United States Patent Application Publication US 2006/0046253 A1 - sequence listing, part 4

SEQ ID NO: 4703 - DNA, 2037 bp, Saccharomyces pastorianus
atgacgtataagttcagctgttgcgacgatgggtccggagctactgttggttcagtagtgcgcttcgataacgtcaccctgttaattgatcctggctggaatccatctaaagtttcatatgagcagtgtgtcggctactgggaaaaagtgataccggaaatcgatgttataatactgtcacaaccgaccgctgaatgcctaggtgctcactctttgttatattataatttcatttctcatttcatatcgagaatacaagtttacgctactcttccagttatcaatttggggagagtatccaccatagactcatatgcatcagcaggtgtaataggtccgtatgatactaacaaactcgatcttgaggatatagagaaatcgttcgaccacatagttcctctcaaatactcacaattggtagatttacgatcgagattcgatgggttgactttactagcatacaatgctggtgtttgtcccggtggctctatttggtgtataagcacgtattctgaaaagctgatctatgccaaaaggtggaatcacaccagagataacatactaaacgctgcttcaatactggatgcaactggaaaaccttcatccacgttgatgagaccatctgcaataattactaccttagacagattcggctcttctcagcctttcaagagacgttccaaaactttcaaagacacattgaggaagggtttgaattcggatgggtctgttataatacccgtagatatgagtgggaaatttttagaccttttcacacaagttcatgagttattattcgaaagcacgaagatcaatgcgcatacgcaggtgcctgtactcattctatcatattcaagaggaagaaccttaacttacgccaaatccatgcttgaatggctatctccaacccttcttaaaacatgggaaaatagaaataatacttcaccgtttgaaattggatcacgggtcaaaattatatctccaaaggaacttaagaagtacgtcggttccaagatctgctttgtatctgaagtggaagccttaatcaacgaagttataactaggataggtaattctgaaaagacaaccctgatattgactaaaccgaactttgaatctgcatcctgtctggataagatattagacattataaaacaagataaaagcgaccgaaaaagcccctctgaggaggataaaccatccgtttgcgatagttacatttcaatcgacactataaaggaagagcctttgagtaaagaggaattggaagcgtttaaattacagctgaaagagaaaaaaaagaatagaaacaagaagattttactattgaaaagagaatcccaaaaattggccaatggcaacacaaacatagacgattccaacgctggaggaacgataaacagccaagacatcttagcaggcgatgtagatgaagagccagtgacagaccgcatcacaggagaagacgaagatgaagaagaggaggaagataacgataatttactaagcttacttaaggacaattcccaaaagcctttggcaaagaaaaacactgaggcctctgtggacatcattatacaacaaaatgcaacctcgaaacacaaaatgtttcctttcaatcctattaaaatcaaaaaagatgattacggtactgttgtagatttcacgatgtttataccagatgacttagacaacactaatctaaatagcaggaaaaggccactaaaagatggcagcaaaagcatgggcaaggacagtgttgcaggcgatgaagacagcaaaaacgaagaagatgatggttacaatgtgggggacccagtaagtaaaaagaggaaacaccgtagttctcgttattcagggttcactggtgctgaagaaacggaaaattttgataatttggactatttaaaaatagacaagacactttcaaaaagaatagaatctacagcaaacatccaattgaaatgttccgtagtggtgttgaatttacagagtttggttgatcaaagatctgcatccatatatggccatcattaa

SEQ ID NO: 4704 - DNA, 1359 bp, Saccharomyces pastorianus
atgcaacagaaagcgatgttcatcgatttaattctcttccgtccaaaattagtggggcgctcactagagaacaaatttattcgtatcaaaccatgttcaggattcaagaaattactatcaaactgcgtactaatgattttgttcctccctccagaaaaaacagatcaccttcgccaccaccagtttatgatgcccaggggtaaaagaacgaatacccgtgaacagagatatagaaagaaattagaggatgaacgtatcaagttggttgagattgcgttaagggctattccttactttgttcctccggatgattacaaaaggccaacaaaatttcaagataagtattacatcccagtagatcaatatccagacgttaattttgtcggcctgttactaggtcctcgtgggcgtactttgagaaaattacaggaggattctaattgtaaaattgcaatcagaggaagaggttccgttaaagaaggtaaaaatgcaagtgatttacctccaggcgctatgaatttcgaggacccattgcactgtttgatcatcgcggattcagaagacaagattcagaaaggtataaaggtttgtcaaaacattgtcattagagccgtgacatctcccgagggtcagaatgacttgaaacgaggacaattaagagaactagcagaacttaatggtactctaagggaagataatagaccttgtccgatctgtggcctaaaggatcataaaagatatgattgtccaaatagaaaggttccaagtatccaaggcatcgtatgtaaagtatgtggtcaaacgggacacttcagtagagactgtaaatcatcatctcaaaggataagccgctttgatggaaacgtgtctgcaaatagtagtttaccaatacagaacaacagccaccacaataataatggtgcctacccagcccaagcggcaaaaaaatctcgttttggtaacagtgtaacggatggtcctcaaagattccccacctcatcacgctatgaaccaacaccctcaccacctgcgccacgccttccaaaccgaacgtacaacgggacgcccacgcctcctcctggtttaagttcaggtacgtttagctcaggagttccaggaatggctccaccaccatcgcgaaaccctctagaatcggaacaacccaaattggctctagcacctccgcctggaatgactacagtacaatcttcaattgcaccaccacctggaatggccaccgtacaatctcccattgcacgtcctccaggactaagtggccctccagggctttttagtaccacagacaatgacaccaacaacactaaacctccgggacttcaagggcctcctggattataa

SEQ ID NO: 4705 - DNA, 261 bp, Saccharomyces pastorianus
atgtcagaagaaatagtaaacgttccccccaacgtcaacctgtcgttatggaagaagaatgcaacagaaagcgatgttcatcgatttaattctcttccgtccaaaattagtggggcgctcactagagaacaaatttattcgtatcaaaccatgttcaggattcaagaaattactatcaaactgcgtactaatgattttgttcctccctccagaaaaaacagatcaccttcgccaccaccagtttatgatgcccaggggtaa

SEQ ID NO: 4706 - DNA, 552 bp, Saccharomyces pastorianus
atgaacatgcatccatcgccaaatgtaccggagagaacacaaaaacagattaagaacatccccttacctgaagggattcaccttttatcatcaaaggaaataatagatctaattcaaattcataaacatcaattggagttgtatgtgacgaagttcaaccctttaaccgaattcggtgagaaaataaatgcgttaaaggatgagtttaaacaactggaaaagagttttgaagatctacatggccaaagagataaggttcaggctcttctagagaactgcagattcgtagaatccaaatatgtggctagttggcaggactatcattccgagtttgaagaaaaatatggcgagatggcaatgagaaggaaactagagcaatgtacgaaaaatcttgacgaggaaagttcgcaattagaagcttccatgagaatcatcgagtcaccagatgggctggatcaattcatcaaggattatttaaatatacgaacacagtatcatttgaggagagaaaaactcgcaacttgggaaagccaaggtgaattgagatactag

SEQ ID NO: 4707 - DNA, 387 bp, Saccharomyces pastorianus
atgcggcggcaaatcttcaccaccaccgtacactcttacaataccactacggcggcacagtccagcaagtcgactacggtgccgagctctagcaccaagccggcccacaagagcattaccaacaagaagggtggtcacgcgggcggtcatgcgtctggtcacgggtcaagttctgggtcaagccacgggtcaagctctggatcaggcactaggtcaggtagtggtacaaatggtgtcgcaggtggtgtcgtaggtggtaccgtaggtagtagcacaggccaccgcagcccttccaaatcaggcactagctccgctgctctcatacgtcccacgttgcgcctgccactgctcgtatccctgtttcttcttaccgttttctattcatag

SEQ ID NO: 4708 - DNA, 702 bp, Saccharomyces pastorianus
atgttaagtacgtcagatccctttgccaagaagcaggatggccggggaagcgaattgggcaagagggcccgcggagacgagaacttcgtgctggccaacaagcagagtttctactcggttgagctggccctcggcacgccctcgcagaacgtcaccgttctgctggacacgggctcggccgacttatgggtctccagtaacgtaaacccgtattgcgggtccacgatgaattgcgaccagtacggcgtgtttgaccaggccaactcgtccactttcaaagccaacaactccgcgcccttctacgcctcttacggcgatggtacttttgccgaaggtgtgtttggtcaggacaagctgcattacagcggcggcctggacctcagcggcctgtcgtttgccgtggccaataagtccaactcgaccgtcggcgtgctgggcatcggcctgcccatgctagaagtgacgtactccggcaaagtcaccgtcacagacaagaaacgctacgagtacgacaacttcccgcagtttctgaaacgctctggagccatcgatgcgatcgcgtattcgctcttcttgaatgatgagtcgcagacctccggtagtgtgctgtttggcgcagtcgaccacagcaagtacctcggccagctgtacaccatcccgctgatcgacctctacaaggcccaggctaccagcgccccgtag

SEQ ID NO: 4709 - DNA, 372 bp, Saccharomyces pastorianus
atggccaagagtctgaacgctacgttttccaagaaactgggctactatgagtacgagtgcccggccacgagtgacaacgccactagcgtggtcttcgacctcggtgggttccacatcaacgcgcctctgtcagacttcaccatgcagaccaacgtcggaacctgcgtcttggcgatcgtgcctcagacaggcaatgcaaccgccattctcggtgactcgttcttgcggagtgcctacgtggtctacgacctagataactacgaggtttccctcgcacaggccaactacgcctccggcaaagaagacattgaagtcatcagatccaccgtcccgggcgctgtaaaggcccccggctacaacagcacgtggtaa

SEQ ID NO: 4710 - DNA, 438 bp, Saccharomyces pastorianus
atgaataggacaataaatgaagccatagaggctaccgaaatatggggggcagcttcagaattaacgaacaaggacgctaaaaattatctgagacaggaacaggcgtcacgaaagtctgcaaacacaggagacaagagtgagagagacgatctcgctgattcagtacaggaagcctatcctctagttagtgaagtggcagcatccatggaccgttcagatacttctgaagaacaccgttcagatacttctgaagaacaacgtacagacgaagccgaacaaagcacagacgaagctgaacaagagtccaaaagggcttacgctgagttagttgcaaccttgcaagccaagggtataccactgagcgtattagaccatccttcttttataagatggctcgaaaaatacaccggtgtctacagaagttcttggcatgggtag

SEQ ID NO: 4711 - DNA, 537 bp, Saccharomyces pastorianus
atggactccttagtcaaattcattgaagacttgggctacaatctggaagatttagcgactttatgcttagtccatttactagggtacaagaaattagaagagcccttgaaacgagagctttttctgtcggcgtggttcatgcaaggatgctctacacttccaaacatgcaaaggtgcgtcaagggacttgatgctaagctacacgaagacttgcaatacttcacagagatctacgactataccttccatttaatcttggatacaaatcgcaaggacgtagacacggacgaagcaattcaatattggacactgcttttccagccagaatatccaatacatatggaatcaggccttctagaggcatggttccgtttcctgcatgatgaagggaagagaacagtaacgaaagacgcatggcatatgctgctccaatttttcaaacaataccccacaatacagtcaatcattgatgactacaatgaagctgcagcctggcctttcattatcgatgagttctacgaattcctgcgggactag

SEQ ID NO: 4712 - DNA, 1584 bp, Saccharomyces pastorianus
atgcgaatcaccagtcacattgaggacgccagcgggcaaaccaacagaacaaaggacaacgctataatcatcacaacaaactcggcaaacggtggctacccattccctccaccgacgttgatatctcctccaatttcaaatacatcaataaatggttctccatctaggaagtaccacaggcagcgatatccgaacaaaagccccgaaagcaatgggcttaacctattttcctctaatagtgcatacttaagaacgtctgaactgctttcattttcccctcccaactacaatctcaatatggacggtttgagttataatgacaacaacaacaacaacaacgataataacaacaataatgacaagagaggtaacggcagtaacaatatatcccagctttttggaaaaacttccccaggcgggcttgatgtttcttcgcagataatcagtagcaatctgaggtcaccctttctcctcagcaacgataaagacagggacgaccaatacgacagtagtactttgacggctagaacacaactttcacccagccataggaaaaaggaatcagcaatttctacagtatctaccattccgcaactacaagatgatacagaacctcctcatatgcgaaatactcaaagtccgacggcaagaaatgaaaataatccactatcatcaaatatgctacctccaattccagggtccagcaataacactccaatcaaaaattctttaccacagaaacatttattccaacacactcccatcaaaatccaaaatcaaacgttaccaaaaattggccataacctaggcccccttctaaatgcaccagacttaacacaacatcagctggaaattaagacgcctatacaaaacaacagcccgaatggggacgaaaactacacgcgatcccgacctttcgcacgtggtatgaacactagccctaccttggatatgtcacctcctccaccagacgagataatagccaggacgacgcctatgaagattaccaaaaaaccaaccacgctgcctccgggcaccattgaccaatacgtcaaagagttgcccgaaaaactgttcgaatgtctgtatcctaactgtagcaaagtattcaaacgtagatacaacatcaggtcacacatccaaactcatttgcaggatagaccatactcatgcgacttccccagttgcgataaggcgtttgtgcgaaatcatgatttgataagacacaaaatatcgcataatgccaagaagtatgtttgcccctgtggtaagagattcaaccgcgaagatgccctgatggtgcacagaagtcgtatgatttgcgcaggcggtaagaagttggaacacttcattagtaagaaactcacatctcccaagaggagcgtatttggcagcccgcatgagaccagccccgtcaaagaaaccattgccagaaataaagatggtagcgttataatgaggatggaagaacagctgcgaaacgacatgcgggaacatgggttattggacccgacgccgccgtccacggcggagtacgaacagagtccacgtctcacaccctttaatgacagggacgaattttga

SEQ ID NO: 4713 - DNA, 813 bp, Saccharomyces pastorianus
atggataacattgcagatccatggtatataaatccttcaggcctagtgaaaggcccacaaaatggagagttttctcaacataacggtaacctcaattccaacttacaccaatcggacagttatcctttgaatagcgaaggtgctgaaggcctcgataacctcttaggtatggactactataacatcgacgacctgttgactcaagaattgagagatttggacattcccatagtgccctcccctaggacaggcgatgaccctagtgatagcaaatatatggagaggagctggaattttgctggtgacaacaacaaaccttcacactacagcaagaaatcaatggcttcgcacaagagaggtcccagtggtacagcaatatttgggttcctgggtcataataagacattgagtatatctagtttacagcaatccattttgaacatgtccaaagaccctcaacccatgggactgataaacgaaggggacaaccatacttcaaggcagaataatgaggatttcacccagatagaggaaaaagatggtgaaaataaccatttaagccaggtcttgttaaaacagcaggaagaactaagaattgccctagaaagacaaaaggaagtgaacgaaaaattagagaaacaattgagggataatcaattgcaacaagaaaaactacgaaaggtactggaagagcaagaagaagtggctcagaaattggtgtctaggacagcaaattctaatcccaaatgcgaatcaccagtcacattgaggacgccagcgggcaaaccaacagaacaaaggacaacgctataa

SEQ ID NO: 4714 - DNA, 1284 bp, Saccharomyces pastorianus
atgcacccagctgcatgtgccattgtacatctacacctccaaattagggtgtggataggcgtcgtcctctttaatgtgggtgcattttgcgacgtcgcgacaaataaagagaatgggcgatgggctgtgggagcaatgagagagaaagagagagttgacggcagcgaaaacgtaagtcggccaggcaggatggcgtttaagttatggtctttggatgaggagacgctatacgagcacgtgttcgagcggtacatgcagctggaggcccagtgtcgggagctgccccaggatttgggcattcaggacaaaagcagtggtgtattggagctggcgatcgagcctttgggggttgaagccagcaagaagaagaagcgagtgaggaggaggaacaaggccgatgctgccaaggacgattggggcgtcgctgtagacagttatcacgttcgggtggaacagtccatatctagcttgcattcatcccgagacaacgacaactccaccacagggtacgttgtgtggtccacgacaccttttttcatcaactggcttctgtatagtgctagcgctgcaccctttcgtcttggtacccaggtggaagtcgtccacgggccttcttgcgaggggcatatgcttgacctgcccaagctgatcaacctttccggcacagaccgcagcaagagaggcatcctggaacttggagcagggatatcgggaattttgcccgtggttcttggtaactttgtcgacgtctacgtctcgacggaccagaggggtattcttaacaagctgaaacataacaccttggaaaacctgtcgcagttgaccagaaggcagtgcgtgtcccggacgctacgtttggaaccgccgcccaccacaccatccgaaaccgccacattagagctgccatccaaacccacgttggatctggaagtgacggctctagactgggagaagatcaacttgcgggacgaaacgacacactcactgcatctggagctgtcactcttgggccggacaagctcctctgtgtacgttctcgccatggacgtgatatacaacgagtacctcatagaccccttcctcaagacgctggagcagctgaagtactgcttccagtccacctacaacctgaagttccacgccgtcgtggggctccacctacgttcgcaagacgtaaccaccctgtttttagaaagggcagtcatagagcacgacctcgccgtctacgatatcgttgaccaggccatacaagagtcccgcttcaatttttatctcatcacttag

SEQ ID NO: 4715 - DNA, 1008 bp, Saccharomyces pastorianus
atgctgggttcaaagcagttaatagaaaacttggtaagatttaaatttcataaaacaccatacacacggagttcaatatggccattcaaaagaaattcggcggtaataattttattgtttattggcatgaagggcgaattacgtgttctcttaactaaacggtcaagaacattgaggagcttttcaggagacgtttcattccctggaggtaaggctgatttttaccgagagacgtttgaggatgttgccagaagggaagccgaagaggagattggattaccacatgattctgagatcttacataatgaatttggaatgagattagaaaatctagtcatggatatgccgtgctacctatcaagaacattcttgagtgttaagccgatagtgtgctttctctacaagaataatttagatcacaatgaggataaatacaaggttcccttagacatcagtaagttttttggtaaactgaaccccggagaaacatcttctttattttcggtaccattgaatgatctaatcgtacatctattgccaaaagacgatgcggatgttaaaaactacagggcggaatattttgaacgtaaagagtataagcgtaattggggcggtgtaaaatggttaatcatgcattaccatttccatgtagccaataataacgaaatgccatggctgcaaattatagaggatctatcaagctcagacgaaggtggccttgatggggacaacgctattttcaaattccgggacctttggggtttgacttgtaaaatactatttgacgtatcatgtattgctaatggactgatggatgacaagttgagaaaagagttgggccatgaagatttgatagttggactgcatgattatggtaatcaaatgcagctaaatggaagaagtgagtgggagataggaatgataaacggtgacagagatttaaagtatagtgacgtgatacctgcatattatatgaaacatttgataggacaccgatcattatggtga

SEQ ID NO: 4716 - DNA, 774 bp, Saccharomyces pastorianus
atgtggcaaacagagtccggttctcacttgattgctcctttagcaggtgccgtcccaacgaaacccggttctgccactgtcccattctttggtattaacgcttgtatcatcgatcctgttacaggtgtagaactagaaggtaatgacgtagagggtgtccttgccgttaaatctccatggccatccatggccagatccgtttggaaccaccacgatcgttacatggacacatacttgaagccttatcctggtcattatttcacaggtgacggtgccggtagggatcacgatggttactactggatcagaggtagagttgacgacgttgtaaatgtttctggtcacagattatccacatcagaaattgaagcatctatttctaatcacgaaaacgtctcagaagctgctgtcgtcggtatcccagatgaattgaccggtcaaaccgtcgttgcatacgtttcactaaaagatggctacctacaaaataatgccgctgaaggtgacgccgaacatattaccccagacagtttacgtagagaattgatcttacaagttagaggtgagattggtccttttgcttcaccaaaaactatcattctagtgagagacctgccaaaaacaagatcaggcaagatcatgagaagagtcctaagaaaagttgcttctaacgaagccgaacaactaggtgatttatccactttggccaactcagaagttgttcctgctatcatttctgctgtggaaactcaactcttctctcagaagaagaaataa

SEQ ID NO: 4717 - DNA, 903 bp, Saccharomyces pastorianus
atgacagttaaggaacataaagtggtccatgaagctcacaacgtggaagctcgtaaggctcctcaacatttttacaatagtcaaccgggcaagggttacgttactgatatgcaaaattatcaagagatgtaccaagaatctatcaatgaccctgaaaagttcttcgacaagatggccaaggagtatttgcattgggacgctccatactctaaagttcaatccggctcgttggacaatggtgacgtcgcatggtttttaaacggtaaattgaatgcttcttacaattgtgttgacagacatgcctttgccaatccagacaagccagctttgatctatgaggctgatgatgaatctgaaaacaaaatcatcacatttggtgagttactaagaaaggtttctcaggttgccggtgtcctaaagagttggggcgttaaaaaaggtgacaccgtcgctatatatttaccaatgatcccagaggcagtcgttgctatgctggctgttgctcgtattggtgccatacattcagtagtctttgccgggttctccgctggttcgttgaaggatcgtgtcgttgacgcaaactctaaagtggtcatcacttgtgatgaaggtaaaagaggtggtaaaaccatcagtaccaagaagattgttgatgaaggtttgaatggagtcgatttggtgtcccgtatcttggtcttccaaagaactggtactgaaggtattccaatgaaagccggtagagatttctggtggcacgaagaggctgctaagcaaagaacttacctgcctcctgtctcatgtgatgctgaagatccattatttttattatacacatccggttccaccggttctccaaagggtgtcgtccataccactggtggttattcatcgggtgctgcttaa

SEQ ID NO: 4718 - DNA, 264 bp, Saccharomyces pastorianus
atgggtggtgtcgtggttacaaaggacatcataggttgccaaacagcaattgaagaatggggggtagcgactttgatagacaaatttgccactttaagagaactggcaaacttatttactgttcaacctgaattactagaatcgttgaccaaagaaggccacttagcagatattggaagggatattattcaaagctatatttccaacagagaggacttcaatcatgacaagttcatcaacagtgttaaactgaattttagataa

SEQ ID NO: 4719 - DNA, 2211 bp, Saccharomyces pastorianus
atgaactcattatatgagttggatcctaaatggaaaagactgttaacaacaaacaatttcttgggtggattaacggtcaatgagttcgttcaggagttgagcaaagatcatcgtaatgatatgttagccgatgctaacaccaagggtctttcgaataacgaaaaagaccaagatgcaattcgggaggccatttggaaacaattggaccccaaaccctacattagaacatttgaatccacattgaaggaactgaaaaacttgaacgaggaaaccctaaataaaaggcaacattactccgaccaagtagctacccaagaagtgatacattcagaaaacgtcataagtctatcaaagaatttacatgcaactctactcactttcgaaaaattggatgatcgtttaacaaatgttacccaagttgtttcgcctctaggtgataagttggaaactgcaataaagaaaaagcaaaactatattcaaagcgtggaattgatccgtagatataacgacttctattccatgggaaaatcagacattcttgaacaattaagattatccaaaaacaggaaattgaatttaaaatctgtgattttgatgaaaaatctactaattttatcatctaaactagagacgagttctataccgaagactataaatacgaatttaatcatcgaaaaatactctgagatgatggaaaatgaattattagagaatttcaactcagcttacagagaaaataactttaccaaattgaatgaaatcgccatcattcttaataatttcaatggcggtgtcaacgttattcaaagttttatcaaccaacatgattatttcatagacacaaaacaaatcgacttagaaaacgagtttgaaaacgtcttcataaagaatgtcaaatttaaagaaagtttaatagattttgaaaatcatagcgttattatcgagccctcaatgcaaaatttaataaatgatgtggaaagtgtaataaaaaatgaatcgaagattgtcaaaagggtctttgaagaaaaggccactcacgtgatacagttatttattcaaagagtcttcgcccagaaaattgaaccaagatttgaagttttattaagaaattctctttccatttcaaatttggcgtacgttagaattttacacggacttttcacattatttggtaaattcactaaaagtttaattgactatttccaactattagaaattgatgacagtaatcgagttctgtcaaccaccttggagcagtgcttttctgatttattttctcattatttatatgataggtccaaatattttggtattgagaaaagatcactggagacaattcttgtggagatgacatctaaattcactgtaaattatgataaagaaactaataaaaggatcctattagaaaagttcagggaaaaattatccacgaacgtagatgcatttatgcatactcctaggggcaatgcacactctcgtcaagattcaacgtcaaggagtaaactgtcacaattcaactcctttttgaaaactcatttagataaagatcatttgagtctcaaccgcacaaactctttatatggctcgttaacaaataactctacgtccacacaatatgacatggcaaacaacaattcgaatttaatgaacccaaacagcataatggatgatattgataataatccaaatggtcccaagaattattctttggatgacgtagattctatgttgaaatgcgttgtggagtctaccgcaagagttatggaactcattcctaacaaggcgcacctatacattttagaaatattaaaaataatgtttttgggaattattgactcatacatggaaattgcattagaagtggcctactggaaagtttgtaaaatggacgccaataaagcggtggcagtagtgaatttgaattttctaaagctcattgcaatgagcacaaagatattggatttgttatcaatttcaatcaagtccatcttcttgccactattgaataactcaccagaaataaaagctcaaattattgaaatgaccaattctcaaattcaaaagatggaaatgctaatcaatataattctacaagaaaccattgcggtgatatctacgaaattttccacaattctgtgtaaacaaaataagaaagattttataccaaaatctcaagatttgttagatcgacaagcttggatccggccataa

SEQ ID NO: 4720 - DNA, 438 bp, Saccharomyces pastorianus
atgacttccaaagtcaacagttcgttgtcgacatccggcgtcactcccacaatgaagaaaagactggcgtatcgcttatataccactttgtggtcgctgtattcgatgatgttgcacattttaggcttccttgctagaatcgtaggtgtcagattttttactatcttggccttttcactagcagacattgcagtataccatttctttaatctaatctttccttgtctagaaaccaatatcaaataccttaattgtgtcatctctgtgcttttgtgtgtgtttgtgtttgtaattactctcctggctctttcgttctcatcttcttttattcgttcagggccatttctggctttcttttggctgaaattgaaatacgcctcgttacccgactatattttcgtactaatacatactataaagagagatacacatagatga

SEQ ID NO: 4721 - DNA, 1803 bp, Saccharomyces pastorianus
atgaatagtcaagacttagaaactcaaccactgttgagatcaaacgcccaggaaaatcagcttctctgtgatgaagtgcgaatcaatgtggcacaaaagtcgataaataaggcccgtataagaagtatgaaacgcttggttacctatttggtaagtgtggttctaataggttcgcttggctttggtatagttcgatatattaagggacacgtgccgcccacagaggtaatagagaaaagtttagtcgatgtgacaaatttcaaattaatggaattccagcttgacggttggaaagatgatattcattctggtttaaacaatgacactgggaagtatttacaggtgtctatacactctcagatctggttcgattatgacaattggccagctgcagggaacgactccctgataaaaaaccaacgagattggataagacatgttaacgaaaaagtgctcaaaaccgtttgtatagatatgaataacgtgactacttttgacggagatctggaattcaaggataagctgggagacgttgttggcatggaccccatttgccttgatttgagtcataagaaaatcaatgacctgcaatttaaagttttggtcaaaccgtctatttggaaaatcataaaggtcatgaaaaaattctggaacggcgacttcgattccttgaatctaaagtctaacttggatatgattatctttaaggaaaaattcgggatgaggttcaatttgcggaaactgaatgacgaaatcttaaattggaatgatatcatcgattgggagaaactactgtcagagcctcttcaaagggtacgaaatatgatcgatacaatggcccttcaagattttacactaagggactccgattccgaagggttccatgccaacatgatattaaatccaataacgattttcaaaggattagattggcttcggcttccgcatggttcgacaattcctttcatcaattgggaaataaaactaccggactgtaacggcgaaccaactatcgcgattccaacattatcgtgctttaatgaaccgattaatttgcaccatgatagagacaatatagttgtctgtctacaaaatgaaatcgaaggacccctgcccgatgatttattatacgaagaatgtcccaataacagtcttacgccaatgagccagatggtcaatgcagttttgaacgcaaatgagaccattacatttgccgcaagaggccatgttattgacgatggcactaacgatgattctttgattcctgtcgacatgctggacagaattttgcaagagatctcattcatccccctaactacgaatgctacgtttaattccagtgaattgattcaagaattccaaatcaatgacctccaattacgattggcagcgcgcaagaagctcagtctcgtggggacattcgtgggtttcttcgatctatctttttacgagacacattaccgtgaccaggttagcatcgacaccatccggggacaaatcgacctgtaccacaacgatgtcaatttcctgaatttacccatgaaagattgggtcaactccacgtcgcgtatcctgcacgaccaagacacaggcaacacgctgatgcagctccaatttaaccttgagaacgacgacatggaaatcgtcaatagcctagaactaactcggacattgaacgagatccttttccagggcttcacagtaatccatttcaacgcaacaatcgatgcgtcactcacgacggcacttggcccttgggtgctcacggggttaaccggagagggtgatactttggtcacgtga

SEQ ID NO: 4722 - DNA, 2310 bp, Saccharomyces pastorianus
atgcctgtgtccggggataattcgaaggatcctgctagtcgggatccgaatgacgatagtaacggtcctggtaacgggtcctcgatgaacaacaatcagtacagcttgaacgctcccaagtacaacagccaaccgcagccggcctcccacacgtacctccctccgatgtcggtgaaaatcccccccatagccacaaaaccctcttcgatatacagtcttttacatcaaagttcccctcggccggagtcgccaaacccaatattgccgcctctcattggcagtggctccaactctcatataccatctcctacccctgcacagcctccgcctcctccacagccaccgcactctgctgcgtactcgatgtacccatcatcgatcagtctgaacagatccaactcgtctattttcccactgcctttcaaatcagaggacataatgaacagtaatccctctaccgcggccaagagaacgaacaccttcccctcaattcctgacaacactaagaaactgaaaaccagtcaagaaaaaagaatctcctccatctcaaggaggaatacccaagaaataatagctaaacagattgccgaaagcaacaagtccaagaccattgaagaatatgctcagattgtgaaacacgcagaaataaaagtcctgaacatggactcgcaaaccacctcaaaggcttctttacaattggcggaacaaaacagagaaagggaaaggcaagtgtttgcgctactctggttgatgaaaaactgtaagtcccagcacgatagttatgttccaagagggaaaatttttgctcaatatgcctcatcatgctcccaaaacaatctaaagcccttatcgcaagcctcattggggaaactgataagaaccgtgtttcctgatttgaccactagaagacttggtatgagaggccaatcgaaataccactattgcgggttaaaaatagctaccagtgaaaatggcactgcggcgattactaacaatagcaccccgtcatctctggcacaaaataatgacccgatatcgcccctatcatcaccctccccatcttcaccttcaccaacattaactgcagtcttatccccatctccatcgaatactaaatctgtttctcataccgcttcgccagttaagcagactaataacgacatcagtaatgaaccagaactgcaacacaatgatcaacctataacgaatgaacaaacaacaagaacaaagatgatggcggcggcaacagtatcatctgaagaattgagtttcgctgatgatctcgttgaaaaagttttcagctgcaatgataagctatcagataagtacaatactcaaatatcggccaatatagaacctccattgctgacatcatacaagttagaattccccaatattccgagaagtgcactcccggcagaaacggatgcggacgttatatcatctttagagtcgttgtaccacatccattgcaactccgtttatgaaagcatcaaatttttgaaaaccgatactatatcaaatgctttatctttctccaactccaattccatttcgcctacgatgtttaatctattcacttctgagccgttgattgattgggtaactaaatgcgacctaatcacatataccgaattaatcaaatttttttctcagtttataattcattcaaatgagatcagcgattctataattaaaaaattggaaaccgtgatcaaaatttatcccgaacaaattaacaaggccgctttagaattaccaaaaccgctggttcaaaagaaactaacaattataaacaattttatcaaattactcaaaaaattgatcaaacttttaaaatttattgtgaattttttaagaagtttccccattttcaaaaatggtatgaataatgactggcagaaagttgtaaatctagaagatatcttagacatgatgattaacgaagaagatgatgcgaattcagagacgaagacaataatgcagcattggcagaagttttgtcaagtgtttgttacaaagtttttgaattcctccatgcgtactagcaacgacccttcaatatccattgaatgcgaatcattgaaccaaatggtaaaggatttttgttattttatttccgaacaaaaccacttttcgtgcttaaaactaattgattgttatacaaggttcaggaatgcattaatcggtgatattagcttaaaatcaagtgaaaacctactatcatggttgtttctcaataatgttatgggccaattattgaactattgttttgaagttatcaaattcattaatactttaaaactctaa

SEQ ID NO: 4723 - DNA, 1716 bp, Saccharomyces pastorianus
atgaagacatcaccttctccaattgtaaacgataacgaacaaaagatgaaactggaggcgttccttcaacggttattattcccagagatccaagaaatgcccgcatcttcaaataatgaaaacactgctagaaatttgcaacagggaagctccggccaacagcagcagcagcatgtttcatttgacagtgttttccaagaggttaatgacgcttttcctcgcaccccattaaatctaaatattcccgtcgatgaacatgggaatactccattgcattggttgacttcgatagcgaacctagaactggtgaaaaatttagtcaagcatggctcaaacagattatacggtgataatatgggggagtcttgtctagtgaaagctgtcaaatcagtcaataattatgattctggaacttttgaggcactcttggattacctatatccatgtttaatcttggaagactcgatgagtagaacaattttacatcatatcattattacatctggtatggccggttgttcgtctgctgctaaatattacttagatattttgatgggatggatcgtcaagaaacaaaacagacccattaaaagtggtgataatggtgggaataagagcgataacgaaaaaggagaaaagagggattcaattctagaaaatctggatttgaaatggataataactaacatgcttaatgcccaggactctaatggtgatacttgtttgaatattgcggcaagattaggaaatatctcgatagtagatgctttattagactacggtgcagacccatttattgcaaacaagtcgggcttaagacctgtggattttggggcaggtacttcaaaattacaaaataacaacagcgatgacaaaaactctgatatggtgtccaaggaagattctgatagccaaaacgacggaagcaacaaaaaaataaggactcaactactgaaaaacccccctgaaacgacgtcgttaattaatgaagttcaaaatttactaaactctatctcaaaagactacgagtctgagacaatacaatataacgaaaaactagaaaatctccataaagagttgaatgaacaacgagataacttggctagttcaagagatcaattagcaagtgtaaaacaactgaaagacgaatactcattaatgcaagagcaattgactaatttgaagtctggcatcgaagaagaagaagcaaattttagggaggaaagcaaaaagctgggaattattacagacgaaagttcgggtattgattgggagtccagtgaatacgatgcagatgagccattcaaagtagagctcatttcagatttcttggaggaaaaactacaaacggactatgatggtgacatttccaaattgctagaatcagagtccaaagagcaaataatggaacaaatacgaaatcaaattccgatagaaaaaatcgattctatgctaccacctaccgttttactaaaagcaagaataaacgcatacaagaggaacgataaacacttaagcaatgtcttgcacacaattagtaccaaacaatcagaattagagaataaatttagaagagtgttgtccctatgtttgaaaattgatgaaaacaaagtggatgatatgcttgacggtttgttgcaagccatatcatccgaagacccgcaagatatcgataccgatgaaatgcaagatttcttaaaaaagcatgcttcgtga

SEQ ID NO: 4724 - DNA, 591 bp, Saccharomyces pastorianus
  modified_base (567)..(567): a, c, g, t, unknown, or other
  modified_base (578)..(578): a, c, g, t, unknown, or other
atggcgttggaagaagtggtgcgatacttgggacctcataatgagatcccattgacgctgactagagactccgagactggtaatttcctcctgaaacatttcctacctattctgcagcagtatcatgatacaggaaatataaatgaaacaaaccccgataaattccccactaatgaggaaagagatagattactggcgcattatgggattgttgtgactacaaacgaccaaggtgagttatggatagagttagagaaatgtttcgaactattgaacatgttaaatctgtttggcttgttccaggacgcatttgaatttgaagaggctgaaacagatcaggatgaagaggaccctgaacatattaaagaaacagagaacaatataaaaaacgagaacaccacaaatagtgccagtttcaaaaggatcaataatttacaagatacggaggtaaattccgatgatcaaagggaattgggctctccgttgaaaaaggttgaaaatagacacttctgcgatagaggcggaaagtggcacgactcctactgctgccacccagttaacacctantacaatgacgnaataaggagctag

SEQ ID NO: 4725 - DNA, 78 bp, Saccharomyces pastorianus
atgagatacttgaaacacgtctcaagaagattcaagaacggtttccaaaccggctctgcttctaaggcttctgcttaa

SEQ ID NO: 4726 - DNA, 543 bp, Saccharomyces pastorianus
atgatgaatggtactgaatatcaaacgaaacaatctcaacaattgcaagcacctcatacaggaccgcaatctccgtcatatgctaacagaaatttacaaaccaacgcctcacagcctttggcgtcatatccctctggccgcccattggtcaatataagaacgggcccattgaccactcaacctatgcatcagagcgggaactcgccaattaataatccccaatttccgcaacagcgtttcgctccctcacaacaatcgcaacaagcacaattgcttcctctgagaaacgatgtttaccggggcattaacaaccagaatccgttatacccatcacagcaacaaccccaaaatatgagatatccgaataataaagcaccaataaatagtagaggcccagcaccaataatacagcccaacatacaagatagccgctctaatcctcctataaagatcaataatcacacaaagccacgtgtcacaccaggcggattttcacagtttatgccacctaataacacatcaactaacccatattctaactag

SEQ ID NO: 4727 - DNA, 864 bp, Saccharomyces pastorianus
atgaaaagaatcttctctggtactaagtctccgaagttacctgctcccccaaaagtttacaagaacgatgacagtccatccgctccaggctctcctaaagtcgaccaagggcttcgaaatttaactgtatctgcatcaagattcttcagtagctcatcatccagtcctggaagccccacattgaatcttccccaagaacactctattaatggtgacatctctccagaattagtaccgattgttactttactttctgcgcaggctcacaggagataccactatggaattctcttgatattgcatgatttaaaaacggacggtacacctgctacccgtcaatgggaagagtgctatggtgtcctgttaggtacccaattggccttatgggatgctaatgagctttcaagctcgaagacaaataaagaggattcaaacctgaagaaaattgcatcaagacccactttcatcaattttacagatgcttcggtaagaagtctagatgcgaatgatgatgttaccagtacgggaggcaacaaaagtaataaaagtgatttagaaaatgttctcgttgtttccacaactttaaaaaacagatattttctaaaatttagaaattcagaatcgttcaaaaattggaatgcagcaattaggttaagtttattcgagttcactgctttacaagaggcttacacagggtcgtttctttcgagtagaggcgttaagcttggtgatattaaggtcgttatggcagatacaaaatttacctacgaagactgggttagcgtaagatttggtacaggtatgccatggaagcgttgttacgcagtgatttctccacaacccaacaagaaaaagagaaattaa

SEQ ID NO: 4728 - DNA, 1437 bp, Saccharomyces pastorianus
atgactactgttgtggatgcaaaggctttgtatgctgtatatccctcctctccgatattgattgacacttctaccataataaagttggaagggctggtttcttttgaaaaacatgaggaacctcaggagaccaacatcttcatcatgcctgaaaaacaccaaggtgttcctgggtatgatactattattcgattcttaatcccagctatgaatgctttctacttatatgggagaccaaaaggccttattgccaatagagtcgaccctggctctttactgtttgctttgccaacgctgcctcatatacattatttgcaagtggatgatgttgtatcgttcactaaagataagaactattcacattggaatgctgttgaatggagaagtaatatcgttcaattactacagaagaagctaaataagggttacaaaggctgtggcaccaagtccgtacctactacatcagccatggcaaaatccccagcaattagctcggtagagttgtttgatgggtacgattcacttcctgcaagccagttagagagcttagaaaaccctaatataaagactcgttccacattagcgtcaactgatgacgctgattcacctaactctgtgaattctcatgtcgcctctgcgaaacaaacccttttgtctgtgcctgacaactcctcaaaaatcagtgattctttatccactcaatccagcgctatcaccaacttcaaggatagctttaccactccaatgacatctgggatgctcaatcaagagaatacgaatagaagcttgacatcgggtctgaagattgaaatcacggattcgagtctcaaaagtacggaagaagtcgaagcggactcttccaacaacttttccacgacaccggaagacaagcatataccactggctaatgcgcctgacttatctgctctttatgacaaatactctacttcgccatttggtaaatccgaggctaatttaagtcctaagccacaaactttagatgtcaacgatcgaattgaaagcgaatgtagaagtccttatgagagatatgttggaacatccgctgaaagtaagatatttgaaataggtaatgtgagagaatccaagagcacaatcaacacgtgtctatcgtcacctgtaagggtagaggataatagatattcaagaaatgagtatatgggatcgttaggagagtttgaagagctttcccgaaagattagcaatatgggagtaggcaatatgtcttcagaggctctaaatgaaaaatcagaggataattctttagtaacggatttgaacttagacattagtactgattcacctaccaccttacctgatgaccaacgtaaactggattcggagaagcaaacgtatttgatcctgactatatggaacaaaaccaaatgctggaaacggaaagtaatacactacggatga

SEQ ID NO: 4729 - DNA, 741 bp, Saccharomyces pastorianus
atgggacaagatatatcagaaaccgatatggaaaatgtttgtgttttcgctcagagagtcgcttccttagctgattacagaagacaattatacgattacttatgcgaaaaaatgcacactgttgcaccaaacttatcagaattgattggtgaagtgattggtgctagattaatttctcacgcaggttccctaactaatttatctaagcaagcagcttcaacggttcaaattcttggtgctgaaaaggctttgttcagagctttaaaaactaaaggtaacactccaaaatacggtttgatttaccacagtggttttatttctaaggcctctgccaagaacaagggtcgtatttctagatacttggctaacaaatgttctatggcctctagaattgacaattactctgaggaaccatctaatgtttttggttccgtactaaagaaacaagttgagcaaagattagaattctacaacactggtaagccaactttgaagaatgaattagccattcaagaagccatggaactttataacaaagataaaccagctgcagaagtggaagaaaccaaggaaaaggaatcctcaaagaagagaaaattagaagatgatgatgaagaaaagaaggaaaagaaagaaaaaaaatcgaagaaggaaaagaaagaaaagaaggaaaagaaggacaaaaaggaaaagaaagataagaaggaaaagaaggataaaaagaagaaaagtaaggattaa

SEQ ID NO: 4730 - DNA, 126 bp, Saccharomyces pastorianus
atgagagttaaagagtggtatggctggcatttccccgaactggctaaattggtcccagacaactacacttttgccaagttggttcttgttatcaaggacaaagcttcattaaacgatgactcctga

SEQ ID NO: 4731 - DNA, 72 bp, Saccharomyces pastorianus
tccgaagagtgccatcgtctttggagatgtgatagtgcagcctttggtgcccaatcaggcctatacatatga

SEQ ID NO: 4732 - DNA, 558 bp, Saccharomyces pastorianus
atgatctcctcgataggcgcttccaactcgccctcgtttgttcattcgtccacagctgtcatggaactaatgaaattccaattggtcgataaaagataccgtttgactgaaggaatcaatcccgatataacaccacattataaattgccctcgttggaacatttgttattaaaaaggctagagatggataaaccagttggcgaacaattgacggatttgatgtcacaattggctatcccgagcgggtttctctttgaaactgcgatccctgaattacataggttatcggatgatatgatttactactccaacgaaaaggaccatcatgattccgcatggtatgcaaagagaatggctgtttcgagcacgtatatcggttcgcaattatttatggctcaagacaggtctcatgacttccgggagacttttgcttttgcaaaggacaaattacatagagttatgcgtttgggcgaatactacaataacactgaagagtttgcttggtatacattaatgtcgacggtcaatttagtcaaatctcaattagttagaggttaa

SEQ ID NO: 4733 - DNA, 189 bp, Saccharomyces pastorianus
atgttaggtcgtaacattgccaggaagagctgcgcatctcttcgtttatatcactcaaaccccatcgagcacgtcaacccgctccatattaagcctctaacttacgggaaacaatcgcctcaatataaagtactatcctggccttacaagaatacgttcccaaacatggtttcactgagagatccatag

SEQ ID NO: 4734 - DNA, 849 bp, Saccharomyces pastorianus
atgggcatccagatggccatcgccatgaggcacggcttcatatacagacagggcattctcgcgtactactacgtgttcgacgccatcgagcaggagatcgaccgtctgctgaatgacgctgtgtccgagaaggagctgcaggcgtctggtattctgaagcagttttggctcgaggacttcagacggtccacccagatctacaaggacctgaagctgctgtactcgaatacgttcaagagcacggagtcgctgaacgagtttctggccacgttcgagaaaccgccgctgctgcagcagttcgtcgacgacatccacgacaacatacgccgggagccttgcaccatcctctcctactgccacgtcctctacctggcgcttttcgccggcggtaagctgataagatcgaacctgtacaggagactggggctcttccccaacttcgagaagcttacgcagaaggaattggtcaagaagggcacgaacttcttcactttcagcgaactgggccccacggaggagacgcggttgaagtgggagtacaagaagaactacgagctggctaccaggacggagctgacggaggcgcagaagctgaagatcatcagcgtcgcggagggcatcttcgactggaacttcaacatcgtcgcggagatcggagaactgaaccgccgcgagttgatgagcaaattcagcttcaagtgtgtcacctacgtgtacgaggaatggatgttcagcaagggctctgcctccagaaaggccttcagcaccaccatgctgctgctgctctccatcgccgcggtctggatcctgtactactttgtaaggaagagttttcttagcgtagtataa

SEQ ID NO: 4735 - DNA, 735 bp, Saccharomyces pastorianus
atgcagcaactacaaagacaacaacaagagcaagcccagttacagcagcaaaggcaacagcaagaggctcagttacagcagcaaaaacaacaacaagaggctcagttgcagcagtacagattacaagaacaagctcaattgcaacaacaacaacaacaacaacaacccttgacacaaacgagaacaggcaaccagtccgtatcagataaatataacgacttaaacgttttgctggcaactggtaccggcgcagacacttttggtaacacaggggaagcgcgtattcccgcccaacacaccaaaacgggcacttttataaattctcaaggtacagggtataaacaggttgtcaatgaacctaagaacaacccattcttgaacagccaatacaccggtttaccaagtacaagcatcgtgcccgcacaaacaggttatgggtttggaaaccaaccaccaaatcctggcatgagttcccccccacaaaactccgctaacgtgaactactcccaacctcaacaacctcaacaacagcaacaacaacaaccacagtacactcaaaactaccaacaacaacaaccgcaatacacgcaaaactaccaacaggcttcttcacagcaactgcaacagcaacagctacaacaacaacagttacaacagcaacagctacaacaacaacaacagcaacaacagcagggatatgcccccgaccaaggtataagtttaattgatctttga

SEQ ID NO: 4736 - DNA, 675 bp, Saccharomyces pastorianus
atgtcgaaacagtttgttcgttctgcaaagaacatggtgaagggctactcgtccacacaggtgcttgtgagagacgccacggcgaacgacccgagaaccccgtcgatagacactcttgatgatttggcgcagaggtcttacgattccgtggacttcttcgagattatggacatgttggacaagaggctgaacgacaaggggaagtactggagacacgtggccaagtcgctgaccgttctggactatcttgttcgcttcggtagcgagaactgcgttctctggtgcagagagaacttctatgtcatcaagaccttgagggagttcagacacgaaaacgagtctgggttcgacgagggccagataatcagggtcaaggccaaggaactggtctcgctgctgaatgacgacgaaagattgcgcgaggagagaacgatgaatacgaggaacagaagggccactaagactgtgagacccagaccaagaagacaaagaacgagaagcaacccgtacgattctccccccacctaccagaatgacctggaaaaggccctggaggaaagtagaattaccgctcaagaggacgaactacgcaggaatgaaatggcccagtacgacgatgaagaccctgatttccaagctgctttgcaattgagccaaagaggaacgaggagttga

SEQ ID NO: 4737 - DNA, 954 bp, Saccharomyces pastorianus
atgtacgaggattccgatggggaaatgatagaaactacagaggaagatgaggacagcgtacttgaaccactatctcccataaacaacgatgaaatccagaatgaattggacaaggcatttgaaaaatacttccaatcagtacctgatccgctggatgacgacactcatgatgtggtgatggttgtagaatatgcatcggaaatcttctattatttaaaagagctcgaagtgaaatatagacccaacccgtattacatgcagaatcaagtagaactaacatggccattcagaagaactatgatagattggcttgttcagctgcattttaggtttcagcttctaccagaaacactatatttaacgattaacatagtggataggtttttatcaaagaaaactgtcactttgaatagattccaactagttggtgtgtctgcattgtttattgctgccaaatttgaagagattaactgccccactttagatgatctagtctacatgctagaaaacacatataacagagatgacattataaaagctgaacagtacatgatagacacattagaatttgagattggttggccgggccccatgccatttttaagaaggataagtaaagctgatgattatgattttgaaccaagaactttagcaaagtatttattggaaactacaatagtagagccaagattagtagcggctgctccgagttggttagctgctggtgcttattttttgagtaaaataatacttggttcgaacgattggtctttaaaacacgtcttttattccggctatacatccgaccaaataatctctttagcttcactgatattggaaaattgcaaaagtgcatctcgacgtcatcattcaatctggaaaaaatattccgatcagcgacattaccgctgttctcaaattgtagaagaatggattgtttctaaagagtcttaa

SEQ ID NO: 4738 - DNA, 159 bp, Saccharomyces pastorianus
atgtttgacgggcgcacagtacaacctccacggtctactttgacagatggcagtgacattttgaatgaaaatactgatcaagaggccgaaaactactttaccatgagttccaaaagagtacaaaggggccagagagacgacaggggagagtggctttag

SEQ ID NO: 4739 - DNA, 201 bp, Saccharomyces pastorianus
atgaagactaacttgagactggaacaattcaaaaaggaattagtactatatgagcaaaacaaattcaaggaatatggcatgaaaattgaccaaattgcaaaagagaacaaaaagttgtctaatgaaatcgggagattgagagaacgttgggatagtttagtagaaagcgccaaacaaagaagggataaacaacgaaactaa

SEQ ID NO: 4740 - DNA, 270 bp, Saccharomyces pastorianus
atgacagcaaaaattcaagaattagaacttttgatcgataaacggtcaccagaagaaaacagtatcggaatgctcaacaataatatgcttatcgggtctgttatcttgaataacaaaacttcgataaatggagtgggcaatactagaaactgggataattcaatatatcaaaattcattgaaccccctaaacgatcctattttgatttcaattttgaatcgcttgcaatttaatttgaataatgatatggaatcgaaggtgaaggagtaa

SEQ ID NO: 4741 - DNA, 153 bp, Saccharomyces pastorianus
atgacaccgatatggcgcttagggacctcgaaatggcaaccactttccaaccgaaatgaggccgccatcttgaaagccatggacgacaccaaattgaagaggaagcaacaaaacgaaaaacaaaagaaatctctttcgaagatgttctcctga

SEQ ID NO: 4742 - DNA, 1023 bp, Saccharomyces pastorianus
atgactagaccaaaggcttttttcgacatttccattggaggcaaacctcagggccgtatagtctttgagctgtacaatgacattgtgcccaaaacggctgacaatttcctgaaattgtgtaaaggtgacgctggtatggccaagaccaagcccgacgtgccattatcgtacaagggctccatcttccatagagtaatcaaagagtttatgtgccagtttggcgacttcaccaatttcgacggtactggtggtgagagcatatatggtgaaaaattcgaagacgaaaacttcgctgttaaacacgacaaaccgttccttctatccatggctaatgccggtccaaacaccaatgggtcacaggctttcataacctgtgttccaacacctcacttggacgggaagcatgttgtgtttggtgaagttattcaaggtaaaagacttgtccgcttgattgaaggccaacaatgtgatcaagaaaataacaagccaatgcgtgacgtaaagatcaatgactgtggtgtgctgccagaagattaccaggtaccggcggacgcggaagccaccccaacagaccagtacggtgacaattatgaggattttttaaagcaagacgaaaaagtggacttgactaaattcgataccgttttgaaagcaatcgaaacagtaaagaatattggtaccgagcagtttaagaagcaaaactattcagtggcctttgagaaatatgccaaatgcgacaaatttttgaaagagtatttcccagaagatttaccaaaggaacaaattgaaacaatcaatcagctgaaagtttccgtacctttaaacatctctatatgtgctttgaaactaaaggattataagcaagtactagtggctgcatcagaggtgttatacgccgaagcggctgacgaaaaggccaaagccaaggctctgtaccgtcgtggactggcttacttccacgtcaatgacaccgatatggcgcttagggacctcgaaatggcaaccactttccaaccgaaatga

SEQ ID NO: 4743 - DNA, 291 bp, Saccharomyces pastorianus
atgagtagtgttggcgagaattcagagtattacaagcaggcgctggaggagtacaaggacgtccaggaggacgaggacccggatgtgtgggatgcgaggatttctaagaccggatgctacgtagaaaacctagcattacagctgtgccatgctgaaactggcgactggagacagtgcttcaacgagatggcactatttaggaagtgctgggaaaacaacggcaacagagagcgtgtaagcacggtcgacatggacaactcgaccaataatggcccggacaaagagaaatga

SEQ ID NO: 4744 - DNA, 168 bp, Saccharomyces pastorianus
atgtgtctgccctctgcgtttttgcttcctctcccctcttctcatccatatttttcatatttgtttttcttttccttcttttttcaacatgacaatgtccgaaaaaaaggggtttcagccattgaaaggcagttgaaagcacttttaacagtggtgttaatcacataa

SEQ ID NO: 4745 - DNA, 339 bp, Saccharomyces pastorianus
atgacattgtccgaaatatcatccaagataaacataaaaccgcaaacaaagcagtgggattcatcgaaaaaggtggagcatagcgcgaatcaaccgctacagaaaagagccaaaataataacagtgacggaattagaaacacatttcgcaaatgttcgacaagcacacaacccgccactcgaaaacaaaaaaaaaaacgtcttgcctaagtcggcaaagcatgccgttcaacaagaggagagtgttacagacccgctatgctccatcctccctgcatactcggacgaagcaaatgtgagcgttcaagtaccagaaacgcctatatcaaagggcaagtga

SEQ ID NO: 4746 - DNA, 1710 bp, Saccharomyces pastorianus
atggataatgaagaagttaacgaagaatatctgaggtcactgttcaagaacgtccgtgtgcatgtagatgatcatctgacatcaggccatatatacgatgaagatgcatatatcaccttcggatgcttcctagccggcatacatcacaaattcagaaaacttcttgaactactgcttttgagacaagaggaaatgcatcgtaagaaaaactacgatcatattgatgataccgtgataccgttgctgctgaagcttttgtggtctcaaattcacgagcctgtctttcagtggttcgagtgctggttcttcaaaatcgtgcgattagacagcagacatcggttcaggctattcggacaattccataagaaaatggtgttctttttcaaaactacacatcggtattactatgatatcatcgaatgtttctttgcgagatatgatatgaattcagtggttccaccagacatttttacaaagctgaacttagttcaaggaacaaacaaaaaagtcgtattagatgcaacgaatccgttgaaattttctatcgtgatttcgtttcaaagatgtttgattaatataggttctacgcattcctacaaagcaatcctagacgaaccaaccgacaaacccaagagggttgaagacttcaaaaaatctattaggtacctaaccatcgcctcactctgtctcccatccgttggagatacttacctacaattagccaaaatttaccagaacaccggaaagctttcgtcatatctctttgaattggtacgaggttcattggtgaggattccgtccaagtatgcgttgaaaggtttaaaaggtctcatcttaattcctgatttccctgagaggaagcttttaatgaagaaattaaaaaaatctttatcaaaacatccaaaagggaaacgacttcttttcgaaaatcgtattatcttgcagcttctaacaacattagagcatatcatggttccagctttatcgagcgtatcctacacccctgaccgttggctgctaagagatcatttacaagctgctgtatcagaacatcatttgggacatacgaacgctatacttgagattttggctaccatgatgggattttttgactttatgtttacaaatgaagaaggaaaagaacaaaggaggaaactcaaatacgttaatttgagtaaatgtcaagtttcctttttggatttcagcttcgattttattgtcagtgtaatagatgtagtggtcaaacctgcatggcagaaaaatgtggagaattttcaatatctagcgattattcgtttgctaatatgctggattaagtcatatagatctattttacaatatgctcatcggcacaggaagttttgtacttcattggcctcattactcaacgatttgatgaatagtcccttgaattacccaaagtgcttatcgaaccataggccgagaagaacttattattttgaggaagacattatgtttagagagttctcttgtataaattttgcactaactgactttaacgacgatctcgtgtacaactcccccaacatggtaaacaatataatcggttgtcctttatcgaccgagaaaggatcactcaaagaagaaggtattttgcgaataaaagcgatcatattttccggtatgaaatttttagagaaaatgacaccgatattaaatggaacgtcagcaaatataccttcgacctag

SEQ ID NO: 4747 - DNA, 1818 bp, Saccharomyces pastorianus
atgagtttcagagctaagatctcaggtttcggtgctaaggtctcgaaaggtttgagatatctggaaattcctgttcaggatagggactccatcagttttttaaagaatccggatttgcagcctattaaggcggaaaatcaaacatggggtttctggtctaatttcgcatattggggggttatgtccttttccgttggtacctggattagtgcctcgtctgcattaagtgtcgggttaagttatccagagactattggtacgtttattgtcggtgatgtattgactatcgtattcaccttggccaactcgagtcctggttacgactggaaggtcggttacactttgactcagagatttgtcttcggtatcaatggttccgctttcggtatcatcatcagagtgttaatgagtattgtcaattacggttccaacgcttggttgggtggtctttgtatcaacatgatcttagattcctggtctcatcactatctgcatttacgtaacactttgtcctccagtgtcgccatgaccactaaagagttgatcggatttattatcttccacgtcctcactgccttctgctacctaatgaagccttaccacatgaactacattttgatttggtcatgtgtggccacctttttctccatgctgggtattgtgatctatttgacccaccatgctggcggtgttggtgacttgttcacgtccactgaatccaccgccaccggttctactaaggcctgggcttgggtctacatgatttcgtactggtttggttccgtctctccaggttccaccaaccaaagtgattactcgagattcggttcttcccaaaccgccatctggctcggtaccatctgtgctctattgattcccaccactttgattccagtctttggtgtcattggtgcttccacttccgaaaagctatatggtacacaattgtggatgcctatggatatttttgactactggttaaaggaaaactattcttcaggtgcccgtgccggcgccttcttctgtggtgtttccttcgtcatgtcccaaatggcctacaccatctctaactgtggtttcgctagtggtatggatttagccggtttgttgcccaagtatgtcgatatcaagagaggtgctatttttaccgcgtgtatctcctgggcttgtttgccatggaatttctacaactcttcgtccactttcttgactgtcatgagttctttcggtgtcgttatgactcctattatctctgtcatgatctgcgataacttcttgattagaaagagacaatactctatcaccaacgcctttattctaaagggtgaatactacttcagcaagggtgttaattggagagcaatcgtcgcttgggtttgtggtatgactcccggtttacctggtattgcctgggaagtcaataacaattatttccacaacactggtattgttaacttcttctacggtgattcattcttctcattcttgatctctttctttgtttactggggactgtgtctaatcttccctatcaagatcgttgtcaaacacgatgacaaggattactacggtgcattcactgacgaagaagcaagaaagaagggcatggttccattcagcgaaatttctgaagaagaaattgctgcttacacattaggtgaaggatacaccactggtcatgaattcagacctgacggatccgacgaagaagtgcctgaattggccaagactagctctgaaaacaccaacgagtttgaaatagttcaccaaaagcaagatgaaaaaaattcttccaccgccagtgaaagagccaactaa

SEQ ID NO: 4748 - DNA, 1293 bp, Saccharomyces pastorianus
atgtcactttcaacatcacatgctaatcaaaaattactgaagtccgtttcaagcggttctgaaatctccggaaccgaatcactacccattgtgatttcgcctttagccgagtttttaattaggagagcattggtgaaccctagattggggaactttttttattggtatttgaaatctgaatcagaagacaagccttatttagatcagattctaaattccttttggagtagattaaataaaaaatctcggaatatactaaatgatcaaatcagattaatcaacatacttcgagaatgttgtgaagtcattaaaaagctaaaggataccacagccaagaagatggagttgttagtacatttactagagacaaaagttaggccactagtcaaagtacggccaatttctttaccactagatccagacgtgttaatatgcgacgtctctcctgaaacatcgaaggtatttaaaagttctttgtcgccattgaaaataacatttaaaacgacattgaatcaaccataccatttgatgttcaaagttggcgatgacttaaggcaagatcagctggtagtacaaatcattagcttaatgaatgagttactaaagaacgaaaatgtggacttgaaattaacgccatacaagatcctagctacgggaccacaagaaggtgctattgaattcattcctaacgatacattagctagtatactaagcaaacatcatggcattcttccttatctgaggcttcactatcccgataagaatactgaactgggcgtacaggattgggtactagacaactttgtcaaatcctgtgctggttattgtgttatcacatacattttaggtgtgggagatagacatttagacaatttactagtcaccccagatgggcatttctttcacgcagactttggttacattctaggccaggaccctaaaccctttccacctttaatgaaacttccacctcaaattatagaagcatttggaggtgcggaatcatcaaactacgataaatttcgtagctactgctttgtggcatactcaatcttaagaagaaatgcgggattaattttaaacctatttgaattaatgaaaacgtcgaacataccagatatcagaatagaccccaatggtgccatcttacgtgtaagagaaagattcaatttgaatatgtctgaagaagatgccacggtgcatttccaaaatctaatcaatgacagtgtaaatgctttactacctatcgtgatcgatcacttacataaccttgctcaatactggcgggcttaa

SEQ ID NO: 4749 - DNA, 1209 bp, Saccharomyces pastorianus
atgtccctaaataacataacattttgtgtgtcacaggacctcgatattcccttgaaagtgaaaattaaatcattggaaggtcagaaacctcttttgaagccatcccagaaacttctgaaccctgaactttcattggtagcgtccaatgtgtttcctcatagcgatctagttgtatcattacaggtgttcgataaggaaagaaatagaaatttgacgcttccagtatactcaccgtatattccttttaaaaattctaggacttgggattattggttaactttgcccatacgcataaagcaattaacgtttagtagtcacttgcgtatagttttgtgggaatatgacgggtctaagcaagtctcattctttcaattggagacaagcattttcaatccggtggattgtgcgctaaagagagggtttgaatcactaaggttttgctatgatatcattgaccactgtgaagtagttactgataacaaagatcaagaaaatttaaatagatatttccagggtgaatttgcaagacttccgtggcttgatgaaatcacaataaataagctgagaaaacaacgtgaaaaaaggacctggcctcagggtatttttatactaaatctagagttccccatgttggaacttcctgttgtgttcactgagagagaaatcatgaatacccaaataaatatcccgactttgaagaacaatcctgggctgagcaccgacttacgagaaccaaataggaacgattctcaaaccaaaatttctttgggaaataaatatcactctactctgaaattttacgaccctgaccaacctaacaatgatccaatagaagaaaagtacaggagactagaaaggacgtccaaaaatgcaaatttggataaacaagtgaaacccgacatcaagaaaagagactacttgaataagatcatcaactatcctccaggcacgaggttaaccgcgcatgagaagggttccatatggaagtatagatattacctcatgaacaataaaaaagcgctcacaaaattattacaaagtacaaatctgagagaagaatcggaaagagtagaaatcttggagttgatggattcatgggccgagattgatatagatgatgctttggagctgttaggctcaacattcaaaaatctttcggttagatcatacgctgtaaataggcttaaaaagcatctgacaaggaattag

SEQ ID NO: 4750 - DNA, 591 bp, Saccharomyces pastorianus
atgttcccctttaagttgcttttggttggtagtttaattggcttcccattagtgaaaatccaagctaaaactcctagacaacggaacgaactctacaatccacccatttttaattttggattacagttaccacagccgattttaattctgattataacactaatttatagtgttatgagtacaaaaattctggcatcggggttggcgtattttatcattggattctatgtttataaatatcaattgatctttgcgacagatcatttgcctcattcgacagggaaagtatggcctttaatttatagaagaattatcgttggattgctattgttccagttgaccatggtaggtacactgacagggtttgaaggaggatgggttttgtcatcctgcctcttccccctaccagtgataacattatgtttcctatatgactttgaaaagaactacttgcctctatcgcaatatattgcattaagttcgattcgagagtacgaaagagataattctctggttagctccatcagcggcgaagaatcttatgcttacccttacgctgtgagtgaactagagggtccgatgctagactaa

SEQ ID NO: 4751 - DNA, 1515 bp, Saccharomyces pastorianus
atgtcatctcatattaaaaatctcatgtcggcagggtcgtatttcgatacactaccaaatgaggcccatgattttaggaaacccaccgctatggtagtaacgacgcaactaacgattgctaccttgttgggcctttttgccttactttcattctctattctgttgaagaagtggccaagattgtatgcaagcagaagatataaagatgagggaaatcttcgattaccatcctggaatcagtcaagtttatttggttggctggccgtcttatatagaataggggacgaacaaattttggaatatgcaggtttagatgcgtatgtgttcttaagctttttcaaaatgtgcattaagctagtttccattttctgtttcttttccttatgcgttatatctccagtgaggtatcattttacaggaaaaattgatgatggtaacgatgatgatgataaatctttcatacgtctagtgaaaagagttatggagggaagcggcgatgatgatggccactcagctcccgaacgtacgaatgtgtacctctggatgtatgttattttcacatattttttcacctttatagcaattaaaatgatggtcgccgaaacaaagcatgttgtgaatactaggcaagcataccttggcaaacaaaataccattactgatagaacaattagactgtcaggtattccaatagagcttcgtgattcggatgctctaaagacaagaattgaacagctgaaaattggtactgtgtcatcaatcactatttgtcgagaatggggtcccttgaataggctattccattgtcggaaaaaaatcctcagaaacttagaacagaagtacgcagaatgtccaagcgagctacgtactcgacaaccatcctcagagaattatcgtttaacaggaacacagcaaaataacgtgccttcacatgaaggaacaaccccatcaaacgatcacaatgaggacgatggtgtactatactctcaaatttctttgggagaaagaccgaaaatgaaaactggatatcgtggtatgttcggaaaggaggtggatgctatagaatatttagagcagcaactaaagtttattgacctagaaattacagaggcaagaaaggaacactactctgcaacacctaccgcatttgtgacaatggactctgtagctaacgcccagatggcggcacaagctgtgttagaccctagggtacattattttataaccaggttggcacctgcgcctcatgatattaagtgggaccacgtttgcctttctagaaaggatcgtttaacaaaagttattccactacagtatcataggactttcaagtttatttttggttattccagtgtcatacctagctactttactgaatttgaaaaccctttcaaaattctggccaagtgtgggaaagttgttgaaagaacatcaatgggccgccaacatcgtgaccggtttagtaccaacttatatttttactttgctcaactttgtcattccttacttttatga

SEQ ID NO: 4752 - DNA, 954 bp, Saccharomyces pastorianus
atgagaaaaattttgccaaaatttatagatgatgagctgaaagatcacgcaagagaggccaagcaaccaaaagcaggtgaagcatttacactgcaaacaagtactcaatcaagtgtactactagacaacaataacatgtcgcgcgttggtactatggtgttagggcctgcaggtgcaggcaaaagtacattctgcaattctatcatatcgcacatgcaaaccataggacgaagagctcatattgtgaacttggatcctgctgcagaggccaccaagtacgaatttactattgatattagagatttaatttctgtagatgatgtcatggaagagatggatttgggccccaatggtgcgttaatatattgcttcgaataccttttgaaaaatctggattggcttgatgaagagatcggggatttcaatgatgaatatttgatctttgactgtcccggtcagattgaactttacacacatatccctgttttacccaacatagtacgtcatttaacccaacaattgaatttcaacctttgcgccacatatcttttagaagcgccatttgtgatagacagttcgaaattctttagtggtgcactgtccgccatgtcggcgatgatattactagaactgccccacatcaatgtgttgagcaaattagatttgataaagggtgatattaataaaagaaaactgaaaagatttctgaatcccgatgcaatgctaatgatggaaaccgatggaatgaatcaagaatccaatcctaaatttttacgtttgaaccagtgcatagctaatcttgttgacgattttggtatggttcaatttctacccttagagtccaataatcctgacagtatagctaccatattatcgtatattgacgatattacacaatgggcagaaggacaagaacaaaaggagcccgatgaccaaatagatgtcgaagaatag

SEQ ID NO: 4753 - DNA, 4482 bp, Saccharomyces pastorianus
atgtcgaacaccccttataactcatcggcgccttctattgcgtccatgacccactcctctgtgtcaaggagccccaacatgcacacggtgaccacccccggcaccaacaccagctcgaactcgccaccgtctctacatatgtcttcggagtcatccaagaccaaaaggaagcgcaacagaatcccgctcagttgcaccatttgtcggaaaagaaaggtcaagtgtgacaagttcaggccccactgccagcagtgcaccaagaccggcgtggcccatctctgccactacatggagcagacttgggcggaggaggcggaaaaggagcttttgaaagacaatgagttgaaaaagttgagagagcgcgtcaagtccctagagaaaactctgtccaaggtccactcctcgccctcttccaactctttgaagagctacaacactcccgagagcagcaatttgttcatgggcaatgacgagaactccaccctcgtcaacaccaacggctccgtttcatctgcctcgcacatgcaacagcaacagcaacagcaacaactacttcatcaacaccagagccagcatcagcaggacttcgtcaagaacgcaaacgctaactcttcgtctctctccatctctaacaaatacgataacgacgagctcgacctgaccaaggacttcgatcttttgcacatcaagagcaatggtaccattcatctgggtgccacccactggttgtccatcatgaaaggtgacccgtacctgaaacttctatggggccacatttttgccatgagggaaaagctgaatgaatggtacttccagaaaaattcatattccaagctgaaatcaagcaagtgtcccatcactcacgcgcaagcgcccccctccgctgctgcggctgttgctgctgctgctgccaccagaacgtgtccagttgatcataccatgtttgcatccggaatggtggcccccaaggaggagagtcctgcacccaggaaatgtcccgttgaccacaccatgttcccttcgggaatggtgccccccagggaggaaactcctgtccagaagagatgtcccgttgaccacaccatgttttcggcaggaatgatgccccccaaagaggagatcccctccccatactcaacgagacccgtgattgaccacaacaataggcattcgatgaacccacctcaatcgaagtgtcccgtggaccataggaacttcatgaaggacccttctgccgatatggcaaatcttcctcctaaccccgctggtcgctgccccgttgaccactcaggcatgaaaaacaccgctttgccatcatctcacaatgccaacccacaccaccaacaccaacctcaacctcaatctcgttctcattctcactctcatcaaaggatgaaactggatagcttcatgacagaagctgaagtactcgcaacactttgtgaaatgttgcctcctaaacgtgtcatcgcgttgttcatcgaaaaatttttcaagcacctataccctgccattccaatcttagacgaacagaacttcaaaaaccacgtgaaccaaatgctttcactgtcatcgatgaatcatgccatcaacaacttcggcatgggcatgccatcttcctccgctttggaaaatcagcccatcacccaaatcaacctcccaaaactctccgactcttgcaacctaggtatcctgataataatcttgagattaacttggttatccataccctccaactcgtgcgaagtcgacttgggcgaagagagcggctcattcttagtgcccaacgagtcaagcaacatgtccgcatctgcactgacctcaatggccaaggaggaatctcttctgctaagacacgaaacaccggtggaggctttggaattatgtcaaaaacacctgatcaaattcgacgaactatctagtatttccaacaacaacgtcaatttgaccacggtgcaatttgccattttttacaacttttacatgaaaagtgcctccaacgacttgactactttgacaaataccaacaacactggtatggcaaaccctgggcacgattccgaatctcatcagattctattgtcaaacatcacacagatggccttcagttgcgggttacacagagatcctgataactttcctcaattaaacgccaccattccagtaactagtcaggatgtatccaataacggcaacaagaagacaaatgtcaacacgaatgccaatctgaataacagcacgtccgctaataccgccaatgccaatagcagatccggtagcgctgactcaagaagtggctctaaccctgcaaacaaaaaggaaaatcaggtcagcattgaaagatttaaacacacctggagaaagatctggtattatatcgttagtatggatgtcaaccaatctctttcattggggagccctcggttattgagaaatttgagagatttcagtgacactaaattaccaagcgcttccagaatcgattacgttcgcgatattaaggaattgattattgtgaagaatttcacccttttcttccaaattgatttgtgtatcattgctgttttgaatcacattttaaatgtttcattagcaagaagcgtaagaaaattcgaattggattcattgattaatttgttgaaaaacctaacctacggtacggagaacgtcaatgatgtagtgagctccttgatcaacaagggcttattgcccacttcagaaggcggctctgtagattcaaataatgacgagatatacggtctaccaaaactacccgatattctaaatcacggtcaaaataatcagaatttgtacccggatggtagtaacagaagtgtttctagtagcgatatagataaaaaattggatttgcctcatgaatctacaaccagagcattgtttttctccaagcacatgactatcagaatgttattatacctactaaactacattttgtttactcattatgaacccatgggtagtgaagatcctggtaccaatatcttagctaaggaatacgctcaagaggcattgaacttcgccatggatggttataggaactgtatgattttcttcaataatattaggaatactaattcattattcgactacatgaatgttattttatcttacccctctctagacattggacaccgttcgctacaattcattgtttgtctgattttaagagccaaatgtggtccactgactggtatgcgtgaatcgtcgattataaccaacggcacatcaagtggattcaatagttctgttgaagatgaagatgtcaaggttaaacaagaatcatccgactatttgaaaaaagacgatttcatgaaggatgtcaatttagactccggcgattcattagcagaaattttaacttcaagaatgctgttatttcaaaaattaacgaaacaactatccaagaaatacaattatgctattcgtatgaacaaatctactggattttttgtttctttgttagatacaccttccaagaaagcagattccaaatcgggcaacggtgcttttatgctgggcaattggaagcatccaaaggtttcgaacatgagtggatttcttgctggtgataaggatcaattacaaagatgccctgtgtatcaagatgcactagggtttgctagcccgacttccggtgctaacgaaagttctgctccaattcaaggtttaactatgcaaggtcccaacggtaggatgggagggactcagttacccccaatcagatcatataagcctatcacttataccagtagtaatttacgtcgtatgaatgaaactggagaggcagaagccaagagaagaagatacaatgacagttatgttgaaagcaacaatgatatagctagagcagtaagcccaaaacctgcaagtggattctcttcggtgcaaccactcttgtcatcgttctccatgaaccaactaaacggaaacgctattccaacggtaccatcactttctaatatcacttctcatatgggtgcactaccttcgttagatagaattaccacgagtcaaatgaatctgccggatccatccagagatgaagcatttgacacctccataaagcaaatgacacctatgacaagtgcgtttatgaatgcgaattctgtaatgtcaaactcaactctaaatggaaacgtaaatatgaatggtgctggtactgtgaatacagacacgagtgttaatggtagtgctttgtcgactttgacaagcccacaaggttcagatctggcatctaattctgcaacacagtatacaccggatttagaagatttcttgatgcagaactctaattttaatggattaatgataaatccttcaagtttagtagaagttgttggtggatacaatgaccctaataaccttggaaggaacgatgctgttgatttcctacccgttgataacgttgaaattgatggactagttgatttttatagagcagatttcccaatttgggaatga

SEQ ID NO: 4754 - DNA, 780 bp, Saccharomyces pastorianus
atgattgacgatgctaatgatttgattttgaataaaatcagacatgttcaattattcaacagtccaagtgaccgtgtcaaaatgattttccatccagaatttttgaacgcaaataatccaattcttggtttagactatgacgaattcgttcgtggttgccatttgggtgtcttcccttcatactatgaaccttggggatacaccccagcagaatgtaccgtaatgggtgttccttctatcacaacgaacgtctctgggtttggggcttatatggaagacttaatcgagaccaaccaagctaaagattatggtatttatattgtagatcgtcgctttaaagggccagatgaatctgtggaacaactggttgattatatggaagagttcgtgaaaaagacaagaaggcaaagaataaatcaaagaaacagaaccgaaagactatctgacttgttggactggaaaagaatggggctcgaatacgtaaaggcaaggcaattggcattaaggagagcataccctgatcaattcaaagaattggttggggaagaactcaatgattctaacatggactctttagctgggggtaagaaactaaaagtcgcaaggccgctaagtgtaccaggctcgccaagagatttgagatcaaatagtacagtttacatgactcctggtgatttagggaccttacaagaggctaataatgcggacgattatttctctttgggcgtgaatcctgcagccgatgatgatgacgatggcccatatgccgatgatagttaa

SEQ ID NO: 4755 - DNA, 1182 bp, Saccharomyces pastorianus
atgtcccgtgatctacagaatcatttattgttcgagaccgcaactgaggttgctaatagggtcggtggtatttactccgtgctaaaatcaaaggcccccattactgtcgcccagtacaaggacaattaccatttaatagggcccttgaataaggccacttaccaaaatgaggttgatatactggattggaagaaacctgaagccttttccgaggatttgaagcctattcaacatgctttgcaaacgatggaatctagaggtgttcattttgtttatgggagatggttaattgaaggcgctccaagagtgattctttttgatttggactctgtgagaggcttttcggacgagtggaagggcgatttatggtcattggtaggaattccctctcccgagaatgatttcgagacgaatgatgccatcttattgggctacacggtggcttggttcctaggtgaattggctcacttggattctcaacatgccattgttgcacatttccatgaatggttggccggtgtcgcgatacccttgtgccggaaaagacgtattgatgtagttacgattttcactacccacgctactttattgggaaggtatctatgtgcctctggtagtttcgatttttacaattgcttagaaaccgttgacgtcgatcatgaagctggaaaatttggtatttaccatcgttactgtatagaaagagccgctgctcattccgccgacgttttcaccacagtgtcacaaattaccgcttttgaagcagaacatcttttgaaaagaaaaccagatgggatcttgcctaacgggctgaacgtaatcaaattccaagcattccatgagttccagaatttgcatgctttgaaaaaggagaaaatcaacgattttgttagaggccactttcacggctgctttgatttcgacttggacaataccttgtacttctttatcgctggtagatatgagtataaaaataagggtgctgacatgtttattgaagctctagctcgtttaaactatagactgaaagtatctggctctaagaaaaccgttgtggcgtttattgtcatgcctgccaagaacaattcatttacagtggaggcattaaaaggccaagcagaagtgaaagccttagaaaacactgtagatgaagtgaccgcctcaattggtaagcgatattga

SEQ ID NO: 4756 - DNA, 1311 bp, Saccharomyces pastorianus
atggacttaaagggtacccagtcgcggttgaaaaggttattgagttttaaccgcaataagaaggaaatcactacatccgaagaatgctcaagtagcaaccattctgctaacggggattctcatgttggtaaattgctagcttcagccatggaaaaggttggtaaagaaggtgttatcactatcagagaaggtagaacgttggaagatgaactagaagtgactgaaggtatgagatttgaccgtggttttatctctccctatttcatcactgatccaaagtcaagcaaagtagaattcgaaaagccattgttactattgagtgaaaagaaaatttcttctattcaagatattctaccagccttggaaatttccaaccaaagcagaaggcccttattgattatcgctgaggacgttgatggtgaggcccttgctgcctgtatcttaaacaagttaagaggtcaagttaaagtctgtgccgtaaaggcccctggcttcggtgacaacagaaagaacaccattggtgatattgctgttttaacaggtggtactgtttttactgaagaattggacttgaaaccagaacaatgtaccatagaaaacttgggttcttgtgattctattactgtgactaaagaagacactgttgttttgaacggtagtggtccaaaggaagccattcaagaaagaattgaacaaattaagagttccatcgatatcaccaccacaaactcttatgaaaaggaaaaattacaagaacgtttggccaaattatctggtggtgttgccgtcattagagttggtggttcatcggaagttgaagttggtgaaaagaaggaccgttatgatgatgctttgaacgctacaagagctgcagttgaagaaggtatcctgccaggtggtggtactgccttagtaaaggcctctagagtcttggatgaagttgttgttgaaaattttgatcaaaaattgggtgttgacatcataagaaaggccattacaagacctgctaagcaaattatcgaaaacgctggtgaagaaggttcggttatcgttggtaaactgatcgacgaatatggcgatgatttcgccaagggttacgacgccgctaagtctcaatacaccgatatgttagccactggtattatcgacccatttaaggttgttagatctggtttagttgatgcttctggtgtcgcctcattattggctaccactgaagttgctatcgttgatgcaccagaaccacccgctcctgctggtggtgctggtggtatgccaggtggtatgccaggcatgccaggtatgatgtaa

SEQ ID NO: 4757 - DNA, 684 bp, Saccharomyces pastorianus
  modified_base (659)..(659): a, c, g, t, unknown, or other
atgttgagatcatccgttgtccgtagtcgttctacgttgagacctttattacgccgtgcttactctactcacaaagagttgaagtttggcgtagaaggaagagcctcgcttttaaagggtgtggagactttagccgaagccgttgctgctactttgggcccaaaaggtagaaatgtcttgattgaacaacctttcggacccccaaagattaccaaagatggtgttactgtggcaaaatccattgtcttgaaggacaagttcgaaaacatgggtgccaaattactacaagaagtagcttccaaaaccaatgaagctgccggtgatggtactacttctgccactgtcttgggtagagccattttcactgaatctgtaaagaacgtcgctgcaggctgtaacccaatggacttgagaaggggtacccaggtcgcggttgaaaaggttattgagtttttaaccgcaaataagaaggaaatcactacatccgaagaaattgctcaagtagcaaccatttctgctaacggggattctcatgttggtaaattgctagcttcagccatggaaaaggttggtaaagaaggtgttatcactatcagagaaggtagaacgttggaagatgaactagaagtgactgacggtatgagattcgaccgtggttntatctctccctattcatcactgatc

SEQ ID NO: 4758 - DNA, 111 bp, Saccharomyces pastorianus
atggtgaaaaatttcctttgtaacctttacaatgtggaagtcatgccgcgtagatgcaagacactactaagaaacgggcgttatgtggacaccgatttcgattctatgtga

SEQ ID NO: 4759 - DNA, 1950 bp, Saccharomyces pastorianus
atgacattgaaatcttcaaagaaacgtaaggggaggtctcgccattccaggaacaagcaaataacctcagcaatattgaccgaggaaggaataatgatcaagccgaaaacatcaagcccctacaattatgcaaatagaatggcagataagcgaagcagcactagcatagataataatagcagaacaagcttccagagcaacagtgataaaaatagtattttcgaaacggcttcccttattagctgcgttacttgcttaagcgacaccgatacgatagatcgatcggaaacatctacaatggatacgagtagagatgacctttcaggtgacccagaagttcattatccatcagtgaacggtcaactgccagcaaacactgttataccctatggacgaatcctggatgctagatacattgacaacgaatctttgcactatcatgatgcagtgtcctcgtccacttctccattgaagagcccatttaataacagtggacaggaaaacgttggtgacatagataccttccaatggcaagaaaggaaaagtaattcgttatcacgcaagagcaacagtagcagtagcattatttcttctagaccttcttctataaaattggtcgagattatattcgcaagaccaagacggcacgacgttgtacccaaaagggtttcacttctaatagactataagccacatccatctccccacatgaaagaagacgaagacttgattgaggaaatactaaagagaagttacaaaaataccaagagaaacaaatccatattcgtgatcgtcaacccgtttggtggtaagggcaaggctaaaaagctgtttatgacaaaggcaaagccactgttattggccagtcgttgctctatagaagttgtctatactaaatatcccggtcatgctgtagaaattgcacgagaaatgaatatcgacaaatatgatactattgtctgcgcatccggtgatggcatcccccacgaagtgatgaatgggttataccaaaggccagatcatgtcaaagcgttcaataagcttgcaattacccaaattccatgcggatcaggcaatgcaatgagcgtgtcgtgccattggacaaacaatccctcatattcaacattatgcttgataaaatcagtggagaccagaattgatttaatgtgttgctcacaaccatcttatgctagagagcatccaaaaatatcatttttgagtcaaacatacggtctcattgcagaaactgacataaatacagagttcattagatggatggggcctgcaagattcgagctgggtgtggcgttcaacatcatacagaagaagaggtatccatgtgaaatttatgtgaaatatgctgccaaatcgaaaaacgaattgaaaactcattacttagaatacaagagtaaaggttcattagagtatcaacatatcgccatgaaaaaacataaagaggaccgcaataattacaattacgacaatgaatacgacactgagaccgaagatgaagatgaaaacgaagacgaaggagaagaagaagaagattgtcctaatttttacggctctgtgaatcccagtaccgaccaaattacggaagaggatttcaaaataaaatttcctttggatgagggtgtgcctagtgattgggagagattggaccccaatatatccagcaatttgggaatattttatacgggtaaaatgccatatgtagcagctgatactaaattctttccagcagcactgccttcagacggcactattgatatggttatcacagatgcaagaacatcattgactagaatggccccactattattaggactagacaaaggttcccatgtgttacacccggaagttatacactctaagatcctcgcatataagatagtccccatgctggcaaacggtgtgttctctgacgatggtgaaaaatttcctttgtaa

SEQ ID NO: 4760 - DNA, 1500 bp, Saccharomyces pastorianus
atgatgtttttgccttttgtagaaaagctcttcgttagagatgccactaacgttgatctaattgttctccttaatttaacagaagatccaagagacaagtacaatcttggtatcatactccaaattctttgtttaaagtactataatcaaaatgttccttcgtccatcaaagacttcattcacggtttaactgtggcttcgtcatcttcaagcttaaattttattgaaagactgcagttttttttgttgtcttacattaatataatgataaactgtacaagcggtgtgtgggatggcactcaaggcattggtttagtgaacgagttatgccagtcatgccttagtttaggtttggatgatatcaatagatggcatatggacgaaagtcaggaaactaaggaaagcctcagatgtatttggttctggacattgttcttcgatgtttcatgttcatatgatgtaggtaaacctccattcatttctgatgattctttaaatctgaatgcatttactgtgcaagattctgagtcatcgggtatcaactccaggttcaaggcaaagagaagcaagttgatgcacgattttttaagggtttctcggttcattagtcgtgagattcataaaagacaaacaagtgaaaaaacccctgctttgttgttgttattgactagattcgtccaatcaaatttttcacctatcgagcactatacgaatccaatttactactccgagattgatccgtttgctataatgatcttatcgagagctctgtgtatgattactagcataggtaatatcgacatggtgattcgtcaaaatcataaaattatagacaagaacaaaatggttcagttcacactaatatcaatatcgatttgcgttaataccattttattcaattttgaaaaatcagccaacgaagaagaagacattttatttgaagggttgaaactatctactatcctaatcaatccgcttttgatacgaatagtatcggaagtgtatggcctggcattccataaactaacgtttagagaaagaggatttcttttcctcatcgatcttgacacaggaaaaagaatccaattcatcaaatacgaggaagaagacttcgatgaaatcttgaaaggattcgatgtcagaagtgacaagttcttaacattttctggtacaataattagattctatgaaattattgacacgttatttgattctagcaatagaaacaaagaaattttcagggctgtttctaagtcctaccaattaacttctactttagcatttgaacgtgtaagtagggtcttgttcgataaagcaactcaagcaagattgaatactgagaaggtctggttgaagaagggcattaacatggaacagttcagtgatctcatgattgaggaatttattaacgatgtttggaaggctttcaagcacatttcccaagatctctggtgtattaacaaaaaggaattctataaacaatacaattttgatatataa

SEQ ID NO: 4761 - DNA, 519 bp, Saccharomyces pastorianus
atgaccggggaaagaggcaaagaagagacaaacggggcacaatttgtcggcatggatgggttccatatgggtgcatcgtttggtactgaagggtcctactccggtgacaagaagggcaagaggaggaaggtcattaagtcgtgtactttctgcaggaaaaggaaactgaaatgcagtcaggccaggcccatgtgtcagcaatgtgtcattaggaaattgccacaatgtatctatacagaggagttcaactatcccgtgactaacactgtattgttcagtcaggtgcccaatgtagcattggtgcagaagattcagagtttacaaaacctattaacagaaaacaataacgataccggtgatgaatcgatgccaaacggaagcctcgataatccgctaaggtttctccgtacttctgttttgggggagaatggctcaatgtacgtatttggcccgacttcttggaaaacgctgtctttgttcgagccaaataaatttcaaacagagtttcaaagtttgtga

SEQ ID NO: 4762 - DNA, 2019 bp, Saccharomyces pastorianus
atgcccgtgtcttcgttgaactactgccacggcagaaagctgaaaccatctttgaaaattgcaaaaacaacttcaatttcttcgtttatttcttctgcgccatcgaactcgttttcccccgtggagaacacagcatctgcttcttcatctgcatcatcttcatcgtctggaaaatcagtaaggtttgctacacatttatatacggtcaaaaggttcaatactaaattagcgcccatctcaataccagaaagagccagcaatttgccagctaaatacatcacttctcaactctcgaaaagcacgcatagcagttatgttccattgatttttcctgttatcaatagtgaggaccacccctacagtttagacattttggattatagtgacctggagtacgacgacaaggatgatgaatatgacaatgaaagtgatgtagaggagggtgcaaagcttgtccttgatcgcaaccttcttaataagaaggaagatccgtgcctgggtgaagagaataaatttgacattgttgattggaaactcatcaatagtaatttgcacccattcaagagtaatggtgctgtgaatttagcagagttggaatctagaatattttcttacttgaacggtcaaaacatcaaagttcactcattagaattatccagtcctgtaagtcacgaagatttttgccacaataattttggtagctgccaattttcgggacttatatttgtcaataatttaaatttcgaaaaaaacatcgagatcaaattcactttaagtaactggtcagatatacattacatcaacgcacgtttcaacaagtcaattacttcgaaaattgacgaatttagatttgttatcgatttttctgcgttgaaattaaatttagtttcaaaaaacctaattttcgctaattcgaatgaaaaaaggaccgattgtattttaaatttgcaattctgttgccgctatgatgttaattatttgagcagtaagacattttacgataataatgactatagaaactatgaggtaacgatttctttgtccacaataattaatctcaatcgcggagtttcaaaatttccaaaacatgaatccaaacatgcctcgctcctgctaacagactgcagtgctggtgttcatatattgaaaaacaacgaaaatgtaaaaaaaccattaagaaaatttaacgatgatacggattattttaacgactcaccgttgaagcacaagtttcatcattcgttcgggagggaagctgcctaccaacaggaaggcactccaccaactacaagattagaaacgaatgacagtgaaataaaaccctttggcaacttggtcgaggcctcaacctctgatgcagatgaggatatagttgatggctcctatgatttatctttacaagactttaactactgggaatttacgaaccatgggcttggaaaggcgttagccgactcagatattttacagtttaaaaactactcgaaacccgaagcctttagtaggtaccctttaatagacaactcattcacattaagagcaggagatggcaccttacgtttaacagcacaagaacttgaagacagctcgagcgacggaaggaagagtactgtgacaagtactacattaaatgcgatgcaacaatatagtgatgaattcagagcctccttaagttatacaaatcatcggaatgactctactgataccttgatgaaaacaaacaacagaccacctatagaatcaacttctccttcacaattatccgtatcgacaataaaggtgaaagaaagcataccgccccaagagaacaccatggctgttatgatacgctcatctccagcgttttcgcctgtggataatatgcccccaccaccatttttctcaggtgataatatgagtgatagctctggggaatatgaagacacaatatcccttaactcaaaagaaattcgtttacttcgtgattgtttttcaaagtcagcatcgccatctccatcgcaatctcccatattcttataa

SEQ ID NO: 4763 - DNA, 243 bp, Saccharomyces pastorianus
atgtccctcataaatgatgccatgataacgaaaatacctgttattatctcattaagaaataatcataaaataatagcaagggtaaaagcctttgatagacattgcaatatggttctggaaaatgtcaaggagctttggacagagaaaaagggcaaaagtgtaataaatcgtgaaagatttataagcaagttgtttttaagaggtgattcggtcattgttgtgttgaagacccctgttgagtaa

SEQ ID NO: 4764 - DNA, 891 bp, Saccharomyces pastorianus
atgactcaaactccgactccataccctcaagtttcgcatatgttatcacatcaacaagcaccacaacctctccaaccacttcaaccactccaatcacagcaacaaactcaacagcaacaaacccaacagctgccacaacagcatatctctcccccacagcgtttttcagaaaaccatttcacgaatcaattgaacaataatatcatcaacaataatgctttacgatcaaaaatattttctaatccttcaaacgaaaacaagcggtcaaggcgcatcgaagatgcgaactttaatccaccgcaaatgagatcagagtatgatacaaatatcattccttcaattccaacatcaataacggatcattcaatgactgctaatgtcaaacaaactcgcaatgtctcatcttcaggtgatatactcttcagtaatggtgcccatgatatgatcaataatatttccacatggaccaataactctgttttggatgctttgaatagtaagtccatactacaaacaatctttccacaaagtcaagacccatcatctctccccatggataaacaagagcaacagcctgaaatatgtcccacaaataacgtgaatgctaacagctttcagcaaccacagaatgactcttcctataataggaatctgtttatgatgtctcaacaggatggtgatcagcagcaaaattttgaagtgactgaaaagaatagactgaaggtacaagcagaaacgaatacaactacgaatatgcattttgagaacgtagcacctactgccgctactgcggaaatcagaaaaaaacgttctaattgggataatatgatgacgtctggtccggtggaagatttttggacaataaacgacgattatggtttcttgacatga

SEQ ID NO: 4765 - DNA, 546 bp, Saccharomyces pastorianus
atggaggcaggcagaccaacagctaacttgcaaccaccgcagaatactaaccgcgagcaacctcaccaagaaacgatgatgaacacagcgtgtagaagatggatcagcggcacggcagtgccgctgatcaagaagagcaagttcccgccgcggccgcagttcaccccagaaatggaggcacaatgcacagaaaagttcctccacggtggcagaggccccggcggccagaagatcaacaagtgcaactccaaagtgcagttgcgacacgatgccacgggcatcgtggtcgagtgccaagaaacacggtcacgtgagcagaaccgccggcttgcccggctcaagctcgcgcgcgagctggccgccgcgtcgtgtgacacgatgccctccagagaggccgcgttgcagctgtggcaccgccaacagaaacacgcgcagcgccggcgcagtatcgcgaagcacgaacggcatggcgaggccgctcgtgctgaaaaagaggagcgcgaggcccgggaccaggaggcgctgcgtgaattattccgacggtaa

SEQ ID NO: 4766 - DNA, 939 bp, Saccharomyces pastorianus
atgcatcgatatataaagagaggacagtacatggatgaagaaattgggcgtccacggctggttgtacagacaaatagtatagcagaaacagacaaagagatgccgggaattagaaagaatgagaaaatcagttatcgtaccgtggggccctttttcattatacagttagtgaaacctgggaatttaaatgctttagagggagaagattatatttacctgggagaactgctggaattggcagacaaagacccacacgtgtatttcacagttttacaaagcagcggtaggtttttttcgagtggggcagacttcaaaggcattgcaaaggcacagggagacagtagcattgaatacgcatcagaaacaagcaaatggctgtccaattttgtcgctaggaacgtatatgttacagatgcgtttatcaagcattccaaggttttgatttgctgtttgaacggaccagctataggaatgagtgcggcgttggtggcattatgtgacatcgtgtacagtatgaacgacaaggtctacttgctgtacccatttgccaacttgggactggtcaccgaaggcggcacgacggtttcgctgcctctaaagtttggcgtaaacacggcgtatgagcacctgatgttcaataaaccattcaagtacgatacactgtgcgagagcgggttcataagcaagaatttcaacatgccatcggcaagcagcgaagagttcaatacgacggttttggaagagctgggacgcaaagtggaagggttgtatttgcccagttgcctgggaatgaagaaattgctgcagtcgaaccacattgactcactgaacaagatcaattcgatggaggtgaatgaatcgctgaagtactgggtggacggagagcctttgagaagatttagccaattgggctccaaacaaagaaaacatcggttatag

SEQ ID NO: 4767 - DNA, 1983 bp, Saccharomyces pastorianus
atgccgtcttgtagtacaagaaattccgcggctccaagtatcaagtttataccacgcgttctcacgctgctagcaatatgcacgttggtgtttggtctgccttcaaaaatgatatcatttgcctcccaagaatctctacacagaataaacagtcttcttcgaagccccgctaatcgggaggtggataaattcggaacatttttgaacccaaacaaaggcgaagatggcaaggataaagatcaccacaacattgatatcgatcccttgcttcgaagcccctctttaacgccagatcatcaactcctaaagattggtttacacggcgccataagttctgatttagagatctgtagcaacttgaccataaacgaagtcttgttgaaattccccggcaccaacgctgcagatgctgcagtgacgcaggctctttgtaaaggcatggtaaacttctttaatagtggcattggtggtggtggttatgtggtgttttctggtaaaagcgatgacgaccatttgtctattgattttagagaaaaggcacctgcgggctcgcataaacacatgtttgaaaactgttcattgtgctcaaagataggaggtctagcagtaggtgttccaggagaacttatgggtttataccgtctatatgaagaaagaggtagtggccaagtcggatggtatgacttaattgaaccagtggcgaaattaggaagcgggggttggcagatagatgaagtcctcggtgccagtttacggctatatgaggacgttttcttaacattgaaggaggattggtcatttgtactgaactctacccaaaacggcgttttgaaaaaaggcgattggatcaagagaccaatgctagcgaacatgttaatggaactggcccataatggttctgtagcgccattttatgatcccaaccactggattgctaaatcgatggttagtacgatagagaaatacaacggaataatgaacttggatgatgttgcatcatatgacgttcacgttacaaaaccactgtccacgcaaatccggaagggtgtaaactatattcctgacaacgacatgaccgtactaacaagtagtggttcgagctctggtgcagcactactttcagcattaaagataatggataatttccataaccaagaaggtggcgattatgtcgaagaaaacacctatcaattgctcgaaagcatgaaatggatggccagtgcacggagcaggctgggagattatgaaggggaaacgctgcccaaacatatcaaagaggtgttggacccggaatgggctctcaaagctgtggaaagcatcaggagcaactccctagacggcaagttcaagacgttggagaactggacactttacgatccagcatacgagatcaataacccacacggaaccgcacacttcagtatagtggactctcagggcaatgctgtttcgctgacgacgacagtcaatctgttgtttggttccttagtacatgaccctaaaactggggtcattttcaacaacgaaatggacgattttgctcagtttaacacttccaacagttttgaactagcaccctccatatacaatttcccggaaccggggaagaggcccttatcctctacggcacccaccattgttctatcagaactgggtatcccagatctcgtggtgggcgcctccggtggttcaagaatcactacgagtgttttacaggccattgtaaggacctactggtacaaaatgcctatactagaaacagtggcgtacccacgcatgcatcatcaactgctgccggaccacgtcgaggtggaaagcttccccatggtgggcaaatctactctacgtactttgaaagagatggggtatacgatgaaagaagtcttccccaagagtgttgtcaacgcagtccgaaacgttaggggagagtggcatgcagtgagcgattattggaggaaaagaggaatctcctccgtatactaa

SEQ ID NO: 4768 - DNA, 402 bp, Saccharomyces pastorianus
atggataggatgcagctgcccaaattggaagtggttgtgagtcccgatgaaggatactacaatcacggttccatcagtttcaacctggattttaacgaggtttacccaatcgaaccaccaaaagtaacatgtttgaaaaagatcttccatccaaatattgatttaaacggaaacgtctgtctaaatatacttcgggaagattggtcaccggctctggatttacaaagtatcattatcgggcttcttttcttgttcttagaacctaatcctaatgatcccctaaataaagatgcagcaaacctgttttgccaggaccaaaaaaaatttgcagaaactgttatattgaccatgtctggaggctcagtcgatcatgtcctatatgatgacgtagttcctcattga

SEQ ID NO: 4769 - DNA, 1347 bp, Saccharomyces pastorianus
atggggttcttgaaaacttcaagcacggaaaaggaaaaagggcaggagttattgcagaacaagctagccaaattaaacgaagagttttcacagctggccctcgagaagtcgaatataacaaaggaacttacttctttaaaaatatcttacaagcaaaaggaaaaaactgtaggttacttggaagagcaggttaaacagttcaatgagcaaaaggatgcggctgaaaagtcaacagagcagttgaaaaaagaaaatatcaaaattttcaatagattagagctacttaaaaaggaaaacgaaacattgcataacgatatcacaaagaatggtaactcttatgaagcctatttgaaggaaaacggcaagttatctgaaaggttaaatattctgcaagaaaagtataatactttacaaaatgtgaagagtaattcgaatgaacacatggattcgattaaaagacaatgtgaggaattaaacgtcaagttgaaggaatctaacaagaaaatactatctttagaagatgaacttaatgagtatgctaatattgttcaagacaagaccagagaagccagcactttgagaagattagtctcagatagtcaatctggtgatttgagtaagcaaaaggaactggaaaataaattggagtacttgactgatgagaagagtagactggaatcggaactgaatttacaaacgtcaggaaaagccagtgaattacaagaatggaagcgtactgcggccgagctaaaatcagaaatacacgcactgaagcttcgtgaaaaagaactgaagtcagaggtcaaggcactggattccgctaatagcgatattaggcgcaagacccaggccacgtcggatgattctaaccaactggaacaaatcaaatccaatttaaagcttgcgttatctaaagctgaggaaagaaattcagaattacaatcaaccaatgaaagtcttttgaatttaaataatgaactcaacaagaaattcgaccgactattgaaaaattaccgtttattgtcttctcaattgaatgctatgaaggcaaaacaacacagcgataattcgggaagaataagcagatctagttctatgagttcctccgctaatgggaatggcaatctctcaacagccagtgagtctcatttgcccatagaagagatacgatcatcaagctctttagaattagactccgaaaaaaatgaaaaaattgcatatataaaaaatgttttgttggggttcttagagcataaagaacaacgaaatcaattactgcctgtgatttccatgttgttacaactggacagtactgatgaaaaaagactggtaatttctttaaagtga

SEQ ID NO: 4770 - DNA, 1386 bp, Saccharomyces pastorianus
atgttcaaacaactgtcacaaattggtaagaacctgaccgatgaattagcgaagggtttagcggatgatgtgaacggagcctcatcgaatcaacaaactgaagatgacaagagtggcttacctaaagatatacaaaccaaattaaggaagtttgaaaagtacgaacagaagtatcccttgttactctcagcttacaaaaatgagaaacagaaatccgagaagtttgaggctattgaaaagattttggcagaaaatacacccatatcgaatattgatgatgcagttgatacgttgccagtctttttccaagatctaaataacaaaaataatcttttgaatgatgagatcaagagattaactaaggagaattctgaagtggtgccggaaagtacctcaggggacatactaaatgataaagaagaattcttacagaaagagcaaggatacaaaaacgatatacatggactagaggagaagatagatgctttaaaaaatgatttagctaccttgcagaaaggtaaagaggataccatattagagttagagagaaaagtagctgcattggatcagcttaaggaagagaaagataccaaagaacaggaagacagtgcgtgtttattcaaattaaaggaggagttggccattaaggatcgctcttttgaagaaagccaactaaaaataagagaactggagcaggaattggcgtctcataaagttacaatggaagaaaacaccgcgacgttaacggagttaaacacctctttaaaagagaaggaagaaaaactggaaaatctggaaaaccaatcaaaagagacgtcaaagacaatcgtgtctaatggctcgttgaaccaaaacgtaggaagcaacaacagaaggaagaaaaacagaaaggggaagaaaaacaagggaagtacgagtgttgatggcatcaatgaagaggaaaattttgataacctaattaatgctgaaggttataggaaactgaaggaagatttacaaacgatacaagaaaaacataaggattgtgaagactggaagcatcggtatgaagaaataaaaacaaaaatagaaagcgctagtggattggaagactcacagcttgaaaaattagagaaagagctcgaaaaactgaatgtagagttatctgaaactaagaaatctttaaaagagaaaaactccgaattagaagaagtaagagacatgctgaggactgtaggaaatgaactggtagatgcgaaaaatgagataaaagaatcatccagccagcaaaatgaagaagtaaaagctggtaaaatggagctcgatgacttgcgtcataagaacgcagcgatgatcgaggcttacgaaaccaaaaattcagaattcacagatacattggatcgttaa

SEQ ID NO: 4771 - DNA, 156 bp, Saccharomyces pastorianus
atgaaatcattccaggttttccgatttaaagttcgtaacgatactaactggtctatcaaacacttgaaacgattaggaatgaaggtcaagcattcaagattgtataagtcggtatcagaatgcaagaaaaagagctacttcaaatgcaaacattag

SEQ ID NO: 4772 - DNA, 1002 bp, Saccharomyces pastorianus
atgacgctggaagacgaccattggaatgtagttagattacgtaaattacgtaaggggaaagaaaaagaagaggaagaggaagaagaagaggaagcatcgaaatcggaaatatccttggatagtttgcacgagggcccttttgctgaggaggacgatgaagacttcgatgccgatgtcttatcgaacactagcagtgaagactcctcgcagatgaatcgtgtttacgatatgagaacgtccggtgaattaaagggtgctgctattgctgctgctgctacagctgccgatcaaaccacagttcctgctatctcagagtcgtttgacaccttgtctggctcaaagattggtggaacagtcttaccaagtttggaaggttcgagattaaaggatagtgtaactgcgacgtctatgagaagtgattcgatttcgcgaatggatgacgttatagataaatgcgagggcaagacaactaaactgaggatgtggcatgttatcatgttgacgtcgctagtttctatgactttttcgtacttggcccttgagtattttctgactggtgatgtatttgcaggcttcaaatcgcaacagttacttcggaataatgaaaggaaaatgttatacggtaacattgactttgtcaataaaaactcttatgattcaaccggcaactctttaagtcaatgggctccctcagggaagtactacgtcgatttcgacaaccatatagcgtatccattaaaggatgatgagataatggggtggaaaagatacaaggctgatcttgttattctttggtataccacaaaggccagaatgaaaaacggctggcataagagaatcgacaagttaaacggggggagaatgaagttacatgcagttctcaagaaggctctcacgtccacccgaaaaaatttgatgatatttcataatgaacaaaacaccattggcaaaagctattcacattatgtcgaaataagtataaccaattttctccacgtctaa

SEQ ID NO: 4773 - DNA, 756 bp, Saccharomyces pastorianus
atgatatcgatatcgggttctttcaggagaccggttactgctttgaactgtaatttccagagcattcgatcggttatatatcttcataagggtccaagaattaatggtttgagacgagatccagagtcgtatttgagaaaccctagtggagtgcttttcaccgaaatccaggtaaaggaatgccaggataaggtcagatccatactacaattacccaagtacggaataaatctctctaacgagctgattttgcaatgcttaactcacaaatcgtttgcacacggttccaaaccgtacaatgaaaaactgagtttgctaggttcacagtttttgaaacttcaaacatctatttactctttaaaaaacgatccgcccacggaaagccgcgagaatggaccactttccttgcagttcaataatttgggcacaaaatttgccaaggaattgacgtccaaaaagacagcatcggcattcatcaaatcacacaatctgagccctttcatattctggaaaatgaaagacccattgaaagacggccaaataaatggcgaaaccacgatatttgccagtgtcttaaatgcattcattggcgcgattttatccactaatggttcggaaagggcttccaaattcatcgatggaagtttactggataagggagatctccactcgttgaccaacattgctaatgaaaatgttgcatctacaaagacaactataccgataaaggaaaaggaaaatgaagctaccctgtag

SEQ ID NO: 4774 - DNA, 492 bp, Saccharomyces pastorianus
atgggggaagtacgagttgagctagcacgggcatcggcgctgtcaacgaacatggctgcggcagggcaacggttccccatcgtgagcgtctttgtcgacccatcaagacagaagggcaaagtggtagtggaagatggcaggaactgcgcgggttcgttgcccatcgaccatagcgtgatggtgggaattcgcacggtcggcgaaagactgaaggaagacgcagccgaagatgcagacgcgtatctgtgtctggattacgacgtctacttgacgcacgagccatgctcgatgtgctcaatggcgctggttcactcccgggtgagacgtgtgatcttcctttcgcagatggagcgtacaggatgcttaaagataaccagcggcgacggctactgtatgaatgacaacaagctgctcaactctaagtacgagggcttccagtgggttggcgaagagtatcccgtggggtctgttgacccggacgtatgttgctag

SEQ ID NO: 4775 - DNA, 204 bp, Saccharomyces pastorianus
atggtcaagaaggcaaacaatccactgaagattgattatcagaatgggctaatagaagatcggcttttgcagatacgaaatttcaaagatgtaaatacgcccaaattaagtatgtattttgaatcaccaactgcaattgagtttgagttactaactttcggatgtatacacgtatacattgtgcagtcacggtatggagtatag

SEQ ID NO: 4776 - DNA, 384 bp, Saccharomyces pastorianus
atggctcgtgcgtcaagtagacgtcgtaatccagacacagatacgcgtctgcatcttcggctgcgtcttccttcagtctttcgccgaccgtgcgaattcccaccatcacgctatggtcgatgggcaacgaacccgcgcagttcctgccatcttccactaccactttgcccttctgtcttgatgggtcgacaaagacgctcacgatggggaaccgttgccctgccgcagccatgttcgttgacagcgccgatgcccgtgctagctcaactcgtacttcccccatgtcgatcttatagtcgttcaatatctggtcgttggggttgccgttccagatcagcggccaatactttgcagaccatgcactgttcagctcctttgtgctag

SEQ ID NO: 4777 - DNA, 2631 bp, Saccharomyces pastorianus
atgaaaagtttgagcgaattcattcacgacaagcttgacattgattcagaaacaaacgcccttcatcacgatattttaaaatacggtcaatataatggccttaatgaacttttaactacgtgtttcatactaccaaattcaaagaaagtcacactaccgtccattgccggtgacttaaaccataagtctgtcatagaccaatgcataattcatcttttaacgggggacttctttaacaacgtgctgacatttggctatagaatagctagaaacgaaaatgtcgataacagtcttttttgtcattctacaaatgttagcgccactttgttgaaaagcagcacttggaaattattccatagtttgatcggtacccatgcgtttgttgatttgttaatcaattatacagtgattcagtttaatggtaaatttttcacgcaaattgtgggtaataggtgcaatgaacctcatttgccgcctaaatgggctaaaaaattgtcatcaccattggataccactctgcagattaagcaactaatggcaccaataacgaacaaaccatttctgcataggctcaaaataaactctcctaatatctttccttatggcagaatccttccatcgtcatcaaccattaataaattaacagagttaagagatgctgtcttccctccaaatttggttaaaattcctctgagtgtgaaaattcgaatcgatataactttacaaaagctattaaatagacataaacgtttgaattatgtttctgttttgaataacatttgcccgcagctgaaggaaaatacatcggaattacctcatctaaatttccaattaccgcaaggccaagttctgaaattcttaatcgttattctacaaaagctactacctcaagaaatgtttggttcaaagcggaacaaaagtaaaattattcaaaatctacactctttattaggtctgcctttaaatggtcagttaccatttggtgatttgttgaaaaaaataaggctaaaggattttcaatggttgatggtttctggtgtttcattcactaagcaaaactttgaaaattctaatctgttgatgattttttttgtttcttggctctttaggcacttgattcccaaaatcattcagaccttcttttattgcactgagatatcttccaccgtgaaaatcattttctttagacatgatatgtggaatatacttgtaactccattccttgcagagtactctcaaaaataccttactgaaaatactgtgtgcagaaaccacaacagttacactctgtctaattttaaccacagcaggatgagaatcataccaaaaaaaagtaacaatgagttccggattatcgcgattccatgtagaggtgcagatgaagaagaattcgcgatttacaaggaaaatcataaaaagactgtagctcctactcaaaaaatactcgagtacttaagaaaaaagaggccaactagcttcactaaaatttattcgccaacccaaatctcagatcatgtagaaaaatttaagcaagttctcctgaagaaatttgataatgtcttaccagcattgtattttatgaaatttgatgtcaagtcatgttatgattccataccaagaacgaaatctatgaaaataataaagagagctttgaaagatgaaaatggattttttgtgagatcacaatctttttttaatactaacacgggtgtactaaggctagtagatgtggtcaatgctagtagaacaccaaaacctcacgaactgtatatagataatgtgagaacagttcatttatctaaccaggatgttataaacgttatagagatggaaatgtttaagacgtctttgtggatccaagataaatgttacttaagagaagatgggctctttcaaggctcaagtttatctgcacaaatagtagacttggtgtatgatgatcttttggagtcctacgatgagttcaaagccagtcccaaccagaacacattggtcttaagaatagccgacgatttcctcataatatcaactgatcaacagcagattataaatatcaaaaatcttgcaatgcgcgggtttgaaaattataatgctaaagccaatgaagacaaaattataactgtgagctcccaatcaaataatgatattattatccagttttgtgccatgcatatattcattaaagaattggaaatctggaaacactcgagtacgatgaatgtattcaacgttcgttcgaactctagcaaaaaaatatttcgaagactaatatcgttatttaacacaagagtttcctataaaaccataaattataacttgaactcaaccgctactgtcctcatgcaaatttactatatcgtaaaaaacatttcggaaggctacaaatctgcctttaaggacctgcctattaacgacacgcaaaatgtacaattctcttcattcttgtcgtgcataattgaaatgacattggacatctgcccagctacgaaatatgatctttttactgagtatgaggtgcgatacactatattgagcgggttcctggaaaacctttttttgaacacatcaaaattcaaaaataatattgattatttgaaaggggagattcaatctctgcaagtgtgtatatag

SEQ ID NO: 4778 - DNA, 477 bp, Saccharomyces pastorianus
atgttggaaaatccttttacatttttttcagacctggttattgcacacatttttgaagataggcccccttttgacatgaatattaggaactttcttttgtatcagttcataaccctcctcaacaaagttttaaggatgaaattcgagcaagtatctcccgatgaattttctgagctttgcaagctacacagggcattatgcattgagtgcgttacagacgatacgtttagtaaaaacaaagagctcgttaatgaaaaagccgctttttcatcatctcttttgagaatagctgatggattttgggaacatagtaggctttcacagttggatacgcttaacaaaagcatgaatgtaccctgtcaaatcccacatactagtgttcaaaattcactttctgtgattgtaataaagataatagaggataatatagaacacattaaggcatctgaacctttcatacaattcaaaagtacttaa

SEQ ID NO: 4779 - DNA, 3120 bp, Saccharomyces pastorianus
atggatgtcgacgaaccgaagtctactgtgatatcagattccgaagcagccgatgaagaaattagcatcatatacagacccgaattcaatgaagattatctttgggcagaagaaagggctcaagaaacattggcaacccaatcgctggaaagcattcatgcgacatcaagcgtgaatctgttttctggagaatctgtttcccctttagcagcaactaatgagcaacagactccaggcttgagatggtctttgagaaaaaggaaggctattcaaaagatgccatatagtttagaaaggataaagcacaggcagttcttagaaggctatgatattaccggctttgataccatttcaaatcagttagttttaccagagaatacctttccagtggttgagcagcaaaaagtgccagttgcgaatagaagtaacagaactttggaggaacaagataacgatactacaaacgatatcgggttccaagaggatgcgtttggattagaaacctctgatagcgacgaggtgcaacccagaaaaagacatcgtaattctaatattcctaaccacgatagggccattcaaccagatgattctttggatgaaaatgaagatcttgccaatagaagttcacaggactctcaaaatgatgaagttatattcagaggaagagttttgaatgtaaaaactggttatcgtggggttttacccagggttgcttgggaaaagtcattacaaaagcagcagtcttcgaaaactacgaaaagaagggccgaactattacaccataagggagtggctaagcggaagatacacaagagtttccacaatgaagatgaagaacaagggttgttaaatgatcttattgcgccagatgacgaactagacgttgatgaagacatttctcatgacttgtacttgagaaatcccacaatagatcgtgaagctagtgaaaaggaaatgaaagaattaagggaatattatgaaaacaaatatcacgaagacgaaccattagcagaagcttctagttttgatatcaatggggaataccggaacgaaaccatatttgagttggaaaaacacggtcccaagagccgcttcccccgcatatcttacaaagaacaacctattatatatttaaactcacaacactcagatagtgggatcagtgaacggtacaacatttctgatgaagataatcaaagcataatatcctcaaactttgcaaaagagcataaagatggcataattgataagatgctagttaaagctaaaggaaagaggccatcttctggtttgaataagaaaacgagaagtgctacaaagtatcggtaccatcgcgaaaagcttggcaagtaccagaccacaagagctataaaagttggaaagagatcggcccgtaaatcacgctctatgtccattaaaaagtctataccactcagttcaaaaaaaaaacatgcaatagatgaatacgcttttgaagttttagaatcagaacccctaaaaatagaggaaagctcttttaacaatgcgccgaaaaaggagaagaagaagaagagatcaccggtatacccgagtatgtctacagattctgaattaagaccaaaattagtttttaatactgttgttgaagttcccacgaatcgatatgcctttacaaagtcaaaaatgcgcattcccagcgctagctatagcactgagtttaatgaggaagatctgaaccaagaatctcgaccaataatggctgttcttgactcgattttaatgaaaaaaccgtttgacccgcctgctgtcattaaaatcgagttgcctggcaagacatatgcattatccaaattgaatcctgcagatatatgcacatctctaagggatacttttaggatcatcatcgataaaggtgtcactgatacggaactaattcattttaacgaaagtcttattgcttttttggtgcatcttgatatgccagaactgttcgatataattagcgagtttcaccgtgaatttaggtcgaaagtcaatggcttaagaaaaaaggctaaaccaatccatttttttcaaattgcaacctgtcaattaatgtttctagaaatatcaagatataacaaaatttcaacggctttgaagttggaaatggataccaagcttgtggatcatattgtctccttttttaaactgctctctgtatgctacgattctgtcacgaaaaattcgatggaatatttgtatacgagttactatattctatcttctattgtcgatattatacataaaaaggagggtttatgggacttattgaaagaccatcccttttcccctcggatttcgctgttactggtcaatatatttccaacaaaagcatgctgctggcaggttctgaagttggatcctgagtttgaacctttgaattcggcatttcgattcatcaagtactgcattgaaacctgtaactggaacgtttctaatggtttgattctctctcttgatcgcatattcaaaaggagaagattctctgatttcgaagaagaatctattacatcgcagaacaataagatactatatcctccaacaaagcaacccatgcgccaattaacgtttaacaaatacttgcgcttactggcactgtgtgagctgtctagttccaatatacaacgagtgataccaatgagtgacatttctatacacgattcgatatcggttttgaagaatcgtctgaaccttttaattgttttggccacaaactttgatttgaatttggagaaacgcttccaagaactaacacgaccgttatatagtaaggactatttagactttcatacgccagatgcgctcaagacgataacagcatccattatgcaggccagcctttcatttttggaaattagtcggaacaagaattatcccttcaatgggaaatttatagtttcgttattcggtaaattgatactacaacaaccttctacatcgagaatcacggagaacttcctgaaggagttcatacctttagttggcaagatgaaaagaaaaggtttaaacatgcttaaaatgttgtactcttcactggtggccatgtctcaggaggaggttttcgaggcttcttctgttttgtactgcagttatatttga

SEQ ID NO: 4780 - DNA, 672 bp, Saccharomyces pastorianus
atgttcggttcaacttgggtccagaattaccttctccagtttactaagagcaaagctcaagggaacactagttggatagagtattactgtcgtgttggaaaattccttgtagatgcgggcgtatttacttggtggacattctttgcttataatggtctagatgctgcactaaattttcaacttgcgtttgactctctaattatcgatttctgcgatatagattcattcgaattgttgagaaaacctctctattcggttgcggctgatttactgctcaaatcccaggataactcattttaccaatttctttcaaatctattgaagaggggacatattatagctacagatttgatacctgcatccaatgagaaagaacttttaaaattggtatccatgttttctaaggcgttgcaaaaatactcataccaagacttattatctactcttttagccttagccaaaaaccattgtgaagatggagacatcagcagagattttttagcaaaatacctggaatttttgaacaaaaattgcttgacagagctaagaaacaaccagctttttattacgttaagaagagagtttggtgtatcaagtgatgaagatgaaaaatgtaggtttggaactccttcaatgaatcagggatatcctgtcgaaagttgcttttgttga

SEQ ID NO: 4781 - DNA, 234 bp, Saccharomyces pastorianus
atgagaaacgacattatccttatagtgtgtgtcagtattggcaaagttggtaccgttcatgttgaattcatcgaaaagatcgttgtcgtattcagcataattgacgactttagctcttttatgctgccttgtttgctgggccattgtaaaaatggggatgttatcatcctcgttggtcaatctgttgtgaaaattggagatataggcctgtgggataagctggttttggtgtga

SEQ ID NO: 4782 - DNA, 90 bp, Saccharomyces pastorianus
atgagagcaagggatcggttggcaaaggtgctagatgacaacgaggagaaagagcagccaagtggccgcgacagcaagaaggtcgtgtga

SEQ ID NO: 4783 - DNA, 90 bp, Saccharomyces pastorianus
atgagtgacaacacaacgaacgtgcatgaaactagagccaagtttgctgagacattgcaacctaggatcggtggtatactactaaagtga

SEQ ID NO: 4784 - DNA, 900 bp, Saccharomyces pastorianus
atgctgtgtctcttcgctggtatggtactttatttcgagacgttagtgaagtatttcgggcatcttgccattattgctatcctttgggggtattcgttattagacaaccatatcgaaggtacgttgagttcctcgccaactttagaagatattgcgagtttgatgaatcgggtgtccttgaagtcagatatactattgtctcccatggtaaaccttggaacgcaagatatccaaaggctgctatacactacagttatcttgtctccgatttatgttatgataacttggctgctcttgccaccaaggagcctcatgctgataatgggcctatttctcttgtcataccattctccctggtccaaagtggcaagaaggctgttatggaagtttaaagtcattcggttgctagtcttctatgttactggcttggatctcggtggaataaataaggatcaaggcatttttgctacagtccaaaaacaggtgaagaagttggcctcgacggaaaatgcaaacggggtgttatccaattctaaacccattcgttttacttatgtgttgtatgagaatcaacgtcgttggttaggaatcggatggaagcctagtatgctgagttatgaaagaactccatggaccgatgaattcttgaacgaggcaccctcgcctgaaaacttccatttgcctgaagaaaccagttctatggtctggagatgggttgacaagacatggaggttagacatgaccaatgatggggccattcaagtaccaaattctaaggcaagaaccgccgccgaaccctcccctgatgaagggtttatatattacgataatacgtggaagaacccagtaaagaagactcgttttctgaatacgcagaaggagaagatgggtgagtactgc

SEQ ID NO: 4785 - DNA, 657 bp, Saccharomyces pastorianus
atgttcgaaatggctttggacgccatctctgaacagacgagatttgaagtcattggtggctactactcccccgttagtgataactaccaaaagcaaggcttggctccatcttaccgtagggtgcgtatgtgcgagttggcttgtgaaagaacttcctcttggttgatggtggacgcatgggaatcactgcaacccacctacaccaggaccgctaaagtcctggatcacttcaatcacgaaataaatatcaagagaggtggtgtggctacagtcaccggcgacaaaataggtgtcaagataatgctgctggctgggggcgacctgatagaatcaatgggtgaaccaaacgtctgggcagacgctgatttacaccacatcctgggtaattacggttgtttgatagtcgagcgtactggctctgatgttagatcgtttttgctatctcacgatatcatgtatgagcacaggagaaacattcttatcatcaagcaactcatctacaatgatatttcttccacaaaagtccgcttattcatcagacgtgggatgtctgtacaatatctgttgccgaattcggttatcagatatattcaagagcacagattgtatgtggaccaaaccgagcctgtcaagcaagttcttgggaacaaggaatga

SEQ ID NO: 4786 - DNA, 1737 bp, Saccharomyces pastorianus
atgcctacagtaagaccagtaaggagaagtcatcaaagaaaaacctccaatatatctcctcccatgggagcggctcctccgctgtcatcggtcgctttatcgtcatctgccaaaatcccagtacaggctccacctcctccaccccctccaccaatgatgtcagctccggtacctagctcagatatcgaaaaacctaaaccacctatgggcaacgcatctgtatcgtcaccaccttcaagtgggctaccctttttggcggaaataaatgcaaggcgatctgagcaagggacagttactggtacttcaacgacaggagatcgatctgaaaagattaaggcagcttcacgtgcaccaattccaccacctgcaccacctgttcctactttgcatgcccctccattaccaccaactgcaccaccgccaccatcgctaccgaatgtgacatctgtatcatctgacaaagcagcatcagcgcctgttcctccttcaccacctccaccacctcctctttcttcgccttctatagcctctccatcaccaccaccaccaccacctcctccttttcttactgctgccgtacctacaccaccaccgcctcctcctccccctccagtagtgatagcaagtaagccgccggctccaaataagcagtccaaaaaccctgctactgcatcttcctcggccataacaccagggggggctttgcctttccttgctgagatccaaaataagagagatgacaggtttgttatcggcggtaatagcgaatacaccactcaagataaacaaggggatgtggtaaattcatctccgactaataacattaacacttcttctaatgcaccttctgttccttcgccaaagcaggccagccaaacaggcatgtcatttttggatgaaattgagtccaaattgcacaagcagacatcttctagtgcctctaaaacgccacatgccccaccttttgctatggcacctcccttgcctactagtggctctcctcctcctgcagtttcaccttcaactaagaccctctctggtagttaccacagccacaatgaagatttaagtgtgtcgagtatgaatacagcaaaggcaccaccactgccagcgcaagctccacctccaccagccccaccaatgatgccacataataataagaatattgcgccggctgcatctttattacatgatatgcttccctctcaaaattctgaaaagcctgcccctccgattgcagctgctccacccctacccactctcaatgcgccaagcctccctcaacagccgattcctccaccaatatcgtcaactcccctaagtgcgaccacatttcctggtcgtacggaaactagaccaactgtgagtagttctttaaaatctccaccgcctccgccaaatttggaggcaagcgcatcgaccaaagacggagcttcttctaatagtgacagcaaaaatctcaagcaaagactattttctacaggagaatctacgctgcatcacaagcataatactcatacaaatcaaccagacgttgatgtcggacaatacaccataaatggatcaaattttaacggggcacaatcaggacatgaaaagatagttatagatgattcaagattcaaatggactaatgcctcacaaatgcctagaccacgtccatttcaagccaaaacaaaattgtatcctagtggtaaaggtagcagcgtgccgttagatttaacattatttacgtaa

SEQ ID NO: 4787 - DNA, 279 bp, Saccharomyces pastorianus
atggttagtgctccagctcctcctcctcctcctcctccgccaacaatgggtggtggcaacgctccaaagccagcaaactctgtcatgcagggccgtgatgcccttttaggtgacattagaaaaggaatgagactgaaaaaagcagagactaatgatagaagtgctccaactgtaggaggtggtgtcgtctcatcaacatctgggagctctggtgccctcaacaacaatagaccctccatgtcggcccctcctatccctggggtggggcccccacagtaa

SEQ ID NO: 4788 - DNA, 360 bp, Saccharomyces pastorianus
atgtttgcgttgtggttgacatgtttcagcttaggtattccaccagccaaaataccactttactgtgggggccccaccccagggataggaggggccgacatggagggtctattgttgttgagggcaccagagctcccagatgttgatgagacgacaccacctcctacagttggagcacttctatcattagtctctgcttttttcagtctcattccttttctaatgtcacctaaaagggcatcacggccctgcatgacagagtttgctggctttggagcgttgccaccacccattgttggcggaggaggaggaggaggaggagctggagcactaaccatttttgtaatactttgtaaataa

SEQ ID NO: 4789 - DNA, 234 bp, Saccharomyces pastorianus
atggtacctctggcaatcttggttgggacacccaaagcttggaagaaagaagttttacctggttccataccggtgttaacagcagtgacccagatatcttctggagcaacggcaccagctctagctggggcagcaactctcttggaaaccataacgtccttgatttcgttcaaggattcgttagtgaaaatgaaacccacgttacccttcacaaaaggcaacaacttttcgtag

SEQ ID NO: 4790 - DNA, 93 bp, Saccharomyces pastorianus
atggacttgtattcttccaagtattctctcaacttagcaaagtattcagctttcttttcacgaacgcctcccatttcaaacttattatattga

SEQ ID NO: 4791 - DNA, 2019 bp, Saccharomyces pastorianus
atgactacaagaggtggtgtttctaaagcacagaagggtttacatttgaatgaagatatttatgctggtatgaatgctttgcttcgtggtggtcgtattaagcattgtgaatattatcaatgtggtaaaggtagagatttgggtttcggtactattttgaatttcaccacaaagattggtgccggtatgggtgaacaaatgttatctcgtgaatactactacttgggtactcaattacctgttgatcgtttcttaacattctattatgcgcatccaggtttccatttgaacaacttgttcattcaattatcgttacagatgtttatgctaactttggtgaacctgcatgctttagcccatgaatccatcctgtgtatctataatagaaacacaccaatcacagatgtcatgtatccaattggttgttataacttccatcctgcaattgactgggtgagacgttatacattatccattttcattgttttctggattgcctttgtccccattgtcgtccaagaactgattgaacgtggtatatggaaagccactcaaagatttttctgccatatattatcattgtcccctatgtttgaagtgtttgccggtcaaatttattcctctgcgttattgagtgatttggcaattggtggtgcgcgttatatttccactggtcgtggtttcgccacttctcgtataccattttctatcttatattctagatttgccggatctgctatctacatgggtgcaaggtcgattttgatgttactgttcggtactgttgcgcattggcaagctccattgttatggttctgggcatctctatcttccttaatttttgcgcctttcgttttcaacccacatcaattctcatgggaagatttcttcttagattacagagattacatcagatggctatcaagaggtaataataagtaccacagaaactcatggattggttacgttagaatgtctagagcacgtatcactgggttcaagcgtaaaacgactggtgatgaatctgaaaaggccgctggtgatgctaatagagctcatagatcaaacttgatttcttctgaaattgtaccatgtgccatttacgcagccggttgttttatcgcctttacattcattaatgctcaaactggtgtgaagaacgataaggatggtacggtgaactctgttctacgtattattatctgtacgctggctcctattgctattgatctgggtgtcttgttcttctgtatgtgtatgtcatgttgctctggtcccttattcggcatgtgctgcaaaagaacaggttccgttatggcaggtattgcgcacggtattgctgttattgtccatatagtctttttcattgtcatgtgggttctagaaggtttcaactttagtagaatgttaattggtgttgttacttgtatccaatgtcaaagactaatcttccactgtatgacagcattaatgctgactcgtgagttcaagaatgatcacgccaatacggctttctggactggtaaatggtatggtaaaggtttaggttacatggcttggactcagccagctagagaattaactgccaaagtcattgaactatctgaatttgcagctgattttgtgttggggcacgcgatcttaatttgccagttaccatttattattatcccaggtattgacaagtaccattctattatgctattttggttaaagccttctcgccaaattcgtccaccaatttattctttgaaacaaacacgcttgcgtaaacgtatggtcaagaagtactgcagtttgtacttcttagtattgcttatttttgcagggtgcattgttggccctgctgtggcttcgtctcacgttaaaaaccttggttccaaactgactggtactttccataacttggttcaaccaagaaatcaatccaataatgatacgggacaccagatgtcaacatataaaagtcactattacacaagtgcgcctcatctgaagacctggtcaactattaaatga

SEQ ID NO: 4792 - DNA, 792 bp, Saccharomyces pastorianus
atgatgacgcacgacgaagaattgtcgtacatcaaatatattaatctgggaaagcagataatcgtcaaagacaatatacatggctatctggttaacaaaatcgttttctttttaatgaatttgagacagaagaagggatgtgtgtattttgcacgctgtggaactagcgataaagataactacatgcatgatgaagaactaaacgatgaaggaatccattattcaaaagtgctcaaaagttttgtgctcaaaagaattgaacagaagagactggcaaagagaaactcagaatctttagttgaagtaatggatggaaactttgataaagatttgaagacatccttgatagtttggacaggtccgagaaaaagaacccacgacactggcctttttttttcaaaagaaggtattaaggttcagcaacgatctgaactgagacagttgaacccagggagtatcgccgatctcactgatgaccaaataatgaagaaatatccttcggaatatgcagaatcattgaaagacccatatcatttccgattccccagagcggagtcttaccacgacttagctgttcgtatggaaccattgttattagaaatggagcatacaagcaaggatatcctcattattgctcatgagtcaacgttgagagttttatatggctatttaatggcttgtacttgcgttgaactaccaaacttggacttcacaagagataaattggttgaaatttcatttagccccttttgcaatacggtggaactattggacatccctttaacagattaa

SEQ ID NO: 4793 - DNA, 726 bp, Saccharomyces pastorianus
atgtcgaatgtgctctctgatgacgaggagctcctcaatgggctaggaagtgagattataaagccttttaaacaaggtaatcatatggcaagaaccgtcaaaaggtgggtaagtaacaaaccttctaccacaacaggatctgtaaacatcaacgttgatggggtgcatgggccagtaaatacggaaagttatatatcccctggacaactttactccacggactcaggtaatctatttcacgctggaagaattctcgtcgtcctcgttggccttcccgcaacatctaagacattgttatctgtggcgattacgaggtatactagatggttaggagtcaggactaaatcatttcatttctcagagtataaaaaatccgccaaagatgtaccttctgattatttctgcgtagttccaaagtcaaaagagggggtagaatttaatgaaaaacttcgcaggcggatgttagacgacatacttttattttttaatggcacttctggtcaactggccatttatgatgccttgaatattcgtaagattgatagaaagaacttagaagcaaccttctgtgaaatcggtgttaaagtgcttttcatagaatcaatcgtatctgatcaagaaatcatgaataggaatatagcgctcgtattgcagtcgagcgattatagagacctttcaacggacgatgctgttgacgaatatatgaggcgtttagcggggatcctc

SEQ ID NO: 4794 - DNA, 183 bp, Saccharomyces pastorianus
atgctcattgtttgtcccagtttgtccatgacaaaggtggaaatggaagcagatgtttcagctacagtgtcagtggcgtattctaccatcgtggttaaagcggaaaaagcagaggcacgagcattgaactcgttgtctgctctattggctgcactgattaagccggccacgagagcaggatag

SEQ ID NO: 4795 - DNA, 900 bp, Saccharomyces pastorianus
atgtcgacgaacgcagactcagctggtaagaacatcaagtatccgtggtggtatgggggtgcggcgggaatctttgcaactatggtgacgcatccgctggacctgtcaaaagtcaggctgcaggcggctcccttgcccaagcctactctgttcaagatgctggagagcattctggcacacgagggtgtgctgggactatactcaggactgagcgctgctgtgctgcgtcagtgcacatacaccacggtgcggttcggtgcttacgacatgttgaaggaaaatgtaattccgcaggaccaggtgaccaacatggcgtatctactgccctgctcaatgttcagcggcgccatcggtgggcttttggggaactttgcagacgtcgtgaacatcaggatgcaaaatgactctgccttggagcccgccaaaaggaggaactacaagaacgctatagacggtgtttacaggatataccgccatgaaggcgggctcaagacgttgttcactgggtggaagcccaatatagtcagaggtatcttgatgactgcgagtcaggtcgttacgtatgacgtgttcaagaactatctggtcacgaagctcgatttcgacgaatccaagaactacacacacctgaccgcgtcgctgttggctgggctggtagccaccacggtgtgttcgccggcagacgttatgaagacccgtatcatgaacggcagcggggaccatcaaccggctttgaagatcctggccgatgccatccgcaaggagggcccctctttcatgttcaggggctggctgcccagtttcacaagactgggtcccttcacggtgttgattttctttgccattgagcaattgaaaaaacacaaaatgggcatgccaaaggaaatagaagataagtag

SEQ ID NO: 4796 - DNA, 108 bp, Saccharomyces pastorianus
atggaaataggtaagacgaatgatgaagcagcatcgaccattatatttcctaaattacctcttgacgcttgtgatgttaaatcgtcaataatggttggtatattgtag

SEQ ID NO: 4797 - DNA, 210 bp, Saccharomyces pastorianus
atgttttcgatggtttcctccacttcctcgtattctagttttcttttcttgttggtgccggaccatctgttcaacgactgttctaaacgtgggtcacctgagtttattattctttcatttactattacactgggacccctaaaccataatatttcacctttcgtctttttccatggtaacatctcttctcttccagatctcttggtttga

SEQ ID NO: 4798 - DNA, 894 bp, Saccharomyces pastorianus
atggcagtgaaacaagtggagattaaaaacaacaatatgggtgcagccacagataataacaacaataacaacaacaacaacaacaactactacaagcaaaccaagacagatgaggataacgttcaggaggagcaacatcagtcacggttacaaaatcagcagcaggagaaatcagaggatgtcggtgcagtaaatcatccaaaaactaatcaaaatattcataaaaagatggttgatgctctgcagcatgaaatgaatttgttaaaggaactgcatcatgaaaacattgtgacctattacggtgcttctcaggaaggcggaaatttaaatatctttctcgaatacgttcctggaggttcggtttcatccatgttaaacaactatggcccatttgaagaatcattaatcactaattttacgaggcaaatactgattggggttgcatatttacataaaaaaaacattatccaccgagatattaaaggtgcaaatatcttgattgatatcaaaggttgcgtgaagatcaccgatttcggtatttccaaaaaattgtcacctttgaataagagacaaaacaaaagagcttctttgcagggctcagttttttggatgtcaccagaagtcgtcaaacaatccgccactactgctaaagcagatatatggtccactggttgtgttgttattgaaatgtttactggtaagcatccgttcccagatttttcacaaatgcaggctatttttaaaattggcactaacacaacgcctgaaataccctcttgggctacacaagaaggaaaaaatttcttgagaaaagcgtttgaattggattaccaatacagacccacagctcttgaattactacaacatccatggctggatgcgcatataatttga

SEQ ID NO: 4799 - DNA, 1266 bp, Saccharomyces pastorianus
atgagtgaaggataccttatgcaaaatataggaggcactgatctactagttaatgatggaaaggcaaaggatctaccctttgtagagtcatttttggtagaaattggctgtgagaaatacttgaataaatttatccaatgtagtgttgtcacagaagaagaaatcaagtatttggacaaggatattctcaccgctctaggggtcaacaaattaggagacagactcaggatactaagaaaggctaaatcatttcagagaagcaaacgcattgaacaagtaaaagaattgaaaaacctcatggaaagggtaagttccctatctacttccacattgactatgaactcggacttggctcctgaaaaacactgtgttatattcattttaaacgatggctctgctaaaaaagtgaatgttaacggttgttttaatgctgactctattaagaagagattgatcaggagattgccgcatgaactattagccacgaattctaatggagaactcactaaattggttcaggattacgatgtatttgtactggattacgccaagaacgtgctacatctgctgtacgacgtagaattagtaaccatatgccatgccaatgatcgagttgagaaaaatagactaattttcgtttctaaagatcagactccaagtgacaaggccatatccacatccaagaaattatatctgagaacattgagtgcattaaaccaagtagggtcatcttcgtcgaacttactctctcaaaacaggacaatttctaataccaattcagaaggaaaactcaagattgacaataccgaaaaagacagaattaggcaagtttttaatcaaagaccccctagcgagttaatctcaaccaacttagcagggtacttccctcatacagacatgaaacgattgcaaaaaacaatgagagaatcgtttcgtcattcagctatgctaagcatcaatcaaaacagacctttgagcgccgaatcaaacaatgttggggatatcttgttaaagcactcgaatgccgtggatatggcactattgcagggtttggaccaaactagaataaataataagctcgacacaaccaaaattccgaagcttacacataaaagcgctgacagtaaagatgtcatatctgatcaattggaactgctaagtgttgaatctgatggagaagaagattatgatttccttggagaagacagcgaaatcgtttcgttaccaacaaaattgctacaccaagaactggttgaagggtgctga

SEQ ID NO: 4800 - DNA, 306 bp, Saccharomyces pastorianus
atgaactgtacaaatagtaattatccgaaacgtacacgacccacgaagatgccccaaaagccgcttaaagtcactaagaaagtcaaagacccacgtagggttacaaagaagcagaaaaacttaaggaaagctgctccgttgcaattgaaatctaaaaagaaatcattacaatatatgaagaaattaagaaagagctcctctcttacggaaactaccgaaagattggttgcaagtaaagtcggccacttggagctgttgaggggtactagaaaagaactggaaaagggcaaaaaagcttccaaataa

SEQ ID NO: 4801 - DNA, 147 bp, Saccharomyces pastorianus
atgacccgttcttctgttttagccgacgctttaaatgccattaacaacgccgaaaagactggtaagcgtcaagttttgttgagaccttcttccaaggttataatcaagttcttgcaagttatgcaaaagcatggtatgttttactaa

SEQ ID NO: 4802 - DNA, 1776 bp, Saccharomyces pastorianus
atgacaaagaggagaagcctctatatggttggttctaccttaacaatagatcatttacctccagaaatatggctgctcatttcgaggttactgcagacatctgatttgcacagcctatgcttaactaacaggaggctgtatttgacaatagttgccgatgaaatttggaaaaaacggtgctacgatcgatggattattcaggagaacttggatattttagccgataatgattacgatccaataccagtgtgtcagtggcattcttactatttacaaagagcaaagtgggaaaacaaaatattttctttattgtgggaattaaccatggagacgcagcctcaagctttcagagaaaaatactttcatatccttcaatttgagcatcacaaattggccacgttccttcacaggatcattaaacaaggttatatccctaataaaaggcggcttgatttacttacatatgccaattatctgttgaagaatataaggcataagtatgtattccctttattttatccaatgaatgccacagaactgaaagacttaaacacaatggcttcaagagatgcggaaatgatatacttaagactatccgccattgatacttctttttatgatttattggattccagagagtttgtcttgaatggcatatgttccagtttgcttcacaggtataaaaaaattgaaaagttcttggaattacgccctgtagacagagtttcaaagttgatttcaatgagtacggattatctcgactgtttttcacaactcagtgatatagaagatcaaatgggcgatagagatggggaaagagagctgcatagagaagacttcatgttactaagagtatactcccgagaaagtcgaggctataaaactattattctggcaatcatacaaactattgccaagagatataacgttgaatcgtatcttgcccgagatcatttggtagtcaccgaaccagatttcccaggtggtcaagctttcgtgactgtcaatgaagattttcagccatatatatttaataaggaagatctgataagcgtttggtctagtaattaccccaattcagcaaacttcgaaactgcagctctaccagcactgttagaaccaatatcgatacaacatctccttacggaattcttccgtgaattactacgatgcaagcccaggccatttgaagattatcctaatagagcgcatggattacgcgatatgtttccatatggaaaagtggaagttccaagggatgtaaccatgtactttgcattcatattcgatctttttgatgctatgtttgaatctggaatgacaagcttgcggggccaaatgttaagagacctattgaattacgtgaatgccaataatttcggcgatttaaatattatcattggacagaatgcccttgaagaaccgaatgattgctggtgcaataaaagagactacgtccttttagatgatgatgataaaatcgggtacttcttccaggatattgaaacccaggataccttatgtgctttaaatcaatataaggtagacgggaaagtgttcataacgacaatagatattttgggtgatataagagtccgcctagcagaggggctgatgccctttcgaggagattgtgataagttgtgggggagcttttccccagtggttccacgaactgactggggtctctttttcaaaggctacgacagtgaaaagcagagaatgcaactcagcgcttacacacaggagaggctctttgatcttatagataaataa

SEQ ID NO: 4803 - DNA, 711 bp, Saccharomyces pastorianus
atgcataacctgtttttgacatctatttcactggtcttctggctgctattgttggagcaattgattcctatggtgtaccgtcatggcctgttctggtccatctgttccgaagaagccttcgcaccaaaattggttactatctactatttgaactatttgaccaaattcttggaattggttgacactgtatttttaattttgaagagaaagaagctactgtttctacacacttatcaccacggtgccaccgctttgttatgttacactcaattgatgggtcgtacttccgttgaatgggttccaattttattgaacttgggtgttcatgttatcatgtactggtactacttcttaagttcatgtggcattagagtttggtggaaacaatgggtcaccagattccaaatcatccaatttttgattgacttggtctttgtttactttgctacctacacattctatgctcacaagtactttagtcgtatcttaccaaacaagggtacctgttatggtacacaggatgctgctgcctatggttatttgatcttaacatcttatttgctcttgtttatctccttctacatccaatcttacaaaagaagcggcaaaaagactgctaagaaagaatccgaagtatctggttccgttggatctggttcttctactggtgtcaagacttctaacaccaaggtctcttccagaaaggcataa

SEQ ID NO: 4804 - DNA, 333 bp, Saccharomyces pastorianus
atgaatactactacctctgctgtcgcagccgctgctgcggaccagttccaggctttgaactcttcctcattgggtttcttaaagtttcatattccttccatcgaaaatccatttggtattgaattgtggccgatcttctccaaggtttttgaatacttcagtggctatccagccgaacaatttgagttcattcacaacaagaccttcttggctaacgggtaccatgctatcggaatcatcgtcgtctattacatcgttatcttcggtggtcaagctatcttacgcgctttgaatgctaccccaatgaagttccactatggtttgacatgctaa

SEQ ID NO: 4805 - DNA, 141 bp, Saccharomyces pastorianus
atgcgtccaacggctacaaaaaacaccgcaacggcgaaaaatggcgcaattattggtcgcccggtcacctcgcacggtcgcgcagcgctactgggatcaacaatcaataaacaactcataacacgagccatcaagaggtga

SEQ ID NO: 4806 - DNA, 225 bp, Saccharomyces pastorianus
atgttcatgttgggcagggccgggtgggctgaggcggacgaggcctcaccattgtactgcctctcggctgccttgataaggttgtcgaatgacgaaatggggggcaacgtaacgtggttcatagcgctattgtttgcattactcatcgctcgctgcacatgccacacaaaaaacacacaccctgatacctcgaaaccaatgcactgccccagtacgcatcgctga

SEQ ID NO: 4807 - DNA, 1308 bp, Saccharomyces pastorianus
atggctcgtgttatgagttgtttattgattgttgatcccagtagcgctgcgcgaccgtgcgaggtgaccgggcgaccaataattgcgccatttttcgccgttgcggtgttttttgtagccgttggacgcatggcagtaccatctggagcaaagcaacggtataaagaagactggctggttggtcagcgatgcgtactggggcagtgcattggtttcgaggtatcagggtgtgtgttttttgtgtggcatgtgcagcgagcgatgagtaatgcaaacaatagcgctatgaaccacgttacgttgccccccatttcgtcattcgacaaccttatcaaggcagccgagaggcagtacaatggtgaggcctcgtccgcctcagcccacccggccctgcccaacatgaacatcagcaacggtagcgccagtgcgggcgcatcgtcgtcaatgctgagctaccagctgcttccgcactccaacgacgtgtcccgatcgaactccagctcgagctttctgccctccgcgcagcagccggcggatggatcgacttctgcatccgagacctcttcctctgcgtctccctcacgctccatatcaccgcctttgaagatggctgcaccttcgtctgccggtggtgctggtgctggtgctggtggcagtgccccccacagtatcaaaatcaacaagccaagaaagaagaagcaatgcccgatttgccgcaacttctatgctaacctgactacacacaaggctacgcatttgacgccggaggataggccccataagtgccccatctgccaccgcgggtttgctaggaacaacgatttattaaggcataagaagaggcattggaaggatgaaatactgtcccagtcaggagcgctatcgagccctgccaatgatgtcacgggcgggtctgtttcgcccaccgatgatgatacccatgaaaagatgacaccgatgaattccgtcacggattatgcacaattgaagtcgctgcaccagataaaggggacgttcaagtgtccattcaactccactttgatacaactagatatggacatgtatccgtacaaattcaagcctttgaatttcgagacctccaattgccaccaaaccggcgtgttctcacgttgtgacacattcaaaaaccatttaaaggctttgcatttcgagtacccacctggcactaagaaaaaggatagaaacatcgttcctggtagatgtaagcattgcgggctgaaatttgagaatgtggacgtttggctcaacgaacatgtggggaaacagtgcggatataaataccattaa

SEQ ID NO: 4808 - DNA, 321 bp, Saccharomyces pastorianus
atgacgaccacgagcgcctggcccaaaatcagaatgatggcgcacaccttctgggcaatctggaacaactctctgtcttgcttgttttcgagcctgatctgcaacagctgggtgccctgcaagaactggaagatcatcgacgacgtgatgatgggcgagacacccagctccagcagcgtaccacggttggaggccagcatggcacgcaaccagtacagagggtccgaggtttcactggacacgatcccgtacagcgggatctggcccaggattaaaaagatcagcagcgaaacacctgtccagatgagcttctggttgtaa

SEQ ID NO: 4809 - DNA, 198 bp, Saccharomyces pastorianus
atgagagagcaggctcaccaaattcaaaagaattttgttgaagtactcgatttattgaaggctaacgttaaggagatttattctattagcgaaaaagacagagagagagttaatgaaaacggggaagtttactacatcccagaaattccggttccagagatccaagatttccccaagagtcacatcgttgatttttaa

SEQ ID NO: 4810 - DNA, 3333 bp, Saccharomyces pastorianus
atgcgtaatcttattaccctaaataagggtaagttcagaccagtgacctctactgcggaagatgatgaagatgatttacctttagctttattggactctgtgtttgacacgttatccgatagtattacctgtgtacttggttccactgatattggtgctattgaagtgcaacagttcatgaaggatggatccaggaacatcttggcttcattcaacattcagacctttgacgacaaattactttctttcatccattttgctgatatgaaccagctagtgtttgtcttcgaacagggtgatattgtcactgccacttatgatcctgtcagtttaaaccccacccagactttgattgaaattgtgggtaccatagataatgggatagcggctgcacagtggtcctatgatgaagaaacgctggctatggttaccaaagatcgtaatgtggttgtgctaagtaaatcctacgaacctatatctgagtaccatttggaagtggatgatcttaagatatcaaagcatgtcactgttggctggggtaagaaggaaactcaatttagaggaaaaggtgcgcgggccatggaaagagaagcattagctagtttaaaagcatccggcttggtcggtaatcaactcagggatcccaccatgccctatatggtagattctggtaatgtgacgtctttggacacccatgaaaccaccatctcttggagaggtgattgtgattactttgctgtatcttctatcgaagaagtgcctgacgaggatgacgaaacaaaagtggtaaacagaagagcttttagagtattcactcgtgaaggccaattggatagtgcttctgaaccagtcacaggaatggagcatcatttaagttggaaacctcaaggttctttaatcgcgtccatccagaggaagaccgatcttggtgatgaggattcagtagatttaatcttctttgaaaggaacggtttgagacatggcgaatttgatacaagattgccattagacgagaagataaagagcgtatgttggaatagtaactcagaggcattagccattgttttagtagatcggattcaattatgggcatctaagaattaccattggtatctaaaacaagaactgtatgccagtaacatttcttacgttaaatggcatccagaaaaggatttcactttaatgttttctgatgatggatttgttaacattgttgattttgcctacaagatggcgcagggcccaacattagaaccattcgataacggtacatctcttgttatcgatggaacaaccgtgaacatcactcctttagcccttgctagtgcccctcctccaatgtattaccgtgattttgaaacttccggtaatgttttggacgttgcatgtagtttgtcaaatgaaatatatgcagctatcaacagggatgctttggtatttgcatccatacctagtattgaagaaatgaaaaagggcaagcatcccaaggtagttcgcgaattctttaaatctgagtttacaagtgaacttgactctttgagacaagtagcctttataaacgattcagttgttggtgttctgcttgacacagataacctttctagaatagcacttttggatattcaagatattactcaaccaacacttataactattgtggaggtttatgataagattgttttgttgaggagtgatttcgattacaaccatctggtatatgaaactcgtgagggtacggtttgtcaagtggatgcggaaggtcaattaatggaaattactaaattcccccagctagtgcgtgacttcagagtgaagagagttcataatatgttatcagaagatgataccaactggtctactgaaagttcggaattggttgcattcggtgtcacaaataatggtaagttatttgcaaaccaagttctcttggcttctgcagttacttctttggaaatcactgactccttcttgctatttaccacagcacagcataatttacaattcgtgcatttgaattctaccgacttcaaacctttgcctttagtggaagaaggtgtcgaagatgaaagagtgcgtgccatagaaagaggttctgttttagtatctgtcatcccatccaaggcttctgttgtactgcaagctacacgtggtaatttagaaactatctacccaagaattatggttctagctgaagttagaaaagatattgtggcaaaacgttacaaagaagcgtttgttatttgtcgtacacatagaatcaaccttgatatcttgtacgactatgcccccgagttgtttatcgaaaacttggaactatttattaaccagattgaaagagtcgattatctcaatttatttatttcctgtttgtcagaggatgacgttacaaaaacgaagtatagagagactctttattcaggtatctcaaattcatttggaattgaaccagcaccacttacagaaatgcaaatgtacatgaaaaagaaaatgtttgatcctaaaacttctaaagtcaacaaaatatgtgatgctgtgttgaacgttttattaaataatgtcgaatacaagaagaaatatctgcaaacaattatcactgcatatgcgtcccaaaatcctcaaaatctatcagatgcattgaaactaatcagtgaactaaaagacccagaagagaaagacttttgcgttacttatttatgtttcttgcaagatgttaatgtggtctacaaggtcactctatctctgtatgatgtcaatttagcattattagttgcccaaaaatcacaaatggatcctcgtgaatatttgccatttttacaagaattgcaagacaacgaacctttgcgccgtaaggtcatgattgatgactatttaggtaattacgaaaaggctttagagcatctttccgaaattgaaaaggaaaaagatgtttcagaagaagtaatacattacgttgaggctcatgaattgtatagacatgctctagcactgtaccgttatgattcgaagaagcaaaatgtcatttataacatttacgcgaagtacctttcatcgattcaatcgtatacggatgctgccatagcatacgaaatgcttggaaaattcaaagaggcaatgggagcgtatgaatcaggtaaaagatggcgtgaggctattaccattgctgttcagaaatttccagaagaagttgaaacagtcgctgaagatttgattacttccttaacatttgaacataggtacatcgatgctgctgatattcaactagaatatttgaacaacgttaagaagctgttactctatattgtaaggcttacaggtacgatactgcatgcctag

SEQ ID NO: 4811 - DNA, 192 bp, Saccharomyces pastorianus
gagcaggctcaccaaattcaaaagaattttgttgatgtactcgatttattgaaggctaacgttaaggagatttattctattagcgaaaaagacagagagagagttaatgaaaacggggaagtttactacatcccagaaattccggttccagagatccaagatttccccaagagtcacatcgttgatttttaa

SEQ ID NO: 4812 - DNA, 219 bp, Saccharomyces pastorianus
atgcggaagaacacgttagatatggtcagtgtcgggatcgtgtgtctcgtgggcatctacacaggcacgaagttctttgagcccatcgtgatcgatagattgcgcaaggacgggaacctgagatcggacgttcccatcccggactatgatagggacgggaacttggtgatgcccccaccgcctacaccgcctacacaatcgccaccaccggaacaatga

SEQ ID NO: 4813 - DNA, 852 bp, Saccharomyces pastorianus
atgaataatgagcttttcaataactcaagcctgaaagttccttcaaaagatgtaaaagttgttaacggagtcgggtatataaagagtgataggaatttctctcaagccaactctatttcgatacaagacggggatataaggacaaggcccacatcatcagcaacatcgacgaggcagccttctcgcatggcgaatggtatgagagttttctcatgtccgtatcaaatggggctacctgatggtgaaagtagtatgagggtggaagtgagaagtcgagatttaaagcagatatacagaaaggattatttatttcgatccggcagccaaaattttgacaaggtattcctagtcatggaagggaatatatcaagtttgagcaagatgcaaattgtaccacgaagaatacagctaaatttgttagaaacaacaacttatttatcacagggaatagcaaacgggaactattcatctttgaaactgattgaacttgatttgaatcagcctaaatccaataagccccttctgaacttgaatgaaatacgggagagttctgatggttccgtgtttgagtgtgagttacgattgagggatcatcctattttaagaaagctggtgtttaacgaggaggattacaggcaccgtgggaatagactttatagtttcaaaacatgcacaataaagagaatatttagtttccaactattgatcgaatgggaaattaatggaattaggaagcaatctgaagtaaatatcaacccggttcaagtattttgtcaaatacgagagcatgttgaggctgaaataccgcctagatatgtgctgccaccaacgtatacggagatggcgacttaa

SEQ ID NO: 4814 - DNA, 675 bp, Saccharomyces pastorianus
atggctccgaaagtcaaagtgtctctaaacccaccatataatggggatttttacagctctaatgatcaaatgtcaggagtggttaatcttcaattaaaaaaaccactgtcgataagaaaaattaccgtcatattgaaggggttctcagagactttgacaaagattgaccaagaatatatgtttcagcagaacggtatgatgatacctgggcaagataataggtccttccatactttgttaaagtttgaacagagagttttccctccagataatgtatggaatgctcttgatggatcttcaaagccgttcaaagttaaaccaggtgcgtatgactacagtttccagtttgacaagtttcctaaaaaacctgaatgcctgaaaaatcatactgcaaagacaatagcgtttgtgacaaggagcaacgcacggcttccacccacgttcaacagccattggcaagaattcaataagattgataatttggatctatatttttatgcgtttggaaaggtcatttatatggtacaggtgcaaatagagttgggaaaggcagcatcttggtttaaaccgttccacagattaatcagggaaatcgaaacatttgaatttatacctgatccgaagaaccttattatagaacccgatgaagatatgatgaagaagttgctggtttga

SEQ ID NO: 4815 - DNA, 1476 bp, Saccharomyces pastorianus
atggtgttccacaaggtgcaatcccagttagactacatagatatgtccgaatcattgagaattgaagcattgagagtggaagaaatgattaaatattcttttagtgaaaatgctaaggaaactttacaaccagaacatgaaaaacaaattaagctattgcaaggagaattacaaactatagaatataagagctgtgagatctgtgataatgatatcgaaaggtttttagaattaatgctaaagtacaaagaggcaacagtaaacctaatgcaagaaatggtcaaatctccttcaattctacatattctgaaagaaggaagactcgttgcgtttagagatacaaacgattgtctcaaactagggtttatatttaaagtttcgttaaaggatgccgtttgtgttattatgacgttcacaaaagcatttacactttcaaatggtaagccaaatcatttgatatactttccaaaagcagacgggtacagaaagaggaatttccccaagtttgagaaagccgatttttatatggaagaagtccctgtaaccgctatagaggtaatcacaaagcgcaaatttgccgctccattaggtaaagtaatgaagaaggatgccaccgctctaagtgaattcaaggccgaaatcagtaacattttagagggaaaaacactcaaagaagcaatcaatattgaaaagcaaggtttgaaaattcatcaaatactgctagaccgtacaaacattagagatgagatatttgaactaaaaagcatcaaatgccctggtttgagcgaacatattgttccgaggtacaaggcacatgctaccgaaaacaagatcaaagagttgtatcatttaatgtctgaccaaaacttaagtctactacctgattatgaaaagagactagctgttctaaaagatactggatttatcgatgagaatcataatgtgttattaaaaggtagagtggcatgcgaaattaattctggttatgaactggttctaactgagttaattttggacaacttcttgggaagttttgaacctgaagaaatagtcgccttactatcggtgtttgtttacgaagggaaaacaagagaagaagaaccccccattgtcacaccaaggctagcaaagggtaaacaaaaaatcgaggagatttacaaggaaatgcttggtgcttttagtacacaccaaattcctttaactcaggatgaagcggagttcttggataggaaaagatttgctatgatgaatgttgtgtatgaatgggctcgtggtttatcgtttaaagaaattatggaaatgagccctgaagccgaaggtaccgtggtcagagtcattacatggttggatgaaatttgtcgtgaagttaagactgcgtccattattattggtaattctacactacatatgaaaatgagcagagctcaagaattgatcaagagagatattgttttcgctgcaagcctgtacctgtaa

SEQ ID NO: 4816 - DNA, 2436 bp, Saccharomyces pastorianus
atgacgaagggatttaataccagctctatacaggaactatacacgtctttaaaggaaatcactaatggtgcagacgtggagcttttcgaagatcgtatcaccaaattagattttgggagcagtgacgatttaggacacgccaatgacaccataaaagacagatttttgaagccttcaaatgttcttccttggagtttattagatatggtccaagacgtcccaaaaatgaactttttagacgatcactctgataagttagactacaaggagctgttgaaaattcctaacccaattaatagaacatcatatcagttcaaaagaacaggcctagagggtaaaatttcaggctataaagaagaggtcaacttgaaggaaatcgctagtgccaatgcatcaaactcgctgtcaattaccagaagtatcaatcataaccaaaactcagtaagaggttccactgcgcaattacccttcactccaggcggtatccccatgaaatccgtcaaaaaaagctcggaacaaaatggcacatcagcaatggccaacgccaccaaactactgcacaaggatggtcgaggtttatttgacattccagatggcatggaaagaggtatcaatccagtggataccgttgttgataatgaggatcataacgaagaattgaaagagttgaagcaacttgacgaaatagataatgaactagacatcaagatggagatatacgaagcaaaggtgaagtcggaggaaagctccgataaaacactttccgaagaaattatagaggaagctaccgaagaaacaacaactaataacgccgaagatgcagagatcgatgaactattaccaattggtattgactttggcagaacaaaggcgatttctaagaatgtcaccgtaaagaaggaatgggctcatgttgtcgatttgaaccataaaattgaaaactttgacgaattaattcctaatcctgccaggacgtggccttttgaactggatacgttccagaaggaggccgtttatcatctcgaacaaggtgactctgtttttgttgcagcgcatacatctgctggtaaaactgtggttgcagaatatgcgattgccatggcacacagaaatatgacgaagactatttacacatcacctatcaaagctttatctaatcaaaagttcagagactttaaggaaactttcaacgatgtcgatattgggttgattacgggtgatgtgcaaatcaatcctgatgcaaactgtttgattatgaccacagaaattttaaggtcgatgctttacaggggtgccgatcttataagagatgtagagtttgttatttttgacgaagtccactacgttaacgatcaagaccgtggtgttgtttgggaagaagtaatcattatgcttcctcagcacgttaagtttatcttgttgtctgcgacggttccgaatacgtatgaattcgccaattggattggaagaacaaagcaaaaaaatatttacgtcatttctactcctaaaagacccgttccgttagaaataaatatatggaccaaaaaggagttaataccagtgatcaatccaaactcagaatttctggacgccaatttcaggaaacacaaagatatcttaaatggagacagtacaaagggagcccctccgaagacggatagtggaaggggaggctctacagcaaaaggtggacgtgggggaagtaatgctcggggcggaaggggaggccgtggtaattcgacacgcggaggtgctaaccgtggtggctcaagaggtgctggcgcaattggctcgaataaacgtaagtttttcacccaagacggtccttctaaaaaaacatggcctgaacttgtcaactacctaagaaagaaggaattgctacccatggttgttttcgtatttagtaaaaagagatgcgaagaatatgctgattggcttgaagggattaacttctgtaacaataaggaaaagtcacaaatccatatgtttatcgaaaaatctattactcgtttaaaaaaagaagatagagatttgcctcaaattctcaaaatcagatccttgctggaacgtggtatagctgttcatcatggagggttgttgcctattgtcaaagaattgattgaaatcctattttctaaaggttttattaaagttttgtttgccacagaaacatttgccatgggtttgaacttacctacaaggactgttgtttttagcagtattcgtaagcatgacggcaatggactgagagaactaaccccaggagagttcactcaaatggctggtagagccggtcggagaggtttagattctaccgggacagtcatcgtcatggcgtacagttctcctctatctatcactacattcaaagaagtaaccatgggtgttccaacaaggttgcaatcccagtttagactaacatataatatgatcgac

SEQ ID NO: 4817 - DNA, 2025 bp, Saccharomyces pastorianus
atggagcaacagacagaaaagcgttccattgtggaggacaacgattcaagcgtgaagagacaggatacttcctggtcgaaaggtgttgctcatcttaagcccgagtatatcgtaccgtttaagcaaaatgcacttcaagaggcccctgtttatgacgaagagatgtcttccgatagaatggtagaagaactgtccggtaacggtgggaacaataagaagaacaaaaaggggagaggtaagaagcgtggccaaaacaagaatagagataacagacaagtcaaggaacaaaatgccctgtgcccccgcttgatctatggagatgcgtccaaatgttcctttggtgatagctgtaggttcgtccacgatatcaatcagtatctttccacaaaaaagcctgaagttgaaagtgacatatttcctatatgcccggttttcagctcattgggatattgtccgatgggattcaagtgcagatttttgtcatcccatttaaacaagggagaaaatacacttatatcaacaagggacgtggatgtagatactcaaaccatctggtctgttaggggggaagtcaatcatatttcacctggaaagaaactggatctaataaagagaaggttcccattccctaagagtaacgaagtgttggaaatcatcgactctttccaacaggagttcagagactctgcgaagttagacgaggaagcagaaaccaagcccgtggaaaaggaacaaaagcaagaatctcaggagccaaaagcccaggaccaagttgctcaactggaagagagagaaaaagagttcgcggaacatagagcgaaacaacgtgaagtgtacttgaaatacaaggacactcgttactttgctcaagagaaaaagcccttggatctgcatcgtaaaaaaatcgtatcaccattaactaccgtgggtaatttaccataccgtcgtctaatgagaaaactgggcgcagatgtaacatactcagaaatggctttggcgattcccttgatccaaggtaccaattccgaatgggcgctacccaaggctcataagtctgaggtgcctggttttggtgtgcaagtggcttgttccaaagcctggcaggcagctaaggctgcagaagcacttgtcgattctgttagcgatatcagcgaaatcaatttgaactctggttgccccattgacttgttgtacagacaaggttctgggagtgcgctactggacaatcctgcaagaatgattcgttgtttaaacgcgatgaactatgtctcgcaggatgttcctatcacggtgaaactcagaacaggcacaaaagacggccatcctattgcggaaggtttggtgaaaagattagtcaacgagaccgacgtggcagctattaccttacacggtagatccaggcaacagaggtacacgaaacaagcggactgggaatacgtgggccaagttgctgatacattgagatctgcagaagcggaatttaaagaatctgagcaaggtaaggaatcacgagactccaagaatagaatccaatttgtcgggaatggtgatgtcaacaatttcgaagattggcaccgttatctagacgggaatgcgaacattgacagtgtcatggttgcccgtggtgccctgatcaagccatggatcttcgaagagatcgactctcaacagtacttagacaagacgagtactgaaagattagacatcttaaaagactacgcacaattctccatggagcattggggcactgatgaatacgggctttctcaatgccgtagattcttctgtgagttcatgtcctttttccacagatacattcctatgggcatttgcgagagatatcccgttcagttgaatgaaagaccacccaattggtgcgggagagatgacgttgaaactttaatgggcagcacggacgtcaacgactggatcaagctaagtgacatgtttttcggcaagactgatgaaagctttgttttcgttcccaaacataagagtagttcttttgccactagggactcataa

SEQ ID NO: 4818 - DNA, 1059 bp, Saccharomyces pastorianus
atgtccgtcatgcccgacccacatgctaaaatagcgataccaaagccaaagcttattactagggaaacggacccattgcacataataaagacgagaataacaacacatggtagacctgtgaacattgcaggcccaatggttcgctattctaaattaccgttccgccaattatgccgagattacaacgtcgatatcgtttattcaccgatgatattggcaagagaatacgtccgcaatgagcatgcgagaatctctgatctttctataaatgacaaagacgtcccattaatcgtacaagtcggtgtgaataacgttgctgatctactgaaatttgtcgagatggttgcaccttactgtgatggtgttggtatcaactgtggatgccccataaaagaacaaattagagagggcataggttgtgctttgatttataactctgacttattatgtagcatggttcgagctgtgaagaataaatatggcgacaaattaagacttgaaacgaagataaggatacacgatgaattggatcaaacggtcgaactgtgccggaacttatgtgatagcggcgtggattggattacgattcacggtcgtacacgtagaactagatcatcgcaatcggttaatctggatgcgataaaatacattatcgacagaatcgccgataaaaatgtgcccgttatagccaacggagactgcttcaaattatcagatctggaaaaaatcactaaatacaccggggcgtcaggtgtcatggctgtccgtgggttactaagtaacccagcactatttgcggggcatgatatctgcccgtggggttgcattgaaaaattctggtattgggctttggagtttggcggtttgccgtttcagctggcccagcatcatttatattgcatgtttgagagtatggagttgaagagatcccttttgaaggagatgatgaatctcaaaaattatatcagtttaatagattggtttgatgaaaacttcgacttcaagcgtcacggcgaagacggatttggtgaggctatcgagatcccttataaaaaatga

SEQ ID NO: 4819 - DNA, 213 bp, Saccharomyces pastorianus
atgggtaccgaagatgtccgtctagctccagaattgaaccaagctatttggaagagaggtgttaaaggtgttgaatacagattaagattgagaatttctagaaagagaaacgaagaagaagacgccaagaacccattgttctcttacgttgaacctgtcttggttgcctctgccaagggtttacaaaccgttgtcgttgaagaaaatgcttaa

SEQ ID NO: 4820 - DNA, 693 bp, Saccharomyces pastorianus
atgacttcgacctcaaaatatccgaaaaagaacattaaatataccttaacgcataccttacagaaatggaaggaaacgttaaagaaaattactcatgaaacgctgagtaatatcgacgattcaagcggaagcgatgagaagattgaggcgctattcaccgtggctcaacctcccgttacaacttcaaagggcatagaaagagacagtggggcttccatgtctcaagtagggatgggaggtgtcaacagtacattggaaatgaaacttactgacgagagtgaggaatctagttccgctaacaatgcaacaacaaccacaaccacttcccatattctgtcgaattctagaaaatccatacagagttttgaaaactataacgtggtggaagaacgcataaaactagcccaacaaagcaagaagccattttgtaatggtgaaaaactctggagacgaagaagacagctttggacacaacacaatgaacaagaaggaagcactggcgacgatggagctgctcacagggaagtctttcaagccatacctgaagaatactatgctcgtatttataagaaattggtcgtagatgacaagcctttaagagagccactaaacctggaagacgctttacaagtaattaatacaggctggacggaaacaaggaaatgggctaatgctgccaaaggcatgccgtaa

SEQ ID NO: 4821 - DNA, 324 bp, Saccharomyces pastorianus
atgtcaaacaggaccgaagagctggaccgattacttgacaatatagtcaactcaccaaatggaacagaagcttcgaagacgttagaagagattgaaaataatcaatcatatatattagacatacaattaaagaatttactgcgacttcacgatgactcgtttaagaacaaatgtgtgttacctgctaatgacatgttagagaggtataccccgtatctggggcgcgctgaagttttacaaaaagaggcagaacttgtggatagggatctccgaatcattgagatggcttaccaactcataaagaagaaccgtgagttgaaataa

SEQ ID NO: 4822 - DNA, 1737 bp, Saccharomyces pastorianus
atggagtactggcactatgtggaaacaacgtcttcgggccaacctctacttcgagaaaacgaaacagatatttttatcgaccagtctgtaggcctttaccatggcaagtcaaagatcttgcagagacagcggggcagagttttcttaacgtcacaaagagtcatatacatcgatgattctaagcccactcaaaattcgctaggcttggagttggacgacctcgcgcatgttgattattcgtctggctttttgaccagatcgcctcgtttgattttgttcttcaaggactcctccagtaaagacgccctggagaaacgcgcggatgcaatgtgtagcaatgtcgtttccacgtgggtctgccccatttgtatggtctcgaacgaaacacggggggaatttgctaaggacactctacctttacccatttgtgtcaattgtggcgtgccagcagattacgaactaaccaggtcttcaataaactcttccaatacaacaaacacaacgtccagtgatcaatctgggtcggactctgacaaaaatgtttgttccgcttgcacttttgttaatcatcctcaaataggtaattgcgaaatttgcggccacaggctacctaacgcatccaaggtacgatcaaaattgaacaaattgagaagctttcatgattctaggatccatatcgagttagaaaaacactcactgagtaaaagtaaaagctcacattcggcatcgtcagctgcgccgtcgtcgtcgtcatcaacagcaacacctacagaattcgtacagttaagcttccgtaagtccgatggtgttttgttctcgcaagccactgaaaaggctttggaaggcatacttcatgaaaaaaataagcacatctttaatcaaaacgtagtgtctgttaatggtatagatgtgacggagacggccaacggccacgattgtgataatgatgttctatttgtagagactaagctgagtaggatcggcatagcgagtctggaaaagtccagagaaaaccagctcttgaataacgatattcttttcaacaacgcattgaccgatctgaataaactgatgtcattggccaccagcatcgaaagattatacaaaaacagcaacatagcgatgaaaaagacgacaacaaacttccaggacgaatcaacaattaatgaaccgaaagccaaaagaccgctattgattcttgatagagacaaattcctgaataaagagttgttcttggatgaaatcgcgagggaaatttacgagttcacgttatcggagtttaaagactcaaacaacgacaacaacaatacgaactacatgattgtaaccttggtagatctatatgcaatgtacaataaatccatgcgtataggtactggccttatatcccccatggaaatgaaggaagcttgcgagcggtttgaacatctaggtttaaacgaattgagattagtaaaagttaacaaaagaattctgtgcctgacaagcgaaaagttcgacgtcgtcaaggaaaaactagtggatttgataaatgaaaaccctggttctgatcttttaaaattaacacaaatcttgagttctaataattcacagtcaaactggactttgggtatccttatggaagtcttacaaagttgtgttgacgagggtgacctactgatagacaaacaattgagtggcatttactattataaaaactcttattggccccctcacactcaaataatgaacgcataa

SEQ ID NO: 4823 - DNA, 501 bp, Saccharomyces pastorianus
atggaacgagacgatcttgtcaaactattcgcaatcaacgcattggcgcccgtccgttttgttcaagaactggcaccaagcaaacactctacgagacagtgttatattgtcaacatcgcaagtactctggggatactaacgccggccaaagtagcaggctatgcagcaagcaaagcggccttgatagccttccaccaatcgtacagctttgaattacaaaacgaaggcgtaacgaatatcaggacactattagtgacaccaggccaactgaacacagcgatgtttggaggattcgacccaccgcatcaattctttgcccctgtggtagacgtgaaccatctggccgccaaaatagttagttgctgcgatctgggccgcagggggcagctcaatgagcccttttattgtagttttgcccatctcttgatgtgcataccttactcgctacaacatatcataagaagcatctctcgcatggatcgttgtcttccggatgagtag

SEQ ID NO: 4824 - DNA, 618 bp, Saccharomyces pastorianus
atgagcacgcaatatatcgatgaaacagcatttgtacaagctgaagaaggtagaaataatttaatgttccctgatgaaaagcaacaggctcgttttgaacttggcgtctccatgatgatttacagatgggatgctttggatgttgccgttgaaaataactggggtggcccggactcttctgagaaaagggattggattacaggtgttgtagtagatcttttcaagtctgaaaaagtaattgacgtcgcttcaatagaagagacattgctgtatgctatggttgatgaatttgaaaccaacgtcgaagatgactcggctttaccaattgccatggagatcatcaacatatacaatgactgttttaatgtaaattataacaaagtggagcagttatacttagagtgggaagagaagcaaaagacaaagaaagcaaaaagagtcattcacgttgaaggcgatgatgatgatgacaatgacgatcaagacgacgatgacaacgaagatgaagatgaagagatggaagaagctatgcctgatttggtatcaactaaaccggaacccgttgtagatgatgatggttttgaactggttcaacccaagggaagaagaagacattag

SEQ ID NO: 4825 - DNA, 3117 bp, Saccharomyces pastorianus
atgtcgctttcattgaagacgataatacatctggtaaagccatttgcttgcacggctaagtttagtgcgaggtatccaattcatgttattgtcatcgctgttttattaagcgccgctgcctacttatctgtaacgcagtcttatcttaatgagtggaaactggattctaatcagtattccacgtatttaaccatcaagccagacgagctgtttgatagatgtacacactactacagatcacctgtatccgacacatggaaattgctcagctctaaagaagccgccgatatttataccccttttcattattatttatctaccataagtttccaaagcaaggacaactctacggcattaccttcccttgaagatgtcatctatagtgctgatcatacacgatatgtgttgagtgaagaaccaaagatcccaactgaactaacacctgaaggcggaacgaaatggaggttgagaagtaacagtaatttaattctggatctgcataatacctataggaacctcgtcaaggaattttcgaataagaccagcgagtttgaccaatttgatttgtttattatccttgctgcatatcttacccttttctatactctctgttgccttttcaatgacatgaggaaaattggatccaaattctggctgagcttttctgctttatcaaattccgcatgtgcattatatctgtcattatacaccacacagactctattaaagaaaccagcgtctttattaagtcttatcgtcggcttaccgtttattgtggtaattattggcttcaagcataaagttaggcttgcaacattatctttgcacaagttccacagaattagtatcgataaaaaagtaacggtgagtaatattatttatgaagctatgtttcaagaaggtacctttttgatccgtgattacttattttatattagctcgtttgtcggttgcgctatttatgctagacatcttactggattggttaatttttgcatattagccacttttatgttgatttttgatttgattttgtcagctactttctactcagctatattatcgatgaaactggaaattaacattattcacagatcgaccctcattagacaaacattggaagaagacagcgtttttccaacaaccgccgacatcatatacaaggacgaaactgcggcagagccaaattttctaagatccaacgtagctatactcataggaaaagcatctgttatcggccttctacttttgattaacctctatgtgtttacagacaagcttaacgacaccatattgaactccgtgaattttgactccacgatctattcattaccaaattttatcaattataaagatattgggaatctaagtaatcaagtaatcatttctgttctgccaaaacaatattacactccattgaaaaagtaccaccaaatagaagattccatcctgctggttattgaatctgttagtaatgctattcgggaccagtttattagcaagttactgttttttgcgtttgcagttagtatttctattaacatttatttattgaatgccgcaaaaattcataccggatacatgaattttgagccgcagtccaaaaaagaaggtgataacctcagaccaaaatcagcaacgattgaattctcggatacttatagtacacctgcttcttctgacccagaagccccagtaaccgataaaaatatctcaattacacaagaaattcaaaacaacgaatgcatctatgctttaagttcccaagacgagcctatccgtcctttatcgaatttagtagaacttatggacgatgaacaattgaaaactttgaataatacagagttgtcggatcttgtagtgaatggtagacttccattgtacgctctagaaaaaaaactagatgacactactcgtgcagttctggttagaagaaaggcactttctgttttggctgaatcaccagttctagtttcagaaaaactgcctttccgaaatttcgattacgatcgcgtatttggtgcttgttgtgaaaatgttattggctatatgccacttccagtcggtgtaattggtccgttaattatcgatggtgcatcctaccatattccaatggctaccaccgaaggttgcttggtggcatcagccatgcgtggttgtaaagctatcaatgccggtggtggtgcaacaactgtcctaaccaaggacggtatgaccagaggccctgtagttcgttttcctacgttgataaggtctggtgcctgcaagatatggttggattcagaagagggacaaaacatcataaagaaggcattcaattctacgtcaagatttgcacgtttgcaacacattcaaacctgtttagcaggtgatttgctcttcatgagatttagaactactacaggtgacgcaatgggtatgaatatgatatcaaaaggtgtcgaatactcactgaagcaaatggtggaagagtacggctgggatgatatggaagtcgtttctgtatccggtaattattgtacggataagaaaccagccgcaatcaactggattgaaggccgtggtaaaagtgttgttgctgaagccaccattcccggtgatgttgtcagaagcgttttgaagagcgatgttgccgcattagttgagttgaacatcgctaaaaacttggtcggatctgcaatggctggatctgttggtggcttcaatgcgcatgctgctaacttagttactgcacttttcttagctttaggccaagatccagcgcagaatgtagagagctccaactgtataacattgatgaaggaagtagacggaaatttgagaatatctgtctctatgccctcgattgaggttggtacaattggtgggggtaccgttttggaaccacagggcgctatgcttgatctcttaggggttcgtggccctcatcccactgaacctggagcaaatgctaggcaattagctagaatcatcgcatgtgcagtgttggctggagaactatctctgtgttctgcacttgctgctggtcatttggtacaaagccatatgacacacaatcgtaaaacagacaaaaccaatgaacaacaacaaacaagtaacaaaaacccttccttgtaa

SEQ ID NO: 4826 - DNA, 312 bp, Saccharomyces pastorianus
atgttgattgcctgtggtgctatcagtgcctataacgatccatcaaaatttgtgtttaaaagttacggctttgttctaaccaagagattggttatcaaaggggttttagtaacggattatgtggatgagtttccagaagcattgaaaaaactaagtgttttcgtaaaaaacggccagatcggcttggagaattctgccactcttgaagatggtagcgctgataattttaagaatgttcccttgatatggaagggtttatttagcggtgctaataagggtaaacttattaccgaagttattaaaaacgactag

SEQ ID NO: 4827 - DNA, 438 bp, Saccharomyces pastorianus
atggtcttggctaagcaatgggttctaaaaaatttaccggctcctggtatgccattcaattttaattttactgatcctgaatgcactttcgaactaactgagaaagaactctctccagaacaactaaagagcggtgaaatactattagaaatacattacttgtctaatgatcctgctcaaaaattttggatttcctcgatggataaaaattatgcaaaaggtgtccaacctggtgaaattatccctgcaagagggatagctaaggtcttggcttctaaaaacgaaaagtttgctcctggtgattatgtctctgcaaaaactggttggactacccacgttatagttcctcaatcggatattagagaagcaagaaagttgataaagatagggtgggaaaattgtggtggtatttatcagtcttgggtggtacttcattaa

SEQ ID NO: 4828 - DNA, 261 bp, Saccharomyces pastorianus
atgcaactacaggacaagaacaacagagaggaagaaccacgaagaatcatgtctaaatatgcttggtataccagagtcacagatacgctacatcgtctaacggtgctgacgctagttggtggtacgttatacatgtccggtggcttagcttacactttatacatgaatggtaagaagtatgaacaacaagtgacccagcaaaaggcactagaggaggacaaccagcagttacaaagccccactgcctctcctgtcgaataa

SEQ ID NO: 4829 - DNA, 1386 bp, Saccharomyces pastorianus
atgactgaactaaagaaacaaaagactactgaacaaaaagccagaccacaaaacgtcgggatcaagggtattcaaatctacatcccaacccaatgcgttaaccaatccgagctggaaaagtttgacggcgtttctcaaggtaaatacacaatcggtctaggccaaaccaatatgtcttttgtcaatgacagagaagatatctactctatgtccctaactgtcttgtcgaagttgatcaagagttacaacatcgacaccaacaagattggtagattagaagttggtacagaaactttaatcgacaagtctaagtctgtgaaatctgtcttgatgcaattgatgggcgacaacaccgacgtcgaaggtattgacaccctaaatgcctgttacggtggtaccaacgcactattcaattctttgaactggatcgaatctaatgcttgggatggtagagacgccatcgtcgtttgcggtgacatcgccatctatgataaaggtgccgcaagaccaaccggtggtgctggtactgttgctatgtggatcggtccagatgccccaattgtatttgactccgtgagagcttcctacatggaacacgcttacgatttctacaagccagatttcaccagtgaatacccttacgtggatggccatttctcattgaactgttacgtcaaggccctagaccaagtttacaagagttattccaagaaggctatttctaaagggttggttagcgatcccgctggttcggatgctttgaacgttttgaaatacttcgattacaacgttttccacgtgccaacctgtaaactagtcaccaaatcatacggtagattactatataatgatttcagagctaaccctgcattattcccagaagttgacgctgaattagccaagcacgattacgaagaatcactaaccgacaagaacattgaaaagacctttgtcaatgttgctaagccataccacaaggaaagagtcgcccaatctttgattgttccaacaaacacaggtaacatgtacaccgcatccgtatatgctgcctttgcatctctattaaactacgtcggctctgacgacttacaaggaaagcgtgtcggtctattctcttacggttccggtttggctgcttctctatattcctgtaagattgttggtgacgtccaacacattatcaaggaaatggatgttactaacaaattgggcaagagaatctctgaaactccagtggattatgaagctgctattggactaagagaaaacgctcatttaaagaaggatttcaaacctcaaggttccattgagcacttgcaatctggcgtttactacttgaccaacatcgatgacaaattcagaagatcttacgatgttaaaaactga

SEQ ID NO: 4830 - DNA, 963 bp, Saccharomyces pastorianus
atggccgaccaatgtgatgggttgcaagggttcctgttcacacattccctcggtggtggtaccggttcagggttgggttctctcctactagaaaacttatcgtatgagtacggtaaaaaatctaaattggaattcgctgtctacccagcaccccagttatccacgtccgtcgtggaaccttataacaccgttttaacaacacataccactttggaacatgctgattgtacctttatggtcgataacgaagctatttacgatatctgtaagagaaacctgggaatttccagaccaagttttgacaacttgaatgggttaattgctcaagtggtgtcatctgtaacagcgtccttaaggttcgatggttcgttgaacgtcgatttgaacgaattccaaaccaacttggtcccatatcccagaattcatttcccattggtgtcatacgctcctatcttgtccaataagagagccacccatgagtccaattccgtgtcagagatcacaaacgcttgttttgaacccggtaaccaaatggtcaagtgtgacccaacgaagggtaaatacatggctaactgtctactatacagaggtgacgtagtgacaagagacgtccaaagagccgtcgaacaggtgaaaaacaagaaaacagtacaaatggtggactggtgtccaacagggtttaagatcggtatctgttacgagccaccaaccgtaataccaagttctgaactggcttctgtggatagagccgtttgtatgttatcccacaccaccgccattgccgaggcttggaaaagaatcgacagaaagttcgacttgatgtatgctaagcgtgccttcgtccactggtacgtcggtgaaggtatggaggaaggtgaattcaccgaagctagagaagacctggctgctttagaaagagattatattgaagttggtgccgattcttatgccgaagagttttaa

SEQ ID NO: 4831 - DNA, 1665 bp, Saccharomyces pastorianus
atgataataggcaaagagggatgtgtcattcaaaacactgaagtgaaaaccgcagaaaatgaagaggcttatctagagattgagaataaatcagtgctagagactgaaaactcttcgccacgtaacaacaaagaaggagctttagcaacaatggttttaacggaatctgaagatgaagtaatgaagaccgaacaacaaaaatggcaaaacccaaactacttcaaatatccatggcaagagtatctcttcatcttcacttgtatgataagtcagctcctaaaccaatcaggtaccacgcaaactctttccattatgaatatacttgcagatagttttgggtcagatacaacctcaaggtcatggctgatggcatctttcccactagtctcaggttcattcattttaattagtggcagactcggtgacatatacgggttaaagaatatgctgttgataggatatgctatgattatcatatggtctttgatttgtgggctcaccaaatattctggtagcgatactttttttattatcagcagagcttttcaagggctaggaattgcatttattttaccaaacgtgctaggtattatcggaaatatctacatcggtggtacatttcgtaagaatattgtgattagtttcataggcgcgatggcgcctattggtgcaactttgggttgcttttttgcagggttgattggtactatgaacccaaaccagtggccttgggccttttatgcatacaccataacagcagccatcaatctagcactctccatatacgccattcccaataatataccaacaaatatccatcgattttctatggattggattggatctattttgggtgtaattggtcttattttattgaattttgtatggaatcaagctcctatttcaggttggacccaggcttatattattgtgcttttaatcatttctgttcttttcctcgtcgtgtttggcgtttatgagatccattttgccaaaagtccgttattgcctcaagctatcatgaaggaccgtcatatgattcaaataatgttatccttgttctttgggtggggttcatttggtatcttcacgttttattattttcaatttcagttaaatataaggcactacacggccttatgggctggaggttcttattttatgttcttgatttggggtattgttgctgctttactcgttggattttccattaaaagagtatcgccatcagtttttttgttttttgccatggttgcattcaatgttggctcgataatggccagcgttacaccagttcatgagtcgtacttccgtactcagatggggacaatgataattttgagttttggaatggatctttcattcccagcttcttccatcatcttcagtgattacttgcctatggaataccaaggtatggcgggatcattggtgaatactgttgtcaactattccatgtcattgtgtcttggtatgggtgccacagttgaaatgcagcttgacccagatgggaaacatattctgaagggttatagaggtgctcaatatctcgggataggattagccactttggcatgcataattagcgggctttacatggtcgaaagcttcataaaagatcataggacgaaagctgtcgcgaaagataattgcggcatgagctaa

SEQ ID NO: 4832 - DNA, 1005 bp, Saccharomyces pastorianus
atggatgaggacaaattagatgctagattagggtctatcagggactccttgcgaaagaagaccaaacttgcttcgagaaaagctaaggataccctagcacagcgagttattactaaatggaggtataggaagaaagcttatgacgggagctcaatactcccagaaaggtgcaaaaatcgtgtccaattgttcgacgatttagtacatgaaagctctagtgattttgctgggttccaattacatgactcgcgggccatgttggagcgaatatgtttgacccaaaattatacgagactcatgctcattgaatgggacgttcggtgggtcaatccgctaactttagcatcgaaaggttggaaaccatatcaaggacaatccagggcccaggcgatctttaagtgctgctgttgccacgccatcatgtcgatgcacttatcaaagaatgatgacagtaccgctgattacaacaggaagttgaatgaaaaaatatggcattcgaatgttatcaataatcatctagatcagtgtccgtggaaaagaaatcaattcgacgtgaacaaagaataccatttaagttcacaaacacttattatagacattgagagaatttatacagatattgagaagataacatccggattagaaatattcaatctgaaaaggaactcatcccgtatattttactatttgactgaaaagaacatgcaaaaactggccagttttttcaattgtaacgactattctcttcttggactgttgcttctcggttacacgaaattcgagaaagaggatttggtccagtgcacagcctgctttcaccgggcatctgtcaaaaggttggaacatacagattttaatggacatgctctgtggtgtcgatattacaacaaagaactgctgtccatcatgttgctggagttgattgatgagaaggacaatgcagctacaaaaatgaatgtagaggaaagactaaataaattagagattgttctacaaactttataa

SEQ ID NO: 4833 - DNA, 765 bp, Saccharomyces pastorianus
atggagttggctgagttggatccctctttgagaacgccgatagctccaaagataacgactacagtggtaagaagccaagaccaagaagaacctgcccttttcccaggcatgaatagtaatacaaatgacaaaattaacgatgaaaaagagcaactaagttttatcaatcccaaaactggtaaagttgaacgttctgaggcgatttccaaaaaagatttagaagaagttaaaagatttcagatactttacccttgctactttgacgtgaacagatcgcacaaagaaggtagacgagttcctaaggagctggcagttgagaacccgttagcaaagactatggcagatgccgttcgtgaactaggaatactatgcattttcgaaggtgaaaagtgtcacccacaagattttggtaatcctggtagaattcgtgtccttttcaaagaaaatgggcaattagttggtggagccactagatttaaaggtgggaagaggcaattgatgaaagctgttggcgaatacatgaaaagaaatccaactactattgaatgtttaagagaaattccatatggtcctgattttgataatattgaattcaggaaaatacctcgtgtaaagggtttcaagatgaacgaaatcgtcccactacacagcccgttcttaatgggtcatccgatgacaaaatctgtctacgacgctcctcaggtaactgcagcggagaaatcattcaaggcaccaaagaacaaatacaaagttgttagaagatga

SEQ ID NO: 4834 - DNA, 2616 bp, Saccharomyces pastorianus
atgaatccatctcaaaaggatcaactgagtacttgtccctcagcaaataaactgttgcaggtatttctaactcctatggactccatcgacttggccccaaatactctgatgaatattctcatttcgccattggatgccacaactaagattttgggagacaagatcttaggcaacctatattccagattgatgaataactcttttaagttatgcaaactcttgatttccatcagaggtagtaatcatgacctaaaaccaagcaacctggaaaaactgattttcatgaactcctcaaaattgatcgacgtttacactttaccaaattacgtttttttgaaagctcaaatcatagaactactaagttatttggtggaagcgccttggaatgacgaatatccgtttttgttatccttcttgggagaatctaagtcaatgaaatttttagaagaggtcctatctgatttgaattctcctgtacaaaattggggccttttacaaaatctttacattttcttcacgactttactagagagcaaacaagatgggttatcaattcttttcttaaccggccaatttgcctctaacaaaaacagtaatgatgaatcgtccatagataagaacaaatcaattttaactgttttacaaaaaaatgctctactgctagactcgatgcccgaagaggtcagttgtaaacttttggaaacaatcacatatgttttaaacacttggacaaattctaaaattttcatcaaagactgcaaattcgtggatatcttattgaacaaattgaagaactccaaaactttgtttcaaaagaaagaaaatttgactcgtgatgagactattcatcttattaagaaatacaaattagtctcgagaattgtagaaatttttgcattgtacatttataactcaaacgattcaaatgcaaaaattctaagctttttgaaccaagcagatttatttgagctagtcagtcattttttccaaattgatgggttcgataaaacgtttcatgatgatttgaatctcaaatttcaagctcaatggcctagtctggaattaaaatcatttcaaaaaattcccttgtcaaaaataaatgaaaacgagaatttcggttacgatattcaattattagatctagtattgaaaaatgaccctaattggtgcgaacctagcatcaaccagaactattttagaaaagaaatcgtcgatgcttcattaaatttacagtatgtgaattacgaaatatctactgcaaaggcttggggtgcgttaatcaccacatttgttaagaggagcccaaatccactaagtgacagctttattgacctagtggcgcatttcttacaattgaatattgaatttggttcagacaaacagctatttactcaaatatatttggaaaggattgaattggcgttttatatcttgtattctttcaagctatcagggaagtcactgaatgaaaggaaaatagttgaactattaaacaagatttttataattttcaaatctgatgaaattgattttataaagatgattggcggatctttcaaaaacaatttctatagacctctattaagatccgccctaatccttttagagttggtcactacgggtgatcattttatcgagtcagtatctgatcaattattggagttttttgaatcggtattcagcaaaggtgtttacttgatactatctaacatcttatgccagattaataagtgctctacaaggagtctaaatgcggaccatgccacacagattgccaacttggaggaaaatactcaagatttacttttattactatcgctgttcaagaaaatcacggatttgagtccttctaagaaattcaatgttatcttagcatcatctttaaatgaggtagggactttgaaagtaattttaaacttatattcaagcgcacatttggttagaattaatgatgaaccagtgcttgggcaaattactttgacttttatctctgaattgtgttcgattgaacaaattgccgatacatttatcaatagtggactgtatactgttttactggaaagcccactgtcggtggctatacagcagggagatatcaaacctgaattatcacccagactacataacatttggagcaatggtctgttgtctatcatcctattgttattgagtcaattaggcatcaaggttttacctgagacctgcctctttgtctcatattttggcaaacaaatcaaatcaacaatatacaattggggcgataacaaattagcggtatcaagctcattgataaaggaaaccaatcaattggttttgttacagaaaatgttaaacttactaaactatcaagaactgttaattgaatctaagaactctgatgataaggatagagtcgtagaactagtcattggtttagattcggattatgataagaaaagattaagtgcagcactaagcaaattcttgacgcatccaaagtatttgaattcgagaataatacccaccactctggaagagcaacagcttttggaagatgaaccaaagagactggaattcgtcaagggtataagcagagatattagaacattgcaagattcgctattcaagggcgcttga

SEQ ID NO: 4835 - DNA, 2226 bp, Saccharomyces pastorianus
atgcttataaacgtcttgaaccactcgacgaaacacaattttagcctagccatcccttgccgccgccagaagaaaaggactccaccagccatggctacacactcaattgggaatcccgctcaggaattatcctttacttacgtcgccaacttcatcaacgatgctgctgctgatgtttccgctgtggacgctagccaactggctcaaataagacagtttttgaagacgcatagggcaacgctcatccaaggtgtttcacagcctaagccggacgtagtcgcaccacgcggtgacaataaactgcgctccttaatcgcacatttactgcagataaacgtcgatgatgatccgtcgtttgctcattctgaggaccctggcctcgctgctaagctctttatatccgagaggtcgtccaaactacacatcctgtactcgcttctcgtccacccagatattgaccccgatgtacactctttctttgccaacgataagttcaacatagcggaaaggctgatctctttaatagcgtccatcatgcagacgtacgacactaccacggcgtcggtcttggagcaaggccggatcgatgatcaagacagtgtcacgttagattcactggttcaattgaagaatttctccgatttgaagcttgtgttgctaatcctacagattttaaacttgctcatccttaatacaaaagtacccgtaggaatcgtcaaccaatggtttcttcaatttcaaaatcaattcgtcgagtttatcagacacgtcggctctccggaaaaaaccatcgacacttcttcatcgcatttttataagtttcagaatttccaagacctgagttacctttcaaaaacgcttgtttccagaatatcgtccctaacaacaatcacgaccattttgatgctcgggctcaacaccgcagtagctcaatttgaccttcaatcacctttatattccgattcacgcactttcgaaaccatcaacgccgctttggaaaatgatttaacaaccagtatcgtgaacgaagatcccgttttccatcccatgatccattatgcttggtcctgcatactctaccatagactagcattgcaacaatcagaatcattggaaaatccagaaatagccaaatttgcgcaatttgccgaatcacgaaacattttccctgaattggacactttggcagaagtattatcgtttgatcccacctacactaccatcattacagtttttttggaattctctttgaacttcatccctataacagcatccacttctcatgttttcgccaagatagtttcaaaggccccaaggcaatttattgaaaatttcttgacgaatgacacttttgaagacaaactaagcatcctaaaggctaaattgccgctattaaacgaatcacttatccccttgataaatctatcattaatcgatacggaatttgccaatttcgaactgaaagatattaattcgttcgcgatctccaaaaatagcttaaacgacttggattacgatttgatagcagacataacagcatcatcttcgtcttcctcttcggatatcattatacctgatttgatagaattgaaatccgatttgctagtatcaccccctctagaaagagataattccaatagtttaatgtcaataccgaaatctacaaaggccaaaatactttccatcaaacaacaacagcaagaagataatggccagcagccacctattacttcaaacttgatcatctttctttacaaatataacggttggtctctagtgggtagaatattacaaaatctattacattcgtatacggaaaagggtacccaattggatcactcacaacatgaactgatgatatccataataaaattaattgctaatgtcgtggatccaaggacaaccttggagagatcaaatgaaatattatcaagcttgtcgagttctctagacactacaagcagcgctctaaataacgcgtcgatcattcaagtaatttttgagattttcgaaatttcactacaaaagaaggattataatttaatagtgaagtgttgcgaatttctgacaatgctcacaccaaattacccccatttggtctcttcttatttgaatagatcagaactattggataaatacgggaagacaggtctttccaatatgattcttggttcggttgaattatcaacaggcgattacaaattactattcaattgcttaaactaa

SEQ ID NO: 4836 - DNA, 207 bp, Saccharomyces pastorianus
atgttcacgaccccacgcgaaacggtgggcgggttcttggcggctacgtcgtcgcccggttgcgccgcacgcagcgccggcggctcgatcctcgcaccaaactgcgcttgggcgtcgatcgacacgtacgagcagaacccgtccgtggacgagaccagcagcgtcgagccgtctccggaccacgccaggtccgtgatcggcgagtag

SEQ ID NO: 4837 - DNA, 459 bp, Saccharomyces pastorianus
atgtatgggcgaccgagacaaaaccagaaacgcgcaaaaggatgctataaacgttgggtgctggaataccaactgtacgcacgttcacacaaacacacacacaaacacgcaaggatggacggatcaactacagtgttcatactggtcttggtgtgcattttcgtgttcaccgtgcagcgcaggaatgccaagcaggcgcccacgcccacgcgcaccgtgaaggacaccgctccgactcccacggtccttgccaccgaggagtcctcctcgccagagcctctgccagaagcgcatgccgcccagcgcgtgaacaggaaaagacccgtcaacaaggacatggtcgagatcgtgatgaccatggccccgcacgtgcagcaacagaaggtcgtgcaagacctcagggccaccgggtccatcgagcgcaccatggagaacatcttcgccggtaaactagactag

SEQ ID NO: 4838 - DNA, 1560 bp, Saccharomyces pastorianus
atgtgtggaattctattgcactattgtgcggaaaagcagccagtagacgatgaactaattgagtatccagaaggaacagaattcgccggcactacaagtatgaatgaatcttatattttcaataaaatcattccatatatagctgcaagaggtccaaattactcttctcttcgagtctccaaatcccaccaaacaagctggttctcttctgtcctatctttaagacaaccttttaccaagcagagcataaccgttgacgacagatattatctacaattcaatggtgagttgtacaataaagaaatatctgacggagacaatgatagtcaatatattgcctctttgttgcaggatttggcagaggatggggacgttattgatgttataagaatgttggaaggtgagtatgcttacactgtgtatgacgtaaagtcatcgaaattttatttcggcagagatcccattggcaggcgaagtctatcctacttggtcaattcaaacaatgaactatatgtagccagtgtgacaggagctattgaaggatttaaagattgtatagggggggttgtttacgaatatgacacccaagctaaattgttaaaggaaaaccagaagttacgtcctccatacgaagtgacacaaacggctgatttagaattaaagtcattaccagaaatatctaaaaatttatactctgtgctatatgaatctgtaaagaggagggtagagtcaatacatcctgcacatatagaaaactcacctattgcaatactcttttctggtggtatcgactgctcagtgatagcagcgttggtatgtcaaatattgaaggagaatgactataaaggtgggaaaccaattgtagagctattaaatgtgtcgttcgagaaccctagaacaggtctttcccccagtgatacagctgacagaaagctttccactaatagtacaaaagtattacgaagtttatatccggaaatcgatattaagctagtcgaagtagacgttccttatgaggaatatttgaagtggagaccctttgttatcgatttaatgtattctaaacaaacagagatggacttgtctatcgctattgcgtttttctttgcctcaaagggtaaaggcttccttagttcgcctcatggtgaaagaaaaccgtaccaacgtcaggggatagtcttgttcagcgggttgggagcagatgagctatacggtggttatcacaaatttgcgaataagccgcctcatgaactcgtggaggaactaacgagacagataaacaatatctatgagcgcaacttgaaccgcgatgataaagtgattgctcataacggggtggaggttagatacccctttttggatgaacatgttattgagttttccaccaatgatatccccattaattacaagataaacaaacttattcttcggaaagtggcttctcaatacttaaaactggacgagatagcagaagagccaaagagagctattcaatttggcgccaagagtgctaaaatgactaaagatggtaacaaacacggcacggatctattgaagtaa

SEQ ID NO: 4839 - DNA, 375 bp, Saccharomyces pastorianus
atggccaagggcaagtttgtagaatgcattgatgacatcaaaacagtttcccagccagaaaatgaaggacaaaagctactggttcctgcatctgcatcattatacatcccaggtaaaattgtggataataagaaattcatggtagacatcggaaccggatattatgttgaaaaaagcgccaatgcagcaattttgttctaccaaaagaaagtggaaaagcttaacaaggaatctgtgcaaattcaagatatcataaaggaaaagacccaatactctttgaccatcgaggcccagataagacaggctgctatcagacagcatgaagcgatgagcaagcagcaacaacagcagcagaaggatgctaccacagcctag

SEQ ID NO: 4840 - DNA, 330 bp, Saccharomyces pastorianus
atacgccaagctggccaatcggccgtcgatccttctggttcttacttcccttggaaagctaccgctataggaaaaggttcggtggctgcaaagacctttttggagaaaagatggaatgatgaattggaactcgaggatgctattcacatcgccttactaacactaaaggaatcagtagagggcgaattcaatggtgacaccatagaattagccataatcggtgatgaaaacccagagttactaggctacactggtattccaactgacaaaggtcctagattcagaaaattgacttcacaagaaataaatgatagattagaagctttatga

SEQ ID NO: 4841 - DNA, 735 bp, Saccharomyces pastorianus
atggtcgataacgaagccatctatgatatgtgcaaaagaaacttggatattccaaggccaagtttttcaaacttgaataacttgattgctcaagtggtctcatctgtgacagcgtctttaagatttgacggttcactaaatgtggatttgaatgaattccaaaccaacttggttccatatccaagaattcattttcccctagtttcatattctccagtcttaaccaagtcaaaggcattccacgaatccaattccgtctcagagattacaaacgcttgtttcgaacccggtaaccaaatggtcaaatgtgatcctagagatggtaaatatatggccacctgtctattatacagaggtgacgtggtaacaagagatgtccaaagagctgtcgaacaggtgaaaaacaagaagactgttcaactagtcgattggtgcccaactggtttcaagatcggtatttgctacgaacctccaactgctacgccaaactcccaattggcttctgtggatagagccgtatgtatgctatcaaacactacatccattgctgaggcttggaaaagaatcgacagaaagttcgacttgatgtatgctaagcgtgccttcgtccactggtacgtcggtgaaggtatggaggaaggtgaattcaccgaagctagagaagacttggctgctttagaaagagattatatcgaagtgggtgctgactcctatgccgaagaagaagaattctag

SEQ ID NO: 4842 - DNA, 1281 bp, Saccharomyces pastorianus
atgaaggcaaaaccaggtatagactcgatggactacctacatgtatataacaacaaccacggtcatgtccccagaacacccactggccaaccatgcctgtcgcctgttctccccccaataaaattggcgctagatcaacagcactcacagacgttcgggtatgctagcccccggtgcttgcccacacccatattgccctctatgagcatgaatgcggccgtcggttggtcacagcaggtcctcaccattcctgtccccatacgaagcagcacgcgaatgattcctatgatcacgccgatcgcttccccaagatcacgattcgaagtgacgaccccttcgccctcgctagccactgtcgccataaagctgccagatttgaaactgccaccttcgcctgtgcttgctacagcaaacagtgcgccaccgcagcccgttctacccaagattgtggttggaactagcaacagtgccgctgaaaggacaaacaatgaagaactggtcagaggaatacccgactacatcgactgtgcaataaccaggacacaattgagtaaggccagatctggtaaacaactaattgcatgcgcacaggcgtaccaccacccggtgaacgaaaatgagatagaaaacatcaataacatcctgaactttagagatttcatttttaaacaccccaaatcctccttcgagtcgctgtgtatcctatctttcgagcagttcgttagagtgtatgcattcatcaatttcatttataaaacgaaaaaaatcaataaaaacaagtatgaattcacttgcgagatgaatgttcacgagcaactcagtaataagcgcatccaaaggacgaggacccccgagaaatacaagatacacttgatttgtgaatctaaactcatattatccttcaaccatagcaccaagacggtcaaattcgaatccgtcaacggtggacattgccatcccatctcaaccaatcacgttatcaagccatcgctattcctgatgcactgcattaaacagtgtcatcagacggtaactgaccctacgcatctgaaactagcactgagagacgctttgaaatccctcgatcatgaaagaataggaataccgtatctgaagaaaagacaccttaaacagttgcaccaagcaacatcattatctaacgcttgcaccacgcccaaaaaacaagaagaccataccacactaagcatgcacacagggatcatccctacaggcaactttttcatgttcaatgcatccagtgatatatttcaaaggaactaa

SEQ ID NO: 4843 - DNA, 1101 bp, Saccharomyces pastorianus
atgccattgcctgttggtgttatcggtccattggtcattgatggtacatcttatcacattccaatggctactacagaaggttgtttggtggcctccgctatgcgtggttgtaaggcaattaacgccggtggcggtgcaacaaccgttttaactaaggatggtatgacaagaggtcctgtggttcgtttccctactttgataagatcaggtgcttgcaaaatttggattgattctgaagaaggtcaaaatactattaagaaggcattcaactccacatccaggtttgcacgtttgcaacatgtacaaacttgtttggcaggtgatttacttttcattagattcagaactactactggtgatgcgatgggtatgaatatgatatccaaaggtgttgaatattctttaaagctaatggtagaagaatacggctggggtgatatggaaattgtttcagtttctggtaattattgtaccgataaaaaaccagctgcaattaactggattgaaggccgtggtaagagtgttgttgccgaagctactattcctggcgatatcgtcagaaaggtattaaagagtgatgttgccgcattagttgaattgaacatagccaagaacttggttggttccgcaatggctggatctgtcggtgggtttaacgcacacgcagccaacttagtgacggctgttttcttggcattgggacaagatcccgcacaaaatgttgaaagttccaactgtataacattaatgaaggaagtggacggtgatttaagaatttctgtatccatgccatccatcgaagtcggaaccattggtggtggtaccgttttagaaccacaaggtgccatgctagacctattgggtgtaagaggccctcatgctaccgctcccggcaccaatgctcgtcaattagcaagaattgtcgcatgtgccgtcctggctggtgaactatccttatgtgctgccctagcggctggccatttagtgcagagtcatatggcgcacaacaggaaacccgcccagccagcaaaacctaataatttggatgccactgacatcaatcgtttgaaagatgggtccgttacctgcattaaatcctaa

SEQ ID NO: 4844 - DNA, 990 bp, Saccharomyces pastorianus
atggacgaagaatcccctgctgaagaagaagaagaagaagaagaaaaaactgaaaagaagaagaagaacaagggcaagaaagttgaaagcgagagtgaaagtgaaagtgacgaagacgatgaagatgatgacgaagacgacgagttccaagaatctgttcttttaactttgtctccagaaggccaatgccaacaatcattggacctaaccattgctccagaagaagaagtccaattcattgtgactggttcttacgctatctctttgagtggtaactatgtcaagcatccctttgacaccccaatgggtgttgacgatgatgacgaagacgaagaagatatttacgatagtgatgaatatgacttgacaccagacgaagacgaaattatcagtgacaacttggatgatttggacgacgaggaggaagaagaagttcgtattgaagaagtcgaagaagaagaagaagaagaagaagaggaagaacctaaaccagagccaaagaaaactaaaaaggaaaagaagagaaagcacgacgaaaaggaagaagaaaagaaagccaagaaagtaaaaaaggttgagttcaaaaaggatttagaagaaggtccaacaaaaccaaaaagcaaaaaggagcaagacaacaagcaaaagccaaagaccaaggtcttggaaggcggtattgtcatcgaagaccgtgccatgggtgacggcccacaagctaagagaggtgtcagagtaggcatgagatatattggtaagctgaagaatggtaaggttttcgacaaaaacaccagtggtaaaccattcgctttcaagctcggccgtggtgaagtcatcaaaggttgggacatcggtgttgctggcatgtgcgtcggtagcgaacgtagaatcgtcatcccagccccatacgcctacggtagccaagccttaccaggcattcctgcaaactctgaactaacattcgatgtcaaattggtttccttgaagaactag

SEQ ID NO: 4845 - DNA, 183 bp, Saccharomyces pastorianus
atgaccgacatgctaccattagctacctacaacttgaacgttgaaccttacactccggttccagccatcgatgtaacgatgcccattaccatccgtatcaccatggctgctttaaatcctgaagccatcgatgaagacaataaaccgtcgactctaagattatcaagagaagacctgcagcat

SEQ ID NO: 4846 - DNA, 834 bp, Saccharomyces pastorianus
atgacatcctttaacggtaacggcttcagtataacattattgaatgcaactaaggcaacaaaagcattacaatcggaatttcaagaagtcaagtcagtattggatttgttgaacgcctatacagacgcaccaggctggccaatttctgatttcgaaaatactcctgcaccatctgtcaacgaggatctgttacataacgaagttacagcaaaggcggttggtacctacgactttgacacctttgccaagtggatgaagagtggtgctaaacaagttatcgagagcgaaccacacatcacggaattagacaaccaagttggtgatggtgactgtggttacaccttagtggctggtgttaaaggcatcactgacaacctagacaagttatcaaaggatgcgttgtctcaagccgttgcccaaatctcagacttcattgaaggctcaatgggtggtacttccggtggcctctactctatcctgttgtctggtttttcgcacgggttgatccaagtctgcaagtcaaaggacgaacctgtcactaaggatatcgtggccaaatcgcttgagattgcacttgacactctatataaatatacaaaggcaagaaagggctcatccaccatgattgatgctttggaaccgttcatcaaggaattcaccgcatccaaggatttcggcaaggccgttcaagccgccgaagaaggcgctaagtctactgcaacattcgaagccaaattcggtagagcctcgtatgtcggcgactcctctaaagtggaagatcctggcgcagttggtttatgtgagttcttaaagggggttcagagtgccttctaa

SEQ ID NO: 4847 - DNA, 789 bp, Saccharomyces pastorianus
atggatagaaagcttgtatcggaggagctgcagttggaagacatgccctttttcattccttatgacacgaaagttaatgattttaatgaaatcattacacccgaattggatgaaattctgggtgaagctatcccagcagaattcagagaaaaactagataccagagcattctttgatgaaaatgatcctatgaatgcacatcttccagaattcaatggctgtcacatattcggatccgtcccagtgaatagggttagtggcgaacttcagattacagcaaagggtttaggttatttggattcacgtaaagcgccactggaagatttgaactttgctcacgtcatcaacgagttgtcgtatggtgacttctacccatatatcgataatccattggacaacactgcccagttcaacaaggatgaacccttaactgcttatgtctattacacatccgttgttccaacacttttccaaaaattaggggcagaggtagatacaaaccaatattccgttaacgattaccgttactcgagtaaagatggtaatactaaaagggtgctgggcatttttttcaagtacaattttgagccattgtccattgttgtttccgatgttcgtttaagcttcgtacagtttttagtcagattagtggcgatatgttcgtttttggtctactgtgcctcatggattttcacgtttctggacatggctctaatcaccgttatgggacccaaatggtcattgcgctatcaaccagatgctaaatctaagggtattttagataggtag

SEQ ID NO: 4848 - DNA, 345 bp, Saccharomyces pastorianus
atggcggagatgaacagaatacagtctatggatgaaaaagaggaaagcggccatgaatatgatgaccaggacgatgaagaaaatgaagatgagggtgaaggtgatatggaaatggacgttgaggagtcaaaagaagatacagaagttggtggggaaagtagccaacaagaagaaaacgatcgtcagagcattggtgaagaaacgacacgaggtaccgaagactttatagaagaccaagatacgatcagtgaagcggtggaggcaggaaacgaccagctggctgagaaacgtggcggtagtggaagtgattacagtgcgtcttcgtctgtcgaagaagcaaaatga

SEQ ID NO: 4849 - DNA, 843 bp, Saccharomyces pastorianus
atgcctctatctgaaaagcaaatcgacgaagtcaagaccaaagtttattatagtgaagtagacactccctttaacaaatatttagatattctaggaaacgcaactaaattgacagagagcattataaatggtagattatccaatgatgaaagtaaagctgaggctctgactaaagagaatatttcaaaattaaaagaaagtgcacagcttcgatttttgggcctgcaatcctcaatcgatacaaagaaagcagcagatgaaaattgggaaacatgtcaacaagataccctggccaaattggaaaacttaggagccaaattgcctgaattaaagagtatccatagcaggctgcttctacgtattggaaaattgcaaggtcttcacgattccgtaaaagtaatcaacagagaggtggaaggtttatcagaagggcgtacaagtctcgttgtaacacgctcagaatgggagaaagagcttggtggtgatttggttaagtttttaataaaaaagaattacttgaaactggttgattcggaactagaagggggcggtacagaagagagatatcgtgtttatgatgatttctctaaaggcccaaaagaattagaaagtatcaacacttccatgaagttggatatagataaagtgaaacaagaagtgtcatcctataaggagaagtggctaagggatgcagaaatatttggaaagattacatcaatttttaaggaagaacttttgaaaagagatggcttacccaagagggagcaggagaaaataatgatgacgatatatccgataagagtagaaaggaagaagattcaaggcaggatcgatgcggaataa

SEQ ID NO: 4850 - DNA, 123 bp, Saccharomyces pastorianus
atgttacaaaggcatagcagaaagagatttcaaccgaaaacagactcaaacgataatcgagctcgttcattggtggccgacaaacgtaatcaccaagacacagaggaccacgttctagaataa

SEQ ID NO: 4851 - DNA, 2064 bp, Saccharomyces pastorianus
atgcccaggtggacaaggcccatattgaatcacattttaccgaggaggccattcatccgcagtttcaacagcttccttttactcgaaaacacatctcactctaggctatcgttttccatgagcagtcgaggctttagatctaataactttattcatgcacaactgaagcatccatccatactttcaaaagaggatttagatctgctttctgattcagacgattgggaagaacccgagtgcatacagctagaaactaagcagccagataaaaacaatcctatcataataaatgatgatattctagcagtaaaaaaacccatgatggataagaatgtcatgaattttatcaacaaggacaatttctcgtcttggaatgatatacccaaacctagtatagctaagccacaacaactggctcctgagaactcatttgaacagagcagtcaaaaaaagtcagagtcgaaaggcttcaagaacccgttaagaccaacgttgaaaaaggaaccttcctttgaggaatttcagaatagttttttatcccaagagagaagtctggaaatgataaacgaaaacgaaaagaaaaaaatgcagtttgggcaaaaaattgctgttttaactcaaaggccaagctttactgagctgcagaacgaccaggaagatagtaactcgaatttttccaataatgtgaagattaagataccgatttgtttaagcaaagaacaagaaagtattatcaagttagccgaaaacgggcacaacattttttatacaggtagtgctggtacaggtaaatccattcttttgcgtgaaatgattaaaattttgaaaggcctctatgggagagaaaatgtggcggtcactgcatccacaggattggccgcctgcaacattggtggtataactatacattcgtttgctgggatagggttaggtaaaggtgacgcagataaactttataaaaaagttcgtcgatctagaaagcacttgaggcgttgggaaaatattggcgccttagttgtcgatgaaatatcgatgttagacgcggaacttttggataaactagacttcatcgccagaaaaatacggaagaaccatcagcccttcggtggcattcaacttatcttttgtggagatttcttccagttaccacccgtatccaaagatcctaatagaccaaccaagtttgcttttgagtctaaggcctggaaggaaggtgtcaaaatgacgatcatgctgcaaaaggttttcagacagcgtggagatgtaaagtttattgacatgttgaatcggatgagactaggtaatattgatgatgaaacagaacgagagttcaaaaaactttcaaggccattgccagatgatgaaattattccagcggaactttatagtactaggatggaagtcgaaagggctaacaactctagattgagtaaactaccaggtcgcgtacatgtgttcaatgccatcgatggtggtgctttggaggacgaagaactaaaggaaagattgttacagaatttcctagccccaaaggaattgcatttaaaagtaggcgcccaagttatgatggtgaaaaatgtggacgccactttagttaatggatcccttggcaaagttattgaatttatggatccagaaacatacttttgttatgatgcactaacaaatgacccatctatgccctcggataaattagagacatgggttgaaaacccatcaaaaataaaagcagcaatggaaaaggaacagaatgatatggaagaaagtgcagtagctagtcgaaaatcttcggtaaaagagggttttgctaaaagctctacagacgaacgtgtctctccattagattcctcggtttttgattttatgaaaagagttaaaacagatgacgaagctgtattagtgaatataaaacggaaggagcagcttatgcaaatgatacaccaaaattctgcgggaaaacggagattgcctttagtgagattcaaagcttctgatatgagcaccagaatggtacttgttgaaccagaagactgggccatagaagatgaaaatgagaagccgtag

SEQ ID NO: 4852 - DNA, 975 bp, Saccharomyces pastorianus
atgtgcgatcttctgtgggcagatcccatcgaagagtacgacgaagtcacggataaagacttgaccgaggaggacattgtcaactctaagacgatggtccctcacaacggtaaaatggccccatcgcgcgacatgtttgtcccgaactccgtaagaggctgttcgtatgccttcacttatcgtgctgcatgccatttcctgcaagaaactggcctactctcaatcatcagggcacacgaagcccaagacgccggttatagaatgtacaaaaacactaagactttgggctttccctctcttttgactcttttcagtgctccgaactatttagacacctacaacaataaagccgctatactgaaatatgaaaacaacgttatgaacatcaggcaattcaacatgaccccacacccttattggttaccagatttcatggacgtgttcacgtggtccttgccctttgtgggtgaaaaagtcaccgagatgctggtagcaatcttgaacatctgtactgaagacgaactagaagtagagacccccctaattgaagaactggttggcactgataagaaattgccccaggtaagccaaccaaaggaggccccgaaggccgccacgtcgactccgcgcaaatatacctccatcctggatgatgaacatcgaaggaaaaccttaagaaataagatcttggcggttgccaaagtctctaggatgtattctgtcctaagagaggaaaacaacaaagtccaatttttgaaagatcacaattccggggtattgccacgcggcgccctgtctaatggtatagaaggtctggacgaagctctatccacttttgaaagagcaagaaagaaagacttaattaatgaaaaattaccgccttcattagatgaagtgaaaaatgaaaaaaaaaaatattatgaaaaagtttgggaaaaagtacaagaacatgatgcaagtaaagaaggtaaataa

SEQ ID NO: 4853 - DNA, 552 bp, Saccharomyces pastorianus
atgtcttcagacgccataagaaacactgagcagataaatgctgctatcaagattatagaaaataaagcagaacacccggaatcgttcgcgactgccgtagattccaagctcgcttctgctgctgctgctgcttctgctgctgctgccaccgttgcttcttcttccacgcagcccacgagagacctcacacagtataccctcgataacggaaggaccgtggcgacgaaccatagaatcatgagcaaggtgcccgccatcacgtcccatatcccgacggatgaagagctgttccagcccaacgggttgcctcgtcacgaattcttaagagaccatttcaagcgcgaaggaaaactgtctttggcgcaggcggccaagatcatcaccctcgctaccgaactcttgagcaaagaaccaaaccttatatccgtcccggctccgatcactgtctgcggtgacatccatggccagtacttcgatcttctgaagctgttcgaggtgggcggcgacccggccaccacctcgtatctgttcttgggtgattacgtcgtatag

SEQ ID NO: 4854 - DNA, 1023 bp, Saccharomyces pastorianus
atgaccaaaaacccagtcactggtgttaagggtattactttagccgaaggtaatgaaatcttgaaacaaaccaaaaaaggtaagttgttgatcgttgacgaaaataataacttagtttccatgttgtcaagagcagatttgatgaagaaccaaaactacccattggcttccaagtctgccaccacaaagcaattgctatgtggtgcttctattggtactatggatgctgataaggaaagattaacagcactggtcgaagctggtttggatgttgttgtcgtggattcatctcaaggtaactccattttccaattgaacatgatcaaatggatcaaagagacttacccaagtttggaaatcgttgctggtaatgttgtcactagagaacaggccgccaacttgattgctgctggtgctgatggtttgagaatcggtatgggtaccggttccatttgtatcactcaagaagtgatggcctgtggtagaccacaaggtacagctgtttacaacgttagtcaattcgctaacgaattcggcgttccatgtatggccgatggtggtgtccaaaacattggtcacatcatcaaggctttggctcttggtgcttccactgttatgatgggtggtatgttagctggtactactgaatcaccaggtgaatatttttacaaagatggcaaaagattaaaggcttaccgtggtatgggttccattgatgctatgcagaaaaccggtagctcgggcaatgcctctacttctcgttatttctctgaaactgaccatgtgttggttgcacaaggtgtttctggttctgttgttgacaagggttctatcaagaaatttattccatatttgtacaatggtttacaacattcttgtcaagatatcggtcacacatcattgaccctattgaaagagaacgtcaaaaatggagaagtcagatttgagttcagaaccgcctctgctcaattggaaggtggcgttcataacttgcactcttatgaaaagcgtctacacaattaa

SEQ ID NO: 4855 - DNA, 507 bp, Saccharomyces pastorianus
atgactgctccaatggaccacaagaaagccttagaacacttgaagacatacagttcaaaagatggtctttcagtccaggaattgatggactccaacatcagaggtgggttgacctacaatgatttcttggttttaccagggctggttgacttcccatcttctgccgttagtttgcaaaccaaattgaccaagaagatatctttgaacactccatttgtttcttctcctatggacacagtcactgaagctgaaatggctatcagcatggctttgttgggtggtattggtttcatccatcacaactgtactccaaaggaacaagcttccatggtcaagaaagttaagatgtacgaaaacggtttcatcaactctccaattgtcatttctccaactactactgttggtgaagttaaggccatgaaaagaaagtttggtttctctggtcttccagttactggtatgttttttttacaattattccaatggtttcctaaaatattttcttag

SEQ ID NO: 4856 - DNA, 501 bp, Saccharomyces pastorianus
atgaagctctacagaataaaggaaacagatctagaggaatttgcatcctttctggatgaaggagctcttcagacaccaaaactgtccttcaaagattacttaagcggccaggccaaagtaccccaaccatctcaccaagttcgccataagaaccttacgaagtttcaaggtgaaacttttctcagagattggagcttggtttgcggccattacaatagagacgctaagtgtggtgaagtgggccccgacattattaaagcctttcaagaggaacagctgtttcctgaaaataatttagccataatttctcatattggtggccatgtttttgctggaaatgtcattttttacaagctatttaatggaggaaatactcaaaacaaactggactcattgtggtttggaaaaatctacccacacaatttgaggcttttatgtgaaagtttggaagatggaaagattattgatgaattgtacagaggcggtttatcaattaactga

SEQ ID NO: 4857 - DNA, 177 bp, Saccharomyces pastorianus
atgttacgcataaggattattaccttacatcaacgtgcactttttcatcgtggttttgaacgtgtcagcttgccagaacttcattctgccacccaacaagatcaaaccatatgttactgccaaaagctaaactcaaggctgccatcagcaacagatcatttggatccctcaaattaa

SEQ ID NO: 4858 - DNA, 3915 bp, Saccharomyces pastorianus
atggctgctagagataatgaactgtacttgtaccatctgacgttgcagaagcagacgaatttcgtgcactcgtgtattggccacttcgtggacctggacgcagggtccaataatggccagtcgcaactgtgcgttgccactgagacgcacttagagctctatgacacggcggaaggggagctgaaactgattaccaggttccagaacctgttcacgacgataacatcgatgaggtcgttggacttgccgcatgccgggtccacggcgaattcttccaattgccccactttcctagtgttgacatcagactctggtaatttaagcattgtgcagatcactaggcatgcaggcgcgttcaaattaaggacgttggtgaaccagccgttgaccaggaccactctgcggagggcctctccaatttcgtacatggaagttgaccctaatgggcgttgtataatcctgtcgtctgtagaacagaacaaactatgctttcttgtggactttgcacgagaactaaggatctcgtcgcccttagagatcatcagacctcatatgatcacgttagatatgaccgcatgcgatgtgaatttcaacaacccgtgctttattgccttggaaatggacagcatggctgcttcactctcggtacatttaatattttacgttttggagttggggttgaaccatattgttaagaaagctgattattcagtcaatccgtctgctaatttcattttgagtttaccggatttgtcgaagtataatataacaacctctctgaatgataataactacgatcgtgacgaagactctttgtttaatccctttgttgtaattggatttgaaaatcatatactgatcaaggacatgaacggtttctatagtttgaaagtacaaataccacaaagggccgctgcaagcaacctccagaaatctgtaacgatcatctcaggtattgtacagaagcttaaaaatgacttcttcgtactcctgcaatctaactacggtgatctttttaaattaaccataactccggacattaatgatagaaatagacctttggttaaattgagctattttgatacaatccaaaattccaaccaattacacatttttaaaagcggttatctttttgcactatctgaaatgaataacaactttcttttccagtttgaaaaactaggtgtagagaatgacctctccaagattctaacctcaaaagatccaaataaaccgctggttttccaaccatctaccaacctgcagaatttgagtatcttgtcccaacagttaaatttgaacccattaggtagctcccagatttcgaatgactcgcctttatctatcgttactcaacatcacacaaacagtaagctattaaccttaacaagcggtgtaaattactctaacctgatctccactaatttgccacccaacgcaacaaaattgtggttgatacctcatcctgcagccactaacaataacaacaacctcttgttcattagtttccctaaaaagacgatgatattacaaattgacaacgagtctatggaagaattaacccctgatgaagttgcacgttcgactttcaaactatctcaggacacgacgattcatacctgtttgatgagctcacattctattattcaggtatgcactacagaattgagacagattgtaccaattgataaaaccgggttctctaataaattgacatgggtgcctccagcaggtattcgtattatatgcgctacatcttcaaaaacccaattgatcgtatcactatcaaactacgagctagtctatttcaagatagatagttcctcgaactcattgattgagctgactacacatccagaattggacacattgccttgtaaacttgccgtcgagcaggatagccagcatagtgatttattagccatcgctgatgatgaaggtatgatcaaaataatgtctcttagagatcaaaaggaagatttcttaacagtaataagtttgcagttggctaacgaaaaagtctctgacatgatcatggttagagatcccttaactagattgctaaatttgcatgttggtttagtgaatggtgtctacatgagatttcacatacaagaaattgatggattgtttactgatataaaaagacgatttcttggtttgaaacccgttgtactgtcatatctgaataagatatctatgtccctaaatgaagaggaagaggaagagaaagaggaagaggaagaggaagatggaaatgaaaaaaaatggatttcatgcgttgtttgccattccgcttctacgtgggtaagctacacgtggaataacatgtggaatatacggccattaaacggccaaaatatgttaagctgctccaaatttgttaacgcagacgtacaaataaacggtgtttgttcgatttctaactcagggcatttaaacatcggccaggtttccggtttttcaacgtgggagaagtggtttcatgtggatgaagtaagtatcgaggaacaaggggacaagaaagaggatgatgctggtgaagaaagcgaagaagatgatgaagacgacgaggaagaaacattaagaatatccacattccaacctcgtactattttgtccttccccaataaaccgaaacatgctttgttcatcgagaatcataccgaagtaccacaatgccgtatatcattaaaaatcaatgacgattgcataaagcacgcaaattcagatcgctcatttaaactattagacaatgtgcattgcatctccgccacgataatagacttcgggaaaaaggtcgaccaccttgtaatctctactaaagacaatagattgatgacataccaagtattggtaaataaggacgaatcatctttcgacattgaattacttcatcaaacaaaaactttatcacaaatacattccatgctgaaatttaagaatcatttgctggccgccatagattccactattatcctgtatggcttaggtaaaaaacaattacttagaagatctgtaaccgaaacaccagtatcaataactaaaattgtatctatggatcagtggaattacgaaaggttggctgttggggatatacatgaatctgtcacgctatttatttggaatcccacagggaatgtttttattccaatggtggacgactccattaaacgtcatgtaacaactttaaaatttttggacgaggcaacaattattggtgccgataagtttggaaatgcctggactttaagatgcccgtcagagtgcgagaacatcatatcaagtcatgaggctagtgaattatcagacggcaccatcaagtacccattgaatttgatcaatttacaacagaggttacctaatacgtatgattgcaaattcaagtttgatgtactaaaccacctctacgttaatgatatcatcgtaaattttcatattttggacagcatctcaaattctgataggccaggttgtatctatatgggtttacaaggtactattgggtgctttattccattattatccaaggggaatgttatgaccatgaaaaagatcgagaaaataatgtcagaggctgatgatacattttatatggagtatgaatcaagaaaaaaaaataataatatgcacagtgaagatgacgaagaggaacccgccagtgtcgtgttacacaggcgaggtgatataattgatggaacgatatgcgaaggatcgtattccattgtaggcagagatcatcaaagctatagaagttattatgctcctgtgcgtatggttatcgacggtgacctatgtgaaaatttcttgagactttcactaaacgaacaagaatttttggccaaagatctgaaaaatattcaaatcaatgatataattcaaaggataaatgaagttagaacaaattatctttag

SEQ ID NO: 4859 - DNA, 141 bp, Saccharomyces pastorianus
atgtggggaggtggcaaaacggcaatagtaggattgtcgccccacacggcagagatgcgtctgctatatgagcaagccacgacgacgatgagctttagtagtttaaacgagggattggaacaaaagcagaataggcagtga

SEQ ID NO: 4860 - DNA, 864 bp, Saccharomyces pastorianus
atgttgacttggttgtacacggatttgcccgacgccatttcccccacgccgggaatctgcttgactaatcaattgtcaagagtattgattccgctggccagacacatggacctgcctgatattgccgccaagttggaacaagaagttcaagcgaattattccagtcttattgcccaatggcttttcttcgtcatgcacgtttttaaaattgcccttatcactttgtttctcaaactgggtattgccaaccctattagtttcaacccttacaagttatggactttgagagacatggcttctccttcttctaacagcaataacaagaatggtaagaaccctgcaggcgccagcaacggtgcgacagacttgaagacccttttacgttccgtaggttggattggtgctaagagagccacttatgacgattatcaaaccaactactacaactacgtcatcgaaaagatgggtggtccagttgctgcctacagggccggtgccatcaggaaagccgcagctccaggtattcaactggaagccggtgaaggtttccaaagtcgcttggaagatagattcactgcttctactttcacagctattgaaacagaacgtaaattcatcttaagcgaagaatactttgtagagttggaaaacaacttgaaaaaaattttggaggaatacgatggggatattggtaagatgaatgctgaaattagaaggttcagaaggtttggtatttacgaaccagatgaaaaattagccactttggttaagctcagaagggaaatcactgatgaaaaagaaaaaaaagcaaataaggatgccactcctggcataaaaaagaacgacttaaaaaaatccaaataa

SEQ ID NO: 4861 - DNA, 369 bp, Saccharomyces pastorianus
atggagatttacgttagactaaacgcagacgttgagcgcgactatgcgttccaggtgtcgaacgacgacaccatcaataacaagattagaaagattttcccctccaagacgggcctggcggacttaatggtgctcaggccttcaatcttccacgagaaaaaccccgtaaagttttataagtctatccatccaggatatctgtccgaaggtggctgtttgatgtttcattacgacgctgataacgaagagaatttggtggaattgaacgactccaagccgcttatcgaccagttgtggcctggccaactagttgttcctcagtggaggttgtctaaaaaaatatatggacgtttgctgccgtcatgttga

SEQ ID NO: 4862 - DNA, 180 bp, Saccharomyces pastorianus
atgttcaaaagtaatacattatgcgtagcgaccacgccatttacacattatactaacttcttctttgtttttccacttttttattcgcagatttataaattgaacaatgatttcaagcctgaaggtgttaaagacctttcaagggctttggtaaatgccattcaactaagaggtatatag

SEQ ID NO: 4863 - DNA, 486 bp, Saccharomyces pastorianus
atgatagcatccaccataccgcaatttccggaaacgaaagtatcgatatcgttctttgaacaagttggaaatgcagaagaaatacgcactaaaatgagcgatttatcaacatcttttgcatttgttgaccctaaattgatctgttcgcaggaacaaatatattccgctatttacaagactctagtagaagttaattacaacaggatgagaacaagaaatttgaattctgagtgtgtattgtgcctttcacccacttccaatatcagcgatgccttccaaaaatttggaattaaagacgattcaacagagcttatctgcctaaactttcacaataacaccagtgatttggataaagaacaactggccaacgaattatcttctatagtgaccggtgtagagatcgagtttaacgataagaatttatcaaggttttatgacgaaacactcataagaaaagtatgttcaaaagtaatacattatgcgtag

SEQ ID NO: 4864 - DNA, 465 bp, Saccharomyces pastorianus
atgaagtgtcagtttgaaagagaaatcttccaaacatacaaaaaattccaatggccgatttggctgatgtttttactaattataattagtaaagtaattgagaccaaattgaaaaattattataagaggaaggccaagatcgaaggactaattacgcaaactatggagaaactaaaagctcaaaagctcaaatcaatgtccagttcagaggagaatgcatatttgagcgtagtccaattacgtgacatcttcctttcggatatcgtggatttaaagtacaaaaaccaactatggtctcaagtagtaaagtttttagagcacaacaatagtaatattaaatccaatttgaccgaaatacgcggcgacattatgaaatgctgggaatggatagggccgttggagcccaatggtccaaatgatccactggaaaacaaatcattacccaaggatgaaacggaatcatag

SEQ ID NO: 4865 - DNA, 1584 bp, Saccharomyces pastorianus
atggaggaggaggaggaggaggagcaaaacgatgaggaggataacgacgacgaagatgacgtgtccatagccagtgctaataagtctgacacgaacgattttcaacgaaattccgttactagcaggaaaaggaaaggacctgattccgatattagttcaaaggagaataggaacaacgacgaaatcacagaggccttcaatatttcgtcatctgattcggatattgagaaagagtataagaacgcgaagaaacgtaagattgatcgtttgagccctcaagagcatggaagtcgttcagccattctggaaaggatttctgataagacaccaataaggaacgcgaatagaaagccaataagcatggaccacttcaatgattctatgacgtctagtggaacggaaaacgaaatatttataccaaacataaagcacaactcaaacgaggccgaagttgaagacgaaaggcaacaggccaccccgctaagtaaattaaaggtctcggcttcatttgcggataaattacctcaaaaggaggaaccaacaacaaaactggctccagaagctaagcaatcaactccatcacagagcgaaaagccgccctctctattctcatccgatgaatcaagctcagaggcagaagaggcgttgattccagagataaccactccgggacctgatgctactgatggaaatacaaaccatcatttggtggaggtgatagaaaatgatgacagcagtggaacggcatccgatggggatgagatcctcgtgcctacaaggatcgagaccccacaattggccacaactgaagacgtcgaaaagagcgaaaccagagttcaagagctccaggaggaaatcaatgaacagttggaaagcgatggcgaggatgaagccgacgcaaagcaagaaaaagattccgaaatagtcaaaaagagtgctccaaagaggaaaacacataaatgtaagagaattttcaagtttttgggcaaatctctacttgcaaccatcctattcggcgtattcatagtcattcctgccctattcgggctttggtatagggagcaaagactactagtaggttattgtggtcatgaagtgccatcacatcgaataaacgaagattcttctgatctcattcgaaatctggataaccgactacagaattataaacctgaatgtattccttgtccatctaatggaatttgctatccatacatgaaactgaaatgcaaaccagattacaaattggcaccatccaaatttgatttcttagaaatcattcctgcacaaggtaaatgtgtcaaagacgacaaaaaacaacaattagcatctgaagtagtggaaaaatccttggagttcctaagggctaagaatgcacaaatatcttgtggtgacgggaaaaacgatatcgaaagtggtatgacagaagatgatttatatcaaatattcaatgaagcaagggccccttggatccgcgatgatgagtttgaagatctttggactcaagtcattaaagatttaaccgaagagccagaaataatatggaggcaagtgagtagaatttatcttttacaaccttattga

SEQ ID NO: 4866 - DNA, 522 bp, Saccharomyces pastorianus
atggacaatgatttggagtatttaaaggccgggttcgatccgaattcggtgaaagtggctgccttgaggagaatattggtggagaacaacgtagagtttccttcaaatgccaggaagaatgctctcgtagggctgtttgaggagaagattaaaccgcaggtgcagcagttgcggaaaatgtatctgaacgttcaaccaagcgacgagggtattgtgaagatggaccatccttcttcttcctcttcttcagcatcttctactcgcaagagtagacggtcccgtggggaaagatcagcttctcctctggctaaacagttcaggaaaaataaaatattggacgatgtcagtgatgatgaaaatgatgacgaagttggtgatcttttgattatatctagtgatccaatgaggaaaacgaggaagacgaggaggaggaggaggaggaggatggatggatggaggaggaggaggaggaggagcaaaacgatgaggaggataacgacgacgaagatgacgtgtccatag

SEQ ID NO: 4867 - DNA, 738 bp, Saccharomyces pastorianus
atgccggctggcaaccaaccaagagaggtatataaagagacacaatctgccagaacattgccagattattcggtgcgtggcttcccacgtacattgtcttttacaattgcaatcaaccaaccacacatacatacaattacatacacaatggtcgctcaagttcaaaagcaagctccagctttcaagaaaaccgccgtcgtcgacggtgtctttgacgaagtctctttggacaaatataagggtaagtacgtcgtcttggcctttatcccattggccttcactttcgtttgcccaactgaaatcatcgccttctctgaagccgctaagaagttcgaagaacaaggtgcgcaagtccttttcgcctccactgactccgaatactcccttttggcatggaccaacatcgcaagaaaggaaggtggtttgggcccaattaacatcccattattggccgacaccaaccactccttgtccaaagactacggtgtcttgatcgaagaagaaggtattgctttgagaggtcttttcatcattgatccaaagggcaccattagacacatcaccatcaacgacttgccagtcggcagaaacgttgacgaagctttgagattggtcgaaggtttccaatggaccgacaagaacggtaccgtcttgccatgtaactggaccccgggtgctgccaccatcaagccagacgtcgaagcctccaaggaatacttcgaatccgccaacaaataa

SEQ ID NO: 4868 - DNA, 225 bp, Saccharomyces pastorianus
atgcaaaacccaacccactacaagattccagcttggtttttgaaccgtcaaaacgacatcaccgatggtaaggattaccacactttggctaacaatgtcgaatctaaattgagagatgacttggaaagattaaagaagatcagagctcaccgtggtatcagacatttctggggtttacgtgttagaggtcaacataccaagaccactggtagaagaagagtttaa

SEQ ID NO: 4869 - DNA, 525 bp, Saccharomyces pastorianus
atgcctcaaaagggttctggtagagcaagagtcggggatgctaactccccaacaagacacaatggtgctagggcactcgcaagaactgcaccaaacgattacaccacagagctgccatccaaagtatattccatggctttcaacaatgctttgagccaccagtataaaagcggtaagctgtttgttattggtggtaataaagtcgacttgatatcacccaccccggaaatagacttgaacgcgttagacatcttaaagacggacacacttgaggataaggagagttttgaaggagaagccatcttcaggaagttcttagaggagtttcaactaaagggcaagagactacttttcattactgacaaggcaagagaggggctgatgaaatgttctgacccatacaaacaaactgtggatgttatacagaaagagcttgttgaggtcaatgacatactgagagcacaaaccgtcttcattgaactggaagctcttgaatatttagcaattgcacaccaaaaagaataa

SEQ ID NO: 4870 - DNA, 336 bp, Saccharomyces pastorianus
atggatttccaaaccaacaagagactttgtgatgaaatcgccaccatccaatccaagagattgagaaacaagattgccggttacaccacccatttgatgaagagaatccaaaagggtccagttagaggtatttctttcaaattgcaagaagaagagagagaaagaaaggatcaatacgttccagaagtctctgctttggacttgtctcgttctaacggtgttttgaacgttgacaaccaaacttctgacttggttaaatctttgggtttgaaattgccattatccgtcatcaatgtttccgctcaaagagacagacgttacaagaagagagtttaa

SEQ ID NO: 4871 - DNA, 1716 bp, Saccharomyces pastorianus
atggcgggaatacgaaggcaatcgcgagtaaatggcgattgtggtggtaatctgggtatggatggcgcgttaataagttctgttacgtatgtgaggccgcgggaagatgcgcattattttgtagagctcactgagagacatttgctcgtgttcgagatgttgaattccatgtgtctcttggagaactatgaccatatgctgttatttttggagtgtcagttgggcaaatctcacaatctggcggtcatcccctttgatatcatattggttcttttcacgttatcaactttgtctgaatattataaagagccgatgttaagggcgaacgatccatataacgtaacgagaggaacattgagcaggagagctttgaaaatgctgcaaaaatatctcgtcattttaaaagagtttgatactgaagagttcaatctgcatgatttagaattgctgcgatgtcaatttttcctggcaatcgatacgctgacaccaaaaaagcaaaggtggacttttgataggtttaggagagtaaagtccgaaaatggggtggtttataaacaaaatgctagtgcagaccctgaccttgacccaagtgagactataaaaaacccttataggtcctatattagttgtctagagcaaactcacaccgttctgggaaatcgcttattgaatttgaaactaagcgagcccggggaattcatcaacatgattttatggacgctgtccaactcattgcaagaaagcacgccgctgtacctatcaagtcatgaaatatggatgcccttactggagatgatcatcgatctgtttaatgctagacaagattactttatacagcatgaaattacccgaagtacaggcaaggccttgttcattcagcgcttatcagagagtcctttggccattttctttgagtccttgaatacaatgaattttgccaatagattttctgaatacgtgtttctaaattgtgattacaaactaccgtcagacagttacgcgacaccggtccatcccatatatcatggcgaaaatagtatggttaatacatacattcccagatttgagtatagtcgcctgtacaaatcgcaaaaatcattagcactgcgaaggaaacttattggatcatgtttcaaactattattaaaggtaccagatggtcgtagattaattactccaagaatcgttgcggatgatatcatccagggaatctcacgaacgctcgcctctttcaacgatatcttgcagttcaaaaaattcttcatgaccgaaaacttgtcacaagagtcatattttatacccttattagccgaaggtacgctatccgagatatccaaagacacgcaagactgtgttattattctgacattggtggagaatctatcggatggcgtctcattttgcaatgaggttattgatctagtcgagctggattgttttgcatttaccgaacaaagtattaagatgtcatacgaagaatcattcttagttattgaaaaatgtgacgtatgcttactggtccttttacgatatcttctgcatttgattgatattgaaacaataacaggagccaagggagcactaagaatgttaaaagtaattgaaaaaaatgatttgaaaaggcagcagtgggttaaatcactggatttggaaattgaaccgcctttattgtatcctacggcttccaaaatgttcactgttcaccttaggatgtaa

SEQ ID NO: 4872 - DNA, 162 bp, Saccharomyces pastorianus
atgatgtcgccaagcccttcaatggtagctgcggtgcttgtatcgggctgctcgtccttgaagcagagcacggcagcgtctgcggccaactggctgatcttttcctggagggcgctggcccattgtgcggggtcactagagtacacttcgaggtacatgtga

SEQ ID NO: 4873 - DNA, 2247 bp, Saccharomyces pastorianus
atgggtaaaaagaaactaaagattttatccattttccaaagggactattatacaggaagaatttatattgaagcgccaaaacaatctgttattgagaagttttgtaatggtgttccagatatttacatttctcaaaaactgcttatccctgttcaagaattgcctctactgttaaaaccaaataagtctgatgacgttaccttggaagaaggaagttatgttcgtattaaaagaggtatctataaaggcgatctagccatggttgaccaaatcagtgaaaacaatttagaagtgatgttgaaaattgttccccgtctagattatggtaaattcgatgaaatcgatccaactactcaacaacgtaaatctagaagaccaacatttgctcatagggctccaccgcaactatttaatccaacgatggctttaagattagatcaagttaatctttacaaaagagatgaccgtcattttacctacaaaaatgaagattatatcgatggttatttatataagtctttcagaatccaacacgtggaaactaaaaatattcaaccaaccgtggaagaactggcaagattcggttctaaagaaggtgctgtggatttaacttcagtttcacaatccatcaaaaaggcgcaagctgcaaaggtcactttccaacctggtgatcgtattgaagttttgaatggtgaacagcgtggctctaaaggtattgtaacaagaactactaaggatattgccactattaaactaaatgggtttaccactcctttagaatttcctatttctactttgagaaaaatctttgaacctggtgaccatgtcactgttattaatggtgagcatcaaggtgatgctggtctagttcttatggtagagcagggtcaagtgaccttcatgtcaactcaaacaagcagagaagttaccattacagcaaataatctatccaaatctattgacaccacagccacatcaagcgaatacgcactacacgatattgtagaattaagcgctaagaatgtcgcatgtattatccaggcaggtcatgatatattcaaggtcattgacgaaaccggtaaagtgtctacaattactaaaggttctattttgagtaaaataaatacagctcgtgctcgggttgccagtgttgatgggaatggtaatgaaatcaaaattggtgatactatagtggaaaaagtaggttcgcgcagagaaggtcaagtcttatacattcaaacacaacaaatctttgtagtctcaaaaaagatcattgaaaatgctggtgtttttgtcgttaatcccagtaacgttgaagctgtggcatccaaggataatatgctaagtaatcaaatggatttaagcaaattgaatccagaaattgtttccaaaatgggaccaccttcatccaagactctccaacaacctattcaatctaggatgggccgtgaagtggcgcttggtaaaacggttagaattcgttctgccggttataaaggacaactaggtattgtgaaagacgttaatggtgataaagccacagtggaattacattctaagaacaaacacatcacaatcgacaagcataagctgacctattataatcgtgaaggtggtgaaggtatcacgtatgatgaactagttaatagacgtggtagagttccacaggcaagaatgggtccaagttatgttagtgcgcccagaaatatggctaccggtggtattactgcgggagcttccgcatctaccggtctgagcggtggtatgacaccaggatggagttcgttcgatggtggcaaaacaccagctgtaaatacacacggtggctcaggtggtggtggtgtgtcctcctggggtggcgcgtctacttggggtggccaaggtaatggtggtgcctccgcgtggggtggtgccagcggtggtgcctctgcttggggtggtcaaggtacaggcgctacgtctacttggggtggtgcttcagcttggggtaataaatcaagttggggaggtgcttccacttgggcttctggcggagaatctaatggtgctatgtctacttggggtggaactggtgacagatcgacttatggtggagcttccacttggggtggtaacaataagaacaagagtacaagagatggtggagcttctgcttggggtaatcaagatggtggcaacaggtccgcttggaacaatcaaggaaacaagtcgaactatggtggtaatagtacatggggaggtcattga

SEQ ID NO: 4874 - DNA, 180 bp, Saccharomyces pastorianus
atgtactattaccaccatagttcgacttgtttccttgattgttccaagcggacctgttgccaccatcttgattaccccaagcagaagctccaccatctcttgtactcttgttcttattgttaccaccccaagtggaagctccaccataagtcgatctgtcaccagttccaccccaagtag

SEQ ID NO: 4875 - DNA, 288 bp, Saccharomyces pastorianus
atggttaactgttccccttcggtatggagcaataaaactacgacaccacaatcatcttcgtatatatgtgctgaaatggtaaaagtcaagtccaagaacagtgttatcaagctattatccactgcagcgagtgggtattctcgttacatatcggtaaagaaaggtgcacctttagtcactcaagtcagatacgatcctgtagtgaaacgtcatgtgcttttcaaagaagcaaagaaaagaaaagtggcagaaaggaaaccattggatttcttacgaacagccaagtga

SEQ ID NO: 4876 - DNA, 642 bp, Saccharomyces pastorianus
atggattttgttaagggtgatttcatgcacatggacttcgaagaaaacaccttcgacagagtttacgccattgaagccacttgtcatgctccaaaattagaaggtgtatacagtgaaatttacaaggtcttgaaaccaggtggtacttttgccgtttacgaatgggtgatgactgacaattatgacgagaataatgctgaacatagaaaaatcgcttatgaaattgaattgggtgacggtatccccaagatgttccatgtcgatgtagccaagcaagctttaaagaactgtgggtttgaagtccttgttagtgaggatttggctgataatgaagacgaaatcccttggtattacccattgacaggtgaatggaaatatgttcaaaatctagctaacttggccacattcttcagaacttcttacttaggtagacaatttactacaacaatggtttccttgatggaaagatttggtttagccccagaaggttccaaggaagttactgccgctttagagaacgctgcagttggtttagtcgccggtggtagatccaagttattcactccaatgatgttattcgtcgctaagaaacctgctgaggttgaagcctccaccaagacttctaagaaagcaactcaatag

SEQ ID NO: 4877 - DNA, 1377 bp, Saccharomyces pastorianus
atgtctgtagaattcatagtcagtgatacgaaattgttaaaatcgataaaggtcaagttagagaatcaaggccttttcgttaaacccatttattccgataataatgcaaaagtcattaaatcttctatcagtgatccaaatcatccattagtaatcgaaattggcaatgtagcaggtgtcgaagctcgggtttgtggagacgataactttgaacataacgcagggaatttaggacacagtagcaacataaatagcatgatggaatttacaaaaggtttcttaagaaatcgcattaaggatgatgaagtttttttatcttgtctactagatcatctacccttgaaatacaccatatacccgccaatggttctgttcaataattctactgtaaggtcattcaatcatccagtctggcaagaagcattccaaaaagaatatgttgattcaaatgagttctatagcaagctattatgtttcatatcgcctaaaaatcctcacgataatgcggattcccattttaaagatcgatttttgacccacttggctataaataatcctatcattgagacagatatactgcggaggccattcaatatccaaccgctatatggggaactaatagataaagatgctcttaatgatgatgacgatacactatgggaaaatcctagccaagaacaattgggctcaagtatatggtgtagagttatacaaaacggtataacccaaatttggtcaccagttttcaccatgtttagtagagggaatatcaaggaaaagaaaagaattctcgccacttttccggatatttccaataacgatgtggttgatttatatgcgggtataggttatttcacttttagttacttgacaaagggtgccagggccctttttgcgtttgaattgaacccttggagtgtagaagggttaaagcgcggattaaaggcaaatggattccacaagagtggaaactgtcatgtttatcaagagtctaatgaaatgtgtattcaaaggatatctgaatttcaagctcagcatccagattttgagttacgtattagacatattaatctgggtctcttgccctctagtagacaagggtggccattagcgcttaagttgattcatttacagggagcttcctcgaccacagtgacgatgcatatacatgaaaatgtacatataaatgccattagagatggaagctttgaaagcaacaccatagcagagcttgaaagttttaatgaatcaatttcatcgaatgaaaactctgatataaaactccactttgtaaattctaagcttgagcggataaagacttttgcaccagatgtttggcatatatgctttgatgttgatattctggtgagtacataa

SEQ ID NO: 4878 - DNA, 1032 bp, Saccharomyces pastorianus
atgcttctcttatatcaaactgagaaatacacaatcagccataaaccaacaatgtccagtgatagcagttattatccaattaagatcgaaaaagctttgaacgacccaactctcttactaaaccatacatgtttaagggttaaggatccggcaaaaaccgtggagttttatactaagcactttggtatgaagttattaagtagaaaggattttgaagaagcgaagttcagcttgtatttcttaagctttcctaaaaacgacatatctaaaaacaagaacggcgaacctgacgttttcagtgcacacggtatgttggaactgactcacaattggggcagtgagaaggactcaagctttaagatcaacaatgggaatgaggaaccacaccgtggattcggccatatctgtttttctgtctctgacatcaatacgacttgcgaagagttagaatctcaaggtgtcaaattcaagaagagactctctgatgggagacagaaggacattgccttcgcactggaccccgatggatactggattgagttgattacgtattccagagagggacaagaatatccgaagggctcggttggtagcaaatttaaccatactatggtccgtgttaagaacccaaccagatctttggagttctaccaaaatgttttgggaatgaaattgctgagaaccagcgagcacgaaaatgccaaattcaccttatatttcttgggctatggtgttccaaagggagacagtgttttttcatgcgaaagtgtattggaactgactcataactgggggacagaggatgacccaaatttccagtaccataacggtaattccgaaccacaaggttatggccacatttgcgtaagttgtgatgatgctggcgccctttgtgaagaaattgaaatcaaatatggcgataagattcagtggtctcctaaatataaccagggcaaaatgaagaacattgcctttttaaaggatcccgatggatattccattgaagttgttccacatggtttgattgtttga

SEQ ID NO: 4879 - DNA, 3273 bp, Saccharomyces pastorianus
atgtcaatttaccatctgccaacgctactgaacccgttgattaacgctatatttaactgccctgaaccagacaaatcgccgttgaagaagcttttcgctaatttgcaaacccgtaggtttattcttctggcgcctccttcccacctcctgttgaactatcacgatgttaaaactaaactgccattacatgagctttgttataatgctgattttatcaactcccacatattgttaactactgagaactcttatataaacacgactttacgagacgatcattacgaaactttagatggtaagactgtagttattcaatggaaaaataatgtcattcacactttgaatggattctctctcaggcgaagacttaaaattttggatacgaaaatattacccaatttcaatgactactttgaaggggctgaatatttcgctatattatatatagatcagcctctaggttgcgaatttgttcctaacgactacttgcactgtttcaatagttatggggaaagtccaaaacttgcacgcaatgcacccaacttgctaatggatacttcccaactagaaagatcatcatttgagaatatattacatattcatccggcttggttaacacaactgggtcaattgttttccaattacagaagagttgctcctaatgacgatccttcgaagaaaatgtttgaagaacttgtagaacaagcatttgatggaatgaaatctgactcacttttcaaaaacttttctaacctttatgatctcatacacgactattttgagctgaatctttatgaagacatttggtccagacttacaatacattttaaaggctatgaagtagatactgataactgcgaatatttttcagtaaaccagctattaacagatttttactcaaaagactttgacagctttaagctaagtgacatcacttttattgaaaggcacgttagtgcagcgtccaagaattttcaaaaattgactttaagccattcctacgcagaaaaatctaagatattagttgagactttacaacaactatcaggaaccagtgatataagctcccaacaatcggatctgtcaaatggtttcaataatctgacaatggatgcggacaccctaataagccttttcgtacttgttgtttgcagaagcgaacaaaagcacttaagaagccatctttactacctacaaaatttttcgaataactccacctcatcaaaattcggaattttggggtatgctatctctacactagaggctgtggtttgctattttgaaaacttcaacaaaaatactaataacgtggcaaaggccaatttattgtgcaaaaaaaccagagacctattacacaaattgtcatgtgaaaaccccacaaacgaagtaaatgatctagcatcataccaggatatcttggcatacaggaatgagcaaggacaatccatcttatctatatgtataaccaataagaaaaacgacattttattagatgtcctttctgaatatgaaacactttttccaatagaggacattttggaagatgaaactattgacggttccacgctactcatagactcaatcaaagcagggaatatcgaggctacaaaaattcttatcaggattttgctgtttaattgcactgatgaagaattggttacgtatattaacaaaacggataaatatgcgcgttgtgtagcacattacctaactcatgaaatggatatactcaaaagcattggaagctatataaattggaagcaaaaaaactccagtgggcaaacacctttattttctatatttagaagttacgatcaaccaaattatgaagaaatggtgaaggtggccttcaatattgcaaattcttggtatcaaaaccacaacagttcatttggttattcagatcatacagacaacaaaggcaatagcttactacatgttctgaagacagacgtgtcaattcttttgcaactagctaagttgaatatcaacggagaaaactacaagggtttaactccattgatggtatacgtcaagtacaaaaggataagcaatattgacgctattacaaaagatcatagattaatactagagaaggttcaaaactccactttctttacttgttttgattatgcaaaggatcgtttggtactcagcaagataggagaaagaggagcaaatgattcaattttcggattgatttatcttcatactcttcggtatcataatttaaatgctacagtgaatgtgacatctgtttcaaatacagaggagcctttcgtaacaactgttatcaatatgaaaacaattcaaggtttgctacgttcaatcttgaaggacaatccatttacgtttttaccaatagataattatatcgatggaatttcgcatttaaaccgatctgatatgacaataatagggaaagcagatgtcagatccctactgcacaaattaactaactgcttcaacgtgcttctcttcttaaagaaagttccagaaaatttattcaccgacgaagcctctgttttgtactggatgcgtataaacacttccagaagaaatcagaaatcgcccagtaaagaaaatcccaaaacaatggaaccagaggaaattaatatgatacagagctttttacgtttcaattttgatgaaatattgtcattcaaagcgagcctgaatattttgagaaagatcttaatattccttagcttaaaatctagtgactttgaagacgcttatgccagccttctgaaaatgggtaggaaggtcaccaatgccaaagctgccgatgcttttacaacgagcataacaaataataaaatgtttagcgatttgtcgctagatgaattgctggagcatgtgcgatttttggaagaatgtaccgttcagctattcaaatccatccagacaatactgtttgatagaatcccaaactggtggaaacattacggtgaactcttgagtttgcacaaaaactaccggaaggcatttcctagtacagttaaaccaaaaagtacggctggtaccgctagtcatattccacttggcggttttattgaaaccaaacgcgaacagtcagagcagcggctgtctgttcaaatcaaggcttcttcaaaaatcctcaaagaacttggaagtgagatattttctgctcatgaaaagttggctgaagagttaagcaattacatggaattcaggaaagcatgtctggatcaacgtactattgtagcatttgctataaaaaacatcagcgttctccaagaatgtatataa

SEQ ID NO: 4880 - DNA, 1104 bp, Saccharomyces pastorianus
atgggttcttgggatccttctttgaacgctttcaccgatgtcaagtatctcggaaccaatgttaccaacggtaagccagttaacaagggtaagtgtattgccgggttcgacaacacaggtttcctgacagccacttcatctaccttgttcaaccagtttttgctacgtttgaattctaccggtttaccatcgttcatcgctaatctggccacggatttcttaaccgacttatccgaagctaatgatgacattgccatttacgctccaaatccattcaagggagcaaatttcatccaaaaaaatgccacctctggcattatcgactctgatgatctattcttggttgatggtggtgaagataaccaaaatatcccattagtgccattgttgcaaaaggaacgtcaactggatgccatttttgccttagataattctgctgacaccaacgactattggccagacggtgcctctttggttaacacttacgaacgtcaatttggtgtccaaggtttaaatttgtccttcccatatgttccagatgctaacacatttgtcaacttgggactgaacaaaaaaccaaccttttttggttgcgacgcaacaaacttgaccgatttagattacatcccacctttaattgtttacattccaaactccagacattcgttcaacggtaaccaaagcactttcaagatgtcttactccgactcagaacgtcttggtatgatcaaaaatgggtttgaggccgccacgatgggcaatttgacaagtgactctggattcttaggctgtgttggttgcgccatcatcagacgtaaacaacaaagcttgaacgctactttaccatccgaatgtagcaagtgtttctccaactactgttggaacggtacaattgacaataagtcagtctcaggtttaggcaacagtgacttttcctcttctgcctctctttctgcctcagccgctgcagcttctgcctccggcaaatcctcctctactaacaagaaaaatgcaggtaatgccttagtggactactccggattgagtaccaatacctttgttggtgtgttgagtgttatcagcgctgtttttggtctaatttag

SEQ ID NO: 4881 - DNA, 885 bp, Saccharomyces pastorianus
atgaagttgcaaaatttgttagcgtctgctacaattttgactgcattgacagaaaatgttgacgcgtggtcaccaagtaatagttacgttccggcaaatgtaacctgtgatgacgatatcaatctagttagagaagcctctgacttatcaacaaacgaaaccgaatggctaaagaaaagagatgcgtacaccaaggaggccttacattctttcttggatagggccacttccaacttcagcgacagttcgttgctctccactcttttcggtagtaattcctccaacatgcccaagattggtgtcgcctgttccggtggtggttaccgtgccatgttgtctggtgcaggtatgattgctgctatggacaaccgtactgttggcgccaacgagcacggtcttggcgggttactacaaggtgccacttacctggcgggtctgtcagggggtaactggttgacaagcactctggcctggaataactggacctctgtgcaagacatcgtggacaacacgactgcatccaactcaatctgggacatctctcactcgattcttaccccaggcggtatcaacatcttcaagactgggagcagatgggacgatatttccgatgatgttcaagcaaagcaagatgccggtttcaacatctctttggccgacgtatggggccgtgctctggcctacaatttctggccaagcttgtaccgtggtggccaaggatacacatggtctactttgagagaggctgacgttttcaagaacgcggaaatgcccttccccattacggtcgcagacggtaggtacccaggtaccaccgtgataaacttgaatgcgactcttttcgagttaatccattcgaaatgggttcttgggatcgacagctga

SEQ ID NO: 4882 - DNA, 159 bp, Saccharomyces pastorianus
atgggctgcttggtgttctccttcttctatgtctttttctttgtctgtgaaactaaaggtttgactttagaagaagttaatgaaatgtatgtagaaggtgtcaagccatggaagtctggcaactggatttcaaaggaaagaagagttccagaggaataa

SEQ ID NO: 4883 - DNA, 1608 bp, Saccharomyces pastorianus
atgcctgagctcgcgatcaatcctatcgagagcggttctcaagaactttcaattcactctacttcagcagtaaaaaagctagaaacagatgacttccaattacaagccaagtctgaaaacaatatcgccgaacttccacaaaagccaatcaccgcttactggacagttatctgtttatgtctaatgattgcatttggtggtttcgtttttggttgggacactggtaccatttccgggtttgtcaaccaaagtgatttcaaaaggagatttggtcagatgaagtcagatggtacttactacctttctgatgttagaactggtttgattgttagtattttcaatattggttgtgctgttggtgggttaacattgggacgtctaggtgatatttatggccgtaaaattggtttgatgtgcgttattttggtgtacattgttggtattgtgattcaaattgcttccactgacaaatggtaccaatacttcatcggcagaattatctccggtatgggtgtcggtggtattgctgtcttatctccaactttgatctccgaaactgctccaaagcacattagaggtacttgtgtttccttttaccaattaatgattacactgggtattttcttgggttactgtaccaactatggtaccaaagactactccaactcaattcaatggagagttcctctaggtatgaactttgcctttgctatcttcatgatcgctggtatgttaatggttccagaatctccaagatttttggttgaaaagggtagatacgaagacgctcaacgttctttggctaggtctaataaagtcacaattgaagatccaagcatcatcgctgaaatggacactattagggctaatgttgaagttgaaagactagctggtaacgcttcttggggtgaactattttctagtaagggtgccattttacctcgtgtcattatgggtattatgattcaatctctacaacaattgaccggtaacaattatttcttctactacggtaccactattttcaacgctgttggaatgaaagattctttccaaacttccatcgtcttaggtatcgtcaactttgcctctactttcgttgctttatacaccgttgataaattcggccgtcgtaagtgtctactaggtggctctgctttcatggctatctgttttgttatcttctccaccgttggtgttacaagcttgtatccagatggtaaggaccaaccctcttctaaggctgctggtaacgtcatgattattttcacctgtttattcatctttttctttgctatcagttgggctccaattgcttacgtcattgtttctgaatcttatcccttacgtgtcaagaaccgtgctatggctattgctgtcggtgctaactggatttggggtttcttgattgggtttttcactcctttcattacgagtgctattagtttttcgtatggttacgttttcatgggctgcttggtgttctccttctctatgcctttccttgtctgtgaacctaggttcgctttgaagagttatgactgtcttcaagtttcagctggaatccggcatgattccagcagacatccgagatataactgtatgatc

SEQ ID NO: 4884 - DNA, 183 bp, Saccharomyces pastorianus
atgcaattatacaaaaagttttatttgagggagatgagagatcgcgatgatcaacgagacactacaatggtattaactttatctcgatttcaaaaattgtttatgatgatttccacatttcacgacggtcaactgcgtttttcgaatgtttatcgattaactttgatgatatttcgcccgtga

SEQ ID NO: 4885 - DNA, 2685 bp, Saccharomyces pastorianus
atgacggctattggtaatatagatgatgcacttccagccaatacagccgcaagtaatgaaaatagcaaaactaggctaagagtccaaaaagcttgcgagctttgcaaaaagagaaaagtcaagtgcgatggcaacaagccatgcataaactgctctaaacaccagaaagaatgccgttatgatttcaaagcaacaaaccgtcgaagaagaaggcgacaagctacgtcacccatacagaacattaataaagaatatcccgaggccgaaggtgttttctctagagatacgtcagcaaatttaaacattccttcagactgcctatcctcgtctgctggaaactctccatattccaattcacattactctaatttacaatccacaataccatttatgagtgttaggccaaatcgtgcttcccacaccttcaattccacagtcaatgcgaatggtgataataacacaaatgcctttgttgaggatcacatggctaagctattattacaggtaggctcgaagctgaaaaatactgcgaatgaatcgtccaaagtcaacaaaaacagtgataataatgtgaacacaaacctggcgacaataaacgtggacagtaatcaagcaggaaatacgtctaaccgcaaatacgatatgcgtagttcttcagagacccttgatagtaacaacattaactctgagaaagacgagatgctcaactctcaaataatgagcatagttaatggccatgttgaatcaccctggcagacgttttctttagataagtataggttccacagacgttaccagaatatattaccctattaccttggtgcatctattttgaaggatatatcgccgcaggcgattgaatatgcaaacttaaagcgcccaagagtccaaaactatggttggaatttatctggtggccattatctgaaatacaaagaagactttagaaggcaggataaattcataaggcatgaatccaagtttttcaactttgatgaccctgttcatttatctttagtcaacaaattattaaggtattattttgatgaaattaatcctgttttcagtatcattcacgaaacaacattttggcaacaatacaagaataagtttttgcgacaaggcaaacaaaataactcatccgcgaagttatttacctcgatactttatctcatactgtctactacactacggtttaaagagggtcacctagataaccaggaaggagaagaaaagcatagcggttcctcctttaatggcactttcgaagaggaatccgttttgaacaaaaaaccattcatagaggagatgatgttcgaatatgcctattctataattaacacgttgacctttgaatgggagtcatttgaattgatacagtcctggcttttaatcgcgttctattttaggacctgttatagacaaacagcgtgttggaatgccttaagccaagcagtaaatatgtgtaatggaatgacattatatttgaacaagttccctgaaattcattccacgtacgatgaatcaaaagcatggcattgtttttggtgttgtttcataatggataaattaatcagtttccaaacgggccggttttaccagttgtcattacctgtaagtgaaatgttcgaacaaatgaatttagtaaagtcaaagaaatttttacaagatgaagatgactggttccataaagaaaccttccaaatgctagacctatccataatagtaacaaggtttttaaaaagggacgctcaagatttaaacttaagcgagactattcaactacggggtcaacttgctcagtggtacaatacttttatgacagataaggatattaatacgtatgataagaattaccacgggttctaccagcttcaaccgctcatgacatacctggacataagtctaacttttgaaatcagacaattattctgtttagtagctccttcctctaatgcaaatggtaaatccttagactatgcagtggacacccaattactagtgtcccattgccaaatggctgctgacaacctgactaacattacaaaaaggaacctattcttcgttccctggtggctaaacctgtcacaattattcacagtaaatttaatttgtatcatctatatgcacgcagggatcgccgtcacacaaagtaaagctatcatgcaaggttgcaatcaaatttggcgaactatagatagttccaagcctaaaaactctcccgcaatgctccctgaatgcttatggtgcttgaaaatgttgaaccatatgttctgtattcgattgagggattctgccttgcaattagaatcttcgcttggtacagatcatggcgatgatacccctaacaagaacaaatttgagcaattcaagaaggtcggcgatcaggatgcggatgatgaagctgagatagacgaaggaggagaagagaacgcagatgagagacaagaaaatccgctcaagcataatcgaaaagtacccccattgacaacaagatctcataatatcactaccttgaacgcctcagtggggatttctccagaaagtggtataccaaattctgttaaaaattccgggttgccttctgatgttcttgatgcaagcaataatataagagactctaccgacgttttcgatgatgatctattttctaatttgctatggtttgatcaaaattttgcctga

SEQ ID NO: 4886 - DNA, 372 bp, Saccharomyces pastorianus
atggtgagagctgtgaataaattggaaaataggttcggcgtaagttatccaatagtgagtgtatcttgcaagactaaggggggcatagaattgcttattgatattttaacaagaaacttcaaacacctgtctcaatcgagtgccgattcgagtccgattgttgtttccaaaagagttactgagatcctgaaaaacgacgtgttttatggtttggaggagttcttgaactctaaagactttgacaatgatatcgtcatggccacagaaaatctaagatacgcatctgacggaatagctaagataacggggcaggctattggaattgaggatattttggattcagtgttcagtaaattttgtataggaaaatag

SEQ ID NO: 4887 - DNA, 273 bp, Saccharomyces pastorianus
atggctcaattgactgcaattattgattttgctgatgataatagccaagaaattgacaatacggatatgatattccatggagtggaaaacaatatcaaacgtttacgggatgaaattttctctttcattcaaaaggtcgaaaaatcttcaatcttgcaagacgggatcagactagtattactcggggcccctaatgttggtaagtcatctttagtgaacaggttaactaacgaagatatatcgaacgttagtgatatcctggtactactagag

SEQ ID NO: 4888 - DNA, 156 bp, Saccharomyces pastorianus
atgaatgctttatttctcctgcggccacatttcgtttcgaatcctcttctttgcaaaagagcagtgaataggttgtccggatttacaaagcctgcaacttcacacctaccaacaatctatgcctgtctacgccagcaaaccagacctctgcaatag

SEQ ID NO: 4889 - DNA, 1137 bp, Saccharomyces pastorianus
atgaagccgttcccatacagtacgtggcattggagccgaaccattagacctctttcacggtgtttacccgggacttgcgttcttcagcaaagctcaagattgacctcaaaacgatacctgtaccactcaacgtcgaggcaacaacaacagggcttcctacccgaatccgagctcgcccaatacagagactactatcaaggcctgaagggtgcgataaacgagatacctgaaccagtggcctccaaatcgccttcattaataacgctccacaagagattacaactgcccaatgaattgacctactcaacgctatccagatgcttaacgtgcccctccgcaaagctgcccgataagattaacgatccttccaagggtgcggcctttatcaacactgtgcccacaaataaatatttggacaaccatggtctgaacatcatggggaagaatttgttatcctaccatgttaccaaatccatcatccagaagtacccaagattgccaacggtggtcttgaatgccgcggtaaacgcttacatatcggagatagtactggctcatattgccaaatactggggtatagaagtggaaactacatctgttttgtctcgttatttgaaaatggagcctttcgaattcaccttagggaagttgagattcttcaataattcgttgaactctaaggacggtattgaattaatcactggaaagaatttctcggagacaagtgcccttgcaatgagtgtgagaagtataatagctgccatttgggccgtgacagaacagagagactctcaagcggtttacaaatttattgatgaccatataatgagcagaaaattagatatcacgaaaatgttccagtttgagcaaccaacaagggaactggccatgctatgtcgcagagaagggctggagaaacctgtgtcgaaactagtcgctgagtctggtagactatccaaatcgcctgttttcatcgtacatgtattttcaggtgaagaaactctgggtgaaggttacggttcttcattaaaggaggcaaaggcaagagctgccactgatgccttgatgaaatggtactgttacgaacctcttgctcaacaggagccggttatcgaccctggcactgtcgtcgtctag

SEQ ID NO: 4890 - DNA, 1419 bp, Saccharomyces pastorianus
atggctatccctgaaaggtttatgaccaatgacaagggcacctttggtgaatacacagccagttcccgttggcccattattctacaaaatgctatagacgatttgactacgcaacaagaattggaaaagagtaacaccaccaagtttcaacaagctgagtctatcaaaactgggttgaggcagttccgccaagatgtcattgaccgtgttcgtttgagaccgttcactgaagaagagatcaagttggcaaacgtcccgctttcgttcaacgaatacttaaaagaacactccgaagccaattggggtgacgtcgaatggttattctccgaagtttacttgtacagaagagttaatgttcttttccaacgtgaatccgaatgggctgagtttgatatttttaacagactgaagcaatctacttttgaatcttcattccatggcgttgtggagttggctttaaggtaccaaaatttgttgccccaattgaaaaacattgggcagaactcggaagacaacgacgaggatttattgaaagtccttttcaaagaatttatagaaatttctttatggggaaatgccactgatttatctttgttgaccaatgccactttagaggagattaaatctatccaaggggccaaagcaagagcagaatctgagtctaaaattgttgtgaatgacaccgacaaggcatggggcgtattaactaacgccaaggccaatgctaatggcaaaccaattcgtgttgattttgttctagacaattctggttttgaactatacgctgatttaatgctagcagctttcctgttagaaagtggactagccaccaaatgtatcttccatgccaaggatatcccatatatggttagcgacgttatgttaaaggatttcgacatcttagtccaagacctgagagaccgtgaatttttcccaagtggccaaccgtcaacaaaggaatccagagcccttgatttctttgccaaggaaatgggcaagttcatttcgagtggcgagctagaatttcgtgaagattctttctggaccacggaactagactattggaatttggatacaaaagaaaccaagtaccatggttctgttttacataaagatttactaaattctaacctggttatcttcaaaggtgacctaaactatagaaaattgacaggagatagaaaatggccccgtaccactaaatgggagaccgcaatcggtccccttgctaccaacggtatcacgtctttgagtttaagaacctgtaaagccgacgtacaggtcggtttgcctgaaggtctcgatgctaaattgagtcaagaatgggaaaaggaaaatccaggtcgtggttcttggtggtgttgtagcggtaaatgggcagttatttgtttctgttctggtaagtcagacggaaactaa

SEQ ID NO: 4891 - DNA, 945 bp, Saccharomyces pastorianus
atgatttcattgcagaattgttgtattatcgacgttggaacataccatactgatatcattcccatcgtcgattatgcacaattggacaatcttgtgtcgtcactaccagtgggtggacaatctatcaatgaatctctgaaaaaattgctaccacaatgggatgaggaccagatagaatctttaaaaaaatctccaatttttgaggtgttgagtgatgatgccaaaaaactatcaaattttgattttggaaatgacaatgaggacgatgaagaaactttgaacgttgctgaaatcataacaagcggccgtgatacacgtgaagtcctagaggaaagagaacggagccaaaagactaaaagtgtcaaaaatagcgatttagaattcaacacattttgggataagaacggcaatgaaattaaagttggtaagcaaagatttcaaggttgcaataacttactcaagggtatttctaatcgtgtaggattgactctagataagattgacgatattaacaaagccagggctgtttgggaaaatatcattattgtcggcggtactacgtcaattccagggtttaaagaagctttgttagggcaactattgaaggaccatttaattttagaaccagaggaagaaaagctgaaaagagaggaaaaagctagatctgtgctacctgctacaacgaaaaagaaaagcaagtttatggcaagctctactgcgtttatcccaagcatagaatatgtgcagtgtcctacaataattaaactagctaaatatccggactattttcccgagtggaaaaagagtggatattctgaaattatatttttgggcgctcaaattgtttctaaacaaatctttacacatccaaaggatacattttatattacaagagaaaagtatgatatgaaaggcccagctactctttgggacgtgcaattttaa

SEQ ID NO: 4892 - DNA, 438 bp, Saccharomyces pastorianus
atgaaattagcctccccttcaaatcctaacttcttctataaggataacccccaatcttcgatgactacagcatcgtcagcattatcatttaaatttgaaccgcctccaaaactatctctaaatcacaaaagagtttctagtggttcgtcaataaattcaagtgaaagtacaggagaagaaaatttctctcccatattcagtaaatcctccatgagcagcaacagtaatttaagtacttctcatatgttattaatagatggcttggacaactcatcatattttagttttgaggatgacagaagcaccaaccggcaagcagatcaaggtgatgatcaaggcgaacaggattttacttttgttggttcagatcgtgaagattttcctagacctgctagaagatcgttatttccttctttccaaaacgatgagaaaaattga

SEQ ID NO: 4893 - DNA, 1032 bp, Saccharomyces pastorianus
atgaataatatatttcatggaaacaacgatgaatatgcaaacgaaggtactctgagctctcaaaaaatctccttgaaaagtccattcggtaagaagaagaacatattcaaaaatgtccagacatttttcaagtccaagagtaaacattcgcctgccaatgatgatttggttaatgaagaccatctttcattccataactctccactattgactggatccagtgatcatgaaatagatattccttcaccaacgataacacagttcgatcgccatggtgagcacgatgaaaatgaggatgatgatatagtattaaatatgcattttgcttctcaatctttacaaagtccaaccaggaattcatcgagaagatctttaactaacactaaagagaatgacctattaaataggatcaaatacccaagaagcccccagaggtccagctcattttcgagatcaagatcactatcaagaaaaacgagtatgaatagtagtagtaattccagcaagagggtacaaagacaggatggaaaaatcccaaggtcgtcaaggaaaagctcacagaaattctcacatatttctcaaaatttcacttcagtatcatccagtccactggctttcgattcgacaaaggaaaagtgttacgagtcatgcctggggaaaacacaaataccatattactatgatgaccaaatttcaaatgattttttccctcgtatatctccagaaacattgaaaaacatcatgcagaataatatatgccagccattttacaattcgtgttgtattgtagactgccgatttgaatatgagtatacaggcggccacattatgaattcgattaacatacactctagggatgatatagagaacgaatttatccataaagttctgcatggtgatactcacaataggaataagaacaacaacaatctaccaactctactaattattcattgcgaatttagttcccatcgagggccgctattggcatcccatttgagaattgcgatcgacaagcttgatccgccataa

SEQ ID NO: 4894 - DNA, 549 bp, Saccharomyces pastorianus
atggcgtggaatggcaacggctccagtatcagagtgctggaggagccaactactgtcggcaatatagtggcgatcaattcgaacggatccgtaagccggcctccatcggagttggtgcaagacgaacaagacgacgacgacgaagacgacgacgacaagtccagcgtagagcccccgacacctacacccactcccacgcccactacatccaagactaaagagaataccagcacgagcccaaatacaactacaaccacaaccacaactgccagacagaaacagcccatcaagtacatcgaaaacaagacccgcagacacgtcaccttctctaaaaggcggcacgggatcatgaaaaaggcatacgagctctctgtcctgacgggtgccaacatcctcctgctgatcctcgcgaactccggcctggtgtacacgttcaccaccccgaagctcgagccactggtgcgggaggacgagggcaagaacctcatcaaggcatgcatcaacgctcccgacactccaccggcacacgatcaacccgccaccaactga

SEQ ID NO: 4895 - DNA, 1047 bp, Saccharomyces pastorianus
atgacgcgtaatcaagatccatcgcttctattgaccagaatgccagagaaaagaaaacagaacataattagagtgatggatgaggagtcagacaatccgctattggccttcaatggttctaacgggcttcaaagtgaccccactataccgaatggcttagatggttcagtggccgatccgactatagcagacccaacggcgattgcatctaaaaagagaaggcctcaggtaaaactaacggcagaaaagttgcttagtgataagggtctgccatacgttttgaagaacgcgcataaaagaatacgaatctcctcgaggaagaacccttatgataacttatcaaatatcatacagttttaccagctctgggcacatgaattgtttcctaaggcaaaattcaaggatttcatgaagatctgtcaaacagtaggcaaaacagatccagttttgagagagtacagagtaagcctttttagaaatgagatgggcgtgagtttaaatgttgatacaggggaggctgagcaagagctagaaacacaagagcctatagctacagaacatgccgatgctacgaacgcggaactagttacagcggcctcactcaatatacaagataatggcaacgacgacaatggtgacgacaacgaagaagatgacgatatctatcacctttctgcgagtaacagaagaaagagagttctggatgaagaggagaatgatgcagcagtcttgggaactcaaggcctttcaagcgttaagaatataccgtctaaggaaccatatacagtactgaaaaaatttaaggaacaagggcctgctgaactgaacatagatgagaagaaactcttatcaagatggctagatgagcataggagtatggagaaggttttaatgactgaagaagatattcaactattacgaaagctggaagattgggagatgaacgatgcagaagtagcaatgacatataatgattttgtaacaggagaggatgattttgatattgaccaagatgagatagatgccatgaaagaaatgggattctaa

SEQ ID NO: 4896 - DNA, 624 bp, Saccharomyces pastorianus
atggcggatcagcttgtcgatctattgcggatgaaatatcatatccaagtgcaacagcacatacaagaaatggatgagaactttatgggtagattggataaagagggaacggttgctcagtacgtgaaattcaacgaaagatataagaaattgcaagagttatataaaaagtattcagaaggtacaaaaaagttcgaagaaagatttcaagatattgacaacaagcagcagctccttcttcatgagatgcaagaattgaattcactatcatcgagattaaaatacgatatgcggattttggaagtccgtgtgagagacattgaaagtagtgttgctcaatttgattctaaattgattgggttaaaaaattccctgcaggggcaaggtaaggccagtatatgctcggcgatggatcccaagaatgataaagagcaatacgataggtgcgtaaatgatctgatgaccactagtaacccctcttatgaagctctgtgcttgaagatgttgagccgccgttatttgacggatttgaagcacgatactatcggttggtttagatggttgtttggcaacagttctttgcatagaaatgtcaatgacgacgatagaagcatacaaatttaa

SEQ ID NO: 4897 - DNA, 1485 bp, Saccharomyces pastorianus
atgttggacactattactacagataccacagctggatggcttgaaaaaagtatgcaagattttgacgaaatctcccctcaaagggatgtacttgatgatgacttccttagtaaggaacacggtcaagataatgcaagtgcagattactacgacgaggtagacaatgaagggaccaattatagtggcagtggctattatggttactcggacgactcagagaccattgggctggcgagaaacgacacctcgggtcagtttccaccactagacagctttattttcccagattctagggctctgttcttgttggatttggccacctatactgatctgacttatgaagaaattatcatacacggcttcgaaatctatatagtggaacagtgggtcgcatgtagaaatttgtcaacattaatcacatcatacacaggaaactctcaagataccatatcaggaatcagggttgttttgccaaaggaaacacgcgtgtggcctggtaagtttaaacagtattacggagagttgatggagtttgcacggccaaaattcacgccaaaaggtactctttttattaccaatttatcgggcgtatcctttggcttgaacctattgcacgtggaatgcggagacttgaggacaatttggaaggatttcgaggttaatttcgatttgaaaaaccttcattgcggtggacgatcgggaaatttattatgtcctccgacgatggcgtcactcgagaagttttcacaactgttcagaattcccacgaatagttttatagcccaacatcctcaaatgatacagcagcagcagccacgtttgtctgcggaagagtacaagtttttcggcagccatcggaatgggatcagtagtggtaagtctcccgttgtggagatgataacgttggttcaaatctcattaagctacttcaattttttacacaaaaattaccaaacagatggtcttttatgcgaagataccaagcgagctatagatgagtggtgggaaatttacgggaaattgtatctcggaatggaaaaaccgaagaatgaatgcactctgggtccaacaacagtagctggtctaattagtttgatcctgtgttgctatttcaaacttatgattgaaaactgcatttcctccaaggatccatttgatgaagtggaatttttccaaggtgtctataatttccaaaaaaagcatggcctaaataagggaatttcaagagcttgtttgaatccaagaacattagaaaaactttttgaagtgacggcaaagatttctaacaaagacattttcaaactcaaaaaaatggtaaaatcaaccatacaagacattatagggaagggcaatcccattaatttgtcacacgatattctcacgacagatctagacacactcgttcataatattcacggaggttccgtgggaatattatggaaaggtaaaggtcaaccaagaaaaacatgtagtcgatatatctaa

SEQ ID NO: 4898 - DNA, 546 bp, Saccharomyces pastorianus
atgcctcacggataccaaagtgtggagaatattgaacatgatgaacatctggctcaacaacgacattcgacagaggggtttgagggaatggttatcagtgatatcaacagtgtcacggacggcaccaacgaaaacgttggtggtgatgaacatggttctaatggggtattcaattttggcgacgtcatgattcatcaagtgattcataccatcgagttctgcttaaactgtatctcccatacagcctcatacctgcgtctttgggcgctatcactggcacacgcacaattgtccagtgtgttgtgggacatgaccatatcaaacgcgttcagttctaaggattcaggttcgcctttagcggtgatgaaggtggttttcctgtttggtatgtggtttgtcttaaccatatgtatcttggtcttcatggaaggtacctctgcaatgctgcatgcattacgtttgcattgggtggaggcaatgtccaaatttttcgaaggtgaagggtacgcatacgagccattttcatttggtactataaccgagtaa

SEQ ID NO: 4899 - DNA, 2100 bp, Saccharomyces pastorianus
atgaaccaagaagaagctatattccgctcagcggacatgacatatgtccagctgtacataccattggaagttattagagaggtgactttcttattagggaaaatgggtgtctttatggtaatggacctaaataaagacttgacagcttttcagaggggttatgttaaccagttgaggcggtttgatgaagtggatagaatggtgagtttcttgaatgaagtagtagagaagcacgccgcagaaacctggaagtatattttacacattgatgacgaaggaaacgacatcgatcagcccgatatgctggaactcatcaatactatggaactacagtctttggaaagcgttaatgacatggtgaaggaaatcactgagtgcgaatctcgtgcaagacaattagacgagtctttagataatcttcggatcaaactaaacgatcttttagagcaaagacaagtaatattcgaatgctcaagatttgttgaagttaacccagggattgctggaagagccagaaatgctgaaatcgaacgagaagaaatggacgtggacgacttcaggctaaatccggatgatgtaagcgaaacattaagcgacactttttcttttgatgatggaagttcagagaacttaaatactccgagaaataatattattagaaaccgatcgaccgaagatctaagctttttagagcaaggataccagcatagatatatgataactggttccatcagaaggactaaggtagacgtattaaacaggatactgtggaggttgttacgtggtaacttaatctttcaaaattttccaatagaggtgccgttgttggaaggcaaagaaaaggtggagaaggactgcttcatcgttttcactcatggtgaaacactgctgaagaaggttaaacgtgttatagattctttgaatggtaaaattgtttctatgaatacacgttccagtgaattagttgaaactttaaacaaccaaatcgatgatctacaaagaattgttgatacaacagagcaaactttacacacagaactgcttgtcatccatgaccaattgcccacatgggctgccatgatgaaaagagaaacatacgtttataccacgttgaacaaattccagcaagaatctcaaggtctaatagcagaaggctgggtaccttctacggaattagttcatttacaaaactcgttaaaggattacatcgaaacattgggttctgaatacagtactgtcttcaatgtgatcataaccaataaactgccaccaacatatcacagaacaaataaattcacccaggcgttccaatcgatcgttgatgcatatggtattgctacctataaagaaatcaatcccggtttagccactgtagttacttttcccttcatgtttgccatcatgtttggtgatttgggccatggtttaattttatttttgattgcgttgtttttagtgctaaatgaacgtaaattcggggcgatgcgtagagatgaaatttttgacatggcatacactggtagatatgttttgctgttaatgggtgcattttctgtatatacagggctattgtacaacgatatcttttcgaagtctatgacgttattcaaatctggttggcaatggccccacacctttaggaaaggtgaatctattgaggcgaaaaagattggagtttatccaatagggttagactatgcatggcacggtaccgataatggattacttttttctaactcttataagatgaaactgtcgattttaatggggtatgcacatatgacgtattccttcatgttttcttacatcaactacaaatcaaaaaattctaaagtggacataattgggaatttcatccctggattagtattcatgcagtcgatatttggttatttgtcatgggctattgtgtataaatggtcgaaggactggatcaaggatgacaagcctgctccaggtctactgaatatgctaatcaatatgtttttggcaccaggaacaattgatgatcattatttcctggacaagccaagttacaagttgtactattgcttgcggcgctggtttgcgttccatggttgttgttatataaaccgttaa

SEQ ID NO: 4900 - DNA, 984 bp, Saccharomyces pastorianus
atgtacactattgcaaacagcatccggaccggaactcgccgcatgacatcaattgaagacatcatatcaaacccgcccctgctgctgcactcttcactgtcgcagctccgctacctcgtacttagcgaagggctccccatatccgaagacaaacagcagcagcgtacacgatgctacgtgtggacggtgctctcccaaacgtccatggagacctcaacgcagcggtaccttgcgctcttaaagctgggtccgccctccacgaccatataccagaaaatcaagaacgacacttccaggacttttcaaaccgacccgaatttcaggaatagagtctcggaagacgctctcatacgctgcctatcgtgctttgcctggcagacccagcaaagaaggcggaaggcccagttcaacgaatcctcctccaagacaacccgcattccggtgagcacctacgttcagggtatgaacgtgctgctggcccccatactctattcgtgcccgtccgagccgatggcataccagctgttctccaagctgtgttacgagataataccgacctacttgaccaagaacttgaacggcgctcagaatggcgctaagctacttgacgtttccctcaggatcatcgacccgaaactgagcaaattcctatcggacaacttacttaccgccgagatttacggaatgccctccatactcacgctttccagttgcaataaaccgctagaccaggtcattaaactctgggacttcatgttcgcgtacgggttccacatgaacatcctgtttgttgtagcgttcctggtgaaaatgagatccaaggttttcaggtcggactctcccgtaaacttattacgacagttcccggatttcgatgctgatgagatcatccgactgggggtggggtttattgccaagattcctgctcagatttacgatctgctggtggaccatttaactgacccggacatatatataccttag

SEQ ID NO: 4901 - DNA, 195 bp, Saccharomyces pastorianus
atgatgatgacctcagggcaggccgttaagtacgacggcgccatggactgtatgaggaaaatcgttcagcaagagggcgtctactcgctgtttaagggttgcggcgccaacatcttcagaggcgtggccgcggccggtgttatctcgctgtatgaccagttgcagctggtcatgttcggcaaaaaattcaagtaa

SEQ ID NO: 4902 - DNA, 465 bp, Saccharomyces pastorianus
atgtctcaaacggaaccgcagactcagaagtcgcatttcggcgtggacttcctcatgggcggcgtttctgctgccattgcgaagacgggagctgcccccatcgaacgggtaaagctgttgatgcagaaccaggaggagatgctgaagcaggggtcgctggactcgcggtacctgggcatcgcggagtgctttaagaggactgccgcacatgagggcattctgtcgttctggaggggtaacacggccaatgtgcttcggtacttccccacgcaggcgctgaatttcgcgttcaaggataagatcaagtcgctgttgagttatgacagggaccgggatggttacgccaagtggtttgccggtaatctgttttcaggcggggccgcgggcggtttgtcgctgatgtttgtgtattcgctggactatgctaggacaaggcttgctgcggatgctagaggggttcgaagt

SEQ ID NO: 4903 - DNA, 1749 bp, Saccharomyces pastorianus
atgccggacatcaccatcgacaagggcgaccgtgtccagctgtacctgaccaacgggatgaacaacaccaacacctcgttgcatttccacggtatcttccagaacgggaccaactcgatggatggtgtgcctttcttgacgcagtgccccattgctcctggcagcaccatgctttacaacttcaccgttgacgacaacgccggaacctactggtaccattcgcacacggacggtcagtacgaagacggtatgaagggtcttttcattatcaatgacagagaaaacttcccctacgactacgaccaggaactttctttgtcgctgagtgagtggtaccacgatttggtcaccgacttgaccaagtcgtttttgagtgtctacaatccgaccggtgctgaacctatcccgcagaatttgattgtgaacaacacgatgaacctgacatgggacgtccagccggataccacgtatcttttgagaattgtcaatgtcggtgggttcgtgtcacagtacttctggatcgaagaccataacatgactgtggtcgagatcgacggtatcatcactgaaaaaaacgtgacggacatgctttacattactgtcgctcaaagatacactgtcttggttcacacgaaaaatgacaccgacaagaactttgccatcatgcagaagttcgatgacaccatgctggatgtcattccaaaggacctgcaattaaacgctacgtcctacatggtctacaacaagtctgccccattgcctgagcaaaactacgtagactctgtcgacaacttcttagacgatttctacttgcaaccatacgaaaagcaggccatcttgggtgagccagaccatgtcattactgtcgacgtggtcatggataacttgaaaaacggtgtgaattacgccttcttcaacaacattacctataccacaccaaaggtccctacattgatgaccgttttgtcttcaggtgaccaagccaacaactcggaaatttatggtacaaacacacacactttcatcttggaaaaggacgaaattgtcgagcttgtgctaaataatcaggacaccggtacccatcccttccatttgcacggtcacgttttccagaccatccaaagagatcgtacatacgacgatgctttgggtgaagttcctcacagtttcgacgcagatgaccaccctgacttccctgaatacccaatgagaagagatactttgtacgtcagaccacaatccaatttcgtcctgagattcaaagccgacaaccctggtgtttggttcttccattgtcatatcgaatggcatttgttgcaaggtttaggccttgtccttgtggaagatccgtttggtatccaagatgctcactctcaacaaatcagtgaaaaccatttggaagtctgcaagagttgttccgtgagtactgaaggtaatgctgctgccaacacacaagatttaaccgacttgactggtcaaaatgtccaacacggcactattccttctgggttcaccaaaaagggtattatcgctatgacattctcttgtttcgctggtatcttgggtattatcacgattgccatctatggtatgatggatatggaagatgctactgaaaaggtcattcgtgacctgcgtgtcagccctgaagtcttgatggacgatgatgatgaagaacgccaaataaatgaagaccgtcattctactgaaaagcatcaattcttgactaaagttaaaggtttcttttaa

SEQ ID NO: 4904 - DNA, 336 bp, Saccharomyces pastorianus
atgtggacagaagtggaacttttgcaagacgttttaccatggaaggaaaataccttaagtttactcaaaggacgtcctccacataaattaagcaatgatacagaagacacagtaggtgatcatggcatgtccccagtacagcagacagagtttattttgcccatcaatatgtctcagtacaaggaaaactttcttacgctggagtgcttgagccaagtctttacacaattatgcgattcagtcactgagaggatacttttggccatcattaacgatgatggtacgattgtttattactttgtttataaaggggtacgaaaaccgaaaaggaattga

SEQ ID NO: 4905 - DNA, 300 bp, Saccharomyces pastorianus
atgtacaatgagaaagaagacagttacctttcttccggaaagcagaacagtgactacggctcctctaatataaatccatcagaaagaaaaagatcaatggaggaatccggaaataatgggaacttttctaataagaaattcaagaggggctcagaactaccagcagaagttcttgatttattgagtgtcatacctaaacgccaatattttaacactaatttgctagatgcacaaaagttagttaacttcttgaatgatcaagtagaaatcccagcaaccaatggcaccaaatcaggttaa

SEQ ID NO: 4906 - DNA, 1935 bp, Saccharomyces pastorianus
  modified_base (1886)..(1886): a, c, g, t, unknown, or other
  modified_base (1898)..(1899): a, c, g, t, unknown, or other
  modified_base (1909)..(1910): a, c, g, t, unknown, or other
  modified_base (1932)..(1932): a, c, g, t, unknown, or other
atgtctagttccacaacccctgatatattaagcccttctgtggacaaagccgtagtgcccagtgataatatacacgcagaagaattacgatttagagaaaaaattaaagaaaaccgtgctgacatcctatcatacttccaactcattcaatatttggaatctcaggagtcatacgctcaggtgagagatgtttacgaggaatttcataccacgtttccattttattcgcctgcgtggaccttacaattgaaaggtgaattggcaagagatgaatttgagacagttgagaaaatcttagcgcaatgtctttctggtaaattagaaaacaatgacttatctctttggtcaacatatttggactacatacgtagaaaaaacaacttgatcactggtgggcaagaagcgagagccattattgtcaaggcgttccaattagttatgcaaaagtgtgcagtttttgaacctaaatcatcatcgttttggaatgagtatctcagcttcctggaacagtggaaaccattcaacaaatgggaggagcaacagagaattgacatgttgagagaattttacaaaaagatgttatgtgttcctttcgataatctagaaaaaatgtggaacaggtacactcaatgggaacaagaagtaaactctctaacagcaagaaagtttattggtgagttatcggccgaatatatgaaagctcgctctttatatcaagaatggttaaatattaccaacggactgaaaagggcatctccaattaatctacggacagctaacaaaaaaaacataccacaaccaggtacgtctgatatgaacattaaacaattgcagatttggctagaatggataaaatgggaaaaggagaataagctgatgcttagtgaagatgtgttaacagaaagaatttattatgtctataaacaaggtattcaatacatggtattttctgcagaaatgtggtacgattactcaatgtatatatccgggaattcggatcgacaaaatatcctatatactgcgttattagctaaccccgactccccttctcttacatttaaattatcagaatgttatgaattggataatgattctgagagcgtttcaaactgctttgacaaatgtactcaaaccctgctagcacaatacaaaaataccacctccaatgtagatacaagtgacgatgataaaaatcctatcacagagcatgaacaagatctggtatacagacaaagagaaaaactaacgtttgtgttttgcgtttatatgaatacaatgaaaagaatatcaggcctatcctctgcacgctccgtatttggtaaatgtcgtaaactaaagcgtatattaacacatgacgtatacgtggaaaatgcatatctagaatttcaaaatcaaaacgattataaaacagcttttaaagttttggaactgggtctaaaatatttccaaaatgatggagtttatatcaacaaatacttagattttttaatatttttaaataaggactcacaaattaaaaccttatttgaaacatccgttgaaaaagttcaagatttgatccagttgaaagcaatttacaaaaaaatgataagctatgaatccaagtttggtaatttaaacaatgtttattcattggaaaaaagattttttgaaagattccctcaagaaaacttaattgaagtttttacaaatcgttatcaaattcaaaattcaaatctattaaaaaagctggaattaacctacatgtacaatgagaaagaagacagttacctttcttccggaaagcagaacagtgactacggctcctctaatataaatccatcagaaagaaaaagatcaatggaggaatccggaaataatgggacttttctaataagaaaattcanagagggggctcnnagaactaccnnagcagaagttcttgaatttatntga

SEQ ID NO: 4907 - DNA, 2772 bp, Saccharomyces pastorianus
atgtatatatatatgaactatgctagcaaaggcctcatgttacaatgggtagggtcgtacgatattcgaccacgcatgcttaaatatactcgatcacttcgcaccagtgctttggtaataaattctcaagtacgcttttacagagcaaagcgagcatcactgaagtctattcctcatatacctggaattataaacaagaacgttgtggaaccaaatgaaccggaaaaaatcctcactttgaaaggggaaacgcctgaggatgtcgagcgtaatttaattgctagcaaaaaattccaagagatcaacccattagacactattcaagaaacctttgtacaatatttgaaattctacaatggaaatacgtttaagagaagtaacaaaaacttaacaactttaaaaataaatctagaaaataaagacctggatactaccgcaaagatccgttcaatttttgactatttgttggaggaatgtgacctagaaataaagagatcaagtacaactggaataagtcagaaatccgatgaatcacaaaaaaatgaagaggacttggaagagtccataatgaatgacattttccaagcaacgcaggaagaagtcgaaactgaggagggaagcatatgtctaaagagtacaaattttttgcttgagattttaaaaagttttaacgaacggtttaacggcgttattaaaccaaaggaatcagtgacagaaatgattacattcgaccagcttgctcaggcttttgaagtcgtcaaattgataccggtggaaggaaagaagcaacgaggtatatacttagttggcaatttactatatggcactggtaaggttcgtttggatcctataaacgagtccttctatatcgaatccctattgtcatttggaaactacaagaaggcgtataacttattcattaccgctaaagacaaagtagatgaacggtggtggaatgaattaggactaatgatcgcgttaaggtccaaccatttgagaaactttaaaagacttttgattgagacagatatgaagtacccaacagcgcactcttacttaagtccaagagttattaaactgggggtacgaaaatatttatcgatcggtaacgttaatgaggcaaatgcattgactgatcgatttatcagattggcagaagaagtcggggttacgagaatgaacaatcagcaaatggagctcacaaaaaagtccagaaattttcaaaatgaggaacaggcgactcagtttttaaatgaattagaaataccatcagaccacgattatattagtattattgatttccatctttacaaaaaaaatatttctaaagccgcacaacttattagcagattcatggacatacctgacacgacacaagaaaacgtcacgtttttgattttgaagacaaaattaaatatgttaaaggattttgaaaatctgcgtaacatatttgaacacaatggaggttacgaaatatccacaaacaacctcaaaatattggaagaagcgtttgaaagtgtgattgcaaagtacaacactaaaaatccaatattcagtgacttgttgttcgacaatgtttctgctttaacgaaaagtattatattagcggatttcgtggaaagttttgtagcccagcataattctggagaatggatgaagcttgacagcgtttcacgttccaagaaattcaatggcttgttgaacattcttttaggtatgggacaagaagaaaaagcctacagcatcttaaggaagttagaagaatcgtcaaataaagcaaaagaggacccaaagttactttatagccaattttattctgaggttaacgcgtatcattatgctaaatttgttgaattttacagtctccaaatccaaaatatgaaatcacagaaaagattcttacttgacaaaaaggaatgtaaggaaaaagtgaatgcacttctaaaaagaatgcaggagttagaggttgttccaaacgcagtatttttgagagaaacacttgccttttatgatcgactatatgatttcaattcaagcttcgagattataaacccattactagagtccaagcaaagtgtaagttccgaatcttcgttatccgcttcagatccttcccacttttataaccgtcgtatcattacaaaaccgttatactatgagatttggtcagtttattgtcattattaccatatcctacaaaacaactctaatatattatcgaaaaaatcatccattgtgaaaaaattaatcaagaagcagataaaaatacatcccagttgtcatccaagaactttgtttcaaatgatgacgtgcgagggtgaaattttaccggataaagctttttataaattaataatttccacgtttatgaaaagcgaagactttgaagccattccagctatattgacaactctcacgaaaaagcatgatttggatatcgattatgattttagtgtatatatatcaaagggcttgaaaagacaatatctacgaaacataagcaatgctagcaaagatgcttatgactataaaaaccgaaagatgaaactgatgaataacgagtcgctcctgaaaagaattccacaaggcataaataaagatatgatgatatctcacttgataagggaaattttgatttatatcaagtggaaagaagatagcgattattgtagctttttgatggtggaagatgcctttagggaattaggcgctgagtctattttattgaaggagctgatcgaagatgtgaataaaataaagataaatgtctga

SEQ ID NO: 4908 - DNA, 561 bp, Saccharomyces pastorianus
atgaatatcaacccggcacagcctctgcatctccctcccggttggaaaataaacaccatgccgcaaccgcatccagcagctgcttccaaccacgcacctctaccgcctcagccgcaaaaccccgtggctcccaacgccatgccggcgccttcgtccgaccaaaaatacatccatcaatgccagttttgcgaaaaatcgttcaagagaaaatcgtggctgaaaagacatctactgtcgcattctcaacagagacatttcctgtgtccatggtgcttgagcagacaaaagaggaaagacaacctcttacagcacatgaaactcaagcacacgaactatttattggatgaattgaagaaaaacaacattatcttcaactacaacaattccaccactaccagtaataacgccagcagtggtagcggtagcgcggcggtggccccggggactgaagacggcaacagcttcgatccgaacatcaagactttaatcaatgatggcgtactgaacaaggacgacgttaagcgtgttttgaataaccttattgtcagtcataacaaatag

SEQ ID NO: 4909 - DNA, 474 bp, Saccharomyces pastorianus
atgcctcccagctcaggagcaagcgtgtgtttagttatggatccggagttgcaagccattagagaggccaggctggcccaattaaaaagcaatggtggcggcgccaatggcgacagaaatggcggtgctagtaacaacggaggtgacaattctgctcctgtaggtgcagctattgctagcttcttagagcctcaagctttggagaggttgtcccgcgtggcgttggttcgtagagatagggcccaggcggtggaggcatatctaaagaaattgattggcacgaacaatgtcacccataaaatcacagagaatgaaattgtctcaatattgaatggtatcgccaagcaacaaaactcgcaaagtaacaataagattatttttgaacggaagaatttcaacgaggacctaaattcgttcgacaagcccaatgccaagaatgactgcgatgaagatgatgacgatttctttgattag

SEQ ID NO: 4910 - DNA, 822 bp, Saccharomyces pastorianus
atggattcagatacgggtaggttcttgatttgttacaaatgtaatcaaacaagattaggatcatggtctcatcctgaaaatgcaagattaataatgacatgcgattattgccaaactccgtggcatttggattgtatacctagagcttctttcaaaaacctaggctcaaaatggcaatgcccattacattctccgactaaggtttgcaaaaaaatacactaccatcaagaagacgataattcaaattacaaggtttggaaaaagcagcgttcaataaataagaaaaatcaaatttattatcaaccgttgcaaaaaattgggtgccagaatgacggcaacatccaaattatgccaactattagtaataccgactacagttacaaccgagatttcaaaatcactcaaatagacgaaaattccatcaagtatgatttttttgataaaatttacaagtcgaaaatggtccaaaaaagaaaacttttccaatttcaggaggacttaattgataaattagtatcaaatgcatcacaaaatggcaatacccaagataataaaatcaaggatattgcctcattaatatacttccaaataagtaacgacaataataacagcaaaccagctgaaaaaaaaaataatctacaaaaactatgggaccttaaggaactgtcaaatgtagtggtaccaaacgaactaaattccatgcaattcaacgacttttccagtgatgatatcagaaatttactgtgtctgaaaaagattattgaatccaaaccaaaggatgaactcttaaaatttttagacatgaaagatccagacaactga

SEQ ID NO: 4911 - DNA, 471 bp, Saccharomyces pastorianus
atggacagcggcactgccaccactgtcaacagcaatatgatggataccaacaagaaggatgccagcaagtcgccttcacattgcgacagttcgtcgccctcagcatcttctctatcttcgacttcctccaaagagaaaaagcgtcctaagagacagtcctctcagaatgttaattatgatttgaagaggaggaaaatcattacttgtgacggtacagaaacgacgtttaaacaccagcacgataaccttttacttgaggacggtattatagaggaagaacctaaggaccttttggaaaaagattctaaaggtaatataatcaaactaaatgaaccctccaccactatggaggattcaaagacctccattactggattgccgttaaataaaggcccctctgaaaaaattaaacgagagtctctttggaactataaaaaaatgtgggaggccaatcaaataattcggaactaa

SEQ ID NO: 4912 - DNA, 315 bp, Saccharomyces pastorianus
atgtctaaaaattttaagagttcatcctttggtttggattcaataatctttttcagacacagtaaatttctgatatcatcactggaaaagtcgttgaattgcatggaatttagttcgtttggtaccactacatttgacagttccttaaggtcccatagtttttgtagattattttttttttcagctggtttgctgttattattgtcgttacttatttggaagtatattaatgaggcaatatccttgattttattatcttgggtattgccattttgtgatgcatttgatactaatttatcaattaagtcctcctga

SEQ ID NO: 4913 - DNA, 693 bp, Saccharomyces pastorianus
atgtttgaaaactgtgaaaaatggaggaaggattacggtacagacactatcttacaagattttcactacgaagaaaagccattgattgccaagttttacccacaatactaccacaagacagacaaagatggccgtccagtatattttgaagagttaggtgctgttaacttgcatgaaatgaataaggttacatctgaagagcgcatgctgaagaacttggtgtgggaatacgaatctgttgtcaatttcagattacctgcttgttcaagagctgctggccacctggtagagacttcatgtacgattatggatttgaaaggtatctctatttctagtgcatacagcgtcatgtcatacgtcagggaagcctcctacatcagtcaaaactattacccagaacgtatgggtaaattttacattattaatgctccatttggtttctctaccgcatttagattatttaagcctttcttggatcctgttaccgtttcaaagatctttattttaagctcatcttaccaaaaggaattattaaagcagattccagccgaaaacttgcctgtcaaatttggtggtaagtccgaagttaatgagtccacgggtgggttatacttatccgatatcggtccatggagagatccaaaatacattggaccagaaggtgaagctccggaagcgttttcgttgaaatga

SEQ ID NO: 4914 - DNA, 858 bp, Saccharomyces pastorianus
atgaggatgacaggttctcttagtggtgagtccttactgcatggagtaaaaagaatgagaataatattatgtgatacgaatgaagtagttaccaatctatggcgggaatcgataccccaggcatatatccaaaatgacagatatctctgcattcatcacgggcacctccagtccctcatgacttcgatgcgaaaaggtgacaaaacccaccacggtcactcgtatgcaattgtttcaccaggaaattcattcggctatctgggaggggggtttgataaagctctgtataattatttcggtggaaagccctttgagacatggttcagaaaacagcttgaaaatagataccatactgttggatctgcaacagtagttgatttacaacaatgcttagaagaaaaaaccatcaaatgtagggatggtataaggtatatcattcacgtcccgacagttgttgccccatcagctcctatatttgattcgacaaatcctcttaatacaggatttgagcctgttttcaacgcaatgtggaatgctttgatgcatgctccaaacggaattgatggtcttattatccctgggttatgcaccgggtatgcaggcgtaccacccgctattagttgtaaaagtatggcatttgcattaaggctttatttaatgggggatcttatgagcaaggaactaaagaatgtactcattatgtattatttacgatacccattccaacccttcttccccgaaagttgcaaaatagaatgccaaaaactagacatagatcttgaaaagttgaagtcatttgatgtagaaaaggatgctctagaagcgattattcctcgaaaaaaaaattcagatgtataa

SEQ ID NO: 4915 - DNA, 1617 bp, Saccharomyces pastorianus
atgatgctcatcactgagtttagcccttgcaaaacagcttcttggtacgatcacaagcgtagcagcaatcacaacatgtctacagccagacctagaataatcacttcgaaggctccgctattgcctcaacaaactaccccggaacagcgttactggcgtcaatacacctctgcacaattagtcaaagaacataatagtgttactcacatatctttcaatcctcaacaccctcacgattttgcagtgacctcatccactagagtccagatattttcctccagaactagacaagtgatcaagacattctcaagatttaaagatgtcgtttattctgcatcctttagaaatgatggtaagttgctatgtgccggtgatgctaccggtttagtgtctgtatatgatagctataatccaaggaccattcttctatctataaacgcatccacacaccctactcatgtcacaaagtttcacacacaagataataaagttttagccacggcaagtgatgatagagttaccagactttgggatatatctcacgcatacgaaccacaattggagcttaccggagctactgattacgttcgtacattatctttcattcctgctgctccacatttggttgctacagggtcttacgatggtttgattagattatatgacacaagatccagcggatccactccaatctattctttgaaccacgatcaacctattgaggacatcactgcagtttctccaactcaaatcgtctcgtgtggtggcaataacttcaaagtatgggacttgactagtaacaaaaaattatatgaacgtgggaatttcaacaaagcagttacatgtttggactacgtagagaattttgattctccaatgcaatctgcgttgatcgcttcttcactagatgggcatgtcaaggtatttgatccattagacaatttccaagtcaagtttggttggaaattttcaggtcctgtattaagctgtgccgtttctcctagtacggcccaaggaaataggcatctagtggctggtctatcatctggtctactagccatcagaaccaaaaagaaagaaaagcgagaatccaataaagaaattgcactaaccacatccaatacaaatgctaagagtaataacttccaaagaatgatgcgtggttcagaataccaaggtgatcaagaacatataatccacaacgataaggtaagatcccaacgtcgtatgcgtgcattcgaaaggaacataaatcagttcaaatggagtgaagcattagatagcgcctttgtcccaggtatggctaaggagttaacacttactgttcttcaagaactacgtaagcgtgggaaaattcgtgtagcactatatggtagggatgaatcctctttagaaccactactgaattggtgcttgaagggaattgaagatgtaaggtcagcatctgtagtggcagattggatcgctgtagttttagaattatacggtaatacgctagaaacttcaccagtccttcaggaattgatgatagatttgaaaactaaagttagacatgaaattcacaaatccaaagaagctcaaagaattgaaggtatgcttcaacttttgacgagttaa

SEQ ID NO: 4916 - DNA, 660 bp, Saccharomyces pastorianus
atggaaagccaaaccgtttcgatgaaagttattggcgtactagcgttgcaaggtgcctttttggagcacgcaaaccatctaaaaaagtgcctggctgctaacgactatggagtagggatagacgtcaggatcataaagacacccgaggagctggccaagtgcgatgctctcattatccccggtggagagtccacctcgatgtcgctcatagctcaaaggacaggtctataccctcacctatacaagttcgttcacaatccagaaaaggtgatttggggtacttgcgcgggattgatctttctaagtgcgcagttagagaacgaaaatgctctagtgaagacgttaggtgtgttaaaagtcgacgtaagaagaaatgcatttggaagacaagcacagtcttttactaaagagtgtgacttttccaaattcatccctggctgcactgattttcccgccacctttattcgagcccccgttgtagaagaaattttggatcctattgcggttaaaagtttgtacgaattgccaatgaatgggaagaacgtggttgtagctgcacagcaagaccataacatccttgtgacttctttccatccagagctggctgagaacgacataagattccatgactggtttatcagacaattcgtttctatttga

SEQ ID NO: 4917 - DNA, 516 bp, Saccharomyces pastorianus
atgagggaaaaaattgcaaaagtggaagaaattacaaaacatgggggcgatttcacactatacatatgttttccatacacatcgagaaacgatatcttacatacgattcaaggttcagttcaagattgtttgcaaaataaatcacaaagcaaaatagatattaaaaagtttaccaacaagatgtacatggatttttactctaataagtgtgaattactgatcagaactagtggtcatagaagattgtccgattacatgttatggcaagtgcatgaaaatgccacaattgaattcagtgatacgttatggccaaactttagcttccttgccatgtatctaatgattctgaaatggtccttcttttgcacaattcaaagatataatgaaagaaaccatacattatttgaaagggtgtatgaaggtgtcccctcaatactaaaaagaaagaagacttctatatcattacatcaatttcctaatccacctatttctgtgtcaattacaggcgaagactag

SEQ ID NO: 4918 - DNA, 489 bp, Saccharomyces pastorianus
atgaaagtgcctagtgttattcaaattcaattcgtagcattaagaaggctcctggcagagaccaaggagcagttttgctttgccataaaaaacaaactccggagaatattcgggtggattatgtcgttcagtctgttttcatggctttatagaactattcaaaactttttgataaaagtattaagcgtagggccggtacctgagcatgtctcctttatcatggatggtaatcggaggtacgccaaatcacgaaagttgcccgtgaaaaaaggccatgaagcaggcggattaacattactaaccttactctatatatgcaaaaggcttggtgtaagatgtgtatctgcctatgcattttcaatagagaattttaatagaccaaaagaagaagtagataccctaatgaatttattcacgataaagctggacgagtttgcaaaaagggctaatgactataaagatccattatatggctacaagaaagtatag

SEQ ID NO: 4919 - DNA, 249 bp, Saccharomyces pastorianus
atgaaaccacattctgggagtagcagtggagccgtacctctccccccacagaatgtaatttctcctcagcctgttcaaaatactgaacagcagaacaatggcactccaacaagtgtttccccagcagctaaccaagcaagttttggtgatggtttggctaatgcactagctgcgagagcaaacaaaatgagactagagagcgatggggaggaaggtgctgatgatgacgaggaggaagacgattggtag

SEQ ID NO: 4920 - DNA, 3318 bp, Saccharomyces pastorianus
atggcaatcttaaagagaggggctagaaagaaagttcatcaggaaccagccaaacgttctgctaatatcaagaaagccacttttgattcttcgaagaagaaagaagttggtgtgtctgatttgacacttttatctaaaatatctgatgaagctatcaatgagaatttgaaaaaaagatttcagaatgccacgatctacacctatattggtcacgtgttgattagtgtcaatccattcagagatcttggaatatatacagatgctattatggatgaatataagggtaagaataggttagaagttccaccgcatgtattcgcaattgcagaatcaatgtattacaacatgaaatcttataatgaaaatcaatgtgttattatctcaggtgaatcaggtgccggaaaaactgaagcggctaagagaatcatgcaatatattgcagctgcttcaagcgctcacacagaatcaattgggaagatcaaggacatggttttggctaccaatcctttgttggaatccttcggctgtgcaaagaccttgaggaacaataactcttcaagacatggtaagtatctggaaattaagtttaacaatcaatttgaaccatgtgcaggtaatattaccaattatttgttggaaaagcaaagagtcgtgagccaaattaaaaatgaaagaaactttcacatattttatcagttcaccaaaggtgcttccgacgcttataggcaaacttttggtgtgcaaaaaccagaacaatatgtttacacagcggctgccggatgtatatcagctgatacaattgatgatttgcaagattatcaagaaacactaaaggctatgaaggtcatcggtctcggacaagaagaacaagatcaaatattcagaatgttggcggcaatcctttggattggtaatatatcttttattgaaaatgaagagggaaacgcacaagtcagagatacttctgtaactgattttgttgcttatttactacaaatagatggtcaattattggtcaagtcactagttgagagaattatggaaaccaatcacggtatgaaaagaggatctgtgtaccacgttccattaaatatcgttcaagcagatgcggtgagagatgctttagcaaaagctatttacaataacctatttgactggattgttggcagagttaacaaatctttacaagcgtttcctggagctgaaaaatccattggtattcttgatatttatggttttgaaattttcgaacataactctttcgagcaaatttgtatcaactatgttaacgaaaagctacaacaaatttttatccaattgacattgaaatctgaacaagaaacttatgaaagagaaaaaattcagtggactccaatcaaatacttcgataataaggttgtttgtgatttgattgaggccagaagacctcccggtatttttgccgcaatgaatgattctgttgcaacagcacatgctgattccaatgcagctgatcaagcttttgctcaacgtttaaacctgttcacaacaaatccacattttgaattaagatctagcaagtttgtgattaagcactatgccggtgacgtcacatatgatatcgatggtatcacagataaaaacaaagaccaattacaaaaagacttggtagaactacttggtactaccactaatacatttgtagccacaattttcccagataacgttgataaagagtctaaaagaagaccaccgacagcaggcgataaaattataaaaagtgcaaatgagttagttgaaactttgtcaaaagcacagccttcttacatcagaacaattaagccaaacgaaacgaaatcccctaatgattatgatgaccgccaagtccttcaccagatcaaatacttaggtttgcaagagaacgtacgtatcagaagagcgggcttcgcatataggcaagtatttgaaaagttcgtagaaagattttatttattatctccgcactgttcttacgccggtgactatacatggcaaggtgatacgttagacgctgttaaatacattttacaagactcgtccattccacagcaagaatatcaattaggtgttacaagcgtctttatcaaaacacctgaaaccctatttgctttggagcatatgagggacaaatactggtataatatggctgccagaattcagcatgcttggagaaggtttctacaaaggagaattgatgccgctattaagattcaacgtactatcagagaaagaaaagaaggcaataagtatgaaaaacttcgtgattatggtacgaaagtcctgggtggaaggaaggaaagaagatccatgtctttgttaggttacagagccttcatgggtgattacctatcgtgcaatgaatccaaatccaaaggtgcgtacataaaaaggcaagtaggtattaaagagaggattgttttttctatacacggtgaagccttgcatacaaagtttggccgttctgcacaaagattaaaaaagtccttcttactatctccaaccacattttacattgtaggccagactttagttcagaatgctatgacttatacccaagattataaaattgacgtacggagtattcaagcggtcagtttgacgaatttacaggacggatggatcggtattaacatgaccaactcggctcaacctgacccattgatcaacacgtatttcaaaacagaactaataacacatctaaaaaaacttaaccataaaattcaggttaaaataggcccaacacttgagtaccaaaagaaacctggaaaattacatttagttaaatgccaagtcagtgaatcagctcccaaatacagcgacatatataaatctagcactatatctgttcgtcgtggtaaccccccaaattctcaagtacataaaaaaccgagaaataagagctcaatttctccagtgtatcgtactagtccctcggaatcaacgaaaagaactgcctcgagagttcccgcacaagcccaacgagttcctactgctccaacttcgagaaactccaaaaaacctgctccaccgccaccgggaatgcagagcagaggtaatgtgaaaagctccggttcagctcctgctccaactcagagaagtactgctgcacctgctgctatagttcaaaccaataggcagaccagcgtgccttccccacctcctccacctccaccggcttcaaaaccaaaggaacctatgtttgaggcagcctatgactttccgggttcaggctcaccatctgagctacctttgaagaaaggcgatgtagtttacattacaagggaagagccaagcggatga

SEQ ID NO: 4921 - DNA, 381 bp, Saccharomyces pastorianus
atggacagtgagaagagacgaggaaacacagccatgcagccaccatatgtgcagaagcgtttgaagtcgttaaatgaagtggaaagtcaactgtgctctatgttgcaagaggcgtcgcaggtgactttcatatttggtgaattgaaacgtggtaatgaatctgtaaaaccgcaatttgagaatcatgtaaaacagttttacgaattactagacaaatcaactacgcagttgcgcaaggaaataaagctcttggacgaaaacgttggaacaagactactacccattaacgttaacaagaaggccctaggtcaagatactgaaaaaatggaggagcagctagatttactatctgtaatactggacccttctcagtccaaataa

SEQ ID NO: 4922 - DNA, 300 bp, Saccharomyces pastorianus
atgttgtggaacttggctgctaagaaggctatgtacactttgtctgctcaagacgaagtcttctctttggctttctctccaaacagatattggttagctgccgctactgccaccggtatcaaggtcttctctttggacccacaatacttggtcgatgacttgagaccagaatttgctggttacagcaaggccgctgaaccacatgccgtttctttggcttggtctgctgacggtcaaactttgtttgctggttacaccgacaacgtcatcagagtttggcaagttatgactgctaactaa

SEQ ID NO: 4923 - DNA, 585 bp, Saccharomyces pastorianus
atggcatctaacgaagttttagtattgagaggtaccttagaaggtcacaacggatgggtcacatccttggctacttctgctggtcaaccaaacttattgttgtccgcttcccgtgataagactttgatctcctggaagttgactggtgacgaccaaaaattcggtgtcccagttagatctttcaagggtcacagtcacatcgttcaagactgtactttgactgctgacggtgcttacgctttgtctgcttcttgggacaagaccttgagattatgggatgttgctaccggtgaaacttaccaaagattcgttggtcacaagtccgatgttatgtccgttgacattgacaagaaggcttccatgatcatctctggttcccgtgacaagaccatcaaggtctggactatcaagggtcaatgtttggctactttgttgggtcacaacgactgggtttcccaagtcagagttgttccaaacgaaaaggctgacgatgactctgtcaccatcatctctgccggtaacgacaagatggttaaggtatgtgatatttttttttctatttttttccatggtaaattaagataa

SEQ ID NO: 4924 - DNA, 489 bp, Saccharomyces pastorianus
atgctcgagtggaggaaaattgtagaaaaggtcttctcttttggcatatatatggaacaaagatctttcatagctcggttcagaaaactgcaagcaaggtacattgaaacaccgttgagaatggctagttttttcgtcaagttatgggagagtgtgtttgaaccagggaccaccccacagttggtcatcgccacacacgcttctttcgttgcattgctgttgaccttgatgtggcttatttacgccacgcacggcaacattcacttctacgttctgttcggcatttctcttttgctctggatcactgttatctggttcattagcgaactatccttggtcaagttgaaagataacgatgaactggataaagttgccaacgaaaagaacgaaaccgaagcaacgaacgacactgataacaagcaagaaagcgggaacaccactggcagttccagatccgttcaaacgcattccaggtcgagaaaggcatag

SEQ ID NO: 4925 - DNA, 1833 bp, Saccharomyces pastorianus
atggtagagcttattcaggttgccttgccaaacgtcaagaaagcattagtcaataacatggagcaactgaatgaattgtttcctgattggaaccatttgttaactcctcaaactggtgatgaaggatttaatgacgccttgacgcttccaacagtaggacagttaaaaacttcgttacgtctggacaaaggtttcggttctgttgatagcatgtggaggactccaaggcatgctttccacgtatacttaccaaattctgctggtaactttgaaaccgtagtctccatcaatacatatgctggccaattattcaacgatatcattatcgatttagtagaaagtttggaatttaatagaaaggaagtggcaagacaagtaataactttggacctattctttaaagccggtatatttaccgaacctggtgaatctattgctcaattaatcgccacttacgaagaaaatccattagctcctacgttcaagatagaagatttggctattgaaactattttaggtcttattttcaaattacctagtgtttcccaacctttcgcgtacttttacactctgttagttgatatctgccaaaattctccaaaggcaattgcacctgtttttggtagagcattcaggttcttttataatcatttggattcattggactttgaactaaaattaagatacctggactggttttcaattcaaatgagtaatttcaatttctcttggaaatggaatgaatgggaagaagactccagtaaattcggcaagtatttttataatccaaaggtgaacttcgccaagaatctgatccaaaaggagctacggttgacttcaaacttctctgaagtggaggacagtttaccacaagaattcaagaaatatctggatacttcttacatcccaagggacgaattagtcaactattaccagtcactatttaatggttacaccgtggaaaaagaatcaattcgaaagaacgatttatatttcagacaagaaggtgtgcctatggaaaatactgtgcgtaaattattagattatacacataaagcaaatgattccagagaaatcactgaactagaaagtattctagaagagttaaagaatgagcatggttccataatttccgatttcaataaatttgtcataatattattagttcacgctgtggcagattctggtagtaggtctctatcgcacgcaaacaagtatattaatgatttgagagaagatctgaagaccatatttgacaagattgaattggatgctgaaacgaaagaatacatcataattgaagctgttctgacattctggaattctaatcctcaaacgggtttcctggtggcagacgccttcaaatatgcaggtttgattacttccaaaaccatttttacatttattttcaacgagactgatttgaaaaataacggtttggttgaagccactgctatcgaagctgtctttagaaacttatctcaacaaatttctgaagaaaacgaaagtggaaataattttgagtttgttttcgaaagattgtgtacaattgtcaacaacacaacagatttattgggtgtcactaataatgatgaaattgaaacgccaaatgtgaacaatgagatggatatcgacgatattgaagacgacaagttagatttgaaatggaagtatgttacagcaattgggttcgttaaaagtatattaagaagatattcctatgaataccgtaaactagcggatagattcattagcggcattgacaatgctattccacatgaaccaacaaagaaaacggttttaaactggatacaagaaacgagggaaatctaa

SEQ ID NO: 4926 - DNA, 819 bp, Saccharomyces pastorianus
atgagactgccaattttttgtcaattggtacggtgcgcgacagaaatgtttacttttgtggcactgagaagaggagaaagtaagagtgtttgctggataaataaccagaaatgtgttttatttattttactttcttcgctttgtttgttttgcatgataatcaatatttacctgatctatttaattgtgaatccatttcttcaagaacccgttctttcaaatttattcaaattactaacatacccaaattcaacatctttgcatatgattttacctttagactttgatgaagaagaaaattaccgtgattttaggcctcgcatgcctaagagacaaagaattcctcccgttgttcaattatgtaaggaaatgatgcccgatattcgtactattggggaatctgtaaaagcttttgaagacgatatcaaattcttaagtgaagccataatgaatgaatacggccatgaagactatttcaatgacgccttattgagtacttttaacgctgttgttgtggagcaaccacaaaagcaagctgccgttgctttgttaaccatggtcgtaaattcaaaaaataacgttgctgggaaaagtatcatcaattactttttcgaagagttacagaaatggtgtaaagaaacatttaatgaggagtttaacaatacttcaaatgaaactgggccatggaataagatcaaattgattttaagattcttatctattttgtcaccaatgtttttagttgatgaactgattaatatctacaaaaaactatttgaattgagtattgaattgtacaacctagatcgacggccgatt

SEQ ID NO: 4927 - DNA, 1887 bp, Saccharomyces pastorianus
atggtaaaaaggctgagaaaagaatttccattcaaaaagaattctaagcacagtaaagaattagaaaccgccatttcaaaagtgggtattagttcgaagacaaccgatttagaagctgaggatatagactttagtgtccaagtcattgatgaggataaatttaagagttcaattgagtacgaagaaggcgaaaacgaggaagaggaggaagaggaagaagaagggtttgaagagacattggctgaaggtcaaacagcaaatgatcccctttacgtgcttccactttattctcttttgtcaactaaggaacaaatgagagtgtttcaacagcctccgaaaggttctagactctgtatcgtggcaacaaacgttgcagaaacctcgttaaccattcctggagtgagatatgttgttgattgtgggagatgtaaggaacgtaaatttaatgaatcgaatggcgttcaaagttttgaagttgcttgggtaagtaaagcgagtgccaatcaaagaagtggtagagcgggtcgtaccgggcctggtcattgttatcgtttatattcttctgctgtttttgaacaggatttcgaacaattttccaaacccgaaattttaagaatgcctgtggagagcatcgttttacaaatgaaaagtatggccattcataacatcgtcaactttccattcccaactcctccagacagaggggctctttctaaagccgtgcaattgctacaatatctcggagcgcttgacaataaagaaaagatcagcgaagacggtaagaagatgagtctattcccactttcgcccagattttcgaagatgttgcttgtttctgatgaaaaagcctgcctcccttacattgttgctattgttagtgcattgtcagtgggagatccttttatcaatgagttcgaattaggaataaacgaaatttctagaaaaccaaaagaaaatgaggacatagatgaaaatgataaaaaaccagatgaacccataccagatatggaccccgaagttaaaaaggaattgcgtagcaaattttacaaaagcagggcacagtttagtaagttagacaaatacagtgatatattccgtttgctaagtgttgtaagtgcgatggattatattccaagggaacaaaaagaaatattcatgaagaaaaatttcttgagaggtaaattgatggaagaaatagtcaaattgaggaaacaattgatgtacataattaagtctaagacatccaaagaaaatattgctgtagtaataagaaatgaagacttaaagagtgacattcctagcgccatccaaataaaattattgaaacaaatgatttgctcaggttttgtcgatcatgttgccataagagcagatgctctatttccggatgatgctacgataacgaacaggaccaccatgattaacattccgtacatccccgttttgtctacaaggacacccaatatcgaggactgcttcgtctatatccacccgacctcgatcttgaataacctgggagaaatgcccccaaaatacatgctttatcattcattgcacttaggtggaaataacaagacaagaatgaacaccttgtgtgatatcgcaagtacgccattagcaaatattgcaaggaagggtcttctcttgacgtacagtaaacctttaactggccaaggtttgaagacaataaacttatcacccacggagcgttactgttatgtggtccctaggtttggatctacagtgaacaatgatatcaagattggctgggatctgaatcctatagcagtgcaccaaaagaagcaaaacggccaatggacagtcgtcaattttattactaggaaaaactttcaaagcgccacaagcgaaaataagattgagaaataa

SEQ ID NO: 4928 - DNA, 1905 bp, Saccharomyces pastorianus
atgggtacttatagaaagaggttcaatgaaaaggccaggtctggccatatggctaaactcaaagaattgaagagagttagaaataagcaattcaccagacaggatgaaaatgaagaagaggtagaaacaccggattcagatccatctcaaaatgagaaactagatgcaaatgtgaatgcggaaattctcaagcctctcactgaagaagaaaagaagctcaaaaaaagaaaactacaggagttgtttacaccaaaagaatcaaaagtttcgagattaaaaaagaaaagactagataagtttattgatcatcagttgaaaagagaggaaaggaaaactatcattgacaaacttcaagactacaagatagatacaagtttgttaacaagttctaagaaactaggtgaaggtagacaaactcaaaaggaagagttcaaagaagcgctaagtctagaacgtcaaggcaggggaaatgaacaaactgaggaaatattgtacgaagagtttgaaccaaaagcttgggataagcacgatgaagaggaaagccacgacgatgatgaagatgatttcgaggataaatttggtagtatggtgaagccagaagacaatacttccgaaaagaacaaaccttccagctttattgaccacagaccagctaaattcggtggttccggtatcggttttggattcagcaacgtaaagattgtaaataaagaaaacaaagctccaaagaagaagtacaattggagacaacttgtagcgatggaagagctaaagaagcatgggaaagatgatgaaatggattttgacactacatcggaagaagaaggcgatgatgacgacgctgaaggagaagatgaggagcagaaggaaagtgaaagtgaacaggaagaaagcgaaggtgaacaacatcaagcggaaccagaggacgctgatcaaaagaaccctgcaaatcaattcaaagactgggctaatcaggagatcaaaaaaatggaaggcagaggtcaagaactggttactcctactttaaacatcgactacaagccgataatcagagaagaagatttagatgatggtctcaaagaaacccatattccaatagacgagaactccactcgtaaagccttctatgtcaaagtcaacagatcagacgaaattcagaaaacaagaatgcagctacctgtatttggtgaagagcatgcaattatggaagccattcatcataacgacgtagtaattatctgtggtgaaactgggtctggtaagactactcaggttccgcaatttttatatgaagccggttttggtgctggggaatctccagattacccaggaatggtcggtattacacagcccagaagagtggcagctgtgtctatggccgggcgtgtgaccaatgaattaggtgaccatggtaacaaggtggcataccaaataagattcgactccacaacgaaggaagagacaaagatcaagttcatgaccgatggtgtcttactacgagaaatgatgcatgattttaagttaactaaatattcctccattattattgatgaagcgcatgaaagaaatataaatacggatattttgattggtatgctgagccgttgtgttgggttaagggctaaagagcataaagagaatccgatcgaacacaagaagttgaaacttatcatcatgtcagctacattaagagtatcagactttagtgaaaacaaggctttatttccaattgcgcctcctgtcttacaagtagacgcaagacagtttcctgtatctgttcatttcaatcgtagaaccgcgttcaattacgcagaagaggcttttaaaaagacctgtaagatccaccagaagcttccacctggtgctatattggtactggccaacaagaaatcacacatatggtaa

SEQ ID NO: 4929 - DNA, 1431 bp, Saccharomyces pastorianus
atggattacgatggaaacgctctggaagagtttgaaaataaattccaaaacagttacaaaccggccttgaaagtgactaaagaagggctgtaccagttagttgatattcgtgactcaagttgtcaaggtaaaataattaacgagaatagcacgtttaaagtatctttcttagagaaaccaagtttcgctatccaagataaccatcgtattactagattgacaaataatttattcgctaaagaagaagtatgtcaaggaatggaaggcactgttgatttggcgttatatggctcgcccccattcatattggaatacgatttgatggctcctaatggtcactttttcacaaaaaaaattcaagtaactaccaaatatgcttctttaaaactacctaatcaagttcctggagaatatataaccactattaaggccatttacgatggcaactatggcgaaactgataggcattttgaagagtacctaccagaacttgtaattaagcagacagtacatcctattcctgatgttacttttgctgatgggggtaaaaccttacgcgcgtgtgctgccaacttagaccagatctcattttcagaaccaattaatctgaaatttttgcaaggtgaaagtccattttcaattacatttagcgtttatcacgagagtacaagtagaacagatcaatataccatcggagaaattgactcggaaaactttttgttcgaaaagctatacgaaggcatgaaattaggtaaccatgcaataagtattgactctgtcgttgatgcaaatggatgcataaacaatgttataactggatcaagtaaccaaattttcgtttccattactgatgcgccaaagatccacttattagatccttccaacgaatattgtgtgggtgactatgtggcatatcaattaaatggtgtagctccatttatggtaaaatatgacttcaatggcgttcctttgaaatctaaggagcgcagctcccaatttattagattggcgtctgagccaggtgtcatatccatcaattcattacaagattcatcatcacaatgcatagtcgattttacgaaccctggtctgaaaagtgaatttaatgatttatcattaactatacacccaattccttcagtcactgtatctcaagggaattacattactgaggacattcgagaaggtgaccaggctgaagtgatattttcacttgaaggtacaccaccattctgcttaacttatgtaaggacagaagaaacagatggtaaacatggcaagaaaagatcccaggttgttgaaacgcacaaggtcactgatatatattctaatgaatacaaggtagtcacaagcttgcaaggtacctacgaagcgattgaaattacagatgcttattgctttgccaaaaatgatctcttcttcaataactga

SEQ ID NO: 4930 - DNA, 1998 bp, Saccharomyces pastorianus
atggaacacaggtataacgtgtttaatgacactccgcgaagggaccattggatgggccattctgcgtcagaatcaccatatccatcatatagtggccgtcccaatgttaacacaacacgacgttttcaatataatgacggtgaacctaacaaagaaaatccagttttacgttcaagcgaatttgaaaatgcagaaaataccaatttgagggatgaaaaacctaggatattcaagcgtgacagcaaagaccgctacaccagtgaagatgacagaaaggtcggttttacttcattgcccctgatatccaccgacgttttagagatttccaaacaaaggactcttgcagtggtgttgtttttaataattcaatgctacaaaatatatgatttgataatattaaaatctggcttaccaatacctggtttattgttcaagaactatcgatttaatttcatatccaaatacttcattgtggattccttatttttgtatattttaccatcctttaatattcctagactgacttttaagccatggatggtgtatctccaggtcttaacgatgacagcattgagtgtttttatatcaagtgatcatgaatttgttcttatttcattgattgtgacaacctggagaaaattctatacaaaggaattgagcgtaacaggctcatccatcaatcatcgtcgtattgttgactcttccgcccattttaagggtgctctgacaattaagatcctgcccgaaaataccgctatgttcaaccctttacatgaatcattttgtttgccaatggataccagtcttttcaaagttaactccgttaacattcctataagaataaactcaactgaagaaatagatctcattgaattagaatacagagatctttatacaaatgcagttgaacagcgttccttaaccaagaaagacttcaaagtcatcaataaccccaagacccttctgaagaaagatgattcgatcttaaaacctcatacaaacgattttgaggaggatagcactattcgttatttgagtttaacgcttcaggatattggattttatcaaattaaaaaaattgttgattctaaaaagctaaatttaaagatttaccaatcacacctaattattccacactgtccaattgcttcaattacgggaacggggggcaatgatagatgtataggtgactcggataatgtttcccttgagattcaaggtgtgcctcctatgaagctggcatactctaagatcgttaacggtcaaactttttcctttgtagactctagtttacaaccagaatacttcgaatcacccttacaatcaagtaaaccgagacaaagtttcacccaagatgaattaaatgatttgcaatggggtagaaatcaacctgttaatattgatttagactcctcaattacacaagacggtaaatacgcatatatggttgataaactgattgatggtttaggaaatgtgatggacttcacaagttttccagaagatctgaagaaacatcatggtttatcctataattttaatgttcatggaattccacgtgtggcgctagaagaaagatttgattctaagtcacccacaaaaagatcgattgccatagtattggaagaaagcaaaaactggggttcagacattccatatgttgttagcttatcctatgcagacacacaagacaaatcgaaaaaggaaatgaatgtcaccacgaaaatgttgactaaagtgtttcaggccgatcttccaggtacttacaatttagaatatattgaatccaagttttgtcctggtgtaatcgttggaaaatcaagtgttctggtgacaatgccagtcgcaccaaatatggaggttaaatcatcaccaattttggaccaatgtgtaggacaggtaggcttaaattttgagttgtcatttaccggtgctccaacctactattataatactaaaatttataagcttgaaaacggcgaaagaaaactatatgat

SEQ ID NO: 4931 - DNA, 402 bp, Saccharomyces pastorianus
atgataagggacgttatggtgtcgttgtgggacattggcggacaacggacattgaggccgttttgggataactacttcgacaagacgcaagtgatgatatggtgtatagatataagccttttggtgcggtttgatgaaaccatgcaagagttgagggaactggttaatagagacgaaagccgaataggatacgactgtgcagtcattatcgcactaaacaagattgacctagtggagaacaagaccgaactcggccgaagatccatattggtggagagcgtgctgaagtgtctgttcaagccagacatccgactagctcttgtccaatgtagcgggatcaccggcgagggcctcgacgacctgcaaggccggttggtagaattctcccgctttgcccaataa

SEQ ID NO: 4932 - DNA, 645 bp, Saccharomyces pastorianus
atggcagtcagaagtcgtaaaagaagcaacaagaaaaagactcttttgcgcacgagcgttgctcaagagaataatgcaacgtatttacttgccgcagaggaactgcatgaaagcagcatcgatctgaacgtaggcaccgaagcgccaccggtcgagcacctcgaaaatctcatgccagccaaggaattgaaccacctgagaaagcaaggattgcaacaattagagcctataaatgaacatgaaaacagcgaagacgaagagactatgaaactcgagtctgtgacaaaagactcaggtcccgtctccgaaactgaggtccaaaaactgctattgagctacgcctttacaagtggcctagtacaggaagaagatgaagaagacttacgtggcacactaaccacaatgtcgtccccatctgcgtcttccgtatcaacctatttccaagccttcatcgagaaaaccaagcaatttttctatagtttgagcttatatttgatagaaaaattccaagctttaaaaaacagcgtgtatgaggtgttttggatcatcgtcatttatataaattactggtttcccaatgtgggaaactatatgaggtatgtcaactgtcaatactctcccggagccgaatcttcactttactaa

SEQ ID NO: 4933 - DNA, 2163 bp, Saccharomyces pastorianus
atggacgattggcgtgagttcaattcagtgataaagtcggtacattgtaacgcaaaagacacaagccataaaattaacagcttggtggatttggcgataaagagtgaaaattctgccttcatcaaggccgtcttaaatttaaaagagaattcatcaaaaatagacggacagaaaagattcttgtggcttacttcaactgtcaattcaaagttttatccccctatatctatctcagaggcgtcaccactatcttggaatgaaaacgagtactgcgtacctggcagtgaagaattacaaagtcgctactctagtagaaccgcattgcgtaatgaaggagagtatatgggcgaaatagaacagtgccaagatgtgtcagactgttcgttagtagcttctctgattaatctcaggtctcgaaatttagaattacctccaattaaacagatatcaccaaatgaatatcaggtcaatctatgtttcaatggaagtagtgaaagattagtcacggtcgacacttcccaaattccaacttcagtgaatggtaaacaactttcgctaagaagcaaaagtatttcagataagattagcgaacttgcgctattactggttgtgcaaggtacatattcgaccgacggatcaaatatcagtatagatacttactacttgagcggatttttaccagagattatagggatagatagcttctcgtttgagaaattatggaagttctttaagtcgggtctttgtctgatcggtgttggtaccggaaatcgtcctaatgatttgatagaaccattgttagcaaatcatgattattctgtcgtcgacatcagacacgagtccggagtaatcaaactgcgggacccaagtaattcggcattaaatgttgaaattagctacgaacaatacttaaataacttcaaacaattataccttaattggaaccataaaaaattatttggatactcacaagctcttcatattagatacgacgtcacacgttataataaattcgccattatttcggataagcctttattccacatcgtaaataattccaaggagacggaaacagtttggatcttgctcgagaatcatttgtcaaaagaaggcaggaagaaaggtcgctcaatttcctttataaaccaagctcgagattgtataatttacccaattgaggtaccagctaataaaggcactgttcatgtcggattgcaactgatgaaattaaaattagctcccggtgctcaaacgctattgtattgtcattcaactactgacaacaactttagcattcatttgttctcagtcgtaaaggagatattttttcaaagactaaaagatatgaataaccttgttgccaaagtcagcttttctcatctttatggaatgggcaaaaagacctcttttgacacctgtagtttctttgaaaacccaacttttcaactggaagttcaatctgaaagagatcaacatattcttatggatgttacatgcgtttctaaaagctcgcaggattttgttaatattcaggtttattatttggacgattatgaactaatcaaaccaatcatgtttgataatcactatcagccggaacaaaatatcaaacaagatgtgcccatcttaaccaatactaaatacataattgtatgctcgacatatggccctccggtttcttcagagtttcaattggtggcctcgacacgtttgtcctctccatggagattcaagtctagtatcaatttacgcgagattaacatggcttacggttcttatccttatcagtgctatgacaagttttattgtaaagaaacctctaaaaaatttaaaattttgataagtttgcaaaatacaaaacacacaaccaacaaactctttatacgtgtggcacctgtagaatcatcggcacaattgaggatacggtgtaatgttttcgaaccagcatcatctctctgtgtttatgaatgtgaacattatagaaattgtccacctgggggtgtggttatacctgatttagaaatctcttgcattgacacgattgtattgatgattgaaagagatatgcctatttccaataagttagctacagaaggttcaatggctggattggagctatttgttggatctaatcaaagagctaaaattgaaaagttgaagtaa

SEQ ID NO: 4934 - DNA, 99 bp, Saccharomyces pastorianus
atggttacggaatactgcgctgtttttaccctactgttcgttttggcgctaattggacatacgttttatcgaagaagaacaaccggaaacttaaattaa

SEQ ID NO: 4935 - DNA, 1086 bp, Saccharomyces pastorianus
atggcttatgttttagtaaacgtcatgagaagaaaaacaccgatcagcaaaatgggtagtccgaaacgaagtgactatcttaaaagttttattggaggtaatgtggttgctctcggcgctggaacgccttatctttattcattttatgctcctcagctattaagcagatgtcgcattcctatttctacttcaggtaaactatcattctctttgacgatagggagttcattaatgggaattttagcaggtattgtcgtcgaccggagccccaaactttcttgtctgattggatccatatgtgttttcattgcgtacttgattttgaacttgtgctataagcacgagtggtctagtacttatctaatatcgttgagcttagtgttgattggatatggttccgtttcaggtttttatgcgtctgtgaaatgtgcaaatacaaactttcctcaacataggggcactgctggggcatttcctgtgtcactttatggtctatcaggcatggtattttcatttttatgttcaaaactgtttggtgaaaacatcgaacatgtgtttatctttttaatggtgacgtgcggtagcatgatcttagctggttacttttcattggatatatttacgaatagagaagaggaagacacaagcatcaagcaatgggagcttcaaaaaaccacagaaacgaacggaaatatagtgccattatatgacagtagtaagaattacataggttcgccagtgcgcccatcttcaccagccgttcatgaaaattatgcactaacagacaattttcaagaaacttcagaattttatggccttgaagataggcaactatcgaatcgaccattgttaccgcctttctccccacgtactaagtatgacatcgaagatgaggatattataaacagtgtagcagatgagagtaacggtgtacaaaaaagtatgaaatcacatgtgctacaaagcttaaagtcttcgacctttatttgttattacgtagtgttaggtatacttcaaggtgttggtttaatgtacatctattcggtaggatttatgatacaggctcaggcggtttccccaccttag

SEQ ID NO: 4936 - DNA, 384 bp, Saccharomyces pastorianus
atggatgaactatttattgctagacttctagatcgaaacaatagagaggcccatttgagcgaattattccaagacaatagtggcgcaattggtggtaacactatccaccatgacgatgctttactgaagaccctgacagtactgcaacaagaactgaaaagtaaggagcaagagatacggaagttgaaagaagttataggattgaagaacaagaatgccgagaggctaaatgacgaactcatcagtggcactatcgaaaacaacgttttacaacaaaaactctttgatcttaaacaagagcattcaaaattggtcaccaggtggttgaagaaagcagagagggagacggaagtcatggacagcgcgatgaatgagaggaaatga

SEQ ID NO: 4937 - DNA, 3090 bp, Saccharomyces pastorianus
atgacttccgtctccctctctgctttcttcaaccacctggtgaccaattttgaatgctcttgtttaagatcaaagagtttttgttgtaaaacgttgttttcgatagtgccactgatgagttcgtcatttagcctctcggcattcttgttcttcaatcctataacttctttcaacttccgtatctcttgctccttacttttcagttcttgttgcagtactgtcagggtcttcagtaaagcatcgtcatggtggatagtgttaccaccaattgcgccactattgtcttggaataattcgctcaaatgggcctctctattgtttcgatctagaagtctagcaataaatagttcatccattaaaacctgtttgtggtatccttcttctgtttctttgcgagcttcacttttgttattgttaacgctgcgaatctgcgcccctaatcatatacattctaacggaataacaggtcattgttcaagctcaaaatcatataagattcataaagaaaaagataaccaaacaccgttatcatttggcacatcaaaaacaattgctgttataatggatgtcgagcaacagagaaaacaacaacaactgcaattagggcaaatagagcaaatagagcaaatagagcaaggagaagaacaggaacagcaaggactacaagaatcgcaagagtcaaaagagggacagcaacaacagcaacagaaacagaaacagaaacagcaacaacaacaacaacaacaacagagcctatggaaatcttggtggcattctaatgctgaagatcgcatggatgtagcgataaacactgagtatctagctgagccagaaagaagttcttcctcttcaagaattcaagatgtgaacataaacaatggcaacaacggcctatggtccaaaattgcatcctttgcaacgtcaagatacaggaatgcgccaattattgttgacgataatactcggtattcacaattaaacatagaacaaattgatttcttagaaagtgaagctaaggatatgatttctaaaaaatcaaaatcttggtgttggttcgaagcgattccgcataaaacaacgtcatcaaatataattgattcctcagataccccgggaataataagtgtgtatggtacgggatctgctaagtgcccattaccattaaacaaatatcccggtgatggaaataatcccgggtacaacgtattcattaatgattctttaatcctgccatcagagagccctacagatttttttcatgttcaaccattaagaactaagatactaaataccatcaaaaactattacaacttcccaaacgaacagcatctttacctgagacagaataaaacagcattattaaaggacaaaaaagtcataataatatctgtggtaggagatttgccagaaaagtatgagcagcgctcattggaatcacagagatccgcatactacctttccaaaaagctatcccaaaatttgacacatgagcaacctgaaagaattttaactctatcattccaatgtccattgcacagccaagagttaatacctacttacaaagaatgtgtggagctactgaatcattgggcccatcttttcaaaagtgttgacgcggttttttttgtgggtgcttaccatagtgttccattgactttgttattagccaaatatattgttcagaatcatgaagttttagagttcgatgaaaacactactgtgggtgtattgagttttcagtcctgtctacaaggttatcgattttgggatcatagctccgactttgttaacaatagttacggtaatttaagctctaacacaaatatcaatgaaaatgataataacgaaaacgaattcaataatgattttactacaaagagtcagcagattaaagaaaaacagttatttcaaggcattgataaaagacaacaagaaatgctctccaaagtcaagaattataggaaaatagattctagtgaatccaaactagttcaagatgcattggactggcttttatttaattgggattcgtttcggctgacattcttcggtaaactctacgataattttatgacaatctctgaaaaacttgctatcgattataatcatcccaaaatcttgaggaacttatggtgtaacgggaagtatatgggtgttgacttaaaagatcctaacaatttaaacttcgataatggtgacgatgacactgataacagcaataacgatatccatataaaaactcctaattttgaatcgaaattgaaaattcccgccaatagacttttcgagctaactttgtggaatattctaatgctcacggaaaatttagggtataagcaattcatacctataatcaatttactaggtccgtttttcatttctagatcgtttaatgaatataccttaccgccaaatgtcaagaagcaataccagaacaataccaaagtttggcttcaagaaatggacaataaatggaaactaaatggtcctcaattcaaccacgaacaaagaaaaaatgaaaataccggttcctcatcaacgtctttactaccagaagatatctctactgtaaatgactttttgcagtttgtacagtatcagaatgaaaaggctccagattttgtgaaaatatactctgatatttacgacgacgatttggtctataaatgctttttgcacaatacgatttttacgaaaaacccactgagtcctaagcatttgtgtttaaatatagatctcgatactcctacgagcatattgaatactgttaatcaatatgatttggtctggaagattcatgattccttttccaaattgattcaattgaaaaacttaccacaacaagaggtgccacaggtattaaggctttccatctcattaaactgttttttggacagcattgcaactaaaaccggacctgtttttcaaagagacaacatagaggccttgagaagactaacggagatttggcgaacttatcaagactggtctccacctacaaggggtttgaagcatctaagggagattctgagcgttttagccatgtatgataaccccaagaatctaatcaatgatgtccggcgtacataa

SEQ ID NO: 4938 - DNA, 1092 bp, Saccharomyces pastorianus
atgatatcaggtcgttatattttgaagacagcgataatgatatggacactgaggaaagatcaacaccattttttgccggctttggtaataagatcaccgatgctctatcctatagaacagtgggtataccaagttcaaggattttcaccaattaattacggaaggcgaagtccatatggagttgttagactagctggttatagaagttcttatatacacatcaatgaacttgttgatcatttttttccgccagttagtcttgacaacgaagacttaagaagtaatacttccatggttcctggatctccacctaataaaacgctggataatgctgatgcagaaaatacttcaggtcacaaaactttgttcagaggtaaccaagaagagaaatttacagacgtcaatttttggagagacccgttagttgacatcgataacttatcggatatcagcaaaggcgacgatgaaagtactgatcaagatactgatatatcacgacaaggcagtggtagtagaagtaggacaaattcagccaaaaccatgaaggccagtaacgttccccagttacatgtcagcagcacaaacagcaatgaagccttagctgcttcgtcttatgtagaaaacgcctcgtctcatgatgcctctaaaagtagctcaacgtcgacgcccaataaatcctcaaaattcaaagaggatatagggaagcaaatgtatcttgaattaggctcacctcttgcgtcaccaaaaatgaagtacctggacgatatggacgataatgagtacaacgagagcagattcaaatcaaggagggcatcttcggccacagcaacgagtattggcaaagagttcaagaagttatcaatgtccagagccggttccccaacaagcagcgtttcaaaagtcagcgttctagacgacgtacactcacgtgaaaattcagacaccgagtcagggatggagccaggtgatgataattcgaaacgtaaacaattgcaacacacttctgcggacgataacgacaacgacttggatgcaagagtaagcgatgagtttgacgacgatgaattcgatgaggatgaattcgaagattag

SEQ ID NO: 4939 - DNA, 1647 bp, Saccharomyces pastorianus
atgcagtacgtaggcagagctatcgggtctgtttctaagacatggtcgtccatcaatccagccacgctgtcgggcgctatagatgttgttgtggtggagcatcccgatgggaggctatcgtgctctcccttccatgtcaggtttggcaaattccagattttaaagccatcacaaaagaaagtccaggtatttataaacgagaagctgagcaatatgccaatgaagctgagtgactctggggaggcctacttcgttttcgaaatgggtgaccaagtcagagacgtccctgaggagttactcgtgtcgcctgtgatgagcgcaacttcaagtcccccccaatcacctgaaacatccatgatggaagcagggaccgaatgtgacggtgagggagaaggtgaagataagaagcaggaaaagaaagtcttagaagagcctgatttcctggatattaatgaaacgggtaaatcaactgttaaaaacgacgaaaccacagcgtctgaatctcttactggatcctccgcgacaacgtcaccagatttgactaaagagaggaagcttgctgagcagcgaacaaagaatttccagcagaaattgaacaagagactcactgagattcatattccgagtaaacttgacaacaacggcgatttactactagacactgaaggttataaaccaaacaaaaatacaatgcacgacacggatatacaactgaggcaattgttgaaggacgaatttggtaacgactcggatatttccaattttatcaaagaagacaaaaatggtaatattaagattgttaacccttatgagcacctcaccgacctatcacctccaggttcacccccgacgatggcgacaagcggatcggtcctaggactggatgcagtagaatctggaacgaccttgaactcatcattctcctcgccatcaacttccgatacggaaagcgaaacgtcatttagcaaggaacaaagtagtgccagtgaaggcgccaacgagaaaagttctgacaagtcagaaaagaggtacatacgaaccataagattgactaatgatcaactgaagtgcttgaatctaacctatggtgaaaatgacttgaagttttcagtggaccacgggaaagccattgtcacttcaaaattatttgtttggagatgggatgttccgattgtcatcagtgacattgacggcaccataacaaaatccgatgccctaggtcatgtcttggctatgatagggaaagattggacgcatttgggagtggccaagttatttagcgagatttctcggaatggctacaatatactttatctaacagcaagaagtgccggacaagctgactcaacgagaagttatttaagatcaattttgcagaatggcagcaaactgcccaacggacctgtcattttgtcaccagatagaacaatggccgcgttaaggcgggaagtgatattgaagaaaccagaagtcttcaaaattgcatgcttaaatgatatcaggtcgttatattttgaagacagcgataatgatatggacactgaggaaagatcaacaccattttttgccggctttggtaataagatcaccgatgctctatcctatagaacagtgggtataccaagttcaaggattttcaccaattaa

SEQ ID NO: 4940 - DNA, 1512 bp, Saccharomyces pastorianus
atgcctgatttatacacagacctcaaaatcccacaattgaaaatctctgttaaacaaccacttgggttgttcatcaacaacgaattttgcccttcatcagacggtaaaacaatcgaaactgtaaatccaagtaccggggaggttataacctctttccaagccgccagcgaaaaggatgttgataaggcggtcatagcagccagaaatgcttttgagaatgtctggtcaaagacatctgctgaacaacgtggcatatatctctcaaacctattgaaactcattgaagaagaacaggaaacgttagctgctttggagactttagacgctggcaaacccttccattctaattctatgggagatttagctcaaatcatgcaacttacaagatatttcgccggatctgccgataagtataacaagggtgatactattccattaaattccgacaagcttgcttacactttaaaggttccattcggtgttgttgcgcaaatcattccatggaattatcctctagcaatggcgtgttggaaattgcaaggcgcgttagctgcaggtaacactctggtcatcaaaccagctgaaaatacttctttgtccctgctttatttcgctacattgatcaaaaaggccgggtttccagcaggtgttgtcaatattcttcctggctatggacaacttgtagggaaagctctagcatctcatatggatgttgataagatatctttcacaggaagcaccaaggttggtgggtccgtgttggaagcctccggccaatccaaccttaaggacgttacgttagaatgtggtggtaaatctcctgccctagtatttgaagacgctgaccttgacaaggctgttgactggatagcagctggtatattctacaattcaggacaagtctgtactgcaaactcaagagtctatgtccaaagttcaatttacgataagtttgtcaagaagttcaaggaaattgcaaagaaagactgggacgtgtcaggaaactttgatccctttgatgagaagtgtctcgttggtccagtcatatcaagtactcaatacgaccgtatcaaagaattcatcgaactcggtaaaaaagaagaaaaattgagcatgtttcaaactactgaattccccattgagcaaaccaaaggttactttatcccgccaacaatttttactgacgtcccacaatcgtctagattgttacaggaggagatattcggaccggtcgtggttgtcagtaagttcgaaaactacgatgatgctatgaaactagccaatgacacttgctacgggcttgcctctgctatctttactagagacgtgaagaaggcacacatgtttgctcgtgacatcaaggcaggaactgtttgggtgaactcgtccaatgacgaagatgttactgttccttttggtgggtttaaaatgagcggtattggtagagaattaggacaaagtggtgtcgatacctatcttcaaacaaaagcagtccatgtgaatcttggataa

SEQ ID NO: 4941 - DNA, 1689 bp, Saccharomyces pastorianus
atgtcattcaagtttctgataaaatcgctcgtactcggatcactaagtggacaaatacgtcgtggtgcgtcgtcagtgatcccccttgacagtgtgccctttgatgaagacggcgctgatgaacttaacatggatatcatgctgtttgcgtttggaaccctggtggtggtctatattatcatctgtatcgtctatttcctcacgaagcaaatcgctacacggctgataacagcgtattataacgaacacggtcctagtcaaagaatatctttgttcaatgattacgatgaaaacacgccccacgtccacagtagacggctcatggaaaatatgagtttaagatggcccaacaatttagacgatatcaatgaagttaaagacaagttggcacaactctcgcctgaagagcagttttattataagcaaggtgaagaatatatcaagcaaaatccgccttttctactcaaccagggactattacagcagtctgagaatgacagcccagataccaatagcgatgacccgatcatgaacgaccaaacaagacaatacattcaagaggagggagcctacgcttgggaattcaaaccaaatcctgatatgccgaaccatactgtcatcgtggaaagcaaaaccgaggtttcgttcctaaattataattacgatgcctccatatccacaaacttacccattccatgcatcaataaagtgtactactgtgaattcaaaatattcgaaacagatggcccgttaaacagtagcgccagtggtgacaacgcgtcgagaaatgtaatctcgttcggtctttccactcagccttacccatatttcaggttaccggggagacatcatcattcgatagcgtacgattcgaacggagccagaagattcaacgactcttttaaattaaatgatcagttaaagacgttgttcccggcgtgcgagaaaggagacattattggcatcggctacagatcacacagtggaacagttttttttaccaggaacgggaagaaactaaatgaaaaatccgttggtggccatattcgcggttggaagtttaaatatctatacccagtaattggctccaatgtgccttgtcaaattcacgtaaatttcggtacttatggcttcgtttacatcgaggcaaacgttaagaagtgggggtatgcaaaatcaaacggcatcaaactgccccctccctcttacgaagactacgggaaggacactctattagaaagcggcggcgaagacaatgattttgacgatgatctttcagatggcgacagtgacgctgctgccgctgccacccccaatgtcaatgacgacattattataagaaacggtgaaatcttaccgcctccaccgggattcgaattcaccatgtcacctcccactgggaaggaaattaccaatgaggagattaatctggactccttacctatgcagccgccaagttattcagatgatgaacatcatttgaagatagacaaaatcttaccagtccggcgcactattggaacaagcaaaaccttaatgaataatgaaccgttttacgataactctaatgatgataacgaagaaggtgacgatcacgataaagatcgcgaagggacttttagatttagtgattacgaaagcaggatgcatgacatagaactcggctttggcggcaatagcccggcttaa

SEQ ID NO: 4942 - DNA, 2073 bp, Saccharomyces pastorianus
atgaacagccaagtaaatgaggatgctatagacatcaatcttggtctctctttgcccacccacatttcgccagcagccggctctgagagcgccactggcagcaacgtcagcacacttcacaacgatgggcaggcgctaaatggcgatctcttgaggagttccacggcaaactcaacgccgacaggtgctaaccagcagactgaaactattggcgagaagctgaataacgaggagcgagtgaactcaaatccctctgcttcgaactcgaccattgcgggcgcaggacgtatgttgagtcagtctttgacaaacgactcgccttcgaatgagatatctactgaccagttgaagattttccaaagaatggatgagatgagcgcaagaatgattgagatggaggagagttttaatcagttgtccagcaaaatcgtggagcaaaactcgatggttctaaacttaaagcaagataactataaagtcttgaacaagttgaacatactacttaaactagtggcgcaaccgagtgtgcgcccaagctcgaacaatgcccagaataagcttgccgtcgatttgctaaattcgatatcagccgttagcggcgcttacttgcagaaaatgcaaaataattgttctggtaatcagcacaatacggagccacataccgggcttcccaacgcccccctcacttcgaaccatcattcaggtacaaacgcaagtattaatgtacagacgaacgccgcacacctaaacaaccaattttccaatgcattaacaacaattttgcccgatcagcggtccaatcgatataataatgcccaaaatataaatacactttcgcaagcaaacgcgaaacatttttcgaatccaggtgcaggtcctgtcccaaacgcacatgcgaaccagaaccaaccgcaaatccagaaccataatccaaattcaaatcagcaagtaaatcgctctcctattgctttccccagtgcttcaacggataaggcattcaagttgaatccgaatggaatcaaaaggcgtagaagaaatactcaaaacggcaacaattcgggcactaatattaatggtatgagttccattcaaaggcccataacaatgctgtctccgttgacaaattcccacaattctaccacgagtatgaattatacgccttcttccattcattcgagtattactagcgcttcaaattcgtttcatgatctaaattcgctgaacaatttcggcacaacggcagctttaaatttacctagtttaagtctcgataacacttcgtttcccacaaatccaaatggcgcatttcctaataccaacaacatcaacaatgcccaacagcctttatcattttctcagttaattaatcaagcaagtactacgtctgagctattaacgaacggtggcggcggcgtaaacacaaacattgtgaagagaaatagaagttctaccttaccatcgcactcgaaaccaatggagatgaaaaataacgttgacgacgatggttatcaagaagacgatgatgacggcgatgatgaaggcgatggacgcgataacgaagaagacagtactgctgaagaagacgaagtggatgacgagattgagaccgaggtcaagaaagtctctgccaataagcgtagaagaaatttactgcacaaaagaggtgattctctcaatggtagaagaaagcatcacgatgagccagcaggcagacacaactcaaacccaaactcaaacccaaacccaaactcaaacctacattacaggatactaaaggcacccactgacgtgaagacaatatgggaagagtatagcattggtatcagggggaaaccgtctatcaagtaccttgagtccaaatacggtaacaaatggaggctgaataaaaacaagaagacattttcaagacggaaaagactctacaagttcattttgaatggcatggacaaaggcaaaacagcacaggagatgatagagaccctagagaacaagaggctatacaaagatgacgaggacggggaagtaaaaaaaagaaccatcggctggttgcaagagagccttgccggactttag

SEQ ID NO: 4943 - DNA, 651 bp, Saccharomyces pastorianus
gctgcaggtgactctagaggatccccgtatggatcttctaacaagaacaagtcctcttacggctcttccaacaacgacgactcatatggatcttctaacaagaacaagtcatcttacggttcttctaacaacgatgacacttatggttcttccaacaacgatgacacttacggctcttccaacaacaacgatgattcgtatggatcttctaacaagaacaagtcctcttacggctcttccaacaacgacgactcatatggatcttctaacaagaacaagtcctcttacggctcttccaacaacgacgactcatatggatcttctaacaagaacaagtcatcttacggttcttccaacaacgacgactcatatggatcttctaacaagaacaagtcatcttacggttcttccaacaacgatgacacttatggttcttccaacaacgatgacacttacggctcttccaacaacaacgatgattcgtatggatcttctaacaagaacaagtcctcttacggctcttccaacaacgatgacacttatggctcttctaacaacaacgatggttcgtatggttccaacaataatgattcttatggttcatctaacaatggtggccgtaaccaatacggtggcgacgacaattactag

SEQ ID NO: 4944 - DNA, 624 bp, Saccharomyces pastorianus
atgggtttatttgataaagtgaggcaattcaccaacaacgacaataacaacgacaacaatagttctggcaacgatggtcaaaatgattatctctccaaggctgaaaatatgatcggtcaagatagactcgaccgtttaaagtctaaggtcggtgaggatagatttgacaagatggaatctagagttcgtgataagctttccaaaacttctttaagtgacaacagcgacaacaacaactcttctaacgattctaacaacaagtcctcctacggctcttccaacaacaacgatgattcgtatggttcatccaacaagaacaagtcctcttacggttcttccaacaacgatgacacttacggctcttccaccaacaacgatgattcgtatggatcttctaacaagaacaagtcctcttacggctcttccaacaacgacgactcatatggatcttctaacaagaacaagtcatcttacggttcttccaacaacgacgactcatatggatcttctaacaagaacaagtcatcttacggttcttccaacaacgatgacacttatggttcttccaacaacgatgacacttacggctcttccaacaacaacgatgattcgtatggatcttct

SEQ ID NO: 4945 - DNA, 732 bp, Saccharomyces pastorianus
atgccacataccgccttttggctagctttcctctgtgaatatatatacttctacagccggggcttcatagatcttgcatatgtcggatttaaagataacccagctcccccacacacatacagttcagatacgatggccatcaaacctacaaagagctttcaaaattgcctcgaggctgaagtgcctggttacaacgattgccccacagttttgttctccatcgaccctaatagcggtcccaaatccaaatcaaagacaagagcaaagacgaaaagatgtatgagcgggaaactgaccacagaggtgatggatctctacggaaacaccaaaacagccacgacgccgccgcccgtatcgaagaggccgcccgtaggccctactcaacaagaaccggcttctgaaattgtgcctgcaatgggccaaaacgatacccagtcacaggtggtgatgtacagtaaggacgatctgctgcttaagatcaatgatctttgtgggcctggctcaaagttggcctcgaaagagcaggatttttacaaaagaaaaatagactctaatattgccaagattttacacaccgatcacacgagaatggtgttgtcgcagatcttcgatgaaaatgacaagcaagcagccgtaaagaccatcaaacactggatggttaccgacacgaccatttctaattggtgtcctgctttcttaaaacttttcgaaaacagcgcccaaagaaattga

SEQ ID NO: 4946 - DNA, 2952 bp, Saccharomyces pastorianus
atgagcgaagagaaatcgcacaagatcagcataattgacatactaaacaagaagccacagcttgccgaaaagacacccttagacgatttcttcgaagatctagatgataatttaataactcccataaacaactttgagtttgactcggcgtctcgcatttcggtttatcaagccttagagtgttcagacaacaatgagtttgtcgtcatactattacaatacttcaaagatttgcacattcaagtacttggccagcaaaagacgcttatccaaaacaaaagtgatctgttgcctatctcattgcatgacatgaagtatgttgacgaactgattaacttactgatccttcacggtatcgacgctaatttgtctccaatgataaaaattccctttgattcgaaaaggctgaatgccttcagaaagggcgagaagagtacgcagtatgaaacacctacatcgcataatataaacagcggtacgttatctttagtagtaactgccttttatgatattcttactgatgaaatgtcttcggattatttgaaaaacataatcttaaagggcaatgcgtatgcgaacatcttcttaggtttgttatcactacatttgcaacagcccaaccacttctcattgcagatggtaacaaaactggaaaatgctcaagaaacgtatacgttgtttggaatgtatactttactggttgaaacaattcaagacgcaaaggcaagagaattaatactactaaagctaactactttatccttacgaagaccagaaaacggtctcatcagtttggttgattttatcttgggcgtaagagacgttgaggatattgatgttgagaagttcaatcgtgtttatcagattttgatgagcaaaccggaaacaatgacgaatttgcaatacttgactgaactgttcagacaaatatacgattgcctcacttttgtaaatagacccatcctcgttacctgtttgaacggattgatcctaaaattttacatgaggaataaaagaattgtccacgattttctatttcaaaagatcaattctgtcatttacaattgcccgttactcgaccattcggcaaaggaactgaacaacaccatgaacgtgcttatatcgctgtctaaaaactcatccgttgatttactgaatgatttagttaccattcatcccgatgcaaatggcgcctctggtcaatttttcttgaatttatggatatattccctttttttgaagaaagaccaaaacctcaacccactaagtattaatgaactgtctatatcgaacgataaaaatccaaatagtggacattcgccagaggaacccttttccaattattatcaggtcgtactatcactgttaaaatctctggtaatcgtaacagaaaactatcaaattctaaatatattgagccttaacttggtcaatttcgagcacgaaaaatggaagtttttaattgatctagacacacagctgccttatatatcagttaaaggccccaatacagtagagttgctctccaacaatgtatcgaaaagtacagagatatctcaattcttccacgacatggaccttgcagtggatttgtttatggaatttttggtattactaaacgatgaagagcaactaaaaaatctctttttggaaattttgaaaaggtgggttcaccatactaaggaaattggggaaaaatcttcacacgatttagacagcatatcagacgtggcagacaatgcgcttatactaatggacttgaagcttctggaacgcatgaacgatcagttcaaatcaaacattgtgaacaaggctaatgatgtacttatcgttattgatcaattgattgatattgttcaaggaaagcacgaaccgcaagagaaagaagttgattcagatgatgacgaagaagaggaagtgacggaagaggtagacctaactgaaaattccgctgtcaaaattatcttacaattattgtccactgtcctttcagaatcgtctagtagtacgttatttcaaaacagccatacattaaaatccatttccagaaaattgcaatctctcaagccaaaagtcccagaggcaaatacactgttagtattgatggatagaattctggttaacaagcacacaacagaagctgatggcgatacagaaaccgacatagatatggacactcttgatagagcgatgactaatttgaacgatcctttaattccgatcaaatcacacgggttaataaaactacgaaatctagttgaaaagaaatctaaagtgatcactgtgaagaaagtgctgcaaatacatctagactatttaaagaattcagacccatttatttatctcaacgtcattaaagggcttactgcattgtgcgaattagaccctgaaactaccatacctccccttgttgatttttatgcaaataagaggaacaaaaacaaattggacaacgtcttaaaagttggcgaagttttcatcaactacatccgatgtcaaaaccaactgtttcaagggaaatttgcttatttgattatagatatctgtctcgatatcgtgaggtccaatgataaaacgccgttggacaatagatggcgtatgtcatccatgtcaatcttaggtatgtgccttcaagttaatgcgaagggccttccagatcgaattcatgatatgctagattgtgcattcggaatattacaattagaacggccacataatcatcctgagggcaaagatgattctttcctgatgagaagaagtgctgtacacttgatacacgacctgttgtacagtacgggactcgacatgctcccccgtgaatacagttacgacaagttgaaaacactgttatcttacgtgcatgatcaagatgaagattacttggtctgcgaacaagtcagcaagctcttaacagtactaaatgaactgttcacaagttctctacacgtttaa

SEQ ID NO: 4947 - DNA, 684 bp, Saccharomyces pastorianus
atgttgaatataagtaccacaaaggcgttggacgtttatgcgcaaactgaacgtggcttgctaagcattccactgacttcttcagtaataatatatggattcttgcattacttaagtaatatttctaatgtgagtgctaatgcaatactattcaaatggatatacctcaatatcgtcaaagccgccggaaacaaatactacaaggggataggtttacccaagataatactctattcgaatttggccacattttgttataattttacctttaagagattcctcgacctaatgtacaaaagattgatccgtaaaggttccgaaaatttataccatggagactttgaaaatgctaaccatgtggtttctgttgatgagttctttattaaacgcagttggtataccgttttagcagaaaagatattatggccatttgttggtaaatgtacaggaggtcttctgctgaacatttttctttggatacaaaaaaggttaaaaattgaatggtcacctaattgttctccttcagaatttagaatgattttcaatattataggttgcggtactgcagccgtcagctggtcgagtctgaagctctacgctaattatagaagatgccaagaacttgaaaaaattaaccgttatgttgaagaaagttgcagtgaagttcaaacagattattcctag

SEQ ID NO: 4948 - DNA, 435 bp, Saccharomyces pastorianus
atggcaacattccacttcttcccatccttaaaaaaaaaaaggtgtatatgttggatatgcctagaagaatccacgtatgataccacatggctgctgcacacatgctgttgcaacctacaaatacataaacgttgctacattaagtggctataccaaatgcatgttgagcttttcctttcagacccaactaattcgccgaagggtgccgatctacccatcataaccagtcttaagtgcctagttgatgggcatcatgattttatgactactttctcattgactgaaatatgggacacacgacctatttgggggcagaaatcagtaccctttcaaaacgattacatgcttaatctgatgtctctttatactaaaagaaattatcatccaccttatgtaatgcttaatttggcgagtgtcccatgtacgacgacgagt

SEQ ID NO: 4949 - DNA, 1122 bp, Saccharomyces pastorianus
atggctgtaggtggtaataactggaacgtatggctacgaatgtcacgggtccagctcaggcagatcaccaaatcgcttgaccggacgctagtggggctgagccatgggagatttccccttcaatacaatcacaatatcttcaccacctggtggagaagtctatttgatgcttctattactttcagaagagcaaacagattcactgcttcaccgcttaccagaaggggtgtcgctgggtttgatcgtttgagacctgctgctcacgtcagtaggtttgccactctgtccagggttcccaaaggtgcccccaggggcttgtttaccaactggaatatggtcgcttcaactagattgctgggacagagagcttactctacttctagtatcaagttcacccaggaagccgtgaataatatgaccgtatccctaagatgtttcttcaactcattggatgggttggatcaatgttctcactcaacctactccaagactttccagcatgcgtctaatgctaaacaacaacaggtacatcctcaacctgttgcgttcaagaggctgtctcaaaaagatatcagtttcatccgtgatttggagttattcaaaataatgaagacccaaaatcaaatcattaacgaatccagcccattatttgccgaaaaatctggatcttacattgaattcactgttcctgaattcaacgttaatgaatcagcttctgtacccatgtcatttctagatcccgctttgttgggagacttgaatgaaaaaattacaaactacaacagtgacttgaaattgatgtacgacagcattgatatgatcttgaaaaattatggttcgttgcccacaacttttcatcgaaacaagatccgagtacacttcccaaactccaccgtggtcgaaacagagaaactggttgctggtttgtatattactacaggtattatatatgctgatgcttctctggacattactttggaagatgctaagttgaatgctttggttaatgatgacaaatctacaagcatgtggtctcttgttgacgaagcctccctccccgttagtactgctttttcacccgttctatcggaagcatccgatgatgattatgaatttatctag

SEQ ID NO: 4950 - DNA, 2199 bp, Saccharomyces pastorianus
atgaatgaaaaaaacgagaatactgaacatctgatgacgtctgatgaaaacactctaggagaacagcttgaaattccagcaacctctcatcctgaccaactaaaagagaatctagatgacatcgtttcgggaaacgagaacttaataatagatagcagtaacgaaacgaatttaaacaaggaagtagaggcattggccgcagggacaaacattggagtagatttgaatcagagcataaatgaccgtacttcgattgatggccttacagattcacatgatgctccaatcccaaaagaaccggaggtggagccacaggaagaagccccattaatatctgagaatctaagccagcaattagaaaatgaaagatcaaaagttgaaagggccctagaagcaatatcttccccttcattaccaccaagagataatgatgttggaagttttacacctgtgcccaccaaatcttcgtctcccccagtaccctcaagaaatacaaacgttcaagtctcccttgatcaacctcaacttccaccaaggcaaaaacttaatgcagaaactttacatttgaaagcaccccatagtagtgcggtgcctgtcagaccactaactaatacgtttggtaattcttcttccccagccccaccaattttacctcctcgtcgtatagaagatcctctagacttagccgctcaaaaggagcttttggcaagtacattcaaaagaaacatgctgttttacaaaaataaagataactcagtcaaaaatgatttggacgaaaatatgcttattttgagggaaaactttcagaaaattagtaccgatcgattgtctgaggaggatagctcattttggagaaaaactgtaaatgactaccaacagaccttacttaatgatagtgagagtttacacgttcaactagctcgtggaataccctctatttatcgtttgatagtctggcagttagtaagttatgcaaaatcaaagtcctttgagctgatatacgagacttatctaacacaggatgcaccatttgatgtccagaaattcgaagatcaactcaaggtgatagacactatatcatctacgaacgtaaaaagcataatcaacgtactaaaagcgtaccttctttttgactctgaatgtgaattttctatcgacatggtttatattgttaatatggttcttgcggtttgcaagaaagaaacagatgcgtttgggttattcgttcgcttgatgcaagtttatgatttaagatcattgtttttaccaagcgcccctgtgatcaatgttctctgctataaatttgatagactagtagaagaatcctatcccaaggtttataaccacatggttaaagaaggtattcgttcttctatgtttttgcctagttttttcacaacattgtttcaaaagtattcttccattgaaattcaaccacgtatcggtgatattatatttttagagggtcttgattccattatgagaattcctgctaaattattgtgtgaagcacaagatcaactattaaaaatgagtttcgaagaactgctggagtttttgaaagtaggtctattagatgcttatattaagaaggaaaccgatacggaaagtgatcctctttccttaaacaattgtatagatcaacttattcaagatgctatgacggaagttcaaatatttccaaaaaccatgaagaagtttgcttctgaatatgaggaaattcatagattagataatgagagagaagagcagtacaaatcaatcaccgaaaagaatttgcatttacagaagcatgtacgcaaattggaaaatgactatacgtcattaaacagagagcatgtgacaattgcaaacgaactagtgaaaaaccggttgaagatcgagtccgtattgaatgaaaacaatggatataaactaaaaatcttggacctgaagaaaacgttagatacagaaaaaaagaaacaagtttcaatcgtatatgttcctaatgatttgaaaaaggatttagatgaaacgataaaaaaaaatgcacaagtaatggacgaaaatttaaagttacaagataagatttcagagcttgaaaggatggctgaagcaattagcactgcaagcaaaaacggtgttttatttgagtattcaaatcctaaaaatcactctttgggcgctggttggtcgggatttaagaaagttttcaaatga

SEQ ID NO: 4951 - DNA, 246 bp, Saccharomyces pastorianus
atgaccccagccccaaagatctcttacaagaagggtgctgcttccaacagaaccaagttcgtcagatctttggttagagaaatcgccggtttgtctccatacgaaagaagattgatcgatctaataagaaactctggtgaaaagagagctagaaaggttgccaagaagagattgggttctttcatcagagccaaggctaaggttgaagaaatgaacaacattatttctgcttctcgtcgtcactaa

SEQ ID NO: 4952 - DNA, 672 bp, Saccharomyces pastorianus
atgcccatgggtaatgagataaactcaaacagtcaaacgcagatctttagtgttctcatcaatggcataatcaactcccccccatctctggtcgaagtctataaggagcagtatggtataatacctttcatattacaggtaaaggattataatgtagagctgcagaagaaactgcaattggcctctaccatagatctaacgaaaagaattgccgttaattcccgttacttcgaccaaaacgcttcttcatcaactgcctcttctccaggcacatactcatccggcgccaactatactccaatgagaaacttcagcgcacaatcagacaacagtgtattcagttccactaacatcgaccattcatcaccaatcactccgcatatgtacaccttcaaccagttcaaaaaccaaagtgcttgcgacagtactataagtgtaaacagcctgcctaatcagacccaaaatggccacggaccatcatcaagtaattatcaaaacatgatggtagatgaacggaataaagagaaccgaattcccaacccttcatctgctgaaataccacaacgggcaaaattcatgacaagtggtatcttccagaactcagctgaacttactaatagggcgtctacgatatcgctatcaataagaaaccaaaacacttcccaactgtaa

SEQ ID NO: 4953 - DNA, 987 bp, Saccharomyces pastorianus
atgaaccacacagaagtgaaagttggactaattgtcaccgcaaaacagacgtactacccaattgaactgtccaatgcagaacttttaacccattacgaaaccatacaggagtaccaccaagacatctctcagaatgtattgcttcagtcttccaagacaaacccagatatcaagttgattgaccagcaacctgagatgaatcctcatcaaaccagagacgccatagtgaccttcttgtaccagctctcagtgatgaccagagtaagcaacggtatcttcttccacgccgtcaggttctacgaccgttattgctctaagagagtggtcttgaaggatcaagccaaactagtggtgggcacatgtctttggttggcagccaaaacctggggtggatgcaaccatataataaacaacgtttccgtccccacaggtggtaggttctacggtcccaatccaagagctcgtatacctcgtctttctgaattggttcattattgcggcgggtccgaattattcgatgaatcaatgttcattcaaatggagagacatatcttggataccttgagctgggatgtttacgaacccatgattaatgactacatcctaaatgtcgacgaaaattgtttgatacaatatgaactctacaaaaaccagctacagaataataacaacggcagcaacaaagaatggtcttctgaaaaaagacaatctcaatcttccgaagacagtgatgccacagtggaagaacacatcagcagttctccgcaaagcactggattggatggcgctacaaccaccatggatgaagatgaagagctgaactcgaaaattaaattgatcaacttgaaaagatttttgattgatttgatttcttggcaatacgatttgctcaagttcgagctgtacgaaatcagcaacggcgtattttctattataaataaatttactaatcaagatcaggccatttctctctatgcccatgggtaa

SEQ ID NO: 4954 - DNA, 849 bp, Saccharomyces pastorianus
atggataatagcaagagagatgcgtcactgccgaataagagaccgctggaaaacataaggcccagcataagaaggcaagactatatcgagtatgattttgccaccatgcaaaacttgaacggaggttacatcaaccctaaggacaagattccgaatcccggttttggtgacgacgaagactttgattctgagtttgggtccaagaagcaaaaaacactacaggattggaaaagagaacaactagaacgtaaactgctgtatgaaaatgctccgcccccggaacatatctcaaaagcaccgagatgtattgaatgtcatatcaatattgagatggaccctgttttacacgatctcttcaagctgcaagtctgcaagcaatgttccaaagaccacccagaaaaatacgccttattgacgaaaacagaatgtaaagaagactattttttgactgatcccgaattgaatgacgaagagttgttccataggcttgagaagcccaatcctcattctggtacctttgcaagaatgcaactgtttgttaggtgcgaagtggaggcttttgcattcaaaaaatggggtggggaagaaggcttagataaggaatggcagcgccgtgaagaaggcaaatcgcaaagaagagagaagaagtacgaaaagaaaatcaaggaaatgagactgaaaacaagggctcaagaatacaccaacaggttaagggagaagaagcatgggaaggcccatgttcataacttcagtgcccccatcgatggaggaaccgatgaagacggatatcaaattcagagacgcagatgtacagattgcgggttggaaactgaagaaatcgacatttaa

SEQ ID NO: 4955 - DNA, 948 bp, Saccharomyces pastorianus
atgttgagcaccagtagcaatagacccatatctgctcatttaaccatccattacaaacctatccaggaggaagaagaggagaaaaggagcggtgccaggggaagcagtcgtcatgacgactgcttcgtggagggcgacaggtccctcactcccaacaggaaacacgagttcatcaagacagtgcttaacataaacgatgatgacagcgagttttcagacccctgctctccattcaccgggtcacaggacgccaccagcggcacgaatctgttcggagacttcttgtctaagagacagcagacgctttcgaactccatgaacattcacgatctttatcaatgcgtgcataacttgtcgccaagcgccgccgctaacactaaccaccagttcatagctaggaggttcagcgattcgcacatcccatctctgcaccaccgccagcagcagacgacgacatcgaagaatttcgtacaatctactaagaacattcaaaggatcgcgtcctacgcggcagattccgaccaaagagtcaagtatctgccaaactaccaccagtccgctccttctaccgcatcgtcagcggcgacttcaagggcggctaaaccaagaaaactccctgacgacgacaatacaaaatatgtacttcaactgcagctctcgtcgtcgcctcactcacaaccagcctcaccaccgcttcaaccggaccgacgcccttcttgctcttctttcacttgctcgtcatcttcctcctcctcagcatgttcatctatgtccgtctcagatccgaataacgtaacagcatatgaaacgaatagcgcccgccctcagttcccctgtggccagcctttggacatatcgagtccctgcacgagacatcaccatagaagaaattccatcgctgttaagtttgataaggcattatataaaaaacaacaaaatagcgattag

SEQ ID NO: 4956 - DNA, 6837 bp, Saccharomyces pastorianus
atgactgataaagaatttatctcgagtggaaagagaaggaggcttccgcatttggttaacgctagtgagacctggcacgcgtactgtcattcatattataccacattcacaattacttgcattcgattgggacagtacaagctcgcgttatatttggattcttatccagcctataatataacgggcagtctaatagttcatttgaaaagacagcgttctccatacagcagccgattctgttctcacgcatatagacattcatcccgtgtgggtttgcatctgcctttcaggaggaagtattcaagctgtgcccgccggaacatacacaaacaaagccgtttaccgcctcaattcatagggctaaacactgtggagacggccccatcttcgacgctaaaggactttgtcgagtcacatggtggccatacagtgacttcgaagattttgatagcaaacaatggtattgctgcggtaaaggaaataaggtctatacggaaatgggcatacgaaacttttaatgatgagaagatcattcaatttgtggtgatggccaccccggatgatttacaggccaactcggagtacattaggatggcagaccagtacgtagaggtgtcgggaggcacgaacaataacaactatgctaatatagatttaatactagacgtggcgcagcaaacaaatgtagatgcggtatgggccggatggggccacgcttctgaaaacccatgtttgcctgagctgctggctaattctcaaagaaaaatattatttattggcccaccaggccacgccatgagatctctcggcgataaaatttcttccactatcgttgcgcaaagtgctaaaatcccatgtattccttggtctggttctcatttagataccattcatatcgacggccaaaccaagctggtgtctgttccagaagatgtatatgcaaggggatgctgttcctcgcctgaagatgccttggaaaaggctaaatctatagggttccccgtaatgattaaggcatctgaaggtggcggaggtaaaggaattagacaagtagacgacgaggatgattttattacattctaccgtcaagccgtgaatgaatcccccggatcaccgatgtttgttatgaaggtggtcaccgatgcacgtcatttagaagttcagctattagctgaccaatatggtaccaatatatcgttatttggaagagactgttctatacaaaggaggcaccaaaaggttatagaagaagcaccagtaactataaccaagcctgaaacattttatgagatggagcacgcagcgattcgattaggtgagctcgtaggttatgtttccgcgggtaccgttgaatatttatattcaccgaaggatgataaatactattttttagaattgaatccaagattgcaagtggaacatccaaccactgaaatgatatctggagtaaatcttcctgctgctcaattgcaaattgctatgggcatccccatgcataggataagtgatattagaaagttatacggtttaaaccccacggggacttcacggattgatttcaaatctctgccaagacctaaaccaaagggacactgtatctcatgtagaattacgtcagaagaccctaatgaaggttttaaaccatccactgggaaacttcacgagctcaattttcgttctagccccaatgtttggggctatttctctgtgggaaataatggcgccatccattcattttcagactctcaatttggccacatttttgcaataggtaatgataggcaagatgcaaaacagaatatgattctagctctaaaggacttttctgtgcgtggagaatttaaaacacccgtcgaatacctcattgagctattggaaactgatgattttggtaacaataatataaccactggttggctggatgatttgattttaaaaaacctcagctccgatatcaagttggatcctatgcttactgttatttgtggtggtgcaatgaaggcatacgtctttacagaaggaataaggaacacttacttgaaactattgcaaagaggccaagttcctcccagaaacttgctgaaaaccaaattccctattgacttcattttcaataataagaagtatttattcactgtttcacagtcctctgaagagcgcttcgtactctctatcaacaattcacaatgtgaagttgatgtccaaaagttatccaacgattgcttactggtctctgttgggggtaaatctcatacagtttattggaaagacgatattggtggcacaaggcttttaatagattcaaagactacgttcttagagtcagagctcaacccaacgcaaatgatgtcacctactccaggaaaattaatgaaattcttagtttcaaatggtgaccatgtttctgctggacagccatacgcagaaattgaaattatgaaaatgcagatgccgttagtagccaagactaatggaattattgaactattgggacgacctggttccatcatcgaagcaggcgatgttatagcgaaattaaccttagacgcgccctcgaaagccaacgaatcgtctttataccagggagaattacctgctttaggcccaccggtaatagaaggtagcagaccaatccataaatttagaactttagtaagtagattggaaaagatccttaaggggtataccgagagtgttgaaataggagcctctttaaaggaattgataaaagtcttgagagatggtagacttccttattcggaatgggaatttcaagcctctgcagtgcgtaatagattaccaaaacaattgaacgagaaactagaaaaaataatcgagaactctgcctcttttcctgcggaagaactgcatgtgttgctgaaacgctacgtcaaagaatacgcggatgaccatgtaatatgcattgctttgcagccgctacttaatattgccaaaaggtattacaatggtttggataatcacgaatatgaagttttcttcaagctaattaataattatcacgctgttgagaaagcttttgaaagtgatgatgtggatgaagaaagaaatatattagacctacgcaataaagaatcaagtaatttgagaaaccttttgagcagaagtttatctcatgctaatttatccagcaagaacaagttgattatgtcgatcttgcgcgaatatgaaccgttgtgccaaaattcctctggtattgcgttaaaatttaagactgttttacaggatttggcaaccctaaaatctaaattgactaaacaggttgccgtaaaggctagatcgatgttacttagagattcactgcctcctatcaaagagagaaaaaagcatattgaaaaaatgctgcaattgcatgctaatattataggctgtaaacaaattaatgaagacgacatatatttatgcgtgaaaaattttgataacttaataaattcaaatttggcgcagttgcaagatttgtttttattcttcggacattcaagtacgtttttttgcagaattgcatcagaaatttacgtaaggtatgcctatggtccttaccatttgaagggattaaacagttacagagaaataccaaatgttttgatgtcatggcaattcgatttgcccagctcaaacgatggcatcgataaagaaataaattcttctaggctttcttgcatacccagcaaggattcgttgagaaagatcggttttcttgtaaacataggtgaatttgattctatggaaaagacgttgggtgtgctatacgaaaaggttcatgcctcgggatatgtttccattagtggaggaaactctctcattgtgaatgtgctctctccaatgcatttcaaaaatgaagaagatctaatcagcagggtgaagactaaccttcttgataataaaaagcgtttaagtgacctacgctttagtcgtatcactttcgtatttaccccagaaaatggttcgcgtgttaatttttactctttcgatggaatgacttataacgaaattcctcaaataagaaacatggatccgtcctacgaatcatcgatggagttggaaagaatgtcgaactataaaatcagacctctattcgcgtatgatagcaatgtacgcattttcgagggtataagcaaatttacgcccctcgataaaagatttttttttagaaaagttataaattcttcccttgttaacgatcagacaatcatcctcgggcatctagaagcagaaattgacgcccaggtacgtcgtatgttagagtatctggaagctatcgatacgtcaaattcggacctgaatcatgttttcttgaatttcaaagcaccttttaatacatcagcacgccatttcaaggacatcctagaaaaaaccctcaaaagtcgtgagagtaagttgttccaagaaagagtcacggatatagaaattcgagtattcatcaaatgcccagaaaccatgaaacccgtcccgcaccggttatttgcttctaataaatcaggatatgtgattaacattgaaacatataatgaagtaagtgaggaaaaaggtggtacaatattatgctcattgagtaagcaaggatatttcgatggggaatctgtctctttgccttacgctgtcaaggactggttacaacccaaaagatacaaagctcagtttatgggtacaacgtacgtctacgactttccaagtttgttccgtcaggctgccactcagcaatggaggagatattttccaaagcacaggttgaaggacaatttttttaagtggactgaactgatcgaacaaaatggaaaattaattgaggtaaacagggaaccaggtaataatgatataggaatggttgcttttgaactgatggttcaaacacctgaatacccaaaagggcgcaaaatggttgtgatatcaaatgacattactttcaacattggatcttttggaccgaaggaagattcgtttttcaataaagttacaaattatgcaagagaaaaaggtatcccgagaatatatttggcagccaattcgggcgctaaactcggtatagccgaagagctgattccgttgttccatgtggcatgggatgatccctccgatcccacaaaaggtttcaaatacctgtatttgacaccaaacgacatgaaacatctcaaagatactggaaaggaaaagtcagtaatcgtagaacacagaatggtttacggtgaggaaagatatattatcaaaacgatagtcggatccgaagaaggtttaggggttgaatgtctgcaaggatcgggtttaattgccggtgctacttcaaaagcgtacaaggatatatttacgatcacagcggttacttgtaggtctgttggtataggttcttacttggttagactgggacagcggactattcaagttgaaaataagcctatcatactgacgggagtatcagctattaacaaagtcctaggcacagaaatctatacatccaacttacagataggtggtacacaagttatgtatagaaacgggataacgcatttaacggccagtaatgacatgaaggccatcgaacaaatattgacttggttatcatatattcccgcaagaagagatatgagcatcccaattcttgaaacaacggatagatgggatagggatgtaggcttcaagcctgtcaagcaagtgccctatgagacaaggtggctgatagaaggtaagccgggcataaatggcgaatttcagtccggtctttttgataaaggctcgttttttgagacgttgtctggatgggccaaaggcgtaattgttggcagagcacgtcttggaggtattcctgtgggtgtgattgcagtgaggacgaaaactatcgaagacgtgatccctgctgatccagctaacctgaagtcatcagagttttcaatcaaagaagcgggacaagtttggtatccaaattctgcattcaaaacagctcagactataaacgatttcaactatggtgaacagttaccactgattattttagccaattggaggggattttctggcggtcaaagagatatgtataatgaggtgttgaaatatggatcgttcattgttgacgctttagttgactataaacaaccaatactgatatatatcccgcctttaggtgaactaaggggtggatcatgggttgttgtagatcccaccattaatccagagcaaatggaaatgtatgctgacgttgaatctagaggaggcgtattggaacctgatggagtagtcagtatcaagtatcgtaaagagaagatgatagagacaatgattagactggattcgacgtatggacatttgaggagaacgttgacagagagaaaattatcgttggagaaacaaaatgaccttactaagaggctgaaattcagagagagacagttgatgcccatttataaccaaataagtatacagtttgcagacttgcatgacaggtctactaggatgctggttaagggggtgatccgaaaggaattggaatggaccaagtcacgtagatttttatactggagattaaggagaaggttgaatgagggtcaagtgatcaaaagaatgcaaagtaagatctgcgacaacaagacagtaatgaagtatggtgagttgttgaaaatagttcagtcatggtatagccacctggacggaaacgacgatcgggcagtagcggaattcatagagaaaaataccaaggaaattaacaagaatattgaagagtatgaaatttcactgtttgttaatgaactaaaaaagaaatttgaagacaaaaacggaaacattgtccttaaagaattgactaaattaatagacaataagcggaggaaatag

SEQ ID NO: 4957 - DNA, 564 bp, Saccharomyces pastorianus
atgcgtgtagattccattgaattgtcagcattgatgtacatatgtaacttgttcgcccttggatatgaccgggatgtgaaaatacgaccttttacacaacagtattcgggtcaaacagagtttggcaatcagttgagggctttatcggcggatttgagtaaatttaatcaatgtgataatttgaatccactatggggggactttagacagtattcacccaacgctaaaaactttgataaaatcatcgtttgtagcgcatatttcatagatactgcagagaatgtttttgattatttggccagtattgaagcattaaaaggattctgtaaagagctacattgggttaatgtagggccattaaaatatggtaccaaacctttggtccaatttacaggagacgaattaaaacggctacgtgagattcgtggttggaaggatcttgtgcaaacgtacgaagttgattactctaagggactgaatggttatttgactgattatgagtctatgtaccaaggttactatggtttgcttaaattccattctgttttcgaaaactctgattag

SEQ ID NO: 4958 - DNA, 303 bp, Saccharomyces pastorianus
atggccagaagtggaaagaatccagacatacgatattgtgtgatgacacaggctagctccttgacaactaatatagttttggcccttgtagtagttttgatgactctactaaggcagaacaagtcgttgcagaagtggtttgtatcgaatgtggaaaagcttttgttaaagaaaaccagcacaacccaaaaagtcaatatctcgtcacctagtctgaaactagctagggatgaggaatccacgggtgcttatcagcccaattttcccaagctgagttctggaggtccaacgcttttcgaataa

SEQ ID NO: 4959 - DNA, 1365 bp, Saccharomyces pastorianus
atgcatgttagaggttttctacccaatttcttaaccgttcaccaagtggtttctgagaatcctatcgaatttaagccctctgacaaagtaaagaatgagaataaaggtatcactatcccagagttgattaagagggaagcccccgagttagctgatggtactactgacactctgtacggtttgctggtgaacggccatttacaaactgcatatggctctgttaggcgctttgaaaagatagataaagtcgaatataaaagaatggtaatcaaatacccacatgggggggaagggactgtagattttgctgtaaagaatacgagcatcaaaaaaacgaaaaaaaaagagaaggaatacatgccggcgaaccagccgatgtttgatatgaacctgaaactaaaatattcgtactatgctcctgacgatcccaaattgaagtctgccgatacgaagcctatgcttattcttcttcatgggttaacagggggctctagagaaagctatgtaagggctattgttcatgaaatcaccacaaaatatgacttcgaagcatgcgtgttcaatgccagaggatgttgtttctccgcgattacaacacccctattatacaatggtggttggactaatgatattaggtactgtattaacgatttaaggaaaagatttcctaataggaaattttatatgatgggattttccttaggagcatctataatgacgaattacttaggagaagagtcagatcgtaccaagatcgaatgcgctatttccatgagtaatccattcgatttgttccactcttcgtatttcattaataatacgccaatgggttcacatttctactcgcctgcattgggccaaaacttgctacgtatggttcgaaaccatatttctgtcttagaagaaaatcccaatttcaaaactgttcttgagcaaaatttggataaaatccgcacggttaagcaattcgacaatttgttgacgggaccaatgtttggatataagaatgcagaagagtattatagaaatgcttcgtcatataagaggataccgggaattagaactccattcgtagctgtgcatgctatggatgacccaattgtcggtagtgataatcttcccattggcccagtgaaatccaatccttacactctgctaatagagacttcaactggaggccacgttggatggttcaaagatagttccggcaaaaggtggtatacagagcctgtatgcaagttcttaaaggcattccatgatgaaattacagtaaaggggttgaaacctgacttagataaagcgaaactgccaaatcctaaatgtgagcctatagccacaactttctcctcaaaagcagttcagtga

SEQ ID NO: 4960 - DNA, 1128 bp, Saccharomyces pastorianus
atggtcgcaatgttctacatacgcgtgatactgtctttactattattgccgctgattttggcgcaggactactatgctatactggatataggcaaagatgcctccgagaaggaaatcaagtctgcatacagacaattgtccaagaaataccatccagacaagaatgctgggagcgacgaggcccaccataagttcattgagattggcgaggcatacgaggtgttgagcgatcctgaaaagaagaaggtctacgaccagttcggtgcggatgccgtgaagaacggtggcggcggtgcaggtgggcccggtggaggtgggttccatgacccttttgatattttcgagcgtatgttccaaggtggccatggcggacctggtggtgggtttggtcagagacagaggcagcggggcccaacaatcaaggtccacgagaacctatctttgaagcagttttattccggcacgtccatagagtttactttgagtttgaacgacgaatgtgatggttgccatggtagtggttccgccgacgggaaactggcccagtgtccagattgtcaagggcgtggggtcatagtgcaagtgctccgcatgggtatcatgacgcaacagatccagcaaatgtgtggcaggtgtgcgggtacaggacaggtgatcaagaaccagtgtaagacgtgccacggaaataaagttaccaggacgaacaaattcttccacgtcgacgttccaccaggcgcaccaagaaactacatggatacaagagccggtgaggctgaaaagggtccggacttcgacgcaggcgacctggtcatcgagttcagagaaatggacacagggaatatgggctaccgaagaagaggccacaacctgtacagaacagaagtcctctcggccgaggaggccctatacggtggatgggaaagaacgatagagttccttgacgagaacaagcccgttaagttatccagacccgcacacgcggtggtctccaatggtgagatagaggtcgtgaaggggttcggcatgcccaagggtagtagagaccacggtgatttgtacatagactacgtagtcgtcatgccaaaggcactcgcacacgagcgcaccatgctcaaggacgaactgtag

SEQ ID NO: 4961 - DNA, 5274 bp, Saccharomyces pastorianus
atgtctgaagaaaaaaaaaagtctgattcaagagcgcatcaacttaatctgacaactcccagaaggaagttgaaattattgtcatctctcctagacacacaagagaattcacgaactcaaggttcggacatacgacacaactatttaggctctaatagcaataaacacagagtagcgaagcctatccgatactcagacaaccgtggatccttttccaccaggcagaaccatcatgttcatgataaatcccttcataaagatagcacaaaggcattgagctgggtggactctttaatcaataggggtaaaagtatacttaatacactggaaaaggaagatactttgtttgaacaagaacttgaagaagaaagaaaacggtcccaacttcatgagtctttgatgaataagtacactggcggtagtaaaccacaccaacgattagtagatctcaagaagagccaatatggaactgatacttccttccaaaataatgatgaaatcccgttagatagtttcataacttctctttcaccagaggttgaagacgagacaccatcagatatcgagtctgatgaagatgaagagttggaagaagatcaatcgtcaatcaaaaatgacgatattggaaacagtgatgataacttgtttggagaagaaaatgaccacagtgatgcttcaataataatattatcagatgaagagtatgcagaagaagcagcaccccagggtgtattaaatgaagatgaatataatattcgggaggaagaacgggttgagaataaaggcgaagaacaaataaaaagaaacatgaattcggatgaggaattacctaccgaacctagcccctgtaattcaagtgaacatgagaattatccagagttagtggaggaagaatatttcagtgaatcagaggaaggtgatgatgtagaaagcagctcagaaaaatatgaggatgaagacgaggatgaggatgatgatgaagatgaggaaggaactgggcattcaatagacttttcaaaatttatgcaaccgcgaaaaggcaacattgtagcttcaaataccctaaaccagcaacctaaccagcatgaagctaatcacatgtattcagaagatgatgcatttgattgccgctcagcggatatctcggtaaacgatgaatcggaagatgaagaagaccaagctgcaagaactgatttattttcaaagagtactggtagtatacagtatcctgatgagaaaggattgagcggtaacgaactaacgagaaagaatgcatcaccagacagtgcatcagaaatggtccaagaaaccaaaccagaaaataatcgagcttttgaagatgagctcgttcacggaaaagaatatgcgctagaggaatcgaataaaattaacaataatgaagatcaaaacattaacaaggaagtctacaatatgagtgagagagaccatgcggaaaccggtggggaatccgaagaagatggaagtattcaaattgcttcagacgaaagtttctatgaagataagttcgaaggcgaaaattatgaggcaattacggaagatgttaaaaatagtttgacccatcaacagccaaattatgagtgttcaccagacagcttgtatgatattgccgctaaagctatgcttcaattgcaacaaagtgaaaactcgatgcgtactcaggaagaaaagaaaattcttgaatccaaccaaggaaatcctgacagtgtcaccgtatctgtcataccttcacaggaagctgaagagcaaacatttagtcaaaacagcatcgtttgcgaagttgatgatgaagatccagaaatcgacggagataatcttgaaacgtttagcgttataatggctgagaaaggttctgagcaaggttcgcagtctactaaagcgaaggatctagggtcatcatccgctataacagactctgtagttgatgaaatatcaatagtgaatgaagatactgtttattattctctggatgaagccgattctgtgccagagaatagttcaaatgctttagttttggaagtccaagcaaaggcttctgcatacgaggtaatattttcgggatctgtgtatagctctacttctgaagacaactcggaaataatgccagcaccggtagagtatacatcacccttcatgaacaacccatttcattcatcaaacgatgaatatgaaaataaaaataacatattaaaatcaactctagcggccttggcttcaaccgttgatcacaaagatctaaaaaccgaagaagacgaagccgtcgaactatatccaggatccaaatcagaaaacgttgatgcttttcacgagccgggacagaaaattgaacagaagagtggttcagacgaaactatagggggtgccgatagtggaaatgaagatccccacgatgaaaatacgaaagaaaatattgagcatgcctctcattctgaattgggttctgtcttgagaactaacggcgacaaatcgattgaagaatctgtagaggagagctacttctctgctatcaactataccaatatcatagaaccgccttcccctcaagagattattagagagtccacttcaaatgtggaaggagattcgaggcttggaatagaagatgcaaacgaaatagaaatttcaaccgatactgaagatgacatcaaaaagagtatagagcacaaacgtgatagcttgacccaaaatattttcgggactaatttatcgaaaacgtatgaaaagaatagtgacaacactgactctttgcctattgaaagcatcgcaagagatggtgattttgatgaaaatttacttgagaaacctacgaatgctgaaattgattataatataattgcccaaggtcagagtaaaagcgagagctctcaggatagcgcacatcaagaatatgccacgaggttgaaatcggattataaagctgttgattcaaggcataggcaagaggtaaaacatcaagaaaatcaagaaaatctgtctgaaggaaaacgtacggattcggaaacggaatgtgaagcaaataaagagagagccagtcaagatgttatccatgaaaaagtggattacaatttgcttgccacccaacataatgtggacaaggccccttgtgaaaatcatttcgaggaagacgttttaagtgtagaattgggacacgaaatcgctggtgacaaaggtaatgaaagcaaaacttctaatgtggaggtacaatatcatggcaatatagaacaaaaacaagaaacaattgacgcggactccactcgaggaataattgtaggagcaagtaatttcagtttgtctgtaaacgatcataatgagaaaataattgttgagggtaatgatcaagaagtgaaaataaaagatgcaggaggtcaggcaacaagcgttattcaggctaaacaagaagacaatccatttattgttgaaagcatcagtaacgatgtgattgaaaacgctagtaaaaactctgaaaatacggatatggaaacaatacaaaaagaagttttctttgaaggaaaatcaaaaaattttgaacactcacaagttgaggaagaaaacgacgatattaacgatactgccaactcggctttttctgacttaaaacaaggatctgatcaatcggtatccggggaaaatcttgagagcgatacgaaaccatgtttggaggtccagcattcaaatccagaacatgaacctattgaactgtcaaagccagtaaccgccgaatcaaacgtgttctcatcccccattcgtgcacttgagacagtagtgaggggggtgaagaatgtggtagacttggcagagttatttgtgaaaaaaattgatgttattgattccgaggctgaagacgcagctgatattagtaatggtaacaaagaagcttctgaaaacttggtttcttccaatgaatctaaagatacagaaagtacaaatatatcgataaatgatagcgatggagatgcaaaacatataactagggctaccctaaccgaggatattaccgcgagattatgtgataacgacgtcaatcatgtaaagtacatcgaaacgatgaaaagtagtcatgatgaagaagaactgggttatgctagtgatttgaaaatatctgaacaaaaatcagaagaagaagaaaaagaaaaactggaggagccattaaccgaatctacacaagtagaacagtataacgagaacatccgtcaccacgctgcggaagaaaagattgagcccatggttgatgagaaaccatcaataaacgttcacacaaataatctggacgatgttaaaagacagcaacttctcgagaacttgagcgatttacaaaactactctcaaagactttctgaaggctctagactgggcacaaatcaagagaagttagaaaaagtatatatgggtgattttgaaggtgcctcaactaaaaaggagattgaagaggaatgtgttggatctattgaagaagacagcgttcttgagttgaatttgagtacaccttccatcgaaagtgagggaaaactattaatgagggaggaaaagtcaatggatgccctacattccgagccagaagaggaagaactgtccgcatttgaaattcaaaggcctttagaagcggtagtttctggcgaaagtgatggtgaagaacaaatatttggaattataccatcgacggaccttccttctgatcctccatccgatacggaagagactacagatcttcacaataattcaaatacagaaagtatgcaggttgaaacaaactcatttgcatcaccagaagtatatgaagtatcctcggacacaccgattgaagttctagtgggaacaggtgacgcactactcaatttcatgtcagagaaagacagttgtgacgcaacagcgcctgtattagatgttgcctcggatgattcacccagtcataatgtaggcaatcagaccgacgaaaaccctgttgatatcaagataaatgaaggcggggagtctgaatcgcaagctgtagatatacctgttcaggtattcgttaaacaagaacgggaagaaaagccttcagactctaaacttgaaaaagaggaactaaagtcgaacgatggcgagagccttgatgttaaggaagccgaagaaatcagccttggagaaagcaaacctaaaccgaaaaagaagagccgtaagagaaactacaacagtagaagaagaaaaagaaaaatcacagaagatagtgctcctggtacaagaaacaagaaaagtagagggaaaggcggtagtaggtaa

SEQ ID NO: 4962 - DNA, 1563 bp, Saccharomyces pastorianus
atgctgacttcaataaacgtagttttgcgaatacagggagcaatggccacttcaaaaacattgcgatacgcacaagttgcttgtgcttgtatttggtgtcttttctccgctggcattgtatttggatttgctgctttgaagcccattttgatttcagaaggtgtttaccacgaattgtgtgatccagaagacggtgatggcttgctatgtaccgcccaagacctgaaattaaacttcatatttgctctgggtgccactgtaacgaacgtcatggctctgcccgtggggaagattctcgatatatatggacctcgtgtttgtggtttgatcggatcagggttcctattcctagcgtgtggtaatttcatttctgctagacatttgacgtctgtctgggacccctatgttgtgggttacacactgttggccattgcaggcccatttgtattcatatcatgtttccaattggccaatagcttcccacaaagatcggggactatattggctttattaacgggatcttttgattcatcatctgctttgtttttgatatatagactactgtatcagaattggtaccctgatctacgtgtttccaaatttttcactatttatttattggtgccgttgtttatccttgtctgccaacttactgtcatgccccattcttcctacaagaccgtaaaccacattgccaagattgctgtggaaggcctagatgaaaatggaaggcttattgagggcgatacaggatctaatatcattcctgatgagcaggagcgtcaagcgttgattgcaatggaggaggacgaagagggtaggacgcctaacgtcacaccaaggagaaggaaatcagtacttgaaacttatgttgaaggaaaactgcagaaaaaatccggaggtatatttggggtcctgcatgggaaatctgccttagagcagataaaaagtccgtggttttatttaatgcttttatttgcacttgttgccatgctaagaataaactattttatcgctaccgtcagaactcaagaagaatatctgttgaatgataggaagctcgcactaaaattgaactctattttcgatgtgttgcttccaattggtggcgttgtttctataccgttcatcgggttgctcttggatcatacagatactttaaccactcttacagtattattcactacttctactgccataggtatattcgggttgattccaaattctttcacctttaatctaatagggatagccctcctggtagtatatagaccattctattacactgttgtttccgactattcttccaaggtttttggattcgacacatttggtactgtttatggattactgtcttgtgtttgtgggattttcaacatgggccaaaatttattagataaatggacgcataccacattcaacatgaacccattccctataaatcttgtcttggtaattttcaccatcgtattttcactaaccattacattttttattagggcgcagatcttgcataagcctagggaagaaagagtactgtcctcagactatcaatctatttaa

SEQ ID NO: 4963 - DNA, 291 bp, Saccharomyces pastorianus
atgcaacacgagactaacaatagacaacatcggtttccgatcttcttatcagccaaggttgccagactagtgcttgctgccatcccgccagcacaacgaaacatgggcacgcagatccagtcagaaatcatctcagactacaataaggtcaagcccattgtgaaagtgacatacaaggacaagaaagagttggaagtcgacccgtcgagtatgaatttccaagagttggccaaccattttgaccgccactctaagcagctggacttgaaatatatgctggaaatgcactga

SEQ ID NO: 4964 - DNA, 477 bp, Saccharomyces pastorianus
atgattccactcgcaaaaatcatagccaactgtgataccgtcaggagtaaactaaaggatttacaagctttgaaaaaagattacatgctatttttacaagaaaaaaaggctaatgtacgagatgtgaaacgtgatttgttgggaatgcatttccaaaacttgcaaaatcaaatgaaaagggaacttccagttttcattactttaatccataatacggttgaatgtatcttactgaactataacaaagtttttttaaaatatctagaaataatcgctggtggaaaaaaatatctgcaaaaggatctacaaaacaaggctctcaatgattctacagagacaggtctagtcaataatcttgacatcctacaatgctactctaaatcacggtacatgacaaaacgcatggtaagaaaagactggcccttccttggagatcctagtggaagccgtgtcattcgaaaactatttgaactttga

SEQ ID NO: 4965 - DNA, 1542 bp, Saccharomyces pastorianus
atgttcaagacatcttataccttgtatgatttaaactatccaacaaatagttcactgacgccaataagagactacaaaaatgattatttccataaaaacgataataaactaccggagatagtgagaaaacccactagaatgttatcgaagcacgaaggcaaagttaatgacaagaaatctacaaacaaaagaccagcaagtcttgacttacattccatagtgaatagtttaaacagcaaaagaatatattctcctatcaacacagaaaaatttcaaagcgtggtcaggctggattcaagcccccacgttcccacttccgcatatggaggatgtaaattttataaagttgttcagaagttgtatctttctgagatcgattactacaatgttttattaactgccaataacgtatacagaaaagcattaaatgacgacctaagattcaagaacaagctaataaagtctgactcaagtgatgagttgttgctttttgggaatattgatactattgcttcgattagcaagatatttgtatcagcaataaatgacatgcttttggtcaaccaacgtgggaaaacgttagacgcaaatgattggggaaaaataaccactgatgctgagacccaacagcagttatattcagtttttgatatttcagaggcgtttgaacaacatttattaaggaccaggtcaacttatatgagttattttgttagccatcaaaaacaaatggaactatttacttcattgagggctaataaaagccatgtcttcaacatgtggtacgaacattgtttaaaggaaagtggttgcttgaaactagaggacatattggaaagcccaatgaaaaggctaattgaatggattgatacgttggaaacattacagagctgttttgaagatgtaatttcgttaaaattgggctcgaaattaagtcaagctagaagaaaatactcggtatttgctaataagttggatacagaggtttcggaatacaaaagcaactccatgtataacttcagtttaaccccgtcagagattatacaaagttatgatgaagacccgttttcgcatcttttaaagcctccagacaaccaaaataaaaggaaaagttatgcttctcgacacgggagtgatcccaataaaagtagggtcccttctctactttctggttcatcaagcttttattcggaagtttcgggtttagagactgttagtgatacctctagtatgccatttggaactgctccgttagaaatggacgaagaagaagagttttatactctggcagatcatattagcaaattcaaaaaagtatcaaaacatttgtcagacttacaaaagcatttattaaaaaacagtttttcagacattattgattccagtttacagagaataagtgcttggaaaaaggtaatcgaatgtgaggcacctttcggtgcatttttcgaacacgataatctaatatcgaccatgtgtttgtcatacatagataaactacatgaacagaaaaaccaagtaacaatcctaaaactgacataa

SEQ ID NO: 4966 - DNA, 714 bp, Saccharomyces pastorianus
atggccaacgagggtggaacacgttatgaaattatggctgacatcagtaaatatatcccgatggttgacgccatattaagtgcgtccaacccagatgaaataagtccgaagagggttagaaaagcccttcaaatcctattttcagttgatttggaccctcaaaggaaggcaatcaacgaattgatccttgaaaggtttggtgatatacaagaaaatcctagagttttggttccaaaggaggtccttatcaatcgagatcaggaattagcttcgaaactgcaagaagagggaggaagacctctaaggtcaacaaagaaaagaaaaagtaagactgaaactaaaccgaaaaagaagaaaaagaggactgaaagcactgactctaacagcatttcagtccgaaaagttcttttatcggctcctctacagaagtttctgggggccgaagaattgccaagaacacaagtggtcaagatgatatggaaatatattaaggagaatgacttacagaaccccgaggatcgtcgagaaatcttatgcgatgagaagatggtgcccatttttggtaaaaaaatgacaatgttttcaatgaacaaacttttaaccaagcacttgtttaatcctgaagaaattgtcaagcacgaagaaaaggaggaaccgatgcctaaaaaagaagtcaaatcggaagatgagctgcttccgaatgccaccgattaa

SEQ ID NO: 4967 - DNA, 123 bp, Saccharomyces pastorianus
atggtattcactaaagtgcataatgaaatgccttctagattttctgagcctgtggctcaactggttgacgataacattctaaagtttttaaaaaattttacaaatgacacattcgataattaa

SEQ ID NO: 4968 - DNA, 936 bp, Saccharomyces pastorianus
atgtcatctactactacagcgaacgtaatagagaagaagccagtctcgttttctaatatcctgctaggtgcgtgtttgaacctgtcagaggtcactacattgggtcaacctttagaggttgtcaagaccaccatggctgcgaacagaaacttgacgtttttggagtcggtcaagcatgtttggtcaagaggtggtatcctgggttactaccagggtttgattccatgggcatggattgaaggttccactaagggtgctgtgctattgttcgtttcggcagaggctgaataccgctttaagagtttggggctaagcaactttgcatcgggtataatgggtggtgtcacaggtggtgtcactcaagcttatttgaccatggggttctgtacttgtatgaagactgtggaaattacaagacacaaatccgccactgcgggtggtgtcccacaatcttcttggagtgtgttcaagactatttaccaaaaggaaggtatcagaggtatcaataaaggtgtcaatgctgttgccatcagacaaatgaccaattgggggtcccgtttcggtttatccagattagtggaagacggtatcaggaaagcgaccgggaagaccggtaaggatgacaagttgagcgcattggaaaagatcagtgccagtgccgtaggtggtggtttaagtgcttggaatcaaccaattgaagtcatcagagtcgagatgcaatctaagaaggaagatccgaacagaccaaagaacttgactgttgggaaaacattcaaatacatttatcagtccaacggtttgaagggtctataccgtggtgttactccaagaatcggtttaggtatctggcaaacagttttcatggtcgggttcggtgatatggcaaaggaatttgtcgctagaatgacaggtgaaaccccagttgctaagcattag

SEQ ID NO: 4969 - DNA, 441 bp, Saccharomyces pastorianus
atgagaatctttgcttcaaacgaagttattgccaagtctcgttactggtatttcttgcaaagattgcacaaagttaagaaggcttctggtgaaattgttaccattaaccaaattaacgaagctcacccaactaaggttaagaacttcggtgtctgggtcagatacgactccagatctggtactcacaacatgtacaaggaaattagagacgtttctagagttgctgctgttgaaactttataccaagacatggctgccagacacagaactagattcagatctatccacatcttgaaggttgctgaaattgaaaagactgccgacgttaagagacaatacgtcaagcaatttttgaccaaggacttgaaattcccattgccacacagagtccaaaaatcttccaagaccttctcctacaagagaccttccactttctactga

SEQ ID NO: 4970 - DNA, 120 bp, Saccharomyces pastorianus
atgatcttgccgttcttggggtcggtggcgtccagaacattggctctgtccaggcactggaagaacacgtccctggactcccagcacagcttccgctgcgaccgggtgttagggggttga

SEQ ID NO: 4971 - DNA, 810 bp, Saccharomyces pastorianus
atgaatggtgggtctgcgatcagcatagatgctcaaaaatttctgtccaatgtcctgtgtcccatgctgattggttacgggttaacagaatgtgtggccaacgcttgtgtggtagaacctgaccatttcttcgaattcggtgtcgccggtgatattgttggtaccatgacagctaaattagtagacgttgaagagttgggttacttcgcaaaaaataatcaaggggaattactactaaagggtgcacccgtcttatctgaatactacaataaccctgaagaaaccgccctcgctttgactgaggacggttggttccgtactggtgacgtcgctgagtggacttccaggggacaagttaaacttattgacagaaaaaagaatctggtaaaaaccctaaacggtgagtacattgcattggaaaaattagaatccatttacagatcaaacccttatgtgcaaaacgtctgtgtttatgctgatgaaacaaaagttaaaccaatcggtattgtggtacccaacttgggacctttatccaatctggccattgagttgggtgtaatgcattctggtgaagacgttgagtgttatatccacacaaggaaactacaagatgctgtttggagagatatgataacaactgccacatctcaaggtttgaacggtattgaattgttgtgtggtattgttttctacgaagaagaatggactcctgaaaatgggcttgttacatccgctcagaaattaaggagaagagatatcttagccgccgtcttgcctgatgttgaaagagttttcgcagaatgcggttaa

SEQ ID NO: 4972 - DNA, 1221 bp, Saccharomyces pastorianus
atgaccgaacaattctccgtcgaagtcggcaaagccgctaacgagcatgaaaccgctcccagaagaaacatccgtgtcagaaaacagcccatagtcagaccgttgggctcctccgcctccacgatgtacgaattcgccctcgagtgttttaccaggggtggcaagaagaacggtatggcttggagagaaaccgtcgaaattcatgagaccaagaagaccattgttaaaagggtcaacggcaaggataagcccatagagaagacgtggttgtactacgaattgtctccctaccaccacatgacctacgaggagatgacgtgcatgatgcacgacgtcggtcgtgggctgttgaaaataggtgtcaagcccagtggtggagacaagctccacatctttgcctccacttcccacaaatggatgaaaacattcttggggtgcctgtcccagggcatccccgtggtcaccgcgtatgacacgttgggtgagagcggtctgattcattccatggtcgagaccgagtcctcggccatcttcaccgacaaccaactgctagccaagctggcagtgcccttgcaatccgcaaaggacatcaaattcgtcattcacagcgaagccatcgatcccaatgacaagagacagagcggtaagctgtacaaggccggcaaggccgccgttgataagatcaaggaagttagaccagacatcaaaatctacagtttcgacgaaatcgtcgaactcggtaagagggccaaagacgagatcgaactccacttccccaagccggaggacatggcctgtgtcatgtacacttccggttccaccggtacgccaaagggtgtggtattgacccatcgcaacattgttgccggtatcggtggtgtgggccacaatgtctacggatggatcaactcttcagaccgtgtcattgcattcctgcccctggctcatattttcgaattgacttttgaattcgaatccttctactggaacagtcttctagggtacgccagcatcaagactttgacctccacttctacacgcaattgtgaaggtgacttggtcgagttcaagcccaccttaatggtgggtgtcgccgccgtatgggaaacaatcagaaagggtatcttggccaagatcggcgagttgcctagcttgtcccaaaagctcttttggaccgcttatgccctcaaggaaaaaacgtgccatgcagtgggtttataa

SEQ ID NO: 4973 - DNA, 2793 bp, Saccharomyces pastorianus
atgaaagactacaaatatgatgacaatggaaaattattcgaaggtaacggtagatttttaaaccaaaaaaacgtcaccatgctttatcacagtgcggttgctaatcaacagattgagctattttgcggtattttaccaaagctaaatacagacttactttcaatgctgctcctaaatacagactttcttttcagcgccttgtacaaagtttccgaagaaaccaatgaagagctctttaagtcatcattacagttggcgaaaagagaccctgaaattgctgatattttggcacatgctattttgcaatacgttcaagaccattttagccctactacaaaagagaaatacattagacataccgtagagttgataagcaactgcagtgatacctcttcaacgtttttccccactgatatgattgatctttttgtcaagtatgtcccaacgattgactacagatcgtctttggtgaacatcttaggcttaaacacacatttactcttcacggaggacaatcctcttgatttagcaagcatgcgaaaactgattaagcatgccctattcctagattcactactcgaagcattaccagaacatattaacaaccgtatcattgcatttatatcaacagtctctgaagcagtcacagattataattgtctttcagccgaaccaaatgattccttttacgatttcgagcatacttttttcaaacatggtaagataaattcagacttctctactgttatcgaaagcatcacgcatcctgccgatgaagatggatctctatttacgaatagtgttgcaaaaagtaatcttgtctactttttctattattcaagaatattatataaaattttgttgaatggcatggatacggtttcatctgcaaaactaaacgaactgttgccatcagtcgagaaacacattaccaaaactgtaaggaatcaaaaatcttctgataatgattacttgttatgcgctattcttctcttagtgttcaacagagcgaacgccaaaaatgaaatgaccaaattaagaacactgttggcgtctcaactaatcggaattagagaaaatgaactagtcgaccgcgaattcaaatcgttaatacttctgaataacttgctggatatatcagacgcaggtgaccaattcgttcctatcgcaccacaaagattaagcatggtgtttggttcgataggaaaatggctcgacagtgaccttgcctatgaacctagcttcattactgttaggctggcattgctagagttttttaccaagttactgaagtttgaaggggttagagacttgggtgtaacagcttttgaaatttctgaaaggttagttgctgattctctatcaatgtgccaacttgatgacactatgtttttattggagttgcgttcttcctgtttgaacttatatgatacattgagcacgtacagaaatgacaaagaatcaccagaatacagtaatgaaatctttgaaaatttaattgaattgattttccttaactatagtctagaacggaataatcaagtctccacaattttttacaaaaaattgtacaaaatcatttcctcaatgaaattgaaaagttcaaagccacaatatgaaaggatatttaacgctgtcttatacgataaggacactggtgaaaacatcaatcaatcaagacttttaacaagtattttgggatctttgatcgtggaaacacaacaagagatcataattgaatacgaattgaaagtccaaaaacaagctgcatcagatgaagataacggtgactctaataatgatgtgagctctaaattcaagttacctgaagaactgttactaaaagtgaccagtgatgtaccaaaagagtatctcgagtatgaagataaaaattcgtttatcaaatacttgtggttttggcatttgattttgatgtactttcaagatacatcttacaacatgaggcaattattcatcgaacagttgaaggaggccgatttaatcaataaaatgtttgattttataacggaccaaatagatttacaagatactgaattttggaaacaggttgatgttgatgaaatctcagggtatgacattgttggaaatgggttctcgccatataaggaagatatctttgcggagtgtaaaaaattgctgggacatacgctttatcaactatttaataacgttggttctttgacgaacacttggtggttaaacattaaagatagatcattgcaaagcgatattgaaaaattcgtctctcaatttgtctccccaattttaattgacaatgaattcaacgagatcaactctaagatggatcggctaacgtctagtgacgatgcgttaacgatcaaattgaataatattaccagtgaagtgaaagcaagttatttaattgatgaacaaaagttggagatctctttcagattaccaaagaactatcccttgacaaatattcaagttacaggtgtttctagagttggtataagtgaacagaaatggaaacaatggattatgtccacacaacatgtaatcattggcatgaacgggtccgtgttagattctttggagttgtttaccaaaaatgttcatttacaattttcagggtttgaggaatgtgccatttgttactctatcttacatgctgtggataggaagctaccttcaaagacttgtccaacttgtaaaaataaatttcatggggcatgtctttacaaatggttcaggtcttcgggcaataacacatgcccgttgtgtcgtagcgagattccatttagaagataa

SEQ ID NO: 4974 - DNA, 1809 bp, Saccharomyces pastorianus
atgtcgtttggtggaatcaacacgtttcagcagtataacacggatttaggactgggccacaatggtgttagaatatcgttaaactacttcgacggttcacccgacccaagtcttttgaattctctatcctcaaacgagttgaagcttatctttaaatctcttttgaaaagagatgaaactacaaaggagaaggccttgacggacctttctaatttaattgatggttttaaacaaaatggatatctttttgacgatattcttctcctttgttggtcgcaagtatatgctaaactgatcgttagtgattcaaagggtatcagactgcaatctcatcaaatcacgttgaagctggtcaaaactctcaagaaaaaaatatcgaaatttttaaaggattttattcctttaattcttttgggtacgtgcgaactagactacagcgtagctaaaccttgttgcaatgaattaatggattgcttcaataacgatccagcaaagataaatgctttgtggattgtctttcaagaacaactattggatttaatcaaggaaattgttgtgaacgaaaatgaagaaaccatttccgatgaacgctactcaactaaagaggaatccggatttagatatcagagaattatggcgagtgcggtgttgctgttgattaaacttctggttcacaataaagatatatccgaacataaatcttcttacaaggcaattctttctgatgagtcaatctggaaattattgaatctgaaaaacagccaaaatacaaagacatatgaatcggtcattcaactgatggatgttctttatataagcggttacatgggctcgcacaaagatacactcaagttatcgacaaagaagttgttcaaatcgttagcgcatgtctcgtcaaagaacatcttaaaagtatctccggtggttccaaccataataaatcttctatccactctagacagttacaaagacgggaaaatatggacatacgacaaatcctccaaagacaaattgatcggatttctgtcgatctcttgtactacgccatcgccagggtttttcaagagtatgttaacactatatacctcgactaaaaagcatgcatttcttgattatgatctcgcatggcttccaatttggcaaaaatcgattcaaaaacttaatgaaaagactttttttggtagaaacggtgccgaagttcttaatgaattctgggtaaattttttaaagtttgctaatgactcatctgaagaaaatgtgaaagagatgacggagtttgagattttgaacactttatctaatgggaaatccttggctgagttcacgtttttgaaccaaactctttgtgatgctcttccatctgataagtgggaaaaagaaattgaaagttttttcaaatcagacgatgaaacaagacagaaaaacgaatactacgaaaagaacatatttgctttactagttatcgccactaacaacaaatcagcaattatttccttgtttgacttcctttccgaattaattcaaacaaatccttcaaatgtccttaccagatatgaaggtatatttgaagtttataattactttctggattctgatatggattttttgggtgataagataaaaaaacttatgtatgatattccaacctgggttgaagaaacatcatatcaaaatcttgctggtatcatgacacattattcaaattctaccttttttgagaacaatgaagacgtaataacttcatttgaagattatttcactgttgcgtatactctcaatattccaaaaactataattataaacaaatag

SEQ ID NO: 4975 - DNA, 507 bp, Saccharomyces pastorianus
atgcagaattacctacaacttactcaaatatgttttcacacacgtgattttaaacatgcttgctatttgatttcacaggctaggaaaatgttggacacttctgataataggcaatggatgatgtactatatgacatccttgaagctagccgcaagaatgcatgaaagcgaacgatttagcaaaactttaaaagactggaactgcaatcaaagcgcaagtctaatcactccaggttgcattagacaaataaagggatttatgaaatatttcgagaaaaggtcagcttacatgtcaactacaactcccgttgacaccaaggagataaaagaccgaatcgacgaattggtggttagatatgcggactacaaattccaaggactagaaaacatgcgaaaattaacaaattttttaaaagaatggtttgatgaagaaattttattaaggaacatcgaacaaaatgaaaggaaaaaagagcttcttagggagcatgaaaagggagaaatatga

SEQ ID NO: 4976 - DNA, 4257 bp, Saccharomyces pastorianus
atggcaaaacgattatccaaccatcaagatgaactatttcgaattaaagagtttttgatagctaataatccagcaaagattaacgatgaaaataaaaacgatacattgaccaaattcgagcaaaattttggatatctggtccaatatattaaagatgggctaccggatttaaacgaatccacgaagttgattttcccggacactttctcgatttgtttgttaagaagtcaccaaatcattgtaagcaaaaagattgattctgaaaaatatttatcggttgtaagtaaggatattttaactgtcacgaatagtaacgctatctttgaatatgttcttgactattgggctgatggtggcgctccgttgacgaacgctttgagagatctcttcgggaaattactgaatttactaaaagttatatatcctatgtcagttttgaaggatattttatttaattggatgaacgagatattagaaataccctctacattacgtgtccaatactacttaattgatgcgctttcttctgactttgatctctactacattttagaaaaaaagccaaacttcatcgaaaactccttctctttgatgggctccgatttactagccaacccagtcggaaaatgtgttgttggcttactgataaacgtttataaaatgcattttaaagagaatgtgaattttatcgaggaatggatacaattgtggaaaaatccggctctgaaattcattcatgacagccggtataccaaatccataaatttgtatgttatgattccgttatttagaaatatgccgaatacagcttttacgagttttcttaaacagatgcctattaaggatccatcactcctgctttcgctattaaaaattgggcaggaactgggtatagaagaagagccatttcatgacaacaaatatgccacgatagagttggtcaataaacttctggagcaagatgaatttaaactccaagtatttgaaatactaactttttcgacgaaaaaatcgaagcccatccatccctatatttttaaaatcattgaacaacacttgaatgcattttttgtggatacagaacttgaacggagaaattacttttgtagttctatgaagcatttcatttttcgagttagagattgcacatattctttagccagagatgcgggaaagcttaaaaaggctgggaaatttcctgatgagcagaaggaaaaactaacccaagtagaagaatcgcgtgcctttttagcttggttatgtggttatatcaaacaccaattggcaccaggttctttgtaccaaagtaacgtaacagccctgaaacttttacgtatactaattaagtctggtattgataaagttacgccacatcagtttttggataaccaaaacaaaagagaatacccattttctattacagtcttgcaggacgttacatttttgagactacttactgatcttctagtcaataattttgccgatgttcgtgaattgtccaaggaattgttgtttgtgatgataagcgcagatgaatctaaacaatttctagacacaataaacacgaactctctagaaaggactgctgattcactattgaacaaatatgaaaagggtgatgcaggtgctacagtatacgagtttatttttactattactggttcacagagaagctttgttgaccgcacaattggaacattatcgcaaatgatacgagatttgcgtgatgacagtattggctgtgcagaaaattcaatcggcgcacactttgcggctctgagcgcagttctggataagtataactttcaagaaaatattcaggatacatccaacataatctccaaatcaatagatctcgtacttgcgaactgggaagccacgaagagtgtagtatgtcatgattcagcacacggtatattgcctgagaaatatattgattgcggggttccagatcaagtaataataagccatgcatttagagctattaaggaagcatctgccttgaccgaaactatattaaaaagataccctttaacgggtgatcaattaagctgtatcggcgatcttttcacacttcaactttcaaccattcgtcatagcggtgcattccaagctgttctacccggtcttaggacatattgtgttcgttgccagctcgaatctcccgcaatcttggaggagcttttagccaagagtatgaagtctttagaatctaaaacccaacatattacaagaaggtcgggaggcttgccctttttggtaacaaccgtcctaggtgcagaggtaactaaggggagacctttattgcaaagtaatttcaaaaaattattattcattgcaaagcttccagttcctccccaccaagatgaattcgacttaccccaggttaatgctataaattgtataaacgcgatatttgttgaaccaaagctctctgaacactgcacgccatttgtttctaatgctttagaaatagccttattgaactttgattgtgagatatgggctttacggaactgttcaattatgctgttcacctccttacaaaatagaatttttgggaaagtgggtagaagcgtcagtgcaaaattatttttcaccaagtattcaggtctgagaagtctactattagatattttaaacatttcggtttctcaaggatctagtgatgagaagaaaaactacaaagttgagagtattttcttaatcctcaacgtgttacttaggttgaggcccacaccaggttacactggattgaacgaatttcgtggtctggtttacaaatgtttatctaatgagaattggaagatcagagacatggcatccagagttttgaattcgttgtctgaaaatccagaagaagaaacaaggaaactgcttgatttggcatccactaagagacaaaaccagttgcatgcgcacttgctggctcttcagcacatagccccaccataccttgaagagaatactgatagtgagttaatccaaaaaatatttgaaaagaaaagcgagtttttagtgaataacaaatgtttcgttacacaaaaggcctacttagaattaacacggtctatattaggaaacaattgtggtacaccagaacctattctagaggactatattagggctctaagaaatgtatttacttctgagaataatgaatatgccatcaacggtagtaaacagctatatcttgctcaagtgctaggttttctcttggagtatgaggatagcgcgcattttgaagatatctatttattgggattgtactctccattttatgaagttcaacttaaaacactacagcatatggatacccattttgactggattacaatgagaagttcagagtttctcgaaacactacaagtactactccaagttgagaatttattgcccatggccaaggctttagttgtaaaaattctatcaagaaaggagggtgctctatccttatccacatctactcacctcatcgaaaaggataacagcgaagaaacaaaactctctgccatctcatcgctaagcgctcaattgtcttcaggaacatttaatcagatttggagtttgatgcaggaatttttctccgattcttgttctaaggattttaggctagcatctctgaactgtttagtcgcctatcctggtagtgacaaaaactttaagatattgcttcaattattcaactttttatgggacgatgattcagaaataagagaaaaggcttcattttatttgaataaaaactttattcaatctgaagattgggaatgcaataaaaatattggtgtaacaactcttctttttacgaggaagtttgctgaaacttttactggccctgacgtcatagaagagttgtggtcacagctgtttcaatatgtgaatgaatgtgatatttttgctgccgaaaaatcagcaacgaacattctctttactacagaaaaagacaaccagtttattaatgaacttgaacgggcaatgcgtttgtttgacattataaaattgactgcaaaagatattccagggcgttacaaggataagatatcctacatgaagaacactctactaaagcatttcaacaatgagaacatcagagactgtcccattggctggtgttctaatgctgaagttttttcaagagttacgttattgaagatattgattcagtgctacttttcttcagaatatctcagttttatcgatgaactaacaaaacattgtgttcatccattgatcattagtttttctcaatactag

SEQ ID NO: 4977 - DNA, 978 bp, Saccharomyces pastorianus
atggcagattgcgaccgggaccatgacactgtagctatgaataagctggtcgatgcacattgccatgttagtactgatccagaaagctcatgtggcggagacgacggagggtttcagggcacggtacgatgtgtgatgtcatcaaacccttatgactggagcaatttgaaaaaaatggccagcaatggcagacggaaggacgatatgtgcgtagggtttggcgttcatccttggtacagtcatctattttatgtgggggggcaacgcgataagctttcccactacgaaggcgtactggagtataaggacggagaccagttcgcccgtttggtccaggtgctgcctgagcctctagatcttgaagagtatatagcaagggagttcgacggcacactggttggtgtgattggagagatagggctggataagctttttagactacccgcaaacgggttctacacgcaaggcgagaaggccaggctaactacggtaaaagtcaaactgtcgcatcaggaggcggtcttcaggcggttctgtcagttggccagagacacacgtaggcccgtctccatccacgacgttaagtgccacgggaaactcaacgacatctgcaacgaagagctcttgccctgctcgtccgtcaagatatgcttgcactcgtacacagggtccaaagagacgctcttgggccaatggctcaagacgttctctccggaccgtgtctttgtgagcttgtccaaatggatcaacttcaagaacccagaagagggcaacggcctggtcaggagcctaccccccatgtgtatactgacggaaaccgacttccccattgacaatccagatccagcgtaccaagcagatcttactgagcagctgcaatatctgaacgctcaaatagcgcaggcatgggatgagggccatgattcctcacaggctacctcgcatgtgtacgacaactttcagaggtttattaaatag

SEQ ID NO: 4978 - DNA, 702 bp, Saccharomyces pastorianus
atgattgtgtggtacactgtgaagtgcaattcgttcagttgtttggcgttttcgaaggggcaggcacagcacaagacaacaatggcaagaccgattaacggaaacagcgaagtagaatcgagaggaagggtcctccagggcggtggttacgcaaataacaacaatataaacaacaacggcaacaacaacaacaacggcaatggaaacggaaacggaaacggtaataataacaataacaacagcaacaacaacaactcaaacaatgggaacgggcctggagccaacgggagagctaacgggaagcaaagactcacggcagcacagcagcagtacatcaaaaatcttatagagacgcatatcacgaataaccatgctgatctgcgcccaacaagccatccggtggattttgaagagtacacggatgcgttcctgaggaagtacaaggaccattttcaattggacgtgcccgacaacctcactctgcagggataccttctgggctctaaactgggcgcaaagacctactcgtacaagaggaatacacagggacagcacgacgcaaggatacacaagaaggatctcgccaacgtggtgagaaggcatttcgacgagcattccatcaaagaaacagactgcataccgcaattcatatataaggtgaaaaaccagaagaaaaaattcaagatggaattccggggctga

SEQ ID NO: 4979 - DNA, 1371 bp, Saccharomyces pastorianus
atgtccagcaagagcaacgatcactgcgttctgaggaaatggaacagttgcgctcacgaattggccgtgccctcagaggtccctgaacatgcgattacgaaattgcacatatacgatttcgacaatacgctgtttgctacggcgggccctacagagcagttatatacacgcgagctgttgggaaagctgacgtcaagtgatttgccgaatggcggctggtggaatgagccggagtttctgcaggctgctattgagatctcgaggagtaaacccagacggttttcatggaatgaagagatcgtcaaattggcggagggttcgtatcgggctaaggacaccctctctattattttaacaggaagggaagagaagaaattccacgagttgatacagcgtgctctggaaacggcaagaagccttaaggaatgttcaccggctgaatttaagttcaatgcggtttgcttaaagaaaaccggagtttcgaaatataccagtgaatataagaaggagctgatgcatgactttctggaatactacccttcgctgagggaactgaccatatatgacgatagagtgcaccaaatagatgcgttcaagtcgtttttcaattctttggacttgcctcgtttgcaatggtttgccatccccgtgccgccttttaccaaaccgctgcccaaggaacaagagcttgaaatagtgatggaaatggtcagaaaaaataacaaccgagtgtttgagtcttcgcaaaagtttgacttggcatggacgccgaaacagactggtttcatccttaccgtggcatcgcatcggttgctatcgatagaggttatgaaacttttcagaaaaaggagaggaagaaaccacaagaattttggcggaagagcgttcaagccaaaactatacgaatatcccatgtatataccctgtgcggaacctggcaatagcatccctgtgctcgaaaccgttaagatatggtctaacaatgacatctccacttttgattccgaggagaaagtgcaaagcactttaaaacagttccgtcagcaacagcctggaaaatgcatggttcgtttccaagtcaccgacatcgccataataccgtcaagtcattacaacaagagaaagcccttggaggtctatttcagggccataccggagccaaatagatacactttctcgttgttcccggaattcacagtcacgggtcatttttacaacaataacgtgattgaagatttagacgaggtcacagatcgtctgctgaacagcaaaacggctatccgctggactcctttagataaggccgttcctataaagaccttttttgggcaatatgccaagttcgcatctgtgccatatcccaacgattga

SEQ ID NO: 4980 - DNA, 2859 bp, Saccharomyces pastorianus
atgggcaaccaaacaactactgctactgcctcaaacacgtcgaccgagcaggtcgttacggctttggtcagtaacggtgctatctttcttgctttcatcatagccttcatactgctacgtatgaaattgaaaaggatatacgaacccaaatcctcattcaaccttatcaatgaagagaagaagccagaacctttgccaaagggtttgtggcaatggatcaagccactattgaaaaaatcggacaatttcatcatccagcaagccggtctggacggttatttctttttgaggtaccttttcattctttccgtttattgtgctgtatccctgctttatatctttcccattttattagctctcaacgcagctggtggaggtaatcttcaaaccggaatgaatcgattggcttatcagaacgttaagcaccgtggtcgatattttggccatattttttgcggatggattttcttttgggggtttctttacattgtatatagagagttgtacttttacacttctatgagacaggctgtattggcttctcctcgttatgctagaaaactggcctccagaaccgtacttttccaaactgttcctaagcaatacttgagtgaagaagaattttccaagttgtttgatggtgttaagagggtctggatcgccagaggttccggtgagatcgaagctatggtcaagaagagagacggtatggctttacagttggagggtgctataattagctacatgaaatctgcattgaaagaaatcaagaagttgaacaaaaagagtcctcaaatgtccgtgtctagtaatattgctgattatgttcctgataagaaaagaccacaccataaaattaacaagtttgccaaattcttctttggtaaaaaagttgataccataacctacattaaagaggagctaccaaaattgaacgcacaagtaaaggaattacaagcggatcatgaaagcgcttcccctttcaattccgttttcgtggagtttgaatcccaatatcaggctcaagtcgcctctcagattaccacgtaccacgctcctcttttcatgaccccagcacacgttggtattgaaccatccaatattgtttggtttaatatgagaatgttctggtgggaaagactaggcagaaaagttacttctgtttcggcgattgtcgcattagttatattatgggcaactccggtggcctttgttggttcaatttccaatatcacggctttgaccaaagaacttccatggttaaatttcatctatagactaccagaacatctaatgggtctattgacatctctggcaccaaccgtggcattagcactgttgatgagtttattgccagtgtttattagacatatggctgttgcgcaaggtgctccctctaagcaaattgtagaacatttcactcaacaagcttattttgcttttcaagtcattcaagtgtttttagttgttacaatatcgtctgctgctacatccacagtaagtgcgattatagaagatccttcaaaggccatgaatttattggcttcaaatttaccaaaagcttctaatttcttcatctcctacgttattttacaaggtttctccgtttcatcaggtgctcttttgcaaatcgtcccattaattattttctatctcttgggcgctcttttagatggcaccgtcaggaagaagtggaatcgtttttctggtttatcaagtatgcaatggggaacaacttttccagtttttacaaatatggcagtcatcattttttcttacgccatcatttctccactgattctattatttggcgcagttgcattcttcctattgtatgtcgcatatttatataatttgacttatgtctatcaggagtcaccagatgggagaggtatttactacccaagggctctattccaatctttagtcggagtatacatcggtcaagtttgtttgctgggtctttttgttgttggtaaaggttatggtcctatcattttacaaatcattggaatttgtgtcacagtcttcgttcatctgcatttgaacattgcatttgatcatctatcgaaagttgtacctgtggatacaatgaaaccgctagacggtatattagatactccttccttcaaaaatatctaccgaggagtaggacagggcaaagaaaagaagaacaattttggtgctaacatcaatatggatggaatcagagaattgcctgagtttccaatcaagaaatatcacaagaagactgattccgttattgaacaacaagtggataacagcttatttagcgaaaacacgtttgagtatcaatttaacccaacctatgatgcgaatgcaaatgggcacgttagaaatactgaaaacacaattgaagatgttccgttattagcagatggtgacacaatgaagatccctcctgcaccgtggtggaagagattcttgaaacctcacgtctattattcttataaggctgtgaaaagcagactgcctgaagtttatggtttggtcgatcctactgaaaaagttaatgagtttgatattgcacatgcttatgactatccagccgttagcgcagaatgtccactattatggatccctcaagatccttatgggttttctaagacattgattgccgatgttgccggcgttgtcgatatgtctgataaaaacgctacgatcgataaagactcaaagtttgaattacaagacatgccaccttcttacgaagacatcaaaagtgaaaatgcaaatgatacaatagatccaaaggatgattatgaaaccactagccaggaaaataatccattcgcagatccgaactataaaggagaagaaaaccgtccgacagtttag

SEQ ID NO: 4981 - DNA, 636 bp, Saccharomyces pastorianus
atggatagcaaagagtatcttatatcgtatggttggaaagaaggagaagcgtttaaagaaggcggtttaaagagaccaatactggtcaaacataaaagagataagaagggattgggtaacgcacccggtgggaacgatggtgaagcatggtgggaaagactgtttgacgggcatttgaagaatttggacgtcagcaccgactcaagtaatggtggtatcacatttactcaaaatgaagtagttgcatctgccgtatcgaaaagcagctcacctctatacagatggttcgtcaaaggggaaggtttgaaagggaccattggaaaccgtaatgtaaagaaaaaagccagtattgtgatatcggatgcaagtacaagtaaatcgaagaagaagagaagcagaggcgatgatgatgactgcaaggcaaaaaaaaagaagttaaagaaggacaaaaagagtaaagacgatatgaagtatgaaaaggagaggaaaaccaaaaaggatagtaaaaaagctaaaaaaagcaagcaaagtagtaatgaagataagaaatctaagcataaaaaggatagaaagattaaaaaacacaaaaaggaacaaaagtctgttggaaaacataaaaaggagcatatatcataa

SEQ ID NO: 4982 - DNA, 1632 bp, Saccharomyces pastorianus
atgcgtccagtcttcaaagagaaaatgagcgtacagagtacgggttcgccggtaattgacaaaatctcgacgaaagcagaggacaaagtagtagtttccacagaggatgaagacgtgacaacagttgcttcctcgaacaattcaattcaagcacccaatgactcgccatggcaagatccaacatatttcagttcttttgggagggaactaatgtttatagtcacatgtatgttagcgcaattgctgaatcaagcaggccagacgcatgcccttaccataatgaatgttctgtcaaagtccttcgattcagagtcggacaagcaggcctggttaatggcatcgttccccttggttgctggatcttttatccttataagtgggaggctaggtgatatttatggactgaagaaaatgctaatgattggttacgttaccataatcgtttggtcactaatctgtggcctttctaaatattccaataacgatgcatttttcattacatgtcgtgcgtttcaagggctggggatcgccttcatcttaccaaacgttatgggactggttggtcacgtttataaagttggttcaacgagaaaaaatctagtcattagtttcattggtgcatgtgcccccgcaggcggtatgtttggtggattgttcggaggattgcttgttaatgaagaccctgaacagtggccttgggtgttttatgccttcgcgattgcattttttcttaattcgattttagcttggtattctattccaaacaatataccaacaaacgttcatggattttcgatggattggactggctctgttcttgctgttattggattgatcctgttcaactttgtttggaatcaagctccaacagcaggttggggtacagcttatattattgctcttttaatagtctcggtaatctttctcgttgctttctttgtctacgaggtcagttacgctaaagttcctctactaccacatgcagtaactaaaaaccgccatatgattatgattttattggccgtatttttgggatgggggtcatttggtatttggacattctattacatgtctttccaactcaacttgaggcattacagtcctgtatggactggtggtacgtattttgttttcgtgatcttcggtacgatcgctgcatttatggttgccctaaccatcaagagagtaggacctgcctttttgttatgttttgctttggtggcatttgacgttggttcaataatgtttagtgtgctgccggtaaaacaaagcttctggaaattgaactttggaatgcaggctatcttatgctttggtatggacttgtcattccctgcttcatcgattatattaagtgatgggctcccaatggagtaccaaggtatggctggatcgttagtgaacacggttattaattattcagcgtccctctgcttaggtatgggagctaccgtagaacatcagatcaataaaaacggcaaggatttgttgaaaggttaccgaggtgctatatatctaggcgttgggctagcttccttgggcgttttgattagcttcacttacatgatggaaacattttggaataatcgcagagatcgccaaaaggatagcgttatatcggaaatgagttga

SEQ ID NO: 4983 - DNA, 441 bp, Saccharomyces pastorianus
atgggagctaaacgatattggaccgtaacatccccacttcgtcgatttccggatctgataaacgatctgcagatccatcgtcattgcaagaaaaagccgctatgtttcagccaagctcaaatcaaccgtctaatctggccaattcaatctcgagcagacattctgaaaacggcaagtcgtaactcatcaacatattggacactgaattatttgaagaggatgatgaaatcggacccggaaaaaacgtacgatgtaatgataacatcagtaccgcagaacggttttgctggatgtgtttttcctgacctatcgtttgctagggggacattgaaattgcatccaagcactaagcattatcccatgataggggatactgtaaaaaattgtaaaattttgaaaatcgattgcctagaaggaatgttggaacttgaaaaactgtaa

SEQ ID NO: 4984 - DNA, 2427 bp, Saccharomyces pastorianus
atggtagttagagggaatcatcaggcctttcttatcacaagaggcttccatacctatagaccctgtttaagggtcaccaacagaaataaacgacagcgaagcaagtacaaacagcaagaaacagcaccattcgactatgcgacattgtcaaaaaaagaccaagtcgaagacacagcaatagctagaccagttgaaaatgagaaagagatagaagcgataaatgaagattttttacacaggactaagggattggagcctgatattgaactaaaacagctatatcagattaaagaagagttcaataaacgttatagagataggtatgttgctccttcggaaagttggtatttaaactcctggcggtcattgacaaaaccaaagattccgtcctacggattaataaattcagatgttcattttgatacgaaatcgaaaagctcaaaacaaatggaatttcaaccagcccaactgatggaaaaccctttgaatgttggtgacctagttcttttaaaaaacagaccaaacgaattggcgatgtgtgtaagccttccgaatagtactatggatccgcgatacacatttgcgtctatcgatggatcgatgtcttttgcgactaaaaaccgtgtattgttaaggctccctcaaaaattacctactggaattaactcgctcgtccaacctgaaggccatcataaatatttgccaatcgggaccgtaaagaacttttccaaccaaacaaatattctcccgactgcggcgaggcaaatgataacaagtaggagtccggcacagatttccaaacaagcgtggaaagatttaccaatcactacgaaaaaattacaattacttcacaggtcattacaaaattatatgggcccatggcaaattccatttttcactttggttggattagtccaaaaactggatttgaataaagcgctggataataaagatggattaacctatttggctgatctagtgaacagttataaaagcgccgatagtgtgcccatgaactcggctacctttgtttccacatattgggccattgtacaacaacaggaatctaatctttgggggaaaatacacttgaatactgcgctgctctcccctacatcagttacaatcatccctttgaaatcccaacacttatactacgcacaggtaatagagaagctagaagctgacaactacaaggacatcgaccgatttgtaaagttggtgaacgaaagaaaatataaagatatctcatctttatacccttctgtcattcagctgctgaaagattttgccgcgggaaacttccacaataatggagttatagtcaccttaatctccaaaatatttagaaagatagaactctataagagttttgatataacaagagatatatgtcaagatctggtcaatgaaattttacccaataaaatgatcaatccgttgttactgaatatggatttagctttgcctgcatcttcgaaattggggcaatcacagcaaaagctttatgagttgacagacatagaaaacctgcaagcaagtaattccaatattaatggtgatagatatgattttggtgatcttaaggttttttgtatagattcggagactgcgcatgagattgacgatggaatctcgatagaaaaccacaaaaaggacggattgtacactttacatatccatattgcagatcctacttctttgtttccagaaagcactaatcttgattctcagggtattaccacggatgttctaaatgttgcattaaaaaggtcgttcaccacatatttgcctgatttggttgttcccatgctacccgagtctatatgtcgcttatctgatttgggaaagcaagggcaaaggacaagaacaatatcgttttctgttgacgttaaaattctccctaagagcactggagaacccattgaaattatgtatgatagccttaaaattcggaaaggtattgtgtcgaatttccctaaagctacgtataatgatgttgataggattcttagtatacctgacagcgaagcaccacccttcaaagaagatttggaaagcttgtttatgatttccaaattactgagggagcgacgtataaagaaaaacaatgctgttatctttggtgaggggtttaacaggggtctggtaacgctgacttctaatgatgaaggcgaactgactgaggtatcattttcagaccaagcggaaacatcatctaacgtcctagtgtcggaaatgatgatcttggccaatacgttagcgggtagattttttacagaaaacaaaattagcggtgtatttagatgttacaaacagctaccactggatgcgatagcacagcagcaatataattccatgataacaagtacgaagaaaggaatttttcccaagctagaagatatcactaagcttcatcacttttga

SEQ ID NO: 4985 - DNA, 513 bp, Saccharomyces pastorianus
atgaatgaatacacaacgccagagacgaatgttcaaaatggtgtccttaaagctatgtcgtttatgttcgaatatattggtgacatgtccaaggattacatatacttcattacgccgttgttggaagacgcgctcactgatagagatttagtccaccgtcagacagcctcgaatgtcgtaagtcatttggctctgaactgtgcaggtactggacacgaggatgcctttattcacctactaaatattctaatccccaatatttttgagacttcaccgcatgctattttgcgtattttagaggggttggaagcattgagtcaagcggttggtcctggtatgttcatgaactacatatgggcggggttatttcatccagcaaagaccgtaaggaagccattctggagagtatacaataacttatatgtaatgtatcaggactccatggtacctttttatcctgttacgcgggacaacaatgaacagtatgtagaagagctagacttaattttataa

SEQ ID NO: 4986 - DNA, 2370 bp, Saccharomyces pastorianus
atgagtcatcctgtgcagtttgttaaggctagtaattctgatggtagccaccggttgggtggtcaatattccattcctcaagatttgagagaaaacctccaggaagaagccacacgtactagtgaaaaggagaaggatgtgttacaagaaaagatggaaaccaagacagtgcacaatagagaggatgagtaccacagaaaaagattcgatttgaggcttggacctggtccagacacaaaagaaattacctccaagcaagatactcaaaacgctgtggttccaaggaaaagaaaatctcgatgggatgtaaaaggttacgaaccacctgaagaatctcagaaaacatttagcgaaaattccgacaatgtcttagttgatatagaaggagttaaagatttaatgtttttcaagccttctgaccataaatattttgctgaaattgtatccaaaaaacctatagacgaattgagcaaggacgagaagaaagaaagatcattcttgatgctacttctgaaaattaagaatggtaacacggcaagcagaaggacctcaatgagacttttaactgaaaaagcagttacgtttggtccgcaaataatatttgatcgactattgcccatattactggacaggtccttggaagatcaagaaagacatctaatgatcaaggccatagatcgtgttctttacaaactgggtgacctaacaaggccttatgcgcataaaatattagtagtgacagccccattgctgattgacgaagatccaatagttcgttccactggtcaagaaatcattaccaatttgtccatggttactggcttaacaaccatgctcacggtgataagacctgatatcgagaatgaagatgaatatatcagaaataccgctgctagggcaatggctgtagtggcaaaagccctcggtgttaatcaattgcttcccttcattaacgcagcatgccattcgcggaaatcgtggagagcaaggcatacaggtataaaaattgttcaacaaataggtttaatcttgggaataggtgtactaaaccaccttgctggtcttatgagttgtatcaaggacggcttagtagacgatcatgttccagtacgaatcgttacagcgaatactttatctacgctggccgaaaacgcatatccgtacggtattgaggcgttcaacattgcactggagccactgtggaagggtataagaagtcatcgtggtaaagtcttatcttcctttttaaaagccgttggctctatgatcccattaatggatccagagtatgctggctattatactacagaagcaatgaggataattaaacgcgagttcgacacacctgatgacgacatgaaaaaaactatccttttagtgttacaaaaatgtagtcgagttgaatctataacgtcaaaatttttacgggaggaaattgcaccagaatttttccaaaaattttggatcagacgtgtggccctagacaagccattaaacaaagtcgttacatacacgacagtagtgttagcagaaaagctaggctgctcgtatgccattgataaattattaaaaccattgagggatgaagctgaaccattcagaacaatgggagttcatgcggttacaaagatagtgaatttattggggacagcagatttagatgaaaggttagagacgcgacttattgatgcactcttgatagcatttcaggagcaggcggataacgactctacaattttcaaagggtttggggcagttactttatcgcttgacattcgtatgaaaccttttctggcacctattataagcacaattttgaaccacttaaagcacaaaactcctttgatccgtcagcatgcagctgatctgtgtgcgatattgataccggtcatcaaaaactgtcacgaatttgaaatgttgaataaattgaatataatactgtatgaatccttaggcgaagtatacccagaagttctaggttcaatcatcaacgtaatgcgctgtattttgagtgttatggttatagataatctacaacctccagttaaccagattttacctactttaaccccaatcttgagaaataagcacagaaaagttgaggtaaacactatcaaattcgtcggacttattgccaagttagcaccaacccatgctcctcccaaagaatggatgagaatatgttttgagctattagaactattaaaaagtacaaacaaggaaataagaagatcagcaaacgcaacatttggctttattgcagaggccatcggaccacaagatgttcttgtagctttattaaacaatttgaaagttcaagaacgtcaattacgtgtatgtacagctgttggccattggtattgtagctga

SEQ ID NO: 4987 - DNA, 465 bp, Saccharomyces pastorianus
atgttccggatgcacactgcttttcctaatcaacctggctcctttatcactaactattcattttttatagaattcggcgtggccttcactttcggtggttttcttttctttttgtttggcgtatttactttatttgatcgtgctttattagctttgggtaatattttgttcttaattggggtatttttaattattggttcacaaaagacatacatattctttacaagaccgaataagagacgtggctcgctcttcttcctagtcggggcctttatgattttgataaaatggacatttttgggctttataatcgaatcactgggtattgtgaatctttttggtgatttcttcggggttatcgtacaatttttaaggtcgatgccgatcattggtccatttctttctcaccctgctgtttctccaatagtagatagattagcaggtgtgagagttctgccagtgtaa

SEQ ID NO: 4988 - DNA, 1491 bp, Saccharomyces pastorianus
atgtttttcacagcgtattggctggaaaaaagtgtatatataataaacctatcgaatcttattcgaggcagagaatccgataaaacaaccacacccaattacgcaacgatgccgttgaagcgttctttaaaacaaccacttcaaagactatccgatttacaatcaaaatataatatatttacaagcatcaatacagcggcaaacaaggaacaaacaaacaaaccattaacgaattatgttgccagtatcaaagacaacatagtcactaaagacctcccaactacctgtgcctctcatatgcttgagaatttcaaatcaccgtatgatgcaaccgtagtaaaattgttaaagcaagctggagtacatattttaggtaagaccaacttagatgaatttggaatgggatctggaggaatacattcaataaggggggccgtaatcaatcctttatatcctcacgaacaaagaatgatcatgggcggttcctcctctggggctgctgcgagtgttgtttgtgatctagtggactttgccctgggcacagataccggtggttctgttaggttgcctgcgtgctatgggtccattttgggctttaaaccatcctacggacgtttgtccaggtttggcgtaatagcgtatgctcagtctttagatacagtagggattttgactaaaaagatagatgtattacggaaagtatttcaggtacttgataaatatgatgctaaagaccctacttcattaaatgatgaattgcgtggtctgatagaaaaaaatatgaaagctaaaaaatctttaaaaattggtattgtgaaggaatttaaccatgaaagtttgcccaatgaatttcaccaattatatccctcttttttggaaaagttagtgaatttaggtcacgaaatataccctgtatccattccgtcagtaaagaatagtttaccaatttactatacattatccccagcagaagcagcttcaaacttgtcgaggtatgatggtatcagatacgggtacagggattccaaacttgatataaaagacggcgttttatttgctcccaccaggttcaaatttggaagagaagtgaaaaataggattatcttaggtaattataatctttgttcggatgcattcaaaaataattttatcaaagctgaaaaactaagggtaaatttgattgacgagtttgacaggatcttcaaattcccgaatgttttgactgattctaaggggaatccggaaggcttggatatactattagtaccaacgtcatctaagcttcctgagaccataaagaaatttcaagaagaggaaagtaaatctccggccaattcttacatcaacgatgtctttacagtccccatgtcattagctggactaccgactttatcaatgcctttgaaagagaaaacaccaataggcgtacaaatagtgggccaatatggtgatgattccacagtgttggattttgtcgaatcaatatcatag

SEQ ID NO: 4989 - DNA, 345 bp, Saccharomyces pastorianus
atgaagtatccaaaaaattcgaaagagaaaagaaaatcatcgaaaacaaaagtgtctgtggggtatcaacagcttatttcttcttcattctaccgaataaacctctcttcttcttcttttctttctccccagtttcaacgtgctgttgtggttgataaactgcttgttcaccgtacatttggttggaagaagcacccatctgttgaggcataccgttcgcgtcataggccacagcagatccgaacatgggaaagtcaggtcttacacggaacccataggtgggagtctccaactgttgggcccagattgggtctccagagacagcatactcgaaacttcttatag

SEQ ID NO: 4990 - DNA, 1665 bp, Saccharomyces pastorianus
atgacacatattcccgaagttctgcccaagtccatacccatccctgcatttgtcgtcactacgttgtcttacctctggtactacttcaacctgttgatggtgcagattcctgggggccagttcgtcgtctcgtacatcaagaagtcacaccacgacgatccgtaccggaccaccgtcgagatcgggctgatcctgtatgggatcatctactatctgtcgaagccgcaacaaaagaagagtctgcaggcgcagaagcccaacctgtcgccccaggaagtcgatgccttgatcgaggactgggagcccgagccactggccacccccatcgccatcgatgagcaattgtggagagttgccgcgatccctgtcaccatggacatgccaatccagaaccacgtaacgatcacgaggaacgatcttaaggagacgtacaccaacgttttcaacctggcctcgaacaacttcctgcagttgtccgttacgcagcccgtcacggacgtggtcaagaccaccatcaagaactatggggtgggtgcctgtgggcccgctgggttttacggtaaccaggacgtccattacaggttggagtacgatttggcccagttcttcggcaccgaaggtgccgtgctgtacggccaagacttctgtgtcgccccatctgtgatccctgccttcacgaagcgtggtgacgtgatcgttgccgatgacgaggtttctctatcggtgcagaacgccctgcaactaagcaggtccacggtctactacttcagccacaacgacatgaactcgttggaatctctgttgaacgagttgaccgaacaggaaaaactcgaaaagctacccgccatcccaagaaaattcatcgtcacagaaggtatcttccataactccggtgatctggctccactaccggagttgaccaagttgaaaaacaagtacaagttcaggttgtttgtcgacgagacgttctccatcggtgtgcttggtgccacgggtcgtgggttgtccgaacacttcgacatggaccgcgccacgtccatcgacatcactgtcgggtccatggccaccgcattaggctcctccggtgggtttgtgcttggtgacacccccatgtgccaccaccaacgtattggttccaacgcctactgtttctccgcctgcttgcctgcctacaacgcaacgtccgtctccaaagtactagacttgatggactcgaacaacgactctgtgcagacactgcacagattgtccgcacatttgcacgaaagctttgcatcagacaacactttgcgcccatacttcatcgtgacgtcttcccccatgtccgctgtactccacttgcaactgacaccggaattcagatcccgcaagtttggctacacccgcgaacagctgttcgaaaccatatcggatctacagaagaagtcccacacaaacaagtacatcgaaccttacgaggaagaagagaaattactgcaagccatagtcgaccacgctcttgctaaccacaaggtgcttatcacaaggaacaccatcgtgctgaagcatgaaacactcccagtggtttcaagcttgaagatctgctgtaacgccgccatgtcccgagaggaactccaacacgcctgcgaaagtgttaagcaatccatccttgcttgttgccaataa

SEQ ID NO: 4991 - DNA, 696 bp, Saccharomyces pastorianus
atggcttgtggtgaaggtggcgaaccttccgttctgccctccgaagagtgttccgccatggaggactctttggaacgttgtctaggtttgatcgagtcgtgctacaactcccagtccgtctggtcctgtgttccagccactatctactgtaacaacgcccaactggctccttaccaacgtaccggtaaaaacgtttacgacatcagaaaggaatgtgaaggcggcaatttgtgctacccagcattgcaagacatcgacgactacttgaaccaagactatgttaaggaagctgtcggcgcagaagtcgaccgttatgaatcctgtaatttcgacatcaacagaaacttcctgtttgcaggagactggatgaagccctaccacacagccgtcacggaccttttgaatcaagatttgcccatcctggtctacgctggtgacaaggacttcatctgcaactggttgggtaacaaggcatggaccgacgtcttaccttggaagtacgacgaagaattcgctgaccaaaaaatacgtaactggaccgcttctatcaccgatgaggtcgctggtgaagtcaagtcctacaagcatttcacctacttaagagtcttcaacggtggtcacatggttccatttgacgtccctgaaaacgcactaagtatggttaacgaatggattcatggcgacctatccttataa

SEQ ID NO: 4992 - DNA, 738 bp, Saccharomyces pastorianus
  modified_base (679)..(679): a, c, g, t, unknown, or other
atgacaacgtcttgtactcttggccagcattcttgctggcttcttagttcttgctgcttgtacgatagctttatcgttggggcaggggccacccgcggggccttaaagaaggggccagtattaaaagctccagataagagctgcaacaaaaagctccgaacgtacccttttcttcttctcttcccttccgagtacaacaaagtaagagagaagaaacagtcaagagagaccgttttttgcactcaacccaaacgtactcccgctatgaaaccatttactagcttattatgtggactgggcctgtctaccacactcgccacggccatctcgctgcaaagaccgctgggtctggataaggacatcttgcgccagaccgcagagaagttcggattggacttggacctggaccatcttttgaaggagttggactccaacgtgctggacgcatggacagagatgaacgacctgttccccaaccaggtcatgagcctgcagacatcgaccaagcctaagttccccgaggccattaagaccaagacggactgggacttcgtggtcaagaacgatgctaccgagaactaccagctgcgtgtcaacaagatcaaagaccccaaaatcctgggcatcgacccggacgtgacgcagtacacaggttacctggacgttgaggacgaagacnagcactttttcttctggttttttgaaagcagaaacgaccctgccaatgacccggtcatc

SEQ ID NO: 4993 - DNA, 930 bp, Saccharomyces pastorianus
atgatgagcaatgcatgggataaactattagctcaaaatgaaccggtagcaaacgctaaagaaacctttgaaactacagtgatcatatactctccatcgaggaaaacattacaacaatttacaaccatctgttttccagaaggaacaagtccagcgctagatactagtctaattaattatgctacaataggatggactagtgattcagatcagtgctatactgtagatgtatacacgctaattaaaaatagtgccgatacattagatctactgaaaccttttcttcaagaaccgacctcgaaggttcactggctcatattgctagattggtcgttaaatgatcagaagctgtggttaaatgagctattcggtactttcaacaagatcaaacagtttaatgataataatgacatttccctatggtgcttaaacagtagtgaaatattcaatttacagagaaacactaccgcatggcaatcagcccatatagactttattctgcaaacactaagatccttttgtcatttcaatgaaagctcattgatctacgtagatgaagatagcagtgaagatgaagaagaagagacgcaaaagctcagatatcaggaaatcttgaaacgcatcattgaaggcagggatatcaaaagacatatcgaaatggtcaagcgtagcagaattgtaataccgaaaggttgtgattccatagggttaataaaaacaatagatgaaagatttgagcctagtgagttgggagatgatcagttcttggacaagtatgcggacttcgttcctgcgatagatgcaataagggataacgggaaaccatgccatgatcttgataagcttcatccgttatcttctttccaggtcgacattcaagaagagctaggcaagatgtttgcaaagcatagagagagttcaaaagtgtag

SEQ ID NO: 4994 - DNA, 162 bp, Saccharomyces pastorianus
ggatcagcttgtcgatcagaagtgggaagagagttaagccttagggaaagtcctgaccagaaactgtgcaaaagtagactggactatttatctggaaagataaacgctagtaacgctgtcattaataagtgtgaagaagaaataaaaaagttatctaagtaa

SEQ ID NO: 4995 - DNA, 3210 bp, Saccharomyces pastorianus
atgctatcatcggggaaatttaaagacaacgagtatgggaaaaaaagagtacagtattggccaatgggcaaacaccaggagcgtgcctatgggacaagcacgagcgtaattaaaggtatgaaggcttcgcttacgtttagtttctccgacatatatgctccttgtacaatttccaaggacatatacctcgagtacggcgataaaactgcaggcttatatggtgcagtcggattgcccacatacggccaggcgtgctcatccaaaaaaattgtgcgatgcgtcttggacgactcattgcccttctgcagtattgttctgcctgccaaacttttcgggtttgtagctactcaaccgaccgtagatttttgttatttcgagccaattcgtggcgatatgatacccgtgctggatagtgtgacttttatgatcaatgatctgctttactcgaagctaacgggcctgccccaagagatacagcaacaacagttcttgcactacaaatacggtatcaactccacggagactgtcgttcatgcccgagatatacttacatcgggtgtttgccaaattctaaattgttcacctttctcgcaggggcttgtggatttcaccaagacagaactgactttgatcaaggacgttgatcggaaattgaccacgaaaaaatatgctaatgaagacagcacatattctttacctaatatcgggacgaattccgctctatcggtcaggcttgagtcacttccatacgtaatctcgaaaaatcttcttaaaccacaaccccacgccagcgatgatgattcgatatacgcgtttacagatgcggaaactctattacgactggatgtcacgagtggatccttcataagaatctcccatgcaagttgcataaggctgattaaattatttgtttttctactgcccaatagcttcgaaaaaagttcaatatacgtaccacctaaagtaatggcaagcttttctgactgcgacactgtgacaatatccaagtcaaacattggctattcggacattcccatcgccaatgaagtttgcatttcaagggtgggcggctggcttcagtctcaaaaaagcttccaaaatattattttgaaagctttgaaaaaattcttcagcgatagtaaaaggattctttgccaaaatgatttgattccgataacattcgattccagcatggctgatcttaacataatagagaacgaagacgacgacaacaataacgatgacgatctaacccagtttgataagaacgactctgttgtttggttcgttgttacaagcgtaaaactggaaaacgtctctctggataatgcccactttgttattgatccccagcgtactaaattaataactacaaatattgtcaacaaaaagcctttgcctttaaacaagtgcgatctccaaagttattacgggtttgctaaaactttccactatgacatgcacatattcccctacataagacagttggttaatatattagagacctcattcgattgttctcaaagagggatatctctaaacacttcagtactactccattctactacaaacaatgtaggtaaagctacagcggtgcgatttgcttctaaacatcttggcgtacatctgttagagatcgactgcctctcattaactacaaatctgggccacttggattctacttccaaaattattggctatataagagcgaaatgggaaaacgtactgccttacacgtctcctgccgtaatttttttgacccacttagattcgattttgctcgatgtaaactccaatcaagatccagaggcaactaaattacaaaaatccataaactttgaaatgtctaaactcttggacgatttcacatctgagtttccaggaacgacgtttattggatctgtgaataatatagacaacattccttcaagttttaggtcgcatatgagatttgagattcttgttactgttccatctgaagcgcaaagattacacatcttcaaatggtacctatcttcatcggaactgaacaatgatgttaaacagaaaaccccgctatgctgcgcagataacatttccttttcttcactctcttcacattctgctgggctaactcctttagacatcaagtcaattgtagaaacagcacgaatgacagccacaacgcgtttttaccaagaaacgaagaagtccggatggcattcgcagtcaattttgatactgaaagaggacttatcaaaagctatatctaaggctagagacgaattctcagtctcaattggagccccacaaattcctaatgtgacatgggatgatataggtggtatcgacattgtgaaaggtgaaataatggatacgatagacatgcctctaaggcatcctgagttatttagctcaggtatgaaaaagagaagtggtatcttattttatggaccaccaggaacaggcaaaaccttaatggctaaagccattgcaacaagtttttctctaaatttttttagtgtcaaaggtcctgaattattgaacatgtatatcggtgaaagtgaagccaatgtacgtagagttttccaaaaggcaagagaggctaaaccgtgtgtaatttttttcgacgaaattgattctgtggcccccaagcgtgggaatcaaggtgactcaggtggcgttatggatcgtatagtttctcaattactagccgagctagatggaatgagtaccgatgccgatggtgttttcgtgattggagcaaccaataggccagacttattggatgaagcattgctgagaccggggagattcgacaagttgctatatttgggtataccagacaccgatgcaaagcaactgaatattttagaagcgttaactcgtaaattcatacttgacactgacgtgaacctcattgagttggcgacactgtgtccattcaattacacaggtgcggatttttatgctctctgttctgatgcaatgctaaatgctatgacaagaatcgcacatataacagagattaaagtctcacagcacaacgaaagtaccggtgcgaacatttcgacacgtcgttggtttgataagatagccacaaaggatgataccaaggttgttgttaaaatgattgacttcctgaaggcacaagagcggctcgctccgagtgtgtcccaggaagaactgaatcactaccaaatggtgagggccaatttcgaaggggtataa

SEQ ID NO: 4996 - DNA, 201 bp, Saccharomyces pastorianus
atgacagaacctgaagctttgctcatcttggatatctccgccagagagattaaccacttggacgaaaagctcctgaaaagaaaacacagaaaggccatggtacagaaccatccggacaaaggcggaagtccctacatggcagccaagataaacgaggccaaagagcttctccaagagagcgttttactaagaaagagataa

SEQ ID NO: 4997 - DNA, 993 bp, Saccharomyces pastorianus
atgagtgacaggttttcggtgactaagctttttcctaagtgtttgacgacatgcttatatatatggaccgcctacataacgctgacaagaatacatcaaataccaagctggtttctcacggtaactataattccgacattactggtagccttatatacctatttcaaagccatttcaaagggacccggctctcctttagacttccctgatttactagtccatgacttacaggcagcagaaaatggtctcgaacttcccccagagtacatgtcaaaaagatgtatgaccttaaaacatgacggaagatttcgagtttgccaaatttgccacgtttggaagcctgatcgttgtcatcactgttcatcatgtgatatatgtgtattgaaaatggatcatcattgtccttggtttgctgaatgcactggtttcaagaatcagaagctttttattcagttccttatgtacacaactttctacgcgttcttggtcctaatctactcgtgttatgaactcgggacttggtttcgttctggtagctttaatcaagaactgattgattttcacctattaggggtggcgctgttagccattgcaatattcatctctgttttggcgttcactgctttcagcatttatcaagtttgtaataaccaaacaaccatcgaactatacggtatgagaagatataggcgagatctggaaatcatcaatgacagctatggagcagatacacagttggaaaatatatttgacttaggttcttcaatcgctaattggcaagatttaatgggcatgtcatggttggagtggttacttcctatcgagacatgtaagtacaagaagtctaaacacacaaaagatgaaaagggtttatatttcgatataagaccggaagcacaagaaagattgctcagcagtagaggtctagaggatcgcctaatgagaagagtaaccccaaggccttcgttagaaactgacaggccctccgaataa

SEQ ID NO: 4998 - DNA, 258 bp, Saccharomyces pastorianus
atgtgggtcactgttgtcagacagggcaacactatcactgtgcagaccacattcgtccagcgtttctcctcccagtacgcaacagttgcttccccctccgcagggtccatcgggttgggctcgttgtcgggtactgtaggtgtcatcaaatctgcaatgaagaagaccgtttctcataacgaggctcagcacctaaatatgaaatcgtttacttcaactttgggcgggctattaacggttttaatttggttcttataa

SEQ ID NO: 4999 - DNA, 405 bp, Saccharomyces pastorianus
atgatgttgcgtcgcacgctatcactgtctctcgtttcgttgctgctctccctgtcgctgtggccggctgctattctggcagccatgaccacccaggttaccgtggaaacaaatgttgcggggtttttggtcactcagaccactatatgggaccctgccactgccactaccactaccgcggctgccgccgccgctaccactgcgacggcaaagacggggtctttcaccacggtgtttacaactaccaacatcaacggggtcaccgttgttctgacgcagaccgtcgacagagcaaccatgctggcaacttcgaccgctgcttccagctcagccactgctaagaccacgactacaggcaactgcctgtgtcttcctcgcttgcttcgggcgtgtacctgtccaccg

SEQ ID NO: 5000 - DNA, 1005 bp, Saccharomyces pastorianus
atgaacgggaagaatttgaaggttatttttctaggtcctaaaggtacatattctcatcaagctgcactgcaacaatttcaatccatacctaatgtcgattatttgccaacagcgtccatacctcaatgctttgatgaattagagagaaatgcaagcatagattactcagttgtaccattggagaactctaccaacggacaagtggttttttcctatgatctgttgcgggataggatgattcagaaagttttatcttcaactacctcagcagaaaatagtagaatcacaccagatatagaggttatagcagaacagtacgtgtctataacccattgtttaatcagtcccatcgaattgtccaatggtattgaatcatttggtaaatttcaagaagtaaaaatatattcgcacccacaagtttggggtcaagtcgatagttacttgaaatctttggcagagaaatttccacaagtcacatttagcagatctgattgttcttcaacgtctgaatcggtaaatcaatgtatgcagtcacagatcgacaatcaagacaacattttgcatgtagccattggtagcgaaacagcggctcgtttatacaaagcccaagtcatcgaacactcaatcaatgataagctgggaaacacaactagatttttggtcttaaggaggcggagagacacacgtctcaatgaagttggggacactaaattaccacaggtcaatctgttaacttttactacccgtcaagatgatcctggttctttagtggacgttttaaatgtactaaagactcattcgcttaacatgtgctctataaactctagaccgtttaatttaagcgatggtgatagaaactggcgatatttgttttttattgaatactacactgataagaacgccccaaaccataacgaacaattttataaagatatcggcggaaaatgtaaacattggtgcctctggggtacattccctagaagtgagatgtattactataaatga

SEQ ID NO: 5001 - DNA, 285 bp, Saccharomyces pastorianus
atgatgaaacaaccttcggaaagtacttccaatgaaaacggtcagtccttgtttgtcaaggaggatgctgatacttctgccggtggtagtccattacaacgaattttagagttttgtaaaaagcaatgtgatggcaaggacgcaaactcattcgctgttccgattccgttgatttctcaatctctaaatttggatgaaacgaccgtcagaaattgttgtacgactttgactgaccaaggtttcatttatccaactttcgatgacaacaacttttttgccttataa

SEQ ID NO: 5002 - DNA, 528 bp, Saccharomyces pastorianus
atgagtctaagaggcaaaacgttgttgcgcagcggcatgctgtactctagatgcattacaagaaccctgttgcctcgtgtaacctacaatttgtgtcgcactttccctagagcatcgctgtacaccagcgtcatcagatataatgagataaaaaaggacgataagaaagtgcatttggggtcctttcaagtggaaaagcccaagatgatgattgctttcacctgcaagaaatgtaatacgcggtcctcgcacacaatgtcaaagcaagcttatgaaaaaggaacggtcatgatttcttgtccgcactgtaaagtaaggcacttgatagcagaccatttgaagatctttcacgacgaccacgtcaccgtggaacagctgatgaaagctaacggggagaaaatcagccaagacgtgggcgacttggagttcgaagatattccagattcgctaaaggacgtcttaggcaaatacgccaagaacaacccagaacagacgccacacctgccccatccatcgaaaaaggactaa

SEQ ID NO: 5003 - DNA, 1257 bp, Saccharomyces pastorianus
atgtctcaatcccaaatgtcccctgaaaaagagcaagagttgacgtccaagatcctacatcgagctgaattagctcaaatgactcgtcagttaaagttgggtttaagtaatgttccttctgccaaaagaaaccaggattcaacggctaagaaaagaagtggtgatgatgaagatgacggggatgaaaacaagtctcttctggaagccatctcgcctgcgaagaagccgcttcacgatgatacgaataaaatggctgctttttcacctgtaaaatttatgggaaagccaaatacccccccatgttcacgccaacgaatatccgaagactgtccagagcaatcaaagtccagaaaggaggacaccccgtccaccccaaaggcttctgctcctccaataattttaccacactcctcatcacatcagcaacggtctaacgataaaattttcatgacgccaaaacgaaataataataacactaataataacaataacaataacagtataaggaaaaaagcatcggtttccaaagacttaccacaggacagtgataacaccgcgggggccgatcttttaatgtacttggccacaagtccatataccaagtcttcccatcatggcacaccaatgaacgtaaaaatgcctactacaccacgctcttctcattacgcgtcgcaacttaatatgaacggtaatacagggaatgctgctaacgatgcagtaaggttttctcacattaagccttcagcgtcttccccgcagtccaccttcaaaacaaatctcttatcgcatttctcgggtgattctctcatggattctccatcattatatctgagtaacaatagcggtaatgcccaggcggcattatcgccacagcagagaagaaagcccaccacgaacacattgcaccctcctaccaacgtgcctactaccccttcaagagagttgaatagcaccaatttcaacttactcaggacgccgaacttcaacatgggagactatctgcacaatcttttcagtccttctccaagagtcactcttcaacagaccacttcgagtatgtcaactgggatttcctcggcgccgctgactgcacctccatcatcctccaatgcttctacaataacagcagctgctatgtcaagtcatactacaaatgcctttctggacatgagtgcaaatggaatccccctcattgtaggacgaggtggcgaccgtatgggcgaaggagaatccattgatgacaagctcaccgactga

SEQ ID NO: 5004 - DNA, 216 bp, Saccharomyces pastorianus
atgaaaatactagtttacgaaccacagcaaagattatctccgagaagaattcttgcccatccattcttcgatgaattaaggaaggatgacgctttcttgccaagaggctacgccgaaccaatcaaactaccaaacttgtttgattttaatgattttgaattacaaatcttgggtgaattcgctgataaaattaaacctgaggaaattattgaatag

SEQ ID NO: 5005 - DNA, 912 bp, Saccharomyces pastorianus
atgtctacggaagaccagaatggagttcctcttcaaagggggtctgaattcattgcagacgatgtgacttcgaataagtccaacaacaccaggcgaatgctggtgaaagaatacaggaagatcggtagaggtgccttcgggaccgttgtacaagcatatttgaccccagataagaaaaattggctgggcccctttgccatcaagaaagtacctgctcatacagagtacaagtcgagagagttacagattttgagaattgctgaccatccgaatatcgtaaagttacagtatttctttactcatttgtcccctcaggataataaagtttaccaacaccttgccatggaatgtctaccagaaactttacagattgaaattaaccgcttcgttaccaataaactagagctgccattgaagcacatcaaactgtacacgtatcaaatcacacgcgggatgctgtatttacacggtcttggtgtgtgccatcgtgatattaaaccctccaatgttctagtagacccagaaactggtgttttgaaaatatgtgattttggctctgctaaaaaactagaacataatcagccttcaattagttacatctgttcaagattttatagagctccagaattgatcattggctgtacccagtacaccacccaaatcgatatttgggggcttggttgtgtcatgggtgaaatgcttattggcaaagctatctttcaaggtcaggaacccctcttacaactacgggaaattgctaaattactgggtcctcctgataaaagatttattttcttttcaaaccctgcttatgacggtcctttattttccaaaccactattttcgggctcttcccaacagaggttcgagaagtacttggtcattccggtccagacggtatcgatcttctga

SEQ ID NO: 5006 - DNA, 1251 bp, Saccharomyces pastorianus
atgtctcaacggaaacgctactcgctgaacgtcgtaacctctccgccgataccatcgtcggcacccagtgcaccgctacgaacgaacgagttaagttgggaaactgcctcgacaactggagttgcgtcttcattcctcccgagtgcccaccacggtggcacggtactgaatcccagtttgggaataatgaggtctccctcgctgagcaagtctggtgcgtttggccggtccggcagcagtggttccaatgcgatggtagaaccatccaatattaagctgctcttaataggggatgcgaacgtagggaagacggccatgatcctgagctactgccacgagctgatgacacgagctgaaatgtcacggtcggtgcgactgaagcatcagcagccgcagcaacgaggcataggcttgaagaaaaccgtggtgaaccatagactgagcatgaaggagaagaggaaacggtacagctccaatgattttgagaaggagtttaaagacgttgcttattttgccggtaaggccagcgagttcgggagctttgataccgatgaagataacggccaagaactggcggacccacatgagattataattgacactagaagtaccatcgggatagacatcaagacgaacctggtcaacatagacaaccggttcttcaacgtcatactgtgggacacggcgggccaggagcggtatcaaaatgctatcattccatcgctatacaagaagacgaacgcggtgatactgacgtacgacataacgaatgccaagtctttccagaattgcatggagctgtggattgtgcaagccttagaaaactttacttcccacgatttgtccagggcaagattctttctggtgggcaataagatcgacttgtataaggaaaggcaagtgactcattacgacgtaatgcagatggttcaagaaacgcagttgaaacatggtattgagatttcgggaaattttgaggtaagttgtaaatgggtcaatgttgtggaaaggacaatgaatatgataatactggatctggtcgaaaacggatgttttgaaaataacgatcccttcataccgaccgggacatctagcaatttgcatgaacaagaccaagaattccatgacacagtggaagaacccttccattttgctcggcaacgacaacaacagtccgaaaagaagactacagtagacatcacgaaacctaacgacgacaccaacaataaccaatctatatgttgcgtttag

SEQ ID NO: 5007 - DNA, 303 bp, Saccharomyces pastorianus
atgccaccacaagactctgaaggttggttctacaagcgtgccgcctccgttgccagacacatctacatgagaaagcaagtcggtgttggtaaattgaacaaattgtacggtggtgccaagagcagaggtgtcagacctttcaagcacattgatgcttccggttccatcaacagaagagttttgcaagctttggaaaagatcggtattgtcgaaatctctccaaagggtggtagaagaatctccgaaaatggtcaaagagatttggatcgtattgccgctcaaactttggaagaagacgaataa

SEQ ID NO: 5008 - DNA, 123 bp, Saccharomyces pastorianus
atgggtatcgatcacacttccaagcaacacaaaagatccggccataggaccgctccaaagtccgataatgtttatctaaagttattggttaaactatacacttttctagctcgtatgtactga

SEQ ID NO: 5009 - DNA, 201 bp, Saccharomyces pastorianus
atgggtccacacaagggtaaggccccaagaatccaatccaccggtagaaagttcgaaagagccagaggtagaaaaagatctaagggttcaaagtgtaatagaattctgattctctttttatcctttgcctatctctttctcgtttcgtatataccaaactggagaatcgggtttcttttcacgccatatgaccaattataa

SEQ ID NO: 5010 - DNA, 1926 bp, Saccharomyces pastorianus
atgacgaggagtaaagcacagttttcgccctcgaaagttgggcagaaaaaatataaaaacccaaaacgaatgcggaaatcatcctttacaaaaacccagaaaatgttcgaagtgttcaacgaaaatcgttcgcattttaataagtatgaaagtctcgctatggatgttgacgacgatggaactttcgggaattttgtgctgatggaaaatgatgaggggggtatcgacattcctgaaattgaggaagagacgtcaggcgatgatagaacgatacacgagtctcttaagaatggtaattctctggaagataaccatgacttcattgctttttcagagagttctgaagatgaggaagtagaagagaaagttgtggaagaaaaaagcgttcttctcgtacagaaccaatacgaaatctccactgttacttcacaaccacatgaaaatagcgacagcgtatgcaacatggagtatccttggattaagaaccatggccattcgagacaacgcggaatagcagattggttaactttagaaatcaaagattttgttcattatatttcaccaagcaaagccgaaatcaaatgcagaaacaagactatcgataaactacgcaaagcggttaaggaattatggtcagatgcagacttgcacgtgtttggttcatttgccactgatttgtatttgcctggttccgatatcgattgtgtgataaatagtcgtaatcgtgataaagaggacagaaactacatatatgaactagcgaggcacttgaagaatcaaggactagctataagaatggaagtcattgtcaggacgcgagtacctatcattaagtttatagagccacaatcacaattgcatatcgatgtctcattcgaaaggacgaatgggctagaagctgcaaaacttatcagagaatggcttagagattcgccagggctgcgtgaactagtgctcgtcataaagcagtttttgcattcaagacggttgaacaatgtgcatactggtggtttgggtgggttcactgtaatttgtctggtttattcattcttaaatatgcatccacggataaaatcaaacgacatcgatgccccggataatctgggcgtcctgctgattgacttcttcgaactttacggtaagaatttcggttatgatgacgttgctataagtaactccgatggctacccttcctatattcccaagtcgcattggaagactttagaaccgtcaagaggcagattttcgcttgccattcaagatcccggtgatccaaataacaacatcagtagagggtcctttaacatgaaggatatcaaaaaggcatttgctggggcatttgaattgctggttaataaatgctgggagctagattccgccacctttaaagatcgtgtaggaaaaagcatattggggaacgtaatcaaataccgtggacaaaagagagatttcaaagacgaaagagacttagtggagaataaggcgattctcgaaaacgaacgctaccataagaagcgtacgagaatagttcatgaagatgtgttcataaacgacacagaagaattgccggtagaagacatctacaaacttgatgagcctcttaaaaagaagcggaaggggaaaaaggacaagaaagaacgaaagacactagaaggaactctaccccctcccgcttccgaggtagcagtaaagaagagcaaacgacaacaccagcagaagacagtgaaccccagtccaaatccacatcatgacaatcccaccatagatgccttgatgggactttctgacaatgaagaagggtctgaccaagatcgaagagaaaacggcattcaaccggggcaagacgagaagcagccgttgaaaacgcagactgtggacgcgcaaaccagaagagactactggctctccaagggtcaggctctctaa

SEQ ID NO: 5011 - DNA, 399 bp, Saccharomyces pastorianus
atgaaaatcatggaccatatgtatccagtttacacgacaatactatcttccctgacacattcaaaagacttgaagagattcgaaaacaaaattaaagagtcaattgagaagattgtaacgcgcttgtcagatgagatcccgtccacatacttctttcaagatggagtggattgtatcattcaacccagccccattcataatttcaaaagaatgcattggttaagatacaccaagagacacaacacattctgggggaggagtataaataaagacgttcaagtgagtttcaatgacaaatatgttgttacaaggagtggcgttagatatacgcggtatcctactaatttgaatacacaactactggaaactgcatttgaagaatgggattattatgaatga

SEQ ID NO: 5012 - DNA, 840 bp, Saccharomyces pastorianus
atggaatatcatgcacttcgaaggttggttttgtattaccccacagtcattcggtgtggtccacttaggcataatatgacaagggtgagctgtaggaatatttctagtaagggtggcggacgagatgagaagggagattgtagtgaagacaatgatacctctaaggatttggggagagtgccatcaaagttaaaacggacgtataatggtggcaaagttgctgaagaggccgatgttcatgctaatccgttatcgcggcaagggaagcaattactagataccctaagttccgccaggccgaagatgactaccggttctaatttgcatttgctggttcccaaagttgcctctactgaccatattcccaaaagagaggtgaatacagagggcctgtttgccggctatcgacccttgtttttaggaaattcaagcttcccctccgatgtaagaaagggcaaaaacttccatgatttggacgaagttcttcccaatattcagttgattgatggttctgagaaggatgggaaacttaacgtccaggaaatcattgaagatttacaaagaactagcctgagagagagcattagtaatatggaacagccctcattgtcacataaacggaggcctgtgataccgtgggatgcatccataagtgggatggtctacaatgacatgccttttaaacatgtgcccaaaaatgttgtctcgaaactgaagccattcaaactcgtacgtgttgaaagaaagccaaattcaaggaatggcaaaaaaccgagtatgataaaactccagttccacaatcgaagaatcaacgatacgctggagtttgtgaatacgtga

SEQ ID NO: 5013 - DNA, 1656 bp, Saccharomyces pastorianus
atggccagcttggtgagcaataacttatggagacacggttcagaagggtccaatacctacggtagttgccatcccatgaaattaggctctggtgtgctggtagaattgcccttttttggagattctgcactatttgcagatgatataacattccgaagttattgttgtgaaactgtccccgtttacatatctacggcattgaaaaccacatccccctatcggtaccttgatgaagtgattaaagattggcaaactttcatccaagtaggtgattatgttggcggttcttctcagtacgcaatttatgccgtgattttgtgcataacgtccaactttgtcattactgtgtttcttactgtgatttgctgtatcaatatcagtggacgtgcttataagagaatcttacaattattaaggattgcctcgttcatagcctcgctaaacttgacaatcttcatcgtcaaagtactgcgtaaattagaaaatgagcataaccaatacggcattgttcgggctcattccattattcatttattctcagacgatatgacattcgttgttctggatttttttgctactttaatgttccaattttgtcaggttggtatagtcattaggttattccaaagagctcaggaaaagagaattattttttttgttggcgtggtcctagtaatgactgcaaatattttatgggtgattccgccgttttccaaccatgtgaaaggacataaaaaaaactggcaaattctgcgaccctttgtttatctattccgcatagctattgcgacgtcatacgcatcaatcgtcatctaccatatttggcagaagaaaaagttatggtttaaacttaatcaaatggggctgcttacgttattgacattcatcgtgttgcttttattgccagggttctttcttgctgatgtagcaaacttatggatatccgatttgggcgacgtgttcaacactacgtgttatgtcacttcaacagtgataacctgggaatggttggataggttgaacgttttggaaaggaaagaagaagcgcaaagcatcttggggaggcccatttttgaagaggaacagcaagattatagatttgcaaaatatgccttgagggttcaaaacgcattaacgagaagagaatctcatgaaacattaaatagaaatgacacatcgaatagttctgagatatgcgatttgcaaaccatatctcgctatgacccagaggatcaggtatccgaaggtaggagtatcgaccaaatacattttaacgataaaaaaacctataaggaactggcattcaagaaattgagtagtgctcgcgacaagattttatattttacagaccaaattgtccagaaaagtgtaggtcacaacaataacagcagtagctcaaaaaatgaggacaccaaacggcgaaaggcgatggtaagaaaacggttagggctggacagacctggtgtatacatttactcgacaaaagaagtggttttcaattcagaccaagactacgaagacgaagacgaagacgaggatgaagacgaggatgaagaccaggatgaagaccaggatgaagacgaggatgaagacgacaaccaagataatgacggcaactctacaactttgaccagtaacggtactagccattgttga

SEQ ID NO: 5014 - DNA, 408 bp, Saccharomyces pastorianus
atgggtcaagaagatagtgatatggaaatttttcaggtgatacagacattccccaagacactattgaaccctaacgagatatttgagaagattattttcaaaagaaggttcaatttgaataggctagatcaggatgaaatcgacagatgtcgaaaattcgttgcggcacaacgtctcaagtttaagacatatggtgagcttcttggaagcgcaacatcagaagcagaattgaccagtgccaatgtcaacacagatgccaaaggtacccacatcacaagtgatgcagttaatgaagcattatcttcagaagtgtatggattcaaaaagagcctagctggagttcattggaataacagcattaaggaaaaagttaagcaaatgagaaagaaaaaggacaggaatgactga

SEQ ID NO: 5015 - DNA, 399 bp, Saccharomyces pastorianus
atgttatgtgttaaagaatatattcctgaggtttggtcgtacattaaaccttccattgatcatcaccagcaaaataacaaaaccttctctccgtccaacaacaaagttctattcaatatgcaaaagaatgaatttttgtacaggctaccgccaattactctgtgtacagcgagctggttcatgagctgctttgttggaattgtgccgatagagacgacgctaagaatatgggattgtttattctacgaggaatcgcattttttgttcaagacctcgctggcagtgttaaagttgagtgagcacgaactttccaagacaaagcctcgtagcaattcgcttaaccattcttggacttctaacacgaaaccagagaaacggatcaatgggtcaagaagatag

SEQ ID NO: 5016 - DNA, 873 bp, Saccharomyces pastorianus
atggatgctgacgaattagaattaaaaaaaaacttaagaattttaaaaaaggaggagctgcttaaaaggaagctatcaaaagagagtaatgaccgaaagagagacgtcgcatacaagaacaattccaagactagctcaatatatatatcagatcttcccacggaaaggataacaaaagaggaactgacggaacagttttccaagtatggagtaataagaatgaatcgggatggtaaaccccattgcaagctatatgtgaacgataaaggtattcccaaaggagatgctttgattatttactctaaagaagagagtgtcacattagcaattgaaatgatgaatgagtcgaatttcttgggaaagaaaatcaaggtagagagagcccaattcgatgacagagagagtatcaatatagacaacaaggaaaatagtaccaaagcgccgggcgaatcagaacgaccagtaaaaagaccgaaaccaactaacttcaaagatgatggggagactgtagactataatgacgatgaaagcctggccaaagctgaccgaactgtggtacttgccaatgtgttcgatatttataaacagtacacacaagacgacatcaatgacataaaagaagatctgttggatggttttcaggaaattggccaagtggacaacctttctgtatctaccgataaaggaaaggcaactgttgttttcaagagaagtaaagatgccctagaatgttgtaaaaccatgaatggacgttattttgacggccaaaagttacttacattcatgttaggagacgattatgcttcagaaatcaatcgcgagagtgaagcaagtgatgtggaagatgatttgatagagattggcgagagataa

SEQ ID NO: 5017 - DNA, 882 bp, Saccharomyces pastorianus
atgttggctaaatcagcgaccaaagatattttgttccgaggcttattcaaatcgccggtatcgacgtttcaagtttgtcgttacgtctctctcttgggacaattaaagccatcagatggctctaccaaatctttcaaaagactgggtcgtggtccctctagtggtttgggtaaaacatctgggcgtggtcaaaagggtcaaaaggcacgtggtaaagtgaaatcgtggtttgaaggtggtcagactccaatttataaactattccctaaagttggatttaccaatgcgaatgccaaaccgttgaaggaactaaacctggaacgtattcaatggtttcatgataaaaacagactgaatttacaaccaggtgagattttagatataaataagatgaggaaaattggcttggtcactgggcctattaaaaacggtattaaaattctagcgagtggaaaatttcattacagtctaccaatttctatagaggcttcgagagcatccgcaaaggctattgaggccattgaaagagcgggaggtaaattcacagcacgatactacacaccgttgggtttaagggcacaccttaatccagaatggtttttaaaaaaaagaggaaggctgcctttacaagcaagacccactaaaagaaaagatattgattattacggtaaagaagagaaaagaggttatctaataatggaaaaagacaaacttttgaaagatatcgagaatgctcaaaagaatggttcaagacatttcttgagacagaacgtaaaaaagagttctttagaacttgaactagagaaattgtcttcagatcatgaatccgtgcctgtcatatctagatctaaagtcatgaatgtcaaagatctggagcagtag

SEQ ID NO: 5018 - DNA, 285 bp, Saccharomyces pastorianus
atgatattcttgcagttggttttcaagaagttcacaattagtttgtttatcagcttgaattccaacaaaaaggcatcgtggccttctggagactcgattttctccagttgcgaattcggtatgtattcagccaagaattcttgttcggagtatgtgaaaagcccatcagattggataccgatgatcagcgaaggctgctcgatggcggaaagtaccttcgtgatgtcttccaccctgtctctggctaggtcgtgcgtgtccagcttacgcgtaatggcaatgtaa

SEQ ID NO: 5019 - DNA, 3054 bp, Saccharomyces pastorianus
atgaagaaattaaatgatttaaggagggccttagctgaaattcaaatggaaagtaatgatatttctaagtttaatgtcgaagaacgtgttaatgagctatttaatgaaaaaaagtctttggctttgaagagattaaaggaactggaaaccaaatataagggatttggtatcgactttaatgttgaggagtttatagaaacacctaagaaatttaccgtaaatgaagaaaacgatgcggcctatccaagccttgaccctaaggcataccaaagcaaattagacgagattaatagaataacagatgaattgttggatttgcaaactcaggtcaaacaggaaactgaagaagacgaagacgaagaaacaaaatctttctcctccagctccgaagctgatgatgatgaaatatatcaagatgcatctccaactcaagaaagaagaagtgaatattcagagttatctgcaggatcaggtcccggatcttttcttgatgcgttgtctcaaaaatacgggactggtcaaaacgtcaccgcgtctgcaggtttgagagacagtcatggttcggggcacatgcctagcaatgtcgagaaatccttcataaacaggctcaggaagtctaccgtgtcttcagctccttatttagaagagttgacacaaaaggtaaataaagtggaaccattgaaccaaaacaaagatgaagacctattaacagaaaataacacaggggatgaaatctctatttcggatagggtgcggaaagatgttcagaaacacgttaaaaacaaaggtcggaagcattctgacgatacggaagaaggcgccacaacagatacaagttatgtgagtgattctgataaagaagttgaaggtgaaaatccttctaccacatcatcgacgcttcaccctcctcctcctccccctccactccctttgaatctgttcggtaagattaatcaatcaccagataatgaaaatgaaacagaaaacaatgctgctgctgctgctgctgctggagacgctgctgctgccgttccgccgccacctccacctcctcctcctcctcctcctcctatgggattatttggccaaaataatggagcaactcctccaccaccacctttaccttttgtattatcttcaactggtgcaggtgcaattccaccagctccaccgatgatgccagcttctcaaatgaaatcagccgtcacatctccgttgcttcctcagtcaccatcgttatttgaaaaatatccacgtccccacaaaaaattaaagcaactgcattgggaaaaaatagactctactgataattccatttggggatcaggtaaggctgagaagtttgcggatgatttgtatgaaaagggtgtccttgctgatttagaaaaggcctttgctgctagggaaatcaaatctttagccactaagcgaaaggaagatttacagaaagtaactttcttatccagagacatttctcaacagtttggtatcaacttgcatatgtactcttcactttcagttgtcgatttggtcaaaaagattttgaagtgtgacagagactttttacaaacacctagtgttgtcgaatttttatcaaaacctgagatcacagaagtatctgtcaatttagctagaaactatgccccatattctaccgattgggaaggcgttagggatcttgaagatgccaaacctccagaaaaagatccgaatgatctacaaagggccgatcagatttacctgcaattaatggttaatctggaatcgtactggggttctcgtatgagagctcttacggtagttacctcatatgaaaaggagtataatgagctgctggcgaagttgagaaaagttgacagagctgttggtgcgcttcaggagtcagataatttacgtaacgttttcaacgttattctagctgtcggtaactttatgaacgatacctcaaagcaagcacaagggtttaaactttcgactttacaaaggctgacatttatcaaggataccaataatagtatgactttcttaaattacgtcgaaaaaattattagattaaactacccaaatttcaatgacttcttaaaggagttagaacctgtactagatgtcgtcaaggtctctattgaacaattagttaatgactgtaaggattttagtcaatcaattgtaaatgtagagcgctcagttgaaattggtaatttaagtgactcttcgaagttccatccattggataaagttctgataaaaacattgcctgtactaccagaagcaagaaggaagggagatttattggaagacgaagttaagttaactatcatggagtttgaaagtttaatgcaaacatatggtgaggattctggtgataagttcgcaaagatttcattttttaagaaatttgcagattttataaatgaatacaagagagcccaatcacagaatttggccgcagaagaagaagaaaggctttatgaaaagcataagaaaatggtagaagaacagcaaaaaagggcacaagagaaagaaaagcacatagaggtcagagcttcacccgaaggaaatgaggaagaagaaacggaagacagacgtgctgttatggataaactattagaacagctgaaaaatgcaggccccgctaaaagtgatccttcgtctgctagaaaaagggctctggttaggaagaaatatctttctgacaaagataattcggcacaagtactcaacgacttggataatgaagatggatctattctctactctccggaagcctcaacccctgacacggatgcagcgatccatgctgaatcacctacgccgcttgccacgagagactttatgaacacttcagaagatttaccatcaccatcaaaagcatctgcattggaagatcaagaagagatctctgacagagcgagaatgctattgaaggaattacgaggttctgataccccagtaaagcagaattccgtactcgatgagcatctagaaaaattgagagctcgcaaggaaagagcaaacggcgagacgaatacaggcaacaagctaagtttcaagtaa

SEQ ID NO: 5020 - DNA, 2772 bp, Saccharomyces pastorianus
atgttgaagaattcgggctccaagaattcgaattcgaaggaaagtcattctaactccagttcaagttccggtcttttccaaaacctgaagcgcctggctaattcaagtgcatcgaatagtaatgtcaccgctccgaacaatgcatcagaacagcagtatcctcccgtgggacaggaaacgaccactacatctgcatcgtcctcgtcctttagaaggctaaatggaccatccaggtctacatccactgaagcaaggccactgaacaagaaagcgacactcaacacccaaaatttgtctcagtacatgaatggtaaaataagtaccgatgcgccaatatcgtcccagcatgcaaggtcgcattcaattcagtccaaatattcgtactctaagaggacctcctctcaggcgtctaataagctaacgagacaacacaccgggcagagtcattctgcggcaagtcttttgtcccttggctctttaacaaacttgagcaaattcactactcctgatggcaaaatacatttagagatgccctcggatccatatgaagtggaaattctgtttgaagacattatgtacaaaagaaacattttccaatctttatcaggagacaaacaagaagagctgatgggctacagtacggaaaagaaatggctgattgtgaaacaagatttacaaaacgaattgaaaaagattagagcaaacacgacttcctcttccgctgcttcgcgtacttcgatggcatcagaccaacatcccatacttacagctaattcaacactttcgtcgccaaaatctgttttgatgacaagtgcttcttctccgacctctactgtatatagtaacactctaaaccattccaccaccctttcaaccgtgggcacgtcaactccaaagggccataataataagaaaacaatggccgggggtttgaaaaagcaaccatctataaacagtatttatcgtggtgggcctgaaattaatacaagcgcgtccactcttcctggagacagaacaaacagaccaccaatacattatgtgcaacgcatcctggccgataagcttacgaccgacgaaatgaaagatttatgggtcaccttgaggacagaacaattagactgggtagacgcctttatagatcatcaaggtcacattgccatggctaacgtactaatgaactcgatatacaagacggcgcctcgggaacatttgacaaaagaattattagaaaaggaaaattcctttttcaaatgttttagagtcttatcgatgctttcacaaggtttatatgaattcagcacgcatagactgatgaccgatactgtcgcagaaggtttgttttccacgaagttggttacaagaaagatggccactgaaatttttgtctgtatgttggaaaaaaaaaacaaaaacaggttcgaagcggtcttaacagcccttgataagaaattcagaataggccagaatcttcatatgattcaaaatttcaagaaaatgccccaatatttctctcatctaacccttgaaagtcacttgaaaattattcaagcttggttatttgctgtggagcaaactctagacggaagaggcaaaatgggttccttggtaggagcatccgatgaatttaaaaacggtggaggtgaaaatgccattttagaatattgtcaatggaccatggtttttatcaatcatttgtgttcttgttctgataacattaatcagagaatgcttttaagaacaaagctggaaaattgtggtattttacgaatcatgaataaaataaaattgctagactatgacaaagtgattgatcaaattgaattatatgataacaataaactcgatgactttaatgtgaaattggaggcaagtaacaaaacatttaacgtggacttgaaagatccattatcgttgttgaaaaatctttgggaagtatgtaaaggcacggataacgaggaattgttggtgtctttagtacagcatcttttcctttccagttcgaaattaatcgaagagaatcagaacccctccaaactatccaaacagttgaaattaatggactctttagtgactaatgtcagtgttgcctcaacagccgacgaagaaacgaatatgaacatggccattcggcggctttatgatgctatgcaaactgatgaagtagcacgtcgtgcaatactagaaagtagaactctaacaaagaaattagaagaaattcaagcagagagggattcccttagtgaaaagctaagtaaagcagagcacgggctcgttgggcaattagaggatgaactacatggaagagatcgtatactggctaagaaccaaagggttatgcaacagctggaatctgaactggaagaattgaaaaagaaacatcttttggaaaagcatcagcaagaagttgaattgagaaaaatgttaactatattaaactccagacctgaggatggttttgatgtaagtaaaggaactaaagatataaactcaagtttaaactcctccgaaaaggcaaatattcagaaggtattacaggatggattatcgagggcaaagaaagattataaagatgactcgaaaaaattcggtatgacacttcaacccaacaaaaggctgaaaatgttaagaatgcaaatggaaaatatcgaaaatgaagcaagacagttggaaatgacaaactttgctgagtttgaaaaagaacgcctcgaacctcctatagagatcaaaaagcccaaaaggaagcataaaaacatacaatcaagaaatctttag

SEQ ID NO: 5021 - DNA, 879 bp, Saccharomyces pastorianus
atgatacaggtcaagcttaaaacgtgcctgaaaatgtgcattcaaagattaagatatgcacaagaaaagcaacaggcgattgcaaagcagtctcgaagacaggtcgcgcaacttctattaacaaacaaagaacaaaaagcgcattatcgcgtagaaacattgattcacgatgatattcatattgaactattagaaatattggaactatactgtgaattgctattggctagggtgcaggtgataaatgatatctccaatgaagaacagctgatcaaggagcatatggaagatggtattaacgaggctattagatccctaatttattcaattctttttgttgatgaagtgaaagaactatgccaattgaaggacttgatgacttggaaactagatgctgggtttgtcgctgggattataacggatcatatcgatgttcctgataaaatcgtgcaaaaatgctctccttcggtgccaaaagaggaacttgtcgacttatatttaacagaaattgcaagaacgtatgacgtgccttacagtaaactggatgattctctatcctcgtcctcttctagcatttctttaggctctactggtgctccaggagatgttaaagaaacagacgaagaaaagcccatactagccttagataatgacgagaatgacaccgcggatgctaaacaccctatcactatcaaaaagcctagacaaaatagtgagaatataaacaacgaactgaagattccaaaggacattaaaaaggaagtaattgataagaaacaacctgaaaaaaaaaccaccaaaaggaagaccaaaaaagaacaagaaaatgatgaactggacgagttaaagaaacgttttgatgctttacgtagaaaataa

SEQ ID NO: 5022 - DNA, 495 bp, Saccharomyces pastorianus
atgacaatggattttgacgattcactgactttagaagaacaatattaccaagacggttatcgtgaagggcaaaatgagaatttgaagcaaaacttcttggagggcaaacaatttggcctacaagtaggattccagagattcatcatcctagggcaaatgaaaggattgtgtgatgttgtagattcgtataattttcaaaatcctttgttcgaaaaaaatatccatactgttcgcacattaataaacggtttagaaatgaataatgatgatgaaaatgtgatagggttcgaaaaggtgttagtaaaactaaaaaataagttcaggacaattcttatagctcttcaacgattaattaaggatgaaaagaaaaaacctctaacatttgaaatgtttgaagacgtctcaagggccattgctggagatattaaaggttttgtagaagatgacgaaagtgccaaaacgaaaagtacacaagaccaagcccaatcatggtaa

SEQ ID NO: 5023 - DNA, 2298 bp, Saccharomyces pastorianus
atgatctttggactggatatggaagctctttttcatgataaagatgaaattatacgcgagttacggaaggatcctttgataattaaagatgataaccatataataaatggcaaagaattacaacaagagtctagcgatctattacaacaagaggcacagctggccaacgaactgaacactctggacaacttgaagatactatcgaatttattaacggaagttaaaaccaatttagaacttctagaactagaaaattgctactattcattgcaatctttacggcaaaaaatgcgtaacaatacagcctttctaaagcaaagctttaactttcagcagtcaatatcattatacgttgattcactacatttaaaacttgtcacggaactgtatgaaattcttacaactgggttttggaggattactgagaatactattcaatttacaccaaccgtcaaatggggcaaagacgaagtggatattgagtacaatacgtttatgggtttcgtgactcagcagtattttcctcaaggtggtctggatagtcagtcatggatcatttcagatatggacaatgctgactcccaggagcaagtaagagcaaagttgaatgtaattttaaaggattatgtgaatcttgccagtgttgtcaataagatcaggagctcaatttttatacctgggaaacaaatctcgcatgatgatgagaagaagatgcttaatttttctaaatctgcgtcgcatggccaaaacaccactactgtattagcaagtttcgaaacagtatgcgatttcatattgcacggattggccctgagagacatgcgaaccttgagttccgaattaggacatttatttaatacagaatttaccaaatttgtgaaaaataacgcatcaataattttagactccttagactcccctctcaaaactctagtctcttcggcgaacgacaaattgatcaaattagcctcagaaactaaaactgaaaactggttttactccggaaaggaaatacaagatctgttgatgaataagcagttatattataatctattgctagacaaaattctcgaatcgcatatcaataatataagagatattttcgaggacccaaataaaagttggaaaactttagaaacgatcgagctcaagcatgctcgtagtagcactaatacaacaagtgagaacaaagggaacagtggtatggacacaaaacaagaaaaaaaagaacatcatacttcagcacccaaggatgacgactggaattgggaggcggatgatgatgctgatgcatggggtgaagaaattgacgtagatatcgatgacgaggaagaaaaaccagccgaactgatggaagaagaaccagatgaagaagaagaaggagaaaatgcctgggatgaagcatgggcaatcgacgaagacgaaaacgttagtgacttttcctctgtaagtaaaataaaaccatcaaaagttcacaatataacacttaatgaagaccgcattgaagtgacacagttaccgaacttgtttttgacaatttcacagaatttcaagaactcttttgaagatagtcatgttgataagcaatactttgcatacaaatataatcttttgcaaacatcgtacatggctatgtgcactaataatcttttcaacaattggtatcaactttatgtggatatgaggtatctaatagaacaagatgaaaaactatacagaataaaggaattgacgagaaatttgttggaaactcgattaaatatgaagtatcgttttgtttctaggttaattgagcgtcagttaacagaattccgtgagaaagaaaagaatccatcatgggatgccatcattgagagcctactaccatatatctcaaaggaaatcatttatccgctagagaaaataaaaggtgaagaaagttaccgttatttattgtcattcctaaactttttgtataatgactgcgtgacaaataaaatcctaaaatggaagatcatctctgaggtcaattcggaaaatttaggtgagcttgtatctttactagttaacaatactgagatacaaacattagcggaagaacccggttataaagcgatgagagaaaaattcgccacaatgggcaagtttctacctttgcatttaaaagagatcatggagatgttttataacggtgacttttatcttttcacaactgatgagcttattcaatggatagagttgttgtttgctgacacacctctacgaagaaatgctattgatgacatccacgaaatcagagatgctggtttagaagattga

SEQ ID NO: 5024 - DNA, 3693 bp, Saccharomyces pastorianus
atgcccgtccaagggactgatcctaaaaagaggcaattaaggctgatatcggtggcattcaaggaagcgtctatcgattcaccttcctttcgtgcctctgtgaatttcttccaaaccagagtggatgcattagaggattgggtagagaaaacggtggacttttttgatcagaagtacaaggtgtcctttgaagattttcagcgggccaaagaaactctactatcacaattgttaccttctcctgtcctattaagtaacggttttgtcagcaaccaatcttttaccccccaactggtagacagttttaacaaggactactacgatttctcggtcaaactgttaaaaattgtaaagggcgatgattccagccattcaactgctttattggaactgatgactaatgcagttgaaccatacagaaatgtaagaaaaaattttgatatttaccaagggaaatatgacagcatgttggcatcataccaagctataaaggtttccagtaccagtttagaaccttcctctataaagaatgatgctttggagttatttgaagtccaaaaaagttatctgaaagcctctttagatctcataagcgctatatcagtagtaaaattaagcttagacaaatttatatatgagtcaatgaaggtactaaaatgtaagagcatccttgcaacgaaagattccggaaaaaaaatcgatttatctccttgtatgaatgactacttggacagttactccatatgggtggaaaattcaattgaaggctccaaagttttgaattctgacattattcatgccaaaaagcaagcctatggttacactctaaaaagaattaccccatccaacgacacgagtgaccataatatcagatcgctacattcttcaaaactaatatcgaaagatacagaggcaccttcaaaatcgcctgaaaaatttggatggctctacatgaaaacgcaagttggcaagccaagtagagagatatgggtcagaagatggtgctttttaaaaaatgccgtatttggtatgtttcttttatcgccctcgaagacctatgtagaggaaacagataagtttggtgttttccttactaatgtgcgttatgacccagaagaagataggaagttttgttttgaagtaaaaatctttggtaatagagtaacggatttacatggtaatatatcaagggatatcacgctggttttccaaacatccaatttccgagacttaaaatcatggttaaatgcatttgaattgacaaagaagtacgttatgaacttacagcataatagtcttgaatacgagctcgcgtttaaaagattttctccaaaatattttgaatttgcctctagtacgactacctctatagatcaattgataacaacttttgacaaagagaccgagtctttatatgatacattaaactgttcattatccgagtatgatattctgactttgggagaggagaaagtttttcaatttcaaatgcctacgacgccaatatctactaaaatgacacagttggctatattgtcaaacttcctcacaaagggtagttggtttcctaatgcggtgcttgtaaatgtatggggcaccacggattggagcgagtacactatattaccaagcaaaggaaagaagccttcttcacttttaacaaatgacggtaaaaggctaccgataagaaattctactgtatatccccattattattctaatgagttgaaggttcttgatctgcaattcaaatcacttgtcttttcaccggaccaaagattagagaagctacctgaagaacttttattattcaaatttgaagcattttggtgccccaacaaaagacaaaagttttcggcaacttgtttctgcacaaaggattatatttattgctacatgaactctatggagttcatctgtctcacgaacatcaatctagctgacattatttcagtagaaaccgataagacatcaaagaaaactttaaaattttatgatgccagcggcttacagatgaaggcaataatcttgtttactgactataaactcattgcctctaaattgcagtgccttttggaaaacaaggcttcaaaaaatccaaatggcaatgaagaaatattagtgaaacttgagcagatggagaaggattttcaagagaaaaagcaagaagaatcaaataaagcagaaaaagaagaaaattccaataataaggctatgaacagtatatccaaaatgataggatctcatgtaacgttttgggagatgcctgatgacgcatcttctttattgaacaggctcaaaaaacttcaaacagaatacacaactacatatgatcacgagtatgaaatttccagcaaaggattggttcatatattatttggtgacaagtcgggagcctttccaaaatgtctatttctagcaaaaaaaaatacgaaagaaaacatcaaatcgttttggcataaagaaaaagatgccaaggacagattacaattggttcgtaaaataccattccgattggatatgactgacaacttcttgaatactggaaaatatctcagagatagagaatccaaaccaatttttgttactcaaagaattgtcgatattgttgaaaacaaatattatgaaattgatttggatcccatttttattaaagtgccattttgtcatctactaagaatttcagtcaagtttgtcatatccgagtcatatgataccgataaccatttagaaattaaactgaatctgacggcaaatagttctcttctccatgttttgtacaaactagagtacattgatagtagaactggggaagtagtaaagaaattatctttggcggagatggtgtgccaaaactgggtattaaaatttacatatagcgaattcctactgataagaaaagtgatacggtactatttagagagaattggcaagcatgggaaagttattaaggctgttaagctatgcggtattttaggcgtttctaacagtaaaaatgaagaaccaaccggtgacaagagcgataaatttgagaaaagtgaaaagattcaatatgacataaagtattcatgcactattttgttcttaatattcattaaactgatggtttacaggattaccaatttaacatttgtattttttaggatattgattggtatcttattgttgtttgctgaaaaattctcgcatattaatcggaaaatggtaattgggttgttagcatctattatgtttagcgtgtttttatcaggaagagcatcagtttcctactggtccgtaaagagggctgaaaaaatattccaggatcgcctcggatcagataaattcacaatgaaaagagccatttacataagtgattcagatctactgaccaatcaattatcagttacaccggatagtcccatttttgaaaagttcagtgacggcagtttcactaaagattgccagtacagggaaacgcggaaagagttggcgatgaggaggaacgaactgttgatcgaattaaggatactgcaagacatggagaaacagctagtacagggtgactataaaaagtttttatcagacgaaattgataaatgttcgatggtgtcgatagaaatggctgatctttggtcgaatgacacacaattgcagaaatactgcctcaattgtgacgaagagcttagaaaattgggatcatccctaatatga

SEQ ID NO: 5025 - DNA, 1521 bp, Saccharomyces pastorianus
atgaagttactatcgaaggaaaaaacaattagaatactgaatatttcgtctgtttttgaaagtgaaccaatgtatttcaaagatcaaagtccctttatgaatgggtgcattgaactgaaaactctattggctccgagagaattattgaaattatgcaaaaaaattgagtacgaagaattgcaaagaatcaagcattttgataacggacccagaacaatagatttggatatcgtcatgtatttgaatagtgtcggggaggatgtactggtaaatgaagctgatttaaatataccacatcctagaatgttagagagaacttttgttcttgagccactatgtgagctaatatcaccacgttaccttcatcctgtgacagcagaacctatagtagactatctaaaacaaatatacgagaagcagaatgatgaagatactttatggaaattagttccgttaccttcccgtgataatacggaatctaggtttctgaaattcaaaacaataaccaccatcgatgaattaactggagaagcaaaaagaatcactatttcaccaacatatatcatgggtatattcaacgctaccccagattctttttcagatggaggtgaccattttactgacattcaaagtcaaatgaatagtgttgccaacatgtgtaaagaagcattgactttgcatgactacgtgatcatcgacattggagggtgttccactagacctaattctattcaagtatctgaagcagaagaactaaagaggacaatcccattaattaaatccatcagagagaactctaacttgccacaagaaaaacttatactctccgtcgatacttaccgttccgacgtcgctaaagaggctattgcggctggagtggatattatcaacgatatttctggaggatcttttgatagcaacatgttggacgtgattgccgaaaatccagaagtctgctatatcctttcacacattcgtggcgatatttcaacgatgaacaaattgacacattacgaggactctgccttaggcgattgtgttcaacaagagttcgtgaacaacactgacattcaacagttggataaactgaaagacagcacaacattaattagaaatataggacaagaaattggagaaagatacttgagagcaatcgaaaagggcgtcaagcgttggcaaataataatagatcctgggcttgggtttgccaagaatgggaaacagaacttacaaattattagacaaattcccatgttgaagaactactctttcatcatggacacacaagattctcatacctatataaacttcagaaacatccctgttctgctaggcccatcgcgcaaaaaattcattggacacattacaaaggacgtagacgcaaaacaaagggactttgccaccggaaccgtagtcgcatcgtgtgttggatttggtagtgacatggttagggttcatgacgtgaaaaattgttcgaagagcattaaattagcagatgctatttataaaggttcggaataa

SEQ ID NO: 5026 - DNA, 960 bp, Saccharomyces pastorianus
atgtcaaagctgttttctaccgttaattctgcaaggcataccgttacactgggcagtatgaaagactatgtgcatatcaagaagttagagatgaacacggttctgggaccagattcttggaaccaattgctgcctcagaaatgcctgttaagtttagatatgggcacagatttcagtaagtcagcggctacagatgacttaaagtactctttaaattacgcagttatttctcgtgatctgacaaaatttgttagcaggaggaaaaattggggctctgtttccaatttagctaaatctttatctcaatttgttatggccacatatgccggtgttgaatcactgaatttagaagtgcaagcagatacgatacacattagaagtgatcatatttcttgcgccattcaacaagacagacaaaatccagatcaaaaaaaatttgatgttgtgagaatatcagatctgaaaatgctgactttgattggtgttttcacttttgaaaggctcaggaagcaatatgtcacgttggatataaaattaccttggtcgaagaaggctgagttggcacccccagttcaaaatgtcatcgatgatgttgtgaaatttgtagaagcttcaaacttcaagaccgttgaagccttagtggaatctgtgacaggtattattgccaataacgattatttccaaaaatttccagaattgccaattgtagtcaaggttttgaagttaaacgcaattacggctactgagggtgtaggggtgagttgtgttagagagcctagggatatcaaaaccttgagtaccactgacaatgaacagccttgtggcgataatgagacttctaataccgcctttgatttaccttcattgcaaaacacatttgttgaggggaaagatacatggaaaacggctttcttagcatttggttcaaacattggagatcgtctcaagcatattcaaatg

SEQ ID NO: 5027 - DNA, 1197 bp, Saccharomyces pastorianus
atggctggaccaaatgggcgaatcaaccaagtgaggagaaagggtatctattctacaaagaggggaaatggtgataacttactgctaatgaaacgccaaggaaaacatggcatacaggaagctgagagtgacgaattatcgaatcacgaggcctcttctcccacgaagaagcgtgctaaagcagaagatattattgcagataggactagagtggtggaaggcatgtcgatggctacgtttgattgcagtaataaaattgggaagctgttttctgattccgagataaaagttgacaagagatcagaagaagaagaggaagtaggggacatttccgtatcgctgatacataatttgaaggacgaagacatcgagtctatcaagtgcagaaacaacaatcttttagacagtaaaaaactactattagaggcggaattatcagcagttgaagacaatcaaatcttttcgtcttcattccctgaaggaaagaaattatcgatacaaaactctttgagctccagagatcaaattgttaaaaagcttcaaacaaggaaagactacgtaagcaagtttaacctaccacctttgttattttcagacgagctgctgaatgaggtggaacccttcatgcctattgtgatggatatattgaagggacgggtctcctctgcctattacttcaaggcaaaaaatgcatacaggaattcccaaaaggcctatctgtcagtagatgagtttagaaaattgaacttaaacaaatttactgcgggattttatggattgaaaaggcaattgagggttggcgaagatattgctaagagatacagaagggaactgacacataaccaacctgcaacactgagatggtggggggtgacagatttctgcaattacgttttggcgccggaaattcttgcgtccttttgtattcgccaattaaatttctccagcagatctcattcaccaaagttgcaagataaactcagcgaaaaagcctactactacgaccccgaaacaagggtactagcatacgatttattcgaagatacgatcgagtacggccttatagtcgcagattctgatccaatagagcagtgggaaaccgctatagaggaagaccgtctgcaagaactgaagctcgatgtgcactactattctagcaagagatggcgacagcccgccaatggtgaggccaaatga

SEQ ID NO: 5028 - DNA, 960 bp, Saccharomyces pastorianus
atgaaagaactaaaggaacaacttgactctagactaaatgaaatgaacgaggaaaagaggaaacttgcagactcaaataatgaggagaaaaatttgaaacaaaacttagaattaatcgaattgaaatcacaacttcataatatagaagccgagatcaatgaattggatgttcaaaatgcggaagccgaaagagacaaatatcaagaggaatcattgaggctgagaactaattttgagaaattgagttctgagaatgcaggtaaattaggtgaaatgaaacaattacaaaatcaaatagattcactaacccaccaattacgcaccgattataaggatgttgagaaaagttatcacaaagagtgggtagaattacaaaccaggtcttttgtcactgatgatatagacgtttattctaaagcactagatagtgccattatgaaatatcatgggttaaagatgcaagacataaacagaataatcgatgagttatggaagcgtacgtatagtggaactgatatagataccatcaagattagatcagacgaagttagtagtacagtgaagggcaaatcatacaattaccgtgttgtaatgtataaacaggatgtggaattggatatgagaggaagatgttcggcaggccaaaaggttattgcgtccattatcatccggttggcattatcggaaacgtttggtgcaaattgtggtgtcattgcattagacgagcctaccaccaatttagacgaagaaaatatcgaaagtttagcaaaatctttacacaatatcattaatatgagaaggcatcaaaagaatttccaactcattgtcattacccatgatgagaaatttttgggccatatgaatgcagcggcatttaccgaccatttcttcaaagttaaaagagatgatagacaaaaatcacagattgaatgggtggatattaatagagttacatattag

SEQ ID NO: 5029 - DNA, 2568 bp, Saccharomyces pastorianus
atgagtgccatttataagctgtcaatccaaggcatacggtccttcgactccaatgaccgggaaaccatcgaatttggcaaaccactgactttgatagtcggcatgaatggttctgggaaaacaaccatcatcgaatgcttgaagtacgccaccacgggtgatctcccccccaatagcaaaggtggagtcttcattcatgacccgaagataactggtgaaaaggacattagagctcaggttaagctggcgttcacgagcgccaacggacttaatatgatcgtcaccagaaatattcagctattgatgaaaaaaacaactgccacttttaagacgttggaaggccaattggtcgctatcaacaatagtggcgaccgtagcactctgtctaccagatccttagaactggatgcgcaggtgcccctctatttaggtgtcccgaaggcgatcttggagtatgtgatcttctgtcatcaggaagatagtctttggccattgagtgaaccatccaatcttaaaaagaaatttgatgagatctttcaggcgatgaagttcacaaaagctctggacaacttgaagtccataaagaaagatatgtccgtagatatcaaattattgaagcaatcagtggagcatttgaagttggacaaggacagatccaaggcaatgaaactcaatatccaccagttacaatctaaaatagaccagtttaatgcggaagtgtcacagatcgaagctcaattaaacgaaattactgaacaatctgataaattattcaaatcaaatcaggattttcaaaaaatcttatccaaagtggaaaatctgaaaaactcaaagacctctataagggatcaagtggaaagattatcaaattccattgaaatcttagacttgtctaaaatggatttaaagaatttgttggctaatttctccaaagtcctgacggaaaagaatcatcaattgaaagatttggagatgaatatttcaaacctgaaaaaccagcaatcatctttgcaaaaccactccaattctcttatcagaagacagggtgaactagaagctcgtaaggaggcatacgaaaagaacctgagtcatctcgcctcattgaaagaagacttccaacagagatttcaacatctttcagataataacaacagcgacatggttaaaacaaatcaagagatgtcgcagttccaggttcgtatttttcaagatctatcgaacactgcagaacagtttgctaaagaaattctaataaaggagacaaatgtatcggaactggtaaaatcaataactgtagactcacaaaatttggaatacaataagaaggataggacgaaattaattcatgatacggaagagcttactgaagaagtgaggttgcttaaaaacttgtccactcaagacgatctcaatcatgaattggaaaacttgaatacatataagggaaagttacaggcctgggaaaacgacaataccataccgaaactaactcagaaaatcgaagagaaaaacaacgagatgataattttggaaaaccagatcgagaaattccaagatcgtataatgaaaacaaatcaacaagcagatttatatgccaaactggggctggtcagaaaatctcttaatgtcaagtcaggtgatttacagaatatcattgaaaaactacaaaaggatcctaaaataaggcagattttccccattacgcaagactttcaaaaatctgatttagaaatcgattttcaaaaattgtttatcaacatgcaaaagaatatcgctgtaaataataaagaaatacatgaatttgatagaaaatatactaatgccttgtacaattccaacaccatagaaaaggatttacacgataatctgcattcacaacaaaaagtgatacaactactaaacgaaaacttgcctgaagattgtacaattgatgaatataatgatgttctggaagaaactgaattgtcctacaagactgcgttggagaacctgaaaatgcatcaaacgactttggaatttaataggaaagccctagaaatcgctgaacgtgacagttgctgttacttgtgttcaaggaaattcgaaaatgaatccttcaaaagcaagttattacaagaattgaaaactaaaacggatgcaaatttcgaaaaaactttaaaagaaaccgtccaaaatgaaaaagaatatcttgatagtttaagattactggaaaaacatatcatttcactaaactccctgtgtcaaaaaatcgaaaacgctcaggaagctcttgataaagctaaagaagaaacaaaagcttctaaaacaaaactagatttactagaaacaaaatccacaactttaaaaaatgaaaaagaatttgcagaatctgaaattcgtccattgattgaaaagttcatttatctagaacgagaggttaaagaacttgaacacagctctaagacaatatctgacgagctatccatttataacaccagtgaagatggtattaaaactgtcgacgaactgagagaccaacaaaggaaaatgaatgattctttacgtgaattaaggaaaaacatatcatga

SEQ ID NO: 5030 - DNA, 699 bp, Saccharomyces pastorianus
atggagcctgtttatgagaaaagagacgcgtatattgatgaaatcgcagagttttggaagatcgtgctttcgcagcacgccagttttgcgaactacataagggcctcagactttaaatatattgatgctatagataagatcgaagtgaaatggctagcgttggcatccaaaacccgcgacaccagggacttcagcataacattccatttccacggcattgacggcgacttcaaagagcagaaaattaccaaggtgttccagatccggaagagcgaagacgatgaagaggacgggatgctgaccagtgagcccgtgactgtggagtggcccaagagttacgactcgataaacccatatttgatcaaagacaagcgcagcccggagggcaaaaagaagtacaggcagggaatgaagactatatttggctggttcagatggactgggctaaagcccgggaaggagttcccacacggggactcgctagcatcgttgttcagcgaagagatctacccattctgcgtgaagtactacacggaagcgcagcgggacctggaggacgaggagggagagtccgggctaagcgctgctgatgacgacgacgatgagggcagtcttggcgaggtcgacctgcccatgtccgacgccgattccgatgccaatgctgacgcggaacccagttccaagaagaggaaggtttag

SEQ ID NO: 5031 - DNA, 1524 bp, Saccharomyces pastorianus
atgatcagtgaaggccctaccaagttcgaaaaaaacacagtcatatctgtcttcggtgcgtccggtgacctggccaagaaaaagaccttccccgccctgtttgggctcttcagagagggctatctggacccgtccaccaagatcttcggctacgcccggtccaagctgtccatggacgacctgaagtcccgggtgctgccccacctgaagaaactgcacggcgaggccgacgatgtcaagatcgagcagttcttcaagatgatcgactacatcgcgggcaattacgacacggacgaaggtttcgacgagctcagaacgcagatcgagcggttcgagaaacgcgcccaggtcgacgtcccacaccgtctcttctacctcgccttgccgccaagcgtcttcttgaccgtggccaaacagatcaagagccgggtctacgcccaaaacggcatcacccgtgtcatcgtggagaagcccttcggccacgatctggcctctgccaacgagctgcaggagaacctgggcccgctgttcaaggaggaagagctgttcagaatcgaccactatctgggcaaggagttggtcaagaacctcttggtgctgcgtttcggtaaccagttcttgaacgctccctggaacagagacaacatccagagcgtccagatctcgtttaaagagcgcttcggcaccgaaggccgtggcggttatttcgactccataggcataatcagagacgtcatgcagaaccatctcttgcagatcttgaccctcttgaccatggagaggcccgtctcgttcgacccggagtccatccgtgatgagaaggtcaaggtcctcaaggccgtcgcgcccatagacacagacgacgtgctcttgggccagtacggcaaatcggaggacggctccaagcccgcctacgtcgacgacgacaccgtcgaaaaggactccaagtgtgtcactttcgcggcaatgactttcaacatcgaaaatgagcgttgggagggcgtccccatcatgatgcgcgccgggaaggccctcaacgagtccaaggtcgagatccgcctgcagtacaaggcggtcgcctccggtgtcttcaaagacatccccaacaacgagctggtcatcagagtccagcccgatgccgccgtctacctgaagttcaacgccaagacccccggtctgtccaacgccacccaggtcacggacctgaacctgacctacgcaagcaggtaccaggacttctggattcctgaggcgtacgaagtgttgataagagacgccttgctgggcgaccactccaacttcgtgagagacgatgaactggagatcagctggggcctcttcaccccactactaaagcacatagagcgtccagacggcccaacaccggaaatttacccttacggttcaagaggcccaaagggcttgaaggagtacatgcagaagcacaagtatgtcatgcctgaaaagcatccctacgcttggccagtgactaagcctaagcctgatgctaaaaaagataaatag

SEQ ID NO: 5032 - DNA, 927 bp, Saccharomyces pastorianus
atgttcttgaatttggtcaagaagtatggccttgtccccaaggatctatacggagatttggcttattccaccactgcttccagaaaatggaattcgctgttgaccaccaagttgagagaatttgctgagactttacgaactgccttggaagagcactctgctggcgactccgaaattgccattttgagggaggaaatgcaaatggagatcttcagattgatgtctttgttcatggacttgcccccagtgcaaccaaacaaagagttcacttgggaatatgtcgacaaagacaagaagattcacactatcaagtcgaccccattggagtttgccaccaaatacgcaaagctggacacttccaaaccagtctcattaatcaacgacccaagacacccatacggcaagctgatcaagattgaccgtttgggtaacgtcctcgggggcgacgccgtgctttatctaaatgtcgacaatgaaacattgtccaagttggtcgtcaagaggttgcaaaacaacaaggctgtttttttcggttctcacactccaaaattcatggacaagaaggtcggcgtcatggacgtcgagttatggaactaccccgccatcggctacaacttgccccaagaaaaggcctcacgtatcaagtaccacgaaagtttgatgacccatgcaatgttgatcactggttgccacgtcgatgagacgtccaagttgccagtccgctaccgtgtagaaaactcctggggaaaagactccggtaaggacggcctgtacgtcatgactcagcaatacttcgaggagtactgtttccagatcgtagtcgacatcgatgagttgcccgaagaattggccacaaaattcacctcgggtaaagaagaacccattgttttgcccatctgggatccaatgggcgctttggccaaatag

SEQ ID NO: 5033 - DNA, 231 bp, Saccharomyces pastorianus
atcggcgtcgacattctggaacaaagagctgcatcggacttgacgcaccaattggccaccaccgttctccagaactacaacgcccatgacgtgctcttgaaccagactaggctgctgcagcaggacaacagaatcttcaacaccctcgtctccaccgattctaccccgtcaccaaccaaaaaagctccggtagatgctggctatttgccgctaccaaccaattgcgtttga

SEQ ID NO: 5034 - DNA, 981 bp, Saccharomyces pastorianus
atgagcatatgtctagcgttaattgccacacctttcggtattaagtactctattactttcgtagcacagacaggcctaatcaattcatatcctgtaatgacatctgattttcaatttcccaagatagcttatccaggtaaactaatatgtccacaatacagtacagagaataaagatggtgaagatgtaatttttaactatgtttgcggtccagggacaaaactgcttcagtatgaacacaacgggacaatgttagaggctatcactgccaccttaattggtacagtgaaacgcgaggaagtgaagaatactgacgaagaagaagaagaaaaacttgaggtcgctgaccaatctacagaggaggaaaaatcagtggatgcgtcttccagtgaagtggtgaagagggttgtaaaatttatccgagtttcagttttgccgggggcagatgatgatggcagaactagcaaacatgctaataacgattttgccaataatctaccaaaggaaggtgatattgtgttgaccagagtgacaagactctcattacaaagagccaatgtcgaaattttggctgtggaagataaaccctctccaattgatagtggagttggtagtaatgggatgggaataattgccgctggtggcggttccggagcggccacgttctctgtatcgcaagcatcatctgacctaggtgagacatttagaggcataatcaggtcgcaagacgtgaggtccactgacagagatcgtgtgaaggtgatagaatgcttcaagccaggtgatattgtaagagcgcaagttttgtcgctaggtgatggtactaactattatttaactaccgcgagaaatgatctgggtgtagtgtttgccagagccgctaatggtgctggtggattgatgtatgccacagactggcaaatgatgacctcaccagccacgggggtgacagagaaacgtaaatgcgccaaacctttttga

SEQ ID NO: 5035 - DNA, 108 bp, Saccharomyces pastorianus
tcattatttcaagaggtccaaagcctcggcggtattgtaggtttaagcgaagtcgatttaagaggtactcacgataaactcatttacccagtaaactcagaaaagtaa

SEQ ID NO: 5036 - DNA, 1485 bp, Saccharomyces pastorianus
atgcagaagtggcttggactatggaaaatggattgcgtacagaaagtatcccacggtgtgttgccagcctcgtctgaggaccccgaaatttttacgaatagtgattatgtagtattaggagaaacatatcctgggcaagagcaagaagaaagtcctgaacagccagacccagacggcgaggcccgcagcgatacggttggtggtggctttttcagcagtctgtttggtagagatatgtcttcctacaccccagagtttcttttggatgtacgatcaagggtcaatttcacatatcggacaaggtttgttcctatagcaagagcaccggatggaccttcacctttaagtttgaacgtactggtacgggcaaatccgatcaatacaatagagaactacatagccaaccctgattgttttaatactgatattgggtgggggtgtatgataagaacaggacaaagcttgttaggtaatgctttacagacccttcatctgggcagggattttagggtcaacggtaatgaaagtttagaaaaagaatcagaaattgtgaagtggttcaacgatacgcctgacgctccattctcattacataactttgtttcggcaggttccgaactctctgataaaaggccaggtgaatggtttggccccgcagccacagccagaagtatacaagctcttatctacggtttcccgaaatgtggcatagatgattgtatagtctctgtttcctctggcgatatatatgaaaatgaagttgaaaaagtatttgttgagaatccagatagtaggatactgtttttgctaggtgttaaacttggcatcaatgctgtaaatgaaagctatagagaaagcatatgcagcattctaaattccgcatgctcagtaggtattgccggagggaggccgtcctcatcgctttactttttcggatatcaaggtaatgagtttttgtactttgatcctcatatttctcagccagctgtagaagacacctttgtagaatcgtgtcataccagaaaatttggtaaactacacctatcagagatggatccttcgatgctcattggtgttctaatcaaaggagaagaggattgggaacaatggaagctagaagtcatgggatccaccattatcaatatacttgctaagagaatggatgattttgatgtgagttgtagtatggacgacatagaaagtgttgattctaacttgatgaagaaggatacaaacaataatgaaaattacggagtgttagagggagattatgtagatatcggtgcaatacttccacacacaacaaacatagggggcagtgaagaggacgatggcttccaagacattcattgcaagaaccagaagattgttgttatggggaacacacacactgttaatgccaatttaacagactatgaagtagaaggtgttcttgtagaaaaggaaacagtaggtattcctagtcccatcaacgaaaaatgttag

SEQ ID NO: 5037 - DNA, 1146 bp, Saccharomyces pastorianus
atgttaccatctggtttagtcaacccacactgtcaaaatttattgggtaatggtgtcgttatccatgttccatcattttttaaggaattggagaccttggaggctaaaggtttgaaagatgcaagaggtagattattcgtttcttctagagctcatttggtctttgacttccatcaagtaactgacaaattaagagagttggaattatcaggccgttccaaagatggtaaaaatattggtactacaggtaaaggcattggtccaacttactctacaaaggcttcgagatcaggtttaagagttcaccatttagttaacgatcaaccaggtgcctgggatgagtttgttgtcaggtataaaagattactggaaacaagaagacaaagatatggtgatttcgaatacgatttcgatgctaaattagctgaatacaagaaattaagagagcaattgaagccattcgttgtcgactccgttgttttcatgcataaggccattgaagcaaagaaaaagatactggtcgaaggtgctaatgctttgatgttggatatcgatttcggtacttatccttatgtgacttcctcgagtactggtattggtggtgttcttacagggttaggtattcctccacgtaccattgatgaaatttacggtgtcgttaaagcctacacaaccagagttggtggaggtccatttccaacagaacaattgaatgaagacggggaaaaattacagacgatcggcgctgaattcggtgtcaccactggtcgtaagcgtcgttgtggttggttagatttagtcgtcttgaaatactctactctgatcaacggttacacaagtttgaacatcactaaattagacgttctagataccttcaaagaaattcctgtaggtatttcgtattctatccaaggtaaaaagttagatttattccctgaagatttgaatattttaggtaaggttgaggttgaatatgtaactttaccaggttgggaccaagacatcaccaaaattacaaaatatgaagagttgcctgaaaatgcaaagagttatttgaaatatattgaagatttcgttggcgttcctgttgaatgggttggaactggtccagcaagagaaagtatgttgcataaagatatcaaatag

SEQ ID NO: 5038 - DNA, 174 bp, Saccharomyces pastorianus
atggttaccgttgtattaggctcccaatggggtgatgaaggtaaaggaaaattggtcgatttactggttggtaaatatgacattgtagctcgttgtgcagggggtaacaatgctggtcataccattgttgtagatggtgtaagtatgatttccatatgttaccatctggtttag

SEQ ID NO: 5039 - DNA, 828 bp, Saccharomyces pastorianus
atgcccatcagaacaggtagtgatcacaacatgattcagccacccaattttgatgcgagctcgatgaaaatattggaggagctccaggaagggaggcaattaacgaatacacagcattttccagcacgcacattatatataaaattggctcttgattattctttctttagggacaatttattgaaatttcgtgctcacctgcatgaaataaaagtattcataagaataagcttcgatatcatgtatattgtgtgcaagatggaaaaggaacttctaagtctagtttatagtaatggaatagtcgatatatgcctgccgagatttatcttaagggaggaattgaagatttttgaaagctgcttttacactcatcatgacaaccgcttgcgtattctccaagaggagttttctcagctatttaaaaaaatcaaagtcaaagcttccattctttgttttagcattgaggagatgtccatgacaaatcaggaagcactacctcaaagctcgagattatttgaacttctaaaatgtaataacacaatgcagagagaagaactgcaacggagagatttcatactcaccaaagaggtaaagttgagcaagacgcaagtcaccttcctgattggaagtaggggaacaagaatagaaaccttgagaaaagaatcaggtgccaccataaaaataataccaattagcgagaaaatgaccatgcaggaaaggtttcatcctgaaaccgtccaacaaaccatactaatttcgggtgatctgtactcagttgcactagccattaccaatattgaatccgcattgtttgctataggactatag

SEQ ID NO: 5040 - DNA, 99 bp, Saccharomyces pastorianus
atggccgctttgcaaatcgaagacgcttctactgatgaattgagaaaggctgaagttggtttgaagagagttgtcaccaaggccatgtcttctcgttaa

SEQ ID NO: 5041 - DNA, 765 bp, Saccharomyces pastorianus
atgttcaagtctactttggaacctgttgaacaagttttgaaggatgctaagattgctaagtctcaaatcgacgaagttgtcttggttggtggttccaccagaattccaaaggtccaaaagttgttatctgacttctttgacggtaagcaattggaaaaatctattaacccagatgaagctgttgcttacggtgctgctgttcaaggtgctatcttgaccggtcaatccacttccgatgaaaccaaggacttgttgttgttagatgttgctccattatccctaggtgttggtatgcaaggtgacatgttcggtatcgttgtcccaagaaacaccaccgttccaaccatcaagagaagaactttcaccacttgcggtgacaaccaaaccaccgtgcaattccctgtctaccaaggtgaacgtgttaactgtaaagaaaacactttgttgggtgaattcgacctaagaggtatcccaatgatgccagctggtgaaccagtcttggaagctatcttcgaagttgatgccaacggtatcttgaaggttactgccatcgaaaagtccactggtaagtcttctaacattaccatttccaacgctgtcggtagattatcttctgatgaaattgaaaagatggtcaaccaagccgaagaatcaaggctgctgatgaagctttcgccaagaagcacgaagccagacaaagattggaatcttacgttgcttccatcgaacaaaacgtcactgacccaatcttgtcttccaagttga

SEQ ID NO: 5042 - DNA, 666 bp, Saccharomyces pastorianus
atgtcagcaaacgaattctactccagcggtacacaaggacaatacaatcagccaaacaaccaaggaagatctggaggctcttacgacaacaacaacaacaacaacaataacaacggaaatgagtacagtggcgataatgctaatcctaacggagaacgtggtctgttttctacccttgtaggcggcggtgccggtgcgtatgctgggtcgaaggtctcaagcaaccattccaagctaagtggtgcactgggcgcactaggtggtgcgttcctagcgaacaagatatctgatgagcacaagcagcacaatcagcaggagcaatatggccagcaaggcaactctaattatggcggatccaatcatcaccagcaacacaataacaatggcggttttggcggtcgcgaagaaggtcaaggtttcagaagagaaggaggccaaggcttcgagagaggtgaccaacagcgttacgggggtccaggtcctcaaggcccacaaggattcggaggcccaggtacacaagatttcggtggcccaggtcctcaaggtttcggtggcccaggtccacaaagtttcggcgggccaggcggccaaggctttggtggtccaaactcgcaagagtttggaggccaaaatcaccaaggattcaatggcggctcacgctggtga

SEQ ID NO: 5043 - DNA, 504 bp, Saccharomyces pastorianus
atgtatttgggttttaataacttcgagcagtatgcagatggtgctataaaccaaaatagaggtccagcattaaaagaaatatctgggaacattatcaattcagagggcgctgaatttgtactaccggataaagcgcttggaactcgcaatttccaagactgcgaaaggtttccgaaccgtttgagatcccgagaataccagaatgataatgatattacaagtgcctcaagtacgctgaccatcgaaaaattccagaaggacccaattggtactatttcaaaaagctggctgttactttcagacgcgctgcacaaatcatatgaagacttcaaaggcacgatcgtccagccaacgattgagaatattcaacaaaggaatttgtcggatgacctcaaaagatcattagtgcactttaatgaaaaaattcatgagatgtcccatttacccttgccagtattctcttgttttactggagaagacattcttccttcagagttcaattaa

SEQ ID NO: 5044 - DNA, 276 bp, Saccharomyces pastorianus
atgcatttgtttgataatagcagagatattgaaaatcgaaagagattgctatgtgctaagaaagtcgcaggcaataacaagtgctttgaatgcaagagtgccaatccacaatttgtttcttcgagctttggtatattcatttgtgtcaattgcgcaaaccttttgagaggtttagatgcaaacttgttctatgtaaaatctatcacaatggacagctttgaagaaaaggatatccgaaggtggaaaaaagtggaaattttagattgctgctttctg

SEQ ID NO: 5045 - DNA, 414 bp, Saccharomyces pastorianus
atgtcaataacagatttgaaggcatttggagagaggtttgcgaaatcgcagacaaaattgccagcagcgccggcaataacaaaatctatcctaccaaatttctttacggtcttcaaaacggcatcctccatctgtttaaaattacgaacgtcaacgtttgcgatgggcaaaactgcatcatcgtttttcaccaatcctgaaatctcttttgcagctttctgtgtcctttcctggtctcttccaacaatagcagctttgcaaccgagaagaaccaatgcttctgtttgcactcggcatatggttccagcaccgccagtgacaaatgccactttacccttaaataactcaggcctccacgaaccttcggtcacaaacttactatccagagtatttcctgtattcatggttttctaa

SEQ ID NO: 5046 - DNA, 246 bp, Saccharomyces pastorianus
atgttgaaatttggagaggaaagtcaatcagagcattcaagtttagaaaacggccttgaaggcgaaaatgatgtttcagtaaatataccatcagacggattggcttctaatcatttagaggatatcgatatgaaaaatgtcaaaagattacattcagagattgagcattttgacaatgatcctcattattccggtgaccagttagcatttaagaaaagcgtcgaccaaatgaatgcaagcacataa

SEQ ID NO: 5047 - DNA, 399 bp, Saccharomyces pastorianus
atggaaacgaagatcactgggttcactagacgttatacgttggacgatgaagcagttgaagaactcttacaactaacaaacacaaataaaagacagagaccaataacaacaagcgatggtgccttgataaatgacggtacagataccaatctaaacacaaacaatacccaaatgaaagttgacctaaatcctccaaataatattgcaccaattgacacagaagcggtaatacgccctttgaaagaagcctacgactctattgtttctgagaaggggcaaagaattatgcagttggagagggaattagaattacaacgtcaagagactcagtggctaagaaaaatgttaattgaagacatgggctgtgttagaagtatgttgagggatttacaaagatga

SEQ ID NO: 5048 - DNA, 957 bp, Saccharomyces pastorianus
atgcatcatcaatcgaagttagatgtatttataatcagagcttacaatttactttctaatgagtcagtcattagcggcgcatctctacaaagtgttacaaactcaccgcaaacagcaacaaataccccgtctggtatggtcaacggcatggttagtacagggattactaatccagcagggttagtggggtctgatggcacacctaatatcgatgagattattactagcaatggcaataatgctctggcgaaaaacaactcagacagtgctaatgcaacgccgaatggtaattcaagttccacctctgccataagcaataccagcaatcacactaacaacgggaacaacgcgagcactagtacggcgtccaatggaatttacacgcaggcccaatattctcaactttttgccaaaatatcaaaactttataatgctacgctatcatcaggttcaatcgatgatagatctacctctccaaaatcggcaatcgaactgtatcaaaggtttcaacaaatcgtcaaagagctagaactaagctttgaggccagtccttacgcaaagtatttccgccggttggatgaaagactttggcaaattaagtctgacactgaattagaaaatgacgagttatggcgtttagtctcaatgagtatattcaccgtgttcgatccgcaaactggccaaattttaactcaaggacgtaggaagggaaactctttaaatacatctactaagggttccccatcagagttacaaggaataaataatgggaatatcaatgggaataatggtagcataaacaatgcgaatagtatgaaaaacaactatgggaacaagaatgcatcaaccagccgaaccaaaaaaagaggtaccagagtggctaaaaatgctaaaaatgggaaaagcaataaaaacgctaataaggaaaggaatagcatgcagatgcaagcacattaa

SEQ ID NO: 5049 - DNA, 114 bp, Saccharomyces pastorianus
atgggctacaatacaatgaccaataatggatcacattcatggaaacgaagatcactgggttcactagacgttatacgttggacgatgaagcagttgaagaactcttacaactaa

SEQ ID NO: 5050 - DNA, 957 bp, Saccharomyces pastorianus
atgagtactccccaaccttctacaccaactttagaatggggaaacacttcagtgtctcaacacggttcttcattctttttgccttctgccgcatcaacagctacggtacctgtcaataacggtacaaatgccaatgctatttccaataatgtaactaccaacagcgcaaacacctccaccacactttccaacaactctcaacaacagatgatgcaaatgggtaatgcaatgaacgcttccatttcatcttcgaattcaatgcccccatacggtttgatgtcttctcaaacacaacatatgtcaaatatggttaacacttctgatattaatatcacgcctcaaaagcaaaacagattcatgcaacaacctcagccagagcacatgtatccggtgaatcaaagtggtacccctcaaaaagttcctccagcaagactaagttcaagcagaaattcacataaaaataattccactacctcattatcttctaatattacagggtctgcttcgatctctcgggctgatttatcactattggcgagaattccaccacctgccaaccccgctgatcaaaacccaccctgtaataccctttatgtcgggaatttaccatcagacgctactgaacaagaactaagacagttattttctggacaggaaggtttcagacggttgtcattcagaaacaaaaataccacatctaatggtcatagccatggcccaatgtgttttgttgaattcgatgatgttagctttgcgacgagagcattagccgaattgtatggtagacaattacctcgttctacagtaagtagtaaaggaggtataagattaagcttttcaaagaacccactgggtgttagagggccaaatagcaggagaggaggcactaataacccaaatcctaatgtaaatatgatttcaaactacaattctgatgtcggccatataaagaactaa

SEQ ID NO: 5051 - DNA, 351 bp, Saccharomyces pastorianus
atgcaaaactctgtttattttgaacaaaccgggtcatttgcgtccagtaatgacaatattgtgtcgagtaccacgaatacccacaatatttctcctagtcatcgttctagtttgaatctgaacaattctgcccttgcccacgatgcgtccggtaggggaagcggcagtggagatttgtatttgaatgacacaaattcacctttagcgatatcctctatgctaaatacacttgcccttggcaatacatcatgccacaggacatggcacgtaacaacagtaaccattattaacaatgacactattcagggcagttactgcttaacattaatcaaaatacctagggatttacca

SEQ ID NO: 5052 - DNA, 210 bp, Saccharomyces pastorianus
atgtccgccacatccctagtagaccagaatcaaagaggtaaaaaacttctccagctagagacagaatactcaaacaaagtcaagagtgtgatcacaggactacaactactgtgcacgaagggtcaactgcattccgtaaacggggtaaccggtcaacaagtggcccgctggtccgaattccccacttgttgccatcaaaccccagtttaa

SEQ ID NO: 5053 - DNA, 645 bp, Saccharomyces pastorianus
atgaataaagtagatcagattataggctacaagaagtgcgagggaaaactaccaaaggagaaacagataaccaagaacagatcgaaaggtgggaatgttgagcagctagataatggtaaaagggaaagagaaaacctgaaaacattcaacgaagaaagaaagaaattcttggagaggatgaacaaaagcaaaaagaaaaacatgacgaagagggagaaggaaaaaccaaaagaaacagaaaaagataactacaaaagagatgacaaaaagtttaaagagcaaaaaaagttaccagcaacaagggagtttcgtttcaaagaaccacattcgccaagtggttctcacaactttccggacgaaaacttgaaatcaaaatctcagtttggaggagatgttgagatagagtcggaaattgaaactaaaattatgatagaccaagctattcaaacatatggacctttgaatgtccagctgtcggaactttttaacgacaatattcttaacgtcactaaagagaatacctcttttttacaggacacagagttcacctcatgggaacgtcggtggtcaaattgtagtacaatcagtaatgcgactacaatctcctcagttccagatcctaaatacaagttcaacttcaacgaa

SEQ ID NO: 5054 - DNA, 783 bp, Saccharomyces pastorianus
atgctaggtttgggacaatccgctcaggcatattccgccaatgacgataccgagatgcagcagacagaagaaaaaatggctggcgttcccggctgtggccaggcacacgatctcgaataccctcatcacgataaccactcttcaccccatcaccaacactccggtatcctgccaagtgaatgttctggtcccacgttaaatactggtgctggcgccgttggtattccaggttgtggaagagtcaccaataaggtagtttctgaccgcgacaataacgcaaggtccactttagcaagttttgataccagtaacatgactgaggcaagaatgaatagcaagaatctgcccgttggttgccaaaacacatctatgccgcacttcgatggttctatggaccaacgtattccaggtgcaggttcgcctcgaagtgagcctcaccatattgacgcgtggagcaatatcccaaccttcggtgccggcactaacgaccagaacataatgcatccccaagcggcccctctagatagctacaatgagcacatggtgagagatgaaacaagcgacaattccgcttctttgtatactgttcatactcgcggttccccagcagacattccatctgctactcaaagaactgaaggaagaaaaaactatctgtatggaatgaatgatcaacattctgtgccaagaaactacgctacagataaagcggatccttcatcggttgaaacaagtgctgatcctgatatttccaacgtccaaagcgaaatcttgcgcaattag

SEQ ID NO: 5055 - DNA, 129 bp, Saccharomyces pastorianus
atgacaagtaaagcgtcgatttactttaatgtaatactatggttggtggcattatctgcattgataagatttattggttgttcattctatatgattgtcagagctttcaaaaagattacatcccgttaa

SEQ ID NO: 5056 - DNA, 462 bp, Saccharomyces pastorianus
atgtcggtcatatttttatggctgtatggcatttgcacgttatcgacattcatactttcattgggaaataaacctaaaagtacggaaaaattttatgtcttaacttgcgtcatttttgcgataatgatgatctatatgatattttgcagtatattcatgagtgtcaaatctttccaaaatattctgaaaaccgatacgatcagttttgagggtttgattactacagaagcctttagagatattgttatttcattgggttccacttactgtctgtacttgatcagctcaatcatttatttacagccatggcatatgttgacaagttttgtgcaatacattttgttaagcccttcgtatatcaatgttttgaacatctatgcattttgcaatgttcatgacttgtcatggggtacacagggtgcatggctgacccagtgggtaaaattaatactacggaagacg

SEQ ID NO: 5057 - DNA, 213 bp, Saccharomyces pastorianus
atgtttgaggtggtaatattaaaggactgtaattgcattttaaaagtcagcaatagctgttatgcgtatacagatgttccagatagggttccagagtttattcttcagagaaggcgttggttgaatggttcgtttttcgcgagtgttattccttctgtcatttttacagagtttggagcagtggccataactttggtagaaagcttcttttga

SEQ ID NO: 5058 - DNA, 1287 bp, Saccharomyces pastorianus
atggagaatggagaaaaccacagcgggatagatataactccctattgtgacaccggtgaagtgttcgaggccgacaggatacgagaagtatgggaaagggaagataaagaatggctgcaaaagaccaaaaacgatgccagtggatatgcatacccggcactgggcaaatcgccgtatattggtgagacgagtgatggcaggatggaaaagaaggttctgtgtcaagacatattttggtcatgcgacggtacctcgcttgtttctgtacataacgattttggcattaggcagtatttaataccggaggaaaacgatggcgacaacaaaaacaaagaactactgcttctactgccgttcagtagattcttcaagaaccaatccattgtttcgtgtgcagtacacccactatactcgctttatgatgaaccgtcgggcggagtggctaccgacaaaatcgcgattggaagcaagaactttcctttgcagctgtactccgtgatggacggacagtgcgttgcgaccttcgacacgacgaacgaaatgaatggagaatacgagactgcgtacagcgtgaaaatcgataccgaagcgcatatctataccggctcgcaccgaaacaaagtggccatatacgacatgaaccggcgggaagccgtgtggatgcaccgcagcagcaagaaagcgagcaagggaaggcacagcatcatctcgtgttttgaagagcagccagcgggagcggctgctcttccaagaggacccttactgtgcggtagctacgctaatgaactgttcctagtggacccccgccaccggcagccggtagcgataagccgcagtggccagaaggcggccatgggcgtcatccagatcctcactagcgtcaacgggcggtacgtgtatgtcactagacgcaacagcgataagatcagtgtctacgaccgccgggacctgcagcgcgaggtgagcctgctggcgctgcccttccgcgtccgccaagactctgccaagttcaaagcatgcgtggatgcgacacacgggctgagtatgggtactccgtggggggccgtgctgaattggggccacgacctggtggagttcggaggagtctccccgcatcagcgaagtgaagaacaggctgtagcttcccttccgccagagtcagaatggagcactggtcccgagtccatgggatttaccacgacggtggtgaagagttgtcctacagagcccggtctcttggcgctggcccacgggggcacgatctcactgggcaggctcagcggctaa

SEQ ID NO: 5059 - DNA, 120 bp, Saccharomyces pastorianus
ttgccagatgctgtaacgatcatcgaaccaaaggaagaagacccaatccttgccccatccgtcaaggactacagaccagctgaagaaactgaagctcaagctgaaccagttgaagcttag

SEQ ID NO: 5060 - DNA, 582 bp, Saccharomyces pastorianus
atggtcgctttaatctccaagaaaagaaagctagtcgctgacggtgtcttctacgctgaattaaacgaattcttcaccagagaattggctgaagaaggttactccggtgtcgaagtccgtgttactccaactaagactgaagtcatcatcagagctaccagaactcaagatgttttgggtgaaaacggtagaagaatcaacgaattgactttgttggtccaaaagagatttaagtacgctccaggtaccattgtcttatatgccgaaagagttcaagaccgtggtttgtccgctgttgctcaagctgaatccatgaaattcaaattgttgaacggtttggctatcagaagagccgcttacggtgtcgtcagatacgttatggaatccggtgctaagggttgtgaagtcgttgtttctggtaaactaagagctgccagagctaaagctatgaagttcgctgacggtttcttgatccactctggtcaaccagtcaacgactttattgatgttgctaccagacacgtcttgatgagacaaggtgttttgggtatcaaggtaagatcgacagctgatccgccataa

SEQ ID NO: 5061 - DNA, 927 bp, Saccharomyces pastorianus
atgaacttgacggtaagaatacctcaggtcagcgggctttccaaaactctactatttcccttgagtagacggtcgatacatataacgcctataaatttcaacaattcaagagggtctctatttggaagcatcaccgaaaacaagataaaggaagaaaaggagaacaaagatgaggatccgaacagcttttctaatagattggcggttgcttctgattccaccggagaggccgctgaagttgatagggactccataacgttgaagaacgataaattattacaacagcatatcatagcattgcagcaaccggagcaattagcatctgaaagcctcctttcacctttgaaaagagaaatatacaaagctaattgtgaacttaacaatgggttttacaaaaaagacacgattgtaaaactacctgattctaataagcgttataaattaaatttgacaagaaaagaaatcgaagtgctggaaccttccgtatatgttcaatcatacagaatcaaatcttcgatgaaaaaggccacccatttattaaggttattgggtgggctcgaagttatgaaggctatttcacagtgtcatttttcaaataaaaaaattgctcgcgaagtagcagaattgcttcaaaaaggaattgaagatggccagaaattgggtttgaagccagaggatttatacatctctcagctttggacaggcagtgatgggttttggcgaaagctcgttgaatttaaagcaagaacaagaattggtattataagtcacccttacattcacgtaagatgcattttgaaaacaaagagcgtcacgaagcaaagactcgcttatgaagcatccttgaaagagcagagaagggcaccatgggttcagttgggtgacaagcctatcagaggcgttacaggtggtgtatataaatggtaa

SEQ ID NO: 5062 - DNA, 249 bp, Saccharomyces pastorianus
atgactctgcttttttcgtcttcattgtctctcgtcttggaaatgaaaaatctgactaaatcatcttttgtagtgtcgaaagataaattaccaatccaaacaccatatttgctttcttctttttttttcttcgttgcagcatcatcggatgcggtttctactgtaacatctgttttggattcaccatcttgggcatctttcttaacatcaccagattttttcttttcagcgtcctctttatattcttga

SEQ ID NO: 5063 - DNA, 243 bp, Saccharomyces pastorianus
atgttgtacttcgcgttcaactcttccaaggtaatctttccccttcttaagagacgtttttgtttcttggataaaggaatagagctctccaagtcgatttcgatttcatcttcagcttttctctttttggttgggtcgagcaaagcttttttaatctgttcctcgtttttgttattggatacaatttgttcgcttgggacttcgatttctgacattttatatgaaactatgaaccactgttaa

SEQ ID NO: 5064 - DNA, 291 bp, Saccharomyces pastorianus
atgatctataatcctattcatttccaaaacaaagtcttggaagcacggagatatagtatatacagccaaaaaatgttaatcttaagtgtaaatcctttttattttgaatctttattttcaataatgcctaactcctgtcccattttaaccttatcaccaacattaaccttgaatttgaattcagttggtgcctcgaagcatagaacgacggtactgcccaattcgaagccccccatttcttcacctttgaccaaaggcataccccctaatattttacttgcattttcatag

SEQ ID NO: 5065 - DNA, 1074 bp, Saccharomyces pastorianus
atgctccatagcaaacaaatgtcgtctgcaaatcaatccaatggaacaactaacgcatctgtagaagtagtttccgaaaatggccctatgcccataaatgtgatgatgcaagaaggtgtaaaagctttgactaaaattctttctaatcagcttcaggacaggcaagctttccacaatgcccctcatgctatgcaattcgttataagaaacggtggaaaggtattatcaaatgcgcgactggaagaactcaaagatgcgcttcctaagatggattcgttgagtctagaagacgaacttgcaaaaatagataatcaaagtacgtaccatgtcaattctgcagatgataaggagactttcgaaagagaaataggacagattacaacgacaaataatactgactttataatagaccgtgatttgcaaaaaattctagatgacgatttgaaagatccagaacttcatttaaatggtgaagaagccgaaataatatttgattatgaaagccaagaactagatacaccagatggcataggggagaagatttctcaaatgatagaatccgtactgccaggaggatttggtactgaagagcagggaagattgcgagctgtaatgaatggagatgatttagacgttgaagaagaaattaacgaaactgatcgcgatattgcggatacagctggtttgcatggagacagtcaacatcctgcctcttcaaagaaacacaataaatctaagcactctaaaaaaaatgggcacgtaaggcgacatgactattatgatgaatcaagagaccataagagttgttgccctcaccatcattatgaaaatttatcgaaactgagaaactattactaccacgactttgaatacatatccaaaaccgacaaccgtactccggatttttccgttctggtaaacgaatcaaagcctatgtgtttattttgtgagtactacatggtatttggggaaccgccgcgtaatatgataaagtggtataatcgtacatttggctataaccggatgccgaacccgccaagggatgaacaagatagtaggaaaaggaatagatag

SEQ ID NO: 5066 - DNA, 855 bp, Saccharomyces pastorianus
atggtttccaattggctgttagcgagggacctctggcgaatgaacctgtccagggaatgtgtgttattgtcgagggtattcataaaaggtcacaggaagagattgaatctattgaggccacacattggttgtaacattttgttatcagacgataatctccttcatagtctatttgaaggtactccagcagcttttgaatattcagactctgtcaaaaatggtttccaattggctgttagcgagggacctctggcgaatgaacctgtccagggaatgtgtgttattgtcgagggtattcataaaatgtcacaggaagagattgaatctattgaggacacacattaccaagaacatattgtggatttgtcaggaaggctgataacatatacaagagacgctatacatgaagctttcttagattggtcgccaagaattatgtgggccatctactcatgtgatatccagacttctgttgatgtccttgggaaagtatacgcagttgtactacaaagacaaggtaaaattatatcagaagaaatgaaagaaggtactccattttttcaaatcgaggcccatgtgcctgtcgtagaggcattcggcttaagtgaagatattcgtaaaagaacatctggtgcagcacaacctcaattagtgttttctggatttgagtgtattgatttagatccgttttgggttccaacgacagaagaagagctggaggaacagggtgacacggcagataaagagaatattgctcgtaggcatatgaatgccatcagaagaagaaaaggtttattcattgaagagaaagttattgaaaacgccgaaaaacagcgtactttgaagaagaattga

SEQ ID NO: 5067 - DNA, 2829 bp, Saccharomyces pastorianus
atggttagagttgaatcagagacttacaaacgtttacaaaatgacccttcctgtataaggaatatttgcattgttgcgcatgtcgatcatggtaaaacttctctttcagactcacttctagcttcaaatggtattatatcacaaagactagccggtaagatcagatttttagatgctaggcctgatgagcaattgcgtggtatcacaatggaatcatcggctatttccctttattttagggttttgcataaacaagaaggttcggatgagcctttggtgaacgagcacttggtaaacttgatagattccccaggacatattgacttttctagtgaagttagtgcggcatccagattatgtgatggggctgtcgtattagtcgatgtcgttgagggggtgtgttcccaaacaatcactgtgctaagacaatgctggactgaaaaattaaagcctattttggttttaaataaaattgatagattaataactgagctacaacttacccctcaagaaacttatatccatttatcgaaagtcattgaacaagttaactccgttatcggttcttttttcgccaacgaaagacaactggatgatttatcttggagagaacaattagaacaaaatgaaaacgctgaatacattgagaaagatgactcaggaatttactttaaccctagcgataacaatgttatctttgcatccgctgtggatggttggggtttcaacatcggacaattggccaaattctacgaacaaaaactaggtgctaagagagaaaatctgcaaaaagttttgtggggtgacttctatatggatccaaaaacaaagaaaatcatcaatagtaagggcctaaaaggaagatccctaacacctctctttacgtccttgatcctcgaaaatatatggaagatttatcaaaatgtaatcatatcaagagattctgacatggtcgtgaaaatagcaaagactctaaatatcaagcttctaccacgtgatctaagatcaaaggatgacaagcaattattaagaacaattatgggacaatggttgcccgttagcacagcagtgttacttacagtcatcgaaaaattaccttcacctttagaatcacagactgatcgtttggatactattctggcttctgaagcagacgctgcagacatggatcccaaactgttggaagcgatgaagacgtgcgacagggaagggccagtaagtgcatatgtatctaagatgctttctattccgaaagaagaactgcctgttgaaactaatagggaagtttcgtccgatgaactgatggaaagaagcagaaaagcacgagaagaagcattgaatgctgcaaaacaagcaggtatagtagaaaacatggcgcagatggatttgaacgacaataccaaggatgatggcgatttttataaaagagcaaaggacaccgtcactactccagaaatgggagagcaaccaaaaccaaaacccttggttaacaacgatatctttcatgtcgtttcggagcctgctccggctttagatttaggctttgactatgaggaagatgatgatgctaatatccaagataatttcggcttagacttcgtaccaaccgatatagacccaaatgaccccctaagttccatgtttgaatacgaagaagaaggcacatttgcaaatgaagtcctccaagctttagaagatgtgaatattgaagaagatgatatatttgatgaaaaggaagaatcgctggtagcgttcgcaagaatatatagtggaacattaagggttggccaggaaatttcagtattgggtcctaagtatgatccaaaacgtcccgacgagcacattgagactgcagttattacacatttatatctgtttatgggtaaggaattggttcctttggatgtttgcccatcaggcaacatcgtcggtattcgtggtttagccggtaaagttttgaaaagtggtactttggtgcaaaagggtgttcaaggtgtcaatttagcgggggttaatttccactctactccaatcgttcgtgttgcaatagaaccagctaatcctgttgaaatgagtaaactggtacgtggattaaaattgttagatcaagcggacccttgtgtgcgcacatacgttgagaacacgggtgaacatattttatgtactgccggtgaattgcatttggaaagatgtttgaaggatttgacagaaagattcgcgggaatcgaaatcacacattctgaacctgcgatcccatatagagaaacattcttgtccgtttccgatatgatttcaccaaagaatgcgcaattggggaggggcgttcatcaattgctattgggtcaatataggattacgttcaaaacaatcccattgagcgataaaattacagaatttttgtctcaacatcaaaacagcattaaaaatattctgaaaacctccacctcaaatatcgaccctatcattgaaacaactggaggtgctcttttagataataactcattcttagctgcgtttgaagatgtaatatctaaggacggaaagagcggagatcttctaaaagggttcaaatcaaggttggcaggcctagggcccaacagggttggttgtaacattttgttatcagacgataatctccttggtagtctatttgaaggtactccagcagcttttgaatattcagactctgtcaaaaatggtttccaattggctgttagcgagggacctctggcgaatgaacctgtccagggaatgtgtgttattgtcgagggtattcataaaaggtcacaggaagagattgaatctattgaggccacacattggttgtaa

SEQ ID NO: 5068 - DNA, 564 bp, Saccharomyces pastorianus
atgaacttgataatagatcaacaggataacaagaaaaacaagaagacatcagggaagcgcaaaaacaatatagtcttggacgaagacgatagcaacgacggcattgaaagatactctgacaaatatataaaaaaaagaaaaataggtgtttccattgatgaccatccatataatttgaatctcttcccgaatgaactgtacaatgtgatggggatcaacaagaaaaaattattaactatctcgaagtttagcagttccgataacgttttcactggtacaggattgcaagatgaaaacattggactttccatgttggccaaattaaaggaattggctgaagatgcagacgacgtgacctccgctacgggcggtgctgcgacaaaggaaaactcagaaggtcacaaaacaggagatggtgatgatgatgatttggcagacgacgattttgaagaagatgaagacgaagaagatgatgacgattacaacgctgaaaagtatttcaataatggtgatgatgatgactatggtgaggaagaggaaccgaacgaagaagctgccttctaa

SEQ ID NO: 5069 - DNA, 129 bp, Saccharomyces pastorianus
atgagttcctatagaggcggtggtggtggtagaggcagtggtaataactatatgagcaacctgccctttgggttggttatggagatgtgggcaagatcatatcacggagttcccgactatagagatccc

SEQ ID NO: 5070 - DNA, 336 bp, Saccharomyces pastorianus
atgaagagatcagaaaatagaccgcaacagcaaaggaaaaaatttgaaggtcccaagagagaagccatcctagatctatccaagtacaaagactccaagatacgtgttaaactaatgggtggtaaactagttataggtgtcctgaaaggctatgatcaattgatgaatttggtcctagacgaaaccgtagaatacatgtccagtgctgacgatgaaagcaacaccgaactggtgtctaaaaatgcgaggaacctagggttgactgttataagaggtaccatcctcgtgtctttaagctccgccgaaggctctgatgtactatatatgcaaaactaa

SEQ ID NO: 5071 - DNA, 675 bp, Saccharomyces pastorianus
atggatccgttgcactgtgatttctcaatgctgagaatcagtgatcatgacttgtcacaagacagcactagagagccgtcactcttaaatttggcggaccgcacgattcaggaagaggggttcagcgatgacgaagacgaagatgatgggaactataatgacgacgacgaggaatatggagatgatgacgacattaatagactaattagtttggatgatagggagttccatctcggggctgcggacttcaatgaatacgggactgcattccataccaaaaaccccccgctatttaaaggtattaatcatgatgaatcaaggggtggattgtcgaaaaatacgcacagaatgtgcttggataacgctttgaaatgggctcctgccacggagcctatttcaagaaagagatatatcaaagattcgctgcgatgcattaagccattaacagaggaccacccatggacaggcaaggtcattttcaaaccagcgccaccaccggcttacgaaacgaataatctaccaataaaaatccacggccacgaaaatagtaaggatttaaggcatatgaaaaaccattatctaaagccttatctggtggggtcatgcgggctcttgaaaaccggtgctaaggtcttccactcttacgacaaaactgacgaagttacgattttatga

SEQ ID NO: 5072 - DNA, 1143 bp, Saccharomyces pastorianus
atgtccttcactgtctgcggaatgacggcggatcgtgacagtgggttgaagctttcgcagacggcatcttctggctctatgagtgaagagtttgtctgttctagcaacaccagcacctccattttagattatccgcttccgaaggtggcatttaaccatattgacagtataacagacgctgacacgggccttgtcaatgcaatgttggagccacgggccacggttgatgtcggtgctaccgacaataacgtgctgtattgcatagacccgtatcctgtggagcctccgtgctacgacttggccaatccgtcaaaagttatcagatatcccatctatgagcattgtcgtccgtgccccacttcagtgaaaccgccaagctatacaccgtcggtggaacactacactgtggtatccatgaaaatggagaagctctcgccctttgaaggcgctaactccaggctatggaacaactttatcttgcaactgaactccacccaaataaacttctactccatcgacgacgagttgaccaaggatataaagaattaccgaggcggtgatatgtttggccaccaccacttcaagggcggcagcgaccgtcaccatgcaacccggtctttattgactgcgttcacaggaaaacccacttaccaattcgataaatacgataaagaaagaatatgcaggatagttgctcaagacaaatcaaggtttctatcaaacgagtacctctgcagcagctactccctgcaatgcgcaaaagtcggcctacccatagattactcatcaagagacttcgttctgagaatgcgctgtgaaggactgcagttcctgctgcagttctcctatgtggacgaactgataaactgggcaatgtatttgaacatggggatatcgctctccttggatttggagctacgggagttgcccacttatagaagcgttcccagaagaagacacgcaagagcaagaatacctgccaacaaggacaaacaccacaataagaacaagaacaagaacaagaagaggagtaattcccactctcacgccccacctttgagaaaattcaacacctcctccgtttgccagttggtgctgttgccaacgaacgtccaaaaaacaaatcaaggtcaagaagcctaa

SEQ ID NO: 5073 - DNA, 1110 bp, Saccharomyces pastorianus
atgtttgccgccgttactggcgccctaatgttgggtggtgcttgcgaaagagcaagactattccccatgatggtgttcttattcttatggatgactgtcgtgtactgtccaattgcttgctgggtttggaacgcagaaggctggctggtcaagttgggcagtttggactatgctggtgggttatgtgttcatttgacttccggccatggtgggttggtctacgccttgattttgggtagacgtaacgaccctgtaacacgcaaggggatgcccaagtacaagccacattccgtgacctccgtggttctgggaaccgtgtttttatggttcggttggatgttcttcaacggtggctccgcagggaatgcctccatacgagcatggtactctataatgtccaccaacttggccgccgcttgcggtgggttgacctggatggtgatcgattatttcagatctggtagaaagtggaccaccgtcggtctatgttcaggtatcattgccggtctagtcggtatcactccagccgctgggtttgtaccaatctggtctgccgttgttattggtgtggtcactggtgcaggttgtaatctcgctgttgacttaaagggactactaggtattgatgatggtttggactgttactctatccatggtgtgggtgcttgtattggctgtgtgctaactggtatctttgctgctgattacgtcaatgccactgcgggttcctacatctctcccatcgccggtggctggatcaaccaacactacaaacaagtcggttatcaattggctggtatgtgcgctgcgctagcatggacagttactgtcacatctatcttgctagtgactatgaacgccatcccatttttgaaactaagattaagcgccgacgaagaagaattaggtactgatgctgctcaaatcggtgaattcacctacgaggaatccaccgcttacattccagaaccaatcagatcaagaacttctgcccaaacgccacctcctcatgaaaccatcgatgacaaaatcgttgctaatacagacgcagaaaagaattccacgccttctgatgtttcttctaccaagaacaccgaccatatagtataa

SEQ ID NO: 5074 - DNA, 3024 bp, Saccharomyces pastorianus
atgaagctttttccctttgacaagaggtgttttatttacaatgagatgatgacaaaactatctcaagataatttaccaataaaagtaagcttcaataaaactgaaagagaagccaagagcattttgaaggctttgagtatagataccatagccaaggaatctagaaggtttgctaaactgatttccacgaatccgttggcttcattggtgcctgcagttaaacagattgagaattatgataaagtctcagagcttgtcgtctacactacaaagtatttcaacgaatttgcatatgatgtattgcaatatgtactgttactacgtttaacttatagcagacctgctgttcaatttgacggtgtcaatcaagccatgtgggtacaacgattatcaatattcattgccggtttagccaaaaattgtcctaatatggacatctcaaacataatcacttacattttgaaaactttgcataatggaaatatcatagccgtttccatcttaaaggagttaatcattactgtcggtggtatcagggatctaaatgaagtcaacgtgaagcagctgttgatgttaaattcagggaaaccattgaaacagtatgcaagacatttgatttatgactttagagatgacaattccgatattgcatcaaaactaacctcatttttcaccgaccaaaacgctatctctgaaattattcttttgttatattctctgaatttaaaggcgaatacccaggactctcactacaagatcttgtccacaagatgtgatgaaatgaacacattgttatggtcgtttattgaattgatcaagcactgtttaaaagcagaagcattcgaagaaaacgttttgccatttgtagaattgacgaatcggttccatctatcgacaccatgggtttttcacatttggagagactatttagataaccaaataaacgaaaacgaaaatttttctattgagcaattggttgaaggggcagagtttgatgatgtcgatttaacaaagatttcaaaagatcttttcactactttttggagactttcgttgtatgatattcattttgataaatcattatacgatgaacgcaagaacactctctctgggaaaaatactgaccaaatgtcaaacagaaaaaaacactcagtccagaatcaaattaaagatgtcttagttaccggaatatctcatcaaagagcctataagaaaaccgcagaactcgtgtccgaaaagtcaaatatctggaacaaagattgtgaggacaatcaaatcaaagtcttcatacagaattgcgtggtcccaagagttttgttttctccttctgatgcacttttctcttcatatttcattttcatggccttcaatgcagaaaatttgatgtcaattctaaacacctttatctcctccaatattctaaaaacactgctgttctgctgtactagttcagaagcaggtaacttgggtctcttttttactgatgttttgaaaaaactagaagaaatgagaataaatggcgatttagacgaacaagcttctaggaagttatacgaatggcactcaattattacagaacaaattattgatctcttatccgaaaaaaactatatgtcaattagaaatggtattgaattcatgaagcacgttactagtgtcttcccaatactaaaaacacatattcagttggtttacacaaccttagaggaaaacttggtaaatgaagaaagagaggatattaaattaccaagtagtgcattaataggtcatttgaaggcgcgcttaaagaaagctttagaattggatgaattctgcagcttaactgaagaggaagcagctcaaaagaaaatctatgaagccgaattggaagaaattaagtgttatgagacagcttaccaaaatgaacaaaagcagttggctttgagaaagcaactagagcttaacaaatcgcaacgacttcaaaacgattcctccaaaagtgccaccagtaatagtacggaacttggtatcaacgacaaatggagctattcgcataatgagcccgcaattccaacaaagccttctagcagccaatggtcctattccaaagttacgaggcatttggatgatataaatcactacctggctacaaaccatttacaaaaggcaatctccttggtagaaaatgatagtgaaacttggaatttgaaaaaattgtcgaaacaaaatatgccaatttttgatttcagaaatttaactttagaaatatttgaaagatatttcagatctttgattcaaaaccctcagaatccggactttgctgaaaagattgaggcgctcaagaggcacatcaagaacatatcgcgtgagccatatactggcgtggccaactcccgctctgagacttttggtcccgaatataccaaaaggtcaagtaggtatggcgggagtaccggagccaaagatacatataataatgctaactataaaacttcaagcagtgatcgttctggcttgaaaaatagcaagccaagtaccagttatccacacaaaagatcggaattgcccaccagacctagcaaaggcaaagtttataatgacagaagcagaccagctagacaagctggtccggacagaggcgagagctttgatcagcaaagagatactcgttcacgtgaagactataagaaaactaactcacaacgtcctcaactaaggtttccggaaaagccatcacaaggaagtaatgataacaacaagaacacatcctaccaacaaacgccatcctacaagcgtgaaatgccttcagagaatgatgaaaagcccaataaaaggttcaagaaggatgatggtaacagaagcaaatttcagagacaagactatagaagtacaagagatagcggtagcaacttcagtgcaaataacagtagtagcaatcgtagacccaatgaaacccaaagatacaacacaaacagaaagagcaatacacaggctcttcctcaaggccccaagggaggtaataatgttagtagatatcaacgttaa

SEQ ID NO: 5075 - DNA, 1719 bp, Saccharomyces pastorianus
atgacaacacagacgcttctttcaagactggatgctctttcccggcaggtcatatctccaggtttactgaaccaggcaactattctaacggaggaaacaataacgaactggtctgaacgatcaaaagctctatgttcggactttattgcgctggaatcgaatgacgaaaaggaacattggctgaagattttatttatcgaattgtttgatttcataaatcaaggcgatgaaggttcccctctcaggctctccgatattgcactgtttatagaagagttggtgaacggtgacagaaaagggtcgcaggcttccctagtgggcaaaatgctcattgctgtttcgagttccgagcccaatataaaggacacgaacaccatatcattgtgtaagctgataccgtccctacatgaagagctgtttaaatttagttggatatcctcgaagttattaaataaggaacaaactactttactgagacatttgttgaaaaaatcaaaatatgaagtaaaaaaatataaccttttggtggaaaattcagtaggttacgctcaattggtagctttattgttattggcgtattacgatccagacaattctcttaaagttcatgcatatttggaagagatgtatcatattatggggaaatattctttagattccattcgatctttagatgtaatcctaaacgtttcctgtcagtttattactgaagagtaccaattttttatcgagtttttgcagaaatcggatttttggccctctaaccatgtggccgataattcgaattactctaccttaaatgtaggtggtaacatgattgcggctaacattatctcattcaatttatcccaatataaggaacaggttgataaggaaaatcaccagaagtatatggacatgtgttgcattttaataaacacagggtttatcaatttctattccatttgggataacgtaaagcctgatatggaatctctacaaaagtatacggaggatttagaaaccgaattagaagcagaatccactaaaggcatagaaaaccctttggctatggcagcagctttatcgactgaagatgagaataatgaggatactgcgcttgtgaaggatgacgataaggacaaggacaaagcctcagaaacaagtaacgaagcagacttgaaagacaagcagaaaaacgatactttatcatttggtaaaataaatttattagagcgtttattaattcatagttgtattactcctgttgtccacatactaaaggaacatccaaaaatactatatgttaatgaatccatatcaaaatattttggcagaatatttgaatatcttttagatcctttatacacgtcaaagacatctcgcgatgagtcaaacaacatggcgtctgctttaatggtaactcggatagataatggcatcctagctcataagccaagattgatccacaaatacaaaacacatgatccatttgaatcattcgaattgaatacaaagtatgtattttactactctgaatggaatagtgcccttgtcccttttgcatccattgatgacctatttgaaaagtcacatacatttttgtctatcattgggccctatttagccaacacccccacgctattgagcaagatctcacgtattggtgtagctgatattcagaaaaatcaagcactgagtttttgcaaagtacagttgacaagtgggtggattttgtaa

SEQ ID NO: 5076 - DNA, 1215 bp, Saccharomyces pastorianus
atgcgtggtggtgaaatcaaggaaactccatttttgttgcagacgtttgctgtattggaaaaaagacttgattttgccttatttagagctatgtttgcttcatccgtcaggcaagctcgtcaattcattttacatggtaatgttcgtgtaaatggtacaaaaatgaagcatccgaattatacattaaagcctggggatatgtttagtgtcaaaccagacaaagttcttgaggccctaggtgccaaaaaaccaagtttcgaagaaggactggcggttgataagactcaaattactttatggaataaatatgtcaaggaggcaaagacaaactcaaaagaagtttgggacaaaaagctgaaaaagctcgaaactatgtcagattctaatccaaaaaagcttcaattccaagaatttttaaaacaatacaacaaaaatttggagtcacagcaatacaatgctttgaaggaatgtacacaggaaggtatgttgagcaagctgttgaatgttgagaaagaaatgggtaagctagataacgaaccgttgtcgatagatgagctcaagaaaggccttcctgaaatccagaatcctcagttattgcaaagtgtccatagcgcttatcaagactttttcaactcaggcgaattgaaaagagaaaacctttttaaattgaaatcggaggagatatcttcatgggcagcagactttctaagtcttaacgaagccacaaagaaagaactatctgatggagccaaatcttcgattagatctggtaagaagacgttatcagaatgtgccaagttatggactaaagatataactgctcattttaaaactagaatgagcgatacctcgaatggatctatcgcgttcgaccccaaatgggccaaagacttgaagtatcatgatccacttaagacttctgaattggaaagcgacgagcaaaaggcacgtgggttaataaatttgccatggcaaaggaatcatgtttatggtagacaagacgccaaaaaaccatttttcacaccatggaagccaagaccgtttttatcaccttttgccattttaccacatcacttagaaatatctttcaagacatgtcatgctgtatatttgagagaccctgttgcgagaccaggccaatctgaagtcatttcgccatttgatgtccctgttcacgaacgtgcgtatatgtactacttaagaaacggtaaatga

SEQ ID NO: 5077 - DNA, 396 bp, Saccharomyces pastorianus
atgccaagaaaggccaatttgctgaaatctctggcaagaggacgagtacgtacttctttcaataagtacaatctattcaacttatacaaaaagggcagtgtggacttaaagtctaaatctttatatcaacagaaatggacagcaaagcaggaaacccgagcctatcatggtgaacatttgacagaaaagagatggcaaaatgctttcaaacctaagttagattcagtagctcagttggatgcttcatgcgtggtggtgaaatcaaggaaactccatttttgttgcagacgtttgctgtattggaaaaaagacttgattttgccttatttagagctatgtttgcttcatccgtcaggcaagctcgtcaattcattttacatggtaatgttcgtgtaa

SEQ ID NO: 5078 - DNA, 84 bp, Saccharomyces pastorianus
atgttcatcaatgatatcatttacgacataaccacatatttggatatttacgctttatcgattaagcatccaaaggagacttag

SEQ ID NO: 5079 - DNA, 978 bp, Saccharomyces pastorianus
atggcaccaaatttggttacattattagggttctgcttcattatcttcaatgtattaacaactttttactatgatccatacctgaatcaagagtccccccgttggacctatttctcctacgctattggtttgttcttatatcaaacattcgatgcttgtgatggtttacacgcacgccgtacgggtcagcaaggccctctcggtgaattgtttgaccattgcattgactcgatcaatacgactttatcgatgattcctgtttgttcggtcactggtatggggtatacttacatgactgtttttacacaatttacgatattgtgcagcttttatttaagcacatgggaggagtatcacactcataaattgtacttagccgaattctgtgggccagtggaaggcattatcactttgtgcatatctttcatctcggttgggattttcggaccccaggttgtgtggcacactaaagtggcagagttttcatgggaaagccatgtttttgaaattgaaactattcatttaatgtacgcattttgcacaggtgctttaatctttaatatcgctacagcacatggaaacgtcgtaaagtactatgaatctcaagatgaaaaatcttcagctccaggtaaggctgaagaaaaggttagagaagcgctcaagggtcttttaccattctttgcatacttcttttcgattttcactttggttctgattcagccagccttcatttctctgcccttagttttatcgactggcctttcgattgcgttcgtagttggccgcatgattgttgctcatttaactaagcaacccttcccaatggtgaactttccaatgtttatcccaaccattcaattgttcgcgtacgcatttatggtttatgttttagattaccagaaaggtcaaatagcctttgctctgggttggatggcgttttggtttaacccttgctattcacggtatgttcatcaatga

SEQ ID NO: 5080 - DNA, 120 bp, Saccharomyces pastorianus
atgttaaaggaagtcgtcgatcagtacaagaacttcaaagacagactatatatctttagagcagacttaaaaaatgatggcgacgaagaactatttttgttgagcaaatcgttacggtaa

SEQ ID NO: 5081 - DNA, 2040 bp, Saccharomyces pastorianus
atggaactagagcccagtctttatggaataatagaggcattggctcctcaattactgtcgcagacgaacttaaaggcatttgtatccgatgttgtcagtttgctacgatcccctaccaaatcagtaagtcaattgagtcctctgattgattttcataaactacaatcatcagactcgactgaggcaacaattatgtggcacaagattgaaaaatttctcgatgctttgtttgggatccaaaatacagatgatatggtaaagtacctctctgttttccaatctttgctcccttcacaaggcagagcgagagccacgcaaacttccaatgggctgaatacggagaacttggccaaccatgatcatttattaagtcccgtccgagcgccaagtatatacacagaagcttcttttgaaaatatggatagattttcagaaaggaggtctatgatctcttcacctaatcgttatgttccctctttgacttataactcagttactttaagacaactatcagatccctattatgttaacactatacccgaggaagatattcagaaattcgtgtcgtatactctactggccaccacgtctgcgctatttccgttcgatcgcgagcaaatacagattccatctaagataccgaattttgaaagtggccttttacatttaatttttgaggcaggtttaatatatcataatttaggctctaaagtagagaaatttagaatgtcaaatatctctccaatgaaaaaagcattaatcattgacatctcagaagagctgcgaaattacacagcgtttgtaaacaatttggtctcttcagggacagtggtgtcattgaaatcattatatcgtgaaatatatgaaaatataataaggcttcgaatatactgtagatttatggaacacttcgaggaattaagtggggacacctttttaattgagttaaacatcttcaagtctcatggagatcttaccataagaaatatagcagccaatctgttcgattcaatgattgctctttactacgagtatctaatgaattggctgaccaagggtctactgcgggccacctacggagaattttttattgtcgaaaacactgaaataagcggtgatgctgattttatttaccatatccccatagaactcaatcaagaaagagttccaaatttcataccgaaaaagtcagcatataaaatatttatgattggtaaatcatacattttcctagaaaaatactgtaaggagatccaatggacaaacgaattctccaaaaagtatcatgttttgtaccaaagcaattcttataagggaatatctactggattttttgacattataaatgaccagtactctgaaattgttaattacactaaccatgtcctaaatcaaaagtttcattataaagacgtggtgtttgcattaaaagatattctctttatgggtaaatccgattttatggatatgttgatagaaaaggctagcgatattctaataacaccgtcggattcattgccaaactataaactaacaagactcttacaagaagctgtccagctttcttccctaaggcacttgatgaataactcttctaatggttcggtcattgatggattagatgcgagagtgcttgatctaggacatggatcggtaggttgggatgtttttactttggactacatactacatcctccattaagtttagtgttaaacgtgaaccgtccttttggtagaaaagagtatctaagaattttcaattttttatggcgatttaaaaaaaatgattacttctatcaaaaggaaatgttaaagagtaataacataattagatcgttcaagaaaatcagaggttataatcccctcatccgtgacattatcaacaaactttctagaattagtatattaaggacacaattacaacagttcaactttaaaatggaatcgtattacttgaactgtattatagacgaaaattttaaaaagatgaccagaaaattgaactacacagaaaaaaaggatcaaaatcatttgatttaa

SEQ ID NO: 5082 - DNA, 912 bp, Saccharomyces pastorianus
atggccttgtttgacgatttgaaagcccggttgggtgaaaaggcgttcatcgtcactccggatgcccactggatagacacttttgagttgaagcgcaacagaggtaccgatgcgtctaacgggtatgacgaagaattacctgaagaggaacaagaattttctgacgacgaaaaggaagccctcttcaagaaaatgaaaaaacagcaacagcagcaacagagaaagaaaagggacaaccgcaagcagcccaatgatttcgacactacgaaagtgaagaaggcccgtcaaccaaggccaacaaatctgcctaaattggtgccaccaatgggcatgaatagtaatgggagcaaaggtgctgcgctgcaacatgggtacaaatcgagaaatgctcgtgaaaatactaagcatgatggcaatgcggcacctagccaaaaccgcccggctcagatgccagtgagacagcaatcaccaccaccaccacaacaacaacaacaagttcctgtaaataactacccatatctaccacagccaaacggtatgccatatcctccctacccccctttcccacaaccatccaacttccaatacccagctccacctttcggccaagtgccaccggcccaattccccaacgcagggccatataacaacgtgccacctgcgtacaacaatcttccacttccaattcaagctccgtttatgcaaatgcctcagggccaaccgccacatccatatggtgcgccttccatgggtcaaatgcagaacccgatgtatatgcagccaccacctcaaatgccacctcaagggaatggcaacttccaacaggtgatggaactgcaccaaatacttttgcagcaacagcaacagcaacagcaacagcaacacgagcatcaacaggagccacgtaattag

SEQ ID NO: 5083 - DNA, 297 bp, Saccharomyces pastorianus
atgtctttgttcaacgtattacatccgctattgaaggggtccaatagcttcaaaccaagattgaaccagtttttatttaacaatgtttccgcaatcacaataagaactctaatgaaaacccacaaaggtacagcaaagaggtggaggcgtaccggcaatactttcaaaagaggcatagctggtagaaaacatggtaatataggctggtcccatagatccttgaaagccttgagcggaaggaaaacagccaattcatcttatttaaaacatctaaaacgtttactaccttaccattga

SEQ ID NO: 5084 - DNA, 195 bp, Saccharomyces pastorianus
atgatgacagtgataataatgtatatgcaattgtgctatggttgtctaattttattgaacacaagcattaaggataaaaatttagtctggcccagagtcaatactatgagtagtttagtgaatccaactagtgaagataaggagctaaatgatatactggatcaattcgaaattacttccgatgtcgaagagtga

SEQ ID NO: 5085 - DNA, 1362 bp, Saccharomyces pastorianus
  modified_base (1271)..(1271): a, c, g, t, unknown, or other
atggagtgtcagagatgtcccgtaacagccaaaaccctagcgactgttttgtcgaggaaggaaaagttttgcgatgagtgcttcattaagttcgttagtactaagcaaagaaagcaaatgatgaaagatgaatttttcagaaacttgttcaaggtcgtatatccgctcgaaaaagaaggttctgttggaaaaatattgttgcccttgtcactttctgactcaggatccttagttatgctagatatagtccatgatttgttattggagcagaacaaacagcacaacaatcacacgggtttcactgtcgatatacttaccatatcaaccgaggacaatcttcctgttattaaagagcaaatgaaattactgatcaaggaaaaaatgctagaactgaatgaaatatccgacatatataaagttcacttcattgatataaatgaatttttcaatagcacatcgaacgtatcgaatttgatcatcgacgatgaaaattttgaaatttttgctaaatccaggtcggtgggtaatgaggataagttatctttgaaggaaatattaagcgaatattgtttaaacaactcatctagaactgacctaacgtcgattatgaaaacccaattaatcaaacattttgcatttgaaaatggcaacgatgctattttgtggggccactccatgacaaagctatctgaggtgatcatttctcttgtggtgaaaggtaaaggttctcaaatagccactttcttagactctgaatcttttgacacattggacaataagccatgtaattataaaaacttatatccaatgaaagatctactatcggttgaaatcgaaagtttcctgcaaattaaaaacatgaccaaattcctcatcaacgttgaagaaactaactccaaacccaactgtttagtttcgaagaaaccaacatcggcgatcaatcaacaaaaactaatcaagaacatgacaatcaatgaaattactaccaaatatttccaagatattcaaaatgattattcgaatataatatcaacggttttaagaaccgcagataaactagcagagcctaaacctagtacaacaaagacatcgcaatgtcaaatatgccaatctaaaatctatactaacccatcgaattggctggatagaattacggtcactacaccttatcctagagagaccaccgaggaagaacatttattcaagcagtggcaagattcgaaattaggaacatctcacactcattatgttgaattggttaacgaaataanaagggactctataaatagtgatgatgacagtgataataatgtatatgcaattgtgctatggttgtctaattttattgaacacaagcattaa

SEQ ID NO: 5086 - DNA, 1302 bp, Saccharomyces pastorianus
atgacttacggcggcagagatcaacaatataacaagactaacttcaattccagaggtggtgacttccgcggtgaaagaagctccgacagaaactcctacaatgacagaccacaaggtggaaactttcgtgggggtttcaacggtggtcgctccaactacaaccaacctcaagagttggtcagaccaaactgggatgtagaattacaaaacctgccaactttcgaaaagaacttttacgttgaacatgaaacagtccgtgacaggtctgatgaagaaattgctcaattcagaaaggaaaacgaaatgaccatttccggtcacgacatcccaaagccaatcactactttcgacgaagctggtttcccagattatgtcttgagtgaagttaaggctgaaggtttcgctaagccaactggtattcaatgtcaaggttggccaatggctttatctggtagagatatggttggtattgctgccactggttccggtaagactctatcttactgtttgcctggtattgttcatatcaacgctcaaccattgttggctccaggtgatggtccaatcgttttggttttgtctccaacaagagaattagctgttcaaattcaaacagaatgttctaaatttggtcaaagttccagaattagaaacacctgtgtttacggtggtgttcctaaaagtcaacaaatcagagatctatcccgtggttctgaaattgtcattgccactccaggtagattgatcgatatgttggaaattggtaagactaacttgaaaagagttacctacctggttcttgacgaagctgatagaatgttggatatgggttttgaacctcaaatcagaaagattgttgaccaaattagacctgatagacaaactctaatgtggtctgcaacttggccaaaggaagttaagcaattggctgctgactacttaaacgacccaattcaagttcaagttggttctctagaattagccgcttctcacactattactcaattagttgaagttgtttccgagttcgaaaagagagaccgtttgaacaaacatttggaagccgcttctcaagacgacgaatacaagactctaatctttgcttccacaaagagaatgtgtgacgatatcaccaagtatttgagagaagacggatggccagctttggctatacacggtgacaaagaccaaagagaacgtgattgggttttgcaagaattcagaaacggtggatcacctatcatggttgccacagatgtggctgccagaggtattggtatgttaatttttcattctttttga

SEQ ID NO: 5087 - DNA, 369 bp, Saccharomyces pastorianus
atgccaggtaacattgaagattatgttcacagaattggtagaactggtagagcaggtgctactggtactgctgtttctttcttcacagaagaaaacaaaggtttaggtagcaagttgatttccatcatgaaagaagctaaccaaatcattccacccgaattattgaagtacgacagaagatcttacggtggtcacccaagatacggtggtggccgtggtggccgtggtggttacggtggtggccgtagaggcggttatggtggtgccgtggtggttacggtggtggccgtggcggttacggtggtaacagaggccgttcaaactattgaggctaaacatctcactttgcactcctccgtctacaattaa

SEQ ID NO: 5088 - DNA, 342 bp, Saccharomyces pastorianus
atgtcggcgtcagatccggcttcaaaggcattcataaatgtccaattcatttcttctccgttagttagaaaagatgtattaccattcatcgtaattctccataccctcttttcaaatggcagattttcaccttctgctttcaacacctcaaatttgtcaatagcgcaacttccgtttcttataaaggtacctttatcatcaatgggctctttagcactggagaatttcaataaattcataccaagagctgatttagtggctgcatgtgtaacaatcataatcgtcttgatttctggaaatcttttttctaccctttcgatgaaaatgggccagaacttatga

SEQ ID NO: 5089 - DNA, 675 bp, Saccharomyces pastorianus
atgcctccatcaataagcaaaaggataaaaactttgtcggtaagcaggccagtaatatatggtaataccgctaagaagatgggtagtgttaaaccaccaaatgcccccgctgaacacactcatttgtggacaatctttgtaagaggtccacagaatgaagatatatcttacattatcaagaaggtcgtttttaaactccatgacacctatccaaaccctttaagatctatagaggcgcctccgtttgaactgactgaaaccggttggggtgaatttgatataaacatcaagatatattttgtggaggaagccaacgagaaattgttgaacttttaccatcgattacgacttcatccatatgctaatcccgctccaagtaccgacaatgaaaacgagaataacccaccaggccgtaacgctaaagacgcagaagttagttccgttttttttgatgaaattgtgtttaatgaaccaaatgaagaattttttaaaattctaatgagccgaccaggaaatgtcttaccttcaaacaagaccgatgattgtgtgtactccaaacaattggaacaggaagaaatcgacaagatagatattggcatagaaaaggttgatagggaaataaatgaattgaagcaaaagctagaaagcctagtaaaagaagaggctactcaataa

SEQ ID NO: 5090 - DNA, 1776 bp, Saccharomyces pastorianus
atgcttaaagacccatctcctaagtacaacccgttcaaggctcccaagatgtccagtaggcaatggccggacaaccaaatcacgaaggctccccgttggttgtcgaccgatttaagagacggtaaccagtcgctaccggaccccatgtcagttgagcagaagaaggaatacttccacaagctggtcaacatagggttcaaagaaattgaagtttccttcccatctgcatcgcagacggatttcgacttcactaggtacgccgtggagaacgctccagacgatgttagcattcaatgtcttgttcaatccagagagcatttgattaagagaactgtcgaggcattgtccggtgctaagagggccaccatacatacctatttggctacaagcgacatgttccgcgaaatcgtgttcaacatgtccagagaggaagccatttccaaagccgttgaggccaccaaactggtcaggaaactaactaaggatgacccttcacaacaagctacccgttggacatatgaattctcccctgaatgtttcagtgatactcctggtgaatttgccgttgagatttgtgaagctgtgaagaatgcgtgggaacccactgaggagaacccaattattttcaacctgcctgccaccgtggaagtagcctcaccaaacatttatgctgaccaaattgaatacttctctactcatatcactgaacgtgaaaaagtttgcatatccacacactgtcacaacgaccgtggttgcggtgttgcagccacagaactgggaattcttgccggtgctgatcgtgtagaaggttgtctctttggtaatggtgaacgtaccggtaacgtcgatttagtcactgtggccatgaacatgtacactcacggtgtcccccctaagttggatttctcagacttaacttccgtcctagacgtggttgaacgttgtaacaagatccctgtgtctcaaagagctccatacggtggtgacctggttgtctgtgctttctccggctcccaccaagatgccatcaagaagggtttcaatgtgcaaaacaagaagcgtgctcgaggtgagacgcaatggagaatcccttacctaccactagatccaaaggatattggccgtgattacgaagctgtcatcagagtcaactcccaatccggtaaaggtggtgccgcttgggtcatcttaagatccctaggcttagatctcccaagaaacatgcaaatcgaattctccagcaccgttcaagacagtgccgattccttgggcagagaactgaaatcagacgaaatatccaagttgttcaaagaagcttacaattacaacgatgaacagtaccaatctatcagcttagtcaactacaatgtagagaagttcggtaccgaacgcagagtgtttacaggtcaagtcaaaatcgatgaccaaatcgtcgatatcgaaggtacaggtaacggtccaatctcttctctagtcgatgctctatccaacttgttgaatgtaaggttcgctgtggcaaactacacggaacattccctagggtctggttccgccacccaagccgcttcctacatccacttatcctacagacgcaatgcagacaatgaaaaagcttacaaatggggtgtcggtgtctcagaagatgtcggcgactcttcagtaagagctatctttgctaccatcaacaacattattcactccggtgacgtgtctattccctctgtggctgacgctaaggcggagaataaaagtgctgcagcatcgggctcagcatag

SEQ ID NO: 5091 - DNA, 1230 bp, Saccharomyces pastorianus
atgtcgtccatagaccatggtgctttcacaaacgtagatatcacgtcaagtgagaataatgctgccagcggcaacggcgtagatccgctatctcacctattacgtagaacaactcatacaccgagccgctcttctcctttgagtaatgttgtgtccgctcaaaacacgtccaaacagcgacaaccggacggtaaaatcaacaatagcgacggttcaagtacggtccctaatataaccgttcctgactactccattattcctacatccgtgttggtaacgctgttgccaagagttaatgtccccaagggtgcgtacaactccttggtggcagcaggatttgataatgaccaaattgacgctattgccgctataatggcttaccatcatcaaaaaaaaacaagggaaaatagcagcagcaatcttaacaataatggtaacactagtaccaaccaagaggcgccccttctgaaaaacataaacgaacttttaaatgtcctgataccgtcttcctctaccgacatggccgcaacctcttcctcttcctcttcatcgtcgtcctcctcttcctcttccaatggacacggtgtagtagcagaagcctcttttctgagctctattttggaactaggtcttaaccatccgaaaagtaataatattcacaacgacagacagtctacgcgaaatgaacgtaagaattcaagggaacggaacaataataacgactacagtaataatgataatgcagcttataattcaagtcttaaccacagcaatgaaatcaccaagataagatctgaaccaacgttaaatgcaagcgctcctactcgcaaggacaacgccttgaaaagatcccattcaggtgatttgaacgaaagaaaatcgtacattaaagccaaatattctgatgacgaggacgacgaatacggtgacgccgacctccgtaaacataaaaagagacaacagatcaagaaagagctagaggatgacgatgaagacttgctaatacaatccaacaaatcacatcagaggaagaagttaaaggaaaaggaattagagtcatcaatacacgagttaagtgaaattgcagcatctttacaaaaacgaattcacaccttagaaacagaaaacaaattattaaagaatttggtgctaagtagtggtgaaactgaaggtatcaaaaaagctgaaagcctgaagaagcaaatccttgaacaagttcaaaaagaataa

SEQ ID NO: 5092 - DNA, 624 bp, Saccharomyces pastorianus
atgaaacaggagcatccccgtgaaggcgactcgtacaacgccgagtttataaacctcttcgggaaggacaccgcagcgcacggcagcagcagcaacaacaccgctagcagcaacggcatgggaagctctcacccgctggaccagtttgtagcaacagcctcgtcgtcgtcgtcgctggcggttggaaccgccaatacacagcccttgcttggcgatgttggcgccaggggcagtagcaacttgtatgaccatgcggtcacgccggaaatactgctggaacagctggcttacgtcgacaatttcataccttccctcgacaacgagttctctaatgtcgactggaacgtcaacaccactcacaacaacataaacagcaatggcacgagcactttcaacaccataaatgcgaatcctttcgatttagacgagcagctcgccatcgagttgagtgcatttgctgatgattcgtttatcttcccggatgaagataagcccagcaacaacaacaacaataacaacaataacaacaataacaacaataacaataataatgacaacaccgctgatgaagtgccgcatgcgaaccttttaagcaataacaggcagagaaccctcattttttga

SEQ ID NO: 5093 - DNA, 1002 bp, Saccharomyces pastorianus
atgaaacgtcgtgagttttgcccgctttcaagagatatttctatacgcgttttaaatactattctgtcagacaatgatccagaagaggcattacaagaagtttatgaatacttggaagacatcaggaataaagtggaggccaacaatatcagaattgataaatataaaattaatacgaggctttcaaaggatcccaaggcttatcctggtggtaaaaatatgcctgcagttcaagtagctctaagaatgcgcaaatctggtagagtggttaaagcaggttctgtcatcacgtttgttattactaaacaagacgaatcaggagatgatgaaaacacacccgcactctctgtggctgaacgtgcttatgcgttgaatgaagtgatgattaagggcaataatttaataccggacccacaatattatcttgagaaacagatttttgcacctgtagaaagattgctggaaagaattgacagttttaatgttgtacgtttaagtgaagcacttggtctagacagcaagaagtacatgaaaagagaaggtgtcaataataatggggatgatattaataacctgcaacctttggaaacaacgatcacagatgttgaaaggtttaaagataccgtaatactagaattaacctgtccatcatgcgatattcagtttccatttggtggcattgtatcctcgaatcattatcgaatgtcgtataatggtatccaatgtaagcactgtgaacagtcctttacccttcttcaattaactagtcagatagagcattctattagggcacacatttcattatattatgccggatggttacagtgtgatgacactacatgcggtattgttacaagacaactttctgtttttggtaaacgttgcttaaatgaaggctgcacaggtgtcatgagatacaagtatacagataagcagctgtacaatcaacttttatacttcgattccttattcaattgtgaaaagaataaaagcaagaattga

SEQ ID NO: 5094 - DNA, 828 bp, Saccharomyces pastorianus
atgaccatggctttacaagaaaatattaccaattgtatgatttcagcagaagtatcttatagaattcaattattgtcattaaccaaacaattgacgaatctagctggtaacgcttgggctcaaactttaggcggtacaagggccggtagaaatgagtatattttgttgcatgagttctcaagaaacggcttcattgtaccggataaagaaggtagcagggatagggctcagagacaaaagcaaaacgatgaaaactcggacgctccaactaatcctaagaaggcgaagtatcaaggtggtttggtttttgagcctgagaaaggtctgcataagaattacgtcttggttatggatttcaattctttgtatccatctatcattcaagagttcaacatttgttttaccaccgtggatagaaataaagaagatatcaacgagttacccaatgtacctccttcagaggtgagccaaggtgtcctaccaaggttattagccaacttagttgatcgccgtcgtgaagttaagaaggtgatgaaaactgaaactgaccctcataaacgagttcaatgtgatattcgtcagcaagctcttaagctgactgctaactctatgtacggttgtttgggttacgttaatagtagattttacgccaagccgcttgccatgttggtcacaaataagggtcgtgagattttaatgaatacaagacaactagcagaaagtatgaatcttctggttgtttatggtgatacagactctgttatgatagatactgggtgtgataattatgcagacgcgattaaattggtttgggcttcaaaaagttag

SEQ ID NO: 5095 - DNA, 2235 bp, Saccharomyces pastorianus
atgtcgtctaaaagtgagaaactagaaaaattgaggaagttacaagctgctagaaatggtacatctgtcgatgattacgaagacgccgaagcagatggtgatagattgtatgacgaggtcgatgaaaaggagtatatgacaagaaaacgtcaggaattgctgcatgacgattttgttgtagacgacgatggagtgggttacgtggaccgaggtgtcgaagaagattggagagaaaatggcaacgaattcagtgacgaagacgatgagcacagcggcaatcacaccagcaaagacgttaaaaggaagaaaaccgcaaaaaaagcgaaagaccaccctattacggatatgctacgaacccaacattctaagtcgacactactggcgcacgccaagaaatctcagaagaaaaatatctccattgatgaatttgatgacattcttggagaattcgaatccggtaaagtagaaaaaccaagaatctcattcccctccaaattaagggctaatttgaattcttcaccatccattgcattcaaatcatcggtgaaaagagttaatgacctcgacaattcaaatgatgatgccactagcgctaaaaaggttaaaattgatccagacacgagcactgaaaaatatttagatatcgattcttcacctctgaaatcgcaaagcagaaaacagcgttacaccaacgatgtacaagatttattggatgatgtggagaattctcccgtaacaaataataagaaacaagaaaaatcagaagatttgctagttggtagtccaccgtctacgcaaagcttggctgatgatgatgacagtgatgatgatattatactaaagagaaggaccatgagaagcgtcacggcaaccaaacgtgttaatttagattcaagaagcaatccttcaacttcgccattcgtcacggcaccagggacaccgattggtgttaatgctccaactccaagcagaccaccacgagttaacatagatactaccacgctttctgttagggtcaagaagaaagatgtagtagatcctgaaactgatactttccagatgttttggttagatttctgcgaagttaataatactctaattctatttggtaaagtgaagctcaaggatgacaaatgcgtatcggccatggttcaagttaatggtctatgcagagaattatttttcctgccaagagagggtaaaacagcggctgatgtccatgaggaaatcgttcctttattgatggataaatacggattagataatattcgtgccaaacctcaaaaaatgaaatactcctttgagcttcatgacatcccgcctgaaagtgagtatctaaaagttttactaccataccagacaccaaagtctagtcgagacactattccaccagacttatcaagtgacacattttatcatgtcttcggtgggaacgctaatatatttgagagttttgtcgttcagaacaaaattatgggaccatgttggctagagataaagggagcagatttcaacgcagttcataatgcctctcattgtgcgattgaagtttccgtagataaaccgcaaaatatcattcccaacacaacgaagacgatgccggatttgaggtgtctttctttatcggttcaaacattaatgaatccaaaagaaaataagcaagaaattgtcgcgataactttgtcatcttacagaaacatctcgttagattcacccattccagagaatattaaaccagatgacgtgtgtactttggtaaggccgcctcaatcaacaagttttccactaggattagcagcattggcaaagcagaaactgcctggtcaagttaggttatttaacaatgaaaaggcaatgctgtcttgtttctgtgccatgctaaaaatagaagaccccgatgttattattggtcatcgtttacagactgtatatctggatgttttagcccatagaatgcacgaccttaacattccaacgttcagttctattggtcgtcgtctaagaagaacttggccggaaaaatttggcagaggcaattcgagcatgaatcatttcttcatcagcgacatctgctctggtagattaatatgtgatatcgccaatgaaatgggtcaatcattgacacctaaatgtcagagttgggatctttcagaaatgtatcaagtgacatgtgaaaaggaacataaagcattggatatcaattatcaaaatcctcaataccacaaacgatgttaa

SEQ ID NO: 5096 - DNA, 189 bp, Saccharomyces pastorianus
atggttttcccaaccgaaattgtcggaaagagagttagatatttggtcggtggtaacaagatccaaaaggtcttattggactccaaggacgttcaacaaattgactacaaattggaatctttccaagctgtttacaacaagttgactggtaagcaaattgtctttgaaattccaagtcagactaactaa

SEQ ID NO: 5097 - DNA, 153 bp, Saccharomyces pastorianus
atgtcttctgtccaatccaaaattttgtcccaagctccaagtgagttggaattacaagtcgccaaggccttcattgatctagaaggctcttccccagaattaaaggctgaattgagaccattgcaaatcaaatctatcagagaagtatgttaa

SEQ ID NO: 5098 - DNA, 441 bp, Saccharomyces pastorianus
atgcaacaattcgtccctggctccttcttcattaacagactagttctcgtagctacttcgaagacatcatcaacaccttccccagtcaatgcactacactccatgtattttttggcaccaatggctctcgccacttgttttgcatcttcggcgggaaccatttcgtctacagcattttctttgatatgggcctcctgcctcaaatccttcttcaaacccacaagaacgatcggcgcgtcggggcaatatcgtaacgcctcgtcagcccattttgtccttgcgttgattagggactcagagttatccacggcaaacccaatcaatattatgtctgctttcgagtatgaaaatggacgaagacgttcatattcttcttgccccgctgtatcccaaagagttaaggacacttttattccgtctaccctgcagtcggtaacataa

SEQ ID NO: 5099 - DNA, 564 bp, Saccharomyces pastorianus
atggcagcacaattttccgtatatcctgtagatactttgaaattcagaatgcaatgtgctcccttggacaccaaactaaagggaaacaaactgttatttcagacggcgaaggatatgttccgggaaggtgggttcagattattctacagaggtgttacagttggtatcgtgggtatattcccatatgctgcattagatttggggactttttcagccttgaaaaaatggtatatcgctaagcaggcgaaggcattaaacttaccgcaagaccaggtcacattgagcaatttggttgtactaccgatgggtgcatttagcgggactgtgggggcttccgttgtgtatccaattaaccttttgagaacaagattgcaagcgcaaggaacatacgctcatccgtatgtatataacggctttagagacgtactagcgaagacacttgaaagggaaggttatcaaggcttattcaaagggttggttcccactctagcgaaagtctgcccggcggtctccatcagctacttatgttacgaaaacctgaaaaaattcatgaagctagaataa

SEQ ID NO: 5100 - DNA, 186 bp, Saccharomyces pastorianus
atgtgctcccttggacaccaaactaaagggaaacaaactgttatttcagacggcgaaggatatgttccgggaaggtgggttcagattattctacagaggtgttacagttggtatcgtgggtatattcccatatgctgcattagatttggggactttttcagccttgaaaaaatggtatatcgctaa

SEQ ID NO: 5101 - DNA, 1068 bp, Saccharomyces pastorianus
atgctgttgaaaaattgtgagactgacaagcagcgagatatacggtatgcgtgtttgttcaaggaactagatgtgaaaggaaatggtcaagtcactctggataatctagtaaatgctttcgagaagaacgaccatcccctgaagggtaatgatgaggccattcggatgctatttactgcaatggatgttaacaaggattcggttgttgactggagtgacttcaagaagtacgcctccaaggctgaatctcaaatttggaatggttttcaaaggatagatttagaccatgacggtaggattggtatcaacgaaattaataggtacttgtctgatttggataaacagaacatatgcaataatgaacccagcaaagaaattacaagtgaaaagataaacaaattctcgaggttcttcaaatgggcattcttaaagaagaaaaacaatattgaggcacaggattctgcttcccgcaacgatggtaacgataacgatcgtccgaagcaaccaactagttcagatccatacgttacatatgatcaatggagagatttcttattgctgataccgagaaagcaaggttctagacttcataccgcgtattcttatttttatttatttaatgaagatgttgacctatcttcagaaggtgatgttactctgattaatgatttcattcgtggatttggattttttattgctggtggtatatcaggtgtcatttcaaggacatgtaccgcaccatttgatagactaaaagtatttcttattgcaagaacagatctatcttcgactttattaaattcaaagacaaatttacttgccaaaaaccccaacgctgacataaataagatatcatcgcccttggcgaaggcagttagaagcctgtataaacagggcggaataaaagcattttacgttggaaatggtttgaacgtcatcaaggtgttccccgaaagctcaattaagtttggttcttttgaaatcaccaaaaaaataatgaccaggcttgaaggctgccacgacacgaaagatctttcaagttctccacttatattgctggtggtttag

SEQ ID NO: 5102 - DNA, 2676 bp, Saccharomyces pastorianus
atgacccgaattaaccagataaacgacatagatgttcaccgaattacatctggacaggttatcaccgatttaacaacagccgtgaaagagctcgttgataatagtatagatgccaatgcaagccagattgaaattacattcaaggactatggcctcgaatctattgaatgttcagataatggcgatggtatagatccttcaaactatgaatttttagctttaaaacattacacttcaaaaatttcaaaatttaaagacgtcgctaaagtggagacattaggatttagaggagaagcattatcctccttatgcgccatagcaaacttgagcgtcgtaacaacgaacctgccaccaagggcagacagattggaatacaatatggctggccatgtctcatcaaagacaacaacgtcaagaaacaaggggaccacaatacaggtttcacacttatttcataacctgcctgttaggcaaaaagaatttgccagaactttcaaaagacagttcaccaagtgcctcaccgttttgcaaggttatgcagttatcaattctggcatcaaactctccgtttggaatgtaacatcaaagggtaaaaaaaatctaatcctatcaacaatgagaaattcaagcatgaaaaaaaacatctcttctgtctttggtgcaaatggtgtgcgaggactcgaagaggttgatttagcccttgatttaaaccctttcaagcaaggagtgcttaggaaatacactgacgatcctgatttcttagatctcgactataagatacaagttaaaggctatatatcgcaaaattcttttggatgtggaagaaattctaaagacagacaattcgtttatgtcaacaaaaggccagtggagtaccatacctttttgaaatgttgcaatgaagtttacagaacatttaataacgttcaatttccagttatttttttgaacttagaattgccgactaacttggttgatgtgaatgtcactccagataaaagagtaatactactacataatgaacaagtggtcattgatgtgttcaaggaaaatctgattaattactacaatgggcaggagttggcccttcccaaaagaatgtgttcccaaccagaacagcaaactccgaaaagacatagaattgaattcaggacccacgttgctaatgatgaaaacatgacgcacaaaaccattaatcacagctatggtgatactggaaacaaatatagtgagtctactcttacatgccgcgataatgcacttgaagatgctgatcccttcacaaatactgctgataaaagcaaagatacgcaactaacctctataatggactacaagcatgaaattctgaacggtgaccccggttcagagtgtgacgcttctgttgaatcaccgcttgccttgaatgaggacaactcaagtacaccggctaagaaatcatcaagcgccagtgcgaaatttgacgatgttagtagtataaacctaggggaattttccaatcccgagcttcaacatttggttaacacaactaaaacatctaactctgaaaacgttattgaagagcgtgtttacttcgaaattgatggtgaaaagtttcaagaaaaagcaacgctgtcacaagataatggattggttttcgtggatgatggagctcaccgacagccagataaatgctgccatcatgaaagacagggtagtgctgactcggaacaagatgacgagaacgattcagcatatgcacagattgaacctgtcgaaatcaatgttagaacgcaattgagaagctcaagatcgctcaattcaaaatctaatcgctcaatatccaaagataactaccggtcattaagtgatggactatcacacagaaggctccaagacgaaataatagagtttaattcaagcacaaaaggacttagggaaatgataaaaaacgggagaatgatgagtagcattataaataaaagaagatcacaatcacacaaaaacttgattaaaaaggaaagagaactggagaactttgaagaaggggagaagtacttgacactaactgtttccaaagaagacttcaagaagatggagatagtcggacagtttaatttgggattcattatagtaaccagaaaaataggagataagtatgacctgtttattgttgaccagcatgcaagtgatgaaaagtataattttgaaacactacaaactgtaacagttttcaggtcacaaaaacttattataccacagccagtagatttaagtgttattgatgaacttacagttctagacaatcttcctgtttttgagaagaatgggtttaaactgaaaattgatgaagaggaagagtttggctcgaggataaaactattaagtttacctacgtccaaacaaacactttttgatttggatgacttcaatgaactaatacatttggtcaaggaagacggtggtctgagaagagacagcatcaggtgctccaagattcgatcgatgtttgctatgcgggcatgtagaagtagcataatgataggtaagccactgaacaggaagacaatgtctaaagttgtccataatctcagtgggttagacaagccatggaattgtccccacgggcgtcctacaatgagacatttgatggagttgcgtgattggaactcattctcgaaagactataaaatatga

SEQ ID NO: 5103 - DNA, 1089 bp, Saccharomyces pastorianus
atggctaccagcatggctccccatgaaaacaagcattccaagtatgaccgagcgactttccagaagacgtacagctccatgaaaacgctgtctctgaaccacttgacggccaaacagcacatgctgatggccctgtgcagggacatatcccttctaccgccattgacgtacatcttcacttcgctgcgaaaggcctggagagtctctatgcgcaccagcatcaaactgtacgagccgcaatcgctgagggatgccttcacctatttctggcaaaagcttaacagcgcttatgacaactactcatcgtctgatggatcccgccaagaagctgcgagcgacaacagcaaggactcgctcttgttatctgcattgactaccgccagggcgtccgaataccttctctgttcgctttggtgtgtggtgtctctatacctctcgtatgccattctcgactctttaatggtccgctggatcgttaaatactccaccgtggccgccattttaagaatgttctctatgtctttgatcatagtcaccttagagcttctattgctctcgtctttatctccagagctcgactattttctgcatacctggatacttattagttgtgtgctaacggccgtgtacatttggcaaagctatctaacttctgatctaaaatattttagaaacagggaaggtgatgtacaagaggataccagcgcccgagaagagtcagacgacgacgacggcgacgtcgacgccgatgaagactcacatgtcgtggcagcggatgaagacgcaatcgacgtccttccctacgacgctctttcagatgatagtgacggtcggcttttgccagtcaacaggccctcgagttcgcattcgcaaagtcccagaagatccaagaaatcctctaagaaagcattcaagttcaccaccaagagaactatagatttatataaaatcaccgtgctctgtgtcgtccccgtgggactggctagttttatcacaatgctcggtttacttcgaaacctattcatccaacgactggatgtagagcaattagaaagaatactgcatgaaatgcatccctcctccgcataa

SEQ ID NO: 5104 - DNA, 1092 bp, Saccharomyces pastorianus
atgagcatgaactctatagataatgagacttccaaaagcaccagtccaaattttgaaaatgcgggaagtagaaagtcctcccttcctcagaaggagtctctgtttggaaggccaagatcttataaaaacgatcaaaatgggcaattatcgctttctaaggcatcttccagaaaggggaagaataaaatcttcttcagtagtgaagatgaagattccgattgggacagtgtctcagatgattcagaattttatgcagacgaagatgacgaggattatgacgactataatgaggaagaagcggaccaatactatagaagacaatgggacaaacttttattcgcgaaaaaccaacaaaaccttgactcaagaaaatcatctgtttcctcgactaacaccattaactcgaacacatctcacgatccggtacgaagaagtctactgagtggactattccttagtgaagcaaataacggtagcggcagcaacaaccacaataatgcgcataacgaatttaattctagaaacgcttcaccgataccccagctctctcatagtaataccggcagccagccacaacagaatctagcgaatgctaatggcatgaaacaacaaaagccctctttgaaaacaagcaatgtgacggcccttgcatcgttatctccgcaacagggaactaacattgggcggttgccgatggaaattcaaaaggactttaagagtaatagtggatccaatcacccgtatgaatctaatgctcccctaacggcgcagaccatcttacccaccgccttatctacacacatgttcttgccaaataatattcaccaacaacgaatggcgatggccactggaatgaatcagcggcatcgcttcccgagacgtgagtcgatggatattccatccaaaaataggaacacaggatttttaaagacaagaatggaaatttctgaagaggagaagatggtacgtaccatatcaaggttcggcaacacaaatgctgcagacaataatgagaacggtgatgacggtgccgcgaagcagagtaaacaagaaacgctggaggccaccgaagatagtacagcacgaatatga

SEQ ID NO: 5105 - DNA, 522 bp, Saccharomyces pastorianus
atgtcacgagagacattcgacataccgaacataggtagcaacaagttcttaaaagtcacacctaatttatttacaccagaacgattaaatctatttgatgatgtcgacctttatcttacgttaataaaggcatccaagtgtgttgaacaaggagaaagactgcacaatataagttggagaatcttgaataaagctcttttgaaggaacataatatcaatcgacccaaaaagagagatggtgtgaaaaacatttactatgtcctaaacccaaacaacaagcagcaaataaaacctaaatctgttgctgtaaaacagtcaccattaaaaaatgccagtgtacctcccacaacagtaaagcagaacgttttggctcgacccatgacatcaccagccattgcacagggtgcccacgatagatacgtggataactccaatattacaaacaacgatgtgaaaaatgatttcatttcaagcagacaatactcaaagacctgcaggcatgcaagcttgcactgccgtcgt

SEQ ID NO: 5106 - DNA, 555 bp, Saccharomyces pastorianus
atgggtcgtttggcctccactattgccaagcaactattgaacggtcaaaagattgttgtcgtcagaactgaagctttgaacatttctggtgaatttttcagaaacaagttaaagtaccacgactacttgagaaaggctactcgtttcaacaagacccgtggtccattccatttcagagctccatctagaattctttacaaggctatccgtggtatggtttcccacaagaccgctcgtggtaaggctgccatggaacgtttaaaggtctttgaaggtatcccacctccatacgacaagaagaagagagttgttgttcctcaagctttgagagttttgagattgaagccaggtagaaagttcacgactttggctaaattatcctcttctgttggttggaaatacgaagacgttgttgccaaattagaagacaagagaaaggtttcatccgctgaatactacgctaagaagagagctttcgccaagaaggtctccgctgcctctgctgctgcttctgaatccgacgttgctaagcaattagcttctttcggttactaa

SEQ ID NO: 5107 - DNA, 1515 bp, Saccharomyces pastorianus
  modified_base (19)..(19): a, c, g, t, unknown, or other
  modified_base (47)..(47): a, c, g, t, unknown, or other
atggaaagctcaatttcgngacggatatgtcaatgttcagggacttngtctaaactagatcactcgcaaccaataaccgccgaaacgggtgcaccatacacgttgctaagttacggtcagaaatgggggatggtagcagtcctaaccatgtgcggattttggtcttcattggggtctccgatctattatcctgccttaagacaattagagaaggagttcaatgtggatgaaaacatgatcaacataaccgtggttgtgtatttaatgtttcaaggtatagcacccacggtttgcggtgggctagcagattgttatggtcgtagacctatcattctaggtggtatgttagtgtatgttgtggcatccattgggctagcacgtgctccatcatacggtgttatcatgtttttgagatgtgtccagagtattggtatttctcccacaatcgctattagttccggagttgtcggggatttcactttaaagcatgaacgaggtacttttgtcggtgccacatctgggttcgtcttacttggccaatgctttggtagtcttatcggtgccgtcctgaccgcaaggtgggattggagatctattttttggtttttgaccattggttgtggcacatgttttattattgcattccttattctaccggaaacaaaaaggaccatcgcaggtaatctttccgtcagacctaaaaggtttattaacagagccccaattttccttttgggccctgtaaagagaagattcaggtatgataatccggattatgagacactggatcccactattcccaaactagatttgacctctgccatgaaaattcttgcgctaccagaaattattttgtctttgttcccatcagggctgctatttgccatgtggactttgatgctgtcgtctatttcatcggggttatcagtggggccatataactatcgtttggtgattattggtgtctgttatctacctggtggtattggtgggttattgggttcctttttcacagggagagtcattgacatgtactttaagagaaagttgaagaaatttgaagaagacaaggctaacggctcaattccacaagatgctgaaatcaacatgttcagggtccgtttagtatgtcttctaccccaaaatttcttagctgttatagcataccttttgttcggctggagtatagacaagggatggagaatcgagtccgttttaatcacttcatttgtttgttcatactgtgccatgagtacactatcaacatcaactacgttattggtggatttatatccaaccaaatcatctacagccagtagttgtttcaactttgttagatgtagtttgagtaccatcttcatggggtgtttcgccaaaatgaaagcctcaatgactgtgggtggtaccttcacattcttatgtgcgttggtgttttgctttaacttcttgatgttcattccaatgaaatacggtatgaaatggagagatgacagattgctgaaacgtcaaacataa

SEQ ID NO: 5108 - DNA, 393 bp, Saccharomyces pastorianus
atggatttaacaggaaagtttttatacgatggtcttgtagtggcaactacattacatttaccaacagtggtaccgaagttagccgagaaggttcatggttcaaggcctattgtatgttatggccaattcaaagagaccttgttggaactggctcatactttatactctgatttgaggtttttagcgccatccattttggaggtcagatgtagaccataccaaagcataagaggaaagttacatcccttaatgaccatgaaaggtggtggtggataccttatgtggtgtcacaaggttatacctgcccctgaaccgatctcagaagctacggtggaagtcgagtctaccagtgctgctattggagaacacgatgctaaaaagcaaaaagtatag

SEQ ID NO: 5109 - DNA, 612 bp, Saccharomyces pastorianus
atggaggatgaatacaaagatattgtagaactagagggcttacttttagagcatgacccaaacttcactgaagaagatactctagaggctcagtatgactggagaaattctatacttcatctgtttttgagaggtcctaggcctcacgatagtgagaatattcatgaacagcaccaaatgcatttgaatgtggaacgtataagggtacctgaagtcgttttccaaccaacattgggtggacaagatcaagcaggtatctgtgaactttcagaaacgattttactgaaaaaatttggctctcaaccaggcaaattaagttccacttctctagacatggtgaataatgtatttataacaggtggcaactccaaagttcctggattaagagaacgtatcgtaagagagttcactgaatttcttcccgttggtaccaatttctcagtgaacatgtcttctgatccttcattagatgcctggaaaggaatggcagctttggcacaggacaaagaggagtacaagaaaacagtaataagtaagaaagaatatgaggagtatggtcctgactacataaaagaacataaactagggaatatgaagtatttcgaagactag

SEQ ID NO: 5110 - DNA, 1464 bp, Saccharomyces pastorianus
atgtccagcagagacgcttctttgactcctctcaaagcaatagtcatagacgaccctccgttgagacaggcaccagaaccatttgatgatgattcagcatacgatccacgcctacccattgctattgattttgggtccagcaaattaagagctgggtttgtcaatcaagctgcccccacccatatctttcctaatgttctaaccaaattcagagatagaaaattaaacaaaaatttcacttttgttggtaatgacactttgttagaccaagctgttcgttcgcaatctagaagtccatttgatggacccttcgtgactaattggaatttcaccgaggaaatcatggattacaccttccatcatttaggcgtatcgccaaataatggaatttgtaatcctatattgcttaccgagaggatggccaccgttcaatcacaaagagcgaattggtaccagctcatgtttgaaacatacaacgttccaggcgttacttttggaatagacagtttgtatggtttttataaccaaaatacaagcggaaacaagacaggcttagtcattgattgtggccatgaggatactaatgtaattcccgtagtcgatggtacaggtgtcttaacagacgcaaagaggatcaactggggtggccgtcaggcagtcgactatttaagcgatctaatggctctgaaatatccatactttccaacaaagctatcttatttacagtacgagacgatgtaccaagactattgtcgcgtttcaccaaattatgatgaggatatcaaaaacatccttactttagacagtctagacacaaacgatgtggtggtggaagcgcctttcacggagattcttcagcctcaaaagacagaggaagaattgcgaattcaagccgaaaagagaagagaaactgggaaacgtttacaagaacaggcacgattgaaaagaatggaaaaattagttcaaaagcaagaagaatttgactatttttcgaaggtaagggatcagctaattgacgaacctaaaaagaaaatactgtcggtcctacaaaacgctggttttgatgacgaacgtgatttcaaaaagtatcttcatggtttagaacaatctttgaaaaaggcccaaatggttgaagcagaagatgatagccacttagaggaaatgaatgacgataaaacaattcagaaatttgaactacttgatatcgcagacgaaaacctgactgaagaccaaataaaggaaaaaagaaaacaaagatttttgaaggccagtcaggatgctagacataaagctagggaggaaaaagaaagggtcgctaaagaagaagaggagaaaagactaaaagagcagcaatggcgtcaaacggatctaaatggttggataaaggacaaaagattgaagcttaataaactaataaagagaagaaaagaaaagttaaagttacgtgacgaagatgacaggaca

SEQ ID NO: 5111 - DNA, 429 bp, Saccharomyces pastorianus
atggctcacgaaggtgttgttggtggtgctgaatttggctacgacatcagcgccggctccatctcccgttacgccatggctctaagttacttcgccaaggactactccttgggcgctactttgaacaacgaccaaataaccactgttgatttcttccaaaacgtcaacgccttcctacaagtcggtgccaaagccaccatgaaccgcaagctgcctaacgccaatgtcaacatcgaattcgccaccagatacttgcctgacgcctcttcccaagtcaaggccaaggtctccgactccggtatcgttactttggcttacaagcaattgttgagaccaggtgttactttgggtgttggttcctctttcgatgctttgaagttgtctgaaccagtccacaagctaggttggtctttatccttcgatgcttga

SEQ ID NO: 5112 - DNA, 282 bp, Saccharomyces pastorianus
atgtcccccccagtctacagcgatatctccagaaatatcaacgatctattaaacaaggacttctaccatgccaccccagcagcatttgacgtacaaaccacaacttccaacggcatcaagtttgcattgaaggccaaacagccggtcaaggacggtccattgtccactgatgtggaggccaagctgaacgataagcaaactggtttgggtttgacccaaggctggtctaacacaaacaacttgaagacaaagttggagcttgctgacttgaccccgggttaa

SEQ ID NO: 5113 - DNA, 558 bp, Saccharomyces pastorianus
atgcatacggcttatttgcaaggcaagaaaatactagtccattgccaatgtggcgtatcaagatcagcatcattaattgtagcgtacatcatgcgatattatggcctgaccctgaatgatgcctacaacaagctgaaaatggtcgctaaagacataagccccaacatgggactcatctttcaactcatggaatggggggagatgttgtctaaaaactcgttagaggaagaaggagaggctattcgtatgcaacccgaagaagacgaaaccagcaacaacgaagcttcctcttccaccgcgaagtcctactcttctgtttcatacagaagtttccccatgctaatgaacccatcgtcgtcgccaaatgacagctccatcaactcttcggaggtcacgccaagaacccccgccactttgacgggagcaagaaccacgctggtcgaagaacaggatgaagaagacaagaagaggttgtctcaaacagcagacgcactagacccctccgttgatagcgagtctctatccaccgcatcggaacagatgatgctgctcccatag

SEQ ID NO: 5114 - DNA, 645 bp, Saccharomyces pastorianus
atgcaacttcattcaaataaacagcgtttggacagtaaaagtgacatagatttccggtcgaaatcaccgcgttctttgcaaaatagaaataccaaaaatttatctttagacatagcaacacttcatccgttaatggaattctcactgcaaagccagaatgatccaggttcagtaaagttcccatcgccgacgcctttgaatctgtccatgaagcccaaaaccaccatattggagaaattcccaacaaaaataagctcaagaccaataccaccaccgctacccttaaggcggagcgaggcttccatatacacactaccagcatctttgaaaagccggacagtttctccaaacttgtatacaaggacatctatggcgacatccatcgggaaacattcattatcatcgccggcatcatcattctcagaaaaaccccatctaaatagagttcattcgctatccgtgaagaccaaagatttgagattaaagggaattagagggcgatctcaaaccatttccggattagaagcctctaccccgacctctagcatatacgaaactgccctaggtaacagtgacctgaacaaattctctaatcaaaaaaacatgcaaacgacattgattttcccgaagaggagccagatttga

SEQ ID NO: 5115 - DNA, 1197 bp, Saccharomyces pastorianus
atgtcgaacgatttggaagactttgattctttactggaaaccaatttcgatgctaaacaatttggaaatgatttattgaaagttaccaataacatcaacactactactttagatctgaatacatctttaaaaaagctgaaatacgatcttcacgagatagattctagaatagaccaattggttaataacaaaccctcggagataatagacttgatgtatagaaatgaaaacgttaatttcactatagtcgatgaactgaaaccaagcttagaatatttaaacatgtcatatgacaggttaaaaacccaagttctagatccttatgaaagagctaggaaagtccaattggcactgagtaaagtttatcaaacatcctttcttcttcgaggtgctttggtgtacattcatttatcgaataaaataagtacgacgtccaatgtagcccaattaaatataccaacagctgtcaatctagcttcattgcactaccaattacaaataactctgaatgaaaatgaaaatttgaaatctttacagaaagtcaaattgctagatcaaaacattattactcccaacaagagagagctggtaacattcctgtccttacaagtgtcaaaagagtgtttgaactctattaagatcaaaacaaataaagaaacgatatctcagctagtccgttcattatttctactttcacctcaagaattcgtggctactataaataaaattattctttccaacgtcacaacaagctcgcagattctatcgagaactataaactctatcagagggttttccgaaacattcaaagaagttgtagagaaaagctataatatttacatcttagagacgatattgcgaaatatcaaaattgataataccaccacagccgcaaaacctacagctactaataagtcgcacctaggccatcttttatcagaatatactctaatgggaaataccaaatcaggctctggcacaccaagagatctgttttggaataaggttgcgtcatcttttagaaaagactttgaaatctcggtcaacagaggtggccctgtaggtaagtcactgctcaaaaataaagatttcatcattgatactataaggcagcatatgggtaaatcctgcgataatagcgattatcaaagctatttgaatttgatgttaaactcggtatctattatcgcaaaatga

SEQ ID NO: 5116 - DNA, 471 bp, Saccharomyces pastorianus
atgaaagtttcattgaaggagcctgaggaagaaatgattgaccaagaaaggcctaaagaatattactttgcaaactattctgaggttcaaaggcaacaatttctacagagcgctatagattacgatacgataatacaagaaaatgcaaagattcaagaggatgatctacgagtacttcataaatggtcgtactgccaaggtaaaataatgaatttgcacgaacacaatttggagatcgcatcacagcagcaaagggatctgaaaatcaaaaaaagaaggccaggccagaaacaacgtgtagctaaaaaattagctcttgaaagaaccaaagagcgtgatgccaaagctcgtgagataaagaaactgttaaagaaaaagtttcataagcgtggtggaaagaagaataagaaaaaagcaaccttaaacccactagttaacgctggcagcacccataaggttagggcaggatga

SEQ ID NO: 5117 - DNA, 1965 bp, Saccharomyces pastorianus
atgtcttaccagtggaacagcgcaagagcctccctagacctcaggaaaccacatcagcaattggcaggtgtgaagggctcggacccttccactttggcttatcagcagcagcagcagcagcagcaacaacatagccagaagatgcctctgtcgctgccttcatcgcttgcacagcggaactcgataccctaccccatcgatgccatcacttcagatcccaccatccaggcgcatttgagtgcgtatgaccaggatcgacagtactcggtgggcgttgctgcggcaagcagcaacataatatacccttccagctctaataatattccctcctctcaaactaataataacaacaatgaggccaccaacatgggctcattgaccgatacgtctattttgcctgtagcaagaacttcgctccaaactcaccagaaactgtataattctaaccaaagtgaccccagatcacctctggtgatactgatacccacttccgcgcaacccaccgagatactggctgctcggttctctgcctggagaagtgtcatccgcgccattgtggtgtatctgtctgaaactgcttccatacaggacgaaatcattaggcagcaactaagactgtcccatgctgtgcagttccctttctttagtattgaaaaccaataccaaccaacctccaatgaggacaagtccatgcagaagttttttctgccattgggcagtgggtccatacaggatttgcccacgatgttggccaaatatcatgagaatttggcctctttagcattgaagagttctaaagagttgaccagtgaaatcattccaagactagaagacttgagaagagacttattggttaagatcaaggaaataaagtctttgcaatcggacttcaaaaactcttgtagtaaagagttgcaacaaaccaaatatttgatgaaggccttcaatgaatccctgaaagactgtaaattaggcagcccgaagaatgaccctttcttaataaagttacaattggaaaaacaaattaaaagacagttggtcgaagaaaactatttacatgaggcatttgacaatttacaaaattcaggggctcagttggagaatgtcgttgtgatggaaatacaaaacgggttaaccagctatgcaagaatcattgggaaggaagctcaactggtatttgactctgtcatctccaaactagactccacactcttaaacaaaaacccaaatcttgaatgggataacttcattcagaaaaatacttccaatttcgtaccgccaaatttgccaatgaggaaattcaaagagatttcatacagcaaccaacacgacccattcactgtagaaatcaaatctggattcctagagaagagatcaaaattcttaaaatcatactcgcgtgggttttacgttctcaccccaagctttttacatgagttcaaaaccccagataggcacaagttttccgtcccgctaatgtctataccactagttgagtgcaccgtaactgaacattccaaaaaggcgaaatcagactccgaccaaggcaataacaaattcatactccggacgaattccaacgggttgatacacagaggccataactgggtattcaaagtggattcttatggcgatatgatggaatggtttgaaaatatcaaagccttatcaagcctacccaactacgatgacaaatgcaaatttgttaataaagttacgaaacaactcaaaactaaaaccaatgatgacgagagctctatgcaaaacataacggatgaccaacacacgagacctgatgacgtgagtagtagtttccccatgaactccatccctagattagacaatgtgacaatcacgaacaccacctcatccataccggagaccaatgattcacaattacaaaacagaattcctgaattttgtatcgaaaatgtagattctctaaggaaaatctaccccaagtaa

SEQ ID NO: 5118 - DNA, 636 bp, Saccharomyces pastorianus
atgctggctcgatcaagaagctggttgccatctggtttatttatatacaaatgcatatatccatatataggtagtgtgggtggacattccctgtgtagcacgccaatggaacatcccaactcaaagaagagctttggccagttgctcgcaaaaaagaccgcagtggtagatgcaaacaagacacaggtcaatatggactcagggactgccaaccggctgcggaagctgctacacagaaggaaaccccagtctccagtagtccaatctgcggtccaatgccgaataccaggccattacgtggatagccgagccacaccggccgctgggctcatacgcaatagcgtagcatcgccagcggtatccacgcttcacatcaacgaacggtacatccggtacgatatcaacaccaagcccttggtagtcgtgttggccatctccctcgtgtttctcggctgtctggtggtcctcaaggacatcatcctgcaatcctctcaaagcatcgtgagcgtggtcaaatggaagatcatcggggcacccttcgcaggttcccctcaaacaggcctgcttgtggggctcttgggcactttgttctcaccactttccgttgtctcatcgtggctgtccttcatcttttga

SEQ ID NO: 5119 - DNA, 1074 bp, Saccharomyces pastorianus
atggaatctccaaacatgacgtttgccactcctactttgattgcccacgacaagtccaatattgatgttatcgctcatgaactggctcattcttggtccggtaacctggtaaccaattgctcttggaaccatttttggttaaatgaaggctggaccgtttacctggaaagaaggattatcggtgccattcatggtgaacctacaagacattttagcgctcttattggttggagcgacttggaaaactccatcgagtccatgaagaaccctgaaagattttccactctggtgcaagatttgaacgatgacaccgatcctgacgacgccttctctactgttccatacgagaagggatttaacctattgttttatttagaaaatgttttgggtgggaaggctgaatttgatccgttcatcaaacactacttcaagaagtttgccaagaagtctctagatactttccagtttttggatactttatacgaattctttcctgaaaagaagggaattttggatgctgtcgactgggaaacttggctatataaaccaggcatgccaccaaagcctcacttcattaccgcattagctgacaatgtctaccaattggctgacaaatggattcaaatggcccaaaagttgaaaacttcagaagaattccggtccgaattcagcgccatcgacattaaagatttcaactcgaaccaattggtcttgtttttggaaactttgacacaaaatggtcactccacggaaaagccaaaggatttcgattgggccaaggcccctgtggcatccaaggttctgttagacatctaccaggacaagattgttaaatcccaaaacgctgaagtcgttttcaagatgtataaattccaaatctttgccaggctacaacaaacctacaaaaatttggctgactggttgggcaccgtgggcagaatgaagtttgttcgtcctggttacagactattaaactccgtagaccgtccgttggctcttgccactttcgacaaatttaaggacacgtaccatccaatctgtaaggcccttgtaaaacaggatctaggcctatga

SEQ ID NO: 5120 - DNA, 108 bp, Saccharomyces pastorianus
atgctcctattccccctccgcactcgtcattgtatcactatacaccagtgctcacttcggttgcaaggaaatcttactagaaaaaccagtattatcctacccacctaa

SEQ ID NO: 5121 - DNA, 477 bp, Saccharomyces pastorianus
atggaaaatatcaaaagcgagttccattcgtttcagtctaaactagcctctcttcgcacccctcaagaatttttcaatatcaagaaagtctccaaacctcaaaatttcggggaagtccaatccagagtggcttacaacctaaaatactactccagtaattacgggttgatcattggttgtttgagtatctacacattattgaccaatttattactactcttcgtcatcgctctggtcatatttggtattcttggtataaatagactaaatggcgaagacctggtgactccctttggttctttcaaaagcaatcaactatacaccggtttgatttgtgtggccgtaccaataggtttcttggcttcgccaatctccactttgttatggttgatcggtgcttctgccgtcagtgttttcggacatgcttccctgacggaaaagccaatcgaaactgtctttgacgaagaaactgtttga

SEQ ID NO: 5122 - DNA, 765 bp, Saccharomyces pastorianus
atgagtcggcagccttccccttacaagtttccaccaccgccctctgccaacggcttgccactccccactactacaaacgctcaaagaagagccaattctcccgccagaataggtgcatccgcagtggctgctttgactgagaacatttccataaaggaggaagacgtcgccacacgtatccctctaggtacaaggccacaagaatctccgttgaacaagaagcctgcctcacttcatagtcgcaatctctcgcttccaataggcaaatttaccaaccctaatatcccttcagcaatgacatctatactaagtttcaatagagaccagcagcaaccgcactcccaaacatccccacaacagcagcagcagcaaccacaacaacaaccacaagaccctcagacaagcagttctcaccctctactaaggaaacccggaatggttcagaaaaaacacaggcgtgcaagatccacgtcctcgttcggagtaatcgatttgagtatcattgatgaggccaaggaaaaacatctacaaaggtcgccatcccccatacgcttcaacacatcggtgacattgaccccacaggcccagccaaccgaagctcgtgcgaaggaacgaccaactctaccgcaaccaccacgtgaggcacgcgaactgcgcgatgacttggatgacagaacgtgtagtgaaagcagtagcaggaacgaaagccccgtcagaaccatcacaaaggacaactctgtaggcaagatcttgaatagcacttaa

SEQ ID NO: 5123 - DNA, 138 bp, Saccharomyces pastorianus
atgagtacttctaacagtcacagccagccagaaaagagtagcgatagcaatcataataatgcctgtaagaacaagtctctgctggagattatattcgggaccaatgtatcggaatgggaatttctgagaacgcattga

SEQ ID NO: 5124 - DNA, 1410 bp, Saccharomyces pastorianus
atgactaagttcatgcaatcaaccaaaaaaaaaatggaaacccatggagtcactaaaaccgccatggtcggcggtttggcatgtcaaaggaactcttttctttttgacgggttcaaaacggtggttgtatcctgcgaaccaaagaaagataaaaaaggcaaggccgaaggttatgacatcgaattacaagacaccattttggttcctgagggaggaggtcaaccgagcgattcaggcttgttgagaattgtaaagggaaacggtgattcatcgacaatcaacaaaagtgtacaggttccacatatttctcgttcaggtttacatgcaaaacatcacgtcaaggagcccattgagcctggtacaacggtggaaatagtagtagatgcagtaaagagaatggattacatgcagcaacacactggtcagcatttgttaagtgctattattgaacgcaaatatcaactaaagacaatatcttggtcaatgggtggtcttattactgagaaaaagtcaacattagaacccaatgactatttcaactatatcgagataaacagaaaattaacagaaggccaaataacagaaatatctgatgagatcaaccagtttattactaaatcacctcaagaaattactgtggtggaaagaattagtagcggcgtagatgaagttgatacatccaaaatacccgacgattatgacctgtcgaaaggtatactacgcacaattcagattggtgtcattgattctaatccatgctgcggaacgcatttagaatctacttctcagattggttccattctaattcttcccaaccagacaaccgtgagaggctcgaactcaaaggtttatttcatgtgcggaaaacgagtggctgactatgcaaactcagctaataaaactttgtcaaactccaaaagtttattaagctgttctgaatctcaagttccagaaaagatagaaatgcagggcaaaaaattgcaacaatcaaacaaaagagagcaatactggataaagaaattggcacacatagcgtctgaggagttgagaagttcactgaaagctagtgggaaaagaagagcttattttatggaagaagaattcggtacattagaactcttgttgcaaatttttaaggggatatctactcatttaaatggggaatttgaagcctacgagatcattttatgtggttatgaaaggcaaaccaatacgggttcgttgttaattctttctgaatctggtgagaaaatttcttctttggctagcaagctgggttcaatgctacaaaacctgaaaggcggtggtggtaagaaaggcggtaaatggcaaggtaaaatcacgtccatttcaaatgctgaattggctgccctaaccgattatttgactcatgaattcatagcccattga

SEQ ID NO: 5125 - DNA, 267 bp, Saccharomyces pastorianus
atgtttgtgagagaaccaagtgtggagacggtaacgattttcaaaggaactgggctacaattgtccaaagtgaacgggatagttgttttcccccaaaagtggaatcgaaggctttttgaacgagtggagtttatatccaatgacagaatcattgacgttgtgattaacgaagggttttatcgtggattccaagtaatattttaccttgcagcgattgtgcgtaatgcatccaaactgaaacttttatttccagtatgtatttattga

SEQ ID NO: 5126 - DNA, 228 bp, Saccharomyces pastorianus
atgtaccatgaacagtcgcaaaacctagtacatttggaaacagagcgcgagaagtctcattacttgtcccattgcaacgtcaagagacagtttggcagaattatcgaaaacgccaccgtgcaaactgcggtacagaatggccaattgcaagtgtacggtctgctgtacaacgtagaggatggtctactgcaaaccgtcagcacatattcaaacgccatcccaaaataa

SEQ ID NO: 5127 - DNA, 201 bp, Saccharomyces pastorianus
atgagcgctatcgactcctcttcaatcttcacactgagccacgactcaaatctacaagacattttggacgctaacgtcaagtgggcttcccagatgaacattgttcaaccaaccttgttcccggatcataatggtaagggcagtcccctcatacactttttatcggctgctccgattcgcgctacaacgaaaactgtctag

SEQ ID NO: 5128 - DNA, 1236 bp, Saccharomyces pastorianus
atggccactactactcatttgtcgccaatttttatacagaaaacttctcagtctacaccactaaacatgaatagttattctttggttgaattaagctcttttggatctgaaaactggtgtctaaagttacaaccttcttataagcacggacttctgacagggctgagcaacggtgagatatgtttgttggattggaataccggaaagccgttgcaaaagatcagagcaagcgagacggcaattaacgatatgaaggtcattgacagcgactttgttgcagggaatctaattagtagcgcctctattgactctgtgaaggttttcgacataagatcaaatgactgtgttgcaaaaattaacaatgagactaactctccttttctctctttggattcccgtcatggcctactagcttgtggtacagaattacatggtatcgatgctactatacatatctatgacgttcgcaaatgggatactccattaagatcgttggttgactctcatcatgacgatgtcacttgcattaagtttcatccttctgatgtcaatgttttgcttagcggatcaactgatggatatactaatatttatgatctgaaacaagatgacgaggaagatgctttacatcaagtcatcaactacgcgtcgatccactcctgcggatggctatctccaaagagaatatatactctatcgcatatggaaacattttcagttcacgaattgaatgacaaatctgacgagttgaaagagccacagcctttatactttggtgatattaggaaagcatggaattgtgattatgtagtagacgtctatcctggctttatcgctaccggcaaaactcaagagggtgcgggagagctacgcctgttaccattcaaagatgagaagatagatatagaaaatggagttgtaatcccacatgcacatggagatgaagtagtgagggatgtccttgtatcagcacaaaataccgatgttttatattcttgcggtgaggatggttgtgtcaaaatttggaaaaacaatctggggcccctaaatacaccggaaagcttctgggattattctgaaagaatgagtgttttagaagatgagaacaaagaagccccaacaagcctagaggagcctttgattattcaaaaagaatcggtgactacgaaacccaaaaaggaaaagcacaagaaaagtaagaagcattccaagaagagtcgttttaaaccttattag

SEQ ID NO: 5129 - DNA, 348 bp, Saccharomyces pastorianus
atgggccgttccacgctctgtccacggagatatgtttcgaccgcaacaccctcgttccctgtcttcgtcgtggccatggtcacggcaacgttgtttgctttggatacggactccgtgagcagtttggggttgttggcgaacatcccgtcaggaatgtccatggtaaatgaactatacgcccattttggagactatacggtagaggttctcggcggtgtcatgaagctggcgtcagccatcaacagagagggctggcagagggaaaagcacggtttcgtggtcccatcgagggaccgacccaacgaaacactgctaagcgttcacatgtatagttcagacctgttatag

SEQ ID NO: 5130 - DNA, 762 bp, Saccharomyces pastorianus
atggatggtatatttggaggattcgaggatttagttgttcctaggcttgaagagcatctcggtcaaaccgatctctcgttcggtggaaaattattaccagcattaaagatttgcgaagatggtggtgagagcggttgcggtggtaaagtctggattgctggtgaactgttatgcgagtacgttctcgagaaatcaaatgaccatttattgagtaagacgatacatggaaagaggccgttcaagaaagttttagaactgggtagcggtactggtctagttggattatgcgtgggattgctggaaaagaacaagtttcatgataataccaaggtgtatgtcacggatattgacaaattggtacctttaatggaacgaaatatacagctggataaagtccagtatgaggttctcgcaagagaactctggtggggagagccgctatcagcggatttttcacctcaggaaggtgatttgcaaactaataacgttgatctggttctggctgccgattgtgtgtacctagaaaaggcttttccgttactagagagaacgctgcttgacctcactaactgtatatccccacccgtaatcttaatggcttacaagaaaagaagaaaagctgacaaacagttcttcaacaagattaaaaagaattttgacgttcttgaaattacagattttatcaagtttaactattatcttaagcagaaaacccacttgttccaactcgttagaaaatgctctccacgcagcggggcatga

SEQ ID NO: 5131 - DNA, 933 bp, Saccharomyces pastorianus
atgattggccttatggcggatcaagcttgtcgatctcagttagactgtaatgaagaatgtgaagctttaaaacgcctaaaggaattgagagaagcatttggtattagcgaagtatctaatgagtcaacaaacaatgaactggatactctaaaaaagctagtatctgttgctacgacattcgaagaacttcagctgccattcactgagacagtactatcagtatacgcgaagcaagaacggtggtgtttacaaatcgagaatatcgtcaataagttaatgagcgataaaacacgttctagtttgcatttcaagcccatgaggcctcctcagcgtcattttattcgtgaattggcgaaagcttataacctatattctgaatctcaagatagagagcccatgagatctgtatttattaaaaaggaagataacaacaaaagcagtaggccgattttatcactggcagaagctttcccactatttgaatccttcaaagagttgcagaaagaacgcaaaatacaagaatttcaagcacgtaccacagcgaaactaatcaactttgaagttcagaatgcggaaccagaagtagaggtggccaagaacaacggatttttagttcacagcctggtgaaaggaaatggtgtcgataatttaaagagattcttcgaaccacatttaaagcatacgttagtagctaaacctcaatacttaattattgatgacggcaagactgcgctggtgtaccctgaaaactacgaagcggtatctgtaaacactgaacgcgacatggagcttttggttggtcatttcgactttatggccaaagaggttttcttggccgattctatttccctgcgctcgattgatgaagagcttgggagaagactagattccccagtagctcaagaagatagtcctgtaaaggaagagaactag

SEQ ID NO: 5132 - DNA, 2004 bp, Saccharomyces pastorianus
atgttgcaaacaaacgaacgggagtctgttggtttggagcagaatcaaaacgataatgacgttcatgaaccttacttaaatgatgagcatgtctctgacgtgaaagttagccacgagcaatctagcacctatgattcagaagaagaaagtgatgatgatatgcagtactacgagcgtgccattcaagaaattgccaagggcgattcgtatatttgtatgatttgtacggtggagatggattacacttgtcagatgtttgcctgtaagaaatgttatagagtattcgattacgcctgtataagagaatgggcattaaagtcaacggaaaagaccgtggataagatatggaaatgtccaaactgttatcatattggcaaaaaagttccgacaaggaacaggccgacatgttggtgcggtaaagttgttaatccggaccacaacccactggatcctaactcatgtggacaaacttgtaatgcccctacttgcgttcatggctgttccaagatttgtcatttagggccgcatccagaatgtacaagaatggtagaaattaagtgtcactgtggtaagcattcaaaaagcatcttttgctatcagtctaaagctatgaaaaaacattttgattgtcaagaaaattgtggactgcctctatcttgcggtattcataaatgtaaaaaaaagtgtcattcaggcttatgtgggccatgcccagaattaattaggagtgaagatagcgcaaatgattggataaaatgctactgtggtatccattctaaagatagtataaaatgttctgagacaaaatttccaaaatccggtagatcttcaaaggatgaaggtggaaatgagtgggtaggtgtgtttgcttgtgaggacattagaactgttgactacgcatgtcataaacattcctttatagaaccttgcataagccctcctacagtcaacggtaagaaaacctgcccgtttttacctagtatactgaagacatgcccctgtggtcggacagccctggaagaacttaccaagcctcgtaaacattgtactgatccaataccgacatgtagttcaaggtgctgtaaaccattaaaatgtggtaagcattcttgtcccttcacttgccacgacggtgcctgtatggatccctgcttacaaattgatagcgtcaaatgtgcatgtgagcaaagcacatttttagttccttgtggatttcaggaaaagccacattgcaatataaaatgtgagtcgctgatgtcatgccgcagacacagatgtattgatagatgctgtagtggtagaccatcggcactagaaagaaagaagagaatatttagatcgcaggatttgatggatgaatctcttgtggaagcgcaacatatatgtttaaagccatgtaatctaactctatcctgtggaagtcatcaatgccagagaaaatgtcatcccggaaaatgctcaccttgtttggaaagtgattcgaacgatttagtttgtccgtgtggcaaaacagtcattcctgcacccgttcgttgtggcactaagctaccactatgtaaccacgcatgtatcaaagttgtgcgtggtgaatctgagtgtggtcacaagccaatgccacatacctgtcatcctttagacctagcttgtccaccatgtacggagactgttttcaaaccttgtaaatgtgggaaaaaagataaagtgagaacagtttgtttccaaacagatgtatcatgtggtacaacatgtgggaaaccattgtccggctgtcatcatacttgtcaaaagacatgccatttaccagaaaattgccaaaaggtctgcaagcaaatatgtagacagaaaaggcaaaattgtgaccacacatgccccaaaccttgtcatggtaagagtgaatgtcccgatttaccttgcgccgcactagtgaaaattacttgcagatgtggtagaatagaaaaaaaggtcgcatgtggcgcacaaagtgatgcagctagcgtaacagaa

SEQ ID NO: 5133 - DNA, 1614 bp, Saccharomyces pastorianus
atgttgttaggtacaggttttattactcaaatgaacgactacggtttgtttgagtactctgattatattgctggattgtcaggcggaagctggatcttaatggatttggttgtccagaactttaatgtaaattctttgctcacagaatgggaccttgatgaagaccttttattgggcataccagaatttgacatttccgaagaagagattgttaccaatgcaaaaaaggagtatattgataacgatatcagtaagaaaaaacgtgaggtgaggaaaacgcaaatttcgagctttcctgaattttacgatcaggtagagctagctgtgaactcttttgaagaaagcccagaagaatgtagtttagtgaaaaggaatatgaatccattaacaagactgaagaggattttttttccaaataacacatttactgaaacagatgccaaaattggaaccttcaaaacagtactggatttttacaagaatttgcatttaaaaataaaacctaaaaaaatggaaggtttccaaatttcattcacagattattggggcaaggcgattattcaaaggctaagaaaaaattttgatgaggaccctaaccatacattttccttctcaaaacttgttcagtcgtcagcaaaattcaaggaatgcagtgtgcctcttcctatattcgttgcaaattgcaaaaatgggcttctttcaaatgttattttcgaatttacgcccttcgagtttggttcttgggaaaatatcctcagacttttcgttaggctgccctatctgggttcaaaaatagtttctggggaggccctaaaatgtgttaataattttgatgacttgggctttataactgcaacctcttcttcaattttcaataatgtgctaatttttatctggaatctggcctcccagtcttcgagagatgctatgaaggcgcttaatatggtcatgggaatatttggtctaggcaaggaggaaatgtttagtatttcgaaggactcttcgagattagagacagactatgccgtgtaccagcctaaccccttttatctttatcccaaagtggacaatgttttaactaacaaggaccatttgtacctcgtagacggcggtgaagatggtgaaaacatccctctcaggacattgattattcctgaaagggaattagacgttatctttgtcctggattctagctcagatatcgataactacccaaatggatctaaattgaaaaaaatatttgagaaattagatgaagaaaacattcattaccagttccccaaaaatataaaaagcctcactcgtcctgttgtgatagggtgtaatgccacgaaaagaccaggccgtgattcgtttttgccaattataatttatcatgcaaatgcatatcatcaatatgtatctaatacttcgacgttcaaaataacttacaatcagtctgaagttaataatatgttgcttactgggagagaagtgtttagcagtgactacgaccttcactataaaaattgcttgggctgtatattaactaaaagaacaatggataggctgcctaaaaaaaaaaaattttcgccattttgcttacaatgttttaaagactattgctactcatga

SEQ ID NO: 5134 - DNA, 135 bp, Saccharomyces pastorianus
atgcaaaggttcttcatcgtgattttagtactgttgacaccaggcctagcaacagctccatttcaggtacaatgtcctagctctccgttagtcagggaggcaaaagtaagttctatattctacggttatgtttga

SEQ ID NO: 5135 - DNA, 2037 bp, Saccharomyces pastorianus
atgatgtctacgaatattctagagcaggtcaagctatttctcaatcgaagagacatcctcggtgtattctataataaaacgggaaataccagtaccctagagcagaccactcaagactttgaagggtatgcgagtttaaactctacaacggttccaagaaccacctttgattccttggataaaatattacggaaaggtgatctgacgactccagtactgcttaagacaggtatcaaaatctttttttcatattcagtaagcaagtatgctgttctatgtttttgcaccgccattatgttgaataggctatctgtaatgtcttctctgagatcaaattccacaaatattcgcctgcccctttggtcaaaaactttacttcatttggtggctgctctgtcactgactagtgcattttcacaaatcttgggtcagatcggtttcataaacaaattgcatacagatgatatggatgcttatgcgttgagtgtttatttattaacaattttgtctgattgcattgagatttttgtttcttcaacgacaaacgctatcccattaaagagctccgatttttctatatggggtttatcattaaatctctatatcatatccaaactacccgcaaaggagcaacacatgggcgataatgtaaaactattagcagcagtctctcacagactaataactcatttactggagctactgcatttgagaacctataggttgtttgcagatgccattttaaatgtagggtttttcgcatcattcatcgctagagcctatttgaacggccttgatttcattaatatctgtctcgtccataattgtttccctagttttgcttatattttggttatcttgctggcatctgtaggcgatatttcgaaggctttattcaccggtaacctcttccgatcactatcatcaagatatcgaactttagcaaagtggtggaagtcaaatagttacaatggagaagaggaattcaatgaaattgctctctcattgtgcctttttttaacaacgaatgaccgtactgttttcaaaaagtctcacaaggattcccaaaaccccgttgacaaagctgctgctttgagtaacagttatatggttagtgggtatttgaaccaacttcagtcgactccagaggatatgttatctcacaaggaaatgactactgattctcagttaccaagtttcattactacatacttaggtttttttcaattggtaaaggcaatatctttgaactctttccagcttttaaaaggccttgtatggaataaaaacctggaaacaaacagagatcatgaatcgaaaggaaaaaaatcgaagaagaaagatttcaacagatacgttacggaaaaaaactacaaaaagtttctgtataaaccggatgtcaaggactttgactccggaagcgatcctcgatgccgggagctattgctccctgaagatgactcatcaaaggactacgttcctcctaaagaaaacgacgatagcatttcagatgaggaatttgacaacgatggtgaaagtcagttgattatggaagaaaaggaggcgttaacacgtctatcgaccaaccccgttggttcagataacgtaagggacctggcttggaatctctcaatgtggtccattttaaaatatgaaatggatgaaaataacaagattaagggaccattaacgagatctcagtacggcaaaagaaattgtgaaggtattttggctgatacagttattgaacgccttttacaccagaattctagtcatatatataaacgttcagaggtggaagaagataaagaatcagaattccagttcgatcttcctctcggtgattgcgatgaaatggataacattgatctcgcttgcctgatttgtaaagctaacaaaagaaacattgtaacttggccatgtagatgccttgctctatgtgatgaatgcagaatattgcttggctataaagggtttagtacatgtgtcagctgtgatagtgatgtaaagggttacagtaagctgaatatcgtttga

SEQ ID NO: 5136 - DNA, 327 bp, Saccharomyces pastorianus
atgtacaagggtgagaatgatgccgaatctcatgaaatagttctaaatgacaacaacatcgttgaagaacagttgggagaccatggaatcatctgtgtagaagacatcattcatgagattgctactatgggtgaatcgttttctgcctgcaactttttcctacaaccattcaaattgaatagagaagtatccggatttggttctttaaataggttgagaaagataaaacaaagagaggcagaatcaagaacccgtcagttctcaaatgcggctactgcaccagttatcgaagttgacattgactctttattgaccaaattaaattaa

SEQ ID NO: 5137 - DNA, 453 bp, Saccharomyces pastorianus
atgtcatctgcccaagaaagtaaaactcaagccttgaactccaacccagaggtccttttaaggaaaagaagaaatgctgatagaactagaatcgagagacaagaactagcaaagaagaaaagggaagaacaaatcaagaagaagagaagtaacaaaaacagatttgtcagagcagagagcatagtcgcgaagactttggctacatccagagaaaaggaaagaattaagagagtttcaatattagaagacaaaaaagctaagaatgagacacagcatattgcatctgaaaaagatttcattttaaaaatcaccgaaaaacctaagcatgttgagcaggaatctgccgatttgaaggaaagcgatgatgaagaagatgacggtttaaacagagaaaaaactacatacgatggcgaacctgctttactttttgttgtaagagtgagaggtccactt

SEQ ID NO: 5138 - DNA, 312 bp, Saccharomyces pastorianus
atggcaacttttgtttcacacaccgtcgcggcaatgatcattgtcccactaatgagcgaaatcggtgcaaacttgccctcaggtgatcattctagattactaatcattatagctgctttactatgttccagtgctatgggtctaccaacctctggtttccccaacgtgaccgcaatttcgatgattgatgaagttggtgataggtatctgaccgtgggcacattcattacaagaggtgtcccagctagtttattaagttatgttgttattgtcacagtaagctacggtctcttgaagtccatgggattttaa

SEQ ID NO: 5139 - DNA, 933 bp, Saccharomyces pastorianus
atgaaattctcacactcgttgcagttcaattccgtaccggaatggtctaccaagtatctggcctattctcaactgaagaagctgatctattccttgcaaaaggataagctgtacagcaacaacaaacaccataatgcgcagccccacgaggccgacgacgagagcctgccgctcttgtccgacgcatctccagatgaccagttctacatctccaaatttgtggctgctttgaaccaagaactgaaaaaaattgataaattttatatatctcaagaaacgggcctcatcgccaactacaacgagctaaaggacgatgttatggaactagagaacagcaacaaggccaaccagctgttcaaccagcagcagcagcatcaaacacagaacggggtaagaagcaggaagtccaagtcgcagcagcgtcagagaaggttcagtagtgtctcctctacggactcgaacccctccttgacagatatgtccatcgattccgcgcccgtcatccgtacccaggtctcaaacaccaccaacaacgcgaactctttgcaaaatctcgcctccacttcagcgtctctttccaacaccaactcggtctacctctcccccatcacccagcacaggttgtccttgaaaaagagattgatatccgtctacacccaactttccgagttgaaggactttatcgagttgaaccagaccgggttttccaagatttgcaagaagttcgacaaatctctaaacaccaacctgaagcagaactacctgaactacatcaagtttcactcgcacgtcttcaaccctgccacaataaacagaatccagcaccatatctccgagaccattcttacgtatgccaacttgaataaggatacccgccaaccctccaccacttttaacctggacgcggaccagatcctgatagtgagtcgtatt

SEQ ID NO: 5140 - DNA, 78 bp, Saccharomyces pastorianus
atgatgaatttagaaagaaaatatcagtccgccaagaccgataacaaaaattttatgaagctaagttccagccaatag

SEQ ID NO: 5141 - DNA, 1230 bp, Saccharomyces pastorianus
atggcaatggcaaacggcaatgccggcattattgctccctcgtcgggctctttgaccttccaccaactgatacacttgccgcccaagcaatggctccaattcctcgcaagccaaacatccttactcaaattcgtaataatcacctccattttcatcgcactattgactttcaacttaacaccattcaccactgattccttacagaaaaactgtttcgccatcttgatctatgcatctctgctgtgggccactgaaacaatcccccttttcgtgacctctttgatgattcccctgctcattgtagtgttccccgtcatcaaggacccagtcacctcccagcccatggcccctcgtgaatcttcccagttcatcttatcgtcaatgtggtcaagtgtcatcatgcttttattaggtgggtttactttggccgctgctctttccaaatacaacatcgccaaaatcctttccacccacattttggcctctgccggtacaaacccgcatttcattctcttaacaaacatgttcgtagcactctttgtctccatgtgggtttccaacgtcgctgcacccgtgctttgttattccatcatccaacctttgctaagaacacttccaaggaactgcacctatgctaaggccttaattctaggtatcgccctcgcctctaacatcggtggtatgtcttcccccatcgcttctcctcagaatattttctccattggcataatggacccttcgccatcttgggccgaatggtttatgattgcgttaccggtgtgtttcatttgtatcatggcgacttgggttctcttgatcataactttcccacccgaaccaaatgtgaaaatcctacaattgcatccatctcgtgatccgttcactttgacacaatggtttgtcagtttagtttgtattacaacaattatcctttggtgcctttccaaccaaatctctggtgtttttggtgaaatgggtataatttccatcataccgattgtggttttttttggtacaggtcttctaacctcagatgatttcaacaactttatgtggacgatcgtcgtcttggccatgggaggtacgactttaggtaaagcggtaagctcatctggtttattgtccacaatggcacacctaatcaaatcgcatgtcgaacatgaaccgatttttatcattgtgttgatctttggtcttgtaattcttgtaatggcaacttttgtttcacac

SEQ ID NO: 5142 - DNA, 5217 bp, Saccharomyces pastorianus
atggtaatattcattccttttccgattctcagttcggtcatatctttgcctttggtgaaaacagacagcttcccagaaaacacatggtgtcgcctaacggagctatccattagaggtgacttcagaaccactgtggaatacttgatcaagcttttggaaaccgaagacttcgaacacaacacaatcaccaccggttggttggacgatttgatcacccataagatgaccgctgaaaagccagaccccactctggccgtcattcgcggtgccgctactaaggccttcttagcatctgaagaagctcgtcacaagtacatcgactccttacaaaagggtcaagtcttgtccaaggaccttctgcagaccatgttccccgtggatttcattcacgagggcaaaaggtacaagttcaccgtcgccaagtccggtaacgaccgttacactttatttgtcaacggttccaaatgtgatatcatactacgtcaactgtcagacggtggtcttttgattgccattggcgggaaatctcacaccatctactggaaggaggaagtcgctgctacaagattgtctgtcgactccatgaccactctgttggaagtcgaaaatgatccaacccaattgcgtactccatcccctggtaaattagtcaaattctcagtcgaaaatggtgaacacattatcaagggccaaccctacgcagaaattgaagtcatgaaaatgcaaatgcccttggtttcccaagaaaatggtattgttcaactactaaagcaacctgggtctaccattgttgcaggtgacatcatggctattttgactcttgatgatccatccaaggttaagcacgctctaccatttgaaggtatgcttccagacttcggttctccagttattgaaggtaccaagcctgcttacaaattcaaatctttggtgtccactttagaaaatatcttgaagggttatgacaaccaagtcattatgaacgcctctttacaacaattaattgaagtcttgagaaatccaaaactgccttattccgaatggaaactacatgtctccgccttacattcgagactgcctgctaagctagatgagcaaatggaagaattggtctcgcgttctttaagacgtgctgctgttttcccagccagacaattgggcaaactcatcgacacggccgttaagaaccctgaatacaaccctgataagttgttgggacctgttgtggaaccattaacagatatcgctcaaaaatactccaacgggttggaagctcatgaacactctattttcgttcatttcttagatgaatattatcaagttgaagtattattcaatggtccaaatgtccgtgaagaaaacatcatcttgaaattgcgtgacgaaaattcaaaagacttggataaggttgccttgactgttttgtctcactcaaaggtctcggctaaaaataacctgatcttagccatcttgaagcattaccaaccattgtgtaaactgtcttcaaaagtgtcctctattttctctactccattgcaacacatcgttgaattggaatccaaggctaccgctaaggtcgctcttcaagcaagagaaatcttgattcaaggtgctttgccatccgtcaaggaaagaactgaacaaattgaacacatcttaaaatcatctgttgttaaagttgcctatggttcatccaatccaaaacgttccgaaccagatatgaatatcttgaaggacttgattgattctaattacgtcgtttttgatgtcttacttcaatttttgactcaccaggatccggttgttactgctgccgctgcccaagtctacattcgtcgtgcttaccgtgcttacactattggtgaaatcagagtgcacgaaggtgtaacagttccaattgttgaatggaagttccaattgccttcagctgccttctctaccttccctaccgttaaatctaaaatgggtatgaatagagctgtctctgtttctgatttgtcatacgtcgccaacagtcaatcatctcctttgagagaaggtattttgatggccgttgaccatttagatgatgtcgatgaaatcttgcctcaaagcttggaagttattcctcgtcaccaactttcttccagcggccccgcccctgatcgttctggtagttctgcatccttgagtaacgttgctaacgtttgtgttggttctactgaaggatttgaatccgaagaggatattttgttgagattgagagaaatcttagatttgaataagcaagaattaatcaatgctgccattcgtcgtatcacattcatgtttggtttcaaggatggctcttatccaaagtactatacttttaatggtccaaactatagcgaaaatgaaacaattcgtcacattgaaccagctttggctttccaattggaattaggaagattatccaatttcaacatcaagccaatattcactgataacaggaatatccatgtctacgaagctgttagtaagacatctccattagataagagattctttacaagaggtattattagaactgggcatatccgtgatgacatttctatcccagaatatttaacttcagaagctaatagattgatgagtgacatcttggataacttggaagttaccgatacttcaaactccgatttgaaccatatcttcattaatttcattgctgtctttgatatctctccagaagatgttgaagccgcttttggtggtttcttggaaagatttggtaagagattattgagattgcgtgtttcttctgctgaaattagaatcatcatcaaggatccacaaacaggtgctcctgtgccattgcgtgctttgatcaataatgtttctggttatgtcattaagactgaaatgtacactgaagttaagaatgcaaagggtgaatgggtattcaagtccttgggtaagccaggatccatgcacttaagacctattgctacgccttacgctgttaaggaatggttgcaaccaaaacgttacaaggcacatttgatgggtaccacatatgtttatgatttcccagaattgttccgtcaagcttcgtcctctcaatggaagaatttctccgcagagactaagctggctgacgatttctttacgtctaacgaattaattgaagacgaaaatggtgaattgactgaagttgaaagagagcctggtgccaatgctattggtatggttgcctttaagatcactgttaagacacctgaatatccaagaggccgtcaattcgtcattgttgctaacgatatcacgtttaagattggttcctttggtccacaagaagatgagttcttcaataaggtcactgaatatgctagaaagcgtggtattccaagaatttacttggctgccaactctggtgctagaatcggtatggctgaagaaattgttcctttattccaagttgcatggaacgatgttgatcatcctgaaaacggtttccaatacttgtacttgactagtgaaggtatggaagctttgaagaagtttgtcaaagaaaattctgttttgactgaacgtactgttaccaatggtgaagaaagatttgtcatcaagactatcattggtgctgaagatgggttaggtgtcgagtgtttacgtggttccggtttaatcgccggtgctacatcaagagcctaccacgatattttcacgattactttggtcacttgtagatctgtcggtattggtgcttatttggtccgtttgggtcaaagagctattcaagttgaaggtcaaccaataattttaactggtgctccagccatcaacaagatgttgggtagagaagtttatacttctaatttacaactgggtggtactcaaattatgtacaacaatggtgtttcacatctgactgctgttgatgacttagccggtgtagaaaagattgtcgaatggatatcctatattccagccaagcgtaacatgccagttccaattttggaaactaaggatacatgggatagaccagtggacttcactccaatgcctggcgaatcatatgatgtcagatggatgattgaaggtcgtgaaactgaaaatgggtttgaatatggtctattcgataagggatcattctttgaaactttgtcagggtgggctagaggtgttgttgttggtagagcccgtcttggtggtattccattgggcgttattggtgtcgaaacaagaactgtagagaaccttgttcctgctgacccagctaatccaaatagtgctgaaacattaattcaagaacctggtcaagtttggcatccaaattccgctttcaagactgctcaagctattaacgatttcaatcatggtgaacaactgccaatgatgatcttggccaactggagaggtttctccggtggtcaacgtgatatgttcaatgaagttttgaagtacggttcgttcattgtcgatgcattagtggactacaagcaaccaattatcatctacatcccacctactggtgagttaagaggtggttcatgggtcgttgttgatccaactatcaatgcagatcaaatggaaatgtacgctgatgtgaattctagagcaggtgttcttgaaccacaaggtatggttggtatcaaataccgtagagaaaaattattagacaccatgaacagattggatgataaatacagggaattgagatctaaattgaccgacaagagcttaacaccagaattacatcaacaaatctctaagcaattagcagaccgtgaaagagaactactgccaatttatggacaaatcagtattcaatttgccgatttgcacgacagatcatcacgtatggtggccaagggtgttatctccaaggagttgcaatggaccgaagcacgtcgtttcttcttctggagattaagaagaagactgaatgaagaatatttgatcaagagattgagcaatgaaatgaacgaggcttcgagattggaaaagattgctagaattagatcctggtacccagcctcagtggaccatgataatgatagacaagtggctacttggattgaagaaaattacaagactttggacgataaactaaagagcttgaaattagaaacctttgcccaagatttagctaagaagatcagaaacgatcacgacaatgccattgatggattatctgaagttatcaagatgttatctactgacgataaagaaaaattgctaaaaaacatgaaatga

SEQ ID NO: 5143 - DNA, 1596 bp, Saccharomyces pastorianus
atgagcgaagaaagcttattcgagtcgtctccacagaagatggagtacgaaactacaaactactcggaaagacacacaaaactccccgaccacttcatcggtctcaatacagtagataaactagaggagtcgccgctaagggactttgtcaacagccacggtggccacacggtcatctccaagatcctgatagcaaataacggtattgccgccgtgaaggagatcaggtcgatcagaaagtggtcgtacgagacgttcggcgatgacaggactgtccagtttgtcgccatggccaccccagaagatctggaggccaacgcggagtacatccgtatggccgaccagtacatcgaggtgcccggtggcacgaataacaacaactacgccaacgtagacttgatcgtagacattgccgagagagcagacgtagatgccgtgtgggccggctggggccatgcctccgagaacccgctgttgcccgagaagttggcccgctccaagaggaaagttatcttcattgggcctccaggcaatgccatgaggtcgcttggtgacaagatctcctcgaccattgtcgctcaaagcgccaaagtgccatgtatcccatggtccggtaccggtgtagacacggtccatttggacgagaaaaccggtctggtttctgtcgacgacgacatctaccagaagggttgctgtacctccccagaggacggtctggtaaaggccaagcgcatcgggttccccgtcatgatcaaggcctccgaaggtggtggtggtaaaggtattagacaagtcgagcgcgcagaagacttcgccacactataccagcaagcgtcaaacgaaattccaggctcccccatcttcatcatgaagttggccggcagagctcgccatttggaagtccaactgttggcggatcagtacggtaccaacatctccttgttcggtagagattgttccgtgcaaagacgtcaccaaaaaattatcgaagaagccccagtgaccattgccaaggcggaaacattccacgaaatggaaaaagccgctgtcagactcggtaaactggtcgggtatgtctctgccggtactgtggaatacctgtactctcacgatgacgggaaattctactttttggaactgaacccaagactacaagtcgagcatccaaccacggaaatggtctccggcgttaacttacctgcagcccaattacaaatcgctatgggtatccctatgcatagaataagtgacatcagaaccttgtacggcatgaacccgcattctgcctcggaaatcgatttcgagttcaagacccaagatgccaccaagaaacaaagaagacccatccccaagggccattgtaccgcttgtcgtatcacatcagaagatccaaacgatgggttcaagccatccggtggtactttgcatgaattgaacttccgttcttcttccaacgtctgggggtatttctccgtgggtaataatggtaatattcattccttttccgattctcagttcggtcatatctttgcctttggtgaaaacagacagcttcccagaaaacacatggtgtcgcctaacggagctatccattag

SEQ ID NO: 5144 - DNA, 684 bp, Saccharomyces pastorianus
atgggtgtcgacaataatgataacggatttgagtggtggagacgaaccatgcagtacaagactggtttaggtctgacgccggaggagaaaggccgatatgaggaagactctaaagctcgggccctgaagaaggaatgtcttcgatgctacgagcatcgagattggatgcttaagtactcccccacggtccgctttatggtgcaagcactcacaaagctgaataagggtagtgagagcaaattcgatgagtccaagatcatttgcgattactgtcccgattggaagagtggagggttccaccctgagctaggtatcctgttgtgtcagaaccggctgcgtgacaagtggcacttggaggacacgctgtcgcacgagctggtccattattttgacgatttgaaatggcaggtagattggttgaatttgaagcaccatgcatgttcggagatcagggcctcttcgttgagtggggagtgcagattttgggaggagttcaagagaagagggttcagcaccgggttccacgtggcaagaggccatcaagactgtgtgaagagaagagctacaatcagtgtctcaggtaaccccaactgtgaaagtaaggagcatgctgcgaagatcgtggacgaagtctgggatagttgttttgcagatacgagaccgtttgatgagatttacaggtga

SEQ ID NO: 5145 - DNA, 1281 bp, Saccharomyces pastorianus
atgaacaggacacagttgtgcatagaaacacaaagcagcagtcgcccgtttctcgttttgtccagcatgtctagttcaatctttggtcctttattgcgcgccatggaacgcgttaatttacttaatgcgccctaccaatcattgacgtttgaagaacagaaggccatgaccatttggcaaagagtcaaattttataactggagttttgaattatgcgccttgtttattttattcttggtgtatgcattctacaaattcggtaactccatcaattccaaacgtgggaaccggatcttccaatctttccattcatatttggccaacgacttgaagttctctcgtgtgggcttcaatattaacaactccaagatcttcaccgcagaacaccaaaacacatggttttcctcttttgccactggtagatccgccatcaaaagtgtcaatttgaacatacatttggtagctcgtagcaacccattctccatgtgcttggaatacctgcttggattcttctttgcaagtttgaaaagtaaacaattggaagaattcgtcgaaatcatcatcaaaccaaacggtatctacgtggctaacgaatccgcccacgctaacaataatgcgcaagaagtcttgagcaaatttaaatttgtcacttccattgtcaacaaagaatttatgaataaagctcgtgctgaaaactatttcctatccatcgcacacaccagcgaaaaccacaagctgccaaacaactacgtctacatgtctgatgttaaccaattgtcaggatttatgttacattactccaaaccctttgaacttttgtctcaagctggtaaccttctaaaatttataagtttcaccgatttgcctgtcgatgctccacgtgatgacaaagaatgggaagcttccttggaaccaagagccattattcgttgtgctgttcctcaaaatgataacgaattaaacttgttgaaccaaatcattgctctagccgtggaaatttacgatggatgcactcaagatttggtccaaaagtctccaaacacattcataactaacgatatcttgaagaggacaaccaatttgcgtcaacaggaattgaacaagattaagaagttcatgaaggaaaatgaattagaattggcaaaggaaaagaaaacagaatcggaaaaggccaagagacgtcaattaaaggcttccggtgaacaaggaaaagtcgaccaaaagatgaaagaaaagagagaaagacgtctaagaaacaagcaaagaacaagaattcaatag

SEQ ID NO: 5146 - DNA, 777 bp, Saccharomyces pastorianus
atgccattacaggtgtgtcatatttatagtgatcgaggtttcatcgtgataaagtcaatatcttcatggaataattgtgagggaggctctttagcagctctattggagcatggtcgtattgaagatgaaatggtcactcaggtctacacattacagttactggaaggtcttgcgtatctgcatgaatctgggattgttcaccgtgatgttaaacctgaaaatattctgctagactttaatggtgtcattaagtatgttgattttggcgctgccaagaaaattgctaataatggaaccagactggctagtatgaacagaactgaagacgcagacggtgagcatgaagaagacgctcacgcttcggattcaaaggcagcgaaaaacaacgaaaacggtctgcaagatatgatggggacacctatgtatatggcgccggaatcgattactggttctaccagtaaaggcaaatttggggcggatgacgtttggtcattaggttgtgttgtattagaaatgattactggtaggcggccatggtctaacctcgataatgagtgggccattatgtatcatgttgcggccggacacactccgcagttccccaataaagatgaggtatcctctgctggtaggaaatttttagagagatgtcttattcaaaatccttccaagagagccagtgcggttgagctgttgatggattcttggattgtacaaattagagaaatagcctttggtgatgattcttcttccacagatactgaagaaagagagtga

SEQ ID NO: 5147 - DNA, 1602 bp, Saccharomyces pastorianus
atgtcgcattcagactacttcaattacaagccgtatggcgagtccactgagaagtcaggcagctcgaagaagagacaatcttcttcctcttcatcatctaggataagatccgaaagtctagggcgaaataccaatactacgcaggctcgagtagcgtcttcgcccatcagtcccggactgcattctactcagtacttcaggtcgccgaacgcagtatatagtccaggagaatcccccctaaacacagtgcagcttttcaatcgtcttccggggattcagcagggccaatttttccatcagaatgccatatcagggtcttcaagctcatcggcaaggtcaagtagacgtccctccaatatcggtttgcctctaccaaagaaccctcagcaatctttacccaaactgtccactcagtctattcctgcgcataagaagtttgatcctagtaaaactgaaactgataattttaagaagccccttccaatgaatagtagtcaagacccattattaactacgcccacattggttatatcgccggaactggcttcgctgaacacaactaatacatcgattacgtctacaccacaaaacctaacgaaccaaagctctagtaagcatattgccactagatcacaaacaaacgcgtctgcaagtacttcgacgttgcaagatttggtcacaacaaacagctcgcaacggtccgtagcacatcacggtggaagcacatcgagtctccgaacgtataaaaagcaatacgtattgaacgaacagctgtatctgagaaaaatgagaaatcgtgcgaacgatgactattacacaagaggtatagtagcgtcgtccaattttgatgacgatgaagaaaaccatagcaataaaggcgaggatgaattagaactagaaatgaatgatctcctaaagatagagggtgatgataaagataatgatttcaattttggttataattttattacgtcaaacacaaagaataacgaaaatgtagttgcaatgagcttgaattatttgaaaggcaaattgaactggctcaggaatggtagcgacgataaggaacgcgaaataccggacgacgagtggaattacatgttaggaaccgaggatttattgtcaagattattgcaaaaccctatggtgaataatcggttcgaatggcaaactatgttgtctaaagtgttgaaaggtgatattgtaagaaatgaaaagaccaagattgcgaatcaaggaaagggtcccggcttcaatacgcagtattcagatgatatttggattgagttgaaggcatggatgaatgggagaaccgtggaggatcaaagcaaatctttaagtatcttcagaaattccactgattctgtattccaagaaataatggacttcagattggacgataacatgagcgctgaaaaggccggggagaccatcaagtcacttgtggacaaatattatagggtcctgaatctttggcctaatgtgaagagaatgcataacgaaaaacccattactaaaacagaagcattcagaaataggatagataccttgaacagttggctgaatttcaaattcaacttgacactaatattgcctacctga

SEQ ID NO: 5148 - DNA, 1356 bp, Saccharomyces pastorianus
atgtggaatgaactaaatttgtcctatttagagcaagatttggaatttttattgatgtttcccatgtgtctagtcaaagatatcatactaatacgcttatcctatgcaagaaaaatacagaatccaacactaatgatgattgaccaaatgatggacgatttcagcacttacatcaaattagcggtccagatgaaattcactgttgcttcttattgcaaagactggtttctaaacgtgaaaattgatcctgaatttgatcatactgttgtcgaagctttgcagtattttttctatatcttggaactaagaattttgaacagtggaaagaactcattcaagacctctaaagaaccagatttgctacttaaatactgggaaatgttcagaaatgttggctattacatcgatgatgctggtgaattaattgccactgagtttacaaaattgacacttcggttggtccacagattgcatgcataccttttacggcagcaaaatactcccccgaaattagatgatgaagcgggcgctgaaaaatggttgatccaaatattcgagatacttggatcaatgaaaaggaaacttaatagattcacaaatattttaacaaaagcattccaaaattttgttagatataagatagaagaccacaactatctattgagacagttgaaggaaaccggccactttcttatctactcaggggggtatctagaacaaaacggtacttatttgattggtagccccgaattattgggttgtaaagatgatgatatattgagaatcattaagaattcagacattggttgtgatttggtacccaaactagaaatcaataacagtctgaccatttataatgcattggatggcaaatggtactcaaactcttcactgggttcggatatttcaagtgatggtacaccattctactatgttaaaaatgagttaaccagccaacctagatcttacaacgggaatagggtcaaccgtgaaccggacttcgaaaatagtaagagcacagaagaagaactatacgaattagagacaagattgaattctcttggttatgtactggtgctgactccacaggaaccattgctatgggaaggtgaaatgtacaatctatcggataataaagtcatcaaagcggaagatttaaatttaaaagtgatttcaaactcaatagatctgatgtgtcaaggatccagttatgccctggagtatcaatgtgatagatttcaacaaattgctagcaactcagtttcctttttggaaaagaaatcttcttctgagactgtgaaaaataacctgcagagaataaataacgcttattcagatgcacatatagtgttttga

SEQ ID NO: 5149 - DNA, 615 bp, Saccharomyces pastorianus
atgctgtatatatccaaattaacatcaatattatctttagtttggctcttacccgagcgagaacaagttttgcggagcgaaaaatcccatataacgagggaatggcaggtcaagaagcaggttggtcaaagaggaaacaggctagtaagagccatgttgtcgaggttgctgtccagctcatggtgtgcgccctggaggcaggcgcagagaatgttttccaccaccgttccaatacaagccacgctgaaccaaatcaagagagggtccggccctccaagacgcaagaaggtgactacggccccacagctggaccagtgtccccaacggaagggtgttgtgctgcgtgtgatggtactgaagcccaagaagcctaattctgcgcaaagaaaggcatgcagagtccggctgtctaacgggaacgtggtgtcggcgtacatcccgggtgaaggccatgacgcccaagagcactcgatcgtatatgtgagaggaggccgttgccaggatctgcctggtgtgaagtaccacgtcatcagaggcgctggtgacctgagcggcgtagttaacaggatttcttcgagatcgaaatacggggccaagaagccaagcaagtcgtga

SEQ ID NO: 5150 - DNA, 456 bp, Saccharomyces pastorianus
atggtgcaaccagcacctctcattaccagggcgcccacaccaaaaatacccaacataccagctgttgcgcccaaggaggcaccctgcatcgtggcccccattagaatagaccaagtgcagggcaaatataacagccacgagcccacaggcttctcgagcctcatcagctctgcatacggaatccatttcttgggcaaccgggacacaaacggccccagtccgtccagtctttccttgcgtgccacctccagctccttcggagtgaacactggtgttaactccttcgacgacgacgacgacgacatgaacctctttctaccgatcccgttgattccagcaacaacgactccgccgctgcccacgatcgaccgccctagcaataaactatttctctgccaaacaaacattgctcgaccctacttccctacgaccgacactcccaccatagttcactag

SEQ ID NO: 5151 - DNA, 303 bp, Saccharomyces pastorianus
atgcaatatgaagaaggtgaaagagacatggtcgtactacagcataaattcggcattgaatgggctgacggaactaccgaaaccagaacagctactttagtcgattacgggaaggtcggtggctacagttccatggctgcaaccgtgggttatcctgtggccattgcaactaagtttgtcctagatggtacaatcaaaggtccaggtctaatagcaccatactcgccagagatcaacgacccaatcatgaaggaactaaaggacaagtatggtatttatctaaaggaaaaaacggtggcttaa

SEQ ID NO: 5152 - DNA, 1047 bp, Saccharomyces pastorianus
atgggtaagaacgttttattgctgggatctggttttgttgcgcaaccagtcatcgacacattagcagctagcaatgacattagtgtcaccgtcgcatgcagaacactagccaatgcacaatctttggccaaggcctctggctccaaggctatttctttggacgttaccgatgatgctgctttagataaggttttggctgacaacgatgtcgtcatctcattgattccttatattttccatccaaatgtggtaagaagtgccatcagaactaagaccgacgtcgtcacctcgtcttacatctcccctgcattgaaagaattggaacctgaaatcaataaggcaggtattactgtcatgaacgaaatagggttggaccctggtatcgaccatttgtatgcggtaaagactatagatgaggttcacagagctggtggtaagttgaagtcatttttgtcgtactgtggtgggttgccagctcctgaagattctgataacccattgggatacaagttctcatggtcttctagaggtgtgttattagccttgagaaactcagccaaatactggaaagacggtgagattgagaccatctcttcggaagatttgatggctactgctaaaccttacttcatctaccctggttatgcgtttgtctgttacccaaatagagattctacacttttcaaagagctatatcatattcctgaagctgaaaccgttatcagaggaactttgagattccaaggtttcccggagttcgttaaggctttagttgacatgggtatgttgaaggacgatgctaatgagattttcagtaagccaattgcatggaacgaagctttgaaacaatatttgggtgccaagtctgcttctagagaagatttggttgcctccattgactcaaagaccaactggaaagatgatgaagacagagctagaatcctatctggatttgcttggttaggcttgttctccgatgcaaagaccactccagggagtaaccctctagacactctttgtgggggatcctctagagtcgacctgcag

SEQ ID NO: 5153 - DNA, 477 bp, Saccharomyces pastorianus
atgtcactattagaagaaaaggacacagacgaatcaccaaaggctagaatcttggacaccgagagttatgctgatgcattcgggccaaaatctcaaagaaaaaggcctcgtcttgctgcgtccaatctggaggacttggtcaagactacagatgaggaatttgtcaagtacgaggaaaagcaagtcttagacgccacactggggctcatggggaaacaggaagataaagaagaggggtggacagccactgctaaggaagccattttcagtaagggccaatccaagcgtatttggaatgagctgtacaaagtcatcgattcttctgatgtggtgatacacgtcctggacgcaagagatccattggggacacgttgcaaatccgtggaagagtatatgaagaaggaaacgccgcataaacatttgatttatgtccttaataagtgtgatttggtacccacttgggttgcagtatgttga

SEQ ID NO: 5154 - DNA, 450 bp, Saccharomyces pastorianus
atgaagagaatcttcctgatcgattgtcccggtatcgtgccaccttccactaaagactctgaagaagacattttattcagaggtgtcgtgagagtcgagcacgttactcatccagaacagtacattccaggtgtcttgaagcgttgtcaggtaaagcatctagaaagaacctacgagatctcgggatggaaggatgccacggacttcattgaaattttggcaagaaagcaaggtagactactgaaaggtggtgagcctgacgagtgtagtgtttccaaactaatcctgaacgatttcaacagaggtaagatcccttggttcgttgttccacctgagaaagctgaggatgctaaagctaaggatgctaaagctaaggatgctaaagctaaggatgctaaagctaaggatgaatctaaacccaaggaggtgaaggttgacgagacagcataa

SEQ ID NO: 5155 - DNA, 1599 bp, Saccharomyces pastorianus
atgtcaacctcggaagcgccagaagtcaagttcgacaagcatttcaactggtggtccctactgggcatcgcgttctcattgagttgttcgtgggtcggtatctctgcgtctatggcggtcggtatcgccagtggtggcccgttacttattatctatggtttgataattgctgcattcttcagtctgatgtgcggcatctcgctgggcgattttgcctctatacttccgaacagcagtggtggttcgttctgggttctcaagatgttggaacaggaaccaggaacattgaaaactccagactacgaggacgcttctgacgatgatgaagaggtatttctggaaacctattgccaaacgtgcaacgtcgaaatctcttccagacttcagaaggccacttccatggttgtggggttgttgaactatttcggtgccatttttaccaccgccagtgtttgttcgtcattatcgatgagttgtattggtattcataaactgttgcacccggagtatgaactgaaacactggcatgtatttgtaggttatcagtgcattaatgccactttgacgcttttcaacgtctattcgtctccgttgccttacatctctcagtttgggctttacacatctcttttgtcttttgccatgacatttatcatttgtattgtttcaagatctaataacacagtggacccatggcccaaggcttcgaacgtctttggaaacttcgataatcaaacaggctggaattcctccggtatggcatttgttgtgggcttggtcaatccgatatgggcgtttgtcgggatagattctgctacgcacatgattgacgaagtcggttacagcaaatcgcgtttcttggttcctaaggtcattataaccaccatcgtcgtggggttcataacaagttttatttattgtgtcggtttgtttttctgcatcactgacaaaacggttgtcgtcgaatccattctacccattgtggaaatattttatcaagccacaggtaataggaatctcagcgtgtttttacaatgcatgtgcatcaccacaggttacgttgcaggtatcgctagcggtacctggcaaagtcgaatcttacaatcatttggtaaaagttatgcaccattttataaagaaggttcgctgggaaagaagtcactaaaaaagctggcaactttgacacctgggttcaaatctccattatacgctcactttttgtcgcagatctgtgttacaatcattggctgtatttttatgggatctagcactgcattcaatgcaataatcactgcatgtattaccttgctactcatgtcatatgcagttccttcctttatatttgtctttgttgtcaataaggaaaacttcacctgtagaatcgaaaacgatataaatggtattagccgacctaagactcgccgtatgtcaacgatcccccacattatctgcatcctatggaccttattttgcctaatattcttgtcgtttccatacacgttgccagtcacagcagggaacatgaactacacttcggttgtgtacgcagtagttttctgtattatcagcattgttgtctttcctgcttgcaggcaatga

SEQ ID NO: 5156 - DNA, 1650 bp, Saccharomyces pastorianus
atgctaattgctggtttaattcgttttttggactacactccaataaaaaagttaatcttcaagcaaaaactgatgaattatgtgaggggttatatcacgttaccaacccttttgaaaaagcatgcagaacctttttcatacctaaaagtgtttactggctatattcctactagattcgaaaccctggttattttgggatacctgatactccataccattttcatgtcttacaaatatcagtatgacccttaccacatcattttcccagcccataaagcagaagtggcacgattcgttgcttataggagtggtatactttcatttgcacatataccgctgattatcttatttgcaggaagaaataactttctacaacttatttctggtttgaaacacacttcgtttatcgtattccacaagtggcttggaagaatgatgtttcttgatgccgtgattcactctgccgccttcacaaactactacttgttttataagaaatgggatatggttaaagtaaaaacattctggaaatttggtattgcggctacttgtttagcgggaatgttgattttcttttccattgcagctttgagaagacactgctatgaaacttttatggccctccatatagtattcgctgctatgttcttgtatgcatgttgggagcatgttactagttatagtggcattgagtggatttatgccgcgatagcaatttggggtgtcgacagaatcgcacgtatcgttagaattgccctcttaggttttccaaaggccgacttgcagttagtcggttctgatttgatccgcgttacaatgaataaaccaaagaatttctggaaagcaaaaccgggtcaatatgtgtttgtctctttcttacgccctctgtgcttttggcagtcacatccatttacagttatggattcttgtgtaaaggatgatgaactggtcatcattttgaaggcaaagaagggtgtgacaaaattggtaaagaactatgtggaacgcaaaggcggccgagcttccatgaggttggctatcgaaggcccatatggatccaattcggctgcccatcgctttgataatgtattacttttggcaggtggatcaggtcttcctggtccaattgcccatgctatcgagctaggaaaaacaacagctgcaagcggaaagaattttgttcagctaatagtagcagttagagggtttgatatgctcaacgcgtgtaagcaggaactaatggttttgaaagatctgaatgttcatgttcatatctacaattctaagcaagatgcaactccaggtgtaccaatcagcccaaaagtatccaaaactgacgaaatagtgatagaggacactccctctgttgtcgataattcagagaaagctctttctgagaacgaaaatacggagcaacccctctctgtaagtggcacctccaatgtcgattttgaatttgccactttccatacaggaaggcccaacgttgaagagctgctgaaagaatccgtcactcactctggttcactcgcggtagtgtgttgtggaccacctgtctttgttgacaccgctagagatcaaaccgccagagccgtaattaaaaatccatcaaacgtaattgagtacttggaagaatatcaagcatggtaa

SEQ ID NO: 5157 - DNA, 387 bp, Saccharomyces pastorianus
atgatgtttttgacgtcatttataactatccttctgttcttccggttttccgctgcaaaagcacctcctagtaagacttctctggtaaatacccatgaaagaagatcaatctattcatgttatgtcggtttgcgtaaagagaattgggcatacaatgggtccgctatatatcgctatgagcctgcaattcaatcgatgctatattgtctctacgaagacacgttcgagaaagggtactcaaacaaaactctagagaagggtttcgaagaaatgagacagttttgctacacaccaaaatttctgaatatgactgatgccgaattttatacttcattgaataacggatcacactatattcaagaacaaccaaagccaccgtcaatgtaa

SEQ ID NO: 5158 - DNA, 1935 bp, Saccharomyces pastorianus
atgggaaatttaccgaacaaatctgctgcacccaaagggcccgagccatcaacgctacgcgctaactccgacttcgcaaagaagttaccttttcaagaccgccgcgacttcgaagaggcattgcgcggcttcgttgctacggtacccgatgccctggtgcctggcccaggcaccagcgagcgaccagcgtggagcatgaaaccatttgattttattaaggcaaatgaggccgcggatactgtgaaccctagtttatggagacaagctcaattaaacgcgatccatggcctcttccaggtgactgagcgtatttatcaagtacgcggctttgacatctcgaacatgaccgtgatcgaaggagatacatcgttaatcgttatagatccgctgtttacagtcgagacagctcatgcttcgctagatctttacttccagcatcgcccacggaagccggtcagcacagtgatatacacacatagccactcagaccattttggtggtgtgaagggcgtggttaacgaggcggatgtgattgctggcaaagtaaaaataattgctcccgctggattcatggagagcgcagttgccgaaaatatcttggcaggcaatgcaatgagccgacgctcccagtttcaattcggtatgctgctgcagcccggtgtccgaggactggttgacacaggtttaggaaagacaagtgcccgtgggacaaatacactaatcgctccgaccgtcaccattgacaattccaaagaggaacacactattgacggggtggaatttgttttccagcttgctctgggctcagaagcaccttcggaaatgctcatatatctaccgcagttccgtgtcttggacatggcagaagatgtgacgcactgtatgcacaacctttatactctccggggcgctgagatacgtgacggtaatttgtggtcgaagtacatagacgaggcacgtgtgtccttcggaaataagactgatgtgctcattgcacagcatcactggcccactgttggacgcgaacgcgttaatgatttattaaagaagcatcgtgatacgtataaattcatccatgaccagtcgctgtgcctactaaaccatggctacacagcggaagaaattgcagaaacgcttcgcatgcctgccagccttgagcaagaatggtcaacgcgcggctactacggtacattacaccacaacgccaaggcagtgtaccagaaataccttggctggtacgatgccaatccagcaaatcttaacccattaccacccgtggcatatgcgaagaaaaccatcgagtacatgggtggggctgacgcagtgcttgaccgcgcacgagaggacttcaagagaggcgagtttcgctgggttgcaagtattgcaaaccaagtcgtctatgctgaacctgaaaaccgggaggcccgcgaattaggtgcaaatgcccttgaacagttgggataccaggcggagtcaggtatttggcgttgcgcctatttggtaggtgctatggagctacgtgatggcgtgccggacattccaagcatcaccaaaaacattggcgacttaactaaagcggttagcaacgacttgttgttcgacttcctagctgtacgtcttgatgggaccagggctgaaggcataaattcagtcatcaactggcattttgccgatttgaacgaatatttcgtcatgtcacttgaaaactctgcccttacacacatcatcggtcagcaacaagaagcagacgttagcgtaagactgtaccgaggtacgctcgatgaaatcctgcagaagaaaacaactttcactgaggcggcgagtaacgacaaggcggtgattgatggcgacatctcaaagctcgaagaagtgttttctttgttggatagtttcgaactcatgttccctatagttgaaccaaggaagaaaaattag

SEQ ID NO: 5159 - DNA, 1665 bp, Saccharomyces pastorianus
atgacatacaaagaggaggatactcgcattgaggttgcgaaagatcaaacaaccgtccaaagtgaagataccctttctctaggtcattctgactcatcgatagatcacgtttatgataaagaggaatcgaaacgtaatcctttcttaaatcctgcagtcgaaaagtactactggaacttatatgaatctaccaagtatgagtgtcgtgaaagatttgatcctaacttcgaatggacaaaaaaggaagagaagagtcttttatggaaattggaatggcgcgtaacgctattagcttgctttatgttcgtggctttgcaagtcgaccgaggaaatttggcgcaagcggtagcagataacttactcgacgatttgaatatgaatacaaataactacaataccggcaatactatcttttatttgacattcttgtgcgcagaactaccttcgcagttgatctccaagagattaggtgcggatatttggataccgatccagatgactctatggtctctcgtcgctattgtgcagtgtagactcacaggaaagcattcattttatgcatgcagggcgctactaggccttcttgagggaggttttgttccagatttggtcctttggatgtcctacttctacactgcctcagaattatcaattaggttatcactcttttggaccactttgtcgttgacacagatagccacttcattacttgcttttggtatattgagattgagaggtcgtgggggaatggccgggtggcaatggttgtttttaatcgaaggtctattcactctagtcattggtatagcctcctattttttgatggttccgtctgttgttgaaactaagaaaccgtggaacaagaaaggatggttcacggatagagaggagaccatcattgtcaacaaaatcttgagagatgatcccacaaaaggtgacatgaataatagacagggtattaatctcaagatattatggcaaacaataaccgactattaccaatggcctgtctatttgattggattaatcgcgtatatgccagcgaatgtattaactgcatacttgacattggtattaaagagtattggctttaaaactctgcaagttaacttacttgctatacctcaatatgcactccatatagttctattactcggtattacctatttgacggagaggctaaacaacagattaggactatgtcttttgcagcctttgtatactgtaccgttactagccatcttgcgtttttggaaaggaactatggttgataaatggggaacatatattatcattacattgctcttgggaaatccatatatacatgctatttgtgtttcgatgtgttccaggaattcacactcaataaaaacaagaacagtctctgcttcattatacaacatgtttgttcaagccggtctgataatatcttcgaacatttaccaacaaagtgataaaccgctatatcgcaagggtaattcggttttgtttggcctttctctcgccatgtttcctttattgattggaagtaagtttttctatatacatatcaaccgtaagagagataaaatttggaacgcaatgtctgaagaagaaagggagcattatatgaatgtaactacggatacaggttcacgtagattagactttaggtttactcattga

SEQ ID NO: 5160 - DNA, 2127 bp, Saccharomyces pastorianus
atgagaacatcacacagataccacactagctctactgcaatgaaagatcagaaacctgagaaacagaagattaagaatgttaaacaagaaagacgcaaaaagtacgcagatttggctatccaaggtacaaataactcctcgattgcttccaaaagatctgtagaattattgtatttacctaaattaacttcagccaataattttcaaatgaacaaggataacaaattgctggaatactttaagttttttgttccaaagaaaatcaaaagatcaccttgtatcaacaggggctactggttaagattatttgcgattagatcaagattaaattccatcatggaacaattaccacaaaataaaaaagtagtcataattaacctcgggtgtgggtacgatccattaccatttcagctactagacactagtaacgttcacagtcagcggtatcatgaccgtgtttcttttttagatgttgattattctgatttactgaaatttaaaattgagctaatcaagtcgatacctgaacttgctaagatcattggtcttaccgaggataatgactatattgatactacaaattcggatgttctaaccacatccaactatcatgccagaccgtgtgatttgaacgattctgcaatgtttagcgcattactaaatgaatgtcaattgaacgactcgaatatcattaaagtgtttatcgctgaagtttcactggcatacatgaaaccggaccgttcggatagtatcattgatgcatgttctaagatggaaaatagtcattttgttattctcgagcaactaattccaaaggggccatttgaaccattttctaagcaaatgctggcgcatttcaagagaaacgattctcccttacaatctgtattgacctataatactattgactcgcaagttgaaagatttaataggctaggttttccctacgttaatgtgggagatatgtttcaactgtgggaaagtgcagatgaaatgaccaaaaaggaacttttagaagtagaaccgtttgacgaactagaagagtttcatttgttttgccatcattacgtcttatgccatgctacaaacaatagaaagtttacttttactcaagagtttgaatttgacagaccaatctccgagactgggttagttgtagatcgaaaatatcagctcttagaatatgaatgcccgatcgataggagatttggcgatgcagctatttgtggaaatgatatattttatgtgggaggcagtaacccatacagggtaaacgaaatattgcaattaagtatctctcacgataaaatgaatgtgcaaattattgaacccagaagcaatgaacttcccatagcaagaatgtgtcatactttgacatccttttgcggtggtagccagctactactcgttggtggtagaaaggcccctcatcaaggcctttctgataactggatatttgatacaaagacaaatgaatggttaatggttcagaagctacaacatacaagatttagacatagtgcatgcaacttatctgatgatagtgtcctgatctttggtggtgctacagacggaccggctatgctacgctacgatgtcactgaacaagcctttcaagacataacaccaaaaaacacgttcttcgaaaactcgctagtatcagcagggttggcgtttaatcctgtatccaaacaaggtgtcatattgggcggtggattcaaggatcagacgactgtttcagacaaagcagttgtatataaatacgatgcagaaaatgccacagagccaattactgtagttaaagagattcagcacccattactacaacgctatggctccaaaatcaaatatctttcttcagaaaagctgctgatagtgggcggaacgagtccttcaagactatttgaccacactaactccataatcacccttgatcttcagaatgagacggtaaagtctattcctatcccaatacacatttgggaggatcattccttaatgcttagcggatttaacttagtctccgcagcagaagacattgttcacattataggaggtggtgccacctgctacgggtttggttcagtaactaacgtgggtctcaagcttgtagaaaatggcaattga

SEQ ID NO: 5161 - DNA, 2904 bp, Saccharomyces pastorianus
atgaacgcccatacaggacctggcctttgcctaaactggcatcctcatcaagaatacattgctacaggtggtcgagatggaaaatgctgtctttggtatgttggtgataatgtcaataccagtgaaaatacagtggttaattacggatattcgccctcattgcacacaccaaatacaaccatgaataacaatagttcgttggcatttcctaaactaacaatcaacacagggtatccagttaccaaattaaaattcagacctacctatagtaagaacatatacaactcactattaggagtatcgtcaatgggtgacgaagcagaagtttgcgtttattccttagcaaggaagtacattcctagacatatccttttatcaggaacaccctcgctgggattagtgtggtgggatgataacttggtcttcaatattgataaggggactcgcattaatggttgggacattaacaaagagccaacggtgcttgaaaacttgagcaagaatacgaccacctggagagatttagacggaaatggattactctcggttgatcaagaagtgggctcatacgagctgccagaaccagagactaaaaccattccaaacaatacaagcaaaaagcatccaggtgcaataaaaaatacgaaaaatggcaattcggagggccagggcataataggaggaatcaaaaaaggttttagtcatacaggactaacaagctttgcaccagaaagaccacccactttaaaagcaggtccaacattcagtacaaagagtttaatgacaataacctctgcggcatcttctttcaatagctcttccgcatcattaacatctttaacaccacaatctgaaaatcaagaggaagttgccattgaaccgccttatatcatcactttagatataccccagattttcaataatttaagattaaccaaaatggatcatttgaaaaaaaaagacgcaactattgaaaggttttctgttagggattcaccagtaaacacttttaaatttctggctcggcagctcaaattttcatatgttcaagaccagaatggtgcagatgatgttaatgttgtatacaaacgtgatgagaaaaatgttaataatgataagaaagtgattggtgggcacgatgatgatgacgacgacgacgataaaataatcgagactcatttgttgaaaaagtataatttttcagaaaataatacgtgggccactctaatgaatgaaaaaagcagcaaaaaacaatccaagagaaactccaaaggctccaaggatttcgatgagaaggataccagatcaagtatatcttccatttccaccaataaacgcaatcctggcaaaatcagaaagattaacaagaacttagaagcagagctccagaagaaaatgcagacgtttctagatctaatatctattgcaacccacaatgcatcagtttatttgtcaataaatgatctacccaattttaaggtttggattctaataagagattctttgctttgggacttgaagtggatgacttcctctccagtatcatccgatgaagcatctaatatagatacaaacgaaagctctgattttgaatcaggggggaatccaagagctggaaaaaggtctcctgaggaagatagagaaggaacaagtggagcagattctctaatagaagaaagaccacaagcatttcaagctagttctgaggaaccaagtgatactgaaaaaaaaccaatctctaaacttggagagcagttgaaaaacacagaaagaatcacatatacacaaccaaatgaggaatccgatgaggtgttaagtagattgaaagaactacaaagccaactttcagagtctcacgggattatgggcgaggcaacaaatgacgatgccattatcgaggaagatgaggaagaggaggccgaacaagaagctgatcaagaacaggcgtatgacccattgataaaatcaacccgcacccatgcgtcgtctactgccaaaagtataccgatcctacagaagcgagaacaccgtaaatctttcatagatacgttcatgctacattctcccaacggctacaatgcagatactgacatgggaaatgacgacgataacatatctcccaggtttgtttacaacagtgtaagcccacgtagtaaagtgtcatcgttgcaaagcttcaccacgacaacctcccaactgggagctttcaaaaaactgtcttctcaaactgcaccagtgatcgggtcgcccgttcgcacgctgtcacaaccagatggtgttgacaggcaacaaccgtcttcctcattaacagaaaaactcgccaaatgtagacagatggcggacaacccgccttgggatactaaaaaactcatcaagcaactatacaaacaagccacagacactgggaatgtcgtgctaacagtgaatattcttttccttttccaaacgatatatcacgttacagaaatcgaaatcgcaaaggacgcaatttcacattttctgctgctgctccatagatatgagctgtttggaatcgctgcagacgtcttgaaatactgccccttcgaggatatcatgggatctgaaggtgatcagtcttccattagactctactgcgaacaatgcggcgagttaatcacgaacgaaagctccaaggacaaatttagagcggaagtgcagcagacaaacaacaagaaggtaatggaaaagttcggatactggtattgcgactcctgcaagaagaagaattcgctctgtgtcctgtgtgaaagacctttgaagaaactaaccatggttctacttccctgtggacacgagggacatttccagtgcatacaagaatggtttctcaacgagaaggaacgcgaatgtccgggcggctgtcccggtgttgcattcatctga

SEQ ID NO: 5162 - DNA, 1101 bp, Saccharomyces pastorianus
atgagctcgtctccccacatggagaatgcttcaatccttaagggaggtacctctataccaaaaaacaaaaatgtctctttgggcaagaacgagttacttggatcttcgtcaagcaacaattcgtcctttcgagtgcaccattattcgaatagtagtcagacacccacattggactctatacggagaactaacctaactcccactttctcttacagtaacgggatttatatgtctgaaagtcatgcacacagaacaagttcattcaacgataactacttggcctatgataagagtccctatgcaaagaaaacgagaagtgcgaacaacaagtcaaacatgaaggttaaaacaaaaactaattttaatattacaacgactacaaggaattcttccggactcatatacaccaccaaagtggataaggaattatccagtatagacaaagtgaatgatccgaacatcaatggtcttgtgtgtgcaggaaaaacacatttaggattctatcaattttcgccaaccgataggtctattaagtgtgtacatgatttcataagacctaataataatacatcaacaaagttgggaacgtccctactacccaaattaagcaagagaacaaggcagaataaatttagcacaattgcagatgtgaaaacggggttcaataattacaaaaactgtatcgcagtgtgtaacaattctacggcgatatctatatacgatctcaacaagagctcttcattagataatcctttgataacatctctatgtgaacatacaagatcaatcaatagttttgactttaatatggtagaatcaaaccttataattagtggtgggcaagacagttgcgtcaaaatatgggatttacgttctaataattccaaaagctcaaatcgatctgatatcaatataaacacagcgtctgattcaatcagagatgtgaaatggatgcctggttacaactttgcatctaagaatgaacagggttcatcgacgtacggcaattctaaaagcggttacaaatttgcatccatacatgactcagggtatctattgaagttggatcttcgtcaacctgctcaatatgaaaaaaaatga

SEQ ID NO: 5163 - DNA, 351 bp, Saccharomyces pastorianus
atggacgaattcaaccaaatccaccaatatatcaatcagcacgaagaaatcgatgccagcttgtttttcttcaacgttatcaatgttggtatcgtagaaccacattctttaaaccatagtcactacccttccacctgtggaagacaaattcgagacactattatggtcgttgaaaactttatcaaccactattcgcaaatgtttggttttgaatacatcgagtccgttaagctgtttttcgagaaattcgaagataaccatgaagaaactctagctgcattggattctgtagtcaatgatgaatttttcaacgatttacaagaattgattgaaaataatggattctcttga

SEQ ID NO: 5164 - DNA, 960 bp, Saccharomyces pastorianus
atgtgtggttcttctgattcggactctcacgatgggtacctgacctccgattataattcctcgaattctcttttttcactaaacaatggctacagctattcgagtgcgtctctcgacagagcgacttttgactgccaagactctgatcttcttggaaatcataagcatccaatgctgtctacagaggtaccgcgttttatttctaacgacgcgttacactctcccattacgttgaactacaaaagggacaatgacgatgttacgtatacgaacgcgaaagtaaataaattcatgattgttctgattggcctacctgctaccgggaagtccacgatttcttcccatctgattcagtgtttgaagaacaacccattgactaattctctacgttgcaaagttttcaatgcgggaaagataagaaggcagatcagctgcgccaccatttcgaaacctctgcttttagcaaatacgtcttcagaggacctgttcaatccgaaaaatactgacaagaaggaagcgtatgccagaatcactttacaaaaactgtttcacgagatcaacaacgatgattgtgacgtcgggattttcgatgccacaaactctaccattgagagaagaagattcatattcgaagaagtttgctcgttcaatacagacgaactctctacttttaacctcgtgcccatagtcttgcagatatcatgttttaatagggactttatcaaatacaatatccacaacaagtcgtttaacgaggactacttggacaaccatatgactagccataaggatttagcgaagagattgaaacaactactactcccaatttacacctttctccatggacgaattcaaccaaatccaccaatatatcaatcagcacgaagaaatcgatgccagcttgtttttcttcaacgttatcaatgttggtatcgtagaaccacattctttaaaccatag

SEQ ID NO: 5165 - DNA, 213 bp, Saccharomyces pastorianus
atgaagaaggttgaagatggtaacattttggttttccaagtttccatgaaagctaacaaataccaaatcaagaaggccgtcaaggaattatacgaagttgatgtattgactgtcaacactttggttagaccaaacggtaccaagaaggcttacgttagattgactgctgacttcgatgctttggacattgctaacagaatcggttacatttaa

SEQ ID NO: 5166 - DNA, 303 bp, Saccharomyces pastorianus
atgccaccacaagactctgaaggttggttctacaagcgtgctgcttctgttgccagacacatctacatgagaaagcaagtcggtgttggtaaattgaacaaaatgtacggtggtgccaagagcagaggtgtcagaccattcaagcacattgatgcttccggttccatcaacagaagagttttgcaagctttggaaaagatcggtattgtcgaaatctctccaaagggtggtagaagaatctccgagaatggtcaaagagatttggatcgtattgccgctcaaactttggaagaagacgaataa

SEQ ID NO: 5167 - DNA, 99 bp, Saccharomyces pastorianus
atgggtccacacaaaggtaaggccccaagaatccaatctaccggtagaaagttcgaaagagccagaggtagaagaagatctaagggtttcaaggtgtaa

SEQ ID NO: 5168 - DNA, 192 bp, Saccharomyces pastorianus
atgggtatcgatcacacttccaagcaacacaagagatctggtcacagaactgctccaaagtctgacaatgtctacttgaaattgttagtcaaattatacactttcttagctcgtatgttaaagaatattatgaatggccccagccaacatccatttctggttagaaggattctgttacacaaggtacaatag

SEQ ID NO: 5169 - DNA, 1971 bp, Saccharomyces pastorianus
atgagtgtagtgccaaaaccgaaacgttcttcggcctctacaatgtctgacgaagatgacaattatgacgatttcatgttatccgacgaccaaggcatggaatccattgaaatggaggaagaaactgatgacgaagacgaaaaaatgatccggctggacgagcagcaggaccaaaaccaagaaggcgagcaatataaacagcttatgcaggatacagtgggtaaggtcgacaaagaatgggatgcttgtaaagtactttttgaacggggccaaagtttcaaagaggacgaacaatacaaagaagctcgcgactcatttctaaaaatatattatagggaagaatttttgggtgatgaaagtattgacgtacttttgatatggaaattcaaatcattgaatgaaatactacgcttaggagcaccaagcttccaatttcaaagcaatggtacacaagacttggccctccaagttctagaggatacagcaaccatgtcagattttttacaaagaattgatttccaaatcgatgaaaaaatatttgaatcactttcagacacctttgagacactggcgcccaattgggaaagagtatttttatttgacgttgaaaaggttgacaaacaaaatatgatctgcaaaatagagttccaaaaaagcctcatggatcagtttcaatggatattaaaaaaatctgacaaaaatgataaattaaaaaaacttcagtgtatcatcagaaagaaattgcttattgcagttatttggcatcgaagattgactatgggggatatctttattcctgaagtttatttccaaatacaaaatctcgtatgcgatatgggatctgcttcttttgaggaggtgaatgatccagaaagtatttcaatactgctacagtactatatactggaatttatgaaaaacgcacggataaaaaatagaaacttgttcaagaagtgtattgactactttgacctgacgacatcaaaatcgcttactttctcccaacaaccaggatcaatggtaatattatatacttccaaggcagtttggattttagactcagattcagaaaacgatttatcctttgcattgatgaaatattatgaccggaaagaagaactgaaaaacatgtttctccagattttaaagcatttggaagagatggggaagttccgagaaagagatattgcttctttgtttcacaagtttgtgctcagcggctttatatttaccagcatgattttagaagcgataagtgctgataaaatcaatccctttgattttgaacaggtaaagattgccctaggcagcccaattgttcatgtattacaaactatctacaaatgtttcgcagaattggatttaagacaactaaatgcaaatatatctcgtattccagaattgtctattataatgaagaaaattattcaggatatttattatttagcccagacactaaaactatcgagaaaaattgcacagctttactcttgcatctcaataaatgacattattgatatgttacaagtaaacgagaataacgagatgacgagagacgatttattaacaattttaatgcgatcgataatgaaagacagatcagttttgtatttcaagctggacttgaccagcgatttggtttatttcggtaatgaaaacaaagtcatgttaccgagatgttccaaagaggaaattcgtttaacaagtacgtcaaaagaggatgggcctacgaaaaatgccaaactcatagatttcgaatatgtcaacgacgtcggaatttacaacaacccaacaaggataaagactaaatcttctaaagagttttttaatacattaagaaaatctagggaaattgttagattacctaaagtcagcaatcagtcaaatgagggggtatttttaccatcgtatatgagatttgccaccaaatacctggaattgactaaattatcctccaccaacctctcttag

SEQ ID NO: 5170 - DNA, 963 bp, Saccharomyces pastorianus
atgtatgatagattgaaggaagattgtcgtgcgggcgctgtgtctgggaaggatatggaagctatagagagagatatttatcgaactttccccgataacattcatttccacaaggaatcttttcagaggggggagcccgcgatgatccagtcgctacgtcgagtcttgatggcgttctctgtttatgacggggccatcggatactgccaatcgatgaattttcttgtgggcttgctgctattgttcatggacgaagagaagacattttggatgttggttataatcactggcaagtatttacctggagtgtatgaatccgatctggagggcgcgaacgtggatcaaggggtgctagtgctatgcatcaaggaatacttacctgaaatatggtcgcacatagaatcatcgtacataaacggcaacggcagtacgcgccagataccaaggccgaatccggaggagcagtatcttagtagattgcctacgctgactttatgtacagcaagttggtttatgagctgttttgtcggggtagtgcccattgagacgacgctgagaatatgggactgtttgttttacgaagagtcgcatttcttattcaaagtagcgctaggaatattgaaattaagcgaaagcgagtttttggagagcaaaagccaaaaactgttcaggcaatactcttcgtacacgtttggaggtggcaatgatgcagactcgagtttcaaaaggctgaaaaataagatcaagacacaggaggaggcggatatggagattttgcaggttattcagaactttcccaagcgtctgctgaacccgaacgaaatcttcgagaagatattgatgaagaagaagatttcattaaatagcattaatcaagagacaatcgatcgcggcagggagtatgtggcgatggagaggaacagacaaaggacgagtagccgcccaaaggggaaaaggaactaa

SEQ ID NO: 5171 - DNA, 177 bp, Saccharomyces pastorianus
atggcatatcccgagacttgtgatagatatggatttagtaagaaaagctattttatactacaggaagaatatgataaatggttggttgaatacagtagatacagcgagagaaggaaaaaaaatgggagaaccttttatcgaagaataaaatcaacctcaacaatgataacccgctaa

SEQ ID NO: 5172 - DNA, 780 bp, Saccharomyces pastorianus
atgtcaagttcttcgtctagcagtacatcatcagctccaaaaacgaccacgagcgcatcatcgggagtatcaataataacgtcgttcgaactaataacgagtatggttacaaataccattgtgagtacttctggcgaacaccaagaaacgatatttgttacgactacctctgtaatcgaaaggacgtctgcagtagctacggcagactcttcaattaacaaatccaattcgaactacaaaaagggcctaagcggtggagcaatcgctggtgttgtcatcggtgtagtgtttggtgtgatttttactatagcgattctgcttttcttagtatggagaagacgtaaatcggatgatccgttagacctggaagaaacaaaacatcatcagccttattcatttggcgacgaagatgccaatccagtaagacttcttccgtcatctggtacaactaattggatgagacatacgaggcgtgatacttcaggttctatcggcacgagcaatatgtacggtttatccatgaataacggtgggaattatagtagtcccagttcaaataatagtggaagtgtcctgaataacttagctggattgcaagacggagccgttcagaggcaaaatcttccgtcaacagttttcgaagagacaaatacactgaatagtgtgaatgaaaggtttagtgccaactcattacctgatatgatgatgagcgggcctttacaagtggtgaatccagataatcctgaattgactagtaccgcatcacataatcgagcgtag

SEQ ID NO: 5173 - DNA, 531 bp, Saccharomyces pastorianus
  modified_base (519)..(519): a, c, g, t, unknown, or other
atgcaaagagcatgcttctcaaatttgacaaatagaggaatttttaagttcagctatatccaatttatacttttaagtgttctatctcaatatcttttaaggctagtcagtgctgacttcaactatgaaggctgctataatgcagaggatgttcagtctgctggactatctctcaaaaactcatatctatatcaatcagtgtcctactgtcaaaatcaatgtcctgattctgctgtagtggcactgtttgatggatcagactgttattgcggagattctgtaactgtcttaagttctctaacaaaatctacagattcaaattgtgaaactaaatgttctggatggccataccaaatgtgtggcggttcatcctatatgaacgtttatgtcaatgctaaagtttctgtttcctccgttgaatcttcatctactacagaagcgtccaccatcccctatataacctcaacgactcgctcgagcacgttaaagtcacatcttcagccactgaaagatcgacgnccgattgccagc

SEQ ID NO: 5174 - DNA, 417 bp, Saccharomyces pastorianus
atgactttcataggactagcagcatattttgttatattgaccgataaactcaactcctacaaaagatttaataagacagttttctttatttcagtgtcggtagtttgttgttccttgccgctattaaccgctatcatcacgtttgatggactagaaaatctaaaagatagaataaaactaaacgcaatcacttgggaacttgtaacgctggtggtggcgtcaatgatctatgtgacaagatttcctgaatcgttgttcagacgaaatgaaaagggggaaggttggaaccattccgaatatctcttccacctccttatatccggtactgctttttatcacttctttatcttgattcaatcctatattttgatgcattcaagtttgaatcaacctgaactaattaatttcaagtcttaa

SEQ ID NO: 5175 - DNA, 270 bp, Saccharomyces pastorianus
atgtacagcatggcctctttgacgacagtagaacgaagcccagtcaagacggcaacggaaaagtatagcgatgcgtctggagaggttacttccaatacggatgcggaaacgaaagagactaagaagggatttgcgttccaggatttggccaaatggcaaaagcagtataaaaataaatccagcaggagtgagtcgctggtagcgttgatatatcttctgggctcgatgtcatccttgtctgctcatattcttctcggctttacttgggat

SEQ ID NO: 5176 - DNA, 387 bp, Saccharomyces pastorianus
atggtttggaatatttatgtacctataatcagaattaattattatgatctcttcgattttgcagatgagttgtttgagtttgcacctgtgttaagacccaatcccaaggcaacatgcgttttgggcaacccgttaaccaatttacttgttaacgggatagtggcgtgtttctttgaattttgttccttagcactaacgaaagtttcaaagattctactagatctgttcgtcttcgcactattcaccgattccgaaaatgaatcatgctttgatatagatgatgattggctgtgcggcctaggttttggagaggcaggttttgaagacggcgagtctataggtaacactctcccagatgatgacgttcttctttctgttattttttga

SEQ ID NO: 5177 - DNA, 867 bp, Saccharomyces pastorianus
atgtcagatgagaaaatagaccaaacagaagaggtggtgaaaagaacaccacctttgccaccggtgccggaaggtttgtccaaaaagcaatggaagaaaatatgtaaaagacaaaggtgggaggataacaaagtgaaatataatacggaacgtcgtgtgaagaggaagaggctacgtcacgagagaagtgcgaagatccaagagtacattgacaagggagaagaagtcccacgggagttggttagagagcctcgggtcaatgtaaaccaagtcgattctgggatcgagatcatactcgactgttcctttgacgaactgatgaacgacaaggaaatagtcagtttgtcgaatcaggtcacaagggcatattccgccaacagaagagcggatcatttcgcggaaattaaagtggcgcctttcgataaaagactaaagaaaagatttgaaaccgctctgcacgatacgaattacgacaactggaaccacttcaaattcctaccagacgacaaaattatgtttgaagacgagcacgtaagcaaggacaaaatagtgtacttaactgccgacacagacgagaaactagataggctggaaccgggcatgaggtacatcgttgggggtattgtagataagaaccgctataaggagttgtgtctcaaaaaagcccaaaagctaggcatcccaacgcggagactgcctatcgacgagtatatcaacctggagggtagaagggtgctgaccacgacgcacgtggtgcagctcatgctgaaatactttgatggccatgactggaagaacgcttttgaaagcgttttaccggccagaaagctagaggcagaaacagcatccacgaccgacgacgcataa

SEQ ID NO: 5178 - DNA, 744 bp, Saccharomyces pastorianus
atgggtgccgttctgcagaatttgctatctaccatgatcattcttgccgcgtactataccgtggccgatgtcattttacttggtcaatgtctatggtacgacaatgaggaaaaaccggcagtggaccctattcatctttctcctgctaacccaatgaacgaaaatgttttgcacgacgtcttcaacgaacagcagccgctgttgaacacgcaaggccaggcaaatcacattgatgaagaaatggctactccttcgtccaatggagacgttgctggtgacgatttgcgtaaagctaattcaagaaatttcgtgaaggacgtctgtattgttgcaggagtggttttcgtgggtgttgtatcatggtacgtgacctactgcttaaactacacgcagtctcctcccgtggaaaacctacctttgcccgttcccgaattagaaatcaactggttggcacaaatctttggctatctaagcgctatgttgtacttaggttcaagaatccctcaaatactactgaacttcaaaagaaagtcttgcgaaggtatcagcttcttgttttttctgtttgcctgcttgggtaacataacgtttattttctccgttgttgtcatctctctagactggaagtacttgattttgaacgcttcctggttggttggaagtataggcactctgttcatggatttcgtcatcttttcccagtttttcatttacaaagggaataaaagatttatactaaattaa

SEQ ID NO: 5179 - DNA, 1143 bp, Saccharomyces pastorianus
atggtttcatttcttgttagtatttcctctcttaattcttattcatttcctgtctcttatattgtaccaagcatacaatcaactatctcatatacaatgtctatcccaaaaactcaaaaaggtgttatcttctacgaatcccacggtaagttggaatacaaagatattccagtcccaaccccaaaggccaacgaattgttgatcaacgtcaagtactccggtgtctgtcacactgacttgcacgcttggcacggtgactggcctttgccagtcaagctaccattagttggtggtcacgaaggtgccggtgtcgttgtcgccatgggtgaaaacgtcaagggctggaacatcggtgactacgccggtattaagtggttgaacggttcttgtatggcctgtgaatactgtgaattgggtaacgaatccaactgtcctcacgctgacttgtctggttacacccacgacggttctttccaacaatacgctaccgctgactccgtccaagccgctcacattccaaagggtactgacttggctgaatgtgctccagtcttgtgtgctggtatcactgtctacaaggctttgaagtccgctaacttgtctgccggccaatgggttgccatttccggtgctgctggtggtctaggttctttggctgtccaatacgccaaggccatgggttacagagtcgtcggtattgacggtggtgaaggtaaggaagaattattcagatccattggtggtgaagttttcatcgatttcactactgaaaaggacattgtcggtgccgtcatcaaggccactgacggtggtgctcacggtatcattaacgtttccgtttccgaagccgccatcgaagcttctaccagatactgtagagctaacggtaccactgttttggtcggtatgccagccggtgctaagtgttgttctgatgtcttcaaccaagtcgtcaagtccatctccattgtcggttcttacgtcggtaacagagctgacaccagagaagctttggacttcttcgccagaggtttggtcaagtctccaatcaaggttgtcggtttgtctaccttgccagaaatttacgaaaagatggaaaagggtcaaatcgtcggtagatacgttgttgacacttctaaataa

SEQ ID NO: 5180 - DNA, 840 bp, Saccharomyces pastorianus
atgtcacgcaaatgcttaaatgctataactcagcaactttccatactcgaagaatttttaaacaagacacaaaatcaggaagctgggccaagcgaagtacacggaaggaaatgcgttgtgttacctgacgatgattttgaacccatggagtttttctctcatctaaaaactaatgcgcaattacgagatgttcacgaagcttataaggcatatgggaagcttctaaggaaatttgatggccgaaaggagcgagtggatgaatttctaaaagacagtaccccattgcccgaggctgaagatgcgaaacaggtaactctatctgagacggcggaagtagacaataaagggccaggaaatccaaacgatcgcacgttgcacgttgaagtgagccatgaagacaattcactccatttcacaatatataacaacacaacttcaacagtgccagggaattgcacatttgagttttctaactcagcctctgaggttttcagcgtccaaatgggaccacatgaaataggtatggatggacgaaaggaattgtggcatttccctgctcttcccactccgcttatcggttactctgtcaacatcataaatatagcgggagaaattattttttctggtaaatgcactgactcaagtgaggcgatcttagaactatcgccatcaacacactcagtgggcagtttccatactttacaagaccccgataatgtcttccgcgtagacgcgctttcttcatttgatgaatcaagtattatgagcacttccttttcagacgaagaggataattcaggggtttcattagaaagggcatttacttgggaagaaatatag

SEQ ID NO: 5181 - DNA, 318 bp, Saccharomyces pastorianus
atgagaattttagtagaaacgaaaacgttcgagttcgctgttatcgaccaatacaacaaatcaacttactcggcagcaaatacaaaggccaaaacaatcaagagctgtattgataaatttatcgaccagtttaatttatatgatgagcagcatgtattttggcaaccagcagaaaaaaagaacgctcgattgctaataaataacaatgactacggtcagttaggggaccatcctacatcgccaagtaaaatgcaacattatcgttggcgaagaagcactaaagaagtatgggttgaccgtatgcgcgccttacgatga

SEQ ID NO: 5182 - DNA, 1269 bp, Saccharomyces pastorianus
atgaccacaccaaagggccacctgttaaccgtttgcgatgaacacaataggctcaacctaatcatgcccagtttggatgcggatgccatctttgagtgcatggggcagtgttcaatgttgaatgatgccaccagaagcaagcacttgttttggcaaccgagcaataagtccaatgttcgaatattactgaacggtcaagactacggtcacttgttcaagcatttgcagtctcagatacattgcactatttatataggggaagaaacactaaaaaagtatgggttgactattactacgtactttgacaacttcttagacaagcgggtttctggagagaaagaaaactcgagtatagtatataatcacgaaacggccacatcgtccgaggccaagtcgtccgaggctacaaccacagagtctactgcaggtgtgatagtaccacgtgaatgtttaaacagcttcacagaacaactatcaagactggaagaatctctgaataaaatggaacttgagcaaaaggcaacaaccaccaccatccttgcaagcggggaacctgactacaaaataagcggcacgatagacataccagaagataaacccgaactggtacatttcttcacgcaattgaaaacagtcaagcaactagaagatgttttccaacgttatcatagttataagaacttactagacactttcggcggcaagatggaaaacattaacaactttctgcaacaagagactgtgatctgccaggatcccgagccccgaagtgatcgctcactacaagtgacaatgaaccatcgggacagttctttatacttccaactgtacaataacacgacttccatactggcgggcaattgcaaattcaacttcaccgggggtgaccatactcccgtcacacgcaccatcgatatgggcccacatgaaataggcataaaggaacgcaaggaattccgctacttcccgtacacacctgaactaatgaccgcttccaccatcgaaatagaaaatgagtacggagaagttatctttgtaggcaagcgaggcccgtcaccaagagtagatctaaaaccgcccacccgattgtcggcggagagtttacaggcctcccaagagcccttctacgacttccgaatcggcagactaccggaactggatgactccagcatcataagcacatccatatctctgtcttgtgacgacgaagacgatgagaatcgtacaatttccaccttcggtaaagtcctcacctgggaagaactgtag

SEQ ID NO: 5183 - DNA, 3375 bp, Saccharomyces pastorianus
atggacggtgtcagtatacttcctgaattagagtctccgccgatttccaaggatttcatggaaaactatgccacattagggaaaatgagaattacgagagaaagtgaaggccaaaaaggaaacactagccagaacttaatacgagagaggaaaattgaagacgacgagggaaacaaaataagtcaacaggacaaaagcgcaaaaaatactttaatagtcgaggagaacggaacgcttcgttataacccacaaaattcatcaacatcgaattcgcttttagttggtgatgacgaaactaatgataagcgccataagatgagctccaaggagggttcgtattcaaatagctcaatggagctacaaaaaaaatctagtaagaggtcatcattaccttttgtaagaatatttaaaagtcgaagggaccattccaatacttctggaagtaagaatgctgtcaactcgacgaacacaagaacaagaacgtcaaccttgcactcacctagtcaacgccataacaagaaaggcagcaaatttgatatgaattttgactttgatgaaaacttagaagaagaagatgacgacgacgatgacgacgaggaaggcgatgatatacactcgcaattttttcaattacacgacgattttgatacagaaagtgctggtcccagttcaattcacaaagactccaatggcacgtccaacaataacagcaacacttacaccaataacaagaatagcctcagtattcttgatgaccgagagagtcctgacggtacttcaggaagtgcttcaagattaaggtcgcattttcctgcgagtcaaaaaggaaaactgtttttaactgaaagcaaaaatgatgggccaaagtctgactcactaaacgtgagcaagggtacaaacggagatggaggcaccaatagaggcaatggattagatggaagggacggttcaacagaaacccaaagtaacgatatttcggatatggaatcatacattaatgagaaagacttagatgatttaaattttgacacagtcacctcaaatataaacaaaacagtatccgatctggggggacatgaatcagcaaatgaggaatctgcaaacgtaaacgcagattcacaaggcaatcacgctgatggaggtgaacgtggttctcaaagcctcgctggaatatctcctggctcatcatacgggaagtctcttttagggtctgaatattccggggaacaatatttgaataacgagacatcaactatagagagcggcgaaatgtctctcgattcagatgtacaaaccaatactttaccttcacattctataccaatgtccatgcaaaaatatgggatttatcatggcgatgatgattccacattgaataatgtatttgatagagctgtactgactatgaaatcatcaagaactcccaaagaaaggcgtgatacggttgcatcggttaaagaaccgacatccttggccagctccaataggaagttatctgttagctcgaacttaacctctacgaaatcctcacttcttcgtggacatggaagaacttcatcaacgaccagcagtgagcacatgaaagtcccaaagttttctgatggtggatcacataggcccagaaaaattaccttgacattgaagcaagaccatacccaatctaacctttcttccaatgcccacaagatttcaaaagacgggaacattgttattgaaaggaccacagactatctagaatccaagccaaaagcatcccagttatcaaacttgttcagtaaaaaaaagaaaagaacaaacaccaattctacggatgtgttggaatatttttcttttgtctgtggggataaagtgccaaattacgagtccatgggtctcgaaatatatattcaagcttcaaaaaagtataaacgacattctttcaccacaaaagtccggaaatcgtccacgatctttgaggtcattggattcgctttatttctgtactctactgagaacaaacctgataatttcgaacaagatggattgaccgtcgaagatatttccaatccaaataatttttccttaaaaattgtggatgaagacggtgaaccatttgaagataattttggtaaactggataggaagagtaccattcagtctatttcagacagtgaggttgtgctgtgtaaagttagtgacatagagaaatctcgcaatgaaatcgagacgcctttgccgtttgatattggtggtggcgtgattgatgcacctactctggacattaatagcactcatgatacgtccgacggtaccattaatcagttgagtttctacaaacctataattggtaacgaagacgatgtagataaggcgaatggctccaaggtcattgaggtaacagtatatctgtatcctaatgtgaatcccaagttcaattacaccactattagtgttttggtgacttcacggatcaatgatatcttggtaaagtattgtaaaatgaagaacatggatcctaacgaatatgcactaaaggtgctaggcaagaactatacactagatttgaatgatacagtgttgagactcgatggtattaataaagtagagctcatttctaaaaaggacgtaagggaattgcatttggaaaagatgaaaccaaacataaaaaagcctgttttgccaacaatccagagcaatgacttaactccgttgactttagagcctctgaattcatatttgaaagcagatgctggaggagccgtggctggagtcactgagaatgcgaaaaccgcatcaaagcctaagaggatttccgcgaagtacaaactgggtttagcaaagcaacattcatcgtcaagcgttgctagtggaaacggctcaactgcagggggtctagtgaatggtaatggattcttcaagaacaagaattcatcaaaatcttcattgcatgggacattacagtttcaccacttaaaccgctcacagagcacgatggagcacacacctgatacgcccactggggttggggataacaactaccaagacctatttaccggggcataccataagtacaaggtatggagaagacaacaaatgtcctttataaataagcatgaaagaacactagcaattgatggtgactacatctacattgtaccaccagagggccgtatacactggcacgataatgtgaagaccaagtcattacatattagtcaagtggttcttgttaaaaaatccaaaagagtcccagagcatttcaaaattttcgtgagaagagagggacaggatgacattaagaggtactactttgaggcggtgtccggccaagagtgtaccgagatcgtgactagactacaaaacttattaagcgcttatagaatgaatcacaagtga

SEQ ID NO: 5184 - DNA, 1641 bp, Saccharomyces pastorianus
atgatgtttattattcttagtgttattgtttgttatttgacccgatccggaaaagcgatctcttggtcaaatagctggtaccatcaagaagaggaagaagaacaggataatttgacaaccaaaagagcaccagcgagaccagacaggcgtgcaagcatgccagaagatacagagaaagacgggccatctagggccaaactgaatacgcaacgactctctgcaatgatcgattctttacacaatgagaacgacattggactatttcagcctccgacgacaacgacaacgaatgacaaggttgatcaaaccgatataggcaaaccgccatcacggctcctaagatcacctgccggtgatgtgtcgctagcgcttggtgacaatagatcaagcatgatttccaattattctggagttatccaagaaggtgtagaagtttcatacatagtcaagaaccaacaacaggacgaggagccttatagcaacaaggcgagtcctttgaaacagtctgtgggaagggaagatttgccacagttgcccatgttgccctcagaagcgacattgaccaaatatttggatgacgaccaaagtatgaaatcgagaaatggtgaagacgaagttgtgattaagtcagtaaccaatgccaagccggtggggaggttcaattctggtacgttgaagaagggcgaggctcgcgggtcattaaagctgctgtctaatcctcgacgccaggaaaaagttttgcgttcgtccataggttcaggcaatttggccagtgagagtggatcttccacttataacccaaagttccagcagtcgatccaagagcaattagaggaggacgacgatgcgaattctagcgacaaactttcgattgtttccagtgtgatacctgacttatctacaaagacaaacggcgtgccccaagagatgagcccaatacgttctgagacaaatgattataatccaaccatcccacctagaagcaaagatcgtcccagatcaagattgtttatccaagatgatgaaggtgaagacgagtttttggatggggaactactgccaggtccaccccaaaatgttggtcattttaaaaacctttcccagatttctaccgtcagtgaacaaaaatcagactcatactactcggcagcaaccagcatgcctccagcagaagaaacttacttgaccaggccactacctagcacgcccaatgaggatcacaaaggctcatcgaatttgaaacgagacgacacgttaaaggctgctcatacaacgacagagcccatccacactgtctcaagtgaccaagacgatgacatatacgaggacatcattgaggaaacacctaagaaaactaatcgcaagaaggatgggaagaaaaaactcaataacaagaaatccttgaaggagttgcgatcatttgatatcgatacactgaaccagctgttgaacgtgacaaagggtactttgattggatcagaatttgcgcaactggggatgcaattagaagagaaacgtgccctcgaaagactagtggactccttgtctaggttgacggcagacatggttcttgatcctgaccgttacgaagaaggattgaagagattggacaaagctacaaaggcccttgaagggttttga

SEQ ID NO: 5185 - DNA, 1863 bp, Saccharomyces pastorianus
atgaaaaacttaaatcaagataaatgcttcaaaaggaaagaagagagaaaaagagaatggcatcgaaagaaaaaaagcaaatactggaagacatatcgtgaaatgagttctaatgatggagcaggtaacgagttcaataccttattaaacaaagaaatcgaaactgcgaaggaattgaggcaaagaagggatgcgaacagaaatagtagcaagaatgagaccagcaccaaaatcaaagatgccagtggattcagattacgaatcatcgaaaccgatggacgaaagaatagaaagatagatccagaatatgaagtgacgattgatgggcccttaagaaagatcgtgccttatttcttcacttacaagacgttctgtaaggaaagatggagggatcgtaacttactggatgtgttcgtgagtgaatttagggacagggagcccagttattatgccaaaacgattgcagaaggcaaagtgtacttaaacgatgaacctgcgaatctggaaaccatcattcgcgatggtgatttgatcacgcataaagtacatcgccacgaaccaccggtcacctccaaacccatagatattgtgtttgaagacaaagacatactcgtcatagacaagcccagcagtatccccgtgcatccaacgggtagatacagatttaatactattacgaagatgctcgaaaagcagttacagtgttcagtacatccttgcaatcgcttagacaagcccaccagcgggctaatgtttttggccaagactccacaaggtgcagataaaatgggagatcaactgaaggccagggaagtcaccaaagaatatgtggcccgtgtgaagggcgagttccccgtcggtgaggtagaggtggacaagcccgttagatccatcaatcccaaagttgcactgaatgctgtttgtgaaatgggtgacgagaacgccaagcatgcaaaaactgttttccatagagttagctatgatggccagacgagtattgtaaaatgcaagccgttgacgggtagaacacatcaaatcagagttcacttgcagtatttgggattccccatagctaacgatccgatatactcgaacctggatatctggggcccggaacttggtcgtggtgggctcaagaactatgacgaaattgtcctgaagctggacgctattggcaagaacaaacccgcagagagctggatccatccgcacagcaagggagaatacctgctgggccgtcaatgtgaagaatgcgaggccgaaatgtacacggaccccggtactaacgacctgggcctctggctgcatgccttccggtatgagtccctggagagggacccggaaacacagaaaccgctttggagctacaagaccaagtacccagaatgggccctggagcctcatcgccaatacatggagatggccgttaaagaggctgacaagtgcgggccaacaaagactgcgttcagcgttggtgccgttcttgtccatggggaccaagtcctctccatgggctactcgagggagctgccaggaaacactcatgcagagcaatgtgccctgatcaaatactcccaagcgcatccggactgccccagcgtagttcccgtggggacattgctctacacgacgatggagccgtgctccttcaggctcagtggcaacgagccatgctgtgataggatcctagccaccaacggagccattggcactgtcttcgtgggcgtcatggagccggacacgttcgtcaaggacaacaccagtctgaacaaactggagtcgcacggcgtggactacatccagatcccaggctacgagcaagaatgtaccaccatcgccttcaagggccacaacgacgtctag

SEQ ID NO: 5186 - DNA, 1035 bp, Saccharomyces pastorianus
atgattcggtttacgattccacgtaacattacgatatctttacgttgtacgaggagtatatggtcattcactcaggcgcccacccgtagccatatttggtctactactttgaagggtgccaccgcaagtagaggaaaagcttcgacagtgacaagtagacaagtccatgatgggaagcattttttcaccacaccacagcagcaacaaacgaaatcagagggagctgaagagaaagagcaccacagcgtgaaagaggaggatctgaaaagtattggtcaagccatagcacaaaaacgacataaacgccgaaaacaaatatggtcggctatgttcggagggatatttggtgtgataataggatattcggtaatttataaagtgatatacttgaaagatcagagtttcataccattgttcccttcgtccaagatacgcaaactgagtgcaagagatttgaagaaaatcgacgcaaatcaagtgcaaagcctctccaaattgagagtgctggaaaaattgtccggccacgacatgatcaaagaacagtacggggtgccgttattggacaaagacggcaactcgccaagactgaacgaattcagcatgtggtgcgaagaccaagacccatgcgtgaccggcattgtaatggagccggacgacaaaagagcaagttcacacacctggtacagaattccctttgtttgcaaatggagaataacgcaccggccgataagcatacgcggcaccatcgacgatttgctgaaccgtattggactagagaccacggacttattcgagataatatcgcctgaaagagtgtacgggtcgttcaagtacgagtacccactgcagggggactcacacgcattgcacgtttggttccatggcgagctcgaattagacgatgattcgctgattgtatataatggaaaataccacgtggacgtcaaactccaagagatagacctgttcagacgtgaaaagaacggacaactagtacagtacgttctatacaaaaacgaagcgggcgacaagtaa

SEQ ID NO: 5187 - DNA, 156 bp, Saccharomyces pastorianus
atgaatggagcctcgttctttgcaacttcttgttttccattaactgtggcgctggatttggtcataaattggtcatcaggagaatcgattttgatttttttggaatcactcattatatttgaatctggcgatagcaccgacgctattgaatcttga

SEQ ID NO: 5188 - DNA, 1476 bp, Saccharomyces pastorianus
atgccaccatctccaccctctaaggaccaattggatgaattaatccgagaaatcaatcaatgggccattactaatggattaactatgtatccaccgaaattcgaagcaaatccatcaagtgcttcggtgtcaccggtaactgtctacccaactccaattcccaagagttgttatgatgaagccgttgaaatccagccagtgttcaatgaactatacgcccgtataacccaagatatggcccattctgattcttttttgtataaagagactgaagcattggctttatcggattccgaatttaccggtagactgtggtccttataccttgaaactttaaaaatggcagcaaacagaaagcaagccttaaagttaggtatatttagatctgattatctgatcgataaaaaaaacgataatgatcaaattaagcaagttgagttcaatacagtgtctgtttcctttgcaggtctcagtgggaaagttgatcgattgcatactttcttgaataaggcaaacaaatatgatatcaaagggccatactataatgaatctgacatgattgtttccgagtcagggcttctgctgtctaaggcattggccaaagctgttgagtcgtataagttacaacgagagaattcggtttctaatgaccctattgtagcgttcattgtgcagagaaatgaaagaaacgtttttgatcaaaaaatattggaactaaacttactggaaaagttcaatgtcaaatctattaggttgacatttgatgatgttcatgaaaaattgttcatcgataatgagactggaaaactatatgttaaggattctaagcaagaaatagcggtggtgtattacagaactggttataccaccactgattacacctccgaaaaggattgggaggcaagactattccttgaaagtagctttgccattaaagccccagatttacttactcaattatctggttccaagaaaattcagcaactgctaactgatgaaaacgtactaaataaatatgcttctaattctgagcaaaagaataacttgttaaagacattcgtcaaaatatatccgttggatgatacagatttgggtaaagaaggtaagagattggccctgactgaccctctgaaatacgtgctaaaaccacaaagggagggtggtggaaacaacgtttacaaggaaaacattcctggtttcttgaaaggtatcgaagaacgccactgggatgcgtatatcctcatggagttgattgagcccgaattaaataaagagaatgttatactacgggataacaaaccttatgacgaagctattatcagtgagttaggaatttatggttgtattttattcgacgacaaaatggttttagtgaacgaatttagtggctcattattaagatccaaagtcaatacttcaaatgaaggtggagtggcagcagggtttggatgcttagacagtatcattttatactga

SEQ ID NO: 5189 - DNA, 237 bp, Saccharomyces pastorianus
atggccccaaggagaacatatacgtatttgcaaagatatttcttactaagaggattcagtaagaaagaggctaagaatttccagtatgaacattacgcaagtttcatatgtttcggaatgtcggcaggcctgttggaaattataccgttcttcacaatcatcaccatttccagtaataccgttggtgcagccaagtggtgctcctctatattaagggaggggaagaagaaagagtga

SEQ ID NO: 5190 - DNA, 834 bp, Saccharomyces pastorianus
atgaagggaatcagtgagtccgtgggtagcacggattacttgcacctgtttctcctggtgattggatactacatgctgaaccttgcgtttgttgttttgtttgtggcgatactaacatgctcgacgctggtgttcatctacctgccattttttgggttcctggcactaccgatggcttacctgcaaactgttctcgtttccactaccatttgcaattcaatggtgaaaggtactgattttattcttttcacgcgtatatatggggtcacgtttgcaaggaagaaattaccagagttgagcaaagcttgtgaaacggtgagcttcacgccatttgtttacagaagatcgcatcggttgcgtggaattttttcaagacagttttatttcgtttctttgccgcagtttttcatctttgtcatctggtatgtctctatagcctttttctttcttttcctgatgattgtccccgtcgtgggacccattatagtcaacatgatgccatgcagtcctggaatgggcttctactatttcgagccctactttgtcgacgtgctacacttgaactcgcgtcaactttcagatgtctactacagaggctttgcaaaatggctcctgtactcgatgtcaagcggtctactagaatctatcccaatcttgagtggatttttcattggcacgaacgtcgtgggtgcctcgctgtggattattaaggagagaaacgatcaagaagatccgattctacctcctctcacccctgtgcagccgatagaacccgctgaagaatcccacgcccctccggttcaacaatccatttcccacgtgaacccgccatga

SEQ ID NO: 5191 - DNA, 339 bp, Saccharomyces pastorianus
atggtcttgcaagacgtcccaagagcacaagcagcaatgtcaactagagcacaacctgattggtactaccacagacatccatatgcgtcgactccactcgcggagggcgaggaaccgcagctgctccccatccaagaccaatcgggccataaggggtcgaaaacttggatggcatacaaggccccgatagtgcaatggtataagaatgcaatgctcgtcaagcatagtttctggcacgaccttgagtcgtgtcaccagatcatctggtacccttataaagtacgtacatacccaacacagtcatattattatttgttccgctttactaaccgcacatga

SEQ ID NO: 5192 - DNA, 192 bp, Saccharomyces pastorianus
atgtcgggactcttgaccattatttccaaggaccttcttagtatggtcagcctcactcccaatgagtttggagatatggggttatacgaaaatgcatgcggcgattcgttgggtacagcaacgaggtctgaacggtcatcatcactaaacgttgacgagaatgaatcaacggaggaagacgtatgttggtaa

SEQ ID NO: 5193 - DNA, 165 bp, Saccharomyces pastorianus
atgtttaataacgacaacatgtgtaaatcggaagccctttcaaacgagttattttccagtgctagattcaacaaaaacaataaattctccaattctgacttttctggattcagcttgttggtagcagcgttatctgttagcaccatcaatgaggcagctctttga

SEQ ID NO: 5194 - DNA, 1674 bp, Saccharomyces pastorianus
atgtttggcctacggcttcatgaactggtcggtagaccaattattaaattggttccctccttagcaaatatgatattatattccaataaaacgtatcccagtttaaacataaacttgccagaaaataaaggcttggtgttaactgaacatttctttagaaaaattgaagctgaaatgcaccataatattgactcattctatacctcaattggtatagatggctgccataaagatggtaatttaataaaggtagatatccaattacgtgtattgaacacgaatattatactgctatggatcacccattcgagagacgtagttattgagaattacactaccgttccttcacagctaccgatgttaaaggaaaatgaaattgatattgtcggtagtagaggtagttcgaacgcatcgtccaagaagtcttcagaaaagattccagtggaccttttgaggacaatgactaatctatcgattagctcttctgaaacgatttccaattccgacgacgaggtagatttaaatcaagtgaataaaaaactacgggagaccccgagtggtaatgtaaggaataccgaacttaatgaaaacaacaataacgacgatgatatgaccatggttgatgatcctgaattaaagcataagattgaactaacgaaaatgtacacacaagacaaatcaaaatttgtaaaagacgacaattttaaagtcgatgaaaagttaataatgagtataattgaaccgataaatggggaggaaatcaaagaagaaacaagtgcactgcttaaagaaggacccaaatcaagggcgacaaatgctactgctacgtatttgaccgttccagaaagcaatattggctcacaaaagcgcataaagaaattttctgattttaccattttacaagccatgggcgaaggtgcttacggcaaagtcaatttatgtatccataataaggagcattacattgtggttatcaaaatgatcttcaaagagaggattctggtggacacatgggtaagagatagaaaattaggtactataccatccgagattcaaattatggctacactgaataaaaatccacaagaaaatatcttgagattattagattttttcgaagatgacgattactactacattgaaaccccagttcatggagagactggtagtattgacttatttgacgttattgaatttaagaaagatatggtagaacatgaagctaagttggtgttcaaacaggttgtttctagtataaagcacttgcacgatcaaggtattgttcacagagacattaaggatgaaaacgttattgtggattcacatggtttcgtgaaattaattgactttgggtcagccgcctatactaaaagcgggccattcgatgtctttgttgggactatggactatgctgcgcctgaagtccttggcggttcatcctataagggtaaaccgcaagacatttgggcactcggggtactactctatactattatctacaaggagaacccatattacaacattgacgaaattttggaaggggaattaagatttgataatgcggaaaacgtgagtgatgattgcatcaacttgataaaaggaattctgacgagagaagttgataagaggcctactattgacgatatatatcaagacaaatggcttaaaatttag

SEQ ID NO: 5195 - DNA, 1575 bp, Saccharomyces pastorianus
atgtcacgtaaaacgaaacccgaaattttttcatgctcatcgcaatttttttcactttcttcctttagtcttaaactgttatatgtagctttcagtaattcaagacatttcgttgataaaacggttaaatattatcctacagactaccattacactaagattgaacgtgaaaatatgtcgtctgcaattgataatcttttcggtaaagttgacgagaaaaaagtagaatccgccgtggataaactattcagttcatcttgtggtcctatcaataaaatacaggtcaagagtaaaacccgtactattcttcctgattccaagaagagagaaagatccaccgaaaccagccaggagaaggtagaaaacaaggacgcagaagttgtcgaggaacaaactgaagatgccacccttccaaagccaaaaaaggtcaaaaaaactaaaaacagtgacgaagacgaaggtttagaggcccgttactatgccaaattactaaacgaagaatccaaggatgataaagctaaaacagtcagcggcgataaagcagcatcaacaacaaaatccaatgacctaaccacaccaaatgcatcagcagccaagaaggtagatttcaaagaagatgaattggaaaaagcagaaagaactgtttttattggtaatatactaagtactgttattacatccaaaaaagtctataaagaatttaagaaacttttcggtacaagtccagctgtcgaaactgaagaatccggtaacgatgacgaaaaagaagatgccaagaaggaaagctctaacccatttgccattgaaagtataagatttagatccatttcctttgatgaagctcttcccagaaaggttgcgtttgtccaacaaaaattccacaagtcaagagacaccgtaaacgcttacatcgtatataagaacaagtcagctgtaagacaaatttgctcgaacttaaacggtacccttttacaagatcatcatttaagagtcgacgctgttgcacatccagctcctcatgacaacaagcgctctatctttgtaggtaatttggattttgaagaaattgaagaaagtctttggaaacacttcgaatcatgtggtgatattgaatacgtccgtatcatcagagattcaaagacaaatgtgggtaaagggtttgcttatgtacagtttaaggacttgcaaagtgttaacaaagctcttttgttgaacgaaaaacctatgaagtctcaaaagcaagaagacgaagattcaaaaaaaccagccaagaaggcaagaaagttgcgtgtttccagatgtaaaaacatgaaaagaggtaccactgttggagctggcttagataaaaatggtttaactgattcacaaagaaccaaagctggtagagccaagaaggttttaggtaaggccgacagggcaactttgggccaggaaattaccatcgaaggtcaaagagccaaaaagggcgaaggctccacccacttaaagaagaggaaacaaagatctcctacaggtagagtgacgcagagatcgatagcattcaagaaagcccaagctgaaaaaacaaagaaatag

SEQ ID NO: 5196 - DNA, 1554 bp, Saccharomyces pastorianus
atgagtcaaagaagagctgttgtagcggttagcgtaaagcccaagtgctttaaattagagcctagacacggatcttcatcctcttcgtctccacccccatcatctccggatgaaaatacatcagaaatgccatctattaagctatccaagaactgggagttgcctcagcggctgaaacccggacgtaagccgaagtacaaacgtgctgaagcgttggctaacaagaagccgtcattcaagttaaaaaaggccccaacctgtaatcagaaagggcagatgattacagctgactatgagcacgaactgacgaaagatgatggagataaagaggtaaacacgattgcaagtggcgatgaaaacggtgttgataacgtagaaaaacgaaggaagcaaaatagagacgctcaaagagcatatagggaacgtaggacaaccaggattcaagttctagaggacaaagtggagaagttacaaaatttggttgacacttggcataagaaatacaaactgttggaattcgagctacgtgatacgaagaaaaagctgcattcatcgctagcgctaaatagcgaattacaaagaacgtcgccttggtttacgaatactcaatttcagcaaccacaatcaaatgcccaaaatttggcagaaaaccccgtttcgataacagaaatgatagagaatttcaagccaatgggtgctgtaaatctgaagaaaaggaaagccgatgaagctcctttaacatcacaaatttccacgatatcaacggaccagtctttatcagagattgaaacagttaatgaataccaatatcctagcagtaaacagtttagttcaaggaactcatctctcgacggccatacgagtccaccgtcgtctttatgtagtagcagcaccaacgcaaacaagaagacaaaattctgtgagaagaaacaaatggtagaaccaactgagtgttgtgggcaggacaataccattgcacccactttggctccgggatgttttgcaagtaagaaaataaaattggatggtaagagaccggtaccaacctgctgtaaagacaaagaaagagacaaggaaatcgatgatagtgagaacaaacccatcaccatagaggatgggtcatggatacctgggagctgtaaacaatgtagatcagaccctaacagtatgaatttctgccaatcgctttctaacagacgtagttcaagttgctgttctgccagtagttcagtgccagcgaatgccaataaacaacaaactgatatgaattatagtctgattaagttgcctgaaataggcaacgccaagaataccccatcggatgtggcttccaatgcaaatgactatataccaatcagttgcacatatcaaaaaattcgtcaacatatgcagaagaataaaagtctccaagaaccgatcaatacagatgatccggcctccgtctcgttaatcctggagaacgttgcttctggattgcgcgttagtggacagaaagtggagttacaaagcgtaaaggatgcgttacacaagatggataaacacgttttagaatag

SEQ ID NO: 5197 - DNA, 816 bp, Saccharomyces pastorianus
atgctgttggctaacatttccgtggcaagaaaaatttacgatgccttccctcagaccgcaatgctaagaagacacgcagctccaccatctactaatttcgaaattatgaatgaaatgttgaatacgaggaaaaatatgtcgatctcattggaatcatccaaggctctggcagattctttggacagatgtgtggaccccgaagacccatacttcaacactttggtccgtataatgtcaacacgttgtatgatggctgcccaatatttctattctggggcctattcctaccctgactttagacattatggtttagccgttgatatctatacacatttcacatccccaatcagacgttactgtgatgttgttgcacacagacaattggcaggtgccattgggtatgaaccattaagtttgactcaccgtgacaagaataaaatggatatgatctgtagaaacattaacagaaagcatagaaatgcacaatttgccggcagagcaagtatagaatactatgttggtcaagttatgagaaataacgagtccacagaaaccggatatgttatcaaggtgtttaataatggtatagtggtactagttcctaagtttggtgtggaagggttgataagactagataatttaaccaaggacccaaattctgccactttcgacgaagttgaatacaagctaacttttgttcctacagactctgacaaaccaagagatatttacgttttcgataaagttgaagttcaagtgaggtcagtgatggacccaattacaagtaagcgtaaggcagaattgctgttgaagtaa

SEQ ID NO: 5198 - DNA, 2256 bp, Saccharomyces pastorianus
atgtcggtatctgctgttgcccctagaagaaaaaggctggcggaaggcttgagtgtcacgcagaaagtgtttgttaggtcccgtaacggaggggctactaagattgtcagagagcactatctgagatcggacattccatgtctttcaagaagttgtaccaagtgtccgcagatcgtcgttcccgacgctcaaaatgagctgcccaaatttattctatctgattctccgctagagttgagcccacccatcgggaagcactacgtcgtgctggataccaacgtggttttgcaagcgatcgatcttctagaaaacccaaactgttttttcgacgtgatcgttccgcagattgtcctggatgaagtgagaaacaaatcatatccggtgtacacgagattgagaactttgtgcagggacagtgacgaacacaagagatttattgtgtttcataacgaattcagcgagcacacatttgtggagagactaccaaatgaaaccattaacgacagaaacgatagagccatccggaaaacatgtcaatggtacggtgagcatctggaatcctacggtataagcgttgttcttgttaccaacgaccgtttgaatagagaagccgccaccaaggaagaggactccaagataacaaccaagagtcttatggagtatgtcgagttgctgccaaatgcagacgacatcagagactctattcctcaaatggacgctttcgataaagaccaagaaagggacacattttctgacttcaccttccccgagtactattccacggcaagagttatgggtgggctaaaaaacggtgtcttgtaccaaggtactattcaaatatcagagtacaatttcctggagggctcggtgagtttaccgagattttccaagccggtgctgatcgtgggccagaaaaacctaaacagggcgttcaacagtgaccaagtcattgtggaactattgcctcagtcagaatggaaagcgccctcgtccatcgttttggactctgaacatttcgatgttaacgataacccagatatcaaagcaggcgatgacgatgacaacaatgaaccttcctctacaaccactataacctccgacaagcaacgtagactattggccaaagacgctataatagcccaaagatcgaaaaaagtccagcccacagcaaaagttgtgtacatacaaagaagatcctggagacaatacgtgggccagctagcaccaagctccgttgatttacagagcagcagtacacaaaacgtcttcgttatcttgatggacaaatgtcttccaaaagtcagaatcagaaccagacgtgctggtgaacttgtcgataaaagagtcgtcatctctatcgattcatggcccgccactcacaaatatccattaggacatttcgtaagagatctaggtacgatcgaatcagcgcaggctgaaactgaggccttattattggagcacgatgtcgagtacaggcctttctccaagaaagtcctggaatgtttaccatctgaaggccatgattggaaagctccagccaaactggatgatccggaagctgtttcaaaggatgcattactgacaaagagaaaagacttaagagataaactgatatgtagtatcgatccaccaggatgtgtagatattgatgatgcattacacgcgaagagacttccaaacggtaactgggaggtcggtgtacatatcgccgacgttactcattttgttaaaccaaatactgccctagacgcggaaggtgccgcaagaggtacatctgtctacttggtggataaacgtattgatatgttacccatgcttttaggtactgatttgtgttctctgaaaccgtatgttgatagatttgcattttcagtcatttgggaactggatgataacgctaatatcgtaaacgttgactttatgaaatccgttattaaatctagagaagcattttcgtatgaacaagcacaatttagaatcgacgataaaaaccaaaatgatgaattgacgtcaggtatgagagctctgttggacttgtctataaaattgaagcaaaagagactggaagccggcgccttgaatttggcatctcctgaggttaaagttcatatggatagtgaaacctcggatccaaacgaagttgaaatcaaaaaactgctagcaacaaattctttagttgaagagtcatgctgttggctaacatttccgtggcaagaaaaatttacgatgccttccctcagaccgcaatgctaa

SEQ ID NO: 5199 - DNA, 783 bp, Saccharomyces pastorianus
atgggaaactcaaacgcttctgaactcaatgacgaagaagacggcggtatggcatttgacaagagaaaatctacatctacgtattcggttattgaaagtgagagtggcctggcaagcggcagtattcctaataattacatgagaagtaacggcaataactacaatacgaatgataaagcggcactaatgaagagagagatttcaggcagtccatccttagcatcctcagattactcccaaagagacgttattccccatagaaacccttcaaggttattgaatgatatcatggagacttcgttcaatgaaccaaatgacaacggcatcaatcacatgtctcaatttaatgataaggataatctaacttcaatatcgcaaagaggggttaatttagaagcgtacaaccaaatgcctcaaatggtaggggggattcctccccagaacatgaggccttatgctggtcaaccacacacaaacccatcaatgtatccacaacaacaacaacgacaaccacaacatcagtataatttgtatcaaagaactatccctgttggtccagatccttctaatgtggttttacaaagcaatccttatttcaacattggcccaagccaaccaccacaacacagaaatccggttccaagatcgggttttgctccaaacccactaccaaatcagggcccaatagcgcaaggctaccaacctgcttataagaggagaatgcagaataagaatatgcccagagccaccacctctttaaataatccttatggctttaggtaa

SEQ ID NO: 5200 - DNA, 435 bp, Saccharomyces pastorianus
atgagcggttccataatttcctcaacgggcacactccccacatcactagcatccaatgagtccttcactctttactgtggaaacatgggtgttatgtttgaaaccaagccaactcaggcaagtgaatacgcaaattttttgcgggcggcttggggttgtggcagaggctatgaatctgcatttgcaacattgactaaaacacgagagatcgtacttcccttgcccacgacttcttcctcggactcgaacttactagattgtggctattcaacaaccattaacgctatggacgattcgaaatcgcctgttgacttttggaattgtggtagaacatatgctagagaatacgcattatccgacgcgttttcgttgagaccaactaatttgatacaatactttgtatttgctttactcattttgtgtatttttctgtaa

SEQ ID NO: 5201 - DNA, 1272 bp, Saccharomyces pastorianus
atgtggagagagaatatcttcaattccttcaagtacgtcaggttggcggcaaattcatcgttaaagggtcaaagtgacttcaagaaatttgagaaggcaagacaactaaaatctcacatcgacgccattagaagagactacacaagaaacttgaagagtaaagtcatgctagagcgtcaaaaagctgttgccatttatttgattgacgtctttgccctaagagctggtggtgaaaaatctgaagatgaggctgacaccgtggggtgttgttcattgagatacgaacacgttactttgaaacccccaaatactgttatttttgattttcttggtaaagattccattagattctatcaagaagtggaagtggacaaacaagtttttaaaaatctaacaatcttcaagagaccacccaagcaaccgggtcaccaattatttgaccgtctagacccatccatactgaacaagtatctgcaaaactatatgccgggactgactgccaaagttttccgtacttacaatgcttccaagaccatgcaagaccagttggatttgattccaaataaaggttctgtggcagaaaaattactgaagtataacgcagctaataggactgtcgctatcttatgtaaccatcaaaggactgtcaccaaagggcatgcacaaacggtggaaaaggccagcaataggatacaagaactagaatggcaaaaagttcgctgcaaaagggccattttacagctggacaagggtctcttgaagaaggaaccaaaatatttcgaagaaatcgaagatttaacaaaagaggatgaagctaccattcataaaagaattatcgacagagaaattgaaaagtgccagcggaaatttgttagagaaaatgacaagagaaaattcgaaaaggaagagttattgcccgagactcaactaaaggaatggctagaaaaagttgaggaaaagaaacaggagttcgaaaacgaattgaaaactggtgaagtcgaattgaaatcaacttggagttcagtggaaaagataaaagcacaagtagagaagttagaacagcgtattcagactagttccattcaattgaaggacaaagaagaaaactcccaggtttctttgggtacttctaaaatcaattatatcgacccaagactttcggtggtattttgcaaaaaatttgacgttccaatagaaaaaattttcacaaagactctaagggaaaaattcaaatgggccatagaatcagtagatgaaaattggagattctaa

SEQ ID NO: 5202 - DNA, 855 bp, Saccharomyces pastorianus
atgaccatcgctgctgcttcgaaagttaaacgtgacttatcttcagatgatgatgacgacgtcccactgtcccaaaccttgaggaaaagaaagatcgattccgccagttctgcttcttcccatgacgatgcagacccttatgacagtgatgaggccatctctaaaatttcaaagaaaaaaaaaaccaaaagaataaagactgaaccattgtcatcgccaccgtcgccaaaaaagaaaactacgacaccaaaacctaagaagatcaagaaggaaaatagcgatgtcaaggtaaaggcaactaagaagaaaaaagaacaaaagaagaaacaggaagaagaggaccaagaggcggaagaccaaaaattaaaggatgaagaggacgaatataaatggtgggaaaaggaaaacgaagatgacaccataaaatgggccacgcttaaacataacggtgtcatatttcctccaccgtaccaacctttaccatctcacatcaaactatactacgacggcaacccagtagacctacctccacaagctgaggaggtggccgggttcttcgctgcgttattagaaagtgaccatgccaagaatcctgtttttcagaaaaatttctttaacgatttcttacaggtgttgaaggaaaacggtggtaccctaaataacgttgaactaaaggagttttctcgttgtgatttcaccaagatgttcgactatttccaagtgcaaaaggaacagaaaaagcaattgacatctcaagagaaaaaacagatccgtttggagagagaaaagtttgaagaagactacaaattctgtgagttggatggcaggaaggagcaagtagggaattcaaagtag

SEQ ID NO: 5203 - DNA, 984 bp, Saccharomyces pastorianus
atgattcatattggtagagaagcgttcgaaatgtcaactttactagagaggactaacagcgtccaagaattaaagaagagagctgcagggaacacatccgcaaatcccgcagaagtcgcagaagcaaagaaagtgctaaagagagtctacagttgggacgaaattccagaatggcaaagagataatgactttattttgcatgggtacgtgaaggaaactagtagttttgttgatactttcaaaagtttattctacatgcataatgaaagtgtcaatatttattcacatttaatccccgcagtcgggtttctcacagttctgttgctagataaaacgactattacagtgtttgagactaccacatggcttgatcatatgatgattgacctatttttttcgggggcatttgcatgtttgatactgagtagttcctttcactgtttcaagagccattccttgagaattgctactttgggtaataagctggactatctcggtatttgcatattgattgtaacatccatggtcagcattttatattacggttactacgataaattccccgtattctgtttatttgcgcttattactctcagctttggtgttgcatgtagtgtagtttctttgaaagataagtttaggaaaagagaatggagaccttatagagccggactatttgtttgcttcggattatcttcgattgttccgatttttagtggcctttactattatagtttttcagaaatctggaatcaaattcaactattttgggtgctgcttggaggtggtttatatataatcggtgccgtcctttatgggatgcggttccccgagaaggtttatcctggcagatttgatatctggggacattctcatcaactcttccattttttggttgttatcgcagccttatgtcacatgagaggtgtgttgaatagttatgagttagtccatataaagatgcaaaatggaattgtctcatag

SEQ ID NO: 5204 - DNA, 2244 bp, Saccharomyces pastorianus
atgcgacacgaagatcagacagcttttaatcaagacgtatcaaatacatacgctatggcctccgaaaatccagatgtgcttctttcaaagttagttaatgtgataagagctgcatcttcattagctgcccaagatgttgatttttacagaaatctggatagagattttagtaatattttgcaatcaaaatcgaacaagcttactgaaatggtgaatggaatcgtccattctattgatgagcatcatgactctcttgaactaaaagaggaagaaataagtgatttatggaaagattttggaaatataatggacaacttgttggaaaagtcagatcattcgttagacaatttaaaccgcacttccaactccaataacagtgcggccgatctccaatacttgggtgatttttcaggaaaggactcacatccaacaaagagagttgagaaacctcagttgaagtttagaacaccaattgataacagtgaaagtcatccattcctacctttacttaaggagaagccaaatgctttaaagccgctttccgatagtttacggatgattgagactgaagaaaatagccccggtcattatcctcacccatatgagtatgaaattgaccaccaagaatacaactcaagtatccttcaaattaaacaagaaataccctccaaatcttgggatgcttcggaaccaatatggatagattcgaaggcaaagctcgattcaatgctagagcatttaaaaaatgcacaagaaatcgctgttgatcttgagcatcacgattataggtcatactatggtattgtctgcctcatgcagattagtactagggagcaagactatttagttgacactattgaacttcgcgaggatttacatattctaaatgaagtatttacagatccattaattgtgaaagtatttcacggtgcttttatggatattatttggcttcaaagagatttaggattatatgtcgttggtctgtttgatacttaccacgcctctaaggctataggacttcctaggcacagtttagcctatctgttggagaatttcgccaatttcaaaacatcaaagaaataccagctggctgactggcgtataagaccactctcaaaacccatgaccgcgtatgctagggcagatacccatttcttactaaatatatatgatcagctaagaaacaagcttattgaatctaataagttagccggtgttctttatgaatcaagaaatgtggctaaaaggcgttttgaatattccaagtataggccaataacgccctcttcaaaagtttattctccaaccgaaaaggagaatccttggagagtgttgatgtatcagtacaatattgctcccgagagagaggaattagtaaaagctctatatgagtggagagacgttatagcaagacgagatgatgaatcgccgagatttatcatgccaaatcagctgttggccgcgctcgttgcatatacacccactgatgttataggtgttgtttctctgacgaatggtgtaacagaccatgttcgtcaaaatgcgacaatactggccaatttgatcaagagtacactaagaagtatgaaggacactcataaggaaagcgctgcaattgtgtcgtctgagcttaagtccaatagcgcttcgttagaagctatcacagttcctcaaattcgtaacattatggatagattttcagtattttccagcaacagcgttacggaggatcgaagcatggatagtactgcatcttccattcttttaggtaagattttaccacatgaagagggtgatgttgtgtatgagaacagaggcataccgcataaagttgaggttgaagatgtgagaggccgggctcaaagattcaattctgcattagcagcgttggaagacatcaaatttgaggtagaaaagccagtcgacgtagaaaagagcgaaaaggtgaaaattgaaactacacctgagcctcaaactaaaaccgagaatcctgacgaaattattgttttgaagaaaaaacagatacataagaaggaggcagcgaaaaggagtagtgcggcagccgaagaagctgttgattactctaaaatgcctgatgtcttatccaataaaccagggcaaaataataggcaacagaggaaaagaagattcgatccatcctttaacgaaagtgagggaccaagagctccgaaaaagaaaagacctacgaccaggggtaagaacgtatcttttaaaaggtga

SEQ ID NO: 5205 - DNA, 780 bp, Saccharomyces pastorianus
atgcgtcaaaagagagctaagtcatatagaaagcaacttcttgtctacagtcacacgtttaaatttcgtgagccatatcaagttctggttgataatcagctggtatcagaatgtaatggttcaaatttcgacctaccgagcgggttaaagaggactttgcaagccgatgtaaaagtcatgattacacagtgttgcatacaggcattatatgagactagaaatgaaggtgcaattgatttggcaaaacaatttgaaagacgtcgttgtaatcactcttttaaagacccaaaatcgccagcagagtgtatccaaagtgtcgtgaacgtcaacggcgcaaataaacatagatacgtggttgcttcgcaagacatagatttaaggagaaagctgagaactgttcctggtgttcctttaattcatttaactagatctgttatgatcatggaaccgctcagtacagcaagtgctaaggcaagcaagatgaccgaagaacagaaattgtacaaaggcctcaatgacccaaacattgaaaaggcagaagcaaatagcaagggatccgagaaggaatccacgcccaagaaaagaaaggctggcccaaaggcccccaatccattaagtatgaagaagaagaagaaatctggtccatcagacgatgaggtgaaagacaaagatgatgcttctaaagacaaaaaaaggagaagaaggagacacaaaagcaatgctgatgactccgttgcaagcagaacaccggtagtgcaaaaacaatcagcctcagactag

SEQ ID NO: 5206 - DNA, 789 bp, Saccharomyces pastorianus
atgtgtggtggtacagacgcgtactctgtataccggattggatccgatacaagcagtgatagcgtaagtagttctgactctgatactcaaaccagttcttccacaacgtcttccacgacatcttccacaacgtcttccacaacgtcacaaacatctgactcaacccaaacaacatattctacttcaacatcacagagctcaagttccacgacgtcacaaagctcacaaaatgcaaacactttgacgacgagtagtactagttcccaatcacaagatgctacttccgtaatatactcaaccgctctccacactgagggtggttctacaatatttgtgaccaatacgattacgaaaagtgctcagaattcaggatctgccaccggtacagcagcatcagactcgacgagtggaaagagtacacacaagaaggccaatgtcggggccattgttggtggtgttgtcggtggtgttgttggagccgtagtaattgcacttggtattctattgattgttagacatatcaacatgaaacgtgaacaagatagaatggaaaaagaataccaagaggctataaaaccagtggaatacccagataagctatatgcttcttccttttcgtccaatcatgggccttcgtccggaagtgtcgaagaacagcatacgaatgttccaacggatactaatccgttcgatgactcaagaagaataagcaacggaacatttataaatggcggaccgggaggaaaaaataatgttctaacagtggttaatccagatgaagctgattga

SEQ ID NO: 5207 - DNA, 159 bp, Saccharomyces pastorianus
atgagactgaacaacaaattcagtttgcttttggctttattgcccgccttgtcgcaagcaagcacctacacgttggtggactgttttagctcactgccttccgacttttcacaagacgatacgtatgcctaccagacaagttcgtactgctatgaatag

SEQ ID NO: 5208 - DNA, 114 bp, Saccharomyces pastorianus
atggcaaccaaaggcaacttaaaaaggcaaacgaagcactcttcaacaatagcgctcattgaacctcgcggagaggcgacgccatgcgcagtttctcagtcgaaaccctcgtag

SEQ ID NO: 5209 - DNA, 462 bp, Saccharomyces pastorianus
atgcaaccttactcattgttcccaactttctggaagtttatgtatagagtttcaccatacacatatttcgttgaaacatttgttagtattctattacacgattgggaaatcaagtgtgatatgagtgaaatggttcccggacaacctatgacagggcagacttgtggcaaattcatggaagccttcattgaagaatatggtggttacttgcataacaaaaacaccttcaccgtctgcgcttattgtacgtacactgttggcgatgatttcctgaaaaatgaaaacatgagctatgaccatgtttggagaaactttggtatcgagtgggcttttgttggtttcaatttctttgcaatgtttgctggttattacttaacttacgtggcaagagtatggcctaaagttggcaaattcatctctaaggtaattccacatagaggaaaaaaatctgcacaaaactaa

SEQ ID NO: 5210 - DNA, 1578 bp, Saccharomyces pastorianus
atgccaaaatcacactctgtttcttcatcttcgtctagtatctctgctctcccataccaggtatcgccttcaagtaaggaaatagcattagcagattaccatgacaaaggacacatggaaacagtagagactcagaagcacgttatttcttggagaaacattaactacacagttggtgacaagaagctcatcaacaatgcatccggtttcatcagttctggtttgacagccttaatgggtgaatctggtgcaggtaagacgactttattgaatgtgttatcacaaagaatcgaatctggtgtcgttactggtgagattttgattgatggtcaaccactgacagatgaagattcattcaaaagaagtattggttttgttcaacaacaggatttacacctggatctattgactgtgaaagaatcattggaaatttcctgtattttgagaggtgatggtgacagaacttacttagacactgtttcaaaattactaaagtaccgtctgacatttggttgccgatttgaaccccactcaaaagaattgctgtccatcggtgttgaacttgttactaagccttctcttttattgtttttagatgaaccaacttccgggctagacgctgaggctgcattaacaattgtgaaatttttgaaacagctttcattgcaaggccaagctattttctgtactatccatcaacccagtaaaagtgtcatcagtcatttcgacaacattttcttattaaagagaggaggtgagtgtgttttctttggaccaatggacgatgcttgcggatatttcatgtctcacgacaacgcattagtctacgataaagagcatgacaatcccgctgatttcattattgacgccgtgggcaacagcaactcctcggttgaggaatgcggaatgacggaaggtttcacgttgaacaaggaagctaaaaactggggcacagtatgggagtcatctacagagaaaaagttagttgaaagagaaacagctaggttggaagatgatgctcgtgcctctggtgttgattacacaacatcactatggcaacagccttcatatttacagcaactaactctcattacgaaaagacaatatatttgtaccaagagagatttgacttacgttatggccaaatacagtttgaatggtggtgccggtttatttattggtttctcattttggaacattaagcataatattattggtttacaggatagtattttcttctgtttcatggctctttgtgtttcatctcctttgatcaatcagattcaagacaaagcattgaagacaaaacaagtctacattgcaagagaagctagatcgaacacctaccattggaccgttcttcttttatcgcaatgcattattgaattaccactggcacttacaagttcagcgttgtttttcgtttgcgcattcttttgctgtgggttcaacaatgctggctggagtgctggtgttttctttttaaactatatgcttttctctgcttactatgcaaccctgggtttgtggttgatctatactgctcctaacctgcaaaccgctgcggttttcgttgca

SEQ ID NO: 5211 - DNA, 1728 bp, Saccharomyces pastorianus
atgtcgatttcaaagtattttactcctgttgctaacgggtcacttactttcaatggtgcaaatattcaatttggttctgatgcacagagtgactctcgaaagacttatgataccgaagagagtacacctccttctgccaatcaattgaataatataacctttcaggcagaggctggtgaaatggttttggtgttgggtaatcccacatctactctttttaaaactttattccatggtaaaacaagtttatcgtactctccccaaggctcgattaaattcaaaaataacgagttcaaaagtttttccgataaatgtcctcaccagatcatttataacaatgaacaagatatccatttcccttttttgacagtagaacagacaatcgattttgccttgagctgtaagtttgatattccaaagggtgagcgtgatgaaataagaaatgaactactaaaggaatttggtctatctcatgtattgaaaactattgtcggtaacgattttttccgtggtgtttctggtggtgaacgaaaacgtatttctattattgaaacgttcattgcaaacggttctgtttacctatgggataactctacgaaaggtcttgattctgctacagctctagactttttggagattcttagaaaaatggcaaaggctactcgttctgttaacttagtcagaatatctcaggctagtgataaaattgttgataagtttgataagattcttatgttatctgattcctatcaaattttttatggtaccgttgacgagtgtctggcttatttccatgacactttaggtattgaaaaagatccaaatgactgtattattgagtacttgacttctattttgaattttcaatttaaaaacaagaacgttggaaacctatcaaactcatcgtcttctagcgttctcaagactgccgcaaaagaagtgaccaagtatacatataattctgatatggatttatatgaccaatggaaacactcttcgtattataacaatataaaacaacagattgcagagtctctaatcgatgactctattaaagaggtcgatccctctgatatttcacctatttttaatattccgttgaagaaacaattatcatattgtacaaagagagcttttcaaagaagtttaggtgataagacttacatgacagcacaattcatttccgtcgttgttcaatctttggtcattggttctttgttttacgagattccattaacaacgattggttcttactcaagaggttccttaacctttttctccatccttttcttcacctttctttctcttgcagatatgccaattgccttccaaagacaacccattgtcaaaaagcaatcacagcttcacttctacaccaactgggttgaaactctttcaaccacagtgttcgattattgtttcaaattctgtttggttgtcgtattcagcatcatcctatacttcctagctcacctacaatacaaggccgcaagattttttattttcttgctgttcctttccttttataatttctgcatggtgtcactgttctctttgacgacgttaattgcgccgaccatttctgtcgcaaatttgttcgctggtattttgttgttagctatagcaatgtatgcctcttacgttatctacttaaacaacatgcatccttggtttgtgtggattgcctacttaaatcctgcaatgtacgccatggaagctatactagcc

SEQ ID NO: 5212 - DNA, 678 bp, Saccharomyces pastorianus
atgctagcatcaccaatccctaaaggagagactctgccagtaaatttgacaaatgatgtcgagagagcttcgagaacgctgtttaaggcgttcgaaaattcgtacgccaatgattacctaatgaaaaaattctttcatattccaatagaggaaaaggtttcaagagcaaggataaatgccataatacattactatacgacatgctaccatgacttggacggtgaaatcgctgaggccaacgatttcgatgccgtaggtatatggagtcgtcctgggcaccacttgcctgccacattatctgacgatgagtcttttaataagattttttttgacgacttgactgcgagaaagcatgaagtcgtgcccgagggaatggactattactacctctatgccattgggaaaaaccttagtcaccctgaaatcagaggttcggttagaaagatactcgaagaatacaaacgcaaggcagacaaaaccaattgcgcccttgttctcgaggcaatttcagaacacgcgagatctgtctacgaatacttcggttttagaacctacctagagttccaatttggggctggggaagtaaactccgagtgcaaaccagacccacagggggaggggttcacggcctacctgatgctctaccatagagacgcagacaccgtctttcgtgcatga

SEQ ID NO: 5213 - DNA, 651 bp, Saccharomyces pastorianus
atgcgttctcaatcgtcgctaagcattatgcgtgtttttgctctgatcgcgactttgtttacttcatccttcttcgctcatgcattttcctccaactatgctcctataggcatttctttacctgctttcacgaaagaatgtctctactatgatttgttctctgatgaggatgtgctcgtggtcaattatcaagtcttgactggtgggaactttgagatagatttcgacattaccgcccctgatggcactgtcattgttactgaaaggcaaaagaaacactctgattttttactgaagtcgtttggtgtgggtaaatatacattctgtttgagtaataactatggtacttccccaaaaaaagttgaaataactctagaaaaagaaaaggaaactgtttcctctcaagaaaggaaagaggatattatcgccaataatgccatcgaagaaatcgacagaaacctgaataagatcatgaaaacgatggactacttaagggctagagaatggagaaacatgtacacagtaagctctacagattcaaggttaacgtggctatcattattaattatgggagtaatggtcggtattagtatagtgcaagctttgattattcaatttttttttaatagtcgccaaaaaaactatgtataa

SEQ ID NO: 5214 - DNA, 1788 bp, Saccharomyces pastorianus
atgtataattttgaccctgcagtggaggatatcaatccagagtttttggagaagagaagtgaagagaatataaatgcgagttctcttgggagtaaacaaacgaaaccaattttcatcacacctcacaaggatgaatctctattgaaggttgccaacgaacacaaaaaaaaatacatttcctcgtcaagttctatgacctcgatactttcccagttgcattatcttctttccaactttagaaagttgaacatcattgattcttcgatatctaggaacttccctcagaaaaattgtaattattcagaaagtgcatattttccatcaacagtcattttaagaaagaaaaaaaaaggcgtttgttctatcgattccgatcgaagtctggatagagaaatggttctctctgtactgggacactatcttgaagatttcctaacaaaaaattcgcctaacagtttacaagctgaaaactaccattattccagcatagacgaattcatcgtgagatctcaattagacgcctacgatccaaatctgcctggaactggtgtttttgatctaaagacaagggctgtttctgctataaggtatgatttgtcacatgtagagaataacaataatcaaactggatacgagatagaccgggtctatggcgaatttgaatccttggaaagggaatattttgaattgataaggtccgcacttttgaaatattctttacaggctagaattggtaaaatggacggtatatttgttgcctatcacaatatctctaaaatgtttggattccaatatctacctttggatgagttagattatataatacattcttcatgcaacaacaaatttgatagtttattagagcagaaagacgaaattatgaaaggcatatatggtgaagaagactacattttacgccacagtaggaacgacaaagagattgcctccttggtggctagtagagaatttaaaatgtcaatgaatttgtttagcaatattttgaagcatgttgagcaattactgaactcaaacactactagctgggaaatgtgtaaaataatgctcaaaaccgaagttgaagaaaaacagctgaaaaatggccgcttctttaacgagccagttctaaatatcgtagccctgccactaacatctgggtatgaggataaatcactactggtaaaggaggcttcgaacgaacaattgacagaagagctaacgaacattcgcctgtataatgaaaatcttttagaagagaacttggatatgttggtcggctttaaggtaaacgtcaagcatttctaccatcatcaccctagtactatgaatctgccaacatttgcttcgagaaagaaagatattctggaccccgatgcccgtgaatatatttctgacataatgaagcgagattggtataaggatatacgatccacacaaactccaaacttcttccatgcatcagatgtttccacttgggaagtcaattctacctttacagatatcatcgataagaaggagttgaggagtttatacctgaaatatctagatgttaaattaaaggcgttgaagaaccaagtccttacacgtcaggaaccagacacatcccgaaaggatgaaattataaatcgaatcaaaaaattgcaaacccgcaggaaacacggcagtagcacaagtcacaacaaatcatcaaattttggtccctcacgactacaaaccaagctgcgtgcatacgccaagaagggtgctctacgaaggaaactttgggaaagtaatgctaaattgcatgcgtaa

SEQ ID NO: 5215 - DNA, 525 bp, Saccharomyces pastorianus
atgatgagtttttatggctataatgtcctgtccaggcgtctctctgtccaagcctggagcataggtggcggtagtagaggcagccatcagcgatggattggccatacaagcgctgctctcatagatgctgtcaatgaggaaaccccacctgacaagttacgttccgacctacatagcgcccttcagatggttgatgaaatatacgatacaaatactgcggcagaggacgttaatgacaagggcaaggaaggtcgacaaaaatatacccgagagatggacaaggcctttaatttgcttaaaacaaacataaagaaggaagatagacaaattaaatatttgaagcctacaagagcacgaacgcgccctactagcgggtcatataccttccaaataaatgctcaaaaagttaagcatacattagtaccttacaatcgaaaaggtgctcataaaaacgaccataagccacctgaaatagcccatgggctgactagagtactatatcaacccttgtcgttacaaaattga

SEQ ID NO: 5216 - DNA, 2712 bp, Saccharomyces pastorianus
atgagtttttgcttagaaagcctcttgcatttttcagcatttctttcttattgcttaaccggaaaaaaaagaaaaggggtccccttttcaaaacaaatatgtgaacgagatagagatgcaaatctaatattgataacgagtagagagatcatcctagtttccatctatcacttgcttctcccttcatataaacaaccgatgttttcatcttcttctcgaccttctaaagagccattactatttgacattagactaagaagcctagataatgatgttttgttaataaaaggtcctccagacgaggcatcctctgtgttactatctggcactattgtcttatctattaccgaacctatccaaattaaatctttagcgttgagactttttggaaaattgaggttaaatgttccaacagttttgcaaactgctaatggtccatataaacgatactccaaattcgaaaggagtatatactctcatttttgggacgatttcaatataaagagttattttcaaaacttgtatgacaatcataataatggtaaaacaactatttctagtaaatcctcaacaaatttaacgactttgccaaaaaggacaagggctctttctagtacatctttaatatcaaataatggacaaacaagtacgaataaaaactatcgcaccttagtaaagggtaactacgagttcccatttagcgcaatcattccaggttcgttggtagaaagtgtcgaaggtctaccaaatgcagccgtcacgtatacattagaagctaccatcgagagacctaaacaacctgatttggtttgtaaaaagcatctaagagtcattcgaacattggcaacagatgcggtcgaattatctgaaacagtatccgtcgataactcatggcctgaaaaagttgattatacaatctctattccaactaaggcgattgccattggttcttccgccatgattgatatcttgattgttcccgtattgaaggggctaaaattgggtccaattaggattaccttagtagaaacttctcagtactgcggtagctatggagggattattaaccaagatagagtagtggccaagttgaaattgaaagatccattgaagcatatttcccaaataaagaagagaagaagcctgaatgaaaccaacgacgaggattttgatatgggcactggggagtttcaagacaaatgggaagttcaagccttattgaatatacctgcgagcttgtccaagtgctctcaagactgtcgaattttatctaatatcaaagttcgtcataagataaaatttacaataagtttactaaatccggatggccatatttcagaattgcgtgcggcattgcccgttcaattattcatttcaccatttgttccagttaatgtaaaaacgtctgatgttatcgagagaacgcttaagacatttggcccttcatatcaggccacaactcaaaacgatagttcatttagcaacaaaagatttatagacaatactgaagaagacgtcattttccaaagatttgtgtccgagttacaattgtcttcgatgcctactatagtaaatggttccaattcaaatgctcacaatccagacgcagaaacttcgactaccaatgatgcggctatggtagccagtctaatggttcctcctaactacggaaatcatgtttatgatcgtgtatatggtgaaacaaccaatcaaaacaaaatatcggcaccagtacccccagttgccagcgagtcacaagtccttgacgatatccaaaacttgtatatctcggatagcaacgatactaacaattctacttcggcacggaatcctgaaattagaatcgatgacggtaacccaaataactgtgattcccaagacaacagtgtcaataatagtagctcgaatttggttattaattttttgacggttaatgataacagcaacagcgcctccggaagtagatataataattacactactaatacaggactgaatagtccttcgttgaccccgagcttcgctcacttatcgagaagaaattcttatagtcggcaaacttcatctacatccttaaagaatgacttggagctttcgactttaagtagagtaccttcatatgacaaagccatgaaatccgacatgatcggtgaagatttaccacccgcttatccagaagaagaacttgattcacaacaaaacaagaaagtggagttagaaaggccgaaaattttacaccataaatctacatcgtctttattacagtttccaagttcaagcaaaacttccaataatgtaaaaagctcgtccagcaaaacccatttgtctcattctccattaccaaaaagtaacaatacctcctcggtatcattacaacaactgacaaggagcaacacggatagctccttcaatttgaatctatctttcgcggccccaaaaagcaattcggcaagtagacacttttcattcaatatgacaccatccttgactaattcaaatactgatagccaaaacaatctatactttagtaacgctgagctcgcttctgatgcggatcaagcaaggccggaggaaaactacatgggctcagtcgaaactcagagatcacgctcctcatcaattagaagtaataccagtaactcaccatctagacaaaagaccggttcattttccaacttcatggagatgtttacaagacgagaccgcgcatag

SEQ ID NO: 5217 - DNA, 2157 bp, Saccharomyces pastorianus
atgctcgctgccttacgacccaatcctcgaggttttcgctcgcgtaccccttccgtaagtctcttcgtaagactgacccactcctacataccgtggttttacgctatcgacgtgcccaactctaaaccatacttgcctacgtacaaggctttccaatctcccaaaaaattcaaaccgttttccattgatgactccaaccgcctggaaagggccagcaagcatcgggaacataaccccgtcttagtcaacgaagactacttgttcaaagtggacctctcgcacatggaactatcccccacatattgggagggccccacgtatcaggtacgaagaggcgtctggttcgactctttggaccaacccttatccagcgacctcacctctgaaatcgagggcttgtataagtctatcaagactgacaaaactgagggcgatgcgcttgcgacaccgtctgccgagttacaagatatattcaggctcaagggtaaatatccaatcgataaagaaaaccaaaaagagcggggaaaggaatccagcaacgaacacaatgatgaacccgttttcaagtttgttttgttcgtcaacaagcaaaccgcttttctattatcggatctagacggcggcaaactacaacttgccttcttgagatctaatctggctcaatctttacctctcaatgctacaaagattacaagatcgtacaagaggccagccaagaaaccctctgcaccctccaaagcagccaaccctcaggtccccgtagccgatggcagcggcaactccaagtcaaatagcctcgaaacaaaactggaaaagaaagtctccaatctttttaatgtgtcagatttcttgcaattgttcaacggcaatgcaaacaaggatcaagatgacgcaaagagcttagaaaaccaaatggaaagagactacaataacgccgatagcaacgagggtgccgatgctagtagcaagattaaaaacggccaaaattcaaacacaggccccaaggaaaataaaagtaataaaagaaatgtggataacctggtgctttgtgttcatggtataggccaaacactgggcaagaaatacgagtatgtcaacttcccgcacacgataaatttattgagatctaacatgaagaaaatctacagtaattctaagaggttacagtcgttaaacacagcatctaatcaccaaaataactgtaatttgcaggtcctgcccatcacttggagacattcaataagctttcaaactgacgctaaggaggagaatatcgagaaccaagaattacccactttgtcacaagttacagtaaacggcgtgttgcccctgcggaaactactagctgatggtctattggacatcttactgtatgtcgaaccttattatcaagaaatgattctccatcaagttacgtctcaactgaacaaaactttccgaacttacaagaaatacaatccagaattcgagggaaatgttcatttagtgggccattcgttaggcagtatgatcttatttgatattttatccaaacagaaaaaattcaaactagactttcaggtagataatctattctttattggatcaccaattggacttttaaagctgattcaaagaactaaaattggtgaccgtcccaaattccccaatgatttggagaaaaaactaaccatacaaaggccgcaatgcaaggacgtttacaacgtctatcacgtctgtgatcccatttcctatagaatggaacctcttgttaataaagaaatggcatactatgaacaagcttatttacctcattgtagtgaagcctatgacttgacttccaaggttttagagtttggtgaaaacatatggaaggacttacctggtactggcaacagcactaccaatgaaaataattcgcaatccaaggaaagatcatctaatgaaaccaagaccaaactatcagataaattaacaacaatgcttacggatttaaactatagtggacgtttagattatgccatgctgccaagtttacttgaagtggactttatatcggctattaaatcgcacgtttcttattttgaagaacccgatattgcagggtttatcatgaaagaaattttagccaagcatgaaaaagtttccgaaatatgcgcgaaaaggaaggcaaattga

SEQ ID NO: 5218 - DNA, 837 bp, Saccharomyces pastorianus
atggaagcctttagtaacgatgataacgagaacatcgatcgtgtagaggaagccgcattgaagtctgatcaaaactcgaatcttcttccagcagcctcaattgtgaagaaagaacaattctctggtttcgagagtctacttcctttgtcaagaacggactcgtcgctagtcaccgctgaagaactcaaagcatctttatgcctggaaaacattgaagaaaacaacactgataacaacgataacggagaagtcgacggtgacgacctagcttttaagctcaaaaattctccggtcaggagacatttccatgtaacacccaaaagaataacaagggtgagaactggtagggtttcgcacaatattattgaaaagaaatatcgttccaatatcaatgataaaattgagcaattaaggaaagcagttccaacattgcgagtagcgtacaaaaaatgtaatgatcttcccattacatcgagagacatgatagacttggatggcctagaaccagctacaaaactgaacaaggcgtccattttaacgaaatctatagagtatatttgccatttggaaagaaaatgcctacaattgagtttggctaatcagcatttatcaaatgacgcaagcgagccatttgttcaactttccgaaccaccccatcccgttaataataatagtggtaatgaacaaagacagaggcaaaatcaaaactggcaaaggcagcgaccacaacaacctttacataacatccaatataacggtccacatcaaaatgggctcgtgagtggcaataccaacagttcaaatgatctgaactttaacaacgcagaagatttttag

SEQ ID NO: 5219 - DNA, 375 bp, Saccharomyces pastorianus
atgttccaaagtaataactataatgtaccgccacaaaattataacgctaattccctgggccctcaagtgcccataacacaggcttactatgcgccgttccaagcgcctattcatgttcaacattctatgcctccagcatataaaaacaattcgtaccctataagtggccagtatgactcgtcgttccctagtacctcgagccatggctcagtaatggataccaactattatactgatactttgacttccatacccacaacagcgaccgacagtaccacgatgacgacagaaaacggcaatgctattgatagcgaagagtacatcgatatatggaagcctttagtaacgatgataacgagaacatcgatcgtgtag

SEQ ID NO: 5220 - DNA, 108 bp, Saccharomyces pastorianus
atgggcgacctgagtgataaagtcgccgttaaggttttcgattgtagaactgcccaggactgtaacgaagagcaggctgtaaacgtgactacaaaccaaatgtattag

SEQ ID NO: 5221 - DNA, 573 bp, Saccharomyces pastorianus
atgagtcatgacagttatgagatccatagcacagacgatgatgatgatgatgatgatgttttttgtgttaataatggtgacgttgataacaatactactgaggattacagtgaatcttttgatcgtaaggccctaacaagcagtactagttcattaccacggtcgtctcaaagaagcatatcggggtgcacaaaggttttacaaagatttagatattccaagtcatttagtggagggagtcctagcagacagccattattcccgcgcaatgtcaatcaaaaaagtaaaggaatggtatatgtcaatagaaagagagatgatggcgatgaaagtgctgatgataaaaacgtgagcatacaaaggccctcgctaaggaaaagcctcatgggtgccaaatcgcagagtatagtcattggtacgaagagtgtcgacgacagaaaattattcaattcgtcacccatcttgcatgaggggaacaagaaaaccgatattagggttaccaagccaagccaaagccggccggcggttaggtctgtgtccttgctttcccaatttgtttataaaggtaaataa

SEQ ID NO: 5222 - DNA, 627 bp, Saccharomyces pastorianus
atggtgatgtcttacttgttcgataaggacatggaaacatggcttctggtaagtgacggatggtgggcttatggttcccaatattgggatacaacaaatactactggcttgtcttctagtaaagcgaatacggacgcttttagtagtaatgaagctaacataaatgaaatggttagtgatattaaaaatgataaccaaagcattatcaactttatggaacgtaagacgaacgatgaacttaatagaaagagcaggattaagaatttacaaagatttgctaggacgatattgatgaaggaagggtttgagaatatggaggagattgttactttgtcacatttggaaaacaaaatactaacagctattaagttggaggaatctgaagaattttccaagttagtgatggtttattgcattcgtcttagcgaactgggatatatggaccgcctagatgatgttttccaatggttatataacgatgtgtctgtcagtcatacagacacaagatttgccgaagtaaatttcaggagggacctcttaaggaaaatactaattgcgtgcggtggtattagacaggttcaaagagtcaccacacgctacgccaaggaaatgaatataatatcttaa

SEQ ID NO: 5223 - DNA, 1926 bp, Saccharomyces pastorianus
  modified_base (1923)..(1923): a, c, g, t, unknown, or other
atgagactgcttaagtatccattggatattaatgacgagaaagtgaacaccctcgctgcccttggcccctatattatactagctggcagcgatggtcacgtgatggcgtggaagcaacagcaattagtcgataccgcctttgataaagccatgatcaaggacttgaagcctgaactttcatttcaagttgatcaggactctggcggtgatatattttttttaacaggggacctcgaagcattgtgtattgggtctgaacatcgtgtgtggagttattctggttggttcaataaagacacgactagtattaattccttagaacaaatgaagaagaaactaatgttcgaatgtaaatctccaagcaccataacagatgtgaaatacgacatacatctgggcatcatatttgttcttttaagtaatgaaaacaaggtactgctattccaccataaaagctcggaaaagctatcggaaatatctatggacaaggcgagcaaacctattacgggaataatagatccaaccggccagacctttaccattttgactgccgatagatcaattttggtctatcaagttaacaaaacaggtacacacaagcttataaataaactgacacaacatgtacagatgtatccattgcattacagaatttcaatgtcacctcaggcagatattttaccggtaataaactcggtcaaaggcgtaccaaataacgccaccagttgcactactttgctagacagaaataacaactataaagttatgaagactttggtgacaccctcttcaaatggttgcaaagttctcgtctattcaccagcatattatgagaagcccaacattaaaaaggccacgagtacacgttacaacctaatcgctacttccggctcaacggacggtaccgttttagtctggaacacgaagagaatgaaacctttgtttaatgcattacaggtttcaaaaacagcaataaacgatatgtcttggtcacaagatgggttaactttgtttgccatttcaaacgatacaacgctatacacatttgcatttcaagagaaggatttgggtgtggcgttaccgctagcagaaataaaaacattgcaggaattaaataaaaagctgccaaagctcgaggaaccagttccaacacaaacacccaaggatttccctgaaaatgtcaaactcgaagcatcttcaagtataatgtctatacccaacgacacgagtagaccaataacggggaagaaactgtctaaaaaaaagctaccttcaggtcaaactaatggtattaagactactcagagtacctcaatggaatttaacgcgccttcttatactgtgcccaaggacctaaaaagaaaaccaaaagaagcgactccgaatgacgctacaaacaatgttcctagtagcaagaaacaaaaaaaagaattgcaacccattgactttttggatacaggccttatgcttcccaatacatctttttcgaggattagactcgcaacaccgaaaatcagatctacgtttaaatattctccaattaataacccaaacttaattctcgaggtaaaaaatgggtctggcaacgaacaaaggccaacgatagtgaggcttacttcaaaagtacttgaccaggatcaagtattgttccaagattttataccaaagctcgtaacaatttgtacggcaggtgatactttttggtcattctgtagcgaagacggaattatttacatatactctgattcgggtagaaagctaatggcacccttaatactaggtgttggcattagtttcctagaagcatgtgggacgtacctactttgtttaacgagcataggggagctttattgttggaacatagaacagaaaaagctggcattccctacgaataccatctacccgttattaaatcgggtcctntag

SEQ ID NO: 5224 - DNA, 906 bp, Saccharomyces pastorianus
atggtaggttccctcctaacctggagtacaccaatctttttcatccacatgaagttttcactacagcaaataagaaacatgcatattaagcccataaagatgagatggttaacgggcggtgctaactacagctatttattgagcactgaaaacaaggagaactcttggttgattgatcctgcggaaccccttgaagtatcgccagagttaagtgttgatgagaagaagaaaatacatgctatcgtcaatacgcatcatcattatgatcactcaggaggaaacatagtaatgcacagcatcttgcggaaagataatccaggtcacaaagttgaaacaattgctggatccaacgcttctcccggtgccactgaaatacctcagcacatggaacagtatcaactgggcaacttgcaaataacatgcattagaacgccatgtcatactaaggattccatatgctatcatgttaaagatttgggaacatccgagcaatgcatcttcactggtgacagtctttttaatgcaggctgtggaaggttttttgagggaaatggagcagacatggacacagctttgaacaagactattttaagagccgtaggtgagcccaactggagtaacataaaaatatacgcaggccacgagtacacgaagggaaacgtcaaattcatcagggcgaaaatctaccacgctatgggggagaataaacactttgatgcactggaacagtattgccagagtaatgagtgcaccactggtcattttacattgaatgatgagctggaatacaatccgttcatgagattggacgaccctgcagttagagcagcagttggtgatactgctaaggcatatcctagagccacagtcatgcaagagctgagaaagctgaaaaacgctatgtaa

SEQ ID NO: 5225 - DNA, 387 bp, Saccharomyces pastorianus
atgatcaccgctttaatgtacttttcctccaaattgggaaaagcatcctttaactcctgcaatattgggttctcctttggcgcaggctcttcagacctgtttctggccggtaagggaggctgctcctcttccttttcctctccttcatctgttttctttgcagaaactgcctttgtatcatcattagcttcacagggggtttctccttctttaacattttgtggggtgctcttatccttgtctgcagcatcactatcttctttctcatcggcgctgagatcgacatctgtagtctttgcgatatcctcatcaatttgttttggagcttctttcttctcaactgaaggaatatccttgctatctttttcttccatggttccggtttga

SEQ ID NO: 5226 - DNA, 3066 bp, Saccharomyces pastorianus
atgggtgttccctcattttttagatggctatctcgaaaatatccgaagattatctccccggtattagaggaacaaccacaagtagtcgatggtgtcatattaccgttggattattctgcccctaacccaaatggcgagttagacaacctttatctggatatgaacggtattgttcatccatgttcgcacccagaaaacaagccccctccagagactgaagatgaaatgcttttggcagttttcgaatacaccaatcgtgtgctgaatatggcaagacctcgtaaggtacttgttatggctgttgatggtgttgctccccgtgccaagatgaatcaacagagagcgcgtagatttagaagtgccagggacgctcaagttgaaaacgaagcaagggaggaggttatgagacaacgagaggaggttggtgaaataatcgacgacgctgttagaaacaagaaaacttgggactcaaatgcaattacgcctggtactccatttatggacaaactggctgcggccctacgctactggacagcatttaaactggctactgatcctggttggaagaatctgcaggtgataattagtgatgccactgtgcctggtgaaggtgaacataaaatcatgaatttcatcaggtctcaaagagccgatcctgaatacaatcctaacactacgcattgtatctatggtttggatgcagatttaatctttttaggcctggctacccacgaaccccattttaagattttgagagaagatgtctttgcacaagataatcggaaaaggaacaatttcaaagacacgataaatatgacagaagaagaaaagaatttccttcaaaagcagaattccgaacaaccctttttgtggttacacatcaatgttttgagagagtatttatctgctgaattatgggtgcaaggtcttccctttacatttgacatcgaaagggctattgacgattgggttttcatgtgctttttctgtggtaatgattttctaccacatctgccatgtttagatgtcagagagaatagtattgatattctgttagatatttggaaggtagtgctaccgagattaaaaacatatatgacatgtgatggtgttttgaatttgccatctgttgaaacactattgcaacatcttggatctcgtgaaggtgacatcttcaagaccagacacattcaagaagctagaaagaaagaagcttttgagagaagaaaagcgcagaaaaatatgtcaaaaggccaagacagacaccctatcgtagctactgaacaattacaaatgtatgacacacgaggtaatttagcaaaaggttcgtggaatttgactacaagtgatatggtgagattaagaagggagctgatgcttgcaaatgaaggagacgaaaaagcaattgctatagttaaagaacaaagtgacaaaaataatgacttaatgaaggacattagtaaggaagaaatcgataatgctgttaataaagccaataaatccaattttagtcttgccgaagttatgaagcaaaagctaataaacaagaaacataatcttgagaaggataacgaagaggaagaagactctgctaagagtagtaaaaaaataaagccagaaaagactgagtctgaaagtgatcttgatacagagatcaaggctgaaattgaagccgatgtaaacgatagagatgacaccgagagtacggaagtgtcaaggtattcacctgctcgggatactctcatttccagtgaagctcctcaaaatggtgtctttgatacggacgagtatgttcggttgtttgagcctggctatcatgagagatattacacagcaaaatttcgtgttgctcctcaagatatcgacgaactaagaaaagacatggtaaaatgctatattgaaggtgtagcttgggtactaatgtattattatcaaggctgcgcttcttggaattggttctatccctaccattatgctcccctggcaactgactttcatggattttcccacttggaaataaaatttgaggaaggtacaccatttttaccctttgaacaattaatgagtgtcttgccggccgcatctggtcacaccctaccaaacattttccggtctttgatgtccgaacctgattctgagattatcgatttttatccggaggaatttcctatagatatgaatggtaagaagatgtcatggcaagggatagcgctactaccatttatcgatcaagatagactactaacagctgttcgtgcacaatatccttcactttctgatgctgaaagagcaagaaatgttcgtggcaggcctgtcttgttgataagtgacaagaatgcgaactacgagagattttccaagaagttatactcaaaagatagtaatgccactattgaggtaaaattccaacatttcaagagtgggttgagtggtattgtatcaaaggacgtggaaggatttgaattaaacgggaagatgatctgtccaattcaaggagggtcattaccagatttgtctactagtttgatattgaaaatgtcataccgattaattccattgccgtcaaagaacaaatctatcatactgaacgggttcattccatcagaacaggtactaacgacatatgatcttgattccgtaatgtacaagtatagtaaccaaaacaactctcgtcgctggaactttggaaacgatctgaagcaaaatattgtcccagttgggcccaaaggtattactcaatacaaaccaaggactggcggttatcgcgccttcttttattatgctgagcagaataggaacagtactcaacccgtcaacaactataataagaacagttacaatgcccaagctggtttcaataatagtagatacaacggtggtggtaacaacaacaacaataacaacaacaacaacaacaacaacaacaacaataataattacagcagtaattacagacaaaattctaggaacaataactattctggaaatagaaacggtggacagtacggcggcaacggttactcccggaataataaccaaagtcggtacgacaattccaggcgctag

SEQ ID NO: 5227 - DNA, 1182 bp, Saccharomyces pastorianus
atgtccaacgctacaaataatactttaggcagccttttgccacagatggaagcagcagcaaatagtgattccctttatggcgatatggtaccgaaccttcgttttaatgttacaatgattgtcatttggggtatactgctaggaatacaggtcatacaagttatcatgcgccaatactggttcacggtggcctttatatgtacaggtattttggaagtgataggctacgtaggaagaacgtgttcacattacaacgttgcttccttggatcctttccttttgaacatgatttgtttgaccattgcgcccgtttttaccatgggtggcatttactatcaactggcaaagcttatagaagtgtacgggcaccggttctcgttattgccttctccaatggcttattcatttattttcatctgttcagatatcatctctctggtggtccaagctgtcggcggtggtctttgtggtgtggcagttgtagatggcgactccctaaaaactggtaataatgttttcattgctggtttagctattcaagtcgcatcaatggccatattcatcatactttggggccatttccttttccgcatatatatatcagtaagatgggagcatcttaatgctaaactcatctcattcaaactcttaaagataccccaaaaggatgtcgattatttgtacagagaaaaataccgtgacttgaggcttgaacctaaacgttgggttttccattatttcaatctggcgatgaccgtatcagtactgaccatttttactcgttgctgttatcgtttagccgaactgattgtgggttgggatggctacctaataacccacgaatggtacttcattatcctggattccttgatgatggccatcgctacagtgactttgacaattttccatccgggatatgccttcaaaggtagaagcctttccattccaatcacaccgggtcacgttgatcctgaaactctgccacatccagaagacactgatgatattttggacggttcagattcaaatcagcttgatatcgaaaaagaagaactccaaataagtttgatgtatccaattaataccttcaagcaaataatgtctaaagtggccagtccattttcctctaaaaataaaaaaacaaatacaacagtacctcagcattcccagatgccaatctaa

SEQ ID NO: 5228 - DNA, 2055 bp, Saccharomyces pastorianus
atgccagcaaaatctggatcgaaaaatgacaggaaagcagtgcctccaaccgttttggctggagcagagcaaacaaatttaagcacgccggcaatgcccgatacaaattctacaggaccattgtcatctgtttctggcctcgatataaggaaatcatctagtcccagccgttctcacaccaagtcgattatgaacgttagtgggtcatctggcgccgtcgtcagtaatacacctgagccaggtttgaaaaggatacccaccgttactttcagtgacccaaagctcgggtccctcaggttggatatggagcagactccgtctggtcaggtgaccaggcagcctagtgagaagaaagcagcgtctgtacacattgcttcggataataacgaccaaggcaggacgttaggggacataaacacaaaaactccaaaggatggagacactcccgcttcttccttttcgactccaacctctatattatccaacaatgagggaggaaataacgtagccagcctgcttgcaaaaaaactgagtcttgctggtggagctgattccattctgaactcagacaatagttcggatagccctaaaaaggagcatccacatttttacgtggaagatcccttgcatacgccatctgttagatccaggtctaacagtactagtccccgcccctccatagtaatgaacacgttcaatccaataaatattgagcgggaggtctccatatcgaagaccggggagcccaccttgctggagtccgttttagaagaagccttgtctcccaatgcagttccaaacccattgaagaaggaaagcgttatgacgaatttagatccgaggttacctcaagatgacggtaagctgcatgtgctttttggggcaacaggctcgttgtctgttttcaagctgaaacatatgataaagaaactagaagagatttatggaagagataaaattagcattcaagttatattaacaaactcagcaacaaaattttttgcgatgaagtacatgaggaaaaacaagaaacctcacaacattaatgatacaaaatgcaataataccgatactaataccaataaaaccaacaatactaataccactactaatactaatactaataacaataacaataacaataacaacaacaacaacaacaacaacaacattaataatgctgctcttctggaatcacctagctctagaaatattcctttggacacagccgcttctggcctgaaaaatgcccaaaatgaggaagataatcccaaggtttccgatacaggatttccctcttcaatttgcagtggccgtacgttgagcaacgcttcaaacactgtatcacaacatcctcaaatcgagttgccaccacatatacaattttggacagacccagacgaatgggatgtgtggcggcaacggacagaccctgtcttacatatcgagctacgtcgttgggcagacatactggtcgttgcacccttgaccgcaaatacgttagcaaagattgcacttgggttatgtgacaatcttttgacaagcgtgataagagcatggaatccgacgttccctatatttctagcgccttcaatgggcagtggcacgttcaactctataatgactaagaagcactttagaattatacaagaagagatgccgtgggtaactgtattcaagccttctgaaaaagttatgggtatcaacggtgatattgggttaagtgggatgatggatgcgaacgaaatcgtgggcaagattgtggtcaaattaggcggttatcctgacacttctgccgggaaagagggagaaggagaggacgaggacgacgatgacaacgatgatgaggaagacgagaataggaagaacgatgcagatgaagatgacgataacgacgacgacgacgacgacgatgacgatgacgacgacgacgacgatgacgatgacgacgacgacgacgatgacgatgacgacgacgacgacgatgacgatgacgatgaagatgaagacgaagatggcggggagaatggcggagagggtcccgatcgctcttag

SEQ ID NO: 5229 - DNA, 2439 bp, Saccharomyces pastorianus
atggagacagcaacatcctcccctttacctattcaatcaaggagcaatagtgacaattctagtacaatagtgccgcatatgaacccttcattgcaaacgccattgaccatatcgacaatggtcaatcaatcaaactctagagaatttatgaagttaactccagtccgtatcagagattttgggtctcccttgaaaaacgtatccacaaatcaccgtttcttagactcagataatggtagtaatagtacggttgataacatgtataaagagaatttcaacctcatttcaagggaattggaaaagttactggaaaacctaaatgtgatatatcaaaatattgggtattctaatactgagatcattaacaaagagaagctcatattcactaccatatctaactctataaagcaatttttcgaacaagctgacgaagaattgaagagactgtccatagaaaatgaaattgaacaagatatcttaaataacatcctggaggtaataaatgacccaagcgggataaaaactattcctgatttatacatccgaaatgccattctactccaggaaagcaaaactgtaccacaatcgcctaaaaagcccctttcattgctgagcaaaaaggcagcactaggcactgcgaagaacttcgttttgggaaagtttttaccccaactacacaactacttgaaatctctagtcactctgaaaaaactcacacaatgcgtaaaagaaaatcttcaaggattgacaagagcagatagtgacgccctttcagcatttcctgatctggacatattaacaacgtatatgacacagatagaaagtactaaagatgatgtcaattcgtccatgaaatttatcagagataacaaaaaggatatcttgaagggatcggcattcaaaatcattgaccaagaatctgtgaaacacatgaatgagattataacagtttacgaggaggaatataaaaggaggtttataaccatactcaaaaaaaaggacatcattctatccatttctgaacaaatcgaaatgccgctgtcaacagtaacagataaaaattttgaggcagatttgagatcatatggagagaaaaaactcctcacatcagaaacgcctgacctatatcctgtggacggagaaataatgtctaaaattgacgcagtattgaagagaatggaagcaatccacagtgaaagaatgaacaaaaaagatcttttaatggaacagtgccaaaaactttggacaaagcttaaaatctctcaagaatatgtcaaatcctttacacatagtcactcaggtttttctacggaaaccttagacaagataaatatagaactaacaagactcgaactgatgaagaaaaaattgatcaaaaaacttatctcagactcctgggacaaaattagagagctatgggacacgctacagtattcagaacaaagtcggtctaactttatcatagtattcgaggaactgagaagaaacgctgcgactttgcaggaagacgaacttctcttagaaacttgtgaaaacgaactaaaaagtttagaagataaattgatactttataaaccgattttaggattaatatccgattttgaatctctacagaaagatcaggaatttttggaaaaaagctctaaagactcttctagactattatctagaaattctcacaaaattttactgaccgaagaaaagatgagaaaaaggataacaaggcactttcctcggattatcaacgatctaagactcaaattagaggaatcagagggtctattcgatcaaccatttatgtacaaaggcaggccacttccagaagtaattaacattcaacaacaagaactagaagcaaaatatccaagatgcagggtcagaatgcagaggtcaaaaaagggaaaagatgttgtaagtaaagaaaatagagttcagaaaactactcccaaaaccactcaaaactcaatcagaataccaacagatatagatttgaactcaataaatatgattcataaaacgccttccagaaacacggtgaggcagtttccaaaaagtggagcatctcgtgagaattcagttcctcgtcatatgcagggaacaacacggttatctagtcctaaaagaagaaatacaaaattactgccgccgacgataatatcgaagggctctagagggaactcacagaggcctgctttgaacagaggtaaatcgtctgaccttctgttatctcctatgctaaaccatacagtaaacgaatgtccagtaaaaccgcgtcaattatttctactttcattaaacaaagtcgacgcaaagggtagtcatattccacaactaaccaaagaaaaggcaatggagcttgtcaaacgatctgctgtccacaccggtaaggagaacataagaagccgacctgcaggcatgcaagcttgcactgccgtcttt

SEQ ID NO: 5230 - DNA, 1410 bp, Saccharomyces pastorianus
atgattaacattgaaactctttgcagttccccgaaaatatcaaaacaaagctttgaaatgccttctgacaaacacctgtttgtcttgatccacggattatgggggaactataagcatatggagtccatgaggacaaccctttccgctactttgaagaaggaagacgtcaaggatgatatgatatatttcttaccgaagcagaacgccatgtttaagacgtttgacggtattgaaatcattgggtatagaacattgattgaagtctgtgaatttatccgggactataaagatggaaaaatcaccaaaatcagcataatgggatattcacaaggaggattagtggccaggttcatgattggtaagatgttgactgaatttagagaactttttgaggacattgagccgcaattatttatcaccatggcaacgcctcacttgggagtagaattttataaccccatgggcacaacttataaaagtgtattatttgctactttaagggcatttggatccaccatcttaggcaaaagtgggagagaattgttcattaaaaattctaataacgatatactggtcagactgagtcaagatgagtaccttgaggcactttcgcgttttaagtggaggttggcctttgccaatgttaaaaacgaccgtacagtagcgttttatactgcttttatcacagattgtgacccattcattgattacgagaataaactaatgtacacttttgaggaaaaaattccaggatcggattatagcggcatattaccaaagattgttgatctaaatgctctaaacgttaacagccatgctcctaccaaaccaactaagacttataagaagtggcccaccattattcttatagtatttgtagctacgttttttgtcttccctgtagcactgattatgaatggcctgggaactgcgtatagtcatattgttacttgcaagtaccgtaaaatgatgtcaaatggtgcgtttcatacagcggtcagagggaagttgggattgacggaacagttgaaggggtatgttgcagatgcatatggttcaattttaaattctgctctagacacggacacaaataatgaggcaagtaacagcagcgctgtcaatgaagaggagcttccttggaaggagtttgtcgaaaaatactcgactatgaatgacggtgcttggaaaactggattcaaaaaattaccttttgatgacagccggaggacaattttggaaaatttgaatcagttgaaatggatcagggttccgatctacataaaggcagtaaatgctcatggagtgatcgtggctagaagggggctagacgagaacacagcagctactggaaaagcatgtgttgaattcacgggacagttgttggcgtacttgatgcaaaagagcaattga

SEQ ID NO: 5231 - DNA, 1908 bp, Saccharomyces pastorianus
atgaataacgtcgtggacaaaagcatgatcaagaaaagaggcaggcctcccatcaccaaagattatcccgatcctttacaaagccctatggcgcattcttcattgcaggtacagaaacagggccctcgcagtttcgctaaacctttgatgaaggtggggcagtgtagtccatctccgaataaaagaagactcagcgtcgaaaatcaccctaatttagtggccaccaccaagaagggcagatatagaggcgtcctgttatcaactcctaccaagaaatcaggagtgagcgggtttactccgatctccaccccatcttccaacgacagttataccaatacggtattctctgagtcaaggaaaactttcctacaaagttcgccgcccattatgtcgtcttctccaggcttccaaaagaagaatgaattcatattcccttcaccggaccaattcaaactttctttaaccattaccgaaagtgggaaggctgtcattgctggatcctcgccattctccccattgtcgaaactacctcattccttaatgaacagtaacgataaaaaattcttacttaatgaaagaattcataaaaatatcaagaaaactactcttaaatttgaaaagaaacgtattctttctctcttgaaacaaatgaagaacaataaagatttcaatatgtcttccgaaatacgcccaccgaaatcaagcagatctgatgtcgttgaaactgaactgcctaccattatagagacctcggcttctccagtaagtagcattagacataacaacgctttgttttctcgatctccacaatcaccgcccccaagcgcacaattcatgccaccatccacaccaaaaagttctttccaatttagaactggattcactcctaacgttgcactgaatcaggtgtctttaagcgatactttaccgaagcctacagcaaatggtcttaactcgaacattgtcggttccaacaacaataatcacaacggtagctccggtaataataacattgtagatgctagtgcattattaacgttgactaatagccctggaatgttcttgtcgccaagaaacaaaatgatgcccaaatctgctactctgtctagtgaacaacaggaattcgtattcaaattctcaggtggcgatccattattgcttaccgatgacgcagatgggaactggccggaaatgcttttcaacgtatctaacagtccaaaacgtcaaaaatgcttcaatacacctccatcgtggataaactttggttcaccagggctattcagcccaccaagaggtgccactatcatggtaaatggtaccacccccgcagccacatcggataacggtaatgtgcatagacaattacaagcccaattagaggcacaagtgcaagcgcaatcccaaaccaattctccggctcaacgacaacaacaacagcgccagttccagatgctccaatcgcacactaacatgagctcttccccaccgcagatcaacatagctctttcacctcaacagtctatggctagcagatcatctgggtacctcaataaagagaaaaccatgattggaacgacagatatactgggcaacgccaaaaatggaaatttacaacccccagcaaacctggttaacgctgctcatggaccttcgacgcccagaaatcaagaattacaattaccaactttaatcgagtgcactccgttaatccagcagaccatgaatggttctttaggaactaaatacataccagaaacctctgtttcaaatagcgttgcatcgaacttaaacgggttcactgctaccaaaacagtttccggttctaatgatttactaaagcagaatatgtatagtaacaaacatgacgatgctagaattgctttgaaaaaattaatcgatgatcaataa

SEQ ID NO: 5232 - DNA, 729 bp, Saccharomyces pastorianus
atgtttgctacaaagctaatcaagccgcctttaatacctaaagatatcaaggaaattaatgaaagactcttggccaacaacggaagtaaaggcttagtacaagatgtgttttttgttatcttaccccagattccgcccaaactaacatttatcttaactctattttaccaaattttagcggtccttcccatattattcgatccatcattcaaaagatttattggttcattaaccctttgtgggctggcttcatatttgtttggatggcacgtgcatgaaaaggctataatgctagttattatcccatttacattccttgttggatttgatcgtcgtcttttggttccgtttatgcttgttgcttcagctggttacgtttctttgtacccgcttcttttcaaagggcaagattactttatcaaaagtttatacacttacgtttggtgcataatttattttgcagctttcagaaaaactaccaaaatttcctcgagtgtggaaaggaggatatttttcttggatagattagcattaacgtacatcttttctttattaccaatggtaactgtactacagattttagacgaagtcaaatggagatactcgtttttgcaaaaattcgagttcttgggattgatggcatacagtgtttattgttcattgggcataatcagctcatggtttgccctatcgtggttatataattttgatgaattactatggcaataa

SEQ ID NO: 5233 - DNA, 1362 bp, Saccharomyces pastorianus
atggcttcaataagagatttaaagaaaaacgttgataactttgatccaacgacatccaaccatttcaaaatcattgtagataacaccaaaatagaaagggagagtggatcttcgatgttcaaaaagacaattcaaatggaaaattctctactaccatcatcatcatccttggcccttatagacacccctggggatgccagatttttcaacaaggaaaccattaattcaattttgacattcaacccagatgtttttacactagttattgattgcaactatgattcttgggaaaaattattagatggtccaactaacaagatttatgaaattttaagaatcatatcatacttgaacatgaattccacatacaaaaagcgattgattattcttttgaataaagcagattcgattggctgggacaaacaaaggttagaaatgattcaatctgaattgctgtatatgctaacggaaacctttcaatgggaaaccacacaattccagttcattccatgctccggtttgtcaggttcaaatttgaatagtgctaataacgtcgttaccaagtctaaatacaaatctgagtttgactctataaatgatgtacccgaatggtatgaaggaccaacatttctatctcatctgtattcattaatggaagccaatatgaataagatagaaactactttggacgagccatttactggtatagtgctgcataattctgttctcccattatccacagaaaacaacggtatatcgttcaagattttcatcaaaagtggatatattcaaactggtcaaacgattgagattcatactccatatggagaaaaaacctattatggcatcattacacagatgattaaacctaaaatgacgttgaggcctgatataaaaaatcgatcacccgttggtgtacactctgacattctagaaatttatgttaaaatacaccctacggatgaatttgcgaaaaagcaaattcacatttacaaaagcgatttaataatttctcctagaaaagcaaacactttgtcaccaaatttaccaaattctctgaagttattaaacctgcggtcaatgaaattgtcgatccaaacttgcgcgttcagtgaccctatagttttagattctgaattgatcctttaccatgatttaacatacactacaatcaagttagtgaagattgttggaactaacgctagttcgattaacccaaaccaatcactaactattgaggtcgagattatcgcaccaggctgtgccttaaacgtgattaattccaaatatgttacaaatgatgttgttatagcatcgtcagactataaaaccgttgcagtgggaaaaatcgcatgtcaataa

SEQ ID NO: 5234 - DNA, 384 bp, Saccharomyces pastorianus
atgtctttattagaacaattagcaagaaaaagactagaaaagtcgaaagacccctcaaatatagcccaatcacaaagtacttctaaaagtgcttccttactagaaagactccataagaatagagaagctaaaagtatcaatggcgaatccagaagaaaagacttgaagtctcttcttgcaaaagataggattacaaaaaatgataatacttcaaatcaacacactttcacattaagttcaaaactctctgctttaaggaaaccatataataatttagacacagaggcaaaaccagcaccttctaaaagcacggaaggtcaatcccctgtccaaagaaggtcgtccgatgtaaccgcgatattaaagatccatggaatgttctga

SEQ ID NO: 5235 - DNA, 174 bp, Saccharomyces pastorianus
atgagtggtggtagtttattgtatgcctctttcacagcatttgttggtggaggctcacacgatcatgacttgagcgtagaagaggaagttgttttaccccatgatgaatccatttatgtgttgctaggtgtgagcattccgttagtgatatcgttttgcatttctgaagactag

SEQ ID NO: 5236 - DNA, 2226 bp, Saccharomyces pastorianus
atgtctttgcctgcagatttagatacaaacatagattctgctgttcttaaagctattgaactaggtacgagactttttagatctggtgagtacctgcaagcaaaaaggatatttactaatgctttgaaagtgtgcgattcttattctcaagagcaaatcgtgcggataaggagcgcgcatcatttagatacttcaagacccgataacaaacggctttgtcatcccaaatacataaaaatactggacaatatttgcgcatgctatgaaaaattggacgatttaaaatcatgtctaagtacatcacaaagatcaattcagctagatcctgaaaatgctaaatgctatgtacgatgtgtgagaacgttcataaaattaaaggattggaaaagagcctataaaatgtgttctcgtgggctacaattaagtggtaacgctaactctcttttgagacaacaaaggcaattcattaagcaaaatatagcaaaaacccaggatatccagaaagtgaacaatggcgacagaaagtatatagatccgttaacagatgatgtaaaagtggaaaaaagaaaaaagaatagtcatgacatagcgggattgtcccgaccaaagaaattattgaagaatgatagccggaaaattgatttatttggcgatctaccaatagagttactacctatcataatccgtagtttttccagtaaagaacttattacattaacattggtttgtaataaatggagagataaaattctgtatcatttaagttgttttcgagaattcaactttaattcaattagtttcagaaatttcgtcaaatttatggattttttacgtcagaatttcactagaacttacaaaaaatacaatctttcacagctgaaaataagctctaaaatcgcttcagaggagttgagaattgcccagatgttatttactaaaatgccgaaatgcataaatttccaacgacttatactatcaatgacaacgttaaccacaacacaattctacaaactgatgatgggggaaaatagggaatttttttcgaaattaatggaactgtcgctcatgataacttatagacctgatagacaacatgaatggaaaattcttcagaattgctctcagttaaagaagatagaactaatctttgttaattccatgatatccattgccaatcggacaaatagcattggaagcggcggcagcttcagttcagtgaacggtagtgttaatgagatagtactagctgaggatcaaggcgaacaagaaattgcggaagaaaaaatagtttataatgagctagagaaaatgacgctgatatgtgacaagaaaaagattaagaacttcccacttgcttatgctctgctaaatgatggttttcctcgattgcaaaaactaatcataacaggtgtgacttttcctattaataaccgaggaatggtaacttttgagtggttatcaaattttccgattttgagagaattgtggctggaagacaacgacaactgtgaattaggtaaattcttgcaagtattgaaggactcgcacgtttggaaaagcatgcagaaattaacctttagagagaacaaactgtacacggtgaccgatttagatgaaagtttgccgattgctaatgatagtgaagtacaagctaggctgtattacggagaaaatcttgaaaatttggagacgttagacctaatgggaacgtcgataagcggatccgctttgacgaaattatgtgatcgggggtacttgaatggtaagaaattgaaggttttgaatattggcaattgccctaatatgcagttttctaaccactatgttaatggagcaaggatggtgttggacgtgaacgtggttttgaaaagactgttcagtttggaagagattaacttatcccatgcgagttcactaaatgacaatacaatgaaattattcattaccaacgtgccgttcttagaaaacttacataaacttgacatttcgcacaattttgaaatcacaggaatatcaatctacgagtttttgaaaaaattccagatggatcacgaagacgacacaggtggccagccattggcttacttgaatatcgacgggtgctcgcaagtgtctcatatcacggttaatatgctgcgagctcagaatttagtcaaacgagtagattgtgcttacgaaagggaagtatggaaaaaatttggagtcaattcatatgcgtattcatga

SEQ ID NO: 5237 - DNA, 1161 bp, Saccharomyces pastorianus
atggggcgcaaccaacttgcatctatcgaacatgaaattatggacgggtctgtcgataatgacatgcctatttcccgtctttcagagatgttcaacgtggaccacatcatcgcgtgtcaagtaaacatccacgtcttccccttcttgaaattctcaaatacctgtgttgggggcgaaatcgaaaaggaaatcaccgctcgtttcaaaaaccaactgacgaagatcttcaaatttgtttccaacgaaaccatccatctcctagacatcctgaaggaagtcgagttccatccctatttggtgacgaagctgaaacacctctttctacaacaatattccggtaacgtcaccatcctacccgatttgtcaatggtcggccagtttcatgaaatactgaagaatccctctcagctcttcctgttgcaccagaccacgttgggcgcaagatcgacatggcccaaaatggccatgattcaaaataactgtggccaagaattcgctttggataggacaatcacttttctaaaggagaaaatcatcatctcttcgtcaataagaaaccctttgcaattctgtcaggctcagctgggtgagcatatcaaatctctatcaataatggacgccgatttaccaggcgtcgacctagaagaatcctcttccaattcgttatccatcatcaagacgccgaagaagcattcaaagagaacaccccttcagccgttaccttctccatcctccattttcaataagagaaaactagattcttcatcaacttccccatctccacccgcattactggagggcacaaagtctttatcgatacatggtccaagacagaaggcaaactctttgtcatttgctattgactcttccagtttaaggttgaagaaatccccattgaagaatcaaccaccgcctccattcaaaaaaagatcatcctattgcaaccaaaatgtttcaccggaaacaagaataaataggaaaaaatctggtaccatttcctcccacgatgttcaaacaaactcagaagatttccccatccccgctattgaaaacggttcattcgataacacttaccttcacccaactaggttccctataaagggtatgtcgaccgcaacaaaggacgacttcatgaacaattctgatatcttccaaaactaa

SEQ ID NO: 5238 - DNA, 909 bp, Saccharomyces pastorianus
atgtctaacactctgccagtaacggagttccttctgtcgaagtactatgagctatctaacactccaaccaccaacgcaccgtccttcctcacttggctctaccacaagaccctgtcccgcaagcagctgctcatatccgacctatcttctcagaagaaacgcgccatctcgtacgaccaatggaacgatatcgcattgagacttgacgaagccactggcctttccaaatggaaagatatcgacgagtcgtccctatacaactacaagctgctgcgcgacttgacgctccagatgcgccatttgcgaacgtcccgcgaataccaccgcctgctgtacctgatcagaaccaaatgggtccgcaaccttggtaacatgaacaacgtcaatctctataggcactcccactccggcaccaagcagatcataaacgactacctgcaagagtcccaggcagtcctcaccgccctcgcccacgaatcagacatgaacgaccactatctcttaggtatcctgcagcaaacaagacgcaacatcggccgcaccgccctcgtgctcagcggtggcagcaccctgggtcttttccacatcggtgttcttgccgccttgttcgaatccgacctgatgcccaaagtgattagcggcagcagcgccggcgccatcgtcgccagtatattctgcgtccacaccacccaggaaattccctccctgttggcgaacgtgctcaatatggaattcaacatcttcaacgatgacaactccaaatcacccaacgaaaacctgctgatcaagatttcgaggttctgccaaaacggtacctggttcgacaacaagcccttgatcgacacaatgctgtcgttcttgggcaacctgaccttagagaggcttacaacaagacgggtaagatcttga

SEQ ID NO: 5239 - DNA, 507 bp, Saccharomyces pastorianus
atgaggaacaactccttttttgccaacgcgcacacgcaaatcctgcagaacatcatcgacttcgaacggacggcggccaaagacgacggctccgtcgtccgcacaaagatggaccaggcgcagaacttgctatgctatatgaacatgcagtccttcgcgccctttttgatcagcaacgtcaagttcgtgcgcaaacgcaccatccacatcgtgggcgcacgctcgaactggtgtccgccagaaaaccagctgtttttgcaaaagaccttgcagaactaccacctcgactccattccgggcgggtcccacctggtcaacatcgaggccccagacctcgtcatcgacaaaatcaaccaccacattcgcgagttcgttctcacgtacccgctgcagcccgcttgttcgctttcccgcttgtcgttcgaggaacgaatggccaagttcaaccaggcgttcgaatctttcaaggaccacgctctgatcaaaactaggaaccagaaactgtag

SEQ ID NO: 5240 - DNA, 639 bp, Saccharomyces pastorianus
atggcccagccgaagtcggtgtaccacccgccccgctcgacaagctccgcggctaaaatggaacatacattcaccagagaaacgaaaacggacagcgcaagctggccgcgcgcaccacgtgccacactgagtgcggcagaccgcctcgagctcgtctacgacgtgtacaccaacgcagagcggcaccgccaccctggcgccacaagcgtcaacattgtgtttctgcacggcagcggtatgagcaaggtcgtgtgggagtactacttgtcacggatcgtagccgccgacccggacggtcactacgcgctgcacaagctcgtgctgatcgaccaggccaaccacggcgactccggagtacgcaaccgcggcaagctgggcactggcttcgactggaccgacggcgcgcgcgacgtggccaagatagccgcccacgagttcagcggctacgaaggcgggacgccacccgcgctgaacgttgctgtcggccattccatgggtggtttccaggcgctggcctgcgacgtgttgcagcccaacctgttccatctgctcatcctgatcgagccagtggtcatcacgcgggtgcagcagcagctgctacagcagctgctgccaccggcgtctcccagatccctttag

SEQ ID NO: 5241 - DNA, 504 bp, Saccharomyces pastorianus
atgattacgaatcgagctcggtaccggggatcctctagagtcattgtcgttctgctcttgaaaaagcagtccaaactgatgatctccatcttctcttccagactcatctgggctgccctgtccaccttcttcatcatctgcatgatcagtgcccacatgttcaaccagatcagaaatacgcagctggtaggcgtcggcccaaagggcgaagtaatgtacttcttgcccaatgagttccaacaccaattcgccattgagactcaagtcatggttctcatctacggtatgttggcctcattggtcgttaccttggtcacgggcattccattcttgcgctctcatctgtatccaaacgcgaagaaagcatacttcattgacgctgccttggccaccttttgtgccttattcatttacatcttctttgctgctttgaccactgtcttctcgataaagagtccagcataccctttcccactattaaggctatccgctccattcaaatag

SEQ ID NO: 5242 - DNA, 627 bp, Saccharomyces pastorianus
  modified_base (616)..(616): a, c, g, t, unknown, or other
atgaattggctgtttttggtctccttgattttcttctgtggcgtgtcctcacactctgccctggcaatgtccaccggcaaactgctaaagctggcaaacaagtctccgaaaagaatcatccctttgaaggactcaagcttcgaaagcatcctgacgcccccccacgaaaacgcgtacatagtcgccctcttcaccgccacagcgcccgaggtcggctgttccctgtgtctcgaattggagtctgaatacgacaccatcgtggcatcgtggttcgatgaccatccagaaggcaaatccgcccattccaacacatccatcttctttaccaaggtcaatttggaggaccccgccaagaccatcccaaaggctttccaattcttccaactgaacaacgtccccagactgttcgtcttccagccaaactccccctccatctccgattacagcatcatcaatctctccactgacgccggggcggaaagaatgaagcaggtcatccaaggtatcaaacagctttcccaggtcaacgacttctctttgcacttacccatggactggacccccatcgtcacctccaccatcatcactttcattgtcgttctgctcttgaaagcangtccaaactga

SEQ ID NO: 5243 - DNA, 102 bp, Saccharomyces pastorianus
agtaaagatgacgtcaaagaacttactgaaaaagtggaaattctcacagctataattactgacttacttcaaaaattggatttaaaggataaaaaagaataa

SEQ ID NO: 5244 - DNA, 1701 bp, Saccharomyces pastorianus
atggtgtcatccaataacggtttgaatttacccatttcaaatgaacaatgtttgcccgaaaatactggatctcttgggtttgaagcccccactccgagacaaattttaagggtcacattgaacttgaagtatttagttgacgaaatcgtacctattgtatataatcccgctgaaatcgtttgcgatcattctgagattttgtcaccaaaggttatcaaattggcttataatgcatgcggtggaaaccccgatgacaaggccaacaaaagaaagtatcagtctgtcatcattttctcgcttttaaaagtttgtgaatggtactccaaactgtctaccatggaagtgcataacgctaagctttatgaaattaggaatttagctgcacagcaattatgtaaactgctaattgaacaagaggaaacaagagatttgcaatttctttttatgcagctgttattgcgccggtacgtgattaatgagaatgacgaggatcaagaccctttgaatgcgttggagttggccacggacatgcattgtactacagtgatagggtcgagtggatttcaacgttgtttaaaatggatttggagaggttggattgtccaaaatggaatggatcctaccacttttattaaggacgattcattggctgagatttctatagtttcgcacttcaacccagtaagactaaaggcaccaatatatcaaaattatctgcagatgactttttcgtttttgtttctggggctgtataccttggtggtaaatgggaaggactctgaaagggtgcaatcctttgatttgtgggaaactgtgttttatattttcaacacgggtttcatcttggatgaactggctaaagtttattatattggttatgctcacctatcattttggaacttattcaatgacgccacatacctgattatcaccttggcaatgggattccgtgcaatgagtgtaactcccctgaacgccaaatacacttcggaagattgggataaaatttcatatagggtactctcatgcgcagccccattcgtttggtcgagattgttactataccttgaatcacaaaggtttatcgggatcatgttggtgattctaaagcacatgatgaaagaatcgatagtattcttcttccttctgttcttaattatgatcggattcactcagggtttcttaggtttggactccgctgatggtaaaagagatatcacgggcccgattttaggtaatttgactattaccgttttgggtcttggaagctttgatgtttttgaggaattcgctcccccatacgcggcgatattatactatggttactactttatcgtttcggtcattcttctaaatatcttgattgcattgtattctactgcataccaaaaggttattgataacgctgatgacgagtacatggctttgatgtcacaaaagacgttgaggtatatcagggcacctgatgaagacgtttatgtctctcctttaaatttgattgaactgcttatgatgcctatattccatgtccttccatcaaaacgcgctaaggacttaagttatacaattatgacaatagtgtatagtccatttttgttgtttatttccataaaggaaactcgtgaggctagaagaataaagtataatagaatgaaaaggctaaacgatgatgcttatgaatatgatacccatgggatttaa

SEQ ID NO: 5245 - DNA, 1032 bp, Saccharomyces pastorianus
atgccaccaaagaaaggaaaacagccccaagtggctgggaagaagaaggaaaatgtcgacaagacatttggtatgaagaacaagaaccgttccaccaaggtccaaagatacatcaagcaggtgcagacacaatcggatccgaagaaggaagagatgaaactgttgaagctggaggagaaaaaacgtaaagaagccgaagaggctgaacgaagagcactgttcaaccctatagttgaccaaagaattcgtgcgggcgtggaccccaagtcgatggtctgtgccctgttcaagctagggaactgtaacaagggtgccaagtgtaaattctcacacgatttgaacgtaggcagaagaatggaaaagaaagatttatatcaagatacgagaagtgagaaggaagaggatacgatggataaatgggatgaagaaaagttgagagatgttatcatgtcgaagcacggcaacctaaagaccaccacggaaaaggtgtgcaaatactttatcgaggcggtggaaattggcaaatacggttggttttggatttgtcccaacggaggtgacatgtgtatgtacagacactctctaccagaaggctttgtactgaagaccaacgagcaaaagaggctcgagagagagtcgttggagaaacaaccaaaaatcacactggaggagttcatcgaaacagaaagaggcaaactggacaagtccaagctcacacccatcacagtcgccaacttcgcggagtggaagaagaatcacatcatcgccaagattaacgaggagatgaagctgacgagcaagaggaagccctcaggtagagagctcatcctgaagatgaccgccgagaacaggtcgttcgagtcagataacaccgtcgacgaagcggcacagggctccgcatgggatctgtccgaattcacagacgccttaaagaaggctgaccaccaggacgacagcggtatcaaggattacggtgacggtagcaacccgaccttcgacatcaagaaggccagccctgccaccctcgcataa

SEQ ID NO: 5246 - DNA, 549 bp, Saccharomyces pastorianus
atggctgtcatcctggcgttaatcatcgccttcatcccctgggttaaagccttattcgtcacttcggagcataccccaaagattaaacaggctccagacaatgcacccgctttagcgttcattatggactttacctcttatgtgggagctgcctcagtgccattcggtttaatcctattaggtgccactctgggtagattgaaaattgggaaactgtatccgggtttctggaaggctgctgtgatcttagtgttcattagacaatgtatcatgcccatttttggtgtcttatggtgcgatcgtctggtgaaagcaggttggttgaactgggaagacgacaagatgttactgtttgttactgcgataacttggaatttgccaaccatgactaccctaatctatttcactgcgagtttcacccctgaagatgaaactgaacccgttcagatggaatgcacttctttcttcttgatgcttcagtatcctctgatggtcgttagtttaccatttttggtgtcttatttcataaaggtacaaatgaaactatga

SEQ ID NO: 5247 - DNA, 1236 bp, Saccharomyces pastorianus
atgacacatatcacgctaggacaagccatctgggcctctgtcagaccaatcatcaagatctacctgattattggtgtgggcttcggtttatgcaagatgaacatcttgaccgtccaggccacgagatccatctctgatatcgtcttaacggttctgcttccttgtttatcgttcaataaaatcgtagcaaatatagaggataacgatattaaaaacgtcggtatcatttgcctgtcgtctgttctgcttttcgccactggccttgggttttccttcatcgttagaagtgtgcttcctgtccccaagagatggcgtggcggtattcttgcaggtggcatgtttcccaatatcagtgatttgcccattgcttatttgcagtccatggaccaggggtttatcttcacggaagcggagggtgataaaggtgtcgccaacgttattatcttcctggccatgtttttaatctgcgtcttcaacctgggtggcttcagattgattgaaaatgacttcaactacaagggcgatgacgatgaggaaaatactttgatcgatcaagatcaagactcaacccagcagctaaaaccacccgttgagggcggctcttcttcttcatccaaccaagacattttgaaagagccaaatgaatccactgttccaaatagttcacaagcaagctacatttctgagaaggagagtaaacaggaaaaattttcagctaccgctcccaaacctactcaagctgtgttcccaacagcaagtaacatgagcatgaattcatccgcggtagtgtccatcgatagcattacacactctctgcacacaacccgcatggatacacagtcctctgaccaactaaataaccccacttatagaactaggagtcaaccaatcgcatataccactgaatcaaccacaggcaatcgcaagaatagccgcaggaactccattactggctctttacgttccgtggatatgcgtgagctacccgctgaagatatgaatgatttgattcgtgagtactcaaacgttgaccggtacggtaagagaaggagaagttctcttagctctcaaagaccgtcttccatcatggggaaccaggcagacaacgctttttctcccaatctgtctagaacctccactatacaaagagtgaaggcttctaatctaacaagaatatactcagatgctactgtcagtaagaaagaatcgatacttcaggatcgacgccgattgcag

SEQ ID NO: 5248 - DNA, 5037 bp, Saccharomyces pastorianus
atgaatgtagtatttgtcgccttgattttgattatagaacagtctattcccatagaaagcgtgtattgcagtgaattgggcttaatggatttttctattcctccgaccttacctctagacctgcaaagtcgattgaatgagttaattcaagattataaagatgaaaacctaacaagaaagggttatgagaccaagagaaagcaactactggatatatttgaaatttctcaaatgaggccctatacccctcttcgatctccaaattcgagaaaatcaaaacgtttgcacaagagaaatcccagtctagcatcatccacaatatccactccaacctctatcgataggcgacattccatatatcgtgttacaaccatgaactcaaattccgcaaatggtacccctaggagacgcagtaaaaggtatgctgcttctttacaatcatcattgccaggttctgctgatgaaaaggctttagggaaggacaccgtttataatcctatgattccgctattgccaagacacattgagcctgaaatcacgtccggtggggacacaacaatgacagattctttgccattgattttgagaggacggttcgaacattgtgatggccaaacagcaatgattagtataaatgctaaaggtaaagagacctttattacatgggataaactttacttgaaagcggaaagggtggctcatgaattaaataagagtcacctttataaaatggataagattttactgtggtacaacaaaaatgatgttattgagtttaccattgccctactgggttgttttattgctggtatggcagccgtccccgtttccttggaaacatattccctgcgtgaggttattgaaattatcaaggtgacaaattctaaatacgttttgatttcaaacgcttgtcataaacaactagataatttgcattcatcttcaaatcattcaaaagtcaaactggttaaaaatgatgttttccaacaaataaaatttgtcaggacagatgacttgggtacgtacacgaaagcaaaaaaaagctcccctacttttgacatacctaacatttcatatatagagtttactagaacgccattaggtcgtctgtcgggtgttgtcatgaagcataacattctaataaatcaatttgaaacaatgacaaaaatcttaaactctcgatcgatgccccattggaaacaaaaatctcaaagtattaggaagccattccataagagaattgcgtcaacgatttcaaggtttgtcattttgaacagtttagaccccaccagatcaacaggtttgattatgggtgtccttttcaacttgttcacaggtaatcttttaatttctattgatagtagtatattgcagcgacctggagggtatgagaacactatcgataaatttagagctgatattttattgaacgatcaattgcaactgaagcaggttgttatcaattatttggaaaatccagaatccgcattttccaggaagcacaaaatagattttagttgcatcaagtcatgtttgacctcatgcaccactatagacaccgatgtgactgaaatggttgttcataaatggctaaagaatttgggatgtatcgatgctccattctgctattctcccatgttaactttattagattttggtggcatattcatttctaccagagatcaattagggaatttagagaactttcccattcataattcgaaactaaggttgcagaatgagttgtttataaaccgtgaaaaattaaagcttaatgaagtcgagtgtagcataacggctatgattaacgcatcaagttcttttaaagattatctgaaattggaggcatttggtttcccaattcctgacgtcacgttgtgtgtggtcaatccggatacaaacacgttagtccaggatctcactgtgggtgaaatatggatttcttctaaccatattaccgatgaattttatcaaatggataaagtgaacgagttcgtattcaatgcaaaacttaactattctgaaatgtttacgtgggcaaggtacgaaatgcctagtagcgaatcgcaagctgttaccgagcaattggatactattttgaatatttgtcctgctaacacctactttatgagaaccaagcttatggggtttgttcataacggaaagatatatgtgctttcgcttatagaagatatgtttttacaaaataagttggttagattatcaaattgggcacacacatcaaacctattacatgtcaaaaaacccggccagccttctacaaatatcagtaaaccagtagttgaagaaattgtcaaatctgcgaatacctcagctttgagtgttgaagcattttctgaatgtaagaggactgtcgaatcccattacttgcagcaaattactgaaacaattgtaagaacagtaaatactgtttttgaggttgctgcatttgaattgcaacatcataaggaagaacattttttagttatggtggtagaaagctcgctggctaagacagatgaagagagtaaaaagaatgcagcaacagatactaccttggtgtcgtttaatgagaaacagaaaataaaagtggaagcgaaaatgaacgacttaactgaccaaatcttcaggatcctttggatttttcataaaattcaaccaatgtgcatcttagttgtaccaagagatactttacctaggagatactgttccttagaattggccaatagtactgtagagaaaaagttcttaaacaacgaccttggtgcacagtttgtaaaatttcaattcgacaatgttatcttagattttttgcctcattccgcttactataacgaaagtatattatctgagcatttatccagattgagaaaaatggctctgcaagaagagtacagtatgaatgagcccggctatcgtaccgatggtcccgttgagtcaaaactggctctgcaatgtagcggtgtcgattatagagaagagtctgttgacaccagaagccatactaaacttacggatttcaaatcgattttggagatcctggaatggaggatttccatttatgggaacgaaacggcgtttagcgatggtactaattcaaatatggccaattcctcaagtaataacgataataatgtacataaaaaggtttcgtgggcgagctttgatagaattattgcaggcttcttaaaaaaaattgtgggatcaaaaaacctgctaaagcatggtgacagtgttgttgtcatgtgtgaaaactccgttgaatatgtggcaatgattatggcatgtttattttgtaattttttggtcattccgttaccaagtattaaagaggttaccgtagaggaagatctgaaatttttggttagtattattcagagttacaaagtgaaaaggctttttgttgacgctaaattgcacactttattaaacgataataataccgtaaacaaatgcttcaaaagatacaaaagtttaatgcccaaaataacagttttttcaaaagtcaaggttaagaatgcattaacgatatctatgtttaaaaatgtattaaagcagaaatttggggccaaaccaggtaccaggatcaatatgacaccatgcgtcatatggataaacacagaatatgatgtggcgtcgaatgttcatgtgaccatgacacattcgtccctacttaacgcaagcaaaataatcaaagaaacgttgcagttaaggaataatagtccacttttttccatatgttcacatacaagtggattggggtttatgttcagttgttttttgggcatttatgcaggtgctgctacatgtttattcagtctcacggatgtgctgattgatcccaaggaatttttaattggtcttcaaaatttaaatgtgaaagatttatatttgaaaatcgaaacgttttattctttattggacagagcctccaatttaatcgagggatctaaaaatagaaaggaaactttaaattcaaacaagaacaatacttctagttctgtcagaggagatgtttttaaaggcgttcgaaatattatgattcctttccccgataggccaagggtttatacaatcgagaatattttaaaacggtattcaaatatctctcttgcttctacacaaataaactatctctaccaacatcatttcaatccgattatctcgttaagatcatacttagatatccctccaatcgacctatatcttgatcccatttcactaagggaaggtatcataagagaggttgatgtaaacgatatgacaatgaatggaggaacttacatcagggtacaagattctggtgttgttcccgtgtgcacagatgtttctgtggtcaatccagaaaccctgttaccatgtgttgacggagaatttggtgagatttggtgctgttcggaggcaaatgcgttcgattactttgtatgtaatggctcaaagaacaaactgtacaaagatccattcattaccgaacaattcaagagcaagatgaaaagtgagatgaataatacattgagctatctaagaacaggtgacttgggtttcatcaaaaatgtcagctgtactaattcacaaggagagattattggtttgaacttgttatttgttttaggaagtattcataaaaccattgaaatcttggggttaacacattttgttagcgatttggagagaactgttaaagaggtacacgctgatattggtagttgtttgattgccaaggcaggcggattgttagtatgcttgattagatgtaaggaccgccacaaccctatcttaggtaacttaacgacattgattgtttcagagctattgaataagcatggtatcattttagatttatgcgcatttgtgaagactaaaggcctaagttcgaaaaactccagtatgataatggatgtatgggcaaagaatagggcgtcgataatgcaagcttggttcgatcagagtattcaaatagaagcacaatttggtatcaactatggtgagaatatttcgatatatttactatcagattacgaaaaggacaatatataa

SEQ ID NO: 5249 - DNA, 2628 bp, Saccharomyces pastorianus
atggatttttctattcctcctaccttaccactagatctgcaaagtcggttaaatgagttaattcaagactataaggatgaaaatctaacaagaaagggttatgagaccaaaagaaaacaattgctagacaaatttgaaatctcccaaatgaggccttataccccgcttcgatctcccaattcgagaaagtcgaagcatttgcacagaagaaatacaagtcttgcatcatccattacgtcgttacctaattcaattgacagacgtcattctatctatcgtgtcacaactataaactcgacttctgcgaacaatactcccagaaggcggagcaagagatatacagcttctttgcaatcgtcattgccaggttccagtgatgaaaacggttcagtgaaggatgccgtttataatcctatgataccattactaccaagacacactggagccgaaaatactagcagtggagactcagcaatgacggattctttaccgctaattttacggggacgctttgaacattatgatggtcaaacggcgatgatcagcataaattctaaaggcaaagaaacgttcatcacatgggataaactttatttgaaagcggagagggtagcacatgaattgaataagagtcacctttacaaaatggataagattttactatggtacaataaaaatgatgtcatcgaatttactattgcattattaggctgtttcatatccggcatggcagctgtaccagtctcattcgaaacgtattctctgcgtgagatccttgagataattaaagtaacaaattcgaaatttgttctgatttctaacgcatgtcatagacaattagataacttgtattcatcatcaaatcattcaaaagttaaactggttaagaacgatgttttccaacaaatcaaatttgtcaagactgatgacttagggacgtacacaaaggcaaaaaaaacttcgcctacctttgatataccgaatatttcatatatagagtttactagaacaccgctaggtcgtctttctggcgtcgtcatgaagcataacatcttaataaaccaatttgaaacgatgacaaaaattctaaactcacgatcaatgcctcactggaaacaaaaatcacaaagcatcaggaagccatttcacaaaaaaattatggcaaccaactcaaggtttgttatcttgaatagtctggaccctactagatctactggtttgataatgggtgtgcttttcaatctttttactggtaatcttatgatatctatcgatagtagtatgttacaacgacctgggggctatgaaaatatcattgataaatttagagccgacattttactgaatgatcagctacaattgaagcaggtagttattaattatttggaaaatcccgaatcagctttttccaagaagcacaaaatagatttcagttgcatcaagtcatgtttaacctcatgtaccactatagataccgatgtaagtgagatggttgttcataaatggctgaaaaatttaggatgtattgatgcaccattttgttattctcccatgttaactttattggactttggtggtatctttatatctataagagatcaattaggaaacctagagaactttccaatacataattcaaaactaaggcttcaaaatgaattgtttataaaccgcgagaaattgaagcttaatgaggttgaatgtagcataactgctatgattaattcatcaagctccttcaaagattatcttaaattagaaacatttggcttcccaattcctgatattactttatgtgtggttaatccagatacgaatacgttggtgcaagacctcactgttggagaaatatggatttcttctaaccacatcaccgatgaattttaccagatggataaagtgaacgaatttgtgttcaaagcaaaactaaattactccgaaatgttttcttgggcaaagtatgaaatgcctactaacgaaaaatcgcaagcagttactgaacaattggataccattctaaatatttgtcctgcaaatacctactttatgagaaccaagcttatggggtttgttcataacggaaagatatacgtgctttcactcatagaagatatgtttttacagaatagattaatcagattacctaactgggctcacacatcaaaccttctttatgccaaaaaagggaatcaatctgctcaacctaaaggtaacactggagcagaaagtactaaggctattgatatttcgagtttaagtggcgaaacatcttcgggatacaaaagagttgttgaatcccactatctacaacagattactgaaacagttgtgaggacagtaaatacggtttttgaggttgctgcatttgaattacaacaccataaggaagagcactttttagttatggtggtagaaagctccctagcaaaaaccgaagaagagagtaaaaatggcgaaacaacagatactactttaatgaaatttgcagaaacacagaggaacaaattagaaacgaaaatgaatgatttaactgaccaaatttcaaattctttggattttcataaaatccaccaatgtgcatttagtgtgccagaatattacctagaatttgtcccggaatggcatagc

SEQ ID NO: 5250 - DNA, 360 bp, Saccharomyces pastorianus
atgtgggatgtaggaggacaacaaagattgagacctctctggagacattattttccagccaccaccgcacttatctttgtgatagattctagtgctagaaaccgtatggaagaggccaaagaagagttatatagtatcataggtgagaaagagatggagaatgtagtactgctggtatgggcaaacaaacaagatttgaaagatgcaatgaaacctcaagaggtttccgattttttagaactggagaaaaatttgaaaaaccaaccttggtgtgtcatcggtagtaacgccttatccggacagggtcttgttgaaggattatcctggatttcgaacaacacaaacgttccaaagaaataa

SEQ ID NO: 5251 - DNA, 111 bp, Saccharomyces pastorianus
atgggcaattcaatttcgaaggttctgggaaaactatttggctcgaaagaaatgaaaattttgatgctaggcctggataggctggtaagacaacaatattgtacaaactaa

SEQ ID NO: 5252 - DNA, 153 bp, Saccharomyces pastorianus
atgtctgctccacaagccaagattttgtctcaagctccaactgaattggaattacaagttgctcaagctttcattgaattagaaaattcttctccagaattgaaagctgaattgagacctttgcaattcaagtccatcagagaagtatgttaa

SEQ ID NO: 5253 - DNA, 276 bp, Saccharomyces pastorianus
atgaactcaccaaaagctctgttttttggaatccctggaaaactatcacataattgtaacctcaaactcaccaacaagacaaattgccccacacagatgatgaaacctgataaaaatgcgttgaaggggaaattgtcacggattaaaacaatgaatgcaaactggattattcctagcaaaaccaaaaagaaacaaaatatatcaattagttttagtttaggatttttttcaatctgggcaaagtacgccttcttggaagtcttgaatgcttcttga

SEQ ID NO: 5254 - DNA, 378 bp, Saccharomyces pastorianus
atggctaagacatcgaaagcaagcactacatcatctgcggtcataacagattttcaagaagcattcaagacttccaagaaggcgtactttgcccagattgaaaaaaatcctaaactaaaactaattgatatattttgtttctttttggttttgctaggaataatccagtttgcattcattgttttaatccgtgacaatttccccttcaacgcatttttatcaggtttcatcatctgtgtggggcaatttgtcttgttggtgagtttgaggttacaattatgtgatagttttccagggattccaaaaaacagagcttttggtgagttcattgttgctagtttgatcttgcatttcgtttgtttacattttataaattaa

SEQ ID NO: 5255 - DNA, 606 bp, Saccharomyces pastorianus
atgagtctactaatggacgggtaccatcgatttgtgaatttcgtaagccaggaagattactatacgcaatccactggcggtagcggctgtgcgccggaacaagaacttaaaaatagctctattgtctctttgtcggcgctaggcgaagaaaaggtgccacgagtaaggaaatacaatgaaggaaaacctaaccgaaccggagcggcgatggtcttccaggagacttctacaaacacagccgctgaatcacagagcagctgcgcttctcgcccaagcgaatccacgtactccaccagcactgacagtaacagcaccatttgcctcaatatcaccaataaacgtctcaaaaaaacccacaattccagttttttcaactcgggaaaggacctactgcaaagattaagctttgtgaaaaaacgcaagtctttcaaacaatcttcaacttcgtacaacaaccatattagaaaccacctgaaaagagctaagcagtcatccacaataacaacatcgtcgtcgccctcatcgtttccccccacagcaacgggactgaacgaaaaaagcgttgaaaatggctttaaaaagcttaacctacaggacactgcttaa

SEQ ID NO: 5256 - DNA, 207 bp, Saccharomyces pastorianus
atggcgagtgttccgagcttatgcgacatactgataccgctagaaaagagtgatcacaaagctcactcaattcaacttcgaaagggccctcacgagggtgtccgctctccgtacactgatcacaaagctcactctattcaacttcgaaagggccctcacgagggtgtcgctctccgtacactgtacagaggttttataagtttttga

SEQ ID NO: 5257 - DNA, 162 bp, Saccharomyces pastorianus
atgaatgatgttattcaccgtagcaaagacggctctgacagaagcatctccagtgtcctcagatacaccaataccccacatgttagtggtagcatgatcatttttccttatataggaaaggtttatgaacgatgcggcttgagtggcggaaccagaacctag

SEQ ID NO: 5258 - DNA, 642 bp, Saccharomyces pastorianus
atgaaggaaattgactttgacacctacggttgtgacgaagaagatttaaataaggaagataatctcctcgccgcacaatttttgaacaatttacgcttgaactcgcccttggcgatattgccaaatagtgccgctgacagcgaagtcgaatccacttgggatgacaatgggtggggtgaaaacggtgatactaacgattccatgacaaacggcagaacgaaagcatctcccaagtcaaccagtcgtatggccacagcaaccacaaacacacaagaggtctccgggaaaccagttaaagttaacaagagctggaatgaagaattgaacgataacgactggttgcaggacgaaagcgatccatggaatgtgcctgaggatcgtccaaaaccgcaggtctcggttttagggaaaaaagtggcacctagtgtaaagctttcaattaagaagaagaaaacgacgattttagcgccaaggggcggcagaaccaatgtcaccaccactgctactgcttctaaagcttccacatcaaacaaaacaacaagaagcgaattcagcagtgcccacaaccaaacaacaaagaaagccagtgcagatagttgggatgatggtgcagatgcagacccttgggatacggactggtga

SEQ ID NO: 5259 - DNA, 1620 bp, Saccharomyces pastorianus
atgaacttctcaagtatcttcaagtccatttctaacttccaatttccatacaccatccaggaaactgccaccaatgaaacagctctctggcaatcttttgatggaataaggaaggcagattcattgcccgtgactgcttttaaagccaaaaggacaccagaaaacgcatctttgatcttgaatgctgtacacaaggccaaaattttaaagattccagggctttgtactgtgttagaaacattcgattcagatcctcaatctacattcattgttactgaacgagttattccgtttccttgggatgatctgagctgcttatcccaaaacaaatttggtatcgaactaggaatatcacagttattaacaactttgggatttttgaacaaatttgttcttggtacactctcgaaagattcggtatatattaatggtaagggagagtgggtattgtttggactagaactctttgcaagcaaggagggtttaagtgcttttgagtttgctagcaaagctagaacatattaccaacttcatggctcacaactgcctagtgaggatccaaatacgattgattcaatgaaattgggtttcttgataaaggatcttatgggtccttcttctcttccaaaggattgggtggttcatgttaatatgatcctagaaggaagggccacgatcgagagcttcacaaagaggctagaaaatacagaaacttggcgttctaatcctttgataaacttctatcaagatttgaaggaattgcatataaaggacccacgtggaaaattgactgtaatgtcaaatttagaaaatctgtacttggagtcaagagagatttttcgcaacctgacacctgggatgatcgaaaatttcattattccagagctatgtgatatcataaaattgttgatatcacaaagcatggctagcaccagcagtaatgtggccacagacttcaacgcatcacataaacttgtaccattcctagcaataatcttggatttgacttcagaaaccaacactttcccagttggattcaacgatcttattacccaaagtttcaaactaactgatagacaagtaagatttcttctattgatatatctacctaaactaatagaaccattgggtaagtcagaggtctccggtaaaatatacccatatttcagtcagggtttaacagattctgatgccaccctcaggttgcaaacattaaagacaataccatgcattgtaccatgcttgactgagagacagctgaacaatgagctgctgagatttcttgcgaagacacaggttgattccgatatcgaaattcgaacatggactgtcatcatcataagcaaaatttcgacaatactatcgacttctgttggtaatcgttcgaatatcttggctacagcatttactaagtctttgaaagatccccaagtgaaaccgagattggccgcactttatgggttagagaaatcaatcgagttgtttgatgtgaataccatcgccaacaaaatcttaacggttattgctcctggtttgttggataaaagccccttggtaagagataaagcaaaaatgttatttgaaatgtatctgagcaaactggagaaagaggccaactga

SEQ ID NO: 5260 - DNA, 2832 bp, Saccharomyces pastorianus
atggatgggcccaaacaggaactaattgggaacaacactggacattcgagcaatacacgtctgacagatccggatactgaaaaactactagccatgcctcctccatctgcgcagtttctgagcagttcgcaaacgggacaaaatcaaaatcaaaaccacgcattaggccatgctgaggagcagcgccaggaccatggacagggaccgacccctgctcagaaccaaggccaacagcaacaatcacacctacaacagcaacaaccaagaaacgagtctatttcatattacacgaatttcaaccagccacgatactctacagatgcgtcgattacttcatttttgaacatatctgacaacgtagcaggtaccggagcacccagtactggtggcacattttcgaatcttccacggctttctacctccagtactcatcaagcgccagacctgtctcagatcggacgcggcttttccattgtaaacaacctttttccacaacaacttcagcagcaacatctacaacaacaattgcaacaacaacaacaacaacaacaaccacagcagcaacctccattcaaaacaccttctttttctacgggattaacgggaaattcttcccaattccagtttctacaaaaaagtgatggttcttctcaaccaacttccaagagaaactctgtttatcttggacccaatgatggagctgattttgaattttttaacatgcagcaatcacaacaatcgcagtttcagcctagtagtaggagagaatcaaatgcaatgagacccccacttttaataccaactactaacgctaaaattcaatcgagcggctctaatgctaacggaaatataaacgtaaacgctgattacgattcatttttcaacggcaatacaaacagcaatagcagcaatcccaaccagaatccatattttctaagttcaagaaataattccatgaagtttaatccagaagattttgatttccagttcaaaaggcggaattcttcagttagaggtactttagatcatggtaaccagaacgccttcatacctgagtcaagactaaactctcttactgttagcagcaaacccagcaatggtccccctgccaatagtgatactattatcgataacacaaacgacagcaaaagcaacgaaatcactaatgaagatggaaataataacaataataccaacatgaagcacgatgataatgataatgatgacagtagtattaatcctacatccagtactaatatcccaaaccaagatgaccacaaccttgtttccgccaataatgcaagcaatagcagaaaagacttaaaggaaatagaacagagacttcgaaaacatttaaacgatgaggatagttactcgagtacgatagcaagaccattagataaaaattctgaaatagttgaaaataatgaaagattggaccaacatgtggatgaatccagtatgcaaacggacgtgaacaaaaaaatgaaaaaagatgagtctgccgtattcattaagaatgaggtgccccgcaacgattcatcaataacaaaagggaacccagtatcggacgaaagcgcatcaataattcacttttctggcaaagaacctccaatgactgacatggcctcaataagtgatgaaccggctaacctgataggggccacaaaagtcgatcaattaatgttaatcattcaagcaaggaagaaaggatttactgaaaaggtgaacactacacaagatggcgacttattgttcaaccagacaatggacatattaccacccaaaaatgaactagtggggggtgtagaaaaaccaaaaggggtacacaatacacggactattaagaaacacgaatgtccttattgccatcgacttttctcacaagcaacacatttggaggttcacgtacgttctcatatagggtacaaaccattcgcttgtgattattgtggtaagcgttttacccaaggcggaaatttaagaacacatgagcgattgcatactggtgagaagccatattcatgtgatatttgtgataaaaagttttcgagaaaagggaacttagctgcgcatttagttactcatcaaaaattgaaaccttttgtttgcaagttagaaaactgtgataagaccttcactcaattaggtaatatgaaagctcatcaaaatagatttcataaagaaactttgaatgctttaacagccaaattagctgatatgaatccatccgaaaatattccacatgaggaacgacaactattggaatactttgcatccatttataaaaattcaaacagaggaatcaaaggtaggggaaaaggtgtaggaacgaaaaaatcaacaatctcctcaccagaaagccattctgcaagcataattctgagtgctaatacgaatgctaataatgctattactgctgagagcactgataatattaataacccagaaggcaacatcgagagcaacaataacaattcgggctcgaataccttaatttcacctactcaaaaagatatgggaaccctacaatcccaatatgttcacagcaacttcaacaattctatgaacagctcaaacccctctaatcaacccataataaactacaactacactacactacctcattctagattaggaagtagcagctccagcaatactaataataacaacaacaacaatcttcctgttgcatcggtaggtcctgctccaggtgttttattggcgccagccgccaataatgactttggttttaacttggaacagtctactgataacgggagatctcaacaagaacaagtcagatttaagaacatcaactacaagagctaa

SEQ ID NO: 5261 - DNA, 276 bp, Saccharomyces pastorianus
atggctttacaaccaaatgaaattggagaaattgttcaaggtttcgacaacccagccggtttacaaagcaatggtttgcatatccaagggcaaaagtttatgttgctgagagcagatgatagaagtatctatggtagacatgatgccgaaggtgttatttgtgtaagaacaaagcaaaccgttttaatcgcacattatccaccaactgtacaagccggtgaagccactaagatcgttgaacaattggctgattacttgatcggtgttcaatactga

SEQ ID NO: 5262 - DNA, 525 bp, Saccharomyces pastorianus
atgttcattccaacatccaccagttcgaaaatacatcagaagttgagtaaagctgttgtaagaaagaaccaaaggcaaaaccaaggtcctggtacatatattatcaatatggatccggaagtagaaaaaagagaactggaaaagaaacaaagccaaatcctaagagacagaaggaaaagacaactcaaagaaaaagagaaacaagaatctccagatgttggttttgaaactgcattcagaaaacagagctcccctactgcatatggagccaccagaagaaacgagtacgaagaagacgactttttagtcgacgatgatgaagaagagggtgaatttgatgacgatgatgacaacgaggaggaagaagaagaagaagaagaagtcgacgaagacaatgcggcacgcttaagaaacttaaaaagagaaggtgcggcaatgtatagagaggaaggaggagatgacgaaagtaacgagagcaagagaagaagggttgccgtcatcgaggacgatgaagatgaggactag

SEQ ID NO: 5263 - DNA, 717 bp, Saccharomyces pastorianus
atgtcatctgaaactccggtagatcaatcgcagaatgagcaggctgttggcgacttaggagtaactcctaataatacaattgaagaaaaaccagatgtcacacaagataatagcgatgaaaaaaaaaacaaccaagacgaagaggaagaagaagaggaagaggcggaattagatgacctgtttggagatgatgatgatgatgatgatgatgatgatgttgataatgacgggaaggggtcagagaatgaaaatagtaataatgataaaagtgggaatagcgatgaggaaagtgccaaccatagagaacatcacagagaaagtctcggattggacgatgatgaagcagaagaacaagctatgtatacacgtaagttttatggtgaagatgccaatgacttttctgaccaagatgaggccgcacatactttcaaagaagagaatgtagaacttgttagacatattattccaagtaaggctaatgtaaatgaaacggtgtctcataatgaaattttttatgccagaattccgaactttctaacgattgatccagttccgtttgaccctccaagctttgaggccagcgttaacgaaagagccaataattcaacctctaaggaagaccaactggatgaccgtcttatcgatgaaaacacagttcgatggagatattcccgtgacattgaccaacacgtcttcacagaatcgaatacacaaatc

SEQ ID NO: 5264 - DNA, 738 bp, Saccharomyces pastorianus
atggaagagtacggggatgtcaaacgtacagtcgccgtgacgacttttcctactattttgcaagtgcaaattcaaaaagtttattacgatcgtgagaggttcatgccatttaaatctattgagcccttgccgttcaaggaagttatttacatggacagatacgctgatacagataaccttactttgttagccaaaaaagaagaaacagaacaattaaagcaaaaattgaatgatatgaaaaacagacaaagggaactgttgaatcgtgatggatcaggattaacaagaaaggatgcattcttagaaaccgttaaattattagaatcaagtattgtcgaaaacacggttttgaataccgaagataagaaaaacgtgataaagacgttgaaaaacaaggttactaatattgacaatgaattgatgagtttatacaatgatataaacagtttggaggataaaataagccatcaatttgacgatttcaaggaatacggatactcgctattttccgttttcattcatcgaggcgaggccagttatggtcattactggatatatattaaggaccgaaaccagaacggtgtttggagaaaatacaatgacgaaaccatcagtgaagttccagaagaggaagtttttaatttcaacgaaggcaataccgcgactccttatttcctggtatatgtcaagcaaggacaagaagccgacattgagcctttgaaaagaatcttggagtag

SEQ ID NO: 5265 - DNA, 3045 bp, Saccharomyces pastorianus
atgccaaaagaagataatgagcttcaaaatgcaatcgaggatgatcaaaatcaactatccaattacgaaaaagaccatactgttgacaaagctaatactatagatgactgtccactatatgaaacaagcacaagtcaacagtcaactagtgtggacgttgacgatgggaagcatttactgtatctaaatattgccacctatttacctttgaagacttccgacaggcttttggacgatatactttgtgataccgcttttcttaattcgacagatccacgtgtaatagaaatgggtctgaaaacctccggtattttaaagaagtctatgctttcctactcgaactttagaagcggaatccgtccaaatgcattaggctctttaactgatcaagtggtccttcaaaccaaaactgaatacgattctatctcgtgcccacaatacaacaagatacaagtcttacaggccgtcattttgaatccttcattgaccgaacagcaaattgcaggttttgatgatattgttaaaattcccatttatcatctgaaagtcactgtgaagattcgtcaagaattggaacggttgaaaaagcacgtgggtgttactcaatttcatgcactcgaccgtttgcatgaacatgacttagtagatttgccaacttttgattcttctgacccaaatttaaaggattatggtatctatgtttccgatgacacgaataaactgatcttagttgaaatcttcaacccagaatttaattcacctgaagaacgcgacagctttacaactgccgccattcaaaaaagatacaatgatttgtgtctagaaaacgaatcattgaacgagaatgaaataccatcccagcctgattgcttctacacactctttaaaatattcaaaggacctctggcaaggagaagtactgctgaacctataaagactattgactcaggaaatttagttttaaacacacacttgaatcctgagtggttaacatcgaaatatggatttcaagccagctcagaaattgatgaagaaacaaacgaatcatttactgaatatgttcctcctgatatggtggattatgtaggtgattggaaaatcaggaaaattcgtgaatcatatgtgagaaagtgtttacaacttatattctggggtcaattatccgcttcgttattggcgccgaattcccttttgaaaaacaccaaaagtgtcaagggattatcttctatacaaacttctttttctatattaccgtggtttcaattgttaggagaatcaagagcaagaattttactaaattttaacgaacaggctcattcgcccctggacgcagaaccacattttattaatctttccgtttcacattattatactgatagagacataatcagaaactatgaagcgttatcctctttagatcctgagaacattggattatattttgacgcattgacttatattgcaaataggaagggcgcctatcaaataattgcttattgtggaaaacaagacattattggtcaggaagctttggagaacgctttaatggttttcaaaattgacccaaaggagtacaatatcgccgagttaaatgaagcgactttactgtctatatataaatttgaaacttctaacaagaacaaagcaacttccaatcatctaacaaatttgaaaaatgctcttagactgctggcaaaatatactaaatccaacaaattaaagttttacgtcgaccatgagccatacagagccttatctcaagcatacgacacacttgcaattgatgaatcagttgatgaagatattataaaaactgcatattcaattaagattaatgattcaccaggactgaagttggattgcgacagagcgctttacacaattgcgatcagtaaaaggagcctcgacttattcaattttttaacagatgaatgtccacaatttttaaattattatggtccagaaaaacttgattatcaagaggcattaaagcttttgcaagtcaacgaaaatgcttctgacgaaacaatactgaaaatttttaaagggaagtggtttgacgaaaatgtttatgagccggaccaatttcttattttgaaggcagcgttgactaaaatcagtatagaaagaaattcaaatctaatcaccaatttcctactaactggtagagtagatccaaattctttgcctccagaaaactggccaacgggtattaataacattggaaatacctgttatttaaattctttgctacaatactatttctctattgcgcccctaagaagttatatattgaattaccaaaaaacaataaacaattttaatgaccatctttctaatagtggccatgttcgaagaattggtggaagggaaatcagtaaaagcgaagtagaaagatctattcaattcatacatcaacttcgcaatcttttctatgcaatggtgcattcacagcaaagatgcgtaactccgtcaaaagaactggcctatctagcctttgccccaagtaatgtcgaagtagagtttgaagtggaagataaaaaagaaagcaaaggcaccacaaatttgaaagaggaagaaccgcgaggtgcaaacgttataaccgaacaaaatccgaatttaattgatttggaagtggatgaaaaccttaacggtgatgtcgaaaaacatcagaacaatgatgaaaaagccgaatcgaatgatgatgaaatagttatgagcgacgatgccccagatttggcttcacctacgcgtgtggcaaaaattagctcagatcaattggagaatgctttggagatgggtagacaacaagacgttacagaatgtatagggaatgtgttgtttcaaatagaaagtggttcagagcctattagatatgatgaagacaatgagcaatatgacttaatcaagcagctattttatggtactaccaaacaatgtattgttccgttatctgcaacagataaagtccgtacaaaagttgaaaggttcctctcgttattggtaaatattggtgatcatcctaaggatatttatgacgcatag

SEQ ID NO: 5266 - DNA, 702 bp, Saccharomyces pastorianus
atgctgtctcgaatttcagtcttcaggccagctagccggagtttctctgtcctgtcatcattaatgataacagaacccactttaacaaagcttgccgaaaaaccagaacatgctgtcaagtccgagaacttatccgacgcacaagctgccttcttggatcgtgttattcgtgttgaccaagccggtgagttgggtgcagactacatctacgctggccagtacttcgtattggctcatagatttcctcatttgaaacctgtgttaaagcacatgtgggaccaagaggtacatcatcataacacgttcaataacttgcagctaaaaaggagagttaggccttccttattaacgccattttggaaagtaggagcctttgcaatgggggctggtaccgcattgatttctccagaagcagcgatggcgtgtactgaggctgttgaaacggtcattggaggccactacaacggccagttgcgaaacctggccaaccaattcgatctggaaagaaccgacggaacaaagggtccgagtgaggaagtccagtccttgacttctaccatccgacaattccgggacgatgaattagagcatttggatacagctatcaagcataattcttacatggcaattccctatacagttatcactaagggtataaaaactatttgtagagttgccatctggagtgctgagagaatttaa

SEQ ID NO: 5267 - DNA, 2739 bp, Saccharomyces pastorianus
atgttgcatagagaaataaataactctagtagcagctttggggcagaaagtgaagcattcccacttgaggtgccgaacgtaagctatataatatccgcagaatttcataataagctgggccctatagtgaaatatcagtatccaaaaagtattccaggatttaggcagtcattgtatagagaatctaatggctatacgtcggtgtctacaaacttggcaagtcttatgatcccgagcagtatagaacaaaaccctggtaagccagaccttacaacatttactctttactataacaggtctactcaatgttaccaactttttccggtaccgaaagacacccgtttgaacccacatcaacgtgaccagtcacatagtagaagttattacgatgttgaaaataattatgatgagaagaacaaaagacacaccattgttatagaagacaatacattagaatcccaaaagtcctataacaaccaggaaatgataaacaacgacactttgttcttcattaatgtggccaacgctgttctggatacctcaaacgatcgaggagctgtcattaaatcgattgccatcggcacaccactgaaaaccttcttcgcatttaaaagcattctggtatctatactagatctgtacatgacagcatcgtcccaagctgtttctttaggcttactcatcgattgtttcgaaatgctgaacagtatcgatctctctttaattaataagatacactccaaagcaagtacgcaagatgtgttacattccatttgtgacgaatctgtcatagctagaatattcatggatcttgactccaccctaaagagactgtttcacataggtggatccaacaccaacgacagatacggtaacatcataacatttgatgaccagttcgttcaatatcattttacgaagtttaagcccacgacactcccgttatatgtgttaaaaattccgttacagttcaacatggtgaagagcaatcctatctatattgagaatgattaccatgcagtagttttaagatttctgaacaaattcatcccctatcttcttaaagccggctcaaaatctaacaagtggaagttagttatcaactcaactaaactgaataaagaagatctttgtgctttcattctatcattggctaatataaccgctacttatgctggtgactcgcagccatatttcaaaggaagcgcaatgttggtatttcctttcatggatatatcgcttgttgatggcttacgagcgtatttaacgtcaaatatcgattttcttggatcttttgcaataattgggaccgcgaatccgattttccggtaccaaatagatatttgggactattactacgatatggatgcagacatattttatgaaagtggtagaactggaaactacaaaccaactccgagggtagaacagaagaatggatccaaaggtttaaaaaaaatgtttaacaagcctcctcattcttcacctcactctttacctcattcttcacctcattcttcacctcattcttcacctcatgcagttgctcaaaatcaagcgaacttgggccaaaagtttatttctcttctcatcggtgaatatcatgatagtgatactatgatgagtgtattgagaaggctgaatgttcttcaactagaaagtcttcttaatgctaccaaaaagcgagaatcatcgtttgatatagcactgaaagatgaatatatcgtgacctataaagactttttcctttttccggagtttttcgactattttacattgcattgtattgaattattatctaccttggatagctgtctcctcaacttgggaagcacacgccaattatttacaatagagcaaacttactcgcaatttagtcaaatattttctattgttaaagaattgtttcgtatggtgtccataaacaaaacaaatgttgagaagtttttgaatgcttgtttaaactattctccatctagaatattaccactagctgaactacagacagatactttttccaaatggagcttcgaaaaagaagtaaatcgaagatttaataatttcggtagccacatgggtaccgaaaatgacacgcatggcgttttgttttcttcgatagatctcttcacacatatttacagttttgatattttggcagttttcttaacatttactggcaaggacgatgagcgggaactgctaaatacgaaatccatggccaaaaagaggacatctttttctctgatagctcaatcgtcttcgttaaaacagcttttacaaatgactacaagatccaacgcaaaaaattcgaggactaatgggcaggaattcggaaatctaaaggagtcttgttatacaaatgcatcgtcaattgtttcccctaaactgaaggcttcccctctactagaacgaacagcaacaaaaatcagttataacattacgcttttactttttaaactagaatgtcatcctgtaggtaaagttctattaaagaaatatcttcacaaacaattccgtgaagcttatgaagaattgaaaacacggtatgttggtgcaaataaggattctggcagtggtgaccgaaggaatgcttcttctgttttgttatcatcaccatccaccagagatttaatttcgttatcttctaatagaactggaatgctgaataatttgaaggaaatgagtgaccagagagaatctatggatattgaaacaggatcttttcggaacaattattga

SEQ ID NO: 5268 - DNA, 828 bp, Saccharomyces pastorianus
atgatgcacaatccctttgcctcgaagaacggcaacaaaccaggcaacaccaagagaaccaatagcgttcttatggaccccttgacacctgcggccagtgtcggtgtccaaggtccactgaactaccccattatgaacgtcaatccatcgatccgtgactataacaagtgtctccctcaaaatacggctctaagtcctatatatcctataaatgagcccacaactaggttgtattctcaaccaaaaatgagaactctcgggtctacaagctctttacccaacgataggagaaacagccccttgaaattaacaccaagatcctcgttgaatgaagatagtttatacatcaagcctagaaattcacttaaatcaagcatttcgggcacctcaatttcctcctccttcaccctggtttccaacaacccggctcctattcgctactctcaacaggggctgcttcgttcattgaataaagcagccaattgcgctccggattcagcaactccattggacccctctgtcttgacgggtcctactcctaaaaacatggacaatctacccattgtttcttcaaatttaataaactctccaatgaacgtcggacacggcacaagcatatcgaacccgcagcctacatcacatatggaactaccgcaaccatcgttgcccacaacaaacgtcactaaaagcaatgacgagactgatactatcagaagatctgggagtggtgtttattccttattaaataacgatgatagcagttcagccaatgctaatcctaaaggtaaaggggaaaccacaccagtatctaagaaggtcaggttgtga

SEQ ID NO: 5269 - DNA, 1920 bp, Saccharomyces pastorianus
atgaagagtttgcccaattcagaacctagcacggctccacttaacgacgaaatagatctaaacgacccaaccgcaactatcgtgatacatccaggctccaattctataaaaattggttttcctaaagatgaacatccaatagtggtcccaaattgtgtagcagtgcctaagaaatggttgaatatcgataatgaccagaatgaaggaaatatgttcttacaaagaaagcagtcagaagagttcgagagcataaagtcagaaatggaaaagaattttagagaacgtatgagatactacaaaagaaaagtaccgggaaacgctcatgaacaagtagtttctttcaatgagaattctaaacctgaagtagtttcagtaaagaatgacccctctccgatagaatggattttcgatgattcaaaactatactatggttcagatgcactaagatgcgtcgacgaaaagttcgttattagaaagcctttcaaaggcggcagctttaacatcgactcaccgtattataaatcgttggcagagttaatctcggacgtaattaaacttttggaatacgctcttgattcagaaactctaaatgtaaaacctaccaaatttaaccaatacaaggtggtattagtgataccagatgtgtttaagaaaagtcatgttgaaacctttatcagagttctactgactgaattacaattccaggcagtcgccattattcaagaatcgttagccacctgctatggcgccgggataagtacttccacatgtgtggtgaatataggtgccactgaaacaaggattgcttgcgttgacgaagggacagttttagagaacagtgcagttactttagattacggtggagatgacatcacaaggctcttcgcccttttattactgcagagcgattttccgttacaagattggaaaatcaactccgaacacggctggcttcttgctgaacagttgaagaaaaattttactactttccaagacgcagatatagctgtgcagttatacaacttcatcaaccgctctccgaatcagcccacggaaaaatacgaattcaaattatttgatgaagttatgctggctccattagcactattctttccacagatttttaagttgatacgtgcttcatctgacaaaaactccagcttagagtttcaattacccgaatcacgtgatcttttcactaatgaactgaacgattggaactccttgtcacaatacgaaagcaaagtgggagacctgtattgtaatttgaatgacgatcttaagactttaaataaaacattggatgctcataccatgattgaccaacttcaagataagcctgaaaaatacgggagcacttccaaagaaaatttaacacccttagaaaaggctatcattcaaagtataacaaatgcttctgtaacagcagatgtcacaagaatgagttccttttattcaaacattcttattgttggtggtagttccaaaattccagctttggattttattctaactgatagaattaatatttggagaccttctttgttgagttccacatcattcccacaattttacaaaaaattgaccaaggaaatcaaagatttggaaagtcattttgtcagtgcacctgaaaagacagaagaagagaacaaacaaatcctacaactacaaattaatgaaaaagtgttgacagaactcgatgaacaacatcaaattattgagcatcaaaacggcaatgaacatcttttcccaatcagtattattccgcccccacgtgatatgaaccctgccttaataatttggaaaggtgctagtgttttggcgcaaataaaacttgtcgaagaattgtttattacaaataatgattgggatgtccatgggagcagaatcttgcagtataaatgcatcttcacttattaa

SEQ ID NO: 5270 - DNA, 498 bp, Saccharomyces pastorianus
atgcctagaagttgggcagtacgcaatgggctgctggccgacagcctcagaaggacagcagctggcgcgcgaaacatgtcacaggaagaagcagaatccagtatggtctacgaagagcccattgatattccattagaggacgatgacgaggacgaaatggaggaagaggaaaacattgtgcgtttgagcagccaggcggaccaggacaatggtgataatgactccgatgatagcgtcgataacggaatcggatccgagacgcccagaagtgtcacgggtctttcggctgatccagagacgctgcagaagaggaagaagaagaggaagaagaggaagaggaggaggaggaggatgataacgatggtgacaatgacaatgacgatgagaatgacaacgacgatgagaatgacaacgacaatgatggagaaagtcccaaggataagagggcacaacctactgctcaagccagtaagcggtacaaaaaatatcccaagttag

SEQ ID NO: 5271 - DNA, 1008 bp, Saccharomyces pastorianus
atgttatttatttcctcgaaaagtgacaaaaagtcgaataatataggtatgagtgaagagtgtattgaaaatcctgagcgaattcaaattgatgctgactcaatcaagcaccaaaatcgagtaaatttgaaagaattgataaatccaaacaagggcgacaattctgctttgcttatactgaatcaaaagattgatattcctaaagaactgttttacaagatctggaaacttcatgacctgaaaatatgtgcagatggcgcggcgaatagattatatgattatgtaaaggacgatgaatccataaggaccaaatatctccctgattatatcattggtgatctggactcactatcagaaaaggttttcaactactataaggaaaaaaatgttgttataattagacaaaccacacagtattcaactgattttactaaatgtgtaaatttaatttctctacatttcaattcaccaaagttccattccttgatatccaacaagaacgctcttcagtcaaatcatggaattgagttagaagagggtatccatactttatacaatagtatgaccaaatccttagttttttcgcaagtgactccaataagcttattggccctaggaggtattggtggtagatttgatcagacgatccactcaataacgcaattatacaccttatccaaagaggcgagttattttaagctgtgttacataactgtaactgacttaattttcttaatcaacaaaaatggaactttaattaagtacgacccccagtttagaaattcttgtataggaaattgtggattgttacctattggagaagctactgtgattaatgaaactcgaggtttaaaatgggatgttaagaattggcccactagcgtggtcaatggaagagtgagcagtagcaatagatttgtcggaaaggaatgttgttacattgacactaaagatgacataattttgaatatagagatatttgttgataaattaataaactttttgtga

SEQ ID NO: 5272 - DNA, 108 bp, Saccharomyces pastorianus
atgctttcagtattatttattcctataattctgcttttgctgctgtcttccccgttaacactcactatggtatccttctttaaagcagtaggtgcaaccatcttgtag

SEQ ID NO: 5273 - DNA, 1866 bp, Saccharomyces pastorianus
atgttagccacacattcacagacccctataataaggcggtccttgctttcaattacaagtcatctcgtaagacatcatattcgcgcttacaccgtcgttaaccatggaaatttccagtctttggtaccacctcgtaagggttcgttgcccgtgaggtgtttgatggctcaacggttcatgcggtcatttccgacaaatgataagttcatggccaaggcttccaatatcgaaaccattctgctaaggaaaaataatgagcgagagtttaagcaaacacttttggcagatgccaggaattttcaacagaggttcaagatcaacttaaagtggatccttataaaaaacaacaggccgttttcccttaacgaaataagcattatcgtatcgtggctgcttttatcgcaggtgttgtggctcatattgagcactacaacttttatttcgttctatctattcgttatgaactccgcgttcagtcaggaatatatccatgaaaaaaaaatttatgagtcgctgttgaaatttctgttgaagggccataaccgctccgatggaggtttgcagattagtttttcagatgacaagccgtcaactgttgctttgtctccagattgggagtcaaactcaataacaataaaaaagctaaacgttaaggatgaaggcctggatatggatttaaagtttcatcacatcaacttgactgtttctctgaaaaactggctattcggtaagggtatgatatcgaatgcttccatctacggtattagagggaccttgaatctgtcaaattttattaacctaataaactcttttcaggacgatcgtaagactgaaaatttcttaaaatcttcaaacaatattgaaataacggactcagagattcttttaaaacaatctcgtagtagcccagagacgccaatgttaaaatttgccatttataatctatctttaccacgattaaggttaaaccatttcatctcagatgttttgagcgccaagacattctctggttcagtaaacaattctcttttcaatttatttaagagacaacaaaagttaacagcagttattgaaaatagtaacaaaagtaagatggtaacatcaaaattcgattttactaataataatcacgaaaatgacgaaaaggtaactcaccaggatgatcctaactacataacgacgttaagattaaactttattaacgtcaatgacttgaaattcaacggtagcagtaaattcaactggttaaaagacgggcaagtggaaattttggccgatgtaatgctaacgaactccacctcccaactatcatcagaatccaaatatgctgtagtggatttaaaggtcacttgtaaggatctgaaaacaacttttcctcaagagccaccaatgttatcaacgggtgacagcattgtttcgctggatgaattgaaacctcttataatgtatatcaattcatatgaaggaatggttaatccaatattgaaagatttcgccgaaaacgaactgctgaaaaattccatagtctggagctctcccaatgtctcgatcaataggcaaagaaaatcatatcctttaactacaaaggtaacttctaattccaccaaagaaatcattaagttccataatcagcccaattcggatgccaatgaaatagtgttgcgctgtaagatggttaaaaacctttccgatttgcaactggttaatatcaatcaaatattagaccaaatcaccatggaattatatgttgatttgaccaaaatagtcgatgattgggaatttagaaacaaaaacgactggatgaaacaatggggtaccacctttgcatcacaactactgttatttggatttggcgctatggtttaa

SEQ ID NO: 5274 - DNA, 2091 bp, Saccharomyces pastorianus
atgctcttacaacaaaaattaatgcctagcttaatcatggatcagcccttggatgatgaatatgatgacgatcttttagaaggtatgacacgtttatttgtggaagctggtgaagcttggtccgttttcatttctaaaaatcctgaattttttaaaccaatggtttcagtgttattgatgttaacttgcaaaaatggagacttagatattgtttcttatacatttccgttttggtttaacttcaaacaaaacttggttttgccaagatatcaaaattctaaagaggtttactccgacatttttgtcaaattgatcaatggtataatcactcatttacaatatccatcaggccaattctcatctaaggaggaggaagataagtttaaagattttaggtatcatatgggtgacgttttgaaagactgtactgcagtagtagggacctctgaggccttatcacaaccactaataagaattaagtcagccataacgaacaacaacaactggcaagtcatggaagctccattattctccctgagaacgatggccaaggaagtgtctctaactgaaagcaccctgctaccagaaattatcaaaattatttgcagcttgccggagcaacccaagatcagatacgcgtcaacactggttcttggtagatatactgagtggacagccaagcatcctgaactattagagatccagttacagtatatttttagtggtttccaactacatgagggttcgacggatatgcaaagtataattaccgcatcatcgcatgcattaatgtttttctgttcagattgttcaaaattattaaccggatacatcgatcagttgattaacttttttctcaatgtacagaattcggtcgacatcgaatcgcaatttgaattatgccaaggcctgagtgcagtgataaacaatcaaccaacaactgaagtttctacgatatttcaaaaactattagacgataatctgaaccaaattgaaactttggttcctcaatggaaggcaaattcgatgttggtcgctccacagattgctgataagattgatttgctctatgcactatttgaagaattaaaaccacgatacaattatccgcagcagggatcggaacccttattacctcaaatggaattcatctggaatgcattaagaaccttattggttgacgcaggtgcaatgacagatagcattattgtggaaagagttgctaaactgctgcgtagagtcttcgaaaaattccatgtattttgtgagccactattaccatctgtggcagaatttttaactcagggctattcaaccactggattcggttcatatttatggtgctcaggttctcttattgttatattcggggatgatgaatcattcccaatatctcctgatttgaaaaatgcaatttggaagtttgctttatctcaatgcgaaacctttatcctaaatttcaatgagttcaacaagacacaattgaatgattatcatgaggcaatcattgattttttctcattgatttcggatttaattatgttctaccccggcgagtttttaaattctacagaattgctaaccccagtattgaacgtttccctggaatgcgttagcaaattggacaattatgatgcgtatatatgtattttgcgttgcttagacgatatcatatcgtggggattcaatactccaccaatctccaccgtatccattgaagttgttccagctgaatggagaaaacaagttattaacgaagtggtaataccacatggtaatcggttgatcgtagtactgttcataggactggtaaccacttttgaaaataccgcccattcagacgccattagctgtattgtaaagtgtttgagaatattaacggaggcgaacaacaacgattccacaatatgcatcgaatggatcttcaaagtggtggagcaactgggtcaggtgaccgtcaaggaaagagataatttggtacaggctgtggtcgaggggttgaactcgagagattacaggaaggttagagaggggatcagaacttttgttggatggtatttaagaaagaacgtcaattcaagattcgaatga

SEQ ID NO: 5275 - DNA, 786 bp, Saccharomyces pastorianus
atggacaacttccaagtacctgatatccaaaccgctttgcaatgcatctcttccaatgcatcacaagacgataaaaataaggcgctccaatttctagaacagttccaacgatcctttactgcatggtcagtttgtaacgaagtcttaactaagccagatcccacgaactcacttttggagctaaatatttttgctgcccaaactttaagaaataaagtcacgtacgatctatcacaacttgaaaataatttgttacaatttaaagactctctgttaaacatattagtatctcataaccaaaaattaattataacgcaactgaatgttgcacttgcacgtttagccatccaatttctagaatggcagaacccaattttcgagatcatttcattgctaaattcatcaccatccatattgttaaactttctaagaattttacctgaagaaacgttggacatcgcctccactccacttacagaagtagaattcaattccagaatccatgaattaatcgatcccatagccgaagacgtgttgaagtttctaatctcatgcatagaccaattacaaagtacaaactttaacactaactcatctccgatttcattagagcagattttacattgtttgaattcctggtcatatgaattcgccatcgaacagctgttaaccgttcagccattggtatccctagtgttcgagaccatttccaacggtaatgaaaatgacatggaggcatttgatgctgctattgattgtttatgcgttattttaagagaaagctga

SEQ ID NO: 5276 - DNA, 573 bp, Saccharomyces pastorianus
atgatcgaaaaggcaggtagtcatggtatagtacgttctgagactgcacgtgaaggaagggagaaccaagtttattctgccattactggtgcaagattggttgctggctgcatctgtttgactcccgacaagaaggaagttcttatgatcacttcttctgcacataagaagagatggattgtgcctaaaggaggtgttgaaaaagatgaacctgattatgaaacgacggcacaaagagaaacttgggaagaagctggttgcgtgggtaaaattgttgccaacttgggtacggtggaagatatgagacctccaaaggattggaacaaagatataaagcaatttgagaccgcaagagatgatcctgaagtagcaaaacatccacctagaaccgagtttcatttttacgagttggagattgaaaagctcattgaaaagttccctgaatgtcataaaagacacagacaactatactcttatgcggaagccaaaaaacacttgataaacgcaaaaagacccgaattgctagaagccctggataggtcctctattattaaggatgttagtgataagtag

SEQ ID NO: 5277 - DNA, 2514 bp, Saccharomyces pastorianus
atgcttattttattttttgactttcctttgactttttttctccattgttaccttaacgaagagggacaaaacgaacaaacaaaatactattgcaaaaggagtgttcaattgttgtattattattggtttcatctcaaaagagcaaatatcattaactggcttaaaaatcagcacttctctatgacaaccgatagatctgctattcaattaattgatgaagagaaagcttttcatcagagcgcattacaatattttcaacaatgtattggaaatcgtgatgtcggtctagattatcatgttatctctgtgttcggctcccagtcaagtggtaaatctactctgctcaatgtccttttcaataccaatttcgatactatggatgcgcaagtgaaaagacaacaaactaccaaaggtatttggctggctcatacagaagaggttaatacgactattgaagttagtagcgatcgtccagatattttcgtactcgacgtagaaggttccgatggttcagaaagaggtgaagatcaggatttcgaaaggaaagccgctttatttgccattgcagtatctgaagttcttatagttaatatgtgggaacaacaaatcgggctgtatcaaggtaacaatatggcgttattgaaaaccgtttttgaagtcaatctatctttatttggcaagaatgacaacaatcacaaagtactactactctttgtcattagagatcatgtaggagttacaccgctttcaagtttaagcgattcagttacaagggagctggaaaaaatatggtccgaactaagcaagcctgctggttgcgaagactcaactctgtacgatttttttgacttacagttcattgggttggctcataagctgctacaagaagacaaatttattcaagatgttaagaaattaggtgattcatttgtaatgaaagggaccgacagttattatttcaaacctcaatatcatcacagattaccattagatggttggactatgtatgctgaaaattgctgggaccaaattgagcacaacaaagacttggatctcccaactcaacaaattttggttgcaagatttaaaacagaagagattgctagcgaagccctagaagaatttatttcaaaatatgatgaatccatcgcgcccttgaagggtagtctggggcctttaacctcgcaattagtagcattaaaagaagagtgcttaagcaaatacgatgaacaggcatcacgctatgctaaaaatgtttatatggagaaaagagaaagcttgaatggagaactaaacacacacatttcaggcacaataaatgagtttttagagacactaatggaaaaattatgggataatttaaggttggagatatcttccagagacaaagcatccacttcctttgtcgatagtttggctacaggcaggaccaaagtcgaaagtgactttaatgaatcagtcggatccttcaaaaagttggagttattatcatcagataaagaaatcatctccaaattttctaatgaattcgaagaaaaaatcaagcagttgcgtgacgccgaattgaaagctaaaattaatggtatcaagaaaaatctggttccagaactaaaggatcatgtaattcatttactttcccatccatccaaaaatgtttgggatgatataatggacgattttgaatccaccattcaaagtaacctttccccatatgagatctccaaggctgaatatgattttaaggtcggactatcagatgatgaaaacgcagcagtttacaaaaatattaggattttggcatggaggactttagatacaacagtgcatgactatttaaagatagacacaattgttagtatattaagagacagatttgaagatgtattcagatatgacaccgaggggtctccaaaattatggaaagcagaagaagaaattgatggagcattcagaatcgcaaaagaacacgcgctggaagtctttgaagttctctcacttgctgtaacctctgacaacgttgagatcatgcctgatgtaccaattgctgaagaagatagtagcgagggcaacgaaatatatagggataacgagggtatatttcattctcgtcgctttgcacacatcttgacagaattgcaaaaggagaatgttttagaccaattccgcagacagattaacattactgttttagactccaaaagatcgataattactacaagaacacatattccaccatggatatacattttgttagttgtgttgggatggaatgaatttgtagcggttataagaaaccccttattcgtgactcttaccttggtctttggagcaacctttttcgtgattcataggtttggcttatgggggcctgttgtcaatgttgtccaaagcgctattggcgaaacaagaagtactatcaaggaaaaattgagaaaatttgtcactgaagaccacgaagtaaaagaatcttttgaaatgacggatttttctaaagacgaacaaaaaaaagaataa

SEQ ID NO: 5278 - DNA, 93 bp, Saccharomyces pastorianus
atgggcataatttcgacctgtaaaggttccaacggaaaccgttcgccatcgactgaaaacaaaccagacttgatttttggtatgattttgtaa

SEQ ID NO: 5279 - DNA, 1062 bp, Saccharomyces pastorianus
atggggtctcaagatttggctagtttagttggcagattcaagtacgttagggtcctggattcgaaccctcacacgaagaccatctcattattgggcagtatagacgggaaagatgccgtattaactgcagaaaagacacatttcatattcgatgaaacggtccgtagaccttctcaaagtggccgtagcacacctgttttctttcaccgtgaaatagacgagtattcctttttggatggtatcacggacttgaaagaactgacttcaaatgacatctactattgggggctgtctgttttgaagcaagacatcctacacaacccaaccgcaaaagtcaatttgatttggcccgcctcgcaattccacatcaagggctacgaccagcaggatttacatgtcgttagagaaactcccgaaatgtatgctaatatggttgttcctttcatccaggagatgtgtacgagcgaaaggatgaagtgggtcaacaatattctttacgagggcgctgaagatgatagagtcgtctacaaggaatacagcgagaggaataaagacgacggatttgtcatcttacccgatatgaagtgggatgggatcaacattgattcgctatacctggtcgctattgtgtacagagatgatatcaaatccttgagagacttgggtcccaagcatagggactggttgatcaaactgaataaaaagattaagacgattattcctcaacactatgattataatgtgaatccagacgaattaagagtttttgtccattaccagccctcctattaccacttccatgtccatatagtaaatataagacacccgggtgtgggcgaagagagaggcgcggggaaaacaatgttgctggaagacattatagaagcgttgggtttcttgggccctgatggttacatgaagaaaactcttacgtatgtcattggtgaaaaccatgaattatggaaaaagggcttcaaggaagaagttcaaaaacaattagagcatgatggcattgctactagccctgaaaagggttccggcttccacgctagtttgagttga

SEQ ID NO: 5280 - DNA, 162 bp, Saccharomyces pastorianus
atgcattttcacctcattttttacttgaatgaagataataagaacgcgtgcctgagcgatgactctttaaccgatcatcacggaaacaacaacccgtttataagtactttcagttcatcccctcccattctttcgcaagaagttgatcgatggcggctttaa

SEQ ID NO: 5281 - DNA, 552 bp, Saccharomyces pastorianus
atggaaatacgcagagagagacttcagcaaatagtcaagcttgattgcagcgaagacgatgaaatcagtgatctataccttcacatagtacaaatgtttgggagtatagagaaaaccacaacgggagatgttacgaaattgcagctactagacgacgttgaaatagagctaacgctaaacagcattgttatcgagtggacaaaggactcaatggtaagtgaaacggtcgccgatagtataataataatgactcttggattacaaacgaaaaagaagaacgtactgtctgaatcaaaactagaagagagagacagtaatgcttggaaagtccatgaattacaaaacttatttcaagaacaattcggagattgttttagtgccgaaacagggcaggaagaaggtgtagggaatggtagtgtgaccataggaaagagcaaagctatagtcgacttctctaccatgaagctgatcgattgcaattcgaatccattaagagggagagtggagagtatactcagcattgggcaaaaactaacaaccccattgtgctga

SEQ ID NO: 5282 - DNA, 1542 bp, Saccharomyces pastorianus
atgtacgaaggcgataataatgaatttggaaaggaggtgccggcttcatcaagtagcaatacttcaagatcgcataaaaaggttactgattcgactatagaagaactgaatagtatggttgaagaaatgatggttagtgaaccagagaacatcaaaacttccgtgaccgaaacagaaacgttcgaatcattgaccaaatttgaccaatataaaccagctagtataaccgatgatgatttgcaaagtagtcattcaagtgctattcattcactaaagttaagttcaaatacaaacgattcatatacagacagttccaaagtaaatactgataaaaagatggtagaccctagaaagatttcagaacaatccattgtcaatgacgattcatcttcctattattccccaaatattgatggcttgccaacttcaagaatgccaagtcagccaacatttttgaactctgatccacagaaaacattagcgaacgaccctcgcctggatatgttacaaggtaatggtggaaatctcatccaacaaagaatgccaaaatcatcacctgaaagcaacttatctccaattcatcagcatcgccatcagaacagtcgcccggataggataactccagtccaatcgccacatagcgcactaattccacctttgggagtgcaaaaaataccttatccgccagcaagatctccacagcttccttcaaacccagcgggatttagacagaatatgtcaaactccccggttggacacaaagagtctgcttcacctgtaataaatcaaccacctaatgcttaccaagaacaatataatcatcctcttcaattacaaaagaatcgtcattctccaaacgatattactccgcaagagttgaaatatagaaatcaacaaacaaaggatttgcctgttccacaacaaatggtgccggtgaaacagacgatgtcgtatgcaccttctaacataccaccacaactaccaagggaacagatgaactcgcctattcaaccgcaaatgaaaagctatcaacagcctgtaaatacatactacgtaggccgttcaccacaacatcaagtcataggaaatgtctatggaaacggccactcaggcattgcccaaatgccggatgaaaggtggggcaatccctcgcaacaaatggggcccaaaggtattcgccctaatcagtttcaacatccacaacaatacgctaataggtatgctccacaagcccaacccacgccaccagcagaatactacaatgggccacaacctaatatgcaagcacctcttatggtgccacaaataatttcacctcaccagccagcacattactcagctggcggaaacagacgcagttatccacacagcatgaatcaagctaattatgctgcacctgctcagcctacaggagctcctaacagtgagttttacttgccagaagctccccaaggaagcagactacatggtgggaatattaacaagagacaagagagaaaaaaattatatgataacatcagaagcggtaactttggcatataa

SEQ ID NO: 5283 - DNA, 1278 bp, Saccharomyces pastorianus
atgaacgatatggcaaagcctttacccactcctccgactccagaggtcaggaaaagtcgatcaaattcaccaaggaaagcccacaaaacaggctcaagcccaaacaagaacgttacgaatggaaaaaaaacagctgagttaaataggaaaagtacaaatgaacatgatgttgacgatgatgaatttgagtttttccacgaatttagccgggagaaagtgaaaggcgtcatacattcaattactgctgagctcaaagaaaagggtccagatgttgaatttttaatgataccatttagagaggaacaaacgaatgataaactgttgacattactgaatcagctattcccgttagggaacggacaacccgttaacgaaaggaagcaacaaaaaatcatttccagggctgatgtttggacactttttcaatgtttgaaatacatatggtgcagactaccgaattcagaagttataggctggaaatcgtatatggaattcaagtttagagaagaggagaagaaattcccacaaaaatcattcttagaaatcatgcctcaatgtttggcctctccgaatcatgcatctatcgtttatgattttttcgatctcattatttcaatttcatcgaattctagagtcaataaaatgagtgctaggaagatttcaaagatgtgcgcaatttgggcatttaacaaacaaaaaccaaaatctgatgttcaagattatgatttcgaatcaggtgccataagatcatctgcccccaacaactccatacaggatggactggaccagtggatccctggttcggatgccatattccatctgcttttagcatttttgaggagttttgttcctcaagatctcgaatcagcgaaactgccgcgcgcactaaagagtttactgtttaataaccagtatcctccgaaggaatcaacggcttatacgtcagaaacaatcttaaccattcccttagtgactttgaaaacagacacgttttccagaaagccctggcaattactggaacgctgcaatgatcttttagactttactgaccatgatgccttcgaagcaagagaagactatgctttactaaagtctctattcagaaaaaaaaacactgtagagggaattagtaggaaaatgtcacaagaatcaagaagactaatgaaagccatgtctactaaacactcaacatttcaagcaggttgggcccctagaaaatgcatagagaatatacctcacttaaaagaatgcattgaagttaagaggcttgatatcgat

SEQ ID NO: 5284 - DNA, 171 bp, Saccharomyces pastorianus
gcacctcaaccagacactgtggaaacagtcccaactccatatattcaaggaacttatcacacagtgattagtaaggacgtgctgggcataaacaaacataataagaacatacactcgtttgagcaaaaaatatctaaatggaatcccctaactatctacgaaagaaagtaa

SEQ ID NO: 5285 - DNA, 1215 bp, Saccharomyces pastorianus
atgtatcctggcaggggaaattacacatacaacaactctaatgataatggtgggtaccagcgccccatgggcgcccctcctaaccaacaatttgcacctccaccaggccctccgcctagggactacaacaggcccacgtatccacctccacaattccaacagcagcaggcacaatctcaattgaataacgggtacaacaatccaaatatggacgcttccaatatgtatggtccaccgcagaacatgtcgatgcctccaccgcaagcgcaaaccatacagggtgtagatcagcaatatcagtactcccaatgtaccgggcgcagaaaggcattgattatcggtatcaactacataggttcgagaaacgcgctgcgtggctgtatcaacgatgctcacaacatctttaattttttgactaatgggtacggttataatccagatgacattgtcatgttaacggacgatcaaaacgatatggtcagggtcccaaccagggcaaatatgctcagggccatgcagtggcttgttaagggtgcgcagcccaatgattctttgttcttccattattccggtcatggtggacagacggaagatttggatggagacgaagaagatggaatggatgatgttatatatccggtagactttgaatctcaagggcagatcatcgacgatgaaatgcatgatatcatggtaaagcctttacaacagggtgttagactaacagccttgtttgattcctgtcactcaggtacagttttggatctaccatacacttactctaccaagggggtcatcaaagaacccaatatctggaaggacgtcggccaagatgggctgcaagctgcgctttcgtatgctacgggaaacagggctgcgttaatgggatctttgggctccatattcaaaactgttaaaggtggcatgggcaataatgtcgatagagaacgtgtcaaacaaatcaaattctcacctgcggatattgttatgttgtcgggttctaaggataatcaaacttcagcagatgctgtggaagatggccagaacacaggcgcgatgtcgcatgcctttatcaaggtgatcactttacaaccacagcaatcgtatttgtctctgctacaaaatatgagaaaagaattagctgctaagtactctcaaaagccacaattgtcatcgtcacatcctattgatgttaatttgcaatttattatgtag

SEQ ID NO: 5286 - DNA, 141 bp, Saccharomyces pastorianus
atgccgttcaggtcatgtacgctgagcgccttccctgtcgtgtacttttctgcggtagcgtcagccaagtggctcgtgacgaacgtccagcctcccatttcttgcgacttggtgaagaactccagcggcttgtcaacgtag

SEQ ID NO: 5287 - DNA, 105 bp, Saccharomyces pastorianus
atgctatgtgaaggctatttacaggcgaggatattgtctattaacagtgcagtggccacactcacgttgagcgagtctacaatgcggtcgggatcccgctcgtga

SEQ ID NO: 5288 - DNA, 2184 bp, Saccharomyces pastorianus
atgccaatttttgggcaaagaattagatctacgaagccagcaataaaccgagtagagatgggtaaagtttctaaatcaacgaaaaagtttcaatcgaaacatttgaagcacaccctcgaccaaagaaagaaggaaaagaaccaaaagaagagaatccaaggtcgtcgtggtaataagactgatgaagaaaaagccaatgctgctggtactaaagaattccaacagttgaaaaaagcttctaaggaggaagttttcaaagacatgtctgtggaaaacttctttgaaaagggtattgaaattccaaaagagaataaaaaattgaaaaagaaacagactgccaaggatgaatctgatgaggactcatcttccgaggaagaagaggacatgggacaaagcatggcaaagctggctgaaaaggatccagagttttacaagtatttggaagaaaatgataaggatttgctggattttggaggaagcaatccattggatggaattaacggtgaagatgaagatgctgaagctggcaaaaaaatcactgaaacatctgaacaagttgagcatgtaaaagagaaggttgcgctttctttgaagttggttaaacaatggaaaacacaattacatgattcgccaaacttgaagctattgaggaacattgtcagtgctttcaaggtggctgtaaatttgaataaagaagaaaacattgaagactacaagtacgcaattaccgatgaaaaggcatttcacgaactgatgtttatggtcttgaaggatgtaccacacgcaattcagaaaatggccccatacaagattgttaaaggttcaagaactttaccaaatggaggtaccgtttcaaaaatgtcgtccattgtcaaatcgcatgctggttctctattgatcttattgaacgatattaccaataccgagactgctgctttaattttgcattctgtcaatgaattgatgccttaccttttatcatatagaaggatcttaaaggaacttatcaaatcaattgttgatgtatggtcgacaacgagagaattggaaacacagattgcttcttttgccttcttgataaacaccaccaaggaattcaagaaatccatgctagaaacaactttgaaaaccacttactctactttcattaaaagttgtcgtaaaacaaatatgcgttctatgcctttgattaatttccaaaaaaattcagctgctgaactgttcggtattgatgaagtcgtcggttaccaaatcgggtttgaatatattagacagttggccatccatttaagaaacactatgaacgcaacgactaaacaatcaagcaaagttaactctgctgaagcttacaaaattgtatacaactggcaattttgtcattccttagatttctggtctcgtgttttatcatttgcatgtcaaccagaaaaggaaaatggccgtgaatctccactgagacagttgatttatccattggttcaagttactttaggtgtaatcagactaattccaacgcctcaatttttcccattaagattttacctgattaaatcactaattagactttctcaaaatagtggcgtattcattccaatataccctcttctttctgaaattttaacctcaactgctttcactaaggcacctaagaaaagtgtcaacctggctgcttttgactttgatcacaatatcaaatgtacacaagcttatctaaacactagagtataccaagaaggtttatctgaacaatttgcggacttattaggtgattattttgctctatattgtaaaaacatcgcatttcccgaacttgtgacaccagtgattatctccttgcgtcgttatatcaagacttcgattaacatcaaattcaacaaacgtttatcaaacatcgtcgaaaaattaaaccaaaatagcgcatttattcaagacaagagatctgacgttgaatttgggccaaacaacaaatccgaagtttcaagattcttgaacgatgtagcttgggagaaaacgcctttaggttcatacgttattgtgcaacgcgaagtcaaagaagaaaaggctagattaatgagagaaagtttggaagagcaagacaaagaaaaagaaatggatgaagtcaaactgttaagagatctcgaaagtgatgaagacaacgaagacgttgaaatgtcagacgcttag

SEQ ID NO: 5289 - DNA, 1662 bp, Saccharomyces pastorianus
atgtctgttcatatcgccactgatggtggtagaatttgtagacctttaatcatcgtgtccgatggtcaatcccttgttaaggatactcatgtacgccaactactagatggagaattagattttgatgactttttgaagcttgggttggtggaatatttggatgtcaacgaagaaaacgattcttacattgcattatatgaaaaagatgttatcccttcaatgacacatctagaaatagagcccttcactatattaggtgccgttgctggtttgattccatatccacaccataaccaatctccacgtaacacatatcaatgtgcgatgggtaagcaagccattggtgctattgcatataaccaattcaaaagaatagacacgctgctatacttgatgacttatccacaagaaccaatggtcaaaaccaaaacgattgaattaatcgactatgataaattacctgctgggcagaatgctacagttgctgtcatgtcatattctggttatgatattgaagatgctttagtcctaaacaagtcgtctattgatagaggctttggtcgttgtgaaactcgtagaaagacaacaactgttttgaaaagatacgcaaaccatactcaagatattatcgggggtatgcgtgttgacgaaaacggtgaacctatatggcaacatcaatctttgggtcctgatggtttaggtgaagtgggtatgagagtcaaaagcggtcagatttatatcaacaaatctgttccaactaattcgactgacgctccaaatccaaataatgtgaacgttcaaactcagtacagagaaactccggtcatatatagaggtcctgagccttcccatattgaccaagtcatgatgtccgtttctgataatgatcaagctttgatcaaagtcctcttaagacaaagtagaaggcctgaattgggtgataaattctcatctcgacatggacaaaagggtgtttgtggtattattgtcaaacaagaagacatgcctttcaatgatcaaggtattgtgccagatattattatgaaccctcacggtttcccatcgcgtatgactgtgggcaaaatgatcgaattgatatcgggtaaagcaggtgttctgaatggttccctagaatacggtacttgttttggaggttctaaactggaagatatgtccaagatcttggtcgatcaaggttttagttattcaggtaaagatatgttgtactccggtataacgggtgaatgtttacaggcatatatcttttttgggccaatttattatcaaaaattgaagcatatggtcttggataaaatgcacgcaagagcccgtggtcctagggctgtcctgacgcgtcaacctaccgaaggtagatccagagatggtggtctgagattaggtgaaatggaaagagattgtgtcatcgcttacggtgcctctcaattattattggaaagattaatgattagttctgatgcttttgaagttgatgtgtgtgataaatgtgggttaatgggttacagtggttggtgtactacttgtaaaagtgcggaaaatatcatcaaaatgactattccatatgctgcaaaattgctattccaggaattattatccatgaatattgccccaagattaagactggaagatatatttcagcaataa

SEQ ID NO: 5290 - DNA, 1080 bp, Saccharomyces pastorianus
atggttgatgcaacgaaaagacggaaaacccatgtccataaacatgtgaaagacgaagcgtttgaagatttattgaaaccagtgtataaaggtaagaagatcaccgatgagattaataccgcccaggataagtggaatcttttgcctgcattcttaaaagttaaaggtttggtcaaacagcatctcgattcgttcaactatttcgttgatacagacttaaagaaaatcataaaggcaaatcaattgattttaagtgatgtcgatccagagttttatttgaaatatgtcgatattagagtggggaagaagtcctcttcttcgacaaaggactacttgacgccacctcatgagtgtagacttagagacatgacctattccgcacctatttacgtggacatagaatataccagaggtaggaatattatcatgcataaagacgtagaaattggcaggatgcccatcatgctaaggtctaataagtgtattctattcgacgccgacgaatcaaaaatggcgaaactgaacgaatgcccattggatccaggtggttatttcatcgttaatggtaccgagaaagtcattcttgttcaagaacaattatctaagaatcgtatcattgtagaagctgatgaaaaaaagaacattgttcaggcttccgtcacttcatctacccatgaaagaaaatccaagacttatgttatcaccaagaatggtaagatttacctaaagcataactccatcgcagaagaaattcctatcgccgttgttctcaaagcttgcggtattttatcagatttagaaatcatgcagttggtttgcggtaatgacagtagttatcaagacctttttgctgtcaatctggaggaatcttcaaaattagacatttatacacaacaacaagcattagaatacattggcgccaaagtgaagacgatgagaagacagaaactgtctattttgcaagaaggtatagaagccattgcgaccacagtcattgctcatttgaccgtagaggcccttgactttagggaaaaggctctatatattgcaatgatgacacggagagtggtaatggccatg

SEQ ID NO: 5291 - DNA, 543 bp, Saccharomyces pastorianus
atgaaggaggaattacgtcaatgtaattccaggtatcaggctattaaaaacgctgttggcggtaagaaattaacaaacgtcatgggctatttggaaaacgaatcgaactcgcaaaaggagacgctcggtatgtctaaattactattagaaagaggttctgaggctatttttctagacaaaaggtgtaaggtgctatcgttcagactaaaaatgttgaaaaacaaatgccattcaactattgaaaaggaccgttgtccagaagtgtttctatccgcagttagtgacaagttgacttctacagcggttctattcctcaatgttgaattactgagtgattttttctataactttcctatcgaattggacaggaggttgacgttgttgggtgatgagcaggtagaaatgtttgctaaagaggacccaaagatttcaagacacatcgaattacagaagaggaaggaattactagaactagctttagagaaaatcgattctattttggtcttcaagaaaagctataagggcatttccaaaaagttgtga

SEQ ID NO: 5292 - DNA, 1770 bp, Saccharomyces pastorianus
atgagcacctttactccattaaggatcattccaagagtggcaaacacctgcattctaataagaactaaggcaagcccggtacgacttttgctcttgaaaagacaactctcgactcatccagcgatactgtatggcccaccttacatcaagaaccccttgatccatctacacagccgcataaacaacgctcatggaacaacgcgtgcaaatgctgtacactttatggttaccaagaggtcgatatcaagctttcccaaaatagttgccaaattcatcagactaccgatatatgtaggtggcggaatggctgctgcagggagttatatagcctataagatggaagaggctagttcgttcacaaaggataaactggaccgaatcaaagattttagtaaatcgatgaaggagaagtttaatgaaatgtttcctggtagtagttctcaaaatggaagtagtggaattgatggcaatgtgcccactgctacattaattgctgccgcatcattagatgacgaccaaagcaagaaagaaaatgattcaaatgacgatgatgacgaagatgacaatgaaaatgatgctatagataccactcaagacgaaatgttaaacttgaccaaacaaatgattgaaatcagaactattttaaataaagtagattcttcttctgcacacttgaccttaccatctatcgtcgtgattggctctcaatcatctggtaagtcctccgtattagagtcaatcgtcgggaaagaatttctaccaaagggttccaacatggtcacaagaagacccattgagttaactttggtaaatacccctaattctaatatcgtgacggcagattttccaagcatgcgtctctacaacataaaggattttaaagaggtaaaaagaatgctaatggaattgaacatggccgttccaacctcagaagccgtttccgaagatcctattcagttaacaatcaaatcatctcgcgtcccagatttatctttagtagatttacctggttacattcaagtggaggccgctgaccaaccaatagaattaaaaaccaaaattcgcgacttatgtgaaaaatatttagctgcacctaatattattttagcaatttctgctgctgacgttgacttggccaatagctctgccttgaaggcttccaaagttgcagaccctaagggtctaagaacgataggtgtcattactaaactggatttagtggaccccgaaaaagccaggagtatcctaaataataagaaatacccactaagcatgggctacgttggtgtgattaccaaaacaccaagcagtatgagcagaaaacacctgggtcttttcagcgaaggaccttcttcatcattgggcgatttattctccaaaagacagcacaatcaggacacaggtgatcagaatgtcaatggtatgaagcaaatagtctctcaccaatttgaaaaagtttattttagagagaacaagaaatattttgccaattgtcaagtttccacaaaaaaattaagagaaaaattaatcaaaatcctggaaatatccatgtcgaatgcattagagcccacatccacactaattcaacaagaattggatgacacttcatatttgttcaaagtagaattcaatgataggcacttaactcctaaatcatacctattgaataatattgacgtactaaaattagggattaaagaatttcaggaaaaatttcacagaaatgaattgaaatcgattctaagagccgaacttgaccaaaagttctag

SEQ ID NO: 5293 - DNA, 663 bp, Saccharomyces pastorianus
atgacatgtgccttgtgggatataccgaaagcgaaaagagtgagagagtattccgatcatttgggtgatgttttggcattagccgttcccgaagagccaaactcagaggtctcctccaatattttcgctagttgtggctcagacgggtatacatatatatgggatgatagatccccatctgcggtacaaagcttctacgttaatgacagtgatatcaatgcacttcgctttttcaaagatgggatgtcaatcgtaacggggagtgacaacggtgtgataaatatgtatgacttaaggtcagactgctccatagctagtttctctctctttcgaagttatgaggagcatactcctacttatatggcagccaatatggaatacaatagcactcaatcaccacaaactgtaagatcaacaacttcgggcttcctggataaccagggagttgtttctttagactttagtgcatcaggaagattgatgtactcatgctatacagatctcggctgtattgtgtgggatatattaaaagcagagattgtagggaaactggagggtcacggcgggcgagttaccggtgtacgctccagtccagatggactagctgtatgcacaggttcgtgggattcgactatgaaaatctggtccccaggttaccaatag

SEQ ID NO: 5294 - DNA, 594 bp, Saccharomyces pastorianus
atgactgcatatcaaatggattcaacagcgtatgccaatagtgtcactcagcaatatactcagccgcaaagtttaactttacatgatatttcagctgtagaggatgaaatacaaaataaaatagaggctgccagacaagagagtaagcagcttcatgcgcaaataagcaaggtcaagcataaaatacaggacgcaaacctattccaaatggccaataaactggcgccgctaaccaaaaataaaatcaatttgaaaccgaatatggtactaaaaggtcataataataagatctcagactttcgctggagtcgagattcaaaacatattttaagtgcaagtcaagatggcttcatgcttatatgggacagtgcttcaggtttgaagcagaacgctatcccgttagattcacaatgggttctttcttgtgccatctcaccatcaagtaatttggtggcgagtgcaggtctgaacaataactgtaccatttatagagtttcaaaagaaaatagagtgcaacaaaatgttgcatcaattttcaaagggcatacctgttatatttcggacattgaatttacagataactcgcatatataa

SEQ ID NO: 5295 - DNA, 459 bp, Saccharomyces pastorianus
gatagctctccagttttggagggtcaccatagtaagcctcttttatctatcgatacagacccaggagtcactggggtagatacctcatcgctaagcaagggaggctcttcgttgtcccccgataaatcatcgctagaatcgcccacttttctaaggctttcgacggattcaaagccattcagttatcaagaaccgctgcccaagctttctaggtcatcttcatcaacatcaaatttgtcactgaatggaagttcacagacatctttgccttcacaactcgagaataaggataaaccaacatcagacactaaataccttttcgcctccaagccactgggattgaccattgacacttctggcactagcaacactacatcgcagagtgaaaatggtgcaggtggttccgcgtcaaaccctccaaaaagtccaagcataacggttaatgaattctttcattaa

SEQ ID NO: 5296 - DNA, 240 bp, Saccharomyces pastorianus
atggcaaaccaaaagcagatgagaacacaaatattgatcactgacattcccagagagaaattcgacagtaaatggcccacccagttggaaaaaaccttatttacggagcagtttcctaaattacagagtaatctgcaatactacacaccattaccgtttttgaacagaattgtaattatctttgacaatgaagagactctagaggatccccggtaccgagctcgattgtatcatgtcata

SEQ ID NO: 5297 - DNA, 1083 bp, Saccharomyces pastorianus
atgaaattactaacatttcctggtcaagggacctccatttccatttccattttaaaagcgataataagaaacaaatcaaaggaatttcaaacaatactgagccaaaatggcaaggagtcaaacgacctgttgcagtacattttccagaacccttccagccctggaagtatagccgtctgctccaaccttttctatcaattgtaccagatactctcttacccttccgattctctggaacatgcccagagaagcacgttcaaaaacgatatacccagcagaagggacaacgaacaatgctatctcttgggtcactcgctgggtgaattaacctgtttgagtgttaattcgttattttctttaaaggacctttttgatattgctaattttagaaacgagttgatggtgacatctactgagaagtacttagtggcccataacatcaacagatctaacaaattcgaaatgtgggcgttgtcctcgccaagagccacggatttgccacaccaagtacagaaattgttgaattcccctaatttactaccgtcttcacaaaacactatctctgttgcaaatgccaactcagtgaagcagtgtgtggttaccggcctggtggatgacctagagtcgttaagaacagaactgaatctaaggtttcctcgcttaagaatcacagaattgactaacccatataacattcccttccacaatagcaccgtattgaggcccgttcaagaaccactatacgactatatatggaacatattgaagagaaacggaacgcacacgttgacagaactgaaccatccaataataggcaatctggatggtaacatctcttattacatccaccacgcgttagatagattcgttaaatgttctagcaaaacggtgcagttcaccatgtgttacgacaccatcaactctgcaactccagtagagattgataagagtgtttgctttggaccagggaacgtgatttacaatctgatcaaaagaaactgccctcaggtggaaaccatagaatacacctctttggccaccatagatgcatatcaccacacgactgacaacaatgaggattga

SEQ ID NO: 5298 - DNA, 513 bp, Saccharomyces pastorianus
  modified_base (6)..(6): a, c, g, t, unknown, or other
  modified_base (14)..(14): a, c, g, t, unknown, or other
  modified_base (16)..(17): a, c, g, t, unknown, or other
  modified_base (26)..(28): a, c, g, t, unknown, or other
  modified_base (38)..(38): a, c, g, t, unknown, or other
  modified_base (49)..(50): a, c, g, t, unknown, or other
  modified_base (80)..(80): a, c, g, t, unknown, or other
  modified_base (82)..(82): a, c, g, t, unknown, or other
atgcanagacatcnannggtccagcnnntaccttgggnaccaaaatggnnactggttttgaaaagaaaaaactggtcaananaaacgaaaggtatcactgggttgtacaagggtgtagaatccaccatgtggagaaacgctctctggaacggtggttactttggtgttatcttccaggtgagaaactccatgcctgaggcaaagacaaagggacagaagactaggaacgatcttatcgccggtgccatcggtggtactgtgggtacgatgctgaacactccatttgacgtggtgaagtccagaatccaaagtgtgggcgcagttgacagtgttgtgaagaaatacaactggtccctgccttcgctattgatcatataccgcgaagaagggttcagagcattgtacaaaggtttcgtccccaaagtgtgtagattagctccaggtggttcgttaatgttggtggttttcaccggcatgatgaatttcttccgtgagctcaagtacgggaactag

SEQ ID NO: 5299 - DNA, 567 bp, Saccharomyces pastorianus
atgtcatcagatccaaacgcgaagccattgcccttcatatatcagttcatatcgggtgccgtcgccggtatatctgagttggctgttatgtatccacttgacgtggtcaagacaaggttccagctggaggtgaccacacctgcagcaattgcagcaggcaaacaagtggagaaatacaatggtgtcatcgattgtttgaagaaaatcgtgcagaaggagggcttcagtagactctacagagggattagttctccaatgttgatggaggcgcctaagagagccaccaagtttgcatgtaacgatcaatatcaaaaaatgttccagtcgctattccacacgaatgaaactacgcagaaaatctccatcgcagctggtgcctcagcaggtatgacggaagcggcagtaattgtgccctttgagttgatcaagatcaggatgcaagacatcaggtccagctaccttggaccaatggactgtttgaagaaaactgtcaaaaacgaaggtatcactgggttgtacaacggtgtagatccaccatgtggagaacgctctctgaacggggatcct

SEQ ID NO: 5300 - DNA, 393 bp, Saccharomyces pastorianus
atgcaagacggaggggttcctcttcgtcttgtaatccttgattgccgccttgatggcgtcttctgcgagcatggagcaatgcagcttcaccgggggcaggctcaattccttggcgatctctgtgttcttgatcttgacggcctcgtccagcgacataccacgtatcagttcggtcatgtaggaagaggacgcgatggccgacccacagccaaaggtcttgaacttgacgttctcaatgatgcccgacttgtcgttcacttggatctgaagctttatcacgtccccacaagctggggcgcccacgatccccgtgccgacgttggcctgggacttgtccatggatccgacgtttcttggatttgtgtagtggtcaattaccttgggatggtatag

SEQ ID NO: 5301 - DNA, 984 bp, Saccharomyces pastorianus
atggcttacttggacaagactggagagacaacgctactagccatgtccaagaacgggtccttggcctggttcaaggaaggtattaaagtcccaattcacatcgtgcaagaaatgatgggtccagccaccagctttgccagtatccattcgttgactagacccggtgatttgcctcaaaaggatttttcattggcaatatctgacttcggcatttctagtgacaccgaaaccgttgtcaagtctcaaagtaacggggatgaagaagacagtattttgaaaatcgttgacaatgctggtaaacctggtgacatcttgcgtactgtccatgtcccaggtaccactgtgactcatactgtaaaattttttgacaaccatatctttgcatcttgttcagatgacaacgtcttgagattctgggacactagaacctcggacaagcctctatggattttgggtgagcccaaaaacggaagattgacatcgtttgactgttctcaagtctccaataacttgtttgttaccggtttcagtaccggtattatcaaactatgggatgctcgtgtagcggaagctgccaccaccgatttgacttacaggcaaaatggtgaagaccccattcaaaatgaaatcgcaaacttctatcatgcaggaggtgattctgttgtcgatgtccaattctccacgacttcaagttctaaattcttgactgttggcggtaccggtaacgtttaccactggaacaccgactacactctgtcaaactatgaacccaaggtcagcaacacagctccacaagatgccactgaaatatcgcaaacaaactctttggaattcttacacaagggtgggagcagaagatctccaaaacatgtcggaagaagaaacgctactgcttggcatccggttatcgaagacctggttggtacggtcgacgatgatacactagtcagcatctacaagccatacaccgaggaaagcgaataa

SEQ ID NO: 5302 - DNA, 195 bp, Saccharomyces pastorianus
atgtctaagaaagtctggaaatcgtccgctccttccacatatgaacatatctctagtttgagacctaaattcacgtctcgtgtagataacgttcttcaccagaaaaaggccttgaccttcagcaatgttgttgtcccagataagaagacgaacactctatcctcgagcgttatctattctcaaggtagtgacatc

SEQ ID NO: 5303 - DNA, 165 bp, Saccharomyces pastorianus
tctctaagtcacgtgccattgcaggataccttggaaccggtgaaggactacggtgacgcttttgaaagtgccgagaagacctcattgagcccaaaatttgtttaccaggtgaaaccgtttccaaaatggcttacttggacaagactggagagacaacgctactag

SEQ ID NO: 5304 - DNA, 126 bp, Saccharomyces pastorianus
atgtggggtaaggtcaccagaacccacggtaactctggtgttgtcagagctactttcagaaacaacttgccagccaagactttcggtgcttctgtcagaatcttcttgtacccatctaacatctaa

SEQ ID NO: 5305 - DNA, 1056 bp, Saccharomyces pastorianus
atgacccttgtcttaggcatcaatcaacaacataataaggagcatttgaatgcattgacccaagatgtaaaggaagagacattggaaaatattgcgcatgaggggaaaaatactgatacagatgaccaaaatacaaccgaaccatctgataacggcggtggaagaataggtcgcgatttgccatttgaatttggtaaacgtagcctaactgaggaatctgaagtttgggatcataacgcttgggataatgttgagtggggtgaagaacaggtccaacaagcagaggaaaaaatcaaagaacaattcaagcatcctgttcttgattttgacaaaaagttgtataacgagaatccagcacgttattgggatattttctataaaaacaataaagaaaacttttttaaagataggaagtggctacagattgaattcccgattttatatgcatctaccaggaagggtgctgatcctgtcacaatctttgaaatcggttgtggtgcaggtaacacttttttcccaatattgaaagataatgaaaacgaaaacttgagaatcatagctgctgattttgctccaagagcagtcgaactagtcaaaacctctgaacaattcaactccaagtacggccatgccgcagtgtgggatttggccaaccctgatggtaacttacctgacggcgtcgagcctcattccgttgatattgcagtgatgatatttgtctttagtgctttggctccaaaccagtgggaccaagctatggacaacctccacaaaatcttaaaaccgggcggtaagatcatattccgtgattacggtgcttatgatttaactcaagttagattcaaaaagaacaggattctagaagaaaacttttatgttagaggtgatggtacaagagtctactttttctccgaagaaaaactgagagaaatcttcaccaagaagtacttcctggaaaataaaatcggaactgatagaagattattggttaacagaaaaaggcaactaaaaatgtaccgttgctgggtgcaagccgtttttgatgttcctcaataa

SEQ ID NO: 5306 - DNA, 786 bp, Saccharomyces pastorianus
atgggtgttgcagatttaatcaagaaatttgaaaaattctcaaataaagaaggcgaagctaccgtcgacactggtagcccttcagagcaggccaaatcagacggcgagactaaggatgcggaacaacaagaaggcacttctgcttctcaagaagacgcaagtgagcagcacgaagatgtaccaatagaagaacctgaaactatccacgaaaaagaagaggaggctcccaaaggccaaggtgttaaccccaacgccggtgaaggaactgatgctcaagaatctaaggaaagcgaagaagctagcaaccaacatgctgcaagtagcgttgaggaattcaatgccgacgaagaaaacttggctgaacaaactaagggaactgttgatcctaagcaggaagaaagcgagcaaaatagtaattcggaagaaggagctgccaacgaatccgtatccgcaccagttaagaaggactctcaatctgaaaaagatgccgatatcgaccaagttgatagcgaggaagctcaaagtgacgaaaatgcttctcagcaagttgatgataactctacaaatgccgcaatttctaataacaaggaaaaggaaaacaagaagaaaaacgaaaagaagaatgacaccacctctgatgccaatgctagcgccaatggcagtgacaatgcacccagagataacgccgacaacgacacaacgtcatcaactgactccgcagttcaagaagtgaacaatttggaagtcgttgatgacccttgtcttaggcatcaatcaacaacataa

SEQ ID NO: 5307 - DNA, 1485 bp, Saccharomyces pastorianus
atgataatcaggaatccattaagaatgatcggcaaaacctatcatgatgctgttaccgcattaaattcgttacagtccaattatgccaatatcatggctatccgccaaacaggtgatcgtaaaaacatcatgacattattggaaatgcatgaatggtccagacgaattggttactcttcatcagactttaataaattgaacatcgttcatattaccggaacaaaaggtaaaggctccacggccgcatttacttcatccattttgggccaatataaagaacagcttcctcgtatcgggctatatacatctccacatctgaaatcagtgagagaaaggataagaattgatggtgagccaatctccgaagaaaagtttgccaaatatttcttcgaagtttgggaccgtttagataaaacaacgtcttcattggataaattcccacacatggtcacaggaagtaagcccggctatttcaaattcctcacattactttcgtttcacacttttatacaagaagggtgtaaaagttgtgtctatgaggtcggtgttgggggtgaattggatagcactaatataattgagaaacctactgtctgcggtgttaccttgttgggaatagaccatactttcatgctaggtgacactattgaagaaattgcttggaataaaggtgggattttcaaacctggagcaccggcttttactgtcgaagaacagcctcctaaagggttggaagtgttgcaagaaagagcagaggaacgcaaaacaacgttaacagaagtacctgtattcagacagttgcaagacgtcaagctcggaattgctggggacttccaaaaaagtaacgcatctctcgccgtcatgttggcttccgaagtcttaagtgcatgcaaaatattaaacaagaaaatttgttgtaacccagatgcaccacttcctgaaaaatttatagatggtctaaaaagcactaagtgggaaggtaggtgccaagttcttgaaagagggaaagacacatggtatattgatggagcgcacaccaaagatagtatggtggcagcttctacatggttcagagaaactgttcgctcttcgaacaagaagaaaattcttcttttcaatcaacagagtagggacgctaaggctcttatagacaatttacacgcatctgtttctccggatgtcaattttgatgatgtgatattcaccacaaacgtcacctggaaatcaggttcatacagtgccgatcttgtttccatgaacacttctcaagaagatgtagaaaacctgaaagtccaagaattattggctaaggactggactgaaatcgacaaaaatcatgctcgtgtacatgtgactccgaatatagaaacagcaaacgaattgattgaaaaatcatacgattgccctgttgagatatttgtaaccggttcgttgcatctcgttggcggattgttggttgtctttgatagactagatgaaaagtga

SEQ ID NO: 5308 - DNA, 195 bp, Saccharomyces pastorianus
atgacaccaccgtcttggctccatcgtcatctgcagcagccagtatcggcgacgacggctcgaacaacaagggcgccaacatcagatcattggaccaaacctcgacttcttccaatggttgcgtcccgatcaccaagttcgtcaccgtcaccaaggagcccatcacccagtacgttacagtcactcccaatatga

SEQ ID NO: 5309 - DNA, 537 bp, Saccharomyces pastorianus
atgccagttaccaaatctttatctaagttgcaaaagaacctttccaagaagggcaaaagcgttgcggttcatccaaaaggtagaaagttcgaaagactggtcagggccactatgcgtgaagataagatcgccattaagaagaagctgcacaacgataagaaaatccacgaactgactcgggtcaagttcatccaagacgtggtaaactccaatacattcaaggaccagccaatattcgaccacgcccacaccagagaattcattcaaagttttattgaaagagatgatgtagaattagacgaattaagaagcaaaagaagatcaaacagaccaccaagcaccagacaggtgcagctacaacagaggagggagcaagagctaaaggaattccgtggagggtttctctgtcccgatttgagtgatgcgaaaaacatggagtttctaagaaactggaatggtacattcggtctcttaaatactttgagattgataagaatcgatgacaagggtaaacaagtcttggggggcaatgaataa

SEQ ID NO: 5310 - DNA, 1881 bp, Saccharomyces pastorianus
atgccccacgggtctggaacaaaaggtgatgtggcgattgctcaatatatccaggattcctttgagaataatggattaaaattggttaaaaaaatggaatatatggcttacgctaattatccaggaaatgtatcgatttcttactatgatgacaaacatgaaaaacatgatttaaaattatccagagaaaacttcaatcccttgagctccaacgggaaactgtccaaaatgagtctaatttacggagacaaaggtaccacaagtgatttgcagacattaaaagactcaaacatcatagaaaatggaaaagattatatactcctgttgcaatatgacgaaatagtaagccagcaggtattaatagcccagagatttggcgctaaaggtataatattcatatctgaatcatatggtgagaatatagacattgtccaaccaaagcctgtaggcctaccacaatactctacaggagatgcgttaacacctggttggtttggctctgttttggacgaaatagacgccaaggactcaaaaagtttagctcatattcccacagtgccgatatccagtaggcaagggcaagaactactgtctcttttatcttccgatggaataactttcggtggtggtaacgaggaacatagaaatagtgggaaaatcggtgatttaattgttgatttagatttggagacaaatgtaagagaaagacactccgtttgtgatatcattggtaagattgaaggtagggagcaaacagataaagctgttattattgccgcgtctagaaacaccatcaattctggagctgcttaccccagctttggtacgtctgcgctattatccgtattacagctatttcaagaactaaagtataagtatgattggaaacccttaagaaacatttacttcatttcattcggtggttcggaattcaactacgctgggtcttctgagctcattgaacaaaagctaacaccattaaaagatgaagtttactctttcatcgatattagtcagttaagcatacctttcagtacggaaactgataacggtaacaccagaggaatattgaacattgagacacatcctttattaagtaagtttttcaaaaacaaggaggggcatctaaattttgatgtatctgttgaaaacgtacaacattatggtgactggactcccttcctggcgaatggtattcctgtatccgtactatcttctggtctcacaaaaaaccgttcgttgccagttggaacttcggaagatacctttgagcacttcaaaaagtatttggaagatgaacagaaccaagaatcgatcagtgatttgttagtatatatactacacattacagcgaaactggttgacgacccattattacactttgacataacgagttatgttgacgacattgatgaacgactacaaaagctggagcaagcatatcccgggaaactagactacaactcagtgattaaaggtttgttgttctggaaaaaaattggtaacgaatggacttcatggactcaaggttgggaaaacatagtctggtcacacggtgatggcatagagccttctttactttcaattcacagatggacatggaataagaaattgaccaatattggtagaaggacgtgctctcctgcaggtctgccaaatagatcattttacaaaaacattttatttgggccaacactaatgcaggaagccagctctggtagcaacgagggtgtggacttttggagttttcctggcataaaggatgccattcatgatgacaattggaagagggcgcaagagcaggttgacctcatcggtaacgtgctacatcagtcagctgcattattcgtagaggagactaatgacatcggttataaataa

SEQ ID NO: 5311 - DNA, 426 bp, Saccharomyces pastorianus
atgaggagcaattatcaaccggtggcgaatacggacgctgatcacgaaaacactatacccacagcatcttcttcgcatactttgttgctgaatcaagattttgatgatttccaggccaactctaataaccataacaacacagacactaatacaacgcccccacctgagcccccttcttatgaatttgatatagaggatcctcgtaacgaccttcataaaagatcgcacttgcaaagagtttccatcggatttcaagagcgaatcctggaacccttagtagagaatatcatacatccatttttccaaatcttaaaattcattcaagacaaagcggattattatctgagtaaagtcggaaaccccttcatacttcgaagattattttacatcgttctaatgtcatttgttgcatattacattttgtga

SEQ ID NO: 5312 - DNA, 858 bp, Saccharomyces pastorianus
atgtcaagacaagcttcattcaaagatccatttagtggaaatcagcaggatcacaacccttccaccaccgacgacgatgaagaccgtaatcgtgacgacgacgacgacgacgacggttacaaaccctcaatcgcatctatccaacccacatatttcaagaaaaagaacgctcttattctggacccgctaaactgtaataaatcattgagtaaactctttagagatttatcccgtcgttcatggcaacattccaaaccaagagaaccaatgggtatcttcattttaccagacgaaacctcgttcgtcagagccaataacctgaacacatacatggatgcaaatagatttgtcttgaaaataaaatctcaaacaatgttcactaaaaatatacaaatccaatccgcagccattggtgctgatgccatcgtagaccctaaatgtcagatttcggcccacagtaatgtcaaaatgtcggttgtcggtacccaggctactattggttccagatgccgtattgctgggtctctcttgttcccaggtgtccaattaggtgacgaagtcattttggaaaactgtattgttggacccatggccaagatcggctctaagtgtaaactcaccaattgttacattgaaggtcattatatcgtagagtccaaaaataactataaaggtgaaacgttggccaaagtttatttggacgaggatgaggataacggattggtatatgatgatagtgtcatcgcgggtgaaagtgaagattccgaggatgctgatagtgacgaaagaagcgatgaagattctgatgatggtgagtatactgacgagtatgaagatgatgggctgtttgaacgttga

SEQ ID NO: 5313 - DNA, 864 bp, Saccharomyces pastorianus
atgcccatccaagcttttatcttctgcggtaaaggttccagcctggctcctttcacacagcctgatttcccgtttcaagcgcagaacgatgacagcgctgctactgccaacagcgacaagctcaatgagtttgccaagaatgctctaggtgcaggtgtcatcaatgagttcatgcaacattctacgcgcttgcccaaggctcttttgcccattggcaacagacctatgatcgaatacgtcttggattggtgtgaccaggcggattttaaagagatcaatgtggtggcaggtgttgacgaaattgaattgattgaaagtgggctagccgcgtttttgtcccttagaaagcaacagttcgaattgatttataaggcattgtcgagttccaaccacagtcaccacttgcaagaacctaagaagatcaatttcattccttccaagaccaattccacaggcgagtccttgcaaaaagagttactacctagaatccacggcgacttcgtactcttgccttgtgattttgtcacagatatacctccacaaatcttggttgatcagttcaggaatagagatgataacaatctagcaatgactatctactataagaactccttggatagtaacatcgataaaaagcaacagcaaaagcaaaagcagcaaaaaatttttactgtgtattcagaaaatgaagactcggagagacagccaatactattagacatctactctcagagggacgttaccaagactaaatatttacagatcagatctcatttactgtggaactacccaaatttgaccatatctaccaaattgatgactcctttatttacttttgctcttttgaaatttgccaattgctaa

SEQ ID NO: 5314 - DNA, 1002 bp, Saccharomyces pastorianus
atgtctttacaacacgaaagggttaccattgcaccactagtcttactatctgctttagaccattatgagcgtacacagacaaaagagaacaaaagatgtgttggtgttatcttaggtgacgcgaacagttccaccatcagagtcaccaattctttcgccttaccattcgaagaggatgaaaagaaccctgatgtatggttcttggaccataattatattgaaaacatgaatgacatgtgcaaaaaaattaatgccaaagagaaattgattggttggtatcatagtggtcccaaattacgggcttcggatcttaaaatcaacgaattgttcaaaaaatatacccaaagtaacccattattattaattgttgatgttaaacaacaaggtgttggccttccaacagatgcatacgttgccattgaacaagttaaagatgatggtacttccacagaaaagacatttttacatttaccctgtaccattgaagctgaagaagctgaagaaatcggtgtggaacacttattgagagatgtgcgtgatcaagcagcgggtggattgtccatcaggttgactaaccagctaaaatccttaaaagggttacaaagcaaattaaaagatattgtcaaatatctggacaaggtcattaataaggaactaccaataaatcatactattttggggaaattacaagatgtctttaaccttttaccaaaccttggaacacccgatgaagacgaaatgaatatgcaagatcatgatacaattaagatttcaaacaatctacaaaaggctttaaccgtaaagactaacgacgaattaatgatcatatatataagcaatttggttagatcaattatcgcatttgatgatctaattgaaaacaaaatacagaataaaagaattcaagaacaaagaataaaagataaacaatcaaaagagtctgacgatgttgagaatggtgacaaagagacgactacgccttcaacccaagaagagaaataa

SEQ ID NO: 5315 - DNA, 423 bp, Saccharomyces pastorianus
atgctttccgcagagtatgacatcaggctggaactatacatatataagaaattgaaactacagaaattgctttgtgatgaattggagaaaatctaccaatatttcttgattgatgactggttattgttgcaaggtatactcaaaactgaaggtggaacagccaaagttgttttaagtgataaagaattggtcaattgtgtactcgaaaggaagctttatcgtaaggacgaagacttaaacaaaatggttaatgatacttcagggcaaaatatattgttaaaaagattgtttctttattggtcattgaggtacgatgacactatttcatttaacggagaacatacattcagcgaaaaatggggagtcgataatatttcactcttgaaatataatatagagctggtgatcacaaaggacatctga

SEQ ID NO: 5316 - DNA, 900 bp, Saccharomyces pastorianus
atgtatactcggctcattatggtacggaggtatacaacatcaaccatgaccaaaagctatccgtcacgattaaaacatttagtaaagacgccactttatgaagccttggacaaccaatataaatcagggaaattgcagatagcgcagggtgccgactggaatgccaaaacaaccacttcttattctccagagcttttgaccgaaaccctaaactccactcgatctttaccaatgacaaagttccctaggcaagaaatcttgaaacaggtggaattggatccaaaagttggccaatggaggaaatttataacaggttggtttaggatagggttgtatctcttgaaaatgtacaaatcagggattcaggacacttttaaagtttattggagtacaagacacgtgaaacgtgaatttgacataaagaatggctctttggccaaactggtccgtgaaatagaaatgagtgaagtgaatatcaagctgtcctcctcatcgctatccaaaaaggcggatgttaaggttgcttcaataccgttttcaattaaccggaaacagctggtggaattgatcagaagagatcaaatttggaaactaccggtctttttcagtttggtattcatatttgaggagatgagtgcgttaatattcacattctttccacgtgtttgcccatataactgtttaactcccggtgggtacaagaagctctccaatgtttatattaaggaaactacgggatttaatgacaaccgtggtctgggtcctttaaagtttactaagcaagggaatattaagtatgaaccaccgtatgctattccaattgagaacgtatacagtttcctaaaatgctttccgcagagtatgacatcaggctggaactatacatatataagaaattga

SEQ ID NO: 5317 - DNA, 309 bp, Saccharomyces pastorianus
atggctcatagagcccccataccgaatcccacagattcgaattttaaatgccttttaacgctaaagggccatctttcatgggttagagacattttcatccgtggtcagtatctgttttcttgtggtgatgataaatctgttaggtgttgggatttaaacactgggcaatgtttacatacttggaacgatttgcattcagggtttattaattgtctggatatggatgtagactacgactccaatattttaccaagacaaataatggttactggtgggttagatagtaagtctagtgtctttatgaggtaa

SEQ ID NO: 5318 - DNA, 315 bp, Saccharomyces pastorianus
atgcaaaaggaggctgaagccgaaggtgacgttgatgactttgatactgccaatggtgaaatgaacttgacaagaatggcaactttaagaactatggaaacagacccttcgaccgggggagctgcaggtgaaaggttagcattacacagaactcatacacagacaaaccaatcctcattcaaacacgagggcacacaacgccaacaaaagccaaacgagcccatctccaatagtctattctcagctgttaaggataccgaagatggctattcatatacagaaatgacaactgatgcctctgcaagaattgtctag

SEQ ID NO: 5319 - DNA, 684 bp, Saccharomyces pastorianus
atgtcttctcccaacatcgaagctaactctaatacccaaacaggtgaacaccttgtttctaaatccgcgaacaagaacagccaggattcatcatcatctacaagctcgataatggaagatgaaaaaatgtcaaactcgaatgcagattcgaccgatagcaacgatgaaccgattgacccaaaagatctagactgggatgggcttgatgatccggataacccacacaactggccctcttggaagaaatggtatgctacgatgtcttccgcccttctttgtttggtggttacgatgggtagttctctttacgtctcctccgtaccagaattggtagctaggtaccatgttagccagaccttggccctttctgggttaactttctaccttttgggtctagcgacggttattggcgctccattgagtgaagtattcggtcgtaaacccgtctatttgttctccttgcccgcatcgatgctcttcactatgggtgttggtttgtccaatggtcacatgagaatcattttacccttaagatttctatccggtgtctttgcctcccctgctttgtccgttggttcaggtaccatcttggatatcttagatgtcgatcaggtctctgtagccatgacatatatagacctatctccatttaaggggcccgttttatcaccaatcatggcaggg

SEQ ID NO: 5320 - DNA, 897 bp, Saccharomyces pastorianus
atgcatgtaaacgaaacctgtgtgcaagaaactagttcatcttgctgttgcatatctaaattagagggcaccataaacgtcaaccaaattgccaggatgagtgacagaaagaaagttttaatgctgcatggctttgttcaatctgataggatattttctgccaagacaggaggattacgaaaaaacctgaaaaaactgggttatgatttgtgctatccatgcgccccacactcaattgacaaaaaagcactctttcaatcagaggctgaaaaaggtatagatgcggccaaggagttcagcacgtcagcaaccagtgatgaagtatacggatggttctttagaaaaccagattctttcaattctttcgaaattgatcaaaaggtacttagctacttgcatgactacgtactagaacatggtccattcgacggtataattgggtttagtcaaggtgccggccttggtggttacctagtcactgatattaacagaattttaaatcttaccgaagaacagcaacctgccttgaaattttttatctcctttagtggttttaagctagaagatgaaacataccaagaaagttacaataagcccattcaagttccctctttacatgtaaggggggaattggatgcagtggttggagagtctagagtgctggcgctatacgatgcatggcccaaaaataaaaagacgttattaattcatcctggtgcccatttcattccaaactcaaaaccttttgtgtcccaagtctgtaattggattcaaggaacaatcaacaaagaaaatcaagagcaagaagatcaaccggaaacggaacagaaacagtttgacaaaccccagttagacgatgatttgctggatatgatcaattcgttaggcaagttgtag

SEQ ID NO: 5321 - DNA, 456 bp, Saccharomyces pastorianus
atgagatcaaatctttaccaggacattaggtttgaccggtccacaggtaaagccactgatacctctgttataagaaagcgttaccaatttttagacgaatatagggaaaatgaaataggtgaattacagaaagtactaaaagatcgaaaatttctatctaaaatagaccaaggagatcgtgaagaaatggaacaaaggttgaaaagtatgaaatctagactacaatcgatgaaaaacaaagacctcgagcgtaacattcttaaggactatgaaaacgacttgaataaagacaataatacaaggtatcatttgaaggagtccgagaaacgtaaagtggtacagaagtggaagtttgatcacatgaagactaaacaacgtgagaaggttatggaaagaaagaggaagaaaagattgggtaaggagttcaaacaatttgaatttcataatagtaagtaa

SEQ ID NO: 5322 - DNA, 327 bp, Saccharomyces pastorianus
atgagagtatttaacaaaagaactgggcagagcaaagtaaagcaccaggaagctgaaatgtcgtattactttaaaaatttgaagccggatttgaattctgatggagaggaagatgacggggagtcattggaggaaatactggccaaaagaaataaccaagtggccgaggaacaagaatcaagcgacgatgagttaaaaacgttgtctttcagctctttaaaaaaagctgagacgttgatggacgaagaggattcgaaggataaaaagccaatccacagaaaacggactgccactgcatacaaaaaaaaaagctttgacgaaaaataa

SEQ ID NO: 5323 - DNA, 714 bp, Saccharomyces pastorianus
atgtcagtagaagtcgctaaaggttcatcgccattcgcgttctatgccttttaccagctgtattctcatttgaatccgggggaaacatctaatctttctttaaaagaaattgcaaaaaatctatatcccgactttaaaatagactacaacgaaaaaacgtcattgttcataacttggaagaaaagatcggataagcaccataatgggagctcaacccaagagaactatatgctcagaggttgcattggtacatttgcgaaaatgccaatagcgtccggtattaagagatattctttaattgctgctctagaagataggaggttttctcctattcagaaaagagaattaaccgatttaaaatgtagttgcaatattctgggccatttcaaaaccattttccaaggcggggataatccaagcggtgacatttttgattgggaactcggaaagcatggtattgaactgtatttcaagcacccgaaaacaggaacaacatgcagtgcgacttttctacctgacgtcatgcctgaacagcactggagtaaagaggacacgtttgttaacttgattgaaaaagcaggatactggggtaatattagcgacgtaatggatagttttgaaagttatttcattgaagtgataaggtatgaaggtgacaaaagttctataacttttgaagaatttgagaggcaactagacaatgtagaagcttga

SEQ ID NO: 5324 - DNA, 456 bp, Saccharomyces pastorianus
atgtcagactgggatacaaacactattatcggtagcagagccagagccggcggttcaggcccaagagccaatgtcgccagatctcaaggacaaatcaacgccgcaagaagacaaggtttggttgtctccgtggataagaagtacggttccaccaacaccaagggtgacaatgaaggccagcggttaaccatggttgaccgtgagacagatattgtcaagcctaagaaaatggacgccaacgtcgggaaggccatttcgcgcgccagaacggagaaaaaaatgtctcagaaggacttggccaccaagatcaacgaaaagccaaccgtggttaatgattacgaagccgctagagccattccaaaccaacaggttttgtccaagctggaaagagccctgggtatcaagttgagaggtaacgacattggttcacctttgggtggtccaaagaagaagtga

SEQ ID NO: 5325 - DNA, 1284 bp, Saccharomyces pastorianus
atgaacaacgtggaggatttcgaaaaaatccagcacgaacgactaccgacgctgtatgaagtactgatacagaggacgtcgacgcctgttgatctctggacgttttacacgtttctttcacagttcccatatgccatcaactacttggacttctgggttgacctaatggcccacacccggctttgccaaagctacgtcgaaatggtaaggaagtctctggcgagtttcccacaagaagaacagcatgacgggggcggctctgcgaccacctacaacctgctggacgcactaatagaagagggtcacttggacctgcaaacacccgagaacctcctacaaaacggcaccagcgacgtgccattctcacccaaattaaaccaaatgctggggaactggaaacatcaatccggcataagccaggacgccctccaaaacgaagacatggcactgatcgtagacgagatcctgaaaagacgctcgcaacaagatggcgtgccgcaaatcactacaaaacaactgcttcacagcgcaatggggctctgtaccacctacttgatatcgcccgagcaaagcgagcgatacctgagcaacatcccggcggaaacacggacccgcattttagaagacatacaggttgaacgaaggtacgacgccaccattttcgacgacgtcaagactctgacataccagtttctagagatggactgcttcccgaaattcctgagccgggttgccctgcacaacatccacgacgagatttccgactggcggttccactccgttggcgccaccaacgagaagaacagccgctcccggggccagacgcacatctcccgctctccgttttccaaccacacatccataagccggattggcctcggcttactatggttgggcattgggttctggatcggatacgtgctgatcttcctggcatacggccgtgccatccgcgtggtcactgtggtgccatttgcgctgggatgctactgcatcgtgtgcggcatgtaccaggtggatatcgtgtactcctggtttggcgtcacccaaagactgctccacagacacaaaaacagcaacgacaatgctggcgccgccactgacgcggatcacgtgccgggagtgctggcgatgttcggcggcaagagccggctcaccagcgtgcagcacccgttcacacgccggctgttgcgcaagcgcggattgtggtgtctgctactcgtggcgggtgccacggccgtgcttacggtgattttcagctgcgtaccgggtcgtcgtgtgtga

SEQ ID NO: 5326 - DNA, 762 bp, Saccharomyces pastorianus
atgaacaccaacttggttgctgaagttaccaccaagaagccgttccatgtctctgcattgcctgacaaggccagagcaaatgtcgctcttattgattgcggtgtcaaggaaaacatcatcaggtgtctggcaaagaggggcgccgacgtgaccgttttcccctacgactacagaatccaggatgttgcgtccgagttcgacggtattttcttgtccaatggcccaggcaatccagaattctgccaagccaccattgcgaacgtcaaagagctactaaacaaccctgtttacgaccgtatccccatctttggtatttgccttggccaccagctcttggcccttgcttcgggcgcttccacccacaagttgaaatacggtaatagagctcataatatccctgccatggacttaaccacgggccaatgccacatcacttcgcaaaaccacggttatgcagtggatcctgagactctacccaaggaccaatggaaaccttacttcgttaacctaaacgataagtcaaacgaaggtatgatccatttgcaaaggcctattttctctacccagtttcacccggaagcaaagggaggtcccatggacaccgccattttgttcgacaagttcttcgacaatatcgaagcttatcagtccgattctcaaaaaaaaaactcaatttcacaaaaaacagctcataagggtgatagatctcaattgcgaaattttaacgttacaaaattagctaaggaaagagtattgttctaa

SEQ ID NO: 5327 - DNA, 240 bp, Saccharomyces pastorianus
atgtcttcttcccaaataaaggctacttttgccattcaaaacggtccttccttcgaagccatctccttcggcgcaaacaagtctgtcgctggtgaagccgttttcaccacttccctggtcggttatccggagtccatgacggatccttcctaccgtggtcagatactagtcttcactcagcccttaattggcactacggtgtcccatccggcgatgcccgtgacgagttcaatctactga

SEQ ID NO: 5328 - DNA, 195 bp, Saccharomyces pastorianus
atgatagcagctggcaatcggcgtcgatcgaaatgtgaaagagagcggcgaagggaagttgacttgatcaattcaggaagattggtcaactactatgaaaactcatacgcctcaactttattacaagattgcaatattcccgcatggctaaaactaggcatatacaagagtagtgatttcggtttgcaaaagtga

SEQ ID NO: 5329 - DNA, 582 bp, Saccharomyces pastorianus
atgataagaaactatctaggacgaagatggctcaataattcagcaattcaagcatacatcgaacaaaattctgctgtcgctcattcgacggttttccaaggaaatctctatgagtatacggtgatgagagaactatctgaaaaattgcgaatgactaaattagagaaagttggtggcgcccatgatgggggagtagatgtgaaggggagctggccagtagattacatttatgcgaaaacctcattggtgatgggcaatttagaaacaactaatactataaagagaacgcactcccaaaatggtttcgttttaaaaccactgaaatatagaatatttgataatacttttacacccttgaaagtactggtccaatgtaaagccttcactaaatcaaagctggccccgaaagaattccgtgaattagtaggaacattcatctcactggtatccaatagccagcgcaataaaactgtctgtattatgtgctctcctcatttgcttacaaaagatactctgaaacttatcaataatattgcgctacctatgatatatttgcggatcgaaatgctgaaagagagcggg

SEQ ID NO: 5330 - DNA, 864 bp, Saccharomyces pastorianus
  modified_base (75)..(75): a, c, g, t, unknown, or other
  modified_base (125)..(125): a, c, g, t, unknown, or other
atggaagaacgtgttaagaccgctgccgaagtttccatgggtactgaaatcactcaacgagagttagacaacatnaacgctttagctgaacaaatcgttgattttgctgcttacagagaacaatngtctaactacttgtccgcaagaatgaaggccattgctccaaacctaacccaattggttggtgaattagtcggtgctagacttatcgctcactctggttctctaatttcccttgctaaatctccagcttctaccattcaaatattaggtgccgaaaaggctttattcagagctttgaagaccaagcacgatacaccaaagtatggtttgctataccatgcttctctagtcggtcaagccactggtaagaacaagggtaagattgcaagagttttggctgccaaggccgctgtctcattgcgttacgatgctttggctgaagatagagacgattctggtgacattggtctagaatcaagagctaaggtagaaaacagactatcccaattagaaggtagagatttgagaaccactccaaagattgtccgtgaagccaagaaggtagaaatgacagaagctagagcttacaacgctgatgctgacacagctaccactgccaaggctgattccgattccgactccgactctgactctgatgacgaagaagaagtaaaggagggaaaaaagaatgaaaagaaagaaaagaaggataaaaagagaaagagagacgaagatgaagaatctaaggattccaagaaatcaaagaaagacaagaaggaaaagaaggagaagaaggaaaagaaggaaaagaaagagaagaaggaaaagaagtctaagaaagagaagaaagagaagaaatga

SEQ ID NO: 5331 - DNA, 546 bp, Saccharomyces pastorianus
atggcttatgttttaactgaaacctctgctggttatgctcttttgaaagcctctgataagaaaatctacaaatcttcaagcttgattcaagatttggatagctctgacaaagtcttgaaggagttcaagattgctgctttttctaaattcaactctgcagctaacgctttagaagaagctaactccattattgatggtaaagtatcctcccaattagaaaaacttttggaagaaattaaaaaggataaaaagtcaaccttgattgtcagtgaaaccaagttggcaaatgctattaacaagttgggcttaaacttcaacgttgtttccgatgccgttactttagacatctacagagcagttaaagaatacttgccagagttattgccaggtatgtcagacaatgatttaagtaagatgtcattgggtttagcccattccatcggtcgtcacaagttgaagttttcagctgacaaagttgatgttatgattatccaagctattgccttattggatgatttagacaaagaattaacacatacgccatga

SEQ ID NO: 5332 - DNA, 549 bp, Saccharomyces pastorianus
atgaaaatatctattttcccctttaaatcagtggctcatttcaaagaataccaagtcattggtcgtcgtttaccaactgaatccgttccagaaccaaagttgttcagaatgagaatttttgcctcaaacgaagttattgccaagtctcgttactggtatttcttgcaaagattgcacaaggttaagaaggcctctggtgaaattgtttccatcaaccaaattaacgaagctcatccaaccaaggtcaagaacttcggtgtttgggttagatacgattccagatctggtactcacaacatgtacaaggaaatcagagatgtttccagagttgctgccgtcgaaaccttataccaagacatggctgccagacacagaactagatttagatctattcacatcttaaaggttgctgaaattgaaaagaccgctgatgtcaagagacaatacatcaagcaatttttgaccaaggatttgaaattcccattacctcacagagtccaaaaatctgctaagactttctcttacaagagaccatcaaccttctactaa

SEQ ID NO: 5333 - DNA, 1029 bp, Saccharomyces pastorianus
atgtcagctaatcaaattagaagcgaatttaatacaaatcctgtaaaagatacaacagaacaagaaaaaatggggagtctcgagcttgataaagtacacaaaaacccaatcgaagccagtcagcctttacaacaacaagaagatgtaaatgaaaatattaacgacgttcaaagcaataaagttaaaagaggtaaattaaaccttaaaactgttgatcatgtgggggcctacccactaatacaacaaacagaggaggtagcaaagaaggtagctattacaaggattgttttagctcagacaaagcctggtattgataaggtaataatttcaaagcctgttcaaactgtagccccagtcattaactttttcgataaagtggctaactcaactctaaacaccgtagaacgcgttgttccatctttaaaaaccaaaacttatcaaaggttaggtgaagaaatagcactaccatatactctaacaaagaagtatggaaagcaattcaaggacacaactacaagaaccggagacaactacgtttaccagcctgtccatggaaggttggtaaaattcagaaagtactataatgaaaaatatatagacacaaaaggcaagcctttaataagaggacaccttgatcctgttttactaccagttaacaatgcatttgaaaaaacaacggtgagatatctacccaaaggtcaaaaggttccaagtgatactttttgctgcgagtttaatagagggctagccttggattacaatttcatgacaagagcaatctctgctgtcggtcaccaggttgttgatgttgcaaaattaccatttgcttacggatgccatgccaactctgtttataataaaaatctagacaaacaagaagatttaagaatgagaaatgttttgaaaggtacctgggggacggtaaaagatctagaacatgagttttgggtttctgttaccgataagagcttatttagatttttcgctaccaaatcagaggaggaagatttaccacgtttagtacaatag

SEQ ID NO: 5334 - DNA, 780 bp, Saccharomyces pastorianus
atgactgaaggatataacgattaccacaatattgtaagccccggcttaagcttcgataatgactgcttttcggaacatgaatcggttagtccattaagtgacatatcttcaataatctccacatctcctgatgttgaaaagctcgattctatagatcctttcggcgttgacccttttgtctggaattgcaaacctcttgtcaataaggaagcattggagttacataggatgattcattcttcatttcctatgaaccccccaaaatcaaataatgacaccccattactattaccaatacaaaaagacagacagtctccaattggcagtcctacttttaaaccaagcaaatatgagccttctcaccggttgctgaagcccaaaaaaccaattctaacgatacccaccaaatctctcaacctcatagtgagttcatcacgaggctcattaaatgatgccactatttttgctaccgagataaattcatccatgagtagtgaagaaaacaaattaccaacaatttctactacctgggaaaagcttacaattccagtaaattcttcaatcaaggaaaaatacaagaagctcaaggaccaactttatgggcataacagtaattttggtgaagatgaagaaaacgaagaggaagggcttcctgatgcggcggtaataagaggttacgaattcgagtcagaaagttgcgacgatcaaaagttaagcagcgaactggagactacgaaagactataaaaaagtcaaatgggcaccagttttggaacaataa

SEQ ID NO: 5335 - DNA, 747 bp, Saccharomyces pastorianus
atgttgattggttacggtttaactgaaacttgtgctagtaccactatcttgaaccctggtcatttcgaattaggtgttgcaggtgacttgactggctgtgtcactgtcaaattagtcgacgttgaagaactgggctattttgctaaaaataaccaaggtgaagtttggatcaaaggtgccaatgtcacgcccgaatactataaaaacccagaggagacttctcaagctctaacttccgatggttggttcaagactggtgatatcggtgaatgggaaaaaagcggtcatttgaaaattattgataggaagaaaaacctggtcaaaacaatgaatggtgaatacattgcccttgaaaaattggaatctgtttacagatccaacgagtacgtcgccaacatttgtgtttacgccgaccaaacaaagaccaaaccggtaggtattattgtcccaaacaatgctccgctgacaaaattggccaaaaagctaggtatcatgaaggaagatgaaagctcgatcaacattgaaaactacctacaggagccaaagttggttaaagctgcctattccgatcttttgaagaccggcaaagaccaaggtttagtcggtattgaattgctagcgggtatagtattctttgacggtgaatggactccacaaaatggctatgtcacctctgcccagaaattgaagagaaaagaaattttgaactctgtcaaagatgaagttgacgccgtttacggctcttaa

SEQ ID NO: 5336 - DNA, 1242 bp, Saccharomyces pastorianus
  modified_base (1127)..(1127): a, c, g, t, unknown, or other
atggttaatcaatatagcgtgccagttggcccagccgccaacgagcacgaaactgctccaagaagaaactgccaatctgctcaagagccgcttgtaaggccgcctaatacgaagtgctccaccgtatacgagttcgcgctggagtgtttccagaagggtaaaaatcacaatgccatgggttggagggacgtcaaggaagtgcatgaagagtctaagacgataatgaagaaagttgacggggaggagactccagtggagaagaaatggatgttctatgaactttccaaataccaatataacactttcgaccagttaaccgatattatgcacgatgtcggtcgcgggctggtgaaaatggggttgaacccgaatgctgatgacaaactacacctgtatgccgcgacttctcacaagtggatgaaaatgttcttgggtgcgcagtcgcagggtatccccgtggtaacggcttatgacactttgggtgaaaaggggctgatccattctttggtgcaaacggggtccaatgctatatttacagacaactctttgctagcatctttgattaaaccggtccagtccgcccaagacataaaattcataattcatttcgactccatcgatcccgaggacaagagacaagacggtaggatataccagtctgccaacgacgccatcaacaagatcaaagaagttagacctgacatcaagaccttaagtttcaatgaacttttgaaattgggccaaaactcccgtaacgaaatcgacattcatccacctagtgcggatgacctttcttgtatcatgtacacctcaggttctacgggtgaacccaagggtgtagttttaaagcattcgaacgtcgttgcaggtgtgggtggtgcaagtttgaacgtcaccggcttcatagataccaaggaccgtgttatttgctttttgccattggctcatatctttgaattggtgtttgagctattatccttttattgggggtcctgtattggttatgccaatgtcaaaactttaaccaagaactctgtgaagcattgccaaggtgatttgcaagaattcaaacccactatcatggtcggtgtcgccgccgtttgggaaacagtgagaaagggaatctntaaccaaatcgacgatctacctttcctcaccaagaaaattttttggactacctataatgccaagctaaacatggaacgtttccgtataccaggtggtggaatcttgggtaattaa

SEQ ID NO: 5337 - DNA, 1533 bp, Saccharomyces pastorianus
atggtgggtcttttcatcattaccgtggtaggtacttatactatagttgaattgtggaacctattaactgaaaaatctgtatcctggaaagcttacatttaccattggttggcaagaatttttggattaatcgttatacccgtttttgtgtttctattgtgcttcaagattcatttcgatttgctatacaactcaggtccaggcgactataccatgccatcgttattccaagctagtctgaatggcacaaccgtaggcaagggaccccgtgatgttgccctaggatcttctatcatctccatcaagaatcaagtgttgggaggagctttattacactcccacgttcagccatatccagaaggctctgaacaacaacaagtgaccacctatggttatggtgatgccaacaatgaatggttcttccaaagagttaggggcgctgcaccctggactgaggctgaaaatgctacactagaatttgttaagggcggtgaaatgtataggataatgcatcgcctcacaggtaagaatttgcacacccatgaaatccctgcacctattgtaaagagcgaatgggaggtttctgcttatggcgacgttgatcttggcgatcctaaggataattggatcattgaaattgcggagcaagtggggaatgaagatcccacactgttacatccgttgtctacgtctttccgaatcaaaaattctatactgggttgttatttggcccagtcaggtaaaaatttgccagaatggggttttagacaaaaagaagtagtctgtttgaaacatacctccaagagcgataagagaacatggtggaacattgacactcacgaaaatgaattgttgcctgaaccaaaagattttgtatacccgaaggcctcatttttaaaaaacttcatttatttgaactcagcaatgatggcaacgaataatgccttggtaccaaaccctgaaaagttcgacgctatgacttcatctgcttggcaatggccaaccttgaatgtcggtgtaagactatgtgaatggagtgaaaaatccgttaaatactttttgttaggatctccaggttctgtttggccctcaagcattgcagtctgcgctctaataatacatatcacgttcttgattttaaaatggcaaagacaatgtgttgtcctacctgatccaattaaacgtgacaagttctttatggccgctttttacccattgctcgcatggggtctgcattttttgccatttttgatcatgtcaagagtcgtttacgcccaccattatttgcccactctttactttgcgctaatgatcctaacgtactattttgatacaattaccaagcgctggactattactaatacgggcagatcactgaggattggggcttacattgcgtacggatcattggttatcgctgggtttttttatttctctccatttagttttggaatggacggccctatggaagattacgcttacttggcatggctaccttcgtggcaagttgtcgaagatatacgtaacacatag

SEQ ID NO: 5338 - DNA, 702 bp, Saccharomyces pastorianus
atgccgtacagagtggcgactggctatagtgaaaatgtcacagacgatgatttgaaatggagaaggccaatgttgaaagaggaattcgagaaccatgacaatttctggatggatgaggccaacctaaatgaaaaaaataaaaaggggcaattagtgtcccgcttggaacctatagtcatgcccattgtttttacgctactggggatgttcactagaatgtataagattgggtttaatgaccatgtagtttgggatgaagctcattttggcaagtttgggtcctactatctgagacacgagtattaccacgatgttcatccgcccttagggaagatgctagttgggctctctggttatttggctggctacaatggttcttgggatttcccatctggggaggtctaccccgacaacatcaactatgtcaaaatgagattgtttcaagcaatgttctcttcactatgcgtacccttggcatattttacggggaggactgtcggattttccaggctgagcgtttggctatttaccacgttagtagctttcgaaaattcctatgcaactttaggtagatttatccttttagattcaatgctccttttctttactgtctcttcttatttttgtctagccaagttccataccatgagaaatttccattttctggcagatggtggctatggttatgtcttactgggctga

SEQ ID NO: 5339 - DNA, 1434 bp, Saccharomyces pastorianus
atgatcgtaaaggcgttggtagaggaagtaagaataacaagaacaagcggaagcagtataaagatgtccaactcgcagcagatagcccagaacgcccgtaaggctgggaacattttaaagaccatctccaatgaaggaagatcagatattctatacaaaattcacgatgctttgaaggctaatgcacatgccattgaagaagctaacaaggttgatttggcaatcgccaagcaaaccagtctagcagactctttattgaaacgtttggatctattcaagggggacaagttcgatgttatgttacaaggtgtcaaggatgtcgccgacctggaagaccccgttgggaaagtgaaaatggccagagaactagatgatgggttgaccttgtaccaagtcactgctccagtaggtgtcttgttggttatctttgaatctcgtccagaagttattgctaatattactgctttgagtatcaagtcaggcaatgctgcaatcttaaagggtggtaaagaatctgtcaacactttcagagaaatggcaaagattgtcgataataccattgccaaataccaaagtgagaccggtgttcccgttggttctgtacaattgatcgaaaccagacaagatgtttccgatttgctgaatcaagacgagtacattgatctagttgttccccgtggctccaacgccttggtgaggaaaattaaggacaccaccaagatccctgtgttaggtcatgcagatggtatttgctcaatctatttggacgaagaggccgatttggccaaggctaaaagaattagtttggacgccaaaaccaactacccagctggttgtaacgctatggaaacgttgctaattaacccaaagttacctaagtggtgggaagtcctggaaaatttaactttgaaaggtgacgttaccgtccacgctacaaagggcttgaaaactgcttacttcaataaactaaatgaacatggtgcattgacagaagcaattcaatccaagaccgttgatgctgatgaaaaggtggattttgatagggaatttttatccttagatttagctgctaagttcgttggatccacagaagaagccattcaacacataaatacgcattcttcgagacataccgatgccatagtaacggaagacaaggtgaatgctgaaaagttcatgaaaggtgttgattcatctggtgtctattggaacgcgtcaactagatttgccgatggtttcagatacggttttggtgctgaggtgggtatctctacctccaagattcacgctcgtgggccagtcggtttagaaggtttggttagctatcaatatcagataagaggtaacggccaagttgcaagtgactacctaggtgctggtggtaacaaggcatttgttcacaaagacttggatgtcaagatgatctcattgtga

SEQ ID NO: 5340 - DNA, 4692 bp, Saccharomyces pastorianus
atgattctgcgattctcgcattcaaacccgagtttgaatgaacgcgatgcctgttcgtcagagcatccgactagcgagacgcatccttacgaaggtctcgatgaggctgcccagaaagaaatcagagaactagcacgaacactaacgagccagtcctcactgctatctcaggataagaacgttgctagggtaggagacccgaatacgataagtgcagcgtgttcttcctcttccaaagagtccgttttcgctaaagacatcaaaggtgtcaaccctgtattgttgaatgtcaacgatcctggctacgacgagtcgctggaccctcggtctgacaacttctctagtgtaaggtgggtgcagaacatggcccaggtctgtgaaaatgatccggatttctataagccattttcgttgggttgtgtgtggagggatttgagtgcttccggcgactctgccgatatttcttaccaaggaacatttagtaacatgcccgtcaaattgtttaagctggtttggagatgcatgtctcgtcgtattttctgcccggaagacaataaaaatatgaaagatagttctacttttcagatcctaaagcccatggatggctgcattgacccgggggaacttttagtcgttctcggaagacctggtgcaggttgcaccacgctactgaaatccatctctgtaaacactcatgggtttaaactctctccggacaccaaaatttcgtacaatgggttttctaccaaggaaattaaaaacaattatcgtggtgaagtggtctataatgcggagtcggatatacatgtcccacatttgacggtgtttcaaaccttatacaccgtggcaaggttgaagaccccaagaaaccgaatcaagggtgtggagagagatacgtttgccaaacacaccaccgaggtggcaatggctacttatgggctatctcacacaagaaacacaaaggttggtaatgatttcatccgtggtgtctctggaggagaaaggaaaagagtatccattgctgaagtgtccatatgcggctcgaagttccaatgctgggataacgccactagaggtctggattccgcgactgcattggagttcatcaaggctttaaagacgcaggcctcaatcacaggttccgcggcaactgtcgccatctaccaatgctctaaaaatgcttatgacctgttcgataaggtttgcgttctttacgatggttaccaaatcttttttggccccaccaagctggctaaacaatacttccaaagaatgggctacatttgtcccgaaagacagacgactgcagactttttaacttctattacaagcccttcagaaagaatcgtggatcaggacatggtcaatcacggaatcatgatcccgcagacagcctgtgaaatgaatacgtactgggtacgttcagaagaatacaagcgattatcaatacaagtgagcaaccacttggataaagattcctccctgcaaagagaacaaatgaagaatgcacatattgccaagcaatctaagagggcaagaccttcttccccctatacggtgagcttctttatgcaagtcaaatacttgttgtatagagatttttggagaattagaaacgacccaagtattcaattgttcaccgtcttgagccatgcaataatggctttaattcttggttccatgttttacaaagctatgctttcctccactacagcgacattttatttccgaggcgcggctatcttttttgccatcttatttaatgcattctcatcacttttggagattttctcattgtttgagacaagacccatcacagaaaagcataagacttattcactctaccgtccaagtgcagatgcgttggcttctacgttttcagaggtccctacaaaactgattacggcaataacttttaatatacctttctattttttggtcaacctaaaaagagatgctggtgcgtttttcttttactttatgatcactgttgtgaccgtttttgccatgtcacatttgtttagatccattggctcggtatcaaaaactttgccccaggcaatggtccccgcatctctgcttttactagctatcgcaatgtacactggattcaccatcccaagaaccgaaatgctaggctggtcggaatggatttcatatatcaacccgttagcttttctttatgagtcgctaatggttaatgagtttcatagtagggatttcccatgtgctgaattcatacctagtggttccaattatacgaatgcaacaggtaacgaagtaatttgttctactctcggagctgtaccaggtaatacttatgtgaatggtgacgatttcattcaggcaagttttggataccagcataaacataaatggcgaggatttggtatcggattggcttatatcatattttttttatctctttatcttctgatatgtgagtataatgaaggtgcaaagcaaaacggcgaaatactagtgttcccacatagcgtggtaaaaagaatgaggaaaaggggtcaaacgatggaaggttcacctccgacaacgacacttggtactgagaaggacctggagatgaatagtgattcaagtgtcactgataaaaggttgttgcatgattcagattcagcggtgattggaaatagtggtgctatagcaaagcaaaaccccccttcgacgtcttcttcatcatctccgtcctttggaaatagctccagtaaaagcaatgagattgaattatctaaatcgcaagcagttttccactggaaaaatttatgttatgatattcagatcaaaaaagaaaagagaaggattttggacaatgttgatggttgggtccgacctggtacattgactgctttaattggtgcatccggtgcaggcaagacaactttgttagactgccttgcagaaagaattacgatgggtgtaattacaggtgatgtgtttgtagatggaagatatcgggatgagtctttcccgagatcaatcggctattgtcagcagcaggatttgcatttgaaaactgctactgtaagagaatcgttaagattttctgcatatttacggcagcctgataatgtttccattaaggagaaaaacaaatatgtcgaagaagtcataaaggtactagagatggaattatacgcagacgctgttgtaggagaacctggtgaaggcttaaatgtggaacaaagaaagagattgaccattggtgtagaactagccgcgaaacctaaactactggtgtttttagacgaaccaacgtctggactagattctcaaactgcatggtcaacctgccaactaatgaaaaagttgaccgctcgtggtcaagcaattttgtgtactatccaccaaccatccgcccttttaatgcaagaatttgacagactattgtttttacaatctggtggacgaactgtttattttggagaactaggaaaaggttgtaaaaccatgatcaagtactttgaagcaaacggtgcacataagtgccctccggatgccaatcctgctgaatggatgttggaaatagtgggtgcggcaccaggaagtcacgccaaccaggattacttctccgtttggagaaattctgaagaatataaagaagtgcaaagggaattggattggatggaaaaagaattgcctttaagaacagaaagttcatcaaatgaggagcaaagggaatttgctacttcaacgttttatcagatcaagttggttagtttccgactattccaccaatgttggagaacgccattctacttgtggtccaagtttttcttagcagttgtgtgtgaactgtttataggctttactttttttaaagcaagcgcatctttgcaaggcttacagaatcagatgttggccatttttatgtttactgttgttttcaatccattactacagcaatatctcccactctttgttcagcagagggatctttacgaagcaagggagagaccatccagaacgttttcttggaaagcatttattgtgtcgcaaattctcgtcgaggttccttggaatttactagccggaacgttagcttactttgtctactattatcctgttggattttacgagaacgcctcctatgcaaaccaattgcatgaaagaggtgctctattttggttgttcgtatgcgcatttttcgtttatatcggttcaatgggcctattagtgatttcatgttttgaaattgctgaaaacgcagccaatatcgcatcagtactgtttatgttgtcgttatcattctgtggtgtctttgctactccaagtgttctaccaagattttggatcttcatgtatagagtgtcaccactgacttacctcattgacgccttgttgtctgttggattggccaatgctagggttgtctgttcagagaaagaactcttgactatgattccacctagtggtatgacatgttcagaatacatggacccttacatccaatctgtggggacaggataccttgttgacgggagctcgatgaccgaatgccatttctgtcgatttagttacacaaatgatttcctggccaccgtaagctcctcgtattctcataggtggaggaattatgggatttttagtgtttacattgtctttaactattgcgctggaatatttctatactggctggcaagagttccgaaaaatagcaaaaaattaaaaaaatga

SEQ ID NO: 5341 - DNA, 3801 bp, Saccharomyces pastorianus
atgggcagcacgatggttaggtctaaatggttggtgcaagttgtgcggcggctgccgccgccgccgtgtttgcggtggtctcgccgctgctacgccacgaagaagagcagcgcagaggcccccagaatcaatcccgtggggattcagtacttgggtgagtcgctgcaccggcaggtgtttggcagtggtggaggtggtgaggaggctgatcatggtgacaaacttatagagctgtcgaagcagtcgctgagggaccacggtttgtgggggaagaagacgctcatcacagagccaatagcgtttcccctgcccccgctgcagggtcaatcgctggacgagcacttccagaagattgggcatttcaattcagaaccctacaagagtttttgtggcgacaagttcacacaaatggtgcctcgaccggcgcaatggcttcgccagcccggctgggtcaagtacgttcctggagcggctcctgtcgaggtgccgtatccggacgaagagctggttgtgttcgacgtggagacgctgtacaatatctcgcactatccgacgctggccacggccctgtcgtcaacggcatggtacctgtggtgctcgccattcatatgtggcagcgaggaccctgctgcgctgatacccatgaacacgttgcggaaagagcaggtcgtcattggccacaacgttgcgtacgacagggcacgggtcctggaagagtacaatttccaggactcgaaggcctttttcttggacactcagtcactgcatattgcgtcgtttgggctttgttccaggcagcgtccgatgttcatgaaaaataacaagaaaaaggagacagaacaagagacagaagcgcagtcggagatctccatcgaagattacgacgacccctggttgaacgtgtctgctctgaactcgttgaaggatgtagcaaagtttcactgcaaaatcaaactggataaagccgatagagatttcttcgcagcaacggacaaatcgacgataattgaaaacttccagaaactggtcaactattgtgcgaccgacgtaacggccaccagccaagtgtttgataaaatcttccccgtttttttgaagaaatgcccccatcccgtttcgttcgcaggtctgaaatcaatgagcaagtgtgtcctacccacgaagttgaatgactggaacaagtacttagacagctcggagtccctgtaccaacaatccaaagtggaaatagagtcaaagatcgtcgaaattatcaaggacattgtcctcttgaaagaccaacctgatacgtatcgcaaggacccgtggttgtcacaattggactgggcatccaaacctttgagaatgaccaaaaagggcgttcccgcaaagtgtcagaaactccccgggttcccggaatggtacaagcaacttttcccttcaagggacaccatagaaccgaaagtcactatcaaatcaagaatcattccgattttattcaagctgtcctgggaaaactcccccgtgatctggtcgaaggaatctggatggtgctttaaagcatcgcaggaccaagtagaagcgttcaaggcaaaaaactatgtcttagcagatagtgtatcccaagaagaggagcaaatacgatcgcgagatcaaggatcgtcatcattatcaacctcgacggacgttcttttcaaagtgcctcaccccaatggacccgattttaattgcacaaatctcttgacgaaatcgtacaatcattttttcgaaaagggcgtactgaagtcggaatcggaattggcacatcaagctttacaaatcaactcttccggttcatattggatgtccgcaagggaaagaatccaatcccaattcgtcgtgcccagctcgaaattccccagtgaattccgctctttaagagcaaaaccattaccaaatagtgcttcggcagatgacattgcaataattataccaaaaattgtacccatgggtaccgtcactagaagagctgtggaaaatacttggctgactgcgtccaacgcaaagttaaacagaataggttccgaattgaaaactcaagttaaggcgcctccaggttattgtttcgttggcgcagacgtggatagtgaagaactgtggatcgcatcgttagttggagattccatttttaatgttcacggtggtaccgccattggttggatgtgcttagaaggtactaaaaatgaaggtacagatttgcatacaaagacggctcaaatcctgggttgttctcgtaatgaagctaaaatcttcaattacggtagaatttatggtgccggtgctaggtttgctagtcaattgttgaaaagatttaacccatctctcactgacgaggaaacaaaaaaaatcgctaataaattatacgaaaatacaaagggtaagacgaaaagatcgaaacttttcaagaaattttggtatggtggctccgaatcaatcttattcaataaactagaaagcatcgccgaacaagaaactccaaggactccggtcctaggttgtggtattacctattctctcatgaagaagaatttaagggcgaattcctttttaccttcgagaattaattgggctatccagtcatctggtgttgactatttgcatttgctttgttgctctatggaatatatcatcaagaaatacagccttgacgccagactctgtatttccatccatgatgaaattagatttttggtcagtgaaaaggacaaatacagggctgctatggctttacagattagtaatatatggacaagggccatgttttgtcaacaaatgggtataaatgaactaccgcagaactgtgcctttttctcaatggttgatatcgattcagtcatgcgtaaagaggttaatatggattgtatcacaccatcaaacaaaactgccattccacatggagaggcaattgatatcaatcaactattaaccaaaccggatagtgcgttgggcgatccaaacactgaaatcgatagccaagtatcacaatacacatacacattcagagaacctgtattcgaggagtacaataagacatacacagcagaattcctaaaatattttctcgcaatgcaagttcaatcagataagcggaatgtcaatcaactggaagaggaatacctgcgggagtgtacatccaaagaatacgctaaggatggcaacactgcggaatacagtctttcagactatctacaggatgtgaaaaagggcaaaagaactaaaatacgtatcatggggtctaattttttagatggtaccgaaaaggctaataccagccgacgaaccgacccctctgtcaatatgcacgattatggttcgcttcataaaattgctaatgattctataacgccccaagagcaacttgtgaaggacaaggaaagggagaaaaaggtagacggttcaatcgaagagaacaagaggacattgacgaagaaaaagaagactacatccatggacaggaaatacaaacgagtttatggtggcagaaaagcatttgaagcgttttacgattgtgcaaataagccactggactacgctttagagaccgagaagcaatttttcaatattcctgtagatggggtaattgatgatgttctgaatgacaagactgactatagaaagaggccattgcgagcaagggcaacatcatcatcaacacgcaagaccgcaaaggaagcaccactaaaacaacaatcggtacacaaaccaaacaccaaaaaaatgggtgtacttgaactggaaagggacaatactttaccaaagggtaatagccaaaaactgcattag

SEQ ID NO: 5342 - DNA, 297 bp, Saccharomyces pastorianus
atgagcgctttgatatgtagcaagttgataacgatgcagtccggcttgcacatgatggtcgggataatatcgatggaggagttgtcaattttcctcaaatctctggggaaaagcgagtgctcagttaaaaaggaccatttggagaacttctcagacattgagatgatgttcccctcggaattgaacaccgtgcatgaaatgaacagcgagtcggaaggtgagatgggcttcaacgacagcaactgcttccgcaagatggtcccattggtctttgcagtggtggccgtatcagaatag

SEQ ID NO: 5343 - DNA, 1587 bp, Saccharomyces pastorianus
atgttcctcttccttggtgcagcccagtatgcctttttttactcttttttttttttttttttttttagttttttttttggcagcattattagaacaatagggctcaagatcgcacctgagtccccattattaccgtgtacgccttcaaaagaaagccggtcttccatcaagcatctcatgagtcggcgtctactggtgcgttccatatctggttttaaactgctgtcgagaataactcttgcgaggcctttcagagcgttccccaggcactattctgatacggccaccactgcaaagaccaatgggaccatcttgcggaagcagttgctgtcgttgaagcccatctcaccttccgactcgctgttcatttcatgcacggtgttcaattccgaggggaacatcatctcaatgtctgagaagttctccaaatggtcctttttaactgagcactcgcttttccccagagatttgaggaaaattgacaactcctccatcgatattatcccgaccatcatgtgcaagccggactgcatcgttatcaacttgctacatatcaaagcgctcatagagcgggacaaggtctacgttttcgatactacaaacccatctgcagctgcgaaattgagtgtgctcatgtatgacttagagtctaagctgtcctccaccaaaaacaactctcaattttatgaacatagggccctagagagtattttcattaatgtcatgagcgctctggagacagatttcaaactgcattcacaaatctgtatccagatcttaaatgatctggaaaacgaagttaacagattaaagctaaggcatcttttgatcaaatctaaagatcttacgcttttttatcaaaaaacactattaataagggatttactagacgaactactggaaaatgacgatgatttggcaaacatgtacctgaccgtaaaaaagtcccccaaggataatttctcggacttggaaatgcttatagagacttactacacccagtgtgacgaatacgttcaacaatcagaatctctgattcaagacatcaaatctacagaagaaattgttaacatcattctggatgcgaatagaaattccttgatgctgttagagttgaaagtaaccatttacacattgggatttaccgtagcatccgtcctacctgcattttacggtatgaacttgaaaaacttcatcgaggaaagcgaatggggctttacatccgttgtggcattctccatcatgtctgccctgtacatcaccaagaaaaacttcaattctctaaggtcagtgacgaaaatgaccatgtacccaaattcaaccacaaaccctaattctttccccaagacatcaatatccacttctgtatcaagtaaactacgcaaaaggcgaaactggtggaaactgaccaggcaacggctggcaatattgctttacggtagtaactattacaatgccgcgatgtcgaacaacaagggaaataaaggcttcttgaaattgaagaaatttaatatggaaaatgacttgaaaagtaaacaagacagagatatgatttggaaatggttaatagaagataagaagaattga

SEQ ID NO: 5344 - DNA, 363 bp, Saccharomyces pastorianus
atgggtcatgacagcatcttcaaaccaatcaaattccaaaacttaacccgattcaaaaagatttgtcaattagtaacgcaatgggttgccgaaactttgggcgagggaggaccacatgagaaggatgttaaattatttgtgaagtatgtggtcaaactttgtgactctaatagagttcatttggttcttcaattatcgaatctaatatcaagagaattaaatctccgagcctctttaaaccaggatcgtactggcttccaaaaatgggaaaaaatcctactcagtgttataattccacttttaaacagaaataaacacacatttcaaactgtacgcaaactagacatggactttgaaatatga

SEQ ID NO: 5345 - DNA, 2568 bp, Saccharomyces pastorianus
  modified_base (880)..(926): a, c, g, t, unknown, or other
atgagtgaaaacgatggtcttgtagacttactggatagtgatttagaatattctgtagaaaaagaaacccctgtgaagcatagtattactcaatcaagctttaatgactcgcacttaacttcaaaaactggcggcacaaatgcaaagtcgtttctctctttattaagtgatgattcgttgatcgaatatgtcaacgaattatccagagcgaataagaacaatgcccatttgatcaccggtaccccaaaatttgttactcaaaaggttgactgtgaaaatttacatacagaccttgaccgtcacgaagacttgctcatcgctcagagcaatatcgaagttaaaccaaatgataacagtgaaaatgagatcgataagaacaaagtgtatagtagggaaacctactttcaggacaaggcgcaaggacaaagtgtacaagaccaaatattaaaaaatcaatataaaggcctaatttccagtcaaaattgtaacttgttcaaaaattgtgtcatctatataaatggctacacaaaacctggtagattacaactacatgaaatgatagttttacatggtgggaaatttttgcaccatctgtccgcaaagaaaagaattactcatatagtagcttccaatttaccattgaagaaaagaattgaatttgcaaattacaaggtagttagtccggattggataactgaaagtatcgaaaaaggaagattattgccttggcaaaattattctttaacagcccaacttgatgaacaacaaaaaaaactggataattgtaaaacggtaattcctttcccgcctgagataaactctaatagaacacctgcttatgttagctccgcgttactgccaataaaaccatcatcatcgnnnnnnnnnnnnnnnnnnnnnnnnnnnnnnnnnnnnnnnnnnnnnnntccggactttctcaattcttattttgctcactcgcgcctacaccatctttctacatggaaagccaatctaagaagtaagtttttgaacgaaaacattaacaactcaatcaggatcaccaacaaggacacttacacagtatttcatattgatttcgattgtttcttcgcaactgttgcatacctttgtaggagcgcttgtttcctatcatgtgattttgagaaagatcctatagtggtgtgccatggtaccaaaaattccgacattgctagttgcaattatgtggcaagaaagtttggaattaagaatgggatgtgggtgtcacaagcagagaatctgctaccaaacggggtcaaactaatttcactaccatacaattttgagcaatttcagtcaaaatccgaagccttttaccgaattctcaaaaacttaaacatttttgacttgataatacccatatcgattgacgaagctgtgtgtgtaaaaaaaactccaaatgatatcccgaatagttacatctcaaattccgagatgtgcaaggaaatacgccgcgaagtttttaaagagaccaatggttgcacggtaagtattggatgttcagattctttgatgctagcaaaattaactctgaaaatggggaaaccaaatggttataacattacattcagaaacgatatttcggagcaattttggtctaatttcaaactggatgatttacctggggttggatattctgttctttcaaaattagaatcaacgttcaataatccatcttttttgagtgatttgagaaaacgttatactctagattctttgaaggcaagtgtaggttccagattgggtatgaaaatacatcttgcactacaaggccaagatgatgaagaaagtttgaaaatgctatatgacccgaaagaagtcttacaaagaaagtcgttatcaatcgatatcaattggggtatcaggttcgaaaatatagctcaagtagactcgttcatcgaaagaggctgtcagtacctgctaatgaaattaaatgaaatcaacaaaaccacatcacaaattacactaaaactcatgaaaagatgtaaagatgctcctattgaacctccaaaatatatgggtatgggaaggtgcgattcattcagccgaggcagcaaattaggtattccaacaaatgagtttggaattatcgctacggaaatgaaaagtttgtatcgaagtttagcttgccctccaaaggaattaagaggtgtcgctttacaattcaacaaattggtcgatatggattccggcaacaaccagccaaaactgagactaccatttaaaacgattgtgacaaataaagcatttgaagatttaccagaagatgtgaaaaatgacattaacaatgaatttgataaaagaaattatatgaaaaacgaatctgggttagcttctaatataccaagttccaaaaagaaaaggagtatatatttgaaaacatcaaacagaaacgacttgcccagcactgtggaagaacaattcatgaatgaattaccaacgcaggttcgagaagaagtgaggaatgatttgagaattcaaaaaaaatccatcagacgaaattgggaaacttacaagaaaagatcaaaagaagggaagaaaacctga

SEQ ID NO: 5346 - DNA, 1566 bp, Saccharomyces pastorianus
atgccaaagacgcaatcggccccaagtacaccaacaccaacattaatgtcagaatcaagattgcagagactagccaacctgaaaatagggaccccgcaagagcttagacggacctctattataggcaccatcggaccgaagacaaatagctgcgaggcaatcaccgctttgaggaaggctgggctgaatatcattcgaatgaacttctcccacggctcctatgaattccaccaatcagtgatcgacaatgccttggaatcagaacagctgttccccggaagaccactcgccattgctctggacaccaagggccctgaaatcagaacggggcgcacctcggacgaccaggacttccacatcctcgtagaccaccagatgatcttcaccacggacgcaaagttcgaacactcctccaatgacaaaattatgtacatagactacgctaatttgacaaaagtaatcgtgcccgggaagttcatatacgtggacgatgggattctgtcctttaaagtgctgcaaatcatggatgattccaatataagggtccaagctctcaattcgggttacatctcatcccgtaaaggtgtcaatttacccaataccgacgtagacttgccccctctgtccgcaaaggatatacaggacttgcaattcggcatgcggaatggaattcacatggtatttgcctcattcatcagagcccctgaagacgtcttgaccattagaaaagttttgggccctgaaggccaggacatcaaaatcatctccaagatcgaaaaccaacaaggtctggataattttgacgcaatcctgcaagtcacagatggtgtcatgatagcaaggggtgatttgggtatcgagatcctggcaccagaagtgctggccattcagaaaaaactcatcgcaaaatgtaatgtggcgggcaaacctgtcatttgcgcgacccaaatgctggagtcaatgacctacaacccaagacccacaagggctgaagtctctgatgtcggaaatgctgtgttggatggtgctgattgtgttatgttgtctggcgaaacggcaaagggcgattacccagtcaatgcggtcaagataatggcggccacagctttaattgcagaaagcactattgcgcatttggctctatatgatgatctcagagacgccactcctaagcccacctccactacagaaaccgttgcagccgctgccactgcagcgattttggagcaagatggtaaagccatcgttgtattatccactacaggaaacacagcaaggttgctctctaaatatagaccaagttgtcctatcatactagtaacgaggctcgcaagaacggcaagaatcgcacatttatacagaggtgtttttccatttgtctttgagccaaaacgcttggacgactgggctgaagacgtgcacagacgcttaaagtttggcgtggaaatggcgaggtcttttggaatgctcgaaagtggtgatactgttgtttccatccaaggtttcagaggcggaatcggacattcaaacaccttgcgtgtttctactgttggtgaagagttttag

SEQ ID NO: 5347 - DNA, 1536 bp, Saccharomyces pastorianus
atgataggacgaaaagataacagggaaagcgagggccaaatggaaccgtttggcagttacaatcttacaaccaaagatggtcttcagatggacacgaccggtgtagctgctgctcatttggaagttaacgtgggcggttgtcgcacagaacaggtaatacccatactgaagcatcaactcgtaaaggtgggaaggaataacaaagaatgccagcttgttttgacacatccgtcaatttcttccattcattgtgagttctggtgtgtattttttgatgaagatagcattcccatgttctatgttaaagattgttctttgaacggaacatacttaaacgggctgcttctgaaaagagataaaacgtaccttttgaatgattctgacaccattgaattatctcaaggaaatgaagaaaacgaccataaaaaaatacagctggtttttatgatcaatgacgatttacagtcctccatggacccaaaacttttggatcaaatgggcttcttgagagaaataaatcaatgggaaataacaaataggatagttggtaacggtacttttggtcatgttttaattacacataactcaaaggaaagcaacgatgatatttgctatcatcctgataattatgctgtcaagattatcaaactgaaaccaaacaagtttgataaagaggccaaaatccttttaagattggatcatccgaacattattaaagtctatcatactttttgtgacaggaataaccatctttacatttttcaggatttagttcctggtggtgacctcttttcttatttagccaaaggcgattgtttaacttccatgtccgaaacggaatcattaataattgtctttcaaatcttgcaagcgttaaactatcttcacgatcagggtattgttcatcgtgacttgaagctagataatattttgttatgcacccctgagccatgtactagaatagtcttggccgattttggtatagctaaagatttgaactctaacaaggagagaatgcataccgtagtagggacaccggaatactgtgctcccgaagtgggatttagagcaaacagaaaagcctatcaaagcttctcaagagcggctactttagagcaacgaggttatgatagtaaatgtgacctatggtccctgggtgttattacacacattatgttaacgggtatttctccgttttatggtgatggttctgagagaagtattattcaaaacgcaaaagttggcaaactaaactttaaattgaagcaatgggatattgtttcggataatgcgaagggttttgtcaaagaacttttacaaactgatgtaactaaacgactaaatggtaaacaaagtcttgagcatatttggatcgcaaaacatttaagtcaattggaaaggttgtattacaagaaaatactgtgcaataatgaaggacctaaattagaaagtatgacttcagattggaaaagaaagttacccaaaagtgttgtcatttctcaggtcgtaccaaaaaagaagaaagttttgaagtga

SEQ ID NO: 5348 - DNA, 1587 bp, Saccharomyces pastorianus
atgtctaccctttttttgataggaatgcatgagattgaaaagtccgaaacaattgcacggaaagaagacttatttgatagaatagttgagcttcaagacttggactctttaatgatcaatttgtataaggatagggtctcgcctttccccaacgctcataattttgagactggcgtgtccttggttctgtatgatccttctaaactccaattacctgtgcggcaactggatgttttgttcaagcgatttttcccatcttttaatattagcgcgatagatcctacacacgaggagaatctacagcctcttaaaagcattgggcgtgaaaatagcatctgcggtaacaggataacaaggatcaatcattggatgtatcatcaccatgacgacacttcagacggttttaccaaagcaaatttcggtacgaataatgaaaataccctgccaactcaagcatgccaagcaaatatttatacattattattgcatctgaattattccaaagcacaacatttacaaaaggcatctgtgccaaggttgatacggaacatcgagttcatgtctttcttatcggagccaatagaaaaactttctcaggacaaatcgtattactggaacattttatcgacttggaaattttgtgctttatcgttaagcactcaagaattgatttggtgcgggttcacacttatcaaaaagttatctaaagatgcaaacgtactcattgcagataacaaacttctactattattatttactttggagtcgtcctaccaccaagttaacaaattccataatttcaggcatgccattgatgttatgcaagccacatggcaattgtgtacatatcttcttccggataaccctgtgcatacgttgttattgtgtatggctgccattggtcatgatgttggtcatccagggacaaataaccagttgttgtgtaactgtgaatcggaggttgccgaaagtttcaaaaatgtttccatcctggaaaatttccatagggaattatttcaacaattattatcagatcattggcctcaactgttagctatttcgaagaaacaatttgatttcatctccgaggccattttagcgactgatatggcattgcattctaaatatgaggatagaataacgcgcgaaaagccaatgaaacaaattactttaatatctttaataatcaaagctgctgacatatcaaatgtgacaagaccattgtctatatcagcacgttgggcatacctaattaccttagaattcggtgactgtgctcttttggaatcatttcataaagatcatcgtccagagcaggattgctttggtgattcatataagaacattgatactgcagaagaagatttggactccattcaaaatatgttaacaagtgtgactaatgctgatgacattattaaagaacacccgtatattcccaatggccaaatatttttcatcaatacgttcgctgaagtattttttaaagcattaagtcaaaaatttccaaacttgaaatttttaagcgaaaacgttgaagccaataaagagtattggatgaaacacacaaacaagaaacaaaaatag

SEQ ID NO: 5349 - DNA, 2181 bp, Saccharomyces pastorianus
atggctaccgaaacatttgaagatatcaagctagaggacattcccgtcgatgacattgacttttccgatttagaagaacagttcgaagttactgaagaattcaatttcgatcaatacatcgtggtcaatggtgccccagtcattccgtcttccaaagttcctgttttgaagaatgcgttgaactctttgttctccaaggctggtaaagttgtcgacatggacttcccaattgatgaagccaccggtaaaaccaaaggctttcttttcgtggaatgtggatctgttaacgacgccaagaaaattattaagagtttccatggtaaaagattagacttaaaacatcgtttgttcctctacaccatgaaggatgttgaaagatataactccgacgatttcgaaacggaattcaaagaacctgaaatgccatctttcgtcccatcaagctctttgaaatcctggttgttggatgacaaggtcagagaccaattcgtattgcaagatgatgtcaaaacaagtgttttctggaactccatgttcaatgaagaggattccttagtcgaatctagagaaaattggtctaccaactacgttagattttctccaaagggtacctatttattttcttaccaccaacaaggtgtcactgcatggggtggtccaaattttgaccgtttgagaagattttatcatccagacgtaagaaattcctctgtttctccaaacgaaaagtacctggtcactttctccactgacccaattatggttgaagaaggaaacgaattctctccatttactaagaaaaatgaaggtcatcaactatgtatctgggatattgcaaccggtttgttgatggcaactttcccagtgatccagagcgaatatttgaaatggcctttggtcagatggtcttataatgataagtactgtgcccgtatggtcggagacagcttaattgtacacgacgccaccaagaacttcatgccattagaagccaaggctttgaaaaccactggtattagagatttttcttttgctccagaaggtgttaaattacaaccgtttagaaacggtgatgagccttccgttttgttggcctactggacgcccgaaaccaacaactccgcttgtactgccactattgttgaagttcctcgtggtagagtcttaaagaccgttaatttggttcaagtctctaacgttactttgcactggcaaaaccaagccgagttcctgtgcttcaatgtggaacgtcatactaaatctggtaagacccaattcagtaacttacaaatttgtagactaactgaaagagatattccagtcgaaaaggttgaattgaaggatagtgtatttgaatttgcttgggagcctcgtggaaacagatttgtcacaatttctattcacgaagtcgttgatatgaattatgccattccagcaaacacaattagattctacgctccagaagccaaagaaaaaactgccaagaacgttatcaagaggtgggacttggttaaagaagttccaaaaacttttgctaatactatttcttggtccccagctggtagattcgttgtcgttggtgctttggtcggaccaaatatgcgtagatctgacttacaattctacgatatggactacccaggtgaaaagaacatcaatgacaacgacgatgtttctgcttctttgaaggacgtcggccaccccacctactctgcagccaccaacatcacttgggacccatccggtagatatgttaccgcttggtctagttctttaaagcacaaggtcgaacatggttacaaaattttcaacgttgctggtaacatggtcaaagaagatgtcatcggcggatttaagaacttcgcttggagacccagaccagtttctatcttgcctaattccgaaaagaagaaggttagaaagaacttgagagaatggtcagcccaattcgaagaacaagatgcaatggaagctgacactgctatgagagatttgatcttgcaccaacgtgaattattgaaacaatggaacgaatatagagaaaagactggacaagaaatggaaaaatccatgaactttaagatctttgacatccaaccagaaaacgccagtgatgatttcatcactatcgaggaaattgttgaagaagtcattgaggaaaccaaagaaaaggtcgaatag

SEQ ID NO: 5350 - DNA, 219 bp, Saccharomyces pastorianus
atggttatgttctcattcataattgtttgggcttcaatatcaaagaatattgtattatttaggggaaagaaagcagcttcaaaatacgatgcagaaaattgtgaatttctcacacaagtcaataaagctgacgtcttcaagtatttagtggatatatcgaagggttccgaaaacagttgcgacgcattattgagtagtgtgaatgagttcgaaacctga

SEQ ID NO: 5351 - DNA, 651 bp, Saccharomyces pastorianus
atgaaagggaggtattttaatggtgggcgtacaacgaaaaacttgccaatgagttatgataaaaaagcagacgtcacctctttagatgaggatttgagacaactaaggcaaagcaagttcttacctgaagcgatccaacatattaaaaaatggatatttgaatcagtgctaacagaaaccgccccccctgagcaattactgcagtgcctgaaagatgggacagtcctttgtaaattagcaaacatattgtatgaagcagacacaaaagaagcaaaccatattaatttgaagagctctaaaatgccatttgttcaaatggaccaaatttcccaatttctatcgtttgcaagggcatacggtgtgcctgaagatgaattgtttcagacggttgatttatatgaagataaggacccagccatcgtttatcaaacgttaaaatctttatctcggtacgctaacaagaagcatccagacaggtttccagtcttagggccacaactatcgacgaagaagccaagaccaccagtcaaatctaaaccacaccatctacaatgcagtactggatggagcacctttgagtatggttatatgaaaggcgcttctcaaggaagcgagggcgttgtattaggccaaagaagagatatcgtttaa

SEQ ID NO: 5352 - DNA, 2466 bp, Saccharomyces pastorianus
atgcacacgaatatgaatgagcaggaggaagacctgtcgagccagctgggaaatctaacgatacactcgcccatgaagttacatgcacgctcgaaaatgcacagtaataagggcaaagtgttcaaggaatacgagagtaaccacgacttccacgattcagactttacctcgcaattcgtagagcctacaatatccgagtccgtgaaaaagcctccaacgatgactattttgaacaactatagcacggtcaatcagaaagtgccctcaggattctccggtaccaccgctacatcgcaccaagaggctcaatggaagcactatttccctggaatcggtagtggcactaccaatgttgccgctacagacaaggtacctgagtcggatctgatagtaagcgacctggtcaaggatttatctggtgtgctagaaaccaacacctttaaaaggcacctggatatgaagaacaaaactaccacaacgcaagtgcatgaaaaccaggatactatcaacatctcacattcaaaagatttcttcaacggcgaaaaactgtcatcattttcagatgacagcgattctgggccagcagctgaagcacatgacgtatttgacggtatattaaaaaaacaaaaatcgaactatctgatcgggtcctctacaaacagtaacaaggccaagaagaatggtttcgaacccgatgcctccaattcgttcaatttttcgtcttcgtcatctatgtcgtcgtctcagactcaatccggtggaaaaccgaaattatcgaagaaacccccactaaacaccatatccccgggccaattgggataccagttcaaccatacgcacggtgcatgggacccgcctctaaaccagggcttagacgtgtcaagttcacactctctggacaatacttcttctaatcattcacagttgactacggtggtacctacaagagataccaacacgaaggacaaagcggcttcgattctaaataaaaaggcttatgacttcgtcaccagcaaacgagacaaccaccaagaaaaaaaaatgcaagaagaagatcaggaaaacaacgacgataccccactggacacgccaaaattcaacgatctttttacaagaaatggagccggaacaaagggtaaaaagcaagtgcccagctctcgttctatctccaactccaacctgctggacaaccataagaaacttagaaatttccccaacgaaagggtcgaagatatcacgtcgatttccgaagtggatacttcattcaacgaaactgaaagacaactagtatcgatcttaaccagtaagctgtccagaaccccggctcacgattccaactgggaaaaaatcctgaagtttgacctctccaagtgcaaactgaaaaacgtttttggcctgcaaagactactgccgaacttattgacggtgaacttcaatgacaacgaactgagcaccctagagggaactccatcgggtgtggtgcagctgttctgctccaataacaagatatcaagcgcacactgctcgcttgtggggttcgcggatctggaatgcctggatttatcatacaactacttgaacacaagcctgaaatttctgtcgccctgtcgccacttgcaagagataaacctctcatataactctattcagtcgctagagggaataggcacatcgcgcatcaaaaaactgaacctttcaagcaacgacatccgcggcatcatcgatttcgcgcaactgatccagaccaacaacgccgccatgggcggctggtcgaccgtcgaagtcctggacttaagtgataacaacatcacgggtgtcaggaacatcaactgtctgccccacttgaagattttaaacttgaacggcaacccgctggtctccatcgtcgaagcagccacccacaccgagaactcagcactaagagctctttccatcaaaaacaccggaggcgcgctgtccaagttacaaaactacaagctcaacaaccaataccttttcccctaccaaaacctaaagatactaagagtggagtcattcgcgcaactgagcaaatggcgaaaatggccctcctctctgcaaaccctggagatcaacggcggctcggcctcgtccctgccccactttccctctctaaggcccacaaacctgtattccctaacaatagccaacctcagagatctcacgcaattgcccgtgaatctgtccaacgagctgccgtttctgcaagaattgcggctgccgggaaacaacctacagaacgcccatcacctgacaaactctctcccatgccaatccgtaaagttgctcgatctacgaaacaacccgatcaccacgccatgtgaccgcactagcacaaacctgtacgagcttgccggcctatgccagcgccaatgtcccatgctggtaaccctctggcttgatgacgccccggctccgacctcggctccggccgccacgaacccgtaa

SEQ ID NO: 5353 - DNA, 222 bp, Saccharomyces pastorianus
atgttccaccaatcggaggagaccgaacacaagtatcgtataagagatttggcctttggtcaatttcaagggtcatggcatcaagctttttcattgggtgtttcttcgactaatgtgaagggaatgaacattttgatttcttcaacgaaaaatgtcgtgggtagtcaagaattgttggaggaactttgtgctatgtacaaggctctgcttttaaatccctga

SEQ ID NO: 5354 - DNA, 1404 bp, Saccharomyces pastorianus
atggaaacagaagaaagccaatttagcagtataacaaaaatcatcaatccaaaaactctaatgaatacctacagtgaaaaaacgtctcttgttcaagatgaatgtcttgtcaagatgatacagaatgggcattcccggcgtatgggatctgtggaagatttgtacgctgcactcaacagacagaaattgtatcggaatttttcgacatattcagagctgaatgattactgtaccaaagatcagctcgcattagctctaagaaatatatgtttgaaaaatccgactctcctacatattgtattaccggcaagatggccagatcatgaaaagtattaccttagctcagaatattattcacagccccgtccaaaacatgattatatttcggttttgcctgagttgaaattagatggtgtgattctcaacgagcaacctgagcacaatgccctaatgaagcaaatactagaagaatttgcgaatagcaatggatcttatactgcaaaaatctttaaattgaccaccgctttgactataccttacactgggccaacaagtccaacttggcggttgatttgtctcccagaagaagatgacacgaataagtggaagaaatttatatttgtatccaatcactgcatgtgcgatggtagatcctcaattcacttttttcaggatctaagagatgaattaaacaacataaaaactctgccaaagaaattggactacattttcgagtacgaaaaggattaccaacttttgagaaagctcccagaacccattgaaaatatgatagatttcaggccgccatatttgtttattccgaagtctcttctttctggttttatttacagtcatttgaggttttcttcaaagggtgtttgcacgagaatggatgagatagaaaaaagtgatgagattgttacagaaattatcaatatttctccatcagagtttcaaaaaattagaacgaaaattaaattaaacattcccggtaagtgcaccatcactccgttcttagaagtttgttggtttgttactctccataaatggggcaagtttttcaaaccactgaagttcgagtggctcactgatgtttttatacctgcagattgccgctcattgctgcctgaagatgaagaagtgagagctatgtacaggtacggcgctaacgttgggtttgttgacttcactccatggataagcaaattcaacatgaacgacagcaaagaaaatttctggccacttattgcacattatcatgaagtaatttccggggcgataaaagacaagaagcatctcaatggtttggggttcaacatacaaagcttggtccaaaagtatgtcaacattgataaagtaatgcgtgatcgtgctcttggtaatcacgtgggggcactttgttga

SEQ ID NO: 5355 - DNA, 2058 bp, Saccharomyces pastorianus
atgtatggcaaattgcccttggttatgactgactcatgcatgggagtgtttggtgaagttacctgggagtataccagtgatgctttatacgcctcaccggtatgtacttatgaaccagcattgcaatcgtttttgtattgcatttatgatacattacatgaaaagggtcattcgaataaaacatttgaaaaagcgttagatgctgtcaaagaagactgctcatactatactgatacacttcataatatgactacttctgacttttacgataccctaaacaacggaacgaagtatatggtgcaatatgttgaaggtagtgccaatcttacataccctgttgaaatggatgctcaagcaagggagaatttctatcattcttaccatggtttctacgctaattacgacatcggccatacatatggtggtattatatgtgcctattttgtgggtgttatgatttttgcaggaattcttcattatatgaattatactcggtttaaaactaccctcttcaagcaaaagattgtgagatatgtgaggggatatgctacgttacctactataggaagtaagcatgcgtcagccatttcttatctcaaaatattcacaggctttgtacctacaagattcgaaggtattattattcttggataccttgtactgcataccgtttttttagcatacgggtatgagtatgatccttacaatctaattttcgactctcgtagagagcaagttgctcggtatgtggcagataggagtggcgttcttgcgttcgcacactttcccttaattgtcctttttgcaggaagaaataactttctcgaatgcatctctggtgtgaaatacacctctttcattatgtttcataaatggctgggaagaatgatgttcctcgatgctatgattcatggtgctgcctataccagttatgaagtattctataagtattgggaagcaagtaaggcagaactatattggcaatttggagtggctgcactttgcttagctggtatgatggtttttttttctttggcagtattcagaaagtttttttatgaaacttttttgtttcttcatattgtccttggagcgctgtttttttatacgtgctgggagcatgtagtaacactaagtggtattgaatgggtatacgccgcaattgcgatttggatcgttgacaggcttattaggcttgttagactatcatactttggttttcccaaagcctccttgcagttagttggagatgatattattcgagtaacagttgaaaaaccaacaaggctatggaaagccaaacctgggcagtatgtttttgtgtcgtttttgcatccactatatttctggcagtcacatccattcaccgttttggattcaatcaccaaagatggcgaaatggttattattctgaaagaaaagaagggggtaacaagacttgttaaaaaatatctctgtaggagaggaggtaacgcattgatgagactggctatagaagggccgtacggctcttcgtcaccagttcataactatgataatatcttgctacttaccggagggactggattgcccggtcccattgcccatgcgattaaacttggaaaaacttcagcagcagccggaaaacaatctgtaaagttagtgattgtagttagagggtttgacgtacttgaagcttataaaccagagctgttgtgcctaacagacttgaatgtgcaggttcacatctacaataccatgaaagttccattgttggattcaagcgatagtttaagcacgtctcaaaaggatgaggaaggtgatggaaaaggcggttttgtagaaacaagtctagacaaatcatccagtccctttgagtttgattgtgccgtttttcatcatggaagaccagatgttgaagaagttttgcgtgagtcaacagaactaagtggttcactggcagtggtgtgttgtgggcctcctgtgtttgttgacaaagtaagggaccaaacagcaaaggctgttttggaaaattcatcaaaagcaattgaatactttgaagaataccaaagttggtaa

SEQ ID NO: 5356 - DNA, 864 bp, Saccharomyces pastorianus
atgtttcacctagctcgccaaaaacttactgatgagaaccattataaaattgaaaagacacgaagaaagcaaattcccgaacctcttcattttaacagagaaaggaatttgccgattgccactatatttggcaagagagggtttttcgtattcccaagcgtacaatcttatgacatgttcaaacggacaaacttcaatctcagtgttcttgatgcggatggtgtaggcgttccgctatttcacattgtacaaaattacaacattataggtcaaatcgtggggaagtcatcaaattttactattttcaggtacgttttacaaagagcgcaagacccacctttgtataccaaatgtaaggttatttgcgaagataaggcctttcgtttatgcaagataccattttgtgagatctactctcaattaagtttccgagatactaagtacgaatttttctatccctccagaagtcagtctgttaacaactaccaaatggttaggcaaaataattttcgtgatttggatgtttgtttgaatggtatgaacttccgttggcatgtgaaagttctaagcgatcattaccgattgacgtatctagatgaaaacccccccagcaataatcaaacaaatacacagaagcaatctcaaagaaaaaccgactctcctgattttgtacttggtcactacaaaagagattattccaaccttctccccaggtctatagcaaaagcctccaatcttatcattggagagaattcaagacatgactgccttggtatcagttctgttccagaattgacagagatgcttgcctgccagggagctctagttgaatacttagaacacatagaaaggcgtaataattga

SEQ ID NO: 5357 - DNA, 1188 bp, Saccharomyces pastorianus
atgcctgctgctataagacatgaaaaccgcgagataggaaccgcaacgaaccgaactgctggcagtattcttaacggtggtagtaccagcgctgtagcggcgtctacgccgaagagaaccaagagtgctcgaaggaaaacgttcaagtgcacagggtacgacgggtgtgcgatgtccttcactagggcggagcatcttgcacgtcacataagaaaacacacgggggaaaagccgttccagtgttctgcgtgtttgaagttcttcagtagagtcgacaatctgaagcagcaccgggagtcggtgcacgcacataaacaactccatcctgcggacccacatcagcggaaaccgtcgtcttcgtctatgtcctcgtcttcttctgcgtcttcttcgtcggcgtcctcttccacctcatattcggaccatccttccaggaaaactaataccgccggcaccagtataggaatgatggcggagaacgagaggccgccgcaaatcattcattctccgccggagttcatcactaacgcgagaagcatcccgcccatctcaccaggtgccacctacagcgcgcaacagcagtatttcggcgctacttctccgcaacatcaacagccgccggcggccttctactacccgtcccacccggccgccttagacagctactaccagtatccgcttcccagcaacagtactgctgttaattacctgccctctatgcaggtgcaatacccgctgaacgtgaacccgaatgcagcgggtcctccgcccgcagaggtaatgctatcgtctttgcctccgagatctgtaccaaatgtatctttcaaacatcctgactcggccgatttccaggctcgcagaatcatggataactataattttagatcaaataatactacaaataccactaataccactaataattcatttcccgcgccatattgtgcaccaaacctgggcaccgaagcaaaaccagtaattttccaacagcatcaccaaccattccaacagcaatcgtatgacaacaaccctaatgaaagcataaagaaagccggcaacgacaagggtaaaagcccctctgacgacgacaataacgacggcaaaaagaggctggagactctaacagactcggaccttttgatcaataccaacaagaaaagactcagcgtcgattacatactgacataa

SEQ ID NO: 5358 - DNA, 1782 bp, Saccharomyces pastorianus
atgtcgctgttcttgtacttccagtccgtcgccgtcgtcgcgatgcaacacgttgatagcgtcccacccattgctgcggcgtggtcggaaaacctggcttggtcgatggggttgatccgtatcacattcatgcagaagattttccgttggtacgtggacgcgaccgggggctctgcgtcactgtatttgacagcgacaacaatgtctgtgctcacgcagagaggcctggactacctaaaagccacctccatctacaagagggccgaaaacgtgttgtatggtaacgcaaacactttaatcttcagaggtatcaaaagaatggggtaccgtatgaaaattgaaaacaccgcgatcgtctgtacagggtttactttctttgtattatgcgggtactttttagctgggtttatcatggcctgtaagtatggtattgagctgtgcataagatgtggctgggtacgaagtgaccggttttaccaattcagacagaattggaagtccgttttaaagggttccttattaagatacctctacattggatttacgcaactgaccattttaagtttttgggagttcaccgaaagagattccgcgggggttatagtcattgcatgtttgtttatcatcctatcatgcggattgatggcttgggctgcatacagaacgattttctttgctagcaagtccgtggaaatgtacaacaacccagccgccttattgtatggtgacgaatacgtcctaaacaagtacgggtttttctacaccatgttcaacgcaaaccattattggtggaacgccgtcttgatgacgtacgttttcattaaggcgctattcattggatttgcacaagcttctggtaaaacacaagcgttggcaatttttatcattgacctagcatatttcgttgccatcattcgtaataaaccatatctggaccgtccaacaaatatcgtcaacatctttatttccactgttaccttggtcaattcgttccttttcatgtttttctcagacttattcaatcagaactacgctgtgtctgccgttatgggttgggtgttcttcatcatgaacgccgctttctctttattgttattattaatgatcttaacctttacggcaattattgtattttccaagaatccagactcaagattcaaaccagcaaaggatgacagagcatctttccaaagacatactatttcccacgagggcggtttgaataaatccgtggctaacgagttaatggctctaggtaatgtggcaaaggatcatactgaaaactgggaatacaaattaaagagtcaagaaggcaaaagtggcgaaaatcttttcggcgtcgaatacgacgatgagaaaaccggttccaactcagataatgcagaaaatagtagtaaagagactactcgtccgactttctccgagaaagttttacgttcattatccatcaagaggaataagagtaagcttggcagcaatagaaggaaaactcccgtgaaggtagcacagaaagagccatcaaccggcagtacaaactcttcgcctatcaacaaatcataccccggtatttcgcatatgaggcaagaatctgaggcaaacaatggtctaataaacgcctacgaaaacgaagaattcaatctgatggaaccaaacgtgccagaagatgcaaccagtttcaatcaaatggacattatgccaatacgagatatgagtttgaacagcatgccaaatacccaagacgttaccaaaaaggcaaatattctggattctaattatttgtag

SEQ ID NO: 5359 - DNA, 486 bp, Saccharomyces pastorianus
atgagaggattttcaccgctacacagcggagcaaacacagcgccgaggatgcaagcactactgacagtatggtatctgataagcgcatgtctggtggcaccagtggcagccaagaaaaggacgctgacggcgacgtcgctggtcacgtgcatggagaattcacagctatcggccaatagcttcgaggtgtcgttctctccagacgacagagcactgcattatgatctggatatgaccacgcagatcgattcatacatcagcgcgtacgtggacgtgtacgcgtacgggttcaaaatcataaaggaggacttcgacgtgtgctctatgaactggaagcagttctgccccgtgcacccaggtaacatccagatcgactcgatcgagtacatcgcgcagaattacgtggacatgattcccgggatcgcgtaccaagtgccggacatcgacgcgtacttgaggcttaacatttacaacaacgttagcgag

SEQ ID NO: 5360 - DNA, 1071 bp, Saccharomyces pastorianus
atgtgtgattctggaaaaatactatgtcagcagcagcaaacattttcaccggatcaatatttggctatgtcaattaataggttaacttcaagccgactcccaagcctcctaacaaaggctactttttcttacccaagagcctatttgcatgagacgacggtttttttgcaaaataaaggagctacccaagattcaccagaacttttagcaaagagttcacatctgaactcaaatccgttggatggaagcaataaagcacctgtaaaaagcacgcaaacaaaattacctttagctcatagcaagtatgagtcgtcgaagtacgaacttcccagatggaaagaagcgctgggtgagctggtaattcgtacgtttcgtctagatatggatagggtcagagcaggacctgttgctgggtcttactattatacactttgtaaaaatcaaggtttacaatatgaagacgaaccgctatcagagactgctaagtatttttatgaggatttaaagctacctcgtactttttcacaatggtttcaaattactgcattgcacgagtggatgctttttgtacgtatgagagctatgcccttcaaatacggcagaaactatcaacaaaaactagtggatagaacattctctgatattgaactaaggttattcgaagaaatgaaagtcaattctggtagaattgctgaccaatacttgaaagactttaattcacagtttagaggcgcggtgtttgcgtatgacgagggctttgctacagatgatcccacgcttgctacagcagtttggagaaatctattcggtggcagaaaagatattgatatgctacacttagaatctgttgtggggtacattcactcccaactatacgttttgagtaggctatcggatagagaatttgctacaggtaaattcaaatttgttcctcctggggtaaaagtagaaaagctaacaccacaacaagaagaggatttgaaggcaaaaaccattgcaaaatatgaggctcaagataaagaccccaacactttaccaagtgaaagaagtaaactgtcgtacacaaattag

SEQ ID NO: 5361 - DNA, 1923 bp, Saccharomyces pastorianus
atggctaaggataatttgaccagtttaatttctcaattgaacattcagttgtctcaagatgagcattctcaggtcgaacagacttgcttgaaattgttgaattcaggctgccaagacccagcagacgtatttagacgttgtttggtggctgttattcaacaagataaataccaaagagccttgcactatttgaagaagttcgaacacattgatgagaaattcggtcgcaaatttgcgttagaaaaattgtacattttttacaaattgaatagttccgacgaatttaactcattgtacagacagattgtcacagatgacctcgatactgtactgaaaaaaggaatcgagtcactaagaggcatcttacacgtgagggcacagtactgttacaagaatggtttgtatgaagaggctttcaaaatctaccaacatttagctagtcacaacgatagggaccaggacagtcaaatcgaattggcttgtaacgaaagggttccactatcggtagtaccagaattaatgaacagatctccgttagtgaccaccatagacgaatcttcctacgatttattgttcaacgaatcatttatcctgacatccttaggtcaatacgatgagagcatcaaaatattggagaaggccctacaagcagccacggatgaaggttataaaaacgatatcaataccatcaatttacaattatcctttgttttgcaaatgaagggggaaaccacgaaaagcaaagagatattaaaaagcttattaaaggaactagaagcatcttctccattttatttgatctgtcaaaataacctgaacgcattcgttgatttatccaaatataacaccaattttaatctactgttgagggaattaaacgtggagaggttaaacactttcaattcacagaccttcacatatgagcaatggtcgaacattcaacgtaatatactatttctacgtctgttcaataatggtaaaattaattcccaaggttccattctgtcaaaaactgctcacaaatattctgagttagtggataatgtcactttggaaagttacaagacgcaagccaagaaactttatcatcatgtcacaaagagtatcttaagtggcacagagggtagtgtaattggtttgttactgctagctattcaattgttaataatagaaaaggaatgggaaaatgctatcagaataagtgaactattcttgaatgagagttggaaatcatcttttgaaaactttgacgattcacaagcaattgtatgctacattttatttgaactatacaagattaaagggagaaaccattcaaagagtatcttattaaaaaaattagattctgtaagaatgcaattgaagggaaaaacccaagaaaacataccattctggaagcacgttgggttcgaactattgtccataggcaacattaaagaatcgaaagctttactcagggagctctcaagcttcaataaagttagcgaagatgaactagtcaacagaattgtctcatccaattctttggatatagcgcaaggcatagatttggtgagaaacattgatgttaaagaattaattcaactaggtgtaaaacctttagaatcttctgtaaagaaaaataaggccactacaattaacaaagtacaaaagaggaaaatcctagaactgaaaaagaaaagaaagactaagcgtgtggacaaattcctacaaagccgtgacgcttccaaattgcccgatcctgaaagatggcttccaataaaggacagatctacatacagaccaaagaaaaaacaacaaggcgggaaacaaacccaaggtggtgctatgaacaagaagtctgaacaagcccttgatatatcaaagaaggggaagcctgctgccaataaaaaagctaagaataaaaagaaggctcgtaaataa

SEQ ID NO: 5362 - DNA, 129 bp, Saccharomyces pastorianus
atgtggtcgtgtttcaactttttttcttcctctccttttcctcgttgcaccaaaaatttctccagaaaaagaaatttaaacgtgggttggggtgacaaaagtgaagacaaccactggagaaggcgctga

SEQ ID NO: 5363 - DNA, 324 bp, Saccharomyces pastorianus
atgaagggtcagccgagcattccgagagagtctaggaaagaaaaacaattcattcagagtattcaaaatcaagtgcagcggggaaatccgaaaactgatttaaacattaaattgattcagcgagagtttgcgaatgaaaactctcaaattttggatttcataaaggaactgggggatgccaatttgctagagtatgagttaacacaagaagaaaaggacgtactttttggtacccctgaagataatactagaaacaactataaaccaaactacagaaacaggaatgctaattcaaatagaggcaatttttctaggaaaaggtaa

SEQ ID NO: 5364 - DNA, 732 bp, Saccharomyces pastorianus
atgcattacaataattttggaaacgggaataacgatggacagcctaggcttcccaagcccacatactcaggaacattatcagatgattatgacgaatcaaaggttaaaaggcaaaagacggagcctactctgaatgtaggtttttcttccaatttgtattcgaatactccatattacgaaaactcctggaataccgattataattctcaacttcatactttcactccccataatcaatattaccacccattaccgcaatcgacccaatacaaatttcaaaattcttcaagttatacgcaaaatggaatacatccaacgaaccacgatacacggtatccacatcatccagagataccaaagcaaccatcactatattttgaagccgctcctcctcaaaaccgtaatactaactatcgtacgtcaattagctatgaagatgtcacaataccagttgcaaagaaaacgaaactagtcaaacaagaaaagaacatgaatgctacaggtactagtgaaaaaaatttaaagcctacaagtcgggttccagcttcacttaaattcgaggaaaacataataaagaaaaaagattttccaagctctaatgtccaagacagccttgattctgaactggatgaagacgaagatgagcagcgacaagaaggcgaaggcgcaggaaaggtggttgtggttcctgggacttctatcgcattagttactgacgatgatattacaaag

SEQ ID NO: 5365 - DNA, 390 bp, Saccharomyces pastorianus
atgaacgataatacttctctaagtacgccgaataaagaagacgatcagaaaaagcttagagaaccagaagaaaaaaatagaagtactaaaaatatcaatggagttctcataagtaaggctaataacaaagcactccccaataaaaatccgccagttcacaataaagcacatagtaagaaggctatctcgccgggaagaatcaggaagcacaaagctacaacatctcccacgaaatcacatttgaagagtaagaaaaaagatatttcagaaagcgcgattcctaaagagaacaagggcacattttatcaaggtgccattgttggttcattccttggggctgctgtaacaaccgttctgagtaacctggcagtaaaggcttttcaaaattag

SEQ ID NO: 5366 - DNA, 360 bp, Saccharomyces pastorianus
atggctcagcaacagcaacagcaacctcacgctcaacagcaattggttggtttaatccaatcaatgcaaggccaggctccccaacaacagcagcaacagctgggtggatatgcttcgatgaacccatcgcctcctcctatgaataattacaatggtcaaaatatgtctgcaaaatctccagtcccacctatgccacatcaaggccaacccctgcagcaacccccacaacagcaacaacagcaacaacagcaacaacaacctccacatcagcaacaacccccacaacaacaacatcatcagcaacctgctggaaataatgttcaaagtctattagatagtttggcaaaactacaaaaatag

SEQ ID NO: 5367 - DNA, 1974 bp, Saccharomyces pastorianus
atgtcagaagaaaacgataacattgaggttcaagatgttccctctcccgaacagtctatgggtagcgactctaacgaaaacgagtcgatgaacaacattaacgacgatgagcagagcgaatctaatgatcaggaagaagaacaggaagccgaaagagaggaagaaaatgaagaacaacatgaactggaagatgtaaatgatgaagaagaggaagaaaaggaggacgcagaaggggaggaggaggaggacgagaatgaagaaggagaggaggaagatcaaggaaatggcaacagttctgcagaattagatagttctagcgaagacgatgatgacgaggaggaggaagatgcggaggaagaaagcgataaacctaaagatgatcaagcagagagcactagtatgaatggtccaaatgaagaattacaaacagaacaaactggcgctgatacagctgggaacgaagtaagtggtgaagaaaatgagaatactcaatcagttaacatggaaaatgttaattatgagcttctacagaagcaagtcaaatatatcatggacagtaatatgctaaatctacctcagttccagcacttaccacacgatgaaaaaatgtctgccatcttggcaatgctaaattcaaactctgatacagctcttttttcacctgtgcaagaagctcctgtcgcgacggctggaaccatggccccagcccctacaggtagtgccaaaaacatcgaccaaagaaaacctccattatcggatgctcaaagacgtatgagattacccagggctgatttgtctaaaccaattaccgaagaggaacacgaccgttacactgcttacttgcatggtgaaaataagattacagaaatgcataatattccacccaagtcaagattatttattggtaatttaccacttaagaacgtgtccaaggaagacttgttcagaattttctctccatatggtcatatcatgcaaataaacatcaagaacgccttcgggtttattcagtttgataatcccctaagtgtaagggacgccattgaatgcgaatcacaagaaatgaacttcggcaaaaaattgatattggaagtttccagctctaacgcccgtccacaattcgatcatggtgatcatggcaccaatagcagttccacgtatatttcttctgctaaacgcccattccagaccgaatctgccgatatttacaatgatgataacggtgctaatttcaagaagtccaaaagacacacaccttcatgtgttatatatgttaaaagaaccgcggaccgtacttatgccagtgaggtatttaacagatttagggatggtaccggtttggaaaccgatatgattttcttaaagccaagaatggaattaggcaaaatgattaacgatgtcgcatatgatggtgtatggggtgttgtattagtcaacaaaacgcataatgttgatgttcaaactttctatagaggttcacaaggcgaaacaaaattcgatgagtatattagcatctctgctgaagatgcggttgcaatttttaataatatcaaaaacaatagaaatagttcccgtcccaccgactaccgtgccatgaaccatcaacaaaatgtatatggcgctccccctcttcctgtgccaactgcgccggctgttgtaccacctcctcaaccgaactattaccaaaattacggcatgcctcctccacaacaacaacagcagcaacaaccttatggccaatcatatggaatgcccccaccatctcacgaccaaggttatgcggcacaggcccaaatccctatcaaccaaaactacggtcgctaccaaagttctgtgtctgcgccaccacctccacaacaacaacaaatgcatcaagggtatggtcgttatcaaggtgctccacccccaaagactaacttaccaaactccaatggatcagacaacaactattgtctgctattcaaaatttgcctc

SEQ ID NO: 5368 - DNA, 771 bp, Saccharomyces pastorianus
atgtttgggaatacacaagttcctccggttttagcatttgctcttgggacactaggatttttattaccgtttgatttcaaagaacatagaagagttttccaagaggtaattagctccagggcgaaatgcttacatagaacgagattagaatgtcatttgaaaaagaaaggtaacagttcgtctatcgtaacccatgccatgaacgatatattcttacatagaggtaactctccccatctcactaacctagatatttttattgatggtgaatttttaactagaaccacagcagacggtgtggcattagctactccaacgggatctacagcatattcattatccgcaggagggtcaatcgtttctccattagtacctgctatcttaatgaccccaatctgtccacgttctttgtcgtttagaccattgattttgcctcattcatctcacattaggataaaaataggttcaaaaatgaaccaaaaacctgttaaaagtgtggtgaacctatctattgatggtatacctcaacacgatttagatgtcggcgatgaaattcacgtcataaacgaagtcggcactatttacattgatggtactcaactcccaaccacgaggaaagctcagcctgaattcgagaattcgaaaaaaccaagaagatctgggatatattgtgtggccaagaccgagaatgactggattaggggaatcaatgaacttttgggcttcaattccagctttagacttatcaaaagacagagtgacaatgaatga

SEQ ID NO: 5369 - DNA, 372 bp, Saccharomyces pastorianus
atgttcccgagactgaaattgaaccacccaatgaggtggtctagaatctatagtacacttgattcacatgccataagattgacgagcggctcaaaatttgtaaaaataaagcctgtatatggcttgaggggtagttcatcagcagatttcgtgtcccctccaaattccaaattacagtctttgatctggcacaatccgttacagaatgtttatattacaaaaaaaccttggactccgtctacaagagaagcgatggtcgaatttataacacatttgcatgagtcataccctgaggtgaacgtcattgttcaaccagatgttgcagaagaaatttctcaggatttcaaggcccccttgaggatgttcctttag

SEQ ID NO: 5370 - DNA, 195 bp, Saccharomyces pastorianus
atgtccgaacaagaagagatacaaaaaagagataaaccaggtgatcaaccggcgaagtcagtggtcagggaaggtgatacacgtcctcaagactatgaaagtatcttggaaaagttgctaggagcattagggcgtttctttgggtcatggttctcttggctgacaacggatacgtcaagtacggagacagcttaa

SEQ ID NO: 5371 - DNA, 648 bp, Saccharomyces pastorianus
atgctgatcgtgagtttatatctgagcgccttgttacaacaatcagcggtcgctgcggcaattgccacatcagccggaggccccaataacttgggtaacagaactgtttatctaggcagtttgcctaaagatgttaagattgaagaaatatgtaacgcggttcgtggcggcttattacagagtataaagctcttgaatgatcgctacgtgtgcttcgtcaccttcattgatcctactgctgccgcgcagttttatgcgatgagttctttgtatggattcacagttcagaaaaaacgttgcaaagtcggctggggcaagcactccggcccactgcccaatgctcttgccttggcagtcagtaacggcgcgtcaagaaacgtttacgtgggtaacattgattttgctagcgattccttaaatgatgaacgtatcttcacggaaaccaatttgagaagtattttccaacaatacggggaagtagagcaaatcaatttcttacctgagaaaaactgttgctttattaattataccaatatcagcaatgcaattctggctttagacaagatcaagtccaacccatatttcaaagatctcaaaatcaattttggtaaagacagatgcggtaacgtgccccaccaatctcgttaa

SEQ ID NO: 5372 - DNA, 1089 bp, Saccharomyces pastorianus
atggtggtttcttataataataataataactcactacctccttttgcttcttctgatgactctaccatgtaccagcactccaattcttccggtcattatcgagacccttatttgaatgatcagcaagcctttggtgatgctacgtaccctatgaatggcggttttactcttttgccatccgactttacgcgggatccaaacgattctttcctttatgaaaatagtggtttcttggactaccatccaattcaacagcaaccaccacagtttcaggtgagccagcaaaccgaatcgcaacagcgacggcttctacaagagcaaaattttggaatgggcaacgaaaatattcaaagcaacaaccattattttgaatatgaaagatcttctaatgaagtttccccgttcggcgatgaaaatccaaatgcggtgtctgatagcatttctcccattgttagggcaaccgccaccgctgtaaccaacgcaaatgctcccttgtcagtaaattcacaagccaacaatcctttgaattttacttctgctccaaccagaactgtctatttaggtaatgtaccaccacatctgacagtaaaagaacttttagatcatgttaggagcggtgtcgtggaagacgttaaaatcatacctgaaaagatgtgcgcattcatatcctttgtcgatgagagtgcagcactattgtttcattcggatgcaattttaaagcgtttaaatattggtgatagagatataaagattggttggggtaaaccaacccgcattgatcctattgtggctgcgagaataactaccgatggtgcgacaagaaacgtatacattggtcgtatgacagtcgaaggtgaggaatctcatttatctgaagagcaattgagagccgatttacaagagtatggcgaaattgattgtataaaaatcatcaaagaaaagggaattgcctttattcattttgcatctattctaaatgctataaaagtggttacgaatctaccaataagaaacgcatattaccaaaataagagaatattctatgggacagatagatgcgcgtttatcaccaaaacgcagaaacataac

SEQ ID NO: 5373 - DNA, 1185 bp, Saccharomyces pastorianus
atgtggatcatcgacggcggcggcactgtccaccctggtccacggcctgaacaccctcggtgtcagcccgcgcgacatgatcagcatcctgcaggccatcaaggccgcgggcgccctgcaagccgacatgatgataagttgcctaatgataccaaaaatatgaggcaatctaagctgggtcaaactataccgaactcccaacttgctctccccaccgctactagcatcgataacaaagacaacattgtctctcaacacaacttctcgacctctatgtcgagcttaacgaacaacttgagaagagcagttcctgatagttttcatggctcgtcacgaataaataatattttccataagaaaagcagccagaatttactcttaaggtctaataataccggcaaaaatccatctgcttcgaactccccattggttaatgaacactccatttcaaatacgaacgccaacggaaatgtaaatggatcttccgattctggtgccaagtttaatagtttcgcccagtttttaaagtcagatggcattgacgctgaatccagaacacaaagaaagctatggctacaaagagaaaattccattatggatttaagttcacaaaacgacgggagtgactccatctttatggcgggaaacattgatgcgaaaagagagtttgaaagaatatctcacgaatactctaatgtaaagaggttttataacccattagacgaggcattattaagagttgaacctacaatggctgggaacactaataacattggaaaaaaaagccataacgatgggcaatcgattactccctccaatggtacgccagatcataaaggcaaagacgatttacttttcgctaattacgagaagaagtttgatgacctttacccacaccttggaaacgccaaaattcaagcagtgttgtccaacatatggaaaaacgaaagtttcctatttaataaagatgtcaatccgattagcaagaacaaggcatcgagcacaagccacagcataagcaataacggtctgcagaacacacgcaatctattgagaggccctatggggtctaccactacattgccccatcagcgcgttattaactctttacagccgactacaagagcggtgaaccgcagaatggagaatgttggctacatgcacgcacagtcacaacaaagataa

SEQ ID NO: 5374 - DNA, 1701 bp, Saccharomyces pastorianus
atggtgcacagaggaagaacattaaaatcagacaccgatataacctctcccaatggatcagcagtaccacatcagtcgaagccctttagacagttctcgactaggtcaagagccaagagtaatgcaagtttcaaaggcttgcgcagggttttaactcatgatggcacactggatagcgattatttcaataaacataatatttctcaaaaatgcaaaagttcagacgctcttttcagaaaaagaactattagtggattgaacatgacggcgttgacaagagtaaagtcaaatcagggcaaaagatcggcatcctttcatagccctgtgcataatacattaattagcccgaaaagcggtagccactctaattccgcaagtagcggctttggcctaaaaccacgaagaagtaaaagtacacagtctgttctaagtcttcgagatgcacaggaaccagataatagtggctctacaactgatgaagaggtcgaatgcttttcggaggatgacgcagagaatgagaaaataaatagtgataaaataagaatcaagcataatgctcctcaagagaaagaaagtagcccacatctaatcgataatgaattacaaccatcagagcctatttacgaacaagaagaagagaaacctctcaatcaacagaataaaaaccatagagctatatccctaccgctaccccatttaacatccactgactactttggggaatctagccgctctgaggaaccccaaaatgatgacaatatatcgtcaagttcaacagaaacaaaacttaatgtgaatcacgttatcaacgaagaggagcaatccagcacaagaaagaacaccgatggcgaaacagaacatccccccaaaatgaacagtccactaatggaagcagacgataaaatctcacatacaccatgtaaggcgaatgaagaaagaatcctcgacattggcaacacattagcggtacataagagtagtgaaaagccaagcaatttggatgagcattttgaccaggaagatcacatcgatgctcctagaagtaattcttcaagaaaaagcgacacaagttttatgtccttgagaagacaaagttctaaacaacgccaaccgctaaacgaagaagaagatctaataaaacctgatccggaaaacatttcttccaatgacatcaacggaaaggatattgaaggcgctaatccattagaaaattatgcacctgacatgattctttcccagtccactggagtagaacgtaggtttgaggatttatcttctattcaaaactcacttgggaaggaaattcaaaatccagaagatcgtttgaattcggatggtactttcgatgacctggatgatgataagttgcctaatgataccaaaaatatgaggcaatctaagctgggtcaaactataccgaactcccaacttgctctccccaccgctactagcatcgataacaaagacaacattgtctctcaacacaacttctcgacctctatatcgagcttaacgaacaacttgagaagagcagttcctgatagttttcatggctcgtcacgaataaataatattttccataagaaaagcagccagaatttactcttaaggtctaataataccggcaaaaatccatctgcttcgaactccccattggttaatgaacactccatttcaaatacgacgccaacggaaatgtaa

SEQ ID NO: 5375 - DNA, 1260 bp, Saccharomyces pastorianus
atgctgcaggtcaccaccactgccactacttcgaacaacatcttgacgtcacctccttcctaccgtgaatcaaatttttcttccccatcttcttattcgttttcttcctactactcgtccgctacatctgtttcttcatcgacctcttcgtttttgaaatcatcaggattgtcatccagggttaagtcaccttcatcctccattaaaccgggttccttcggtacaccttcctctccaacatcagaggcttgtagtcataggtctagcgcaaacactgtatttttgaagcggaactctcatgatacttcttcaagtgaaggtcttgatattgatattgccattgaaaaactgttaaaggttggtgaatcaagagacattacgaagaattctaagaaaaagagctttccgttccactcatgggagattcagttgatttgttatcatgcaagagaaatatttttgaatcaacctactttattaagattgcaagcacctattaaaattgtaggtgatgttcatggacaatttaatgacctcttaaggatcatgaaattatctgggccaccatcagacactaattacttgttcttaggtgattacgtggatcgtggtaaaaattcactagaaaccatactgctattattatgctacaagatcaagtatagagacaatttctttatgctaagaggtaatcacgaatctgcgaatgtcacaaagatgtacggtttctatgatgaatgcaaaaggcgattgaactcaaaagtgtggaaaatgttcgttgatgtctttaacactttgcccttagcagccattatccaagacaagatattttgtgtccatggaggtatttcgcctgatttacatgatatgaaacagatcgaaagagttgcaaggccgactgatatacctgaaaacggattggttacagatttactatggagtgatccagatgcccaggtttccgattggtcggaaaatgatcgtggtgtttcgtataccttttctaaaaggaatgtcctcgatttttgtgctaaatttaaatttgatttagtaatcaggggacatatggtcgtggaagacggttatgagttttttgccaggaaaaaactcgtcacagttttttcagcgcccaattattgcggggaatttcaaaattggggggcagtgatgagcgttacgacaggtatgatgtgtagttttgaattgttaaagccgcatgtaataaagaataagaaaaaattaaacaaaaagaaagtttaa

SEQ ID NO: 5376 - DNA, 384 bp, Saccharomyces pastorianus
atgagaagaagcccgtctaaatcaaacaacaacttcgcagtaccgaattgctcaactaattcaaattcaagtcagcaacaattaacaactccttcagatgagctcaacagtaacgaacctaatgaccctgatgatagtaggtttctacctactatcaagaaattcaataataaacattctataaacaatcacagcactttagcatccgccgcaaaaaacaacaacaacaaaaggactagcaatgataacatgccgttccccgggcagaatgctcataaacagaaaatatacaccaatgaaaatataacgagcttgtatctagatttcgatgtttcagtgaccaaagctctttcttctccacaactgctcccagttatcaatacc

SEQ ID NO: 5377 - DNA, 1353 bp, Saccharomyces pastorianus
atgctgtgtgactttttctatccgcaattaggtggagtggaatttcatatatatcatttgtcgcaaaagctaatagatttaggtcattccgtgatcattattacacatgcttataaagatcgagtaggcgtacggcatctttcaaacggtctgaaggtctatcacgtaccatttttcgtaatttttagagagactactttcccaacagttttttcaactttcccaataataagaaatatccttcttagagaggagatccagattgttcattctcatggtagcgcttccacatttgcccatgaggggatcctgcatgccaatacgatgggattaagaactgtcttcacagaccattcactttatggtttcaataatctaacctcgatttgggtgaacaagttattaactttttctttgacaaatatagatagggttatctgtgtttccaatacatgcaaagaaaatatgattgttagaacagaattgaaaccagatattatttccgtgattccgaacgcagtggtcagtgaagattttaagccaagagaccctgataataacagcgagagaaagcagggtaaagataagatagtgattgtagttattggaagactctttccgaataaagggtctgatttgcttactcgtatcattccaaaagtttgctccacacatgaagaagtagaatttatagttgctggtgatggtcccaaattcattgattttcaacaaatgattgaaacttatagactgcaaaaacgtgttcaacttttgggatccgttgctcatgaaaaggtaagagatgttttgtgtcaaggcgatatatatttgcatgctagtttgacagaagcatttggtacaattctagtagaggctgcatcctgcaatttactgattgtaacaacccaggttgggggtattccagaggtgctacccaatgatatgacggtttatgccgaagagacatctgtttcagatctcgtccaggcaacaaataaagctatcgacattataagaagcaaaactttggacacatcttcttttcacgatagagtgtccaaaatgtacgactggatggatgtagcccaaaggacagttagtatatacaccgatatttcttctacttcttccacagatgataaagattggatgaagatggtggcaaatctttacaaaagaaagggcatttgggctaaacatttatatctgttatgtggtattgtagagtacatgcttttttttattctagagtggttatacccaagaaatgaaattgatatagctcccaaatggccgaagaaaacaaaatctgacgagggagtggaagtggaagcgaaagcaaagaagatctag

SEQ ID NO: 5378 - DNA, 306 bp, Saccharomyces pastorianus
atgaacccaaacataacgacaccgccaccaccacaaccttcagtggttcccgggggaatgaacatgcccggcgtgccccaggggccaatggtcatggcacccactctacaactgccaccggacgtccaatcgcgcttgaaccccgtacaactcgagctgctaaacaagttgcatctgcaaaccaagttgaacgcggagtacacgtttatgttggccgagcaaagcaactggaactacgaagtcgccataaaggggttccagggtagcatgaatggcatcccgagagaggcattcgtgcaattctag

SEQ ID NO: 5379 - DNA, 846 bp, Saccharomyces pastorianus
atgtttccagcaatgatgaagctagcttctacagaacccagtttagtagtggagagtgtgaatcttgcggataaccaactaaaggacatttccgcaatttccacattggctcaatcgttcccaaatttgaagaatctttgtttggctaataaccaaattttcagattcagatcactggaagtttggaaaaacaaattcaaagatttgagagagctcctcatgacaaataaccccatcactaccgataagttgtaccgcactgaaatgttaagactattccccaagttagtggtgctggacaatgttattgtaagggacgaacaaaaactgcatagtgtctattcgttaccaatgaaaatccaacagtttttttttgaaaatgatgcgttggggcagtcgtccacggattttgcaaccaactttttaaacctatgggacaataacagagaacaattgttaaatctgtactcaccacaatcccaattttctgtctccgtggactccacaattcctccatccacggtagcagactctgatcaaaccccgtcgtttggttattacatgccatgttcacgcaatatctccaaagtatccagtgagaaatccatccagcaaagactatcgattggccaagagtccatcaacaacatattcaagacattaccaaggacgaaacaccatcttcaagaccagcccaatgaatattccatggaaacgatcagctatcctcaaatcaacgggttcatcattactttacacggtttttttgaagagactggcaagcctgaaatggaagccaagactctagaggatccccggtaccgagctcgaattgtatcatgtcat

SEQ ID NO: 5380 - DNA, 399 bp, Saccharomyces pastorianus
atgagcgggttccataatgtgggaaatatcaatatgatggcccaacagcagttgcaacaaaacagagtaaaagtcagtataaggaactggcagaatgctacaatgaatgatttaattaatttcataagcaggaacgctcgagtagctgtgcttgacgcccatgtggacggaccattggttgtcggttttgtgaattcaaaggctgaagccgaatcgttaatgaaatggaacggtgtccgttttgcaggtagcaatttaaaatttgagcttttggatggcaatggaggttctgctggaacttcagacactatttcgtttctaaggggagtattacttaagaggtatgatccccagtcgaaactattaacctgggggcattgcattctgaccctgaactaa

SEQ ID NO: 5381 - DNA, 1074 bp, Saccharomyces pastorianus
atggaggttgatttaataacacgtttggttaatcgtgggctcaaggaaggaggtaagcaggatccggcgaattcccttcaagataaactgcttctcctcaataagtcattgttgacacaacgcctttctgataaagacatcttggaaggaatgaattctgtatctgtgccagtgaatgttgttattccccgagatataacgtctcaagaagagaaacagaaagttgagctgcaacgtcgaaaattagagaatattgatctccatcctagtagcaaggtacatattgaggaacttctacgctctttaaacatcgatacgaataagcatgaagagatctacagggaggtttcactttacctacagaaaaatgaagacagtaagaattcgatgggcccctcgcaacatgaccatgtagacatcgatctaaattctttgaaaaaatatttgcaaaatattgaaaagaaggcataccagaaaaatgtcattgataaacgaaagaaaaatcaaactcgtatctatgaatggagcgctgattctttctctgaatccgtaccgttgacagcaggaaacattttatttaagaggagacccagccgcccattaaagcacttagcaaatagaataagcacatttttgaactcaaacaaaagaggaaaaaaggtcggtaatggcgagaaaaccatgaaagggagtaggctactgttgcattcattggatgacaataaggacatcactgtgtctgccgaatttgactatggtttcttcaacatcaacttcacagacttattcggcgtcatcaacgcctctggatatccaccagagagagtattagaccagatcaatgacattgagctaaaaggttggaaatgcgtagggaacttgtatgataatactaaaacgatagttttccaaagtagcgatccattattcaaagaggaaggaagggcttctaaaaggccgtctactgctcgcaagacaatcatcatttctatcacaacttcaatagtctcactttatgcatattatagataccgtctttctcaactcaaagaggctaaagttaactcatcttga

SEQ ID NO: 5382 - DNA, 267 bp, Saccharomyces pastorianus
atgagtgtactatatatatctccactactaacaaaaacaaaatgcttagcatctggagtagatgtgcgctggataagatttgtatcgcatgcaaaaggtggtggtacgaaaattgcagaccataatatgtctcgagtatttgattcaaagatcctcaaatcgggacgtatcaaagccttcaaacatgcagtatatcaatctgccgtaggtaaaggcaaagctaacttctccccaatggaggttgatttaataacacgttttggttaa

SEQ ID NO: 5383 - DNA, 1926 bp, Saccharomyces pastorianus
atgtggaatgctgaaaaaagctctacaaaactgaaaactgtaatctcttactggctagcaagagctcggataaatgtacagttgctgagaaagcaagattatattgctcgaaatattgaacaggcaagattaattggtattgatttccattccgtttactacagagggtcgcaattcaaagtagagtcgtttctaattcgaatttgcaagtcagaaagttttattctcctctcaccaggtaagaaggaggttcgtcaacaaaaagcacttgagtgtgtacctttagttatggagccggaatccgcattctataaaagtcctttagtagttttggattttcagtcattatatccatctattatgattggatacaattattgttattcaacaatgataggaagagtaagggagacaaacctaaatggcaatgaattaggagtgacgaaattttcattaccgagaaatattttgacattactaaaagatgatgtaactattgcacctaacggtgttatttatgccaaaacttctgttcgaaaatcaaccttatcaaaaatgttaaccgatattctagatatcagagtaatgatgaagaagacaatgaatgaagttaacggtgacaatagcagtctaagaagacttctagataacaaacaattagcacttaaattattggctaacgttacctatggttatgcatcagcatccttttctggtcgaatgccgtgctctgatttggctgacagcattgtccaaacaggtagagaaactttagagaaagcaatagacattattgagagagacgacacgtggaatgcaaaagtagtttatggtgacacagatagtttgtttgtatatctacctggaaagactgccaacgaggcttttcatattggtaacgctatggcagaaaaagttacccaaaacaatccaaaacccatttttttgaagtttgaaaaagtgtatcatccctctatactggttagcaaaaagagatatgtagggttttcctatgagaaaccttcccaatcccttccctttttggatgctaagggtattgaaactgttagaagagacggtattccaggacaaaaaaaaattgttgaaaaatgtatacgactacttttccaaacaaaagacctatcaaaaataaagagataccttcaaagtgaatttctaaaaattcaaactggtagggtgtctactcaagatttttgctttgccaaagaggttaagttaggagcgtataaaagcgagaagactgctcctccaggagcagttgtcgcgagtagaaagattaatgaagatcatagagcagagcctcaacacaaggagcgtgtaccatacctggttgttaagggcaaacagggacaaattcttagggaaagatgtgtatcgcccgaagagttctttgagaacgaggatttggaattagactcggaatattacataaataaaacgttggtgcctccccttgataggctgttcaatttaattggtataagtgttggcgcttgggcccaggaagtagaaaaatccaagaaaagcaatacatccgggaaaaaaagagaaaaactagaaataataggaacctctttaacgtgctgtaattgcggagaagagctaactcaagtacgtccatcgcagctttgcgatgactgtttagcaaaaaggagtttcacaacatcatcgcttctaatagagaaattgaagagagaaaaagaatacgaaaatttgaaaacagtgtgtagaacatgcacatatcgctacactttggatgcaagcattgagagtgaccatatcgccagtgaatgtaaatcctatgactgcccgatattctattcccgtgtcaaaacagagaattacttgaaagataaccaagctgctaagagagaaaaagcgttggtcttcttgaatgactggtga

SEQ ID NO: 5384 - DNA, 2454 bp, Saccharomyces pastorianus
atgtcgcaagaccagaacgacagagacgagaaccatacggttgatatcttctctaaaccaaattcagaatattttagaattcagctaaataactatgacttctatatggcacaacctacctcactagaccggtcgcatggtgaaagcctgcctctaaatcaattttctcaggttcctactattcgtgtgtttggtaatacatcctcaggccatcaagtattgtgccacgtccatggtgttctgccatatatattcatcaagtatgatggctatatatctgacacaagtacactaagacaccaaagatgtgctcaagtacataaaatgctggaggaaaagatcaaagcatctttcaatagaaaaaaagatgccaaacagaattcaaccaacgataaactcggaaatctcacttatgtcgcaaacgtgtctgtcgtgaaaggcgtaccattctatggctaccatgttggttggacgttattttatagagtttctttgctcaatccatcctgtataaacaggctttctgaattagttagggacggcaaaatgtttgacaagaggcttgaaatatttgaatcgcatatcccttacttgttacaatggaccgctgatttcaatttgtttggttgctcgtggataaacttggacaagtgctattttcgctcacctgttctcaacaatatgctggacatagataaactgacatcaaacgatgagcttcaattacttttggaccagcactgtaactcacctaataacgtacttaatagaaaggactttcctcgcgttggaaatgggttgattgagttagacattttaccacagttcattagaaatagagatgaactacagcatagagatttacatcacgactttaaggaaaaattgggagatacttctgatatactagtcaagccgtatgtatcatcgactaaagcaatgatgaatgaactgatcatgcaacgaaaggcattgtcattaagtaaatacaaagtgacttcagaaatgaatcgtctcgtgaacgaccacgaatggcagtcttctaaggaatttgaagcattttacaaaaaagcgcaacataaactcagcacttttgatggtcaagtacctaattttgagactttcatagacgaacatcagaaattttcagacatcaaaaagccgtttgaagcattacctgagatgtggccaagccttccacagactgtaattaccaactctagtgtagagcacaaaaacgaagagcagcccgataccttacttacagtgtatgagaccatgaatattgagaatggccaagaaggattaacagaaaactgcaataaggtcgaacctggcccacatgctttggaaagcatagagactttagagcatacggctaactctttaggcgatcaaatagcttctctgagcacggtaaagttttcaatggacagtattctaacacaaaatatggcaagaaaaaggaaattgaggatgctcggttctgccgagaggatttctccagagaccagaaaaaagaaaaagactatgaccccagatttgcaccacagagaaaactattttgcttatcgggtgcctccatttggttatcgaaatattctcgatgaattggaggcagaaggattcccgaaaatggaatatcaagagccttttttttcaaatcctgcagacctagaaaataaaccttacgcctatgcggggaaaaggtttgaaataacgtcaacacatttatcagcaagaataccggtccattttgaaggcgaacccatatccatttataataaacccactttcgatatgttttcctcctggaagtacataagaaagccacctagatttgatgaagtagcaaaatggtgcaaagaacacggatctacagcaacgaaaagtattcagtcacagatagatttgcagacacctcataataaatttttatacaaatttgctagtgatgcctccgtcaaagagaaaagaaaaaacaaaacactgtatgattctctgacacatttgacgcttgaaatccacgttaacaccaggggggacaaaaatccagatcctctaatagatgaagtctccatgattatatggtgcctcgaagaagaaacctaccctttagatttggatattgctcacgaaggaatcatgattgctcacaaagaaaatatggatagtaatttccccactcaaattcaacagtgtgttggcaacattccagtcatgttttatgaaaccgagtttgaaatgttcgaagcactgaccgatttggtattattatttgatcctgacattctatcgggttttgaagtacacaatttttcttggggttatataatcgagaggtgtcaaaaaatacatcagttcgacattgttgaagagcttgcccgagttaaatataaattcaaaagcaaacctcgggatgattggggatatgcacattcttcgggattttag

SEQ ID NO: 5385 - DNA, 369 bp, Saccharomyces pastorianus
atgttctaccgaagtgtgaaaccgttatgggacacgatcttcaaatttcaaaatccaggcccatcggaacagctatcaatttcagatttatttcacattaccaaaactgttggaatttatttgagaaatgtaagcgaggcaaatgatgccagccccatcgaaaatatactgtttatgaattacattcaaaagttgattttgatgctagaaactatactttcgttcaaaaataacgaagacaaaggtagcgaaagctgtttcaataacggaaagttcattgcgggtatgatattaaacctagtcaaaggtaccgaatatttgacaccagaagagaccaaactagagacgctagcaaaactgtttttttaa

SEQ ID NO: 5386 - DNA, 1221 bp, Saccharomyces pastorianus
atggattacgaaaaaattttgttcgggttgcaaccgattctaaatgcttctacaattaaagatgttccaatgaacgatgtttacctaggaagttacttaattgtaattgaccaattggccgtttcattgagagaaccgaacaatagaaatgttgttggaaaaactggtttgctagcaaatctggtgcggattctagaacaagctctggatcactgccttcacgatgagaatacctcagataacgataggctagcattcttcaaaatcgtttctgagctgatcagatgtgttgccaatgcgatgattgacaatgatgataatagagacgttgttctatccgtgggaaagaacatactgttttcttattatataggtggaatactgaaattgaatcaaatatcccttgacgacacggacgatagactattaaatgacctgcaaatgagatcagttgcactattaagaaatttttgtactggaggtgaaaggtatatggaaaaaatagctaccttcatcagaggtccaatatttagtatgttaaagacgacacagtatacctatctggcgtcgtctgatcaagttacattgggaacggagctactgagtgagctcttaaagttccactacaaaaatgttcaaattagcgatttgttctttttgagtcagtacattaaaaaaatctcctctaaagtgcaaaacattgaactaccaccaatagaagatgaagcgctcgtagccagtaccgaagttcaacagaacctcgctaatgaggaacgtgatgatgaaaccaatatcaaccttgcattggtattggacctatcaacatgtttggaaactattgtagcaaaggatgaagatataaacttctctggtgaagaagaggttgttttgaacatacaaaagaacatactcgcatcattagactgtttggcaccgaaaactttcaataataaactgattgtaatgagaagacttgtatcgtgtgctggaaacatatctgctaatttgactacttcaaacaaaaaggagcagcctttgtgcatcgaaaccatcaagaactccacaaatagttacactttggctgcatctttgattattctatctaactcaattgcatgcaaagccgacgctgatgctctgatgaaactcgtatcctttggtgagttaattcaagctggcagtatattcaaggacccagtgcaatatcaagggtttttagat

SEQ ID NO: 5387 - DNA, 873 bp, Saccharomyces pastorianus
atgacaccggtaaacaacagaaattcctttatttctgtatcagagagtgttaataatgctgtcactcgcaacagcagtgcgtactctagatcaagattggtaagatcgaaaccctcaacttccttaaatgcaatcgcgagacaaccatcaattgtagtagaaaatagagtaattccattatctatgaatcgattctcaataaaggaagaagacgaatatgtcatagacacaacttctatgagggaattatccccggttaatagtgtttcctcatctgactatgaccaaaaatcattagcaagccattcagatcacgcggatgcaatggaaacaatagaagcaatagacgaagacgaaactggaaatagcaaaagcatacaagaagacaacttgaagagcgaaagtgtctccaatgatgtgagttacgatttgatgaagcattatttgagcacagtcattgcgcaaagaatcatgctccgggtgcagattgcgcgtctacaggattctaaagacgctgtttatatgaataaatctgctgaaacaaactcgactatctatgaagatctcgtcgactccctcttaattgaatatcaggcggatggcaattcctcccaaatacttgatgatgttttaatgagagatgaggatgaagaagaagaagaagaagaagaagaagaggaaaaaggggacgttttagtggaagaaatagaccagttagcaaacttaaggccgatagaaaaagaaagaaatttgagcattactttgagatcaccattcgccatgttaaactctgcctattctaatagcataatatcgttgcctacaggggctgtcaagaggtcattgactcttcctgttggcataaaaatataa

SEQ ID NO: 5388 - DNA, 798 bp, Saccharomyces pastorianus
atgattatcagatcaccaataagaacaaagaccaaatcattcagaggcgaccaaatagattttaaatttccgtccaccgaaagcttaccaagaggaacaatggaagaatatcacctaaacaatcaccaccttttgaacaatactttaggtggagaaaatccagtcacacacgatgaagacgccacctctcaaattttatctgactatacatccgcatccaatacaaatacaaattctggctactcctctaatggatactattcatttgctaatatctccgacaacaccacatcatctccacgaattattgtcaacccaaatgaagccactaacagattgacatcctcagactctaacaaaagcgactattttgcttcccatgatgtacaaaacgatgattctttacattatagtagttcaagtgtggtaagaaaccaattacattcgatggaagttattccagagggaaatgtaaccggctcagtatcgtcagctttccagaccattccaactgcagagaacgtttcctacaacatcgcatcgtcatcggcatcatcgatatcgtcaaagggaacgacacccaacggaacgctgcagccaacgcaggaggctgaaaccataatcaatccgaaattggagaaacatgaagaagttattaaacaaaaaaagccagtcccagaatgtaaaaaaaagctaaacagagttcctaccataaaacaggtcgggtctttaaaatcttcaaattctagatacaattctagtgccagtagcaggtcaactagcgctcgtggcagctaa

SEQ ID NO: 5389 - DNA, 2754 bp, Saccharomyces pastorianus
atggttaatcttaccggatcttcgaaagtggagcaaaacaatatcaagagcattattggatcatcgtataaccgactttacagccagtttacttcagacgagcttacagaggtaggtaattataagattttaaaacagataggagaaggaagttttgggaaagtttatttggcacttcataggccaactcaccgtaaagtttgcctgaagacaagcgataaaaatgatcctaacatcgtcagagaggtattctaccacagacagtttgacttcccttatattacgaagctctatgaagtgatagtaacagagactaaagtgtggatggcgttggagtattgcccaggcaaggaactatatgatcatttactttctttacatagaatatctttacttgaatgtggagaattgtttgcacaaatatctggtgctgtctactacgcacactccatgcattgtgttcacagagatttgaagctggaaaatatcctattggataaaaatggtaacgctaagctaacggattttggttttacaagagaatgcatgacaaagacaacactggaaacagtttgtggtacaacggtttatatggcgcccgaattgattgagcgaaagacatatgacgggtttaagattgatatatggtcattaggggtaatactttatacattaattacgggatctttgccatttgatgatgatgatgaggttaagactaaatggaaaattgttaatgaagaaccaaattacgattctaaattaattcccgacgatgctaaagatttgatatcacgattattggctaaaaacccaaaagaacgcccatcgttaccacaggttttacaccaccaatttttacagccatacggttctgtagttctagatcaaacagagaaaacgctgagcaggcaacgtagtggcggaactcatttcaaaagcaaattagagaggcgattacttaaacgcctcaaacaatcaggtcttgatactctggcaattaaacaatccattctaaaaagaaagtgtgactcgctttctggcctatggctacttttgctagcacaagagaaaaagcaagaaacctgtaaatatccgaagagaagcaagtcggtgttatcagtgaaaaaagtcattgacaatgccactcataacgatgatagcaacatcgatagtgggatgcttaagcctccgcttgaactttctagagctacttcactgagtaaaatgcttaacaaaggttcagatatcgtaacatcgatgactccggttagcagaaaaaagtcgaaagactcgacaaagatcttacgtcctacactttccaaagcttccacacaaagggcttacactcaatctatggtaaactctcctcgaaagtccaataattttctacaaaaagtttccagttttttcaagtcaaaaaaaaatcttaataataatatgaataacaacatttattcaggaactcgtgaaggctcggtcgcaagcaccaaaggtgcttccattccgggatcttttccaaagaaaaaaagtaactctccccagaaatcaaggactgatgtaggcgcagattttataaagataaactccaaggagtcattaaaaaacaacttagttggcaccgctgcgttgcagaaagctaccattctattagataataatgaggtttctgaaaaagcgatggaaagcacgaacacaactacaggattgctattaaacgaaagcattcgaatagaagaaccccgtctcaaacggtttaaatcatccatatctagtgatatttcccaaacgtctactggcaactatgacagcgaatctgtggagaactccaggtctgtttctctggatgggaaggtttctcccccaccaattcggactcgaccattatcagagatatcacagatttctaatgacacttatacttctgaatattctactgatggcaacaattcgtcattcaaaatttccgatacgatcaagcccagctacatccgtaaaggttcggagaatacgtcacaatattcagcttcatccgaaaaaatgacaaatggctacggtagaaaattcgttaggagagatttgagtattatatctacagcatccagtgcatctgaaagaagttcaagaacggattccttttacgatatcacaacagcttctccagctataaacgctgaaaatagaggcagtagaagcaataattcaaaagagtctgttttgcctagatttgggacccaaagaccttggacgggcaaaagggcatatgcgacatctcgtcatggtaaaaccgccaggcgttcatctaaaagaggacaattcaaaatacagtcttccaataccgattccatcattcaggaagtgagctcatcggaagaagaagaccataatgttctcgataagaagcgaacaggtttaccaacacccgttttacagaacaaaggattagcgggaaatggactagatgagcatgatgaagatggtgatgacgagtatgccattcatactgatggggagttttcagtaaaacctcagtattctgatgaacttattgataaacaaaatagtttgtcgaatgtaaaagctgtggcaactaaacgttctttgagtgaaggtagtaattggtccagtaagtacttggattcagatggtaatcgccaacgcatatctccaatggtggaggaaaacggcgaaggttccgttgggtacgtagcggatagtagtgtcgatggtgaagaacctaaactattgttataa

SEQ ID NO: 5390 - DNA, 879 bp, Saccharomyces pastorianus
atgaatgagattagacaattgatttggaacggtgagctcaatgtgctggtttctattgatccctcatttctaatgaaaggaagcccgaaagaaatggcagtactaagaataagagtgccgagagaaacgtacttgatcaattatatgccgctaatttgggataggatccaagattttctatcctttgatccgttgaacgagaaagaaaagtatttctggtttgaacataatgggaggcccatacgatggaattatcctgttggcgttttatttgacggattggttgcaagcaacgctacttttgccaccccttctgaaattcacctagaaaatgcaatcaccttttttagagttcatttggtcatgggggaatcgttaccgtcaaccgtaatccccatcttaagtagcagtaaccaagccgaaaaattctggtttcatcagtggaaacaagtctgttttatactaaatggctcctcgaagggtatcatgtctttgtcggtaaacgaatctcggaagttttggagaagtgtcattacaaggaattttcatgacttcacagaaatttctaataagataagcccatcaagaccgcggcatgttccgattattattcaaaaccacaaagatttgggaaccggggggatctcacaaccaactatccgcatggctggagtcaatcccacactgagggatatcgaagaagaagtctttagcgctaaggaaataatagatgctgaaagttatgtgatcgtagcccaaggaattgaaattccttgggacactgcactgcttgatttgtacctcaaatttagaagttttgatgggtttttatatataactcttgttcctaaaatttcagtgacaaaaatctttccctga

SEQ ID NO: 5391 - DNA, 126 bp, Saccharomyces pastorianus
atgtggggtaaggtcaccagaacccacggtaactctggtgttgttagagctaccttcagaaacaatttgccagccaagactttcggtgcttctgtcagaatcttcttgtacccatctaacatttaa

SEQ ID NO: 5392 - DNA, 462 bp, Saccharomyces pastorianus
atgattgcgcccaaaaatgtgaatatgccaaatataataggttctattaccttttatacgaaattaattttaaaaattatactatatattagtcttttctattctcaaaatgtaataatatttatagtaataaaagagaaaacgatgttaaagaggatacttatacaattaacaaatttaaatgttagatgggtacaagaagattctgacagaagcaccgaaagtcttggctggcaaattgtttctgaaggtagctctaacaacaccagagttaccgtgggttctggtgaccttaccccacataactctaatcttagaacctctaatttccttggaagctctgtaaacgtaggcaatacgcttacccaagtagaattgagcatcttgtggagtagcgacaccttcgatcttgatcaaagagacatttgggttgttgactctcttggatctttggtaggataa

SEQ ID NO: 5393 - DNA, 1995 bp, Saccharomyces pastorianus
atgaaaacgtcatgcggctctccctgctatgcagcaccagagctagtggtaagcacaaaaccgtatgaagctaggaaagcagatatatggtcatgcggtgttatactttatgctatgctagccgggtatttgccgtgggatgatgatccaaagaaccctgagggaagtgatatcggaagactttataattatatctgttctacgccattgaaatttcctgattatattcttcctatacctcgtgacttattgagacgcatcttggtttcggacccgaagagaagaataaatttgaaacagatcgagaagcatggatggttgaaatctcattcttcatttttatccataacgcccgatgaatgggataaactacacaatacgcactctgtgttcagattagagaagccgaaagcaagatatggatccagaccacaatcaagctgttccacttcatccatgggttcaaggagtgataagagagactcactaataatcgattctactttgcttacattcccagccccaccccaagaatcacagaatcatataataaccagacccacttctattccttctgaccaacggatttcacctattagaagatctaatagacacaatagaagcaactccgccgcttccattgctttacaagcagtggtaaatgcggatagagaatacgttttaagccatgaacaatcactaccttcggcgcaaaaaacaaggcagctaactgtaggaaacatatctcccagtctgtcacctccatcagttgtcaattcaggagatgttatggtggaatccacgcagctcaaaagaaatacaacttccggtaataatgtcacattatacttagaaaaagagcttcttggtacagctcaaacaaacaaggttcacctaaataacgcaaattcctcacaaaacgatcagtataacaaacctaaaacccaaaatagtctcaaatataccaagaacttcgaccgcacgtcatcttcatcccatactaaacctagaccaacttcctaccatcctggctcatacacgaagacttcctacaactcgaatagactttctatagaagaggctagcgacaagaccaaaagcaccgcctcatcgcaaacacttaatcaaagagaaacgtctccattcgactccgcaccttatcttgcaccagatacgtgcataacttcatgctcctctattgaaagctctccgaaattaattacaaatggatcattctcattagcaaaaccatcagttgatttacaaattgtttctggtgatttaatcaagtacaaaggagacgcagaaggagcaacgagaacatacgatgaaaaatataaacaaagacgcaaaagcttaagatacagcggaatattcaatgatatatcatgcgatacagtcactgaggaatctgacgatttaaaggtaccggagtcagctgttgcacaagctcaagaacaagagactttagacacgacaaaggcgggcaatgcaaatcaagatgctttaatttcagtaaaaacacaggttaatctttccttagagagatcgctaaatgaccaggttaatattaacttagagagatcactaaatgaaacagaatctgtaaagaaacgtttcagttttttttctttatattcctacaatacttccaagtctagtttatattcatcgatagattctaagagaaaaccttctccaccttcacagaggcgtccaaaaaaagacgatactcatatcaacccgagaacttcatcgacgaccacgtcaaatgtaccaacatctcataaattgaaaagcgatcaatccctacaaacaatcgctcaagatgaacgtattccagaacttaagaaagctgtcagaactgagagggcctccataatggtgtctgaggtcagaaaggcaaatacagataataaagaaaatcaatatccagaacagtcaactgcaaaaagagtactaggatttttcaaaagaagaagcatgagagtttaa

SEQ ID NO: 5394 - DNA, 312 bp, Saccharomyces pastorianus
atgtcgtacactaataaacgccatacatactacgaggggattacgagcgacccgtcgagcacatttcaatatacgcagcgaacggatgaacaaaggcgaaaacatgtaacgtttggtccttacatcctaggatccacgttgggagaaggagaatttggaaaagtaaagcttggttggccaaaaaatttttcaaacaattctacctcagcttttgatttcccaaaacaagtagccgttaagcttatcaaacgtgataccatatcaaacgactacaagaaagaagtaaaaatatacagggaattaatgctctaa

SEQ ID NO: 5395 - DNA, 138 bp, Saccharomyces pastorianus
atggtcactgacaataaaacacctgagatgaacgtgacgaataatgttgaagaaggcgagtttataatcgatttgtatagtttacctgaaggattattgaaaagtttatgggactatgttaagaaaaatactgagtaa

SEQ ID NO: 5396 - DNA, 831 bp, Saccharomyces pastorianus
atgggtctcatcatttggggcagaaagggccgcggaaaatcgccactttatgaattcgactccaatgagttcgaccctcaagtgcttttctccacgggcgcgaagactctagaatttatggacgatcagaaccagccgaacggtgggtctgcatttttgtcatcttctcgccccagccatttcgacaatcaagcatcttctacagatacaacctctaaaaaccccgccatcacacaatctatcgtggatgctgccgttgcggcctcgatgaataatagcggctcaggccccagctccgctcgcagcaacagtaacactggcaacaataatggtagtatcgggttaaggaaaccaaaggcaaaaagaacctggtccaaagaggaagaagaagcgcttgtggaaggtcttaaagaagtcggtccatcatggtccaagattctggatttatacggtcctggtggtaaaattactgaaaatttgaagaacagaacacaagtccaattaaaggataaagcgcgcaattggaaactgcaatacttgaagagtggtaaaccgctccctgactatttgataaaagtcacgggtaatttggaaaaaatctacaaagcaaagaagaaattctcgcaatctccaaactcatctagtatcatggaacaaaatttatctcaacgcccctcatcttcaggtgcttctgctaataacgatgacacccagtctcaccgggatgattctcatggtcaaagcaatgataatatgccgtctaatgggcttttcggaacaagcacatcagacaatactgggtttgatcctcatctagaagatgggatgtaa

SEQ ID NO: 5397 - DNA, 804 bp, Saccharomyces pastorianus
atggactcgcaactgcccaataacaatgaaagcatgaatcgcttcaatgacatcatccagagcctgcccgcgagaactagactaacaatatgctcactttgcctgttggataacatctccacgcagttgttacggtttctgatcctgaatgccaactcccccaacatcatcgcagtcctaaccgatcagaccgccttcctgagctctggcgaaacagaaatatttcaaacgctggtcaagcttttcaagcagattagaatgatctaccacaccaggtcccctttgctttcggtccacgacgtggcgcccggcttgtggttccctaactcaccccctccgctcatactaagaggccacgaggctttcatcatcactgccatcagaaaggccaacctgctgactttcctgttgacatcactgaactgtctcaactacggattcgagctgctgcagtcgattttccttgatattttctgtccgaacacaaacactgtgggtaacagttcgttggaacaaagcgggaagttcctgaaatcgcaggccatcctttacctcgatctgaaaacacaggcctatattgccgggttgaaagagtttcaggacgaggcaaacgaaatatccctggagaaaaagcaagagctactggacttaattttcccatctaacctagccgatattctcgtgcgaagaagaaccggagattctggagacatcacacttttaactccatcggaaaaggacttcgttgaaaggtgtgatcgtcgtagagaaaatctgaagattgttcaggatttcaactcttga

SEQ ID NO: 5398 - DNA, 1701 bp, Saccharomyces pastorianus
atgctctctgaaacaagcattgaaatgagatgccagaattgccacttacctttgcaattagatccgtctttggaaggtcttagtttgacccagcgaaatctactactgtcaaacaataatattgcaactacaacgaatgaaaataccatttccaacaaagaaggagatgctaatgacaattgcgtatttcagataccagaggacagactgaagcggttagaagagattcagaacataaaagatttgggtttagtcgatgacaaattgactacagattcgtttgtctttttaaaccacgatgatgataataacgcttatgataaaaatgacattaacataaaccgtcaaggtgatgattcagacggcgatagtgacaagaatgtcaatagtgatgcctctggccgaaacagctcttttcgagatcatgaagaagaggaacaggagatcaccgatggagatgaaaaccaacaattacaattaaactccaagactttgtccacccaagtcaacgcaatgactaacgtgttcaacatcctttcatcccaaacaaatatagactatcctgtttgtcaggaatgctgcaatctgctaatacatagactgaaaagtgagtatgatgatgcaatcaaggaaagagacacttacgctcaatttttatccaagctagaaactcaaaacaaagaaatatcaaacgccattactcacaagcaatattccaacaatattttggaaaacaaaaatttacaagaggaaaaacaagagctattaaagcaattattgcgtctggaaacgatggataatgatttagatgaagagctaagtcatttgcaagaaaggaaaatccaactacaaaacgaaaaactacaaaaattgagcgatcagaacttaatggatttgaacaacatacagtttaataaaaatctgcaatcgctcaagctacaatacgaattgtctctaaatcatctggacaaattgagaaagatcaacatttttaatgctactttcaaaatctcgcataatggaccttttgccactataaatggactgagactgggcagtataccagaaacagtggtgccttggaaggaaatcaacgctgcattaggccaattaatccttttgttggccactataaataaaaatttaaagataaacttattagactataagttacaaccaatgggttcattttccaagatcaaaaaaagaataagtagcaacgttgaaaacaataataataccacatcagacagtcctggcggttggttaattctacctgtctataacgatgaaaattttaacctggggaaaattttccataaagagacaaagttcgataaatcactagaaacaatattagaaataataatacaaatgacacagcagctttctacaatagcgtcgtccttttcttctcaaacacgtttatcaaatcaagacgcctcttcattaaatattaacggtaacactaataatgatgcttccatcctggaattgccctacatgatgaataaagagaaaattaatgggctatctgttaaactgcgtggtagcaacccgaatcttgaatggacaacggctatgaagtttttactaacaaatataaagtggttgttggcattttcttccaatttattgtccaagtcaatgactttaagccccgcaaacgatgacaatgatatcaacactactggcaattga

SEQ ID NO: 5399 - DNA, 375 bp, Saccharomyces pastorianus
atgtcatggacattctccaacgtaataagcgtttgtttcaagatcatgtcggctaccgtgctaccgatatgtggtagtgccgtgacatcccatctacgtagtaattcctgcttgacgccggtttcctcatttttgaagacgtccagcccacaacttgtcactttaccagattcaagagcgtctaagagggaatcttcatctatgcatgtgccccttccgacgttgactatcctgacaccatctttacacatcgccaaagttttacggttgattatatcatttgtggatggtgttcctggtagggacaaaacaatcaggtcagcatttttccaagtgtctggatcatcgagatcagagtggtacatggcatcgtaa

SEQ ID NO: 5400 - DNA, 1833 bp, Saccharomyces pastorianus
atggcatttttaagatttgcttttagaaactcttggaaatattatagccagtcaacgcgacatttgcataaaataccattgagaaacctgataatacctacgtctactgttttttatttaacacacgatacgatttcaaggcaatgcagcttgatatacaatgactctctgaggccggatcccaaaggtgacactttcgaaatgggtttgtacatatcttccgagaatgaactgcaagagcaaattaaatcttttaggtctactaaaataaccgaatcacgcgataggctaatgcggtgcttaagaatcttgtggttcggtttcaatgataaaattgttgagcctgtgtgcacagtttttagatttttagagatttctgctattttcttacccattctgttgctataccccatatcgtggttcggtcataaactaaaagttaatgatacgagtataactgaaactcggggttctctgatttggtgccaattgcttcgtaaaggattggaattggctggtccaagttttatcaaactcggtcagtgggcaggctctagaactgatattttttcccatgccctctgtcatgaattgggcaagcttcatagcaatgtgtcggcacattccttacgtttcaccctaaaaaaattgtgccaagcattagaagttgataaggttgaagatgccttcgatgaatttaaccataccccgattggggttggatccatcgctcaagtttatgtgggtgaactatctcaaaaatatattgacaaatatgacaatatccaaattggtaaggatggcaaccgttggtgtgcaataaaaattttacatccgaacgtaagatctcaaatacgaagagatttgaaaataatgacattttttgctgacacaattaactggattccaacaatggagtggttatctttaccaaatgaagtagagcaattttcgattttaatgaatatccaattagatttgagaattgaagcgttaaacctacaaagattcaatgaaaatttcaagaactctattcaggtaaagtttcccaaaccatttcttcccttatcaaacagagacgttatgtttgaagaacatgtatatggtctttccatggaaaaatttctatctacaaaaagggagcttgatgatgttgaactttgtaaaaaggtcagcgatccctttgttgacgcatttttacagatgttaatactcgatgattttgttcatgcagatttgcatcccgggaatgtcataatcaggttcgtcaagacaaacaaatacgggacaaacattatatcttctgaacatgattctttccagattacgcacgcgttaaggaaaaagatggataattatcagagtaaagactttgttgatgaactgaagtctattttaacgaattacacgccccagatttgctttatcgatacaggaattattacggaattgaatgaaaagaacagaattaactttatagcgctattcaatgcactggcaagatttgatggttataaagcaggtgagttgatgattgaaagatcaagaactccagaaacggccattgataaagaagtgtttgcttttaaggtagaaaagttagttgataaggtcaaacaaaggaccttcacactaggaactgtatcgattggtgatttgcttgatcaaatgttaagtatggtaagatcccatcacgttagaatggaatccgattttgtttccgtggttgtcgccattttactgttggagggtattggacgacaattagatccgaatttggacttatttgaaaggttcgtattttatgcattgattaatggttttgaagaatga

SEQ ID NO: 5401 - DNA, 489 bp, Saccharomyces pastorianus
atggcctttctggcacaagcaagacaagtagtcatggaaaaccacagtaggaagccccatggcgtgaaggaccaatcggtaaccaagcccatctctttagatggcagaacaggtgaagtaattgttagaaagtctacaggaaaaaccaagatacgcaaaggccagacagaagaagaatacgagcagcagttgcaacactatttccaagttgaaaagggccctgtacggacagatattggctggatggacaaagtggatcctctgacccagatacgaaatggcgagtatgacgtctccaataagcaccagcgacaagtactcagtggattctgccaccgtttctactaccaacgcaagtatgagcaatgtctggacctcagcagctacttgttggggctcttcgaacccttcaacgtgaagaacaaaatgaagcgtgagttagaagagttgaaatatatgatcgagcagtgtcgtaagcaggtgttataa

SEQ ID NO: 5402 - DNA, 2112 bp, Saccharomyces pastorianus
atgcctgcaggtcaacattttctttcaaagatgagtactccatttggtttagatttaggtaacaataactctgtcttggctgttgctagaaacagaggtattgacattgttgttaatgaagtctctaaccgttccaccccttctgttgttggtttcggtccaaagaacagatatttgggtgaaactggtaagaacaagcaaacttccaacatcaagaacaccgttgccaacctaaagagaattcttggtttaaactacggtcacccagatttgaaacaagaatccaagcactttacttccaagttagttgaattggatgacaagaaggttggtgctgaagttagatttgctggtgaaaagcacgttttctctgccactcaactaactgccatgttcatcgataaagtcaaggacaccgccaagcaagaaacaaaagctaacatcactgatgtttgtattgccgttccagcttggtacacagaagaacaacgttataacgtcggtgatgccgctaggattgccggcttgaacccagttagaatcgtcaatgatgttaccgctgctggtgtttcttacggtatcttcaagaacgacttgccagaaggtgaagaaaaaccaagaattgttgcttttgttgacatcggccactcttcctacacatgttccatcatggctttcaagaagggtcaattaaaggtcttaggtactgcttgtgacaaacattttggtggtagagacttcgatttggctatcactgaacattttgctgatgagttcaagtccaagtacaagatcgacatcagagaaaatccaaaggcttacaacagaattttgactgccgctgaaaaattgaagaaggttttgtctgctaacactactgctccattctctgttgaatccgttatgaacgatgttgatgtatcatcccaattaactcgtgaatcattggaagaattagtcaagccattgttggaacgtgttactgaaccagttaccagagctttagctcaagccaacttgactgctgaagatgttgattttgttgaaatcattggtggtaccacccgtatcccaactttgaagcaatccatttctgaagccttcggaaagcctttgtctaccactttgaaccaagatgaagctattgctaagggtgctgctttcatttgtgccattcactctccaactctaagagttagaccattcaagttcgaggacatccatccttactctgtttcttactcttgggacaaacaagttgaagacgaagatcacatggaagtcttcccagccggctcaactttcccatctactaagttgattactttaaaccgtactggtgacttctcaatggctgccaactacaccgacatcacacaattaccaactgacactccagaacacattgctaactgggaaatcactggtgtccaactaccagaaggccaagactccgttccagtcaagttaaagttgagatgtgacccatctggcttacacactattgaagaagcctactcaatcgaagatattgaggttgaagaggctgttccattagcagaagatgctccagaagatgccgaaccagaatttaagaaggttattaagaccgtgaagaaggacgatttgtctattatcgaacacacttttggtttggaagctaaaaatttgaatgaattaattgaaaaggaaaacgaaatgatcgcccaagataaattagtcgctgaaactgaagaccgtaagaacactcttgaagaatacatttacaccttgcgtggtaagttggatgaagaatactctacctttgcctctgatgctgaaaagaccaaattgaaggatatgttaaacaaggctgaagaatggttatacgacgatggtttcgattccatcaaggccaaatacattgctaaatacgaagaattagcttctctaggtaacgttatcagaggtagatacttggctaaggaagaagaaaagaagcaagctttaagatccaaacaagaatcctctcaaatggctgctttggctgaaaaattggctgctcaaagaaaggctgaagctgacaagaaggatgacaagaaggataccgaaggtgatgtcgacatggattaa

SEQ ID NO: 5403 - DNA, 1353 bp, Saccharomyces pastorianus
atgtcttctgaagaacaaaaaaggtttgcaaaagcagaattgatggctcaaaaattgctggaagaacaacaaagacaagaagaagaaaaaaagagaagagaagaacagcgcaatctaaagaaagagaaaaaactaaagcaaaagcaaaagaaggaagaagataaattgaaaaaaaagaagaaggaagacgggaagttagaaaaagagaaacaaaagaaattgttaaatagtatcttgagtgaagatacagagtcctcctcgcccactgaaagccctgtcgcctcttccggtaccaatttagcaccctgggctaacaagcaagcagacgatactgtctctaatcaaatatcttctgctttagaagatctgaagaagaaaaacacattaaagaaagagaagaagcctagtcgtactcaattagaccgcgaagaagcattgaaattacaaaaggaaatactaggttcaacgcaggctcaaacaacagctcataccgcttctgcctggggtataaagccacaacagcaaccaatcaagcttgacatcaaagaagaattattgaaaggctctaaaagtgcaaagggtctgccaacagttaacaagaagaaaatgagtaaggatgatgatttccaatcaaactctactttcattgaagaacagaaaaagctgtgggaacaagttcaaaagaaatccaagaaatccaaccgcattacctcgctcgatgatttcatttcaaggacgccttccccattatcttccgcggccaattcgtcaaatcctagtaatgcgtggaccacggtttcttctaagagtactaccacttcgacaacttcagcggcccccgtgtccgtaaatcaaccaaggtcatacattagtcctgataaactacgttctgtaggaggagcagccagtacaataaaaactaaggcaaacgggaagggtaagcaaatcggctcatctactagtatccctaacctgaaagcccgtcaagttaaagtatcacgagctcctgcctatcccggtaatgcttcggtttctaagcgtcaagaatttttgaagtggtgtcggtctcaattgaagttaaactcaggcgttcaacccgacaacgttttagaaatgttgctgagcttgccaccaggtcctgagtctaaagaaatcattgctgacaccatatattcttatagttcaaccatggatggtagaagatttgctactgattttaccaaaaagcgcttagaatgcgaagaacaaatcagcgatccattaagctggagcgaagtattaactatgcccgaaggtagttctgaagattgggaattccaagtcgtttgtaagaagaaaggaagacgcttctaa

SEQ ID NO: 5404 - DNA, 813 bp, Saccharomyces pastorianus
atgaatcctctgaactctctagtatttgatctccagagtatcaagcttgcagacgcaaactcagatacaactacactatcaaatagcaacactccaatgatgaacaatacagctcctctacaaaggacctcctctcttttggattccattggcatccaaagagggtcgtctccatttgtaccagcaagcgttaatgctgttaatggtgccggtgctgttccaatgaatgcatatggtgctgaaattgctggatctggcccacagatacctgttaatcaagacaacagcggtgcgttcaacgtggcgtctaatttgcatgtgagcactagcagtgcttctcttaacaacaatcagccgaacgcgttgccgaatatgggttcttatcttttcaattcagcaggacttgcctctaacgctggcaaccaacttccaccgcctggtatagaatcgcagtggaaatacgttgactcgaacggtaacatccaaggcccctttagtagcaacaatatgtcacaatggtatcaagcagggtatttcaccccgaccttgcagatttgtagattagcaacatctatcgagccatttggtgtgagtgatcagttcatcacactgggtaaattaactaccttagttaacaactatcaggacccatttaccacttttgattttattgcaattacggcattaagtggtgttccatctgtcacaccaattgcgccagaaaaccaaaaggttgaaacaaaaaagttaaagcctactgctgatgtgcatagtgatgactttacttacgaagaaatattaaatctcaagttt

SEQ ID NO: 5405 - DNA, 1500 bp, Saccharomyces pastorianus
atggaaataggcagtgattatataaaagagtctgcaactctgcttgcctgcttaggttgcatcattttggactatttactcgaagactgcaagctatcaaagaagttcgtggcctgctattatattaaaatgtttcgctcgggctattatcctactgtcactccaagcaactggggctataacggcactgttaaacacgtgctgggggagaagggcactaaggcgctagccttcaaaggcgccaagcgtcaggtacctcttgatgagtttgtggccaactacgttcccacgctaaaggatggtgcgaatttcagattgaacagtctgcttttcagcggctacttacaatcattatacttattgagcggagatctttccaagaaattcctggtgttttatggtagagaaattttggagtttccagacggcggtatttgcactgcagattgggtcatgcctgaatggaaagaacaatattctttggatgccaaacgggcaacctttaacgacaagttgtttacaaaagacgagcaagccactcatccaaaagactggcctcgtctgcatccaaggacgagatacctaacctcagaagagcttgaaaaatgtcattccaagggggacgaatgtcctttagtggtgatacttcatggtcttgccggtgggagtcatgagccttttattaaagccctatccgaggatattacaaaagtcggcgacggtaaattccaagtggtggtgcttaattccagaggctgtgcaagatcgaaggtcacaacccgtagtctcttcaccgccttgcatacagatgacgttagggtttttctgaaccgccagagagccagatttcctcataggaaattatacgctgtagggacttcctttggagctgctatgttaacgaactacttgggccaagaaggcgacaactgtccattgaacgccgctgccgctctatcgaatccgtgggatttcgtacacacttgggataagttggcccatgattggtggtccaaccatatattttctaggacactgacccagtttttaacaagaacggtcaaagtaaatatgaaagaattacaactgtctgaaaaagttgaagcgtcacacaaacccacggttgagaaaccggtcttctttacatatacccaggaaaacgtggaaaaggctgaaaaattcacagacatgctagaattcgatagtcttttcactgctccttcaatgggcctgccagacgggttaacgtattatagaaaggcaagctcggtaaatagattgcccaatattaaaattccaaccttaatcgtcaatgcaacagatgacccggttacaggcgcaaacgtcatcccatacaaacaggctaaagagaacccttgcgttttattatgtgagaccgacttgggtggtcatctggcttatctcgataacgaaaacaattcttggctaagcatacaaactgcagagtttttgaataaatttgacgagttagtgttatga

SEQ ID NO: 5406 - DNA, 825 bp, Saccharomyces pastorianus
atgtcagccgtagatcaaggtagcaatgccggagtcagtgtcaatgccgggtcggccgttgccattgcaaatcttttacgcaaccataaggagctgaaacaaaggcagggcctgttccaggccaagcagacagacttcttccgttacaagagattcgtcagagcactgcactcggaggagtatgccaacaagtctgcgagtcagccagaggtgtatccgcctgtaccttctagcaagatcgaagaccaacttaaatcacgggaaatcttcattcaacttataaaggcacagctggtgatcccagtgaaaaaactgcacagccaagaatgcaagcaacatgggttgaagccaagtaaggacttcccgaacttgattgtgtcgaacaaggcacagttggatgccgacgagtacttcgtttggaactacaaccccaagacctacatggactacgtgatcgtcattggtgtcgtgtccatcatactggcccttgtgtgctacccgttgtggccgcagtccatgagacgtggttcatactacgtgtctctgggtgcctttggtctcttggcagccttctttatcgtcgctattgcaagattgattctatacgttttatcactggctgtctacaaagacgtgggcgggttctggatcttccccaacctgttcgaagattgcggtgtgctggagagtttcaagccattctacggattcggtgaaaagactacctacagctatataaaaaaaatgaaaagaatgaagaaaaagcaagccaagagagaaactcataaaaagaaagctatcgacgaaaaaactgtccaaaactag

SEQ ID NO: 5407 - DNA, 525 bp, Saccharomyces pastorianus
atgaagcaaggtgttttgttgccaactagaatcaagttgttgttgaccaagaacgtttcctgttacagaccaagacgtgatggtgaaagaaagagaaagtccgtcagaggtgccattgttggtccagatttggctgtcttggctttggtcattgtcaagaagggtgaacaagaattggaaggtctaactgacactactgttccaaagagattgggtccaaagagagctaacaacatcagaaagttcttcggtttgtccaaggaagatgacgttcgtgatttcgtcatcagaagagaagtcaccaagggtgaaaagacttacaccaaggctccaaagatccaaagattggttactcctcaaagattgcaaagaaagagacaccaaagagctttgaaggtcagaaacgctcaagctcaaagagaagctgctgccgaatacgctcaattgttggctaagagattgtctgaaagaaaggctgaaaaggctcaaatcagaaagagaagagcttcttctttgaaggcttaa

SEQ ID NO: 5408 - DNA, 1455 bp, Saccharomyces pastorianus
atgcaactgagtgaaaagaaaaatggccagcagggcacaattgatccagaattagacgatgaagaagaggaagaagaagaaatatatcaagactggtcacaagtcgcatcgctggtgaataaaaatgctgcactttcactcccaaggaggggcgaaaaggactacgaaccagatggtactgacctacaagaagtgcttttatatagggcaagaaaggcaatgtttgataccatatctgactcgataagaggcaccactgtaaaatctcaagttaaagggtattacgtaccacacaggcaccaagcagttctgcccaaacccaaaggtagtttcatgcaaacaatgggaagggctgataattcaggcgaattgtggcttgagtttcacgaatttgtttatttggcagagaggggtaccatccttccttactataagttgcagagtggctctaaacatgaaagttctgattacgacgtcgaaataatgcttagtatggaagacttatattcgctattttcaacacagcacgagatggacgaatatttcgtttttgctcatctaaaaagactcggttttataccaaaacagtgccgtcaagatatgggcgtcacaacttcctattatccatcatcgacacgacaaaacaatttacatataataagttcgagattcttttcactgtttaaaatacagcaaatatcgctcttcagcgggttcttttatcgtaaatggaatttttttttcctgaagtatagaacatcgccacaactatatcaaggactaaatagacttatccgttccgtgactgtgccaaaaactagagatgagttgtggtactcaagattcagaagacaacaagaaagagggaaaatagaggtcccactgactttcaatgtatggaaaccgtgtgctaattttaagaagaaaaatcctggcctgcccgatttccaaataatcgtttacaataagaatgataaatctcagcatttccctacttgtaaagagctacgatctatatttgcttctcttgactataagttcgaatttttgaatgaagtcaaggacgatctcgattgggatgccaactcttatgtcgaagggatatcacgaagccaatataacaccaagacggcgtcaaaatctcgaaatgagaagaataccttgccttcaaaatctttaacaaaatttgattctcagaaagagacagttaagcccaattccaaaaagaaatcgaagacatacccaccccatatacagcaaaaacgtaggcttaaggcggggtaccggagtttcattcttgcgattatggataacggtttgatcagttttgtcaaaatgtccgaagctgattttggatctgaaaatgtatggtatacacctagctctcaaagtaaaccagaacgaaaagtaaatggtggaaaggcgatcaaaaaagcaactttgaacaaaacgtag

SEQ ID NO: 5409 - DNA, 897 bp, Saccharomyces pastorianus
atgagaaaattgtgtaatcatccagctttggttctttcaccaaatcacccgcaactatctcaggttcaagactatttaaagcaaactggtttagatttacacgatattattaatgctcctaagctaagtgcattaagaacgttactttttgagtgtggtataggcgaagaagatatggacaaaacgtcatgtcaagatcaaagtttccccatacagaatgtcatttcacaacatagggctttaattttctgtcagctgaaagatatgctagatatggttgaaaatgatctattcaaaaagtatatgccttctgtaacgtacatgaggctagatggtagtgtcgacccaagagacagacaaaaagttgtccgaaaatttaacgaggatccatctattgattgtctactgttaactaccaaagtaggtgggctaggcctaaatttgactggtgcagacacagttatttttatagagcacgattggaatcccatgaacgatctgcaagcaatggatagagcccatagaattggccaaaaaaaggtggtgaatgtttacagaattatcaccaaaggtacacttgaagagaaaattatgggtttacaaaaattcaaaatgaatattgcttctactgtcgttaaccagcaaaacagtggattagcatccatggacactcatcaattgcttgatctttttgatcctgatagtgttgcttctcaggacaatgaagaaaagaataataatgattcacaaccagccaagggaatggaagatatcgctaacgaaacaggcttaactggtaaagccaaagaggcacttggtgaattaaaggagttatgggatccatctcaatatgaagaagagtataatttagacaccttcataaagactttacgataa

SEQ ID NO: 5410 - DNA, 147 bp, Saccharomyces pastorianus
atggtcagattggactctgaaaagcatgttgactttgcgccaacctctccattcggtggtgctagaccaggtagagttgctagaagaaatgccgctagaaaggctgaatcttctggtgaagctgctgaagaagctgacgaagaataa

SEQ ID NO: 5411 - DNA, 444 bp, Saccharomyces pastorianus
atgtttcaacgtgacttcagaaagcacggtgccgttcatttgtccacctacttgaagatctacaaggttggtgacattgtcgacatcaaagccaatggttctatccaaaagggtatgccacacaagttctaccaaggtaagaccggtgttgtttataacgtcaccaagtcttccgttggtgttatcatcaacaagatggttggtaacagatacttggaaaagagattgaacttgagagttgaacatatcaagcactccaaatgtagacaagaatttttggaaagagttaaggctaacgctgctaagcgtgtcgaagccaaggctcaaggtgttgctgtccaattgaagagacaaccagctcaaccaagagaattccgtattgtttctactgaaggtaacgttcctcaaactttggctccagttccatacgaaaccttcatttaa

SEQ ID NO: 5412 - DNA, 2559 bp, Saccharomyces pastorianus
atgaattttctggcccaagctatgtcaggaacatttcaagggtcgaataacaagataaaacgtaatgtaaggacacaaagtgtgccatcagcttcctataatactgacaaagaaccatatggaccaaatactaaccaattaaacgtcctactttctcaattggaacagcaaacaagtgttgatagtaccagcacgagctcaaacttctattccattgcacaatatattctacagtcatatttcaaagtcaatgtagactctctaaacactttgaaattggtggatttgatagtggaccaaacttaccctgattctttgacgctaaggaagctaaatgagggagtgtcagcacaaccgtacgattattttaatacggtttctcgtgatcctgatatctctaaatgtccaatatttgcattggccatatatttcgttatacgatggagtcatcctaatcccccaatctcaattgagaattttactacagtgcccttactagatgcaaacttcgtttctttaaattctaacccattactttatattcaaaaccaaaacccaaacagcaattcaagcgttaaagttctgaggtcacaaacgtttgaaccatccaaagaattgcttgatttagtatttccgtggctgtcgtatttgaagcaggatatgcttcttatagatagaacaaattataagctatattctctctgtgaattattcgaattcatgggtagagtagcaattcaggatctccgatatttaagtcagcatcctctattgttacccaacattgtaacatttatttccaaatttatacctgaacttttccaaaacggggaatttaagggaattagttccatcagaaacctaaacaatgatgctacagattccctaaacaacgctacaggaatagagaatcaatttctaaacccttccgcagaggaaatgaatcaaaaagttgactcgtattttatagaattgtcgaagaaattaactacagagaacattagattaagtcaagagattacacagcttaagtcggatatgaattctgtaggtaatgtatgtaatcaaattttgcaattacaaagacaactcctttcaggtaatcaagcatccgtatcgaagtctgaaaactatgcatcttccacaggtggggggatattgatattggataagaatagcatcaattcgaatatactgagcaatttagttcaatcgatcgattcgagtcactcaaaaccaaactcacaaactcaaactcaaactcaaactcagcaaagggactcgaaagggcaatcgcagggccacagccaaagtatcagtagtcctgccctagcacccattaatatgtttccgagcctgagtaactctatacagccaattttcaacaccttggcaccgcagccgcaagatatagttcagaagaggagactaccgttaccaggttcaatagcgtctgcagcaacgggcagtcccttttctccatcacctatcaatgaatcgccctacagtaaacgatttaagctggacgataaaccaacgccatctcaaacagctcttgattcgttacttttaaaatcaatctcgagtccaaggttgcctctttcaacattggctaacacagctgtagctgcgaattccgcggaatccctccgttcacctcaacaatatcagccttccccagattttgtagtcggtggtagttcaagttcaacaacagacaataactctaagaagattactgaagattctccttcaaaacttgccgagcgaccacgtcttccaaacaatgattccactaccagcatgccggagagtcccatagaaacaactggggacgatgttgctaaagaactgacatctatgtcaaagacttcagcgccaaatgagaatagccccgagccgaaagattttgacaaagatagcaatggcggtactccatgtagtacagatgttggaaaactagtgcccatttccactattaatggttccactgaagccacaaattcaacctgtacgatgacaaaggtatccccatcgttctcgcaaaatgcacccaaatctgaaatgatgaataaaaaaggatccaaagcaggaccaaatgaggccatcaaatataaattgtctagggaaaataagacaatatgggacttatatgcagaatggtatattggtttgaatgggaaatcttcgataaagaaattaatagagaactatggttggcgaagatggaaagttagcgaagattcccattttttccctacaagaagaatcattatggattacattgaaacggaatgtgaccgtggcataaagctcggtagattcacgaatcctcaacaaccgagggaagacataaggaaaatcttggtcggagatttagagaagttcaggataaacaatggcctgactttgaactctttatcattatattttagaaacttgaccaaaaataacaaggagatttgtatttttgagaattttaaaaattggaacgttagatcaatgacagaagatgagaagctcaagtactgcaaaagacaacataacacaccttcatag

SEQ ID NO: 5413 - DNA, 2343 bp, Saccharomyces pastorianus
atgacacaacctataagcaaaacaggaaaggcattacatataaaggaactccgaaagacaagcaatacttccttagagattatggcacatgagaagttcgttatacctgagaacttcacgttggcacagtctttgcaattgctttattccgtcgtcaggagtcaatacaaaaatttagcaacccaaattgacaatggtgaaggtaataaagaaccagtcatctatggaaaaattcacaaaaatctagatgctctactggtatacgtcaatgagggcctacggaaaattgaaaggacatatgttctaaagaaaggactaggaaaccttgtggttgatcatcctgaattgaagagcgttattgaagatttccaaatacttggccaagacatcaggatttcacgtcgtcaaacagaaaaactcatgaccgaggggaacagtagttcttctctctcatcatcctcgtctgttttgggtcttaagacaggaaacagtctacgttttccaaaactttggaaaacgggttccaagaaggataagctaaaagaagttgacgaaaaggaggcaagaatcaataaacaggcagataatatcagacgtgcaagaaagttggaagaagaagaaaaattagaagcgaatcgtcagtatgagaaggaattagaactccaaagggaaaaattgattgagttaaaagttaaggaaaaagtcgaatatgaagtggcacaaaaactagaggaggagagagtcaaaagagatgaacaacgcaagcatagggagcaagcggaaaagaaacgtatatcaaccttaaaacatgataggaaaacaaattacaaatcaagagctagccttgataatccctctttaaagtcgaaatatgtcggaaagattgataacgccgtaagcaaaagaaggtcgcttgatgtttcacgaatagccaacgaaaaaacgtgcactccagtacgaaaatcaatggaagcaacagatataggaatggctgcacaattagcctggtctcagtatcaaagtggggcaaatcaaacaaaaatgagtaataatggcttacctactaatgaaccctcaatacggtataaatcaactcaacctttaaaaaaaagatatgattacaaaaagccaatggtcaatcgaccgatcataaaatcacccactttcaataggcaaaacagtaaaccttcaaggagttcgtctacaaatgcgcacttaaaatcgaataaagccaacggcaataaagctaccggaaagaatgaaccaaattcggtgcctacttcaccaatacttgtttcggagactgcaacatttaccgaaccgaggccaagacgttccaaaagtgctacacctgatagggaaagctctggaagtttatccatggatcccaaaaaagaagacatattaaagtccgttcaaggagtagatcgaagcgcctgcgaacagatccttaatgaaatcttggtaacagatgaaaaagtatattgggatgatattgcggggttaagaaacgctaagaactctttgaaagaggccgtggtttatccatttttacgaccagatttattcaaaggtctcagagaacctatcagaggtatgcttttgtttggcccacctggaacaggtaagacaatgatcgctaaggcggttgcaacagaatccaactctacattcttcagtgtaagtgcatcttctttactatcgaaatatctcggtgaatctgaaaaactgattagagcattattttacatggccaaaaaactgtcaccttctattatcttcatagatgagatcgattcgatgttgactgctcgttctgataatgaaaatgagtcgtcgaggagaatcaaaacagagcttctcattcaatggtcttcgttatcaaatgcgactgctcaggctgaagatcaaacgaatatgcttgatagcagagtacttgttttgggagccaccaatttaccttgggctattgatgatgcagcaagaagacggttttcgagaagattatatattccccttccagattacgaaactagactatatcatttgaagagattaatggctaagcaaaagaataacttggaggatctggattatgaattaataacaaaattaacggatgggttttccggttctgaccttacatcgttagcaaaagaagcagcaatggaacctattagggatttaggagataagctgatgtttgcagatttcgataagattagaggaattgaaatcaaagactttcaaaattcgttagtgacaataaagaaaagtgtatcgccggaatccctacaagaatatgaggattggtccaataaatttggtagtaccggtgcttga

SEQ ID NO: 5414 - DNA, 285 bp, Saccharomyces pastorianus
atggattcgaatgtttttaccactatttttggagatattgttttcttatgctctctcatagacaccagatccgaaactaaactcagaaggctttcatgcaagagggtagatgatgaaagctggcctccacatctattgacgtctataatctcacccattgcaaggctttctccctctgcatctctggataaatcggatttcaaatctggtttatttaattctcgaaggatcaagttgatcgccttcagatatttcacaaatctgggtatgccggccaaactctga

SEQ ID NO: 5415 - DNA, 1554 bp, Saccharomyces pastorianus
atgtacagtagttatcacaattataataagtttggactaaatgaccttataagctctccggcttctctagcaaaaaaagtttcatgtgggttgataattggtctctctctatacataatcgcccccaatttacatgcgcttgtctttggaaattctcagcaaagaatcggaaaatatacgacggtcggtttgataaataatggaaatgattgttttataacttcatcgcttcagagtttggccggcatacccagatttgtgaaatatctgaaggcgatcaacttgatccttcgagaattaaataaaccagatttgaaatccgatttatccagagatgcagagggagaaagccttgcaatgggtgagattatagacgtcaatagatgtggaggccagctttcatcatctaccctcttgcatgaaagccttctgagtttagtttcggatctggtgtctatgagagagcataagaaaacaatatctccaaaaatagtggtaaaaacattcgaatccatcttcaagtcaaaaatttcatctcaacaaaatgatgcgcatgaatttacgctacttttgttacaaactttacaagaagaacactcgaagttagttgaatatactaaatatatgtctgattcgaatgtaccaaaatttccgtttcagggccaaacttccaaatttttgacttgcttacaatgcaacaggacatcaaaaccatcatatcaagagtcattcattcgtgaactgatggtaccacaacaatcatcagagaaactagcgaagattctggcgaacgatgaaacggaaatcatagaagactactcatgcttgatttgtcaaatcagggccatcctaaaccatgaaaagtatagaaacttcaaaaattgttcacaggaagaactgacaatattagatgccttaagaaattatgcgaatgatgcttcaattaacgaagacctaccaatagaagttgaacagtacatcaaacattacgcaaaagataaattgcgtacatctaatgtgaagagtaaagtcataaaaaaagatgtagtagttcaactgcctgaaatcttggtaattcacttatcaagatctacatttaatggaatgacatataccaggaacccctgtaatgtgaaatttgaagaaacgataaaacttgcagaatacgcatccatcgagaatggaacattagcaaaatacggacaaatcgagtatgatttgaaaagtgttgtgaagcacactggctctcattcacgcggccactacgtttgctacagaagtaagggtgatattctctttgacagtgaagttgattcttacgtagaaagcgcatcaattatcattgataatgatgttgaagccaagaaccacattcaaaccattacatctatgaagaactgcaacggaaaacgaaggtacaaaaaagttaaaagtgctctaaagtatccttattggcaaatatctgatgctaacataaaggaaagtaaaacctcaacagttctaaacgaacagaagtatgcttatatgctatattacgaacgtgtaaataaataa

SEQ ID NO: 5416 - DNA, 1254 bp, Saccharomyces pastorianus
atgaaagcgttctcccgagtactatcaacgtcgaaagttttccaatatagaccacacaacaacatcagtcttcgagcggtacggcatttccgctcaccggtcccttcttatgacttttctagacaaacccccaagacggacccagacaatacagcagcaatgctgctacagaaaaacctgatccaaagaaataatatgctttacggatatgggtcaggcacaatacgatgcactttgctcgactctgttgggcgagccaagtccccatcagtagaaataaaacgcgaagatctggtttcgaaacatggactattacctagagatctacgtaaaattgaaaaatcgaggaaaaacgatttggtccctagtttactcgtgcgagagaattctatattgattagtttgcttaccgtgaaagccctaatcaagcctgacatggttatcattttcgattccaccggtagcgggataaccttaaactcagaggctcacaagaactttataaacgatatgaaattgaggctgaaaaatcaagaaacaaccgaactaaatagcgacccgctgccttatgaatttagagcattagaaaccatattcatttctgcattatccaacctcacaagcgaaatgaaggtactcctaaccatatgtaaaggcgtcctccaagacctggagttcagcataacgagagataagctgaggttcttgttaggtcagaataagaaactgagtagcttcaataaaaaggccgtcctagttagggatatgctagacgatttaatagaacaggacgatttgctttgcgatatgtacttaaccgatagaaaagaaggcagaataagggtccaggatgatcatactgaaatcgaaatgcttttggaaacgtaccataattatgtcgatgaaatagttcaaaaaagtgaaagtgccatatcagacgtgaaaaccacagaagaaatcataaacatcattctagattctaacagaaaccaactgatgctgctaggaatacggtatgctataggaatgctctcgttgggaggtgctctatttttaggttctatttatggtatgaacttggagagttttatagaagagagcaattacggctacatggctgtctttattttcgggctaatatctactgtttggctttacggaaaaggaatcagacacctacataaactacaacgcatgacattactaagcaaagtcaaaacagaatctattcatgaaccgccgctgaaaaaatag

SEQ ID NO: 5417 - DNA, 978 bp, Saccharomyces pastorianus
atgacttacaagacagaagaatatcccggagcatctggaaggaaggtagacaagaaatgtctcgacttgcacccggactacaagtacatcctatggacagatgagatggcgcacgaatttatcaaggaagagtacccttggttcctggacacttttgagaactacaagtaccccatcgaacgtgccgatgccatccgttacttcatcctgtcccactacggtggtatctacatcgacttggacgacggttgcgaaaggaaactagacccattactggctttccccgcgttcttaagaaagacctcccccatgggtgtctcgaacgacgtcatgggttccgtacccagacatcctttcttcttaaaggctctgaaatccctgaaacactacgataaatactggttcattccttacataaccattatgggctccaccggtcctttgtttttgagtgttatatggaaacaatacaagagatggggtattcctaagaatggaaccataagaatcctgcaacctgcttactacaagatgcatacctactccttcttctccatttccaaaggttcctcgtggcacttggatgacgccaagttaatgaaagcattggagaaccacattctgtcgtgtgtcgtcaccgggtttgtctttggctttttcatcctatatggggaatttgtattttattgctggttatgttcaagaaactccagcaatgttaccaagaattggaagttcggctctttcaaagccagggtcgctgcaaccctaaactcactaggacaaagacttaaatcgaccaggggcagtagcgacactacaaataacaccgcctcgctatcgaggcagcagaaaagactaagaaaggactcgaatacaaacatgatgatactaaactcctcgagaaacaacaacgatgtctacgatctagagaaaaatgacccttcaaaacacctgctaggaaatgacgccacataa

SEQ ID NO: 5418 - DNA, 903 bp, Saccharomyces pastorianus
atggatgcttttgataacatgtctgtattaaatcgtccgagcgccaacgcaagaagaagctcccaatcttcaaacgaaatgtttgcacctcagattcaagatcttcaaaacataccaagatctttcaatagtaacagtaccaacttaaacttgccaaaaaattacaatgctgctaatcaactccccttttcgtctcatcaacagaagatcattatggagcacctcctaataacgaaaaacaattctcaacagcagaaggactactctcacgtgccatgcaaatttttcaagatgggcaattgtcaagctggctcatcgtgtcccttttcccactctccagacatcatcaactctgcgaacaatttaccttgtaaatactttgcgaagggcaactgtaaattcggtaacaagtgcgttaatgctcatattcttccaaacgggttgagaatgaacagcaaagggcctatcgaaattgcgccttcttcgcacaataattacttctctcactccagatccgcttcgttctccacttacatatcacctccaatgtctgctaatacagacatcgcatattctgcgtccagtacaaactatttcgctccacaatacccgctctccccaccccaaaagagccctgaggccttacattcggattttttttctcctccctcttcttcttcgtcatacgtcaactacaattacagtaacactaccaccaacactagttcctactcccctgtgtcgtccaatatctggcaagaacaaggccagaccgcattgtcaaactctaatgggagtcagaataccaggtactgcacaagccctgcaatccaagaagaatcagacaatgaaattgaagagatgttaattcacgacttcaatgcacggtgccgccaagaatga

SEQ ID NO: 5419 - DNA, 696 bp, Saccharomyces pastorianus
atgggtttaaggattggcgcgcgtgacgttcctttagatctttctgcagaggttgacattatcgatttttattgggatgtcatcttatgcatggagtctcaattcatattgagcagtgacctcacaacgaaggatgaatcaaacaagcaaaaaacttttgctaaactgttaaaagacaagttagtaggcgaaatgaaaactacgctgaaaagactgatttataccgaaaacaacaagcaacatgcaaacggcaatgataacgacggttacaactggagaaatttaggctcacaatattttattttataccttcctttatttacacaggagttgatttggtgtaagctcaatgaaaattatttccatgttatactgccatctttattgaaaaataagagtattcatgataacgatagcaattatatcaacaaagattggctgcttgctcttttggagctgacgtctaatttagatcagaacttcaggttcgaatacatgaagttgagattatatatattaagggacgatttaatcaataatgggttggatcttctcaaaaacttgaattgggttggtgggaaactgatcaagaatgaagatagagaaattttgttgaattcgagtggtgcggccacggactctatctcacatctattaggtgatgaaaattttgtaattttagaatttgagtgttaa

SEQ ID NO: 5420 - DNA, 324 bp, Saccharomyces pastorianus
atgagcaggggcagaggttcgtcttcaccacgcacacgcgaagctgaacccgatgaagacgacgaagagggcactgacttggccattgaggacggagccgtccccacgcccaccttcacgacgttccagcgcagtctgcagcagcagcaatcacccacccttctccagggcgaaatccgactctcgtcccatatctttgcctttgagtttcccgtgagctcgagcaatgttgataagagaatgtttatgagcatatgtaacaaggtatggaacgaatcaaaagaactggctaaaaagccatcgcatcacagaaaaagcaaatga

SEQ ID NO: 5421 - DNA, 2991 bp, Saccharomyces pastorianus
atgtctcagcccatctttagcattatcaagaaaagataccttgctaagcatgcgtatcaaaagacattgaacttgcccaagacaaaatttccaaatagatcaaatttagatactacattgagggaattaataccgaagtcctctcaagaagtttataaggagcaactagacagtttcttcaaggaattttcaaaattgagtacagtggatgataaattgaagtttgtcaaggagaggttattcatcttgcacgatgggccgccctatgcgaatggcgatttacatctcgggcatgctctgaataaagtgttgaaggatattattaataggtaccaactttcacaagggaaatacattttttacaagcctggttgggattgtcatggattgcccattgaaactaaggctttaaaggatttaaatgcgcagcagatcgatttaatatcacctctaaaagtcagatcactggcgttaaagcatgcacaaaaggcaatgaagaaacaaaggcaaaccttcgaacattttgccatcttaacagattgggaaactccatacattacaatagataaagattatgagaataatcaactcaagacctttaaggaaatgtttgaaagaggattgattaaaagacagaataaaccagtttattggggtacagaaactagaactgctctggcagaaggcgaattagagtacaacgaaaaccataagtctgttgccgcttatgtcaaatttcccctagtaaaagaatctgaagcagatttacgcaagaagctaggaatcactggtggtttgcctatatattgtttgatttggacgagtactccgtggacgcttttctcaaaccgagcaatatgtttcaatgaagacttttcttattctctattgcgcatcggaaaagaacttgtcattgtcgagaccgattccataggcaagttagatcagccaagtggatcatgtacagtcatcaagcaatttcaaggtacgaacttacatgggctgtactaccagaaccgtttactaaatgataagatttgtagacccttattaaatggtgtacacgttaccagtggtactgggacgggtttagttcatactgcgccagggcatggacaggatgactatctgatcggtattcaaaacaatctcgagatttattctcctgtggatcatcagggtcgttatcaactgagcgaacttcctgagtctgtaagatctatcttgaaggatgaagaagacacatcaatcggtaagcaagttttagacgtagaaactacgaaagtcattttacaaaaattaaacgacttgaacttactccataaattccatgattacacccattcttatccgtatgactggagatccaagaagcccgtcataattagagccaccccgcaatggtttgcggatttacatgatgtgaaggatttggctttggaaagtatcaaacgggtcaagttttatcccgaaagaggacactcaaggctttcctcttttatcaaaagtagaaacgaatggtgtatttctagacaacgttcatggggtattcctattttgagtttttacaagaaggatgagccggatactattttgatgaattctgaaactttggcgcatgcaatgaaaacagtcgaaaaaaagggaattaacgcatggttcaacggtaaagatgatgacatgaaagagtggttacctcaacaatatcacggagtggcgcacgaatattgtcggtcccaagataccatggatgtgtggtttgatagtgggtcatcatggaacataatcaaagacttctatgagaaaaggttaaaattaacaaaattaccatctcccttatatcaagtttgtttggaagggtctgaccaacataggggatggtttcaaagttcactattaacgaaagtagcatcaagtaatgtacccgttgcaccatatgaagaagttatcactcatgggttcaccttggacgaaaacggtttgaaaatgtcgaaatcaataggaaatacgatttctcccgaggcgattattcaaggcgatgaaactcttggattgccagctttgggtgttgacggtttaaggtatctgatagcacagtccaatttcaccactgatgtagtcgccggtccgactgtgatgaagcatgtaggagaagccttgaaaaagatcagactggcatttcgttatctgttaagtaatttacaaaaatctgaagattttaaccttttgcctgttgaacaattacgtcgtgctgatcaatttgcgttatacaagatgaacgaattgctgaacactactaaaaaccactaccaaaaccacaatttttccaaggttctaattgctttacaataccacttgaacaaccatttgtcagcgttttattttgatatctcaaaagacactttatattccgatagtatatcttttttgaaaagaaagcaagtccaaactacgctatttcatgtattgaattcatatagagcgattcttgcgccaatcttacctgttatggtccaagaagtatggaaacacacacctgaaagatggttacaaggactaggactgactaatatgagtccaatgcgtggaaagtggccacattttgaagtgtgcccagaaatcaacgactcctttgaagagttcgaactgaaaattttggagctgtttcaaaaagagtttaagaagttgaatcaagaggaaggtatcaccaaaactacacaaactcacgttactgttttcaccgatcattccctcccatccagttccagcgagctttgcgacatcttgcaagcatctgctgtcagtataatgaaaggtattagtggcaacagcagcttaccagccattgaattgggaaacggatcgaagttgcaaatcttggtcgaacagagcaaacagcacgtttgccccaggtgctggaaagcaaactcagcggaagaggatgaattatgtgacagatgtggagaggttgtgagcgaactcgtaccttaa

SEQ ID NO: 5422 - DNA, 1170 bp, Saccharomyces pastorianus
atgccatgtatggatccaccaagagacgatactgctcaaactgttagcgaagctagacacttgggtctaagagttaagatgttaactggtgatgctgttggtattgctaaggaaacttgtagacaattgggtttgggtaccaacatttacaacgctgaaagattaggtctaggtggcggtggtgacatgccaggttctgaattagctgattttgttgaaaatgccgatggtttcgcagaagttttcccacagcataaatacagagtcgttgaaatcttgcaaaacagaggttacttggttgctatgactggtgatggtgttaacgatgctccatctttgaagaaggctgatactggtattgctgtcgaaggtgctaccgatgctgccagatcagctgctgatattgttttcttggcccctggtctctctgctattattgatgccttaaagacctctagacagattttccacagaatgtactcctatgttgtttatcgtattgccctatccttacatttggagattttcttgggtttatggattgctattttaaacaactctttggatatcaatttgatcgtttttattgctattttcgcagacgttgccactttagctatcgcttatgacaatgctccttatgctcctgaacctgtgaaatggaacctaccaagattatggggtatgtctattattttgggtattgttttggctataggttcttggattactttaaccaccatgttcttacctaatggtggtattatccaaaatttcggtgctatgaatggtgtcatgttcttacaaatttcattgaccgaaaactggttgatttttattactagggctgctggtccattctggtcttcgattccgtcgtggcagttagcgggtgccgtcttctctgtcgatatcatcgctaccatgttcaccttattcggttggtggtctgaaaactggactgacattgttactgtcgttcgtgtttggatctggtccattggtatcttctgtgtattaggagggttttactacatgatgtctacgtctgaaacctttgaccgattgatgaacggtaagacattgaaggagaagaagtctaccagaagtgtcgaagatttcatggccgctatgcaaagagtttccactcagcacgaaaaggacagttaa

SEQ ID NO: 5423 - DNA, 132 bp, Saccharomyces pastorianus
atgaaatcgttatccacccattgttttttctttttaccgttaaccataattattgactcatcaatgaataaccaattcaaatcctttgttctctccgaaatgtgggattcaaagaggctattatatgtgtag

SEQ ID NO: 5424 - DNA, 567 bp, Saccharomyces pastorianus
atggttaacggtaaaaagaaaaaacaatgggtggataacgatttcattttatgtaagattggtatgactagaagaaaaacagtggactcgaggcttttagaatggcaaaatacgtgcaagcattcaattataaatctgacgccagaaaaggttgataaattatatcaactgaaactgcaaagtaagtccaagaatgaaagaccaaaaaagggattacacatttcgttatcaaacttacaaaaaaaaatggaaaaacttttcattgatgataagtgtgattcacccaaacctcgctattcgaaactccagccatcaagattccgttcttacaaagacggtggctactttattgacggaaaaggttcaatgaagttatcagatattgaaaatgctattcacagatttttatggaagaaatacggaaaagggttagtttattgctatggatgtgatccaaccggtaagaaaaggcataccgaatggttcaatgtaccggtattagaactaccatctgtgttaacgaccatcgattctttttgccgtaaaggagaatgcccattacgatga

SEQ ID NO: 5425 - DNA, 750 bp, Saccharomyces pastorianus
atgaaagaattgaaacatgagaacatcgttagactttatgatgttattcacacggagaacaagttaacgttggtgttcgagttcatggacaatgatttgaagaagtatatggattcgcgcacggtaggaaacacaccaagggggcttgagttgaacttagtcaaatacttccagtggcaactgctgcaaggactagcgttctgccacgagaacaagatactccaccgtgacctgaagcctcaaaacctattaatcaacaagaaggggcaattgaagctgggcgatttcggtctagcccgtgcgttcggtattcccgtgaacacgttttccagcgaggttgtcacactatggtaccgtgccccagacgtgctaatgggatccaggacgtactccacctcaatcgacatatggtcgtgtggctgcatccttgcagaaatgatcacgggaaaaccactgttcccaggtaccaatgacgaggaacaactgaagctgatcttcgacatcatgggtacccccaccgagtcactatggctggcagtcacgaagctacccaagtacaaccccaatgtccagcaacgaacacctagggatctacgccaagtcttacaaccacacacgaaggagccactggacgggaaccttatggacttcctgcacggcctcttgcaactgaacccggacatgagactgagcgcaaagcaggccctgcaccacccttggtttgccgagtactatcagcacacctcataa

SEQ ID NO: 5426 - DNA, 1113 bp, Saccharomyces pastorianus
atgactggcgataaactaacgatcaacgaatacgagagattggggaagttgactgttgaagacagccccgtcaaggatggcattaggggattgcgaaaaggtgattgtgtggtggcattttctaaaaaaaaaatcctggatcttaaactaaagattgagaaagatactaatttgaaagttgcagtgatttacggttccctgcctcctgagactcgtgtccaacaagcctccttgtttaatagcggtaattacgacatcatggtggcatcagatgccattggtatggggttgaacttgtctattgatagagttgtttttaccacaaacatgaaatacaatggagaagaattagcagagatgacgtcttcgcaaataaaacaaataggtggccgtgcaggcagattcaaatctacatcagccagtggagacgttcctcaaggctttattaccggtttcgagtcaaaagtcttgaaaagtgtcagaaaagcgatagagtcccccgtggagtatttaaaaactgctgtgacgtggcccacagacgaaatatgcgcccaactgatgactcaattcccaccaggtacatcagccagtaccctgttgcaaactatcgcagatgaactggagaagagctccaacaagttgttcactttgtccgatctaaagaacaaactgaaaatcatcgctttattcgagcacatggaggacattccgtttctggacaagctgaagctcagcaacgcacccgtgaaggatatgcctatggtcacaaaggcttttaccaagttctgcgagacaatagcaaagaggcacacaagaggtctattatcgtaccgattacccttcaacctgctggactacaagtgcatacccagtgagagctactccctagaggtttacgagtcgctgtacaacataattacgctatacttctggttaagtaaccggtacccgaactacttcattgacatggagtctgccaaagacatgaagtatttttgcgagatgatcatttttgagaagcttgatagattaaagaaaaatccctacgcacgcaagccgtatgcctcgacgagagaccagtggctgccctcgggaagaagagtacatacataa

SEQ ID NO: 5427 - DNA, 1014 bp, Saccharomyces pastorianus
atgcttgctagccattgtatagcagtttctccactccgatcctttcggctattctttgtcatcaacaaagcttactaccatcatggatccaaaaatatagatccattcaatgacaaaaattggatcgtcaaaagacccaaatttcttaatctacctaaaaatgaacactcaaaactagatactttcgaatttacgttcagcaagggtgaaaacggcaatgtttatttacaggattcgtcattcaaagataaccttgacaaagccatgcaattcatctataacgaaaagttgacatcattggacgctaaacaagtgccaataaagaaccttgcatggttgaaattaagagattctatatattcacaactaaaacacacaagtaaacaacccccagcctgtgtccctccattaagtgaactcatacatctttcctgtccaagtaatttaattccactactgatgaactgtaataaagtcaacaactccatctggaaggcgattttgaaaaacggccagagcaatgatgtcagcactttggacaaattcatttatatcctacagcaaacttttgaccacacgtatgaacaagagatattgcctatgatgacgaatacagatgatacagatggcgctcacaatgtcgatataacgaacccggctgaatggttctcagaagcaagaaagatcaggaggcatataatcatgcacattggaccaacaaattcaggcaaaacatatagagcactacagaagttgaaatcagtggatcgtggatactatgcaggaccattgagattattagcgagggaagtatatgacagattccaaaacgaaaaggttagatgtaatttgttgaccggtgaagaagttatacgtgatttagacgataaaggaaatccagccgggctcacttcgggtaccgtagagatggtgcccataaaccaaaaatttgacgttgtcgttcttgatgaaattcagatgatgtctgatcgacaagcttggatccggccataa

SEQ ID NO: 5428 - DNA, 882 bp, Saccharomyces pastorianus
atgattttcaatagggtcattgtaactgagaagggcttaaggtataataatgagactggttctatgccgtcaaaaaaggcattgatttctatttccaggggccacggtactttaggccgtgatgccacctgggatgagttccccaatggtagattcggtgattccagatctcctgcatatggtgagatagatggttatgggccatccatcaaagtgagtaaaaacagagcacttgaactgtgggggacgcccgaggcagttggtgatttaaaagatattttcatcaaatatttggaaggctcaactgatgcgattccatggtccgacttgggactatcggcagaaacggcgttgattcaagaagaactcattcaattgaattatcgcgggtatttgacgttggcatctcaaccagccacaaacgctacattgagcagtgacaaaatattcggatgggggcccgcgaagggaaggttgtaccaaaaggcgtttgctgagatgttcattcacagacagcaatgggaaaccaccctaaagcccaagctggaccattacggacgtaggaagttcagctactatgcgggcgattcttccggctcatttgaaacgaacctggatccgtatagttctagtgttgtgacatggggcgttttccccaacagtcaagtgaaacagactacaataatcgaggaggaatcgttcaaggcatggagagatgaggcgtttagtatctggtctgaatggggcaagctgttcccaagaaacaccccagccaatattcttttaagacaagtccatagagattactgtcttgtttccattgttcaccatgatttcaaagagacagacgaactatgggagatgctactagaccaagtgtaa

SEQ ID NO: 5429 - DNA, 3339 bp, Saccharomyces pastorianus
atgtcccagctattttatcagggtgattccgacgatgagttgcaagaggaactaactaggcagacggttcaagcatctcaagattctcggaacgaaaataaagatgagagcatcgaagccgatcaccttgatgaggtgaccaatgagggctttaagcttttagacgaaggtactgtgctgtacccactgataccgaatgaaccagatgacacggaaacgtccaagcctaacatagatgatattaggccagtcgatattcaattgactttaccattatcatttcaacaaaaggttgtagagagttcgttgattactgaggatgggttagttataatgggaaaagggttaggcctgctggatatagtttccaatctgttacatgttctagctacaccaacctctattaacgggcaactgaagagagcgctggtcctggtgctgaacgcaaagcccatagataacgtgagaatcaaggaagccttggaagagttatcgtggtttaccaatactgagactgacaaagatagcaccagtttggaggatgatgacggtctttttgaaaggccatttagcgtagttaccgcagactccttaagtgtggagaaaagaaggaaattgtacatttccggtggtatcttgagcatcacctccagaattctcattgtggatcttttgtctggtattgttcacccgaatagggttacgggtatgttggtactaaatgcagactcacttcgacataagtcaaatgaatcgtttatattagagatttatagatccaaaaatacttggggtttcattaaggccttttctgaagcaccagagtcatttgttatggaattctcaccccttaagacgaagatgaaagagttgcggttaaagaacgttttattatggccgcgattcagagtggaggtatcttcgtgtttaaatgctatcaataatgaagcatcacaaaacaaagttattgaagtgaaagtatcatttacgaattctatgtcccaaattcaatttggattgatggagtgcttgaaaaagtgtatcactgaattgagtagaaaaaatcctgaattagcattagagtggtggagtatagaaaatgccctggatgtaaattttatcagatcaattgattcagtaatggtaccgaactggcaccggatctcttacgaatcaaaacaactggttaaggacatcagatttttacgccaccttttgaagatgctggtatcctccgatgctgtcgatttttttggggaaattcaattgagcttggattccaacaaaccctcagtgtcccgaaaatatactgagtcgccgtggttattggtggatgaagcacaactagtaatatcttatgcgaagaaaagaatctttcacaaagaaaattataatctggaggagaatccaaaatgggaacaactaatacatatactagaagatattgcatatgaaagaattaataagggcttacaaggacctaccctaattgcttgttccgataatgctacctgtttacaattagcaagagttttgaattcttcaagcaaaagaaggggaatgcgtgaggtgcttttaaataagctgaaatggtatagaaaacaccgggaagaaacgaaaaagctggttaaggaagtccaaagtcaagatacttttcccgaaaatgcaacattaaatgtcagctcgacattttctaaagaacaagtggttacaaagagaagaagaacgcggggtgcttcgcaggttgcggctgttgacagactgagaaattcagggactaatgtggatatggaggaagttttggaagaccagaagttgactgaagaaatcaaaaaggaaaatagtgataaaccgcatgatggactggaagaaagcggtataaatgatgaagaagatcttgtaaatgattcgaaaatatttgagctacaagaacaagaaatcaatgaagcttttattcatgataacgataacgaacttgccaatgaagaaatagagtatgcggaagaacttccgaaacatgtatctgttcacttcaataaagaattatgggccgaacattgcagtgagtatgagtatgtcgatcgtgaggatgaaattttagtctctactttcaagagcctcaatgacaactgcttattgcaggaaatcatgccttcttatattataatgtttgaaccagatatctccttcattaggcaaattgaagtttataaggccatagtacaagaattacaaccgaaggtgtattttatgtattatggtgagagtattgaagagcaaagccatctgaccgcaattaaaagagaaaaggatgctttcacaaagttgatcagagagaatgccaatctgtcgcatcactttgaaacaaatgaagatctttcccattataaaaacttggctgacagaaaattaaaactctcaaaattacgaaaatctaacactagaaatgcgggtggacagcaaggatttcataattttactcaggacgttgtcattgtggatactcgtgagttcaatgcttcattgccaggtttactctttcgatacggaattagagtccttccttgtatgttgactgttggtgattatgtgataactccggacatttgtttagaaaggaaatcaatttcagatttaattggttccttgcagaataatagattagcgacccaatgcaaaaaaatgctgaaatactataaatatcctactctgttaattgagtttgatgaaggacagtcgttttctttggaaccattcagcgagagaagaaattataagaataaagacatatcaacggtgcacccgatatcaagtaaattatcccaagacgaaatacaattgaagctagctaagctggtattgaggttccctactctgaagattatttggtcttcttcgccactacaaactgtaaatataattctagaactgaaattgggccgtgaacagccagatcctagtaatgcagttatattgggcacaaataaaactagaccatatgtgaatgacaatgtgtcggggggcttaaatgatggcgataatgagtccaaatataagaagttgctggacgttccaggagtgtcaaagattgattacttcaacctacgcaaaaaaatcaagagcttcaataaacttcaaaagctttcgtggaacgagattaatgaactgattaatgacgaggatttaacggatagaatatactacttcttgaggacagaaaaggaagaacaggagcaagagatcaaggattctaattcggaattgcttgccaagaacatgaatgatgatgctttaaatgacgatgacggtgatgatgacgtgctggatgcatttatgtaa

SEQ ID NO: 5430 - DNA, 1467 bp, Saccharomyces pastorianus
atgacagatatcgtagctgtttacgacgttctagtggtcgggtgtggtcctggcggctttgccgcggccactcagtcctcgcaggcgggactgcacacggcgtgtgtcgaccagcgggcctcgctgggtggcacctacctggtggacggggccgtgccctccaagacgctgctggacgagtcgtacttctaccgactgttacagcagcgcgagctcttcgagcagcgcggcgtgcggctgccgcccgccagactcaacatgcaggtggcacaggccgccctaaagcagaatatagaacgtttgggcaaagtttataaatccgagctatctaaatataatgtcaccgtgtataatggtacggccgctttcaaaaccccgcaccgcgtcgaaattgtacagcacggcgaaagcggtcttattgtggaggcgaagtacattatcgtggcgacggggtctacgatcatccagtgtcccggcgttgccatcgatgaggccatggtggtctcgtctagtaaggccctctcgttggactatgtacctccgcggttctctatcatgggcggcggaaccataggcctggagatcgcatgtatattcaataatttcgggtcccgtgttaccatcatcgagtctcaaagcgagatctgccagaatatggatgccgagctggcgtctgccaccaagaggcttttgcagtctcaaggaattgtcttcctcttagataccagagtgcaatgcgcggagagggatgccgccgctcaactaaatgtcacgctgttggacaaacgctcgaagaaaaatttcgcgcaccagtgtgatgtgttgatggtgtcgattggcagacgtccccttctggagcatttgaacatctccatgatcgggttgagtgagcaggatttcgtggagaacgtcgatgagcaaacccagagcttatcgaaattccctcacatcaagcccatcggtgatgtcactttaggccccatgctggctttgaaggcggaacaacaagcctcacgggccattcaatctatactctctgcgggttctgtagagacttcgaattttaacttcccgccgaacgtgctgtattgtcaacctcaagttgcatgggtcggatacacggaacagcaattggtttcctctcatatcccgtaccaaacgggcaaggctttcttctcgcagaacataagatataacactttgatgccacagaaggacactgctgtccccggcttcattaaagtcttggtgggttctcgcgacttgaaaatactgggcgtccacataataaacagcgacgcaaatgaactgcttccgcaggcgtcgatggctgtgtcgcttggccttaccgcgcatgatgtttgtaaagtggctttcccacacccgagcttatcggagtcgttcaagcaggccacccagttcgcaatggcgactgccgctttaccgagcataaatgtccgggaataa

SEQ ID NO: 5431 - DNA, 105 bp, Saccharomyces pastorianus
atgtttcaattcgatcctgacgtagacactaaatgggcagaacaggaggatatggacagcacgtttcagcgcagaacctcactagattacgggggctatttttaa

SEQ ID NO: 5432 - DNA, 978 bp, Saccharomyces pastorianus
atgactaccaaccatgatttttatttcgcgcttctccgcatttccatattacagttactgaaggcccagggatttgacagggcaaggccgagtctggtggatgttatgaccaatctttacacaaagtttctgaatttgctagcatcagaggttagttctattgcccaatcgaggtgtgatcaggacgatacagtggctttgcaggatataactctggctctggaaaatttgggcatcgttaagcctacagatgtcctggatgtctatgatgagaaccctgaattatcaagttcacggggaatggaaaagttcaaggagtggtgcttaagtgctcaatcgagtgatgcacgaataaccgctttacctacagtggaattattgcagaatgaagaaaaagagtcaaatcctctatcggcaataccagactacctcaaccagttacaacaaaacaaaggtgtcaaacagaagttggaaacgaaaaataaaaagacagagctgatagaagatctgataaacaataatggattggatgactggattaaattagtggtggcgagacaacgaatcaacttgattgaaagagcatccaaaaaagactctcaaaacgtgatggctttgccacatattgggggctataaatcttcacttttaagccatccacaccatagtacgataaacaacgaagacaggctaccttcaaccatgactcccagagatgaggacgctttaacagaaatacgagataatccacttgtaacaagcaagctgccgataatgaggaccgaaaatagactggaaaacataactctgtcctttgagaatgaggagctcgaaccattgacgaaactgaagatcccaatcaaacacctcatgacgatagtgatgtggataattctaaaggagataacaaaagttcagcaggatcacctcataatgatgactatgatatatcaatgtttcaattcgatcctgacgtag

SEQ ID NO: 5433 - DNA, 651 bp, Saccharomyces pastorianus
atgaatagcatgaacagaaaagtccgtggtaaaaaaggaaaattaaagaagattcaaagaaaatatgccgatcaagatgagcatgaacgccttttgcgtttagaagctttgggtaccttaaaaggtatcgagaagcaacaacaaaagaggaaagatgaactaatgaaactagaacttagagaagacaaaaagaatagacgcgaaaagcaaaagaatttacaggctttgaagtttagtaaaaacgaaaaggcaaaggttagttatgatagacatatggccgaactaaaaccatctctcgataaggacgatgtagtcattgatattgtgcctgtgtttgctccttggcctgcacttcaaaaatataaatataaggtgaaaattcaaccgggaagtgcaaagaaaaccaaaactttaacggagattttacactattttaagagtagacaggttgatagttcttctaatgacaaggaaacggactggccaaaagaacatgaaatgattaaaagcttgaaggagcaagacctggttcttctgctgtgcgttgataaattaaaaataacgattgctggtcaaaaatccaccaagaacagtggcggctcacaaaagggcaagaaaagctccaaggcgggcggtaagaaaagaaaataa

SEQ ID NO: 5434 - DNA, 2349 bp, Saccharomyces pastorianus
atgaaacaacgaattagcgcgttagacttacagctgctggccagagaactgaaacaaaatctggaaggttacagattgagtaacatttacaatattgccgactcgtcaaaacagtttttactcaggttcaataaaccggactctaaattaaatgttgtggtggattgtggcttaagaatttacttaaccgaattcagtaggccaatccccccaactccttctgggtttgttgtcaagctgagaaaacatctaaaagcaaaacgactaacagctttaaagcaggttgaacaagacagaatccttgttttgcagtttgctgatggtcacttttatttagtgctggaatttttcagtgcagggaatgttattcttctggatgaaaacagacgaatcatgtccttgcaaagagtggtcttggagcatgaaaatagggttggtgaagtttatgaaatgtttgatgaatcactttttgccacagataatgagaatatcaaggagtattcggaaagctctaaaacagaatacacttctaaccttgttaatgaatggatagaagcagctcagagcaaatacgaatcagatgctgccgttattaaggaactaaacattgagagtaaaaagtgttcgaaagaaaagaaagtcagagttcattccatccataagctgctgctttcaaaggtccctcacttgtcttccgatttactttcgaagaacttgaaagtatttgatattgacccttcggaatcttgtttagcacttctaggtaagacagacacactagcaaaactgctaaatgttacccaatcagagtataatgaacttttatcaacatctgatagcaggggttatattttagccaaaagaaatgaaaatttcaatcccgagaaagattcagcggacctcgaattcatttttgatacattccatcccttcaaaccttatatcagcgatccagacaacaaatatttcagcatcgttgaaattgaagggttttacaataaaacgcttgacaaatttttctcaacaatagaatcttccaagtacgccctacgtatccaaaatcaagaatcacaagcacaaaagaaaatcgatgatgctcgtgctgaaaacaatagaaagatacaagctttactgaacgttcaagaatcaaatgaaagcaagggtcatctaataattgaaaacgcctccttaatagaggaagtgaagcttgctgtccaaggtttaattgatcaacaaatggattggagcactattgagaaactaataaaaagtgaacagaaaaagggaaatatgattgcacagcggataaacctgcctctgaatttgaaaaagaacaagattagcgttaagctcgatgtgtctaaggatcaggaaggtaccgcttcttcggatgaaggcaatgactcagagtccagcactagtgaaagttctagtgattcagattcagatccagaagattcaagcgatctaagaaaaaaaagtgcgaaaaatatgaaaaacaaggagtccatcaatacgctaaatgtcacaattgaccttggtttatcagcttacgccaatgcctctgaatatttcaatatcaagaaaacaagtgctgaaaaacagaaaaaagtggagaagaatgttgggaaggctatgaagaatattgaagtcaaaattgaccaacaactaaaaaagaagctgaaagaatctcacagtgttttgaagaggattcgtactccctatttttttgaaaagtataactggttcatttcaagcgaaggatttttggttatgatgggtaaaagtccagcagagacggatcaaatcttttctaaatatattgaaaacgatgatatttacatgtcgaatagttttgatacgcatgtatggatcaaaaatccagaaagaacagaagttcctccgaacaccttgatgcaagccggcatattatgtatgtcttcaagcgaagcttggtctaagaagatagcctcctccccgtggtggtgttttgctaagaacgttagtaaatttgatagttctgataattccgttttgccggaaggtgcgttccggttaaagaatgaaaaagatcagaaccctctaccacctgctcaactcgtaatgggcttcgggtttttatggaaagtgaaaataaatggaaatgatgaggatgaggatgaggatgaggatgagggagtagaagaaggagaaaacagtgatggcgaaattatcgaatcattagaagatgaggatgacaacgaggatgatactacaaatgatagtgattttgaatttgtacagcgaccgcgagaaacgaaatacgaagacgaagagaacattgtgccacactatactatccgaaagtaa

SEQ ID NO: 5435 - DNA, 1785 bp, Saccharomyces pastorianus
atgtcaattaaaggcacgatgaagctcttaagggatttgctggtagataggaaggagtttgagaactggaagaacaatttagcatgggctcgggatggtactttatatttaacaacctttccagatatcagtattggccagccaaaatttactagggacgtgaataacaatagtaagaatttgttccatgtcaaagaatgccccttagaatttgaaaacaaactggatttcgagctggcacaacagaacggtttgctgaattcgcagccagtctcctatcccagagtctgtaaaccatcaccgaccgatgattggatagctgtattaaccaataatgggaatatttctgtatacaaggacagtaaaaaccttatcaatattgactcaccaggcgatttgagccgcagaatttaccattgctttgagtggaatcctaatggttcttcaattgcagtcggtaacgaagatggtgagcttcagttttttggtattcagaagaacctagaaaccactccagaatttttgtttgaatatagcttaaaattaagtgatgctggctcaagagattgggtcacccatataacgtggtgcgatgatattctcatagcggcgctttcaaataattctgtattctccatcacatttcccactccctccaaagatcctgtatccaaattattacaaagtgcttcgagaagaaaaattactgatttgaaaatagtggactacaaagtaattttaacctgtcctggatatgttcataggatagatttggaagattattcaatttcaagcttaaaaacaggatctccagaaaacttttatataatcccactgaggtacgaaaaagagagtacggtattactgatttctaataagactagttataaagttcttttaggagacggactcaatatgacggtagataatattattgcgccttatttggaaaaaaaattcaaaaagtggagcactatttggaatgagttcaacaattatgaaacatctgtggtcattcatggcgtgtctctctctccagatggatattcagtagcaataatatataatatggaacgggtggcattcaaatacaaaatagcctcagaacaatctttctgtataatgttcgctccattatatcaatcttggagaatttctgaatatgctgatggattagcgtggtaccaaacgtaccatatttatgacaaatcaatgcctcgacttccagacaatttcagtgcagataagaaattgctaaatggaagctaccctattagtctggatttcaaatcatacctcatagctttggtaaaaagtgaagagatgagatccataatgtttttgaatatgacaaatgaggtcccatcacttttatcatttcaagaagcattgtacgagtatgtcgcgaataaaacatccgagctaacaaacaactttgatttagcctgcgtattgtctttagcaaagatactgaacagacaagcgccgattactaatggaaagttaacaatgaaaagcggtttacttgaggaagatttcgacttagagagcttcaaagctgaccctgaaattgtaacatctacaaccaataatacgtggaaaagatgcggtgtgactctacttccgatactcactacgcaagtaaaaatatgtcccgtgagtaaaaaaagagtactggatataaaacgagatgacgtcaacaattatggctggttcacaagaggtctactagagacatttaatgacaaaagcatatacagcggaacgacgctggaaacaatttaa

SEQ ID NO: 5436 - DNA, 1815 bp, Saccharomyces pastorianus
atgatgtttttgtacgctacatgggctttgagaagaaaaagcggagaaacaaggttactgcttggtgtgtcgggtctagttatagtcttggcctctattatctgcgcatccggctttttaactctttttggtttaaggtcgacattgatcatagcagaggttataccattcctagtcctagcaattggtatagataacatttttctgattacgcatgagtatgataggaattgcgagcaaaagccagaatactcaattgatgaaaaaatagtcagtgctatagggaggatgtctccttctatattgatgtcattgctgtgccagacaggttgttttttgatagcagcctttgttacaatgccagcggtccataattttgctatatactccacggtatctgttatgtttaatggggtgctgcagttgacagcgtacgtgtcaattctgtctctctacgaaaagagaaccaagtataaactagttacaggaaatgaagacgctacggaatcctctttgaacaacttttatcttaagattctgattcacaagaagatgattttaggagcatttttggcttggtttttaacctctctggttttcttacctggaatcgaattcggattagaccaaacattggccgttccacaggactcttatctggttgactattttaatgatgtttatcgctttttaaacgtaggcccaccagtatacatggttgtgaagaacttagatttaactcaaaggcaaaaccaacaaaaaatatgtggtaaatacactacctgtcagaaggactctttggctaatgttttagagcaagaaagacacagatcaacattaacggagccattggctaattggttagatgactatctaatgtttttaaaccctcagctagatcaatgctgtaggttaaagaagggaacagatgaagtttgtcctccttttttccctagcagaagttgtgaaacttgctttcaacaaggatcttggaattacaatatgtcagggtttcctgaaggtagtgagtttatggagtacttgagcgtatggattaatgcaccaagcgacccctgtcctctaggtgggcgcgctccgtattcaacttctttggtgtataacgaaacaggtgtttctgcttcagttttcaggacagcgcatcgtcctctgagatcccaaaaggactttattcaggcctatgatgatggaattaggatatcagcctctttccctgaattagacatatttgcatattcaccattttacattttctttgtgcagtatcaaactttgctgccattaacgttgaagctgatagttagtgccatcgttctgatcttttttgtttcttctcttttcttgcggaacaaacgaaactcattcttattggccttggttgttactatgatcatcgtagatattggtgctttgatggtgcttttgggtatttcactgaatgctgtaagtttggttaatttgattatttgcgtcggtttagctgtggagttctgtgttcatattgtaagatcgtttacagtagtaacaagtgataccaaaaaagacactaattcgagagttctttactcactgaatactgtaggcgagtcggtcatcaaaggcataactttaaccaagtttattggagtttgtgttctagcattcgcccagtcaaaaatatttgatgtattttatttcaggatgtggtttactctggttattgttgcagcaatgcatgcccttttatttcttcctgcattgttgtcattgtttggtggcgaaggctttagggacgattccatagacgcagaagattaa

SEQ ID NO: 5437 - DNA, 1392 bp, Saccharomyces pastorianus
atgaatatactatggattgtggcgctaattggccatctgatccagctcgttcaggcaactggcctttgtgcaatgtatgggaattgcgggaaaaagtcaatatttgggaacgaactaccttgtcctgctcaacctagctttgaaccacctctcctttcagatgaaactagtaaaattttggttgaagtttgtggtgaagagtggaaagaagttcgtcatgcttgttgcaccaaagatcaggtcgtggccttaagggataatctgcaaaaggcccagcctttgattgcttcatgcccagcatgcctcaagaatttcaataatcttttttgccacttcacttgcgctcctgaccaaggaacgtttgttaatattaccaaagtagaaaagtcaaaagaagacaagaatattgttgcagaactggacgtttttatgaattcatcatgggcgtctgtattctacgattcatgtaagaacatcaaattctctgctaccaatggttatgcgatggatttgattggaggtggtgccaaaaactacagtcaatttttgaaatttttgggagatgcaaagcctatgctaggaggatctccctttcagatcaattataagtacgatttgccagagcaggaaaaggaatggcaagaatttaatgatgaagtttatacgtgcgatgatgcccaatataaatgtgcatgctctgactgtcaagaatcttgccctgatttggctcctttgaaagacggtacttgtaaagttggttctcttccatgtttctccttttctgtggtgatattttatactgtctgtgcactttttgtagctacgtggtattgcttcttcaagagaaaggaagggagagcgctgattgtagatgacgatattttaccggagtcggcttctttggatgactctaatacaaatatatttgagagctttaataacgaaacaaattcatttaataacaaattggccagtgctttctcgaaagtggcacaattttccgtccaaaatccatacaaaatattagcagctactgcccttagtatctttgcattcggttttatcatctttcaatacggtacccttgaaacaaatccaatcaacttatgggtaagtaagaactctgaaaaattcaaagaaaaagaatattttgacgataattttgggccattctatagaacagagcaaatttttgttgtgaatgaaacagggcctgttctatcgtatgagacacttgaatggtggttcgatatgaaaaattattacggaagagctacaatcgccagaaaatattggataccaagacttttgtttcagaccaacagaagactctacctgcgttatagaatcctttacgcaatactttcaaggagctttgccggagaaggatag

SEQ ID NO: 5438 - DNA, 1119 bp, Saccharomyces pastorianus
atgtctgcgagtgatttcaagcctgaaacatggactttgaatgccaacgaagctttaaaaatttctatagttggtgaaaacgcgattcaatttttgccattattcacgtatccaatctatggcgattctgaaaagatttatggctacaaggatcttgtaatccaccttgcatttgattcgatagcattcaaaccatatgtcaatgtcaaatactcgtcaaaactaaatgatagcgatgttagtaatgtggaggaaaaactgctctcgtttttaccaaaggatgacgtgattgtcaaagatgaagctaaatgggtggattgttttacggaagaacaaacaaattataacctaccagaaagtttttgtaaagtgtctgagtattcactaaatggggaagaatttactgtatataaaacaaatttgcttgacgattttgcaaagaggatgcatcgtcgtgttcaaatcttttcaattctatttattgaggcagccaactacatagatgagaacgatccaaactgggagatcttttggcttttgaacaagaaaacaaaacaattagttggatttgttactacctacaaatattggcattacctgggtgcacaatcttttgatgaaagtgttgacgacaaattcagagctaaaatatctcaattcctcattttccctccctatcagaataaaggacacggctcctgtctttatgaagccatagttcaatcttggttgagtgacagaagcatcactgaaatcactgtcgaggatcctaatgaagcgttcgacgatcttcgcgatagaaatgacctccaaagactacgaaaactaggttttgttgccgcgttacgagagcactcggaacacgcgtttttagaatcaaatagaaggtctttcaaactagaagaaaggcagttcaatcgacttgtagaaatgattcttctttccaacaagtctccatcatttgagatgaaagtgaagaaacgactttttatcaaaaattttgatgctctcagtggcacagaaccagaagaagcaaaggaagccctgatgaactcatttgttctggtgaaagatgattatatgcgtattataaaatcagtcgaagatttcaaagcctag

SEQ ID NO: 5439 - DNA, 1446 bp, Saccharomyces pastorianus
atgctgcacagatctataacgagcacgtatgtgcgcaggagactctttagttcaactacaatcataaagtcgtctgctataactcttaaagaagctcttgaagaagttatacctcaaagaagagatgcgatcacagaattcaaggctgtatatggggacacagtagtcggaccgattaccatttcctcaattctaggaggaatgagagggaatcagtcaatgttttggcaaggaacatcattagatcccgaacacggtataaagttccagggtctaacaatcgaccaatgccaaaagaggttgcctggcacaggtattgatggtgataatttcttaccggaatcaatgctgtggctactattgacaggtagtgtacctacacttgagcaaacaaattctttaaaaaaagaactagcgtttcgcggaaggaaattaccccaggatacagagaaagtgctgttatgtttacctagagaaatgcatcccatgacccaacttgcaattgggttagcgtctatgaataaagggtccgtatttgctacaaattaccaaaatgggttaatagggaagaaggacttttggattgacacccttgaagattctctaaatttgattgcttctcttccactcctgacaggtagaatatattcaaatatcacaaatgaaggacgttcattgggagagtatagtgaggatacagattggtgttcaaatatatgctctttgctcggaatgaccaatggaagcaagtcttccaataagtgtagtctcaattcccagcaatctctagatttcgtcaatttgatgaggttgtacaccggtatacatgttgaccacgagggaggcaatgtttctgcacacactactcatttggtggggagtgcgttaagtgacccatacctcagctactcatccggcataatggggctcgccggaccattgcatgggttagccgcgcaagaagtggtgagatttttgcttgagatgaattcaaatatttccagcgtcgaacacgaggaggaaatcgaagactatctttggaaagttttgaactcaagccgtgtaattcctggatatggacatgcagttttacgaaaacctgatcctcgatttacagcaatgcttgaatttgcgcaagccaggcccgacgaattcaaaaatgacgaaaatgttttattaatgcaaaagctgtcggaggttgcgcctaaggttttgctaaagcatggcaagagtaagaatccgttccccaatgtagactctgcttccggaattttattttatcactatggaattaaggaactactattcttcactgtaatttttgggtgttcaagagctataggacctttgacccaacttgtttgggatcgcgttttaggcctaccaatagaaagaccgaagagtttgaactttaaaggtctcgaagccctcacaaaggtgatatag

SEQ ID NO: 5440 - DNA, 1707 bp, Saccharomyces pastorianus
atgctgttcaatagatcgacttcaagaacgctaaaaaagttggtttcctccccaggtaagtcgttgcgagcatactctagcaaggcaaaaagtaccgaggattttttatcgtcagaatcagcgaaagtagaaaaatggtgggcttcaaggagattccaaaatgtttctcgtccttattccgccattgatgttgtgaagcaccgaggcagtctgcccgcaaatacttcagtttacccttcatcgcatcaagctcgaaaactgttcaatttattggaggaaaacttcaagaggggtacgccgcttcatacgttaggggtcattgatcctgtacagatgagtcagttagcccgttgtaaaaaaattaaagtcgcttacatttcaggttgggcttgttcttctacgttagtagggtctacaaatgaagtttccccagattttggcgactatccatacgatacggtgccaaatcaagtggagagaatattcaaggcacagggattgcatgatcgaaaggctttcctagaggcctccatcaaaggctctgtccctgttgattacttaaagccaattatcgcagacgcggacatgggtcatggtgggccaacgacagtgatgaaagtggccaaattgtttgcagagaagggagcagccgctattcaccttgaagaccagatggtaggtggtaaacgatgcggccatctcagcggagctgttctggtacctacagcaacacatctaatgaggttaatctctactaggtttcagtgggatatcatgggtacagaaaatttagttattgcaagaaccgactcttgtaatggcaaattgttaagttcaagtagcgatccaagagatcatgaattcatcaagggtataataaaagaaaacgtagtgccttggagtgaaaaactgattgaaatggaaaataagaaggtttctaattctacaatttctgccatggaacaagaatggtaccatgaaaatgaactgtttacatttgaggaagctttagcaaaaagtttaacgtcaggcgaatttgaaacttacaaagcaaagaaagaagatcttatgacgaataagttaaacagaacatatttaagcctgagagagatgaaacttctggcccaagaagtcgcgccatctaaaaaagttatttttgattgggacgctccaaagacgaaagagggatattacatgtttaagggttgcatagaagcggccatcagaagatctttagtatttgcaccatactcagacttgatttggctggagaccaaaacccctgatctagagcaagcacgttcgttttcaagtgaaatccataagtttttcccggctaccaagttagtgtacaatctctctccaagtttcaattggagcgcgcacggattcgatgacaaggcactaaaatcctttatttgggacttggcaaaagaagggtttacggtgcagttagtttcccttgccggtctacattcggatggggtatccttctgggagttggccaacaactttcaaaatgacggaatgaaagcatacgtcgaacaggtacaaaggcgggaaaaggaaagtaactgcgatgtactaacacaccagctttggtctggcgcagaatatgttgattccttgatgaaagtagttcaaaacggggcttcatcccaaactttaagtacgtctggcgagagcttcaccgaaacacaattttag

SEQ ID NO: 5441 - DNA, 576 bp, Saccharomyces pastorianus
atgtattcaggtgctactggtgaagaactcagagcagatatttatgtcggtgttgtttactatcaaagattacgtcatatggtcaacgacaagttccaagtccgttccaccggtcctgttaatagtttgactatgcaacccgtcaaaggtagaaagagacatggtggtattcgtgtcggtgaaatggaaagagatgctttaattggacatggtacctcattcttgttacaagatcgtttgctaaattcttcggattacacgcaagcatctgtttgtcgtgagtgtggctccatcttgaccacacaacagagtgttccaagaattggttcgatttcgacagtttgttgccgtcgttgttccatgagattcgaagatgcaaagaagttgttaaataaatcagaagatggagaaggtgttttcattgacgattctcaaatttgggaagacggacaagggaataaatttgttggtggtaatgagacaactacagtggctataccatttgtattgaagtacttggattctgaattatccgctatgggtataagattacgttataatgttgaacccaaatag

SEQ ID NO: 5442 - DNA, 555 bp, Saccharomyces pastorianus
atgagcaaagtgattaaaccacctagccaaaccagaacggcagatttccgcactctggaacgtgaatctcggttcattaatcctcctaaagataaatcggcatttcccttattagaggaagctgtccggccacatattggttcctttaatgcattaactgaagggccagatggaggtttgttaaatctaggtgttcaggacattggtgaaaaagtcatatttgatgggaagccatttgattctgaagatgaaaccgccaatagcagctaccttggaaataagctttctgttagtgtggaacaagtttccattgcaaagcccatgtccaacgatggtgtttcttctgcagtagagagaaaagtttacccaagtgagtcgagacaaagacttacttcttatagaggtaaattacttctaaagttgaagtggtccgttaacaatggtgaggaaaacatgtacgaagtaagagattgcggtggtttaccagttatgttacaaagtaacagatgtcacttgaacaagatgtccccatatgaattggtacagcataaagaa

SEQ ID NO: 5443 - DNA, 585 bp, Saccharomyces pastorianus
atgctacatcatatggctggctatccgctcctaaagacccccttgcgaattccaataaagctgaaaagcgtgttggttgacgattgggagtatgtaacgaaggataaaaaaatctgcaaactgcctgctgatgtgacggtggaacagctattaaataagtacgagcatgaagtaagtcaagaactagagtcgccgggatcgcaatcgcagctgagcgaatattgtgctggccttaagttgtacttcgataaatgcctgggtaatatgctcctatatagattagaaaggttgcaatatgacgagatcctcaaaaagtcaaccaaggaccagaagccattaatacctatcaaagtttatgggcccatccatctgttgaggctgacaagtgtcctaccagaactaatatcatctactacgatggatttacaaagctgtcaacttttgattaagcaaactgaaaactttttaatttggttactaatgcatatggacgaatatttcaacgacaaagatcccaaccgcagtgacgatgctctatacgtaaatacatctagccagtacgagggtgtagctttaggtatgtga

SEQ ID NO: 5444 - DNA, 612 bp, Saccharomyces pastorianus
atggttgatttggaacaagaatttgcgctcggcggacgctgcctggcgttccatggtcctctaatgtatgaggccaagattttgaaaatatgggatccatcttctcaaacttatacaggtgttcctaatgacaagccggggttcaactcgcaaacaataaaggagacacaaccacagaatttgggggaggacgaaagcattccagaggaaatcatcaacggaaagtgttttttcatacattaccaagggtggaagtctagttgggacgagtgggttgggtatgataggatacgggcctataacgaggaaaacatcgcaatgaagaaaagactagccagcgaggcaaaggaagcaaagaaatcgcttctcgagcagcagaaaaagaagaaaacttctactagtttgggcggatccggcagtggtgggaaaaggaaaggtgatggccgtgcaaatgccggtataagcaagagtgtgtcgcaaagttcgttagcgtcctccatgagtggaaagaaaagcggaagaagctctgctaattctcttcatccaggaagttcttgcgctcatcgtcggatcaaaacggacacgatgatcgacggccgattgccagctgct

SEQ ID NO: 5445 - DNA, 144 bp, Saccharomyces pastorianus
atgatctaccaaaaaattgttgctccattgactgacagatatattttgagagacgttagcaagactgaaaaggacgaaattagagcctctgttaacgaagcttcaagatccggatcaaagactacaggttcttctgtccattag

SEQ ID NO: 5446 - DNA, 1227 bp, Saccharomyces pastorianus
atgagatatttggtgagaaaaaaaaaggacagaagtttaccactatttgaagtagcttccaagagcacaagtggtcctgccattagagaagaagtcgttaataacaccattgacgataatttattggcttacacctcaaccaaagaaaagaataaaaacatcccgttttctgaatcatttacgatcaagacgaaactaaactttcccaaatactccgaaatcgacgctaccaaaaccacaaatttacctacttatggtattgacctttttgatccaataaaagattcaggtcaagttgaaagcacttctaacaatagcaatatgttgggctttctaatgggtcattcaaataagacctctaatatgccccacaaacttcaaccagaagagggccataataattttaaagatcaaggtgtgaacgaagtaacaactttacaaactagctccaatgtccccgttcaattctatacgcgactgaacaaaccaagacgtggtttgtatttggacagcatgcattttaaaaatattcaatgctcacataaattagaaattgttttgagagttagtaaaaccgacgacagtaacccacaacttacaaggcattacgaaataattgtcgatacgccaatatatttgatttcagacttgtgcaatacttccaatattgacttacccacgtacgatatggccactactgaatcatccaaggttctaccaccaactttcgaagaggcaacgtctgtctcagcatcaccaagatcctccttatcttattatcctgacgatatttctatgcaacaactacatctttccaggtcaacttccttggcaaacggttatctgtcgaagatacattcgaaagcaacaacggtctcggaaacatttaatagtgccccgtttcaaggccagaaagatcaacaaccacatgttttaaggaccgaagatttttcaccgcaaatgacaaatgcagaaaatacatacaataatatggatggcttactttcgcaagacatcttggaacagagaaatgtttctacactattagagggggataataccactacgatggattttaataagaatatattcacaccacggggcaatccttgtacccttattagtaacgatgacgattataatgatattgataatgataaagacgggcctggtccaatagttcatccaggtactgaaccgccaagatacgatgagatttcctcctga

SEQ ID NO: 5447 - DNA, 2226 bp, Saccharomyces pastorianus
atgaacgttgtttctaagtcgagtttcgcagacaaagaagcaaagccgattatgcagtctcccgttcctatagtgattgcaagcagttcagacaagagagatgtcggtccaacagtcactgcgaatgaaaatacaaatgcgagtgatacgttgcaacgattgaccaacaacaaggaaactacctcttcttacctgtctccgccgaaaacaacagtaattggtaatagaagaagatcttccagcgttagaagcgccctttcggccttttttggtgctggtaccagcccgacatccaatgtggacgattattcgaacccggcaacccataattataccactgctccgccgttgtcgtccaggtttagaggaaatagtctctcctctgacgttcctagtaatacctatactggcaccggttcttaccaaccgcagagacataggaattcggtgccgtacaccgccattgaccaattacatacaagacaagatacgggcatgagaagggaatcggatcctgttgctttgaagaaatttaccagcggcaacaatgggacattgaaaccgcttatgtcacatcgatccgaatctggctcttcttttgttggtaacgtattatcggactatttgacagatcgcggtttcattaagcagaaactattatataataagaaaaatgtgctggacgtttccattgcgacaagtgcagaatctgttttcttgccgactacaaaaagtaacgaaacagagtatttgtcactgattaatggctctttagaccgtgcgcaaacacaacctctcgtggccactaataccgtcgggaatgaactctctcctttctcccctggcatggacaccttgaatgaaaacaacgatttgtcgctactttcgttacctacacagcggcccattcctgcgaacaccgcaaatatagacagcactgggttctcgaatatggccggtaacacatcatcaacctctaataacaacacaacagatacggattctcttggttcgaatcacaatatcgtaaacaatacaggacaagtgacgcgaaacacgcattcgcattcacgtcctcgatcgcgttctcgctcgacagcttggaatactcagatgccctccttcagctttgccttaatattttgcttgaataggccagccacacttacggacatcaaagtggaacttacttcaaatgtgagaatcgtatggtttaacggccttcctccggccaaaagtgtcaatgaagaatgctataacataggtgctctagattggaccttgaatgcggataatttcaacctcttcataccgcgggatgccaagtctctcgtcgatatcgttgagaaccattcaaataccaggagattaaaagtgctgcagaaattatcgatgaggaaacgccattccttctcgagcaaaaccatgcttaaagaaaatatactgaataaactaaattcgtccgatgcttctaacaaattaaatgccggtgtatatatatttaccattcccattatccttgccaatcatatccctgaatcgctatattacccatcggcaaaggtctcttacactttaagattagcaacaagactagaagatgaacattcacaagtaaacacatcacagccgcatcctacttctctctcttcttctgtggatccacattcgcatacctactgtgatcctaacgaaaattcaagagccgatgataccattgaaggggaaacatacaacaccgatagcaaatcccgtagcaaaactccatttccttcttcatggctgaaaaacgttaaaggccgcttaaaattgaatagttctaatggtggcattgaatgtgacagcaatggttcactcaccgctgctgactctgcgtcacaaagagccgacttaaattccttggtatattcagagtatccactccatttagtgagaactccgcccgaaatatctatcaccacagcaaataaaccactttacataaataaagtttgggagaattctctctcttatgagatttcatttgctcaaaaatatgttcccttgaatggtgaaatcccgattactatcaaggtagcgccattagtgaaaactattaccgtgaagagaattcgggttagttgcagagaaaaaatatccttcagaagtaaagactaccagcacgattttgaccaattagacccattagctggggatccatacaacaccgatagcaaatcccgttag

SEQ ID NO: 5448 - DNA, 1443 bp, Saccharomyces pastorianus
atgacgctgaacaggaaatgtgtcgtgatacataacgggtcacatagaacggtggccgggtttagtaatgttgagttgccacaatgcatcataccttcgagttatgtcaagagaacggacgacgcgggaaaggcaaagtttatattcggaacctatgacatgatagatactacagcggagaagcgcagtgacgacgaggtctatacgttgatggacagccaagggttgccgtacaattgggaagcattggagttgcaatggcggtatatgtacgagactcaattgaaagtttccccggaggaattgccactggtgatcaccatgcctgtcaccaacgggaaaccggacatgagcatattggagcactattatgagctggcgtttgacaaattgaaagttccagttttccagattgtgatcgagccgttagcgattgccttgtcgatgggcaagagctctgcgtttgtgattgacatgggtgcgtcaggttgcaacgtgacccccatcatcgacggtatcgtggtgaagaatgccgtagtgagatcgaaattcggcggcgatttcttggatttccaagtacacgaaaagctagcccccatgatcaaagaggaaaacgacatggaaaacatggcagacgaggggaaaaattccacagatgtttggcacgatgccaacacgtggatccaacaattcaagtccaccatgctgcaagtgagcgaaaaggatttgattgagttagaaagatattacaaggaacaagcagaaatatttgctaggcagcaggagcagttgaagcagatggaccagcaactccagtacacggcattaatggggagccccaacaacccattgctacagaagaaaaactttctattcaaacctttaaacaagaccatcaccttagacttcaaagattgctacgagtttgcagagtacttattcaaacctcaactgatatcggacaaattttcaccggaggacggcctggggccgctaatggcgaaatcagtgaagaaggccggcgccagcataaactcaatgaaagccaacacctctgccaacccgaacgggttgggcacaagccacatgcacgccactgctggcgacaatgccaacggcagcagcagcaacaacatatcgccagaacaagtctactcgctactgttgacgaacatcatcatcacggggtcctcatctttgatcgaaggcatggaacaacgcataatcaaggagctgtccattaggtttccgcagtacaagctgactacattcgccaaccaagtcatgatggaccgcaagatccaagggtggctgggcgctgttacaatggctaaccttccctcgtggaacctaggcaagtggtactccaaggaagactacgagtcgctgaaaagggacggaaagcaatcgcagcctgctaacgcgagcgccaacacaaactag

SEQ ID NO: 5449 - DNA, 1497 bp, Saccharomyces pastorianus
atgcctgcggttacctacagagaagcaagacaaagtgcaccggtgatttcaataatgggggcaactaagattttaatggacagtacccatttcaatgagatccgcagtataatccgttcgaggtccgtggcatgggacgccctagccaggtccgaggaactaagtgaaattgatgcgtctacagccaaggcactagaatccattcttgtgaagaaaagcaacggcggtggtgactactcatcatcgtcgaacaatgcagactctgagttcaaagtgaacggcaaaacgttgatgccattgattcacttgctttccacttcggacaacgaagactgcaagaaatctgtgcagaacttaatagccgaattgttgtcgtcggagaaatatggcgacgacacagtgaagtttttccaggaggaccccaagcaattggagcaactgtttgccgtgtcgcttaacggggacttccaaaccgtgctgatttcagggttcaacgtagtgtcgcttttggtgcaaaccgggctgcacaacgtgaagctggtggagaagctgttgaaaaatgacaacatgctcaatatcttgcagaacattgagcagatggacacgtgttatgtgtgcatccgtcttttgcaggaactcacggtggtaccagagtaccgcgacgtgatatggttgcacgagaaggagttcatgcccacgctgttcaagatcctgcaacgcgccacggactcgcagttggccacgcgcatagtcgcaacaaactcgaaccacctggggatccaattgcagtactactccttgctgttgatctggctgttgaccttcaaccccgtgttcgcgggcgagatggtccagagatacctgagcgacttcctggacctgttgaagctggtcaagatcacgataaaggagaaggtctcccggttgtgcatatcgatcatcttgcagtgctgttccgtgcgcgtcaagcagcacaagaaggtcgtcaagcaactgttgttgctcggcaacgccttgcccacggtgcaaagcctaagcgagagaaagtactcggacgaggaactacgcgatgacatcaacaagctcaaggaaatcctggaaaacgagtaccaagaactcacctctttcgacgaatacgtcgccgagttggactccaagctgttgtgctggtcacctccacacgtcgacaatggcttctggtccgacaacatcgaagagttcaagaaggacaactaccgaatcttccgccaattgatccagctcttgcgggcaaaggtccgccagggcgacgtcaacgcgaagcaagaaaagatcattctccaggtcgcgctcaacgacatcacccacgtggtagagcttctccccgagagcatcgacgtcctcgacaagtctggcggcaaagccgacatcatggagttgttaaaccatacggactcccgcgtgaaatacgaggcgctcaaggccacccaggccatcattggatacaccttcaagtag

SEQ ID NO: 5450 - DNA, 399 bp, Saccharomyces pastorianus
atgtggaggggcgtgctcaccgcaaccgtctcgggtctcggcgcgtgcgtatataaggtctctggttcttcattaactgaactactctctcgtgtcttctctcttaccttgttcttgtataatataacatcaagcaagcaagcaaacacaaacaagctatctctccactctcacaaaacaaacactcaatcaacaatggtcgcctttttagaactaacctcagccgtctctcaacctttcgtcatcccttctctttccccagtgtcgcagccaagctcgagaaagaactctgacgtcagcgccgacgacttgaacctggcaatcgccaacgctgctctgttgggcgctgccgcccccaacaacgcacaccccagaaagaactctttgacgctgttgtaa

SEQ ID NO: 5451 - DNA, 651 bp, Saccharomyces pastorianus
atggatgaacacacagggaggcatgaggccccggaagaagcgcagcaagaacggaaagaaatgggtcaactagtcaagaggagccatgctatcaggatcatcgcagcgctgggcattgtcgggctgtggatgtttttctcctcgaacgaactatcgatcagcacgccaagcctgatcaagacggacgctggcgccaaggaggtacaggaggcggcagctttgaagaatgaggcccggctgaaggagattgagcagcagacgatcatgccgctgatgggagacgagaaggtgaagcaggaggtgggccgggcgtcgtggaagtacttccacacgctgctggcgaggttccctgatgagcctagcgcggaggaaagagagaaactggccacgttcatcgagctttacgcacagctgtacccgtgtggggagtgttcgtaccactttgtcaaactgatcaataagcacccgatacagacgtcgagtaggacggccgcggcgatgtgggggtgccacatccataacaaggtgaacgagttcctgaagaaggacatctacgattgtgtcaccatcctcgcggactacgactgcggctgcagcgacgacgacggcaaaagagtatcgctggagaaggaggccaaacagctgggctag

SEQ ID NO: 5452 - DNA, 300 bp, Saccharomyces pastorianus
atgatgaatttttttttaaatagggctaaaagaactaagaaggttggtatcactggtaagtacggtgtccgttacggttcctctttgagaagacaagtcaagaagttggaaatccaacaacacgctagatacgattgttctttctgtggtaagaagaccgtcaagagaggtgccgctggtatctggtcttgttcttcttgtaagaagactgtcgctggtggtgcttacactgtctccactgctgctgccgccactgtcagatctaccatcagaagattgagagaaatggttgaagcttga

SEQ ID NO: 5453 - DNA, 1404 bp, Saccharomyces pastorianus
atgtttcccaatagcatagtaaggaccaggaccggtctttatcgcttatattcaacccttaaagctcagcacgtggaaatcaacggtgtgaagtatacgacaaaccccaagatatgcaacgttacagactcaataatcaatctaacagataaagcattacatttaaaggaatcacatccggtaggtattcttcgtgatttgattgagaagaagttaatcgacaaatcattcaagacctttaataatttcagaccggtagtcactactatggaaaacttcgactctttagggtttcccaaggatcatcctggaaggtctaaatcagacacctattatataaatgaaacacacctgttgagaacacatacttctgcccacgaattggaatgctttcagagaataaagaataatatagatggcagtaaagccgggtttctaatatctgcggatgtttatagaagagatgaaattgacaaaacccattatcccgtattccatcaaatggaaggggccaccatttgggagcgaacggaggccaaagatggctcaaaggaacctactcatattgttaagatccgcgatgatattaaatcggttgaagatcaactgaagaaggaaaatgttaagataactgtcagcgatgacactttacccttgaaagaggataatcctaaacaggaatacatgaccgatttggaggtagatttatgttcccaacatttgaaaaggtccattgagttagtcgtttctgaagtcttcaacaaaaaaatcaccagtatggtcgaaagtaaatcaaacgatatacctaaacagttgaaagttcgttggattaacgcttatttcccctggactgcaccatcatgggaaatagaagtctggtggcaaggggaatggctggaactttgcggttgcggattgattcgtcaagacgtgctacttaaagcgggctataaaccttctgaaaccattggatgggcctttggtttgggcctggaccgtattgctatgcttcttttcgaaatacctgacattagactgctttggacatctgatgaaagatttttgaaacaattttccaaaggttcgattagctctttcaaaccatactccaaacatccaggctcatttagggacgttgcattttggttgccaatggataagcctgatgttcatcaggttcatgaaaacgatttaatggaaataatcagaaatattgctggcgatttagtagagagtgttaagctagttgatgatttcactcatcctaaaaccggtagaaaatccttgtgctatagaatcaactatcaatcgatggatagaaatctaacaaacgctgaagtcaacgctttacaagatacggtttgttctaaattggttgaagaatatggtgtaagactaaggtaa

SEQ ID NO: 5454 - DNA, 267 bp, Saccharomyces pastorianus
atgtatcctctctgtctgacgttcctgtgcggatccgtcttgcacacaatgcacccgattggtgcactaggtgtgctactcttgacgtccacagcaatgtacgtcaattcaggccattggtttaagaaatacctatatacatatatcgaatacggctctgataagtccgcgtctatcagcttcttgatgcttgcaaactgctcttcgttgcgtatgtccaatggtttgtacactatttccatggttgcgcccagcacctctctttga

SEQ ID NO: 5455 - DNA, 78 bp, Saccharomyces pastorianus
atgaaccccatcccttcatacaggttcagcgccgccacattttctacctctgtctctagcataatctcgtcgcagtga

SEQ ID NO: 5456 - DNA, 1197 bp, Saccharomyces pastorianus
atggatgtatgcagggcctcaagaatgaatcgcatgctcacggacaacaccagggctctgaatgtgccccccagtctcgctccccctcaggagaggaccattttcgccaaggagaggatatccattccagggtactatgagatcatccagtttctgggcaagggcgcctatgggaccgtgtgttctgtaaagttcaagggccagaatccacccgctaagattgcagtcaagaagatcagtaacatctttaacaaggagattcttttaaaaagggcgattcgcgagttgaaattcatgaattttttcaaaggtcataagaacatcgtcaatctgatcgacctcgagattgtctccagctcgccctacgatggactgtactgctaccaggagctgatcgactacgacctcgctaaagtgattcactcctccgtgcagctatcggagttccacattaaatattttctttaccagatcttgtgcgggttgaagtacatacacagtgcagacgtcatccatcgggacctgaagcccggaaacatcctgtgcactttgaatgggtgcctgaagatctgtgatttcggtctcgctagaggtatccataccgagtttttccaatgccaaacaacaaattccgctgtgcagccccatataaccaactacgttgctacgaggtggtacagagcacctgagctgcttttgtctaaccaaccgtacgacaagtccatcgacatctgggccgtcggctgtatccttgcggaattttatgcccggaaacctgtcttcatggggcgagattccatgcaccaggttttcgagatcattaaagtattgggtacccccgaaaaggaccttctaatcaagtttggcaccattaaagcctggaatcttggcaaaaacagcaacaaccctgtatataaaaaaatcccatggtctaatatgttcccctttgcgtcgcacgaagccatagacctcatcgaatcgctactccattgggactccacgcacaggctgaacgtggaacaagccatatcacatccgttcctaactgatgtacggaaaccggacgacgaaccagtgtgtctacaaggccccttcgacttcacttatgaatccgagttgagttccatgtccaaattaagagaccacctgattaaggaagtcgatgatttcaaaaccgagctattctcatctctgtaa

SEQ ID NO: 5457 - DNA, 3195 bp, Saccharomyces pastorianus
atggatcacctaaaaccgatacaaaagggaagaagacgtggtctttccattaacagtctttcagagactcagcagtctgctatgaatagttctctggaccaccttcaaaacgatttaagcaggatagatatccaatggaatagagttctttcggataacaccaatcctctggaactagcacttgcgtttttggatgatacatctgtgggactaggtcacaggtacgacgaattcaatcaattgaagtcacaaattggcagccatttggaagacgttgttaatgaacacagccaagtctttaacactaacgtggcatcttatgggaaggtcgtaggctccattatgcaggctcaagaacaaaccttaaatctgaaaagatgcttgaaggaagcaaatgagaagattaccacggacaaaggatctttacaggaattgaatgataacaacttaaaatatacgaggatggttgatgtcttggtcaatattgaggagctattgcagattcctgaaaaaattgaagagagcatcagaaaggaaaatttctatcaggtacaaattctattagaaagaggattcatactaatgaacaacaagtctctaaaaacagtggagattttgaggcctataaaccaacaactagaactacaagagcacttgcttttcaataatctgattgaagagattcatgacatcatgtactccaaatctaacaagacgaatttcactcaagtgacaaataatgatattttcaagatcataagtgtgtcccacaacggtttcaccagcttggaaaattatctttataacatagtcaatatagatattatggagcatgctaaggctataaataaaaacctcgagcaattcatccatgaccagtcattaaataaaggggaagtcatgctgcaagagaatattgcatctcattcatcgttggcatcatctcggaaccaagaaaacgaagggtttagcagaattggattcttgttaacgatcatcaataacattaataagctacctattgcattcaacatcatagcagagagagccaaagaggaaatccataatatcattgtgaagagtacagattctatacgtttgaagcatccttctttgctcaaaatggccagtagcttgaaaaatgataatcagttcggtctgcccgtacaagacatactttccattattttgagagaatgtttttgggaaattttcctaaagttactttatgctattcagtgccatcgcgttatttttgaaatgtcaaacgttcttcaaccaacctcttcagcgaaacctgcttacaagttcgataaaatttggaccaaactattagacgaaatagagttgctacttgtaaggtacattaacaaccctgggttgctaattagtagtgctaatggaagtgataaaacaataaatggcacaaccaataaagcccctaatttacctaaaaggaaaaatcccaaaattttttcgctggaacataacattgaggataactcttctgcaaaggaccaagcctttgaattaaaagctttattgaaagacatttttcctggattctccgtttcttccaacatggatttggattctatttatgtcaaggatgaatcatttgagcaagatgaaccgttagtcccaccctctattttcaatatgaaagtgattttagatccgtttttattatttacacagtctacatcaacaattgtgccaactctcttgaatgaaagtgttgttccgtcattgacctttttccatgattatgtgaataaaagttttcttccaagaattcaaatgactctgaattatctattcacaattgaagtagaatctaacaatccatacgcgttagaatcatctgacgaaaaccataacatattcaaaacagcactagatttccaaagactattttacaacctgctgaatgttttcaatacagcaaacactttcagaacaaagatttcatattgcattttggaccttctggaccatttttgcaactactactcaggactattcaataatctaatcggcacttctgacaggcacttgagtagaaaaattatcacaatatggctacaaaatggcactttgatggatcaggagcaaatgattttgaatggagatgaaacacttttcaatgaagaatccaaaggattatttaaggacataccttgtttttatcaagccggcaaaggtttaagtaaatctgatttattcaataacttgaccttggatacaatcctgcggttttcttccactgtgatatggatcttaaattggctgccaggtttgaagaaagccattaatattgaggaattaaaccaaaagcctatgttggatgccgataaattaagaagcaactggtcgttttctgaatcaatgaatctgaatgttttaaacccaaataccaacccaacctcattgggaaatttaaagattttattggatgacaaggcttccaaaaaatttgatgaaactgttgacggattcaaagcgttgaaatttaaactaatgaccatactaaggctcaatattagagccttgtgtatatatgacattgggtcattttttcaaaataccaagatttggaatatggatgtgggcagtattgaattagatcaaaatatagcttcattaatctctgaattgagaaggactgaaaacaaactaaaacaacaattgtcagaaaaggaaaaaaacgcagtgcttattggtcttgatataattaacaattacgccttaattaaaggcgctaactccataaaagtattgaacaataacggaatcaagaaaatgttaagaaacgtaaacgtcttacaacatgcttatagaaatctttcttcagagccatccaaaattaatatgaacattacaatgaacttctattctctatgtggttctaatgaaactgaattgttcagatatgtggaaaggaacgaactatcgtattgttccatcgatgatttgaaaactatactaagattgcagttcagtgaagaaatgcaacgtcaattgaagagacaaagcactaatgccaccaaaggctccataaaaccttctaacaagagatatactgaagctctagagaaactaagtaagctagaaaaagaacagccgaaatcaggagcacagtcgaaaattgaacagcttaaaaagagtttgaaaacagaccatactacgaaatag

SEQ ID NO: 5458 - DNA, 228 bp, Saccharomyces pastorianus
atggtaggaccgaaccctttgaaaaacgcactaataccttctttagcatataaggtctttgctacactagaaatagaattaccgaatttgggcttttgtaaattgtcagtttgcatgacagatttaatgacatccaatggatataccatcaaccataaggcggtaccggataatgcaccaaaaatgcatagtttccatgtaggaatgtcccttctttccaggccatga

SEQ ID NO: 5459 - DNA, 462 bp, Saccharomyces pastorianus
atggccagtaagtgggatcaaaagggcatggacatcgcgtatgaggaggctgagttgggctacaaagaaggcggtgttcctattggcggatgtctaatcaacaataaagacggtagcgttcttggacgtggccacaatatgagattccagaaggggtctgctacgctgcatggtgagatctccactttggagaattgcgggagattggagggcaaagtttacaaggataccactttgtacacgactctgtcgccatgcgacatgtgcactggtgccatcatcatgtatggtattccacgctgtgtggtaggtgagaacatcaacttcaagagcgacggtgagcagtatttgcagacccgaggccacgaagtcgtagtcgttgacgatgaaagatgtaagaagattatgaaacagttcattgacgagaggccccaggactggtttgaggacattggcgagtag

SEQ ID NO: 5460 - DNA, 921 bp, Saccharomyces pastorianus
atgtacgtaaatagagcagggaaaatggactgcaagatattgatactcggggccggcggccttggctgcgagatcctgaaaaacctggcaatgttgaagttcgtcaaagagattcatatcgttgacatggacaccatcgaactgaccaatctaaacaggcagtttctttttcatgatgcagatataggtaagccaaaggcccaggtggcagcccactatatcaactcacggtttcctcaactccaagtcgtaccgcacgtgcgggacctgaccactttgcactcgagtttctacaagggctttcacttcatcatctcggggctggacgccattgaaccccgccgctttatcaacgaaaccctcgtcaagctcacgatgaagtcaaactacgaaatctgcatccccttcatagacggtgggaccgaggggcttaagggccatgtgaaaacaatcatcccgggcatcactgcatgctgggagtgctccatcgataccttgccctcgcagcaggataccgtgcccatgtgcaccatcgccaacaacccgcgctgtatcgagcatgtcatcgagtacgtctccacgatacaacatcccgagctcgacatagaatccacagcggacgtgcagtccctcttggagaaatgttatgaaagagctacgcgatttagtatctctacggaaaaattatccacaagctttatcctaggcgtaatcaagagtatcatacctagcgtcagcaccacaaacgcaatggtcgcggccacatgctgcatgcagatggtaaagatttacaaggatctcatcgatctggaaaacgacgataactttactttgatcaattgctcagaaggttgttttatgtatagtttcgaattcgagcggttacccggctgcccggtttgctcttcaagtcctgactga

SEQ ID NO: 5461 - DNA, 648 bp, Saccharomyces pastorianus
atgataacagccactaatacccacttaaactacaatcttgcaaaggcaaggatccggccccccatcgtgaatgtgaataagcaacagctagatatgcaagctaaactgtttttgaccagactatactttaggcttccccgtaccagcttccgtcagttccctgcgagaggtttcccactacagaaaagtttttactccgatctggccactaaagagtctttgatttcaccagagagaataataaataaaacacctgggttgaacttatctatctctgaaagagcgtcgaagagattagctgagatttgtcgtgatagtaaagaaaatctaagaataagtgtagaaagcggtggatgtcatggtttccaatataatctaacactagaacctgcgttcaagtcagatgaaaggagaagcgccagaaatgaagaattttcagatagtgttgacggtggtgattccaaggacatagtgtacgtgttacccgaagacaaaggtcgagtaatcatcgacaataaatcactagagattctaaataatactacactgacgtacacaaatgagttgattggatcgtcattcaaaatcgtcaacggtagactaaaaagcagttgtggctgtggaagtagttttgatatcgaagactag

SEQ ID NO: 5462 - DNA, 1161 bp, Saccharomyces pastorianus
atgtcaaacaacacaggaccacatgcaagaaagatgctgaagcgatcttctttgatatatctatcgtgcatcttaattgtatgcataccgatacttttgcatatataccggcctccaaacagaggagatgaacacgtcaccattcagaataaagaaaaggcaatcacgtgtcccaaagaacggaacaccgaagagttgttttgcgcagtgaccaacccggtcactggatcatacatcgatctatcacaactttcatcaactccaaacaagttaagagacggtcaagaacagaaaaccgggaagaataaacatgaatcctccaagacgaaatggtccgtgagaggttggggctacgacaccaactttacattggggatctgctccagccccgttggcgagactgagattcaacaactgtctaacctaacgggtgcattttacgtggaccatgaagatgaggatagcttggtgtcgattggtgatttcagtacagaacccgtgctagttggtggctcgtccatcaagaaactgactttgaaatacgaaaacggctcgatatgcccgaatggtaaggacaagaaggcgaccttgttaaatttcgtctgtgacaaagagatccagtccaaggcgcagatagcgtacattggtaacctgcacaattgttcctatttcttcgaagtgcgcagcatctatgcctgtcctacatcgaacaagaaaaacgaagtcaacgttgtgggcatcttcatcgggatcttcgccattttcttcttggtcgagtttgccggcagaagatggatctacgctaaattgaacagacacttgaaaaacagcgacgagctgaacgaaatatcgccgtctttggacgagcaacctcactgggacctcatagaagacggatctcgctggagcagattcttcagcggaatcgccaagtcagcgagaaggttcaccaagtcgctggtgagccctctgttcggaggcaggaacaacggtcaaggcggcatccgactaaggacgtctccatctgcctcctcctctagccttgccaacagagagttcttcagagacatggaggcacagaacgaaatcatcgacagcctgggcatcaacagccataccacagaaagcgaccacccgactttggcaggccagagcgtttga

SEQ ID NO: 5463 - DNA, 1350 bp, Saccharomyces pastorianus
atggggcgctttagtaatggagggagtataacgagttctctaactttatctgatttcaccttacgtaatcataaaaagggcattacagcattgcagattatcaaaatgccatcagtttctaaggtgtcagtcctgctatctggtgatagcgatggcctctttgtcatctgggacttggtgactaaaaggcccattacgtgtacacaaatcaaagatcatccacacattatagcgttccaatgggtgggtagcaccgtactgtctattctctgcaaagattccatgctacgaatgttcaagctggaagcatcagccttattatctacggatttagtggttggggaacgtcagtttaataaaacgacgggtttgcaatgggcccaaatttatgaaatgcctgtaaatacattaaattttgcgaactttattatggattctcaagtcgagttaaaagatgggaaggataacgaatcgtatagacttatctgctgtcatactaacgattcagaagctatagatatataccagataatgcaagatccaaaattcaaactacaaagaccttttgataatattaatttccccgaatttttaaagaagcaaagccttctagaaatatttaacgtacccaaggactccaagttcggtattataatgaagttggccaaattaaatgatatcatatttttaggttttgaaaatggatttataatggggttcacaaccacttttgatgaggaactccagaagggcgttgcggatttgatccatatttccaatgaccattacccaaacccaatactaaatatgtgcattagcggggatgaactatatagttgttccacggacggtttcataagcaagcacaagttttcaatagaccttttaacacggcctgcggcagaatacattaaaaatgacacattactgattaaatgttctagtactttgaaagcaagcagaccatctagaatcgatcttcccctaaagaacataagtcacatcgatgtaatatcagacgattacttagtcgtgagtaattggtcaggcaaaacaattgttataaatgagtatacttcagaagtcttgcaaacttttgtgaagacaagaaacaacttggtcgccaacgacagttctatcggagacttaacgaatggtaacaactcaaataccgaatccagcttgaaatcgaagaactataaagtggggtcgatgatcgggctaaaatcttttgatgtgcaatcagatggtttgaaagtgggggaactcagacgcatcaaaaccttggcaaaattcagttggtgtattattggttatgatgacggtaccataaaactcaatagactatag

SEQ ID NO: 5464 - DNA, 492 bp, Saccharomyces pastorianus
  modified_base (29)..(74): a, c, g, t, unknown, or other
atgttaataatagttgaaagagtgaattnnnnnnnnnnnnnnnnnnnnnnnnnnnnnnnnnnnnnnnnnnnnnnccgaacaatgaggtttaacccataccgaattgctttgccatttgtcgcatttgaggatcttgcatcattttcatcatttcattcatatcaggcattcctccacccattccaccgcccattccgctacctccaagcatattcatcatgttttgcattagaccgggattttgtttcagtttttgttgtgcttgttgcatcatttgtggcgatacttttggcatacctggcatattgggcatacctggcatacctggcatatttggcattccaggcatcctggcattggctccgggtgcacccggttgttgttgtgttgcagtttgtgccattctcgccatcatttgctgttgcattaatatcatttccacttcaaatacggatgtacctgaacctttggccacacgaaccattctggtag

SEQ ID NO: 5465 - DNA, 1098 bp, Saccharomyces pastorianus
atgaagccttcaccactaaagattgtccaaatatttggtgctttattatacgtcctcaatttacatcaaactcacccaattttccaacaacagtgtctttctatatctgttaaatggttcgccacaactttattcaataagatcttgaaagataaaaagaagagatcgctatccagggcacacgctatccagattagattaaatctctcgactctggaatcatggatacaaaacaatgatttctgtgttcctaagccggtgcttattgatgatttcatgtggcagcgctttccaatgactttaattcgcgatgttggtgagatagatctttcagatccaatacttagaaatgtggcctcttacaaacctgtaaacaaggatgataaagattggatatacgatatgtcgaactcattattttactatcagtcattccacagaattgcacaaattcaccttgaaccggtgttccaattgttacaatggttgcaagtggctacaacactcgacagcgaggattcattgatatcaacaatgaatttattgccagggctcacaccagttcaattactgaaatctatggagaagtataattatgaactaaatgaaagtaaattcaattctaaattgagaaaatttttgaacaacaaaattaaagatgacaaaatgagcaaattcaatgcgtatctgcaagaacacgaaattccatatttagtgctgccaacgatcgcagaaatgacagatttgtattcaaaaggtcctgattcgcatactttccaaccatttttaccaggtagtattcaagatgacttgtatgaaattcatgatgtaaacactaaacaaagacaggatgaaccacaaatttctcggagcgactcaaacactttagactcttctgacaatgaagacgggactgaaatcgaaaacagagaaaataaagacgatgtaggaaatagtgaaaaggcttatggaggatctgaacgcagcgtggtaaatggaggtaacgatgattattttaaagaactaaatgttccatcttctaccgctcaacgtcctgcttggtcaaataatgatgacatggaacagaatccgtggtag

SEQ ID NO: 5466 - DNA, 1434 bp, Saccharomyces pastorianus
atggacagtgtatgggacgatgctagaattgaagacagcacgatggaagaaccagtgggttcatcccatgctcaggagaaagttgcgctaataaagtcgacgttacttaaactggagcaggaagatatattggaaggcgacccctgggtacaattggtcaggctgattagcgatgaggaacgtgacgaagagttcaccacgtttaaagattacttgagcgaagtgaggaacgttaatgacaaatctattacgggcgtagctttaattcattatatcattgtgtatgaccgtgcagactacatcgagctattacatgggaactcaagtggcgtgaaactagacttgaacctttttgatgacgttgtgggctacacgccgttaatgtggggcttttgtctgcaaagaaggaactgctgcttggaattggtcaatgctttcgacgagataaagttcaatttgactaataaggctgggctgtctgcatgggatatggttcctccctattcgccactttccgaattcttggaacaaaacaatatgtttcgatatcgtactgaaaaccataaagtgccgcaaatatctccaccaaagggctcttcttttctaatgactaataacgacgatgccgctaccaaggaaacgtttgataatattgacttgcaggtagctgggctcactttatcttctgctgcagatgacaatctcttcctggatacggacgataaggacaaggaccattctcaaagaccttctgcttttatcgatccaacatatacagaagattatcatggtacttttaattttgataaattatctaccgatcaatatttggagttttcagattttgatatccctcaaatcttgaacctactaatatcccttcctcaaaaggaacctcatatgacaacatacccagcaggtttaatttaccaatgtactagatatgctgaccacaagataaaatctaaatcgttggtggagtcgctgatcaatctctctttaacgaagatactgattagtgtttcatccaatggggtggcaggattagtctccacagatgcttctttacaggccggtgacattgtgttacaatcatattggttaagttgcctgtcattcctctattattatctttgcagggatgaatcatttttcaaaagacatccgagtgtgttacaagagctgataaacaccattcattccataatcatagagctaacgtcgtctattcattccaggctgatttctttgatagattcaacattactagcatacacgaactatacaagatgtcaaacagaccttatacaaaagagactggaactttttcaagaagagaaagcaggccaagcttttattaaaggaaaagaatacaaaacaattgaagaaacaacaaaaaaaagaacatcagccacaaggccaagatcaggataa

SEQ ID NO: 5467 - DNA, 885 bp, Saccharomyces pastorianus
atgaaggagtgcccgatttgttttgagggcgaccaagacggtgaccagtttggatgcttagaagtttgcagacatgagttccatctgaactgtataagagagtggcacaagtatagcatcgacttgaagtgtcccatttgtaggaccgaatccagccaccttaacgtcggtgacggccaacacgcagtctctgtagatttggagatggggtttatgatcaaacatgctcttgagcatgcagaggccagaaccaccggcggcgaggagggagaggaagaagagcaggaagagcaggaagaggaagaagaaggggaaatgggtaccctgagtgagatgctacaagacggcctggtcatagacgccatcaaggtgatacagtgcggcatttgcggagacacagatgctgctcgactgaacctgtactgccaagactgcgatgcgatataccacgaaacatgtctacgtggactggcatgcgaggtgggcgaacgcaatgcatggcatgagtgcaccgaatgtcggtcccaccagctgcttgagctgcgcatggggtgcgtcagcgaggaccaggtcaccagttatgactcgagagactatatgatattcgccggagaggtccgggacaagcacagcgtccagacagagcagatgtatgacagaatacgacacgccaagcatagcatccagacgcacgtgcggcgagcattggaccagtacccgctggccctgcccagggacacctacaagaacatcaatcagcacgtctcccgcaagctctaccgcttctctgacaacaagtacctgcccaaccagcatgactacgactcgttggcccgcaccgcagtccacgcagagctcttcccccactaccacgtcgatatatag

SEQ ID NO: 5468 - DNA, 2835 bp, Saccharomyces pastorianus
atggatcgagaaatgacaatagtagagagtggcaatcatctcggtgcctcttcaccagctactgatatgcagatcacgatgaactcacccctaataaatgaacacgaaataaaaggtaccacggaaagcataacggaatcttcgggaaatgaagtaccgatggaagccaaacaggcgaacagtccccatatagaaacgggagaagggctatccaaaagccctgatattagtatagaaaaagagatagggaaccctataacagatgaaaacggaaatctaaaattggaacttccagataatctcgataatgcagacttttccaaattactagaattcgatgcgaaaaatgatgaagctttgtttaactcgaatgatctattatcccaaacaatgaacactgtaaatgaaatcaatatcgacggtattcctgacgatcacaatgaggaagttacaccaaaagatagtaccagtatagaggcagtgacttctcatggtgatgaaaaggagaaaacccaggatacttcgggagcaatgaaagttgaagaaatggaaggttttgaagaatccagcataaaaacagatcaaccaacagctgacgccatttatgcccagaagaatgaatcttcagcagaagaaaatgatggtacaccgccaacgataattattgaaaaggacaatccactccatacaagaaacaattcgataacaccgataatgtttcagcagcacgaactattagcacaagcgtcccaacacagcgttactgaaaacaacagcactgacgcggaaacttttgaacgaaaaccaagcgagccgtctaacgagaatttacctctgcccaatgaacaaccgactatttttgcgtacgcgagactagattttcaaagttttacattctatgtgcaaacattacatgcaataattggtaggaggtctgagaatgacttttcccacaaagttgacgttaatcttggcccttcaaaatcgatttcgaggagacacgcccaaatattttataattttggaacaggaaggtttgaattatctataatcgggaaaaatggggcctttgtagatgatatttttgttgaaaagggcaataccgttcctcttcgtaataggacaaaaatccagattgggcaaatcccatttcaattcattttaccagagcaagaacgcaacgaggatagtaagagtccagaaaaccctgatataacagaatctgaaataaaactaaaagacccaaagaaaaacgagcttaaatcaaaaaaaaaggtatccactgggacaaagcccaagaaaccacaagcaaagccggcggttaagaaggacaaaaagccaccgaaattaccaaagaaagtttacacattggaggaaatcccactggaatataggacgaagcctaccatatcttattctgctatgctgaccacttgcatacgaaagtactcgaccgccaaagggatgtctttatcagaaatatatgcagggataagagagctttttccctattacaagtattgtgctgatggctggcaaagttcggtaagacataacttatcactgaacaaatcttttagaaaagtttctaaagaaggtaaagggtggctatggggtctcgatgaagaatatataactgagagagaacgccagaagaaaaagcaaagtgagatggctatagcgaaagcgcatgctgcgcaattaaagctcgagcaacaacaacacagacagcagcaagtaccatctcaaaagggcaaaaaagatatcgtttctcaaaagtcacctgtaccagccagaaaacaaaacatttctcaaactcttgcagcaaacagggctgcctctaacaagaaaaatacagcgagcgataaccaaaggacaatgaagtatctgcaagaacagctagttatcttgacacgagatcgaaagggattatctaaacaagtgatcgctgcaattttaacgcaagcccttgcaatgactataaatcaagtaacacaagcagcaaagaacaaggggattacaggtaatccacttaccgctttgatggacaagaatcctcagcatttgaatctaatcttagcagctgctgttaatgctgcaactgcaaaagtcacaaaaggcgaagtaaaacaattggtaaatcctgaaactaccgccgctctagcagccaaggctcaaaattccaaaccaataactcagccaatagtacaaacgccgaatgtgccagaaagacctgcaccacagccatctgcatctgcttcatcacattccatcaactacatgcatgataaaccaccaggtccttttgacccatcttcattatctcgtttttttcaacctagacaaaacgctagagttgcatcccctgcgacagctccagttccagtaacaattgcgcagagtatagatttaccgcctaagcctacaccgacacagaatagtggtggtgagagcgaaagcggttccagcagcagcacagcatccagcagtgaaagcgaaagcgacagcgacagctgcagtgacgatggtagtggcagtggaagcgatggtagtggcgatggtagtagcactagcagtgaaagcgaaagtgatagtgatagtggaagcgaaatagatgagaaagaagataaaggccaaagcgaaaatgctagacacaatgataccgaggatgatgttgtgcataataacgatgggagtagcaatggtcatgacactttagagactgatgaagagggccatgattctaaaagacgaaagattgacgaagagatcgactcagtgaatatagtttccgaggagaatggaggcacggatagtaacattaacatatcgtaa

SEQ ID NO: 5469 - DNA, 354 bp, Saccharomyces pastorianus
atgcctgaatgtgtgtttttcagcaaaaacgggtactgcacgcaaagtccagactgccaatatctacatatagatccagccagcaagatacccaaatgtgagaattatgaaatgggattctgccctctagggaatacttgccccaggcgacatattaagaaggtgttttgccaacgatatatgaccgggttttgtcctctgggtaaagacgaatgtgacatggagcatccacagttcataataccggatgaaggtagtaaattaagaataaaaaaagatgatgagataaataccagaaaaatggatgaagaaaaggagaggcgtttaaatgctatcatcaacggggaagtttaa

SEQ ID NO: 5470 - DNA, 345 bp, Saccharomyces pastorianus
atgagtttaattcaccttgatacagcaaagtatccttttaaatttgagccctttctcaggcaagagtactcgttttcactcgatcccgatagacctatatgtgaattttacaactcgagagaaggcccaaatcgtgtcccagagggcccctatgtcctaaaaagcacgtattacccattttccaaaataaaatcgtttgcaggcattggcttcgtggattatgcaagaagaatgaccaatgtgaatacttacatgaatacaatcttcggaaaatgcctgaatgtgtgtttttcagcaaaaacgggtactgcacgcaaagtccagactgccaatatctacatatag

SEQ ID NO: 5471 - DNA, 1062 bp, Saccharomyces pastorianus
atgtatgtaaacggtaactatcaagcatacagaagaaagcaagtgagagccgtcatgtcaaacattgtgggtatcgagtacaaccgtgttacaaatacaacttctacagattttcctggcttttcaaaggatggggaaaatgagtgggatgtggagaagtttaagaaagacttcgaagttaatatttcatctctagacgccagagacgctaattttgacttaatcaacattgatacatcaatcgcaaatgctttccgtcgtattatgatttcagaagttcctgccgtggccgctgaatacgtatatttttttaataacacatctgtcattcaagatgaggtcttagctcatagaataggtttggtcccattaaaagttgacccagatatgcttacttgggttgacagcagtttgcctgatgatgagaaatttactgacgagaatacagttgttttgagtttgaatgtaaagtgcacgagaaatttagatgcaccaaaggattctacagatccaaagcaactatataacaatgctcatgtctacgcgcgtgatctgaagtttgaacctcagggtagacagtctaccactttcgctaattgtccagttgtcccagctgaccctgatattttactagctaagctaaggcctggtcaagaaatttcattgaaggcgcattgtattttaggtgtcggtggtgaccatgctaaattttctccagtttccacagcctcttatagactattgccccagatcgatatcctgcagccaattaaaggtgaatctgccagaagatttgaaaaatgtttcccaccgggcgtcattggtattgacgaaagttcggatgaagcatacgtcaaagatgctagaaaggatacagtttctagggaggttttgagatacgaagagtttactgataaagtcaaattaggaagggtgagaaatcattttgtctttaatgtagagagtgctggtgccatgacaccagaagagattttctttaaatctgttagaattttgaaaaataaagctgagtatttgaaaaactgtccaatcactcagtga

SEQ ID NO: 5472 - DNA, 1356 bp, Saccharomyces pastorianus
atgccgttgaaaaagcaaaaggaacttaaaagaaaggctgccgcatctaaacaggaattctcttggaattcattgtacatgaaccaagacgccgttttaggtagtgtggctgccaaattaggtttagaaaagtcccagttgattgatgcagagaattcaaattcagcagttaagcaagcgctggctgaagcccatgtgattggtgacgttaggaaatactttgaatctaaaggtctcgaattgaccaagttctcgcagctgaaatcgacgaaccaaagagatgatagagtaatactcgtgaaaaatttcccttacggaacaactagagaggagctcggcgaaatgtttgtaccatttggtaaactagaaagattgctcatgccaccagctggtacaatcgctgtagtccaatttagagatgcaacatccgcaagggcagcgttcactaaattatcatacaagagattcaaagatggtattttatatctggaaaagggacctaaggactgtttaactaagcccgcagagtcggatgacttagttgatgaagcttctgcaaaggaagaagaagcgccagtcgaaataaagccttcgttgaacgatctaatggaaacaaacaaagatactaatgaggagacatcagccacccatgacgaagatgttatcgatggtccaaccgtctcaatttttatcaagaatttaaatttcactaccaccaatcaagatcttacagacagattcaaagtatttactggatttgttgttgctcaggtaaagacaaaaccggacccaaaacatcaaggcaaaactttgtccatgggtttcggttttgtggaatttaggaccaaagaacaagcaaatgctgtcatatctgctatggatggcaccgtaattgatgggcacaaaatccaattgaaattatctcacagacaagcatctcataacaataatacgaatgttaaatccaagaagaaaagcggtaaaattatcgttaagaatttaccatttgaagctacgagaaaggacgttttcgaattattcaattcttttggtcaattgaaatccgttagagttccaaagaaattcgataagtctgcaagaggttttgcatttgtggaattcttattaccaaaggaagcagaaaatgctatggaccaattacaaggtgtccatttgttaggccgtagattggccatgcaatatgcagaagaagatgcagtggatgcagaagaagaaattgctagaatgaccaagaaagttagaaagcaagtcgctactaatgaaatggcagctttaagaaacaaaggtggtagaaagaagttagagcttgatgatgaagacaatgaaggcttttag

SEQ ID NO: 5473 - DNA, 3444 bp, Saccharomyces pastorianus
atgtccgactatttcacgttccccaagcaggatagcggtgacgtgacgaaacagtcggggactccgtgctctactcggaactcttcaaggaatttggagctgccgaagaattaccgatccttcgggggcagtaacgatgagctggcgtctatgtactctggggattctcagtatctgatggatatgatacctgactccttaacgcttagaaatgtgcccacattcggaagtccggccaatctctcaccgtccgatggaccggatgccaaggatggctcggatgtaaagctcgatgactatatacttcctaagtcagacctcagatcaccttatcatgtcaacgtgcctatccctaagaaagcgcccaagggagaggggaaggtgaagatcaaaccgaaggctaaggataaggctgaaacatccgatctggaggcggaaagcgcttttgaagattccccggaatttgttagggaatttccgaccgatattttggtcgatagattccacaagtggaagaaaatacttaaaagtttgatcgcttacttcagagaagctgcctattctcaagaacagattgcaagaatcaattaccaattaaagaattctgtgaaattcgctttcctcacggatttggaagaaggatcgaacaagctggtcaatccaactgtctcgaaggtgcctgccaagaaacctcagccggtccttttggctctcaaaaaaaatgacaacaaacttcagttagatgtggaggagccacaacccgttcagccagaactcccagagcaagtaacctctgcctcttctggtttcatgaagtttggatctggatccattcaagatattcaggtcattttgaaaaaataccatttatctttgggtaatcaacaatacaagatttcaaaggagatagtagcgtctcttgttcccaaactggcaggactgcgtaaggacttgagcgctaaaattaaagaaatcaaagaattaaacggcgatttcaggactaatataggtgaacatgtcaaaataacaagtaggcttttgaacaagtatattgcctcggtgaaatttgttgatagaacatgtgacgcggataataaacaaaaggaaaaactaaaaccaaagcacgacccatatcttttgaaactgcaacttgatttacaattgaaaagacaattgctggaagaaaactaccttcaagaagcgtttgtgaatctgcagacagctgcactgcaattggagaaaatagtttactcgaaaatccaatgtgccttacagcgctactctgccttaattgattcggaagcacgtttaatgatcaaaaatgtgtgccatgaattgcagcaaggtattttatccagaccaccggcgctagagtgggataatttcgtcgctcatcatccaacttgcttgatgaatctaaaatcgaatgacccgttaccacaacccagaaaactatctgacattgtttatcccaacatgaaatcgccgttggccaaatgtatcagagtaggatatctattcaagagatcagaatcatcgaagggttttacaaagggttattttgtgttgactacaaactacctccacgaatttaaaagcagcgatttctttctagagaacaagccccttcgttcaaaaaacaaggccactgaatactctagcaatagctctgccgataaaaacggcactgctaatggtaatcggccatccagtaatgggacgcaagatttgaaattaaccaaaactaggaagggaatgacttcgtccaacctacatccagtgtccagtttatctttgaacgattgtagcttcattgaaagtactgacatgatcttcactttaagaggatatgccaattatcacttttcggaggatccatcacttacaacagattcaagtgccgtttctaatgcaagtacactgtctacaaagaaaaataagcatcaacggacgccttctactctttcaattgtgtccgttccaaaattcttgaagggcacatctaagtcaaaagaacaaaaaaaggttaagggaaactcttcggaaactaaggattctagcattaataacaagacaaataaagacaaaaatgttgaatggactttcaaaatttgttttgctagttctgaaccaactcctgaagaattaaagacttttaaaaaatgggtccaagatatgaaatcccttacaagctttaacaatactttggagagatccaactttattgaagaaaaggtgttgaaaagtagaagttacaatagtgggaagaactcccaaagctccaaactcaccacggctactacagcagtagagagctttgttaacctctctgaaaaggcaacgccatcttcttctgtctatatgctaaacactaagagggcaaaccgtcctcggtatattgatatcaatggtgcaaatacgaatgcgggtgctatgaactctgtatataggtcaaaagtcaatactccagccattgatgataacggtaatctagccatagtaggagaaagaaaaaacagtgctccgcaaaatgccatgagttccgcattcacaatgccttcctcatcgcctcattcgcctcgttctgggacacataacctttaccaccattcagctgacaatttggcagcttctcctacccaaaaggtatcgccttttggagaagtacctcaggtagccgttaccagtcacggaacggaagcgatcatttcagcaagtgcgtattctgatgacagtcataaatcatctcgtgcttccagtgttccttcgattgtcaatcagcgaaggacatctttaccatcattattaaagaatgtacctggtagttcacccagttgtgtgccactggacggcaatgcaaacggatattttggaataccactgaactgtaattcagagtcaagaagaggatccgaactctcagcttttgaaaaccagtcgcctttgtatgaagaaggtagaagtcaaaatttcagcaactctcgtagaagctctgccggctatatgccccagcagtatcctccaaaggtgaagctgaatgattcggaattaaatcacaccaacccaggtatgtcgcaatcaaatccggattcaaaccactcaccgaaatctaaagatattaaaccaccttacaacagcctgaagaagacatctagtgccggaaacgttccactagtgcgtaccgaatctaatgaaaaacctttttattcaaataaaaacagaagtagtaatagtgtatctgtgtctaagaatgaggctacgaagacgcatccaataagaacgcacagaaagaacatctcatttggttctttgaacagcgtaatgaacaacaagaagaattcaagccaagcttctgaaaaaagtagaagaacttcatctaccggtattgaagaagcagatgaagaagaggaccatatcaagctgaatcaatccttatattcttag

SEQ ID NO: 5474 - DNA, 921 bp, Saccharomyces pastorianus
atgcgcattagttatttgatgactattggaaatatcgaacattcctttatcagtagccttttcttggtaacgtctgggatttctgttaaattgggtttggcagaatcactgtaccaaaagctacttataaatgtcccaaagaagggcgtcaaagtaggctgtaaccgacatattaagcatgtttctccaattgttacgaacttcgaaaaatggtctgataagcggaaaaagttatactttaaagatgagaaggaaatgatggaaaagaataatttggggaattttgatctggaaaataatgtgtacggcaggctcttagcgtccccaatgagggcagaaaagatctcaaaacttaaatcttgtagagagttactaattccattaaaagtaataccaatggttggaaatgatcagcatgctgaaaacagcatgctaaaactggcacccatactagattattccaaaccgtacaaaagttcatacatattgaattcagcttctattgtgcgggacaatttagcagctgcaacatcttggttcccactttcaatattacaaggttccgcctcgagaaaacttgttgtgaatacggcaacattcctatcagaatacgacgttcaactgcgggaacttataatatcaagactttcagaaataaaaagcgttgggccttcttcaaaagacagtgttctacttatatataacgaaacaagcacaataccaattgaagtacaacgtgttaaaggtgccgatggattggaatttacgcagtcgattttcaacctgggatgtcttcaaacgtttgcatcagaaccaatgataaataaagacgtaattaaggagggtatttacctggacgccaacaatgacaaggacctcatcaaacacctttacaggtttgtattgttctcgctcgggtag

SEQ ID NO: 5475 - DNA, 2247 bp, Saccharomyces pastorianus
atggttcataatattgagttgaaatttgacaataaaataagacatcatcttttggaatatgcttccactgcttttgaaagaaaatctatgaggttttctttgacttataagtccgtaactatattaaaagagttgctaggaaacgtcttaactggtgtcaaaacatctgttgaagactacggttccatgctcgaggatgatttggctagtaattcggaattcatcgaacgttttgaagaacttatcagggacgttccaagcgatgactttgattatgttgataattatcttttcagattaatttcccctcaagtgcagattaaatctgacgttgaaaggaatgcggcagttattttggctgctagggatatagaaataggcattatcgatatagtacaagtgtatggaaaatctgggaaaagaattccggttgacgttgatactattgtagaaacccgatatacagctatttcaaaagatatacaactgttcacgttattcaagaaagatttggaaggtcctgaaggtcggttcttccataaaaatggatacgggttagataaagagtccgatatatggcccccctggattcccctagaaatgtgttttgacggatctctattagataagcatgttttcctgaagcgaagatcaatgttcttaacatatgttgctcctaatcccttattttttagtgcaaataacacgtcagctttttcctgtgattcgagatttcgtatcgcctttccaggactggttctaacatctgattgtcaacagtactgtgcagtatatgcaatcgcagaggatttgttatccttcggatcatctttggacgagaagattgtaaagctttctagggttttgtttactgacgaggttaggaataacctggagaatcttgatgtatccgttgttacaacactacaagatagaattaaagagttatattatacacgggcatatctaaaggttcatgatccaaacttgtttaggaaatcaggtcaggagttaacctttgacattcaaactagtacattgaaattgacactccttatgacggcaatcaaaaaaacgtatgataagatggggagtgggaagaaagcgaaacagaaaaaattgaggtggcaagttggaacagatgaattgatttgggagttgtatgatgaaagtaagaccccttttgtaaccatcggacttggaccttctaccttcattcgttctgagacatctgacggcgccaatagtaataaaatctccatctcctcactgcaatgttttaatcaacaggaaaatcctgttttcactgaattgctggctccattttttgaaaactcgtcctataataaagacgcctcaatggtagagattttttggattatgggtccgtcagttggagggatttccgatttgcaagagctggttgtttccttacagccactgattttcaagatggatcataaaacatctgtaaaactaatgaattatctttttccaaagatagaacaaactcccacagaggccactcctccaaatcttgtgccacgaagttccactagttcattctttttatcttccacaggtatgcgtcgcagtttttctaatggctcctcatccacgtatgatgctaaagatgttgattcctgggacttgcgcagtatacgaagcaacaaaggaggcgaaaaaaagtataaaggcgatcacaggaaaatatcagcgtcactttttatgcagcctgattacaacattaatgaaatggttaagagatctgggacatttttcaatgtcaaatctattataattcgaaaaactctaatgtccgtgtgttataaaggctctcatagtctcttatccgatgttaataatttaatcgtcaaagtccctgatttaaagtaccataacaaattgtggtcaagagaagagtttttcacggccttgaagagagacattgtcaggattgttttacagcacttagggaatattattggtaataagtttttacctcacaagaaagagaataagaagaaaacttctatggaaatacataggctattaagtccaagttccgaaggtcatgaagtttcacatactgttgaagcccaagggcacccgaattcatttaattactctacatcctcatcaaatgtcaggtcaataaattcagatgaagcatgtgatgaaattgatgtaaatgatgaaattcggcctttttaccctgttgtaagtagcatttcaaacaaaaaatga

SEQ ID NO: 5476 - DNA, 5283 bp, Saccharomyces pastorianus
atgtttatgattccgtggtcccaaatttgggatatttctaaacttggtttgatatttatgcttttcatcataacagttcagaagattacaagcttgctcatatcatggattttaacactacgaaattccgcaatacgaaagatctcatttgggtacttttttggtacttcaataaggcgagcgttcatcctaacagattttgctgaactatctattggcaaggtaaatctgcggataggttggagacctggatttgtcttccataatattgatttgaaattacttaagaagttttccggagctgcagaccattcgacaagagactctaagacatatttcgatcctgagaaccaaacgtttacctttgttatcaataaaagaattctatcaatattgaagctagtattcccattctccatattcctccatactttaacattgacgatgccaaatggaaagacatacaaactaaacctaggctctataacgatatcacacccacgcgatgatactatcaaagtggaggcatttttacatgattttactcatcctgaaacaaaagatactttaaaccatactggtttttttgtcgtatgtaaaattgcgaaagaagatgaaaaacatagcaaaagttcaaaagttatactgagaaactggaaatcgagccttaaaataaacgacgtttgttggcatcttccagaagaaagaggaaacaccccaaacttaaatgaatcggattctcacaacacgagcgaagaagcggaaacactcgcctcatatcgcaagatgctgaagccttttcgttatcccttaaaaactttgaatatcctggaccttaaggtagaaaacgtcaagttcatgtataaagaaaaattcacgatccgcatatcaagtgctcaggtttacttagaatcgatttccattttaaacaacgtatccgctttggagcttttacctttgaataaatctacatggggggattttgaactatcactatctgcaaatgctgttgttatagatatcgacggcaatactgcgattagaattccctttggaaatatcgtgttaacatcagatatgttattgtcttttttggataatgtgcccttgcaaaaaacaaagctgacgtccatttttaacataataaatccttcggttttccttactctacaccaagtattagaaattcttcatttggtagacaaatttgataattctaaggcctcatcaagcacaagcacaaacagtatgtcattgaatattctagactttgatattgatcgattccccagtttcaacttcgaattgatcatgtcaaatttcgtttcgaggctacatatatcaaatgaggagaacgtgacatttaatgttttcagcatgcatgctttatttagccgaaacaatatgtccatgtccgcatcgaggggaaagctggtgtcgatacgtcctaattggccgtttgccaagacagttccggattccaatcaactatctaactatatcaagattgtaggtacatcactttcttatctaagaattccaacagatgataatgctagcccagtatccataccggtctgtggttttgaaagattagacacattcttggatgaattttctaattccaaactaattgttcagtctacactaagacattcgtacgttagcctcgataatgtcgaagttttacacactttaagccgcgcctttgatacgatttattctttaatatcaagcagagaaaaaagaaatgaaactcatgaagtacaagactataaaatggaaaacatgggtaaagtaaagaataattttaaatgggcattgaaactgaggctaaaagacatttcgtgctcgttgttgattgctggctttcttccacggatcttggatcctgaggaggctgaaaactttaacttgtctgacgtaacaagaggcgctaaagttgtgctcacagaatccatattgttagctgacaaccagggaaaaaaattcactgtagtagatgcatcgatataccgtgttgcggatggtatgagttgtgaatcagctcctgacggcattgttcgattcacggacttagtactgagtttaaacgacttgaacgaaattcatttttcacttccaaagataaaacttaaggtggacgtaaatattatttggcttttgttctacattcaaagcatatggatgaaattccgtcctagttctaaattgagtaatgcttcgacgagtggattaaagtgggttgatatcttggataggctaacagtggatattgggaagattatcattgaactaaggcttccgcataattcagaagtgctactaatattagaagacctaaacttttcaaatctcactaagaaactcacgatcgcatctttatctgcgtatgtggtgtctgtctatgttaagcatactaaagtgtatgtttctttaattaatattaatgactttgagctgaatgttttaaaacttattgaaacgaaatccgtggccatatgctcttcttcaattcacttccacaccgagtaccattttagaatttatatgataactgataacatcgttacattgtataaatcgttcaagcaaatcaaactggcattctcaaccttgcatgaatttaagaggttgtatccgcaacagcaatttcctaaaagtatattaagtttgcacattcgttctcaagactttctgattgatattgaagaagatccttttgagcaagaattgggattgattttaaaagttggtgttctagagcaacgtgaaagattaaaaaagttggaagagtttaaggaaaaactatcgacatacgaagatatgaatgtacgtttaagatcactgtatgacacctcacgaggtcaaactttttttccggatttctatgcaaacgataaagaatatgaagaaaaagcttacctcatgctgctagaaaacttttcgacatcatggatcgctagatacaggaaggcgaaactaaccttctatggtatgccctatcgtgttatcagtcgtgaggagcttggcacaaaatatcaattgtttactagacagaagactagtacagttgctaacttggttgtgagagatctggattttaaattaggcgacccttcctttcctttaaataactacatggactttctttacgagtatgggaagaaagttccaaaaacctcgaagtacactttgttgattattcttggcctcgaaattagaagcaatttatgggagttgcggctaagagattaccccatccctgctatatcttttccggatacatttacaactggtgatgttgtatttgctgagaatatgccagcaccttgtgctcttcatactgtttatgtcccttttgttaatgcagcggagaaaagcccttataatgatgcgaataccatatatggttcgcacatcattcgtactattaactcagtcaaaacgtatttcaatatcaggtcaatggttacatcttcttcgtctgctaggataacgtgggggaaatctctgcagcccggttatgagtctttaatgctttggtttgacttcttgaccaaacctctcattgatccatctaaaaagctaggattttgggacaaattcagatacttggtacatggtaaatggatatatgaattttcagatagcagtgaaatgcatttaaacataaaaggttctcatgatccttataaaatcaccgatgatggtgcaggtctagctttctgctggtctggtggtactacgatttatgttcataattccgcagaccctaaagaatttttgaagattaaatcccgaagatttcaattggcagtgccagattttgccaagataaataagtttgataaagtcttcatgaaactagatggaaaggtaatttggacattgggcttgctttttgagcaaggtgatatatcaagggcaggggatgaagagagatttcttccggataaaccacactatgaaattcagctaatgaacccagatggagtagcagatttggatcatcatgatacttataaaggattcagaacctccttcatccacatgtcatttggtgtgtactcttcagaacatggatctataaacagcctttatcttgcgccgtacgctttgactcactttctaaaatggtggaacttatttcatacgtatacgtctggtcctattagacaaggacgtttgttcactgatttacttcaaaacaagacaaaatttgggcgcgcgttatttacaatagcgtaccagctacatttaaagcgattaatggtcacacatatttatcgacacattaccacacaatatgatcttgaaaaagatagcaagattacttttactggtttaaaaggaagatttgattctttaaagatcgacttacatcaaaaacgaattaaattgacgcacacggaccagaagttaaataaatcgaaacctgtatggaagcttaaaatgtccaggggtgagattgattgtgctgaagcagatattagaattttatccacggtgtttgatcaaaaagctgtaaaagaaatcctcactactggtctcgatggtatactcgaagacgagccatcccgccctatgtccccacgagatgtggagtctttacgtgaatcagactggtatgattttgaagattacatagatttaaatcaggtatctctgggctcctcacttccgctcaagttagaagcaatacctttgttgtactcgcctaggatatcttacttcagaaaagtaaatgacgatggttatgtgctagcttgtcctttcggcactgaagaatcacacaattgtttgattggcaaaaatcatccagaattaacgcaagaaaagttagcaactgaaaggaaacatgaaatagaagtgcaactgaaaatcttaatgaccacattggacacgatggaatctaaagaaaaaggagggtcggtgagtacaaaatcagaacaccgtgcgaatgaaacaaaggcggagatagccgaactgaagcacagattacacacagtcaacactattttaagtgatttaaaaatcgcagaagctattccggaaataaaagtcggtgacgacgatgacagctccagttccagctcacttactgacatggatgctaattttagaccacgttcggggctccgactaggatatcattattgcgaactaatactgttgaatcgtgtgtatctaatgagaagaggcgctactatgcaagttgagtccccttatgacaacagggtcatggttcataatattgagtggaacatgaccataagttag

SEQ ID NO: 5477 - DNA, 459 bp, Saccharomyces pastorianus
atgacgacatacgacatacccgacatgcttgagcctgaagtggattgtgtaccggctgaactcatggttgcagagctccccatcgacatgcctgccatcgagctacttcccatcgacatgcctgccatcgagctgcttcccatcgacatgcctgccattgagctgcttcccatcgacatgctcgccatcgatgccatacttgaagccaatgttttgcttgcactggacatcgcatccatactcatcgaagccatgctcgacgctaccgtcttcgatgcactagacatcgcatccatgttcattgatgacatactcgaagctatagctttggttgcactggacatagcgtccatgctcatcgaggccatgctcgatgctaccgtcttcgatgcactagacatcgcatccatattcataccgctactactcatagacatgctattcattgttagaccgtag

SEQ ID NO: 5478 - DNA, 918 bp, Saccharomyces pastorianus
atgtcgtcatcaagtaacagtagttcctcaggatcgtctatggatatggacatggatatggatatggatatggggatgaactattatctgactcccacgtataaaaactaccctgttttattccaccatctacatgcaaataccagcggcaaggcctttggtattttcttattgattgtcgtggctgctttcgtttacaagctcttgctttttgtcagttggtgtctcgaagtacactggttcaagaaatgggacaaggagaataaatactgcacgttaccttcagcaaatgctaaggatgacggcagaaactatggaacggagaacaactttgaaatccagggtttgcccaaattaccaaatttgctaggtgacatattcgttccttctttaatggatctcttccacgacattattagaacgtttttagtatttacctccacaatgatcatctacatgttgatgcttgctacaatgtcttttgttttgacatacgttttcgcagtcatcaccggcttagccttatcagaagtgttttttaataggtgcaaactagccctgttaaaaagatgggatattcaaagagagattcaaaaaacaatgaactgtcctggttttggtaactgccaatgtggcaagcatgccagcagcacacctgatccaattgccgttgccgataccacgtcagctagtgatcaaagtactcgcatggaaaaaaacaatctgtctgaggttgctattgcggaaaataaccaaacgaacacacctgcacaagaagacggatgtaactgcgccaaagtctccagaaaaaaccaagaaaacatcgaaagtaacattcttgaaagttccaagttgcaagaacagtctgggaacatggatcagaacttacttccagccgaaaagttcagtcataattaa

SEQ ID NO: 5479 - DNA, 453 bp, Saccharomyces pastorianus
atgaatagcatgtctatgagtagtagcggtatgaatatggatgcgatgtctagtgcatcgaagacggtagcatcgagcatggcctcgatgagcatggacgctatgtccagtgcaaccaaagctatagcttcgagtatgtcatcaatgaacatggatgcgatgtctagtgcatcgaagacggtagcgtcgagcatggcttcgatgagtatggatgcgatgtccagtgcaagcaaaacattggcttcaagtatggcatcgatggcgagcatgtcgatgggaagcagctcaatggcaggcatgtcgatgggaagcagctcgatggcaggcatgtcgatgggaagtagctcgatggcaggcatgtcgatggggagctctgcaaccatgagttcagccggtacacaatccacttcaggctcaagcatgtcgggtatgtcgtatgtcgtcatcaagtaa

SEQ ID NO: 5480 - DNA, 222 bp, Saccharomyces pastorianus
gcggctcgcataatacgactcactacagggatcaaacactggaactatgttccggaatacaaaggcgccaaattcatccccattcccagtggttcttctatctctaaggtcaatgaaaactttgatgaaaagaaaacacaacttaccgacaaagagttcaaagccattaacgacttcttggctactttccacactgttggcgataggtacgaattcaattga

SEQ ID NO: 5481 - DNA, 231 bp, Saccharomyces pastorianus
atgtccgtcactgaattgagaaacgatatccataagttagataccggttatggtctgatgagtttgacctggagagctgagcccattcctcaatcgcaagctttcgaagcgatgcacagagctgttgagttggccagagaacgtggacacaaggccttcttcaacgttggtgagttttacggcccggacttcgttaacttaatatttgttcgcgacttctttgcaaagtag

SEQ ID NO: 5482 - DNA, 945 bp, Saccharomyces pastorianus
atggctaatattgcagtgtaccctttggatctatcgaaaacgattatccaatcgcaagttgctcatcctgatgcaagtgagcctgataatgtcgacaataagctggctaagaagaggtataagaatgtccttgactgcatgataactatattcagggaaaaggggttttttggtctatatcaaggtgcgacggttattacagtggccacatttgttcaaaatttttgctattttttttggtacactctcattagaaagtcatacatgaaaaataagctactaagaccgcaattgttgaaaatgcatgctagttctggcacaccttccacaatcgaagaattggctctgggagtggtggctgccagcatatcgcaaatcttcacgggaccaatggccgtggtggctacaagacaacaaactgtccactctgtagagtccgccaagttcagtaatgtcgttaaggatatttacaatgaaaataacggagatttgactgcattttggaaaggtttgagaacaggtctagctttgactataaacccgtccattacatatgcctcatttcaaagattgaaggaggttttctttcatgatcattctaacgatgtgggcaatctctcagcggtccagaattttgtattgggcgttctttccaagatgatttccacgttaatcacgcaacctttaattgttgccaagacaatgcttcaaagtgcgggttcgaggttcacttctttccaagaagcgcttttgtatttatataaaaacgaagggttaaaatcactttggaaggggatccttcctcagctggcaaagggtgtaattgtgcaaggtttgttgtttacatttaggggagaattgactaaatcgttgaagaaactcattttcctgtactcttcattcttccttgaacgcaacggacgccataggctggtttctacttga

SEQ ID NO: 5483 - DNA, 321 bp, Saccharomyces pastorianus
atgcaactagagtttgattctgaaaaattgagaaagaagtctgttatggattctgccaaaaataggaaaaagaagaagtctaaatccggtgaagactccacttcacgcggatcttcagtacaaactctatacgaacaagctgccgcaaggaggaacagagctgctgcacctgcacaaactaccactgattacaagtatgctcctgtaagcaacatcaacacagtgcctacgaacgcgagggccgttggtgttggttccaccttaaacaacagtgaaatgtacaagagattgagttcgagattaaacaagaagcacaaataa

SEQ ID NO: 5484 - DNA, 675 bp, Saccharomyces pastorianus
atgagtgctgcggatcaagaacaatttacagtgatggaagccacgcctgatgatggtacagctttcctgcatgagtcggttttgaatggtgaggacgaaactacaaaccacactgatgacagcgggcgtcaaggagtcacagaagatggcccaaaggacacaggcgacttgggtgagcaaggcagggacgatgaggataatatagaggaaaacagccgtgtagaggcggcagagaggaaacgtaagcatatcagcgcagacctctcggatgatgaattagaaaaggaggcacataataaccaaagttctcaaccagcggtagaaaatagaattaatatggatagggattctagtgccactccaaccagtagacaggaattggaagaaaaactggatcgtattttgaagaaacccaaagtgagaagaacgaggagggatgaagacgatttagaacagtacctggacgaaaaaatcctaagacttaaagacgaaatgaatattgcggctcaactggacatcgacacgttgaacaagagaattgaaactggcgatacttctttgattgccatgcaaaaagtcaagctattgcctaaagtagtaagcgtactgtcaaaggcgaacttggctgacactatattagataataatctcttacaagtgtccggatatggttag

SEQ ID NO: 5485 - DNA, 252 bp, Saccharomyces pastorianus
atggaacattatcatccaaatgtcgccaccttggccaaggtcttttctcaaccatttaaaaagctgagttacaacatggaagatttcttggattggagttacgattcattactcagtgcggaatcatcaagaagattgaaaactcttcctactttagaatttgagacgtttggaagtgtattcgataatgaagaaggtgatgaagaatcatcatcacaagataacgtttacttgcctggggtagcatggtga

SEQ ID NO: 5486 - DNA, 129 bp, Saccharomyces pastorianus
atgataatgttgcacaatccagctttcatttccgatccattccagatccctgagcaagtcgaccatttgacgaatttgaaagacagttacgtggatccatacaatgtaactgaatccgatccggaactg

SEQ ID NO: 5487 - DNA, 861 bp, Saccharomyces pastorianus
atggatctggaatctacacattttgcatctaaaaaagacgctccatttttccctaataaaacattcaggaaattgattattgccctatggtcctcgaacatgggcgaactagagagtgccaggaactccggtgcgtctgaaaacgtaatcataatagagttcaccgaaaaatactataagaaattcgcggacatccaatactatttccaatcagaattcaaccagctcttagaagatccggcttaccaggagctacttcttaaaaacgtcggcaaatggttgacactggcgaaccatgatgaacattgttccagtgcgaatgtagatttggaggtgttcgtaccaaacccaccgcaagccattgagaatgactctaagtacaagtcgaactttgaaaaaaactggctctctttactgaacggtcaattatctcttcaacagtacaaaactattttgttgatcctacataagagaataataccccatttccacaccccaactaaactgatggatttccttactgactcctacaatttacaaaactccaataacaacgccggtgttatccccatcttggccttgaatggtcttttcgagctaatgagaaggtttaacttggagtacccaaatttctacaagaaactttatcaaatcataaattcagatctaatgcatgtcaaatatagagcaagattcttcagattaatggacattttcttgtcttcaacgcatctatcagctcatttggtcgcttccttcatgaagagattggcgagactcacactggaatccccaccatcggcaattgtgtccgtgattccctttatttacaacctaatcagaaaacacccaactgtatga

SEQ ID NO: 5488 - DNA, 216 bp, Saccharomyces pastorianus
atgccactgctaatatcagaaatcaaagatattgccaagaagctgactactgccaccgacagaaagcagtataactctattattaagctcgtcaatgaacttgtcattccagaggatgtctcccaattgaaagatgaagagacggaaagaaatttgaggttcttgatcatgtcgctgttccaaatattcaagaagttgtttctcgtagcgatttga

SEQ ID NO: 5489 - DNA, 72 bp, Saccharomyces pastorianus
atgtatgaagggacgtctttccactcagggaagtactccatccccatactggacgtagaccaccagttgtag

SEQ ID NO: 5490 - DNA, 183 bp, Saccharomyces pastorianus
atgtacgtcacttttggcggcgtgcagggcctgacagcgggtacaatcatgggattcctgataggcgccatctacagatccggactgttttctatgtccacctggatcccactttgttgcgcagtggttcagatcctttttgacgtggtcctgggctactcaatggtcggttctatcatgtga

SEQ ID NO: 5491 - DNA, 1059 bp, Saccharomyces pastorianus
atggaagaactctgccatcgcccgaagaacacgggagaatgttatagaaaaaaaagggaatcttcttttttttttttaaaaaaaaactgcgatagatcagatagtctattaattttttcagtgtatatttttttttggaaaataaaactattctttataagaaatattaatgcactgcgccccttgtttaatcagcagaccaagcttaacatagcacaccatagaatagaaatacatttgatggctaccgcatgcattttccaacctaaccttctcaaggttaatgcatctgatgagccctccaatatgatccgcaaaagaagaagaatacaacaatcacaaccaggatcattactccgagagaacaaacttcaacctcaaatctttttgcggaacctaaatcactgttacatactatcactttataaagaaatcacgtgccaactcattggagaaatccttcaccaaaaaatatccaagatatggggaaaagtatacataccgtcttatgaactaatatcagatattcatggaaaccagctttatgtggagcaaggcgtggacgaaaataaactagtctcggaaatattgaagagacttaaccctaaccttattgattcagaagccactcaaatgttatttgacgattaccatttagaattatcacacacaggggacggtatctgcatatccagtttaaccgatcgttttcataaagagttttctttcaataatgcagtcactggtacattcagactctgtgggacgagtgtacgcgccgatagcagcggaacggtatatggtgttatgcagattgaaattcctatcgatgagaatacgtcacaagccgagcatacctttagtgggctctctacttttcacattcagacggacgaacccaatgatacagaacaagaaataagagcctttaatttgagtcgacagaatcaagaaaatataattagaagggagattacaagaagattgaaaggacatggtgagctttacaaccatcgcaaaaacatgcgaagcgcttcttcaagaaaagcaaaaaaataa

SEQ ID NO: 5492 - DNA, 90 bp, Saccharomyces pastorianus
atgatttccagatgtctgggcaacaaatggccgaacaagccaacaggccatttttccaaggcttcctgcataacagtgtggttggtataa

SEQ ID NO: 5493 - DNA, 84 bp, Saccharomyces pastorianus
atgatagatatacgagacaaaagatcaacatccttggggaatttctttgcaacatcttgcaagaagaaccaattaatatcgtaa

SEQ ID NO: 5494 - DNA, 549 bp, Saccharomyces pastorianus
atgctcttaactattgtcaaccaatatctagaacaaaagcaaaaaatacgtatagcgctgcatcgagaagaaatgaacggtaacagcaacaatagagagcaattacaacaagagttgggcgccacacaggaccaggtggcctcgattattgagtcgtttgtcgaattaggcgtctccatttatgacttccctggtactcccgaggccagcaagggaatgatcaccaatttacaaagaaacgtggaccgtttgtacaagttgaatgtgagaagcaacgacccccagtcaagtctgtctaaggtcgacattcccttggaagttgtgcagtacattgaggacggtcgtaatccagatatttacacgagagaatttgtcgaagctataagaagatcgaaccaataccagaggggcaagatgcacggcttgaagcagttaagagactcgctggctgataagatcgtggatgaatttcccgagttacagaagcccgtcgaggatatcataaagaggacttctcctattgatgattcttccactgctcatcaataa

SEQ ID NO: 5495 - DNA, 1518 bp, Saccharomyces pastorianus
atggcgaagagtaaaaaacaatcagatgtcgttgattcaacgaatttccccattttagaactaacatcttcaaaaactcccattttccagtctattctacatcccgaactcccaataatcataacgggattcggtactggtcatatcgtctgtcaccgttataacccagctgagttgcaattgggtttaaatcgtagacgtaaacttgacgctgcagcattggataacgacccaaagagtaagtccaaaacaaagaaaggtacttgtctctggactagattagacatagatgtagagaatggtactttaaaatctgtcgaaacagaggacgaagaacaacaaatggagcaaagcgaagccttgggcgtggagacactttggaagaccagaaggcataaaggtagtgtgcgtgccatttgctttgatgcgaagggtagttgtatcttttctattggtactgataacatttttaaaaaagctgatactatgaccggtaaagttattaaaaaggtgaacctaagttcattatttgagtccgagaagaagaagaatgacaagtttaccaaactatgcatatctcaaactcatccgtttatattgataggtgacgaatctggtgacgttcatgtgctgaattcgaacaacttgactttaaccaacacagtccattcaatacattttggtgactctattaatgatattttccattttgataaaaagtccgtatacaaattcatctccttaggccagacaacgttagcatattttgatgtccgtgacaaagatgccaaaccaaacacagcagaaaaccaggacggcaaaatcatggttagtgacgatcaggaagatgaagtcctttgcggttgtttcgttgatcccgaagaggcagatacgcttttatgcgggatgggcgaaggtatcgtcaccgtttggaaaccaaataagaatgacttggtagatcaaatgagtcgtataaaaatcagtaaggatgaaagtattgattgcattgttcctactttgcaagatgataattgtgtctggtgtggttgttccaatggtaacatttataagctgaatgccaaattggggaaagttgttgaagtgagaaatcataacagccttgacgaggtcaatttcttggatttagattgcgaataccgtgttgtttctggtggtttagaaaacatcaagatttgggaattgtcaaatgatgacaaaaaggaagaggaatctttagagtccgatgaggatcttgccagttcagatgaaaacgacagtgatagtaacagcgaagatgacagctccgaagaaagttctagtgaaactgaagtcacgcttgtcggactatcgaaagaagagttattggatgagctggacaaagacttgaaccaacaagaagagtttgcagaagaaaaggagtccaatcaaaagagcaataaaaagagaaaattgatgaaagaaaacagtagaaaaaaggaactttacgaacatggaataaaaaaatttgatgatctgtaa

SEQ ID NO: 5496 - DNA, 1038 bp, Saccharomyces pastorianus
atgactgaaggaaaattaagtgaggatgaaattgcgctgtacgatagacaaattcgtctttggggaatggcagcacaagccaatatgagatcagcaagagtattgctaattaatcttggagccattggctccgaaatcagcaagagtattgtacttagcggaataggacatttaacaatattggatggccacagagtaactgaagaagatttgggctctcaattttttgtcggctctgaagatgttggccaatggaaattggaggctgccaaagacaggatccaggacttgaatcctcgtgtagaattaaagtttgacaagcaggccctacacgagaaagacgagatttttttccagcaatttgatttagttgtagccacagaaatgaaggctgatgaggcaattaaagttaacaagttaacccgaaaattaaacattccgttatatgttgctggttctaatggactatttgcatacgtttttattgatttgatcgaattcgtctcagaggatgaaaaattacggagcataaggcctactgtcgttggccctgtttcaagtaatcgaagtatcattgaaatcaccactaggaaagatgaagaagatgaaacaaaagtttatgagcgtatcaagaccagaaatagctacaaatctttggaagaagtactatgtacagccactctgaaagaaaaattgacacgaagacagctaaaaagggtcaccagtattttgccattaacgctcacattgttgcaacaggaactgaatgaggggagtgagaagatagggtttgaattactgaaccgagaggcagctgcatggtgtgggaaactgggtgtccctatggcaatattgaatgacgaatatatgcaacaaattatcaatcaaagatatattgaatttgctcctgtcgcagctatcatagggggaaccgtcgcacaagatgtcattaatatcttgggtaaaagattgtctcctctgaataatttcattgtgtttgatggtgttactttagatatgcctatttttgagttttga

SEQ ID NO: 5497 - DNA, 1284 bp, Saccharomyces pastorianus
atgggcaaattggtcggagataatgggaataagtctccatgtgaagctggacgagagcccatggcgatgtcacgatctcagagcaccgattctttgaatagtttaaattctaccaggagctcatcgagcaacaggccaaaaacgtatttttgtgactatgacggctgtgataaggcattcacgaggccttcgattttaactgagcatcaatcgaccgttcatcaaggtttaagagcatttcaatgcgacagttgcgcaaaatcgtttgttaagaagagtcatctagagaggcacttgttttcgcattctgatacgaagccattccaatgttcttattgtggcaagggagtgacaactcgacagcaattgaagcgccatgaagttacgcataccaaatcttttgtttgtcccgaagatggatgcgatctccgattttataagcatcctcaattaagggctcatattctatctgtccatctacacaaattaacctgtccccaatgtgataaaagtttccagaggccctacaggctaaggaatcatatctccaaacaccatgatcctgaagtagtaaatccttatcaatgtacttttgctggctgttgtaaagaataccgtatatggtcgcagttgcaatcacatattaagaacgaccatcctaaactgaaatgtcccatttgcaacaagccttgtgtgggggaaaatggtctacagatgcatatgatcattcatgatgaatcgttggtgactaagaactggaaatgtcatatttgttctaatacatctttctcaagaaaacacgaccttctcactcactaccagtcaatgcatatggatgaggatgttcccttagaattgaaatataagacccccgatattcaacaattagttcaggagcaagggattcatcttagcgatgaagacgtcaccagcgaacaagatgatggcaaaatatccaataggttaaggaaacgaagaaagctcaatgaaaacaacaacttcgtctttttgcaaaatgaaataaacctagaaaagcagttggagtttggtgaagatgggttgagtcttctactgaattctgttggaagaaagcacaagtgtttttacaataaatgttatagaactttcaagacaaaggaaaaatacgataaacatatagataagcataaaatacatgaactgaaactgaaaatcctacaagaaaaagaaggcaaggaaatgatagagaatagtgacgaaaaccagcgggacctgaaaccaactacgatactgagtgaggaataa

SEQ ID NO: 5498 - DNA, 216 bp, Saccharomyces pastorianus
atgaccaaatatgaaagagcaagaattttgggtacaagagctctgcaaatttccatgaatgccccagtttttgtagacttggaaggtgaaactgatccattgcgtattgccatgaaggaattggctgaaaagaaaattcctttggtcattagaagatatttgccagatggttccttcgaggattggagtgtggaggaacttattgtggatttgtga

SEQ ID NO: 5499 - DNA, 1503 bp, Saccharomyces pastorianus
atgaaagttgcatatctacagttcctttttttgaacatatcgctggttaaggctgtgctgcagcaatctgatttcacgctgagaaacgattcgtattgggaagaatttgaaggatacgtggatacaaagcatctaaacgagaagtggatcaccagtggtgctaccaatgagaaaggtgctaaaatttatggtgcgcaatggcgaatctcgcagggtccattgcaggggtctctcccaaataaaggactcgtagttcgtacaaataatgcagcagctatgataggacacgtcttggagactcctgtgaatgtctcggatacggatactttagttgttcagtacgaaataaaggtggaaaattctttgacatgcggcggtgcgttcattaaattggtatctagtttagtggatacagatgcattaaagagttattctccaggtaaagaaggcgtagaattagtgtttggtccggattactgtgttccagacaccaacggtgtgcaatttgctatcaataaggttcacaaaatcacacatcaatcagagttgaaatacttacaagaggcacctttatcgagattgactgataattcacaatcacatttgtatacgctaataatagacgaatatactcagtctttgcaaatccttattgatggtaaaatcgccatggcaagagaacgtattaaagacacgtcaaaggatctttttaagccacccatttcaccacttttggttgttcctaatgtttcggtaacgaagcccaatgattgggatgaccgcatttggatcgcagatcctgctttagtaaaacctgataattggaacgaacacgaaccgctaatgattccggatccaaacgacgcaaaaccattggaatgggatgaatctatttctaaatatatactcgatcctgaggctaagaaaccccattggtgggaagaggctgagcatggcgaatggatcccacccatggtaaaaaatcccctctgtaatatagaacatggctgtggtcagtggaagtcaagactaataaagaaccccaaatacaatggtccctgggaacctaaccaagtcataaatcccaattacatgggagaatggcaaccgccagagattgaaaacccactgtactacgaagagaagcatccattacgaatcgaaaatccaatcaacggtataattttcgaattttggagcggatctcctaacatgatgataagtaacatttatttgggtaaaaacgtaacggaggcgcaaatcattggaaataagacatgggtcatgagaaatcgtgcctcaaggcgtctcgacgattcttcagagcgcaagttcatgaacaccagattaggtggtctacaagatactcttcacagcgaaacggtgtccttcaattttttcgatcgcatcatcgactgcattctggaatctccaaaatcagtacttactattgccgtcgttctccttgcgacgctgtctttttggtatataattcttatatag

SEQ ID NO: 5500 - DNA, 108 bp, Saccharomyces pastorianus
atgaacttgcgctctgaagaatcgtcgagacgccttgaggcacgatttctcatgacccatgtcttatttccaatgatttgcgcctccgttacgtttttacccaaataa

SEQ ID NO: 5501 - DNA, 369 bp, Saccharomyces pastorianus
atgacatcggcagatttcaattcatggtccaaaaccatgaggtccgaatctgtagtgtctataagtactgtattctttggggaatatgaaggtgatgacgaaaagtctcttgggatagtaattggtggtaaaacgtcttgtataatgggtatgaattcagctttcgttaaggaaacaattagacttgatttaccaacgccttcgtcaccgcatatcaccactcgaattgtttctttagtcattgtgacgtttggttgtaccgttctcgaatcgccctttggtgttgtatttgtttttatttgttcattgtttgaattttgtttttggtttaaaagcaaaaatcattatggtaaacttgacagtaactaa

SEQ ID NO: 5502 - DNA, 1350 bp, Saccharomyces pastorianus
atggtatctatagagatagttcagcaatggaaggccaccaaatatattggtataattgggctaggtgacatgggcttattatatgccaataagttttcagatgctggatggaaagtcatctgttgtgacagagaagatttttatgaggatttaaaagaaaaatatgcatctgccaaatttgaggttgttcaaaatgggcatttggtatccagaagaagtgattacatcatttatagtgttgaagcatccaatattaataaaattgtcgaaatgtatggaccatcctcgaaaattggtgcaattgtgggaggccaaacaagctgtaagctgcctgagatcaaagcttttgaacagcatttacccaaggattgtaacattattaccgtgcattctcttcacggtcctaaagttaatacggaaggtcaacctctagtcattataaaccacagatcacaacaccctgagtcttttgactttgttaattctgttatgtcatgtttgaagagtaagcgggtttacttgacatacgaagaacacgatattattaccgctgatacacaagctgtgacgcatgctgcatttttaagtatgggatctgcatgggccaaagtaaaggtttacccttggactttaggtgtgaacaaatggtacggtggcctggaaaatgttaaagttaatatttctttaagaatttactccaataagtggcatgtttacgcaggactggccataacgaatccaagtgcgcatcaacaaatccttcaatatgccacaagttcaacggaactttttactttaatgcttgataataaaaaacaagaacttactgaaaggttactacaggctagaaagtttgtgttcggaaaacacactggcctcttgttattggatgatacacttttagagaaatattcgctatcgaaaaacactgttaatgacgacgctgattccaagccattgccaaattctcatttatcgctgttagcgattgtcgactcgtggtatcaacttggtattaatccatatgaacatatgatttgttccacgcctctattcagaattttcttaggtgtgtcggagtaccttttcctaacacctggtctgttagaacagacaatcgatgcagctattcatgatcaatcgttcagaaaagatgatttagaatttgttatttcagctagggaatggagttcaattgtgtccttttctaattttgagttatacaagaaacaatttcaagctgtacaagaattctttgagccaatgcttccagaggctaaccttattggcaatgaaatgataaagactattctaagccattctaaagaaactttaacgggtaaatattaa

SEQ ID NO: 5503 - DNA, 636 bp, Saccharomyces pastorianus
atgtacgggttaacatgtcaaggcgcgaagttacttgcgtgcttcagcgccaatacgtatgccgtttattcctacagtagaggttactgtatcctcaacttacctaacatgaactgttacagaggagtcttcaaccatttacagtgcttctgtgtgtcatcacaagcaagaaagacgttgctgcaatatccatttatatttatcatcatgccttctctccgagacttaacaatagagagaaacaaaagtttaagtcagttaagagcccgtattaacaaggctaacaagctaagcacaaccgagtttggtgctccctttttgaaggctttagatggaactgttaacggccatgtacttcaaccgtcaccgtcttctgattcattgagcactattgaacaagaaattagtcatatcgaaatgggtgaggaagaccagcattcacacatttctcttcagagagatcagcaaacagtacgcattggcaaagtctctgaaactggcgacctcaaagctaagctcgcgtctgctatggaagagctcgaaaagaaaactgatgaaacgatcaatagcataataaggaaaaggttactacaaaattccaattacgaacatgatacaagcactggaccaggctaa

SEQ ID NO: 5504 - DNA, 147 bp, Saccharomyces pastorianus
atggtcagattggactctgaaaagcatgtcgactttgccccaacttctccatttggtggtgctagaccaggtagagttgctagaagaaacgccgccagaaaggccgaatcttccggtgaagctgctgaagaagctgacgaagaataa

SEQ ID NO: 5505 - DNA, 672 bp, Saccharomyces pastorianus
atgtcacaatccaacggatcacttgtgccagaaggcaaccaaggctccctccaagaagatgttaatcctgatttcaatggagtacctggccaagctttagatgctgtacgtatgcggttggctcaattaactcattcattgagaagaatcagggatgagatgtctaaagctgaactaccgcaatggtatacactacaatcacaactaaacgtcacattgtcgcaactcgtgtccgttacatctaccttgcaacatttccaagaatctttagattcaacggtcgtttatccattgcctaaatttccaactacttcgcatgaaagtttgatcactacacttttgagaaaaaagaacattcctgaagtagatgaatggatgaaatacgctagagaaacatccggaataacgacaaatttgttgaaggatgaagaaatacagaagctattacaacaggacaaagacataacaaactgggcacgtaatacgtttggaaacgaatttgaaaaacacgatttcaaacatgaagaggccctaaatgaagaggatgcttcactccttgtacgagataccaagccatcaaaaccttttaacgttgacgttattttaaagtttacacatgcaggagaaaaaccaatttcgatagatacgacgccgaaattgactactggttga

SEQ ID NO: 5506 - DNA, 693 bp, Saccharomyces pastorianus
atggaggacaagcaggttccaccgattcgggtgaaggtgagcgacatggatccgggctatgaaagcaaattcaacagccgggaaccgagcgcccagccggcaaagctggaattcaagcccggcaaaagaaaaatcaaaggatctccagactccacagttgctaccgccgccgctaccgccaacggcccgttgccggccccggaggcttccaagaagctaaacacgccgccgacgagcaactcaccggccgctggcaccaccaccaggagcaacaccgcctacgaaagaagcgtcaacggcagcagaatcacaatgcactctaacctagtacccactgagacgcaggatgtatcttggtctgagatcgacaccctagatgatgtgaagaacatggctaaagagcctatcatcaacgacggattcccgcaggatttcgagaacagacttacgcagatgcgacgctcgcacgctcagctgctgcgagtaatgagagaaagaaatgagcggctaaaacacgccaagcccgacctctccacgaggatggcagccccccctgagaagggccagcgtggtacttccgccaagggccccaaacgcgaaccggaacaggcgattgatgacccggaagtagcgttcgacggcgagaaatacgtgggtcagattgtcgataccatcaagagactcgaccagtga

SEQ ID NO: 5507 - DNA, 3207 bp, Saccharomyces pastorianus
atgactgctccagaagaatacttggagaaattgaaaccgtttcaagttggcgtaccttcacgcgatcctgagtcgaataaagagcgttacttattgaaggatgctaacaataaaaaatttgatctagaaggcacaaccaagagatttgagcacttattatctttaagtggtttgttcaaacattttattgagagtaaggctgctaaggatcctaagttcaggcaagttttggatatcctagaggaaaataaagcaaatggtaagggcaaaggcaaacatcaagatgttcgcagaaggaaaaccgagcacgaagaagatgcagaactactaaaagaggaagactcagatgatgatgaaaatatcgaattccaattcagagattctcccggctacgtgaatggccaattgagaccttaccaagtccaaggtgtcaactggttggtatctttacataaaaacaaaatagcaggtattctcgctgatgaaatgggactaggtaagaccctgcaaaccatttcgtttataggttaccttaggtacattgagaaagtgcctggtccgtttttggttatcgcccctaaatctacattaaataattggttgagagaaatcaatagatggactccagatgttaacgcgttcattctacagggtgataaagaagaaagatctagtctaatccagaagaaacttttaacttgtgatttcgatgttgttgttgcttcttatgaaattattattagagaaaaatcgcctctcaaaaagattgactgggaatatatcatcattgatgaagctcatagaatcaaaaatgaagagtcgatgctttctcaagttttgagagaattcacttcacggaataggttgttgatcactggtacgcctttgcaaaacaacttgcatgaactgtgggcactgctaaactttctgttaccagacatcttttcagattcacaggattttgatgattggttttcctctgaaagtgctgaggatgatcaagataaaattgtcaggcaattacacactgttttacagccatttctgctgcgtcgtattaaaagcgacgttgaaacatctcttctacctaagaaggaattgaatttatatgttggtatgtctaatatgcaaaagaagtggtacaaaaaaatcttggaaaaggatttagatgcggtcaatgggtctaacggtagtaaagaatctaaaacaagactgttgaatatcatgatgcaactgagaaaatgttgtaaccatccgtatttgtttgatggggctgaaccagggccaccatataccacagatgaacatttggtatacaacgctgctaaacttgaagtcttagataaactgttgaagaaattgaaggaggaaggttccagagttttgatcttcagtcaaatgtcaagggtattagatatcctcgaagattactgttatttcagagattacgattactgcagaattgatggttctactgctcatgaagatagaattcaagccattgatgattacaatgcgccagactccaagaaatttgtttttctgttgacaactcgtgcaggtgggttaggtattaatttgacatcagctgatattgttgtcctgtacgattctgattggaatccgcaagcagatttgcaagcaatggatagagcacatcgtattggtcaaaagaaacaagtcaaagttttccgtttggtgacagataattctgtggaagagaagatcttagaaagagctacccaaaaactgagattagatcaactcgttatccaacaaaacaggacttcttcaaaaaagaaggagaataaagctgattccaaggatgctttattgtccatgattcaacacggtgctgctgatgtgttcaaaagtggtacctctactggctctgctggaacgccggaaccaggttcagagggaaaaggggatgacattgatttggacgagcttctatcgaaatctgaaaacaaaacaaagtcattaaacgccaaatatgaaactttaggccttgatgatttgcaaaaattcaatcaagattcggcctacgaatggaatggtcaagattttaagaagaagactcaaaaggacatcattagtcctgttttgctcaaccccaccaagcgtgaacgtaaggaaaattattcaattgataactattacaaagacgttctgaataccggaaggtcatcaacgccatcgcatccaagaatgcccaagccacatgtcttccattctcaccagttacaacccccacaattgaaagttttgtacgaaaaggaaagaatgtggacagcgaagaaaactggttatgtaccgacgatggatgatgtaaaggttgcatatggcgatatttccaatgaagatgaaaagaagcaaaaattggaattgctaaaactatctgtgaataatgctcagccgttaactgaagaagaagaaaaaacgaaagctgactgggaatctgaaggattcactaattggaataaacttgagtttagaaaattcatcacagtatctggtaaatacggtaggaactcgatccaagccattgcaagggaattggctcccggaaaaacattagaggaagtgcgtgcttatgctaaagcattctggtctaatatagagaggatagaagactatgagaaatacctgaaaattattgagaatgaagaagaaaagatcaagcgtgttaaaatgcaacaagaggccttgcgccgaaaactttctgagtataagaacccattttttgatttgaagttgaaacatcctccttcctctaacaataaaaggacgtattccgaagaagaggaccgttttattcttctaatgttattcaaatacggtttggatagagacgatgtgtatgaattagtgcgtgacgaaatcagagattgtcctctttttgaattagacttttacttcagaagtaggacacccgtagaattggccagaagaggaaatacattgctacaatgtttggaaaaggaattcaacgcaggaattgtactcgatgatgctactaaggatagaatgaagaaggaagatgaaaatgggaagagagtaagggaggagtttgcaaatgaggtcgccgataaaaaggacgttgatgtggcggaaagcaagaaagccaaggttgaagaaacatcgaatcttgaaaccgagcaatttgcagtaaaggctattgcagaaaacgaaactgctcgttaa

SEQ ID NO: 5508 - DNA, 531 bp, Saccharomyces pastorianus
atgagttcttcctcctgtacagaatcgtcttcttcgggctcttgttcttcttcgtcttcttcgtcttcttcgtctttttcgatttctgcgccctcatcatcatcttggtgcggttgtagctcttctttggcaacttgttggtcatccaagtcaggttgccttcccagttgccccttcttgtcatgtatgctatttttctttaattgtttgataacgtcttctaagaatctgaaattttctctcttttccacacattcttcaatagaagccaaacttagtcgtagacttgatttgcccctcgagttcagctgcgctaataccagtgattcctccaccaggttctgcacaaataactctgcagcaaacgcggtcgccgatactgctgcattagatgtaataacatactccggatcgcatttggcaatcttcttgactttggatatcgggaaggcaggcgccttttctctaactagatcggacatttcttgcggtactattgatgggttgcctgtcttttaccagttggtctga

SEQ ID NO: 5509 - DNA, 273 bp, Saccharomyces pastorianus
atgatttgggcgggcgttcaaaagcaaacttgtagcgggagtcgcgattcactaagcgtagcatgtagtgcgtggtccaactattatcgtgtggacgcccctgcgtccgatgaacctatcgcatcttatatgacgaaaatgttggaagatgaggttcagtgtccaaacgtggaaaataggaccacctcagagcgtctccacctggatatggaagtgccagagtcgaaatctttctggacttcattaaaggataaactcttctctaaaaaatga

SEQ ID NO: 5510 - DNA, 594 bp, Saccharomyces pastorianus
atgctcaataaatatatcgtaattgcgtcatccgtccttgcgactttgctctctacagcatccgcagtcgatttggatgccctgcttctgctaccgggggtcgagtcacatgacggcagtaatactgtgttttctaatagcgatttctatcagacgtcttttgtcgagtccattgctcctgctatcgtcaacagctccgtgatcttccacgatatgtctcgtggtgtagtcattggcaacgtcaagagcagagtaagtgtctccaacgaagatacttattacgactgggttcagtaccagatggtgagaagtggtgattggggaacagaatggtctcctgtctctgactgtatctggagggacgagaaggacaaaagcgacgacacgccaaataagtttcccatctcagtgccgtttagctggacgtccgagtattctattgtcgactacgacaaggatgctaacgatgacggcctagacatggggctcatcaaatcgttgttgaacaagaagaattggcaccaaatgaacgaaaccgtctccgaatcgagtattatggtggcaccgatgataaagccatacaacgtggtctaa

SEQ ID NO: 5511 - DNA, 990 bp, Saccharomyces pastorianus
atgccggtacgaaaccaagctggagcaaagaagatgagaaatattattatttcggatttcgatgaaacaattacaagatatgatacaatcggtatcattgcaaaattgccgtacctaataaaccccgagttgaaacctgagtggtctcattttaccaaaacttatatggatggattccgtaaatacaaatataatggaacgagatcactaccattgctatcttcaaacgcgtccttaacattatcacattcaaatttcgactgtgtattcaaagatgaattggaatttcaaaaatataacagaactattgagttaaatagtgtaaacgagatttcaaaacaacaacttttcaagtcaattactttggaacaaatgaaacaatttgccaaagagcaaaatcgtgagatttgcctattgagaggcggtttcaaccaattttgttcctccgttattaaaaattttcaagatgatttttacattttatcaatcaattggtcaagagaattcatatgtgaaatcattggtaacaaagaggtcaatcctgatcatgttctttgtaacgatttgaaagtgtctacagaaaaaagacctcctacttacaccggtgaatttgactgtggattattgacaggctctgataagatcaaatcactaaatgaaatactaggtatgaccgagacgcacaacaatggcaatgagactcgctgctactggtatataggggatagtgaaacggacttgttatctgtattacacccatctataaacggtgtattgttgatggaccccgtagaaaacccctccaagttcttgaggattactgagcaaatcatcggtgtgccaagtgacaaaatcacaagatttcaaactgataacgctttgggctggttaaagttctgtgaaaaggaaaatgggatgtttgcctacctcgtgaaatcttgggattcgttaaaagatttgatcgcgcagacatcgaatagtacgtgttaa

SEQ ID NO: 5512 - DNA, 3072 bp, Saccharomyces pastorianus
atgattcaaaactcagctggttatcaatcacttaataccacggctccgatgaccatgcatataaaaaaccagaagaaaatctgtgctcattgtaacaagcaagttgtacaagatagccaacgaacgaagacgacgttgaaggcgctgggtaaatactaccatgaaaactgctttacatgtcaagactgtaggaagcctttgaaacccaagtactttccattccaagtgagcaagacgagtgaacctatcttgctatgtcaatacgattattttagaaggcataatttgttatgccacgtatgtgatacaccattacgtggcttatattatactgcattcggttacagatatgatgaagagcatttctcctgtacaatctgtgctactccctgtggtgtaaaaaaatgtttcatgtacgaggaccaattgtattgtaagttccattttttaaagtatttctccaaacgttgtaaaggctgtgaatttccaatatcagatcaatatatcgagtttcccaaaggtgaagaaatacattgttggcacccagaatgttatgggattcataagtactggcatgtaaatctggctgctgacaccgttggtttacagtatgttcccaagctagagtatagccccaatgcgaaggacaatgatttaaatccaacggctcacgagttagataaacaaatgcaggcatttaactttattttatctaaaacatggtcggttttataccgttttgaggaagaagcagcttcgtgcatttccgatatgtttcaatacctaacaagtaatgaccaattgaaaggtatagaatctacagccttattggtgctgaaaattgaatgtctctttaaagggctcgacactctgaacctatcaaccaataataacatgaccatcggccacgaatcagagtgcgttgacaacaatgcaatggctatcaacaaatacagcaaatttcccaaaaacttatccacaaagataatgatatacttacaattgttgagaaagttggggacagaaagcaagaacgagactattacaatatcgtctttcatgtccgttattactggactggctcattttctaaagctactgactagatttggattatacacaagcttagaaaacaacaaaaaaattcgctcggtaaatcctttgttaaaatttttgagggaagtggaaaagaatgagcttttcgaagagaatccatttcaattcatcaagacgcctgttaacgctacagatagttgtgctggttgcaacaaatatatacaagaggaatgtgttcaattctatgagtataggtggcatatagcctgtttcgtctgctcctcatgccaaaagaaaattaatccgatgagcttaacagatcccactttcaataaagagaagaaaagaatattatgttctcattgttcgatcaatgatcctgcttccgtaccgggcttcagattcgtcactaagctggcgcagctaatttttctcttaaaaattgccctagttaaatcaagaactgttatgttgaaatcgagagcctctaataaagccggcagtactcccttacagagtactatgctgaacgaacaaacctacattaggacattgaatgacattaaacgattaagatcaagaagagaaagcgtccgagttactcataacaaacaacaagccagaaaatcagtcatattggaaactacagaaacagacttaaatgatccaacgaaacaaggagataacaagaatctagtgattcaaacagatgatctgtctgttaatcagcaagttagtacgcgtgaaaatgtttttagtaatacgaaaacgttaacgttagacgatatttctcgtattgtagccgctgaacaggcaagagagttaaggccaaacgcatttacgcactttaaaaaattaaaggaaactgatgacgaagcttccaatatcgctcccaaaaaaagtggagtctattattcagaactgaatacaacggagttatcgataatcaaggccatcagtttatcattgttaactagcaaacacttgatatccaaaatggacccctattttaataatttagaatctatgattttttcaaacgaaaagcaaatattggcaggtagcttctggaacaaaatgagagttatgatgagcatggaacccaaaaaaaccatacctaaaactgtctttggtaccccgttggacatactatgtgaaaaatggggtgtcgattctgatttaggtgtaggtcccgttaaaatcagaatccccataataattgatgagctgatatcatctttgaggcaaatggatatgtcagtggagggtatttttaggaaaaatgggaatataagaagactaagggaactaaccgctaccattgacagcaacccaactgaagcacctgatttttcaaaagaaaatgcgattcaattatcagctctgttaaaaaaatttgtaagagaactgcccgatcccattttgtcaactgatttatatgacatgtggatcaaagcttccaaattcgactcagaggatgagaaacagcgcattatgttgttgatatattccttgctgccttcatacaaccgcaacttacttgaagcactgttatcatttttgcattggacatcttctttctcctacattgagaatgaaatgggatcaaagatggacatccataatttgtccactgtgataacacctaacatcttatacttaccccataaggaagcatcgaatgacaatgcttcagaagaaccagaatctggattagttgactcattcgcccaaaacaaaggggaaaattatttcttggctattgagattgttgattacttgatcacccataatgaagaaatggcaatggttccgaaatttctggtgaatctcttaagagaggtgcagtcgcagaagttagataactatgagtcgattaacaatcatatttctcacatattggaaaaaaaaacaatcgattattcagaatttgatgtaaagagtcctgtcaccgtcaaagattccactactatggtcgtgcaaagtgaaataaacaaaacagaaaatgatacgtag

SEQ ID NO: 5513 - DNA, 930 bp, Saccharomyces pastorianus
atgactgcacaaaaagaagcaccagtaaagataaccaacaaagacattgctcaggagttcttgaacagatatgacacatttttgttcgattgcgatggtgtcttgtggctaggttcgcatgcgctaccatacacccaagagatcttgaatcttttgaaacagttagggaagcaattgatctttgtgactaataactccactaagtctcgtttagcatacacaaagaagtttgcctccttcggtatcgacgttaaagaagaacaaatcttcacttctggttatgcatcagctgtttacgttcgtgattttttgaagttacaacctggcaaagataaagtttgggtatttggtgagagtggtattggcgaagaattgaaactaatggggtacgagtctcttggaggtaacgattcgagattggatgtaccattcagcgcaagtgaatcaccatttctggtcgacggccttgataaggacgttaattgtgtgattgctgggttagatacgaaagtaaattaccatcgtttggctgttacactacagtatttacaaaaggatactgtccattttgtgggtacgaacgtagattccaccttcccacaaaaggggcacacctttcccggtgctggttccatgatcgaatcattggcattctcatccaatagaagaccatcttattgtggtaaaccaaacatgaatatgctgaataccattgtgtcagctttcaacttagacaaatcaagatgttgtatggtcggtgataggttgaataccgatatgaaatttggtgtcgaaggtggattaggcggcacactattagttttgagtggtattgaaactgaagaaagggccttggaaatttcagctgactatccaagacctaaattttacattgacaaactgggtgacatttacaccatgattcaataa

SEQ ID NO: 5514 - DNA, 1029 bp, Saccharomyces pastorianus
atggtggagatgacagctggaccatggtatattagacaacgtgacacagatctactcgggaaattcaagttcatacaaaaccaagaagatgcgagattaagggaagctaccaacggtacggcaaattcccggtggtcgctgggcgtcagtgtaaaacctcacaatgactgcagaaaccggtacgtcaacatcatgccgtttgaaaggaaccgcgtccacttgaagactgtatccgggaatgactacattaatgcgtcctacgtaaaagtggatgtccccggacagagtatcgaaccgggatactacattgccacccagggtccaacgaggaacacttgggaacagttctggcagatgtgctaccacaactgccccttggacgacatcgtcattgtgatggtgacgcccttggtcgagtataacagggaaaagtgtttccaatactggccccgtggcggtgaaggcgatatggtcagggttgcaccgcaattgcaaggccccggtgggttcagggacaggtccgagtttccttgcgatctgcagatagaattcttgagtgagcgcaaagtgaaagacttctacacggtcaccgatatcaagttaacgccctcagaccccagtgttgggcccgccaaaactgtgcatcacttctacttcgatctttggaaagacatgaacaagccggaggaagtcatacccatcatggaattatgcgctcattcacatagccttaattctcgcgggaacccgatcgtagtgcactgctctgcaggcgtaggaaggacggggacgttcattgccctcgaccatctcatgcatgacacccttgacttcaaaaatatcacacaacccctaaggcgccctgaagagtatccagaagagtacacacgagacctaattgagcagatcgtgttgcaattgcgctcgcagagaatgaagatggtacagacgaaggatcagttcctgttcatctatcacgccgccaaatatcttaacagcctctctgtcagacaacagaaagctaaataa

SEQ ID NO: 5515 - DNA, 447 bp, Saccharomyces pastorianus
atggtctctaaacctttttgcactagggatgatccgcctccttcggacttgatgaaccctcttctgagatcacccttctcactgacgaaattcccagcagctaagggaccactggaaataacatgtgtgttatttaaatatttggccattcgcctttgttgtccaccattgccgtttactcttttactgttactgttattgaagtttttcttgtctctcttagggccctcctctagcttcactttagatgcggcagcctctctctcctccttagattttctagcgactgcttttggcttaaactttaatgaaggctttgcaggtcctccggtagatgaagaatcttttaatgacggcaagcgcccattgcccttattgctactcatgttttactggatgatataccacttaaagcaaaccaaaaaaaatgcgttagatgtattttaa

SEQ ID NO: 5516 - DNA, 5373 bp, Saccharomyces pastorianus
atggaccttatccaggggctgatacagcagccaaaagtccaatccgcggacgaaaccattccaacactgtgtgatcgggtcgaaaactccactttgatcaatgatagaaggtccgctgtgcttgggttgaaggcgtttagtcgtcagtatagagaatctgtgattgcatcagggttgaaaccgttgctcaacactttgaagcgtgattatatggacgaagattcagtgaaggcgatcttagagacaattttaattcttttcattcgaggcgatggtcatgatgatctaactagaggatggatttctcaacaatcgcggctgcaaaatgggaagtatccttcaccattggtgatgaaacaagaaaaggaacaggtagaccaattctcgctatggatcgctgatgccttgacacaatccgaagatttaattcatttacttgttgaattttgggaaattgacaatttccatatcagattgtatacaattcaattgttagaggccatgatggccacaaggccgttgaaggcgagaagtgccttgatttcgttaccaacaagtatttctactatggtttcactgttagatgacatgcacgaacccattagagatgaagctattttattattgatggcggtggtcaacgattccccccatgttcaaaaattagttgcttttgagaatattttcgaaagattgttttccatcatcgaagaggaaggtggattaagaggctcccttgttgtcaatgattgtttgtctttgattaataacatcctcaaatacaacacctcaaaccaaactctattcctggaaaccggcaatttgccaaaactggcacacttattgagtgaaccaatatctcaagatgaaggctttttctggaatgaccaaagaataataaatataaacacggctttggatattgtcagtttaacagtggaaccgggaaacactgtcacctctcaacaccagaacgtcttattcgattcaagcgtcttgatggttgtattgcgtctggcattttttcacaacatccccaaaagggttagacctattgcgctcttaaccgctgcaaacatgatcagaagtaacgaatatgcgcagttggaatttagcaaaattgacgttccttattttgatccttcattaccaacaaacgctaccgcaaatgacggcccagttaaattagttcctgtgatagatattttgatcaattggatgctttatgctaattctgttcatacattcgatacaagggttgcgtgttctagattattaaaggcttatcttatggacagtttcgacattcagaaagatttcttatcacatcaagagcaattgtataaccaaccttcaacaacaaatagccacggtgctaaagagaacgatatttctgaaaacgttgatgaagaagaaagtgcaaatgaagagaacatatcagacactaagggtgtgagccttctcaaggcaaacttatttgaagttttactaaattatgatacagaattgaatttaaacccttttaaattgtttttcacaactgatattttcatgtttctattccaacaggaacacaaatcgagtgaagaactacgtgaaattacaagaaacgttactatcggtaataaccttgacgacgaagaacccttaaaggctattcaaacaataagtgaactattgactacttcccttactgctgctgacatcagaattcccatctcttatttgactttcttgatatattggctatttggtgattctaaggctaccaatgattttctgtcagataaatcggtaatcaagtccttgctctccttttcttaccaaatccaggatgaagatatcactattaaatgtcttgtaacaatgttactgggtgttggctacgagttttcatccaaagaatctccatttccaagaaaagaatacttcgaattcattactaaaagtttaggaaaagacaattatgcttcccgcatcaaacaatttaaaaaggattcttttttctcagaaattgaccaaaacgaagatagtatactgactccggagcttgatgaaactggtttgcctagagtgtatttcagtacttatttcatacatttattcaatgaaaacatgtatagaatcagaaccgcattgtcacacaacccagacgaggaaccaatcagtaaaatttcatttgaagaagttgaggagctacaaaatcaatgcgcaaaactgaaaagtgaactaggatccttgcaagctgaaaccaagaccacgaatgaggatctcactgaaaaattggagactttatctaaagaacatgaagaattaatagaaaaataccaatcactaacctcttcacatgtgtcattgaaagaaaacgtttctggtttagaaattgaactaaaaagtattacggaatccttaaatgaaatgaccaattcaagagatgcgctcgaaacgaaggataaagagaattattttgccttacaagagtacaaaggcatgattcacaaacaggaggaggccattagaattttggaaaaggaacttgaaaccatttcttctcaaaagaagaaagcagaagatggtataaacaaaatgggtaaagacttattcgctttaagcagagagaaacaagcggtggaggaaaaacagagaagcctacaaaaggaaaaggataaaagtgatagtgatcatcaaaaagagaataaactgctaaaagatgagattactagaaaaataactgaaataaagacactaaatggaaacctagtaaaaacaaaaacccagtacagtgctttgtcagaagaaaaggaacaaacttcgaaagaacttgtcgagtacaaatcgcggttccaaagtcatgataatctggttacaaaactaacagaaaagcttaaatctctagcgaataattatagggacttgcaagccaagcatgaattactaatgaaatccacagaagaaaccaagagtgaaagtaacacgcaactatccaacctgcaggacgaatatgattatttatcacgggaaaaggaaaattttcaaactgaaaaagatcatcttacagatgatattaaagaattaaaagaaaccatttccagattagaacacaaaaacgaagaaactatctcaaagtacaattctgaaaaggatgagtatgagtcacaaattaaccagttgagagaacagttgaaaagcgcaactaccacacaggatgacaatgtgaataaaatttctgagttatccaaagatattaaaaacttggaaacgacactggaaacttgcgaaaattctaaacatgatctccaaacaaaacttgaagcttcagaaaagactttggcggaaatgcacgaaaacgaggagcacttaaaggaagagaaaaatcaactggaaaaagaggtcgctaacaccaagaaacaactcaatactttgcgtggcaattttgagtcattagaaagcgaacacaaagattcgatatctcaagtgagagagtatgagaaacaaatcactgacaaagaaaaggaatataataaaaatatttcaaaactgaacgacgagatcagggctattcaacaagaaaatgaagcactatgccaaaacaacgacaatttaaagaacgaaattgaagaagttaaacaaaccttggaagaacagttaaacttgaaagagtccaggatggaagctttaaattttcaaatacaagatctcaaagtaaagaaccaatctagtgaagccgagttatcggagtcggtgaagaataaggaaattgaaacagaaaagatgatagaattacaaaaagaatgtaactccagaaaagagaaaattagtgaattagaagagaaactgaaaactttagaagtaagaaattctcataatttagaactgctaaaagaatcagaagaggctgaaaatgaattaaaagaggctaaaaaggaattggaaattagaacaaacgaggtaaaaaatcaatcagagaaaatcgcgaatttagacaagctcaacgagaaaacaggagctgagctatgtcggttgaaaaagacatttactgataaaaaaagaaacttagaagagcagttggggaaactaagaaacgaaataaaaatcaaaagccaagcatttgaaaaggaaagaaagttactcaatgagggttcatcaacaattacccaagaatattctgaaaagatcaacatgctggaagaccaattaaataaaatggaaaatgagagcgaatcaaaaacaagactaattgatacaagtaggagtgacctggagaaagccactttgagccatgatgaaattttagaagaaaagcggaatgagattaataaaatgaaagacgaaattctctcatacaaagaaaagataaatgaagcaaacacgaaactactatcaacggaacaagcacatgaaaatgggttaaatagtttgaaggaacaacttgaggctattcaagaatctaaatccgaggttgaaaggaaattgaaggacatggaggaaaaatctgctcacctcaaatcagatttaaaaaaatcaaaagaaactgcgaaagacttaaaaagtgacattgaaaacaatgaaaaaagaatagaacttttagtaaagagtgggaaggaatctgatgagaagtttaaacagtataaagaaattagtcaggtagacattaaagagttgcaagatgaaaagactgatttggaatctcaaatcgtagaattcagaaaaaaaatcgaagagctacaagtgaaactgaaagacgaagcagaatctaacagtaagatagagaccatacagcaagagctaactaatgcttatgagaaaataagagttaatgaagaagaaaatgtattattaaactccaaattgaaaaatttagaatgcaatttaagagataatcaagacgagatacagagcactaaggaaaagaacgaatcattggattcttacttgaaagatctgaagcaggagttgactgacgctcaacaaaaggctaaagaatgcgaagaaaagagtaaaacggaaattgaacaacttcaagcagaagcgtctcgatctcatgaaattgccaaacaacttgaattaaaatacagtaaccttgcaacggaagagcaaacttggaaaagaaatgaagaagctatcaaaaaatccactgactctcaaaaaactgaaattgaaaaattagttgaagagttggagagattgaattcagaaaacgcacagttaaaagaagcgaatgaagatcgctcggaaattgatgacttaatgcttttggttaccgatttggacgaaaagaataccaaatatcgctcaaagttggaagacttaggtgttgagctcagctctgaagatgatgacgaagatgaagacgatgaagacgaagaagaatag

SEQ ID NO: 5517 - DNA, 423 bp, Saccharomyces pastorianus
atggatcagaaagtgtggctgagcttcacgcatgatagtgatattctgaactatttgacagccgtcggattggttgacgatactagaaatctatcaactgcccacgttccgtttcgcgatcatgcctaccataaatcgtggtatatcccgcaaggcgctagaatatatactgaaaagatccaatgcgttaaggatttctacatacggtatgtggtcaacgatgccgtggctcctatcgagacttgttcagatggtccaggattttcctgcaaagaaaatcagttttacgagtatgcgaaagagagacttgaaggcctaaatttctatgaagattgcagcgtttccaatgttagcccccaaagagaattaagcttttattgggattggaatacaaccaggtataacgcgtcgttggtagactaa

SEQ ID NO: 5518 - DNA, 816 bp, Saccharomyces pastorianus
atgttcatgtcactggcctatgccattttatgtgcatcgctaactgatgcagccgctatcccaactggcagtttggcagatgctgaccagatcggctctcagcaaaggttttttcccttcttaggcggctctggaccatatttctcatttcctgctaattatggcatccccgcagacattcctgtaggttgtacgctaacgcaggtgcaaatgattggaaggcatggcgaaaggtatcctaccaatagtgaggccaagggcatttttcagacatggtacaaaatatccaattatacaggtaagtataacggaccgttgtcgtttctgaattacgaatatgagtttttcatttcccatgaaagtgacctagaaatggaaaccaccttggaaaactcgatggatgtgctgaacccatatactggcgaaatggatgcgaagagccatgcaagagaattcttggcaaaatatgggcagctagtggagaatcgcaccagcttccccatctttacctcaaattcaaaaagggttcatgataccgcccgtttttttatcgacgggctgggcgataacttcaacgtatcattgcaaacaatcagcgaagcttcatccgctggagcaaatacattgaccgccaagagctcttgtccgaactggcgttccaatgtcaatggtgacatactttctgagtattcgagtgaatatttagaaaatattgccaatcgtctaaacgaggaaaataaagggcttaatttaatcaagagcgacgcaaatgcattattttcttggtgcacttttgagcttaatgtaaagggctaa

SEQ ID NO: 5519 - DNA, 918 bp, Saccharomyces pastorianus
atgctattatatgacgatgataattacagttcttcgtcggatagcgaacaacagtttattgaagactcccagtataagagcagcgatgacgaagaagaggaagatagtgagaaccaagcggtagatgataaccaggacgaaggactatcactaaggagaaccttatcattaggaagggatgaatctaccagttctttatatgaccttgcacaaccacgttcttcagaaactcctttatctcaggccaagaaacctactgatttcatgaaaggaagaactgacgaaaacaaagatgcacagcaggctgttaggccatatccattaaaacgtaattcctcttctggaaatttcatattcaattcagatagtgaggaagagagtagcagcgacgaggaacagaggccgatgctggtgaccaaccagctgactaaccaagacgcttcaataaataatgcaacatctaacccggtaaatattccaacgcaaaagaaaataccaccctcaaagcaacaaaatgcatcagatagctcacagagctttagaattgtaaataatactccttcacctgccgaagtgggctcaagtgatgttgccatagaaggttacttttcccccaggaatgactccattaaatctgtcgtttcaggaggaggtgtgatggaccagcgggaccaaccagaaattgacactttgtccaaaggatttgaggattgtcatatagataacacggataggaccaaggacaagaacgctgatagcgcccatgccgcaggaaaagaaacttttatggcagattcaagcaacgaaagtttacagaaggtgatgcataacgcaaagggtttggcaagcaagtacttacatccatggaaaaaaaccgatggtaaacaacgagaaaacagcagcagtactgacagttga

SEQ ID NO: 5520 - DNA, 2130 bp, Saccharomyces pastorianus
atgtcaacaaatttagcaaattactttgctggtaaaaacgattttgaagatgagcatgtaaatagaaatgctaacgaagagattagtagcaaaagcaatgacaatgttgctagtaacgataacgacaacgacgatgaagatatgggaccctcaatatcgatggctgttcaagcaaaaagcgatgatgaattccataaatcaaccttcaaccttaaaagaacaaggtcgatgggcctactcgatgaatatatcgatcctactaagaaactgttgggaaggtcagacgatttatataatgacgacaatgaatactacgacaacacatctgatgttaattcatcaggtagttcttcagatgatgattacgataatgactatcacgaccactcaacttctgtttctccacctcctgcagataatgatagctatttacttccacaggatgataatgacgtagtagtagagcctgaaagacatgtagactatctatcccatcaatggaaggagtcagaaatttctaattcttggaaatatattattttgaagaaaaagaaaagggacgtagatttggtaaatgctgctaggttagagaacgcatcatggagaacatgggcaaaggcgagaaacaatttaaaaacagtctctcctgaagtggttaactggtcaaaggactcagacgtcacgtggctgtatgggcctatcgtacgtgattctgaagttaatgttcaaaaagaggaggagcacgatttggaaagaggttatggttcggatgatgaaaatttcaaaagaatgacaaagcccactaagaaatcaaagtcaccagccgccgctcctaaaccaatattgaagaaaaggaccgtcacggaaattatagaggacaatgctttatggaaactaaacgaggcaagaaaacacatgacagaaatgaagcatgcatcagttataatggatcccaacggaaataaaaacgttcacgacgattttgatgctttggctgctcaagttaacgcccaatattatcattatccaaaaaagtcaaacagtaacgtaagtttgaaaagccaaccttcagaaaaaacagacaaaaaatcttccacgataccgaactcctcggggggcaatccaaatgagaacgataacaggggtatagagacttcaaatttaaaatctgctcttcgtggtaaaagaacgccgtcacttccacaagcagataaaagcattcttaagaataacactaatgacaatgatattgactacttagacgaaaacgtggactcgtctttacactctaaccttcaccaactttattcatcgaaatctggattgaatagagataacgaaaaccattcggtaggattgtcgtcaatattaacatcaagcccaagcgaaaaacccaacaagcccactaaaaatagacatatacattttaatgatagagtggaacaatgtatggcgctacgatatccagcatctcaatcggatgataatgatggagacaaggaacatattgatgctaataacaatgctaatgttactaccataaacaataacaatactccaatgttaggctcctcaaatggctccgcatctaattatcgtaatgccggtgctagtgatgatgatatgtcatcatcatcatcatcatcttcttcatcatcatctcactcggaagatgaagagcatggtggtctttacataaatgctggattttcaaggaggtctgattctggaattcactcaccactaacagataactcctctataggttcatctttcacctcgagatctcatgtgcgtcctataataaagctacttcctgacacaactttgaattatggatccgatgaagagtccgacaacagcgaattcaacggttatggtaatgctgtctcacataatgtcaatacatccagaggttatgattacatatatgactataattctgtttacactggtgatacttcaagctttatgccagtggattcatgtgatatcgtagatgtgccagaaggactggatcttcaaacggctattgccgacgacaatgcatcgacttacgagtttagcaatgccgttcagtccaaaaacaacaaaactacacaagccaatcaattccccgctaatgataat

SEQ ID NO: 5521 - DNA, 405 bp, Saccharomyces pastorianus
atgggtatcaacccaactttcatcttcggtcacccacaaatgatgtctccattagccaaatactcaagagatcaaccaggtctatgtgaacgttttgaagtctttgttgctacaaaagagatttgtaacgcttacactgaactgaatgatccatttgaccaaagagcacgtttcgaagaacaagctagacaaaaggaccaaggtgacgacgaagctcaactagtcgacgaaacattctgtgacgctctagaatacggtttaccaccaaccggtggttggggttgtggtatcgatagattggccatgttcttgaccgactccaacacaattagagaagtcttattgttcccaactttgaaacctgatgtattaagagacgaagttaagaaggaagaagaaaaataa

SEQ ID NO: 5522 - DNA, 363 bp, Saccharomyces pastorianus
atgtcccaacaagataacgttaagtccgccactgaaggtgtcgctaacctacacctcgatgaaaccaccggggaaatggtctccaagtctgaattgaagaagcgtatcaagcaaagacaagttgaagccaaaaaggctgccaaaaaggcaactgcccaaccaaaaccagcttctaagaaaaagacagacttattagccgatctggatccatcgcaatatttcgagactagatcccgtcaaatcaaagaaatgagaaagacccacgaaccaaatccatacccacacaaattccacgtttccatttctaatcctgaatttttggccaaatatgcccatttgaaaaaaggtgaaacctttacctga

SEQ ID NO: 5523 - DNA, 1650 bp, Saccharomyces pastorianus
atggaccaatatactataccaacagacctagattcgttacctaccgcttcacccccgccttccgtccatcaggcgtcacaacaacaacagctctctcccatattggctaacaaagcccgctctccattcgataacagaagtcagagtcaaaatgataaggctttagaaacgtcttcggtgaagcaggtagcgattcctatacacgcaatcccttcatctgaatcgggggaattgtcaaaactccaaaacgatacagttgagacattacctgaaataggatcatccaatagccgcaagaagcatactcatataatcatactaaaatctttaaatgcgacatttgaaaccaaattccttgtcgtaccatttaaaccggacgggttaaaattaggtcgaccagttaccaataacttaaacaagaatggaaaaacttcagcatccaaaagagatttgttttcacaacaagtaaggccagataacggaaacttcgattccagagtcctttctagaaaccatgcttgcttaagttgtgatcccacaacggggaagatatacatccgcgatctcaagtctagtaacgggactttcgttaatggagttaaaattgaccaaaatgatgtagagttgaaagttggcgatactgttgatttaggtaccgacattgataccaaatttgaacatagaaaaattagtgcgtacgtagaagagatttcggtcattcctttgatgaatacagtggctgattcgacgagtttgatggcgaagaagcaggaatttgctaataaggacggtgatatttcgaccgatataaatggaataaaattagacagagcgcatcttactcaacacatcccgctacgatctcatttaaatgagaattatacagaagctggtgtaacgtctgccacaacagcccaaagggcagcttttgaagctgccatgttcggagatgttaataatatagaactagatgacgatatcctaggattagaaaccgaggttctcagtgggattttcattaacaattctgccggaacaagcatgaacttaataaatatgataaagacgttaactactgaattatctttagaaagtcaagaaatggaaaaactacactccatgcaaaactttgtgacaaattataccgcaaacttggattctataaacaagcatatgattgaaatgaatgagaagcatctactcaagctaagcacggccttacagaaaactctttctgaaaacaatgacgcactactcaaagaatctgaagatcagttaaaagagatgaatcaacaaaacaacaaaatcaaatttgcatgtagtttgaaagaaaagcaaaacaatgaaatacttgaagatctagaaagtgaacttaaggatctgaacgtccaaatagaagaagagagacaaaaaaattcgactttaaaacatagtaattcaagcaataatatcaataacggaaataacaccaaagccaagtcagaagatttaaaggaagacacaaaagatagtcaagagacgttagttagtactgaagaagtaggcattgtcgagagcaataaaccaaaagtcggtaaaggaatgcttttcgggattattgctatttcatttggattagctgcaacagctgttaagcaattgccgcattaa

SEQ ID NO: 5524 - DNA, 183 bp, Saccharomyces pastorianus
atggcggagctggaaagaagaagaaggcctcctccgcaactgcaacattctccttacgttagggatcaatccatctcgccaggaatgacaaagactccgcaaacttcaccgccgaagagggctatggggagaacgagatcaactccagaagtagcgggtccagttcaatgcagacatggacca

SEQ ID NO: 5525 - DNA, 990 bp, Saccharomyces pastorianus
atgctaggacgttctatgctaggttctactgctgcaaggtcagtgagatgtcaacgtcgtggaatattcctccctacagccgcaatatacagcttgggttcactagtgtttggtaagaaagcaagattggcagatgccatggagcgtggtgatttacataacaagaacgtagactatgcgaaagaggctgaagaacgcaccgagtcacgtattatggctctggctaatagtagaccaatgaagccccggtacgaaggccatgtccccctctatcggtatgagaagctgctactgttcgcgatatccggctggaactcattcttccatcctgaagatggttataacattgttcagctgggtgaggcgactgccctgccagtctttcttgagaatttgaagcaaacaatgctcagtgatccctcggggaggcgtatcctgaaggagcaacccaatattacggcggacattttacacatggataagctagccaagttgccgcataacacttttgggtacgtttactatcaatggttgaaaagggagaatgtttctccagacaccagagcgcctgtcaaattcatcgatgatcccatgcacgcgtatatctttaagaggtatagacaatgccatgatttctaccatgctctaaacaacttgccgattatcattgaaggggaggtcaccataaaggctctcgaaggtgccaatttaggggttcccatggccattcttggtggtatccttgcacctttgcggctaaaaaaggcgcaacgggaaaggttatacaacacatacctcccctgggccatcaggacaggactaagttgcaagccattgatcaacgtgtactgggaagaaatgctagaaaaggacgttgatgccttgagaaaagaactgcaaataactcctcctccagatctaagagcgatgaggaagaagcgtgcagcccttaaaaaggagcttgacgtcaaatacaatacacacgtgtga

SEQ ID NO: 5526 - DNA, 1257 bp, Saccharomyces pastorianus
atgggaatacctggcttattaccactattgaaaacaattcaaaaacaggtaaccctaaaaaaatatgtgaaccaaacattggctattgatggctatgcgtggctacatagggcttcttgtacgtgcgcttttgacttagtaatgggcaagccaacaaacaaatacttgcaattttttattaaaaggttgcaactattaaaacggcttaatattacaccatatgtagtttttgatggcgattcactttttgtaaaaagtcacacagaaatgcaaagaaagaagagaaggttagaaaatgaattaatggcaaagaaattgtggtcggctggcgacagactcaatgcgatggaattcttccaaaaaagtgttgatgttacacctgagatggcaaaatgcattatagactattgccaggtacattcaattacatatattgtcgccccatttgaagcagatgcgcagatggtttatttagagaaaatgggtcttatacagggcattatatcagaggactcggatttattagtgtttggctgtaaaactctaataactaaactaaacgaccatggagaagctctggaaatttcaagagacaattttacatctttaccagagagttttcctttaggtgaactaagtgagcaacaatttcgtaatctagtctgcttagcgggctgtgattacacaagtggaatttggaaggtaggtctgatcactgcaatgaaaatcgtaaaacagcactctgctatgaaagacatacttgcgcaaatggaacagacagataaatttcggctaagcaaaacgttcaaacaggaagttgagtttgccaattatgcgtttcaatatcagagagtgttttgccccctatcaaaccagattacaacattaaaccatatcccacagcctctcataaactgtcgtgccgaaataatgaagatcataggatgtattggctctgttgttgaaaaaagatcaggaatacgaaaagatatcattgacactaaaaacattgatcacaaagtttatgaaagaatagccaaaggggaactgaacccagtagatataacttctaagcttttaaatagagagaaaaaattaagaataagaaacccactcagggcaaatatacttgtaggtcggtccgaccttctcaaaaaggtacccagacagttgactgtaagaacacagagtggaacgtttaacgcggaaattccactcgagagtaaagaggtttctttgtatattcaagcttattga

SEQ ID NO: 5527 - DNA, 1068 bp, Saccharomyces pastorianus
atgggaaagaaaaatagaaagggaaaagagaatagtacaaatagaaattttttccgaaaggtagaaaatactaaagattccagtcctaatctgtgcactgcatcccaaatctgcacaaccggtgtagaaaaagaggctagcccaacgattgatgtatcgcttgtttcaaagaaagatggaagcacgaaaacagaaagcagtgtttgtttcgattatccaactataggcaatttagtttcttctgtggaaaaactgtatattttaaaagaattagaggccgcgttcccagacataggaaaaaccataatcaaagctattttgattgcctcccaaggggttttggaaccggcgtttaactctttactttacttttcaaatccaacggaaaacacagctttcgcactaccaatgaagcctataagtgcgcaagaggttagtaaaattgaaattccagatatattacagtatgaaatactggacgatttcgaaaatgaagcctcatcagaagaaatggaaggtcaaatgtacacgtctgtaacattcacaaacactgagccggaacagagctctgtagtaaatcccacccatactgaaagaaaggccaaaccaaaccgaggagtggctgaatcgacaagaaattcgaccatggcagacgagcacagtgcaatttcatcgaaggaaaaaagtgtgcgtcttgaagaaaagaagggcataaatggtttaacaggagccgctgtgaaagccatttccatcgctaaaaaaaaaagcgaaccatcgaacaacttgtttgacattttagattgtgacgagtctggcgaagacgaagagcaggacattaaagtccacatatcaaatcaagaaaacaaagacgcgggaactccagagaggccggtctcgaaaaagacgggcggcaaaactcaatccgatgatattacaagcaagccgccggttgagactagcaacgacggagggtacaaatctcccttcggcactgatagctgtgattttttccctatcgatgcaaaaaatccaaggcaggtgaattccagcgcagggaacaagatgtag

SEQ ID NO: 5528 - DNA, 1254 bp, Saccharomyces pastorianus
atgcttccaattaaagtactaccaaattcattcagtttcgtatcaagattgcaaattcgatggattagaactaatttgttagtgatgaattctaaggtcggagatgactcttcgagaggtaaggtagccgcagagaagaaggccaataaggacagtagtccaatggatacgaaaatcaaaacaatgaagacgctcacgaactcgaagaatccaacacgttatttgagacgaagttttgtaccaaaccacagaaatgaggagagagaacatgataatttaaaggatgtattgagcaaaaagtatttgaagatggaaagttgtactactattactacaggagaaggatacaaccttaaagaatgcgtcaggttcctaaaaggtcaaggatataaaccgacaaacttgataaccggtgaaatcgttacatttaggtaccaggataatggccataagggagatataatgattctgggccaaaatggatctattgtgagttggggtttcggtgaatctaccgttagagacaaaatagtgcctttagttgaaggagcaagtataaatccgttggctaaagaagatttcgagacagaagatatggactacgtggaattagtaaagaaacaagatgttgaaaggtttctcagcggaaacaatggggcgaagccaaaatttgtggacgaaagctttctttctggggatttgatactaatcaattcgttagatgccgatcaaggaatgttagataaggcagcgttttccagtgggctgtctagaagcactaatttggctgtcctggaagaagctatggaaaaacacatatcaaaaacgagaacaataacggaaaatatttctaaagggacgaaattgaatttaaaatcaaatgatgcattaaaatcaataggccggctctttttaatcagagggaaattgaatctctactccgaactgattgaaactcctgatctttattggagtgaacctcagctagaagtaatttttaaaaatgtgtcgaggtacttagacattggcccacgaataaacattctgaacagtaaactggattactctacggatgaatgtcgagctcttatttctcttctaaacgaaaggaatggtgcttttttggaatggattattatatatctaattgccttcgagctatgctttgaaatatatcatttttaccaaagatactattctcctcagtgtatagagacgaagagtaatgatccgaatgttaaagaaaagaattag

SEQ ID NO: 5529 - DNA, 765 bp, Saccharomyces pastorianus
atgcagattctgtctcgaggaaaagcaaaagctcaagataagaaagtaaacaccatgactagcaagaacagactgcccaccccatcggaaaaagctgacggtaaggaccacgacaaggtttgcgtcctgaacaaggccacagatatcagaagagcggcagagactttggccgtagccttccatgactcaaaggcgttcgattatatttcgaagaaattcttcaatatccccatcacggaacacgtgtccaaggatagaatcaatgccaccattgcgtactacgcgtcgtgctatttggactcaccccatggtgagatctccgaagtcaacgatttcgacgccgttgcattgtggagtctgccacctcacgtccccaaggtactgagcaatgatcctaagttcaataaggacttcatcgaagacttgagtgaacgcagaaagcaagtcattccggaaggtatcaactattattacctcttctgtatcggtaagaatctgaacgagaagagcatcaaaggctcggtaagaacgattttcgaagaatacaagaaaagggctgacgaggataactgcgctattgtgcttgaagccattgccgaacatgctagatccgtctatgaatacttcgggttcaagaattacaagacttttaaatacggcgagggtgaagtcgattccaatggaaattacgaccctaacggtgaagggttcactagctacttgatgatataccacaaagacggtgataaagtcctgagaggataa

SEQ ID NO: 5530 - DNA, 333 bp, Saccharomyces pastorianus
atgcgtgacggtaatgctttttatagggcctcgtcgatttgtaactttgccagtttccaattcttcagacattctttgatccatgctttgaagctagctgcgaaaagtttcaagatctttccaatggtcaaattaatatggttatatgtatgcattaagctgttgtatgacgaattgttaatttctagcatgtctgatatacagattgatagacaatctttcaatttggataaatcttggttcaactgtttgatctgtttagatctttcttgttcagtcaattgtttgatttctaatttattgagattcattgttggcgtagacgtttcatag

SEQ ID NO: 5531 - DNA, 2694 bp, Saccharomyces pastorianus
atgaatttgctagcgcagaagcatcatccgggcataataaagttgtattacactttccatgatgaagaaaatctgtattttgtactagattttgctccagggggagagctactttctttgctacataggatgggcacgttcaatgaattatggacacgacatttcaccgtacagttggttgacgcattagaattcatccattcccacggtatcatccatagagatttaaaaccggaaaatgttcttttagataaggacggtaggctaatgatcactgatttcggtgctgcctctaccatagactctagtctgagcgataactcaacccgatgcaattccgacagtaacagtgtaaacgacaaccaaagttgtgcttcgtttgtcggaaccgctgagtacgtgtctccggaactgcttctttataaccaatgtggttattgctcggatatatgggctctaggctgcatgatatatcagttccttcaaggacagccacctttcagaggggacaatgagttgaaaaccttcgaaaaaattgtggctttagattatccttggggccccaacaaacgtctcaataacactacttcgccgatcaatccactcgcaataaacttggtacggaaaattttagtggtagaggttaatgaaagaatctctctctcggtgataaagaaacacccgtattttgctaaaatagactggaatgacaaagtcaagatatggaggggaatttggcaaaacccacagggacaactaatacaacagtctactggagtaccctctagttcaccacaacatgtgctacccatccggcaactgcatgtgattgacaccccagcaagaaatatacagatcactaaacaaaaacgtaagaaaccgacaaaaatttccagcaccactagcagtatagtagtatggagaaaaaggcttggtatatccacaggcaaggatgatttgggtaccgtcccatccactgctcccacaattattgtccctaatgacagcaaaatttcaaccgctacagtgacacatttgagctcgaattctgctccaccggcaagttcccaacccattcaagctcaaacgaaaagaacgcaacctactgctcctaatagaataccccccaaagttctaataaacagtgctaatataaaaaataagccaactccgcgacagaaggctattgtaccaacaccattaacaccaccaacacaaccaacaccaccaacacaaccaacacaaccaacacaaccaacacaaccaacacaaccaacacaaccaacacaaccaacacaaccaacacaaccaacacaaccagctcctctagcgccgccgtctgttccgtctgcacctctggcaccaccatcaacacaatcatcattatcggcaccatcggcaccatcatcgatacagtcatcattaccagcaccatcggtactatcaacccagacaaagcaacaggatatggtaccaactctagatgtgaaaaatacgatcgatccctctactctcaaacaagactatgtctttatatatggaattccatatgaagccgaagggcctgccatgtccttgaatagctataataaaattgataacgatttgataacgtcactagttacacagtataaagaagaattaaaaagctctaagatgtttttacagttgttgactttgaaaaaaaatggaatcttgagctacaggaacgcaggtcaagaagatcgcgataaccaaggcaatatggaccaccaaatggctaatattgaggattcggatttatccatgtatgattttgaattcaatgaattgtcgagaaaagggtttttaatcttagaaaaatacaagaataagctatggtttatctcactgccctcatattcaatattgtctaaaataccatttaatgctgagaaatccttgacaataaatgacaatgaaaattgggttgattgcttctttagagcaagacagctcctagaggaaaagcaaattcttgataaaattagtaatgtttcctttgacagcaaagtgtctaacgaaacgacatcgcctccgccaacatctaaaaaggatcacacaccaagcataagcaatggtgtaacaccgcctgcctacgatacaaaatacggaagccagaacaatgtacgacaaaataataacgtaaagcaagaagcgttttcccacatagccactactggcaaagacaagcccagtgtaaattcagcttccgccattactcacccaagggttttgtcaggcaatagcaccaataaaagcacaagaaaaacaatcgcaggatcgccaaagagtgctccttctgctaatgcatatagcaatactacaactccaatatcgggcaaccggtctactaatgtaacgaataatagacacgctcctttactatctaagagacagaacctgcctacatattccaattcatctcctacagtcaggtctcaaatcaaatcagcgggtcaacgacaaccaacgccttcgccgccactttcacccatggaatattcagccgtgaaagagaaatattcagcaccttccaacatggtgattagtagcagtaggtacgaggttctgcatactcttaataacagccaaacaaattttgatagggagatagctagtagaggtgcatcggctgcatttaaaagtttacaaaagaataagaagaaaaattag

SEQ ID NO: 5532 - DNA, 144 bp, Saccharomyces pastorianus
atgacatctagaaaaaggtctccgcacgatttcatttttaaagaggagctgggccatggctcttactccactgtattcaaggctgttgataagagaagtccgaacaagatctacgccatcaagtatgttcgaagaagcacataa

SEQ ID NO: 5533 - DNA, 501 bp, Saccharomyces pastorianus
atggtagttggaatttgtgagccgatggagggagagcagctttacttggcgctctggacctttatatacgaaagatccatgaagaaagtgcggcgggccccttttgcgaaggggcccgagatatcgcatcttagtaataataatactattgggtgtggtactagtataaaccaagggagcagtgatggccagcacagcaagggtgaaaagatatcaacggaaatgagtgctaagtacccgacaacgatgagttgccgagaggcgttcgatcagctgacgagttgttactcgatcggaggtcaatttagaaactactatagacatggggatttcacatcatgtgacaagcaggtatcaaaattcaagttttgcatcgtccatggcagcgaccctgtgaaagtgcaggaatggcacaaggaacaagtttccaacaacaagacactgcaaaacagcaccggcatcatctggcaggagaaagagaccgccgtgaagaagaagtga

SEQ ID NO: 5534 - DNA, 402 bp, Saccharomyces pastorianus
atgatacgaaatgggaaacaatcaaagaagagggacggagaacaatcaacggtaaaggaattagagcaatgtcagtcaataaatttgttaataaagttttgggagaaatattttttgtttaaagggccgaaatcacctattatgaatttcgaaatattctctcaaattggtaaaattcaattcgaaataaagggcttactttatataatagtcatttctttatgtgattctaatagacttatggtcaaggatattactgttttacaaaagacaggtggaaacataattaccaatgcggaagctaccatcaaacttaatgacaaatatcagaacaataaccaaatgtatatttatcaggtgatggatgatattataagcgaactaacaaacaaaacaaaataa

SEQ ID NO: 5535 - DNA, 717 bp, Saccharomyces pastorianus
atggagaatgcgaatacaaatgattatgagactgttctaagagacattgaagattcggttgctattaggagcgaagaagttttagataaacaggaatcaagactcaagcatactctgcatgaaattacttcaagcattttggcaataaatgaagaaaacgaatttattaacccctacagaactaacggagttgaggacataggagaagatgagtcatttgttaatcctaaaatcttaacttcgaaaatcaaggaactcaataaattgatggagttattaaaattgacttacctagaacaggagacgctagactatttcttaaggtttactttgtcttcggcgaacccactacacctgaactcagagaacgacccccaaattgtggtgttgagaaaaagggttgacgatttaaaacaagagatttcagacgttcatgaaagtaagatagaagagataaaaattgagattcaagagacgagccacaattttgctgtaaagcaagattcgacaaatgagctttatttagagacaactgctgacattgatagttgttggagttcactaaacgaacttaaatatttaacaaattacgacgaaaatctctcggaagacaaagatctcgtatcaaaatcaagtgattcagatgatgttgtagaggagacgtacgtgaaatggacaaaatctgctttctttacaaaaagcaagagcaaaaattaa

SEQ ID NO: 5536 - DNA, 351 bp, Saccharomyces pastorianus
atgcccagttttccgttcccgttcacaacaccgccttgcctcctcaggttcgttagctcgttgatcagcacgttattttgtatttcgttcgtcagctttaccagcgatattcgaagattgttcccgatcatgttaattcctccaccgttcttgaccagttcttcatttttgttcgagatcagcgtatgtatcagctgcaacaccaccagctcactcacctccgtatccatctgtacttcactttcttccggtgccttctgcactcatggctctcttcccacaccaaagcttctttatttattttctttttttttgtctattctacacatcgaaaaaaccacgttaaaatga

SEQ ID NO: 5537 - DNA, 363 bp, Saccharomyces pastorianus
atgatcgtgttgttggggctcttgaacagtttttggaagtttcctgtcttgctctctagcttattcagcacggtgtccctgtacagtttcaacagcttttctcttttggggtccatagcatgtcctccatgggttgtagtcgtgcctatcacggcacctccactcttgcctgtgtgcgattgcgattgcgattgcgttgtaccgctctttataccgttcttctggatctcgtcctccatcgcccttatctgttcagtttgtgctctcttgaattcatcgtacttgcccactaggagtttctcaatatcatgcatctctaggccgtgcaggcttaactgcccatcgttcagcgttgtcctgtag

SEQ ID NO: 5538 - DNA, 546 bp, Saccharomyces pastorianus
atgtgtattctagtagacgcaatgaatgtcaaggagccgttagtcaattttttgaaaagcgtcttgaataacgtaaacttagcatttcagtacagaatcagtcgatttcatttgcagctgttgcaggagaccaatgtcttgaggttcatacacagaagaatagagaggtggtttggactggagccaaagaccgaaccgtccccctatataaagggagaagaggaccaagttatctgtagagttgaccactacattgagtgttccaaatacgagttgattgacctcaaggcaaaggaaatacagatgcattacgagaagatggttttcgagatgacacaggaattaaaaggtgacaaaagggtattctctctcatagctcaaacatatcaaagtagcggcgcagagagggttgagacaggggtcgtttcgagaaagcatgagcgacgatatagtgccaaggaaatccagacaattccgctaaggttcaagcctatacgtttgaaaagaagaatacagccggtgaatgaagaaaaaattgatgattaa

SEQ ID NO: 5539 - DNA, 1377 bp, Saccharomyces pastorianus
atgggacaaatactatccaaccctgtaatcgataaagagaaccactccggcgcggactcgctgaccgcgttcgggctatgtgcaatgcaagggtggcggatgtcgatggaggactcgcacattctagagcccaatgtcatgacgaagtcggacaaggaccacattgcgctttacggtatattcgacggccacggtggcgcgaaggtggcagagtactgtggcaacaggataatggacatcctactggagcagaagtcgtttcaaaagggagacctgccaagggctctgattgacactttcctacacacagacgtgaagctgttgcaggacccgatcatgaaaaacgaccacagcggatgtacggccacgtccatgttggtatcgaaatcgcagaatctgctggtgtgcgccaattccggtgacagcagaactgtgctggccatagacggcaacgccaaggccctctcgtacgaccacaagcccacgttagcaagcgaaaagtcgcgtatcgtggcggcagacgggttcgtggaaatggatagagtgaacggcaatctggcgctgtcccgcgccatcggcgacttcgagttcaaatccaacaccaggttgggccccgaagaacagatagtcacgtgcgtgcccgacatcatcgagcacaccctggactacgacagagacgagttcgtgatcctggcctgcgacggtatctgggactgtttgacctcccaagactgtgtggacctggtccatctcggcttgcaagagggaatgactctcaacgaaatatcctcccgcatcatcgacgtatgctgctcaccaaccacggagggaacaggcatcggctgcgacaacatgagcatcgtggtcgttgcactgctgaaggacggcgaaaacccggcaacctgggccgatcgtataaaggccaagccccgccactccaccatccgctccttcgcggacaagagaagaagggttttcagctactacgatttctccaagagtaatgacgaacaagtctttgccgtcaccacgaaaaggccccaggacaagttcaccagggaccacgaggctgcagtagccgccgtgactgccgcggatgcggacgcggacgcggatgccatggaaatcgacgacacagacgcggacacagacgcagaaaacctggacccttcaagccagtctaagcacaccatcgacctggcgtcgctcgaggccctgctaggtgccacaggcggcgttaagacagacggcgccggcaacaaagtcacttacactcttcccccctccgcgctgtcgcaactgcttcaatcgatggggcaggatcctagcgccctgatggaagccgccaacaaccatggcgactcgcagccgcagtga

SEQ ID NO: 5540 - DNA, 2844 bp, Saccharomyces pastorianus
atggaaatgaatgtactagaatacaacagagtaaaacaaaagaacgaacaaaaggcaataaagcacgagcgcattcgccacccacaccagctcgcccaggcacccctcatcccttcttccacaatgaacatgcaagacgctaataaagaagagtcgtactcaatgtatcccaagacctcttctccgccaccacccacaccaacaaacatgcaaatccccatctaccaggcacccatgcagatgtacggctacacccaagcgccctatctatatccaacgcaaatgcccgcgtactcgctcaatatggtcacccaaaaccaggcgatgtatcatcagaatactagcccacactacctgcctcctcaaaacaacatgaacaccgggagcgccaatggcaacaacagcataaacaagaagaagtggcactccaacgggcctgccaacaacagcaatggccagaacgccaattcaaacggcaccggtgtgaattacaacaaatctcacaactaccaccacaactactcaaacagccatatccccatgatgaacggcgcaaacaacggcagcaacaacacacccgtcaagaagcaggccaattcttccagcaccaatggctcgaccccctctccttcatacaactcctcgccgcagtatgacttattcaagttcgatgtaactaaattgaaaaacctcaaagaaaactcgtcaaactccattcagctgccactgttcatcaacaccacggaatcggaattcgctgcggcaagtgcccagagatacgatctaaacttgaagtctttaaacttggactccaaaagtttggaagaacacactaaagaaaagagcaccacccatcaccaaagggaaagtcacacgatatcaaaaaacggcgaagaaactgaggcagaagtggaatcagaaatagataaagaaaccaaagatagagacgataaaaaaccaccagcgagcaaagataaccgcgaacataaaaggaaagtagaaccaaagaaagacgacaccgagaaggaacaaggtgaagaagctattttggaggcgccagtccctaccgtttcgcctcttgtggaaaatgaggagttagaagagatggctgacgaagataccgccaaggcgtcgtcgtcacctacactccctactgccaaatcttggtccgccattgcctcagacgcaatcaagagcagacaggccagtaacaagtcagcctcgggttccaccatttcctcagcttccgcttctacaacagcaacaaccacgccattatcgacagcagccacagcaaaaaccaattcttcgctatcatcaaagcaacctcaaagaaaggacaaaaaatacgtcccaccttccactaagggtatcgaaccactaggttccattgcattaagaatgtgcttcgatcctgatttcatcagttacgttttgcaaaacaaagacaccgaaaataagattccattacattccatcattccaagaggtataatcaatagggccaacatctgtttcatgagttctgtattacaagtcctactttattgccaaccgttcatcgacgtattaaacgtcttgagcacacggaacacaaattcaagaataggaacctcatcatgcagactattagatgcctgcttaaccatgtataaacaattcgatatggaaacgtatgaaaaatcattagaaagtgcaaatgaaaatgaaaagtctacagagacagattcaaagaaaccaatcaaatctaagaatttccaacacaatgctaccgcagaggctgtcaaaccggatgatttttacaagactttgtccacaatttctaaattcaaagacttacaatggggccatcaggaggatgctgaggagtttttgactcatttattagatcagttacacgaagaattaatattcgccattgatggtttaaccgacaacgaaattcaaaacatgttgcaaagcatcaatgatgaacaattgaagattttcttcatcagaaacttatcgcgttatggcaaggcggaattcattaagaatgcaagtcccagattaaaggaattgatagagaaatatggcatgattagtgacgactctaccgaagagaacggttggcatgaagttagcggtactagcaaaagaggtaaaaagaccaagactgcggccaagagaactgtggagattgttccgtcaccaatttcgaaattgtttggtggccaatttagatccgtactagatataccaaacaacaaagaatctcaatcaattacactggatccattccaaacaatccaattggatatttcagactccagcgtgaatgatctggaaactgcattcaaaaaatttagcgaatacgaactattaccattcaaatcctcttcgggcaatgatgtcgaagccaagaagcaaacatttatcgacaaattaccccaggttcttttgatccagtttaaacggttttcattcataaacaacgtggataaagataacgcaatgacaaactataatgcatacaatggacgtatcgagaagataaggaagaaaatcaaatatggccatgaattaattattcctgaagaatcaatgtcttctataatgttgaagaaccacgcctcaggcatcgccgatagaaattataaactaactggtgtgatttatcaccacggcgtaagctccgatggcggccattacacggcagatgtttatcacagtgagcataataagtggtacagaattgacgatgtaaatattattgaactggaagacgatgatgttttgaagggtggtgaggaagcttctgattcaagaactgcctatattttaatgtatcaaaagaaaccttaa

SEQ ID NO: 5541 - DNA, 708 bp, Saccharomyces pastorianus
atgacagcgaacgagaaacaaataacacgactgctcaaacccctaaggcttttgttattgggagcgcccgggtccggcaaagggacacagacttcaatgctcttgaaacaaattcctcaattgtcttcactttcgtctggtgatattttacgtcaagaaatcaagtcagagtctacattgggccgcaaagctgctacttatattgctcaggggaagttactgccggacgacctcataacgcaattgataacgtttcgtctttcgaaaatgggatggttgaagccgcccgctacatggctacttgacggattccctcgaaccaccgcacaagcttccactttggatggcattttgaagcaacataataccgacttgaacctagtggtcgagctagacgtgcctgaatccgctatactcgaaagaattgagaacagatatgtccacgttcctagtggaagagtgtacaatttacaatacaatcctccgaaagtaccaggcttagatgatattaccggtgaaccattgaccaagagactcgatgacaccgtggaagtgttcaagaaaagactggaagaattcaaaaaagctaacgagcccttaaaagtgtattacaaaaagagcggacttctctgcactgtatcaggggaatcttcagacatcatattccccaagttgttgaacttaataaccagcaaatttggccaatag

SEQ ID NO: 5542 - DNA, 231 bp, Saccharomyces pastorianus
gtaaacgacggcagtgccagcttgcatgcctgcaggtcaaataatattcaatcatcgatcttccaaccaatcgaagagcatggcaaggtttttgggtctgggtctgggtctgcaactgggactgattccagtacagaaaaagtgagcgatcctaatcatgataggcatagtaataatggaaatgaatccaatctaggctcagagcaagaaacagatatagaggaagattaa

SEQ ID NO: 5543 - DNA, 2001 bp, Saccharomyces pastorianus
atgaaacagccagttgaaacgatttgtgacggtctcacaagggcgttccatgaggagagggatgattctgtctctttagtaactataattgatatgtataacaagcaggtgaactctgaaaactcccttgaagaaaaagaacactatttagaggtcctgttggaattgttgaaggaggattctgatgttgtgaaagagattggttgggatcttccaaaaagtttattgaaatttttttcaagtaagaacgttgatgcaaagaagcatttggcgctaagtcccattgtttctagtgtgatgaattgcttctatgagctagctacaaatgggaaccccaaagagtgcctactgattgcttgcgaactggtatcgagtcttagtatagacttggctgaagaagatgaatctaatgaagagaccgcacactcacttgattctattaaggatgaagctacaaatcatgataatgaaatggcggatatttgtctgaagactgaaatttatgcagccaaggattcagtggaatttatacctaacttgaaaatttacgctctattcgaacttatgagttcaacgttgaaacgcgttgacactttgtacccatcaaaatttctggctatggcaatttcagcaattgtcaaatacttgaaaagtaatattgaattcatggatgatgtatactttatcttacgcagagtttacagtttttgcgtaacctacgttgcccctcagccatcaaataatcttactaatggtattgatccaagtgatcttgaaaaaatctcaaaagatgaatcaattttgcagaaaaagctattagcaaatctaagtgtgcttgtaatcgaaaactgtctgaagaaaacaccagggaatattgataaagtatactataacaacctgatggataagaaaacggatacaagtgaacatagtaccccaatcggaaacatatgcaatcaatactacaagtatgttgtttcgttgggtgttgatgtgaagcaacttttcgaggaatgtctggaggaatccaaacgtatatatgatgttgttctctcggattcccaaacctctataactaagtccaaagaagaaatcaaccagctagtatacgaattatcctatgcgtaccaaaccaagaagttggctcttgagaagaatttagagcttgaccaatatggagttataatcctgtccgcgatatattactctagcaatggtgtgcatttgttgtcacaagttgatatccaaaattcaatatatttgtatctacgatgtacgaccgcttcattattctcagaaacatatgacaataaatttttggaaagcgcagtacgttattggttatgggtatccataactaggacttctataaaagatataaaagccagtttagagctacttccagaacacattaacacatccttcttacaaatgttgttaatgaaaggttgcaacgaaccaaatagcgagaccaaactaactgaacttacacttctgacgagaatattgtgtttgatgcctgaagacacatcattttcatttatatttgaaacattactgcattgcccatacataacggttaaaattgctgtccttgacattctaaaggatatgatgattaaatcgccagagacttgcgatagtagcacatccactcctgtacctgagggaaatgataatacgccaataccgccaagactacccccaaggccctacatttctatcaatgaagaccgtatggcttccatccatagcattgctgagatgagcttttccactgccaggcaaaggaaaagaacacaaggtgatttaattctggtgttaacttacatgaacttttttgttagtttaagaaataaatgggatttgggacttttgacacttgtaaataatgagatttcagaagcctttcaagaagagggtgagcctgagctgggattcataaacatcgccaatgattccttgagcacgtatatagaggaaattagcaaacgcctataa

SEQ ID NO: 5544 - DNA, 801 bp, Saccharomyces pastorianus
atgatgagcccggcggcaaggaatcttcttgctaggagattataccacccaaatttgaaaagggccccaccaacctctttgcttctgaagcaaaaaatacgtctagctcaaaataccaataacgcttcaaatgaaagccccatatcgttctcacatacaatgtccgaggtatttagtgttctgcaaccgaatgcacctgatccggatgaagacaaaacaatcggcttggaacgtgaactcctattaaccgaacgtctaaataatgatgaacttagcggaatcataaataaacatttccatccatcatcaacaaatagcaaccgattgatagatacggacgttctattacaaaatttccccaagctgaacgaaagtgatttagagctattaaactttgctatagatgagaaaccccaaaaggattggcacgatctacagtacgattttattcagttatggtataccaagtcattcggcttccttggacctcgatcccaattcatcgagaccaactcgccttctccattgaagtcccagttcttgcagcttccattgtttgagtacaactggctactcttacaaaacaagaaagatataaatttatcgcccactgatttaaagaaactgatcaagatttatcggttagatgacaaaaaatttacttggaaaagtatagatccattcagtaaagtcataatatcgctcgtcatctgtgtttcagtctttgtgtggtgtgatgagagtgcaaaacaaaaaaatgagaaaccatccgctgaaaacactatcgtagtgtctgtgtag

SEQ ID NO: 5545 - DNA, 534 bp, Saccharomyces pastorianus
atgattcgtatattatcaatgatccggacttttacaaatgatgataggttcgtcaacaacgttttggacgttaagccaggtttggccattggtagcaaacattggacttcatacatattacctcaatttttgaaattattaccatcaagagaaaaattcactattgttgcggtagccaaattttggaccaagttgctcaataacaagaaatataatcaagaagaactgacgaccgtaagacaacaaatttcctctatgggacaagatctggcgtaccagactatgtatggtttattccacacacaaaggtcagatttgaacagttacacggatttgctaagagctttggtagctaagttcccaattgaggcaaaagattggctggtcgttgtcctgcctcaaatatgtaataaccctgcaggtcatgaaaaattcattaataaattgctcattacaaggggaagtagagcggcggggaatgttattttgcaatggtggttggactgtagtacgcttccaaattatcaagcatag

SEQ ID NO: 5546 - DNA, 207 bp, Saccharomyces pastorianus
atgtctgatgttatgaattttgttttaagacacgtccccaactgtgagattggtacatctttgccatattttgtttacctactggaaaatctagtttcggaattcagaactcaactaacatcgcaagagtttgatttcatgtttgaaaagattcttctagcttattatgattcgtatattatcaatgatccggacttttacaaatga

SEQ ID NO: 5547 - DNA, 1959 bp, Saccharomyces pastorianus
atgagctccattcatgaggttgttgctcttattgaagaattgtattctcctcatcccaagcatgatgttaatcagattcaacagagtttacaatcaatccaaaaatctgagcaaggattccatctagctactgagctattgtccgatgagaagtattcagcgaatgtcaagtacttcggtgcgttaactttgacagtgcaactaaatacgctgggcgaaagtaactatgaaactctatggaatgtcttcaaatcgaatttaatgtacttggctaaattcagtacactgtacgtttccaatccgcacatgtacgggcagtctctaatcattattagaaagctaatgtcgaatctgtctttgatttttaccaaaatcaacgatccgcaacttaatagtacttgtgatgaaaatgttattaagcaatggaacaatcccataaatacatttattcagctcatgtcgcttcataatcataacattcaagacgatcaactattcctcgaatcaatcaattgtcctgtcacttacgaacaactatcccacttcgccagcctttctgaaaaacataacgaattagtattgacttttacagaaattatcgtggaagatttgaccaaattccaaacgaagagacattccatgtcccaaatccatgaaatagtccatgaacacctttacatttcgaccatggcattgatcaacctgaatttgactgtaccggtcatctttaattcaactgtgtttgactgtattaccgcctggattaactatatttcattgaccaggaacgtatcttcgagcggtagaatggatttatcggaaattttccgaaacctgattaatttaatgtatcagtctactgaaggatcggatggctacgataatgctgaaaagatcctgacgattttcggtaatattttcgctaatgatcctctgctaatgagttacgatttgagacaagaaattgagtgcatttttctaggtgtagtaagacctgattctgtaacaacagattcatcgaataaaaacttttggatgttgcaatacatgaattatttagttaccaatgaattgttttcggaattgaaagaattgaccatttgtatcgtcgatttcttacaaattaataccttagacgtttgtaataaactattcacaaatattcaaacgaataacaacggtcaagttcaaaatgaatttatccaagaatatatcaaagtacttttgcaattaaccaatttccccttgacgcctgttctacaggaattcttttctgtaagaatggtcgatttttggttggatttatctgatgcttataccaatttggctactgaaactttgaggccagattccattgaattatctaaacaaattttccaacagttaattaatatttacctgcccaaaatatcgttgaatgttaaacaaataataatcgaggaagatggtgaaaatacttccacgaacgaattcgatgatttcaggaacgctgtttctgatcttgcccaatctttatggcagattttgggaaatgatagtttaacgaatgtcctaatcaatggtatgggccagataccagctgcaagtgaggattcactcatcatcaaggcttctgacactctgttccaaattgaaacgatgtgttttgtgttgaatcctatattggttgatatgaccttatcggaaagcccatggattaagaacattgttagttcaaataaatttttcaatcaaaacatcatatcagttttccaaactgggtttcaaactaacgccaacacaaaagttggccaaattttgaagcttgatattgtaagaacaagcacaacgttaatcggtaccttagcagggtactttaaacaagagcctatccaattgaacccatacgttgaaacattatttcaagttttgcatacttgcactaattttactagtaaaaacgagcaagaaaaaatttga

SEQ ID NO: 5548 - DNA, 1263 bp, Saccharomyces pastorianus
atgggtaagaatattacagttgctcatatccagtatgactttgatgctgtcttggaagaggagcatgaaaatgatgatggcttttacatcaacgtagacagaaacttgaatgaaatcaaggaatacagaataaaagtgctagcaaataacgagggcgtagatgcaggcgaaaaaaatagttttgagaagatcaattctcatctctatatggcacaactgaacgggcagaaatttctgttcaataccatcaagaaagattattccaagatgttcgagggtgcggattatactgctgtagattcgatcaaagttccgacgaagcagttcatattaggtactacagaaggtaatattaaagtactggattcgaattttagcttggaaagagaaatcaaccaggcgcacgctggtgagataacaaaattaaaattttttccaagtggtgaggctctgatctctggttcgcaagatatgcaggtaaagatatggtccgtaaaagatggttccaatcctcgctcattaatcggacacaaggcgacaattacagatattgctataatagaccgtgggaggaatgtactttctgcctctctggatggtaccattcgtctatgggaatgcggcacagcatcgactgttcatactttcagcagaaaagaaaacccacatgacggtgtgaatagcatagccgtattcgtgggaacgaaggagcaactgcttgagagtccagatattaaaaaaagagatctagagtttggaacatacggtaagcatgttattgcaggccacgcttctggagttattactgtacatgatgtcttttcgagaaggcaaattactcaactcccaagcaagttcacatcttcatgtaattcgttggcgatcgacgtgaatgatccgaactatatttacgcaggctatgaaaatggaatgttagctcaatgggatttaagatcaccagaacacccagtcgatgagttctctattaatgaaggcgttcggataaatagtgtttgctttgctgatgaatttttgcttgtctcttctgggcttgacactagtattaaatttgatattactagggatccaaaaagccagcatcccgtaattgcatctaaagcgcctatatttttagtctccgatgataacgaagttaatcagttttgctacacgccgcacagtgaatcacaaaaggaggtgatcacagttggtaaacataatttctttgcattgtataatttgagtagtgatgtttttatataa

SEQ ID NO: 5549 - DNA, 1377 bp, Saccharomyces pastorianus
atgttatgttggtctaagtcggtggattcaaataactacaccaacgcttacgtctccaacatgaaggaggatttaaaaatgaagggtaatgattacgtttatacttcaactattgctaatgtcggtgccattgtttttcagttaccatttatgtacttgttgccaagattccccgctcatataattttaccggtaatggacttgggttggacatggtttacatttgcttgttatagggcaaaaacgttggctgaattgagagcatacagatttatcctgagtgccttcggtgcagcctactacccagtatcacaatatgttttgggctgttggtatgcccccgacgaaatcaactcaagagtttgcttattcttttgtgggcagcaattggggtccgtgacctcgggtctcttacaaagccggatattcaaaagtttgaacggcgtgcatggtctggctggttggagatggatgtttttgatcgacgccattgcaatttcgcttccaacagctattattggctttttcgttattcccggcataccatccaaatgttactctttattcttgactgatgaagaaatcagaattgcaagagccagaaataagagaaaccaaatcaaagacggcgtcgacaaaagtaagctagttccactttggagcagaaagctttggaagaaagttttctgcaccccagcattttgggtgcttgttatcttcgatatgtgctcatggaataatatgaccgcctatagtggttcatatacattgtggttgaaatctaacactaagtactctatttctcaggtgaacaacctgagtgttattccggcttgtctagggtttgcgtacgtgatcttttgtgctatgggtgctgatatgtttagatgcaaatggatatttatggtatttgccgctattatgaataccgtttcttgtggtctgctaatcaaatgggatatttcctccaaggctaaatggtatgcatttttcaccacgtatttcagtgttgctgcgtcaccatgtctatggtcgtttataaacgacttcttgagattcgatcctcaagtgaaagccgttacgtggatcgccatttattcattctctcagtctacttacgcctggatccccacgttggcatggcctactgtggagtcgcctcgtttcaagaccggttacaccgtaagtttaattttcggtgccatttacggtttatggacatttgttgttttgtttttctacaagaggaacgaaaagaagcacgctctaggaaatggtatcatcttatatgatagtagtaagggcgaagagctcccagaatttgtaaaaaaagatatgaaggaaaaagacggctactactatctaagacgatcctga

SEQ ID NO: 5550 - DNA, 789 bp, Saccharomyces pastorianus
atggactttttaaacgatactgatctggatttggccttgccagtaaccgctgaaatatccaaggagctgtttgcaacagagattgagaagtaccgtgaatctcaaaatgacggggccgatatggctgcgtttgatatcgataagtttttagtagaaaagaatttccactacctccctcttgacgcacttattagagatctatctggactttcacaaaaaatggtacaaacactattagaacagataacaaccaattatgatgattatttgtctttctccaatacatatactgatgaagaaaataaaacgctgttgaacttggaaaggacgcagagcgaccttcaaaaattcatgactcaattgggtcatttggtacaggaagacatcaccaatagtcaagagatcataaaggatgtcttggaatacttaaagaaattggatgagatatacggttcattacgcaaccattcacacttgacagcagcactttcgctgggaaagaagctaagtaagtctcttcatgaaatgtgcggcatagaaccgctagaggaagaaatatgttctggcttgattgaacagttgtacagtttagtcacgacgtcacgtcgaatattgcattcgtttgttgattcgaactcgccatatgctcatcacctgcgtaatgattaccaagatcttctgcaagaatttcaaatatcattgaagattttaactgaaaagtgtttggagaacccatcaagctgccagaaactgtctttaacactagtttccatattaaagatcacataa

SEQ ID NO: 5551 - DNA, 222 bp, Saccharomyces pastorianus
atgaatcaactgcagtccttttcatccatttacaaaacttttttcaaacgaaacgcagtttttgttggtactatctttgctggtgcctttgttttccaaacagtatttgattccgcgatcacttcatggtacgacaatcacaataaggggaagttatggaaggacgtaaaggctcgaatagccgcaggcaatggtgacgatgatgatgaagatgatgactga

SEQ ID NO: 5552 - DNA, 1176 bp, Saccharomyces pastorianus
atgggagcaaaaatctatcctccccctattattgagaatcctcttagcaatattttgagagcgaagattctatctgaaatttcacctcctctatctcaatacaacactttttacagctacaatcaggaattaaaaatgagttctttactgaaaaaaattcatagggtttctcgtaatgagaacaagaaccccattgtcgatttcaaaaaagcaggggacttatactgtatacgtggagagttaggtgaaggaggctatgccactgtctacctagcagaatctagtcaaggacacttacgagcattaaaagtagaaaaaccagcgagtgtatgggaatattacataatgagccaagtggaatttaggctgagaaaaagttttgttttaaagtcgataatcaatgccagtgctttacacctgttccttgatgaaagttaccttgttttaaactatgccagccaaggtacagttttagatttgatcaatttgcaacgagaaaaggcaatggatggaaatggaataatggatgaatatttgtgtatgtttatcactgttgaactaatgaaagtgatcgagaagatacacgaagtagggataatacatggtgacctaaaaccagataattgcatggtcaggttagaaaagcgtggcgaacccttaggggctcattacatgcgtaatgggaaagatggatgggaaaacaaaggaatttatttaattgattttggtagatcattcgacatgtccttattaccgcctggaactaaattcaagacaaattggcaagctgatcagcaagactgttgggaaatgcgaacaggtaaaccgtggagttacgaagctgattattacggattagctggtgtcatacattcgatgcttttcggaaagttcatagaaacgattcaacttcaaaatggaacatgcaaactaaaaaatccactcaaaaggtactggaaaaaggaaatatggggcgttgtttttgatttattgttaaacagtggtagagtttccaaccaaactttaccaatgactgaaaagattgttgagataagaaatctgatagaaggccatctggaacagtacgcaaaagatcacttaagaaatgttatactccatgtcgaagatgaactatcgcatttacaatataaggggaaaccctcaagaaggctctaa

SEQ ID NO: 5553 - DNA, 1728 bp, Saccharomyces pastorianus
atgaattttgatttgggttcaactgtacgaggaaatgactcagataaagctgcatcttcacaatcaaaaggcgttacctcatctcagaaagagcagtatagtcagttgaatcaaaggaagatagcttacgaagaacgactactaaatgaattggaagatatggacgatcctctggatttgtttctggactatatgatatggatcaatacaaactttattgaagttgattcaacatcaggtcaagaagttcttcgaaatacaatggaaagatgtttggtttatatacaggatttggaaacctacaagaacgatcccaggtttttaaaagtttggatctggtacgtcaatttgttcctgagcagtaactttcgcgaatctgaaaatacatttacgtatatgtttaagaaaggaatcggaattaagctctcgctgttttatgaagagttttctaagctattacttaatgctgaattttttctagaagctaaaataatgttagaactgggcactgaaaacaattgccggccttatagtagattattaaggtcactaagccactatgaagacagactccgagaaatgaatatttttgaaaacgaacacagcatatcagattcaagaaaaagactgatagaaagaatagactatggaccggtgccatttttcattcgcaaattttcaacttcatcattgatggctgatgataaggagaaccaggtccaaccccagttgctgtctaatatagatgtccgtaagtgtgctcccagtatacaccaagactctgttaccgctcctggttttaaagctgaaatcggaaagcatgaatatcatgaaatagtcgacagtaattacttggccggccaacatttagaaaatgagaataagagaatacctatatatccggatgcaaagcaatctagtgatccaatctacaaactgattaatactcctggaaggaaacccgagaaaatagtttataactttaacctcatataccccaagaacaacgaagaatttaacattgaagaaatactggccaaatcaagaggttcttataagatgaagcccaaattcactactcaaggtgcgaggaatgctgaaaattgtttcgataatgctgccggtgataaaactaacaagaagcggaaactggaagtgctgaaagagaagcaacagcaattaccaccatcccaaccacctactgtaccgaaagccacacagattgaaattttcagggatgaccctggttctaatcaaggtacgcaaaataataataaacaagtactagtgcaaaccacaacttccattttacctctaaagtccgtgtctgatggaaatttcgcacatgacacaccaagtaagactttcttaggcgcccatggttcacgttcgccgaccgtaaccgccttttcaaaagacgccatgaacgaggtattttccatgttcaatcaacactattctaccccaggtgcattattagatggtgatgataccacaacaagtaaattcaatgttttcgaaaactttacccaagaatttacagccaagaatattgaggatttgactgaaataaaggttcccgaagaagagccgacgtcacagaaactatcgccaaatattggaactcctgacaattctggaagagtacaagtcagcacgacacacgcagaaagaggggactatatgacgcccataaaggaaacgactgaaataatgcgctacctctga

SEQ ID NO: 5554 - DNA, 108 bp, Saccharomyces pastorianus
atgtacatatacatccttttcgctccattatgtcaaggtatgcacggtgatggagaaaaatatgtacctttggaatggctatccacttgggatatggcggttcaatag

SEQ ID NO: 5555 - DNA, 2007 bp, Saccharomyces pastorianus
atgagtaaagccaaggtaacagggttttcgtcaattgatgctgacgatgaaagtttacgcgaacgtcacgtaaagccattatatgcagatgacagcaatgcccaagatgaacagctggatgcccttaacgaattagaaaaagagcataagggaaaaaaatacagagattttaccatgctggtaatcataagggatatcataggaccgctgctattaactatactttcattctatctaagattcaagcgcatagatcaaaacaatcacgttgtctgggatgaggctcatttcgggaagtttggttcatactacatcaaacatgaatactaccacgatgtacatccaccgctaggtaagatgcttattgcactgagtgaatggatagctggattcgatggacagtttgacttctcctctaataatccataccctgaagaggtgaactttaaggtaatgagacaattcaatgcctcattcggtgctttgtgtaccccggtggctttctttactgccaaatggatgggattcaactatttgactgtatatttaatcgctacaatggtaactttggaacactcctatattgttctgtcaaaatttatattgctggattctatgctactttttttcacaatgacaaccttcgcctgtatggtgaggctgtacacgttaagaaaacagcaaatgacgagaaagtggtctctatggatgctattgacagggttatcaataggctgtgtttgttctgtgaaatgggtcggtttatttatcacagttgtagttggtctctacacatgtatagaattgtttttgctttactgtgatactaccttgcctagagtaaaatactataaacactggcttatcagaatcattaacctgatagttattccgtttcttatctatctctactgcttcaaaatccattttgtcctattgtacaagtctggtacaggcgactctacaaccaacacgttatttcagattaatttggagggaactcaaatcaaagttggtcctcgtgacgttgtatttggatcagaattaacaataagatcacatggtttaagtccgaatctgttacattcgcacgttcaattatatccagagggttccggtcaacatcaaattactgggtatggatttgccgactctaataacgtttggaagtttgaattttcaagatcctctggatcgcatctggacattaacgggactctaaacggcgaaatagttccaatagtggatggtacggaagtccgtattacccataaaaatacaggatccaatcttcattcccatgaagtgccttctcacgtctctaggggaaacttcgaagtttcaggctatggatcacaagacgttggggacgccaaggatgattggattatagaaattgtaaaacaaatggattccccaaatcctgactacgcagatgaagatccagacaccttgcaccctgtttctacctttttcaggttgaggcacaaggttttgggctgttacctggcttccactgggctaacatacccagcttggggtttcaaacaggctgaaatcgtttgcaaggattcatggagtcatagagataaatcaacttggtggaatgtagaggaccattggaacaataatttagaaaccccggaagattatgttcccccaaaatctaatttttggactgattttgttttgaccaacttcgccatggcttcgtctaataatgcattagttcctgatgaagacaaatatgacagtttatcgtcaagtgcatgggaatggccaacattgcacaaaggactgcgaatgtgctcgtgggcaggttatatcgataggtattacttaatggggtccccattcaatacatggatatctactacatgcttactcatatttccgttcatcatcatttctgtgctgtatcgatggagaagacaaacgctttatctttcagacgatcaaatctggaaagtgaccattcaggtatttttccttttatctcctggatga

SEQ ID NO: 5556 - DNA, 2682 bp, Saccharomyces pastorianus
atgctgaaagaaagagatggtcctgaagacttgaagaaaacttctttcaaggggttcaaagatttgaatttcgaaatcaaaaagggtgaattcatcatgattacaggtcctatcggtactggtaaatcttcgctattgaacgcaatggcaggatcgatgagaaagactgatggtagaattgaagtaagcggtgacttgttgatgtgtggttatccatggatccaaaatgcttcagtgaaagataatattatatttggttctccattcaataaagaaaagtatgatgaagtcattcgtgtttgttctttgaaagcagatttggatattttacctgctggtgatatgaccgaaattggtgaacgtggcattactttatccggtggtcaaaaggcacgtataaacttggccagatcggtttacaaaaggaaagacatatatttgtttgatgatgttctaagtgctgtagattcccgtgttggtaaacacattatggatgaatgtctaactggagtactcgcaaacaaaacaagaattctagccacgcatcagttgtctttgattgacaaagcctctagggttattgttttaggtaatgatggtgatgttgatattggtacagttgacgagctaaaggcccgtaatccaaccttgataaaccttttacagttttcttcccaaaattctaaagaatcagaggatgaagaagaggaaaaggtcatcgttaatgaattggagcatctaaaatatgaagctgaagtgaaggaactaactgagttgaaaaaaagaactacccaattatcacaaatttcaaacagtggtgaagccgttgtagatggtcacactagcacaaaagaagaaagagcagtcaacagtattagtctgacagtttaccgggaatacattaaagctgccgtaggtaaatgggggttcgtcgcgcttccagtatatttcttttctgttgttggtaccacattttgtacacttttttcttctgtctggttatcttattggactgagaacaaattcaagaataaatcgcctagtttttacatgggtctttactccttctttgtttttgccgctttcatattcatgaatggtcaatatacaattctttgtgctatgggtatcatggcatccaagtggttgaatttaagagccgtaaagagaattttacatacaccaatgtcatacatagacacgacacctttggggcgtatcttgaacagattcacgaaggataccgatagtttggataatgagctaaccgaaagtttgcgtttgatgacatctcaatttgcgaatatcgtcggtgtttgtgtcatgtgtattgtttatttgccatggttcgctattgcaattccattccttttgattatttttgttttgatcgctgatcattatcaaagttctggtagagaaatcaagagactagaagctgtccaacgttcgttcgtttacaataacttaaatgaagtattgggtgggatggaaacaatcaaagcttacaggagccaagagagatttttggcaaagtcagatttcttgattaacaaaatgaatgaggccggttatcttgttgttgtcctacaaaggtgggtcggtatattccttgatatggttgctatcgtatttgcgctaatcatcacattgctatgcgttaccagagcttttcctatatctgcagcatccgttggtgttttgttgacttatgttttacagttgcctggtttattaaataccattttgagagcattgacgcagacagaaaatgatatgaacagtgccgaaagattggtttcgtatgcaactgaattgcctttagaagctgactacaaaaaaccagaaatgactcctcccgaatcatggccttcaaaaggtgagataatattcaaaaatgttgattttgcttatagaccgggtttaccgatagttttgaaaggcctgaatttggacattaaaagtggagagaagattggtatctgtggtcgtacgggtgccggtaaatctactatcatgagtgctttatacaggttaaacgaattggctagtggtgaaatattaattgatgacgttaatataagtcagcttgggctttttgatttacgaagaaaactggccattattccacaagatccggttttatttagaggtacaatccgtaagaatttggatccgtttgatgaacgtacagaaaatgagctatgggatgcactagtcagaggtggcgcgattgccaggaaagatttaccagaggtcaagttacaaaaacctgacgaaaacggtacgcatggtaaaatgcacaaattccatttagatcaagcagtggaagaagaaggctccaatttctcattaggtgagaggcaattactagcactaacgagagccttagttcgtcaatccaaaatattaatcttggatgaagctacatcttcagtggattatgaaacagatggtaaaattcaagcgcgtattgtcgaagaatttggagactgcacaattttatgtattgctcataggctgaagactattgtgaattacgatcgtattctagtgttagaaaagggtgaagttgcagaatttgataccccatggacattattttctcaaaaggacagtattttcaaaaacatgtgtttgagatcgggtattgtagaagaagacttcgagaacagattttag

SEQ ID NO: 5557 - DNA, 1767 bp, Saccharomyces pastorianus
atggtcgctaaaatgaacgacatagtttcggagtccggaaagaataaaaaagaccagaacgtagttctgttccacaagggctccgcatcctcagacgtgagctcagatgtggggaaagactcttcgtctttttgggacgacaaatctttgctgcccacaggcgagtatatcgtggataaaaataaaccgcaaacgtatttgaacagtgatgatatcgaaaaagtgaccgaatcagacatctttcctcagaaacgtttcttttccttcttacattcaaaaaaaatgcctgaagtaccgcaaaatgatgacgaaagaaaggtgtaccctatgttccatacaaatatcatatccaacatgttcttttggtgggtgctgccgatcattcgagttggttacaaaaggacaatccaaccgaacgatctcttcaagatggaccccaggatgtctatagagaccctctatgatgattttgagaaaaacatgatgtactattttgaaaaaacaaggaagaaatatcgtaaacagcatccagaggctaccgaggacgacgttattgaaaatgcaaaactgcccaatcataccgtttttaaagctttgctatttacgtttaagaggcagtactccatttcagtgctgtttgccgttttgtctaattgtacttctgggttcaacccaatgattacgaagaggctgattgagtttgttgaaaaaaaagcaatgtttcataatacacacgtaaatagtggtgtcggttatgctattggtgcatgtataatgatgttcgttaatgggctaacctttaatcatttctttcatagttctcagttgacaggtgtgcaagcaaaatctatcttgactaaagccgctatgaaaaaaatgttcaatgcttctaattacgcgagacatcgtttccccaatggtaaagtcacctcttttataacaacggatttggctagagtggaatttgccctgtcttttcaaccgtttttagccgggttccctgcgatcttggcaatttgtattgtcttattgattgttaacttaggccctattgcactggttgggattggtatcttctttgctgggtttgtaatatctctttttgcctttaaattaattctgggtttcagaatcgctgcaaatatttttactgacgcaagagttaccattatgagagaagtgctaaacaatttaaaaatgatcaaatattatacttgggaagacgcttacgagaaaaatattcaagatattagaggtaaggaaatttctaaagtaaggaaaatgcaattatcaagaaatttcttaattgccatggccttatctttacccagtattgcttcactggtcacatttctagcaatgtacaaagttaataatggaggtagacagcccggtaacatttttgcctctttatcgttatttcaggttttaagtttgcaaatgtttttcttacctattgccattggtacgggtattgatatgatcattgggctgggccgtttgcagagtttgttggaagctccggaagatgatccaaaccatatgattgaaatggaaccttccgctgactttgatccaaaactggctttaaagatgactcactgttcatttgaatgggaggattatgaattaaatgatgccattgaagaagctaaagatgaagctaaagatgaaggtaaaaaaaacaaaaaaaaaaaaagcgtaaagatacatggggtaaaccaaccacaaacgacaataaagcaaaaagattggacaatatgctga

SEQ ID NO: 5558 - DNA, 726 bp, Saccharomyces pastorianus
atgatgaacgttgcatatttgaaagtattgacctatgaggaaattgttaatgcgggtcctcttgttggttcggtgctatttaccaaactttttggaccacaaattggtggtaaattcatttccttttccattgcgatctcggcagcttccaatattttagtcgtcatctatagtgtatcgagggtaaaccaggaaattttcaaagaaggttacctaccattcagtattcatatgtccaaaaactggccattcgatgcacctttgccatccatttctctatgtggctttataaccatcgcatggatactaattttgcctaaagagggcgaatccttcaactatctcgtatcaatggatggttatggtaaccagttctttttgctactagtcggactcgggctatttgtttggaggtccaaacataaacacgaaacgccccagattcgtgcgcccacttttggtgtcttggcgattatcgtattatcattatacatgctggtggccccatttttggcagacaccagcttgaacagagttggtttcttaccaccttaccaaatcatgtcattgctagtgatatttgcatgctttcttttttggttcattaagttttttgtactacccaaactttaccattacaaacttctgcccaaaattacttatctgcacgacgggctcgtggtaacagaatgggttaaaaagccatatttacatacacacttatag

SEQ ID NO: 5559 - DNA, 696 bp, Saccharomyces pastorianus
atggaaccgttgctctttactagtgggaaagcgagtctctcacaagatgctttcatagatgtagaagttggcgatatttccactaaatatggtgctacaaattcaggatcattcagttcgatggacacaatggaagcgcaagcgataaaggcagaaacgactaggtttcttgaggtaccgcaaggtagacatctaggtgtgttttccacggttatcttgtttgtttcaaggataatgggatcgggtatatttgcggttcccagcgtgatcttgttgaacacaggtggtaataagctgatatattttgcgatatggattttcagcgctatgattgcgtttgccggattataccttttcctagagtttggttcatggataccgaaatctggaggacgtaaaaatttcctcgagcatagtttcaagaagcccagacttttaatcagtgtagtgttttcatgctatagtattttgaccggttacgcattaacgggctccattgtgtttggcaagtacgttttaagcgcgtttggagttacggatgactcgtggtccaaatacgttagcatatcctttattgtcctagcggttctcattcacggtatctctgtgaggcatggggttttcatacagaatgctcttgggggtttgaagctgctcatgatagttttaatgtgcttgccggactatacaccctga

SEQ ID NO: 5560 - DNA, 1737 bp, Saccharomyces pastorianus
atgaatgaactaccattgaaaaggacagttgtggatagaattgatcctccaaaaagtaaacacacagtgctttactacttgggcatgtatttcggaatcggttttattcaggcactgctaggtggcaccaaaacctttgcaactttttttgctggtatccaagcctcccggaagatatttgatgatatgctagatttagttttacatgccaaaataaggttttttgacgtaacaccgatcggccgaatcatgaatcgttttgctaaggacatcgaaggcgtcgatcaagaattaaccccttacctagaagtgacaatgttttgcttaatccaatgtacgtcaataattttcctcatcaccataatcaccccccgcttcttaatagtcgccgttgttgtgttcatcttatattacttcatcggaatgtggtatttaacagctagcagggaattaaaaagaatcgattcaataacaaaatctcccattttccaacatttctcagagactttggtaggtgtttgcacaatacgagcctttggggatgagaagagatttatcttggagaacttggataaaatagatcaaaacaatagagccttcttttacctatcagtggctgtcaaatggtttgcctttagagtcgatattatcggtgcgtttattgttttggcatctggatctttcattttgattaatattaataatattgactcgggtcttgctggtatttccttgacatacgccattttgtttaccgatggagctttatggttggttcgattatattcagcgtttgaaatgaacatgaattctgtggaaagattaaaagagtattctagtatcgagcaagagaactattttgactataataaagaccatatacaggagctccagcagtcttcatggcctgaacatggtcagatcgaagttaaaaacctatcattgcgctatgcattaaatctaccacccgtaatgaaaaacgttagttttacagtggaacctcaaagtaaggttgggattgtgggaagaacaggcgctggtaaatctaccataatcacggcattatttagattactggaaccagaaactgggcatatcaaaatagatgggtgtgatatcagtcaaatcgatctagttactttacgtcgtgccattactatcatccctcaggatcctgttttgttcacaggtactattaaaagtaatgttgatccatatgatgagtacgataacaagaagattttcaaagttttggcccaagtcaatttgatttccgcaggtgatattgaagcagcacagaacatgggggagaattctattaccgttcgtaataagtttatcaatctccaaaccgaaattactgagggaggtcaaaacatttctcaaggcgaaagacaattgcttttcattgtaagatcattgttgcgtgagcccaaaattatattactggatgaagctacttcctccgttgattacgaatctgacaatttgatccagggcattataaggaacgagtttcataagagcacaatattaacaattgcacatcgactgagatcagttattgattacgacaaggtacttgtcatggatgcaggtgaagtaaaagaatacgaccatccctctaacctgttgaaaaacgagcaaagcatattttctagtatgtgtcgggatagtggagacctggagcttttgaagcaactagccaaccagtcgcgtgagagatctacgcagtag

SEQ ID NO: 5561 - DNA, 3102 bp, Saccharomyces pastorianus
atggttcgggattctgcaattatccgaagtaatgacccattttgggacattgatgactttactcgatttggaagagctcagttattgaatttttacttgccatgggcaattataatatccattgccgtttatgaaatctaccggtgtatcacgtctcgcaataagaaacttcctgagcctggtctagttaatgaatatttgtatggctctcagcaacaagaagtaggagaagaagaagatgagagactcctgcaaagtcattatgccccggttctttacgttgataggaaggaaaatggagaaatattgaaacaaagacatttcgatataaaggatatagatgtaaagaaaatcgacgctaagaaccacggtggactaacatttaagaatcccaccactgcggaccatttcagaaagttgttcgagatcgtattggtatttttacaagtaatcagcctttccgttttaagagtaacaaacgttaatacagaattaactaatagagatatatccgttttacttttgctgtggttattactactttctctaactctcagaagactctataggccaacagaaaaccactggaacacctgcttcgctgcctacacagttatttggatatccacttggtttccattacgttccatgtatattggccatatcaacgatacacctacacgcattttctacgtttttgaatttacaattatttcgattttacagctaataatgcttacctctccattcaaagacaatcagctcataatgtacaccagagataattctatacttccttccaaagaacacatatcctctattttgagcctcatcacctggagttggattactgactttatatggcacgctcagaaatataccatcaaactaaaggatatctggggcttgtcaatggaagaatattccgttttcattttgaaaagattcgcgaaagggaatgatatgtcaaccaaaaatggcttaactgtatcattattcaagttctttagatgtaatttaatcgttgaattgctatggattgcagttaatagtatcgttaatcttttcccaaccattctaatgaaaaaatttctggaaattgtagatgacccaggcgaatctgtatcatctatgaatttggcgtggctttatatctttgctatgttcatctgtagattaacaatagcaatttgtaattcacaagcgcaattcattgccgataagatttgcttgaaaataaggaccattcttataggagaaatatattcgaaagctctgcgtagaaaactatttacagctcccaaaaacaatgatgatacaactagcgtctctgcgaacctcggtactataataaatttgatttccattgactctttcaaagtgtctgaaatttcaacctacttctttatgacagtgcaagccataattatggtcctaattgtggtaggattgcttttcaagtttttgggcatttctgcctttgcaggtatcttaattatcttgatgatgtttccgttaaacttcaggttagctgagttaataggtaagtttcaaaaatcggcactacaatgtaccgataaaagaattgccaagttaaacgagtgcttacagaacatacgaatcgtgaaatattttgcatgggaaaataacatctcaaaggacattaagctaataagacaaaacgagttaagatttttactccaaaagtctatggtgtgggcactaagttcattcctttggtttgtgacaccaaccttagtcacaggtgttacttttgccatctatatatttgttcaacaccaggaattaaatgcccctcttgcgtttactactctttcacttttcactttattaaagacacccttggatcaattgtcaaacatgctaagttttatgaatcaatcaaaagtgtctctagacagaatagtcaagttcataaatgaggacgatacggaaaagtataaccagttaactgtatctccagacgaaaacaagattgaatttaaaaacgctactttaacgtggaatgaaaatgacacagaaagtacaatatttagattgtgcgatttaaatatcacatttcaaattggcaaactgaatttgattttgggttcaacaggttccggtaaaagtgcactattgatgggcttattgggtgaattacacttaatcagtgggtctatcaccgtgccaggtttagagccaaggcacgatttgatacctgatcataatggactaaccaattcctttgcatactgttctcaaaatgcatggttactaaatggcacagtaaaaaacaatataatcttcaacggtgcctatgatgatgttaggtacagaaaggtgattgatgcctgcggactgaaacgagacttggaaattttaccagctggtgactcaacggaaattggtgaaaaaggtataacgttatcaggagggcaaaagcaaagaatttctttagcaagagccgtttattcgaatgccaagcatttgttgttagatgattgtttgagtgctgtagattcacacaccgccgtatggatctacgaaaattgtattacaggaccaatgatggaaaagaggacatgtattttggtcacccacaacgtttcattaaccatcagaaaagcacattttgcagttattttggaaaatgggaaagtgaagaatcaaggcgctatcaagaaacttgaaaaagagggcatattcaaagaagaaattgctcagatgccttatgagggcaatagggccgaaaaaagcggtaatgaaacaagtgatcttcaggaaagcacttcacaaaaaactaaagcagatacggaggacacaaaatttggaggggatctgattcaaaaaggacaattagtaaaagatgaacaaaaatcaaacggcgccataagtctagatgtttataaatggtatctgaaatattttggaggttggaaagctttaaccgccttgctcactctttatgttattactcaagtactatttattagtcagtcctggtggatacgatactgggtgaacgattccaaaccccatatagaaacttccggtttttcgatgaatgaactaccattgaaaaggacagttgtggaatga

SEQ ID NO: 5562 - DNA, 132 bp, Saccharomyces pastorianus
atggatattgatttagcatccgatttcgaagatgaaccaaatgcacatgcaaacacaaacgctgatcaagatatttttttcgacatcgattatagcaaggatacgaaaaatgatcttggacgcaatacataa

SEQ ID NO: 5563 - DNA, 1413 bp, Saccharomyces pastorianus
atggcaaaccgaaatatgtgtgaaccgtggctgctgctagtatggctgttgctgatctgtaacgtggttcgggggaatcaagaaaccataagccaaaaggatcacgaggtctgttcagggatgtattccaaggaggattacaacgggaaagtggacccctttatatcttttactttgaatgaactgtcactcgatggtgaggacgataacgatgaaggaatcagcgtggctgtatttgattttcaggactatgagcacattggtgtgcagttacctaatgggggcattcagtacatttgcgatgactacgcattagatttgggtctgtgcgatgcttcatccaaggggcaattcatcatccaaaagacggccatcgacccgctaactgataaggaacacaaattaaccagtccaatattgacgttcactcaacaagaattgggcatgcacgacaagacgtactcgatcaataaaaccggttattattgtgtaactacgtcgtctttcgcctcttccaaatcgaagttaaaggccacggtaaatttcagaaacgcttatggtcagctgaatgcttcagaagcatacaagctgcccatttatgcctttttagctattgcttatgctgtatgcacgctaatatacgcttggttatgttggagacatagacatgaattgctacctctacaaaaatacattttagttttctttgttttcttaacagctgataccattttcgtttggacgtattatataattgagaatcaaaagggaaactctagcgtagcccttcatatctacatgattttcatatcgatattcagtgccggtaagatgactttcacatttctccttgctttgttgatatcctttggctacggtatagtgtatccaaaattagatcgtacattactgagaagatgccagatgtttgctgcgtttacgtttgccgtatgcattgcattcctactccaaaaatattcgcaaaatcccgagtctttgtctaatttgattttgattactgctattcccctggtggtatgtttgtttgcattttattatttgactctctcttcaatgagcaaaacgatggcttatttgaaggaacaaaatcaagtggtcaaattaaacatgtacagaaaattgatcactttgtgttatatttctttgtttatactattcttaggcttactcgtctcaactttcgcctatgttgggatggacaccgttgacatgattgaacaatattggaaaacagaattcttggtcacagatatttggcccacttttgtttatttcttggtctttgccgttttcgcattcttttggagacctaccagtacatcctatttgttagcatgttcgcatcaactaccaaccgatatggaaaatgtatccgaatttgatacttgctga

SEQ ID NO: 5564 - DNA, 312 bp, Saccharomyces pastorianus
atgagcgcaaatatcaatgaagtaaaatgttttgaactaatatcctgtctcaagcgggaaccacaattttctgcgagtgaaacgatcaaagagagcgtccttaaaattacgttggcatcctgttgttccagcctcttctctataagatccatgacctcctgcccattatcttcaggatcctctttaaccaaatcacaaacatctagaatatactgccagttatcagttcttaatttaggatctgtcgcccttaatacggcatttctcatttctgtcatggatgatgacatcttgactgaaggcttactatga

SEQ ID NO: 5565 - DNA, 642 bp, Saccharomyces pastorianus
atggagaacttgaatccagctgaagttttcggtaacatcatggtagaatacccatacgtggagtgcacagattcttccgttcttggactgacctacttccataagttttttgactataaaaaagaggaaatatctacatgtatcagaatcgctattgaatacatcaagaagtctcaactaccagagggaggttggtatggaagctggggtatttgcttcacctatgcaggtatgtttgcgttggaagcactacacactgtgggagaaacatacgaaaattcctcgacggtgagaaaaggttgtgatttcctggtgagcaagcagatgaaagacggtggttggggtgaatcgatgaagtctagtgagttgcatagttatgtggatagtgaagactctctagtcgtccaaacagcatgggcactgattgcactgctttttgctgaatacccgaaaagaaaggtcattgaccgaggtattgagcttttaaagcatagacaagaagaatccggagaatggaaatttgagagcgtagaaggtgtttttaatcattcctgtgcaatcgaatacccaagttatagatttttgtttcccataaaggcattaggtatgtataccaaagcatatgaaccagatagtttttga

SEQ ID NO: 5566 - DNA, 1440 bp, Saccharomyces pastorianus
atgacagaattttattctgaaaaaatcggtcttccaaagacagatccacgtcgctggagattaagaactgatgaatcaggccgagaaagctgggaatacttgacgtctgagcaagcagctaacgacccgccatccactttcacacaatggcttcttcaagatccagactttcctcaaccccacccagaaaaaaacaagcattcaccagacttttcggctttcgatgcctgccataacggtgcatctttcttcaaactcttgcaagagcccgattctggtattttcccatgtcaatataaagggcccatgttcatgacaattggttatgttgctgtgagctatattgctggcattcaaattcctgaacatgaaaggatagaattaatcagatacatcgtgaacacggcacatcccgtcgatggtggttgggggttgcactccgtggacaaatctactgtttttggtactgtactgaactatgttattttgcgtctgttaggcctatcgaaaaatcatcccgtttgtgtcaaggcaagagatactttattaagattaggcggtgctatcggtgcgccacactggggcaaagtttggctaagtgcattaaacttgtataaatgggaaggtgttaaccctgctcctcctgaaacttggctacttccgtactcattgcctattcatccaggaagatggtgggttcatactagaggcgtttacattccagtcagttacctgtcattggtaaagtttgtatgtcccatgactcctcttcttgaagaattgaggggtgaaatttacgtcaaaccatttgataagattaacttttctaaccacagaaacactgtgtgtggagtggatttatattatccacactctaaaattttgaatattgcaaattgttttgttgtattttacgaaaaatacttgagaaatcgattcatttattccttatccaagagaaaagtttacgacctgattaaaaaggaaattgaaaataccgattctttgtgtatagcacctgttaatcaagcattttgtgcccttgttaccttaattgaagatggtgtagattcaaaagccttcaaagatttccaatacagattcaaggatgcattgtttcatggcccacagggcatgaccattatgggaaccaacggtgtgcaaacttgggactgtgcatttgccattcaatatttttttactgctggtctggcagaaagaccggaattttataacacaattgtctccgcttataaattcttgtgtcgttctcagtttgacactgaatgcgttcctggtagttttagagacaaaagaaaaggtgcttggggtttttcaacaaagactcaaggttatacggtttctgactgtactgcagaatcgatcaaggctattatcatggtaagaactctccggtctttagtgacgtacatcatttga

SEQ ID NO: 5567 - DNA, 1200 bp, Saccharomyces pastorianus
atgtcatctttaccgaaaatggagcccaactctcacgcaccaactgaagttgacattcaaaaaaacaaagaagactcgatcgtaagggaaaatgaaaatatacctgctccattggggactgtagtccaattattgtttggttcgaacacagattatatgaaaaaaactatcactagagataaaaacaacgttaacgtggagacaataccaacattctcgccttcattagccgatggcgccacacggcactatgagtacatcaagaaactaaacaattccataggacctaaacaaacgaaatgtttgttgactgagaccattgaacatatggacatcaatgactatgttttagtaaaccagtcaacaagatcccctgatgttccatccggtaacaattttacagttgaaagtaaaatatatttatgttggggacaacacgatactacaaatatgaccgttataacaaaggtcagctggacaagcaaatcatttttgaagggtcccattgaaaagggttctgtagagggccaaaaggcgtctgtcgagttcatgatttctgaacctaaggatattattaatgcagcccaaaccgcaagaccagtgaagaggaaaacgaagaatcatggcaaacataggcccgtccacaataagattgagcagaaaattcctgaaagtcaaaatacagagaaggataaagataccttcacgtatattttggactttatccaagacaacattaatttggatatatttatgaatcctcaaaaactgaccttgattgccggtatagctattatgtgcttttggcttcttggtttcaagcctttcaaaagtcaagaaaatttccaaatcatcaagccggggaggatgcttattgacggtcaggaatataactatgtgccaagttttggaaccctatatagttcatatgaggacaaaatattgtctggcaaaagaaagacgagtacagattacgagaagaatgttaacccggtcactggaagagaaagggatatttgggactggatagataacagaggaaacagcgtattacctcaagagcatgcgacgctgggaaacgtcgatagacacacgttacagcagttggtagaaagtgttagggtaacagaattacaactagaacatatgaagactatgttggatgatatcaaaatggacaaagataatttttcaccttga

SEQ ID NO: 5568 - DNA, 2034 bp, Saccharomyces pastorianus
atgcccaaggacgcaaagaaaaaacaccattggggcaggtccttgctaagctcaattgggctgaaacgtaagcacaagaaggagcacacctcgtcaagtgacactaagcgtccggagacaaactatgccagaacttcgcatggtaacggaagtagagccgaagctgcacaatttatgagtggaaataagaacttggatatcccgaaaccacccattactgaaaggtttgcagaatcgccggccaagggctcccagaaggcggactcctccttagcacctagccaaggcgtattcaatattccaatcgtcatagatcctatggagacaaacaggctgaacaaaacgaacacaagcctaactctgggctcgtctaagggtcgctatgcgaatgaaaatctaaatctaaatccgaattcaaattctatgcaaagcttgtctccccaggcaattgaaagggaaagggaaaggccggagaaagaaaggcgaaaggaaaccaatcgtgctgagaaggcgactccggaaagccacaaagcacatactgcctttgaaacttttctttcgtttgctcgtaatgccgttaaccacgtccccaaaataaatgtagaagaagctgatgatagcgctggttccaagaatgaaccaaagcacctgaaaaagaacccgttgcaggtttcaaggaccacatctgaaaagagtactaatggcaaatacgcacaatcgctacaagaaagtgatgatccctttttgaagaatttagataatgtacttgcagcgtccgcatcctcaccgcggatcaaccaacagtctgatacgactacaaccgaaaccaagaacaaaccctctccatttggtaaattcgcatttaccaatctgaaaaatcacgtgcattcgagtttgaattccaattcgctttcaaggtcaaactccaaagacgacatttcttcagacagagccaataaggatttaaatgattttgctagcagagtcactttcgaacccattagacactctgatgataaacctattccaggagaaggaaatttgaaattggaacatttcaacgactctcaagcaacctttgaagagccattaacagaatactctgatttatccgcaggggaagatggtttcgataccgacgacataccgctgcaggacgacgtacgggatagcaatgaaaatgaggtggaaaagagacctagttcaaggaaggactcttccaaattgtcagcagtttcttcccctacagtagacgatgtaaggccaagaagaagagtcaaatcaatgataagcgcagcaaatgcttatcaaaatgggcgccatgattttatacagaaaagactctcttctctttcatctaatggatttacaaaaaacgactcggacaatgaagatcgtgaacccagagtgatgtccaagaagtttctcaccaggaggtcattttctccaggtaacattagtagtggaatgagagtattgccttccacagctttaaaatattcgttgaataaagtaaaaaatagcactgatatcgcaaacaccataataccaagaccaagtatttcgaatggtcatacctcttcaggtatgcgaagaagttctagcaaaagcttttcatcaacgccttatagtattgttgaaccatctggcgaagacggcaatcgacgcaatattgaaataaagggagtcgaatatgcaagtgaaaagaaaaattcagaattccatacaattttcaaagattctggtgtgaaccccgatgaaagattaattgcggatcatagttgtgccttgtcgagggacatcctttcgcagggcaaaatctatatatcggatcaccatattgggttttattcgaatatcctcggttgggtgagcactgtttttataccattcgagactattatacaaatagaaaagaagactacggcaggaatattccccaacggaatcgcaattgacactttacatacaaagtatagttttgccctgatgaatcccctaatgatttttatcaaaatcattaagttaaggtag

SEQ ID NO: 5569 - DNA, 642 bp, Saccharomyces pastorianus
atgagttttagaggaggtaacagaggtggccgtggcggtttccgtggcggctttcgtggtggacgtgctggtggtgctagaccatttcaacaaggtccaccagacagtgttctagaaatgggtgctttcgtacatccatgtgagggtgatattgtttgtcgttccatcaacaccaaggttccatatttcaatgccccaatatatttggaaaacaagactcaagtcggtaaaatcgatgaaatattgggtccattaaatgaagtttttttcactatcaagtgtggtgatggtgtccaggctaccagcttcaaagaaggtgacaaattctacattgctgctgataaactattacctattgaaagattcttaccaaagccaaaggtagcaggcccaccaaagccaaaaaacaagaaaaagagaggtggtgccccaggtggccgtggtggtgccccaatgggccgtggtggggctagaggtggtttcagaggtggtgatagaggtggtttcagaggtggtttcagaggtggagctcgtggtggtagttcattcagaggcggatctcgcggtggtagctcattcagaggcggttcccgtggtggttcccgtggcggtttcagaggtgatcgtggaggcagaagatga

SEQ ID NO: 5570 - DNA, 318 bp, Saccharomyces pastorianus
atgtgctcgaggagatcatgcttgggaaaaagagcattcgaagaagtagttcccttcgaaacatttattgcaccggagatgccttcccgaggaagttggcgtattgcatctaaacaaatagagctgctgttgttgctcgatgtaatgaggacttcgtccatcgagcatgtcgacgaagatgagggtgactttagcctctcgatcctattagtcgctatggatagtttgctctctattggcagagccatccttaacaaacaaactgcaaatgctgaatcagggaaagttgtggcttcgagaaacagcgacttcttgtga

SEQ ID NO: 5571 - DNA, 1560 bp, Saccharomyces pastorianus
atgaaccttcccgtaagtgaaaacatctctttgggcactaacatgaataagtttgacgagtttattgagtccaacgagaaagatttagagacggataccagtacacgaagcagcatagcttccatgtctcccgtggtgaaacctggaccgaaaatccatcctgctggccacaatggatataagccagaacatcatcgtacatccagtgctggaagtatgcattcacaaaggctaatgacgcctactagattaaatgaacaagatcatcccctacaaaccaagccgggtgccagaagggtcgtaacccgtcattcctctgtatctatgccaaatgccatcggtaagaggagatctctcattcaacctatggttgtaccgactacgccagaatctcaaagtaatatatcttttggaaatccattgacctattctgatggctctcatggaattccggtagaatccaccactttactttctagtgaacaagcaatgggaggtagtctccggcattctcgaaatggtagctcacaatctgttaatagtttggcaactcccagcatgcccacaattggtgccgatgtgagtgcgcttttacaagccctcgctacaaaagagttagaacttttagaatgtaaacaaaaggttgaaggtctgaagaagcaaacccagtatgaagaacaaacctattcccgtcgtgcgcgtgaactacaggaactgaaacagcaagtctctaaacatttggacccgtcccaaaacacaccagtgaaagaccgtaacttttcaccagcactccaaaatatacctatggaatctcggtttgaaaatggtggcaacggaagctttacaaattctgcaaggcctcgacaagacaaaatatctccgaatgcgaaacagtcaggatccgtgtccccacaaggcgttcaggacacgcacccaggaagtagctcagcagatctttctaaacagtctctctggagtaaaccattggctttattcaaccagtttgatcagatcattcagcatgaaattgagagaacccttaactgggacgaaaaaagtccaggtccgccagagccacagcaaccgccatcgactggcaaccacgattccacagtacgacatcacattagtgaaccttcagagactgatcaagaagcttcctcacaaggctctgtctccagatcgctatggagctttgtcagcgacgtcaaggcaggtttgttggggatagaggaagaaaatgatagtgatgttactaacgataacagaaatggccttgtaaataagagcggtagacagtatgaacaaaagcagtgtatacctaaagtatcagactggtcacaaccagaagaaagtggtgatgactctagtctaggtatgaaaaaattcaagacgatagataagttcaagacagctgacgatgaccgtgaacatcgagcacaagcaaggaaaagaaaaacgggcactaacaaactacaatttgttggggacaattacaccaatgacacgagggaaggtagtccctctacacaaaatccggtcgaaatggcaaatctttga

SEQ ID NO: 5572 - DNA, 3198 bp, Saccharomyces pastorianus
atgcattcacatactacgccgttcacgcccgaatactcgaatgagttactgcgaagggtccgagacctgtaccacgaagatattaagcattattatccgcagttgaagctggagaagctgttagacctgctggaacatactgagtacctgatcgagttatatctggaatcgatgcgccacgataggcccaatgatgcgctgacggcattcatcattgggtgctactacgtgttcctaatcatcccacaatcgttgcagtttcagacacgaaataagtcctacagcatttacagtgatctaaagaagatgtacgagaacgaaatgaacatgactaacgtagtgctcatggtgaagaaagaaatcggagtggttctggatgactcggtcaagcacgttgtcggtattgagcacaggatcaccaagaaaagggcgttttctgcaccaggcattgatctctcagaccaattggcgtcactatcactggacactgtaggttcgcggggacatctccataagacctcgtctacagaagaagatgcggaccaatcttcgccggtttggactgcaccaaacctggagcctaatgatcaattgaaactggctctattgcccgaagtagtacctacaccagccttctctggatcagcaagaaagacgagtactccaatgagacaatctgtgctactggaagacgtgccctacatttacaacgataacgaaaacacatccgcatcatcagatcaaccgtttggtgaaatcaccgcagataggtctgtgactcatcggaaggactcctaccattccgtttacatggtggatagcgagacttttaaaagtgataatgacgatctcttgaatgtcgaaaccgatgggttcatccagagtttagaaatcttacaaaagcaaagtataatcactgcacctgaattgtttactattttatcaaatcagagtgagagtgaaaagcttctacttattgatttaagaataccacaaaggtcttcactaaataacatcgtggcaccgaatttggtgaaaatcgatccgaatttgctatgggacaagaaggcgaatacacccatttaccaagatgacatattggagcatttactgaggggaaatgaaaatttcgtaaaccgtaataaatttcaatacatcgtttgttattcagatgtgaagacttttatggcgatgaattttgactattcatttattttcttctatttgctgctgacttctcaaaagacgcgtttgaccactgtacctactgccctgctaggcgggtatgagaaatggaagaaaactctacacacgtacgcccagcagtaccacattactatcgatgattacttgtataggccctattcccaaaaggtacgtcatcaaccacagcaacagcaacagcaacagcaacagcaacaaccaagctcccaagattcctcttctagtaaagaatcatctgcaaaaattcccgaacctccttcttggaaacctcccgatttacccatacggttaagaaaacgccctccaccaccactacctgtaacagtgcccacaactccagaaaacccgcctcctctgccccccaagataatggttcatccacacgataactcccaacttcgacaaccaccaataccagcaagacagcatgtgaaaaagcagcaactcaactccaatgaaatcattcaaaggaagagacagcagcaacaccagcattacgaccaacaattgctccagccacagccacaaagagtataccatataccaactattgaacaaagctctaatgtatatgtttcgctttcaattacaggcctgagaaacttgggtaacacttgttatatcaatagtatgattcagtgcttatttgccgcaaaagtatttcgtacactattcatttcgtctaactataagagctacctccaaccttcgagaggcaataggttgcattctccaaaactttctaattcactaaacatgcttttcgataagatgtacttgaacggtggttgttcagtcgtcccaacggggtttctcaaggtttttaaccaattacgtcctgatttgagaattcctgacgaccaacaggatacgcaagaattcttaatgatactcttggatagactacatgatgaattgtccaatcaaccacatgtggcaaacgattatccgaacctattattgtatgatgcagatgggctaaaggttttcaacaaagaatataaacactggtttgataaaaatgtaatcggaaacggtatatcgcctattgatgatatttttcaaggtcaaatggaaaacagtctacaatgtaaaaggtgcggttatacgacttttaattatagtacattctatgttttgtcactggctatcccaaggcgctctacgagattaagcaaactcggtagacccaatgaaaagagagttaagctagaagattgtatcaacatgttcacaagcgatgaagtgctgtccggtgaaaatgcctgggactgtccgcactgtggacctacatcgtctaactctctatctgcatccgcatctgcattagaaaatgattctaacattgttaagagtaaaaagaagaaaagtcggtttttcacgttgcatacaagatcaaagcgtcgtcatcttgatttttttggagacggtactaatgagagcactagtaataatcctgtaaactttgaacgcgaaagatcgaggtcacccttcaaaatgctgggtggtggtaggaaaagatccaattctaatacgccgctggctaatagcagtaatgacgctaataattttaacgattacaaaaatagaaaattgaccacagtgaaaacgataaattttgtgactttaccaaagattttggttatccatctctcgagattttactatgacttgaccaagaaaaacaacactgttataacataccctctgatactgaacataatattgaaaaacaatgatactatgaaatataggctatttggggtggtcaaccacacgggtacgttaatcagcggccattacacgtcattggtgaataaagacttagagcataatgtggatattgggcgttccaagtggtattattttgatgatgaagttgtcaaggcggacaagaatcatggctctgacaagaacttgaagatctcgagtagtgatgcttacgttctgttttatgaacgggttaacgcttag

SEQ ID NO: 5573 - DNA, 1698 bp, Saccharomyces pastorianus
atgacgtcggtagtaacagatacgctgtcagacaatgaatttgaggacgaactcacggaaagtatgcggtcttacaataaagagcatgcagagaagttggctttacatagaacgtctagtgtgaaaccagagccggagattacagcctcaccccactcgcggttttctcgttctttgaagatcgtgctgatagctcaatgtgctttcactgggtttttctccactatagcaggtgccatttactatcccgttctgagtgtcattgaaagaaaattcgaaatcgacgaacaatcggttaacgtcactgttgtagtgtactttgtgttccagggacttgcccccacgttcacgggcgggtttgcagattcattaggtaggaggcctgttgtgcttatcgccattcttgtttatttcggtgcatgcattggcctggcttgtgcccagacatatgctcaaattatcgtgctaagatgtctacaagccgcaggtatttcgcccgtgatagccattaatagcggtatcatgggcgacgttactacaagagccgagcgtggcgggtacgttgggtatgtggctgggttccaagtgctaggttctgcatttggtgcgcttatcggtgccggattatcgtcgaggtggggctggagagccattttctggtttctagcaattgggtcgggcgtttgtctcctggcatcctctctgatattaccagaaacgaagagaaacatttcgggaaatggctctataacgccaaagtcatacttcaataaggcgcccatcttggctttacgagtgataagaaaaacgcttcatttggataatccggattacgagacgttggaacagcctacacgactgaacttactggcgccatttaagattttaagagcttacgaaatatgcatattgatgctagtggctgggttacaattcgccatgtacactacacaccttacggcactatctacagctttaagcaaagaatatagcctgaacgtggcccaagtagggttatgctacctgccctctggagtttgtactctaatcagtattgtcaccgccggtaggtatttgaattggaattacaagcacaaattgagagaatatcgaagttggttagaccaaaaaagatcggagcttttagaggcacacgataacgatccgaacgtggcacaacaaatcatagaggacgacccccaatatactttcaatatctttaaagcaagattacaacctgcgtttgtcaccttggtcttaagtagtagtggattctgtgcctatggctggtgtattaccaccaaggcccccttagcagccgtcttgtgcatgagtgggtttgcatcgctcttttctaattgcattttggccttttccactacacttattgttgatttgttcccttcaaagacatccactgccaccggatgtttgaacctatttagatgcatcttgtccgctgttttcatcgctgcattgagcaagatggtggagaaaatgaaatacggaggcgttttcacattcctaggggctttaacctcctcgtcatcaattcttttatttattctcttaaggaaggggaaagaactggcctttgagaggaaaagacaagaacgagagactaccaaagatgtcaaactccttgaatcaaaggaaaacacaacgtctgaccctcttgtcactgatgaagaagaatga

SEQ ID NO: 5574 - DNA, 222 bp, Saccharomyces pastorianus
atgtctttagtcaaagaagaagatgactccaatgatgtagtttctttactttcatccttcaattgcaacctacttacttcatctcgcaaagactttatttcctgcaataatccaccacgtgtgaaagattccttagcgagcttcgccactaatggattttcatccaacctcttgttttttacagaaaataattttaaaatgttcaacatttcttcaacatga

SEQ ID NO: 5575 - DNA, 2682 bp, Saccharomyces pastorianus
atgaaagctgaaaaaacattggatgaatacttcaaggaagtcttttgtaaatgtaaaatatttgcaactaagcttctatccgttcatgaagctttgtttcagacaaataccaaccttctaagaacctttaagtgttacgttaactccttcaaaactgttagtgaatataatttcaaagatctattaaggaacatacagcaacatacagagaaatatttacaaataatcaatgaaaaggctgataagttttcccacgaggagaaagtagagttcaaaaaactcaattttgaattctatttggtaaatttccaaatttgccttacagaaaatgacttggataccgccaagatttacacctcaaaggtaaatatcactgaaaactctaaatacatggacgcagatttgctgattgaattatgcagaatgatctacaatgctacagttctgttgaaagaaagtgatgtctctgggactcagcaaatagataaaaatattgtctattttttaaaggatgtggagaagtacttagagctgcctgtggaaaacttgaaagcccatactgactatagtaatttgagatactcagttttgatattcatgactaattgcttgattggagaatacccacaaacttcagaattcgaagaatgtgaccattatttaagtcttttacaaaacgaatatccgaacaaagtggaccctttcatattagcaattaaactgattaatcgaaaagagattacaaatccggcagaaactatggaagaaattttaatgcggatgataatgtcagtggatgtcacgttaaattttcaaacagttatggcttcgatcaatgatctttcaaaaattgacactaagctgtctatagtgtgccttgattatttgctagtcaataagctgcattctaaaaatgatacgaaattattagaaaaagccatatgttctagatttttgattacgacgcaatctaaaacaatgaaagattcagaaatagcagaaagcttagatgatttttgtacccaaattgaaagaatggtatcagagcctctttctaaacataccatctcttgtataataactttattatggaatacagggaaaaaattagagaagatggagaactacgttgagtcgattaaattttacaaattagctctcaaagatattataagccaaaactattcggatagagggaaagttcaaagagctctacaagctgtatataacaaaattcacgattattctagcacacttaaaatttaccaacatatggatgaagaggacaaagaatctccattgtgccaacttctaatactgcaatttttcttagcaaatgataacgtggacgaggcgcttatgtgtcttcagaagataaagttatctgaagacgacaaaagtacaaatgctcttatactagctgtagcagagtgtaaaagaaaaacagatttgtcagttcaaggtcttctcatgctttttgagaagttacagtcgaagaatagtccgcagaacatatcaactacatcaaattctcagacattaagtctcctaaggtacactttacagatgattgttaaggtttcggaagaggaatccatagaaacgtttattaattatttgccgacagtagaaaaactcttattgaaggcagttgaattccttaaaacagttaaattactgaaagaattaccgtcagacgtagagaaagatgcaatttatcaacagtccgtgactataaatgaaatagaatggtttgcctcgttctcatataatgtcgccgtgaaatgtttaactgatgagttgtgtgactctgtttctcaattcccccaattttgtatccagtttattgatctcataccaattcaagattttactttcccaaaaatgtatcactttacatattggaaatttaaatctctaattttacagttagtaatagccaaagaagaaattgtcaatgactgccactcaaagcatcaagacatatatgaaagatctggtgaattggtcgacaacataaactctatgaagaaaagttcagaattcaaagatgggtcttcttcggaagatactaaaacaataaatgaatgttttttggaagcactaacaatacatttggaaagcgctttgataacgagtgatcaaaataaaattttggacatattaaagaaaacagagttttaccgtgatagccacgtagatgcattattggttgatatctcgtcaaatatggaagatttaccaaggggacttcttgtggaagtaattgaaactgtcctaggtaggaatataggctgtactgaaataaaggaacaagagctttgtctctggctacaaattttattggaaaatgcaatcaatctgaatcatgaagtcgagcttcgtatattagaaagggttttaaaaactttggttgcaaaccaatcaagctttcaagatccagatggcattcttcagacagaaatagaaaccatagctacctattgttggaacatcggtgtcaactgtataattaaggaaaacaaaggtaaaggaattgcttggtgtaaacactcaatgggatatgcaaacttggtcaacaagggtttgcaggagcagttatactcattatgggggtctttagcaagctccgccaatattgacataaatagtgccgttaacgagacgcatttacccatttag

SEQ ID NO: 5576 - DNA, 495 bp, Saccharomyces pastorianus
atggaaacaaacaacaaaaaaagggtatacgactcaaggtcgcagatgaacaaaatccaaagcattaacgataaagaactgcaaagtgggattcttagcccgcatctttcctggcataatgaatataaggataatgcctatatatacattggaaatttaaacaaagaattgacggaaggtgatatcttaacagtattttccgaatatggagtacctgtcgatataacactcagtagagatgagaatacaggagagtcacaaggttttgcgtatttaaaatatgaagatcaacgatcaacgattctggcagtcgacaatttgaatggggttaaaattggtggtagggcccttaagatagatcatactttctataggcctaaaaggaatttgcaaaagtaccatgaagccgtacgacaagaactggatcaagatataatgcccaaggacaacaatgaaaaatctgttgcgctgacaaagaaagaccgatcaggataa

SEQ ID NO: 5577 - DNA, 1005 bp, Saccharomyces pastorianus
atgggtacaaactctgctggtgaaaccacctctggatgccatcccaaaactatcacaactactgtgccatgttcaagcggtacaggtgaaagcactatttccccatccaccactggcacaccagctaccactcccgtaacatcaatgatctcaactactgtcgttaccactgaatattcaacaagcacaaaaccaggtggtgaaataacaactggattcgttactaagaatatcccaaccacttacttaaccaccattgctccaactccagcagtaaccactgttaccaatttcacaccaactacaatcaccactactgtttgctctatgggtacaaactccgctggtgaaaccacttccggatgctctgctaagactatcaccactaccgtaccatgtacaactggtgccagtgaaaacaccgcatctccagctaccactcctgtaacctctgctgttccaaccaccattgttactaccgaatacactacaggcactaactctgttggtgaaactacatctggttacatcaccaagtcagttccaactacctacttgaccactttggccccaagtgcacaatccgctcctgcaaccactgctaccccaaccacaatcaccaccaccgtctgttccgccggtacaaacgctgctggtgaaattacatctacatgctctgctaagactattaccacatctgcaagtgaaagcgaaaacactgcttccccatctgtagctaccggttcaaacggtgacaagaactacgaaactgtcgccactgcaaccaacccaagtacaatcaagacaagtgcaacatctcaagccgtcgcttctggtgtgtctccagtcgttacatcaccatccctaaccggaccagtccaatcagcttctgcttccgctactcactctgttccttctgtttcaagtacgtatcaaggtgctgcaagcatgaaggttcttggaaactttatgtggctactagttgctcttccaattgtagtttaa

SEQ ID NO: 5578 - DNA, 2541 bp, Saccharomyces pastorianus
atgtctctagagccaacagataactcggtgaaggtaaaagaaagcggtatattaatgaaaacgccaacaagattcacatttgaaaaaaaattacacactccaccaagcggtgatggtgatattgaaagatcaccacctaaaaaatttttaagaggtttgtctggaagagttttcagaaaaacgccagatcttaagaaccaacaagaaccgaggtttggagatgtggaagatagccagtttaccccgaattttggtctaatgatgtccaagaggggcaatatacctaaaccacttaatctttctaagccaatatctcccccgcctagtttgaagaggacagcgggatcagtagtatctggcctttcaaaaacaggtcagttgaccgctttacactcaccagttaatattgtatgcaacaacaaattcaacataaaaggcacaaatttgacaagtagtttactccgagaatcgatttctgattccaccacaatgtgtgataacttttcagatgtcaatttaatggttgtggatgaagactactgcatcgatggagattcatgttatgaagaagattcgccaacattcataatgaatttggaaagaaatataaagaagtgcaattctcaatccggtccaaaaagatatgtaggggagaaatgcttgatctgtgaggaaaatatcagttccacatttaccggcgaaaaagttgtagaatctacatgttcacacaccagtcattataattgttatttgatgttgtttgaaaccttatatttccaaggcaagtttcccgaatgtaaaatatgcggtgaaattagtaagccaaaggacaaagatattgttccagaaatggtatctaaactcttaacgggcgcaggcgctcgtgataatagcccatcatcggacatgcaacagcaatggattgatttgaaatccgcgagaagcgttactggtgggttacctcagtttaccccacgtgaacaattgattcgtacggcagatatttcatgtgatggattcagaacgccacaattatcaaacagcgaacgctttgaatctgctagttacttggatagcccattattgagctcgccattcatcaatgaaccaatttttactgaacctctcagtctgggaggtgatggatgggatgatcatgatgaaacagatgaatgcgcggttgaagtatggtttagtacaacggaaaaggaagatttgatggtcaacgtgaagttcccagaaacagatctgaacgatgatgctattgatttagagattttacaagatgtggactatatgaacggccaagagccggaagaaagaggaaaactttggaaagagagcattgaccaatatatcgaaactaacgtggacaaaaataaacaattcggcaatttgatcttgtttgacaaaataatgtattctgatgacggtgagcaatgggtaaacaacaacgttgcaatactattcaccaaattcttagttttgttcgattacgaggacatgaagattttgggtaagatccccagggaccagttttgccaggtaatcaaattcaacgagaaggtattactttgtaatttgaaaagcaccaatatacctgaaatatacttgagatttagtgaacattgcgaaaaatggttgctcgcaaaatggaaatattgcttggaaaatgcgtcgctggaggggctaccattatgtgaagttgtcacgacagtagaggagcttcttcgtgaggacataatatctgcatttagagtgcctctcggtacggtagcagcgcattccaataaccttcaactgccatggaaaaaatcgcaaaaggaaacgccattgaagcttatagtttgtttgaacgtgtcacacgctgacggaaaaggttaccgcaagagagtcgtgggtgccattaaccaaatcttgaatgaactgaacgtagatgacttactgggtatagtggtgaccggaagagacggtaacggccaggctggcccgtttggtactttcatggggatgataaacaaaaactgggacggatgggcaaccttcttggaaaacctggaaaccgttggtccctacgtgttccaagatgaagaacaagaatatagagtcacactgcaaacttgtgccaggctagcctccacgagcgcgtacgtagatacgaacgaccacactcggattgaatacgccaaacaaatcatggttttcaataatagggaagttcatgaaacgggccgtgaccaaaagttgatgaacaccctagacatgttgtctaacgatttaaaatacgaaacttcacaacatcgcatggccggcatacaacagttcctgaaaaaattgcacagtaaaagctatcttaacgtgactttgtgtctaccagaatcgacatccaagaaaatgtatttgggagacatggccgcgggcgaactacaaacgcgcttggtccaagataagcacccgcattctaactttgtagagttggaatggtttgatgtcgcgaaacagcaaagaatttgcaagacccttgaattatcatacatttag

SEQ ID NO: 5579 - DNA, 105 bp, Saccharomyces pastorianus
atgattcacctgaggcttggaacccttggcggtggtggtggtggtgatctccacggtgccgtcgtcgtagtaaattttctcagtcttgacagtgttaggttttga

SEQ ID NO: 5580 - DNA, 237 bp, Saccharomyces pastorianus
atgcgaaccttttcacggggttccttttcgtttaattttgttaatgatgataaccaaagatgcatagttcaactgattgaacatactatcgaaatgaagataaaaatttccatcgaaattagtctttcgctcctatctgaacactacaaaagaaacgaatcttgtattagtaatatgctcgttattggagatgggccgagaggcggagccattgtagagcgattttgtacgtcttga

SEQ ID NO: 5581 - DNA, 729 bp, Saccharomyces pastorianus
atgtcttctgaagataccttgatacactctgatgacccacgccatcctgcaaatctcatctgcacgctctgcaagcaattcttctacaacaattggtgcacaggaactggcggtggtatctcaataaaagaccctgaaacaagccattactatctggcaccgtctggggtgcagaaggagcaaatgagacctgaggatttgttcgttatggacgctcaaactttggactacttgcgtgctcccaaattatacaagccaagtgcgtgcactccactgtttgtagcatgctatcaaaagaaagacgcaggtgctataatccatacgcattctcaaaatgctgtggtgtgctctttgatctttggtgatgagttcaggattgcgaacatcgaacaaatcaaggctattccgagcgggaaagtggaccctgtgaccatgaaacctatagcactgtcgttttttgacacgttgaggatccccatcattgaaaacatggcacacgaggacgaattgatcgatgacttgcacaagacctttatcgattatccgaacacatgcgccgtgatagtgcggaggcacggtatcttcgtttggggccccgccatcgacaaggccaagatattcaacgaagccatcgattatttgatggaactggctataaagatgcacaaactgggaattcctcctgactgtggcattggggaagagaagaagcacttggcagggccataa

SEQ ID NO: 5582 - DNA, 4263 bp, Saccharomyces pastorianus
atgaatgatagaacaattgaaagtgtattggccgtggatccggctacaatgatcatcaaggagtgtattaatctctgttctgcaatgaagaagcaatccagagataaatcgcgaactagcgtaactgcactactaggcggtgggagtgatatgtttataaaccaaagcgagtcatttgttgacagtttccataacttagcgaattccgaacaccatgaccctctgatatctggcttagtcgaactacggttgaagatcaataatttgaagggttcggatgaaataaatgctctggaacttttggacccatttttgcaaattgttagcgctagttcggtatcgggatatatcacttctttagctttagactcgttacagaagttatttacattaaatgttataaacaaagcgtctatgaatattcaaagtgccatcagagaaaccgtcgttaccttaacacattgtaaattcgaaacttcaaagcaatcatcagatgactccgttttgttgaaagtcgtaatattattacgttatattgtgatttcttcctttggagactatctttctgatgccataatctatgatgttctccaaaccacactctcgttggcgtgcaatacccagagaagcgaagtcttgaggaaaacagccgagattacaattgcgagaataaccgttaaattattcacaaagttaaagctattggaaccgcctacaaaaactgaaaaatatattaacgacgaaagctacactaataatgatttaaaggatgatgttataggcactaccgggtctgatgatgagttgatcagtactgatgatgataatgctactgacaatcataaaaacaaggacctcattgatcctttaaccaaacaccaagataaagatgcacaaaaagggaagaaagacgacgaaattgaaccaaattacggaatatccgttatcaaagactatttagggctactattatccttaataatgccagaaaatagaatgaagcatacgacttcggccatgaaattatcgttacaattaataaataccgctattgaaatatctggtgacaagttccccctctaccctcgttcatttaacttaatttctgatccaattttcaaaagtatcgtatatttattacagaactcaacccaacactctcttttgcaagccactttgcagctgttcacgagtttagtagtcattttgggcgattatcttcctatgcaaattgaactgactttaaggaggatattcgagattctagaggataagaagggtgccgatgatgcgaccaagcagaaatcacctgctctgaaggaattgattatcgaacagctttctatactatggattcactctcccacttttttcttacaaatgttcgtaaactttgactgtaatttagacagatcagacctttcgatcgacttcataaaggcattaacaagattttctctaccagcagccgcaataactacttctaacaatgttcctccaatttgtcttgaaggaatcgtttcacttattgacaacatatacaacgatttacagaaaatggacaagaaagactttgtgaaaaacgagaaagaaattgaaactttaaggcagagagataggaaaactgaatttataatgtgcgttgaatcattcaatgaaaaggcaaagaaaggtgtcccaatgttaattgagaaaggttttatcgaatcagactctgatgaagatattgcttcgttcttatttttgaacaatggacgtttgaacaagaagactattggtctattactttgtgatcccaaaaaaacatcattgttaaagaaatttattgacttatttgacttcaaaggtttgagagttgacgaagcaattagaattttacttacaaaatttagactacctggagaatcccaacaaattgagaggattatcgaagcattttcatcaaagtattctggtgatcagaatatcgatgaaatagaggttggggaaggacactttgaaagcaatatcacatctgtggcagaagatgtcactattcctgtgcagcctgacgcagactccgtgtttgttctaagctattcgataattatgctgaatactgatttccataacccccaggttaaggagcatatgtcctttgaggattattctaacaatctacggggttgttacaacggtaaggatttccctcgctggtacttacagaaaatatacacgtctatcaaagtaaaagaaatagttatgcccgaggagcaccatggcaacgataaatggtttgaagatgcctggaacaatttaatatcttcggcatctgtgatgacggaaatacaagaaggcttcaaaaatcccatttccaaactagttcaaactgagcttattcaatatgaaaaggcatttttttcaaacgtgggtgaaattatcacaaaaactttattcagcatattcacaattgcttctaatgatcaaatatcctcgcgcatcttggaaaccataagcagatgcactttcatcaattcttacttttctcttgatcaatcatttaatgatattattcttcgcctaggggaaatgacaacactggcgtgtacgaacacaaaagagcagccgtcagacgctgaaagtatacctttagtggaaatatttgtcgaagataccgagtcgaaaatatccgtcagttcccaaagtataaagctcggagaaacgttcaagggacaactatgtactgtaacttatttccaaattattagagggataagtgatccaacagtcatttcttccgaattgtggactcaagttgtgcaaatcattttgagattatttgaaaatttaatgatggatttgaatttaaagttctttgaaaacttccatacactcctaaagcttccagaattgccttcaccagaaccagatgttgcgatccgcaaggcgaagatgagtagaagtcttttgtccacctttgcgtcttacttgaagggtgatgaggaaccttcggaagaggacattgacttctccatcaaggctttagaatgcgtaaaggctagcagagcgtttagctcagtctttgaacatagccaaatcataactcctcagcttgtggaaatacttctttcttcgcttgtggttgacaaaactaatgaaaattctcagtattttgagcaggagcttcttcttttactagaaatatccatcattttggtatcggaggtttgttatgggaaagactttggcccattaattgccgatcatgtggtcaatatttcaaaccttgacggactctctaaagagtctattgcaagatgtgcttcatataagatgttcttggtgtcaaagttgaacaatccacagaatattttgattgatctaataaaacatgactttttggtcaaaaatgagatatttaatgcgaagtattacgaaagcgaactggggaagcaactactgtgtgatctgttcacacattttgaaatgctaaaatatgatcaggaaattctcaaggatgtaaaattttggaaatttgtaaggaagcttatgtcaaacgaaggcaaccgattgatagtatatcaatttgtagagaaatacattcaaaatggtgaagtatttttaggtgatgggaacttcatgcacatattgggtctgcttgatgaaatgtcgtgtgctggcgccatcggtagtaaatgggaacaaaactctggaggttcagtcgaagatggaggtcaaccaccaaaaagtagcccctaccgttccgttgttgatatttccagccgatctattaatattactgcagatctgctttcaaacagtaagggaagggattatacacttagtaagactgaaattatagctgctattcaaggcttggcccatcaatgcctcaatccttgcaacgaattaggcatgcaagcattgcaagcattagagcgccttttattatctccgacgaacaagcttcgtatgggagaagttgctctagatactttgatagaaaccggactcctgccgatttttgaattggatgaaattcaaaatgttaaaatggaacgaattactgacattttatccgtaatttctaagatttttttgcatgaactggcaaaaggtaacacaaataacgaaacctttctgagggttctgaacgtattcaacgagtatgtagatgatcctacagtggaaaggcagttgcaacaattgattatatccaagagagaaattcaaaacgaggatacgggtgctgacgtaacattgcaaaaaaataccgaaaagtag

SEQ ID NO: 5583 - DNA, 294 bp, Saccharomyces pastorianus
atgaaaatgacccaggtgtttgatattcttttctcattgacttcgggacagccttatacggaaacttacctaggttctttggtcgtggacagtttacaagacagtaacaaccctattggttcgaaagaagcaagcgaaattctggccgggctgcagggaattctaccaatggaaatatctgttcatcaagtggacggtggattgaaagtttacagatggaacagcttagacaaaaacagattctccaaattactggaaatttacaaactaaaacaacaagatgatgatgtttag

SEQ ID NO: 5584 - DNA, 1584 bp, Saccharomyces pastorianus
atggctgctgtcggtgaagttggtgttggtgtggccagcgaagcaagctcagagtgttgtgatatgagcggtaaggagaataacagaagaagaacgccgctgcgtgtgccggttatagacctggacagggtttccgccgaagaccagctgttgccggtggtgagggccgttttgcagcagcacgatacgttcctgttgaagaactatgccaacaaggcggcgctggacgagctgctgggggcgcttgcgacgactgacctgcccgacacgagccaagggttcgatgcgaacttcacaggcacgctgccgctcgaggacgacgtctggctggagcagtatatcttcgacaccgatccgcagttgcacttcgaccgggcatgcaagaacgagtcgctgcgatcgatttacgccagactgttcaagctgggcgtgttcttcgcgcaattgtgtgtgaaaggtgtggtctcgagcgctgagttgcaggactgcatctccagcacgcactgtgccacgaagctcactcgttacttcaacgacggtgacagcgcacagaacggcttggacccgagtgccacgatgcttcccaacggcgacgatttccagtaccaatttgagagggactacgtcactttactgccgacgggtgtgttgaccgtgttcccctgtgccaagggcctcaggtacaagccctcgacgatggcagccactgacaactcttgggtgaccgtcgatgagcccgactgtctgctgttccacacggggaccctgctggcgcgctggtcccagggaatgcacacgacttcaccgcttcaggtagaccctcgtgcgaacgtcgtgtcgttgaccatctggcctccgctgacgacgccgatcaacgatgaaggcaccattgccagccacttgctggagcaacagatcaaaacgttcccgaaggtcgctcagcagtactacccgcgagaacagaatattctgaaactgcaagatgctatgaagttcgtcaagaagctgttcagcgtgtgtgagaccatcttgtctttgaatgctctctccaggtccaccggagtttctcctgagctgcacgttttgctgcctcagatgtctaacatgatgaaaagaaaaatagtgcaagatgacgtgttgaagctgttgaccatttggtccgatgcatacgtggtcgagctgaactcaagaggcgagttgacgatgactttgcccaggagagacaacctgatgacgttgacgaataagtccaggacgttggccttcgtggagaaggcagagtcgtggtaccaacaattgatagcttccaataacgacattattacagatatacccgtcttcaagataaataaaagaagagcaagcatcaacatcaaaaccattatgggcagcaagacgcaaacgaaaaattccaactccaatgcgcttaacaactctaaatacctatcgaataagaaggaaaacttcttttataaagagaaaaccctgattcgcaagccaaccttttggaccggctacgtgaaagggagagacgttcagctgcactgctttcgcaaagacaaagacattaccagcagtttctag

SEQ ID NO: 5585 - DNA, 1725 bp, Saccharomyces pastorianus
atgaaatacgttattgtttctggtggtgttatctcaggcatcggtaagggtgttctagcttcctccacggggatgctactgaagacgcttggtctcaaagtcacttctatcaaaattgacccttatatgaacatcgatgcggggacgatgtctcccttggagcatggtgagtgttttgttcttgatgatggtggagaaactgatttggacctcggaaactacgaaagatacctcggtataaccttaagcaaagaccataatatcaccactggtaagatatattctcatgttatttccagagaaagaaaaggcgattatttgggaaagactgtacaaattgttcctcatttaactaatgcgatccagagctggattgagcgtgtttcaagaattccagtggacgatacaggcttggaacctgacgtctgtatcattgaattgggtggtactgtaggtgatattgaaagtgcaccttttgtggaagcgttacgtcaattccagttcaaagttggcagagagaactttgcgctaatccatgtctcattggtgcctgttatccatggcgaacaaaagaccaaacctactcaggctgcaatcaaagatttaagatcactgggacttatccctgacatgattgcctgtagatgtaccgaagaactaagcgcagccacgatcgataagatcgccatgttttgccacgtggggcccgagcaagtagtcaacgttcatgatgttaactcgacgtaccacgtacccctgctgttactgaaacaacgcatgatcgactatctacatacaagattgaacttagaaagtgttccattgacttcagaggacaaggaaaggggatcccaattgttggccggctgggaggccatgaccaagagcctggatgattccgacgatgtggttaagattgcccttgttggcaaatatacgaatttgaaggactcgtacttatcagtgacgaaatcgctagaacatgcaagcatgaaatgtcgccgccaattagaaatcctttgggtggaggcaagtgacctggaacccgagacccaagagctggacaagaacaagttccacgagtcatggaacaaactcagctccgccgacggcatcttggttcccggtgggtttggctcgaggggcatagaaggtatggtccttgccgccaaatgggcccgtgaaagcggtgttcccttcctgggagtgtgtcttgggttgcaggttgctgccgtcgagttttcccgtcatgtgatgggccgcccaaacagcagctctacagaatttttggacgagtcgctattaaaacctgaggaccaagtagtcatatacatgcccgaaatcgacaaggaacacatgggcggaacgatgagactggggttgaggcccacgatcttccaaccaggctcggaatcgagccggataaggaagctgtacggcggtgctagcgaagtacacgagagacaccgccatcggtacgagattaatcctgcgttggtggacgagatggagtcacgtggccttgtttttgtgggcaaggacgaaaccggccagcgttgcgaaatattcgagttgaaaggccacccttactacgtgggggcccaataccatccggaatacacttccaaagtgttggagccatcgaggccgttcttggggcttgtggctgcagcctccggaatgcttgacgagttggtccagggcatgaacaccatgaatgaataa

SEQ ID NO: 5586 - DNA, 240 bp, Saccharomyces pastorianus
atgtgggagtcgtggctgtttttgaagatgtttgcgcaggacagcgtggcagtgcgcagaatgcaggtcaacaagtacgtgttgggggtgatcgtgtgttcactgggcgcgagtgtgatgagtgagtttgcccagagcgtggtgtcgcgtggacagagggtgtttgacgtgaacgatatcgtgtgcaatttctggggcagtctgcttggtgtcggggttgccttctaccaggaccactag

SEQ ID NO: 5587 - DNA, 876 bp, Saccharomyces pastorianus
atggttcttggtcatgaatcaagtgggcaggttgtggaaattggtaatgctgtcacaagagtcaaagttggtgatcgcgttgccattgagcctggtgttcctaaccgttactctgatgagaccaaggaaggaagatataacctttgtcctcatatggcttttgctgctacacctccaattgacggtactctagtgaaatactatttgtctccagaagattttctcgtaaagcttcctgacggtgtaagttacgaagagggagcttgtgttgagcctttatcggttggcgtgcatgccaataagctggctggagtccactttggaaatagagtggttgttttaggagcaggccttgttgggttattaactggcgcagtcgcacgtgcgtttggtgccagtgacgtcgtctttgttgatgtgtttgacaacaggctagacagggcaaaagattttggcgccactcatactttcaatgcatccaaactctctgctcaggaattggcagacgaagtcaaagaacttttggggggacaaaatgcagatattgtctttgagtgttccggagcagatgcttgcattgacgctggtctcaaagtcaccaaagctggaggtaccatggttcaaatcggcatgggaaaaaactacacgagcttttcaattgcagaagttagtggtaaagagatgaagttgattggatgcttccgttattcgtttggtgattaccgcgacgcagtaaagttagttgcttcaggcaaggttaatgtaaaagcaatgataactcacagattcaagtttgaagatgcaggcaaggcttatgatttcaacattgctcacgttggtgaggtggttaagactataattacgggtcctgcctga

SEQ ID NO: 5588 - DNA, 342 bp, Saccharomyces pastorianus
atgttattcgtgttgatagcatatatcaaaaatgtaagagttgcaccaatgaaattggaacacaagatgcactacatttcaactgttattagcgagcaagaagttggcgctaatggatgggaccaaatcgcaaagaaaatgaatgtgtattttttcgaacagaaactttacgtggatcaagagtttttttttgacggaactgattgcaaatggttctttgatcataacttctctagttctctatcttcaaagaagtctatgtggcttttgccattgaatgctgaactatggccatacattaaggaagcgcaatcagcctgtggcgaagaatctctagcgtag

SEQ ID NO: 5589 - DNA, 342 bp, Saccharomyces pastorianus
atgttattcgtgttgatagcatatttcaaaaatgtaagagttgcaccaatgaaattggaacacaagatgcactacatttcaactgttattagcgagcaagaagttggcgctaatggatgggaccaaatcgcaaagaaaatgaatgtgtatctgttcgaacagaaagtttgcaagagtcaagagtttttttttgacggaactgattgcaaatggttctttgatcacaacttctctagttctctatcttcaaagaagtctatgtggcttttgccattgaatgctgaactatggccatacattaaggaagcgcaatcagcctgtggcgaagaatctctagcgtag

SEQ ID NO: 5590 - DNA, 393 bp, Saccharomyces pastorianus
atgggtgctaccgaagaggaagttcaacacgagggcgcttacaacccagatacaggtgagatcaattgggattgcccttgtttgggaggtatggcacacggtccttgcggtgaagagttcaaatcagccttttcatgctttgtctattccgaagcagaaccgaaaggtattgactgtgtcgaaaagtttcaacacatgcaagactgtttcagaaagtaccctgaacattatgaagaccaattgaaggaaacatcggacgatgaagaaacccaagataaagcaaaggtgaacactatggaatcagctcctaatgtctcaagtgcaaaggagaatgctgagaaaaaggccgaaaaatcagatgtcaaaaaggaatcattggatgaaaaggcttaa

SEQ ID NO: 5591 - DNA, 402 bp, Saccharomyces pastorianus
atgcttcgcaatatagtcgctagaaatgcgtgcagacacaggccgtcgattcaggtggctaggggattatgccgacaccaaacaaggcgtttgatggcctcgtcccctcaatttggtaaaagctatgactctaagcaagagaagacagcaggttttataatggggattctgtctatggctggtgctttgtatttcataacgcccaacaggaagcctctctttgcttcaaggaaggtggaatccgataaaaccgctgaggaagaaatttcgagaggtgaagagcaatcacctgacaacggaaacggtgacgaaagtcagactgaagctggggctcaattaggtggtgaccaaattggtgcctccaaagtggctgaagatgtgtgtattgcttgtcctagctga

SEQ ID NO: 5592 - DNA, 2259 bp, Saccharomyces pastorianus
atgaagctaggacagtaccacacccccctgtcgaaggggtccatctggtcaatactttccgtgtgcatactgtttatgttcaccgtactaatactgattattgtcgctacaacaggctccaccgcagactacaagcccttgaccaatatatatatcggcgaagccgatatcaaacacatcaacgtgagcaaagtgattccgcagatcggccccatcttgaccatactggggtccgctttgacggctccgaacagctctttggatgcgatttttggcgccctgaaaaacattgctgacacgccagctctgacgccgctgttgacgctgttgtccaacgctgaaaacactacggtaaccatcgagtcgttgaccgagttggctcccctagccatcagcggaaatcccgcctccagcaccaagcagctggcggaaataaacgggctgctgaagtactcaaacaactccactgaaaccttggatggcttggccagattggtttccgcgtcgctgtcttcggccagctcgagctcttcaagcgactccacctctttggtcctggacttgctacaggattcggacaaccctcaaaactccacagacgctttgctcactctgaataatctgacaatgactgaaaaggcgcagttgttgcctgttttcaagctattcgcactgtccacgaacaaaaccgctacaatgacggcgttggctagcttgatgaacaccaccatcccccccacgttggctcaaacgctattgacccaactacaaaacacaatctcggaaggcggttccctgaacagcacgtttagcagtttgcaacagctagtgcccagtgctgacgcgggcgcttttaacgcagtacaagtgctgctaaacgaaacaacgtccacgaaccaaaccttaagcaccttgactgacttgctggaaaaaaacgtcactcagtcatcatcggcaaagagggcttttgccgccttgacccagctaatggatagttcgaacaattccacgatggtgaccacctcggtgcaatccttggctgctgtgactaataccacccaatccacgcagcagctcgtcggtttggatgacgtgataagctcctctaccgacaccaatgagacgttgtccatcctgtccgaattacagtccgatttatcgggtaattcgagcactacgcagtacatcccatatctgtttaatcttctaggtgcatccagtaacccgaaaaccacgttttcatccttggtgacgctaacgtcatgggctcaagaaaaccctcagacattcatgcccattttgaaaatattagccgaagccaagtctgttgaaccaatctcccccacgaaattagacgctttgacaccgaatattttggagtacttgaagatcccagtttacttccgtctatccattttcactctctgtcatgccaacctcaaacacaaaatccttgattgcagcgcttcacatgctgttcagaacttagacttcaggacaattatctacgacgcactgattgcctccgatttccagccttacttgaacgctctgaatattaccgcagacgacctatacttgcaagggaagttgctgcgcagggaacacgagtacgtgcctgccgtgaagtccgttctggctatgaacctattgacaatcatcttcgctttctctaccatcgttttcaccatattattgtacttcgacaggtacatgattagacaagcattatggctcatcaccgtagccctatacgcttgtgttggtttattcacagggttgggagctactataatcgccgttatgatcaacatcataaaaagtggtaccgcggatgataaatttggcgttgtattcaaggctagtcctgcttatatgggattaacgtgggcagctttcgtattagcagttatcgctactataatgatgatcagcgcgtggtggacaaacaggataactggtcgctacgtatccagagctacactagacaaaaatggcgaagcctacgtgtatggagatggcgctgccgtcccagctatcactgtcgctgcagatacaaatctggaagatgacgatagtgacgtcgaaaagaatggcaatcgtaacgaagttactgctatcgacggtagcagttctgcaaacaacactgacgtcataagaagtacaagcgatgaaatggaactacatcatgcaggcgtggttccgaacgtccccaatgaatcaacaacggatgccaataaccagcgagtgataatttga

SEQ ID NO: 5593 - DNA, 738 bp, Saccharomyces pastorianus
atgccttccttcaaagaagtatctattagttttatgaaaaaaggtaaaataaaaacaggaaataaacagatatcaaaaacagaagcgctgatgagcaaggttgtaacggacacagtgatcataacctcaggtaggtgtgatgttgttgataatgacaatgtggaacgaatccagggttggttatctaagtatattttaacgaagttccaaatcaacgaagatgaaccgctacagttgatcgttttaaaaagattcaaaagaatactgttaatctgccccagtcatgacttatctcaacatgttatggctgcatctcatgcttcggaggtggagaagctcaactttagttactctttacaagatggatataacaatttagccaaagaacacttgaaggtaccagagagcgaaaaaatgtttctgatttcacctccagcgtcaccaccgcctgaatttgactttagcaagtgtgaagatgcaccacagagacacgttcagagtcatatacagcagcagcagcagcagcgaatgaaagcgggccacctgttgccaaacaacccagatgaagacagtaacggtactttcacgttgttgaaatcaaaagtgggcgctatcacgattaacaggtgtcccacaaatgaagattgcggaaataagcgattagtggatcatgttaagacagctctcccaccaaaatccatatttgacagtgatgacgatgaagggacaacatgttga

SEQ ID NO: 5594 - DNA, 888 bp, Saccharomyces pastorianus
atgcaattcaaagcagttcccggatattttgctgcttatcccaatgacggttttcaaggattggactccacgaaatacgatcatttgcgattgatcaatcataatgattggaaagaactatacgacgctctacccaaagatacccaaaattgtcattataagctgctgattctagccaggcacggccaaggctaccacaatgctgctatatcgagatacggcatggagaaatgggacgcacattggtcattactttctggggatgaatatggcgaatgggttgactctagattaacaccattgggtaaagaacaagttagaagaacaggaaccaatgtactgctaccgatgataaagcagctagatatgctacctcatgttttctttagttctccaatgagaagatgtcttgaaacattcatagagtcttggacaccggtattgaatgaaactcaaaaaccaatgagcgaaaacaaaatttccacacgtattatagaaagtcttagagagactctgggctcccatacatgtgataaaagggtcgcccactcaatgactgttggtgagtatcaagattttattatggattctggtcacactgtacattggcactatgtcactgattattctgaagaagatgaattgtggctagttaatcaccgagaaaaaaaccctgaactagatatgcgtacgcaagatggattatcccagctatttggcccactgtcgaccgaagaaagatttatctcccttacttgccattcaggcgtcatccaaagtgttctgagaaacctgaagcatcctccgatttacaacttagagacaggtaaagttgttggtgttgttgtcgaagtgccaactaatatagaaggtcagacagaagcttga

SEQ ID NO: 5595 - DNA, 495 bp, Saccharomyces pastorianus
atgtcacaattttattctcttacaccaacggaccgagatggcaatcagttcccctttgctcccttgaacggaaaagtggtactgataatcaatgtagcgtcacattgtgcgttcacgcctcagtataaagaattagagtacatatacgagaaatacaaaaccagcggcctggagatcatagccttcccttgcggccagttcggtaaccaagagattgaaaaagacgaagcaattaataagttttgtcagaacaagtttggtgtaaccttccccatcttgcacaaggtttgttgtaatggcccaaagcaagatcccgtttacaaattcttgaagaaatcagtaagcggaaaatttggcataaagatgattaaatggaattttgagaagtttttgattgacaagaatggtcaggtggtcgagaggttttcatgcatgacgagaccgctagaaattgttcctcttatcgaagagctattgggtcaaccacgaacgtaa

SEQ ID NO: 5596 - DNA, 2724 bp, Saccharomyces pastorianus
  modified_base (1161)..(1181): a, c, g, t, unknown, or other
atgttctttgtcgacgataagggactgcaagctccattaacagtaagacgagcaatggccacggtcaggcggacgatatcccaggcctccatggcgctgcccttccagctgcgactggtgcacaagaaatcctggggccatcggctaagggacttcatttcccgctttctgaagtcgtgcaagccgattgccaagtacatcttccccaacttcattgtggtgcactacatgtacctgattacactgaccatcatcgggtccatcctgctgtacccgtgcaggaacacgccgtacatcgacgtgctgttcctggccgctggatcgtgcacgcagggagggttggccaccaaaagcaccaacgacttcaacctgtaccagcaaatagttgtgtacgtgctcacgtttctgtcgacgcccataatcattcacgggtttctggcctttgtcaggctgtactggttcgaacggtactttgacaacattagggacttctcaaggcagaacttcaagctgagaaagaccatgacactgcagcaaagagaactgtccagtggcagcggcaacacctctcggaatagaagtttcaaagacaacctgtttcgtgggaaattcgtttcccgggaagacccgcatggaaccgctacagacatgcccatggattctcccgccgtttcctcttccaaaagcgaatcctcctccctcggtagtcacggctcacccaaccacttctctcgaagacgccagctctctgacgttgacccgacagatatttacaagtcgataatgatgctgcaaggacaaaacgaaaaggccagctcagactccaccgcttcctcccacaacgaaccaaacgggcctgcctttgtggttcaagagcgacacgagagaagatcaccgacgccaccaccaccgcacgcgacagaacggcaacactcttcatcaaccgttggggaattgaacaaactggcccagaccatgagctttcagaaattgcttcgcttgcagagaaacgaaggcgaatacgacgccgccgacgcctctcacaagtccatggtcaccaagaaaaggagcatatcgaggacacaatcctataatgctccgagacgtacaccttcaccggcacctgaaacatcaagccaagtgcgccaagatgacgagagnnnnnnnnnnnnnnnnnnnnnccagccgactccttcatcttccgttgacgaagaggtaagcttctacccacaagagtctttaaacttacagtttcaggcacacccgcctaagccagaccgccgtggcagcaatacgcaacatcccttaacaagaacgatgagcactaattatctttcctggcaacccacgtttggcagaaactctgtatttattgggctcacaaagcaacaaaaggaggaactcggtggagtggagtatcgtgctttgagactattgtgtaatattctcgtggtgtactacatcggattcaacattctggcatttgtcatcatagtgccatggatatgtgccaggcacaagtatgcagagattgtcaggcaaaacggaatctccccagcctggtgggggttcttcatcgcaatgagctcattcaccgatttgggtttggctttgaccgctgattccatggtctcttttgataccgcaccttatcctttgattttcatgatgcttttcattatcattggcaatactgggttcccgatcttgttgagatttatcatttgggtaatattcaaattctcgagagacttatcccagttcaaggaaagcctcgggtttttactggaccatccgcgcagatgctttacacttctattccccagtgcccccacatggtggctatttctaactttgatagtcttaaatgccactgattggatccttttcataatcctggattttaattccactgtcgctaagcaagtttccaaaggctacagagtgctcataggtcttttccaatctgtgtgcacaagaaccgctgggtttaatgtcattgatttaagtaaactacatccatccattcaagtgtcttatatgctgatgatgtacgtctcggttctacccttggcaatttcaatcagaagaacaaatgtttacgaagaacaatcgttgggactgtacggtgatgaacaagacaccgccaatgacaccactgacgaagacggtgcgaaggatgatgaacaaggtgacgaaagcgaacagaacgacgctataccaccaaaaccaaaaccgaaaaaatcgtccccaaaatcgtttataggcgcccatttaagaagacagctatcatttgatttgtggttcttattcctcggattgtttataatctgtatctgcgaaagtcggcatatcgaagacaccaatgaacccgagttcaacgtcttcagtatattgttcgaaattgttagtgcttatggtacggtgggcttatcgttgggttacccaaataccaatacatcgctttcggcgcagttcagtgtattgtctaagttggtaataattgcgatgctgataagaggaagaaacagaggactaccatacactttggatcgtgccatcattttaccaagtgataaattggaacaaattgatcgtttgcaagatatgaaagctaaggggaagttattagctcaggtcgacgaagatccaatgactatttatgtcaagaaaagatctcacaaactgaagaaggcggccaaaagactctggaaaagacgttag

SEQ ID NO: 5597 - DNA, 2457 bp, Saccharomyces pastorianus
atgatgcgtatgttgaaagaatgtggtgtcgatcctatgcaagtgcggggcaacatccctgcaacaagtgaagatgagccttgtgacccaagaaaatatgattcagtcgcatctttgggccaagtggggttgctaccatatgacggtttattagcagactatttagttcaaatagggcattcaatgaaaccttcagcttcagatgtcaaaagtttagaaaccccaccagacatacatgaagagcaaaagaagtttccaataaaccccatcaacgaagataacaacgctttattaccagaaaccggtagtccgatgacttccaacgcgagagctgaagaactgcaccaatctaataaagagatcagcgcattggctgctatgaaagaaagtagttttaactcttttttgggagactcgtcgggtatatcatttgcaaggttggtattcacagccactaatttccgacaagattcgggagatgacatacttgatgaagacattaagcaaagggagcagaagtataacgaatacgcggaggcggaaaacaatccccagttcgatccattagaactcccccctcgtcatattgctgaaaatatgatatccagattttttatagacactaattcacaactgcctttgttacatagagaactgtttttgaaaaagtactttgaaccaatttacgggccctggaatcccgatattacattggcttctgacaaaacgaatattaatacagattttgaaattccaatcacgagtaccttcgctgcacgtaccgatccaaagctcgaaaacaatgacaataaaattgaaatatattcttctaaggatgtcccgtggtatgaaacctggaagtttttacaaaaagataacatgagttcagttattgaactgccaacaaaactccatataccttatttttttttaaacatcatttttgctgttggtcacgctacgcaagtacttaagtcagatatcactattgtggctacatataaaaggcgtgctaccaaatatactacatctttattctcatcttcagacagactggaagcattggcaggcactatgttgatggtaatttactcgataatgagaccaaatattccaggtgtttggtatactatgggttctgtactgagattgactgttgatttaggattacactcagaaaaaatcaacaaaaactatgatgcatttacgagagagattcgcaggcgacttttttggtgtgtttattccttggatcgacaaatttgttcttacttcggtagaccctttggtattcctgaagaaagcattactactagataccctagccttctggatgattcgtttatcacgctaacgaatttagacgttgatgattattcagatttgcctaacccgaatccgtcctctaaggttattgccttggccatgtataaaatcagaaggattcaagccaatatcgtgaggatactttacgcacccggtgcagaattgccaaggaaatttaccgacctcgagagttggcgaattgagacctataatgaactggaacattggtttcaagtggacgttcctaaaaatttcgatataatgaattgtaaattcaatagcatttggtttgatttgaactatcattactcaaagagtattctctacgggctttctccgaagtgtcctactttaaatgaaacggccttccgaattgttctcaagagcacaaagggcacaatagatgtcttttacaatctctgtgtcaataaaaaaattggttatacttgggtggccgttcataatatgtttatgacaggtatgacttacctttatgtaaacttctattcaaaaaacagcataaatgacacccatgaaaaagtggccgagtacactgagaaagtgttgacagttttaaagaatttaataggtttctgcgaatctgcaagaaattgttatactagctacaaaattttatcatcagttgtgatgaagctaaaatttatgcaatttggtgaagataatgcaaccttctcgggcgcaaatactctaactgctcaaacaaagggcactttcaatcatagtccttatataaaaaaagcgaaaactcttgattttgatggcgacactttcgatcataagggattggaaaagactgctattgaagacagaccgtcattagatatacctttagaagagtttttcactgtattagaaaagtacaatatttctcaaactgatgcgccagacgtaaatgaaaataattcaactataaatgacggcgatcctttaaatatacctcctgccgtgaataaccaaatgaatagcaataaccaagatattatggacatcctttttcaggtcacttcaggatctgtatgggacgaattttttgtcaaatccggtaatgcaaatgaagacgattatgatttcaacaagggaagtaatgctggatccaacggtttgatttga

SEQ ID NO: 5598 - DNA, 1875 bp, Saccharomyces pastorianus
atgtgctcacaccataccacgtcaaagataaccactatcggggatatttcaattctgacaaccttaggatttagaggtgaagctttatttcttttatcgaatttgtgtaaccaacaaggctcaatgcaggtggagacgaaaaccgtaggcgatgttattggtgaaaaatggttaattgatggtggaggtgctatcacgaatggaaagcgatataagatatcttgtcccgttggaaccacagtaacactaagaaagcttttagggggattgcgagcgagatatcttgaaatatcctcgaaaccaagaaaaacacttgatgagctgacctatctgataaaccattactccttaattcatagaaacattcgattttttttctcacttgtatcgttacgaaaaaatggttctgtagagcgtaagcaaacacaagagactttagactccaaaatttcaagagcaagaagcttatccttactggtaaggttgaagaagcctgtaccagtaaatttcatagcagaggaaaagttagtcattgatgaaaaaatggctttagatctggttttaccaaaaatggtaccagcatcagatgttattaacataaagaagcggctaagattcatatctatcaacgaaagggctttgtctttaaatttggagacggggaaagctgtttctaagctgctgtcgtcactttacaagaacgcaaatctactagaacctatggtctggtttattaatttgaactgtgatacgaaactaattgacgttaacattgaaccggagaaaaatgacgtgatgatcagaggctttgaaacagttcttaaaaaattagaactgaaaataaaactgctattggaggaaaagcttgacccatgtacaagcacagcatatgatgaaaacgtacagtccttggccaataaaagaataactcctacactggagattctcgcacctgacgtggagaatgaaacaatgaaaagttgtggtaatggtacaaatgaggagaaaggtggcaacgggcagaataacttaaaatcgataatacctacttataacgacgaacccaatttagaaaacacaactattgttgatgctacaccctcgcctacaaagatcgaaaaaggtgaatttcttgaccaacaaactcaggagagcctttcaaactgtaaaatcccgagctccagatctctggcttctgaagatggtaccaactggcgtcacaatttgcaagaggatttaagtgaaagcaatgaagtggcgggagctggctcctcaacattgccctcttctttgacttataattatatagaaactatcccagaaaatgaagatctagagctctccaaagatgcatctatttccaatcctttcatgattacgaagataagaagtgttaataggaaactaagtgaagactcgcataaagctaaaaatggtaattgcgacggtgccgaagcaggaaaaatacgtgagaaaatgcaattgtcaagcacaacagaggaagaatcgtttagaccgcaaaaaacatatagcaaaagaactgacggcgtgaacacgaaaactgattcagacgacttgaaacaaaagaatattgataaatatgcaaaaaaagtgtcacacttacacaatagagtaccgagactcatacaattttctgaatataccaacaaccttgtctttgattggaaacacagcaaacctccagcgcacaacaccgatagctttgccaaagatgctctatggttacgttccagagatgaacccactaatccttctttcagcctcttgcaaggcttgcgaacgcgtgtgaagaaacgaggacgcactgaagccacagcaaacggctggtgcctcttcacgccagacagttcttga

SEQ ID NO: 5599 - DNA, 1272 bp, Saccharomyces pastorianus
atgcaagggtacgtacctcccagccagcggctattccacgccagacacagaataactagagatgatttgaaagatgagcccctgcacatggggtccaccgattggacgacgatcctcgacaccgcggtagataaggactcgagcctcattagctacacagtccccataatagataattttgccattcctcgagccaattcgctggagagccccgcagcgtccacacgaaacaatagatcgaccgtgtactcttcttcgtcttcctccgtttcttctgtcttctcagatggtctatttacaccgaatcccaataagaactcatcaggatcatcctctttggtgatcagaccgcaaaaaaatttgagtgtagattcattgatccaggaaaacaagaggaaaatcaacgacgagaaagcatcgctgtcactgatcgccaataataataacgaaaccttatccactcatcccgacctatccatacaaaatctgatcaggtcacagacaaagagaaatatcttgaacctgaagtttcaaaatagaaacttattcagaagagaactgaagctagaaaaattttgggataatttgagaaactaccatacctctggtgtcgatggtggtttgctactagtaattagaaagcacaacttatattggtttggaataccgaatgatttccgtcttcccatatacaagagatgtttataccaccatatcgaacaagatgatgctacatctttcagccagcacaggaaaaatcccttgtacttagcaataaggaattgttgtaataacgaagagcaagaaactttatcccgggcaatcttcataaacctgataaaaaacgtcacttggttgaacagtcgtttaagtgatgataaggaccgtagggatgtttacactattatcgagagcaagttttaccaaaatttccctaatctgtactaccacttgaaagataaattgcaattgaatgttataacggattttatcaagcctgtaataagaaatttcataatcaatgcactgaacaagcataagctagatggtattggtttggagctattggatattttaatagtgaccacttactacggacgtgacgaaatcaacgtctttttaatggacacatttatcttacatctattaaaacagtgtcactttaagttttttgttgataacatctctgaagtgatcatgcagatttcaaagattaattgtgacctggtcattctgctagaagatctgaggtcccgaattgatttggtttga

SEQ ID NO: 5600 - DNA, 339 bp, Saccharomyces pastorianus
atgcttgatggtaaaagtagtaactctgttgaaaacactttcaataataattggagtagcgaagtggaaaaatacgaagagcagtatgatgatgtagagtacatcgcattctctgagcccctggatatggatccggcgcaaggtgaagacgtaattaaagaggattgctggtattttagtatggatgtaggccaagagcttgagttcgaaagacaaaatcaggagggccacacaacaaaggcgaagaaatacaaccccttctacgtaccatcgaaggtagtgcgggaaatggtcagtaaagcaggtgtcgaatggcagagtatagccaagccaaattga

SEQ ID NO: 5601 - DNA, 390 bp, Saccharomyces pastorianus
atgaaccggttggaagggaaaattatggcaaatgacgtcaacccactgctcgccaagatgaacaaaattgtggagaatgagcgtgaactgtttgagcacttaagacaggtgcttgatcttaaaaaagcgggaggaaggctggacctgggcgatgacagttttcaagatttcctgtcgatgaacgcaaacctagacaaactgataaaggagcaacaaaggctccggctagattccaagctgtatggcgagcggggcggcggcggcggtagccatagcaagatcttctccaagataattttttggctggtcccgttgattttttctatgatcacgttgacgtactatatgtttagaataaaccaagacattaagaaagtcaagctttcgtag

SEQ ID NO: 5602 - DNA, 699 bp, Saccharomyces pastorianus
atgaatctgatcaatggtttaatatggctgtacatatgcatatgtatagtgcaggccaaagtcacatccaaggatgcattgaaatggaatagagaattttcgttgcccaacttactaggattgaaagatccacaaaaggaactttcgcagtggtcgttaacaaacaaagtcaagcttgaagaaggcaggtttatcttgacccctgagaagaatacaaagggctcgctttggatgaagcaagattacaaaatccaggaggcagtgacagtagaatggacgtttagaagtattgggttcagaggcagtaccaggggtgggcttgcgttttggttcgaacaggggaagtcaggagatggtacggaggtgtttggtggaagctccaagaaatttgatgggttgatgattctgttacatttagatgacaagttaggcgaaagtgtgacagcatatttaaatgacggagccaccgacttcgacgctaagagcgcttcgcattttgcgtcatgcctatttcaataccaggattccatggtaccatccacattaaggttgacgtatgacccgcaaaacaatcacttattgaagttgcaaatggacaatagagtgtgcttccagacaagaaagatcaaattcatggataaggccccgttcagaattggggtgagtgctgtaaacgatgcatccaaagagtcgttttga

SEQ ID NO: 5603 - DNA, 696 bp, Saccharomyces pastorianus
atggagatcctgggctactacaagctgctgcgccgggcgagcgcgcgtgcgagctcgcgcagggcgggtgacggagaaggcgcgcagcccattgcgtacgaaatgagcagtgggtgggtcgcgctggagacgaagctcagcgaagccgccggggaagccgcaggcgagccccccgcaaccgaggaaggagacgccgaggcggagtccgagggcgctctcatcgactacgacagctggcggcgcaggtgggaagcgatttactcgcacagccgcatcgcggagataaggccgctgccccgccacgcgctgcccctgtcgcgcagtgcggcgggggcgttggagcgcagcgtacggcgctacacacgcgtgctgctgtggtgcacggaggcgcgcgcacgtgacctgcacgtgcttccgcggtgcgtcgcgcaaacgctgcgcaagtgggaactcgactacccgcgcgagggcaagttgttccgcaccagggaaatggcgcgcttgtttctgcagagtcagctatcaagacgggatccacccccacccccacggcaccacgatcaggtccccgatcacgacgatgatgtcactgcaagtgaaagtggaagtgaacccgaacgggacgaaatcgacgacgcggacctgatccgatccgcactacatgaaaatcggctgctgaaatggttatctatctaa

SEQ ID NO: 5604 - DNA, 117 bp, Saccharomyces pastorianus
atgggttggacattgagaataaaaatgtgtatgctttcttggtttatttctacttcacctctaaaagaatactgtgtggggtggaagaagagaaatttacaaagaagtatcctctaa

SEQ ID NO: 5605 - DNA, 1482 bp, Saccharomyces pastorianus
atgagaggttttaaattagatgccatacttacacacggagtcaggacattagcatcaatgggtggcgaaattatcactttacaagccggtcaatgtgggaaccatgttggtaagctactctggtctcaattggcgaaagagcacgcgataggcaccgacgggctctcgcagcttcctgattcaagtgcagatagagatgatgatacaaaaccctttttccgcgaaaatagcaggaacaggttcacaccaagggctatcatgctggattctgagcctagcgtcattgccgacgtggaaaacacgtttcgtggatttttcgatcctagaaacacctgggtggcttctgatggctccagcgcaggtaattcgtgggccaatggctacgacatagggacccgcaaccaggatgaaatcttgaacaagattgataaggagattgactcaactgataatttcgagggtttccagttgttacactctgtggcaggtgggaccggctccgggctagggtccaatctcctggaagcattgtgcgatcgatatccaaagaagatacttacgacttattctgtgtttcccgcgagatcttccgaggttgttgttcaatcctataataccattttggccttgaggagattgatagaagatagtgatgcaaccgtggtgtttgataatgcttcattgttgaatatttctgggaaagtatttagaaatccgaatattgatttacaacacacaaaccagttgatctcggctataatatcttcagtaacaaacagtatacgattccctagttacatgtattcgtccatacagagtatctattctaccttaatcccctctcctgagctccatttcctaagtcctagtttcacaccatttacgtcagattacatacacgatgatatagcacataagggccactcgagttatgatgttatgttggatttgttagacccttctaatcctcttgtttccaccggcatgaataacccaacgtatttcaacgtttataacacaatcatcggtaatgtggaacctagccaaatatcgcgtgcgatgaccaaaatacaacaacgtctgaagttcccctcgtggtcttcttctgccatgcacgttaacattggaagaaggtcgccttatttgccctcacagcctaatgaaaacgaagttgctggtatgatgctaagcaatatgtccaccgtagtgaacgtctttgaaaatgcgtgcaatactttcgataaagtgtttgctaagggcgcctttctgaataattataatgtaggtgacttgttccaatccatgcagaacgttcaagacgagttcatagagtccagagaggtagtacaaagtctaatggaagactacatggctgcagaacaagactcgtacttgaacgacgtactcctggatgatgaaaacatggttggtgaattagaagaagatctagatgccgacggcgatcataatctagcatattaa

SEQ ID NO: 5606 - DNA, 144 bp, Saccharomyces pastorianus
  modified_base (11)..(12): a, c, g, t, unknown, or other
gatggcttagnngcggatcagcttgtcgatctcgtggaggccggtctagaccccgaagcaatccgagagcttacgcagaaatggagagagttactcaatcaacaaactcaagaagaaagtagtggtagcgaggatgaagcgtaa

SEQ ID NO: 5607 - DNA, 432 bp, Saccharomyces pastorianus
  modified_base (374)..(374): a, c, g, t, unknown, or other
  modified_base (390)..(391): a, c, g, t, unknown, or other
  modified_base (404)..(404): a, c, g, t, unknown, or other
atgcctccacaagaatacgctatttttacagatataccagtgacaaaagcgcaggttgaacactgttcttactcatcgtggtctacattatttcctaaatacgtaccgaaatctaaaataataaaatcattaccaaagaaattcattcagtatttggaacaagatggcatcaagctaccccaagaggaaaactcgaggtcggtttatactgaggaaataataaggaacgaagataatgaatacagtgactgggaagacgatgaggataccgccacggaatttgtccaggaagtggaaccgttagtagatttcccggatttacaccagcagctgaaggatgctatgagcgaacttggcgcggttgctcccaagtntgaattggtcagcacnncaagagatgctancgtggatcgacgcctgattgccagctgc

SEQ ID NO: 5608 - DNA, 375 bp, Saccharomyces pastorianus
atgggcgctaatacaagaaaaaattcaacaaagagtgtcggtttagatgagattcatgaaatcttgggtaaagacggcgatgacttgctatccgtggacaatataaacgactacgatacacaaggaaatcattcaattgaagataccgacgccgacattttagcatcgttaaccgctcctgttcagtttgataatacactggacagtgaaaacagtaactctatgtggagaaggagacagagtatggtagaagcagcagctgaaaaccttcgttttaccaagaatggtttatttagtgaaagtgctttagctgatatcgagggaattatgggtaatgacaccaaccaaccattcgagttcaacgatgtcttataa

SEQ ID NO: 5609 - DNA, 1650 bp, Saccharomyces pastorianus
atgtctgattttgatatgcctttctatgaagatccaaaatttgctaatctctattactatggtgatggttcggaaccaaagttgtctttaagtacatcattacctctaatgttgaacgatgaaaaattatctaaattgaaaaagaaagaggccaaaaaacgtgagcaagaagaaaggaaacaaagacgaaagctttataagaagacgcaaaaaccaagtacaaagaccacttccaatgttgataacgatgaatatatcttcgacgttttctttcaatccgatgatgaaaacggtgacaataacaacgccaagaaaaagaataagcataaatcggaaaacaaagacgctaccaagcataaggataaaggcctacgcttaatcgaaccgaacgataaatcagaaccgccattacaccatatgggccagggatccaggatgtctgactcttctgatgacgaatatgataacattttattggatgttgcccacatgccctctgatgatgaacacagtgaatctgaagcatcccatgatgctgatacagatgaggaattaagggcactggattcagatagtctggacatcggcacggagttggatgactattgcgaagacgacgacgatgatgacgacgacgacgactccagcgttacaaatgtgttcattgatattgatgatttggaccctgattcattctacttccattacgacgacagtgatgactcttcctctgtttcaggctctaactcagatcagaagaatcaagacgaatccaaagattgtaaacatgatctactggagactgtagtgtacgttgatgacgaatcaacagatgaagatgacaatctaccacctccaagttctaggtctaaaaacattggttcaaaggctaaagaaattgtaagttcaaacgttgttggactccgtcctcccaagttaggtacgtgggagactgataacaaaccgtttagtatcatcgatggcctttctaccaagtcattatatgctctaatccaagaacatcaacagcttcgcgaacaacatcaaagagctcaaactccagacatcaaaaaagaaggtagcgctaacagcaataatgctacccttaatggggatgagttaacacttaatgaacttttgaatatgagtgaactggaagacgattcaccatcccatacagacgatatgggtagtaatagtaatggaaatagtacagtcaataacaagagtactaatggacatgctgcggattggtacgaggtccccaaagttcctttatctgcatttagaaataagggcatcaacgcatatgaagaagatgaatatatgctacccacaaattccaatagaaaggcgcccattggctatcttggcaatgaaagaacaaggaagaagattgacaagatgaaagagttgcaacggaagaaaaccgaaaagaaacgacagttaaagaaacagaagaagcttctgaaactccgaccggacagagaaaaggcgaaaaaagagcaagaaactatgacgttgccattaagcgtcagcggacatgataccgccattaagaacaataacagtaatagtgatataaatacgggaacggatttcaacaacaatgaaaatactctttggaatatctgcaaactcataacctga

SEQ ID NO: 5610 - DNA, 690 bp, Saccharomyces pastorianus
atggtaggcaaaaaaagtcctcgaaaaagtacggtgaaccatagcacacactccggtaaactaccggcaaatatcaaaagactcataaaaaagggtgaatctaaaatgaatttaaaacagtcaccgcctcctatgctagggacaacaaggccaaggcgatttagtctaatatactcttcagaatcgtctctgagtgacgtatcggattccgacaagaataaaagtacaaatcaacataacaataaaaagaaagcaaagaacatctcaaataattctcaaggtaagaaaagtaaacttatacaaaggcaatcggacaatgatgaagaaggaactgaatcctctgattaccaagttataacgaatgatgaagagagtgaaaacacagcagtaaaagacagcgaagaagaagacgataacgatgacgatgaagatgatgatagcgacagtgacagtgatagtgacagtgatagtgagacgagttccgatgatgaaaatatagattttgtcaaactaacagcccagagaaagaaaagagcaatgaaagctttatctgctatgaatacgaataatacaactgccttttcctctcgcgataacagcaataaaataaaatctactacaacatctcccagtaagcaacagccacagccacaaccacagcaatcgcaagcgcaagatcgacaagcttga

SEQ ID NO: 5611 - DNA, 393 bp, Saccharomyces pastorianus
atggttgaaggtgattttgttaatgaacaaacaaacgttgtctcgcaaagctcaaacttcctgtgcgctgagcgtcacggcgccaaagccagtataggggacgaaatattaaagctgctgctaaagatcctaaactcggacgaaaccgtcgctcaaggtgtgcatacgcatgttgcggggtctccagatctatcagacttcggtttcgaaaatgaacaactggaaaatgtactcgccgtactcataatatcgtttattattgttgttgtcggggtgttgttactagggttgattggaatgatattcatatccttccgctcaaccagtagtagtgacaagcagctgcaatgcgacgacgaggaaaagcaagtgcttgctggaaaccagccctaa

SEQ ID NO: 5612 - DNA, 1938 bp, Saccharomyces pastorianus
atgactagttcagaattaacgaatgaccaaatcatagatctcataacagattataagaattttaaaagaattatagaaacttccgtgtctaaaggtaatcgaagaagaaactcatgcggcggcaataacaacaatctatcaaagttatcagatacgcagttttggcagctagcgacggatgtaaacaatgaactgatgaagagattgacaaactcgaacgtagatgaagatgatcatggtttgaaacgaggtaaagcgcaatcaaaactatcccgactgaacgactccaagttcgataacttgatctatgacatcttcacggaaattgaagagaggaaactgcatgatttgaacaagatgagtcattttgacacaatgggtaagggcgagttcaatttttattttaatgattcattatttgagtcgattaatataaacgataactgtataagtgcaagcggtatcgtgcccatggaagcgttccgggagttgcgttcacaattcgtactttactttcaaaatacgctccaccaagttcaccccacagatgcaactgcacctttaccaattcttctagaaactgtattcaatatagcaagcctaatcaacgaagttttaccactcctgttatcgccttcattaccggagcctttagaaaaggaaatcgtgtacttgaaaagtgccctgtcacatacaatcacttcaacaaggtattaccttacgtttggggacctagtaccacgtattgtgattcaatcatctatttcagaactaatttttgcgttttgcaatatcgttcagattgtcaagatcaaacccacttcaccaccacatgttgcattgcctagtgaaaagaaattggatgatggggaaactgcgatgaaaccattgaagattattgaaaaactgaaaaatgaggaagttggtaaagaagctttaggaaagggtgctggtgatctcgacggttcttcatcccccggaaaagtcagtacagtagaaccggggaattcaatggatgaatcaaaaatcaacacaccgcagccgatttccagcattagcaaaactgatgtagttgttaatggcaaatcgcatcaaataaatgaagcggatgattcctcgccatgcaatagaaagatagattcaaagttggttttaaacctaaacaatcccaaaaatccatcaacagtcaaaaataagttgtcttcgcgagatgatttgaatgtttcaagccctctcgataaggtgctaccatcaatcggtcaatctcgacaacatcaccggttgtcaccaccgaattcacacatcatcaacaagtcaccggcagaaacgacgaagcataaagagattttaagtttttcagatgtacctgaatcaccaactgcagccaggatgagacgatttaaagaaaaactacaacatttcggctctagctctggccttggtttcaggatttctacttcagatgaagacgtgaaaaattcagaagtaaagaaaagcacgcccaagattagtacaggtgaacttctagaatttgtagagggtaaaacaaccattgtggtcccaatggtccagggcattttaagcggtatccaagattctaaatctaagaattttgagggcgcaaggccgatatcagcattatgtcaagattccgtcaagttaactcccatattgaaaacgatgattgatatgactacagaggtaatgacccaacagaattctaaatcatatttgaacaagcacgctaactggatagttaaagggctaacggactgctcgaaaaggctaacaagtttatgcagtggtgtacacaccctcttaaagttcagcgataaacatttctatcaaaaattagcgggtatcctgttcgatgtggtcaaatgcgctaaggaattggttaaatgcgtggaaaaggcgagtggccgcgtagcgctgtag

SEQ ID NO: 5613 - DNA, 864 bp, Saccharomyces pastorianus
atgaggcatctcatacaactagaagccatatatgctcaaaggattgccgatccactagcgtataaagagcagcagcagatactgatgtttaggaagagagtagtgaagaaaagccctgacaatgaaaaaggccagaagaagaggcaaaaaatcgacttcagcaatgagaagccggtcgctagcgatcatggtgatgacttcgttgacagtatcccctcagcaaaagctggaactgccaagaggcttcggccctcaggtccggatgagaacagtctatctagacgaaacgaggatttgggtaagtacactctgacggtcaacgacgactctacaaaggaagacctattgaactcggagagaagagagctgactgagaaagtcaggaaagagcagtccaacgacagcaacgagctagcattgaatatgagtggcaaaaaggcccggctagctaaacagattaaccaaccgtcgaatatccggaccacggtgcttatggacttccagcctgatgtttgtaaagatttcaaacagacagggttttgtggctacggagatagttgtaaattcttacattcaagggatgatttcaagactggttggaagttaaatcaagaatggaatgtagatgatgaagactcgcggaaggacgcattggacttgggcaagatccctttcaaatgtgttatttgtaaggagaattacaagtcacctgtggtcacaaactgcgggcattttttctgtgggtcgtgctttgctatagagatgaagaaaggtaccaaatgcttcatatgtggcaaggaaacgcacggcagtgccaaagtagctgccgatttgcaaaaaatattgggcaagaggaaggtgtga

SEQ ID NO: 5614 - DNA, 3069 bp, Saccharomyces pastorianus
atgggcatagctcttttgacctcttcttctgtacttctttctagaccgcccctctctcaattggttcgtttcgcaccaatcgctctaggttccattgtaagacgctttaaaccgctcacgtgtacacctcgctactatactgcaaccccttacaggatgactaccaatttcaagacgtttgatctggagtttttaaaaccggacttggacgacagatcgtacaggttcattgagttgcccaataagttgaaggccctgttaatccaggaccctaaggctgataaagcagctgcttcgttggacgttaacatcggtgcctttgaagacccagaaaacctgcccggtttggcccatttctgcgagcatcttttgttcatgggttctgagaaatttcctgatgaaaatgaatattcgagttatctgagtaagcatggtggctcgtccaatgcctacaccgcgtcacaaaacacgaattacttctttgaagtcaaccatcaacatctgcttggtgcgttggacagattctcagggtttttctcgtgcccccttttcaagaaggagtctacagataaagaaatcaatgctgttaacagcgaaaataagaaaaacttacagaacgatatctggagaatctaccaattggacaagtctctaacgaacccgaaccacccttatcataaattttccacggggaatatcgagactttgggtgaatcgcccaaggaaaatgggctaaacatcagagatgagttgctcaaattccataaagacttttattccgccaacataatgaagctttgtgttcttggtagggaagacctagacaccttatccgaatggacctacaatctgttcaaagacgtttccaataacgaccgtgaagtgcctcactacgcagaatctattatgcaacctgaacatttacaaaaaataattcaggtcaaccctgtgaaagatctgaagaaactagaaatttcgttcactgtacctgatttggaagagcattggaaatccaagccaccaagaatattgagtcatttaatcggccatgaaggctctggttctttgttagcacatctgaaaaaattaggctgggctaatgagctgtctgctggtggacacaccgtctccaaaggaaacgctttttttgcgatagacatcgatttgactgatgatgggttgacacattatcgagatgtcattgtcttgatctttcagtatattgggatgttgaaaaattcgctaccccaaaaatggatatttaccgaactacaagatatttctaatgccactttcaagttcaagcaagccggtaacccttcttccactgtttcgtctttggcaaaactcttggaaagagattatattcctgttgataaaattttagccatgggtttattaactgaatatgagccagatttaatcactcagtacacagacgcattgatcccagaaaattctcgtgtcacgttaatttcaagaggtttagacactgattccagcgaaaagtggtacggaactaactacaagatattagactatccggaagatttgttaagggacattaagtcaccagttttaaacccggcgctgaatttaccacgtccaaatgaatttgtctcgacgaattttaaagttgataaattagatgacgtaacgccaatagatgaacctatgttattgttatccaatgggatgagcagattatggtataagaaagatgaccgattctggcaaccaagggggtatatttatttgacattcaaattgccccatacgcatgcgagtgtcatcaatagtatgctgtccactttatacatccaaatgatcaatgatgcattgaaagatctacagtatgatgctgcttgtgctgatcttcgtatttcatttgtcaagactaatcaaggtctcgatatcactgcgtccgggtttaatgaaaaactgatcgttttactaacaagattcttgcaaggagttgtctcttttgaaccgaaaaaggatcgttttgaaattttgaaggataagaccattcgtcatttgaaaaatttgttatatgaagttccctattcgcaaatgtcaaactactataactcattaataaacgaacgttcgtggtcaactgcagaaaaactggaagttttcgaaaaattgacatttgagcaactgactagcttcataccgactatctatgaaggcgtgttttttgaaactttggttcatggtaatgttaagcatgaagaagcaatggaagtggactctttgattaagtcattgattacaaataacattgataatttgcaagtctcaaacaaccgcttgagatcctatttacttccaaagggtaaaagctttagatttgaaacagatttgaaagatccgaagaatgttaactcttgtattcaacatgtcacacaattggatgtttattcggaggagctgtctgccttgagtggactgttcgcacagttgattcatgagccatgttttgatactttaaggacaaaagagcaattgggctatgttgttttcagttcgagcttgaacaaccacggtacggcaaatatcaggatcttaattcaatcagaacataccaccccttacttagagtggagaataaataacttttatgaaacatttggtcaaactttgaaagatatgacgcaggaagactttgacaagcataaagaagcattatgcaacagtctattgcagaaattcaaaaacatgagtgaagaaagcgccagatatacagcagcgatttatttaggtgactacaatttcactcatcgtcaaaagaaggctaagctagttgccgatatcacaaagcaacaaataatagacttctatgaaagttacataatgggtgagaacgcatcaaaattaattcttcatttgaagtcacaagtggaaaacaaagagctcgatgaaagtgaattggacgccgctaaatatccaagtggccagttgatcgaagatgttggttcattcaaatcgacactatttgttgctcctgttcgtcaaccaatgaaaaattttgaggttactgcacctgctcaagctgaaaagtag

SEQ ID NO: 5615 - DNA, 5778 bp, Saccharomyces pastorianus
atgtcccaagaggattcgcagcgctggctgcctacggatcaactaatatatggtgtgcttgtaaaatcttttcttcccttacaaaggcatcctaaattagtgtatgcgaatagcaattatgcaaacgtgtatgttggtgccgaaatttacgtcttcgaagaatctgtggatgggaagtggtgtagagcgtaccaatgtttaaggccctttcctgaagaattcatatcaaacatgaattcttcaaatgatgttttacccgatgtaaaaccaaaggtggtgatacttcctaggaaatttatacatttcaatcctaaaaaagccgttagtactatgccatttttcaaagcaccaagcgccgaggattttaaacccttgataagtaaagaatgtgaatcgccttccttttgtgacagcctttatgtcagttcacctgatgaaatatccactggtaaaccgagaaaagtaccgagacctccttttcccttctttagataccaaaataggccctttaaagatgaaatgggtcccatactatctcttatttcttcccatgtttattcgatgtattcaattggtgagtttgctatatatagaaaaatgataaaattgtattatgacctggatatcatacgatttaggttgtcaatggatttgaccacggaaagggagaaagttaatctcataagagcagcaacctctttacgaactaagattgcaaaatttttgtcttctacacataagaaaaataaacttctctctaattctaccccaaggaaccctgatccatatggttttgaaggaatatttgctagagatatcaataccggtgaactgcttacatatgacatcgaaaaactaagaactctagtatcatcttcgatgttttgcggcttgactaacaacttccctatgctaaatgacacagatttagagtgtctgccgtcggccaatgaaatatttggtacagttagatcaagtattctggtcaacttgaaagatctggcatgggatccatccatatcaaacccgaattaccaagagctttctatttgtgtatatttaagaactaaagaggaggttcttaccgagtcattcaccatgacaaaatcgtccaatatggagtatgcactggatgaaattcccgcaatgctattcaagaacatcctagagacgataatacaaaaacataaaatatacttagtggtagtcctgaaggaaacagtggcaatttcggctagtaatcctccagaaatttcatcatatgatgtatccacgcatgaatcaagcgtacattatccgttccctcctactaattcacctgctgagaataagatagattatgtgaaaaagggcttagctgcgggagtgatcgacatatctccagttttcaaattttacaatggtccggctgtctcaaataaagctcagaggttcaacctttatctttattgttctgattctttggagtccactcaaagttataacctttcaaacgatgacgacttaggttggggtgatctcacaaagaggatcattgatgattcatctgagggaatctctgttaatcctagagcagtttctttatcggtaacagttaaggaaattataggtaaagaagatggagacaaattacattcgacgtccctagtacccataagaactattcctacttatttttacgacaccatgtttagtcaatcagagagaatctatttgaatttggggagagtgtcgctttgtggactcgcaacatcagatacgaccatcgagaacgttactgttcaaatatcttgtagaaacaaaaatgtaaagttttgcaaaaacagacttgaagagagaacggggaactggaagtttgtttcagtgcatccaaacgaaagcattggagaagcaataagaatcgaaggtgtcgagaatatgagtgaggatgaaacattaagggtacttgtgtatttgaatgggttcttaatggcaaaatcaaacatccatatcaagaaaaaggatgaaatattagaatatagaaagggtactatattccagataatgtcatctcgttcagtccccctaattcatctagagctcgaagcgtcttattttggtcgaaaatataatgtaaatccagccattgccaaatttctggtccttccaatcaaagatgttgaatttgaccaaaaactcaaaaaaaatttcgcgattgtattaagagatttaaacaatatttcatttaatgacctattgaaacattttgactccattttggcgcactatttgatgctcctcgagttcgttgatagagcctgtgataaacggggtgttccttcaagtttacctaatgttgtgtttagtgagtttgtgaaatttctagatttgatgttaacgcaccaagaaagttcgagatattggtttaatagactgtacaaaatggttttatcgagagagctagaatgtcctaatgttgcaccgatactaataaaacacatgaccaacatctttgacagaagccattccacttggactagaacaggaacggcagtgtgtcggactattctataccttatggtgttagtaattgggtcatctcactcagacgaaatacctgattttaatcgattttttcaaagtttacacaattttttgatgcttagcgatgattcaattatggcaaatcagatcttattaatcgaggcattccctgccatggtacaaacaatgactaaccattgtgatgcagaggacttggttcgttttgcgattggattatttgaatgttgtcaagaaaaggaaaaggctcaaaaaatatattccaaatcactttcacctagagaagaagaatatttgaatgcaaaatttacttgtctttcgaagataattaaaaaaaaagttcttaagaaatatttactcaggacggaaactgtgaataagctgaggttacggttcttatctaaatgtcttgagtgggtgcttataccgtatgctccagatgaggacaaacgctttcatgtagaatccttgcggctagctaatacagttttaattacaataattgaagactacaaaattgacatgcttcagcgaaacttaataagattattaccatatttatgtaggacctttactcatttgagaaggtactgtaagaaagcacgtctaatgcggcctcggagagtctttagcatgcttttccccaatgttatgccgtgtaattatattccagtcgattcgattgtgaatgatgagattgttgtagaggttcttttagaattggccattataatatgtgaaataacgaaaattgcatcatgtacatttgcttcgtaccaatcatttgaggaaataacaaacttgtgcgataaagactttcttttccaatcgaaattctacttacgaaatttatcaaatgaacatgtttacacgataacgaatacaatttacctactttttaagcaggagtggttcccagggatgaaatggcttggtgtatctgcattgttaggaagatcgtccttagtgttgcttaatttgtgcaagaattacatcatagaaaataattcaccttcctctttgaacgggtctgaggaacaggttgatatgcgactttgggcagaatactccaaagcagtactactagtttcaaatcataaaagcgcctccctcacaaaattagctataacgccacgcaaggccgtttatttgatatcaggggacttgaaaaaaacttcagcatatatactaaacgactgttgggatgctttagctactggacattataatgccagttacgccaaaaaatttggtttaggggccttgagtgattgtcaatttgaacttttcgttcacaatcagtttctaatacgtgagatttttatttttgccttccatagacacatagatgctactagaatatgttgcaaaatactatggggactaggattaaacttttggagaatatttgggtctctacaaccagctttaaatgcatgcattccggagctattcagtgcataccaaattgggaaacttcatttaaatgattacgaattggagagatttgtctcttgtctattttttatgatacatattccagattcagacacattttttccagcatgcatgaacgttttaaaagatttgcttggttttttacacattgtaaatgaactttacaagattcctaatcaagaagaatttgatgacgatcgaacagcacgttatatagaaatgttcgagtatctgttagaggccaacaggccagaattgtttcataaaatgatttacgatttgtttgtccactttgttcagaaaaaggattttgttcaagccgctttaagtctggaacttttggcaggtacatacgcatgggattctaatgacacactggaagcgataccatttccgccgctgccagaacaatcttcgtttgaaagaaaggaatatttgcttaaggaatctgcacgaaatttttccagaggtcaaaaactagaaaaagctttagctgtatacaaggacttgattaaggcctatgatgagatcaactatgacttaaatggtttggcttttgtacacgaccaaatagctggtatttacaccagactgcaatctattgatagactggttccaacgtatttcaaaatttcgtttatgggatttgggttcccgaaatctctaagaaataaatcgtttattttcgaaggccttccatttgaacacattacgtccatgcacgataggcttttaagaagttatcacggatctaatatagtgcactctcaagaagaaatagatatgctattgatgaaccctccactggggaaatacatccatgttgcttccgtagaaccgcgtttgagcatatccgatgactacaatagtagtgacaaaaaaagctctattaataacaaagtacgcatgtacattgaaaacaggaacttgaggaccttcagtaattctcgacgcttaccaggagcaaaaggcgttactgacctgtgggtagaagagtatacctatcatactacaaacacgttcccaactttgatgaatagatcagaagttgtcaaagttactaaaaacaaactttcaccgctcgaaaatgctatacgttccctagaagttaagatacaggaattatatgggcttgaaaacatgtgccataaaactctaaaagatcacggagatgtgaccaatttatttagcgagctttcgacaaatattaccgggacaatatcagccccagttaatggaggcatatcacaatacaaggctttcctcgaaccgtctacttctaaacaatttagtgcggatgatctagcaaggctaacatcagcttttgatgaacttgttgcagtattaggtcgctgtttgtcgctgcatgctgagttattaccttctaaggaactaaaaccatcacatgagcttttagtgcggcttttcgaagagaactttgcagaggaaatagaaagatacagccgcgccaacgatgaagccatcgctaccagggacaagaaggtgaaggctcgtatactttcttacaaaagtacttccagaaggtcctgtctttctggaagggatcatcataccatagggtctaatcacagccagtttttccaagatcagagtgattcctttggcccgaacagcttactttttgggaaatatttaacaagaacagtatctcattcgtctactacgagtagcataaataaaagtggaattgcttccgcaaatggaagctcctctttaacagggtcacatccgaacaccagtacagagccccagcaataa

SEQ ID NO: 5616 - DNA, 618 bp, Saccharomyces pastorianus
atggaacttaaagaacaaataccaaatgacctcctacaactgataaaaagttccaagtacgtccatgtagcgacatgttcatcaaagtgtataccatcggtttccttgatgcattatatattcgtttcatcagcagaaacttttcataaacacgagtatggtatagattcagatcgtaatgattacattatatttacggctttcgaaaaatcagtaaagtttcggaatgttatagagaacccaaatgtcgctttattatttcatgattggattactgctaaaaacttaacccttcgaaagaaaagtatacatgacgagaaatgtttctctggacaaccaggatctgcaaagttgaacgattttttacgagatttaaaccaaaatgaactgaatcaagtaagtgccaccattaatggtattgcggatatagtcgaccctgatagtgaagaatccacgtactataggcggttattattaaaagctaacccagatgcggatatttttattctgggcgaagagactgccataattaaagtcagaattcacaaaattaaagtgtctgatatggaaaataatacatcagtttatggtcaaaccgcaaaactcggttcaacgtag

SEQ ID NO: 5617 - DNA, 3399 bp, Saccharomyces pastorianus
atgctcactcttttgcaacagtttcaattggttttagttttgttttgcttggtacttatgatacgatggtcgatagctgattttcttttgggatttcttttcagcatcttcatatttggttacctcgtactcttcagatctttacctgacccaccagagcttcagccaaaatttgttggccttgtgcctgaaaagccaaatgctgtgaaggtagagagagaattgagatcagctgaagaattgataagtgaagggaatgcgcaaattggtaaagaattggagagtattgttgacttgatcattaaggacttcgtagagtcctggttcgcgaaaatcgaccgaagtgctgatgctgaatttctgaaagtcatgaagtggaaatttctacagacgctcctagtagtaaaggggaaattaatgaagaacgatagtgccagtttaattgttttgaaactgttacctatattcaataaacacttcagtactttctgtgacgcaagagaagctgtattgagcgatttgactcttgaaagacaaaaagcagctaatattgatctacaaattgctgtagaatttaataaaaactacaagttacataaatcattatcattgaaacccaatgctcttgagaacgaaattgaagagtccataaggaaatctgtgattggacttctcccatatattttcgataacaatgagttggattcactgtttgttttcacgttaatgacagaagtgctcactacatgcattatttccccactaatcatcaaacttagcgatccagataattggaacttgaaaattgttagcatttcacagaactactttgaagagaaaaataaagttcataaaataagaagaatgctaagcaaagaattacaagaccataggaatgcgatcaatgacgtcacaaataaaaacgtacgagattcctccaacgaaaagttggaactcagtgttaattatacggggaaacagttcgagcattacctcaaccggcttgactctatgacagatataagtgacatcaagtatgttgcattctcattagctctcaagatataccaattgaaagatattgagcatttaagcaaagaagacttgaaatacaagaaacgtttattactctccttgaatttaattgaatcaaaatcatcatattccgattcgggaaccaaaaccgaaaacgaaagaactgtaagggacagcaattactcagacttgaatatggatagtagaatagttctaaaggagatgaatttattttttagcgcgatcacgttaagagaaattatagatgacagcaagtgcctcccatttttcaagtcgtttttaggaagtgtttctaaatcccagggtagcacgtttttagagtattcgcaaacaattgagtcattcaaaaatcccttagaggatgccacatctgaggatataatttctggatattctggaattaacaatattcagctacaagaaatttcttcgaaattttttcaaaacgataacttacaaaatatgaaattgctggatgagggattggtaagaaacgtgatccttttcacaggttctttgcatatgaataacgacgaagagacatttattctagctcgaaaaagtgttcttttgctacaagcagaagctataaaatatctagacgataagcttttaccattatttaagagttcgcctttcttcctcaaaatgttatcaacaccagacattatttcgactgacatatacgttcattttctaaccatgagtagcagtgataacaacgcaaaacaaaacaaagctataagggagactacaaagatagattttatgaaccctgttagaatttttgcaaaccctggcattacagacgctttagacaatatagtaaatggatctgatttaaagctagataaagcaaaaaaaagcgcaaacccacaatattcacaattgtttggatcagataacaataatatcttcaaagataaactctttgacgatgacaatgacaacacctctgaattttacctcgccgaggatcagttggatttaccgcatagtgtaggaaaatctagcacctccagtaaaaattgggattcgatccatagtcaacactatggctcaaataattttagggataatatagcaagtttaactatctcaattgaccaaattgagaaagaactagaattgttaaggcatctaattctgaaggcagatttaaccaataatcaaacgcagttaaaaattttgaaaaaatcacaaaggaccttattaaaagaactagaaatgaaagagctcctgaaacagcaatatatggttcaagaaaatgctaacagtttgttcagaaagactaaaatttacatcaggtcttactttagtgagggttctagtaaaagtctaaccgaaataacgtactatatcataaacattcatcattttaataacgggcaagtaagttcatgggatatggcaagaagatttaatgaatttttcgatttgaacgcatacttgaaaaaaaattataagcctttgatgaaacaattgcaagatctgtttccatcaaaagtaaaaatgtcgttgaaacatcacgtcacaaagacattacttcatgaagaaagaaagcaaaagctggaaaaatatttgagagagttgctgtctatttctgaaatatgccgagatgatatttttagaagatttttaactgatcccgcttcattcagactagacaaagactatatgcatgatgatgtattggaagaacggcctcatgagttgaatagcagtagtaatagtacgagtaacagcagctctgttgtagatctacaaaccagcaaagacgacgaagaattgaatttttacgaagatgaaagacacttttttactgattctgggtatcctttctattcgcaaaacaaatcttttgttaagcaaatatgcgatctatttatttcattattccaactgaataaagcgaattctggctggttaagaggcagagctataatcactgttttacagcaacttcttggcagtaccatcgaaaaatacataaaggtcagtattcagaaattgaggtcagaggaccaaacgcttgaagccataatcggatttaagaatatgctatggggtgataatggcttgttagaaaggaaaagaaatgaaacaacagagccagtaagaacgaaaggtgaaaagttaaggacagaaaaggatgctttaacgagccttcaaaggcttttcgccgagatttgtgggcgtgtagtcggtctaagagactcccatgaagctgctggtcgagttcatgccatgctccaaaatccttacttaaatgccagtttattattggaggcgcttgatgcagttttattagatatcatatgtactgatgaacatgaaaactaa

SEQ ID NO: 5618 - DNA, 195 bp, Saccharomyces pastorianus
atgagaaattccggacgcggtaactatagcaataacggtggtatgaacggagcttcaaggggaagaggatccggtagaggaagaggattcggtagaggtacgtacaacaatcgcggcggtcgtggcggacgtggcaacaatggcggctactccaattacaactctaattcaacagatacgtctcaacgatcatga

SEQ ID NO: 5619 - DNA, 1827 bp, Saccharomyces pastorianus
  modified_base (1509)..(1542): a, c, g, t, unknown, or other
atggtcttgcagtgttctggatcctctctaatcagccgggttttttttaacgaagatggaaaggcacgggatgtctatgcatgtttctatccaggaacgaataacaatacgtctaataataatggtactacgaagaaaatgtctctcgaagagtttctggggaatgacactctaggcgagtcggtatgggacgaggaggacattaacttggatgctataagcaacaccacgaatatcgatatcctgaaacaaaccaaggctggcggcgagcatcaacgcgatggccatcagcaaggcccgcatggcagtcaagggcctatgggcagatcgcgtttccccaattctgcatccttcggtggtggaaacatgggagatttcgcaaaccatcaccacccactgcagcagcagcagcagcagcagggccccccttacattgttaagttctccgatttaccaccgagattttccaacttcgacattgaagatcttttccaggcaaagtttaccaagtttatcaagttcaaattgttttgggaggtgaacaagaaccctagtatttcgactttgaagtcaggctcggtctttgaccagaatttcaaacatgactcgaaagtggcatttgtcgaattgtattcatctcgtgatatggacaagattttgaactattggactactccgttgaaggaaatttaccatatcactatagcgcccgcggaatttgatgatttcaaagactacagtgcaaaggtgaaattgttgacagacctcaaagacgatgccggcaaaccattcattgtcaagacccagagatcaaaatccaatccttttggaagcgccaggcccgttgatacacagtccaagattttggacatcgaagagaaaatggaaaatttacacgtggaagatacaacaactttgagagcatctttggtctccgacagtgatggcaagtccttggcaacaccagctcctacaacggcagcaacagcaggcggcaagatcacaatcttgaaaaaacagccacttacgggcgaagaatcaacttctacaaccccgactccaaaacctttgagctattcggaagtggtggagagatctgtggtcaacgaaacttcgaagaaaagtactcccttaagcaagattggtactccagcttcagatttacaatccaccgataaatcagacaactttgaaggggacgatagacaaggttctgagaaatacgaaaatgataaaatccaatcggacgcctcaggtggtaatggcatagatgcggatactggtaaacaatttactttcaagaacgtggaaagagaccaaaacacaggtagaaccaagtacaacggtaaccaaaataatagtaataatggcaatttcagaggaaataacagatatcgcggaggtgctaacagcggcaattatagaggtggtaacagtaatcgtggtaatcgtggtgggaatcgcggtggtaattcttacaacaacaataataacactggtgatgatgannnnnnnnnnnnnnnnnnnnnnnnnnnnnnnnnnggctcaagatatcatgatcgacagaacaatggagatggagctgtgaactcagagtcgacggcagatgccacagggcacaacagcaacgacttttcaaactcagtatccaatacacaacaatactccatcttcaaaccagctagcgggttccttggccaaagtaataatgattctatgagaaattccggacgcggtaactatagcaataacggtggtatgaacggagcttcaaggggaagacgatccggtagaggaagaggattcaataaaagtacgaacaacaaa

SEQ ID NO: 5620 - DNA, 777 bp, Saccharomyces pastorianus
atgtttcagcggtttttgagcatttgcatagacgagttcccggagaccctcgattatacgggaagggacgaaaatggcaattccaccactacagtcctgcacagacagatgatgtacgtgcccgaagatgacgacgacagcattgacacactcgggtgcatgaactacacgttgcacaaggccgactgcgaccagacactgcactcgtgcgtgcagctggtggacgagcacctgggcgccaagtaccgccgggcgtcgcgcaccatgtacggcaaccggctgccgtggaaggcgaacaagctcgcggagatgaaaagcgccggtttgatatatgtctgttactggggcaacgacgtgcaaggcgtgcgagcgctgggcgcgtttgtctccttcatgtacacggaggagacggggctcgtcgagggtgatgccgcgcacgaggtgagcgtgcccgtgatctacctctacgaggtgcacgtggcctgcgcgcaccgcgggcgcaggctcggccggcggctgctgacaaactcactgtgcgagggcgtggcccggcgcgtccggcgcatgtgcgacgactttttcggcgtcgcactcaccgtgtttggcgacaacacacgtgcgcggcggttgtatgagtcgctcgagtttcagcgtgcacccgggtcacccgtaccgatagccgcacctccgccccgtgtgacgcgacgcggccacggggcccgggcccttgtggcgcgcgatcccctctattacgtatattgcctgcacctggcgtaa

SEQ ID NO: 5621 - DNA, 1791 bp, Saccharomyces pastorianus
atggcatatttggaatacacgttattgaacaaatctaaaaagagtaggaaaacagactggataagctgttacctagcaaattgtcccatatccgagaattcccaggaaattcccaatgtgtttcaaattcaatcttttttggctccagttacgacgactgacacgattaaattcataagacatttgaaacagtattgtgagcagcatgctcgtgatagcccaactgaagattttcagtctatgattcaatgtctcctggttgcttcattggatatcaagcaaaaatttcaagcaaggaagattttaaagcaaatagttgtattcacggataatctagatgaactagatatcacagacgaagagataaatgtactggttgaagaactaaacgcaagaattgttttgattgactgcaggaaagatagccaagatgataggaaacaatcaaattggctgaagttagtagaagccattccagattcgaaagtatacactattaatgagcttcttattgaaatcacttctcctgcgacgagtatagttaaaccggtaagaattttttcaggcgagcttaggttgggagctgatatattgacgacacaaacatcgaatccaaagggtagcgtggaggatgcaaattgtttgtgcttcagagtagaggcatttcccgccactaaggcaatctctggactcaatcgaaaaaccgttattcagactgaagattccaacaagcaagtaaaatacttaggggttaaatccataattgaatatgaaattcataatgaagaaaataacaagagcgccattgcgaatgatgaggcggagccttcttacacttcagcaatcatctctaaagattcggtaacaaaggcgtaccgttatggtgcagattatgtagtgttgccatctgttctagtcgaacagactgtatatgaaacatttcccgggatggatttaagagggtttctggatagagaggctttgccaagatattatttaacatctgagtcttctttcatagtggcagatacaagacttggctgtctatctgacgcaatggcattcagtgccctagtggatgttatgttagagaataggaaggttgctgttgcaagatacgtaagcagaaaagacagtgaagtgaccatgtgcgccctgtgtccagttttaatcgagcaagaagataacgaaagaaaagtcgttagaagccttatttcgtgtagattaccatttgcagaagatgaacgagtaactgatttcccaaaactactgaataggacaactacatctggggtgccgttaaaaaatgaaacagatgaggaccagatcgatgaccttatgggtcagtttgtggagtcaatggacacagacgaactaccggaaatcccatcctataactactatcaatccataaacaacgtgacgacagacaccactctccctcttcccgctttgaaaaagggacaagacgcaaacaaagacgatccgcttagaatacccacagtgttcatttatagacaacagcaagtgttattggagtggattcaccaattgatgatcaatgactcgaaagaatttcagatcccagaactgccggactcactgagagagaaaatcagcccctatacgcacaagaaattcgatagcaaggaattagcgaagattcttcgaatcaagaaatcggacaaactaaaccttacatcagacttaaaggatcaattggaaagggaaaaaattccagacttggaaacactattgaagcgtggagagcaagacaacaaggagcgttag

SEQ ID NO: 5622 - DNA, 135 bp, Saccharomyces pastorianus
atgtcaagcgaatcaacaactttcatcgtggatgtgtcaccatcaatgatcacaaatgaccatgtctctaaatctatgggctatttggaatacccttctttgaccaatcttaaagagtacgacaccgatggataa

SEQ ID NO: 5623 - DNA, 363 bp, Saccharomyces pastorianus
atgcctcaatgcgctatcctaataactccatggcacaacctaagaaaaaataaggctatgaatcctggtgaagtatcgtttaaatctctgaggcaatgcaggaaaatagaatgcggaacaagagataacaaaacactgaataggttaaccaaaacgagggtagaactattcgataatgtagaggccacacttaatgaggcaaagaaaaccaaaaatggtgacttttttgtcaaacttatagagtctaatagacagaatcttattggggaagaaaagcaaaggaagttagcgaaaaagaatcaaaagaagaagagcaaacaacatgacgacggctttcttgatgatagtcctttaacagcttaa

SEQ ID NO: 5624 - DNA, 315 bp, Saccharomyces pastorianus
atggtttatttttacgaatcaaaaccaacggagtattcaataccctaccaaattattaccggtagggacaaatttgaaaacgacctattaatcaaatggagttacaaagagttgaattatgtttggtttcatgctgataagtattcgagcggccatatttatctaaagctacatgaaaacgaaaaaacaatcgatgatgtaccgcacgaagtatacatgactgcttaccgctatgcaaatctgaatctattcaaggaaataaatgcctcaatgcgctatcctaataactccatggcacaacctaagaaaaaataa

SEQ ID NO: 5625 - DNA, 1269 bp, Saccharomyces pastorianus
atgtacgagtactgttcagttataatcaagaaatattctagatacacgattccctctctcgccccaaaagggttcagttccgttcttgaaccccctcatatagacaaatggcagcatctttccgttaactgtactctccaattcaaggttttattagaggattccggacaagttgctctccaagttattcttaataactcgacttttttggaacatattcggctgccgctagggagcaatcatgattcgatacaattctcatgcaaatgccctataatttcctgtaaatatatatctgaagagtttggacccaaagtgttgaaaaggttccagataaacttatcaaatgaaatggatttcaaccgaattgtcatttctttgaaaaatttaagctttattgtgaagaccgccaaaacctccattgctcgaaacacaatgataaaccagacatcagatttcagtaacagtaaaaaaggtaattttaatgaaaacaataatgctggcacttacagaaactccagtgtgcagtttcagacacagaatatggtcatggatttcagtcaaatttatcaggaaaagtgcgcaagggaactaaataactgttcaaatatcacatttccaatgactaaccttcctatgacacagcaaaattttccaacaccagaggcaaatgtagagcatttttcacaagaccttaacacgccatcggctacacaaaccattccaattgcaccagaaccattaagtgtaaaacttttggaagcttctccacctttatcgaataaatcaagacattctcctactacaaagaaagaaaacaggaatacagctatctcttttgatctactttcaaaaaaaggcgctatcttgcataatggtaatgatacattgaatgtggctgatttaccgaagaaaaggcagagcacagaagacctggtacaaattcgaagctctgctaatgtagttacaaccctaggaacatcatgcaatctggtaaaaaagaacgcgacaaagcaaaataaggaaaaggtcgataataagttaagtgactcccaaaacgtagcgcatacaaacgaataccagaaaaagaaagaaattcctttatgtggcccaattaatggattggagacaaaaatgaccttgatccaagaagaaatgatggctgcaaaaaagactagcagagatccgccaagaaaaatatctaagcggctaataaaagaaaagttaaaggacgaagagtttatgaaatgggtatgtacgaagatttga

SEQ ID NO: 5626 - DNA, 1185 bp, Saccharomyces pastorianus
atggtccctcatattccagtatcaaaccctgtagaaaattctcatccaactggaataatgtcttcaatacctcctacaaatcagcagttcgcttcacaaaatcagccatcaatgttccctgatcaacagcgattttttcagtatcaagtacaacatcaaaaccaaggacaagcgccatctttccaacaaaatagatctgctaggtttgatgacacaaacgcaatgaaattatttcttcaacaacaagcgttgcagcagaattcactacaacaaaattctggaaacccaaattaccagccaaatgcgcgaagtaataccggtgaagagaacaccctcatgaataataccgttacgaattataatagtatgttgcaagaacgtatacgggcacgattcaataaaatgaaggcaattcctcagcaaataaatgaccagaatactgctgcaagcccagttattaacgacctaacttctcaacagcaatatatgcacatgatgatgcaaagattggctactaatcaacaattacagaatggcggttttccttccgaggttggtcgtataccgcccaataacaacaacgtctcattgcaaggaggaactatgggtccccctggtatggacaatacggccatacgacagactagccagcttggtccaaaccccatggttaatatgcagcctttatatcaaaatgctacttccggaatgcatgcgtacgcaccgcaacaacagtttcatgtgccacagcagtacaaagctaatgcttctataccacataatgatcctactgtcggtttccctccatcgcatagtaacagtaacacaaccacgatttcacaatcgttttcgaaacatacctcaagttctagcgcgactcctaatataactgttgctacacaaccaaaacggaagcagcgagtaagtaagccgaaagttaaggaatcaaggaaaagtactgccgcgcaaaaaacctctaaatctaagaaaatcgagcaaactggtgaactggcaaatgctaacttcattaacgttgtttctaaggctgaaaatagtggaaaagatatcacaaaaacgcacaatgccgactcacaccagcagtcccacggttcctttactatagatgcagaaaattttgacttcttcaacatgggtgatttttctcccgatttaatggacggttag

SEQ ID NO: 5627 - DNA, 1239 bp, Saccharomyces pastorianus
atggataaaacatccaatataaatacaaatgagcgctctgatagtattgaattcggttcagccccaaataataaaggcttgaatggccacaatcccgtgcaacttgacggagattctccagtgtttgtttcggatgcaatggcaaagaattccaagcaattactatacgcccatatctataattacttgattaaaaacaattactggaattctgccacaaaattcttaagcgaagcagatcttccactatcgagaatgaacgggtcccccttgggtcaaacaaatgatctgaattcgaatttaaagcatggcttaatgaatgttgcttataaaggtgatattgttggcaaggatggattattaccctcgaaaatgctgatggatgccaaagacacgtttttactggaatggtgggaaattttccaatcgttatttaacggtgatctcgaatccggccgcgaccagaaacacgacattttaagagagagaatagttccaattctaccagttaatgcgaaagctaatatttccccgcagttctcgaatatcccgccaaatatagtcccgccaactcagaatagcttctcagtaacggaggaaaactttagactcaacgatggaaataacgctaacttgaatgaccaagctaatcgaaatgtgtcggaaagatttatatcaaaaaccgccggtaattacgataagaccaagaacaggaactttgcagtcgataatacaaataacgagattacagcgcagcaatacgcagttttcaaccttcaaggtcattttaatgatttacattcaccaccaccacaaccgcaaccgcaaccgcaaccgcaaccgcaaccgcaaccgcaaccgcaaccgcaaccgcaaccgcaaccgcaaccgcaaccgcagccgcaaccgcaatcagaacctcaacctcaaccacaaccacaaccacaactgcaaccgcaaccccaatctcaaccaccacaaccacaaccacaactgcaaccgcaaccccaatctcaaccaccacaaccacaatctcaatctcaatcccaaccccaatctcaaccaccacagcctccaacacaaccccaatcgcaacagcaacagcaacaacaactgcaacaactgcaacagctgcaacaacaacaacatcaacaacagcagcaacaacagcaaccccaatcgcaacagcaacaacaacaacagctgcaacaattgcaacagcaacaactgcaacagtag

SEQ ID NO: 5628 - DNA, 624 bp, Saccharomyces pastorianus
atgtccagttttgtttatgtcccctcagaggtgttaaagacaagattacagctgcaaggacggttcaacaattctttttttcaatctggttataattattcaaatttaaggaatgccataaagacagtaatcaaagaggaaggtgtcccctctcttttcttcggttacaaagctactttggctagagacctaccgtttagtgcattacagtttgcgttctacgaaaagttcaggcaactagccttcaagattgaaaacaaagacggtaaagacgaggagttgtctatctccaacgaaatattgactggtgcatgtgcaggcgggctggcagggataataactacgccaatggatgtcgtcaaaaccagagtacaaactcaacaaccgccaagcgcgagcaataaagcatattcggtgtcgcatccacacgtcacgaacggtagacccgtggcactttcgaactctattttattgagcctacggacagtttaccaatctgagggagcactaggcttcttcagcggcgtgggccctagattcgtttggacaagtgttcaaagtagtataatgttgctcctgtaccagatgacgctgcggggattgggcaacacattcaccaattga

SEQ ID NO: 5629 - DNA, 591 bp, Saccharomyces pastorianus
atgaactcatggaacctgagttcttcaataccgatagtacatacacctcatgaccatccaccagcacctgaagggaaagcagataaaccaaatagtaaccaaggagatgacttgccacacgaaaaaacgaccgattcggagggcggattaagccccatatggcattgcgtcatttctggtgggattggtgggataataggagattctgcgatgcattcactagatacagtcaaaactagacaacaaggtgcgccgaatgttaaaaaatacagaaatatgatctctgcatatcgtaccatttggttcgaagagggtgttagaagaggattatacggtggatacatggctgccatgttaggctcgttcccatccgcggcaatcttctttgggacctacgaatataccaagaggaccatgatcgaagattggcatattaacgacactatcacacacttaagtgcgggatttctgggtgattttatttccagttttgtttatgtccagttttgtttatgtcccctcagaggtgttaaagacaagattacagctgcaaggacggttcaacaattctttttttcaatctggttataa

SEQ ID NO: 5630 - DNA, 1116 bp, Saccharomyces pastorianus
atgattgatccagagtattatctaaaaaataagaatgtagaagacataactgttgtttctgattttgaagttttggctacttttagatacgatcctggttttacacgctgtttatcttcaaaaaacaatatatttgagtgccctgctgttgaattgggtttaagagacgatgaaatcaagcaacagattatcaaggaggactattcgtgttatttgcgagtaaacgaggctagttccggtgcagaccttctcaaagatattcaatctcctaatgtctggaagcagtgctgcaaagttattgagtgctatcggaaaccagaaattttacaggttatttatgagagatttttcttgttagaagaacagtaccaaagactaaggttagctttatctttctttagaattgatttgaatatatctctacatgactttttcaagttactaattgaaactctggttgattgtaaagaaggtaccgtagaatacttcgaaaaagtgcaaagtatgatcagtgaaaaacaatgctacaaaatgcgggttcttgtttctaaggtagggagtattcgaatggaggcagtgccattacctatgacgcctatatttgaactgaccaaaagctgtgacaacgcttccaactattttattgaagcaatgctaaacggatttttggatcgtggctcaataaattgggacgtcgttattgcatctgaaccaataaataagtccgttttcaccagttttaaaacaacatcaaggggtcattacactagtgcaagaactcacatgcaaaccgccattaataaggtgaaagggacggaaccatcttcccctgtctctcagtgtgagattttactttctaataaatctggacaattgatggaaggttcgataacgaacgtggcaataattcgtagagactttaacggtaacaagaaatatgtgacaccaaaattgacaagtgggtgtctatgtggtacaatgcgtcattatttattaaggctcggtcttatcgaagaagacgatatagagatagaaaagttggctgttggtgacgaggtgctactcttcaacggtgttatgggatgtataaggggaacaattagaataaaaacttaa

SEQ ID NO: 5631 - DNA, 1554 bp, Saccharomyces pastorianus
atggaatggtctgtattgttaaattttatgaaaagactgttgctatcaacttcgaataataccaagaatgccgttatactaaattaccaaacactattgaaagaaatcttaaatactaacaatgttccacctggtatcttaaaggactgttgcgagatattcaccgagtatgacatcacgtatagcgacctctcaatcagtgcttccaacaaaactgaatacgattgcatatacgaactaatcactgggtttccctccctctacaaattagttttcgaatatgatgcaatgacggatgaatttgtggaaaaagtactgcttctgtttaattctgctataaaatatcctcttttgcctgagttcgtccaagataaaacgaagccctcttctatgcaaaaggccatattgtctggtcttgacatctttgcgaccaaagatttcaaagataccgaaattttgattcttctgcaattaagtacgatatcagtattagcttttgatactagggaaaaaatagcgaacaaacttggaccaaaattgcccaaatcgtcacttaatagactacctacttttgaggcaatcagttatatggcatgcacaaacttaagagctaaagtagcaaagatagttcagtttgatgtatcaacattgaaagcaaagcacgttttaagaatactgaaaaacttgactgaaatcatcaaacggaagtctctcattgcagggtcagctaatgatgaaattcctatatgggttcttgcttccaattgcttcagtgatttatcgagcaaaattttcaaatcactccaaggagatgcggggaatcaacttaaggataacttttgtgatttattcataaatgtaatcaccactacattacaaagaattaacccagaaattgataaccaaactgagatagatgatttgaatgaatactctaaatatcgggagatcttcttaggcaataaaatcattgagcttttcagtgaaaggcagttagacatatttattagtgctgtttggaactgctcgtttttgtacgaatttgatgaattggaaaatgctctaatgagaggttgtgatacactagccgagttttcatccaagttatctgcgtttgatttttcaaacttatttggatctaccactaatcctccatttctgaccaagtacaaatgttctttagaatgtttacaagatttggtaaagtttatgctaaactcaaacgaaaaattgagaaagttaacggcaccttacctctctgctaggatagccctagttctcaggagatatatatcagatgaatacttgattgggcgtgcacccataccaaaactgcgcaagattgaactcactactttgttaaatggattgtgcgagatattcagggttattttaagtaaagattcggccctagcgaacaaacaaattggggttgaaaatttagaaaggttaggcccattgattttaagaacaattccggtgtctcacaagatggatggattacaagataaagttttggaactctcgcttgatttcaccaaactagtaatctag

SEQ ID NO: 5632 - DNA, 2331 bp, Saccharomyces pastorianus
atgactatgaacactgggggatttacctccatgcaaaagcaactcgaagcagaattgcgttcactatcgtccgaatcaaaaagaaggaattcggccattcgccatgctagtgataaatccgtcgagatcctaaagagggtacataatttcgatgagttagaaaggcatccggattttgtgctgcctttcatactggcgtgccagtcgagaaatgccaagatgacgacactggctatgcaatgcttgcaaggactgtcaaccgtcccatccattcccaggagccggctgtctgaaatcctggatgcttttatagaggccacccatcttgccatggaaattcaactaaaagtcttacaagtggtgccaatttttttcaagacgtacggaaagtttatctatggtccgctttgtaagaaattgctgctgtgctgctcaaatctgctacacgtacccaataaagcacccgtagtggtaggtactgcaagtgcaactttacaacaactcattgatgaaatatttgatagactttccattgaatctgttgttgacgataagcagttcgaagtcctgataagtaacaatgaaacaaccaaagttaacgtttatagatacgatgctaacaaactgtttaataatatttgttccctgaacgaggtaagtataagcggacccagtaatgatggggatatcttattggatatcggagacatcccaatagactacggattagaaatccttgagtccatattaaagaatagtcagaagaatcttttagaatgcggagatttacagtatctactaagggtgaaggccattcccttgctgctacgttgcatatcatcttccaaacatttttccaccgctgtgaggagttgccgttgcttgaagttattgataagaaaggaatacctaagtacactcgaattagaattagaagtcattttgtcgttactgattcatggtatctccgtcgaatcgaacttatctgcttggcagagagtcctatcattggaactttttaaagatttgtctcaagatactgagattgttaatactctctatatggactatgacaattactcagataagaagcacgttttcaaataccttttaaaagagtgcattggcctactgaactctccagagtatattactttcttaggttcatcatcaatcgttcaaaagatggattctcccctgataaccactgagaattcaatggtcaaaacaagatttatgcatcttttggacaagtctaacgctccgtccatcaacattacctacattatatcgctaattctcggaatctgtaacaatttgtgtgaaggcttgagcaattctgctctggacagctctcctcttgagaagaaaatgggggacaaacaacacaacggagaattagaaaatgactcgaccatagtaaaggtttatagcggcctattttctggactctatgagatcaacaagttatttctatattcgacttctttagagacatctattttccattcggtggtaagagctttccaaaaattagctcatagtgccggtgttttgtcactcgaggaaaaacttagaaagtgtatgaagttgttttcgattttaatagtaaataatgtaatatcgtcaaatcgggtcccttctaatgatatgagcaggctagtaaaaagtcaacaggtaagagaaatatccgggtcaagggtcttgaataatcctggtgaaacaatttcttctccaacgacaaaagatttaacgaaagaaattggagattcttccaaagacaaggaaacgaaaaggcaattgcaccctagaaacatcagtccaaggcaagttagtttactcagagctttggtatcgttatcggtatcattaggtcccgtttttgattcagaaagctggaaatacactttcttaacctggcaatggatatcgtactacatatatggcccatctgctgattttaaagaaagcttttactctgaagatattccaccacctccagtactaagtaaatcggatgtcacatcaattgaaagttctctaacaaaatttttcgaaagtacaagcaattattcttgttcaacatttcagttggtattaacgagattaattttggattcaaaaaataccctaactttagaacaaactaaccttaacttggacaacgatattggttatcatccattagatgctgggaatgaaattatgccatgcatttataacaaggctttttttgtcaacaaaatcggtgaactagcgacttacaactgtaagaaattccttgcaggaaaaaacggaaaggagctttggaattactttctaactatatga

SEQ ID NO: 5633 - DNA, 789 bp, Saccharomyces pastorianus
atgatcaaactaatatcaaatcgtgagatggataatgattcattacgcttgtacagcgtgagagtattcacagaaattattaaaaaggctactaacgaggttggcaactctgatgatcaagaggataaggtccagcaattcggtaccttagaaaacctaattatcgatagtttgatggaaacaataaactcgatcaaacaattggatgtaggtaggcaagaaatatataacggaacaatcaatgtggaatctgatattcttttccaactgctattgactttgaaagaaattttaaacgagttcggtgagttgctgatgaactcatggacaaatattttcaacattatcaattcacccttcgagtggacagtcgaagacacaaacctatccatgaatgaggacatagacgattcatctttgtttgaaggtatcgttcagaaacacaagaacatgatacaggtatcttacgatgttttcaaactaatttctgacgattttttacaaagtttgccaatgaacgttatcaagtgtgttattgacacacttgtcaattttgtaactcagaagaggaatctaaatatttctttctcttccattagtcaattctggctagttggagactatcttagagtccgtttcagtcccgatacgttagatttagatgacgaaaaacgtaaaaaattttctgaaaagatcactaatcaaaaactaattgaaatcattacgtctgatacgtcgcataattgggagctttatgacggactatggatataccttctgaagaattag

SEQ ID NO: 5634 - DNA, 1770 bp, Saccharomyces pastorianus
atggggaattatcttatcgaaaaaggtatggaggaaaccgtcaaggctacgctggagacgctatcgctcatagtttacgccagcgagggattactcaattttgtcattgacttgtatctaggcacgtatgcctgtttgatagttagcgcggtggatgggaccgtagatgtcgccactaataccaccgagaagttgatcggtttggtcaatgagacgatttccagcgtcgccaatgaactggataatgggttggatgacatctccaagataatcaataaagtcatcagcgctgcatccaaagtagaggattttttcaccggagatgatgatgacgacagcaacatgacctcatcaattaaaagcgtcaatttgaccatatccgccctgcacaatttatatattccttcgtcaatcaacaacaaactagaggagctgtcagcaaagacgccagactttgctcaagttaaaaacaccacgaagaacttaatctctgttccattcaatgaagtgcgcaagaacattaaagccgtgaacgccagtaaactaatcggcgatacttcggttttgtacgtaccgcccgtttctgtttccaatggcactgggatatgttcctcgaataaaccagagattatagctttttacactgtcctaggacacgcactgaaaataactaccatagtatgcatcaccatattgatatgctttgctattggggctatgataccagtcgcatggaacgaaatcaaactctggaaacggctttgcaacatgagaagccattacatgctgagtaggcaagattcgtacacatcgttttccagcgagaatactcacgagttgaagaatccatttgccgaccccccttcacctcccaacgacgaatatgatgtcattgcaagctaccagcaatgctttcacacctggaatacaagaatcgcgtgctggatgtcgaagcttgtgaccttaggaagatcaccagagaacatcaaacctgagactagaaagaagattgaatgggtggtggcctatatgacatccgaaagagcactgtgcatcctaggaattggcttattggggatcctggtgtgcgggtgccaatttgccatgatatctgtgttgcaacataagataagccattcactagcatccagtgacgatagcagtatccagaatttacttaagtccagcagtgcagttgatatagaaaaccaaatgagcctttggagcgttcacactaacgactacctcaataccaccgagaccaatatcaaccaggaggtctttggatggatagacaccacgacactttcgataaacaatacggtggccaccatgatctccgacatagacaccactctagcagatgtgtttaatgggacactactatataacccgatgaaaacagtggtgggatgcgtcattgagaataagctatacactatagagaaggcaatgacatggattcacgacaaggctcaattgcaaatcccaagagtcaatggaactcaaatcaagcaggccttgacaaaagaggcaagcaacgctaccatggccgctgtcagctcgccttccacaaacacagcaagcttactggagaaccttgcagacgatatgagagaaggccttttgaaagttcttcgtgcttactaccgcataaccatgagagaactcacagtcgccttgattatcctgggtgtgtggcttctgcagctgcccatagctctggtcatcctgggactacgcctccacaaggctcatctttgtttctag

SEQ ID NO: 5635 - DNA, 1635 bp, Saccharomyces pastorianus
atgagcgaatgccaacaggttggtatcggtattgatataggctcatcgagtgctagagttggcatatataattatcacgataatgttttgttagaaatggcacaagaaccagtaccatactaccacgattcttcaaggaaatcatggaagttttggcaaaaatcaactgaaataattaaagcacttcaaaactgctttcaagagttaaaaattaaccaatataaagttagatcgtgtggtgtttccgcaacatgttcgttagctatctttcaaaaagatcttacaaacgatacattgataccttatcccaatgaagataatgtaatattttggatggattcttccgcagtggatgaatgtcaatggttaaatgcagagtgttcccaacagcttttggattatttgggtgggaagttcatacccgaaatgggaattcccaaactgaagtatttcttgaacgaacactcccataagcaagacaagcaatttcatgtccttgatctgcatcaatatattgcatatgaattgggtcgcttataccattggagcactgataaagtttccgtacgagaaaacaataatggaataggcaatgatggagaggcatctggttggtcatcgtccttttacaacgacattataaaattgccttcaaatgtaacaattggtctcgcaggccttaattccaacaactcgtcctcgacaactacggttcgtagttgtatcgacagttatgcgagttggtttgcagtttcttccccaaatttggaggcttcattgtttatgatagccggtacttccacatgttacatgtatggctctcccatcactactaaaaaaattcctggagtatggggaccctttgatactatacttgaaagcaatggtaactattctgtctatactgctggtcaatcatgtactggtaaattgatagagcatttgttcaaaagtcatccggctgccagagaaatactaaagagtggcgaggatatttatcaagtattggaaaaatccattcaggacattgaaaagaaaaactgcaaatcaattcatatcctagcgaaacatatgttcttttatggtgactatgagggaaataggacgccctttgcagatccacagatgagaggttcattcatcggcgaatccaccgatacttcaattttaaatcttacatacaaatatgtttctatgctagagttcttgtcatttcagacaaaattaattattgatacttttcagtgtcaaaactcagatgtaagaattcaagaattaagagtatctggtagccaagcaaagaacaaaagattgctgtctttgatttcactggttaatgacggaataaaaattaagaggccaaatgagaatattgatctgatgggtgtaacgggtgcttatatattaggaaaatctgctaacgaaaagaagcagattatcgacattataaaggagagggatatcaatgacgacagcgaggagttcgtaccttttagtgcatacctagttggaaatgatagtacaatggtaaaaagattactttgtactaaatataatatacacttggatatggcaaaacaacagcaacaataccacaagcttgtcgacgaagctctgagcgttacaatcaactaa

SEQ ID NO: 5636 - DNA, 1278 bp, Saccharomyces pastorianus
atggcggaaggtcattttagatggaagccaactaacttgattaagaaagtgttgtgtttacctatgagaaaaaccagaaatgacataggtttgaagctggatgtttcatatatcttatccaacctaatggtgtgctcatacccggtaagcacatatccaaaactactctataggaacagtttagatgacttaatattgttcttgacagtatatcatggaaaaggaaattttaggatatttaattttagggccgagaaagaggatggcgactacaaagataaggacttggtggaaattgctgccaaatatgaagtcagagatttggaaatccaagaaatacgttcaacactcgtgaatgatggaaagataccaatatcacccattgatctagaaactaggactttagtggaagaagaagcaaataacgtgatttgtgaaagaatcggttggttggatcattttcctcctccgtttgaactgctagaagatatcatagataggatagaaaactatttgtctgcttcgaagataaaagtagcagttttacattgtcgaatgggaaagggccgatctggtatggttaccattgcatatcttatgaaatacttacaatgccctcttggagaagcgagattaatattcatgcagagtaggtttaaatacggcatgacgaacggtgtcaccatcccttctcaactaaagtatttgagataccatgaatttttcatcactcacgagaaagctgttcaagagaatatttcgaatgaagcagtaaaattcaaattcaagtacagacttgctaaaatttcatttatccaaccatcaagcttggtctcgtccaaatctgctatagtaactacaaatatccagcattacagtgatgacaggaatattttgataacccgaaaaacattgtattcagacatgatggcacacgaaaatggcgatagcatggctttcacctttgataacgaccacttgaccctcgaaaatgatcttcgtattgaattcactttgggcacaaagaagtccaaggcagcgaatggtatcatgtcttgggcatcgtacgcaagttgttggttaaacatttacctagaaactttaatgcaaataatcaaggatgactctccgtcagattacttcctggtagacaaattaaagaagaatggtaagttctttacgatcatcaactggcaagacttagatggttttggtgaacttagcactcacggcttaaagttatttcaagcattgagactagaatgggaaaccacatag

SEQ ID NO: 5637 - DNA, 1215 bp, Saccharomyces pastorianus
atgcaagcagtttctgcatctgtacaggtttttgtttcattcattattggaaatattgctgagtgggttggatccattaaattcgttatagtgatactttatttcttatcatttgtgggtaattttctttattcatgtgggggcgctgtatcattaaacaccttgcttggtgggcgcattatttgcggcgcagcgtctgcttcaggcgcaatagtcttcagttacattacatccattactccagatagggctgttgtgttcaaacttctatcaatgtacagaacagcagccggaatttgtatggcgctggctcaattagttgccattttttttggatattgtgacttcaaaattaaaggataccgcattacttctttcaacgcaccaacgtttgcctccagctttattattcttgcgatatgcttactcctaatagtggttttagaaaatcctgaagtaaaatttacgaaactacagaatcagagttttcttagtgctctgaaacagttttttagtgttggaagaaaaagacttattgcctgtttaatcttattatggagcatgttcttatcatcatttataataagtgaagtggtttactttatgccactatttttaacacttaaaatacactgggataccaaatttcaaggcatagcatttatggtcgcgtctatattaggtgtggcgggaagttattttgctccaaaattgatcaatattcaaactatcttcagaaaagccgaagaagacgatttgaacgagtcagagacgattgaatgtgaaaaattaggggtagaaaagaaagattatctctaccgtaatcaagtttttttgtcaatctctgcattacttatttcactggtgggacaagctttcatggttggagcatcggaagctttgaaatataaattaatgccgcccacgaactctggtatattttttgtagcagggatgtcgattactttgttgggatatatctttttgacgtccagcattccagcaattttttccacctacattgatccagagctgaaggttctgttgatgcctttaattggagccatatctggggttggtaagttagtagcacccattgtgttagctgctctttataaaacaaaactaggacttccaatcgcggttggatttggtatgatgttggtagctatttcgataccactactattttggctaagaaagaaaaggtattaa

SEQ ID NO: 5638 - DNA, 1854 bp, Saccharomyces pastorianus
atgattggaccagatagactcaagaaaaaggccgttagtctggcttgtactgtttgtaagaaacgaaaattgaaatgtgatgggaatactccatgtggtaggtgcaataagctaaagacgcccgaaaaatgtagctattgtactgatagaagaaaagataagagaaagatccaaaacggctcgagggttttcgtgtttaagaatcaaaatatcagtaacgagaacaaatttttggaaagaaacgaagaacgtagtgaagatcttctttccgataagactagaatagaaacagcagaattggagccagatataccagaatttgaaacaactgggatttcggctgctgatacaggtatatgggacaattctcttccagcagattttaactttaatgatttcagtactgaaggtgcaggtattgatgactttttgaaactactgggagatagtttctttccaatgaggcaagaaggcacatcatactctccatgtgccacagactccaacattcttactagtggtgtaactggagtgactgagagtgaaaactatactatcaatcgatctcatttgatcaatatcctttttgaggacgagtctcacgctccaccaggaatatcgaaaaaacatcttcttgatttggaactccgatacggagatttagaatctatagaaggaagcagtgatgaaaagtttctgcttgcaacctcattgtgccttgggtcgttaactatccgaaagagggagttactaaatcaatcgagctccgatgattatcctcttttatcagagaatggtatcccaacattgacggcagatgcttataactattatacttttgcaaaggcgttaatccccgatctgctgccttctcccacaatcgatggattttgtggtcttgtcctaatggctaattttatgactatgatgatatctttagaaggtcaactatatttgagtataaatgctttgcagatcgcggttgctttgaacttaaccaatggagaaaaatgcaaagaattacttgaattaaatgccgacggagttggtttgattttactattctggaatatttggtgttcgtcttgcatgttaacaagtttccacggaagaagaccttttattactctagaagatatcacgacgcctttaccttgtgaactgaaactcgacaataaaagatccgaactttcaatacaattcatgcaattaagaattcagttagctgcaatacaaggcaggattttcaagcaactgtacatttcgggtccgacaaataaggaccagtttgtaaggttgcaaaatgagcttgaagaagtttcaattcaaattaataggttgaaaagctgtcccgtattcgaagaacgtcttttctatagaagtcgggtgttaatgttagagctatcgagttttaaagctcagacgtcttttctattatatcacccgtacctaatttgtgcaaagtccttagaagcagtgaatgctgcaaaatcaataattcatgaaatctggagtcattacacaaaacagtttcccaaaaatgaaaaagaaatcatagaacatttggattggaatttctgttatcctttcaggactgcatcactgacgttatgcgtttcatgtgttatacttctaagatatacgcaagctataaaatttctggaagatagtgatttgttcgaatatgttttagcaatagagatattacaagatttaatccaattactcccgattgaacaaaagcttactgatttaattaaagcttcaagtgaaccaaaaggtactacaataggctcgaacagtgatagtttcgttgagttttggggatgtatgcttgattggaactcatcttaa

SEQ ID NO: 5639 - DNA, 1425 bp, Saccharomyces pastorianus
atgacgatgatgaaaagacctctagaggaagactcggaccataatgaaaccaagaaactgaaaccgagagcggcatacccttccatccttgggaaagataaagcaacgggcaagttcatattccccgcgatcagcaaagacgacgtaatgaacgcaagactgtttctgaaaaataatgatttgaaaacgtttttggagtttttcctgccagcggaagtcaactcgatctacatttatttcatgatcaagttgttagggttcgatgtcaaagacaaagaacttttcatggcgttgaattccaacatcacctccaccaaagagcgcaagatcaatgggatagcgacattaccacacgcggatattgacaataaagacgggttgacagacccccttgagaaaaaacatgccgtgaaattaatcaaagacttacaaaaagccataaataaagtccttagcaccaggcttcgattacccaatttcaccacgatcgataacctcaccgccactttgcataatgcaaagaaaatcctggttttaaccggtgctggggtttcgacctccttggggattccagatttcaggtcttctgaaggtttttactccaagatcagacatctcgggctggaagatccgcaagacgttttcaacctggatatatttttacaagacccctcagttttctacaatattgcccacatggttttgcccccggaaaacatgtactccccgttacacagttttattaaaatgttgcaagataaaggcaagctactaagaaactacacacagaatattgataacttggaatcgtacgcaggcattgatcctgataaattggtgcaatgccatggttcatttgccaccgcatcttgcgtgacctgccattggcaaatcccaggtgaaaggatatttagcaatattagaaatctagaattaccactgtgtccgtactgctaccagaagagaaaacagtatttccctcttacaaacggcaataacacgatgccaaataccaattccagttcacccattttgaagtcttatggtgttttgaaaccagacatgacattctttggtgaagccctgccatccagatttcacaagaccattcgtgaagatatactggaatgtgatttattgatttgcataggtaccagtttgaaagtggctccagtctctgaaatcgtaaatatggtaccttcacacgtacctcaaattttaattaatagagatatggtcacccatgcggaatttgatttgaacctgttagggttctgcgatgatgtagccagtctagtagccaagaaatgccattgggacataccacacaaaaaatggcaagatttaaggaaaatcgattacaactgtatggaactagataaaggtacatatgagatcgaaaaacaaccacgaaaaaaaaaatga

SEQ ID NO: 5640 - DNA, 2160 bp, Saccharomyces pastorianus
atgaaggtcatccagcaacagcaaaatgccaccaagaacgacgctatcccaccatctgctacgcccaatgccgctgccttccctcaacagcaacaacagaatgcaaactccaaattatatcaaatgcaacagcaacaacaagcccaggcgcaagctcaggctcaagcgcaagctcaagcgcaggctcaggctcaggtgcaagctcaggctcaggcgcaagctcaggctcaagcgcaagctcaagcgcaggctcaggctcaggctcaagcacaagctcaggcacaggctcaggcgcaagctcaagctcaagcacaggcccaggcgcagcaacagccccctcaacagccacaaactcaagcacaacctaacccactacacgggctgacaccaactgcaaaggatgtcgaagtcattaagcaattgtcgttagatgcttccaagactaatctaagactgacggatgtaacaaattctttatccaatgatgaaaaggaaaaaataaaaatgaagttaaagcaaggtcaaaaactatttgtgcaagtgagtaattttgcaccacaagtttacatcattactaagaacgaaaacttcttgaaagaagtcttccagttaagaattttcgtcaaagaaatcctggaaaaatgtgctgaaggtatttttgttgttaaattagacaccgttgacagactgatcatcaagtaccaaaagtactgggagagcatgagaatccaaattttaaggagacaagctatcttaaggcaacaacaacaaatgtccagtaccaacaacaacaataacaacaacaccgctaatgctcctgttaccggcaataacaataatgcgaacaatattgctactcagcaaaatatgcaacaatcgttacaacaaatgcaacatttgcaacaattgaaaatgcagcaacaacaacagcaacaacaacaacaacaacaacaacagcagcagcagcagcagcaacaacaacaacaacaacaacatatatacccttcctcagcaaacggtccatctaattacccaggaatggctaatgcccccaataataatagcaacatcccttacatgaaccataaaaacacctccagcatggatttcttgaactcaatggaaaatactccaaagattcccgcgtctgctgcagcgactccatcactcaacaaagcactcagcaacaaggccaacaacagaaccaagtccaacacgatacctgctactagcatttcatcaacgaataagaagctttcgatatcaaatgccactagccaacaaccgactcctagatctgcttcaaatactgctaaatccactccaaacacgaatccttccccattgaaaagtcaagctagaattggtacgccaaattccaataatattaagaatgcacaatctcccatgggtgtacaaccatcctacaacactagcaccatagaaaatgcattcaaaaaggaagaacttttgttaaaagatttagaaatgaggaaatcggaaatttcttctcgtttcaagcaccgccaagaaattttcaaggattctcctgttgatttgttcataagtacaatgggtgactgtctagggattaaagatgaagagatgcttctttcttgtgatattcccaagtcggtcgttgatcacaccaatggttctggtaaaaggaaacctacaaaggcagcacaaagagctcgggatcaagattctgttgacgtttccattaaggacaataagctaattatgaaaagcaaatttaacaagaataacagatcatactcgatcgggctgtctgacgttgctgtaattttcaagggtatcggcggcaactttaaagatctgtctactttggtctattcatcatcgccatccacttcttccaatgtggattttactaattttaagaagaggaaggcaagtgtattagaaataagtcctcaagattcaatagcgtcggtgctatcgccagattcaaatataatgagtgattccaaaaaaatcaaaatcgattctcctgatgaccaatttatgaccaaatccagcgccacagttaatggaaaacaagaagttgcaaagaacgaggctccattcatgacttctgctgctgattcggagcaattcaacgtatgggattggaataactggacaagcgccttttga

SEQ ID NO: 5641 - DNA, 1167 bp, Saccharomyces pastorianus
atgtcttctgctcccatccacgacaaggacaccttgtccaataccgagcgtgcaaagaatgtcaatggtctgctccaagtgctcatggacatcaacactctgaatggaggtagttccgataccgctgataagataaggattcatgcgaaaaattttgaagcggccttgttcgccaagagctcttcaaagaaggagtatatggacagcatgaacgagaaagtcgccgtcatgcgcaacacatacaactccagaaaaaatgctgtcagtgctgccgctgctaacaacaacatcagccccgtggaacacataaacaccatcaagaactccggcggtaacgccaacaatatgaacgtcaacatgaacctaaaccctcagatgtttttgaatcagcaggctcaggcaagacagcaggttgcgcaacaattaagaaaccaacagcagcagcagcaacaacaacagcagcagcagcagcaacaacaacaacaacaacaacaacagcaacaacaacaacaacaacaacaacaacaacaacaacaacaacagcaacagaggcgtcaattgactccgcaacaacagcagttggtgaaccagatgaaagtggctcccattcctaaacaactgttacagagaatccccaatattccaccaaatatcaacacttggcagcaagtcactgcgctggcccaacaaaagctattgactcctcaagatatggaggctgcgaaggaggtctacaagattcatcagcaattattgttcaaggcaagattgcagcaacagcaggcccaagcccaggcccaagcgaatagtaacaacatcagcagcggaaacgccaacggcatcccgcaaaatggcaatattaacaacaatatgaacattccacaacagcaacaacagcagatgcaggctcctaacacaaacgcaaacacaagccccttacaacaacaacagcagcagcagcaaccacagaacaccgtaccaaatgttctaaatcagattaatcaaattttttctccagaagaacaacgtagcttattgcaggaagccattgaaacttgcaagaattttgaaaaaacccaattaggcaatacaatgacagagcctgtaaagcaaagcttcatcagaaaatacatcaaccaaaaggctttgaggaaaatccaagcttaa

SEQ ID NO: 5642 - DNA, 1992 bp, Saccharomyces pastorianus
atgagcctacccatcagcaagctgattgagcagtatcgctccacgcaggataatgacctcaagtacatgctcttgaggcagaacatcgaaatcaccgatatagaggatgaaatggttcctctggttagggacttgttgctcccgatattggtggaggagcaagacatggagattctgaatttagtagcatttcacgtcttcccctgtttggtcctttctttaataaagagtaaggctaacgcagccgctacacagctgggatgggtaacgagcttggtatgtgaccccatattgaacgagagtatggttcatgaaaatcgatcgttcattttgattgagacgctaagaaatattttgcaaaaaatcgaaagcgcttctcatctcaattaccgtcatccagtgaccaattcatttgagtttattactaaattcatcgtcgaaatgaaaaggcatatgcgtgagattgatgaggcccagctctcgcactccctttctgaaggcaacatgctaatttacatagagtcgctaaatctattgttgaagttctacttcttttcagatacgacacatccttcgctaacgatctcgttgccatttgatattttgaatgacatttttactattgcgcaggattattcgactacaaacacaaacgagagtattgacaggataactgagaaactactgttaacgtccacccaattgacgcatccattggacctagaaaggctttgctccaagattgactttaaaaccctattagttatttcacgaatatggtacaaattcggccccatgattaatgcgctatttaccgagcgtctattaccaggcctgttatctcccacgtatgcggaagaaggatacagcgtcgaaggcattttggaaatgatccataatttctacccgttctactctattcgtaggctaaaggataataaatgtctattatctgattctacagtcgcccttctaagaagaagtttgtttgacatactaaacacgttaaatcgatcatttacagtagcgcacaatgagaaagttgatgattaccaccgagtggacgataacgatgacggatttatctctgacaatgatcctgagcagcaagcataccttgatgaattagtatcggacaatgatgatggagatctgtatgagcaagaaactgatgatgatcgagctgatgatgaaaacttcgaaaaaagtgaggagacaacgaaggatctcacccaaataaacgaaatcctttccatttttgctgaattgcactatcctcaggaggagcgtttccccaaattgttggctgagttacagagcaaaattagcatagattcatctttgattggcaaaattctttctcaagatgcatgcgaatcgctcactcctggcgggaatgagattgatctggacgaaattttaaatgaactgaaatccaataagttcgccagaaaaaacgatactctttatacactaacccgttgcctttcatcaaaactttcttcagatttgtctgtattgcaattatcaatagaagtcgttgatcagttattggttaaaaatcattccgataatatcactagaggtgagcaattccagctgatcaaattagtactgcctcacctgaagactaacaaatcctttattgatacattgaaagcaggaaactttacccaaaagattgatgaaggcgtgactttgagaacgatgatcctgtctttactactgcaactactcccactggactattccatgttaggcgaggtcctgcccactattgcaaaatattctgtcaaggacaaggatttgacggtaagggatttatctttacaactactgaatcaaatcctaagcacacattataaccacttaatcggtattgattgggactggtacagcaatgatttttatcaggttttgcaagaaacttgtattaaaaaggatgtcgataccgaactcttacatcaataccccccttattctcacatttaa

SEQ ID NO: 5643 - DNA, 1377 bp, Saccharomyces pastorianus
atgtcctctctttcaccatcgccgcccgccagtcgatctggctcgatgggttccggcgagtcttcgtcttcatctttgccttcgccttcgttacagacggagaggctaacgcacatcacgagcctggacggccaagacgagcttcttggccgcatcagcaagcagctgggtaggtcgcggaagatcgcgtgtctgactggggctggtatctcgtgcaacgcagggattcccgatttccggtcctccgacgggctgtacaaccttgtgaaagaggaatcctcgcagtattggtcgatcaagtccggcagagagatgtttgacatttcgctgtttcgagacgactttaagatctcgattttcgccaagttcatggaaagactgtactcgagtgtgcagttggcgcggccgaccaagacgcaccggttcatagcgcacctgaagaacaggaacaagctgctgcgctgctacacgcagaacattgacggcctcgaggaggacatgggactcaccatgtccagcaagaagccgtctttgccctcgttcagctcgcactggaaaaacctggatgtcgtccagttgcacggcgacttgaacaccctgtcgtgcaccaagtgcttccagactttcccctgggataggtactggtcccgctgcctaagaagaggcgagctgcccctgtgtccgcattgcgaggcgctcatcaacaagaggctgaatgaagggaagcggactctggggtccaacgtggggtttctgagaccgaacatcgtcttgtatggcgagaaccacccgtcgggtgagctgatcacgcagggcctgaacctcgacatcctaaggggcaatccggacctcttgatcattatgggcacgagcttaaaagtcgatggcgtgaaacaactggttaagaaactaagcaggacaatccacgaccgtggcgggctgatcatcctcgtaaacaagagccccatcggcgactcgccttggcacggcatcatcgactaccagattcattcggactgcgaccggtgggtctcgttcctcgagtcccagatcccggacttcttcaagacgcaagaccaagtcgataggctaaggcagttgaagagagaggccagcgacctgagaaagatgatgaaggctcaaaaggacccgatcaacacgccccccactacccctcttagaaccgcactgcagcccgctgcacacgcccacaacgagttgaacatgcgaataaagtcactgaacaaaataaagaggaaactactgtctccggagaactccagtgaagaagacgaggaggaaaccgcggattccaagaaacgcgccaaaatacgaccaacaccagcggcggacgttaaatgttcattgacccagtag

SEQ ID NO: 5644 - DNA, 906 bp, Saccharomyces pastorianus
atgtttatacaaagaaaaatgaacaaccatcctttgaatttccaaccaatattattttctcatccgatgactagagatagcacaacgcaaaaaaatatgacgggtaaagatttcaccccaactcatgcagaattcgtcaaagaagagaacaagcctgatttgcattctattccggtgggctcgccgaacgttattctaccacaaattcagctcccaaagattgcaacactcgaagagccagcatttgaaagcagaacaggctcgataacggatcagtctgccaggagaaattcggtcaacgtagggaccttgtgtgacgatgctccgaacttttctggctcacatgtcccaaggccggtggccgtccaaaatctaattcctccatctttaccaagattgaacgcgtatcaatttaggccccaactcatagatggtaattcaaacttccaattcaaccctaaccactatactcccgcatctgtcccacctcatacatcatacgaaccctcctacactacagcatctacgttcgccaacttacctgcggcttcttattttccttcaaacagcacaccaacaacaagaaaaaatagcactactatgaactctcttactgaagaagcacgtcgtgtctctgtttctctttctgaaccggtatacaacgaaggtgaaaaatataatcttgatggtcaattaattggtaagacaggtaagccgctaagaaatacaaagagagccgcgcaaaacagaagtgcccaaaaggcattcagacatcggcgtgaaaaatacatcaagaatcttgaagaaaaatctaaaatatttgacggcctggtgaaagaaaatgacgaactgaaaaaaattattgatttactaaaagcaaaattaaatgaagaaaaacaaggatga

SEQ ID NO: 5645 - DNA, 2505 bp, Saccharomyces pastorianus
atgaaaaggataagtgatgccttattagaaaattttcaggtcgctgacgcaacgccgctaagtgataacggaaatgctaatggcacggctggtggcgacggcggcggcgatggaagtaacgctgcaagaccaacatcgtctaatggcaataagaagagaaataaactcataaagtcgtgcggattttgtaggagaaggaaacttcgttgcgaccaacagaagccaatgtgttctacatgcatttctagaaacttagtggattgtcaatacgctgaagagttcaacaagagcgttgaaaaaaaagccatctatggaactttttctaacgttgaattacttaagaaaatcgacgatttggaaaataagattcgtacgctagaaaacaacagaaataccaattcgcctacgaacttcgtgtgtagctcttcgaatttttcgcttttgaactctacgacttgtggaggatctactgaatctccggaccctttaccaaacggtgtcataaatccatacgctgatcgctactacgtacaatgtaaacattcaggtaggtcgataatatatggcccaacctctatgaggacacagatttccagtactaattgggggtttattgcaaaatataaacaattatggaccaaagttaaagtggagaggaacatatggaagaaaaacaatcaaaagacaatgtgtagagaattgtgccttttaaaggagtcaagctgggaacctggcccactgcttgaacaaatatacaagtttttaccaacgtatgagaaaatcttttcaatcatagaccacgtctttgatgatgaagtgatcaacgagtttaatattatcctagacaagactaaaattaccaaagattatatagattactttatgccaggtaaagaagccttaccaaatggcgagagacccatcgtttacatcttgtccaactcaaagaacaattactataaagctgcagtgatactaatgatcctttgtctaaggtatttctatgggaacatcccagcacctctagaaaagcttctgattttcctgaacggtacctccacggagaaagtattctatatcgaacgtgcccaaatgttgatactgctattttaccaccgtgaacttcactcatttggcggggatggttctcatctgctcaatataaacgagttgttatttgctacagtcaccacattaggattgcatctagacattaggaaaattttcaagggcgaagaacaatccatgggtagcctggaaagtttggagaatatctggttcatggcaatactgatcgactacaccatgtcttcccacattggtaagcctttgatgatcaacaagttttatctagacgaaacgcaggagtactgtgttttgaacgatcagagtaaaacttatgaggggaagctgaaaagatacttgaaaatggcaagatccatgttatttgctctttacgatagagaaaagttccccgatttgaaacttttttccaagcaacttattagttttgtagaagaagaactcggaccactgggacattacacggacgaaaaccttgccgtggaggtccccttaaaggaaactagaattatatgcatggcactgggcctaatattatcattctatgcgttggtgcactctgtgttgaaagtcaggacctttgaatccaaaaacaatacgtttcaattggttctgataaatttttccatcattgtgaacaccacgatccgatgcttcctcattgataaagaacggtatccggagtgcttcaagccttcgtacccgcatttgccaccaaccatggcgatgtcgatgggccttagagcggggcttttttcaaaaactttagtgttcttttgttccttgatatttttcaagctgacgctttttgaaaatgggatatgcctgtccaacgatatggaatgcgggtggtcggatttgaccagcataaccgttcccttagacaaagacttgtcgatgggcacggcgatgaaactatacaccgagatttccggccgtttatttaatgcgggggataaacttctggtacgcactatgcacaattcaccgcagtttataatagaattggccatcgaaaggacttcaagaaccattcttggaaatgttctggagttcagaaaaatgaccgaggaaacgtggctgtcacaaatcagacaggaactagatccgctgccgacagaactaagaagcgagcaagaacagcatcaccaacaccacgcgcctttgaacagagaggcgtctcttccacaggagccgggctctccggctccgccatccgctccttcgacggatccgaccactgtaccttcacagggtgatgataagaatcctacaaagagtcaatcagagatcattcagatgttgaccgacgagttctggaccaactataacctgggctgggaagaactgataaaccaatccgagttttccactatgttcaatgacatcgaaggcagcactgctgaaccaaagggatggtaa

SEQ ID NO: 5646 - DNA, 450 bp, Saccharomyces pastorianus
atgggtttgtattcgcaagtcctcgatagctccaggggaatgcttctcaataataattcaaatggcttcttcacggacggagtctccagaggggatgtactgtgcggtgagcaccattctttcgacaagggacttttcaagacaaccatacgagccctcagctacagcatcaagctggggctgagaggcacccctgagcccaaagaaacggtctccatttttcaaagcgaagacagcccatgcgaatacgagtactatgcggtttgcatggcgttttcttggttcatattcggtctctttatagcttgcttactgctttctattacattgctactgactgcacgatatcatggcggcaataatagcagcagcggaatagaatcagaagcacctctagccaatatcaacgacgaggaaaagcagcagcagttctccgatatagccttataa

SEQ ID NO: 5647 - DNA, 1638 bp, Saccharomyces pastorianus
atgcctaaagtggatttgaacttgaagctaaacttgcatacaaattcaactctgaacttgaggataaatatacccccacctaatgattcaaacaaaatattcctacaatctttgaagaaagatttgatccattattcgccaaattccttacagaagtttttccagtttagtattccttccgatttagtttctaacgattctactctacccaactggcttagatactactcgacaaaagaaaatgaaaaggcaattctgaagaaaatttttgacagttttgaaacccttgagaactttgaaatgcgaagattagaaaagtgtttgaagttcaagaaaatgcctcctctgcaacaaaagcaacaaccgcaacagcagaaaataccaaacaaattagacaattcaaaattgtattctttaaccagtttgcaaaggcaatacaaaagcgttgagaaaaggaatgtgcaaaacaataggaacttgaaagtagttataccaaagctcaacacttcatcttcaccatcaccatcaccatcaccactatcatctgacgacactataatgacaccaataaacgattatgaacttaccgagggcattcaatcattcaccaaaaacaggtattccaatatcttaccttacgaacattcaagggtcaagttacctcactctcccaaaccgtctacagaaactgacgtacctacaaccaacttagtatcttattcgccgaaaacggatgattcttacccaatgtgccccatagggtcaaaaaaccatccctgcaaacttaacgactatatcaacgcaaactatttaaaactatcacaaataaatcctgatttcaagtacattgctacccaagcgccactaccctctacaatggatgacttctggaaagtcataacgttgaacaacgtcaggataataatatcactgaactcagatgatgaattgaacttaagaaaatgggacgtttactggaataattcatcatgttctaactacaaaattaaacttcaaaacacctgggaaaatatttgcaatatcgatggatgtgtattgagggtatttcaagtcacaaaattaacccccgaaaataatagcctcaaggagaatggccatgatggtaacactactgccaccactatgcccgcatctcatccgtttattgtctaccaattacaatacaagaaatggttggattcttgtggcgtggatataaatgacattattaaactacacaagatcaaaaactctctactgtttaaccctcaaaaattcgtcgcaagcctacaaaaggatatttataagcctaacttaatagacgataagaacagtgatctccgccttgacacagtgaattcatccccattattagttcattgctcagccggatgtggaagaacaggcgtttttgtcacgctagatttcttgctaagcattctttcgtcgacaacaaatcgctccaacaagatcgatgtttggaatatgccccaagatcttatctttatcattgtaaatgagctgagaaaacaaagactttcaatggtacaaaatctcactcaatatattgcctgttatgaggcattgctaaattatttcgcactgcaaaagcatgttgaacacgggtcatctccttga

SEQ ID NO: 5648 - DNA, 234 bp, Saccharomyces pastorianus
atgacctcccctgttatatcagaaaaaaaccatttacaggtcgaacaagcaagaacgcctgctcaaatgcccgcatatagaggtgaaactataaacttgtccaacctttctcaaaactcggtcaaaccgtgcacagatttggacgaccctagcatacgacgtaacaactccgacaaacgtccaaagtgctgctgcttgatctatctacaggtcctactgcatcttcatctgtaa

SEQ ID NO: 5649 - DNA, 2778 bp, Saccharomyces pastorianus
atgtctacctccactcattcccacaaaaggaaaaacagtcatctattctcgcaaaggaaaagttcgaattcttccatggacaagccgttcttctctgatagcaataatgagaccaatatggattctcaagccaatgagaacgaaaacaccattgacgtgagtagaccgagaaattccacaatagatgtcaccgacggtcctcaaacgccgtttcttcaagaacaccactcaatggccccacaacgagaaagcttcgagtttaatgacattgagaaccagggcgttacgcattcgttctttagtgtcaactctattcgccgtccttggggagaatggtctttaccagagaaaagatcttatgttctactctttgccttgatagcactattaattttgtttttaatggttatcttgatacctacgaaatttacttttagtaaaacaacgcccgcacaaacgtctccagcaggttctggattgaataaacgttccttctccatcgaaaacgtcttgaacggagatttttccattccagaagatactttccatttcattgccccacctcaaagcttgaaaagtcatgactcagatcctggtttatactttactacaaaggaaattgatggacagacgcatttcattgcgaaacagttgtttgatgacacttttgaagtgaatctaggtggaaacagatttcaatatgaaggtgttgaattcaccgccaatagcatccaaattaattataatctagacaagcttatattcggaaccgacatagaccctgaattcagacattcttccaaaggctattattggattaaggatttgagtacaggtactatcgaaccgattctaccaccggatgaagcagctgatggaaatgtacatggtttattgaaactgtcctatgcccatttctcacctgcttacaattacatttattttgtctatgagaataatttgtttctgcaacaggggaattcaagatacgccaagaagcttacccatgatggctcaaaagacatatttaatgctaaaccagattggatatacgaggaagaggtcctcgcgtccgaccaagctatatggtgggccccagatgactcaaaagctgtttttgcaagatttaatgacaccggcgttgaagatattcaactaaaccactatacgaacacgaaggaaccatatctttccagttctaaaataaaatactctaaaccaggatctaaaaaccccaagtttgatttatttttaatcaacttacagaacgaggtactttattcagtcaatacgggtggtcaaaaggattccattttgtataatgggaaatggattagtccagattcatttagattcgaaattacggacagaaattccaaggtgttggacgttaaagtatacgatgtaccgtcttctaaactacttactgtgagaaccactgattcgaattcgttcaatggatggattgaaaagaccaaagatatcttaagaattccaccaaaacccgaatccgaaagaacggagtacggatatatcgatattcacgcggacaataacgggttcaatcaccttttttattatccaaccatctttgccaaagatggcattcaattgactaaaggaaactgggaagttactgggaacggtataattggttacgaatatgaaacggataccgtattttttacagccaatgagattggaaccatgtcacaacacctttatagtaccagttttaatcctgcaactataggcaaacttcaagttatgcaaaatccatctgataaatatgatttttatgactttgaattgagctctagtggaagatatgccatttcaaagaaactaggccccggtgcaccagtgaaagtagctggaccgcttacggaagtactggatcttaccaatgctaacggcgattcggtggtgcagctgaccagggatcgaaaatttaaagagacaataaagggttacgatctaccaattaccagttacaagtcaatggttctaagtgatggtattgaaataaactacatcgaaattaaaccagcaaacttagatcccaagaagaaatatccgatattagtaaacatttatggtggcccaggatctcaatcattcaccactaaatcgtcgcttgcattcgaacagtctgttgcttcaggattggatgcaatcattctccaaatagaaccaagaggaactgggggtaaaggttggagtttcagatcttgggctcgcggtagattgggatattgggagcctagggatattattgaggtcaccaagaaatttttacaaaagaacaaaccacatatagacgaaaacaaggtcgcaatttggggttggtcgtacggtggctttgttagtttgaagaccgtagaattggataatggtgaaacattcaaatacacaatggctgttgcaccagtaacaaactggacactgtatgactccatctacaccgaaaggtatatgaatcaaccatcggaaaatgaagagggttattttgacatatctactattaaaaattacaagtctttcgaatcgctgaagcgactctttgttatgcacgggacctctgatgataatgttcatattcaaaatacgtttagatttgtcgatcaactgaatcttttgggattggccaattatgacatgcatatttttcccgattcagatcattctatcagacaccacaacgctcaaaagattgtattccagaaactgtactactggttaaaggatgcctttgacggccgctttgataatacataa

SEQ ID NO: 5650 - DNA, 723 bp, Saccharomyces pastorianus
atgactgagtgggatgattgtgctacgatgattgatatcatcctctctgatatgtatttgaaaacggttacgactaaaagggtaagaatagctttaaaagacgtatttatgattgacgtcgaatcacaggggaaagccattaatgagttaataagaaagcgcttggatcttataaaagcaacacccccccctgaaaggtccctcgaagatttattgaaggaaaatgctactttggcaatgaaactcaccaaggaattaagtgtaaacaaaaaatcattagaagaagaagaagaagaagaagaagaagaagaagaagaagataaagatagcgcagttaggcaaaaggatgttcaagagagaaaatccatgcctaaaaagccgcttatctctacacgaaaagttactttgtcggaaccattggcggatttgttaggagaggcccaattaactagaacggatgttgtacgaagaatttgggcatatattaaagagcataacctacaaaatccgaataatggaaaagaaatactaagtgacgaaaaattggagttaatattcggtaaaagtactgatatgtttcagatgcacaaacttctggtaaagcatatgacagaccctgataaaacaagcgattgttccgaagcaatcagcaaaactgaaaagcccagcgcttcagagcaatccgatacagaaggacatcaatacgacaaaaatgggagctag

SEQ ID NO: 5651 - DNA, 2484 bp, Saccharomyces pastorianus
atgaaaacgataagtaaccttttgacagcaattttttctagtacaaagccgaaattctctccagttttatctttttattattcgagtatacttgatgatccagtaatggaattttaccaggcacaggccactgccgtcaaaaaatattggataaaagtatttaaaagaaccctttttaagacagcggaaaaatattttatctcgcttctgcaagacatgttaaaaggtaatacagttgaaattcaaagcgtccataaccttgtggagacaattattgacgccataaaggcaatccaaaaacgctatagtaaaccactattggatgaaatatcgttacctagacaatgtgcagtttttctctgtgaagtgtacggttcagactcattaaaattaataaaaactgctgaaaaaagcagcgtgaaaatgaccggaaaaggtttgggcccaatggacgcactggatatgtacgatgtattgaaagagctaaggcagatttacattcaggtaaagccaaaggggacatgttttttcaatcttgaagattattttatcaaatatctagctcagttatgtgatgatgtaagccttaatgttcaaaaagtcatcaaaacttctctcaaaaccgaaaactggcaacccataaacgatcaagattatttcagtaggtcagtcttggatatatttaaaatgataaatgaatcaactggcatgcttgagaaatttggctgggaaaatgaggtgcaactagcacaaatgatcacgatggttttgaaggccttttcggatggcctattatcatattcagcacaagtaatgaacatgatagagagtgatttacaggagggtgatgagccttcttactctttagaaagctccgactctcaatcgtcgcttaatcttagtgtttcaagttataccagtccgaatcatgaacgatcaagaagtagtagattatttgaagatttgaagaatgcggttaaatcaactccaaaaattgtggcaccagccccgtatcagttcaagaagcgtacgtgcgtgctactcaacgaccttgataaaacactgtttttgttagaaagttttgaagaaaaagtagatccatcaagaatatcatctattatcgcccaatatcaatcctctcgcaaatcagaagataatataaaactgttagatgatcagaatatgaaacaagtgtacacccttaggattattggtgccgacaacgttaaaggtttcagtaaaacagggctttcaaattcttatgttttgatgagaaacataactttgcaacgagagatagggacaaccaagactgtttcaaggtcagttactcccaaatgggatgaagagtttgtattcgaatcgccttttggtaagtcgaacgatattgtgttcactatatggcaccatccacatagtagattgaagaacctggctgaagacgacttatgtgggaaagcaaatatgaaactttctccgagaaaattaaaggatgatgggtttcctctcgacttttcgctcactttaaacccacagggaacgctgcattgtcaagtttctctggaaagcgaaaaaatagatgccgtttcttccatgggaaaaatatacagatcattcagtaggtcaagagaccgtgcaataaatttgatggtcagcaaattctctaattttattgcctttgcgttttcaaggactacattgaaaacagtttgtggtcaccatggcaccacacttgcatctgatgaagcggtgtatgatgcaatattaccattgtttgactatttaaatgcgaacttgaacattctggcctctgagctttctcaaaggctactgtttatggtaatgctgagagcttggaacctagttttagagaatgctgacttgcttcttttaccatctctgaacagtgctaaaaccaatatattaagatcagccaagaaatctctctgggaaaacaccatttcaagtacaaaaacggtatcaggatacggccgtccattaacccaagcagaaattgaaacaatttttaaatggctcggcgcactatgtatagatttttttcataacaaaggagaaggcccccctcttgcagaactaaagaatgagtattaccaaaacatattactggttccagctttctatgataaaggcgtatccgaactgaaggaagaggttgatcgattagttcctgtttatgaagagtatttgaaatggttttatttgaagaagactccgattacttttactaataaatcagtcggaacaatatccagaaaaaaatctctagcggctaatatcatgaaagaacccaagcagcaactagaacgagacgcagaggtaatgaacatcatattaaggattttgattgcaaaaggccagcacgattatgttcatcgcatcttgcacgatagaagagaccttgttaacactatgaaaaatagaagagccgtaagaaaagcagtcggttctaccggaaaaaaataa

SEQ ID NO: 5652 - DNA, 90 bp, Saccharomyces pastorianus
atggatcgatttggaacgggcgaaaaagtcagctctcacaaaaatcgtctcataccggaagatgctaaagcgtattcgtccatctcataa

SEQ ID NO: 5653 - DNA, 981 bp, Saccharomyces pastorianus
atgaatcgaacagtctccacaccttcatcgtctgtcactgatgtgtctgctgatataccatcaatacgtaacgtcattaatgtcgatgtacctgcatcggacgtctatctttatacactaaaactgattatactagactacattaatgaaccacggtttagagacacatcattacaatcaaatagaacagatacacgaagagccctatccgacaaaacaaataatccacaggtacagcatgaaaagagaatactgattgataagcaagacgacatgtctgaacatgatatagtacaggcaacattacgaatattaaagggaaagttagcacaaatttcaggcaataagagcttggcgccggatgagatgcattggaagagtattgtcaagatgtactatagcatgcttgattcctctactgccgatgcattttccaagatgagtcaaatggaagaagttgttggttatttcacgaacgtggctagcaacgaattaaaaaagttgactgttggtagctcacgtgacgagttgtttagcgaggtagcgtatttcatagaccttgtgatcgatatacttccagacagttgtgcagggattataaagagattgctagattacaagatcagtctcagaaagggtgagacggcaggaaggaagaaaaaagttacctcaccggcacctatgccccaatatagaagtgtttctggcggcacgagcaatagtaagcaaccttcgttcaaagtccaagatatttcacacatgtcatattttacgcaactatttgaagtagatgaaacaaagcttcaaaaagatgtaataaccgctaaggacgattccacaaatcctatattttgcggtgaattgagatacttgaggaaaaaaattaagaaagaaactggattattgactgcttcagatttttcagatgacagagactatactctatggaagaattatgacttcttgaaatcgccaacttga

SEQ ID NO: 5654 - DNA, 519 bp, Saccharomyces pastorianus
atgaatatcgtatcggaacacatcgggcgtaagatagttggagtgggggttgatattgtgcatttgccaagattcgctcgcctgctagaaaaatattctccattggacccagctggccgtttgactttcaaaaagatcgcacaaaagttcatgcatgagaaggagagggctcaccttagaaatcttctcaatgaagaacaacatctgagtccaagcttgtacaggtatatggcgggtatttgggctttgaaggagtgttcattgaaggctttgtgctgtcatatttcgaagcacgatctgcctcctgctcaagtagtatattccagaatgttatataaaacgcagaacagtgcgggcgtcccgaaattagagtatgacaaaatgtttgagcaagagtatccaaaatatcaacagttctccaaaaaatatggctcctttttttctacacatgaatttcttgtatcattgtcccatgataaagactacttaatagcaatagtaaatttggtggaaagataa

SEQ ID NO: 5655 - DNA, 495 bp, Saccharomyces pastorianus
atgggggacagcaacaagcctatccactttgagtttcccaaaatcttcgtgatgttggtaagaaccgttgctcaaacaattgaatcggaatctggtttcctacagccggctttggacatcattgctaccataccgacagatacccaatctagaaaaattcccattagtttggttgtgggctgcaaacaagaagactctttgaaatcagcttcgtccttggcctgttattactacgccatccccttagctaaaagcagacatccaaatctcaaatcaggtaaggatagtgttgtggggataccgctattggatactaatgatgacagagttcgtgatatgacccggcggttggcgacaataatatccgagaagttcaatagaccatgttatgtaacgtggtcatcatcacctaacgaagattcatctgtgctggtcaccagccatctatatattttaaagaagtgtctcaatctcctaaaagcagagctcgggtaa

SEQ ID NO: 5656 - DNA, 1386 bp, Saccharomyces pastorianus
atgactactttagatgttgcagagagaaataaaattaaaaatgaagaattcaaaatctggaagaaatcaataccttctttataccaacatatttcaagtttgaagcctaatttcagctcaaacgtcaacgacacgtcaacaacacccaaaagtttagtcttcactaacgacaaagcttgtgacaaagctaaggggactttaaccgcaccgcttctatattcccaagggagtgagatttttgaagtggaatgcgtaatgccacttggacttcattataaaaagttagaaggcagtatagaaatattaccacaaccagattacaccacggagtctctaaaagttgaacagactgttctaacaccaaaatgggaatttaaaggtgaaaccattgaaaaaatgatatatgttgataacagtgaaataaatgtaaaagtgatagccctctccgccaatggttctttggcatggttcagggatggagttaaattacctgtttatacaatgttggaagcgcccagtcctctcagtacagcatcatgcggagaacatgatggtaaaccaaatgttgattttgcaatctcaaacgactcaaaaacactggtagtaactaaaggaactatacttgatagtgaaagtgctacgttcaagataatagataactcaagtaaaataggagaagttgttcgtacagtgtctgtttctaatataaaaaccatccaagcggttaacttcttgaataacaacatatttgctacttgctcagatgacggtgttataaggttttggggaactgaagcaggtgaggagcccctatggatattaaatgattctttagacggaaaatcatgttgctttgccgtatcgccctttgttgataccttattcgtaaccggaacaagtagtggagccatcaaagtttgggatctccgtgcggttgtttcctcgatggacgctgctgttggtccgaattccaatcaagaacacaataaagtcaatgagctatttaaagtccatcatttttacagtgagcgagtctctagaatcgaattttccgccatttcacctacagagatgataactgttggggatcttggaaatgtctatcattgggattttgagccagttttctccagctataccgaaacaagtgaggagttccaaggtacgatagccgatgaagtagaagcagaaagcatgacattttatcacactgaaggctgtagaagagaaatgggggaaaacgacaaggtcaatactgttgcttaccataattctattgaagacctggttgccacagttgatagtgatggtttattaactgtgtataggccgtttacaggaaagattcatggagatgaaacgaagcttgaaatggcaacggactag

SEQ ID NO: 5657 - DNA, 2439 bp, Saccharomyces pastorianus
atgagaaagttacccaaaaaagatgttttgacaataaacttggctcgtgatttaaatgagatagtcaccagactctccgagtcaaatacagggtggctggcaaaaccaaaattaagcagcgtctggggacagctagacaagtcttttaataaatatatcggaggggacgacattgatgcactgagtaaaaaaaacgataagaagaaggtatttgacggattcactcctggatcctcggctaattcatcaacggttgaccttactcaaacatttacccctttccaaactcaaggtaattctcagagctatgtggatacgacggctctcttgcatagtgcttataacggaccaaatcacagtcttctgcattcaaagcctcctcatgggtcaaagggcttggctgagccaaacctaccttatgtacacaggattggcgacagtttacagggatctcctcaacgtgttcaaagtacacaatatgcttctatagaccctcaaatgacttctttaaggagagtaagaactgatcaacacgcaagcgagaaggcttttgaaggtctgccaatttcgggccaaaagttatcatcttacgctcctcaacatgggcataatcatagcattccgatggaaaaatccgactcaaatgctacttctatgtttacagactttgcgcctccgccaaaattcggaagagtttcttctaattacatgtctagtccagatttaataagaagggagtcaattatatctacaggctctgattttcttccacctcctaaagttggagcacctgttagaaataattcttcacaagggtcacttatgtattcaccgagtgtagaggctttacctatggaacccctcattccttcagatcatgaaataccatacaacaattctagtagcaaacgtcccgatgaaaccacacttgaccgagaatatcagacatcagagaataatagcaacacagatcaaaatacactaaaagatttcacgggggcagcaggtgaaaccaggggtaccgaagtaccagatttagaggatgaaaaggttccttccaccatggagactgtcagtcagcatacttctcgaactaatcccgttcaacttgcaggcgaagaagcaattagcaagtccctttcacatactcaaccggtaactgaaggttccaatgagggcacaaatgtcgacaatgctataccttcaaatgacaatggggaaagtggcacaggactaccagaacatgtaacaggaccggtgtcatctacatacctaccctctgtgaaaaccgtatcagaacaaaataaccttgatagcgccccggctattcaggaacaaatcgttgctgagagtgttattattacgacacccaaacctatggaacaacatgtatcgcctccaaagctaataagcactaaagctactaaaatgcattcgtccccatatatgccccaagatcttggcactgacgtagacactgaagtaccaactatccctgaagcatcaccagcaatatccgtaagagctcctctagtaagaacttcagcagcatcgccgtattatcctttagccaacagagcaaatgaaaatgcattgtatgggatatctgaaacggtgtctcaatcacaagttagcaacgatgttcctacagagaatagattcagtccaatcaaaaaagctgaagttgttgagagagaggattttgaacctactattaggaaggcttcagccaatcagtataaggctttcaaaccactagagtcggaggtaaagaaatataatgatgttattgaggaagaatccgatgatgagaatacctctgctgacgatggaaagaacacaaaggataaaaagaagaacaacgacaacgcaaaaaaggaatcaaactctagaaacgataatattgatgacaagtccaatagttggtttggttggttgaagaaagacactggtgacaagaaagtttataaggccaagttaggccataagaacacgctatactacgacgagaaattgaaacggtgggtaaataaggatgcaacagaggaagacagacaaaaaattgtcgaaacttcagcaccacctcctcccccaatcgttaaacgcaaagacgctggaccaaaaacaaagccacgttcgggccccatcaataatactgtacctccaataaatgctacttcggtaatcccaaacaatccaattactggagaacccttgtcaattaaatcacctcctcctctttcttctggaggagtcaataccgaaaattctccaccaccatcctctcctatatctaatacttctggcgtaaacctgactggtagaaaggccaacggtctagatgatttgttaagtttgacaggagggcctaaaccagcaagtacaagaagaaagaagaaatcaacaagaggttatgttaatgtgatgaacaacatataa

SEQ ID NO: 5658 - DNA, 450 bp, Saccharomyces pastorianus
atgttcctttcaaaattcaaccttataaggtcatgctcacccatcttccgttcaacgacccttcttcgtcatcaaactcgaatgtttttgagtacagaaataagaaaagctattcaagacgctattgaatctgccccagtggttctcttcatgaaaggtactccagaatttccaaaatgtgggttttcaagagcaaccatagggttattaggaaaccaaggtgttgatccagttaaatttgcggcttataatgttctagaagacccggagctacgtgaaggtatcaaagaattttcagagtggcctactataccccagctgtatgtaaataaagaatttgttggcggttgtgatgttattacaagtatggcacgttcaggtgaattagctgatttattagaagaggcacatgccttggtacccgaagaacaagaagccaaggataattga

SEQ ID NO: 5659 - DNA, 345 bp, Saccharomyces pastorianus
atgaagagattttatattatcaatatatcaacggtgttgacattaaggctttcaaaagtgggcacacatttcattacttccaaaagtggtataaattcatttcacgatggaataacctctgagcttagcttgaaggatagcaatttaaatgtgaaaacactgctcgcatatttgcccgattttaaaagtcatgaacactgggaaaaactttcaccgaccatttcaaaacaacttgtatgctgtttagtcgatggaaggtacggagatactgttctcggaagcaaaagatcaattggtgacattcttttgttggctgaacttaaaaattcatttattgataattag

SEQ ID NO: 5660 - DNA, 423 bp, Saccharomyces pastorianus
atgaagagaataatttataaagtcttcgtaggcttatatgaacgcgttggtttaggtaaaaaatttcatccaagttatgatataattttaattataggcggttcttcaaacaagttaggcattgaaatctgtaaaacctttatcgaagattatcacacgaaggttataaatgttgatacagtagataatatcaatgagaaagaaataaagaaagagagtagtaaattttacacttttattccgtgcaaagatttcagcaacattgaatatcttgaagaatccctactggacgtgcagaagttgaaaatatatcccactatactcatcaacaatatgcaagagggtatagaatcaacttttctaagggaagatcagtttccaaagcttaatgaagaatcattgtgcgaattcgaaaaaatcgtg

SEQ ID NO: 5661 - DNA, 753 bp, Saccharomyces pastorianus
atgtcgtgcaatcctggtgacccagacggtcctctttgcacggtgagtgtaaaggatctcttccaaaatgtgagtcttgagcaaactccaagtttcaataagcgattcgttgaatccttttggaaggcttttaaacggcctgtggtttcaaaacctcatacaatgaagacatcaagccacagcaaggagctgagaaaaaaagaaggtgtcactttgatgccacctgtcccggaaacattactccataaatttaacttctggagcaagactctttgttcccccattagcaggaaacaagatgaaacagaagcagacgagacgaaagagaccaaaatcgttattaatgaaaaacagatccgggattcaatatcttgttatccagatgaacaaaaagggagcgttgtgttttgctacttgcctgaccttgtactgtattacacaccgccgatgaaagtgactggaaagccatgtcctataaagaaaagcccttgggaatcgatggagatccgataccaaaagttcatctatccgttagaaaaattagaaggacaatttgaggaagtccccttcagaccttggtttctcgctatgcgcttgaaagagctctacagatgctttgaaagatcatttagtaatgcggcaaatagaggtaaggcaaagttattgcgaggaaaacgaagaacaaagaaatcgtaccacaaaaccgttgatttggtttcgatgaagatttccacccaccagcattcccactaa

SEQ ID NO: 5662 - DNA, 1194 bp, Saccharomyces pastorianus
atggtgaagaccacgttctttgcgtgcttgccccccatctctaggtgccatttcctttccacactacactacactacactactcctgtctgccgcgatgtctgttccaaccgctgccgttgcttctgctacgacagacatgtctgtcaagaagatcgctgcccacttgaaaagccatcccggcgctgaagtgatctttatggttggtgcaggaatatccacgtcttgtgggattcccgactttcgatctccgggtactgggctgtaccacaacctggcaaggttgcgcttgccgtaccccgaggctgtgtttgatgtcgactttttccagtcgaatcccttgcccttttacacgcttgctaaagaactgtatccggggaacttcgagccttctaagtttcaccattttttgaaattgtttcaagatcgaaacctcttgagaaggatatatactcagaatatagacactttagaaagacaggccggtattagggatgatctggtaatcgaggcccacggcagctttgctcactgtcattgtattgagtgtggcaagatattccctcaacatgttttcaagtctaagctgagcgaagaccctatcaaggattttgtcaagtgcgatgcgtgcgacgaactgataaaaccggcaattgtcttctttggcgaggacctgccggactccttttcggagacctggtctaaggattccaaatggcttcgtgaaaaaaccaggacatcaaacaaatccaatcaagaccaggaacctcttgtcatcgtagttggcacttcgctagccgtgtaccctttcgcctctctgcccgaagaaattccccggaaagtaaagcgagttttatgtaatttggaaacggtgggggattttaagactaacaagcggcctacggatttggtagtgaatctttattctgacgcgtttgcagaacaactcgttgaagaattaggctggcaagatgatttcaataagatactccgggctcaaactgtaatcacagataatcttaaagaacaattgcttgatattgtgcaggatttggaagatttaagtctgaccaagactgaagacgaacattcaagggacaaagatacgcaaccgcaaactaaggttcacaaccaggaagaagatgcagaggaagaagataagtcctccacgaaaaatagtagtgataacaaatag

SEQ ID NO: 5663 - DNA, 303 bp, Saccharomyces pastorianus
atgcccatggccgccattttcttgaagaacaagttcatcgcctggttttccctgattcagagtttgcacttctacctaaacaccgacgaagacatcgtcgctgcccaaaaggagactaagtcggcctcccccatggaccagcctcctgcaatcaagcttctcatgagcaccatcgggattgtcgtttgctacatgaacttggtcttccctcaacaattggctccgccaaagcctaccgtttcaaaggacgaaattgaaactgtgatcgaaactaccaccaaagtcgagacccaaaccgtctaa

SEQ ID NO: 5664 - DNA, 117 bp, Saccharomyces pastorianus
atgtggtcagaaataacttggagaaagaggtttttcttttacaagaaagattcaaaaggtggacttcaaagcacaaagatactggaaagactcaagtccttaacagcaactgtgtaa

SEQ ID NO: 5665 - DNA, 354 bp, Saccharomyces pastorianus
atgtctccactggaatctttcaatagttttagcttgttttctagattatcaatgttcaagttcctcacacatacaactttttcacgtccattcgtatactccgccctcagtagcgggtgtccagactttctcaacacttcaaactgtatccatggaaattcctggccccatttgtctagcctctttgaagtcaaaaacttcctcatgccttctgaagatcctccccagttgcagtactgcaaagtaacctttttgcatggaaacacaaatgctcccaccccgttacgtcctatggaatttcgagcaatagctttaacaaccatccttgtctatgggccctctgatgctatttga

SEQ ID NO: 5666 - DNA, 243 bp, Saccharomyces pastorianus
atgtacataccaaagggtatatttaatttacatagacatatcactctaaaattcgacattggaaggaggttgagagaattggttggaggacctatcttgagaatcattttgatagttttgatagccacctctgttgttttggtagttatttctgttttggtagccacttcgttggccacctcttcctctgtttcccctattacctctgtaattgccgccacggccacgaccacgacctcttga

SEQ ID NO: 5667 - DNA, 1422 bp, Saccharomyces pastorianus
atgagcgacagaggaggggtaaagcagtccggcagtacaggaaccatgcgtcgaaacggggtatggcaggagttcaagacgcccgcaggcaaaaagtactactacaacaagaacacgaaggaatctcgatgggataaaccagatttcaagaaggcactcggtgtgcaaaacagtgcaaaagcgcctcaggcagagagaaagcccatgtttgcattggagctgatcgactattggtacttgataatatgcaatgatggtacaaagttctactataacggcgaatccaatacgtctaaatacgaaatcgacgaagagggcgctggccagtgcgcagcgttggtaaaatcgttggacaaggaaaaactgaccctcttaatcggcatagccagagggtacaacgtaagagaggaggacgtggaccagatctttaaatcactgaacgaagagatcgatctattcaaaaaaaaccaagtggaagaagaagacgaaaaagaggacgagccaaacgaagaggcgggtgacgcagaggcagaaacaccacctcagacaaattccgcagggcttgtcagcgggtatggctcgtcctcagaggaggaggaggaggaggaggaggaggaggaaccggcgaacgaagatacagatataatcgacgacctgaaccagatcgattccggcgacctcaacgagcgcggcctgtttttccagctgttggacaggtacgagctggacaaattctccacgtggtcattgcaatgcaagaaaatcgagaacgatccggatttctaccagattagcgatgccgcggtccgcgaaagcctcttcgaagagtggtgcgccaaggaaagcggcagcggcagcgaaagcgaggacggcgctgacctgctggagccaacaaagttccactacttagcgcagatagtcgccaaagcggagatcgcgcccgactgcattccgcaggatatcaggaagcaacagagggcgctgttcaaggcgtacagggtcaaggagtacgtgccgtcaaagcgggaccaggaccggttcgtgtcgcagctattgttctattacaaaacgttcagtttggaccagcgaagggagatcttccaggaatttctgcgggatcatgagcgagactttgcatgcgcggtgcaaacgttgcgccaagacaagggccttatcagccgttggcgggcattactcgcagcaacggccgctgatggtgccagcgtagaggacgcgctgctgaggatcgaacaccggtgtggcgtgggcgccatagccttggcggatccgcgctactacgtggtgggtattttggacaagaccgcgggttgggtgcgatggctagccgccgagggtggaccccgcagccgggtggccccggctgcggatgcgggtgcggccgcggggccgtgtggccgataa

SEQ ID NO: 5668 - DNA, 690 bp, Saccharomyces pastorianus
atggttgtgaccggagtagaggttgcagaacttgtcactacagaggatgaaacagcagaactggttacgtcagaagaagtgatagtagagcttgaagcagagctggtcacgtcagaagatgtggcaactgagctggagacagcagaagatgtaacaacggagctagttacattagacgagttaattgaactaatgatcgtggctggagtagaggttgcagaacttgtcactacagaggatgaaacagcagaactggttacgtcagaagaagtgacagtagagcttgaagcagagctggtctcgtcggaggatgtggaagcagaacttgagacaacaaaactggagacaacagaactggagacagcagaggatgtggcaacggagctagttacattggatgaggtagtagaactaatggttgtgaccggagtagaggatgtggtggatcccgttgtgacctcagtagatgggacactggatgagctgacgccggttggtgttttaacttcaattatggtttcaaccgttggtaaactattgagtcctgtgatagtagatgtcttagtgtctgtcgttgtatacacaccagtccatggttccgttgtggttgtcagaatgccagtaattgtgttgttttcgggattcgtaacatcacaattcgcttgggccaggttattgtcaaaagaatag

SEQ ID NO: 5669 - DNA, 288 bp, Saccharomyces pastorianus
atggcagctgtgcacttatacataatttcattcacagcattgatgatatcatcaacgagcgagataggtgggtaccccaaatgctccgtcagtattgacgtcgatctcattgtcggtgccgacatagcttctctggtcgttcgagttggccttttaccgtctgttgatgaagatgaagatcatctatgtattcacttttttattatttaccttttttatttacgcgtaatacaaatttctcaaacgtttcaaaaagtaacgagacaaagtaatatgatatggcaataa

SEQ ID NO: 5670 - DNA, 597 bp, Saccharomyces pastorianus
atgcaaaatgctcaaactagacggtcttccacagactataaagctggcggtgcacgtggtgcaagtggtaacaacaaggctggtatgaacaaaaggtctctggcagatgttgagggagcagagactgtgttgggtcacaaatcctcggtggaaactaaaccgaatgtgcgatggcaggcttctcatagcaatctggctgcgttgcatgacaaggagcagaggtacgaggcggagcatcaccatgctcgacataagcttcatcgccaagttatcccagactacacttctgcttcaaccgcgatgtttagtgactgtatgttcaacataggaccagagaaagtgcgaagtgttagcacgatgaatccatcaggactttcgccaaaacaccctttcaatatgggtgaaaagtttaaagggcccttcccgcagcacactgtagcctcgaagactcacgatggcggggccattattacagaccatttcccctctcttcggcagctgcagccccagcagcatccggcacatcgccactacaagcacaacgacaaggacggcttgaaatcaccttctcaatcctttgtgaaggaacaaaaagac

SEQ ID NO: 5671 - DNA, 402 bp, Saccharomyces pastorianus
  modified_base (294)..(386): a, c, g, t, unknown, or other
atgaacttacaacaggatttcgataaagagaatgccgaatcgttcgaatcacgtctaactgatactataaatacaaacgttgccaaattacaagagttagaggagagaatggcattttgtaaggagagattggtcgccagaaaggaaacgatgaggaaaatggaaagccttctatctttggagagctctttgatgatttccaagaaaaatctaaaattcatgtacaaataccggaacgaggctcttgacctggtttccctggtcgtcatcgttgtgatatgctacgttttttannnnnnnnnnnnnnnnnnnnnnnnnnnnnnnnnnnnnnnnnnnnnnnnnnnnnnnnnnnnnnnnnnnnnnnnnnnnnnnnnnnnnnnnnnnnncgcgtataatctgtaa

SEQ ID NO: 5672 - DNA, 174 bp, Saccharomyces pastorianus
atgcttctgcgaacccctttagtgataataatggatttgaaaatgacggctttggaaacacagaaccgtttattgaaaacccattcgccgatgatactaggaacgctcataaagccaattcctcaagagacgactttacatttgatttgtgagttgtggagacaaataacatga

SEQ ID NO: 5673 - DNA, 894 bp, Saccharomyces pastorianus
atgctcactgccggcagtgaagttggtgatgggcacgcccacggccacggcgtcttgcgggaacaactgggcatgcgtgcccctgccaaacgactccacggtgccctggcgcctgtcccagacgtggatcgaggtccacatgcagcggacctcgagtccgagccttgcttcttgctgctcgagctggaaccctgcgggcaggcgaccggatgcgtgcgccatgcggccgttcttgtccaccacgaccaggaagtccttgcccatggccacgtagtccacggccacagaccccaaatcgcacaccagcgtgggctctaccaccgaccggcacttgcgcgcctgcagctgacacttggtgttgctgccccagccgtatacttgcgggccctgcaccaccacgaagttctggaagcacccgtatactgctatgcggccatctgccgggtccagaaccggcagatggcgctgctcgaactcgtaacgaccgcctcctcgctgccatacatggccacgtgtgtcgaccacgaccgttgtgtcccagccgcatgccacgtccactaccggcgccggcacctcgatgggcgtccaaccaggcacctgctgcagggcagccgtgccctgcagctcacctcgcctgttatccccacacccggccagagttccattgctcatcagcaccacgctgtggttcccaccgcacgctatcttcgacactttactctcacctgccaggacggacctctgcggcgtgtccacgtcctcgtcgtgcgccagtcccagctgaccctgtccgttggacccaaacgcatacacacagctcatcactgccctcctgcagcagcctgcaacagctcctttctgtgcttcttcttcgtgatgcctgttgtatgttaa

SEQ ID NO: 5674 - DNA, 279 bp, Saccharomyces pastorianus
atgacaatggatgccatgttgttccagcaccaacctccactggtgtcactgcaaccactgtttcttcaaagtcttacactaccatcactgtcactcactgtgatgacaacggctgcaatgttaagaccgtcacttctgaggctcctaaggaaacttcagtcaccactgccactaccattgctccaaaatcatacacaactgccactgtcacccactgtaacgacaacggctgtaccgtcaagactgtcacttctgaggctccaaaagccactacagtag

SEQ ID NO: 5675 - DNA, 219 bp, Saccharomyces pastorianus
atgtccgttctctgcagcaccataggttgtcgactctttgctgcgctggccagctttaaaggcgcctttagatcattcaatgataggccaccggcatcatctggccatgctttcacaaacgcgccaacgccaagtgtaaaccccaccgtgggtaagattactgctctattgaccagtttaaacaaaagtggtattattctagccattttggatgcatga

SEQ ID NO: 5676 - DNA, 921 bp, Saccharomyces pastorianus
atgccgtttactcatagcagcaaggcaaagaggccgaaattcctactaaatttgcagatcaaagaactggtgaatatccctcaatcttctgggttttgctacacgaagtggcgcctgaaggatggaacagggacctcaggacataagacagctctggatggagagcaccaatccgcgtcgactcagagtagaggtacaacgcaacacgtacacgtgcagcatcatagggcacagtggaattactcattagacaagccaattctcgtcaagcttcacttagacaaaaatggaaaatttctgaagaaacccttagtactggaggtatttttcgagtttgctgatgggagctccacgtcaaatttgaattccagtcccaatgttaaagtgaagaaaaccaccaattctaacgcaactgcgctaatggctattggtaacaactcatactcccaaaaggtaacgggcaagctactcttggggacagtggacatagacgttgcagaatatgtcaaggaagacgaaactccaactacaaatagattcttactgaagcattcaaaggtaaattctatcattaacgtgtcactgcaattaaaactgataagaggctcctatgaagatttcaaggtttcaaaatcggttactaatgaccaactcgctaattttcgaccgggaataaacactatactggacaattcatccgaattgtccactcctacatcaacaacgaatcaaacgtcaaccaacaacacctccccaaatacggacggtagcggtaacggcacttccgtaccaaaaccaactaacaatggggcacgaaatggtacaagtattaaatcaccgacatctataaacactaagagtaacggagcaacaactaggacaggactgtccacgacgatatcgtcttcgatgaccccgtga

SEQ ID NO: 5677 - DNA, 1047 bp, Saccharomyces pastorianus
atgttgcggtttgctcggtgctactcattggccagaagtaaagctacgcaagttcagagtacggtcttcaagccggaatatgccttgaagtgtggattagagattcacacacaattgaacactggaaataagcttttttcacagtctaccaatagtgccacacccttggcggatgtgcctaaccaccacaccagcttctacgatgtggctttgccagggacgcagccggttttgaatttggaggccattttgtttgccatgaagctgtcgctgtcattgaattcccaggtgaatatggtgtcgcagtttgatagaaagcactacttctacggtgaccaaccccaaggttaccaggtgacgcagcactacaggccgtttgctcgaggcgggaaggtcaatctgtccagggaactcgacggcatcgacgagtcgtccaaggacattagcattgcgcaattgcagatagagcaggacacggggaagtcgcactacacagacacaggcaaagatgttgtcacgctggtcgacttgaacagatcgaacgtcccactcatcgagttggtgaccaacccagattttagtgatatcaaacaggtcaaggcgttcatcaagaaataccagaatttggttcgtcatttgcacatatcttccggggatttggaaacgggtgccatgcgggtggacgttaacttgtcgattaacgaatttgctcgcgtggaactgaaaaacctgcctaacaccagctctatcatcaatgccatcaagtacgaataccaacgacaagtcgagttgatctccaggggcgaaaccgattcactgctggagcctgagacgcggggctggacaggctcttccacagtgaagttgagaagcaaagaaactaccatcgattacagatacatgcccgatccggaattgccgtatatcaatcttgctccggatattatcagtggcgtggcggcatcaatgccggaattgcctgatgacataatgagaatgcttatgcagaagccattccagttgtccttaaaggacgccaagatttaa

SEQ ID NO: 5678 - DNA, 201 bp, Saccharomyces pastorianus
atgttggaaatgaatgacgtggacgtggtcaatgggaatatccttaattccctggaatggttgatttgcctctacattgaaagaatattggtcgataccaatagtaacttcaacgggaacagatgtaaatggtacgctattcatcggttgtccaacaattcacttcacactcacatttggtattcaatatatggaagttaa

SEQ ID NO: 5679 - DNA, 672 bp, Saccharomyces pastorianus
atgatggcactaagaaaatccatcaataacagaaatacagcaactgtaaaatatattgtatcactaagtgcattgagtgtaaattgttgcatctctacaaaaaaagaaatcaaaagtatacgtacctacataattatacaatcttttttcttctttttgttttgcttatccttcttgtccttcagaagtaaattatttgatttccttcgttcaagattggttccggatggacttctaccggcaccacccaagttatccatattcaatagctgcccatttggctttatctccgtcgactgtccagcacctttttgtggtgttctgataggcgaaggacctttcttaacattgttattcatattgatttgcaaaccctgtggctcagaatctcgtttggaatttccagtaaaaaatgtctcggactttgaagaaacggttgagcttggcttcgcaaacgacccttcgttgcctaatccattgtctgtagtagagaataagtttaaagtgctgacacttttattctttttatgttgtttcttactggcagcggcaattccaccttctctggaacctagcttattaatcgccctcttgtcatttttttcagcagccttttcgtaccatttccatgcgtattccaagttacattcgcaacctttgccatgttcataa

SEQ ID NO: 5680 - DNA, 2040 bp, Saccharomyces pastorianus
atgtgcgttagtctaaataacgatgcctgtggggccttgcgaagaagccacgatggcccttgcagcgaaggtgaaggtgtacttcgtggcagtaaatcgatgcccgttggcgagcaagatctattacagtctcccgggatgattaacatgtgtgaatttttgcaagacgatgaagttgttgacgacgagaaatccgtggtacatgttgctacaacaatttctgcggagacaagtgtggaaagcgtagagtccaatcagtccaaaaaggctgatcagaggtatcgtcacattgcgttagatattttggaaggtactttcatagagataccgtataaggaatacgcaaacttcttggggagtgaaggcaaccaccgaattttaactgagtttataaaattattggatccccttccactatcgttattggaggctctttccaatttatcgaatagtatctatttcatcgcagaagcgcaaaatattgaccgaacactggagtgcttgagtaaagaatggatacagtgtcatccggatacccattggaaatcaagctataagttgtgccacattgttttattttctttgttaatattgaattcagatctgcataacgattttcaaatcgaccataaaaagactaaattttctatggttgcattcatcaacaataccctgagagcattgagagaagagagcgaatatgaagaattggaaatctgtgccggcgaacatctgatcatcgacgaactttcagaatactacaagttgctgaatgagacccctttaccgctgcttacggaatccgaaacatcaatcgctacatccgagtacgaaccttctttgaacagattctctactttgggatcgcgagaatatagtatatcaaatctgcgtggtatggcctctagttctacaaccctatatcccagagataatcaaaactctataagagaagtgagcgcgaaatccaacaggaactttcataataataagcccatgcagacgctatactgtaaggaaccgtttgacgatgatttagtaagcgacagcggttctagttggtttgttgacggtctggtttcaattagcaaaaagtcactaccaaacagattctttaagagagacagagatcaagaaactacaccaaaagtgcactctaaaagatcgttttttgggtggcttaaaccatcgaaaagtaaaacgtttattgaccacacatctcgtacaacctctttatcgtacttaagtaaggattccgaatgggatagagtgaaagtacaaatcagagaaggcagaatgcttattttcaaaataaagcaaaatgtgaaggatatccaccaatccaatgggacaaacagcactgctattgactattacaaagaaattagtagttcttattttgcttattcgctatttgaagctgaagcacaagtggtgcaagataatataattatcggctgtgaagcagtaaacataaacaaaaatgcgaaaaagaaaaagggaaactttactgtaatcttccctgaagacatcaatggtcctgaaactgtcttagagtttcaaaccaaagacattgcagaatctcataaattcacgcagtgtatcaacttctgggcgggtaggatttcgcccgtgcccatgacacaattcgaactagtgtccaatgaagaatatgggtggagtgacaaagtctttaccgatcttacgtgctttgatttaaagcaaaccactataagcgaatggaaaccactgctaggcctggaattattatatgaagactcaaaggatatggagactaaattgaaggataggttggaagaattgatggatttcaccaagcagttgggagtatggatagacaggcacaacgaaatcaaggacaagctagttgaaatttggagctttgatgagaattgttttgaagtggttatgaataattggaactccaaatatttgtacatgaatacccaatacaagaagcgactaacttatttagaagctttacagaaagccatggagtctgtcccgctagacatttga

SEQ ID NO: 5681 - DNA, 705 bp, Saccharomyces pastorianus
atgggctcaacgatgttggatgatgtggatgataacatgatgggtataaagtcccttcacctgtacgagctgctaaacaatgtagtgaaaattggcgacaaaacacagttgatgacggctggtcccgaggaagttttgcccgaattgattcaacatatcaccgatacgataccgtttgacctattcataaatctcaagaacgggacaagcgatgccaggagactcattggtaggctgaatggcttgggcaagtttctgaatgataatttcttgcaaaaacatatattcccatttactatacttcggatatgcgagttgtgctatgatccattcaagtactataagatcaatgagttagacaaatttgtaaatgcgttggaaaagtgctgtttggtcactactagttggcaagagcccgaaaacattgacgataagaaggaagaagacgccgatgggaaggacatcaaaagtcaagaagacgtctcgctgatgaagatcccgtggatggatgaagaaactactgaccagctaactccctttattagagaaattgattcgataatgagcgtcaatctaggctatgatgatgaagaagatgaagataatgaagaaggggaagaggaaggattttttgacggcgacgagaatgaggaacctgaaagtaagactaagcataatattctattaaaagacgaaagactctag

SEQ ID NO: 5682 - DNA, 1137 bp, Saccharomyces pastorianus
atggcgttacttgattccgatacttcatcaaagacaatacaaaacagcacagacaccacttcgcttaccggtgacaacgaacgttcttctacagaacgagacaaaaccgccaatgattccgccagtatcgtttctagcagctcgcaaaaaagagaaaatgaccaggaaagtgataagacctcttcaaagaataacgggaaacggcccttgtttcaaagaatcgttgaattcctgcaagttgatccagagtccattgaaccaactaatgagaatcctgaagagcccataagaacgttcaaggagctccgaaaatccttattatccacatatttgtacaacggggagttgaggcctatagaggctaagagaagaacatggacctggaaagaatacactttcttttggatttctgaagctttcaacattaacacatggcaaatatccgctactggtctacaacttggcctgaactggtggcagacctggatttgcgtttggacaggatacacttttgtcgcgttgtttttgattttatcttcaaaaataggcaacaattatcatatatccttccctatatcatcacggatatccttcggtatttatttttccgtttggatcgtcatcaatcgtatcattatggcgtgtatttggacatccacactagcttatattggtagcgaatgtgtccagttgatgctgaaggctatcttcggtactgatttaaacaccagaatcaaggacaaaataccggacccgtatttgaccaactttgaatttatgtgttttatgatcttctgggttgcgtgtctgccattcttgtggctgtcgaccgatagcttgcgttatgtctttgttgtaaaatccattatcgccccatttgcagcatttggtcttttaacttggaccctttgcaaatccgagggtcgtttggcattaggttccttgagtgatactaaacttatcacgggcaaatccgttttggcatggtccgtcattgaagctatcatgagcagcataggaaattttgctactttgattctaaacgccccagacttcacgagatttagtaagacttacaggtcagccgtttattcacaattttttgctttactcttttgcatgccattatttcactga

SEQ ID NO: 5683 - DNA, 2037 bp, Saccharomyces pastorianus
atggctagaagaaagaattataaaaagggaaacaagaagacctttggcgctcgtgatgactcgagagctcaaaagaactggtctgacttggtaaaggaaaatgaaaaatgggaaaaatactacaagaccttagctctcttcccagaagatcaatgggaggagttcaagaagacatgtcaagccccactacccctaaccttcagaattacaggctctagaaagcatgctggtgaagttttagatctgttcaaggaaagacatctacctaacttgactaatgttgaatttgaaggtgaaaaaatcaaggccccagtagagctgccttggtatccagaccaccttgcttggcaattggacgttccaaagactgtcattagaaagaacgaacaatttgcaaagactcagagatttttagttgttgaaaatgctgtcggtaatatctcaagacaagaagctgtttcaatgatccctccaatcgtgcttgaagtaaaacctcatcataccgttttagacatgtgtgctgctccaggttcaaaaaccgcccaattaatcgaagccttacacaaggatacagatgaaccatctgggtttgttgtcgctaatgatgccgatgctagaaggtctcatatgttggtccaccaattgaaaagattaaacagtgctaacttaatggttgtcaaccatgatgctcaatttttcccacgtatcagattgtacgaaaactcaaagaacaagaatgacattttaaaattcgacagaattctttgtgacgtgccatgttctggtgatggtaccatgagaaagaacgttaacgtctggaaagattggaacacacaagcaggtcttggtttacatactgttcaattgaatattctgaatagaggtttgcatctcctaaaagatagtggtagattagtttactccacttgttccttgaatcctatcgaaaatgaagctgttatagctgaagcactaaggaaatggggtgacaaaatcagattggttaattgcgatgataaactatctggtttagtaagatctaagggtgtatctaaatggcccgtttatgatagaaatttgactgagaagaccaagggagacgaaggcacattggaaagctttttcgcgccatctgaagaagaagcctctaaattcaatttgcaaaattgtatgagagtttatcctcaccaacaaaacacaggtgggtttttcatcactgtttttgagaaagttgaggaaaaaattgaacaagaggctactgagaaattatcctcagaaactccagccttggaatccgaaggacctcaaacaaagaaaataaaggtggaagaagttcaaaagaaagaaagattaccacgtgatgctaacgaagagccttttgtttttgttgacccacgacacgaagctttgaaggtctgttggggcttttatggtgttgacaacatctttgacagaaatacttgtctagttcgtaatgctactggtgaaccaaccagagtagtttatactgtatgtccggctttgaaggacgttattcaggctaatgaagacagattgaagattatttattccggtgtaaaattattcatttctcaaagaagcgatatcgaatgttcatggagaattcaaagtgaatcactaccaataatgaagcatcatatgaaatccaatagaattgttaaagctaacttggaaatgctaaaacacctattgatcgaatcattccccaattttgacgacatccgtccgaagaacattgacaatgattttgtcgaaaaaatgactgttttaagctctggctgtgcgttcattgatgtatcaagaaatgaccctaccaaggaaaacttattcttacctgtatggaagggtaacaagtgcattaacttaatggtctgcaaggaagatacccatgagctattatacagaatctacggtattgatgcgaacgccaaggttgctccaaaacctgaagaaaaagaagaaacgacggaaactcctgctgaaactcctgctgaaactcctagcgaggctaaatga

SEQ ID NO: 5684 - DNA, 606 bp, Saccharomyces pastorianus
atgccagttgaaatgtttgcgatgaacacagctgggagggagcgatgtgtgttaggagcagcaaaaggtgacggtcagggcgacttgagattctgtgtgtgccagcgaaaacgaaagaaaataatggagaagaaaaccccacacttgcctcccaccagtgagcagatcctggagagatctacgaaaggagccacgttcctcatgatgggccagctgtttaccaagatggtgactttcgtactgaacaacttgttgattaggtttctgtcgccaagaattttcggcatcactgcctttttggagtttatacaaggaacagtactgtttttcagcagagatgccattcgtttgtccacgttgaggatctcagactctggtaacggtatagtcgatgacgacagcgaggactaccaggagacgcactataagtccaaggtgttgcagactgcggtcaactttgctcacattccgctttggattggttcccgctgtccagtggtcttaccgcatggcagtatagaaacatcaatgcgtatttcatcacgctaccatttttcacgtggtcgatctttcttatttggctcagcattattgtcgaactgctga

SEQ ID NO: 5685 - DNA, 594 bp, Saccharomyces pastorianus
atgttgaactatgccgcgagatcgagattcgaaagcattgcggtgaccaccgggtgtattgtcaattttttagttgtttacgctgttcagcagtctcgctacccgatgggaattgtcactgcagatagtgacaaggaaggtatcgctatactggcgtttgcattgggaaaagtgactcattcgatcaccttattagcgtgttactactgggactatcacaagaatttcaaaccaaagaaattgttcagcactaaattgacgaagataaaatcatctgagagtaacggcataaagaaaaattactcgaaaaactcatcttatttcttccaaaatgatatcttggagcattttaaaaaagtatatttccaactatgtttcaagcatttgttgacagaaggtgataagctgattatcaactccttatgtactgtggaagagcaaggtatctatgctttactgtccaactacgggtcgctactgacacggttattattcgcacccatcgaagaatccctgcgattgtttctggctcgtctgctgtcatctcataatcaaaagaatttgaaactagccattgaagtcttgtcaatttga

SEQ ID NO: 5686 - DNA, 1986 bp, Saccharomyces pastorianus
atgatactcattcatggactatatgccatttggatatttctactcttttccttggtcaatgcgaagggattttcccccagagtaacaaagactatttcggaatattcggtcggtttatggagttttgatgattctaacactctacttagaacgcaagatgattccttggccattagttttgatgctggggaaaaatgggaaaagattaatgagactaaagaaggtgtcgaatggatatatatggacccctttaatgggcacgacagagccattgcagcgccactggtcgaaccatacttctacatgaccgatgatcaaggtaaatcgtggaaacttataaccatagaggattctgaagaggagtctttgattcgtggttgcgaaatatctactcatcccacaaacaacgaatatcttattgcaacttgtagctactgtaaagaaggagagggcggcgacatgagcgatgagcattggtttgataaagcttacggatctagtgatggtggcaagtccttttctgagatcaagacttctttggaagggaacgagaaaagtctttatagcatcgctcgttgtgacttcatcaaatctagcaaagattctgacttgggtggcaatgacgcctcaataatttgtctttatcattattatgatctcgctgaacgtgatattaaaagtactattaccgagtcgcaactgtttttaactactgattggggtaaatcggtcaaagaattcgatcaatttaaagataaaaccgttgattcatacgaagtgttgaagtctcacgtggtaatcttgacccaaggtgatagatacaataagatgtcttttgtggatatatggatatccaatgatctgtcaacttttcaaatggcccacctgcccactcaactaagacattctgtccaggaagggatttctgaagactctatcggaagaatcgtcttacctatatctagagaaacgaatgatgacgaaaaagacaagtccagcacgtcagaaatcctaatttccgaccctcaaggttttaagtttacccccattaaatggactgatatggaccaatttggatatataagtcttgctcaacctgatttcttaaagggaacaatgattgcatcgttttccccttcatttagcgatcacgatggaaaaggcaaggaccagaaaagtaagagaaaagccaaaatatccgttgataatggtacgacatgggcaaatttgaaagttgttgatccagagaatgcagactcatttggctgtgatattaccgatcccgagaattgctcgcttttccctatgttatatgagctagaagacttaactccttctgcggggatcttaatgaataacgcttttgttactgatggtggaaggggtgattggggagatcaaagaacctttatttccagagatggtggcttgagttggagagtagcattcaattcttcttctttatttgctgttggtgattttggcaatgtaatagtatctgtgccagaatactctgaagaagacggtgatgggatttctaaattctattattccttagatcaaggtaagacttgggccgagtaccagttgggggccacgattttctctacgtggctgattaataccacgccagatggatcaggaagcaaatttgttttgtacgggttcagccaaacgggcataaccgatccagaatatctaacctatgctattgacttttcaggtgcctttgatggaaaaacctgtgaagatgataaagatttcgaagactggaatctggccgaagggaagtgtgtcaatggtgttaagtacaagtacaggagaagaaaacaggacgcccaatgtttagtcggcaaagtgtttgaagatctaaagctgtatgaaactagtacatttttgtctcatgatgatggacagacaacaaaaaagtttgacactaagaatgagaacattgtcgaagctatctccaacccatacttcaattaa

SEQ ID NO: 5687 - DNA, 288 bp, Saccharomyces pastorianus
atgaaactagtacatttttgtctcatgatgatggacagacaacaaaaaagtttgacactaagaatgagaacattgtcgaagctatctccaacccatacttcaattaacaattttgacatcgaggataaagcttctgtggctcccgaacaagaacacacgtcatatacggatcaggctgccgccagcgatattccagatgcgttgccggcacgcagtgaagaagacgcacacaagtctgacccagcagctccactcaacgagaacgattgggggatatatcttgtgtag

SEQ ID NO: 5688 - DNA, 2256 bp, Saccharomyces pastorianus
atgcctgcaccaaaactcacggagaagccagtctcttccaagcaagtacaggagaccatgagtgccagtgccagtgccagtgccagtgccagtgccagcacggccaaaggcgccaagacggatgaacaggaatatgtgtacaaggagcctagtgcgattaaaaaagtgctttactccgttgcgacgtggctgctttacaacatcttccactgtttctttagagaaatcaaaggccggggcagctacaaggtcccgcagcaggggcccgtgatttttgttgctgcaccgcacgctaaccagttcgtcgaccctgtgatcctgatgggtgaggtgaagaagtccctcaacagacgtgtgtccttcttggtcgcggagaactcattgaagcagcccgccatcggctttttggccagtttcttcatggccatcggcgtggtcagaccccaggataatttaaaaccggcaagaggcactatccgcgtggacccagaagactacaagaaagtcattggccgcgacacgcacttcttgaccgactgcgcgccaagggggctcattgcgctgcccaaatccatggggttcgtagagatccagtccatagagagtgatacgtgtttgactttgagaaaggagttcaaaatggccaaggccgaggtcaagaacactgttctcaacggcaccgtctacaagtatgccgacaaggtcgaccaatcttgcgtttaccacagagtcttcgagcacttggcacacaacaactgtatcgggatcttccccgaaggcgggtctcacgatagaacagacttgttgcccttgaaagcgggagtggcgatcatggctcttggctgcatggacaagcatcccgacgccaacgttaagatcgttccatgcggcatgaactactttcacccacacaagttcagatccagggcggttgttgaattcggcgaccccattgacataccgaaggaactggtcgccaagtatcacaacccggaaacgaacagggacgccgtgaaagagctgttggacaccatatccaagggtttgcagtccgtcaccgtaacatgttcagactatgagactttgatggtcgtccaggcaataagaagactgtacatgacccagttcgccagcaagttaccgctgcccctgattgtggagatgaatcgaagaatggtcaaaggttacgagttttacaggaacgagccggaaattgcggaactaacaaaggacataatgtcgtacaatgccgccctaagacactataatctgcccgaccatctagtggaggaggccaaggtgaatttcgccaggaatcttgggcttgtcttcttcagattaatcgggctttcaatcctcttcgccctagcaatgcccggtattattatgttctcacccgtgttcatcttagccaagaagatctcccaggacaaggctcgcaccgcgttatccagatctacagttaagataaaggctaacgatgtgattgccacatggaaaatcttaatcgggatgggattcgcccccttgctttacatcttttggtccgttctaatcacctactttctcagagggcaaccgtggaacaaaatctacatcttttctgggtcttacatctcctgtgtcatagtcacgtattccgccttgatcgtaggcgacattggtatggacggtttcaaatctttaagacctttagtcttgtctttaacctctccaaggggtctacaaaagcttcagaaggaccgtggaatcttggcagagaaaatcatcgaagttgtcaacaactttggaagcgaactattccctgatttcgatagcgccgccctacgtgaagaattcgatgttcttgacgaagaagaagaagaagaagacagaaagacctctgaattgaaacgtaggaaaatgttaaaaaagcaaaaaattaaaaggcaagagaaagatttgccatccttcagtgacaaaaatgaccacgatgacatttatgaacaccataatcaagattcagatggcatttcgttggtcaatagcgacaactccctctctaatatcccgctattctccaccaccttccaccataaatcagagatttctttggcttcaacatccgttgcgccttcctcgtcatctgaatttgaagctgaagacgaagccctcgaagaaaaaaatgggttggctagtaagattgcacaagctgtgctgaacaagagaatcgacgaggatgctgcaagggaagaagaagaagacggagaagcgtag

SEQ ID NO: 5689 - DNA, 150 bp, Saccharomyces pastorianus
atgggcgattggaagggcagcgacagctggcctgcgccagcaagaaaaacgtcgtgcgtctccagggcggtcttgcactccaacgtgcggtggaagtggtgggcaaagtcgacgctggagagggcctccagctgctgcttcggcacgtag

SEQ ID NO: 5690 - DNA, 1227 bp, Saccharomyces pastorianus
atgtttcaaagatccggggctgcccgtcacagcaagttacttttgcctcgaaagtgccgctttaaatcctcatttgcagtcgctctcaatgcagccagtagattggtaactcccaagattctttggaataatcctatttccctagtctcgaaggaaatgaacactttggcgaaaaacatagtcgctctgattgggtctggccatccgctgcttaacaaagttactagttattactttgaaacagaggggaaaaaagtacgtcctctattagtcttgctactatcgagagcgctttcggaaatccccttaacagaaagaaaccatttgaagattgaccgtgcagatgttcctgaggacccaatttactccaagccgggccaaaatcaactctttcagcgtcccgtaagtagtatttcgccacttcatatacttcacggtattaaaccactaaatcccctgacgaaaggtccggaacctttgctagaaaaagccttcgataaagaaagaggcatcttacccaagcaaagaagattggcagagattgtagagatgattcatactgcatccttgcttcacgatgacgttatcgactattccgatacaagaagaggaaggccaaccggcaacgctgctttcactaacaagatggctgtattggctggtgattttctcttaggaagggcgacagtatcaatttcgagattgcataaccctgaagttgtggagctgatgtctaatagtattgcaaaccttgtcgaaggcgaattcatgcaattaaagaatacatccatcgatccagacacagatactattgaaaatggccataaactgcttccggttccctctaagaaacttgaagttaaagagcacgaatttcgtgttccaagtcgtcaacagggactacaattatctcatgaccagctaatagaaactgcgtttgagtattacatacacaagacttatctgaagacagctgctttaatttccaaatcgtgtagatgtgccgctatattatctggttcaacaccagccgtcgttgacgaatgctatgattttggtagaaatcttggtatatgttttcaacttgtagatgatatgcttgattttacagtctctggaaaggacttaggcaaaccatcaggtgcagatttgaaactaggtattgctacagctccagttttatttgcatggaaagaagtccccttagtgagggttaatgcggccgcg

SEQ ID NO: 5691 - DNA, 312 bp, Saccharomyces pastorianus
atgtctgctaacgattattatggtggtgccgccggcgagaaggccgagtactcccgtccctccaacccccctccctcctccactcaccaggcaacacccaagagcgtgggtacccaccgcagcaacagcagcagtactaccagcagcaaccgcaacagcaacagcagcccggatactacaatcaacaagggtacaaccagcaggggtacaatcaacaaggatacaatcagcaaggatacaatcagcaagggcaccagcagcctgtctacgtccagcaacagcctcctaaaaagggcaatgaaggttgcatga

SEQ ID NO: 5692 - DNA, 717 bp, Saccharomyces pastorianus
atgtcagtgacttgtgaggatgacatagatcgaatcataaagtttgttgctgactgcaatgccaagtttgaaaattcaaagtgcgatataagagaatctgcccttggcgggttgggcgtctttgccaagtccgacattgcgcagggcgagacaatattgacgctgaataagtcctcaattttctctgcatctaacagctccattgccaatttgttatgcgataacgatattgacggtatgttggcgctaaacatggcatttatctacgaaatcacagttttcaagaacactagtcattggtactcctttctgcgaaccatccggttccacgatgataaaggccgcttgaatctaccgccaagcttttggagtacaaatggcaagaaacttttgaagggaactagttttgatactttattcgatgctttggcaccagaggatgaaatcatacaaggatttgaaaccgccgtaaatctggcacacaactggaatgaagaatttggattggaggtacctgcagaattcttccacattgatgagaagcagcgtgaaaaagattataaattgaagctagaaaggttcatttcggtggcatacacgttatcgtcaagggggtttgaaatcgattcgtttcatgaaacagcgctagtccccattgcggacctgttcaatcaccatgctacaaaacctgatttgaagttttgtatcgttgtatga

SEQ ID NO: 5693 - DNA, 507 bp, Saccharomyces pastorianus
atgtgcaaacacctgatagcggaggaattcctggaagcaaaggaacaagagaagcatacgcctgcgacgggcggtacaggtactgctactattgacgataacttaatcaataggctcgaaaataatttggaggacgcatgctctaataagagcgcggatgacgaagacgatgatgatgatggtatactaaacccagacgaatgcgttgacttggtgctaaagaacgatgtaagccagggtcaggaaatatttaattcatatggcgagctgtcgaacgtttttctattggccagatatgggtttaccatacctggaaaccaatatgatattgttcatttgggacccgattttttggaaattttcaggaaagatgacaaacaccaggagaaagttaagtggtggagccaagtcggccatggattgttttctgcatggtacgctcaaatgcgccaggaagaagatgagacgaacagaacgaagcggggatcctctagagtcgacctgcag

SEQ ID NO: 5694 - DNA, 450 bp, Saccharomyces pastorianus
atggagaaaccatcctttttggaccaagagccgccggcaggttacgtaccaggtattggtcgtggtgctacaggattttcaaccaaggaaaagagaagggtctttgatgataatggaggcagaaagataccaaaacgataccgcgaagacatcagctctaatcaagaacgtcaaactgaaaacgacgaagatgaggaagctgcaaaagtatttgaaaagcttgagctgaaattagcacaaaaaaaaaagaaaagaaacaatggaaataacgataacgatgaagctgatggctccgctgtgaaaacgcaatttgcagacctgaaagaatcattaactactgtaactgaggatgaatggatgaacattccagaagctactgattttacgagacggaacaaaagaaatagaatcccaagagcaactaaacagaaagacttatgccgcacctga

SEQ ID NO: 5695 - DNA, 1128 bp, Saccharomyces pastorianus
atgaattacatgacttacgattatgatccccaacattgtttggaaacgtcctttaataatttggcgtttcacccgcatcaacaatcacaacagcaagggttatatgaagctggagaaaggaatgatgccaggccgggactaatgaacccgttaggacagtccaataaaatgaataataccatgattcctcaaggttcatcggctaatccattaggaggacagcataacttgaatagttcggcaaacttcaacatgcctacatcaatgaatacctacaactatcagaatgtaccacaggcgccagctagaaatgctatgaaccacaataacatcatgagtggggcaactgctaacgattattggctggatccaatgagtaatatgtcgaacaataacaaagaggccaacggaaatcccaacgactcgatgtcttcgatgtccaatatgactgctaaaacttcgatcaacagcacggcgttcaagaactcatttgttcctttcaatcatgtagcaactcttccaatgactaacgtaaacagcaatgagacgaattcgaacaaagacgaaagaatggaaactatggaagtgaaactacaaataaaagaaagccaaattgaatcgctagagaatgaaattcaaaaattaaagaaaatttttaacgaaggcttaaattacaaacagaacgaatacaagtatgaaaaggaaaactcccatataccccaagcttttgagttgcctgcttcattagaagtgatatttagaaagctatcatcatcacttcattcaaaagagaaagagctagcagatacaaaggagaatttagagagtatattaactgcactggctctaaacccaacaaattcagtgaccaaatatggaagatacgatgcagaatccattgctcacaaaatggtggtaaggctagagaatctaaccaatgaaaacaaagaaatggccaagatgttggcctatggcaggtcaaaagaaactcaaatcgagctacagttgtctaaaaaagaaaatctagaattaagggaaaagatagcattcttagagacccagttggctatgaagataccttcaaaagaaataccgacctgcagcatgcagctgcatgcgtcgtttaca

SEQ ID NO: 5696 - DNA, 1440 bp, Saccharomyces pastorianus
atgccattatcagaagactttggatcttctggtaagaaagaaacctcgccggattccatttcggtacgttcctttagtgctgggaacaaccttcagtcattgacaagtgaaaaaagttattccagagactcaaccgggaacgacaaacttatacatagatttgtggactcatttaagagggcagaaagtagcactacaaagaccaagcaaataaacaagaacacttcagatttagaagaggatgttcattcctttacgtcggactccgacttgaaaaagtccatgaaatcccgtcacgtcgtcatgatgtcgctggggacaggtatcggtacgggtcttttggttgctaatgctaagggtcttcattacggtgggccagccgcattggttatcggctatgttttagtttcctttgtcacatatttcatgattcaagctgctggtgagatggctgtcacttatccgactctaccagcaaatttcaatgcatactcctccatattcgtctccaagccgtttgggttcgccacagtatggctttactgtttccaatggctaaccgttttacccctagagttaatcaccgcatccatgacagttcaattttggaacgataaaatcaatgctgatattttcattctaatcttctttgttttcttacttttcgtccatttctttggtgtgaaagcatacggtgagacagagtttattttcaactgttgtaaaattttaatgatagcgggcttcatcattctttccgttgtcattaactgtggtggtgccggaaatgatggttacattggtggcaaatattggcgtaacccaggtgcatttgctggtgactcttcggcttccaggttcaaaaacatttgctatattttagttaccgcctatttttcgtttggtggtatggaattatttgcattaagtgttcaagaacaggagaatccaagaaagtcgacccctgtggcagctaagagaagcatataccgtatcctcattatctaccttttaactatgattttgattgggttcaatgttccgtataatgatgatcaattgatgggatctggcgggtccgctacacacgcatctccctatgtgttggcagcctccatccatggtgtcaaagttgttccacatattatcaatgctgttattttaatttctgtcatttcagtgtccaactcctccctatatgcgggcccaagattaatgtgctctttggcccagcaaggctacgcacccaaattcttagattacatcgacagagagggtagaccattaagagctttaattgtgtgtagtatttttggcaccgttgcgtttgtcgcagcctcgtccaaggaagaggtcgtgtttacatggctagcagccatcgcaggtttgagtgaactattcacctggacttccatcatgttatctcactttcgtttatag

SEQ ID NO: 5697 - DNA, 2754 bp, Saccharomyces pastorianus
atgttgtctagagtatctttattgagaaactcaagagcctttcagcaggccaaatggcgcacttatcgcttccaggtttcgccaactgtacatgcttcatactaccacatcctgtctggtgggaaacttgctcagtctattcgtgaaaaggctgatgacgaaataaaatccattaaattgaaacatcccaatttcaagcctactttgaaaattattcaagttggaggcagacccgactcgtccacctatgtgagaatgaagttgaaagcttcgaaggatagtggcgtggactgtgtcatagagaaatttccaccagaaataaccgaactcgagcttttgaagagaattgccgacatcaacgatgacgaatctattcatgggctgttaattcaattaccattgcctcgtcatttggatgaaacaacaatcacaaatgctgttgactacaaaaaagacgttgatgggtttcatagatttaatgctggtgaattggccaaaaagggtggtaaaccatactttattccatgtactcctcacggttgcatgaagttactcgaagaggctcatgtcaagttagatggaaagaacgccgtagtgataggtagatctagtattgtcgggaacccagttgcctcgttattgaaaaatgccaatgcaacagtaaccatttgtcacagtcatacaaagaatgttgctcaggtagtttcccaggctgacataattgttgcagcttgcggtatgcctcaatacgttaaaggagagtggatcaaagaaggtgccgtagttatcgatgttggtattaactatgttcctgataatagcaagaaaagcggacagagattagttggtgatgttgaatttgactctgtaaaggaaaaggcatcttacataactcccgttcctggtggagtggggccaatgactgtggctatgcttgtttctaatgtactcttagccgcaaagagacagtttgtggaatctgaaaagcttccaactatcaatcctcttcccctacacctgaaaacaccagttccatcagatattgatatttcaagagcccaaagcccaaaacacatcaatcaagtggccgaggaattgggtattcactcacacgaactggaactgtatggccattataaggcgaagatttctccaagtatcctcgaaagattagaatctcgtgagaacggtaaatacgtccttgttgcgggtattaccccaaccccattgggtgaaggtaaatccactacaactatgggactggtgcaagccttatctgcccatttaggcaaaccttccattgcgaatgttagacagccctccttgggccctactttgggtgttaaaggtggtgctgccggtggtggttacgctcaagttattcctatggacgagttcaacctacatttaaccggtgatatccacgctattggggccgccaataacctgcttgcagctgctattgacaccagaatgttccatgaatctacccagaagaacgacgcaacattttataagagattagttccaagaaagaatggtaagagaaagttcaccccatctatgcaaagaagacttggaagattaggtatcaataagcaagaccctgataccttgacgcccgaggaaatcaacaaattttccagactgaatatcaatcctgatactatcacaatcagaagagttgtcgatatcaatgacagaatgttgagacaaattaccattggagaagctgctacagaaaagggcctcacaagaactactggatttgatatcactgttgcctctgaattgatggctatcctagctttatccaaaaacttgcacgaaatgaaggaacgtattggacgtatggttattggtgccaattatgataatgaaccagtaactgtagaagacgttggttgtactggcgctctgactgcattgttacgtgatgccatcaaacctaacttaatgcaaacgttagaaggtacacccgtaatggtccatgctggtccttttgctaatatttctatcggtgcatcgtcagtcattgcagacttaatggcattaaaacttgtaggcacagtcaagaacccattaaacaccaaggacacccatgaacctggttatgtggtcactgaagcaggatttgattttgccatgggtggtgaaagattctttgatatcaaatgtcgttcctctggattagtaccagatacagttgtcttagtcgctacagtaagagccttaaaatctcacggaggtgctccaaatgttaagccaggacaaccattaccaaaggaatacacagaagaaaacgttgatttcgtcgccaagggtgttaataacctggtcaagcaaatcgaaaacatcaaaactttcggaataccagttgttgtagcaatcaacagatttgaaacggactcacaagcagaaatcgaagtaatcaaaaaagctgcattgaacgcgggagcatctcatgccgttacttctaatcactggatggaaggtggtaaaggtgcattagacttggctcatgccgtggtcaatgcaacaaaagaaccaaaaaactttgaatttttgtacgacgtcaacaactcaattgaagataaacttactagcatcgttcaaaagatgtatggaggagcaaaatcgaagtttcaccagaggcccaaaaaaagattgacgcttataaggaacaaggattcggtaatcttcctatctgtattgctaagacgcaatactcattgtcgcatgatccatctttga

SEQ ID NO: 5698 - DNA, 81 bp, Saccharomyces pastorianus
atggatgctgcacaactaaaaagtcaaatacaacaataccttgtggaatcaggaaactatgaattgtatgatacagcataa

SEQ ID NO: 5699 - DNA, 528 bp, Saccharomyces pastorianus
atgaatccgggcggtgaacaaacaataatggaacaacccgctcagcagcaacagcagcagcagcagcaacagcaacagcagcagcaacaggtacaacaacagcaggctgcagttcctcaacagccgctggacccattaacacaatcgactgcggaaacatggctctccatagcttccttggcagaaactcttggcgacggtgatcgggctgcaatggcgtatgatgccactttacaattcaatccctcttccgcgaaggcgttgacctcactggcccacctataccgttccagagacatgtttcaaagggccgcagaactctacgaaagggctttgcttgttaaccctgaactatcggacgtatgggctaccctgggccattgttatctgatgctggatgacttgcaaagagcttacaatgcctaccaacaagcgctatatcacctcagcaaccccaacgtaccgaaattatggcatggaatcggtattctttatgacagatacggttccttggattatgctgaataa

SEQ ID NO: 5700 - DNA, 2142 bp, Saccharomyces pastorianus
atgggtgaatggcagggcgccaaagaggcctacgaacatgtcttggctcaaaatcaacatcatgctaaagtgttacaacaattgggctgtctttacggtatgagcaatgtacagttctacgaccctcaaaaggcattggattatctcttaaaatcattggaggcagacccttcggacgccactacatggtaccatctgggcagagttcatatgatcagaacggactacaccgctgcatatgacgccttccaacaggccgtcaacagagattcaagaaacccaatattttggtgttctatcggtgtcttatactaccaaatctctcaatatagggacgctttagacgcttacactagagctataagattgaatccttatatcagtgaagtttggtacgatttaggtaccctttacgaaacctgtaacaatcaactatctgatgccctcgacgcttataaacaagctgcaagattagatgtaaataacattcacatcagagaaagattagaggccctaaccaaacagctggaaaatccgggcagcaaatcaaatggtgctccttcaaacgcttctcccgcaccaccccctgtgattttacaacccaccttacaacccaatgatcaaggtaatcccttgaatgctaggatttcagctcaacctgctaacactgctgcatcaatggttcaacaacagcaacatccagctcaacaaaccccaaccaactcttctgccacaatgtacactaatggagcttctccacaattacaagcacaagcacaagcccaagcccaagcccaagctcaagcccaagctcaagcccaagcgcaagcccaggcccaagtacaagcacaagcacaagcacaagcacaagcgcaggcccaagcacaagcacaagcgcatgcccaagcacaagcacaggcccaagctcaagcacaagcacaagcgcaagcccaagcgcaagcacaagcgcaagcacaggctcagcagcagcagcagcagcagcgacaacaacaacaacaacaacaacaacaacatcagcagcagcagcagcagcaacaacaacaacaacaacagcaacaacatcaacagcagcagcaacagcagcaacaacagcagcagcaacatcagcaacagcatcagttgcaggctttaccaagacaacaacagcaacaggccgttcctgtacaaatgttgaacccacaacaaggccaagcttatgtcacccaaccaaccatcattcaagcacaccaattacaacctttctctgcgcaagctatggaacatcagcagagttctcagttgccatctcaacaacaactacagtctattcagcatcaacaacatcttcagccccaacctcaggctccacaacctttaattcaacacaacctggaacagaactctttgccccaaaagagatacatggaaggcgccattcacaccttggtagatgccgccgtatctagtagcactcacccagaaagtaatagaaattctcctcaccaactaccacccgccatatcgaatcaaacctctgcagtaataactccgagcattgaaccacgatcaaagaagcaaagactaaattcttcaggttcaaatatcagccagttagtaaatactgcttcttctatcgaggagaattcaacgcctgagacgactaacccacaacctgcagtagcagaatctgatgttcctgtacaagaggagatacccacaaaggcaagttcaatcccttcaacaatccatgctcaagaactctcacaagaagccactaacaacgaacagattactaaaacatcttctgctcctcctcccatggaatcgtctaacgtggaggccaagccagctaatgtacaaccgactttatcgtcagaaaattcaacgacgaaagggaatgaagaaggtactgctgagacaatcaaactttcgactactactagccctaccgaggaaactccagtagaagacgacgtgggacgggacactaaagagggaaacggcactccaacccaaccagttgcatcctctgccgaggaaacagaccctacagctgctgtggaaactgaaccacaacaagatgaatctctcgctacaacggcaacggtaattaagcctacgttggaaacaatggaaccgtaa

SEQ ID NO: 5701 - DNA, 201 bp, Saccharomyces pastorianus
atgtttccgcagtcgattgtgttaatgggtccagcggctgttgaggaactgcagcctgctgttgttgtacctgttgctgctgctgttgctgttgctgctgctgctgctgttgctgctgagcgggttgttccattattgtttgttcaccgcccggattcattttttcttttttaccagtgttcgtggttgctgctggtgtag

SEQ ID NO: 5702 - DNA, 111 bp, Saccharomyces pastorianus
atggctttttgtatactagcgtgctttgtggagacattaagcggcaattccaaacttggaattctaggtagatctaatgtaaattcatctgctattaccggcggtgcttga

SEQ ID NO: 5703 - DNA, 189 bp, Saccharomyces pastorianus
atgcatatgcaaactggaccctttgtatatatatatacgctatgtataaaagaagaagaggaacgcccgcaaacttccacacacaaacttccacacacgcaattgcagtatttcctatggagctcggaaacaggagcgcagcctatgcaaacaactattgatcttcctgttttcatacacacaatgtaa

SEQ ID NO: 5704 - DNA, 819 bp, Saccharomyces pastorianus
atgacttttgtacagcagtttcaagaggcaggtgaaaggtttaagtgtctcaatggccttttatgggttgtttttgggcttggtgtcctgaaatgtacaactttatcgttaagatttttagctctcatttttgaccttttcgttttgccatcagttaactttgataaatacggcgctaaaaccggcaaatactgtgttgttactggtgctagtgatggtattggtaaagagtttgctaaacaaatggccaaacggggatttaatttggtattgatctcgagaacccaatcaaaattggagactttacaaaaggaactggaagacaaataccatgttattgtgaaaattctggcaattgatattgcagaagatagtgaatctaactacgaatccatcaaggaattgtgtgcggaattaccaattaccgttttagttaacaacgtcggccaatcacattccattcctgttccatttttagaaacagacgagaaagagttgagagacatcataactatcaacaacactgccacattattgattacacaaattgttgtaccaagaattacggaaaccgtcaaagctgaaggtaagaaatcaggccaccgtggtttagtcttgaccatgggttcattcggtggattgattcctaccccatttttggctacgtacagtggttctaaatctttcttgcaaagttggtctaactccttagccggtgagttatcaaaggatggtatcgatgttgaactgatcatttcttatttggttactagttccatgtctaaaattagaagatcttcgttgattattccaaaacca

SEQ ID NO: 5705 - DNA, 837 bp, Saccharomyces pastorianus
atgaaaaaggaactgaaatttctcataatagcaaatgtcgtgctacttttctccataatacactatacctttgatttgttgacgttgtgtatagacgatgcctccaaagatgcgttattagacgaagagctgaacccagtcaaggaccctaattcaaagttcaatgaaactcacccacaactgataccgaaaattatacatcaaacgtataaaacagagaacatccctgaacaatgggtaaaaggcagacagaagtgcgttgacttgcacccagactacacctatattctatggacggatgaaatggctgaaaatttcatcaaagagaaatactcatggtttctcgatacattcaagggttacgaatacccaatcgagagagcagatgcaatacggtatttcgttctttcgcattacggtggtatctacattgatctggatgatggttgcgaaagaagattagattctttgttgactgtgccggcattccttaggaaaacctctcccacgggtgtgtctaatgatgtgatggggtctgtacctagacacccatttttcttaaaagtcatcaaatctttaaagcactacaacaaaaattggtatgttccgtatatgaccatcatggggtcgacaggccccctttttattagtgtcatttggaagcaatataaaagatggtcgaacacagccggtgacgatgcagtaagaatcttacaaccggcagattacaagatgcacaccaactcgtttttctccatatctaaaggttcttcgtggcatacgggtgatgctaatttcatgaaagttctagaaaccacattttatcctgtgtggtaa

SEQ ID NO: 5706 - DNA, 1770 bp, Saccharomyces pastorianus
atgctaaatcgtgctattactaataaatatggattttcttttcatcttaggaggtttgtccactcaaatgataaatctcttgatgaactttctactttctctttgaagaacagccacacgcatgatgtttccgtcggtgattcgagcagtgttttgagtgattccgacatcgacaagattaataatttggcattttgtgattataccagtgcccccaaagaggcaaacactaaggaaggtacgttgttggatgagaaactagccaatgtcaaaaacttgttcggagcagaccctgaaaatcgggcatttgtcaattacaagctccctcaaggcttaaaaaatccctacattgatattcagttgaaccaattaaaaaggaaaaggctatctgtcacacagttatgtaccacccaaaactggtgtgaattaagaaacttttacgatttttactcccaaaatttgtctagtcagctactagatttgaagttccagatccagaagggtaagaagattcataagtcactggaagacgaaactcatcccgaattaaatcagtataatagtttcgtacaggatttccttcccctgaccaacttggctatggatatcgacagtgatatgaacactttgctggataattggtgtagttcgatcagcagattaatctctttatttaccagtggtggtggccattcaagagaaatcatttgtcatggcttcattaatatccaaaacggtaagctagtaagagatttgaccaaagacggaaacacctcagaggaaagcgttataatatcaggcatcattgatcacctgacttttagaaacaagcgtaatcatcaagtgcagaaacgtacaacaggtctcgaccgggaagatcaaagttgggatagcatccttgctaaattactatcagacctaccaaccttgaaatcaaacaatgaaattgtcatctctgatatcaagaccaggtcagtaccgaaaatgccttccattgagtcggtcgtacaatcgtctaaattacagacaatgtattataagtattttctttcccatttaagccaagatatgacccaaacctatcatagctttttaatcaatgcccagagaagagggctcgatgttgacgcgcctatagattctacgaagattctaactttcatattgacaaacccgcttttcgctaatgacatggatcacctcctggatggaaaaccgatacactttgccccatttgataacgacaccaaaaaacctagtacattcgatatgacggcatttaataatttgctcgatcaaggttccacatcctttaccataccaacagaacaagaggaagacgatttggaaccaacaaaatgcatatctttacaagactataaacgtttttatacaaaatggaagaccccaataactctaaaatattttgccgcaagactgtcacagatttattatattgtcggaaatctcgtttccaatgacctgatgatagaatactattatcataatgataacttccataataccatattcccgtatgatccagtgaaattggaaaaacacgctcatgatgtagcaatggtttggttcggtcacagagatatgaatccaattgaacctgttcagaaaaaattcaatctatactgtaaatattgcgactacaaacacgtctgttcttggaagaataaaaacgagcttaaactggctgatttgggcaaagaattacaaaaaatcattctcgattcaaaccaacataatttaagttcctaa

SEQ ID NO: 5707 - DNA, 792 bp, Saccharomyces pastorianus
atggaagccagatatacagacccttcaaaactaccaaaaggtactcctgtaactattgccaaatggaactttactggagttaatgttcctgaaggtcaagattctgttcccgttaaggtaaagctaagatgtgatccatccggcttgcatattattgaaagtgcttatactttagaagaaattacagttcaagagccagtacctttaccagaagatgctccagaagatgctgaacctgtgtttgaggaggtcactaaaacagtcaagaaggatacactgggtatgacagtggaaacgtttggcttgaatccggttgaactgaacaatctaatcgaaaaagaaaatgaacttacaaaccaagataaactagttgcagaaactgaggatcgtaaaaatgcccttgaagagtatatttacactcttcgtgctaaacttgatgatgagtattctgattttgcatccgatgcagagaagaaaaaattgaaaaatgcgctagctacgactgaagattggttatatgacgacggtgaagattctaccaaggcaaaatacgtcgccaaatatgaagaactggcttcgttgggtaacgttattagaggaagatatttagcaaaggaggaagaaaaaagacaggcgttgagagcaaatcaagaaacctcgaagatgagtgatattgctgaaaaattggcggctcaaagaaaggcgcaagccggaagtggcgatgatggcgaaaacactgacgaaaacatggatcttgattatctatatactcgacatttagcttccgtttag

SEQ ID NO: 5708 - DNA, 1161 bp, Saccharomyces pastorianus
atgagtacaccatttggtttggatttaggtaacaataactcggtcctagcagttgctagaaatagaggcatagatattgttgtcaatgaggtgtctaataggtctaccccatccttggttggttttggtccgaggaatagatatttgggcgaatccggtaagacaaagcagacatcaaacgttaaaaataccgtggaaaacttgaaacgaatcattggactgaatttcagggatcctgaattcgatattgagaataatttttttacatcgaagttagtagaactgaaaaatggcaaagttggcgccgaagtcaagttcggcggtaaaacacacactttttcggctactcaactgactgctatgctcattgacaaagttaaacataccgtccaacaggaaacaaaatcaacgatcactgaggtctgtcttgctgtccctgtatggtattctgaagaacagcgttataatatagctgatgccgctagaattgcaggtttgaatcccttaaggattgttaacgatgtcactgccgctgccgtatcatacggtgtgtttaagaatgatctaccgggccctgaggaaaaaccaagaattgttggtttggtggacattgggcactctacctatacttgctccattctggatttccgcaaaggtgaattaaaagtactaggtaccgcttacgacaaacactttggtggtagagattttgatcgtgcaatcacggaacatttcgctgatgagtttaaagccaaatacaagattgatattagacaaaatccgaaggcttacaatagaatcttaaatgctgccgaaaaattgaagaaggtactctctgctaacaccaatgcccccttttcagtcgaatctgttatggatgatattgacgtttcctcacagctgactcgcgaagaattagaggagttagtaaaacctttattagaacgcgtgacagatccaatatctaaagccttgtcccaagctaaattgactgttaacgatgttgattttgttgaaataattggcggtacaacccgtattccggttctgaaacgatcgatttctgatgcctttggtaaaccattgtcttccactttgaatcaagatgaagcggtcgctaaaggtgcggccttcatatgtgccattcattctccgacttga

SEQ ID NO: 5709 - DNA, 198 bp, Saccharomyces pastorianus
atgggaagatttcgttgggattatccagaaaactctgtatctggcttttggggcgaaacaacctcgaccatcgactggtgcgaagagaactatgtggtctctccatatattgcagaatggtcaaacactctcacaaacagtgtgtttatactttcagccgtatatacaacctactccgcatacaagaacaagctggag

SEQ ID NO: 5710 - DNA, 171 bp, Saccharomyces pastorianus
atgtccagtaactccttcactaacttcaaattggccactgaattatcagcttggtctaaattgcaaaaaatttacgaatcccaaggtaagactttgtctgtcaagcaagaattccaaaaggatgccagcgtttcgaaaactaaacagactttcaccaatacgacgttctaa

SEQ ID NO: 5711 - DNA, 1878 bp, Saccharomyces pastorianus
atggagccaatcgaagatctactttcagagcttactgatgcgttcaaaactcaaaaggaggaccttattgcgctggtaacactaatcgatatttatagtgaacaagttgaccaggaaggcacgtttgatgagaaggctaaattcattgaaaccctaaggggattgttagaggagaatccgaccattactggtgaaattggctgggatgtacccaaaggcctattaaaattcttgtcaaaagagaatatcgatgtaagcaaagtattatgtgttaataatattattcacggtgtaatgaggtgtttctatgtaatttcgattcatggagaaccaaaaaaatgtctggttactggtttggaattgctttcagccctttctgttgaagatgtttctgaaaacaatgatcaacaaaataaagaggagtttgtcaatgagcaagctgctgcgccagctcctgcagaaacggttactaaaagttctgatccgagcgacagttcttattatggtgaaaggaaaaacataaaggaattctttttaacgttgaaagcttacattctatttgagtttattggagcgaacctcaaaagaatctccactttgtatccttcaaaatacctaggagctgctgtggcaacgattgagaaattcgtttatgaccacgctgattcatttgaagacgcacttttccttcttcgtagggtttatacattttgcaggaattacatttccccagacacgccgaaagatatacagttaaacgcacaatttactcaagaaatgcttgataaagtagtagagaaagaaagcgagttacaagtgagacttttacgtaggctctgcacatttggaatttcgtcgcctatcaaaactgtcaacaccaatcctgatacaaaatactactgcgcactaaatcatcaaaagtttcaaccaacggtatattacaccgaactgcttgagttatattgtaggttttatcaactggcgtattcgcttgatgttgatataaaagcagaatttcagaacgtattaaaagaatgcagaataatttacaaatctgtaccacaagagactgacgctgttaatgatgaagcgaagttggtcatggaaagaatggtatataaactagcttatacttttgaagtacaaaaggctgcaaaagaaaggagcgttggcttagatcttaatggtattgttttgttttctggtatcaattatttagagaccaatgaacatctggtacagaaaattacaatcacggatgccatttatctttacttaagatttaccaccccttcattatattccaaagtgtaccatagtgtagcagttgaatctgttaatcgttattggctatggtatgcaatcacaactgagtctttggaaaatgttaaaacggaactcaaaaatctttcagtatttgttacaaaagctttgttgcaggttctacttattaagaattgtgttcaagtcaatcgccagttacgaatgataactttcaccctcctcacgagactactatgtttggttcccgagaacgttgcatttgactttattttggatgttctcaagatatgtcccttcccattgggcaaaacatctgtattgtgtatcctaaaagatctttcaaggcaacgcgtttccaaaagagatgataatcctgaaaccagttcaatcagtgaaggactgtcaaagctgggaatcaatgaagatcaaaagcccaagaaaagaaacatcaaatattatattcaattagatccttccaaaatggtagctgtccatgaatgctgtttacgaactatccacgactcattcactacagacgctaagaaaggcgagatattgttgttatcgacttatttgattttctcatcgtactga

SEQ ID NO: 5712 - DNA, 219 bp, Saccharomyces pastorianus
atgacacagtcgtcatcgtccttaccatttgtagttttttttccagcatctgcactatacctgaaactcttccatcgttgtgccacctgttcagcgacctcagatctctttcttttggcaccactcattgatcctctttacactgatcgccatctgacttcttgtcatcgttattcttgtccgggctcatcatattacctatttttttccttttcataa

SEQ ID NO: 5713 - DNA, 1581 bp, Saccharomyces pastorianus
atgatgttttcgacctcgtcctcttcaataaattctgacatttcccaggtgctatcggaaaatattccaagtagatctactaccctcactagagactctacacaaaaccgaataagtgaagactgggatagcgaaggcttcaccgataagttgcccaagaaattgattcagttgaagaaactgaaaaacggcggtactacgattaaaaaggctaaggaggatttcgaatattgttacgattcattacggctgtacgaaaacccatatgtaacttcttctgtagataaaaaaagtggttacagcattgaactacgcctagatgacaagtacaaaacgttaatgttttcagatttgcaactgaataacgattttccattgtattacgattcctcattggaaaatataccaagacgcaatgaaagagaagccgtcacgcctttacaaataaagggaaaaattagaatacatattgacagagatgaccaggcgcttttaatcacttctcaatcaatttctttaaaatgcttcactaaagaatacgcgtgttttgttaattcgcaaataagtgaaaattccagcaatagacaaataattaagcaattaaaccatacagattttttcgagtcttccacttaccccaaacaacaattaaaagtcatacatcattcattgagtgacaagaaaattcttctagcaaaaggcacgtatgattacccatttacatttacacttcaagccaacacttttccggccacgttctcttccttctttggcaagacacatttccgaatagaaagttcgacttcgataatgagaataccaagtaaacctaaaggttttctcacttttctaaaaaatgagaatattacagacaaggttattttgacagaagagattaaggttaaaagagttttgccttcaacaaatatgctcaaatatgaaatgttccagctacgatcatacaacacagcaaatgatgtagtgatttctgttattggaaattccaaattaattgagatcggcacgcctttccaaatgatcctgtcgatcgtaaaagccgattcttctatcgatttacatgaaacctctttgacagtagcacaaagaatggcaatacccagtattgatttaaaaagcaaggatatattgccggaaccctatattaagaaatctgaatacctcctaaaaaccgtcgaaagtcaaagttttgattctgacaaaacagtatacgggttttgctttgacgacgttgttattccaaactacaccgaaggtctaccgagctggttcaaaacgttttactgcgaacctagttcattttatcccaattatgttgctctcaaagttactcatttacttttgttccgaattaattatagcaggattgaaatggtagaaggagtggaagtaaagaaaaattatcgcataacagtaaatttcccggttttgattggtgatagtgatatctcaaccagttctctgttgcccaggtatgaaaaattcgagaatattagcgatttacaagatgatcctccattatattcgatggtaataggtgaagacgtagatcccttaaattga

SEQ ID NO: 5714 - DNA, 1623 bp, Saccharomyces pastorianus
atgagtctcttgcaggtgtcacctttaccgcagatcaaggacgttgtgctaggagataccgttgggcagggcacatttgcctgcgttaagaatgcccatcttcaaatggatccctctgtaattctagctgttaagtttgttcatgtccccacttgtaaaaaaatgggactcactgagaaggacatcacaaaagaagtggttttacaatccaaatgctctaagcatcctaatattttgagacttatagattgtaatgtatctaaagactatatgtggataattatggaaatggctgatggtggtgacctctttgataaaattgaacctgatgtgggaattgatactgacgtaacccagttttattttcaacagcttgtcagtgctattgattatatgcatcggaaatgtggtgttgcccatcgagacattaagcctgaaaatgtcttattagataaaaacgggaacttgaaactagctgattttgggcttgcttcccagtttaaaagaaaagacggcacactacgtgtatccatggatcagaggggctctccaccttatatggcccctgaagtactctactccgaagcgggtttttatgcagatcgaacagatatatggtctattggcattctcctatatgtattattgaccggccaaacgccctgggaactaccgtcgttggaggatgaagattttgtcttcttcatacaaaacgatggaaacttgaactgggggccttggtcgaagatagaatttactcatttaaacttactccgaaagattttacaacctgacccagttaagagggcgactttggaagctttgaaagcgcatccctggatatcacgtagagtcgtatttgctggggatgacggcctctgtaatgatcctgacctcctagctaaaaaactcttttctcacctaaaggtttcattaagtaatgagaattatttgaaattcacccaagatgtaagttccaacagcaggtacatttctacgcagcctgtcggcaatgagttagctgaacttgaacatgattcagtgcattctaaggcaatagcgaatactcagcgtgcattttccatatatgattcgaatatgaatggtaacagtgatacctgcatgacacaagaggctaaatggacgcaatttataagtaatgatatggccgccttgcaattccattccgacgaacatgattttaccaaaccatttcaaaattgtttacagttcaatcccaataagcttactaaattttacacttttcaacctatggatattttgctgccgattctagagaaggctttaaacttatcacgaattagagtgaaaccagatctttttgcaaattttgaaagattatgcgagtcattaggctacgataatgttttcccacttatgataaacatcaagacgaaaagcaaaggtggttgccaattatctggtagtatttccatcatcaagattgaaggagacttgaaaaatgttggattcgaaaggaaaactggtgatcctttagaatggagaagattgttcaagaaaatttctaccatttgtagagatattatcttacttcccaaccaaataaaagaggaacccaaaaatacggtgattatgcattga

SEQ ID NO: 5715 - DNA, 468 bp, Saccharomyces pastorianus
atgagaacggccgtacggcagttgctggaagcaactgcttgcgtctccagagaatgtctcctgataaaaagaaaccacgaaatacgaagagcaagaaagcgcctactcagtgactggtacaggctgggtgctgacgcaaaccaggatacccttttggtagtcgcaaactctgcttggaggtttctcgccgtttggcgaccgttcgtaacctcaatccaacacgcaaccaaagaattgtttaagcaaatcgcctattaccttcttcatagcaacgtcgacttccaaagggtcgcggcactaatccaggtcataatgggggaggaccatttgcttttctccatggatgaggtcctaaaagaggtagtagaaatacaacaatacctcgataaaatgctcccgctcgacacccaccaatggcaaaagccatccccctttgagtctggaaacctgaaaactacgcattcataa

SEQ ID NO: 5716 - DNA, 348 bp, Saccharomyces pastorianus
atgttgtcgttagtctttgacttttctgtctcaatctgttctcgtactttggagtccctcatctggtccttgaccagtccctcggcttccagagtggacctgatcttcttgttgtccaggtcttgtttgcttgcctcatttagcagtgtcggtatcattgtttcactgcttttgtttaacctctccacttgtaacttggttcttttcctctcagcagtgctgattggcctctttttttgctgcttcttgccaacaccaccgttcttgccctggctcgtctttctcatgctgctcttgcccattttcttccttctgaatgtctttggtactctgttcctttttatgtga

SEQ ID NO: 5717 - DNA, 210 bp, Saccharomyces pastorianus
atgagaatccggttgcggtctcgagcatcagggatgattttctcccaggggcccaagttagccaattgccaatctgtgacaaatgcatcatctgaaaaaactgcttggacacaactcgtccttagaaaaagtgaaatgaagacacacaccagggccgtacacgttatcttcattgttgtgtatggggcagtagtggggtgtgaacgctga

SEQ ID NO: 5718 - DNA, 141 bp, Saccharomyces pastorianus
atgaatcaatacttgtttggtaatgatgtatggaatactccgtactatttttactgtgataaggattgtaacgatttcttcagaaccattattaaaggaaagaattccgttatgcaggtggatcctactgaaaatttatag

SEQ ID NO: 5719 - DNA, 1437 bp, Saccharomyces pastorianus
  modified_base (1342)..(1401): a, c, g, t, unknown, or other
atgtctttatcatcaaagttgtctgtccaagacttggacttgaaggacaagcgtgtcttcatcagagttgatttcaacgtcccattagacggtaagaagattacttctaaccaaagaatcgttgctgctttgccaaccatcaagtacgtcttggaacacaacccaagatacatcgtcttggcttctcatttgggtagaccaaacggtgaaagaaacgaaaaatactctttggaaccagttgccaaggaattgcaaactttgttgggtaagaacgtcactttcttgaacgactgtgtcggtccagaagttgacgccgctgtcaaggcttccgctccaggctctgttatcctattggaaaacttgcgttaccacatcgaagaagaaggttccagaaaggtcgacggtcaaaaggtcaaggcttccaaggaagacgtccaaaagttcagacacgaattgagctctttggctgatgtttacattaacgatgccttcggtaccgcccacagagctcactcttctatggtcggtttcgacttgccacaacgtgctgccggtttcttattagaaaaggaattgaagtacttcggtaaggctttggaaaacccaaccagaccattcttggccatcttaggtggtgccaaggttgctgacaagattcaattgattgacaacttgttggacaaggtcgactccatcatcattggtggtggtatggctttcaccttcaagaaggttttgcaaaacactgaaatcggtgactctatcttcgacaaggccggtgctgaaatcgttccaaagttgatggaaaaggccaaggccaagggtgtcgaagtcgtcttaccagtcgatttcgtcattgctgatgctttctctgctgatgccaacaccaagattgtctctgacaaggaaggtattccagctggctggcaagggttagacagtggtccagaatctagaaaattattcgctgccactgtcgcaaaggctaagaccattgtctggaacggtccaccaggtgttttcgaattcgaaaagttcgccgctggtaccaagtccttgttggacgaagtcgtcaagagttccacttctggtaacactgtcatcattggtggtggtgataccgctaccgtcgctaagaagtacggtgtcaccgacaagatctcccatgtctctaccggtggtggtgcttctttggaattattggaaggtaaggaattgccaggtgttgctttcttatctgaaaagaaattctttcctcacttcacgctaaaaatgatagtttatttttttcttttctctttcctcacttctagactaaaaatgatagttaagattttgattnnnnnnnnnnnnnnnnnnnnnnnnnnnnnnnnnnnnnnnnnnnnnnnnnnnnnnnnnnnnaagatttttattagatctttcctcacttcacgctaa

SEQ ID NO: 5720 - DNA, 648 bp, Saccharomyces pastorianus
atgcgctataataattatgataactctggaaattcttttgtaactaaagtagttaaaaaaacagacataaagaaaatcgtattagaaaataaggacattggcggctggaaactaaacggtaagaggaaggcctataaggaacgtggaaaagtgtttgtaagctgttcatttattgaagtatctctttctcagataaacattgtggatattgaaaaaaaattccaaagtgcggagcaactaagaggcataacaagggacatgcttaatgagaaggattgttcctcacatgaaatagctccctcaaagaattgtgcaaatactacccgcggctctgaaagagttacctccagcggtggaataaaaacttttagaaacagtcagggccaaggccaaggtgatgatgggtctactacttcttcaaaaagacatactaaaacccccgcaagccgcccaaaaagagaaaaaagacaaactgttcttccaaacggtgagattaaagaatgtgccagatgtagagacacttggactattcagtggcgaagtggtcctgcacaaaatagggagctttgcagtccatgtggactcgcgtatggtaaaagaataaaaaaggaagaagacgagagaaaggggcaagcaaggaccagatga

SEQ ID NO: 5721 - DNA, 1233 bp, Saccharomyces pastorianus
atgagtagatatgagcgagatcgaagtcccggtcatgaccctgatatcgtgaagggttcatactcccaaacgtcccttaggtcactacatgaattaaattacaggcatcctgccggtataagcgggcttaactctgcaggaagtccgcagcagtcggtggcatccttatcgcaaatgcggctggaaagtttaactaaagataaaaattgggaggaagtggaagactttggtctggaggagttaagagacggatttttcgatgctgcatttactaaaccagataacaaaggcagatatccggacagtgccatcggagacgatgatgatacagcaaggaaaaaattgcagtcaagttttagtaatgtttttcacgacgtgtggacggctgtctataagccaatcatccgtttcccaagggaccttagggagaactgcgtatccttattcaagtttttcatcgcctattttgttgcaatagtgatttgcgtcatcaggccgtcaggtaaatgggttggccacgaatttaggtattttcttcctattgctgtactcatacaccatccggttagaaacgtcggtgtccaactggaaatgactttaagttccgtaatcggcgcaagttttggcctcggatggtccgctttggctttgtatgtgtccacagcgacgaaaccagccgctaactaccagggtgggattctattccaaagtctcaccatggctctttttttggccgtttggttaagatctatttatcgccgttttttctatgttgctgtctcgttctccctgtctattattttcacccatacggtccgattggtctcgtctaagaaagatttgcaatggcaaattttttgggatttcggaatctcttacttgtttggcctcctgctatctctcttggtatgtgtatgcgtatctccacacggtggcaatgccgagttgatggagcactacacggagtgcctacaaaccacaaagtcttttttaatggcattagttgatacagacttggttaatgacaaggaaaaaatataccaagcacaagtgaaaatggtgaaaactttgaacattgacctgtctcaaggttttagagatttcgttaaccaattgacgatttctaggtttgaccttcaatctttgaaaaatttaaggaattccctaaccgcgatggaaacttcgttaagagtattgcccttgcccccaagatttttagtgatattgagttga

SEQ ID NO: 5722 - DNA, 2787 bp, Saccharomyces pastorianus
atggacaccttcgaagaaccagaatgtcctccacataaacctcgtgcatttgtaaaatcaacgaaagagtttgaggattatccaaacaacgcaatcgttcctgtccagttcgtgtcgcttttaacttcaatacgattgactgaaacaaaatgtttgttgggattttctaattttgaaagtgggaaagatcaggcgaaacaatgttacacagtcaagttaaagttcaaagacaaaaatacagaaaggttagcaagaatgacaatatccttggtttgtcgatatttcgacatcgaattaccagatttagatttggacacagaatcatgctctacatttatactggaggatattcatttcgaaaggctgtgctttgcgagctgcaaaaccttatacgtgtcgcaacacgggaactacaccctatttttggaagacatcaagccattggatttagcatacgtcataaacaccttatcaaaagggcctaaaaactgtagcaacggagtttctttatcggcaccaaatgtagggccgaatttgaaggaatccctcgcgactattttcgacaatttgattacaatgaacagagatcagaaaaacagttttaagtttgtgaagttgatacactatgatacagaggtcaaagagtttatccaagaacgacaaaggcttctattacggaaatcaaagcccaacccagtcgatcccttttttgttccccacagattgggcgctgcttctcttgaatcgcagaatgaattcaactcgcagcttatgacgctcaatgtagatgaagaagttacaaacacgagcagcacaagagacgacctggatgcgcactcggaccccattgaggattctgacgtttcatcatcctcttctacgggcacgtttctaagctctagatcgtatatccagtcgcagactcctgaaaggaaaactaaagtacccaacgactggccccaccatggttcagaaagaaaaaaaagaaaactgtctttcacggaccgtacggctccttcatcacaactcggtatcgattatgaacggctttccatggccagcttaggctcgatggaaagattcgaggggaagtttgtcgggatgtacccgcccgagttccacagtgtggatgaatttaagcattgcactctaaaactgtatttcacaccattgccgctatccgcgggcttggaccgagtactggtaccgggtgtgaactgcctcgagatcatactccctaccgttgaacgaatccgtgacctgtttggtagtttgaactgtcaaagcgacaagatatcagcgattctattaatggacaaaccgggtctggttaccgcagagattgaacggattctgtgggacaatgacgaaaccgttagtcccggcttggcggtctggagcttgaagaatatccgcactgacgcccatgcgcacccgcccgcgccactagcatcattaccgtcaaacccgcctcgattgaagatgcgggaactggccaagaaggaccccaccatcgaattccgtgagttggcgttgagcgcgttcgataccaagttcgtcaccatgttcggcatggtggtgtcttgctcctttgacaagcctgcgttcgtctcgtttgtcttcaccgattttaccaagaacgacatcacccagaactacctctacgacagatacctggtggactacgaggccaaactggagctcgatgaaggcttcaaagccatcatgtacaagaaccagttcgaagtgttcgactcccgcatcgagaaaatattcggcaggcgccttaaggatctgcagaacggcaatgacgaaaacgtgtcgcagcacgggatagtatgcaggatgaacatgaaagtgaaaatctacaacggcaagctgaacgccatcgtgcgcgaatgcgtaccgatcccgtacgcccaggtaaacaccctagcgacgcccacgcagttcgagcatctgcagtcgttctaccagcgggcattcggcagactcggcgagtctgccatctcccgctacttcgaccagtacactacgtttttccccatacaaagaaacaagcaccacctcgccgaactgcaacccgccgcggcaaaacacagcccagaaccggcaccgttacagaccgcaccacccctcagggaagagtacatcccggacctgaacgcagacgtcgagtccttcgacgtcgagttcactgacatcttcccgctcctccactctttgacccgcggccgctcactgcaaccgcagccgcacaagaaccacacgctgtacagctgcgagggccgcgtcgtcgccatcgagtgccacccaacggacctctgtttccacatcacggatgaacttacgccctcgcaaacccgtggcccggatccgcaacgtgtgctgcaattgcacatcactactcccaagaacctcgcgtactttttcaaccgcacaagcgctttcctacagagccaggacctcgacggaagacacgcacaactggcgcagtttctgggacaccgattcaagttcaacataacctcctcgcggttgctgctgctgctgccgccggcagcagcagcagcagcagcaacagaattgcagatctggtgtcccatcgaatgcactttccaggaattgcagcagcagcacgcctacacggccgcagcagcagccggttcagggagccctggcggaattaacgctgatccaccgcgcctacttgccgcgctagatggcgtcaccgtgaaaagggaggacgccgatgacgccgtgaccgccgggttgtccgcctcgtga

SEQ ID NO: 5723 - DNA, 363 bp, Saccharomyces pastorianus
atgcaggatgaacatgaaagtgaaaatctacaacggcaagctgaacgccatcgtgcgcgaatgcgtaccgatcccgtacgcccaggtaaacaccctagcgacgcccacgcagttcgagcatctgcagtcgttctaccagcgggcattcggcagactcggcgagtctgccatctcccgctacttcgaccagtacactacgtttttccccatacaaagaaacaagcaccacctcgccgaactgcaacccgccgcggcaaaacacagcccagaaccggcaccgttacagaccgcaccacccctcagggaagagtacatcccggacctgaacgcagacgtcgagtccttcgacgtcgagttcactga

SEQ ID NO: 5724 - DNA, 996 bp, Saccharomyces pastorianus
atgagtatgtcaagcaaaaacgagaacaaaataacggtagaacgaaaggtgtcgacggattttggccaggcttttcaactccaagggcttgggtccaatttaagatcgattcgctccaagactggtgccggtgaagtaaactatattaatgctgctaaatctgtaaatgataaccaactgcttgcagagatcggttacaagccagaattgaagagacagttttccacattgcaagtttttggtattgcattctccattatgggtttactgccatccatcgcgtctgtcatgggtggtggtctggacggtggtcctgcatccttgttgtggggttggtttatagctggttttttccttttacttgttggtatttccatggctgaacatgcaagtgccattcccaccgccggtggtttatactattggacatactattatgctccagaaggttacaaagagatcatttcgtttattattggttgttcgaactctctagcattaacagctggtgtgtgttcaatcaattatggtttggctgaagaaattgccgctgccgtcaccttgaccaaagatggcaatttcgatgctacaagagggaagctttacggtatatttgctggggcagtggtactcatgggtatttgtacatgtattgcctccgggggcattgctcgtttacaaacactgagtatagtttccaacgtgtttatcattgtcttattattcattgccttaccaatcggtaccaaacataatataggaggttttaataatggtgattttatattcggaaagtttaaaaactttagtgactggaataacggctggcaattctgcctagctggttttatgcctgcagtttggacaattaattcatttgattcatgtgttcatcaatccgaagaagccaaagatgccaaaaaatctgttccgattggtataattttatccattgttgtttgttggatcttaggttggtttattattatctgttga

SEQ ID NO: 5725 - DNA, 1869 bp, Saccharomyces pastorianus
  modified_base (1833)..(1833): a, c, g, t, unknown, or other
atggatcctaatcggaatagctctagtgaaacactacgccaagagaaacagggtttcctagacaaagctcttcggagggtaaaaggcatagcactgcgacaaagcaatagggacaaagactctaaagccgatgatgtgccgattagtatacaaactccaacagacttacagccgcaggattttgataggcagtcttatgtattgtccgtgcttacggacgacatttccaccattgataataactcagtattattttcagagcctccacagagccaatctatgatgatgtctatatacgtaggtgtatttgttgctgttggtggctttctgtttggttacgatacaggtctgatcaatagcatcacttctatgaactatgtgaagtcgcatctagcacccaatcacgattcgtttactgctaaacagatgtctatcttggtgtcatttttatcgcttgggactttttttggggctctgactgccccttttatatctgatacgtatggcagaaagcccactatcatttttagtacaatcgtcatcttttctattgggaactccttacaagtgggtgctggagggcttaccttattaatcgtgggaagggtcatatctggtattgggataggagcaatttcggcagtggtgccattgtatcaggcagaagcaacacacaaatcattgagaggtgctattatttccacttaccaatgggcgatcacttggggtttattagtgtcaagcgcagtgtctcaaggaacacactcaagaaacgatgcgtcttcatatcggatacccattgggttgcaatatgtttggtcatcgatcctagctattgggatgttttttctaccagaaagtccgcgttattatgtgctaaaggataaactagatgaagccgccaaatctttatcgtttttgagaggtgttccggtccatgattctgggctactggaagagctggtcgaaataaaggccacttatgattatgaggcatcttttggtacctccaattttgtagactgcttcatttcaagtaaaagtaggccaaagcaaaccttaagaatgtttacgggaattgctctccaagcatttcaacaattctcaggcatcaatttcatattttactacggtgtgaattttttcaataagacaggggtcagtaaaagttatttggtttcatttataacttacgctgttaatgttatcttcaatgttcccggtttattctttgtggaattttttggtaggcgtaaggtcttggttgttggtggaataataatgactatagcgaactttattgtcgcaattgttggttgttccttaaaaacagtagcggctgcaaaagttatgattgcattcatatgtttattcatagcttctttttctgccacttggggtggtgtcgtttgggtcatctctgcagaattgtatccattgggcgtgaggtctaagtgtaccgctatatgtgctgcagcaaactggcttgtaaattttatttgtgctttaattaccccctatatcgtggacactggctctcatacatcgtcattaggcgccaaaatattttttatttggggctctttgaatgcattgggggtaatggtggtttatttgactgtttatgagacaaagggtttgacactagaagaaattgacgagttatacagtaagtcatcttcaggtgttgtttcgccaaaattcaataaggatataagagaacgtgcattaaaatttcagtacgatcctttacaaagattagaaaatggtaagaatagtctcattgctgcacaaaacagttctgatgaccaaacaccaaggactctagagatnccccggtaccgagctcgaattgtaatcatgtcatag

SEQ ID NO: 5726 - DNA, 333 bp, Saccharomyces pastorianus
  modified_base (17)..(50): a, c, g, t, unknown, or other
atgaatacatttagagnnnnnnnnnnnnnnnnnnnnnnnnnnnnnnnnnntttacataatatgaagagtctatatataaatgtaggtatgaaaggagctagaagaaacgaaagggaaaacctgatatgtttctatgtgcttgtatttggagtgttcaaatttgttgatttttcacattgtctcttttccagtttagcacgttctaaggcttctctttttaaattcttatcctcctttatcttggatttaatctttttacaccagtgtctgaatttatcgtctttggatgctgttgcatattttagtataaggtcgtggtgtaacattcattaa

SEQ ID NO: 5727 - DNA, 1677 bp, Saccharomyces pastorianus
  modified_base (1586)..(1638): a, c, g, t, unknown, or other
atgtctactaaggttccatctaacgccacgtttaagaacaaggaaaagccccaagaggtccgcaaggccaacatcatcgctgcgcgttccgtggcagatgccatccgtacttcgctgggccctaagggtatggacaagatgatcaagacgtcccgtggggagatcatcatctccaatgatgggcacaccattttgaagcaaatggccattctgcatcctgtggctaggatgctggtggaagtctctgccgcgcaggacacagaagctggtgatggtactacctccgtggtgatcttgaccggtgctctcttgggtgctgcagagagattgttgaacaaaggtatccatccaaccatcattgcggaatccttccaaagggccgccaagagatccgtcgacattcttttggaaatgtgccataggatctcgttgagcgatagagatcagctagttcgcgctgcaactacctctttgagttccaagattgtgtctcagtactcctcatttttggctcccttggcagtggactctgtgttgaggatttccgacgaaaactccaagaatgtggatcttaacgatattaggctggtgaagaaggtcggtggtaccatcgacgatacagaaatgatagacggtgtggtcttgacccaaactgcaatcaagtctgccggcggtccaacaagaaaggaaaaggcaaagatcgggttaattcaattccagatttctccaccaaagcctgatacggaaaacaacatcatcgttaatgattacagacaaatggataaaatccttaaagaagaaagagcatatttgctgaatatctgtaaaaaaatcaaaaaatccaagtgtaacgtgttgttgattcaaaaatctatcctaagagatgctgtaaacgatttggctcttcatttcttagcgaagttgaacattatggtagtgaaggatatcgatagagaggaaatcgaattcttgtcgaagggtttgggctgtaaacctattgccgatatagaactgtttacggaggatagattaggatctgctgatttagttgaagagattgatagcgatggttccaagatagttaagctgaccggcataagaaacagcaatgcaagaccaaccgtttccgttgtcatccgtggtgccaacaacatgattatcgatgaaacagaacgttctttgcatgatgcattatgtgttatccgttgtttggttaaagaaagaggtttgatcgccggtggtggtgctccagaaattgaaatctctcggagattaactaaagaggcaagagccatggaaggtgtacaagcatttatttggcaagagtttgcctctgcattagaagttatcccaacgactttagctgaaaacgcagggctaaacagtatcaaggttgttacagaattgcgttctaaacatgagaatggtgaattgaacgatggtatatctgtcagacgatccggtactacaaacacttatgaagaacatattttacaacctgtactggttagcacaagcgcaatcactttggcttccgaatgtgttaaatcgatcctacgtattgatgatattgcattcagtcgttnnnnnnnnnnnnnnnnnnnnnnnnnnnnnnnnnnnnnnnnnnnnnnnnnnnnnatagtgtacttttctattaaacaaaaacataaaacataa

SEQ ID NO: 5728 - DNA, 705 bp, Saccharomyces pastorianus
atgaagacaagtaaaaaagtttccaagaaaagaacgctgaaaaaccttcacggcgccttgaaagggctattgaaagaatccagcaagaaaaatgaggccaagatacgaaaacgttctgattacggttctgttccccaagtgcacgctccgattatcgaaagaggggcaaagaagaggatgcacaataagaacttgcggccaatcgctgaaaaaaatggccacatatacatcatgtccaaggaaaatcaggttatccccaagctaagcgacgacgaagtcatgcagcgccataaacgggcagacgaaaacatgaaggaagtatggtccaacattataaacaaatatgagtcccttgaagaccaaggtgatctggtggacctgaaaacaggcgagatcgttgaagataacgggcatatcaagcaactgactaccaacgacactaccaaagataaaaaaacgaggtacacaagcgtcctcagggacattatcgacattagcgacgaggacgacggcgacaaagatggagagtacaccatatgggcagacaacagcgagtcaagcgattttgatacggatgtggatgtggatgccggaaacggccaagaagaagaggaagaggaagaggagccggagactgacgcagacttcaagggttacgaagccaagctgtcaagaaaaataccgagagacttaacacagcagtag

SEQ ID NO: 5729 - DNA, 1194 bp, Saccharomyces pastorianus
  modified_base (1141)..(1142): a, c, g, t, unknown, or other
  modified_base (1154)..(1155): a, c, g, t, unknown, or other
atggatgcagatttagacgtcccaatgcaagatgctgtcaccgaacagttgacgcccacagtgtctgaagacatggacatgaacaataatccgggagataataacgaagaggaattttctattgaagacttaaagccaggctcctcgggcatagcagaccataagtcgtccaagccacttgaactaaccaatacgaatataaaccagctcgaccaatggattgagcaccttggtaagtgtgagccattatcggaagacgatgtggctcggctatgtaagatggcagttgacgtgttacaattcgaggaaaacgtcaagccgatcaatgtccccgttaccatttgtggtgacgtgcacggtcaattccatgacctgttagagctgtttaagatcggcggcccctgcccggacaccaattaccttttcatgggtgactacgtggatagaggatattactccgtcgaaaccgtctcctatttagtcgccatgaaagtcagatacccgcatagaatcactatactgagaggtaatcacgagtcgagacaaatcacccaagtatacgggttctatgatgaatgtttaaggaaatacggcagtgcaaatgtttggaaaatgttcaccgatctgtttgattatttccccattacagctttagtagacaacaagattttctgtctacatggcggtctttcgcccatgatagagaccatagatcaagtcagagagctgaacagaatacaggaagtgcctcacgaaggccccatgtgtgacctcctatggtccgatcctgatgatagaggcggatgggggattagtcccagaggtgcaggcttcacttttggtcaagacgtcagtgagcaattcaatcataccaatgatctatcactaatagcaagagcccatcaactggtcatggaaggttatgcctggactcatcaacaaaacgtagtcaccatctttagtgctcccaattactgttatagatgcggtaatcaggcagcaatcatggaagtggatgaaaatcataatagacaattcttacaatacgacccatccgtaagacctggtgaacctagcgtcagtagaaagacaccagattacttttatacatatatgcttcataatatatatatatatatanntagatatatatnnatttgcgtggcttttctcttttaccattttcatagttaa

SEQ ID NO: 5730 - DNA, 504 bp, Saccharomyces pastorianus
atgtctgcaaatagcgaatttcaaagcgtcaccgaatcggccacagccccaaccacgaataatccatatggccccaaccctgcggattacctttccaacgtcaagaatttccaactgattgattcaaccctaagagaaggtgaacaatttgccaattctttctttgacactgaaaagaagatcgaaatcgccaaggccttggacgacttcggtgtggactacatcgagttgacctctcccgtggcctccgaacaatccaagaaggattgtgaagccatctgtaaactaggattgaaggccaagatcctaacgcatatccgttgtcacatggacgatgccagagttgccgtggagaccggtgtcgacggtgtcgatgtggttatcggcacttccaagttcttgagacagtattcccacggtaagactgaactacttggccagagtgcgcgaagtcttgagttgtcaattcagggtttgaatcggatcctcgaaattcgtcaatga

SEQ ID NO: 5731 - DNA, 861 bp, Saccharomyces pastorianus
atggagctaagaagtagacggagtgttgaggcttaccttgtcacacctgaagaaccagcgaagagtgcgcaggagccaaacatggaacctaaggagccgttcaccgccaaggaagaaagaagcgagactacaagtgtatttagccccgcttactctgatatcgccgctactgatacgaccagaaaaaccgatgatagcgaatactacaattttactagtcatttcatgccttccctaaaaaacactagagagctggaaggcacaatacttaatcttatacagaagattaaggaaggggatgacgaaactttggttagtgagaaagatcttatactgaacgttctcaataggtccttaacatccacttcacactggatgctgcaggcccagctatcagagttaagagccacttcagaaggcaggtatgcagtggaaacaaacctgttgaaaaaagaggttgagtttttgaagaataaaaccccgaaaaccggtgagaatccaggtctttcagagttgatattacccaacgaacaacctcgtaaacgtaaaatgtcactaccaggaccagtcttgaggcccttttccactgatgcccgattggaggctggacatgaatctgtaaccgatcaatcatggaaatccaaagttccaagacttcctcatactgctcccagaccatctttgggcgttttcccacaaaagccgtcatcagatataacgaagagtgagggaaatgaaggaactggctcactggaactagtggaaaacactaaatttcatccaagaatgagaagaacgagtgataacccatccaccaaaggagtacgtaagagttttccatttggagaaaaaggaagctaa

SEQ ID NO: 5732 - DNA, 621 bp, Saccharomyces pastorianus
atggatgcaactaccccgttattaaatgttgcgagtagccattctactcgcaacccaaaatatactggatggagggctgcaatgcatgatttagagtacattttgaaagcatcccctttgaattttctattagtgttcgttcccttagggttagtgtggggacatttccaattagctcatacatggacatttgttttcaacttcttggcaatcattccattagcagctattttggctaatgctactgaagagttagcttctaaggcaggtaacacgatcggggggcttttgaatgctactttcggtaacgccgtggaattgattgtttctgtcattgccctgaagaacggccaagtaagaattgtgcaagcttctatgttgggtagtcttttatccaatctgctactggtccttgggttctgctttatctttggtgggtacaatagagtacagcaaagattcaaccagactgctgctcaaacgatgtcgtccttgcttgccattgcatgtgcatctttactgattcctgctgcgttcagagctactttaccacatggtaaggaagacgcctacattgatggtaaatcttggagttgccagaggtactcgattataatctaa

SEQ ID NO: 5733 - DNA, 2583 bp, Saccharomyces pastorianus
atggctacgaacttggcgtctttaaaaccaccgtttaaggtgaaggctagatatggttggtcgggccaaaccaaaggtgatttaggatttttggaaggagatatcatggaggtcacaagaattgccggctcttggttctacggcaggttgctaagaaacaaaaagtgttctggatatttccctcataattttgttatattattagaagaaaggctaaactcaaactctctatcagaaaacagtagacaatcttcaaaaagagcagaaaatctagagacttcaaataaagttgttattccaccggttccatcaaggttttcttttgaggagtcaagaaccaagaaaaagttatcttcatccgtaccaaactccccaaaaagaccagctgattcattgacaaaggttagaaaggcgagatcaaaggaaataataaacgaagaaagtatttataatacccaatcctcacggcatcaaaacaactctgcaccaaatctacctatatctaaccaaaccaagcccaaggtacgaaagtttgaagattccttgaagaacccattaccaccgttgccaccattacctgatttgagcaatatgagaagaacagatagaagaacgccaaagaaatcacattctgccaacgatctcaatttagctcgctcttccagagagtacaactactataaagataaccaaaagttttacgacggatttattccagaaaagagatcttctttgggggaagattctatttcgtcaggcttattttcaaattctcagtacctggatgactcggtatgtagcagtgagaacagttttgcgttaatgagtgatttcagtgctactagtgctggaagttttgcaaggcacaaatatgctcagtcgttttctgattcgttgcagagatctcaacatgcatttacttctacaaacaaaggcgatgatcaacagcaatttagtgattctaattctagttcaagaaacggtaaaatgggcgatatattgagaaaaataatcattccaaagaggagtaccaataatgcatccagctcaatatcttcaccacagtctccgaaagcatatcccaaactaccagacatccaaaatttgaacctgtctgcgacacccaatgaagctcgtgactggattgccgtgaaatgtcatttaaacagagcaagaactctgacaaaatatgagaagcatccgaggtatatgagagcactcgaagaaaatcgagatttagtcttgcatcctcaagattccatttataacggcttaaacactaatgaagtcaaaggtaatacaaaacctggtttggttgatgtggaactggctgcgttaaacatagaatatattgataagatgacttggaaacgatgtgttaaagacggaggcatgacattagattcttgggctcaaacaacgttttcagcaagatactcaactgttttggaaaaattgagaggagtgtacattttttgtacggaaatgtttgcactaactgatgacaatggatcctcagatttctcttcagaacctgaaaacttggggaaaacactatttaaaaagcattgcacaccgtatgaattaacttggctcttcaaaaaattagccaattcactgggaatcatttgtgaggttgttataggtttcttaaagacaccaagtgcggtgaattgggaattcaagtataaccattgttggctaagggtattggttaacagagaatggaggtttattgatgttattctaggaaatacaactaatccaattcatgaatttgttaataacagaaaaattaaaaaagctgaaaacagttacttcttgatggctccattagaaatgatttacacacatataccacccagggaattcgaacaacacattgtccctagcattgatcaattgtctgcgttatacctaccgttagtctttccatcgtttttcaaaaatgagttgaagttatataagtttagcactgctttgtcttttttggaggattctgaagtttacgaatgctctttggaaattcctaatgacgtcgaggtgtttgcatcagtggttatcccaaccgataatgaagaaatttcaaatgcgtataggaatatggaattagcattaactcaaatcaaaaagcaaaaagcagattccggcaggagagttgctctcatcaaagccattttgccacccggtgtaagcaaaggttcactatacgtacattctggtgtgagaggtacacaaaccagtattgctaatattcatccactgtccatgatgatcccgttaacacataagggaaatgatatgaaatacgaatttttagtcaagattccttcagaaagcatccaaaaagtcgaactatacattgttgaacctcagagcagacatttgtttgctgataatgattactcattcgaaattatccaaagtccttctgatggtattatatacaccagtgacgaaggaccaaaccagaatcggagacagccgatggcggtgaagtcaccttcagggaagagttcacgaactagtaaaaagcgacccccattttccttacggcacctggaagacaagcatcaaggttaa

SEQ ID NO: 5734 - DNA, 711 bp, Saccharomyces pastorianus
atgtcggctatacgtgaagtcaaatacttacaggaaatgcaacatccaaacgttattgaattgatagatatatttatggcttatgataatttgaacctcgttttggagtttctccctaccgatttagaagtggtaataaaagacaaatcaatactgttcacaccagcagatataaaagcatggatgctcatgactttgagaggagtctaccattgccatagaaactttattttacacagggatctgaaaccaaataatttactattttcaccagatggccaaatcaaagtggcagattttggtctagcaagagccatacctgccccacatgaaatcttaacgagtaacgtggtgactagatggtacagagcaccagagcttttattcggggccaagcattatacatctgctattgatatttggtcagtaggggttatatttgcggaattaatgttaagaataccatatctaccaggacaaaatgacgtagaccaaatggaagtcacatttagagccttgggcacgcccacggatagggcttggcctgaggtttcttcctttacgtcatacaacaagttacaaatatacccacccccttcgagggatgaattgagaaaaagattcatcgctgctagtgaatatgcgttggattttatgtgcggaatgctaacgatgacccacaaaagagatggaatgcaattgagtgtttag

SEQ ID NO: 5735 - DNA, 645 bp, Saccharomyces pastorianus
atggatatcgctgtgggagactcattagataaatgtggtagagagctgggatttaaaggaacgatgattgctagagagatggaaaggtttataaatcaagaccccgaggacaaagattcaacattaaagctaaaaatgcccagtccattgaaaaataaagtaggcaggaaaaacttgctatcattttcattttcatcattcattacagcattaagaatcagtctaagtaaactgggtaaaagtcacatcagcgacctgcctgaatgtgaaatacgatcaattgcatatcaagtacaggagtcaatattcgaccatgtcattgacaaattaaagcaagttgttaagttgcaaccggaaaaattccgaaacgtcaatgaatttgtatgctctggtggagtgagtaataaccaaagactgagaacaaaattggaaaaagaactgggtaaaacgaacccaactggttttaccaatttttactatcctccaatggacctttgtagcgataattccattatgattggctgggcgggtattgagatttgggaaacgctaggcttggctagtgatttagatatatgtcctattagacaatggccgttaaatgatctattaaacgttgatggttggcgaaaacacctgctgtaa

SEQ ID NO: 5736 - DNA, 1152 bp, Saccharomyces pastorianus
atgactgacactaaacaactattcattgaggctgatcagacccaacttttccaaaactgggatggtttgtctcccgaagaccaacaaatattgctatcgaacttggaaaaaatctcttccaaaaaggcccccgcaaaattactcgaagattgccagcatgctatcgaattttcacaagcaaactcatctaaagatgctgatgtgaacgttcaaccattaccccatacctcttatgaatcgttaattggaaacggtgataacgaggatgaatatcgccaagttggtctagaagccattggcaaaggggaagttgccgtgatcttaatggccggtggtcaaggtacccgtttaggatcatctcaaccaaagggctgttatgacattggcctaccctctaagaaatcccttttccaaatccaagctgaaaagttgatcaggttgcaagaaatggtcgaagctaataaggtggagattccctggtacattatgacatcgggtccgactagagcagctactgaagcgtattttgaagagcaccagtattttggcttgagaaaggaacaaattacttttttcaatcaaggtactctgcctgcatttgatctgactggtgaacatttcttaatgaaagatccagtaagcttgacagaatcaccagatgggaacggtggcctttatcgtgccataaaagaaaatggattgattgaagattttgacaaaagaggcgtcaagcatgtttatatgtactgtgtcgataatgtcttgtctaagatggcagaccctgtattcattggatttgccattaagcacgggtttgaactggcaaccaaagccgtcagaaaaagagatgcacatgaatcagttggtttgattgcaactaaaaacagtaagccttgtgttatagaatattcagaaatttctaatgagttggcagaagcagaagatgaagaaggtctgctcaagctacgcgcaggaaatattgtcaaccattattacctagtggatttgctaaaacgcgatttgggccaatggtgtgaaactatgccataccatattgcaaagaaaaaaatcccagcctatgacagtactactggtaaatactcgaaacctacagataccaaacggtataaaattagagcagtttatatttga

SEQ ID NO: 5737 - DNA, 168 bp, Saccharomyces pastorianus
atgacagtactactggtaaatactcgaaacctacagataccaaacggtataaaattagagcagtttatatttgatgttttcgaaacagtgccactcgataagtttggttgtttggaagtgacagagttaaagattttcgccggggatcctctagagtcgacctgcagc

SEQ ID NO: 5738 - DNA, 189 bp, Saccharomyces pastorianus
atgattacattggggacagggtccaccttcaatggatgctttctttccatattccagtcagccatggtcttgctcaactgctttattttttttgcaaagacaggatcatcgaaaaaagaaagaagaaaaagatctgtgcatattatgcaatacacttctgttcctttttctattgttctcgagtattaa

SEQ ID NO: 5739 - DNA, 2232 bp, Saccharomyces pastorianus
atggctgactggaatatggaaagaaagcatccattgaaggtggaccctgtccccaatgtaatcattaaacgcggccctttaaggtctttcctggtaaccaagccttccgaagatctaagctcattgaggagcgttacctcatccaaggaaaagtttttggttgcttttctgctggtatttgcagctgccgtaagactacacaatatctctctaccaagtagtgttgtttttgatgaacatcgaattggtaattctgtttctcattatctaaaaaaaactttcctcgccgatttcaatcccccattagtttcaatgctgtacagtggtgttgcttccatattcgggtacgatggatctttttctttcttccatattggggttgaataccctagcaatgtaccatacattgccatgaggtttttctctgctactttaggtattctgtcggttttggtactgtacttaacactacgagtgtctggtgtaaagattgccgttgctgctatttgtacggtatgtttcgtaattgagaactcttttgtgacattgtctcgctacgctttgttagagggaccttttctctttttcattgcatgtgccgtttatttcttcaggaaatcggaactttatttgccaaactcgtgcaaagcaaataaatcgttgattgcttcgagtattgccttgggttttgcggtttcttcaaaatgggctggtctctttactatagcgtgggccggtgtcattgttctttggagattatggttcatgattggtgatttgtcgaggcctattggcccttccatcaaatatatggtatttcaaattacttgtttgttgagtattcctgctttcatctacattttggttttttttatacatatcaagacattaagcttaaatggaactagtagtagtttctttcctgctgagttcagaacatccttggagaataataatgtccttaaagagacagtagcagaagtaggtgtaggctctgccgtttcattgaaccatattggaacagtagggggttacttgcactctcatcttcacaattacccagcaggttctatgcaacaacagattactctgtatcctcacattgaccaaaacaataaatgggttattgagctcgctgatcatccaaatgaaaatatcacaagtttccaaaatttaaccgatggtaccataatcaggttgagacatctcagaaacagttgtagattacattctcatgaccacaaacccccagtctctcaaaaggcagattggcaaaaagaagtgtcctgttatggttatgatgattttgatggtgatattaacgatgattggatcattgaaatagacaaaaaaagatcagcacctgggcctgctcaggaacgtatcagggccattgagaccaaatttagattaaaacactatcttactggttgttatttgttttcacattacgaaaaactgccagagtggggatttggtcaacaggaagtaacatgtgcatattttgcaagggaagacttaacttcatggtacatcgaagaaaacgataatgaagcaccattaccaaacccagaaaaggtctcatatgcaaaaatgggcttttggcaaaagttcattgctattcataaattcatttccagtgcaggcgacagtttggatttgagttatgtctattcatcagaaccgaaaacatggccttttatgttacgtggtattgacttctggaatgagaagaacaaggaagtatatttcttaggtaacgctgtattatggtggtctgtcacaggttttatctgcatgtttattgctggagtggcaattgaacttcttgcatggaaactaggcacaaagatactgcaagatgcatatattataaattttcactatcaggttatgcaatacttattaggttttgccctccactacgttcccttctactttatgaaacataacttgtttctttatgattacataccagcctactattttggtatcttagcgtttggtcatgcattagaccttatttcgacttaccttttcaacaaaaaaagccatattggttatgtcattgtcattatttttatgttagcatgtttctatttcttttatgatcactctcctttaatttatgcctctgaatggacaagcggcttatgcaagagatccaagtggcttggaagctgggatttctattgtaattcgttttttcctacatatagccattatgaataa

SEQ ID NO: 5740 - DNA, 1293 bp, Saccharomyces pastorianus
atgcagcagaggttaggaagatccatagccagggccaaatttataaacacgacattgttaggaaggaagagaccagtcatggagagagtcatcgatataactgattcggatttaggtgaagatatccaaccgttaatgaaagaactggagacagatactaccgcagcacgccacgaaactctacaaagcatattagacatattcgatgcttgtgagaatgaagaggagcccactcttacaaaggattttcacaagatgtatttgaactttgccatcgagactccattacctccacaaatgacagctctcgatgcttcacaaccatggatgctatattggattgccaattctttgaaagtgatgggtcaagattggctcgcagatgatgtcaaaagaaaaatcgtagataaactattcgctataagcccttcaggagggccctttggcgggggtgtcggccagttatctcatctggccagcacttatgctggaattaacgcattggccctttgtgataatatagacagctgctgggacagaattgatcgaaagagtatttacaaatggcttttatcgttgaaagagcccaatggaggattcaagacttgtttggaagttggagaggtggacacgagaggtgtatattgtgtcttgagcattgcatcgctattaaatattcttacagatgaactttcagaaggcgtattgaaatatttgcaaaattgtcaaaactatgaaggcggattcggaagttgtcctcaggtagatgaggcacacggggggtacaccttctgtgctacagcaagtctggctatcttaaggtctgcaaatcaagttgacatagaaagactaatggaatggtgtagtgtccgccaactgcaagaagaacgaggattttgtggaagaagcaacaaactcgttgacggttgctacagtttttgggtgggtggctcagccgccattctcgaatccctggggtatagccaatgctttagtaagcacgctcttcgggagtacatactatactgttgccaggcggaagggcagccagggttaagagataaaccagggaaacactctgatttttaccatacaaattattgtctattaggactagcaataacggagagttcgtacacttgtgccccaaatgatcctccacacaagataaaatgtattcccaacagtcaagtcgagtcgtctgaacttactgatatcaaccccgtttacggtctacccatagagagcatagagagatttattgatcattttgaatcaggtccctattcgtag

SEQ ID NO: 5741 - DNA, 249 bp, Saccharomyces pastorianus
atggccgagtcgaatctacccttgctgaactcatcacggatgaacgcatgctgggcggccaagacctccaagaacgtgaacttcacgccgtggtctctgagcgtcttcctgatcaggtcacggccctccgggtccacatgggtgtccgaagtaccgaagatcagaaccatttcctggtcgttgcccagctccttcgaaacacgttccagtgagtcgtcgttctcgcccagccccaaggttctcgagtga

SEQ ID NO: 5742 - DNA, 2100 bp, Saccharomyces pastorianus
atgggctccgtctcacataatcaattttatgagtgtggatccaaaactttacctcaagacaaattctcgatcgaaaagtatgaaactcaattgttccaatcgctaaacagatttattggtttcataaatagtgctgataaatccgttggcagtaaagagcaaaacactaaattttgcaagacatcctccaatttccttcgcttgaagctactgacgattttgcgacaatggtgtgattgccctcaaaataagtataccgtagaaaatcgagatgttttaatccaatggtgggtgacgctcttgaattttttgaactctgacacttctcttcaaatggacgctacccttgagttcagcttaagcatagaattgacttcggtgtgtctcgagtgtgttagcagactaacgactatactaataatactacctattcatcctcatagagatatggaagtttattcgcatcaccttttattaaccattcattgcataacaaataaactgattttaatttccaagaacactaaaaaactaagtcgtacagagagtaatgataagtcatctacaaatgacaaaaaactgcaacacctcaacaggtactcttctttattacgatcatttattgggaaactgaacgcatacgcatttttttatttaccggaagagttacattttgatacgattttattgttaaccgtttctccgcagatatcttcaagtgttcaaacatgtttgttcccatggaaaaacaggcattatacatttactagtgatcaagaacaaattattcgttctgaaacatttgaaaataaagataccaaattcttcaaaattatcgtgtcttacattaaaaacgattttatacttatgtcgttctattggcactactggtatattatacttcaatttattaaaattcccgattcaaattttgaacttgggaaatcgacattaccatgcatacctgggtcagaaattctcttaacgcatgtaacaactagatttttgaattcagatttgaacaaattcacacggatcatcaagcaaacaccgaatccgagaattgtgaatgatagtttaacagagtctcatccaaattttagagcgctgagtggtaataacaacgccttgattacttctgaaaagatcaatgattacatattttccaacttcaaaacaatcaagttatgggaatgcttgagaagcctttcaggttgcatttccaaagaggaccactttgaatatctagaaaatatgctatccttgcacgagtcctcattggtagattatgtatcgactatttcagcatacgattacgttgcggcaaacgtcatttacaataagattttacaatttattgttttccagtttgaaactttaccttctttaaaattcattcaatgggggccgtggtacaatgggcttttgagtatgttgaagactaaaaatgttaattgtcagaccgtttcactgttgtgccttttcaacgtatggaggcatgtatcttttgaagaacgggaagagataactaaaagattactcgaagacttttgggtatctctaacctttgacaatgaatttcctttgattagaatcttattcatgaaattgttggttttcaaaatcgttccaaatattcaagactctagcccaagtcttcaagaatccggcgttataagatcgttaccgtataaaaaaattagagaattagatgaagagttatcatcaaacaaagaaagcctgcttttaatgcagcactattatttaagtgatattgtggcgcacagaaaaaacgctctgattttcaatggtaattcacatttgatgatggtcccccaaaagtcaaatacagaggatcagttagtctataagataaaccacgataaaaaactaagaatagaaaagtttcctacagttagttcagtggcaaatacaaggccaaacgtaattttgaaaaatggcaaatacgtttatgacgttttggatgaaatggcaagtaaagccgcctatttacttgccgaaaagaaaactaaactgagtttaaaaaaaaatcataaaactatagacggtagtgaagacgatcaggaaggcgaagggtga

SEQ ID NO: 5743 - DNA, 450 bp, Saccharomyces pastorianus
atgttagtacgagacatagccgccgaggtctttcttgatcaacttcttttgtttgttttccgcgttccctcttttcgctcgtttttcgccactgcgcccgctttatatacaaaatccattccgaaagaaagcgcccgaaacaagcgccaacgtcgtccattttgccaccgtgtcactgtacacgggccacgacacgtcagcgtcggtcgcgccacgcagagcccaagagcgtctttggatagccttcacttaactcatgtatttggacagtcctctaacgtgtgtcttttgcgtacatgccggtctgcacgatcgcatttgcccctgcatctgccacgtcccttatgcgtgttgctttttggcgcgtccatccctctcagccttgttgacgtggcactcttttggcctctctcactttttttttcagcgcagggcgtcaccctgcgctga

SEQ ID NO: 5744 - DNA, 465 bp, Saccharomyces pastorianus
atgccaaacatacaacacgaagtaatgaatgaaaacgagtacgataattttgatgatttggatgaccttttagatgaagatcccactaaactggatgaagcagagcccgatgatgtgcaagcgaagggttctgtgtacaacgatagtgaaaacaaagagaagaatgccgaaagtaaggacagtgatggcgtacaggtagctaatgaatctgaagaggacccagaattgaaagaaatgatggtagatttgcaaaatgagttcgcaaatttgatgaaaaataacggtaacgagaataatgtgaagacagaagattttaataaactgattagtgctctagaagaggcagctaaagtacctcgtcaacagatggagcaaggatgtagtagtttgaaaagtaacagcactgataaagggaccctgaatggtagcaatccgggatttaaaaacattgtttccatacgctag

SEQ ID NO: 5745 - DNA, 354 bp, Saccharomyces pastorianus
atggatttacagaaatgggaagctggtatcccaggcaaagaaggtacaaactgggcgggtggtgtgtacccaattacagtcgaatatccaaatgaatatccttcaaaacctccaaaggttaaatttccagccggattttatcatccaaacgtgtatccaagtggcacaatatgtttaagtattttaaatgaagatcaagattggagacccgccatcacgttaaaacaaattgttcttggggttcaggatcttttagactctccaaatccaaattcccctgctcaagagcctgcatggagatcattttcaagaaataaggacctgcaggcatgcaagcttggcactgccgtcgtt

SEQ ID NO: 5746 - DNA, 2505 bp, Saccharomyces pastorianus
atgtctaaccaaatatactcagcgaaatattcgggggttgatgtttatgaatttattcattcgacagggtccattatgaaaaggaaaaaagacgactgggtcaatgccacacatattctgaaggcggccaattttgccaaggctaaaagaacaagaatattagagaaggaggtgcttaaggaaactcatgaaaaagttcaaggcgggtttggtaaatatcagggtacatgggttccgctaaatatagcgaaacggctggctgaaaaatttagcgtatacgaccaattgaagccactatttgattttacacaaactgacggttctgcttctccacctccagccccaaaacatcaccacgcctcaaaagtggatagaaaaaaggccatacgaagtgtgagtacttctgcgattatggaaacaaagagaagcagtaagaaaagtgaagacaaccagtttcaaaatagtaaaatactgggaaatcctacagctgtaccaaggaaaagaggtaggccggttggttctacgagaggaggcaaaagaaagttaggagttggtttacaacgctctcaaagtgatatgggattccctagaccagccataccgaactcttcaatatcgacgatgcaattaccctctattagatctacagttggaccacaatcaccaacgctaagtatccttgaagaagaaagacaagactctcgacaacaacaacaacaacagccaaacaattcggcccagtttaaagaaattgatcttgaagatggcctgtccagcgacgtggagccccctcaacagtttcaacagaattatagccatggaactagttttgcacctcaacaacaatcctccttgatacaaactcagcaagcagaatcaatggctacctccgtatcatcatctccttctttacctacctcgccgggcgattttgctgacagtaatccattcgaagagcgcttcgccggtggtggcacatctccgattatttccatgattccacggtattctgcaacttcaagacctcaaacttcagacatcaatgataaagtcaacaagtacctttcaaaattggtcgattactttatttcgaatgaaatgaaatcaaacaaatctgtaccgcaagtgttattgcgtccacctccgcatagtgctccttatatcgatgcccccatcgaccctgaattgcacactgcattccactgggcatgttccatggggaatctgcctatcgccgaggcattatacgaagcgggaactagtattagatcgaccaattctcaaggtcaaactcctttgatgagaagttcattattccataattcgtatactaggaggacgttccccagaattttccaattgctacatgaaactgtatttgacgtggattctcaatctcaaacggtaattcatcatattgtaaaaaggaagtcaactacaccttccgcagtttattatcttgatgttgtgctatctaaaatcaagaatttcttcccacagtatagaatcgaactgctactgaatacacaggataaaaacggcgacaccgcattgcatattgcgtctgagaatggagatattgttttcttcaacacattggtgaagatgggtgcattgaccacaatttccaataaggaaggattaacaccaaacgaaataatgaaccaacaatacgagcaaatgatgatacaaaatggcacgaacccacactccagttctttaaacacggacttgaacctgcacgttaatacacagaatagtgatatgaaaaacgatgttaattcaatggtgatcatgtccccgatatccccatcggattacataacgtatccgtctcaaattgctacaattatatcaaagaacattcccaatgtggtgaattccatgaaacaaatggccagcatatataatgatctccatgaagaacacgataacgaactgaagaatctacagagaacgctgaaaagtatatcaaagacgaggatacaagtacatttaaagacactagaggttttgaaggatagtagcagagacgataacgacggggaaataccgaaggggaatgcggacttcgagactctaacttatttacaacagcgtaatgttgaagaaattaaaaaaaagcttataaggtataataagatgattaaacagaaactagaatacagacaaacagtcttgttaaatgggttgatagaggacgaatctcataccatcgcgaacagtgcagacggtgacgagagtaatctcctggaaaagctggagctagctcagaaactaacacttttacaatttcaaaggaggaaacgattgaggagtttaatggagaaatttgaagacaattccaagattcataagtatagacggattatcagggaggggacggagatggatatcggagaagtggacggttcgttggatgtaatactacagacattgatagtcaataataataaaaacaagggcacagacccgagtaccacgaacacgaacgaccgtgcatag

SEQ ID NO: 5747 - DNA, 345 bp, Saccharomyces pastorianus
atgaccattccacacatgaatcacgctgtatcgaagaatagcaagaataaggtttcaaatacagtaagctctacccaggatcaaaacgcggtcaagaaacagcccgatgaggtcgtagatagtggagaacctttgcctaagaaattaaaagtgccactggcgggcttctcgatggcatccaataaggctgacaatcgagaatacgctcaggctgcagtcgggcaagtagcatcaatggagcttaaaccagctagtgacatggatcccacagcagtgtcagcagcgtcagcagcgtcaatgtccaatgaggttttgaaaccggaaactccccaggggccaataata

SEQ ID NO: 5748 - DNA, 1284 bp, Saccharomyces pastorianus
atgatcatcaagggatcatccctgaatcctaacacatcgataaggtcgtccttaccagaagaaaagacaaatgttctccgagaacttaataccaccaccgtcaaccaactattggggctgccaggaatgacatccaccttcacagccccacaactattacagttaaggataatagctataaccgcctctggcgtgtcgctccttgccgggtgctttggaatgttctttctttccaagatggataagaggagaaaggtttttagacatgatctgatttcatttttaataatttgtgactttctaaaagccttaattctaatgatttatcctatgattattctgatcaataacagtgtgtatgcagaacccgcattttttaatgtactgggttggtttacagcctttgctattgagggtgcagatatggccataatgattttcgccattcattttgctgtgctaatatttaaacctagttggaaatggcgtaatagaagttccggcaatatggaaggcggactatacaagaaaagatcttacatctggcctattactgctttaataccggccattttagcgagcttagccttcattaactataataaactcaatgatgattctgacactaccgttgtcttggacaacaataactacaatttccctgattctcccagacaaggcggttacaagccttggagtgcatggtgctatttgccacccaaaccatattggtacaaaatcgtattgagttggggtcccagatactttattattgtttctattttcgccatttacatcagtatttatgtttttgttaccagtgaaagtaaaagaatcaaaaaacaaattggagatttcaatcataatccacaacaagaggaagaggaagagaaagataaaaaaaaactgctaagtttgggccatatggggaaagttaggtggtatcttaaaagttatcttaaatcgccattgttacgttttttaaagaacctgagaaattttttcaccatatctctggtagagccaggtgaggaaacaacagatgattcaagtagtagtggcacttttaatctcggccaaaacttgcatgaattgcctgcatatacaggaagcaatgaaaacatccccattaatggtagagtacggttgcttgactataacactactaagccggctaataaatccaagattataatgcctgcaaaccaagatttagagaaaaatgatccgtttgactgctataatgacctatcagtaaatcccctaagttttacgatggaacca

SEQ ID NO: 5749 - DNA, 1140 bp, Saccharomyces pastorianus
atgcagattataagcctgaaaccagatttagagaaaaatgatccgtttgactgtaataatgacatatcaataaatcccctaggttttaagatggaacaagaggagcgtgatgcagcttttggaatggaaaatggaagactggatacaagaaagagttcaatgctggaacaccagactttttcttgcttgaattccttagcatcacccctcgaagcgttaaatcataataataatgatgatgattgcaacagtagaaacaacaagaacaacaagaacaagaacaacaataaaaatactactaccactactaataatactaataataccaataatactaataataatgctacaactaataatattcctcctgcttttaatgaagcattcgtccaaaataaagatttttcgcacaatagcattagcgatacaatcagggacgacaatttaaacgttactgatgtacaacgacactttcaagctcaaacttataaagatatgaaaaagcgcaggtcacaaattcagaagaatctgagagccatattcatttatccactatcatatattgcgatttggctttttcccatcattgcggatgcgttgcaatacagctatgaaataaaacatggacccactatgtgggtgacatatatcgatacttgtgtgagaccattaagctgtctcgtcgacgttattgtttatctgttcaaagaaaaaccttggaattattcatgggccaaaacggaatcaaaattccttactgaaaaatttgttttaaaaggcgagcttggcgaaaaggaaattttgaacctttgctatagtaaatggggcaaaagaggttggtattaccgtggaaaatggaggaaaagaaagtgttggagatattctacaagcaccacaaagcgtattatgtggtttatccaacgcttttttgaacagttatttgagttaaaatttcactttgattttcacgacaactgtgatgattttgaatattgggaaaaatattattcagccaaggaatcagcgataagaacgcacagatcagatgagaccaaacaaatggcagtgatagatctcttcagacaaactcacgggaaggagcagaccaggcgaaagacgataaaggcgcgaagaaagtga

SEQ ID NO: 5750 - DNA, 1248 bp, Saccharomyces pastorianus
atgctagcgagatacctgggcttactggcacgaagaggcactgcgccatacaaaccacagcgattgccggccaagtttgacaatgtcatagtggcgatgtcatctggtgtggattcttcggtagcggcagcactatttgcgggggagtttccgaacactcgaggaatttacatgcagaactggtcggaatcgcaatctctggatgatcctgggaaggaaccgtgctacgagaaagactggaaagacgtaaaccgcgtggctgaacatttaaacattacagtagacaaggtcaacttcgagcaagattattggattgacgtgttcgaaccaatgctaaaaggttacagtgaaggatcgacgcccaatccggatatcggctgcaacaagtttgtcaagtttggtaagctaagagagtatctggatgagaagtatggcgttaataactattggcttgttacgggtcactatgcccgagtcatgcaagaggtggaaagtagacagtcattccatttactaaaaagtatttacaagcccaaggatcaaagctattacctttcccaaattgacccggcagttttatcgtcgttgttgctacccattggccatctgaccaaacctgaagtgcgagatctagcaaaatacgtgggcctccctacagcagcaaaaccagattcacaggggatttgcttcgttaataattcacagcatgggaaattcaagaacttcctcaagcattatctgcccagtttaccaggaaatataataaccatcgatccggagtccgggagcaaaacaccgtggggcaaacacgatgggctgtggtcgtacacgataggacagaaagtcggcttgtctatgccgcaaggtgacccaaactaccagggatcctggtttgtcagtgaaaagctgaagggaaccaacgaaatcgtgatagttcgcggaagagacaatgctgcgctgtacaaggataccatccggataaaaagctttgcgtccatgtgctcgaaggaggacaccatcaaggctctacaggatacaagtgccctgacattgcaattccggtcactacaagacccgatccagatcaaatcgtgcacgttacgagaccctgctacgggcaccgcagaggacctcgacataacaatagaactagcctcaacgcaacgtgctgtggccccaggacaatcctgctgtctctatattggcgatagggttcttggaagtgggcccatctcctgcgtgaaataa

SEQ ID NO: 5751 - DNA, 129 bp, Saccharomyces pastorianus
atgatgtttgtggttttttgttctttcaaccaactcgcccgatatagggtcaatttcacaagaggggacggataccagccaatcattctttaccacttcgttcatcaacactctttgttttgggtctaa

SEQ ID NO: 5752 - DNA, 183 bp, Saccharomyces pastorianus
atggtggtaccccagttaccggaaccaatgacggtgaccttgaaaggcttttcagcggccttcaaagaaacagaagaagaacttctctttctaccggcgttcaaatggccagaggttaagtttaatctatcagcagcagcagacatctttgtattattattattattttgtgtggagagttag

SEQ ID NO: 5753 - DNA, 399 bp, Saccharomyces pastorianus
atgaccggtgccaaatctaacatgagcgagtattcctgttgcacattgaatcctttacctgttcccgtacctttatcactcttgatagcagacaaactgtcatccgccgaagctatgggctgctggagtcccactctttgctttatttcgttaatctcttcatctacttcagagtttcccttctttgtggtagatgttggcacggcagcagttccccttgacgatctaccagctatattatccctaccaacactaaataactgtgggggcttctcctcttcctttgtctctattgccagaaagttcgcattctgtgctataaagaaaactaataacaatagtagcatcgttatgcttaaaattctagcatttctcttattggaaagtatcatgatatag

SEQ ID NO: 5754 - DNA, 291 bp, Saccharomyces pastorianus
atgacaccgtttagctggaccgcatcactaacgttttcaggcgtcaacccaccagccaatatgaattgtaggaattgcgaattttcatgcttcgtagcccaatctgaaatagagttccaatccaaaagttcacctgtcccaccggcctccgaatcaaataggggagtaaacagatgggatttctctggaggcgtattcagtagtatgtcacagtctctagggaacacaagccttttaataacgggcaacccgaggaaatcttggtattcttgccacggctcatcgccgtga

SEQ ID NO: 5755 - DNA, 1221 bp, Saccharomyces pastorianus
atggtatcaccaacaaagatgctgattaggtctccattaaaggaaacggacacgaacctgaaacataacaatggcattcctgtatcaacggcaacggcaacggcccatttgaacgcgctccctaacgataacaatggcaacaacaacactaatgaatccttcccgaagaaaaggtcccttgagcgcctcgagctccaacaacaacaacaacacttacacgaaaagaaaaaggctaagctagaaagggccaggtccattgaaggcgctgtccaggtgagtaagggtacaggcttaaaaaacgtcgagccaagggtcacacctaaggaattactggaatggcaaaccaactggaaaaaaatcatgaaaagagactctcgtatctatttcgacattactgatgacgtggagatgaatacctacaataagtctaagatggacaagcgtaaagacctattgaaaagagggtttctttcattgggcgctcaaatcactcagttcttcgacactactgttacaatagtaataacaagaaggtctgttgaaaatatatacctactaaaggatacagacatcttatccagagctaagaaaaattatatgaaagtttggagttacgaaaaagctgctagattcttgaaaaatctcgatgtggatttagaacacttaagtaaggccaaatctgcttcgttagctacccccacattgtccaaccttttacacaacgaaaaattatacggccccacagacagggaccccagaactaaaagagatgatatacactatttcaaatatcctcatgtttatctttacgacctgtggcaaacttgggctcccataataactttagagtggaaacctcaagagttggcaaacttggacgaattgccttaccccgttttgaaactgggctcatttggaagatgtccctttataggtgatagaaattatgacgaaaattcttacaagcgcgtagcaaaaagatactcgagagataaggcaaacaaaaaatatgcattacaactccgtgccttattccagtatcatgctgacacttttatgaatacgtcttcagttaacgaccaaacgaaaaacttgatatttattcctcatatgtgtaacgactccaccaaaagtttcaaaaaatggatgcaagaaaaggcaaaaagtttcgagaatgatgagaaaaagaattggatgatgaggtattcaagatatccatga

SEQ ID NO: 5756 - DNA, 720 bp, Saccharomyces pastorianus
atgatggatttagacaaaatcatagcatcattgagagagggaaaacatatccctgaagaaactgtttttagactatgtttgaattctcaagagcttttaatgaatgaaggaaacgtagcgcaagtcgatacacccgttacaatatgcggtgacatacatggtcaattgcacgatctactaacgctttttgagaaaagcggtggcgtagagaaaacgaggtatatatttctcggtgattttgtagatagggggttttattcattggagagttttttacttttattatgttacaaattacgatatcctgacagagtcactttgatcagagggaaccacgaaactcgtcaaataacgaaagtttacgggttctatgacgaagtagtaagaaaatatggtaacagcaacgtctggagatactgctgtgaagtgttcgattacttatcattaggggcaataataaataatagcatattttgtgtgcatggtggactgtcaccagacatgaccactgtggatgaaatacggacgatcgacaggaaacaagaagtcccacacgaaggtgctatgtgcgatctattatggagtgaccccgaagatgttgatacatggtcattatcaccaagaggtgctggatttctttttggtaaacgagaagttgaccagtttttagagaaaaacaatgtagagtttgatgccagggcacatcaattagtgatggaa

SEQ ID NO: 5757 - DNA, 549 bp, Saccharomyces pastorianus
atgaaattctccactgttttgttatctgccggtttggcctcgaccactttggctcaattctctaacagcaccgctgcttcttccactagttcttctagttcctccgtttccatcacatcttctgccacctcagacgctgataacggtactaccactgctatcccaacagatgctccaaccaccgctctaccaaccaacggcaccaccactgacgtaccaccaaccacatccgaagctccaaccactcaacttccaaccaacggtaccaccagtgctttcccaccaacctcatctctaggtccaagcaacaccactagtactcctccttacgacccatccacttcctacaccactgactttaccgtcgtcactgaatacactacctactgtcctgaaccaaccactttcactcagaatggtaagacttacaccgtcactgaaccaactacattgaccatcactgactgtccatgtactattgaaaagccaaccactacctcaaccactgagtacactgttgtcactgaatacactacatactgtccagaa

SEQ ID NO: 5758 - DNA, 288 bp, Saccharomyces pastorianus
atggaagcaccaaaagtgcgttttttgaccaagatatatcatccgaatatcgatagattgggccgtatatgcctcgatgtgcttaagactaattggtcccccgctttacagatcagaaccgtgctattgtccatccaggcattgttggccagtcctaatccaaacgaccccttagctaatgatgtcgctgaagactggatcaagaacgaagaaggcgccaaagccaaggcacgcgaatggaccaaattgtacgccaagaagaaacccgagtcatcggccactgtataa

SEQ ID NO: 5759 - DNA, 417 bp, Saccharomyces pastorianus
atgcaaacgcaagtgcaaatcaagggacctgtaagaacaaacagaacactcaacgatagtagtaataacgaccttgctgtctccctctataaagcaactccgtatcacaataccgccacagcgcaagaaacaacgagatatatttccttgaagcacaaaacgccatcccttcccttccccttgcccttgcccttgccgacgccctttcccctcaaagtctttttttctttttctcaccccggcgtcaccatcccctcttggcgccggggcaattcccggggcaggggggaaggaagtgggccaccaagcccctttgcccgccaggcccgtgcggcgtacgttccgggccccatggtgcggggtaccgccgtccggcgtgatgcgccctgcaaaaacatctatatctttaacatatga

SEQ ID NO: 5760 - DNA, 897 bp, Saccharomyces pastorianus
  modified_base (833)..(889): a, c, g, t, unknown, or other
atggcatctttggaacattgtagcaaaaagggtttggtcactttggaaactgtagattcatatgttggtaaatctcacaaggaaggtgagttgattgctagacctggtgtgtatgtcagagatttcgctcaagtccatattcttaaactaaagaccgcaagacaactattaaccaagattgatagacaaggtgtttacccattcaagttatctcatttatcctccaacttcccattcgttgatgaaaacgaagaagaacttcagaatctaaagaaggatttgagatcatttagacttggaatgagtgaaatttccaacaattacttatgtgtggaaagtccaatacaaattgctagatggattccatgggaccatattttgaaggccactaactcaaacggtaatttgagttatgatgccactactacattaacattacctggtcatgaattgcctttaccaaaattgggtgtttcagctatcaaacttaaatccttattaaattcaactaatgaatctatttctttaccagttgcacgtgaatgtaatactgtcgtattgtgtgacgccagtgtaagtacaaccgacagaccagaattattgagattaactggcggttccaagacttgtcaaccaagttggattcactcccaacatgaattgaaccctgaagactcaattgttcaaggtatctttcaattggctactttggctaaggataagagatttgggcttctattgaaggaaacacaaccaatgaagcagaaaggtgtcacatcaaatgttgaagttgaagaaacgatgaagatgttaggaactcttacactcttaannnnnnnnnnnnnnnnnnnnnnnnnnnnnnnnnnnnnnnnnnnnnnnnnnnnnnnnnaattataa

SEQ ID NO: 5761 - DNA, 525 bp, Saccharomyces pastorianus
atggctctagctatctcccacgaggatactcagattttgttaaaagacaagaatgtactacaggactcggtcttgaacaaatacagaacagctgggcaaatcgcacaaactgctctgaaatatgtcacctctttgatcaatgattcgtaccataccaagactgctcagcgtcaactatctgtctcagagttatgtttgttgacagattcctttgtgctgactcgcttggaacagcactacaaaaacaaagtcaatgaaagaggtattgctattccaactaccatcgatattgaccaaatttccggcggatggagtccagaaattgacgatacacaaaacttgttaaactggaacaaaaacaaagattccacattttcatcttccgtaactggtatcttgagagcaggcgatctggtcaaaattacgttgggtgtccacattgatggttacacttccgaagtttctcataccatggttatttacccagtcgatgaagccaatctactcctcaacaactggacatag

SEQ ID NO: 5762 - DNA, 3741 bp, Saccharomyces pastorianus
atgacagccaagatggaccatcttcttagcgttgttgaagacgacgtgaagtatgcgcagagactgagcagttttagctcaccacaaaatgccagtgtcaaagtgttcactattcctcgacactccttcacggcctttaggttgtcttatatttccccagtagagctttctgagtgctcaaaggtgactttattgggcggtattccaaaacaatggtacgccgaccaaaataatcagttgtggaaacttataactaaatttccacttcgaagggttaggaagcaatcccgaatgctgagaagatacggctataaaacgatatataaaaaaaatgcggagaaaatcccttctgcctcacatttaagaaggcattttacgtggtcatatgaaggcaatacatcaacctgtgatagttattatcttagtgacccaaccgctgagagagatagggctagttcgagccctgtaaaagctagtgagtgtaaaatggttccgcccagaaggagccaaagctcctcagataaggcaccaatgcgagaagatctatcgaaagttacgtgtgcacaaggcccggggaacaacgattcaaaggctttactgttgaatgagacggcacagcatgggataaccaagtcgattccagaaaagaaggattacaaaggaatgactagaaaatctatgctggggttctcaactctgaatcaaggcgacgaacagcatagagaaagcccgcctagagaagacaattcagaatcgaacgaaagagcgatttgctcctcagtagagaggtttagggtcacaggtatcgacgataacagggaaccttctgaagacactttaagatactctggtcatagtataaatgcagctacaaatcggctaaatccgaataaaaaaagtttctttgatgaggtagagcattttagtcatttggatgacttgagtgatgacgtttcaactactcaggccatcgataatctgccattaaaccagagtgagaaagtagctcttgatgcgctacaaactatagaaaagaaggctctctcgatagagaaaactcctcggaattatggcaattatttcgatgatgggcggaagacttccattgttttccaaagcacgaaaagaaaaataggtgaagaaattggcagagcggactcaagcaagtttccattttttagtgtcttgcccccctatccaactcaattgacactggaagagaacgttatacatgatagattagcttctaagcattcccgtcatataagaaagcgtgtctattatgctagaaacaaaactagctgcaagctcaaagacagttttggagctgttttgggcgcaacaaattcccttacagcaactgttcgaaaaagctctggccagattctcaaaaaagaaaaaatgctggtattggtaaaagaggccatacaaaataaggtaccacttcctaacttcacagaaaacgaatgtttcgatacaagagtcagtgaacggtggaaggaatatattgtcattgcaaggtcaacaggaaggtatgatccccctattgttttacagttttaccgtcatcgccatattccagaaattgaagatattagccatgtagatcaaaaatatcatcgtaacccattggatttttttctcacaagaaactgcatcgtgcaattttatagctcactcgataagacaatatccattcaaaagcccgatgaacggttaggtggattcgtagacgaaaacatcgaaagtcaggagggactaaagcacttttcccccattaagatttttattttaagatgtaacagtatacgctcatctggtttgtggtataagttttttcttgatactttgaatcgtcaattattcacaccaaccatcaatttgagaatcccacaaactgaaatctcaatcaaaattaatctgaatgaagaatcattccaaaaattacgagccttaggaaaacaagaacaagataaactaaaactctgttttctcgagaaaggttatagaatttttcaacatcctattttgcgatttttcacggttgctatcttagaaaagttaaaattggcacgatatgattctttgattaaaaaatgggatgtagaaaatgctatactgggatgtgctttgaagagatatgatagattggaatggattccatgtgatggagactccctaatgacaggaatatatgcattttgtcagtctcatttgattcagtacaggccaataacaaattattcaagggaaacaacatctacaaccggagatattttggaagaagtttcaccgatcgaaggctttttgattagattgacagacaaatatggatctctgagaacaaaatttggtaagtttatcattacgacatcttatttttttacgtgcgataatttactgttttcgatgaaggcgtatagggcaactcccccgctacctatagatgcgatgattgatgaagatagtacggaaaaggaaaaagaagaggtttggaaacagtggaaaacacttccagaagcttacaaccaacaaccctatcccttaacctcggatagccacatagaatggatgaattgccaaactacgcaagatgaatatgactctagggatttttatgcgtttcactgctttcatagaaggattgaccaaatgctcaaaacagacactatgattgatttgtcagaagtaaaagacatataccaaggaacaactgatgactgcgaaggtgataaaataaaatacggtgtttacaaagaagcaagtgagcttttttggcacaaaagctacagtgccgaagatgtttcccgatctgttataaatattgaaacctcaaacggtctcctattgaagcttcttgcttcatcagcaacagttgcagaacaatgggtcacgcaattgaaaaagatgtcacattactggaaaaacaaacagagagaagatacaaataggttgctaagaataagacgttccaatgccaatcttttaatgcttaatggagaggaggaaacgagaattggtgagaatacattacgctggattattgaaaacggccgtgcagatgaacatacttttaatgctaacggaatatcgctaagtaggcctctgattcaaaaggggcctttatatcaaaaaccacacaaacatgctgttttttcaaaatattacgtagttttgatatctggttttatcattttgtttcattgctttcataggtcaactacgggttttgccaaggaggttctggaatatgctcattacatgactattccaattgatgattgttatctatactcgggaactacaaccgagttggatcttttgaaaagagatcgtacttttgatgaaattaatttaggatctcataccctgcctcgagtttatggagacggatggagatcggtggaagacgaaagttcacgatgctttacactttggtttggaacaagacgtgctatttccagcaatccctcgccaaagaaagagaaggaaaaggaatactcaaagttttcgggtggacaacataactttgttgatccaccttcggctctagaaatcgatctggactactccgagaggctaaatattacagataggattcattacatcaaaaagttgggtgtaagcgggaaatcgatggtcttcatggcaaggtcaaggcaagaaagagatatttgggtaatgtccatatatgatgaacttgaaaggctgaggagaacagcttccttttcgaacgagtga

SEQ ID NO: 5763 - DNA, 2109 bp, Saccharomyces pastorianus
atggttttttcgtatgagcactatatgaatttgcttttccatttggatcacagtaaagagacggtgcctccagaaattgcgaagagaatagtttccaatgccatagctccagtgataacagtaacttcaaccccactttttgacaaacatatccaagaggcatatagtgttgactctctgtacatgctgttacgattctttggtggatgtgtttctgatagagatcaagcaaatgaaggaaaggttgaacaggatgaacaaaatgcaagtgcctcgataaagtcgtcttcaaaaaaccaaaatttagaagtgcctggtgtgttaaaaaggggaaaccgcagtagatcaaacagtctctttcagagagattcaacccaatcgcaatatgtcaggtttacaagaccgttgggggatctgatcgaaacaagagatacaaatgacatgctgtttaattatcattctttggaagtatttctagataactatctaaaattagtagcaaggaacactgatgaagaagtcccccatgatcttttaaaaaagtcgatttatcatagttttttttcgttagcaatttcctccacaaataacttatcgccttacgaaacctttaatcatccgattctttctttgattgctttagatatatcacgtggagaagtatatgaggacgcaagggatcttttagtgaatttcaaaaatctcaatcacaataccgaaaactttcctattttcatgaatacgaatgaaatgcttccagtttttttactatgctataatgacgaatctcaagaagagtttgaaaagtgtcaggctttggccaaaaaacttaaaaagcagctgtttgtggagagtattttattgcctctctggaaggattctttcgttggcgctgaaaactcaaatatacaattgcatcaaccagttatgtcatcgcttgaagaaatcctcttttttctacgggttccaactcaaacaaaactttcactacctttgataaatacaatctacgatatgcttgattatttggtttatgatttaatgataccatttatgaagaggaaaatttcattttgggaagagacgattttacagccaagaaaatcgttgtttaatggtgcaaaatttttcagaaaatttatgaataaagcccctgtcaatggcaatcaccagcacaactctctgacgagagatagtcaaggaaacgagtattttgcatcttcgtcttctgaattcttaatgagaaaattagcagattggtctatgatgttatccgacttcaaaactgcttattctacgtatgaatcacttatggatgatttggatgcgtttcccaaatatttggcttcgtgcattgagtggtgcgcagtatcattgctgatgggtgcacaaagtatagttacagtgaaaatgatcaaaaatgatataaatccactgattgagagagctttggccacatatgaaaattgctctcaaacgcagcgccataatagcaaagagctgacatcttcaagcgtcgtggaaccggtacgttcatatgagacgcgttgtatgatcttggcgtctgagttgtttttatctttaagcgatacgtggacttctacaccttacgctattcaatatttggaaacaattctagatgaatgtaagttggggccttgctcacaaataatggtttgggaaagactcagtgactgttacaatttgagagtcgatcctagagttaaacatagagttggagttatgaaaaagagcattaagaatactgaggatctccgaaatgatgacgagtatgatacgtgtcatttcacagaagaagacatattatcagaagggttaacaagaagacgtaaagccgcttactttaggttgatagcggccaaaaaatgggcggaacaaaaacaatggagacaggtatcctggtgtttaaaggatatcgaaaacacgtattcagagatcgattttttacatggtaacggtttaatcttgagtaatttgaaaagccagctaaatttaaaggatgtcgattcgcaccgacaccgactgaaaagaatcctacgaagacgagcatcaatttcattgaatgaacatttttgtatagaaatgtaa

SEQ ID NO: 5764 - DNA, 411 bp, Saccharomyces pastorianus
atggacaaaacctgtctggtgaaagtcaaaggcttttggtctagctgttgtggattaccaatgtttgcgtttatgatgttattgaacggtaacgaatttgagcttctttttagttcctcctttagttcgtcggcccttgtggggatagcgcctcttacagcatactctgctttggtgacgcttgcattcaagtccttcttagtgagctttgcagcaggcttgaaatccaaatcctttgtagtaaagacacttttcaaatccttttggtgtgtcatcgtcatgtgctattgcaatgtgttggcagttttcaggtataaagttactgtggtggcttttgccttgattcttatcttttatgctcttgttgttatttcggcaaaaggagaaaggaaatattggggtattcactaa

SEQ ID NO: 5765 - DNA, 1098 bp, Saccharomyces pastorianus
atgaatgattacttcatcgattataacccacgcttcccaatatttgctattagagtagtaaaaggccttgccattcacagagtgtcagaccacgctagacttgcagtaattcctattagaaatatagctttagtggcgaattacaattgggacgtttccactggtaaatttctgtcaattttcttcaaggatggaaccattaggattcacgatatttttaaagacggtagattagtctcatttttaagaataccgagaacaaatatatcaagaggtatatgggaccgaattccattaaaatatgaatctggtcatcgaagttttgcctataatgtaatcgatgtattaccaaaattaattcgattcgtcaaggattctaaaagagtaactattgcaccttacactccaccgaatagtctatggagaggtcccgatgaggatgatcctgaaaatcgtgataaattagacattcacgtaatatttaatgaaggaaacgacaaaatcacagttttttttaatggtgactacgctattcttttgccagtaagtgattttgagaacgagaagatccttaaatcggtagttaaagtacaggatggtttttatcgttgcttatataatgatggaactgtatcaactttaaacttggaacggctattacagagcgaaccatcagtggacttattgcgctatatgatggtaataaaagagcttataggttacttgctcgcgcatatagagtttattaaccgggaattaacaacgccgtatgtggatttcctcaaaagaatatgtgatgaagcctatgggtatagtaagctgaagtcagaactagaatgtttatttttattaggagaagttccatgcgatttagacgattggttatgcaatgcagtgggtgagaagaatttcaaaagatggaaagttttgggctgcgaagcttaccaaaagactgttcaggtttttactttggcgtttgtgcccacatgtgaaaggatcattatttttgtccaaaaagtaaaaggtgtattagaagccttttctattcaagatgaatctgacaataatgctgatttaacagcagttgacttctattaa

SEQ ID NO: 5766 - DNA, 417 bp, Saccharomyces pastorianus
atggaagaacttagaagggcgctggcgctagtaaatagtcaaggagttgagtttatggcgtttgtgaaagacaaagaccacgttagaaacgaaccgactggaaaccatttcttttcagagagttttgtatcatcttcaatcgaaaaggaccctccactggcatttgacctattggtacacaggagaagaataactgtttatgaaacaaacatcgagcccatgatagccttgccgctagatcgaccagtactagtccataactatctatgtgctgcattcaagttgttgagacagctgccttgcaaggcaatcgctaagctgtggataaaaataatagagccaaggaagaagacgaggttcccgtaccctacagcggatcctcagaacgcgacacgctgcccaaggatgtcgacatag

SEQ ID NO: 5767 - DNA, 426 bp, Saccharomyces pastorianus
atgcccggtgcagttgacttcaaacatgtcaataaaagacccgcctcgggcactgaaatatccagatttaaagccctagaaaacaccaactacgctgtcgacttaggcagatcgaagggattttccttagttggtattgaaggctctgatattgtagacggtaataagttgttgacgctaggtctagtgtggcaattaatgcgcagaaacatttccatcactatgaagacattatcttcgagtggtagagatatgagtgattctcaaattttgaaatgggctcaggaccaagtcacgaaaggtggcaaaaactctacaattagatcatttaaagatcacggtttatcaaacgcacatttcctattggatgttttgaacggaattgcaccaggctatgttgattatgatctagtcaccccttggtaa

SEQ ID NO: 5768 - DNA, 456 bp, Saccharomyces pastorianus
atgatctggcaaattattagaagaggtctgttaagtaagatcgatatcaaactacatcctgaattataccgtctactggaagatgacgaaactttggaacaatttttgagattgcctccagagcaaatcttattgcgttggttcaactaccatttaaagcaggctaagtggaatagaacggtttctaacttctctaaagacgtttctgatggtgaaaactataccatcttactgaatcagttggatcctacgttgtgttctaaggcgcctttgcaaactaccgacccactggaaagagcagagcagattttacaaaacgctgaaaaattagaatgtagaaagtatttgaccccaagttctttggtcgcagggaaccctaagttaaatctggcctttgtagctcacctgtttaacactcatcctggattagatcctattcaagaagaggaaaactga

SEQ ID NO: 5769 - DNA, 288 bp, Saccharomyces pastorianus
atgacgttatcactcaatacaccacttggtgtccattgccaaccactgaagctccaaagaacaccacatctccaggtccagcaccaactgaaaatccaaccaaacatggttcttccgtcccaactgtcacctcttacaccggtgctgctgtcagagccttgccagctgctggtgctttgtttgccggtgctgccgctttgttgttgtaaacagtttaacatttttcaaaaaaaagtcaagtattttttccaatacagtttacacaatatattctttcaattccattag

SEQ ID NO: 5770 - DNA, 219 bp, Saccharomyces pastorianus
atgattgttaaagtgaagacgttgactggcaaagaaatttctgtcgaattgaaagaatcggaccttgtgtatcacatcaaggaacttttggaagaaaaggaagggattccaccatctcagcagagacttatattccaaggaaagcaaatgtatgtgaaagtttacgtaatcgccaattacatttcttctgtttgtttttcaaattttactaacgattaa

SEQ ID NO: 5771 - DNA, 204 bp, Saccharomyces pastorianus
atgccatttttggttaacgataatatctctaaatcagttttcaaatttttcaaagtttccttgtcattattccaagatttttctgtccttttgttcgattctcttagttgcttacactccatatccaaactagttaacttagcttccaaatcccagttgaggtctttggttgagtctatctccctcttaaaggaatggttttga

SEQ ID NO: 5772 - DNA, 114 bp, Saccharomyces pastorianus
atgaaaacttcaagaagcaccacgacagaccaggtttgttgtccatggctaacgccggtccaaacaccaacggttcccaatttttcatcaccaccgttccttgcccatggttag

SEQ ID NO: 5773 - DNA, 162 bp, Saccharomyces pastorianus
atgcaagataagttagacggatactatgcgaatgtactttcaaatgctgggaaagacgaggatacgactgacgattacgacaagaccagtgatgaagaaaatctagaggagatactggcggaactagataaagaactagacgatgatcgacaagctgatccg

SEQ ID NO: 5774 - DNA, 699 bp, Saccharomyces pastorianus
atgaaccggtgcgcctgtctgagcaactcgcccaccaaacacaccacagtggtcgtcccatcaccggtaatctcgtcctgggcggccgcggcccgtgcgatcagcacggccgtgggcgattggatctgcatttcggttagcagcactttaccgtccttggtcaacttaatattgcccgccccgtctacaagcatcttcagcgtaccctttgggcccaggttggtctccaacacggactgcagaccctcggcagaggtgacgttcaccttcaacgcggcatctcttctcagcgactcggccttgggattcagcaattgcaacgacatgattgtacagtactactcttgtgatcttttgttatcgctgctttgctttgctctgctctgctctaccgtgctatacaaaatccattcctgctatgtacagttcacttttgtttctgcgcaaagggaagcgaaaaatttgccaccggcccagtccgccgtgccgagcgacccacggcccgtatcagcggcccgaacacccacacccccgacataccggccgaccgacgatagccggccgcagctgccgctgctgagtcacgctcgcgcccacgggtgctgtttgatctctgcggttttgccccgcgcaggcgtggtgtgtgggctgcacggggcgtgggtgcccgccgtggttgccatgattaccgtctcgtag

SEQ ID NO: 5775 - DNA, 1623 bp, Saccharomyces pastorianus
atgtcgttgcaattgctgaatcccaaggccgagtcgctgagaagagatgccgcgttgaaggtgaacgtcacctctgccgagggtctgcagtccgtgttggagaccaacctgggcccaaagggtacgctgaagatgcttgtagacggggcgggcaatattaagttgaccaaggacggtaaagtgctgctaaccgaaatgcagatccaatcgcccacggccgtgctgatcgcacgggccgcggccgcccaggacgagattaccggtgatgggacgaccactgtggtgtgtttggtgggcgagttgctcagacaggcgcaccggttcatccaggagggtgttcacccacgtatcattactgatgggtttgagatcgcgcggaaggagtcgatgaagtttctagatgagttcaagatcagcaaggcggatctccccaacgacagagagtttttgctacaggtggctcgttcttcgctattgaccaaggtagacgcggatttgagtgaagtgttgaccccgattgttacggacgccgtgcttagcgttcacgacgtggaggcggacaacctggacttgcacatggtggagataatgcagatgcagcacttgtcgcccaaggacaccacttttgtcaaaggcctggtcctcgaccacggtggtaggcatccggacatgcccagccgcatggagaacgcgcacattttgattttaaacgtgtcattagagtatgagaagaccgagatcaactcgggcttcttctacagttccgcggaccagagagacaagctggccgccagcgaaagaagatttgtggacgccaagttgaagaagatcatcgacttgaaaaacgaggtctgcggcatggacccgcacaagggcttcgtcatcattaaccagaagggtatcgaccccatgtcgctggacgtccttgccaagcataacattctggctttgagaagagccaagagacgtaacatggaaagactgcaattggtcaccggcggggaagcacagaactccgtcgaggatttgtcgcctcagatcctcgggttctccggcctggtctaccaaaagaccatcggtgaggagaagttcacatacgtcacggaaaacaccgaccctaagtcttgtaccatcttgatcaaaggttccactcactacgctcttgctcagaccaaagacgccgtgagagacgggttgagagccgtggcaaacgtcctcaaggacaaaaacatcatccccggtgccggtgcattctacatcgcactggcaagacacttgaagtccaccaacatgaacaaacttggcgccaagggtaagacaaagaccggtatcgaagcctttgcggaggccatgcttgtgatcccaaagacgttggtgaaaaactccgggttcgacccattggatgtccttgccatggtggaggacgagttggacgacgcccagcactctgacgaaacaaggtacgttggtgtagacctaaacataggtgactcgtgcgaccccactatcgaaggcatctgggactcctaccgtgtcctaagaaacgcaatcacgggggccacaggtattgcaagtaacctactattatgtgatgagttgttaagggctggtagatccacttga

SEQ ID NO: 5776 - DNA, 384 bp, Saccharomyces pastorianus
atgatatattcaccttgtctcgtgatgacgcccttgaccgtcggtgaatcgttttgtttgctgttttcgttgggaataccattggatatgggcatcttaaatatctggtcactctctagcatttccagacatttggagaaattgtcaatgatgttaggcagttgtggtttaacaatctcttcgatgacccatgaacattctgccatggcatctttatgctcatcatactgggcagctgctccaaacctgtcatttggatacaactcaacactcatattgctatccgaacggctttacttgtgtttgctgtggctgcttgtacatcttcattcattgttcaaacagccccgaattgttccattcattcattctgtatatatttaa

SEQ ID NO: 5777 - DNA, 1224 bp, Saccharomyces pastorianus
atggcaaacatagaaaagccgaataacaacacgggatttcccggtttcgacctgaactcgtattttgccaacgacttcaataacatcaaacaagaaacggaaatggaaatggaaaccgataattccccggatttaccaatgtcttcgtctgcttcaagagaaaactcaaacactttctctgtgattcagagaaccccggatgggaaaatcatcaccacgaataataacatgaactcaaaaatcaataaacaactggacaaattgcccgaaaatttgaggcttaatggtagaacgcccagtgggaaactaagatcgtttgtttgcgaggtttgtaccagagcgttcgcaagacaggagcatttgaaaagacattataggtcccacactaacgagaaaccttacccctgtggtctttgtaacaggtgcttcaccagaagagatttattgatcagacacgctcaaaagattcatagtggtaatttgggtgaaacaatttctcaaaacaagaaatcatccagaacaatcatcaagacccgtaaaaactcggcgtcttcagttaaatttcaaacccctaattacggtacttcagataatctcaatacgttgaactgcgccgccaatacaagaagaaaggcaaatcccagcgcactggcaaaacgtaaatatttgaaaaaactcacccgcagagcctcctttagtgctcagtctgcttcaagttatgccgtatcgaatcaatccgaagtggatcaacaccatccaaaggatcgcgtccaattctccacacctgaactagtaccattggatttgaaaaaccctgaccttgactccacttttgatgcgaatttgaatctagatttagggctgaacttgaattcaggtgtcaacatggcattgaatcattccgattcctccgcttctacaatgaacttggattacagattgcccgaatccgcaaacaattacacatattcctcttcctcgccaaccgctgcttacgttggtactaattcgaactcaaagaatgattttttcaatgacgcaaatttattgtcgtcatcatactggataaaatcttacaacgatcatttattttcggtctctgaaagcgacgagacctctccaatgaactcggagtcaaacgatagtaaattgatcatccccggtttgaaatcaactctcaaccaatggaatgattcaaggtcctcttcttggaccgccgcttag

SEQ ID NO: 5778 - DNA, 129 bp, Saccharomyces pastorianus
gaaccactggtcttgaaatgcaatcacctcaattatgtattccacacagaatcaaaagaatgggtgatccaaacaattatcaacgaggatactggtttccactacagtgatagtgaggatgatagctga

SEQ ID NO: 5779 - DNA, 3900 bp, Saccharomyces pastorianus
atgtcaggtcggttggttcaatggaaaagttctccggatcgggtcgtccaaaatacctcatcaagggcacctccttccccttcagccagaagtagcgatatgaatgaagtaaacgttcccgttgatacgtcggaaatccaggctgaagcaacaaacagcgtcgaaggaagccctcattcaaacccgaatccagtcaagtttatgaacactaatgatatttttcaaaaatcactgaggttgctcgatgagagtccacatcatgatgaggagttgaatattgaggtaggagacgatgaccaaccgaatactaatatattgcgtaacgaaagaactcctgaccttgaccgaattgctaattttttcaagaccaaccgaactcctggtaaagaaaacattttaacgaaatatcaaagttctgatctagaagacacacctttatcatcacgaaaaaaattgactttccacaatccaactattccgttagaacctcaaatgcctaagaagttaaggtcaaacaccgaattctgctcttatagaaaagaaggtactgaagaaactgacacatcattagaggtaacggaggctgatgccacatttttacaagcggcagagctctctgccgacaattctaattgctcacctgaagaaagtgctagatgcgaacaacatgaagacgatttacgtcaaagtagaaatatagacaaaagatgtactgagaatacagagttaattagatcgaataactcaatagattcaagcaaaaaaaacggaatccccaaggatggctggaccacaagaaatgaaagcgaagtgtttaaaaataacggagatgaaacgaaaaataaggcggaagaggcaacgagaagactgaccgaaaatgattcagcgaacgatttaagagaacgtggaagccaagtgatacaaatccatgaatgggaaccagaaattaacgaaacgaaaaagagcctcaacgtttcgagtgaagaaaacaagacgaacaactcatatatcaatattgaaacaagtgttgcatctggtacgccttcacagaataatttagaggaggaaggacctcatgctaacaatctaagcaatgagacaccgtccgagagatgggttttccgatattcaaaaaataaggaattcaatagcaatagatcaacgcaaatagtcagtaatcccaaaacacaagagatggcgccggaggatctgtcaatcaatacgcaacgattacctaaagggtatgatattgatgcaaacaatgaattggagacacagataattgtttcttccctttcacaagggctatctgctcagaaggaacctgtgtttcagtctactgagcaggctgaagaaatcaaaactcaaattatcaactctccggaacaaaatgctttaaacaccacgttagaaactcctggtagtatttctcgaatcagttttgaacctattctagaagttcccgagactagttcaccctccaaaaatacactttcaaagccatcgaactcttctcccatttcaaagggaaaagacacattcaatgtgtacggtaaagaagtagacacaaacaacgtcttttcaaatgatattcagcgttctttggacgccgatattggagatggcaatactatgaccggttcctcagaatataatgcacggaaggaattgagtgatagagtatacttacaactttcagggaagcagaagtctgacttaggaagcgatgaaactcacagcgtgtcccaaaacgaacttgatacgaaaagggatggcaccattatgagcgaggccgaactaactcaggaattacctgaagttgaagaacaacaagacctggacacttcaccaaagaatttggaaagggaggagcgatctacaatagagaaaacaaaccacaaagaagattcgcttcaaatctacgctgataatacacaaattaatgtgaatgaacaaggcgacatggaactgcagacggttgaaacttcggctagccgagaaggtaaggaaaagagctcacaattaaaaagaaatcttatgcaattgttcccaaatgactcacaagagatagtttctaatggaagaaggataaagcgacgccaaaaggatacaatagaaatcgccgaagaagaagaaaaccgaagtactaagacatcacccacaaagcgttcaaaaataagcactgattttgtagccactcctgctaaaggagaagcttatagtagcaatgaatttcaaggaggtgttgaagaatctgaaagatattataaagaagcctcctatgtgttccctcaaggaatcaaaactgaggatagtagtttcttgtcgaaagaagacattatatttgggaatgcagtatggtgtcagtattcatggaattataaattttatccgggcattttattggatattgacactaatcgggacggttattggatttattttgagacaggaagatctttaaccaaagaggaagatatctactatcttgatatcagaataggagatgcagtcacttctgatggaaatgaatacatagtggtaggtctagaatgccgtagccatgatcgcgatattataaggtgtattcgaggatatgacaccgttcatttaaaaaagaaaaacttgagtgggtcgctgggaaaaaggatcctagttaaagcgctcagctctataagtcttgatctaaacgaatggaccaaaagagcaaaaatcatactagaagacgatgaaagaaccaaaggaaacgcatatagatatctgcggcatcccattagaggaaggaaaccaatgaccaacgtgatatcaccaaaaaagctagctaatgacgaaaaggggaaaagagcgcataatagagtgcacaatgatgaacaattgagctatgaaaataatgaacttactaaaaaaattactaaaaattcctcgtcagaaaacgaggccttccctaacctacttttttctttgggagaagtaaaaagagggaatatatttgataggtgcatatttgttttgacaagtttatttgaaaatagagatgagctgcgccaaatcatcgagtcacaaggcggcacagtaatcgattctgggttttcctctttgtttgatttccctcatccaccagctaaatttctggttgatagagaccgtatagagaatacacgagagttggacctaaaactagcttggaaacctgactgtcaattcgctaattataggtttgcttgtctaatcacgaaacggcatttaagaagcttaaagtatttggaaactttggcattgggatggcctacactacactggaaatttataagcacatgcatcgaacgaaaaaaaatatcgccacatttaatttaccaatatttgttaccttcgggggaaagtttccggttatcattagattctcaatcaaagggagggatcgttaaatctaacaacattttctcattttataccaggtttttgcgaggatgtcacctacaaaatcaaatagacgggatggcaaatatgctgaatggctatattgttattatatgtggtagttcggagttggatagttttatcaaatttgtttttgcttgtttaagtgcaaataaaatgtttaccattgatttgccgaatattgacatagagaatacagaatcactgtcaaacttcttggcttctttagtttctcggataggatcggcaatatctgataaaaatttaaaatttctcatatatgttaacgaaaataatggaaagactcaaatgcgacttctcgaaaaattgagaaaccaactgtctttgaaattcaatcacctcaattatgtattccacacagaatcaaaagaatggttgatccaaacaattatcaacgaggatactggtttccactacagtgatagtgaggatgatagctga

SEQ ID NO: 5780 - DNA, 333 bp, Saccharomyces pastorianus
atggataaatatactgctttgattcacgatgagaatttttcaactcttacattgaatgtctcgagataccctaaaagtttggcatattgggagaagttactgaactatatagtaaaggcttcggcaccaatatgcaagtccactgagcctcaattattaaagttaatacgatgtacttattcttctatgctgaatgagtttccctatctagaaaactactatatcgacttcgcgctactggaatacaaactagggaatgtttctatgtctcataagatatttcagcgcggattgcaagccttaaccaaaaactaccagatggtcaagtcatta

SEQ ID NO: 5781 - DNA, 243 bp, Saccharomyces pastorianus
atgcgttcaagaagaaggggagtagcgtatcatcatagtaaaccaaaaggaccactttcacaaggacagtatcccatagcatctaatgagggacaaagaaggaagctcaatagtcctgaggcgtttcaatcgtttgacatctggaaaaatttggatagaataagaacaactagaaaggatgtggaacaacttatgaagggcagcctacttatacttcctgtgagaacacaagataaacagcaa

SEQ ID NO: 5782 - DNA, 345 bp, Saccharomyces pastorianus
atgacatggcattcttctgtgaccaacgaaaccaccacagactctacacctcctatgccttccacttgtttggtaactgtggaaacgcaggatccacaggtcattccttgtatgcttagtaaaccttgtcttgtagttgcggttgtagtatccttgtcatttagtatctcgcagtcgaacccacaatcttctattgtttccttgatagaatcagtagtcaccccattatcgtatgccacctggcactcattcgtcactaaactaatatcacattttgtcacccccgctaaagctcgtagctgcgtggtaagcgtgttcacacaggcgctacatgtcattccatga

SEQ ID NO: 5783 - DNA, 1296 bp, Saccharomyces pastorianus
atggccaaaagaagaccaaaaaagagaactcatgcgcaggttgtacctgagcaggaaaaaggtattccaaaatcaatggtcattagagtcggacaaacttctttggccaaccactctttgaaccaattagtaaaggattttcgtcaaattatgcaaccacacacagctataaaactgaaagagcgtaagtccaataaactcaaggattttgttgttatgtgtggtccattaggtgttactcatctctttatgtttacacaatccgaaaagacaggtaatgtttctttgaagatagcaagaactccacagggtcctactgtgaccttccaagtgatggattattccctagggaaagatatcaaaaagttcttaaaaagaccaaaatcattgaataatgatgacgtactaaatccaccattgctagtcttaaacgggttttccacatccaagaaatccgatgaagacaatcaggatgtaaacgtagagaaggtcgttgtttccatgtttcaaaacatcttcccacctttaaatccggctaggacttcattaaattctatcaaacgtgtattcatgatcaacaaggacagagcaacgggcgaaatttccatgcgtcactacttcatcgatattagagaggtagaaatttcgagaaacctgaaaagactttataaggctaagaataatttgagtaaaacggtgccgaatttacatcgaaaagatgacatttcctcattaatcttggaccacgatttgggtgcctatacatctgaatcagaaatagaagacgacgctattgtgagagtggttgataaccaagacgtcaaagcaaagcaatctcaaaactcgaaacctcaaaagaaatcagcagagacaaaggatgctaaagaggaagaagaagaagaagacgcagaaatggaggagcccaaacgccaagaaccttcccaactaactccacgtaagaaggctatcaagcttaccgaattgggaccaagactaaccttgaaactagtcaagatcgaagaaggaatctgttcaggaaaagtgttgcatcacgaatacgttcaaaaatcaagcggagaaattagagaattggagaaaagacatgctgcaaagatgagactcaaggaacaaagaaagaaagagcaagaagaaaacatcgcgaaaaagaaggctgtcaaagatgctaagaaggaacgtaagttggaaagaagaaaagctagggcggcagaagagggcgacggtgaaaacaaggccgatgctatgagtgatgactcatcttcgtccagcgaagattaa

SEQ ID NO: 5784 - DNA, 354 bp, Saccharomyces pastorianus
atgctggactatggtaggctggcatacgacgtcacaagaaagcatacgtccttccctttactcgctccaaaacggcacaataatattggggagagagggaacggcattgaagcttatactctaacggtcttcggcccattcattctcacgtctgatggcggcttcctcctctggggtgaagtcgttgacgatattaaacgtccttcttatttcctcgggggacctgcctctgatcatttcggcaacaactttgcagcccgcgtccagcaacggcttgatgttaaggtagtttgccgccaggatgatttcataaagcatctcttggtccactttcaaaaactccctatcccatga

SEQ ID NO: 5785 - DNA, 4356 bp, Saccharomyces pastorianus
atgaccacacctcgtaaatcacatacgaaaggcagcaaagttgatggcgaacaggatttggcggacttgaagtttaaatatgacctgctgacgaatgagctgttccatttaagggagtttatttcactagtggactacgatccaacgcatttcaacgactcggaaagtttccacaaatttcttaaggatacacacttgtcgttggaggagggacgagaagagcctactaacggccttgaggatacaattatagctgccaatctcactcataggaggcgtaacctcaggacatcaacagttgtcagttcagatgccattaacgagaaaaaggacgatatagaactgaagctggaaactatcgcgcctttggttcgaaataaatgtgaagaactgaaaagtaaactgaacgataatttaaacatcaaacacgtggtaccacaaaagagaccaatattgcattcaaagaaaagagaagctcccaaagcttccaagttaaaaactgaaaaaaaggaagagatatcactatcacttgtaaataaagatgaacagaaacataaccatatcgcaaaggtagaagagacttccgaaaacttcacaataaactatgcttctgactcctccgacaacgctagtgaacactacagtgataatttctatttcaccacatcatcagaagaggaagacataaaaaagaaaagaggcagaaagagaaaaagaccaagaataaatttaacggtccatctcccaaaacaaacgataacaaatccctcccatgtaattaagccggaatataaaaacttgcatgaatacatgaattccttcaaatctttagaagaagatttaacgttggacgagtataatcaatatatcgatgaacagaaacaaatgttgttgagaattaaaaaaggaatcgaaagtggtacattgaagtatgacaaagaaacagactcactgcaacctttaacatcaaaggaaattaaaattattttagcgtataaaccagacccaatctcatatttttataaacaacagaatctgcaagttcaccgggaccatttgattaatcaaggtgttcacatgagtaaattgtttagaaattcgacaaaggcaagaatagcaagagctaagaaagtctctcaaatgatcgaacagcattttaaacatatagctggcgcagaggaaagaaaattgaaagaagaggaaagacataaaaagggtctagcaaggttcgctgttcaagccgttaaaaaaagatggaacatggctgagaaagcttatagaattttgaggaaagatgaagaagagcagctaaagaggattgagggtaaacagcatttatctaagatgctggagaagagtacacagctgctaggtgctcaactaaaccaaacaaatgaagatggaaaagagggcaatttgtcgtctaattcagacgatatatcgagtgagagtgatattggtatggatgatgaattgtcaacatcctcttctgatgatgaagaagtgggtgctgatattgagttggataataacaaccaagcctcaacagaagccactccaacagatgagtccttgaatctaacacagttgaaggaaaaatacgaacatctgaatggttcgtcgacagtatatgactcgagtaatgcagacggaaagtctcccttattggacgaacacgacgatgcaaatagtgaaagttctgtaatgacaggagaggaaacgtctgaaaactcctcatccgaaaacgaaagccaaaaagaaaccgaggatagatctgatgatagaaccccttctgtcgggctaagtgcgttgtttggtaagggtgaagaatctaatgaagaactagatcttgatgacagtgaagactttgcaacgaacaactcttcctctgcagagagcgaggaggtcgatcaaagagatgaagcagataatttgggctctaatgcagataatgtagagaaagttgaacataccgagactggagatggaaccgatgtgaacgatgttgaagaagaagtccccaaaaaaatagaagaagaacaattatcagtggtggacgtaccagtgccatctttactaagaggaaatttgagaacatatcaaaagcaaggtctaaattggctagcctcgctttacaacaatcaaacaaacggtatactagccgatgaaatggggctgggtaaaactattcaaacgatttctctgttagcatatttagcgtgtgaaaaagaaaattgggggccacaccttattgtcgttcctacatctgttttattaaattgggaaatggaatttaaaagatttgctcccggcttcaaagttttaacatattacggctctcctcaacagcgtaaagaaaagagaaaaggttggaacaaaccggacgctttccatgtgtgtattgtttcttaccagttagtggtccaagaccaacactcttttaaaagaaaaagatggcagtatatggtattggatgaagctcataacatcaaaaactttagatcgacaaggtggcaagctcttttgaacttcaatacacagagaaggttgttgttaactggtacgcctttacagaataaccttgctgagctgtggtcattgttgtattttttaatgccacaaacagtcattgatgggaaaaaagtatcgggatttgcggatcttgaggcatttcaacaatggtttggacgccctgtcgataagattattgagaccggtcaaggctttggacaagacaaagaaacaaagaagacagtggccaagttgcatcaagttttacgtccatatcttttaagaagattaaaagcagatgtcgaaaagcagatgccggctaagtatgagcatattgtttattgtaaactatctaaaaggcaaaggtttttgtatgatgatttcatgtctagagctcaaacgaaggcaactctggccagcggtaacttcatgtctatcgtcaactgtttgatgcaattgagaaaggtgtgtaatcatcctaatttatttgaagtgagacccattttgacctcgtttgttcttgatcattgtgtggcttccgattataccagcattgaaaaaactgtagttaatctcttcgaaaaaagcaaacaattcaaacagattgatttggattttatgaacttagtttttgctaataatgatcacgacttaacttcctatcatgctgaggaaatttcgaaactaaaatgtgtcaatgattttattgaagaggttgataaactgaaagaaactaataaacaacttcaaaaggaatacgaaaacacttcattgaactttcaagacgcaaatcaatacttccaatattctaagcaacggaaagttgaaggaacacttggtatgctgaacttcttgaaaatggttaataggctaaggtgtgataggagaccaatatttggtaagaacttgattgagctattgaccaaagatgatatgattggatacgagaagccacggatcattgatggcgggttgataaaacctttgcaaaccagactgttggacaataaaaagatcatcgatacctttgcagttctaacgccaaacgccgtctcattggatatgagaaagttaacgctaggattaaacgatgacagtttattagatgataacaccaagtcggaggtagtggagaattgctttggagtggccaacccactacatcaactacaaaccaaactaacaattgcattccctgataaatccttgcttcaatatgactgtggtaagttacaaaaattggcaataatactacaacagctcaaggacaatggccacagggcccttattttcactcaaatgacaaaagttttggacgtcttggaacagtttttaaattatcatggttacttgtacatgagattagacggtgccacaaagatcgaggaccgtcaaatcctaacagagagatttaacactgattccaggactacagtgtttattctatccagtaggtcaggggggttaggtattaatctaactggtgcagacaccgttatcttttacgattcagattggaatccagccatggataaacagtgtcaagatagatgtcatagaattggtcagacccgggatgtgcatatttacagatttgtcagcgaacataccattgaaagtaatattctgaaaaaggcaaaccaaaaaagacaactggacaacgttgttattcaagaaggtgacttcaccaccgactatttcagcaagctttccgtaagggacctactaggatccgaactacccgggaacgctccaaatgaggacaagccactaatagcagacgcaggcatggctgccgaggaccccaaacagctggaaaaactattggcgcaagctgaagaatga

SEQ ID NO: 5786 - DNA, 408 bp, Saccharomyces pastorianus
atggcaaaatgtatatgccggagttatcaagggtctttagcccagatggtcaattcatcgttgtataaacatatgggcagcgcatccccatatcagatattgcctattgtaagtttgcgttctttatctacgaaaggttttcttttggaaagcgaaaagaactgtttgaaggctacgcaaattcgtgattttgaacgattgatgccatattccagcaaacacgaatcttcgaaaaacgttcaaaagcgtttatacgagctccgacaattgaagactgtattatgtgagacgtttggagtaacagagtatgcttctttttttgaatctttacgacatgccttgcgttccaaagatctttcaaaccctgaaaagacgaaactgctctatgatgtaatcttgaatcaacat

SEQ ID NO: 5787 - DNA, 318 bp, Saccharomyces pastorianus
atgtgtcttttccctagtagtttactttctaacgcacgctcaaaccggtcttttttcaattggtgttctctaacttcttgctcttttaaaggctgtgacattggtacgtcctttttcaaatcattaattaggtttcttttacggtttttatcgatattgcctgaccttgaactcggcggtatattggccttgatttctgggaaactgacatcgaattgcgaagcttcgctaaacaacctggtagagtcaatggtatcatcaatgcttattcttcgcattttcctcgccgggccttcgttttcgtcatcgtcattatag

SEQ ID NO: 5788 - DNA, 471 bp, Saccharomyces pastorianus
atgccacaaagaattgagcttacatcggaaccagtgagaagacctcagtcttccggaagttcattgatcagaaagatccaaagagcatgtaaatccacattacctgaaccagatttgggtcttaatctagacatagccgattttatcaactcaaagcaaggagctacaccaagggaagcggtcctgacgattggaaaactaataaataatggcgacacccaaacggctgtttttgccctttctctactagatgtcttagtaaaaaactgtggctacccactgcacctacaaatatccagaaaggaattcttaaatgatctggtaaaaaggtttccagaacggccgcctttgaggtactctaaggtccaacaaatggttctcgaagctatcgaggaatggtaccaaactatctgcaaacacgccagttataaggatgaccttcaatatatagtgacatgcacaaattattga

SEQ ID NO: 5789 - DNA, 522 bp, Saccharomyces pastorianus
atggtagaagctattaaactgaatgatttaaagaataggaaaagaagaaatacagaagaagaagaaaatggcagcgaggaatctgaaatcgatataagtagtaccgattcagaaaacgaagaagagccaaatggggaagaagagatcgtgaatattgatttcgacttcttcagtggtaacccagatgttgatttccacgctttaaagaatttgtcacgtcaactctttggacctcaagaaagtaccagaattcaactgagcagtctggcagatttgatgctaggctctccaactaccacaatcaaaacagatggcaaagaatctgatccttattgttttctttctttcattgacttcaaagctaaccgcaatagtgactatgcaaaatacttacagaaagtggacatgagactgtctacgttttttcaaactatttcggatagcggcaacaaaaactgtgctttggtcatcagcgaaagactaattaacatgccaccggaagtcgttcccctttatacaaga

SEQ ID NO: 5790 - DNA, 276 bp, Saccharomyces pastorianus
atgtcggctcctagcacacatacttttgaagtgcatctattaataatcgtgctcaaaggaggatatagcctgactgcctcaaaaagaaatgcattcaataaaggtaagtccgctaaggctttcgaatcagtgacactttctacttcttgcctgagactgttctgccattcgtttgaatacttagccaaaagatacaacgaagtgttgaagagcagttgggggttttcatggccagcaacgaggataatgacgatgttatcggataattgtttgtag

SEQ ID NO: 5791 - DNA, 2466 bp, Saccharomyces pastorianus
atggtctcactaagtataaaaaatgttctgctcctcatatcattaatgaatgcaattgcagcttataccaatgatacttcatactcatatttatacactagtggaatagatagtacgtcgtcgtattcaataaatgggatatacagtactgaatccagcaataatgaaaatggagaaacatcgagccctgaaaccaccacattggctggccaatatagtgaaagtgaaagggtatcaacgaatgaaggacaaagttctaccatttctcaacaacttacctctgctgctgtcaccgtacgaagttcggactttatgtcgaagtcaacgatagtagcgacagcaagtagtagtagcgttcccagaccgattcaagctaccagtgaagcaccatcactttcacaaattcatagttatgacacaaaacctgtttcaagatcattactttcccaatcatcgagtagttcatatacatctgatgccacagcagtaccgagaggaacaaatccaataataacgacgaccttttcatcttccaaaggcgaaataataccaactcaaacttctgccgccagtcgcacagctagtcttgcgcaagtggtacctgagtcctcaaaactttctcgtacgaccttaacgacaacaacccatgtttcaaacggtgaaacaacacaaactcaattttttagcacaataacgtctatgataccaactgaagagtacactatagacgaattctctggagactacatcaccaacgaccctggtggggaattgattgtggaatactcatctagccaaaccgctacaattattttatcttccaaaggtgaaactatatcgaccaaaacttcgagcaccagtaacgctgccagtatttcgcaagttgttaccggggcctcacagctttctcgtataacttcaaccataacaacacaaagcgcaagcataacgcaaacccagcctttcagcttaatttcatctataaaattgactcaagtgtctagtacgagtgaatgggagacctccgaaaatgacggcggaattttcaccaaataccctaaccaggaattaattgtagatgatccgtctagcttgtctcttaaaacaactgtatcatcttcaatgaaaagtcaaagtgaacacactgaatctaattcaatcacgaaatcttcgacattgaatcaaaattccatagttaccagtataccgtacgctgaagcttcaactttgagcacgattccttctgtgtcttcgtacacatcctccccagccgcagttggtccttctgcttcttcatacacatcctcttcggctgcagctgcagttggtccttctgcttcttcatacacatcctccccagccgcagttggttcttctgcttcatcatacacatcctctccagctgcagttggtccttctgcttcttctgcttctccatacacatcctccccagccgcggttagtccttctgcttcttcatacacatcctccccagccgcggttagtccttctgcttcttcatacacatcctccccaaccgcagttggtcctttttcttctactcaaacgatttctccatctttctacacccctttttcacctgccactacttatgcttctggattgtcatcagtacagtctctgttaacatccgtcactgttacgccagtaatttcaatacatacaacgtcatcttcatcccaacaagtttcttctacaccatataaaacaatactccaatccatatctataagctcaatttcaagtgacgctacgttttcaagtccagtttctatcatcagtataacctcttttgcttcaaaccgggtcgaaacttctccgctaggttcatctactcaatccagctccacttacgtggccgagtcgtctaaaagtaacatacctctaacgcagctccctagtggttcagaagcgtcatataggatgactaatcagaataccgcgagcaatgatcaactcacaacaacaaggcaatcaaatctcccatattcttcctctaagaaaacattagataatgaatttttttcggcaacgtttcaaaccaatcctacaggtttgactaagtcggataccttatctacctcagcatccggtagctcgacgcctcaattagtggcaagcggtgtttctgactcgtcgattgatctgggatcccatatcacgtcgttatatcactccgcctcctcaatatcttcaaaaaagtattccaaagagacaaatattatcactaaatcattttcaaatacacaaggaagtgtcacaagatcaacaacaacatatcaatccagtaggcagtctagaatatctacagcaaagaccactgtaaatacccagaatcatgttttaacaaccacctcttcatccaccttttcaaaatcagcgaactcgatagctggctcaatcagtttatcaaataagttgtcaaaaaccacaactgacagtcgg

SEQ ID NO: 5792 - DNA, 1092 bp, Saccharomyces pastorianus
atgcctatcaaaataagaccctcagaaaatacagtgcctacatttccaaagcggagaagaacataccaagcttgcatcaattgcagatcaaggaaggtgaaatgcgatcttggccctgtcgataaccctcatacaccaccatgcgctcgctgtaaaagggaactaaaaaggtgtctttttagttccaacagagaagcaatgcataggttatcgcccagcatgattaatataacaagtaaaaatgcctccagtaagagtgaacaaggggtaccaaatgagtcgataagtccgactccatcagatatgactttgtcgggaaagaacactcataatgaaacgttatttaaatcagatggtatgaaatggaaacttgaactttcatccatgcagaacactttagaatttttagcgcaagcggctggtaccgtggctaaagaaggtgcgaaggaagttataaaagatgagtccacaacaacgccatatgtaaactctttgcactcatcatgtcaaccgtccacagatgaaggattaaaacggctttcaggatgtgtaagtgctgcttctgacaccccagacgaaaatttaacggttgcacttgctaccaccctgaatgctaataaaacaacttcacagttaatagaagagattggtaaagttagaccaacacccacacgaaaaatagaggactttgaatatatcggtccagctaatctgctcaccaaagaagaagcaattgatttaatcgaagcatttttcctcacgatgcatccgttctttcctaacatcccattccaattacacgatccaaaagaattggcacaataccccattttgttctgtgcgattttaactgtttccgctcgctatcatcctttcgatactctggggttagataatggagaaaatggtgcaaggcatgttgaagttcacgataaattatgggtgtactgccaaaaactgatatctcaaacaatttgggcagaagctagcacaagatcgattggtactgtgcttgcatttataatttccacggaatggaacccaaggagtattcactgcaaatggtctgactacgcaatgatccagaactaa

SEQ ID NO: 5793 - DNA, 486 bp, Saccharomyces pastorianus
  modified_base (449)..(449): a, c, g, t, unknown, or other
atgtcatggatgctaacggggtccgcagtaaggctcgcacaggatatggggtttattgaaaatagttcaaaaatatttatagttactcatatctctgaaaccacaagcgcaatgaatatgaaccaaaggtctttactagcagaatcatttagtgtcttgaacctaaacttagaaaggtttgacaatgatggaaatgaaaataatgagaactatcttaggaatgaaaagttctatctagatgaaattctacctaatgatgaaagtaaagagaggtggaaaaaggttttagaaaatttagaagctgacaacgacaacgagaaatgcgttctgacagattgggaacgagagtttttgaacgatgaatacgttctatattactccaataagaaggacgatacgaatttggcacaaaataatatgccaccatttccgctagactctagaggatnccccggtaccgagctcgaattgtatcatgtcatacgt

SEQ ID NO: 5794 - DNA, 1278 bp, Saccharomyces pastorianus
atgccaccatttccgctaagattctcgtttgctcaaagagcaaagatagagataattcggatcctttccattgcatatgagaccatctattgcgaaaagaataagagaaaactggcaactactgaccaaaggcacaacctatctgtactaagtgttttttctcccttgatagaaggctggcttagcaactacagagaggttcttgtacctctttctgatgttccattttctttagcgaatagaaagaataaaagacaagttcttaacaacatcgataggataaatggcgaaagtattattacagattttaattattgtcagctttacattttctcacttgcattacaagtggatgggaagataagcagactaaacatgagcgaaattgttaagagcgccaggtatgtagaattagcatacaaatctgctaaagaaattttaagctctgcaaaaagggtctcaagacaatgcatgctgaagtacatgcccgttagatgggttatacgaataattagatcaattgcctttatagtgaagtgttacctaacactcactggcagtgaaatagcaacaaatcccgatgccagaaacattctgaaactaagtgcaatatctgtcgatgaaacattcgatctcattcgcgacaccgcagtaactttgaaggaggccacacccgatgagctacacctttgccaaaggtatgcagccatattaatgtacttgtgtacagaaatgaaacttcgaaagaaatcccatttagaacgaccacccacatcaagaactggtatagcccccttgaaaagcaatggcgattcgccgttagaaggagcaaacctggctaaagggccagcgtttggaaaagctgctggcacgagtaaggcagagagtattttcgatcctttagcgaagacttctacagaggcaacatgtgatgatccgaataactcaacggagttaccatttaaaagtggcctaaattcctttgtggatcgaactagcgatattactgcaatgttactgaataatgagcttttccaaggcccatcgttatctgaagaagtcacagattggtttagtgctagtgaagacattgggctggagttcgtagaaccgtggacagagctaatcgaacaacgatacatgcaatgtggtgatggtgataacaacaatttcgagaatttatatacttattcgcgaatagtaatgacactgatactgacactgatagaccagcccctcacacataaaattagagaaaaggaatgtttaattagataa

SEQ ID NO: 5795 - DNA, 132 bp, Saccharomyces pastorianus
atgggtgcacaaggtttattgaacaagaacgggactccaataaagaaggtggccaggccaggcagaaaggtcgacgctaaggccaagaataaaaggactgcgctgaacacggcagtcctacgggcgttttga

SEQ ID NO: 5796 - DNA, 462 bp, Saccharomyces pastorianus
atggacaccatagtcgatgattccaattatgactggctattccaattattgaatgcgttgactgttggtgattttgacaaatttgattcattgataaaagttcaaatttccaagattccagtattagcagaacatgaatcctttttacgacaaaagatttgcttaatgacactaattgaaacagtttttgtcaagaatattagaatgttgtcttttgatgatatctccgaggcaacccatttaccaaaggataatgttgaacatttagtcatgagagccataagtttacgcctattaaggggctgtattgatcaggtaaacgagttagtaaccatctcatgggtccaaccaagaattataagtggtgatcaaatcacaaagatgaaaggaagactggtagaatggaatgatcaagtcgagaaacgacctgcaggcatgcaagctggcactgccgtcgtttac

SEQ ID NO: 5797 - DNA, 129 bp, Saccharomyces pastorianus
atgtttgataaccatgaacttgacactgtattgagtacacttcgcatggaagcagaaccttctttccaccctttgttcgaagagtttgaaaaatttatgaacaaaattatggttcagttgtctgaatcc

SEQ ID NO: 5798 - DNA, 954 bp, Saccharomyces pastorianus
atgtttaataatcatgaaattgacaccatattaagcactctccgcatggaggcagatccctctttgcatcctttattcgaacaatttgagaaattttatgaagagaaattgtggttccaattgtccgaatccttgactaaattttttgatgatgctaaatctacaccattgaggctcagattatatgataacttcgtttctaaattttatgataaaatcaaccaattgtcagtagtaaagtatctacttgcctctttgaaggattctaaggatttcgatgagtctttaaaatatttggatgatttgaaggctcaatttcaagaattggactctaaaaaacaaagaaataatggatcaaaagaccatggtgatggtattttgttgatagatagcgaaattgctagaacttacctgttaaagaacgacctcgttaaggcaagagatttattagatgatttggaaaagacattggataaaaaggattccattccattaaggataacaaacagcttctattctacaaattcccagtattttaaatttaaaaatgatttcaattctttctactacacaagtctattatacctttctaccttagaaccatctacaagcattactttagccgaacgtcaacaattggcctatgatttgagtatctcagcattgttaggtgacaaaatctataattttggcgaactattacaccatccaataatggaaactatagtcaacgattccaattacgattggcttttccaattattaaatgctctaaccgttggtgattttgataaattcgactcattgataaaagttcaaatatcaaagattcctatattggctcaacatgaatcatttttacgacaaaaaatttgcctaatgacctccttgaaccagttttgtcaaactatcaggatgtttccttcgacgatttccacaggcaaccactaccaa

SEQ ID NO: 5799 - DNA, 1278 bp, Saccharomyces pastorianus
atgtctgaagctcaagaaactcacgtagagcaactaccagaatctgttgtcgatgccccagtcgaagaacagcaccaagaaccaccacaggctccagatgctccacaagaaccacaagttccacaggaatctgctccacaggaatctgctccacaagaaccaccagctccacaagaacaaaatgacgttcctccaccatctaatgctccaatttatgaaggcgaagaatcccacagtgtccaagactaccaagaggcccaccagcaccaccaaccacctgaaccccaaccatattatcctcctcctcctccaggtgaacacatgcacggtcgcccaccaatgcaccaccgtcaagaaggagaactctcgaacaccagattgtttgttagacctttcccattggacgttcaagaatccgagttgaatgaaatctttggtccatttggaccaatgaaggaagtcaagatcttgaacggcttcgcgtttgttgaatttgaagaagcagaatccgctgccaaagccattgaagaagttcacggtaagagttttgctaaccaacctttggaagttgtttactctaaattgcctgccaagagataccgtatcaccatgaaaaacttaccagaaggttgttcatggcaagatcttaaagatttagccagggaaaatagtttagaaactactttttctggcgtcaataccagagattttgatggtaccggtgctctagaattccctagtgaagaaatcttggtcgaagctttggagagattaaacaatattgaattcagaggttctgtcattactgttgaaagagatgacaatcctcctccaatcagaagatctaacagaggtggcttcagaggtcgcggcggcttcagaggcggcttcagaggtggcttcagaggcggtttctccctagaggcggttacgacggccccagaggtggctttggcgccccaagaggtggctacggtggctattctagaggtggctatggtggctactccagaggcggttacggtggctctagaggcggttacgacagtccaagaggtggttacgatagtccaagaggtggctattccagaggtggctacggtggtccaagaaatgattacggtcctccaaggggtagctacggtggttcaagaggtggttatgatggtccaagaggcgattatggccccccaagagatgcgtacagaaccagagatgctccacgtgaaagatctccaaccaggtaagcgattttatataactggaaaaaaattttaa

SEQ ID NO: 5800 - DNA, 96 bp, Saccharomyces pastorianus
atgtccgcttctgaattctacgcaaaggagattaagagtgcatttaagcaatttactgacttccccatagagggagagcaatttgaagattttttg

SEQ ID NO: 5801 - DNA, 1137 bp, Saccharomyces pastorianus
atgtcgaagtccagatattatttggagcaatgtattcccgaaatggatgatctggtggaaaagggacttttcaccaagaatgaggtttccttaatcatgaaaaaaagaaccgattttgaacataggctaaactctagaggttccagtattaacgattacgtaaaatacattgattatgaaaccaacgtcaacaagctacgtgccaagagatgtaaaagaatcttacaggctaaaaagactaacagtctatctgactggtccattcaacaaagaataggttttatttatcaaagaggaacgaacaaatttccacaagatttgaagttctgggccatgtatttgaactacatgaaggctagaggtaaccaaacatcatataagaagattcacaacatttataaccagttattgaaattacatccaacaaatgtggatatatggattagttgtgccaagtacgagtacgaagttcacgctaatttcaagagttgtagaaacatcttccagaacggtttgaagtttaatcctgatatacctaagctatggtacgaatatataaagttcgaattgaatttcatcactaagttgattaacagaagaaaagtgatgggtttgatcaatgaaagagaacaagaactagatatgctaaacgaacagaagaatactgagaccaatgatgaagagaaatctcacatgcaagttccatcaacaggcgattctatgaaggataaattgaatgaactgcccgaagcagatataaacgtgttaggtaatgcagagactaacccagcgctacgtggagatattgcattgactatttttgacgtgtgtatgaaaactttaggtaaacattacattaacaagcataagggctattatgccatttcagactctaagatgaattctgaattgaacaaagaagcgttgaattacttgtttaatcaatcaataaaatatatccaattatttgatgaattcccagatttagaaagagattatcttatcaatcacattttgcaattttggaaaaacgatatgtacgatctttcgctccgtaaggatttacccgagttgtatttaaaaacagtactgattgacaccacgttaatttccgatacatgccagtccaagacctga

SEQ ID NO: 5802 - DNA, 369 bp, Saccharomyces pastorianus
  modified_base (365)..(365): a, c, g, t, unknown, or other
atggtagcacaagttcaaaaacaagccccagcttttaagaaaacagcggtagtcgacggtatcttcgaagaaatctctttggaacaatacaaaggtaaatatgttgttctcgcctttgtgccattagccttttcatttgtctgtccaactgaaattgtggcattttccgatgctgccaagaagttcgaggagcaaggtgcccaaattctatttgcctccaccgactcggaatattccttactggcgtggaccaaccttgctagaaaggacggtggcttgggtccagtcaatgttcctttattagccgacaccaatcattctttgtccagagactatggtgtcctaattgaagaagaagtattgcnttga

SEQ ID NO: 5803 - DNA, 1602 bp, Saccharomyces pastorianus
atgccctctaccacgttgttgttcccacataagcacatcagggcattgccaggcaagatgtacgcgttcttcagacagcttgtcagtggagtagtaatatccaagccagatttgagtctgcgtttctcatccgaaagtggcacgaaattggaggatgaggacgaggaggacgaggaggacgaagaagacggaaacatggtcgccggtctgtttccaaagtcgaacaacgtagatcgctccctgaacggaggttcctccgtcatcccatgctccatggatgctagccacctgaacactccaatatcgatgacgctatccccggaaaatcgcattaaatgcgaagtgaatgcaaagctgctaccggggtccaagctggagcaagaagccgggattttggtgacgtcgtctagcagtgcgtcgagttctccgctaagtgcgtcaggctccaccccggagcactccacgaaggtcttggaaaacggtgaagaggagttcatctgccactactgcgacgccacctttaggatcaggggctacctcaccagacatattaagaagcacgctatccaaaaggcttaccactgtcccttctttaactgttctacacccccggaccttagatgccacaattctggcgggtttagcagacgcgacacttacaagactcacttgaaggcaagacacgttttgtactcgaaaggcgtcaaaccacaggaccgtaacaaatcttcaggccattgcgctcagtgtggcgaatacttttccgccatcgagaatttcgtcgagaaccacatcgaatctggcgattgtaaagctttgccgcaaggctataccaagaaaaatgagaagagatcaggcaaattaagaaaaatcaaaacctccaacggtcattcccgtttcatttccacttcacaaagtgttgtggagcccaaagtgctcttcaataaagacgctgtggaggccatgacaatagtggccaacaacagttcgggcagcgatataatatccaagtacggcaacaataagctaatgttgaactcagaaaactttcaaatcgacatacccaagaggaaaagaaagtacaccaagaggaagcagcaacagcaccctgattcagcaataacatcatcaaccgacaagaaccaacaagaggccctggacgccatctcatctgccgcagtattttcacatttcgactcccatcttctcgagcccgtcacttccaattcatcagaatcttctgcggaaattatggcccacagtaagcaaatgaaaaatatcttgattgatataaacagcttcacaaacgagcagcaacaaccacagaatgttcctacgttcatgccactggatattgaacagtcctcttacgacctgaacgacatggcaatgtcgtatccgatcacacccgcacaaaacagtcataacagttcacagtataccaatgcaaagatcactcaaatattacagacacaactggacccagaatatcttagccaaagccatataagagaaacgcagcaatatttggacttttataacgataattttggatcgcagtttcgagtaaataaacacatgaggaaaacggaaaaaaagtaa

SEQ ID NO: 5804 - DNA, 696 bp, Saccharomyces pastorianus
  modified_base (602)..(658): a, c, g, t, unknown, or other
atgaatagagatcaaactgtgaagtatcaagagcgaaacctgcggcaaaagtacaatatgctacacgcattaccggcgttaaaatctaaagcgctctcaggactatattatagaaacttccataattctgtgaaacgatatcaagttgtattgcccgaacagctaattagtgggaaattttgtcctcattgtggatgcgtttatgttccgaattttaatgcaactctccaagccacaaccagcactgaactagatgattcggcaaaactcaacaacgaaggtaggcagacatcaaaaaattgtattgaggtcagatgtttgaattgcaaagtgtgtgaacaatttgattggaaaactgaactagctggacaagccgtcgaaggagaacccaacccaatgaccaatggtataagtgctagaaaaattcctcaggaaacggaaaaactgcagaagtcgaatacgaagaacaaaggcagtagtggtaaggacagatccaaaaagaggaagctgacttcactaacaaatcttttgtcgaagaagaaccaggagaagaaccagaaaaaaaatataagttcatcattatcattagagagttttatgannnnnnnnnnnnnnnnnnnnnnnnnnnnnnnnnnnnnnnnnnnnnnnnnnnnnnnnncgcacacacacaaacccaaacctatatggtggaattaa

SEQ ID NO: 5805 - DNA, 474 bp, Saccharomyces pastorianus
atgtcgtacagcggaataggactcaaatcggcgaaggggtcatcgacgtcgggccacgtgcagcgatcgctggccagcaacacagataggcgcagggcacagggcagtcaacggcagcgcgacaaggcaattaacaagcccacccacagcagggtcaacaagccccttgcagtgcagaaggagatgagcacccacatggagaaacgtgagattgaggttcaggtcagcgagctgcgtgactggctggaggatgacgaatcgctctcggacgagcaaataaacgaacagtgtgagacattgaggaacaagctgactaaggagtggcaggagcaacaacgagtctcttctttgtatacctcccgcaaggcgcggctaaatgaagatcctccagcagcagcaacaacaagaatagcagcattgacgataacgataagcttcgcgcgtggggaaaacaagaggcatttaattatataa

SEQ ID NO: 5806 - DNA, 2334 bp, Saccharomyces pastorianus
atggacattaacccgaatgccccagtgaatcccatacgaaatgatttaccgatgactagtaaaaatgaaacaggttccggcagggtacgtaatagcatccgttctatcatcaatcatcctgaagacagtcccaaagttaatgaagccaatggaacaaatgaagcaagtgaagcaagtgaagcaaatagccctcaaagtattaatggcaacaagaaacctcgaaagaaaagaaaaacctttagttgcgatacctgtaggagagtaaaaacgagatgcgactttgaaccttttatcggaaaatgctataggtgtaacgtcctgcaacttgattgttctttgtctaaaaacaaagataatgaaatcatgaacaccttacgtgaggatggtttattgaagaagattagctctattaattccaatattgcttcgttctctcactcaagcagagacgtttcgaacgaaagccaaagtagtgctggaagaaacgaaatgggcatgatcaataattatgtaatcaatgaaagactttcttcattagaagatcatataaaatctctacaccagaaaatggactcaataattacatcaacaaagttctccaatagcagcgatgctagaaacagaaaagaggacagaagaaactcagaaaatttaaacaatacaaacgttgctaccagcggggaagaaatacaaaaatcagggaaacatagcaaagagagccttttcttgaatgaattcaaactgaaagaatctcctttgaagttattggacgatatcgatgaaaggttgtttccgtctaaggccacatccaaggcagcaatgctagccggacaacaaagaccgtatgcagtggcaagagtgaattttctccacttttatgaggaccatcaggaattatgtcataaactagccaaagagtttttagtcagatcacatttctggattattccaggtggaagaaaagaaatagatgtggaatatgctcattcgcacttatttatcacgagtgtttttaccatcattgccatgagttttgctgacaatgataaatatgcagaggaacaagagatattatatccattggtagagagactcttaacgaacaccttaactatgtttgaaaagttaaccgcatttgacattgaagctatactgtattgctgtatgttccatatatctcgaaaggcgaagaggtataggcaattaaaattcaattctctagtcttaagcaattttgcactcaatagtttgctacatgtgattgatttttatcaaataaaagatagagttttagtaaaggaagaatataactcggaagatctttatcatttaagaattttgaactctttaaccgcatgctatttagaatattcaattagttacggagatattagggaacaagacggcatgttgaaggagtttaataaactcgtagcaaagttccctcaagctaatttcggtgatgatatcaaaatcagtgaaataaatctgggcgatatcgtgaacgggatttttatgaacctcaaagattattttatacaatgcttaagtgagttcgataacggcatgtatggtactggtgaaactgcttttgtttttgttttcgcagaattaaattattggttgaagaactgggaagagctgttaacgaaagatgggggaggcgtattgttgttcacgttcgatttctatcatattatgatatgccgtacttttatctcagaatttccttctaccttaagaagcaacaagaaatttttaaagctgatcctcaacacaatgaaagaacattcgttttcacttttgaaaggattcctaaggctaccacctacattaataagaggggctcctatttttacatgccatcaactggtttacgcatgcttaacactatgtgactatctctattggttcgatatttctcaacgtcaacaactcttaagtctttgtacaaaagtatattggcacttgagtaccataggggagaaaatgaatgaggctactgataatgttggaaaaattatcaaatctataattgatacaagtaaaacccgtgttgatgttggtaattacccattatctccgcaagaaaataatgacattgatacgattttaacggccgctaacaggtccatagaatcaacgagttcacatggagtgaaaccaacaaactcctttacaaacaatggtactttgcacgaaagttcatccaatagtcatttcatgatacctgacgttgatcaatttaattcttttgaagatttttttcaagacttttttgacagtttaaagccgaattcccagaaaatgtttaccaatgataataaggcctaa

SEQ ID NO: 5807 - DNA, 405 bp, Saccharomyces pastorianus
atgtggtcaatgctttgtgccatttggaaatccaaaggcgcaacatcatcggcatcgttatcgttttcttcttcttcttcttcctcttcttcttcctcttcttcaaatgcaacgtgctttgcgttcgtactagatttaggtctgatatctaaagcagcatccacgtcttcgtcttccaaaggcggtagattattaatgccttgcttattgccaccgacccaggtgccagacgcaccttctatttccgcaaataatggagtatcggtttcgtctttagctctcttgtttatgtttttcagaagattggcaatcaatttaggatccaacgaatcatacaggtcctggcgttcgttcattatttgctcatcggtcatctcctgcaagactttgatattttcttcatga

SEQ ID NO: 5808 - DNA, 1233 bp, Saccharomyces pastorianus
atggaaaacctactacccccacctcctccacaatcgaaagagttttccactcccccaagaaatagacatcgacacaagagatcctttgctatatctggagattttgaatttttgaaacagctgactcctgctcctgctttatcttctgcatacgactcacccacttttgaagatttgtcgacaataacaaatagcacaaagctgacggtacctaacgagtcggcattgatatgttctccgagcccaaggttttttattaatggagaatctacatatacatcaccaattaaaggagtgccggacgctatcattaatttagatgatgtatttaccgatgatccaaaaatgttcaaatcgcaccgaaagacgaaatctgttccggtaaaattagacgatttctattctttccataaaggtagttccgtaccagaattaactataaatgaagaaatggatgaagatgaaattaattctcaactattgggacccataaaaccatcttcaacctccttgtctacatgcatggataaaaataagacgaggccactggaaaatgctaaaagttacaattcattaaaaattcaagcacaaaagcagagatactattattctacaagatatttgcccttaagcagcgatgaaagacccacagattcgcaaactttaacgaagcagagttctattacttccttattttcttccagatccattactcctgtatcctgtaatatcaatactgcaggcagaattaatgcaatcaacggcaatcaccttgatgatgttctttatgatctagatacccctgcatcaaagttaatccagggtgttgataatctacaaataacttctactgaaaggattagatcgaccccgcaatcgtcttcaatgaaaaattgttttcctgaagatggaaaatacatcaatggctttaactttcaatctcagaattacgatatagcatctctcactgaagatttcgacccaataacatcattgtcttcctctattcttgattctgaaagacaaagcgtcgatgaagaagaaagcatcccagaagaaatcctactcggagaacccctgcatgtatacaatgaaatttctaaatccggcgaagaagtcatttttccgacaaaacaagaatctgtgtccactgacaggaacaggagctcggccagccgtatgaaaaatatccttgaagaccggagattcaattttggccaatgtttcgttaga

SEQ ID NO: 5809 - DNA, 1443 bp, Saccharomyces pastorianus
atgtcttcttctcctgttgttgttatcggtaccggtttggccggattggccactgccaacgaattggttaataaatataacattcctgtgactatcctcgaaaaggcatcttccattggtggtaactccatcaaggcctccagtggtatcaatggtgcctctactgagacccaacgccacttccacattgaggactcgccacgtttgttcgaggatgacaccgtcaagtctgctaagggtaaaggtgtccaagcattaatgggcaagctggctaccgactctcccttagccattgagtggctgaaaaatgaattcgacttgaagttggatctattgtcccaactgggtggtcattccgtggcaagaacccacagatcatcaggaaatttgcctccaggtttcgaaatagtttctgctttgtccaacaatcttaaaaaattggccgaaactaagcctgaattagtcaagattcatctagatagtaaagtcgtcgacatccaagaaaaggacaactccgtttccgctatagtttacgaaaacaaagatggtgaagagcacttaataaccgcttccaacgttgttttctgttctggaggatttgggttttccaaggaaatgcttaagcaatatgcgcctgatttggtggacctgccaacaacaaatggccaacaaactaccggggacggtcaaaggctcttacagaaactcggtgctgacatgattgatatgaaccaaattcaagttcaccccaccgggttcattgatccaagtgatcgtaactccagctggaaatttttagctgcggaagccctcagaggtctcggtggtattctattaaaccctgccaccgggaaaagatttgttaacgaattgaacacaagagacgtcgtcactgaagctgttcaaaagcaatgtccccaggacgataatagggcccttttagtcatgggtgaaaatatgtacaaggatttgaaagataatctggacttttacatgttcaaaaagcttgtacagaaattgacactatcccaggtggtttctgaatacaaacttccaattactgccgcacaactgtcccaagaattacaagcatactcttctttcgccactaaggctgatccattcggacgtaccgtgattctcaatgaatttggtaccgacgtgaccccagaaaccacggttttcattggtgaagtgacaccagtggtccatttcaccatgggtggtgctaagatcgacgtcaaggctcaagtcattggtaagaacgacgaaccgctactgaagggtctatacgccgctggtgaagtttctggtggtgtccacggtgccaatagactaggtggttcaagtttgttggaatgtgtggtctttggtagaatcgctgcagaatccattgctaatgacgacctgcaggcatgcaagcttgcactgccgtctttacaa

SEQ ID NO: 5810 - DNA, 222 bp, Saccharomyces pastorianus
atgatgcacgtttgttccttgttggtaagcttggaagttgtgaagtcgttgacacagtccgtgaaacacctttctactaagttggagtataaacgcatgaaatccttcatttgcttttgttccaccactttctggaactcttgttgttctttagaattcaatgcgtccatctctgcggtcctgtcttgttctttttttggtcttagttgtttgaatgtctag

SEQ ID NO: 5811 - DNA, 126 bp, Saccharomyces pastorianus
atgacaagcaactctaccattatcaattataggaaagggttcattttttctttccattcattcttctttttttcctttcgttttgagtcctccttaagggcatgttacccgggcaaggaagaataa

SEQ ID NO: 5812 - DNA, 1572 bp, Saccharomyces pastorianus
atgctaaaacaaatggcagagacacaaatgagctatgaagttggagacaggcttaaaataggtggttactgttgtacagtcaaatttatcggtgccattaagtcatggccttcagtcaaagcttacggtgtggagtgggacgatcctaaccgtgggagaaattctggtacagtagatggtatacactattttgatgttaactatcccaattcaggatcatttctgaaggaatcgaagattaagactctaggcgtacgaagaatcaacttcttcgaagcgttgttggaaaagtacggatcatcaagtagtgacattcgaagtttatccattggtagtaagaaaattgagagtttgggattcgagaagttggatgcaaagaataaaaatctaaagaagttgagaaaaataacgttgcgagactcagatattgcaacactctttcaaaatcagaatgaattagatattatagtacgagagtgcacgagcgtcaacgatttagatctgtcgctaaatttgtttaccaatgtaggttctttatgcaagtttttggagcccttaaaaagcttgcggacccttgacatatctcaaaacaaacttttaagtggttggggtgatttggggagatatgatctatcgcatattacaaaattacgtttgtcgtcctgtgatttaagttgggagcagataggtaaactactcaaaaattttaatgtgttgaaaatgttggatttgagctgtaacaagctaacctacgtgggaatccaaaatttgatgactgtagtaacaccctctctggaagagttaaatataaccggaaataatctcgaatcgttcccagagcatttagcacatatggctttaaaagatttaaatatttccaataacaacatctctaaggcattacctattgttgttcaatccattgaaaccttagatttatccgagaaccattttaaagtgcgaagtagaatagatgatctgaatatcgcatttccttcattaaaaaatattcgtttgaatggtaatgacttgaagtctgacgaaagcagcgctgacatcgaagaccaggcaactttctatgaggtattggcaagatttgaccatgtcatggtgctaaatggatcaatatgtgacagaaaaacaagaagagaagccgagatgtatttcatctccaaggttttaaacagtgaattggactatgatattagtctgccacgttggaaaagactaattgagtcgtatggcattggcacaaatactttaagcttgaataaaattaaggagagacggaaatctcttgtgttgaaaataaaagttacgtcagttgagggatcagatagcgatttagaactttcaattcttcccagcttcacagtaaggtatgtgaagagcataatctgccggaaactgaaactagatatattaagggtcaacctgactcatgaaaactgtaaagggatgctaaacgaaattacccataacttttgtccagtttcagattttagtgtagtagaaggagatattattcatgttcacgttgccagtaaatgccaagaatcaaaaaaacattaa

SEQ ID NO: 5813 - DNA, 1215 bp, Saccharomyces pastorianus
atgaactccatgcaaggcagcttccccacggataacgaccgaagaccctttaagtgcgagatgtgctccagagggtttcatagactagaacataagaagagacacgtgagaacacatacaggcgagaaaccgcacaaatgctccttccgaggctgtccgaaaagctttagtcgaagcgatgaactgaagagacatttgaagacgcatgcaaggactactcaaaggctgccacgcaagcggaaatctaaaagccttcaaagggttgctgcggacactacggtctccgcttctacgactttcaatgacaccagtggaactttggacactagcataggccgctctgaaatttcgcctattattgtttcggttgctcagaactccagtaatttggatagacgaacgttcaataatggttacggtgttgtgaaaacgcaaacaccagggactctgattccagtagtaggcattcaaacaagttctcatctggttccagcggggcatctgattccgaacaaccactccagcacgtctgtgacctctattatgtctatgtacccttcgacttcttcacttcaatacctaaacaatggggattctaacagctgtgcatccataccgtatatggagttatctagcagctctttggcgttaagtgaggtatcttcagagtcctcagtgttttcgaaatctcggacaacctcgactgccctgagtagtctcgattcgttagccaattctagaaatcaatcgagtaccttgctgctttcgcaaacctcgctgccaccgaagcaactcgctagaccattatcaacaacattgagccctctacaaaaagtaataccggccattagtgcagaggaaactgaaatcgtaagacccatatccacttcaagcagttcaacttccttcacctcttctgtatacgacgacacaacggccaagcatatgggcatgggtctgtttatagacaactcacagacagcacacgacgcttacaggagtggtcacatgcacacagcaagaacggtctccagaggaaggctacatgcgagagcggaatttcacatatccggagatgaagaggacaatagagtctccaattctgaatcaagagaaccagctacaatccctaaaatatcgttgccacccatagggtgcatgttgcagcaaatcgacatcttcaacaatgatgcccctactatcgctaaatactaa

SEQ ID NO: 5814 - DNA, 1035 bp, Saccharomyces pastorianus
atgttggaagaaggaaataatgtttacgaaatccaggacttggaaaagagttctcctataataggctcgagcgtggagaacgagaagaaggttgccagctcagaaacctttaccgcaacttctgaagatgaccaacaatacattgttgaatcatcagaagctactcagctgtcacgtttccaaaggttctttgccagcctaaatgctgagacaaagggtgtcgaaccagtcacagaagacgagaaaactgacgactctatattgaatgctgcatccatgtggttttcagccaatatggtcattgcagcatatgctctaggtgccctaggtccaatggtatttgggttgaatttcggtcaaagtactttggttatcattttcttcaatattataggtttagtgtctgttgcattcttttctgtttttggtgccgaattgggtttaagacagatgattctttccagatatttggtcggtaatgttacggcaaggattttctccttcattaatgttattgcttgtgttggttggggtattgtgaacacatctgtttccgctcaactgttaaacatggtgaatgaaggctctggtcatgtctgtcctctttgggccggttgtttgatcatcattggtggtactgtgcttgtgacattcttcggttacagtgtcatccatgcttacgaaaaatggtcatgggtgcccaatttcgccgtctttttggtcattattgctcaacttgccaaatcaggaaagttcatgggtggtgaatgggtaggtggttctactactgcgggtggtgttctatcttttggttcatctatttatggttttgctgcaggttggaccacatacgccgctgattacactgtatacatgccaaagaaaacaaacaaatacaagattttcttttccttagttgctggcctagcgttccctctatttttcactatgatacttggtgctgcctccggtatggcggcccttaatgacccaacttggaaggcatactatgataaaacgccatgggtggtgtga

SEQ ID NO: 5815 - DNA, 150 bp, Saccharomyces pastorianus
atgacagcaaactgttgttgcgaaacagaagtgaagttttttaaatattgctcaacttctctctttgtactgatattgttcagtagttggataacagtggacctagtagccgaagagtcgtcagtagatgaaatgcatctctttgagtag

SEQ ID NO: 5816 - DNA, 2700 bp, Saccharomyces pastorianus
atgagggacagtctgccttgcataaacgtccttcccaccgaccgcacttcaatagtttccgatactagtactctgataggatcagactcaaatgcattcccgaaacaacctccccataacagtcaccacaacagtatgaacagtaacatatatcatagccccaaggccagcagccctttggtgagctataagatgtcatctcctgtgcttttgaagagggcgactgcacccgtactcccaagttttaagcccaaagagcagcgatatagtaaaccacaaggttgctcgctaataactgctgtggaactgggcaagcttatcgacactttaccgcgagaagaagtgcttttactggacgtgagaccgtttaccgaacacgccaaatccatcattatagactccattcatgtttgtctaccttctacgcttttaagaagaaagaattttaccttttccaaactcctggaaaatttgactcccagtgagcaaactatgttgagaggcaaactctctgtagacaaccttcgcattatcatttatgataacactgcaaaccaaacagaaagctctgtctctttgccttgctttggcattgcttccaagctagtagaattcgacactgaagccaaaaaaacagtatccgtactgatgtgtggcttttctcaatttaaaattatatttccagaccatatcaaaacaagtgtcaataacgcagattgcattgcttccttcgaacctaaaagtcccaagatcaacccttacagtaaagtacacagcacagttccgcacataacggcaactactccgttgtcgtccccgcaaatgaaccttaggttaaacgtccctgatgataatagatcggaccactcaagcctttccaactctcccaccccacgtaatattctcgcagactcccccatatcttcatcttctcccatatccgccctattcaaattccaactaccggcgcctcaaacaaatatcaatcagatattcaaattctcgcaaaacgaagaaataatggacctggaaacatacttgagtgcagttaacatcaaagaagaacatgaaagatggtgcagtaatgattccgcaaagaattccttacaaaattttcaatttccaaagaaacaagcttcccgtaccatggacactaataaagacaaactaggcttccagatcaaatatgaaaaaatgcgcaaaatctatagacaagaagatattgattctataatacctgaatggttccaacacctgatgacaatctctaaaattgaacttgtctcccaatttcagaaattggatttcttagagaaaagacgtctgaaccattctttatcctttaaaaaacaggataacacgtttgtaattgatgaggcttcaacatacctcgagaaatcgacctccacgtcctcttctattatcatgcctccaaaattccctgacgtgggcaaagtacaaaaaagatcacactctcaaccaatattcactcaatacagtaaatataaatctatgttaagtcttgaatcagactcggactcggactcagatgacgttataatttcatcaggcgtcgaactgggcgccaagaacaggtacaaggacattttcccctatgagcattcaagggtaatcctaaggaaaggttcgcaatcatcaataaacactaaacgctcgcattccacacccgatggtggtatcctggacaattacatcaacgcgaattatttatctctgccaagattatccattgagcaaaatttgacattcccaacagcaactgccacagcaagaagagtccgttatattgcctcacaggcgccgatgccttctaccgtacacgatttttatacatgcatactgaacaatggtgtcccattggttctttccttaacaaacgatttcgaaaatggtattgaaaagtgttatcgttactggcaagaaggtaattataacgggatccaggtcaaattactagaaaaaaaaatattaagaatgcccaatagtaacaatacaagggcaaaaacgaagattatgaaagatagcgatttcttttcagccaacaccaaaggtgatgatgatggcgatgacgatgatgactcaatatttatcagaaagatccaattaatttatcatgatcaagaaaaaccctatgaggtgttacagattcaagtgaaaaattggcccgacttaggcactttgctcaatccaacctcgatcgtgcaagcaatcaacataaagaaccacataataggtgcattatttgcaggaaaattttatcaagacgatcaacttcctacgatattggtacattgttccgcaggttgtggaagaaccggcactttatgtacagtggattccatcctctcgaatttcgaaatgtttgaagctttacaaaaggagttcattaaattaaaatatccagcaaaattgtttgatccaatttcttggataatcaatatttttagaaagcaaagaatatccatggtccaaaacatcaatcagttcattttcatttatgactgtttgttattttattttagattacgtcttaatgatataacagatacaaaggtcgatgataaaaattgcaatgacaatatatcattgacctcgctaaatgacgaaatcaaagatttgaagattttggagacgtttattaacgataaactgaacgacctccacaataagaaagcttga

SEQ ID NO: 5817 - DNA, 291 bp, Saccharomyces pastorianus
atggaaaacttagtaaatcttttctccttctgttgtttgtcattcttcagccaggaaccccaagtgtacttaaagaaagcatccctctttggatcgttatcgtctgttagttttgtaaacacttcatttggtttaccggaaatgaatcttttagtggtaatgggggtattagtgatacatttgatcgtacctactcttttggaaatccttgctacacacctactggaggagccaataacggttgatctaatcatgattggcctttgtcacgttgtcttactggatgtttga

SEQ ID NO: 5818 - DNA, 1233 bp, Saccharomyces pastorianus
atgtcaaacatcgatattaacaatctacaaaactcattccaacaagctatgactatgagtggctctgcaggcgccgtttgtacctcaccaactcaatcttttatgaacacagtcccacagcgtttaaatgccgtgaagcaaccaaaaatcttgaaacccttctcaactggtgacatgaaaatcttattattagaaaacgtcaaccaaaccgcaattgcaatctttgaggaacaaggataccaggtcgagttctataaatcttcattgcctgaagaagaattaattgaaaagattaaagatgttcatgccattggtatcagatcaaagaccagattaagttcaaatgtactacaacacgccaagaatttggtttgtattggttgtttctgtatcggtaccaatcaagtcgatttagactacgctactggtaaaggtatcgcggtcttcaattctcctttctccaattcaagatccgtagctgaattagtcatcggtgaaatcattagtttggccagacaattaggtgatagatccattgagttgcatacaggcacatggaataaagttgctgctagatgttgggaagtgagaggtaagactcttggtatcattgggtatggtcacattggttcccaattatctgttcttgcagagtctatgggtttgcatgttctatattacgatgttgtcacaatcatggctttgggtactgctagacaggtttccaccttggatgaattattgaacaagtctgatttcgtatctttacacgtacctgccacttcagagaccacaaaaatgttatctgctccacaatttgccgccatgaaggatggctcttatgtcattaatgcttcaagaggtacagttgtggatattccatctttgattcaagccatgaaggccaacaaaattgcaggtgccgctttggatgtttacccacacgaaccagctaagaatggtgaaggttcattcaacgatgacttaaatagctggacttcagaattagtttcgttgccaaacattattctgacacctcacattggtggttctacagaagaagcccaaagctcaattggtattgaagtggctacctcattggctaaatacatcaacgaaggtaattctgtcggttcagttaatttcccagaagtggcattgaaatctttgtcttatgaccaagagaacactgtgcgtgttctgtatattcaccaaaatgtaccaggtgtttag

SEQ ID NO: 5819 - DNA, 231 bp, Saccharomyces pastorianus
atgcatctgtatttcctttgccttgaggtcaatcaactcgtatttggaacactcaatgtagtggtcaactctacagataacttggtcctcttctccctttatatagggggacggttcggtctttggctccagtccaaaccacctctctattcttctgtgtatgaacctcaagacattggtctcctgcaacagctgcaaatgaaatcgactgattctgtactgaaatgctaa

SEQ ID NO: 5820 - DNA, 258 bp, Saccharomyces pastorianus
atgtcattagctatgtccttttcgttagccattgcagtgcccgctcctattgtggaggtcgtgtttgctcgattgaaaaaagacattattccctacctctctttgttctgttgcctgtacttaaattttatatgcagattaaggtgtatgatctttgattttagatatatgcgtgatgatacttactgcagttcagactcacccagttgtacaatctcgtcgaagtgcaatttttttcagcgcttgatactaatctaa

SEQ ID NO: 5821 - DNA, 1404 bp, Saccharomyces pastorianus
atgagagtaagaccaaaaaggtgggtcatgatgcttatggccgtaacagtcgtgatactcatcttccgaaatcagttctattcatcccgaacgcgacagcagaatcaagagcccttgtctgcccaaaacaatccttattatgacgggtggataacaccgaatctgtataaaaagggcgatcccttggaactaattgtaaataaggtggaatccgacttgacccaattaccatacgcgtactatgacttgccgtttacttgtcctccaactatgcataagaaaccacttcacttatccctaaatgagataataagaggagataggaaatgggaaagcgattatattctcgcatttggcgaagacaacgcttgccaaaccctatgcgcccgaaaaactaccaaagagggtatgcagtcattagataagctggtcagagagggttacgtcgtacaatggctgattgatgacacgctaccagcagccactacgttcatctccactacggatcataaaaaatactatgcgtccgggtttccattaggtttcgtggatcccgatactggcaaaacgtatttgcataaccacgtaatgctagtgattcgtttccatgctggcaataatgatcaaaataccattgtagggtttgaagtatatccaaggtccgtatctgattattactgtcctggggcctcgaaaaattacgaacagtacgaaattgtggtccctgaagacgaaaatgaacttacttttctaccatttacttattctgtatattggagggaagaattcgaagttgattggaatcacaggtgggactattttttgaattcaggcgagttgtccaacgagaagagtgttcaattccattggatgagttttgccaactcaatggggattgtattgtccatttcatttattaccattgttatttacatccaagtcatgcatagggataagaaaaacacggattccaccaaatatctgataaacatagaaggtattgaagtcgataacttggaagacgacaaatatggcaagaactctatttatatggtgaccaaggattggatacaaaacggtaagccgaatctgtctggtttaaaagtattaatcgtactagtctcgtttggtgtacaatttctgtttactgtaataggatcattgacaatatcttgttcaatgaacaaactacataacgttaggaatagcgtgattactatggctatattgtgttttgtccttggcgcattcatggcgtctttcgtcggaacaagattgagcatagtaacaaaaagaagaagcattgatgtcaactatcttgatgatagcaaaaacttcaaaaattgtaataagtttagccccgtttttgccataatttgcgggtccagtttaccaggattgtga

SEQ ID NO: 5822 - DNA, 222 bp, Saccharomyces pastorianus
atgtcggtgtcatccaagataagaccccctcctcgcaaggacacacgtatggccactgaccattccttcaatatgaagaacttctatgctgatccgttcgctatatcttcaatatcgttggccctcgtctcatgggtcatcgccattgcgggttccatctcttctgcatccactaaagagtccttcccacgtatcacttggtgggggatagtctatagtttc

SEQ ID NO: 5823 - DNA, 180 bp, Saccharomyces pastorianus
atgggtatcagagcgtatctccgatcgtctctttccagaacttcgatgccgttccgcagcactgtgtcaagaccattggcgtccatcacgctggtgccggcgctgtcattcagacttaacagtagattaatgaccttttccaattcttttaacttgtgcttatactccacctgtaactga

SEQ ID NO: 5824 - DNA, 276 bp, Saccharomyces pastorianus
atggcgatgttgttgccgctcaaaagcattctgccgtggtgttgcatgaccttcttgttcttggtctcgtcctccgggtcgatgagccactcaacagcgtcctccagtatgacgttgacgaagtcgtcgaagccgaccagcgtgccctcaaattcgcggttcgactgcagcacgatcagcactctctggttgattgttttgtctatgacctccaagggcaaaatctccggtagactcattgtgtgcttctgtgtgtgtgtggtttgccctgcatga

SEQ ID NO: 5825 - DNA, 2265 bp, Saccharomyces pastorianus
  modified_base (1895)..(1964): a, c, g, t, unknown, or other
atggaaaattctggtcatagacttagtatatcacaggtatatcaactagctcacgaataccgagaccatgcatactctgttgcaagcaagatcagttccgaagaggagctgaagcagtattacaccctgataaatatgtctatccggatgtttcaaatgctgaagggaaaatgcacgctctccgtcgtggaggatagcaagatcacgtttgagatggtggagttactaatacatgagacgcataacttcgatttagccgagttgtacatttcaagtttgaaggaacggttgcaaacgcaccagaacagcatgtgtgtggtggaagaggtcatgcattgcgagtttttattagtacacgatctaccattgatgagagatacgaagttccattacaagattgcgctaagaaactgtaatgagttagtgcagtacatgacgagtttaaaggacgaagtctaccaaaattgggcactagtattccagtatgttggggtggcactttgtatcaaactgaaacagcaccgtagggtgaaaacgagtttcgctgggttgctctcgcaatgcggggataagtcacaatggaagtggttcctgaacttgtgctacgtgaactacttactgaacgagagattccccatccctgaagctgcaattgaagagttgagaagcacggagttggacacggtgggacccaggctatatgcatggaagttggcgttgaacatggtgatccaagtttacaaagacgggaacattacagagcatctaaacgagttcaagagatttttcgatgtgaacaagcagtcgttggtcaatgatgaagacaaagggtgcatgatcagtattgcacctggggtgacgttgaaagtggacctgccaataattttccactacaaggaactgaaaaatattctgttgttactgcaaagcgtaagctacatcgtgaactgctacgacgggaaggggaacttctcgaggaagtttctgcccaaagtgcattccacgacgcagaagctgatgaagactatcgggacaggcggcgtgtcgatgaacgagctggactcacgggtccaaacgtacaagagcattcttgatttctgcgacttttacaaagtgtgggaggaaatactgctgaatggcgccgtggttgaggcggcggcggcgtcgtcgtcgtcgtcgtcgtcgtcaaatctgggaccctctccggcatacacaaagttactgcaagcgatgaaggtccaatttcaaggcggggggggtgtggaggagtacacgcgcctggcgcagtctggtggcacgtcgagcgaagtaaagatgatatcgctgctaaattgctacaccgtgcaagcggcgaaggtgagccggtgtccgggagacaagcaggcccagctcgtggagcagtgcaacaaggtgtggcagcaggtggagaggctgctgcgggagacggacctgcagttcaacccgatatgggagtgcacggtgatgattctgtggctgttcagccacttcgagcccttcagttggaacccgctgccgtgcagcgacaaggagcgggccgagtacatgtcgaagcttcgcgagttctactcgagcaacaagtttgccagtggcggtggtgccgtggacgagcggttcaagctcaagaaggcgttgctgctgcaggtgctggtgaactacctgggcgggcggatgctcgaacacgacctggaggagatccgcgggatctccggcaagtgctttgacatgtgccggcaccagggcgggatggacaaagtgcagtacgtagtcgggatatggcatctcatgaactgcacggtgggcatgcggggcaaagacgttgccctcacgaacgcgaagctggaggcgctggtgaagcaaatcaccagtggcgagcnnnnnnnnnnnnnnnnnnnnnnnnnnnnnnnnnnnnnnnnnnnnnnnnnnnnnnnnnnnnnnnnnnnnnntacaatttcgccttgttttacttttctacaacgcctgggcaggggactttttgccgcctggcacaagaatggcgatgttgttgccgctcaaaagcattctgccgtggtgttgcatgaccttcttgttcttggtctcgtcctccgggtcgatgagccactcaacagcgtcctccagtatgacgttgacgaagtcgtcgaagccgaccagcgtgccctcaaattcgcggttcgactgcagcacgatcagcactctctggttgattgttttgtctatgacctccaagggcaaaatctccggtag

SEQ ID NO: 5826 - DNA, 1386 bp, Saccharomyces pastorianus
atggctaacaaagagatcaattttttcaagggacacccaagctcgaggctgctgcctcgagatgaggtagttcgggcgaccgcggccgtgctgggtccggagacccgagagtacgataacgacccctataataggcatccgctgacgtacgggtcggacgaaggtgctctgtgggtgcgggagcagatctgcgggttcttgaatgaccaggtgttcaagtttgagggcggggcccccgccaggacgcagccagactacttgaatctggataacggcgcctcgtacggcatgctgaacattcttttacagacgacgttgccgcacaacgggtataccaggcaggcgttcatcatcaccccgacgtacttcttgatcaacgactgcttcacggatgccgggttcaacggcaagctgaccgcgatcaacgagaagggccacgactcgatcgatttcgagtcgttgctggccgcgctggaccaccacgaggcggctgccgaggccagtggcggctcgaccgcgatcatccagggctcgaagctcaccaagaagatctacaagtacgtcatgtactgcattccaacgtttgcgaacccgacgggcaacacgtactcgtccgaaaccagacgcagactcatcgacattgcccggaagtacgacatgctggtcatcaccgatgatgtgtacgacatcctggactacaccacgcccgccgaccaactgccctcgccacctctgagaatggtgcatctcgacagggtcaccgcggctccgggcgaggactcgttcggtaacacggtctccaacgcgacgttttccaagctgattgcgcccgggctcaggttcggctaccacgagtcgatcaacgcgaaccttgccagacagttgtctaagggtggcgccaacgtctccggcggtacgccctcacagttgaactcgatgatcgtgggcgagctgctgcgtagcggtgccgcccagagatgcatcgcgtacttgagatctgtctattccgagagagccgcagtgctgaccgcggcgctcgagaagtacatgccgccgggcacggagatccctcccttgaacggcggctacttcagctggatcaccttgccaccggcctacgatgccaaggaaatcgccggtgttctggcgcagaagcacaacgttatcctggccagcggctcgaacttcgaggtcgtcggcgacgagaagaactggggccagtcctcgttcaggctgtctatcagcttcctcgagccggaccagatcgaaaagggcatcgagttgttcggcgttgtttgcaaagatcatgccgtggccaataatatactatgtaaaaaaggaatatatgtatatatctacacacacgcagtgccgggcagagggtaa

SEQ ID NO: 5827 - DNA, 543 bp, Saccharomyces pastorianus
atgcctattataggggtcgttatcgtactctcgggtctccggacccagcacggccgcggtcgcccgaactacctcatctcgaggcagcagcctcgagcttgggtgtcccttgaaaaaattgatctctttgttagccatttacgtttgctacttcttctacctgttactgtactctttctttctttctttctccttctactcaagtatcaatctcgaatcctcttctctttatcaccacctcggcatccgtcagcggcagcccgcgataacactgccgaaactccgctagaacgcgtcgcgcctgcgctgggccgggcacatgccacaggaccgcgctcaacagtagcggcagcgaccattcgttcttcacgaccagcggttgccgcccaaacagcgccagcgcggctgcctgctcctgcggctgctgtagctgggcggctacgcccaccgccctggccaactgcgggaagtcccgcagccgcagtggcggctgccccggcagcgtgtccatctcctgcaagaacaccttccacttctcgctaa

SEQ ID NO: 5828 - DNA, 444 bp, Saccharomyces pastorianus
atgcaccattctcagaggtggcgagggcagttggtcggcgggcgtggtgtagtccaggatgtcgtacacatcatcggtgatgaccagcatgtcgtacttccgggcaatgtcgatgagtctgcgtctggtttcggacgagtacgtgttgcccgtcgggttcgcaaacgttggaatgcagtacatgacgtacttgtagatcttcttggtgagcttcgagccctggatgatcgcggtcgagccgccactggcctcggcagccgcctcgtggtggtccagcgcggccagcaacgactcgaaatcgatcgagtcgtggcccttctcgttgatcgcggtcagcttgccgttgaacccggcatccgtgaagcagtcgttgatcaagaagtacgtcggggtgatgatgaacgcctgcctggtatacccgttgtgcggcaacgtcgtctgtaa

SEQ ID NO: 5829 - DNA, 201 bp, Saccharomyces pastorianus
atggttgtcgtattctgtatcatcgttaaaagtgaattcttcagcctcttcgcgtttacttttgggtggttcgtcattaaaactaactcgtggccgactgtattcattagctggtacgccatcattgacatggggaggcccgatatgtgtatcttcgttgctactattctcttcaaactgaaacgtatcttcgaacggtga

SEQ ID NO: 5830 - DNA, 759 bp, Saccharomyces pastorianus
atgcaaaaaaaaaaaagacctatcgacaaaggtggaagaagagcaaggatgttcaagaaaactatattagggcagttgagaaggtatacaaatggtgttgtattcaaaacggccttaaaacctaaaagaaaatggattccatggaccattttcggcggaagtttccttgggggatggtacttaacgcaacatatgacattcatggatcttctcgcttattggaaatatgatgctctgccaaaaaatgcagatgaagtggtcaagtatcatgcaaatttgaatcaacgtttgaatggtttatctattgtgaaacaattagaggaagccgggtttgtacaagtgattgcccctgaagagaaaaacttgttagtgtcaaaggcattgaatacaccaggcgggattgccataccaccaagaatttattatagtccaagtagacgtgaaactatcgggatataccatttaggtatgaagctaacaggttatccctttttaattcatggtggaatcctagcaacagtaattgaagacttaatgaaagaagccattagactggaaaaggggacagaaaatataaatcaagaaacgaaggatctgagcgtttcatacaagttcctcacattagccaatcagtttgttgtggtaagaacaacagatctcgagaaatatggaaacaagactaaactaaaggcagaattgatggaccaaagtggcaacagaacgttagtcaaagcgattgctacattttctagtcaatag

SEQ ID NO: 5831 - DNA, 2571 bp, Saccharomyces pastorianus
atgtcgtcctcatccagttcctctgagtcatcgtctaatctatcgaggccaaactcattgaacaactctatggtttccatgaaaactgaagaccacacaggattatatgaccacaggcaacaccccgatttgttaccagttcgttaccaagcccccggattgaagcgacaggaaatagctaagctcgctgctcccagaaagcagaagaaggcagcgaaacatgaagatcataaggaggttgagattacacctgatagagatcgaatgaatcctgaagatgcagaccctgaactgaatgaaacagctgctcatcatcagctgagagcctctgcgatttcgacctcaacttctaacgtgaggtcatctagattagcatattccatgccgcgccaagtccagctttacgaggcgagtagtaataaccgttcgtccaacgatataagtataaaacgtaattataatacgccattatctaccacttattcaagcaacaaacccaagttaagttcatcttcttccataggtactgtaataaaagttcataaagcctcagtacttcttgaaaatccgctggaaatgaaaattgacattcattgcaagcaggcaaagcccaagaagagaacatcccccagaacatctacgcattcatccattgaccccatggctgtacttgcaaaaagcgcatcgcaacaatcaggagatgatccacaggaaagaaaaccagtacacacaaacactagagcctcttttgatagcgatgtttcccagccctcgagagaatcacaagagacggaggaagatgtttgtttcccgatgcatccgcaactgcacacgagagttaatggtatagatttcgatgaaatagaagaatacgcccagttcgcgactgcagaaaagaaacagtacctggccagccttcaagggtccaatgaacaaatggttggtaatatgtctcatgatattggatttacaagctctacttccacttcaaggtcctcggcagccctcaaatacacacctagaatttcgcagactggtggatatagtaatagtaccaatgaagcagacatttgtaagaagaaggaagacgaggatgaagatgacaaatctggaccacgtcctggcgtatcatttggtaaaaacaaagttgaagaagaagacgacaaaattccatcccataatccagcatatttgtcatacgagaatacagattttcaaattcccaacaggttttcatttttctgttcagaatctgatgaaaccgtgcatgctagtgatattccgtccctggtgtgtgagggtcagtcattctatgaattgttcagagggggggaaccaacttggtggttagattgcagttgcccaaccgatgacgaaatgcgttgcatagcaaaggcttttggaattcatccattgacggcagaagatattagaatgcaagaaactcgtgaaaaagtggagctttttaagtcgtattattttgtttgtttccatacatttgaaaacgacaaagaatcggaagatttcttagagcccattaacgtttacattgtcgtttgtagatctggtgttttgaccttccattttggtccaatttcacattgtgctaatgttagaagacgtgtaagacaactacgagattacgtcaacgtcaattcggattggttatgttatgccttgatcgatgatatcacagatagttttgctccggtcattcaatccatcgaatatgaagcagactctattgaagattctgtattcatggctggtgacatggacttttcggccatgctgcaaagaattggtgaaagtagacgcaagacaatgacgctaatgagacttttaagtggtaaggccgatgtcatcaaaatgtttgccaaaagatgtcatgatgaagccaacggtattgggccagcgctaacatcacaaatcaacattgcgaatttacaagcaagacaagataatgctaatcacactaataataacagctatgcaactttaccaaacaactatgtgctcacaacttcacaaccaagaggggatattgcattgtatttaggggatatccaagatcatttgctcacgatgtttcaaaatttgttggcatatgaaaagattttctctagatcacatgcaaagtatttggctcagttgcaagtagaatcatttaattcgaataacaaagttacggaaatgctaggaaaagtcacgatgttaggtgtaatgctagttcctttgaacgttatcaccggtctgtttggtatgaacgttccggtgccaggaggaaaaagtacaactgtttcgtggtggttcggtatattgggtttcttgattttactgggcattgcaggttggctcttagcgaactcttggattaaaagcatagatcctccatccacactaaacgaagctgcggaaagcggtgccaaatcggtcatatccagttttttgccaagaagaaataaaccatttaacgatcgttctaaaaacgtcaatgtaagagctggtccttcaaacaggtcaattgcaagtcttccagtaagtatagccgctatgattgagtaccaatga

SEQ ID NO: 5832 - DNA, 1854 bp, Saccharomyces pastorianus
atgtctggtgaagaggtagagaaatttgctaacgtcgaggaaatagactcttctccaaaagaagaaattggagctacatttatagtacctaagttacttatcaaagagcatgaacgggttatactcaaacagattctacagattctaaaccaagatgaattactacaggctccagtagacagattcccttacaggagacttgagttaccaaagtacacagatcagtcgaagaccagagacgcaacaaacacttcttatataatggaacaaagggatgtatatggtgagaaaaagataggattgaatggtgaactgtttggtggcagacactatttgttcaatatgtttacctttgcagctagtggaaacattcttctcacgcttttaaaagacgttattaaagtactgtaccaggatgatttgaaatatgacgaacatgagtttatcgatcagcatagtcaaattttggtaaaagaaactacagaagatcaaacgaattttttaatcacgcacggaattctccccaaagggtctgttggcccttttaagtatataactgccaaatcagcgtttgtcgaatttggtgcctctgttatcgttggtggccagcgtatcgttgatgattattgggaaacgttagccaaaaagcaaaacttatcatcacaccaaagagtattcaaattaacaacaaagttaatctcaaaaatatcacttctacgcccctcgtttcaaaataatgaaaaggataacgttaaaaaaatcggtgagaattctgacacaagcggaagtacaatttcaaactataaatttgaatcaccatacccaatcgtcacagaacaaccgtcagcagagatcagagaagcgtacattgaaaactttgccaaaggtgagcacatttccgcaattgttcctgggcaaagtatcagtggaacactagaactaagtgcccaatttagagtaccgcgttatcatagtaaaaactcatttcaacaatccttgcaaatgaaagcaatggatatacccattgggaaacatgaagaactactagaacaatatgaaactcaaacgcctgatggatccacatcaacttctctgcccaacaatatcccgtctgttaatcctagtaataaacccatcaagcgaatgctgagtagtattcttgatattaacgtgtcatcatcaaagaacaagaaatctgaagaaaacgaaatgataaaacccataaacaaaggtttacttaaaaataatacgtcgctaaatataaatggctggaaatttgaatcgctgcccttaaaatccacggaacactcaggaaaccagcagtattatagaggattgccattatacgaaaaatctgcgctcctggaaaggttaaaacagctgacgccgaacgaaatcaaagaattagagcacttacacgacgctgtttttgttaatacaggtttacaaaatgttagaaaagttaggacaaagaaatggaaaaaatactggcagtataaagcaggtattccaattggtttaaaacgttcccaggtggatgagttcaaaaaccaatatttgaaagacgtgttggagcagacgagtgtcactacaacgtttaacgaggtaacgaatatggataaaacattaacgacgaaaaggataccaaacgcaaatttcttagggaactgtaatgtcaaagggttcgatcctccatatatttaccctcgtctgaataaatcgccacaaaacaaccctgaaaacaaagaaactctcaagccagaaattgatgtgtcaaataaaatttctgcctcaatgatgacgacaacaatggcgaccaaaacgggcacttttccaacctcaacaatggaataa

SEQ ID NO: 5833 - DNA, 2316 bp, Saccharomyces pastorianus
atggacgtactggcagaaagcgtggagggcacattgaaaaatttgcagggcaaaagagacttccttgcagagcaaagggagcattacattgatataagaagtcggctggttagctttaatagtgatgatgatgatgatgatgaaggggctaagagtcagggtacggtctttggtgatattataatatcagcgagtaggatatacttgagtataggctatgaatattatgtagaaaagaccaaagaagaggccactacatttgtggatgataaattgcgactaatagagaacgctattgaacagtttgatatgaagatacaagaagctctgacaaccttagataatttgaatggtctagacaatgaagtcagtaacgagcaaggggagacgggaaatgaggaaggtttccttccctcgatagagattagagaagaattggatgaggaaggaaatgtcacaagcagctctgtcactcctacaacgaagcagccattgcagtcaaatatcaaaaaagaggaaaaggctctaacgtctcaaaataaacagtctacaaacgaaaagaaaccaagctcatttgaagacaatttaaagggcaagctatccaaagagaagaaaccaaactcattcgaagacaatttaaagggaaagctatccaaagagaagaaaccgaactcattcgaagacaatctaaaggggagattatccaaagaggccgccgaaaagagggtggtagagccatcgaaagtggacacagaaaacgtatatacgtttgccgatttagttcagcagatggatcaacaggacgaattagacgacggttcaattggtgccgatgacataaactatgattatgatgcttttgaaaactctaattttgaggtcaaggactatgaggacgacgatgaggatgatgaggatgacggttatgtaaaccattcaattatacctggttttgaagcgcaatcttcatttctaagccaaatccaacaattacgcgcacagaatcagcctcaagagcataaacagaaatgtactgaaggaaataagccattgaaaccaattttaaagaagtcctccgctgatgaagagcctgcgaagaaggaaaaaacgaaacgagtggggtttgcctcatctttagaaatccacgaagtggagaacttgaaagacgagactaaaaagcagacgcattccttcaagatccccatgtatgacatgataaacaaccaggaaatcatggggcctgccaacgaaatggcgtcggaccaattcgatggtgatttgcttgccaagatgttgggtgtgcaagaagctgatgaggtccatgacaaatacaaggacaatgtggcaggccaggagaagcatgaagaggaaacgagcagatcgaacaagaaaaccaggatttccagattcaagaaggatagagcccccaaaaggccagactcgctgttaaattgtggacctgtggagagggagccagttgtgagcgacatagtggagagacgcccggtcgtgaacgatgttatagaaaaggagccggttgtcagcgatataacggaacgggaaccaacggctggcactagcagcaaatctgacggtgcattaaataagaaagacttgaaatcattacaaaagccaaggtcatcgagatttaaaaagaagaaatttgatcccaagatattcgacgatataagtgacgacgaacccgaagtcaaccccgaacccagacgaactgccgatgtgcaggagaaattcccttcaaagatccaggaggcgtccagagcgatggaccaggcaggcgcgaccgcagaggataaaccggtcagaatcgcgaacgtcgactaccacgccctggggggcgacatggatgacatggtcaaggcatactcgctggggatatacgacgacgacctggaggaggatccgggcactgtagtggagaagctcgaggatttcaaagagtacaacaggcaagtggagttgctgcgtgacgaaatccgggacttccaactggagaaccagcccgtggcgacggaagagaacgacgagaacgacgaacacgatggcaagatcatggtggatgttgttgagcgtgaggttcctgaaagctacgcggacgaggaagacgaagtggcattgcatccggatcgattgcacgaggcggttgcgatcgagtaccgacgcatgaaggaaaccgcagcgtcgaaatggcagtcatcgcccacgcaagctgagggcgagctggagcccatcgatgagtttgggaacccagtgaagacgagtcggttccggtcgcagcggttacgcatgtgcgaatga

SEQ ID NO: 5834 - DNA, 1050 bp, Saccharomyces pastorianus
  modified_base (619)..(658): a, c, g, t, unknown, or other
atgctactactatttagaaacggtaagttattggtgaaaataaagtggtcgtcaaaggaggatgacgaggaggtgtccaggaagttgggaaaggcagaagcattgtgtaaggggcggtgggcgcccccatccatgtcgttcagcaggtcggagtgcactatcgagtgcgtctccacatcatcatcatcatcatcgtcatcatcaaacacgttctcgaacacggacgcgccgttaagattcatgtccgaaaggaagaactgctggttgtcagtgtcatcggtctcgttgttagtcgtcgccgccgtagtcccggcaaagggcgaggcagagaagtccaaggcagagttggaatgctgcataatgcggttaatgtgctggaacgacgtgcgattgtgcaggcgccaagaaaggttcaaaatacgatctgagtctggcaatattttctgcgcgctcgagtacagattccaaatatcgttgtttaaattcagatccgggtcgagattcggggctctgttcttgctcataactttactgtctgtagaaaggggagggaaagaaagggaaaaaacgggaaagaaagggaagggaaaggagatgactcactgccgtgcaccgtgtnnnnnnnnnnnnnnnnnnnnnnnnnnnnnnnnnnnnnnnntaatatgcccgaaagagagtgactttgcaacaacgtatgatatgatacgatacgaaacgatacaatcgatgtggccgctacaagcaaaaacgccggaaaagcgaaggaaagaaaacgtgcatgctcataccgggcccatatatatgtggctggtggtgcggacagctttgtgtggtggctgtagtcgttgcttgcagcacaaaaacgagcgcgatgcgtcggacgagagagctgttatcttatcttatcttatctgcttcttatcagcccgggctcccgctttgttgacgttggcgggtgggtgtttgatcgcccgttatcggccgggccaatcacgcagggacccacacaccgagcgcttgcggtcacgtgcgatcgatctcggcggctaa

SEQ ID NO: 5835 - DNA, 285 bp, Saccharomyces pastorianus
atggcagctataactaaacagctttttctattattttatcgttcttgctcatcaaagtatcctttcattaaaaatctccaccgtcaaatccgccgtcaaatccgccgtcatagccaccgtcgaagtcaccaccattgtcatcaccgtagtagttgttttcgacatagacattatcttggtcgtggttatcaaatgcattttccagcatggctccacccaataaaccagcaccaacaccgagtagaccacccatcatggcgttgctacgcccaccacttttcttag

SEQ ID NO: 5836 - DNA, 441 bp, Saccharomyces pastorianus
atgaccccctttacaacaacccttacagccttgctagctgtgacgataaacgcgctgcagaccaaacactcatgtgaagcacttgcagatgaatgccttgatgtagcgttatcgtcaccatcgtacataagcattgaaggaaacactaccagcgaacaattgatgcagggggttgattctggggagcctcctgctgaagacttttcccttgatcgccaaattgcaaagcttttagcttcctacgacgggtctgtctcgacggtgggtaaattcaactttagcggtcttgagaaagcagaggtagccaatatgcttaaagcattcatcgattgctactacgagtccagcgaaaacagtacgtgccttaatgacaatttcgaggaacgcttgccaggtagcctattggacatgacggatcggaacaaatcgttgccagcgtag

SEQ ID NO: 5837 - DNA, 177 bp, Saccharomyces pastorianus
atgatggtcgatcccttgtatagcggcgggttgacaaaaccattctgttcgtctggattacgaccaataacggtcagttgcgtagtgatatcgaaagttgacaattctgtaaggtcgaccattgttgcgaattttgatagttgtgccaattatgtgccaagattacaaagcgtttaa

SEQ ID NO: 5838 - DNA, 1206 bp, Saccharomyces pastorianus
atggtcgaccttacagaattgtcaactttcgatatcactacgcaactgaccgttattggtcgtaatccagacgaacagaatggttttgtcaacccgccgctatacaagggatcgaccatcattcacaagaaactttctgacgtagaaagcatgaaaggaagatttttttacgggacagcaggttctccaaccatcgcaaatttggaagatgcttggactcatttgacgggtgccgctggaacagtgttgtctccatctgggcttggctcgatcacattggcattgatgacccttgcgaaggccggcgatcatatcctaatcactgacagtgtctacgtgccaacacgcgtactatgtgatggtttactggccaagtttggtattcagaccgagtattatgacccatcggtaggagaggatatagaaaaacttctcaagcccaatacaagtgtcattttcctcgaaagtccgggctcaggaaccatggaaatccaggatatcccagccttggtttctatcgcaaaaaaacatggaataagaaccatcttggataacacatgggcgacaccacttttcttcgacgcccatgggcatggcattgatatttcactggaagctgggacgaaatatttaggtgggcattctgactttctccttggtctaacctctgctaatcaagaatgctggccactattacggtcaacttacgatgcgatggctatgttaccaggtgccgacgattgccagctggctttgcgaggaatgcgtactttacatttaagattaaaagaggcagaaagaaaagcgctagacctagcggcttggttgggaaacagagatgaggttgagaaagttcttcatcctgcatttaaagattgtcctgggcacaagtactggttacgtgattacaaaggttcctctgggttattctctatcgtcctcaaagatggatttacaagagctggtctggaaaatatggtagaaaagatgaagatttttcatcttggattctcatgggggggttatgaatctttaattacgcctgtgaaaccagccaaacaaagaaaaccccacaactggcctcatcgcggttttgctttacgaatccaagtgggcttggaagaactatcagacttgaaaaaggaccttgaattaggatttaaacgtttagcagcagagatatccatgaacccattacaactttag

SEQ ID NO: 5839 - DNA, 1704 bp, Saccharomyces pastorianus
atggatacaaaagagccatctctcaatacattcgtcaagagacactctgagacacattttgctaatatcaaatatggatactatgtcttggtaatatcgctagtttacctcgtggggttggtacttctaagagcgtttgggacaagaacggctggcaggtcaggatcacaactcaggaataaagtcatttatcggatctatagcatagatcctgcaattcatttggctatattgtttctcgcactcctggctcccttttactatcattactccttgaccacacaaactgctgtttatttgaaaagactgggaagactgagttatgcattagttccattaaacctattccttactctaagaccaaattggatattgagaaaaaattgcgcctacactgatttaataccgttccataagtggttctcacgttttattaccgtgattggtttgcttcatggcattttcttcatcgttaaatgggccatggatgatactgtttccttgaagcagaaattgattttgaaaactttcaatcttgtcggatttttagtatcaattttgatactgtttttgctaatttgctcaatcgggcccatcagaagatacaattatcgcctgttttatattgtgcataatttggttaaccttgcattcatcttgctcgtccccatacattcaaggcccggtgtaaaatttcccttcctcctactgaattgtattctattatttttccacattatcaatagagtaatattcgcaaaaccactaatcctcttgagtaagaattcaaattacacgaagacaaatttagtccacgtaaaattaccaagagcagtcattccagatttctttgagcctgggtctcatataagaatcagcccctacagaataattaatccgctttactggttattgccatcccacccgtatacgattgcctctttggcagaggacagttcaatcgacctcatcataaaggagacttcaacaatcgagggagctagtcaaatagagtctcttcgcagcaatccgaaatcgttttatttagaacaagaaacttcctatactctcgttggttgttatcctccctctgtacctgaaaaatgcctttctcaaggcacaaacatagccattgtgtgcggtgggtctggtatatcttttggcctaccagtatttaggtattttttaaacaaggaggatgtgaagtacctgaaaatcatatggttgataaagagtcgttccgaatatgaacttgttttgaactacttggaggcaaatgacataaattttgaaaatgcatcgtccaacaataagaagtttttaatatttattagtggaaattatcttgtggaaactcgaccaaacgaagcccccaatattgaggatgaaaatccagactatgaaatggggtctttcactaatgaagatgaagacctttcaatctccaatttcaattcacaaaatgcgtacagcaacggcaatactccagagacaagtcatagtcctacggccaagaatgggaacttgattgaagtaaaatcaaagcatagttttactcttcacaaggaattaagagaatttcaaaatggaaactcaggaaaggacaaggatcaaacatggttgttttcatgcggtcctccgtcgtactacgtgactcaggaatactgtcatggggatcctctagagtcgacctgcagcatcagc

SEQ ID NO: 5840 - DNA, 1029 bp, Saccharomyces pastorianus
atgaaccactccatagtaaccgatgacgaagttcgcgagttcttcttaaattgttcctcagagacagttattgaatcaatcgctgacttgcatgagtcattgagactctattctgaaaaccatgggatactgcccaatagaatattcaaaacgctgggtgaaaacgatgaggattcgaagatatcccacatattcatgccagttgtaagtagagatttttctggaataaaaatcttgattagtaacaacaataaaaacttccagggtgtaattaatcttctagaacccgaaacaggaaaattaaatggctgctttgaagccaaacaaattactgcgataagaactgcactggtgtcatgcattggtttatataagcaactgtcggatcctcatcatggatggtttaagtttgaagatggcatttgccagttgacatgtttcggtactggtctgcaagcattttggcacatttacgtatgcattaaaatattaatgtcggaagcctttaaaaggtctttaaacgctatcaaagttaacatactatatcacaagaacaagatggatttggcttgcttaaaatcattgagtaaatcatttggaaatgaactaaacatagattttaaccaatatcaattggggaccggcgaagatcataagagcccaaaagcaaatgatgctgtttctagtagtgatattatttttggttgtctgcctacatcgacaccgaacttgtttttgaatcaactgacaaatagcaagaattctaacgagccaaaacacacttacatctcgctaattgggagttataagccaataatgcatgaatgtgataaagatttagttgatgtgttcaagtctagtgatgaaaatgtccgtattttagtggattcaagggagcacacacttttagaatctggagaattaattgattccgaaatcaaccccgataacgtcattgagataggtgaactagattcaataaaagatatcgttttagatctacacgggaagagcacaaaagattattaa

SEQ ID NO: 5841 - DNA, 120 bp, Saccharomyces pastorianus
atgaacaggatcagtgattgttctttgtccttccttttcctttgcctcttcctcttgttcttctcactccactttttctgttttacccgtaaacacgttacaccgtacgctcccacttaa

SEQ ID NO: 5842 - DNA, 153 bp, Saccharomyces pastorianus
atgaaatacatccaaactgaacaacaaattaacgttccagcaggtgttactgttagcatcaagtccagaatcgtcaaggtcgaaggtccaagaggtactttgaacaagaacttgaagcacattgatgtcactttcaacaagatcgacagctga

SEQ ID NO: 5843 - DNA, 1386 bp, Saccharomyces pastorianus
atgttgagggaggcagtaccccttttaaacaaaatatacgaaagagactctaggttgcactttttatccacagaagatagttcagcttattgggaaaactctgacaaacagtttttgaatttgagattttatgaagaactgcaagagtacgaagatttgtatagagaacgtttagaacaagaggaggaggaggagaacatggaaaaggacttggattttgggactgaaaggcgctcgttcaagtctttactattgaataaaatgaaaaagaggctcaagtcgtcattacgttttcggaaattggaaatccttttagatttaccgttctttattccttttgaagaaagagtggacttgttttacatgttcattgcacttgacaaaagacgattatctttagatgatgatcacagcctaatgaatacgtttgcaccttgggcttcgactggtatgagaaaacagtctgctattatttccagagaaaatgttttagatgatgcctttaacgcgtttaactctataggagaaaggttcaaagcatcattagatgttacatttgtcaatgaatttggcgaagaggctggtattgatggtggtggtatcactaaagaatttttgactaatgtaactgaagaagggtttaaagattcaaagcacgaattatttcaaacaaacgatcattatgacttgtatccttccgtcgtatatgacgcttcgaaactaaaatatatatggttcctcggaaagattgtaggcaagtgtctatatgaacatgttttgatagatgtgtcttttagtgatttcttcttaaagaaattgctgaactactcgaacggattcttatcttccttttcagatctcggaagttatgattcagtactgtacagtaatttggtcaaattattgaatatgtccgcagaagaaatcaaatctttggatttaacgtttgaaatcgatgagcccaacagccctgcgaaagtggttgatctgattccgaatggttcgaaaacatatgttacgaaagacaatgttttattgtacattactaaagtaacagactacaaattaaataggagatgtttcaaacctgtttcagcgtttcacggaggattaagtgtaattattgctccacactggatggaaatgtttaattctatagaattacaaatgttgatatcaggtgaaagagacaatattgatttaggtgacttaaaagctaacacagaatacgggggctatacggaggacgatcagacaattgtggacttttgggaggttttgaatacgttcaagtttgaagagaaactgagcttcttaaaatttgtcacatccgttcctcaggctccgttacaggattcaaggcattggatccaaaattcggtataa

SEQ ID NO: 5844 - DNA, 1188 bp, Saccharomyces pastorianus
atgttaaacttcactggtcaaacgaggagaaggaatgtcaatttaggaaatagaactcgaaatacaaaaaaggatttactggaaaagactaaaagggagcgagaaagaagagcccaagataaacttaaagaggacgcaagtagaactattcaaaagtatgttagaagacattttgcaaacgtgagatttttcaagacagcttttacgaatgcgcaactagttcatatgataccagcttacgggggcaaattgatcaattatatttcccgagatgatctgcaacaattactgatcctatctcatgatttcttgtccacctaccctagccctttgggtaattcacagctattgagtttgttaaagctatatcaagatgatacactagtgatgcaaactataagcgatttaaacatgaaatacccaaccattgacgagtttttagacagtgtatcgacctttttgcgccaaacttccgtatcaagttattctgtgactttaaagctagcagatattatagagatgtggggagtaatggacacaaatgcttcgctaaatattttttcaataccaataggacgctatgaagagcaaccatttgcattagatttctactgccttctcgcagaaagaaatcttctgcccaaatatatcgactcagacccgacattatgggataacatggcgaaggcatattcacattccagggaaaccggtcaaaaaaatattgcaaaactgctcatccctaatttcagtcactatgtttcttcatcaatcttgcctaatgacaacgactacgtattaaagttttatgaaaaggcatttatagatgaagtgataactgctacaaaagactatgtttccgacgaaggccacgttagaaacctaatgcgttatattgcaagttctcccaatcaaagttgtaagaactccgttctgatcactttactttcaaataagaactttgtcagaagactctcgtgggaattctttcacaccaagttcagtgctaccaaaacggaagctaatccgctcttttcagttttagcacaattaatcgacatgcaccttttgatatcgactgatcgggaattattggatcatgagtcagtaatacctattgaaggagttgaaaaaattcacatctattttgaaggatttttcctttcgacaatattggggattacttga

SEQ ID NO: 5845 - DNA, 102 bp, Saccharomyces pastorianus
atggttggaagcatttcttgtataatgagagcacttcaagaggcatctataaataagaccccgttgcctcaatttatgccaagtgcaagaaatcgctcatag

SEQ ID NO: 5846 - DNA, 2763 bp, Saccharomyces pastorianus
atgtcgcttaagcttaaattaatcaagttccagaagttatggttgtattattttccctgtgacagaactcttacgaagagaatatgtaaatctaccgttaattctacagtggccttcatcttttgcttgattcctgagatcagaaagcatctgggtgctgctcctgcgatgctgcctatgatttctgttattgttcatcctggaagaagggtgggaggcacgattcatggtgccatctattgtacaacgggtttgatatttgggttggcttacgcaatctttggcaggtttctggcacagcgatgcttggggagttcttgggacaagttaacagaggctcaacagcatatgtctaattacaagagatacgaagctgggttggcaattttggctgtttttgaagtgattatgcttttattccacggttggatgaggtctgtttcccattattatttcggtatcgtatttccactattcgtcgtagtccatttcgcttttatggatcctttaaatgaaacggcgggtactattgccaaagcttatagtgctcctttctacctgggtattgcgatgtcgatattttggaaccttgtattgtttccagaatgggggactacttacttaggtaacaccaccattgacaccttgaatgaacttcacaaatccatcgattattcaatcaatttctttattgcagtggatccacataacgatagtcagttgtacagtagggaccccgtttcactaggtaagcttctaaaaatgaaaacatcaattgcttcaaaagtaagcaattgtcgattggtcctccatgaatgtatttatgagttcacttatgcctatatctcgcctactaaactgaaaccgattatctccactttggaaaatttaacagtttacattaatgggcttgtcaatacatgtcaactagaattcatcttattagctcggaatgataacgagctcaagtctgacgatgttgcagcattaacgcttccgaaaaataaagaaatcagttttgcaaatgctgaaaaattgttaaaagttattgacaagttacatccagtaatttatagcttacatcgaacaatgagtgaatgtatgtatatggcgaagttggtacttgctcatgcttttgatgtgaaggtttcaaaagttcactcttgctcgatgtttaaggacggtaacttcccgactttcaacaataacgctaataatcttccaaatgatgttgacatccaaaacaagattaatgatttaaagaacgcattagaggaatgtaaatcaaaattcaagtcagaaatgttaggatttgatattgacattatgagtcccagtgatgaaatgtttttactctcaagttttttactaaacttcaggcaaactgcgaactcaactttgaccatcatggagtccgttaaagatattttagtaaagagacagatacaagagaagaaaggttggctgagaggcaaaaggctttggtttttagtattgactaactacgagacgttctctatttggttgaaaggtgacagaaactcggtgacagaaaatgatacattaaagggcacttttaatgcagccactaatggttttgctcatgatacggtcattagaaggccagattacgaagagaatcagcttttgtctcaaaaagtttcttcaaacaaaaattttccaaaatatgacgcttctctggatctgccaataacaagtgaaccaaagaaaatttcttcttcttcctctgcttcttccttttctcctgccttgtctttgactaaaacatccacattcgtgactagaaagagctccaaaaagcgcactagattttcatttatgtcattgctgatttcagttgacgatttttgcaaagtatcacgtcctcatttcagatttgctttccaagtagcgattgcattgatgctagcctctttccctatgttcattccaaagacaaggcactggtacatagattaccgtggtacctgggttggtttcgtttgtatactttgtttggagccttccgtaggtgggaccttctgggtcttcttccttcgtgctgttggtgttatttatggagcagcctgggggtatttatcttatgttgctggtgttaaccaaaccaatccatatctggaaactgtcattacagtgtttggtgctgttcctgggttttactatttactaggttcaccctatgtgaaggctgcaatcattgaaatcattagtatctatattgtcatgcttgcggcaatccttccctcccaggatgatattctgacaagttttgccaagagatgtttggccgttgggtacggtgggggagtggcgctgatagttcaggttttctttttcccattgaaagcacgagaacagctgaatgaagagatttcgtttgtatgtggttgtatatcggaaatggagcttctttatgccactgggctggagggagagcaggttgctaacagtatgaccgaagataaatataaaaggattgagaaaatatcaacaagtgctaaagaggcattggcgcgcgctacagcttacaaagggttaaccagacaagaaccgagattgaagggtgaatacaccgaattagaaaatgtcttcactcaagtgatatttatacagaagcaaattatagaaaggatagatacaatttctctgttaagaaaacaaatggaagtgcagttattgaagagtttaccagtcttgtctacccatacagacgtcaaatggttggaagcatttcttgtataa

SEQ ID NO: 5847 - DNA, 759 bp, Saccharomyces pastorianus
  modified_base (741)..(741): a, c, g, t, unknown, or other
atgcttttagtgtatagtcgtattagaaactacgtgccgtcttctttatgtcgaatatgtatacggtataattccggttcgcagaacagatggctgaataggcaattgggggatccatacgcgaaacaagccaaagtccaaaacttgaggtctagagctgcattcaagcttatgcaaattgacgacaaataccgactttttagcaaaagcaagccggagcagaggatattagatcttgggtatgctccgggggcctggtctcaagtagcacatcaaagaagctcgcccacctcgatgatactaggtgtcgatattttaccttgtgaaccgccgcatggtgtgaactctatccaggccaatatactggccaagagaactcatgacctaatacggcttttcttttcgaaacattttcaactgaacaaacacgatgagttgcataaagatcatggttactttcagaatatgctcgaggaggaattaacccatttgaaagatactgatttataccgcgagattttcactactgatgacaattacggcgtttcaagtacgaacagcacgctaagagaactggaaaacttcccaattgatgtaattataagtgatatgtatgaaccttggccccagacagcgggattttggaataacattactaatcaagcttattttaggatggcgaatacttctggtgttagcataagagaccattaccaatccgttgatttgtgcgatgccgcngttggtaacgggctatag

SEQ ID NO: 5848 - DNA, 930 bp, Saccharomyces pastorianus
atggtgttatacaagagaaagcctatactgcttcctgatccaaagcctctaccattggatttgaacgtgcaagtatggcatattgaagaaaccggagaatggtttcctagttacgaagaatttctggataggtttgatttctatactcgccaccattttacttgtgaaatcactggtacttcgtgcttaacttttttccaggccttggatagtgaggaaacacaattcaaatacgttgaagacagattcccattgaaattaagagaacccgtagcacgattcttgcatttcaacgggataagaagattggacgcattggtggagaaggtttatgcaaggttcaaaaatgatttcttccctggtgaaattgtgtatctacgtaagcataaagacgcttctacaacaaattcaaattcacaacaagatactccccagcctgatgagttgcctgagaacaataacagcagcaatcctaacttacctcagtaccaatatcaaaaacggtatattatcaaagaaaaagttcaattcaatgcaacgataaatccagaaaccaaagaaatagcgatgcctgcccataccaaatacatgttgatagaagaatctacctgcagcaataaatcatttatagttgaccaagggcagatttacagggatcgttctactttcactaaacacttaatcaaatgtttttttaagatcactttacaaagggcttcttcaaagatgggtgcaccttggtgcgttaaacctgaatatttagcaatgtatggtttgactatggattggccgaatgatatgctaaaatacaaagatgatgaaccttccactgttgcaaaacgtttggatagtgctaatgtttcaccaccagaaaacggtaagagtaaacgtcaaagtaaatcatccaataaaacaattactccacgatga

SEQ ID NO: 5849 - DNA, 816 bp, Saccharomyces pastorianus
atggatgatttggcattgccatatcagcatccaccaagaatctttccaaacctaacgtgttataatgagaaattggaatgcgttctagttggttctattggaagctccaaattattcacatcttttggaaagctattacaagtctatcaatttttgaacacttttggctcaaggatttacttatctcacttcagtcttgaccagttcatcacctctctgaaatgtacggacgcatatgagttaaaaggtgaagttgtctatgtaaacataaaggctcaagcaactgaagaacgagaaggaaagggtagcagctcactcttgaaaacagaaaaagaggaaagtgttgaggaacatgctgaaaaatcaagcaattggcaaagaaatccgttcatccgtgaaatgataatgaaaagaaattccaataatgttgaatacaagattatccatgacgatccagcaacagacgatatacttgataatgtcaatcacaatgggtccgccttactcattgaagtttttactgcattattgcgtctatttatcaacgaagatggtgattggaactgtattgttgttgaagattggataatatataataaaggagtactgtcagaagcaaataattctagacaagggcagatgacgcagcagcaaaacggcaacagatattttctgcaagatagggaaaagccggataactcaagtcccacacaaaaagtagaaagacttataggtgaccgtagtgttgaaagtgcatccaactctaaatctgaatctgaggctgaatctgaatctgaagaggttgacctcagttgg

SEQ ID NO: 5850 - DNA, 600 bp, Saccharomyces pastorianus
atgtctagcagatggttaaacgcgatacattacctggtgtgcccggcgacggtgctgccgggatacctcataaacgcgtacggctgcggcgcggcgttgcaggaaacgctgaacaaggacggactggtgaacgctgtgttcgtgaagaagggatggttctggacgtcgctgcttgggtggtggtgcatcatacgctacctgcccacgccgtccgcgggcgccagcggcagccgccgcaggcgcatggcgcactcgttcaggcgctacgccatcctgacggtgtggtggtacgtgttcaggcgctacgccatcctgacggtgtggtggtacgtgttcacgcagggcatctggttcggcgtgggcccgatcatggacctggtgtttgtatacacggggggccattgccactacgacgtcttcgacgcagtcggtcacgtgaaccgcgacttccagggctcggagactcggacgcagcgcgcgctggcgctgatccgcgacgtgctcacgctgcacggcggcgatcacgtgcacggccagcaccagcagcaccacgctgtgggaccgctcggtcgggtcgatcgacgcccgattcgccagctg

SEQ ID NO: 5851 - DNA, 981 bp, Saccharomyces pastorianus
atgtctcaagaacagtacacagaaaacttaaaggttattgtcgctgaaaagttggctggtattcccaacttcaacgaagatatcaaatatgtcgcagagtatattgttttgttaattgtgaacggtggtaccgtcgaatctgttgtagaggagctggcaactctattcgacagtgtttcgaaagatatactagcaaacgttgttcaaacagccttttttgccttagaagctttacaacaggcagaaagtgctgagaatatcgtatccaagattagaatgatgaatgctcaaagcatgggccaccgggatgccacccaacatctactacgtcgacaacaacagcagcatcagcaacaacaacaacagcaacaacaacagcaggaggtacaacaacaacctcagcagctacaacaacaacctcagcagctacaacaacaacctcagcagctacagcaacaacctcagcagccacagcaacaaccagacgcacagaacgcaatgcagatagagcctcagggagttccaactcctatatcagctttctctggcgttgtgaacgccgctgatgcaccccaattcatgcctattgacaatagccagcgttttactcaacgtgggggaggtgctgtcggcaagaaccgcagaggcggtcgcggcggaaaccggggcgggcgtagtggtaatgcgacacgtttcaatccattagccaaggcccttggtatggctggtgaaagtaatatgaatttcgttccaaccaaaaaggaagggcgttgtagactatttcctcactgccccctaggtagatcgtgtccccatgctcatccaactaaagtgtgtaatgaatatccaaactgcccaaagccttcaggaacttgtgaatttttacatccaaacgaagatgaagaattgatgaaagaaatggaaagaactcgtgaagagtttcaaaagaggaaagctgatcgacaagctgatccgccataa

SEQ ID NO: 5852 - DNA, 1719 bp, Saccharomyces pastorianus
atgatgtttagaaggagcgcggtgaagccgttgagaacggtacagttgggcgtgagcaacgctcttagagccggctcgataggtatgctgggtcgtcatcttaccaatacggttctgaacgaacgtgcgtatcattccaaccaaggtggcggtaggaagccatttgacggcggtcaggacaagaagaacaaatgggttaggcaggggaagaacaaggccgttcgagaagaattgaaagtggatccggcgtctccatggcgccacgagcttctttcgttcgacgagtgtgtctcatctgctctgaagtactctactaccccgctgcagaacacttacaagagaatggacaacaaacaattgaacacacatccgtcgtttgccctgttttgggattccatgggtagagcaatggaattgtactattctctgagagaatcgcctgacttcaatgcgtaccgcgtatcacggctgattcatttgttacacaatggcctgaggtcgactagagatcaactggtcaagctaagtaggaaacctgattatgactcgcagtctttccataaggaaatgataaactttttatgtaactccttaaaagacatctctgatgacgtcttggcgaataaggtttctgttaacggatacggtgcgactcatcttctgacctctttcaaagaattgtcttttaacgatgactgtattcaaatatgggaaacggggaagacttcacccaatgaaactacatctgaggcattcaaagaagccaaagtagttgggtttatgctaccattactttacgcaaaaaaccagtctttaaccgagcctaacgaactgtacaaccaagttattcagtcgaaagaatttacccaccctaacctttatagcgggttgattaaggtgttcattaaggctgaagattatgaaaaagcgttgtcactcttcggtcggttatgtgagaaagcagaagtacggaattacggttatttgattgaaacgcatttaagctttattagtgattctaagaatttaactctggcagaaagtttttttgataaaattatcaatgacgaaatgccatataaaatcattttacaagtttccacggtgaactcgtttctgcaaaatatatggaaaggggagaatgattttgactacgtctacaagatttgggaaaaagccgttcgattctatggtagcactgttaatcccggaatcctgtcttcattgaacaatacgtttttcacaattttctttgaaaacttcgttaacgacaaaatcaagggctttaacaaactgcaggaaatcataatgttctacagcggtgtcaagaaaattgacgaaccatttttcaatgtaatgttgactaaagctactacttggcatgaacgtagcataatcgattttatcgataaaaactatactctctaccatattccaaggactattatatcatatagaatattactgaaatcactcggaagcatagacgacaccaccaacgaggagattttgaacaaatggctggaactagttaagaagttagatgagttaggccaacagtacatagccaatgcagacctatccgcgttgagagatgcaactgtcgtttggtcgcaacaaaagaaggatgaaaaggagctcattgctaaatctgaatcaacagcaactacaacaaccgatttaaagattaaagatcctttggaatccttgcaaaaatga

SEQ ID NO: 5853 - DNA, 396 bp, Saccharomyces pastorianus
atgagcttgttgcttgtggaagtatctcataccgaccttaccgaagtaacctggatggtatttatccatgttaattctgtgatgatgttgaccaccggccatacctctaccaccgggatgctttctgtgcttaccgacacgacctttaccggctatataaaaaataaaacattgtatgaaatacaattttttaacttgttagtaaaacgtgtttctgatttggatgttttgttttcctgcaaaaaaagaaaccgtggtaactctctttttcataattgcgctcttctctacaccaatttgatacgacaacatagcgatatacctttcagcaatttgttgaaaaatacagctcttgctgcccacaaaatgtgtaaagagtatgactatactgcataa

SEQ ID NO: 5854 - DNA, 3165 bp, Saccharomyces pastorianus
  modified_base (461)..(520): a, c, g, t, unknown, or other
atgttcaataaaagtgtaaatggcggtttcacctttggaaaccaaaatacatcgacaccgacttccacaccagcacagcccgccaatgcccttcaattccctcagaaatctaccggattatttgggaacgccaatgctaatgcaaatgcaaatacttcaacacctagcccttctggtggtttgttcaatgttaattccaatgctaatactttaaaccaacaaccgcctagtaattcgctattcggcaatagaccaacacagccatcaggtgggttgtttggtggcacaagcgatgctacctctaaaaacaccggaagtttatttggaaataacaactccacagtaaatccaacgggctccacaggcttgttcggtaacaattctacagggtccactgcacaaaacggcggcctatttggaaatgctgttaatacaggttctaatgcatctaccggtggttnnnnnnnnnnnnnnnnnnnnnnnnnnnnnnnnnnnnnnnnnnnnnnnnnnnnnnnnnnnnctggacaaagcggtggtttgtttggaaagccagttgcgaacactaccaactctactgttgggtccgggggcctgtttggaaacacatcctcaacgaattcatctacaggattatttggatctaataactcgcaaggaccagcaggcctgttcggacaaaagcccaatgttccagccactgggacagggctgtttggaaataataatgcagcttttgcgcaatctgctgaccctaccggaaacatgtcaaccaatccatacggtattaatgtaagcaatgtgccagtgtcagtcactaatatgccaagatctattacatcttctctgccaaatagcgacggtaaatcgggtgtatcatctaaaccaattgagaatagaagaacatattcattttcttcgacaaactcagctaaacctcctctgccacgcgcatcagaatcaagtttagttagtaaattaagcaccagactaaaaaccaatcagaaaagtgcgacccccaatggaattttctcaccatcttataacaaaccgtggttgactggaacgagtttaaactctttagtaggcgacatttcatcttctaacccaaatactatgaactcgagtgaaaacaccgactgtatggctaacggattcaactttttatcctcccaaaagaccgacctattcgaattacgtaagttgaaaatcgattctaacaggagcgctgcaaaaaaactgaaactgctatcagggagtccagttaccacgaaagggtatatttttcaggacgaacaatttccatttaaagatgagtcaatagccaaaactaataagggaagtaacataaatactaaagaaaacaatgataatgatggcggtcacttggatggaaaggaccaaacaaatgatccgtatactaaacgagatgacagtggtgtaaaaagtgaaacgtcacaaaattctgattattggtgctccccttcaccagaacaattggagcttttatcattgaagcagttaaccgctgtcccaaattttgtcataggaagaaaaggctacggttgcattacgtttaactatgaagtagatcttaccgctttcgtcagagattttagagaagaactatttggtaaaactgtaatattccgttcatctaagacagttgaagtttatcctgacgaagatactaaacctccggttggatacggattaaatgtccctgctactattaccttagagaatgtctaccctgtggataaaaaaactaaaagaccaatgacggatactttgaaatttgcggaatttcaaattttcgacaaaaaactcagaaacatgagagaaatgaactttatatcctataatccctttggtggtatttggacattcaaagtcagccattttagcatttggggcttggttaatgaagaagatgcggaaatagatgatggagattcggagaaggataacaataaatttgagaatcattcaaaaaaggtacgcacactagcacaatctaagcccttaaatgaagagatgattgttaagacaaatggcacgtccggatgtttagccgataaagaagactctattattgaagaaaaagcatacgaacctaatgtatctgaggcagactttgagagaattgaagtttctcctacactggatgtttctaaagattgggtagagcaattaaccttagctggttcctcattacgctccgtgttcatgacttccaaagaattgtccaaaccctgtcaagatgaaatagatttactatttgcggaattcaatgacgaaatagaaacggaaaaaagcatcgtgaaagagagaaagtttactgctccctacacatttgccaacttttcgacaggctcgatgctattaacaaaatctacctctactgaaacgggtgtttctattcagcgcttaccaaatgagttgaaacgagactttttatttagtgatctgtacttggacaggcaaattgaaaaagttaccctaaaatcaagagattcaaactcatacccatacgttgttgagagttccctgctcttcaaggacgtcttgaattatatgaaagtcacttccaaggactatagcttatggaagctttcatccatcttgtttgaccctatttcttacccatacgaggtcaacaatgttgaagcgaaaatagcattactgaaaagagaaagacatcatcaactaacctcgtggattgttggtcaaattactgccgaagttaacgaaaaaattaagagctcttccaacacaatcgaacaaattttcttacacttgatgttgaatgatgttgtaagcgcctctaagttagcaattgaatccaagaatgcacatctaagtgtgctaatatcctatctaggctcaaatgaccctagggttcgtgatttagcaacactgcaattacaaaggtggtctactggtggtagtagtgttaacaaatacgtctcgagaatttacaaacttttaagcggttcaccctttgaaggtctattttctttaaaggagcttgagtatgaatttagttggttatgtcttttgaatttgacattatgtttcggtgaaatagatgagtattcgttagaagctctcgttcaatcccatgcaagtagatttctccccttgtatgatccggtggtttgtttt

SEQ ID NO: 5855 - DNA, 276 bp, Saccharomyces pastorianus
atgaaagtttttgaagactatctaaggtttatattagatgatgtggaaacatcgaaaacggtcgactcgttgattaatggtatgaagatattttacgaagaaaataagcataatcgtgaagttcctgcatgttgtaatgttatgtctgaaaagatcgtttcgaaactcttaaaaaataacagccctatcatgaacgattccaagagcaaattgcttgaccttcctttagggcaacccgaaaaggcatacttaaagagcgaatttgccaaaatttaa

SEQ ID NO: 5856 - DNA, 279 bp, Saccharomyces pastorianus
atggagttcgttagttgtattaccatggttaatgaaaaagaggaatatagggaagatgctgaaagtggtctctgcaaaatccagatcgaggaagatgccgtgttagaagcgatggatgaagctaagctttcaaaattaaaggtggacagcttgttagtgagcgagggtacagagattttttccaaaactggtttgggaattgatgactgtgcgagtctttattggagaaaatatcaatgtagagtccaagacatatgtgtggtacgtatgtgctcataa

SEQ ID NO: 5857 - DNA, 579 bp, Saccharomyces pastorianus
atgttgactggacataagatatatgttgcctcgctagataataagattacattttccaaatggacgtgtagaatacaagataacaaggtatggaaagtggttatggaattggaatcatcggcgattataagaaaaattgcagaatttaatttatgcccagttaaaaatggggaagctgacttatttgcaatggctgataaactgtatcaagatatttgttgtgtcaacgattcatacagaaacatgaagaaaagtgatttgcgtaatagaagccgagttaaggaactagttcaagaaagggaacttttggataagcttttggaagaacgtgataacaaaacgagagctattgtggtgaccctattgaatgagaaaaagaagaaaatacgagaactgaatgaggttttgcggcgtaataatattaaagtgtgtggcgatgatattccagattctgaactcattaatacggaagtggcaaaaccaatctctgagttaaactctccaggtaagaggttgaaacgaagaaggatgatggaatcccaaaatctaaatgaaaagttgggaattgcaaccagatga

SEQ ID NO: 5858 - DNA, 300 bp, Saccharomyces pastorianus
atgatatcttcaatagcagtggaggacgtagtgctcccctcggtacgatcattggtgaaaatatcattcggttgtaagattttctcaatgtcgtcatcattcaagcttggtaaagactctatacgggaagcatcgctgatgtttgactcattggtcgccccagtatttgcaatattgttcatggcgccaataatacagctgttttttcctttgaactctttgtttattcgttaccacactatcgtaatacacacctatctctttgcctttctctgccccagtgctgcagatgctcactga

SEQ ID NO: 5859 - DNA, 177 bp, Saccharomyces pastorianus
atgtgctcgacggcctcgctgtccgggcgaatttcgcggtacaacagccggcgcagcttgctgttgtactgcgcgaacacgggaccctccagcagcaggcctgcagcgggagccctcgggatgtgtttccttgtcgcggcgacgaggtggtcgcgcacgacactgggcggcaactga

SEQ ID NO: 5860 - DNA, 291 bp, Saccharomyces pastorianus
atggagaagaagaccatatttgttacgtgcggcgcaacaatcccgttctcaaagctcgtttcgtgcgtgctaagtgatggattcacccgagaattagttgagtatggatttgtgcgtcttatcattcagtttggaaggaacttcgccactcgattcgaccagctggtgcaagaacgtggggggaaagtcgagcgcacggacatccgaatcccggatgacgagttcggttgcgatggcaatgtaagcccgatactctctgatggacggaacactagaagtcattgggtatga

SEQ ID NO: 5861 - DNA, 126 bp, Saccharomyces pastorianus
atggacggaacactagaagtcattgggtatgatttttcggccaaagtgcaaaaaatcattggcgatttctcggacctggtcatatcacacgctggaacaggctcgatactggactctcttcggtag

SEQ ID NO: 5862 - DNA, 219 bp, Saccharomyces pastorianus
atgccagatttttgcagctctgatttgaattccttcattgcatgccttaaatctttgtccattagaatcttgatcatttgccatggcttcatcgtgttctcttcagtggcagaagtcccatctaaattaacaagttttttctcgatcattatgttactaacctcttctagtttctccagaacgttaggctttgagtttatttcgtccatgagtttttga

SEQ ID NO: 5863 - DNA, 453 bp, Saccharomyces pastorianus
atggcagcagtgacacccgatcgcgtccgcaaaaatacaacacagccggccatgacgacagacgcccagcgggaccgtgtcggtccggcctggcgggaaactccggggcggcatatttcgtttgcttacctgcccagcttagctatcgtgatcaagcacctgggtgatttttggctctttgtccatttgtgctgctccgcctttgtttcagcgagagagcactgccccccgacttcgggaaaatctggagtgagtagtagcggaggccctgcggcgttttcctccggaaaaacttgtgagcagaagaagcaacagcaaaattttacaacaggcgggacgagggaaagtggggaagagcaagcagaaaaaagaaaagaaaatagtgcttctcggataatctatttattatatcttttcatcgcagcatccattaccaaagacgacgtggagtaa

SEQ ID NO: 5864 - DNA, 111 bp, Saccharomyces pastorianus
atggaggcgatcattcccgcagacgtcaagttagaggacttggaagtgacgctggccaacaacgagaacgaggtgagagacaacgtgtccaagcagcatcgacgccgattg

SEQ ID NO: 5865 - DNA, 1155 bp, Saccharomyces pastorianus
  modified_base (198)..(220): a, c, g, t, unknown, or other
  modified_base (260)..(319): a, c, g, t, unknown, or other
atggtcccccctcatttattagctcaaaatcatatggcgatgatgaataacgccaataacaaacaccataaccgtaacaataataggtcaaatcataataacaacgataatggtagtaactatgcttacaacaacaaggacggaagtcgttccaacactggtaaaatgaaaaacatgaaaaatggttaccatggctannnnnnnnnnnnnnnnnnnnnnnctcacaataataacaacggtaataccaatagcaataacannnnnnnnnnnnnnnnnnnnnnnnnnnnnnnnnnnnnnnnnnnnnnnnnnnnnnnnnnnnatgctgaaaagcagcgtaaaattgaagactcttcgagattcgcggatgcggtgctggaccaatacatcgggaatatccattcgttgtgcaaagaccaacatggatgtcgtttcttgcaaaagcaattggacattctcggcagtaaagctgcagatgctatctttgaagaaaccaaagaatatactgtggaattaatgactgattcatttggtaattatttgattcaaaagctattagaggaagttaccacagaacaaagaattgcactcacgaagatatcctcgcctcattttgtcgagatttccttaaatcctcatggtacaagagcattacagaaattgattgaatgcatcaagacagatgaagaagcacagatcattgttgattctttacgtccttacactgttcaattaagtaaagacttgaatggtaaccatgttattcaaaaatgcctgcagagattgaaacccgaaaacttccaattcatttttgatgccatttgtgaaaactgtattgatattgctacccatagacacggatgttgcgttctacaacgttgtttggatcacggaactagagagcaatgtgaaactttgtgtaataaattattaacccttgttgataagttaactttggatccatttggtaattatgtggttcagtatgtaattactaaggaatctgaaaaaaaaaaatatgattacacgcacaaaattgtacatcttttgaaaccaaaagttattgaactttcaattcataaatttggatcaaatgtaattgaaaattttgaaaacaccgatagtttcggaaccaatgatttgggaaatcttaaataa

SEQ ID NO: 5866 - DNA, 1404 bp, Saccharomyces pastorianus
atgtccacaaaggatttgaaagaagaaatcgatgatgtgccatctgttgttgaccctgtcgtctcagaaacagtcaattctgctttagagcaactacaactggatgatcctgaggaagtcctcacccctcatacttttccaaatgaaagccttcaaaatccgcagttcgccaacggccctccctctcaaatgttccctcatcctcaaatgatgggtgggatgggctttatgccttattctcaaatgatgcaagttcctcataaccacaatccctttttccctccccctgatttcaacgaccctactgtaccattgaatacttcgcctttgaacggaggcgccccaccattgttattcaacagcgactctcatcctttccaaatgctctcttccaatgcagcagcagcaggacaaaccccaaacacactggctaacgatagttcgatgaagatgctacctactgcatccgctgatccgttatggattccttcaaatgtcccaggctctgcatctgtggccattgaagaaacctcggccactttgcaagaaagcttgccatccaaggatggggagtctaaatctagttcttttagaagacaaacattccacgccttgtcgccaactgatcttgttaacgccgccaataatgtaaccttgtcaaagaattttcaaaccgacatgcaaagtttctccaaggctaaaaagccatctgtaggggctaacaatactgcaaagactagaactcagtctatctcttttgataatacaccttcttcaacatcatttatttcctcagctaaaaatgtttctgataaattatcagatttcaaaattgaagaaacctccaaagaagatttaataggcaaggtaacttcgggtaaaaaggacagcagccctacgacttatgctgcagcatacccttatgggggacccttgcttcaaccaaatcctattatgcaaggtcacccacacaatatatcttcacccatgtatggaatcaggtctcctttccctaactcttatgaaatgggcgcacaattccaacctttttctccgattttgaatcccgcaaatcacccacttaactcaaactctcccattcctttgactcattcgccaatccatctaggtccagttttaaaccctaattcacaatctgtcgccttcttagatttcaaagataataatggcaagactggcactgataacgacaagatgggtccaaatgtgagaatggactcgatgaatcctacccttggaccatccatgcaaccattccacatgttgcctccccaacaaaacactccaaccaacccctccttggctatatggaaccccacctcccttcaacggaatggtcccccctcatttattagctcaaaatcatatggcgatgatgaataa

SEQ ID NO: 5867 - DNA, 498 bp, Saccharomyces pastorianus
atgacctctaagaacggtgtccatatcgaagcagattctggagccgaaacgactatggactcaaacggttttgtaatgagtttggccggcagggttcgcaaaccgaggtcgaaagtcagcaaggcgtgcgataattgcaggaaaagaaagataaaatgcaacgggaagtttccctgcgccagctgcgaaatatattcatgcgagtgtacgttcaccactcggcatggtagcagacgaataaataattttcaaaagacaaacttggagggagcgacgattcaagtgaaagaggagactgactccagttctagttctgttcccaatcctcagttgtgtgcagatggaccttgctcaatagaccagccggagaaaaattatgataattgtaaaatggacggaggcagtagtagcaactgtagtaacaaagacgacgcggagtccaataagaatgggttttatgacgatgacagaaaattccggccactctgggatctttac

SEQ ID NO: 5868 - DNA, 363 bp, Saccharomyces pastorianus
atgaaactctttaaggaagattggcaactctctcaattttggtacagtgatgaaacagccgcaatcctaggagatgccctattagaaggcgctgatgaaaacactgtcatcgcgatagtcagtgccccatcggtttacgctgcgatccaaaaaaaacctatcagtgaaattccaacagagcatatttacctgtttgaattcgacacaagatttgaattgttggctggaaaagatcacttctttttttacgactacaacaaacctctcgaatttagtgataaaatcaaaggcaaggtcgatagattactaatcgatccgccttttttgaacgaagattgccaaacgaaatgtatgtattattag

SEQ ID NO: 5869 - DNA, 147 bp, Saccharomyces pastorianus
atgtccgaagttatagccaaggtttattcaaccacaagaattacaacatttcttccagagcattctaatggtttaagtaacgaatttaggtgttacgcaaacttcgagtgtaaatcttggacatatgcttctgaaccttcctcgtga

SEQ ID NO: 5870 - DNA, 222 bp, Saccharomyces pastorianus
atgttagatctttcttgctttcacacgatatcatgtatgaacacagaaggaatattctcattatcaaacaacttatttacaacgatatttcatctacgaaggtacgtcttttcatcagacgtggcatgtcagtacaataccttcttccaaactctgttatcagatacatccaagagtataatttatacattaatcagagcgaacctgtcaaacaggtattag

SEQ ID NO: 5871 - DNA, 357 bp, Saccharomyces pastorianus
atggcatgctgcacatgggtagagatacgaggcggctcgagcttgttggtctgccgggtggttctcatagcggtgttgttgacgctgccgttacatgtattttcacaggagttggcccaggccaactccacaacgtcaagcacagctccttccgccatctcgctttctgcgcttgattcatccacgtttaccgtcgcaacatcgagcagcctaagtctatcgacgacgagcgtagcctctgtttcgttcacttctttcccacagtcctctttaccccttactattttgtcgacttcgtcttcatcgtcttcgtcatcttcgccaaccgctataacagattcgtcttcgtctagttaa

SEQ ID NO: 5872 - DNA, 312 bp, Saccharomyces pastorianus
atgtctacaactaatggttttgtgatggtgttgctgatggcgctcctctattggacaagtctccttcctgctacaaatatcatggcaaattcaaagtttggatacgtgaggcagttcgaaacgcacgatgctattttaccccaatgttacatcgtggtaagaatagatggtaaaaaatttcatgaattttcaaagttttacgattttggtaagccaaatgacgaaaacgctctcaaattaatgaatgcatgcgcgaagaaccttgttcttaaatatacaacagatatgatattagcgttgtggagaaagtga

SEQ ID NO: 5873 - DNA, 618 bp, Saccharomyces pastorianus
atgatgttgaacaaagcgaggattctcgcacggtatggaatgacccatgcgaagcaaaatactgctcgaacaacgggcttcagtattgtgactccatcgatccatcccttccattctatggcgaagatccaactacagaaacaaggtccactggatctttcttatgatgtaatcaagagtgatacgcccagaaatggcaatgtcgagaagccgggaccgcccattattatactacacggcttgttcgggaacaaattgaacaaccggagtatcggccgaaacctcaataagcgattgggaagggacgtgtacctgttggacttaagaaaccatgggtcctcgccgcacagccccgtacacaattacggcgcgatgtcagaagacgtgaagcatttcatcacaaaacacgaactgaacacccaggatgggcccattatagtgggtcactcgatgggtgggaaagtcgccatgatgctggtcctgaagaacccgcaattatgctccatgatggtctgtatagagaatgcgccagtgagtctacgccccaatatccgagttgtcgagtacttcagagcgctgcccaaaatcgagcagaccacggaagaccatcagaactta

SEQ ID NO: 5874 - DNA, 114 bp, Saccharomyces pastorianus
atgaacagtgctggccgtgtccagcgttcgtgtgtgggatcaagaggccatgccgcaatctcgcctttcacgatggcgtcttttcagcgtgcacaagcgggatgcgctgcgtga

SEQ ID NO: 5875 - DNA, 2043 bp, Saccharomyces pastorianus
atgtcatacaacgatcccaacatgaatgaccagcataacaataatgctaatggggatggtgacggtaattacccgacgtatcaagtgacacaagaccaaaatgcgttcgatgagtatggccaaccgatttatacacaagaccagttgggtgatggttattacgatcctaatgaacaattagttgatggtacacaatttcctcaaggtcaagatcccactcaaactcaaggcacttataacaacgatgctagttactataaccagcctcccaatatggtaaacccatcttctcaggatggggagaatttctcggattttagctatggtccccccactagtggttatcctaatgaccaatacacaccttcccagatgagctatcctgatcaagagggttcttcagggacctccaccccaaatatgtacgggaacggtgcagcgaatggtaatggacgctattacgaccctaatactattgagatggctttgccaaatgatccgtatccagcttggaccgcggaccctcagtctcccttacctgtcgaacaaatcgaagatatctttatagatttaacgaacaaatttggttttcaaagagactccatgagaaacatctttgaccattttatgactctattggattcgagatcttccaggatgtctccggatcaggcccttttatctttacattccgactatattggtggcgatacagccaattataaaagatggtattttgctgctcaactagatatggacgatgaaatcggtttcaggaatatgaaattgggtaagttgtcaagaaaagcaagaaaggctaagaagaagaataagaaagccatgcaaaatgctgcacctgaagatgccgaagagactttgaaccagattgaaggcgataactctttagaagctgccgattttagatggaaatcaaagatgagccaactatcccccttcgacatggctcgccaaatcgctttatttctattgtgctggggtgaggcgaatcaagtcagatttactccagaatgtctttgtttcatttacaaatgcgcttctgattatttagattctccacagtgccaacaacgtcctgaccccttgcccgaaggcgatttcttgaacagaatcattactcccttgtattgctttatcagaaaccaagtttataaaattgtggatggtcgttatgtgatgagtgaaagagatcacaacaaaaccgtcggttacgatgacgtaaaccaactgttttggtatccggagggtatagccaaaatcgttatgggagatggaactaggctgatcgatttgccagcagaagaacgttattcaaaattgggcgatatcacatgggatgatgtcttctttaaaacttataaagaaacccgttcctggttgcatctagttactaacttcaatcgtatttggatcatgcacatctcagtgtattggatgtactgtgcttataatgcaccaaccttctatactcacaactatcaacaactggtcaacaatcaacctttggcagcttataaatgggccacggcggcactaggcggtactgtggcatgcataattcaaatcgctgcgaccttatgcgaatggtcatttgttccaagaaaatgggctggtgctcaacacttatctcgaagattctggttcttatgcatcattcttggtatcaatttaggtccgattatcttcatttttgcctatgacaaggacacagtatattctaccgctgctcatgttgttggtgctgtgatgttttttcgttgccgtagcaacggttgtttttttctcggtgatgccactaggtggattattcacatcctatatgaagaaatctacaaggagttatgtggcttcacaaacttttaccgcatcttttgctccattgcatggcttggacaggtggatgtcttatttggtttgggttaccgtatttgctgcgaaatttacagagtcttatttctttttgattttatcattaagagatccaatgaggatattgtccactacttcaatgagatgtacaggtga

SEQ ID NO: 5876 - DNA, 1413 bp, Saccharomyces pastorianus
atgccactaggtggattattcacatcctatatgaagaaatctacaaggagttatgtggcttcacaaacttttaccgcatcttttgctccattgcatggcttggacaggtggatgtcttatttggtttgggttaccgtatttgctgcgaaatttacagagtcttatttctttttgattttatcattaagagatccaatgaggatattgtccactacttcaatgagatgtacaggtgaaaaatggtggggtaacaagatttgtacacttcaaccaaagattgtgttgggtttgatgattgccacagacttcatacttttcttcttggatacttacttgtggtacattgtcgtcaacaccatcttctccgtcggtaaatctttctatttgggtatttctatcttgacaccttggagaaatattttcaccagattgccaaagagaatttattctaagattttagctactaccgatatggaaataaaatacaaaccgaaagttttgatttctcaaatttggaatgccatcatcatctccatgtacagagaacacttgttggccattgatcatgtacaaaaattattatatcatcaagttccatctgaaatcgaaggtaagagaactttaagagccccaactttctttgtctctcaagatgacaacaatttcgaaactgaatttttccccagagattcagaagctgaacgtcgtatttcatttttcgcccagtctctgtccacaccgatccctgaaccactaccagttgacaatatgccaactttcactgtgttaactcctcactacgctgaaagaatattattgtctttgagagaaattattcgtgaagacgaccaattctcaagagtcactttactggaatacttgaaacaattacatcctgtagagtgggaatgttttgttaaagatacaaagattttggctgaagaaaccgctgcttatgaaaataacgaagaagaaccagaaaaggaagacgctttgaaatctcaaattgacgacttgcccttctattgtattggtttcaaatctgctgcacctgaatatacgttgcgtactagaatttgggcttctttaaggtcgcaaactatatatcgtaccatttctgggtttatgaattactcaagggctattaagctattgtaccgtgtggaaaacccagaaatagttcagatgtttggtggtaatgttgatggattggaaagggaattagaaaaaatggccagaagaaagttcaaatttttggtttctatgcaaaggttagctaagtttaaaccacatgaactagagaatgccgagtttttgttgagagcgtacccagatttgcaaattgcctacttggatgaagagccacctttgagtgaaggcgggggaaccaagaatttattctgctttaattga

SEQ ID NO: 5877 - DNA, 366 bp, Saccharomyces pastorianus
atgccattatactttgggcaaaacagtgccatcgccaacgtatcttggaatggagagaatttccaagaagtaaaatcattttgtcattggcatgaagcagagcgaaatataaaccaaaactcggtaacacttttaggggatgatgctaacttgtatttcgccaagaattatttactgggatcactggaatctacagttccaatacccgaggttcaaggccaggttgaacaaatagatacgttttttgaaacaaatgactcacagttatatgacaaatatggtgaaatgacaaataatatacagtacattacgccatcttttggccctgtgttcaaagatcgacaagctcgatccgccataaggcca

SEQ ID NO: 5878 - DNA, 345 bp, Saccharomyces pastorianus
atgtttgccgcgcatttagataaattcaaccttagaagaccgtacacatgcccaataaagcagtgcccttggaaaatattaggatttctgcaagcaacaggtttaagaagacactgtgcatctcagcatagaggagagcttgatgtagagatggagaaatcgctaaatttgagggtggaaaagtatccagggctcagttgtccattttctatttgccagaaaacatttaagaggaaggatgcctataagaggcatgtagccatggtgcataataatgccgattcgaggttcaataagcgtttgaaaaaaattatgaacagcatctccaacaataaaagtaaatag

SEQ ID NO: 5879 - DNA, 111 bp, Saccharomyces pastorianus
atgtccagtgaaagagcttgcatgctatgtgggatagttcagaccacgaacgagtttaatagagagggttgtcctaactgtcaagggactctagagatcccggtaccgagc

SEQ ID NO: 5880 - DNA, 2427 bp, Saccharomyces pastorianus
atggctgtcggtcagaaaaagtatatatgctcgttttgtttgaagccgttttcgagatccgaacacaagataaggcacgaacggtctcatgcgggcgtgaagcctttccagtgccaggtctgcaaacactcttttgttaggcgcgatctcttacagcggcacatcagaaccgttcatagatctttcctcttatccaattgtgcgtccgttgtggatagcaaggccgaggaaactgtgtctcttggcatcgatgctgccgattcggcttcaacacgggacatcaaactagaaacattggtcaattcaatgatcaaggtcaacagcgggcttattaatatccactatcacaaagtcaaagtcgagagaacagaccagcaacagcagggcttttccggtgagtgttcttcttcttcttcttctttgaaaaggaaaaaatcccccttcaaaccgaccaaaaagcagctagaaacctctattagcgcaaagattttgcaagaatattctctagagtttacaagttcaagagaaattttgaccttctttaaaatcggtgtaaagcatttggtagagaataatatctttcaggattttttctcggacttgttttcctcattgcaggacaatgaactgatcgagggattttggatccgcaggccctttggtctcataatagcgtgtctggggatggctacctcgttgaaccaggactctcaggaattatggtctatttgttgtaccaacctgtatgccagctctcctctagacgacgaacgcagcggcaatcaagagagagagcagcacgtcattttcgctctgatcctattctattctcttttggtaatgttggaaaacaatctacctgtttcaaattcgattaagaatttgaacgttttcaccatgcttcaaagtattctgaaattatttgctgtcacctccatcaccaccaccacatcctccaattaccattatctaaatgcttctggaaatgtatggttcatgttcaacctttgggccaacatcttgcgcgattcaaacaatttcaacaacgattctttgcaaatttttaactggttctcaaatcaagaattgtccttgtctaccccgctaaaggactttttagacaaagagccgccaattgtgacaactgatttagctttgaggcaaatcaacgttttggccaattatgcttacgtccacttcataataaagaaaaattttgctctcgagttgcctaatgtatttaaggtgcacgatctgctaatatacataaacgagtgcttcatagcacagcaaccgattgcgtcccgaattagtgtgaactcgccctattttgcaaccgttctgagtgccaaaatcacagaatgcaaatccaaaagtcattggttattatgggaaactatttggtttgatttcgttgataatttgactttgaaaagcggggctgggcggaacatgtggtttattgataactttcctcaagtgtccggctcctgttttctgcaccagtcctcctctcttatcgaccagactttaatcactacaagcttatccatcgtctcgatgcttctgaagccaaagtctttcagcctcgcgtctttaaactcaagaaacgtccaattgattacagacattgcgactttccaactgaagctgttttcatccgaattgattgcaagttctgacgtttctccatctcaagtatcccaactgctgatgaaccctaatactgagttgttgttgtatttctggtacgacaccatttacatacaacgccaagactgcttgtctcctagagagaacgaagagttcgaaaaggtggaaatgttcattaatgattacataataactcaccggaagaacttagtaacagattcgcattcaatcctgtttgatttctggtcagactcctttatcgcataccacatcctgttacatgctattgcgacttctctgaaagacaatattctctacccttacttgatttactctcctcatttaaatgacaaaacaaaggctttgttgactgatatatctaactggtcatgcttcgctcttcagcagcccttccgtaaaacttcaagaggttccttatccgttgctgctgatgcgagatcacaatcaatcacatcgtgcttaccactctcccccaattttacaaggagagaatcaaaccacaatagaattcttttacctcctttaaacatcaaagctattgaaccaatatcaacaagtaactacacctacttgaattcgggccctcaacatcaaagagaacaaaaaccgttaagaaacgcagacagtaacattaattctaatatccaaacaattttgattcctcctcaggtagacaaagaatcacaaaaattttccgttggaaatgaaaataaccaaagcaaaaatattgaaattattggccaaataaaataa

SEQ ID NO: 5881 - DNA, 1275 bp, Saccharomyces pastorianus
atggacatagatatcaatgcttgggaagaccaattgaacattatatactccaaattttctggcttacgagaatcagtaatttcattaactttaccgaaaaactattatgcgaaagtgttagaaaacggatatagtgaaaacccaactttcgataccagaaatcttaagtcggtaacgtatcatgcttgcatagtaacagaattgcttcattgctttttgcaaccatttttcaatatgcctacggaatcattactttcttccttctcttttgtcaaagaaagtcatccgcccaactcgttgttggactctttgacagacttttcatgcttggatatatcatcaacagtgcttggcaaaatcagttctttaattgaagaaattaacataaacgactccctaaagtcagatttcatattatactgtaacgattacacacagtctaactgcaatgagttgacttcgatactttcattcgactgcagtagttactcaactttgcaaaataatttggaaaatttcgtaaatttggttccgttcttcaagtcaatcaattctcatctgaagaatgaatcactcactgactctgattttcgattgatcattactgtggaggaaactttaaaaactttcgagcaggcaattgagtattttgcttcttctgccccattaaagttcacacataccttggtttttattataagccttgaaacttatttggcagaaattatacgaaactctacttttgccaaagcaaaaagaccttttgaaaaaatcttatcaaaaatttcaaaggttaaagaactctatctacatgatgatgtcaacttaattggcgcatttttgtacccatcaatattccaaaataaaaacctactaatcgaaatcttcgacacaatatccatcaacaaaattatcgataaagttactaaaattgcccttaaatacctgcaaaaattcatcaatataacaaatttccagtcttccaataattgtaaaaacgacggtccgaatttccgtgaaaagctcatatctgattatgaaactattttcatgaatgggtctcaagaaattgagtttttaaacaacgttaaggtgagtttaccagaatccgaagatcttttgttctcacagatcattcgggatgacctgttacgctatattaacagaattacacacgaactgcccaatgcataccacgactacttgaatgagaatgatattagttttgatggctctcactttacgaaaatcgaattacctgaagagaacatttca

SEQ ID NO: 5882 - DNA, 1023 bp, Saccharomyces pastorianus
atgaacactacattgggtgacttacacgaggatctagtcactttagaggataacgaaatcattgatacaactgagcattcaactcattcgtcttcgcaatcaactagccatggagaagaagaaaacgaagagggtggcattgaagatgtagaaactatagaaaaggacggcagcaagcgtctccttaaaaaaatccatccagaagacgaaattgtaaatgatggatctaatatatggatccccgttcaaatgctaaagaaaaatatagccaagttctggtctcacttcctcgctattgataaggaattaacgagagttaaatgcaaacattgtggggaagtgctaacaaggaatgatccaagtttaacaaagactttcagatttcatataaaatcgaagcataatattagcgcaaataagaacttttattccatgaatttcactgtgaggaattccattcttacagatagtaattctcatgcgagaaactcacttcagcccaactaccgttctttgacattcaattcaaactcaattcgtaagtgttatgacattaataaattacaaaacaatacttttctttcctttccgcgactaatagccataattatagcttccgaagggttgccactaaatttctctgagattgagtcattcaaatttttagtatcaaaatttcacaagacccctcccctgacaacaaccttgataaaagagtccgttatggaactatctaattcaatagatgagttaattagaagatctgcttcaaaaagtgatgcgtccttgcctgtaaatattcaattatccgataccaaaaactcagattttcctgtttatttacagtatacggaggatattcgagcacaactaactagtctaaacctatcctcactcgtttctttgaacttcacagaactagataagacaagatcgttattttctttacaagtgtcgataataccaataaagtttcgaaaattttaccgttatctatttttgtacgtaaaggaatggacatag

SEQ ID NO: 5883 - DNA, 195 bp, Saccharomyces pastorianus
atggcattcatttgtggtgatactgattgtagtgttccccaaactgtggtaccgttctttaactcgatggtaacttgctcattacgcagttttttcaaaaagttgaccagcttcataacctcaacttggataatctatcaacgtttcctgctaatttggcaatcctctgtttcaagactatttcaatgttcttga

SEQ ID NO: 5884 - DNA, 546 bp, Saccharomyces pastorianus
atgaaaaaaaacaggttccacggtattgtaaaggctacgagtaacaaaggcttcggctgcaaggaaactcgcatacatcgcaccggctcacacatatacacgcagggcactatggacacgctattcaactccacggagaaaaacgcccggggtataccgcaagctcctttcatcgagaacgtcaaggacatcatcaaagatccgagcgactttgagctgtgcttcggcaagttccaggaacggctctctaagtacaagttcatgcaagagtccaaaatggccacggtgaagcaattgcaaacccggatcccagacttgcagaataccctgaagatatgccagagcctgcgcaaccacagcgaggatggcgacgaggacgctgagcctatgcttctgcactaccaattgaacgacacgctcttcacaaaagcccaggtcgacatacctcaggaccgtggagacctgaaagtcgggctgtggctgggcgcggacgtgatgctggagtaccccgtcgacgaggccatcgagctgttggggatcctctag

SEQ ID NO: 5885 - DNA, 264 bp, Saccharomyces pastorianus
  modified_base (258)..(258): a, c, g, t, unknown, or other
atgaatagaagcagcagggcatttcaggtaccgaacaaggtcattactaaggaggacatcacccccctgtccagatcgcacgtgaagaagacggaccctcgcgaggtcacagatggcgatgacggtctcgccagtgcggtcgaggccacgcctatcattatcaccactgctcgttcgatagatactgccggttcattatctaagaagtccacgggagacgaaggcgcccaggagacgggcgttgaccaagacaacaancggtga

SEQ ID NO: 5886 - DNA, 477 bp, Saccharomyces pastorianus
atggttgctaagaagagaaacacccttaggggcaaagcgtctacaagaaacgctcaaagaattggagtatccggggcggaagatgtccatgaggatctaccgtatgacttggaatcggatccaaaagcctttttgcatcaaccaaaggaaaccaagaaggagaaactgctcaataagcaaaacacattcttgtcacagctgaaaggaagacccatgtctgatgtcggtgtgagcgctaattttgacggaatttccaaatcctctgttagacgtaggaaaaggaaactaagagaggaattaaaaccaaggatgcaagatctacttacttctttagagcaagaaaaggatttgcaaagcattataaaagaaacaggcgtggctgtggatggtaacaatgatatcaatatggactccaagataagaatcgtagatacaaaggaaatgcgcccgaagaagctgctgagccaggatccataa

SEQ ID NO: 5887 - DNA, 1671 bp, Saccharomyces pastorianus
atggctacaagtgttaagagaaaggcttcagatccaaacatcgctgaagggcacaagaaacgttctacacaggcaaacacaattgatagcgcgccagaaggagacaaccacaatgccccagtgaccaatgaccctctagttcccgaacaagaaaatggtgacgataacggcgcttctgatgatagagatatcaccgcgaagaacactacttcccgtcgcaacggaagagccaccgcaacagagtctcatgacattcatattgctagagaaaccgcggaattgttcaaatctaatattttcaagttgcaaattgatgaattattggagcaagtgaagttaaaacagaaacacgttttgaaagttgaaaaattcttacacaaactttatgatatcctccaagaaatccctgattgggaagaaaagacactggctgaggtagactccttcttcaaaaataagactgtttctgttccatttgttgaccccaaacctgtacctcaaactacaaattataaattcaattacaagaaaccagatatctctttgattggctcttttgctcttaaagcaggtatttatcaaccaaacggctcttctatcgacactttacttacaatgcctagtgaaatgtttgaaaagaaagatttcttaaatttcagatgcttacacaagaggagtgtttatttagcatacctaactcaccacctatcgatatccttaaagaaacataaactagattcatttttgcagatcgagtactcatattttgataatgatccacttttaccgatcctaaggatcttttgttcaaagccaacaagtgattctccatctgaatataacttttacaaaaccagattctcaatcaatttagttattggtttcccatacagagcctttgaaccaaagaaattgctacccaatagaaactgtattagaatagcacaagagagtaaagaagtgtctttaccagctactcccctttataacttttcggtgctatcttcaacaacacatgaaaactatctgaaatatctatacaagaccaagaagcaaacagaatcattcatagaagctactgtgttgggtagattatggctacaacaacgcggattttcatccaagatgtctcattctggttcattaggtggatttggtacttttgaatttaccgttttaatggctgcattattaaatggtggtggtgtcaatagcaacaagattctgcttcacggcttttcatcctaccaactatttaaaggtgtaatcaaatatttggctacaatggacttatgccacgatggccatttacaattccattctgacgcagagaactcttctagttcgttcgcttctaaatatatcgatgaaggcttccaaactccaactttatttgataaatccaccaaggttaacattcttacaaagatgaccgtttcctcttatcaaattctaaaggaatatgctggagagacattgaagatgctaaacaatgtcgtccaagaccaattctcaaatattttcttaactaacgtcagcagttttgataatttaaagtatgatctatgttacgatatacagttacctttaggtaactacaacgacttggaagcttctttggctgcgacatttggctcaatggaaagagttaaatggggatcctctagagtc

SEQ ID NO: 5888 - DNA, 780 bp, Saccharomyces pastorianus
  modified_base (689)..(753): a, c, g, t, unknown, or other
atgaaaaggctttctgaaagattaaccttgtcccaatataagggtattcaaatgaatttcgcgaatttgagaaacagcgatccaaacggtacacatttgcaattttttgtcgcctccaagaacgatccaagtggtattttatactcatcaggtattccattgcctatcgccacaagattaacagcattagctaaggtagctgtgaacttactacaaacacatggcctgaataaacaaactatcgatttgttattcacacctggattaaaagattatgattttgttattgacttgaggacgcctgtaggtttgaagtcatcgtgtggtattctttcaattactgaattcaagaatatcactaatgaccaggcgccatcccaatttccggaagatttaaatgatttgagtgaaaaaatggacccaacatatcaacttgtaaagtatttgaatttgaagtataaaaacagtttgattttatcaagtcgtaaatatataggtgtgaacggtggtgagaagggagatagaaatgttatcacagggctaataaaacctctattcaagggaccgcacaagtttagagtaaatctggactgcaacattgttcctgtggatgacgataatgttgttttaaacaaagaagccatattccatgagattgctgcatttgggaatgatatggtggtaaaatnnnnnnnnnnnnnnnnnnnnnnnnnnnnnnnnnnnnnnnnnnnnnnnnnnnnnnnnnnnnnnnnnaaaacaattttaaactggcagttttaa

SEQ ID NO: 5889 - DNA, 1266 bp, Saccharomyces pastorianus
atgtcaaatcccacagaagctgatcgtatgaacgccctcgaaagaaagaatgaaggtaatgttttcataaaagagaaacactttttaaaggccattgaaaaatacacccaggcaatcgatctcgattccacacaatctatctatttttcgaatagagcatttgctcatttcaaagtagataacttccaaagtgccttgaatgattgcgatgaagccttaaagttggatcctaagaacatcaaagcttatcatagacgtgcattatcttgcatggcactattagagtttaaaagggcaaagaaggatttgactgtgttactaaaggcgaaacccaatgacccagccggtaccaaagcactagctacatgcgatagatttatcagagaagaaagatttaggaaagccatcggaggcggcgaaggtggaactaaagtcagtctatgccagactttgaacttgagttcattcgatgccaattctgacttgaccaactacgatggtcccaaattagaatttgaacaattgcatgacgagaagaacaacttcaacggtggcgaaatcaagaatatgtcgcaagaattcatctcgcaaatgattaacgaccttttcttgaagggcaaacttcttccaaagaagtatgttgcggctattatctctcatgctgataccttatttcgtcaagaaccttctatggtagaattagagaataaatctaccccagatattaagatatcagtatgtggtgatacacatggtcaattttacgacgttttgaatttattccgcaaattcggtaaagtaggtcccaatcacacttacctgtttaacggtgattttgttgatcgtggctcttggtcctgtgaagttgcgttgttgttttactgtttgaaaatattatatccaaagaacttctttttgaatagaggaaaccatgaaagtgataatatgaacaagatttatggttttgaagatgaatgtaaatacaaatattctcaaaggatattcaacatgttttcacaaagttttgaaagtttaccattggctacgctaattaatgatgattatcttgtaatgcatggtggtctaccaagtgatccttcagcaagcttgtctgatttcaagggtattaacagatttgctcaaccaccaagagacggtgcatttatggaattattgtgggcagatcctcaagaagctaacggtatgggtccttctcaacgtggtctaggacatgcatttgggcctgatatcacagaaaggttctaa

SEQ ID NO: 5890 - DNA, 1275 bp, Saccharomyces pastorianus
atgcaacttctacattatgagcaggacagaaaatccgctgttcaaagaacaaggctatctgttcttgtaacgtctatggtagctctgttgataccctgtcatgccgtactcgtaccatggctggatgacgacccatttgaagaggctcttataggcgtcaacgatgattcgtggaataatggtatactttcaaacacgctcccgctccatccatctgaagttactgaggataatagaagtctggaccaaaaaggcaatgtgccacaatatgttatcgataatagccctttgatccacctatacagtgaagaaaaatattggccagccgatatcaaggattttgtgaaaaaattccaattgcgggaccatactggcgaaaacattatcaaagagagcctccatgacttaagtgatttacaggagtcttattcagtagaattacagaatggaacgtatgaccggataccgagcgaaggtacttacatgacaagtttggacgattttggcaaggatccgaagtggttgttgggagaacaaccggaatatggtacgggccacatcaagaaggcacccgccattctttttgttgtcgataaggggaatggctgggtagatgcattttggttttacttctacccattcaattggggtccctatataatgggttctggaccatggggtaatcacgtaggagattgggagcactctttagttagattttataaaggggaaccacggtatctttggatgagtgcccatggtggcggtactgcttataagtttgaagccattgagaaaatcaaaagactacgccgtattgatgggaaactgacaaacgaagccatcaagaaacctgtaattttcagtgcaagaggaacgcacgcgcattacgcatcagtaggtcagcattcgcacgatgttccgttcttctttatgccattgagtgattttactgacagaggcccattatgggatccttctttgaacttttatgcgtatactgttacagtgggggaaactataaccccatgtggtgttgaggaaaccgaaatggggctagactggctttctttcaagggttcttggggcgataaacaactaactgcaaaggaccctagacagaaatggtgccctttccaatggaaatacattgatggaccaagaggcccattgttcaaaaatatggaaagagtttctctatgtcagcgattcaaatggtggaatttttggaagggttgtcctgcaagaaggtatattaaaagaggcgaagtttag

SEQ ID NO: 5891 - DNA, 222 bp, Saccharomyces pastorianus
atgcattcgtttacattcccaattgctcattgcccttcttgcccttacccatcctctttttccctaccattaggccggccttttttcccaaatgggtacttgtttttacgatcttcagctggaacgtggagacttgaaacttggtgcctcttatatttaaagactactgagcttctttgtttcaccgtcccacttctaggaattttttttcttgtagtctag

SEQ ID NO: 5892 - DNA, 564 bp, Saccharomyces pastorianus
atgagtgacctttatgaagacgccgaaggaacagacatgtatttatttctcgactctttttcagaaatagatgacacaagttgcaatgaagaagaagacgatggaacaagtctctttaacggtgatagtataatgtcaaatagttgtaaaaagaatgcacggttattttctctgagctgcaatggcgcagatgaaaatgaaaatatcgttaaaagtacagtgtcgcctagtttaaagttgggggaaccaagacgaaaaagaaaacatttaagaagtgtgggcctaatggccgagaattcaaaaaattatattgccgaatcgagcataggtaccggtcaagtatatggtatgcaacttaatggcagtagtgacgcgattgaacaagagcaggacagtgtcaggccgtgtgggtgccacaaatccagagtagcaaaatgcttcaaagagctagaaactgaaagtttggaaaacggcaatgagaaaaagagcctattttatagagatattaatgagtggtgtaaaactatgaagttaataaaaccagggaaatttgcgtaccactga

SEQ ID NO: 5893 - DNA, 294 bp, Saccharomyces pastorianus
atgaatgttcaagatagaagaaggttactaggcccggctgctgccaagcctatggcatttagttacactactggtggtgaagtagagaagatttcaacgaatacgccacccaaatacagcgaaggtgaagagatactttctttacatacgggattcatcgagaattgtaacggacctgctttggtagaagccagaaactcaaagcatcagacgtcattaattaccgctgtatatggtccacgttccattagaggttctttcacatcgcagggtaatataactgggatcctctag

SEQ ID NO: 5894 - DNA, 93 bp, Saccharomyces pastorianus
atgacaccaccgacgggttcgaattccttctttaaccattcatcatcgatggaccatgatagtctaccgacgaagatagtggcaggttcttga

SEQ ID NO: 5895 - DNA, 522 bp, Saccharomyces pastorianus
atgtctttctacaaccccaatgataatgctaacaatggtggtggcttctaccaaccgtccgcacaatttgccgtgcctcaaggatctatgagtttccaaaatactgtggactcttctaataccggcaatgacaacaatctgggtgttgcccctgatcctttacgggtgggtattctacatgctctttctacaaaggggtatgcgcatgaacctccattgttggaagagattggcattaacttcgaccatattattacaaaaaccaaaatggtacttatacctatacgttttggtaatggtgtaccacaagaaattttaaatgatgcagatttggctgggcctgtcatattctttttattatttggtcttttcctattgatggctggcaaagtccatttcgggtatatctacggtgttgctttatttggtactatttctttgcacaatttatcgaaactgatgagcaataacgacacttctatccaaacgacttacaatttttcaatactgcgtctatcttag

SEQ ID NO: 5896 - DNA, 138 bp, Saccharomyces pastorianus
atggcaccaccgacggctaaggtcaaaagatgtctcacagatagctctttgcttaagttggtgttgttgatatcttcttgttgtacgtcatcaccaccacggaagcgttccgatgatgtgacatcgtttgtagtttga

SEQ ID NO: 5897 - DNA, 1008 bp, Saccharomyces pastorianus
atgagtgagagagaaaataatatcgaggacgggaagccgctatatatcgagaaccctgcactagaagcagctgctgcattcaccggcgggatggatggcgcgtcgtactgtaaccggcgttttgctgagggccttagccactcttctgagtcagcagagtcattgaaagatttccgtcctggtgaggtagcctcatcaaagtcgtccaaagtggagggaggttctaacaagaaagggaatggtggtggcgatggtgctcccctggaaagaataaaaactggtctcttttctccgaggttacgaaaacagagagaaaagatactgttgaaattcggtgtcaacaactttctcattgcatgtctctgcatctctctcatatcgatttactggggggccagttacggaacaaaccgttacttctttaaagtgaaaaatattgttgtgctacaagatgtttcatctaacagtactgtgcagtcgatgtctgccatcataccgacgttgttagcatctgttcctggcacatggcgcatatataacacagcgtcgttgaacgagaaattcggatcgacgaattccgatgagattgatgcgaaagtggtggatttgatttatgaagagaaatattggttagcactaaacgttaaaccaaatgccacagacaccctgtacaattctttaattactcaagatgtgaactcgctattcaattcttcagatttttttcaatccgtgtatgaaagtggtcgtgacccattaagtgtaagagcaactattctacccttgatgcagaaattggaggccttgtttcagcaatactacacgaaggagtatcttccctcattgatgagcaacgtcactactacttacaacgacgccagtataaacactcagaactgggcaagtgcaggtcaactgttatttgattacaacgaccatcgccccttcactgaccgtatcctaatggcccctttacaagtgacctgcaggcatgcaagcttgcactgc

SEQ ID NO: 5898 - DNA, 1065 bp, Saccharomyces pastorianus
atgatgcctaactctaaagcaccgcaacaagttgctgctcctctgaaggtaatagacgtggttgaccatgcgctaaagagtcgactcttgggtggcagcacgttccattcggggtttgatagcttggattccgtgctgaacttgcaattcagactgcattatcatgtccttgggtctagggggcttgcaaagcccgtttgtgaagttttgttgaaggattgcaaaaggctggagaagaacctaggtatgatggaggaattgaacgactatcccgaggtcgcaaggctgatcgagaaggtcctgttcaattgttttggcacacttttcttctacttaggccaattccaggaatcgcagcgctgtttgctgcattctttgaaaattcacaatagtaccgtggcacaaaatatggcactactggaacagtacgaccaatttttgattctggaaaacttatactatcgtggtctactctctcaggacgttaaaatcatgcagaacatcttttataaggaactgttggcccatgtgaatacgatccctccggagtcaaatggccttcttttcgaatacagtaatatgattgtcgccaagttgaggtttaaccaacttcaagacttggcggaaaatttcaaagctaccgttgacagtccctttatcctttttctctacattttaaaggagtttcaatcatcttctcagaaacatactgatagcgacgatatttttttgaaaatgggtcagcatgcattatcgaaggcgaagtttcctagtgcaaatgaaggcaataataaaaacttggagcattttaacatctttttacagtactatttcaaattcgcttatgtggaaaatataaaagttaatcccggttggtatagtttcatcgtctcttctatggagaggacttttcaaagtattgacatttccaaaacggcaatgattctttttcaaaatctaagcaaaaacaatagcaacgacgaaatcaagcaacaatcactaaaaagagaatcaatactaaattttgttaactttgttaaatataacgacaatactaccaactaa

SEQ ID NO: 5899 - DNA, 141 bp, Saccharomyces pastorianus
atgaacaataacgttgaggagctattacgaaatatccccctttacaacaaatatggcaaagatttcccacgagaaacagtaaccagattacagatgcctgaattcaagctaccaccattacaaccaacagggacttgttag

SEQ ID NO: 5900 - DNA, 162 bp, Saccharomyces pastorianus
atgcccagggatccattgattggtattgtgggtaagccatcttcagggaaatccaccacattaaattctttgacggacgcaggtgcggcggtaggagcatttccctttaccacgatcgagccaaatcaggcaaccggctacttgcaagttgagtgtgcttgc

SEQ ID NO: 5901 - DNA, 162 bp, Saccharomyces pastorianus
atgtccttaccagctacttttgacttgactccagaagacgcccaactattgttggctgctaacactcacttaggtgctagaaacgttcaagtatgttgcaccccattgccattatatagaataaccgttggcgcgattgaagatacgttaaggaaaaattga

SEQ ID NO: 5902 - DNA, 318 bp, Saccharomyces pastorianus
atgaagggctctagtaaagctattaagctggtgctggaacacttgcaatcgacaggaagagtacttggaactgtggaaacaaaaacttctgctggaataaacgaaaaatcagcttttagtggtggtcatcagcaactgcaggtgaagaaacctttgatcttacagtatagaagctataacccatatttggtcaggaagactttgtgtcaattttgccggagaatcaatacaaaaaccgcggccaatttaccatgggctgactttcaactaatcaaggtgagggaccctaatattttcaatcaagatcgacgccgattg

SEQ ID NO: 5903 - DNA, 1335 bp, Saccharomyces pastorianus
atggatgttcgtcaacctataagagaggccaccaataacagaaggaagccgaagtttctaagcgtttcgtttaaccaagatgattcatgtttcagtgtagccttagagaatggattccgcatcttcaatactgatccattgaccaacaagctatcgaagacgtttaaggactctttggccaatcagtccaggggtaccggaataggctatacccggatgctttatcgtacaaactacattgccctgatcggaggtggtaagagaccgaggcatgccctaaataagctaatcatttgggatgatcttttacaaaaggagacaatcactttgaagtttatgtcatccataaaggacgtcttcctttcaaggatccatatcgtagtggtgctggagaacaccatagaaatcttccaatttcaaacaaacccacaaagaatctgccccattctggatattccttccaatgggtctgtagactatgtggtctgtagcagcaaacatcttcaatcgcagagctcatcgcatgcgcagtccaagattgtcgaaatcatcgcgtttccttcaaataagtgtataggccaagtccagatagccgatctatcacaattaaagcataattctcaaaacccaacggaatctgcacttttgcctacatccatcatcaaagcccataaaaaccaaatcaagttggtcagattgaaccatcagggcaccatggtagccacatgttccgtccagggcaccctaataagagtattcagtactcacaatagcactctgatcaaagagttcagaagaggcatggacaaggcagacatttacgagatgcgttttagccccaacggtagcaaattggccgcattgtcaaataagcagacgttacatatctttcaaattttcgaaacgaacaatactgaaacaaactcgcatgaccattcgcatgataatggcacaagccatcccctaaagaattatataccgaagggtctatggagacccaaatatttggactccgtgtggtcaatatgtaatgttcatttgaaaaacccagtgtttgacgctcatcgaagtgctaatagcaataacgcggcacacgatgatgaattttataaggacaggtgcaagattggctggtgccaagataccaacaatcaagaccaggacgattcgttggtactggtgtggcaaaactcagggatatgggagaaatttgtcattttggaccaggaacaagaggaaacgtccaaaacgcattattcactaaatgaaagtttcagaaacagtgattcgaaaccaatgcacgaagcaaccagatgggaagtggttagagaatca

SEQ ID NO: 5904 - DNA, 1251 bp, Saccharomyces pastorianus
atggctaccccacatttaaattacagatataactccagaaactcaaacaaaaagattacttccagcggaaacgcggtagaagttgaccgtttcattccaaagtcagtgtcaagaaatgcatataagtccattccgatgttgaacgggtttgatataagctactcagagctttgtgagaaatctccttcacctgagcggctatcgtcccctgaattcttcaacgaactgagaaatacgggccactacgaatcaataagtgccattaacgaatattccatgtcaagcatatctagttcttccgaaagccaggttactagaagtgaaagtggaagagtttcaaggaaagatgatacgaaattaactaaagaacagaagcatcatagaaaaaatattgcccattcacttggtttccaattacctgaccgtgtctttacattcgaatccgcgaacactgaaacccaggaaaagagccagataatgaagaattgcctagcctcaagaagtagcatcggaatacaaacaacgttcgattttagtacattatcgccggatgtcgcccgttattatattgctaattcaaacttaagaacggtgtcgccgccgaaaagctttcaaagacctgtcaaaagagtcaaatcgcacattccttatcgtgtattggatgcgccttgcttgagaaatgacttctattcgaacctaatttcttggtcaagaactacaaacaacgttctagttggactgggttgttccgtgtacatttggtcagaaaacgacggggcagtgtccatcttagatcatcaatatttgagtgaaaaaagtgatttggtgacatgtgtttcattctgtccttataatagctattttatcattggcacaaaatttggtcgtattcttctttatgatcaaaaagaattcttccattccaccaaaaaggaccaaaaggaaccagtctttgtttttcaaacagaatctttcaagggaatatgctgcttagaatggtttaagccaggcgaggtatgtaagttctttattggagtagaaaacggcagtgtaagtctattcgaaatcaagaatttacatttccctttgaaaaaatggaacaaaagacaaaagtatgaggaagaaaatttgattggactaaagctccaatctacatatcaagctcaagcacaacaagtttgtggtacgtttttgaaagcttgcacaaaagtttttacatacccttatcctaacatcacgcattttttttag

SEQ ID NO: 5905 - DNA, 486 bp, Saccharomyces pastorianus
atgttttcaaattcttctcttactttacgaactttaccatcatcatcatcttctttcttttcctcttctccctctttggcggttaattcacctatatcgttattgtcgttatcatctttttttggttcagcgacatcttcatcttcaacattttcgctttcttctacctttgcttcttctgcttctgcttcttgttcttgttcttgttcttgttcttcgtcgttcttttgttcggccttggtttcttgctctacttggctgattttctctgtttctatggcctcagctgccacttcagcggagcttaaagtttcattaggtgcgctcgtggcatgctttggaatttcgccattttggatagattttgcgtttacactatcaatatcttcatcttttatagattcgtcaccaaaagtagaaggttgctcatttgccactggcgcctccggtttattttgcgcgccaggcatgtatttttgctgttga

SEQ ID NO: 5906 - DNA, 1230 bp, Saccharomyces pastorianus
atgctatccgaacacacccgtactataattaaagctactgttccagtcttggaacagcaaggcactgtcatcacgcgtactttttacaaaaatatgcttgctgaacacacagaactactcaacatttttaacagaactaatcagaaagttggtgcgcaaccaaatgccctggccaccactgttttggctgctgccaagaacattgacgacctgtccgttcttatggatcatgttaagcagattggccataaacaccgtgctttgcagatcaagcctgaacactatccaatcgtcggtgaatatttactgaaagccatcagggaggttttaggtgacgctgctacccctgaaattattagcgcttggggcgaggcttaccaggctattgctgatgtcttcatcactgttgaaaataaaatgtacgaagaagcttcatggtcaggttggaaaccgttcgaaattacggctaaagagtatgtttcctctgaagttgctcaattcactgttaaaccaaaggtcaattccggcattgacttggcaattttgccaattactccaggtcaatatattactgtaaacactcacccagttagacaggggaatcagtacgacgccttaaggcattattcactctgttctgcttctgccaaggacggtttgagatttgcagtcaagatggaagccgctagagatgattatcctgcaggcctggtctctgagtatttacacaaagacgctaaaatcggggatgaaataaagctaagtgctccagctggtgattttaccattaacagagaattgatcaaccagacgaaagttccattagtactattatcctctggtgctggtgttacaccaattttagccatgttggaagaacaggttgaatgcaacccggaaagaccagtttattggattcaatcttcttacgatgaaaagacacaagccttcaaaaagcacgttgatagactactagccagatgttcaaatgttgagaagattattgtccatactaacactcaaccgatgattgatgctaaattcttaaaggaaaggacacctgcacatgcagatgtgtacacctgtggctctttagccttcatgcaagctatgcttggacatcttagagaattggaacaccgcgacgacatgatacattacgaacctttcggtccaaagatgtcgactgtcaatgttaagagagtagacttggaaaatacgatttattaa

SEQ ID NO: 5907 - DNA, 1635 bp, Saccharomyces pastorianus
atgtcttcatcgtatgccaagcttgtgaagggggcgaccaagataaagatggctcccccaaaacaaaaatacgtggaccccattctcatgggcacttcgaacccccgtgacttccaagagattacagacgccttggacgtaaggttgtcagatacggcgtggaccattgtgtataaggcgctggttgtgatacacctaatgatccagcaaggcgaaaaagacgttacgctaaggcactattctcataacttgagcgtgttccagttaaggaaaatctcgcatacttccaaatggtcttccaacgatatgaaggcgctgcagaagtacgatgattacttgaagatccgttgtgaagagtatgggaggctacgtatggaccacgtacgagacaactattcctcgttaaaattgggcagtagagaccaacttaccatggatgaagagttggaccatgtagagtcgttagaaatccaaataaatgctttaataagaaaccgatactctactccggatctggaaaaccacttgctactgtatgcgttccaattgctagtgcaagatctgttagcgttatacaacgccctcaacgaaggggttattacactattggaatcattctttgaactatccgtcgagcatgccaagagaacgctggatctttacaaggattttgtggacatgacagagtacgtggtaagatatttgaaggtaggtaaagccgtcggtttgaaaattcccgtgatcaagcatatcaccacaaaattgattaaatctctggaagaccacttgagggaggaaacaaaaagacagagaggtgagcctcttcaacaacaacaagacaggaagccatcttctaccgttagcaatacaaccaattacgatagcaacactggtaatagatccatagcgcaacagaagctggaacagataagggaacaaaagaagcttttggagcaacaactacaacagcaacaactgctgatttctcctaccgttccgcaagatgcgcacaacccgtttggctcgcaacaacaagatgtaaataatgatactttttctttcgagccagcacaacctcaactggccgcccaaatcccacaacaaaccggtaacccattcttgatacaacaacagcaacagcaacaacagcaacagcaacagcaacagcaaccagtccaattggccggcgcacccacgatgctgcaacaagcgcaggtaccagtagcatcgaatttgaatggccagcaaactgggatgtatgcctccaatctccagtataccccaaatttcactgggtcaggatttggtggctatacaactatcgatagcaacccaatggcaaacaccatggagccgacgaaaacaggctctaacaatccgttttcgttggagaatatagtaagagaacaacaaaaacagcctaatgaatccttgaacccatttacgttgcagcaagctcagactaccccgattcttgctcaacatcaaacagttaacccatttcaagcacaaaacatgatgacagcaccaatggggacatacatgactggttcaccggctgggcaagttcagtatgcttccaccggtatacagcaacaacaagctatgcaagaccaacagactgggtatgcatga

SEQ ID NO: 5908 - DNA, 177 bp, Saccharomyces pastorianus
atggtccacgccgtatctgacaaccttacgtccaaggcgtctgtaatctcttggaagtcacgggggttcgaagtgcccatgagaatggggtccacgtatttttgttttgggggagccatctttatcttggtcgcccccttcacaagcttggcatacgatgaagacatgattcagtaa

SEQ ID NO: 5909 - DNA, 2232 bp, Saccharomyces pastorianus
atgggtagaagaagcagagctgctatgctcccaacaaatattattcttttgcagaatttggtaaaacgtgatccagagtcctatcaagaggagtttcttcaacagtatgcacactatgaatccttgagggacatatttatgctaaacggtcttaccggtggtgattctgccgccgctactaacgggctggttgtaggaaatggttcatctacaatggcagggagtaatggtaccactatcagcacttcaacctctcaacttattgaattggttggttttgtatcccaagtttgttcatgtttcccacgtgagactgcaaactttccctccgaattaaagcagcttctattggaacatcacaagtcattgccatttgaattgaaggaaaaaatcctaagttgtttaacaatgctaagaaataaaaacgtcattaccgctgaggaattgattcaaagtttgtttccattgctggtggcctactcttcccatggtaattcccttggtgccaattcacatgctaaggagttaagaaaaatcatctatacgaatttaatatccttattgagaagttgtaacactagtggtaagaaccagaaattaaacaaatccacacaagcagtttgcttcaatctgttggacaaaccagattctcagggtgtttgggctacaaaattaactagagaactttggagacgtggtatttgggatgattcaagaactgtagaaattatgacccaagccgctttacaccaggatgttaagattgccatgtcaggtgtaatgtttttcttagatgctgatagagagcgtgaagagaattttgaagaaaaatcggatgatgaagatggattcgatttggatgcgttaaagcataaaatgcaagtcaacaaaaaatcaggtagacgtggtaaaaagctagaaaatgccataaaaactgttaaaaaaaagcagaagaatggtccaggtactccacaaggttacttgaatttcagtgccatccaccttttgagagatccacaagggtttgctgaaaaactattcaaagaacatctttcgggtaaaacgaaaaacaaattcgacctcgaacaaaaaatatctttgatgcatttactatcaaggctaattggtacacataagttgattgttttgggcatttacacattcttcttaaaatatctaactccaaagcaaagggatgttactagaattatgtcagcatctgctcaagcatgtcatgaccttatcccacctgaagttataaacgtcatggttagaaaaattgccgatgagttcgtatcagatggtgtcgccaatgaagttgctgctgctggtcttaataccatcagagaaatatgttctcgtgcaccattagccatcgatgaaatcttgttgcaagatttggtagagtataagggatctaaagctaaaggtgttaatatggctgccaagtcgttgatagcgctatatagagacgttgcaccggaaatgttgaagaagagagatcgtggtaagaatgcggccatggaagttcaaggagccagaagagaaggtaaagattcaagaagaccacaatttggtgttgaaaacaatgtccaagggattgctggtattgaactactagctaaatggaaaaaagaaaatggtgacgaagatgaggatgaggatgcagaggctaactgggaagtagatgccggcggccaagacggagaagtcgatggtgaatgggtcaccatggacagtgacaaagaatacgaggtcaatatggaagatagtgacgaagaaaaggataaagctgacgaaaaagaaatagattccgacttggaactaagcggcgacgatgaagataaagaagaaaagaagaaacaagaaattatggacatggatcctgaagctgccttccgtgaaattgcttccacccgtattttgactcctgccgattttgccaagctacaagaattgcgtaatgaagacagtgttgctaaaattatgggtgttcacaagcaggacagacgtgaagagctagtcgattcaaacacactaactggtcctatcagatacaagcagtcacgtgaagaaagattacaaaaagtgctggaaggtcgtgaaggtagagataagttcggtagtagacgtggtaagcgtgacaatgttcgttccactaccaatagagaaaaggaaagaagaaagaattatgtcatgtccattcacaagagatcgacgccgattgcagct

SEQ ID NO: 5910 - DNA, 696 bp, Saccharomyces pastorianus
atgtcaaaggcagtaggtgatttaggtctagttggtttggccgtgatgggccaaaacttgatcttaaacgcagcggaccatggttttaccgtagttgcgtataatagaacacaatcgaaggtagatcggtttttagctaacgaggcaaagggaaaatcgataattggtgctacctcaattgaagatctggttgctaaattaaaaaaaccaagaaaaattatgctcttgattaaagccggtgctccggttgatatcttaataaaggagcttgtaccccatctggataagggtgacattatcattgacggtggtaactcccattttccagactcgaacaggcgctacgaagaacttactaagcaaggtatcctctttgtaggttctggtgtgtctggtggtgaagaaggtgcccgttttggtccctcgttaatgcctggtgggtccaaagaagcttggcctcacatcaagaccatctttcagtccattgctgctaagtccgatggcgagccatgctgcgaatgggtgggacctgcagggtcaggccactacgtcaagatggtacataacggtatcgagtatggtgatatgcagttgatttgtgaagcctacgatatcatgaagagactgggtggattcaccgataaggaaatcagtgaagttttcaccaagtggacgtcggtgtctgactctttctga

SEQ ID NO: 5911 - DNA, 1173 bp, Saccharomyces pastorianus
  modified_base (793)..(793): a, c, g, t, unknown, or other
  modified_base (1155)..(1155): a, c, g, t, unknown, or other
atgggtgttcattcattttgggatattgtaggcccctcggcaaggcccgtaaggttggagtccctggaggacaagaggatggcggtggatgcctccatctggatctaccagttcttgaaagctgtccgtgatcaagaggggaacgctgtgaaaaactctcacattaccgggttctttagaagaatctgcaagctgctgtactttggaatcaggcctatttttgtttttgatggtggtgtgcccgtattgaaaagagagactatacggcaaagaaaggaaaggagacagggaaaaagggacagtgcgaagtccaccgctaggaagctgctggctttgcaattgcaaaatgcctcgaacgatggtgccaagaaacccgttcaacatagtagcagtggtgtccaaattttcaagcctcatgatgaatgggacttgcccgacataccggggtttaaatacgataaagaagatacgagggtggattcaacaaagactttcgagaagctgatgagttcgatagacaacgatggattggaagacattgatttggaggcaataaaccccgcgtccgccgaatttgaagaacttcccaaggccacccagtatttgatattatcgtccttgagactcaaatcgagactaagaatggggtacacaaaagaacagttggaaacgattttcccgaacagtatggatttttcaaagttccaaatagatatggtcaaaagaaggaattttttgactcaaaggcttattcataccacgggtacccgagatggtgaagcttcttcaccanatggcgaagtggttaacagaatatctggtcaaaaagacaaagagtacaagttgactaagactgatactggatggatacttgggctgggctcaagcgatggttctgaagtgcaaaaggcaatcgtaatagacgacaaagattcaggtgcactactacaggagttgaatggtagtgttggaaacggtgacgtacttcaatgggatagttcacaggaggatacgcttaaagttttgcgagataaacctactgacacaatgacaacaccgcaaaagaaagaggacagtcgactggaggatgacgaagacgagtttgacgaaggtgagtgggaagatgtggagcttaaacataaggacgtcaaaccnaagaagattttctattaa

SEQ ID NO: 5912 - DNA, 1035 bp, Saccharomyces pastorianus
  modified_base (956)..(957): a, c, g, t, unknown, or other
  modified_base (968)..(969): a, c, g, t, unknown, or other
  modified_base (978)..(978): a, c, g, t, unknown, or other
  modified_base (1002)..(1002): a, c, g, t, unknown, or other
  modified_base (1031)..(1031): a, c, g, t, unknown, or other
atggaatccattgactctcacgattctacttctgcgaagaaaaagcatgttctggtgaacaaagagcacgagttgaactctgatggccatattaactctaactctgactcagttagtcgtgctcacgatggtgcaatcccccaattatctggcaaatacgacgccctgagacaaaacaaaagtttggtcatcaagcaaaccgaaattattggcaatgcctacaaaaaatggtacttccaggcgattttgctttttagtgcttttgtgtgtggttacggttatgggctagacggtaatatccgttacatttacactgggtatgctacatcttcctatagcgaacattccctgttatctactattaacgttatcaatgccgtagtcagtgcagcttcgcaaatcatatacgccagattatccgatgtctttggtagattatatcttttcattagtgccatcattctttatgttgttggtaccatcattcaatctcaggcttatgatgttcaaagatatgctgctggtgcgatattctataacgccggttatgttggagtcatcttaattcttttgattattctatccgatttctcctctttaaaatggagactgttataccaatttgcgcccacttggccatttattatcaacacttggattgccggtaacgtcacttccagggctaatcctatcgaaaattggtcttgggatataggtatgtgggctttcatcttccctctatcatgtattccaattgtcctgtgtatgttacacatgcaatgggtcgccagaaagacttccgaatggcatgctttgaaagatgaaaagtcttactaccaagaacacggtttcgccaagattttggtacaattgttctggaagttagatgtcataggtgtcatcctgatgggttgctcccttgggttgcatttcttggttcccattgactttggctnnggtggtgtcannagacccacnttggagatgactcaagagttgatngcggtcccatttgtaacttggttttgttnttga

SEQ ID NO: 5913 - DNA, 222 bp, Saccharomyces pastorianus
atgaggcggtctacgacgttgttggactggtcaatccgccttgtttcgttctggatatactcgtcagcgtcagcgatgggagcgggggcatccgtagtggagttagcgatgtcgttcttcacgctaaatagcagattgagcctgttgcgctcctgctggatggaggacctgatgttgcggaagctcttccagtggtcctgcaggatctccttgtggcgctga

SEQ ID NO: 5914 - DNA, 222 bp, Saccharomyces pastorianus
atggcctccagctgcgtgtctattgccttctcttccccagtctgttctgagctggtggtctgcgcgaacgtggagtacttcgagaggagagactccgtctgggtctcgagcgagatggccttgcccctgatagttatgaaagatggttgtgagctcatgtggtgcgtcgggttgcgtgcgtgcgggcttctcgattgggggccatacacgtccttattgtag

SEQ ID NO: 5915 - DNA, 1113 bp, Saccharomyces pastorianus
  modified_base (1070)..(1070): a, c, g, t, unknown, or other
atgttctatgctagtgtgattggctttacttcaggggccgagtgcagcagggtgctaacagctgcaagcttatttatatactgctgggaaaatagaatgatcagatacctaggctcacaaggacaaatgcgcatgcggacgtcgaagatgggtacacagctaaagatgtggttgatgtgttgtgtgatgtgcgtcagctgggtacgggccacacagtctatatgttcttcgcagaatacagcgacgacggacggggtacgagagcagttccaaagcaatggatggtgttcgaacaagtgttcaggccatcaatttgccatagtgcagggatatatgtgctggtgcagtgacactgagcccagcacgcagacttcggttagcgactgtagtgggacttgtcccggatacggctacgaagattgtggtagtgaggatgatagccttttcggttacatatacctgggacagacgccgttgagctcagtacaaagcgtggaaacgtcgacgatggtgagcgcatctagccttgcaagctcggatgatagcactacgagtagtagtagcacgagcactgtccccacttcatcgagcacaacaacctccagcacaagcacgagcattatctctacgccatccagcacatttacaacaagcacgacttcatcaagcacaacgccaacaagcgcgacctcgtcaagtacatccacatcgagcacgacatcatcgagcactacctcctcgagtgcgacatcatcaagcactacctcctcgagtactacttcctcaagcatcacctcctcgagcactacctcatcaagcactacctcgacaactcctacttcgacaaccacaatattatccagtataactcaatccagcacgacggagagctctgtgactacaacggcatcccccacattatccactataacgtcagtgaacctgcagacatcactgatgtattctgttataacggtgacttccgtgcaaaccaaggactcaaacgtctcggaattcacttcgaggtatttcaccacaacaaggatagtaacacagatttatccctccgncgccactgaaacagccacctcggtaacaaccactacatctgcc

SEQ ID NO: 5916 - DNA, 1767 bp, Saccharomyces pastorianus
atggtagacgattcaagctatcttactccacacgaaactgcgctggcagtggtggccacctctatgaaaaaagcgaggcttcagctggacacattggtagtaaactccatactgggcggtattctcttcagtagtggttcgttcttgttggtggcaatgcattccgatgatcctggtatagtcgcgcaaaacccaggtttagtgaattttataactggtgtaacctttgccatagggttattctacgtggtaataatgggtgctgatcttttcaactccaatattctatttttctctgtgggagttatgagaggagcggtcactatttatgatttaataatctcatggcttgttagttggttgggtaatattgctggctcacttttcgtttcatacctttttggtcatcttacaggcattagttctcaagagctctggatgaagggctcgaaacaaatcattgaacaaaaagcctcattctcattcattcaaactttcctgaagggtattgcggggaacttctttgtctctttggccatttaccttcaattaatggcaaagcctattcacgtcaagttcattgtaatgtcacttcctatcattacttttgtatccatcggatttacgcatgtggtggctgatatgtctgcatcatttattgccatgctcaacggcgcaaatgtttccgtaggtgaatacatttggaaactactgatccctgcttctttgggtaacattgttggaggtgtctttttcagtgcagttgttccattctatttacatttggtggttgtggaacgtgatagaaagagactatccttgccagaatacgaggcaagagacgaacaaccagaattgaatatggattcaagagttgtcagaataccaaaacatgaacttaaggaagaaagggatggcgacgatgacgatgatgacgacgacaccactgcaactggtggcgacattgaagacctgaatgaaaaggattccacatccttatttaataaagcacatgacggttcgagtattttgactgggaggagcctaaactcgttcttatccataccttcatcggcagtaacctcaaagaatgctaccatagagtcaaatttgggagagcccatatcattcatacctatacccaattctaccacaaattcctcgcatttacagttacggcacaaccgctcaactaaatctattaatagtcgccattctaaaaaataccatagtattagatcaccacccggtgttttccctgtaagagggatgggcgaaccgttagagagagagaaaaccattgaaaatgcaacctatgatccaaaggaagataagcattttttggaacgagctgaaactcacaactctacctttgtgaaaaataataaagagaatgataacatcctaaggttagtaaaaactgaacaaaatcgggaacagaacgagtacgaggaaaacggtggatacaatatcctggagaataaaccagggaccaggttagaaaagatgatcactcattttgcagaaggttttccttcaaaagaatcgactccaccagggctacctagaacgacacaagacactttcccttataacgcccctgcttcgtctcccgcatataccggcaacattcactcactgaaaagggtcaatagtaccactttgggcgggttgtttagggcagtttcgagagagtttcatacaagcaaagatgcagaattttcaaatgacctactcaaaaaaacttccactgctcccaaactatag

SEQ ID NO: 5917 - DNA, 333 bp, Saccharomyces pastorianus
atgacagaggaggaagatacacgtgtaaattggatgggatcatctagtgaaacaactacattgtcgtcgtcctggcttgtgtccccgattttggcaggatccatagatttatatccgtcaacttcactggcggcattgccgtcattctgtaaggcattgacgttcagagtccccgtggtcctaggcaatcgtaatccgtcaccgccgttgttattggacccagcagccttgtcactattgctggcaccattatcaagagtgtgcgtgcctggtaatgccgctatagaaggtggatcattgctcatttctttttgcttgtcgagggttttataa

SEQ ID NO: 5918 - DNA, 693 bp, Saccharomyces pastorianus
atggctaggaaaactaattcaaagaaatccacacctgcgaatacaccaaccaagcaaaaaaagaaggttgctgaaaagaaaccttccacgattattccaaaggaaagagtgactaaatctgttgatgaactaataaaatacacctccaagtcccaagaaagcgacaaggaagaagaaaagaatggtaagaaacaactgttggaagatgatgaggcggaattgaagaaagatttacaactaatcgtagtgaataataaatcatttaccggtacttctaaatccttcaaattgaaattgctgaatattaagcattctctttataagccttggaaagaagccagtttgaccgctgtcaaagattttaagattctattgatcttgaaggattctgacatcaaaaaagtatcggaagatgatttattcgataaattagactctgaaggcatcaaaattgacgaaattatctgcggtaaggatttgaaaactgtttacaaagcttacgaggctagaagtgctttcatttcccaattttctttgatcttggccgatgacagtatagttacatctttgccaaaactaatgggtgtcaaggcttacaacaaagtggaaactactccagtagcaatcagaacacaagcaaacaaggaattctcattgaccactttgacgaacaacattaagaaggatatttaa

SEQ ID NO: 5919 - DNA, 387 bp, Saccharomyces pastorianus
atgcagggcaacggcttgaaatggcagctcgtgcgccgtgacctgaagtgcggcgactatgcgcgcatgaacgcgctcgtgcaactcgtgctcggtgacctcttcgccgggcgggtacttctcgaagcagtgcacgtgcacccacggcatttcgttgttaccgtcttcgcgggcgtattcggcaaagatgccgcggaagttgcccaagaacgagatggcgctgtcgggcaggttcatgacatagtgactgattcgagctgggatcggcacttctttgaagcgcggttgctgttgttgttgctgctgctgctgggaccggtggcgtttcctggcgggaacagggatcttaatcgtgccgtcttcttcgttcttgatccattgctgtaa

SEQ ID NO: 5920 - DNA, 195 bp, Saccharomyces pastorianus
  modified_base (184)..(185): a, c, g, t, unknown, or other
atgattcggtcccatcttccctttgaagtgtcacaaaggttaaaggaactattgggagaaaaatttactgttccaaacgttgttatagattcctggtttgataaggtctacgcttttgcatgcatattcactttcatttgcatacggattgcagagcggaagctttctactaagaaaagttatnntgttgaatag

SEQ ID NO: 5921 - DNA, 729 bp, Saccharomyces pastorianus
atggacaacggacgcctacataaaagaaagaatccagattatgagcataacatagaacaaaatgtgcaaatactaacacgattagaggacgagccaaatggagaaaactcaactttcaaggcacagttgatggaaaagattgcttggtatcaattatcgctggggaaattagagacattgctacatcagtctccgcaggtaaggactttcaaaaaagtctttgagattggttttaccgtatactgtcttcataaactaataacaacttttctgaaaaaaatacctcacatcatataccactcgtttaaatatcctgatgactacgaatatgagaatttcagtgaaaacgcggcatcggaccctttagcaatcactattgcaaacattttggactttttattctttagattcaattatcaacatgatctcgactctttgacaaaacaaatatcgttgtttttgtcaatttccctttttctttgttgtctctctgcggtcagtaccaccatctcatacgttgtgactcttttgcctgtaaagttccaaattcttgcgctctttgccatgcaaaatgatgatactggttatgtacttccagaatatgttgataactctaattataaggggaaaggggggagctcctcccaccaacagaaaggaatatctttgataaagaacttggtggtatcagagctaactggtgtttacgttttggccacttcgttatga

SEQ ID NO: 5922 - DNA, 195 bp, Saccharomyces pastorianus
atggccgccctatccgggctggccactgtttcaagtttatactataattttttggttatatggcataagctacgtagcacttcaatgtcagaccccaactttagaaatataaacaacaacaataacagtaaatccctattatggacaacggacgcctacataaaagaaagaatccagattatgagcataacatag

SEQ ID NO: 5923 - DNA, 87 bp, Saccharomyces pastorianus
atagtgacaagtatcgctttgtcaattcttattgcaattctaagctatatcaatatcgggccatttcaatacacgagaaatatttaa

SEQ ID NO: 5924 - DNA, 477 bp, Saccharomyces pastorianus
atggaggcgcttattatgtttttagtgctttccgtatccggagtgttcatgtacaagtggtcctacgaacagctctggttcaaagtgggctctctatttgacatcatatcaacttcctcgaggaaagaggcctattctttgacaagcaaatgggaaaccagcccaaatggaaacgcgtccaatatgggcaatttcatcaataagttttacacagaatattccttgccctctcataaagtcctacaatctctgcgagttcttttttcattagcgatgatgacatatacggtaacgatagaaattatactatggcaaatcaaggtagctgatatggaaaaggaagtcacctttataacgacttgggtgtggcccttgacagctatcattctatcgttcatattaatcttactccagccattcttcattattatatccttattgaataagttttacaatgacaagtttgatatcgaccga

SEQ ID NO: 5925 - DNA, 213 bp, Saccharomyces pastorianus
atgaacatattactacatcttcaggcctcatataattactacagctcaagccaacgcaccatcatgagctatttagaaacacaattaaccaaaagacaggaacaaataaaggaatatcaagaaatgaacagtagtctgactaagacattcgaactgatttctgcagaaaaggaaatgtatgtaactcgttttggctcaccagcagtaagttaa

SEQ ID NO: 5926 - DNA, 498 bp, Saccharomyces pastorianus
atggaggatattgagaagataaagccgtacgttaatagtttttcgaatgcgttggatgaactgaagccagaaatcgaaaaactaacgtccaaaccgttggatgaacagctgctgctgttgtctagtgagagggctaagctagatttaactaaccgctatgcatatgtgttgagctctttgatgtttgctagtatgaaggtcttgaatgtcaaagacatgtctcccatactaaatgaactgaaaagagtaaagtcgtacatggacaaagccaagcagtatgacaataagatatcgaaatccaatgagaagtcacaagcggagaaggaaaaggctaagagcatcatttccaacgtcttggacggtaataaaaaccaattcgaaccctctataagcaagaataacttccaagggaagcatacgaaattcgaaaacgataagccggcagccaatgactctagaggatccccggtaccgactcgaattcgtatcatgtcatag

SEQ ID NO: 5927 - DNA, 858 bp, Saccharomyces pastorianus
atggtatctcctagcgatcccacgacttatatgaaatatgacgaacccataatagatttcgaagaacctcgactaaatgaaaacagtacaaatcctaaagcgcatggctccacccagcaaaataagcaacatcaaatgtattcaaataactttcagcaatcttatccgaatggcatggtcccaggatactatccgaaaatgccatacaatcctatggtaggagatccgctacttgaccaagccttttatggtgcagacgatcttttctttccttctgaagggtgtgataacaatatgttgtattcacaaaatgcaaattcatggaatgttttacctcctcaagctatgcaaccggccccaacttatgtaccccgaccatacacaccaaattatagatcaacacccgggtcagcaatgttcccattcatgcagaattcaaactcaatgcaatggaatgctgcagtctcgccatacaattcaagagcgccatctactactactaaaaactatcctccgaatacgttttatcctcaaaatgttaaccaatacccccggcgaagaactaccgggatgaagatttcgcaagggaatgcttcaacgaacagcaaacaatccataagcaaatccgcgaaaatttcaaagcctctccatattaagacaagtgcctaccagaagcaatacaaaataaacctggaaaccaagactaaaccaagtgatgaagacctcactcatccggaaaagcataaagaattttcgatgccaaccccggattcgaatactttggtaattcagccagaggagggtagagatgattcgtctgatgcagaaatgggtgagtgttctaaaaaatctacctga

SEQ ID NO: 5928 - DNA, 1188 bp, Saccharomyces pastorianus
atgaaagtccaactaaccaatagtagaaccgaggaaatcttaaaggctcgaaccgatactgaaaataacgaagtaagcaaagctactccagacgaagttgaagaatcactaagattgatcgatgatttaaaattcttcttagctacagcgccggtaaattggcaagaaaaccaaattataaggcgatattacctgaacagtgggcaaggttttgtttcttgtgtattctggaataatttatattatattacaggcacagatattgtcaaatgctgcctctatagaatgcaaaaattcgggagagatgtggttcagaagaaaaaatttgaagagggtatattttcagatttaagaaacctaaagtgtggtatagatgctactctagaacaaccaaaatctgagtttttatcatttctgttcagaaacatgtgcttgaaaacccaaaaaaagcaaaaagtatttttttggtttagtgtggcacatgataagttatttgcagatgcactggaaagagatttgaaaagggaaagtctaaatcaaccttctaccaccaagcccgtcaatgaacccgctttatcattctcatatgattcttcctctgaaaagcctctttacgatcaactgcttcagcatttagattctagaaggccgtcgagtgcagtaaaatctgacgattcgcccacaaagttagaaaatgaagattttaaggatagcggtttagtgactgtgacaaaccagccacttttagatgttgatctcatggataacacagtagcagcttcccctcaaattaatgacttcacacctcaaaagttgatcatagaacccaatagcctggaactaaatggtcttgcagaagaaccatctcacgttttatccaagaatgctgttaagggcggggacgaggaagatttccctctcgactatttccctgtatcggttgagtaccctacggaggaaaatgcgtttgacccatttcctccacaagcttttacgcccgctgcaccttccatgcctatgccatatgacaacatgggtgaaagagagtctatgcccgtgaattcccttcttaatagatacccatatcaattatctgtggcgcccactttcccagtgccagcatcttcatcaagacagcattttatgactaatcgagatttttattcatccaataacaataaagagtaa

SEQ ID NO: 5929 - DNA, 582 bp, Saccharomyces pastorianus
atgtcggaacccgaacatgctcgccaaatccccctagagggatctgctactgtgagcacgaactctaactcttataacgagaaatcaggcaactctaccgcacctggcgccgccggttataacgctccacatggtggtcctcccaaggacgaactggaagagctacaaagagaagctaacaaccagttggaaaccaaatccaagtcagatttgctgttcgtgtccatctgctgtttaatggtggctttcggtgggttcgtctttggatgggacactggtacgatttccggtttcgtcagacaaagcgactacattaggcggtttggaaccactcgtgctaacggtacaagctatctttccaacgtcaggaccggtttgttagtgtctattttcaatattggctgtgccattgggggtatagttttatctaggctcggtgatatgtatggccgtaaaatcggcctagtcattgtggtcgtcatttactccgtgggtatcgtgattcaaattgcctccatagataaatggtaccagtattcattggtaggatatcttctgtttagtgttggcgtatcacgtgtg

SEQ ID NO: 5930 - DNA, 306 bp, Saccharomyces pastorianus
atgaacgacaagatatccgttttacctcctgaacccattcagctgcttgacgaagacactacagagcctgaattcgaagttgactctcagcaggagaatgaagagccagtcattacatctgacagcaatagttatggcagccgccgaagcaccccaattactagagcaagacctagaaggagcagctctatcaatgcaaactttagtttccaaaaggcactcgtcagtgattgcaccataatgacggagaccacggaacgaagtttgccgtttggaggatcactgttcttcttgaacccaacttga

SEQ ID NO: 5931 - DNA, 2454 bp, Saccharomyces pastorianus
atggctctgccaatagagagcaaactatccatagcgactaataggatcgagaggctaaagtcaccctcatcttcgtcgacatgctcgatggacgaagtcctcattacatcgagcaacaacagcagctctatttgtttagatgcaatacgccaacttcctcgggaaggcatctccggtgcaataaatgtttcgaagggaactacttcttcgaatgctctttttcccaagcatgatctcctcgagcacatagatccccttccagctcatccaccaagctatcattcagttaatccaaacaaagaggtgcgctttccgacgtttagcgataccgcaccatgtcccaaaacctctttacctcctttgtacgcaccggcagtaaacgagttgaccttagtatcgttaaaattggagagactttctccctatgaactgtccagtaacaggagttggaagaattttcttttagagattaattcaacccagttaaatttttatcatattgatgattctttgacaaaacatattaggaactattcgagtggagaaacaaagttcgaaaaagagaacaggaacaacaccgaatcttcccatcgcagcgatcagtcgcagcatttgcatcaccgcttgtttactctgcctacgagatctgcgtcagatttcaagagatcggatcaggaacgcatctcttttagagttaaacgcgaccaatctcgttacttaaccaacgaggccctttacaagtcattcaccttacaaaacgcaagatttggtataccaacggactataccaaaaaaagctttgtgctgagaatgtcgtgtgaaaatgaacaatttttattgaagttttctcatatagatgacctgatagactggtctatgtacttgtctatcggtatatcagtatcgttggatttggaaatcagggaatatccagactaccgagtagtccctagaaggagaagaaggagaagaagaagaaggagaaggagaaggagaagaagacatactcaaagaatagaaagctcgatgggctcattttcgcaacgattcattcgttccaattctaggccagatctagttcaaagatacagtaccggatcaaatactaacaacaatgctaatcttagagaacgttcgaacactttcacaaccggtctactcgattattactgctacggcttgtcaatctcgtctgacgctttatcagcgtcttctggtgtatcgagagaagtcactgatagtaatacatttgaattatctagatcttcatctggatgctcagtctctcgttcaattgcatctagaagcctaaaatttaaaatcaagaatttttttaggcccaaaacttcttcacaaacagaaaagcttcacagacttaggtcaaactcaagtaacctgaatagtgtaattgaaacagaagaagaggatgatcggtttgaacttaatggaggaaacaatttagatcatcgtgtttcagtaaaaactgtaagtacggtggaacttccatcgtgtatagaaagagccgttcctccgcctcaaatacaaccattaaggcgcgcaattagcgaagaggtggttcctattgggttcccgaatagtgctacagtcaataaaatggcttctccgattcctgagttagtcgatactacacctactagtgagcaatcatttgtcgatggctgtgaaattatgctacaatcacaaaactcagttatgaaagaggaattacaaagtgttgtttcgactttggcagttaatgaaaagaatggggtgccgattagagcagcttctcgaagtccttcatcatatgtgtctgaaatggcctttgatggtgattttacgacggatttgtctcaaagtagtagatcagtttctctcgcagagagtaactctcaggtgaatggacacgagagtgttagtgggactgatgacgaaagtgatgacgatagtgaagatgatattaacggtagccatgttcatggtagtgacaatgattatccaagcttaatggaacagagaatgagaaatagaaggcgggcatcttctactttaagctgtttatcaaatattccgtatggaactgacgatgtaaaatggaaaccacccgttaaggaggtctcaagaagacgttatttaagagattctttgaagtgcatcaaaccatttttggatagcaatgactgcttgggtaaagttatttatatccctgttcctggtcctgctttccgaactagtaatacggttcatgtttgcagtagtcatggtttggtaaagaatcacttcttaaagggttatatcgttggacctacagagttaatagagcttaactgtaaaaacaagagcgcaattgctgggatagcaaaagacgtagaagatgaagacgaggacgatggcaatgatgatgattgcaataccggtgatggtgacgatgatgacgaggacgatgatgatgat

SEQ ID NO: 5932 - DNA, 405 bp, Saccharomyces pastorianus
  modified_base (363)..(363): a, c, g, t, unknown, or other
atgttacagatgaatccgttgtggagttgtgttattgtggttctggcagccattattggggtcactgccattcagggaccccaggaggattatagtaagtatggtgtttataggttcacttttgaggacagctctgcgttgtttagggacgtgatcgcacctttaactgacgattatgatgtatggacgaggagtaataaattcattgatattaagttacctaaagacataggtgagcaggtaaaggaaggacgtctgatcatagatgacatgaaccaactaatacaagatacgatgcctaatagacatttgatggcacatgaccaggcagtgtttgagaatttgcaggagtttttcttcaancgaggacctgcaggcatgcaagcttgcactgccgtcgtttac

SEQ ID NO: 5933 - DNA, 1581 bp, Saccharomyces pastorianus
atgactgccggttctactgcccctctcgactatgtctctttaaagaagaagtttcagccagttctttccaagcgggtggaaaacaggcacttgaaaagtttctggaatccctccaaactgcccgatggcgtcatcgagctggctggtgggatgccccatgaaaagtttttcccgatcgaggccattgacttgaaaatatcgaagacgcccttcaacgagaacccaaaatggcacgactcgttcaccacggcgcacttggacctggagtctcccggcgaattgcccatcgcccgttctttccaatacgcggaaactagaggtctgccaccgctgctgcattttaccaaagacatggttgccaggattaaccgcccagccttctccgataagacggattcaaactgggacgtgatcctgtccggtggctccaacgactccatgtataaggtcttcgagaccctctgcgatgagaccaccaccgtgatgattgaagaattcactttcaccccggcaatctccaacgtggaggccacgggcgcgacagtcgtccccatcaagataaacctcagcgtggacaggcagtcacaaggcgttgacgtcaactgcctgtccgaactgctagaaaactggtcgacggggccctacagccacctgaacaagccaagagtcctctacaccatcgccacgggccaaaaccctacggggatgtctgttccccagtggaaaagagaaaaaatttacgagttggcccagagacatgacttcctcattgtcgaggacgacccctacggctacttgtatttccccccatttgacccggaaaatccattggacaacccttaccaatccagcagcgtgaccaccgaacggtacttgaatgaattcttgatgaagtcgtttttgaccttggataccgacgctcgtgtcatccgtttagaaactttctccaagatatttgctcccggtttgcggctctcctttatcgttgctaacagattcattttagaaaaagtcctggagttggctgacatcaccacaagagctcctagtggtgcttctcaggccattgtctattccaccataagggcaatggccgagtccaacatgccctcctctcttccattaaaagagcttatgttcgagagttggatgcaatggatcatgcagatcgcttccaaatacaatcataggaaaaatgtcaccttgaaagctttgtacgaaactgaatcttaccaagccggccaattcagcgtcatggaaccctccgccggcatgtttatcatcatcaagatcaactgggcgaacctcggaaaccccgaagacataccacaacagatggataaactggacgaagtcttggtgaaaaacggtgtcaaacttgttcttggttacaaaatggccgtttctttagagtattcaatgcaacattcggatttcttgaggctaaccatcgcttatgcaaaagatgataaccagttgattgaagcctccaagagaattggtaacggtatcaaagatttttttgaaactaccgttaagaaaaaaatgacctgcaggcatgcaagctggcactgccgtcgt

SEQ ID NO: 5934 - DNA, 501 bp, Saccharomyces pastorianus
atggggacgactgtcgcgcccgtggcctccacgttggagattgccggggtgaaagtgaattcttcaatcatcacggtggtggtctcatcgcagagggtctcgaagaccttatacatggagtcgttggagccaccggacaggatcacgtcccagtttgaatccgtcttatcggagaaggctgggcggttaatcctggcaaccatgtctttggtaaaatgcagcagcggtggcagacctctagtttccgcgtattggaaagaacgggcgatgggcaattcgccgggagactccaggtccaagtgcgccgtggtgaacgagtcgtgccattttgggttctcgttgaagggcgtcttcgatattttcaagtcaatggcctcgatcgggaaaaacttttcatggggcatcccaccagccagctcgatgacgccatcgggcagtttggagggattccagaaacttttcaagtgcctgttttccacccgcttggaaagaactggctga

SEQ ID NO: 5935 - DNA, 195 bp, Saccharomyces pastorianus
atgaaggtcagttatttcattctcatattagttagtatattctccatggcacaggcatcttctctatcatcaacattcgtaacgttccccaagtctgacacagtttcagcaggaggagcaacacattatagaagatgtcaacgacagtacgtggtagcaatcggcggctacatcccacatgagtacagccggatc

SEQ ID NO: 5936 - DNA, 309 bp, Saccharomyces pastorianus
atgaatttcaattttattacaatcgttaatattttattttttctattctccttaaccgatgccaacaacaacggggaagcagtcaaactctttacttccaatggcgttgtctacagttatgctgtctacaccaaaacacttgcgcctgcaagagttgtggtcaaaacaatttcctatacaactaccagagtatatccagtcactttggcaaattcagttgtctcttctaccactgaaaaaataacagaggtttcaacaatatcaacttcggaacaatccagtgccactcaacagaggggatcctctaga

SEQ ID NO: 5937 - DNA, 486 bp, Saccharomyces pastorianus
atggacaattcagaatttctttggaaggtgttgcggatacaggagctgcgaaatgtcaacgagcattttttggtcaattgtattacagtagatacgagtaggctggtttcacaagtggacaagctgctgaaagctggagacaatggtgtcgacttcattgttcagcagctacagctattgataaaggatgtgtacagacaattacgaagaagccaaggaatggtgccggaaccttctctggcagttaatttgaatttcaccattttgaaattctcagttgcttactgggacattctattgcagaggtcattggatttgatgcctgaagttcccagaagagatgttcagtattttatcaccgaggtcacctccgtagagaggattcggtatgttgagaccaaccaaaacttcaagaccttcaaaaatcaccagggtttggttcgggacagtgtagaaatggacgagttcattgattatgaaacttaa

SEQ ID NO: 5938 - DNA, 3267 bp, Saccharomyces pastorianus
atggcggatcaagcttgtcgatcaacttcagaacctccatttccacgttataggcatgttgcttctgcatacgctacagacaaaaaccaaatatatgttatcgggggacttcacgatcaatctgtgtatggcgatacatggatactatcggcctttgacgatgccaccaagttttcaactactacgatagacataagtgagaccacaccgccaccaagagtaggtcatgccgccgtcttgtgtggtaacgcttttgttgtgtttggtggtgacacgcataaagtcaacagggaaggtctaatggatgacgatatataccttttaaatgtcaattcctataaatggacagtcccagccccggtcggaccacgtcctttgggaaggtatggtcataagatttctattattgcaacaacccaaatgaagacaaaactatacgtatttggtggccagtttgacgatacttatttcaatgacctcgcagtttatgatttgtcttcttttagaaggcccgattcacattgggatttcttgaaacccaagacctttactccaccgcctatgacgaatttcacgatgatatcatatgattcgaaactatgggtatttggtggtgacacattggaaggtttaataaacgatgtatttatgtacgacccagcaaagaatgactggtctacgattgagacgtgcggtgaaaagcctcctcctgtccaagaacatgctactgtagtttacaatgacctgatgtgtgtggtgggtgggaaagatgagcatgatgcctatttaaactccgtttattttttaaatttgaaaacccataaatggtttaaattacctacatttgctgctggaattccgcaaggtcgctccggtcattcattgacgcttttgaaaaacgataaggtgttgattatgggaggcgataaatttgactatgctagggccgaagaatccgatttacatacttccgattttgatatgcaaagaggcacgattatttacaccctagacctgacacgcataaaagacctttgcccgggcgtaatggatgttttaaacgagaccaccgtcaacagaaataatagtctcgaattgacaacgccggtgaccccaacatctcatcaaaatagaaatttaaatatggtaagttcagctgcacagtcatcctccgctccatcgcctgcaatgagaactcctttagataccgatgacgttaatagaggaatacacaatcgaggtatttctgcggagtctcagagtcaaaggcctcaggtaaactctgaatatcatccaattggggaagcaaacattttgactccgtacgttcctccagagaactcgcaaacacccgtcatgaaaacaacctcgagtaaaccctttgagacaccgattatcgagaaaacgcctgacatatctgagcccattgaaccgacaaatggacatcagcgaactatatcttcaaactatggaaataacctcactccttcaacacaaattaaaaccagctcttccccagtagtagagacactgttaagcagcaatactaaaacgcttcagaatagttatacagaagagacagaaattcatgctgataatgctagtctaatagattctacgctacctttcgagcaacagataaatggaaacaatctgcgggcgttagtgacgggaaagacagaagacgcagctaatgttgttgcggatgacgatgatgaaattggtgtagcccaaatggctagttcgccatcaaaagatcagtttaaaataaatcattacaatgaatctttggaattatcgaaaaatgatactaagatcgataaattatctgaacccgtggatatcatgataaagaaaagcgataatgtcgaatacgatagcgaagctgctaaccgtgatatcgagactgaccatcatgacatcgagacaagtagaaaaagagacgtagtggccctaattactgaggcttcctctaatgttaaaattgaaaaatcgaaaaattctacagaggcaacaaaaattcctgagagtaaagaaaatgcgcctgaagttgtcgatagagcgctatttgaaagattaagatctgaattacaaactttgaacaatataacacatgaaaaggcactggaagccgggactcacataaaggcattggaaacggagctatggcgactaaaatctcaaaatagcactggggtgtctaaagaaatagacgagctggattccgttagactacaatcgaagtgtgaactattggaggcagataaccattctttggaagacaaagttaatgagttggaagctttgataaatagcaaatttttagacatggaaaatctaaatgaaattcttcaatttcaaaatgaaagaatcaaattgctggaactagaaccgaatcacaaggagaagctagaaaaattacagatagaatacgaaaatttgaggagagaaaatgaacgtctgaaaaatgagagtaagcaacataatgaagatattattaaacaggttacaagttattcttcgcaactagctttattaattaatcattggaaagaaaacaaagttaactcttcattcctttcatcatcttcttcattgttatccgtatcgtctaaccaagaggaaaacggtgaaaaatctataaagaatgagggcgaaccctacagtgatcaaaatcgtcatcatcgtgtagtaattagcaaactaacaaacaggttggatgatctgttagaaaaaagtcaagagctgaccgtatcgaaagaaaagctatcctctgaatatcatgctttaaagatggagcacagctcactgagccaagatgtattggtgaaggaaaatgaaatcaaaaagatacaaaacgattatagagaaagcattagctcggttaataatgcaagtaaggctttagtagtctcacaaagagaattagaaaagtataaaagcttgaacaagaaattaattgacgaattggatgagttgaaattcaagcacggccatggtaatcgaaattctgaggatggtttcgaaagtaccaacgagggttctaacgatgccagtaacaataacaatatcagggagaatcaatttaacatcaagataaatgatttgaaggccgagcttttcatcacaaatcaagaaagagataacttgaagagtgaagtacttgagctgaagaagaggttactcaatttagaaaacggtactaatgacgttaacgagaacgatggcagtaatttgcttaagggggatcctctagagtacctgcag

SEQ ID NO: 5939 - DNA, 441 bp, Saccharomyces pastorianus
atggccggattcagcttcgccaagaagtttgctcataaaaaacatgggaagacaccttctgatgcatccaactctgaccaatctagagaagcttcgctgtcaactcctccgagtgagaagtttttcactaagcaggaaacgcctcaaaaaggacgtcaattctcacaaggaaatcatcctaacgccaataagacaagttcgccccctatgtttgccagaaagcagcaaggagaatcaaggatccaaccgactgcagctccaccgcaacaacgtaacgtatcaggaccatctaccactcttcataagcaagcttcaatgcagaaagaatataccgtgtggaacaggatcaaacttcagaactctccatttccacgttataggcatgttgcttctgcagactctagagatccccggtaccgagctcgaattgtatcatgtcat

SEQ ID NO: 5940 - DNA, 351 bp, Saccharomyces pastorianus
atgttcaatttccttttcccgtgtagctggttcttaattgtggtggtgttctcgaatccatcgatgtctgagggaggcggtggtggtggcggcaaagcagcctctaaaggtggctcgataggtacttcaaagtcacctggaggtggtggaggaggaggagggggaggtgggaagaatataccatcactatttggtggctgtattgaagaattgtttggttcttcaagttcatatccaggtggcggaggtggtggtggtggtaagtcttcgtgttcttcaaagccaggaggaggcggcggtattccactcatcttttttctatctcctttaacgcaaaataaaatgcagtaa

SEQ ID NO: 5941 - DNA, 696 bp, Saccharomyces pastorianus
atggctgtctctaaagtttacgctagatccgtctacgactcccgtggtaacccaaccgtcgaagtcgaacttaccaccgaaaagggtgttttcagatccatggtcccatctggtgcctccaccggtgtccacgaagccttggaaatgagagatggtgacaaatccaaatggttaggtcaaggtgtcttgaacgctgttaagaacgtcaacgatgttgtcgctccagctttcgtcaaggctaacttggatgtcaagaaccaatccgctgtcgatgacttcttgttgtctttggacggtaccgctaacaagtccaagttgggtgctaacgctatcttgggtgtttccatggccgctgctagagccgctgccgctgaaaagaacgtcccattgtaccaacatttggctgaattgtccaagtctaagacttctccatacgttttgccagttccattcttgaacgttttgaacggtggttcccacgctggtggtgctttggctttgcaagaattcatgattgctccaactggtgccaagaccttcgctgaagctttgagaatcggttccgaagtttaccacaacttgaagaagttggctaagcaaagatacggttcttccgccggtaacgtcggtgacgaaggtggtgttgctccaaacatccaaactgctgaagaagcttttgacttgattgctgacgct

SEQ ID NO: 5942 - DNA, 1305 bp, Saccharomyces pastorianus
atggacatcagcgccacttgctatgggtacatcgataacgaggaagatctggccctgattttccagggcgtttttgatgaacaattgagatgtgtcgaacgaaggccatatgaagcagagaaggctaaattggctggctcaggaaatatttttgttttcagcgaagagaaatcaggcatcaaaagatggactgatggttattcttggtctccctctagaatttcaggaaaatttctagtgtacagggagtataatagactcggccccacacaaaatcccaagctgtatgatatctgtgatcaaaacatctttgagagatccaatcgccaatacttttatactgggttgctgaaaaaaacgttctctttgaagttcggcacagatcaaaccaacagcaacaagatggaaactttccatattgttgcttattacacagaaaaggatattctccaaggaagtttgaaaagaccttcagagaattcttttttcgacagatttcaaccttcagaaaaactatcagatgctctgcaaaaagtagctgttggcaatggtagatcaaatccgtctaagaataacgaaaggggcggaagcagagcacaaagatcggggatccaacggtcattgtcgtcttcttcgtcccataatgatctcacgagaaataatactaacacctcacgaaatagttctgccagtgtgtcctcttttgttgatggcaggggtccaattcagactactcccaatttaaacaacgccactgtagatcagtaccagcagcagcaccaacaacgacaacggcaacaacaatacgccctgccaatttacaagcccatagagcaacaaaaccaactacccttcccatacacaccacactcaataggcatatataatgctggcgctcaatctgggttgagacgcacagtctcacagtccatgatctactataacgcttatagcccatgtctgccgcaaccggttccggtacctggggtagcacctccactgatgtattcttctagtaaattcaacgcaatacagtaccaaagtggcgatccgtactacccaagacaaggaccgggacacatgagttcttctgctcctattccttcaaatatgatgcctcctgtatattcaatgctaccacataattattcacaacagcaacagcaacagcaacagcaacagcaacagcaacagcatcctcagacatccccagcatccgcagcatccacaacaacagcatccgcagcatccacaacaacagcatccacagcagcgacaggattcccaggagcgaacaggttcaac

SEQ ID NO: 5943 - DNA, 177 bp, Saccharomyces pastorianus
atgagctccaatgttctccaacctcccaatccaaatgctgcccctattacaagaaccgaaaatgtggagaaaatatgcattttaccagcacttcgcatgagtgttccacctcctgtacagtatccagatgttcttgcaccaaaaaaaactcatcaaggccacaattcattcgattaa

SEQ ID NO: 5944 - DNA, 189 bp, Saccharomyces pastorianus
atgggagttaccaccatcgatgatgatgtcgcccttttccagaagtgggacaatttccttgatcaaggcgtcgactggagcaccagctttaaccaaaagcatgacctttctaggtctcttcaacttggaaatgaaatcttgaatggaagtagcaccaatgatagacttacccttggcttcgttagctaa

SEQ ID NO: 5945 - DNA, 678 bp, Saccharomyces pastorianus
  modified_base (501)..(584): a, c, g, t, unknown, or other
atgtctgttattccagaaaacgccaacgtcaccgtcttgaacaagaacgaaaagaaagccagagaattgatcggcaaattgggcttgaagcaaatcccaggtatcatcagagtcactttcagaaagaaggacaaccaaatctatgctatcgaaaagccagaggtcttcagatccgtcggtggtaactacgtcgttttcggcgaagccaaggtcgacaacttcactcaaaagctagctgctgcccaacaacaagctcaagctagtggtatcatgccatccaacgaagatgttgctaccaagtctccagaagacattcaagctgacatgcaagctgctgctgaaggcagtgtcaacgctgctttggaagaagaagatgcaggtgaggtcgacgccggcgacttgaacaaggacgatatcgaattggttgttcaacaaactaacgtctcccaaaacgaagccatcaaagctttgaaagcccacaacggtgatttagtcaacgcnnnnnnnnnnnnnnnnnnnnnnnnnnnnnnnnnnnnnnnnnnnnnnnnnnnnnnnnnnnnnnnnnnnnnnnnnnnnnnnnnnnnaggggtacgtagttattctaatgcaaatcactttctttgtccttctcggggagtgcaggctgtgcatcttgcttggcctgcttggcttcgatga

SEQ ID NO: 5946 - DNA, 309 bp, Saccharomyces pastorianus
atggatatcggatcacaagcaataggaaccaggaatcctcagaccagcaaagtcagtgtggggaatgaaagcccttctgccaacaacgagagcaacacaaataaagatataaatagaaatagaaacaaaaataaaaatagaaacagaaacagaaacagaaacagagatagcaagaaagaagataagcctaattctataacggggaatcaggaaggacaaaggggaaaactgcaaacgaaaaaccgaaaacgaaaagacaacaatgaaccaataaaagaatacttagaaacccaaggaatgacgagataa

SEQ ID NO: 5947 - DNA, 5028 bp, Saccharomyces pastorianus
atggaggacagaatatcagaatacctgcacgtgccatccgaatcgcttcgaggcgtgaactattctatattaaggaccctatgcaagaaaatagacaaatttgaactttctgaagaagaagtaacaaggctcaatgttttaattgatgagatcaagtcgcagtactatacaaggatatctaaacttaacgaaatactggctaagtcgtctgaggagaaaaatgtatccaacaaagaatcggatcgtttgcatagcctattaaaaaatgaacgttcaaaatgtgcgcggaaaatagatgcgttaaacaagcaattgaatgcgagcaaagacactattaaaaaactagatgatgagagaggtatgaaagaggaagcggcagtttcccaagctgaacgtgaaaatgatgatccagcaaggaacgctttaagcaatgaaaataagctactacgaagaaagctgttggagatggaaaacatactacaaacatgcaaatctaatactctgtcattgaaattgaagtatgaaactgtatcacaagaaaaggacctaatactacagaacaaaaagtggattcaagagcaattgtcttttcgtgacgagaaaacgctagttgatgaagttacaaaaacagttcatgtacagaatctcgaagaaaaattaaaccgaattcaaaatgattatgaatctgtttctaccaataatctgtttctagtagctcaaaataaacaattatctcattcaatgggagagaaaatattggagattaaaaacctaaaagataccgtaaatatagaaaaagctgagttctccaaagaaatgactttacagaaaaatatgaacgacttgctccgctcgcaattgacctcgcttgaaagaaattactccttgagaacaatagaaaaagataatgatgatccttgcaaaaatcccgaacattccaatgtgatagatgaactaatagataccaaattaaaactagaaaagtcaaagtatcaatgccagcggttacaggatatagttgcagattgcattgaaaaaaatggagccgcttttgataatacacatattgccgacccctccgttagtggcttagtttctgatatcaaaaatttgaaaagacaattgataaaagaaagaaatcaaaaattccagttacaaaaccaaatggagagttttatcatggaattagaacgcaaaaccccagaactgatctcatttaaaaagagaacagaattattggaacatgaactcaaacattccacggatcttttagaaacgatatctcttgccaaacggaaggatgaaaaggaactaatctcattaagacagaaacttaacaattgtgagtcaaatatacatttgctggtgaaacagcgcctggatttggcccgtcaagtgaaacttcttcttctgaatatatctgccgtccagaaatcggcgtcgccactatcgaatgatgaactaatatcattgaaaaaactattagaatcacaagatgtaccaaacgaaaaggattcacagacaatcattactgaacggttagtcgaattcaataacactaatgagctccaagaaaagaatatggaactcttaaattgcgttcgtgttttggctgataaattagaaaattatgagggaaagcaagataaaagtctagccaagctagaaaatcgaaccatcaaagaagcaaaggacgcaataattgaactggagcatgtaaactcaacattggaatcacgtataaatattttatcaagggaacgcgattcatacaaattattaacctcagccaatggtaacaaggatcatgcagacgctgccaaaataacagaagcagttcatttgaagataattaaagcacttgaagcggagctttcacttacaaaaatagaaaactccgctgttgttcaaaagttaaacaaagagcttttaccctgtaaaaaattacaatccgatggacaaatatcattacaagaactttcaaattttaagatcttagctattgagaaggaaaatcttttacagacaagaatagatgacttgaagactaaattggaaaaacaaagatcgagcggaccatcaagtacacagggcagcataggtagtgaggaaacaaaagtttcacagtataaaaacaaaattgaatctttgatgtgcgaaatatctaatttaacgaaaaagactattgaccttggatgtatgaaggaatctttaactagggatttggaaagatgttgtaaagagaaaatgcaattacaaatgaagctcactaaatcagaaacaagtcaaaatgaacaaaaactcaaatctgactctaagcaagtccaatatgatacaataataaaggaattggaaaaatcctgtcaagaactaaataatagactactcttaaaggtgcaagaaatagaaacactacaaacatccaaaaactcacagcttaaatgggctcaaaataccattgatgagacagaaaagaatatgaaactcgtttccgcagatttaactgaaaagaaaacaacaattagaaaactctcatcagaaatgaaggacattgagaatgaattgcaaaagaccaaactccagtataaattcctgaataacattagtgatgttaacacactagaaatggctttaaaaaaagaattggaacgtactcaaattgagttgaaggatgcccattctcagattgaaacttacgaggaaataatctcaacagacgaaaatgcactcaaagaattgaacgatcaactaacgaaaacaaaagaagaattaagagtcaagactcaatcgctcgataaagaaaaaaatgcaagggaagaagaatcatctttcttgcgcagagaacttgatgaatttaggggattacaacccaaactaaaagaaggcgctttacgtcttgttcaacaatcggaaaagctaagcaatcaaacacaaaaaatccaagcaatgaataaaaaaatcgataaaatgaccacgattgtccaggtgtatcaaaaagaacagacatctcaacatcaatcggagctaaaggcaaatgaagacttatccgcactagttttgcgtcttgaaaacgaagtgattgattaccaaacggagctgaaaaaaaccaaatcgtcattgcacagcactcaagaattgctagataaacatgaaaggaagtggatggaagagaaggctgattacgaaagagaattgatatctaatatagaacaaacagaatcattacgtgttgaaaattcagtgttagtcgaaaatatggatgatggtactggcgaaagtaacggtgataaagattatttaaggctagtttcattattttccagtctgcgtcatgaaaggaatactctggaaacaaaactaactacctgtaagagagatttagcacttgcaaagcaaaagaatgccaatttggaaaagaccgtaaatgatatgcagaaaactcaccccatatcgcgcaaggatgtccaatgttctaccgaaattattgacgagtttgaggatattatgaaagaaataactcaagttaacatcctaaaggaaaacaacaccattttgcagaagagccttgagagagttacagaaagaaatgaagcaatttataaagagtacactaatttgcaacatgaactatctcgactacaaggtgaacttgtgcaaacgaaagagcaaacttctgttaatgctaataaggttttagtctatgaaagtgaaattgaacaatggaaacagaggtttcacagcttatctcaacaacagaaagaggcacacaaagaagaaactgaaaagctatttaatgagattagcgacatgaaggctaaacttctcaatgcccagaatgcaaatgctgacttgaatgataaattcaataggttaaagaaacaagcgcacgaaaagttggacgcttccaagaaacaacaaactgccttgactaacgaacttgatgaattaaaagatatgagaaatgaattggaagagagtttgcgtagtgaagaatctaaagtccttgaactggaagcgaaacttaagaagcatggagtacaagcagaaggcgtttcaaaaaatcaagaagacgatacttccaatccattaatcgaagaaattcaattacttaagagggaacttcaagtgtttaaagaaaccagtgactcttctgacattattgagagaatgaaagaaattatggaggcagagaaggccaagaccattgaagaaaaggcaactgagtttgaaaggaaactagaagaaattacgggaaaaaatagcggaggaaaggtagacaacggtgaaaatattgaggaactgaagaaacaatggctcaagcaatatgaagaagaaacagtgagaagaattaaagaagcggaagagaacttaaagaaaagaatcaggttaccaagcgaagaaagaattcaaaaaatcattagcaagcgtaaggaagaattggaacaagagttccaaaggaagttagaagagaattcaggttgctttacattgtctagcaacaaaaaggaaaacgaaataagtgttgaagacgaactatggaatagcccctcgaaggggaattcggagaagccttctattgttaccaaattaataaagcagaaaaactctatacttcaagaacagctaaagaatgccaaaaatgggttaatctctaatgacagtcgcccagctagttcaaataaagaaaatgacatcccagataacacagcagctgataacaaggtcccttcagcttttaatttcggaaagcctttattcccttctaatatatcatctttccgaagctttaaaaatccgttcacccctgccgctactagttttaacacaggtgtttcattaccggcatttagtatccaacctgcctttgcagtcgatgcaactgttgatacagcgggcccaaatgacgacaacaacaatgaggcaaaaataatagaaattgaaaacaattcattaaaacgaccaatcgacggtgaagtaccctctgataccgattccaaaaagataaaggaaagctcagacaatgactaa

SEQ ID NO: 5948 - DNA, 297 bp, Saccharomyces pastorianus
atgccaagtttagaacaacaagatattgctgataacttaatggagcgccagaaacttccttgggagaaactaaatggcagtgaaataaaagctgcttggcatatatcttatggtgaatggggacccagaagagcagtttatagagggggtgatgttgagcttattactaaaggtgtcttttgggggttaggcatctcattgggccttttcagtttgataaaaatattggctaaccctgatactccaaagacgatgaacagagaatggcaattgaagtttgatgaatatttaaaataa

SEQ ID NO: 5949 - DNA, 1248 bp, Saccharomyces pastorianus
atggctgagaagtcgatattcaacgagcctgatgtggatttccatctcaagttgaatcagcaactatttcatattccttacgaactactatccaaatgcgttaaacatactcaagcaactatatataaagaaaccaaatttttacacgaacatatcagtacgctgaacgaaatctttgagcacaatgatgtcgagcatgatagattagcactcgcaaaaataaacgaactgatcagaaaaattgaccatatggaaaagttcttgaatattcaagctaaatcacattgcgaaattctaaatagaatcaagaaaagattggagtttttccatgaactgaaagatatcaaatcccgaaacaatgagattccacttaatgaaaataacccagatatgagaaataaactgattcggtggtatcaaagttacacaaacattttgattggcgactacttaactaggaataacccgatcaaatataattcagagacaaatgaacactggaattcaggggtagtgttcttgaaacaaacccaattggaggatctcatcgattatgatgttctcttggaggccaataagatttccacatcattattaaacgaccacgatctcttacccctaatttcatgggtaaatgaaaataaaaagactttgaccaaaacatcttctatgctagaattccaagcaagactacaagaatacattgaactattgaaagctggcaactatatcgatgctatcatttgtttccagaaataccttttaccttttatagagagtaatttcacggatttaaaattagcatctggacttctgatatttatcaagtattgcaacaagcaaaaaccaaattcatcttctgggtctagacttgatactgaagatatcaaatcaaaaaacctaccaatgaataaagaccaaatatttcaacatttcttccataaatgtctaccgagggatacttctgacccagagacgaatacaactgattacgataagagctcgttgataagttcacataatggtgactttgaaaggtacctgaagttattagacgatgaacgatggtcagtattgaacaatttattcttgaaagatttctattcaatgtatggaatatcacaaaatgacccattgttgatatatttgtcactaggtatatcgtccttaaagacgagggactgtttaaatccttcagacgatgaagagagaaatgaaggaacagaaatcacgggtacaccagaaaat

SEQ ID NO: 5950 - DNA, 267 bp, Saccharomyces pastorianus
atgaatttattcggaattatagctttaaaagtagtctgtggaaattcctctatcctcttcaaccacccccatcgttggggaaagctaggcggttcatcgctaggttcaacagggccattccaaactctttcaaaaaacttttgtatggggtttttcctctttagtaataaccatttgggcttgctgccttcgccttcctcttcgttaggcacgttttccacgtcagcgtttgaaaggtcccgcaatggtatggactcagttctctga

SEQ ID NO: 5951 - DNA, 219 bp, Saccharomyces pastorianus
atgatatacctattacgccctcacgtgataacgatccgcacaacgtcgaagaacccgcacccgcataccgtgggaccttcaggagaaggtcttctgtatttgaaaacatttcaagaacaattccctgggctcatgcaactgactttcaaaggccaacagttaatactgtggatgacagatcacctgaaacggacagtgaaagtgagatggatagtgtga

SEQ ID NO: 5952 - DNA, 579 bp, Saccharomyces pastorianus
  modified_base (498)..(498): a, c, g, t, unknown, or other
atggatggtgactctgacattgatgtctctgggttaagagatggactgcataaggtggcaaacgaagaaacagataccaccgccgccaacgatgatgtgccatatggcgctacttgccgtatatgtcgtggagacgctaccgacgataaccctctttttcacccttgcaaatgcaagggctccattaaatacatgcatgagtcctgtttgctggaatgggtagcttcgaaaaatatagacatttccaaacctggcgcggatgtgaaatgtgacatttgtcactatcccattcaattcaaaacaatctatgcagagaacatgcccgagaagatacccttttccttactattatccaagagtattttcacattttttgagaaatctcgtttggctataactattgggctggctgctgtattatacataattggtgttcctttggtatggaacatgtttggtaaattatacactatgatgctagacggatcttcgccttancctggtgacttaatgaagagtttaatatacggttacgatcggactctagaggatccccggtacgagctcgattcgtatcat

SEQ ID NO: 5953 - DNA, 117 bp, Saccharomyces pastorianus
atgtcacatttcacatccgcgccaggtttggaaatgtctatatttttcgaagctacccattccagcaaacaggactcatgcatgtatttaatggagcccttgcatttgcaagggtga

SEQ ID NO: 5954 - DNA, 90 bp, Saccharomyces pastorianus
atgtcagagtcaccatccatgtctttcacacttctagtttccttgattcaattggtagcggacgcagtcttgacccggaagatgtactaa

SEQ ID NO: 5955 - DNA, 684 bp, Saccharomyces pastorianus
atggaatggaatggaagaaaaaaaaaaaatcaaacatgtgtatatacatatatcaacatcgcaggcagtactcacttgcccatgttccgcctcttgatgtcattcagcagcttcagcgacttgatttcgttgatgtcgttgagcttcgccttccagaactcgttctccttgttcagctgcgcgatgcggtcgcgcagcttgttgatctgcacgttcaggccatgcagcttgttcaggttctcgaagttcctctgcttcttgcgcacgcggaaccgctgcgacgcctccgtgttcttccttcttcgctcctgcttgatcttgtccagctcgttcacgggcgcctcttcctcttcctcttcctcttcctcttcctgtgccgtggccgttgccgttgccgccttcccctttttcggctcgcgcagcttcttgaattgcgacacgtcttggccgctgtttatcatgcctatgagctcctccgcgttgccactgctaaccagtagcaatgatagtagacgcgagcccagctccgagtcgttcgagatcaggctctgtagatgttcggatagattgttcacgttcatgttcacgttcatgtccatgtccatgttcatgctcatctctgcgtgcggtgccggttcaagggcggtccttgtctacaagacaacaatggcactcgtcccgtaa

SEQ ID NO: 5956 - DNA, 840 bp, Saccharomyces pastorianus
atgtcttttgtaataattttcacaaatccatatacacataccatgcaaaaaccaattatactcgcttatttggtcctctcgctactgttcaactcagctttgggttatccaactggacttgttccaagaggatcctcagagggaactaattgtaattctatcgttaatggctgtcccagtttagattttaactggcacatgaaccaacaaaatattatgcaatatactttggatgtgacttctgtttcttgggttcaagacaacacctatcaaatccaaattcatgtcaagggtaaagaaaacattgacctaaaatacttatggtcattgaaggtcattggtattactggtccacaaggtactgttcaattatacggtgttaatgagaacacttacataattgacaacccaactgatttcacagctactttcgaagtttacgctactcaagatgttaacagttgtgaagtctggatgcctaatttccaaattcagttcgaatatttgcaaggtaatgcagctcagtatgcaagcacttggaaatggggtactacatctttcgatttgtccactggttgtaacaactatgacaatcaaggtcattcgcaaacagacttccctggtttctactggaacatagactgtgacaacaactgtggtggttcaaaaccatctactactaaatgtaccaaaaaccataccccagaatctagcacatcttcaccaagcactacatcaaccgctgcttccagtaccgaatcttcatctactccagctgcaactccatctaccgaaacctctacatccactacttcaacttcaactacatgcacagataaa

SEQ ID NO: 5957 - DNA, 477 bp, Saccharomyces pastorianus
atgatacaacgaataattttttttttgcactcattggttattaatattgtttttagaaatatactgctatgtaataatcgtattctattatttttttatagattaagaatgtttatgtgctatatatatatatattacagatgggtttcctttgtgttaattgttacatttttatcattgacttcattcatttctatagtttggttgtcagccgcacttggttcctcttttaggttcgaattgtcgcctttgagttctgctaatgaatgctcattgggggacctttccgttcctatagatgtttcgtttgctacgacacttgttgaatcttgtctgggttcgtgtatagagctcaagggtggggcattcatttgtgtactggagttcacgttcgcaatggaattaactcttggcgaagacgtattagatgctgggtgtttattcatatgcgaaggtgtaacgttcggtgaagagtga

SEQ ID NO: 5958 - DNA, 318 bp, Saccharomyces pastorianus
atgtctttagtaagatttccattaagaaccaggctaataagaagtcttagtcccatgagattaacggttagaaccgtcacatcgacgagtgcaggtgctaaggcaaagtcaagatatgataaaacgataatcaagccaatacttttagtaatggtgtttggatcgatattaaactcagtcatagttgaaaagagaaaagctcaagatatggaaaggaagtaccacttaaaggccaacaaattgaaagagttgatacaaagggttaatgacaataacggaaaagtggattttgacgcagatgacgataagatttggtaa

SEQ ID NO: 5959 - DNA, 234 bp, Saccharomyces pastorianus
atgataggccacgttgagccacttgtacagcttcagccacgccatctggctcctaccacgagaaccattgaacacaaagtgggtgatcttcctccacacgtacccagccagcacggtcaccacatacaaggtgcgtttcctgcatcggaaagctacaccgctcagcgcagacccgtacgtgtggctggaaccgtgctgcgacaagaaccttgtcgcacacacaaacaccagtga

SEQ ID NO: 5960 - DNA, 186 bp, Saccharomyces pastorianus
atgtcctttatgtcattactcgaatcttctatcacgccatccttcttttcagcaagcttattgttatccttctccacagaattaatagctatatcgggagtgtttgtctcgttattcgaaacagagctctctgtttcgccaaacaagttatcgctatcattatggtcttggccgaacaaaacctga

SEQ ID NO: 5961 - DNA, 192 bp, Saccharomyces pastorianus
atgtacgtgtgtgtgcgtgtgtacacatacgcgtgtgtatacgggcgagggcgcgcgccggtgcatcgttgcgccgatatgtgtagagcaacgtcgtactcaacgccttcttcgctgcgctacaccccttttccccttctccttttctttgttcttggtatctatcgaaatgcacctgctcgccataattaa

SEQ ID NO: 5962 - DNA, 468 bp, Saccharomyces pastorianus
atgagtataattagttcttggttacttgtctctattatttgcttaactacttctattgtaacaaaattgcaagctgctggagttactacccatctattttatttaacaagaggtgctcccttaagtttaaaggaaaactattatccttggttgaaagctggttctttctttccggatgctttgtactcatgtgcaccttcaaataaggattggtctgattttgcagaattcactcattggcccaatttcttaatgattgcagtatcttattggcagcagaagtatggtcagaactatcgacttcggggatctcagggctcactcgcactaaagtcatttttaataggggtattcactcatcagatagttgatgtttcctggcattcgttagttaccgattatagaatgcacgggctaatccgagttctcagcgaaacagatgtgatggagatattgaactgttcatag

SEQ ID NO: 5963 - DNA, 228 bp, Saccharomyces pastorianus
atgatgggctcgacgactgcgacttgtgccaagaatgcgaccgggaaacaaacttcctcacttgaaaccatcactgtttttttcttggtctttctatatataaacaaaagcctctgtaaagtttttttttctcgcatatcaaacgcgcctatcttagacataacaacaacagccagcggccgatgcctgcgtaatacatatgaacaagtacttccagaagagcattga

SEQ ID NO: 5964 - DNA, 615 bp, Saccharomyces pastorianus
atggttaagataaatgagaaagcggccccttctgggtctagttctcaaacagggagctcgaagcgaactcaatcgggtttagctcttgatggtgatagcaactaccaaaccccgggcaattcaggtgacgaggtcagcaggagtgcttctggttcaggccagttcacttttagagcagacccagatgcttcccaaaatgacaacaagaatgtaagatttacgagtaatgcagatgatgcagaaaatgacgcgtcctccaaatttacagaaactagctctaattccaggagcaatgatgagcaagagggcgacggagataaacctcgtcgtcgcaaaaggaaggctaaggtatcctttacacatttgagaaacaacggtgaggatggagacgatgagactttcatcaaaaagataataaacaatttaactggcaatcaggggggcttagtccctgggctagcgccagtatcgtcagacagagaaaataataaagatgatgaaaactcccaaaaagaagatatccccttatctgacctaaccgatgcgtccaaaattgtgaacgtgcacgacggtgaccataagaaaactgagagcaggagactagaaaatgcttga

SEQ ID NO: 5965 - DNA, 423 bp, Saccharomyces pastorianus
atgtggaaacagagcgtgtacagatggaccagagtgagagcaggtgctggtagtgcttgcagtggccgattgagtgcaatttggctcgggaggaaaaacctgtccacggcaacattttctttgccgaaagtgagaaatataggtatcattgcccacatcgatgctggaaagactacaacgacagagaggatgctttattatgccggagtcttgaaacacattggggatgtggacactggcgacaccatgacagattttttggagcaagaaagatcacgaggtatcaccattcaaagtgctgcaatttcattcccctggagagattcctttacagtgaatctgattgatacgccaggccacatagactttacattcgaagtgatcagggcgttgaaggttattgattcatgcggggatcctcta

SEQ ID NO: 5966 - DNA, 594 bp, Saccharomyces pastorianus
atggatcggatgggggcaagtttcaatcatacagtcaaagacttgatgaggaaatttatgcaaggcacaactactaaaccagtattgataaattttccctactatagaaaaccgctaactggcagcgattatgttttccaaggtgtcatcgatgttataaatggaaaaagcttaacatggaaccaggaggatcccgacgcgattgttatcaatgacctggatagtgattctcttgagcaatacaaccgttgtagagaatcaatgatagagactttgactgaatatgacgaagaattggtccaacattttctggaagatgcagaaggcgattattcaaaagtatctgcacaatcgttaaatgcctctataagaaaattaagtgtgcagaataaggtcgtgcccatattatgtggtgcctcattcaaaaatattggtgtacaacctttactggacgctatcgtaactaccttccttcacccatcgaagctcagtgcctcagtaacgatgaatattccagtaagtacgatcctaatggtgtctagtaatacacaaaatattgatgcgttgcatacagtcatacagtcgcagctgtcg

SEQ ID NO: 5967 - DNA, 1716 bp, Saccharomyces pastorianus
atggtattcatagctgtctctatctctgttacagccttccccgtcttatgtcgtattttgaacgaattgcgtttaatcaaggatagagcagggattgttgttcttgcggcaggtataattaacgatatagttggttggattctactagcattgagtattattctttcaagttcagaagggagtccggttaatacagtttacattctgcttatcatattagcgtggtttttaatatatttttttcctttaaagtacttgctaagacggattttaataaaaactcatgaattagacagaagtaaaccctcaccgctagcgacaatgtgcatcctattcatcatgtttatttctgcttatttcacagatataattggagttcaccccatttttggtgccttcatcgccggtctggttgtgcctagagatgatcattatgttgttaaactgacagaaagaatggaagacattccaaatatcgtgttcattccgatttattttgctgttgccggtttgaacgttgatctgactttgctaaaccaaggtagagactgggcttatgtttttgcaacaattggtattgcgatatccactaaacttgtttctggtaccctcatggctaaacttagtggcttgttctggagagaatctgccgctgctggtgttttgatgtcctgtaaaggtatcgttgaaattgttgtcttaactgttggtttgaatgcaggcattatcagtaaaaaagtatttggtatgtttgttctaatggctttagtttctacttttgttactactcctatgacgctgcttgtttatccagattcttaccgagaagaagttcgtaaatacttggcgaaatctgagaaaggtgacgggacagtgagtgtatctaactctgaaagtgttaataaatctgaatttaatacgcaattgaattcattgacagatgttagtaaatatagcattggtgaattggtcactgtaataaatactacagaagcgatttctccgtctttgaaattattgaattacttatctttgggatcttcccctaaagccagaagtagcaggcagaaaaatgagacttccttgagcagaactacaactgctactgattctacatcaaaatcgaacacatttaaaatcaaaaaaatggttcacatttggtctaagagcattgacgatatagacacaaacttaagtgttatagatgaaaattcaggggcatttgaagggatcacagccttaaaagccatccacttacggttgctcactgaacgcactactgatctgttgcaatcatcttccttatataatgacgatccgcattttactgcgaataccgattcattattgcaaattttcgatattttctcacatctaagcaacatgccattttcgagtgaagtaatattctctaccacacgggaaaaagcagcgaatattgcaactataaaaatgaatcctacggatttggtattattgcccttgaagggcgcctcatatgagtatagaggaagcccagttcttactgacgaaaaatatgtaaactttgatcatatttattctcatcttttaggtttgaacgagctatcgtctgcctttttcaaatctattttccagacactcaaagccaattttgctattcaaatttcaaatacttatggcagattgaacgctgatcgtttcaagaaaaagcggtttagtttgttgcttgcaaaa

SEQ ID NO: 5968 - DNA, 297 bp, Saccharomyces pastorianus
atggcaaacactattgggggcgttttatcaggtgtgaacccgttccattacaacgctagttcaccattaacgctattcctctttcaggcatgccttatattattggtgtgcaatttggtccatatccccttttcgatgatgaggcagcctaaggttatctctgaagtcatagcaggtgttattttagggcctaccgtatttggccaaattccaaactacacgaagacaatattcccaccatcatcgatcccggggttgaatttaatcgcgaatttgggtataatattgtttatgttc

SEQ ID NO: 5969 - DNA, 120 bp, Saccharomyces pastorianus
atgtttagggtattcagtgcatttggatcaagaaatactcaatcttctggtgaggaacagccaacaaagacaaagcaaatcttacaacaggccaatgacttcgagattgctttgaaagga

SEQ ID NO: 5970 - DNA, 162 bp, Saccharomyces pastorianus
atgacgctcgtggtgtacctaactctgttttcctccactaggagcctcaggttcttcgtgatcggtatcacatcgttcaagaactgcagatggccatcggtcgactttaatatcgtggcggagacgtcgtcgtacgacagcgtgatctcgtcggaaggatga

SEQ ID NO: 5971 - DNA, 363 bp, Saccharomyces pastorianus
  modified_base (261)..(324): a, c, g, t, unknown, or other
atgaagaattcggtagcaaacgctgtggctacgaatgcgtcgtctgaagtgtccatgtattccggatcattcttggctatcctctgtactttttccacaggcagctggagcgaacaaggcggtggaacccccgtttctatactgctattgttctcattcattgtgttggtctctgcgctgacctctggacgagctgtcttggatagtcctcatttgctctctcttgtgtcttttttttttttttcactctttttccctgcnnnnnnnnnnnnnnnnnnnnnnnnnnnnnnnnnnnnnnnnnnnnnnnnnnnnnnnnnnnnnnnncaagggtatacacagaaatctagggtctgggaaccatga

SEQ ID NO: 5972 - DNA, 759 bp, Saccharomyces pastorianus
atgaaggtaggaataacgaaattctttctcttaatatacctatttttggtcactactgttttagccatcagcaacaaaacgttgctcgaatttgagaatacggaggccaagctggtcaattcgttaagagttctagatactaacccgcgcaactccacgtctgctgacaaaagaatatctgacattgagacgcaaatgaaggaaataaagactatgtacggtagtcattccttcatcctgaagggattgaacggcatactaaaccacaaggtaaacatgctggcaagggaggtacaaattgagggagaaaacagtaccgtatttgaaacggaaacaacaaaagtggccaagggactacatcgggccattcacatatctcccttcaagtacataaaaaagttcaagacaatctcgactgagaagttggagcgtattctgaaaaaatacgatcaggtttccaaaaaggatggtgacttgacggaagaccaaaagaaaaagaaggaggtgctagcgcgagtcagcagagttgtagccgcaacaacgattgaggcaggcttggcgcaaggtgtagtcgatttgtgtatgacagtgacgaccagcctctgtttgatatcagtccagtataggaggcctagggtttatcatttggttaatgatcgtataccaagctttgacttaggaacctctttcttagcttcgttttccgccacttcagtaatttgtttagtctcggactgttgtatatgtgtaatcttctaa

SEQ ID NO: 5973 - DNA, 150 bp, Saccharomyces pastorianus
atgggagaaattatccctcgaagtctaccagcaacatatttcactggatcccatttcatatcttgtttcttctgtaagtctgtgaccttgctaagcgcagtattcttgaaagaaactaccactgcacgattaactgaatcacctctttga

SEQ ID NO: 5974 - DNA, 1371 bp, Saccharomyces pastorianus
atgtcacttagattgccacaaaatcccaacgcgggattgtttaaacaaggctacaatagttactctaacgccgatggccaaattattaaatcaattgcggccattcgcgaattacatcaaatgtgtttgacttctatgggaccctgtggtagaaacaagatcattgttaaccatctcggtaaaatcattattaccaacgacgcggccaccatgctaagagaactagatattgtccatcctgcagtgaaagtcctcgtaatggcgactgaacaacagaagatcgacatgggagacggtacaaatttagtcatgattttggctggcgaactattaaatgtgtccgaaaaactgatttcaatgggcttgtctgccgttgagattattcaaggttataatatggcaaggaagtttactttgaaagaactagacgaaatggttgttggtgaaattactgacaagaatgataaaaacgaacttttgaaaatgattaaaccagtcatctcctccaaaaagtacggatctgaagacatattgagtgaacttgtttctgaagctgtatctcacgttttaccagttgctcagcaagctggagaaattccttattttaatgttgattctatcagagtagtaaagattatgggtggatcgctttccaattctaccgtcatcaaaggtatggttttcaatcgtgagcctgaaggccatgtaaaatcattatccgaagataaaaagcataaagttgcagttttcacttgtccgcttgacatagccaatactgaaacgaaaggcactgttttattacataatgcacaagaaatgctcgatttttctaagggcgaggaaaagcaaatagatgccatgatgaaagagattgccgacatgggcgtagaatgcattgttgcaggtgctggtgttggtgaattggcgttacattatttgaatagatacggtatactagtcttgaaggtaccaagcaaattcgaattaagaagattatgtcgcgtttgtggggccactccattgcctagattaggtgcgccaactccagaagaattaggtttagtggaaactgttaagacaatggagataggtggtgatagagtaactgtgttcaaacaagagcaaggtgaaatttcaagaacatctactatcattttaagaggtgccacacagaataatttggatgatattgaaagagccattgatgatggtgttgcagccgtcaagggactaatgaagccatcaggcggtaagttgttgcctggtgctggtgctaccgaaattgaattgatttctaggataactaagtatggtgaacgaacacctggattgctacagttagctataaaacagtttgccgtgggcttttga

SEQ ID NO: 5975 - DNA, 1773 bp, Saccharomyces pastorianus
atgtcagaactctttggagtattgaaatctaatgctggcagaattattttgaaggacccctccgccacttctaaagatgttaaagcatatatagattcagttatcaatacctgtaagaatgggagtattacaaagaaagcagaactggacgaaatcactgttgatggtttagacgccaatcaagtttggtggcaggtcaaactagttcttgatagtattgatggtgatctaattcaaggaattcaagaactcaaagatgttgtcacgccttctcacaatctctctgatggtagcaccctgaactcatcatccggggaagaaagtgaactagaggaggcagaaagtgttttcaaagaaaagcagatgctctctgctgatgtttctgagattgaggagcagagtaatgatagtctttccgagaacgatgaagaacctagtatggatgacgaaaaaaccagtgcagaggcagctagagaagaatttgcggaggaaaaaagaatttcttctgggcaagatgaaaggcattcttcacccgatccttatggtatcaatgataagtttttcgatctcgaaaagttcaatagggatactttagctgcagaagattctaacgaagcttctgaggggagtgaggatgaagatatagattattttcaagatatgccttcagatgacgaggaggaggaggctatttattatgaagacttttttgacaaacccacaaaagaacctgtgaagaagcactctgacgtaaaagattcaaaagaagatgaagaattggatgaaaaagagcatgattctgccatggataaagtgaaattagacttatttgcggatgaggaagatgaaccgaatgctgagggagtgggagaagccagtgacaagaacttatctagtttcgaaaagcaacaaatagagattagaaaacagatagaacaattggaaaacgaagcggttgccgagaagaaatggtctttgaagggtgaagtaaaggcaaaggatcgtcccgaagatgcattgctcactgaggaacttgaattcgacagaactgcaaagcctgttcctgttataacaagtgaggtcacagaatcattagaagatatgattagacgaaggatacaggacagtaactttgacgaccttcaaagaagaaccctgttagacatcacacgtaagtctcaacggcctcaatttgaattgagtgatgttaaatcctcgaagtcgttagcagaaatatatgaggatgactacacacgcgctgaagatgaatctgcattaagtgaagagcttcaaaaggcacattccgaaatatcagaactttatgctaacttggtatataaattggatgtgctttcatcagtgcacttcgttcctaagccagcaagtacttctttggaaattagagttgaaacacccactatatcgatggaggatgctcaacctctctatatgtcgaatgcctcttctttggctcctcaagagatatacaatgtcggtaaagcagaaaaggacggagaaattcgcttgaagaatggtgttgcaatgtctaaggaagaattaaccagagaagataaaaacagattgcgcagggctttgaaaagaaaaagatcgaaagctaatttgccaaatgtaaacaaaagatctaaaaggaatgatgttgttgacactttgtcaaaagccaagaatattactgttatcatcaaaagggtgaaaagaaagatgtttccggtaaaacgaagaagagcagatcaggaccagatagcacaaatataa

SEQ ID NO: 5976 - DNA, 1557 bp, Saccharomyces pastorianus
atgcctgctcctcacggtggtgttttacaagacttggtcgctagagatgcgtcaaagaagaaagaactgttagccgaagcccaatcttcagacatcttagtgtggaacttaaccccaagacaactctgtgatattgaattgattttgaatggtgggttttctccactaactggcttcttgaacgaaaatgattactccacagtcgttacagactcgagattagcagacggcacactatggactattcctattacactggacgtcgatgaatcattcgcaaaccaaataaaacctgacacaagaattgccctataccaagatgatgaaattcctattgctatcatctcagtccaggacgtttataagccaaacaagtctatcgaagctgaaaaggtcttcagaggtgatcctgaacatcctgctatcaactacttgtttaacgaagctggtgaatattacgttggtggttcattagaggccattcaattacctcaacattatgactacccaggcttacgtaaaaccccagctcaattgagattggaattccaatcaagacaatgggaccgtgtcgtcgccttccaaactcgtaacccaatgcacagagcccacagagagctgaccgttagagccgctagagaagctaatgctaaggtcttgattcatccagttgtcgggttgactaaaccgggtgatatcgatcaccatacccgtgttcgcgtctaccaagaaatcatcaaacgttatcctaacggtatagccttcttgtccttgttgccattagcaatgagaatgagtggtgacagagaagctgtatggcatgcgattatcagaaaaaattatggtgcttcccacttcatcgttggtagagatcatgcaggcccaggttcgaactccaagggtgtcgatttctatggcccatatgatgcgcaagagttggttgaatcctacaagcatgaattggatatcgaagtggttccatttagaatggtaacctacttaccagatgaagatcgttatgctccaattgaccaaattgacaccacaaagacaaaaactttgaacatctcaggtacagaattaagacgccgcttaagagttggtggtgaaatccctgaatggttttcatatcctgaagtggttaaaatcttgagagagtcaaatccaccaagacccaagcaggggttcgccattgtcctaggtgagtccctaaccgtttcacgtgaacaattatcgatcgccttattatcaacattcttacaattcggtggtggcagatactataagatcttcgagcatgacaataaaactgaattactgtctttgattccagattttattggttctggttctggtttaattattccaaaccaatgggaaagtgaaaaggactctattgctggcaaacaaaacatttacctattagactcatctagctcagctgatatcaagctagaatcaagtaacgaattaatttcacatattttcaaaaagtcgtttatggcagatactataagatcttcgagcatgacaataaaactgaattactgtctttga

SEQ ID NO: 5977 - DNA, 357 bp, Saccharomyces pastorianus
atggcaggcgatgaacttagttatgaggagttgctggatcacattttaaataataaacctatacccaatatcgttgaagtaccaaacgttactctagatgagagtttaagtagttcgccttcactgaaaccaagaacgaggccttgggaaagacagcagcagcagcatcagtccggtaatgatgcccgacagcaatcacaagaggttaaaacaaacgtgcctttggattttgatcaagagagcttggaaaaaatgacctcaccatcaaagctgtctgaatgctacgatatacaatccaagctgggaatgaattttgatgatgatgactacaacagcaacgataaagttgatggctag

SEQ ID NO: 5978 - DNA, 1389 bp, Saccharomyces pastorianus
atggaaacggatgccgaatattgtaggcgcaaagatatacacgacctttccagtgtggtcggtggtgcctgtaatcaaggtgttccgggtgctgactcagacctagttgacagtgagaaggaacaagtggccgattccgtggaagactttcaaccgggttccatacatgccaatggggcctcatcaacagcagctcaggcagcagcgctggccccatcttctcccggcgctggtgatgaaggtggggtgcccgtgcagaagactcccaccaggtttttctcacccagtttgcaaggccaaagaaagaaagtctttttaaagttcgtctttaccaactgcctgctagctattctttgctttacaatttttgttttgttttggggggctctctacaatacagaaaaatatgtgcataaggtcaggctgctggccgtcatccaggagcctcctgtcgtggccctggacagcaacaattcgatggccgtgccatccatctcatccgcactacccaccttcatcggcgaggtgccttgccattgggacgtttacaacgcttccgcgtttcagactagattccacgtgaactcctccgaacagatcaatgacaaggtcatcgatttgatttacgacgaaaaatactggttcgccatcaatattaaacccaatgccacagagactctctttgagtcgctgatcaacgacaccgccccctattttaattccaccctgtttaaccaggtcgtttacgaaagtggtagagacccaacgaatctgaaatccacgatattgccgtttgcccaagaaattgaagaatactacggagccttctatacgttcaactacttaccgcaattcctgactaatataacactgatggataactacaatttgaccagcaacctcacacatattaccgcggcggggaaatacaactacgaatactatgaccacaggccgttcaccgaccgtattgtgttggcgcccacccagatcggtgttatttattgtctgctgttaacctttttccagttcctgttatatggcccattgcacgcagaaatggcaaaagtgctaaggcctgccaacggtataatttaccgtatcgccatgtcatggtctacctttttccttgcatccttattcttttgcacaatttctgccatcttccaagtcgacttcaccaagtctttcggcagaggtggcttcatggtgtattggatgtccacgtggctgtttatgcttgccgctggtggagctaatgaaaacgcggtgatgcttgtcatcaccttgggcccacaattccttggattctgggtcctatcgttcgtcattttaaacatcgctccatccttctttaccactggcagtatacaacaatgttacagtacg

SEQ ID NO: 5979 - DNA, 519 bp, Saccharomyces pastorianus
atgtcgctcacttctccgaccttgagcttgaaggcggcgtcctcgaaactgggctgcatctcgcccctgccgaaccagcccaggtcgccgcccctcttgtacgaagagcagtcggacctctccttagccagcgcctcgaaggagttggtcttggaagcgtcgtccagcctcgtgaccagggtctttagctcgtccgtggcctcttgcttggatatggtgatgttctcggaccggtgcgaagcaggtcttctcgagtcctggtgcttgatgaggatgtgcagacaccttacacgcattgggtggtctttcagatactcgtgcagctgttccttatccgtaccctcgggctcctcccactgcgagtgcttcgtgtccgggttgaagaagtactctcttttcttggacttgctgtacctgacagtccacggcgtgggcaggccggtgctggctgctgcgtcggatggcattgctgtgtggttgctgctgtgtggagagtcgtgtggaggtaaaagctggtag

SEQ ID NO: 5980 - DNA, 435 bp, Saccharomyces pastorianus
atggtctcccagtgttgcagcgagtcgtgctccttagaccgctgcacggcaaacaggatcatcgaggtaaagatcagcttgtcgtgctggtacgcactaacctgcttgtggatgaagttccggccgttgcgcaggttctgcacatggtacgtgatcttggcccgcggatcgccacccttgatgaagtacgagtgcaacgaagtggggaagaagttgagtggcacggtgtacaacgacgctagcagcgattgcgacaccagcgtcccgccaaacgtgcccttggaccctacaggcgctgccggcaggtaccgcgttacaaagctggtaggcgacagcgggacaagctctagtattttctccaggttagacatggccatcttggaaacgctcattgttggtctggttctctcttgttctgtcttggtgtcgtggtag

SEQ ID NO: 5981 - DNA, 207 bp, Saccharomyces pastorianus
atgaataggttagtgttcttgtcgaagccgtccaagcttgctatgagacactggccgtcagtcttgattataacgacccttttattcaggtattccttgagtattggtgacattgagcttggtatctgccttgtccccttgtcttgtctggtcttgtcttgtcttgtcttttccctgcagcctgcgtataggctcatcttaaactag

SEQ ID NO: 5982 - DNA, 1086 bp, Saccharomyces pastorianus
atgaactctttagcaaataacaagattggtggtggggataacgaagttcactcggcgagaaagagaagctatcacgaggaacaaaacgtcaacgaggccagaaagaagcagagagaccaaaatctgctgtcacaagaaagcaatgacggaaacatcgactcggctctattaagtgaaggggctactctaagagggacccaaagccagtatacaggcgggctagcgtctaatcatgatgagaaggaaagtgatgaagatccttccgtagcggaagctgcagtagccgccaccgtcagttacacagacttaattcaacgtcacgaagatgtgtctgacgttcatatgcccaagcaaacaagtactgataacggggacaaggattccatgaatgaaggaagagcaacaaattcgtcaaacgaaggggccaagttgagcgtctctctggaggggatggaatcctcaccaatagagtccacacaagactccaaaaatgacatgctcataccattgcccgaacatgaacgtagacacgaacacgaagaagaggaagaagaggaagaagaggaagaggaggatgatgacggtactggtatgaacctcaagaaggacatgaatatgcagtcgggccgtcgaggaaaaaaacctaccacactggccacgacagaggaatggaaaaagcaaaggaaggattcccacaaagaagtcgaaaggcgtcgccgtgaaaatataaacaccgccatcaatgtcttgagcgatctgctccctgtaagagagtccagcaaggctgcgatactggcacgtgccgcagaatacatccaaaaattgaaagagactgacgaagcgaacattgaaaaatggacattgcagaaattgctaagtgagcagaatgcatcgcagttggccagtgcgaacgagaagctgcaagaagaactggggaacgcatacaaggagattgagtacatgaagcgcatcttacggaaagaaggcatggagtacgaggatatgcacagccataagaaaaaggagaaagaaaggaaggccccggaggtgataacgtccatgaggcttgaaagcacagatacgtag

SEQ ID NO: 5983 - DNA, 4407 bp, Saccharomyces pastorianus
atgcgcgaaactactgtggactctctgctgaaagagatagataacgaaatggaacaaacaaagtgcaatgccatgcagaagactgttgaggggggttcccgtgactggaagctgccattgcaggatattggcgacgagaccatggaaatgctggtaaaacacaacactaggtcgaattctcatgcgacagaaaaggctagtcgcaagggacaatcatcatctaggaagtctgatatctccaatgaaagttttggtttggacctcttgcgtacaaactccgagcttggagagccttcggatacagtgtttcagaaatcacctaaaagttttgccgtcaatggctcaccttgcccaacgagttctcccaaagtcctcaataatttgaaaaatatggcccacgatatagacgacctgacacgcgaagacgaaaaacctgcaagacgtgatagctcttccttgaaattcacattgaaatccactcaaccgctgctctcatatccggagtcgcccactcacagaagttccattgaaatcgaaacaaactacgacgacgaggaagaagaggaagatgcagacgcatatctggcacaatcgcctcaaatattacattctccctcaaggatcccgataacaaacgcggtatctatcaacaagttcaatctcgatttatcgttgggtgccagtgggcttaacaaaaggttggcgtctggtgactctgcagacagtacagaacacgagctggatacaaaaacaatccctgagttaccataccgtatgccatctaccccggaaatgacggctgtcgaggatgaatgccctggattaccatatattgtcaagaaatcgcttctgggatcaaggtcggctacggcttctgtggaagacctaaatatctcaacgagcctcctagaaacgagtgaccgtattgatgctggcatcacgtccaatgcagatgctatcatagagaaggatctagtggaagatttacagtacaatgctaaacacatctatgatgcattcgatgaagagagacttcttggcaaaagttacgaaatgaatcatgatccttcttcccataataacgtcactacgcccaaccagggtgtctctaatgaagctggtaaaagtgctgaacgagagttatcagccgctaatcaggacctctcggaggaaacctccctgttacatactgaatctaaatttggtgatactcaatcaaatgatatgcttactgtagacgacatatacaatactaaagcagatatctcaacatctacaaagccagaggaaagtctagttaatgagaatgaagaaacagtacaagaagatcaaagtatgcaaaaccctcgactgataaataaacacaatgaacaaccaacagctctcaaaaatgatgtggcagaaaaggagtcaatcgaatcaaacgacaaaaatgaatcattcacgaactctgaagatgcaattaaccacgagctcgctcatcttggggagcaacaccttattcagaacgtaacgtattcagaagatagcgaaacacatgacagccaaatagatcttgatcatgtagagactggtacagtaaatggcctaccaaatgggagcaaagatgaaaaaattaaatcatcgttgtcaagtgaacacatgctggcgattcaggataattatggtgaagatagagccgatgaaaaggaagatgaacatgaacatgaacatgaacatgaacacgaacacgaacacgaacacgaacacgaacacgaacacgaacacgaacacgaacacgaacacgaacacgaacacgaacacgaacacgaacatggaaacattcaagaaaagaaagagcaggaacaggttccaattttaccgccattgccaaggtgggaagcaattcaattcagtgagccattcgctgatgaaaacgatacctccaatgattccatggatttaacaagatcgatgaaaccttcagattatatctctatatggcatatacaagaagaagaaataaaatatacttcaccagaatccgttgccaactctcagttttcacaccagtcgtctattaccactgcatccacagttgattgcaagaaggagaatgcttcaacatctttcaaattcaagcccagaatagtaagtagaagtaagatctataatccaaaacatagagtatcgtcgttgaactactatgacagcgaagattacgttttgaacaatagtgaatggaacgcattggatcctatgagaagaaacacaataatctctaaaaagattcaagataatattagggtacaaaagcgtctgactccatttctaagtcctaccatcatggaatctcaagataaaaactccaacttccaaaaccatatttttgaagaagaacaggatgaaaaagatgaacgggagaaggaagaacaggatgaaaaagaacaggatgaagaggctgctctgtcaaatattcaactgagtgagcaagatattacaaccaacattaatccagttggacaagatttttcaataaatactcaagagggacccgaaacttctgttcgtgaaataaagaacgtaggcgatataagtttcgataaaggtgatttgctgtctctatccgttggtgaggaattgggccaggattttgctaattttctagacgcattagaccacgactctacatcattcaatcatgcgctaaatgaggcagccggtttcaacagggatgattcgaagaaaagcttcagttctctttgggagaaaaattatgaactgaaacctcccccttcagtaagaaatcaatctattgcgccagatgtactccaaaaactattggaatcagatgctaaaagtgacactgaattgaaaagcgataacgaagaagaagtcaatgtggtacatatgggtctaggtattgggacgctgaaaacacccgtcaaagatgtatcggttgcattagcagcaagcattagagggtacgaagcaagttttagcgactccgattctcattttggagagatgatcaatagtgacgttatgactctaaacatgtttgatgattttgaagaggacgaaatgagtcctggcactccaactggtggcataagcccagtcaagcgccatattagtagcccatttaaggtgatcaaggctggaaataaatcaaattgtgacgaaataaatgtcaagactgaagaagagccagagacagccaagctaacgtgtactgacagcttagagtcagctacacctccgccagtaatagaaacaaaagaggaaatggagacccaacttgaaggaccaggggagaccgaggaagaatttccagatttgggaacactttatttaactgtgaagggaatttctacgcttgcgctgtacggtaccaagagccacagagccacattttccattgtttttgataatggggaaaatgtcatccagacttcctgggaatcacttccatatgatggtaatattaggattaataaagagttcgaattacctattgacttcatgaagaacaaagactcttcctcagtctcttctggagaaagcagttataaaaaatgtactatcacactgaaatgtaaatatgcgaaagccaagcatgaactagtagaagtagtagatagggtaccagtcggaaaaagtttctttggtaagacaaagtacaaatcggagaagagatatgtgcaaaaaacagcaaaacaagatgaatgggattacttgtttgcacaagatggttcgtttgcccgttgtgagtttgaaattgatgaagagtttttaaataatgctgcattcagtaatagtcatatgcgctatgatatgataaataaatggagccgtattgcagatggaattggcggctcagctagatttcatgaactaccacgcaaaccgcctcataaagtagcttcgttggatgtggaagcatgcttcttaaaaagaacttccgcttttgaacaatttcccaaaacattgtcattagtaaacaagattatttccaagtacaagttgcaaaaaaacatttacaaagaagggtacttgttgcaggatggtggtgatttaaacggaaagatagaaagtagattttttaaactacatggttcgcaattgtctggctatcatgaaatctcgaagaaagctaagatcgacattaatctgttaaaggttacggaagtgctatgcaacgaagacatccaaaccaaagatggagaacgaaggaatttcacagagtgggtattgtttaacgaatgtttccagctggtctttgatgatggcgaaaggatcacattcaatgcagactgctccaatgaggagaaaaacgattggtataataagttgaaggaagttgttgagttaaatgccttccaccaaccttgggtaaaaaattttggcgaaatactggctacatag

SEQ ID NO: 5984 - DNA, 315 bp, Saccharomyces pastorianus
atgcaactgcctggattaattcaaattctatcgatgaggacgaggatggtatgcctcacgctactgatgtatcagaccgactctatgaggtatcgcttagctagcgcacgtttgccatctcaccttgcgggttctggtgcggatcctctccgcagtataggcgtgttccatacgtcggctgtccttactgctctgcctaccagaacagtttacacaggaggaaatgcaggtggtgacccagcactaaaagaacaaatctacgtgggtgttccttttccccactgcatagccgttatgccaaaatttggttggtaa

SEQ ID NO: 5985 - DNA, 255 bp, Saccharomyces pastorianus
atggcctcgagccattcgtcgacctggtcctctgccaagggctcgttggccggtgctcgcagcgaagactggaaacgagcagtcccgagaccgctctgccacaatagacgtggcctgcacaacaaatgtctcctcgcagaatgcagcattgtgtgtgtatgctctttgcctttattgggtgatgcccgttggtggatagcatgtatatatatatatatatatatatgtactataccacgcaaattgaacctctga

SEQ ID NO: 5986 - DNA, 474 bp, Saccharomyces pastorianus
atggcgacgagctcttcgcccagacgcacggcaaagtcgctggacacccgctggttggcgctctgcacgatccagttccaagcaattctgtttctctgtcttttgttcaacggcacggggatgaccgaggccttggccacacccgtgttaaaagtcttggtgagcatgagaggggccaagtcgtccagcgccctttccagagcctggatcggatcctgccgggtctggcagtacaccaggtacaacgccttagacagcatggactgcgctttctccttctttccgtggcgcatgatcatgttggtgatgtggtccagcgtcgggtccttgcgtggagggatgggcacggacttcaacgcctcccactgctccagctgctccgtggtgggcctggtcttggcctctgtgtgcgggccatgcaagaggtctatcttggattggcctgggggcgccagcgaagtttccggcaggtag

SEQ ID NO: 5987 - DNA, 591 bp, Saccharomyces pastorianus
atggcacaagcctttaatactacaaatgttacttttttcagagtagcatttttattcacgatcgcgtttttttgtttgaagaatgttagttcgattttgcaaaattcatatttcctagtcttgacagaagctatgaacttgccacaattaacattgtcacgttacaacggccaactgggtctttttgctcttctttttgtcctaaacggtatccacgatctgattccattgttagaaaacaatgaaaaatacttccaatctattgttccgctaagattattattttttttcatcttaacaggtgtttcatatctttgggaatcaaatttatacatccacaacaacgctgttttcatctactgttttgtagaggtttggataaatttccttttgtataatgctgttagggaagaaaaaaatgaacaattcaaaagagcgaatcaatttatgcttgctgaagaggacgttgaagaaccccaaccatttgttgtgaaaacagaaacgactgaaattatcgaaataaccaatgaagaagaagaagagggtgatgatgatgatggtgatgatgttgatgaaaaagatggagaataa

SEQ ID NO: 5988 - DNA, 396 bp, Saccharomyces pastorianus
atgaagacaaacggaaaaagtgccagcaacacgaatgaaaatgtccacatttatttcgagcggccgcgggtcatatgcataatgcaagcgccccttggcccaacgcgactggcgacctccgaaacgggccgttgctttcaaaggttatttcccgcaagggaagttgcgcgtctagttgtctattgttgccgtgaccgcgtcaccgcctcgcagagaatctgcgcagtgcaacgccatgacgcaggatctgagtattgcgactttccccctgtagtcgccgccctagtagtcgtcgttcggagtgactatgcgggttgtccttgctgtagcgattgtcgctgcacctgctaccgttactgctgctgctgctgctgctgctgctgtggcggccagtaa

SEQ ID NO: 5989 - DNA, 195 bp, Saccharomyces pastorianus
atgaataaagaaaacgagtctactcgaatgattattaattcacacttgtggggtcctcaagattcttgtgggactttcgaaaagaagatggaatatcatgcgaatgctgctaaaagtgatgcggttatattcttggacagcctctatcatgcagccagtgcaaatcatgatatagaagatagaatcaatgggtaa

SEQ ID NO: 5990 - DNA, 111 bp, Saccharomyces pastorianus
atgttctgtgacatgggagaaaactttctgaatgaacagaattatttattggctggaaacgtgatcaaaaaatgctctagcgattttcaactgaactccagcattatctag

SEQ ID NO: 5991 - DNA, 945 bp, Saccharomyces pastorianus
atggcagaacaggtcaaaataatatacggaagctttcctcttaatcttttgcaacggtcagatatcgatgagatatcaactattttggagaaagcaggagtaaaagatatagatactgcacggatctacccagatagcgaaaaaatccttggcgaattccgggttccaagtagatttactattcatacaaaggctagcggattttcagctggatgtttaacaaaagataacattaataagtctattgaagagtcgttgagcctgctaggcgttccaaatgttgaaacatattttttgcactcgccagaccctgaaactcctattgaagaaactctcggcgcaataaactctctgtatgaacaaggtaaattcaaaaagtttgggttatcaaacttcgcaacggaggacgtgaagcgcatccacgaatatgcaaaaagcaagaattacgtcttaccaacagtgtatcaaggaaactataacgcgttctcacgggcgattgaggatgatctttttcccttgttaagagagttgcatatttctttctatgcgtattcaccaatcgcaggagggttcttggcgaaaacgccggaacagatattgggggggaaatcaggccggttcgacaagagcaatcatattgggcagctgtatttgaaactttataacaggcctgctcttatgaaagggctggaagaatggaacaaactcgccgagaagacaggtatatctaggttcagtttagcttacagatggattgctcacaactcttctctaaagagggaatttggtgacgctgttatcattggaggacggtctcctagtcaggtttctggtgcgttggagtccatttccgaggggcctttagaccctgaaacggtaaagaaaatcgatgaaatttggcagctagttaaagatgaagcaccattaaataattacgcttactag

SEQ ID NO: 5992 - DNA, 1206 bp, Saccharomyces pastorianus
atgcttctgtctgaaatagctcccaaggatctgagaggtggacttatttcattataccaattgaacatgacctttgggattttcctaggctactgtagtgtttacggaacacgtaaatacgacaatactgcacaatggagaatacctattgggttatgctttttatgggccctaattatcatcattggtatgttaatggttccagagtcaccaagatatctaatcgaatccgaaagacacgaggaggcacgtacttccattgccaagataaacaaggtttcaccagaagatccatgggtacatggagaagcagaagaaattattgcaggtgtgcttgctcagagggaacaaggggaggcctcatggaaggagcttctgtcggtgaaaaccaaagttttccggcgtttgattaccgggatacttgtgcaaacgttcttgcaacttaccggtgaaaactactttttcttctacggaactaccattttcaagtctgttggacttacagatgggttcgaaacttcaatcattctgggtacagtgaatttcttctctactattctcgctgttatgggtgtagacaacatcggtcgtcgtaaatgtcttctattcggagcagccgggatgatggcctgtatggtcatattcgcaagtgttggggtgaaatgtctttaccccaatggcaatgacggcccctcttccaagggagccggtaatgctatgatcgtgttcacctgtttttacatattttgttttgctacaacatgggcacctgtcgcttatatcgtggttgccgagtcgttcccctcaaagtttaaatctagagctatgtcgatttcaactgcgttcaactggttatggcagtttttgattggtttctttacaccatttatcactggatccatcaatttctattacggttacgtgttcgtgggatgcttggtcgctatgtttttctacatcttctttttcttgccagaaacaattggattgtctttggaggaaatccagcaattgtatgaagaaggcgtaaaaccatggaagtctgcatcttgggttccaccttcaagaaggggtgacacctccgaagaggcccaggttgaaaagaaagactggaagaagtttttgaagatctcgaaggggtctttcaacttgcattcttcaccttggaagagcaacattgctatcaacgttaaagcacctcgatag

SEQ ID NO: 5993 - DNA, 1158 bp, Saccharomyces pastorianus
atgggaacaactttggctacaaactgtgctttagaaagaaacggcgaacgttgtgcctttattactacaaaaggattcaaagactctttgttgatcggagatcaaactagacctgatattttcaacttgaatatcaaaaaagtgtcgcctttatacgataccgtagtcgaaatagaagaaagagttacattggaagatttctcagaagacccttactttatcaaatcaactcgtaatgacaaagagggaattttggaaggtaatagtggcgaaatggtacggataattaaaacaccggatgagtcaagtgtaaaatctgttctacaagtactttacgctagtggaatcaagtccattgcagtagcgtttctgcattcatacacttttccagatcacgaacgaattgttgggaatattgccaaacagattgggtttcaccatgtttcgttatcttctgaagtttctccgatgataaaattcctaccgagagctcacagtgctgttgcagatgcttaccttacgccagtaatcaaaaaatatttaagtagcatttccgcaggattgtgccacgctgaaaatacccatattcaatttatgcaatccgatggtggactagtagacggggaaagattttccggtttgaaatcaatactatctggccctgcaggtggtgtcataggttattctagtacgtgctttaataaaaaaaataatattcccttgatcggttttgatatggggggcacatccactgacgtaagtaggtatggtgaggggaggctagaacacgttttcgagaccactaccgcaggaatcatcatacaatctcctcaacttgacattcacactgtagctgctggagggagttctattttattatggaagaatggattatttaaagttggtcctgattcagcagctgcagatccaggacctgcagcatatagaaagggaggacctttaactatcacggacgcaaatctctttttaggacgtttagttcctgaattctttccaaaaatttttggacccaatgaagatgaatctcttgatttagaaaccacaactttgaaatttaggcagctgactgatgaaatcgataaagacctcgattcaaatttggcaccggaagaggtcgcgtacggcttcctcaagtag

SEQ ID NO: 5994 - DNA, 3495 bp, Saccharomyces pastorianus
atgctacagcgaatatcatattccctccatcgcaggctcctgtctggtctgctgcgtgccaagcactacccgctcagacgggttctattcccactcatcctgctacagatcatcatcatagcgttcatttggtcgaactcacctcaacgcatcgcggccgatccagacaacggctatctacagagcgacgacgacgactcgtggtatggccgcgtggcatcttcgttcgccttaaaagataaccgcgagatccagaccgccaagaagctgtacgagaacctcaagtttagcacccagcccagatgggccagcgagtacacactgcagaatgacctgctcaccgtcaaggtgggcccgcaaaagggcaccaagctctcatccgtcgacgatttgaagttctacgacttcgacccgcgactcacatggtccgtcattctgaaccatttggagaacagcaacgccggccaggaaaaacttcccttttcctggtacgactggacaagcttccatgaactgaacaagctcatctccattgaaaaaaccgtcttgccctgtaacttcctcttccagtccgccttcgacaaggagtctcttgactccatcgagaaagagctgagcgaaccgctgttcctgtacgatagactcaagtacaaccaaaaactgtggtacagggccgccagaaaacttgacagaattaaagaaaccaaggagctggacaagcattgttccaagctgttcaccccaaagggcaagggctcccctaaggacttgaagttcaacacgcagttccgtataaaggagctctacgacaaggtcaggcccgaagtttaccaactgcaggccagaaactacattttaacctcgcagtcgcatccgctgtccatctcaatcatcgagtcggacaacgccacctaccaggtgcccttgcaaaccgacaagtctaagaatttggtgcaatctggcctcctgcagaaatacatcgcagacaacgtgaactccaccaacaagcggaaaaagaaacagaaccaggacgtcgagttcaaccacaactcgctctttcagaaattcgtctcggacgaacaactgaactcccgttacaagctcgacatgaaggaaacagacaaatccactttcgacaaggacttggtctacctgtctccctctgacttcaggttcgatgcctccgagaaaatcgaagatttagaatcactcaagatgctccacccgaacgagttttcagctcacaacgaaaactatttgaacagtttgaaacgctctataacaacgaatcctgccttgcaaaaaaaattcttctacgaggccggcggtgtcaaacagtataaaggtatggggttccatcgtgacaaacgattctttaacggtgataccctgatcaacgacaaacaggaataccaggcaaggttaaactcgatgatcaggactttccagaaacttacaaaggccaacggtatcgtatcttggctgtctcatggtacgctgtacggctacctctataatgggctggctttcccctgggacaacgatttcgatctgcaaatgcctatcaagcatctgcaattgctcagtcaatactttaaccaatctctgatcttggaagatccaagagagggcaacggccgttatttcctcgacgtcagcgactccttaacggtgaggatcaacggtaacggtaaaaacaacattgacgcaagattcatcgatgtggacaccggtctatatatcgacatcaccgggttggccagtacttccgcccccagtagagactatttgaactcatacatcgaagaacgcttgaaagaggaagagttggacattaaacacattccggaatcagacggcgagaccgccaatgtgcccaagcaattaaatgatggattggtcaatatggccattctaaacatcagtgaactgaacgattatatcacaggcgaggagaataaaaaacataaaagagtccccaccgataccaatttgaaagaccttttgaaaaaggaactggaggaattgcctaactccaagacaatcgaaaataaactgaatccaaaacaaagatattacatcaatgacaaactcagactttataattgtagaaacaatcattttaattctttcgacgaattgtctcctctaatcaatactgtgttccacggtgtacctgcgttgatcccccacagacacaccaattgtttgcataacgagtatcacgtccctgatagatatgccttcgactccttcaagaatacagcttacctgcccgaatttagattctggttcgattatgacggcctaaagaaatgcagtaatatcaattcgtggtatcctaacatccccagtatcaattcatggaaccctaacctcttaaaggaaatttctaccaccaaattcgaatctaaacttttcgactacaataaggtctctgaatactcttttaaaaacttgtctatgaatgacgttcgtttgatttatagtaacatcccaaaatcagggtttatcgaggtcttcaccaacttgtacaattcattcaatgtcactgcatatagacaaaaggaattagaaattcaatactgtcaaaacctgacattcatcgaaagaaaaaagctcttacaccaattgcggattaacgtcgctcccaaattaagctctcctgcaaaggatccgtttattttcagctacgaaaaagccatgtggagaaagttatcagaatccatgaaccagactgtactagaccaagtcactaatatggttcacgaagaatacgttggtaaaattattcacttgtctgagggcttgaaatgcaagaactttacgcttttcaatattacattagatggaacgggctcacttgtaaacgataatactgatgactttatccccgttagcgacgctaatgtaaatccagtagattttaaatctggtttaaattttaccagtaacacctttttggatctgaactccttcgggctcgatctttttgctccaactttatccgatgccaataggaaaggtgttttgatgtttgataaagatcctattatcatatacgaagatattgcgtatgctaaagtagttgagaaaagaaagaagaaggagaaggaagataagaagaagaaagaagaagaggagaagaagaagaaaaagaaggaagaagaggagaagaagaagaaggaggaagaggaaaagaagaaaaaggaggaagaggaaaagaagaagaaggaagaggaaaataagaagaaggaggaagagggggaaaataataaagaggaagacaagaagaaagaggaagaggggaaaaacaatgaggaagagaaggagggaaaaaataataaagaggaagaagataagaagaagaagacaagaagaagaaagaggaagaagacaagaacggaaatcaatgaacactctcattcccaaagcttccacaattacacatttgcattatatatttattaccttcattacttgactccattgtga

SEQ ID NO: 5995 - DNA, 543 bp, Saccharomyces pastorianus
atggctaaaggattcaagttgaagcagttgctatcgcaccacaaagaagttcaaaaagctgataagcttgagaatgacttaaagatgaagaaatcccaacaactgaaaaaagaagagccaaccgttatctcagccactgatttggaaaaaatcgaagagcaaaagaagaacgctgttgctaagaaagaaccagctgctgatgtcgaagaataccaaagtcaagccatgtcaaagaaagataaaagaaaattgaagaaagaattgaagaagatgcaagaagagaaggcaccagaggttcagaaggatgcctccgaagaagaagaggaagaagaggaagaggacaagaaggaagactcgatcttgaaaagttggctaagagtgattccgagtctgaagatgagtctgaagaagacgaggaagaggaaatcgtcgctgaagaagaagaaaaagaagaagaagaagaggaggaggaagatcaagacgttccattgtccgatgttgaaattgattctgatgcagacattgttccacatcataaactaa

SEQ ID NO: 5996 - DNA, 348 bp, Saccharomyces pastorianus
atgaagcacgctttcgaaagggtacaactgccatggaaaaagcattccttccaagagcaccaaagtatcacagccacaaccaatacagatgaacagatcaaggacatatatgatgataccgagagagaattagctttttacaagcaatcattaaatgctgtcgtagttgcacgtgaagaattgaaacgactaaaggtcccattcaagagaccattggactattttgctgaaatggttaaaagcgacgagcacatggacaagatcaagggtaagctggtttatgaggctagtgacaagaaggcacgcgaagacgctagaagacaaacgacaattaaagaagttcggtaa

SEQ ID NO: 5997 - DNA, 120 bp, Saccharomyces pastorianus
atgaggctagtgacaagaaggcacgcgaagacgctagaagacaaacgacaattaaagaagttcggtaagcaagtccaacatgccactctgcagaaacgtcaactggaaaagagagacaca

SEQ ID NO: 5998 - DNA, 348 bp, Saccharomyces pastorianus
atgaccaaattacgaattgctgttcagggatgttgtcacggtcaactgaaccagatatacaaagaagtgtcacgactccacgcaaagactcccattgatttattgattattttaggagatttccaaagcatccgtaattctcaagatttcaaatcaataagcatacctcccaaataccaaaggtttggtgatttcatatcatactacaacaatgaactcgaagccccagttcctacaatttttattggcggcaaccatgagtcaatgagacacttaatgcttctaccacatggtggttatgtagcaaaaaacatttactatctgggttattctaacgttatatggtta

SEQ ID NO: 5999 - DNA, 750 bp, Saccharomyces pastorianus
atgctcacgtcgagcgtaccgccattattagttatagtgtgcggcgcggcaggcactgcaccattcgccgattcgctgtttacctgcagtggtgggttcttcagcagaccgccggcagtcccacttgatttcctgcttctgcttctgctcccgctgttgctgccactaccactgccactgccactaccactgccactgccactaccatccgttaagagtgaatcagacgcgtgcgaggttcctgtgccgcctcccgtgactgcattgccgttgttgcccttcatatctgcgatgcttacacgtcttatgctattcgccatccctttttcttctctcttctctctatctcttctaatcattcattgttcttctacgatagcctcacgagcacaatattgcgggaaaaagtggtggtgcgcttgccgggtagcggcgggcagtaggttatcaaagcctaatgataacggctatagcaactatccaaaacgaaccaccagcaaagcagttctagacgtactactttggcctcggaacacaggtccgagagtagggataagttgtcataaccgcctggcgccagatgccacgctcgccgatgattgtagtggggtcacggctatgagggcggggtggaccaatcacagcgcagaacgcggcgccgagcaaccgcagaaccaagggatccgggcctctgccattggttgtttgtttgcgcaaacccgttatatattctgggatcttcgaccttga

SEQ ID NO: 6000 - DNA, 990 bp, Saccharomyces pastorianus
atgccaccaaaagagaactgggaaaaatataaggcgcctttggaagacgatgacaaaaaaacagatgatgacaagattgtacccttaacagaaggcgacattcaagtgctgaaatcatacggtgctgcaccatacgcagctaaattaaagcaaacagaaaatgacctaaaggacattgaagccaggatcaaggaaaaggccggtgtcaaggaaagtgatacggggttggcaccttcccatctttgggatattatgggtgatagacaaagacttggtgaagaacatcctttacaagtggctcgttgcacgaaaatcattaagggtaatggggagaatgatgactccacgacgaataacaataacgatattaatagcagcaacaataacaacagtaatagtaatcaagagtctgcagatgcagatgaagatgacgaagatgctaagtacgtgattaacctaaaacaaattgcgaagtttgttgtcgggctgggtgaacgtgtttctccaacagatatagaagaaggtatgcgtgtgggtgttgacagatcgaaatacaatattgaacttccattacctccaagaatcgatccatcggtaaccatgatgactgtcgaagaaaagcccgatgtcacttatagcgatgttggtggttgtaaagaccaaatcgaaaaactaagggaagtcgtcgaactgcccttattatctccagaaaggtttgccgctttaggtatcgatcctccaaagggtatattgttatatggtcctcctggtaccggtaagacattatgtgctcgtgctgtcgctaatagaactgacgctactttcatcagagtcatcggttccgaattagtacaaaagtacgttggtgagggtgctcgtatggtcagagaattattcgaaatggcacgtaccaagaaggcatgcattatattcttcgatgaaattgacgctgttggtggtgctcgtttcgatgacggtgcagggtggtga

SEQ ID NO: 6001 - DNA, 372 bp, Saccharomyces pastorianus
atgtccgatgtgtccggattttccatgagttctagtgccattgcacgtacagagaccatgacagtgcttgacgaccaatacgaccaaatcatcaacggctacgataactatgaagaagaactagaggaggacgaagaacaaacttaccaaccgtttgacatgacgacggagagatctgatttcgaatcaatgctcgatgatttcttggacaattacgaactggaaagcggtggccgtaagctagctaagaaggataaagaaattgacagactaaaggaagcggcagacgaggtgagtaagggtaaactgtccctaagaagaaatcgtgagagacaggaaaagaagaagctggaaaaagtaccaacacgctaa

SEQ ID NO: 6002 - DNA, 405 bp, Saccharomyces pastorianus
atgaaccctgcactaagagaagtcttggaagcattagaagatgaagcatatgttgttaatgacgatattgtagttgaagaccccaggaaatctaatgctgagaaaagggcaggagccaagaaggatgatgatgacgcagaagatgatatttttgcccagcttttaggaagcggtgaagcgggagatccagatgagtttgaagacgaatttgatgaatgggatatcgataatgtagagaattttgaagatgaaaattacgttgaagaaatggcacaatttgataatattgaaaacctggaagacttggggaatatcgattatcaagccgatgtcagaagattccaaaagggcaaatccactttggagaagctaaattcggacgacgagttttccatgcaggtttag

SEQ ID NO: 6003 - DNA, 576 bp, Saccharomyces pastorianus
atgtgtaacttgcaaccaacgttgctacactccctcgatattgcgtttcgtacaaattcatcattagacccatccaataccgcaaacggtatagtgtgcacttttttttttgaatattcgtacgtaattagagataaagcatcacataagagcttctcgtcgcttatcccgacgttggtaatagcacaacaaattttgttttggcgaggaatcaagtttgcaggatcccatttgccacctagtccggtttctataatgcaccactggcaacatttcttggcgaaatatacgaatgctatacttgttagcagctcaatggtgttacactgtaaatttaaagattcgtctagttttataaggctgttcgcaatctcagaatactctttcaaagaaatggattcattgttaacgctgatagcttctctatcgttaagcaagaaagaagtagtatatctaccaaccaaaaccttctgccgctgtggttccgtaccctgtaatatggatgttaaaaatgtagacactgtttccttaccatttgttcctgctatatgtattattttcaaactgctcatatag

SEQ ID NO: 6004 - DNA, 741 bp, Saccharomyces pastorianus
atgttttggaaaaaggatccaagcgttacttgggaaagaaaacatatcaacaacattgactttagctatctgaatgtagcaataattggcggtactggtggaattggacgcgccataagtagagagttggcgcaacgggatgccaaggttactgtcgtcgggcaaacgttcaaggacgaagacttggctgacaagattaagtttgtcaaggctgacttgagcttagtatcagaatgtaagcgtatttctcacagcgatgagattccttacgagaagctgacacatttgattttcactactggtatcattgcttcacgccaaagacaagctacaagtgagggattagagaaggacatggcggtgagttatttgagtagatatattatattccatgacgttgccaagcgactaggcaccaatagaacgaaaaaagatgacttgccaaaagtattcatcgccgggttcccaggcaatggccaactgggggacccagatgatttgaactctgatgagaaaaattacagtgcctatgccacacacacaaacacggtagctgccaatgaatgcttggttctcgacgctacggacaggtatacgaacatagacacttttggtttgaacccgggcataatcaaaacgaatatccgcagtaatctccttggcagcaacacctacatcgccgcattgcagaatggatcattagttggactttccaaagtgcagagacgtatgccaaaatga

SEQ ID NO: 6005 - DNA, 213 bp, Saccharomyces pastorianus
atgatctgtactttgattgtaagccctgccattgaatctcgcagcgggacaatgttcagtaacaagggagatgccattttgcccacgcctggtttgacgaaaaatgttgtcgagaagttcatggaaaattcggaactgttggtggaaaaagctctgcagaatcaaagccctcccacctccagtaacgaaggaatatatacgggtagtttataa

SEQ ID NO: 6006 - DNA, 213 bp, Saccharomyces pastorianus
atgaaaatgcggcatcccaaatatactggagcagcgcagagcaatgtgcccagaccccaagatgccatctctgtcaaaattactttgacaataggaagccatgcaggcgatgaatccaacggtcacacgacacggcgtgccaagcttgtggaaagaaatcttcgcatccaaagcatctgggccaccaaaacgcgtacaagcatacgcttttaa

SEQ ID NO: 6007 - DNA, 1440 bp, Saccharomyces pastorianus
atgagagagcaaaaaccagaaaaaagagaggtaagactaacagtgatctttagtgctcatattaaaataagggttacaaggacggtgaaaagtggcaaagagagcgtgatgacggacggaaaagcaaactcagttcagaatatgaacggaaaacagggagctaacttggcctcatctttgcctactacacaagtaccggtttcgatattgactaacaaggagaaaagcaaaaaccttcacgatgagtcaaatgtggaaggatctaacaacaacgacgatcaatcgaggtctaattctaatagaagaaatatttataaaaacgactttagtacgaatttgagagacttttgttttgctgatttgaaacagagtagcgaaagaaccagagatggccatgatatatatgttaacacgaatgtgccatcgaataacggccagcaaaatagcttctcaccttctttgccttctgctgtttcattcacggtgccagaggtggaaagaatgcctcatcatagatattcaatttcgaataaacccgggaaacagcaaatgcagcaacaagagcaacaacaaaaggaacaactacaggagaaactgcgtcaagaaaaacaacaagagaaagaggtgaagcaaatacaagaagaagtgcagaaaaaacaaattgaaagacaacaactaatagaaaaaaaggaaaggatagcgaatgtcatatttaaggagaagacaaccaaagacgatgggaactgtaataaaactcccgtaccagatggagcagacaaatgtgacgatgaagtggactcaccttctatggagaaaaattctatcgttcacatgcctggtgattttatttatttcaatcctaagcccaacgcttctaaaccgatggacgccaaggcggcacaattagtggctaacagcagctctatgcataaaaataaggaggttattgcaccacccacgggaccacgtgtgccctttacagagtttttccaaaaggaggacgacaaaaagttccatatcttgattggcgccacggggtcagttgctacaataaaagtgcccttaattattgacaagttattcaagatatacgggccggagaaaatttcgattcagttgatagtgacaaagcccgcagaacattttttgagagggctaaagatgtctacgcacgtcaaaatctggagggaggaagatgcatggatatttgatactgtaaacaagaatgacgctaacctaaatctgaaccttatattacatcatgaactgagaaaatgggccgatatttttctaatcgcgcccttgtctgccaacacgttggctaagttggccaatggtatatgcaacaacctgttaacttctgtgatgagagattggtcaccgttgacaccagttttgattgcacctgcaatgacacttttatgtacatcaaccccatga

SEQ ID NO: 6008 - DNA, 309 bp, Saccharomyces pastorianus
atgggtggcatgagagaatggacagacattgtggagattgtgaggaggagaataaacgagataagaaaagccagggatgaagagacgggagacaaagagcaagaacaagaagaacaggagggtattaacaacgggaacgacgacgaagaggaagatgaagaagacgatgacgaagaggaggaggcgactcgaaacgaaacggcctcggatgagagcgatgatgatgatgatgatgatgatgacgacgatgacgacgacgacgacgacgacgacgacggagacggcgacaaaggagaggggggggactga

SEQ ID NO: 6009 - DNA, 990 bp, Saccharomyces pastorianus
atgagtaattcactggaggagcgccttcgtgccaattcaagcgcttttgatggtttattggctttaattcctgccaaatactattacgatgaaacaagtcaagatcaatggaaggccaagaagaaaactaaagtacaaagtaaaagtgacaaagtgaaaaaactggatcccgaacaacgtgatgatgaaacatccagtgctctagaagttatgaaaaagaaggaaaaagatgccaagccagtggtattgcctggcgaaaaactcaagctcatgcagaagcagaaacagaagcagaaggaagcagcagtagaagaagagcaggactccaagctagaggtaaaacaggatggtcctataatggcagcattagaagaagaggaagatatcaaggtaatctttgatgatgaaggaaacgaaataccattagaatctgagaaagacaccaaagaagttagtaagattaacgaaaagaaaactatcacagaagaagagaagttacaaaagaagaagaacttggaggctttgcgttctaagttacaggccagaatctcagatatgaagactaaaaggaaagcgcctggttctagagaagctattcttgctcaaaggaaacgcaaggaagagctaaagaagaggaagcgccaagaaaacgaacaggaacaggaacaagatgaaaatggatctgattccgatgtggacgaaatcgatagtgatttggaaaacaattcgaaaagaaaattcaagaaggccaaaagggactcagagattaatgcagatggtgtgatgtttcagaatatcatatttgatgacggtgcgagaaccacgtcagacctacagagattgagaaaggctggtagaacgaaaggcccatccaagaacgacgctaaatcccaattaaaactgatggaagccaagagagaaacaaatggaagccaaggacgaactagaacaaatcaagttgaaggaaaaggaaaagtggctataggctga

SEQ ID NO: 6010 - DNA, 219 bp, Saccharomyces pastorianus
atggctactgcgttatatactgcaaacgattttatattaatctctttacctcaaaatgcccaacctgttatcgcccctggttccaaaaccgatttgtggtttcacgagagtttaattggcggtagagcatttgtttctgattttaaaattcccgaattcaagatcgggtccttagatacattaatagttgaatcggaagagctttctaaagtagatacc

SEQ ID NO: 6011 - DNA, 1260 bp, Saccharomyces pastorianus
  modified_base (1181)..(1182): a, c, g, t, unknown, or other
  modified_base (1218)..(1219): a, c, g, t, unknown, or other
atgacagacgaaaaaagactggaggatttgaggtccaaaatcatggagtctataggaagatcagacaaggattctgtgggagttgagaataaaagatccaacacaaataatggttatatagatgcacattccaagagacaaagaagcgatggtaagcttccgactgcgccaaaaagcagagatgcccgatattcccgcagtaacggactacagtcttcagctattgtgaacgcgaatcgatctacttatgaccaatcaagggctggtcctcatcgccaaggtcaacgagatgcattagggagatcatacaatagagaaaacagatataatactcacggctctgttccacaatggaacgacaattcctttagcagacaaagggatgaaagaagaggaagaagcgaaagatcagatagaagagacaggaacggaaatgaaaactacggtcgttttgggaatcaaaggaaaaatgacggtcgtaagttccacgatgaccatgaaaaaatgcaagtacaaactaataggcacgatatgaactataatgctcaaaatgttatttaccccggctcagcgtttgattctccggcttactataacatggcttcctctaaggcaaattcaagactcattatctcgggtttatctcacagcagcaatacccgcattgtagcggatttgaaagctttgctagaaaattatgttgcaggcttgaaggaaactgagaagaattcggaggattttgaaattacggaattttttattggtgaaggaagccccaaccatgtcattgtcgagtttagctcccagatatgtagtactatggttttggcttgccgatcatttttcaaagcgaaacttggtgatgttgaattagattggaggaggccaaacgaatacgttcaacaactggatcatttggttgggttttgcagaggtacggtaatcgctctagagaatttagaaaatgtgaaggaagctaatgatgataaaatgaaagagttactcgcgtcatttaatatagcaaacggtgcttccaaactgcttttttacaactgctctctcggtgcaaataatactgacaaagaacccgaatttaccaaatgcgtcctattattgtttgaagtagtcactcccagaatatttcgtagaataaatctaacaaccatttacaagtggttcannagccgaacgaacggcaagaacactcgcaagcttacnnatcgatggattcacgtttcaaagactatgccaaagtcttga

SEQ ID NO: 6012 - DNA, 228 bp, Saccharomyces pastorianus
  modified_base (15)..(15): a, c, g, t, unknown, or other
atggcttttgaactngtttggacccatttggatttgaaggatgagacattcatcacagaggtcaaagaaactttaaagtatactgtaaagggaatagaagtgatcaagatatgtcaaccgggtgtagattacagacttaattatgacaacctggtcgtaagtgctggtaatattatatcaagttcaaaacattggaagcgcaaaaacgcctggaaaactacgggcacg

SEQ ID NO: 6013 - DNA, 1767 bp, Saccharomyces pastorianus
atgtctacacaatttaggaagtcaaatcataatagtcatagcagtaaaaaactaaatcctgcgctaaagtccaaaatagacacgcttacagaattgttccctgactggacgagtgatgatttaattgatatagttcaagaatatgatgatttggaaactataattgacaaaattacatccggtgcagtaacaaaatgggacgaagtaaagaaacctgctaagaaggaaaaacatgaaaaaaaggaacaacaacatccatatgtcccccaacaacatttgcctaaccctgaagatgatattacatacaagagctctagtaataacaacccttctacttctacaaagcataataccagtaacaattattctcaggtcagaaataagaagaaggtgcaagcaacacgagctcatactactggaaagcacgtcaatatcgacaagggaaagcccgttccttccaagcctgtctcaaatactacatcgtgggcagcagccgtttctgtagataccatcagacatgacgttcctcaagatacaaatactaatgataatgaagaagaatcagaagaagaagaagaagaagaaaaagaaaaagaacttgaacagaagcaagcacaggagcaagaagaacagcaactgcaagaagaacagcaactgcaagtagaacaagaaaacaaagaagaacacaagcatacagaacaaccttcattaatgtcaaagaaggcttctgagccaactacctcccaaccaaagaagatgtcatgggctgctattgccacaccaaaaccaaaagctgttaaaaagacagactctcctttggagaatgttgatgaaatgaagaaggaaataagtgaaattaagaaggaagaacaaaaggcggaatctggtccagaacaggccaacgaaacagaggccgttgaaaaggaggaggaagatgaggaggaagccgaaagagcagaattttccgaagaatctagtgaagaagaagtcccagaattgaacgaagaagacgaagaggatgaagagaatgaattagaagaagaaaaagtagtttctccagaggaaaatgttgaagtcattgaagaaagagttgaagttactgctgtcgttccagaaccttcgggagctcaagtaaataccgtttcgcaacaagagcaacaagagcaacagcagcctgtccaaccacaaactcaacaagaacaactatctcaaaactactacactcaacagcaacaacaacaatacgctcagcaacaacatcaactacaacaacaatacctatcccaacaacaacaatatgctcagcaacaacagcaacagcaacaacagcaacaacaacctcaatcacaatcacaacaacaacaatcacaacaacaacaacaaccacaaccccaatcccaacaaagtccacaaagtcaaaaacaaggaaacaatgttgctgcccaacaatactatatgtatcaaaaccaattccctggttattcttacccaggtatgtttgactctcaaggatacgcttacggtcaacaataccaacagcttgctcaaaacaacggccaaaccaccggtaatgctaatcaatataacttccaacaaggttatggtcagactggcgccaacaccgccgctactgctaacttgactagtgctgccgctgccgccgccgctgctgctgccgctgctgcttccccagcctcagctcatgctcaacctcaacctcaacaacaacaacagcaacaacaaccatacggcggatcgacaagctga

SEQ ID NO: 6014 - DNA, 483 bp, Saccharomyces pastorianus
atgtctagcaaacaagaatgggctaactcggccattcaaagtgaatcgagtggaagatcactcagtaatgtcaacaggcttgtaggagaccaacaatcgattaatgatcgtgcgttatccttgctgcaaagaacaagagcaaggaagaacctgtttccaagaagagaagaaagaagacgatatgaaggtcctcaggacgacgtagaatttgaggcagattatgaggatcatgcaggaaatctcgaaacggaaacagaaaacggagatgaaactgaagtagaagcagatgtgtcaacggttaagcaaactcactcgtacgccttagatagatatgttagacaaaaacggagacaaaaacaaaggcagcagggcttgaagcgtgtggaaaagaaatatagtcctagcgaattagctctctacgaaattcgaaaataccagcgttctacagatttactaatctctaaaattccatttgcagattag

SEQ ID NO: 6015 - DNA, 1440 bp, Saccharomyces pastorianus
atgtttaggcaatcaaagagaagaatcgcttccaggaagaacttcagctcgtacgatgacatcgtcaagagcgagttggatattggcaacgtaagcgctgctaaccaaataattttaggttccactttgtcggaagaggagaagacactgtacgcaaagctgcacgagtccaaattatcgttttacgatttaccgccacgcggcgaaataaccttggaacagtttgagatttgggccatcgatcgtctcaagattctgttggaaatcgaatcctgcctttccaggaacaaatccatcaaagagatcgaaaccataatcaagccacagttccagaaattgctgcctttcaacacagataacttggaagacaagaaaaaggattattactctcatttcattttgagattatgcttttgtcgttccaaagagcttcgtgagaaattcgttagagcggaaactttcctgctcaagattaggttcaatatgctgacctcagccgaccaaacaaaattcgttcaatcgttagatctgcctttactacagtttatttccaacgaagaaaaggcggaattgtcacaccagttgtaccaaaccgtctcagcttctttacagttccaattgaatcttactgaagaacaccaaagaaggcagtacttccaacaagagaaattcataaaactaccgttcgaaaacgtgatagagctagtgggtaaccgcctagtgtttttgaaaaacggctatgcttatttgccgcggttccaacagctgaatttgctatccaatgaatttgctagtaaattgaacgaggagctattgaaggcctaccagcatcttccaagactgaacgaagatgacaggttgctgccaattttaaaccatctttcgtcaggatacacaattgcagactttaaccagcaaaaggcaaaccaattcggtgaaaatgtagacgatgaaataaatgcacaaagtgtgtggtccgaggagatcagctcgaattatccattgagtatcaaaaacttaatggagggtttgaagaaaaaccatcatttgagatattacggtaggcaacaactaagcctgtttctaaagggaattgggttgagcgccgacgaagctttgaaattttggtcagaagctttcacaagaaacggcaacatgacgatggaaaagttcaataaagagtaccgctacagttttagacacaactacggcctcgaaggtaacagaatcaactacaaaccgtgggactgtcacaccattctatctaagcccagacccggccgcggcgattatcacggatgcccattccgtgactggagccacgacagactatctgcagaactgcgttccatgaaactcacccaagcacaaatcataagtgtcctagattcgtgccaaaaaggcgagtacacaatcgcttgcaccaaagtattcgaataa

SEQ ID NO: 6016 - DNA, 306 bp, Saccharomyces pastorianus
atgtgtcttggtatgcttcttagtagacattgtgatatgcttggtgggtttgcgcggaagatagtttgtaaaatcggaggagaacagagccttttaacggtgatgatgagtgaaagagcagaaattgtactttcaatcagaaatcaaatacattctctcactaggcacctctggaaacactctgttgtttatttaggtttatatactttattcagactagaaaaggaaaaaaacaaaaacgggccgagcccagaaggaaccgcgtcaggttgctcgagaaggggcgggggagaaggaggggggtga

SEQ ID NO: 6017 - DNA, 657 bp, Saccharomyces pastorianus
atgttgcaatttaaattggttttattaggtgactcgtctgtaggtaagtcttccatcgttcatcgttttgttaaggacacgttcgacgaattacgtgaaagtacgattggtgctgcttttctatctcaatcgatcaccattcatccaaatgatggtaatgaagcgaatgcaaagggcgtcgttgtaaaatttgaaatttgggataccgctggccaagaaagatataaatcattagcaccaatgtactatagaaacgccaatgcagctttggtggtttacgatatcactcaagaagattcattgcaaaaggcaagaaattgggtggatgaattgaaaaataaagtaggcgatgacgacttggtcatttatttactagggaacaaagtggatttatgtctagggacacctgatgctgaaataagccaagaatcaaacgaagatggggataatgaacaaaaggtaagagcaatcagcacagaagaagcgaaacaatatgcacaagaacaaggtttattgtttcgagaagtgagtgccaaaactggtgaaggtgttaaagatattttccaggagattggtgagaaattatacgatctgaagagggacgagatcttgtccgagcctaatagacagattcatcgacgtaataatgccaggtag

SEQ ID NO: 6018 - DNA, 1548 bp, Saccharomyces pastorianus
atgtttctggactattctggatatgaggctcttactgaaatcaattcttcctttgggaagtatgttctgctattacatcaatttgaaagttgtcagagattgaaagatcggctgcaaatgctgaaggatttaggtaaagaattcagcatattcgaagggttacgtgtgggagactttaaggaatccaaaagcatggttcatagattctataccatggttatttctttaaagcaaattatggaaatcgggccattaattagacgcagccccgctgtgttaattgtagaatttggaacatctatagaagactgtcttgatgaattagacccattgcacccactcaataaggcctacattttcatttataaacaatgggcctattaccatcagtattatgtaattgaaaaaataaagaaggttattattaacatggctccggtagaagaagatgattggagtatccttcacaaggttatttactctgatgggttccctgaaagacgatataaaaataagaaatacttgggtgacatttatattccacaaccattcatgaaaagcaaaaaaatcacgaccatttccaagttttcccagatttctaaaatttccaacgtcaaggtctacagatttcacactacagtagtgagtgatccttctaaactgagcaaaaataatttgaaagttcaagagcttggcgataaagattttcctaatcttatatggaccctagaacctgaaaacttttatgttgatatgaaaccctacaaggagcaccgagaaagaaagaggcagagagaagaagcggctaggctaaagttgttggaacaagaaaaagggagcataatactggaagaaaaaaatgaaagaaatggcaatgaaatcaaagtacttcccggattgaaaaatatcatgaaaacccctcttgccaataaagttgttaacatctttagtaattatgcggctgctgtaacaggttatactcaagctattgaaacagacgtaaacgacataaacggaagcactcaacagaaagatggtgacataccagaattgtcaaatggtaaattagcccaacaatccaggagccagatccaagccggtccaaagacacaaacaaataattcacctttgcaagcagaattccggaataacgatgaaaataacatatcgtggaacacaactatgcaggatatagatccaatttatatgaacgaaaaatgtatcagagtttggagaaaggagcagcaaatgctaggattggaacgggctagaacctttgatacgagactccagaaagatcctatcgcagcaaacaatgaaaagtttggaaagccgggaaataatccaaaaggacgcgccaaatctcaacgcattaaaatcaaaacatcgaatacggcatccactatcatcaataaggatgagctgaccgtaaatagtcatagaatagaaacacatggcctagtaagagaatacttcaaggcaaaattcagtatatcatctaaaggaagcaaacgaggtgagaaaccggacagcaatacacttatataa

SEQ ID NO: 6019 - DNA, 1554 bp, Saccharomyces pastorianus
atgtctggttctttttggaagttcggtcaagattactcgatagagtcaccggtttctaaaattctaaatagtgcctttattaagatcgataaagaccaggacgaggatgtacccactagcgcgattgaagaacacgttgacaccggtggaaacgaaccttccactgatggattgattcctgaaaaaagtattggtgacgagggtgacgacaaggaggaagaaaatgctctaccgaccacggaatctgaatatgagaattataagcctaatttagaggttctggatgatttgctggatgatgatgaactatacacggaattaatgtgttccaacttcaaacttctaatatttttgaagtatcctgaagttctatcaaaattgatagaatatgttaccaatgaaaaggttctcgacgaagcaccggatagtatcgcaaagcctgaaataattgaaggcgtaaatgatcaacccattttgatagatcatggcgaaaggaaggaaagtggggaagctgaagaagcagaaaatgatagcgacaatgattctaacgacgaaagaagcgttaattccgaagagacaagcattactttacctccagaatctgaagaacagttggagactagaagagctagaatagcagcagagatcttgtcggctgatgtatggcccatatctgcagcaataatggagaacagaaacctgctcagtaggttatggtcgatactagatcatccagctccgttaccaatacctgcttctacgtactttatgaaaataaatgagagactccttgacatggatattacaggaatgttagggtttattttgcaccgtggtaatttggttacgaggttcttaacgcatgttgacaacccttccttgatggactttcttttaaaagttatctcgacggataaaccggattctcctacaggagtcattaagatattaaaagcacaagatttaatacctaaacttctagatcaccttaatccggagtacggtgtctctacacaatcagcagcgggcgatttcattaaggcatttgttacattgagcactaactcgagcaatgaactcgcttcaggaataggtcctaacgaattgacaagacaattggtatcagaggaaatgatggagaaattaatcaaaataatgttaaaaggtggcacatgtttaagtaatggagttggaatcataatagaattaatcaggaaaaacaattcagattacgatttcatccagttagtatacaccacgatagaaagtcatccccccaatgatcgagatccaattcatttgacacatttggttaagttatttgctaagcatatgcctgattttgctaagatgcttaacgagactaagttgccaataatggaaatgccgtttggtgagattgaacctctaggctttgaaagatttaaaatctgcgaacttattgcagaactactacactgttctaatatgacattactcaatgagcctaatggtgagttgattgctgaagagcgtgatatggaaagaactataagaattggaaaactcggttga

SEQ ID NO: 6020 - DNA, 1086 bp, Saccharomyces pastorianus
atgtcaagggtgtcgacggcgtgtggaactcacatggcccaggcggatggatcgatagtggaagaggcggatggtttgcatacagtcccagacgaattagacgaacaggaagtgttgcagcaattgcctgagaacggcaacacttccagcagcttgcaaagagaaaagaggagaactcccaatgacaaggagactgagaggaagcatgcgttgcccaaatcgtttgtagacaaaaatatgagcgacgtgtcacccaaccactcgctggaccatcttatgctatccagtgatcgcaatccccgcagggggtctgccgaggaaggtcccagccgcccccataaccatctccacagtagcaacaataatattcattccaaacgaaactccaaaagggaggagtcgaagagtccctcgaggcacccttctccggcggcttacacgcagcagcagttcaatggctggaagaaagagtttggtcaagctttcaaaaaaatatctgccattggtagactaaggtcttctgtgaatcctgctacgcccactggcagcggtcatcgccacaaccagcatcaacaagtgaatgacgaagacttgtacacacagagactggcatccgaccttctggactcactattgtccgggtgcccggcttcgttatttgcaagcacacagttcctgagagatgaacacggtaagagaagggcgcccatgctgttagctaagctggacgttagagtatctcctttgaaaagtgagaataactttttggaccttacaaacggtaatcaccaccaccaccacaataacaacaacaataatagcagcaacaatatcacccccaacaccaattctgatagacgaccttcattgccaagaagatccagcattatgagcatttcttctaacgtagccgaatacatgtatggcagaaacgaaaattcattgtttaggatacacttggaatacggcattgatgataacagactcaaatggtctatcgttagaagctataaagatatcaaatcactacaccataaattgaagatcgtcgcgtttcagcaatctaccattagcaactttatagtg

SEQ ID NO: 6021 - DNA, 792 bp, Saccharomyces pastorianus
atggtgcttagtgattcgttgaaactgccctcgccttctctttctgctgctgctgctgtcgtggacgactgtgatagtgaggaccaccccacgtgccagaactgcttcaccgttaaaacccccctctggagaagagatgaacacggtactgttctgtgtaacgcttgcggccttttcctgaaattgcatggcgagccaaggcccattagtttgaaaactgacactatcaagtccaggaacaggaaaaaactaaacaacaatgccagctctaactctaacacccacactaacgacccaaataaaatatttaaaagaaaaaaacggctgctcacaactggtggaggctcgctgcccagtaataacccaaaggtatccatcttggaaaaattcatggttagcgggtccatcaaaccactgctgaaaccaaaggaagcactgcccagtgctaaagactaccccatgcagcggggaaaatattctttggaacccagcgagcccagtgggaagaactacctctaccaaatcaacggttccgatatatacacgtcaaatatagagttgacaaggctacccacactgtcgacattattggatccgtcccccttctcagatcctactataccggagatagagctgacttggaagctgcacaacgaagaggaagtaatcaaattgaagacgaagataagcgaactggagctggtgacagatctatataaaaagcacatattccaacttaacgagaaatgcaagcaactggaggtggagcttcactcccgagctccaatctag

SEQ ID NO: 6022 - DNA, 423 bp, Saccharomyces pastorianus
atgttttttcagcccctcaatgctcttaatctttgtgcaagtttgtcttccttttcgtcgtcaacattaacctctttcgcctttatctctggaacattgtccagttttgcactttgcttcaattccatgccattttcgtcagcaactttgctcattagttcatccaccttatcgttgtccaccagcatggcatccgaattcacacccatatcttcatatacgttaacactggtgtccaaatcttcgaattgctgttcgaacttgtccattatcatggttatctgttggaggttcatattctgtaacgccttatccatgcctttgcaaacttgccccattgatgctgacacctgcctcatcgtgacggcggtttgtacccttgatgcgaccgaatccacccgtgatgcacttcaacagttgtaa

SEQ ID NO: 6023 - DNA, 519 bp, Saccharomyces pastorianus
atgccgttctcatcagccactttgcccatcagttcatccaccttatcattatctactagcatagcatccgaattgacgcccatatcctcatacacattgatactcgtatccaggtcttcgaactgctgttcgaacttgtccattatcatggtgatttgttgtaggttcatattctgcaacgccttgtccatgcctttgcaaacttgccccatggatgcggacacctgtctcattgtgacggcggtttgcactcttgatgcgacagaatccactctggatgccagtttcagtagctgtaaccgctcgtttttcttccttatagcattggacgcgtatatacgggagatctcctcattttcgttgagagcacgtttaagtttgttggtttcttgtttctcctccttcgacgccttatttgcttgcttttgcagttgttttgaggtaaactttagttggaaaagcgtattctccaagcctgcggcggaattacgtgacatttctatgggataccggacctaa

SEQ ID NO: 6024 - DNA, 912 bp, Saccharomyces pastorianus
atggcagaaagtctagacagatgtatagacgatatcaatagagcggtggactccgtgtccacgctgtatttcaaaccgccgggaatatttcataacgccatcctgcaaggaaccagtgacaaggcaagtctcaggaaagacatcacaaggctgatcaaagactgcaaccatgacgaggcttacctgctgttcaaagtcaatccggacaaacagtccgtgtcgcgtagagacggtaaacagggagtgttcgactacgtgaacaaaagagacaccaatatgaaaagaaatagaaggctgggcaaaccgggtgaaaaaccaatcattcatgttcccaaggaagtgtacttgaacaaggatcgtttggatttaaacaacaagagaaggaagacaggcgcaacgggcggtgttggcttgaacaacttcatgttcgacaccgatctcataggttcctcgcttatttctaattctagctcaggtacattcaaagcattatccgccgtgtttaaagatgactcccagatccagcgactactgtatgccttggagaacgggagtgtgctcatggaagaagaatccaataaccaaagacggaaaaccatctttgtggaggacttccccactgatctaattctcaaagtcatggcagaagtaacagatttatggccgctcacagagttcaagcaagaatacgaccagttgtcccacaactacgaacaactgtcttccaagctggggttcatcaaaaaggaggttctgcttcaagatgaccgtttaagaaccatgtcacagtaccatccttcctcatctcatgatgttgccagaattatccgcaaggagaaggacgaaatcaggcggctggaaatggagattgcagacttgcaagagcaagaaaccgctcccatgcaagagtag

SEQ ID NO: 6025 - DNA, 705 bp, Saccharomyces pastorianus
atggcggtgcttatccgggtgccaccggattctatcgcggcggagaagctctatacggttagctgccaccagcgggatgctcatcgcatagaaccgttctacgctgcgttcgctgatctggtcgacgctggcggctgccagcgtcggtgtgcctggcagcggcagcacggttggctcgcctttgggccggcgccagtactggcggatggctcgttctgtttcagcttcagtctcggtgactttagcctggtcgaaggcagaggcatctatcccgtcctcgccctcgccctcgcttgtgctttcgccctcgttctcgatctcgatctctcttttctgtttcaggcggtccctctcgctctcagtggtgacacacttgtaacccgctatgctttcaccgtactcgaaaagcgcactgccatgattcgccggacttgtgcgttgtcgtttcttttttggccggttctgcggactctccatagccaccggcaccagccgtatagtaggtttctgtttctcttcgccatggcgctgcgtttgcttcacgggcgtgtcaccaagatggcctacgccttcgaggctcttggcctggacttctctcttgctttttctaacaaagactggccgggcgtatttcttttcggcgtcattgtcgtcatcgctagtcacgtagtcgtcgttaccactcatgccgttggtcttggttaa

SEQ ID NO: 6026 - DNA, 5658 bp, Saccharomyces pastorianus
atgtctgatcaaaatgcttcaatgagaagcacacaaaatgatggagacacaggcgaaaggctaaatgccattgcctctttttttgattgttctttagaacaagttaaatctattgatagcgatatcgtaacacacttgaacgataaacttttacaatttaatgagcttaaatcagaaaacttgcaaatcactgtctcatttgatgaattaaaaacaaactctgcgaaaaaaattagtagtttgaaaacagagatggagagtgttttgaggcaaaatgatgaaatccgaaaagaaagaaatgacacttctgccaaattcgagtctctacaaagagaaaagacacagctatcgaacgaattagagtcgatacagagaaaggcaaatgacttgaacgaagagaaaaaggaaattcaaagcagccaacagcggactttgaaaatactggacgaaagactaaaggaattagaaatggtcaaggccgaaaataaccgctgcgacaatgaatgcaaaaaattacgatctactatattagaattagaaacgaaacatcaatcttatatttctagtgatctgaactctaagtctcagctagaaagaagaacgcaagagctaaatctactgcagtcaaataaagattggctggaaaaggaattgtcgtccaaaaatgagcaatatctttcatacaggcaaaaaacaaacacaataattacagaaattagaaatgatttaaatcgtttacggaatgatttccaattagaaaaaacaaataacgatgtcttggggcaaaaaaacaatgagctatcgaaagatttacaagaaaaacttttacagattaaaactttatcagattcttcggatagtgaaaaactcgacttttctgcagagattactttaaaacaacgtttaatagaccttttggaattacaattgaatgcagtgaaagaagaattaaacaatacacgagaatccaactattctgacgtagcctcaaatgactcgaaacggctcatatttgaaaatgaaaagttacttaaagatttgcaatcaacgaaacaaaaattaacacaatgtgaaaatgagtaccttcgcctatcatctatcacaaaagaggcaagtaaagaagacaatgtcttgacttctaaatctaatggagacttcatattattgaggaagcaattaattaaagaaaagcgtgctaaggaacatcttcaaaaccaaattgaatcatttattgttgaattggaacataaagtaccaattatcaactctttcaaagaaagaacagacaccttggaaaacgaattaaacaatgctgcattactactggaacatacatccaacgagaagaatgccaagattaaggaattaaacgtcaaaaatgaaaaactggcggaatatgaagatgaaatccacatattgtccaaacaacgtcttgatttatgtcgtcaaattcaatatctcttgatcacaaattcagtatccaatgactctaagggacctttacgcaaagaggaaatcaaatttattcaaaacattttacaaaacgacgatagtgctacaactgaatcagactcgcaaaaaattgtaacggaaaggttagttgaatttagaaatattattcagttacaagagaaaaattcagaattgttgagagtaacaagaaacttagccgataaattagagtcaaatgaaaataaatctaaacaatatcttaagaagattgaaaccaaaactataaatgaagctaaagaagcgatccttaccttacaaagccaaaaagcacagttagaatcgaaaatccacgagttagaaaaggaacgagaaaaatttaaggactggactttggatcaaaaggcttcacctaataactcgataatacaacaattaactgagactaaaagagagctagaatcccaaatccaagacttacaagcccgtatttctcaagttaccagagaatctaccgagaatatgtcacttttgaataaggaattacaggacctatatgatggcaaaagtagcctatcaattgagctaggaagggaaaagtcatctaggatattggcagaagagaggttcaaattactttcaaatacgctagatttgactaaagcggagaacgaccaattacgcaagagagcagttaatttacaaaatgccatctcaaaacaagattcaaagacccaggagacacttaatgagtacgtttcttgcaaatcgaaactaagtgttactgaaacagaattatccaatttgaagtcagagcagacactgaaaatcgaattagaaaaaaacctaagacgagaactaagtgaactttcttctgagaaaaacagtttacatataatggtaactcaattgcaaaccctccaaaaggaacgtgagaacctattagatgaaattaaaaaatcttgtcaaaacaaaataggtatattagaaaatgcgcaaaatgaactaaaaaccgaagctattcataaagaccaatacattaaacaactggaagaagataatgacacaaaagttgaatggtatcagaacaaaattgaaactttgaggaaagatcatgaatctattatgaattctttaaatgaaaagcaaattgaggttgagaaattgcagtatgaagtcaagtctttagaaaaggaaatcgaagaaaacaagattcgtttacatacttacaatgtactagatgaatctgttaacgatgattccttacgcagagaactggaaaagtcgaaaataaacttaactgaagcttattctcaaatccacgaatacaaaaagctttacgagactgctgataaatctctacaggaaatgacatccatacaagatgaatctaataaaacattttctaatcaaattcaaagtttaactgatgaaaagaccactttagaggataaagttttccttctgaaagagcaaatgtctaatttgaataatgaattagatttacaaaaccaagccatggaaaaagaaaaatccgaattcaagaaaaagatttctattttacaaaataacaacaaagaaattgaagcggtcaaatctgagtatgagtccaagttgtcgaagattcaaaaggatcttgaccagcaaactacatacgctaatactgcccaaaataactatgaacaggaattgcaaaaacacgcagatgtttccaagactattagtgaactaagagaacaattacatacttacaagagtcaagtagaaactttaaacctaacacgtgaccagtttgaaaaaactctaaaggaaaacgaaaacaattggaattcccaaaaggagtctttattagaacagatagatctatacaattcacgaatcggagatctctcatcacaaaataaactattgtacgatcaaattggattatacaccactgcgggcaataaaggtgccgacacaaaaagtggacctgctttgaataatgatattttaaccacattacgtcgtgaaagagacattctcgacactaaagtcgcagtagctgaacgagatgctaaaatgctaagacaaaaaatttctttgatggatgttgaattacaagaagctcgtacgaaaatgtgtaattcaaaggccgaaaatgaaaaacgttcctttatcattgaacaacatgatgagattatggaaaagctaaatcaattgaacttattaagggaaagtaatacaacgctgcgtaatgagctcgacaattccaatagtaagaacaaggaacttcaatctgaattagatcgactaagggataatattgcgcctatcgaggctgaactagccgccctaaagttttccattcaagaaaaggaacaagaaatcagactaactaaggaagaggttcatcgttggaaaaaacgctcacaggatataatggaaaagcaccaacaattgagctcaactgattacgaaaagctggaaactgagatagagagtttgaaagcacgactcgaagataaaacgcaacaaggtgctgattcggaggaaaagtttaacagattaagaaggcaagctcaagaaaaattgaaagcgtcgaaactttcacaggacttattgattgaacaactaaatgagttaaaagatgccaaacttgcattagaaaagtcatttaacgatgccaatgcaagaattcaagagttggaagatgcaaaagtagcagaaaataggaatcagttaaatatgatcaaaaaattacaggaagatacaaaagagaactctaaagaactcgaaacaaagttagaagaaaacacaatttcctatgactccacggttaagaaactaaacgaagaaatttgtattttaaaagaagaattagaaaagcaaaggcaaatccagcagcagatccaagctgcggcaggaacaggacaagaagatttatcgaaggtcgttgagtctatgaaaagatcatttgaagaagagaaaattaagttcattgaagaaaagaccagagaagttaatcaaaagatacgagaatttcaagaggctcaagaagcccaagaagcccaagaagctcaaaacaaggttattcaaccaagcaacatcaatatagatgaaataaaaaaacaatgggaagcagagcacgacgaagaagtttcgaaaaagatccgtgaagctgaggaagctctcaaaaagcgcataagattacctacagaagagaaaatcagcaagataattgaacgcaaaaaagaagacttagagaaagagtttaacgaaaaagtggaggaaaggttaaagtcgataaaccagtctggaaaaatggaagatacatttcaaaagcaactggagagtaagatccaagagaaacaaagagaactagaaaacgaatacaacagaaaactgcaggaaaggttaggggaacttccgccttctgctatcatttctcttgatgataaagatcagttacgggcagacgttgaggcccaattgagggaggagttcaacgacgaattgcagagtataaagaaaaaatcttttgaagaaggcaaacaacaagcaataatgaaaacgacccttttagagagaaagcttgccaagatggaatcccaactttcagaaacgaagcaaggtgtcgatagccctcccaaacatataaacaaaatgcccaatccattgttagggttacctagaaagattgaagagaattccaattctccatttaatccactgctgtctggtgaaaagcttctgaaactgaactctaaatcgtcctcgtctggtgtgtttaatccttttacttcgccatctccgaacaagcctttgcaaagagatgaagcagaacgagagcctttgagcaacgaaacagacccgccgactcatttggcacccagtttcaatattcctgctccacagggtccgaattcctcgtcttctacactgtcaaccgatacaaatgacgaggaacgcaccgttaatgagcaggagggaaataatgtatttgatggaattggtcaattacaagacaaaaaagcacaaggaaaaggggaatacctcattgaagcagcaggtgcatcaaaggacgagacaaaatttaacaaacgtcctattgacgaggttggagaattaaatgatgatgatgatgaaattgacacagattctatgaatgaggcaaagaagatcaagattgatgatgaagaagaaaaggaagaagaaggtagacgttaa

SEQ ID NO: 6027 - DNA, 1836 bp, Saccharomyces pastorianus
atgacttcctctactggatactccagcagtgtgccacaccatctactgagtgtacattgcgatgcgacttccactaccgactactccagcagtgccgccacatctaccgagtgtaccacttgtgatatgacttcctctactgaatactccagcagtgccgccacatctaccgagtgtaccacttgtgatatgacttcctctactgaatactccagcagtgccgccacatctaccgagtgtaccacttgtgatatgacttcctctactgaatactccagcagtgccgccacatctaccgagtgtaccacttgtgatatgacttcctctactgaatactccagcagtgcttccacatcatctactggatactccagcagtgccgtagtgtcatccactgaatctaccagcagtgccgccacatcatccactgaatctaccagcagtgccgccacatcatctactggatactccagcagtgccgtagtgtcatccactgaatctaccagcagtgctgccacatcatccactgaatctaccagcagtgctgccacatcatccactgaatctaccagcagtgctgccacatcatctactggataccccagcagtgccgtagtgtcatccactgaatctaccagcagtgccgccacattatctactggatactccagcagtgtcgtagtatcatccactgaatctaccaacagtgccgtagtgtcatccactgaatctaccagcagtgccgccacattatctactggatactccagcagtgtcgtagtatcatccactgaatctaccaacagtgccgccacatctccggtatctaccagcggtgcttcatcgtcgttcaccaaagtcagcactactagttattctaaattgcctgtgcatagtatttccccaatatatccaagtaatcaaaccacgacaactagttttgttacccccccactgatttcttccaagtcataccaatcatcagagtcatctgaatcatctactgactccaccacttctaccacatcagaactcaaatcctctactataaaagcaaaatctgctagtacctccggatcatctactgactccaccgctagctcttccacatcaatcgttaactcttcaactaccggttcttcgcaaactactgatttaacgattagttcctctggatcatctactgcaaccagtgcccgtagcacttctatcactagttccgaggatcaaaaacccacaatgtcttcaacctttactttgcccaactctgattcctcaaaatcttctgagtcattcaaatctgttccatctaccagcgcatccaccgaaacttctcgtagtcaaacgaaatccgttatcacccccaccacttactccagcagtaataaaaatactccagcttctgcttcaatctcttcctcattcactactatttccactggtgctactatatccagtagtaaaactgactccacaagtctttccactgggtccagcgaatctggaagtaaaattggtgtttttacttcttcctctgcttcatcttccaaatcacaagaaacaaccagtagtgatgtcacttccggaccttaccaggatcgtactactatccaaagagccactcctactgctacaaaaacaaatgaacaaactacattagttactgtaacttcctgtgaatcccatgtgtgtaccgagtctgtatcatcggctatcgtatctacagccacaactacggttagtggcgtggctacagaatacactacatggtgtcctatgtctaccacagagccaacaaaacaactacgtgattacagttacttcttgcgaatctgg

SEQ ID NO: 6028 - DNA, 1059 bp, Saccharomyces pastorianus
atgtctcgtcattacatattttcgacggtactcgccttcctggctctagttaatgtaacttcaggaagtactgaggcatgtttgccatcaggtgaaaaaaaaagcgggatgaatattaatttttaccagtatacgttaaaggattcatccacatactctaacccagaatatatggctcatggatacgcagataaggaaaagttaggctctgttagtggccagacaaaaatctcgattgactataatattccatgttcatctgaaacttgcgattgtgacgacgaatcttctgacgacaactcttccgagatcgtactaatgaaacgtggaaataagccttgttccgataccgcagctcttgccaagaaacgtgatgatgtcgattgtgaccagggtgctgcctactggagttcagatctgtttggtttttacaccaccccaacaaacgtaactgtggaaatgacaggttactttttagcacctaaaacaggttcttacacgtttggtttcggtacagtagatgattcggcaatcttatctattggtggtaatgtcgcatttgattgttgtaaacaagaacagccccctgttacgtcaactgattttacaatcaacggtattaaaccatggaatgcagatgcccctaccaacatagagggatcagtgtacatgtacgctggttactactatccaatgaaagttgttttctctaatgctgtttcctggggtacacttccaattagtgtgacattgccagatggcagtactgttagtgatgacttcgacgggtatgtctattcctttgaagatgacttgtcccaggccaactgtgccgttccagaccccccaaactataccactacaggaataatcaccaccacaacagaaccgtggaccagcgcgtatacaacgacagacactcagacctctactgttacaggtcccaatggtttaccaacggatgaaaccatcattgaagtaaaacaccaacaagtgtcagctcttcaattgccacatcgtctgatgcaaccagttctgctaccacatcctctgacgtga

SEQ ID NO: 6029 - DNA, 1716 bp, Saccharomyces pastorianus
atgacagatattgagtttggccaacctcttcccagtgatctaaagtatgcggtttcatttggtattcccacatgggattcagcgataggatacgcggaaaaggaccctaaggtaataagcagaatggctacaggatacccgagatactttccacagcctcctatccaaaaactttgcaaatacttcattaacaaatttggacaaccttcagaggattgccgcccttttccctctttgaatatagcctcgaaatgtttagaatttgtgaagtcagttgtcggacccgaaagtagagctcatcttgaagtggagacaatttcatttgaagtaggtgcgaagaataagcccaatgaagatggtaagttcactgtggcaatcgcagctatcttagcctcaggtgaggagttcacacttgttagagagtattggaaattaagaggtgaatgtgtatccagccgactagcatcctctcttaaccagttacttgacgccactaacttgacatcaagtgagacacggcatgaggttgaggccagaatctttctagccgagaaggaaggagacgacgcaaagagtctattaaagagaagaatagctgagaaccatttcaatccatttgacttaagaaaagaaggcgccgatccaaaagaggtagatgtcaacccggaaaacgatattcatctcgtatcaagtggaatgtcagcaatttttacaactcgtaagttgcttacattttgggaagaaaagagagcttttgagtacgccctgaacaaggacagttcgaaaaaagaaattttaccgtgtaatacagctgccatctttggctttccgttcaaagatacacaagtaatcatggacacatttggaaaatgtcagttctttggatttggagactccagagatatcactgagttacaaagcttcttagagacgagcaagcaacgtatccttgctgtgttcgttgagaccccctcgaatccattactaaatatgccggatttgaaagaattaagaagactggcggatgcatatggattctttattgtagtcgatgatactataggggggctcaacgttgatatattaccttacgcagatgtggtctgcacctcgcttactaaacttttcaatggctctagtaatgctatgggtggctcgattattttaaacccaaagtcttctctgtactcaagtgcccatgagtactttgaaaataatgaatttgaggacctgctatggtgtgaggatgcggtagtccttgaacaaaattctagagactttcaagagaggacactacgcgctaatataaacacagaaaaacttttgaatgaggtactctttcctgaggaagggaaaatatgcaagaaaatatattatcctactgtgagctccaaggagactttccagaattatgaatctgtccggaataagcacggcggttacgggtgcttgttttctatggcattttacaacgaaggcgaagccaaagctttttatgattctttgagagtgtttaagggaccttctaacggaactaattttacgttagcatgtccatatgttcatttggcgcaccattcagaattagaagaggtctccaagttcggagcagacccaaacttaattagggtgagtgtgggtttagaagatactcagtggctgctggacgtgttttcaagcgcgatagatgttgttagacgctccagagatttatga

SEQ ID NO: 6030 - DNA, 513 bp, Saccharomyces pastorianus
atgatagagtatgaagagtggcaaagacaactaagatcattatatggttcccagattttccaaaattgggctctttgtcaagaaattcgtctagttgatgataaaaatgcagtctttctatgtttggagcctactcacaagcttcaagaaagcactaagattatagaaaacaaatcattggatcatatagaactatatcttacgtattcaaaaatttatagtgaacccttactgcttttacgaatatgggaagaaaaaagttcagaagatatattaatgaccagattaatgtttccctgtaaggtcgaatctttactgggtgtcgagggcaagttccagctggggttagacactttcatcgatataggaaatactgcttggtactctttccatccatgtgatacgtcaagcatagtcggtgaccaggaagcattcaggccaacttacttaagacgatggaccagtattttcgtatttagttggttaggctatgaggactgtagttatacttag

SEQ ID NO: 6031 - DNA, 291 bp, Saccharomyces pastorianus
atgtcgggaaatccaggaagctcgctgagcgcattgagacccacccccccagaaagaggctcgttcccactagaccacgacggcgattgcacgaaacacatgcaggagtaccttaaatgcatgcagctggtgcagaacgagaacgcaatgaactgccgcttactggccaagaactacctgcgctgccggatggaccaccagctgatggatacgacgagtggtcacacttggctaccggagacacccccagcactgtcgatcgacagcttgatccgccataagccaatcatg

SEQ ID NO: 6032 - DNA, 123 bp, Saccharomyces pastorianus
atgaagatcaaaactattaaaagaagttctgatgattacgttcccgtcaaaagcacacaggaatctcaaatgcccaggaatttgaaaccctggaattgcattcctttcgaaaagggctcgtga

SEQ ID NO: 6033 - DNA, 93 bp, Saccharomyces pastorianus
atgttcgctaaaccctttgtaggtcagttgggggacggtcacagagacggtgtctatgctattgccaagaactatggtaatttgaacaaactg

SEQ ID NO: 6034 - DNA, 1491 bp, Saccharomyces pastorianus
atgaaattaggtatcattccctatcaggagagtaccgatattgtatacaaaaatgcttcccaagatcagcaagaacaaaagagacccaatttaccacagttagacgtaacgcaccaagtcgaatcatcagtccaaaaaacaaatattaaatttgtacgcacagaggatatcccactgaatcgaaggcactttgtgtataggccgtgttctgcaaatccgtatttcaccactttaggttatggttgtacagaatacccgtttgaccattctggaataagcgtgatggatagatcagaagggttatcaatagctcaagatagaaatgacttggttagtgttcaggaccaatacggctggcgttcagcaagaagcgacgtctgtatcaaagaagggacgacatattgggaagtggaagtgattcatggaggcaatgacaagcccacaccaggagatgatggttcagtaagtgaagtgcaaaatggttcatatgaaaagagacgcaagcaagtgaatgacaccccccatctacgattgggggtttgcagaagagaggccagtttagaggctcccgttggattcgatgcgtacgggtatggtgttagggatatttcgttggagtccattcatgaggggaaactgaactgcgttttgaaaaacgggttgccattgaaggaaggtgataaaatcggatttctattgaagctccccagcattcaaacgcaaattgaacaagctagagaatttaccaaaagaagaattcttgccttagattcacatatggactcaatgaatgaaccgtggaaagaagatactgaaaacgggccttcgaggaaaaaattgaaactggagacaacaaacaaggaattccaaagggcgttactagaagacattaaatatgatgatgttattcgcgaccaaatcgccatcaggtacaaaaatcagttattcttcgaggccactgattacgtaaaaactacgaaaccggaatactattcttctgataaaagagaaagacaggactactaccagctggaggagtccttcttggcaatatttcaaaacggtaagtacatcggcaaggcatttgaaaacctgaaaccgtttttaccaccattcagtgaactacaatacaatgaaaaattttatcttggatactggcaacatggtgaagctcatgaagacaccaatgaaaaaggtatacccagcgcaaagaaaagaaaacagcaaaagaagaaaggtttaattctcagaaacaagtacgtacataacaacaaactaggatattatccgacaatcagttgcttcaatggcggaacagccaggataatcaccgaagcagataaattagagtatttgggtcaaatccaatcgaactattgtgctggaaagaatttacaagttaacacattggatacactatacaaagaacaaatagccgaagacatagtttgggacataatcgacgaattagagcaggctgtttcaatttga

SEQ ID NO: 6035 - DNA, 1602 bp, Saccharomyces pastorianus
atgtggacacggatctcatatcaaatgtttaagtggccatatgaatctattcgtggtatacaaaaccaaaccacaaaaaacattccattatcttatggttcagggctaatatattgtcccgtttgcaattccttaagtaattcatttctaccgaaactaaatgaccctaacaagaaagcagctaacgcttttttcaagtgtactaaggatcataaagataacatagaggaagatgttgaactgttgagctctatttgtattaaagcagcaatgatctttagtgatctacaaggagtaaaagtcacgactatcgatgatgcatacaaagttgttaataatgttttaatcaacaccgtagcaaatacagagctaagactaaggtcttatagggaacatggaaaaatagtggacttgaacaagatatccagtcaatgcgttttgaccttacgactactttgtgaactgaaatcgttccttcataagcaatgcgtcgagttaaaaacatttgtcgacgaaatccctagtaaaatatggaattggaacgaatttttaatagaaggtaataatatggatttgctcctgtatatgagccaaaatttcgataatactgatcgaggaaggatcgcgcaaccacccaccctttgcgtttatgaaatgttcaagagaaggtttcaccaacttttacttctacttgcaagagatatgatgagagtaaatttttacaaggactgccaaaataaaatcaagctatcatcaaatcgatccggcgagccacacacaagtatgttgtatttatttgagacttttaaaaagtacattgaccttttcaaaccagacgacattgagtttgatgttacgagcttagaaaagagcaaaaactttatatgctcgttgttactagagtcgttaaccatcttttgtaggaaaacgtacttactatttcgtatccagtacgaagatgatgacaacgatggcgacagcacgactaaacaagatgaaatagagcaaatcttccattatttcaaattacccaatttagctcatttcctgaaggattttttctataacgaattaactcaaaacatcgaaagatacaacgatggtaacgataacttaagaatccaaaaagtcatatatgacatggtgcagaatataaactcaagatcatacccgtccccagaaaaaattcaactaatcaaactcccggtaaatctctccaagttttcccttgacaacgacgaaatatcgaataaatgtgataaatacgaaaccggagtgtgtttattgtgcggccaaagatgtcatatccaaaaaagcatagcactacaaggttacttacagggagaatgtactgaccacatgaaaaatggatgcgaaatcacatcttcctacggggttttcttaatgaccaggacaaacgctatatatctgtcatacggcaaaagaggtacgttttatgcagcaccctatctgagcaagtacggagagaccaacgaagactacaaattcagtacccctgtctatttgaatcaggccagatacgagtatctggccaatgagattgttttcggcaacatgatcccgcacatagtgttccgacta

SEQ ID NO: 6036 - DNA, 4050 bp, Saccharomyces pastorianus
atggaggattctaatctggctataaacaatatcagggacttcctcacccagctcccgaaactcgccaaatgcgagtacaacgaaaccactagttatctgctatggaaaactttgaatctacgccttaagaataatgataaccatgtcgattggccctctctcgtctccatcctcaattccgaggcttggacaagtgaagcgtatagagacatactaaatggcaaacagtggaaaacactagagttcgagagtgaccatcgcccactggataacatacacacaggaacagcatgcacacgtttatgtttcccctctgagacagtctactactgttttacatgctctacgaatccactatatgaaatctgcgagctttgttttgataaaggaaaacacatgaatcattcttatgtagccaaagtggttatgcgcccggaaggcagaatatgccattgtggtgatccctttgccttcaatgatccaagtctagcattcaaatgcatgaacgaactgaataatgtttctggttttagtgaaactaatgacgatattgatgacgaaaacgttgtttccttattgaattatgtactggattttttaattgatgtaacggtttgctacaaggaggaggcagaaaccaactctggtgagataaaaacatcttcccccacgaatcctgtcaacgatgacacaacggataatcaagaatacgaatcgttggtcaacgatgacaattctgcattttttgacagcaattggtctaatacaaagaaagagccccgcgaggaatgggctatccaaatcgaggacgaagaatgtaacgtacactatatggacctagcgtctataataaccaaaacattgaacgtgcctattgagtatgccatttctattaccagggctctagaagactcccatgatgtagtaactgtgctccaaggtgaaaacttttttgaaatgaatagaatagctgaagggtttcagaaggaaaacataaaagtttacgtacggaaaatgagtggtatatttaatagaaaactaacggacgatttaacgaactggctgtactctatgtgcttcaagtcgaccgaatcattgcaaattaaatattttcttcggatttccatgctcgatgtttggtattcgcacttttctaaaatgagagctagtccttcaaactcaaaccctgatttctctaaaataaacttattaggtggatttctactatcgaatgaaaatagtaatgggtcctggttcaaaccttggccactagaacatataaacgatgagaaaatctcgaaaatattaaccaaatacaatgatagattaaccaatgcacattcgccgaactcggtgagtcatttttacagtttttatggatcaagattccaatatatcattataaattccattaacattctgtcgagaaagtccaagttcaaaatgttaaagatcataacgtcattattttccttaagggatgagagtagaaaatttcttgccgctcagtatatcgacatttatctctccgttctctatgatgccgtggcttcagacgctaaagaatgccaggtaactctaatgagtctcttgggacaatacactttccaagaccccagcatagcaaatatgactataagctctggatttatcgaaagaaccatcaggttcgcctttactctcatggcattcaatccggaagacttgatgtcatacttacctatatctttatacaatgggttcaaattacctaccgaaaccatacgaaaccggagaacaatcatttgcttcaaagatctttgtacgattatgtcagcaaacacagttccagaagagcttctatcgaacgacgcgattttcaatgcaataattgaatccttttctgaattcaataatgtgcttcctttaaaaagggaaaccaaagaacatgtggaagttgaaaattttgacttctctgcgttctatttctttttttcgtcgattttaattatgatagatggctacgtacgtagtatatcgttggtaaaagacgcgactttccgtaaacatattgttctcaagctattggatgttgctcagaatagggaatttgagtcgttaactcactcaagaaaggccatagcatctgataacatatcaactagtgaaactgacaccaacaaagcaagtttatctactgttagagaaactatatgtaactacgttgcagaaacgatcgattaccaagtgggggtgaacacacaatattttttcaatccaatgtcgtatttattcaagttcgtcattcaatggagccaatgtggtagatatgagcctcttcctacatatttaacaaactacattgatttgtacgaggttttccaagataagcagaaagctttgcacatatcagaatcggctttatctaccctggttctgatcgggcaaatcaatgttggcttttgggtaagaaatggtactccaatcactcaccaggccaggatgtatacgaaatacagcatgagagagttcacttacgttagtgacatctttaatgtccaattcagcatggcaatgtgtaatcctgatgaactaatggttacatatctttcaagatggggattaaaacattgggcaaatggtgtaccaatgtacgattatcctgatgcagaaactaccatagctgttgtcaatgaatgcattttgttactgattcaattgctcacagaagtgaggtcgttggtcatgaaatcctctaaagaggggtttgaaagaacatttaagtcagagattattcacgccctctgctttgacacatgctcttacgcacaaattaacaattgcattcccgagcatattaccaagcacccttcatttgacatatatcttgaaaaatacgccaactatattcctccaataagtttaactgacaacgggactttttcattgaaagaaaagtacaaagacgagattgatccttattatataggactctcttctagtagaaggtatgatgtagagaaaaatatcaggctgaacatggccaatttgaagaaaatgaaatatgaagacacttttgtaccagcgaaaaaagtcaaggatttattaaagagcactttctattcaggactttactcaatatcgtcagcaaacacctttggcttgtttttaaaaaatacacttgagcatatcatcaaatatgattacgaccacttactaccaagagttgtccatttgatacatttatgcgtggttaataacctaaatgaattcatgggaatattgtggcatgaatatgcaattgtagacacagagttttgccattaccacagcattggttctatactgtattactgtctgttgaaggatactttttcagactcgcatggcaagatcagggaaatttttagatacctaatggaaacagcgcctcatgtcaatgtaagcagttatttaaaggaacaaactacttcgtatacgccgggtatactatggcccacgaaggaagataagagtcacaaggataaagaatttgaaagaaaaaagcatcttgctagattaagaagaaaaaaaataatgaagaagctagctcaacagcaattaaaatttatggaaaacaatagcgtggacacttctgaaatcagtacacccaggactatgtcacctagtttatcgccttctagggtagatatagataataataacaagtcaatgagtagttgctgtgacgatgactgtgcattttgcaagatgtcaaaggacgatgatgtttttgtttacttttcttatcaagaacgaaacatatgtgatcatggtattgatttcacaaatccgccagacattaacagaataagttcccagcttagcggtaagcatccaagaaacagtatgattcaggaagacacgtatgaagatgatgtatcgagattaaaattgaccaggtgtgaaccagtattaagagcatgtggacacggatctcatatcaaatgtttaagtggccatatgaatctattcgtggtatacaaaaccaaaccacaaaaaacattccattatcttatggttcagggctaa

SEQ ID NO: 6037 - DNA, 231 bp, Saccharomyces pastorianus
atgtatgaagtatactgtggaaatgcggtttcgaaatcctccaaaaataccaggaagaacggcatatcagcatctgcagcggcggacctggccagtgtattctcatctgcactggacgttattgcctgtgcaccagagcaatggctgaccagcaagcctaatgagaagaggtttttaaaggaatataaagcagcagtaaatctcattggcgctattcttcttctagtgtaa

SEQ ID NO: 6038 - DNA, 2454 bp, Saccharomyces pastorianus
  modified_base (2284)..(2317): a, c, g, t, unknown, or other
atggaagctatttcacaattacgtggtgttcctctgacacatcaaaaagattttagctgggtctttctagtggattggattctaaccgtggtagcgtgtttaacaacaatattctacatgggaaggatttatgcatatcttataagttttatattggagtggttattatggaaacgagcgaaaattaaggtaaacgtggagacagtacgtgtttccttgctaggtggccgaatatactttaaacatctttccgtgattcacaaagattatacaatttcaatcttagaaggtagtttaacatggaaatactggcttttaaattgcagaaaagcagaattgatagaaaatgaaaagaactcctccggaaaaaattcagaacttccatgcaaattcttattggaatgtgaaggtttggagtattttatctataacagaacagaggcgtatgataatgttataaacttattgtccaaggacgaacgagataaatttgaaaaataccttaacgaacattcgtttcctgagccttttagtgatggaagtagtgccgataagttagatgaggatctgagcgaatccgcgtatacatcaaattctgattcatcaataataaacgatagggactaccaagaaacaaatattggtaaatatcccaaaggtctaaatttttttccacttgagcttaaattaaatcgtggttctctattactaggaaataaattcacgccttcagtcatgattttaagttatgaaaatggtgaaggtataatagatgttttacctccaaaagagcgattagacttgtacagaaacaaaacacacttggaactcaaaaatttcgaaatttccattaaacaaaacattggctacgatgacgctatcggattaaagttcaaattggatacgggaaaggtttcaaagctatggaaaacatttgtacgagtgctacgagtagtcgccaaacctgttataccgacacgacgtaaaaagacagacccgtcagatgatgctttttttcagaaatggaaaggcctttctctttataaagcctctgcaggcgatgctaaaacaagtgatttagacgatattgaattcgacttcacgagtcatgagtatgctaaattcacatctattctaaagtgtccaaaagttacccttgcatatgatgtagatgttcctggtgttgtgccacatggcgcccatccgacaatacctgatattgatgggccagatgtgggaaataacggggcaccaccagattttgccttagatgttcaaattcatgggggttccatctgttatggaccctgggctcaaagacaggtaagtcatctacagcgagtcttatcacctgtagtatcaagaactgctaaacctatcaaaaaactcccgccaggttcgagaagggtgtacactctttttagaatgaatattttaataatggaagataccacttggcgtattccaaccagagaatcaagcaaagaccctcaatttttacaacactacaaaaaaactagtgaagagtatagaccttttggatggatggacctccggttttgtaaggacacgtacgcaaacttcaacatcagtgtgtgtccaacggtagaaggttttaaaaatgactttaatgttcatttcgtggacactgaaatcaggtcaagtgttaatcatgacattttattaaagagtaaagtttttgatcttaatggggacatcgggtaccccttaggttggaatagcaaagctatatggataatcaatatgaaatctgaacagttagaggcctttttactacgagagcacatcacattagtcgcagatacgctttcagacttttccgctggcgaccctacgccatatgaactttttaggccattcgtctacaagatgaactgggaaatggacggctattctatttacctgaacgttaatgatcacaatatcgttaataatcctttagatttcaacgaaaattgttacttgtcacttcatggggataaattaaccattgatatcacggttcctaaagagagtatcttgggtacgtacacggatatgtcttacgaaatttcaactccgatgtttagaatgatgttaaatacacctccatggaatactttgaacgaatttatgaagcataaagaagtaggaagatcctatgactttacgattaagggttcgtatcttctgtactcagagctagatatagataatgttgatacgctaactataaattgtacaagcaacagtacagtacttcattgttacgggtttgttatgnnnnnnnnnnnnnnnnnnnnnnnnnnnnnnnnnngtgagttttttaatttcgtgacttctgaggaatatacaggtgtccttggtgccagggaggttggagaagtcgtgacaaagagctcggtggtggacttagcgcctagtttgattcagagtgtcaggatgacagtatga

SEQ ID NO: 6039 - DNA, 1698 bp, Saccharomyces pastorianus
atggccttattggagaaattgcatcgaagggttgttgacatgggacttgtcccgcgtgtcattgctttattgcctgttatttccacgttatgtgccctgttcgggttcatatctattgctattctgccaatggatgggcagtacagaagaacttatatttctgagaacgctttaatgccatcgcaagcgtacagctacttcagagaaaccgagtggaatattttgagaggctatcgctctcaaatcgaaaagacggtaaacatgacttctacggaaaggaacaatataatgggctcctggttgcaaggatttggtaccaagactgctatttatgagaatgatcagtatggagaaacgctatatggtgtaatgcacgcacccaggggtgacgggacagaagcaatggtgcttgccattccgtggtttaactcagagaaggaattcaatgttggtggtgcatcgttgggtatttcattagctagattcttttcacgttggccggtatggtctaaaaacattatcgttgtattcagcgaaaatcctcacgcagctttgagatcttgggttgaagcataccacacttctttagatttgactggtggttccattgaggctgctgtggtactagattattctagtgcggaagatttctttgagtacgtagaagtatcctatgacgggctaaacggtgagctgcccaatttagacctggttaacgttgctatatctattattgaacatgaaggtatgaaagtttctttgcacggactaccctatgatcaactaggtaacaatgattttttttcaaggtttaaaatactatgcttaggaataagagattgggcgttgtctggtgttaagaatccccacggtaacgaagcattcagcggatggagaatccaatctgtgacgctgaaagctcatggacatggtggtcatgatattaccacatttggacgtataccggaagcgatgttccgctcgattaacaatcttttagagaaatttcaccagtcattcttcttttatttgctgttagctccacgccaattcgtttccattagtagttatttgccaagtgctgtagctttatcggtcgcatttgcagtaagttcattgaatgcatttatcaacaatgattatgccagtatatccttattttcagagtataatttgatagcggtattggtttggttcatatccatggttgtgtcatttgttatatcgcaactatttctttcggtactaccagctgggttgttgatgactattagtttagcaatctgcttcttacctatagcactatctggaaaagtccatatatcagaaccgctatcataccgattaaaaaacgttgcatttttatatttcagtttagtatcaacatcccttttgatgataaactttgctatggctttactgatcggtactctagcattcccaatgacatttatcaagactatttctattaaagcatccgctgagtccgaaacgagcttaggatcaaacatctcaataaaaaccgagcccaacgatgaaatgcagctcaatgagcattataaagaaggaatatccgagaaaaaccaacaaagacaaaaattgaagaatttatcgctattaatcttaacaaacccatttatttcgataaccgactctagaggatccccggtaccgagctcgattgtaatcatgtcatac

SEQ ID NO: 6040 - DNA, 90 bp, Saccharomyces pastorianus
atgcaattctctactgtcgcctctttcgccgctgttgccgccgttgcctctgccgctgctaacgtcaccactgctactgtcagtgaataa

SEQ ID NO: 6041 - DNA, 291 bp, Saccharomyces pastorianus
atgaccaccaacgaggaattcattaggacgcaaatattcgggacggttttcgaaatcacaaataggtacaatgatctgaaccctgtcgggatgggtgcgttcggactcgtttgttcagccacagacactttgacgtctcaaccagttgccattaaaaaaatcatgaagcccttctccaccgccgtgctggccaaaagaacgtaccgtgaactgaagctactgaaacacctgagacatgagaatctgatttgtctgcaggacatatttctttcgcctctggcagatatataa

SEQ ID NO: 6042 - DNA, 2412 bp, Saccharomyces pastorianus
atggatgaaaaagatgaaccagtaatttttggtgtttgtcttgtcgactttcatcataagaggggccctgaaatagaattctggtatggattacctgaggatactcaaaatgcggatttatggccaaatctacctttccaggcgcttcctgatggttctcactcttttgaagagacattcacttacttcacgttgctatatgacgaaaagaagcaaagaagtcctcccaacggtgccactgatttatctgaggacggagtcaatgataccacgactttatttgctatatcctgctcgagacagataaagagcgatgaattgcttgttaaggacaaagatataactcgatctactgtgcagaaggcaattgtggtcatctcaagacaaccaattttcggccaaattaaagacaaactgagcatagtgaccaatgcttttttcttacagcatgattttggagatacgaagatagttcagtcattatgtgaaaatttaaagtccatatacacgcctgtattgttgggcaggaacgctgaaaaccgtctctatgttggattgtgtttaaggaaaattctacacgatttcaagaagaacgttttagtgctgctaaaatcaatcttacttgaacgaaaaataatagtttatggtaacgatgtggaagttctatgtaatctacaatttggattgattagcttaattccggacttaatgtcaaatttacaagattctggaagtccgcaattgttccaggatgtttctaaactaaaggtagctgactcattcaaatcaagtaaccgagaatcagtgctaaggtttttgggtttccccttgccaatttttgaagaaggtggactattctcaccctatactccgttacagcagatgaatgacataaagtcaaaacgtactatgttttttatgatcggaagttctaacacgttactttccgaacgaaaggaggaattgtgtcacatcttcgtcaataccgatgactctaccgtggaaatcctggataaatccctagcttctattcttcaactatcaagccatgataaaaaatggatcgattcaatatcggggattgtgtcagacacgtggaatgaaaatgatgatgaaacgccaaagaattctcagtttgaaggaagtgaagattttattagatggcaatttgaagactatttaacagggctactttcaagtgttaaactaaatgattatttggagttgcataaggaaaatgaacaagctttgaagactatacctgaagatatgctgagttccaatccaatacacttattcaattcgaactgggtccatagttggaaggaaacccaaaattttcaaatatttaatgcaagaacagatgataggttatttgatttgtttcctccaaagcatatttacaatggcgctgacacattgtctctattacagcaaagatttttgtccacatttcataatttaaaaaggagcaccagtaatacttcaagtgataaaaatggacatcaaagtgaagaggattccaaagaccaggaaagcatcaaatcgaaaaggcctactgcacaaaccgctgtaaattccgagaagaacacagagaagccggcaactcatctatggaattcatggaaggaatattttaacaagtcaaagaatgctactaatggcgacatcaccgaatccacagaagatctcaaaaatagaggcaaaacaggaaatgccatagagaaagcaatgattggcttgggtttacattatacgccagaaggggaaacaagccaagaggaggaacaagaagaaatcgatgaagatgatgatgatgatgatgaagatgataaagatgataaagatgatgaagatgataaagatgataaagatgatgaagatgataaagatgataaagatgatgaagatgataaagatgatgaagatgatgaagatgatgaagatgatgaagatgatgaagatgatgaagatgatgaagatgatggagacgataaagatgatgacgatgaagaagatgatgaatctaataattcaagtgaaagttataatggtagcgagacacacaaaagcattcaaggcactagtaacgatgatggtgaaagtagcgatggtgcggaggacgacaatgatgatgaagacagcgtggaggacaatggaaggagaattgaagatgatgaagcccatggcagtgaaaacgaaaaaaaagccgaagtactatccaaagagaggaattcaagtgaaaaaacaggtgagaataaagctgatagtgcacaagacaatgaaaacaaacatgtcgaaagtaaagaattgcatgttgataatattgaacgtactgttcataagacaaaagaagaagataacggttctccttataccaatatagattcctttcaatctggcgaaaattag

SEQ ID NO: 6043 - DNA, 849 bp, Saccharomyces pastorianus
atggactctttagaaccggaagcagtcaacacgcatgtctccgcagagcagatcctgcgggatgtatacaagaagggccagaaggcaagaggatcgaccaatattgacatattagacttggaagagcttcgagaataccaacggaggaagagaacagaatatgagggttatttgaaaagaaatagactagacatgggccaatggattcgttacgcgaagtttgagattgaacagcgtgacacgaggcgtgcaagatctatttttgaaagagctttactcgtagataattcgttcatcccgctttgggtacgatacgtcgacgctgaattgaaagccaaatgtgttaatcatgctagaaatctgctgaatagagccattagtacgttgcccagagtggataagctatggtacaagtatatcatagtagaagagtcattaaacaatatcgatatcgtacgatcgctgtatacaaagtggtgttctttggaaccaggtgtcaatgcatggaactccttcgttgatttcgaagtaaggcagaaagagtgggctcgcgtgagagatatttattctaaatatgttatggtccatcctcaagtgaaaacgtggctaaattgggccaagttcgaaagcagacatggtaacgccggatttacaaggaatgtatattgtctagctttagacaccgtggctaatcttcaaagtttacaagacctgcaggcatgcaagcttgcactgcctcctttcaacgccatatatatcactttttattctatttctgtttctttatttcactcttctctctctccgaaaaaaaaaaaaaaaaaacccttcgtcctaaaaaaaaaaaac

SEQ ID NO: 6044 - DNA, 174 bp, Saccharomyces pastorianus
atgttgaattttgaaaaacaatttggtaatttaaactctatcgaagaaactatcagttataaaaggaaaatggactatgaagcttcattaagtcgtgacgcatatgattatgacacttggtggttgtacttgatcgacaagcttgatccgcacataatgccaactccctgccgt

SEQ ID NO: 6045 - DNA, 729 bp, Saccharomyces pastorianus
atgtacgctaaattcttgatacgacaggaaaacgtatcaaaggcaaggaaaattatgggtaaagccatcggcctttgtcccaaagcaaaaacttttaaaagctacatcctattggagatgaagttaaaggagttcgaccgtgtcagaaaaatatatgaaaaattcattgaattccagccctttaatttgagtatttggatcgaatacgcagagctggaagagaatttaggagatgaagacagagtgagaggcgtttatactattgcattggatgaaaattcggagtttctcacaatggaggcgaaggttgagctacttcaaaagtacataactttcgagactgaatcacaggaatacgagaaggcaaggacgctttatagaagttatttggagctgaatgaattttctgttcaaagctggatcgaatttgccatgtatcaaagttcaaccccaacggatcagcagttatccgatttagcaaaactccaaagtgagaatgtagatgaagatattgaatttgaaattactgacgaaaataaaatggaagcaagaaaaatatttgaagaggcaatcttgttcttcaaaaacagtggtgatagacaagggagaatgtctattttagaagcattgaaagactacgaggaaacatatggtactgagctcgataaagaaaatgttagcaagaggttccctaaaatagtcaaaaaacaaagctggaagatggtatag

SEQ ID NO: 6046 - DNA, 570 bp, Saccharomyces pastorianus
atgtatacaaccaagttttataggcctttgcgcggagtgagaagctttcattcctcaattgtcagaccgtttacaatccccttcttgccaaagatacctcaaaaacctgggggggtgagcggaacagcgaacgattcctcttatatgttacctgaaagcagagctcacggttcatatcattggattgtagagcgtggcctctctttaatggttcttccattgattatggttcctttggtcactacaggtcctatttctatttttgctgatacgtttctatccttggttctgctgggtcactgccatatcgggtttcagtcttgcattatagattatgtttcagaaagagtttatggcaaggtgcatcactatgccatgtatttattgagtttaggcacatttttatcactagttggtatatataagttagagagccaagaagcaggtcttattgggtctctaaagccttctatgggaaagcgaaccggtcaaaaagaaggagaaaatagtgactggaaagacgatatagttcacctcacgcggcctctttttttttttgagcgttgttaa

SEQ ID NO: 6047 - DNA, 1329 bp, Saccharomyces pastorianus
atgacgaagattaaagtggctaaccccattgtggagatggacggtgatgaacaaacaagaatcatctggcatttgattagggaaaaactggtcttgccctaccttgatgtggacttgaaatactacgatctttccgtggagtaccgtgaccagaccgatgatcgagtgactgtggagtctgccaacgctactttgaaatacggtgtggccgttaaatgtgccactatcacgcctgatgaggcaagagtcgaggaatttcacttgaagaagatgtggaaatctcccaatggtaccatcagaaacattttgggcggtacagtgttcagggaacctattcttatccccagaattcccaggctcgtgcctcaatgggacaagcccatcattatcggaagacatgcattcggcgaccaatataaagctacagatgtggtagtccctgaagaaggagaattgagattggtttacaaatccaaaagtggcaagcatgatctagatttgaaagtatatgagtatcctgaaaatggtggagtggcaatgatgatgtataacactacagattccatcagggggtttgctaaggcctcttttgaactggctcttgaaagaaagctgccattgtactccactactaaaaacaccattctgaagaagtatgatgggaaattcaaagacgttttcgaagccatgtatgccgaagcttataaagataaatttgaatctcttggcatctggtacgaacaccgtttgattgacgatatggtggcccagatgttaaaatctaaaggtggttacataatcgccatgaaaaactacgacggtgatgtggaatcagatatcgttgcacagggatttggttctttggggttgatgacgtccttgttgattactccagacggtaagacatttgaaagtgaagccgcgcatggcacagtgacaagacactttaggcaacaccaactagggaaagaaacttcaacaaattccatcgcctccatcttcgcgtggacaagaggtattattcaaaggggtaagcttgacagcactcccgacgtcgtcaagttcggccaaatcttggagagctccacagtgaacacagtacaagaagatggaatcatgactaaggatttagcattgattttgggtaagacggaaagatctgcttatgttaccaccgaagaattcatcgacgctgtggaatctagattgaagaaggaattaaggccgcgtcttctgacgttacgtataattatcccatctatttatttatatattcttcttccctttttcattgatattttctggtatttttattttcgtaaattgtga

SEQ ID NO: 6048 - DNA, 927 bp, Saccharomyces pastorianus
atgtcagtaacaaatgtagccactagggtagttgctacggcgagagattttgacaaagttggattagggatcatcggatactatcttcagttatacgcggtggaattgatactaagtgaagatgaacggtcgcaagaaatgactggactagccacagggctgctggatacgattgaagggttcaaaaaggaagttagcggtgaaactcaagcagaaaacagtgacaagagtatacaagtcatgaataccctaatacatgaccaagaaaaggctaaggtgtacatgctcaattttacaatgtcactgtataatgagaaactaaagcaattgaaagacgggccctgggatgttatgttgagaaggtcgctttggtgttgtattgacttattttcgtgtatattacacctttggaaggaaaacataaatgaagcaaatgtaagtgctttggagaaacgaataaaatactgtaaactttatttgagtaagctagccaagggtgagattggacctggagatgagaaagagctggattacactgactttatagacgacaacgaggagacaaaggatgaggaagttgatcatttgataaacaatttgaaaactgatgacatcaaaacagaaaaagagtgttgggaagaccaagtaaactctgatgagccaggagacgacgtacccgaatacattgacgattccgatagcatagatggagaagaaccgaaacgcggcaagagtgaggggtcgtatatacatgacagcaaaccggaagtcaagcaaagggaggtgccgccgccttccccatcaccggcgcacaaatcgtattcaaaagacgagttggccaacatcatggataagtccagtaagattgagcaaatccaaaagcttgctaaatacgctataagtgcactaaactacgaggacctgccc

SEQ ID NO: 6049 - DNA, 2070 bp, Saccharomyces pastorianus
atgatacgtcttttcaatggtccaaacatgttgcgaaggcaattctcatcatcaagggcactatacttgactaaaccgttaattagacccatagtgtacccaaagataagggcaagaccgactatacctcacaggaagccattgatgtttcaaacaattcgtttccagtcaagccctacaaatggaaagaagtctgctagctctggttcacctactttaaaactatccgatgcagattcaaaatcatcagggttcaaagatatcaaacggttgtttgtattatccaaaccagaatccggatacatcggacttgctcttcttttaattcttatttcgagttcagttagtatggctgtaccctccgtcataggtaaattattagatttagcttcccacaatgacgacgaagaagacgaggaagaaacaaaagataacaagctttatggtctaaccaagaggcagttctttacagctctaggggctgtgttcttaatcggcgcaatcgctaacgctagtagaataatcattttgaaagtcaccggtgaacgactagtcgcaagactaagaacaagaacgatgaaagctgctttagaccaagatgcaacatttttagataccaatcgtgtcggtgatttaatttcaagactatcgtcagacgcttccatagtggcaaaatctgtcacacagaacgtctcggatggagcaagagcaatcattcaagggtttgttggttttggtatgatgagtttcctctcttggaaattaacttgtgtcatgatggttctggctcctccattaggtgccatggcgctgatatatggtagaaaaatacgaaatttatcaagacaactacaaacttctgtaggtgggttaacaaaagtagcagaagagcagctgaatgctacaagaacaattcaagcatacggtggtgagaaaaatgaagtccgccgttacgcaaaagaagttagaaacgtctttcatgtcggtctgaaggaggctgttacttctggtttgttcttcggaagtacgggactggtgggtaatgcagcaatgttatcgttattattggtcggaacgaatatgattcagagcggtgctatgacagttggtgagctaacaagttttatgatgtacgctgtgtataccggaagctcactatttggtttatccagcttctactcggagcttatgaaaggtgccggtgcagcagctagagtgttcgaattgaatgatcgtaaaccgctaattcgcccgactattgggaaggatccagtgtctttggcacacaaacctattgtctttaaagacgtatcgttcacatatccaactcggcccaaacatcaaatctttaaggatttgaatatcactataaaacctggtgaacatgtctgcgctgtaggtccatcaggaagtggtaaatcaacgattgcctctcttttgctcagatattatgatacaactgcaggatcgattgatttcggtgatgaagacattagaaactttaacctgaggaaatacagaagattgatggggtacgtgcagcaagagccactacttttcaatggcactattctagacaacattctctattgcattccacctaaaattgcggaacagaaagaccgtgtcgcacgtgccattgggcaagctaactgtaccaagttcttagccaatttcccagatggtttgcaaactatggttggtgctagaggtgcacagttatctggtggtcaaaagcaaaggattgcattagctagagcattcttgttagaccccgctgttctcattttggatgaagcaacaagtgcccttgactctcaaagtgaagaggtcgttgccaaaaatcttcaaagacgtgtaaacagagggctaacaacaatatcgatagcacatagactttctacgataaaacacagcactagggtcattgtactgggaaaacacggttctgttgtcgaaactggttcattccaagatttgatttccattcccagtagtgaattaaatgccctacttgctgaacagcaggatgacgaaggaaaggaagaaacagcaacctcgaaaaaataa

SEQ ID NO: 6050 - DNA, 570 bp, Saccharomyces pastorianus
atgaaaaccagttccatattattcgcttcattagcttctctagccactgctcagaaggattccggctccttagatgaccaggtctctgacaatagttcccaaaaaagctcgagccctcagaagtctgcagcatccgtctccgcaaacgcccaggaaagtacgtctaaagcagcgtctacaacggcgagcctggtacaaaccagcaacgtcgtcagcaatacctacgctgtggctcccagtagcactgtagtgaccaccgacgcccagggaaaaacgaccacgcagtacctgtggtgggtggcagagactaattcagctgctaccacgacatcaaccgcgtccgtggagcccaccagtgagacgtcagggaaaagtcttagctctgcctcctccagcataacaacatcaacagacggaccaatcaccgtagtaaccacttcaaactcgttaggcgaatcatacacgtccaccgtttggtggctaccatcatccgctacattgagcagcacggcttcttcaagtggatcagcgtcacatcagcatcagcgtcagcatcaggctctaaggtag

SEQ ID NO: 6051 - DNA, 132 bp, Saccharomyces pastorianus
atgctaggaagggcattgcgacctgggtggctgggtattaccagagcgacagcgaggtacccgatctgcgggacctgcgctaacagacgacttagaggatccccggtaccgagctcgattgtatcatgtcat

SEQ ID NO: 6052 - DNA, 147 bp, Saccharomyces pastorianus
atgcctgccatgcaagagggtattctgagctcaatgacgattatgacgatgatgacgacaacaacaacgaggatcagcagcacggttagcgagccgttggccggctcgagcatagtgatgcagctggactctgtgatgagaaagtag

SEQ ID NO: 6053 - DNA, 1329 bp, Saccharomyces pastorianus
atgaagaacataatactgcaactggtgcccgttatcggcagtatcgggtttaccctcggagaattgtacaaaccaaaaaactctataccctgctctacaaacaagcattgtcccgctgagtggccatgctgttcaccgtataatgaatgtggagcaggtccaatgtgtgttggcggctgtgatgtgaggtcttcttttaatgaggagagctgcacacctatacctgctttggtgcccaatttggaggtcaagtttgtcagcacaccaaaggttcccaaattcattgcgaactatcaaccaaggccgccgatcaaggaggacaatgtaccaaaaaaggcgaataccaaagtaggtatcatagagggggaactcaattctaagagaatcatacactatgccaaattcttaatcactcccgatgtaaaagaagctgaaaaaatgctggatgattttgattttacacatagtggttatacctcaattgagccaagtacgggaaacattttattggccatgcccaagaaaactaccggaagtttagtcacaacaacaagatcgttcttgtacggaaaagcaagcttacgaatgaaaacagcacgttcaaggggggtcgtcactgcgtttgtcctcatatctgccatcggggatgaaattgattttgaatgcctgggcggtgatctaaccatggtgcaatcaaactattactcccagggacaattagactatactaaaatgcaaaggttccctgttggaggcgacacttgggcgacttaccacacgtatgagattgattgggatccggatagaattgtatggtatgtggacggcaaacccgcgcgcaccgttgtaaagaaggacacatgggacccagttaagaaggtatacaggtacccacaaactccgatgaggctggaagcagccgtttggccaggcggctctgaacacaatgggcctggaacgataaattgggctgggggccttatagactgggagaattcgcctgatataatagaaagaggccagtttacggcgcaggtcgatcaaatcaccgtaaaaccataccggaataaatttacagaacaagtgcagcattgcttgaaagcgaagaaaaatgcaaccgccatcctcgacaaagatctatcgaaagtggtcgtatcgtacaagaagcaaaacaaaaccgcacaatacgacgattcgtccctcgaatgggattgttttatcactccgagagtaaatgactggctgagttctggaaaaatgcgcgacattaataatagtcgcagtgataatggcttagtaaagcatttgcatacgtacactgacctctga

SEQ ID NO: 6054 - DNA, 1530 bp, Saccharomyces pastorianus
atgagtatagacgtcgattatcaattttttaaaaaaagtttaagaaaagagtttaagaaaacaacaaagatcattttaaagttacaagaatacgatggtaacgtattgagagattttctggctctctatataccatacaacgcagttttttataaccttgttattatgcaaaaggggtcatctttgagaattcaaaccaattatctgttcaaactagaattgagcaagattttaaactttaatcttgcaatgggcccaaaacatattatcaagatactgaaaaaagagaaggtcgacctggaaacgataaaaagactaaaattggtgctgtatataaaattattccaaggaatatttagccatgtggatgaaaactataacctggcattccaatcgtttcgctggtgtttacaattcattgcgtactcaaaaagagcaaaattatttacaagcattcaaggtgaacaaatttggaaattttatgaactttgtgaactatttgtgtccttactgtgttgccattgcttcctgattgatttgaaagagaacaaagaattggtaggcgataatctaaaaaactttataaaacgacaaaactccggctgttcccatgactttgatttgaatgaggaaaagaaatcgctccaatggcatcggacattggatgagatagatgttattgacgcattatactgcactagtttcgactcaatggataagtgtactctcgaattttcaaaagctaatgagaactttgtgttaagtcagtttttccagcattgtgcagaaattgaggagatgctagccatcttgaaaagtaaaatttgggagtgtgagagtgacgaattcggtttcaagattgggttgttaataaacaataaccatatgaatgaaatgattcaaaaaaacattttgtcgataactttcaaacttgataaggatcctcaaattatatgttgcttaaataaaattttacagggtttattactttcatcaggggttcaattcaaagttatccaattcttttacgtattaaaactatactatatgcaagatgatgaatcctcagaagaaaccccatccagaatggataagttgaccattgaatgcctgactattgttgagaacctgattgatgcctgtgacaaccctgatgaagtatcggattttcaactacccaaagtacttttaacctctatgcaaggaaaattacttgttgccgaaaaaacttttgaaggtgatgacgcttcagaaactattgatggttaccatcctcatatttatcagtttaaacatcctaaaatattgatagataaaatgaaatcaaaatttaaggagaaattgcacctagattcatttcaagatcaagaaacagatgactactggattgagtactggaaatactgctatcaggataatataggaaatatacctgaaacgttgtcatatgcctacgaagccttcatcgaagccggcacttcagcagaaaattaccgctctgtttcatattttctgtttcttagcatctga

SEQ ID NO: 6055 - DNA, 243 bp, Saccharomyces pastorianus
atgattgaatctctggttgatctgggcattaaccccaacgaattcccgcataagtacgtcactggcgaattgtcggacgatattcccatggatttaaacgtaggtatgttaaattcatccttaagagtttctggatattttttatccaatttcaatgcttcttccatggcttacttggttgtttgtcaaatgcttagaattaaaagtatatttatttataatatatgctgtcttattttgtag

SEQ ID NO: 6056 - DNA, 435 bp, Saccharomyces pastorianus
atgcgttgctcatcggctctcttaagctttccatatgcgtttggccgccgggcacaggtatgctggttaaggctgcggcaggaatgcacttatgcggcgtgcggccacgtctgtggcgggcggtgggtggtagacggcaggcacgggcgccgagaccgcgatgcgcatacggagagagcggtcatatgcagttacgggccgctacatggatgtcttagcgcggtcataaacttgcagcagggtattcttacagccattcgtcttgatccagtacttcctgtacttttcgactatgtcagatacgacttctgccctggaggcgtgcccatcgcagatttttttcaggtcttgctccatctcacggcgctggaagggctttgcgaaggagtcttcgaggccgatggcctcgaagccgtgcacgagggaaacgcctag

SEQ ID NO: 6057 - DNA, 1389 bp, Saccharomyces pastorianus
atggtcgctgctttatcatacctgcccaccgagcttatcgagaggatattcgagtttacagtggcggagaccgcctcgcaggagtggctgtacaatttggttacattgatcgacttcacagtttcttctgggggcgagaccgctataatgaacacgtttttaacaaattacgtcaagaagaacctaacggttttggacctgacctgcgagactacacagaaatcaatacggcagtttaaatataaatttttggggaagcttttaccctacattgatctggatacccaatatatcagactttctgatatagagactgcatctggtaagatccagagttcgaagatcgagaaacttatcgttatatttgacgaatcttccgatttggccagtatagacgcttttttccccttagccaattctaatttgaaaataaccgagttcatattttgtatccatgatctgaagagttcgttctactcgcctctggaaaaactgcacaaagcgaacatcgtgtcgaacatcgatatcaacacattgtacctagattctctagattcgaatgtttattcagatcaagatttctttggaatttttgactccaacattttccaactgattaataaagacttccgaaatttctttaccaagactaatcaaaaggggaatggaagacctccgatttgcaaaaaagtttgctttccctttgtggaaactttaaatttagattatatggctctggatttatttttcaattcgattctacgtaaactaactgccagaataaaaagttttgaaagaaataacgaatttgacgtgagcgaaaacttgaatttgaattcgacaacgacgatgtcatctttgattatcaaatcgatcttacgacaattcttcaacgatttccacataaactttcccaatttggtcactttgaatttcatcaagacttccactttccaaaaccgcaaagaggttactcagtgctgcaatttcatagattcatcgtcatctgtactgaacaaatgtttgagcgaaagtatttcgataaattttctcttccaactacactctttgaaaaattggtcattgcccaagatcaaggaatttaccggacacaaattcaagtacgacgaaaccacttcttcaggctcaccagagagatatattaaatcgttaagagggaacataaaaattttgcaagacatggcgattagcgaaaccaatgatggtacctgctatttcagagtgaagttgattcctgaaggtgtggagaaaacccaaataatcaactggataccctacgcttcttcattcgtcgatgacaccgccaaccaaagacaccgcctgagaagaccaatgatctgtttgaaaaacaactcattgaatccctga

SEQ ID NO: 6058 - DNA, 474 bp, Saccharomyces pastorianus
atgagggaagatagacagaaaagaaaccgtgaagatagtgctgatgaaaaaaatataccgcctcgcaagagatcgaaaactggctcaacagatgacgaaacagctagcacgaaattacgttctgccgtgcccaaaggctataaaatgatggaaaaaatgggctataaagaaggtgaaacactaggtaagaacacgaatgccctcaaagaacctattaaggtaaaaattcattccaagaaacaaggtatacgtacaagtaagcctactacacgcacagcaaatgacatacagacaagcgaacaggcatttaaagaacgggaaagtaagaagaagaaaaataagcagttagaaaaagtttggtacaacatgcagaaaactgcttttgaaatgacgggtgactctgagttatacaatccaggcgaggatccgagagactttaatgtactatggagatcatatgtgatacttgaatga

SEQ ID NO: 6059 - DNA, 2328 bp, Saccharomyces pastorianus
atgggtcgtccaaggaaaaatgttagtcaagagaaaattctacagttgaaaagagaactggagcttgccggtaacaggacggacgttttgctacaagacaaaaagggccgttccagatcgtgtcttctttgcagaagaagaaagcagcggtgcgaccataaattgcccagttgcacggcctgtctcaaggccggcatcaaatgtgtgcagccctccaagtattccacgtccacctcgaatagcaacaccaatagcaacacccctacagctggcactgtaccttcaccttaccctatattcaaaaatgagctgcaggatagcagtattggcgctggcgctggcacctctttgaacgatataaccataataaaacccatttccgccggccacacgaacatcgatgtcgctggtgcgaatgctcccaagaaaatcatgaagtctgcgaccaccactttcaatccgaatctaatgaagccagacaaggaccagtataccatgttcttggagaaaaaactgaaaaccctggagaccctgctggatctaccaccgggatgtaaccagtacaacaacaagttggcccaatacaggagaatttcgcacttactgagcgacaatggccccgactacaccaggccgccgaatgctaatatggtcatactgccgctgccatccccttcaaacaagcaactggaaaatagtaacgtcaccggcggcaatatcgggacggccgcgaccgatgtttcgaccatcacaaacaacataaacaacaataacgccatttgccaatcggtcagcctgttgaacgaccccttggagtcgctgaatttcaccaagtgtattttcgccaagtacaacttgaaaaaggaattcttgatgtatgaccccatatttgaactggacgaaaagctgtctcgttccttcttggacacgttcttcaccagattgcaattcaaatacccaatcttggatgaacgtgagatttacactttctacgatcactacctccacaacaagattgtcatcccgccttcttctccctccacgtcatccaccgcgccatcttcaaattcgcattcttactcggagatagaattccatttcctctccggtagaatgtggctggtcttcagtatcagcgcctacttactgatgaccacaggtaaatacaagggtttcccccctcatcggtacttctccaccgccatccgtcacatcaccaagtgtgggctgcacttgaactacgtccaacaaatcgaattgttgaccttattggtcctctacatcatcagaactgatagagattccctgatactgtacgacattatcaaagatgtcatgggaatatccaagaaaaaactgcatctaaatcaatggtatcccaatgatcccttcgcaaataaaaaactacggctgttttggtgcgtatatcttttggaaagaatgatttgcgttgccgtggggaaaccgtataccatcaaggaagcagagataaacctgcccctttttagcaacgactccttctatacaaatggtgtacacgcagcgtctgcggccccatccgccaaggaccacggtgtgcagtttatcaatcaatctttgaaactgcgcagaatcgaatctcagtttgtggagactttgcaactcctaaaaagcgattctaaatcagtaagacagtccaatgatcaattacccctcgtgcaaaaattctttgaagatttggagatttggaggaaaagttattctactctcgatgtgaaaaattttgaaaatgaaactctaaaactttattactataggtccgttcggctattgatccagccttatttggaattttttgctccggaggatagactattcagagaatgtcaagcagccgcgggtcagatatgtcaattatataaaatattccatcaaaagacccttaatggccactccacgccagcagtacataccgttttcgtggccggtgtcactttgatttattgtatgtggttggccaggaactttgatgaccaaagaaggaagaaattgggcgacgcttcgaaacacacgagacctttgataagtgcaagtctcttctctacaatggatgatttaagagcttgctccgtttgtttatacgtcatgacagaaaggtcgaactttgcaagaacttttagagacacttttgatcaactaatgaacgctacggtgggcaacttgatcgaaagatgtggtccagattcttctgaattgatcttcatggcgagcagtataactgattttgaacaatcaagacacaatgaaggccaacagactgttttcgacaaggctatttccttccacagc

SEQ ID NO: 6060 - DNA, 480 bp, Saccharomyces pastorianus
atgccacgggcatcgtggtcgagtgccaagaaacacggtcacgtgagcagaaccgccggcttgcccggctcaagctcgcgcgcgagctggccgccgcgtcgtgtgacacgatgccctccagagaggccgcgttgcagctgtggcaccgccaacagaaacacgcgcagcgccggcgcagtatcgcgaagcacgaacggcatggcgaggccgctcgtgctgaaaaagaggagcgcgaggcccgggaccaggaggcgctgcgtgaattattccgacggtaaccgcaggcgaagtgacaaaagcgaagcggaaaaatttgaaattaataaatttttcagctgcgggcacccaagctggctaggaggcctggtcacgaacaaagcactgcgacaacaatacacggaagttcctgctgctgcacattctgcacgtcgtcagcgagatcgcaccgtgtggtgcttatacgccaatcttagtttgtag

SEQ ID NO: 6061 - DNA, 339 bp, Saccharomyces pastorianus
atgtttttcaaagacatagatttctgcaaaagtggccctgaatacgagttaaagctccgcaaacacggccagaaccgctgcgggcttattttggcaggaaagaatcgcaccagcgacacacgccctaaccgcatcatcattgacttactagattgctacgtcccacctgcctgcatatgcgcacgcacatcttctatcccgatcattgtcagccaaggcccatgcatatatgtatatatacgtgcacaacacactaattaccgtgcggttttttttccccggaataccatcgcgcacgctcatgtgaaagcatatggaggcaggcagaccaacagctaa

SEQ ID NO: 6062 - DNA, 936 bp, Saccharomyces pastorianus
atgatgatgcggttagggcgtgtgtcgctggtgcgattctttcctgccaaaataagcccgcagcggttctggccgtgtttgcggagctttaactcgtattcagggccacttttgcagaaatctatgtctttgaaaaacattcaactatcagagctatcgtcaccgccgttgctgaaggaaaaggaaaaggaaaaggatgtcaagacttcgtttggtctgttggacaggttttcggaaaacttcatcgcccagggaaacgggttgaaacccactacttctcagaatcaactggacacaatcaagttttatcagttgctgcgtgagaggggcagcttctcggacgaacagtgtaaaaacattatttctttgctcttgcaactgttgaataacgagttctattctaactacaatgagttgtttcttagagatatggaactgaacaagcagtctcatctgttcagttccctggagactgaactgaagtttgccatccaaaactccagggacacgcagctaaatgagcatcatttgcaactcttgaaacttaagagagagctgaactccatccatgacgaactgaacgaagttataataaactctctgcaaaaggacgctaaactagagttcaataaccagaaactggagaataccctactgtataagcatatcaacctgaggttgaacgactcttccaacaagattcaaaccaagatactgggcgaaatcaggtcccacatcgaaaatttaagatggcaaacaacaagaagcggtctcttaatcatactggtccttgtttgttcgattatgatcggagtaagtgcgtcgaaaaaggaacacgcggtagtaccacaagaaccgacagaaccggaagagccagaacccccactaccggatcaagttccaacaacactctcctccgagaccagcttgaaataa

SEQ ID NO: 6063 - DNA, 153 bp, Saccharomyces pastorianus
atggcacatcgaaaagcactattaaccctttgcggtaatgaaaacaatcgtctggtacgacacccgctgcggcaaattacctttcctcaaaaacctcactttgatataatgacgcgtaaacgaaaaaaaaaaagcggaagccggaaaatgtag

SEQ ID NO: 6064 - DNA, 105 bp, Saccharomyces pastorianus
atggctagagaaatcaccgacatcaaacaatttttggaattgaccagaagagctgacgttaagaccgccactgttaaaattaacaagaaattgacaggccggtaa

SEQ ID NO: 6065 - DNA, 531 bp, Saccharomyces pastorianus
atgctctccagcatcttgaacagagtaggcttgggcaagggagccgcctgcagcctgacttttgacaggtccagcggatgcgtcaccatagttgcaaagattcccgccgcacccccataccaccacggatacttgatgttcttaccagctgagtctgcgttcgtcgacatcccgatgttgagatatgatggttttcctaagcccgctccggatattactactttacaagcaagagaaacgtacctctacacacaaacatgtatatatatatatatataccccaagcccgcggcccgattactacctgccccacctcctgcagcgatctcgctggccaaagaccaagccttgcagcccttctataccaagatagatacgagaagcacagcgaagagggccctttccttggcacaacgatgcgacgcgacgctatctcagaccgctctcactatcgcaattgagctccaacaacagcagcggacgcgctgttgtgcgaaagaggtcacgcattttgctggcaagcgagattaa

SEQ ID NO: 6066 - DNA, 1260 bp, Saccharomyces pastorianus
atgtcggattccatttttgaacagcctttcgtgtactgtggcgtttgccatagaagaacttctcatggagacccattgagattgacttcatgtgctcatattctttgctcgcagcattcgccggtgacatcgaaagtgtgtcctatatgtcattcaaacgatatatctataattaagcttgtagaatgtaaacaattgcccaccgatattaggatattttttgaaccattgccaccccttttagagacattgtacaatgtatctcaatttcaattgaaggggctttcgaaccaatgccaatactaccaaaaccactgtctgaaattgagggaaaaatgtgcaaggcagcagcaattgttatatcaagctaaagtagaactggattctatggcaggactgaagaaaagaatacaagaattagagacagtattaaaacacagcaatatgtcaccggtatcaatgggcatcatgtcgacgaaaaataatcatcaaagtcactaccagcctcctcccacagttgatttgacaatcgacgataatagcctagaagaatttgaagccaaatcgtttatccagaaactgaaaaaaaactcctctttgagaaatactgcaaaaaataataatggttcatctaccccatctataaaccatcatgtgaataaaaatcaatctctttacaccgagacgttgaaaaatccaaataataatagcattctatctcctaatttgaatccaaatgcaaaccataacttgcccaacatttccactattgcagaatcgaccaatctaaaccgattttcgtattcccctgtacatgttggaaaagactttaatggcaaaaacccaaacttcaatactcccacaaataatggctctttatcttctaagaacatatcaagattatcttctgcttcttttcaaccatcttcctctttgtcttcatcatctagtaggcttattttaccaaatagtaatcttgaagaattgcatcatttaaatactccaatgacgagtacttccactcagtttccctcagctttggaaaaattgaaaataacaaggaaaagaaacaatactattagtggctcgaatagaataacgcaaaacttaagctcgcatatgagaagtggtggtcttgcattttcgtcttcatccaactctttgcaacaaagtaagctacaaaagtcgaattcgctaaggcgatccaattcaactcagcagttgtccaatacgcagctcaaaaatgacatttctcaacct

SEQ ID NO: 6067 - DNA, 1281 bp, Saccharomyces pastorianus
atgtcgcaaataccgatgaactctactggcacaacaaactcatcatctcgtatgactaataataatttgaataacaacaataacaactacaatcaacacaataacatgaccgccaatactaaaaatgcagctcagaaaagaaataatgcacaagctcataatggcaatacgactaataacacttctatgcatgccaatcttgaaaacaacatggattccaactctataatacgacaatctcagcatcctcaacaccagcagaatataatacagcaacaactgcagtcaaattctgtcgccaacacatcaggagccgtgccggcaccaagtacgatagcttcggcagcgacatcgtctacaaccgcaaatttgaacgctatatctttaacaggggctccaaatccgaatttatcgatggccaatcattctcaacagttacatttgaacgggaacttggtggacgcagtttctactaatgatgtgtttttaagaactaattctccgtcaagacatgccccaaacaataaattaacgaatctaaacaacaatactggaattaacattaacaacaataacaataataactcacacaataacaataataataatatcaacatgggtaacaagaatattatggtgaatcgtcctcacacttttaacaactactctctcaacaaaacgtcaagaacatctattccaaaccaatcaagaaaaattgatcctcaccaaacagatttgtcccccttagttctcgttcaagatattgatttgagttttatggatgatgacattttaggacctggtaaccacaaccctatgaactctaacgtaaacacggcggcaaaccctcataattacaatactttccatccctccatgcatacaaaatcttctcaaaacatggtggacgaccaagatattgacgatatcgacgatgatgatgatgtagatgatgatgacgatgacgatgacgatgatgatgatgcagaaaacggatcagcatctaatgcaaaatcggtgcataataacaactacaaactgcctcagcaagcttacatagatgaccctgccagaaggctttatgtcatggatcatgaagagcaaaaaccattcaagtgtccagtcattggttgtgaaaagacttataaaaatcaaaacggtttgaagtatcatagattgcatggtcaccaaaatcaaaaattacacgagaatccagatggtacttttagcgttatagatccagattctacagattcatttggtgatggaatgggatctgct

SEQ ID NO: 6068 - DNA, 525 bp, Saccharomyces pastorianus
atggatttcacaacaatgaccatgacgagcaatatggctgctagtgccactacaacggctacgcctacacatacatcgatgaattcttcttcaaatcccaacattgatatggattctaaccagcacacaccttctatcttaataaataataattcagattcttctaatgcgaagactacagatttcaacggcatcaataatattcaccaaaaaagcgtcacgagcaataatacaaataacgtccatttgtactcgcctaatataatggaccagacactactaactccgcaagatattgctaaattacggagagagtccatagcccattctcaagggatgggcggtgtttcgtgggggtccattagcgttggttcttggttgagagatgagattatcagccgtagaagtagtattgtgcctccttcagcaaacagtgctgtcgctgctgctgctgttcccccgccgtttctaccactgctaccaacactttacaaatccaacaacctactaagagaccttctgtga

SEQ ID NO: 6069 - DNA, 123 bp, Saccharomyces pastorianus
atggccattgttcaaaccctttcttgtaacagaccccaccgtgcctttgtttcagcggtcccttacctgaagaaaaagaaatgtcttccagaaacgaatgggaaggcaagaaaaaagaaatga

SEQ ID NO: 6070 - DNA, 1968 bp, Saccharomyces pastorianus
atgaacacaaaaatactcctcccgatttgtgcttttttgacacttacaacgtttttattaacgattattgccaccgcgggttctacttcgaactataaaccactaacaaacatttacatcggtgatgctgatatttcaaaaattaatgttaccaaagtcgtgccacaagtcggcccagttttaacggttttgggttctgctttgactgctccaaacactacggtagataccatcttcggtgctcttaaggcaatcgcctctaccgaagtcttgtctcctctgttgaacttgttatcccatgccacagataccgcaacgacattgtcgtctctaacaaaattggctccaatggctttaacagggactaacgctggtaccaccgcagccttttctgccctcgatgaattattgactacttctacaaataccactgaacttttggatggctttagtactttgatgtcatccatgtcgagcaatagttcctctagttcgcttgctatggcaaacactgtcttaactctattagctgattccactgacccggtagccaccactgaatctctaattactttgaataatatgacttctgccgaaaaagtacaactgtccccagtatttgaattattcgaaacttctaagaacaccaccgctacattagaagcattaggaactattatgaactccactattccatctacaatggtttcttcattgtttaccagtctggaatctgcacttgccaagggaagcaatgtcactaccacaatcacatctttagcttcgcttgttccttctagtttgcattcagctgttcaagctgtcattacattatttgatgaaactacgtctcaaaatagtacgttgacggttttgagcactatgatttccgaaaacatcaccgaatcaccttccgctaaaacagctatggctgctttgactagcttattgggttacactacaaaccagactgagctactttcatctgttgcaagtttggctgtttccaaagaggccgcttcttccacgaatcaattagtggcacttgacgaaattctctccagcagtgctaacgcatcagctgttgtgtccatggttccagctttagaatcacaattggccagtaacaccgctttgcttcagtacgttccatatctgttcagtttactatctgcctccagtgacccagcattgactttctcatcgttggtcagcattaccaaatgggctgaaaacaatactgctacatttttaccaatattcaaaattttgaattccgctgaaagtgtgactgcaatcactcccgaacaattgaaggaattgactccatctattcttgaatatttacacattcctgtcgattatcgtctatctattttcacaatgtgccgtgctcacagtaacagaacaatgtattcatgtagcaaatcacatgccgttcaaaacatggatttcagaggaattgtttacgacaatatcattcaatcagactttaagccttacctggaagctttaaacgttagtaaagccgacttacacctggacggtgaattgcaaaaaagagaatatatgtatgttcctgccgttagagctgctttagccatgaacttgatgtgtatcatcactgctttcttcctaatgttatactttatcctattgagtagacgtcctacaattagccaaaaacaatggttagtgttgggatttatttccggttgggaatgtattttcagtggtttgggtagcgctatctttagtgttatcgttggcattatgaaatccggtagcaaaaaagataactacgatgttgttatcgctggatcttctccattcttcggtttaatgtggtctggatttgtatttgccgtcttggtattcctctatatcgcacacagttggtggatgggcagaaggcaagttgaccccatggaagctgaaatcaatgtccaagaaagcgactctacatga

SEQ ID NO: 6071 - DNA, 1275 bp, Saccharomyces pastorianus
atggaattaaatcaggtgttagaaaagaaggaagaaatttcacagtacttggccagtctggtcgggctgcatgagaaagcgttgtctgacgtagactctgcttcccgagttacaaacatccggaaagacatcaccatttgccttaatgatttatgcagagtcaacgatctcttagtatcccatgatggtctcttgaagagggagattgcttcattgctccacgacaagcaagacctactagacttgaacgagagagagcgtcttctttggaaagaacgggaatcgtggcatatcgagcaagaagtagataccgctcacgtagactatgttatcgacaagaacgccatcatctccatttcctcgcattacaggacgtcactaaacaaatatatcgagtcagtgggggcagaaaatacaaccttatcgtctacggctgatctgaatgacaagatcgaagacacacagaacacggactcttccgcaggtcaaatgctatgcaattacaaactgctgcagttatctcataggcaagccaaatcggaaataacaaaactagaaaacttattaagagacttcaaaaaggatgacaagttcatcgagcaggagctgaaaagtcaatctggacgaatacgctctgaaatcggcaatatcgatttccatttatccaagatcgaagagtcgaaggttcaactaatgaagaagatagggttcgagtcacctttaacgcaggaaaaatcactatcagagaggttgttcaacctgagattgtcagacactgatgagaattacaatgaaagggtgactattaacaaaaagaattttgttcatatgaaagacctcatcgaattgaaaattgatgatttgcaagaccaattaaccaaaaacaaaaacgagtcttccgcgttggtagcacaacgtgatttatggctcgattctcaaagaaaagtggcggatttggagaacgaactgataactaagctccggagtagcgcaggttctaagttatcgcccagtggtatgactggtatgatcaaatccacgatacaatacctcaatgaccttatcgattcatccaatgaaaaactcacgacaactttaatatccaacgaaagagacgtactcttcaaagcttgtgaggagctgaacacccaaggtccttcggcccctcagggcaatagcaatgcaacaccttctcgacctattgacatacgaaaacacagcaaagacccaaaggaaaattcaagtctaaggcagccaacacatccccattcttag

SEQ ID NO: 6072 - DNA, 312 bp, Saccharomyces pastorianus
atggcagtgaccctggttgacggcggagtaggcactgaggaagtccaggtattgcttaccctctgggtcccacacgtgcgcacccttggccttgtgaaagaccacgggcaaagggtggtagttgtgggcggagtacttgttttcccattcgatggtctgcttggaggagagggtggcgttagacattgcggtgtggtgtgttgctgtggggggagggagggtgtggagggaagagactcgtggaagaccaacagcagcgttgggcgtggcccgctcttatatatgctagcgagtcagcgagtcagccgctaa

SEQ ID NO: 6073 - DNA, 1344 bp, Saccharomyces pastorianus
  modified_base (1270)..(1309): a, c, g, t, unknown, or other
atgtctaacgccaccctctcctccaagcagaccatcgaatgggaaaacaagtactccgcccacaactaccaccctttgcccgtggtctttcacaaggccaagggtgcgcacgtgtgggacccagagggtaagcaatacctggacttcctcagtgcctactccgccgtcaaccagggtcactgccatcctcacatcatcaaggccttgaccgagcaagcgcaaactttgactctgtcctccagagcgttccacaatgacgtgtacgcagaattcgccaagttcgtcaccgagtttttcggcttcgaaaccgttttgcccatgaacaccggtgcagaggccgtcgagaccgcgttgaagctcgccagaagatgggggtacatgaaaaagaacattcctcaggacaaggccatcatccttggtgcagagggtaacttccacggcagaactttcggtgccatcagtttgagtaccgactacgaagactccaagctgcacttcgggcccttcgtgcccaacgttgccagtggtcacgccacccaccagatcagatacggccacgcagaggacttcatccctattctggagtccgccgagggtaagaacgtcgccgccatcatcctggaaccaatccaaggtgaggccggtattgtcgtgccccctgcagactactttcctcaggtcgccgcgttgtgccgcaagcacaacgtgttgttgatcatcgacgagatccaaaccggtatcggcagaaccggtgagttactgtgctacgaccactacaagaccgaggccaagccagacatcgttctgttgggtaaggccctttccggtggtgtgctaccagtctcatgtgtgttgtcctcccacgacatcatgtcctgtttcaccccgggctcccacggttccaccttcggcggtaacccattggcctcccgcgtcgccattgccgctctcgaggtcatccgcgacgagaagctatgccaaagagccgcccaactgggcggctctttcatcgccaagttgaaagctctacaagaaaagtctaacggtgtcatctccgaggtccgtggtatgggtctgctcactgccatcgtcatcgacccctccaagactaacggcaagaccgcatgggacttgtgtctgctcatgaagggccacggcctcttggccaagcccacccacgatcacatcatcagactggcccctccactggtcatctccgaagaagacttgcaaaccggtgtcgaaaccatcgccaagtgtatcgatctgnnnnnnnnnnnnnnnnnnnnnnnnnnnnnnnnnnnnnnnnccttatattttatttatatgtacctacgtacctga

SEQ ID NO: 6074 - DNA, 468 bp, Saccharomyces pastorianus
atgaacgactctacagaaccccccaacgtacaaccagataatattaacaaccaggatactgctttaccaaaggcaacctcaccagaaaacccgagcctaaataacaaagtgccaagccttttcaaattagccgcccaatggcaaataaataatccgcaggaaaacattcaaaaccatatcatggagaatgaagtgcttcagagaatcaacgagattaccagtttgataagagaatcctataaagacctttccaaccaagacggaatgatgtccaaggaaccccaagaaaagttggattgggacctcttttgtaccgttcctgtgaatattatcgagcagtatacaaaggatatggacgatattttcgggaaaatggaaaagttgtccaaagtacgtataaccaaacagacaaacaatactcaacaatgttcttttttactaataacaatttcatgcctattttcgtaa

SEQ ID NO: 6075 - DNA, 573 bp, Saccharomyces pastorianus
atgcctattatgttggaagactaccaaaagaactttttagagttagccattgaatgtcaagccctgagatttggttctttcaagttgaaatcaggtagagaatcaccatatttcttcaatttaggattattcaataccggtaaattgctttccaatctagctactgcgtatgcaatcgccatcatacaatctgatttgaagtttgatgtaatttttggtcctgcctacaaaggtatcccactagctgccattgtttgtgtgaaattagcggagattggtggctccaaatttcaaaacattcaatatgcatttaacagaaaggaagccaaagatcatggtgaaggtggtattattgtcggctctactctagaaaacaaaagaatattaataatcgatgacgtcatgaccgctggcactgccattaatgaagcattcgaaattattggaaatgctaagggtcaagttgtcggctccatcattgccctagatagacaagaagtcgtgagtactgaagataaagaaggtttgagtgccactcaaaccgttagcaaagatacggtattcctgtcttga

SEQ ID NO: 6076 - DNA, 402 bp, Saccharomyces pastorianus
atgtctaccatgaatttcttattatccacaattttacctgggatgtataatgatgcagatgcaggaaccagtagcttttgtccttcattttctggctgggaaactgttttgatgtcatcaatgcattctacaaacttgcccttggccatggacagtgcttgcaatgattgtgtgaaatgctgcaattcttggtcgaactgttgtttcacagcagttaattgctcgggattcagcttggttaaatcaactatttggaaatacgcatgtgtacataggttagtaaaagaatttggtggcaataccaatgagggggtagaaatgttcacatactcttttgggaggacatggtttggtttgagtgtgctctttcttactttaattttagcaagatttttcaactag

SEQ ID NO: 6077 - DNA, 2520 bp, Saccharomyces pastorianus
atggcttttaaatcatttaagtataacatatattccaaaggttaccatcgttctgccgctcaaaagaaaaacgcaacttcttttttcgatagttcctaccagtatctaagacaaaaccaaggtttggtaaactcggatccggtactacatgcatctcatctacatcctcatccggtcgtagtagcgaatgttaactataataacgttgatgacgttttgcacttgcacgacctggattccccattaaacatcagcaccaaccctctaacgcacgatgaactgctttacaaccaaaacgtttctcttcggtcattgaagcaacagcaaaacaacaacaatgctaataatagcagcactcaacatagatactattctactggcccaactgttccagccaaccagtacgattctttgaactttagttctaggaatttccaagatttacaatcaaaacaacaacctccaccagtacaaaagcaacagcaacaagagtataatcttctggaagacgaaaacacatttgtatggaaagaagacactgaaccgtgtctgaacacttccacatatttacaaactcacattgatgaaattaatcgttgttatgaacagaataattacaacaaaatcaactcactgtatcagtcgctcaaaagaaatggtatagttccacccttggaaatctttacaaaagttttagactctctttgtaaaaggccattggataataacgatttagataataagatgtacgaattattaacgtgttaccaagatatgatcaataacagaatgaaacctcctgatgaaatttacaacatcgttcttttatcgcttttcaaaggctcaattttggcctatcaattcaaaaatccaaacggtagtgatttctataaaattgccatagaactattcaacacaactaccaatgatcctaaacagaagagcgaagtcaagttccgtaacttctccaaggacgtcttggattataacctcttagcgatgaacatttacccaggccatatcagcttatcaaaagctcaacagattatcaaatcttctccagctttcatcaaggattcattttattttattgcatgcttttcatacgccaaatcaacaaatgataaattggccattaaggaactttatgaagattttagactatctatatcctcttctgcctcaaaccaaactttattcgataaccagtttgaaatctatagcgtgattctttctagtttcattgagactggcgaggttgagttggctaccaatcttttggatgatttggtttcgaagattcagaattcaaatggtctagcctccaacatttctttgttgctatcaaattttttaatctcaatgagtaagattgattcttccaaagcctatgaaatttggtttaaattccacaaactagactggatacctgaattttcttatgaattttatttgattttcatggcaaatagtttccaggattggaatctgaccaagaaaatttatgattatattttccccatgaaaagaagtttatctccattgaaaaagcaaaaattatcggattatctgctatatccaatgggtgctgaatccattataacgtctttactagattactctctccagttgaaagacaacgagattatcatgaagattttggaagagtccgttatcaaaaacttttcctttgatattggtatttatccattcattttcaattatttaagagaaatcaaatgtggcgacgagtatctcatgagatttatcgactcacacgctgaatttttcgaaaagagtgattctgtcagcaaattccaatttttgaattcgatagttgataatttccaatcacaatcattattgaacagtatatcccacgcaaagtttttcatgaatttagtgaaggatttcaatctggaaaattgtgaaatcgtcaactataatgggttgataacatgtattcataactttgttaaagcgccaaagacaataaaagactttccatacattctagaaattcatgccgttttgattacgaaattgtttgactttgacacttacccaatactacaaaacaatagcgatgaaactctattaaactttagagaccagattgaacatcagtttcgaattttgactcaaaacttttatagattgaatttggacccaaacttactagctggtgttgtttcccaggccttaaaaatgattaatctcgacgaagttactaatggccaagacttgttgagattctttaatcatcctggggattgggacaaatcttatccattgtccttgggttccttcattagaaattcttgtaaggctggtataagagagtttactaaactaagcaaggaaggatattgctttgattatgatacatacaaagcgttgatagtcaatagagctattaacagacagattattgacagatgcatagaaatatgccctgatacaaccgaattgaaatctcttgttaatttgataatttccagattcctggtagagaattga

SEQ ID NO: 6078 - DNA, 729 bp, Saccharomyces pastorianus
atgataaaattgatcaaaaattgcgaatctttatcaaatttcattagagtttgtgatttcccagaaaaattcaaaagtattgccattcaagctgaaaacaaaaatgctattgaactgatttacgaaaaattgtttgacagtggaaactatgctgatattttgaggtataacaatgttgtacctgttcttaatttagaacttttactaaaatcatgcattagatatggtgaatttaagaaatttgaaagccttttcaaaaaatttaacgataaaattaacgaatcatccaagattgatattcagttagagtatctgatcaataagaatgacttggaaggagcattggaactattcgcaaaaactccaaaggatttaagaactcctcacaagaccatggacctatatacttttgcattatttttggacagtttcaatagagacatcacgtattatgaaactccagagaatacattacagttcgccaatattttatccagccaagcaagctatataaatttgctgtccacttacaatctaattgcccattcagatcaactgatgagctttaacacaggtggaatggccagtaaggtaaagaaggaaatcttaactcaaatgctgaacaatctgtatgattccgtgagattattgtcttctagcatagagaccgacgaatccatgaaacgaaacatggagagaagaaagtacagaattactgcagatctaaag

SEQ ID NO: 6079 - DNA, 1917 bp, Saccharomyces pastorianus
atgaagcaatctggcttggttttgcaggaccttccacctgaaattttgataaacattttttctcacttggacgaaaaggatttattcacactacaagaaatctctacacatttccagcaactaattcgcgatgaagaactgtggaaaaacttgttcaagtctagaatttatactacacatttccctacgttttcccagtccaccaaatttagtgtagaatacatcgaaagaactcgtggtcttcataattggaaacataacaaagccataagaactaaatataccataactccgactcgtaactgggaccagcctagcatagaacgtatagtattcgattacccacgagttgctgcttacaacgatggtataattaccatcttgcaattacaaaaccacaagagacagaagaagtttaaaaagctaatttatattccatgtacgactccacagggatgctccaccatggactttaacatcaatgccgctgtttttggcaggtttgatggtagagtgtttgggaaactgctaagtaacaaatcatacttgacgcctgtgatggaatttattggaagacatagttcaggtgtcactgccatttgtaattcagagtcctgggatacgtcgagagaagactggtgtgtgagtggttctgaaaatggtgaaattatttggtggtgtgaaaacaaacttgttaagatgtggaaggtttgcactagggtgatttggaaattggccttttttaaagattggaccttgatcatggatgatgaaaaactttacgtcatctatcaaatgcgtgaactacacagcatagacattccaagggacgcggacgatcaaccggtaagtgtacgattcttcaaaatggattttggttccatgaccttggtattggctgatctgaataatgtttatacaatatcggtcaacccgaatggtaattttggtaatttgagaaaattagccattccagaacaaatatgtgccatagagatagatgaaaagacctcgcaaagagaacagaactggcaatttgccggtgacgacggctgctacatcagtcttttgactactgcgaataccatttacattatcaatataagagatctttcaacgacgggtttgaaagtccaatgcagaatcaactttgacgaacaagtttatgtttcgcaagtgaccaacttaattgttgtcgtggcactaccaaacactcttcaaataatgaacatgatgaccggtgaactgattaagtccgttttgaagaccgacaaatttcctgagtttttgaaagtttcgcaagataaaatcgttatggggagcggtaatgtgttgaattatttattatttgtttcaagcgattcaaagaaaaaacatcattccagtaagagtaaaaatgcaataagtaataaatggaatgaaaccttgaacaccgagttacaatattatgacgaagctgaagaccttagaaggcaaagacaatcagaaatatcaagattaatccacgcatatggtggagatttagaacctttaggtgacaccgaagaagaaaatgacattcagttaagaattgcgctcctggaatcgcaagaagcacaagcgcgaattgacgctgaaactgggccacagattgaggatgatgaagatgaacaactacagagagctttggaagagtcccagaggttacatgaaacacagatggataacttggctgatctatccattacttcgagccaaggagaggatgatgctgaagatgacgaagagtttcttagagctattgaacaatcaagattggaggacgaaagaaggagacaagtcagaaatagcaatacaagccgacgaaatggacctttaatggatgaaacatctactacaaatagcggttcatccggcgaagtcttcgctgggaacacc

SEQ ID NO: 6080 - DNA, 975 bp, Saccharomyces pastorianus
atgccgctgctatccaaaaaattgaaactggtggcgaaaccaattgcctatgtttctaggttttcagcaaagcgcccaattcatataatactggtgtctttgatcatatccgcatttgcctatctatccgtcatccagtactatttcaatggctggcaactagattcgaacagtgtttttgaaactgcgccaaataaggacaccaatagtctttttcaagaatgttctcactactacagagattcctctttgaacggctgggtgtcaataaccccaaatgaagccagcgacttgtcaacccctcatcactactatctattgaacctaaatttcaacagcccaaatgaatccgcatccattccggacctatccaataccgtttttgacaaggaaaatactaaatacatcttacaagaagatctcaacgtatccaaagaactttcctctactgatggaacacaatggagattaagaagtgacagaaaaagtcttttcgacgtaaagacgatagcatattctctctatgacgtgttgactacacatatagctcaagcagacccattcgacgtccttattatcgttaccgcttactttatgatgttttacacaatattcggcctcttcaatgatatgaggaagactgggtcaaatttttggttaagcgcttccacagtggtcaattccgcatcttctcttttcttggcgttgtacgttactcaatgtgtcttggggaaagaagtttccgctttaaccctttttgaaggtttaccgtttattgttgtcgttgttggctttaagcataaaatcaagattgctcaatatgccttggaaaaatttgaaagagttggattgtcaaaaagaattactaccgatgaaatcatttttgaagccatgggtgaagaaggtgcccgtttgattcaagaccacttgctttgtatcgttgccttatcgggatcctctagagtcacctgcagc

SEQ ID NO: 6081 - DNA, 849 bp, Saccharomyces pastorianus
atgtcagccaaatcgttcgaggtttcagacccagtcaattccagtcttaaggggtttgccctcgctaatccttctataaccctagtgcctgaagagaaaatccttttcaggaagactcaatccgagaacattgccttgatctccggtggtggtagtggtcatgaacctacacattctgggtttattggtaagggtatgttgagtggtgccgttgtcggtgaaatatttgcgtccccttctacaaagcagattctaaacgcaattcgattggtaaatgagaacgcttctggtgttttgttgattgttaagaactacactggcgacgttttgcattttggtctatctgctgaaagggccagagccttagggatcaactgtcgtgtcgctgtcatcggcgatgatgttgcagttggcagagctaaaggtggtatggttggaagaagagcattggcgggtaccgttttagttcataaaattgtgggtgcctttgccgaaacgtactctagtaaatatgggttggatggtactgctaaagtggccaagattatcaatgataacctggtgaccatcggttcctccttggaccattgtaaagttcctggcagaaaattcgaaagcgaattaaacgacaaacaaatggaactaggtatgggtattcataatgaacctggtgtaaaagtcctggatccaattccttctactgaagacttgatttccaaatacatgctaccaaagttattggatccaaacgacgaggatagagccttcgtggatttcgacaaagatgatgaagttgtcttattgatcgacaagcttgatccggccataaggccaattcaactgcacgtc

SEQ ID NO: 6082 - DNA, 267 bp, Saccharomyces pastorianus
atggcgggcaccttgctcatgattctatggttcgtcgccacggtccttccgttatcgagggtatactgtgtgaggtctctcgtgggctgcgtggaagaagaagcaacggtggcagcagcagcagaagcagcagcagcagcagaagcgagcttggaatctacggcagtcgcgaacgattccgggtgttctgctttattttctataatcttgatagcagcatttatctgctcagtgtttcttatggcgtctgaagacatggcggattag

SEQ ID NO: 6083 - DNA, 129 bp, Saccharomyces pastorianus
atgattgagcatataaaaaacagtctcgttaccaaatggttgaaccgggtcttgcacacgtcgctgaagatagcgtggtacgtgtaccgtggattcagcaactccctaggcgtctgtatcatttcctag

SEQ ID NO: 6084 - DNA, 768 bp, Saccharomyces pastorianus
atggaggccaacgaggcagctagcaaagaacaagagtacgttcacaacgtgtacaatgagatagcgccgcatttttcgcagaccagatataagccatggcccatagtgacgcagttccttcagacccgtgccatgggggccatcggcatagatgttggctgtggtaacggcaagtacctcggagtgaaccctaacgtatacatgatcggttcggatcgctcggatgggctcatcgagtgtgctagaggtatagacccggcctacaatctgatggtggcggacggattgaacctaccgcatagggacggtacgttcgactttgccatctcgattgccgtagttcatcactggtccacgagggagagacgtgtcgaggtgatcagacacatcctgtcgaagttgtgccggggcggtcaggcgcttatctactgctgggccctagagcagggcagctcccgcagaggctaccacgagggaatggagcaggatgtttttataccctgggttctccccaaggacaagcccaaacttacaccagctgccaaggctaaggccaaatcaaagccagacttagccaacatcccgcccaaggagcgtgcccagtacttgcaacgttggagggaaaaccacggacagcaagagccggcgacacgcatgaaagcccacagagcaagcggacagaaagtgagacggacacataaccggaggaatacaagagcgcaggggccgccaggaggcagccaatgggggccaaagaagggaaaaagg

SEQ ID NO: 6085 - DNA, 369 bp, Saccharomyces pastorianus
atggtggtgcctccgcgtggggtggtgccagcggtggtgcctctgcttggggtggtcaaggtacaggcgctacgtctacttggggtggtgcttcagcttggggtaataaatcaagttggggaggtgcttccacttgggcttctggcggagaatctaatggtgctatgtctacttggggtggaactggtgacagatcgacttatggtggagcttccacttggggtggtaacaataagaacaagagtacaagagatggtggagcttctgcttggggtaatcaagatggtggcaacaggtccgcttggaacaatcaaggaaacaagtcgaactatggtggtaatagtacatggggaggtcattgatctctag

SEQ ID NO: 6086 - DNA, 1725 bp, Saccharomyces pastorianus
atgcaattacagaatatattactagctacctcgctagtgtctggactctctctcgctgcagactcgtcgtcaagcataggtggtggttacgctccatcaaaaatttcttgtcccgatgatggcgcttctttagtgagaaatgcctctggtttgtctactgatgaaaccgaatggttgaagaaaagagacgtatacaccaaggaggccttacattctttcttggatagggccacttccaacttcagtgacaattcgttgctctccactcttttcggtagtaattcctccaatgtacccaagattggtattgcatgttcaggtggtggttaccgtgccatgttaggtggtgctggtatgattgctgctatggacaaccgtactgacggtgccaacgagcatggtcttggcgggttattacaaagtgccacttacctgtcaggtctatctggtggaaactggttaacgggtactttggcctggaataactggacctctgtgcaggaaattttagatcatataagcgaaagcgattctatttggaatatcacgaaatccatcgtgaatccaggtggctctaacataacctacaccattgaaaggtgggaatccattgcgcaagaggtacaggccaagtctgacgctggctttaacatttctttgtcagatttgtggggccgtgctctttcttacaacttcttcccaagcttaccaaattctggttctgccttgacttggtcttctttgagggatatcgacgtgttcaagaacggtgaaatgcctttaccaattactgttgcagatggtagatacccaggcaccaccgtgataaacttgaatgccactcttttcgaatttactccattcgaaatgggttcttgggatccttccttgaacgcgtttaccgatgttaagtatctaggtactaaagtttctaatggtaagccagttaacaaggatcaatgtgtctccggttacgataatgctgggtttattattgctacttctgccagtttgttcaacgaattttccttggaagcttctacttcaacatactatacaataatcaacaattttgctaacaggtacgtcaacaatttatctcaaagtgatgatgatattgctatttacgcaccaaatccattcaaggacactaattttgttgaccgtaattacacttccagtattgtcgatgccgatgatttgtttttagttgacggtggagaagatggtcaaaacttgccattagtcccactaatcaagaaggaacgtgacttggatgtggtctttgctttagatatctcagacaatacggatgatatgtggccgagtggcgtctgtatgacttacacctatgagcgccaatattctaaacaaggtaagggaatggcttttccatacgttccagatgtgaatacttttgttaacttgggtctaactgacaagccaactttctttggttgtgacgcacaaaatttaacggacctggagtacgtgccacctttggtcgtctatattcctaactcaaaacattcgtttaatggtaacacgagtaccctgaaaatgaactacaacatcactgagcgtcttggaatgatcagaaacggttttgaagctgcgacgatgggtaactttaccgacgactctgaattcttgggctgtatcggttgtgctatcataagacgtaagcaagaaagcttgaatgctaccctgccatctgaatgtact

SEQ ID NO: 6087 - DNA, 1305 bp, Saccharomyces pastorianus
atgaagaaccaggactcaaaaatacgaaagatctggacacacccgataacagagtacttgaagtctcaatggttcttcttctgcctggcaattttaattgttattgcaaggtttgccccaaattttgcaagggacggtgggctaatcagaggccaatatagtattggttacggctgtgttgcttggattttccttcaaagtggattaggaatgaagtccaagtccctaatggcaaatatgttaaattggaaagcccataccactattctaatcttgagttttttaatcacctcatctatagtgtatggattttgctgtgcagtaaaggctgctaagaatccgaaaatagatgactgggtacttattggtctaatcttaactgccacttgtccgacgactgtagcgtcaaacgtcattatgactacggatgctggcggaaatgatcttttatgcgtttgtgaagtgtttataggtaatcttctgggcgcatttattactcctgcattggtccaaatgtttactggccaagcaccgtttcaatacggcaatcctgctaccggaaacggtataggtgctctttatggtcgtgttatgaagcaagtcggtctttctgtcttcgtacccttgtttgtggggcaagttattcaaaacgtttttccaaagtatactgcatattatatgggtttcttgaaaaaataccatatcaagattggatcctacatgcttttgttgattatattcagttctttttcaacagccttttatcaaaattcattcgcaagcgtctcccatgtttgcatcatatttatctgttttttcaatttgggaatttacattttcttcacaggattgtcatacttgtgtgcaagaccttggtttatcatcaagctttttccacacgaacccattgatggcaaatctacaaaactataccgttactcttatagccttttcaggccattttattattctaaggatgatgcgatctgcatcatgttttgtggtcctgccaaaacagccgcgctaggtgtatcgttaattacatcgcaatatgccgataaaaaagaacatttaggtaaactgttggttcctctggtgttatatcaagctgagcaagtgatgactgcaagcttattcgtcagtttgttcaaaagatggttacgaaaggacgacccatcaaatggaagtgagtcttcctctacaagtggaaatgaggagcctgacctggaaaagaatatttcaatggaaactggtcacaatagaactgtcccttcaaaaacgattgcatttcaagactcaaaataa

SEQ ID NO: 6088 - DNA, 1056 bp, Saccharomyces pastorianus
atgttttcaaaaactgatgaaagtgaggaaaaacacaagccggtcaggtgtaaagtaaatccgtctgacttggcatcgatttcacctttagttttgggtggtgcagtgctgaaccaacagtacaccgatgacccagaatccatccctttggaagacatgatcaaatacgccttcacacacggcataaacgcaattgacacttccccttattatgggcctagtgagatcctttatggcaaggcactaaataacctgaaggatgacttcccccggaacacttacttcatatgcacaaaagtaggccgcattgctgaggatgatttcgattattccagcgaattcgtcaaactcagtgtacacagatcatgcaaaagactgaacactacctatctcgatctggtttacctgcatgatgtggaatttgtcgcgttttcacaaatcttggaagcactcaaggaattaaggatcttgaaaaatgaaggcgttataaaaaattttggcctatcagggtacccaatcgacttcgtcacttgggtagctgagcattgttctgcgaaggacaacgatatcggttcattggatgccgtactatcgtactgtaacctgaatttgcagaacaaccaattactaaagttccgcgaaagactactacaggctgccaacttgaaaatggtttgcaacgcatctatcttgagcatgtcactgctaagatcacaggaaacaagggagttccatccctgttcgcaagaactgagagaatgcgcatccaaggcggctaaatattcccaagagcaaaatatcgacctagccgacttggcgacaagatacgcaattgcagaatgggtgggcaaggggcccgttgttcttggagtcagcagcatgggcgaattaaagcacgccttggacaactacgaaaacgtaaagtccaatggcaacaaattgtctcccaaagaccaaaggctagcaagttttattcagaacaatattttcaaagaacacttcaatgaagcctggccgtccggcattcctcatccagaaatgaagaaagtctcttaa

SEQ ID NO: 6089 - DNA, 1503 bp, Saccharomyces pastorianus
atgtgtgtcattaggatgcagtcccgcagatggtatcctgcattcaaaaggattcccctcttagtggatagtcaaaaaatcatcaaacatgaagtacctcatccagatgaaatacttcacccattctaccagccagctccaatagaacagtttattgcatgtgctacggaatacaatccaagcttactcgatggcaaaaaagtagttccgtcaatcatacaacacccaataaagcaaaatagcgtgttagtggatagcaaattagaatttactgatgttaggggtgtaaataaatggttactagatttcatttcgaagcgacaacagcagaagatgctggttcataaacctctggacaaggacaccaaattttctcaacttccgtttttatcttcttctgatatatccagaatatcaagccttgaagatacactattaagcattagagatacagatgacttggaatccagcgtcgagaccgtaaacaatgagttgcaacgtatctttgagcgtgaagataagcagtctaagttgttttgtgaaaatatacttgttcatttgataaaccaccatgggaattccgttcagaagcttatattgctaatgaatctcactcgggtacagttattctcacgtttggatcaactgaaagccttggacattgttatgtatcatacactttgcaaaattagaaccatcggcaatctgccatataacacctatttgatcaccacattggaaagtttattaacgtcaatcaacgatagattttttcccagatgttgtgaagattcattacatccaattgtaatcgagcagctgttatcatttttcattgaatcaagaaatttaaacgaaagtaagatttttttgagtcatttgataaaaaaaggcattttgcccaacacaggcgctataaatggatatctgaagagtgtggacgagcattttggtaggacttccaattttttggatataaaattcaagttcgcgtttataacagatcttgcaccaataatacaaaaccatgaggtactaccgctatttaaattcttgatacctatgtgcagacattttgatgaactgtactctctgttgaatactattcgaaaatcagacaactccaagcaaatcatggacagcatactatccatacttattaagaaggtacctacatttaccaacgacccaatggttaactcagcaaacttgtgcacgcttttgaacttagtaatcccactatatgaacagagcctatccagtgaatttgtggaaaaattcatactagctttcgctcttcaaggaaactgtactatgatggccaatatgatagatgaatatgagatcacattaactcacaaacggcaaatgcaaataatgagcgctctagccaaaaatgagaaaaaccacatttcgaagcatacagacgctataggttatagtaaagaattcaagaagtacttcttggagaactatttatctctaacaaaaccgaagagctga

SEQ ID NO: 6090 - DNA, 1086 bp, Saccharomyces pastorianus
atgttgaaagaagcctcagctagtttgcgagaagctattatcgaagggactgtactcatagtgaaaaggctattgcgacggtacccggatttgctgaccaatatcgactcagagaatggatggagttcactgcactacgcctcgtaccatggaaggtacctgatatgcgtgtacttgattcagttgggccacgacaagcacgagctgatcaaaacgttcaaggggaacacgtgcgtgcatctggcattgatgaggggacacgaacaaacgctgcatctccttctacagcaatttccgcagtttatcaaccaccgcggggagaatggcagggcccccatccatatagcgtgcatgaaaaactactaccagtgcctgagtctattgataggggtcggggccgatctctgggtcatggataccaacggcgacacgccgctgcatgtatgcctggagtacggcagtttgaattgcatgaagatgctcgtcaacgaaggcgaggtgtcgttggacgacaacgtcaaggacaagggtaactggaagccgcttgatgtggcgcagacgttcgaagtggggaatgtatattcaaaagtgttaaaagacgtgaagaagaagggggtaccgctgggcaccggcaagaaacccagttcgttcaggactcccatcttgggcgcgaaagcagctttcgaagacggaccttctccagtgctaagcatgaactcaccgtattcgctctattctaacaacagcccgctcccggcactaccaagaggaatatcgacgcacaatgcgagcgtcactggagggaccaaccgcagaagttccatccaaaatcctgtgttcaacccgcgcaagccgtctttgtccacggacagtttctcgtcaggctccaattccagccccagggccagagtgaacagcaagagcacggcgggagggtcacccatgaaggagcaggtaccggagtcgctgcgacacagtgtaacgccgacgagcccgcacaacaacattgcgctgatcaacaggtacttgctggcaaacaaaagcacgagaacttactatagaccgcaggtgcagcgaataacgaca

SEQ ID NO: 6091 - DNA, 894 bp, Saccharomyces pastorianus
atgatagcttctgaaattttcgaaagagatgtgcaagatccattttgtcaaggttgtgattatgaggacgaaacagtggtaccaaactttttaggttcaaacgattttgtaaactctaaattagcttcctttagtttcgaaaactctttaaagaataactactctcgtaacaacagcagtaataattcgaacagacataacagtttcccccatatcattggtcatcatttgagaaaaatcaaaactgctccacatcatctatctagtttcatcccgccaacttcagcaaacacttccaatgaaacaattcgtcccgctccaagaagagtaagagcaaatagcagtactcttattcaccaactgtgtagacagtcaaccagacagtcttccttaggtgacacagcaaatacctgtattgaacataaacgctcaaagcctaggtccagacactcgtcctgctacggtataccaacacatctttacgggttagaaaagtacgtttcgtctgaattggattcgctggcagcaaacaacgatcagccaaatgatactactctcccatcagcatctgcttcgacctcgacctcgaactcaaattcgtatttgaatctcaattccaactggaatgtaaaccctgtttccaactctaccgcatgcccatcgtctaatcttcccaatgaaaaaactaatcgattaaaattgatttctcatggaaaaataccatcaaataacatcgcaagccatagcggaaacttcgcccattattctaaagaacgcacggcagctaatttgagaagagaatccacttcgatgctttcgtccggctcctcttcatctcccttgcagacaagaaataattcgtattctaactctggtaaaatcgtcttccaatag

SEQ ID NO: 6092 - DNA, 2667 bp, Saccharomyces pastorianus
atgtttaggagaagaacaacggcagcagatatggaacaagcgaacccgacagctttagcagctgcagcaagtatcggtaaattattcatgaagaaagagaatcagccagaaaataagccaaaatcgacctatcgttcggcttcgatgacaaacatgaggaaaccttctgcttccaaaagagtgtcttccatttccagtacatcgtcagagtctacgcgagggaacagtcaaaatcgtcctaggaagctgaatagtctcaaccaacgctcgtcagtggtgagagaaagtggctcaaatctgcccttgcggacgggatcacagtccaaaaccagttcacatgatcgaacttcgagtcttcccaaccagagaggccaatcgagcagaaacaattctggtttgcaacgccgtaactcgaaaataaaccaaagagtaagctacgacgaggctcagcgtacgttcaaagattttggggggccacaggctagaggcgttttaaccaacaaacaacgttctagtacccacggtagtctcgcccctttgaaaactacgcgaaaatatatacccggacctaacgggctaattgcggttgatgttccagttgaaagaccagataacatttctggttcattaagacgttcaaattcagcccacagcgacttgaatgtcagaaatggttcgttattgagaaaaaaaatttcgcaagaatctttacattcacaaccaaaaagaacttcttctttaaggaactcatcaaactcacaaacaaaacaagacaacgagcctactcaaaatggaaaagtgccaaaaaaccgtcctcttattgaaacacaggttcgtgaagaaaccgatcaggaactaaagctggaaaactccagctcttctggatccgaaactgtagtcaatggagagaataattcagaaaagcccaaatcaccggctaatggaaaggacaatttaagcaaactgatagatgaaaacattgagttaaaaggctttattgaaaaagaggaaaaggagaaaattttgaaatccgacgaagaacacgttattgcgcataagccagctaaacaagagaagttgaatgataaacactcagcagttgtagatgataaatctccttactctgacaagatagagactgcaaaagagacatcaagaaaaaaaccaaatcatgtactagaggaacactatggttctaaagctgaaaagccccaaggacaacttaaaaaattggaacatactatttctgacgatagttcatctgttcaaagattggccgaaaaagacagattggaaaacggtgatcgtaacttaacaagcgatacagttatatctcccacgcaaaacctcaatgaaaacgctaattcaatacaagatcacattattccaaaagctatcaatacaacacacaagactgaaaaaatggacagctcttcggatgaattatctccttcaagcacctactctacacacgaaaattttgatgacagtaaggatagaaatatcgatgcagtagacaagaaaactcaagaagcaataaaaccaatcacttcccaggaaaataatggacagaaacaagcgaagccaacaccctctttggctcaatatctaagaacctcaaatacctatctatctccaaaaaatccaccgaaacaaattgaaacagaaaagcttcttaaaccagaaaatccaatggcgcccgccaccaaagttgttacacccatcaaatctgccttaaagaaatcatcagggatatctaatcacaaaaattctgtgtacgctgagagctcccctgcaaatggtgcatatctgtctcttacaactgctgaaaatacaaggctgaatgcccaaatgaccgtctctgatagtgtatcgcgcagaactagtgtgaaacgctcttccataaaaagacctcaatcagtgggccagtttagaaacaacagatcgagttcaccttctcccccagagaaaataagcagtaagcgccactctgctatacctttaggaactccggagaaaggtaaatcaaaaagaagttcggtagtagcttcttttcctaaagccatatcacaaactcacaattcaaccactgtaccagagcccaatggccaaaaaagcaaattgaaaagcgaagttagcggaaagctcaatgatgcaagtatgaagaaaggaccaccgggcccacagaatagtaagcctgcaacaaaggatatgaacagtatcttatatcctaaggaaccacctgcccgcaaatctagttttgagaaaacacgaagcaatgagtctcatcttggattcaaaaagctatccctaagaaacagtattatggaagatgataccagtgatggttatagcggccaagcgagccagaataatgcaaaccgaacggaagcagcacaggagttttttaaaaatctgggttattcctccagatttgcagattcagactccgacaacgactcccaagtttttagtcaaagcccttccaaacaaaaaggtggaacagaagaacataatactaacagcgacgagaagactagtagcggtaataatggtggcttttcattggttcagagcacgagcaagaaaaaagaggacgacatgggcccaccgcgcctttcacaggctaatcacgataacggccactattgcactccccatattaaa

SEQ ID NO: 6093 - DNA, 201 bp, Saccharomyces pastorianus
atgacaaaccgccagccgaaggacgggcgcttaaatccgccgcgcaaaaagaggcccgcagggaataagttggctttaccggaacttcgccagacaacggcggaggacccttgcattgcctggaaagagctttcgcttactcactgtcgccgtgttttcctttgttctgggccgggagccgctggcctcttccgcggatga

SEQ ID NO: 6094 - DNA, 459 bp, Saccharomyces pastorianus
atgggtgcctacaagtatttagaagagctgcaaagaaagaagcaatccgatgttttgagattcttgcaaagagtcagagtctgggaatacagacaaaagaacgtcattcacagagccgctagaccaactagaccagacaaagctagaagactaggttacaaggccaagcaaggtttcgtgatttaccgtgtcagggttagacgtggtaacagaaagagacctgttccaaaaggtgccacctacggtaagccaactaaccaaggtgtcaacgaattgaaataccaaagatccttgagagctaccgctgaagaaagagtcggccgtcgtgccgctaacttgagagtcttgaactcttactgggttaaccaagattctacttacaagtacttcgaagttatcttggtcgaccctcaacacaaggtctatcagaagagatgcgcgttacaactggatctgtaa

SEQ ID NO: 6095 - DNA, 120 bp, Saccharomyces pastorianus
atggttcttttttttacttccccgtcctcgtcatctttgtatagcctcttgttctctagggtctctatcatctcctgtgctgttttgcctttgtccatgccattcaaaatgaacttgtag

SEQ ID NO: 6096 - DNA, 333 bp, Saccharomyces pastorianus
atgattcgtatggttcatccaacaagaacaagtcctcttacggttcttccaacaacgatgacacttacggctcttccaccaacaacgatgattcgtatggatcttctaacaagaacaagtcctcttacggctcttccaacaacgacgactcatatggatcttctaacaagaacaagtcatcttacggttcttccaacaacgacgactcatatggatcttctaacaagaacaagtcatcttacggttcttccaacaacgatgacacttatggttcttccaacaacgatgacacttacggctcttccaacaacaacgatgattcgtatggatctt

SEQ ID NO: 6097 - DNA, 726 bp, Saccharomyces pastorianus
atgctgcaggtgactctagaggatccccgtatggatcttctaacaagaacaagtcctcttacggctcttccaacaacgacgactcatatggatcttctaacaagaacaagtcatcttacggttcttctaacaacgatgacacttatggttcttccaacaacgatgacacttacggctcttccaacaacaacgatgattcgtatggatcttctaacaagaacaagtcctcttacggctcttccaacaacgacgactcatatggatcttctaacaagaacaagtcctcttacggctcttccaacaacgacgactcatatggatcttctaacaagaacaagtcatcttacggttcttccaacaacgacgactcatatggatcttctaacaagaacaagtcatcttacggttcttccaacaacgatgacacttatggttcttccaacaacgatgacacttacggctcttccaacaacaacgatgattcgtatggatcttctaacaagaacaagtcctcttacggctcttccaacaacgatgacacttatggctcttctaacaacaacgatggttcgtatggttccaacaataatgattcttatggttcatctaacaatggtggccgtaaccaatacggtggcgacgacaattactagattttctgatctgcttcaccaaaaaaatattatatcttttagtaagttatataatatgtatatatctgtgtag

SEQ ID NO: 6098 - DNA, 2142 bp, Saccharomyces pastorianus
atggcagaagtctctaaaatgacattaaagatcctttacacgttggacaacggatccaatggcagttatttagcacgctctaagactccaacacaggtaagggtggctaatattcccaatccctttttagcggcttcgaatgagcatacagagttaagaattggcgcaattcatttgaaaaccatattacatgaaatctacttgaattctcctgaagtacttgatcatgactctttaaaagatggacatgactacaacctgtattatcgtgatatttgtgagatggatgagccactagtaagtctgggccttctttctaagcttcgaagaaagttccataagattcataagagtacttatcaacacacagaaaacagtataagtgaggaggacgaaaacgaagaggacgaacaaattatagaggaggaggatgaagacgaatctttcatagtgacgggaagggtttgctcaaatttttcagcgctgctaaggagatcgtatagcaacgcctcgagtaaaaacggaagaaccgtgagcaatcaaaccccagaagaaacgttagaggttaaactaaggttctctaaagtcgtggctcatactagaaccactgccaacagcgctgcgaattctcgaaggccaagtattcaattgcagtcgtcctctttgccatcgtcagcacttccgtttccttcaagaatgcagcctctttcaaaagcaaaccaaataaaaaattcaagaaatgcaaggaccacaacaacaataaataatacaggcaatgcgactttggggcgtagacaaacaaaccctatgcctgctccaaaggctgttagaacacaatccttacctatttggaacctcaaaccaaattcaatcaacactggtttcccaagaaactcaattgcacataaaatatatttagcggatagaaaaacagaagctcaccaacaaaatcatccaaaccaacatcaaagtgtggcttatgaaataaacactttgcaaaatgacaatacaattcagaagacgaaaattgacgattcggtaagcaaaaggtttgacttcatgctcaacaaaaaaaagcccactaaaaaagtgtcttctacaacagtaacggcaagaaaaccgacttcaataggcccaaacttaaagcaaacagcaaagaatattgacaaaagggcaactgccaaggtcaaaagctcagattccaaatatcccaccaagtccatattaccaggccagaaacgatcatctgtggcagagccattaagcgacgacgtggattcgattttgcatgacatactatcaggtccaatcaatcaagaacagaaatcccaacagaaacaaaagcaacacaagacttctgcggtgaatgaaaatgacaaagagaatattccaccgcaacgtgtaacagaaaaggagaacaagctttacgatgagttagattttagtgccggttttcctatgagagacttttcagacatagtattcaaagatgaaattggatggttgtccaattttgatttcttcgaatcaccaacttccttaactggttcacacttcaaccagcaaaatataaagccctcttctacaacacctagggatccgaacacatgcaatactgttactttggaaaatgaagatgatgttggtgaggtagatgaaacgcaaaataataaaattccattgaccagtgacgccgataagacttccccaatagactcattgtctataccgttgattgagctcagtcactcaagttcagcagtaaacatacggcacacatcattgaaggaaggttcgatgccgagcggagtcgatagcagtaacaatacaccctgcgataatgatactaaggataggaaaacaccgataatagactccgacaattcaaaagctcagccaatgcttatgaatttctcaaccccagcagatcagctaggttctgataataatgttgccaccgtaaagaagcttgtcagcttgccagaaggacaacaacttaagagatctcatgaaactctggaagaagaggaggaggaggaggaggacctgaaaaagcaaaaggctataccctcttcgccttgtggaatgtacaattaccatcagcctgagtgcataggcttatctgacgatatggttaattaa

SEQ ID NO: 6099 - DNA, 972 bp, Saccharomyces pastorianus
atgcctgaccgatccaagaccctttccaatgaaaagtcttctcgtgaggatgctgtcaccaaaaactccgatattgatgtagttcgccaactgggaaatttacacatctcaaaaaccactaagctaccaaaaccaccaaatttgcctttcaaaaccgcaaaaaattcgaggattctcatggagttccatgaagatgtctgtaaattggtatggactcatcttgctcatattcgtaagccatcaatagctcacattgaaatagaaatgaaattcggtataatcacagataaaaaaactcgtcgcaggataatacattctaataaaccctccgttgttcagaactgtagaggtcgcttggtatccaatgtttcctcggaaatgtttctaaaatttcaagatttcttgcctttaaatccaaatagtatggataccactgctttaaacaccgttcaacagacacacacgtatacaaaagactcgatatacagcgttaatgatctttcaaaaactgatagactagcttcatggcgttgttcggaggacctgaaaaacaaaggatctaaacgtacgtttattaagaagacccgtgtcaaggattttctcattcattatcctcatagttcattagatgctaaaatcagtatcagtcttgaaatacctcaaattgagactttagccgttttcagaagtaattctgttctacaaaggtataaagatcgttctacctacagatttggtaatgagatacccttacacttggatatgacaagagttatcacgaaacggagcggttcttctcatcaatccacgactcacgaagtggagatagaaatggatcctgtctttaaaaagacagtctctaccaatgataaagagagctttgacgaatacatgaattcgtttttacatacaagcgatctgatacgtgagcggctaaacgggaagggacataaaaaacatgaaagatgctaa

SEQ ID NO: 6100 - DNA, 4242 bp, Saccharomyces pastorianus
atggtaacgaaaccgtcgcataacttaaggagggaacacaagtggttgaaagaaacggcgactttgcaagaagacaaggagtttgtgttgcaggctattcaaaagcatatagcgaacaagaagccaaagacaaattcgccaccgattacgccgtctagagatgtgtatggagcagggacaatgaacctgttaaccagccttcctggatctggttccactagcaccgttacgaaacagcgcgaggacacgcacaccctatcaaacgacacggaatggctctcctaccctgccacatcgaaccaatataccgacatccccatgggagatataccggccagcacaagtatcgtatcgaacccaaggacacccagcggttcgaaaacacacaacaccaatatgcttcgaccgcccatggcgagttctcttgtcgaaaatagcagcagtagaaacatggatcgcagaaacaataccaacgacgtgattgatagtacaagcacgagcaaacagatcgagaagcatcaagacaggatagagagagatatagttggacttcaggactcattgattactaccttgaaggagcaatcaaaattgttactccaaaaatgtagtataattgaatctacatcattgtcagaggatgccaaaaggttacaattgagtagggacatacggccccaattatccaacgtatctatcagaatagactctttagaaacggaaatcgcacaaattaagaaagacgcactttcgaaaagtcaaactaaagttcacagccaggttccctcacaaaacaataatattatatcaagtattttacccagtccattagacaacaacctatctttcaaaagcacaaatctggcaaccactactgcaaccgctgcgactatggcagtatctgcccgtgcagctactgcaactttcacgaaaagcccaaaaactaatgctaataatgataaccacgatgatgacttaattcaggtgctagacgatgaggatgatgatgatgcaaataacgatcctaccattatcctacaaaaagggttagtcgatataccgcaaaacaatactccaatttctccttcaccgccacgtctggatatgaccacagaagaacaagatgagcttacaagaagaagaaatatgcgttcaagagaaccagttaactatagaattcctgaaagagatgacccctttgactatattatgggtaaatcattgagagaggattgcccagaattcgaaagagaagaagatgaactcacaatggaggctgaagatgatgatcattctagttatatgactactagagatgaagaaaaggaagaaaatgatttgttgaaccaaagtgattttgattttgtagtgaatgatggtcttgaggccacccaggatactgattaccatgacaatctggatgggtgtgcaaatattaaagaagatcccttagaagacgatactaggtccacaattactttatcacagaataaaaatgttcaagttattttatcttccccaacaacacaaagtgacatatccagccgtcaaaggcaaacagatgtggagcatattgatttactggaagacgatttagaaagggatgcaattttggatgatagcataagtttttccttcggtaaccaaaacttacctatgtcacattctgatttagagttaattgacagtgaaaaggaaagtggtgaatacgatgaagataacaacaacaacaacaactttgaaaacctatcagatagcgatttagaaagattcgacgaagaaagagaaaatagaacccaagctgcagatattcaggaactggataatgacctgaagatcataacagaaaggaagcttacaagtgatcacgatctgcaatcaccctcttggtctcctacgattaaaagagaaagatcgaacgctagtcaaaaaaaaggcgaggaagatgattttgatgacgatttttcactaagtgatatagtgagcaggtctaaactgacttctaaggcgaaaggtccaatttatccgtggtcggatgaagttttataccgcttgcacgaaatatttaaactacccggctttagacctaatcagttagaggcagtcaatgcaactttacaaggtaaggacgtttttgttcttatgccgacagggggtggtaaatcgctttgctatcaacttcctgcagtggttaaactaggcaagacgcatggtactaccattgtcgtttctcccttaatttctttgatgcaagatcaagtggaacatttgttgaataaaaatatcaaggcaagcatgttcagttcgaaagggaccgccgaacaaaggagacaaacctttaatttgtttattaatgggttattggatttggtttatatatctcctgaaatgattagtgcttctgaacagtgtaagagagccattagtagactatatgcggatggaaagttggctcgtattgttgtagatgaagcccattgtgtttctaactggggtcatgattttaggcctgattacaaagaattaaaattctttaagagggaatatcccgatattccaatgatcgctctaactgcaactgcaagtgaacaagtaagaatggatatcattcacaatctagaactaaaagatccagttttcttaaagcaaagttttaacagaactaatttgtactatgaagttaaaaaaaagaccaaaaataccattttcgagatctgtgacgctgttaaattgagatttaaaaacgaaactggcattatatattgtcattctaaaaaatcttgtgagcaaacgtcagcccaaatgcagagaaatggcatcaaatgcgcctattaccatgcaggtatggaacctgatgaaagactaagtgttcaaaaggcgtggcaggctgatgaaatccaggtgatttgtgctaccgtcgcgtttgggatgggtattgataaacccgatgttaggtttgtttaccatttcaccgtgccacgaacattagaaggctattaccaagaaactggtcgtgccggtagggatggcaattattcatactgtatcacctatttctcgtttcgagatatcagaactatgcaaacaatgattcaaaaagataagaatttagacagagagaataaggagaaacatttaaataagttacagcaggtgatggcatactgtgacaacgtcacggattgtagaagaaaattagtgctatcttacttcaatgaggattttgattctaaattgtgtcacaagaactgtgacaattgcaggaatagtgcaaatgtaataaacgaggaaagagatgttacggatcccgccaaaaaaattgtgaaactggtggagagtattcaaaatgaaagagtcaccataatttactgtcaagacattttcaaaggttcaagaagctccaaaattgtacaggctaatcacgatacattagatgaacacggccttggtaagtccatgcaaaaatcagaaatcgaaagaattttttttcatttgatcactatccgtgtcttacaagagtattctattatgaataacagtgggtttgcttcgagttatgtaaaagttggacccaatgctagaaaattactcagtggaaaaatggagataaggatgcaatttacgatatcagcaccgaactctcgtccatcaacatcttctggccatcaatcaaatggggataatacgccagctatagctcaaagatcaacaactcttggggagaatacagctgttaaccctgcacgctttattagcgcgaaagaacacctaagatcgtatacctacagtagttcaacaacggaatcatcacatcctatatcattaaaaaacaataccgaattacattcgacccaagaactaaacaatctacgaatgacatacgaacggttaagagaattatcattaaatttaggaaatagaatggttcctccggtggggaactttatgcccgactctatcttaaagaaaatggcgacaattttgccaatgagtgaatcggcttttgcatctttgggtccagtagaggacaaatattgtcggaggtttaagtactttaaagccacaattgctgatcttagtaacaaaagatcaagcagagaacatgaaaaatacgataccatattaaatgaagagtctgtcaatagaatatccagttcaaccaatcaagttatctccacaacaggaacacgatctaggttttttggcgctaccctagtgaagttaaggaaaatgaacaaataa

SEQ ID NO: 6101 - DNA, 1050 bp, Saccharomyces pastorianus
atgtcagaatttagagcgttcagtgctccagggaaagcattactggccggcggatatttagttctggacccgaaatatgatgcgcttgtagtcggtttatcagcaagaatgcacgctctagcctatccttacgatttattggagaaactggacaagtttgaagtgcgtgtgagaagtaggcaatttaaagacggggagtggtcataccaagtaagccctgaatcaggcttcattcctgtttcggtaagcggatctaaaaatcccttcattgaaaaagtcattgccaatgttttcaattactttaagcctaacatggatgattattgcagtaggaatttgttcgtcatcgacattttttctgatgatgcttaccattctcaggaggacagcgtgactagacattatggtagtagaaacttgagtttccattcacacaggatagaagaagttcccaaaacagggctgggctcctctgcaggtttagttacggttttaactacagctttggcctctttttttgttccaaacttaacagataatgtggaagggtacaggaaggtgattcataatttgtcacaagttgcccattgtcaagctcaaggtaaaatcggaagcggatttgatgtagcggctgcagcgtatggttctattagatatagaagatttccacccaaattaatctctgatttacctgatattggcaatgtcaattatcctgacaaattaactcatttggttgacgaagttgattggaatattaccattgaaagtaactgtctaccttcaggattggccttatggatgggtgatattaaaagcggttcagaaacggttaaacttgttcaaaaggtgaaaaaatggtatgattcacacttaccagaaagtttagaggtatataccgagctggatcacgctaattctaggtttatggatgaactatctaaactggaccgcctacataactctcatgatcattatagcggccaaatctttgaggctataaaaaaaatgactctagttgccagaagtattcggaaatcacagacgtga

SEQ ID NO: 6102 - DNA, 300 bp, Saccharomyces pastorianus
atgggcttgttttcattcgacagcggcaagaaggattctcaaccccctaacacccggtcgcagcggaagctgtgctgggagtccagggacgtgttcttccagtgcctggacagagccaatgttctggacgccaccgaccccaagaacggcaagatcataggtgcccagtgtccggcggagaacaagaagtttgaggagaactgcgctcacagttggatcaagtacttcaaggagaagcggatcaccgactttcggagggaggaggccatcaagaagatcgagcaggaagcccagcagtag

SEQ ID NO: 6103 - DNA, 291 bp, Saccharomyces pastorianus
  modified_base (92)..(112): a, c, g, t, unknown, or other
  modified_base (207)..(208): a, c, g, t, unknown, or other
  modified_base (243)..(243): a, c, g, t, unknown, or other
atgcctctagagtctatatgggccgatgtccttgacgaagaaccagtaaagaaacagaagccaattcacagacggaataacgataacaaaannnnnnnnnnnnnnnnnnnnnggaggaacagcgacaacaagccaaacaacaacaaaagagacactgaaaccaagacaaatcacaataaaagaaacaatgaaacgaagacaaagaanncaaatcaagatacgcctgccagacagaagaatcgnctcgtaaccaggggcagacttcactacaaacgaaccattacggtgaat

SEQ ID NO: 6104 - DNA, 1206 bp, Saccharomyces pastorianus
  modified_base (1182)..(1184): a, c, g, t, unknown, or other
  modified_base (1186)..(1186): a, c, g, t, unknown, or other
atggcttttcaagatcaagacctattaatagtattatcatatacttccaaatttcttaatcaaaatgacttgttaaacttgagcctggtgtccaaacaagtgcataatgtagttgccataccctcactttataacaacattcacattactagaaatcctgtgttgaggacggctaaatggcttttggaaggggggaaaacttatgtgagtggttatcgatcggttttgaagactggagataagaacgacatattcgtatatgacagagttgaaaggttattggaagcatcgcatttaaagcttataaagcagataactatagacaacgatatcttccaccacagagaagaggggctgcagctgttacaaagactggtcaatgaaataactgacttgaacgtggttgaaattcttgatattaaagatccaggattatttgaggtgtgttcaaaaaaatatcacgatttaacaagcctaaagaagcggatagtacgtgatgaagctgcatttaaaagtttcaaatcattggaaaatctcaagagtttagaatgggacttacctgcgtcactggatctacaagatataataacccccgagatcggcgggttgttaacaagaaaattggatggaggtgagctggcaatcaaggatgaagcgtattcaagcttaagagtttttgattactttgatttttcaaatattcgttttaagaaccttcgccgtttgaagttcaatcatgttcacaaacaaagtgatgcagatacagtttccgtaaggttggcttcgcatgctttgaaggatgtggttaatctatccaaccttaaagcccttgaactagaattttcttgtgaggtagacgactgtaaatgtgatgatgaattcctccagagcatagcaggtgaccttgtttccttgacaagtttaggactcatcgaaaagacattcgtcaaacaaggacatcactatatggatgaaaactgggatttggtcattaataaatttattttaaatttacccaatgtgggtcaaaacttgcgggttttgagcatacgacatgatcctcctttaaacggtaaaggtatcgatacagtcgacggaaacctgcttcgtcgtaagaagctttacgagacagtgcttccgacctgcaggcatgcaagcttggcactgccgtcgtttcaaccnnncnaaaaaaaaaaattaaaataa

SEQ ID NO: 6105 - DNA, 435 bp, Saccharomyces pastorianus
atggttcttgttggtaagcaacctcgcagcctcttcgtcagtggccaaataaccaatcaaatactcgtcctccaggatttcgtacgcggattcgctgtgttcatgtacatcgctgtctttcattatctccgtgatgtccttaccagcgtagtccaagatgaactcctcaccaccggggtgctcgcccaaaaacctggtcacgtcataaatctttctgttctgataagtaacccagcaatccttggcagtgttgtgttcttctaccgtcttcttagaaaacagctccagtgtcttggaagtattgctcgacatcttcgtagttttgttctatcactattccttacagctcctcacgcaaagaataggaaagtgttctcgaacaatagacacaatagctgctattgccaactatcatctgttcttatatggttgtaa

SEQ ID NO: 6106 - DNA, 2718 bp, Saccharomyces pastorianus
atgcccagtacacccaacgatagcatgttgcgtatgaaatcaaacaacaggacagcagctattcaaagagataaacggaagtcagaagttttgatcgctgctcagtcccttgataatgaaattcgaagcgtaaagaatcttaagagattatcgatcgggtccatggatttgttgattgatccggaactagatataaaatttggtggcgaatctaacgggagaaggtcatggtccggtgcgacttcgagttctacgtcaacaccgaatgtcacaacaagcatgaataatacgcgatatagcgatcgaccgccattagaaaaattgcatgtgctaaatagtgcagacacagaaccctataataagagtagacaaggcaactatacaggtcataaaaaagtcgtccattcaccgtcaagaaagttgaatgctaatgcactaaaaaacaacttattatgggtccctgctaatcagcaccctaacgttaagcccgataattacttagagcttgttcaggatactttacagaatatacgactaagcgacaatgacgataatgataacaataataataatgaaagcgatgaggcgcccggagaaacagaatcatatggtaataaggagaatttaaatgtggttaatgtgaacaggggcatgccaaggcatgggaatgcttcactaatacgaagaccttcaacgttgcgaaggtcatacacggaatttggtgatagtggagacgacatcggacaagaagacgacgattccatgactgtaaataaagtgaaggaaagaactcccagaataagagaaagaccaatatcattaagagatattactgaagaactgacaaagatttcgaatagcgcggggctgacagatgatgatgccataacattagctagaacacttaatatggctggttcatattcagataaaggagatggatcaaggcccaaagattcagaaaccaaatatgaagaagaaaatgataaagttaccggctcacaaacggaaacttcggatgatgttgaatatgcctccaatatgccaatcagcagtgactcaagttggccagaacgatcatctctgaaaagaagcagattcaatacttacaggattaggtcacacacagaagagcaggaggaagagcaggtattggaagaaacaaaaaacgaggacgtgagccgtttgcatttggctgagaatactttagaaatgggaataaattcgcccaaatcacctttcaagcaggaagacgacgagtctgaccctatgagttcacctgggtccatcggtgattttcaagacatatatgaccattatacacaatctagcggcgactgggaaaaggaaatgggaatagaaaaggacaaagcgctggaagttggtaaggttgaagacgtctcagtcgaacaagagttggaaccacaagaagaaccaacggagacaattgtgtcagctgccacagaagatagcaaggagactaaacgccatcgccgaagaaatggatggacatggttaaacaataagatgaataaggaggaggatactggagaaagccaaagggatgacgagggtgaagaagatgtggagtcgcaaagaatggaacgcgacagttccaagaaacatcacatttcgatgttcaatggcagtgagaagaccgaggcgataaacaaagaggaagcgaacaattccaatgcatccacgtccacttctcaaacaagacagaaaatcgagaaaacattcgccaatttattccggaggaaagcacatcacaagcatgaagcggcgccattgccgtcattgccaacaccaaacaatgacactgcgcacgctcctgaaacgaaactgaagaaactagccagcaaaaatgggagagagccaaccgagcctattgtgctacacaatcgccctcaccacaaccgtcaccatcagggccgtcacggttcccgagaaataaacatgaagggcactagcaatacgcaaatgcaatcgcaattacagccccaaccacaactgcaaccgcagtcacagcagccgcagctgcagccgcaaccacaaccacaaccgcaattgaagccgcaacctcagccattacagttacaaatgaagggagagtccagtggaccaggaatagcaaacaacgaagaaagcgatgccgagagtttgcccaagctacaacctgccatcagcgtaagtagcaccaagagcaactcaagagactgcgaagaagcggacaccaagaagaagaacaaggaaaagagaagcaatacgaccaacctctcgaacggacagcactccaagcatgctcagaaaaaaacgggccatgagcagaaggaccaaacagcggctctagcggacccaccggcctcaccagctcctgctctgagacatacatccgtgttacccccaagaaagctgaccttcgcagatgtcaagaagtccgagaaaccaaacgccccggtccagttcacggacagcgccttcgggttcccgttgcctctgctgaccgtctccacggtcgtcatgttcgaccaccgcctaccgatcaacgtcgaaagggccatttacaggctaagccacttgaaactgagcaactcaaagagagaactgcgcgagcaggtcctgctgagtaacttcatgtacgcctacctgaaccttgtcaaccacaccctgtacatggaacaggcgggccacgacaaggaacagcaacagctttga

SEQ ID NO: 6107 - DNA, 1458 bp, Saccharomyces pastorianus
atggacgaagaaattcttctttcattgtctcaaatcaataaagatgttagaaaggaaaacaaatctgtcagaaataggcttcagagcatccttttagataataggtttttacgagagcgagttcttcccctttttcctcattttccaatagtacccaacgaaagatgtggtttgtggtattgtgaaccttcaagttttaaacaaacgagttactttaagagcacagatggtcatgtcaatcaatgggattttagcacccgtagactgaactttcatttgttagaggttatccaagaaaataaaggtattataatagttgatagtacgagaaggggaaaaaagatccccgatgctttaagtaaaactgtgccaatatggtgtgcggtgttaaatacgataatgctacaggaaactgaagaaaatgtagatattgataaagttctatacgttccacctgaaacagttcccaaatcagaatatgatatgatcaaaagaaagatacctgaattagtcgacaaactccaaaaattgaatgttatagactccacgatgttgaacaaattgtttaagggtaagatactacggcctatatgggttcatcctggctcttcattactaaaccattctgtcgattatttcacaggcgaaatagaagagcaggaaacctgggaaactcctgaagaccaaaacatcatacctatcatcttgtgtacagtgagctaccaagcacaagatggtgtggataaaagatacggatttacctatgttcagggtgcagctgatgatcatgagctctggtctttcggattagattccgaaatgttttggtctcatatagactacttgggcgatgcaaataattcagatgaccagctgtgtggttacatcacagatcagattgctaaaaaactggaacatcaactttccatacaagataaaggcggcctagacgacattttcgaaaacattgataaaattacgaacgaaatatccttaggaaaggtaatccaaggcttgactatcaacgagaagctggaagaagaattaaaggtgcagtatgaaaaagtgataattctcagcaattcggtggccattgctgcacaaacagacagtgtggaagtaggcaggacggatccatttatttcagtatacaaattacaaagtggggacaagaagagttcgaaagctttacgaaccactttcccgatgattcatcaagaagtgcaaccagtctttgtaaatccgacgataggaatgaagccgatactcatctgttgtaatacgggcacagatatgtcaattggtgtaattttgagtatcctttgctcccaatataacgaagaatggatcctcacgtcggagttgccggtagttaacaagatcataataaggaaacacttgacaaaactgatctctcatttacatggtcgtaacgttaatcccatccgggctaactaa

SEQ ID NO: 6108 - DNA, 1614 bp, Saccharomyces pastorianus
  modified_base (1543)..(1593): a, c, g, t, unknown, or other
atgacacaagacgaaaaagttaaaaccttagcctcagatgctagctatgcttcagaagcggaaactaataagcccgttaaagacttaaagcagcaaattgatgatacctcgaagaagcaaacaagaaagaagggaaataaaggtaagaaatcaaaaccggaagtgacacccgaacatattgctaaagttcgtgcggaaagggatgccgtgagaaaggctaagagagattcattgttggctcgaggtattgatccagactgcccaccagaattgcatttcatcaagaggcctttcctatcgttacatgagaaggagccagtgacggggtttagatttaagctgatgacttacaattgcttggcgcaagctcttattcgtaggaaattgttcccagatagtggcgatgccctgaaatggtacagacgttctagagttctattaaatgaattcaagcattacaatgccgatgtcatctgtttgcaagaaattgatcatatccagtttcaaagcttttggaaagaggagtttaataagttgggatatgaggggcaataccataggaattctacaaagaatcatggtgttgctattatatggagaagagacatgtttcagcaagtggataaaatgctaattgattatgacaaggaggtttcgggaaatatccccacaagaactacgacaaataatgtgggtttggtcttggctttgaaattctctgaaaaagtactgtcgaacttaggtaaagcatcatcaaaaaaacgcggtattctgattggaacttcgcatttattttggcatccgttcggtacttatgaaagaacaagacaatgttatgttgttctaaagaaaatggaagagtttatgcaccgagttaacgttttgcagaatgaaaatgacggagatttatctcattggtttccttttttctgcggtgactttaactctcaacctttcgacaccccatatctgtctatgacttgcaagccagtgcattatgagaacagagcaaagaccgttattgaatgtagtacttcatttaaattttcaaaagtacgggatggtgaagagggtgcagatgaagaagagggtgggaatatcgagaaatttggtaaagatcaacctgagagccccgttccaaaggattttcatgctaacgaagagcaaattgaactggtggatgagatggcacaacttcacaactcattggatatgagagctgtttcgttatattccgttgcctataaaaacgttcatccaggaaatgcaggtcttgataatgataggggtgaacctgaaatttccaattgggcaaacacttggcgcgggttgttagattacctatttcatattaaaaaatgggacctacaaagtaactgtcaaaaagtggatagtcttaacgactttgaaaaagacaacgaaatcaaaatcagagggtttttaaggatgcctcctggtagcgaaatgacaaagcatggacaaccccacgttggagaatatgcaagtgatcatttgtccatggtttgcgacttagagctgcagnnnnnnnnnnnnnnnnnnnnnnnnnnnnnnnnnnnnnnnnnnnnnnnnnnnattaaacggttttgtaattga

SEQ ID NO: 6109 - DNA, 1005 bp, Saccharomyces pastorianus
atgaacgtgatagatttaagtgacccagctattagtgtagattacgacagtttgattggcattgacgatgaagaatctcaagaagtttttgaaaatgaagtgaaggaagacgcacaacaagaacaacaagaaggcacggtcttaacaaatgataaggtcattgttgagcccaaacgtgacattgaaagcttgagaaaagtcatcagagagcaattactgttcgatgtgttcaggaataggcaatcggatcataatgatgaaagaaaagttatcagcaataaagatgctgagagtcgacaaggaaaactagatagaataaggaaagaattgaaggagctggaaacggaagatccgtctcttgaaaggcgaaacgaaattagagagttatgcaaattgcaatcaaagttagcgatgcagtcatcaagcacgtttgccaatttggagaaagagctcatcggggacagtgaaagtcaacctatcacgatgctccccgatatatcacttgacatgaccagtttcaaaagattgcaaaagctagaccagagaatatccgggatggaacgttatgttggtgttccaggaattctagaaggtcaagaagatggaaaatcagtgtataatagggtgaatgaactctacagaaccatacagcttctacaagatgatgacaaggaaggagaaaagctgcgaaagttccaggatagattgagggaactaaatgagcaatttgaaaactcgctgttgggtaaaaaaatccagcgagaccagaaattaggtgatgaaactgtgaacaaaattattacgcctgaaagcaaaataaaagaaataaacgacatgtatgctatgtttaaacagtatcgagattcgctgccgcaattgactgagagaatgaaggctctaaacaaaatgaacaataaagtggtggatgtgtacgaaacgacaagaaggttgaactcgcaaatcacaagtgtccgggaacaagaacaagtatggttaaagacttaa

SEQ ID NO: 6110 - DNA, 924 bp, Saccharomyces pastorianus
atgtctggtatgtttgagcctgcacctgaaccttctactgagttaggccttttaagggttctctctaaaacggctagtgttaaagcctctcctctaatcctgggcgggatgtcgattggtgatgcgtggtcaggatacttgggctcaatggacaaggaacgcgcttttgaactacttgatgccttttacgaggcaggtggaaactttattgatactgcaaatacttatcagaatgaacagtcggaagcttggatcggtgaatggatgaagtcaagaaagttgcgcgaccaaattgttatagctaccaaattttctacagattataagtggtatgaagtaggcaagggtaaaagtgccaatttctgtggtaatagcaagcgtagcttgcatgtgagtgtcagagactctctgcgtaaattgcaaactgattggatcgacattctttatattcactggtgggatcatatgacttccattgaggaagttatggatagtttacacattcttgtacagcaaggcaaggtcctctatctgggtgtgtctgatacacctgcctgggttgtatctgcagcaaattactatgctatttctcacgggagaactccttttagtatctatcaaggtaaatggaatgtgttgaatagggactttgaacgtgatattattccaatggcaaggcactttggcatggcacttgctccatgggatgtaatgggtggtggtaaattccagagtaaaaaatctatggaagaaaagaagaagagtggagagagcttgcgttcctttgatggtatttccgagcggacaaagatagaggtcaagatgagtgaggtattgtcaaaggttgctgaggagcatggtactgagtctgttacggctattgctattgcttatgttccaaagcgaggaatgtttttccattga

SEQ ID NO: 6111 - DNA, 612 bp, Saccharomyces pastorianus
atgaataaacttcttctaccgctagtcggcgtcctctcgctgctcagcttaacacatgctcttatacaaacacaaccagtgcttcaagatctacaaatagcagatagctataccaagaccaaggaatgtacggacccagatcattggttccttatagaaggtcagctgctcattcccaagggtagttcaagcagtatatcatttcaagtacctaaggaatttgggtcgttccctcaagagtctttcgctgtggaatataattccaacaaggttgccacggtatcgtgtccagaccagtcaacgaacaactttacgatttctgtcctggacaacactctagaagaactaaacacaacattcaattttctagcacagcttaccccagacgccaagtctgaaattataaacccaaaaaccattgcatacagtttctactcatctgaaggtgatgtatttaacgacagcatcaactatgccgctaagaacatatctgccgtaacaacggatggtggcatatacacaacaaataacactgcatggtttactgttgatctaaccaatgtcaacttttcttacaccacggttcttttacttctcaacctcttctcgtcc

SEQ ID NO: 6112 - DNA, 213 bp, Saccharomyces pastorianus
atgcggaacatggtttctcttttattgctcccaacaatatacatgcgatcctttgtttcatatagcgtatatttacccatcacaaatttggaggtctttctctgcttggacccagaagtagcaatcacgcccccaccaagggaatggtccattgcgtcattattcatctcttccttgctttcctttgctttggcttattttattgtgatttaa

SEQ ID NO: 6113 - DNA, 387 bp, Saccharomyces pastorianus
atggcaagatgggtggcctctataaaagcatccaggatttcagacagccggctcctgggaatggatgggacggttgacagtccttgcaagcattgcatagccagtgtcgtcatcttggcatttctcgactggcacgccagtatgaaaggcagcacaaaatccggatgcctttctaactcatcgaaattatgtaccctctttaggatctcgacggatttatcactagcatggcgaatggccgaattccttctttttgattcggacgatagtgaacgcaattctgcttcgagttgcttttgcatggaggtaaatcccccagtgttcatagtcatatgttggtatacagcgaactcaattagcctattctctctgaaactacttgtataa

SEQ ID NO: 6114 - DNA, 798 bp, Saccharomyces pastorianus
  modified_base (616)..(616): a, c, g, t, unknown, or other
atgcaaaacgaccagcagaggctctctctacacaacagggcggtcttcacacatccatacaagaggcttggaggagcgtttccggtgaaatcaccgtctgtgcccaatttccacgacagagtccatcctggacacagctccagtgatccggcactcgttaatgatgactctatactaagtgatcaccccactgttgaacggagctgtttaggtcaagtttccccctctgaacacgatgggaacttgagcgttattgatttgtatggagatgaagtagagtctcagcgtgtcgacgacgacgacgacgatgacgaagatgatgacgatgatgatgatcaggatgccacacacagcgatgacctagatctgctccctggagaaggcggccagcacatcgaattggacgatgttactgctggcactagcaaaagtgctagcgcggatggtgtaaacaagacacattttgaccggtacggattcaagaagcaaaataactacatatcagaatccgagtatgataggtggtggggatactactctcaatactgtgtccgtcgtaaacacaaatggcagttgctgttagagaaaagtggtttaccagttactgacgattcanccgcacgattcccatccaagagcgaacgattgaccaggtatgtcagaaagggtattccagcggaatggagaggacatgcatggtggcattttgccagaggacaggaaaaactaaacaagaacaaaggtatttactcacaagttctgccaaaaatgaaccgattaagaaacagaaccccatga

SEQ ID NO: 6115 - DNA, 567 bp, Saccharomyces pastorianus
atgcaaggaagggatacctcaacaagacggattcagggaaggatgtcaataaatacgggcaagaaaagcaaagagaaccttccatgggtcgagaaatacagacctgaaacgctggacgaagtttatggacagaacgaggtgatcaccacggttcgtaaatttgtagacgagggcaagttgccgcaccttttgttctacgggcctccaggaaccggtaaaacctctacaatcgttgctctggcgcgtgaaatatacggaaagaactactctaacatggttctggagctaaatgcatctgacgatagaggcattgacgtggtgaggaaccagatcaaagacttcgcctccacaagacagatcttctctaaggggttcaagttgatcatactagatgaggcagacgccatgacgaatgccgcgcagaacgcattgagaagagtcatcgaacggtacaccaagaacacacggttttgcgttttggccaattacgcacacaaacttactcctgcgttgctgagtaggtgcacgcggttcaggttccaacctatgccccaggaggccaaatga

SEQ ID NO: 6116 - DNA, 618 bp, Saccharomyces pastorianus
atgtccgggtcgttgaagtcgttagacaagaaaattgcgaagcgaagacaggtgtacaagcccgtgctggacaacccgttcacgaatgaggcgcatctgtggccgcacgtgcacgacctgccattgatctggcagctggtgcagtcttccatcttgaacaagctggcgcacatgcaatcgaaggaggagtacccctgggagctgtacacggacttcaatgacattgtgcagtacttgagcagcgaccgcggaaacagcgatcccgtgtacctgtttgtgtgcaacaaggaccccggcgtgccgctcgtgctcttgcagcagatcccgctgctatgctatatggcccccatggccgtgaagctggtgcagctgccccggagtgccctggccgctttcaagacggtttctaagtacgggctgctgctgctgcggtgcgatgacagggtcgacaggaagttcgtgtcgcaggtcaacaagaacgtcgacccgttgcagtttccctggctgagcgcagtcaagtaccagccaacggcagtcaagttgctgaagaccaccgtgcccatgtctccaagactaaacagaagtagatgcaattacccgcgtagcttgcctttctag

SEQ ID NO: 6117 - DNA, 222 bp, Saccharomyces pastorianus
atgtcctttggaatcttcagttcgttgtttatattctcactattttgtctaggctttttgatagtgatagggtgtttagcatccgcggtgtcattctcgtcattatctaaggctagtatgggcttttcttcgtctgtttctttaacatctcctggagcaccagtagagcctaaagaaatgctagaagaggacgaggatagagaatcatccagtttactgtaa

SEQ ID NO: 6118 - DNA, 2463 bp, Saccharomyces pastorianus
atgaaagtgaggaaatcaatcatcttatgcctctggtgggtcctctcggagcccctcattgtactatcgcagcatattccattgaaagaccacacaacacgacaatattttgccatagagagtaacgaaacactgtctcgcttgggggaaatacatcccaactggcaatatgaacacgacgttcgtgggctactcaaccactatgttttttccaaagaggtattaagtctgggtaaaagatcgtcattggaagagcttcaagaaaacaacgatgaccacatattatcagttcacgatctatctccgcgtaatgacttattcaagagactgcctatccctgcccccccagtggattcaagcttgttaccaataaaggaagccgaagataaacttagcatcaacgatccacttttcgaaagacagtggcatttaatcaacccaagattccccgggagcgatataaacgtcgtggatttatggtacaacaatatcacaggcgccggcgttgtggctgccatcgtagatgatggccttgactacgaaaacgaggacttgaaagataacttctgtgccgaaggctcgtgggatttcaacgataacaccaatttgccaaagccaagactggctgatgactatcatggcacaagatgtgctggtgagattgctgccaagaaaggtaatgatttctgtggtgtcggagtaggttacaatgccaaaatttcaggtataagaatattatccggtgaaattactacagaagacgaagctgcttcattgatatatggcttggacactaatgacatatattcctgctcatggggtcccgcggatgatggaagacatttgcaaggccctagcgacttggtaaagaaggcattggtgaaaggcgtaacagagggaagaggctccaagggggctatttatgtttttgcaagtgggaatggtggtgctcggggtgataattgtaattacgacggttatactaattccatatattccattactattggggctattgaccacaaagatctgcaccctccttattcggagagttgttctgccgttatggctgtcacgtattcatcaggatcaggtgagtatatccattcaagcgatatcaatgggaagtgtagtgatagccatggtggaacttctgcggccgcccccttagcagccggtgtttacactttgttgctagaggcgaatccgagtctaagctggagagatgtacaatacttatccatcttatctgctgtgggactagaaaaaaattccgacggagattggcaagacagcgctatggggaaaaaatattctcatcgttatggttttggtaagattgatgcctataagttggtcgaaatggccaagacctgggttaatgtaaacccccaaacatggtattacttgccgacactatacgtttccaaatcaacaaactctacagaggagaccttagaatctgcgataaatatatcgcaagagagcctcaaagagggcaattttaagagaactgagcatgtcacggtcaccgtagatatagatacggatttcagagggaccacaactgttgatttaatatcaccagcgggaatagtttcaaaacttggtgttgtgagatcaagagacgactcgtcaggcggattcaaaggttggacatttatgtctgttgcacactggggtgaaagtggtgcgggtgaatggaaaatcaaagtcaagactacagtaaatggtcataagattaatttccacagttggagattaaagctttttggtgaatccatcgacccatcaaaaacagaaacgtttgtttttggaaatgacaaagaggaagtggagcctgctaccacagaagggtctatatctgcatcctctaccggcacaggctcaacatcctccaccggcacaggtttcacagccactaccgacacaggttccacggccactactggcacaggttccacggccactacctcgctcggtgtagaatcttcagccgctgctactagtataactgccatcacagaccctgattcagacccaaacactcccaaaaaactctcctctccaaatcaagccatgcattactttttgaccatatttttgatcggtgctatatttatggtattatactttatgtttttcatgaaatcaagaaggagaatcagaaggtcaagagcggaaacttatgaatttgacatcattgacacggactccgaatacgattccaccttagataacggtgcttccggaattattgagcctggggaagcggaagactttgatttcgatctttccgatgaagaccaccttgcaagcttgtcttcatctgaaaacggcgatgctgaacatacaatcgatagcgtgctgacaaacgaaaatccattcagcgaccctataacgcaagatcccccaaaagacagtagtgaggaaacagattctaatggcttacaaggaccgtag

SEQ ID NO: 6119 - DNA, 453 bp, Saccharomyces pastorianus
atgaagtcgaattctaaacgtctactaaactttttatacaaactgtgctatagtgtttctattcaggcctccatctcgaatagcattcctgaacatatgcacaaccttgtgtacatggttggccatcttttggtctgtatgctggttgggacaattgtcttgtcacccgatattacattacctgcccttgtcacggacccgcacctgctacatctcttcagctttccgtcatttatttctgacgtactcaattggtcgcaggttacgtcgtcatacagtagtttgctgaaagatctagagcttctacagtttttaggtagttcatcagtatcaataatcagtcccttctccaagggttgcaaaagatggaatatttcaggattgaaaaactctgtattggatatctttaaaccactggtatctgcaaaatacactgcagccgcattggcgtga

SEQ ID NO: 6120 - DNA, 1035 bp, Saccharomyces pastorianus
atgtttaagagattttccaagaagaaagaggttcctgaagagccaaaaaatttaattgagattgacaagccaattaaggacttgcctgcctcggtatctattccagaggaaaaaccacttaccgatgaacaaaaaaaaatgtacaaggacgttctgaaatacttcagtaatcctgacttgaaaatctacacaagtgaaaaaaatagatcagaagaagaagtcaagcccttagaggaggaggaaaaagcttggttgacaagagaatgtttcctgcgttacttaagagccaccaaatgggtcttaaaggactgtatcgatagaatcactacgactttggcatggagaagagaatttggcatcagccacctcggagaggaacacggtgacacactgaccgctgactccgtggccgtagagaacgaatccggtaagcaagtcattctgggttacgaaaacgatgctaggcccatcctgtatttaaaaccgggcagacaaaacacaaagacctctcacagacaagtgcagcacttggtctttatgttggaaagagtcatcgatttcatgccagctggccaggattctctagctttgctaatagatttcaaggagtatcctgatgtgcctaaagtacccggtaatagtaagattccacctatcggtgtaggtaaagaagttctgcatattttacaaactcactatccagaaaggctcgggaaggcgcttttgacaaatatcccttggttggcatggacattcttaaaattgattcatccatttatcgacccattgacccgtgaaaaactggttttcgatgaaccatttgtcaaatacgtccctaaggacgaactggattcattatatggtggggaaatgaagttcaggtataagcatgatatatattgggcatctttggtggatgctgcccgcgaaaagagagatcttttttccagacgttccaagcctcgcggtattgtaggtaagcgaaagcgaattagaagtctcccgattactccttacccggaaatcagcaagtaa

SEQ ID NO: 6121 - DNA, 2175 bp, Saccharomyces pastorianus
atgtcgttaccgggtacaccaacgacttctccaaccccgatggatgaggatattgaacagactgtctacgttaacactgagcccaaaagagtaaaggtatacatccttgaaaacaacgaatggaaagacacaggaactgggttttgtattggagaggtagatgaaaacaaactcgcatatcttgttgtctcagacgaagactcaccaactgaaactctattaaaatctaaattagaaggaaatattgaataccaacgacaagaagaaacacttatcgtttggaaagacttgggcgggaaggatatagccttgagttttgaggaaagcatgggatgtgatgccctatgtgaattcatcgtccacgttcaaagaaacatagaatcgaatatttctttggtcaccgttaaatctagcgacaatggactcggatccgttcatgacattataacaggccccgtgacattaccctctaattgctctgagcaaaatggccaaacattactagaagctctaagaatcttgaatgaaaacacctcttttgattttttgaaaaacgagaccatagaatttattctccagtcgaactacgttgatacgttgatttctcatttccataaagcagaagaagaaaaaataccgaaggacttatttctattaagtaatattattaagactttgatactttacaatcaaagggatatactggaatcaatggtcgaagatgataggattatgggaatagtaggtatcctggaatacgacactgaatatcccacatcaaaggctaaccatagaaaatatctgggttcaaaggggcccaattttaaagaagtcattccacttgaaaacgaagacctaaaaataataatgaaaaaatgttttcgattgcagtttttaaaagatgtggtactagtacggtttctggacgatcataactttaatttaatctcggaaatcgtaatggatttagaaacatgcatcatcgactttcttcaagtggggactttcttagataggctgatagagctttatgatactgatatcattccagatagctccgtagagagagaaaagttcgtacaaaaacgtaaagacggtatcagattactccaacaatgtgttcaaatgtccattaatttagacgcgcatgaccgttccaagttttataagacacttgtccgaaagggtctattcaaagtcttagattatgcatttcacatggaaactgatagtaacgttcgcattttggctaccgatactatcattaccatcatcgagcatgacatattgctgattcacaacgttcaaaatgaaaactctttcaaacaacaacacaaattggccccggatgacaaatgttctacacgaagcaattcacaggattacaactccagcactgactccaagctattattaatactttcaacgattcttttaaccgacaaaagtcccgggttacgcgaacaagttgtgcaagcgctaaacacgttgcttcacccagaaggatgtctcagtaatggtgaaggttcgtatgatatcatgagtagatccaacaacgaatcaaaaaatacctctgaagacttcccaaatttcggttatggattgaattcggattcaattaatttggacaattacaactacaataatgaagatatgaataatctagacgcaacagagtctgaatcagagtttcaaattatggaatatttcaccaatttttacaataaaattgctccaatactatttgggcgactaatcaaaagagatgccacaacagaaatgacagaaatgaatggtaaaataaaaaagactcagaaagacgatcttttgttgattcatttagtaaaactggtatcatttatttgcactgagcatgaccgcgttttgtctaggagattcatactagaaaatggtatactagattctgtcagcaacctcatcaaaggtaaccatatactgcaactaaggctaacagcggtaaggtgtattaaaaatatcatatgtcttgatgataaatactatcatcgatacatgatttccaaaaatctgtatgcaccaattttcaaactcttccaggagaacatagacaaaaataatcttgcaaattcatgcattcagatttttgtcgatatcataatggagtgcagatacatcgacctgcagcatgcaagctgc

SEQ ID NO: 6122 - DNA, 882 bp, Saccharomyces pastorianus
atgtcatacaaaaagtttgtgttttttattaaccttttctttctactaggtgctacattgttgacattttttttgatattggcaggcgccaaaaacacgggagttttaaagaatttttattggttccaggcatccacgtcgggctttaactcagcaccctccttgaccagatggtataactacaactggtgcggctggcagggtggacaggctgcaaactgctcttccaagatggctgcgcagccgttttcccccagggacaattttggtagttccaccctcatgccctccacctttttgaacgacagaaatacgtattattacctatcaagagtgggctgggcaatgcttttgatcgcgctcttcttcttactgatcacgttggtgtctgttattgtcagcttgatcaagtatacaagacctaccgcctcgttgacgacggcgatgagctggatcactctgttcttcatgaccctttccgcttgcctgtacactggttgttacgccaaagcggtaaaggcatttcaccaccaggatcgcggggctaggctgggccccaagaactttgggcttatttggacgacagtgttcttgttgataggaaacgccgtttgcgccacagtcatggcggctacgtacaggaaaaatgagtacatctacgaccgcagtttcgcttccactaagatgacggactcacagacatcgaccccggatgcctccgcgtacccagcaaacgaagtggtctctactcctgtccccgtcccggaagttcaacagcctcagccttcccgtaacggcagatttttcagaaagttgagaacaaagaagagaactatcaccactacaggcgatgaacctgatcgacgccgattgccgctgcta

SEQ ID NO: 6123 - DNA, 1749 bp, Saccharomyces pastorianus
atgagtaaccaaaataaccgatcaagaaacgaatatcaagcccacccggaagatgagtcttcctacgagctacaaaacaaccatagtgggctgtttcagccttcaaatgaagaattaataaacagaaatcaaagatacacgaaccataatacaagtatggattcgttcacgcccgtacaatctttacaattcccagaacaatcccgacaaacggatctgcagtacaacaatcctattaataataacggtaatgagcaagacatttacggtggtttcgttaaccactatcgtcaacgtccggtaccagcaacggcagaatataatgacgttttcaacactaacaaccagcaaccagaatcattacaacacgatcataataacaacatcataccctcatatccgcttccgtcgataaacgtgattcaaaccaccccagaacttatacataacggcacacagccgatagaatcccccaccgaaaggccgtactttaacgaaaacgattactactataacaataggaactccagagcatctccgagtattgcttctagtggggaaggctacgcggatcaagaagctagacccatcctggatcaacccgaaaataacatgaacaatggcaatatcccacaataccatcgcaaggacgaaaacctggcgtatcataacggttatcatggagtagatcctcagcagtactatgatgatccggaagctggctatatcgatcaaacgggggatgactaccagattaactcatacttgggtagaaacggcgagatggtagatccttatgactataacaatcatttgacgcctatggaacgtagcggatacttgcctgatgatcacagatctttgaatggtggagaggatgaggtggatagtgtgaaaagcggatactctcacagagaccttggtgaatatgacaaggatgacttttccagagatgatgagtacgacgatttgaacactgtcgacaaattacaattccaagcaaacggtgtgcctgcatcatcttcggtatcctctgctggatctggagaatcgaatttgataggcagtaatgataacttagttggaaatagaatgcttaaaagaagtggtactgaaattagaaagtttaagctttggaacggtaatttcgtcttcgattccccgattagtaaggctttattggaccaatactcaaccaccacagataatgcaagtaccttacctaatgagtttaaattcatgagatatcaagctgtgacttgcgaacccaaccaacttgcagaaaaaagctttaccgtcagacagttaaagtacttaaccccgagagaaacagaattgatgttagtagtaacgatgtacaatgaggaccatatcctgctaggaagaactttgaaaggtgccatagataacgtaaagtatatggtaaaaaaaaaaagatcaagcacttgggggcccgacgcatggaaaaaaattgttatttgtatcatttcagatggtcggtctaagatcaatgaacgttctttggcattactaagttcattaggttgttaccaagatgggtttgctaaagacgaaatcaacgagaagaaagtagcaatgcatgtttatgaacataccacaatgattaatatctcagatgtttctgactcaggtgtatcgtcggaatgtaatcaaggcaccgttccaattcaattatggtctggtttgaaagaccaaaaccaaaaaagattactcgctagatggcattga

SEQ ID NO: 6124 - DNA, 1173 bp, Saccharomyces pastorianus
atgactcaacaacttaactctgatgatatgcaagaacaattgagtgctactgtcaaattcagacaaattttgtccagagaacaccgtcctccaattgatattgtcatccaagctggtgtggttccaagattagtagaattcatgcgtgaaaaccaaccagaaatgctacaattggaagctgcttgggctttgactaacattgcatcaggtacatcagctcaaacaaaggtcgttgtggatgctgatgctgtaccacttttcattcaactattatataccggctccgttgaagttaaagagcaagctatttgggctttaggtaacgtcgctggtgattctaccgattatagagactatgttctacagtgcaacgccatggagccaattctaggccttttcaactccaataaaccatctttgatcagaaccgctacttggactttatccaatttatgtcgaggtaaaaaaccacaaccagattggtccgttgtctcccaagccttaccaactttagcaaaattaatctattcaatggacactgaaactttggttgacgcttgttgggccatatcttacctatccgatggtccacaagaagctattcaagctgtaatcgatgttagaattccaaaaagattagttgaattactaagccacgaatcgaccttggttcaaactcctgctttaagagctgtgggtaacatagtaactggtaatgatttacagactcaagtggttataaatgctggtgtcttatctgccttaagactactactaagctctccaaaagaaaacataaagaaagaagcatgttggaccatctctaatattacggcaggtaacaccgaacaaatccaagcagttattgattcgaacttaatccctccattggtcaaactgttggaagttgcagaatataaaactaaaaaagaagcttgttgggccatttctaatgcctcctcaggtggtttgcaaagaccagacatcatcagatatctagtatctcaaggttgtataaagccgttgtgtgatttgttagaaatcgctgataacagaatcatcgaagttactttaaatgccctagagaatatcttaaagatgggtgaagccgataaagaagctcgcggtttgaatattaatgcaaatgctgactttattgaaaaagctggtggt

SEQ ID NO: 6125 - DNA, 414 bp, Saccharomyces pastorianus
atggtggaaaagaagctggaggggttgcgagagtatgaacgaaaaagaataccgacaaaggggagtggtgtgtctaatcgttaccaagacaattcgttcaaagtatcgacgccaacaaagtcatatatgtcttcgaatagcacttcgctaccccatatcactgatatagagacccccattaatatcttcgaggatgaaggtaaaatggaagcaaataaaaatgttttacactttcaagagcaagggcagctgacttcgtttcagaaattacagtctgagattgaaacaaacacaaggaaacttgatatgattatagatttgttgaaggacgatacggtcggaagggaggaaaaaaaagtggccgatcacggaaatgtaactttgggaccgggaagtgacaaggtggtgggatag

SEQ ID NO: 6126 - DNA, 2394 bp, Saccharomyces pastorianus
atgtcgtcattaaccagactattgcaggaaaaacgaaaaaacgaagcctcaaattcgtcaccgagaacttctgctgatacattgaccacaacgcccgagtcacatcctcttgacgctcagacaaggaataagagtagtagtcacattgcaagcgatagtaacagcagcaatggagaacgtaacagggccactatgccagttcctggaagcgttacaacggttacacaaatatactcggaggaagattcgtcatcaacggccggttcttcactagacgaaagaaatcagttttcttccagttttcttaattccaattttgcccacactgcctcattatatggcacaagtgcacaaagtaaagatagatttgggtctttgataaatgaccagggggctgctggactttcctcgtatggtggttcttctcttgccccacaaaatagaatcacgagtagactatccgctacttcgcacacttcgggaaaggtcattccttcattgtcttcgagtattccttactctgtcccaaattctaacaaagacaacaacagctcgaatagcaacagctcctctttgtcttcatcatggctcgaaacatatgcaggcggtttgcccagtaatatttctgcgatcgattctaatgttatatcttccccaaaagtagatagtgtcgagccccgcttcattatttccaaacaaaaacttcagaaagcatcgatggacaacaacaacaataccactgctacccaagcaaggtctatttcacgttcaggttcattttcttcacaactgggaaatcttttcttttctaaaaactcaaaagaatcctcaaacccaaactctgctggcatgacataccccgccaattctaatggtccatccacgagtattaaaaattctaatgttgcaaatggctcaactgctatacctaaaccaattcgtgcaagacaaagtagtatttattctgtatcgaggcaaccaactggttcctacacagataacttgtacggctctccatcttctgttcatgaccatttacccccaagccaaagcgttccaagatcgcaacattcttccatcggtgatttaaaaagattcttcaaaaagagctctagcagtaatctgtcctcgaacaataacaacgctattccaaatggatctcctgtgtctaccgggatggctgttccatcgcattctcattcatcatctcattttgcagcaggaaactatccttcctctaacagctataatggaaatggggacactatttattctcacgcacatggttctgcagttccgttttcaaagagatacgtcaagacgggagaagatttaggtgctggagcaggtggttccgtcaaattagttcaaagaatcgtagataaccaaatttttgcagtaaaggaatttagaactaaatttgaaaatgaatcaaaaagagactatgttaagaagattacctctgagtactgtattggtacgactttaaatcatcccaatattattgagacaatcgaaattgtatatgaaaatgatagaattttacaagtaatggaatactgtgagtacgatttgtttgctattgttatgagtaataagatgtcgtacgaggagatttgttgctgctttaagcagatccttactggtgtgcaatatttgcatagtatcggcttagctcatagagatttaaagctagataattgtgttataaatgaaaaaggtgtggtgaaattaattgatttcggtgcagctgtggtattttcatatccattttcgaagaatcttgtggaagcaagtggaattgtcggtagtgatccatatttagcacctgaagtttgtatttttgcaaagtatgatccacgtcccgtagatatttggtcttcagcaattatcttcgcctgcatgatattaaagaaatttccatggaaaatccctaaattgagagataactcctttaaactattctgttcagggcgtgattgtgactccttgagtagcttggtaacgagaactcctgatccaccttcttatgacgagtcgcactctccagaaaaaaagaaatctgagggctcttcaaataatgtatcagatcccaataatgtcaatattggaccacaacgactattgcattcattgccagaagaaacgcagcatattatcagccgcatgattgacctggcacctgcatgtagaggaaacattgatgaaattatggaggacccttggattcgtagcattagcatgtgtcgaatggttgaagatggcctagcgttcaaagtggttgaaggagatgaccaccatcacacgcaagttgatcaaagtgaagcgcatattgcaggtttagaaaagaaaaagaaaaaggataaacaaaacaactatcaagtaagcgtctaa

SEQ ID NO: 6127 - DNA, 537 bp, Saccharomyces pastorianus
atgtcggcggctattggcggagaaactgggatgttagatgtgggaagacactgtgcttattgcaggcagctggacttcctgcccttccactgttcattttgcaacgacgatttctgctccaagcatagactgaaggaagaccatcactgtaaatggttgctggaacaagaagcgtcttctaagaacaatgaaagagcaactatgagccagagtggtataggctcaaaaaacgaggcgtatatcaagagcctgttaccagaaagagcacatgttagagtgcagatggcggacaataatcgggaaccaaagagagacatcaacactgctaaagttagttccagtttaaattcaaagacgttggataagatttttaggttttttcagaggaatgagaaaaggaagaatagcagtaaatccaaaaagacgttcggctcctcttcgaataaaatcattcaactagcgaacctcaagaaaatggtaaaggtgatacgaagattccgtcacaaaatagaatatatatttggtgctactcggtag

SEQ ID NO: 6128 - DNA, 318 bp, Saccharomyces pastorianus
atgataacaacaagaacacatcctaccaacaaacgccatcctacaagcgtgaaatgccttcagagaatgatgaaaagcccaataaaaggttcaagaaggatgatggtaacagaagcaaatttcagagacaagactatagaagtacaagagatagcggtagcaacttcagtgcaaataacagtagtagcaatcgtagacccaatgaaacccaaagatacaacacaaacagaaagagcaatacacaggctcttcctcaaggccccaagggaggtaataatgttagtagatatcaacgttaattttgaacagtccacatag

SEQ ID NO: 6129 - DNA, 138 bp, Saccharomyces pastorianus
atgaggtatcgaataaccgcagaactctacgtctgggttcttcattatgatgtaacgcagagcgttgcccagtgtgtggtcttcttcaacaatctggaaagaggcgctggttccgtcttcagacgtggcctgtgttaa

SEQ ID NO: 6130 - DNA, 177 bp, Saccharomyces pastorianus
atgaattccacggcacatgtagattttcgggagattttatcaccaattggtctaaatactaatccatacgattctgaaactatcgctatacttctaccttgttgtttggatatgagtattttcattgttacacgtttttttataacgttttattctttgcgtgctcctcctctttga

SEQ ID NO: 6131 - DNA, 195 bp, Saccharomyces pastorianus
atgtcctggaaatcccatttggaattgtttaaacaaaaaaagtccacagcatatattttgttgacggtcttattaggaatcggttgggccgttttagatttcccggtaatagtcgctataaatataagaccttcaagttcaataagaccaatgaacccgaatatttcatggctggagagtctttggaaaccatga

SEQ ID NO: 6132 - DNA, 357 bp, Saccharomyces pastorianus
atgagtgtggaaggaaaaagaacaaggaacgggtcgcatcctctccgggcagtaagcgggttcaccaccaagggctacatacatgcgttggtggattccacgtcgaactcgaactcgaactcgaactcgaactcgaactcggacagcagggtacccctggtgcaaatatcagatgactctcacataacgcacgatagctttaggctgtatacagaccagcgcgaggcttcgcacttgaggaaccgtaacatcaacggggcagggcaggtggacaacaccgacgttatggaccagttctctcaatggtccagctacaaaagaagctcatcccctcacaataccggtgagaacctatcc

SEQ ID NO: 6133 - DNA, 1452 bp, Saccharomyces pastorianus
atgcagcataacacgtcattatatgactctttaaacgttaccactactgcatcgacaccggaaatcaaaaaagcctacagaaacgctgcattgaagtaccatcctgataaaaataatcacactgaagaatccaagcggaagtttcaggagatatgtcaggcatacgaagtcctcaaagacaatcatttaagatctctttatgaccagtacggtaccacggacgaagtgcttatccaagaacagcaccgggcacaggcgcaagcacaagctcaagctcaagcgcaggcgcgacagcagcagcagcagcaacaagccagcgtattcaattcatccgcaggctttgacacgggaggagtgacttttccggacctgtctccaggtaatctttttgcgcagttcttcaacagctctgccagcgcctcctccaatggttctaaaaataacttcagcttcagccttaatggcagctctacgcccaacttcccattcggcaacggcggaggcatgagtaatttgcaatctccaccatcgaaatacggttccgatgatgatggacatcatttacatagaggtcccgatatcaaacacactttgaaatgcacattacgggaactctacatgggaaaaactgcaaaattgggcctgaacagaacaagaatttgtcacgtctgtgaaggacatggaggcttgcagaaatgcacgtgtaaaacatgtaagggccagggtgttcaaacgcaaaccaagcgtatggggcctttggtacaaagttggtcacaaacatgtgctgattgtggaggtgccggtgtatttattaggaacaaagatatctgccaacaatgccagggccttggtttcatcaagcaaaggaaaattctacaagtcactgttcagccaggtacaagtcacaaccagctcatagtgctgacaggtgaaggtgacgaaattattagcaaaggaggcggtcatgaaaaagtcataccgggtgatgttgtcattaccatattaagactaaaggatcctaaattccaagtcactgataactgcaacctaatctacaagaaatgtaaagtcgacttgatgatcagtttatgcggaggtatcgtttacatcgagggacatcctagtggtaaattaatcaagctcgatatcatacctggtgaagtacttaagcccaattgcttcaagactgtcgaaggaatgggtatgcctaagtttattaatggagttcgaagtggattcggtcatctgtacgtcaaatttgatgtgggctatccggagagactggagcctgaaaatgccttgaaattacagaaaattctggcccaagataaatacattcaggctgaacaacaagcctcagaaaccacggatgctgactgctattgcgatttggaaaaatcctaccacgctgtagaagaacacgtactaagcagtcttgaggccccgatatga

SEQ ID NO: 6134 - DNA, 792 bp, Saccharomyces pastorianus
atgaaactatctgctactgctttgaccgtcgcttcattgatcggttctaacactattgtttccgctttaccatacgcggcggagattggatccgattgcactaccactgcccacggatctcaccagcacaagagagccgtcgctgtcacctacgtttacgaaaccgtcatcgtcgattccaatggccaaaccgtcacccctactgtcactgggacttcttctgcggtttcttcaaccactaccttggttccagaatcttccgctgttacatcttctaccgaggccaaatcttcttcttcttccgcaactgctaaaaaagcacacaccaccacccttacttcctcttccaccccagcaacatcaacctctcaagaaacctccaccacttcctctaccacttcagtcggcgcgactacaacagcctcgactacttcttcaagcggaaccagcagcatatacggtgacttggctaacttctcaggtcccaatgaaaaattccaagacggtactattgcctgtagccaattcccatctggtcaaggtgttattcccattaactggttaggcgaaggtggctggtccggtattgaaaacactgacacttctactggtggctcatgtaaggaaggctcttactgctcttacgcttgtcaaccgggcatgtctaagacacaatggccttccgatcaaccctctgatggaagatcaatgggtggtctgctatgtaagaatggctacttgtaccgttccaacaccgtcaccgactacctgtgtgaatggggtgttgatgcg

SEQ ID NO: 6135 - DNA, 918 bp, Saccharomyces pastorianus
atgcctcgaatatctccatcgctgctaaaaaaggcctcgagtatacggcccggcttgcaccttttgatccctgagtgtagaagtctccaacaagccacactcgagtacaaatggcttagtgaagaactgcctccagaaaaatccatcctgtgggcctgtttacagagatacaaccatgtcccattacagtacatcttgggttcgcaaccatttggtgctttggacattatctgtaagccaggtgttcttataccaagatgggaaactgaggaatgggtgatggagctaataacaactataaacaattcaacactcttcaaccatgagactcctttgcatatttgtgatacctgtactggaacagggtgtattgctcttgctttgaatcatggtataccaaattctaccttcacagccattgatatctcgaagaaagcgattgacttggtcaaactaaatatactaaagaacaaagtgggcaaaggcaggcttatacaacgaaatatattaacttcaacccctagcaatgttcctccacttcatatagacatacttactggcaatcctccctatattcgaaagcgtgattttaacagagatgtcaagacctctgtaaggctgttcgaaccgaaactagcactagtgggtgagcttgaattttatcaaaatctagtagaacactggctatcaaaaaccgattccttcttttatgagattggcgatactggtcagtttgattatgtagaaactcgtattaaaagcgattctaagctgagccaaagttggtccatcggcttgaaatatgactctaatggtaaaccaagggttgtatatgggttcaaaaacaactccaaaggagccaggttacttccgctctttggacctgcaggcatgcaagctggcactgccgtcgtttac

SEQ ID NO: 6136 - DNA, 576 bp, Saccharomyces pastorianus
atggaaccgttgacgactatagactttaatcaacacgtcattgtgcggttgccgtccaaaaactacaagatagtggaactgaagcccaatacttctatatcattggggaaatttggtgccttcgaagtaaacgacattatcggatatccatttggtttaacatttgaaatattctatgacaatgaagattctactgccgttgagaaaacagattccaagccaaaaaacaaaattccaatcgggaaggtaaggttactgtcacaagaggttgaggatgaaagcaatgataaagatgatagtcatagtgaaccgccattgtctactaaggaaaaatcagtctctgttgaattatctaacattaacagtagtgccaccaatcagaatttggttaacatgggtagtaaggctcaagagttaactatcggagaaatcgaacaaatgaaacaagaatctttatctagtaaagaaatcattgacaagattatcaagtctcacaaaagcttccataacaagaccgtatattctcaagaaaaatatcttaacagagaagcaaaattcgcaaaatattcacggtga

SEQ ID NO: 6137 - DNA, 1671 bp, Saccharomyces pastorianus
atgggtagcagacgtcataagaacaagcaagccgctccaccaactttggaggaattccaagctaaaaaggacaaaaaggctaatagaaagttagaaaaaggaaagagaccttctgccactcaaggtaatgaagtttccgatagaaaaaagaagagatcgaagccattcaagaaatccagaaaacaagaagaagaggttgtcgaagaagacaaaaacttgccagaagttgatcttgaagctctgtctaaggccagaaaatcattgtttgacgatgacgaagacgctgctgaagcaggatctgatgatgaagagctaaaagatgagtttgacttggaacaagaatatgattacgatgaagacgaaggtgacgaggctcacccaatattctcagatgacgataatgacgaaggtgatcttgaagaattaaatgcacaaaacatggaagctctctccaagaaattggatgaagaagaggctgaagaagctgaagaagccgaaatggaattagtggaagctgaacaaatgcaaccaagagctgatgtcttgccaaccgaagaacaagaagaaatgatggctcaagaacctcctaatttaacctctaccagaacaagaatgatcgaaattgtcaaggtcttggaaaatttcaagaccctcggcgcagaaggcagatccagagcggaatacgttgacaggcttctaaaagatatctgtgaatattttggttatacaccattcttggccgagaaactgtttaatttattctcaccagctgaggcgatggagtttttcgaagctaatgaaatcgctagaccaatcaccattagaactaatacgctaaagactagaagaagagatttagctcaaacgcttgtgaatagaggtgtcaatctacaacctattggttcttggaccaaggttggtttacaaattttcgattcccaggtcccaattggtgctaccccagaatatttagcaggccactatatcttgcaagcagcatcatcctttttaccggtcattgctttggaccctcatgaaaatgaacgtattttggatatggctgctgcaccaggtggtaagaccacctacatatctgccatgatgaagaacactggttgtgtttttgctaatgatgccaataaatcaagaaccaaatctttaattgctaatatccaccgtctaggctgtaccaacactattgtatgtaattatgatgctcgtgagttcccaaaagttatcggtggctttgatagaatcttattggatgccccatgttctggtactggtgttattggtaaggatcaatctgttaaggtttcccgtaccgagaaagatttcattcaaattccacatctacaaaaacaattgcttttatccgctattgactccgttgactgcaactccaaacacggtggtgtaatagtatattcaacatgttctgttgctgtggaagaggatgaagctgtcgtagattacgcattgagaaaaagaccaaatgtcaaactagtcgaaactggtttggccatcggtaaagaagggtttactagtttcagaggtaagaagttccatcctagtgtaaaattagcaagaagatactatccacatacttataatgtcgatgggttctttgttgccaaattccaaaagacaggtccatctacgtgtcgatga

SEQ ID NO: 6138 - DNA, 438 bp, Saccharomyces pastorianus
atgctaacaaaaatggcgcctatgatagcgcctacagcaatatacacggttccattagtcttatgggcagcgttcagtataaacgggttccccaaagtagaaggcggtgttatcgtcggagcaattagcgatgacgacgatgtcttcgaactggaaagcgcggtgttcaatgacggcaaggacttggaagtcgtgtgggacgctatttctgatgcagaggctgacacggtagttgaactagccgtagtgctggttagtttgggaatgtctcttccgacaagtgagacagatggtatgaaatttttcctgaccatctttgccgatgttctttttgaaatttgcaggaaggaaaatcttgctgtagtacaatctcaaatgtcttatattatcaaagatcttctgctaatgcatctccgctgctgtcaaagatggttttga

SEQ ID NO: 6139 - DNA, 261 bp, Saccharomyces pastorianus
atggaaggagagaggaaaagccaattaaaatttaaaaggaataaagtttacaacaaaaaaagacgatttctttttttcaatgctttacggacttttcaaacagtttcttcgtcaaagacagtttcgattggcttttccgtcagggaagcatgtccgaaaacactgacggcagaagcaccgatcaaccataacaaagtggagattggcgaagccaagaaacctattggtacggccacacaaatcaaaccggtgtatagttga

SEQ ID NO: 6140 - DNA, 156 bp, Saccharomyces pastorianus
atggtttttaccaactcagacaattcttcgttattgtcctctttcaaaataacgtgttccatggtatccataaactctctagaacaaacttctttaataaatggtgttccaccattcttaacacatatatttgtaagtttccatgaagacaattga

SEQ ID NO: 6141 - DNA, 270 bp, Saccharomyces pastorianus
atgcaacgcatcgaatccttagggctgacccttctagaccttaagacatcagaaatctctaatgctatgggaagatcgaggtcaccattcggaatgctttcgctagtggctttttctattaacgtgtccaactcacctggcgtactgacggacattctgtttttagatattctactgactatccatcaatttggggcgggaggtattcgaatatttttacaccttttatttccattccctgtgttgtatatatattttagataccattga

SEQ ID NO: 6142 - DNA, 507 bp, Saccharomyces pastorianus
atgagctccaacaatggtgttacgggcaagctatcaagcagagtcatgaatatgaagttcatgaaattcatgaagaacgacgacgacgaaagttcaaattctaatacaccatcaaacgccaattcagacacagaatccacagaacagaaatggaaacagtttggtcgagataactcagagtgggatctcaatagttgcaatgacgatgtgaaagaagactcaggcaaggaaaagaaaaaagtaaaaaaactagtgtataagaagcgacctcatctcatagtctccaatgttgggtacagtgaattgcgaaaatcggaagacctgataaccggaagaaaaacttttggcagcaataccgacgaagccaatcccaagaagagaaagcttgaagaaggcgaacaagaagaagaaaagggaaaaggctatgatcaaaaaaaggaagccgcaggaaaacaagacgaaggagaggatgactacgacctggataattattcaaggatagcatga

SEQ ID NO: 6143 - DNA, 720 bp, Saccharomyces pastorianus
atgcctgcaggtcgcattgggtggcttaagtttttagctgaagactgtgatccgacagatcagagggtgtttaggtggtgtgtaacgtcaatggaatttgcaatgcatatggtcagtggttggaatgttctagcgcttgatgactgtcaattttcttctttaaagcaaaaaatctcagagtgtatgtcactacttatctcccatttcgatataataggtgcccgctccatggaagttgagaagattaatcaacaagctagatcaaatcttgatttagaagatgtgttcgatgacgatatgatgttgcaagtgaactctgagttccgtgtacagagtatcatagaattggaagaaaaaatcaaaaaaaatccacaccaaactggtaaagtgatagatgacagtgataaaggtaacaagtatcttgtttccttggcatcctccatctccaacgtatctatgagatggcaaaagaggaattttgttggaggtggtacttttggaagagttttttctgcggttgatttggacaatggtgaaattctggctgttaaagaaattaatattcaagacagtaaggcaatgcaaaagattttccctctaatcaaagaagagatgagtgtcttggagattttgaatcacccaaacattgtttcatattatggtgtcgaggttcatcgtgataaagtcaatatcttcatggaatattgtgagggaggctct

SEQ ID NO: 6144 - DNA, 615 bp, Saccharomyces pastorianus
atgcactatggagtggacccaatccttagattaagtttagcggtctccatcatatctataatttattttttgattattagggttttaccagttttgttgattttggtaatggaaatcattttgtctatcctgtggttctctgctttcgtaactttggcttctgattttggtcctatgtcatgctcaaatatgccatgcggtatgatttataatccgtatcataataggtctggacctaatacttacatgccatgtccaaatgtgccccgccttatgaattccagctcggtttcttgtagaattgctaaagctaatattgttctagaagccattatgtttatactatttctcgcaaccacatatgtctcctatctcgcagttgtattgcaagctagacaacgtggttccaatactaggtctatcttaaaggcaatctgtaagactagtgttaagacgttgcgcagaaccaccctatacctggagagctattttgaggaagatgaatctcttttagatcttgaagctgaccaagcggaaaaagttgaaattgcagacgatggagagccagcttataatgagaaaaacgttcaatctgaatcagaggactttgaataa

SEQ ID NO: 6145 - DNA, 1116 bp, Saccharomyces pastorianus
atggcaaatacaatcaaggtcgaaggatacccgtccatggaatggccgacttctttagatatcccactaaaggcctcagaagaattggtcggtattgatttagaaacggatttgccggatgatcctactgacttgaagactttgttggtggaggaaagctccgaaaaggagcattggcttaccattgctctagcctattgtaatcatgggaaaaccaatgaaggcattagactgattgaaatggctttagacgttttccaaaactctgagagggcttcattacacactttcctaacctgggcccatttgaatttggcgaaaggtcactctcttagtgtggaaacaaaagaacacgaacttacgcaggctgaattaaatttaaaggatgctattggatttgaccctacgtggattgggaatatgttagctactgttgaattatactaccagcgcggtcattatgataaggctttggaaacctccgatctctttgtaaaaagtattcatgccgaagatcatagatctggtagacagtctaaacctaattgtttatttttactcttaagggcgaaactattataccaaaagaaaaactatgtggcgagtttgaagatttttcaagaattgctagttatcaaccctgtgttacaacctgatccccgtataggtattggtttgtgcttttggcagctaaaggatcctaagatggcaatcaaatcatggcagagagctcttcaaatcaattcaaagaacacaagcgcctcaatcttggtattattaggtgagtttcataattctctaaccgattctacaaatgatgaagtcttcaaagaaaccttttcaaaggcattgagcgacttaaagaatattttctccgaaaatcagaataatccagttttgttgacgttattacaaacataccactactttaaaggtgactttcaaactgttttggatatttaccatcacaagattctaaaaatgagtcccttaatagccaaaaccgtcctttcggaatcttcattctggtgtggtagggcacattatgcgttgggcgactatcgcaaatcattcattatgtttcaagaaagtttaaagaaaatgaagataatttaa

SEQ ID NO: 6146 - DNA, 207 bp, Saccharomyces pastorianus
atgcatggttccataatgtggtttctgcaaatggcacagttgtcaacggctatatcccacgaccagaacgccaccgctgtccattttttaatctcgaatcttttttttttggtctctaccggtgtattttgttgctcattctgcgtggaaacttgcgattcgtcttcatctacttccattctgtcaccttcgttgctcattctgtag

SEQ ID NO: 6147 - DNA, 129 bp, Saccharomyces pastorianus
atgaacgacatggaacgcaaccaaatgttgccaatttgcgtctcccagttaaagaaaaatatcgataagggcttggaattcgtgcatcgagatctgcttcatcttaatgagcatcggaccgaagcataa

SEQ ID NO: 6148 - DNA, 870 bp, Saccharomyces pastorianus
  modified_base (773)..(774): a, c, g, t, unknown, or other
  modified_base (786)..(786): a, c, g, t, unknown, or other
  modified_base (808)..(808): a, c, g, t, unknown, or other
  modified_base (823)..(823): a, c, g, t, unknown, or other
  modified_base (832)..(832): a, c, g, t, unknown, or other
  modified_base (849)..(849): a, c, g, t, unknown, or other
  modified_base (867)..(867): a, c, g, t, unknown, or other
atgccccactcagttaccccctccattgaacaagactctttgaaaatcgccgttttaggtgctgccggtggtattggccagtcgctatcgctgcttttaaaggcccagctgcaataccagttgaaggagagtaatcgcaccgctactcacatccatctggctctttacgatgtcaaccaggaggcaatcaacggtgtcactgctgacttgtctcatatagatactcctatctccgtgtccagccactcccccgcaggcggcattcaaaactgtttgaataacgcttctatcgttgttatccctgcaggtgttcctagaaagccaggcatgacacgtgatgatttgtttaacgtgaatgccggtatcattagccaactgggcgattctattgccgagtgctgcgatctctccaaggtctttgtgcttgtcatttccaaccctgttaattctttagtcccagtgatggtttctaacattcttaagaaccatcatcagtctagaaattccggcattgaaagaaggatcatgggtgtcaccaagctcgacattgtcagagcgtccacttttctacgtgagataaacattgagtcagggctaactcctcgtgttaactccatgcctgacgtccctgtaattggcgggcattctggcgagactattattccgttgttttcacagtcaaacttcctattgagattaaatgaggatcaattgaaatatttaatacatagagtccaatacggtggtgatgaagtggtcaaggccaagaacgnngtaaaggtatgntgctacctttattcgatggccncatgcgcggttatanagtgtgttngtccaatttgtttcttntgttatgtgggtaacatntga

SEQ ID NO: 6149 - DNA, 783 bp, Saccharomyces pastorianus
atggtttcattgactacaatagagcaaagcccagtcaaatgcgagacaaccactgagaaagagagcaatgatactagggggacagattcgaacgagaatgcagagacaaaagaaacaaagaagggttttccattccatgacttggcaaaattgcagaaacagtacaaaaataaatccagtaggaacgagtcactagtagcactaatatatctcttgggttcgatgctgtcattttgtctcctaatatttttcacggacttttatttgatacctttgttccccaccaccactacaatgacagactacattgtattcaatttttatttattgaacgtttttgtattttgtatggtgcatttcatttatcacttcgtcaaaaatatttctctacaacaacatctcgaacattggcagaagttttcgtatttatcgaatatcaacttattgatatcatcacaaatcacaattctttattatctattctatgattacgtgtttttcttcaaaatttttacccttttaatgaacttcataggattagtggcatacttttttatattgacggacaaactcatttcctcgaaaagattcaataaaacagttttcttcatttcggtatcagtagtgtgttgttccttgccactattaaccgcaataatcacctttgatggtttagaaaatctgaaagagaggataaaagtgaacgcaattacgtggggacttgtggctttggtagcggcatctatgacctgcaggcatgcaagctggcactgccgtcgttta

SEQ ID NO: 6150 - DNA, 291 bp, Saccharomyces pastorianus
atgaatgaggatagcgacagggctcagttgaaagccagactgtgggtccacgtagagacacgactacaacaggctctgtgctcccaggatgccaaatacacaccgagattcatcaactctttgttagaactagcgtatttacagctaggggagatggggagcgacttgcaggcattcgtggagcacgctggccgagatgtggtcgacaggagcgatctgatgctgtacctgaggaagcagccggaattgcaagagcaagttcaacaagacgagaaaactagaactacttga

SEQ ID NO: 6151 - DNA, 135 bp, Saccharomyces pastorianus
atgctaacctttactatcttgctacttttactattatctgtgatcttcctgttcgactgcttcgtctttttaccagaagcagggccgccttttgaggctaacaatgcttgccagttcgatgaaagtgccatttga

SEQ ID NO: 6152 - DNA, 540 bp, Saccharomyces pastorianus
atggtgtttgaaaaggaattattagttgcaactcaggcagtgcgcaaggcgtctttattgaccaagagaattcaatctgaagtaatttctcataaagattctactaccatcaccaagagtgacaattctccagtgactacaggcgattatgcggcacagacaattattatcaacgccatcaagagcaatttcccggaagacaaggtggtgggtgaagaatcctcggatgggttgagtgattcgtttgtgtcaggaatcctgaatgaaataaatgccaatgacgtcgtctacaataaagaatacaaacagcgtgatttccagttcactaatgaccagttcccgctaaagtctatcaaggatgtcagacaaatcattgatttcggcaactacgcaggtggcagaaaaggcaggttttggtgtttggaccccattgatgggaccaaggggtttttgagaggcgaacagtttgcagtatgcttagcattaattgttgatggtgttgtccaacttggctgtattgggtgcccaacatggtcttga

SEQ ID NO: 6153 - DNA, 1380 bp, Saccharomyces pastorianus
atgggtcaagatgaagtttacctgaaggtaatcagcacttcaggctcgaattctgaaaagaaactggccaagcgagtgcttgacctaatatctagggggaagcattgggttctagtcacactgctgctttctaatgttataaccaacgaaacattgcctattgttttggacaggtgtcttgggggtggttggcaggctgtagtgtcgtcaactattctaattgtgatcttcggtgaaattattccgcagagtgtctgtgttaaatacgggctgcaagttggggcattcttctgcccctttgttcttgtactgatgtatctgatgtacccagttgcatatccgatcgcgactctcctggactatatgctgggtgaagatcatggtaccatgtacaaaaagtccggcttaaagactttggtcaccttgcataggaccatgggggtggaacggttgactaaagacgaagttacaatcatctctgctgttttggatctaaaggcaaagagggttgaggaaatcatgactccgattgaaaacgtgttcacaatgagtgccgataccatcctagacgacaaaactgtcgaaaaaatcttcaactcagggttttctagaatcccaatttttttgcccaatgaaccaaacaacttcatcggcatgttacttgtcagggtgcttatctcctacgatcctgatgactgcctcccaatctcccacttccccctagccacgttgccagaaacttccccgaacacatcttgtttgaatattctgaattacttccaggaggggaaagctcacatgtgcgtcgttagtaaagagccgggctcctcgcatggcgccattggtgttttaactttggaggatgtcattgaagaattgatcggtgaagaaatcgtggacgagtctgatgtctttgtggacatgcatcagcatattatgagacaacaaccgggacccttgagcaaaaggcacattacttcctatttgcatcatttgtacactagttctcacaaggagcacaaagctgctgaccaagctgatgaatcgtctccactcttgtctccatccaattctaatcacccatccgagcacccacagcaagatttgaataataagtcttggaagcagaagtcaaatgatggttacgataggtccaacgctgtattgtctccaactccacaagcgacggaacatggcaccatcataccttcaaatctagcgtccaacccgttgaacgtaaataatcttttgttaccattaaaaagcctgccaatgttccgaaaatcattactacacacactcctcattctagcaaagagccttctccagcaccacactcaaatgataaatcactctccgccgaagaacaacaactattaa

SEQ ID NO: 6154 - DNA, 654 bp, Saccharomyces pastorianus
atgactgctcatactaatatcaaacagcacaaacactgtcatgaggaccatcctatcagaagatcggactctgccgtgtcaattgtacatttgaaacgtgcgcccttcaaggttacagtgattggttctggtaactgggggaccaccatcgccaaagtcattgcggaaaacacagaattgcattcccatatcttcgagccagaggtgagaatgtgggtttttgatgaaaagatcggcgacgaaaatctgacggatatcataaatacaagacaccagaacgttaaatatctacccaatattgacctgccccataatctagtggccgatcctgatcttttacactccatcaagggtgctgacatccttgttttcaacatccctcatcaatttttaccaaacatagtcaaacaattgcaaggccacgtggcccctcatgtaagggccatctcgtgtctaaaagggttcgagttgggctccaaaggtgtgcaattgctatcctcctatgttactgatgagttaggaatccaatgtggcgcactatctggtgcaaacttggcaccggaagtggccaaggagcattggtccgaaaccaccgtggcttaccaactaccaaaggattatcaaggtgatggcaaggatgtagatctaagattt

SEQ ID NO: 6155 - DNA, 1041 bp, Saccharomyces pastorianus
atgactgttaccatcaaagaactgactaaccacaactacatcgaccacgaattatcggccacgctggactcgacggacgcgttcgaagggcctgagaagctgctggaaatctggttctacccgcacaagaacgccatcaccaccgccaagacgctgagagatgttgccatggacaaatggatcgagatcctgaagctggtcaagtgcgaggttctgtccatgaagaagacacaggagctagacgcgttcctgctgagcgagtcctcgctcttcgtcttcgaccacaagttgacactgaagacgtgcggcaccaccaccacactgttctgtctcgccaagcttttcgacaccattgagcaggagttgtcgtggaaattccaaaccaccccggacggcaagtacgcaccattcaaagtgttctactcaagacgatgtttccttttcccctgcaaacaagctgccatccaccaaaactgggcggacgaggtggattatctcaaccagttcttcgaccatggaaagagctattccgtgggcagaaacgacaagagcaaccactggaacctgtacgtcaccgagacggaccccagcatgccccagggcagggagtacacggaagacgacgacgagaccttcgaagtgctcatgaccgagctagacccgcactgtgccaacatgtttgtgtgcggcccggacacatccacgcctgcccccacagaagcgaacgaggacaagggccacaacttgggctatcagatgaccaagaagaccaagctcgacgacatctacctgaactcctcccaggattcagacgcatcgttccaccatgacgcgtttgcattcacgccatgcgggtactcgtccaacatggtccttgcagaaaaatactactacaccttgcatgtgaccccggagaagggctggtcctacgcctccttcgagagtaacatcccggtcttcgacatctcccaagggaagcaagacaacctgaacgtcctcttgcacattctgtccgttttccagccaagagattctcgatga

SEQ ID NO: 6156 - DNA, 1572 bp, Saccharomyces pastorianus
atgacatacccgataaagtcagcaacttctgctgacatctcatatcctaaaaatacccctttggtgggcctgtccaagccgccatgcctttaccaacatacgtcttcctccgttgattcattctcgtcaacgtttagtgatgatgaccgttcagacctcgttgctgtacccaacgaatcgccgcatgcattttcgtataaccccatatctccaaactcattgggagtgaggctgaccatactaagaaggtccttggaaataatggtcaagagtcccgacattttacaagagttaaagaaaaagtctcccgtaatagcataccctacctcgcttaagcatacaagaaacttaaccgaggccaccgcactgccggattaccgagaaccatctaaatggccctctgttgttccagcggtgtccaatatctcatccgcctccaaaagacctgcggttcaaagagctgcctcattgatggtgctaacagataacgctgctaccaacaagctgaatccagaaaagtcagaattggagaatttattgtttttgttgaatctagcactggaaaataactcgtttgaaagggcttccgatttacacatgttgtcgttattaaacatcaacaagctgagctttgattcggatattcaaaaatcagaaactctgaaaaaagctttactagatagtttagctgaaccgttttttgaaaactataagaaatttcctcataaagactctggtgtaagttcacaatctaaccaacatcgggaacaccaagacgatatagtttctttagcagatatcaagccacaacaagattatagccgcatacttcatcccttcacatctgcgaaaaattctggccctgaagccgttttcacctgttctcaacaatatccttggaacttcaaggctgccaacgatttggcatgtttaacattcggtatatcgaaaaacgtcatcaaggcactcacattacttgacctaattcatacggatagtaggaaatttgttctagagaaaattatgaatgcagaagaagaaaatcaagaaatcgtatttaccggtgaaaccatacctattgttcagccaaactcaacaagtgataacaaattaccaaacttgatttgggcatcgttgtgggccaagcggaaaaacggtttactggtctgtatattcgaaaagacaccttgtgactatattgatgttatgctaaacctcacggatttttcagtggatagtattgttgatataacggggtttttaaagaactttaatgaacagcaacagcaagaatcatcttccccaacgtccacaaaaaaaacagtgaaatttgcaaatgaaattcatgacatcagatcaataagtcattcattgggtaaactgatcgatgatgtacgtttcgggagagtattttccgcagatgatgacttattaccattacctatcagagtggcaaaccatatcaatgaagaaaggtatttcacattaaatcatttatcagaaaatataccgtgcgctgtaacaacttctgtattggaaatgaatcaagttaaagatcgacgccgattgcca

SEQ ID NO: 6157 - DNA, 552 bp, Saccharomyces pastorianus
atgtcatcctgctcaaaaatggcttcattgatatcaaattttggagcaatttctaattctcccgtgtggggtaaaggtggcaacaaagtcagttcttccttactattacctttgtcgccacggaagcccatttcttcatgtaaattaggagtggatagtgagaggttggtggctgatttatccatatcgtgtagcatatccaagttatcgtgcagatcgatattggacgaagacgaagatgaagacgagattcttcctaaaacacgaggcgaagaacgatctatttgggtgagttcgtcatcatttgcctcctcttctttgatattgtgcaaatgcgtggtaacagtcgtcgaactcgatgtgggtgtggcgcttttgggcatcgtaggcagggtagtactgttatatgcagtggccctgttagagccagagttcctgtatctgggtggcgagttgtcttggtggtccatactaaatatcgttaacttttttatttcttttttttatttcttttttttttttttttttttttttgatttcttctatcaataa

SEQ ID NO: 6158 - DNA, 510 bp, Saccharomyces pastorianus
atggctttcactaaaatcgctttactagcagctctcgcagcttttgcttctgcccaaactcaagcagaaatcgacgaattaaacgttgttttgaacgatgtcaaaagtaacattgctgactacatattgttatctcaagatccaacttctggtttctccttggccaatatgccagctggtgttttggacattggtttcgagttggcttctgctactgacgactcctacaccagtttatactcagaagttgacttcgctgccgtcgccactttcttgaccatgttgccatggtactcctccagattagaacctgagattgaagccttattagcaagtctttctacttctgctgtcacttcttccgttgctgccacctcatctgttgtggcctcttctgctgttgccagctcttccgctccaaccacttcatctgctgttgtctcttctgccgccagctcttctgctgctgcttctcatctgcatgctgccagctcctctgctgctgggatc

SEQ ID NO: 6159 - DNA, 330 bp, Saccharomyces pastorianus
atgagccgtggggtgggaggaccgagcagaacagaacagaacagaacagaacagtcgagtgtgttattatacaaagatcaagagacgagtctcggaaccaggaagaagcacatacgccaaccactgtttcttcttgttcttccttcacacgggtcttgtcttgcgcatattctcttcccgcttttttcgtccctgcgcttcccgcggctacgcgcagtggcgagccgggctacggccgtttctgtggcgggtacccctcgctcgcgggtaaccgtccgggctgagacatcgcgcgcgacggccgccgtgtgcgattaccgcaaagggtaa

SEQ ID NO: 6160 - DNA, 510 bp, Saccharomyces pastorianus
atgggtattcagggtcttcttccacaactaaagcccatccaaaacccggtgtcattacgtagatatgaaggtgaagcgttagccatcgatggctacgcatggttgcacagagctgcctgttcatgcgcttatgaacttgcaatgggaaagccgactgacaaatatcttcagtttttcataaaacggtttagtctgctgaaaactttcaaaactgaaccatatttggtgtttgatggggatgccatcccagttaaaaagtccactgaattcaaaagaagggataagaggcaagagagcaaagccatcgctgaaagactatgggcatccggggagaggagaaatgcgatggactattttcaaaagtgtgttgatataactcctgaaatggcaaaatgcatcatagactattgcaaacttaacggtatccgttacattgtggccccgtttgaggcagactcccaaatggtgtatctagagcaaaagaatattgtgccaggggataatttctga

SEQ ID NO: 6161 - DNA, 678 bp, Saccharomyces pastorianus
atggtttgtctatctggttgtgattataccaacgggatccccaaagtaggcttgattacggcaatgaaactggtcagaaggttcaatactattgaaaggattattctgagtatacagcgagacgggaaactgactattccagaagcatacatcagtgaatacgaagcggcagtcatggcgtttcagtttcaaagggtcttctgccctattcggaagaggatagtgagcctgaaggaaattccttcacacttaaaggataccgaaagtaagagacaaaagttatatgagtgtattggtcatgttatacacagagaaactcaaaaaaagcaaattgtgcattttgacaacgacatagaccatcatttgcatctgaaaatcgctcaaggagatttgagcccatatgacttccaccaacctttagcgaacagagaacgtaaactacaattagtatccaaatcgaatttagaattcgggaaaggcgataacaacggcacggaagttaaggtcaaaccaatagaatcgttttttcaaaaaatgcaaagagtggatcatgctcccaaaattgtagccaactttcataacataaggcaagtggaagataaactgactagaactatcaagcgtaggaagttaagtaatgttgctgtagttcaagaaactttaggggcgcacaagtaa

SEQ ID NO: 6162 - DNA, 2205 bp, Saccharomyces pastorianus
atgtcaggagttagtcgtgatgagagcatgagaagtacctctgatggggtgggtaatcaaacacaggttctggacagcgaattggatagtgagtttgtggttgaaactttcatcgaagctatcaaggacggcgatttgaaggtggtgaaggatgtggttgaaagcggggccattgatatcaacaatgactgcattaacgagcttccgggcctgcattgggcctgcatcaaaaataggttttctatagcaaaattcctcgtacgcagaggtgcgaatcttaaccaaacagcaggccccgagagggctactgctctgcactgggccgcgaggtatggtcacgtttatatcgttgatctacttctcaagcatggggctgatccgacgcttatagatgggcaaggcctaaacattctgcatttcagtgtctacagttccaatattatgcttgtagtttacgtcctctatttcgttgtgagcaacgataacaatgtcgatatagattcgaaagattacaacagtagaacccccctgctgtgggctgcttaccaaggcgattttctcactgtggaacttctactaaaatttggcgctactgtcgcattgacagataatagaggattcaatgcgcttcattgtgccttggttggaggagaccaaagggccatatgcgatttgatactaagtggcgcaaatttttacgaaagaaataaccagaagcaagactgtttcgatctagctaaagggataggaacaaaatcactcttcgaacaggcactgcaacaccatgggtatgacaaacttggaaatcaaaaagaaaaaatattcaagaaaaattcgcactcacagttgatgatatttttgtcgcctttcgcacttatgatttatacttattcgatttctttaattctttctcccccactagccatcgttctttctctcctggtgattgttgttaccgtgaattcactgaaaaaatttgtattaccgtcgcttacaagaaaaaacatttacaaagtttctctagcaagaacgccctttttcagtggcctctttgtttccactttctgcttcttgctattcatttgggtgaagaaactgtacccatatagcgtgtttgactatacagcaaaagacgcacaacttttggttacttcccttttcacatttgtactattcctgaaattggtgaggtcggacccaggttgtttgaaaatggacgatagtactataccggtacaagaaacgataaaacagttaattcagtcgagaaaatatgacagaaataacttttgcgtcgaaaccttagaaagaaagccattaagaggtaagtattcacttttcagtggagccctggtggccagatttaatcattattgtccatgggtatataacgacattggtttgaagaatcacaagctttttatgttttttgcttttgcggttcaatacgagatgtttttgttcatgtggttgtgcttagagtattttaaaaagaccaactatatttacgaacaagttgacgaatattcaagatgtactttcctgaaaaatgagaccttgtgtaaaggttccaattatgatccctctactttctttttattcatttggattagcgtgaacttcgtgtggttggggggtatgttggttgtccaatgttttcaaatattaaagggaattacaagtcccgagttgtacgctttaattaaggaggaacgcaaggcggaagctctaaatctgataccattcgaaaaccctatattttccatcccaaatggtaagaataccgatacggtgtctgatgacccaattgcgacgactgtcacacatacaatctccattgatagtttggaaccaagacacaggcgctatgccgttttcaatgcatgtttttcgatggttggcttaaatcagtgggttgttactttcaaggaaatgataggcatctccaaccttttacgcggcaacagtaaaccacgccataaccattcgctgcttcgaaacttcttagtgactaatcactggaagacaaacttggccgatttctggttaaacagtgatgtaacagcgcccttatggcagcggtttttttattcctcagatacctcgaaggccatgctaggtggcgttgaagttgactattaccggttatacgagcttcctgctcgagaaggagaaccaataagttcaaactcggagttcgtttaa

SEQ ID NO: 6163 - DNA, 1074 bp, Saccharomyces pastorianus
atgctgtgggtaaagtgtgcttcacctgggctccgaatagcacggaagcttcatacagtaaacaaaaagagtaatatctccaagatatttttggctacaggtggtttactagcgacaggagtgataggctgctatctaggttatagatgctttaaaggcaaggacaacaactctgagttatctccatctcatttcgttaaatatgaaatttcacacaagcaagacatcgattcatcgcattttttactggagttaactccactaattaggcagaatgtaaatatgtggtcactgatgactgcagaaaacctatggtctgttgaagtcaaacaaccggaagtcatggtggtccgtagttatacgcccctaccgcttcaatttaacccagtttcaaaagaattggaaatcttgaaagacggtgacaatgctgatgggaaattatgtttttatatcaagaagtatgaaaacggagaggttgcaagatggctgcaccaacttcctaaggaccatgtgattgaaataagaggcccatttattgattatgagtttccgcatttgccgaatgagtccaaaagatctcgtgagtgtttatatacgagcagaagcaataccgaaatccccaatgaagatgaggattcaaaattcacttatcagccctatgacataatgatgtttacagccggtactggaatagtgaccgccttacaattgctcttgacagaatcaccattcagaggcagtatcaaattattccacacaagtgaaaatattcagcaactggggcctttaaattctattcttttgaaactccaggcgtcaaacagggtccggttacaagtttttgaatcagataagcaaacaagaaataaaatattagaagatatcgggaaagctatacctagaccctcttcatataaaggtaagctgccattctctagtatcagtggtagaggctttgagcctatattggcgttggtgtgcggtccagaaggttatattagtagcatatctgggagaaaattggatcttgactctagaggatccccggtaccgagctcgattgtaatcatgtca

SEQ ID NO: 6164 - DNA, 507 bp, Saccharomyces pastorianus
atgtctattggagagccaaccatgaagggtgatcgtttgaggcaaaacatggcagtgacaaagaaggcaaagttgaaaaaaagtgacgagcctacaaagacgtcaaaggttaccgcatccgagaaaggtgaggaatctaagcgctattcgttatggaatttctggataagcacattatttttgaagttgttgttgattcctgattattttagcaccgactttgatgttcatagaaattggctggcaatcactaataaactccctatgagcgaatggtattacgagcatactagtcaatggacgttagattatccgccattttttgcctattttgaatggtttttatcccagtttgttcccaaggttgttcgcgatgatggctgtttggacatcgtaaaggtggggaaatttggtttaccaacaattgtctttcaaagacttactgtcataatcagtgaattcttctatttgctgtcctccaaatatacattaatacaacaaagctaa

SEQ ID NO: 6165 - DNA, 621 bp, Saccharomyces pastorianus
atggatgccatgttaacaaaaatctgtcaagactcgattttacaaaaagataaagattttcttctgttcttaaccagtgataattttagttctgactctaaaagtagggcgtacacaaccggatcaggcgctattaatgatagtaatgacttatcagaaattcgtataagtgaaataaagctgctaggcgcagaagacgcagccgatgtattgaaaaatggcggtattgatgctgagtcacacaaggggtttatgagtatatcgtttacgtcgctacctaagtataatgaaacagatgaattcttcattgaaaaaaaaagaaaattggatgaattggaagacagcttgaaaaaattgggcaaatcgttggagatggtcgacacttcaagaaatagtcttgctgcatccactgatgaattctctggcatgatagaaactttagcgtctttaagcgtaagtgaacctaattcagaactgttgaataattttgctaatgctcatagaagcataaagagctctcttgagagaagctctttgcaagaaacgttgactatgggtgtaatgctagatgatatattaggggatcctctagagtcacctgcagcatgcactgcactgccg

SEQ ID NO: 6166 - DNA, 1524 bp, Saccharomyces pastorianus
atgggagtcagatctaaatcaaaagaaatgcatgaacgagaccacacttcagatagctccagtctagtaacctcgctgatgaaatcctggagaatatcatcggtgtcttcgtctttttctaaaaagccatcattgtacaaaatgaacaccagcgaatctaccagcttgccatcaggttacacgtcgtctgctgatagagatagaagaactagcgacggtaatttcgaagccatggccaagcaaaaggcaagaactaggcgcacctcgaattcctactcgcctctaagatacgtgagccccactttgagcactgcaagtaacgatagtccccgacccgccctactcttacgccagcatcaccagcgtcatcatcaccatcagcaagcccaccataatagcagtagcggcagcgtaaacaacagcggcagtaatagcatagaaccgaacaggaagaatgatcgatattttaaagatttggatgaagattggagtgccgtcatcgatgactataacatgcctattcccatgctcactaatggtgggttcggtacccctgtggctccaccaaatactttgtccagaaggtccacatcctcttcaactaattcggtctccaatatgggaccctgcacgatgcgtaattcttcctcttctttcacataccctcaattaccacaactacaaaaagaccagtcgaatgattcgaaaaagacccagctggagattgaaaacgaacgggacgttcaggaattgaactccatcatccagcgtatttcaaaatttgatggaattttaaaggataaaacaatcataaatcaacaagacttgcgacagattagttggaacggtatcccgaaaatacatagacccgtagtttggaaacttttaataggttacttacctgtaaacaccaaaaggcaacaaaatttcctgcaaaggaaaagaaaagaatacaaagatggtttgaagcatacattttctgatcaacattcgagagatatcccgacttggcaccaaatagagatagatataccaagaacgaaccctcatatccccttgtatcagttcaaatccgtacaaactagcttgcaacggatattatatctttgggccattagacatcctgccagtgggtacgtgcaaggtattaatgacttagtcacaccgtttttcgaaactttccttacggaatatttaccgccttctcaaatagatgatgtggaaataaaggacccttctacatatatgacagatgaacaagtaacagatttggaagcggacacgttttggtgtctcaccaaactgctagaacagattactgataattatattcatggacaaccaggtatactgagacaagtaaagaacctgagtcaactagtgaaacgaattgatgccgatttatataatcatttccaaaacgagcatgtggaatttatacagtttgcgtttagatggatgaattgtctattgatgagggaatatcaaatgggcactgtaataagaatgtgggacacataccta

SEQ ID NO: 6167 - DNA, 321 bp, Saccharomyces pastorianus
  modified_base (272)..(317): a, c, g, t, unknown, or other
aatcggcgtcgatcagagggaggaagtagtgcacagaagttgtcttcaaagcatataaattttgataaattcgacgactctgatgaagaagaagaagaagaagtagccaaagccataaaggcacgaaagagaaagacgttgaagaatttgagaaaagactcagtgaaaagagggaagttcaaaattcagttactaccaacgacacaggattctaaagcattgccaccaaagaaagaatcatcaattataaattcaagagatcgttggttgannnnnnnnnnnnnnnnnnnnnnnnnnnnnnnnnnnnnnnnnnnnnnataa

SEQ ID NO: 6168 - DNA, 672 bp, Saccharomyces pastorianus
  modified_base (623)..(668): a, c, g, t, unknown, or other
atgggtaagggacacgttaagttcgatgaagatgaaagtgcggccaatgcggctgctatcactgataggaaggatgacatgcaggtaatatcaaagaacgatgagcaaatacgcatggatagtgacgaagaaagtgacgaggatgatgctccacaagaagaaggactgcactctgggaaaaatgaaatagaatcacgttttactgaaagggaagaggccataaggtcggaacaatcacagttgaagtctaaaagaaggaagcaaaatgaactttacgctaagcagaagaaggtgataaccgaggcagaggtggttgaagagacaattgctgaactccccgaagaactactagataatatagatcagagggaggaaagtagtgcacagaagttgtcttcaaagcatataaattttgataaattcgacgactctgatgaagaagaagaagaagaagtagccaaagccataaaggcacgaaagagaaagacgttgaagaatttgagaaaagactcagtgaaaagagggaagttcaaaattcagttactaccaacgacacaggattctaaagcattgccaccaaagaaagaatcatcaattataaattcaagagatcgttggttgannnnnnnnnnnnnnnnnnnnnnnnnnnnnnnnnnnnnnnnnnnnnnataa

SEQ ID NO: 6169 - DNA, 159 bp, Saccharomyces pastorianus
atgctgctgtcgtcgcccacgaagaagcagcagcaccggcccgtggcggcgatgggcgccgccacggaaacggaaacggaagccgaagccgagaccgggacccccgcggacgagacggagccggagtcggataccgaggtggaggtggagacggtgtag

SEQ ID NO: 6170 - DNA, 813 bp, Saccharomyces pastorianus
atgtctttttttgacatcgaagcacaaacctcaaagaacaagtctcaaccagaaccagaatcctcaacaaatcagaagaccagagaattaagcgatttgatagaaaggttcgccgaacaatcacgaatactggagaaggaatgcaccaaaataggctccaagagggactccaaggagttgaggtacatgatcgagacagaattaataccgaactgcactagcctcagggataagatcgaaggcaatatcgtaattcatccaaatggaaaactctcaggtgacttcaggaaccttaaggcaaaaaaccagtccttacagcaatcgtataatcaaagaaaaaatttgtactctttgaaacccgctgttcaaccggcaacctccaggggaaggaacgacgctcacccgcgaaccgaggccatacgacaagatcctgagtccagctatatctccatcaaagtgaacgaacagactccgttgctgcacgaagaagaacagcaccaactacagctgcaagaagaacaagaacaaacacaagagcaacaaaaggaacaacagggattgtcccaggaagaactggatttccaaaccatcatccaccaagaaagatcccagcaaatagggcgcatccacacggcagtgcaggaggtgaacgcgatttttcaccagctgggctcgctggtgaaagaacaaggcgaacaagtgaccgatatagacgaaaatatctcgcacttgcacgataacatgcaaaacgcaaacaagcaactgaccagagcggaccaacatcaaagccaacggaataagtgtggcaggtga

SEQ ID NO: 6171 - DNA, 324 bp, Saccharomyces pastorianus
  modified_base (246)..(246): a, c, g, t, unknown, or other
  modified_base (286)..(286): a, c, g, t, unknown, or other
atggttgctttcactgttgaccaaatgcgttctttaatggacaaagttaccaatgtgcgtaacatgtccgttattgctcacgtcgatcatggtaagtccactttgaccgattccttggtccaaagagccggtatcatttccgctgctaaggccggtgaagctcgtttcaccgataccagaaaggatgaacaagaaagaggtatcactatcaagtccactgccatctccttatactctgaaatgtcngacgaagatgtcaaggaaatcaagcaaaagaccgacggtnactccttcttgatcaacttgatcgatccccaggtcacg

SEQ ID NO: 6172 - DNA, 1095 bp, Saccharomyces pastorianus
atgtttaacataaatttgctttcaacgccttcttctagagaaccttctcctcaaggcgactcgtccccaacgtcttctgtaaaatgtaagagggatagagacactttttccagctcacagaacgaattcgacggcaaagtgtttggagtttctttggaagattccctgcgagtcgcccacgaagaggtggccatcgaacaaaacattcacgaatctgagttcattccgatattaatagcgaaaaacgggcaatatttgaaagaaaatgcattagacacaatcgggattttccgtatcgcaggtagcaataaacgtgttaaagaactgcaaagtatatattccaaaccatctgatttcggccgaaattttgaaggctggagtgatttcaatgtccacgatatcgcaactgtattaaaaagatacctgaacgcattaagtgaacctttagttccattagcattatacgatgtcttcagaaatccaattctgcaaaacccccaaatagacgaagggaagaaagaaatcatcgaggactacaaagacatctacatgctcttaccacaaccaaacagacacctaatactatatttagttgggttgctgagtttgtttgcgaaaaacgaaaagaaaaacttgatgcctgcaagcaatttagcggccattgttcagccatcaatactttctcatcccaaacacgaaatggacccaagggagtatgaagtctccagaacggtcatcgagttcctcatcacgcacgcttccgacataataccaaatgaagcaaagtcaaacaaaaacgccagccccaattcaggaatggtggcgaagtttagcaacgtagttgttcctgaaatggccattgactccgatgacgaagagcccccaatgccttcaatagataaccacatgctgccgaagtcacgtgcgcactccgactcgaacaatttcatcctgcagcctgccgtatcctgcagccccaccgacctcgacaagaacggcctctctgtaccaagaacatacaacgggaagaaccctgagtgcagaatccctttcgcccaaactcggcaaattgcttggcggccgcagcagcaataa

SEQ ID NO: 6173 - DNA, 348 bp, Saccharomyces pastorianus
atggtagttaacccgttcacgaagatggggcttacatcacaaaactcccaatttatgggaacgtctgctgcactaaagatttttttcactgatttagaaatttccggaccgataccatcaccttcgatgaatgagactgtgtatcttcccgtggaaggatctggcttaccagtgtatcttccgatggaaggttgcttgacggtagacaaaaaccttctcgaggtgtttcttagaaaagtgtttctcaacattattattatctgttatagtaatatgttattcgctcctgctaatgctgctgtgcgtattctcaccgagttagttctagtacgaataagggatttgtga

SEQ ID NO: 6174 - DNA, 183 bp, Saccharomyces pastorianus
atgttcaactgcctcacaaaactcgtgatattggtatgcttgaagtacgtggccagggctttactgaaccgctccacgggcttgatcatgaaggacagaccggatggagaccaccatatcaagtcgtgcaacgagtcgtcctccaggatctggtacaacttatggataaatatcgcattttga

SEQ ID NO: 6175 - DNA, 1059 bp, Saccharomyces pastorianus
atgaacgaagaggaaatggcatccgcttcttgtggtcttgctgctgcagaaacagcaactgcagcagccaatggcggcgccgaggggagcgacattcccgaggacgccaagaaacatggctcgaagacgctggtagggcctcgacctcctcaaaatgcgatatttatccataagttgtaccagatcctggaggacgactcgttgcacgacttgatatggtggtctccatccggtctgtccttcatgatcaagcccgtggagcggttcagtaaagccctggccacgtacttcaagcataccaatatcacgagttttgtgaggcagttgaacatttacggcttccacaaggtgtcgcacgaccatactagcaacgacaccaacagtggcgacgatggtaataccaacgatgatgtcaacgcaaacgacgataacggtggtaacaagaacagcagtggcgaagaaacgaccggcgccggctcgcaagagaaggaaaagagcaaccccaccaagatctgggaattcaagcatagctccggtattttcaagaagggcgatatcgagagcctcaagcacatcaagagaagggcttcctcgcgcatcaacagcaggaagaactcgagtaaccagaactacgatatggactctagtataagagcaagaccctcttctgcgcaagacccggcttcaacttccagcgccttcagtacctacatcccgcaaattccgggcgccagcagctctatccctgaatgtttctctcacgtgccttatgaaaacgcaaaccacggcccgttagaattcaataacccggatgcacaggaaacgagcagaccgcttagtttccaggacgaaactctcacccatttgaaggacatcaatttcgatatgatcaaaattatagagtctatgcagcacttcattccctgcagcacagtttctgttcgcaaagtttcaccttcaagaatgtcagcaaaaaaaaatccgaaaacatcattaaggaccaccaaaaccaactcaagatattcgaaaacgatatgctcactttcaagcagcacgtga

SEQ ID NO: 6176 - DNA, 1140 bp, Saccharomyces pastorianus
atgccggaagatccaaattatagcgactcctatggagaaagccataacagcaagccgaacatggtgtctccctataaagattctttctttaaagaagtgaccccttctaagccaaatgtgaggtttggtaacgatgatgttaatatttttgaccaaaggaaaaaggtgaatgaaatcaacaaaaatagttgtattaaaaagagtattccaccttcaacgaatacaaataacacaccaaacaagtctagcatgaagtctccaaaaggcaaaaatactccgaagtctgatttcgattataaaagtcaatttgaatcaaacgacgaaacttttaaagatgtgaatgatgcagtcaaccgttgctatgcactttgtaacattcccactaagcatgtatccataaacagtatctctgatctggcacagacttttgaaacacttgctgtaggaataactcatgaaacgaataggaaagctgaatgtgaacgaagcaaaaacgcaatagattcattgtactaccatgaacagctggaaaaaaaagaacttaatgaaaaaagcctccagatggcaattgatcatttgctgatagtaacaaaacaaaatttaagacaagctgatgatacaaacaaattgaaagaaacagaagtgcttaaaagtttttttgaggagattgaagaggttgatgataataaaatttcgattaacaatctagagcaacagttacttgaagaaaaaaaggcaaacaatattcttagaagggattactataaacttcaagaacgtggtagacgcttgtgtcacgaatttcaagatttacaaaacgattatgcacaacaagtcaaacaaaaggagtgtgagttgcagaaacttaaaaatgaaaataaaacgttactcaacatgaacaataatttgaaagcagagaaaacccaattttctcaaaaggagaaacaatattttcaaaaatatacatatatagagaaatacatgacccatgtcaaagaagaatatagtaagaaggaggacgaatgcgataaattgaaatttattattgataacaacgtgaaaaagatagaacgcctagaaagagcacttcagatgccaattattactccaaacagttttctaacggcaccatccaggaag

SEQ ID NO: 6177 - DNA, 1488 bp, Saccharomyces pastorianus
  modified_base (1055)..(1086): a, c, g, t, unknown, or other
  modified_base (1445)..(1445): a, c, g, t, unknown, or other
atggtaatagaatctgctactgctacactgtctccatcaaagacaataccgtcatttccccatggtaatctaaccaaaagcatgtcggacaaccgtatacgtcgtccgtccgctcctcccattagaaaactaaagtcttctttgaagatagcccatagcgatcttccttcaagatccaagtccgatttttttctaacttcacctgaaaagaacgttcgatttgctattgaactaacaaccgtcaaaagatttgataaaaacgcggagccaagttcaatctcgaatgagaactcgcccaccttatctcctgtcgacaactatacggccactgatgatattcaattattcagtagtgatgactgttggttcaacgactcttcattggtcactaacctgctgaaaaatgaaaagaagtttcgttacatgaattctttaaataacatgttcaagttagatctttatgattccgaggacgaagatgaggaggatggcggcatcgaagaacatagaaacgttcaagccggttatgactatacgtatgattcgataacgtccaagaaagttccctcctataataaaccagtgggttcatcagatgcttcctcccttgcttcgcaagcgactaatatctgtgattggaagcttcactgcacagacttggtttcctttacacaaacatctcccctattcactaaaacgctatctacctccgatctacacgaccagctatccaattatctaaatggccaaaatataaagctgcactcactcactcaattagatcatgactcaagtaaaattgtggggctgctatacgttaaaaatttgagttttgaaaaatatctggaaattaaatttactttcaactcgtggaaagatattcattatgttacggccaactacaacaaaacggttaatgctgatatcgatgaattcaaatttattattgatttaaatagtttgaagtatattttactcatcaaaaaaattatcaccatggaaaagaatacaagcagctgtccactcaacattgaattatgctgcaggtatgacgnnnnnnnnnnnnnnnnnnnnnnnnnnnnnnnnggtaaaaattatcaccttttcatgactaccttcaagaagggcggtgaaacgaaggaaaagattccagttgtcgtcgagcctgcttctcaaacagatgcagccatgtcgccgaaggaaatgaaagcaaggttcgtctcctcgaatcccactctttcaaggtttttacctcaatcaagaaagttcagcgaggatacagattactataatacatctccattgaaacatctttatcataatgatacgacaagctgggttaagcccaagagattgaacgttgttttagataaacttgaaaatgctacccctcctcctccttcttctgctttggctaacgacaccgccagaactggtaaaataantaaagataagaacaatgtgctcgccccaccaaccggccagtaa

SEQ ID NO: 6178 - DNA, 2268 bp, Saccharomyces pastorianus
atggacgaattgcccaccacaccggtcaggcttataataggagagcctcagcaacgcgaacaggaatcaggtaacagtttgcaacagcataagcaaccagtgtctcactcggattcacatgccgtatcagattcgaattatgaatttagctcccccggctcttcccaatttattatacatccccacgaaccattgagtaagaagagagaatttccagaagatttagaccggtcgattgattatggtagaacaccaccccgtaacagcaatactaataataatccgttggaaaatattgatataaacaaaatgtttgacgatactaagcccgctgcgggtgctacccgtgtcgatgaaactgaagattcgaatggcaagcacgtctttgctttgaatgattcgcctatcagaattgaaatgtcctctccagaaaagcaaagtgataaaagttctaatgaaggtgaggaaaataaacacaacggccatgtcaataaaaagctaaaattacaattggaatcggtacctgacctaaaacgaagctcgaccgaaaatggtactaataataaggaagagattatgtcatctccaatggcaattgatatgattgacaccaacgtaagtccaaataagttcattttaaatgatgggattgcacgaaatgagagcttcagcatcaacgctgacaaactcaatttagaaaacgatattaatgacaaacaagaagaagaagactttataaaatcaaacactaacaatgtcggtgataacgatgttgattgcgacaaagaacatgaagagggaagtgacataacaaattcgcatataaacaggctcaccccgctatatgaaacttctgcaaggaacttgaataacgacggagaggacagaaaccactacgataatgacagtcaatttgatattagacatgacaactttcagattgttgcaaagagaaacgaggaactaacagatcaaatttatcagttgaatcaaaacttgaattctttgatttccaaaaacgagtccgtatcttttcagtatgagaaattaagtaaaaatcatcaacatctaatagattcatcaaacgaaaaaattgaaaggttaaatacagaaagagaaaatggcattatcaaagtggagaagttcaaaaaaaggatcaaagaactgaatactgaaattaaagtattgaactccaatcaaaaaatactacaagaaaaatttgatgactcaataactgatttagatcaattaaagaatgaacatgaaaagactgttaataattttcaacgaaatgaaaagcttttgaatgacaagaacgtagaactggaaaacatgaaagaggaattaagtatcaacctcgacaaactatccgaatcacaagtaaatataaatgatttgagttctcgtgtagcacaattgaatgataagatcggagatattcataacactttagactccaaggaagacgaattgaacaatttgaaattgagtctaaaagaaactttatcaatgtctaaagattttgacgatgcagaccttataacacaacttaatgaactaatatctacaaagaataccttacaacaaaaactaagtgatttaggtagcctgaatgatgataatttaaaaaacttaaatgacaaattaacggaaaataaaaacacactaagtctaaaagatgcagagataaattctttgaatagtgaaataaatgaactaaagaaacaaatcgatttgaaagatgaagaattcaagacatggcataacaactatgagaatgtagaagatgaagccaagatacgcagtgctgaagttacggaattgaataaagacatcgaagatttgaaagaatccaagttacagttacttgaaacaatttcagaattagagaataaagtccttaaagttgaaaatggatataatttggagaaggagaaatttgagaaaacttcattagagttagaaagtttacaactgaaaaatagtaacatccaagcagaacacattaaggagttagagaatcttcatgagaatcttgtctctctacaaaatgaactgggcatatcgtcggacagaataacaatactaacaaaagagaatgagacactcaaagagcaaaatagcagtactagtagcagtgtcgctgtaagcaacaatcaaaagaataaagatgatgagcatattaagtcgttagagagacaaatccaagattggaaggaaaagtacgatatgaaagaaaaggatacaaatcaaaggttaaactattag

SEQ ID NO: 6179 - DNA, 783 bp, Saccharomyces pastorianus
atggatcatttaatagaaaccactttcagagtaaaaacccagcaggtaatcataccggatcagaaaatagaagaggatgaggttccgttgcgtcggtggcagatggagctcatcatgctagacgcaaaaggtaacgaagtagaggctactataatatctaaatgcatataccatttgcatcctagttttaaaaagcccagaagaaaactgaattcatcaccctttcttataaaggaaactggctggggagaatttaacctgcagattgaatgcttctttgtagacgatgccggaaaatttaccattgaacatgacttaacgtttgaggataatgcgtatgcaattgattatgctgttaatattccatgtggatctcaaattcttagaaatgagctatccaaatattttcatctaccgcaagaaattgtgagccagcaagaagaggaatcgctccgtatggctgatttatcctggattaaaaccctaactttcattgacgaggatgtgatgacggacgttgttcaaatggtattgagcgaccctgcagtacaaaacgcagtcgaaaaccatcctagaagagaacagttctttatgttcataactcaactacccgatgaactgctaatgaaggtccagaagtttttaaagaagttaccaaatgatggagctgctgaactagacactacagtttccgatttggatgcgactagttttccagaacttaaaaacggatttgttaatcgtaagatccgtggtggaccaaataccttgaagccatcgtga

SEQ ID NO: 6180 - DNA, 2490 bp, Saccharomyces pastorianus
atggtcaatatttccgatttttttggtaaaaataagaagcctgcaaggtcctctagacctatagggaaagcaagagcatccaaaccagaggttattgacctagatgaagagtctgataaagaaccgagccacgaaacacctaaaaaagcccttgcaaataagataattgatatatcagagactcctgaatcagataaaaaactacctattccctcaataaaaaaggcaccttcgctagttacaaagccacccagtgtaaaaaagaatcaggcttttgctaaaacttcagatagcaatacagacgttacggctcaagacgtactggacaagatcccttcactggatttatcaagtgttcatgttaaagagaatgtcaagtttgatttcaaaaatgcaggaacaaatgtggactcagatgctattgcttctgaggtaagcgattttcctgaaggacagccaaattgtttattaggcctcaccattgtttttacaggtgtattacccactttagaacgtggtgcgtctgaagcgctagcgaaaagatatggtgcaagagttactaaatcaatttcaagtaaaacatcagtagtagtgttaggtgatgaagcaggacccaaaaaattagaaaaaatcaagcagctgaaagtcaaagccatagacgaggaaggcttcaaacagttaattgcaggaatgcccgctgatggtggtgacggcgaagctgctgaaaaggctcgtcaaaaattagaagaacaacatcatgctgcagccaaagaagcgcagttactggtcaaaaaggaagaagaaagagctaaaaaactggccgcttctagagtaactggtggccacgttaagaaagatgatatgattagggaagaggataagttgtggaccgtgaagtatgctccaacaaatttgcagcaggtttgtggtaacagaggaagtgtgaccaaattgacaaactggttggccaattgggaaaattcaaagaagggtggatttaaaaacgctggtagggacggttctggcgtttttagggcagcgatgatctacggtccgcctggtatcgggaagaccactgctgctcatttgattgcaaaagaactcggatatgatatcctcgagcagaacgcgtctgatgttcgttctaagactttgcttaacgccggtgttaggaacgcactcgacaatatgtccgtcataggttatttcaaacacaacgcagaacctcagaatttgaacgggaagcatttcgtaataattatggatgaagttgacggtatgagtggcggtgatagaggtggggttggtcaactggcgcagttttgtcgtaagacgtcaacgccgttgattctcatttgcaatgaacgtaatctaccaaaaatgagaccttttgatagagtctgtctggatattcaattcagaagacctgatgccaacagtatcaaatcaagattaatgacaattgccatcagagagaagtttaaattggagccaaatgtcattgatagacttatacaaactacgagaggtgatattcgtcaagttatcaatctcctttcaacgatatcaacgactactaaatgtatcgaccatgaaaatattaacgagatctcaaaggcatgggaaaaaaatattgctctaaagccttttgatatcgcgcataaaatgttggatgggcagatatattcagaagtaggttccagaaacttcactttgaatgataaaattgcgctgtattttgatgactttgattttacgcccttgatgattcaagaaaattatttatctacaagaccgagcgttttgaaacctggccagacacacttacaagctgttgctgaagcggctgattgcatttcattaggtgatatggtggaaaggaaaatccgtagtagcgagcaattatggagtctattgccattgcatgctgtcctttcatctgtctatcctgcatcaaaggttgctggccatatggcaggaaggattaattttacttcttggttgggccaaaattctaaatctagtaaatattatagattgctgcaagaaatacactatcacacaagactaagcacatctactgataaaattgggttaaggctggattatttaccaactttcagaaagaggctactggacccatttttaaagcaaggcccggatgcaatttcatccatcattgaagtgatggatgattattacttaactaaggaagattgggattctattatggaattttttgtcggacctgacgtgaccgctgcagtcattaaaaagataccagcggcagttaaaagtggatttacacgaaaatacaatagcatgacacatccagttgcaatttataggacaggtgcaacaatcggtagtggcggtgctactgccagcaatagtacccctgattttgaagatgtggttgatgcagatgacaaccagttcccgcagacgatgaagaggctcaggatagtggtacggactgaagaaggataa

SEQ ID NO: 6181 - DNA, 129 bp, Saccharomyces pastorianus
atgtgtcatgctattgtattttcgtgtaaatccacttttaactgccgctggtatctttttaatgactgcagcggtcacgtcaggtccgacaaaaaattccataatagaatcccaatcttccttagttaa

SEQ ID NO: 6182 - DNA, 753 bp, Saccharomyces pastorianus
atgacccattggcagcagcagctacccttgacagatacacaaaagaatgagctcgataaaagcgtattgcgatacttgaattggaactataagcaaacagtacagcgtgaccgtggtcaggattacgagagtattcggaacaccatcgtaactctgtctaagtttctgttagaacccgtggaccagcaagaattttcaaacgacaacgacgacaacaacaacaacgaaggtatagcggatgttgatgaactactactgccaagaaaatggaactccatcgtcagactgcagcggaaaattattgacttggaacaaaacacagaggctcttgtatcccagattaacgatttaagctcccaagtagcagaactatcacaatcaatgcctctcgctagtagcggtgccagcgctccaaacgttttgaaatgggtaccaagaagctcaccaaactattcggtcaacgtagaatcgtccattacgtccataaagttacatcccaatctaccgatagtgttcgtagccacggaccatggcaaactatatgcattcgatctactgaactactccatccctttggcgtctttacaaactcacacaaaggcaataacttccatcgacgtgttgtttactaactttacgaatgcgaacactaaaaaccacttactggtggctactgcatccaaagacctgcaaatccatgttttcaaatggatctccaacgaatacaaatttcaacaaatcagatccctatag

SEQ ID NO: 6183 - DNA, 159 bp, Saccharomyces pastorianus
atgcttcttcgagttctgctgtgggtgagggtgcacgctcaggtatcacacctttggctcttaagatatcattccattcgctatcttcagattcgtccacctggacctgaaacattggctcgttttgcattgcggcgcctgggtttggtgctttgttaa

SEQ ID NO: 6184 - DNA, 471 bp, Saccharomyces pastorianus
atgaataaggaaataagcctttctattgaggagacaaatgccatacgggcaaaattaggtctaaggcctatcccggtcggggaagagaacgacgtgggcaatgaatcattgtcagtggaagaaacaaacaggcgaagaatttctcttgggttgaaacctatggtctctcaagcaagtacacacagctcccccactactgttcatattgccactaaggcagatgcacttcgagagaaaataacgaagtttcaaaagactaacatacctttaagagaggcacagatttttgaagagcctggagccaatcacgactgctcgtggctgaataatgtgaatgccactgcgacctcaatattaaaggaacccaaaactcacaaaggattttcccaaggtgaaggtaagcgaaagagggtgaagatgccgatctgcataatgttcgagtatcgtataatattaaggaacttggtttaa

SEQ ID NO: 6185 - DNA, 378 bp, Saccharomyces pastorianus
atgaatagagatagaaaacaaaagaggatgaatttaaacgtttccagtttagatattgaagaagaggagaaagactcgctcacagacattcctctaacgattggagcagaacagggaatcatgaacatgccaacaactaaatctccaaaactgctaacaggaaaaataaaagtaaattttgatgaaatgaataatatttcagacgaagatggtggagactttaagccggtaaagataagaaaacgcaaaatcaaggactcaaaatcaagtaaagtgaagaagataaatatcgctcctaaaatggaagctgttaaactaatagacgaagatgagagtttgtcttggatgggcgaggaacaaccagtgaccataataaac

SEQ ID NO: 6186 - DNA, 462 bp, Saccharomyces pastorianus
atggaaaataacgatggcactgccattttaaacactgggttagaaccacgtgctgaagttacccagcgattgcctttcaaaactaatcaagatgcagtaaaggaagctagtcctgcaaacggcgtaactagtagcagcgatgaagacgcacatgtacctgttacggaattacacttgaaatcacacgaatggtttggcgattttataacgaaacacgaagttccacgcaaagttttccattcgtccattggttttatcacattgtatctatacactcaaggtattgattataaaaaggttctatggcctttaatatacgcattcgtcacattgtttatttttggatttgacaagataaactggccctttttcaatatgctttattgtaagacggtggtgcttatgaggacaacgagattcccgtacacggggtatgtgctactcctgggtggtgttccttaa

SEQ ID NO: 6187 - DNA, 303 bp, Saccharomyces pastorianus
atgacgggcagccttggagacgatgacgaaaagtgtgccatacttgtgctggactgctccggctgcggctgtgcctgtggcgtagactccttaatcatcaccttgtcaccaccggaatttctccttcgcccacaaaggctcctcgagaacgatggaggcaaaagggtacagtttcttgacccaggattctccatcctattgatgagcaaatccattttccctctaacgaataaacctaaaaaaacagcaaatgcaaaaatgaaagtgatagagagctgcttttcttcgaaaagtagagtttga

SEQ ID NO: 6188 - DNA, 525 bp, Saccharomyces pastorianus
atgatgtcgtccttcatagactcaatcaaatcagcgtctctctcaagagacctgacaatggccttgggctccaacaacttcaagagcgcctccacgatcaatgactgcaagatgggcttgtacttgtccctgttgccggcaagacccgccaactccttcttggtctcttcgaatatcccgtccagtgattgttcacgggcggaaaggaccttcaaacgcatcttgttggctatcgtagacttagtgatttgctgcgatagcgtggccttcttcatcttgctcttgaagttaccatcgatgttgttggtctcgtttctcacgatgttagtcttctcaatttcgtactcttggtcggccttcaactggatttccttagccttctcttcggcctcctttctgatgaaagcctgcatcttgttcaattcatcgtttacttggttgggtgtcaaagcagtgatagcggaggacatgctgtatcgttgggtgcgtggcctgtgtgtgttctgtgtcttctttgcgagttag

SEQ ID NO: 6189 - DNA, 393 bp, Saccharomyces pastorianus
atgctgctcgtgatgattgctttcaatgtagcaataatattgtttgctaccgctctggcgaaccaaagatattgggctcaaacgcttgtgttaatcactataatgccttgggcactagagttgtcctctacagcggctacagtggtcctgagcaactcaatgcctgataaggatcaggatttagcagcttcttcaataaacactgtagtaaattattctatatcgattagtttaggaatctcaggtaccgttgtttcccaagtgactgagaaatcgaagagtgttcttacggagtattgtagctgtttttattatcaaaataaaagaaaaaaaatggttaatgctttgaaacgctatttgaaatttgtaatctctagaaacattcaaagttga

SEQ ID NO: 6190 - DNA, 270 bp, Saccharomyces pastorianus
atgtgtttattctataaattgcttttcggtagcctttttcttagacttcacaaatgtgctcgatgcatacactgcagcgacataaatcccaagcccgctcaacccgatacccaagtaccaagaacaacggtatcctttcagagcattggatcctccgtcattaacttgagactcaattgtacctgcaacacccagtccaatggatatcgaatagttcactaccgtattgaccaaagatgctgcaaggccttgatgctcgtgtggcattga

SEQ ID NO: 6191 - DNA, 1452 bp, Saccharomyces pastorianus
atgctacgagtaagttttaccccgattaaaacgatcggctccttcgtgccaggctacaataccaccggctaccatgcggccaagaaaactttaggacttaacccttacagcaccggcgcctccatcaactcttgtaggctcctgcattcttcaaaactgtcaaataagaggctggcggaggataaatataacgaagaacttctttcaaaaataaatgcacagaatgaaccggattctaagcaagatcacgacgggccaataccaaaggaaagtacttcttcctctgacgagtcgttactacaacatgcacatggtcatagccatacgcatttgcatgctaatccgctgctgtcgctcaacatacagcaaattaaaaagaatcctggggtgaggataacatggataggactagcatcaaacgtgggcatggctgtagggaaatttattggagggatcacgttccattcccaggcgttgctggctgattccgtgcacgctctcagcgatttagtttcagatgtcttgaccctgttttccgtccactatgcgtctcgtaaaccaacttcagactacccttatggctatggaaaagttgagactgttgggtctcttgcggtatctacaatattgactatggctggtatatctattggttggtcctcgttatgtgccatcgtggggcccattattccgcatacaatcttggagtcctgggctggtttgatgggggagtcgcattcccaccctcaattagtcacacagcaggctactaatgtgaacgctgtatggattgccgcaggttctattttgatcaaagagtgggtatttcaggcaacaaaaaaagttgccatccaaacacactctaacgtactaatggcaaacgcttggcatcaccgcgtcgattctttaacttctttggtggcattagtggccattacatctagttatttttttaatattcaatcactggataatctaggtggactcgtggtatctggtctgattataaagaccggtgggcaaggcatattatcttcgttgaaagagttggttgatcaatccataccatcaactgattctcgttatctggacattgaaactgtaatcaaagacagcatcagcggtttgaaaactaatttggattttgaggggccactaagcgtcaaagacctcaccatattagcttcaggccctaatcttcgtgctaccgcaacgctggaagtgccaactctacattcggggcaagaagttgggattaaatttttagagaacatcattgcaaccataagagaagatctacgttcaaaagtgccaaatgtggggaagattgacatcgagtttgttgatgcgaagtccgcctctaataaggatctagaacaacgccatagtaataattcaagccacactcacactcattccaaccgggctgatgatcatagtaagggacattag

SEQ ID NO: 6192 - DNA, 210 bp, Saccharomyces pastorianus
atgtccaatctattaaacaaatttgctgacaaactgcacggtaacgaccatgacgaacgttatgaaggcgacaacgacgatgagacccgggatcaacgccaccaagtgcatcaacagagagagttcagaaaccagggttccaaggcggatccctacagcgatcaaaaccagggaactttcctcaacaacagcaagcacaatccggtctag

SEQ ID NO: 6193 - DNA, 726 bp, Saccharomyces pastorianus
  modified_base (652)..(707): a, c, g, t, unknown, or other
atgtctaagattacttcttctcaagtcagagaacacgtcaaggaattgttgaagtactccaacgaaaccaagaagagaaacttcttggaaaccgtcgaattgcaagtcggtttgaagaactatgaccctcaaagagataagcgtttctctggttctttgaaattgccaatctgtccaagaccaaacatgtctctttgtatcttcggtgatgctttcgatgttgacagagctaagtcctgtggtgtcgacgccatgtccgttgatgacttgaagaagttgaacaagaacaagaagttgatcaagaagttgtccaagaagtacaacgctttcatcgcttccgaagtcttgatcaagcaagttccaagactattgggtcctcaattgtctaaggctggtaagttcccaaccccagtttctcacaacgatgacttgtacagtaaggtcaccgatgtcagatctaccatcaagttccaattgaagaaggttttgtgtttggctgttgccgtcggtaacgtcgaaatggaagaagatgttttggctaaccaaattttgatgtccgttaacttcttggtctctttgttgaagaagaactggcaaaatgttggctccttggtcgttaagtcctccatgggtccagctttcagattgtacnnnnnnnnnnnnnnnnnnnnnnnnnnnnnnnnnnnnnnnnnnnnnnnnnnnnnnnntaagaagatcgcaatttag

SEQ ID NO: 6194 - DNA, 798 bp, Saccharomyces pastorianus
  modified_base (440)..(498): a, c, g, t, unknown, or other
atgctaaagaacgatagattagccactttacaaccaacatggcatccaacttctgaagaattggcaatcggtaatatcaagttcacaactttcgacttgggcggtcacattcaagctcgtcgtttgtggaaggactatttcccagaagtgaatggtattgtcttcttagtcgatgctgctgatcctgaaagatttgatgaagcccgtgttgagttagatgccctgttcaacattgctgaattgaaagatgttccatttgtcatccttggtaacaagatcgatgctccaaatgctgtttctgaagctgaattacgttctgctttaggcttattgaacaccactggttcccaaagaattgagggtcaaagaccagtcgaagttttcatgtgttccgttgtcatgagaaatggttacttagaggccttccaatggttatctcnnnnnnnnnnnnnnnnnnnnnnnnnnnnnnnnnnnnnnnnnnnnnnnnnnnnnnnnnnnttcaacagctttgtaataatcaagaaattacatagagggtgcactacctacctttctacgtacatcatttgtatccagaccattcaatataatgggttgaagtacaaatatgttacatgtaaaatatacatacatatatatatatatatatatattaagaatttatcttctcatcttgcgtggacgagactcgtcgtcaccatccatggttgttcttttaccattcttggcaaaatattctttcttcttttctttgtccttttgtgcctttttttcttccatcttggccaatttttttag

SEQ ID NO: 6195 - DNA, 2655 bp, Saccharomyces pastorianus
atggttttactcaatagaaaagaagttcaacttgatggaagagagctggccacagataccactgatagaaacacatgggaaataaaagaaaccggtgaacgtataagtggttatgacaattatttgaaaagattggagttttatggaaaagaaatatttacttgtgaagttactggtagaaactttatttcgtattttagggcattaataagcgagaaagagcaccgaaaaaatatcgaatcccttttaccaaaagagttaagagaggccatagcaaattttgccaattttaactcaacaaggaaggtttcagctcttgtagataaaacatatcggcgattcagcaaccggttcttcaatggtgaaatagtatgcttgaaaaattcccaagaaaaaaatttgcttctgcctaatccagaagaagaagtccaatcaggattccagggtacccacattgacaacactttgtttgttatcagagatgtgtttccatcaaaagagatcatagatagtgaaactggggaaaatttagctccaatctcgtcattacatattatcacggaatacccaaatcagcaacctaaggggagggctttcattgcaggccacgatcagattaaaagaccaatctcgcgcttttcaaagtttttggtggcctgttttctcaatgaaatactggtaaaagtatccaataaaaaatacgctccatggagggtgaggcagaagtatgtaaaaacatataatgtgaacccggcatgccctccagaaatggtgaattatttaccagacgaggtggaaacagctacctgcaaagtatatacaccgttaaccataccgctagaggaagatgttgatccagaaaggtcaccatctaaaatgcgaaaaattagttgcgagatttcaaccaaatttcatgatatatatggcactgcgacctccactgatcacaattctttgcagtcgattttcgatgacagacatttgccgtttacaggaccaccgaccccattcaagagtattcgctatttagatagttcgctagaatacaaaactgccgacacgcaatggtatagagagtgtgctcaattttcaatagaaagattactcattgtataccgttttttaaattctttcgggccctttattggtattacacattttaactttgatgaacttctaacaagcatcaaatgcaataatccggaaattcttgtagatgaatttgtgaaaatttcctttgctgatgttgacagcgaaggaaattctagaaggggtaagaaaccgcgaagagacaagtatggtcgagacactaaaggcaatatatgtcaacgggaaacggctaacattcgtaatccaaatgggagttacatcctacttagcaactttacaagaaaccaagaggtgagaaaatttatcacagataaaaacaccaacttttttaagtgctcgatatttaaaggtgagcctgttaaaaatgacgttattgatgtatccccttataataaagcagctaatctctatattgaaatagtctgttctttactatgcctgataatggataaaagaggtgattggacttgcaatgttatggaggaatggattgaagaaaaggagggaagggaagaaaaggacgaaacgattgttgaccaaattgtagaaaaatgtcttaatcatgaaaaaactaactgggctgaacttctatctgataggaaatttgaaggcggtaattggttaatctgtttgctgggggtacttcaagacacaatgcatgttgcaatctatactgatatcaccaaacgttttacagaaaaggtggtaccgtcagccattaatttcgacaatttggggagggaattatggcaaaacttttgcaagaatttatctacaagagacaaaattgatatattatgggttcttgtggatctagtttctaatttttcgagctgtgttaagcagttggtagatgagatcccttttctacaccatgggatccgatcagaattagatagtgttaaaaatgaatatcatatatcgaaagaacagctgaaaagtgtaactgaggagctcaatcagcttcatagtaatccattgagggagaaatatgcattaaacgagtgtgaaagtaaagcaaatgaacatggggaaaaaatgtcacgcttatcaaaagatatttcatatctagaggcaaaactaattgaaagcaatttcgaaagattagagatgttaggcaaagatagatatggaaatcggtattattggatggattcgaatggttcacctttatttactggttggtcgggtcattgtcattataactgctgtttcttgtgggttcaagggccctctgaagacgatgcgattttttacttggatatcgacagagcctctttgaggaaatggaaatcattagcaaaaacaagtgactgcgcccatgcgacaaaggaggttttttcaatgaccagatcgtcaaacgggtcttattttcacacaggtgatggtgaggatgtaatgatgattgattcgaatggaacattgctcctatctaccgctccatcccatatacacaggaaaataatagcagaaactcctgaaggactgttactctctccccaacagtggataattcttaaaccgaagtggaagatatacgcttgt

SEQ ID NO: 6196 - DNA, 450 bp, Saccharomyces pastorianus
atgagtatattaaaagataaacatcctttgagtattgagaagcttgctaaaaacctattcagagtacacaaggatgaaatcactgaagcactcatgaaagacgcattttctcttggagaatatgaaagagcattttttgagaagcggcatgaattactttatcctttagattttcatttggaagagttaagtacatttgatgatgaatttgttttcgaaaagaaaatagaaaaacaagaggatatccttacgaagctcttgaactaccgaaggcataggcatattgattacacggcacactgcaggacaaaacttcaaaggtcgaaagaggctgcatatcttaatgctcaggatatattaaaagatataaaccgtcatcttttctcaaggcatgacagtatcgctgtagatgactcggaagatggtcataggaaagaatcttttatttga

SEQ ID NO: 6197 - DNA, 1770 bp, Saccharomyces pastorianus
atggatggttttagtttagctggagcagtaagtgttggtactttaatcgctgcatatttatattttggcgggaggttttctatagcgctggtgatcttagtgggctatggtatttattgtaatgaggctggtggtcaggtggaggagaaagtgatttctagcccagaaaagaagaaatcatgctgtagcgataagaaaaatgcagatggtgaaaagactggtggatgctgctctgaaaagaagaaaaatggcgccggtggtggtggatgttgttcttcgaaagacggtaagaagaaaagcggaggtgggtgttgttcttctaaggatgggaagaagggaaaaggaggagggtgttgttcctcgaagaaaaaaactagtaacgacgaaaacgaaaacgttgacgttgttcctcaagttcaagaatccaaaaacttccctgtgacagtagattttacggatgtattcaagaaacccgctaagaagagatctggaactcccaaggtgttttccaagaataactcatcaaaatccaaaataggtaaaaaattaagtgtttcaaagaaaattggtcaggatggattgattaagactgctcttactatctcaaacgaaacgcttttgagttcccagatatatgtgctgtatagttccttgcaaggtgcagcttccaaagctgcgacgaccgttttcgataaactaacaggactatatgaattagttaacaaaccaaaacttttgaaccttgatgacctatccgactttgatgactattttgtggacgttcccgctgaaaatgccctatatgttcttgttttaccctcttatgatatcgattgtcccttggactatttcctacaaactttggaagagaatgctaacgatttcagagtagatagttttccactgcgcaagttggttggttatacagttcttggacttggtgattctgaatcatggcctgaaaaattttgttaccaagctaagagggctgattattggatttctcgtttaggtggcagaaggattttccctcttggtgaaatctgtatgaaaacgagcggaaatacaaaaattgaggaatggacttcattgttagcggagacgttgaaggatgatgaaccgatcatttatgaatacgacgaaaacgcagattccgaagaagatgaaggagaagaagataacggtagtgatgaattgggcgatgtggaagatattggcggtaaagataacaacggaaaattttcgagtgccgatgaaatcaagcaaatggtagcgaaagatagtccaacatataaaaatttgacaaagcaaggctataaagtcatcggttctcattcaggtgtcaagatctgcagatggaccaagaacgaactacgtggtaaaggatcgtgttataagaagtcgcttttcaatattgcgtctagtagatgtatggaattaacgccttctttggcatgctcttctaagtgtgttttttgttggagacatggtacgaatcctgtgtccaaaaactggagatgggaagtagatgaaccagaatatattttggaaaatgcccttaagggacattattccatgattaaacagatgcgaggtgtgcctggtgtcattgcggaaagattcgccaaggcgtttgaagttcgtcactgtgccttgtctcttgttggtgaacctatactttatcctcatatcaacaaatttgttcaattactacatcaaaaggggataaccagttttcttgtgtgtaatgctcaacatccagaagcctga

SEQ ID NO: 6198 - DNA, 585 bp, Saccharomyces pastorianus
atggtggaatgtttagaaattttgaaaactgtgcaaaatcatcaaaggacggttttcagattaactttggtgaaaggttttaatatgggtgacgtcagtgcatatgctgacttggttcaacgcggatccccatgttttattgaagttaaaggagctacgttcagtggttcatccgatgggaatggtaatcctttaactatgcaaaatattccgttctatgaagaatgtataaagtttgtgaaggcatttacagcggagttacagaggcgtggattatattacgacattgctgccgagcatgcacactccaactgtttactgattgctgatactaaattcaagataaacggggaatggcacactcatatcgattttgacaagtttttcgtactattaaactcagggaaagatttcacgtatatggattatttggaaaagacacctgaatgggctttatttgggaacggtgggtttgcaccaggcaacgtaagagtgtacagaaaggataagaagaaccaaaataaggagaaccaagataaaagctcctcttcttcctattccagttcaaacaacaatatttattaa

SEQ ID NO: 6199 - DNA, 375 bp, Saccharomyces pastorianus
atgtggtatgattggttatatatgaatgatttattttatattatacatcgagagatatcgccttccggcgtcagctacttagttcatggacttgatcaacttgttgatgaattcttcacggttaccgaaagaaccaccttggacaaagtgcttgaactttcttgggacaccccaaccaccagatgggttggacaacttgaatggccacaaaaagttgttggcttgcttgaagtgtgggccaacggtgatgatttcgtgaatcaaatcgtcaatagacaagattccgtacttacccaagttagcttcaatgatagcgttgtcggacaatgggactctttgcttgttgatcttaccgaaacctctcttgtagactaa

SEQ ID NO: 6200 - DNA, 2784 bp, Saccharomyces pastorianus
atgacttctttatatgctccagggacagaggatattaggcaaaggctacgtccctttgggtttttctttgaaaaatcattgaaagatctgatcaagggtattaggtctcataacgaaacaccagaaaagctggaccaattctttaaacaagtattaagtgaatgccgggaagaagtgaactctccagatctaaattctaaaacaaatgcggttcttaaattgacctatttggagatgtatggctttgatatggcatggtgcaactttcatattttagaagtcatgagcagtaataaacttcagcaaaaacgtgttggttatctaggtgcctcacaatcattttacaaagattctgatattttaatgcttgccaccaatctactgaaaaaagacctgaaatatgatggaaacaatgatgtcgtgaaggttggaattgcattaagtggcctttctacaataatcaccccctcattagcaagagatatagctgatgaccttttcactatgctgaacagcactaggccatacataagaaagaaggcaataactgccttatttaaagttttcttgcaatacccagaggctttaagagacaatttcgataaatttgtttctaagctggacgatgatgatatctctgtggtctctgccgctgtgagtgtcatttgcgagctttcaaaaaaaaatccacaaccgtttattcaactttcacccttattgtatgaaatcttagttagcattgacaacaattggattattataagattactgaagttgtttaccaatctttcacaagtggaaccgaaattaagagcgaagcttttaccaaaaatactagaattgatggatagtactgtcgcgacttccgtgatctacgaatctgtcaattgtattgttaagggaaatatgttagaagaagatgacttcgaaactgcaatgacctgcttagagaggctgcacacattttgtgattctcaagatccaaatttaagatacattagttgtatattgttttacaaaattggtaaaatcaatacagattttatttctcggttcgatcaactgatcatacgcttactatccgacgttgatgtctccattaggtcaaaggcaattgagttagtcgaaggtattgtcaatgaagataacctaaaaccaatcattcagacattgatgaaacaatttgtggatgaagatgtggtcattctacaagccggtaatgtcgtgtatgaaagatcaaaaagaatccccattataataccagaacattacaagatcaaaatggtcaacgttattatatccatttgttctggtgacaactattccagtgtcaatgactttgaatggtacaatgcagttataatcgatttagccatgctttgtcaagaaatatctgacaagactcttggatataaaattggagaacaattgagaaacttaatgataaaagttccctcaatgagggaagtaactattaccaatatcataaaacttatttcagaggaaagtattaacagacagttgcctaccataatgagagagtgtatttggtgtcttggtgaattttctgcgcttgtggagaatggtgatgacttgataaaagtaatgattggtaacaccggctactattctcacagtgtacaggaggtgttgattttagcgctcctcaaaatattcagtaactggtgtaacaatgttcaagaggataaaggcattgaagttgaactgatgttaaaggaactaataaagttttttgaaaacttatctttttcaagtacatttgaagttcaagaaagaagcgttgaagttttagaatttctaaagctaagtttagaagctttagaggaggactcagacggtctgccaatgttactaagtgaagttctaccaagttttttcaatgtctatgaactggcaccaatcgcgcgtggtactcaatcaaagttggaaatagatgaggccattgatttagagactccatttttaactaaggaggaatgtgatgaattgttaaatgatcagaagattgactcgatgggtagtgacctgatttcggatacatcaatggacgagcagggtgatccagaatatattgattattcagatacatcgtatgaagaaaaggagaaattgaacgatcatgacaatccgtttgagattgagagaaaaaaagagcgcatgacaaatccttattaccttgatgaagaagatgaaggaaacgctgagaaatcaaaagatttattagttttgagtgaagatgatagctctaaaactaagccggagactatcagattaaatagacaggataatgacttgaaatccttgagcctgtttacagttgaaaacggtgaggaaaagaagagcaagaagaagaagaagaagaagaaaagagtccaggtcttatccgaccaacctgttgttgaaatcacctcgaagaagaaggaagtttctcccaatccccatggcaatgaaacatctaccacatctactaagatagacaaaatcaatctgaaaatgcgttccaaacttgaaaattttgacttttccaatttcggaacatcgagtaattcggtaaaagaatcacagcaaggaggtgaccttaaagaagatgatgataaagaattaaaccgttcggaaggcaaactcaatgaacacggaaataaaaatgattttagtgatgctgaggaggttatagtcattaagaagaagaagaaaggcaaaaaatctaagtcaaaaattaaacaaaaatcaaaaaaggaaaattctccagaatcaaaagaataa

SEQ ID NO: 6201 - DNA, 357 bp, Saccharomyces pastorianus
atgtccggcggtgctgagccgcatattgttgctcaatacgcttatgtcttgggcgaattggagagacgagccaaggccggtaagcggttggcctttgtccatctggtcgagcctcgtgttaccgacctgaccctggatgaaggcgaaggggactacgatgaaggtagcaacgatttcgcttactccatttggaaaggccctattgttaaagccggtaactttgcgttgcacccagatgccgtcaaagaaaaagtcaagcgtgacagaacgttgatcgcttacggcagattcttcattgccaaccccggacttggtggaccgtttggaaaagggtctgccattgaacaagtacgatag

SEQ ID NO: 6202 - DNA, 714 bp, Saccharomyces pastorianus
atgccgatcaaggtcggtaacactcagcttgcgcaccgcgtggtcatgcctcccttgaccaggatgagggcgagccatcccggcaacgttccgaacaagcaatgggctgccgagtactaccgtcagcgtgcgcagagacccggcaccatgatcatcaccgagggtactttcatctctccccaagccggtggctacaacaacgcccccggcatctggtctgacgagcaggttgctcagtggaagaacatcctcttggccatccacgacaaaaagtcctttgcctgggtgcaactgtgggcccttggcagggcgtccttcccagacgcgatggctagagacgggctgcgctacgattctgcatcagatgcagtgtacatggaggacacggccaacgccgcaaaggtcccagcacacaccttgaccaaggacgatattaagcagtacgtcaaggagtacgtacacgccgctaagaatgccgttttcttggccggcgctgacggtgtggagattcatagcgccaatggctacttgctgaaccagttcttggaccctcgttccaacaccaggaacgatgagtacggcgggtccattgaaaacagggcccgcttcactctggaggtcgtagatgctgcgtgtgtggccatcggccacgacagggttggcttgaggtttgtctccctacagcgctttcaacagcatgtccggcggtgctga

SEQ ID NO: 6203 - DNA, 2163 bp, Saccharomyces pastorianus
atgagttggaatattgagaagctggactctattgtcacaaagaggctcaaatctcaagtttacgcagtttcattagcatcagcggttagagaaatagtccaaaattctatagacgcacatgcatccaatatcgatgtcacaatcgacctctccagtctgagttttgctgtttacgatgatggtactgggttgagcccggatgatctgaataagttgggtactagaaatcacacttcgaaaatacgaaagttaagcgatctaacaacaataaatacttatggttttagaggcgaagccatatacagcatttccgacatctcgaaattgtttatttgctccaaaactaaggattacaactctacatggatgagaaagttcccgtcaaaaagcgttatgttaagtaaaaatatcaagccccaggtggatcctttttggaaagtccagtcttggagccaaagaaaatcaggaactgtagttattgtcgaagacatgctatataatttaccggttcggcgtcgaatcctaaaggagcaaccttcctttagaacctttaacgcattaaaggcagatatgctacagattttagtagccaatccattggttgcacttactgtatcgtatacggacgaatccaaaggccacacggacgtccttttccgttcaaagaatataactgaagaattaacaaaacaccagagaatgtctcaggtattgagaaatgtgtttggggcaataataccgccagatatgctcaaaaaagtttccttaaaatttaatgattatcaaattgaaggtattatttctaagataccgattcgattgaaaagcctacaattcatattcattaatggtaggcgttatacagatagtatattccagacatacattgattctttgtttcagcagcaggacttcggagacagcaatttcagtttacttaagaccaaaaccgtgaggaaaccttatcgatcccaccctctcttcatttttgatctacgttgccctcagactatcgatgacctattacaagatccggccaagaacattataaaaccttctcatgttcgtacaattgaaccattaattatcaagactgttcgttctttcctaacatttcaaggctatttaccgcccgataaatcagataagtcgttggaaatagtcagctgctcacaagccaatgtaacatccatcagcagacaaagtcaagtgagcaaatgtggtcaggtcttagattccaaaatgaaaatggcacggattatcgtaactccagggacatctgttgccaataaatataaagtaagcaaaactacattgagttctgaaaggataaacaaaataagactttatggtcagaaatcgattttgcgaagcaagctttcttcgaggcattatgatacaggcgtcttacaatattgtgataatatagaaaacacaatagaggacctttccatttccagatctgttttggctaattatgaggtgattaatcaagtcgacaagaagtttgttctcatacgatgctccggttcatctatctacaaaaccccaatattgatattagttgaccagcatgcttgtgatgaaaggataaggttagaagatttacttcacagtctactctcagaagcactaactaggaccttcgtcacacaagatttgactgattgctacatagaaattgatcgtaccgaagctgacttattcaggcattatcagtgcgaatttaaaaaatgggagatcaattatgaagtaactaatggcacactagaaacgtctcttttgataattaaatcgctacctgaagtgctggcatccaagtataatggcgacaacaattacttaagaatggtcctgttgcaacacgctcatgacttaaaagacctcaagaagcttcccatgaacctaactcgtttagaaagccacactttaactgataggttatattggtggaagtacgcaagttgcatcccaacagtgtttcatgaaatccttaacagcaaagcgtgcagatctgctattatgttcggagatgaattaagtcggcaagagtgcattattttagtcaacaagctttctcagtgtcaaaatccattccaatgcgctcacggtagaccatccatggtccccattgcagagttggatcaaaaaaatgaaacataa

SEQ ID NO: 6204 - DNA, 1053 bp, Saccharomyces pastorianus
atgctggatattcccaccgatatagacggtgcttcgcttatcatatcgtccggaatcaggatattgcccttcttgggcgttcttgaagggagttgctggggagggtccgcttcgaatttatcaacggcaaacgacactcttttcaacgaaaccgtagataaatccttcactgagagagcgggagaaggtaatgctgaaggggagggagagataggagtgggcggtttactcacggtaggagatgctaccttcggggaagaaagctccttcacacgagggattgtgttgatgttgttaccgttactggatggttccttcttagatgagttatctacaggtgcggcggtattgaccgcgggcaatgcttttttgactgcagaaacagtggaaggggcagatcttttgccaaacagagacccgaagatcgatcgtttggatttttcgctccctgacgagttgctcctcttgatattggcatttgacaaagaagagattggtagagggagctttcccttggcaggagaaggggttccggttgcgcttatgtttgaatttgatagccttggcttggacgagaccacagcattggatatggaagtggagcgtttcttcttcacgagagggacgctagccttgctatcgtcaccatttatcacatcatcggcatctccatcgtctgcggccgccaaactggtacggccactactgctaacaggagtaaggagcggcaagttctcagtgcctgatccaaacccgcttccatcgccgtcagtcaagttcgacttctcgttatttgaaagggccgcattcgatatggacgaagacctcgcacgcggcttgctgttgctgttgttgctactgtccaccacctttggtgcagaggcagatgaagacggcctcgacggctttgtattcaccttccgcctgctcttacccttgtacagccagtccacgggcacatcaaactcggtgttcgttatcatgacctggttagtatcaccacttcttgcacttccttgttgcagaacctatgtttccgctttttttctataa

SEQ ID NO: 6205 - DNA, 216 bp, Saccharomyces pastorianus
aatcttgatttttttttccttcctatctttttcatcctcttccctcttcctcttcctcttcttcccttgcgtttctacccctcttcccttattacagcgaaaagaaaaggaacacgccgatggcagactcaaagaaacaaacaaacaagcaagcaaaggaaaggaaaggaaaggaaggggagccgagaccaaacagctagcgactccccaccttag

SEQ ID NO: 6206 - DNA, 1089 bp, Saccharomyces pastorianus
atgtcctccgtagataacagacctttgccgttcatataccagttcacagcgggcgctattgccggtgtctccgaactactggtaatgtacccactggatgtggtgaagacaagaatgcaattgcaagtcaccacaacaagcaagcccggtgtggctgccgtgaaggctgtaggggagcattacacgggtgtgatggactgtttgaccaaaattgtcaagaaggaagggttctcgcgtctatacaaaggtatcacgtcgcccatactgatggaagctccgaagcgagccattaagttctcgggaaatgatacgttccaaacgttttataagaagcttttccccacgcccaatggggaaatgactcaaaaaatcgctatatgtagcggtgcgtccgccggcgccgtggaagcgtttatcgtggcgccctttgaacttgtgaagatcaggttacaggacgtgaactcgccgttcaagacgcccattgaagtcgtgaagaactgtgtggtgaaagggggcgtcctgtcgcttttcaacgggttggaggccaccatctggaggcacgttctttggaacgccggttatttcggtatcatatttcaggtccgaaagatcttgccggcggctacgacaaacacggagaagacaagaaacgacatgattgctggtgccatcggtggcactgtcggatgtctattgaatacgccgtttgatgtggtgaaatcgaggatccagagaagctccgggcccctgaggaaatacaactggtccctaccctcggtgtttgtagtataccgcgaagaagggttcaaggcattatataaggggtttgcgccaaaagtcatgagactagccccccggtggcgggttgctgttggtggtcttcaccaatgtcatggatttcttcagagaagccaatacggcaaaagtaatggtctgtccggcctcatcctcgtctactacgtctacattatctatatatatatattcttgaaaaataaaaagtgctcgcctttactctctagatcaccttctacgcgcctgcacaagataaagcatggagaagaaaagaaaaaagtctggattgtgtag

SEQ ID NO: 6207 - DNA, 1020 bp, Saccharomyces pastorianus
atgttgctgaatagtttttacagttttttacaactaccgattttttcgaatggcgcaaataaggggatagaaccaaactgtcccatagatattccattgtcatgctctaataaaacagtaataaacaactcatgctgttttgaatatcctggtgggatattcttgcaaacccaattctggaattactttccaagcaaaagcgatttgaatgaaacggagttggtaaacgaactaggtcctctaaattcgtttacaattcacggattgtggccagataattgtcacggtggttatcaacagttttgtaataggacgttacaaatcgatgatgtttactatctgttaaatgaaaaggaatttaacaataataacgacacatctttacaaattcccggcaaacaattattagaatacttggatttatattggaagagtaataatggcaaccatgaatctttatggatacatgagtttaataaacatggtacgtgcatcagcacaataagaccagagtgttatactgagtgggaggctaataacgttgacaagaagagaaccgtttatgattattttagaataacctataacctcttcaaaaaactggacacgttcgctattttgaaaaagaacgatatcgttcctagcgttgataaaacttactccctggaacaaatcgaatctgcgctaagtaaagagtttggtggtaaacaagtgtatataggctgtgatagacacaatgctttaaatgagatatggtattacaaccacttgaagggttcgcttttaagcgaaatgtttgtacctatggattcgcttgccattcgaacaaattgtaggaatgatgctgttaaatttttccccaaagggtatgtaccaccttttaggagaaggcctaataagggggaaagctacagaggcgtcattcgtttatccaatatcaacaatggcgatcaaatgcaaggctttttgatcaaaaatggtcactggatgagccaagtacacctgctaattacgagttaa

SEQ ID NO: 6208 - DNA, 249 bp, Saccharomyces pastorianus
atggacgtgctacctgacggaaatactatagactttgacgcactggccaacatgtttctaattaagtataaagattttatactatcgaaattcaagaaaactgaacccgtagaaaatataaagtttcaaaatttagttcgttcaaaccagttggcagaagggctttttggacagacacaacacctctgttcgatttatgacaacccctcgtggcactctgttgtcttagagaccttagatctggattaa

SEQ ID NO: 6209 - DNA, 573 bp, Saccharomyces pastorianus
atgacatctatgggcattcaagggcccaatggagaagagtctaaatttcaatgtggatctgttgaggtctatgaatgtaaccagtgtcgcaatgtcacgaggttcccacgctataatgatccaatcaagctgttacaaaccagacagggtagatgtggtgaatggtgtaacttattcactttgattctaaaatcatttggattagaagttcgttatgtctggaatagagaagaccatgtctggtgtgaatatttttcgccatatttaaaaagatgggtccatgttgattcttgtgaacaagcgtttgatcagccgtatatctactcggttaattggaacaagaaaatgagttattgtattgcgtttagtaaagatggtgttgttgacgtcagtaaaagatacattttgcaaaacgagctgcccagagatcaaattaaggaagaggagctaagttttctgtgcaaattcataaccaaaagactaagatttacattaaatgacgaagagatataccaactagcatgtcgcgatgagcaagaacagatagagttgattactgggaaggcaacatga

SEQ ID NO: 6210 - DNA, 261 bp, Saccharomyces pastorianus
atgaagcaaggtgttttgttgccaaccagaatcaagttgttgttgaccaagaacgtttcttgttacagaccaagacgtgaaggtgaaagaaagagaaagtccgtcagaggtgccattgttggcccagatttggctgtcttggctttggtcatcatcaagaagggtgaacaagaattggaaggtctaactgacaccactgttccaaagagattaggtccaaagagagcgacctgcaggcatgcaagctggcactgccgtcgt

SEQ ID NO: 6211 - DNA, 4086 bp, Saccharomyces pastorianus
  modified_base (4018)..(4018): a, c, g, t, unknown, or other
atgacacctgaagctaagaaaagaaagaatcaaaagaagaaacaaaagcaaagacaaaaaaaggctgccgaaaaagctgtccacaataaagaattacacgaaacgccagaaagtaccgttagcattgactttgacaatgattcggtgaatccaacaggatctgacatgactccggaatccgatgttcttccagtctcatcgtctaccaatatttctaacgataacgatacgcagccagaagtacttgaagttaaagagttgcatgatgaactgcacgacgaatcttgtcaacatgatataactgcggacacaagcgacttagccaacagttcaatgattgaaagtaactcctctattatccaaacagaaccaaatgtgtctcaagaggacacaaaggactcgtacggttttcctttgaatgaaatgtcatttgatgaagttgctgttgagtctaacgacactaacgagcatgcccagaagacaggtatatcagacatgagagaggagtcttcttccgaaaataactacgaacattatgacagtgtaattattacatcgaatgatagtacttcttcacatcctaatcattttctctcttccaatggcaatatcctttctccagaagttccatctggcaatacgccagcacaagatatctctcttgacacaacagatagtagaaaacttgaatgccattacggtgataaagatacaagcttgcaatcaagtcatgaactttctgaagaccttttcgaagaagaagacgactcattaaaacaacaggcgcatgtgccgcctgaagaggaaaaggaggatacaacagacgaaaaagatacagaccatttgttcgggtctgatacagtatcatttgaaaatgtaattaagagttctggggatgatgcttccgaactttttcaagataacgaaaataatgaaaaacttccttgggaggaagagctttcccaatcaaatggtgttgaagaacaaccctttggtcagaccatgagtggatctcaagacgtggcggaaatttcagaaagacacaatgaagtgttgtcatgggatgaagagtcgaaagagtctaatggttatatggacaacatccaaagagatcaacaatttgaagaaggttctgaaaaaagctctgaaaaaatcagtacacaaggctccaacattcaaaacagttactacgcggataaacttgagattgaagatgacaagtcagcagataaaggaaactccgagcttccatctgccagtgaaggtaatattgaatcggacaatgacaatcgggatggaactggaagcttgtttgcacagagtaccgaaaggccagaagaagtattgccgtgggaagcagacgataaaaacaccgaagtgacaagtgaatctcatgaaaatcatgaaggcctattcgcctctaccgaccattacgataaacttccttgggaagtttcagagaaccaaatatcatcaggaaatacagaaaatagcatgcaagctagtactgagggaattcctgagaaaaagttttcatttttagaagaagacgatgatctcttggacgatgacgatagttttctggcctcttctgaagaggataattccgttattgatagcagcaatatagcagacttagaagtagaaccggtcgaagaaagaagagcctcaaagtatgaaccctctaacgaacaacatactaagatactccaaaaacaagccctgttgaccaatactgctggcattgtcacacctcaacaatttcatggtttagcgaagagtgcttcaaatggtcctggtcgacaaaccagtataccatctgtagttacgcctagtcctccagttgtgaaagtcaaccattccatcaacaaaatcaatgaagagaaaaagaaatccgatgcttatgattttccattagaaattattcctgaaagttctaaaaaaggtcatgcaaaaccagttggtgtaccaactcaaaggtttggttcagcgcaatcttttagctccttggaaaagccaattccacagagtagaaaaagctctccaacaattaattttggcgatccaaagaggccacccgttatcccattaggaacccaggtgcctcgctcttccagaactaactctggcgcctcacagtcgcctctcaattatgctttcccaaatccttacaatcttcagcagcaacaacagccctctagccaaccaagggttcctttaccaaatgtgaacctaccgcttccaatcttacaggtagagactactgcttctgttccaccgattcgagcaagaggaattagtaacgcctctatagggagcacaacatcttttggtgcgagacgttcaactcagtatggagtcaataccgcattatctccagtttcaccatatggccaagctgcaataaacttaccgacagcgaacaagtatgcacctacttcacccgcgacgcaacaaggtcaatatccatccattgcacagagccttggcggtccagttgtaaataaccctaattttgtgaaaactcatagaggtcatacaagttctattagttatactccaaaccagaatgaacatgcctctaggtacgcacctagtaaccagcaatcttatcaaacaccccacgctccacagcctgttgctcctggtgccacaaatctaaattatcaaaatcaacctagaaattcctatgttgccccagtgattcctaacgttcaacctgttgcctcaatgattcctaacgttcaatctgttgctccaatgatttctaacgttcaacctgttgccaacatgaacgctcctatgaacactcagccacctatgggaccatccgccaccattcaagctcctatgaacatgcaactccaccagatcgttgagaaccctgcgaacttgccacctcctacaaacataccgccaataggaattacacgtcaagctatgaacaatgctccattggttcaaaaagcaaaagatgttatggtgattgacaacgaggctatactacatcgtcaatttcccgtttttcactggagtcctgcaaataaggttgtgtatgcggttccatctgctccagatcaatctcaatatatgatttcgtcaagttctgtacaggagatcaaagtgataccgattgatcaaatagttaaaccgaatgacatgctcaagagtttcccaggtcctttgaacactgccaagttgaaaaagaaggatttgacaaaatggatagaaattacagcgaaggccatctctgagaaaaatcaattagccgatatgactatatggctgttattggaaatgaagctttccgatacgataagctggaaaaatatttcaaacctattatacaattctgacgagctttcggtttatttatcacaaccctttccagactctgagctggttccgaactcttacaggctagatgtaagctgccaaatgagagtcctggcgttcttacaaacaggaaatcacgacgaggctcttcgtttagccttgagcaagagagactattctattgcactattgatcggaagtttgatgggtaaggataaatggtccgaagttattcaaaagtatttatatgaggagtatactacagggccaaatcatcaaaaggtaatggcaaattttctgttccttatttttcaagtatttgttggtaattctaaaatggccgtggaaaatttttatgctaacaaagaagctggccaatgggcattaggaaactggaagagcatcgttgctgctgtgctgatcaatatcccagcgaatgttgaagaagcgacatctataccacctgtcgttcttgaatttttgatagaatttggtatctttcttaccaaaaaaggaatgactctggcagcccacacattgtttattatcggtaatgtaccactttcagagcaaccagtaatggcagattcagacgtagtattccatagtattggaaacccaagtactgttgaaagtgtcctatggtgtgaaatttatgagtatatattctcatgcgactctnaactcaaagggttccatcgattttgccacagaaagtatacatgcatccatttacaggaacaagcttga

SEQ ID NO: 6212 - DNA, 4638 bp, Saccharomyces pastorianus
atgacatcacgagtttcgagactggaccggcaggttatattaattgagacggggtccacccaggtggtccggaacatggccgctgaccaaatgggagacttggccaaacaacatcctgaagacattctttcgctgctatccagagtataccccttcttgctagtcaaaaagtgggaaacgcgtgttaccgcagccagggccgtgggaggtatagtggctcatgccccttcttgggatccgaacgaatcggacttagtacgaggaacaaatgaaggttctcccttgaacaacgctcaagtgaagctagatcatgaaatgcaaataaaactggaggaggcaacgcaaaataaccaattaaatctgctccaagaagatcagcatctgaattctttgactgattggaaattaaacgagattttgaggtcaggtaaagtgcttctggcatctagtataaacgactataacgttcttggtcgagcagatgacaatataaggaagcagaccaaaacagatgacatcaagcaagaaatacctacatacaatacgttcgacaaggcgaatgaaaataagaataacgccaacaagaaatcggcaagaatgctggcaatggcgaggcgaaagaagaaaatgattgcaaaaaacacttccaaacatcctgtagatataacggaaagctcggtttccaagaccttattgagtgagaaaaatatgacgagcactacagcatcttcacctacttcttccacaactggtcagccaaatcccaagctggaaatcaccgaacaaacagatgacaataaactgatgatagagtccacagtgagacccttattggagcaacatgaaattgttgccggtctagtttggcagtttcaaggcatatacgaactacttttagacaacttaatgagcgaaaactgggagataagacatggcgctgccttgggtcttcgtgaattagtgaaaaaacatgcccttggggttagtagggttaggggaaggactagagacgaaaacgatataagaaattctaaaagcttagaagatctggcgtgtcgtcttcttacggtttttgcgttggacagatttggagattatgtctacgatacagttgttgctcctgtacgtgagtcaatcgcacaaaccctagcagcattattaatccatttggacaataatttgtccattaaaatcttcaattgtttagagcagctggttttacaagatccaatagaaacaggtctacccaataaaatatgggaagcaactcatggtggactcttaggaattcgttattttgtcagcattaagactgatttcctattttcacatggtttactagagaatgtggtacaaatagtactatatggtctaaatcaaaccgatgatgacgtgcaaagcgtagcagcttcgattctaaccccaataacaaatgagtttgtcaaactaaacacatccaccatcgatacactggtgaccactatatggtcattgctggcccgtttagatgatgacatttcatctagtgtcggttctattatgaatcttttggcaaaactgtgctaccatcaagaagtgctagatatattgaaagataaagccctagaacatccttcagaatggtcatttaaatctttggtaccgaagctgtacccatttttacgtcactcaatatcgtcagtaaggaaagctgtattaaatttattaattgcatttttatcaataaaggatgactccaccaagaactggctgaatggtaaagtatttcgtttggtattccaaaacattttactcgaacaaaatccagaactactgcaattatcattcgatgtttacaccgcattgttggaacactataaggtcaagcacactgaaaaaactttagaccatgttttcagtaagcacttacaaccaatactgcaccttctaaacactccagtgggtgagaagggtaagaactatgcgatggaatcgcaatacattttaaaaccttctcaacactaccaattacatccagaaaagaagcgttccatttctgaggcggcgacggattcagacattccaataccaaagagcaatgaacatatcaatatagatgcacctatgattgcgggtgatatcaccttgctgggactggaagtaatcctcaataccagaataatgggggcaaaggcatttgcattaactttgtcaatgtttcaagactctacacttcaatctttttttgccaatgttttggctcgttgtttagaattaccattctcaactccacgcatgttagcaggtataattgttacacagttttgttcttcttggttacaaaagcattcaaatgaagagaaactaccttcattcgtatcagagcttttcagtcctctaatgaacaaacaattaacaaatcgcgatgaatttcctgtctttagggaattagttccaagtctaaaggctttaaggactcaatgtcaaagtttactggctacgtttgttgatgtaggtatgctgccccaatacaaactaccaaatgtggcaattgtggtccaaggcgaaacagaagctggcccacatgccttcggtatagaaactgctgaaaaagtgtatggagaatactatgataaaatgttcaagtccatgaataactcttataagctgctggccaagaaaccgctagaagactccaagcatcgggtgctaatggccatcgatgcagccaaggagtcagccaagcttcgtacaggtagtattctggccaactatgcatcctcaatcttattgtttgacggcctccctccaaaattaaaccccattatcagatcccttatggatagtgtcaaagaagaaagaaacgagaaattacaaaagatggccggcgaatctgtcgtacatttgattcaacaactattagagaataacaagattaatgtttccggtaaaatcgtcaaaaatctatgtgggtttttgtgcgttgatacttctgaggttcctgatttctctgtaaatgcagacttcaaagaaaaaatattgacactaataaaggagtctaattcaattgccgcccaagatgatatcaatctagcaaaaatgtcagaagaggctcaactcaaaagaaaaggtgggttgatcaccttgaaaactttatttgaagtcctcgggccttccattttacaaacattgcctcaattgaaatctattttattcgattcgttatgcagtcatgaaaacgtagagatagaaaaaattgacagagaacagggccaaaaaatagtggactccttcggtattttaagggctctgttcccatttatgtctgcttctttacgttccgatgaggttttcacccgtttccccattctactgacattcttgagatcgagcttatctgttttccgttattcggctgcaagaacttttgctgatcttgccaaaatatcttctgtggaagtaatggcttttaccattcgtgagattttacctttaatgaatagtgctggctctctatccgatcgccaagggtccacagaacttatttatcatttgtcactctccatggaaaccgatgttttgccttatgtgatttttctaatagttccacttttgggtcgtatgagtgattcaaacgaagacgttagaaatttggccacaacaacatttgcgtcaattatcaaactagtccctctagaagctggtattgccgatccaaaaggtctaccagaagaattggtggccagcagagaaagggaacgtgattttattcaacaaatgatggatccatccaaggccaaaccattcaaattgccaattgcaattaaggctacattgagaaagtatcaacaagatggtgttaactggttggcatttttaaacaaatatcatctacatggaatattatgtgatgatatgggtttagggaaaacgttacaaacaatctgcgttattgcgagtgatcagtatttgcgaaaggaagattacgaaaaaacgcattccgttgaaagcaggccgttgccttctctaataatctgtcctccatcgttgactggtcactgggaaaatgaattcgaccaatatgctccgtttttgaaggttgtcatttatgctggcggtccaactgtcagatcaactttgagaccacagttgaaagatgccgacattattgtcacatcatatgatgtcgctagaaatgacctcgcagttttaatcaaaacggaatacaactattgtgttttagacgaaggacatattatcaagaattcccaatcaaaacttgcaaaggctgttaaagatattacggcaaatcacaggttgattttaaccggtactcctattcaaaacaatgtcttagaactatggtctttattcgacttcttgatgccagggtttttaggaacggaaaagatgttccaagaaagatttgctaaaccaatcgctgcgtcgagaaatagtaaaacgtcatccaaggaacaagaagctggtgtactagctttagaggcattgcataagcaagttttacctttcatgctaagaagattgaaggaagacgtcttatctgatttaccacccaagattattcaggattactattgtgaattgggcgatttacaaaaacaactgtacatggatttcgccaaaagcaaaaaaatgtag

SEQ ID NO: 6213 - DNA, 912 bp, Saccharomyces pastorianus
atgtgtactcgtgaattacttacagtcgatgtggaaatgaaagttggattttttactattgatttcacgaaattgctagccgcgagttggaacaaaaaccggcacatcaaaaatagttcaatgaggaacaaatactcaacacataaactatatcgatgcgtaattctaaaggatcaccttcaaaaagcaagccgatattccaagatctgtgacttcatggatgatctcaaaaaaaaaagctcagtgcgaaggcaggtgacgaatgaagacgatgaacaatatggcggtaacagtctgcacgaactacccaggacaataccaaatgtgaatccctataccagaagccgagggtttcggccatcttactcctcccaaggacctgcaacgagaagcttgttcaacaacttttacaaccgttcaagtgccaatacggtaggaaatgacacgatagacactgatagtgttagttataatggtgtttccaaatttagaagaaatagcgtagatatacccctgcaaactcacaatagactggaagtacgacctatagttgacagacaagattatctatggaggggaataaacgcccttgatgacgttaaaagacaggcacaagcaacagagttgtacgaccagtttccacaaggttttgagaacaaactgatgcggttgaggcaagcgcatagcaaactacttcaagtattaagagaccgtaatgctaaactagaggaagagcaacgtcgtgaagtggcagtcgcaacggccgctgccatgatgacaagaacaccatcacccacgggcaaatctgtgggcgacgaagccactagcaacaacatacacagtagcagcgcgactagaaatccaaatgggccaaatgtcgatcctgaagagggaaagtatgtcaagaattag

SEQ ID NO: 6214 - DNA, 300 bp, Saccharomyces pastorianus
atgtggcgcaccagatcgaaacggcgctcgcctcatctccatgggaaaaaagctggcagcaaagagaagaacgagctcaaatcaaaagccaaaaaaaaaaagagggtggccgcgccgcggagctgtgagaagatatgcatccgctttctatatcgcttttggtttcgctgtcggtttcggtttcggtttggcctttggtcatcggtaatgttggtggtgctaagatctcctctcgaaaagtggtatgtgcaacctggtcggtatatcaccgaccatgtgggcactatcgtaatattttga

SEQ ID NO: 6215 - DNA, 579 bp, Saccharomyces pastorianus
atgcatgcgaggcaggcgttgggctttgcttataagcaacggtttcgccacttgatatacgaactgttctttacatctgtttcgtgctggggctaccattacgtttgtttgcttttttgcggtttccggtttgcgatctcgcactatatagatcaaacgcagtttaaggaatcagcaagcctcgtaaggattgtgcatcaggtgcaggtatacatacagagaacaagaggacagaaagtgagaatggctgtgtcagagcgtttgagaacagcaggcgagagtacgtctgtagctagagcgtcgtacccgactggagatgtggaagcggacacgaagagtggcagcagctgcagcattaggagtccggtagacggaagtttaactggccaggaggcagagttggatccgagtccaggggagggggaggaggaggagaaggaggaggagctggttgcagaccatgcggacggtgaggcagttgctacgaggaagaggaagttccagccgttgaagaaccccaagaaagtcacggaaaagaagcaaagtcccggcgccgctgaacttgtcggagagcaataa

SEQ ID NO: 6216 - DNA, 525 bp, Saccharomyces pastorianus
  modified_base (520)..(520): a, c, g, t, unknown, or other
atggggaaggccagttccaggcagtccatacaggtgaataataacactggcgccaactacgggaaggcacccatgccctcggcgggtatgatgaccgcaatgaacccttacatgcccatgaaccgctacataatgtctccgtattataacccgtacggcctccctccgccccacatggcgaacaagcccatgatgacgccctacggttcgtacccatacccgatggctcctcggacctccgttccctttggcatgcaggccagcagcgctaggccctacgaggagaacgaatacggtgccaccggctacagaaataaaagagtgaacgacttttcggactcgccattgagtggcacagcttccgccgggaaacccaggaggtctgaggaaggctcaggcaactccagtgtgggctcgagtgcaaatgccagccccacacgccaacgcacagatttgggccctgcagacgtgattcatgcagaggaatatcacttcgaaaggatcgacaagcttgatccgncctaa

SEQ ID NO: 6217 - DNA, 204 bp, Saccharomyces pastorianus
atgataacaaacgcaaatccacataatttaccatcacgctttcttggaatagtagcttcaacaacagtaccgtatctaccaaaaatctttttcaatttggtgggatcacggcagctccatggcatattcctaatgattaacttaggcttaccctttagcatagagtcttcatcgtcaacatcatcctcattttcgtttttctga

SEQ ID NO: 6218 - DNA, 1896 bp, Saccharomyces pastorianus
atgtcttctagtggtgcaaagccataccgagagaagcctgcagcgaacaatggtgcttcgtcctcgtcttcgtcttcgtcttcttctacatcggcctcgccatcgcctgcagccgctccacgtaaggccgcagccgtgcctgctgctaacgactccgactccgatgaggatattgatggattgattgaagaattgcaatcgaactacggagagagcgaagaatccagtgaagaagagaagcatactgatgaggcccacgctggtcaaagggtgattcccgaaaaggacctttcgacagatcccgcctatggtctgacttcggacgaagtcaccaggagaagaaagaagtacggtttgaatcaaatggctgaaaacaatgaatctttagttgttaaattcatcatgtttttcgttggcccaatccaattcgttatggaagcagccgccatcttggctgccggtttgtctgattgggtcgatttcggtgtcatctgtgccctactactgttgaatgcttcggtcgggttcatccaagagtttcaggccggttcgattgttgaagaattgaaaaagactttggccaatactgcaacggtcatcagagatggccaattgatggaaattcccgccaacgaagtggtccctggtgagatcttacagctggaaagcggtacgattgctcccgcggatggtcgcattgtcactgaggattgtttcttgcaaatcgatcaatctgccattactggtgaatctttagctgctgaaaaacactacggtgatgaggttttctcctcgtccacagtgaagaccggtgaggccttcatggttgtcacggcaacgggtgacgacacctttgtcggtagagcggctgccttggtgggccaagcttcgggtgcccaaggtcatttcactgaagtcctgaacgggatcggtatcattttgctgattttggtcattgctactttgttgctagtttggaccgcatgtttctacagaactgatggtatcgtcagaatcttgagatacactctaggtattaccatcattggggttccggtaggtttgccagccgtcgttaccaccactatggccgtcggtgctgcttacttagccaagaaacaggctattgtccagaaattgtctgccattgaatccttggctggcgttgagatcctgtgttccgataagactggtactttgaccaagaacaagttgtctttgcacgatccgtacactgttgaaggtgtttctgctgatgacctgatgctaactgcttgtttggctgcttccagaaagaagaagggtttggatgctattgataaagctttcttgaaatctttgattcagtatccaaaggccaaagatgctcttaccaagtacaaggtcttggaattccacccattcgaccctgtctctaagaaggttaccgctatcgtcgagtctccagaaggtgaaggaattgtctgtgttaaaggggctccattgttcgtcttgaaaactgtcgaggaagaccacccaatcccagaagatgtacatgaaaactacgaaaacaaggttgctgaattggcttccagagggttccgtgccttaggtgttgctagaaagagaggtgaggggcactgggaaatcctaggtgttatgccatgcatggatcctccaagagatgacactgctcaaacaattaacgaggctaggaacctgggtttgaggatcaaaatgttaaccggtgacgccgttggtatcgccaaggaaacctgtagacaattggggctcggcagcaacatctacaatgctgaaaggctgggtctaggtggtggtggcgacatgccaggctcacaactggctgattttgttgaaaacgctgattgttttgctgaggttttcccggcactataa

SEQ ID NO: 6219 - DNA, 660 bp, Saccharomyces pastorianus
atgtccattagagaactataccatgagaggacttccccatttatatcactggaatttttcccaccaaagaccgagttagggacaagtaatttgatggaacgtatgcatcgtatgactgccctagatccgctgtttatcaccgtcacatggggagctggaggcaccactgcagagaagactctggcattagcttccctggcacaacaggcattaaatataccggtttgtatgcatttaacttgcacgaacactgacaaaaccatcattgatgatgcgctgaatagatgttatagtgcgggaatcaaaaacattttggcacttcgaggcgatccacctattggagaagactggctagattcacaatcaaatgagtctcctttcaagtacgcagtcgatttagtccgctacatcaaacaaagttatggggacaaattctgcgtaggggtcgccgcctatcctgaaggacattgcgaaggcgaggcagaaggtaacgagcaagatccattaaaagatatggtatatttgaaagagaaggttaacgctggggcagattttgtaattacacaactgttttacgatgttgagaacttttatcttttgagtattgttcgtgaacaatatcgcagattacctctgttcctggattatgctatcagtctt

SEQ ID NO: 6220 - DNA, 129 bp, Saccharomyces pastorianus
atgaaagtgaataaaatttacttatatagtaagaaagaaaaaatctgcacaaaagaacatgggtttaaatctttaattaatgaaaattttccaaaaattttcttttttgcctctaaagagaacgggtaa

SEQ ID NO: 6221 - DNA, 1830 bp, Saccharomyces pastorianus
atggagcaaccaccttcgtcgatgcctcctcaaaatgacactaagaagaaggggatactttccttttttcagaacaccaccactataaagagcagccttggtgtaagcaagtctgcgaggaatgagaccaatgtcattactttggatgaccctaatgaggctgctgttgaagagaggagaaatgctttgagcactactaaggaatccgcaaaagaaacgaacgctgtgtctgagacggctaattcagaaagtcaacatacagacgacaaaatcgtgcccacaaagatgtcagaatctactatgggaagcacagagcaattacaatccgacgagactgcatcagttgcaaaaagcaaaagctcttcgccatcctccagaaaagaactgtccacaataagaaaagagcaaatcagaaaggaaaaggaactaaagaggcaacaacgtgaacaggaaaagcacagaaaagaatcattacgtctagaagagaagcgcaaaaaagaactcaaggcagaagaggagaaacagaagcgtgctgaattgaagaagcagaaagaagaagaaaaacgcaagaaggaggaagccagattggaggctaaaaaaaaaagagaaatggataaattgaaaagagaggaggacattcggtcaaaggaaaaggccaaagaaagagcacaatcccgtattggtaatttctttaaaaaggtaagcgattctaacatacccgtggtggaaaaatcagattatgagaaatttttcctgccattttacgctaaagatggagtcaaaacttgcgataagtggaaattaacaaaattacagctggaaaatagtaaaagaaagatagatgacgcactattgaatagcaatactgccaacgacgacgaacttttaagttggctaaagtccaaaaaggtggccagaggtcataagatcaaatgcagggccgttgaggttctacaacaaatgacactgaaagaaaagactgatgacgagcttcatgctctacttgcacaagtcccacacaaatacataaaattctacgaaaatgtgaggcccccattcattggaacatactctgtggatttcactttgccagcaaataatcctttttccacggacggtacaggattcaattacgattacgattctgatgtggaatgggctaacgaagacgaagaaggtgaagttgacaatctggagagcggcgaagaagaagaggaggaagatgacgaggatatgcccagtgagggagaattcgacgggtttctagacacggaggaaaatggcgacgttgatggtctatccggcgccaagagaaaattcgtaggcccactcataccaacaatttgtttaaaatccgactttgaaaacatgtcggatgaaaataagcgatattttcaatcactcaaagcggaagttctcatagaaacaaccgtaccaatagatcctttcaaagaccccaggccaccacccttgccgtccaaacgaagcaatcccgagctacaaacaccgaactctagtcaatctcaaagtcccgagaagaaacagaaaacaataatcacaaactcgaaggacttgcttcgactttttgatggcattcaagatagcacgttctcgctaggtacagtaaccgaaatagcacaaaagaacttgccacagtacaataaacaaacgatcaagaacacgattaaggaatacgccataaggggctcagggaagggtgatttgccccgaaaatgggagatcaaagacgtggcaaactgggaaaatctccgagcaaatgagactacaccaaatccatctacatgcctcgaccaaattaccagtatatag

SEQ ID NO: 6222 - DNA, 330 bp, Saccharomyces pastorianus
atgaacgtggccagtttctctctttcctccgcgctaggctcatcagggaacctcgccagcagcgtgtggaagtacttccacgacgcccggcccacctcctgcttcaccttctcgtctcccatcagcggcatgatcgtctgctgctcaatctccttcagccgggcctcattcttcaaagctgccgcctcctgtacctccttggcgccagcgtccgtcttgatcaggcttggcgtgctgatcgatagttcgttcgaggagaaaaacatccacagcccgacaatgcccagcgctgcgatgatcctgatagcatggctcctcttgactagttga

SEQ ID NO: 6223 - DNA, 462 bp, Saccharomyces pastorianus
atgcaatattttttacttttgtatttgaacatcctgagaaatatattgtggcatattctgccattgtttctgcttggggtttttttagtttggatggaaaaagggtatagatacaagaagaacatacaaccgtcaagatgcacgagaattaggtgctctcgttgtgatacaaagaagaaacatcccaagtggtctaagtataaattttgcttgcagtttttcttgttatatgtttctttagcctcatttaatatattcattcagtggcaacctataggagatgagatatttcataaagaagagcttggacgggtcccactatacccatttctctttggtgccgcactgatccatttattaacgttccatctatttaaggagtactatctgcataatggacctcttgaaacgaatgatggtggtgttcccggtgaaaagagggcagcaaccaagaaatattaa

SEQ ID NO: 6224 - DNA, 255 bp, Saccharomyces pastorianus
atgatgaaaagtattggagaaggcagtgctaaagtcactatcacagagaaggatgaagctcctccaccactagcgatcagacttactaccaaagcaatgagatggatatttttggtgaaaatgctcgaacactcaattgtaccagatgcaatattttttacttttgtatttgaacatcctgagaaatatattgtggcatattctgccattgtttctgcttggggtttttttagtttggatggaaaaagggtatag

SEQ ID NO: 6225 - DNA, 294 bp, Saccharomyces pastorianus
atgtacgtaaccaaaaagatcgggaaactgtttatatatgaatcacgcatctctatcagtctacgttcgtaccttttttggcttttcgagaaaatttttcatttctcgaagctcttcagagatcgcgagcggaacggaaaacgccgccggtcttcccgaaagaaaaaaaaacgaaagagagataatagcggtgggaaaacggaaatcccagcgggtacccggcgcggggatatagtgcacgtgcttttaggcccgctggcaggccgggtaacgagagctgctctggtaatctga

SEQ ID NO: 6226 - DNA, 819 bp, Saccharomyces pastorianus
  modified_base (801)..(801): a, c, g, t, unknown, or other
atgacgaccacatcaacgcttactggaagcacatctttgtcgagcacagcaacggcttcgacttcggcagttagaggtaccgacggatgcgtggtttgcgataccggggcatcgtgccctgattgcccttcaggcgaatactgtgttatgacttcattaacgtgcgacagctgttccaccttctcttgtgtcaagcagcccagctcacaactaaatggtttaaacagtacttccactagttctagttctcatagttctaacaaaaatggagagatcattggagtcacactgggcgttatcggtggtgtagtggttattgttttggtgacgttattttttatcaatgagaaatactggaagcctagaaggcaaagaaacaaggctttgagattagaagagggatcgcgaaattatgggaacgaagacgaatactttgaggacgaagatgaagacgacgatgatgatgatgatgaagacgacgacgacgacgaagacgacggggacatgagaaaggatgaaaattacaccaagttcaatgcgccattggttcctccaaacctcaacgcccccggaaatagaagttctacatccactacgcgcacaagggcctctaatatcctgcccattgcttacatccccggtgtgacaagcgcactgactgctgagaagttgcagtcaaagctacgttcgagcgctaagagacaaaacgcagccggcgacattagatcacatatcacgttgggctcatccatcctagatggcctagatgaagagtacgatgaccacaacttgggcgcaaancagggactcggaagataa

SEQ ID NO: 6227 - DNA, 420 bp, Saccharomyces pastorianus
atgggtaaagagaagtctcatattaacgtcgtcgttatcggtcatgtcgattctggtaagtctaccactaccggtcatttgatttacaagtgtggtggtattgacaagagaaccatcgaaaagtttgaaaaggaagccgccgaattaggtaagggttctttcaagtacgcttgggttttggacaagttaaaggctgaaagagaaagaggtatcaccattgatatcgctttgtggaagttcgaaactccaaagtaccaagttaccgttattgatgctccaggtcacagagatttcatcaagaacatgattactggtacttctcaagctgattgtgctatcttgattattgctggtggtgtcggtgaattcgaagccggtatttctaaggatgtcaaaccagagacacgctttgttggcttt

SEQ ID NO: 6228 - DNA, 120 bp, Saccharomyces pastorianus
atgtcacgccaccagttcgacttaataatgtgtttgaaacagcctggcacacagataggccttctttgcgaaaaatgtgatggaaaatgccccatctgcgactcttacgtaaggcactaa

SEQ ID NO: 6229 - DNA, 552 bp, Saccharomyces pastorianus
atgagcagcttaaaaattacagatagaaaagaagtacctgttagttttagcgagaaaatcgatgagttagtacagaaagaatttgcaagaacggaaaaagagtgtgttcatcccgaagtacgagatataattgtcaagggcaagggtcccggtaaaagtatcaagggacttccagaggaattgtacaataaatatttacaacagtgtcataatgaaaagaagcgacatttggatgatgatgatgatgatactttttttatgcaagaatacaaacgccaatatcccaggatagatacttctagatacgtaccgcacgggactgctgacgtcaacttattaggaataacggactcctacttaaaacatcaagaattaactttaagcacgcttctgccgcggactgtgtcgaaccagtggataatcaataatgatcaaattcaacaaacggctgaaatagttgaggagatgagcagtcagcaaaggaaacagatacataacctggaaatatacagacaaaagctgcaacaccgatacgagtcttcgtctttataa

SEQ ID NO: 6230 - DNA, 990 bp, Saccharomyces pastorianus
atgtctcgtattattgtgaagggtttacctgtctacttgacggacgataatttaaaagagcattttacaaagaggttgcgtcagaagcactctcatcaagctgtcagtggcagcggtccagacctcataacggatgttaagattcttagggacagaaatggggaaagcagaaggtttggttttatcggttaccgtaatgaggaagacgcctttgacgccgtcgactatttcaatggcagttttgttaatacttctaagatagaggtttccatggccaaaagttttgcagacccaggagttccgcagcctatgaaggagaagagaagggaagcttacaagagattcagagagaatgaggaaaaactgcttcaggaacaaaaccaaaagaaggcgaaactagacgataataagcacaccaacatcgatgaagagattcgtaagaacaagcatttacaagagtttatggaaacaatgaagccaagttcacaagtaacatcgtgggaaaagataggcattgacaagagtatagaagacaaaaggcaaccacaacaaccaacagaagatgactcccatgtacaggggaactctttattggcacatgctttggctttgaaaggagatgataaagacgaagcaccaagactggttattgagcatgaaagtgatgacgagtattctgctttcaacaacaacaaggatgaaggtcaagacaatgaaggagaggaagaaaagatgataagtctagataatttggagaacgccaacgcaaccatgggcaatgatgatgatgatgataataacgatgaagcggaaaacgagaaaaggagaagcctcgcccaaaatgagcaggtctctgattttgactggttcaaacaacgtcgtatcagaattaaagaaagcgagggagaagcaagagataagttggccgcagccgctgctgaacaaatgacaacggcgacgctgaagaagagacacaaccagaaccagtag

SEQ ID NO: 6231 - DNA, 171 bp, Saccharomyces pastorianus
atgcaggtaggatttttttctcctactctggtaaaggttttctttgcttcggaaattagaagtttatcagcaaaatgtctaaagactcgtccttgttgttcagcaacatcttctttcaatctcgatgcaatgatatccttatccaaatcaccagcatcaaagttattgtaa

SEQ ID NO: 6232 - DNA, 672 bp, Saccharomyces pastorianus
atggaaaaatataccacttggagagataatggtactgggatagctccgtttttaccaaacacagtcaggaagcccagttcgatggcgacagcgtgttcaatggtcatactggcagtgaaagctgttgttgcgctaccattgattctaatatatagctttaccaagcagaatgtgctgctcggtctaatattgaagctcgtattcagttggaaggaagaagtaagtgtacagggcatcaagaaacgtgatgtggaaaaatccaaacactacccacagaagggaaacctttatatttgcaattgtacttcacctttggaagccctgtcagcagtgctgttagcgcagggacccgtgtcgttgttggtaccatccaacgatatcgtatacaaagtttctgtgaaggaattctttgatttcatcctagcaggtgggttagatatcaagctttacggccacgaagtcgccggactagaccaattgagcaacactgtaaatttcatgttcgccgaggggacctcgtgtaatggtaagagtgttttaccttttagcataagcgggagaaaattaaaggaattcattgatccttcactggccacaatgacccttgcgatggccaaagataaaaatttgagctgcagaccatccagatcaagaccaacaaaactgccataa

SEQ ID NO: 6233 - DNA, 666 bp, Saccharomyces pastorianus
atggcattgaataatttcacggcacccttctgggcaatctttctaagcgttgtttctttttcaagtacttttctgacatttccagattttccttctcccgccgtaatgggaataatatcccgttttctagcttttcctaacagcttctttttttcggctagcatttcctttttggccttgtattctagcttttctgtttcagtttgtttcagcacttttttatttctggccatgatagggtcctttctgtcatatgccttcaagtgcgatgacagaatagcattgacggcagtagagaagtcagcagaaccatcgtcatgcttacttttcttcgatttcctttttcttgggaaatcttcatcttcttctacttcagcgccgtcctcattgtcatctccagatgatttgtcatccgaattgtcttgttcacttgcttcctcttcttcttccgatgcagcctctttttccagtttttttttcaactctaccttattttttttgtgcccatcctctgcgtctcttctagttctctttttctgtgtagcttttactgtattcttaggtcccattataaactactgtgctgagtttttttcaccttacacacttattcaactacagtactacttcaacacattattatattttatgggcatcgattcttaa

SEQ ID NO: 6234 - DNA, 207 bp, Saccharomyces pastorianus
atgaaacctgttgtatccactggcaaggcatggtgctgtaccgtcctatcggcgtttggtgtggtgattctttccgtgattgctcatatgtttaacacaaaccatgaatcctttgtaggatcaataaacgatcctgaagacggacctgcgtatgttatatcctttcttataccctttctgttttcgttaccttccacgatctcttaa

SEQ ID NO: 6235 - DNA, 108 bp, Saccharomyces pastorianus
atgttatatcctttcttataccctttctgttttcgttaccttccacgatctcttaaatcttcctcccttactaactatcattgtaaataccatctccgttgtttatag

SEQ ID NO: 6236 - DNA, 1971 bp, Saccharomyces pastorianus
atggatttactacgtattttggatacgaaaccaatacccacaattgtcgatgccactaccttgggcatatcaggcaacacctccggtgattattggctaccaactacaatgtcgctttaccaaaaggaacttacagatcagatagtgtcactacactattctgacattttgagatattttgaaacttcgcattataaagaggatgtcatcctcgagtctatgcggactatgtgtctgaatggttcactggtagcaacccatccgtacttattgatagaccattatatgcctaaatcattaatcactagagatgttcctgcacatttggcagagagtggtgggaagttcaacgttttgagagatcttataaaccttgttcaagaatatgaaaccgagacggccattgtctgcaggccaggaagaacaatggatttgttggaggctttacttctggggaacaaggtacatattaaaagatacgatggtcattccatcaagtcaaagcagaagcctaatgatttttcatgtactgttcatttatttccttctgaaggtttgaaattagtacagcatccgataaaatctaaggctcggtttgatatgctgatctgtttagacaccacggtggacacaactcataaagatatccaatacatcttacaatataagagagagaagaaaggtcttgaaaagtatgctccggttgttagattagtagccattaattcgattgaccattgtactttatttttcggtaaaaaattcgataagaatagtagagaatacttggagaatgtcactgcagctatggtaatcctgagggaccgtttaggtacgctaccaccggatttgagacctatttattcacaaaaattacattacttggtagactggttagaaaccccaacagtaccgtggcccttaccagatatttatccattaaagcaatacacctcgatggatgtagaaagatctttgttaacagaagttcatttcaaaaaatcagatgaccaattagaagacgcctttgctaactattcaaaaaaaagagggcgttgtgggcctaataaatcatcatcgcctaatgctgttggaatcgaggatactgacgctccatgtttctattccaccaaaagattgaagaatgattattacacaaatccattgaaacaagatatgactcaattaacaggtatcaccactgctgacaactcctctggtgtaaattatcatttatcgagtggaattataacacataaattgatccagtcaatgggggaaatatatatggatatttgcttgcaaaaacaaaagctaaacgactactcgtgtctgaacgctttacaagatgatcatttacaattcttcttgaacaaagatgaaaaaattgttaaagaatatgatggggcagtacgaacgaatagtgaaaacttaaaaaagtcccacgaactagaagttggaagcagctctaagttatcccaaattgaaacattagagaaagaaattgaaattctgaagaaaaatttagcggctcaaggtgaaagattcgccaaattagaagaattattcattaaaactattaatttacaagatgagatcgagaaggaagacagaataaataaatcaaaagatgctgaaagggaatatatggaacaagaaattaaaagagcaggtgatgctataagagaaaatggcgaagagacaagcaagcttggtaataatagaagagaattagaaaatgaactgaaattgaaacttggagacgctgagactatcaaggaagaactgcgggagaagatttcccttctaaaaggggaaattaagcttgaaaatgatttgaataaagagttagtagaacaattgtccaagacaatggaaaatttagaaaatttatcaatatcaagagtacgtactcagaatggtaatatgaagaaaaaacccaaaacgaaaaaccaggtagtatataagtaa

SEQ ID NO: 6237 - DNA, 25 bp, Saccharomyces pastorianus
aagacggtcttaacggtgccatcat

SEQ ID NO: 6238 - DNA, 25 bp, Saccharomyces pastorianus
gaaaagcagtccaccatcaagatta

SEQ ID NO: 6239 - DNA, 25 bp, Saccharomyces pastorianus
gatatttccgaactcagcaactgca

SEQ ID NO: 6240 - DNA, 25 bp, Saccharomyces pastorianus
tccaatggacatcacgctgcatgag

SEQ ID NO: 6241 - DNA, 25 bp, Saccharomyces pastorianus
cacgccgctaaggacagtatcgaat

SEQ ID NO: 6242 - DNA, 25 bp, Saccharomyces pastorianus
ggatacgactacactttcgactgct

SEQ ID NO: 6243 - DNA, 25 bp, Saccharomyces pastorianus
gttgcagtgacattgccgtctcaga

SEQ ID NO: 6244 - DNA, 25 bp, Saccharomyces pastorianus
atgtctgacgtttagaggcaccgcc

SEQ ID NO: 6245 - DNA, 25 bp, Saccharomyces pastorianus
gttgccaaggccagacacatgatca

SEQ ID NO: 6246 - DNA, 25 bp, Saccharomyces pastorianus
gaatgcttccattcaatgtctgacg

SEQ ID NO: 6247 - DNA, 25 bp, Saccharomyces pastorianus
gacttcgaggcggtgatccaggcta

SEQ ID NO: 6248 - DNA, 25 bp, Saccharomyces pastorianus
aagaggtcgtccaggcgattcacaa

SEQ ID NO: 6249 - DNA, 25 bp, Saccharomyces pastorianus
aaaggtagttcagcttcggttcttg

SEQ ID NO: 6250 - DNA, 25 bp, Saccharomyces pastorianus
gccagacgcctaggtgtcgagattt

SEQ ID NO: 6251 - DNA, 25 bp, Saccharomyces pastorianus
aatcaccggttcgattggctatgtc

SEQ ID NO: 6252 - DNA, 25 bp, Saccharomyces pastorianus
cgccggccagatagtggtctctgaa

SEQ ID NO: 6253 - DNA, 25 bp, Saccharomyces pastorianus
gcagtcaagctgtcaggcttccaaa

SEQ ID NO: 6254 - DNA, 25 bp, Saccharomyces pastorianus
aatccgtggaagcactacgtggttt

SEQ ID NO: 6255 - DNA, 25 bp, Saccharomyces pastorianus
agctactttcgatgcctccttaaaa

SEQ ID NO: 6256 - DNA, 25 bp, Saccharomyces pastorianus
taaggagtccaacgtcaagattctg

SEQ ID NO: 6257 - DNA, 25 bp, Saccharomyces pastorianus
tttgaccctaggaagcacggcgaga

SEQ ID NO: 6258 - DNA, 25 bp, Saccharomyces pastorianus
attccagccaatgaacgtcactctt

SEQ ID NO: 6259 - DNA, 25 bp, Saccharomyces pastorianus
gcagagatttgtcaggttcgtcatt

SEQ ID NO: 6260 - DNA, 25 bp, Saccharomyces pastorianus
gtagcaattctagccacatcctatt

SEQ ID NO: 6261 - DNA, 25 bp, Saccharomyces pastorianus
ggttgcgcaagttccaatgcatact

SEQ ID NO: 6262 - DNA, 25 bp, Saccharomyces pastorianus
gatgccctgcctcgagaaagtgact

SEQ ID NO: 6263 - DNA, 25 bp, Saccharomyces pastorianus
gtaagtctgtccaagggctgtctat

SEQ ID NO: 6264 - DNA, 25 bp, Saccharomyces pastorianus
gaaagtgactcttcggccaaagaca

SEQ ID NO: 6265 - DNA, 25 bp, Saccharomyces pastorianus
aacgaatcattcaaccgggtcatca

SEQ ID NO: 6266 - DNA, 25 bp, Saccharomyces pastorianus
ggatgcgttctataactctgggaat

SEQ ID NO: 6267 - DNA, 25 bp, Saccharomyces pastorianus
tggcgctacgatcgttcctgaagat

SEQ ID NO: 6268 - DNA, 25 bp, Saccharomyces pastorianus
tgacgaagtggttcttttggtccct

SEQ ID NO: 6269 - DNA, 25 bp, Saccharomyces pastorianus
tttggtccctacgagtcatactaac

SEQ ID NO: 6270 - DNA, 25 bp, Saccharomyces pastorianus
atcgaggacccaatcgtggcggaat

SEQ ID NO: 6271 - DNA, 25 bp, Saccharomyces pastorianus
gacgtttctactttagccaaccctg

SEQ ID NO: 6272 - DNA, 25 bp, Saccharomyces pastorianus
aaaggacatcggtccatttgccgcc

SEQ ID NO: 6273 - DNA, 25 bp, Saccharomyces pastorianus
cacttatttgaatccttatcccggt

SEQ ID NO: 6274 - DNA, 25 bp, Saccharomyces pastorianus
aagcgatcaattaggcgacgtttct

SEQ ID NO: 6275 - DNA, 25 bp, Saccharomyces pastorianus
cggtagccgcatttgtggtcttaaa

SEQ ID NO: 6276 - DNA, 25 bp, Saccharomyces pastorianus
accgctgagatagaagccgccatca

SEQ ID NO: 6277 - DNA, 25 bp, Saccharomyces pastorianus
tgaagaagtcaaatcctcccacgca

SEQ ID NO: 6278 - DNA, 25 bp, Saccharomyces pastorianus
aaacacttggttttcactgtcagaa

SEQ ID NO: 6279 - DNA, 25 bp, Saccharomyces pastorianus
atcccggttattacttcacaggcga

SEQ ID NO: 6280 - DNA, 25 bp, Saccharomyces pastorianus
ggacatcgtctatcaaccgctgaga

SEQ ID NO: 6281 - DNA, 25 bp, Saccharomyces pastorianus
aacgagttcgtcctctttcaaacag

SEQ ID NO: 6282 - DNA, 25 bp, Saccharomyces pastorianus
ttccgtgacgataccttcggcaaga

SEQ ID NO: 6283 - DNA, 25 bp, Saccharomyces pastorianus
tgtacaacctacatctgccgttatg

SEQ ID NO: 6284 - DNA, 25 bp, Saccharomyces pastorianus
atccggatgttcgttaccaaccaat

SEQ ID NO: 6285 - DNA, 25 bp, Saccharomyces pastorianus
tcacctgtactttggcattgcttca

SEQ ID NO: 6286 - DNA, 25 bp, Saccharomyces pastorianus
gaaagacgaccgtgtgtccttcatc

SEQ ID NO: 6287 - DNA, 25 bp, Saccharomyces pastorianus
gaggaaggccgtcatggacaccaat

SEQ ID NO: 6288 - DNA, 25 bp, Saccharomyces pastorianus
ttactactattcaccattgtcacct

SEQ ID NO: 6289 - DNA, 25 bp, Saccharomyces pastorianus
gtgttcgctttgttcttactactat

SEQ ID NO: 6290 - DNA, 25 bp, Saccharomyces pastorianus
gtcgggacttccaatcaatcatatt

SEQ ID NO: 6291 - DNA, 25 bp, Saccharomyces pastorianus
tggtaactttctgtctccacaatac

SEQ ID NO: 6292 - DNA, 25 bp, Saccharomyces pastorianus
agatgagcttttcgtgaaccaccca

SEQ ID NO: 6293 - DNA, 25 bp, Saccharomyces pastorianus
ggaggcttttttgggcagatcgttc

SEQ ID NO: 6294 - DNA, 25 bp, Saccharomyces pastorianus
gaagctgcactggatcctggtaaaa

SEQ ID NO: 6295 - DNA, 25 bp, Saccharomyces pastorianus
tgtattctccaacgatcaagccaag

SEQ ID NO: 6296 - DNA, 25 bp, Saccharomyces pastorianus
aacaccccagggttgccagaagaag

SEQ ID NO: 6297 - DNA, 25 bp, Saccharomyces pastorianus
tctctgctctttcacgctgatgaaa

SEQ ID NO: 6298 - DNA, 25 bp, Saccharomyces pastorianus
gagtcgttctcctatttggtttcgc

SEQ ID NO: 6299 - DNA, 25 bp, Saccharomyces pastorianus
aagatgccacatgcaacccgatgaa

SEQ ID NO: 6300 - DNA, 25 bp, Saccharomyces pastorianus
ttggtttcgctcctggacaaattca

SEQ ID NO: 6301 - DNA, 25 bp, Saccharomyces pastorianus
aaacagctctcatcttagggtctac

SEQ ID NO: 6302 - DNA, 25 bp, Saccharomyces pastorianus
ctaccattggtatttgtggcctcca

SEQ ID NO: 6303 - DNA, 25 bp, Saccharomyces pastorianus
tccacgatacttcgctgtacgacaa

SEQ ID NO: 6304 - DNA, 25 bp, Saccharomyces pastorianus
accgtcatggacaagctgctctaca

SEQ ID NO: 6305 - DNA, 25 bp, Saccharomyces pastorianus
gggtctgcgcagatcaaccgaattc

SEQ ID NO: 6306 - DNA, 25 bp, Saccharomyces pastorianus
ggaacatccactttgctcctggcaa

SEQ ID NO: 6307 - DNA, 25 bp, Saccharomyces pastorianus
gtctgttcgtgttcttcgagatgtc

SEQ ID NO: 6308 - DNA, 25 bp, Saccharomyces pastorianus
atgtctccgcttaaggtcatcaaca

SEQ ID NO: 6309 - DNA, 25 bp, Saccharomyces pastorianus
aggtgtttccggacattgccacgca

SEQ ID NO: 6310 - DNA, 25 bp, Saccharomyces pastorianus
ggtccggcttcatcctgaactgtat

SEQ ID NO: 6311 - DNA, 25 bp, Saccharomyces pastorianus
gtacgacaagacatccgacctgaac

SEQ ID NO: 6312 - DNA, 25 bp, Saccharomyces pastorianus
gtcaatcacctgagcttcggcaagc

SEQ ID NO: 6313 - DNA, 25 bp, Saccharomyces pastorianus
agaccgctcagttcagtgccacgta

SEQ ID NO: 6314 - DNA, 25 bp, Saccharomyces pastorianus
ggaattctaccgttcccaagaactg

SEQ ID NO: 6315 - DNA, 25 bp, Saccharomyces pastorianus
cacaccgtctcttatgtcaaacaga

SEQ ID NO: 6316 - DNA, 25 bp, Saccharomyces pastorianus
gctgcccctacacacttaaagaaaa

SEQ ID NO: 6317 - DNA, 25 bp, Saccharomyces pastorianus
attagcttgcgtctatccgaatacc

SEQ ID NO: 6318 - DNA, 25 bp, Saccharomyces pastorianus
gccgccacagattatttctcagatc

SEQ ID NO: 6319 - DNA, 25 bp, Saccharomyces pastorianus
ctcgtccactcaatattctttcaaa

SEQ ID NO: 6320 - DNA, 25 bp, Saccharomyces pastorianus
aagatcaacttcatccacggattgt

SEQ ID NO: 6321 - DNA, 25 bp, Saccharomyces pastorianus
gctacaaaatttaccgatgcgctca

SEQ ID NO: 6322 - DNA, 25 bp, Saccharomyces pastorianus
agattaatgcccatcagacccatag

SEQ ID NO: 6323 - DNA, 25 bp, Saccharomyces pastorianus
gtacagtaacatctttgcccaatcc

SEQ ID NO: 6324 - DNA, 25 bp, Saccharomyces pastorianus
agacccatagtcagtgcacactcat

SEQ ID NO: 6325 - DNA, 25 bp, Saccharomyces pastorianus
gtaagccagttatctgtgctaccca

SEQ ID NO: 6326 - DNA, 25 bp, Saccharomyces pastorianus
tgtcttcccattcgttttcgaaaag

SEQ ID NO: 6327 - DNA, 25 bp, Saccharomyces pastorianus
ttacttgccaaactacgatgacatg

SEQ ID NO: 6328 - DNA, 25 bp, Saccharomyces pastorianus
agaaactgtactccaaagccaacct

SEQ ID NO: 6329 - DNA, 25 bp, Saccharomyces pastorianus
ttatctgtgctacccaaatgttgga

SEQ ID NO: 6330 - DNA, 25 bp, Saccharomyces pastorianus
aacccaagaccaaccagagctgaag

SEQ ID NO: 6331 - DNA, 25 bp, Saccharomyces pastorianus
ttgaagcccgtatcaacttcggtat

SEQ ID NO: 6332 - DNA, 25 bp, Saccharomyces pastorianus
acttgtacagaggtgtcttcccatt

SEQ ID NO: 6333 - DNA, 25 bp, Saccharomyces pastorianus
aacgctatcttggatggtgctgact

SEQ ID NO: 6334 - DNA, 25 bp, Saccharomyces pastorianus
aaggctatcattgtcttgtccactt

SEQ ID NO: 6335 - DNA, 25 bp, Saccharomyces pastorianus
catccaaggtttcaaggccggtgct

SEQ ID NO: 6336 - DNA, 25 bp, Saccharomyces pastorianus
taattcaaacgttctcaccggcgaa

SEQ ID NO: 6337 - DNA, 25 bp, Saccharomyces pastorianus
aacatctcggtaacatcttggtggt

SEQ ID NO: 6338 - DNA, 25 bp, Saccharomyces pastorianus
tgtggcaacctacccgagaattact

SEQ ID NO: 6339 - DNA, 25 bp, Saccharomyces pastorianus
agagcaatcctgaacttacccatta

SEQ ID NO: 6340 - DNA, 25 bp, Saccharomyces pastorianus
ccggcgaaccgttggtgcaatacca

SEQ ID NO: 6341 - DNA, 25 bp, Saccharomyces pastorianus
gcaataccaggcgttcaatgatcta

SEQ ID NO: 6342 - DNA, 25 bp, Saccharomyces pastorianus
aaaggactacaagagctcgcgcaag

SEQ ID NO: 6343 - DNA, 25 bp, Saccharomyces pastorianus
aatccagtcactaccgcaattttgt

SEQ ID NO: 6344 - DNA, 25 bp, Saccharomyces pastorianus
agagtaattgcttgtcacccatcag

SEQ ID NO: 6345 - DNA, 25 bp, Saccharomyces pastorianus
aattttgattcgtcgtcaacccaag

SEQ ID NO: 6346 - DNA, 25 bp, Saccharomyces pastorianus
ggtggtatcatcacactcacatgat

SEQ ID NO: 6347 - DNA, 25 bp, Saccharomyces pastorianus
gtgtcaagcaccaacctcagtatgt

SEQ ID NO: 6348 - DNA, 25 bp, Saccharomyces pastorianus
ttgctatacagaatccccaacgcgg

SEQ ID NO: 6349 - DNA, 25 bp, Saccharomyces pastorianus
tggaggcctcgtccagaaggtacat

SEQ ID NO: 6350 - DNA, 25 bp, Saccharomyces pastorianus
atacctgattttaccgatccggtgg

SEQ ID NO: 6351 - DNA, 25 bp, Saccharomyces pastorianus
gaacacagttcctttgacccacttg

SEQ ID NO: 6352 - DNA, 25 bp, Saccharomyces pastorianus
ggtacatgcctgcagtttatgcttt

SEQ ID NO: 6353 - DNA, 25 bp, Saccharomyces pastorianus
ggatccgtttgaacaagtctccacc

SEQ ID NO: 6354 - DNA, 25 bp, Saccharomyces pastorianus
agtctccacctgacattttgatcaa

SEQ ID NO: 6355 - DNA, 25 bp, Saccharomyces pastorianus
gggtggtatttctatcacgaacaca

SEQ ID NO: 6356 - DNA, 25 bp, Saccharomyces pastorianus
catctcgtccggtcaagattggaat

SEQ ID NO: 6357 - DNA, 25 bp, Saccharomyces pastorianus
acttgattgatgtcctggaggcctc

SEQ ID NO: 6358 - DNA, 25 bp, Saccharomyces pastorianus
gaagggccaaactgccgccggtgtt

SEQ ID NO: 6359 - DNA, 25 bp, Saccharomyces pastorianus
ccggtgttgctgtccgtctggaaga

SEQ ID NO: 6360 - DNA, 25 bp, Saccharomyces pastorianus
gtctggaagatccttctggccaaca

SEQ ID NO: 6361 - DNA, 25 bp, Saccharomyces pastorianus
gggactccaatatgtactgttaaaa

SEQ ID NO: 6362 - DNA, 25 bp, Saccharomyces pastorianus
gttgctagatctgattggctactgt

SEQ ID NO: 6363 - DNA, 25 bp, Saccharomyces pastorianus
cgattcatttactgcataccaagag

SEQ ID NO: 6364 - DNA, 25 bp, Saccharomyces pastorianus
tgccgtaatgttgtgtttcgatgtc

SEQ ID NO: 6365 - DNA, 25 bp, Saccharomyces pastorianus
caaccatcaacctgttccagaagtc

SEQ ID NO: 6366 - DNA, 25 bp, Saccharomyces pastorianus
aaatcatcaacaagcgtggtccaat

SEQ ID NO: 6367 - DNA, 25 bp, Saccharomyces pastorianus
agatctctggatactttgaaggaca

SEQ ID NO: 6368 - DNA, 25 bp, Saccharomyces pastorianus
aatgccgacattatctatcacttat

SEQ ID NO: 6369 - DNA, 25 bp, Saccharomyces pastorianus
aggactaacaatatcttacggaggt

SEQ ID NO: 6370 - DNA, 25 bp, Saccharomyces pastorianus
ggccaatgggaaacacagcaaggat

SEQ ID NO: 6371 - DNA, 25 bp, Saccharomyces pastorianus
ggaggcactattacaaaaactgaag

SEQ ID NO: 6372 - DNA, 25 bp, Saccharomyces pastorianus
gacattactgagtagttcattacga

SEQ ID NO: 6373 - DNA, 25 bp, Saccharomyces pastorianus
gaaacgttctccgaattcctgaaga

SEQ ID NO: 6374 - DNA, 25 bp, Saccharomyces pastorianus
cgtggatagtgaaagcaccagttca

SEQ ID NO: 6375 - DNA, 25 bp, Saccharomyces pastorianus
ggaagctgtcaaactagatatcgaa

SEQ ID NO: 6376 - DNA, 25 bp, Saccharomyces pastorianus
gttactaggcgatggcgagacagaa

SEQ ID NO: 6377 - DNA, 25 bp, Saccharomyces pastorianus
aggccagtccgctgaatctagtata

SEQ ID NO: 6378 - DNA, 25 bp, Saccharomyces pastorianus
aaacctatagacgacacaatgacat

SEQ ID NO: 6379 - DNA, 25 bp, Saccharomyces pastorianus
gagacagaaggccagtccgctgaat

SEQ ID NO: 6380 - DNA, 25 bp, Saccharomyces pastorianus
gatgaacaaaacttcctctacgcct

SEQ ID NO: 6381 - DNA, 25 bp, Saccharomyces pastorianus
agaaaaccccaagccaacgaagatg

SEQ ID NO: 6382 - DNA, 25 bp, Saccharomyces pastorianus
gaatggcggtgaaaccttggctata

SEQ ID NO: 6383 - DNA, 25 bp, Saccharomyces pastorianus
tgaaatcatcgagcgctctgacagc

SEQ ID NO: 6384 - DNA, 25 bp, Saccharomyces pastorianus
gaggtctaattccttacaagcttcc

SEQ ID NO: 6385 - DNA, 25 bp, Saccharomyces pastorianus
gcgccctcaccaaaggtatcgagta

SEQ ID NO: 6386 - DNA, 25 bp, Saccharomyces pastorianus
aacattgtacctggattcggaatca

SEQ ID NO: 6387 - DNA, 25 bp, Saccharomyces pastorianus
gtataagtaactctccctcagtgaa

SEQ ID NO: 6388 - DNA, 25 bp, Saccharomyces pastorianus
gaagccggcggtgttacactatcca

SEQ ID NO: 6389 - DNA, 25 bp, Saccharomyces pastorianus
gagtaagattcaccggtgtgccacc

SEQ ID NO: 6390 - DNA, 25 bp, Saccharomyces pastorianus
tacaagcttccactatgaccctaaa

SEQ ID NO: 6391 - DNA, 25 bp, Saccharomyces pastorianus
attcaaactgctattcgatttctgg

SEQ ID NO: 6392 - DNA, 25 bp, Saccharomyces pastorianus
gatttcgatgcagctatgcttcaat

SEQ ID NO: 6393 - DNA, 25 bp, Saccharomyces pastorianus
tggtatgctttgaaccctgcacaaa

SEQ ID NO: 6394 - DNA, 25 bp, Saccharomyces pastorianus
gcacgtttgcaacccctagtggtga

SEQ ID NO: 6395 - DNA, 25 bp, Saccharomyces pastorianus
gtggcttcgacgcacaaggcttagc

SEQ ID NO: 6396 - DNA, 25 bp, Saccharomyces pastorianus
ttcaattcaaattccacggtacagt

SEQ ID NO: 6397 - DNA, 25 bp, Saccharomyces pastorianus
agatcatgctcaccaacgatttcga

SEQ ID NO: 6398 - DNA, 25 bp, Saccharomyces pastorianus
gatgcgcgttctaaccttattcaaa

SEQ ID NO: 6399 - DNA, 25 bp, Saccharomyces pastorianus
gaagtacaaacccaccagcaagaac

SEQ ID NO: 6400 - DNA, 25 bp, Saccharomyces pastorianus
gagccaaaaaccgacgatgcgcgtt

SEQ ID NO: 6401 - DNA, 25 bp, Saccharomyces pastorianus
aaagtgtcaagctcctacagttcaa

SEQ ID NO: 6402 - DNA, 25 bp, Saccharomyces pastorianus
aagtttactctagttgccatccctg

SEQ ID NO: 6403 - DNA, 25 bp, Saccharomyces pastorianus
gaaagccgctttagttactaaccag

SEQ ID NO: 6404 - DNA, 25 bp, Saccharomyces pastorianus
ttctgcgaacccctttagtgataat

SEQ ID NO: 6405 - DNA, 25 bp, Saccharomyces pastorianus
gtacgaaccggaaacataccatgtt

SEQ ID NO: 6406 - DNA, 25 bp, Saccharomyces pastorianus
gccgcatgtccagcaatttcagaat

SEQ ID NO: 6407 - DNA, 25 bp, Saccharomyces pastorianus
acatacgtatgggtccggtgtgttt

SEQ ID NO: 6408 - DNA, 25 bp, Saccharomyces pastorianus
attgtcttaccgatttttgccttag

SEQ ID NO: 6409 - DNA, 25 bp, Saccharomyces pastorianus
ttcccacacgctaacgtttcaagag

SEQ ID NO: 6410 - DNA, 25 bp, Saccharomyces pastorianus
atccctggatccttcttattttggt

SEQ ID NO: 6411 - DNA, 25 bp, Saccharomyces pastorianus
gtgagttgcaagatgcttctgcgaa

SEQ ID NO: 6412 - DNA, 25 bp, Saccharomyces pastorianus
tataaccgattcaaggccgcatgtc

SEQ ID NO: 6413 - DNA, 25 bp, Saccharomyces pastorianus
ggtgcttacggtgacaagccattga

SEQ ID NO: 6414 - DNA, 25 bp, Saccharomyces pastorianus
atagcgatagcgacagtgacgatga

SEQ ID NO: 6415 - DNA, 25 bp, Saccharomyces pastorianus
gcactaaggctaaacgtccaaaggt

SEQ ID NO: 6416 - DNA, 25 bp, Saccharomyces pastorianus
aaaggcattacgttggtgtggcacc

SEQ ID NO: 6417 - DNA, 25 bp, Saccharomyces pastorianus
ataacggagagacgtttggcgctaa

SEQ ID NO: 6418 - DNA, 25 bp, Saccharomyces pastorianus
aatacgtcgacgtgaacgatctaga

SEQ ID NO: 6419 - DNA, 25 bp, Saccharomyces pastorianus
gacgtaagaagaccgctagcactaa

SEQ ID NO: 6420 - DNA, 25 bp, Saccharomyces pastorianus
gaagcatcaagtgccagtgaaagcg

SEQ ID NO: 6421 - DNA, 25 bp, Saccharomyces pastorianus
aatggttagccgattctgataaaga

SEQ ID NO: 6422 - DNA, 25 bp, Saccharomyces pastorianus
gacaaggatagctccaagagacgta

SEQ ID NO: 6423 - DNA, 25 bp, Saccharomyces pastorianus
gacaagccattgaacgtggacgaaa

SEQ ID NO: 6424 - DNA, 25 bp, Saccharomyces pastorianus
aggttcaacctgactgtggactgga

SEQ ID NO: 6425 - DNA, 25 bp, Saccharomyces pastorianus
gaaatgagactttatccgggattga

SEQ ID NO: 6426 - DNA, 25 bp, Saccharomyces pastorianus
agcgatttattcatgttgcggacca

SEQ ID NO: 6427 - DNA, 25 bp, Saccharomyces pastorianus
gtgtacctttcggacttgtcagcaa

SEQ ID NO: 6428 - DNA, 25 bp, Saccharomyces pastorianus
aagctggttacaactactggtgaga

SEQ ID NO: 6429 - DNA, 25 bp, Saccharomyces pastorianus
tcgagccaggcgatcttttaacttg

SEQ ID NO: 6430 - DNA, 25 bp, Saccharomyces pastorianus
gagattcttcttaccaaaagctcca

SEQ ID NO: 6431 - DNA, 25 bp, Saccharomyces pastorianus
ggctttaagttcatcggttgttcaa

SEQ ID NO: 6432 - DNA, 25 bp, Saccharomyces pastorianus
gacgcttggcgtttgatcgagccag

SEQ ID NO: 6433 - DNA, 25 bp, Saccharomyces pastorianus
ttcaaaggtttaccgacgcttggcg

SEQ ID NO: 6434 - DNA, 25 bp, Saccharomyces pastorianus
agtaaacccactggtaggctgcgtc

SEQ ID NO: 6435 - DNA, 25 bp, Saccharomyces pastorianus
ggtctacatttcgttccatttgtca

SEQ ID NO: 6436 - DNA, 25 bp, Saccharomyces pastorianus
ttgtaatcggctgctaccagtactt

SEQ ID NO: 6437 - DNA, 25 bp, Saccharomyces pastorianus
gtttcgtcttatacgctggtttcat

SEQ ID NO: 6438 - DNA, 25 bp, Saccharomyces pastorianus
gccggcattgtatttcgcattgatc

SEQ ID NO: 6439 - DNA, 25 bp, Saccharomyces pastorianus
aatgcggccgtattatgcgtttcgt

SEQ ID NO: 6440 - DNA, 25 bp, Saccharomyces pastorianus
agagtcacgtatgttcaccactact

SEQ ID NO: 6441 - DNA, 25 bp, Saccharomyces pastorianus
attcatggccactgtagtcatccta

SEQ ID NO: 6442 - DNA, 25 bp, Saccharomyces pastorianus
aatggtccaggtccaaatgcggccg

SEQ ID NO: 6443 - DNA, 25 bp, Saccharomyces pastorianus
gctcgagccaaaacttccgttattt

SEQ ID NO: 6444 - DNA, 25 bp, Saccharomyces pastorianus
aattcgactatttggcttcttccgc

SEQ ID NO: 6445 - DNA, 25 bp, Saccharomyces pastorianus
atacgttgacttgaccaatccatcc

SEQ ID NO: 6446 - DNA, 25 bp, Saccharomyces pastorianus
acaccttcattcacagacgtcattg

SEQ ID NO: 6447 - DNA, 25 bp, Saccharomyces pastorianus
gtggtcaccacacatttacactggg

SEQ ID NO: 6448 - DNA, 25 bp, Saccharomyces pastorianus
ttttgaaacttcagcacgtctccag

SEQ ID NO: 6449 - DNA, 25 bp, Saccharomyces pastorianus
gaagactatttgaaccgcgctatga

SEQ ID NO: 6450 - DNA, 25 bp, Saccharomyces pastorianus
aaaacttctcgcacaatttggccct

SEQ ID NO: 6451 - DNA, 25 bp, Saccharomyces pastorianus
tgactacatatggttctccacgcac

SEQ ID NO: 6452 - DNA, 25 bp, Saccharomyces pastorianus
gtatcggagagttgccattcaccaa

SEQ ID NO: 6453 - DNA, 25 bp, Saccharomyces pastorianus
gacacaacgctcaattccagacagg

SEQ ID NO: 6454 - DNA, 25 bp, Saccharomyces pastorianus
aggccgcgttcaagtacaccaagag

SEQ ID NO: 6455 - DNA, 25 bp, Saccharomyces pastorianus
tgggatcccaaattcaacgacgtga

SEQ ID NO: 6456 - DNA, 25 bp, Saccharomyces pastorianus
gacaacgtcgcgctgtttttgaaac

SEQ ID NO: 6457 - DNA, 25 bp, Saccharomyces pastorianus
gatccagatcatggccacgttgaat

SEQ ID NO: 6458 - DNA, 25 bp, Saccharomyces pastorianus
ggctatcggcattctattgtatacc

SEQ ID NO: 6459 - DNA, 25 bp, Saccharomyces pastorianus
ttgcacgaccaaggcattgtccata

SEQ ID NO: 6460 - DNA, 25 bp, Saccharomyces pastorianus
gtactatagattatgctgcacctga

SEQ ID NO: 6461 - DNA, 25 bp, Saccharomyces pastorianus
tgattgtggactctaaaggcttcgt

SEQ ID NO: 6462 - DNA, 25 bp, Saccharomyces pastorianus
gccgtttgatgtgtttgtgggtact

SEQ ID NO: 6463 - DNA, 25 bp, Saccharomyces pastorianus
atcgatttcgggtctgctgcatatg

SEQ ID NO: 6464 - DNA, 25 bp, Saccharomyces pastorianus
gatcttttcgatctgattgagttca

SEQ ID NO: 6465 - DNA, 25 bp, Saccharomyces pastorianus
ttattatatcgaaacgcccgtgcat

SEQ ID NO: 6466 - DNA, 25 bp, Saccharomyces pastorianus
aatcgttgtgtaccgaagaggccca

SEQ ID NO: 6467 - DNA, 25 bp, Saccharomyces pastorianus
tgcatatgtcaagagtgggccgttt

SEQ ID NO: 6468 - DNA, 25 bp, Saccharomyces pastorianus
tggccgacgacggtgttccaaacat

SEQ ID NO: 6469 - DNA, 25 bp, Saccharomyces pastorianus
gaatatatccctatcctagcagaac

SEQ ID NO: 6470 - DNA, 25 bp, Saccharomyces pastorianus
gcgacttgtgtctttcatggttatg

SEQ ID NO: 6471 - DNA, 25 bp, Saccharomyces pastorianus
ttgtctccaggttcacagtactatc

SEQ ID NO: 6472 - DNA, 25 bp, Saccharomyces pastorianus
attggtgccgcgacgaaatcatttc

SEQ ID NO: 6473 - DNA, 25 bp, Saccharomyces pastorianus
ttatcagattctttgctacctgcca

SEQ ID NO: 6474 - DNA, 25 bp, Saccharomyces pastorianus
tagctaagtcctacgctgtgatagt

SEQ ID NO: 6475 - DNA, 25 bp, Saccharomyces pastorianus
tacctgccataaccgagctagctaa

SEQ ID NO: 6476 - DNA, 25 bp, Saccharomyces pastorianus
ttttaccctctttggaagcactatg

SEQ ID NO: 6477 - DNA, 25 bp, Saccharomyces pastorianus
ggtgcccgtggtgtcattagatgtc

SEQ ID NO: 6478 - DNA, 25 bp, Saccharomyces pastorianus
tgggataccgtttactccatcagag

SEQ ID NO: 6479 - DNA, 25 bp, Saccharomyces pastorianus
aagtatatcttgtccacgtgccaaa

SEQ ID NO: 6480 - DNA, 25 bp, Saccharomyces pastorianus
aatcctgcaagaccagcatctgggt

SEQ ID NO: 6481 - DNA, 25 bp, Saccharomyces pastorianus
gatttgttgaaattcctgccaccag

SEQ ID NO: 6482 - DNA, 25 bp, Saccharomyces pastorianus
atagacgaactgttggtcctgcccg

SEQ ID NO: 6483 - DNA, 25 bp, Saccharomyces pastorianus
agctgattcattctgtcgggttcca

SEQ ID NO: 6484 - DNA, 25 bp, Saccharomyces pastorianus
gatgtgccggctacgatagacgaac

SEQ ID NO: 6485 - DNA, 25 bp, Saccharomyces pastorianus
aactggctacctagaggactctgga

SEQ ID NO: 6486 - DNA, 25 bp, Saccharomyces pastorianus
gtcgggttccacacaagaaaggcca

SEQ ID NO: 6487 - DNA, 25 bp, Saccharomyces pastorianus
aggagagccccgaattaaacgcaga

SEQ ID NO: 6488 - DNA, 25 bp, Saccharomyces pastorianus
gcaagaccccggaccaaacaagaat

SEQ ID NO: 6489 - DNA, 25 bp, Saccharomyces pastorianus
cgcagatgctgcttctttggacgaa

SEQ ID NO: 6490 - DNA, 25 bp, Saccharomyces pastorianus
tcgggaggacccatgacatttccat

SEQ ID NO: 6491 - DNA, 25 bp, Saccharomyces pastorianus
gacgagcttacggttacctacagag

SEQ ID NO: 6492 - DNA, 25 bp, Saccharomyces pastorianus
ggaacttttcatcgatcagcagcaa

SEQ ID NO: 6493 - DNA, 25 bp, Saccharomyces pastorianus
aacgggaattgcgtcatcatcctcg

SEQ ID NO: 6494 - DNA, 25 bp, Saccharomyces pastorianus
gacagggagctgtacaggttccaca

SEQ ID NO: 6495 - DNA, 25 bp, Saccharomyces pastorianus
ttacaaggatgaaccctcgcagccg

SEQ ID NO: 6496 - DNA, 25 bp, Saccharomyces pastorianus
acgttgtcccagtccatcgggagga

SEQ ID NO: 6497 - DNA, 25 bp, Saccharomyces pastorianus
gatgcgctggtgtcccggtacaata

SEQ ID NO: 6498 - DNA, 25 bp, Saccharomyces pastorianus
gaacctcatcgataataacggccgg

SEQ ID NO: 6499 - DNA, 25 bp, Saccharomyces pastorianus
agatgaggagccgtttccctcgaag

SEQ ID NO: 6500 - DNA, 25 bp, Saccharomyces pastorianus
ctcgaagcatgctccttacaaggat

SEQ ID NO: 6501 - DNA, 25 bp, Saccharomyces pastorianus
gaagaccctacatctgcgtgttaga

SEQ ID NO: 6502 - DNA, 25 bp, Saccharomyces pastorianus
tttcgacgcatggttgacccacaga

SEQ ID NO: 6503 - DNA, 25 bp, Saccharomyces pastorianus
accgtgacgcccttggtggtggtat

SEQ ID NO: 6504 - DNA, 25 bp, Saccharomyces pastorianus
gacctggtcagaatctccgttggta

SEQ ID NO: 6505 - DNA, 25 bp, Saccharomyces pastorianus
tggtggtatgatctccttcagaatc

SEQ ID NO: 6506 - DNA, 25 bp, Saccharomyces pastorianus
taaggaaaacatcgtcgccgtcaac

SEQ ID NO: 6507 - DNA, 25 bp, Saccharomyces pastorianus
tatacgagcgtctgcaattcttgca

SEQ ID NO: 6508 - DNA, 25 bp, Saccharomyces pastorianus
gacgtcgttgtcaagcaacaccgtg

SEQ ID NO: 6509 - DNA, 25 bp, Saccharomyces pastorianus
aaattgctgagttcttggctgccga

SEQ ID NO: 6510 - DNA, 25 bp, Saccharomyces pastorianus
aatcaaaggtggtgccgaagccgcc

SEQ ID NO: 6511 - DNA, 25 bp, Saccharomyces pastorianus
attcttgcagaacgccattggtgcc

SEQ ID NO: 6512 - DNA, 25 bp, Saccharomyces pastorianus
gacttgacttatgcattttcgtcat

SEQ ID NO: 6513 - DNA, 25 bp, Saccharomyces pastorianus
aacggcggcgctactacatgaaaat

SEQ ID NO: 6514 - DNA, 25 bp, Saccharomyces pastorianus
aatgacgtaccagagccgatggccc

SEQ ID NO: 6515 - DNA, 25 bp, Saccharomyces pastorianus
gggttttttgatatctgctgggaca

SEQ ID NO: 6516 - DNA, 25 bp, Saccharomyces pastorianus
gggctttgcccaacggtgagaagaa

SEQ ID NO: 6517 - DNA, 25 bp, Saccharomyces pastorianus
atggcccgtgactcagtggctgaga

SEQ ID NO: 6518 - DNA, 25 bp, Saccharomyces pastorianus
gaaaacaatattccgattcttcccg

SEQ ID NO: 6519 - DNA, 25 bp, Saccharomyces pastorianus
atacgacttcaatctctattccatt

SEQ ID NO: 6520 - DNA, 25 bp, Saccharomyces pastorianus
acaattccatctttaccggtgtttg

SEQ ID NO: 6521 - DNA, 25 bp, Saccharomyces pastorianus
acgtcattacgcgataggactttaa

SEQ ID NO: 6522 - DNA, 25 bp, Saccharomyces pastorianus
aatgtaccgaacctgaactcggttg

SEQ ID NO: 6523 - DNA, 25 bp, Saccharomyces pastorianus
aaacttgtacttaatcccagagcat

SEQ ID NO: 6524 - DNA, 25 bp, Saccharomyces pastorianus
gacgatctaagacggcaagctcatg

SEQ ID NO: 6525 - DNA, 25 bp, Saccharomyces pastorianus
ggtgcgttcaccttttacgaattgt

SEQ ID NO: 6526 - DNA, 25 bp, Saccharomyces pastorianus
ccgagaattggagctgtggacgtaa

SEQ ID NO: 6527 - DNA, 25 bp, Saccharomyces pastorianus
agggattccacagagttattttgca

SEQ ID NO: 6528 - DNA, 25 bp, Saccharomyces pastorianus
ggcagttcactttgtttctagcatc

SEQ ID NO: 6529 - DNA, 25 bp, Saccharomyces pastorianus
tttctagcatctatggccggcgtgg

SEQ ID NO: 6530 - DNA, 25 bp, Saccharomyces pastorianus
acagattccgtgaggtttgtgagtc

SEQ ID NO: 6531 - DNA, 25 bp, Saccharomyces pastorianus
tccaagaaggtttttcacgtctact

SEQ ID NO: 6532 - DNA, 25 bp, Saccharomyces pastorianus
gtttgtgagtcgaaccattgcgtat

SEQ ID NO: 6533 - DNA, 25 bp, Saccharomyces pastorianus
taatcccagagcattcagtgcagag

SEQ ID NO: 6534 - DNA, 25 bp, Saccharomyces pastorianus
tccccttatggaggtctaaaactag

SEQ ID NO: 6535 - DNA, 25 bp, Saccharomyces pastorianus
ggactagccactgttggtgtcgctg

SEQ ID NO: 6536 - DNA, 25 bp, Saccharomyces pastorianus
gtgtcacagtggctaagatatctat

SEQ ID NO: 6537 - DNA, 25 bp, Saccharomyces pastorianus
ttaagctgggagtgccctttacccg

SEQ ID NO: 6538 - DNA, 25 bp, Saccharomyces pastorianus
tgagttcagcctttaatatgcataa

SEQ ID NO: 6539 - DNA, 25 bp, Saccharomyces pastorianus
atagcattctagaaccctgggagcc

SEQ ID NO: 6540 - DNA, 25 bp, Saccharomyces pastorianus
tcatgtttaagaacctccccttatg

SEQ ID NO: 6541 - DNA, 25 bp, Saccharomyces pastorianus
tgtgggtatcacaagtatgctactt

SEQ ID NO: 6542 - DNA, 25 bp, Saccharomyces pastorianus
gtcgctgctagtgggctgctattga

SEQ ID NO: 6543 - DNA, 25 bp, Saccharomyces pastorianus
tttacccgctctattggactagcca

SEQ ID NO: 6544 - DNA, 25 bp, Saccharomyces pastorianus
gggagcccaaggtagccaatgatgt

SEQ ID NO: 6545 - DNA, 25 bp, Saccharomyces pastorianus
ctgatgcatccgcacctgaaatgaa

SEQ ID NO: 6546 - DNA, 25 bp, Saccharomyces pastorianus
taagtgttgctcaagtcctactcat

SEQ ID NO: 6547 - DNA, 25 bp, Saccharomyces pastorianus
aagtcctgactggtggtaatttcga

SEQ ID NO: 6548 - DNA, 25 bp, Saccharomyces pastorianus
gcgttggtcaattcggtgcatgcat

SEQ ID NO: 6549 - DNA, 25 bp, Saccharomyces pastorianus
tatcactttgcctgcattcagcaag

SEQ ID NO: 6550 - DNA, 25 bp, Saccharomyces pastorianus
ttatgctccagttgctatcactttg

SEQ ID NO: 6551 - DNA, 25 bp, Saccharomyces pastorianus
aagacgactctctggccgtgggtta

SEQ ID NO: 6552 - DNA, 25 bp, Saccharomyces pastorianus
gattatgatcgtcgtcgtcgttata

SEQ ID NO: 6553 - DNA, 25 bp, Saccharomyces pastorianus
gcttttgcttctccaataactacgg

SEQ ID NO: 6554 - DNA, 25 bp, Saccharomyces pastorianus
gatcgattttgacatcactgctcct

SEQ ID NO: 6555 - DNA, 25 bp, Saccharomyces pastorianus
gcgtgggccagtacagcttttgctt

SEQ ID NO: 6556 - DNA, 25 bp, Saccharomyces pastorianus
gactctaacggtatcctaaacgtct

SEQ ID NO: 6557 - DNA, 25 bp, Saccharomyces pastorianus
cctaaacgtctctgctgttgaaaag

SEQ ID NO: 6558 - DNA, 25 bp, Saccharomyces pastorianus
aggtgctgctccaggtggcttccca

SEQ ID NO: 6559 - DNA, 25 bp, Saccharomyces pastorianus
gattaccatcaccaacgacaagggt

SEQ ID NO: 6560 - DNA, 25 bp, Saccharomyces pastorianus
tagtaagattaccatcaccaacgac

SEQ ID NO: 6561 - DNA, 25 bp, Saccharomyces pastorianus
gaaactgaaagaatcgcttccaaga

SEQ ID NO: 6562 - DNA, 25 bp, Saccharomyces pastorianus
tatcgaaagaatggtttctgaagct

SEQ ID NO: 6563 - DNA, 25 bp, Saccharomyces pastorianus
cgccgtctccaagaaggccgaagaa

SEQ ID NO: 6564 - DNA, 25 bp, Saccharomyces pastorianus
gtatcctaaacgtctctgctgttga

SEQ ID NO: 6565 - DNA, 25 bp, Saccharomyces pastorianus
gaacaagctgacaaggacgccgtct

SEQ ID NO: 6566 - DNA, 25 bp, Saccharomyces pastorianus
aaggacgccgtctccaagaaggccg

SEQ ID NO: 6567 - DNA, 25 bp, Saccharomyces pastorianus
tttagcttttctttcaatggtgcaa

SEQ ID NO: 6568 - DNA, 25 bp, Saccharomyces pastorianus
gatttcaacgttcctgtgacgtcta

SEQ ID NO: 6569 - DNA, 25 bp, Saccharomyces pastorianus
ataagcctgcgagatcttcgtcctt

SEQ ID NO: 6570 - DNA, 25 bp, Saccharomyces pastorianus
taaagctccatcttccacatttagc

SEQ ID NO: 6571 - DNA, 25 bp, Saccharomyces pastorianus
tcgtccttacgctcaaacgttgtag

SEQ ID NO: 6572 - DNA, 25 bp, Saccharomyces pastorianus
aaggcggcgagcttgaaactactca

SEQ ID NO: 6573 - DNA, 25 bp, Saccharomyces pastorianus
aaatgtatcgaatagctccgctttc

SEQ ID NO: 6574 - DNA, 25 bp, Saccharomyces pastorianus
tccgctagccaaagagttcgttttt

SEQ ID NO: 6575 - DNA, 25 bp, Saccharomyces pastorianus
ggtagactcttctccgatagaacca

SEQ ID NO: 6576 - DNA, 25 bp, Saccharomyces pastorianus
aacagcgttcaaaagatgccaccat

SEQ ID NO: 6577 - DNA, 25 bp, Saccharomyces pastorianus
gtagtagccgaaacatctcccgaaa

SEQ ID NO: 6578 - DNA, 25 bp, Saccharomyces pastorianus
ttgattgtccttacagttacctgcg

SEQ ID NO: 6579 - DNA, 25 bp, Saccharomyces pastorianus
ggtgctgagcgtaaatgtttccata

SEQ ID NO: 6580 - DNA, 25 bp, Saccharomyces pastorianus
gacgacgaccatttagttgttcatc

SEQ ID NO: 6581 - DNA, 25 bp, Saccharomyces pastorianus
ggtgattacactttcattgcactag

SEQ ID NO: 6582 - DNA, 25 bp, Saccharomyces pastorianus
tagtcttgccagctcaagtttctgc

SEQ ID NO: 6583 - DNA, 25 bp, Saccharomyces pastorianus
gaagctaccttcagagatgcgtcag

SEQ ID NO: 6584 - DNA, 25 bp, Saccharomyces pastorianus
agttacctgcggctggcaaatgaaa

SEQ ID NO: 6585 - DNA, 25 bp, Saccharomyces pastorianus
gcgttctatttttataccactggtg

SEQ ID NO: 6586 - DNA, 25 bp, Saccharomyces pastorianus
gtgcgcaagatttcggtgtcgtaat

SEQ ID NO: 6587 - DNA, 25 bp, Saccharomyces pastorianus
aacataaggtttgcatccagcccga

SEQ ID NO: 6588 - DNA, 25 bp, Saccharomyces pastorianus
accactattgacatcttgcatgcca

SEQ ID NO: 6589 - DNA, 25 bp, Saccharomyces pastorianus
ggctaactttgttcgatgaccaagc

SEQ ID NO: 6590 - DNA, 25 bp, Saccharomyces pastorianus
taaacattgctagggctcaagccga

SEQ ID NO: 6591 - DNA, 25 bp, Saccharomyces pastorianus
gtgataccaacaatgcaagccctaa

SEQ ID NO: 6592 - DNA, 25 bp, Saccharomyces pastorianus
cagctgctggcttaacgaaatttat

SEQ ID NO: 6593 - DNA, 25 bp, Saccharomyces pastorianus
atatcctgcctgttccaatgaaaac

SEQ ID NO: 6594 - DNA, 25 bp, Saccharomyces pastorianus
acaattgcttggagttgacgctaat

SEQ ID NO: 6595 - DNA, 25 bp, Saccharomyces pastorianus
atgggcggtcaatcagctgctggct

SEQ ID NO: 6596 - DNA, 25 bp, Saccharomyces pastorianus
atgactttaggatcagagcacgcga

SEQ ID NO: 6597 - DNA, 25 bp, Saccharomyces pastorianus
ggctgctattagtttcttgaaggtc

SEQ ID NO: 6598 - DNA, 25 bp, Saccharomyces pastorianus
gggacgtaatgccaacttcatcact

SEQ ID NO: 6599 - DNA, 25 bp, Saccharomyces pastorianus
gttgccaacctacacagtttgaatc

SEQ ID NO: 6600 - DNA, 25 bp, Saccharomyces pastorianus
agagaccaacgaaatcatcctagtg

SEQ ID NO: 6601 - DNA, 25 bp, Saccharomyces pastorianus
aattttcactccttcgaccaaagct

SEQ ID NO: 6602 - DNA, 25 bp, Saccharomyces pastorianus
aaagggcattatcattgctgacacc

SEQ ID NO: 6603 - DNA, 25 bp, Saccharomyces pastorianus
gcagagctggccgtaagactatatt

SEQ ID NO: 6604 - DNA, 25 bp, Saccharomyces pastorianus
ggaacggtgcctcctacaagctagg

SEQ ID NO: 6605 - DNA, 25 bp, Saccharomyces pastorianus
gaaggccgttctttgttggttcaca

SEQ ID NO: 6606 - DNA, 25 bp, Saccharomyces pastorianus
ggacgaagtgttaaccccagactct

SEQ ID NO: 6607 - DNA, 25 bp, Saccharomyces pastorianus
ggaaatgcctcaagacatcgtcgac

SEQ ID NO: 6608 - DNA, 25 bp, Saccharomyces pastorianus
tggcaccgtgcacagcttgaagcag

SEQ ID NO: 6609 - DNA, 25 bp, Saccharomyces pastorianus
aagatctgtcccacagggtggcaga

SEQ ID NO: 6610 - DNA, 25 bp, Saccharomyces pastorianus
atcgtcgacagaaccagggccaagt

SEQ ID NO: 6611 - DNA, 25 bp, Saccharomyces pastorianus
ttccactttcgagctgctacaggat

SEQ ID NO: 6612 - DNA, 25 bp, Saccharomyces pastorianus
agtgctgatggaccaaccgtactct

SEQ ID NO: 6613 - DNA, 25 bp, Saccharomyces pastorianus
acgccgtactatatgtcacctgaag

SEQ ID NO: 6614 - DNA, 25 bp, Saccharomyces pastorianus
ggtcattgggttgcgtaatattcga

SEQ ID NO: 6615 - DNA, 25 bp, Saccharomyces pastorianus
tagccaagtccctcgaaaccagtat

SEQ ID NO: 6616 - DNA, 25 bp, Saccharomyces pastorianus
tctccgctatccgatatttggtcat

SEQ ID NO: 6617 - DNA, 25 bp, Saccharomyces pastorianus
gaaaccagtatccagttcgcaacta

SEQ ID NO: 6618 - DNA, 25 bp, Saccharomyces pastorianus
ctaggtgactttgggctagccaagt

SEQ ID NO: 6619 - DNA, 25 bp, Saccharomyces pastorianus
aaggaacagtttacacacgccgtgg

SEQ ID NO: 6620 - DNA, 25 bp, Saccharomyces pastorianus
aactacatatgtgggcacgccgtac

SEQ ID NO: 6621 - DNA, 25 bp, Saccharomyces pastorianus
gaaatgtgagactatccccgagtat

SEQ ID NO: 6622 - DNA, 25 bp, Saccharomyces pastorianus
ttgcaaaaggtacccagcgtcacgg

SEQ ID NO: 6623 - DNA, 25 bp, Saccharomyces pastorianus
accaggttggtggtgactcggttct

SEQ ID NO: 6624 - DNA, 25 bp, Saccharomyces pastorianus
aaatccgcgatcttctagaccaaac

SEQ ID NO: 6625 - DNA, 25 bp, Saccharomyces pastorianus
gatcaatttgttgccctattttatg

SEQ ID NO: 6626 - DNA, 25 bp, Saccharomyces pastorianus
cagcgtcacggcagcaattggcagt

SEQ ID NO: 6627 - DNA, 25 bp, Saccharomyces pastorianus
aaaagacgaccacgcaaatccgcga

SEQ ID NO: 6628 - DNA, 25 bp, Saccharomyces pastorianus
tctgccattgaactgccgattgatc

SEQ ID NO: 6629 - DNA, 25 bp, Saccharomyces pastorianus
caagatatgttcactccccggtttt

SEQ ID NO: 6630 - DNA, 25 bp, Saccharomyces pastorianus
cggttctgatctgccaactatgtga

SEQ ID NO: 6631 - DNA, 25 bp, Saccharomyces pastorianus
tccccggttttgaaactcttgcaat

SEQ ID NO: 6632 - DNA, 25 bp, Saccharomyces pastorianus
gccactattttcaagcttcgttcaa

SEQ ID NO: 6633 - DNA, 25 bp, Saccharomyces pastorianus
agcaacactggatcgagtgccacag

SEQ ID NO: 6634 - DNA, 25 bp, Saccharomyces pastorianus
ctactacaatcactctcacacgaga

SEQ ID NO: 6635 - DNA, 25 bp, Saccharomyces pastorianus
gaacgatgcgttgatccaagtttaa

SEQ ID NO: 6636 - DNA, 25 bp, Saccharomyces pastorianus
gaggctcgatatagggattggacaa

SEQ ID NO: 6637 - DNA, 25 bp, Saccharomyces pastorianus
ccaaccttacctttctgaacgatga

SEQ ID NO: 6638 - DNA, 25 bp, Saccharomyces pastorianus
gaacgtacgtttactgcacctcaga

SEQ ID NO: 6639 - DNA, 25 bp, Saccharomyces pastorianus
gaacgatgaaccgacacctactaca

SEQ ID NO: 6640 - DNA, 25 bp, Saccharomyces pastorianus
gaaaaccttcctctatcagcgaaaa

SEQ ID NO: 6641 - DNA, 25 bp, Saccharomyces pastorianus
agagcttactcgattccaaccttac

SEQ ID NO: 6642 - DNA, 25 bp, Saccharomyces pastorianus
gagtgccacaggaaccattactgat

SEQ ID NO: 6643 - DNA, 25 bp, Saccharomyces pastorianus
ctagaattgacccttacgcagcgag

SEQ ID NO: 6644 - DNA, 25 bp, Saccharomyces pastorianus
ttgatacttcacaatctacccctat

SEQ ID NO: 6645 - DNA, 25 bp, Saccharomyces pastorianus
atccccgtaactgcccaatatattg

SEQ ID NO: 6646 - DNA, 25 bp, Saccharomyces pastorianus
ggaagtcaaaaacgcacactgccca

SEQ ID NO: 6647 - DNA, 25 bp, Saccharomyces pastorianus
tgggccaaactatgaatgacgctat

SEQ ID NO: 6648 - DNA, 25 bp, Saccharomyces pastorianus
gattacgcaaccacgatgggccaaa

SEQ ID NO: 6649 - DNA, 25 bp, Saccharomyces pastorianus
gattcgcaacggtaaattccaagca

SEQ ID NO: 6650 - DNA, 25 bp, Saccharomyces pastorianus
gtgaacacatgtacgccaaacctgt

SEQ ID NO: 6651 - DNA, 25 bp, Saccharomyces pastorianus
gtaattgacgaaagcgccaccggaa

SEQ ID NO: 6652 - DNA, 25 bp, Saccharomyces pastorianus
gaccccaagttaactctttacaatg

SEQ ID NO: 6653 - DNA, 25 bp, Saccharomyces pastorianus
gagtgctattgctcaaggaaccata

SEQ ID NO: 6654 - DNA, 25 bp, Saccharomyces pastorianus
gatgaactacttggcggtatcgaaa

SEQ ID NO: 6655 - DNA, 25 bp, Saccharomyces pastorianus
gggcctcttaactaaggatcctgaa

SEQ ID NO: 6656 - DNA, 25 bp, Saccharomyces pastorianus
gtgccaatcaccattttcaggcgat

SEQ ID NO: 6657 - DNA, 25 bp, Saccharomyces pastorianus
agtacaaatatttcagggcctctta

SEQ ID NO: 6658 - DNA, 25 bp, Saccharomyces pastorianus
taaatcttcgtgtcaagccaccata

SEQ ID NO: 6659 - DNA, 25 bp, Saccharomyces pastorianus
atgaggttttcaatgccatcctaac

SEQ ID NO: 6660 - DNA, 25 bp, Saccharomyces pastorianus
accattcttccgcaacatcaatttt

SEQ ID NO: 6661 - DNA, 25 bp, Saccharomyces pastorianus
gggccaagagatgccgctgaagtta

SEQ ID NO: 6662 - DNA, 25 bp, Saccharomyces pastorianus
aatcacccgaagacacatcatattt

SEQ ID NO: 6663 - DNA, 25 bp, Saccharomyces pastorianus
catctgttttaaccactggccaaca

SEQ ID NO: 6664 - DNA, 25 bp, Saccharomyces pastorianus
ttacacccttgccatctgttttaac

SEQ ID NO: 6665 - DNA, 25 bp, Saccharomyces pastorianus
gtacaccggaattcatggcacctga

SEQ ID NO: 6666 - DNA, 25 bp, Saccharomyces pastorianus
ttcaagccaggttaacggtctgcgt

SEQ ID NO: 6667 - DNA, 25 bp, Saccharomyces pastorianus
cggtctgcgtgactcgttgaataga

SEQ ID NO: 6668 - DNA, 25 bp, Saccharomyces pastorianus
cttatttcccgtttggtgcaacagg

SEQ ID NO: 6669 - DNA, 25 bp, Saccharomyces pastorianus
gacactgttttcgagctgggcggac

SEQ ID NO: 6670 - DNA, 25 bp, Saccharomyces pastorianus
tgggcggactccctgaacactaagg

SEQ ID NO: 6671 - DNA, 25 bp, Saccharomyces pastorianus
gatttattttgcagcctttgccaaa

SEQ ID NO: 6672 - DNA, 25 bp, Saccharomyces pastorianus
agaatggtgctcttcgtgtgtttcc

SEQ ID NO: 6673 - DNA, 25 bp, Saccharomyces pastorianus
tttttgccacttgctttatgacgat

SEQ ID NO: 6674 - DNA, 25 bp, Saccharomyces pastorianus
tgggttcaactgcatgcttcactct

SEQ ID NO: 6675 - DNA, 25 bp, Saccharomyces pastorianus
aacgtgtgccgttctggagctaatt

SEQ ID NO: 6676 - DNA, 25 bp, Saccharomyces pastorianus
gaaagattgccgtttgccgttttct

SEQ ID NO: 6677 - DNA, 25 bp, Saccharomyces pastorianus
gagttattgaacgagccaccacgtt

SEQ ID NO: 6678 - DNA, 25 bp, Saccharomyces pastorianus
gtgggccatcaggatccaatgacga

SEQ ID NO: 6679 - DNA, 25 bp, Saccharomyces pastorianus
tcgtttctccaatgggatcgcctaa

SEQ ID NO: 6680 - DNA, 25 bp, Saccharomyces pastorianus
gtgtcgaatgtctcttcaccagtaa

SEQ ID NO: 6681 - DNA, 25 bp, Saccharomyces pastorianus
gtttgcttctaacaacagcggccag

SEQ ID NO: 6682 - DNA, 25 bp, Saccharomyces pastorianus
gatttactatccattcagcagttga

SEQ ID NO: 6683 - DNA, 25 bp, Saccharomyces pastorianus
gggcaagagccacatcagtcaacga

SEQ ID NO: 6684 - DNA, 25 bp, Saccharomyces pastorianus
gggatgccaccatacgaaattcaaa

SEQ ID NO: 6685 - DNA, 25 bp, Saccharomyces pastorianus
agtaaacggctcatcacaagggtat

SEQ ID NO: 6686 - DNA, 25 bp, Saccharomyces pastorianus
gctgacagttcgaacgcttttttca

SEQ ID NO: 6687 - DNA, 25 bp, Saccharomyces pastorianus
gattattgagcacaccatcacctat

SEQ ID NO: 6688 - DNA, 25 bp, Saccharomyces pastorianus
atcgggttcaactgcgaacgccaat

SEQ ID NO: 6689 - DNA, 25 bp, Saccharomyces pastorianus
tacgggcaaaagtcaatcgggttca

SEQ ID NO: 6690 - DNA, 25 bp, Saccharomyces pastorianus
atccaagcgagtttgcgaaccaggc

SEQ ID NO: 6691 - DNA, 25 bp, Saccharomyces pastorianus
tagggacatcgcattattccagcct

SEQ ID NO: 6692 - DNA, 25 bp, Saccharomyces pastorianus
cgagcagctgcgcaatagggacatc

SEQ ID NO: 6693 - DNA, 25 bp, Saccharomyces pastorianus
caagcgcctttcgacatagatgact

SEQ ID NO: 6694 - DNA, 25 bp, Saccharomyces pastorianus
caaatctagcggtagctcgatggct

SEQ ID NO: 6695 - DNA, 25 bp, Saccharomyces pastorianus
tcttcggtgctgtcgcagtttgaga

SEQ ID NO: 6696 - DNA, 25 bp, Saccharomyces pastorianus
gaaccaggctcagggtggcgctcaa

SEQ ID NO: 6697 - DNA, 25 bp, Saccharomyces pastorianus
gacttggcattcgatctggacggta

SEQ ID NO: 6698 - DNA, 25 bp, Saccharomyces pastorianus
cttgatatcggtgtacggcctggac

SEQ ID NO: 6699 - DNA, 25 bp, Saccharomyces pastorianus
gtaagtccgtcccaattgtcaagaa

SEQ ID NO: 6700 - DNA, 25 bp, Saccharomyces pastorianus
taaacgatattccaggctcctacac

SEQ ID NO: 6701 - DNA, 25 bp, Saccharomyces pastorianus
agtaatgcccacattggacagtgcc

SEQ ID NO: 6702 - DNA, 25 bp, Saccharomyces pastorianus
ggtttagtgcaggactatcctccat

SEQ ID NO: 6703 - DNA, 25 bp, Saccharomyces pastorianus
ggaaggtgaacatttcgccatcgaa

SEQ ID NO: 6704 - DNA, 25 bp, Saccharomyces pastorianus
gaacacactattctgttgcatgcga

SEQ ID NO: 6705 - DNA, 25 bp, Saccharomyces pastorianus
tgtcgtaacctttgcgggcacaata

SEQ ID NO: 6706 - DNA, 25 bp, Saccharomyces pastorianus
gaagccggtatcgatgtcagactga

SEQ ID NO: 6707 - DNA, 25 bp, Saccharomyces pastorianus
aatacgacaacttgctggctgccgt

SEQ ID NO: 6708 - DNA, 25 bp, Saccharomyces pastorianus
gtagaggttatgtcacttccggcgg

SEQ ID NO: 6709 - DNA, 25 bp, Saccharomyces pastorianus
aaggatgccacttacacgggtatca

SEQ ID NO: 6710 - DNA, 25 bp, Saccharomyces pastorianus
tatgatgcagtcagcaggacgaatc

SEQ ID NO: 6711 - DNA, 25 bp, Saccharomyces pastorianus
caatcaaactggctcaagggaacaa

SEQ ID NO: 6712 - DNA, 25 bp, Saccharomyces pastorianus
cagcgcagatatactatcgatggaa

SEQ ID NO: 6713 - DNA, 25 bp, Saccharomyces pastorianus
ggtagtgtggaaaacgctcaaatga

SEQ ID NO: 6714 - DNA, 25 bp, Saccharomyces pastorianus
atcgtaaacaagaacaaccctgctg

SEQ ID NO: 6715 - DNA, 25 bp, Saccharomyces pastorianus
gacgaatcaacaggagggagcttct

SEQ ID NO: 6716 - DNA, 25 bp, Saccharomyces pastorianus
aaccgcaggttttttgcgtcagcaa

SEQ ID NO: 6717 - DNA, 25 bp, Saccharomyces pastorianus
ttgaggagctcgtgtaggctttcaa

SEQ ID NO: 6718 - DNA, 25 bp, Saccharomyces pastorianus
gatggccaagcttctaaactcaata

SEQ ID NO: 6719 - DNA, 25 bp, Saccharomyces pastorianus
agggagcttctatctgaggcagaga

SEQ ID NO: 6720 - DNA, 25 bp, Saccharomyces pastorianus
gtaggctttcaaggtcctctttaag

SEQ ID NO: 6721 - DNA, 25 bp, Saccharomyces pastorianus
tagactgctacccattccagaattg

SEQ ID NO: 6722 - DNA, 25 bp, Saccharomyces pastorianus
atagatctgggcatcgctttcgacc

SEQ ID NO: 6723 - DNA, 25 bp, Saccharomyces pastorianus
ggtgttgccgcaagttctattgtcg

SEQ ID NO: 6724 - DNA, 25 bp, Saccharomyces pastorianus
tcgattgttcaacaggtgagcctat

SEQ ID NO: 6725 - DNA, 25 bp, Saccharomyces pastorianus
gactcttttcctgatccaaatgact

SEQ ID NO: 6726 - DNA, 25 bp, Saccharomyces pastorianus
tccagaattggttcccttcagatta

SEQ ID NO: 6727 - DNA, 25 bp, Saccharomyces pastorianus
cgctttcgaccagggtagactgcta

SEQ ID NO: 6728 - DNA, 25 bp, Saccharomyces pastorianus
gaaagagtctatgccttactaagaa

SEQ ID NO: 6729 - DNA, 25 bp, Saccharomyces pastorianus
attcatgggtaatgtcgccagtcaa

SEQ ID NO: 6730 - DNA, 25 bp, Saccharomyces pastorianus
taagcgtcgagtctagtgtacagga

SEQ ID NO: 6731 - DNA, 25 bp, Saccharomyces pastorianus
agcaagcaacagatccgtcgaattt

SEQ ID NO: 6732 - DNA, 25 bp, Saccharomyces pastorianus
cgacctcctcgttatctaaatacaa

SEQ ID NO: 6733 - DNA, 25 bp, Saccharomyces pastorianus
gtatgcttatactttgcaaggccat

SEQ ID NO: 6734 - DNA, 25 bp, Saccharomyces pastorianus
aattagtccctgatgatgccactgc

SEQ ID NO: 6735 - DNA, 25 bp, Saccharomyces pastorianus
tttgatctgttgctgtggtggttct

SEQ ID NO: 6736 - DNA, 25 bp, Saccharomyces pastorianus
gcaaggccatgagcattcttccaat

SEQ ID NO: 6737 - DNA, 25 bp, Saccharomyces pastorianus
gagcattcttccaatgattcttcag

SEQ ID NO: 6738 - DNA, 25 bp, Saccharomyces pastorianus
gaactagcatgccagttacaaccga

SEQ ID NO: 6739 - DNA, 25 bp, Saccharomyces pastorianus
cagttgttatattccatgacgagat

SEQ ID NO: 6740 - DNA, 25 bp, Saccharomyces pastorianus
gatcaatcaatcctgtcaacgtagt

SEQ ID NO: 6741 - DNA, 25 bp, Saccharomyces pastorianus
actaaccgtggctatgaatttggat

SEQ ID NO: 6742 - DNA, 25 bp, Saccharomyces pastorianus
gctagcatgcgatcctcaacattat

SEQ ID NO: 6743 - DNA, 25 bp, Saccharomyces pastorianus
ttggacaccaagatctattctgagt

SEQ ID NO: 6744 - DNA, 25 bp, Saccharomyces pastorianus
gaggccatcgtcaaggagcatttcg

SEQ ID NO: 6745 - DNA, 25 bp, Saccharomyces pastorianus
aggtgacttaaacgccattagaggc

SEQ ID NO: 6746 - DNA, 25 bp, Saccharomyces pastorianus
gttgttataacctcggatgaagcca

SEQ ID NO: 6747 - DNA, 25 bp, Saccharomyces pastorianus
gacaccattgactttgaggccatcg

SEQ ID NO: 6748 - DNA, 25 bp, Saccharomyces pastorianus
gttggaagccactgacgacgttcta

SEQ ID NO: 6749 - DNA, 25 bp, Saccharomyces pastorianus
gaatctgcagttcaatctggtcaag

SEQ ID NO: 6750 - DNA, 25 bp, Saccharomyces pastorianus
gacggatccaagacggacccaattg

SEQ ID NO: 6751 - DNA, 25 bp, Saccharomyces pastorianus
tcgctgactggcctattttgggtaa

SEQ ID NO: 6752 - DNA, 25 bp, Saccharomyces pastorianus
cattagaggcttaccagaatctgca

SEQ ID NO: 6753 - DNA, 25 bp, Saccharomyces pastorianus
aaggacgctttaccatcagtcactt

SEQ ID NO: 6754 - DNA, 25 bp, Saccharomyces pastorianus
gagctttgagaatcgaaaccggtaa

SEQ ID NO: 6755 - DNA, 25 bp, Saccharomyces pastorianus
cgtcacaaaagatccgctaccggtg

SEQ ID NO: 6756 - DNA, 25 bp, Saccharomyces pastorianus
cgaagcacattacggccaaacgttg

SEQ ID NO: 6757 - DNA, 25 bp, Saccharomyces pastorianus
gcacattacggccaaacgttgggta

SEQ ID NO: 6758 - DNA, 25 bp, Saccharomyces pastorianus
cattcaagcaatggttcgaagcaca

SEQ ID NO: 6759 - DNA, 25 bp, Saccharomyces pastorianus
gttcgaagcacattacggccaaacg

SEQ ID NO: 6760 - DNA, 25 bp, Saccharomyces pastorianus
ttcgaagcacattacggccaaacgt

SEQ ID NO: 6761 - DNA, 25 bp, Saccharomyces pastorianus
tcgaagcacattacggccaaacgtt

SEQ ID NO: 6762 - DNA, 25 bp, Saccharomyces pastorianus
tcgaacaatgaattggtcagaacca

SEQ ID NO: 6763 - DNA, 25 bp, Saccharomyces pastorianus
aaaagatccgctaccggtgccaagc

SEQ ID NO: 6764 - DNA, 25 bp, Saccharomyces pastorianus
cggtgccaagcgtgctcaattcaga

SEQ ID NO: 6765 - DNA, 25 bp, Saccharomyces pastorianus
ctcgctgatgattgacgtcgttttt

SEQ ID NO: 6766 - DNA, 25 bp, Saccharomyces pastorianus
atgtcgacgtatgacgagatcgaaa

SEQ ID NO: 6767 - DNA, 25 bp, Saccharomyces pastorianus
aaatcaaatgttcacgtacccctgt

SEQ ID NO: 6768 - DNA, 25 bp, Saccharomyces pastorianus
aaatatacctggacgacctgtttga

SEQ ID NO: 6769 - DNA, 25 bp, Saccharomyces pastorianus
gccctagttgctcgctgatgattga

SEQ ID NO: 6770 - DNA, 25 bp, Saccharomyces pastorianus
aaaggaagacctggctgagtactac

SEQ ID NO: 6771 - DNA, 25 bp, Saccharomyces pastorianus
ctggacgacctgtttgatggtgaaa

SEQ ID NO: 6772 - DNA, 25 bp, Saccharomyces pastorianus
gtggagacaggttccaaatatacct

SEQ ID NO: 6773 - DNA, 25 bp, Saccharomyces pastorianus
ctgtccctgtggagacaggttccaa

SEQ ID NO: 6774 - DNA, 25 bp, Saccharomyces pastorianus
aggatatgacctttgagccggaaaa

SEQ ID NO: 6775 - DNA, 25 bp, Saccharomyces pastorianus
aaatagctgtttgccctagttgctc

SEQ ID NO: 6776 - DNA, 25 bp, Saccharomyces pastorianus
aagatctcccagttcgattcagtga

SEQ ID NO: 6777 - DNA, 25 bp, Saccharomyces pastorianus
gtttggttctatcatctggtcatac

SEQ ID NO: 6778 - DNA, 25 bp, Saccharomyces pastorianus
gtaacatcggccaatggacctcagg

SEQ ID NO: 6779 - DNA, 25 bp, Saccharomyces pastorianus
atatcgtacttgacttcatcggcgg

SEQ ID NO: 6780 - DNA, 25 bp, Saccharomyces pastorianus
attttgagtcattccagctcgctga

SEQ ID NO: 6781 - DNA, 25 bp, Saccharomyces pastorianus
ggtcatacaattactcacactacta

SEQ ID NO: 6782 - DNA, 25 bp, Saccharomyces pastorianus
gtgcatacgttaccaccgtaggcga

SEQ ID NO: 6783 - DNA, 25 bp, Saccharomyces pastorianus
gggacaatccaagtgccaatgctag

SEQ ID NO: 6784 - DNA, 25 bp, Saccharomyces pastorianus
tatcgattacttaacctgcagaggt

SEQ ID NO: 6785 - DNA, 25 bp, Saccharomyces pastorianus
gtaggcgactacgttgccaattaca

SEQ ID NO: 6786 - DNA, 25 bp, Saccharomyces pastorianus
gctgattcatggtggcggtgcatac

SEQ ID NO: 6787 - DNA, 25 bp, Saccharomyces pastorianus
ttgacgctttgcaattgaccgataa

SEQ ID NO: 6788 - DNA, 25 bp, Saccharomyces pastorianus
ttggcagccttcagatgatgtcatc

SEQ ID NO: 6789 - DNA, 25 bp, Saccharomyces pastorianus
gtggacgccgatgggttcaagaaca

SEQ ID NO: 6790 - DNA, 25 bp, Saccharomyces pastorianus
gaacgtggccttcttgtatgacatg

SEQ ID NO: 6791 - DNA, 25 bp, Saccharomyces pastorianus
agtaaggtccgtctttgtcatcgac

SEQ ID NO: 6792 - DNA, 25 bp, Saccharomyces pastorianus
caagttgattggtctttccgtggaa

SEQ ID NO: 6793 - DNA, 25 bp, Saccharomyces pastorianus
aacttccatgactacctgggcgatt

SEQ ID NO: 6794 - DNA, 25 bp, Saccharomyces pastorianus
gaagacgttgagtcccaccaaaagt

SEQ ID NO: 6795 - DNA, 25 bp, Saccharomyces pastorianus
gaacatcaacgacggctctttgaaa

SEQ ID NO: 6796 - DNA, 25 bp, Saccharomyces pastorianus
ttagactgatctttacttacccctc

SEQ ID NO: 6797 - DNA, 25 bp, Saccharomyces pastorianus
acacctgtatgcaccactgaagttg

SEQ ID NO: 6798 - DNA, 25 bp, Saccharomyces pastorianus
gaaaaccattactactcacaacata

SEQ ID NO: 6799 - DNA, 25 bp, Saccharomyces pastorianus
gttaatatacatctacagcctgaat

SEQ ID NO: 6800 - DNA, 25 bp, Saccharomyces pastorianus
gttttgcctgtactggaatatccaa

SEQ ID NO: 6801 - DNA, 25 bp, Saccharomyces pastorianus
aaacaacgtcgatctagccatagta

SEQ ID NO: 6802 - DNA, 25 bp, Saccharomyces pastorianus
gagaagacctcgttgcatcacaggc

SEQ ID NO: 6803 - DNA, 25 bp, Saccharomyces pastorianus
taccaaaggtgctcgtaccaaaaag

SEQ ID NO: 6804 - DNA, 25 bp, Saccharomyces pastorianus
gaacgaaccaaactcttatgcagga

SEQ ID NO: 6805 - DNA, 25 bp, Saccharomyces pastorianus
cgtgcctgaccaaactttaccaaag

SEQ ID NO: 6806 - DNA, 25 bp, Saccharomyces pastorianus
gacgatgtactttttggtcattgcg

SEQ ID NO: 6807 - DNA, 25 bp, Saccharomyces pastorianus
gaagattcaccatggaaccgatagt

SEQ ID NO: 6808 - DNA, 25 bp, Saccharomyces pastorianus
gcatcacaggctagtccgaagactc

SEQ ID NO: 6809 - DNA, 25 bp, Saccharomyces pastorianus
gataggtctggtcccattgatttat

SEQ ID NO: 6810 - DNA, 25 bp, Saccharomyces pastorianus
taatgcttcatatttccatggtgct

SEQ ID NO: 6811 - DNA, 25 bp, Saccharomyces pastorianus
gaggaggtatttgcggtcaccacca

SEQ ID NO: 6812 - DNA, 25 bp, Saccharomyces pastorianus
cttcgatttccatgacttttcggat

SEQ ID NO: 6813 - DNA, 25 bp, Saccharomyces pastorianus
atgagtatctccattgttgcgctac

SEQ ID NO: 6814 - DNA, 25 bp, Saccharomyces pastorianus
gcaagaccgtctaaaccatcacaga

SEQ ID NO: 6815 - DNA, 25 bp, Saccharomyces pastorianus
taccgagttaggcagtagcgccgct

SEQ ID NO: 6816 - DNA, 25 bp, Saccharomyces pastorianus
aagctctactagaagccgggatcca

SEQ ID NO: 6817 - DNA, 25 bp, Saccharomyces pastorianus
agacatgttagcctccttgagcaat

SEQ ID NO: 6818 - DNA, 25 bp, Saccharomyces pastorianus
agcgccgctccatcaaaattaactg

SEQ ID NO: 6819 - DNA, 25 bp, Saccharomyces pastorianus
gagatcgacgatcttgataccgagt

SEQ ID NO: 6820 - DNA, 25 bp, Saccharomyces pastorianus
gcccgtatatgactcccagaagact

SEQ ID NO: 6821 - DNA, 25 bp, Saccharomyces pastorianus
tatttctaggcgtccatctttggtc

SEQ ID NO: 6822 - DNA, 25 bp, Saccharomyces pastorianus
gggacacactagtggcattcacaga

SEQ ID NO: 6823 - DNA, 25 bp, Saccharomyces pastorianus
gatcatcctttaattctcatgctcc

SEQ ID NO: 6824 - DNA, 25 bp, Saccharomyces pastorianus
attctctcttccttgtcgaatggga

SEQ ID NO: 6825 - DNA, 25 bp, Saccharomyces pastorianus
aagaggaagacatcgacccactaca

SEQ ID NO: 6826 - DNA, 25 bp, Saccharomyces pastorianus
gaaatttccattgtcctacctaaca

SEQ ID NO: 6827 - DNA, 25 bp, Saccharomyces pastorianus
gacgcagcgaacataccagtacaat

SEQ ID NO: 6828 - DNA, 25 bp, Saccharomyces pastorianus
atctttggtcgtcagcccgtatatg

SEQ ID NO: 6829 - DNA, 25 bp, Saccharomyces pastorianus
taaatcctataacctctccgaactg

SEQ ID NO: 6830 - DNA, 25 bp, Saccharomyces pastorianus
ttcgcaaacaagcatccgtggtcta

SEQ ID NO: 6831 - DNA, 25 bp, Saccharomyces pastorianus
agaattcagaagtcccaccagaaag

SEQ ID NO: 6832 - DNA, 25 bp, Saccharomyces pastorianus
gagtgatttctttcaaaataccgtt

SEQ ID NO: 6833 - DNA, 25 bp, Saccharomyces pastorianus
tccgtaaccgtgaaaagcttcttag

SEQ ID NO: 6834 - DNA, 25 bp, Saccharomyces pastorianus
gaaagccacacaacgaagaacaata

SEQ ID NO: 6835 - DNA, 25 bp, Saccharomyces pastorianus
gagtccgaatataacgcatcaaata

SEQ ID NO: 6836 - DNA, 25 bp, Saccharomyces pastorianus
gcgaatataactccacaggcagtga

SEQ ID NO: 6837 - DNA, 25 bp, Saccharomyces pastorianus
gacgaagcaccggagctaagtttaa

SEQ ID NO: 6838 - DNA, 25 bp, Saccharomyces pastorianus
gtgtgttgcaaaaaatccgtaaccg

SEQ ID NO: 6839 - DNA, 25 bp, Saccharomyces pastorianus
gcttctgaatcatattgggaactct

SEQ ID NO: 6840 - DNA, 25 bp, Saccharomyces pastorianus
gcgaacaataccatacaaccagaaa

SEQ ID NO: 6841 - DNA, 25 bp, Saccharomyces pastorianus
gggaactctgtttcacactcaagaa

SEQ ID NO: 6842 - DNA, 25 bp, Saccharomyces pastorianus
aaatcactaagccattccggactag

SEQ ID NO: 6843 - DNA, 25 bp, Saccharomyces pastorianus
gaattccgttaacccattgctaaga

SEQ ID NO: 6844 - DNA, 25 bp, Saccharomyces pastorianus
actctttatacaatcccgcagatca

SEQ ID NO: 6845 - DNA, 25 bp, Saccharomyces pastorianus
aacgcgttccggtagcataccagaa

SEQ ID NO: 6846 - DNA, 25 bp, Saccharomyces pastorianus
aacaccttcgtcaagaattccttct

SEQ ID NO: 6847 - DNA, 25 bp, Saccharomyces pastorianus
aaccttaatggttcatcctcgacag

SEQ ID NO: 6848 - DNA, 25 bp, Saccharomyces pastorianus
agaacggttcgttgtcttcacagca

SEQ ID NO: 6849 - DNA, 25 bp, Saccharomyces pastorianus
atctttatctcaagcacagccatca

SEQ ID NO: 6850 - DNA, 25 bp, Saccharomyces pastorianus
gttcattcgaacttttcctaccaat

SEQ ID NO: 6851 - DNA, 25 bp, Saccharomyces pastorianus
gacgaatcgatgttgtctgcgcaca

SEQ ID NO: 6852 - DNA, 25 bp, Saccharomyces pastorianus
gaattccttctggttattcagccaa

SEQ ID NO: 6853 - DNA, 25 bp, Saccharomyces pastorianus
gttattccattcacagcatcgagca

SEQ ID NO: 6854 - DNA, 25 bp, Saccharomyces pastorianus
gggctgcgttattcgatatacattg

SEQ ID NO: 6855 - DNA, 25 bp, Saccharomyces pastorianus
gtaagacgcatctttctagctcctt

SEQ ID NO: 6856 - DNA, 25 bp, Saccharomyces pastorianus
gaacgtcgggtggaagtacttgcaa

SEQ ID NO: 6857 - DNA, 25 bp, Saccharomyces pastorianus
actggcactgcctacttaatgaaca

SEQ ID NO: 6858 - DNA, 25 bp, Saccharomyces pastorianus
gcgatatcctctgccattggtgtaa

SEQ ID NO: 6859 - DNA, 25 bp, Saccharomyces pastorianus
catgcttcatcacttacggttgtag

SEQ ID NO: 6860 - DNA, 25 bp, Saccharomyces pastorianus
gctccttccaaatcatttccagaga

SEQ ID NO: 6861 - DNA, 25 bp, Saccharomyces pastorianus
tatttggtttgcgatatcctctgcc

SEQ ID NO: 6862 - DNA, 25 bp, Saccharomyces pastorianus
aataagcgacccgttattccattca

SEQ ID NO: 6863 - DNA, 25 bp, Saccharomyces pastorianus
atgctaactggcgactatttggttt

SEQ ID NO: 6864 - DNA, 25 bp, Saccharomyces pastorianus
agccggactcctactacatgtataa

SEQ ID NO: 6865 - DNA, 25 bp, Saccharomyces pastorianus
atgcagttttcctaagtgccatcgc

SEQ ID NO: 6866 - DNA, 25 bp, Saccharomyces pastorianus
aattttgccggattcttgggttcag

SEQ ID NO: 6867 - DNA, 25 bp, Saccharomyces pastorianus
gccttaatatcgttggccatttgcc

SEQ ID NO: 6868 - DNA, 25 bp, Saccharomyces pastorianus
ttgggtgctaacttgtctggtaact

SEQ ID NO: 6869 - DNA, 25 bp, Saccharomyces pastorianus
atcatcgaagtttaccacggcgcta

SEQ ID NO: 6870 - DNA, 25 bp, Saccharomyces pastorianus
aaaggctacgtcaacattttccact

SEQ ID NO: 6871 - DNA, 25 bp, Saccharomyces pastorianus
ggtgtcatttctgctgattacttca

SEQ ID NO: 6872 - DNA, 25 bp, Saccharomyces pastorianus
tcagtgggcatttccgtacctatta

SEQ ID NO: 6873 - DNA, 25 bp, Saccharomyces pastorianus
gtcggataccttgttgcagcattga

SEQ ID NO: 6874 - DNA, 25 bp, Saccharomyces pastorianus
gatatgaccgcattgttgcccaagt

SEQ ID NO: 6875 - DNA, 25 bp, Saccharomyces pastorianus
taaaggtgccgtgtactcgttcgac

SEQ ID NO: 6876 - DNA, 25 bp, Saccharomyces pastorianus
gatcatgccttttttggacaaccaa

SEQ ID NO: 6877 - DNA, 25 bp, Saccharomyces pastorianus
gtatgagccaggtaccgacggtaga

SEQ ID NO: 6878 - DNA, 25 bp, Saccharomyces pastorianus
gaatatccaacatcttctatacggg

SEQ ID NO: 6879 - DNA, 25 bp, Saccharomyces pastorianus
tgattactcgatcaactctcgttat

SEQ ID NO: 6880 - DNA, 25 bp, Saccharomyces pastorianus
aagcctttgaagtacctgtccgtgg

SEQ ID NO: 6881 - DNA, 25 bp, Saccharomyces pastorianus
gtgacgggctggaaatcctcatcgt

SEQ ID NO: 6882 - DNA, 25 bp, Saccharomyces pastorianus
gctatccataaactcagctgccagg

SEQ ID NO: 6883 - DNA, 25 bp, Saccharomyces pastorianus
ttatgagcccaaggtctttgactgt

SEQ ID NO: 6884 - DNA, 25 bp, Saccharomyces pastorianus
tggcgctgcagcttctttgatcatg

SEQ ID NO: 6885 - DNA, 25 bp, Saccharomyces pastorianus
tactacgttcacaccattattgctg

SEQ ID NO: 6886 - DNA, 25 bp, Saccharomyces pastorianus
ttgccagtgtgatttgttcgagtac

SEQ ID NO: 6887 - DNA, 25 bp, Saccharomyces pastorianus
gtatttgccagtgtgatttgttcga

SEQ ID NO: 6888 - DNA, 25 bp, Saccharomyces pastorianus
gaataacaagaaagccaagtactat

SEQ ID NO: 6889 - DNA, 25 bp, Saccharomyces pastorianus
aatgtttatgtcatcgcctacaatt

SEQ ID NO: 6890 - DNA, 25 bp, Saccharomyces pastorianus
tatgtcatcgcctacaattgatttc

SEQ ID NO: 6891 - DNA, 25 bp, Saccharomyces pastorianus
tcgagttttttcacagaataacaag

SEQ ID NO: 6892 - DNA, 25 bp, Saccharomyces pastorianus
gattcttctatgataatccggtgat

SEQ ID NO: 6893 - DNA, 25 bp, Saccharomyces pastorianus
gtgtgatttgttcgagtacatttta

SEQ ID NO: 6894 - DNA, 25 bp, Saccharomyces pastorianus
gataatccggtgatcgagttttttc

SEQ ID NO: 6895 - DNA, 25 bp, Saccharomyces pastorianus
caatgtgggtatttgccagtgtgat

SEQ ID NO: 6896 - DNA, 25 bp, Saccharomyces pastorianus
gccaagtactattgcaatgtgggta

SEQ ID NO: 6897 - DNA, 25 bp, Saccharomyces pastorianus
gggcccgtgaaaaccacattccata

SEQ ID NO: 6898 - DNA, 25 bp, Saccharomyces pastorianus
ttgattcctggtggtttcggtgtta

SEQ ID NO: 6899 - DNA, 25 bp, Saccharomyces pastorianus
ctcagtaccacccagaatatacgtc

SEQ ID NO: 6900 - DNA, 25 bp, Saccharomyces pastorianus
gacagtcactcagcagaattctacc

SEQ ID NO: 6901 - DNA, 25 bp, Saccharomyces pastorianus
tttcttgggtttggtggctgcctcc

SEQ ID NO: 6902 - DNA, 25 bp, Saccharomyces pastorianus
gaagaatcatccctactatatcgcc

SEQ ID NO: 6903 - DNA, 25 bp, Saccharomyces pastorianus
tgaaatccgcgaaagacaccgtcac

SEQ ID NO: 6904 - DNA, 25 bp, Saccharomyces pastorianus
cttatttccaaaacgacaccgagtg

SEQ ID NO: 6905 - DNA, 25 bp, Saccharomyces pastorianus
gaattctacccagacatcgacgaaa

SEQ ID NO: 6906 - DNA, 25 bp, Saccharomyces pastorianus
tacggcgatgcttctgaaatccgcg

SEQ ID NO: 6907 - DNA, 25 bp, Saccharomyces pastorianus
atgtcgttgtcttcatgccggaaat

SEQ ID NO: 6908 - DNA, 25 bp, Saccharomyces pastorianus
aaaagctggtaccaaattgcctggg

SEQ ID NO: 6909 - DNA, 25 bp, Saccharomyces pastorianus
agtcggattgcgtagctttaagaat

SEQ ID NO: 6910 - DNA, 25 bp, Saccharomyces pastorianus
caagcacgagtatgcgccaaggttt

SEQ ID NO: 6911 - DNA, 25 bp, Saccharomyces pastorianus
gcagagtacccgttcgtaccggtgg

SEQ ID NO: 6912 - DNA, 25 bp, Saccharomyces pastorianus
agacgatcccgtgaagaatttctac

SEQ ID NO: 6913 - DNA, 25 bp, Saccharomyces pastorianus
tattaaccctattgctaagagattc

SEQ ID NO: 6914 - DNA, 25 bp, Saccharomyces pastorianus
tacaattcggtaagtacgggctacg

SEQ ID NO: 6915 - DNA, 25 bp, Saccharomyces pastorianus
gtatcaggataactgcacagcaact

SEQ ID NO: 6916 - DNA, 25 bp, Saccharomyces pastorianus
gagaatgcaaagaaaccgtccaaga

SEQ ID NO: 6917 - DNA, 25 bp, Saccharomyces pastorianus
tgtacaaacgttgccgtctgtgtta

SEQ ID NO: 6918 - DNA, 25 bp, Saccharomyces pastorianus
gagatacgtcagacctttgaccaat

SEQ ID NO: 6919 - DNA, 25 bp, Saccharomyces pastorianus
tgatcatgaacgtcaacgtgccctc

SEQ ID NO: 6920 - DNA, 25 bp, Saccharomyces pastorianus
gataatcccgagtatgtgatcatga

SEQ ID NO: 6921 - DNA, 25 bp, Saccharomyces pastorianus
aagtatgcacttgaccttagcacaa

SEQ ID NO: 6922 - DNA, 25 bp, Saccharomyces pastorianus
gaaaacagctatcggtgtgaccaca

SEQ ID NO: 6923 - DNA, 25 bp, Saccharomyces pastorianus
gtttggcaaatgttacctgtaagac

SEQ ID NO: 6924 - DNA, 25 bp, Saccharomyces pastorianus
atagcacactatttgtctcaggtat

SEQ ID NO: 6925 - DNA, 25 bp, Saccharomyces pastorianus
gtaagacaacgacagctggtcccct

SEQ ID NO: 6926 - DNA, 25 bp, Saccharomyces pastorianus
gctgctacgatcaagccccataaaa

SEQ ID NO: 6927 - DNA, 25 bp, Saccharomyces pastorianus
gttggagaacattgagcgacgctct

SEQ ID NO: 6928 - DNA, 25 bp, Saccharomyces pastorianus
ggaactttggttgcctaatgaaaat

SEQ ID NO: 6929 - DNA, 25 bp, Saccharomyces pastorianus
gcacaattcattggccgttggagaa

SEQ ID NO: 6930 - DNA, 25 bp, Saccharomyces pastorianus
aaatcctgtacgatcatggtgtaag

SEQ ID NO: 6931 - DNA, 25 bp, Saccharomyces pastorianus
tattacctgatgatattgactggca

SEQ ID NO: 6932 - DNA, 25 bp, Saccharomyces pastorianus
ctttctttttgtctgacgagtgcaa

SEQ ID NO: 6933 - DNA, 25 bp, Saccharomyces pastorianus
aaaacaaggatttcaccacgctggt

SEQ ID NO: 6934 - DNA, 25 bp, Saccharomyces pastorianus
gttgaaaccggccagtgatataaaa

SEQ ID NO: 6935 - DNA, 25 bp, Saccharomyces pastorianus
agtaccaaatttgcgcattgttgaa

SEQ ID NO: 6936 - DNA, 25 bp, Saccharomyces pastorianus
cattgttgaaacagtcgactccttg

SEQ ID NO: 6937 - DNA, 25 bp, Saccharomyces pastorianus
tcaccacgctggttagttggaagca

SEQ ID NO: 6938 - DNA, 25 bp, Saccharomyces pastorianus
ctattggctcatggaatgtttccca

SEQ ID NO: 6939 - DNA, 25 bp, Saccharomyces pastorianus
aatttcaacctgattgtgacccaat

SEQ ID NO: 6940 - DNA, 25 bp, Saccharomyces pastorianus
actggcattttgtcggtggtttgca

SEQ ID NO: 6941 - DNA, 25 bp, Saccharomyces pastorianus
gagcatatcttgcaacagcgcagat

SEQ ID NO: 6942 - DNA, 25 bp, Saccharomyces pastorianus
gtgccgacttggacgtaggttacct

SEQ ID NO: 6943 - DNA, 25 bp, Saccharomyces pastorianus
tatatttccaggcagcattcgtaca

SEQ ID NO: 6944 - DNA, 25 bp, Saccharomyces pastorianus
cgggttcaccccagacataatgatt

SEQ ID NO: 6945 - DNA, 25 bp, Saccharomyces pastorianus
aggtggtactacttcatcgagatat

SEQ ID NO: 6946 - DNA, 25 bp, Saccharomyces pastorianus
tgaagagcctgtctatctccacaat

SEQ ID NO: 6947 - DNA, 25 bp, Saccharomyces pastorianus
aagtgtgtaacgaatccttcctcct

SEQ ID NO: 6948 - DNA, 25 bp, Saccharomyces pastorianus
atagaggctcgtatgcacaaatcac

SEQ ID NO: 6949 - DNA, 25 bp, Saccharomyces pastorianus
agtgacctacagtactttgcaagag

SEQ ID NO: 6950 - DNA, 25 bp, Saccharomyces pastorianus
gactggaccgtgtttcggagcatat

SEQ ID NO: 6951 - DNA, 25 bp, Saccharomyces pastorianus
gcgtatccacaagcctctttgatta

SEQ ID NO: 6952 - DNA, 25 bp, Saccharomyces pastorianus
ggcgtgatcgtgtacctcagacaag

SEQ ID NO: 6953 - DNA, 25 bp, Saccharomyces pastorianus
ctggacctgggcgttgcaaacatca

SEQ ID NO: 6954 - DNA, 25 bp, Saccharomyces pastorianus
gtgagccctcgagcaacattcaagg

SEQ ID NO: 6955 - DNA, 25 bp, Saccharomyces pastorianus
atcatacgctagtccggatacactc

SEQ ID NO: 6956 - DNA, 25 bp, Saccharomyces pastorianus
aaacaggtagaacacgtgccgctcc

SEQ ID NO: 6957 - DNA, 25 bp, Saccharomyces pastorianus
agaatgggccacctactgacggagc

SEQ ID NO: 6958 - DNA, 25 bp, Saccharomyces pastorianus
aaaacgcctggagtgcccgttgcga

SEQ ID NO: 6959 - DNA, 25 bp, Saccharomyces pastorianus
gagacttctcgctaggcaaggccat

SEQ ID NO: 6960 - DNA, 25 bp, Saccharomyces pastorianus
tgagcgagtgcccatggtgcctata

SEQ ID NO: 6961 - DNA, 25 bp, Saccharomyces pastorianus
gcaggctcattgcatgcgaccgtga

SEQ ID NO: 6962 - DNA, 25 bp, Saccharomyces pastorianus
aatctgcaggacttgggcgctgaca

SEQ ID NO: 6963 - DNA, 25 bp, Saccharomyces pastorianus
gaagctgcggaactcactggtcaat

SEQ ID NO: 6964 - DNA, 25 bp, Saccharomyces pastorianus
gcatcggtgcatccacgatctaaat

SEQ ID NO: 6965 - DNA, 25 bp, Saccharomyces pastorianus
aaagcccaaaccgttcatgcagaag

SEQ ID NO: 6966 - DNA, 25 bp, Saccharomyces pastorianus
ttacattctaagaccaggccagcag

SEQ ID NO: 6967 - DNA, 25 bp, Saccharomyces pastorianus
gaatgacatcgcagccagggcaagg

SEQ ID NO: 6968 - DNA, 25 bp, Saccharomyces pastorianus
gttgtccagccatctcaaacaagac

SEQ ID NO: 6969 - DNA, 25 bp, Saccharomyces pastorianus
aactgcgccaggaacgagttctcag

SEQ ID NO: 6970 - DNA, 25 bp, Saccharomyces pastorianus
gaacacgccgttgtcaaagcccaaa

SEQ ID NO: 6971 - DNA, 25 bp, Saccharomyces pastorianus
gaagccgaactttttaatgcccact

SEQ ID NO: 6972 - DNA, 25 bp, Saccharomyces pastorianus
aggccgtcacactcaattcaataca

SEQ ID NO: 6973 - DNA, 25 bp, Saccharomyces pastorianus
gtacatcctaatgctcaccgcaatg

SEQ ID NO: 6974 - DNA, 25 bp, Saccharomyces pastorianus
atgagaaagattatcgccgccgaag

SEQ ID NO: 6975 - DNA, 25 bp, Saccharomyces pastorianus
acatcttgagaggtgttgccggtgc

SEQ ID NO: 6976 - DNA, 25 bp, Saccharomyces pastorianus
caagaagggtggtgctcgtcaattc

SEQ ID NO: 6977 - DNA, 25 bp, Saccharomyces pastorianus
tgccggtgctttgtcattgatgttt

SEQ ID NO: 6978 - DNA, 25 bp, Saccharomyces pastorianus
tcaacgggttagtcgatgtttacaa

SEQ ID NO: 6979 - DNA, 25 bp, Saccharomyces pastorianus
ctgctgactctaaatcctccaagaa

SEQ ID NO: 6980 - DNA, 25 bp, Saccharomyces pastorianus
atggttcgccggtaatttggcatcc

SEQ ID NO: 6981 - DNA, 25 bp, Saccharomyces pastorianus
gtttgtacgattccttgaagcctgt

SEQ ID NO: 6982 - DNA, 25 bp, Saccharomyces pastorianus
tgccggtgctggtgttatttcaatg

SEQ ID NO: 6983 - DNA, 25 bp, Saccharomyces pastorianus
gccgaaggtgtttcttctctattca

SEQ ID NO: 6984 - DNA, 25 bp, Saccharomyces pastorianus
gtttgtctactctttggattacgca

SEQ ID NO: 6985 - DNA, 25 bp, Saccharomyces pastorianus
gaacagctcaacaaagttatccaag

SEQ ID NO: 6986 - DNA, 25 bp, Saccharomyces pastorianus
attggcgacaagacttcaaaaacga

SEQ ID NO: 6987 - DNA, 25 bp, Saccharomyces pastorianus
gggcaaacagctgcattgtcccatc

SEQ ID NO: 6988 - DNA, 25 bp, Saccharomyces pastorianus
agaatctatactgtccgaactgcca

SEQ ID NO: 6989 - DNA, 25 bp, Saccharomyces pastorianus
tgtgcccgcacaccagaatctatac

SEQ ID NO: 6990 - DNA, 25 bp, Saccharomyces pastorianus
attgtcccatctgcaattggcgaca

SEQ ID NO: 6991 - DNA, 25 bp, Saccharomyces pastorianus
tcagcgtgtgccctatcaagagaaa

SEQ ID NO: 6992 - DNA, 25 bp, Saccharomyces pastorianus
tcgttcgtccccattgtatgtggta

SEQ ID NO: 6993 - DNA, 25 bp, Saccharomyces pastorianus
gactcttcatacgattctgtgcccg

SEQ ID NO: 6994 - DNA, 25 bp, Saccharomyces pastorianus
ataccgctgcttcctgtgttctggg

SEQ ID NO: 6995 - DNA, 25 bp, Saccharomyces pastorianus
gaactgccacaatttcagcgtgtgc

SEQ ID NO: 6996 - DNA, 25 bp, Saccharomyces pastorianus
tccggaatacgaccaatccattttg

SEQ ID NO: 6997 - DNA, 25 bp, Saccharomyces pastorianus
cccgctaggctacaagacatggatt

SEQ ID NO: 6998 - DNA, 25 bp, Saccharomyces pastorianus
gttgagcaagatcccgttccttctt

SEQ ID NO: 6999 - DNA, 25 bp, Saccharomyces pastorianus
gaacgcttcatactgggcattttcc

SEQ ID NO: 7000 - DNA, 25 bp, Saccharomyces pastorianus
ggatttcaccataaacgccgttgag

SEQ ID NO: 7001 - DNA, 25 bp, Saccharomyces pastorianus
aatttcagactccagattatccgct

SEQ ID NO: 7002 - DNA, 25 bp, Saccharomyces pastorianus
tatccgctgaaggtttggctaaagt

SEQ ID NO: 7003 - DNA, 25 bp, Saccharomyces pastorianus
aaatcctgtcacgattcattctctc

SEQ ID NO: 7004 - DNA, 25 bp, Saccharomyces pastorianus
gaatgaactcaattacccgctaggc

SEQ ID NO: 7005 - DNA, 25 bp, Saccharomyces pastorianus
gagtcttcagaatcgtcatcgtctt

SEQ ID NO: 7006 - DNA, 25 bp, Saccharomyces pastorianus
acttcgaaacaaacagcgccatctt

SEQ ID NO: 7007 - DNA, 25 bp, Saccharomyces pastorianus
gagacgtgcagttttccagaaagta

SEQ ID NO: 7008 - DNA, 25 bp, Saccharomyces pastorianus
gaaagtagtggacgcacgtgaacaa

SEQ ID NO: 7009 - DNA, 25 bp, Saccharomyces pastorianus
gagatggtagacatcacatctacaa

SEQ ID NO: 7010 - DNA, 25 bp, Saccharomyces pastorianus
gaatgtaagcacttctggttggaga

SEQ ID NO: 7011 - DNA, 25 bp, Saccharomyces pastorianus
gctcaagcagaagctagcagaccta

SEQ ID NO: 7012 - DNA, 25 bp, Saccharomyces pastorianus
acatctacaagaaagccaagctgac

SEQ ID NO: 7013 - DNA, 25 bp, Saccharomyces pastorianus
ccaaatcgatacgtgcaagcagtca

SEQ ID NO: 7014 - DNA, 25 bp, Saccharomyces pastorianus
gaatcgaaatcgaggtcgacgagaa

SEQ ID NO: 7015 - DNA, 25 bp, Saccharomyces pastorianus
agtcatctaaatgccaagtctatca

SEQ ID NO: 7016 - DNA, 25 bp, Saccharomyces pastorianus
ctatcaagagacgtgcagttttcca

SEQ ID NO: 7017 - DNA, 25 bp, Saccharomyces pastorianus
gaaagccaagctgacgaaaaaatcc

SEQ ID NO: 7018 - DNA, 25 bp, Saccharomyces pastorianus
agtcttgtcacattgggcttgctta

SEQ ID NO: 7019 - DNA, 25 bp, Saccharomyces pastorianus
aaggaatttggaacgcatacagtga

SEQ ID NO: 7020 - DNA, 25 bp, Saccharomyces pastorianus
gtgtctaagtaagtacccacattta

SEQ ID NO: 7021 - DNA, 25 bp, Saccharomyces pastorianus
agtgcagatgaagtactcgctgaaa

SEQ ID NO: 7022 - DNA, 25 bp, Saccharomyces pastorianus
gacttacgcgtggtacactactacg

SEQ ID NO: 7023 - DNA, 25 bp, Saccharomyces pastorianus
taacgtggtccctataccattcaaa

SEQ ID NO: 7024 - DNA, 25 bp, Saccharomyces pastorianus
gggaccatgcgaatttatatcaaag

SEQ ID NO: 7025 - DNA, 25 bp, Saccharomyces pastorianus
taaaaccatcggaaagggaccatgc

SEQ ID NO: 7026 - DNA, 25 bp, Saccharomyces pastorianus
gttcccgatatcgacttacgcgtgg

SEQ ID NO: 7027 - DNA, 25 bp, Saccharomyces pastorianus
actacgccacacagctgtgtctaag

SEQ ID NO: 7028 - DNA, 25 bp, Saccharomyces pastorianus
tttgagggcaatatcgttcccgata

SEQ ID NO: 7029 - DNA, 25 bp, Saccharomyces pastorianus
tatgccagaaccaaggtctacccta

SEQ ID NO: 7030 - DNA, 25 bp, Saccharomyces pastorianus
ctgaccgaaggttggctacgtttgt

SEQ ID NO: 7031 - DNA, 25 bp, Saccharomyces pastorianus
ggttagtagagtatacgccgaccta

SEQ ID NO: 7032 - DNA, 25 bp, Saccharomyces pastorianus
tcaaaaggtcagtgttcgtcgccaa

SEQ ID NO: 7033 - DNA, 25 bp, Saccharomyces pastorianus
caaggtcgtggttgattcatttgtt

SEQ ID NO: 7034 - DNA, 25 bp, Saccharomyces pastorianus
tatttctaccggttcattcccaatt

SEQ ID NO: 7035 - DNA, 25 bp, Saccharomyces pastorianus
gtttaactgaaccaatcctttcaag

SEQ ID NO: 7036 - DNA, 25 bp, Saccharomyces pastorianus
acgtttgttgttgattctcatgtga

SEQ ID NO: 7037 - DNA, 25 bp, Saccharomyces pastorianus
acattacctctagctcaaaacgtta

SEQ ID NO: 7038 - DNA, 25 bp, Saccharomyces pastorianus
attaccgtccgtcatttagaatcca

SEQ ID NO: 7039 - DNA, 25 bp, Saccharomyces pastorianus
gatcttgttgatgaggaggctgacc

SEQ ID NO: 7040 - DNA, 25 bp, Saccharomyces pastorianus
tgaacacgtcagtacaagcccggag

SEQ ID NO: 7041 - DNA, 25 bp, Saccharomyces pastorianus
gaggacatcctgatatcactgcatg

SEQ ID NO: 7042 - DNA, 25 bp, Saccharomyces pastorianus
gtgccaaggtttcgaaggacgccaa

SEQ ID NO: 7043 - DNA, 25 bp, Saccharomyces pastorianus
cactgcatgctctgggctttgagaa

SEQ ID NO: 7044 - DNA, 25 bp, Saccharomyces pastorianus
acatccaggaaaacggcgggcacgc

SEQ ID NO: 7045 - DNA, 25 bp, Saccharomyces pastorianus
gtacaagcccggaggacatccagga

SEQ ID NO: 7046 - DNA, 25 bp, Saccharomyces pastorianus
gagtgtgtaagcgagctcatctcct

SEQ ID NO: 7047 - DNA, 25 bp, Saccharomyces pastorianus
aagtacagacaacagcaggcgctga

SEQ ID NO: 7048 - DNA, 25 bp, Saccharomyces pastorianus
agcggcagccaacagcagatctcca

SEQ ID NO: 7049 - DNA, 25 bp, Saccharomyces pastorianus
gtgctgaagatctacctggccaagt

SEQ ID NO: 7050 - DNA, 25 bp, Saccharomyces pastorianus
atggctgcccatcaacaacgtggcg

SEQ ID NO: 7051 - DNA, 25 bp, Saccharomyces pastorianus
cgtattgggttctgaccattgtcct

SEQ ID NO: 7052 - DNA, 25 bp, Saccharomyces pastorianus
gaagacatctaagaccttggccaat

SEQ ID NO: 7053 - DNA, 25 bp, Saccharomyces pastorianus
aggtgacatccttccagacgtattg

SEQ ID NO: 7054 - DNA, 25 bp, Saccharomyces pastorianus
attgtcctgtatactctgatttagc

SEQ ID NO: 7055 - DNA, 25 bp, Saccharomyces pastorianus
gacagcaaaccactcgattcatttt

SEQ ID NO: 7056 - DNA, 25 bp, Saccharomyces pastorianus
gactttatcttggtatcctcgaaac

SEQ ID NO: 7057 - DNA, 25 bp, Saccharomyces pastorianus
gaccttggccaatcctggtaaaaag

SEQ ID NO: 7058 - DNA, 25 bp, Saccharomyces pastorianus
gtgaaacctaacacggctaacgttg

SEQ ID NO: 7059 - DNA, 25 bp, Saccharomyces pastorianus
aagtcttcggaattaccagagccaa

SEQ ID NO: 7060 - DNA, 25 bp, Saccharomyces pastorianus
taacgttgccatcccaaaattcgaa

SEQ ID NO: 7061 - DNA, 25 bp, Saccharomyces pastorianus
gagatctcgaggtgattcaagcaat

SEQ ID NO: 7062 - DNA, 25 bp, Saccharomyces pastorianus
gctgcacattctaagattgtccgat

SEQ ID NO: 7063 - DNA, 25 bp, Saccharomyces pastorianus
atggctctgataatgcacatcttaa

SEQ ID NO: 7064 - DNA, 25 bp, Saccharomyces pastorianus
atttcaagatcgattacaccccacc

SEQ ID NO: 7065 - DNA, 25 bp, Saccharomyces pastorianus
gtaacgaacttgactgggcacactc

SEQ ID NO: 7066 - DNA, 25 bp, Saccharomyces pastorianus
ccccacccatgactttgaaatctat

SEQ ID NO: 7067 - DNA, 25 bp, Saccharomyces pastorianus
attgtccgataacgatggctctgat

SEQ ID NO: 7068 - DNA, 25 bp, Saccharomyces pastorianus
accatgataggctgtgtcaatccat

SEQ ID NO: 7069 - DNA, 25 bp, Saccharomyces pastorianus
ataccgcaattgctagcggccgatt

SEQ ID NO: 7070 - DNA, 25 bp, Saccharomyces pastorianus
ggagaagcattacgccgataccatg

SEQ ID NO: 7071 - DNA, 25 bp, Saccharomyces pastorianus
ggcacactcaaaggctccagagaga

SEQ ID NO: 7072 - DNA, 25 bp, Saccharomyces pastorianus
aacagccactggtctatttctgaga

SEQ ID NO: 7073 - DNA, 25 bp, Saccharomyces pastorianus
gtgctagcattctgtacgttactga

SEQ ID NO: 7074 - DNA, 25 bp, Saccharomyces pastorianus
tcaaagaccatggaactcctctgtc

SEQ ID NO: 7075 - DNA, 25 bp, Saccharomyces pastorianus
agccgacatcctgggctacttttga

SEQ ID NO: 7076 - DNA, 25 bp, Saccharomyces pastorianus
gggaatgttactctgattgatctaa

SEQ ID NO: 7077 - DNA, 25 bp, Saccharomyces pastorianus
aaatgctgccgttttgtaagtgtaa

SEQ ID NO: 7078 - DNA, 25 bp, Saccharomyces pastorianus
caagccttggtatttttgtacttat

SEQ ID NO: 7079 - DNA, 25 bp, Saccharomyces pastorianus
gctcccacgtttcgaaccatgaaga

SEQ ID NO: 7080 - DNA, 25 bp, Saccharomyces pastorianus
ctgtccagatgtcccaagattgatt

SEQ ID NO: 7081 - DNA, 25 bp, Saccharomyces pastorianus
gattactgtcaagcgttgtccattt

SEQ ID NO: 7082 - DNA, 25 bp, Saccharomyces pastorianus
aaattggcacatttgctcgatccag

SEQ ID NO: 7083 - DNA, 25 bp, Saccharomyces pastorianus
gaagtttgttatctcagccgacatc

SEQ ID NO: 7084 - DNA, 25 bp, Saccharomyces pastorianus
tggtaatggccctccacaatcaaga

SEQ ID NO: 7085 - DNA, 25 bp, Saccharomyces pastorianus
accggtggtgccttaaatacattca

SEQ ID NO: 7086 - DNA, 25 bp, Saccharomyces pastorianus
gaaaacgggcggtattgcaccatta

SEQ ID NO: 7087 - DNA, 25 bp, Saccharomyces pastorianus
tcaacgtcggaggtgctatgcaaca

SEQ ID NO: 7088 - DNA, 25 bp, Saccharomyces pastorianus
gtaatgcaatgatggcccaacctca

SEQ ID NO: 7089 - DNA, 25 bp, Saccharomyces pastorianus
cagccccaatctcagttcggtttaa

SEQ ID NO: 7090 - DNA, 25 bp, Saccharomyces pastorianus
atgaacactttcaataccggcggcg

SEQ ID NO: 7091 - DNA, 25 bp, Saccharomyces pastorianus
ggagccatgagtactttcaacgtcg

SEQ ID NO: 7092 - DNA, 25 bp, Saccharomyces pastorianus
attcaatgctcaacctcaaatcaca

SEQ ID NO: 7093 - DNA, 25 bp, Saccharomyces pastorianus
aacaccggtgctatgatgccacaaa

SEQ ID NO: 7094 - DNA, 25 bp, Saccharomyces pastorianus
aaatcacaggtggattccagcccca

SEQ ID NO: 7095 - DNA, 25 bp, Saccharomyces pastorianus
tgggcactttggaggaatttgttaa

SEQ ID NO: 7096 - DNA, 25 bp, Saccharomyces pastorianus
atacgcctcatcaacaacaatcatc

SEQ ID NO: 7097 - DNA, 25 bp, Saccharomyces pastorianus
attctgtaaccactcttctacttcc

SEQ ID NO: 7098 - DNA, 25 bp, Saccharomyces pastorianus
gaagctcgagcttaattgccatatc

SEQ ID NO: 7099 - DNA, 25 bp, Saccharomyces pastorianus
caacaacaatcatcgcagcaagcta

SEQ ID NO: 7100 - DNA, 25 bp, Saccharomyces pastorianus
tcacccttaaagctatcatctctgt

SEQ ID NO: 7101 - DNA, 25 bp, Saccharomyces pastorianus
gtgccatatacccaagatgtgccag

SEQ ID NO: 7102 - DNA, 25 bp, Saccharomyces pastorianus
ggaattctttgacaatcgttctttt

SEQ ID NO: 7103 - DNA, 25 bp, Saccharomyces pastorianus
gttgaactctggagaagtgccatat

SEQ ID NO: 7104 - DNA, 25 bp, Saccharomyces pastorianus
agggcttctcacttaagcagcggca

SEQ ID NO: 7105 - DNA, 25 bp, Saccharomyces pastorianus
gacaacaatctgtgcctaatcaaat

SEQ ID NO: 7106 - DNA, 25 bp, Saccharomyces pastorianus
gcaccgtatggattcgtttatgtct

SEQ ID NO: 7107 - DNA, 25 bp, Saccharomyces pastorianus
tacgctaccgcgattgattttatga

SEQ ID NO: 7108 - DNA, 25 bp, Saccharomyces pastorianus
tggccacacgccattcgttatggat

SEQ ID NO: 7109 - DNA, 25 bp, Saccharomyces pastorianus
ggccttattcgttcaagtcctagac

SEQ ID NO: 7110 - DNA, 25 bp, Saccharomyces pastorianus
tctatcccagagaaccttgctaata

SEQ ID NO: 7111 - DNA, 25 bp, Saccharomyces pastorianus
aagagggcgattttagctgttaacg

SEQ ID NO: 7112 - DNA, 25 bp, Saccharomyces pastorianus
atttgtaccctatggaaagatggcc

SEQ ID NO: 7113 - DNA, 25 bp, Saccharomyces pastorianus
gaaggagagcccaggtacgctaccg

SEQ ID NO: 7114 - DNA, 25 bp, Saccharomyces pastorianus
taggtgcaccttctatcccagagaa

SEQ ID NO: 7115 - DNA, 25 bp, Saccharomyces pastorianus
gcatgcattcaactactggccttat

SEQ ID NO: 7116 - DNA, 25 bp, Saccharomyces pastorianus
gagacttactattcaagggcagttg

SEQ ID NO: 7117 - DNA, 25 bp, Saccharomyces pastorianus
aacaaaaagaccagaatcatcccaa

SEQ ID NO: 7118 - DNA, 25 bp, Saccharomyces pastorianus
aaaagaccagaatcatcccaagaca

SEQ ID NO: 7119 - DNA, 25 bp, Saccharomyces pastorianus
caaaaagaccagaatcatcccaaga

SEQ ID NO: 7120 - DNA, 25 bp, Saccharomyces pastorianus
aaaaagaccagaatcatcccaagac

SEQ ID NO: 7121 - DNA, 25 bp, Saccharomyces pastorianus
gataacaaaaagaccagaatcatcc

SEQ ID NO: 7122 - DNA, 25 bp, Saccharomyces pastorianus
acaaaaagaccagaatcatcccaag

SEQ ID NO: 7123 - DNA, 25 bp, Saccharomyces pastorianus
aaagaccagaatcatcccaagacat

SEQ ID NO: 7124 - DNA, 25 bp, Saccharomyces pastorianus
ataacaaaaagaccagaatcatccc

SEQ ID NO: 7125 - DNA, 25 bp, Saccharomyces pastorianus
taacaaaaagaccagaatcatccca

SEQ ID NO: 7126 - DNA, 25 bp, Saccharomyces pastorianus
catgtctattctaaactcctttgtt

SEQ ID NO: 7127 - DNA, 25 bp, Saccharomyces pastorianus
ccagacaccggtatttctcaaaaat

SEQ ID NO: 7128 - DNA, 25 bp, Saccharomyces pastorianus
tgtctattctaaactcctttgttaa

SEQ ID NO: 7129 - DNA, 25 bp, Saccharomyces pastorianus
gctgccaagaaaacttctacttcta

SEQ ID NO: 7130 - DNA, 25 bp, Saccharomyces pastorianus
tattctaaactcctttgttaacgat

SEQ ID NO: 7131 - DNA, 25 bp, Saccharomyces pastorianus
atgtcctctgctgccgaaaagaaac

SEQ ID NO: 7132 - DNA, 25 bp, Saccharomyces pastorianus
aaatccatgtctattctaaactcct

SEQ ID NO: 7133 - DNA, 25 bp, Saccharomyces pastorianus
ggtgaactggctaaacatgctgttt

SEQ ID NO: 7134 - DNA, 25 bp, Saccharomyces pastorianus
tctattctaaactcctttgttaacg

SEQ ID NO: 7135 - DNA, 25 bp, Saccharomyces pastorianus
ctaaactcctttgttaacgatatct

SEQ ID NO: 7136 - DNA, 25 bp, Saccharomyces pastorianus
ctcaaaaatccatgtctattctaaa

SEQ ID NO: 7137 - DNA, 25 bp, Saccharomyces pastorianus
gtacctgttggtaccaattctgcca

SEQ ID NO: 7138 - DNA, 25 bp, Saccharomyces pastorianus
gataaacatcagactgcccaagata

SEQ ID NO: 7139 - DNA, 25 bp, Saccharomyces pastorianus
gtaccacaatcgaagggccttggga

SEQ ID NO: 7140 - DNA, 25 bp, Saccharomyces pastorianus
ttagctgatgtttgtatggtacctg

SEQ ID NO: 7141 - DNA, 25 bp, Saccharomyces pastorianus
gccagtatatctgactttgttgcgt

SEQ ID NO: 7142 - DNA, 25 bp, Saccharomyces pastorianus
taaaaagtactttacacagtgccgg

SEQ ID NO: 7143 - DNA, 25 bp, Saccharomyces pastorianus
gatgggtttgatcggtgaaattcat

SEQ ID NO: 7144 - DNA, 25 bp, Saccharomyces pastorianus
atctgactttgttgcgttaattgaa

SEQ ID NO: 7145 - DNA, 25 bp, Saccharomyces pastorianus
gttggtaccaattctgccagtatat

SEQ ID NO: 7146 - DNA, 25 bp, Saccharomyces pastorianus
gggtacgtcagagttcacactgata

SEQ ID NO: 7147 - DNA, 25 bp, Saccharomyces pastorianus
acagtgccggtaccacaatcgaagg

SEQ ID NO: 7148 - DNA, 25 bp, Saccharomyces pastorianus
atcatagttgaaaaggcgctccctc

SEQ ID NO: 7149 - DNA, 25 bp, Saccharomyces pastorianus
gaaaggcttgtcctcatacggctat

SEQ ID NO: 7150 - DNA, 25 bp, Saccharomyces pastorianus
aagagctcttggtgcttgtagccca

SEQ ID NO: 7151 - DNA, 25 bp, Saccharomyces pastorianus
gggctggtcttgctaccaatgagca

SEQ ID NO: 7152 - DNA, 25 bp, Saccharomyces pastorianus
aaggcgctccctcaattggagatgc

SEQ ID NO: 7153 - DNA, 25 bp, Saccharomyces pastorianus
cattttggagtctatgggctggtct

SEQ ID NO: 7154 - DNA, 25 bp, Saccharomyces pastorianus
tgcggttgggcaccacaccaaatat

SEQ ID NO: 7155 - DNA, 25 bp, Saccharomyces pastorianus
acaatgggactatccgtgcggttgg

SEQ ID NO: 7156 - DNA, 25 bp, Saccharomyces pastorianus
taaacacgagttacttgcttgggtt

SEQ ID NO: 7157 - DNA, 25 bp, Saccharomyces pastorianus
ggaactgacccgcatcgtgtcgatg

SEQ ID NO: 7158 - DNA, 25 bp, Saccharomyces pastorianus
gcagaacttcctatgaatcagctac

SEQ ID NO: 7159 - DNA, 25 bp, Saccharomyces pastorianus
taaacatttgcttcccgtacacggg

SEQ ID NO: 7160 - DNA, 25 bp, Saccharomyces pastorianus
gttctcattccacaaatccttttta

SEQ ID NO: 7161 - DNA, 25 bp, Saccharomyces pastorianus
ggagttccacctttagacttgttga

SEQ ID NO: 7162 - DNA, 25 bp, Saccharomyces pastorianus
agtcattggcgatctttcattattg

SEQ ID NO: 7163 - DNA, 25 bp, Saccharomyces pastorianus
gcatctctatactgcgggagttcca

SEQ ID NO: 7164 - DNA, 25 bp, Saccharomyces pastorianus
gagttcgggcccatacggatggcat

SEQ ID NO: 7165 - DNA, 25 bp, Saccharomyces pastorianus
gaactattagattgcctatggccag

SEQ ID NO: 7166 - DNA, 25 bp, Saccharomyces pastorianus
ggcatggatcctattaaagttctca

SEQ ID NO: 7167 - DNA, 25 bp, Saccharomyces pastorianus
tactgtgtttgcgttctctattgaa

SEQ ID NO: 7168 - DNA, 25 bp, Saccharomyces pastorianus
gacatccaataagggcgtgcgcatt

SEQ ID NO: 7169 - DNA, 25 bp, Saccharomyces pastorianus
atcattaatgactttagcgcacgaa

SEQ ID NO: 7170 - DNA, 25 bp, Saccharomyces pastorianus
attacctaccgtacaataccttctg

SEQ ID NO: 7171 - DNA, 25 bp, Saccharomyces pastorianus
tattggcttgcgttttggataccct

SEQ ID NO: 7172 - DNA, 25 bp, Saccharomyces pastorianus
tacacctttggtacttggccgatag

SEQ ID NO: 7173 - DNA, 25 bp, Saccharomyces pastorianus
attcctatatccagggccattattg

SEQ ID NO: 7174 - DNA, 25 bp, Saccharomyces pastorianus
ttagcaaaatctacccatcctacaa

SEQ ID NO: 7175 - DNA, 25 bp, Saccharomyces pastorianus
gattactaatgttttccgccttaat

SEQ ID NO: 7176 - DNA, 25 bp, Saccharomyces pastorianus
tagcctcttttataccattacacct

SEQ ID NO: 7177 - DNA, 25 bp, Saccharomyces pastorianus
agacttctctgtattcctatatcca

SEQ ID NO: 7178 - DNA, 25 bp, Saccharomyces pastorianus
gcaatttgctttccattgttgtcag

SEQ ID NO: 7179 - DNA, 25 bp, Saccharomyces pastorianus
gaagcccctagtatggattaccaga

SEQ ID NO: 7180 - DNA, 25 bp, Saccharomyces pastorianus
atggtatgtctttttgctcacgtcc

SEQ ID NO: 7181 - DNA, 25 bp, Saccharomyces pastorianus
ggtcctttatgtccaattttttcat

SEQ ID NO: 7182 - DNA, 25 bp, Saccharomyces pastorianus
ggactgttctctaccattcggtggt

SEQ ID NO: 7183 - DNA, 25 bp, Saccharomyces pastorianus
aataggctatacgttcactcttcca

SEQ ID NO: 7184 - DNA, 25 bp, Saccharomyces pastorianus
caccaacggccattgttgccaaaga

SEQ ID NO: 7185 - DNA, 25 bp, Saccharomyces pastorianus
accgagtttggtttggcagcttacg

SEQ ID NO: 7186 - DNA, 25 bp, Saccharomyces pastorianus
ggtgttgatgactataccgtcttga

SEQ ID NO: 7187 - DNA, 25 bp, Saccharomyces pastorianus
agaaggctcgctacatggtgttgat

SEQ ID NO: 7188 - DNA, 25 bp, Saccharomyces pastorianus
atattgtcacatgtgccaccaacgg

SEQ ID NO: 7189 - DNA, 25 bp, Saccharomyces pastorianus
aagttattcttgagggtggccgcct

SEQ ID NO: 7190 - DNA, 25 bp, Saccharomyces pastorianus
gccgccttcctgatttaggacctaa

SEQ ID NO: 7191 - DNA, 25 bp, Saccharomyces pastorianus
aatacaggtgtcttctcggactgtt

SEQ ID NO: 7192 - DNA, 25 bp, Saccharomyces pastorianus
aaaagcctgcatgtgtggtaacaag

SEQ ID NO: 7193 - DNA, 25 bp, Saccharomyces pastorianus
aaatgacattcctgatatagcgcct

SEQ ID NO: 7194 - DNA, 25 bp, Saccharomyces pastorianus
gagacttcacatatcgggttggcaa

SEQ ID NO: 7195 - DNA, 25 bp, Saccharomyces pastorianus
gggttggcaattaccatgcgtcatc

SEQ ID NO: 7196 - DNA, 25 bp, Saccharomyces pastorianus
aagctgccatattgggccatgtaga

SEQ ID NO: 7197 - DNA, 25 bp, Saccharomyces pastorianus
atcctttaccactgaagttcttaat

SEQ ID NO: 7198 - DNA, 25 bp, Saccharomyces pastorianus
aaaggtcttggagtagactacccag

SEQ ID NO: 7199 - DNA, 25 bp, Saccharomyces pastorianus
gaatccgcccaacgcctgaaaaaag

SEQ ID NO: 7200 - DNA, 25 bp, Saccharomyces pastorianus
gagagcagctgcatggtttagaata

SEQ ID NO: 7201 - DNA, 25 bp, Saccharomyces pastorianus
gacagcattcttgctttatgggcta

SEQ ID NO: 7202 - DNA, 25 bp, Saccharomyces pastorianus
ttatgggctagctctacgacacggt

SEQ ID NO: 7203 - DNA, 25 bp, Saccharomyces pastorianus
atctccggtttaatctacgaagaag

SEQ ID NO: 7204 - DNA, 25 bp, Saccharomyces pastorianus
tggtgtcaagcgtatctccggttta

SEQ ID NO: 7205 - DNA, 25 bp, Saccharomyces pastorianus
agcgtatctccggtttaatctacga

SEQ ID NO: 7206 - DNA, 25 bp, Saccharomyces pastorianus
tcaagcgtatctccggtttaatcta

SEQ ID NO: 7207 - DNA, 25 bp, Saccharomyces pastorianus
gtgtcaagcgtatctccggtttaat

SEQ ID NO: 7208 - DNA, 25 bp, Saccharomyces pastorianus
gcgtatctccggtttaatctacgaa

SEQ ID NO: 7209 - DNA, 25 bp, Saccharomyces pastorianus
gtcaagcgtatctccggtttaatct

SEQ ID NO: 7210 - DNA, 25 bp, Saccharomyces pastorianus
tgtcaagcgtatctccggtttaatc

SEQ ID NO: 7211 - DNA, 25 bp, Saccharomyces pastorianus
tctccggtttaatctacgaagaagt

SEQ ID NO: 7212 - DNA, 25 bp, Saccharomyces pastorianus
gtatctccggtttaatctacgaaga

SEQ ID NO: 7213 - DNA, 25 bp, Saccharomyces pastorianus
ggtgtcaagcgtatctccggtttaa

SEQ ID NO: 7214 - DNA, 25 bp, Saccharomyces pastorianus
tgaagacactaacttggctgccatc

SEQ ID NO: 7215 - DNA, 25 bp, Saccharomyces pastorianus
gaagacactaacttggctgccatcc

SEQ ID NO: 7216 - DNA, 25 bp, Saccharomyces pastorianus
aagacactaacttggctgccatcca

SEQ ID NO: 7217 - DNA, 25 bp, Saccharomyces pastorianus
ctgatttgagattccaatcttctgc

SEQ ID NO: 7218 - DNA, 25 bp, Saccharomyces pastorianus
aggtaccgtcgccttgagagaaatc

SEQ ID NO: 7219 - DNA, 25 bp, Saccharomyces pastorianus
gatttcaagactgatttgagattcc

SEQ ID NO: 7220 - DNA, 25 bp, Saccharomyces pastorianus
gtaccgtcgccttgagagaaatcag

SEQ ID NO: 7221 - DNA, 25 bp, Saccharomyces pastorianus
agactgatttgagattccaatcttc

SEQ ID NO: 7222 - DNA, 25 bp, Saccharomyces pastorianus
taccgtcgccttgagagaaatcaga

SEQ ID NO: 7223 - DNA, 25 bp, Saccharomyces pastorianus
tcaagactgatttgagattccaatc

SEQ ID NO: 7224 - DNA, 25 bp, Saccharomyces pastorianus
ggtaccgtcgccttgagagaaatca

SEQ ID NO: 7225 - DNA, 25 bp, Saccharomyces pastorianus
caaagccgtcggtgacaacgatcca

SEQ ID NO: 7226 - DNA, 25 bp, Saccharomyces pastorianus
gaaactcacgaatcttggaagcaat

SEQ ID NO: 7227 - DNA, 25 bp, Saccharomyces pastorianus
aaccgactggaaagtcattgccatt

SEQ ID NO: 7228 - DNA, 25 bp, Saccharomyces pastorianus
tattccaccagctgctccaaaggaa

SEQ ID NO: 7229 - DNA, 25 bp, Saccharomyces pastorianus
ggacatcatcaaggaaactcacgaa

SEQ ID NO: 7230 - DNA, 25 bp, Saccharomyces pastorianus
gctttaggtgtcatggctttgttag

SEQ ID NO: 7231 - DNA, 25 bp, Saccharomyces pastorianus
gaagatccaaatgaaagccacccag

SEQ ID NO: 7232 - DNA, 25 bp, Saccharomyces pastorianus
tacggtgctttaccacaaacctggg

SEQ ID NO: 7233 - DNA, 25 bp, Saccharomyces pastorianus
taattgccggcaagtcttctgacaa

SEQ ID NO: 7234 - DNA, 25 bp, Saccharomyces pastorianus
ttcccaggtctattgagagctacca

SEQ ID NO: 7235 - DNA, 25 bp, Saccharomyces pastorianus
gaacagaaagtacgctttggacatc

SEQ ID NO: 7236 - DNA, 25 bp, Saccharomyces pastorianus
gggtccccgccgtgataaatgcgat

SEQ ID NO: 7237 - DNA, 25 bp, Saccharomyces pastorianus
gaaccgcgatgagcaatgacaccat

SEQ ID NO: 7238 - DNA, 25 bp, Saccharomyces pastorianus
gaggccaacgtgtttgcgcaggaca

SEQ ID NO: 7239 - DNA, 25 bp, Saccharomyces pastorianus
gaagatcatcaacgttacccacacg

SEQ ID NO: 7240 - DNA, 25 bp, Saccharomyces pastorianus
aaatctccaacatcaatttcacgcc

SEQ ID NO: 7241 - DNA, 25 bp, Saccharomyces pastorianus
gacagagttgttttgccttgttagg

SEQ ID NO: 7242 - DNA, 25 bp, Saccharomyces pastorianus
gcgttttccaccgattcaaactgga

SEQ ID NO: 7243 - DNA, 25 bp, Saccharomyces pastorianus
gaatcgttctagacctgtttaccac

SEQ ID NO: 7244 - DNA, 25 bp, Saccharomyces pastorianus
aatggtgcctgtgtgtgaatgcctt

SEQ ID NO: 7245 - DNA, 25 bp, Saccharomyces pastorianus
ataaatgcgatctgggcgctcgggt

SEQ ID NO: 7246 - DNA, 25 bp, Saccharomyces pastorianus
tgtttaccaccactacacaaatcgt

SEQ ID NO: 7247 - DNA, 25 bp, Saccharomyces pastorianus
gactctttcatgattgttgttccat

SEQ ID NO: 7248 - DNA, 25 bp, Saccharomyces pastorianus
gcacaacgctgacttatttgccgat

SEQ ID NO: 7249 - DNA, 25 bp, Saccharomyces pastorianus
gactgccatgggttgttctaactta

SEQ ID NO: 7250 - DNA, 25 bp, Saccharomyces pastorianus
gccaagcctggtgtttagaagccat

SEQ ID NO: 7251 - DNA, 25 bp, Saccharomyces pastorianus
aagccattcctagcgaagtttccca

SEQ ID NO: 7252 - DNA, 25 bp, Saccharomyces pastorianus
tatgggtattcatcaggctccctta

SEQ ID NO: 7253 - DNA, 25 bp, Saccharomyces pastorianus
tgcatttctatccaccattgttgag

SEQ ID NO: 7254 - DNA, 25 bp, Saccharomyces pastorianus
tttaactcccgaacaggctgcggaa

SEQ ID NO: 7255 - DNA, 25 bp, Saccharomyces pastorianus
ggctcccttaaatgcgactggtgaa

SEQ ID NO: 7256 - DNA, 25 bp, Saccharomyces pastorianus
ggctgtttggccatttgagaccata

SEQ ID NO: 7257 - DNA, 25 bp, Saccharomyces pastorianus
gattgcctctattagccattttgac

SEQ ID NO: 7258 - DNA, 25 bp, Saccharomyces pastorianus
ggacactgaatttccaggtgatcta

SEQ ID NO: 7259 - DNA, 25 bp, Saccharomyces pastorianus
aggctttccatccagactctaaaat

SEQ ID NO: 7260 - DNA, 25 bp, Saccharomyces pastorianus
ttatctgccggttacacagcaagac

SEQ ID NO: 7261 - DNA, 25 bp, Saccharomyces pastorianus
gtttcgctgtcgaacctggtagata

SEQ ID NO: 7262 - DNA, 25 bp, Saccharomyces pastorianus
ctaaccaaccatacttacttcaatc

SEQ ID NO: 7263 - DNA, 25 bp, Saccharomyces pastorianus
acactggtgatttcttatctgccgg

SEQ ID NO: 7264 - DNA, 25 bp, Saccharomyces pastorianus
gactgctggtgaagccacaccatta

SEQ ID NO: 7265 - DNA, 25 bp, Saccharomyces pastorianus
agaatgaaccaacgcttgtcgccaa

SEQ ID NO: 7266 - DNA, 25 bp, Saccharomyces pastorianus
gcctcatagagacaccatcgacggt

SEQ ID NO: 7267 - DNA, 25 bp, Saccharomyces pastorianus
gtacagtatactttgaatgtcgcca

SEQ ID NO: 7268 - DNA, 25 bp, Saccharomyces pastorianus
caaaaatgtcattcccacgggtaag

SEQ ID NO: 7269 - DNA, 25 bp, Saccharomyces pastorianus
taacacacatttactcccatcagaa

SEQ ID NO: 7270 - DNA, 25 bp, Saccharomyces pastorianus
cgttggctgcttatttgtgtggtat

SEQ ID NO: 7271 - DNA, 25 bp, Saccharomyces pastorianus
cggatgcccagtcaacaacatttta

SEQ ID NO: 7272 - DNA, 25 bp, Saccharomyces pastorianus
aagtgtctcagatggcgctatgaaa

SEQ ID NO: 7273 - DNA, 25 bp, Saccharomyces pastorianus
ttgtgttatttctttcctgttcccg

SEQ ID NO: 7274 - DNA, 25 bp, Saccharomyces pastorianus
gtggttcattattctgtgccgctat

SEQ ID NO: 7275 - DNA, 25 bp, Saccharomyces pastorianus
ggtgcgccagctataagtgtctcag

SEQ ID NO: 7276 - DNA, 25 bp, Saccharomyces pastorianus
ttgtttgctcggactactttgttgt

SEQ ID NO: 7277 - DNA, 25 bp, Saccharomyces pastorianus
tggcgttgtgcatctgtccgtggaa

SEQ ID NO: 7278 - DNA, 25 bp, Saccharomyces pastorianus
ttgtttgcctggttttatcgccgaa

SEQ ID NO: 7279 - DNA, 25 bp, Saccharomyces pastorianus
gtgtggtatagctccttgtttgcct

SEQ ID NO: 7280 - DNA, 25 bp, Saccharomyces pastorianus
atttgctgtctgttcacatcatcgt

SEQ ID NO: 7281 - DNA, 25 bp, Saccharomyces pastorianus
tcttgcaattgcaacggctcctggg

SEQ ID NO: 7282 - DNA, 25 bp, Saccharomyces pastorianus
taaaagcagctacgcgtcctaggat

SEQ ID NO: 7283 - DNA, 25 bp, Saccharomyces pastorianus
gaaatgccacaaattaacagcggta

SEQ ID NO: 7284 - DNA, 25 bp, Saccharomyces pastorianus
aaatggctctgctttattgggcaag

SEQ ID NO: 7285 - DNA, 25 bp, Saccharomyces pastorianus
ggtatatttggtgttccttggaaag

SEQ ID NO: 7286 - DNA, 25 bp, Saccharomyces pastorianus
gggattgcttaccaacttgctttga

SEQ ID NO: 7287 - DNA, 25 bp, Saccharomyces pastorianus
taggatccttattcactcttgcaat

SEQ ID NO: 7288 - DNA, 25 bp, Saccharomyces pastorianus
agactcggatctattaatttgctgt

SEQ ID NO: 7289 - DNA, 25 bp, Saccharomyces pastorianus
gggcaagtgcgtattacttcctagt

SEQ ID NO: 7290 - DNA, 25 bp, Saccharomyces pastorianus
catcgtttggtggttcaagtcatgc

SEQ ID NO: 7291 - DNA, 25 bp, Saccharomyces pastorianus
gacctactcctatcattactctagt

SEQ ID NO: 7292 - DNA, 25 bp, Saccharomyces pastorianus
ttgattggtactttggtgctgcctt

SEQ ID NO: 7293 - DNA, 25 bp, Saccharomyces pastorianus
gattgtcgttgtcactgctacaaga

SEQ ID NO: 7294 - DNA, 25 bp, Saccharomyces pastorianus
gtagatggatcaactccaccgtgca

SEQ ID NO: 7295 - DNA, 25 bp, Saccharomyces pastorianus
cgtcatttttgccattgtctctaga

SEQ ID NO: 7296 - DNA, 25 bp, Saccharomyces pastorianus
gggtgatacaagaaccatcgctggt

SEQ ID NO: 7297 - DNA, 25 bp, Saccharomyces pastorianus
tagcgattatccttggtttgcccgg

SEQ ID NO: 7298 - DNA, 25 bp, Saccharomyces pastorianus
gtgctgcctttagctatttgcttta

SEQ ID NO: 7299 - DNA, 25 bp, Saccharomyces pastorianus
gatgttgaggactttccccaagaga

SEQ ID NO: 7300 - DNA, 25 bp, Saccharomyces pastorianus
ccaccgtgcacaacctttttgagtt

SEQ ID NO: 7301 - DNA, 25 bp, Saccharomyces pastorianus
aggttctactttctcaacgccgtag

SEQ ID NO: 7302 - DNA, 25 bp, Saccharomyces pastorianus
atcagccttaccaaagatcatcacc

SEQ ID NO: 7303 - DNA, 25 bp, Saccharomyces pastorianus
gaccctaaatactcaatcagcctta

SEQ ID NO: 7304 - DNA, 25 bp, Saccharomyces pastorianus
gtatctatttgatcaacttgtccga

SEQ ID NO: 7305 - DNA, 25 bp, Saccharomyces pastorianus
gattattccattcagtgttccttta

SEQ ID NO: 7306 - DNA, 25 bp, Saccharomyces pastorianus
ggaagtcgaaatcattaactctatg

SEQ ID NO: 7307 - DNA, 25 bp, Saccharomyces pastorianus
ttgctaaccaatcctggactccaaa

SEQ ID NO: 7308 - DNA, 25 bp, Saccharomyces pastorianus
ttattgaattgttgaaatccggcca

SEQ ID NO: 7309 - DNA, 25 bp, Saccharomyces pastorianus
tgttcttattaaccgctaagccatg

SEQ ID NO: 7310 - DNA, 25 bp, Saccharomyces pastorianus
aatccggccaaagagttgctaacca

SEQ ID NO: 7311 - DNA, 25 bp, Saccharomyces pastorianus
caagtactccccaggtgatttgatt

SEQ ID NO: 7312 - DNA, 25 bp, Saccharomyces pastorianus
gaaagactttcccacatgtctgaag

SEQ ID NO: 7313 - DNA, 25 bp, Saccharomyces pastorianus
aatgcaggcacatccggtgtttcaa

SEQ ID NO: 7314 - DNA, 25 bp, Saccharomyces pastorianus
tggaatgtcaaaacagcctgtcact

SEQ ID NO: 7315 - DNA, 25 bp, Saccharomyces pastorianus
acttccaagggttactgggtcactg

SEQ ID NO: 7316 - DNA, 25 bp, Saccharomyces pastorianus
ggtgctaccaaagtcatttctgaat

SEQ ID NO: 7317 - DNA, 25 bp, Saccharomyces pastorianus
aaagaccctcagtgtcattcgtgac

SEQ ID NO: 7318 - DNA, 25 bp, Saccharomyces pastorianus
ttctgtcggaggcaaatccagtgct

SEQ ID NO: 7319 - DNA, 25 bp, Saccharomyces pastorianus
aatccagtgcttcaattgctcgtaa

SEQ ID NO: 7320 - DNA, 25 bp, Saccharomyces pastorianus
ctgtcactttaccaacgtcattaca

SEQ ID NO: 7321 - DNA, 25 bp, Saccharomyces pastorianus
tatcttcaaaggcttgacttccaag

SEQ ID NO: 7322 - DNA, 25 bp, Saccharomyces pastorianus
attcgtgaccgtgacaatttcgacg

SEQ ID NO: 7323 - DNA, 25 bp, Saccharomyces pastorianus
ggtgtttcaaagatcgtctcacaag

SEQ ID NO: 7324 - DNA, 25 bp, Saccharomyces pastorianus
gtactccggaatattgtgctcctga

SEQ ID NO: 7325 - DNA, 25 bp, Saccharomyces pastorianus
gtcggaaagcctccatacacaggta

SEQ ID NO: 7326 - DNA, 25 bp, Saccharomyces pastorianus
tatcgggccaagcatatactcaaaa

SEQ ID NO: 7327 - DNA, 25 bp, Saccharomyces pastorianus
gtgctcctgagatattatcgggcca

SEQ ID NO: 7328 - DNA, 25 bp, Saccharomyces pastorianus
tatcagctcggtgagcaagtctcca

SEQ ID NO: 7329 - DNA, 25 bp, Saccharomyces pastorianus
aaaactgcgactggtattccctggg

SEQ ID NO: 7330 - DNA, 25 bp, Saccharomyces pastorianus
attccctgggatgtctgttatatga

SEQ ID NO: 7331 - DNA, 25 bp, Saccharomyces pastorianus
cagagttcacctcgatgtcatatga

SEQ ID NO: 7332 - DNA, 25 bp, Saccharomyces pastorianus
ttcacggaccattttatctttagga

SEQ ID NO: 7333 - DNA, 25 bp, Saccharomyces pastorianus
agtattagaacaagccccttcacgg

SEQ ID NO: 7334 - DNA, 25 bp, Saccharomyces pastorianus
tacactcaattatcggtactccgga

SEQ ID NO: 7335 - DNA, 25 bp, Saccharomyces pastorianus
aacttgacatgtgatttgaaccctg

SEQ ID NO: 7336 - DNA, 25 bp, Saccharomyces pastorianus
gggttcgtttgccaacttatactat

SEQ ID NO: 7337 - DNA, 25 bp, Saccharomyces pastorianus
gtcaagccaatatatttccatgcct

SEQ ID NO: 7338 - DNA, 25 bp, Saccharomyces pastorianus
gtagacactgtactatccacaattt

SEQ ID NO: 7339 - DNA, 25 bp, Saccharomyces pastorianus
ttaagtccatacacctacttgacct

SEQ ID NO: 7340 - DNA, 25 bp, Saccharomyces pastorianus
atcacttctatcacagtcaagccaa

SEQ ID NO: 7341 - DNA, 25 bp, Saccharomyces pastorianus
ttgaaccctgtgtttcttccacaag

SEQ ID NO: 7342 - DNA, 25 bp, Saccharomyces pastorianus
agattttgggcactccatcccagga

SEQ ID NO: 7343 - DNA, 25 bp, Saccharomyces pastorianus
aagtttacaagctcccatctatctt

SEQ ID NO: 7344 - DNA, 25 bp, Saccharomyces pastorianus
tggttcttcacagccttggcaagca

SEQ ID NO: 7345 - DNA, 25 bp, Saccharomyces pastorianus
ttgacctgccctgtggaagatctta

SEQ ID NO: 7346 - DNA, 25 bp, Saccharomyces pastorianus
ggcggtttgatcttccctgataagt

SEQ ID NO: 7347 - DNA, 25 bp, Saccharomyces pastorianus
attattctccattcgtcccattagt

SEQ ID NO: 7348 - DNA, 25 bp, Saccharomyces pastorianus
tggtcacttggttcgacatcgtttt

SEQ ID NO: 7349 - DNA, 25 bp, Saccharomyces pastorianus
gttcgaatccaacggcattgacggt

SEQ ID NO: 7350 - DNA, 25 bp, Saccharomyces pastorianus
gacctgttgaattttccactggacc

SEQ ID NO: 7351 - DNA, 25 bp, Saccharomyces pastorianus
tacagttaaactttcggacctagct

SEQ ID NO: 7352 - DNA, 25 bp, Saccharomyces pastorianus
aatgttaacaccacctcagatgagt

SEQ ID NO: 7353 - DNA, 25 bp, Saccharomyces pastorianus
ggacacagtcctttatgccagagat

SEQ ID NO: 7354 - DNA, 25 bp, Saccharomyces pastorianus
aacaatcttctatttccctgatgac

SEQ ID NO: 7355 - DNA, 25 bp, Saccharomyces pastorianus
gacgtctacgggttcgattattctc

SEQ ID NO: 7356 - DNA, 25 bp, Saccharomyces pastorianus
aagtgttccatccatttggctggtt

SEQ ID NO: 7357 - DNA, 25 bp, Saccharomyces pastorianus
aaggaactcgaccacagaggcttca

SEQ ID NO: 7358 - DNA, 25 bp, Saccharomyces pastorianus
gaatgaccccagagaaacgttgcca

SEQ ID NO: 7359 - DNA, 25 bp, Saccharomyces pastorianus
gaggcttcaccatctattccaattg

SEQ ID NO: 7360 - DNA, 25 bp, Saccharomyces pastorianus
tcccgctggaggtcgagttctggca

SEQ ID NO: 7361 - DNA, 25 bp, Saccharomyces pastorianus
tagagattccgtgtccagattactg

SEQ ID NO: 7362 - DNA, 25 bp, Saccharomyces pastorianus
aatcactttctcctctgcggaattg

SEQ ID NO: 7363 - DNA, 25 bp, Saccharomyces pastorianus
ctctaagatcggtgcgtgggcctca

SEQ ID NO: 7364 - DNA, 25 bp, Saccharomyces pastorianus
ccattgatctcttcaccaagtggtt

SEQ ID NO: 7365 - DNA, 25 bp, Saccharomyces pastorianus
tttaagacaagaccccgtggctcta

SEQ ID NO: 7366 - DNA, 25 bp, Saccharomyces pastorianus
ggaaggcccgtgatattgctacgaa

SEQ ID NO: 7367 - DNA, 25 bp, Saccharomyces pastorianus
acgcggcaattgtgttcttctggaa

SEQ ID NO: 7368 - DNA, 25 bp, Saccharomyces pastorianus
gaatccatctccttgttgtacaatg

SEQ ID NO: 7369 - DNA, 25 bp, Saccharomyces pastorianus
gaaaggtgccttgatttgcggtctc

SEQ ID NO: 7370 - DNA, 25 bp, Saccharomyces pastorianus
caaaggctacctgtgatatgctcgc

SEQ ID NO: 7371 - DNA, 25 bp, Saccharomyces pastorianus
ggcaagctgtctgttaaccctaata

SEQ ID NO: 7372 - DNA, 25 bp, Saccharomyces pastorianus
gaccccttcttgtttgacaggttga

SEQ ID NO: 7373 - DNA, 25 bp, Saccharomyces pastorianus
catgcttttgccattcattcctaaa

SEQ ID NO: 7374 - DNA, 25 bp, Saccharomyces pastorianus
aagctcccgctgagtatttgactac

SEQ ID NO: 7375 - DNA, 25 bp, Saccharomyces pastorianus
gccctgatcggtgtcatcggtatga

SEQ ID NO: 7376 - DNA, 25 bp, Saccharomyces pastorianus
agcaaagcactcatttggccctgat

SEQ ID NO: 7377 - DNA, 25 bp, Saccharomyces pastorianus
ttctggttttcattgctcggcgcaa

SEQ ID NO: 7378 - DNA, 25 bp, Saccharomyces pastorianus
ggcgcaattttctttggcacactac

SEQ ID NO: 7379 - DNA, 25 bp, Saccharomyces pastorianus
aaggagtacttgagcgacttccatc

SEQ ID NO: 7380 - DNA, 25 bp, Saccharomyces pastorianus
ttgtcacttgtgacccggcaagaga

SEQ ID NO: 7381 - DNA, 25 bp, Saccharomyces pastorianus
tcgccagcggttttgaaggagtact

SEQ ID NO: 7382 - DNA, 25 bp, Saccharomyces pastorianus
tgtcttctaagcacggtatcactct

SEQ ID NO: 7383 - DNA, 25 bp, Saccharomyces pastorianus
tgtactttgggttcagcaactgtcc

SEQ ID NO: 7384 - DNA, 25 bp, Saccharomyces pastorianus
atctcgtacttcttcaacagggaaa

SEQ ID NO: 7385 - DNA, 25 bp, Saccharomyces pastorianus
gatcttctcggcaagttttccatat

SEQ ID NO: 7386 - DNA, 25 bp, Saccharomyces pastorianus
ggccaggactacttggtggaccact

SEQ ID NO: 7387 - DNA, 25 bp, Saccharomyces pastorianus
gtgtggctaaacgacttgtcttcta

SEQ ID NO: 7388 - DNA, 25 bp, Saccharomyces pastorianus
tccatcttgggactgacgggcacgt

SEQ ID NO: 7389 - DNA, 25 bp, Saccharomyces pastorianus
atgtcaagagctacgtgcctgcaga

SEQ ID NO: 7390 - DNA, 25 bp, Saccharomyces pastorianus
gtatattgaaagctggtacctatcc

SEQ ID NO: 7391 - DNA, 25 bp, Saccharomyces pastorianus
attcgaatacactttggccaaccaa

SEQ ID NO: 7392 - DNA, 25 bp, Saccharomyces pastorianus
ctctattttctacaatgatccagtg

SEQ ID NO: 7393 - DNA, 25 bp, Saccharomyces pastorianus
gaacctgccgaaaaaccgatcttca

SEQ ID NO: 7394 - DNA, 25 bp, Saccharomyces pastorianus
gatccagtgtcttctatatcatttg

SEQ ID NO: 7395 - DNA, 25 bp, Saccharomyces pastorianus
cattgaacagtctccatcatttggt

SEQ ID NO: 7396 - DNA, 25 bp, Saccharomyces pastorianus
ggtacctatccaaagatctctattt

SEQ ID NO: 7397 - DNA, 25 bp, Saccharomyces pastorianus
agacgcaaacgtcccaacagattta

SEQ ID NO: 7398 - DNA, 25 bp, Saccharomyces pastorianus
aaggttacgctgctgagatttctgc

SEQ ID NO: 7399 - DNA, 25 bp, Saccharomyces pastorianus
gctggtgacatgatcaaccgttact

SEQ ID NO: 7400 - DNA, 25 bp, Saccharomyces pastorianus
tgctgatatagttaccattggtgat

SEQ ID NO: 7401 - DNA, 25 bp, Saccharomyces pastorianus
gacaacgtcccatgtgcacagaata

SEQ ID NO: 7402 - DNA, 25 bp, Saccharomyces pastorianus
tatccaatattgcatcttccggttc

SEQ ID NO: 7403 - DNA, 25 bp, Saccharomyces pastorianus
atgtaaccgttcctaagctaccatt

SEQ ID NO: 7404 - DNA, 25 bp, Saccharomyces pastorianus
ttccggttccaaatcacagtctagt

SEQ ID NO: 7405 - DNA, 25 bp, Saccharomyces pastorianus
aagcccggccttagtcttaacatgg

SEQ ID NO: 7406 - DNA, 25 bp, Saccharomyces pastorianus
gatttaagctccgttcctttgtata

SEQ ID NO: 7407 - DNA, 25 bp, Saccharomyces pastorianus
ggcatggttcagttttgcattcttg

SEQ ID NO: 7408 - DNA, 25 bp, Saccharomyces pastorianus
gattagttccctctgcaagcatgaa

SEQ ID NO: 7409 - DNA, 25 bp, Saccharomyces pastorianus
ggccactatagtcttaacgatcctg

SEQ ID NO: 7410 - DNA, 25 bp, Saccharomyces pastorianus
atgaccacatcttccaatacaatct

SEQ ID NO: 7411 - DNA, 25 bp, Saccharomyces pastorianus
gatttttgttgctgctaagcccggc

SEQ ID NO: 7412 - DNA, 25 bp, Saccharomyces pastorianus
ggtcttatcccaccgttatctataa

SEQ ID NO: 7413 - DNA, 25 bp, Saccharomyces pastorianus
aaaatatcacccttttgaggcctca

SEQ ID NO: 7414 - DNA, 25 bp, Saccharomyces pastorianus
gcaggtggtgttggactgatcctaa

SEQ ID NO: 7415 - DNA, 25 bp, Saccharomyces pastorianus
gactataaagttgccgctgctgata

SEQ ID NO: 7416 - DNA, 25 bp, Saccharomyces pastorianus
gcgggtctattacaagctctcactg

SEQ ID NO: 7417 - DNA, 25 bp, Saccharomyces pastorianus
ttatctataactaggctctcaccca

SEQ ID NO: 7418 - DNA, 25 bp, Saccharomyces pastorianus
actttacgcctatatcactgatcat

SEQ ID NO: 7419 - DNA, 25 bp, Saccharomyces pastorianus
gaagatgttcttgcacgagttttag

SEQ ID NO: 7420 - DNA, 25 bp, Saccharomyces pastorianus
ggcgcacatgctattgcagttgctt

SEQ ID NO: 7421 - DNA, 25 bp, Saccharomyces pastorianus
gacacttttgaaacgaccttggccg

SEQ ID NO: 7422 - DNA, 25 bp, Saccharomyces pastorianus
atatcttgatatatgccgctgcagg

SEQ ID NO: 7423 - DNA, 25 bp, Saccharomyces pastorianus
gatgaactggtgtttcagctcgaaa

SEQ ID NO: 7424 - DNA, 25 bp, Saccharomyces pastorianus
ggatagtcgttgatcgttatttgga

SEQ ID NO: 7425 - DNA, 25 bp, Saccharomyces pastorianus
tcacgacgagtgatcgttgcgccag

SEQ ID NO: 7426 - DNA, 25 bp, Saccharomyces pastorianus
acaccacctcagacagtcgtaaggg

SEQ ID NO: 7427 - DNA, 25 bp, Saccharomyces pastorianus
gagtaacatacccatccatgagtac

SEQ ID NO: 7428 - DNA, 25 bp, Saccharomyces pastorianus
ggacattccttcatatttgacgtta

SEQ ID NO: 7429 - DNA, 25 bp, Saccharomyces pastorianus
tgctaaacccattctgtctaaagag

SEQ ID NO: 7430 - DNA, 25 bp, Saccharomyces pastorianus
gttgcgccagcgtcgcacttcagaa

SEQ ID NO: 7431 - DNA, 25 bp, Saccharomyces pastorianus
aagcaactgccagaggactcgaatt

SEQ ID NO: 7432 - DNA, 25 bp, Saccharomyces pastorianus
gaaatgtacggatcacaccacctca

SEQ ID NO: 7433 - DNA, 25 bp, Saccharomyces pastorianus
cgcttgagtagggttcgatctgtaa

SEQ ID NO: 7434 - DNA, 25 bp, Saccharomyces pastorianus
ctccacacagttgaattcgtccgat

SEQ ID NO: 7435 - DNA, 25 bp, Saccharomyces pastorianus
aaaaaggacgctgcagactgccaac

SEQ ID NO: 7436 - DNA, 25 bp, Saccharomyces pastorianus
taagcagtgtgcttcgggtcgaccc

SEQ ID NO: 7437 - DNA, 25 bp, Saccharomyces pastorianus
agttcaggccattcgacgtttatct

SEQ ID NO: 7438 - DNA, 25 bp, Saccharomyces pastorianus
tccgatgacgaagatccgggttttc

SEQ ID NO: 7439 - DNA, 25 bp, Saccharomyces pastorianus
accgctgtggctactgctattatca

SEQ ID NO: 7440 - DNA, 25 bp, Saccharomyces pastorianus
aggagctggttcaaggcgcataaaa

SEQ ID NO: 7441 - DNA, 25 bp, Saccharomyces pastorianus
tatccgtgacgtgccaagtaatatc

SEQ ID NO: 7442 - DNA, 25 bp, Saccharomyces pastorianus
gactataaccgtgtctacattgcca

SEQ ID NO: 7443 - DNA, 25 bp, Saccharomyces pastorianus
ggttcgaacccagctctggttatag

SEQ ID NO: 7444 - DNA, 25 bp, Saccharomyces pastorianus
attgccagtgatactgcgaccgctg

SEQ ID NO: 7445 - DNA, 25 bp, Saccharomyces pastorianus
tgggactccaacacaggcggccttt

SEQ ID NO: 7446 - DNA, 25 bp, Saccharomyces pastorianus
aagggctcgctccatggcaagatag

SEQ ID NO: 7447 - DNA, 25 bp, Saccharomyces pastorianus
ggtatcatctacgttccattgggat

SEQ ID NO: 7448 - DNA, 25 bp, Saccharomyces pastorianus
gcgtggacggtgacagacctcccag

SEQ ID NO: 7449 - DNA, 25 bp, Saccharomyces pastorianus
gacctcccagcgtgtcagagttaaa

SEQ ID NO: 7450 - DNA, 25 bp, Saccharomyces pastorianus
ggacgacacaattgctacgttagca

SEQ ID NO: 7451 - DNA, 25 bp, Saccharomyces pastorianus
gctgatttcagctacaagatcctaa

SEQ ID NO: 7452 - DNA, 25 bp, Saccharomyces pastorianus
aagatagccggcctgtttgtttcgg

SEQ ID NO: 7453 - DNA, 25 bp, Saccharomyces pastorianus
gatgatgtcaatgggtcgtgtgctt

SEQ ID NO: 7454 - DNA, 25 bp, Saccharomyces pastorianus
gattactacctgtttggaatccccg

SEQ ID NO: 7455 - DNA, 25 bp, Saccharomyces pastorianus
gagtggaaaaccttctgggactcca

SEQ ID NO: 7456 - DNA, 25 bp, Saccharomyces pastorianus
gacgctgtgggcttcaatttcgata

SEQ ID NO: 7457 - DNA, 25 bp, Saccharomyces pastorianus
aattggagccgattgggtgcattct

SEQ ID NO: 7458 - DNA, 25 bp, Saccharomyces pastorianus
ccgtgttgatctattggcccaggag

SEQ ID NO: 7459 - DNA, 25 bp, Saccharomyces pastorianus
ctgtatgttgattcccaatgccatt

SEQ ID NO: 7460 - DNA, 25 bp, Saccharomyces pastorianus
attttgccaaagtcaacgccgagag

SEQ ID NO: 7461 - DNA, 25 bp, Saccharomyces pastorianus
tgccctggcggtgacttactaaaac

SEQ ID NO: 7462 - DNA, 25 bp, Saccharomyces pastorianus
cgccgtctggtccacttgtaaagta

SEQ ID NO: 7463 - DNA, 25 bp, Saccharomyces pastorianus
tatagaatccccaacgtgctagacg

SEQ ID NO: 7464 - DNA, 25 bp, Saccharomyces pastorianus
gccgagagtctcatgttgttgtttt

SEQ ID NO: 7465 - DNA, 25 bp, Saccharomyces pastorianus
aagcattccgggtacctgtttatcg

SEQ ID NO: 7466 - DNA, 25 bp, Saccharomyces pastorianus
aatcatttgaatcgcctgagcccga

SEQ ID NO: 7467 - DNA, 25 bp, Saccharomyces pastorianus
gggttactacactatcggccttggt

SEQ ID NO: 7468 - DNA, 25 bp, Saccharomyces pastorianus
ttgatgaccactacgttcaacttgg

SEQ ID NO: 7469 - DNA, 25 bp, Saccharomyces pastorianus
tgttggttgattgccgcttgtgtcc

SEQ ID NO: 7470 - DNA, 25 bp, Saccharomyces pastorianus
tgattctgactccagccttaaggaa

SEQ ID NO: 7471 - DNA, 25 bp, Saccharomyces pastorianus
gttggtatgaccgaagtcttcaccg

SEQ ID NO: 7472 - DNA, 25 bp, Saccharomyces pastorianus
aacatgtcggcccagttgcagaaag

SEQ ID NO: 7473 - DNA, 25 bp, Saccharomyces pastorianus
aaggatatcgccaatgttttcatta

SEQ ID NO: 7474 - DNA, 25 bp, Saccharomyces pastorianus
ttgattttatccgtcttgccagttc

SEQ ID NO: 7475 - DNA, 25 bp, Saccharomyces pastorianus
gcttttgtggttgattgcctaccca

SEQ ID NO: 7476 - DNA, 25 bp, Saccharomyces pastorianus
attggctagctatctgggtcttgaa

SEQ ID NO: 7477 - DNA, 25 bp, Saccharomyces pastorianus
aagtcttcaccgtctgttggttgat

SEQ ID NO: 7478 - DNA, 25 bp, Saccharomyces pastorianus
gagccgaatacatctctgccaagaa

SEQ ID NO: 7479 - DNA, 25 bp, Saccharomyces pastorianus
acgtcctcacgatgatgggttccaa

SEQ ID NO: 7480 - DNA, 25 bp, Saccharomyces pastorianus
aacttcaggtgacagggactctaca

SEQ ID NO: 7481 - DNA, 25 bp, Saccharomyces pastorianus
gagatggcattcctggaaatcgcaa

SEQ ID NO: 7482 - DNA, 25 bp, Saccharomyces pastorianus
ggtaagaacttcgaacactggagat

SEQ ID NO: 7483 - DNA, 25 bp, Saccharomyces pastorianus
gttgcctaacactgtgaatttccct

SEQ ID NO: 7484 - DNA, 25 bp, Saccharomyces pastorianus
gcaagtgtcttttctcatgtggcga

SEQ ID NO: 7485 - DNA, 25 bp, Saccharomyces pastorianus
gaatttccctcgtgatgatgctgat

SEQ ID NO: 7486 - DNA, 25 bp, Saccharomyces pastorianus
gatggtttaaatacggccgcgaacg

SEQ ID NO: 7487 - DNA, 25 bp, Saccharomyces pastorianus
ggccgcgaacgacataattgctttc

SEQ ID NO: 7488 - DNA, 25 bp, Saccharomyces pastorianus
tgatgctgattataccgtcggtgaa

SEQ ID NO: 7489 - DNA, 25 bp, Saccharomyces pastorianus
catactgaatgccatcgaagagttc

SEQ ID NO: 7490 - DNA, 25 bp, Saccharomyces pastorianus
ggtgcacatacccactacaaaggaa

SEQ ID NO: 7491 - DNA, 25 bp, Saccharomyces pastorianus
aagacgtagcgggaaatcaaatggc

SEQ ID NO: 7492 - DNA, 25 bp, Saccharomyces pastorianus
tctcacgattttcagcctaagtttc

SEQ ID NO: 7493 - DNA, 25 bp, Saccharomyces pastorianus
ctttgactcattttgtcttcatgtc

SEQ ID NO: 7494 - DNA, 25 bp, Saccharomyces pastorianus
tatttaatggcatcctttgactcat

SEQ ID NO: 7495 - DNA, 25 bp, Saccharomyces pastorianus
ttttctcacgattttcagcctaagt

SEQ ID NO: 7496 - DNA, 25 bp, Saccharomyces pastorianus
aaactcgatggtgcacatacccact

SEQ ID NO: 7497 - DNA, 25 bp, Saccharomyces pastorianus
ggcatcctttgactcattttgtctt

SEQ ID NO: 7498 - DNA, 25 bp, Saccharomyces pastorianus
tgtcttcatgtcttttttctcacga

SEQ ID NO: 7499 - DNA, 25 bp, Saccharomyces pastorianus
cgaagagttcatcgaaaagctttat

SEQ ID NO: 7500 - DNA, 25 bp, Saccharomyces pastorianus
ttatgtgccgcagatttcatcgctt

SEQ ID NO: 7501 - DNA, 25 bp, Saccharomyces pastorianus
atgtaccggctgctcattgaaacgc

SEQ ID NO: 7502 - DNA, 25 bp, Saccharomyces pastorianus
caaaacatgggcaacctttccgcta

SEQ ID NO: 7503 - DNA, 25 bp, Saccharomyces pastorianus
gatgctgagttatctctctgtcatt

SEQ ID NO: 7504 - DNA, 25 bp, Saccharomyces pastorianus
gtcttcaaccatttatgtgccgcag

SEQ ID NO: 7505 - DNA, 25 bp, Saccharomyces pastorianus
acagatcatatatacgccccattac

SEQ ID NO: 7506 - DNA, 25 bp, Saccharomyces pastorianus
gaactataactttgtcttccacgac

SEQ ID NO: 7507 - DNA, 25 bp, Saccharomyces pastorianus
ttgggtgccctacacatacgcagaa

SEQ ID NO: 7508 - DNA, 25 bp, Saccharomyces pastorianus
tatgttctgcaatcacttaccgtca

SEQ ID NO: 7509 - DNA, 25 bp, Saccharomyces pastorianus
ctaccatcgagtccacatttcaaga

SEQ ID NO: 7510 - DNA, 25 bp, Saccharomyces pastorianus
tgccatagtggcgtctacagatcat

SEQ ID NO: 7511 - DNA, 25 bp, Saccharomyces pastorianus
agttttgactcagatgcgacctacc

SEQ ID NO: 7512 - DNA, 25 bp, Saccharomyces pastorianus
attttgtttgcagtgacggtgcccc

SEQ ID NO: 7513 - DNA, 25 bp, Saccharomyces pastorianus
ctataacccaccatctagctggata

SEQ ID NO: 7514 - DNA, 25 bp, Saccharomyces pastorianus
gacgtcaatacgtccgttgatgagt

SEQ ID NO: 7515 - DNA, 25 bp, Saccharomyces pastorianus
gatcgcgaacactatttcgtctttg

SEQ ID NO: 7516 - DNA, 25 bp, Saccharomyces pastorianus
ggtccaacaaatcctccttataaga

SEQ ID NO: 7517 - DNA, 25 bp, Saccharomyces pastorianus
acggtgcccctgatgtgactggatt

SEQ ID NO: 7518 - DNA, 25 bp, Saccharomyces pastorianus
tttatggcttgtggcagtctcgaga

SEQ ID NO: 7519 - DNA, 25 bp, Saccharomyces pastorianus
gctctacaacttaccacatgcattt

SEQ ID NO: 7520 - DNA, 25 bp, Saccharomyces pastorianus
actggattgcacgatcttgatgaat

SEQ ID NO: 7521 - DNA, 25 bp, Saccharomyces pastorianus
ggccagaatcttggacttatttggt

SEQ ID NO: 7522 - DNA, 25 bp, Saccharomyces pastorianus
attccttggacatccggattttcgg

SEQ ID NO: 7523 - DNA, 25 bp, Saccharomyces pastorianus
aatagctgattcgatttcacagttg

SEQ ID NO: 7524 - DNA, 25 bp, Saccharomyces pastorianus
gggaacagtttgctcgtaaagtaca

SEQ ID NO: 7525 - DNA, 25 bp, Saccharomyces pastorianus
atttggtgccactactgcggaaaac

SEQ ID NO: 7526 - DNA, 25 bp, Saccharomyces pastorianus
gattggagctgggttctgatgataa

SEQ ID NO: 7527 - DNA, 25 bp, Saccharomyces pastorianus
tgatgtttccagtaggtccttcttc

SEQ ID NO: 7528 - DNA, 25 bp, Saccharomyces pastorianus
ggtgttctacgtattgatcgttcca

SEQ ID NO: 7529 - DNA, 25 bp, Saccharomyces pastorianus
aacaatcaccacacgaaagggctta

SEQ ID NO: 7530 - DNA, 25 bp, Saccharomyces pastorianus
acagatctgtagatgtttctcacat

SEQ ID NO: 7531 - DNA, 25 bp, Saccharomyces pastorianus
gaggtgtacgattccagtcaagtat

SEQ ID NO: 7532 - DNA, 25 bp, Saccharomyces pastorianus
gattttcggctgcttcatttggtgc

SEQ ID NO: 7533 - DNA, 25 bp, Saccharomyces pastorianus
aaaacccacaaaagctcattcgaca

SEQ ID NO: 7534 - DNA, 25 bp, Saccharomyces pastorianus
gacaggacagagaacacgccatttt

SEQ ID NO: 7535 - DNA, 25 bp, Saccharomyces pastorianus
gggaaatgcgactttccagtcaatt

SEQ ID NO: 7536 - DNA, 25 bp, Saccharomyces pastorianus
ttctggccacctttcaagacataat

SEQ ID NO: 7537 - DNA, 25 bp, Saccharomyces pastorianus
aaaatcacatctgtccacacgaggg

SEQ ID NO: 7538 - DNA, 25 bp, Saccharomyces pastorianus
agaatcgccgttgcataatgttaac

SEQ ID NO: 7539 - DNA, 25 bp, Saccharomyces pastorianus
aagaggcttcgccagaatcgccgtt

SEQ ID NO: 7540 - DNA, 25 bp, Saccharomyces pastorianus
atcgatcatatccagccagacgtat

SEQ ID NO: 7541 - DNA, 25 bp, Saccharomyces pastorianus
cattaccgtacccacgcgaataaga

SEQ ID NO: 7542 - DNA, 25 bp, Saccharomyces pastorianus
acgccatttttgtaagatctgctcg

SEQ ID NO: 7543 - DNA, 25 bp, Saccharomyces pastorianus
aagatctgctcgactgggtttacca

SEQ ID NO: 7544 - DNA, 25 bp, Saccharomyces pastorianus
attggtgacattaactcccatcttt

SEQ ID NO: 7545 - DNA, 25 bp, Saccharomyces pastorianus
accgctagcacttctgttgtaactg

SEQ ID NO: 7546 - DNA, 25 bp, Saccharomyces pastorianus
agattgagttccgaaatcgccgccg

SEQ ID NO: 7547 - DNA, 25 bp, Saccharomyces pastorianus
tcccatctttccgactatttaggtt

SEQ ID NO: 7548 - DNA, 25 bp, Saccharomyces pastorianus
gaaaccgccggtcaaactgccgaat

SEQ ID NO: 7549 - DNA, 25 bp, Saccharomyces pastorianus
aaggcagtttcttcttccgttgctc

SEQ ID NO: 7550 - DNA, 25 bp, Saccharomyces pastorianus
gtaactgcatccaacgctggtcaaa

SEQ ID NO: 7551 - DNA, 25 bp, Saccharomyces pastorianus
aaatccctgctgatgtcttgagcgt

SEQ ID NO: 7552 - DNA, 25 bp, Saccharomyces pastorianus
atcgctttcgttttaaccgctattg

SEQ ID NO: 7553 - DNA, 25 bp, Saccharomyces pastorianus
aaactggactacgatgccatcacca

SEQ ID NO: 7554 - DNA, 25 bp, Saccharomyces pastorianus
ggtaacagcggtttccaaatccctg

SEQ ID NO: 7555 - DNA, 25 bp, Saccharomyces pastorianus
gcgttatttttcctagtttgccagt

SEQ ID NO: 7556 - DNA, 25 bp, Saccharomyces pastorianus
tttccagtctttcccaattgtttat

SEQ ID NO: 7557 - DNA, 25 bp, Saccharomyces pastorianus
ggcagacctttgctttgttttctaa

SEQ ID NO: 7558 - DNA, 25 bp, Saccharomyces pastorianus
gggtgcatcggatttgttgccacta

SEQ ID NO: 7559 - DNA, 25 bp, Saccharomyces pastorianus
ttagattcagagacgccatggccaa

SEQ ID NO: 7560 - DNA, 25 bp, Saccharomyces pastorianus
aatgcctattgtcttgtttgcctat

SEQ ID NO: 7561 - DNA, 25 bp, Saccharomyces pastorianus
gtcatcggaaaacctgaacggctca

SEQ ID NO: 7562 - DNA, 25 bp, Saccharomyces pastorianus
tacgtcccgccatcacttatagaga

SEQ ID NO: 7563 - DNA, 25 bp, Saccharomyces pastorianus
atttctcttatctttgggtgcatcg

SEQ ID NO: 7564 - DNA, 25 bp, Saccharomyces pastorianus
gggctcttggcttgcagttattatt

SEQ ID NO: 7565 - DNA, 25 bp, Saccharomyces pastorianus
agtttgccagttttgggtcgccatc

SEQ ID NO: 7566 - DNA, 25 bp, Saccharomyces pastorianus
aggagaagctactgctggttccgtc

SEQ ID NO: 7567 - DNA, 25 bp, Saccharomyces pastorianus
gaacttggacactccagtcatgggc

SEQ ID NO: 7568 - DNA, 25 bp, Saccharomyces pastorianus
aaagcactttttgtcttctgcacaa

SEQ ID NO: 7569 - DNA, 25 bp, Saccharomyces pastorianus
acgagtcctctatgaagctacctta

SEQ ID NO: 7570 - DNA, 25 bp, Saccharomyces pastorianus
aattccggttcaagctcgcacacag

SEQ ID NO: 7571 - DNA, 25 bp, Saccharomyces pastorianus
gaaacactgcacgaactgaacttgg

SEQ ID NO: 7572 - DNA, 25 bp, Saccharomyces pastorianus
gtcattgtctaacgagtttgctcaa

SEQ ID NO: 7573 - DNA, 25 bp, Saccharomyces pastorianus
cttagacgctccaagaattccggtt

SEQ ID NO: 7574 - DNA, 25 bp, Saccharomyces pastorianus
taaaggactaccattcggccataaa

SEQ ID NO: 7575 - DNA, 25 bp, Saccharomyces pastorianus
aaaatccacgtccagtcggtcaaag

SEQ ID NO: 7576 - DNA, 25 bp, Saccharomyces pastorianus
atatcttccatattctcccaggata

SEQ ID NO: 7577 - DNA, 25 bp, Saccharomyces pastorianus
aatggtggtgctctttatgatccaa

SEQ ID NO: 7578 - DNA, 25 bp, Saccharomyces pastorianus
gtttctggtgaaatcccatcttctt

SEQ ID NO: 7579 - DNA, 25 bp, Saccharomyces pastorianus
gaggctacgcgccaagacgccaatt

SEQ ID NO: 7580 - DNA, 25 bp, Saccharomyces pastorianus
acaatgatttgtccttgctgccatc

SEQ ID NO: 7581 - DNA, 25 bp, Saccharomyces pastorianus
gattacccaggtgtcgatgctgata

SEQ ID NO: 7582 - DNA, 25 bp, Saccharomyces pastorianus
gactgttccgaagttgaagcctaaa

SEQ ID NO: 7583 - DNA, 25 bp, Saccharomyces pastorianus
gtgttgctgttccagttgatatctt

SEQ ID NO: 7584 - DNA, 25 bp, Saccharomyces pastorianus
gccaattaacaactggtcctggtaa

SEQ ID NO: 7585 - DNA, 25 bp, Saccharomyces pastorianus
gtgtgttgactttgactgttccgaa

SEQ ID NO: 7586 - DNA, 25 bp, Saccharomyces pastorianus
gttatcactttaccagattacccag

SEQ ID NO: 7587 - DNA, 25 bp, Saccharomyces pastorianus
tcagcttccccagaagtgttgctgt

SEQ ID NO: 7588 - DNA, 25 bp, Saccharomyces pastorianus
aaggctactgtttccccagataaag

SEQ ID NO: 7589 - DNA, 25 bp, Saccharomyces pastorianus
agcacaccaagtctcttaccaaagg

SEQ ID NO: 7590 - DNA, 25 bp, Saccharomyces pastorianus
agaagttcgtcaacagcgttaccaa

SEQ ID NO: 7591 - DNA, 25 bp, Saccharomyces pastorianus
agtagcccaactccgtaatcaaaag

SEQ ID NO: 7592 - DNA, 25 bp, Saccharomyces pastorianus
gctgctaagaaacctactccattcg

SEQ ID NO: 7593 - DNA, 25 bp, Saccharomyces pastorianus
gaaagaacgcttgtcaggtaccaaa

SEQ ID NO: 7594 - DNA, 25 bp, Saccharomyces pastorianus
ttaccaagaggctatcgcaagacgt

SEQ ID NO: 7595 - DNA, 25 bp, Saccharomyces pastorianus
aagaactcgcagaagctggccgtaa

SEQ ID NO: 7596 - DNA, 25 bp, Saccharomyces pastorianus
aaatggaggaagctgccgctgctaa

SEQ ID NO: 7597 - DNA, 25 bp, Saccharomyces pastorianus
gaacttggccatggtctttgacgat

SEQ ID NO: 7598 - DNA, 25 bp, Saccharomyces pastorianus
gcttcaacctctgctccaaagaaaa

SEQ ID NO: 7599 - DNA, 25 bp, Saccharomyces pastorianus
aatttctcgatgacgctggtagggt

SEQ ID NO: 7600 - DNA, 25 bp, Saccharomyces pastorianus
actacctcaacttattcagttctcc

SEQ ID NO: 7601 - DNA, 25 bp, Saccharomyces pastorianus
agtccggattcccatttatcagatt

SEQ ID NO: 7602 - DNA, 25 bp, Saccharomyces pastorianus
ggatatcctgagctgttttgacaat

SEQ ID NO: 7603 - DNA, 25 bp, Saccharomyces pastorianus
cgaattgtcacgcagttgtcctaac

SEQ ID NO: 7604 - DNA, 25 bp, Saccharomyces pastorianus
cggccctgcgggatctggtaagaca

SEQ ID NO: 7605 - DNA, 25 bp, Saccharomyces pastorianus
gtctctattaatacacggccctgcg

SEQ ID NO: 7606 - DNA, 25 bp, Saccharomyces pastorianus
gatggccgtttgctaattatgacaa

SEQ ID NO: 7607 - DNA, 25 bp, Saccharomyces pastorianus
gataacaccttcagagacgcatata

SEQ ID NO: 7608 - DNA, 25 bp, Saccharomyces pastorianus
ttgtcctaactttaatgtcggtatc

SEQ ID NO: 7609 - DNA, 25 bp, Saccharomyces pastorianus
tctcctctaaacattctcgttatcg

SEQ ID NO: 7610 - DNA, 25 bp, Saccharomyces pastorianus
tgaaatgggttcttccctatttttg

SEQ ID NO: 7611 - DNA, 25 bp, Saccharomyces pastorianus
gacaattcctttgctctcttagaag

SEQ ID NO: 7612 - DNA, 25 bp, Saccharomyces pastorianus
atgcgggttcgttctggaacacttt

SEQ ID NO: 7613 - DNA, 25 bp, Saccharomyces pastorianus
tggacgacccctttaatgattcaaa

SEQ ID NO: 7614 - DNA, 25 bp, Saccharomyces pastorianus
gaattctacctacttcgactgagga

SEQ ID NO: 7615 - DNA, 25 bp, Saccharomyces pastorianus
ttggaaacacctcaaccactggatt

SEQ ID NO: 7616 - DNA, 25 bp, Saccharomyces pastorianus
gaacactttacttccactgctaagg

SEQ ID NO: 7617 - DNA, 25 bp, Saccharomyces pastorianus
tttgagttcgtctgttccattgcaa

SEQ ID NO: 7618 - DNA, 25 bp, Saccharomyces pastorianus
actacccaattccaaactgtcgatg

SEQ ID NO: 7619 - DNA, 25 bp, Saccharomyces pastorianus
caaaaggcctgcttgatgcgggttc

SEQ ID NO: 7620 - DNA, 25 bp, Saccharomyces pastorianus
gattctttgaacatggacgacccct

SEQ ID NO: 7621 - DNA, 25 bp, Saccharomyces pastorianus
tacaaggtaggctagcaccatacta

SEQ ID NO: 7622 - DNA, 25 bp, Saccharomyces pastorianus
gtaccaatcttcctacttttctcaa

SEQ ID NO: 7623 - DNA, 25 bp, Saccharomyces pastorianus
aatctcatcacggaggcgttttcga

SEQ ID NO: 7624 - DNA, 25 bp, Saccharomyces pastorianus
ttcgaactatgctcaaggtctaccc

SEQ ID NO: 7625 - DNA, 25 bp, Saccharomyces pastorianus
ggaagttgttccaaggtctgctgca

SEQ ID NO: 7626 - DNA, 25 bp, Saccharomyces pastorianus
gtctgctgcagagccacagttacaa

SEQ ID NO: 7627 - DNA, 25 bp, Saccharomyces pastorianus
gaagactcccttaatctacgctaaa

SEQ ID NO: 7628 - DNA, 25 bp, Saccharomyces pastorianus
aatgtaccccagacctgctgaagac

SEQ ID NO: 7629 - DNA, 25 bp, Saccharomyces pastorianus
ttctcaacttctattatcatcaccc

SEQ ID NO: 7630 - DNA, 25 bp, Saccharomyces pastorianus
atatcctctctccaaagtacgaacc

SEQ ID NO: 7631 - DNA, 25 bp, Saccharomyces pastorianus
agtaccaaagactatcccgcataca

SEQ ID NO: 7632 - DNA, 25 bp, Saccharomyces pastorianus
aagccactggtactaaccgggtcat

SEQ ID NO: 7633 - DNA, 25 bp, Saccharomyces pastorianus
cggatcatttttagcttcgttctta

SEQ ID NO: 7634 - DNA, 25 bp, Saccharomyces pastorianus
gcaggtgttatctccatgtatgatc

SEQ ID NO: 7635 - DNA, 25 bp, Saccharomyces pastorianus
aggttggctgccgatgctaaatcat

SEQ ID NO: 7636 - DNA, 25 bp, Saccharomyces pastorianus
gggttcatgccttcagtagttggta

SEQ ID NO: 7637 - DNA, 25 bp, Saccharomyces pastorianus
ttgggttattcgattctctcaagcc

SEQ ID NO: 7638 - DNA, 25 bp, Saccharomyces pastorianus
ggctgcggtgccaatattctaagga

SEQ ID NO: 7639 - DNA, 25 bp, Saccharomyces pastorianus
gacttccggtcaagccgtcaaatat

SEQ ID NO: 7640 - DNA, 25 bp, Saccharomyces pastorianus
aatctgacggtattgctggactgta

SEQ ID NO: 7641 - DNA, 25 bp, Saccharomyces pastorianus
ttgggtggttactacaggtgcttca

SEQ ID NO: 7642 - DNA, 25 bp, Saccharomyces pastorianus
tgttcatacccattggacacggtga

SEQ ID NO: 7643 - DNA, 25 bp, Saccharomyces pastorianus
ggttctttcttacaaagtgcccctg

SEQ ID NO: 7644 - DNA, 25 bp, Saccharomyces pastorianus
agttgaccacagttagtggatacca

SEQ ID NO: 7645 - DNA, 25 bp, Saccharomyces pastorianus
attgccaatattctaggtgaagcta

SEQ ID NO: 7646 - DNA, 25 bp, Saccharomyces pastorianus
aaacagtcctgagcgaagacaagtc

SEQ ID NO: 7647 - DNA, 25 bp, Saccharomyces pastorianus
acacaaatttcactcattctacagg

SEQ ID NO: 7648 - DNA, 25 bp, Saccharomyces pastorianus
ggcggtgaagtcattgccaatattc

SEQ ID NO: 7649 - DNA, 25 bp, Saccharomyces pastorianus
ctatgtgctaatgggcggtgaagtc

SEQ ID NO: 7650 - DNA, 25 bp, Saccharomyces pastorianus
agacaagtcgcacggctatgtgcta

SEQ ID NO: 7651 - DNA, 25 bp, Saccharomyces pastorianus
aatgaaatccaaacagtcctgagcg

SEQ ID NO: 7652 - DNA, 25 bp, Saccharomyces pastorianus
cactcattctacaggttctttctta

SEQ ID NO: 7653 - DNA, 25 bp, Saccharomyces pastorianus
aaagtgcccctgttgagttgaccac

SEQ ID NO: 7654 - DNA, 25 bp, Saccharomyces pastorianus
tcaaaccggttctcagtacaggcgt

SEQ ID NO: 7655 - DNA, 25 bp, Saccharomyces pastorianus
aacaacagtgctactgatgccgctc

SEQ ID NO: 7656 - DNA, 25 bp, Saccharomyces pastorianus
aagaacgccacgaacaattccaagg

SEQ ID NO: 7657 - DNA, 25 bp, Saccharomyces pastorianus
tgttgccatggctgacccggtaaat

SEQ ID NO: 7658 - DNA, 25 bp, Saccharomyces pastorianus
ttccaaggcagctgaatcttcatct

SEQ ID NO: 7659 - DNA, 25 bp, Saccharomyces pastorianus
ggcccagtaagatctatttctacga

SEQ ID NO: 7660 - DNA, 25 bp, Saccharomyces pastorianus
aacggcaatgctcctgatgcattca

SEQ ID NO: 7661 - DNA, 25 bp, Saccharomyces pastorianus
agggcttccgtgactaccgagcaaa

SEQ ID NO: 7662 - DNA, 25 bp, Saccharomyces pastorianus
gtcaccatcgcgatgctggagtgaa

SEQ ID NO: 7663 - DNA, 25 bp, Saccharomyces pastorianus
actgatgaccattcgagggcttccg

SEQ ID NO: 7664 - DNA, 25 bp, Saccharomyces pastorianus
atacggtgttgcaggtgccactcta

SEQ ID NO: 7665 - DNA, 25 bp, Saccharomyces pastorianus
gccttgaggcgcaccatggaaaaat

SEQ ID NO: 7666 - DNA, 25 bp, Saccharomyces pastorianus
gttgtcccgcaccaagtgataatga

SEQ ID NO: 7667 - DNA, 25 bp, Saccharomyces pastorianus
gaatgggaatttacgagtctctcta

SEQ ID NO: 7668 - DNA, 25 bp, Saccharomyces pastorianus
gtctctctattgatgctcgaatcta

SEQ ID NO: 7669 - DNA, 25 bp, Saccharomyces pastorianus
ggaactaacgtttgcgctgttaagc

SEQ ID NO: 7670 - DNA, 25 bp, Saccharomyces pastorianus
acaaaggatgcccaggctgccttga

SEQ ID NO: 7671 - DNA, 25 bp, Saccharomyces pastorianus
tggctcactgtatacctgcgaatgt

SEQ ID NO: 7672 - DNA, 25 bp, Saccharomyces pastorianus
taaagccggactggattatcgtaat

SEQ ID NO: 7673 - DNA, 25 bp, Saccharomyces pastorianus
tcacgttgtcttttggttcgttgtc

SEQ ID NO: 7674 - DNA, 25 bp, Saccharomyces pastorianus
agagccgttctatacgacttgctgg

SEQ ID NO: 7675 - DNA, 25 bp, Saccharomyces pastorianus
gaataaggcgatcttccatttggaa

SEQ ID NO: 7676 - DNA, 25 bp, Saccharomyces pastorianus
tgatcatcctgtcacactgggtatg

SEQ ID NO: 7677 - DNA, 25 bp, Saccharomyces pastorianus
gatcgttcgtgatttgtctcaactg

SEQ ID NO: 7678 - DNA, 25 bp, Saccharomyces pastorianus
gactccatcatcctattattcgaag

SEQ ID NO: 7679 - DNA, 25 bp, Saccharomyces pastorianus
gtgatatcggttcaggatccgtcat

SEQ ID NO: 7680 - DNA, 25 bp, Saccharomyces pastorianus
tggaccaacccgtagatttgacatt

SEQ ID NO: 7681 - DNA, 25 bp, Saccharomyces pastorianus
atacgattcaaccttatccttacca

SEQ ID NO: 7682 - DNA, 25 bp, Saccharomyces pastorianus
ttaccatcatccgaattctccaaga

SEQ ID NO: 7683 - DNA, 25 bp, Saccharomyces pastorianus
gtatggatttgacctcgctaagtaa

SEQ ID NO: 7684 - DNA, 25 bp, Saccharomyces pastorianus
gaccgtatagcggagtattccctga

SEQ ID NO: 7685 - DNA, 25 bp, Saccharomyces pastorianus
tttggagatcggtgtcgaagccttc

SEQ ID NO: 7686 - DNA, 25 bp, Saccharomyces pastorianus
agactatccagtgaagctcctgctt

SEQ ID NO: 7687 - DNA, 25 bp, Saccharomyces pastorianus
gacgtgacctttggccaagtgggaa

SEQ ID NO: 7688 - DNA, 25 bp, Saccharomyces pastorianus
aatggaaggccttgaccgcggatga

SEQ ID NO: 7689 - DNA, 25 bp, Saccharomyces pastorianus
tactcggtgagaaatggaaggcctt

SEQ ID NO: 7690 - DNA, 25 bp, Saccharomyces pastorianus
atatcgttcgttccgagaaccctga

SEQ ID NO: 7691 - DNA, 25 bp, Saccharomyces pastorianus
gccaagtgggaagaatactcggtga

SEQ ID NO: 7692 - DNA, 25 bp, Saccharomyces pastorianus
agagaggcttgtcggcctacatgtt

SEQ ID NO: 7693 - DNA, 25 bp, Saccharomyces pastorianus
gaccgcggatgagaaggtgccttac

SEQ ID NO: 7694 - DNA, 25 bp, Saccharomyces pastorianus
gagaccagagatatcgttcgttccg

SEQ ID NO: 7695 - DNA, 25 bp, Saccharomyces pastorianus
cgagaaccctgacgtgacctttggc

SEQ ID NO: 7696 - DNA, 25 bp, Saccharomyces pastorianus
atgttcttcgccaacgagaccagag

SEQ ID NO: 7697 - DNA, 25 bp, Saccharomyces pastorianus
acgaaactaaggctcaggctgacaa

SEQ ID NO: 7698 - DNA, 25 bp, Saccharomyces pastorianus
gttactcttacggtcaagacctgac

SEQ ID NO: 7699 - DNA, 25 bp, Saccharomyces pastorianus
aatctgtcggtgctaacttgttcaa

SEQ ID NO: 7700 - DNA, 25 bp, Saccharomyces pastorianus
cgacacctatgtcagatatgtcatc

SEQ ID NO: 7701 - DNA, 25 bp, Saccharomyces pastorianus
ggtgtgcatacgaactgaactccag

SEQ ID NO: 7702 - DNA, 25 bp, Saccharomyces pastorianus
agcaacgtcaccaaattgtccttct

SEQ ID NO: 7703 - DNA, 25 bp, Saccharomyces pastorianus
tttaccaagatggtccaggttacga

SEQ ID NO: 7704 - DNA, 25 bp, Saccharomyces pastorianus
gatatgatcaaatctgtcggtgcta

SEQ ID NO: 7705 - DNA, 25 bp, Saccharomyces pastorianus
gtcagcaacgtcaccaaattgtcct

SEQ ID NO: 7706 - DNA, 25 bp, Saccharomyces pastorianus
gatatcttcagcaaagacgaattgg

SEQ ID NO: 7707 - DNA, 25 bp, Saccharomyces pastorianus
aagacctgacctcattttaccaaga

SEQ ID NO: 7708 - DNA, 25 bp, Saccharomyces pastorianus
aactgaactccagaggttacagtga

SEQ ID NO: 7709 - DNA, 25 bp, Saccharomyces pastorianus
gagtgccatctgactaatacatgct

SEQ ID NO: 7710 - DNA, 25 bp, Saccharomyces pastorianus
ttccaaccgttaccaaatgcgtttg

SEQ ID NO: 7711 - DNA, 25 bp, Saccharomyces pastorianus
gagcccattattgctatcatccatg

SEQ ID NO: 7712 - DNA, 25 bp, Saccharomyces pastorianus
gtagatttcttggtcgattcggatt

SEQ ID NO: 7713 - DNA, 25 bp, Saccharomyces pastorianus
tgtccctctagatcctaacacatat

SEQ ID NO: 7714 - DNA, 25 bp, Saccharomyces pastorianus
tgtgttgccccaatctttaaaggta

SEQ ID NO: 7715 - DNA, 25 bp, Saccharomyces pastorianus
aaatgcgtttgagacctatggtgta

SEQ ID NO: 7716 - DNA, 25 bp, Saccharomyces pastorianus
ctatttgctgctaaaccgtttgtcc

SEQ ID NO: 7717 - DNA, 25 bp, Saccharomyces pastorianus
gagatcaatgctttcccagatttca

SEQ ID NO: 7718 - DNA, 25 bp, Saccharomyces pastorianus
aatgacgttttcttagcggcagtaa

SEQ ID NO: 7719 - DNA, 25 bp, Saccharomyces pastorianus
tgtaaacaggctaaacttccaaccg

SEQ ID NO: 7720 - DNA, 25 bp, Saccharomyces pastorianus
tgcttctcgtacaccaaactggaca

SEQ ID NO: 7721 - DNA, 25 bp, Saccharomyces pastorianus
ttttgcctattgtcacaggatcgaa

SEQ ID NO: 7722 - DNA, 25 bp, Saccharomyces pastorianus
tgtggttttcacgaaactgtaccgt

SEQ ID NO: 7723 - DNA, 25 bp, Saccharomyces pastorianus
ttccagtcgcaaacgttttcaccaa

SEQ ID NO: 7724 - DNA, 25 bp, Saccharomyces pastorianus
gatcaagcctttccaaaaatactct

SEQ ID NO: 7725 - DNA, 25 bp, Saccharomyces pastorianus
agattcaccatcaaaaacggcaccg

SEQ ID NO: 7726 - DNA, 25 bp, Saccharomyces pastorianus
aacgaatacggttgcttctcgtaca

SEQ ID NO: 7727 - DNA, 25 bp, Saccharomyces pastorianus
gcattacccatatattccagtcgca

SEQ ID NO: 7728 - DNA, 25 bp, Saccharomyces pastorianus
gattttattactacgtgattcctat

SEQ ID NO: 7729 - DNA, 25 bp, Saccharomyces pastorianus
aaactggacacatatgcctctccat

SEQ ID NO: 7730 - DNA, 25 bp, Saccharomyces pastorianus
gttctatgctcactatcgctgacaa

SEQ ID NO: 7731 - DNA, 25 bp, Saccharomyces pastorianus
taccgaatttggtttcattggttgg

SEQ ID NO: 7732 - DNA, 25 bp, Saccharomyces pastorianus
gtatggaccccgcaattagatatat

SEQ ID NO: 7733 - DNA, 25 bp, Saccharomyces pastorianus
gtaaacaacgtatggaccccgcaat

SEQ ID NO: 7734 - DNA, 25 bp, Saccharomyces pastorianus
attcatactgcgaactcacacatgg

SEQ ID NO: 7735 - DNA, 25 bp, Saccharomyces pastorianus
ccaataatgctgtgggtttgtatcc

SEQ ID NO: 7736 - DNA, 25 bp, Saccharomyces pastorianus
tttgtatcccagtttccaatcacta

SEQ ID NO: 7737 - DNA, 25 bp, Saccharomyces pastorianus
gaggatgcctgagttgaaagccaat

SEQ ID NO: 7738 - DNA, 25 bp, Saccharomyces pastorianus
gaacaacggcttcgcttcattgata

SEQ ID NO: 7739 - DNA, 25 bp, Saccharomyces pastorianus
tttgaacgtcaaatccgcgcaggat

SEQ ID NO: 7740 - DNA, 25 bp, Saccharomyces pastorianus
gaaatacgcccatttgaacgtcaaa

SEQ ID NO: 7741 - DNA, 25 bp, Saccharomyces pastorianus
caagagggccattttccaattagaa

SEQ ID NO: 7742 - DNA, 25 bp, Saccharomyces pastorianus
atcctcgtggattggtgcagtgttg

SEQ ID NO: 7743 - DNA, 25 bp, Saccharomyces pastorianus
ccaccaactatttgactcagctagc

SEQ ID NO: 7744 - DNA, 25 bp, Saccharomyces pastorianus
gacgaaatgctatcgccaagttcta

SEQ ID NO: 7745 - DNA, 25 bp, Saccharomyces pastorianus
agcggtaaaatctcttcaatcctcg

SEQ ID NO: 7746 - DNA, 25 bp, Saccharomyces pastorianus
gctacataacttgatatccctgaaa

SEQ ID NO: 7747 - DNA, 25 bp, Saccharomyces pastorianus
tcagagtattctgtcgtctaacgaa

SEQ ID NO: 7748 - DNA, 25 bp, Saccharomyces pastorianus
caagcccttgatcttttcttacaaa

SEQ ID NO: 7749 - DNA, 25 bp, Saccharomyces pastorianus
ggctcgatttcgtctacaaactgga

SEQ ID NO: 7750 - DNA, 25 bp, Saccharomyces pastorianus
tcagctagctgttattaggttccaa

SEQ ID NO: 7751 - DNA, 25 bp, Saccharomyces pastorianus
ggtcggtagataatcccaccaacta

SEQ ID NO: 7752 - DNA, 25 bp, Saccharomyces pastorianus
gctgaaggctgtagggctcgatttc

SEQ ID NO: 7753 - DNA, 25 bp, Saccharomyces pastorianus
tcctccttggaaactgtgtctattt

SEQ ID NO: 7754 - DNA, 25 bp, Saccharomyces pastorianus
tgacctctcgcgttcaaatacactt

SEQ ID NO: 7755 - DNA, 25 bp, Saccharomyces pastorianus
tggcctcgccgattgaacagattag

SEQ ID NO: 7756 - DNA, 25 bp, Saccharomyces pastorianus
tggttagatccgcacctgtaaatgg

SEQ ID NO: 7757 - DNA, 25 bp, Saccharomyces pastorianus
agtgaattcatttttggcctcgccg

SEQ ID NO: 7758 - DNA, 25 bp, Saccharomyces pastorianus
ataagctcccaaaacgttgacctct

SEQ ID NO: 7759 - DNA, 25 bp, Saccharomyces pastorianus
ggaccctgggactgtatcaaaaaat

SEQ ID NO: 7760 - DNA, 25 bp, Saccharomyces pastorianus
atggtgctacgtttgtcacatttga

SEQ ID NO: 7761 - DNA, 25 bp, Saccharomyces pastorianus
atacacttccactataccagtacta

SEQ ID NO: 7762 - DNA, 25 bp, Saccharomyces pastorianus
ggttcgggcccacaatggttagatc

SEQ ID NO: 7763 - DNA, 25 bp, Saccharomyces pastorianus
gcacgggctagggacgtatttcctt

SEQ ID NO: 7764 - DNA, 25 bp, Saccharomyces pastorianus
aacagttcggcgactacctagacga

SEQ ID NO: 7765 - DNA, 25 bp, Saccharomyces pastorianus
tcacctatccgggtttttgtcaata

SEQ ID NO: 7766 - DNA, 25 bp, Saccharomyces pastorianus
gtgcgtcttacgatgggttttacta

SEQ ID NO: 7767 - DNA, 25 bp, Saccharomyces pastorianus
agggttctactatcaccaagacgcg

SEQ ID NO: 7768 - DNA, 25 bp, Saccharomyces pastorianus
gcaactggagctggtaccttcaatg

SEQ ID NO: 7769 - DNA, 25 bp, Saccharomyces pastorianus
ggtcccggacgctttgttgatggaa

SEQ ID NO: 7770 - DNA, 25 bp, Saccharomyces pastorianus
tagccttcttgtcttctagttggaa

SEQ ID NO: 7771 - DNA, 25 bp, Saccharomyces pastorianus
gttacccactacatcgagcacggat

SEQ ID NO: 7772 - DNA, 25 bp, Saccharomyces pastorianus
cctctttcagacagcttttcctaat

SEQ ID NO: 7773 - DNA, 25 bp, Saccharomyces pastorianus
tgaagcttacgcagtgactcacaaa

SEQ ID NO: 7774 - DNA, 25 bp, Saccharomyces pastorianus
aacacccggagattagcacgtattt

SEQ ID NO: 7775 - DNA, 25 bp, Saccharomyces pastorianus
agaatcttatactgttcctccattg

SEQ ID NO: 7776 - DNA, 25 bp, Saccharomyces pastorianus
ttggtcatgatgcagctttctcgtc

SEQ ID NO: 7777 - DNA, 25 bp, Saccharomyces pastorianus
catgaagtatgtcgtgcctggcaac

SEQ ID NO: 7778 - DNA, 25 bp, Saccharomyces pastorianus
gtcaccactgtcaaggactacgatt

SEQ ID NO: 7779 - DNA, 25 bp, Saccharomyces pastorianus
agtcaatctacaccgggatggccat

SEQ ID NO: 7780 - DNA, 25 bp, Saccharomyces pastorianus
gctttctcgtcgcttagacatggag

SEQ ID NO: 7781 - DNA, 25 bp, Saccharomyces pastorianus
agatccatcttttcggtaagcctgc

SEQ ID NO: 7782 - DNA, 25 bp, Saccharomyces pastorianus
aaggctgcctctttgttcggtggta

SEQ ID NO: 7783 - DNA, 25 bp, Saccharomyces pastorianus
gaagagacctttcaaggctgcctct

SEQ ID NO: 7784 - DNA, 25 bp, Saccharomyces pastorianus
attgctatcagctggatggtctacc

SEQ ID NO: 7785 - DNA, 25 bp, Saccharomyces pastorianus
tctcccgtcaagagcgctttggaac

SEQ ID NO: 7786 - DNA, 25 bp, Saccharomyces pastorianus
gggctattgcgggaccaacaaccat

SEQ ID NO: 7787 - DNA, 25 bp, Saccharomyces pastorianus
cataatgtggccgatcaactttgat

SEQ ID NO: 7788 - DNA, 25 bp, Saccharomyces pastorianus
tgcgcccatacagcgatgcaattgt

SEQ ID NO: 7789 - DNA, 25 bp, Saccharomyces pastorianus
agattagacacctccaacctggatg

SEQ ID NO: 7790 - DNA, 25 bp, Saccharomyces pastorianus
gaaaattgcccttggcttccattat

SEQ ID NO: 7791 - DNA, 25 bp, Saccharomyces pastorianus
gatgtgtccggtggcaacgagtaca

SEQ ID NO: 7792 - DNA, 25 bp, Saccharomyces pastorianus
gaagtaccgatgttcctgggctatt

SEQ ID NO: 7793 - DNA, 25 bp, Saccharomyces pastorianus
gagaccattgttacttcgacacgaa

SEQ ID NO: 7794 - DNA, 25 bp, Saccharomyces pastorianus
tggctcttggccatggcaacactat

SEQ ID NO: 7795 - DNA, 25 bp, Saccharomyces pastorianus
gcagatcacatggtttagctcaaaa

SEQ ID NO: 7796 - DNA, 25 bp, Saccharomyces pastorianus
cgagtacattcgttctgagttgaga

SEQ ID NO: 7797 - DNA, 25 bp, Saccharomyces pastorianus
atcgacttcgtttactcctgatgaa

SEQ ID NO: 7798 - DNA, 25 bp, Saccharomyces pastorianus
atcgagttcgtatggttatcagcag

SEQ ID NO: 7799 - DNA, 25 bp, Saccharomyces pastorianus
gaatctttgatctttgccatgaagg

SEQ ID NO: 7800 - DNA, 25 bp, Saccharomyces pastorianus
ggaagcgctgccaaatcgagttcgt

SEQ ID NO: 7801 - DNA, 25 bp, Saccharomyces pastorianus
aaactacccagttcttgatgaatta

SEQ ID NO: 7802 - DNA, 25 bp, Saccharomyces pastorianus
ggatatgtttggttcaggtcttcca

SEQ ID NO: 7803 - DNA, 25 bp, Saccharomyces pastorianus
ttacccaggatcttatgtttcataa

SEQ ID NO: 7804 - DNA, 25 bp, Saccharomyces pastorianus
gaaggattacattcacagcgatttt

SEQ ID NO: 7805 - DNA, 25 bp, Saccharomyces pastorianus
aatttgattcaactttacccaggat

SEQ ID NO: 7806 - DNA, 25 bp, Saccharomyces pastorianus
tcaggtcttccagttattgcattaa

SEQ ID NO: 7807 - DNA, 25 bp, Saccharomyces pastorianus
caagttcaggactggatctgccaat

SEQ ID NO: 7808 - DNA, 25 bp, Saccharomyces pastorianus
aagtcgttggaagcatctgttattg

SEQ ID NO: 7809 - DNA, 25 bp, Saccharomyces pastorianus
gcattgtatcctttgttacacatgg

SEQ ID NO: 7810 - DNA, 25 bp, Saccharomyces pastorianus
tggtcttagacaaccttcctcaaag

SEQ ID NO: 7811 - DNA, 25 bp, Saccharomyces pastorianus
aaagcaccaaggctccagaattgga

SEQ ID NO: 7812 - DNA, 25 bp, Saccharomyces pastorianus
actcaagcacaaatcagcctggtcg

SEQ ID NO: 7813 - DNA, 25 bp, Saccharomyces pastorianus
gtggcacaagtcacaggtcatccaa

SEQ ID NO: 7814 - DNA, 25 bp, Saccharomyces pastorianus
gattacttatatactctgcacgatt

SEQ ID NO: 7815 - DNA, 25 bp, Saccharomyces pastorianus
aaacggttcctcaaacacagatgat

SEQ ID NO: 7816 - DNA, 25 bp, Saccharomyces pastorianus
tgttgtcgttgccacttctttgaac

SEQ ID NO: 7817 - DNA, 25 bp, Saccharomyces pastorianus
gaaacgctgtggtatccttgaagaa

SEQ ID NO: 7818 - DNA, 25 bp, Saccharomyces pastorianus
atcatgtggcccgtgttgtcgttgc

SEQ ID NO: 7819 - DNA, 25 bp, Saccharomyces pastorianus
attgaaaccctagcccacttgagag

SEQ ID NO: 7820 - DNA, 25 bp, Saccharomyces pastorianus
atgtcctttgaagtgctagccaccg

SEQ ID NO: 7821 - DNA, 25 bp, Saccharomyces pastorianus
gcgtcaactggttcagaggtctcca

SEQ ID NO: 7822 - DNA, 25 bp, Saccharomyces pastorianus
gatggcgttccaattatgtcctttg

SEQ ID NO: 7823 - DNA, 25 bp, Saccharomyces pastorianus
gattctctatcttgccagatggcgt

SEQ ID NO: 7824 - DNA, 25 bp, Saccharomyces pastorianus
gaggtctccatctctatagacgcgg

SEQ ID NO: 7825 - DNA, 25 bp, Saccharomyces pastorianus
accatctgtagtggccttgtcaaga

SEQ ID NO: 7826 - DNA, 25 bp, Saccharomyces pastorianus
gagagctattcccaacatgcatgtt

SEQ ID NO: 7827 - DNA, 25 bp, Saccharomyces pastorianus
ccatgcctgacttttacacgtttga

SEQ ID NO: 7828 - DNA, 25 bp, Saccharomyces pastorianus
atccggatatcattctagcgtcaac

SEQ ID NO: 7829 - DNA, 25 bp, Saccharomyces pastorianus
gaagtatgcccatcaatccttcggt

SEQ ID NO: 7830 - DNA, 25 bp, Saccharomyces pastorianus
agcaaatccatgctctaagcactat

SEQ ID NO: 7831 - DNA, 25 bp, Saccharomyces pastorianus
atcgaggtttagacgtgtagcaggt

SEQ ID NO: 7832 - DNA, 25 bp, Saccharomyces pastorianus
gcagtcagagattcggccaagaaat

SEQ ID NO: 7833 - DNA, 25 bp, Saccharomyces pastorianus
cttcctctcaggcagtcagagattc

SEQ ID NO: 7834 - DNA, 25 bp, Saccharomyces pastorianus
taaagagacgttagccaggattcaa

SEQ ID NO: 7835 - DNA, 25 bp, Saccharomyces pastorianus
gaagccgtcgctagatgaaataaaa

SEQ ID NO: 7836 - DNA, 25 bp, Saccharomyces pastorianus
agcaggtctaccaagtgtggacgat

SEQ ID NO: 7837 - DNA, 25 bp, Saccharomyces pastorianus
ggatcgtatacctcatttagtcaca

SEQ ID NO: 7838 - DNA, 25 bp, Saccharomyces pastorianus
gataaactctacaaacctgcgggca

SEQ ID NO: 7839 - DNA, 25 bp, Saccharomyces pastorianus
gtcacattcaaggaggtacaggtat

SEQ ID NO: 7840 - DNA, 25 bp, Saccharomyces pastorianus
ggcaatccccgttattatcagcggt

SEQ ID NO: 7841 - DNA, 25 bp, Saccharomyces pastorianus
aagtgttattgagccatctttcggt

SEQ ID NO: 7842 - DNA, 25 bp, Saccharomyces pastorianus
caagaaattggctccttttgtatct

SEQ ID NO: 7843 - DNA, 25 bp, Saccharomyces pastorianus
ggatcgttccgtcactttgagagaa

SEQ ID NO: 7844 - DNA, 25 bp, Saccharomyces pastorianus
ggttcccctatccaatcataaagat

SEQ ID NO: 7845 - DNA, 25 bp, Saccharomyces pastorianus
tttagttgcccctacaaaggtcttg

SEQ ID NO: 7846 - DNA, 25 bp, Saccharomyces pastorianus
ctgttaccaccgaagtttccaagat

SEQ ID NO: 7847 - DNA, 25 bp, Saccharomyces pastorianus
tacaaaggtcttgctggttccccta

SEQ ID NO: 7848 - DNA, 25 bp, Saccharomyces pastorianus
acaatgccagaggtgtcctttcttt

SEQ ID NO: 7849 - DNA, 25 bp, Saccharomyces pastorianus
cgatgaattaggtaccccattcggt

SEQ ID NO: 7850 - DNA, 25 bp, Saccharomyces pastorianus
tgtgattgaagccatccgtaatatc

SEQ ID NO: 7851 - DNA, 25 bp, Saccharomyces pastorianus
gtcaccattgacttcgaatcagcta

SEQ ID NO: 7852 - DNA, 25 bp, Saccharomyces pastorianus
aaaactttcatctcgcaaagcgcct

SEQ ID NO: 7853 - DNA, 25 bp, Saccharomyces pastorianus
catcctatcccggatttgacagggt

SEQ ID NO: 7854 - DNA, 25 bp, Saccharomyces pastorianus
tatcaacgtcttgccctcattgagt

SEQ ID NO: 7855 - DNA, 25 bp, Saccharomyces pastorianus
tgatcgtcaactacacaacaagggt

SEQ ID NO: 7856 - DNA, 25 bp, Saccharomyces pastorianus
gtgtccaaccaattgtacgccaagt

SEQ ID NO: 7857 - DNA, 25 bp, Saccharomyces pastorianus
agattaatgaagtccgccatcggtg

SEQ ID NO: 7858 - DNA, 25 bp, Saccharomyces pastorianus
gaagccctttccatcgaagacaaat

SEQ ID NO: 7859 - DNA, 25 bp, Saccharomyces pastorianus
ttgtccacgatttacgaaagagctg

SEQ ID NO: 7860 - DNA, 25 bp, Saccharomyces pastorianus
gatgcccaacgatgatatcacccat

SEQ ID NO: 7861 - DNA, 25 bp, Saccharomyces pastorianus
aggatcacggtgacgtgtccaacca

SEQ ID NO: 7862 - DNA, 25 bp, Saccharomyces pastorianus
gccgtcgtcggtgaggaagcccttt

SEQ ID NO: 7863 - DNA, 25 bp, Saccharomyces pastorianus
aagtacgtcagttttctctccgata

SEQ ID NO: 7864 - DNA, 25 bp, Saccharomyces pastorianus
atgctggactcctctgataatatac

SEQ ID NO: 7865 - DNA, 25 bp, Saccharomyces pastorianus
gaatgctgtattccatggtcctgga

SEQ ID NO: 7866 - DNA, 25 bp, Saccharomyces pastorianus
gctcccctattccaacgataatgaa

SEQ ID NO: 7867 - DNA, 25 bp, Saccharomyces pastorianus
tgctattgcgttccaaccgttgata

SEQ ID NO: 7868 - DNA, 25 bp, Saccharomyces pastorianus
atattcttttgatcaagctccccta

SEQ ID NO: 7869 - DNA, 25 bp, Saccharomyces pastorianus
agaaatttgaaactcgtgccctcga

SEQ ID NO: 7870 - DNA, 25 bp, Saccharomyces pastorianus
aactttcagattctacctcttgtgg

SEQ ID NO: 7871 - DNA, 25 bp, Saccharomyces pastorianus
atggatcctagaccagtacgatgtg

SEQ ID NO: 7872 - DNA, 25 bp, Saccharomyces pastorianus
ataatgaagcacaccccatgctgga

SEQ ID NO: 7873 - DNA, 25 bp, Saccharomyces pastorianus
aggatatcctacaagacgcaccgca

SEQ ID NO: 7874 - DNA, 25 bp, Saccharomyces pastorianus
acgcttacacttactgttcatctag

SEQ ID NO: 7875 - DNA, 25 bp, Saccharomyces pastorianus
accgtacactgctatcattggactg

SEQ ID NO: 7876 - DNA, 25 bp, Saccharomyces pastorianus
aacagcagcattttctgccggtaac

SEQ ID NO: 7877 - DNA, 25 bp, Saccharomyces pastorianus
attggactggtttcatgcttggcaa

SEQ ID NO: 7878 - DNA, 25 bp, Saccharomyces pastorianus
atttgattaccgcatctcagttaat

SEQ ID NO: 7879 - DNA, 25 bp, Saccharomyces pastorianus
atgattcagggctataccgtcttct

SEQ ID NO: 7880 - DNA, 25 bp, Saccharomyces pastorianus
gaacgttctacggtatggcattaga

SEQ ID NO: 7881 - DNA, 25 bp, Saccharomyces pastorianus
ataccgtcttctttcctaaattgtg

SEQ ID NO: 7882 - DNA, 25 bp, Saccharomyces pastorianus
gattcattgcccaaattgccttttc

SEQ ID NO: 7883 - DNA, 25 bp, Saccharomyces pastorianus
atggtgtacccatttacgctgtcgg

SEQ ID NO: 7884 - DNA, 25 bp, Saccharomyces pastorianus
ggctctagtgagtcttttacaactg

SEQ ID NO: 7885 - DNA, 25 bp, Saccharomyces pastorianus
gcgtgctcgattccactagtggatc

SEQ ID NO: 7886 - DNA, 25 bp, Saccharomyces pastorianus
tttgatctaaaatccagccgcgtgc

SEQ ID NO: 7887 - DNA, 25 bp, Saccharomyces pastorianus
tgaccaatcccagatccatagtgac

SEQ ID NO: 7888 - DNA, 25 bp, Saccharomyces pastorianus
tcccgaggtccatgtcagagtcaag

SEQ ID NO: 7889 - DNA, 25 bp, Saccharomyces pastorianus
tcatgctatcaaattacggttcggc

SEQ ID NO: 7890 - DNA, 25 bp, Saccharomyces pastorianus
aaaggtgtgatcatacgcccaatat

SEQ ID NO: 7891 - DNA, 25 bp, Saccharomyces pastorianus
acggttcggcaactgcagcgacaaa

SEQ ID NO: 7892 - DNA, 25 bp, Saccharomyces pastorianus
agtcaagaccggtgtttccactcta

SEQ ID NO: 7893 - DNA, 25 bp, Saccharomyces pastorianus
agaagaggatgctcccgaggtccat

SEQ ID NO: 7894 - DNA, 25 bp, Saccharomyces pastorianus
agaccactaggccagatcagctaaa

SEQ ID NO: 7895 - DNA, 25 bp, Saccharomyces pastorianus
taaccgccatttttctgtaacgacg

SEQ ID NO: 7896 - DNA, 25 bp, Saccharomyces pastorianus
atacaggcacgtgatgttgcccaag

SEQ ID NO: 7897 - DNA, 25 bp, Saccharomyces pastorianus
atcggactattttaactcggaggtg

SEQ ID NO: 7898 - DNA, 25 bp, Saccharomyces pastorianus
tcaaggtcactccatcggactattt

SEQ ID NO: 7899 - DNA, 25 bp, Saccharomyces pastorianus
ccagtctttgggttgggagcactac

SEQ ID NO: 7900 - DNA, 25 bp, Saccharomyces pastorianus
ttgcccaaggccatgctcaaggtca

SEQ ID NO: 7901 - DNA, 25 bp, Saccharomyces pastorianus
aaagagctcgcgtgctggagttcca

SEQ ID NO: 7902 - DNA, 25 bp, Saccharomyces pastorianus
agcactacgagtgccatgcgccaga

SEQ ID NO: 7903 - DNA, 25 bp, Saccharomyces pastorianus
tcactatcacactttccagggcaga

SEQ ID NO: 7904 - DNA, 25 bp, Saccharomyces pastorianus
ggaccctgcgcatactgacggagga

SEQ ID NO: 7905 - DNA, 25 bp, Saccharomyces pastorianus
agggcagaaagctcactgaccagga

SEQ ID NO: 7906 - DNA, 25 bp, Saccharomyces pastorianus
tccccgcggtactcggacgataatt

SEQ ID NO: 7907 - DNA, 25 bp, Saccharomyces pastorianus
gaagaccacctaatggcggttacct

SEQ ID NO: 7908 - DNA, 25 bp, Saccharomyces pastorianus
ggacattgcttatttcgtacagtaa

SEQ ID NO: 7909 - DNA, 25 bp, Saccharomyces pastorianus
agttgctattgatatctctctgcca

SEQ ID NO: 7910 - DNA, 25 bp, Saccharomyces pastorianus
gacagcaattagattcggacattcc

SEQ ID NO: 7911 - DNA, 25 bp, Saccharomyces pastorianus
ggacattccagtttctacatgggtt

SEQ ID NO: 7912 - DNA, 25 bp, Saccharomyces pastorianus
cgtaaggttccattgcaagagctag

SEQ ID NO: 7913 - DNA, 25 bp, Saccharomyces pastorianus
acgcctgcttaactattagcggatt

SEQ ID NO: 7914 - DNA, 25 bp, Saccharomyces pastorianus
atctctctgccaaatggacattgct

SEQ ID NO: 7915 - DNA, 25 bp, Saccharomyces pastorianus
atgctttttagccacattctcacat

SEQ ID NO: 7916 - DNA, 25 bp, Saccharomyces pastorianus
ttacctctctagttgctttcgccaa

SEQ ID NO: 7917 - DNA, 25 bp, Saccharomyces pastorianus
gggtgctgtcttgatacagtcagaa

SEQ ID NO: 7918 - DNA, 25 bp, Saccharomyces pastorianus
atctactttgctacttgaaatcggt

SEQ ID NO: 7919 - DNA, 25 bp, Saccharomyces pastorianus
aaaaccgctcgatatttttgatcaa

SEQ ID NO: 7920 - DNA, 25 bp, Saccharomyces pastorianus
gagtcctgaacaactatctactttg

SEQ ID NO: 7921 - DNA, 25 bp, Saccharomyces pastorianus
ctcttgtgtttagctgtgtcatgtc

SEQ ID NO: 7922 - DNA, 25 bp, Saccharomyces pastorianus
tctgctgcatttggtattgagtcct

SEQ ID NO: 7923 - DNA, 25 bp, Saccharomyces pastorianus
tcagcctacttgtcacacatagcga

SEQ ID NO: 7924 - DNA, 25 bp, Saccharomyces pastorianus
ttatctttgttacctctttctgctg

SEQ ID NO: 7925 - DNA, 25 bp, Saccharomyces pastorianus
acatagcgagttcaactacctggaa

SEQ ID NO: 7926 - DNA, 25 bp, Saccharomyces pastorianus
aagttaaccctgtttgtgtgttcag

SEQ ID NO: 7927 - DNA, 25 bp, Saccharomyces pastorianus
tctctttcgaaatcatcagcctact

SEQ ID NO: 7928 - DNA, 25 bp, Saccharomyces pastorianus
gcaagtatcgttttgccgtactgtt

SEQ ID NO: 7929 - DNA, 25 bp, Saccharomyces pastorianus
aatcaaatcgatgcgctgggcggat

SEQ ID NO: 7930 - DNA, 25 bp, Saccharomyces pastorianus
gctccctagtcctgaattttgtcaa

SEQ ID NO: 7931 - DNA, 25 bp, Saccharomyces pastorianus
agaaggctccatcacagctcaaggg

SEQ ID NO: 7932 - DNA, 25 bp, Saccharomyces pastorianus
acaaggaccgtggtgcgatgtgcca

SEQ ID NO: 7933 - DNA, 25 bp, Saccharomyces pastorianus
gcgtggcgcactcaaggtattgcaa

SEQ ID NO: 7934 - DNA, 25 bp, Saccharomyces pastorianus
tagattcgacttgatatcctgctcc

SEQ ID NO: 7935 - DNA, 25 bp, Saccharomyces pastorianus
atatcacagtgtgggctctttcgag

SEQ ID NO: 7936 - DNA, 25 bp, Saccharomyces pastorianus
tactattgcctgtaccagttgcaga

SEQ ID NO: 7937 - DNA, 25 bp, Saccharomyces pastorianus
atcgattgggctcatactgctaaac

SEQ ID NO: 7938 - DNA, 25 bp, Saccharomyces pastorianus
gccaccgcatgattgagttcctgaa

SEQ ID NO: 7939 - DNA, 25 bp, Saccharomyces pastorianus
acagaagctcttcgcatcgattggg

SEQ ID NO: 7940 - DNA, 25 bp, Saccharomyces pastorianus
agagcttctgtagcagtgattcgtt

SEQ ID NO: 7941 - DNA, 25 bp, Saccharomyces pastorianus
tgcgaagagcttctgtagcagtgat

SEQ ID NO: 7942 - DNA, 25 bp, Saccharomyces pastorianus
ttctgtagcagtgattcgttgcaat

SEQ ID NO: 7943 - DNA, 25 bp, Saccharomyces pastorianus
gcagtgattcgttgcaataccttga

SEQ ID NO: 7944 - DNA, 25 bp, Saccharomyces pastorianus
ttcgttgcaataccttgagtgcgcc

SEQ ID NO: 7945 - DNA, 25 bp, Saccharomyces pastorianus
gtgattcgttgcaataccttgagtg

SEQ ID NO: 7946 - DNA, 25 bp, Saccharomyces pastorianus
agcccaatcgatgcgaagagcttct

SEQ ID NO: 7947 - DNA, 25 bp, Saccharomyces pastorianus
atgagcccaatcgatgcgaagagct

SEQ ID NO: 7948 - DNA, 25 bp, Saccharomyces pastorianus
gcttctgtagcagtgattcgttgca

SEQ ID NO: 7949 - DNA, 25 bp, Saccharomyces pastorianus
cccaatcgatgcgaagagcttctgt

SEQ ID NO: 7950 - DNA, 25 bp, Saccharomyces pastorianus
atcgatgcgaagagcttctgtagca

SEQ ID NO: 7951 - DNA, 25 bp, Saccharomyces pastorianus
gtgcccttgttaccaatcgaaactg

SEQ ID NO: 7952 - DNA, 25 bp, Saccharomyces pastorianus
aaatctggctgataatctggtcaaa

SEQ ID NO: 7953 - DNA, 25 bp, Saccharomyces pastorianus
cgacatactatcagagcctatacgt

SEQ ID NO: 7954 - DNA, 25 bp, Saccharomyces pastorianus
ttatctggtgaattggctgatcatg

SEQ ID NO: 7955 - DNA, 25 bp, Saccharomyces pastorianus
acaagaatccatgggcccgttaaga

SEQ ID NO: 7956 - DNA, 25 bp, Saccharomyces pastorianus
gaggtcataatactatcattggcta

SEQ ID NO: 7957 - DNA, 25 bp, Saccharomyces pastorianus
gaaagcggccgatgagttaggtatt

SEQ ID NO: 7958 - DNA, 25 bp, Saccharomyces pastorianus
gcagaatactgtgcccttgttacca

SEQ ID NO: 7959 - DNA, 25 bp, Saccharomyces pastorianus
gaaatagcgtcaaactccttgagaa

SEQ ID NO: 7960 - DNA, 25 bp, Saccharomyces pastorianus
actggctgcaaaaaacggcgtttca

SEQ ID NO: 7961 - DNA, 25 bp, Saccharomyces pastorianus
cgggctctgagggtgtttctataat

SEQ ID NO: 7962 - DNA, 25 bp, Saccharomyces pastorianus
aactacaagagcttcggtgccactt

SEQ ID NO: 7963 - DNA, 25 bp, Saccharomyces pastorianus
ggcgtgtaaagttatttccattgta

SEQ ID NO: 7964 - DNA, 25 bp, Saccharomyces pastorianus
gccaatgttaaatacgtccaagaaa

SEQ ID NO: 7965 - DNA, 25 bp, Saccharomyces pastorianus
aaccaagctatcgaactatctgcag

SEQ ID NO: 7966 - DNA, 25 bp, Saccharomyces pastorianus
tgcgcaattcgtgaccgggtttggt

SEQ ID NO: 7967 - DNA, 25 bp, Saccharomyces pastorianus
aactatctgcagaagctttagccaa

SEQ ID NO: 7968 - DNA, 25 bp, Saccharomyces pastorianus
tggtgcaatgctacgttataaggtt

SEQ ID NO: 7969 - DNA, 25 bp, Saccharomyces pastorianus
ggacaagtcgtacgccattgacaaa

SEQ ID NO: 7970 - DNA, 25 bp, Saccharomyces pastorianus
gatgctgtcactgaagaacctttga

SEQ ID NO: 7971 - DNA, 25 bp, Saccharomyces pastorianus
aagtcttctgaaggtgcgcaattcg

SEQ ID NO: 7972 - DNA, 25 bp, Saccharomyces pastorianus
ggttaactttgagcaactacttgat

SEQ ID NO: 7973 - DNA, 25 bp, Saccharomyces pastorianus
actgacggcggttcccatgggatta

SEQ ID NO: 7974 - DNA, 25 bp, Saccharomyces pastorianus
cattgtcggatcttgcgttggtaac

SEQ ID NO: 7975 - DNA, 25 bp, Saccharomyces pastorianus
atgcctattgcaaatctgacgtctt

SEQ ID NO: 7976 - DNA, 25 bp, Saccharomyces pastorianus
aggattaggctctttggccatccaa

SEQ ID NO: 7977 - DNA, 25 bp, Saccharomyces pastorianus
aaggatatcgttggtgccgtcatca

SEQ ID NO: 7978 - DNA, 25 bp, Saccharomyces pastorianus
gttgacctagcggaagttgccccaa

SEQ ID NO: 7979 - DNA, 25 bp, Saccharomyces pastorianus
ttgtcttggttggtatgccggctca

SEQ ID NO: 7980 - DNA, 25 bp, Saccharomyces pastorianus
aagagccaatctaattcccggtcaa

SEQ ID NO: 7981 - DNA, 25 bp, Saccharomyces pastorianus
ttactatttctggtgcttgcggagg

SEQ ID NO: 7982 - DNA, 25 bp, Saccharomyces pastorianus
ttggctagcctatctgatgttccag

SEQ ID NO: 7983 - DNA, 25 bp, Saccharomyces pastorianus
tgccccaattttgtgtgcagggatt

SEQ ID NO: 7984 - DNA, 25 bp, Saccharomyces pastorianus
acaagctacacaatgttgaccctca

SEQ ID NO: 7985 - DNA, 25 bp, Saccharomyces pastorianus
gcaacaacatctggaggcgggccta

SEQ ID NO: 7986 - DNA, 25 bp, Saccharomyces pastorianus
aagctccatcctttcaaatcagatc

SEQ ID NO: 7987 - DNA, 25 bp, Saccharomyces pastorianus
gctttggtcgttttcaatccgttat

SEQ ID NO: 7988 - DNA, 25 bp, Saccharomyces pastorianus
cactccaagtgatcgaatccgtcga

SEQ ID NO: 7989 - DNA, 25 bp, Saccharomyces pastorianus
aaagctggtgttctatcaagggatt

SEQ ID NO: 7990 - DNA, 25 bp, Saccharomyces pastorianus
gcatgccattgctaaagctttggtc

SEQ ID NO: 7991 - DNA, 25 bp, Saccharomyces pastorianus
tacgagattaaagcccacccaatac

SEQ ID NO: 7992 - DNA, 25 bp, Saccharomyces pastorianus
gctctacttctaaagtctatgtcgt

SEQ ID NO: 7993 - DNA, 25 bp, Saccharomyces pastorianus
gttgaccctcaactgactaatgaag

SEQ ID NO: 7994 - DNA, 25 bp, Saccharomyces pastorianus
agcagaatcgatcatgcatgccatt

SEQ ID NO: 7995 - DNA, 25 bp, Saccharomyces pastorianus
gactttacggttttcatccagttct

SEQ ID NO: 7996 - DNA, 25 bp, Saccharomyces pastorianus
aatcaatcatacaactcgctcgagc

SEQ ID NO: 7997 - DNA, 25 bp, Saccharomyces pastorianus
atatcctactgttctgggctgacta

SEQ ID NO: 7998 - DNA, 25 bp, Saccharomyces pastorianus
tcatccagttcttcctttatgcaag

SEQ ID NO: 7999 - DNA, 25 bp, Saccharomyces pastorianus
gatcctgtacatctatctccagcaa

SEQ ID NO: 8000 - DNA, 25 bp, Saccharomyces pastorianus
gagtgcggtactatacttgggctct

SEQ ID NO: 8001 - DNA, 25 bp, Saccharomyces pastorianus
attaatctccctgcacaaattttgg

SEQ ID NO: 8002 - DNA, 25 bp, Saccharomyces pastorianus
aaaatcctgcgacggtgtgtcgttt

SEQ ID NO: 8003 - DNA, 25 bp, Saccharomyces pastorianus
tgggctctagggttcctcaaattat

SEQ ID NO: 8004 - DNA, 25 bp, Saccharomyces pastorianus
tcaggtgtaatatttgccgggtttt

SEQ ID NO: 8005 - DNA, 25 bp, Saccharomyces pastorianus
gagtatgagccacttcttccaagaa

SEQ ID NO: 8006 - DNA, 25 bp, Saccharomyces pastorianus
taacacaatgcactctttcgaagaa

SEQ ID NO: 8007 - DNA, 25 bp, Saccharomyces pastorianus
gttgtagcgcccttaacacaatgca

SEQ ID NO: 8008 - DNA, 25 bp, Saccharomyces pastorianus
tttcgaagaatcctcactgcgtctg

SEQ ID NO: 8009 - DNA, 25 bp, Saccharomyces pastorianus
gagtagaagcctgttgtagcgccct

SEQ ID NO: 8010 - DNA, 25 bp, Saccharomyces pastorianus
gattacaacgacaacatcatcagag

SEQ ID NO: 8011 - DNA, 25 bp, Saccharomyces pastorianus
gattctacgaaagatctgccaactt

SEQ ID NO: 8012 - DNA, 25 bp, Saccharomyces pastorianus
gagtccattgttcacaaacatcaac

SEQ ID NO: 8013 - DNA, 25 bp, Saccharomyces pastorianus
aacgttgaacgtcaatgaaactcga

SEQ ID NO: 8014 - DNA, 25 bp, Saccharomyces pastorianus
tgcgtctgcaagaacatagcttcat

SEQ ID NO: 8015 - DNA, 25 bp, Saccharomyces pastorianus
caagctacaaccaaaccctcaaaat

SEQ ID NO: 8016 - DNA, 25 bp, Saccharomyces pastorianus
aagtctcaacgcaattttacaattt

SEQ ID NO: 8017 - DNA, 25 bp, Saccharomyces pastorianus
aacgatcaccgtattagagccattg

SEQ ID NO: 8018 - DNA, 25 bp, Saccharomyces pastorianus
gctgcgactcttccagaatttactg

SEQ ID NO: 8019 - DNA, 25 bp, Saccharomyces pastorianus
cgatgagccatttgctgcgactctt

SEQ ID NO: 8020 - DNA, 25 bp, Saccharomyces pastorianus
ttggagcgcctcgtcaaggagtgca

SEQ ID NO: 8021 - DNA, 25 bp, Saccharomyces pastorianus
cattaggttccaacggtgcgccaaa

SEQ ID NO: 8022 - DNA, 25 bp, Saccharomyces pastorianus
aagtggaaacgcatcctcatttacc

SEQ ID NO: 8023 - DNA, 25 bp, Saccharomyces pastorianus
aacaatgcatgcttccaatggtgat

SEQ ID NO: 8024 - DNA, 25 bp, Saccharomyces pastorianus
ggtgcgccaaacttgaagattccat

SEQ ID NO: 8025 - DNA, 25 bp, Saccharomyces pastorianus
ttattgacggcatattccccattag

SEQ ID NO: 8026 - DNA, 25 bp, Saccharomyces pastorianus
gaatccagttagaatctcctctagt

SEQ ID NO: 8027 - DNA, 25 bp, Saccharomyces pastorianus
aagaatctaccttgaccctaacgat

SEQ ID NO: 8028 - DNA, 25 bp, Saccharomyces pastorianus
gatgatgtagttcccattttgttga

SEQ ID NO: 8029 - DNA, 25 bp, Saccharomyces pastorianus
gtaacgccagttatggtaccttcca

SEQ ID NO: 8030 - DNA, 25 bp, Saccharomyces pastorianus
aattcagacttcagacctggcggcg

SEQ ID NO: 8031 - DNA, 25 bp, Saccharomyces pastorianus
aggtgtgggattacagccccgtact

SEQ ID NO: 8032 - DNA, 25 bp, Saccharomyces pastorianus
ttatgttctcacactacaagggaca

SEQ ID NO: 8033 - DNA, 25 bp, Saccharomyces pastorianus
gggaacgtgcctttatattcttatg

SEQ ID NO: 8034 - DNA, 25 bp, Saccharomyces pastorianus
ggcggcgtcaagattgcgtttgtta

SEQ ID NO: 8035 - DNA, 25 bp, Saccharomyces pastorianus
ggtaccttccattgtcgaacatctg

SEQ ID NO: 8036 - DNA, 25 bp, Saccharomyces pastorianus
tgaaaaacctactcttccatatccg

SEQ ID NO: 8037 - DNA, 25 bp, Saccharomyces pastorianus
acaatgttcttgttctgccttattt

SEQ ID NO: 8038 - DNA, 25 bp, Saccharomyces pastorianus
gaatccgaacacgttaatctggctg

SEQ ID NO: 8039 - DNA, 25 bp, Saccharomyces pastorianus
gataacgattatgtcgatccagaaa

SEQ ID NO: 8040 - DNA, 25 bp, Saccharomyces pastorianus
gatataattcctttacagagacctt

SEQ ID NO: 8041 - DNA, 25 bp, Saccharomyces pastorianus
gagagactcgcgtggctaaaaagac

SEQ ID NO: 8042 - DNA, 25 bp, Saccharomyces pastorianus
gacaaagctaaccaagcggcacaga

SEQ ID NO: 8043 - DNA, 25 bp, Saccharomyces pastorianus
ataggaatgcccaacttgccaaaca

SEQ ID NO: 8044 - DNA, 25 bp, Saccharomyces pastorianus
atgaggctgcattttgacaccaatt

SEQ ID NO: 8045 - DNA, 25 bp, Saccharomyces pastorianus
aacaacgagctcctacaatcgataa

SEQ ID NO: 8046 - DNA, 25 bp, Saccharomyces pastorianus
acattccaggtttgaggtcgccaca

SEQ ID NO: 8047 - DNA, 25 bp, Saccharomyces pastorianus
acaggcaaagagcaggtgactacta

SEQ ID NO: 8048 - DNA, 25 bp, Saccharomyces pastorianus
aacgaaagtgatacgcatgctgagc

SEQ ID NO: 8049 - DNA, 25 bp, Saccharomyces pastorianus
aacaaattcgcctcaatgcaaaaag

SEQ ID NO: 8050 - DNA, 25 bp, Saccharomyces pastorianus
gaagtgagtccgctacaatcagtta

SEQ ID NO: 8051 - DNA, 25 bp, Saccharomyces pastorianus
ttgggtcaacatttttgggcagatc

SEQ ID NO: 8052 - DNA, 25 bp, Saccharomyces pastorianus
gttgtcgcaaatgatccagcaataa

SEQ ID NO: 8053 - DNA, 25 bp, Saccharomyces pastorianus
aaaccaccgattgttgttgtcgcaa

SEQ ID NO: 8054 - DNA, 25 bp, Saccharomyces pastorianus
ggtcgagattcgcttgcaaattcac

SEQ ID NO: 8055 - DNA, 25 bp, Saccharomyces pastorianus
gcgagaatatctaagggtcctggaa

SEQ ID NO: 8056 - DNA, 25 bp, Saccharomyces pastorianus
gacagcactaattgatgatcctgga

SEQ ID NO: 8057 - DNA, 25 bp, Saccharomyces pastorianus
gagattcggcggttcaaaaatgcaa

SEQ ID NO: 8058 - DNA, 25 bp, Saccharomyces pastorianus
gagcaccatgttgagtatgcaatat

SEQ ID NO: 8059 - DNA, 25 bp, Saccharomyces pastorianus
agaaccactatttcgcatcctgaga

SEQ ID NO: 8060 - DNA, 25 bp, Saccharomyces pastorianus
acgtatgcgcaatcgctggacgcga

SEQ ID NO: 8061 - DNA, 25 bp, Saccharomyces pastorianus
gtgacgaaccttctgttggtgtaaa

SEQ ID NO: 8062 - DNA, 25 bp, Saccharomyces pastorianus
agaggctacttcatcacccaagagg

SEQ ID NO: 8063 - DNA, 25 bp, Saccharomyces pastorianus
tggttccacaacatatcagattaag

SEQ ID NO: 8064 - DNA, 25 bp, Saccharomyces pastorianus
ataccacctgccactatagaaacat

SEQ ID NO: 8065 - DNA, 25 bp, Saccharomyces pastorianus
gaagccgccttagtggtcaatataa

SEQ ID NO: 8066 - DNA, 25 bp, Saccharomyces pastorianus
gaatctgttgcaaagttcccagaaa

SEQ ID NO: 8067 - DNA, 25 bp, Saccharomyces pastorianus
gatgtcattccaagcgaatccaact

SEQ ID NO: 8068 - DNA, 25 bp, Saccharomyces pastorianus
aactcaccacgagttggttccacaa

SEQ ID NO: 8069 - DNA, 25 bp, Saccharomyces pastorianus
ggaagttgaactgccattagatgat

SEQ ID NO: 8070 - DNA, 25 bp, Saccharomyces pastorianus
gattccatgggtaggccacagcgta

SEQ ID NO: 8071 - DNA, 25 bp, Saccharomyces pastorianus
aattagtaccttctataccacctgc

SEQ ID NO: 8072 - DNA, 25 bp, Saccharomyces pastorianus
gtacaggcgttgacacatggtccat

SEQ ID NO: 8073 - DNA, 25 bp, Saccharomyces pastorianus
acatcgtatcctacatcgtgatctg

SEQ ID NO: 8074 - DNA, 25 bp, Saccharomyces pastorianus
cacgtgcgtttggtgttccattaag

SEQ ID NO: 8075 - DNA, 25 bp, Saccharomyces pastorianus
ggtacagagcgccagaggtcttact

SEQ ID NO: 8076 - DNA, 25 bp, Saccharomyces pastorianus
aggtgatttcggtctagcacgtgcg

SEQ ID NO: 8077 - DNA, 25 bp, Saccharomyces pastorianus
tggtgccaagcctagatccacaagg

SEQ ID NO: 8078 - DNA, 25 bp, Saccharomyces pastorianus
actagcatacgaccctattaaccgg

SEQ ID NO: 8079 - DNA, 25 bp, Saccharomyces pastorianus
agagcctacacccatgaaatcgtta

SEQ ID NO: 8080 - DNA, 25 bp, Saccharomyces pastorianus
aaggtattgcgtactgtcactcaca

SEQ ID NO: 8081 - DNA, 25 bp, Saccharomyces pastorianus
aaggacctgtcgcaagtggtgccaa

SEQ ID NO: 8082 - DNA, 25 bp, Saccharomyces pastorianus
ggcatatggccggacattgtctact

SEQ ID NO: 8083 - DNA, 25 bp, Saccharomyces pastorianus
aattgatctcccatattcacgacgg

SEQ ID NO: 8084 - DNA, 25 bp, Saccharomyces pastorianus
aaagctgctgtcattttcaactcaa

SEQ ID NO: 8085 - DNA, 25 bp, Saccharomyces pastorianus
tgttttcgaattttccatgccaagt

SEQ ID NO: 8086 - DNA, 25 bp, Saccharomyces pastorianus
gacggtggtactcaagactatttca

SEQ ID NO: 8087 - DNA, 25 bp, Saccharomyces pastorianus
ggatctcttcgaaatcttaaccgct

SEQ ID NO: 8088 - DNA, 25 bp, Saccharomyces pastorianus
gtggctctgcttacaaccaagacat

SEQ ID NO: 8089 - DNA, 25 bp, Saccharomyces pastorianus
aagtgacactagtggctctgcttac

SEQ ID NO: 8090 - DNA, 25 bp, Saccharomyces pastorianus
agctatctggctgctgaacgccaaa

SEQ ID NO: 8091 - DNA, 25 bp, Saccharomyces pastorianus
gcccttggtgatgttaccttggcat

SEQ ID NO: 8092 - DNA, 25 bp, Saccharomyces pastorianus
atctcctttgctgcttctgacggta

SEQ ID NO: 8093 - DNA, 25 bp, Saccharomyces pastorianus
gaaggtatcccagcttaccgtgggt

SEQ ID NO: 8094 - DNA, 25 bp, Saccharomyces pastorianus
atccttattttcctcctggtgggtg

SEQ ID NO: 8095 - DNA, 25 bp, Saccharomyces pastorianus
gctcctttgatatccaagacctggt

SEQ ID NO: 8096 - DNA, 25 bp, Saccharomyces pastorianus
tgggcatccttattttcctcctggt

SEQ ID NO: 8097 - DNA, 25 bp, Saccharomyces pastorianus
agaaggctgctcctttgatatccaa

SEQ ID NO: 8098 - DNA, 25 bp, Saccharomyces pastorianus
ccgacaagaaggctgctcctttgat

SEQ ID NO: 8099 - DNA, 25 bp, Saccharomyces pastorianus
aagaaggtagacaaggccgacaaga

SEQ ID NO: 8100 - DNA, 25 bp, Saccharomyces pastorianus
aggctgctcctttgatatccaagac

SEQ ID NO: 8101 - DNA, 25 bp, Saccharomyces pastorianus
aaggccgacaagaaggctgctcctt

SEQ ID NO: 8102 - DNA, 25 bp, Saccharomyces pastorianus
tggttgggcatccttattttcctcc

SEQ ID NO: 8103 - DNA, 25 bp, Saccharomyces pastorianus
caagacctggttgggcatccttatt

SEQ ID NO: 8104 - DNA, 25 bp, Saccharomyces pastorianus
tatccaagacctggttgggcatcct

SEQ ID NO: 8105 - DNA, 25 bp, Saccharomyces pastorianus
gaattacaagatgctgcgctgttag

SEQ ID NO: 8106 - DNA, 25 bp, Saccharomyces pastorianus
gcgctgttagtcttcgccaataaac

SEQ ID NO: 8107 - DNA, 25 bp, Saccharomyces pastorianus
tattcggccctattggaggtgctac

SEQ ID NO: 8108 - DNA, 25 bp, Saccharomyces pastorianus
ataaacaagatcaacctggcgcatt

SEQ ID NO: 8109 - DNA, 25 bp, Saccharomyces pastorianus
tggtcaccacgaaaccaaccattgg

SEQ ID NO: 8110 - DNA, 25 bp, Saccharomyces pastorianus
attttcagctcaatgttcgacaagc

SEQ ID NO: 8111 - DNA, 25 bp, Saccharomyces pastorianus
tgagcgcaagcgaagtgtctaaaga

SEQ ID NO: 8112 - DNA, 25 bp, Saccharomyces pastorianus
ttgggatcttggtggccaaaccagt

SEQ ID NO: 8113 - DNA, 25 bp, Saccharomyces pastorianus
aggtgctactatgcagatactgccg

SEQ ID NO: 8114 - DNA, 25 bp, Saccharomyces pastorianus
atactgccgcagtcatatttgtggt

SEQ ID NO: 8115 - DNA, 25 bp, Saccharomyces pastorianus
ggtctattgtagcttcaagtgccat

SEQ ID NO: 8116 - DNA, 25 bp, Saccharomyces pastorianus
atggcaacccttttttcacattcaa

SEQ ID NO: 8117 - DNA, 25 bp, Saccharomyces pastorianus
gcggcatatcatctactttcaacaa

SEQ ID NO: 8118 - DNA, 25 bp, Saccharomyces pastorianus
tgtttgtctccaaattctcgtttcc

SEQ ID NO: 8119 - DNA, 25 bp, Saccharomyces pastorianus
aaagcgatcgatttcatgggcagga

SEQ ID NO: 8120 - DNA, 25 bp, Saccharomyces pastorianus
ggtttcaagatttactttcccatat

SEQ ID NO: 8121 - DNA, 25 bp, Saccharomyces pastorianus
gatgacgacagtatacacgcagtaa

SEQ ID NO: 8122 - DNA, 25 bp, Saccharomyces pastorianus
caaaatcacaattcccactgtcagg

SEQ ID NO: 8123 - DNA, 25 bp, Saccharomyces pastorianus
caggaccgtttcgatgacacatttg

SEQ ID NO: 8124 - DNA, 25 bp, Saccharomyces pastorianus
aagatcgtcgttatcctcggatgga

SEQ ID NO: 8125 - DNA, 25 bp, Saccharomyces pastorianus
atttcccagagctaataggcacctt

SEQ ID NO: 8126 - DNA, 25 bp, Saccharomyces pastorianus
agacttcaagtcttatttcccagag

SEQ ID NO: 8127 - DNA, 25 bp, Saccharomyces pastorianus
acaagtttctagatagtgcccataa

SEQ ID NO: 8128 - DNA, 25 bp, Saccharomyces pastorianus
cttcgttaagtcgacaacaccatat

SEQ ID NO: 8129 - DNA, 25 bp, Saccharomyces pastorianus
caaaagcatagaagtcctggacgaa

SEQ ID NO: 8130 - DNA, 25 bp, Saccharomyces pastorianus
tgggctgccacttccaagatcagaa

SEQ ID NO: 8131 - DNA, 25 bp, Saccharomyces pastorianus
gcacccatcgttgaagactttaaca

SEQ ID NO: 8132 - DNA, 25 bp, Saccharomyces pastorianus
tgcccataaacatggatcatcttat

SEQ ID NO: 8133 - DNA, 25 bp, Saccharomyces pastorianus
caacggtcgtacgtctaagcgagta

SEQ ID NO: 8134 - DNA, 25 bp, Saccharomyces pastorianus
tcatcttatgtggtagttttgggca

SEQ ID NO: 8135 - DNA, 25 bp, Saccharomyces pastorianus
gagtaagaaagcacccatcgttgaa

SEQ ID NO: 8136 - DNA, 25 bp, Saccharomyces pastorianus
aactaaagagagcaccaacggtcgt

SEQ ID NO: 8137 - DNA, 25 bp, Saccharomyces pastorianus
aaagacgctggcattgggctgccac

SEQ ID NO: 8138 - DNA, 25 bp, Saccharomyces pastorianus
gctgtctatcaacgcatgaccttga

SEQ ID NO: 8139 - DNA, 25 bp, Saccharomyces pastorianus
ggaactttgaagaccgtgggctcaa

SEQ ID NO: 8140 - DNA, 25 bp, Saccharomyces pastorianus
gaggaactgcccaatgattggcatt

SEQ ID NO: 8141 - DNA, 25 bp, Saccharomyces pastorianus
ggtcatcaactatgagaagctgtct

SEQ ID NO: 8142 - DNA, 25 bp, Saccharomyces pastorianus
tggagtacattattactgccctatg

SEQ ID NO: 8143 - DNA, 25 bp, Saccharomyces pastorianus
gggtatactcggattcatcttggaa

SEQ ID NO: 8144 - DNA, 25 bp, Saccharomyces pastorianus
tctggagatttaccctagttcgaaa

SEQ ID NO: 8145 - DNA, 25 bp, Saccharomyces pastorianus
ttatcagtgctctggtataccattc

SEQ ID NO: 8146 - DNA, 25 bp, Saccharomyces pastorianus
gaaagaatttttgccgatactacta

SEQ ID NO: 8147 - DNA, 25 bp, Saccharomyces pastorianus
gctactttaaggctattctggagat

SEQ ID NO: 8148 - DNA, 25 bp, Saccharomyces pastorianus
gtataccattccactagctttcaag

SEQ ID NO: 8149 - DNA, 25 bp, Saccharomyces pastorianus
tggagttttcaatctcttacacgag

SEQ ID NO: 8150 - DNA, 25 bp, Saccharomyces pastorianus
gcattccctgtggactatcttttag

SEQ ID NO: 8151 - DNA, 25 bp, Saccharomyces pastorianus
gttaccaagtatccactgatgctga

SEQ ID NO: 8152 - DNA, 25 bp, Saccharomyces pastorianus
tgtctcctcagctggttggcaaaca

SEQ ID NO: 8153 - DNA, 25 bp, Saccharomyces pastorianus
gatgctgaagcattagtcacggcag

SEQ ID NO: 8154 - DNA, 25 bp, Saccharomyces pastorianus
taagtggatccacgtacccttcaat

SEQ ID NO: 8155 - DNA, 25 bp, Saccharomyces pastorianus
agagcccctattgaaacttgtctcc

SEQ ID NO: 8156 - DNA, 25 bp, Saccharomyces pastorianus
gactgagtttccgtgggccaacaga

SEQ ID NO: 8157 - DNA, 25 bp, Saccharomyces pastorianus
ttgcaggtactttcacccgaggaat

SEQ ID NO: 8158 - DNA, 25 bp, Saccharomyces pastorianus
cttctaaatttgtcacctgtgtcat

SEQ ID NO: 8159 - DNA, 25 bp, Saccharomyces pastorianus
gtaacgttgactcatgggtttccta

SEQ ID NO: 8160 - DNA, 25 bp, Saccharomyces pastorianus
aatccggctctatggttggcgacga

SEQ ID NO: 8161 - DNA, 25 bp, Saccharomyces pastorianus
acagcagcatgcaccgcgatatatt

SEQ ID NO: 8162 - DNA, 25 bp, Saccharomyces pastorianus
acatcgtcccacaaggtaacttcaa

SEQ ID NO: 8163 - DNA, 25 bp, Saccharomyces pastorianus
tcccaggtctccacggatcaagata

SEQ ID NO: 8164 - DNA, 25 bp, Saccharomyces pastorianus
atcgtcaatcgcactgatttcagtc

SEQ ID NO: 8165 - DNA, 25 bp, Saccharomyces pastorianus
gcaagaaggtggtgcggtacccctt

SEQ ID NO: 8166 - DNA, 25 bp, Saccharomyces pastorianus
tcggcatagccgagcccatgaagag

SEQ ID NO: 8167 - DNA, 25 bp, Saccharomyces pastorianus
gatggagcagtaccgacagatattc

SEQ ID NO: 8168 - DNA, 25 bp, Saccharomyces pastorianus
gatgaacgacagacacccattggaa

SEQ ID NO: 8169 - DNA, 25 bp, Saccharomyces pastorianus
aagcattgggagaccacacagcgcc

SEQ ID NO: 8170 - DNA, 25 bp, Saccharomyces pastorianus
ttgggaggacgtctatcctggcacc

SEQ ID NO: 8171 - DNA, 25 bp, Saccharomyces pastorianus
aaatggctcaattcataacgtctaa

SEQ ID NO: 8172 - DNA, 25 bp, Saccharomyces pastorianus
tgtgctcaagaggtatccccgttat

SEQ ID NO: 8173 - DNA, 25 bp, Saccharomyces pastorianus
ggcatgcaaggtgaatccgttccaa

SEQ ID NO: 8174 - DNA, 25 bp, Saccharomyces pastorianus
gatatcggatcttttgggcatgcaa

SEQ ID NO: 8175 - DNA, 25 bp, Saccharomyces pastorianus
tatggcccatataggattaacaccg

SEQ ID NO: 8176 - DNA, 25 bp, Saccharomyces pastorianus
aattggttgctggtccattgttatt

SEQ ID NO: 8177 - DNA, 25 bp, Saccharomyces pastorianus
atggcaccagcggtcaggttttagt

SEQ ID NO: 8178 - DNA, 25 bp, Saccharomyces pastorianus
gttgttcgaaacagccaagcagttg

SEQ ID NO: 8179 - DNA, 25 bp, Saccharomyces pastorianus
tagtcgcagatatgccatttggtac

SEQ ID NO: 8180 - DNA, 25 bp, Saccharomyces pastorianus
cgtctaaactttccattccaacaat

SEQ ID NO: 8181 - DNA, 25 bp, Saccharomyces pastorianus
ggtttatccaagaactgtgctcaag

SEQ ID NO: 8182 - DNA, 25 bp, Saccharomyces pastorianus
gaaatttcctgcagagttccgttta

SEQ ID NO: 8183 - DNA, 25 bp, Saccharomyces pastorianus
tgtcgcggtgagcagtttctttcga

SEQ ID NO: 8184 - DNA, 25 bp, Saccharomyces pastorianus
tctttcgaaacattggtgcggctat

SEQ ID NO: 8185 - DNA, 25 bp, Saccharomyces pastorianus
attgatggccttcggtatgacctgg

SEQ ID NO: 8186 - DNA, 25 bp, Saccharomyces pastorianus
tgttacgttttcttactacctcgag

SEQ ID NO: 8187 - DNA, 25 bp, Saccharomyces pastorianus
tttgttgtgctcttggttttttcct

SEQ ID NO: 8188 - DNA, 25 bp, Saccharomyces pastorianus
ggtgcagcaatacttccatgacata

SEQ ID NO: 8189 - DNA, 25 bp, Saccharomyces pastorianus
agcactgctctcttattttctagtt

SEQ ID NO: 8190 - DNA, 25 bp, Saccharomyces pastorianus
gttattatgccttcagtgttacgtt

SEQ ID NO: 8191 - DNA, 25 bp, Saccharomyces pastorianus
agtagccatgctgttaggatctcaa

SEQ ID NO: 8192 - DNA, 25 bp, Saccharomyces pastorianus
ctagaaatcggtgctgcttacgtct

SEQ ID NO: 8193 - DNA, 25 bp, Saccharomyces pastorianus
tattgccatggctactgacagtgac

SEQ ID NO: 8194 - DNA, 25 bp, Saccharomyces pastorianus
tttggtgttttcagcagcagccaca

SEQ ID NO: 8195 - DNA, 25 bp, Saccharomyces pastorianus
tttgtctggtgtagtgggccattcc

SEQ ID NO: 8196 - DNA, 25 bp, Saccharomyces pastorianus
cattcttggctggtatgctgtttct

SEQ ID NO: 8197 - DNA, 25 bp, Saccharomyces pastorianus
gttcttcatttttgctcttctttat

SEQ ID NO: 8198 - DNA, 25 bp, Saccharomyces pastorianus
taggcgaccgttcacaaatcagtat

SEQ ID NO: 8199 - DNA, 25 bp, Saccharomyces pastorianus
gcatcgtttatgttttcaccagttt

SEQ ID NO: 8200 - DNA, 25 bp, Saccharomyces pastorianus
gcagccacatctcttgcgataatga

SEQ ID NO: 8201 - DNA, 25 bp, Saccharomyces pastorianus
tgctgtttctggtgttcggttataa

SEQ ID NO: 8202 - DNA, 25 bp, Saccharomyces pastorianus
aaattccgtgagctagcatcgttta

SEQ ID NO: 8203 - DNA, 25 bp, Saccharomyces pastorianus
tatttgcagtggtctagccgtggta

SEQ ID NO: 8204 - DNA, 25 bp, Saccharomyces pastorianus
gtcaagagactcctatggttcatct

SEQ ID NO: 8205 - DNA, 25 bp, Saccharomyces pastorianus
agacattacaaaaactcctgggatt

SEQ ID NO: 8206 - DNA, 25 bp, Saccharomyces pastorianus
atcctccaatggctgttatatgaac

SEQ ID NO: 8207 - DNA, 25 bp, Saccharomyces pastorianus
gtatagctacgtacccacatgaagt

SEQ ID NO: 8208 - DNA, 25 bp, Saccharomyces pastorianus
aagtgctggtcttgcaaagtttgta

SEQ ID NO: 8209 - DNA, 25 bp, Saccharomyces pastorianus
gtacagtgggttgaccccacattta

SEQ ID NO: 8210 - DNA, 25 bp, Saccharomyces pastorianus
gaggagggcctattttcaatgtaca

SEQ ID NO: 8211 - DNA, 25 bp, Saccharomyces pastorianus
atggtgccaaagatcaggaagtgct

SEQ ID NO: 8212 - DNA, 25 bp, Saccharomyces pastorianus
agtgcttcgtatttgggatctgttg

SEQ ID NO: 8213 - DNA, 25 bp, Saccharomyces pastorianus
ggttcatctcatggctgctgcaaca

SEQ ID NO: 8214 - DNA, 25 bp, Saccharomyces pastorianus
ggatctgttgaaggtatcctccaat

SEQ ID NO: 8215 - DNA, 25 bp, Saccharomyces pastorianus
ggtgctatctggaacatcaactctt

SEQ ID NO: 8216 - DNA, 25 bp, Saccharomyces pastorianus
gttttctctggtaacagaccaacca

SEQ ID NO: 8217 - DNA, 25 bp, Saccharomyces pastorianus
atccgatttccttttggccgctcaa

SEQ ID NO: 8218 - DNA, 25 bp, Saccharomyces pastorianus
attttgttcggtgaaccagctacta

SEQ ID NO: 8219 - DNA, 25 bp, Saccharomyces pastorianus
ggtatctctacccacgatgcttcta

SEQ ID NO: 8220 - DNA, 25 bp, Saccharomyces pastorianus
gaagtcaagtccgaaggtgccaccg

SEQ ID NO: 8221 - DNA, 25 bp, Saccharomyces pastorianus
gaattagacaactcctccggtatct

SEQ ID NO: 8222 - DNA, 25 bp, Saccharomyces pastorianus
aagctgaagctttgatggttggtaa

SEQ ID NO: 8223 - DNA, 25 bp, Saccharomyces pastorianus
aagttgattccatccgatttccttt

SEQ ID NO: 8224 - DNA, 25 bp, Saccharomyces pastorianus
ttccaacttcttcgctcaagctgaa

SEQ ID NO: 8225 - DNA, 25 bp, Saccharomyces pastorianus
tactccaccggttccattttgttcg

SEQ ID NO: 8226 - DNA, 25 bp, Saccharomyces pastorianus
aagcgccgagccagatgagccattc

SEQ ID NO: 8227 - DNA, 25 bp, Saccharomyces pastorianus
ggtgccgatcattcggtccgtgtat

SEQ ID NO: 8228 - DNA, 25 bp, Saccharomyces pastorianus
tccacgggtgactcggtcagattat

SEQ ID NO: 8229 - DNA, 25 bp, Saccharomyces pastorianus
atgagccattcatcgggtacttagg

SEQ ID NO: 8230 - DNA, 25 bp, Saccharomyces pastorianus
tacttaggcgacgttaccgcgtcaa

SEQ ID NO: 8231 - DNA, 25 bp, Saccharomyces pastorianus
gaacgccatatattctctgtcttat

SEQ ID NO: 8232 - DNA, 25 bp, Saccharomyces pastorianus
tagtggcatcgttctacaccaagaa

SEQ ID NO: 8233 - DNA, 25 bp, Saccharomyces pastorianus
accgcacggctatggtcatgtgatc

SEQ ID NO: 8234 - DNA, 25 bp, Saccharomyces pastorianus
ttatttttgggccatactgcacctg

SEQ ID NO: 8235 - DNA, 25 bp, Saccharomyces pastorianus
gttgttatgtatttaccgggtccag

SEQ ID NO: 8236 - DNA, 25 bp, Saccharomyces pastorianus
gtttctccggatggcaggtggttat

SEQ ID NO: 8237 - DNA, 25 bp, Saccharomyces pastorianus
taggttactaccacattccttacac

SEQ ID NO: 8238 - DNA, 25 bp, Saccharomyces pastorianus
tatcaaaacgctatggacctctact

SEQ ID NO: 8239 - DNA, 25 bp, Saccharomyces pastorianus
ggacaagtcgcgcattcattggttt

SEQ ID NO: 8240 - DNA, 25 bp, Saccharomyces pastorianus
tggcacttgccttgtttgcggacaa

SEQ ID NO: 8241 - DNA, 25 bp, Saccharomyces pastorianus
aagggtactctacttgccatttctg

SEQ ID NO: 8242 - DNA, 25 bp, Saccharomyces pastorianus
ggagtactttaaacgaccagaattg

SEQ ID NO: 8243 - DNA, 25 bp, Saccharomyces pastorianus
acgatgttttccaattcatgagcat

SEQ ID NO: 8244 - DNA, 25 bp, Saccharomyces pastorianus
ggacctctactatggattttgtcaa

SEQ ID NO: 8245 - DNA, 25 bp, Saccharomyces pastorianus
aaaggacaactctcaaaacccgcag

SEQ ID NO: 8246 - DNA, 25 bp, Saccharomyces pastorianus
aaactgtccaacctgtccaaaagat

SEQ ID NO: 8247 - DNA, 25 bp, Saccharomyces pastorianus
ttacgggtacgtcttgaatgtttat

SEQ ID NO: 8248 - DNA, 25 bp, Saccharomyces pastorianus
gtcaaactctcagaattgtctcttt

SEQ ID NO: 8249 - DNA, 25 bp, Saccharomyces pastorianus
aaaatcgctccaagaatcgacgcag

SEQ ID NO: 8250 - DNA, 25 bp, Saccharomyces pastorianus
caactgcatcgcaagcttctatgtt

SEQ ID NO: 8251 - DNA, 25 bp, Saccharomyces pastorianus
gcagacctggttaaccttccagatt

SEQ ID NO: 8252 - DNA, 25 bp, Saccharomyces pastorianus
gatattttcgcgttgatgctgaaga

SEQ ID NO: 8253 - DNA, 25 bp, Saccharomyces pastorianus
ccggacctgtaccatatgttaccaa

SEQ ID NO: 8254 - DNA, 25 bp, Saccharomyces pastorianus
ggttcattccttatttgttgttctg

SEQ ID NO: 8255 - DNA, 25 bp, Saccharomyces pastorianus
gatacagccacgtttgcaactgcat

SEQ ID NO: 8256 - DNA, 25 bp, Saccharomyces pastorianus
agccatccgtagcacaggtttcaga

SEQ ID NO: 8257 - DNA, 25 bp, Saccharomyces pastorianus
aaacatctatgttgcagacctggtt

SEQ ID NO: 8258 - DNA, 25 bp, Saccharomyces pastorianus
atcgacgcagatgactttaagctac

SEQ ID NO: 8259 - DNA, 25 bp, Saccharomyces pastorianus
atatatcgccttccatatttcccat

SEQ ID NO: 8260 - DNA, 25 bp, Saccharomyces pastorianus
ataggctgtctagtactgtccggtc

SEQ ID NO: 8261 - DNA, 25 bp, Saccharomyces pastorianus
ttgttagcgccaatcacttgtcgat

SEQ ID NO: 8262 - DNA, 25 bp, Saccharomyces pastorianus
gatcataaacccaacaagcgtgctg

SEQ ID NO: 8263 - DNA, 25 bp, Saccharomyces pastorianus
gtacggctctttggtggtatcgata

SEQ ID NO: 8264 - DNA, 25 bp, Saccharomyces pastorianus
tgcccggccatttcatttactacat

SEQ ID NO: 8265 - DNA, 25 bp, Saccharomyces pastorianus
tcgcgatgaattttatgcccggcca

SEQ ID NO: 8266 - DNA, 25 bp, Saccharomyces pastorianus
gggatatccctgtggtgacgagatt

SEQ ID NO: 8267 - DNA, 25 bp, Saccharomyces pastorianus
gtcttacaggtctccggatcataaa

SEQ ID NO: 8268 - DNA, 25 bp, Saccharomyces pastorianus
cttttactcttggtgatgctggtca

SEQ ID NO: 8269 - DNA, 25 bp, Saccharomyces pastorianus
gagcattaaacagccagtcgcgtcg

SEQ ID NO: 8270 - DNA, 25 bp, Saccharomyces pastorianus
gagacccgtgatgagccaaagtgta

SEQ ID NO: 8271 - DNA, 25 bp, Saccharomyces pastorianus
gtacctaaacgtttggcatttgatc

SEQ ID NO: 8272 - DNA, 25 bp, Saccharomyces pastorianus
gagactggctgacatcgtagacata

SEQ ID NO: 8273 - DNA, 25 bp, Saccharomyces pastorianus
atggtaccatggacactgatcaggg

SEQ ID NO: 8274 - DNA, 25 bp, Saccharomyces pastorianus
ggagattcagatatgggcacgccaa

SEQ ID NO: 8275 - DNA, 25 bp, Saccharomyces pastorianus
aagaggattcaccatgttgcaattg

SEQ ID NO: 8276 - DNA, 25 bp, Saccharomyces pastorianus
tatgccaggaccaagagacccgtga

SEQ ID NO: 8277 - DNA, 25 bp, Saccharomyces pastorianus
gagagaatacatcgcctatgccagg

SEQ ID NO: 8278 - DNA, 25 bp, Saccharomyces pastorianus
ggactctaagttctcattcggccaa

SEQ ID NO: 8279 - DNA, 25 bp, Saccharomyces pastorianus
attagactatctcaagctctggcca

SEQ ID NO: 8280 - DNA, 25 bp, Saccharomyces pastorianus
aacgattacgtggtgcaggcataca

SEQ ID NO: 8281 - DNA, 25 bp, Saccharomyces pastorianus
aaacattcagccagcatttgcatta

SEQ ID NO: 8282 - DNA, 25 bp, Saccharomyces pastorianus
gcatgaatttgttgccttgatgatt

SEQ ID NO: 8283 - DNA, 25 bp, Saccharomyces pastorianus
aaagattactgctctcgtgatcctg

SEQ ID NO: 8284 - DNA, 25 bp, Saccharomyces pastorianus
gaatctttgcaatttaggctgaccg

SEQ ID NO: 8285 - DNA, 25 bp, Saccharomyces pastorianus
aggctgaccgtattaaaatctggga

SEQ ID NO: 8286 - DNA, 25 bp, Saccharomyces pastorianus
gatcagaatctgatgcaccctcaga

SEQ ID NO: 8287 - DNA, 25 bp, Saccharomyces pastorianus
acatcacatgttcagtttccgggac

SEQ ID NO: 8288 - DNA, 25 bp, Saccharomyces pastorianus
tatggatcatctctccaagctggac

SEQ ID NO: 8289 - DNA, 25 bp, Saccharomyces pastorianus
agaattatgtttcgctggttgttaa

SEQ ID NO: 8290 - DNA, 25 bp, Saccharomyces pastorianus
cttttcctgggcttgtgatgctaaa

SEQ ID NO: 8291 - DNA, 25 bp, Saccharomyces pastorianus
gttgacgacaaccttgatatggaca

SEQ ID NO: 8292 - DNA, 25 bp, Saccharomyces pastorianus
cgctgcctctttgtttttagacaaa

SEQ ID NO: 8293 - DNA, 25 bp, Saccharomyces pastorianus
taccctagctacttctgcactagaa

SEQ ID NO: 8294 - DNA, 25 bp, Saccharomyces pastorianus
gcaaagacgttacctggtaccctag

SEQ ID NO: 8295 - DNA, 25 bp, Saccharomyces pastorianus
tgtcttgtcccgtcgaacaggatat

SEQ ID NO: 8296 - DNA, 25 bp, Saccharomyces pastorianus
tggagacacccattgctagatgatt

SEQ ID NO: 8297 - DNA, 25 bp, Saccharomyces pastorianus
caagtgtacttgtgaaccaggcaaa

SEQ ID NO: 8298 - DNA, 25 bp, Saccharomyces pastorianus
gacttcttcagatcggatgcgtaca

SEQ ID NO: 8299 - DNA, 25 bp, Saccharomyces pastorianus
ggacgagtcaggaggattcttctac

SEQ ID NO: 8300 - DNA, 25 bp, Saccharomyces pastorianus
ggagagtagacaccgatatcacatt

SEQ ID NO: 8301 - DNA, 25 bp, Saccharomyces pastorianus
atatgggttcattctttccgtaagc

SEQ ID NO: 8302 - DNA, 25 bp, Saccharomyces pastorianus
caccatccagatttcatgtcttgtc

SEQ ID NO: 8303 - DNA, 25 bp, Saccharomyces pastorianus
taacgtcaatccctctatccatgtt

SEQ ID NO: 8304 - DNA, 25 bp, Saccharomyces pastorianus
agtgctaccgttggctctgtaatca

SEQ ID NO: 8305 - DNA, 25 bp, Saccharomyces pastorianus
aagatatgtctggttgtcgccacat

SEQ ID NO: 8306 - DNA, 25 bp, Saccharomyces pastorianus
aaatacggctacattccttacattc

SEQ ID NO: 8307 - DNA, 25 bp, Saccharomyces pastorianus
ccttacattcctgtcaactggcaaa

SEQ ID NO: 8308 - DNA, 25 bp, Saccharomyces pastorianus
ggatgattttcaccgctatttttgg

SEQ ID NO: 8309 - DNA, 25 bp, Saccharomyces pastorianus
atagcaaaggcctcgctagctttaa

SEQ ID NO: 8310 - DNA, 25 bp, Saccharomyces pastorianus
atgttgctcgccacagctatcagta

SEQ ID NO: 8311 - DNA, 25 bp, Saccharomyces pastorianus
tatcccgttccgtttggcatgtcaa

SEQ ID NO: 8312 - DNA, 25 bp, Saccharomyces pastorianus
tactcgagctctctttcactaaaga

SEQ ID NO: 8313 - DNA, 25 bp, Saccharomyces pastorianus
ataggcgccttgaagctgctaatga

SEQ ID NO: 8314 - DNA, 25 bp, Saccharomyces pastorianus
ctagcgctagaagatgccgtggtaa

SEQ ID NO: 8315 - DNA, 25 bp, Saccharomyces pastorianus
aaacgcatcgtcaattccaactggg

SEQ ID NO: 8316 - DNA, 25 bp, Saccharomyces pastorianus
gaaatcgacgtccagcgcttgctag

SEQ ID NO: 8317 - DNA, 25 bp, Saccharomyces pastorianus
aattatgacctgcataccggaccac

SEQ ID NO: 8318 - DNA, 25 bp, Saccharomyces pastorianus
gatcagcaacttgttctcacagatg

SEQ ID NO: 8319 - DNA, 25 bp, Saccharomyces pastorianus
aggttcggcaaccagcagctagtaa

SEQ ID NO: 8320 - DNA, 25 bp, Saccharomyces pastorianus
taggcgaccgtctgcagattcttat

SEQ ID NO: 8321 - DNA, 25 bp, Saccharomyces pastorianus
tggactgggctaaacgctgcacgga

SEQ ID NO: 8322 - DNA, 25 bp, Saccharomyces pastorianus
agaagaggcatcaggctcctagcgc

SEQ ID NO: 8323 - DNA, 25 bp, Saccharomyces pastorianus
gattcttatctcgaccaacggactt

SEQ ID NO: 8324 - DNA, 25 bp, Saccharomyces pastorianus
gagctatgtgacttctacttcggcg

SEQ ID NO: 8325 - DNA, 25 bp, Saccharomyces pastorianus
acactagcaaaactggtcgccacaa

SEQ ID NO: 8326 - DNA, 25 bp, Saccharomyces pastorianus
gaaatcatcttcttcggcatccatc

SEQ ID NO: 8327 - DNA, 25 bp, Saccharomyces pastorianus
agctaatgcagctaccggtaccgct

SEQ ID NO: 8328 - DNA, 25 bp, Saccharomyces pastorianus
gtaccgctcagtcgtcaactaatgg

SEQ ID NO: 8329 - DNA, 25 bp, Saccharomyces pastorianus
ggtcgccacaaggtctcatagatta

SEQ ID NO: 8330 - DNA, 25 bp, Saccharomyces pastorianus
ggtagcgcttccatgtcgaaatcat

SEQ ID NO: 8331 - DNA, 25 bp, Saccharomyces pastorianus
agagtcgtccaattccgcatcggca

SEQ ID NO: 8332 - DNA, 25 bp, Saccharomyces pastorianus
aactgatcggtgtagtctcattgac

SEQ ID NO: 8333 - DNA, 25 bp, Saccharomyces pastorianus
gacttgccgtcattttatttcggtc

SEQ ID NO: 8334 - DNA, 25 bp, Saccharomyces pastorianus
tatggattgtgcaaccgccagagtc

SEQ ID NO: 8335 - DNA, 25 bp, Saccharomyces pastorianus
aattctcactctcctttaatgacgg

SEQ ID NO: 8336 - DNA, 25 bp, Saccharomyces pastorianus
aaaatcatcgacacacacagttcaa

SEQ ID NO: 8337 - DNA, 25 bp, Saccharomyces pastorianus
aattgggtctattgcgcagttgaaa

SEQ ID NO: 8338 - DNA, 25 bp, Saccharomyces pastorianus
ggacacagttcaaagttagcgacga

SEQ ID NO: 8339 - DNA, 25 bp, Saccharomyces pastorianus
gtaggaggctatctcaactcggatt

SEQ ID NO: 8340 - DNA, 25 bp, Saccharomyces pastorianus
tataaataattctttcgcacccacc

SEQ ID NO: 8341 - DNA, 25 bp, Saccharomyces pastorianus
gcaagtgatgcttctgtggaccaac

SEQ ID NO: 8342 - DNA, 25 bp, Saccharomyces pastorianus
aaatatcggagaactttggacacag

SEQ ID NO: 8343 - DNA, 25 bp, Saccharomyces pastorianus
attgcgcagttgaaaccatcggttt

SEQ ID NO: 8344 - DNA, 25 bp, Saccharomyces pastorianus
tcaatgtcacaaccttttgctatgg

SEQ ID NO: 8345 - DNA, 25 bp, Saccharomyces pastorianus
gtggaccaacaactggacagctcag

SEQ ID NO: 8346 - DNA, 25 bp, Saccharomyces pastorianus
ggacagctcagctagtagcacttat

SEQ ID NO: 8347 - DNA, 25 bp, Saccharomyces pastorianus
gaagaaaaagatcctccacctgcaa

SEQ ID NO: 8348 - DNA, 25 bp, Saccharomyces pastorianus
tgaaaggctccgtaaccgtcttgcg

SEQ ID NO: 8349 - DNA, 25 bp, Saccharomyces pastorianus
cgtatacgagtgtgtcatcccggac

SEQ ID NO: 8350 - DNA, 25 bp, Saccharomyces pastorianus
tgattgcggcagtcttgggcagcta

SEQ ID NO: 8351 - DNA, 25 bp, Saccharomyces pastorianus
ggcatttcacacacgagtcgcggac

SEQ ID NO: 8352 - DNA, 25 bp, Saccharomyces pastorianus
aagtgtatgtgacccacggcggtaa

SEQ ID NO: 8353 - DNA, 25 bp, Saccharomyces pastorianus
agttcatcgggatctcggcatttca

SEQ ID NO: 8354 - DNA, 25 bp, Saccharomyces pastorianus
agctacgtggtgaagcggttcccca

SEQ ID NO: 8355 - DNA, 25 bp, Saccharomyces pastorianus
ttgggatcctcctgtactttggata

SEQ ID NO: 8356 - DNA, 25 bp, Saccharomyces pastorianus
agtacttctgcctggtgatatttca

SEQ ID NO: 8357 - DNA, 25 bp, Saccharomyces pastorianus
ggctcatttatgaacaccgtccagt

SEQ ID NO: 8358 - DNA, 25 bp, Saccharomyces pastorianus
agaggtttgcttaaggccgccatca

SEQ ID NO: 8359 - DNA, 25 bp, Saccharomyces pastorianus
gagatcgtcgcccaagtcatggaat

SEQ ID NO: 8360 - DNA, 25 bp, Saccharomyces pastorianus
gttccttactctgctgaagatgcca

SEQ ID NO: 8361 - DNA, 25 bp, Saccharomyces pastorianus
gagtcactggtgctgatgttcctac

SEQ ID NO: 8362 - DNA, 25 bp, Saccharomyces pastorianus
aggatttctctgcttggtatggttc

SEQ ID NO: 8363 - DNA, 25 bp, Saccharomyces pastorianus
ggtgcccaacattcgcaggatttct

SEQ ID NO: 8364 - DNA, 25 bp, Saccharomyces pastorianus
gttgaaagtccttgttccttactct

SEQ ID NO: 8365 - DNA, 25 bp, Saccharomyces pastorianus
gaagtcgtcaacttgcgtgcaatta

SEQ ID NO: 8366 - DNA, 25 bp, Saccharomyces pastorianus
atgttttgtcgccagatttcactct

SEQ ID NO: 8367 - DNA, 25 bp, Saccharomyces pastorianus
gaagatttcgcctttccagatgctc

SEQ ID NO: 8368 - DNA, 25 bp, Saccharomyces pastorianus
tcaattctctttggaagccgccgaa

SEQ ID NO: 8369 - DNA, 25 bp, Saccharomyces pastorianus
agggtttcttggttctcacgggcag

SEQ ID NO: 8370 - DNA, 25 bp, Saccharomyces pastorianus
actggatggtatactgctgtcgcac

SEQ ID NO: 8371 - DNA, 25 bp, Saccharomyces pastorianus
attttgtcgacaagctgcccaagac

SEQ ID NO: 8372 - DNA, 25 bp, Saccharomyces pastorianus
aaccacagggcgtcattgttcttat

SEQ ID NO: 8373 - DNA, 25 bp, Saccharomyces pastorianus
aagccgccgtcgtcttgaagaagaa

SEQ ID NO: 8374 - DNA, 25 bp, Saccharomyces pastorianus
gaagcatcgcaccaaatgacctcga

SEQ ID NO: 8375 - DNA, 25 bp, Saccharomyces pastorianus
gaaaacgtcacactgggctatgcca

SEQ ID NO: 8376 - DNA, 25 bp, Saccharomyces pastorianus
agaacttgtttccttcctgaagaag

SEQ ID NO: 8377 - DNA, 25 bp, Saccharomyces pastorianus
gaagaagcaccttgcagccttcaaa

SEQ ID NO: 8378 - DNA, 25 bp, Saccharomyces pastorianus
accgccaccggtaagatccagagaa

SEQ ID NO: 8379 - DNA, 25 bp, Saccharomyces pastorianus
aaagatctcgcctattgaactggat

SEQ ID NO: 8380 - DNA, 25 bp, Saccharomyces pastorianus
gttacgctcttgcaattgttccaga

SEQ ID NO: 8381 - DNA, 25 bp, Saccharomyces pastorianus
gcaactgccagatagtagcactcct

SEQ ID NO: 8382 - DNA, 25 bp, Saccharomyces pastorianus
cattcatccaaccaagcacttaacg

SEQ ID NO: 8383 - DNA, 25 bp, Saccharomyces pastorianus
ccttccactctttttcaacgatatg

SEQ ID NO: 8384 - DNA, 25 bp, Saccharomyces pastorianus
gtcaattattcctggcggttacgct

SEQ ID NO: 8385 - DNA, 25 bp, Saccharomyces pastorianus
gttgcttcagaaccttatacgttgt

SEQ ID NO: 8386 - DNA, 25 bp, Saccharomyces pastorianus
gatgcaatcaacaaaggccttcaca

SEQ ID NO: 8387 - DNA, 25 bp, Saccharomyces pastorianus
aagattaccgttcgcttctgatact

SEQ ID NO: 8388 - DNA, 25 bp, Saccharomyces pastorianus
gcaaatcctggcaatgacgacacta

SEQ ID NO: 8389 - DNA, 25 bp, Saccharomyces pastorianus
tagcactcctccaaaagataccgat

SEQ ID NO: 8390 - DNA, 25 bp, Saccharomyces pastorianus
atacctgccgtaatatgcccttggg

SEQ ID NO: 8391 - DNA, 25 bp, Saccharomyces pastorianus
gaacttcgtcatccctaacgtaagg

SEQ ID NO: 8392 - DNA, 25 bp, Saccharomyces pastorianus
tcgatcatcatacaggacccggtgg

SEQ ID NO: 8393 - DNA, 25 bp, Saccharomyces pastorianus
gaatgccgttctccaccagaggaat

SEQ ID NO: 8394 - DNA, 25 bp, Saccharomyces pastorianus
ataaaccgctttccagcagaccgaa

SEQ ID NO: 8395 - DNA, 25 bp, Saccharomyces pastorianus
aactcggtcaaggagtccacgggct

SEQ ID NO: 8396 - DNA, 25 bp, Saccharomyces pastorianus
gaacttccagatggagtctccacaa

SEQ ID NO: 8397 - DNA, 25 bp, Saccharomyces pastorianus
tgttggtagaccatagccacccgaa

SEQ ID NO: 8398 - DNA, 25 bp, Saccharomyces pastorianus
cacccagttcaactctgtgttggta

SEQ ID NO: 8399 - DNA, 25 bp, Saccharomyces pastorianus
aggcccgaacaatcatctgtcaatg

SEQ ID NO: 8400 - DNA, 25 bp, Saccharomyces pastorianus
agaaggatctccgtatcgtcaaccc

SEQ ID NO: 8401 - DNA, 25 bp, Saccharomyces pastorianus
acgagtctttcgtcgggaacgtcat

SEQ ID NO: 8402 - DNA, 25 bp, Saccharomyces pastorianus
agatcaccgtgtcgccagatgaaat

SEQ ID NO: 8403 - DNA, 25 bp, Saccharomyces pastorianus
agcgtgtactcgctcattttgcaga

SEQ ID NO: 8404 - DNA, 25 bp, Saccharomyces pastorianus
atggagcataccctttcgcccttac

SEQ ID NO: 8405 - DNA, 25 bp, Saccharomyces pastorianus
ctggatctgaaagcgctggacgaaa

SEQ ID NO: 8406 - DNA, 25 bp, Saccharomyces pastorianus
gtactcgctcattttgcagagaaaa

SEQ ID NO: 8407 - DNA, 25 bp, Saccharomyces pastorianus
gacaacagcacgaccaacagatcac

SEQ ID NO: 8408 - DNA, 25 bp, Saccharomyces pastorianus
tcgcccttacaacaggaagtgctaa

SEQ ID NO: 8409 - DNA, 25 bp, Saccharomyces pastorianus
aatcaagcagctaaaccactcgcag

SEQ ID NO: 8410 - DNA, 25 bp, Saccharomyces pastorianus
ttggtctggtgggaacactgctgaa

SEQ ID NO: 8411 - DNA, 25 bp, Saccharomyces pastorianus
gaaagcgctggacgaaacaatcaag

SEQ ID NO: 8412 - DNA, 25 bp, Saccharomyces pastorianus
tacaagcagctttcgctggatctga

SEQ ID NO: 8413 - DNA, 25 bp, Saccharomyces pastorianus
atctgtcaatgctccagagggccta

SEQ ID NO: 8414 - DNA, 25 bp, Saccharomyces pastorianus
gcaacatttggtatctctgcgttga

SEQ ID NO: 8415 - DNA, 25 bp, Saccharomyces pastorianus
gtcgattcccaatctgcagtacaat

SEQ ID NO: 8416 - DNA, 25 bp, Saccharomyces pastorianus
gatccaatggccaagttacgcaagt

SEQ ID NO: 8417 - DNA, 25 bp, Saccharomyces pastorianus
agggcctaccatacagatccttagt

SEQ ID NO: 8418 - DNA, 25 bp, Saccharomyces pastorianus
aatggcaagtcatctgccctgacag

SEQ ID NO: 8419 - DNA, 25 bp, Saccharomyces pastorianus
gaccttttgcaggatccaatggcca

SEQ ID NO: 8420 - DNA, 25 bp, Saccharomyces pastorianus
gactccaaggaatccgtagccgggt

SEQ ID NO: 8421 - DNA, 25 bp, Saccharomyces pastorianus
tacgcaagtttcttcgtgtgggcta

SEQ ID NO: 8422 - DNA, 25 bp, Saccharomyces pastorianus
gcctgttttcagtggattcatcaaa

SEQ ID NO: 8423 - DNA, 25 bp, Saccharomyces pastorianus
aaggatcgcgtatgtagcgcacgat

SEQ ID NO: 8424 - DNA, 25 bp, Saccharomyces pastorianus
aaacaacgcttcaactcagtctttg

SEQ ID NO: 8425 - DNA, 25 bp, Saccharomyces pastorianus
ggtgaacagccaactttaatcccaa

SEQ ID NO: 8426 - DNA, 25 bp, Saccharomyces pastorianus
acatcaatccgcgatagcttctcaa

SEQ ID NO: 8427 - DNA, 25 bp, Saccharomyces pastorianus
gatagcttctcaacgtctacgattg

SEQ ID NO: 8428 - DNA, 25 bp, Saccharomyces pastorianus
ttcaactttaccaattccagcactt

SEQ ID NO: 8429 - DNA, 25 bp, Saccharomyces pastorianus
atcaaagagacctgttcttcccgaa

SEQ ID NO: 8430 - DNA, 25 bp, Saccharomyces pastorianus
gatcttcctagtacagctcaacatt

SEQ ID NO: 8431 - DNA, 25 bp, Saccharomyces pastorianus
cgtctacgattgatccaggcagtaa

SEQ ID NO: 8432 - DNA, 25 bp, Saccharomyces pastorianus
aaggtttgccgccatgtatgttaat

SEQ ID NO: 8433 - DNA, 25 bp, Saccharomyces pastorianus
gaactttctccttgctgttcgaaag

SEQ ID NO: 8434 - DNA, 25 bp, Saccharomyces pastorianus
gacctgtgttctcaagcaatacctt

SEQ ID NO: 8435 - DNA, 25 bp, Saccharomyces pastorianus
aacaagggcagattttatccggaag

SEQ ID NO: 8436 - DNA, 25 bp, Saccharomyces pastorianus
aagcttgtgatcctttgcaaaccaa

SEQ ID NO: 8437 - DNA, 25 bp, Saccharomyces pastorianus
tttatattaacgacctgccccaaat

SEQ ID NO: 8438 - DNA, 25 bp, Saccharomyces pastorianus
aattatacttgttgatcgaaggtca

SEQ ID NO: 8439 - DNA, 25 bp, Saccharomyces pastorianus
gacacggatgaacccaaattatact

SEQ ID NO: 8440 - DNA, 25 bp, Saccharomyces pastorianus
gaccattcatctaatgagcacgcta

SEQ ID NO: 8441 - DNA, 25 bp, Saccharomyces pastorianus
aacgacctgccccaaattgtaagat

SEQ ID NO: 8442 - DNA, 25 bp, Saccharomyces pastorianus
gcaaagctatgcgtgataatgaact

SEQ ID NO: 8443 - DNA, 25 bp, Saccharomyces pastorianus
gagggatccattatcttttatgcca

SEQ ID NO: 8444 - DNA, 25 bp, Saccharomyces pastorianus
gaagcggaatcatctgcgcatattc

SEQ ID NO: 8445 - DNA, 25 bp, Saccharomyces pastorianus
aagagcctacattagagggatccat

SEQ ID NO: 8446 - DNA, 25 bp, Saccharomyces pastorianus
ggtaaggtgatccattgctgttgca

SEQ ID NO: 8447 - DNA, 25 bp, Saccharomyces pastorianus
aaagtctgtagactcctgagcccca

SEQ ID NO: 8448 - DNA, 25 bp, Saccharomyces pastorianus
gcacgccgacgtgcatttggcgaag

SEQ ID NO: 8449 - DNA, 25 bp, Saccharomyces pastorianus
gggttccaccatcttttagtgtact

SEQ ID NO: 8450 - DNA, 25 bp, Saccharomyces pastorianus
aaagagatgtctccggattgcccct

SEQ ID NO: 8451 - DNA, 25 bp, Saccharomyces pastorianus
attgctgttgcatgtggacgcttaa

SEQ ID NO: 8452 - DNA, 25 bp, Saccharomyces pastorianus
tttataggacagatcggcacgccga

SEQ ID NO: 8453 - DNA, 25 bp, Saccharomyces pastorianus
agcaatgctatcaacgaacgctatt

SEQ ID NO: 8454 - DNA, 25 bp, Saccharomyces pastorianus
agattacttcaagacgctctccaaa

SEQ ID NO: 8455 - DNA, 25 bp, Saccharomyces pastorianus
actccttgagatattccacgccaat

SEQ ID NO: 8456 - DNA, 25 bp, Saccharomyces pastorianus
cggccaaatctcttacgtcaacgaa

SEQ ID NO: 8457 - DNA, 25 bp, Saccharomyces pastorianus
agacgttctgtaccactgcaacgaa

SEQ ID NO: 8458 - DNA, 25 bp, Saccharomyces pastorianus
aatactgcagcagctttgctcttgc

SEQ ID NO: 8459 - DNA, 25 bp, Saccharomyces pastorianus
tcttgccaagacactacactttcat

SEQ ID NO: 8460 - DNA, 25 bp, Saccharomyces pastorianus
aacatggcttcgtgtctgttcaaag

SEQ ID NO: 8461 - DNA, 25 bp, Saccharomyces pastorianus
ggaactcgctgaccacagaattcgt

SEQ ID NO: 8462 - DNA, 25 bp, Saccharomyces pastorianus
gacgatccggacatcaacatggctt

SEQ ID NO: 8463 - DNA, 25 bp, Saccharomyces pastorianus
tagagtgtggttcctccagcaacta

SEQ ID NO: 8464 - DNA, 25 bp, Saccharomyces pastorianus
acttccgaactgcatgtcttggtca

SEQ ID NO: 8465 - DNA, 25 bp, Saccharomyces pastorianus
atgcggagttgttcgaagaccctta

SEQ ID NO: 8466 - DNA, 25 bp, Saccharomyces pastorianus
gatcttcgggatcctgtggttcaac

SEQ ID NO: 8467 - DNA, 25 bp, Saccharomyces pastorianus
gaagttctctatgtatccgctgatc

SEQ ID NO: 8468 - DNA, 25 bp, Saccharomyces pastorianus
tgataatcggcgagctgtcgtaccc

SEQ ID NO: 8469 - DNA, 25 bp, Saccharomyces pastorianus
gcgtgaaagtgatcggcaacctcct

SEQ ID NO: 8470 - DNA, 25 bp, Saccharomyces pastorianus
ggccctgtttgcaacgtacgtgtac

SEQ ID NO: 8471 - DNA, 25 bp, Saccharomyces pastorianus
taatgggcggctacgtgttcgcgac

SEQ ID NO: 8472 - DNA, 25 bp, Saccharomyces pastorianus
aactcgattatcttctacggcgtga

SEQ ID NO: 8473 - DNA, 25 bp, Saccharomyces pastorianus
tgatcagtctcagtctcaccatggg

SEQ ID NO: 8474 - DNA, 25 bp, Saccharomyces pastorianus
atctccatcctgaacgtcgtggtga

SEQ ID NO: 8475 - DNA, 25 bp, Saccharomyces pastorianus
tacgtgtacaagagagtccccgaga

SEQ ID NO: 8476 - DNA, 25 bp, Saccharomyces pastorianus
gcagttctgtggcatcaactcgatt

SEQ ID NO: 8477 - DNA, 25 bp, Saccharomyces pastorianus
acactgtggcagtatgtgcgcgacc

SEQ ID NO: 8478 - DNA, 25 bp, Saccharomyces pastorianus
atgggcgtgtccttcttgctagtca

SEQ ID NO: 8479 - DNA, 25 bp, Saccharomyces pastorianus
ggtgctaatagttaacgttgcttct

SEQ ID NO: 8480 - DNA, 25 bp, Saccharomyces pastorianus
agagtttgttatcttgggcttccca

SEQ ID NO: 8481 - DNA, 25 bp, Saccharomyces pastorianus
atggtgttacattccccatcatgaa

SEQ ID NO: 8482 - DNA, 25 bp, Saccharomyces pastorianus
ggcgctgatcctgtttacaatttct

SEQ ID NO: 8483 - DNA, 25 bp, Saccharomyces pastorianus
aaagtcaggtttactgggctacaag

SEQ ID NO: 8484 - DNA, 25 bp, Saccharomyces pastorianus
acgttgcttctaaatgcggtttcac

SEQ ID NO: 8485 - DNA, 25 bp, Saccharomyces pastorianus
ggcgaattctgccaattgaactatg

SEQ ID NO: 8486 - DNA, 25 bp, Saccharomyces pastorianus
ggcttcccatgtaaccagttcggta

SEQ ID NO: 8487 - DNA, 25 bp, Saccharomyces pastorianus
aatgcggtttcactccacaatataa

SEQ ID NO: 8488 - DNA, 25 bp, Saccharomyces pastorianus
ggtgaaaccttcaagtttgaccaat

SEQ ID NO: 8489 - DNA, 25 bp, Saccharomyces pastorianus
gaagttaacggaaacggcgctgatc

SEQ ID NO: 8490 - DNA, 25 bp, Saccharomyces pastorianus
gataccattcgttcactagatttaa

SEQ ID NO: 8491 - DNA, 25 bp, Saccharomyces pastorianus
atcatggctcacgatttacgttcga

SEQ ID NO: 8492 - DNA, 25 bp, Saccharomyces pastorianus
gttgtctacaacctttccaagatat

SEQ ID NO: 8493 - DNA, 25 bp, Saccharomyces pastorianus
gattttagtagctctttccgtgatg

SEQ ID NO: 8494 - DNA, 25 bp, Saccharomyces pastorianus
tagccgatctagctttcgaaacgat

SEQ ID NO: 8495 - DNA, 25 bp, Saccharomyces pastorianus
ttccgtgatggacttgacagacttt

SEQ ID NO: 8496 - DNA, 25 bp, Saccharomyces pastorianus
gtctgctgcatgtatgacggtgcca

SEQ ID NO: 8497 - DNA, 25 bp, Saccharomyces pastorianus
tcgccgagcagcctattgattttag

SEQ ID NO: 8498 - DNA, 25 bp, Saccharomyces pastorianus
taatggtcgcattcacgaagccggt

SEQ ID NO: 8499 - DNA, 25 bp, Saccharomyces pastorianus
acgaagccggtgttgtcggtatcaa

SEQ ID NO: 8500 - DNA, 25 bp, Saccharomyces pastorianus
gacggcagagtttggttgtctacaa

SEQ ID NO: 8501 - DNA, 25 bp, Saccharomyces pastorianus
tgcattaccataccaaacggtcgat

SEQ ID NO: 8502 - DNA, 25 bp, Saccharomyces pastorianus
gaactatcacatataccgagccgta

SEQ ID NO: 8503 - DNA, 25 bp, Saccharomyces pastorianus
atggcacaaagctttcttgacgttt

SEQ ID NO: 8504 - DNA, 25 bp, Saccharomyces pastorianus
ctccacctacaaccgtattcattaa

SEQ ID NO: 8505 - DNA, 25 bp, Saccharomyces pastorianus
ttttaagattgcctttctctccacc

SEQ ID NO: 8506 - DNA, 25 bp, Saccharomyces pastorianus
atttcttattagagaccgtccgtca

SEQ ID NO: 8507 - DNA, 25 bp, Saccharomyces pastorianus
cgtacgtgaagccacaattgccgga

SEQ ID NO: 8508 - DNA, 25 bp, Saccharomyces pastorianus
gagtctcagaaattcatcagtctaa

SEQ ID NO: 8509 - DNA, 25 bp, Saccharomyces pastorianus
tgacgtttgcacagcgttacaagaa

SEQ ID NO: 8510 - DNA, 25 bp, Saccharomyces pastorianus
ttcaaaggctttttattcccgctgg

SEQ ID NO: 8511 - DNA, 25 bp, Saccharomyces pastorianus
tattcccgctggtcgaaacgggttg

SEQ ID NO: 8512 - DNA, 25 bp, Saccharomyces pastorianus
ccgcacattctcatcatttcatggg

SEQ ID NO: 8513 - DNA, 25 bp, Saccharomyces pastorianus
gatgtcgtctgtgaacaaatcgcta

SEQ ID NO: 8514 - DNA, 25 bp, Saccharomyces pastorianus
actacgatgccaaatccgttgctga

SEQ ID NO: 8515 - DNA, 25 bp, Saccharomyces pastorianus
ttgcctgctggctctaatggtttaa

SEQ ID NO: 8516 - DNA, 25 bp, Saccharomyces pastorianus
tatccttcccagtcggtttcaagaa

SEQ ID NO: 8517 - DNA, 25 bp, Saccharomyces pastorianus
gaacactgtttcgtcatcttgagag

SEQ ID NO: 8518 - DNA, 25 bp, Saccharomyces pastorianus
tactctgaacgtcgctgtggatgct

SEQ ID NO: 8519 - DNA, 25 bp, Saccharomyces pastorianus
ttaatgatcgattactctcacggta

SEQ ID NO: 8520 - DNA, 25 bp, Saccharomyces pastorianus
ggtatccccaccgaaggtaaagctg

SEQ ID NO: 8521 - DNA, 25 bp, Saccharomyces pastorianus
tatcaccgatgcttgtataggctgg

SEQ ID NO: 8522 - DNA, 25 bp, Saccharomyces pastorianus
gcacagggaattagcctccggttta

SEQ ID NO: 8523 - DNA, 25 bp, Saccharomyces pastorianus
gtgtggacccggattatattaccag

SEQ ID NO: 8524 - DNA, 25 bp, Saccharomyces pastorianus
gaccgttgaggcgttcgtcaaagct

SEQ ID NO: 8525 - DNA, 25 bp, Saccharomyces pastorianus
atgccctggtcgttgttggagataa

SEQ ID NO: 8526 - DNA, 25 bp, Saccharomyces pastorianus
caaacctggctttgggctacgtgta

SEQ ID NO: 8527 - DNA, 25 bp, Saccharomyces pastorianus
ggaaactaatcatgaaacccttggt

SEQ ID NO: 8528 - DNA, 25 bp, Saccharomyces pastorianus
gtaacattctacctgcgggagtcgg

SEQ ID NO: 8529 - DNA, 25 bp, Saccharomyces pastorianus
ggccatcttcaaggctcattgggat

SEQ ID NO: 8530 - DNA, 25 bp, Saccharomyces pastorianus
gtcggtctgcccaatgatagcggta

SEQ ID NO: 8531 - DNA, 25 bp, Saccharomyces pastorianus
agaaatgtccaaggccatcttcaag

SEQ ID NO: 8532 - DNA, 25 bp, Saccharomyces pastorianus
gacactggacgaagttgcattgggt

SEQ ID NO: 8533 - DNA, 25 bp, Saccharomyces pastorianus
aaaattgcgtccttttatgccctgg

SEQ ID NO: 8534 - DNA, 25 bp, Saccharomyces pastorianus
cacggctttccccaagatttgaaag

SEQ ID NO: 8535 - DNA, 25 bp, Saccharomyces pastorianus
tcacgagccctgcattcgattcgag

SEQ ID NO: 8536 - DNA, 25 bp, Saccharomyces pastorianus
gggcggatttcttcgatctaggact

SEQ ID NO: 8537 - DNA, 25 bp, Saccharomyces pastorianus
aatgcgcaaaatccacacggctttc

SEQ ID NO: 8538 - DNA, 25 bp, Saccharomyces pastorianus
tacaatggcaaatcaacccggcgtc

SEQ ID NO: 8539 - DNA, 25 bp, Saccharomyces pastorianus
gaatccgtttatattgcatgcatct

SEQ ID NO: 8540 - DNA, 25 bp, Saccharomyces pastorianus
gaacccgttttacaagatcaccgat

SEQ ID NO: 8541 - DNA, 25 bp, Saccharomyces pastorianus
gaaatcgaattcaccaatgcgcaaa

SEQ ID NO: 8542 - DNA, 25 bp, Saccharomyces pastorianus
aactcggcaaacagcagtgtggcaa

SEQ ID NO: 8543 - DNA, 25 bp, Saccharomyces pastorianus
gcatctttagatatcgttgaggact

SEQ ID NO: 8544 - DNA, 25 bp, Saccharomyces pastorianus
gtcatgattcatggaaactcggcaa

SEQ ID NO: 8545 - DNA, 25 bp, Saccharomyces pastorianus
gagaagtatccgtttcagtattata

SEQ ID NO: 8546 - DNA, 25 bp, Saccharomyces pastorianus
atatacgatggtgtgtctagggaaa

SEQ ID NO: 8547 - DNA, 25 bp, Saccharomyces pastorianus
gattctttacaggttgatgggcagc

SEQ ID NO: 8548 - DNA, 25 bp, Saccharomyces pastorianus
tgactaaaaccatatacgggctatt

SEQ ID NO: 8549 - DNA, 25 bp, Saccharomyces pastorianus
ttcaatccgtgtagaaactctgatt

SEQ ID NO: 8550 - DNA, 25 bp, Saccharomyces pastorianus
gaaactctgatttcttcaagtgaca

SEQ ID NO: 8551 - DNA, 25 bp, Saccharomyces pastorianus
ttggtatcgtaatagtcctttggac

SEQ ID NO: 8552 - DNA, 25 bp, Saccharomyces pastorianus
ggtacattatgagcacagtagctat

SEQ ID NO: 8553 - DNA, 25 bp, Saccharomyces pastorianus
aacacaacactgacattgaagctga

SEQ ID NO: 8554 - DNA, 25 bp, Saccharomyces pastorianus
gttgatgggcagctgcagaaatact

SEQ ID NO: 8555 - DNA, 25 bp, Saccharomyces pastorianus
aatactggcacgatactaggtacat

SEQ ID NO: 8556 - DNA, 25 bp, Saccharomyces pastorianus
caagacgtgaggtttggtggccatt

SEQ ID NO: 8557 - DNA, 25 bp, Saccharomyces pastorianus
tggacccagggagccaaagtcaact

SEQ ID NO: 8558 - DNA, 25 bp, Saccharomyces pastorianus
gattgtcacataggcgactcgatag

SEQ ID NO: 8559 - DNA, 25 bp, Saccharomyces pastorianus
gaaccaatgtggcttcgtggaccca

SEQ ID NO: 8560 - DNA, 25 bp, Saccharomyces pastorianus
tacaaggccatgtagacaccgtcgc

SEQ ID NO: 8561 - DNA, 25 bp, Saccharomyces pastorianus
ggagatattctttctgattgtcaca

SEQ ID NO: 8562 - DNA, 25 bp, Saccharomyces pastorianus
acgtcgacgacctttcaaatggcgg

SEQ ID NO: 8563 - DNA, 25 bp, Saccharomyces pastorianus
accgtcgccaaaatcgtctcaagaa

SEQ ID NO: 8564 - DNA, 25 bp, Saccharomyces pastorianus
tagatgggacttccctgactgtaac

SEQ ID NO: 8565 - DNA, 25 bp, Saccharomyces pastorianus
aatgggatatgtctcactgccactg

SEQ ID NO: 8566 - DNA, 25 bp, Saccharomyces pastorianus
actgccactgagtttgacactgagt

SEQ ID NO: 8567 - DNA, 25 bp, Saccharomyces pastorianus
atacactccaaactgcaagatccta

SEQ ID NO: 8568 - DNA, 25 bp, Saccharomyces pastorianus
ccaatacttggaacggcacagagga

SEQ ID NO: 8569 - DNA, 25 bp, Saccharomyces pastorianus
gaatcgtttgaacagatgcttcgag

SEQ ID NO: 8570 - DNA, 25 bp, Saccharomyces pastorianus
gatattcaaaaaccgagggctgacc

SEQ ID NO: 8571 - DNA, 25 bp, Saccharomyces pastorianus
cacagaggagggaaacgaatcgttt

SEQ ID NO: 8572 - DNA, 25 bp, Saccharomyces pastorianus
aagagacatactatccaatacttgg

SEQ ID NO: 8573 - DNA, 25 bp, Saccharomyces pastorianus
gaactagacgcatatatacactcca

SEQ ID NO: 8574 - DNA, 25 bp, Saccharomyces pastorianus
agggctgaccagtgcgttgatagaa

SEQ ID NO: 8575 - DNA, 25 bp, Saccharomyces pastorianus
gatgcttcgagacagagttgccagt

SEQ ID NO: 8576 - DNA, 25 bp, Saccharomyces pastorianus
gaaacaacttagtgaagcagcaggc

SEQ ID NO: 8577 - DNA, 25 bp, Saccharomyces pastorianus
acagagttgccagtgtggtgaaaga

SEQ ID NO: 8578 - DNA, 25 bp, Saccharomyces pastorianus
aagccggcagcgacgatgatgaacc

SEQ ID NO: 8579 - DNA, 25 bp, Saccharomyces pastorianus
tcgacaagctgggtgtgcagacaca

SEQ ID NO: 8580 - DNA, 25 bp, Saccharomyces pastorianus
tgactgcggtgagacaacatatgtt

SEQ ID NO: 8581 - DNA, 25 bp, Saccharomyces pastorianus
gtccttcttgcccatattcgacaag

SEQ ID NO: 8582 - DNA, 25 bp, Saccharomyces pastorianus
tacagtaacaacacagcagcgggca

SEQ ID NO: 8583 - DNA, 25 bp, Saccharomyces pastorianus
tccgagttttacgatttcacaagct

SEQ ID NO: 8584 - DNA, 25 bp, Saccharomyces pastorianus
cacaacagcgtgtctggcaaaccga

SEQ ID NO: 8585 - DNA, 25 bp, Saccharomyces pastorianus
tgtatcgtctgtaatttccaaggca

SEQ ID NO: 8586 - DNA, 25 bp, Saccharomyces pastorianus
gatgaaccaccacaggagtacttat

SEQ ID NO: 8587 - DNA, 25 bp, Saccharomyces pastorianus
gcaagacctgaagcccgaggtgata

SEQ ID NO: 8588 - DNA, 25 bp, Saccharomyces pastorianus
gagacattgtaagatcccctacgaa

SEQ ID NO: 8589 - DNA, 25 bp, Saccharomyces pastorianus
aacaagcggtcaaggtggttgcatc

SEQ ID NO: 8590 - DNA, 25 bp, Saccharomyces pastorianus
ttgtggagcgtcttggatgccaagc

SEQ ID NO: 8591 - DNA, 25 bp, Saccharomyces pastorianus
aggtggttgcatcatcgtgccctgc

SEQ ID NO: 8592 - DNA, 25 bp, Saccharomyces pastorianus
aggccgtcgatcataccgctaagga

SEQ ID NO: 8593 - DNA, 25 bp, Saccharomyces pastorianus
ctgccggaacatcgctgaatctgaa

SEQ ID NO: 8594 - DNA, 25 bp, Saccharomyces pastorianus
tatccaagctggttgtggagcgtct

SEQ ID NO: 8595 - DNA, 25 bp, Saccharomyces pastorianus
gacgcccaagcactcgaagacaagg

SEQ ID NO: 8596 - DNA, 25 bp, Saccharomyces pastorianus
cgacgagtcgtgtcttttacaacaa

SEQ ID NO: 8597 - DNA, 25 bp, Saccharomyces pastorianus
aaagcggtaaggacgcccaagcact

SEQ ID NO: 8598 - DNA, 25 bp, Saccharomyces pastorianus
ttggatgccaagcaggccgtcgatc

SEQ ID NO: 8599 - DNA, 25 bp, Saccharomyces pastorianus
ggccgtagatggttatcgacgagtc

SEQ ID NO: 8600 - DNA, 25 bp, Saccharomyces pastorianus
tatcgaagtttctggcaccatcggg

SEQ ID NO: 8601 - DNA, 25 bp, Saccharomyces pastorianus
atgaaccatcattgacagccgataa

SEQ ID NO: 8602 - DNA, 25 bp, Saccharomyces pastorianus
gggacttgtcatttggagatacctt

SEQ ID NO: 8603 - DNA, 25 bp, Saccharomyces pastorianus
agtgggactttcatgggctgccaag

SEQ ID NO: 8604 - DNA, 25 bp, Saccharomyces pastorianus
tagattacctacacaccacagacat

SEQ ID NO: 8605 - DNA, 25 bp, Saccharomyces pastorianus
gggtcctctttgatactttcacaac

SEQ ID NO: 8606 - DNA, 25 bp, Saccharomyces pastorianus
ttctggcaccggtttagtgggactt

SEQ ID NO: 8607 - DNA, 25 bp, Saccharomyces pastorianus
cacagacatgctaccattggcgaac

SEQ ID NO: 8608 - DNA, 25 bp, Saccharomyces pastorianus
agtcttagagttaggttctggcacc

SEQ ID NO: 8609 - DNA, 25 bp, Saccharomyces pastorianus
atcatatttgttgccgatccgatct

SEQ ID NO: 8610 - DNA, 25 bp, Saccharomyces pastorianus
attcacctcagcacccagaatgggt

SEQ ID NO: 8611 - DNA, 25 bp, Saccharomyces pastorianus
tcattaagggtccacttttcctcaa

SEQ ID NO: 8612 - DNA, 25 bp, Saccharomyces pastorianus
gaagacgctacttctagggaagcta

SEQ ID NO: 8613 - DNA, 25 bp, Saccharomyces pastorianus
cggagatacgtatacctattttcaa

SEQ ID NO: 8614 - DNA, 25 bp, Saccharomyces pastorianus
agatacagacggtgatccggcggac

SEQ ID NO: 8615 - DNA, 25 bp, Saccharomyces pastorianus
atacccacttggttgcagttggaaa

SEQ ID NO: 8616 - DNA, 25 bp, Saccharomyces pastorianus
ggtaaaattcatctgggccaagtgc

SEQ ID NO: 8617 - DNA, 25 bp, Saccharomyces pastorianus
gggaagctacgccttcattaagggt

SEQ ID NO: 8618 - DNA, 25 bp, Saccharomyces pastorianus
agaggtcaccgcgaaggacgacttc

SEQ ID NO: 8619 - DNA, 25 bp, Saccharomyces pastorianus
gatacttcagtgctaccggagatac

SEQ ID NO: 8620 - DNA, 25 bp, Saccharomyces pastorianus
aaacatgaattgatgcctcccgatt

SEQ ID NO: 8621 - DNA, 25 bp, Saccharomyces pastorianus
cacgcttggctgcaaataccactat

SEQ ID NO: 8622 - DNA, 25 bp, Saccharomyces pastorianus
gaattccggttttcagatttgtcag

SEQ ID NO: 8623 - DNA, 25 bp, Saccharomyces pastorianus
ggagtgtctagatccgcaacagttt

SEQ ID NO: 8624 - DNA, 25 bp, Saccharomyces pastorianus
aagacccgctttttcatcgattaga

SEQ ID NO: 8625 - DNA, 25 bp, Saccharomyces pastorianus
agatcacaccgtgctattaccttga

SEQ ID NO: 8626 - DNA, 25 bp, Saccharomyces pastorianus
gtgcactgcatggtcggagtgtcta

SEQ ID NO: 8627 - DNA, 25 bp, Saccharomyces pastorianus
gcatgagatggcttcactgtgattt

SEQ ID NO: 8628 - DNA, 25 bp, Saccharomyces pastorianus
ggcccagagctggtaccacgattga

SEQ ID NO: 8629 - DNA, 25 bp, Saccharomyces pastorianus
cagccgagtttattctttgtatacg

SEQ ID NO: 8630 - DNA, 25 bp, Saccharomyces pastorianus
atttggcaggcgcttacgtatttgt

SEQ ID NO: 8631 - DNA, 25 bp, Saccharomyces pastorianus
aaaggccgtttaccctgtgagatca

SEQ ID NO: 8632 - DNA, 25 bp, Saccharomyces pastorianus
aatcctgttttactcaagtccttag

SEQ ID NO: 8633 - DNA, 25 bp, Saccharomyces pastorianus
tgtcaaattcagtggccctggtaat

SEQ ID NO: 8634 - DNA, 25 bp, Saccharomyces pastorianus
atcactgagcttgcgaatatcgacg

SEQ ID NO: 8635 - DNA, 25 bp, Saccharomyces pastorianus
cagattcctaatttttactcaccat

SEQ ID NO: 8636 - DNA, 25 bp, Saccharomyces pastorianus
aagagtgtcactatgggcatctcca

SEQ ID NO: 8637 - DNA, 25 bp, Saccharomyces pastorianus
gcatctccattaggttggttccgga

SEQ ID NO: 8638 - DNA, 25 bp, Saccharomyces pastorianus
atcgacgagagcatcactgttcaag

SEQ ID NO: 8639 - DNA, 25 bp, Saccharomyces pastorianus
tgactgacgatgaactccaaagatt

SEQ ID NO: 8640 - DNA, 25 bp, Saccharomyces pastorianus
tggtcaaagccttcattatctatga

SEQ ID NO: 8641 - DNA, 25 bp, Saccharomyces pastorianus
aaaggatattcgacgctccagcagt

SEQ ID NO: 8642 - DNA, 25 bp, Saccharomyces pastorianus
agcagctaaactctcaaaaccactt

SEQ ID NO: 8643 - DNA, 25 bp, Saccharomyces pastorianus
ggttccggagcaaagcgtcgagcaa

SEQ ID NO: 8644 - DNA, 25 bp, Saccharomyces pastorianus
aattttgagttgaagccctatgtta

SEQ ID NO: 8645 - DNA, 25 bp, Saccharomyces pastorianus
aataaaagagtaccgctgaccacca

SEQ ID NO: 8646 - DNA, 25 bp, Saccharomyces pastorianus
gccctatgttaatgctaatgttcca

SEQ ID NO: 8647 - DNA, 25 bp, Saccharomyces pastorianus
gaagcacgacttcaaagggttcagt

SEQ ID NO: 8648 - DNA, 25 bp, Saccharomyces pastorianus
caaagggttcagtcgtggtcccttg

SEQ ID NO: 8649 - DNA, 25 bp, Saccharomyces pastorianus
gaacctacgtaaccccagatatagt

SEQ ID NO: 8650 - DNA, 25 bp, Saccharomyces pastorianus
ttcagtaagacctcctttaacgctc

SEQ ID NO: 8651 - DNA, 25 bp, Saccharomyces pastorianus
tggtcccttggatcctgaattacaa

SEQ ID NO: 8652 - DNA, 25 bp, Saccharomyces pastorianus
aaaagctcacctattgtacaattca

SEQ ID NO: 8653 - DNA, 25 bp, Saccharomyces pastorianus
aatgttccacctttgaagcacgact

SEQ ID NO: 8654 - DNA, 25 bp, Saccharomyces pastorianus
taacgctcttactagaccttggaag

SEQ ID NO: 8655 - DNA, 25 bp, Saccharomyces pastorianus
ttggcagtgccaactttcccattat

SEQ ID NO: 8656 - DNA, 25 bp, Saccharomyces pastorianus
tcagttttcgtattgatcaccggga

SEQ ID NO: 8657 - DNA, 25 bp, Saccharomyces pastorianus
agccatcccacatcatttgcaaaat

SEQ ID NO: 8658 - DNA, 25 bp, Saccharomyces pastorianus
atcaccgggatctggtttgctgata

SEQ ID NO: 8659 - DNA, 25 bp, Saccharomyces pastorianus
aaagttatccctatcgcagctgtca

SEQ ID NO: 8660 - DNA, 25 bp, Saccharomyces pastorianus
gttgtttgtctgttttgttctctta

SEQ ID NO: 8661 - DNA, 25 bp, Saccharomyces pastorianus
gttttgattcagttggtcgctaaga

SEQ ID NO: 8662 - DNA, 25 bp, Saccharomyces pastorianus
aagctatatctggttcatctgcccg

SEQ ID NO: 8663 - DNA, 25 bp, Saccharomyces pastorianus
atccatatcgcttcttttgttttga

SEQ ID NO: 8664 - DNA, 25 bp, Saccharomyces pastorianus
acaacctttgactttcatcacttac

SEQ ID NO: 8665 - DNA, 25 bp, Saccharomyces pastorianus
atccgtcttagggttgatcactatt

SEQ ID NO: 8666 - DNA, 25 bp, Saccharomyces pastorianus
gaatatcgttaagctctgagtccat

SEQ ID NO: 8667 - DNA, 25 bp, Saccharomyces pastorianus
gagtccattctgtataaccattcgt

SEQ ID NO: 8668 - DNA, 25 bp, Saccharomyces pastorianus
gaataaatggctcggcacatcgctg

SEQ ID NO: 8669 - DNA, 25 bp, Saccharomyces pastorianus
ggtgtcccacaactacttcatggaa

SEQ ID NO: 8670 - DNA, 25 bp, Saccharomyces pastorianus
gtgcccgcaattagacgtcaatacc

SEQ ID NO: 8671 - DNA, 25 bp, Saccharomyces pastorianus
ccacccttggtgtatgttttctatt

SEQ ID NO: 8672 - DNA, 25 bp, Saccharomyces pastorianus
gcgggtttgctgacacgctcaagaa

SEQ ID NO: 8673 - DNA, 25 bp, Saccharomyces pastorianus
ggtcatggcgcctttaaattccatt

SEQ ID NO: 8674 - DNA, 25 bp, Saccharomyces pastorianus
agagcctccgaagccttacaaaatg

SEQ ID NO: 8675 - DNA, 25 bp, Saccharomyces pastorianus
acagcgttatcactagcgggtttgc

SEQ ID NO: 8676 - DNA, 25 bp, Saccharomyces pastorianus
gtacgattgcaagccagacaccagt

SEQ ID NO: 8677 - DNA, 25 bp, Saccharomyces pastorianus
atgctgccgccaccagacggaagtt

SEQ ID NO: 8678 - DNA, 25 bp, Saccharomyces pastorianus
gacccctccgagttcaacaagtttg

SEQ ID NO: 8679 - DNA, 25 bp, Saccharomyces pastorianus
aagttgagcggcaatgagtcatggc

SEQ ID NO: 8680 - DNA, 25 bp, Saccharomyces pastorianus
gtcatggccgaaccaggactcatat

SEQ ID NO: 8681 - DNA, 25 bp, Saccharomyces pastorianus
ttaagcgagctaaaaacgggccatg

SEQ ID NO: 8682 - DNA, 25 bp, Saccharomyces pastorianus
accaggactcatatccgcctgagga

SEQ ID NO: 8683 - DNA, 25 bp, Saccharomyces pastorianus
gtatttcgagaacttcttctcattc

SEQ ID NO: 8684 - DNA, 25 bp, Saccharomyces pastorianus
gccttggaaagcttcaccgatgata

SEQ ID NO: 8685 - DNA, 25 bp, Saccharomyces pastorianus
gaaatggctacgattctgacccgaa

SEQ ID NO: 8686 - DNA, 25 bp, Saccharomyces pastorianus
atagcatggaggcagacatctctga

SEQ ID NO: 8687 - DNA, 25 bp, Saccharomyces pastorianus
gaaatcgtttactgcaatgagacca

SEQ ID NO: 8688 - DNA, 25 bp, Saccharomyces pastorianus
tatgattttcgctatcgttgtggcc

SEQ ID NO: 8689 - DNA, 25 bp, Saccharomyces pastorianus
catccttcttgagttctagttccat

SEQ ID NO: 8690 - DNA, 25 bp, Saccharomyces pastorianus
ggttctaatttgcatccatcggatg

SEQ ID NO: 8691 - DNA, 25 bp, Saccharomyces pastorianus
gatcttaccttcatgctttcttttg

SEQ ID NO: 8692 - DNA, 25 bp, Saccharomyces pastorianus
gagcattctcgcttgaattcatcct

SEQ ID NO: 8693 - DNA, 25 bp, Saccharomyces pastorianus
gatcctagtggtccttggttctaat

SEQ ID NO: 8694 - DNA, 25 bp, Saccharomyces pastorianus
atgacccaatcttccttgttgtagg

SEQ ID NO: 8695 - DNA, 25 bp, Saccharomyces pastorianus
tcacgcagctgggttctgtatccat

SEQ ID NO: 8696 - DNA, 25 bp, Saccharomyces pastorianus
cgttgtggcctctataagtccatta

SEQ ID NO: 8697 - DNA, 25 bp, Saccharomyces pastorianus
tgtatccatcccattgatcctagtg

SEQ ID NO: 8698 - DNA, 25 bp, Saccharomyces pastorianus
tatgctgtgttgagtttgcccgtaa

SEQ ID NO: 8699 - DNA, 25 bp, Saccharomyces pastorianus
atcgatttacacacagtctcattag

SEQ ID NO: 8700 - DNA, 25 bp, Saccharomyces pastorianus
aaatcttacgcaatactcatggtcg

SEQ ID NO: 8701 - DNA, 25 bp, Saccharomyces pastorianus
gaaagtgtacaacctaacagcacaa

SEQ ID NO: 8702 - DNA, 25 bp, Saccharomyces pastorianus
tataaaatttataccaccggatggg

SEQ ID NO: 8703 - DNA, 25 bp, Saccharomyces pastorianus
tattttatccgggttgaccattggt

SEQ ID NO: 8704 - DNA, 25 bp, Saccharomyces pastorianus
ttcgtatatgggacaatcagccagt

SEQ ID NO: 8705 - DNA, 25 bp, Saccharomyces pastorianus
atcagccagtggcatttctgtggaa

SEQ ID NO: 8706 - DNA, 25 bp, Saccharomyces pastorianus
ggttgggcaaagattccgatgaatt

SEQ ID NO: 8707 - DNA, 25 bp, Saccharomyces pastorianus
tcgaaagctctaaaaaggtgtccca

SEQ ID NO: 8708 - DNA, 25 bp, Saccharomyces pastorianus
ttgataaagctactcctacgggaac

SEQ ID NO: 8709 - DNA, 25 bp, Saccharomyces pastorianus
gatggagaatttactccttctaata

SEQ ID NO: 8710 - DNA, 25 bp, Saccharomyces pastorianus
gattcctaagaatgtcacctcaaaa

SEQ ID NO: 8711 - DNA, 25 bp, Saccharomyces pastorianus
gtgagtacgagtttccaattcattg

SEQ ID NO: 8712 - DNA, 25 bp, Saccharomyces pastorianus
attttacacacatcacatgcggcga

SEQ ID NO: 8713 - DNA, 25 bp, Saccharomyces pastorianus
gaggcggctactgatatggcgccct

SEQ ID NO: 8714 - DNA, 25 bp, Saccharomyces pastorianus
ggacttctaggtgcattcattactc

SEQ ID NO: 8715 - DNA, 25 bp, Saccharomyces pastorianus
aaaacacgccgtggttggctgtcct

SEQ ID NO: 8716 - DNA, 25 bp, Saccharomyces pastorianus
aaaaccagataccacgcaggccgag

SEQ ID NO: 8717 - DNA, 25 bp, Saccharomyces pastorianus
taccacccacgtatgatgaggcggc

SEQ ID NO: 8718 - DNA, 25 bp, Saccharomyces pastorianus
gcaggccgagcatcgcagcgagcaa

SEQ ID NO: 8719 - DNA, 25 bp, Saccharomyces pastorianus
ggcgccctcttactatggaatggac

SEQ ID NO: 8720 - DNA, 25 bp, Saccharomyces pastorianus
gcagcgagcaagatataccacccac

SEQ ID NO: 8721 - DNA, 25 bp, Saccharomyces pastorianus
ctggtcctttatctgctgtttatga

SEQ ID NO: 8722 - DNA, 25 bp, Saccharomyces pastorianus
ttttagcctatggtggtgctgcttt

SEQ ID NO: 8723 - DNA, 25 bp, Saccharomyces pastorianus
aattatctgctgctattacgacggt

SEQ ID NO: 8724 - DNA, 25 bp, Saccharomyces pastorianus
ggttcttgactttaccaattgccgg

SEQ ID NO: 8725 - DNA, 25 bp, Saccharomyces pastorianus
aagttaatcttacaatcaccctcaa

SEQ ID NO: 8726 - DNA, 25 bp, Saccharomyces pastorianus
tcacggtgccaacgatgttgccaat

SEQ ID NO: 8727 - DNA, 25 bp, Saccharomyces pastorianus
gtattccgacttcaactactcaaat

SEQ ID NO: 8728 - DNA, 25 bp, Saccharomyces pastorianus
gaatcatccgatgttcctgtatggg

SEQ ID NO: 8729 - DNA, 25 bp, Saccharomyces pastorianus
agctactatgtctttcgctcacggt

SEQ ID NO: 8730 - DNA, 25 bp, Saccharomyces pastorianus
ttacgacggtcatggcaacccaatt

SEQ ID NO: 8731 - DNA, 25 bp, Saccharomyces pastorianus
caccctcaagaggtttctcgattga

SEQ ID NO: 8732 - DNA, 25 bp, Saccharomyces pastorianus
agggaccgctaatatctctaatcaa

SEQ ID NO: 8733 - DNA, 25 bp, Saccharomyces pastorianus
aaggcgtccctgcaattgaattggc

SEQ ID NO: 8734 - DNA, 25 bp, Saccharomyces pastorianus
agtatcgctacctcattagggaccg

SEQ ID NO: 8735 - DNA, 25 bp, Saccharomyces pastorianus
tattgcttgtggagggtcttctaac

SEQ ID NO: 8736 - DNA, 25 bp, Saccharomyces pastorianus
gggtcttctaacaccgtacaggatt

SEQ ID NO: 8737 - DNA, 25 bp, Saccharomyces pastorianus
cacgtcttcaacacttctctaagga

SEQ ID NO: 8738 - DNA, 25 bp, Saccharomyces pastorianus
cgcccgcaaatataacaccaagtct

SEQ ID NO: 8739 - DNA, 25 bp, Saccharomyces pastorianus
gagacaagaggctgccacgtcttca

SEQ ID NO: 8740 - DNA, 25 bp, Saccharomyces pastorianus
ggctgataacttcatctttccggaa

SEQ ID NO: 8741 - DNA, 25 bp, Saccharomyces pastorianus
ttactgaaccggcatgtggtgcctc

SEQ ID NO: 8742 - DNA, 25 bp, Saccharomyces pastorianus
aggacgtcatagagacctgtctgaa

SEQ ID NO: 8743 - DNA, 25 bp, Saccharomyces pastorianus
aaatcatttgcatccagaacagata

SEQ ID NO: 8744 - DNA, 25 bp, Saccharomyces pastorianus
agcatccatccgtaatcaaatcatt

SEQ ID NO: 8745 - DNA, 25 bp, Saccharomyces pastorianus
caaaggcttctatcacatatatggg

SEQ ID NO: 8746 - DNA, 25 bp, Saccharomyces pastorianus
gattcattcagttctaggacaacga

SEQ ID NO: 8747 - DNA, 25 bp, Saccharomyces pastorianus
gatcaatcgttagttggcgggttta

SEQ ID NO: 8748 - DNA, 25 bp, Saccharomyces pastorianus
ttatcatatctgaggatttcgttca

SEQ ID NO: 8749 - DNA, 25 bp, Saccharomyces pastorianus
gcgggtttaagcatccatccgtaat

SEQ ID NO: 8750 - DNA, 25 bp, Saccharomyces pastorianus
atcgttcacgaactcacaaacagat

SEQ ID NO: 8751 - DNA, 25 bp, Saccharomyces pastorianus
aggaggatcatcatcttcaccatac

SEQ ID NO: 8752 - DNA, 25 bp, Saccharomyces pastorianus
tggacaatgagctggcgaggataca

SEQ ID NO: 8753 - DNA, 25 bp, Saccharomyces pastorianus
acggcgaaggagatgttgcagattt

SEQ ID NO: 8754 - DNA, 25 bp, Saccharomyces pastorianus
gtcccattcccacaagctgttaaga

SEQ ID NO: 8755 - DNA, 25 bp, Saccharomyces pastorianus
gatgatatggcttgtgacgttatta

SEQ ID NO: 8756 - DNA, 25 bp, Saccharomyces pastorianus
agatcggaaatttcgtcaccaacaa

SEQ ID NO: 8757 - DNA, 25 bp, Saccharomyces pastorianus
aagaaagtctatactccattcccac

SEQ ID NO: 8758 - DNA, 25 bp, Saccharomyces pastorianus
tccgccgagtcgtggaagactgtat

SEQ ID NO: 8759 - DNA, 25 bp, Saccharomyces pastorianus
gaactggctaacgaagattggtcaa

SEQ ID NO: 8760 - DNA, 25 bp, Saccharomyces pastorianus
ccacctgctcaactacctagaaagg

SEQ ID NO: 8761 - DNA, 25 bp, Saccharomyces pastorianus
gcttaaaggaagtccgccgagtcgt

SEQ ID NO: 8762 - DNA, 25 bp, Saccharomyces pastorianus
tgttcaccccatctatcatatcaaa

SEQ ID NO: 8763 - DNA, 25 bp, Saccharomyces pastorianus
cacactaaaggctttggagcttcta

SEQ ID NO: 8764 - DNA, 25 bp, Saccharomyces pastorianus
catgggccccttcaaaggcttaaag

SEQ ID NO: 8765 - DNA, 25 bp, Saccharomyces pastorianus
ggttacgctgaaggcgatgccatct

SEQ ID NO: 8766 - DNA, 25 bp, Saccharomyces pastorianus
gtgtccacagtccttgacgccaagt

SEQ ID NO: 8767 - DNA, 25 bp, Saccharomyces pastorianus
ttccccgcatggctgggcattggat

SEQ ID NO: 8768 - DNA, 25 bp, Saccharomyces pastorianus
tgttgttctttaaacgccgtgcttt

SEQ ID NO: 8769 - DNA, 25 bp, Saccharomyces pastorianus
cgtcctgtccaatatgctggtcaaa

SEQ ID NO: 8770 - DNA, 25 bp, Saccharomyces pastorianus
acaccctccaacaactctaaagaga

SEQ ID NO: 8771 - DNA, 25 bp, Saccharomyces pastorianus
gaacaagcacaagcaccagcgaaaa

SEQ ID NO: 8772 - DNA, 25 bp, Saccharomyces pastorianus
aaagagaacggcagcgccgtgtcca

SEQ ID NO: 8773 - DNA, 25 bp, Saccharomyces pastorianus
gtgtgttcacttcagtgttgttctt

SEQ ID NO: 8774 - DNA, 25 bp, Saccharomyces pastorianus
gacgccaagtgggacatcgtcctgt

SEQ ID NO: 8775 - DNA, 25 bp, Saccharomyces pastorianus
gttcggcatcggtgtgttcacttca

SEQ ID NO: 8776 - DNA, 25 bp, Saccharomyces pastorianus
gatatctctttgatgtccaatggcg

SEQ ID NO: 8777 - DNA, 25 bp, Saccharomyces pastorianus
acggtattcatgacctagtgggcca

SEQ ID NO: 8778 - DNA, 25 bp, Saccharomyces pastorianus
gatattacggttacttgtgggcaga

SEQ ID NO: 8779 - DNA, 25 bp, Saccharomyces pastorianus
aagggttatgcttccttcggtcaca

SEQ ID NO: 8780 - DNA, 25 bp, Saccharomyces pastorianus
gtccaatggcggtactttatccaag

SEQ ID NO: 8781 - DNA, 25 bp, Saccharomyces pastorianus
gtcaacggtgccttattcactttaa

SEQ ID NO: 8782 - DNA, 25 bp, Saccharomyces pastorianus
ggaagcaccttctcaaatgttggaa

SEQ ID NO: 8783 - DNA, 25 bp, Saccharomyces pastorianus
cccgtggtggtcttcgtgatattaa

SEQ ID NO: 8784 - DNA, 25 bp, Saccharomyces pastorianus
agattcaatggtcccggatctgttc

SEQ ID NO: 8785 - DNA, 25 bp, Saccharomyces pastorianus
gaattggtgcatctatcatcgcatt

SEQ ID NO: 8786 - DNA, 25 bp, Saccharomyces pastorianus
tactaaattcgccaaggatccccta

SEQ ID NO: 8787 - DNA, 25 bp, Saccharomyces pastorianus
tggatcccaaggaaaacaccggtga

SEQ ID NO: 8788 - DNA, 25 bp, Saccharomyces pastorianus
aacctgggcgtggtcgatgataacc

SEQ ID NO: 8789 - DNA, 25 bp, Saccharomyces pastorianus
tgttagattttttcgcagtattgga

SEQ ID NO: 8790 - DNA, 25 bp, Saccharomyces pastorianus
ctgtgttcaggtgcgtatggagact

SEQ ID NO: 8791 - DNA, 25 bp, Saccharomyces pastorianus
gatgataacctatacttgagtggga

SEQ ID NO: 8792 - DNA, 25 bp, Saccharomyces pastorianus
gaagagacccctggacaaaagtttg

SEQ ID NO: 8793 - DNA, 25 bp, Saccharomyces pastorianus
gttattcatggatctctgtgttcag

SEQ ID NO: 8794 - DNA, 25 bp, Saccharomyces pastorianus
gaatggtgtaagctcgttgttagat

SEQ ID NO: 8795 - DNA, 25 bp, Saccharomyces pastorianus
gtgaaatcggcagaagagacccctg

SEQ ID NO: 8796 - DNA, 25 bp, Saccharomyces pastorianus
tcacagccaatttagttcaagattt

SEQ ID NO: 8797 - DNA, 25 bp, Saccharomyces pastorianus
aagattaacgaacggctgaatggcc

SEQ ID NO: 8798 - DNA, 25 bp, Saccharomyces pastorianus
gaaaatttctctactgccactagaa

SEQ ID NO: 8799 - DNA, 25 bp, Saccharomyces pastorianus
gaagattgcatatcatccccgcaag

SEQ ID NO: 8800 - DNA, 25 bp, Saccharomyces pastorianus
ttaatctcgaaaccgggcttcctct

SEQ ID NO: 8801 - DNA, 25 bp, Saccharomyces pastorianus
gaaggacaccactaacggcgctgtg

SEQ ID NO: 8802 - DNA, 25 bp, Saccharomyces pastorianus
aagagttggtctttgtccctataga

SEQ ID NO: 8803 - DNA, 25 bp, Saccharomyces pastorianus
ggcttcctcttcatctgggctaatt

SEQ ID NO: 8804 - DNA, 25 bp, Saccharomyces pastorianus
agaaatcgccattttatcctggttt

SEQ ID NO: 8805 - DNA, 25 bp, Saccharomyces pastorianus
catcgcacctataccgtattgcaga

SEQ ID NO: 8806 - DNA, 25 bp, Saccharomyces pastorianus
gtttatctacccgattttgactcaa

SEQ ID NO: 8807 - DNA, 25 bp, Saccharomyces pastorianus
gaaggtctacggatggccatttaat

SEQ ID NO: 8808 - DNA, 25 bp, Saccharomyces pastorianus
ttgactcaacttcccctggataaat

SEQ ID NO: 8809 - DNA, 25 bp, Saccharomyces pastorianus
gaatttgacgaacgcccacaatgta

SEQ ID NO: 8810 - DNA, 25 bp, Saccharomyces pastorianus
aatgcacttgcaactaccgttggaa

SEQ ID NO: 8811 - DNA, 25 bp, Saccharomyces pastorianus
actttgttgtgcctactcatctcta

SEQ ID NO: 8812 - DNA, 25 bp, Saccharomyces pastorianus
agcccgcaacccattctataagaag

SEQ ID NO: 8813 - DNA, 25 bp, Saccharomyces pastorianus
atcgtgtaccttctctctaagatat

SEQ ID NO: 8814 - DNA, 25 bp, Saccharomyces pastorianus
acgacacttcgttccgtcatttgaa

SEQ ID NO: 8815 - DNA, 25 bp, Saccharomyces pastorianus
aacacaactacgctttctgtgccga

SEQ ID NO: 8816 - DNA, 25 bp, Saccharomyces pastorianus
tgggttgcatccaaaggtcttgatt

SEQ ID NO: 8817 - DNA, 25 bp, Saccharomyces pastorianus
cccttactactctttggtgaacacg

SEQ ID NO: 8818 - DNA, 25 bp, Saccharomyces pastorianus
gatatgagtctctcttcacggacga

SEQ ID NO: 8819 - DNA, 25 bp, Saccharomyces pastorianus
gtgccgatcccaagacctgatatga

SEQ ID NO: 8820 - DNA, 25 bp, Saccharomyces pastorianus
gatttggccttcaatttatctcaag

SEQ ID NO: 8821 - DNA, 25 bp, Saccharomyces pastorianus
cgagactggagatttggccttcaat

SEQ ID NO: 8822 - DNA, 25 bp, Saccharomyces pastorianus
cagttaaatcctgcacgcctgatgg

SEQ ID NO: 8823 - DNA, 25 bp, Saccharomyces pastorianus
gaatgcacgcatttgcaggtgatga

SEQ ID NO: 8824 - DNA, 25 bp, Saccharomyces pastorianus
atcggagcgggcaatagcgtagcaa

SEQ ID NO: 8825 - DNA, 25 bp, Saccharomyces pastorianus
caggcgatatggttgatttgtcttc

SEQ ID NO: 8826 - DNA, 25 bp, Saccharomyces pastorianus
atatgatgccaataacacgccaaaa

SEQ ID NO: 8827 - DNA, 25 bp, Saccharomyces pastorianus
tgtcttcattagtaacctcaccgag

SEQ ID NO: 8828 - DNA, 25 bp, Saccharomyces pastorianus
acattcttttgggtgaaccaggcga

SEQ ID NO: 8829 - DNA, 25 bp, Saccharomyces pastorianus
tgtaccattgcaacactcatcagtt

SEQ ID NO: 8830 - DNA, 25 bp, Saccharomyces pastorianus
aatggtcaatctctaccgttttcgg

SEQ ID NO: 8831 - DNA, 25 bp, Saccharomyces pastorianus
gttactgcggtatgatcctaaccaa

SEQ ID NO: 8832 - DNA, 25 bp, Saccharomyces pastorianus
ttcaaaggccttttccgaccaaatg

SEQ ID NO: 8833 - DNA, 25 bp, Saccharomyces pastorianus
ggatttgtatcgttccacgttcaaa

SEQ ID NO: 8834 - DNA, 25 bp, Saccharomyces pastorianus
tgtccccaactgacttattgactgc

SEQ ID NO: 8835 - DNA, 25 bp, Saccharomyces pastorianus
ttctttggaccacaagcatttgcag

SEQ ID NO: 8836 - DNA, 25 bp, Saccharomyces pastorianus
aacatttcttgccaactttcaacgc

SEQ ID NO: 8837 - DNA, 25 bp, Saccharomyces pastorianus
attggccatgtgttacatttccata

SEQ ID NO: 8838 - DNA, 25 bp, Saccharomyces pastorianus
tttcaacgccgaaccattgcaagat

SEQ ID NO: 8839 - DNA, 25 bp, Saccharomyces pastorianus
atttcgtcttgcctatgccagaatc

SEQ ID NO: 8840 - DNA, 25 bp, Saccharomyces pastorianus
aaattgctatgttctttggacgatg

SEQ ID NO: 8841 - DNA, 25 bp, Saccharomyces pastorianus
gaaagtttcgtttgctcatttcgtc

SEQ ID NO: 8842 - DNA, 25 bp, Saccharomyces pastorianus
cactctgtggtatctgttggactga

SEQ ID NO: 8843 - DNA, 25 bp, Saccharomyces pastorianus
caggagaaactacctcactctgtgg

SEQ ID NO: 8844 - DNA, 25 bp, Saccharomyces pastorianus
gaacagtttacccaaggtcgcaata

SEQ ID NO: 8845 - DNA, 25 bp, Saccharomyces pastorianus
gatgagaaatattaccaccccttaa

SEQ ID NO: 8846 - DNA, 25 bp, Saccharomyces pastorianus
aatctcatgttctcttgcttctagc

SEQ ID NO: 8847 - DNA, 25 bp, Saccharomyces pastorianus
gaaattcgaaccagtcatcccaaag

SEQ ID NO: 8848 - DNA, 25 bp, Saccharomyces pastorianus
taaaggatgaactaccaccctgcat

SEQ ID NO: 8849 - DNA, 25 bp, Saccharomyces pastorianus
ggactgactgtcttttcgaaattca

SEQ ID NO: 8850 - DNA, 25 bp, Saccharomyces pastorianus
gtccttcccacaccgtttagaaatg

SEQ ID NO: 8851 - DNA, 25 bp, Saccharomyces pastorianus
gggactgccatctaagtgcggaatc

SEQ ID NO: 8852 - DNA, 25 bp, Saccharomyces pastorianus
gataagttacctaaaccagcgtcct

SEQ ID NO: 8853 - DNA, 25 bp, Saccharomyces pastorianus
tgcgccgatcgtcccaattaatgat

SEQ ID NO: 8854 - DNA, 25 bp, Saccharomyces pastorianus
gacccgattccaagttaatttccat

SEQ ID NO: 8855 - DNA, 25 bp, Saccharomyces pastorianus
aagagtcacaccatcgggccagttt

SEQ ID NO: 8856 - DNA, 25 bp, Saccharomyces pastorianus
agacgaacgtttctccaacacaaga

SEQ ID NO: 8857 - DNA, 25 bp, Saccharomyces pastorianus
atctgggccatgatgttttctgtac

SEQ ID NO: 8858 - DNA, 25 bp, Saccharomyces pastorianus
tcgctaaacagtatattttccccga

SEQ ID NO: 8859 - DNA, 25 bp, Saccharomyces pastorianus
aaaggaatttatggccgccccatat

SEQ ID NO: 8860 - DNA, 25 bp, Saccharomyces pastorianus
ttatacgaatcactaacgccagacg

SEQ ID NO: 8861 - DNA, 25 bp, Saccharomyces pastorianus
gaaatctaatactgggacccgattc

SEQ ID NO: 8862 - DNA, 25 bp, Saccharomyces pastorianus
caagtatcatctgcgatctgggcca

SEQ ID NO: 8863 - DNA, 25 bp, Saccharomyces pastorianus
ataacatattttatccgcccttctg

SEQ ID NO: 8864 - DNA, 25 bp, Saccharomyces pastorianus
aaagagactgcatttcctggcatcc

SEQ ID NO: 8865 - DNA, 25 bp, Saccharomyces pastorianus
ggccttggaaacttctctaagcata

SEQ ID NO: 8866 - DNA, 25 bp, Saccharomyces pastorianus
atcgctgtacgatccgtggatgact

SEQ ID NO: 8867 - DNA, 25 bp, Saccharomyces pastorianus
catcatcaggtggttcggacccttg

SEQ ID NO: 8868 - DNA, 25 bp, Saccharomyces pastorianus
agcataaaattcatacccaccacta

SEQ ID NO: 8869 - DNA, 25 bp, Saccharomyces pastorianus
aacaccatgctttcacgaggagtcg

SEQ ID NO: 8870 - DNA, 25 bp, Saccharomyces pastorianus
aacgctccgcaagatatagacctag

SEQ ID NO: 8871 - DNA, 25 bp, Saccharomyces pastorianus
aggcctggaagacctttccgagtgt

SEQ ID NO: 8872 - DNA, 25 bp, Saccharomyces pastorianus
gagctgatcaactcgatatcccagt

SEQ ID NO: 8873 - DNA, 25 bp, Saccharomyces pastorianus
aaacatccccgaggtcaagcagagc

SEQ ID NO: 8874 - DNA, 25 bp, Saccharomyces pastorianus
ggaggcacaaaaccccatcatcagg

SEQ ID NO: 8875 - DNA, 25 bp, Saccharomyces pastorianus
gctgcagcagtaccgctccaaggag

SEQ ID NO: 8876 - DNA, 25 bp, Saccharomyces pastorianus
gagttgtcgttgctgcagagcctca

SEQ ID NO: 8877 - DNA, 25 bp, Saccharomyces pastorianus
gtacgacatcgtgattgaccagaaa

SEQ ID NO: 8878 - DNA, 25 bp, Saccharomyces pastorianus
cggagcgcgtgcagatccagaagct

SEQ ID NO: 8879 - DNA, 25 bp, Saccharomyces pastorianus
ggaacatccttgtggacctgcattc

SEQ ID NO: 8880 - DNA, 25 bp, Saccharomyces pastorianus
aacgagttgaaacacttgcccacga

SEQ ID NO: 8881 - DNA, 25 bp, Saccharomyces pastorianus
gttccagctgtcgagcgaggtgcta

SEQ ID NO: 8882 - DNA, 25 bp, Saccharomyces pastorianus
ggtgctatcgcacatcgagatcgac

SEQ ID NO: 8883 - DNA, 25 bp, Saccharomyces pastorianus
agaagcgtgtgtccggtatgttcct

SEQ ID NO: 8884 - DNA, 25 bp, Saccharomyces pastorianus
ccgctggctgctatcttgatcaaga

SEQ ID NO: 8885 - DNA, 25 bp, Saccharomyces pastorianus
aagattgccaaggacggctccggtg

SEQ ID NO: 8886 - DNA, 25 bp, Saccharomyces pastorianus
gacgacaactacgtgcttttaatga

SEQ ID NO: 8887 - DNA, 25 bp, Saccharomyces pastorianus
gggttcccctccagagaaatgctat

SEQ ID NO: 8888 - DNA, 25 bp, Saccharomyces pastorianus
tgacctgcatgtcactaccactgaa

SEQ ID NO: 8889 - DNA, 25 bp, Saccharomyces pastorianus
gtgaagatcagctacgacgacaact

SEQ ID NO: 8890 - DNA, 25 bp, Saccharomyces pastorianus
gaggacgacgaagctttcccgcgcg

SEQ ID NO: 8891 - DNA, 25 bp, Saccharomyces pastorianus
caagattgtcatgagcgggtccgaa

SEQ ID NO: 8892 - DNA, 25 bp, Saccharomyces pastorianus
caccagggcattgtcgatgtctacg

SEQ ID NO: 8893 - DNA, 25 bp, Saccharomyces pastorianus
aaccgaatctcaacatttggtcttg

SEQ ID NO: 8894 - DNA, 25 bp, Saccharomyces pastorianus
gtcgcgagactggacattggcaaaa

SEQ ID NO: 8895 - DNA, 25 bp, Saccharomyces pastorianus
cgatgtctacgattttagcgggttc

SEQ ID NO: 8896 - DNA, 25 bp, Saccharomyces pastorianus
tcttgattccaagagtcgcgagact

SEQ ID NO: 8897 - DNA, 25 bp, Saccharomyces pastorianus
gacagaactacatatgagcaccctt

SEQ ID NO: 8898 - DNA, 25 bp, Saccharomyces pastorianus
ggtggtcatccaatcaaaccttgat

SEQ ID NO: 8899 - DNA, 25 bp, Saccharomyces pastorianus
attccgcagttcctggcgacaaaat

SEQ ID NO: 8900 - DNA, 25 bp, Saccharomyces pastorianus
acggcaattttattctccaagacag

SEQ ID NO: 8901 - DNA, 25 bp, Saccharomyces pastorianus
taccacgataaactctacggcaatt

SEQ ID NO: 8902 - DNA, 25 bp, Saccharomyces pastorianus
aatgccatgctaggcgcttttgtca

SEQ ID NO: 8903 - DNA, 25 bp, Saccharomyces pastorianus
atgatcttccttgttgcgtggttta

SEQ ID NO: 8904 - DNA, 25 bp, Saccharomyces pastorianus
ttatcattaggtgggttgtccgccg

SEQ ID NO: 8905 - DNA, 25 bp, Saccharomyces pastorianus
gacaaaattccggtggtcatccaat

SEQ ID NO: 8906 - DNA, 25 bp, Saccharomyces pastorianus
cattagcgattccattaccacgata

SEQ ID NO: 8907 - DNA, 25 bp, Saccharomyces pastorianus
gagcacccttaacctaatcatgata

SEQ ID NO: 8908 - DNA, 25 bp, Saccharomyces pastorianus
aaaactcgctgatcgggttgcccaa

SEQ ID NO: 8909 - DNA, 25 bp, Saccharomyces pastorianus
aaggaggcacccaggatcaggctca

SEQ ID NO: 8910 - DNA, 25 bp, Saccharomyces pastorianus
acgatgagttggttgctgctttgac

SEQ ID NO: 8911 - DNA, 25 bp, Saccharomyces pastorianus
atgcgggtctttaccaaatgggcct

SEQ ID NO: 8912 - DNA, 25 bp, Saccharomyces pastorianus
actttgtaccagtccggatcactaa

SEQ ID NO: 8913 - DNA, 25 bp, Saccharomyces pastorianus
gtggccgctcaaacttcatggatga

SEQ ID NO: 8914 - DNA, 25 bp, Saccharomyces pastorianus
gaagtgctcaggatgacgccgccga

SEQ ID NO: 8915 - DNA, 25 bp, Saccharomyces pastorianus
tagatacctgcaactggtcaccgag

SEQ ID NO: 8916 - DNA, 25 bp, Saccharomyces pastorianus
aacagcaggtacatcgacagcgact

SEQ ID NO: 8917 - DNA, 25 bp, Saccharomyces pastorianus
ggctaagtgctccacggacgacgaa

SEQ ID NO: 8918 - DNA, 25 bp, Saccharomyces pastorianus
ggatgaccatgactcgtacaacgat

SEQ ID NO: 8919 - DNA, 25 bp, Saccharomyces pastorianus
aatacgcacggagccttgactgcag

SEQ ID NO: 8920 - DNA, 25 bp, Saccharomyces pastorianus
ggtatttagacagcccagtctctct

SEQ ID NO: 8921 - DNA, 25 bp, Saccharomyces pastorianus
gtctctctcataccaaatcatcatt

SEQ ID NO: 8922 - DNA, 25 bp, Saccharomyces pastorianus
gagaggctgctggaactgaacgaaa

SEQ ID NO: 8923 - DNA, 25 bp, Saccharomyces pastorianus
agcgccttcgtcaagcaacacaatt

SEQ ID NO: 8924 - DNA, 25 bp, Saccharomyces pastorianus
ggaccgtcacccaatgaggcattaa

SEQ ID NO: 8925 - DNA, 25 bp, Saccharomyces pastorianus
ttgcgtgcttctaaagaggactcgt

SEQ ID NO: 8926 - DNA, 25 bp, Saccharomyces pastorianus
tgcccctaccacaaacggaatattt

SEQ ID NO: 8927 - DNA, 25 bp, Saccharomyces pastorianus
ggtttgcacccagctattatgttaa

SEQ ID NO: 8928 - DNA, 25 bp, Saccharomyces pastorianus
tattttgacacagctcacaaccgac

SEQ ID NO: 8929 - DNA, 25 bp, Saccharomyces pastorianus
ttggaggcagtatgtcttggtcatc

SEQ ID NO: 8930 - DNA, 25 bp, Saccharomyces pastorianus
caacgatgagtttggtttacacgaa

SEQ ID NO: 8931 - DNA, 25 bp, Saccharomyces pastorianus
gatgtctactgctgacgttaacgaa

SEQ ID NO: 8932 - DNA, 25 bp, Saccharomyces pastorianus
gaagtggacttatccgcgttgacct

SEQ ID NO: 8933 - DNA, 25 bp, Saccharomyces pastorianus
gaagacattcacacgcatatgatgg

SEQ ID NO: 8934 - DNA, 25 bp, Saccharomyces pastorianus
acaggttccaagtcagagagcataa

SEQ ID NO: 8935 - DNA, 25 bp, Saccharomyces pastorianus
gcaagatttctacaggttccaagtc

SEQ ID NO: 8936 - DNA, 25 bp, Saccharomyces pastorianus
ggctaagccagtttccaatattgac

SEQ ID NO: 8937 - DNA, 25 bp, Saccharomyces pastorianus
gcgttgacctctgacttgatgtcta

SEQ ID NO: 8938 - DNA, 25 bp, Saccharomyces pastorianus
tgagtggacatataccaccccatct

SEQ ID NO: 8939 - DNA, 25 bp, Saccharomyces pastorianus
atctttcaccactttcattaatttc

SEQ ID NO: 8940 - DNA, 25 bp, Saccharomyces pastorianus
attccaatttccatgctaaacaccc

SEQ ID NO: 8941 - DNA, 25 bp, Saccharomyces pastorianus
gaagctctcgaaatgtccaacaaat

SEQ ID NO: 8942 - DNA, 25 bp, Saccharomyces pastorianus
ggttgacaacgcaggttccgtgttc

SEQ ID NO: 8943 - DNA, 25 bp, Saccharomyces pastorianus
gtacaatcattctttgcgatggtta

SEQ ID NO: 8944 - DNA, 25 bp, Saccharomyces pastorianus
atgcctgctggtccaagtgaagttc

SEQ ID NO: 8945 - DNA, 25 bp, Saccharomyces pastorianus
tgttcgcaaatgtatcgctcatagt

SEQ ID NO: 8946 - DNA, 25 bp, Saccharomyces pastorianus
tactaaccacactttaccaacatac

SEQ ID NO: 8947 - DNA, 25 bp, Saccharomyces pastorianus
agaaattcaagatgccgtccacgat

SEQ ID NO: 8948 - DNA, 25 bp, Saccharomyces pastorianus
aagctatgcaactgccacgtgtaga

SEQ ID NO: 8949 - DNA, 25 bp, Saccharomyces pastorianus
agagctgtcatgtgtgttgccaaga

SEQ ID NO: 8950 - DNA, 25 bp, Saccharomyces pastorianus
gcagatgcagattttgtggccagtg

SEQ ID NO: 8951 - DNA, 25 bp, Saccharomyces pastorianus
ggttccgtgttcgtgggtgcttaca

SEQ ID NO: 8952 - DNA, 25 bp, Saccharomyces pastorianus
ggaattattctcgaccaaaccacag

SEQ ID NO: 8953 - DNA, 25 bp, Saccharomyces pastorianus
acaggactcctcctcttcggaagag

SEQ ID NO: 8954 - DNA, 25 bp, Saccharomyces pastorianus
ggctcaagaccatccaaccgtggaa

SEQ ID NO: 8955 - DNA, 25 bp, Saccharomyces pastorianus
atgggccatatgacagccgagtgcc

SEQ ID NO: 8956 - DNA, 25 bp, Saccharomyces pastorianus
aacccaccgacagcagcgaagatat

SEQ ID NO: 8957 - DNA, 25 bp, Saccharomyces pastorianus
gcgaagatatcgaactcctgaagag

SEQ ID NO: 8958 - DNA, 25 bp, Saccharomyces pastorianus
gtggaatccttacccattttcgatc

SEQ ID NO: 8959 - DNA, 25 bp, Saccharomyces pastorianus
aatgggccaaggaacgcgagcaatt

SEQ ID NO: 8960 - DNA, 25 bp, Saccharomyces pastorianus
ggtggcagccttaacgaaaagtctt

SEQ ID NO: 8961 - DNA, 25 bp, Saccharomyces pastorianus
tgagcaactgcttgctgtcgtaagc

SEQ ID NO: 8962 - DNA, 25 bp, Saccharomyces pastorianus
agaccaattcgagttgcacaagacg

SEQ ID NO: 8963 - DNA, 25 bp, Saccharomyces pastorianus
aactcagtccaaccagcaacagtat

SEQ ID NO: 8964 - DNA, 25 bp, Saccharomyces pastorianus
aaccagaactctaactcgaactcga

SEQ ID NO: 8965 - DNA, 25 bp, Saccharomyces pastorianus
atggctagttcctacttgggcaaca

SEQ ID NO: 8966 - DNA, 25 bp, Saccharomyces pastorianus
caaagtcaagggtccggtggctcgt

SEQ ID NO: 8967 - DNA, 25 bp, Saccharomyces pastorianus
agcaacagggtcactcgggttcatt

SEQ ID NO: 8968 - DNA, 25 bp, Saccharomyces pastorianus
gcaacctctttcatgcattctgata

SEQ ID NO: 8969 - DNA, 25 bp, Saccharomyces pastorianus
ggtggcaaccagaactctaacggca

SEQ ID NO: 8970 - DNA, 25 bp, Saccharomyces pastorianus
aacgattctttcaacttctctggta

SEQ ID NO: 8971 - DNA, 25 bp, Saccharomyces pastorianus
caatccggtactttttcctcattgg

SEQ ID NO: 8972 - DNA, 25 bp, Saccharomyces pastorianus
ggccaacaccaatccaacgagtatg

SEQ ID NO: 8973 - DNA, 25 bp, Saccharomyces pastorianus
atggctcaatcttacctaggtggac

SEQ ID NO: 8974 - DNA, 25 bp, Saccharomyces pastorianus
ccaaaccgtgccatcattttaactg

SEQ ID NO: 8975 - DNA, 25 bp, Saccharomyces pastorianus
aaagacatccactctgttgttcaga

SEQ ID NO: 8976 - DNA, 25 bp, Saccharomyces pastorianus
gtcatctacaacactacaacggcta

SEQ ID NO: 8977 - DNA, 25 bp, Saccharomyces pastorianus
caattcgtgggtcgctttggaagcc

SEQ ID NO: 8978 - DNA, 25 bp, Saccharomyces pastorianus
taaagccggaactacctggtgagat

SEQ ID NO: 8979 - DNA, 25 bp, Saccharomyces pastorianus
ggtgctgctcagatcaattcgtggg

SEQ ID NO: 8980 - DNA, 25 bp, Saccharomyces pastorianus
aagccatgggtttgggcggtcatct

SEQ ID NO: 8981 - DNA, 25 bp, Saccharomyces pastorianus
acggtatcgagagtcccgacggcaa

SEQ ID NO: 8982 - DNA, 25 bp, Saccharomyces pastorianus
agacgaagccttcggttccgtgata

SEQ ID NO: 8983 - DNA, 25 bp, Saccharomyces pastorianus
ttaaaggcggacttcccagcttacg

SEQ ID NO: 8984 - DNA, 25 bp, Saccharomyces pastorianus
gcaagctcaattggtcttcggtact

SEQ ID NO: 8985 - DNA, 25 bp, Saccharomyces pastorianus
ttgccaccattttatctgctgctat

SEQ ID NO: 8986 - DNA, 25 bp, Saccharomyces pastorianus
atggttcagccccagatttgccaaa

SEQ ID NO: 8987 - DNA, 25 bp, Saccharomyces pastorianus
aaccaccattacctatctggtcctt

SEQ ID NO: 8988 - DNA, 25 bp, Saccharomyces pastorianus
acaaagttaaccctattgccaccat

SEQ ID NO: 8989 - DNA, 25 bp, Saccharomyces pastorianus
gaagcttcttgtattcctggttcat

SEQ ID NO: 8990 - DNA, 25 bp, Saccharomyces pastorianus
gattctgctgccatgattttagtca

SEQ ID NO: 8991 - DNA, 25 bp, Saccharomyces pastorianus
ttcctggttcattgggtttgttgcc

SEQ ID NO: 8992 - DNA, 25 bp, Saccharomyces pastorianus
aatggctgcgttcatggcactacaa

SEQ ID NO: 8993 - DNA, 25 bp, Saccharomyces pastorianus
caatgttttggcctcatcaagacta

SEQ ID NO: 8994 - DNA, 25 bp, Saccharomyces pastorianus
gacaagaacactgccttcggtttat

SEQ ID NO: 8995 - DNA, 25 bp, Saccharomyces pastorianus
ctccttagcttctttgccagacaag

SEQ ID NO: 8996 - DNA, 25 bp, Saccharomyces pastorianus
atgatgctttggctcattcttccat

SEQ ID NO: 8997 - DNA, 25 bp, Saccharomyces pastorianus
ggtccaaaaggtatcggtgccatct

SEQ ID NO: 8998 - DNA, 25 bp, Saccharomyces pastorianus
atctgccgagcatactacattgaat

SEQ ID NO: 8999 - DNA, 25 bp, Saccharomyces pastorianus
attgaatggatctcccgatcatcgt

SEQ ID NO: 9000 - DNA, 25 bp, Saccharomyces pastorianus
gtcaacggtttgttatctgccgagc

SEQ ID NO: 9001 - DNA, 25 bp, Saccharomyces pastorianus
ctatgtcgttaaggccgttgctgat

SEQ ID NO: 9002 - DNA, 25 bp, Saccharomyces pastorianus
ggtgagtctctattaatggcactaa

SEQ ID NO: 9003 - DNA, 25 bp, Saccharomyces pastorianus
gactagaaccattgctatccggtgg

SEQ ID NO: 9004 - DNA, 25 bp, Saccharomyces pastorianus
taacgtttcatttgcctatgtggaa

SEQ ID NO: 9005 - DNA, 25 bp, Saccharomyces pastorianus
aggaactttagcacctccattggta

SEQ ID NO: 9006 - DNA, 25 bp, Saccharomyces pastorianus
gatctattatccatttcgtcccata

SEQ ID NO: 9007 - DNA, 25 bp, Saccharomyces pastorianus
ctattcaagttgcagtcccagtgga

SEQ ID NO: 9008 - DNA, 25 bp, Saccharomyces pastorianus
aaagccttacacgtgttgctgatga

SEQ ID NO: 9009 - DNA, 25 bp, Saccharomyces pastorianus
ggtacggcattcaggcgctacggaa

SEQ ID NO: 9010 - DNA, 25 bp, Saccharomyces pastorianus
cgtttcagggacaagcatgccactt

SEQ ID NO: 9011 - DNA, 25 bp, Saccharomyces pastorianus
aggataccctttattgcccagtggt

SEQ ID NO: 9012 - DNA, 25 bp, Saccharomyces pastorianus
gcgtgctatgtattctctcgcagaa

SEQ ID NO: 9013 - DNA, 25 bp, Saccharomyces pastorianus
gaaacgtggcgcttaaggataccct

SEQ ID NO: 9014 - DNA, 25 bp, Saccharomyces pastorianus
gagatgcttcgaggctaccacttca

SEQ ID NO: 9015 - DNA, 25 bp, Saccharomyces pastorianus
gagcggttcagagtcctattcaagt

SEQ ID NO: 9016 - DNA, 25 bp, Saccharomyces pastorianus
ggaatcgctggatctgcaacgtttg

SEQ ID NO: 9017 - DNA, 25 bp, Saccharomyces pastorianus
tatgtagccagaagtaccctgccga

SEQ ID NO: 9018 - DNA, 25 bp, Saccharomyces pastorianus
acagtaccagctaaccctacaaaag

SEQ ID NO: 9019 - DNA, 25 bp, Saccharomyces pastorianus
gacgaacgcgttgttatctaaggat

SEQ ID NO: 9020 - DNA, 25 bp, Saccharomyces pastorianus
acgatgaacctatctgggtttcgcc

SEQ ID NO: 9021 - DNA, 25 bp, Saccharomyces pastorianus
gccagaacgtaatgctgttccctta

SEQ ID NO: 9022 - DNA, 25 bp, Saccharomyces pastorianus
ggcccattagtatatgttcttcccg

SEQ ID NO: 9023 - DNA, 25 bp, Saccharomyces pastorianus
gacactgcgcaaaacagaccggctg

SEQ ID NO: 9024 - DNA, 25 bp, Saccharomyces pastorianus
gggatgggcgtcttcaaaatacaga

SEQ ID NO: 9025 - DNA, 25 bp, Saccharomyces pastorianus
gactaaagcattgtcgccagaacgt

SEQ ID NO: 9026 - DNA, 25 bp, Saccharomyces pastorianus
aggatgtttcctatgcatatttgac

SEQ ID NO: 9027 - DNA, 25 bp, Saccharomyces pastorianus
gagtccgggattagataacgttaca

SEQ ID NO: 9028 - DNA, 25 bp, Saccharomyces pastorianus
tgggtttcgcccagtaaaattgact

SEQ ID NO: 9029 - DNA, 25 bp, Saccharomyces pastorianus
tcgacttattcggacccattggtaa

SEQ ID NO: 9030 - DNA, 25 bp, Saccharomyces pastorianus
aatgtggacgcgttttacgcgccga

SEQ ID NO: 9031 - DNA, 25 bp, Saccharomyces pastorianus
tgagagccatcgacacattcaacgg

SEQ ID NO: 9032 - DNA, 25 bp, Saccharomyces pastorianus
gatgctgaaccagatcttgtgcaag

SEQ ID NO: 9033 - DNA, 25 bp, Saccharomyces pastorianus
gaccgttataaccaagatccgcaag

SEQ ID NO: 9034 - DNA, 25 bp, Saccharomyces pastorianus
agatattaccgtgcacgttgatgaa

SEQ ID NO: 9035 - DNA, 25 bp, Saccharomyces pastorianus
atggccaaccgacaggtgttgctgt

SEQ ID NO: 9036 - DNA, 25 bp, Saccharomyces pastorianus
tggatccgttatttaccccacaaag

SEQ ID NO: 9037 - DNA, 25 bp, Saccharomyces pastorianus
tacgcgccgatgttgaactggattt

SEQ ID NO: 9038 - DNA, 25 bp, Saccharomyces pastorianus
tactgaaggtgtcaacccaggtgga

SEQ ID NO: 9039 - DNA, 25 bp, Saccharomyces pastorianus
aagatccgcaagaccctgaagaaga

SEQ ID NO: 9040 - DNA, 25 bp, Saccharomyces pastorianus
actttctatcctgcaatcgtcattg

SEQ ID NO: 9041 - DNA, 25 bp, Saccharomyces pastorianus
tgaagttagagaccctgagccagac

SEQ ID NO: 9042 - DNA, 25 bp, Saccharomyces pastorianus
ggcaattcgggcaaggttttcaagt

SEQ ID NO: 9043 - DNA, 25 bp, Saccharomyces pastorianus
aatgccgatggcgaatggatccagt

SEQ ID NO: 9044 - DNA, 25 bp, Saccharomyces pastorianus
ggcaccaggcaaagcaccaggcaaa

SEQ ID NO: 9045 - DNA, 25 bp, Saccharomyces pastorianus
agtacaacccaagtgctccgatttt

SEQ ID NO: 9046 - DNA, 25 bp, Saccharomyces pastorianus
gccaggcttccctactaaaaactat

SEQ ID NO: 9047 - DNA, 25 bp, Saccharomyces pastorianus
gaaagagctgttactgattccgcca

SEQ ID NO: 9048 - DNA, 25 bp, Saccharomyces pastorianus
gtaccctgaaaccacgactttctat

SEQ ID NO: 9049 - DNA, 25 bp, Saccharomyces pastorianus
tatccgccaggcacgaaagtcttgg

SEQ ID NO: 9050 - DNA, 25 bp, Saccharomyces pastorianus
gaaagtcttggcaaggtaccctgaa

SEQ ID NO: 9051 - DNA, 25 bp, Saccharomyces pastorianus
gaatgaccatcgtcttgcaaggcca

SEQ ID NO: 9052 - DNA, 25 bp, Saccharomyces pastorianus
aacaacttcggtggtcgtgtcgtcg

SEQ ID NO: 9053 - DNA, 25 bp, Saccharomyces pastorianus
atggccagaatctccttgctaggta

SEQ ID NO: 9054 - DNA, 25 bp, Saccharomyces pastorianus
gaaaccagctgtatcgtcgagcttt

SEQ ID NO: 9055 - DNA, 25 bp, Saccharomyces pastorianus
tgcccgccagtgagatcttaaggtt

SEQ ID NO: 9056 - DNA, 25 bp, Saccharomyces pastorianus
ggcactgccaagaactcctttaaag

SEQ ID NO: 9057 - DNA, 25 bp, Saccharomyces pastorianus
gagcacttgaacgacgtcaccaatt

SEQ ID NO: 9058 - DNA, 25 bp, Saccharomyces pastorianus
agaagcggtatgatggcactgccaa

SEQ ID NO: 9059 - DNA, 25 bp, Saccharomyces pastorianus
tgagccattcggtgttctagagtgt

SEQ ID NO: 9060 - DNA, 25 bp, Saccharomyces pastorianus
tactttgaagacctgctgttgcacc

SEQ ID NO: 9061 - DNA, 25 bp, Saccharomyces pastorianus
ttccgccttcttgaagctggttgag

SEQ ID NO: 9062 - DNA, 25 bp, Saccharomyces pastorianus
gtgttccattccatttgcggtgtgc

SEQ ID NO: 9063 - DNA, 25 bp, Saccharomyces pastorianus
acaggttctttgagcgtgtctccac

SEQ ID NO: 9064 - DNA, 25 bp, Saccharomyces pastorianus
gtggactactacgtggtcttgacgc

SEQ ID NO: 9065 - DNA, 25 bp, Saccharomyces pastorianus
ccatgcgcatgtcaagccttggtaa

SEQ ID NO: 9066 - DNA, 25 bp, Saccharomyces pastorianus
gaccctaatgtctctttccaataga

SEQ ID NO: 9067 - DNA, 25 bp, Saccharomyces pastorianus
gtgtctccactaccattatcaacat

SEQ ID NO: 9068 - DNA, 25 bp, Saccharomyces pastorianus
tgtatcgtcttgttgctcacacggg

SEQ ID NO: 9069 - DNA, 25 bp, Saccharomyces pastorianus
tgcccagtgtgtatgtcagtctcga

SEQ ID NO: 9070 - DNA, 25 bp, Saccharomyces pastorianus
ggtggcattatagggctcatctccg

SEQ ID NO: 9071 - DNA, 25 bp, Saccharomyces pastorianus
aaacaatggctacatgactccctgt

SEQ ID NO: 9072 - DNA, 25 bp, Saccharomyces pastorianus
ggaagccatggtttgcaccggtaca

SEQ ID NO: 9073 - DNA, 25 bp, Saccharomyces pastorianus
acacctctatttcttggacattcac

SEQ ID NO: 9074 - DNA, 25 bp, Saccharomyces pastorianus
aaaaggtatctggatctcgtctcgt

SEQ ID NO: 9075 - DNA, 25 bp, Saccharomyces pastorianus
tggaaacccttcataaccgtaatag

SEQ ID NO: 9076 - DNA, 25 bp, Saccharomyces pastorianus
tacctggtgcctacttatacttatc

SEQ ID NO: 9077 - DNA, 25 bp, Saccharomyces pastorianus
tggatctcgtctcgtgacaacaacg

SEQ ID NO: 9078 - DNA, 25 bp, Saccharomyces pastorianus
tagccacaccggttactgaagcaaa

SEQ ID NO: 9079 - DNA, 25 bp, Saccharomyces pastorianus
tttgccaacggattttaccaatcga

SEQ ID NO: 9080 - DNA, 25 bp, Saccharomyces pastorianus
agatcaagctattacattacgggaa

SEQ ID NO: 9081 - DNA, 25 bp, Saccharomyces pastorianus
caaatgtgataacggcatcgccctt

SEQ ID NO: 9082 - DNA, 25 bp, Saccharomyces pastorianus
aagagcctactcgttagatttggaa

SEQ ID NO: 9083 - DNA, 25 bp, Saccharomyces pastorianus
ggatacttcaatattctcccagaaa

SEQ ID NO: 9084 - DNA, 25 bp, Saccharomyces pastorianus
ggtgcttcaagcaacgccctaattg

SEQ ID NO: 9085 - DNA, 25 bp, Saccharomyces pastorianus
gtacttcgtgctgttattcttttta

SEQ ID NO: 9086 - DNA, 25 bp, Saccharomyces pastorianus
gatgggctgtattaggtggtctact

SEQ ID NO: 9087 - DNA, 25 bp, Saccharomyces pastorianus
ggccaattctactaatgtacttcgt

SEQ ID NO: 9088 - DNA, 25 bp, Saccharomyces pastorianus
gaagactacctgaattcaagttctg

SEQ ID NO: 9089 - DNA, 25 bp, Saccharomyces pastorianus
gatattcccgtattttggccaattc

SEQ ID NO: 9090 - DNA, 25 bp, Saccharomyces pastorianus
gtattatcactattctcgatcttcg

SEQ ID NO: 9091 - DNA, 25 bp, Saccharomyces pastorianus
attctcgatcttcgatattcccgta

SEQ ID NO: 9092 - DNA, 25 bp, Saccharomyces pastorianus
gccaccgtcatttccttagtattat

SEQ ID NO: 9093 - DNA, 25 bp, Saccharomyces pastorianus
agccctgacccaatgaacggtgctt

SEQ ID NO: 9094 - DNA, 25 bp, Saccharomyces pastorianus
actcctcacgccaaacagagatggg

SEQ ID NO: 9095 - DNA, 25 bp, Saccharomyces pastorianus
gtccatgctattctttattttttac

SEQ ID NO: 9096 - DNA, 25 bp, Saccharomyces pastorianus
taagtcgccttgatgtcgaagcttt

SEQ ID NO: 9097 - DNA, 25 bp, Saccharomyces pastorianus
tgatccgtactcatctacaagattt

SEQ ID NO: 9098 - DNA, 25 bp, Saccharomyces pastorianus
aacccgttggagtgcaattaatgtc

SEQ ID NO: 9099 - DNA, 25 bp, Saccharomyces pastorianus
tgaaacaacttcttacatacattat

SEQ ID NO: 9100 - DNA, 25 bp, Saccharomyces pastorianus
gttgatacacgagtccatgctattc

SEQ ID NO: 9101 - DNA, 25 bp, Saccharomyces pastorianus
gatctataatcccatttgctgttgt

SEQ ID NO: 9102 - DNA, 25 bp, Saccharomyces pastorianus
gagagagttcttgatccgtactcat

SEQ ID NO: 9103 - DNA, 25 bp, Saccharomyces pastorianus
agaacaacattctcagtatttacgt

SEQ ID NO: 9104 - DNA, 25 bp, Saccharomyces pastorianus
gaattaacagcccaacgtgagagat

SEQ ID NO: 9105 - DNA, 25 bp, Saccharomyces pastorianus
agaaaacgccaatagccgttcctca

SEQ ID NO: 9106 - DNA, 25 bp, Saccharomyces pastorianus
gaggaggacctttcagaattagatc

SEQ ID NO: 9107 - DNA, 25 bp, Saccharomyces pastorianus
gagccaatactctgtgcatgtactg

SEQ ID NO: 9108 - DNA, 25 bp, Saccharomyces pastorianus
gatatttggtaaacacttggcgctt

SEQ ID NO: 9109 - DNA, 25 bp, Saccharomyces pastorianus
aaggatttcttctccaataatggta

SEQ ID NO: 9110 - DNA, 25 bp, Saccharomyces pastorianus
aatggtatattgttggcagttccta

SEQ ID NO: 9111 - DNA, 25 bp, Saccharomyces pastorianus
tatggaaaacacacactgctaagga

SEQ ID NO: 9112 - DNA, 25 bp, Saccharomyces pastorianus
gacaaaagctttatggcccaggtaa

SEQ ID NO: 9113 - DNA, 25 bp, Saccharomyces pastorianus
acaagtgtccatcgtgtggccatta

SEQ ID NO: 9114 - DNA, 25 bp, Saccharomyces pastorianus
taatcggatggttaacgcctttggg

SEQ ID NO: 9115 - DNA, 25 bp, Saccharomyces pastorianus
ttgtacctgccaacgtaatcggatg

SEQ ID NO: 9116 - DNA, 25 bp, Saccharomyces pastorianus
actgtgtagggcagatacgtcatat

SEQ ID NO: 9117 - DNA, 25 bp, Saccharomyces pastorianus
tacaagaactccttcgccgaattgg

SEQ ID NO: 9118 - DNA, 25 bp, Saccharomyces pastorianus
actttggctggtcctgatggttcaa

SEQ ID NO: 9119 - DNA, 25 bp, Saccharomyces pastorianus
ctgatgacattcctgtggctactga

SEQ ID NO: 9120 - DNA, 25 bp, Saccharomyces pastorianus
aactgcctctgacgctgctaaaaga

SEQ ID NO: 9121 - DNA, 25 bp, Saccharomyces pastorianus
ggttcaagaactgcttctccattgg

SEQ ID NO: 9122 - DNA, 25 bp, Saccharomyces pastorianus
gaacgcacctgaaaagcctgatgac

SEQ ID NO: 9123 - DNA, 25 bp, Saccharomyces pastorianus
ctttgcctgatgaagtcctgactca

SEQ ID NO: 9124 - DNA, 25 bp, Saccharomyces pastorianus
tttgtcatatctagctcatcacggt

SEQ ID NO: 9125 - DNA, 25 bp, Saccharomyces pastorianus
aaagcagccggtgttttcgtcagta

SEQ ID NO: 9126 - DNA, 25 bp, Saccharomyces pastorianus
aagacaaaccaaacctgctgctgct

SEQ ID NO: 9127 - DNA, 25 bp, Saccharomyces pastorianus
gatcgagtacgatgccttcttgttc

SEQ ID NO: 9128 - DNA, 25 bp, Saccharomyces pastorianus
ctcacctagtgggatctgcattgtc

SEQ ID NO: 9129 - DNA, 25 bp, Saccharomyces pastorianus
tggtaacgtatctgcccatacatct

SEQ ID NO: 9130 - DNA, 25 bp, Saccharomyces pastorianus
gtagagtcattcctggttacggcca

SEQ ID NO: 9131 - DNA, 25 bp, Saccharomyces pastorianus
ggaatcgtcattctataccgtttta

SEQ ID NO: 9132 - DNA, 25 bp, Saccharomyces pastorianus
tgggttggctggtccattacacgga

SEQ ID NO: 9133 - DNA, 25 bp, Saccharomyces pastorianus
gaagtagcaccagccgtgttaaccg

SEQ ID NO: 9134 - DNA, 25 bp, Saccharomyces pastorianus
ggaccatttcccagattacgagcta

SEQ ID NO: 9135 - DNA, 25 bp, Saccharomyces pastorianus
tacacggacgtgctaaccaagaagt

SEQ ID NO: 9136 - DNA, 25 bp, Saccharomyces pastorianus
tgtcctgttacaatattacggctta

SEQ ID NO: 9137 - DNA, 25 bp, Saccharomyces pastorianus
tatttgtcccttgcatcgggtttaa

SEQ ID NO: 9138 - DNA, 25 bp, Saccharomyces pastorianus
aacgtggatgcccattcaggtgtcc

SEQ ID NO: 9139 - DNA, 25 bp, Saccharomyces pastorianus
gtctccatacattgccccggaagaa

SEQ ID NO: 9140 - DNA, 25 bp, Saccharomyces pastorianus
agaaccggcagacagctatggagct

SEQ ID NO: 9141 - DNA, 25 bp, Saccharomyces pastorianus
aggtgtttgtggttcgtctccatac

SEQ ID NO: 9142 - DNA, 25 bp, Saccharomyces pastorianus
gttagatcctgttccgtatagaagg

SEQ ID NO: 9143 - DNA, 25 bp, Saccharomyces pastorianus
gacccattttatctgaattacctaa

SEQ ID NO: 9144 - DNA, 25 bp, Saccharomyces pastorianus
agctgattgttttttcaagcaactg

SEQ ID NO: 9145 - DNA, 25 bp, Saccharomyces pastorianus
ttactttggtcattgccgcaggaaa

SEQ ID NO: 9146 - DNA, 25 bp, Saccharomyces pastorianus
tgcgggcggcgatttatttactttg

SEQ ID NO: 9147 - DNA, 25 bp, Saccharomyces pastorianus
gaggaattcgatccaagacccgtgg

SEQ ID NO: 9148 - DNA, 25 bp, Saccharomyces pastorianus
agctctgctgaaaaggatgacccat

SEQ ID NO: 9149 - DNA, 25 bp, Saccharomyces pastorianus
aaatgggtgtttgccacagggattt

SEQ ID NO: 9150 - DNA, 25 bp, Saccharomyces pastorianus
agcatcacagactactatcgctgaa

SEQ ID NO: 9151 - DNA, 25 bp, Saccharomyces pastorianus
cggttacactcgtttggcacaaatt

SEQ ID NO: 9152 - DNA, 25 bp, Saccharomyces pastorianus
gatgcttccaagttaccaagagctg

SEQ ID NO: 9153 - DNA, 25 bp, Saccharomyces pastorianus
tcaattaaggttttgcaccgacggt

SEQ ID NO: 9154 - DNA, 25 bp, Saccharomyces pastorianus
taagagagactgtgctggacccaat

SEQ ID NO: 9155 - DNA, 25 bp, Saccharomyces pastorianus
gacaagcctgctaaagatgcttcca

SEQ ID NO: 9156 - DNA, 25 bp, Saccharomyces pastorianus
ttgaagaccgaactaccacaattag

SEQ ID NO: 9157 - DNA, 25 bp, Saccharomyces pastorianus
tgagggtaccttatttcgacccaag

SEQ ID NO: 9158 - DNA, 25 bp, Saccharomyces pastorianus
gctgaagtcatctctaacctttacg

SEQ ID NO: 9159 - DNA, 25 bp, Saccharomyces pastorianus
gtgaagcagctagacggacccttaa

SEQ ID NO: 9160 - DNA, 25 bp, Saccharomyces pastorianus
gtgctggacccaataacaaagttct

SEQ ID NO: 9161 - DNA, 25 bp, Saccharomyces pastorianus
atcatgttctttgcgttgttcttct

SEQ ID NO: 9162 - DNA, 25 bp, Saccharomyces pastorianus
ggttcggtatcctggacgcttataa

SEQ ID NO: 9163 - DNA, 25 bp, Saccharomyces pastorianus
agaactcatatgtactagctcgccc

SEQ ID NO: 9164 - DNA, 25 bp, Saccharomyces pastorianus
gtacttggagttatcgtcgccttca

SEQ ID NO: 9165 - DNA, 25 bp, Saccharomyces pastorianus
ttgttcttcttattggcggttacct

SEQ ID NO: 9166 - DNA, 25 bp, Saccharomyces pastorianus
ggctcctccttcagttcataaattt

SEQ ID NO: 9167 - DNA, 25 bp, Saccharomyces pastorianus
aatcgccttggagaacacttttggt

SEQ ID NO: 9168 - DNA, 25 bp, Saccharomyces pastorianus
ttcggtttggctgtctgtactatga

SEQ ID NO: 9169 - DNA, 25 bp, Saccharomyces pastorianus
gcggttacctttttgttgctgtcta

SEQ ID NO: 9170 - DNA, 25 bp, Saccharomyces pastorianus
gttcgctttgactacttttgtgcta

SEQ ID NO: 9171 - DNA, 25 bp, Saccharomyces pastorianus
aacgttgtcgttggtcttgccatgt

SEQ ID NO: 9172 - DNA, 25 bp, Saccharomyces pastorianus
aagtggtgcccttacgagtggtgcc

SEQ ID NO: 9173 - DNA, 25 bp, Saccharomyces pastorianus
acattcacgggcctgagctcatttg

SEQ ID NO: 9174 - DNA, 25 bp, Saccharomyces pastorianus
tgcctcccatactgttatcgttaat

SEQ ID NO: 9175 - DNA, 25 bp, Saccharomyces pastorianus
ttgtcgtccaaaacctggtctttga

SEQ ID NO: 9176 - DNA, 25 bp, Saccharomyces pastorianus
actattcgccatttgcatactacat

SEQ ID NO: 9177 - DNA, 25 bp, Saccharomyces pastorianus
gcctacgaatccctattgatcaacg

SEQ ID NO: 9178 - DNA, 25 bp, Saccharomyces pastorianus
tcaacttgggcatatcactggagat

SEQ ID NO: 9179 - DNA, 25 bp, Saccharomyces pastorianus
aagatcctggctttgttcaatgtcg

SEQ ID NO: 9180 - DNA, 25 bp, Saccharomyces pastorianus
aagtgtactggtgctcttgggctca

SEQ ID NO: 9181 - DNA, 25 bp, Saccharomyces pastorianus
ttgtgtatccgatgacaggtctcaa

SEQ ID NO: 9182 - DNA, 25 bp, Saccharomyces pastorianus
gaccacgttcggatttgtcgtccaa

SEQ ID NO: 9183 - DNA, 25 bp, Saccharomyces pastorianus
aagatctcctgtttttcgagaccgg

SEQ ID NO: 9184 - DNA, 25 bp, Saccharomyces pastorianus
tttagcgccaactaccaatgcattg

SEQ ID NO: 9185 - DNA, 25 bp, Saccharomyces pastorianus
tgggcatccttaataacctacttat

SEQ ID NO: 9186 - DNA, 25 bp, Saccharomyces pastorianus
gatggtgagcactttcaagtctggt

SEQ ID NO: 9187 - DNA, 25 bp, Saccharomyces pastorianus
agcgtgtttacaagggtcttacaat

SEQ ID NO: 9188 - DNA, 25 bp, Saccharomyces pastorianus
gaattattagcaccatccctgagta

SEQ ID NO: 9189 - DNA, 25 bp, Saccharomyces pastorianus
aagagctccaggcttgcactggaaa

SEQ ID NO: 9190 - DNA, 25 bp, Saccharomyces pastorianus
gacagctcagttacatgggcatcct

SEQ ID NO: 9191 - DNA, 25 bp, Saccharomyces pastorianus
atatgggctcgtgacactccaagag

SEQ ID NO: 9192 - DNA, 25 bp, Saccharomyces pastorianus
caagattattcctggtatcgatact

SEQ ID NO: 9193 - DNA, 25 bp, Saccharomyces pastorianus
gaggtcgataagttttccgttgaag

SEQ ID NO: 9194 - DNA, 25 bp, Saccharomyces pastorianus
agcgtattggctccggaagccgtat

SEQ ID NO: 9195 - DNA, 25 bp, Saccharomyces pastorianus
ggaagcaccttaatagtctctcttg

SEQ ID NO: 9196 - DNA, 25 bp, Saccharomyces pastorianus
accaaacctatgttgcgtgacctcg

SEQ ID NO: 9197 - DNA, 25 bp, Saccharomyces pastorianus
gacgcccaaatgaatttgctactgg

SEQ ID NO: 9198 - DNA, 25 bp, Saccharomyces pastorianus
atggacgcactaaagctgtcggatt

SEQ ID NO: 9199 - DNA, 25 bp, Saccharomyces pastorianus
gcgttcctaggcgttcagtacaatc

SEQ ID NO: 9200 - DNA, 25 bp, Saccharomyces pastorianus
agcttagttgctgtagacgcccaaa

SEQ ID NO: 9201 - DNA, 25 bp, Saccharomyces pastorianus
ctactggatcatgttgaggagcgta

SEQ ID NO: 9202 - DNA, 25 bp, Saccharomyces pastorianus
atgatgggcttggtcagcgttccta

SEQ ID NO: 9203 - DNA, 25 bp, Saccharomyces pastorianus
gtctctcttgcggaagaccgtattt

SEQ ID NO: 9204 - DNA, 25 bp, Saccharomyces pastorianus
tgtcggattttattggaagcacctt

SEQ ID NO: 9205 - DNA, 25 bp, Saccharomyces pastorianus
catggccatgccttttgtttttaac

SEQ ID NO: 9206 - DNA, 25 bp, Saccharomyces pastorianus
caaaatctctttgtccggcggattc

SEQ ID NO: 9207 - DNA, 25 bp, Saccharomyces pastorianus
ttgattcaaatcgtgggtaccctat

SEQ ID NO: 9208 - DNA, 25 bp, Saccharomyces pastorianus
gggtaccctattctggatcatttca

SEQ ID NO: 9209 - DNA, 25 bp, Saccharomyces pastorianus
tatactatcggtgccctagctatgc

SEQ ID NO: 9210 - DNA, 25 bp, Saccharomyces pastorianus
atatctcggctttggatgtggttca

SEQ ID NO: 9211 - DNA, 25 bp, Saccharomyces pastorianus
atcatgctgccgacgatgtggaaga

SEQ ID NO: 9212 - DNA, 25 bp, Saccharomyces pastorianus
aaggtgtactgtgccaacgtcaatt

SEQ ID NO: 9213 - DNA, 25 bp, Saccharomyces pastorianus
gtcggttcgttaatcaagtccacct

SEQ ID NO: 9214 - DNA, 25 bp, Saccharomyces pastorianus
gaattaactgctggcaccactggtg

SEQ ID NO: 9215 - DNA, 25 bp, Saccharomyces pastorianus
gtaatcatgatctgccgtactggca

SEQ ID NO: 9216 - DNA, 25 bp, Saccharomyces pastorianus
atacttcaaatcacctgttttcgtt

SEQ ID NO: 9217 - DNA, 25 bp, Saccharomyces pastorianus
ttcgatttactggttccgggaatgg

SEQ ID NO: 9218 - DNA, 25 bp, Saccharomyces pastorianus
tgttttcgttactgactacccacgt

SEQ ID NO: 9219 - DNA, 25 bp, Saccharomyces pastorianus
gataaccagaaggagcttttgccaa

SEQ ID NO: 9220 - DNA, 25 bp, Saccharomyces pastorianus
taacgtatacgcaggctatcgaaat

SEQ ID NO: 9221 - DNA, 25 bp, Saccharomyces pastorianus
aatcatcggcggaagtctaagagaa

SEQ ID NO: 9222 - DNA, 25 bp, Saccharomyces pastorianus
aattggattggtacgtttccctgag

SEQ ID NO: 9223 - DNA, 25 bp, Saccharomyces pastorianus
actcccgacaatactgtggcatgtt

SEQ ID NO: 9224 - DNA, 25 bp, Saccharomyces pastorianus
atgaaacaaaactctactcccgaca

SEQ ID NO: 9225 - DNA, 25 bp, Saccharomyces pastorianus
tacccacgtgtttgcaaagcctttt

SEQ ID NO: 9226 - DNA, 25 bp, Saccharomyces pastorianus
tggttagccggcgaatacttcaaat

SEQ ID NO: 9227 - DNA, 25 bp, Saccharomyces pastorianus
cattattatctctaccattatctac

SEQ ID NO: 9228 - DNA, 25 bp, Saccharomyces pastorianus
gcttgtatcattattatctctacca

SEQ ID NO: 9229 - DNA, 25 bp, Saccharomyces pastorianus
ttggcttgtatcattattatctcta

SEQ ID NO: 9230 - DNA, 25 bp, Saccharomyces pastorianus
tttagttttcattctggtcggtttg

SEQ ID NO: 9231 - DNA, 25 bp, Saccharomyces pastorianus
ggtgttattttagttttcattctgg

SEQ ID NO: 9232 - DNA, 25 bp, Saccharomyces pastorianus
ttgtatcattattatctctaccatt

SEQ ID NO: 9233 - DNA, 25 bp, Saccharomyces pastorianus
ggcttgtatcattattatctctacc

SEQ ID NO: 9234 - DNA, 25 bp, Saccharomyces pastorianus
atcattattatctctaccattatct

SEQ ID NO: 9235 - DNA, 25 bp, Saccharomyces pastorianus
gtatcattattatctctaccattat

SEQ ID NO: 9236 - DNA, 25 bp, Saccharomyces pastorianus
atgactttaccaggtggtgttattt

SEQ ID NO: 9237 - DNA, 25 bp, Saccharomyces pastorianus
gtttggcttgtatcattattatctc

SEQ ID NO: 9238 - DNA, 25 bp, Saccharomyces pastorianus
ggagacgccgaagacaatgccaatg

SEQ ID NO: 9239 - DNA, 25 bp, Saccharomyces pastorianus
aactccgcgagcctgagaacagcga

SEQ ID NO: 9240 - DNA, 25 bp, Saccharomyces pastorianus
ttaacgactacactaccgatgacga

SEQ ID NO: 9241 - DNA, 25 bp, Saccharomyces pastorianus
gcagtatacgagctagcgctaccac

SEQ ID NO: 9242 - DNA, 25 bp, Saccharomyces pastorianus
gctaccaccagtgcagcagggaatt

SEQ ID NO: 9243 - DNA, 25 bp, Saccharomyces pastorianus
gatagaaactccaacgacggctccg

SEQ ID NO: 9244 - DNA, 25 bp, Saccharomyces pastorianus
gtatttcccgcagggttacatcgaa

SEQ ID NO: 9245 - DNA, 25 bp, Saccharomyces pastorianus
gccgtgtccacttcgtcattaacga

SEQ ID NO: 9246 - DNA, 25 bp, Saccharomyces pastorianus
actaccgtcatcgagaggcagcagt

SEQ ID NO: 9247 - DNA, 25 bp, Saccharomyces pastorianus
gccaaagaaatagccgccgtgtcca

SEQ ID NO: 9248 - DNA, 25 bp, Saccharomyces pastorianus
gggtggtcatgcagcaactccgcga

SEQ ID NO: 9249 - DNA, 25 bp, Saccharomyces pastorianus
gaagaagcttttactcttgttctaa

SEQ ID NO: 9250 - DNA, 25 bp, Saccharomyces pastorianus
tcatgactgcactttagagattctt

SEQ ID NO: 9251 - DNA, 25 bp, Saccharomyces pastorianus
aatattcttccatcacctcttcaaa

SEQ ID NO: 9252 - DNA, 25 bp, Saccharomyces pastorianus
ggccaagatgaaggctctctgttaa

SEQ ID NO: 9253 - DNA, 25 bp, Saccharomyces pastorianus
cttattcccgttctgtgggacaaga

SEQ ID NO: 9254 - DNA, 25 bp, Saccharomyces pastorianus
aagatcgctcttttaggtgctagaa

SEQ ID NO: 9255 - DNA, 25 bp, Saccharomyces pastorianus
ggtttgttgagtcctattatcctac

SEQ ID NO: 9256 - DNA, 25 bp, Saccharomyces pastorianus
tttaaccgttcgcttcgttgaatcg

SEQ ID NO: 9257 - DNA, 25 bp, Saccharomyces pastorianus
agagattcttgacactgcaggccaa

SEQ ID NO: 9258 - DNA, 25 bp, Saccharomyces pastorianus
gtagggacgatctgccggtaatact

SEQ ID NO: 9259 - DNA, 25 bp, Saccharomyces pastorianus
aatccttgacaggtgtacgaggcat

SEQ ID NO: 9260 - DNA, 25 bp, Saccharomyces pastorianus
ggtgctaacgcaacaagtgctctat

SEQ ID NO: 9261 - DNA, 25 bp, Saccharomyces pastorianus
tggtatttctttgacttgccaggaa

SEQ ID NO: 9262 - DNA, 25 bp, Saccharomyces pastorianus
gatttgagcctcaccaggctagtgt

SEQ ID NO: 9263 - DNA, 25 bp, Saccharomyces pastorianus
acaatggtgcctcacagtggtgctg

SEQ ID NO: 9264 - DNA, 25 bp, Saccharomyces pastorianus
aaatcaagcctttatcgagcgtgtg

SEQ ID NO: 9265 - DNA, 25 bp, Saccharomyces pastorianus
aggctagtgttgtactgaccgttaa

SEQ ID NO: 9266 - DNA, 25 bp, Saccharomyces pastorianus
agcgtgtggcccctgaagaatttaa

SEQ ID NO: 9267 - DNA, 25 bp, Saccharomyces pastorianus
agatgtcgacgagcttacctgagga

SEQ ID NO: 9268 - DNA, 25 bp, Saccharomyces pastorianus
tattgtcatccacccggtttggaga

SEQ ID NO: 9269 - DNA, 25 bp, Saccharomyces pastorianus
agtgctctatcgaaacctcagggtt

SEQ ID NO: 9270 - DNA, 25 bp, Saccharomyces pastorianus
tgaatcttccaagggcgtgatcacc

SEQ ID NO: 9271 - DNA, 25 bp, Saccharomyces pastorianus
aaccctgttcatgggaatggtcaac

SEQ ID NO: 9272 - DNA, 25 bp, Saccharomyces pastorianus
tatttccgcactattgaaccctgtt

SEQ ID NO: 9273 - DNA, 25 bp, Saccharomyces pastorianus
attggcggctttggctgcagttgca

SEQ ID NO: 9274 - DNA, 25 bp, Saccharomyces pastorianus
ggagaccgttgctaccatttaacaa

SEQ ID NO: 9275 - DNA, 25 bp, Saccharomyces pastorianus
gcaagcacacgttgagggtactcct

SEQ ID NO: 9276 - DNA, 25 bp, Saccharomyces pastorianus
taacaatatcacttctcgtgggcct

SEQ ID NO: 9277 - DNA, 25 bp, Saccharomyces pastorianus
gagcctacggttacagatctgcgca

SEQ ID NO: 9278 - DNA, 25 bp, Saccharomyces pastorianus
ttagccgaagcagcctcatcagtaa

SEQ ID NO: 9279 - DNA, 25 bp, Saccharomyces pastorianus
ctgaccgggatgtcaaggttccttt

SEQ ID NO: 9280 - DNA, 25 bp, Saccharomyces pastorianus
aagatccagttctatttccgcacta

SEQ ID NO: 9281 - DNA, 25 bp, Saccharomyces pastorianus
gtttactgaacaatgctgaccggga

SEQ ID NO: 9282 - DNA, 25 bp, Saccharomyces pastorianus
ggtgctattcatttcattctacgtg

SEQ ID NO: 9283 - DNA, 25 bp, Saccharomyces pastorianus
tagggtcgttaagcgcgcacatggt

SEQ ID NO: 9284 - DNA, 25 bp, Saccharomyces pastorianus
cgcacatggtggtgttgctgccaaa

SEQ ID NO: 9285 - DNA, 25 bp, Saccharomyces pastorianus
ggtgccactgctttattgtgttaca

SEQ ID NO: 9286 - DNA, 25 bp, Saccharomyces pastorianus
actgctacatttgctggttgtgcta

SEQ ID NO: 9287 - DNA, 25 bp, Saccharomyces pastorianus
tctcatgggtcgtcatttcgttgaa

SEQ ID NO: 9288 - DNA, 25 bp, Saccharomyces pastorianus
atttcttcatacttggtgctattca

SEQ ID NO: 9289 - DNA, 25 bp, Saccharomyces pastorianus
attgtgttgggtcgactactgctac

SEQ ID NO: 9290 - DNA, 25 bp, Saccharomyces pastorianus
tgggtactactgctatctcatgggt

SEQ ID NO: 9291 - DNA, 25 bp, Saccharomyces pastorianus
gaatcttggtgttcatgtcgttatg

SEQ ID NO: 9292 - DNA, 25 bp, Saccharomyces pastorianus
tgtttaccagaaagccgtccactta

SEQ ID NO: 9293 - DNA, 25 bp, Saccharomyces pastorianus
gcaggaagcgcaacaggtacgtaaa

SEQ ID NO: 9294 - DNA, 25 bp, Saccharomyces pastorianus
tgactgatggaaatgcactactgtt

SEQ ID NO: 9295 - DNA, 25 bp, Saccharomyces pastorianus
tattcctgtggcttttttgaaggga

SEQ ID NO: 9296 - DNA, 25 bp, Saccharomyces pastorianus
gcctgcttcaagttcagagacgttt

SEQ ID NO: 9297 - DNA, 25 bp, Saccharomyces pastorianus
cttctcattccctcatcaaaatcat

SEQ ID NO: 9298 - DNA, 25 bp, Saccharomyces pastorianus
actactgttcaagtgcggtaagcat

SEQ ID NO: 9299 - DNA, 25 bp, Saccharomyces pastorianus
ggctacatgaatcaaactttctcac

SEQ ID NO: 9300 - DNA, 25 bp, Saccharomyces pastorianus
cgtttacgtgtggtagcaagggcta

SEQ ID NO: 9301 - DNA, 25 bp, Saccharomyces pastorianus
aaattacgtatcaaccatttctggt

SEQ ID NO: 9302 - DNA, 25 bp, Saccharomyces pastorianus
atttctggttgatacgcctgcttca

SEQ ID NO: 9303 - DNA, 25 bp, Saccharomyces pastorianus
ttcgagagatttttattcctgtggc

SEQ ID NO: 9304 - DNA, 25 bp, Saccharomyces pastorianus
gacgaggcccatgcgttgaagctaa

SEQ ID NO: 9305 - DNA, 25 bp, Saccharomyces pastorianus
gatttgcgttcttggatgcaccatt

SEQ ID NO: 9306 - DNA, 25 bp, Saccharomyces pastorianus
atttcaagcctttgatcgactccgg

SEQ ID NO: 9307 - DNA, 25 bp, Saccharomyces pastorianus
gaacggtgtgttcttcaattcgcct

SEQ ID NO: 9308 - DNA, 25 bp, Saccharomyces pastorianus
tcgactccggctatctaacgtatta

SEQ ID NO: 9309 - DNA, 25 bp, Saccharomyces pastorianus
actacgactgtatccttcaacgaat

SEQ ID NO: 9310 - DNA, 25 bp, Saccharomyces pastorianus
acaggcaattatccaacgtcgctag

SEQ ID NO: 9311 - DNA, 25 bp, Saccharomyces pastorianus
gagacattgcggttctgatcattgg

SEQ ID NO: 9312 - DNA, 25 bp, Saccharomyces pastorianus
tgacggctattttaactctaaccaa

SEQ ID NO: 9313 - DNA, 25 bp, Saccharomyces pastorianus
gaagtttcttggaaccctattacag

SEQ ID NO: 9314 - DNA, 25 bp, Saccharomyces pastorianus
aatcttccacgatttgggttctgat

SEQ ID NO: 9315 - DNA, 25 bp, Saccharomyces pastorianus
taggtttacaaagaatcgcgtgggt

SEQ ID NO: 9316 - DNA, 25 bp, Saccharomyces pastorianus
catcccacccgagatcattaattgg

SEQ ID NO: 9317 - DNA, 25 bp, Saccharomyces pastorianus
acacatgctgattccatatttttga

SEQ ID NO: 9318 - DNA, 25 bp, Saccharomyces pastorianus
gctcttctgcagctttaggtttaca

SEQ ID NO: 9319 - DNA, 25 bp, Saccharomyces pastorianus
ggagcatttctttcccaataaggtt

SEQ ID NO: 9320 - DNA, 25 bp, Saccharomyces pastorianus
agctggacggcgataaaaatctcac

SEQ ID NO: 9321 - DNA, 25 bp, Saccharomyces pastorianus
aggcggataatacacatgctgattc

SEQ ID NO: 9322 - DNA, 25 bp, Saccharomyces pastorianus
gaaagaatccaaaacctgggcagaa

SEQ ID NO: 9323 - DNA, 25 bp, Saccharomyces pastorianus
acaaaccacttttgcccagatgcaa

SEQ ID NO: 9324 - DNA, 25 bp, Saccharomyces pastorianus
gatgacgatgattccgatttctcta

SEQ ID NO: 9325 - DNA, 25 bp, Saccharomyces pastorianus
tttttaaagggctcttctgcagctt

SEQ ID NO: 9326 - DNA, 25 bp, Saccharomyces pastorianus
gactttgattgtcatttaccacgcc

SEQ ID NO: 9327 - DNA, 25 bp, Saccharomyces pastorianus
atcacttttggtgtcctcatgatga

SEQ ID NO: 9328 - DNA, 25 bp, Saccharomyces pastorianus
ttggccatcacttttggtgtcctca

SEQ ID NO: 9329 - DNA, 25 bp, Saccharomyces pastorianus
atctcagatgaacagttgaacacct

SEQ ID NO: 9330 - DNA, 25 bp, Saccharomyces pastorianus
acagttgaacaccttggccatcact

SEQ ID NO: 9331 - DNA, 25 bp, Saccharomyces pastorianus
gtgtcctcatgatgactttgattgt

SEQ ID NO: 9332 - DNA, 25 bp, Saccharomyces pastorianus
gaacaccttggccatcacttttggt

SEQ ID NO: 9333 - DNA, 25 bp, Saccharomyces pastorianus
agatgaacagttgaacaccttggcc

SEQ ID NO: 9334 - DNA, 25 bp, Saccharomyces pastorianus
gccatcacttttggtgtcctcatga

SEQ ID NO: 9335 - DNA, 25 bp, Saccharomyces pastorianus
tttggtgtcctcatgatgactttga

SEQ ID NO: 9336 - DNA, 25 bp, Saccharomyces pastorianus
agttgaacaccttggccatcacttt

SEQ ID NO: 9337 - DNA, 25 bp, Saccharomyces pastorianus
gaagccgctttatctgacgctatgg

SEQ ID NO: 9338 - DNA, 25 bp, Saccharomyces pastorianus
atcgaagccgctttatctgacgcta

SEQ ID NO: 9339 - DNA, 25 bp, Saccharomyces pastorianus
tttatctgacgctatggccgctttg

SEQ ID NO: 9340 - DNA, 25 bp, Saccharomyces pastorianus
gaactttcactaccgtcggtgacaa

SEQ ID NO: 9341 - DNA, 25 bp, Saccharomyces pastorianus
tttcactaccgtcggtgacaaccaa

SEQ ID NO: 9342 - DNA, 25 bp, Saccharomyces pastorianus
gagaagaactttcactaccgtcggt

SEQ ID NO: 9343 - DNA, 25 bp, Saccharomyces pastorianus
agatcgaagccgctttatctgacgc

SEQ ID NO: 9344 - DNA, 25 bp, Saccharomyces pastorianus
cgctttatctgacgctatggccgct

SEQ ID NO: 9345 - DNA, 25 bp, Saccharomyces pastorianus
aagccgctttatctgacgctatggc

SEQ ID NO: 9346 - DNA, 25 bp, Saccharomyces pastorianus
atctgacgctatggccgctttgcaa

SEQ ID NO: 9347 - DNA, 25 bp, Saccharomyces pastorianus
gaagaactttcactaccgtcggtga

SEQ ID NO: 9348 - DNA, 25 bp, Saccharomyces pastorianus
gaagccgctttatctgacgctatgg

SEQ ID NO: 9349 - DNA, 25 bp, Saccharomyces pastorianus
atcgaagccgctttatctgacgcta

SEQ ID NO: 9350 - DNA, 25 bp, Saccharomyces pastorianus
tttatctgacgctatggccgctttg

SEQ ID NO: 9351 - DNA, 25 bp, Saccharomyces pastorianus
acccaatcttgtcctccaagttgaa

SEQ ID NO: 9352 - DNA, 25 bp, Saccharomyces pastorianus
agaactttcactaccgtcggtgaca

SEQ ID NO: 9353 - DNA, 25 bp, Saccharomyces pastorianus
aaacgtcactgacccaatcttgtcc

SEQ ID NO: 9354 - DNA, 25 bp, Saccharomyces pastorianus
tttcactaccgtcggtgacaaccaa

SEQ ID NO: 9355 - DNA, 25 bp, Saccharomyces pastorianus
gagaagaactttcactaccgtcggt

SEQ ID NO: 9356 - DNA, 25 bp, Saccharomyces pastorianus
agatcgaagccgctttatctgacgc

SEQ ID NO: 9357 - DNA, 25 bp, Saccharomyces pastorianus
atctgacgctatggccgctttgcaa

SEQ ID NO: 9358 - DNA, 25 bp, Saccharomyces pastorianus
ctccaagttgaagagaggctccaag

SEQ ID NO: 9359 - DNA, 25 bp, Saccharomyces pastorianus
acgctgttcgtggaccccataagag

SEQ ID NO: 9360 - DNA, 25 bp, Saccharomyces pastorianus
aaaccgagtgtgtgctagatgttac

SEQ ID NO: 9361 - DNA, 25 bp, Saccharomyces pastorianus
aagtcaagtcttgtggaggctattg

SEQ ID NO: 9362 - DNA, 25 bp, Saccharomyces pastorianus
gaaacactgtattgcgtgtcctaga

SEQ ID NO: 9363 - DNA, 25 bp, Saccharomyces pastorianus
ttgggcataacaccagaaggcctgc

SEQ ID NO: 9364 - DNA, 25 bp, Saccharomyces pastorianus
ttcgggttcacggacgattttcaag

SEQ ID NO: 9365 - DNA, 25 bp, Saccharomyces pastorianus
gaaggcctgccgtttaaaggaccag

SEQ ID NO: 9366 - DNA, 25 bp, Saccharomyces pastorianus
ggaaagttcaatgccaattcacata

SEQ ID NO: 9367 - DNA, 25 bp, Saccharomyces pastorianus
ggattttgcaatttgacgctgttcg

SEQ ID NO: 9368 - DNA, 25 bp, Saccharomyces pastorianus
gtacagtatacggacttcacataga

SEQ ID NO: 9369 - DNA, 25 bp, Saccharomyces pastorianus
gtggccatcactgtataaactgcaa

SEQ ID NO: 9370 - DNA, 25 bp, Saccharomyces pastorianus
gagacaaagagagctgccgcccaat

SEQ ID NO: 9371 - DNA, 25 bp, Saccharomyces pastorianus
ccagcgctgtttccaagtcatttga

SEQ ID NO: 9372 - DNA, 25 bp, Saccharomyces pastorianus
gaaaactttcaagccgatccattgg

SEQ ID NO: 9373 - DNA, 25 bp, Saccharomyces pastorianus
aacaagcgggttctgccaacacttt

SEQ ID NO: 9374 - DNA, 25 bp, Saccharomyces pastorianus
aaacttccaagaccagcgtaatcct

SEQ ID NO: 9375 - DNA, 25 bp, Saccharomyces pastorianus
ggcacacctttggaaaaccgtcgat

SEQ ID NO: 9376 - DNA, 25 bp, Saccharomyces pastorianus
gtaatcaagccccatgttcaacaat

SEQ ID NO: 9377 - DNA, 25 bp, Saccharomyces pastorianus
tggcgcgtcaggtacagttcaaagt

SEQ ID NO: 9378 - DNA, 25 bp, Saccharomyces pastorianus
gaaccagtctaagccggatcattta

SEQ ID NO: 9379 - DNA, 25 bp, Saccharomyces pastorianus
aaataccaaggtttcggcagcacac

SEQ ID NO: 9380 - DNA, 25 bp, Saccharomyces pastorianus
gattcttctcgtgcaggttaccaaa

SEQ ID NO: 9381 - DNA, 25 bp, Saccharomyces pastorianus
gagattggccctagttctacaaaga

SEQ ID NO: 9382 - DNA, 25 bp, Saccharomyces pastorianus
atgattcctcatcctcaatcaattc

SEQ ID NO: 9383 - DNA, 25 bp, Saccharomyces pastorianus
gaactctccagatttaccagaacgg

SEQ ID NO: 9384 - DNA, 25 bp, Saccharomyces pastorianus
gatcaaatccgaatcatcgccaaag

SEQ ID NO: 9385 - DNA, 25 bp, Saccharomyces pastorianus
tactggacagttcaactcttctcaa

SEQ ID NO: 9386 - DNA, 25 bp, Saccharomyces pastorianus
gaaaggatcttagccagacaacaaa

SEQ ID NO: 9387 - DNA, 25 bp, Saccharomyces pastorianus
ttagaagctcaatcggcaaaggaat

SEQ ID NO: 9388 - DNA, 25 bp, Saccharomyces pastorianus
gtcacctgttagacagatgggccag

SEQ ID NO: 9389 - DNA, 25 bp, Saccharomyces pastorianus
atcgccaaagtttatgaactctcca

SEQ ID NO: 9390 - DNA, 25 bp, Saccharomyces pastorianus
gccaacaatttgagaccagacacac

SEQ ID NO: 9391 - DNA, 25 bp, Saccharomyces pastorianus
ctcttctcaaaccttagccaacaat

SEQ ID NO: 9392 - DNA, 25 bp, Saccharomyces pastorianus
aagaatcatcttctactgctgcttc

SEQ ID NO: 9393 - DNA, 25 bp, Saccharomyces pastorianus
tatggtagtcaattgcctcatcctc

SEQ ID NO: 9394 - DNA, 25 bp, Saccharomyces pastorianus
gatactactggactaccacaacaga

SEQ ID NO: 9395 - DNA, 25 bp, Saccharomyces pastorianus
ttattggctaaagtgcctccaccgg

SEQ ID NO: 9396 - DNA, 25 bp, Saccharomyces pastorianus
ctgcttctgttttcccgaagaataa

SEQ ID NO: 9397 - DNA, 25 bp, Saccharomyces pastorianus
ctcatcctcgtccttcattaaataa

SEQ ID NO: 9398 - DNA, 25 bp, Saccharomyces pastorianus
cagggattccgcaggttatctttca

SEQ ID NO: 9399 - DNA, 25 bp, Saccharomyces pastorianus
aagatgtcagctttgccactagggc

SEQ ID NO: 9400 - DNA, 25 bp, Saccharomyces pastorianus
ggctgacttgtcattattggctaaa

SEQ ID NO: 9401 - DNA, 25 bp, Saccharomyces pastorianus
aaatgaacacgcacggccatggcaa

SEQ ID NO: 9402 - DNA, 25 bp, Saccharomyces pastorianus
gtgggtaatttaccgcctgatgcaa

SEQ ID NO: 9403 - DNA, 25 bp, Saccharomyces pastorianus
gttacaccactaatgagcgcactgc

SEQ ID NO: 9404 - DNA, 25 bp, Saccharomyces pastorianus
gcagcaattgcctttgccggactca

SEQ ID NO: 9405 - DNA, 25 bp, Saccharomyces pastorianus
atcaggtgggcattcctatgaccaa

SEQ ID NO: 9406 - DNA, 25 bp, Saccharomyces pastorianus
tgtaactcttcccaagcagcaattg

SEQ ID NO: 9407 - DNA, 25 bp, Saccharomyces pastorianus
acacgctatgctactaatgatcctc

SEQ ID NO: 9408 - DNA, 25 bp, Saccharomyces pastorianus
tactaccacccctaatgcagatgtg

SEQ ID NO: 9409 - DNA, 25 bp, Saccharomyces pastorianus
gaactggtgcttctatgggaacgaa

SEQ ID NO: 9410 - DNA, 25 bp, Saccharomyces pastorianus
gcaaataccccaaacgctgtaacgg

SEQ ID NO: 9411 - DNA, 25 bp, Saccharomyces pastorianus
ggaccagcatacttattctaccgac

SEQ ID NO: 9412 - DNA, 25 bp, Saccharomyces pastorianus
ccggactcacttttttgctattctt

SEQ ID NO: 9413 - DNA, 25 bp, Saccharomyces pastorianus
agatcctaacgctgacacacgctat

SEQ ID NO: 9414 - DNA, 25 bp, Saccharomyces pastorianus
gtcttaggtctatttatggcatcca

SEQ ID NO: 9415 - DNA, 25 bp, Saccharomyces pastorianus
gggatatcaaggaccgttcagcaaa

SEQ ID NO: 9416 - DNA, 25 bp, Saccharomyces pastorianus
tcactggcgctggattggcgtataa

SEQ ID NO: 9417 - DNA, 25 bp, Saccharomyces pastorianus
ttcgcgcttggtggtgtcttaggtc

SEQ ID NO: 9418 - DNA, 25 bp, Saccharomyces pastorianus
aagtccacctcaaaagaagccctat

SEQ ID NO: 9419 - DNA, 25 bp, Saccharomyces pastorianus
tggcatccatggcttatgacacacc

SEQ ID NO: 9420 - DNA, 25 bp, Saccharomyces pastorianus
gtatacgggatttggcctagaacaa

SEQ ID NO: 9421 - DNA, 25 bp, Saccharomyces pastorianus
tttcggctgcaattgatacgtacat

SEQ ID NO: 9422 - DNA, 25 bp, Saccharomyces pastorianus
tggtgctggttttgctgccttttcg

SEQ ID NO: 9423 - DNA, 25 bp, Saccharomyces pastorianus
gcaactacagctacggcttcaggaa

SEQ ID NO: 9424 - DNA, 25 bp, Saccharomyces pastorianus
aacagcaggttttttcactggcgct

SEQ ID NO: 9425 - DNA, 25 bp, Saccharomyces pastorianus
tgggccatcgggataatgttcttct

SEQ ID NO: 9426 - DNA, 25 bp, Saccharomyces pastorianus
gacccatacttgtcacctgaggttt

SEQ ID NO: 9427 - DNA, 25 bp, Saccharomyces pastorianus
tgatatgggccctaatttccttcta

SEQ ID NO: 9428 - DNA, 25 bp, Saccharomyces pastorianus
atgttcttctgcatgatcaccagga

SEQ ID NO: 9429 - DNA, 25 bp, Saccharomyces pastorianus
aattgatcgattttggtgcctctag

SEQ ID NO: 9430 - DNA, 25 bp, Saccharomyces pastorianus
ggatgcgtcacctcgaattataaac

SEQ ID NO: 9431 - DNA, 25 bp, Saccharomyces pastorianus
acggcattgtcggtagtgacccata

SEQ ID NO: 9432 - DNA, 25 bp, Saccharomyces pastorianus
agagcgctagacgtttgggccatcg

SEQ ID NO: 9433 - DNA, 25 bp, Saccharomyces pastorianus
aaagacctagtgacaagacccgcca

SEQ ID NO: 9434 - DNA, 25 bp, Saccharomyces pastorianus
gaaaagtacgatcccagagcgctag

SEQ ID NO: 9435 - DNA, 25 bp, Saccharomyces pastorianus
gcagatactggatatttcgcccttc

SEQ ID NO: 9436 - DNA, 25 bp, Saccharomyces pastorianus
agatgatcaccgacgacaacgagaa

SEQ ID NO: 9437 - DNA, 25 bp, Saccharomyces pastorianus
ttgctgaattacaaggccacttcaa

SEQ ID NO: 9438 - DNA, 25 bp, Saccharomyces pastorianus
aaggctaaaattaccgcttcagcta

SEQ ID NO: 9439 - DNA, 25 bp, Saccharomyces pastorianus
gaaaatcaacgtggagctaaccgtt

SEQ ID NO: 9440 - DNA, 25 bp, Saccharomyces pastorianus
ttgctttcttggaatttgacgccga

SEQ ID NO: 9441 - DNA, 25 bp, Saccharomyces pastorianus
caggttcattgtttttgtcggtagt

SEQ ID NO: 9442 - DNA, 25 bp, Saccharomyces pastorianus
gccacaaccggttcggataagcctg

SEQ ID NO: 9443 - DNA, 25 bp, Saccharomyces pastorianus
agcacgggactttgctgaaggaaaa

SEQ ID NO: 9444 - DNA, 25 bp, Saccharomyces pastorianus
gatattgccttattgcagcacggga

SEQ ID NO: 9445 - DNA, 25 bp, Saccharomyces pastorianus
agttcaccggaccaaattcgtctca

SEQ ID NO: 9446 - DNA, 25 bp, Saccharomyces pastorianus
ttgacgccgataaagatcgcagcgg

SEQ ID NO: 9447 - DNA, 25 bp, Saccharomyces pastorianus
attggtcatgttttccggtgttatc

SEQ ID NO: 9448 - DNA, 25 bp, Saccharomyces pastorianus
atacgtgctggctatttgtgtcttt

SEQ ID NO: 9449 - DNA, 25 bp, Saccharomyces pastorianus
tccgaaaatcaagggctggccgtca

SEQ ID NO: 9450 - DNA, 25 bp, Saccharomyces pastorianus
gccgtcattgcttcttctaacatta

SEQ ID NO: 9451 - DNA, 25 bp, Saccharomyces pastorianus
catcggttcggccatgatattatcg

SEQ ID NO: 9452 - DNA, 25 bp, Saccharomyces pastorianus
ggccaccacctttctaatgggtgtt

SEQ ID NO: 9453 - DNA, 25 bp, Saccharomyces pastorianus
ccatacgattaccaccttttattca

SEQ ID NO: 9454 - DNA, 25 bp, Saccharomyces pastorianus
tatcaaatcctgcatgacactccaa

SEQ ID NO: 9455 - DNA, 25 bp, Saccharomyces pastorianus
aaggccaatcgttattgccctgtgt

SEQ ID NO: 9456 - DNA, 25 bp, Saccharomyces pastorianus
attcagatctttgttccatcggttc

SEQ ID NO: 9457 - DNA, 25 bp, Saccharomyces pastorianus
attgccctgtgtgtcattgcattaa

SEQ ID NO: 9458 - DNA, 25 bp, Saccharomyces pastorianus
tagaaggctctcctatctgtcatca

SEQ ID NO: 9459 - DNA, 25 bp, Saccharomyces pastorianus
tttaccgccaattgttgccaggagc

SEQ ID NO: 9460 - DNA, 25 bp, Saccharomyces pastorianus
gagatgctaagctttaccgccaatt

SEQ ID NO: 9461 - DNA, 25 bp, Saccharomyces pastorianus
tacgggtgtcatagttggctccaca

SEQ ID NO: 9462 - DNA, 25 bp, Saccharomyces pastorianus
actattccatgcagtaccatcactg

SEQ ID NO: 9463 - DNA, 25 bp, Saccharomyces pastorianus
ttggctccacagttgggattatcat

SEQ ID NO: 9464 - DNA, 25 bp, Saccharomyces pastorianus
tgagtctacagggtcatcgattggg

SEQ ID NO: 9465 - DNA, 25 bp, Saccharomyces pastorianus
gagaaccaatgctaaacccgtttcg

SEQ ID NO: 9466 - DNA, 25 bp, Saccharomyces pastorianus
caaatgccccactaacttttactat

SEQ ID NO: 9467 - DNA, 25 bp, Saccharomyces pastorianus
ggaaacaagttccaacgcgtccact

SEQ ID NO: 9468 - DNA, 25 bp, Saccharomyces pastorianus
tatgcagcgcatccttattatggta

SEQ ID NO: 9469 - DNA, 25 bp, Saccharomyces pastorianus
aaaggccgtagttcaccaatcagaa

SEQ ID NO: 9470 - DNA, 25 bp, Saccharomyces pastorianus
gccgtgcaattcctacaggcatatg

SEQ ID NO: 9471 - DNA, 25 bp, Saccharomyces pastorianus
atttcgtaatcttgggctcatggtg

SEQ ID NO: 9472 - DNA, 25 bp, Saccharomyces pastorianus
aggaactaacgtctcaaatggctga

SEQ ID NO: 9473 - DNA, 25 bp, Saccharomyces pastorianus
tgcccctttgtcattggattcacat

SEQ ID NO: 9474 - DNA, 25 bp, Saccharomyces pastorianus
gagtaaaaccggagtctgcgctgcc

SEQ ID NO: 9475 - DNA, 25 bp, Saccharomyces pastorianus
gggaaccaagcctcgaaactactat

SEQ ID NO: 9476 - DNA, 25 bp, Saccharomyces pastorianus
taaaaatcacccgttcccaattgcg

SEQ ID NO: 9477 - DNA, 25 bp, Saccharomyces pastorianus
gcgttatcatggcatatcttggcta

SEQ ID NO: 9478 - DNA, 25 bp, Saccharomyces pastorianus
tgctatattaacaaggctgcccctg

SEQ ID NO: 9479 - DNA, 25 bp, Saccharomyces pastorianus
gaatcctgctagaagcttggcaaaa

SEQ ID NO: 9480 - DNA, 25 bp, Saccharomyces pastorianus
actgctactaaaggccattgtcgtt

SEQ ID NO: 9481 - DNA, 25 bp, Saccharomyces pastorianus
gaccctaagtctccataccaatgta

SEQ ID NO: 9482 - DNA, 25 bp, Saccharomyces pastorianus
gaatgccactatatgctgtctatca

SEQ ID NO: 9483 - DNA, 25 bp, Saccharomyces pastorianus
ataccaatgtatcatcctggcatcc

SEQ ID NO: 9484 - DNA, 25 bp, Saccharomyces pastorianus
atcgtgggcacctcttctgttagaa

SEQ ID NO: 9485 - DNA, 25 bp, Saccharomyces pastorianus
gatatttgcgatctgaatgccacta

SEQ ID NO: 9486 - DNA, 25 bp, Saccharomyces pastorianus
agaatcactcaacggtttcactcag

SEQ ID NO: 9487 - DNA, 25 bp, Saccharomyces pastorianus
tgttccgtccccattggtgtagaaa

SEQ ID NO: 9488 - DNA, 25 bp, Saccharomyces pastorianus
atgctgtctatcagaacgtgccctg

SEQ ID NO: 9489 - DNA, 25 bp, Saccharomyces pastorianus
gattgccgacggtgccaagaaaatt

SEQ ID NO: 9490 - DNA, 25 bp, Saccharomyces pastorianus
aggaagattccatggcttgcggtaa

SEQ ID NO: 9491 - DNA, 25 bp, Saccharomyces pastorianus
ataagccattccctatcagcaaaaa

SEQ ID NO: 9492 - DNA, 25 bp, Saccharomyces pastorianus
ctactcaacctctgtaagcggcaag

SEQ ID NO: 9493 - DNA, 25 bp, Saccharomyces pastorianus
aggacagcttcccaacatctcaaaa

SEQ ID NO: 9494 - DNA, 25 bp, Saccharomyces pastorianus
gagactttagcaagcctgacgtcaa

SEQ ID NO: 9495 - DNA, 25 bp, Saccharomyces pastorianus
agaactagaggctcaccagcgtgaa

SEQ ID NO: 9496 - DNA, 25 bp, Saccharomyces pastorianus
gattccacagaaactactccaaggt

SEQ ID NO: 9497 - DNA, 25 bp, Saccharomyces pastorianus
tgaagaacatgctcgtccacagatt

SEQ ID NO: 9498 - DNA, 25 bp, Saccharomyces pastorianus
aattgaccgtgctattgacagagtg

SEQ ID NO: 9499 - DNA, 25 bp, Saccharomyces pastorianus
gaggccagtagcaccctaaaatctg

SEQ ID NO: 9500 - DNA, 25 bp, Saccharomyces pastorianus
agacatatactcgacttctcagcac

SEQ ID NO: 9501 - DNA, 25 bp, Saccharomyces pastorianus
gcggcaaggatagctcttcaacctc

SEQ ID NO: 9502 - DNA, 25 bp, Saccharomyces pastorianus
tattgcaaatgctcagcggtctcgg

SEQ ID NO: 9503 - DNA, 25 bp, Saccharomyces pastorianus
gatacgaaccctcaacaagtggcga

SEQ ID NO: 9504 - DNA, 25 bp, Saccharomyces pastorianus
tatttgagaaactcgcatctgcccg

SEQ ID NO: 9505 - DNA, 25 bp, Saccharomyces pastorianus
gacggagctacaatcccagatggtt

SEQ ID NO: 9506 - DNA, 25 bp, Saccharomyces pastorianus
agagctccgtagttctatttgtcca

SEQ ID NO: 9507 - DNA, 25 bp, Saccharomyces pastorianus
gacaagctgttggtgatcggcgcca

SEQ ID NO: 9508 - DNA, 25 bp, Saccharomyces pastorianus
gaatgcgctctacctgacattgcaa

SEQ ID NO: 9509 - DNA, 25 bp, Saccharomyces pastorianus
gatttcaagactctccctacaaaga

SEQ ID NO: 9510 - DNA, 25 bp, Saccharomyces pastorianus
gtctcggtttagttcgtacgctgga

SEQ ID NO: 9511 - DNA, 25 bp, Saccharomyces pastorianus
gaaactgctgaagctcttgcaatca

SEQ ID NO: 9512 - DNA, 25 bp, Saccharomyces pastorianus
acggccaccattacgttcgaagata

SEQ ID NO: 9513 - DNA, 25 bp, Saccharomyces pastorianus
gggcggtgtcgtttacactattact

SEQ ID NO: 9514 - DNA, 25 bp, Saccharomyces pastorianus
tatgatagatttgtcacctgccttc

SEQ ID NO: 9515 - DNA, 25 bp, Saccharomyces pastorianus
ttccagatccccatttcaaacagag

SEQ ID NO: 9516 - DNA, 25 bp, Saccharomyces pastorianus
gtaaagcacctggaagagcaccctt

SEQ ID NO: 9517 - DNA, 25 bp, Saccharomyces pastorianus
aagatgcagaaaccggccagatgac

SEQ ID NO: 9518 - DNA, 25 bp, Saccharomyces pastorianus
aacactctctctagacatggtttcc

SEQ ID NO: 9519 - DNA, 25 bp, Saccharomyces pastorianus
aagggccagctatccaagatgtttt

SEQ ID NO: 9520 - DNA, 25 bp, Saccharomyces pastorianus
gaaatccgtgtacaagtcaccaact

SEQ ID NO: 9521 - DNA, 25 bp, Saccharomyces pastorianus
gatgtttttctgttttccagatccc

SEQ ID NO: 9522 - DNA, 25 bp, Saccharomyces pastorianus
aagagcaccctttgtttgaacgatt

SEQ ID NO: 9523 - DNA, 25 bp, Saccharomyces pastorianus
gaaggtaactattgccgatatcggc

SEQ ID NO: 9524 - DNA, 25 bp, Saccharomyces pastorianus
catggacttagttgactcggagcta

SEQ ID NO: 9525 - DNA, 25 bp, Saccharomyces pastorianus
gtcatatactccgttttcattcgcg

SEQ ID NO: 9526 - DNA, 25 bp, Saccharomyces pastorianus
ttttgggccttcgttggatctacaa

SEQ ID NO: 9527 - DNA, 25 bp, Saccharomyces pastorianus
taagcgtttctgacattaccatgga

SEQ ID NO: 9528 - DNA, 25 bp, Saccharomyces pastorianus
tgttggaccgtatcagccggcataa

SEQ ID NO: 9529 - DNA, 25 bp, Saccharomyces pastorianus
tgaagtgtctttgctgtccaacaga

SEQ ID NO: 9530 - DNA, 25 bp, Saccharomyces pastorianus
atctcatgtcccaaactatgctgtt

SEQ ID NO: 9531 - DNA, 25 bp, Saccharomyces pastorianus
ggctgagttatgctcggtcaacgaa

SEQ ID NO: 9532 - DNA, 25 bp, Saccharomyces pastorianus
atacctcactccaacaagacatttt

SEQ ID NO: 9533 - DNA, 25 bp, Saccharomyces pastorianus
ggagattcactcgaacttagctaaa

SEQ ID NO: 9534 - DNA, 25 bp, Saccharomyces pastorianus
acagctagtgggacctgaaccagat

SEQ ID NO: 9535 - DNA, 25 bp, Saccharomyces pastorianus
ggtttgtttgcctcgaaattgttca

SEQ ID NO: 9536 - DNA, 25 bp, Saccharomyces pastorianus
aatgccgcttggttggttttcgcca

SEQ ID NO: 9537 - DNA, 25 bp, Saccharomyces pastorianus
tgccgcttggttggttttcgccaac

SEQ ID NO: 9538 - DNA, 25 bp, Saccharomyces pastorianus
agttgggtgaggtcatcactaccat

SEQ ID NO: 9539 - DNA, 25 bp, Saccharomyces pastorianus
gcctcgaaattgttcagtaaccttt

SEQ ID NO: 9540 - DNA, 25 bp, Saccharomyces pastorianus
gtttgcctcgaaattgttcagtaac

SEQ ID NO: 9541 - DNA, 25 bp, Saccharomyces pastorianus
caagttgaagttgggtgaggtcatc

SEQ ID NO: 9542 - DNA, 25 bp, Saccharomyces pastorianus
ggttttcgccaacaaacaagatttg

SEQ ID NO: 9543 - DNA, 25 bp, Saccharomyces pastorianus
tcgaaattgttcagtaacctttttg

SEQ ID NO: 9544 - DNA, 25 bp, Saccharomyces pastorianus
tttgtttgcctcgaaattgttcagt

SEQ ID NO: 9545 - DNA, 25 bp, Saccharomyces pastorianus
cactgaaggtgttattttcgttgtt

SEQ ID NO: 9546 - DNA, 25 bp, Saccharomyces pastorianus
ggtttgtttgcctcgaaattgttca

SEQ ID NO: 9547 - DNA, 25 bp, Saccharomyces pastorianus
aatgccgcttggttggttttcgcca

SEQ ID NO: 9548 - DNA, 25 bp, Saccharomyces pastorianus
tgccgcttggttggttttcgccaac

SEQ ID NO: 9549 - DNA, 25 bp, Saccharomyces pastorianus
agttgggtgaggtcatcactaccat

SEQ ID NO: 9550 - DNA, 25 bp, Saccharomyces pastorianus
gcctcgaaattgttcagtaaccttt

SEQ ID NO: 9551 - DNA, 25 bp, Saccharomyces pastorianus
gtttgcctcgaaattgttcagtaac

SEQ ID NO: 9552 - DNA, 25 bp, Saccharomyces pastorianus
caagttgaagttgggtgaggtcatc

SEQ ID NO: 9553 - DNA, 25 bp, Saccharomyces pastorianus
ggttttcgccaacaaacaagatttg

SEQ ID NO: 9554 - DNA, 25 bp, Saccharomyces pastorianus
aatgcgtattcttatggtgggccta

SEQ ID NO: 9555 - DNA, 25 bp, Saccharomyces pastorianus
tcgaaattgttcagtaacctttttg

SEQ ID NO: 9556 - DNA, 25 bp, Saccharomyces pastorianus
cactgaaggtgttattttcgttgtt

SEQ ID NO: 9557 - DNA, 25 bp, Saccharomyces pastorianus
aaacgtggtgaccatcttcagcgct

SEQ ID NO: 9558 - DNA, 25 bp, Saccharomyces pastorianus
tgaccatcttcagcgctccgaatta

SEQ ID NO: 9559 - DNA, 25 bp, Saccharomyces pastorianus
tagcaagggctcatcaattggtcat

SEQ ID NO: 9560 - DNA, 25 bp, Saccharomyces pastorianus
cttcagcgctccgaattactgttat

SEQ ID NO: 9561 - DNA, 25 bp, Saccharomyces pastorianus
aagggctcatcaattggtcatggac

SEQ ID NO: 9562 - DNA, 25 bp, Saccharomyces pastorianus
cagcgctccgaattactgttataga

SEQ ID NO: 9563 - DNA, 25 bp, Saccharomyces pastorianus
tctatcactgatagcaagggctcat

SEQ ID NO: 9564 - DNA, 25 bp, Saccharomyces pastorianus
atcttcagcgctccgaattactgtt

SEQ ID NO: 9565 - DNA, 25 bp, Saccharomyces pastorianus
catggacggttatgcttggtctcac

SEQ ID NO: 9566 - DNA, 25 bp, Saccharomyces pastorianus
gtctcaccagcaaaacgtggtgacc

SEQ ID NO: 9567 - DNA, 25 bp, Saccharomyces pastorianus
ggctcatcaattggtcatggacggt

SEQ ID NO: 9568 - DNA, 25 bp, Saccharomyces pastorianus
atggcggtctttcgcccatgataga

SEQ ID NO: 9569 - DNA, 25 bp, Saccharomyces pastorianus
gagaggtaatcacgagtcgagacaa

SEQ ID NO: 9570 - DNA, 25 bp, Saccharomyces pastorianus
gatctgtttgattatttccccatta

SEQ ID NO: 9571 - DNA, 25 bp, Saccharomyces pastorianus
tctttcgcccatgatagagaccata

SEQ ID NO: 9572 - DNA, 25 bp, Saccharomyces pastorianus
gtttaaggaaatacggcagtgcaaa

SEQ ID NO: 9573 - DNA, 25 bp, Saccharomyces pastorianus
accatagatcaagtcagagagctga

SEQ ID NO: 9574 - DNA, 25 bp, Saccharomyces pastorianus
gaaggccccatgtgtgacctcctat

SEQ ID NO: 9575 - DNA, 25 bp, Saccharomyces pastorianus
tcagatacccgcatagaatcactat

SEQ ID NO: 9576 - DNA, 25 bp, Saccharomyces pastorianus
agattttctgtctacatggcggtct

SEQ ID NO: 9577 - DNA, 25 bp, Saccharomyces pastorianus
gagtcgagacaaatcacccaagtat

SEQ ID NO: 9578 - DNA, 25 bp, Saccharomyces pastorianus
gattatttccccattacagctttag

SEQ ID NO: 9579 - DNA, 25 bp, Saccharomyces pastorianus
gctaagtggagaaagaagagaacta

SEQ ID NO: 9580 - DNA, 25 bp, Saccharomyces pastorianus
agctaagtggagaaagaagagaact

SEQ ID NO: 9581 - DNA, 25 bp, Saccharomyces pastorianus
gaaagaagagaactagaagacttaa

SEQ ID NO: 9582 - DNA, 25 bp, Saccharomyces pastorianus
atgagagctaagtggagaaagaaga

SEQ ID NO: 9583 - DNA, 25 bp, Saccharomyces pastorianus
gaagagaactagaagacttaagaga

SEQ ID NO: 9584 - DNA, 25 bp, Saccharomyces pastorianus
gagaaagaagagaactagaagactt

SEQ ID NO: 9585 - DNA, 25 bp, Saccharomyces pastorianus
ggagaaagaagagaactagaagact

SEQ ID NO: 9586 - DNA, 25 bp, Saccharomyces pastorianus
aagaagagaactagaagacttaaga

SEQ ID NO: 9587 - DNA, 25 bp, Saccharomyces pastorianus
aaagaagagaactagaagacttaag

SEQ ID NO: 9588 - DNA, 25 bp, Saccharomyces pastorianus
agaagagaactagaagacttaagag

SEQ ID NO: 9589 - DNA, 25 bp, Saccharomyces pastorianus
gagctaagtggagaaagaagagaac

SEQ ID NO: 9590 - DNA, 25 bp, Saccharomyces pastorianus
cgtgagaaggagcaattgcgcaatt

SEQ ID NO: 9591 - DNA, 25 bp, Saccharomyces pastorianus
tacagcgtggagtggccgctagatt

SEQ ID NO: 9592 - DNA, 25 bp, Saccharomyces pastorianus
aagagccacagaggactactttgtc

SEQ ID NO: 9593 - DNA, 25 bp, Saccharomyces pastorianus
gaggactcctttgtcaagagagaaa

SEQ ID NO: 9594 - DNA, 25 bp, Saccharomyces pastorianus
ggttcagaggactcctttgtcaaga

SEQ ID NO: 9595 - DNA, 25 bp, Saccharomyces pastorianus
agagggtccggttcagaggactcct

SEQ ID NO: 9596 - DNA, 25 bp, Saccharomyces pastorianus
ttgcgcaatttgaaggaccagctgg

SEQ ID NO: 9597 - DNA, 25 bp, Saccharomyces pastorianus
tggccgctagattctactctgaggg

SEQ ID NO: 9598 - DNA, 25 bp, Saccharomyces pastorianus
gactactttgtcagacagcgtgaga

SEQ ID NO: 9599 - DNA, 25 bp, Saccharomyces pastorianus
aagcaacgaaagaagatcgactctt

SEQ ID NO: 9600 - DNA, 25 bp, Saccharomyces pastorianus
gctcattgcaactacagcgtggagt

SEQ ID NO: 9601 - DNA, 25 bp, Saccharomyces pastorianus
tttcatggagtttagccgtcttctt

SEQ ID NO: 9602 - DNA, 25 bp, Saccharomyces pastorianus
acgattcattcgtactcggagtaat

SEQ ID NO: 9603 - DNA, 25 bp, Saccharomyces pastorianus
tcttgatggtcttggtggtcggcaa

SEQ ID NO: 9604 - DNA, 25 bp, Saccharomyces pastorianus
attttgtttatgttcgcggtcacga

SEQ ID NO: 9605 - DNA, 25 bp, Saccharomyces pastorianus
gggcgactccaccttatattatggt

SEQ ID NO: 9606 - DNA, 25 bp, Saccharomyces pastorianus
gagtcgtgattatcagcatccgctg

SEQ ID NO: 9607 - DNA, 25 bp, Saccharomyces pastorianus
ggcgcgggccattttgcattgagtc

SEQ ID NO: 9608 - DNA, 25 bp, Saccharomyces pastorianus
taatgaacccgccttcttgaggttt

SEQ ID NO: 9609 - DNA, 25 bp, Saccharomyces pastorianus
ttcgcggtcacgaggacttgtttac

SEQ ID NO: 9610 - DNA, 25 bp, Saccharomyces pastorianus
gaggatgaccaagacgctgccaaga

SEQ ID NO: 9611 - DNA, 25 bp, Saccharomyces pastorianus
gagctggacgactggttcaatgatt

SEQ ID NO: 9612 - DNA, 25 bp, Saccharomyces pastorianus
taagagcgtttcaaaggcctcccac

SEQ ID NO: 9613 - DNA, 25 bp, Saccharomyces pastorianus
gagccaatatcttcaacatcctagt

SEQ ID NO: 9614 - DNA, 25 bp, Saccharomyces pastorianus
gaaggagattccctctgtattagaa

SEQ ID NO: 9615 - DNA, 25 bp, Saccharomyces pastorianus
gcgcttattgactttgctcgagaga

SEQ ID NO: 9616 - DNA, 25 bp, Saccharomyces pastorianus
ctagtgattcggattcacagcataa

SEQ ID NO: 9617 - DNA, 25 bp, Saccharomyces pastorianus
gaggctgctgctggacagcgcttat

SEQ ID NO: 9618 - DNA, 25 bp, Saccharomyces pastorianus
catgtatgcttggaggacggccgaa

SEQ ID NO: 9619 - DNA, 25 bp, Saccharomyces pastorianus
gaatgttgagcaaggctgtgctgac

SEQ ID NO: 9620 - DNA, 25 bp, Saccharomyces pastorianus
gggctcgtctagatttaggcatatc

SEQ ID NO: 9621 - DNA, 25 bp, Saccharomyces pastorianus
gggtacaccattgggctcgtctaga

SEQ ID NO: 9622 - DNA, 25 bp, Saccharomyces pastorianus
ggacggccgaattacctagtgattc

SEQ ID NO: 9623 - DNA, 25 bp, Saccharomyces pastorianus
aaattacagctatgcgactcactaa

SEQ ID NO: 9624 - DNA, 25 bp, Saccharomyces pastorianus
gagtttcttaacgattccaggctag

SEQ ID NO: 9625 - DNA, 25 bp, Saccharomyces pastorianus
gatggtggtctcaatacactgaaga

SEQ ID NO: 9626 - DNA, 25 bp, Saccharomyces pastorianus
gattctttgtgttttatactggaca

SEQ ID NO: 9627 - DNA, 25 bp, Saccharomyces pastorianus
agaatgccaagggtacagtccggat

SEQ ID NO: 9628 - DNA, 25 bp, Saccharomyces pastorianus
gtttccactttgacgtttcatttag

SEQ ID NO: 9629 - DNA, 25 bp, Saccharomyces pastorianus
gacagttcaatttcagcaggcgtta

SEQ ID NO: 9630 - DNA, 25 bp, Saccharomyces pastorianus
gtacagtccggataataccttatga

SEQ ID NO: 9631 - DNA, 25 bp, Saccharomyces pastorianus
gcaggcgttaggtgatttatgttcc

SEQ ID NO: 9632 - DNA, 25 bp, Saccharomyces pastorianus
gcggatccgaacaatgtttccactt

SEQ ID NO: 9633 - DNA, 25 bp, Saccharomyces pastorianus
actgaagaggaaattcggctacgac

SEQ ID NO: 9634 - DNA, 25 bp, Saccharomyces pastorianus
tggttccaacctatcgaccgatcta

SEQ ID NO: 9635 - DNA, 25 bp, Saccharomyces pastorianus
gttccagatataactcttccgctta

SEQ ID NO: 9636 - DNA, 25 bp, Saccharomyces pastorianus
gtaaatgtctcctcgatatctgaaa

SEQ ID NO: 9637 - DNA, 25 bp, Saccharomyces pastorianus
agaggtgagaccctttcaattaata

SEQ ID NO: 9638 - DNA, 25 bp, Saccharomyces pastorianus
aatgacattcccaactcttccaatt

SEQ ID NO: 9639 - DNA, 25 bp, Saccharomyces pastorianus
gatgaagagcctctaccgaaacctt

SEQ ID NO: 9640 - DNA, 25 bp, Saccharomyces pastorianus
gaacgatcattctcacagtaacaga

SEQ ID NO: 9641 - DNA, 25 bp, Saccharomyces pastorianus
tgtcattcagcccaccataagaggt

SEQ ID NO: 9642 - DNA, 25 bp, Saccharomyces pastorianus
gtagagtatcgaatttccaccctcc

SEQ ID NO: 9643 - DNA, 25 bp, Saccharomyces pastorianus
agtccttccgtttcataccatatat

SEQ ID NO: 9644 - DNA, 25 bp, Saccharomyces pastorianus
atgggagcgcattcactggttccaa

SEQ ID NO: 9645 - DNA, 25 bp, Saccharomyces pastorianus
gaaaggtcgccttatggtccgtgtt

SEQ ID NO: 9646 - DNA, 25 bp, Saccharomyces pastorianus
gattggcggcagatctacagacatc

SEQ ID NO: 9647 - DNA, 25 bp, Saccharomyces pastorianus
aagtatggaccaccgacgtggctgt

SEQ ID NO: 9648 - DNA, 25 bp, Saccharomyces pastorianus
ggtaacttccatgccttcattgtat

SEQ ID NO: 9649 - DNA, 25 bp, Saccharomyces pastorianus
tgaagtcaaagctgttgcccaacaa

SEQ ID NO: 9650 - DNA, 25 bp, Saccharomyces pastorianus
attgatcaacgccatcgtcggtcat

SEQ ID NO: 9651 - DNA, 25 bp, Saccharomyces pastorianus
ggtccgtgttagacgccgacaagag

SEQ ID NO: 9652 - DNA, 25 bp, Saccharomyces pastorianus
tacagacatcgtcaacgccgttgtg

SEQ ID NO: 9653 - DNA, 25 bp, Saccharomyces pastorianus
agagccctggatgccgaaggtacat

SEQ ID NO: 9654 - DNA, 25 bp, Saccharomyces pastorianus
aactggccattgatccgaagagaat

SEQ ID NO: 9655 - DNA, 25 bp, Saccharomyces pastorianus
gtcccactatctcagttcgacaaag

SEQ ID NO: 9656 - DNA, 25 bp, Saccharomyces pastorianus
aacgacgaacataacttggtgcata

SEQ ID NO: 9657 - DNA, 25 bp, Saccharomyces pastorianus
gaaatagaccctttgatcggaatca

SEQ ID NO: 9658 - DNA, 25 bp, Saccharomyces pastorianus
ggcggactcgccgatcgaagaaata

SEQ ID NO: 9659 - DNA, 25 bp, Saccharomyces pastorianus
gttggacacggccattggaactttt

SEQ ID NO: 9660 - DNA, 25 bp, Saccharomyces pastorianus
ctattcttttattactgggccaggt

SEQ ID NO: 9661 - DNA, 25 bp, Saccharomyces pastorianus
atctccacgttgatgtttttccaga

SEQ ID NO: 9662 - DNA, 25 bp, Saccharomyces pastorianus
gctgatggcgttggactgtttagac

SEQ ID NO: 9663 - DNA, 25 bp, Saccharomyces pastorianus
aaattacagccttcgctgatggcgt

SEQ ID NO: 9664 - DNA, 25 bp, Saccharomyces pastorianus
gtcagctttatagagccggcggact

SEQ ID NO: 9665 - DNA, 25 bp, Saccharomyces pastorianus
gttcgctggagttgcaaatactgct

SEQ ID NO: 9666 - DNA, 25 bp, Saccharomyces pastorianus
ttacggtgcgtgtctcgggatcgac

SEQ ID NO: 9667 - DNA, 25 bp, Saccharomyces pastorianus
ggagcaacatccagacggtgtcacg

SEQ ID NO: 9668 - DNA, 25 bp, Saccharomyces pastorianus
tggtaagtcctccacatgcgagtta

SEQ ID NO: 9669 - DNA, 25 bp, Saccharomyces pastorianus
aatcaagacggtatgggcccaacat

SEQ ID NO: 9670 - DNA, 25 bp, Saccharomyces pastorianus
aacagcattgtcgactggcatgtaa

SEQ ID NO: 9671 - DNA, 25 bp, Saccharomyces pastorianus
acaacatctcggatttcgccaagga

SEQ ID NO: 9672 - DNA, 25 bp, Saccharomyces pastorianus
ttgcacgcaagagggtaccacgact

SEQ ID NO: 9673 - DNA, 25 bp, Saccharomyces pastorianus
gtggctcgtatcactgcttgggaga

SEQ ID NO: 9674 - DNA, 25 bp, Saccharomyces pastorianus
acgctggagccactgttgagacaag

SEQ ID NO: 9675 - DNA, 25 bp, Saccharomyces pastorianus
ggattcgtacgaaccgcacatagtg

SEQ ID NO: 9676 - DNA, 25 bp, Saccharomyces pastorianus
aaatgacgtgtttccagagaggctg

SEQ ID NO: 9677 - DNA, 25 bp, Saccharomyces pastorianus
gacatagtgtccaacgtggctcgta

SEQ ID NO: 9678 - DNA, 25 bp, Saccharomyces pastorianus
caacgtaactccaccatgtttcaat

SEQ ID NO: 9679 - DNA, 25 bp, Saccharomyces pastorianus
ttcacaggaccatagagttctcgat

SEQ ID NO: 9680 - DNA, 25 bp, Saccharomyces pastorianus
tttaccaacattcccagcgtattac

SEQ ID NO: 9681 - DNA, 25 bp, Saccharomyces pastorianus
ttccagtcaccgtgggcagagacat

SEQ ID NO: 9682 - DNA, 25 bp, Saccharomyces pastorianus
gaacctatcgtgtctgttgatgggc

SEQ ID NO: 9683 - DNA, 25 bp, Saccharomyces pastorianus
ctggctcaccaaggacccaatgatg

SEQ ID NO: 9684 - DNA, 25 bp, Saccharomyces pastorianus
gtttcaattccatccagaacgatca

SEQ ID NO: 9685 - DNA, 25 bp, Saccharomyces pastorianus
tcatacgtgttttttgatccgcaaa

SEQ ID NO: 9686 - DNA, 25 bp, Saccharomyces pastorianus
gcaagcattagtaccgctgctcaaa

SEQ ID NO: 9687 - DNA, 25 bp, Saccharomyces pastorianus
agagttctcgatactttccagtcac

SEQ ID NO: 9688 - DNA, 25 bp, Saccharomyces pastorianus
acagcgtgtagccttgttccaagat

SEQ ID NO: 9689 - DNA, 25 bp, Saccharomyces pastorianus
gtttgaacccacgactctgtttgaa

SEQ ID NO: 9690 - DNA, 25 bp, Saccharomyces pastorianus
gtcaaaatgctcgaaggtcctgaat

SEQ ID NO: 9691 - DNA, 25 bp, Saccharomyces pastorianus
tctttccctatcacccatttataaa

SEQ ID NO: 9692 - DNA, 25 bp, Saccharomyces pastorianus
aagctgggagtgcaactttcgataa

SEQ ID NO: 9693 - DNA, 25 bp, Saccharomyces pastorianus
aggccacgtttgtttttgattccag

SEQ ID NO: 9694 - DNA, 25 bp, Saccharomyces pastorianus
aacaggcacgtatggcgggttcctt

SEQ ID NO: 9695 - DNA, 25 bp, Saccharomyces pastorianus
agtactgacggcagatctttcccta

SEQ ID NO: 9696 - DNA, 25 bp, Saccharomyces pastorianus
gattccttagatctttgcgtcatag

SEQ ID NO: 9697 - DNA, 25 bp, Saccharomyces pastorianus
gattccagtgctgaaccagacgtat

SEQ ID NO: 9698 - DNA, 25 bp, Saccharomyces pastorianus
gttccttttaggctgttacaatcaa

SEQ ID NO: 9699 - DNA, 25 bp, Saccharomyces pastorianus
gaagtttctcgacgaatctgtcaat

SEQ ID NO: 9700 - DNA, 25 bp, Saccharomyces pastorianus
gacccaaagcataatccattcctaa

SEQ ID NO: 9701 - DNA, 25 bp, Saccharomyces pastorianus
ataggcaagtttccaatgacccaaa

SEQ ID NO: 9702 - DNA, 25 bp, Saccharomyces pastorianus
atgttcggtaatcctatatcaccag

SEQ ID NO: 9703 - DNA, 25 bp, Saccharomyces pastorianus
aactcccagggtacaggctataggc

SEQ ID NO: 9704 - DNA, 25 bp, Saccharomyces pastorianus
gggtctgccaagtaccaacgttgta

SEQ ID NO: 9705 - DNA, 25 bp, Saccharomyces pastorianus
gacattcattaactcccagggtaca

SEQ ID NO: 9706 - DNA, 25 bp, Saccharomyces pastorianus
gcacgggcattgacacatttggtaa

SEQ ID NO: 9707 - DNA, 25 bp, Saccharomyces pastorianus
aactattaggcacaggcacgggcat

SEQ ID NO: 9708 - DNA, 25 bp, Saccharomyces pastorianus
aatgaacgcgtcatctatgccgcaa

SEQ ID NO: 9709 - DNA, 25 bp, Saccharomyces pastorianus
caggctacggatttgggaaccaaca

SEQ ID NO: 9710 - DNA, 25 bp, Saccharomyces pastorianus
aacagcaactatacttgacctcctt

SEQ ID NO: 9711 - DNA, 25 bp, Saccharomyces pastorianus
ttgctagccaagaagatcaccgatt

SEQ ID NO: 9712 - DNA, 25 bp, Saccharomyces pastorianus
aagttcgtactttggtctgctcgga

SEQ ID NO: 9713 - DNA, 25 bp, Saccharomyces pastorianus
acaacaagcgtatcctccattacaa

SEQ ID NO: 9714 - DNA, 25 bp, Saccharomyces pastorianus
tgttcctgttccatttccaattgaa

SEQ ID NO: 9715 - DNA, 25 bp, Saccharomyces pastorianus
aaagtgttccacgagttccgtcaag

SEQ ID NO: 9716 - DNA, 25 bp, Saccharomyces pastorianus
gacgatgaaactgttcctgttccat

SEQ ID NO: 9717 - DNA, 25 bp, Saccharomyces pastorianus
ggaatgatcgtttcaacctctacaa

SEQ ID NO: 9718 - DNA, 25 bp, Saccharomyces pastorianus
attgggtactgaaatcgccgccatt

SEQ ID NO: 9719 - DNA, 25 bp, Saccharomyces pastorianus
ttcgtgttattattcccatgccagg

SEQ ID NO: 9720 - DNA, 25 bp, Saccharomyces pastorianus
cgccattccagccacaattgataaa

SEQ ID NO: 9721 - DNA, 25 bp, Saccharomyces pastorianus
gataaatcattgtacgtggccgaag

SEQ ID NO: 9722 - DNA, 25 bp, Saccharomyces pastorianus
gataatggacgaccgactgatctcc

SEQ ID NO: 9723 - DNA, 25 bp, Saccharomyces pastorianus
ttactattccaactacacccaagag

SEQ ID NO: 9724 - DNA, 25 bp, Saccharomyces pastorianus
cactcgccaccattatcttagaaaa

SEQ ID NO: 9725 - DNA, 25 bp, Saccharomyces pastorianus
gcccggtccaatgtcatttttgcga

SEQ ID NO: 9726 - DNA, 25 bp, Saccharomyces pastorianus
caataggttccagctcgtaggtgct

SEQ ID NO: 9727 - DNA, 25 bp, Saccharomyces pastorianus
gttggctgcgggagcttattttcta

SEQ ID NO: 9728 - DNA, 25 bp, Saccharomyces pastorianus
tgaagaaatcaactgccccacaatc

SEQ ID NO: 9729 - DNA, 25 bp, Saccharomyces pastorianus
taggtgctgcttccctgtttattgc

SEQ ID NO: 9730 - DNA, 25 bp, Saccharomyces pastorianus
atttgaactgggatggcccggtcca

SEQ ID NO: 9731 - DNA, 25 bp, Saccharomyces pastorianus
tgcattcttcacaggtggtagccaa

SEQ ID NO: 9732 - DNA, 25 bp, Saccharomyces pastorianus
tgcaaagaggttgttcccgtcaata

SEQ ID NO: 9733 - DNA, 25 bp, Saccharomyces pastorianus
taagcgtgctatcaattaccaaatc

SEQ ID NO: 9734 - DNA, 25 bp, Saccharomyces pastorianus
gaaactcaaatctgttcgtgctgtt

SEQ ID NO: 9735 - DNA, 25 bp, Saccharomyces pastorianus
gaactttacgtttctacacatccaa

SEQ ID NO: 9736 - DNA, 25 bp, Saccharomyces pastorianus
cgtgctgtttattctggtggccaag

SEQ ID NO: 9737 - DNA, 25 bp, Saccharomyces pastorianus
gtttctaagagtatcaattcccaag

SEQ ID NO: 9738 - DNA, 25 bp, Saccharomyces pastorianus
ataatggcgctgatctagacggtaa

SEQ ID NO: 9739 - DNA, 25 bp, Saccharomyces pastorianus
tggtggccaagctggtgtctatgaa

SEQ ID NO: 9740 - DNA, 25 bp, Saccharomyces pastorianus
gatgcgcaagacaaaaaggcccgta

SEQ ID NO: 9741 - DNA, 25 bp, Saccharomyces pastorianus
ggctcgtaaacgtggtgtgcatgac

SEQ ID NO: 9742 - DNA, 25 bp, Saccharomyces pastorianus
gaagcaagacaaaagagcctcccgt

SEQ ID NO: 9743 - DNA, 25 bp, Saccharomyces pastorianus
gcctcccgtaaacaagctcataaga

SEQ ID NO: 9744 - DNA, 25 bp, Saccharomyces pastorianus
aaacgtggtcatggatattggcaaa

SEQ ID NO: 9745 - DNA, 25 bp, Saccharomyces pastorianus
acaacaaacgtcataccgagcgatg

SEQ ID NO: 9746 - DNA, 25 bp, Saccharomyces pastorianus
taaaggcagaccaccagcatatatt

SEQ ID NO: 9747 - DNA, 25 bp, Saccharomyces pastorianus
aatggacagcaaacccgaaagattc

SEQ ID NO: 9748 - DNA, 25 bp, Saccharomyces pastorianus
atatcggagccatcagggtccacaa

SEQ ID NO: 9749 - DNA, 25 bp, Saccharomyces pastorianus
caaaaagactttcagtcggtcgacg

SEQ ID NO: 9750 - DNA, 25 bp, Saccharomyces pastorianus
catcagctgaacttctaggccgtat

SEQ ID NO: 9751 - DNA, 25 bp, Saccharomyces pastorianus
ggtattccagttacctaccaggcta

SEQ ID NO: 9752 - DNA, 25 bp, Saccharomyces pastorianus
gtgagcccaccccaggtgtgaaaat

SEQ ID NO: 9753 - DNA, 25 bp, Saccharomyces pastorianus
tatggcagacgattcatcatcagct

SEQ ID NO: 9754 - DNA, 25 bp, Saccharomyces pastorianus
tctttcagagaagccaacccgtgag

SEQ ID NO: 9755 - DNA, 25 bp, Saccharomyces pastorianus
gattgaacgaattgctggacttgac

SEQ ID NO: 9756 - DNA, 25 bp, Saccharomyces pastorianus
atatcgtgtatttcttggttctttc

SEQ ID NO: 9757 - DNA, 25 bp, Saccharomyces pastorianus
acaagcatcactgggacgatctaca

SEQ ID NO: 9758 - DNA, 25 bp, Saccharomyces pastorianus
tacatcagtgatttagtcaaccaag

SEQ ID NO: 9759 - DNA, 25 bp, Saccharomyces pastorianus
atgagtggtcacataacgttgacga

SEQ ID NO: 9760 - DNA, 25 bp, Saccharomyces pastorianus
attgttcaccacacacgaattgatg

SEQ ID NO: 9761 - DNA, 25 bp, Saccharomyces pastorianus
tattccagaatcactctatcgagat

SEQ ID NO: 9762 - DNA, 25 bp, Saccharomyces pastorianus
caatttgagagttatttccgagtac

SEQ ID NO: 9763 - DNA, 25 bp, Saccharomyces pastorianus
ggaaaccagttttatctcatatcgt

SEQ ID NO: 9764 - DNA, 25 bp, Saccharomyces pastorianus
gtcaaccaaggtatcatatatgcaa

SEQ ID NO: 9765 - DNA, 25 bp, Saccharomyces pastorianus
atagaccagccaagattgtcaattt

SEQ ID NO: 9766 - DNA, 25 bp, Saccharomyces pastorianus
aatgatttgcacgttcttactgatg

SEQ ID NO: 9767 - DNA, 25 bp, Saccharomyces pastorianus
attccttggctagaggatccgccta

SEQ ID NO: 9768 - DNA, 25 bp, Saccharomyces pastorianus
tattgcagtatctgtcaactctaga

SEQ ID NO: 9769 - DNA, 25 bp, Saccharomyces pastorianus
ggactagacgtctctgcagaatctt

SEQ ID NO: 9770 - DNA, 25 bp, Saccharomyces pastorianus
ggtactacacgaacacctagtcaca

SEQ ID NO: 9771 - DNA, 25 bp, Saccharomyces pastorianus
agcgatcatgctccaataagttttt

SEQ ID NO: 9772 - DNA, 25 bp, Saccharomyces pastorianus
aattcaccggcttctagtaatacga

SEQ ID NO: 9773 - DNA, 25 bp, Saccharomyces pastorianus
tacgcctccgaacgaaaattcaccg

SEQ ID NO: 9774 - DNA, 25 bp, Saccharomyces pastorianus
atatatgcgctgacagtccggtact

SEQ ID NO: 9775 - DNA, 25 bp, Saccharomyces pastorianus
atgtcttgacccgtaaaggccatct

SEQ ID NO: 9776 - DNA, 25 bp, Saccharomyces pastorianus
agagtatcggatcctcctttacaaa

SEQ ID NO: 9777 - DNA, 25 bp, Saccharomyces pastorianus
aaatagtcacattaccggatcacgg

SEQ ID NO: 9778 - DNA, 25 bp, Saccharomyces pastorianus
caaagctgcccctaggtgatgtaga

SEQ ID NO: 9779 - DNA, 25 bp, Saccharomyces pastorianus
gtttacaatcttcaacctgacggca

SEQ ID NO: 9780 - DNA, 25 bp, Saccharomyces pastorianus
ggcaatacccaagccatgattactg

SEQ ID NO: 9781 - DNA, 25 bp, Saccharomyces pastorianus
atacgccttaagtcccaattactat

SEQ ID NO: 9782 - DNA, 25 bp, Saccharomyces pastorianus
ggtgccgcggaaatactgccaagtt

SEQ ID NO: 9783 - DNA, 25 bp, Saccharomyces pastorianus
gaggagcgtcaacaattcaatcttg

SEQ ID NO: 9784 - DNA, 25 bp, Saccharomyces pastorianus
atggcctaacgatttatacgcctta

SEQ ID NO: 9785 - DNA, 25 bp, Saccharomyces pastorianus
caatcttgatttgttgccagctatt

SEQ ID NO: 9786 - DNA, 25 bp, Saccharomyces pastorianus
ctacaacttctctacaatcctggat

SEQ ID NO: 9787 - DNA, 25 bp, Saccharomyces pastorianus
gatgtagagcctgcgtacctcaaaa

SEQ ID NO: 9788 - DNA, 25 bp, Saccharomyces pastorianus
caagttatagcccaacatctccaag

SEQ ID NO: 9789 - DNA, 25 bp, Saccharomyces pastorianus
cacatctccgtttggagcttatggt

SEQ ID NO: 9790 - DNA, 25 bp, Saccharomyces pastorianus
tactctcctacatctccaagttata

SEQ ID NO: 9791 - DNA, 25 bp, Saccharomyces pastorianus
tacagcttacggtggtgcggactac

SEQ ID NO: 9792 - DNA, 25 bp, Saccharomyces pastorianus
tacttctcctaactatagccctact

SEQ ID NO: 9793 - DNA, 25 bp, Saccharomyces pastorianus
tgcggactacggtgaagccacatct

SEQ ID NO: 9794 - DNA, 25 bp, Saccharomyces pastorianus
acatctccaagctatagccctacat

SEQ ID NO: 9795 - DNA, 25 bp, Saccharomyces pastorianus
tagtcctacttcaccttcatactca

SEQ ID NO: 9796 - DNA, 25 bp, Saccharomyces pastorianus
atcgccatcatattcaccaacatca

SEQ ID NO: 9797 - DNA, 25 bp, Saccharomyces pastorianus
aacatctccgtcttattctcctaca

SEQ ID NO: 9798 - DNA, 25 bp, Saccharomyces pastorianus
ggattcggagtctcttcaccaggat

SEQ ID NO: 9799 - DNA, 25 bp, Saccharomyces pastorianus
cgtctggttagttttcgctaacaag

SEQ ID NO: 9800 - DNA, 25 bp, Saccharomyces pastorianus
tttgcattccatcagaaaccgtcca

SEQ ID NO: 9801 - DNA, 25 bp, Saccharomyces pastorianus
acaccgagggtgtcattttcgttgt

SEQ ID NO: 9802 - DNA, 25 bp, Saccharomyces pastorianus
gaggcactattacagaaacaccgag

SEQ ID NO: 9803 - DNA, 25 bp, Saccharomyces pastorianus
tagatcccgtgtcggtgaagccaga

SEQ ID NO: 9804 - DNA, 25 bp, Saccharomyces pastorianus
aattagatctctgtggaggcactat

SEQ ID NO: 9805 - DNA, 25 bp, Saccharomyces pastorianus
taagttgttcagcaaccttttcggt

SEQ ID NO: 9806 - DNA, 25 bp, Saccharomyces pastorianus
aattaggtttgcattccatcagaaa

SEQ ID NO: 9807 - DNA, 25 bp, Saccharomyces pastorianus
ggtctttatgcttctaagttgttca

SEQ ID NO: 9808 - DNA, 25 bp, Saccharomyces pastorianus
ttctaacgatagatcccgtgtcggt

SEQ ID NO: 9809 - DNA, 25 bp, Saccharomyces pastorianus
gtgtcattttcgttgtcgattctaa

SEQ ID NO: 9810 - DNA, 25 bp, Saccharomyces pastorianus
cacagggttacgatatgtacagtac

SEQ ID NO: 9811 - DNA, 25 bp, Saccharomyces pastorianus
agaaagcgaagctcctagtgggttt

SEQ ID NO: 9812 - DNA, 25 bp, Saccharomyces pastorianus
taggctctgatgttttaccgttaga

SEQ ID NO: 9813 - DNA, 25 bp, Saccharomyces pastorianus
gtcaacacagaaccacagcctatta

SEQ ID NO: 9814 - DNA, 25 bp, Saccharomyces pastorianus
cagcctattacatttgaccttacca

SEQ ID NO: 9815 - DNA, 25 bp, Saccharomyces pastorianus
gtctccgccaagaaaaccgttgatg

SEQ ID NO: 9816 - DNA, 25 bp, Saccharomyces pastorianus
taccgttagaattcgctggtgacaa

SEQ ID NO: 9817 - DNA, 25 bp, Saccharomyces pastorianus
gcggaagatgaatccttagccaaat

SEQ ID NO: 9818 - DNA, 25 bp, Saccharomyces pastorianus
agaatctttaggcttaggctctgat

SEQ ID NO: 9819 - DNA, 25 bp, Saccharomyces pastorianus
acgatcaatacaaagtctccgccaa

SEQ ID NO: 9820 - DNA, 25 bp, Saccharomyces pastorianus
tacatcaagaaagcgggcattgccg

SEQ ID NO: 9821 - DNA, 25 bp, Saccharomyces pastorianus
gctaagtggagaaagaagagaacta

SEQ ID NO: 9822 - DNA, 25 bp, Saccharomyces pastorianus
agctaagtggagaaagaagagaact

SEQ ID NO: 9823 - DNA, 25 bp, Saccharomyces pastorianus
gaaagaagagaactagaagacttaa

SEQ ID NO: 9824 - DNA, 25 bp, Saccharomyces pastorianus
atgagagctaagtggagaaagaaga

SEQ ID NO: 9825 - DNA, 25 bp, Saccharomyces pastorianus
gaagagaactagaagacttaagaga

SEQ ID NO: 9826 - DNA, 25 bp, Saccharomyces pastorianus
gagaaagaagagaactagaagactt

SEQ ID NO: 9827 - DNA, 25 bp, Saccharomyces pastorianus
ggagaaagaagagaactagaagact

SEQ ID NO: 9828 - DNA, 25 bp, Saccharomyces pastorianus
aagaagagaactagaagacttaaga

SEQ ID NO: 9829 - DNA, 25 bp, Saccharomyces pastorianus
aaagaagagaactagaagacttaag

SEQ ID NO: 9830 - DNA, 25 bp, Saccharomyces pastorianus
agaagagaactagaagacttaagag

SEQ ID NO: 9831 - DNA, 25 bp, Saccharomyces pastorianus
gagctaagtggagaaagaagagaac

SEQ ID NO: 9832 - DNA, 25 bp, Saccharomyces pastorianus
gattttccaaaactcgaggtcgaat

SEQ ID NO: 9833 - DNA, 25 bp, Saccharomyces pastorianus
tgtgcctcacttgcgttagcgatca

SEQ ID NO: 9834 - DNA, 25 bp, Saccharomyces pastorianus
gaggctttatcttcttttctatttg

SEQ ID NO: 9835 - DNA, 25 bp, Saccharomyces pastorianus
attgcccatgatgaatttgccggta

SEQ ID NO: 9836 - DNA, 25 bp, Saccharomyces pastorianus
aataatggccatctgcgtaaatgca

SEQ ID NO: 9837 - DNA, 25 bp, Saccharomyces pastorianus
atcggtattttgtcgtgtgcctcac

SEQ ID NO: 9838 - DNA, 25 bp, Saccharomyces pastorianus
gatagtcaacacttagtcttgggtt

SEQ ID NO: 9839 - DNA, 25 bp, Saccharomyces pastorianus
tttgccggtaaacctgttgggctga

SEQ ID NO: 9840 - DNA, 25 bp, Saccharomyces pastorianus
gtagcattggcattcaacactcgtt

SEQ ID NO: 9841 - DNA, 25 bp, Saccharomyces pastorianus
aatgggtttgtacttcgattcgcag

SEQ ID NO: 9842 - DNA, 25 bp, Saccharomyces pastorianus
gggtgataaccttttccattagtat

SEQ ID NO: 9843 - DNA, 25 bp, Saccharomyces pastorianus
aacaagttcctccagggctagactc

SEQ ID NO: 9844 - DNA, 25 bp, Saccharomyces pastorianus
gcggaggacacgacaatcatggcaa

SEQ ID NO: 9845 - DNA, 25 bp, Saccharomyces pastorianus
gagagccattgacagtctaatccaa

SEQ ID NO: 9846 - DNA, 25 bp, Saccharomyces pastorianus
atattttacaaaccctatcaggcgg

SEQ ID NO: 9847 - DNA, 25 bp, Saccharomyces pastorianus
gagcattcaacacattgctgcagca

SEQ ID NO: 9848 - DNA, 25 bp, Saccharomyces pastorianus
gctgcagcaatgataccgttcatca

SEQ ID NO: 9849 - DNA, 25 bp, Saccharomyces pastorianus
gaggaaccttccacatacaacgctt

SEQ ID NO: 9850 - DNA, 25 bp, Saccharomyces pastorianus
gaccaatataaatttcgccagcggg

SEQ ID NO: 9851 - DNA, 25 bp, Saccharomyces pastorianus
aacgcaaaggtttccatgatcaaga

SEQ ID NO: 9852 - DNA, 25 bp, Saccharomyces pastorianus
agacggcacaagcttgagcattcaa

SEQ ID NO: 9853 - DNA, 25 bp, Saccharomyces pastorianus
gtagagttccgtttaatttcactgt

SEQ ID NO: 9854 - DNA, 25 bp, Saccharomyces pastorianus
gaacaattagctcacgtcaaggaac

SEQ ID NO: 9855 - DNA, 25 bp, Saccharomyces pastorianus
gggttcaggacattttcatcaagag

SEQ ID NO: 9856 - DNA, 25 bp, Saccharomyces pastorianus
aatagcctctcgcttatactcggat

SEQ ID NO: 9857 - DNA, 25 bp, Saccharomyces pastorianus
gtaatgccaagctgccaacaaactt

SEQ ID NO: 9858 - DNA, 25 bp, Saccharomyces pastorianus
ttaagtcgttgcatctcccgtaatg

SEQ ID NO: 9859 - DNA, 25 bp, Saccharomyces pastorianus
ttttcatcaagagggaacgtgccaa

SEQ ID NO: 9860 - DNA, 25 bp, Saccharomyces pastorianus
ttatactcggatggccctctaggtg

SEQ ID NO: 9861 - DNA, 25 bp, Saccharomyces pastorianus
ggaacgtgccaaggaagatttcttt

SEQ ID NO: 9862 - DNA, 25 bp, Saccharomyces pastorianus
gatggccctctaggtggttccggcc

SEQ ID NO: 9863 - DNA, 25 bp, Saccharomyces pastorianus
aggaagatttctttgccaggcaaca

SEQ ID NO: 9864 - DNA, 25 bp, Saccharomyces pastorianus
caaacttcagaatagcctctcgctt

SEQ ID NO: 9865 - DNA, 25 bp, Saccharomyces pastorianus
tccaagcgggtcaggtgcagcattt

SEQ ID NO: 9866 - DNA, 25 bp, Saccharomyces pastorianus
agatgccgaactacgtcgttatgaa

SEQ ID NO: 9867 - DNA, 25 bp, Saccharomyces pastorianus
gatccagttccatatatcactaagg

SEQ ID NO: 9868 - DNA, 25 bp, Saccharomyces pastorianus
taataacggtgctccaagcgggtca

SEQ ID NO: 9869 - DNA, 25 bp, Saccharomyces pastorianus
atgaagaccgccaagcgttctgtct

SEQ ID NO: 9870 - DNA, 25 bp, Saccharomyces pastorianus
ggtactactggcacagacaatgcta

SEQ ID NO: 9871 - DNA, 25 bp, Saccharomyces pastorianus
gaattaactgcgattgccaaggcta

SEQ ID NO: 9872 - DNA, 25 bp, Saccharomyces pastorianus
aagcgttctgtctcagatgccgaac

SEQ ID NO: 9873 - DNA, 25 bp, Saccharomyces pastorianus
caaggctacccaaggtttctctggt

SEQ ID NO: 9874 - DNA, 25 bp, Saccharomyces pastorianus
tcctgctatcttgagacctggaaga

SEQ ID NO: 9875 - DNA, 25 bp, Saccharomyces pastorianus
gctagattgtctatcctaaacgcac

SEQ ID NO: 9876 - DNA, 25 bp, Saccharomyces pastorianus
gcagtcctatttcgttccggtctgt

SEQ ID NO: 9877 - DNA, 25 bp, Saccharomyces pastorianus
aaatatccaaactcctctgctgcaa

SEQ ID NO: 9878 - DNA, 25 bp, Saccharomyces pastorianus
ctgttctcatctgatttcctactga

SEQ ID NO: 9879 - DNA, 25 bp, Saccharomyces pastorianus
ctgaatgtactgttgacgctactgg

SEQ ID NO: 9880 - DNA, 25 bp, Saccharomyces pastorianus
tgttgctactgtctttgctgcacag

SEQ ID NO: 9881 - DNA, 25 bp, Saccharomyces pastorianus
gactacgtctactattaccaacaag

SEQ ID NO: 9882 - DNA, 25 bp, Saccharomyces pastorianus
gggaagctccactagaaacgtttat

SEQ ID NO: 9883 - DNA, 25 bp, Saccharomyces pastorianus
gcacagtgtccgacttcatactata

SEQ ID NO: 9884 - DNA, 25 bp, Saccharomyces pastorianus
ataaggaacgccgactacgtctact

SEQ ID NO: 9885 - DNA, 25 bp, Saccharomyces pastorianus
tacatcacgattacaagccccataa

SEQ ID NO: 9886 - DNA, 25 bp, Saccharomyces pastorianus
ctatatgtcattgcgcttttcttcc

SEQ ID NO: 9887 - DNA, 25 bp, Saccharomyces pastorianus
tttgcgttcagtcattgttcattac

SEQ ID NO: 9888 - DNA, 25 bp, Saccharomyces pastorianus
tatccgatgagaccgtgtacgtcgt

SEQ ID NO: 9889 - DNA, 25 bp, Saccharomyces pastorianus
cacctggtgtgtttatgctatttta

SEQ ID NO: 9890 - DNA, 25 bp, Saccharomyces pastorianus
gacgccttaggcaacaccattagaa

SEQ ID NO: 9891 - DNA, 25 bp, Saccharomyces pastorianus
tacggtactcacaattatggtcact

SEQ ID NO: 9892 - DNA, 25 bp, Saccharomyces pastorianus
ggaccaattagactcatcatcagat

SEQ ID NO: 9893 - DNA, 25 bp, Saccharomyces pastorianus
tggtcactacattgcattcaggaag

SEQ ID NO: 9894 - DNA, 25 bp, Saccharomyces pastorianus
gacaacgtaaaccacagcgagctaa

SEQ ID NO: 9895 - DNA, 25 bp, Saccharomyces pastorianus
cgcccatcaactatgctaggtcatt

SEQ ID NO: 9896 - DNA, 25 bp, Saccharomyces pastorianus
tccgctgacatattctttgcgttca

SEQ ID NO: 9897 - DNA, 25 bp, Saccharomyces pastorianus
gaggaagatgctataccggctccgc

SEQ ID NO: 9898 - DNA, 25 bp, Saccharomyces pastorianus
agagagcaagcttaaccacaccaat

SEQ ID NO: 9899 - DNA, 25 bp, Saccharomyces pastorianus
gtaaaagcgcaatcaccaacaggaa

SEQ ID NO: 9900 - DNA, 25 bp, Saccharomyces pastorianus
tatacggctactttgtgctcctcat

SEQ ID NO: 9901 - DNA, 25 bp, Saccharomyces pastorianus
gatggctctggcgatgatagcacag

SEQ ID NO: 9902 - DNA, 25 bp, Saccharomyces pastorianus
acaccaatgtgctgaagttcgacct

SEQ ID NO: 9903 - DNA, 25 bp, Saccharomyces pastorianus
caagttgactaaaccgagctcatcg

SEQ ID NO: 9904 - DNA, 25 bp, Saccharomyces pastorianus
gatagcacaggtgtttcttctgatt

SEQ ID NO: 9905 - DNA, 25 bp, Saccharomyces pastorianus
gccgtggttcttttcattgcattat

SEQ ID NO: 9906 - DNA, 25 bp, Saccharomyces pastorianus
ggacaatataaccaggaccccaatg

SEQ ID NO: 9907 - DNA, 25 bp, Saccharomyces pastorianus
gaccccaatgattttgatttcgata

SEQ ID NO: 9908 - DNA, 25 bp, Saccharomyces pastorianus
gcattattgcctttgttttctggta

SEQ ID NO: 9909 - DNA, 25 bp, Saccharomyces pastorianus
aagcgtcctctagcaagtttagtac

SEQ ID NO: 9910 - DNA, 25 bp, Saccharomyces pastorianus
gtagcaaccaacatgggtctcactt

SEQ ID NO: 9911 - DNA, 25 bp, Saccharomyces pastorianus
gtacgaatgagtgccgtgctcggaa

SEQ ID NO: 9912 - DNA, 25 bp, Saccharomyces pastorianus
tgagaacacctactagacttcgtcc

SEQ ID NO: 9913 - DNA, 25 bp, Saccharomyces pastorianus
gggtctcactttaaatctttttcag

SEQ ID NO: 9914 - DNA, 25 bp, Saccharomyces pastorianus
ggaggtaccagcttatgggacatac

SEQ ID NO: 9915 - DNA, 25 bp, Saccharomyces pastorianus
tgtctggacctgacagatttgacct

SEQ ID NO: 9916 - DNA, 25 bp, Saccharomyces pastorianus
gtggtccctcaagaagtggtaaact

SEQ ID NO: 9917 - DNA, 25 bp, Saccharomyces pastorianus
aacagatggtcaagtggtccctcaa

SEQ ID NO: 9918 - DNA, 25 bp, Saccharomyces pastorianus
agacttcgtcccattgtagcaacca

SEQ ID NO: 9919 - DNA, 25 bp, Saccharomyces pastorianus
ataaacaaatctggctggcatctcc

SEQ ID NO: 9920 - DNA, 25 bp, Saccharomyces pastorianus
gcagtagtctaccacggctaacaat

SEQ ID NO: 9921 - DNA, 25 bp, Saccharomyces pastorianus
aattattgcccatgatcctacctag

SEQ ID NO: 9922 - DNA, 25 bp, Saccharomyces pastorianus
ttactacctatacttccacaacgat

SEQ ID NO: 9923 - DNA, 25 bp, Saccharomyces pastorianus
gagccatcgaagtttaccaattcct

SEQ ID NO: 9924 - DNA, 25 bp, Saccharomyces pastorianus
acagcaccattcgacactataaaga

SEQ ID NO: 9925 - DNA, 25 bp, Saccharomyces pastorianus
gctacatgtttaagagatgcccctt

SEQ ID NO: 9926 - DNA, 25 bp, Saccharomyces pastorianus
gctatatcactatgccaatcactgt

SEQ ID NO: 9927 - DNA, 25 bp, Saccharomyces pastorianus
aagaggcctggtgggctatatcact

SEQ ID NO: 9928 - DNA, 25 bp, Saccharomyces pastorianus
agatgccccttatgctggattatac

SEQ ID NO: 9929 - DNA, 25 bp, Saccharomyces pastorianus
aaaggcgctgagtgccggtatcgca

SEQ ID NO: 9930 - DNA, 25 bp, Saccharomyces pastorianus
aacgagtgccgtgttgtctgccagt

SEQ ID NO: 9931 - DNA, 25 bp, Saccharomyces pastorianus
tggaacgccctaacaacaacgccgg

SEQ ID NO: 9932 - DNA, 25 bp, Saccharomyces pastorianus
acaccgcgagtgtgaacttgaagaa

SEQ ID NO: 9933 - DNA, 25 bp, Saccharomyces pastorianus
gaatcggttcacatggcaacatctg

SEQ ID NO: 9934 - DNA, 25 bp, Saccharomyces pastorianus
aagaaactgatcctcacaccgcgag

SEQ ID NO: 9935 - DNA, 25 bp, Saccharomyces pastorianus
attgaacaactttctgactctttga

SEQ ID NO: 9936 - DNA, 25 bp, Saccharomyces pastorianus
ggcaacatctgcgagagagctaata

SEQ ID NO: 9937 - DNA, 25 bp, Saccharomyces pastorianus
ttttccgaatcttcaatcactttgg

SEQ ID NO: 9938 - DNA, 25 bp, Saccharomyces pastorianus
tggcatccatggttaaagaatccgt

SEQ ID NO: 9939 - DNA, 25 bp, Saccharomyces pastorianus
atatatgagaaattacgcccggaag

SEQ ID NO: 9940 - DNA, 25 bp, Saccharomyces pastorianus
aacaacgccggcaatggtggaaaat

SEQ ID NO: 9941 - DNA, 25 bp, Saccharomyces pastorianus
tgaccagttgcccagattttcgaaa

SEQ ID NO: 9942 - DNA, 25 bp, Saccharomyces pastorianus
agaccgttcttgacctggacaataa

SEQ ID NO: 9943 - DNA, 25 bp, Saccharomyces pastorianus
gaatgtagctgtcactgctgataga

SEQ ID NO: 9944 - DNA, 25 bp, Saccharomyces pastorianus
agactctgacacatctccattgcag

SEQ ID NO: 9945 - DNA, 25 bp, Saccharomyces pastorianus
gattgttgtttcttcattggtggac

SEQ ID NO: 9946 - DNA, 25 bp, Saccharomyces pastorianus
gcgctagcgggtgtacagactctga

SEQ ID NO: 9947 - DNA, 25 bp, Saccharomyces pastorianus
aaagtggtgcctgggagaccgttct

SEQ ID NO: 9948 - DNA, 25 bp, Saccharomyces pastorianus
gacaccgatatagatgctggcgcta

SEQ ID NO: 9949 - DNA, 25 bp, Saccharomyces pastorianus
tacgcgttccgacttgattgttgtt

SEQ ID NO: 9950 - DNA, 25 bp, Saccharomyces pastorianus
tggtattccaggtcctttactgagt

SEQ ID NO: 9951 - DNA, 25 bp, Saccharomyces pastorianus
gacaagccacccaatcttggaggta

SEQ ID NO: 9952 - DNA, 25 bp, Saccharomyces pastorianus
atgaatattcaaactgccactgcag

SEQ ID NO: 9953 - DNA, 25 bp, Saccharomyces pastorianus
gccaaagagacgatgccctgatagt

SEQ ID NO: 9954 - DNA, 25 bp, Saccharomyces pastorianus
aagtcgttgatcattccgtggagaa

SEQ ID NO: 9955 - DNA, 25 bp, Saccharomyces pastorianus
cgaagcttatttccgcgtttgacga

SEQ ID NO: 9956 - DNA, 25 bp, Saccharomyces pastorianus
aatggtctaattgtcacgtggtcga

SEQ ID NO: 9957 - DNA, 25 bp, Saccharomyces pastorianus
ggtgtttatactggccatcgtgggc

SEQ ID NO: 9958 - DNA, 25 bp, Saccharomyces pastorianus
tggcaagattacgtctcccatcaga

SEQ ID NO: 9959 - DNA, 25 bp, Saccharomyces pastorianus
tgtcttggtcatttcttcattctca

SEQ ID NO: 9960 - DNA, 25 bp, Saccharomyces pastorianus
aactgctccaggtcgacgtggatat

SEQ ID NO: 9961 - DNA, 25 bp, Saccharomyces pastorianus
gagacgatcacttccttgttgaata

SEQ ID NO: 9962 - DNA, 25 bp, Saccharomyces pastorianus
gtgggcaacaacatactcgtggacc

SEQ ID NO: 9963 - DNA, 25 bp, Saccharomyces pastorianus
ttcattctcatacccagtttcttta

SEQ ID NO: 9964 - DNA, 25 bp, Saccharomyces pastorianus
gtgagcttccaaatactccagactt

SEQ ID NO: 9965 - DNA, 25 bp, Saccharomyces pastorianus
cagacaggtgaatgacgcctttgtt

SEQ ID NO: 9966 - DNA, 25 bp, Saccharomyces pastorianus
taatacctgccattaatcctgcaat

SEQ ID NO: 9967 - DNA, 25 bp, Saccharomyces pastorianus
aacaccaaccgggatgccaataatg

SEQ ID NO: 9968 - DNA, 25 bp, Saccharomyces pastorianus
agaatctctgttcttcgaccatgat

SEQ ID NO: 9969 - DNA, 25 bp, Saccharomyces pastorianus
ttcaagcgcaacagattccaatcca

SEQ ID NO: 9970 - DNA, 25 bp, Saccharomyces pastorianus
gaggaggaccatctagttcaagaac

SEQ ID NO: 9971 - DNA, 25 bp, Saccharomyces pastorianus
taaccaatggtcaatctgcgatgat

SEQ ID NO: 9972 - DNA, 25 bp, Saccharomyces pastorianus
tggatactacggtcaacagcaacac

SEQ ID NO: 9973 - DNA, 25 bp, Saccharomyces pastorianus
gatcaattattgtctttaccagctg

SEQ ID NO: 9974 - DNA, 25 bp, Saccharomyces pastorianus
acatttgcccgacgacactaattta

SEQ ID NO: 9975 - DNA, 25 bp, Saccharomyces pastorianus
gagactcaaagtatctacccaacga

SEQ ID NO: 9976 - DNA, 25 bp, Saccharomyces pastorianus
gacccctttccgttgagaggagact

SEQ ID NO: 9977 - DNA, 25 bp, Saccharomyces pastorianus
ttatttacagcagttctcgcaccac

SEQ ID NO: 9978 - DNA, 25 bp, Saccharomyces pastorianus
gtcgtgacgctcatcagaaccatat

SEQ ID NO: 9979 - DNA, 25 bp, Saccharomyces pastorianus
gtagaccatctgatgggaccccttt

SEQ ID NO: 9980 - DNA, 25 bp, Saccharomyces pastorianus
tttaaggccacctccatgaggcata

SEQ ID NO: 9981 - DNA, 25 bp, Saccharomyces pastorianus
atgggtgccctctacaatgttgtga

SEQ ID NO: 9982 - DNA, 25 bp, Saccharomyces pastorianus
ggaaggtctacctacggtcaggata

SEQ ID NO: 9983 - DNA, 25 bp, Saccharomyces pastorianus
ttcattccccaagtccatcgaaaat

SEQ ID NO: 9984 - DNA, 25 bp, Saccharomyces pastorianus
aaagacgctcccatggtagaccatc

SEQ ID NO: 9985 - DNA, 25 bp, Saccharomyces pastorianus
caccacaatgatttctcccagttta

SEQ ID NO: 9986 - DNA, 25 bp, Saccharomyces pastorianus
gcatagtgaagttctgtgttccaat

SEQ ID NO: 9987 - DNA, 25 bp, Saccharomyces pastorianus
aaactatacaaacccacagccacat

SEQ ID NO: 9988 - DNA, 25 bp, Saccharomyces pastorianus
gtactctagactatggacacaatgc

SEQ ID NO: 9989 - DNA, 25 bp, Saccharomyces pastorianus
ggcagaagatccgttattcgtgtta

SEQ ID NO: 9990 - DNA, 25 bp, Saccharomyces pastorianus
agccacatgctgtcttagctgagcg

SEQ ID NO: 9991 - DNA, 25 bp, Saccharomyces pastorianus
ggattatgtcattaccggtgggaat

SEQ ID NO: 9992 - DNA, 25 bp, Saccharomyces pastorianus
gttccaactgtttagccagatctgg

SEQ ID NO: 9993 - DNA, 25 bp, Saccharomyces pastorianus
gtccatcaagattaacaccggctct

SEQ ID NO: 9994 - DNA, 25 bp, Saccharomyces pastorianus
ggtatgttcgttgtaaagtccatca

SEQ ID NO: 9995 - DNA, 25 bp, Saccharomyces pastorianus
gaactgtgacattttctacatgcgt

SEQ ID NO: 9996 - DNA, 25 bp, Saccharomyces pastorianus
ataatattcaagtcgattcgcgtta

SEQ ID NO: 9997 - DNA, 25 bp, Saccharomyces pastorianus
ttcagtctcaatggatttacaacgt

SEQ ID NO: 9998 - DNA, 25 bp, Saccharomyces pastorianus
attgacgaagctatgggccatcctt

SEQ ID NO: 9999 - DNA, 25 bp, Saccharomyces pastorianus
tgtacgtttgcttatgcggtttccc

SEQ ID NO: 10000 - DNA, 25 bp, Saccharomyces pastorianus
ctaatttctaatcttttggtgctga

SEQ ID NO: 10001 - DNA, 25 bp, Saccharomyces pastorianus
agtgcgggtgtcatactgtacgttt

SEQ ID NO: 10002 - DNA, 25 bp, Saccharomyces pastorianus
acgtggcgcctgaagttcttacaaa

SEQ ID NO: 10003 - DNA, 25 bp, Saccharomyces pastorianus
gaataccctttgtggtactccatct

SEQ ID NO: 10004 - DNA, 25 bp, Saccharomyces pastorianus
gcattttactctccatactgggaca

SEQ ID NO: 10005 - DNA, 25 bp, Saccharomyces pastorianus
ggccatccttggttcatagactcaa

SEQ ID NO: 10006 - DNA, 25 bp, Saccharomyces pastorianus
caagggccttattcaaacaactgtt

SEQ ID NO: 10007 - DNA, 25 bp, Saccharomyces pastorianus
aatcaaatccagttaggcccatggg

SEQ ID NO: 10008 - DNA, 25 bp, Saccharomyces pastorianus
aagttttcgcaattcctagacaagg

SEQ ID NO: 10009 - DNA, 25 bp, Saccharomyces pastorianus
attgcctaacactttgtccaagcta

SEQ ID NO: 10010 - DNA, 25 bp, Saccharomyces pastorianus
ttgatacggtcatcttcgacacagc

SEQ ID NO: 10011 - DNA, 25 bp, Saccharomyces pastorianus
aaactccttcatgggcgcgggtaat

SEQ ID NO: 10012 - DNA, 25 bp, Saccharomyces pastorianus
gatgccattgtgtgctggtgaaatc

SEQ ID NO: 10013 - DNA, 25 bp, Saccharomyces pastorianus
tgacctgaccacttttgtctgcgtg

SEQ ID NO: 10014 - DNA, 25 bp, Saccharomyces pastorianus
aggaatacgaccctgttgctgacgg

SEQ ID NO: 10015 - DNA, 25 bp, Saccharomyces pastorianus
gtctgcgtgtgcatcagtgaattct

SEQ ID NO: 10016 - DNA, 25 bp, Saccharomyces pastorianus
gatctcctacgacatggacgtcaat

SEQ ID NO: 10017 - DNA, 25 bp, Saccharomyces pastorianus
gtacgaagatttccacgtcatcaag

SEQ ID NO: 10018 - DNA, 25 bp, Saccharomyces pastorianus
gtcaattccatcatcgtcaaccagt

SEQ ID NO: 10019 - DNA, 25 bp, Saccharomyces pastorianus
agcatcgcctgttcattttgcagat

SEQ ID NO: 10020 - DNA, 25 bp, Saccharomyces pastorianus
agtaagaactaccacagcatcgcct

SEQ ID NO: 10021 - DNA, 25 bp, Saccharomyces pastorianus
caccggtagtcgctgaggagcctaa

SEQ ID NO: 10022 - DNA, 25 bp, Saccharomyces pastorianus
acagctacacaacaacgcctaaggg

SEQ ID NO: 10023 - DNA, 25 bp, Saccharomyces pastorianus
acgaagaatccgatttcctgaccac

SEQ ID NO: 10024 - DNA, 25 bp, Saccharomyces pastorianus
aaatccgccgctaattttgcgccaa

SEQ ID NO: 10025 - DNA, 25 bp, Saccharomyces pastorianus
tcccattcatcagctgaggcagacg

SEQ ID NO: 10026 - DNA, 25 bp, Saccharomyces pastorianus
aactggaacgttgacatgaccggtt

SEQ ID NO: 10027 - DNA, 25 bp, Saccharomyces pastorianus
aaaactattgggactgcaccggtag

SEQ ID NO: 10028 - DNA, 25 bp, Saccharomyces pastorianus
aattcaacttcttcgaaatccgccg

SEQ ID NO: 10029 - DNA, 25 bp, Saccharomyces pastorianus
ttgcgccaatggctcgtggtaacca

SEQ ID NO: 10030 - DNA, 25 bp, Saccharomyces pastorianus
accttctttgctgcttctgtatatt

SEQ ID NO: 10031 - DNA, 25 bp, Saccharomyces pastorianus
atgttcttacaccattacttgcctg

SEQ ID NO: 10032 - DNA, 25 bp, Saccharomyces pastorianus
tacttgcctgcttactacttcggta

SEQ ID NO: 10033 - DNA, 25 bp, Saccharomyces pastorianus
gccctaggccatgccttggatataa

SEQ ID NO: 10034 - DNA, 25 bp, Saccharomyces pastorianus
ttacgcgccatccttcttaatgcaa

SEQ ID NO: 10035 - DNA, 25 bp, Saccharomyces pastorianus
gagttacagcccacttatctatggt

SEQ ID NO: 10036 - DNA, 25 bp, Saccharomyces pastorianus
atgggctatgctgtattggtcacct

SEQ ID NO: 10037 - DNA, 25 bp, Saccharomyces pastorianus
tgtctggttgggattacggctgtaa

SEQ ID NO: 10038 - DNA, 25 bp, Saccharomyces pastorianus
aattcctacctctctacatttgaag

SEQ ID NO: 10039 - DNA, 25 bp, Saccharomyces pastorianus
taatagtcagttatgtcttccgtaa

SEQ ID NO: 10040 - DNA, 25 bp, Saccharomyces pastorianus
tatttgttgggtttcgccatccatt

SEQ ID NO: 10041 - DNA, 25 bp, Saccharomyces pastorianus
gagatttccgtcaattcaagctctg

SEQ ID NO: 10042 - DNA, 25 bp, Saccharomyces pastorianus
gaaggctaaatgctctacaatggta

SEQ ID NO: 10043 - DNA, 25 bp, Saccharomyces pastorianus
tgtacgtttaacagccaaaaggctc

SEQ ID NO: 10044 - DNA, 25 bp, Saccharomyces pastorianus
tttgatgctaccaacaatcctgaat

SEQ ID NO: 10045 - DNA, 25 bp, Saccharomyces pastorianus
ggcaagaatactcatctgtgtttaa

SEQ ID NO: 10046 - DNA, 25 bp, Saccharomyces pastorianus
aatcctgaatatgacgtttccagaa

SEQ ID NO: 10047 - DNA, 25 bp, Saccharomyces pastorianus
ggctcatagagcacgatccggtaga

SEQ ID NO: 10048 - DNA, 25 bp, Saccharomyces pastorianus
tgtcctatggctcacatggcaagaa

SEQ ID NO: 10049 - DNA, 25 bp, Saccharomyces pastorianus
tcaagctctgacaaggaatacccat

SEQ ID NO: 10050 - DNA, 25 bp, Saccharomyces pastorianus
attgctaatcagaatgtcctatggc

SEQ ID NO: 10051 - DNA, 25 bp, Saccharomyces pastorianus
gtttccagaaaagcgcccgagattt

SEQ ID NO: 10052 - DNA, 25 bp, Saccharomyces pastorianus
gagagttgaaggctctatctcaaat

SEQ ID NO: 10053 - DNA, 25 bp, Saccharomyces pastorianus
atacgcattcgtagacttacattta

SEQ ID NO: 10054 - DNA, 25 bp, Saccharomyces pastorianus
gagagcttgagatgtctaccataat

SEQ ID NO: 10055 - DNA, 25 bp, Saccharomyces pastorianus
tcaagattctttaaggcgcgatcaa

SEQ ID NO: 10056 - DNA, 25 bp, Saccharomyces pastorianus
tgctgagcgacctgctaatttccag

SEQ ID NO: 10057 - DNA, 25 bp, Saccharomyces pastorianus
aatttccagcaccagtatgggttta

SEQ ID NO: 10058 - DNA, 25 bp, Saccharomyces pastorianus
aattgatcacaccagtaccgagaag

SEQ ID NO: 10059 - DNA, 25 bp, Saccharomyces pastorianus
atcctcgtttgatccaattgcgtca

SEQ ID NO: 10060 - DNA, 25 bp, Saccharomyces pastorianus
agaaccaactcaacttgctgagcga

SEQ ID NO: 10061 - DNA, 25 bp, Saccharomyces pastorianus
gttcgatgcatctttaccaacggag

SEQ ID NO: 10062 - DNA, 25 bp, Saccharomyces pastorianus
acatggcttacttgatccagaagaa

SEQ ID NO: 10063 - DNA, 25 bp, Saccharomyces pastorianus
gaagctctacagatcctggcgaagt

SEQ ID NO: 10064 - DNA, 25 bp, Saccharomyces pastorianus
tggcgaagtccagttttcaccacac

SEQ ID NO: 10065 - DNA, 25 bp, Saccharomyces pastorianus
agcaccaaaagttttcaccactcat

SEQ ID NO: 10066 - DNA, 25 bp, Saccharomyces pastorianus
gagcccgttgagacaaacaccttta

SEQ ID NO: 10067 - DNA, 25 bp, Saccharomyces pastorianus
gacggtttgattttatcgagcgcag

SEQ ID NO: 10068 - DNA, 25 bp, Saccharomyces pastorianus
attatctccacaccagtatttgcag

SEQ ID NO: 10069 - DNA, 25 bp, Saccharomyces pastorianus
gaataaccctgttcgattatctcca

SEQ ID NO: 10070 - DNA, 25 bp, Saccharomyces pastorianus
tcgagcgcagctttacaggaatatg

SEQ ID NO: 10071 - DNA, 25 bp, Saccharomyces pastorianus
gacatcaatgccatacttcgttcgc

SEQ ID NO: 10072 - DNA, 25 bp, Saccharomyces pastorianus
aagccagtttatgcactcgatcgaa

SEQ ID NO: 10073 - DNA, 25 bp, Saccharomyces pastorianus
gacacgcgtaaaccgacaagccagt

SEQ ID NO: 10074 - DNA, 25 bp, Saccharomyces pastorianus
tgaacccgctggactcatacataaa

SEQ ID NO: 10075 - DNA, 25 bp, Saccharomyces pastorianus
ataagggaaccatcactcctgcaat

SEQ ID NO: 10076 - DNA, 25 bp, Saccharomyces pastorianus
gatacggctaacgatcatactgatt

SEQ ID NO: 10077 - DNA, 25 bp, Saccharomyces pastorianus
aacagctggctggttgcagaattga

SEQ ID NO: 10078 - DNA, 25 bp, Saccharomyces pastorianus
acgtctcaacgtatcaaaactcctc

SEQ ID NO: 10079 - DNA, 25 bp, Saccharomyces pastorianus
atggcaagtcgctcttcattcaaaa

SEQ ID NO: 10080 - DNA, 25 bp, Saccharomyces pastorianus
atcactcctgcaatcgatgttggta

SEQ ID NO: 10081 - DNA, 25 bp, Saccharomyces pastorianus
aactgtccatcttctgcattgaggg

SEQ ID NO: 10082 - DNA, 25 bp, Saccharomyces pastorianus
ggaagcatctatcacggtgccttaa

SEQ ID NO: 10083 - DNA, 25 bp, Saccharomyces pastorianus
aatccaaatatgacccattctccga

SEQ ID NO: 10084 - DNA, 25 bp, Saccharomyces pastorianus
gtgccttaattggttgtatcccgta

SEQ ID NO: 10085 - DNA, 25 bp, Saccharomyces pastorianus
ttccccactgatattcactcgagaa

SEQ ID NO: 10086 - DNA, 25 bp, Saccharomyces pastorianus
gccttcagggcgttgttggacaaga

SEQ ID NO: 10087 - DNA, 25 bp, Saccharomyces pastorianus
caagaagccgctggagtcgtacgat

SEQ ID NO: 10088 - DNA, 25 bp, Saccharomyces pastorianus
acaacttcatgggtcctgaggcgtt

SEQ ID NO: 10089 - DNA, 25 bp, Saccharomyces pastorianus
tcggattcctgttcgagcaattcaa

SEQ ID NO: 10090 - DNA, 25 bp, Saccharomyces pastorianus
tcggtacttcggacacccatgtgga

SEQ ID NO: 10091 - DNA, 25 bp, Saccharomyces pastorianus
gacgactcactggaacgtgtttcga

SEQ ID NO: 10092 - DNA, 25 bp, Saccharomyces pastorianus
aaatggttctgatcttcggtacttc

SEQ ID NO: 10093 - DNA, 25 bp, Saccharomyces pastorianus
aacaagctgtgttgcgacctgcttt

SEQ ID NO: 10094 - DNA, 25 bp, Saccharomyces pastorianus
agttcacgttcttggaggtcttggc

SEQ ID NO: 10095 - DNA, 25 bp, Saccharomyces pastorianus
ggaaactgagacttgacctgggcga

SEQ ID NO: 10096 - DNA, 25 bp, Saccharomyces pastorianus
acaagcgcggtcttttgattaacga

SEQ ID NO: 10097 - DNA, 25 bp, Saccharomyces pastorianus
gaatacctggccagaaccttggaca

SEQ ID NO: 10098 - DNA, 25 bp, Saccharomyces pastorianus
gaatgctcgtttgggcaaccgggaa

SEQ ID NO: 10099 - DNA, 25 bp, Saccharomyces pastorianus
gattctgatcgccatggactggact

SEQ ID NO: 10100 - DNA, 25 bp, Saccharomyces pastorianus
tagaaccaacttacatccatacctt

SEQ ID NO: 10101 - DNA, 25 bp, Saccharomyces pastorianus
acaaactggagctactgggcgcaga

SEQ ID NO: 10102 - DNA, 25 bp, Saccharomyces pastorianus
agaggactctgtctatgccatcggc

SEQ ID NO: 10103 - DNA, 25 bp, Saccharomyces pastorianus
aaagtgtcccgtctgcaaggcgaaa

SEQ ID NO: 10104 - DNA, 25 bp, Saccharomyces pastorianus
tccataccttgcaaagcggccagaa

SEQ ID NO: 10105 - DNA, 25 bp, Saccharomyces pastorianus
ttggcaatgtgtctctccatcagaa

SEQ ID NO: 10106 - DNA, 25 bp, Saccharomyces pastorianus
gattgctgacctacacatgggtgac

SEQ ID NO: 10107 - DNA, 25 bp, Saccharomyces pastorianus
aagtctaccacgagagctaatgaat

SEQ ID NO: 10108 - DNA, 25 bp, Saccharomyces pastorianus
gggtttagccatttcatttgtttca

SEQ ID NO: 10109 - DNA, 25 bp, Saccharomyces pastorianus
tatgatttgaccaacgaggccgatc

SEQ ID NO: 10110 - DNA, 25 bp, Saccharomyces pastorianus
accaagtcatcattttcgttaagtc

SEQ ID NO: 10111 - DNA, 25 bp, Saccharomyces pastorianus
gattcggtaccaagggtttagccat

SEQ ID NO: 10112 - DNA, 25 bp, Saccharomyces pastorianus
tgtgtccactgatgttttcggtaga

SEQ ID NO: 10113 - DNA, 25 bp, Saccharomyces pastorianus
attaaatgcttctaacttccctgcc

SEQ ID NO: 10114 - DNA, 25 bp, Saccharomyces pastorianus
aagaatcgtaaactagcccaactat

SEQ ID NO: 10115 - DNA, 25 bp, Saccharomyces pastorianus
catcaccgtccatggtcacatgaaa

SEQ ID NO: 10116 - DNA, 25 bp, Saccharomyces pastorianus
gaacgtattaacctggccatcaatt

SEQ ID NO: 10117 - DNA, 25 bp, Saccharomyces pastorianus
gaaaaacgtatctgtgtgtccactg

SEQ ID NO: 10118 - DNA, 25 bp, Saccharomyces pastorianus
ctgaggctgccaatgttccagttga

SEQ ID NO: 10119 - DNA, 25 bp, Saccharomyces pastorianus
gatcttggccgactctgaaatcgaa

SEQ ID NO: 10120 - DNA, 25 bp, Saccharomyces pastorianus
gacattttcgccaaggctttggacg

SEQ ID NO: 10121 - DNA, 25 bp, Saccharomyces pastorianus
gtatctgggctgacattttcgccaa

SEQ ID NO: 10122 - DNA, 25 bp, Saccharomyces pastorianus
gactttgactgaggctgccaatgtt

SEQ ID NO: 10123 - DNA, 25 bp, Saccharomyces pastorianus
tcgccaaggctttggacggtcaaaa

SEQ ID NO: 10124 - DNA, 25 bp, Saccharomyces pastorianus
tgtctcctccggtgttgctggtggt

SEQ ID NO: 10125 - DNA, 25 bp, Saccharomyces pastorianus
ttgtcttacgctgccttgatcttgg

SEQ ID NO: 10126 - DNA, 25 bp, Saccharomyces pastorianus
tggtgccgctgctccatctggtgtc

SEQ ID NO: 10127 - DNA, 25 bp, Saccharomyces pastorianus
tactgaatccgctttgtcttacgct

SEQ ID NO: 10128 - DNA, 25 bp, Saccharomyces pastorianus
agttgaaggtatctgggctgacatt

SEQ ID NO: 10129 - DNA, 25 bp, Saccharomyces pastorianus
gatttgatccgtgacaactctattg

SEQ ID NO: 10130 - DNA, 25 bp, Saccharomyces pastorianus
aaagcaaggcgctggttcagccaca

SEQ ID NO: 10131 - DNA, 25 bp, Saccharomyces pastorianus
cacattgtctatggcattcgcaggg

SEQ ID NO: 10132 - DNA, 25 bp, Saccharomyces pastorianus
ggccactcgggcgaaacgattattc

SEQ ID NO: 10133 - DNA, 25 bp, Saccharomyces pastorianus
aaagtcaccgttatcggaggccact

SEQ ID NO: 10134 - DNA, 25 bp, Saccharomyces pastorianus
gaagcctgaaacagagtcgctcacc

SEQ ID NO: 10135 - DNA, 25 bp, Saccharomyces pastorianus
gacaccgctgtcaaggaactacgca

SEQ ID NO: 10136 - DNA, 25 bp, Saccharomyces pastorianus
gaaccttgatttggtgcgcgcagaa

SEQ ID NO: 10137 - DNA, 25 bp, Saccharomyces pastorianus
aaatctttggtgttccagcttgaga

SEQ ID NO: 10138 - DNA, 25 bp, Saccharomyces pastorianus
ggtagcatcacgtctattgacacta

SEQ ID NO: 10139 - DNA, 25 bp, Saccharomyces pastorianus
attgacactagcatcttggagagac

SEQ ID NO: 10140 - DNA, 25 bp, Saccharomyces pastorianus
acttcggaaccgattctatttcatg

SEQ ID NO: 10141 - DNA, 25 bp, Saccharomyces pastorianus
tccccttgtatgatatcggtagagt

SEQ ID NO: 10142 - DNA, 25 bp, Saccharomyces pastorianus
acagtttatcttcatacggagtctt

SEQ ID NO: 10143 - DNA, 25 bp, Saccharomyces pastorianus
attgttaaagaagcactcgtcgaaa

SEQ ID NO: 10144 - DNA, 25 bp, Saccharomyces pastorianus
tgaccactactttctgtctcaatga

SEQ ID NO: 10145 - DNA, 25 bp, Saccharomyces pastorianus
gagaagcttttgttgtacctatacg

SEQ ID NO: 10146 - DNA, 25 bp, Saccharomyces pastorianus
tacaggatcgttttactgctcaaac

SEQ ID NO: 10147 - DNA, 25 bp, Saccharomyces pastorianus
aaacggaaattccaagctgattctg

SEQ ID NO: 10148 - DNA, 25 bp, Saccharomyces pastorianus
tacggagtcttgtcggatagccata

SEQ ID NO: 10149 - DNA, 25 bp, Saccharomyces pastorianus
gagggtagaaatatcgtcacgcact

SEQ ID NO: 10150 - DNA, 25 bp, Saccharomyces pastorianus
caagttgagcttgtgaccactactt

SEQ ID NO: 10151 - DNA, 25 bp, Saccharomyces pastorianus
gctgacagggacacctttcgattta

SEQ ID NO: 10152 - DNA, 25 bp, Saccharomyces pastorianus
gtttcaaagagggatccttccgtga

SEQ ID NO: 10153 - DNA, 25 bp, Saccharomyces pastorianus
ggacacggttttacacgatgggata

SEQ ID NO: 10154 - DNA, 25 bp, Saccharomyces pastorianus
tgaagacgttcaggccagcttggat

SEQ ID NO: 10155 - DNA, 25 bp, Saccharomyces pastorianus
tttgggtacactctactacaaccgt

SEQ ID NO: 10156 - DNA, 25 bp, Saccharomyces pastorianus
gaggattcgacgagctactctgaga

SEQ ID NO: 10157 - DNA, 25 bp, Saccharomyces pastorianus
tactcggatgattcagaccccattt

SEQ ID NO: 10158 - DNA, 25 bp, Saccharomyces pastorianus
taatctttatgacaggacccttcca

SEQ ID NO: 10159 - DNA, 25 bp, Saccharomyces pastorianus
tagaggtggagctcttgctactacc

SEQ ID NO: 10160 - DNA, 25 bp, Saccharomyces pastorianus
aaacccgttgcatctccaggtaact

SEQ ID NO: 10161 - DNA, 25 bp, Saccharomyces pastorianus
gatagtgtcataggcaaccttcccc

SEQ ID NO: 10162 - DNA, 25 bp, Saccharomyces pastorianus
gtcaaaaacgtctcacctagaagct

SEQ ID NO: 10163 - DNA, 25 bp, Saccharomyces pastorianus
aagagcttgcaaacttccgtaccct

SEQ ID NO: 10164 - DNA, 25 bp, Saccharomyces pastorianus
aattacacgatgcactattcaacaa

SEQ ID NO: 10165 - DNA, 25 bp, Saccharomyces pastorianus
tccgtaccctagtttattgctcttt

SEQ ID NO: 10166 - DNA, 25 bp, Saccharomyces pastorianus
cgaaagcattgtaagcctgacgcat

SEQ ID NO: 10167 - DNA, 25 bp, Saccharomyces pastorianus
gtaagcctgacgcatctggaaacta

SEQ ID NO: 10168 - DNA, 25 bp, Saccharomyces pastorianus
agtgccccacatgcaacaaagcgtt

SEQ ID NO: 10169 - DNA, 25 bp, Saccharomyces pastorianus
gaagaggtcgctagacaaactacaa

SEQ ID NO: 10170 - DNA, 25 bp, Saccharomyces pastorianus
gaggcactcgttgaagagcttgcaa

SEQ ID NO: 10171 - DNA, 25 bp, Saccharomyces pastorianus
gcaagaatgaggaagtgccccacat

SEQ ID NO: 10172 - DNA, 25 bp, Saccharomyces pastorianus
aagggctcaaacgacgaggcactcg

SEQ ID NO: 10173 - DNA, 25 bp, Saccharomyces pastorianus
tagtgtttgccattctggtggtcga

SEQ ID NO: 10174 - DNA, 25 bp, Saccharomyces pastorianus
atttttatgttctccatcctggcca

SEQ ID NO: 10175 - DNA, 25 bp, Saccharomyces pastorianus
aatggcacggtcattgctcaggata

SEQ ID NO: 10176 - DNA, 25 bp, Saccharomyces pastorianus
gaatgactctgttaccgctgaggct

SEQ ID NO: 10177 - DNA, 25 bp, Saccharomyces pastorianus
gtacctcactggcataactttgttc

SEQ ID NO: 10178 - DNA, 25 bp, Saccharomyces pastorianus
cattcttttgctcttcgttgattgc

SEQ ID NO: 10179 - DNA, 25 bp, Saccharomyces pastorianus
tgcagttaagcactacttctccgaa

SEQ ID NO: 10180 - DNA, 25 bp, Saccharomyces pastorianus
ttagtcatcgagctcttgaccatga

SEQ ID NO: 10181 - DNA, 25 bp, Saccharomyces pastorianus
gcctctaaggacgaccacggtgatg

SEQ ID NO: 10182 - DNA, 25 bp, Saccharomyces pastorianus
gaaagacgtgtacagagcttcgcca

SEQ ID NO: 10183 - DNA, 25 bp, Saccharomyces pastorianus
atgcatactcgggttcattcttttg

SEQ ID NO: 10184 - DNA, 25 bp, Saccharomyces pastorianus
ggccatccagtatttagaacaaaag

SEQ ID NO: 10185 - DNA, 25 bp, Saccharomyces pastorianus
aagattagggagaccttcagttaat

SEQ ID NO: 10186 - DNA, 25 bp, Saccharomyces pastorianus
ttacccgaagagaaatattttgcgt

SEQ ID NO: 10187 - DNA, 25 bp, Saccharomyces pastorianus
gggagaccttcagttaatgatttga

SEQ ID NO: 10188 - DNA, 25 bp, Saccharomyces pastorianus
aatccggccatccagtatttagaac

SEQ ID NO: 10189 - DNA, 25 bp, Saccharomyces pastorianus
ggatattttaaatgaacggactatt

SEQ ID NO: 10190 - DNA, 25 bp, Saccharomyces pastorianus
gatcttgatgaagatagctattctt

SEQ ID NO: 10191 - DNA, 25 bp, Saccharomyces pastorianus
aactaatccggccatccagtattta

SEQ ID NO: 10192 - DNA, 25 bp, Saccharomyces pastorianus
ttgacggcgcaagcaaataagaaaa

SEQ ID NO: 10193 - DNA, 25 bp, Saccharomyces pastorianus
tcaaaaattcattacctaaagacga

SEQ ID NO: 10194 - DNA, 25 bp, Saccharomyces pastorianus
aatcataacgatttgacggcgcaag

SEQ ID NO: 10195 - DNA, 25 bp, Saccharomyces pastorianus
atggctattgctccaattactggta

SEQ ID NO: 10196 - DNA, 25 bp, Saccharomyces pastorianus
aagtcatcatggacatgatcatcgg

SEQ ID NO: 10197 - DNA, 25 bp, Saccharomyces pastorianus
gacatgatcatcgggttctccctcg

SEQ ID NO: 10198 - DNA, 25 bp, Saccharomyces pastorianus
tggacatgatcatcgggttctccct

SEQ ID NO: 10199 - DNA, 25 bp, Saccharomyces pastorianus
atcatggacatgatcatcgggttct

SEQ ID NO: 10200 - DNA, 25 bp, Saccharomyces pastorianus
gtgctatggcctcctactggtggtg

SEQ ID NO: 10201 - DNA, 25 bp, Saccharomyces pastorianus
ggtgctatggcctcctactggtggt

SEQ ID NO: 10202 - DNA, 25 bp, Saccharomyces pastorianus
catggacatgatcatcgggttctcc

SEQ ID NO: 10203 - DNA, 25 bp, Saccharomyces pastorianus
gctccaattactggtacgatcaaaa

SEQ ID NO: 10204 - DNA, 25 bp, Saccharomyces pastorianus
aaagaaaagtcatcatggacatgat

SEQ ID NO: 10205 - DNA, 25 bp, Saccharomyces pastorianus
tcatggacatgatcatcgggttctc

SEQ ID NO: 10206 - DNA, 25 bp, Saccharomyces pastorianus
atatggtcgctcagatggttaagtc

SEQ ID NO: 10207 - DNA, 25 bp, Saccharomyces pastorianus
aacattttggagtctgccaccctaa

SEQ ID NO: 10208 - DNA, 25 bp, Saccharomyces pastorianus
aacttctacgaattccattgcgtcg

SEQ ID NO: 10209 - DNA, 25 bp, Saccharomyces pastorianus
aatgaaagatctgcttacgttacca

SEQ ID NO: 10210 - DNA, 25 bp, Saccharomyces pastorianus
cattgcgtcgatttttgcttggtca

SEQ ID NO: 10211 - DNA, 25 bp, Saccharomyces pastorianus
actgaacctgttcttgtctactaag

SEQ ID NO: 10212 - DNA, 25 bp, Saccharomyces pastorianus
gggtgatttagacaatactccaagt

SEQ ID NO: 10213 - DNA, 25 bp, Saccharomyces pastorianus
gtccaatctgatatcgttgcccagg

SEQ ID NO: 10214 - DNA, 25 bp, Saccharomyces pastorianus
gttgcccagggattcggttccttgg

SEQ ID NO: 10215 - DNA, 25 bp, Saccharomyces pastorianus
aagctcaatataaggccaagttcga

SEQ ID NO: 10216 - DNA, 25 bp, Saccharomyces pastorianus
tgaggctgctcatggtactgtgacc

SEQ ID NO: 10217 - DNA, 25 bp, Saccharomyces pastorianus
tgttcctctcacaccggtttggtca

SEQ ID NO: 10218 - DNA, 25 bp, Saccharomyces pastorianus
ttcctctcacaccggtttggtcaga

SEQ ID NO: 10219 - DNA, 25 bp, Saccharomyces pastorianus
atgtcgtgtctgttcctctcacacc

SEQ ID NO: 10220 - DNA, 25 bp, Saccharomyces pastorianus
gtgtctgttcctctcacaccggttt

SEQ ID NO: 10221 - DNA, 25 bp, Saccharomyces pastorianus
gttcctctcacaccggtttggtcag

SEQ ID NO: 10222 - DNA, 25 bp, Saccharomyces pastorianus
tcgtgtctgttcctctcacaccggt

SEQ ID NO: 10223 - DNA, 25 bp, Saccharomyces pastorianus
atggctcacgaaaacgtttggttct

SEQ ID NO: 10224 - DNA, 25 bp, Saccharomyces pastorianus
tctgttcctctcacaccggtttggt

SEQ ID NO: 10225 - DNA, 25 bp, Saccharomyces pastorianus
cggtttggtcagaaagtacgatttg

SEQ ID NO: 10226 - DNA, 25 bp, Saccharomyces pastorianus
tgtctgttcctctcacaccggtttg

SEQ ID NO: 10227 - DNA, 25 bp, Saccharomyces pastorianus
gattcggtaaaggttcccgccaatg

SEQ ID NO: 10228 - DNA, 25 bp, Saccharomyces pastorianus
gggtcatccatttagattccacaag

SEQ ID NO: 10229 - DNA, 25 bp, Saccharomyces pastorianus
tcagccactattttctcaggattcg

SEQ ID NO: 10230 - DNA, 25 bp, Saccharomyces pastorianus
gtacgttacatgttctttagaccgg

SEQ ID NO: 10231 - DNA, 25 bp, Saccharomyces pastorianus
gcagtggtcaacttctcgttacaaa

SEQ ID NO: 10232 - DNA, 25 bp, Saccharomyces pastorianus
gatcgccacatgtattgcacctgta

SEQ ID NO: 10233 - DNA, 25 bp, Saccharomyces pastorianus
gcaatcccctgcaattttcttcaaa

SEQ ID NO: 10234 - DNA, 25 bp, Saccharomyces pastorianus
gaagaatacgacaaccctgtacctt

SEQ ID NO: 10235 - DNA, 25 bp, Saccharomyces pastorianus
ggtcacggtacattcttaaacgcag

SEQ ID NO: 10236 - DNA, 25 bp, Saccharomyces pastorianus
gtctgggtacacacggttatctcaa

SEQ ID NO: 10237 - DNA, 25 bp, Saccharomyces pastorianus
tgcacctgtagatttcacgcaatcc

SEQ ID NO: 10238 - DNA, 25 bp, Saccharomyces pastorianus
agatgttgttgccatgtccttgtat

SEQ ID NO: 10239 - DNA, 25 bp, Saccharomyces pastorianus
gggtcccttgctatgttcaaattct

SEQ ID NO: 10240 - DNA, 25 bp, Saccharomyces pastorianus
gaatgcggaccacaactattacggc

SEQ ID NO: 10241 - DNA, 25 bp, Saccharomyces pastorianus
ggccaacggtccacgatatggtgaa

SEQ ID NO: 10242 - DNA, 25 bp, Saccharomyces pastorianus
cgccaacttgctcggtaatgtcgtg

SEQ ID NO: 10243 - DNA, 25 bp, Saccharomyces pastorianus
agacagacacgatctcactgggtgt

SEQ ID NO: 10244 - DNA, 25 bp, Saccharomyces pastorianus
ttcaatggaatacccgttgccttct

SEQ ID NO: 10245 - DNA, 25 bp, Saccharomyces pastorianus
gcttagtgcggcttcaaactatgca

SEQ ID NO: 10246 - DNA, 25 bp, Saccharomyces pastorianus
tagtatagccaacgtttgcgtcccg

SEQ ID NO: 10247 - DNA, 25 bp, Saccharomyces pastorianus
gttcacggctacacccgaattggga

SEQ ID NO: 10248 - DNA, 25 bp, Saccharomyces pastorianus
taatgtcgtgctatggtacctgcga

SEQ ID NO: 10249 - DNA, 25 bp, Saccharomyces pastorianus
ttttggatcccatcaagcgaaactt

SEQ ID NO: 10250 - DNA, 25 bp, Saccharomyces pastorianus
agaaccatgctttggtcaagtcctc

SEQ ID NO: 10251 - DNA, 25 bp, Saccharomyces pastorianus
ggaactccactgttggccaatggtg

SEQ ID NO: 10252 - DNA, 25 bp, Saccharomyces pastorianus
aaccagagaagttggccaccggctc

SEQ ID NO: 10253 - DNA, 25 bp, Saccharomyces pastorianus
ttaacgccggtctgtacattctaaa

SEQ ID NO: 10254 - DNA, 25 bp, Saccharomyces pastorianus
acaattgtactctttcgacttggaa

SEQ ID NO: 10255 - DNA, 25 bp, Saccharomyces pastorianus
gtcagaatcaccagatccgttgtct

SEQ ID NO: 10256 - DNA, 25 bp, Saccharomyces pastorianus
ttgtcagggtccgttctttacttga

SEQ ID NO: 10257 - DNA, 25 bp, Saccharomyces pastorianus
tcaagtcctccatcgttggttggaa

SEQ ID NO: 10258 - DNA, 25 bp, Saccharomyces pastorianus
cactccaaaccttatcgacagattc

SEQ ID NO: 10259 - DNA, 25 bp, Saccharomyces pastorianus
aagatcggcccagacgtggtcattg

SEQ ID NO: 10260 - DNA, 25 bp, Saccharomyces pastorianus
gtggtcattggtcctaacgtcacca

SEQ ID NO: 10261 - DNA, 25 bp, Saccharomyces pastorianus
tgcgcgcagttgaccttgttcaaac

SEQ ID NO: 10262 - DNA, 25 bp, Saccharomyces pastorianus
attctggcgctgtcgattctactat

SEQ ID NO: 10263 - DNA, 25 bp, Saccharomyces pastorianus
agcagcattgcattcgttgcatcca

SEQ ID NO: 10264 - DNA, 25 bp, Saccharomyces pastorianus
gtgggctctacgatattctgcatgc

SEQ ID NO: 10265 - DNA, 25 bp, Saccharomyces pastorianus
agggtcgctggtcggaatcatctac

SEQ ID NO: 10266 - DNA, 25 bp, Saccharomyces pastorianus
aaatggatcctgctaacgctgctgt

SEQ ID NO: 10267 - DNA, 25 bp, Saccharomyces pastorianus
gcgaaagtgtacgattccggctgta

SEQ ID NO: 10268 - DNA, 25 bp, Saccharomyces pastorianus
ttgttcaaactggtctcctcgaaga

SEQ ID NO: 10269 - DNA, 25 bp, Saccharomyces pastorianus
gcatgcatctcggttgtctacaagt

SEQ ID NO: 10270 - DNA, 25 bp, Saccharomyces pastorianus
gaagttactgtccacttatgcgctc

SEQ ID NO: 10271 - DNA, 25 bp, Saccharomyces pastorianus
atgggatctctaaccaacctgctgg

SEQ ID NO: 10272 - DNA, 25 bp, Saccharomyces pastorianus
agacaggtcctgtaggcagcaagcc

SEQ ID NO: 10273 - DNA, 25 bp, Saccharomyces pastorianus
tgggttttccctgaaggtaccagat

SEQ ID NO: 10274 - DNA, 25 bp, Saccharomyces pastorianus
ggtccgtgccttctgatgacatgaa

SEQ ID NO: 10275 - DNA, 25 bp, Saccharomyces pastorianus
gaacagattagaacccgtatgcttg

SEQ ID NO: 10276 - DNA, 25 bp, Saccharomyces pastorianus
aggaaatcggttactctccagctat

SEQ ID NO: 10277 - DNA, 25 bp, Saccharomyces pastorianus
gatgaaatacctcccatttttgggt

SEQ ID NO: 10278 - DNA, 25 bp, Saccharomyces pastorianus
cacctggttgtacggttactgccaa

SEQ ID NO: 10279 - DNA, 25 bp, Saccharomyces pastorianus
ttgtcccagtggttgtttctaacac

SEQ ID NO: 10280 - DNA, 25 bp, Saccharomyces pastorianus
gaggctctcaagtatgctactcttc

SEQ ID NO: 10281 - DNA, 25 bp, Saccharomyces pastorianus
atcttggaacccgtttctactgaga

SEQ ID NO: 10282 - DNA, 25 bp, Saccharomyces pastorianus
tgccttccatttggcgcaacaggga

SEQ ID NO: 10283 - DNA, 25 bp, Saccharomyces pastorianus
gataaatcggctgctttggcctcat

SEQ ID NO: 10284 - DNA, 25 bp, Saccharomyces pastorianus
gacatggaggtgtacccgcacaaga

SEQ ID NO: 10285 - DNA, 25 bp, Saccharomyces pastorianus
tcaaggccttgcatttcgaataccc

SEQ ID NO: 10286 - DNA, 25 bp, Saccharomyces pastorianus
atttgaccccggaagacaggcctca

SEQ ID NO: 10287 - DNA, 25 bp, Saccharomyces pastorianus
gaccagatcgctttattttgagcca

SEQ ID NO: 10288 - DNA, 25 bp, Saccharomyces pastorianus
tacaactccaccttgatcaacttag

SEQ ID NO: 10289 - DNA, 25 bp, Saccharomyces pastorianus
ttgccaacgtggctttgctagaaac

SEQ ID NO: 10290 - DNA, 25 bp, Saccharomyces pastorianus
aacaggcgtcttttcgcgctgtgac

SEQ ID NO: 10291 - DNA, 25 bp, Saccharomyces pastorianus
tcaaaggtgccttcaaatgccccta

SEQ ID NO: 10292 - DNA, 25 bp, Saccharomyces pastorianus
tcatcttcttccgaggacacgaaac

SEQ ID NO: 10293 - DNA, 25 bp, Saccharomyces pastorianus
aacgtcgacgtctggctgaacaaac

SEQ ID NO: 10294 - DNA, 25 bp, Saccharomyces pastorianus
atacccggccaagattactctggtg

SEQ ID NO: 10295 - DNA, 25 bp, Saccharomyces pastorianus
gtatttgactttctgacgctagccg

SEQ ID NO: 10296 - DNA, 25 bp, Saccharomyces pastorianus
gagtccaggcaaattacccaagtgt

SEQ ID NO: 10297 - DNA, 25 bp, Saccharomyces pastorianus
ggcaagatcctatgtgtccacggtg

SEQ ID NO: 10298 - DNA, 25 bp, Saccharomyces pastorianus
aaggatgtcgtcaccgtttggtccg

SEQ ID NO: 10299 - DNA, 25 bp, Saccharomyces pastorianus
cagcaaggtcgccagagagttcaac

SEQ ID NO: 10300 - DNA, 25 bp, Saccharomyces pastorianus
ttggtccgcaccaaactactgttat

SEQ ID NO: 10301 - DNA, 25 bp, Saccharomyces pastorianus
gagagttcaaccacgtcaacggact

SEQ ID NO: 10302 - DNA, 25 bp, Saccharomyces pastorianus
ggtggactatctcccgagattcgaa

SEQ ID NO: 10303 - DNA, 25 bp, Saccharomyces pastorianus
ataagtacgggtccaccacggtatg

SEQ ID NO: 10304 - DNA, 25 bp, Saccharomyces pastorianus
ttggtcggaccctgacaacgtagaa

SEQ ID NO: 10305 - DNA, 25 bp, Saccharomyces pastorianus
acagccgcagttcaggcaggcgtaa

SEQ ID NO: 10306 - DNA, 25 bp, Saccharomyces pastorianus
agtatattcaatgcactacctccgc

SEQ ID NO: 10307 - DNA, 25 bp, Saccharomyces pastorianus
ttcggtttgctatttctctacacag

SEQ ID NO: 10308 - DNA, 25 bp, Saccharomyces pastorianus
ggttatatcagactgctatcccaga

SEQ ID NO: 10309 - DNA, 25 bp, Saccharomyces pastorianus
ggtacgtcgtcctagcaagagctta

SEQ ID NO: 10310 - DNA, 25 bp, Saccharomyces pastorianus
tacggccaacggtgaggtcttcgaa

SEQ ID NO: 10311 - DNA, 25 bp, Saccharomyces pastorianus
gacaacgacatcgagggcttatcct

SEQ ID NO: 10312 - DNA, 25 bp, Saccharomyces pastorianus
gcggtgaatcaccactgtaccagtg

SEQ ID NO: 10313 - DNA, 25 bp, Saccharomyces pastorianus
atcccagactttcgacttgtgtcaa

SEQ ID NO: 10314 - DNA, 25 bp, Saccharomyces pastorianus
aactccaagccaattagcggtgaat

SEQ ID NO: 10315 - DNA, 25 bp, Saccharomyces pastorianus
cgaagtcgaagtgcgtctaggttat

SEQ ID NO: 10316 - DNA, 25 bp, Saccharomyces pastorianus
agaactgaaaagttgcaccagtgaa

SEQ ID NO: 10317 - DNA, 25 bp, Saccharomyces pastorianus
aaattaccatgctgctagattatac

SEQ ID NO: 10318 - DNA, 25 bp, Saccharomyces pastorianus
gaaacccatcatcagacaagaagca

SEQ ID NO: 10319 - DNA, 25 bp, Saccharomyces pastorianus
tatataggttacctcccttacccag

SEQ ID NO: 10320 - DNA, 25 bp, Saccharomyces pastorianus
acatgaaccctaagtgtgccgcttt

SEQ ID NO: 10321 - DNA, 25 bp, Saccharomyces pastorianus
tgccgctttggtgacagaactgaaa

SEQ ID NO: 10322 - DNA, 25 bp, Saccharomyces pastorianus
aaatttattgcaatgctggtcttca

SEQ ID NO: 10323 - DNA, 25 bp, Saccharomyces pastorianus
aagtgtgccgctttggtgacagaac

SEQ ID NO: 10324 - DNA, 25 bp, Saccharomyces pastorianus
gtgaagaaacccatcatcagacaag

SEQ ID NO: 10325 - DNA, 25 bp, Saccharomyces pastorianus
tggccacatgaaccctaagtgtgcc

SEQ ID NO: 10326 - DNA, 25 bp, Saccharomyces pastorianus
ccaccagtatataggttacctccct

SEQ ID NO: 10327 - DNA, 25 bp, Saccharomyces pastorianus
caattctttacccaacccatatttg

SEQ ID NO: 10328 - DNA, 25 bp, Saccharomyces pastorianus
ggcagatgcgtttcgagaattcata

SEQ ID NO: 10329 - DNA, 25 bp, Saccharomyces pastorianus
gacccatatggtgaaacgctacaac

SEQ ID NO: 10330 - DNA, 25 bp, Saccharomyces pastorianus
tgcagcgggagagcatgatcctatt

SEQ ID NO: 10331 - DNA, 25 bp, Saccharomyces pastorianus
gaacggactcgaattggcctgattt

SEQ ID NO: 10332 - DNA, 25 bp, Saccharomyces pastorianus
gaacgatattgcctgtcattgtatg

SEQ ID NO: 10333 - DNA, 25 bp, Saccharomyces pastorianus
tatcctggttggtatctgatcgatg

SEQ ID NO: 10334 - DNA, 25 bp, Saccharomyces pastorianus
taggtatcaggcacacagacccata

SEQ ID NO: 10335 - DNA, 25 bp, Saccharomyces pastorianus
cagccccttttacactgggacttga

SEQ ID NO: 10336 - DNA, 25 bp, Saccharomyces pastorianus
gggagattgcccacgcatttggcaa

SEQ ID NO: 10337 - DNA, 25 bp, Saccharomyces pastorianus
catcggtgggcggtgtcaacaattc

SEQ ID NO: 10338 - DNA, 25 bp, Saccharomyces pastorianus
gaccatttgtaatgttgacttctac

SEQ ID NO: 10339 - DNA, 25 bp, Saccharomyces pastorianus
cgtgtggtcactgagatgagcgtaa

SEQ ID NO: 10340 - DNA, 25 bp, Saccharomyces pastorianus
accgaacgagctaccaaaaccatat

SEQ ID NO: 10341 - DNA, 25 bp, Saccharomyces pastorianus
cagagtcttcaaacatattcgagga

SEQ ID NO: 10342 - DNA, 25 bp, Saccharomyces pastorianus
tcgaaacggtggatatacttgataa

SEQ ID NO: 10343 - DNA, 25 bp, Saccharomyces pastorianus
cgtaaatggtgtcatcgggaatatc

SEQ ID NO: 10344 - DNA, 25 bp, Saccharomyces pastorianus
ggatgtgtctttatacttgaccatt

SEQ ID NO: 10345 - DNA, 25 bp, Saccharomyces pastorianus
gtatgatacagttgagggcactata

SEQ ID NO: 10346 - DNA, 25 bp, Saccharomyces pastorianus
gacttctacaatttactgatgcaac

SEQ ID NO: 10347 - DNA, 25 bp, Saccharomyces pastorianus
caagtgattttggttttccatcaga

SEQ ID NO: 10348 - DNA, 25 bp, Saccharomyces pastorianus
gatgcaactgttgtgggaaaacttc

SEQ ID NO: 10349 - DNA, 25 bp, Saccharomyces pastorianus
gaagtcgctttggaagaacctcgtt

SEQ ID NO: 10350 - DNA, 25 bp, Saccharomyces pastorianus
aacacccgttttgatgcgatcttga

SEQ ID NO: 10351 - DNA, 25 bp, Saccharomyces pastorianus
atttgctaaaagattcggctccaca

SEQ ID NO: 10352 - DNA, 25 bp, Saccharomyces pastorianus
gaggctgctgccatgaacaagcgga

SEQ ID NO: 10353 - DNA, 25 bp, Saccharomyces pastorianus
gcgaagagcgttgcagcttacccaa

SEQ ID NO: 10354 - DNA, 25 bp, Saccharomyces pastorianus
ggcgttatgtttcgcttctctgaac

SEQ ID NO: 10355 - DNA, 25 bp, Saccharomyces pastorianus
aaactgatagaaactgccaccccaa

SEQ ID NO: 10356 - DNA, 25 bp, Saccharomyces pastorianus
aatggaagacttcgcggacaccttt

SEQ ID NO: 10357 - DNA, 25 bp, Saccharomyces pastorianus
aagaggcctactattcctgtaccgt

SEQ ID NO: 10358 - DNA, 25 bp, Saccharomyces pastorianus
taatctttctcttttggaacctcac

SEQ ID NO: 10359 - DNA, 25 bp, Saccharomyces pastorianus
ggacaccttttacgatgactactct

SEQ ID NO: 10360 - DNA, 25 bp, Saccharomyces pastorianus
aaaattccatttcctgaccatacca

SEQ ID NO: 10361 - DNA, 25 bp, Saccharomyces pastorianus
ccccgtatggtagctttcaaggcca

SEQ ID NO: 10362 - DNA, 25 bp, Saccharomyces pastorianus
gagaggattccaaagtctgccattg

SEQ ID NO: 10363 - DNA, 25 bp, Saccharomyces pastorianus
gtcggaagaccttcggatatgtggt

SEQ ID NO: 10364 - DNA, 25 bp, Saccharomyces pastorianus
tgagactcagatcggtacaccaaat

SEQ ID NO: 10365 - DNA, 25 bp, Saccharomyces pastorianus
ggtcatgtggttgcatcgtatatca

SEQ ID NO: 10366 - DNA, 25 bp, Saccharomyces pastorianus
cacgatgctggtattgttcattctg

SEQ ID NO: 10367 - DNA, 25 bp, Saccharomyces pastorianus
tgaaacccgcaaattttgtcttagt

SEQ ID NO: 10368 - DNA, 25 bp, Saccharomyces pastorianus
ggcactggttgccatgaattacaca

SEQ ID NO: 10369 - DNA, 25 bp, Saccharomyces pastorianus
tgttcattctgatttgaaacccgca

SEQ ID NO: 10370 - DNA, 25 bp, Saccharomyces pastorianus
ttatatggcgccagaggcactggtt

SEQ ID NO: 10371 - DNA, 25 bp, Saccharomyces pastorianus
aatacactactatctcgtcactttg

SEQ ID NO: 10372 - DNA, 25 bp, Saccharomyces pastorianus
accttgcgaatgtgtatgttctcat

SEQ ID NO: 10373 - DNA, 25 bp, Saccharomyces pastorianus
aggtcatactttttgggcgataacg

SEQ ID NO: 10374 - DNA, 25 bp, Saccharomyces pastorianus
gtggaggttattcaaaggccgattt

SEQ ID NO: 10375 - DNA, 25 bp, Saccharomyces pastorianus
gtcactttgttatcacagccaaggg

SEQ ID NO: 10376 - DNA, 25 bp, Saccharomyces pastorianus
gattcgggcgatttcttttcaagat

SEQ ID NO: 10377 - DNA, 25 bp, Saccharomyces pastorianus
ttcgccagtgtccagtacaaattgt

SEQ ID NO: 10378 - DNA, 25 bp, Saccharomyces pastorianus
ttcaagattccatattcgccagtgt

SEQ ID NO: 10379 - DNA, 25 bp, Saccharomyces pastorianus
gacctggaactggatatcgagaact

SEQ ID NO: 10380 - DNA, 25 bp, Saccharomyces pastorianus
aggccgattttttcaagatattgca

SEQ ID NO: 10381 - DNA, 25 bp, Saccharomyces pastorianus
agataagtctttccccgaagtaatg

SEQ ID NO: 10382 - DNA, 25 bp, Saccharomyces pastorianus
gtagcgctgtcgtttttcaataccc

SEQ ID NO: 10383 - DNA, 25 bp, Saccharomyces pastorianus
aggctattaccaagagactcacgaa

SEQ ID NO: 10384 - DNA, 25 bp, Saccharomyces pastorianus
gaaactagacaactgcgtggttact

SEQ ID NO: 10385 - DNA, 25 bp, Saccharomyces pastorianus
agacgtctggtcgatcgctattata

SEQ ID NO: 10386 - DNA, 25 bp, Saccharomyces pastorianus
ggtgtcaattatcttcattctatgg

SEQ ID NO: 10387 - DNA, 25 bp, Saccharomyces pastorianus
cgactgtttaccgaggagcctgaag

SEQ ID NO: 10388 - DNA, 25 bp, Saccharomyces pastorianus
cataccttgctcctgagctactaaa

SEQ ID NO: 10389 - DNA, 25 bp, Saccharomyces pastorianus
aaattgattgacttcggtagcgctg

SEQ ID NO: 10390 - DNA, 25 bp, Saccharomyces pastorianus
tcccctcttgtgaaattgaccctat

SEQ ID NO: 10391 - DNA, 25 bp, Saccharomyces pastorianus
agcttcaattcctttcgactgttta

SEQ ID NO: 10392 - DNA, 25 bp, Saccharomyces pastorianus
attgaccctatatcgggcgagttgg

SEQ ID NO: 10393 - DNA, 25 bp, Saccharomyces pastorianus
gtcgatatcccaaacggaattccat

SEQ ID NO: 10394 - DNA, 25 bp, Saccharomyces pastorianus
ttagctacccaatacgatgaatcgt

SEQ ID NO: 10395 - DNA, 25 bp, Saccharomyces pastorianus
tcttccaccgggtacgaattcaaag

SEQ ID NO: 10396 - DNA, 25 bp, Saccharomyces pastorianus
acttggaggttaaacgagcgtcact

SEQ ID NO: 10397 - DNA, 25 bp, Saccharomyces pastorianus
tcttaccagactccgaatctcttcg

SEQ ID NO: 10398 - DNA, 25 bp, Saccharomyces pastorianus
tgaatcgtcctgcttaatcgtgggc

SEQ ID NO: 10399 - DNA, 25 bp, Saccharomyces pastorianus
ggaagttcagtaagatcgctcttga

SEQ ID NO: 10400 - DNA, 25 bp, Saccharomyces pastorianus
agacctaagccgtgagatgatccag

SEQ ID NO: 10401 - DNA, 25 bp, Saccharomyces pastorianus
gcaatcatggcatcgtcttaccaga

SEQ ID NO: 10402 - DNA, 25 bp, Saccharomyces pastorianus
tcactatggctcttggcagggccaa

SEQ ID NO: 10403 - DNA, 25 bp, Saccharomyces pastorianus
attttatttggatcctgaatcggcc

SEQ ID NO: 10404 - DNA, 25 bp, Saccharomyces pastorianus
ttagacgctttgacgaggcacataa

SEQ ID NO: 10405 - DNA, 25 bp, Saccharomyces pastorianus
acgcgtcgtcttcggacggtagcaa

SEQ ID NO: 10406 - DNA, 25 bp, Saccharomyces pastorianus
gtggtgcacaattttcaagatcata

SEQ ID NO: 10407 - DNA, 25 bp, Saccharomyces pastorianus
tttgcgtgccaaatcatgaatctta

SEQ ID NO: 10408 - DNA, 25 bp, Saccharomyces pastorianus
gtctccatcaactccggtaaaggta

SEQ ID NO: 10409 - DNA, 25 bp, Saccharomyces pastorianus
gtaccgtctaacactactactacta

SEQ ID NO: 10410 - DNA, 25 bp, Saccharomyces pastorianus
gaaagactatcgtctccatcaactc

SEQ ID NO: 10411 - DNA, 25 bp, Saccharomyces pastorianus
aaagattgtattccgttgctctgaa

SEQ ID NO: 10412 - DNA, 25 bp, Saccharomyces pastorianus
aaaacatctatcatcacatcctaca

SEQ ID NO: 10413 - DNA, 25 bp, Saccharomyces pastorianus
gaaaccgacttcgtccgtgtcaaat

SEQ ID NO: 10414 - DNA, 25 bp, Saccharomyces pastorianus
tacaccattcagttcgagcccaagt

SEQ ID NO: 10415 - DNA, 25 bp, Saccharomyces pastorianus
gaaaaatagtgatctctcgctggag

SEQ ID NO: 10416 - DNA, 25 bp, Saccharomyces pastorianus
gaataccatccacagtggttcgtta

SEQ ID NO: 10417 - DNA, 25 bp, Saccharomyces pastorianus
gacgttatgacgatgccggtgatga

SEQ ID NO: 10418 - DNA, 25 bp, Saccharomyces pastorianus
gaccccttttgcgataactttgaat

SEQ ID NO: 10419 - DNA, 25 bp, Saccharomyces pastorianus
gtttcagaccagatcagagagctat

SEQ ID NO: 10420 - DNA, 25 bp, Saccharomyces pastorianus
acatttgctgccatggttagcccca

SEQ ID NO: 10421 - DNA, 25 bp, Saccharomyces pastorianus
acgggtgatcactgcaagctgtatt

SEQ ID NO: 10422 - DNA, 25 bp, Saccharomyces pastorianus
gagaagaccaaaaccgcggcatcgg

SEQ ID NO: 10423 - DNA, 25 bp, Saccharomyces pastorianus
ggttagccccaacagatacacgttt

SEQ ID NO: 10424 - DNA, 25 bp, Saccharomyces pastorianus
gaatgggccaacaaacgacgggaca

SEQ ID NO: 10425 - DNA, 25 bp, Saccharomyces pastorianus
cattcaatttgaccccttttgcgat

SEQ ID NO: 10426 - DNA, 25 bp, Saccharomyces pastorianus
attccttctgcttctacggtggtaa

SEQ ID NO: 10427 - DNA, 25 bp, Saccharomyces pastorianus
acacagtttgttcaacggagcgcag

SEQ ID NO: 10428 - DNA, 25 bp, Saccharomyces pastorianus
acttactccggatacagactgttca

SEQ ID NO: 10429 - DNA, 25 bp, Saccharomyces pastorianus
atctcgtattattttgcagtgcaac

SEQ ID NO: 10430 - DNA, 25 bp, Saccharomyces pastorianus
atatatgccccagacgacaagaaca

SEQ ID NO: 10431 - DNA, 25 bp, Saccharomyces pastorianus
agaatggtcgtttgtgggccaacat

SEQ ID NO: 10432 - DNA, 25 bp, Saccharomyces pastorianus
gatcccttgcaagataccctggaaa

SEQ ID NO: 10433 - DNA, 25 bp, Saccharomyces pastorianus
attaagtacacatgcgagcgccaag

SEQ ID NO: 10434 - DNA, 25 bp, Saccharomyces pastorianus
tcaccattgacattccagctgaaga

SEQ ID NO: 10435 - DNA, 25 bp, Saccharomyces pastorianus
atgtctatacacacttactccggat

SEQ ID NO: 10436 - DNA, 25 bp, Saccharomyces pastorianus
gagttgtgcccaaattgctgcattg

SEQ ID NO: 10437 - DNA, 25 bp, Saccharomyces pastorianus
atgcacagtaggtacttttcccgag

SEQ ID NO: 10438 - DNA, 25 bp, Saccharomyces pastorianus
gacgcagactcgttacttgaactct

SEQ ID NO: 10439 - DNA, 25 bp, Saccharomyces pastorianus
gcgagcatggatgccgttgatgcat

SEQ ID NO: 10440 - DNA, 25 bp, Saccharomyces pastorianus
gatcctcaaaaacgtagctcagcgg

SEQ ID NO: 10441 - DNA, 25 bp, Saccharomyces pastorianus
acaggatggcgatagtaccgacgaa

SEQ ID NO: 10442 - DNA, 25 bp, Saccharomyces pastorianus
agattcccgatgtttcaaagtttag

SEQ ID NO: 10443 - DNA, 25 bp, Saccharomyces pastorianus
ttacctgattctaaagcgagcatgg

SEQ ID NO: 10444 - DNA, 25 bp, Saccharomyces pastorianus
ggtccgttggtgttattcttttgag

SEQ ID NO: 10445 - DNA, 25 bp, Saccharomyces pastorianus
ttttcccgagtatagtgtcgctttt

SEQ ID NO: 10446 - DNA, 25 bp, Saccharomyces pastorianus
tttgcatgggttgggctttgaagct

SEQ ID NO: 10447 - DNA, 25 bp, Saccharomyces pastorianus
tggtctgaccactattggtgttttc

SEQ ID NO: 10448 - DNA, 25 bp, Saccharomyces pastorianus
tgattagtcttttcgtcgtttccga

SEQ ID NO: 10449 - DNA, 25 bp, Saccharomyces pastorianus
atagggtcgcttattctttgattgt

SEQ ID NO: 10450 - DNA, 25 bp, Saccharomyces pastorianus
tcattcggctactttggttacgggt

SEQ ID NO: 10451 - DNA, 25 bp, Saccharomyces pastorianus
tattttcaatcttttcgtcgctcct

SEQ ID NO: 10452 - DNA, 25 bp, Saccharomyces pastorianus
tcatacaccagttttctttagctac

SEQ ID NO: 10453 - DNA, 25 bp, Saccharomyces pastorianus
taagtggtatcatttcattcggcta

SEQ ID NO: 10454 - DNA, 25 bp, Saccharomyces pastorianus
gtagttctgagtataatcccttttt

SEQ ID NO: 10455 - DNA, 25 bp, Saccharomyces pastorianus
taatcctaaggttcgtgtcccatta

SEQ ID NO: 10456 - DNA, 25 bp, Saccharomyces pastorianus
gtcttggatttggttcactttcgtc

SEQ ID NO: 10457 - DNA, 25 bp, Saccharomyces pastorianus
taccttcgaagtctggtcttggatt

SEQ ID NO: 10458 - DNA, 25 bp, Saccharomyces pastorianus
gtcgctcctaactataccttcgaag

SEQ ID NO: 10459 - DNA, 25 bp, Saccharomyces pastorianus
gaatcctttcagatccaagttggct

SEQ ID NO: 10460 - DNA, 25 bp, Saccharomyces pastorianus
agagacctaacattattccaattat

SEQ ID NO: 10461 - DNA, 25 bp, Saccharomyces pastorianus
ctgttgatgctgaaactgttttcgc

SEQ ID NO: 10462 - DNA, 25 bp, Saccharomyces pastorianus
gaataccgtgtttggaatcctttca

SEQ ID NO: 10463 - DNA, 25 bp, Saccharomyces pastorianus
acaattgactttggaaccatacgaa

SEQ ID NO: 10464 - DNA, 25 bp, Saccharomyces pastorianus
gtctatgctgtcgaattttctcaca

SEQ ID NO: 10465 - DNA, 25 bp, Saccharomyces pastorianus
aagaaggttctatatctaggtgctg

SEQ ID NO: 10466 - DNA, 25 bp, Saccharomyces pastorianus
ggacgaattattcattaccccaggt

SEQ ID NO: 10467 - DNA, 25 bp, Saccharomyces pastorianus
gtattgactctactgttgatgctga

SEQ ID NO: 10468 - DNA, 25 bp, Saccharomyces pastorianus
aactgttttcgctagagaagtccaa

SEQ ID NO: 10469 - DNA, 25 bp, Saccharomyces pastorianus
gaaggtgttgtctatgctgtcgaat

SEQ ID NO: 10470 - DNA, 25 bp, Saccharomyces pastorianus
cagtatgctgtttatgtggcgtaga

SEQ ID NO: 10471 - DNA, 25 bp, Saccharomyces pastorianus
aataccggacgatttcactgggatg

SEQ ID NO: 10472 - DNA, 25 bp, Saccharomyces pastorianus
catcctgtggccatacatattgcgg

SEQ ID NO: 10473 - DNA, 25 bp, Saccharomyces pastorianus
gcgaacatttgttgcatcctgtggc

SEQ ID NO: 10474 - DNA, 25 bp, Saccharomyces pastorianus
ataccaaactttagcgagaccctca

SEQ ID NO: 10475 - DNA, 25 bp, Saccharomyces pastorianus
gatgatctggccaaaaccctggaag

SEQ ID NO: 10476 - DNA, 25 bp, Saccharomyces pastorianus
tatgccccgcggaatcgtgcaagaa

SEQ ID NO: 10477 - DNA, 25 bp, Saccharomyces pastorianus
gaccaaagcccagcaggatgaattt

SEQ ID NO: 10478 - DNA, 25 bp, Saccharomyces pastorianus
atattgcggcaggtgttacgccaga

SEQ ID NO: 10479 - DNA, 25 bp, Saccharomyces pastorianus
gctcatcctgataactatgggccca

SEQ ID NO: 10480 - DNA, 25 bp, Saccharomyces pastorianus
agtgcttcatttgataccacaccaa

SEQ ID NO: 10481 - DNA, 25 bp, Saccharomyces pastorianus
aaagagtgggactccagcagcccat

SEQ ID NO: 10482 - DNA, 25 bp, Saccharomyces pastorianus
agcttcggcggatgacagtttgtct

SEQ ID NO: 10483 - DNA, 25 bp, Saccharomyces pastorianus
tcgctcatgttagatttggcaccgg

SEQ ID NO: 10484 - DNA, 25 bp, Saccharomyces pastorianus
ggtaaacttctagcttcactgcaag

SEQ ID NO: 10485 - DNA, 25 bp, Saccharomyces pastorianus
ttggcaccggtcataatattcagta

SEQ ID NO: 10486 - DNA, 25 bp, Saccharomyces pastorianus
acggttccgaaccttttgatcaatg

SEQ ID NO: 10487 - DNA, 25 bp, Saccharomyces pastorianus
ggaactgctgccgtgccaacatcta

SEQ ID NO: 10488 - DNA, 25 bp, Saccharomyces pastorianus
gtgtctgttcatatagcaaaggctt

SEQ ID NO: 10489 - DNA, 25 bp, Saccharomyces pastorianus
aaacatgggcatggcgaggagctcc

SEQ ID NO: 10490 - DNA, 25 bp, Saccharomyces pastorianus
tgtgcaacaggaatactcgctcatg

SEQ ID NO: 10491 - DNA, 25 bp, Saccharomyces pastorianus
gaatacatcaagtccgtgaccggta

SEQ ID NO: 10492 - DNA, 25 bp, Saccharomyces pastorianus
atggacccaggttatgtaggcaaat

SEQ ID NO: 10493 - DNA, 25 bp, Saccharomyces pastorianus
aattgtcggctctgagttgatccaa

SEQ ID NO: 10494 - DNA, 25 bp, Saccharomyces pastorianus
aatcagctggatgggtttgacgata

SEQ ID NO: 10495 - DNA, 25 bp, Saccharomyces pastorianus
atgctccaagtattgtcttcattga

SEQ ID NO: 10496 - DNA, 25 bp, Saccharomyces pastorianus
attagacctggtagaatcgatcgta

SEQ ID NO: 10497 - DNA, 25 bp, Saccharomyces pastorianus
tcactgcagaggacttcaaacaagc

SEQ ID NO: 10498 - DNA, 25 bp, Saccharomyces pastorianus
gaaatcgatgctatcggtaccaaga

SEQ ID NO: 10499 - DNA, 25 bp, Saccharomyces pastorianus
tcgagacactagatccagcattgat

SEQ ID NO: 10500 - DNA, 25 bp, Saccharomyces pastorianus
ggtgcagatatccaagctatgtgta

SEQ ID NO: 10501 - DNA, 25 bp, Saccharomyces pastorianus
gcaggtttattagctcttagagaaa

SEQ ID NO: 10502 - DNA, 25 bp, Saccharomyces pastorianus
gatacgattccaacagcggtggtga

SEQ ID NO: 10503 - DNA, 25 bp, Saccharomyces pastorianus
ttgacgtatgatcacaaggcatctg

SEQ ID NO: 10504 - DNA, 25 bp, Saccharomyces pastorianus
tggaaatagtggctgtactgctgca

SEQ ID NO: 10505 - DNA, 25 bp, Saccharomyces pastorianus
ggcgactctcgaatagtactattta

SEQ ID NO: 10506 - DNA, 25 bp, Saccharomyces pastorianus
aaggcatctgactccttggaaatgc

SEQ ID NO: 10507 - DNA, 25 bp, Saccharomyces pastorianus
gagcctaacgaagctgcgaaagttt

SEQ ID NO: 10508 - DNA, 25 bp, Saccharomyces pastorianus
gaatgattcattccttaccattgat

SEQ ID NO: 10509 - DNA, 25 bp, Saccharomyces pastorianus
ttgcccgatgcagcttccaaagatt

SEQ ID NO: 10510 - DNA, 25 bp, Saccharomyces pastorianus
aggaagcccatttacaaccagcgtg

SEQ ID NO: 10511 - DNA, 25 bp, Saccharomyces pastorianus
atacggcaaatgttggcgactctcg

SEQ ID NO: 10512 - DNA, 25 bp, Saccharomyces pastorianus
agcggtaacgagatcactaggcgat

SEQ ID NO: 10513 - DNA, 25 bp, Saccharomyces pastorianus
aatacgttgggagttgcccgatgca

SEQ ID NO: 10514 - DNA, 25 bp, Saccharomyces pastorianus
gataatgcggctttcgactcaacag

SEQ ID NO: 10515 - DNA, 25 bp, Saccharomyces pastorianus
aagggcagccttcggatgcaatgtt

SEQ ID NO: 10516 - DNA, 25 bp, Saccharomyces pastorianus
taatgctcctactagtggcaccaat

SEQ ID NO: 10517 - DNA, 25 bp, Saccharomyces pastorianus
ccctccagctgacaacggtgatgaa

SEQ ID NO: 10518 - DNA, 25 bp, Saccharomyces pastorianus
agcaaacgtccccaatactggagat

SEQ ID NO: 10519 - DNA, 25 bp, Saccharomyces pastorianus
gtcagggtcagcaagggcagccttc

SEQ ID NO: 10520 - DNA, 25 bp, Saccharomyces pastorianus
tgtagccgctactcagagtcagggt

SEQ ID NO: 10521 - DNA, 25 bp, Saccharomyces pastorianus
tccaaccctctaaccaaatacaaag

SEQ ID NO: 10522 - DNA, 25 bp, Saccharomyces pastorianus
gatgttttcaggactcgataatgcg

SEQ ID NO: 10523 - DNA, 25 bp, Saccharomyces pastorianus
aacagccttcaatgcaccagcgaat

SEQ ID NO: 10524 - DNA, 25 bp, Saccharomyces pastorianus
atgatattaacataccctccgctaa

SEQ ID NO: 10525 - DNA, 25 bp, Saccharomyces pastorianus
gcatatgctgaagctgccgctgcaa

SEQ ID NO: 10526 - DNA, 25 bp, Saccharomyces pastorianus
atgcaagttcatcagacgctagaga

SEQ ID NO: 10527 - DNA, 25 bp, Saccharomyces pastorianus
gttcaaccagactcacaattgtgtg

SEQ ID NO: 10528 - DNA, 25 bp, Saccharomyces pastorianus
tggtggctttgcgacagttcaacca

SEQ ID NO: 10529 - DNA, 25 bp, Saccharomyces pastorianus
gaaattcttcatatctggtggcttt

SEQ ID NO: 10530 - DNA, 25 bp, Saccharomyces pastorianus
tcgactgttggcaaaagcaccctaa

SEQ ID NO: 10531 - DNA, 25 bp, Saccharomyces pastorianus
tgccgctgcaacaccaagtttgaaa

SEQ ID NO: 10532 - DNA, 25 bp, Saccharomyces pastorianus
gtgactcaagtaaatctgcctgcta

SEQ ID NO: 10533 - DNA, 25 bp, Saccharomyces pastorianus
tgtgactgccattgaagctttccca

SEQ ID NO: 10534 - DNA, 25 bp, Saccharomyces pastorianus
caaccacgttcctactgttgaacag

SEQ ID NO: 10535 - DNA, 25 bp, Saccharomyces pastorianus
ttgaacagttgcaaccaggtgtcgt

SEQ ID NO: 10536 - DNA, 25 bp, Saccharomyces pastorianus
gctaccgttcaaatggcggagattt

SEQ ID NO: 10537 - DNA, 25 bp, Saccharomyces pastorianus
gatcttgccagtacaaatacgggaa

SEQ ID NO: 10538 - DNA, 25 bp, Saccharomyces pastorianus
gtgaactcgccgaaaacatggctta

SEQ ID NO: 10539 - DNA, 25 bp, Saccharomyces pastorianus
aaaagtccgcctagtgtctggtgaa

SEQ ID NO: 10540 - DNA, 25 bp, Saccharomyces pastorianus
gacaccagctaaatacttcttcaga

SEQ ID NO: 10541 - DNA, 25 bp, Saccharomyces pastorianus
aagtgaagctcctttcctagaagaa

SEQ ID NO: 10542 - DNA, 25 bp, Saccharomyces pastorianus
gctaaacatgtcattggacctcaat

SEQ ID NO: 10543 - DNA, 25 bp, Saccharomyces pastorianus
gcggccgtaagcgatggtagtttca

SEQ ID NO: 10544 - DNA, 25 bp, Saccharomyces pastorianus
catggcttacttaccggattcaatc

SEQ ID NO: 10545 - DNA, 25 bp, Saccharomyces pastorianus
ggctttgagccgattgacgctgatt

SEQ ID NO: 10546 - DNA, 25 bp, Saccharomyces pastorianus
gatgtaataagcaacgcggccgtaa

SEQ ID NO: 10547 - DNA, 25 bp, Saccharomyces pastorianus
gaaaagtcacccacgaaagtagatg

SEQ ID NO: 10548 - DNA, 25 bp, Saccharomyces pastorianus
atgggtctcctgacgtgacaagaga

SEQ ID NO: 10549 - DNA, 25 bp, Saccharomyces pastorianus
ggatagagcttgatcccgagctaaa

SEQ ID NO: 10550 - DNA, 25 bp, Saccharomyces pastorianus
ggatccaaatatgcccaagagacct

SEQ ID NO: 10551 - DNA, 25 bp, Saccharomyces pastorianus
aactctggcctcattcaagcaggaa

SEQ ID NO: 10552 - DNA, 25 bp, Saccharomyces pastorianus
tgatcccgagctaaattgcgaagat

SEQ ID NO: 10553 - DNA, 25 bp, Saccharomyces pastorianus
gcaatccaaagatcacggctttcag

SEQ ID NO: 10554 - DNA, 25 bp, Saccharomyces pastorianus
gcaggaactgttgacaaaacctttc

SEQ ID NO: 10555 - DNA, 25 bp, Saccharomyces pastorianus
gcccaagagacctacaaatgcttat

SEQ ID NO: 10556 - DNA, 25 bp, Saccharomyces pastorianus
gaggatcaggcagaatgggtctcct

SEQ ID NO: 10557 - DNA, 25 bp, Saccharomyces pastorianus
ttgcgaagatccattgccaactctg

SEQ ID NO: 10558 - DNA, 25 bp, Saccharomyces pastorianus
ggtctccgctcttatgggtacgtaa

SEQ ID NO: 10559 - DNA, 25 bp, Saccharomyces pastorianus
atgggctggccttgctactaaggaa

SEQ ID NO: 10560 - DNA, 25 bp, Saccharomyces pastorianus
agacccacatcgtgttgaagcggaa

SEQ ID NO: 10561 - DNA, 25 bp, Saccharomyces pastorianus
acttggtgcttgtattcctccgatc

SEQ ID NO: 10562 - DNA, 25 bp, Saccharomyces pastorianus
tgagtccgcaactacattttgggca

SEQ ID NO: 10563 - DNA, 25 bp, Saccharomyces pastorianus
ggttaatgccagctatactctaggt

SEQ ID NO: 10564 - DNA, 25 bp, Saccharomyces pastorianus
gagtcaggctttttcttcgactaca

SEQ ID NO: 10565 - DNA, 25 bp, Saccharomyces pastorianus
gaacgttccagaggcccaatttcta

SEQ ID NO: 10566 - DNA, 25 bp, Saccharomyces pastorianus
ctccgatctcgttttttagcagttt

SEQ ID NO: 10567 - DNA, 25 bp, Saccharomyces pastorianus
agattctcgcttgggaaggtctccg

SEQ ID NO: 10568 - DNA, 25 bp, Saccharomyces pastorianus
atttggttgggctcctcatcagatt

SEQ ID NO: 10569 - DNA, 25 bp, Saccharomyces pastorianus
gtccgtttttggtcctcattatatt

SEQ ID NO: 10570 - DNA, 25 bp, Saccharomyces pastorianus
actacggatgccagcgtcaaaatca

SEQ ID NO: 10571 - DNA, 25 bp, Saccharomyces pastorianus
aacaaactcagccactcagtgaagt

SEQ ID NO: 10572 - DNA, 25 bp, Saccharomyces pastorianus
gagctggatgaattcgacaacgtct

SEQ ID NO: 10573 - DNA, 25 bp, Saccharomyces pastorianus
taccaccggccctagtagtaatacg

SEQ ID NO: 10574 - DNA, 25 bp, Saccharomyces pastorianus
gaggactctatttccagcaaatccg

SEQ ID NO: 10575 - DNA, 25 bp, Saccharomyces pastorianus
taaatcttcattggtccgtttttgg

SEQ ID NO: 10576 - DNA, 25 bp, Saccharomyces pastorianus
gtgaatggcacaaaccatccgacca

SEQ ID NO: 10577 - DNA, 25 bp, Saccharomyces pastorianus
gatttcgtctacctttacaacacaa

SEQ ID NO: 10578 - DNA, 25 bp, Saccharomyces pastorianus
aacgtctaccgccatttatatgcat

SEQ ID NO: 10579 - DNA, 25 bp, Saccharomyces pastorianus
taatgtctccttctaaatcctctac

SEQ ID NO: 10580 - DNA, 25 bp, Saccharomyces pastorianus
tactacctcttccacgtgagacaga

SEQ ID NO: 10581 - DNA, 25 bp, Saccharomyces pastorianus
ggacgctacctcagattgtgcatac

SEQ ID NO: 10582 - DNA, 25 bp, Saccharomyces pastorianus
ggtttgctaatcctatacatgtctc

SEQ ID NO: 10583 - DNA, 25 bp, Saccharomyces pastorianus
atgttccagttgtattacgtcggcc

SEQ ID NO: 10584 - DNA, 25 bp, Saccharomyces pastorianus
gttctctcctaagccctaaatttat

SEQ ID NO: 10585 - DNA, 25 bp, Saccharomyces pastorianus
ctgccatcagccaacgttattttag

SEQ ID NO: 10586 - DNA, 25 bp, Saccharomyces pastorianus
tattacgtcggccttggtttgctaa

SEQ ID NO: 10587 - DNA, 25 bp, Saccharomyces pastorianus
ttgtggtgttacacagcctgtttca

SEQ ID NO: 10588 - DNA, 25 bp, Saccharomyces pastorianus
aaccttgtcggtataatgctgcaca

SEQ ID NO: 10589 - DNA, 25 bp, Saccharomyces pastorianus
atatcgtcggtatggtgtgcgtgta

SEQ ID NO: 10590 - DNA, 25 bp, Saccharomyces pastorianus
gatctgcggtatacttcttaaacta

SEQ ID NO: 10591 - DNA, 25 bp, Saccharomyces pastorianus
agtgtcaatacttcgtcacgttatt

SEQ ID NO: 10592 - DNA, 25 bp, Saccharomyces pastorianus
tctggctgatatcgatttctctggc

SEQ ID NO: 10593 - DNA, 25 bp, Saccharomyces pastorianus
gagatgcctcttggcatatcacaaa

SEQ ID NO: 10594 - DNA, 25 bp, Saccharomyces pastorianus
gactgatatgctggattctatggct

SEQ ID NO: 10595 - DNA, 25 bp, Saccharomyces pastorianus
gagtcctcaaagacgctggcgaaat

SEQ ID NO: 10596 - DNA, 25 bp, Saccharomyces pastorianus
ggtacctccgagtgatgtttttatc

SEQ ID NO: 10597 - DNA, 25 bp, Saccharomyces pastorianus
gaatgccaagctacctatgtatcac

SEQ ID NO: 10598 - DNA, 25 bp, Saccharomyces pastorianus
gtttttatcgacgtcagagtcctca

SEQ ID NO: 10599 - DNA, 25 bp, Saccharomyces pastorianus
gatttctctggctctttggtacctc

SEQ ID NO: 10600 - DNA, 25 bp, Saccharomyces pastorianus
aagctcgacgacaaggtggccaagt

SEQ ID NO: 10601 - DNA, 25 bp, Saccharomyces pastorianus
ctcggatttgatcactgagctgaaa

SEQ ID NO: 10602 - DNA, 25 bp, Saccharomyces pastorianus
gatactctgtattctgaaattctca

SEQ ID NO: 10603 - DNA, 25 bp, Saccharomyces pastorianus
ctactaatgtatgacggcgatgcca

SEQ ID NO: 10604 - DNA, 25 bp, Saccharomyces pastorianus
gaataatacttcttcctctgcgggt

SEQ ID NO: 10605 - DNA, 25 bp, Saccharomyces pastorianus
cgattcttatatgacggtgaggcaa

SEQ ID NO: 10606 - DNA, 25 bp, Saccharomyces pastorianus
gattggctggacgaatttgaccgag

SEQ ID NO: 10607 - DNA, 25 bp, Saccharomyces pastorianus
acggcgctcgtgtgaaagttaactt

SEQ ID NO: 10608 - DNA, 25 bp, Saccharomyces pastorianus
ttatctgacagctgattcgccatta

SEQ ID NO: 10609 - DNA, 25 bp, Saccharomyces pastorianus
aatcgactttgcacgttctgtaacc

SEQ ID NO: 10610 - DNA, 25 bp, Saccharomyces pastorianus
tatacggtgcatctttactactaat

SEQ ID NO: 10611 - DNA, 25 bp, Saccharomyces pastorianus
gcaagagttcttgcacgattcttat

SEQ ID NO: 10612 - DNA, 25 bp, Saccharomyces pastorianus
ggataaattccgcataccaccaaaa

SEQ ID NO: 10613 - DNA, 25 bp, Saccharomyces pastorianus
gaaccaaccagagtctttgcagatc

SEQ ID NO: 10614 - DNA, 25 bp, Saccharomyces pastorianus
ccgcgctattcttgttgacggtata

SEQ ID NO: 10615 - DNA, 25 bp, Saccharomyces pastorianus
atcacggagtacatggaccacctgc

SEQ ID NO: 10616 - DNA, 25 bp, Saccharomyces pastorianus
tacagcatgactacgaggacccaat

SEQ ID NO: 10617 - DNA, 25 bp, Saccharomyces pastorianus
aacgaatcaatgcaatctcccaatt

SEQ ID NO: 10618 - DNA, 25 bp, Saccharomyces pastorianus
ggagcaatcgcagtggagctacaaa

SEQ ID NO: 10619 - DNA, 25 bp, Saccharomyces pastorianus
gcaaacagcaaagtacgtccacgtt

SEQ ID NO: 10620 - DNA, 25 bp, Saccharomyces pastorianus
taacggcgactatgattttgacaac

SEQ ID NO: 10621 - DNA, 25 bp, Saccharomyces pastorianus
gagcaactggctcaattgatcacgg

SEQ ID NO: 10622 - DNA, 25 bp, Saccharomyces pastorianus
gtctgtggatgctatgctttatacg

SEQ ID NO: 10623 - DNA, 25 bp, Saccharomyces pastorianus
aaatgaaaacctgggccgcgctatt

SEQ ID NO: 10624 - DNA, 25 bp, Saccharomyces pastorianus
gaaaattacattcaccgtattggta

SEQ ID NO: 10625 - DNA, 25 bp, Saccharomyces pastorianus
ggtcatcaactatgatttgcctgaa

SEQ ID NO: 10626 - DNA, 25 bp, Saccharomyces pastorianus
gaactggtcattctcgtgtgttgat

SEQ ID NO: 10627 - DNA, 25 bp, Saccharomyces pastorianus
gactctttgaccatcacacagtgtg

SEQ ID NO: 10628 - DNA, 25 bp, Saccharomyces pastorianus
gttcagcaagtttctttggtcatca

SEQ ID NO: 10629 - DNA, 25 bp, Saccharomyces pastorianus
gcagcgtctaactcaatctaacttt

SEQ ID NO: 10630 - DNA, 25 bp, Saccharomyces pastorianus
ggttgattggttatcgcagcgtcta

SEQ ID NO: 10631 - DNA, 25 bp, Saccharomyces pastorianus
aactttgctgtggtttcaatgcacg

SEQ ID NO: 10632 - DNA, 25 bp, Saccharomyces pastorianus
gactggaaattcgataccttgtgtg

SEQ ID NO: 10633 - DNA, 25 bp, Saccharomyces pastorianus
gggcacgtggtattgatgttcagca

SEQ ID NO: 10634 - DNA, 25 bp, Saccharomyces pastorianus
gatatccactgatgtttgggcacgt

SEQ ID NO: 10635 - DNA, 25 bp, Saccharomyces pastorianus
atggacttggatttagaacttgacg

SEQ ID NO: 10636 - DNA, 25 bp, Saccharomyces pastorianus
gaacgcttgtatcgcataatagtga

SEQ ID NO: 10637 - DNA, 25 bp, Saccharomyces pastorianus
cttgacgtaatttcacagttctgtg

SEQ ID NO: 10638 - DNA, 25 bp, Saccharomyces pastorianus
gtttccgactaccataaagtgctta

SEQ ID NO: 10639 - DNA, 25 bp, Saccharomyces pastorianus
gaccctgcagacctaagcggtactg

SEQ ID NO: 10640 - DNA, 25 bp, Saccharomyces pastorianus
agatgtcacgctggtcagtgatcaa

SEQ ID NO: 10641 - DNA, 25 bp, Saccharomyces pastorianus
ctcacagagtaagcagccctggatt

SEQ ID NO: 10642 - DNA, 25 bp, Saccharomyces pastorianus
aagtgattgtgccatgtttccgact

SEQ ID NO: 10643 - DNA, 25 bp, Saccharomyces pastorianus
taatgaatctaagggcgctgacgga

SEQ ID NO: 10644 - DNA, 25 bp, Saccharomyces pastorianus
aatacgaacttctatctcacagagt

SEQ ID NO: 10645 - DNA, 25 bp, Saccharomyces pastorianus
gacctatctccttctgttcgagagt

SEQ ID NO: 10646 - DNA, 25 bp, Saccharomyces pastorianus
actgaggcagctaacaacgaagatg

SEQ ID NO: 10647 - DNA, 25 bp, Saccharomyces pastorianus
gattccttaaggactggtcttgaac

SEQ ID NO: 10648 - DNA, 25 bp, Saccharomyces pastorianus
gagcattccctcttccgaaaggaaa

SEQ ID NO: 10649 - DNA, 25 bp, Saccharomyces pastorianus
aggccactggactgaggtaggaaat

SEQ ID NO: 10650 - DNA, 25 bp, Saccharomyces pastorianus
agagcatgttgagcattccctcttc

SEQ ID NO: 10651 - DNA, 25 bp, Saccharomyces pastorianus
gatcccgtatacaatgtcgctacaa

SEQ ID NO: 10652 - DNA, 25 bp, Saccharomyces pastorianus
gcagttcgccgaaacatcatactca

SEQ ID NO: 10653 - DNA, 25 bp, Saccharomyces pastorianus
aactggactgtggttagtgaacgta

SEQ ID NO: 10654 - DNA, 25 bp, Saccharomyces pastorianus
gtacaaagaaagacccatggccgat

SEQ ID NO: 10655 - DNA, 25 bp, Saccharomyces pastorianus
aggtcagtgataatcctactttcaa

SEQ ID NO: 10656 - DNA, 25 bp, Saccharomyces pastorianus
gccgcttctaaacctgattccttaa

SEQ ID NO: 10657 - DNA, 25 bp, Saccharomyces pastorianus
atgggtaccgtacatcgtcgatccg

SEQ ID NO: 10658 - DNA, 25 bp, Saccharomyces pastorianus
aaggctttccaactccagcaaggat

SEQ ID NO: 10659 - DNA, 25 bp, Saccharomyces pastorianus
taatagtagcgccatggcttctgtc

SEQ ID NO: 10660 - DNA, 25 bp, Saccharomyces pastorianus
gtgctttcaataaaccttccttcta

SEQ ID NO: 10661 - DNA, 25 bp, Saccharomyces pastorianus
gacacgtagtttctatgcttccgaa

SEQ ID NO: 10662 - DNA, 25 bp, Saccharomyces pastorianus
gaaccgtttgatccgagccattata

SEQ ID NO: 10663 - DNA, 25 bp, Saccharomyces pastorianus
gatccgtccatccaaagcgatgtta

SEQ ID NO: 10664 - DNA, 25 bp, Saccharomyces pastorianus
aaccttccttctatgtatttgccga

SEQ ID NO: 10665 - DNA, 25 bp, Saccharomyces pastorianus
gatgaagcgtcccaaggtcatagaa

SEQ ID NO: 10666 - DNA, 25 bp, Saccharomyces pastorianus
acatttgtggcgagtcagtctttac

SEQ ID NO: 10667 - DNA, 25 bp, Saccharomyces pastorianus
gaatcattagattgccttgccgaat

SEQ ID NO: 10668 - DNA, 25 bp, Saccharomyces pastorianus
ccaacgaatcgaacgctcatttgaa

SEQ ID NO: 10669 - DNA, 25 bp, Saccharomyces pastorianus
aacagatcattgcatgtggcgacat

SEQ ID NO: 10670 - DNA, 25 bp, Saccharomyces pastorianus
ggaattatgttctactggtgcggat

SEQ ID NO: 10671 - DNA, 25 bp, Saccharomyces pastorianus
taggaccgcaggatctgaaccgcat

SEQ ID NO: 10672 - DNA, 25 bp, Saccharomyces pastorianus
aatatgatgaactctgttggtctca

SEQ ID NO: 10673 - DNA, 25 bp, Saccharomyces pastorianus
gacaagttcttactgtgcatcactg

SEQ ID NO: 10674 - DNA, 25 bp, Saccharomyces pastorianus
gagaagtttggcctcgcattgccaa

SEQ ID NO: 10675 - DNA, 25 bp, Saccharomyces pastorianus
tggagaccgtttactgagatactac

SEQ ID NO: 10676 - DNA, 25 bp, Saccharomyces pastorianus
tagttccatggccttacagacaaat

SEQ ID NO: 10677 - DNA, 25 bp, Saccharomyces pastorianus
gattgctctggtttgacaagttctt

SEQ ID NO: 10678 - DNA, 25 bp, Saccharomyces pastorianus
gttggtctcagactgttcttgggaa

SEQ ID NO: 10679 - DNA, 25 bp, Saccharomyces pastorianus
atctacacgctatatggccacgtcg

SEQ ID NO: 10680 - DNA, 25 bp, Saccharomyces pastorianus
ccaggacactttgaccgaatacgat

SEQ ID NO: 10681 - DNA, 25 bp, Saccharomyces pastorianus
tacacggtaaagtcgctggctgttt

SEQ ID NO: 10682 - DNA, 25 bp, Saccharomyces pastorianus
gggtctgcagacatctaccaagtcg

SEQ ID NO: 10683 - DNA, 25 bp, Saccharomyces pastorianus
agaagttgtcaaggccctcggcgga

SEQ ID NO: 10684 - DNA, 25 bp, Saccharomyces pastorianus
tggaaggcattctgggaccgtaccg

SEQ ID NO: 10685 - DNA, 25 bp, Saccharomyces pastorianus
gagtcgctattatcatctacacgct

SEQ ID NO: 10686 - DNA, 25 bp, Saccharomyces pastorianus
tatcgaagctgctggtgggtctgca

SEQ ID NO: 10687 - DNA, 25 bp, Saccharomyces pastorianus
attatgaactctctatccactttgg

SEQ ID NO: 10688 - DNA, 25 bp, Saccharomyces pastorianus
gttttcgccgaattaaccaacatgg

SEQ ID NO: 10689 - DNA, 25 bp, Saccharomyces pastorianus
aatacgatgccttcctgtttggtat

SEQ ID NO: 10690 - DNA, 25 bp, Saccharomyces pastorianus
ggtttttagctatgccatggcctat

SEQ ID NO: 10691 - DNA, 25 bp, Saccharomyces pastorianus
aagattgggctaccacttcggtgat

SEQ ID NO: 10692 - DNA, 25 bp, Saccharomyces pastorianus
gatgacgcttctgaatcacacgtgg

SEQ ID NO: 10693 - DNA, 25 bp, Saccharomyces pastorianus
gttatgtgtttcatcccaaccttat

SEQ ID NO: 10694 - DNA, 25 bp, Saccharomyces pastorianus
agtctgtttgctaggtcatactcca

SEQ ID NO: 10695 - DNA, 25 bp, Saccharomyces pastorianus
ttaattgccggttgtgttcactcca

SEQ ID NO: 10696 - DNA, 25 bp, Saccharomyces pastorianus
caattgcttctaactttggtgctga

SEQ ID NO: 10697 - DNA, 25 bp, Saccharomyces pastorianus
ggagctgccattgtcgtatgtatca

SEQ ID NO: 10698 - DNA, 25 bp, Saccharomyces pastorianus
attagaatcgtcttcctcactatct

SEQ ID NO: 10699 - DNA, 25 bp, Saccharomyces pastorianus
tgttcatgtggatcatcgcttaccc

SEQ ID NO: 10700 - DNA, 25 bp, Saccharomyces pastorianus
agttgctagtccaaaaccagctgcc

SEQ ID NO: 10701 - DNA, 25 bp, Saccharomyces pastorianus
gttggtatgacatttcgcatcagac

SEQ ID NO: 10702 - DNA, 25 bp, Saccharomyces pastorianus
gggaattataccgtcagacaaccaa

SEQ ID NO: 10703 - DNA, 25 bp, Saccharomyces pastorianus
gattattactttggtcgtctcactt

SEQ ID NO: 10704 - DNA, 25 bp, Saccharomyces pastorianus
gcaacattcacgacaatgccatcga

SEQ ID NO: 10705 - DNA, 25 bp, Saccharomyces pastorianus
ctccacctcacaattcaagaacttg

SEQ ID NO: 10706 - DNA, 25 bp, Saccharomyces pastorianus
gtcgtctcacttcggccgaaaaatt

SEQ ID NO: 10707 - DNA, 25 bp, Saccharomyces pastorianus
ttaaacagtgattctccacctcaca

SEQ ID NO: 10708 - DNA, 25 bp, Saccharomyces pastorianus
atctttcttgttgattgtcctatta

SEQ ID NO: 10709 - DNA, 25 bp, Saccharomyces pastorianus
atcacacccgaaaactagcaacatt

SEQ ID NO: 10710 - DNA, 25 bp, Saccharomyces pastorianus
caattttgccgtattgattgcgggt

SEQ ID NO: 10711 - DNA, 25 bp, Saccharomyces pastorianus
aagacttacagagcataaccttaat

SEQ ID NO: 10712 - DNA, 25 bp, Saccharomyces pastorianus
tcaggcggctgctgcaaaacttgtt

SEQ ID NO: 10713 - DNA, 25 bp, Saccharomyces pastorianus
aaatcaggcggctgctgcaaaactt

SEQ ID NO: 10714 - DNA, 25 bp, Saccharomyces pastorianus
ggctgctgcaaaacttgttgccatt

SEQ ID NO: 10715 - DNA, 25 bp, Saccharomyces pastorianus
atgagacatcaacaaccgcatatga

SEQ ID NO: 10716 - DNA, 25 bp, Saccharomyces pastorianus
aaggaaaaatcaggcggctgctgca

SEQ ID NO: 10717 - DNA, 25 bp, Saccharomyces pastorianus
atcaacaaccgcatatgaactaccc

SEQ ID NO: 10718 - DNA, 25 bp, Saccharomyces pastorianus
gcaaaacttgttgccattttctctg

SEQ ID NO: 10719 - DNA, 25 bp, Saccharomyces pastorianus
atttatattcaacaggctcctccta

SEQ ID NO: 10720 - DNA, 25 bp, Saccharomyces pastorianus
caacaggctcctcctaaggaaaaat

SEQ ID NO: 10721 - DNA, 25 bp, Saccharomyces pastorianus
tattcaacaggctcctcctaaggaa

SEQ ID NO: 10722 - DNA, 25 bp, Saccharomyces pastorianus
aaacttgttgccattttctctgctg

SEQ ID NO: 10723 - DNA, 25 bp, Saccharomyces pastorianus
ggttgcccaatgtatctatgaccaa

SEQ ID NO: 10724 - DNA, 25 bp, Saccharomyces pastorianus
aaagcctggtgtcactgccatcgta

SEQ ID NO: 10725 - DNA, 25 bp, Saccharomyces pastorianus
atacggttgctctgttactgatgct

SEQ ID NO: 10726 - DNA, 25 bp, Saccharomyces pastorianus
tatgaccaactgaccgaaggcgaaa

SEQ ID NO: 10727 - DNA, 25 bp, Saccharomyces pastorianus
gagccgctgctcacgaacattattt

SEQ ID NO: 10728 - DNA, 25 bp, Saccharomyces pastorianus
gtttaaccgatgactcccaaagaag

SEQ ID NO: 10729 - DNA, 25 bp, Saccharomyces pastorianus
agagttggcatctggtctatctttc

SEQ ID NO: 10730 - DNA, 25 bp, Saccharomyces pastorianus
atttcctttctgttacaaagcctgg

SEQ ID NO: 10731 - DNA, 25 bp, Saccharomyces pastorianus
ccgacggtggtttacaagtcgccat

SEQ ID NO: 10732 - DNA, 25 bp, Saccharomyces pastorianus
actgccatcgtaggtaccggaggta

SEQ ID NO: 10733 - DNA, 25 bp, Saccharomyces pastorianus
gattgattgttctcacggtaacagt

SEQ ID NO: 10734 - DNA, 25 bp, Saccharomyces pastorianus
aaatacctcgaatgtcacttggact

SEQ ID NO: 10735 - DNA, 25 bp, Saccharomyces pastorianus
aaacaggtgatgatacgggctctaa

SEQ ID NO: 10736 - DNA, 25 bp, Saccharomyces pastorianus
aaattgctctaaggctgatccaaga

SEQ ID NO: 10737 - DNA, 25 bp, Saccharomyces pastorianus
gagcaattattcacatctcagttga

SEQ ID NO: 10738 - DNA, 25 bp, Saccharomyces pastorianus
agttgacatctatcacgtctcctaa

SEQ ID NO: 10739 - DNA, 25 bp, Saccharomyces pastorianus
ttatcaaccaaatcgccatcttctt

SEQ ID NO: 10740 - DNA, 25 bp, Saccharomyces pastorianus
gtctcctaagccatcattgccaata

SEQ ID NO: 10741 - DNA, 25 bp, Saccharomyces pastorianus
agtacccctatcatctgaagtatca

SEQ ID NO: 10742 - DNA, 25 bp, Saccharomyces pastorianus
gaaagggccatatccatgggccaag

SEQ ID NO: 10743 - DNA, 25 bp, Saccharomyces pastorianus
aagagatctgtatacggctgctaac

SEQ ID NO: 10744 - DNA, 25 bp, Saccharomyces pastorianus
agagggcaggcttttcgcacaagaa

SEQ ID NO: 10745 - DNA, 25 bp, Saccharomyces pastorianus
tggacggtaataaaatcgcccttcg

SEQ ID NO: 10746 - DNA, 25 bp, Saccharomyces pastorianus
acctccacatcgaaagcgtttatca

SEQ ID NO: 10747 - DNA, 25 bp, Saccharomyces pastorianus
tgcacctttaaagctgcctatcaaa

SEQ ID NO: 10748 - DNA, 25 bp, Saccharomyces pastorianus
gcagagttttgattccgacaccaat

SEQ ID NO: 10749 - DNA, 25 bp, Saccharomyces pastorianus
ggtgatctggtagcggacattcaat

SEQ ID NO: 10750 - DNA, 25 bp, Saccharomyces pastorianus
acaagagactcatcagggcctggga

SEQ ID NO: 10751 - DNA, 25 bp, Saccharomyces pastorianus
gcccttcgttcatgctaaatccaaa

SEQ ID NO: 10752 - DNA, 25 bp, Saccharomyces pastorianus
aaacccttgcccactagaagagagc

SEQ ID NO: 10753 - DNA, 25 bp, Saccharomyces pastorianus
caggctgtctactatgcacctttaa

SEQ ID NO: 10754 - DNA, 25 bp, Saccharomyces pastorianus
acgcgtccgtatccagttaatttgc

SEQ ID NO: 10755 - DNA, 25 bp, Saccharomyces pastorianus
aacattctattgcaggcgttgggat

SEQ ID NO: 10756 - DNA, 25 bp, Saccharomyces pastorianus
taagactgcctttgattttcgatat

SEQ ID NO: 10757 - DNA, 25 bp, Saccharomyces pastorianus
gaacccaaatacttgacaacaccca

SEQ ID NO: 10758 - DNA, 25 bp, Saccharomyces pastorianus
gtcaggccaccttgcaaggcataac

SEQ ID NO: 10759 - DNA, 25 bp, Saccharomyces pastorianus
ataccagacactgctgccagtttta

SEQ ID NO: 10760 - DNA, 25 bp, Saccharomyces pastorianus
aagcgtttctttcgatagttcatca

SEQ ID NO: 10761 - DNA, 25 bp, Saccharomyces pastorianus
ataagggctgtactcaacgatttag

SEQ ID NO: 10762 - DNA, 25 bp, Saccharomyces pastorianus
gagaaccgatcccaaaaacacatta

SEQ ID NO: 10763 - DNA, 25 bp, Saccharomyces pastorianus
caagagggtttactacgtcaggcca

SEQ ID NO: 10764 - DNA, 25 bp, Saccharomyces pastorianus
tgggacggtttctaatgacgattat

SEQ ID NO: 10765 - DNA, 25 bp, Saccharomyces pastorianus
gaccttgagcaacggcgcaagtata

SEQ ID NO: 10766 - DNA, 25 bp, Saccharomyces pastorianus
gctatcccaactgaatgccaattcg

SEQ ID NO: 10767 - DNA, 25 bp, Saccharomyces pastorianus
gaactattccaccaattgcacaaag

SEQ ID NO: 10768 - DNA, 25 bp, Saccharomyces pastorianus
ctttcctaccatcttacttgacaat

SEQ ID NO: 10769 - DNA, 25 bp, Saccharomyces pastorianus
tcgtggtattggtgggatcttcttt

SEQ ID NO: 10770 - DNA, 25 bp, Saccharomyces pastorianus
tgaactaccgttactttgaaacctg

SEQ ID NO: 10771 - DNA, 25 bp, Saccharomyces pastorianus
tccaaccactcatttgaactaccgt

SEQ ID NO: 10772 - DNA, 25 bp, Saccharomyces pastorianus
atgagtttaccagagcatgcctcct

SEQ ID NO: 10773 - DNA, 25 bp, Saccharomyces pastorianus
gacgaatacttctacatcacacatc

SEQ ID NO: 10774 - DNA, 25 bp, Saccharomyces pastorianus
acatcgtaaggaaactcgtggtatt

SEQ ID NO: 10775 - DNA, 25 bp, Saccharomyces pastorianus
gaaccccaggttctagagtcgaatc

SEQ ID NO: 10776 - DNA, 25 bp, Saccharomyces pastorianus
tgctctataccctcgtttcaagaaa

SEQ ID NO: 10777 - DNA, 25 bp, Saccharomyces pastorianus
agcatgcctcctggttatacgacaa

SEQ ID NO: 10778 - DNA, 25 bp, Saccharomyces pastorianus
ttcgttttgtccttcatgcaataat

SEQ ID NO: 10779 - DNA, 25 bp, Saccharomyces pastorianus
gagagtgcttatttcttccagctac

SEQ ID NO: 10780 - DNA, 25 bp, Saccharomyces pastorianus
atttgctgctaattacgagtggcga

SEQ ID NO: 10781 - DNA, 25 bp, Saccharomyces pastorianus
cttccagctacaaattaggtctgct

SEQ ID NO: 10782 - DNA, 25 bp, Saccharomyces pastorianus
gatgactaccttttacaagtgcgtg

SEQ ID NO: 10783 - DNA, 25 bp, Saccharomyces pastorianus
gtgtccctatgagttccctatagag

SEQ ID NO: 10784 - DNA, 25 bp, Saccharomyces pastorianus
gtccttcatgcaataatttgctgct

SEQ ID NO: 10785 - DNA, 25 bp, Saccharomyces pastorianus
gatagcggtgtatatacgttagcgt

SEQ ID NO: 10786 - DNA, 25 bp, Saccharomyces pastorianus
tagcgtgccgttcgtgtccctatga

SEQ ID NO: 10787 - DNA, 25 bp, Saccharomyces pastorianus
gtatatacgttagcgtgccgttcgt

SEQ ID NO: 10788 - DNA, 25 bp, Saccharomyces pastorianus
aaggaagttgacgatgtccttggcg

SEQ ID NO: 10789 - DNA, 25 bp, Saccharomyces pastorianus
agacctttacgtgccctaatagcgt

SEQ ID NO: 10790 - DNA, 25 bp, Saccharomyces pastorianus
ttcttccaaagttatcttgctgccc

SEQ ID NO: 10791 - DNA, 25 bp, Saccharomyces pastorianus
atggtcgggcattatgctttcccat

SEQ ID NO: 10792 - DNA, 25 bp, Saccharomyces pastorianus
caaggttgatgtgttctttggctca

SEQ ID NO: 10793 - DNA, 25 bp, Saccharomyces pastorianus
gttcttttcaacatccttgtcttca

SEQ ID NO: 10794 - DNA, 25 bp, Saccharomyces pastorianus
gctttcccatattcgtttcagacta

SEQ ID NO: 10795 - DNA, 25 bp, Saccharomyces pastorianus
agcgtgctcttttgtaggtctaatt

SEQ ID NO: 10796 - DNA, 25 bp, Saccharomyces pastorianus
acaagcttttacatggttggcggcc

SEQ ID NO: 10797 - DNA, 25 bp, Saccharomyces pastorianus
gtgcgatgttgaatctttcttccaa

SEQ ID NO: 10798 - DNA, 25 bp, Saccharomyces pastorianus
tgtcttcatggcacagttctgggta

SEQ ID NO: 10799 - DNA, 25 bp, Saccharomyces pastorianus
gtctaattggtttcgttgcttgctc

SEQ ID NO: 10800 - DNA, 25 bp, Saccharomyces pastorianus
caggcgcccagatattgcaagtatt

SEQ ID NO: 10801 - DNA, 25 bp, Saccharomyces pastorianus
gatgagttttccctacaatacttga

SEQ ID NO: 10802 - DNA, 25 bp, Saccharomyces pastorianus
aatcgcactacatcgttaatttcgg

SEQ ID NO: 10803 - DNA, 25 bp, Saccharomyces pastorianus
gaaggtggcgggtctcgtcttttca

SEQ ID NO: 10804 - DNA, 25 bp, Saccharomyces pastorianus
acaagctgtgcggttctggatacga

SEQ ID NO: 10805 - DNA, 25 bp, Saccharomyces pastorianus
atcctggtgttatgtatggctctaa

SEQ ID NO: 10806 - DNA, 25 bp, Saccharomyces pastorianus
aggaccacggtgttaccttgcaagg

SEQ ID NO: 10807 - DNA, 25 bp, Saccharomyces pastorianus
aagttcctggtacgccctagacaag

SEQ ID NO: 10808 - DNA, 25 bp, Saccharomyces pastorianus
gggtggcgaactatcatctttggat

SEQ ID NO: 10809 - DNA, 25 bp, Saccharomyces pastorianus
gggacccatccttttatggatccag

SEQ ID NO: 10810 - DNA, 25 bp, Saccharomyces pastorianus
gtttcattggactggacctgggacc

SEQ ID NO: 10811 - DNA, 25 bp, Saccharomyces pastorianus
tttattcagacacttccacgaccga

SEQ ID NO: 10812 - DNA, 25 bp, Saccharomyces pastorianus
acacatggcatctactccagagttt

SEQ ID NO: 10813 - DNA, 25 bp, Saccharomyces pastorianus
aagcatgccttttggcccagaggaa

SEQ ID NO: 10814 - DNA, 25 bp, Saccharomyces pastorianus
aaagcgcagcagacgtatatgacag

SEQ ID NO: 10815 - DNA, 25 bp, Saccharomyces pastorianus
gtcgttgttcttgttacacatggca

SEQ ID NO: 10816 - DNA, 25 bp, Saccharomyces pastorianus
gtatggacatttctttttcaggttc

SEQ ID NO: 10817 - DNA, 25 bp, Saccharomyces pastorianus
gaatagtggtgtgcatatctgtgaa

SEQ ID NO: 10818 - DNA, 25 bp, Saccharomyces pastorianus
tacgtcttgaggaccgtattaccta

SEQ ID NO: 10819 - DNA, 25 bp, Saccharomyces pastorianus
gaagacccagggatgtcgttgttct

SEQ ID NO: 10820 - DNA, 25 bp, Saccharomyces pastorianus
atttgaggtatgacccctgcggtaa

SEQ ID NO: 10821 - DNA, 25 bp, Saccharomyces pastorianus
gaaagcccggtaaatgttacctgca

SEQ ID NO: 10822 - DNA, 25 bp, Saccharomyces pastorianus
agtgtcttgatctctatagtgtctt

SEQ ID NO: 10823 - DNA, 25 bp, Saccharomyces pastorianus
tagaagaccctaacatcaactcgcc

SEQ ID NO: 10824 - DNA, 25 bp, Saccharomyces pastorianus
gaaatagtcatgtcccgttcgatga

SEQ ID NO: 10825 - DNA, 25 bp, Saccharomyces pastorianus
aaacgggtctgccattctacaagat

SEQ ID NO: 10826 - DNA, 25 bp, Saccharomyces pastorianus
tttcgtaatgcccacttccgaatca

SEQ ID NO: 10827 - DNA, 25 bp, Saccharomyces pastorianus
gacagcgatttggatgacgacgaaa

SEQ ID NO: 10828 - DNA, 25 bp, Saccharomyces pastorianus
ttccgaatcagcttacatatcccaa

SEQ ID NO: 10829 - DNA, 25 bp, Saccharomyces pastorianus
aacgtggacgctgctgttgactata

SEQ ID NO: 10830 - DNA, 25 bp, Saccharomyces pastorianus
ttgtatttctattctccaccaaagc

SEQ ID NO: 10831 - DNA, 25 bp, Saccharomyces pastorianus
gataatttctggtacgacagcgatt

SEQ ID NO: 10832 - DNA, 25 bp, Saccharomyces pastorianus
gaaacagcctcacaaggccgaggat

SEQ ID NO: 10833 - DNA, 25 bp, Saccharomyces pastorianus
atctgtcaagggtggtgccgatgtt

SEQ ID NO: 10834 - DNA, 25 bp, Saccharomyces pastorianus
gaaagttcacctctggcgatgtcaa

SEQ ID NO: 10835 - DNA, 25 bp, Saccharomyces pastorianus
gtggtgctcttgtcattgccaataa

SEQ ID NO: 10836 - DNA, 25 bp, Saccharomyces pastorianus
acttatccttctctaacttgacaac

SEQ ID NO: 10837 - DNA, 25 bp, Saccharomyces pastorianus
acttgacaactatcggtggtgctct

SEQ ID NO: 10838 - DNA, 25 bp, Saccharomyces pastorianus
acttctacctctgtcaaactatcat

SEQ ID NO: 10839 - DNA, 25 bp, Saccharomyces pastorianus
agcgctgccagttcaagctcaaaga

SEQ ID NO: 10840 - DNA, 25 bp, Saccharomyces pastorianus
aacacagtgggccagaccttcagca

SEQ ID NO: 10841 - DNA, 25 bp, Saccharomyces pastorianus
gatgtcaaggctgctgtttctgcat

SEQ ID NO: 10842 - DNA, 25 bp, Saccharomyces pastorianus
ttccaagacctcttccaaatctgag

SEQ ID NO: 10843 - DNA, 25 bp, Saccharomyces pastorianus
ttcagcatcgtctccaatagtgagt

SEQ ID NO: 10844 - DNA, 25 bp, Saccharomyces pastorianus
gaaaacacccagctagaggaacgat

SEQ ID NO: 10845 - DNA, 25 bp, Saccharomyces pastorianus
gtccttcaacaagacccttacattt

SEQ ID NO: 10846 - DNA, 25 bp, Saccharomyces pastorianus
tggaagaacttaacgacgtcggtca

SEQ ID NO: 10847 - DNA, 25 bp, Saccharomyces pastorianus
tactgaaccaaattgtcggaccaca

SEQ ID NO: 10848 - DNA, 25 bp, Saccharomyces pastorianus
ggaacgattaattggctccagtaat

SEQ ID NO: 10849 - DNA, 25 bp, Saccharomyces pastorianus
cagagagcagagatgtccttcaaca

SEQ ID NO: 10850 - DNA, 25 bp, Saccharomyces pastorianus
agccagttgagtccggccaattaga

SEQ ID NO: 10851 - DNA, 25 bp, Saccharomyces pastorianus
aatagtgatttcgaactcgcgttaa

SEQ ID NO: 10852 - DNA, 25 bp, Saccharomyces pastorianus
gaaatcgtcgctagttatcggcaac

SEQ ID NO: 10853 - DNA, 25 bp, Saccharomyces pastorianus
atcagggacccagatgagccagttg

SEQ ID NO: 10854 - DNA, 25 bp, Saccharomyces pastorianus
gtaaaacttcaattgaccgtgaggt

SEQ ID NO: 10855 - DNA, 25 bp, Saccharomyces pastorianus
gagtttgaccactatttccactcct

SEQ ID NO: 10856 - DNA, 25 bp, Saccharomyces pastorianus
gttacgatattctgagtttgaccac

SEQ ID NO: 10857 - DNA, 25 bp, Saccharomyces pastorianus
gtatggttgctcttttgtacctaaa

SEQ ID NO: 10858 - DNA, 25 bp, Saccharomyces pastorianus
caatgttttttgcacaccctggaaa

SEQ ID NO: 10859 - DNA, 25 bp, Saccharomyces pastorianus
agatggcggattacgtggtcgacct

SEQ ID NO: 10860 - DNA, 25 bp, Saccharomyces pastorianus
tgcccataagtttctaccagctgac

SEQ ID NO: 10861 - DNA, 25 bp, Saccharomyces pastorianus
accagctgaccacaacctatatgaa

SEQ ID NO: 10862 - DNA, 25 bp, Saccharomyces pastorianus
ctcttatttttcgtatggttgctct

SEQ ID NO: 10863 - DNA, 25 bp, Saccharomyces pastorianus
gccttggacgctcagttacgaaaag

SEQ ID NO: 10864 - DNA, 25 bp, Saccharomyces pastorianus
ttaaactccttacgtgtgcctcaga

SEQ ID NO: 10865 - DNA, 25 bp, Saccharomyces pastorianus
gtgtgcctcagaagatactgcccat

SEQ ID NO: 10866 - DNA, 25 bp, Saccharomyces pastorianus
tatagtgaatcgatgccagctcctg

SEQ ID NO: 10867 - DNA, 25 bp, Saccharomyces pastorianus
cattgtgtatggtgtggccgactca

SEQ ID NO: 10868 - DNA, 25 bp, Saccharomyces pastorianus
atattgtccctcaaaaatgcctgca

SEQ ID NO: 10869 - DNA, 25 bp, Saccharomyces pastorianus
tcaccagtcattccacttttgttat

SEQ ID NO: 10870 - DNA, 25 bp, Saccharomyces pastorianus
ttcaactcccgttacctgcgtttag

SEQ ID NO: 10871 - DNA, 25 bp, Saccharomyces pastorianus
tgggtactttcaccaaatcatttgg

SEQ ID NO: 10872 - DNA, 25 bp, Saccharomyces pastorianus
taccctgctactccgttaattgaat

SEQ ID NO: 10873 - DNA, 25 bp, Saccharomyces pastorianus
agattctgtatgtcagcgtctttga

SEQ ID NO: 10874 - DNA, 25 bp, Saccharomyces pastorianus
gttgtcgttgttgcataccctgcta

SEQ ID NO: 10875 - DNA, 25 bp, Saccharomyces pastorianus
tgaactgtgtccaggccaaggcgca

SEQ ID NO: 10876 - DNA, 25 bp, Saccharomyces pastorianus
agagagattgcagcgtattgccttc

SEQ ID NO: 10877 - DNA, 25 bp, Saccharomyces pastorianus
tagttgaagtttcttctggcctaga

SEQ ID NO: 10878 - DNA, 25 bp, Saccharomyces pastorianus
taggtttcttcttaccgcatacccg

SEQ ID NO: 10879 - DNA, 25 bp, Saccharomyces pastorianus
gacaactcacctaggtttcttctta

SEQ ID NO: 10880 - DNA, 25 bp, Saccharomyces pastorianus
ctggcctagaagacgattcggactt

SEQ ID NO: 10881 - DNA, 25 bp, Saccharomyces pastorianus
gtttcgcataactacagcaagagcc

SEQ ID NO: 10882 - DNA, 25 bp, Saccharomyces pastorianus
gagccaaagccctcctatgagataa

SEQ ID NO: 10883 - DNA, 25 bp, Saccharomyces pastorianus
ttagcagaaatcctgcccgacaact

SEQ ID NO: 10884 - DNA, 25 bp, Saccharomyces pastorianus
attaaggccctgtcaatcaaaattg

SEQ ID NO: 10885 - DNA, 25 bp, Saccharomyces pastorianus
gaaacgagtgtggtactttcaaatt

SEQ ID NO: 10886 - DNA, 25 bp, Saccharomyces pastorianus
gcatacccgatcacaacgaaagacg

SEQ ID NO: 10887 - DNA, 25 bp, Saccharomyces pastorianus
tgctttacgcgggtgcattagaaat

SEQ ID NO: 10888 - DNA, 25 bp, Saccharomyces pastorianus
tagataacccaaagaaacccgctag

SEQ ID NO: 10889 - DNA, 25 bp, Saccharomyces pastorianus
ctctgctaggctatcatataccaaa

SEQ ID NO: 10890 - DNA, 25 bp, Saccharomyces pastorianus
ggtgatctttaacttgcaggccaaa

SEQ ID NO: 10891 - DNA, 25 bp, Saccharomyces pastorianus
taggtacaacccagccagtcaaaat

SEQ ID NO: 10892 - DNA, 25 bp, Saccharomyces pastorianus
ggcactccatgaggctatttgggaa

SEQ ID NO: 10893 - DNA, 25 bp, Saccharomyces pastorianus
aatgctgggaatcttgatacggcaa

SEQ ID NO: 10894 - DNA, 25 bp, Saccharomyces pastorianus
gcaggccaaaagcattcaaaaggtt

SEQ ID NO: 10895 - DNA, 25 bp, Saccharomyces pastorianus
gacgatctcaacttttgtgaatcaa

SEQ ID NO: 10896 - DNA, 25 bp, Saccharomyces pastorianus
agaaaaaggttctccctctgctagg

SEQ ID NO: 10897 - DNA, 25 bp, Saccharomyces pastorianus
gaggaagccttaccatatgtcacac

SEQ ID NO: 10898 - DNA, 25 bp, Saccharomyces pastorianus
atcaaatgcttcttgggcactccat

SEQ ID NO: 10899 - DNA, 25 bp, Saccharomyces pastorianus
attatccctgttatatgcactgtac

SEQ ID NO: 10900 - DNA, 25 bp, Saccharomyces pastorianus
gcgatatattgcacgagcacccgta

SEQ ID NO: 10901 - DNA, 25 bp, Saccharomyces pastorianus
gaacccttcgattaaaatacgtgct

SEQ ID NO: 10902 - DNA, 25 bp, Saccharomyces pastorianus
ataatatcccttgttgttgcctgta

SEQ ID NO: 10903 - DNA, 25 bp, Saccharomyces pastorianus
gaagacgccaacacatctgaaaagg

SEQ ID NO: 10904 - DNA, 25 bp, Saccharomyces pastorianus
gatgatgcacaaaccgaagacgcca

SEQ ID NO: 10905 - DNA, 25 bp, Saccharomyces pastorianus
ttgcgagagtgagcagtgtgcccaa

SEQ ID NO: 10906 - DNA, 25 bp, Saccharomyces pastorianus
attgacaccggaacctctggataat

SEQ ID NO: 10907 - DNA, 25 bp, Saccharomyces pastorianus
aactgtccccattgaatatgacgtg

SEQ ID NO: 10908 - DNA, 25 bp, Saccharomyces pastorianus
aagttccctggatcacagtgcgata

SEQ ID NO: 10909 - DNA, 25 bp, Saccharomyces pastorianus
aatgatccccaaatgcttaagtttt

SEQ ID NO: 10910 - DNA, 25 bp, Saccharomyces pastorianus
tgaagactaccagtttttggtccgg

SEQ ID NO: 10911 - DNA, 25 bp, Saccharomyces pastorianus
gaaaggaattgctgttggcggaaat

SEQ ID NO: 10912 - DNA, 25 bp, Saccharomyces pastorianus
gttttggtagcatcaacgatacaac

SEQ ID NO: 10913 - DNA, 25 bp, Saccharomyces pastorianus
gaatttctggaacatatacttctca

SEQ ID NO: 10914 - DNA, 25 bp, Saccharomyces pastorianus
atacacaacgtggagaatctcgctc

SEQ ID NO: 10915 - DNA, 25 bp, Saccharomyces pastorianus
cgatacaacagatgacgcttccgct

SEQ ID NO: 10916 - DNA, 25 bp, Saccharomyces pastorianus
gacattatcaaaagacaggtcggtt

SEQ ID NO: 10917 - DNA, 25 bp, Saccharomyces pastorianus
gacgcttccgctgacaattttgagg

SEQ ID NO: 10918 - DNA, 25 bp, Saccharomyces pastorianus
tttggtccggttttggtagcatcaa

SEQ ID NO: 10919 - DNA, 25 bp, Saccharomyces pastorianus
gagaatctcgctcagtcatattgga

SEQ ID NO: 10920 - DNA, 25 bp, Saccharomyces pastorianus
atggatttagagaaggaaccgtttg

SEQ ID NO: 10921 - DNA, 25 bp, Saccharomyces pastorianus
gacgataccaagtacagacccgcta

SEQ ID NO: 10922 - DNA, 25 bp, Saccharomyces pastorianus
gggctaacgattttgatggcgtctt

SEQ ID NO: 10923 - DNA, 25 bp, Saccharomyces pastorianus
gcagacagccatccacaaaacagtt

SEQ ID NO: 10924 - DNA, 25 bp, Saccharomyces pastorianus
tatccgttcttgttggacttaactc

SEQ ID NO: 10925 - DNA, 25 bp, Saccharomyces pastorianus
gggtcattatacctcctatgtgaaa

SEQ ID NO: 10926 - DNA, 25 bp, Saccharomyces pastorianus
cagtattatcgattcctatcccaag

SEQ ID NO: 10927 - DNA, 25 bp, Saccharomyces pastorianus
gggcaatacgcatcacggctaaaat

SEQ ID NO: 10928 - DNA, 25 bp, Saccharomyces pastorianus
gacgagcaatggttgtgtcctcatt

SEQ ID NO: 10929 - DNA, 25 bp, Saccharomyces pastorianus
atggcgtctttccaccaggtgtaaa

SEQ ID NO: 10930 - DNA, 25 bp, Saccharomyces pastorianus
tcgacaacgtatcaacctttcacag

SEQ ID NO: 10931 - DNA, 25 bp, Saccharomyces pastorianus
atggcgtagcgtgtcatttcggtac

SEQ ID NO: 10932 - DNA, 25 bp, Saccharomyces pastorianus
ggatctgtaagtcaccaaaggcggc

SEQ ID NO: 10933 - DNA, 25 bp, Saccharomyces pastorianus
gaatcctgatttcaaacagcctgga

SEQ ID NO: 10934 - DNA, 25 bp, Saccharomyces pastorianus
taagggtttctacccgcacttgaag

SEQ ID NO: 10935 - DNA, 25 bp, Saccharomyces pastorianus
gaagcacgatcaagacgcggcggaa

SEQ ID NO: 10936 - DNA, 25 bp, Saccharomyces pastorianus
tgtaagtcaccaaaggcggcccttt

SEQ ID NO: 10937 - DNA, 25 bp, Saccharomyces pastorianus
gcactccaagacaatggatctgtaa

SEQ ID NO: 10938 - DNA, 25 bp, Saccharomyces pastorianus
gaagaaactggataacttggaacat

SEQ ID NO: 10939 - DNA, 25 bp, Saccharomyces pastorianus
gttaagagcaactatttcacgcact

SEQ ID NO: 10940 - DNA, 25 bp, Saccharomyces pastorianus
agacgcggcggaacagaaggaacaa

SEQ ID NO: 10941 - DNA, 25 bp, Saccharomyces pastorianus
tttctacccgcacttgaagcacgat

SEQ ID NO: 10942 - DNA, 25 bp, Saccharomyces pastorianus
cttggaacatgggaagaatcctgat

SEQ ID NO: 10943 - DNA, 25 bp, Saccharomyces pastorianus
gaggaaatcatcagcttccgtctga

SEQ ID NO: 10944 - DNA, 25 bp, Saccharomyces pastorianus
aagtttcggcgagcacaaatggatc

SEQ ID NO: 10945 - DNA, 25 bp, Saccharomyces pastorianus
gttccggtttgttcatcagagacat

SEQ ID NO: 10946 - DNA, 25 bp, Saccharomyces pastorianus
attgtccagaattatgttccggttt

SEQ ID NO: 10947 - DNA, 25 bp, Saccharomyces pastorianus
atgagtaccaagatacccgatgagt

SEQ ID NO: 10948 - DNA, 25 bp, Saccharomyces pastorianus
atatcggtatccactccgtggttat

SEQ ID NO: 10949 - DNA, 25 bp, Saccharomyces pastorianus
gagccattggtaccattttacgaga

SEQ ID NO: 10950 - DNA, 25 bp, Saccharomyces pastorianus
gatgagtacatcaccattgaaagca

SEQ ID NO: 10951 - DNA, 25 bp, Saccharomyces pastorianus
tgctgagaacaccaacgttagtaag

SEQ ID NO: 10952 - DNA, 25 bp, Saccharomyces pastorianus
gtggaatccagcaacaatatcggta

SEQ ID NO: 10953 - DNA, 25 bp, Saccharomyces pastorianus
aatcgttttgatcgctcacgagcca

SEQ ID NO: 10954 - DNA, 25 bp, Saccharomyces pastorianus
taaatcaaggcatcccttcggctaa

SEQ ID NO: 10955 - DNA, 25 bp, Saccharomyces pastorianus
aacagcttgcaaaacagtctacgga

SEQ ID NO: 10956 - DNA, 25 bp, Saccharomyces pastorianus
agcaacttatatcccagttcctcaa

SEQ ID NO: 10957 - DNA, 25 bp, Saccharomyces pastorianus
agtacaactgctactgcacatcaat

SEQ ID NO: 10958 - DNA, 25 bp, Saccharomyces pastorianus
atcaatagcatactgcttgccagag

SEQ ID NO: 10959 - DNA, 25 bp, Saccharomyces pastorianus
tgcttgccagagttatccagatgaa

SEQ ID NO: 10960 - DNA, 25 bp, Saccharomyces pastorianus
taaacgggaaccctcatgccggcat

SEQ ID NO: 10961 - DNA, 25 bp, Saccharomyces pastorianus
ttgcaagcccaaacctaaataccac

SEQ ID NO: 10962 - DNA, 25 bp, Saccharomyces pastorianus
tcggctaaaccgttgattctctctc

SEQ ID NO: 10963 - DNA, 25 bp, Saccharomyces pastorianus
caaaagggtccatgccaatctacaa

SEQ ID NO: 10964 - DNA, 25 bp, Saccharomyces pastorianus
aatgcagatttaaacctccctacgg

SEQ ID NO: 10965 - DNA, 25 bp, Saccharomyces pastorianus
taaactcgcatccaaagcttacgtc

SEQ ID NO: 10966 - DNA, 25 bp, Saccharomyces pastorianus
ttaaccgatcctcaacaagttttgg

SEQ ID NO: 10967 - DNA, 25 bp, Saccharomyces pastorianus
tggccaaccacaagacatgctgaag

SEQ ID NO: 10968 - DNA, 25 bp, Saccharomyces pastorianus
gcaggtactgtcgacttggattcaa

SEQ ID NO: 10969 - DNA, 25 bp, Saccharomyces pastorianus
tcactgttgggtccgcatccaagaa

SEQ ID NO: 10970 - DNA, 25 bp, Saccharomyces pastorianus
atgggttttatccagtcactgttgg

SEQ ID NO: 10971 - DNA, 25 bp, Saccharomyces pastorianus
gattggtttggcaccaacatggcca

SEQ ID NO: 10972 - DNA, 25 bp, Saccharomyces pastorianus
tcggcgatgtttcacttttccaaag

SEQ ID NO: 10973 - DNA, 25 bp, Saccharomyces pastorianus
accctaggtttacttgtcggcgatg

SEQ ID NO: 10974 - DNA, 25 bp, Saccharomyces pastorianus
agacgaaatgcctgactttgtatta

SEQ ID NO: 10975 - DNA, 25 bp, Saccharomyces pastorianus
ggcattataggcgtacagtcccaga

SEQ ID NO: 10976 - DNA, 25 bp, Saccharomyces pastorianus
tgccaatattggctcaatcccgaca

SEQ ID NO: 10977 - DNA, 25 bp, Saccharomyces pastorianus
gataacgaggcatgcaccatcaaag

SEQ ID NO: 10978 - DNA, 25 bp, Saccharomyces pastorianus
gacaggattggtttattcagagact

SEQ ID NO: 10979 - DNA, 25 bp, Saccharomyces pastorianus
gaggacggttccaatttctatgtca

SEQ ID NO: 10980 - DNA, 25 bp, Saccharomyces pastorianus
agctgttcccaactgtttgtcaaca

SEQ ID NO: 10981 - DNA, 25 bp, Saccharomyces pastorianus
aacaggcctattccgcgatataatc

SEQ ID NO: 10982 - DNA, 25 bp, Saccharomyces pastorianus
tcgactttgatagagcaacaggcct

SEQ ID NO: 10983 - DNA, 25 bp, Saccharomyces pastorianus
gggaggcaaagattccacctgggaa

SEQ ID NO: 10984 - DNA, 25 bp, Saccharomyces pastorianus
aagtgctctagtggccaatattgct

SEQ ID NO: 10985 - DNA, 25 bp, Saccharomyces pastorianus
gcgaagatcgcaaccgtattgttaa

SEQ ID NO: 10986 - DNA, 25 bp, Saccharomyces pastorianus
acgccgtcttcccaagataacgagg

SEQ ID NO: 10987 - DNA, 25 bp, Saccharomyces pastorianus
tgttctcatctattggcgttttcca

SEQ ID NO: 10988 - DNA, 25 bp, Saccharomyces pastorianus
aaattcgctcagttggatccgcata

SEQ ID NO: 10989 - DNA, 25 bp, Saccharomyces pastorianus
gtttccaagggagcttttcattcga

SEQ ID NO: 10990 - DNA, 25 bp, Saccharomyces pastorianus
acagggccgccgatactagtagaca

SEQ ID NO: 10991 - DNA, 25 bp, Saccharomyces pastorianus
tatagggactcgtcggatgtgccgt

SEQ ID NO: 10992 - DNA, 25 bp, Saccharomyces pastorianus
gacgaccacttgcaattttcaaacg

SEQ ID NO: 10993 - DNA, 25 bp, Saccharomyces pastorianus
gatgtgccgttagagtaccgcttaa

SEQ ID NO: 10994 - DNA, 25 bp, Saccharomyces pastorianus
ggatccgcatagtttgtccaaacaa

SEQ ID NO: 10995 - DNA, 25 bp, Saccharomyces pastorianus
tggtaaggtttgctgttctcatcta

SEQ ID NO: 10996 - DNA, 25 bp, Saccharomyces pastorianus
gacatatcgcactggttttgctcat

SEQ ID NO: 10997 - DNA, 25 bp, Saccharomyces pastorianus
gagtaccgcttaatcgtcaaggata

SEQ ID NO: 10998 - DNA, 25 bp, Saccharomyces pastorianus
gaatcagactggagaaaaaactgca

SEQ ID NO: 10999 - DNA, 25 bp, Saccharomyces pastorianus
gctactctgaaccagataccaaagg

SEQ ID NO: 11000 - DNA, 25 bp, Saccharomyces pastorianus
agggttctggccagatcctgctact

SEQ ID NO: 11001 - DNA, 25 bp, Saccharomyces pastorianus
ctgcaagaggaatttggtttggacc

SEQ ID NO: 11002 - DNA, 25 bp, Saccharomyces pastorianus
tggtttggaccttgaacaggaaaag

SEQ ID NO: 11003 - DNA, 25 bp, Saccharomyces pastorianus
agatcctgctactctgaaccagata

SEQ ID NO: 11004 - DNA, 25 bp, Saccharomyces pastorianus
gaaccgtatgagatcaaagctgaac

SEQ ID NO: 11005 - DNA, 25 bp, Saccharomyces pastorianus
aagggcgcaactggaaatattcaga

SEQ ID NO: 11006 - DNA, 25 bp, Saccharomyces pastorianus
ttctttttgtctgctagcacccgtt

SEQ ID NO: 11007 - DNA, 25 bp, Saccharomyces pastorianus
gaaatattcagattttctttttgtc

SEQ ID NO: 11008 - DNA, 25 bp, Saccharomyces pastorianus
gaaccagataccaaaggaaccgtat

SEQ ID NO: 11009 - DNA, 25 bp, Saccharomyces pastorianus
tggaggagttagatgacacccacct

SEQ ID NO: 11010 - DNA, 25 bp, Saccharomyces pastorianus
acctcctggtagatccaacgaaagt

SEQ ID NO: 11011 - DNA, 25 bp, Saccharomyces pastorianus
gcatgagttaaacagacttttatct

SEQ ID NO: 11012 - DNA, 25 bp, Saccharomyces pastorianus
gcgctgatccagtgtgatccatcta

SEQ ID NO: 11013 - DNA, 25 bp, Saccharomyces pastorianus
tgatccatctattaaggcacttata

SEQ ID NO: 11014 - DNA, 25 bp, Saccharomyces pastorianus
tccagtgtgatccatctattaaggc

SEQ ID NO: 11015 - DNA, 25 bp, Saccharomyces pastorianus
tgagcgatatagtattggaggagtt

SEQ ID NO: 11016 - DNA, 25 bp, Saccharomyces pastorianus
ggcacttatactacaaatcgacgca

SEQ ID NO: 11017 - DNA, 25 bp, Saccharomyces pastorianus
aagggcgcgctgatccagtgtgatc

SEQ ID NO: 11018 - DNA, 25 bp, Saccharomyces pastorianus
aaatcgacgcaaagatgagcgatat

SEQ ID NO: 11019 - DNA, 25 bp, Saccharomyces pastorianus
agatgacacccacctcctggtagat

SEQ ID NO: 11020 - DNA, 25 bp, Saccharomyces pastorianus
gttcaacccttccagactctagtaa

SEQ ID NO: 11021 - DNA, 25 bp, Saccharomyces pastorianus
ttggaacttccgtcaggcggttcaa

SEQ ID NO: 11022 - DNA, 25 bp, Saccharomyces pastorianus
ctccccaaacgttgtgtctcaaaat

SEQ ID NO: 11023 - DNA, 25 bp, Saccharomyces pastorianus
gaccatttagagacccttttatcag

SEQ ID NO: 11024 - DNA, 25 bp, Saccharomyces pastorianus
aagatctatgacgacagtaccgata

SEQ ID NO: 11025 - DNA, 25 bp, Saccharomyces pastorianus
atacatcgaagggtggacctcctgt

SEQ ID NO: 11026 - DNA, 25 bp, Saccharomyces pastorianus
ataggatcagcagcatcctctgctt

SEQ ID NO: 11027 - DNA, 25 bp, Saccharomyces pastorianus
taaacagctttcaacgtcatccatc

SEQ ID NO: 11028 - DNA, 25 bp, Saccharomyces pastorianus
ttacaccttcccctgtgactataaa

SEQ ID NO: 11029 - DNA, 25 bp, Saccharomyces pastorianus
atccatcatccgttgcagacgtttc

SEQ ID NO: 11030 - DNA, 25 bp, Saccharomyces pastorianus
gccatctggcttaggtcatcttgaa

SEQ ID NO: 11031 - DNA, 25 bp, Saccharomyces pastorianus
gattttaaagtcgtcgcacccgttg

SEQ ID NO: 11032 - DNA, 25 bp, Saccharomyces pastorianus
gttgctactatcattccacttggca

SEQ ID NO: 11033 - DNA, 25 bp, Saccharomyces pastorianus
atgccttctcttccaggattcgaaa

SEQ ID NO: 11034 - DNA, 25 bp, Saccharomyces pastorianus
catatgggttccgttgttgcgataa

SEQ ID NO: 11035 - DNA, 25 bp, Saccharomyces pastorianus
ggtatctttgccattttgtgtcttc

SEQ ID NO: 11036 - DNA, 25 bp, Saccharomyces pastorianus
atataagcagtatgcgcctggccca

SEQ ID NO: 11037 - DNA, 25 bp, Saccharomyces pastorianus
attttacacctcaattcatcaccgt

SEQ ID NO: 11038 - DNA, 25 bp, Saccharomyces pastorianus
atcgtggcagtgtgtttgaccgctt

SEQ ID NO: 11039 - DNA, 25 bp, Saccharomyces pastorianus
cgtcgtgcttttactttcgtttgat

SEQ ID NO: 11040 - DNA, 25 bp, Saccharomyces pastorianus
gaggacgcaaattcctggttcccta

SEQ ID NO: 11041 - DNA, 25 bp, Saccharomyces pastorianus
gaacctgctaatggacagtccggcg

SEQ ID NO: 11042 - DNA, 25 bp, Saccharomyces pastorianus
ggcaccagtggagtttgtcagagaa

SEQ ID NO: 11043 - DNA, 25 bp, Saccharomyces pastorianus
aaagaaatcaagcaacaaccaagtt

SEQ ID NO: 11044 - DNA, 25 bp, Saccharomyces pastorianus
atcggttttgttgccgtcggtatca

SEQ ID NO: 11045 - DNA, 25 bp, Saccharomyces pastorianus
cattggctatgctatcaagttgatt

SEQ ID NO: 11046 - DNA, 25 bp, Saccharomyces pastorianus
ggaactcaattcctagctaagtgta

SEQ ID NO: 11047 - DNA, 25 bp, Saccharomyces pastorianus
aagcctgatttgagggaatactcca

SEQ ID NO: 11048 - DNA, 25 bp, Saccharomyces pastorianus
aagatcgtcaaagccgtcggtatcg

SEQ ID NO: 11049 - DNA, 25 bp, Saccharomyces pastorianus
ccgtcggtatcattggctatgctat

SEQ ID NO: 11050 - DNA, 25 bp, Saccharomyces pastorianus
aaaaattggtcgaggcaccagtgga

SEQ ID NO: 11051 - DNA, 25 bp, Saccharomyces pastorianus
tcaaagccgtcggtatcggttttgt

SEQ ID NO: 11052 - DNA, 25 bp, Saccharomyces pastorianus
gaatactccaagatcgtcaaagccg

SEQ ID NO: 11053 - DNA, 25 bp, Saccharomyces pastorianus
gaagatgttccgcaggcatttgaca

SEQ ID NO: 11054 - DNA, 25 bp, Saccharomyces pastorianus
caatttgccagatcccatgctaagg

SEQ ID NO: 11055 - DNA, 25 bp, Saccharomyces pastorianus
gacgactctgaaaactcccaattat

SEQ ID NO: 11056 - DNA, 25 bp, Saccharomyces pastorianus
acaaggacgctgtaggttcattgaa

SEQ ID NO: 11057 - DNA, 25 bp, Saccharomyces pastorianus
agctgatgatgcactttgggataca

SEQ ID NO: 11058 - DNA, 25 bp, Saccharomyces pastorianus
gtggccaatcctacaaaatacgaat

SEQ ID NO: 11059 - DNA, 25 bp, Saccharomyces pastorianus
gaagacgccaatgagcccaaaacag

SEQ ID NO: 11060 - DNA, 25 bp, Saccharomyces pastorianus
gagacactgggatccgttgacgaaa

SEQ ID NO: 11061 - DNA, 25 bp, Saccharomyces pastorianus
tacaatgagctgatccgtaagtggg

SEQ ID NO: 11062 - DNA, 25 bp, Saccharomyces pastorianus
tacagcatgtattagtggccaatcc

SEQ ID NO: 11063 - DNA, 25 bp, Saccharomyces pastorianus
taagggccaatctcaagctgatgat

SEQ ID NO: 11064 - DNA, 25 bp, Saccharomyces pastorianus
actcactatggttcgatggcatcat

SEQ ID NO: 11065 - DNA, 25 bp, Saccharomyces pastorianus
atctgcgcttgtctgctattgttat

SEQ ID NO: 11066 - DNA, 25 bp, Saccharomyces pastorianus
tattcagtaggttcactttggcacc

SEQ ID NO: 11067 - DNA, 25 bp, Saccharomyces pastorianus
ttgccagttccgtttgatagttcca

SEQ ID NO: 11068 - DNA, 25 bp, Saccharomyces pastorianus
gattacattcctatacttgtccgca

SEQ ID NO: 11069 - DNA, 25 bp, Saccharomyces pastorianus
ttcgtcatgacaagagggcaccgtt

SEQ ID NO: 11070 - DNA, 25 bp, Saccharomyces pastorianus
cactacttacttcttgcattatggc

SEQ ID NO: 11071 - DNA, 25 bp, Saccharomyces pastorianus
gatagttccaaaaggcctcagcacc

SEQ ID NO: 11072 - DNA, 25 bp, Saccharomyces pastorianus
ctttggcacctatctggcattatat

SEQ ID NO: 11073 - DNA, 25 bp, Saccharomyces pastorianus
gctcgccaaccgactatggatttat

SEQ ID NO: 11074 - DNA, 25 bp, Saccharomyces pastorianus
attggtttcccttcttttgatctgc

SEQ ID NO: 11075 - DNA, 25 bp, Saccharomyces pastorianus
gtgtaggttcaagtggctcgctaaa

SEQ ID NO: 11076 - DNA, 25 bp, Saccharomyces pastorianus
ttgtgacgatgtctcaagcctcgca

SEQ ID NO: 11077 - DNA, 25 bp, Saccharomyces pastorianus
gttgtcggcattaactttgctttct

SEQ ID NO: 11078 - DNA, 25 bp, Saccharomyces pastorianus
gtcacacttctgatggcgatgcatt

SEQ ID NO: 11079 - DNA, 25 bp, Saccharomyces pastorianus
gtactacatggcctgatttaatttt

SEQ ID NO: 11080 - DNA, 25 bp, Saccharomyces pastorianus
ggattacttccaccctattatgaat

SEQ ID NO: 11081 - DNA, 25 bp, Saccharomyces pastorianus
tgtggttgagacctctttacgagaa

SEQ ID NO: 11082 - DNA, 25 bp, Saccharomyces pastorianus
aaggactcaaactcttcatgccgtt

SEQ ID NO: 11083 - DNA, 25 bp, Saccharomyces pastorianus
aatttttggtattcttgcatccgtt

SEQ ID NO: 11084 - DNA, 25 bp, Saccharomyces pastorianus
gattcgttaggagcctggttatcta

SEQ ID NO: 11085 - DNA, 25 bp, Saccharomyces pastorianus
tgcatccgttttgttagccgttgga

SEQ ID NO: 11086 - DNA, 25 bp, Saccharomyces pastorianus
attgcaaagagtcgccattgtctta

SEQ ID NO: 11087 - DNA, 25 bp, Saccharomyces pastorianus
gagatccaaactctttcaggccaag

SEQ ID NO: 11088 - DNA, 25 bp, Saccharomyces pastorianus
gaggccagtttctaaatccacaatt

SEQ ID NO: 11089 - DNA, 25 bp, Saccharomyces pastorianus
gaaccatccgcttacttagattctg

SEQ ID NO: 11090 - DNA, 25 bp, Saccharomyces pastorianus
ggtgttccttctaaaaacgctcatg

SEQ ID NO: 11091 - DNA, 25 bp, Saccharomyces pastorianus
atgcaagagctccagaatctttgtt

SEQ ID NO: 11092 - DNA, 25 bp, Saccharomyces pastorianus
gatcaaggtcaacacattccaagat

SEQ ID NO: 11093 - DNA, 25 bp, Saccharomyces pastorianus
gggtattccagctgacatttacttg

SEQ ID NO: 11094 - DNA, 25 bp, Saccharomyces pastorianus
gaaaaccgcgtttgtcgtcgagcac

SEQ ID NO: 11095 - DNA, 25 bp, Saccharomyces pastorianus
cattgtcttagctttgggtattcca

SEQ ID NO: 11096 - DNA, 25 bp, Saccharomyces pastorianus
tgcaccaaaattcccaggtaccgtt

SEQ ID NO: 11097 - DNA, 25 bp, Saccharomyces pastorianus
gtcagaccatggcaagatctacatt

SEQ ID NO: 11098 - DNA, 25 bp, Saccharomyces pastorianus
tatcaaccgcattcttctaaattcg

SEQ ID NO: 11099 - DNA, 25 bp, Saccharomyces pastorianus
agagccccatatcttcgtttgtcaa

SEQ ID NO: 11100 - DNA, 25 bp, Saccharomyces pastorianus
gttcattctggtgaaaagccccatt

SEQ ID NO: 11101 - DNA, 25 bp, Saccharomyces pastorianus
ttctggtcatcatctaacaaggcat

SEQ ID NO: 11102 - DNA, 25 bp, Saccharomyces pastorianus
gtactcttccacaattaacgactat

SEQ ID NO: 11103 - DNA, 25 bp, Saccharomyces pastorianus
ataggtctcctttgggcgtaagcaa

SEQ ID NO: 11104 - DNA, 25 bp, Saccharomyces pastorianus
gggcgtaagcaacccactaatgtac

SEQ ID NO: 11105 - DNA, 25 bp, Saccharomyces pastorianus
gtttgtcaacgattataggtctcct

SEQ ID NO: 11106 - DNA, 25 bp, Saccharomyces pastorianus
gaaacgtacaatacttcttcgatga

SEQ ID NO: 11107 - DNA, 25 bp, Saccharomyces pastorianus
gtaacaggcaattttcttctggtca

SEQ ID NO: 11108 - DNA, 25 bp, Saccharomyces pastorianus
atctggtggcttacagagcgatttc

SEQ ID NO: 11109 - DNA, 25 bp, Saccharomyces pastorianus
aagagtattatcgacaatgcgcaga

SEQ ID NO: 11110 - DNA, 25 bp, Saccharomyces pastorianus
aagaacgtgatttggcagtcaacaa

SEQ ID NO: 11111 - DNA, 25 bp, Saccharomyces pastorianus
aagcgatgggtttgccattgcagaa

SEQ ID NO: 11112 - DNA, 25 bp, Saccharomyces pastorianus
gtttaggatttttcgccacacatta

SEQ ID NO: 11113 - DNA, 25 bp, Saccharomyces pastorianus
agaagttctctctttatctggtggc

SEQ ID NO: 11114 - DNA, 25 bp, Saccharomyces pastorianus
cacattacggtacactggcactaag

SEQ ID NO: 11115 - DNA, 25 bp, Saccharomyces pastorianus
aggaacgtgacttttctgtacaaga

SEQ ID NO: 11116 - DNA, 25 bp, Saccharomyces pastorianus
cattcggtatgcatgtggcgtcaat

SEQ ID NO: 11117 - DNA, 25 bp, Saccharomyces pastorianus
gaaagtgtgctacaccacgtggcga

SEQ ID NO: 11118 - DNA, 25 bp, Saccharomyces pastorianus
gagcgatttcgttcggattgtgtac

SEQ ID NO: 11119 - DNA, 25 bp, Saccharomyces pastorianus
tacaaaactgcctctgaaattgcca

SEQ ID NO: 11120 - DNA, 25 bp, Saccharomyces pastorianus
tctccgatgatattttgtccgtatt

SEQ ID NO: 11121 - DNA, 25 bp, Saccharomyces pastorianus
tcgtcgtgcttcttggaggatagtt

SEQ ID NO: 11122 - DNA, 25 bp, Saccharomyces pastorianus
cgaattacctccaactcatccaatt

SEQ ID NO: 11123 - DNA, 25 bp, Saccharomyces pastorianus
cgtattagattctcatttgatccct

SEQ ID NO: 11124 - DNA, 25 bp, Saccharomyces pastorianus
atttggctgaattctccagcggtga

SEQ ID NO: 11125 - DNA, 25 bp, Saccharomyces pastorianus
gatcccttctgccactactggtgaa

SEQ ID NO: 11126 - DNA, 25 bp, Saccharomyces pastorianus
gacattatggacctcagacatttct

SEQ ID NO: 11127 - DNA, 25 bp, Saccharomyces pastorianus
gaattgattcgttcttaccgttcaa

SEQ ID NO: 11128 - DNA, 25 bp, Saccharomyces pastorianus
ttagctttgaacttctccgttttct

SEQ ID NO: 11129 - DNA, 25 bp, Saccharomyces pastorianus
accgaattgactaaaatctccgatg

SEQ ID NO: 11130 - DNA, 25 bp, Saccharomyces pastorianus
gtaccttttcaccaatttaagcatt

SEQ ID NO: 11131 - DNA, 25 bp, Saccharomyces pastorianus
tggctgtttagataccatcgccgca

SEQ ID NO: 11132 - DNA, 25 bp, Saccharomyces pastorianus
gagcacctggttcatctttatcaat

SEQ ID NO: 11133 - DNA, 25 bp, Saccharomyces pastorianus
gggtttccttcatagtcttccattt

SEQ ID NO: 11134 - DNA, 25 bp, Saccharomyces pastorianus
taagcatttttctcctagccgtgta

SEQ ID NO: 11135 - DNA, 25 bp, Saccharomyces pastorianus
atcgccgcactttcgcaattgaagt

SEQ ID NO: 11136 - DNA, 25 bp, Saccharomyces pastorianus
agtcttccatttctcacaatttgtg

SEQ ID NO: 11137 - DNA, 25 bp, Saccharomyces pastorianus
agccgtgtatggactagcacttaca

SEQ ID NO: 11138 - DNA, 25 bp, Saccharomyces pastorianus
gtgccaccaaacctttacagatacg

SEQ ID NO: 11139 - DNA, 25 bp, Saccharomyces pastorianus
cagcttcggcggtattttcaacaag

SEQ ID NO: 11140 - DNA, 25 bp, Saccharomyces pastorianus
acagatacgcgtctttttattttag

SEQ ID NO: 11141 - DNA, 25 bp, Saccharomyces pastorianus
gaggttattggtcctgcagcacaat

SEQ ID NO: 11142 - DNA, 25 bp, Saccharomyces pastorianus
tagtttcagtctaagctttgacgaa

SEQ ID NO: 11143 - DNA, 25 bp, Saccharomyces pastorianus
atcgactctccatttggtgacgaaa

SEQ ID NO: 11144 - DNA, 25 bp, Saccharomyces pastorianus
agcacaatcaccattagtctccaat

SEQ ID NO: 11145 - DNA, 25 bp, Saccharomyces pastorianus
acttgttgaggttggttcttggaat

SEQ ID NO: 11146 - DNA, 25 bp, Saccharomyces pastorianus
gactttcactttattctaacggaga

SEQ ID NO: 11147 - DNA, 25 bp, Saccharomyces pastorianus
tatcggatgttgagtctacgactac

SEQ ID NO: 11148 - DNA, 25 bp, Saccharomyces pastorianus
ggcgcggttcgttttcgagtctaat

SEQ ID NO: 11149 - DNA, 25 bp, Saccharomyces pastorianus
gacgcatctcacttgttgcttaatg

SEQ ID NO: 11150 - DNA, 25 bp, Saccharomyces pastorianus
gactactattcatatcgactctcca

SEQ ID NO: 11151 - DNA, 25 bp, Saccharomyces pastorianus
gaaagcgagactgacgcatctcact

SEQ ID NO: 11152 - DNA, 25 bp, Saccharomyces pastorianus
ttatattctttttggccacgcagtg

SEQ ID NO: 11153 - DNA, 25 bp, Saccharomyces pastorianus
tagtgctttccaaggtaccaatacc

SEQ ID NO: 11154 - DNA, 25 bp, Saccharomyces pastorianus
gtttagtattattctgggctcgtta

SEQ ID NO: 11155 - DNA, 25 bp, Saccharomyces pastorianus
gttgggaacaccttctttgactgat

SEQ ID NO: 11156 - DNA, 25 bp, Saccharomyces pastorianus
gagagtgccctatatgacacaactt

SEQ ID NO: 11157 - DNA, 25 bp, Saccharomyces pastorianus
tagttagatccagcggaacccgtaa

SEQ ID NO: 11158 - DNA, 25 bp, Saccharomyces pastorianus
ataccaatggcgcaatatatctcgg

SEQ ID NO: 11159 - DNA, 25 bp, Saccharomyces pastorianus
ttatgcgctttacggctggacagta

SEQ ID NO: 11160 - DNA, 25 bp, Saccharomyces pastorianus
ctgggctcgttatttacttttgttg

SEQ ID NO: 11161 - DNA, 25 bp, Saccharomyces pastorianus
acttttgttgcgatcgcctatacaa

SEQ ID NO: 11162 - DNA, 25 bp, Saccharomyces pastorianus
taggagattttataccggtcggaag

SEQ ID NO: 11163 - DNA, 25 bp, Saccharomyces pastorianus
gggcgatcggctttttcagtagcat

SEQ ID NO: 11164 - DNA, 25 bp, Saccharomyces pastorianus
atatctgtgctatgttgcgttgtca

SEQ ID NO: 11165 - DNA, 25 bp, Saccharomyces pastorianus
tttgctggttcatatattgcctaca

SEQ ID NO: 11166 - DNA, 25 bp, Saccharomyces pastorianus
ttcggtgtctattccattgtcgttt

SEQ ID NO: 11167 - DNA, 25 bp, Saccharomyces pastorianus
caggcaacccttattgcaggcattt

SEQ ID NO: 11168 - DNA, 25 bp, Saccharomyces pastorianus
atcttcctatggttttcggtgtcta

SEQ ID NO: 11169 - DNA, 25 bp, Saccharomyces pastorianus
aactcggtggattcgtcacaatcat

SEQ ID NO: 11170 - DNA, 25 bp, Saccharomyces pastorianus
ttatctgcgcagtcctcgggtgtga

SEQ ID NO: 11171 - DNA, 25 bp, Saccharomyces pastorianus
gacaaagtccatttcagccttggta

SEQ ID NO: 11172 - DNA, 25 bp, Saccharomyces pastorianus
aacgctgtttttcataatcttccta

SEQ ID NO: 11173 - DNA, 25 bp, Saccharomyces pastorianus
gcaggcattttctcttttggttcaa

SEQ ID NO: 11174 - DNA, 25 bp, Saccharomyces pastorianus
tgatctaatggtcaagcctcctcaa

SEQ ID NO: 11175 - DNA, 25 bp, Saccharomyces pastorianus
ataacgttcaactggcttctttaca

SEQ ID NO: 11176 - DNA, 25 bp, Saccharomyces pastorianus
attgcacagcactattggaatctac

SEQ ID NO: 11177 - DNA, 25 bp, Saccharomyces pastorianus
ttaccacgtgcggacaacctttttg

SEQ ID NO: 11178 - DNA, 25 bp, Saccharomyces pastorianus
gtaaacgtctcaacatcgagccaga

SEQ ID NO: 11179 - DNA, 25 bp, Saccharomyces pastorianus
ttttgccaccaggaacccaatggat

SEQ ID NO: 11180 - DNA, 25 bp, Saccharomyces pastorianus
tacaggtatttgtaccgtccctggt

SEQ ID NO: 11181 - DNA, 25 bp, Saccharomyces pastorianus
ggcttctttacattccatttccaaa

SEQ ID NO: 11182 - DNA, 25 bp, Saccharomyces pastorianus
ttttcccaaagcttgttttgcctga

SEQ ID NO: 11183 - DNA, 25 bp, Saccharomyces pastorianus
ttgttctgtagttactgggcaagct

SEQ ID NO: 11184 - DNA, 25 bp, Saccharomyces pastorianus
atcgagccagatgtgctttattgca

SEQ ID NO: 11185 - DNA, 25 bp, Saccharomyces pastorianus
agaggtaacacgtatcagcccagta

SEQ ID NO: 11186 - DNA, 25 bp, Saccharomyces pastorianus
atgtcactatttgggaggctgtacc

SEQ ID NO: 11187 - DNA, 25 bp, Saccharomyces pastorianus
aggctgtaccagtttcagtcaagga

SEQ ID NO: 11188 - DNA, 25 bp, Saccharomyces pastorianus
atctctgctctgtctgtattacgtc

SEQ ID NO: 11189 - DNA, 25 bp, Saccharomyces pastorianus
gagaatgttttcctccatatcgctc

SEQ ID NO: 11190 - DNA, 25 bp, Saccharomyces pastorianus
ttgaaaaccatgtcctctacaccgt

SEQ ID NO: 11191 - DNA, 25 bp, Saccharomyces pastorianus
gtgcttttaaacagctcaccattga

SEQ ID NO: 11192 - DNA, 25 bp, Saccharomyces pastorianus
gtatcagcccagtacgttgaagagg

SEQ ID NO: 11193 - DNA, 25 bp, Saccharomyces pastorianus
gtattacgtccgcaaaccaacgtgc

SEQ ID NO: 11194 - DNA, 25 bp, Saccharomyces pastorianus
atgtcctctacaccgtttgggtttg

SEQ ID NO: 11195 - DNA, 25 bp, Saccharomyces pastorianus
aactttcggattcttggccagggca

SEQ ID NO: 11196 - DNA, 25 bp, Saccharomyces pastorianus
agtggctaggatactgggtcctcgc

SEQ ID NO: 11197 - DNA, 25 bp, Saccharomyces pastorianus
gtaagaccacgctatcgagcacaca

SEQ ID NO: 11198 - DNA, 25 bp, Saccharomyces pastorianus
gtacggcgcccatatctgggaatgt

SEQ ID NO: 11199 - DNA, 25 bp, Saccharomyces pastorianus
gttgctatggcgctaagatacttgc

SEQ ID NO: 11200 - DNA, 25 bp, Saccharomyces pastorianus
gtaggcagacctcaatctcaacaaa

SEQ ID NO: 11201 - DNA, 25 bp, Saccharomyces pastorianus
gggctctatgcccttcagacaaagg

SEQ ID NO: 11202 - DNA, 25 bp, Saccharomyces pastorianus
aaggcatttgccacaccagatatcg

SEQ ID NO: 11203 - DNA, 25 bp, Saccharomyces pastorianus
gagcagcatttaaagccgcggttga

SEQ ID NO: 11204 - DNA, 25 bp, Saccharomyces pastorianus
gtcacatttcccaagccattgagat

SEQ ID NO: 11205 - DNA, 25 bp, Saccharomyces pastorianus
gatcgagagctcttgcagaacatta

SEQ ID NO: 11206 - DNA, 25 bp, Saccharomyces pastorianus
gaaagttgccgtctttactaatgac

SEQ ID NO: 11207 - DNA, 25 bp, Saccharomyces pastorianus
tttcagacatactacacctctcaag

SEQ ID NO: 11208 - DNA, 25 bp, Saccharomyces pastorianus
tgaagtgcaagttcaaggcccacat

SEQ ID NO: 11209 - DNA, 25 bp, Saccharomyces pastorianus
gacccagaattgcttgctgctgact

SEQ ID NO: 11210 - DNA, 25 bp, Saccharomyces pastorianus
agagtactcccgatgtagcacgtat

SEQ ID NO: 11211 - DNA, 25 bp, Saccharomyces pastorianus
aatgaagggttctctgccacgcatc

SEQ ID NO: 11212 - DNA, 25 bp, Saccharomyces pastorianus
aaatctcggatcctttactggccaa

SEQ ID NO: 11213 - DNA, 25 bp, Saccharomyces pastorianus
cacgtatcatacctagagcccaaat

SEQ ID NO: 11214 - DNA, 25 bp, Saccharomyces pastorianus
agaaagatctgtagtgggtccacca

SEQ ID NO: 11215 - DNA, 25 bp, Saccharomyces pastorianus
gcccacatggccagttaattattga

SEQ ID NO: 11216 - DNA, 25 bp, Saccharomyces pastorianus
gcgatgatacgcttttgtctagaac

SEQ ID NO: 11217 - DNA, 25 bp, Saccharomyces pastorianus
gaaacgcttcaaatcgacccagaat

SEQ ID NO: 11218 - DNA, 25 bp, Saccharomyces pastorianus
tttgcgctattttcacataccttca

SEQ ID NO: 11219 - DNA, 25 bp, Saccharomyces pastorianus
tgagctatgctttcctgaggctata

SEQ ID NO: 11220 - DNA, 25 bp, Saccharomyces pastorianus
ggatgctttacgattatttgcgcta

SEQ ID NO: 11221 - DNA, 25 bp, Saccharomyces pastorianus
atcccaatcctggtttctcaaattt

SEQ ID NO: 11222 - DNA, 25 bp, Saccharomyces pastorianus
tatttccaattctacttcttcctat

SEQ ID NO: 11223 - DNA, 25 bp, Saccharomyces pastorianus
actttatatctctcagcagcactgc

SEQ ID NO: 11224 - DNA, 25 bp, Saccharomyces pastorianus
gctgtgcttcctagagcagttctga

SEQ ID NO: 11225 - DNA, 25 bp, Saccharomyces pastorianus
ggctaggtccaaacattgcagtatt

SEQ ID NO: 11226 - DNA, 25 bp, Saccharomyces pastorianus
taatcggtgcgttctgggagctgac

SEQ ID NO: 11227 - DNA, 25 bp, Saccharomyces pastorianus
taaagtgttccacgtgccgtactat

SEQ ID NO: 11228 - DNA, 25 bp, Saccharomyces pastorianus
gacgcatccgaaattaccaacttat

SEQ ID NO: 11229 - DNA, 25 bp, Saccharomyces pastorianus
aagtggctgagtttgattccccatc

SEQ ID NO: 11230 - DNA, 25 bp, Saccharomyces pastorianus
caccgctgcagtggatgtcgaaaca

SEQ ID NO: 11231 - DNA, 25 bp, Saccharomyces pastorianus
acaggtgcaggtaaatcgtcgttaa

SEQ ID NO: 11232 - DNA, 25 bp, Saccharomyces pastorianus
gtccattatacctcaagattcccaa

SEQ ID NO: 11233 - DNA, 25 bp, Saccharomyces pastorianus
attgactatcgcacacaggttgaac

SEQ ID NO: 11234 - DNA, 25 bp, Saccharomyces pastorianus
gtaacgatgggttagactctcaatt

SEQ ID NO: 11235 - DNA, 25 bp, Saccharomyces pastorianus
atcgtcgttaacattagcgctattc

SEQ ID NO: 11236 - DNA, 25 bp, Saccharomyces pastorianus
agacaattcgcacggcctttagaga

SEQ ID NO: 11237 - DNA, 25 bp, Saccharomyces pastorianus
acaattactgtgtcttgcgagagca

SEQ ID NO: 11238 - DNA, 25 bp, Saccharomyces pastorianus
gtgctagatgaagccaccgctgcag

SEQ ID NO: 11239 - DNA, 25 bp, Saccharomyces pastorianus
gagagcaatgctggttccatccaaa

SEQ ID NO: 11240 - DNA, 25 bp, Saccharomyces pastorianus
gaagaattttcttgctacgtccctg

SEQ ID NO: 11241 - DNA, 25 bp, Saccharomyces pastorianus
gcacccttcttcaaaaccacagatg

SEQ ID NO: 11242 - DNA, 25 bp, Saccharomyces pastorianus
taggcctaaaatttgcaacagttgc

SEQ ID NO: 11243 - DNA, 25 bp, Saccharomyces pastorianus
aaagtatccttgtcagcacccttct

SEQ ID NO: 11244 - DNA, 25 bp, Saccharomyces pastorianus
gtaataacatctccaaccttggaca

SEQ ID NO: 11245 - DNA, 25 bp, Saccharomyces pastorianus
gtaacttcgctgactatatccttgg

SEQ ID NO: 11246 - DNA, 25 bp, Saccharomyces pastorianus
agatcgcccacaagtcagattactg

SEQ ID NO: 11247 - DNA, 25 bp, Saccharomyces pastorianus
gggcagttcaaaacagatgtctttc

SEQ ID NO: 11248 - DNA, 25 bp, Saccharomyces pastorianus
aagggcgttctgtttcattcaaaag

SEQ ID NO: 11249 - DNA, 25 bp, Saccharomyces pastorianus
ggcatggaatgatgtttctctcgta

SEQ ID NO: 11250 - DNA, 25 bp, Saccharomyces pastorianus
aacaactctaacattttgcctcagt

SEQ ID NO: 11251 - DNA, 25 bp, Saccharomyces pastorianus
acagttttcccctcatgatcaaaat

SEQ ID NO: 11252 - DNA, 25 bp, Saccharomyces pastorianus
gaccttatgtaattgccacgggcgg

SEQ ID NO: 11253 - DNA, 25 bp, Saccharomyces pastorianus
aaattcccaacgcacatgggctagc

SEQ ID NO: 11254 - DNA, 25 bp, Saccharomyces pastorianus
gcactgacgtgcgatttcaataaat

SEQ ID NO: 11255 - DNA, 25 bp, Saccharomyces pastorianus
ttcgggaaattcatacgcaagctta

SEQ ID NO: 11256 - DNA, 25 bp, Saccharomyces pastorianus
agactaccgcctagcaaaagccaga

SEQ ID NO: 11257 - DNA, 25 bp, Saccharomyces pastorianus
acgcaagcttattcgacatcagact

SEQ ID NO: 11258 - DNA, 25 bp, Saccharomyces pastorianus
cagataccggaaaaggctgcctctt

SEQ ID NO: 11259 - DNA, 25 bp, Saccharomyces pastorianus
aagccagaccaactttttagtacat

SEQ ID NO: 11260 - DNA, 25 bp, Saccharomyces pastorianus
aaggctgcctctttaatttcacgca

SEQ ID NO: 11261 - DNA, 25 bp, Saccharomyces pastorianus
gtgtataccaggcacagttttcccc

SEQ ID NO: 11262 - DNA, 25 bp, Saccharomyces pastorianus
atccacttcaaactcttctacaaaa

SEQ ID NO: 11263 - DNA, 25 bp, Saccharomyces pastorianus
gtatccatagctctggttcaggcac

SEQ ID NO: 11264 - DNA, 25 bp, Saccharomyces pastorianus
tatttgcattttgggctttgctcct

SEQ ID NO: 11265 - DNA, 25 bp, Saccharomyces pastorianus
agaagactctgttccaagtgccgtc

SEQ ID NO: 11266 - DNA, 25 bp, Saccharomyces pastorianus
gatggattgtatcaccgacactgat

SEQ ID NO: 11267 - DNA, 25 bp, Saccharomyces pastorianus
cgtcaaagcacccagttactcaaat

SEQ ID NO: 11268 - DNA, 25 bp, Saccharomyces pastorianus
gatacagcctaaatactcccttctt

SEQ ID NO: 11269 - DNA, 25 bp, Saccharomyces pastorianus
atttccatggcccaagttgacttga

SEQ ID NO: 11270 - DNA, 25 bp, Saccharomyces pastorianus
ttcaaagtctggagtcggttcggct

SEQ ID NO: 11271 - DNA, 25 bp, Saccharomyces pastorianus
ttcaggcacctattctacagcaagt

SEQ ID NO: 11272 - DNA, 25 bp, Saccharomyces pastorianus
taacatctggctcgagtatccatag

SEQ ID NO: 11273 - DNA, 25 bp, Saccharomyces pastorianus
aatgcaacagcgtccatgatgagta

SEQ ID NO: 11274 - DNA, 25 bp, Saccharomyces pastorianus
tggaacatcagaatccctggctact

SEQ ID NO: 11275 - DNA, 25 bp, Saccharomyces pastorianus
gaagaattactcctggacctggcgg

SEQ ID NO: 11276 - DNA, 25 bp, Saccharomyces pastorianus
gggctctgctatgaatgccactgct

SEQ ID NO: 11277 - DNA, 25 bp, Saccharomyces pastorianus
gaacctgccatacctatatctgaaa

SEQ ID NO: 11278 - DNA, 25 bp, Saccharomyces pastorianus
gatccaacaggcctacgataacggg

SEQ ID NO: 11279 - DNA, 25 bp, Saccharomyces pastorianus
gacctggcggatgattttgttacaa

SEQ ID NO: 11280 - DNA, 25 bp, Saccharomyces pastorianus
atgccactgctttgaatacacctgt

SEQ ID NO: 11281 - DNA, 25 bp, Saccharomyces pastorianus
atccctggctactcagcagacgaaa

SEQ ID NO: 11282 - DNA, 25 bp, Saccharomyces pastorianus
actgcttttgcttgtagattggcca

SEQ ID NO: 11283 - DNA, 25 bp, Saccharomyces pastorianus
gaaaacatatccaccaaggcgccag

SEQ ID NO: 11284 - DNA, 25 bp, Saccharomyces pastorianus
gagaagctgttactttcctaaagac

SEQ ID NO: 11285 - DNA, 25 bp, Saccharomyces pastorianus
cggattcatgggtctattttctaaa

SEQ ID NO: 11286 - DNA, 25 bp, Saccharomyces pastorianus
agcccgtgacggtaagttgactctc

SEQ ID NO: 11287 - DNA, 25 bp, Saccharomyces pastorianus
aattcaccacaaactgccgttttgg

SEQ ID NO: 11288 - DNA, 25 bp, Saccharomyces pastorianus
agaacactgctgcttctttgaccac

SEQ ID NO: 11289 - DNA, 25 bp, Saccharomyces pastorianus
gttgactctcgaagacatgaccggt

SEQ ID NO: 11290 - DNA, 25 bp, Saccharomyces pastorianus
atatctgttgctgtggctactccaa

SEQ ID NO: 11291 - DNA, 25 bp, Saccharomyces pastorianus
atatccctgccgttaatggtgctat

SEQ ID NO: 11292 - DNA, 25 bp, Saccharomyces pastorianus
ttgtccgtttgagccataaagcccg

SEQ ID NO: 11293 - DNA, 25 bp, Saccharomyces pastorianus
gaaagacctgtcaccgtcaatggac

SEQ ID NO: 11294 - DNA, 25 bp, Saccharomyces pastorianus
aagcctgtactctagctgctaagga

SEQ ID NO: 11295 - DNA, 25 bp, Saccharomyces pastorianus
ggtagagatcaacccaacttataca

SEQ ID NO: 11296 - DNA, 25 bp, Saccharomyces pastorianus
gtgcggaagttgatgtgccctcctc

SEQ ID NO: 11297 - DNA, 25 bp, Saccharomyces pastorianus
aagcgctgttgtttcaagcacggcg

SEQ ID NO: 11298 - DNA, 25 bp, Saccharomyces pastorianus
caatggctcaagtaacggtgcggaa

SEQ ID NO: 11299 - DNA, 25 bp, Saccharomyces pastorianus
tgcatcttcattacctttaaccaca

SEQ ID NO: 11300 - DNA, 25 bp, Saccharomyces pastorianus
aacaccaccaatttgactaagccca

SEQ ID NO: 11301 - DNA, 25 bp, Saccharomyces pastorianus
ggaactgtgcgaatcatttaccatt

SEQ ID NO: 11302 - DNA, 25 bp, Saccharomyces pastorianus
caactgaactcaccgccaaatggat

SEQ ID NO: 11303 - DNA, 25 bp, Saccharomyces pastorianus
tactgtccgtatggtaagcgctgtt

SEQ ID NO: 11304 - DNA, 25 bp, Saccharomyces pastorianus
ggattaccatatgtactcccaattc

SEQ ID NO: 11305 - DNA, 25 bp, Saccharomyces pastorianus
gcaaagttgggctactgtccgtatg

SEQ ID NO: 11306 - DNA, 25 bp, Saccharomyces pastorianus
aacggacatgttgctgggcatgcaa

SEQ ID NO: 11307 - DNA, 25 bp, Saccharomyces pastorianus
acaagccaagttccacggtacgaag

SEQ ID NO: 11308 - DNA, 25 bp, Saccharomyces pastorianus
gaagaagttccaaaacctgcccgat

SEQ ID NO: 11309 - DNA, 25 bp, Saccharomyces pastorianus
agtcgccctcaatgaaggccaggaa

SEQ ID NO: 11310 - DNA, 25 bp, Saccharomyces pastorianus
ggcacaggcgacgatttcatagagg

SEQ ID NO: 11311 - DNA, 25 bp, Saccharomyces pastorianus
gaaccatgcactatctcattagaag

SEQ ID NO: 11312 - DNA, 25 bp, Saccharomyces pastorianus
tagaagcgcaggaagtcgccctcaa

SEQ ID NO: 11313 - DNA, 25 bp, Saccharomyces pastorianus
aagaagaacgaaggcccaccatggg

SEQ ID NO: 11314 - DNA, 25 bp, Saccharomyces pastorianus
gaatggaggtccaacttccgcaaag

SEQ ID NO: 11315 - DNA, 25 bp, Saccharomyces pastorianus
gtgttttgctcttatttcgtcgata

SEQ ID NO: 11316 - DNA, 25 bp, Saccharomyces pastorianus
ccaccatgggaagctgaccgggaaa

SEQ ID NO: 11317 - DNA, 25 bp, Saccharomyces pastorianus
acctgctagactgggacggtccaaa

SEQ ID NO: 11318 - DNA, 25 bp, Saccharomyces pastorianus
acgaattcggcgatttccagagcga

SEQ ID NO: 11319 - DNA, 25 bp, Saccharomyces pastorianus
agaaacgtcactgcctattgtcgaa

SEQ ID NO: 11320 - DNA, 25 bp, Saccharomyces pastorianus
ggacaaatcgatgacctgctagact

SEQ ID NO: 11321 - DNA, 25 bp, Saccharomyces pastorianus
gataacatacctgatctgatcgact

SEQ ID NO: 11322 - DNA, 25 bp, Saccharomyces pastorianus
aaacaagtcccgatacaacagcgcc

SEQ ID NO: 11323 - DNA, 25 bp, Saccharomyces pastorianus
agcgcccagaacaaccggaggacaa

SEQ ID NO: 11324 - DNA, 25 bp, Saccharomyces pastorianus
ttccgccaactacgatagcgtggac

SEQ ID NO: 11325 - DNA, 25 bp, Saccharomyces pastorianus
tcactaacttcaacgttcccgtgga

SEQ ID NO: 11326 - DNA, 25 bp, Saccharomyces pastorianus
tgattcgaccaccacaaacagcaat

SEQ ID NO: 11327 - DNA, 25 bp, Saccharomyces pastorianus
gatcgacttcgatgattcgaccacc

SEQ ID NO: 11328 - DNA, 25 bp, Saccharomyces pastorianus
gtcattccagacttcatgctacaag

SEQ ID NO: 11329 - DNA, 25 bp, Saccharomyces pastorianus
caaagaccgccgagaacttcagagc

SEQ ID NO: 11330 - DNA, 25 bp, Saccharomyces pastorianus
aagcacgtcgtcttcggtgaggtcg

SEQ ID NO: 11331 - DNA, 25 bp, Saccharomyces pastorianus
ggtaccggtggtaagtccatctacg

SEQ ID NO: 11332 - DNA, 25 bp, Saccharomyces pastorianus
acttcagagcgctatgtaccggtga

SEQ ID NO: 11333 - DNA, 25 bp, Saccharomyces pastorianus
attttgatgtcgaagctgatggcca

SEQ ID NO: 11334 - DNA, 25 bp, Saccharomyces pastorianus
atctacggtggcaagttcccagatg

SEQ ID NO: 11335 - DNA, 25 bp, Saccharomyces pastorianus
tacaaggtggtgacttcaccgccgg

SEQ ID NO: 11336 - DNA, 25 bp, Saccharomyces pastorianus
tggccgtgtcgttttcaagttgtac

SEQ ID NO: 11337 - DNA, 25 bp, Saccharomyces pastorianus
gtgaggtcgtcgacggttacgacat

SEQ ID NO: 11338 - DNA, 25 bp, Saccharomyces pastorianus
gttgtacaacgacgtagtcccaaag

SEQ ID NO: 11339 - DNA, 25 bp, Saccharomyces pastorianus
agacccattgttggacttcaagatg

SEQ ID NO: 11340 - DNA, 25 bp, Saccharomyces pastorianus
tcaagatggttgttctgtcccacaa

SEQ ID NO: 11341 - DNA, 25 bp, Saccharomyces pastorianus
attttggccccattgtccgaagaca

SEQ ID NO: 11342 - DNA, 25 bp, Saccharomyces pastorianus
gccgacagaccacaaccaagattag

SEQ ID NO: 11343 - DNA, 25 bp, Saccharomyces pastorianus
gcaaaccatccacgttttggaccaa

SEQ ID NO: 11344 - DNA, 25 bp, Saccharomyces pastorianus
atatcatcccatacatcggtggtga

SEQ ID NO: 11345 - DNA, 25 bp, Saccharomyces pastorianus
gatgcttacaagttgggctgccatt

SEQ ID NO: 11346 - DNA, 25 bp, Saccharomyces pastorianus
gagaagttcggtcctatcgacgcct

SEQ ID NO: 11347 - DNA, 25 bp, Saccharomyces pastorianus
ggtgttccaggtatcgacatcttag

SEQ ID NO: 11348 - DNA, 25 bp, Saccharomyces pastorianus
agagtggctgtgtctgacggtcaca

SEQ ID NO: 11349 - DNA, 25 bp, Saccharomyces pastorianus
ccccttgaagcctttgatcgagaag

SEQ ID NO: 11350 - DNA, 25 bp, Saccharomyces pastorianus
cggacgctacggcaacaacagatat

SEQ ID NO: 11351 - DNA, 25 bp, Saccharomyces pastorianus
aataaacacttcagctcctgcgtcg

SEQ ID NO: 11352 - DNA, 25 bp, Saccharomyces pastorianus
gtactaccagttagcacaccaagtc

SEQ ID NO: 11353 - DNA, 25 bp, Saccharomyces pastorianus
aaagaggtcattggccggaattcac

SEQ ID NO: 11354 - DNA, 25 bp, Saccharomyces pastorianus
gaatctcatatatctgcatcgccta

SEQ ID NO: 11355 - DNA, 25 bp, Saccharomyces pastorianus
tcctgcgtcggagggctgtgataaa

SEQ ID NO: 11356 - DNA, 25 bp, Saccharomyces pastorianus
ctgtcgtcgtcacactcaagtgaat

SEQ ID NO: 11357 - DNA, 25 bp, Saccharomyces pastorianus
gactaaatacgtctggcacctcaac

SEQ ID NO: 11358 - DNA, 25 bp, Saccharomyces pastorianus
aagaaagctgccaatactcctgtcg

SEQ ID NO: 11359 - DNA, 25 bp, Saccharomyces pastorianus
aacacctttggcttctagactaaat

SEQ ID NO: 11360 - DNA, 25 bp, Saccharomyces pastorianus
atttaccagctgcaagttcggacgc

SEQ ID NO: 11361 - DNA, 25 bp, Saccharomyces pastorianus
ggtctggaccgaacacagtcaatat

SEQ ID NO: 11362 - DNA, 25 bp, Saccharomyces pastorianus
gaaaggcaccatccgtttttgaaat

SEQ ID NO: 11363 - DNA, 25 bp, Saccharomyces pastorianus
ttatacgccatgtccgtgcaacgaa

SEQ ID NO: 11364 - DNA, 25 bp, Saccharomyces pastorianus
tcatacaccgtttttggagcaccaa

SEQ ID NO: 11365 - DNA, 25 bp, Saccharomyces pastorianus
gtatctgtgatattctcttccttat

SEQ ID NO: 11366 - DNA, 25 bp, Saccharomyces pastorianus
attgcagtcgatcaaaccgtcattg

SEQ ID NO: 11367 - DNA, 25 bp, Saccharomyces pastorianus
tatcttcggtcattgcctatattgc

SEQ ID NO: 11368 - DNA, 25 bp, Saccharomyces pastorianus
tggctgttcattattcgttattttc

SEQ ID NO: 11369 - DNA, 25 bp, Saccharomyces pastorianus
ttcatcgtacccgtataaatctccg

SEQ ID NO: 11370 - DNA, 25 bp, Saccharomyces pastorianus
gggatatcctaatttcatacaccgt

SEQ ID NO: 11371 - DNA, 25 bp, Saccharomyces pastorianus
tataccgtcgttatttagttcttca

SEQ ID NO: 11372 - DNA, 25 bp, Saccharomyces pastorianus
gtgggcgcatatgaggtcgccttaa

SEQ ID NO: 11373 - DNA, 25 bp, Saccharomyces pastorianus
gttgcttcaagagatcggaggacct

SEQ ID NO: 11374 - DNA, 25 bp, Saccharomyces pastorianus
atctttggccaagatgtgcctcgaa

SEQ ID NO: 11375 - DNA, 25 bp, Saccharomyces pastorianus
gcaggcttggaagttctttgaccta

SEQ ID NO: 11376 - DNA, 25 bp, Saccharomyces pastorianus
gtcgccttaaaggttattacggcag

SEQ ID NO: 11377 - DNA, 25 bp, Saccharomyces pastorianus
tgggtggtgcaaacgcgttgcttca

SEQ ID NO: 11378 - DNA, 25 bp, Saccharomyces pastorianus
gcgtatgaagcattctcgcaggctt

SEQ ID NO: 11379 - DNA, 25 bp, Saccharomyces pastorianus
aatagcgtagcccagactattggct

SEQ ID NO: 11380 - DNA, 25 bp, Saccharomyces pastorianus
atcggaggacctgtggattcaaaag

SEQ ID NO: 11381 - DNA, 25 bp, Saccharomyces pastorianus
ctattggcttgcagtcagagtttat

SEQ ID NO: 11382 - DNA, 25 bp, Saccharomyces pastorianus
gtctatgattctcgtttagcattga

SEQ ID NO: 11383 - DNA, 25 bp, Saccharomyces pastorianus
gggccgctacgataggttatatatc

SEQ ID NO: 11384 - DNA, 25 bp, Saccharomyces pastorianus
agcgctacccgacgactacatagtt

SEQ ID NO: 11385 - DNA, 25 bp, Saccharomyces pastorianus
ggtgatctggtattcatcagctata

SEQ ID NO: 11386 - DNA, 25 bp, Saccharomyces pastorianus
aaaagaggacactgctcgacctttc

SEQ ID NO: 11387 - DNA, 25 bp, Saccharomyces pastorianus
taccggaggagttcgttacctatat

SEQ ID NO: 11388 - DNA, 25 bp, Saccharomyces pastorianus
aggcaaagtatagcgctacccgacg

SEQ ID NO: 11389 - DNA, 25 bp, Saccharomyces pastorianus
gaggattcaaatccgctccattatg

SEQ ID NO: 11390 - DNA, 25 bp, Saccharomyces pastorianus
tcgacctttctatctaacgcatttg

SEQ ID NO: 11391 - DNA, 25 bp, Saccharomyces pastorianus
agagcgattcagcagtggtacaaaa

SEQ ID NO: 11392 - DNA, 25 bp, Saccharomyces pastorianus
cgttacctatatacagccggaagat

SEQ ID NO: 11393 - DNA, 25 bp, Saccharomyces pastorianus
gatgaaatggcttctgattcttcag

SEQ ID NO: 11394 - DNA, 25 bp, Saccharomyces pastorianus
atcttggaggcaaagcacggcgttt

SEQ ID NO: 11395 - DNA, 25 bp, Saccharomyces pastorianus
ttactaccaggacacacgaaattga

SEQ ID NO: 11396 - DNA, 25 bp, Saccharomyces pastorianus
gacgatggtgcaaaaaatccactat

SEQ ID NO: 11397 - DNA, 25 bp, Saccharomyces pastorianus
gccgcatatactccaacaagcattg

SEQ ID NO: 11398 - DNA, 25 bp, Saccharomyces pastorianus
ggacaagaaaatacggcttcagcaa

SEQ ID NO: 11399 - DNA, 25 bp, Saccharomyces pastorianus
gaagtggtgcaaaagctgccgcata

SEQ ID NO: 11400 - DNA, 25 bp, Saccharomyces pastorianus
ttgaacacgcaagattactaccagg

SEQ ID NO: 11401 - DNA, 25 bp, Saccharomyces pastorianus
gaagaacagccgtccaaacgatctt

SEQ ID NO: 11402 - DNA, 25 bp, Saccharomyces pastorianus
acggcgtttggacgtcataaaatca

SEQ ID NO: 11403 - DNA, 25 bp, Saccharomyces pastorianus
ggcagtgtagacgagaggcaaatta

SEQ ID NO: 11404 - DNA, 25 bp, Saccharomyces pastorianus
tccactatctggatacgttaatgat

SEQ ID NO: 11405 - DNA, 25 bp, Saccharomyces pastorianus
aacccgtctcccatattcatttgag

SEQ ID NO: 11406 - DNA, 25 bp, Saccharomyces pastorianus
gagtgagcaatatttcccctattta

SEQ ID NO: 11407 - DNA, 25 bp, Saccharomyces pastorianus
gatggacccaaaccaggcagttcta

SEQ ID NO: 11408 - DNA, 25 bp, Saccharomyces pastorianus
gtagcaggctctccaaaccaagagt

SEQ ID NO: 11409 - DNA, 25 bp, Saccharomyces pastorianus
ggaatccacgccataaagcagcttg

SEQ ID NO: 11410 - DNA, 25 bp, Saccharomyces pastorianus
agttaatacttctgccaattcctcc

SEQ ID NO: 11411 - DNA, 25 bp, Saccharomyces pastorianus
aaacatcttgtccaaggtcgtcgcg

SEQ ID NO: 11412 - DNA, 25 bp, Saccharomyces pastorianus
agcagcatacggtcaatcaaacttg

SEQ ID NO: 11413 - DNA, 25 bp, Saccharomyces pastorianus
gtcgtcgcgaatccgttattattga

SEQ ID NO: 11414 - DNA, 25 bp, Saccharomyces pastorianus
gcagttctagtccagctgtagcagg

SEQ ID NO: 11415 - DNA, 25 bp, Saccharomyces pastorianus
ggataaaccgattgagctcttgaat

SEQ ID NO: 11416 - DNA, 25 bp, Saccharomyces pastorianus
gattacagcgacttgattaagcctt

SEQ ID NO: 11417 - DNA, 25 bp, Saccharomyces pastorianus
agtcgcctcaagttcaaagcagttt

SEQ ID NO: 11418 - DNA, 25 bp, Saccharomyces pastorianus
aaagaatatctgttgctgagcgctg

SEQ ID NO: 11419 - DNA, 25 bp, Saccharomyces pastorianus
atatcattgagtttgccgttagtaa

SEQ ID NO: 11420 - DNA, 25 bp, Saccharomyces pastorianus
atttgtccacttttgattacagcga

SEQ ID NO: 11421 - DNA, 25 bp, Saccharomyces pastorianus
gagcgctggcggtgataatgaaata

SEQ ID NO: 11422 - DNA, 25 bp, Saccharomyces pastorianus
agcagtttcgccaaattcattcagt

SEQ ID NO: 11423 - DNA, 25 bp, Saccharomyces pastorianus
aatgtcatttcattgtccgcacaaa

SEQ ID NO: 11424 - DNA, 25 bp, Saccharomyces pastorianus
aacatttggcaccatcgagattcca

SEQ ID NO: 11425 - DNA, 25 bp, Saccharomyces pastorianus
gttcggccataagcatttcgtttct

SEQ ID NO: 11426 - DNA, 25 bp, Saccharomyces pastorianus
gtttgttgcgtttttcgtcgaagct

SEQ ID NO: 11427 - DNA, 25 bp, Saccharomyces pastorianus
gagatgatggacgatacgcctccca

SEQ ID NO: 11428 - DNA, 25 bp, Saccharomyces pastorianus
gacatagccaaggacgcgtacgaat

SEQ ID NO: 11429 - DNA, 25 bp, Saccharomyces pastorianus
aggatcaggtcctcggttgccgtat

SEQ ID NO: 11430 - DNA, 25 bp, Saccharomyces pastorianus
agacttttagcattggctacccaga

SEQ ID NO: 11431 - DNA, 25 bp, Saccharomyces pastorianus
gggccattagagacgccttttccag

SEQ ID NO: 11432 - DNA, 25 bp, Saccharomyces pastorianus
cataacgccggtgaagatacatctt

SEQ ID NO: 11433 - DNA, 25 bp, Saccharomyces pastorianus
atgatctaagtagcgctgttgcaga

SEQ ID NO: 11434 - DNA, 25 bp, Saccharomyces pastorianus
agcagccgggagtacaacagatttc

SEQ ID NO: 11435 - DNA, 25 bp, Saccharomyces pastorianus
gaatacgatgccgaatttgacgaca

SEQ ID NO: 11436 - DNA, 25 bp, Saccharomyces pastorianus
gcaagcaccgctgacaatgagaaag

SEQ ID NO: 11437 - DNA, 25 bp, Saccharomyces pastorianus
gagctagacaattactgcaagggca

SEQ ID NO: 11438 - DNA, 25 bp, Saccharomyces pastorianus
gaaaattccattcttaaatccaata

SEQ ID NO: 11439 - DNA, 25 bp, Saccharomyces pastorianus
gaatcttttctaaaatcggttcaag

SEQ ID NO: 11440 - DNA, 25 bp, Saccharomyces pastorianus
aatcattggatgactctactgagtt

SEQ ID NO: 11441 - DNA, 25 bp, Saccharomyces pastorianus
cagggacacgaagatgccactgtag

SEQ ID NO: 11442 - DNA, 25 bp, Saccharomyces pastorianus
gatttcaattccaaggatgcacaag

SEQ ID NO: 11443 - DNA, 25 bp, Saccharomyces pastorianus
ggtgtttaacgatattgaccttatt

SEQ ID NO: 11444 - DNA, 25 bp, Saccharomyces pastorianus
gtgaacttgccagatttcaattcca

SEQ ID NO: 11445 - DNA, 25 bp, Saccharomyces pastorianus
gaaatgcagcaagccataatgacca

SEQ ID NO: 11446 - DNA, 25 bp, Saccharomyces pastorianus
atttctgcacgttcagaaacgttca

SEQ ID NO: 11447 - DNA, 25 bp, Saccharomyces pastorianus
accttattaccggaggaaatgcagc

SEQ ID NO: 11448 - DNA, 25 bp, Saccharomyces pastorianus
gatgccactgtagagaagctgacca

SEQ ID NO: 11449 - DNA, 25 bp, Saccharomyces pastorianus
ccgccagttcaacttcaactactat

SEQ ID NO: 11450 - DNA, 25 bp, Saccharomyces pastorianus
gcgactagtgaaccaacttcgagaa

SEQ ID NO: 11451 - DNA, 25 bp, Saccharomyces pastorianus
tcacgacaaaccctacctcaaaagt

SEQ ID NO: 11452 - DNA, 25 bp, Saccharomyces pastorianus
attggcgctgcctctttaaggaata

SEQ ID NO: 11453 - DNA, 25 bp, Saccharomyces pastorianus
attagatcaactcttttccccaata

SEQ ID NO: 11454 - DNA, 25 bp, Saccharomyces pastorianus
aaatgacattgccacacctgaacgg

SEQ ID NO: 11455 - DNA, 25 bp, Saccharomyces pastorianus
tagagaaaccggatcgcccttacaa

SEQ ID NO: 11456 - DNA, 25 bp, Saccharomyces pastorianus
ttcccgtttgtctgtctcgaaagag

SEQ ID NO: 11457 - DNA, 25 bp, Saccharomyces pastorianus
gattgggaatcgattggcgctgcct

SEQ ID NO: 11458 - DNA, 25 bp, Saccharomyces pastorianus
tggcgtggttagtccaaaacctaca

SEQ ID NO: 11459 - DNA, 25 bp, Saccharomyces pastorianus
aagttacatcagcttctacttctcc

SEQ ID NO: 11460 - DNA, 25 bp, Saccharomyces pastorianus
cattgtcgtcaaatgcgttctgcaa

SEQ ID NO: 11461 - DNA, 25 bp, Saccharomyces pastorianus
gaaggctgatctaatagtccgttta

SEQ ID NO: 11462 - DNA, 25 bp, Saccharomyces pastorianus
taaggagtccatcagaattaccaga

SEQ ID NO: 11463 - DNA, 25 bp, Saccharomyces pastorianus
gctcgcgtggttgataagatcccta

SEQ ID NO: 11464 - DNA, 25 bp, Saccharomyces pastorianus
gacaagccgtcaagcagttcctaag

SEQ ID NO: 11465 - DNA, 25 bp, Saccharomyces pastorianus
ttgtattgtccagctatgtacgcct

SEQ ID NO: 11466 - DNA, 25 bp, Saccharomyces pastorianus
aacgcttggcgttcagtgattgttg

SEQ ID NO: 11467 - DNA, 25 bp, Saccharomyces pastorianus
gagggttacgtttccttagatgata

SEQ ID NO: 11468 - DNA, 25 bp, Saccharomyces pastorianus
gattttgcgcattgcataccttata

SEQ ID NO: 11469 - DNA, 25 bp, Saccharomyces pastorianus
tatgtacgccttggtgattcagata

SEQ ID NO: 11470 - DNA, 25 bp, Saccharomyces pastorianus
tgttctccttgacatcatgttccag

SEQ ID NO: 11471 - DNA, 25 bp, Saccharomyces pastorianus
tccagttcctgaccctttacaagtt

SEQ ID NO: 11472 - DNA, 25 bp, Saccharomyces pastorianus
gaaacaataacaatcctcctctaga

SEQ ID NO: 11473 - DNA, 25 bp, Saccharomyces pastorianus
taagaaacgctcatctttcgctcac

SEQ ID NO: 11474 - DNA, 25 bp, Saccharomyces pastorianus
tccctgtcttgcctcgtatcaaaga

SEQ ID NO: 11475 - DNA, 25 bp, Saccharomyces pastorianus
aatggacttgccattttcacccgag

SEQ ID NO: 11476 - DNA, 25 bp, Saccharomyces pastorianus
tagagaaaccggaagcgtcctcaaa

SEQ ID NO: 11477 - DNA, 25 bp, Saccharomyces pastorianus
gccaactctaaagcgttccacatag

SEQ ID NO: 11478 - DNA, 25 bp, Saccharomyces pastorianus
gtctactacagatcaaggtccccaa

SEQ ID NO: 11479 - DNA, 25 bp, Saccharomyces pastorianus
caaggtccccaaaatcgtcaacgat

SEQ ID NO: 11480 - DNA, 25 bp, Saccharomyces pastorianus
tcacccgaggtgaacatctacgata

SEQ ID NO: 11481 - DNA, 25 bp, Saccharomyces pastorianus
gaaagaaccgtcaagttccctgtct

SEQ ID NO: 11482 - DNA, 25 bp, Saccharomyces pastorianus
tgaaccacgttgaccgtcgtatcaa

SEQ ID NO: 11483 - DNA, 25 bp, Saccharomyces pastorianus
aagctccagtttgcgtcgagactta

SEQ ID NO: 11484 - DNA, 25 bp, Saccharomyces pastorianus
gaagacgacatttcaccagggtttg

SEQ ID NO: 11485 - DNA, 25 bp, Saccharomyces pastorianus
tcgtatcaacgctccattcatgtta

SEQ ID NO: 11486 - DNA, 25 bp, Saccharomyces pastorianus
aattaaagtccattatagccgccgg

SEQ ID NO: 11487 - DNA, 25 bp, Saccharomyces pastorianus
ttcatgttacccattgctgctaaaa

SEQ ID NO: 11488 - DNA, 25 bp, Saccharomyces pastorianus
gggccaatccactttattgatgcct

SEQ ID NO: 11489 - DNA, 25 bp, Saccharomyces pastorianus
gttatgcatgttcacacagccattg

SEQ ID NO: 11490 - DNA, 25 bp, Saccharomyces pastorianus
cagggtttgtgttgacatccccaaa

SEQ ID NO: 11491 - DNA, 25 bp, Saccharomyces pastorianus
gaagaagccacctgcttttgctaag

SEQ ID NO: 11492 - DNA, 25 bp, Saccharomyces pastorianus
atagccgccggattttcatgtgtta

SEQ ID NO: 11493 - DNA, 25 bp, Saccharomyces pastorianus
agaaacgacttcaggctctttgtgt

SEQ ID NO: 11494 - DNA, 25 bp, Saccharomyces pastorianus
gagcagaaactgattacgtctttat

SEQ ID NO: 11495 - DNA, 25 bp, Saccharomyces pastorianus
atccacttgtctgagttcgatgtca

SEQ ID NO: 11496 - DNA, 25 bp, Saccharomyces pastorianus
atgccattgccctgtatttcgacaa

SEQ ID NO: 11497 - DNA, 25 bp, Saccharomyces pastorianus
aatcctcacctgtcggataccagga

SEQ ID NO: 11498 - DNA, 25 bp, Saccharomyces pastorianus
tacagaagaacccttcggtactggc

SEQ ID NO: 11499 - DNA, 25 bp, Saccharomyces pastorianus
gcacatgcagaagtaaccccgggaa

SEQ ID NO: 11500 - DNA, 25 bp, Saccharomyces pastorianus
gggatttgttgcatgataccgatca

SEQ ID NO: 11501 - DNA, 25 bp, Saccharomyces pastorianus
ataccgatcagctaatgcgggatga

SEQ ID NO: 11502 - DNA, 25 bp, Saccharomyces pastorianus
ggtactggcccagttatcgcctgaa

SEQ ID NO: 11503 - DNA, 25 bp, Saccharomyces pastorianus
tatggacgctcgaggactgaccaca

SEQ ID NO: 11504 - DNA, 25 bp, Saccharomyces pastorianus
tccaccagcttctctcgaaaacggt

SEQ ID NO: 11505 - DNA, 25 bp, Saccharomyces pastorianus
taaggacaccgtgatagcacctcca

SEQ ID NO: 11506 - DNA, 25 bp, Saccharomyces pastorianus
ctttatcctccactgaaatcacaca

SEQ ID NO: 11507 - DNA, 25 bp, Saccharomyces pastorianus
gtgatagcacctccagtcaaggctg

SEQ ID NO: 11508 - DNA, 25 bp, Saccharomyces pastorianus
ttattctgcctacgtgcgtcaagaa

SEQ ID NO: 11509 - DNA, 25 bp, Saccharomyces pastorianus
aagaaaaacggcactcttccaccag

SEQ ID NO: 11510 - DNA, 25 bp, Saccharomyces pastorianus
aacgttaacttctggtgtgaaccat

SEQ ID NO: 11511 - DNA, 25 bp, Saccharomyces pastorianus
agttctgaactggtcaaccctgcgg

SEQ ID NO: 11512 - DNA, 25 bp, Saccharomyces pastorianus
attgaccgttttcttcgcttattct

SEQ ID NO: 11513 - DNA, 25 bp, Saccharomyces pastorianus
cgctccaaagaagccattgaccgtt

SEQ ID NO: 11514 - DNA, 25 bp, Saccharomyces pastorianus
ccatttgcatggtatcagttctgaa

SEQ ID NO: 11515 - DNA, 25 bp, Saccharomyces pastorianus
gtcctttaacaagactgctgcatta

SEQ ID NO: 11516 - DNA, 25 bp, Saccharomyces pastorianus
gaagtctgcgttaatttcgcttcag

SEQ ID NO: 11517 - DNA, 25 bp, Saccharomyces pastorianus
aggtgtcaagtctttggaccccaat

SEQ ID NO: 11518 - DNA, 25 bp, Saccharomyces pastorianus
gaggtccctatggagtatccgttca

SEQ ID NO: 11519 - DNA, 25 bp, Saccharomyces pastorianus
tcaggcgctattgcaatctccagaa

SEQ ID NO: 11520 - DNA, 25 bp, Saccharomyces pastorianus
ggtccacccggaacgccttatgagg

SEQ ID NO: 11521 - DNA, 25 bp, Saccharomyces pastorianus
gattatacgccagcgaaggcgccaa

SEQ ID NO: 11522 - DNA, 25 bp, Saccharomyces pastorianus
acaagctgtcaaggatgaccccgca

SEQ ID NO: 11523 - DNA, 25 bp, Saccharomyces pastorianus
acaggtgccatttgcttggatattt

SEQ ID NO: 11524 - DNA, 25 bp, Saccharomyces pastorianus
ggtagcacagcattatctacgggat

SEQ ID NO: 11525 - DNA, 25 bp, Saccharomyces pastorianus
ttcgttgtggacattgaggtcccta

SEQ ID NO: 11526 - DNA, 25 bp, Saccharomyces pastorianus
atcgaacagcactcgtcaaacggta

SEQ ID NO: 11527 - DNA, 25 bp, Saccharomyces pastorianus
aattcgatttggtatccttactcaa

SEQ ID NO: 11528 - DNA, 25 bp, Saccharomyces pastorianus
aaataagcagcttccatccaagaag

SEQ ID NO: 11529 - DNA, 25 bp, Saccharomyces pastorianus
agtctattttcgtgctttgtaccaa

SEQ ID NO: 11530 - DNA, 25 bp, Saccharomyces pastorianus
acattactctattgatacgggtggt

SEQ ID NO: 11531 - DNA, 25 bp, Saccharomyces pastorianus
ggaatgacgttcttctactagatat

SEQ ID NO: 11532 - DNA, 25 bp, Saccharomyces pastorianus
gacttaggtactcatttgttacact

SEQ ID NO: 11533 - DNA, 25 bp, Saccharomyces pastorianus
ggaaactggtgacttttctgcacag

SEQ ID NO: 11534 - DNA, 25 bp, Saccharomyces pastorianus
tggatgatgctccatcttccagcaa

SEQ ID NO: 11535 - DNA, 25 bp, Saccharomyces pastorianus
tcacatacagtacccaattcgattt

SEQ ID NO: 11536 - DNA, 25 bp, Saccharomyces pastorianus
gaactatacagtcttacctcgatga

SEQ ID NO: 11537 - DNA, 25 bp, Saccharomyces pastorianus
gttctcacagtggtaattccgcttt

SEQ ID NO: 11538 - DNA, 25 bp, Saccharomyces pastorianus
tcctcggcacattcaaaatactctg

SEQ ID NO: 11539 - DNA, 25 bp, Saccharomyces pastorianus
ggatagatcacttacgcgttctcac

SEQ ID NO: 11540 - DNA, 25 bp, Saccharomyces pastorianus
attgccacatatcgcattcatatcc

SEQ ID NO: 11541 - DNA, 25 bp, Saccharomyces pastorianus
ggagatgatcatgactattgccaca

SEQ ID NO: 11542 - DNA, 25 bp, Saccharomyces pastorianus
cagaactcttattttccggagatga

SEQ ID NO: 11543 - DNA, 25 bp, Saccharomyces pastorianus
tgccagatccgtacaaatccatcag

SEQ ID NO: 11544 - DNA, 25 bp, Saccharomyces pastorianus
attacctgcaagtgtttccaaatct

SEQ ID NO: 11545 - DNA, 25 bp, Saccharomyces pastorianus
tttacatgcatttcctcccaaaatc

SEQ ID NO: 11546 - DNA, 25 bp, Saccharomyces pastorianus
cagctatccaactactttccttata

SEQ ID NO: 11547 - DNA, 25 bp, Saccharomyces pastorianus
gaaacgcgttctaccaaacagttct

SEQ ID NO: 11548 - DNA, 25 bp, Saccharomyces pastorianus
gtcatcgcagttgacgtgcttcgca

SEQ ID NO: 11549 - DNA, 25 bp, Saccharomyces pastorianus
acagggcaatgtactcctaacggaa

SEQ ID NO: 11550 - DNA, 25 bp, Saccharomyces pastorianus
ggtcgggttcgatagcattttggaa

SEQ ID NO: 11551 - DNA, 25 bp, Saccharomyces pastorianus
gaagtgtccaccattgaccgacgaa

SEQ ID NO: 11552 - DNA, 25 bp, Saccharomyces pastorianus
gaagttgcaatatgacgtttccgca

SEQ ID NO: 11553 - DNA, 25 bp, Saccharomyces pastorianus
gcaaaattcatatccggcatcccga

SEQ ID NO: 11554 - DNA, 25 bp, Saccharomyces pastorianus
gggaacaccaacctagcatacgtaa

SEQ ID NO: 11555 - DNA, 25 bp, Saccharomyces pastorianus
gacgtgcttcgcagagaacttcaag

SEQ ID NO: 11556 - DNA, 25 bp, Saccharomyces pastorianus
taacggaacgacttataaccatcag

SEQ ID NO: 11557 - DNA, 25 bp, Saccharomyces pastorianus
catcccgacccagatttttagcagg

SEQ ID NO: 11558 - DNA, 25 bp, Saccharomyces pastorianus
gaaacagtaacttatgcgccacatc

SEQ ID NO: 11559 - DNA, 25 bp, Saccharomyces pastorianus
agcacaatcataccgagccatacag

SEQ ID NO: 11560 - DNA, 25 bp, Saccharomyces pastorianus
caccgacgctttgatgggcggcaaa

SEQ ID NO: 11561 - DNA, 25 bp, Saccharomyces pastorianus
ggcttagcgctaaacttcaaatcta

SEQ ID NO: 11562 - DNA, 25 bp, Saccharomyces pastorianus
ccattacattggacttatacggtga

SEQ ID NO: 11563 - DNA, 25 bp, Saccharomyces pastorianus
acaccagccatggactattgaatct

SEQ ID NO: 11564 - DNA, 25 bp, Saccharomyces pastorianus
ttcaaatctagaacgcccaccgacg

SEQ ID NO: 11565 - DNA, 25 bp, Saccharomyces pastorianus
agaacttcttgaattcaccagtccc

SEQ ID NO: 11566 - DNA, 25 bp, Saccharomyces pastorianus
gacgatgattcgacaagcagcacaa

SEQ ID NO: 11567 - DNA, 25 bp, Saccharomyces pastorianus
caaatcatgtctgggtgcgcgaata

SEQ ID NO: 11568 - DNA, 25 bp, Saccharomyces pastorianus
gacaaccgtcaatcaatcttttcag

SEQ ID NO: 11569 - DNA, 25 bp, Saccharomyces pastorianus
atccccgctgttactcagaagcgat

SEQ ID NO: 11570 - DNA, 25 bp, Saccharomyces pastorianus
ataatggaccctttgaatagttctc

SEQ ID NO: 11571 - DNA, 25 bp, Saccharomyces pastorianus
ttggagaccaccgatagttatcttt

SEQ ID NO: 11572 - DNA, 25 bp, Saccharomyces pastorianus
taacatcatctaccggactaccaaa

SEQ ID NO: 11573 - DNA, 25 bp, Saccharomyces pastorianus
atctcgggtatcaggaaattgctac

SEQ ID NO: 11574 - DNA, 25 bp, Saccharomyces pastorianus
gaagatgggtccgattctaatttta

SEQ ID NO: 11575 - DNA, 25 bp, Saccharomyces pastorianus
gtagcacagccattactacaccagc

SEQ ID NO: 11576 - DNA, 25 bp, Saccharomyces pastorianus
actacaccagccgaatttttgaatg

SEQ ID NO: 11577 - DNA, 25 bp, Saccharomyces pastorianus
tgtgggaagtttgatctcgggtatc

SEQ ID NO: 11578 - DNA, 25 bp, Saccharomyces pastorianus
aaccttcaagaatgggctcactctc

SEQ ID NO: 11579 - DNA, 25 bp, Saccharomyces pastorianus
tgggctcactctcaattgcataatc

SEQ ID NO: 11580 - DNA, 25 bp, Saccharomyces pastorianus
tagttatctttacattgacccaaaa

SEQ ID NO: 11581 - DNA, 25 bp, Saccharomyces pastorianus
gacgtgatatcaccacacggtgttc

SEQ ID NO: 11582 - DNA, 25 bp, Saccharomyces pastorianus
gacaggttattgattgttcgcactt

SEQ ID NO: 11583 - DNA, 25 bp, Saccharomyces pastorianus
caatatcgccccagtcgttgtattg

SEQ ID NO: 11584 - DNA, 25 bp, Saccharomyces pastorianus
gaaaatggcgctttggaccttctag

SEQ ID NO: 11585 - DNA, 25 bp, Saccharomyces pastorianus
ggaccttctagctacaatgggctca

SEQ ID NO: 11586 - DNA, 25 bp, Saccharomyces pastorianus
agagccgctgtggaaagtttgcaaa

SEQ ID NO: 11587 - DNA, 25 bp, Saccharomyces pastorianus
atagaggtatgaccacagtccgtgg

SEQ ID NO: 11588 - DNA, 25 bp, Saccharomyces pastorianus
cggtgttccacctgatttgattgac

SEQ ID NO: 11589 - DNA, 25 bp, Saccharomyces pastorianus
aattccaggtgtcctattcatcgat

SEQ ID NO: 11590 - DNA, 25 bp, Saccharomyces pastorianus
gttcgcactttaccttacgacaaag

SEQ ID NO: 11591 - DNA, 25 bp, Saccharomyces pastorianus
gatgggccaattactcaagcctaag

SEQ ID NO: 11592 - DNA, 25 bp, Saccharomyces pastorianus
aacagatgctaattcggcgtctcaa

SEQ ID NO: 11593 - DNA, 25 bp, Saccharomyces pastorianus
catttggtcaaacagcctcagatcc

SEQ ID NO: 11594 - DNA, 25 bp, Saccharomyces pastorianus
ataagtcaccttttggtatggctgc

SEQ ID NO: 11595 - DNA, 25 bp, Saccharomyces pastorianus
gaaatctacagaacgcgctaccagt

SEQ ID NO: 11596 - DNA, 25 bp, Saccharomyces pastorianus
gctcaatctcccttcggtaataaag

SEQ ID NO: 11597 - DNA, 25 bp, Saccharomyces pastorianus
ggcaatagcagtccattcgcagcaa

SEQ ID NO: 11598 - DNA, 25 bp, Saccharomyces pastorianus
gcagctccatttggctcatttggta

SEQ ID NO: 11599 - DNA, 25 bp, Saccharomyces pastorianus
tagagttaagcgaccttgccgagga

SEQ ID NO: 11600 - DNA, 25 bp, Saccharomyces pastorianus
ggtacctttggctcagtatctaact

SEQ ID NO: 11601 - DNA, 25 bp, Saccharomyces pastorianus
gtacaacttcgtttggacagcaacc

SEQ ID NO: 11602 - DNA, 25 bp, Saccharomyces pastorianus
gatttgttcaaggtttaccctctga

SEQ ID NO: 11603 - DNA, 25 bp, Saccharomyces pastorianus
taaagatccctgtatccagaagatt

SEQ ID NO: 11604 - DNA, 25 bp, Saccharomyces pastorianus
gcctgaaattgcatctacctatggt

SEQ ID NO: 11605 - DNA, 25 bp, Saccharomyces pastorianus
ttcggacgcgacaacaacaatagac

SEQ ID NO: 11606 - DNA, 25 bp, Saccharomyces pastorianus
gttcttccgtcttattcatttgcaa

SEQ ID NO: 11607 - DNA, 25 bp, Saccharomyces pastorianus
aagattcagacacttccttcagaag

SEQ ID NO: 11608 - DNA, 25 bp, Saccharomyces pastorianus
acaatagacgttcattctcccgcaa

SEQ ID NO: 11609 - DNA, 25 bp, Saccharomyces pastorianus
ggtatactttcaaacgatcctgaat

SEQ ID NO: 11610 - DNA, 25 bp, Saccharomyces pastorianus
tttctgaaagacacatattgcctga

SEQ ID NO: 11611 - DNA, 25 bp, Saccharomyces pastorianus
gaagatggacaattcggacgcgaca

SEQ ID NO: 11612 - DNA, 25 bp, Saccharomyces pastorianus
gaagagctgtccgatgtcatagtaa

SEQ ID NO: 11613 - DNA, 25 bp, Saccharomyces pastorianus
atagtaagtttgatctcatcctaca

SEQ ID NO: 11614 - DNA, 25 bp, Saccharomyces pastorianus
atacagatcttcctctgatcggcga

SEQ ID NO: 11615 - DNA, 25 bp, Saccharomyces pastorianus
aaactgcggcccaggattggttcga

SEQ ID NO: 11616 - DNA, 25 bp, Saccharomyces pastorianus
atgattttccttcattgggcggcgc

SEQ ID NO: 11617 - DNA, 25 bp, Saccharomyces pastorianus
gtgaacggaaacaagcgcgccaaat

SEQ ID NO: 11618 - DNA, 25 bp, Saccharomyces pastorianus
aagttccattgagccactactagca

SEQ ID NO: 11619 - DNA, 25 bp, Saccharomyces pastorianus
gatcggcgacagacctacaaatgaa

SEQ ID NO: 11620 - DNA, 25 bp, Saccharomyces pastorianus
ttgtcattgatcaatcctacccatc

SEQ ID NO: 11621 - DNA, 25 bp, Saccharomyces pastorianus
cacgatttgttcttcgtcgcattag

SEQ ID NO: 11622 - DNA, 25 bp, Saccharomyces pastorianus
ggcgctggtcgcaatacagatcttc

SEQ ID NO: 11623 - DNA, 25 bp, Saccharomyces pastorianus
acggatattttgttgcacttgccaa

SEQ ID NO: 11624 - DNA, 25 bp, Saccharomyces pastorianus
ttgcatgttcatagttttcacgatt

SEQ ID NO: 11625 - DNA, 25 bp, Saccharomyces pastorianus
gggcgataaattacgcaagtctatg

SEQ ID NO: 11626 - DNA, 25 bp, Saccharomyces pastorianus
gaactggatacattgcagcagactt

SEQ ID NO: 11627 - DNA, 25 bp, Saccharomyces pastorianus
tctgtcgaatctctgaagcacgcaa

SEQ ID NO: 11628 - DNA, 25 bp, Saccharomyces pastorianus
actggaacagagtgtgcttgctttg

SEQ ID NO: 11629 - DNA, 25 bp, Saccharomyces pastorianus
gcttgctttggagagtacactttcg

SEQ ID NO: 11630 - DNA, 25 bp, Saccharomyces pastorianus
taattcggacatgggtcgcgatgat

SEQ ID NO: 11631 - DNA, 25 bp, Saccharomyces pastorianus
tttccgtttagtgcccgagtatgac

SEQ ID NO: 11632 - DNA, 25 bp, Saccharomyces pastorianus
agcacgcaaatgaacctagcacgaa

SEQ ID NO: 11633 - DNA, 25 bp, Saccharomyces pastorianus
aacgatggtctcgataattcggaca

SEQ ID NO: 11634 - DNA, 25 bp, Saccharomyces pastorianus
agtagagccgcttgttaggacgttg

SEQ ID NO: 11635 - DNA, 25 bp, Saccharomyces pastorianus
gagatgctgatgttagtaccgatgt

SEQ ID NO: 11636 - DNA, 25 bp, Saccharomyces pastorianus
gccttcatcggcatcagtatcatat

SEQ ID NO: 11637 - DNA, 25 bp, Saccharomyces pastorianus
gtatgtgcaatttccgtatggccca

SEQ ID NO: 11638 - DNA, 25 bp, Saccharomyces pastorianus
tatccaagtcccatgatgccttcat

SEQ ID NO: 11639 - DNA, 25 bp, Saccharomyces pastorianus
gtttcagcagcccatgcagcaagaa

SEQ ID NO: 11640 - DNA, 25 bp, Saccharomyces pastorianus
ggtagcgctgccatttaatgcacat

SEQ ID NO: 11641 - DNA, 25 bp, Saccharomyces pastorianus
aatgtcctcgataaactcctcctat

SEQ ID NO: 11642 - DNA, 25 bp, Saccharomyces pastorianus
tagtatcatatcctctgtgcaaacg

SEQ ID NO: 11643 - DNA, 25 bp, Saccharomyces pastorianus
gcagccacttcttcatctatttcaa

SEQ ID NO: 11644 - DNA, 25 bp, Saccharomyces pastorianus
tgtgtatcaacaacctccagcaatg

SEQ ID NO: 11645 - DNA, 25 bp, Saccharomyces pastorianus
gaaaccgttgcgaatttatctgctg

SEQ ID NO: 11646 - DNA, 25 bp, Saccharomyces pastorianus
acagcaggttcaaagttcgacgcag

SEQ ID NO: 11647 - DNA, 25 bp, Saccharomyces pastorianus
actggactgccattatgatgcgttc

SEQ ID NO: 11648 - DNA, 25 bp, Saccharomyces pastorianus
aaacttggcatatggcccagaatat

SEQ ID NO: 11649 - DNA, 25 bp, Saccharomyces pastorianus
agaaatgaacaacaccgcttcctct

SEQ ID NO: 11650 - DNA, 25 bp, Saccharomyces pastorianus
taatgccgattcaccagatacgagt

SEQ ID NO: 11651 - DNA, 25 bp, Saccharomyces pastorianus
gaaagcgtcgtcttcaaacttggca

SEQ ID NO: 11652 - DNA, 25 bp, Saccharomyces pastorianus
aagacccaactgtttcaattgtgag

SEQ ID NO: 11653 - DNA, 25 bp, Saccharomyces pastorianus
ttcttctccttctctgaaagcgtcg

SEQ ID NO: 11654 - DNA, 25 bp, Saccharomyces pastorianus
tataactcgcttggcgaatccccaa

SEQ ID NO: 11655 - DNA, 25 bp, Saccharomyces pastorianus
gcagccgctcaaggtacaagatctc

SEQ ID NO: 11656 - DNA, 25 bp, Saccharomyces pastorianus
tagacgactatcagcaccagaacag

SEQ ID NO: 11657 - DNA, 25 bp, Saccharomyces pastorianus
tgatgcgttcaagccggatttcgta

SEQ ID NO: 11658 - DNA, 25 bp, Saccharomyces pastorianus
gaagattctgtggatcctctacctc

SEQ ID NO: 11659 - DNA, 25 bp, Saccharomyces pastorianus
taaactggttagtgctattccacca

SEQ ID NO: 11660 - DNA, 25 bp, Saccharomyces pastorianus
gggattcgtgcatctgatcaattta

SEQ ID NO: 11661 - DNA, 25 bp, Saccharomyces pastorianus
acagtggtacggcattttttcagag

SEQ ID NO: 11662 - DNA, 25 bp, Saccharomyces pastorianus
gcgcaaacacaagggcccatgagat

SEQ ID NO: 11663 - DNA, 25 bp, Saccharomyces pastorianus
gggcccatgagatctggtactggaa

SEQ ID NO: 11664 - DNA, 25 bp, Saccharomyces pastorianus
gtttgcgccatgacactaaactggt

SEQ ID NO: 11665 - DNA, 25 bp, Saccharomyces pastorianus
gcatccattgaggagcaggcgcaaa

SEQ ID NO: 11666 - DNA, 25 bp, Saccharomyces pastorianus
gggtcgctcaactagcatagataag

SEQ ID NO: 11667 - DNA, 25 bp, Saccharomyces pastorianus
agacttgatatattacgtgggcata

SEQ ID NO: 11668 - DNA, 25 bp, Saccharomyces pastorianus
gatttacagtttcccgacactgcat

SEQ ID NO: 11669 - DNA, 25 bp, Saccharomyces pastorianus
ttcagcaaggaccagcaaaggagga

SEQ ID NO: 11670 - DNA, 25 bp, Saccharomyces pastorianus
aacaaggccctcctcaacaacaagg

SEQ ID NO: 11671 - DNA, 25 bp, Saccharomyces pastorianus
gtctacgttcagcaaggaccagcaa

SEQ ID NO: 11672 - DNA, 25 bp, Saccharomyces pastorianus
aggttactatcaacaaggccctcct

SEQ ID NO: 11673 - DNA, 25 bp, Saccharomyces pastorianus
ttgcttaaaatgtctgtgctgctgc

SEQ ID NO: 11674 - DNA, 25 bp, Saccharomyces pastorianus
cacaacagggctactaccaacaagg

SEQ ID NO: 11675 - DNA, 25 bp, Saccharomyces pastorianus
tcaacaacaaggctattaccaacaa

SEQ ID NO: 11676 - DNA, 25 bp, Saccharomyces pastorianus
acaaccagtctacgttcagcaagga

SEQ ID NO: 11677 - DNA, 25 bp, Saccharomyces pastorianus
aaggcccaccacaacagggctacta

SEQ ID NO: 11678 - DNA, 25 bp, Saccharomyces pastorianus
gaagctgcatggatagttgcttaaa

SEQ ID NO: 11679 - DNA, 25 bp, Saccharomyces pastorianus
gccctcctcaacaacaaggctatta

SEQ ID NO: 11680 - DNA, 25 bp, Saccharomyces pastorianus
cagtgtttctgttgatccttgttat

SEQ ID NO: 11681 - DNA, 25 bp, Saccharomyces pastorianus
gctgtggccaaagttttcaatcaat

SEQ ID NO: 11682 - DNA, 25 bp, Saccharomyces pastorianus
aaataaccatgatcttgacaccgcc

SEQ ID NO: 11683 - DNA, 25 bp, Saccharomyces pastorianus
gatcctatttagtgcattggtttct

SEQ ID NO: 11684 - DNA, 25 bp, Saccharomyces pastorianus
ttgacaccgccctactagaattaaa

SEQ ID NO: 11685 - DNA, 25 bp, Saccharomyces pastorianus
tagcaaccattactgcattattgaa

SEQ ID NO: 11686 - DNA, 25 bp, Saccharomyces pastorianus
taggtcccaaggatgctgtggccaa

SEQ ID NO: 11687 - DNA, 25 bp, Saccharomyces pastorianus
gtattgctactgtagagcgtgctat

SEQ ID NO: 11688 - DNA, 25 bp, Saccharomyces pastorianus
gagtatgaacgtcacgtaccatgaa

SEQ ID NO: 11689 - DNA, 25 bp, Saccharomyces pastorianus
accatttcatcgcaactcaaacatt

SEQ ID NO: 11690 - DNA, 25 bp, Saccharomyces pastorianus
taagtgatgactccatttcctctac

SEQ ID NO: 11691 - DNA, 25 bp, Saccharomyces pastorianus
gaagccgctttgaacatttatcttg

SEQ ID NO: 11692 - DNA, 25 bp, Saccharomyces pastorianus
agtcgttcaggctaaattttccgat

SEQ ID NO: 11693 - DNA, 25 bp, Saccharomyces pastorianus
gtaaatgccgctaaggattccagtg

SEQ ID NO: 11694 - DNA, 25 bp, Saccharomyces pastorianus
gctgctgcattattgatcatcccaa

SEQ ID NO: 11695 - DNA, 25 bp, Saccharomyces pastorianus
aagggtacttccaagcattcttctt

SEQ ID NO: 11696 - DNA, 25 bp, Saccharomyces pastorianus
aaattcatgccggtgttcttgagcc

SEQ ID NO: 11697 - DNA, 25 bp, Saccharomyces pastorianus
atcagcgttggaagcctgcatagca

SEQ ID NO: 11698 - DNA, 25 bp, Saccharomyces pastorianus
gatggaacgttctctacatgactca

SEQ ID NO: 11699 - DNA, 25 bp, Saccharomyces pastorianus
acatgactcactctctgttgttaag

SEQ ID NO: 11700 - DNA, 25 bp, Saccharomyces pastorianus
taagatcttatcatgctgccagcca

SEQ ID NO: 11701 - DNA, 25 bp, Saccharomyces pastorianus
cttgacaattttgccactacggttg

SEQ ID NO: 11702 - DNA, 25 bp, Saccharomyces pastorianus
taggcgatgtcatcaatcccgatgt

SEQ ID NO: 11703 - DNA, 25 bp, Saccharomyces pastorianus
acttcgagtttttacatttccagca

SEQ ID NO: 11704 - DNA, 25 bp, Saccharomyces pastorianus
atcatggactcactggcaaacgcta

SEQ ID NO: 11705 - DNA, 25 bp, Saccharomyces pastorianus
tactgatttatatccggtcggctta

SEQ ID NO: 11706 - DNA, 25 bp, Saccharomyces pastorianus
gattcgccatacttgataaccttag

SEQ ID NO: 11707 - DNA, 25 bp, Saccharomyces pastorianus
tatgatgctggatttcctcggcggt

SEQ ID NO: 11708 - DNA, 25 bp, Saccharomyces pastorianus
gcaagtgttgcctcaagacgttgac

SEQ ID NO: 11709 - DNA, 25 bp, Saccharomyces pastorianus
ctggtttctcgagggtgttacgcaa

SEQ ID NO: 11710 - DNA, 25 bp, Saccharomyces pastorianus
aacattcctcgcgttattgatgaca

SEQ ID NO: 11711 - DNA, 25 bp, Saccharomyces pastorianus
gattttaaccgctgtatggccatta

SEQ ID NO: 11712 - DNA, 25 bp, Saccharomyces pastorianus
tcggcggtgggctaccatcaatgac

SEQ ID NO: 11713 - DNA, 25 bp, Saccharomyces pastorianus
aaggactggtcagccagcttcaact

SEQ ID NO: 11714 - DNA, 25 bp, Saccharomyces pastorianus
atctatctagaacccactttcaacg

SEQ ID NO: 11715 - DNA, 25 bp, Saccharomyces pastorianus
ggagcagatccgcacagtttttcaa

SEQ ID NO: 11716 - DNA, 25 bp, Saccharomyces pastorianus
ttcgaagattactacgtgcgctcca

SEQ ID NO: 11717 - DNA, 25 bp, Saccharomyces pastorianus
atcagcgagctggtgtcgtgcgaaa

SEQ ID NO: 11718 - DNA, 25 bp, Saccharomyces pastorianus
aagccaggaaagagcgcgtctccat

SEQ ID NO: 11719 - DNA, 25 bp, Saccharomyces pastorianus
gtgccatccagcgagctatacgaaa

SEQ ID NO: 11720 - DNA, 25 bp, Saccharomyces pastorianus
gaactattcggtggcaacgtcatca

SEQ ID NO: 11721 - DNA, 25 bp, Saccharomyces pastorianus
gacttactggccactaatgctaatg

SEQ ID NO: 11722 - DNA, 25 bp, Saccharomyces pastorianus
gcgtgcgcggcaacttcgaagatta

SEQ ID NO: 11723 - DNA, 25 bp, Saccharomyces pastorianus
aatgaccttccacgaatctcaggag

SEQ ID NO: 11724 - DNA, 25 bp, Saccharomyces pastorianus
gacgatagcgatttgacttcacatt

SEQ ID NO: 11725 - DNA, 25 bp, Saccharomyces pastorianus
tatgggatcccagtcgtattgtatt

SEQ ID NO: 11726 - DNA, 25 bp, Saccharomyces pastorianus
taacgctattgtgggagaactgact

SEQ ID NO: 11727 - DNA, 25 bp, Saccharomyces pastorianus
gggcacacagtgacgatagcgattt

SEQ ID NO: 11728 - DNA, 25 bp, Saccharomyces pastorianus
agaccagtgctggaacggtccacat

SEQ ID NO: 11729 - DNA, 25 bp, Saccharomyces pastorianus
gtgacactttccaaattcggagcgt

SEQ ID NO: 11730 - DNA, 25 bp, Saccharomyces pastorianus
gtattcgtccgttgcagtgacactt

SEQ ID NO: 11731 - DNA, 25 bp, Saccharomyces pastorianus
gctgggctgcgacaaagcctttgaa

SEQ ID NO: 11732 - DNA, 25 bp, Saccharomyces pastorianus
ggtccacatagatcagccacggtat

SEQ ID NO: 11733 - DNA, 25 bp, Saccharomyces pastorianus
attgggtattgacgcagacttgaac

SEQ ID NO: 11734 - DNA, 25 bp, Saccharomyces pastorianus
tacatatttgacgtcagcgggccgc

SEQ ID NO: 11735 - DNA, 25 bp, Saccharomyces pastorianus
gaaaactactccattttggctatag

SEQ ID NO: 11736 - DNA, 25 bp, Saccharomyces pastorianus
aattaaccgatgtccctgtggctta

SEQ ID NO: 11737 - DNA, 25 bp, Saccharomyces pastorianus
aaactgaccgctattggttcttccg

SEQ ID NO: 11738 - DNA, 25 bp, Saccharomyces pastorianus
gcggtttcgggctactagtacagat

SEQ ID NO: 11739 - DNA, 25 bp, Saccharomyces pastorianus
ggtgaactcctttcctcagacaaaa

SEQ ID NO: 11740 - DNA, 25 bp, Saccharomyces pastorianus
aaagagatctctgccactggtgaac

SEQ ID NO: 11741 - DNA, 25 bp, Saccharomyces pastorianus
gtggcttatctagacgccgttcaag

SEQ ID NO: 11742 - DNA, 25 bp, Saccharomyces pastorianus
gcatggttagatcgctagctcagaa

SEQ ID NO: 11743 - DNA, 25 bp, Saccharomyces pastorianus
gaacttcttatgtttccacagtgaa

SEQ ID NO: 11744 - DNA, 25 bp, Saccharomyces pastorianus
aatgattagacacgtcttcgtcccc

SEQ ID NO: 11745 - DNA, 25 bp, Saccharomyces pastorianus
caacttccatcaaatttcccggtag

SEQ ID NO: 11746 - DNA, 25 bp, Saccharomyces pastorianus
agaagacctctacttccactgatgg

SEQ ID NO: 11747 - DNA, 25 bp, Saccharomyces pastorianus
caagaagacctctacttccactgat

SEQ ID NO: 11748 - DNA, 25 bp, Saccharomyces pastorianus
gaagacctctacttccactgatggt

SEQ ID NO: 11749 - DNA, 25 bp, Saccharomyces pastorianus
ttttgaactcctttgtaaacgatat

SEQ ID NO: 11750 - DNA, 25 bp, Saccharomyces pastorianus
gctgccaagaagacctctacttcca

SEQ ID NO: 11751 - DNA, 25 bp, Saccharomyces pastorianus
tattttgaactcctttgtaaacgat

SEQ ID NO: 11752 - DNA, 25 bp, Saccharomyces pastorianus
tgccaagaagacctctacttccact

SEQ ID NO: 11753 - DNA, 25 bp, Saccharomyces pastorianus
aagaagacctctacttccactgatg

SEQ ID NO: 11754 - DNA, 25 bp, Saccharomyces pastorianus
ttgaactcctttgtaaacgatatct

SEQ ID NO: 11755 - DNA, 25 bp, Saccharomyces pastorianus
tctattttgaactcctttgtaaacg

SEQ ID NO: 11756 - DNA, 25 bp, Saccharomyces pastorianus
gccaagaagacctctacttccactg

SEQ ID NO: 11757 - DNA, 25 bp, Saccharomyces pastorianus
tacttgactgccgtcctagaatatt

SEQ ID NO: 11758 - DNA, 25 bp, Saccharomyces pastorianus
ttgactgccgtcctagaatatttgg

SEQ ID NO: 11759 - DNA, 25 bp, Saccharomyces pastorianus
tattgctcaaggtggtgtcttgcca

SEQ ID NO: 11760 - DNA, 25 bp, Saccharomyces pastorianus
gacgacgaattgaacaaattgttgg

SEQ ID NO: 11761 - DNA, 25 bp, Saccharomyces pastorianus
gttgggtaacgttactattgctcaa

SEQ ID NO: 11762 - DNA, 25 bp, Saccharomyces pastorianus
tcaaagaattggttccggtgctcca

SEQ ID NO: 11763 - DNA, 25 bp, Saccharomyces pastorianus
aaagaccagaatcatcccaagacat

SEQ ID NO: 11764 - DNA, 25 bp, Saccharomyces pastorianus
tgccgtcctagaatatttggccgct

SEQ ID NO: 11765 - DNA, 25 bp, Saccharomyces pastorianus
attgttgggtaacgttactattgct

SEQ ID NO: 11766 - DNA, 25 bp, Saccharomyces pastorianus
agtctacttgactgccgtcctagaa

SEQ ID NO: 11767 - DNA, 25 bp, Saccharomyces pastorianus
gttactattgctcaaggtggtgtct

SEQ ID NO: 11768 - DNA, 25 bp, Saccharomyces pastorianus
gaaccattcctcaagccgaaaagtt

SEQ ID NO: 11769 - DNA, 25 bp, Saccharomyces pastorianus
atcaccggtagattggtccatccag

SEQ ID NO: 11770 - DNA, 25 bp, Saccharomyces pastorianus
gagattggatgcttaccacgctcaa

SEQ ID NO: 11771 - DNA, 25 bp, Saccharomyces pastorianus
ggtagatcttaccacaaactcttca

SEQ ID NO: 11772 - DNA, 25 bp, Saccharomyces pastorianus
aaggtgctttggtctccgacgacat

SEQ ID NO: 11773 - DNA, 25 bp, Saccharomyces pastorianus
tcaagctccaaacctgcaagaacgt

SEQ ID NO: 11774 - DNA, 25 bp, Saccharomyces pastorianus
gatccgatgacaatgctgacgcttt

SEQ ID NO: 11775 - DNA, 25 bp, Saccharomyces pastorianus
atttggctaccggtgacatgttgag

SEQ ID NO: 11776 - DNA, 25 bp, Saccharomyces pastorianus
tccatccaggttccggtagatctta

SEQ ID NO: 11777 - DNA, 25 bp, Saccharomyces pastorianus
caagaagtctggtatctgggctggt

SEQ ID NO: 11778 - DNA, 25 bp, Saccharomyces pastorianus
gaagctctagtccaaagatccgatg

SEQ ID NO: 11779 - DNA, 25 bp, Saccharomyces pastorianus
ctgtcaccggtgtttatgatgagga

SEQ ID NO: 11780 - DNA, 25 bp, Saccharomyces pastorianus
gaaatcacctctacacagcataaag

SEQ ID NO: 11781 - DNA, 25 bp, Saccharomyces pastorianus
gcaaacacaggtataagcaactcaa

SEQ ID NO: 11782 - DNA, 25 bp, Saccharomyces pastorianus
ttgctatcatgaaacctccgaaagt

SEQ ID NO: 11783 - DNA, 25 bp, Saccharomyces pastorianus
gcgattctcaatgggtagctttcaa

SEQ ID NO: 11784 - DNA, 25 bp, Saccharomyces pastorianus
gcaactcaaactcaaataccactac

SEQ ID NO: 11785 - DNA, 25 bp, Saccharomyces pastorianus
gatttgtaaagaaactgtcaccggt

SEQ ID NO: 11786 - DNA, 25 bp, Saccharomyces pastorianus
aatattttcattctacttgctatca

SEQ ID NO: 11787 - DNA, 25 bp, Saccharomyces pastorianus
gatatggttttcaagtgtccgattt

SEQ ID NO: 11788 - DNA, 25 bp, Saccharomyces pastorianus
aagtctgcaaaggacactttaggaa

SEQ ID NO: 11789 - DNA, 25 bp, Saccharomyces pastorianus
agttgactacactgatcccaatatt

SEQ ID NO: 11790 - DNA, 25 bp, Saccharomyces pastorianus
tcgttgccgcctacaagaaactcaa

SEQ ID NO: 11791 - DNA, 25 bp, Saccharomyces pastorianus
cttattatatgatgcggacgaccct

SEQ ID NO: 11792 - DNA, 25 bp, Saccharomyces pastorianus
ttttcaccaaagtccaagagctcct

SEQ ID NO: 11793 - DNA, 25 bp, Saccharomyces pastorianus
gacaatgacggcaacggcagcgata

SEQ ID NO: 11794 - DNA, 25 bp, Saccharomyces pastorianus
gaaggaactagtcgaccttccacgt

SEQ ID NO: 11795 - DNA, 25 bp, Saccharomyces pastorianus
gcggacgaccctttcagcaagaaga

SEQ ID NO: 11796 - DNA, 25 bp, Saccharomyces pastorianus
acgagctcgtggaaaatacctgcaa

SEQ ID NO: 11797 - DNA, 25 bp, Saccharomyces pastorianus
ctggcggtggactggatgacttatt

SEQ ID NO: 11798 - DNA, 25 bp, Saccharomyces pastorianus
aacaaagtcgccacagtgtccaggg

SEQ ID NO: 11799 - DNA, 25 bp, Saccharomyces pastorianus
gaagcagcaacaacgaaggccgcga

SEQ ID NO: 11800 - DNA, 25 bp, Saccharomyces pastorianus
ggcggagaactcgttttcgttgccg

SEQ ID NO: 11801 - DNA, 25 bp, Saccharomyces pastorianus
aaaaagcttccagattgcccagttg

SEQ ID NO: 11802 - DNA, 25 bp, Saccharomyces pastorianus
ttaaaggaggcctgggactcagtca

SEQ ID NO: 11803 - DNA, 25 bp, Saccharomyces pastorianus
tactggaggatactccgcccaagtt

SEQ ID NO: 11804 - DNA, 25 bp, Saccharomyces pastorianus
tctagagaggctgacgtcgatcccg

SEQ ID NO: 11805 - DNA, 25 bp, Saccharomyces pastorianus
ggagaacccgtactgacgaactact

SEQ ID NO: 11806 - DNA, 25 bp, Saccharomyces pastorianus
aagttcaccaatgacctatccaact

SEQ ID NO: 11807 - DNA, 25 bp, Saccharomyces pastorianus
gcataacgtggtgcatgacccagct

SEQ ID NO: 11808 - DNA, 25 bp, Saccharomyces pastorianus
atgacccagctttgccagaacaatg

SEQ ID NO: 11809 - DNA, 25 bp, Saccharomyces pastorianus
gaactgggccatgagctctctgata

SEQ ID NO: 11810 - DNA, 25 bp, Saccharomyces pastorianus
aaaagcaggcccagttccagcaaag

SEQ ID NO: 11811 - DNA, 25 bp, Saccharomyces pastorianus
gagctctctgatactgggatcaatt

SEQ ID NO: 11812 - DNA, 25 bp, Saccharomyces pastorianus
aacaagactgctactgtttcctcaa

SEQ ID NO: 11813 - DNA, 25 bp, Saccharomyces pastorianus
gggccctatctccaagttggtcaaa

SEQ ID NO: 11814 - DNA, 25 bp, Saccharomyces pastorianus
gaattctcccaattggcctgtgaaa

SEQ ID NO: 11815 - DNA, 25 bp, Saccharomyces pastorianus
aagcaattgccagttttccaagccc

SEQ ID NO: 11816 - DNA, 25 bp, Saccharomyces pastorianus
aggaatgtccaaacgtcgctggctt

SEQ ID NO: 11817 - DNA, 25 bp, Saccharomyces pastorianus
aagtcatgccagaagtcccagaaca

SEQ ID NO: 11818 - DNA, 25 bp, Saccharomyces pastorianus
gtttcctcaactactggtcctgaaa

SEQ ID NO: 11819 - DNA, 25 bp, Saccharomyces pastorianus
acttggccgctgaagttccattaga

SEQ ID NO: 11820 - DNA, 25 bp, Saccharomyces pastorianus
ggaccattatgttcgtcggcgacat

SEQ ID NO: 11821 - DNA, 25 bp, Saccharomyces pastorianus
gcctcgcatcgatgaagccttgaag

SEQ ID NO: 11822 - DNA, 25 bp, Saccharomyces pastorianus
caagttcttctcatggttttccatc

SEQ ID NO: 11823 - DNA, 25 bp, Saccharomyces pastorianus
aaagtagtcgtcaccgagggctctt

SEQ ID NO: 11824 - DNA, 25 bp, Saccharomyces pastorianus
agaagctccggttccaaagcaatcc

SEQ ID NO: 11825 - DNA, 25 bp, Saccharomyces pastorianus
ggaaggtttcccacgagagatctcg

SEQ ID NO: 11826 - DNA, 25 bp, Saccharomyces pastorianus
gatatcgtcatcagcgggttcaact

SEQ ID NO: 11827 - DNA, 25 bp, Saccharomyces pastorianus
gagttggtcttttgcgacgctgaca

SEQ ID NO: 11828 - DNA, 25 bp, Saccharomyces pastorianus
agaacaagcggccactgcattattg

SEQ ID NO: 11829 - DNA, 25 bp, Saccharomyces pastorianus
ggtaccggatcctccagagaacaag

SEQ ID NO: 11830 - DNA, 25 bp, Saccharomyces pastorianus
aggtatcaacttggtcgtgtccggc

SEQ ID NO: 11831 - DNA, 25 bp, Saccharomyces pastorianus
ttggatggtcccgtcatcatggaac

SEQ ID NO: 11832 - DNA, 25 bp, Saccharomyces pastorianus
gctccttcggtaacattttctctag

SEQ ID NO: 11833 - DNA, 25 bp, Saccharomyces pastorianus
gacgctgatttccaaacgagggccc

SEQ ID NO: 11834 - DNA, 25 bp, Saccharomyces pastorianus
agaagtagacttgcccatacctgta

SEQ ID NO: 11835 - DNA, 25 bp, Saccharomyces pastorianus
acgtgcccatagagcagttacccaa

SEQ ID NO: 11836 - DNA, 25 bp, Saccharomyces pastorianus
gctccccatggtactttcagtagga

SEQ ID NO: 11837 - DNA, 25 bp, Saccharomyces pastorianus
ggaattgcatgttcttcacgatttc

SEQ ID NO: 11838 - DNA, 25 bp, Saccharomyces pastorianus
attaggcatcccaacagccaacgtg

SEQ ID NO: 11839 - DNA, 25 bp, Saccharomyces pastorianus
ggctattgaccatggagaacccttg

SEQ ID NO: 11840 - DNA, 25 bp, Saccharomyces pastorianus
ggtgatttaaacgtgctccccatgg

SEQ ID NO: 11841 - DNA, 25 bp, Saccharomyces pastorianus
ggtttggacgtggatctgctgaatt

SEQ ID NO: 11842 - DNA, 25 bp, Saccharomyces pastorianus
ggatttgctcacatcaaggctattg

SEQ ID NO: 11843 - DNA, 25 bp, Saccharomyces pastorianus
ttgcacaaaaattcctatccacctc

SEQ ID NO: 11844 - DNA, 25 bp, Saccharomyces pastorianus
gcaggtaccttcttgatacatcgaa

SEQ ID NO: 11845 - DNA, 25 bp, Saccharomyces pastorianus
atcactgcagctcttcaattacaac

SEQ ID NO: 11846 - DNA, 25 bp, Saccharomyces pastorianus
aaagtccaactacctgatatccatc

SEQ ID NO: 11847 - DNA, 25 bp, Saccharomyces pastorianus
gaacagaccacctaagaatcctcag

SEQ ID NO: 11848 - DNA, 25 bp, Saccharomyces pastorianus
tctaaaaacgatgttcctacctgga

SEQ ID NO: 11849 - DNA, 25 bp, Saccharomyces pastorianus
aacataaacacttctgctcaattag

SEQ ID NO: 11850 - DNA, 25 bp, Saccharomyces pastorianus
aattattcgcacgatgcggccgtag

SEQ ID NO: 11851 - DNA, 25 bp, Saccharomyces pastorianus
aaccagttgtttgctatcactgcag

SEQ ID NO: 11852 - DNA, 25 bp, Saccharomyces pastorianus
gaatcctcagggttctaaagtccaa

SEQ ID NO: 11853 - DNA, 25 bp, Saccharomyces pastorianus
agactaccaggcaagaactttgtta

SEQ ID NO: 11854 - DNA, 25 bp, Saccharomyces pastorianus
aggtattagcaaccaatccgggaat

SEQ ID NO: 11855 - DNA, 25 bp, Saccharomyces pastorianus
gatgcgaaccaagactcatggccaa

SEQ ID NO: 11856 - DNA, 25 bp, Saccharomyces pastorianus
atactatctctctcttccagaatta

SEQ ID NO: 11857 - DNA, 25 bp, Saccharomyces pastorianus
gaaagcagtcaaatgggaaccgccc

SEQ ID NO: 11858 - DNA, 25 bp, Saccharomyces pastorianus
ggcacattttactgttcaacgtctt

SEQ ID NO: 11859 - DNA, 25 bp, Saccharomyces pastorianus
ggaagacctccatacacagtcaatc

SEQ ID NO: 11860 - DNA, 25 bp, Saccharomyces pastorianus
tatgccccacaacattaatgccttt

SEQ ID NO: 11861 - DNA, 25 bp, Saccharomyces pastorianus
agacctgacgttgttatatgcccca

SEQ ID NO: 11862 - DNA, 25 bp, Saccharomyces pastorianus
cagccctatttttgatgacagcgag

SEQ ID NO: 11863 - DNA, 25 bp, Saccharomyces pastorianus
aattttccatctttgtccgtacctg

SEQ ID NO: 11864 - DNA, 25 bp, Saccharomyces pastorianus
aggtactgtcgattgccagatggat

SEQ ID NO: 11865 - DNA, 25 bp, Saccharomyces pastorianus
taatgcctttcaggcctggtgacat

SEQ ID NO: 11866 - DNA, 25 bp, Saccharomyces pastorianus
ggatgtttcatcagctcttaatgca

SEQ ID NO: 11867 - DNA, 25 bp, Saccharomyces pastorianus
tggtaggactggtcgtgccgccaaa

SEQ ID NO: 11868 - DNA, 25 bp, Saccharomyces pastorianus
gtgccgccaaagaaggtaccgccat

SEQ ID NO: 11869 - DNA, 25 bp, Saccharomyces pastorianus
acagggtctgaacctctgattcaac

SEQ ID NO: 11870 - DNA, 25 bp, Saccharomyces pastorianus
gtggtcaatttccagattcctaaaa

SEQ ID NO: 11871 - DNA, 25 bp, Saccharomyces pastorianus
ataggcgagcttcacaagtacgtaa

SEQ ID NO: 11872 - DNA, 25 bp, Saccharomyces pastorianus
tgaagaagcccgtctacgcgactat

SEQ ID NO: 11873 - DNA, 25 bp, Saccharomyces pastorianus
aacaacaggttttccgatgctgtga

SEQ ID NO: 11874 - DNA, 25 bp, Saccharomyces pastorianus
aacagactgccgactggttggctga

SEQ ID NO: 11875 - DNA, 25 bp, Saccharomyces pastorianus
attccgcagcggcaaagttcaaatt

SEQ ID NO: 11876 - DNA, 25 bp, Saccharomyces pastorianus
acatggttccaagtcgcaagatcaa

SEQ ID NO: 11877 - DNA, 25 bp, Saccharomyces pastorianus
accgccatctcttacgttggtggta

SEQ ID NO: 11878 - DNA, 25 bp, Saccharomyces pastorianus
agtacagttgtgcttgggtcttcta

SEQ ID NO: 11879 - DNA, 25 bp, Saccharomyces pastorianus
gagcattgcaactgaaaccatcttt

SEQ ID NO: 11880 - DNA, 25 bp, Saccharomyces pastorianus
gcttgggtcttctattctacactaa

SEQ ID NO: 11881 - DNA, 25 bp, Saccharomyces pastorianus
tagcgatgaaccgagatgacctttt

SEQ ID NO: 11882 - DNA, 25 bp, Saccharomyces pastorianus
tggccaactccaacagatcagaaga

SEQ ID NO: 11883 - DNA, 25 bp, Saccharomyces pastorianus
agaggctgcaggctacttattgact

SEQ ID NO: 11884 - DNA, 25 bp, Saccharomyces pastorianus
gatctagggtctctcttgaacacat

SEQ ID NO: 11885 - DNA, 25 bp, Saccharomyces pastorianus
gttagagctcgttacaatctggcag

SEQ ID NO: 11886 - DNA, 25 bp, Saccharomyces pastorianus
caatctggcagtgtcttcaatgaat

SEQ ID NO: 11887 - DNA, 25 bp, Saccharomyces pastorianus
cacattgacatgaacgcgcgtgtaa

SEQ ID NO: 11888 - DNA, 25 bp, Saccharomyces pastorianus
taagctcggcagaccctgaagtaca

SEQ ID NO: 11889 - DNA, 25 bp, Saccharomyces pastorianus
gactcaagagctcatcgaacctggc

SEQ ID NO: 11890 - DNA, 25 bp, Saccharomyces pastorianus
aaacatgatcccgtacgtaccatac

SEQ ID NO: 11891 - DNA, 25 bp, Saccharomyces pastorianus
gatagcagacaactttctccggaag

SEQ ID NO: 11892 - DNA, 25 bp, Saccharomyces pastorianus
gggttaatctaccagcggaatttca

SEQ ID NO: 11893 - DNA, 25 bp, Saccharomyces pastorianus
taaaccgcacggcactagtaggaaa

SEQ ID NO: 11894 - DNA, 25 bp, Saccharomyces pastorianus
ttgaggcagctgtgcacggaccagt

SEQ ID NO: 11895 - DNA, 25 bp, Saccharomyces pastorianus
taagctccagcgtgatgccacagag

SEQ ID NO: 11896 - DNA, 25 bp, Saccharomyces pastorianus
acgatgttcatctaccaaacgctca

SEQ ID NO: 11897 - DNA, 25 bp, Saccharomyces pastorianus
gtatttgattctcgctagcacactg

SEQ ID NO: 11898 - DNA, 25 bp, Saccharomyces pastorianus
ggtatactgcctgtacagcgactac

SEQ ID NO: 11899 - DNA, 25 bp, Saccharomyces pastorianus
gaagttcgttgccataagctccagc

SEQ ID NO: 11900 - DNA, 25 bp, Saccharomyces pastorianus
gccaccgtttgggacctgctaagaa

SEQ ID NO: 11901 - DNA, 25 bp, Saccharomyces pastorianus
acacttccgggatatgcagaatggt

SEQ ID NO: 11902 - DNA, 25 bp, Saccharomyces pastorianus
atgccgataaagaggatttcccgcg

SEQ ID NO: 11903 - DNA, 25 bp, Saccharomyces pastorianus
aataacctccgaatttactgtgaat

SEQ ID NO: 11904 - DNA, 25 bp, Saccharomyces pastorianus
attctgtacgtttctggatctgcgg

SEQ ID NO: 11905 - DNA, 25 bp, Saccharomyces pastorianus
tccactgaacctcttttgactgtag

SEQ ID NO: 11906 - DNA, 25 bp, Saccharomyces pastorianus
gggcaaaaattcacttccactgaac

SEQ ID NO: 11907 - DNA, 25 bp, Saccharomyces pastorianus
agcacgaacttttatccgatgccac

SEQ ID NO: 11908 - DNA, 25 bp, Saccharomyces pastorianus
agaatgggttttccaagctatcgaa

SEQ ID NO: 11909 - DNA, 25 bp, Saccharomyces pastorianus
gtttttgttgtatttcactcacgta

SEQ ID NO: 11910 - DNA, 25 bp, Saccharomyces pastorianus
gtaaatttcctgcatacttcgaatt

SEQ ID NO: 11911 - DNA, 25 bp, Saccharomyces pastorianus
tttaccacaaataatgaccctgccc

SEQ ID NO: 11912 - DNA, 25 bp, Saccharomyces pastorianus
gtaacccaaccatcaccaatattga

SEQ ID NO: 11913 - DNA, 25 bp, Saccharomyces pastorianus
atcccttctgaagctacggttacaa

SEQ ID NO: 11914 - DNA, 25 bp, Saccharomyces pastorianus
cacagcctcagttgagctctacaaa

SEQ ID NO: 11915 - DNA, 25 bp, Saccharomyces pastorianus
gaatcgagtatcatccgcgaactac

SEQ ID NO: 11916 - DNA, 25 bp, Saccharomyces pastorianus
acgccaatgccgttaatggtactca

SEQ ID NO: 11917 - DNA, 25 bp, Saccharomyces pastorianus
atttagatcacaacaagggcttcct

SEQ ID NO: 11918 - DNA, 25 bp, Saccharomyces pastorianus
ttctcaacaccaattacaaccacag

SEQ ID NO: 11919 - DNA, 25 bp, Saccharomyces pastorianus
aacctttttcgaacaatggcagcaa

SEQ ID NO: 11920 - DNA, 25 bp, Saccharomyces pastorianus
agcgaaattcgggatcccttctgaa

SEQ ID NO: 11921 - DNA, 25 bp, Saccharomyces pastorianus
gattctgctccatgtgttaaccaac

SEQ ID NO: 11922 - DNA, 25 bp, Saccharomyces pastorianus
ggtcatctgacttaaggaggcacga

SEQ ID NO: 11923 - DNA, 25 bp, Saccharomyces pastorianus
gtaaagctcaagatcgtcgaaatag

SEQ ID NO: 11924 - DNA, 25 bp, Saccharomyces pastorianus
ccccagtgtggcaaaggtttcgcga

SEQ ID NO: 11925 - DNA, 25 bp, Saccharomyces pastorianus
agcaatcgtggatatatcgctagat

SEQ ID NO: 11926 - DNA, 25 bp, Saccharomyces pastorianus
tggaggaccaagattcagcatttat

SEQ ID NO: 11927 - DNA, 25 bp, Saccharomyces pastorianus
gaggccactcgcgtcaacagaaaat

SEQ ID NO: 11928 - DNA, 25 bp, Saccharomyces pastorianus
gcagtctaatattgctagtcgtgag

SEQ ID NO: 11929 - DNA, 25 bp, Saccharomyces pastorianus
gaatacacaaaacacatcacagcat

SEQ ID NO: 11930 - DNA, 25 bp, Saccharomyces pastorianus
gtgcaaaatgctccttagagttttc

SEQ ID NO: 11931 - DNA, 25 bp, Saccharomyces pastorianus
attggtactcataatgggatcgcga

SEQ ID NO: 11932 - DNA, 25 bp, Saccharomyces pastorianus
tagagttttcaaggtcatctgactt

SEQ ID NO: 11933 - DNA, 25 bp, Saccharomyces pastorianus
aatgacgcagcaagctcctttggat

SEQ ID NO: 11934 - DNA, 25 bp, Saccharomyces pastorianus
gcatgtcaccacgtcatttctaaaa

SEQ ID NO: 11935 - DNA, 25 bp, Saccharomyces pastorianus
ttatttttgatcgtcctaagcgggc

SEQ ID NO: 11936 - DNA, 25 bp, Saccharomyces pastorianus
aagtgcccatactgtccagtgaaca

SEQ ID NO: 11937 - DNA, 25 bp, Saccharomyces pastorianus
taagcgggctgatttctttccaatt

SEQ ID NO: 11938 - DNA, 25 bp, Saccharomyces pastorianus
gtgccattgctaactaaatcgctca

SEQ ID NO: 11939 - DNA, 25 bp, Saccharomyces pastorianus
gctccgcaaagcacattttcttcaa

SEQ ID NO: 11940 - DNA, 25 bp, Saccharomyces pastorianus
atcgctcataggacaacccgttgaa

SEQ ID NO: 11941 - DNA, 25 bp, Saccharomyces pastorianus
agcgcatgtggattggactactaaa

SEQ ID NO: 11942 - DNA, 25 bp, Saccharomyces pastorianus
tttccatccgatttttatttgtcca

SEQ ID NO: 11943 - DNA, 25 bp, Saccharomyces pastorianus
gaatcctgtggaagtttatcatcaa

SEQ ID NO: 11944 - DNA, 25 bp, Saccharomyces pastorianus
gcaaaggactggctaactgacaaag

SEQ ID NO: 11945 - DNA, 25 bp, Saccharomyces pastorianus
gaaaagatcttatccaccagaattt

SEQ ID NO: 11946 - DNA, 25 bp, Saccharomyces pastorianus
gaattcaatggcaaccttcttatta

SEQ ID NO: 11947 - DNA, 25 bp, Saccharomyces pastorianus
cgcaccctgatgtctccaaattgtt

SEQ ID NO: 11948 - DNA, 25 bp, Saccharomyces pastorianus
gtaagattgataccccaactaagga

SEQ ID NO: 11949 - DNA, 25 bp, Saccharomyces pastorianus
agccttattcagttgttttattcga

SEQ ID NO: 11950 - DNA, 25 bp, Saccharomyces pastorianus
attgtaatgacttcgaatatcggac

SEQ ID NO: 11951 - DNA, 25 bp, Saccharomyces pastorianus
tctagttttcaacaggttatccaag

SEQ ID NO: 11952 - DNA, 25 bp, Saccharomyces pastorianus
aaattgactgattctttagggcatc

SEQ ID NO: 11953 - DNA, 25 bp, Saccharomyces pastorianus
atgatccgatctatggtgcaagacc

SEQ ID NO: 11954 - DNA, 25 bp, Saccharomyces pastorianus
tgaagaaattcaggaccggttggct

SEQ ID NO: 11955 - DNA, 25 bp, Saccharomyces pastorianus
ggccatggaggataacgctcgcaat

SEQ ID NO: 11956 - DNA, 25 bp, Saccharomyces pastorianus
gagattcatttttccaataccggca

SEQ ID NO: 11957 - DNA, 25 bp, Saccharomyces pastorianus
acgggttctattttcgatgggcgcg

SEQ ID NO: 11958 - DNA, 25 bp, Saccharomyces pastorianus
gattggaatctctttaacggtatgg

SEQ ID NO: 11959 - DNA, 25 bp, Saccharomyces pastorianus
tgggcgcgttacacagttggcatat

SEQ ID NO: 11960 - DNA, 25 bp, Saccharomyces pastorianus
gtaaccgttattggaactcatttca

SEQ ID NO: 11961 - DNA, 25 bp, Saccharomyces pastorianus
tactagcacttccagacgaaatcgg

SEQ ID NO: 11962 - DNA, 25 bp, Saccharomyces pastorianus
caccacaccacatcttatatgcaga

SEQ ID NO: 11963 - DNA, 25 bp, Saccharomyces pastorianus
tgccgggcgcgcgtttgatcattct

SEQ ID NO: 11964 - DNA, 25 bp, Saccharomyces pastorianus
ttccaataccggcatttatcagcac

SEQ ID NO: 11965 - DNA, 25 bp, Saccharomyces pastorianus
aaatcggaaatgttgctatggccat

SEQ ID NO: 11966 - DNA, 25 bp, Saccharomyces pastorianus
tataatacgacactgttcaccaccg

SEQ ID NO: 11967 - DNA, 25 bp, Saccharomyces pastorianus
ttcccttcgccctttgataattata

SEQ ID NO: 11968 - DNA, 25 bp, Saccharomyces pastorianus
gattaccgtaatcgtgtcaggcaat

SEQ ID NO: 11969 - DNA, 25 bp, Saccharomyces pastorianus
gggtgcacgatatgatggctcctat

SEQ ID NO: 11970 - DNA, 25 bp, Saccharomyces pastorianus
ataagtacaacttccatcccattct

SEQ ID NO: 11971 - DNA, 25 bp, Saccharomyces pastorianus
gaatggtcgggtgccattaccgatt

SEQ ID NO: 11972 - DNA, 25 bp, Saccharomyces pastorianus
gtgtgcctcacaaaaacccttaagc

SEQ ID NO: 11973 - DNA, 25 bp, Saccharomyces pastorianus
taccgattgcgccacctggttgaat

SEQ ID NO: 11974 - DNA, 25 bp, Saccharomyces pastorianus
taaaccagctggtacgtgtgcctca

SEQ ID NO: 11975 - DNA, 25 bp, Saccharomyces pastorianus
aaagacgcagaactgttcccttcgc

SEQ ID NO: 11976 - DNA, 25 bp, Saccharomyces pastorianus
gtttttcatcctctttatctacaca

SEQ ID NO: 11977 - DNA, 25 bp, Saccharomyces pastorianus
acaagcgatgtaaacgcgcctttat

SEQ ID NO: 11978 - DNA, 25 bp, Saccharomyces pastorianus
gaattctgtattctcccacaagttc

SEQ ID NO: 11979 - DNA, 25 bp, Saccharomyces pastorianus
aatgatgcaatactggctcccgttc

SEQ ID NO: 11980 - DNA, 25 bp, Saccharomyces pastorianus
aaacgtcaaggatttctggcttaca

SEQ ID NO: 11981 - DNA, 25 bp, Saccharomyces pastorianus
gtctttttagtactcttgtgggcct

SEQ ID NO: 11982 - DNA, 25 bp, Saccharomyces pastorianus
ggatttgctccttcaattgagttgg

SEQ ID NO: 11983 - DNA, 25 bp, Saccharomyces pastorianus
atggtgctgacggtatatcttttaa

SEQ ID NO: 11984 - DNA, 25 bp, Saccharomyces pastorianus
taaagccttactcaacgggacagaa

SEQ ID NO: 11985 - DNA, 25 bp, Saccharomyces pastorianus
ggccttgttgcaatctgtttgggtt

SEQ ID NO: 11986 - DNA, 25 bp, Saccharomyces pastorianus
agtcgactacttcaagctttacaag

SEQ ID NO: 11987 - DNA, 25 bp, Saccharomyces pastorianus
tcccgttccaggttcgacattgagg

SEQ ID NO: 11988 - DNA, 25 bp, Saccharomyces pastorianus
taatgtcaccgggttctgcgagagc

SEQ ID NO: 11989 - DNA, 25 bp, Saccharomyces pastorianus
ttggctcacatacgtttgtcagaca

SEQ ID NO: 11990 - DNA, 25 bp, Saccharomyces pastorianus
atctcttgatttacagggaaccctt

SEQ ID NO: 11991 - DNA, 25 bp, Saccharomyces pastorianus
taagctctaccttagggtcgtggat

SEQ ID NO: 11992 - DNA, 25 bp, Saccharomyces pastorianus
gagaggcccgaatgtcctttatgta

SEQ ID NO: 11993 - DNA, 25 bp, Saccharomyces pastorianus
catctgttctgctgggactgtctga

SEQ ID NO: 11994 - DNA, 25 bp, Saccharomyces pastorianus
gaaaggtgccccaggttcgaatgta

SEQ ID NO: 11995 - DNA, 25 bp, Saccharomyces pastorianus
ggacatgactgatcctagctgcaca

SEQ ID NO: 11996 - DNA, 25 bp, Saccharomyces pastorianus
aagtggtatccagttctaagctcta

SEQ ID NO: 11997 - DNA, 25 bp, Saccharomyces pastorianus
tgccctatatcgcagaagcttcgag

SEQ ID NO: 11998 - DNA, 25 bp, Saccharomyces pastorianus
gtgttagacttgcatatgaccctat

SEQ ID NO: 11999 - DNA, 25 bp, Saccharomyces pastorianus
ttctcaaccaattagttatcgggct

SEQ ID NO: 12000 - DNA, 25 bp, Saccharomyces pastorianus
tatcgggctacttccaataacgcag

SEQ ID NO: 12001 - DNA, 25 bp, Saccharomyces pastorianus
tttaaacttgcctcaattacctcca

SEQ ID NO: 12002 - DNA, 25 bp, Saccharomyces pastorianus
aaaaaactcgtcatctgctgcttcg

SEQ ID NO: 12003 - DNA, 25 bp, Saccharomyces pastorianus
tccttgccatccttatcgagtgacc

SEQ ID NO: 12004 - DNA, 25 bp, Saccharomyces pastorianus
gagaatgccaatgtccacgatgatt

SEQ ID NO: 12005 - DNA, 25 bp, Saccharomyces pastorianus
taacgcagttgctttttctccaacg

SEQ ID NO: 12006 - DNA, 25 bp, Saccharomyces pastorianus
gaaaagccctgcagcatcgtatgat

SEQ ID NO: 12007 - DNA, 25 bp, Saccharomyces pastorianus
atagacctcaggctgcagatccaaa

SEQ ID NO: 12008 - DNA, 25 bp, Saccharomyces pastorianus
aagctcttgagcgacagacctcctt

SEQ ID NO: 12009 - DNA, 25 bp, Saccharomyces pastorianus
gtgacccctcactttcaatgtcaat

SEQ ID NO: 12010 - DNA, 25 bp, Saccharomyces pastorianus
acaggccgcagatattcttctttat

SEQ ID NO: 12011 - DNA, 25 bp, Saccharomyces pastorianus
gacgagcccaagactattcagaaaa

SEQ ID NO: 12012 - DNA, 25 bp, Saccharomyces pastorianus
gagtgatccaaaccacgattcagtg

SEQ ID NO: 12013 - DNA, 25 bp, Saccharomyces pastorianus
taaatctacgcatgttccggttggc

SEQ ID NO: 12014 - DNA, 25 bp, Saccharomyces pastorianus
aaggcaccttgctgacaaattcaat

SEQ ID NO: 12015 - DNA, 25 bp, Saccharomyces pastorianus
aagcctatcacgatgctggcgcaaa

SEQ ID NO: 12016 - DNA, 25 bp, Saccharomyces pastorianus
gtggaagatgtgtcccggttcaaca

SEQ ID NO: 12017 - DNA, 25 bp, Saccharomyces pastorianus
gaacggccaggtgtatccaatctaa

SEQ ID NO: 12018 - DNA, 25 bp, Saccharomyces pastorianus
gacaggttttattatgaccccgtag

SEQ ID NO: 12019 - DNA, 25 bp, Saccharomyces pastorianus
ggcgatgatcaatctcaacacttgg

SEQ ID NO: 12020 - DNA, 25 bp, Saccharomyces pastorianus
aagactgatttctttcccaagccta

SEQ ID NO: 12021 - DNA, 25 bp, Saccharomyces pastorianus
cgattcttcgagttcaatgacctat

SEQ ID NO: 12022 - DNA, 25 bp, Saccharomyces pastorianus
gtttctgttcagcatctttcagttg

SEQ ID NO: 12023 - DNA, 25 bp, Saccharomyces pastorianus
aagagatcatccctagtgtcgtcgc

SEQ ID NO: 12024 - DNA, 25 bp, Saccharomyces pastorianus
tagtggacgccattgatctgtttct

SEQ ID NO: 12025 - DNA, 25 bp, Saccharomyces pastorianus
gctttgctccttgggtgtgatcata

SEQ ID NO: 12026 - DNA, 25 bp, Saccharomyces pastorianus
tgctgaacgaatcctccgaatcatt

SEQ ID NO: 12027 - DNA, 25 bp, Saccharomyces pastorianus
gatctgtttctttatatatgccggt

SEQ ID NO: 12028 - DNA, 25 bp, Saccharomyces pastorianus
gcctttgataaggtcgtctcactga

SEQ ID NO: 12029 - DNA, 25 bp, Saccharomyces pastorianus
ggtactgctttagacgcggacacaa

SEQ ID NO: 12030 - DNA, 25 bp, Saccharomyces pastorianus
attacggctgtaaactggtccatta

SEQ ID NO: 12031 - DNA, 25 bp, Saccharomyces pastorianus
actgacgtgccattgcgggatttta

SEQ ID NO: 12032 - DNA, 25 bp, Saccharomyces pastorianus
atggattcctccaagatcatcaaca

SEQ ID NO: 12033 - DNA, 25 bp, Saccharomyces pastorianus
agtcgctgtttttctagcccgtgga

SEQ ID NO: 12034 - DNA, 25 bp, Saccharomyces pastorianus
tcttttcttacctccagtcgctgtt

SEQ ID NO: 12035 - DNA, 25 bp, Saccharomyces pastorianus
atctcttttcttacctccagtcgct

SEQ ID NO: 12036 - DNA, 25 bp, Saccharomyces pastorianus
gctgtttttctagcccgtggatggg

SEQ ID NO: 12037 - DNA, 25 bp, Saccharomyces pastorianus
tctcttttcttacctccagtcgctg

SEQ ID NO: 12038 - DNA, 25 bp, Saccharomyces pastorianus
tcctccaagatcatcaacattatat

SEQ ID NO: 12039 - DNA, 25 bp, Saccharomyces pastorianus
ccattttggcgtggttcccaggtat

SEQ ID NO: 12040 - DNA, 25 bp, Saccharomyces pastorianus
gggtactgactgtatagtggacatt

SEQ ID NO: 12041 - DNA, 25 bp, Saccharomyces pastorianus
ggacattattttgaccattttggcg

SEQ ID NO: 12042 - DNA, 25 bp, Saccharomyces pastorianus
ggattcctccaagatcatcaacatt

SEQ ID NO: 12043 - DNA, 25 bp, Saccharomyces pastorianus
aatatgccccagttcagattaaaat

SEQ ID NO: 12044 - DNA, 25 bp, Saccharomyces pastorianus
aacttgaagagacctgacatgccac

SEQ ID NO: 12045 - DNA, 25 bp, Saccharomyces pastorianus
aaaggctacaatatggtcgcagtgc

SEQ ID NO: 12046 - DNA, 25 bp, Saccharomyces pastorianus
gtcgcagtgccaggcgcaagtttac

SEQ ID NO: 12047 - DNA, 25 bp, Saccharomyces pastorianus
aattattgccattgtattctagcga

SEQ ID NO: 12048 - DNA, 25 bp, Saccharomyces pastorianus
cacattggtcaattcggatctatac

SEQ ID NO: 12049 - DNA, 25 bp, Saccharomyces pastorianus
aaccataatgaatctgtccaagcca

SEQ ID NO: 12050 - DNA, 25 bp, Saccharomyces pastorianus
ataccgcgtaggaacagctcagaaa

SEQ ID NO: 12051 - DNA, 25 bp, Saccharomyces pastorianus
gaagccaatctggactatgaattca

SEQ ID NO: 12052 - DNA, 25 bp, Saccharomyces pastorianus
aattgatgatgagggcgggcacccc

SEQ ID NO: 12053 - DNA, 25 bp, Saccharomyces pastorianus
tgacatgccacctccaagtctaata

SEQ ID NO: 12054 - DNA, 25 bp, Saccharomyces pastorianus
ggctactaatcttttggtttctttg

SEQ ID NO: 12055 - DNA, 25 bp, Saccharomyces pastorianus
ccaagctttcccatacttagacatg

SEQ ID NO: 12056 - DNA, 25 bp, Saccharomyces pastorianus
tctacgctgtcttgaaagtgggctt

SEQ ID NO: 12057 - DNA, 25 bp, Saccharomyces pastorianus
gattacgcctgcactaataacgaga

SEQ ID NO: 12058 - DNA, 25 bp, Saccharomyces pastorianus
ggtttctttgatcccgaaggcggct

SEQ ID NO: 12059 - DNA, 25 bp, Saccharomyces pastorianus
aattcgcgactatcatgacttgcta

SEQ ID NO: 12060 - DNA, 25 bp, Saccharomyces pastorianus
actggagccatatttctctacgctg

SEQ ID NO: 12061 - DNA, 25 bp, Saccharomyces pastorianus
caaatggcggttctgtgtctgtaaa

SEQ ID NO: 12062 - DNA, 25 bp, Saccharomyces pastorianus
gagaggtttcttacaattcgcgact

SEQ ID NO: 12063 - DNA, 25 bp, Saccharomyces pastorianus
gaattttcaccaagttcgacggatg

SEQ ID NO: 12064 - DNA, 25 bp, Saccharomyces pastorianus
gaaaactatcaaaccaccgacgagt

SEQ ID NO: 12065 - DNA, 25 bp, Saccharomyces pastorianus
tcggaatttattcctaactcttcga

SEQ ID NO: 12066 - DNA, 25 bp, Saccharomyces pastorianus
aattgattcctcatctaacaggccg

SEQ ID NO: 12067 - DNA, 25 bp, Saccharomyces pastorianus
ctctcccattcaaatcaagccagtg

SEQ ID NO: 12068 - DNA, 25 bp, Saccharomyces pastorianus
aagttctacgaaaccatcgggctca

SEQ ID NO: 12069 - DNA, 25 bp, Saccharomyces pastorianus
gcctagggtcgatcatacagccaaa

SEQ ID NO: 12070 - DNA, 25 bp, Saccharomyces pastorianus
atgagtttgatctttcttcgtcttc

SEQ ID NO: 12071 - DNA, 25 bp, Saccharomyces pastorianus
atttcatgaaacctccaatctcttc

SEQ ID NO: 12072 - DNA, 25 bp, Saccharomyces pastorianus
taacaggccgcctagggtcgatcat

SEQ ID NO: 12073 - DNA, 25 bp, Saccharomyces pastorianus
gatgacttagagcttaccaatccct

SEQ ID NO: 12074 - DNA, 25 bp, Saccharomyces pastorianus
gaaaagcaagacatcactgccgaaa

SEQ ID NO: 12075 - DNA, 25 bp, Saccharomyces pastorianus
cttcgtcttccaatgatgacttaga

SEQ ID NO: 12076 - DNA, 25 bp, Saccharomyces pastorianus
acggtatgctcgatgcttactggga

SEQ ID NO: 12077 - DNA, 25 bp, Saccharomyces pastorianus
gtggacccaatcgatggcactacta

SEQ ID NO: 12078 - DNA, 25 bp, Saccharomyces pastorianus
aattttatccatggctatccttata

SEQ ID NO: 12079 - DNA, 25 bp, Saccharomyces pastorianus
atagttgtacttcgctgggtctggc

SEQ ID NO: 12080 - DNA, 25 bp, Saccharomyces pastorianus
ggcgcagtttttaatccacatttaa

SEQ ID NO: 12081 - DNA, 25 bp, Saccharomyces pastorianus
tgcttggtgcatcctgagagagact

SEQ ID NO: 12082 - DNA, 25 bp, Saccharomyces pastorianus
acatatgctatgtcgctaacggtat

SEQ ID NO: 12083 - DNA, 25 bp, Saccharomyces pastorianus
aaatttgctcagtgagtcgggcgcc

SEQ ID NO: 12084 - DNA, 25 bp, Saccharomyces pastorianus
gaagatgctatttcgccatcagaag

SEQ ID NO: 12085 - DNA, 25 bp, Saccharomyces pastorianus
gagaaccggtagttggcgcagtttt

SEQ ID NO: 12086 - DNA, 25 bp, Saccharomyces pastorianus
tcaacttttccatgcctcgaaaggc

SEQ ID NO: 12087 - DNA, 25 bp, Saccharomyces pastorianus
agccgttgggacataggtctcagag

SEQ ID NO: 12088 - DNA, 25 bp, Saccharomyces pastorianus
agctgaattcgggttgggatctctt

SEQ ID NO: 12089 - DNA, 25 bp, Saccharomyces pastorianus
gatgatctgataaaggccctggaaa

SEQ ID NO: 12090 - DNA, 25 bp, Saccharomyces pastorianus
actgatcaggatcttgcttacaagg

SEQ ID NO: 12091 - DNA, 25 bp, Saccharomyces pastorianus
atttggtattcccagtgatggctca

SEQ ID NO: 12092 - DNA, 25 bp, Saccharomyces pastorianus
atatcttgcaccaggagttgatcaa

SEQ ID NO: 12093 - DNA, 25 bp, Saccharomyces pastorianus
gggatcctaaccgttattctatgca

SEQ ID NO: 12094 - DNA, 25 bp, Saccharomyces pastorianus
gagcattcgcacttacgaggagctg

SEQ ID NO: 12095 - DNA, 25 bp, Saccharomyces pastorianus
ttttgctaaacaacgctccatattt

SEQ ID NO: 12096 - DNA, 25 bp, Saccharomyces pastorianus
tgatggctcaaagattcctatactg

SEQ ID NO: 12097 - DNA, 25 bp, Saccharomyces pastorianus
aggctagaagcttacgtgatgatat

SEQ ID NO: 12098 - DNA, 25 bp, Saccharomyces pastorianus
tagacgttgacgaccatgatggtgc

SEQ ID NO: 12099 - DNA, 25 bp, Saccharomyces pastorianus
ttttgacgaggaacagagcatgctg

SEQ ID NO: 12100 - DNA, 25 bp, Saccharomyces pastorianus
ggaagatcctggtgacgattctcat

SEQ ID NO: 12101 - DNA, 25 bp, Saccharomyces pastorianus
caacggcaacagttatggacttgat

SEQ ID NO: 12102 - DNA, 25 bp, Saccharomyces pastorianus
gacatgacaggccatgatgatcata

SEQ ID NO: 12103 - DNA, 25 bp, Saccharomyces pastorianus
gaagctacaaagtgcactagacgac

SEQ ID NO: 12104 - DNA, 25 bp, Saccharomyces pastorianus
tatctgcgaaggatccatctaggtt

SEQ ID NO: 12105 - DNA, 25 bp, Saccharomyces pastorianus
gtgacgattctcattctgagctaaa

SEQ ID NO: 12106 - DNA, 25 bp, Saccharomyces pastorianus
gtatttctaacgataatggccatta

SEQ ID NO: 12107 - DNA, 25 bp, Saccharomyces pastorianus
gatgacgatgaatccaacggcaaca

SEQ ID NO: 12108 - DNA, 25 bp, Saccharomyces pastorianus
atggccattatgagctagacgttga

SEQ ID NO: 12109 - DNA, 25 bp, Saccharomyces pastorianus
ttagcacaactcatggacgattcac

SEQ ID NO: 12110 - DNA, 25 bp, Saccharomyces pastorianus
tatggtggctctgacttagtgacta

SEQ ID NO: 12111 - DNA, 25 bp, Saccharomyces pastorianus
gaaactagcgttctggctactgcaa

SEQ ID NO: 12112 - DNA, 25 bp, Saccharomyces pastorianus
aaatatgcccacgatcaaagctttg

SEQ ID NO: 12113 - DNA, 25 bp, Saccharomyces pastorianus
aaggtcctaattgttgcctgtgaca

SEQ ID NO: 12114 - DNA, 25 bp, Saccharomyces pastorianus
gacgattcacatgtgcgtggttcta

SEQ ID NO: 12115 - DNA, 25 bp, Saccharomyces pastorianus
gatctggtgcagtcgaacaacttag

SEQ ID NO: 12116 - DNA, 25 bp, Saccharomyces pastorianus
atgtcgccattgaaatcgtttgctg

SEQ ID NO: 12117 - DNA, 25 bp, Saccharomyces pastorianus
gtttgctgaccaggctaaaccagat

SEQ ID NO: 12118 - DNA, 25 bp, Saccharomyces pastorianus
gcctgtgacacgttcagatctggtg

SEQ ID NO: 12119 - DNA, 25 bp, Saccharomyces pastorianus
gtaggtacagattccgtccaacaag

SEQ ID NO: 12120 - DNA, 25 bp, Saccharomyces pastorianus
aaagagatatagacatgccatgacc

SEQ ID NO: 12121 - DNA, 25 bp, Saccharomyces pastorianus
gaatctacattagcaaccaagttga

SEQ ID NO: 12122 - DNA, 25 bp, Saccharomyces pastorianus
aagttcccgtagaaagctcaaagag

SEQ ID NO: 12123 - DNA, 25 bp, Saccharomyces pastorianus
aagcactacaggaagccaatgcgga

SEQ ID NO: 12124 - DNA, 25 bp, Saccharomyces pastorianus
gatgaattacgtttccaatatcaaa

SEQ ID NO: 12125 - DNA, 25 bp, Saccharomyces pastorianus
ctgcggaatcagctcaaactttgaa

SEQ ID NO: 12126 - DNA, 25 bp, Saccharomyces pastorianus
gtgtcccggaaatagttcatctgaa

SEQ ID NO: 12127 - DNA, 25 bp, Saccharomyces pastorianus
cgctacaactagtacacggttcaga

SEQ ID NO: 12128 - DNA, 25 bp, Saccharomyces pastorianus
gccatgaccgaatctaccaagctag

SEQ ID NO: 12129 - DNA, 25 bp, Saccharomyces pastorianus
gaatcttcaaaagctgcggaatcag

SEQ ID NO: 12130 - DNA, 25 bp, Saccharomyces pastorianus
gaactttagtgaattgtgtcccgga

SEQ ID NO: 12131 - DNA, 25 bp, Saccharomyces pastorianus
aacgggcatgtctggtacagcggac

SEQ ID NO: 12132 - DNA, 25 bp, Saccharomyces pastorianus
gaagatgttcgagggcagcgcacaa

SEQ ID NO: 12133 - DNA, 25 bp, Saccharomyces pastorianus
ccgccccaagtgtacattttcagga

SEQ ID NO: 12134 - DNA, 25 bp, Saccharomyces pastorianus
tttttcgcagaaccagcttgacaag

SEQ ID NO: 12135 - DNA, 25 bp, Saccharomyces pastorianus
tgtaccaaaacctctgccgattgag

SEQ ID NO: 12136 - DNA, 25 bp, Saccharomyces pastorianus
attaccagcagagcgtccaactgta

SEQ ID NO: 12137 - DNA, 25 bp, Saccharomyces pastorianus
cagcggacaatataggcccacgttt

SEQ ID NO: 12138 - DNA, 25 bp, Saccharomyces pastorianus
aagtgctgtattctcagttccccaa

SEQ ID NO: 12139 - DNA, 25 bp, Saccharomyces pastorianus
aaaatactggagctccggcgtgttc

SEQ ID NO: 12140 - DNA, 25 bp, Saccharomyces pastorianus
cttgacaagctgttcgtgaggccga

SEQ ID NO: 12141 - DNA, 25 bp, Saccharomyces pastorianus
gccgattgagatatctgcgcgacgt

SEQ ID NO: 12142 - DNA, 25 bp, Saccharomyces pastorianus
aaaggtactgtgacgagtgccgaac

SEQ ID NO: 12143 - DNA, 25 bp, Saccharomyces pastorianus
tggacgggtacgtcgtcaacttgtt

SEQ ID NO: 12144 - DNA, 25 bp, Saccharomyces pastorianus
tgtccctccaccagtgagattattc

SEQ ID NO: 12145 - DNA, 25 bp, Saccharomyces pastorianus
ttctgccttccaatctttgcaaaag

SEQ ID NO: 12146 - DNA, 25 bp, Saccharomyces pastorianus
tattaatgccatcgtggacactcac

SEQ ID NO: 12147 - DNA, 25 bp, Saccharomyces pastorianus
attcatcgattgattctgccttcca

SEQ ID NO: 12148 - DNA, 25 bp, Saccharomyces pastorianus
aaaaccgcggcttccaaagttgctg

SEQ ID NO: 12149 - DNA, 25 bp, Saccharomyces pastorianus
agaatcctgcattgtcgttgcatga

SEQ ID NO: 12150 - DNA, 25 bp, Saccharomyces pastorianus
aactgctttataccaggctgctgcg

SEQ ID NO: 12151 - DNA, 25 bp, Saccharomyces pastorianus
gagtgccgaacctttagatcctaaa

SEQ ID NO: 12152 - DNA, 25 bp, Saccharomyces pastorianus
gactgtcgacttaagtatctctaca

SEQ ID NO: 12153 - DNA, 25 bp, Saccharomyces pastorianus
tgataccagcgaaaacccgtacgtt

SEQ ID NO: 12154 - DNA, 25 bp, Saccharomyces pastorianus
taccagagctggcatctcaaaatgt

SEQ ID NO: 12155 - DNA, 25 bp, Saccharomyces pastorianus
agaggaggaccaacatgccggagaa

SEQ ID NO: 12156 - DNA, 25 bp, Saccharomyces pastorianus
ctctgttcaagatcctatagcaaat

SEQ ID NO: 12157 - DNA, 25 bp, Saccharomyces pastorianus
attatgaagcacctatttcttcggg

SEQ ID NO: 12158 - DNA, 25 bp, Saccharomyces pastorianus
gcagctattacaatcactacggcca

SEQ ID NO: 12159 - DNA, 25 bp, Saccharomyces pastorianus
gataataactccattgataccagcg

SEQ ID NO: 12160 - DNA, 25 bp, Saccharomyces pastorianus
tacggccaattctcgctcgaataac

SEQ ID NO: 12161 - DNA, 25 bp, Saccharomyces pastorianus
gatgacgggctcgatattccaaaaa

SEQ ID NO: 12162 - DNA, 25 bp, Saccharomyces pastorianus
tttttgcagggctaatgggccaaag

SEQ ID NO: 12163 - DNA, 25 bp, Saccharomyces pastorianus
aaacatcgacacgaaggcttccaaa

SEQ ID NO: 12164 - DNA, 25 bp, Saccharomyces pastorianus
tgctcaagttccatcgtttcagaat

SEQ ID NO: 12165 - DNA, 25 bp, Saccharomyces pastorianus
tgaggaatttggctctgctcaagtt

SEQ ID NO: 12166 - DNA, 25 bp, Saccharomyces pastorianus
gatcattgaccgagaattacagtta

SEQ ID NO: 12167 - DNA, 25 bp, Saccharomyces pastorianus
tattcaagctagttcctttaagcga

SEQ ID NO: 12168 - DNA, 25 bp, Saccharomyces pastorianus
tttctatcagatgggtcacgcaatg

SEQ ID NO: 12169 - DNA, 25 bp, Saccharomyces pastorianus
aagcaggacgacaggcacattttga

SEQ ID NO: 12170 - DNA, 25 bp, Saccharomyces pastorianus
aagattggccaatgatttctatcag

SEQ ID NO: 12171 - DNA, 25 bp, Saccharomyces pastorianus
tatacgaagattcagcgggctagct

SEQ ID NO: 12172 - DNA, 25 bp, Saccharomyces pastorianus
ttcacgttgcattccgttaatagtt

SEQ ID NO: 12173 - DNA, 25 bp, Saccharomyces pastorianus
aggtggactaaatcctcgtatggaa

SEQ ID NO: 12174 - DNA, 25 bp, Saccharomyces pastorianus
aagtcgacggatctgtattcaagct

SEQ ID NO: 12175 - DNA, 25 bp, Saccharomyces pastorianus
taagccttttaatacctgcacaaat

SEQ ID NO: 12176 - DNA, 25 bp, Saccharomyces pastorianus
aatatagatcacgatcgtccgcctg

SEQ ID NO: 12177 - DNA, 25 bp, Saccharomyces pastorianus
tgctttcttagcatatcctgcagtt

SEQ ID NO: 12178 - DNA, 25 bp, Saccharomyces pastorianus
agaattggccaaccccgattgttat

SEQ ID NO: 12179 - DNA, 25 bp, Saccharomyces pastorianus
aaccgttctatttggtgcaccattg

SEQ ID NO: 12180 - DNA, 25 bp, Saccharomyces pastorianus
gacacctctaatgacttttccatat

SEQ ID NO: 12181 - DNA, 25 bp, Saccharomyces pastorianus
tgggtgccacatttctgttgagttt

SEQ ID NO: 12182 - DNA, 25 bp, Saccharomyces pastorianus
attgtctttgatttgcctgggtgcc

SEQ ID NO: 12183 - DNA, 25 bp, Saccharomyces pastorianus
atatcacttgatactactgctctat

SEQ ID NO: 12184 - DNA, 25 bp, Saccharomyces pastorianus
gaaacttggttattgtcgttgcatt

SEQ ID NO: 12185 - DNA, 25 bp, Saccharomyces pastorianus
gatcgtccgcctgtatatgtaagaa

SEQ ID NO: 12186 - DNA, 25 bp, Saccharomyces pastorianus
gatcgtttgagtcttctgaagcggt

SEQ ID NO: 12187 - DNA, 25 bp, Saccharomyces pastorianus
gttagcgttataccaaagatcgttt

SEQ ID NO: 12188 - DNA, 25 bp, Saccharomyces pastorianus
aaatatcaaatttgccggtcatgaa

SEQ ID NO: 12189 - DNA, 25 bp, Saccharomyces pastorianus
gaggtacaggtactacgaccactgt

SEQ ID NO: 12190 - DNA, 25 bp, Saccharomyces pastorianus
gcaagaccttgcctgtaactaattc

SEQ ID NO: 12191 - DNA, 25 bp, Saccharomyces pastorianus
gacagtaaccacagtaacaacgaca

SEQ ID NO: 12192 - DNA, 25 bp, Saccharomyces pastorianus
actctggtcttgatgctgttagcgt

SEQ ID NO: 12193 - DNA, 25 bp, Saccharomyces pastorianus
gaggccaatttggagaatttcggtt

SEQ ID NO: 12194 - DNA, 25 bp, Saccharomyces pastorianus
acgaccactgttgataatgaggcca

SEQ ID NO: 12195 - DNA, 25 bp, Saccharomyces pastorianus
acaactctaccaataacggattcag

SEQ ID NO: 12196 - DNA, 25 bp, Saccharomyces pastorianus
attgcggttctgcaaactctggtct

SEQ ID NO: 12197 - DNA, 25 bp, Saccharomyces pastorianus
aggacaccaacggatcgcaattctt

SEQ ID NO: 12198 - DNA, 25 bp, Saccharomyces pastorianus
gtcatgggtctatatggcctcacca

SEQ ID NO: 12199 - DNA, 25 bp, Saccharomyces pastorianus
ggtagattgtccatggccaaccgtg

SEQ ID NO: 12200 - DNA, 25 bp, Saccharomyces pastorianus
gttcggaccctgagatcacacataa

SEQ ID NO: 12201 - DNA, 25 bp, Saccharomyces pastorianus
ggtgattttacccacagatctggaa

SEQ ID NO: 12202 - DNA, 25 bp, Saccharomyces pastorianus
acatgcccgtgaaggaagtctctat

SEQ ID NO: 12203 - DNA, 25 bp, Saccharomyces pastorianus
aagatgggttacctgcactctatct

SEQ ID NO: 12204 - DNA, 25 bp, Saccharomyces pastorianus
tcttccaccgtgttattccaaattt

SEQ ID NO: 12205 - DNA, 25 bp, Saccharomyces pastorianus
aaatcggtcgtatcgtcatgggtct

SEQ ID NO: 12206 - DNA, 25 bp, Saccharomyces pastorianus
gtggaaaacttctaccaactcacca

SEQ ID NO: 12207 - DNA, 25 bp, Saccharomyces pastorianus
aagtctatctttgggaactccttca

SEQ ID NO: 12208 - DNA, 25 bp, Saccharomyces pastorianus
gaggttgccgatttagtagtttctt

SEQ ID NO: 12209 - DNA, 25 bp, Saccharomyces pastorianus
tgctccaagtggtgtttttctgaat

SEQ ID NO: 12210 - DNA, 25 bp, Saccharomyces pastorianus
gaccatttgtgtttctcctaagtta

SEQ ID NO: 12211 - DNA, 25 bp, Saccharomyces pastorianus
aggctaccctgcttaaagaccattt

SEQ ID NO: 12212 - DNA, 25 bp, Saccharomyces pastorianus
aattccttggatcacgttttcacat

SEQ ID NO: 12213 - DNA, 25 bp, Saccharomyces pastorianus
attctcttactgtcctcaaatcaca

SEQ ID NO: 12214 - DNA, 25 bp, Saccharomyces pastorianus
gaaattgacgcacttgtcctttccc

SEQ ID NO: 12215 - DNA, 25 bp, Saccharomyces pastorianus
agctgtctattttctcgttgttatc

SEQ ID NO: 12216 - DNA, 25 bp, Saccharomyces pastorianus
ggtccttgggtttggcttctaagat

SEQ ID NO: 12217 - DNA, 25 bp, Saccharomyces pastorianus
actgccagggcttccaagatattga

SEQ ID NO: 12218 - DNA, 25 bp, Saccharomyces pastorianus
gatgacctgaccatagccatattag

SEQ ID NO: 12219 - DNA, 25 bp, Saccharomyces pastorianus
gaatagctcttcttttgttaaacga

SEQ ID NO: 12220 - DNA, 25 bp, Saccharomyces pastorianus
aatgccgatctagcgcagtttgcta

SEQ ID NO: 12221 - DNA, 25 bp, Saccharomyces pastorianus
acgagtgctatgacaaccttctaca

SEQ ID NO: 12222 - DNA, 25 bp, Saccharomyces pastorianus
gtgcctgtgcgttttccattataaa

SEQ ID NO: 12223 - DNA, 25 bp, Saccharomyces pastorianus
aaatacgcccgctgcactgaacgat

SEQ ID NO: 12224 - DNA, 25 bp, Saccharomyces pastorianus
gggccagaatgtggaagctctcgaa

SEQ ID NO: 12225 - DNA, 25 bp, Saccharomyces pastorianus
gacccaagactatcgcaagtcgcga

SEQ ID NO: 12226 - DNA, 25 bp, Saccharomyces pastorianus
gaaagcgcaaatgaccgcagctcaa

SEQ ID NO: 12227 - DNA, 25 bp, Saccharomyces pastorianus
gctagtctataagataccgcccatc

SEQ ID NO: 12228 - DNA, 25 bp, Saccharomyces pastorianus
aggaatgtcccatctgttttgaaga

SEQ ID NO: 12229 - DNA, 25 bp, Saccharomyces pastorianus
ttttgccccatttgtaatgccgatc

SEQ ID NO: 12230 - DNA, 25 bp, Saccharomyces pastorianus
gattcgagttggttgcactcaacaa

SEQ ID NO: 12231 - DNA, 25 bp, Saccharomyces pastorianus
gggctctccctttgggatagtttat

SEQ ID NO: 12232 - DNA, 25 bp, Saccharomyces pastorianus
tttcagacagaaacagggccacgct

SEQ ID NO: 12233 - DNA, 25 bp, Saccharomyces pastorianus
ttgggcaatactaggccgttccatt

SEQ ID NO: 12234 - DNA, 25 bp, Saccharomyces pastorianus
gacaataaacctgacggattcgagt

SEQ ID NO: 12235 - DNA, 25 bp, Saccharomyces pastorianus
ggccacgctattcccaaaatcgaaa

SEQ ID NO: 12236 - DNA, 25 bp, Saccharomyces pastorianus
gcgaacagacaatgaagacccctaa

SEQ ID NO: 12237 - DNA, 25 bp, Saccharomyces pastorianus
gatgacgatgtcaagggtctcataa

SEQ ID NO: 12238 - DNA, 25 bp, Saccharomyces pastorianus
cgttccattttacctggtgccagac

SEQ ID NO: 12239 - DNA, 25 bp, Saccharomyces pastorianus
atgaccacttcggttacgagcatgt

SEQ ID NO: 12240 - DNA, 25 bp, Saccharomyces pastorianus
ggtgccagaccattaaaacgtaaga

SEQ ID NO: 12241 - DNA, 25 bp, Saccharomyces pastorianus
accacttggtgtattgttgctaaaa

SEQ ID NO: 12242 - DNA, 25 bp, Saccharomyces pastorianus
tcacatcaactcgatcaccttttta

SEQ ID NO: 12243 - DNA, 25 bp, Saccharomyces pastorianus
gatcacctttttagactcatctgaa

SEQ ID NO: 12244 - DNA, 25 bp, Saccharomyces pastorianus
ttcggcttgtgttcccacgaggatc

SEQ ID NO: 12245 - DNA, 25 bp, Saccharomyces pastorianus
atacaattgtggaggccttcggctt

SEQ ID NO: 12246 - DNA, 25 bp, Saccharomyces pastorianus
gtggagaaatacctacagtcgagta

SEQ ID NO: 12247 - DNA, 25 bp, Saccharomyces pastorianus
gcaacgaaaggtaagtcccctcaag

SEQ ID NO: 12248 - DNA, 25 bp, Saccharomyces pastorianus
gggctgtagatggaaccttgattta

SEQ ID NO: 12249 - DNA, 25 bp, Saccharomyces pastorianus
aacggacgcacttgggtaccacttg

SEQ ID NO: 12250 - DNA, 25 bp, Saccharomyces pastorianus
aaggctgcctttgttgttgggaaag

SEQ ID NO: 12251 - DNA, 25 bp, Saccharomyces pastorianus
gagggttattttactggagcacggt

SEQ ID NO: 12252 - DNA, 25 bp, Saccharomyces pastorianus
ttcttccttagtttgactctactgc

SEQ ID NO: 12253 - DNA, 25 bp, Saccharomyces pastorianus
taccactgccgatatcgagttctga

SEQ ID NO: 12254 - DNA, 25 bp, Saccharomyces pastorianus
aaatgggttcgagcttgccttgtta

SEQ ID NO: 12255 - DNA, 25 bp, Saccharomyces pastorianus
atctggatctgcattctctgggtta

SEQ ID NO: 12256 - DNA, 25 bp, Saccharomyces pastorianus
ttatcctatagtaatcgtcggcccc

SEQ ID NO: 12257 - DNA, 25 bp, Saccharomyces pastorianus
gaaactggctctacatatttatcct

SEQ ID NO: 12258 - DNA, 25 bp, Saccharomyces pastorianus
cggcccctgctccaaaatagagtga

SEQ ID NO: 12259 - DNA, 25 bp, Saccharomyces pastorianus
gagcttgccttgttattatcagtgt

SEQ ID NO: 12260 - DNA, 25 bp, Saccharomyces pastorianus
gttactgccatttactaccatacga

SEQ ID NO: 12261 - DNA, 25 bp, Saccharomyces pastorianus
gctagactggatgtactaccactgc

SEQ ID NO: 12262 - DNA, 25 bp, Saccharomyces pastorianus
gtgattattactatggctgcccaat

SEQ ID NO: 12263 - DNA, 25 bp, Saccharomyces pastorianus
tatacgccatttgttagccaacctg

SEQ ID NO: 12264 - DNA, 25 bp, Saccharomyces pastorianus
aatgaagaagccaacttcctctcct

SEQ ID NO: 12265 - DNA, 25 bp, Saccharomyces pastorianus
agacgcaccctgacaagataccaaa

SEQ ID NO: 12266 - DNA, 25 bp, Saccharomyces pastorianus
tagccaacctgtctagtctactaac

SEQ ID NO: 12267 - DNA, 25 bp, Saccharomyces pastorianus
tcccgttgacaacgcttcgagagta

SEQ ID NO: 12268 - DNA, 25 bp, Saccharomyces pastorianus
accaactccggcaccaatgaagaag

SEQ ID NO: 12269 - DNA, 25 bp, Saccharomyces pastorianus
gcgcgctgaatctttcgagcattta

SEQ ID NO: 12270 - DNA, 25 bp, Saccharomyces pastorianus
aaagatcatgattaggcgcgctgaa

SEQ ID NO: 12271 - DNA, 25 bp, Saccharomyces pastorianus
ttcctgtaaggaaacccagtcctgt

SEQ ID NO: 12272 - DNA, 25 bp, Saccharomyces pastorianus
agctttgttaatcctattcctgtaa

SEQ ID NO: 12273 - DNA, 25 bp, Saccharomyces pastorianus
gtctctgatagaattggctgctgga

SEQ ID NO: 12274 - DNA, 25 bp, Saccharomyces pastorianus
gtgcaggccaatatactgtcgcgca

SEQ ID NO: 12275 - DNA, 25 bp, Saccharomyces pastorianus
gaaccaggagcttgtgaccatcaat

SEQ ID NO: 12276 - DNA, 25 bp, Saccharomyces pastorianus
gattatgggtgcgatttgtgacaac

SEQ ID NO: 12277 - DNA, 25 bp, Saccharomyces pastorianus
gtgaccatcaataatcggaacaaga

SEQ ID NO: 12278 - DNA, 25 bp, Saccharomyces pastorianus
ttgtgacaactaccacagcagcgtt

SEQ ID NO: 12279 - DNA, 25 bp, Saccharomyces pastorianus
agagtgtggcgatcctgaaccagga

SEQ ID NO: 12280 - DNA, 25 bp, Saccharomyces pastorianus
gagaaccctcacgaacaagtgcagg

SEQ ID NO: 12281 - DNA, 25 bp, Saccharomyces pastorianus
acagcagcgttcagttcaacctgga

SEQ ID NO: 12282 - DNA, 25 bp, Saccharomyces pastorianus
atactgtcgcgcataattggtaatg

SEQ ID NO: 12283 - DNA, 25 bp, Saccharomyces pastorianus
ttggtaatgttaagaggctcaacga

SEQ ID NO: 12284 - DNA, 25 bp, Saccharomyces pastorianus
gctcaacgagagtgtggcgatcctg

SEQ ID NO: 12285 - DNA, 25 bp, Saccharomyces pastorianus
ggaatacgccaagttgcagcctgca

SEQ ID NO: 12286 - DNA, 25 bp, Saccharomyces pastorianus
actattgcggtcaatttggaagatc

SEQ ID NO: 12287 - DNA, 25 bp, Saccharomyces pastorianus
gaggaacaagcacaatacgatgaaa

SEQ ID NO: 12288 - DNA, 25 bp, Saccharomyces pastorianus
tgcagcctgcagcaactcttaagga

SEQ ID NO: 12289 - DNA, 25 bp, Saccharomyces pastorianus
aaggacacacctgctactattgcgg

SEQ ID NO: 12290 - DNA, 25 bp, Saccharomyces pastorianus
acctgctactattgcggtcaatttg

SEQ ID NO: 12291 - DNA, 25 bp, Saccharomyces pastorianus
gaagatcctaacattgatttcgaaa

SEQ ID NO: 12292 - DNA, 25 bp, Saccharomyces pastorianus
cggttaatgtcttgaggtactctgc

SEQ ID NO: 12293 - DNA, 25 bp, Saccharomyces pastorianus
gcaactcttaaggacacacctgcta

SEQ ID NO: 12294 - DNA, 25 bp, Saccharomyces pastorianus
ctgcagcaactcttaaggacacacc

SEQ ID NO: 12295 - DNA, 25 bp, Saccharomyces pastorianus
acacacctgctactattgcggtcaa

SEQ ID NO: 12296 - DNA, 25 bp, Saccharomyces pastorianus
ccgaaatgatcagaggcaggtcccc

SEQ ID NO: 12297 - DNA, 25 bp, Saccharomyces pastorianus
ggcagaacaccacagggactccaat

SEQ ID NO: 12298 - DNA, 25 bp, Saccharomyces pastorianus
agcaacttacagaacaactccgatt

SEQ ID NO: 12299 - DNA, 25 bp, Saccharomyces pastorianus
tagcttctagtgttgttctcgtgag

SEQ ID NO: 12300 - DNA, 25 bp, Saccharomyces pastorianus
cagaaggtcatcgagtgggcagaac

SEQ ID NO: 12301 - DNA, 25 bp, Saccharomyces pastorianus
cccagaggaggaagccgccatcaga

SEQ ID NO: 12302 - DNA, 25 bp, Saccharomyces pastorianus
acgcgggctgcaaagttgttgccga

SEQ ID NO: 12303 - DNA, 25 bp, Saccharomyces pastorianus
tgaaatcatcctggcggcaaactac

SEQ ID NO: 12304 - DNA, 25 bp, Saccharomyces pastorianus
tccgaggccaaccacaagagcaaag

SEQ ID NO: 12305 - DNA, 25 bp, Saccharomyces pastorianus
acgatgattccagaaagagcgcccc

SEQ ID NO: 12306 - DNA, 25 bp, Saccharomyces pastorianus
taacatcaagccgttgctggacgcg

SEQ ID NO: 12307 - DNA, 25 bp, Saccharomyces pastorianus
atactcacatcactctgacgtggaa

SEQ ID NO: 12308 - DNA, 25 bp, Saccharomyces pastorianus
ttgacagactcactaaacgctttaa

SEQ ID NO: 12309 - DNA, 25 bp, Saccharomyces pastorianus
ataaagactacattggtactgccca

SEQ ID NO: 12310 - DNA, 25 bp, Saccharomyces pastorianus
atgaaaatttctcctcctcgaagtt

SEQ ID NO: 12311 - DNA, 25 bp, Saccharomyces pastorianus
aagcctctttcgttaagccattatc

SEQ ID NO: 12312 - DNA, 25 bp, Saccharomyces pastorianus
aatgtgttggatttggccctagaaa

SEQ ID NO: 12313 - DNA, 25 bp, Saccharomyces pastorianus
aacattttggccgtgggttctagtg

SEQ ID NO: 12314 - DNA, 25 bp, Saccharomyces pastorianus
aggatccattcgcatgtaggtgtta

SEQ ID NO: 12315 - DNA, 25 bp, Saccharomyces pastorianus
ggtcgctgtcatcgatagattcaca

SEQ ID NO: 12316 - DNA, 25 bp, Saccharomyces pastorianus
gccttttccaagcaatcagttacat

SEQ ID NO: 12317 - DNA, 25 bp, Saccharomyces pastorianus
gtaattcccgatgactcaaagcctc

SEQ ID NO: 12318 - DNA, 25 bp, Saccharomyces pastorianus
aagaatatccatcggctagagcatt

SEQ ID NO: 12319 - DNA, 25 bp, Saccharomyces pastorianus
gatttgaatattcttgccccatttt

SEQ ID NO: 12320 - DNA, 25 bp, Saccharomyces pastorianus
taagggccagagagcactcatgatt

SEQ ID NO: 12321 - DNA, 25 bp, Saccharomyces pastorianus
gagacatgttagatgatccgaatat

SEQ ID NO: 12322 - DNA, 25 bp, Saccharomyces pastorianus
cctgtatgtcttcaccgttatattc

SEQ ID NO: 12323 - DNA, 25 bp, Saccharomyces pastorianus
gttagccaacggttacaatattgat

SEQ ID NO: 12324 - DNA, 25 bp, Saccharomyces pastorianus
ggattcttttcatgaagccctgtat

SEQ ID NO: 12325 - DNA, 25 bp, Saccharomyces pastorianus
agagcatttttatttgagttagcca

SEQ ID NO: 12326 - DNA, 25 bp, Saccharomyces pastorianus
aatgttgtctgacttcagttctcaa

SEQ ID NO: 12327 - DNA, 25 bp, Saccharomyces pastorianus
tatagattgggtgaagtcctcaaat

SEQ ID NO: 12328 - DNA, 25 bp, Saccharomyces pastorianus
gtgttcgtttaattctatcctagtg

SEQ ID NO: 12329 - DNA, 25 bp, Saccharomyces pastorianus
tagggaacccgattgtaacacacca

SEQ ID NO: 12330 - DNA, 25 bp, Saccharomyces pastorianus
tgaaatgccaacacttcccagaatt

SEQ ID NO: 12331 - DNA, 25 bp, Saccharomyces pastorianus
aaggacgtgatactagcatcccgcc

SEQ ID NO: 12332 - DNA, 25 bp, Saccharomyces pastorianus
tgactcgcccggttatgggtttaat

SEQ ID NO: 12333 - DNA, 25 bp, Saccharomyces pastorianus
tctcccagacggttcggtatagact

SEQ ID NO: 12334 - DNA, 25 bp, Saccharomyces pastorianus
gttttctgttacttgccggtgataa

SEQ ID NO: 12335 - DNA, 25 bp, Saccharomyces pastorianus
gggaagtgtcactctacaatacctc

SEQ ID NO: 12336 - DNA, 25 bp, Saccharomyces pastorianus
aactcgcttacatctagtacgtctc

SEQ ID NO: 12337 - DNA, 25 bp, Saccharomyces pastorianus
aactcaggatgattgactcgcccgg

SEQ ID NO: 12338 - DNA, 25 bp, Saccharomyces pastorianus
tgaacatggcgttcctttcgaggtt

SEQ ID NO: 12339 - DNA, 25 bp, Saccharomyces pastorianus
ataaccacctcaatcctaagcaaag

SEQ ID NO: 12340 - DNA, 25 bp, Saccharomyces pastorianus
actagccgtagatttggcacgtaag

SEQ ID NO: 12341 - DNA, 25 bp, Saccharomyces pastorianus
gaaccgcttgttctttcaaaaggct

SEQ ID NO: 12342 - DNA, 25 bp, Saccharomyces pastorianus
acaagtttcttgtagctattgaatc

SEQ ID NO: 12343 - DNA, 25 bp, Saccharomyces pastorianus
ggcgacacaggctccagtgaagttc

SEQ ID NO: 12344 - DNA, 25 bp, Saccharomyces pastorianus
gctattgaatctgctaaacgtgaaa

SEQ ID NO: 12345 - DNA, 25 bp, Saccharomyces pastorianus
aacgatgctgctataacggatgaat

SEQ ID NO: 12346 - DNA, 25 bp, Saccharomyces pastorianus
aagaacgctattaaactagccgtag

SEQ ID NO: 12347 - DNA, 25 bp, Saccharomyces pastorianus
attatggccgagctaaaagaaccgc

SEQ ID NO: 12348 - DNA, 25 bp, Saccharomyces pastorianus
gttcaagcagcctgtatgactgttc

SEQ ID NO: 12349 - DNA, 25 bp, Saccharomyces pastorianus
gaagcaagacgtgaggctattttga

SEQ ID NO: 12350 - DNA, 25 bp, Saccharomyces pastorianus
atttgaaagattcccgggcgacaca

SEQ ID NO: 12351 - DNA, 25 bp, Saccharomyces pastorianus
ttgcgggatcatgtctcagaggtca

SEQ ID NO: 12352 - DNA, 25 bp, Saccharomyces pastorianus
tatggtcccttttgcgatcggtata

SEQ ID NO: 12353 - DNA, 25 bp, Saccharomyces pastorianus
gaactgatttcgctcacatttcttc

SEQ ID NO: 12354 - DNA, 25 bp, Saccharomyces pastorianus
cattctcatttattgccggatttgt

SEQ ID NO: 12355 - DNA, 25 bp, Saccharomyces pastorianus
cgattcacttaatgctgttgcggga

SEQ ID NO: 12356 - DNA, 25 bp, Saccharomyces pastorianus
tgcagtatccactatggcagcatta

SEQ ID NO: 12357 - DNA, 25 bp, Saccharomyces pastorianus
ggcagcattactttatatggtccct

SEQ ID NO: 12358 - DNA, 25 bp, Saccharomyces pastorianus
gaagttgtacggtctctggattggt

SEQ ID NO: 12359 - DNA, 25 bp, Saccharomyces pastorianus
gcatactacctatttgggattccat

SEQ ID NO: 12360 - DNA, 25 bp, Saccharomyces pastorianus
gatcggtatatctgcctctacgaga

SEQ ID NO: 12361 - DNA, 25 bp, Saccharomyces pastorianus
ggcttggtcgaatcctactatgtat

SEQ ID NO: 12362 - DNA, 25 bp, Saccharomyces pastorianus
gaagaccctgagttaaccagaaaca

SEQ ID NO: 12363 - DNA, 25 bp, Saccharomyces pastorianus
aactggctcgcgatccaaggataaa

SEQ ID NO: 12364 - DNA, 25 bp, Saccharomyces pastorianus
ataccacaagtgtcgagtgctcttt

SEQ ID NO: 12365 - DNA, 25 bp, Saccharomyces pastorianus
ttgtggctacgaacgatgctggttt

SEQ ID NO: 12366 - DNA, 25 bp, Saccharomyces pastorianus
gtgtaatccgttaatcacagactgt

SEQ ID NO: 12367 - DNA, 25 bp, Saccharomyces pastorianus
tggactgccttctcgcaaagtgtaa

SEQ ID NO: 12368 - DNA, 25 bp, Saccharomyces pastorianus
gtattgctttgaaactggctcgcga

SEQ ID NO: 12369 - DNA, 25 bp, Saccharomyces pastorianus
aagctgctcgcacaagggtacatat

SEQ ID NO: 12370 - DNA, 25 bp, Saccharomyces pastorianus
gttgggacctaaataccgtattgct

SEQ ID NO: 12371 - DNA, 25 bp, Saccharomyces pastorianus
cgagtgctcttttcttccaatataa

SEQ ID NO: 12372 - DNA, 25 bp, Saccharomyces pastorianus
aattcccggcattccattaatgagt

SEQ ID NO: 12373 - DNA, 25 bp, Saccharomyces pastorianus
gactcatgaaccaacgactgtggta

SEQ ID NO: 12374 - DNA, 25 bp, Saccharomyces pastorianus
ttattgggtcaatatcccgatgttt

SEQ ID NO: 12375 - DNA, 25 bp, Saccharomyces pastorianus
gagaaatgccatcaagactcatgaa

SEQ ID NO: 12376 - DNA, 25 bp, Saccharomyces pastorianus
gaaggtgacactggcccatacttac

SEQ ID NO: 12377 - DNA, 25 bp, Saccharomyces pastorianus
gacttctcattgttaagcgaacctg

SEQ ID NO: 12378 - DNA, 25 bp, Saccharomyces pastorianus
cgtttggctctatatggcgctgcta

SEQ ID NO: 12379 - DNA, 25 bp, Saccharomyces pastorianus
gcgaacctgctgctatattgctaat

SEQ ID NO: 12380 - DNA, 25 bp, Saccharomyces pastorianus
aagaaatgcttctggaattaccgaa

SEQ ID NO: 12381 - DNA, 25 bp, Saccharomyces pastorianus
tatggcgctgctagacaagtcttgt

SEQ ID NO: 12382 - DNA, 25 bp, Saccharomyces pastorianus
gaaagggaactgtcgtattcttaga

SEQ ID NO: 12383 - DNA, 25 bp, Saccharomyces pastorianus
ggcccatacttacaatacgctcatt

SEQ ID NO: 12384 - DNA, 25 bp, Saccharomyces pastorianus
gtacacagttgatcgttttggtcgt

SEQ ID NO: 12385 - DNA, 25 bp, Saccharomyces pastorianus
cgcttccgtcggtgttactaaattg

SEQ ID NO: 12386 - DNA, 25 bp, Saccharomyces pastorianus
tttgctatacggtgccatcggtatg

SEQ ID NO: 12387 - DNA, 25 bp, Saccharomyces pastorianus
agaagtcaacgatatgtatgccgaa

SEQ ID NO: 12388 - DNA, 25 bp, Saccharomyces pastorianus
tcctgggttcctgcctctaagagag

SEQ ID NO: 12389 - DNA, 25 bp, Saccharomyces pastorianus
ggttttcgcatacttctatgtcttc

SEQ ID NO: 12390 - DNA, 25 bp, Saccharomyces pastorianus
tggtcgtcgtaactgtttgctatac

SEQ ID NO: 12391 - DNA, 25 bp, Saccharomyces pastorianus
ggctccaatcgcttatgttgttatc

SEQ ID NO: 12392 - DNA, 25 bp, Saccharomyces pastorianus
tatgttgttatctccgaaactttcc

SEQ ID NO: 12393 - DNA, 25 bp, Saccharomyces pastorianus
tgttttgccatggaagtctgcttcc

SEQ ID NO: 12394 - DNA, 25 bp, Saccharomyces pastorianus
tatgtatgccgaaggtgttttgcca

SEQ ID NO: 12395 - DNA, 25 bp, Saccharomyces pastorianus
gaagtcttggccttaacaactaaca

SEQ ID NO: 12396 - DNA, 25 bp, Saccharomyces pastorianus
tctgctctgttgatggaattcacta

SEQ ID NO: 12397 - DNA, 25 bp, Saccharomyces pastorianus
tgtcaagaatatcgtctctggtgtt

SEQ ID NO: 12398 - DNA, 25 bp, Saccharomyces pastorianus
tacgccaacactaagatttctgccg

SEQ ID NO: 12399 - DNA, 25 bp, Saccharomyces pastorianus
atgctgtcattgaaggtccattgaa

SEQ ID NO: 12400 - DNA, 25 bp, Saccharomyces pastorianus
agtcgattccgttggctggaaagtt

SEQ ID NO: 12401 - DNA, 25 bp, Saccharomyces pastorianus
gagcatttggactcggaagtcgatt

SEQ ID NO: 12402 - DNA, 25 bp, Saccharomyces pastorianus
tatgaaacctcatcacgcggctaaa

SEQ ID NO: 12403 - DNA, 25 bp, Saccharomyces pastorianus
gcggctaaagcatggaatttcttgt

SEQ ID NO: 12404 - DNA, 25 bp, Saccharomyces pastorianus
atttctgccggtattgttactgacg

SEQ ID NO: 12405 - DNA, 25 bp, Saccharomyces pastorianus
atgggtgaagttccaaattttgtca

SEQ ID NO: 12406 - DNA, 25 bp, Saccharomyces pastorianus
ctactactgaactcgaatctggcca

SEQ ID NO: 12407 - DNA, 25 bp, Saccharomyces pastorianus
gaagcgttacttcaaaccccagact

SEQ ID NO: 12408 - DNA, 25 bp, Saccharomyces pastorianus
ttgtctcctcatttggttctctaat

SEQ ID NO: 12409 - DNA, 25 bp, Saccharomyces pastorianus
aggtttcatacatcccgttgttagc

SEQ ID NO: 12410 - DNA, 25 bp, Saccharomyces pastorianus
gaacgaacgcttgcaagaggccctt

SEQ ID NO: 12411 - DNA, 25 bp, Saccharomyces pastorianus
tggccatatcaggagacgggtttac

SEQ ID NO: 12412 - DNA, 25 bp, Saccharomyces pastorianus
cgagccattgactaccgggaacgaa

SEQ ID NO: 12413 - DNA, 25 bp, Saccharomyces pastorianus
gcctaaagcgtggttgcctgattat

SEQ ID NO: 12414 - DNA, 25 bp, Saccharomyces pastorianus
taacgtttctacttctggcataatg

SEQ ID NO: 12415 - DNA, 25 bp, Saccharomyces pastorianus
agccattgatgcgtcgcctaaagcg

SEQ ID NO: 12416 - DNA, 25 bp, Saccharomyces pastorianus
tgaacacttataatgccgggacccc

SEQ ID NO: 12417 - DNA, 25 bp, Saccharomyces pastorianus
aatgctcccatgaccggtgttagaa

SEQ ID NO: 12418 - DNA, 25 bp, Saccharomyces pastorianus
tatcctacagactttgacgaccaaa

SEQ ID NO: 12419 - DNA, 25 bp, Saccharomyces pastorianus
tatagcccacatactctgaaaagag

SEQ ID NO: 12420 - DNA, 25 bp, Saccharomyces pastorianus
gttcatggacccgttacagcaggat

SEQ ID NO: 12421 - DNA, 25 bp, Saccharomyces pastorianus
ggccttggaggatctggtgacacta

SEQ ID NO: 12422 - DNA, 25 bp, Saccharomyces pastorianus
accataatcgtactggcggtctaca

SEQ ID NO: 12423 - DNA, 25 bp, Saccharomyces pastorianus
gctttcacagcggttaggccttgga

SEQ ID NO: 12424 - DNA, 25 bp, Saccharomyces pastorianus
tcggcggccatcagaagcgacataa

SEQ ID NO: 12425 - DNA, 25 bp, Saccharomyces pastorianus
aggattaggctccagcacgttttta

SEQ ID NO: 12426 - DNA, 25 bp, Saccharomyces pastorianus
ataaaagcgcactccaaccataatc

SEQ ID NO: 12427 - DNA, 25 bp, Saccharomyces pastorianus
gtaaacccgtcaagcagaactcaca

SEQ ID NO: 12428 - DNA, 25 bp, Saccharomyces pastorianus
atcctctgcatactctgttatcaag

SEQ ID NO: 12429 - DNA, 25 bp, Saccharomyces pastorianus
gtttcagcctcagatgactgtgcac

SEQ ID NO: 12430 - DNA, 25 bp, Saccharomyces pastorianus
agaacatgactctttacccatctta

SEQ ID NO: 12431 - DNA, 25 bp, Saccharomyces pastorianus
atatgtttacggtcccaggtcagtt

SEQ ID NO: 12432 - DNA, 25 bp, Saccharomyces pastorianus
tgtccgcttgagtaacccctatata

SEQ ID NO: 12433 - DNA, 25 bp, Saccharomyces pastorianus
ggctcgtgtggcttcattgatacta

SEQ ID NO: 12434 - DNA, 25 bp, Saccharomyces pastorianus
aggtcagttgacagcggcgtactca

SEQ ID NO: 12435 - DNA, 25 bp, Saccharomyces pastorianus
gttacatcccttacgcaaagacgat

SEQ ID NO: 12436 - DNA, 25 bp, Saccharomyces pastorianus
gcaagtgaaaccaacgcatcctctg

SEQ ID NO: 12437 - DNA, 25 bp, Saccharomyces pastorianus
tacccatcttacaaatccggctata

SEQ ID NO: 12438 - DNA, 25 bp, Saccharomyces pastorianus
aaccagcaccttttcagggagggct

SEQ ID NO: 12439 - DNA, 25 bp, Saccharomyces pastorianus
agatggtttccctgcgcacggcaaa

SEQ ID NO: 12440 - DNA, 25 bp, Saccharomyces pastorianus
cctcgttctatgtgggtgcacgtat

SEQ ID NO: 12441 - DNA, 25 bp, Saccharomyces pastorianus
tacgcgacagacatgcagctcagag

SEQ ID NO: 12442 - DNA, 25 bp, Saccharomyces pastorianus
aaggagatctgccattacggccgcc

SEQ ID NO: 12443 - DNA, 25 bp, Saccharomyces pastorianus
aagttgccagttctttactactccg

SEQ ID NO: 12444 - DNA, 25 bp, Saccharomyces pastorianus
gaacatagcttctgatccatcctat

SEQ ID NO: 12445 - DNA, 25 bp, Saccharomyces pastorianus
agctagtgcatatcctctgaacata

SEQ ID NO: 12446 - DNA, 25 bp, Saccharomyces pastorianus
gttaccatttattttcggaagcgct

SEQ ID NO: 12447 - DNA, 25 bp, Saccharomyces pastorianus
caatactacgtgctttacgcgacag

SEQ ID NO: 12448 - DNA, 25 bp, Saccharomyces pastorianus
gcgctggaactattgcatttgactt

SEQ ID NO: 12449 - DNA, 25 bp, Saccharomyces pastorianus
gaactgggcacaatcctatcctgga

SEQ ID NO: 12450 - DNA, 25 bp, Saccharomyces pastorianus
acggtgctgtcccaatctttagaaa

SEQ ID NO: 12451 - DNA, 25 bp, Saccharomyces pastorianus
gaaactgacttacctgtcaacgggt

SEQ ID NO: 12452 - DNA, 25 bp, Saccharomyces pastorianus
gaaaagaccacttacgtgcttccac

SEQ ID NO: 12453 - DNA, 25 bp, Saccharomyces pastorianus
acgggttattctacgctattggcca

SEQ ID NO: 12454 - DNA, 25 bp, Saccharomyces pastorianus
gaacgtcgacgaagccggctacatt

SEQ ID NO: 12455 - DNA, 25 bp, Saccharomyces pastorianus
aaagaatgcacttgccaggcgagga

SEQ ID NO: 12456 - DNA, 25 bp, Saccharomyces pastorianus
agattgttgccgaccaagtgaacgt

SEQ ID NO: 12457 - DNA, 25 bp, Saccharomyces pastorianus
tcttccttaacttctgttccagggt

SEQ ID NO: 12458 - DNA, 25 bp, Saccharomyces pastorianus
aaagggtatctctgcctgtgccgtt

SEQ ID NO: 12459 - DNA, 25 bp, Saccharomyces pastorianus
tacgtgcttccactatcatgcaaag

SEQ ID NO: 12460 - DNA, 25 bp, Saccharomyces pastorianus
gatcgagatcctttataacactgtt

SEQ ID NO: 12461 - DNA, 25 bp, Saccharomyces pastorianus
aacgataactgatgctttcaaggag

SEQ ID NO: 12462 - DNA, 25 bp, Saccharomyces pastorianus
agcagcagccgtgcacgattacaat

SEQ ID NO: 12463 - DNA, 25 bp, Saccharomyces pastorianus
tggatacaactgagctttgcaagaa

SEQ ID NO: 12464 - DNA, 25 bp, Saccharomyces pastorianus
cattctagagagtcagtttcggctg

SEQ ID NO: 12465 - DNA, 25 bp, Saccharomyces pastorianus
agtgagtggcattatcgaaaatacc

SEQ ID NO: 12466 - DNA, 25 bp, Saccharomyces pastorianus
gagatgttaaaccaattagcaacga

SEQ ID NO: 12467 - DNA, 25 bp, Saccharomyces pastorianus
gagaatagcagcagccgtgcacgat

SEQ ID NO: 12468 - DNA, 25 bp, Saccharomyces pastorianus
taagctgacagttgattacgactac

SEQ ID NO: 12469 - DNA, 25 bp, Saccharomyces pastorianus
gttgattacgactacttactttata

SEQ ID NO: 12470 - DNA, 25 bp, Saccharomyces pastorianus
gtttcggctggcgatgatcctcttg

SEQ ID NO: 12471 - DNA, 25 bp, Saccharomyces pastorianus
atcgtcaaattcgaggagcttctca

SEQ ID NO: 12472 - DNA, 25 bp, Saccharomyces pastorianus
gatattactatcgtctcgaaagagt

SEQ ID NO: 12473 - DNA, 25 bp, Saccharomyces pastorianus
gaaacgagcgggaagaatctgaatt

SEQ ID NO: 12474 - DNA, 25 bp, Saccharomyces pastorianus
aactactgtttgatcatgacgaact

SEQ ID NO: 12475 - DNA, 25 bp, Saccharomyces pastorianus
gaattttgaggcaactttagaatca

SEQ ID NO: 12476 - DNA, 25 bp, Saccharomyces pastorianus
gaaactctacgccatttttcaaagt

SEQ ID NO: 12477 - DNA, 25 bp, Saccharomyces pastorianus
gtaactctttgcatattccgcaaga

SEQ ID NO: 12478 - DNA, 25 bp, Saccharomyces pastorianus
agcaatgtttgcaaaagaacgccaa

SEQ ID NO: 12479 - DNA, 25 bp, Saccharomyces pastorianus
tatgaatgaaccttctttacgagaa

SEQ ID NO: 12480 - DNA, 25 bp, Saccharomyces pastorianus
gacttgtaactctttgcatattccg

SEQ ID NO: 12481 - DNA, 25 bp, Saccharomyces pastorianus
gtgaatgttagaaactctacgccat

SEQ ID NO: 12482 - DNA, 25 bp, Saccharomyces pastorianus
aggttatgaaaattgcccttatggg

SEQ ID NO: 12483 - DNA, 25 bp, Saccharomyces pastorianus
gaaacagggccttgttcagacatat

SEQ ID NO: 12484 - DNA, 25 bp, Saccharomyces pastorianus
ttttaaatgtgcacccgtctcacaa

SEQ ID NO: 12485 - DNA, 25 bp, Saccharomyces pastorianus
gacggtcgttacatatcttcgggcg

SEQ ID NO: 12486 - DNA, 25 bp, Saccharomyces pastorianus
gtgatacagctcaacattccatgcc

SEQ ID NO: 12487 - DNA, 25 bp, Saccharomyces pastorianus
ttggctcttaagtactttcctgatg

SEQ ID NO: 12488 - DNA, 25 bp, Saccharomyces pastorianus
gttcatcgtgggtttatcaaactcc

SEQ ID NO: 12489 - DNA, 25 bp, Saccharomyces pastorianus
atcaaccccagcagatgtcgaatct

SEQ ID NO: 12490 - DNA, 25 bp, Saccharomyces pastorianus
agtagactcttcacatgggattgga

SEQ ID NO: 12491 - DNA, 25 bp, Saccharomyces pastorianus
gcaggctacggtataggcttgtcat

SEQ ID NO: 12492 - DNA, 25 bp, Saccharomyces pastorianus
aggcttgtcattttctggcgacggt

SEQ ID NO: 12493 - DNA, 25 bp, Saccharomyces pastorianus
aaagggcactcttcagcaggctacg

SEQ ID NO: 12494 - DNA, 25 bp, Saccharomyces pastorianus
tggtaagcgtgttcatgacagaaaa

SEQ ID NO: 12495 - DNA, 25 bp, Saccharomyces pastorianus
aggagcgtcgtaaggctagaaagca

SEQ ID NO: 12496 - DNA, 25 bp, Saccharomyces pastorianus
ataaaggtacacaggccatgaataa

SEQ ID NO: 12497 - DNA, 25 bp, Saccharomyces pastorianus
gaggtaagtccaaatctaccaacaa

SEQ ID NO: 12498 - DNA, 25 bp, Saccharomyces pastorianus
gcgattgatccaactcaacctgaat

SEQ ID NO: 12499 - DNA, 25 bp, Saccharomyces pastorianus
ggctgaactagagcttctaatggac

SEQ ID NO: 12500 - DNA, 25 bp, Saccharomyces pastorianus
gttgaagatactttcacacctgatg

SEQ ID NO: 12501 - DNA, 25 bp, Saccharomyces pastorianus
gaaaaaccagttgaaggccaagaag

SEQ ID NO: 12502 - DNA, 25 bp, Saccharomyces pastorianus
tcacacctgatgtggaagatcctag

SEQ ID NO: 12503 - DNA, 25 bp, Saccharomyces pastorianus
aatggacgatgatggcgacgctgaa

SEQ ID NO: 12504 - DNA, 25 bp, Saccharomyces pastorianus
tcacgattttgcgattgatccaact

SEQ ID NO: 12505 - DNA, 25 bp, Saccharomyces pastorianus
tcggtgtctctaatttctctgtcaa

SEQ ID NO: 12506 - DNA, 25 bp, Saccharomyces pastorianus
aatttttactttgcctgaggacgat

SEQ ID NO: 12507 - DNA, 25 bp, Saccharomyces pastorianus
actggcctgtacctctgaaaactga

SEQ ID NO: 12508 - DNA, 25 bp, Saccharomyces pastorianus
agaagcttattcaccatttgggagt

SEQ ID NO: 12509 - DNA, 25 bp, Saccharomyces pastorianus
gatggcgacgttttgtgcattccaa

SEQ ID NO: 12510 - DNA, 25 bp, Saccharomyces pastorianus
gtctccgagcaacaaattggtccca

SEQ ID NO: 12511 - DNA, 25 bp, Saccharomyces pastorianus
tgaaccggcacaacttatcatcagt

SEQ ID NO: 12512 - DNA, 25 bp, Saccharomyces pastorianus
tgtcttagccaaatctgtcaaccct

SEQ ID NO: 12513 - DNA, 25 bp, Saccharomyces pastorianus
gaaattcacccattattgccacaag

SEQ ID NO: 12514 - DNA, 25 bp, Saccharomyces pastorianus
atttgggagtgccaatgccccatta

SEQ ID NO: 12515 - DNA, 25 bp, Saccharomyces pastorianus
agaagatggcactgtcgacgttgac

SEQ ID NO: 12516 - DNA, 25 bp, Saccharomyces pastorianus
aatcaaatttacaaccagacgcggc

SEQ ID NO: 12517 - DNA, 25 bp, Saccharomyces pastorianus
gagtgctgccttcttaatcacgaga

SEQ ID NO: 12518 - DNA, 25 bp, Saccharomyces pastorianus
gacaatgacaatggcgacaacgacg

SEQ ID NO: 12519 - DNA, 25 bp, Saccharomyces pastorianus
gatactacaagtattgtccaaccag

SEQ ID NO: 12520 - DNA, 25 bp, Saccharomyces pastorianus
ttttcgcgtcgctcagatactacaa

SEQ ID NO: 12521 - DNA, 25 bp, Saccharomyces pastorianus
gaaagacttaggacctgatacacat

SEQ ID NO: 12522 - DNA, 25 bp, Saccharomyces pastorianus
aggatgtgctcgctctgacagagat

SEQ ID NO: 12523 - DNA, 25 bp, Saccharomyces pastorianus
gaggacggctttgaattggtcacaa

SEQ ID NO: 12524 - DNA, 25 bp, Saccharomyces pastorianus
gattttatgcccaagattcggatat

SEQ ID NO: 12525 - DNA, 25 bp, Saccharomyces pastorianus
gattttatacggagtgctgccttct

SEQ ID NO: 12526 - DNA, 25 bp, Saccharomyces pastorianus
cagacgcggcagaggaatcttccaa

SEQ ID NO: 12527 - DNA, 25 bp, Saccharomyces pastorianus
gatctcgaactggatcgacctttta

SEQ ID NO: 12528 - DNA, 25 bp, Saccharomyces pastorianus
gccactcacccaattgcagatgcaa

SEQ ID NO: 12529 - DNA, 25 bp, Saccharomyces pastorianus
attttcgcaatatccgttcgactta

SEQ ID NO: 12530 - DNA, 25 bp, Saccharomyces pastorianus
aagcaaccccggtcatgatttacaa

SEQ ID NO: 12531 - DNA, 25 bp, Saccharomyces pastorianus
ggaaggagaaagcaaccccggtcat

SEQ ID NO: 12532 - DNA, 25 bp, Saccharomyces pastorianus
ctttctatttgacatggccactcac

SEQ ID NO: 12533 - DNA, 25 bp, Saccharomyces pastorianus
gagcttggcgtctcagttaatttga

SEQ ID NO: 12534 - DNA, 25 bp, Saccharomyces pastorianus
gagctacaatgaatactttcccgaa

SEQ ID NO: 12535 - DNA, 25 bp, Saccharomyces pastorianus
gatgaacctttaacgatctcgaact

SEQ ID NO: 12536 - DNA, 25 bp, Saccharomyces pastorianus
gcgtagggtactttctgtacttgta

SEQ ID NO: 12537 - DNA, 25 bp, Saccharomyces pastorianus
ggactttggctttgatatgtggatc

SEQ ID NO: 12538 - DNA, 25 bp, Saccharomyces pastorianus
gaattcatcactgttttgagcacga

SEQ ID NO: 12539 - DNA, 25 bp, Saccharomyces pastorianus
aaacagtccacgtatttcgatcgca

SEQ ID NO: 12540 - DNA, 25 bp, Saccharomyces pastorianus
gccccagtggtcaacttaccagaga

SEQ ID NO: 12541 - DNA, 25 bp, Saccharomyces pastorianus
gctgtgttgggcttttgagctttat

SEQ ID NO: 12542 - DNA, 25 bp, Saccharomyces pastorianus
gaagacgaagctacaccggaatcaa

SEQ ID NO: 12543 - DNA, 25 bp, Saccharomyces pastorianus
gatctcctgaggatttcgctaatca

SEQ ID NO: 12544 - DNA, 25 bp, Saccharomyces pastorianus
gggtccatggtcacactaaatgaag

SEQ ID NO: 12545 - DNA, 25 bp, Saccharomyces pastorianus
ggttcttgagagattgccccagtgg

SEQ ID NO: 12546 - DNA, 25 bp, Saccharomyces pastorianus
ggatggatatattacgctggacgaa

SEQ ID NO: 12547 - DNA, 25 bp, Saccharomyces pastorianus
aattcttcccttttggatctcctga

SEQ ID NO: 12548 - DNA, 25 bp, Saccharomyces pastorianus
gatggatacattaccttcgacgaaa

SEQ ID NO: 12549 - DNA, 25 bp, Saccharomyces pastorianus
aatctggagccaagatctttttgtt

SEQ ID NO: 12550 - DNA, 25 bp, Saccharomyces pastorianus
catcgggaagattttgtggtgttgc

SEQ ID NO: 12551 - DNA, 25 bp, Saccharomyces pastorianus
gtctaaaccaaggtcttttcagcaa

SEQ ID NO: 12552 - DNA, 25 bp, Saccharomyces pastorianus
ggcggttgatcaatctggtaagagt

SEQ ID NO: 12553 - DNA, 25 bp, Saccharomyces pastorianus
aataactcattccagagatacccaa

SEQ ID NO: 12554 - DNA, 25 bp, Saccharomyces pastorianus
cggttatctgaagcgtacaagacat

SEQ ID NO: 12555 - DNA, 25 bp, Saccharomyces pastorianus
gaatggacttggataccagcatttg

SEQ ID NO: 12556 - DNA, 25 bp, Saccharomyces pastorianus
aattccacattcgattggtatttcg

SEQ ID NO: 12557 - DNA, 25 bp, Saccharomyces pastorianus
aagtcctcatctttgaaacatgtta

SEQ ID NO: 12558 - DNA, 25 bp, Saccharomyces pastorianus
gagatcattctacaacggaatttgg

SEQ ID NO: 12559 - DNA, 25 bp, Saccharomyces pastorianus
agaaagagttctgccattgttcccc

SEQ ID NO: 12560 - DNA, 25 bp, Saccharomyces pastorianus
aatcacatcgctagggtacgctggt

SEQ ID NO: 12561 - DNA, 25 bp, Saccharomyces pastorianus
ccaatgcccgaattttccaagctgt

SEQ ID NO: 12562 - DNA, 25 bp, Saccharomyces pastorianus
gaaatccattggtctctctaacatc

SEQ ID NO: 12563 - DNA, 25 bp, Saccharomyces pastorianus
tggcgaaatcttcccgcatttgtac

SEQ ID NO: 12564 - DNA, 25 bp, Saccharomyces pastorianus
gattatctgaagactcccttggaga

SEQ ID NO: 12565 - DNA, 25 bp, Saccharomyces pastorianus
gtaatcaagtcgttaaccctgtgta

SEQ ID NO: 12566 - DNA, 25 bp, Saccharomyces pastorianus
tccaagctgtctatccgctttgata

SEQ ID NO: 12567 - DNA, 25 bp, Saccharomyces pastorianus
gtgttttaaccgttgctggcgaaat

SEQ ID NO: 12568 - DNA, 25 bp, Saccharomyces pastorianus
catttgtacgcgtctggttggattc

SEQ ID NO: 12569 - DNA, 25 bp, Saccharomyces pastorianus
aagcctcgatccaagtttctaacac

SEQ ID NO: 12570 - DNA, 25 bp, Saccharomyces pastorianus
caagacgcttttgaggtcggtgaca

SEQ ID NO: 12571 - DNA, 25 bp, Saccharomyces pastorianus
tggttactcgatggaatactacttc

SEQ ID NO: 12572 - DNA, 25 bp, Saccharomyces pastorianus
ggtgtcatccaagaacatcggttca

SEQ ID NO: 12573 - DNA, 25 bp, Saccharomyces pastorianus
gtggcactttgctctgggaatcatt

SEQ ID NO: 12574 - DNA, 25 bp, Saccharomyces pastorianus
ggaatcattgcctttggttactcga

SEQ ID NO: 12575 - DNA, 25 bp, Saccharomyces pastorianus
ggcgtattgccaatgttgtgcactt

SEQ ID NO: 12576 - DNA, 25 bp, Saccharomyces pastorianus
ggttcagcaccagcaatcaaggccg

SEQ ID NO: 12577 - DNA, 25 bp, Saccharomyces pastorianus
gcaccaaatgctaggcgtattgcca

SEQ ID NO: 12578 - DNA, 25 bp, Saccharomyces pastorianus
cgtgcagtatctacactaattcccc

SEQ ID NO: 12579 - DNA, 25 bp, Saccharomyces pastorianus
aagtccttacctcaaggttcagcac

SEQ ID NO: 12580 - DNA, 25 bp, Saccharomyces pastorianus
atcaaggccgactctagattgggta

SEQ ID NO: 12581 - DNA, 25 bp, Saccharomyces pastorianus
gtgcacttttacaagtccttacctc

SEQ ID NO: 12582 - DNA, 25 bp, Saccharomyces pastorianus
ctgttctacccttttccatatatga

SEQ ID NO: 12583 - DNA, 25 bp, Saccharomyces pastorianus
attgagcaagaatgggcccgccgaa

SEQ ID NO: 12584 - DNA, 25 bp, Saccharomyces pastorianus
ggaaatccgggtcacaaactctaat

SEQ ID NO: 12585 - DNA, 25 bp, Saccharomyces pastorianus
tactgcatcaagacgtacacgcggt

SEQ ID NO: 12586 - DNA, 25 bp, Saccharomyces pastorianus
aaattaccagatcctgttctaccct

SEQ ID NO: 12587 - DNA, 25 bp, Saccharomyces pastorianus
taatccacgaccttgacggcgaaaa

SEQ ID NO: 12588 - DNA, 25 bp, Saccharomyces pastorianus
ggaatttgcccagaatactccattg

SEQ ID NO: 12589 - DNA, 25 bp, Saccharomyces pastorianus
tctgaagagtttacccctggaacat

SEQ ID NO: 12590 - DNA, 25 bp, Saccharomyces pastorianus
gggcccgccgaatcttcacagaaat

SEQ ID NO: 12591 - DNA, 25 bp, Saccharomyces pastorianus
acgtacacgcggtggctagcgtatt

SEQ ID NO: 12592 - DNA, 25 bp, Saccharomyces pastorianus
gaaggtactggcaacacatatcaac

SEQ ID NO: 12593 - DNA, 25 bp, Saccharomyces pastorianus
tagagtttctataaggacggcgcat

SEQ ID NO: 12594 - DNA, 25 bp, Saccharomyces pastorianus
accaagaaaggacttcaccactatt

SEQ ID NO: 12595 - DNA, 25 bp, Saccharomyces pastorianus
cctaagagactgagcgggttgcaga

SEQ ID NO: 12596 - DNA, 25 bp, Saccharomyces pastorianus
gagcgggttgcagaaagaagtttta

SEQ ID NO: 12597 - DNA, 25 bp, Saccharomyces pastorianus
tggaaataagaaagtagccacgttt

SEQ ID NO: 12598 - DNA, 25 bp, Saccharomyces pastorianus
gagatctaccaagaaaggacttcac

SEQ ID NO: 12599 - DNA, 25 bp, Saccharomyces pastorianus
agaagttttacatctctatagagtt

SEQ ID NO: 12600 - DNA, 25 bp, Saccharomyces pastorianus
gtttctataaggacggcgcatacga

SEQ ID NO: 12601 - DNA, 25 bp, Saccharomyces pastorianus
cactattgaacacttgttaagggtt

SEQ ID NO: 12602 - DNA, 25 bp, Saccharomyces pastorianus
gacggcgcatacgaagccaaaggaa

SEQ ID NO: 12603 - DNA, 25 bp, Saccharomyces pastorianus
agtttggcaagtatagagatctacc

SEQ ID NO: 12604 - DNA, 25 bp, Saccharomyces pastorianus
tcctagaagtcaaactgggcgtctt

SEQ ID NO: 12605 - DNA, 25 bp, Saccharomyces pastorianus
gacggcgctgcacaaatgacaattc

SEQ ID NO: 12606 - DNA, 25 bp, Saccharomyces pastorianus
gggcgtcttagacttcccagaacaa

SEQ ID NO: 12607 - DNA, 25 bp, Saccharomyces pastorianus
ggttcatttcaattttctgttcgag

SEQ ID NO: 12608 - DNA, 25 bp, Saccharomyces pastorianus
tttcctttccatcggtatggcttta

SEQ ID NO: 12609 - DNA, 25 bp, Saccharomyces pastorianus
tatggctttacctgcggcgctaggt

SEQ ID NO: 12610 - DNA, 25 bp, Saccharomyces pastorianus
gaaagagctatcatgggtcctacca

SEQ ID NO: 12611 - DNA, 25 bp, Saccharomyces pastorianus
ggtcctaccaggtcttataacgaca

SEQ ID NO: 12612 - DNA, 25 bp, Saccharomyces pastorianus
gaatccacctccaagttagcactga

SEQ ID NO: 12613 - DNA, 25 bp, Saccharomyces pastorianus
tctgttcgagattttgcctttccta

SEQ ID NO: 12614 - DNA, 25 bp, Saccharomyces pastorianus
aagaccatccaaacgcacacataaa

SEQ ID NO: 12615 - DNA, 25 bp, Saccharomyces pastorianus
aaagaagttcgcttctgtcccagct

SEQ ID NO: 12616 - DNA, 25 bp, Saccharomyces pastorianus
aaaagaagttcgcttctgtcccagc

SEQ ID NO: 12617 - DNA, 25 bp, Saccharomyces pastorianus
tcgcttctgtcccagctggtggtgc

SEQ ID NO: 12618 - DNA, 25 bp, Saccharomyces pastorianus
tgccgctgccggtgcttccggtgcc

SEQ ID NO: 12619 - DNA, 25 bp, Saccharomyces pastorianus
aagaagttcgcttctgtcccagctg

SEQ ID NO: 12620 - DNA, 25 bp, Saccharomyces pastorianus
gcttctgtcccagctggtggtgctt

SEQ ID NO: 12621 - DNA, 25 bp, Saccharomyces pastorianus
aagttcgcttctgtcccagctggtg

SEQ ID NO: 12622 - DNA, 25 bp, Saccharomyces pastorianus
ttctgtcccagctggtggtgcttct

SEQ ID NO: 12623 - DNA, 25 bp, Saccharomyces pastorianus
gttcgcttctgtcccagctggtggt

SEQ ID NO: 12624 - DNA, 25 bp, Saccharomyces pastorianus
agaagttcgcttctgtcccagctgg

SEQ ID NO: 12625 - DNA, 25 bp, Saccharomyces pastorianus
ctgtcccagctggtggtgcttctgc

SEQ ID NO: 12626 - DNA, 25 bp, Saccharomyces pastorianus
gtccgctttggttttatctttgatc

SEQ ID NO: 12627 - DNA, 25 bp, Saccharomyces pastorianus
tctgtttttgttctttggtggtgcc

SEQ ID NO: 12628 - DNA, 25 bp, Saccharomyces pastorianus
accgtgttcacctttttgatgctga

SEQ ID NO: 12629 - DNA, 25 bp, Saccharomyces pastorianus
ggacaacctggtaagcggctacacg

SEQ ID NO: 12630 - DNA, 25 bp, Saccharomyces pastorianus
gttgctgtggttggtactcgttata

SEQ ID NO: 12631 - DNA, 25 bp, Saccharomyces pastorianus
cttgctgctgacctttttggacata

SEQ ID NO: 12632 - DNA, 25 bp, Saccharomyces pastorianus
gatcccgcgatgctgaacaacgtca

SEQ ID NO: 12633 - DNA, 25 bp, Saccharomyces pastorianus
tttgatcaatgccaacgtccgcggt

SEQ ID NO: 12634 - DNA, 25 bp, Saccharomyces pastorianus
cggcggttatttcggcatcttgagt

SEQ ID NO: 12635 - DNA, 25 bp, Saccharomyces pastorianus
ttctggatttgctacggttacggac

SEQ ID NO: 12636 - DNA, 25 bp, Saccharomyces pastorianus
ttatactgttccgtggtgagcccat

SEQ ID NO: 12637 - DNA, 25 bp, Saccharomyces pastorianus
tttggttgtcgaccaaactaaggct

SEQ ID NO: 12638 - DNA, 25 bp, Saccharomyces pastorianus
ggtcttcgaccattgggccactttg

SEQ ID NO: 12639 - DNA, 25 bp, Saccharomyces pastorianus
gccactttgggttccgacccattgg

SEQ ID NO: 12640 - DNA, 25 bp, Saccharomyces pastorianus
atccgtcagagttaacatcttggac

SEQ ID NO: 12641 - DNA, 25 bp, Saccharomyces pastorianus
ttaacatcttggacgtcaccttaca

SEQ ID NO: 12642 - DNA, 25 bp, Saccharomyces pastorianus
ttggacgtcaccttacatgccgatg

SEQ ID NO: 12643 - DNA, 25 bp, Saccharomyces pastorianus
agttaacatcttggacgtcacctta

SEQ ID NO: 12644 - DNA, 25 bp, Saccharomyces pastorianus
tccaaatttggttgtcgaccaaact

SEQ ID NO: 12645 - DNA, 25 bp, Saccharomyces pastorianus
aacatcttggacgtcaccttacatg

SEQ ID NO: 12646 - DNA, 25 bp, Saccharomyces pastorianus
ggacgtcaccttacatgccgatgct

SEQ ID NO: 12647 - DNA, 25 bp, Saccharomyces pastorianus
gaccattgggccactttgggttccg

SEQ ID NO: 12648 - DNA, 25 bp, Saccharomyces pastorianus
tttccaaacgacctaaacagccaag

SEQ ID NO: 12649 - DNA, 25 bp, Saccharomyces pastorianus
gaagcactgaaaaccgctctttggc

SEQ ID NO: 12650 - DNA, 25 bp, Saccharomyces pastorianus
gcattgcatactgtcatatctcatc

SEQ ID NO: 12651 - DNA, 25 bp, Saccharomyces pastorianus
aacctaggagatgcaccaggcgcaa

SEQ ID NO: 12652 - DNA, 25 bp, Saccharomyces pastorianus
gaagactgtcggtgagttaactatt

SEQ ID NO: 12653 - DNA, 25 bp, Saccharomyces pastorianus
agatctcgtggtgatatttccaaac

SEQ ID NO: 12654 - DNA, 25 bp, Saccharomyces pastorianus
gaatgttgccacaatcttgaatgct

SEQ ID NO: 12655 - DNA, 25 bp, Saccharomyces pastorianus
gagaaagcggtagccattcaagaaa

SEQ ID NO: 12656 - DNA, 25 bp, Saccharomyces pastorianus
accgctctttggctcattttagtat

SEQ ID NO: 12657 - DNA, 25 bp, Saccharomyces pastorianus
ggcttataaaacatgcgcttcggaa

SEQ ID NO: 12658 - DNA, 25 bp, Saccharomyces pastorianus
ggttgcaatcacaagtattacctta

SEQ ID NO: 12659 - DNA, 25 bp, Saccharomyces pastorianus
gggcctgaaaatgttgtcaacccgc

SEQ ID NO: 12660 - DNA, 25 bp, Saccharomyces pastorianus
ggacaagtcccaacagtctaaccag

SEQ ID NO: 12661 - DNA, 25 bp, Saccharomyces pastorianus
tcacctcgtccacagttcataggaa

SEQ ID NO: 12662 - DNA, 25 bp, Saccharomyces pastorianus
gactggtccggaatatcccaactta

SEQ ID NO: 12663 - DNA, 25 bp, Saccharomyces pastorianus
gaggcatagagctttgacgaatttc

SEQ ID NO: 12664 - DNA, 25 bp, Saccharomyces pastorianus
atgttcaacgagcatcccttggaga

SEQ ID NO: 12665 - DNA, 25 bp, Saccharomyces pastorianus
tccaattttgaattcacctcgtcca

SEQ ID NO: 12666 - DNA, 25 bp, Saccharomyces pastorianus
tatgtgcactggtctgattgtcggc

SEQ ID NO: 12667 - DNA, 25 bp, Saccharomyces pastorianus
aaatctcagatcaagctaccatggg

SEQ ID NO: 12668 - DNA, 25 bp, Saccharomyces pastorianus
gcgctctgacggaaacggcactaaa

SEQ ID NO: 12669 - DNA, 25 bp, Saccharomyces pastorianus
cttttgagattgtttgcgctctgac

SEQ ID NO: 12670 - DNA, 25 bp, Saccharomyces pastorianus
gacacactagatccagctttgctga

SEQ ID NO: 12671 - DNA, 25 bp, Saccharomyces pastorianus
aaaagctgcattcattagggtcaat

SEQ ID NO: 12672 - DNA, 25 bp, Saccharomyces pastorianus
tgctgtcattgcagccatcatgcaa

SEQ ID NO: 12673 - DNA, 25 bp, Saccharomyces pastorianus
taaatatcttggtgagggtccgaga

SEQ ID NO: 12674 - DNA, 25 bp, Saccharomyces pastorianus
ctagactcgctaattattcgtaatg

SEQ ID NO: 12675 - DNA, 25 bp, Saccharomyces pastorianus
gatacgtcattctacaaagcgattt

SEQ ID NO: 12676 - DNA, 25 bp, Saccharomyces pastorianus
agggtcaatggctccgaattcgttc

SEQ ID NO: 12677 - DNA, 25 bp, Saccharomyces pastorianus
agctggtttgagagccgtcaggaaa

SEQ ID NO: 12678 - DNA, 25 bp, Saccharomyces pastorianus
aaacgttaaagttatcatggccaca

SEQ ID NO: 12679 - DNA, 25 bp, Saccharomyces pastorianus
gaatttccctcgcttcgtgatagac

SEQ ID NO: 12680 - DNA, 25 bp, Saccharomyces pastorianus
gatgggttcgaccaatccacaaacg

SEQ ID NO: 12681 - DNA, 25 bp, Saccharomyces pastorianus
ccttggaaggcgatttgactccgga

SEQ ID NO: 12682 - DNA, 25 bp, Saccharomyces pastorianus
gttttccaggaagtacatgcatttt

SEQ ID NO: 12683 - DNA, 25 bp, Saccharomyces pastorianus
gaaggagaccgtattggaccaaatc

SEQ ID NO: 12684 - DNA, 25 bp, Saccharomyces pastorianus
gaaattccaaatagcgtcagcccgc

SEQ ID NO: 12685 - DNA, 25 bp, Saccharomyces pastorianus
gtcaccgagggcaagtccttggaag

SEQ ID NO: 12686 - DNA, 25 bp, Saccharomyces pastorianus
aaagtatccaccaacgatgagcttg

SEQ ID NO: 12687 - DNA, 25 bp, Saccharomyces pastorianus
gtcagcccgctcttaagtaatttga

SEQ ID NO: 12688 - DNA, 25 bp, Saccharomyces pastorianus
aagaaatcgtgatgctgtcaccgag

SEQ ID NO: 12689 - DNA, 25 bp, Saccharomyces pastorianus
agttggttgacctgacactatcatt

SEQ ID NO: 12690 - DNA, 25 bp, Saccharomyces pastorianus
gagagatatcccactattcagtaaa

SEQ ID NO: 12691 - DNA, 25 bp, Saccharomyces pastorianus
gacactatcattacctaaggccata

SEQ ID NO: 12692 - DNA, 25 bp, Saccharomyces pastorianus
acggtcatcctgtcacaagcattac

SEQ ID NO: 12693 - DNA, 25 bp, Saccharomyces pastorianus
tcaccgtcaaggaccactgaatgtt

SEQ ID NO: 12694 - DNA, 25 bp, Saccharomyces pastorianus
aagactgctagcactggatgccaga

SEQ ID NO: 12695 - DNA, 25 bp, Saccharomyces pastorianus
gagcgatgtctactcgtcagaaaca

SEQ ID NO: 12696 - DNA, 25 bp, Saccharomyces pastorianus
gatgccagactggattgcactgtaa

SEQ ID NO: 12697 - DNA, 25 bp, Saccharomyces pastorianus
aaaccttatgtctactctgtcttcg

SEQ ID NO: 12698 - DNA, 25 bp, Saccharomyces pastorianus
tacgatttttcgactacaaccagcc

SEQ ID NO: 12699 - DNA, 25 bp, Saccharomyces pastorianus
ggcgttccgatttgttaccaagact

SEQ ID NO: 12700 - DNA, 25 bp, Saccharomyces pastorianus
gatcattcgctcttggagaccgtac

SEQ ID NO: 12701 - DNA, 25 bp, Saccharomyces pastorianus
agccctggctgtcattctattggaa

SEQ ID NO: 12702 - DNA, 25 bp, Saccharomyces pastorianus
tgtcttcgttgcattccacattgaa

SEQ ID NO: 12703 - DNA, 25 bp, Saccharomyces pastorianus
gatttcttacatattccaacgcctt

SEQ ID NO: 12704 - DNA, 25 bp, Saccharomyces pastorianus
agtgttctattgtcagctcattgga

SEQ ID NO: 12705 - DNA, 25 bp, Saccharomyces pastorianus
tattcatgcgcatactaatagcgga

SEQ ID NO: 12706 - DNA, 25 bp, Saccharomyces pastorianus
gtgatttccaacgatcagtgttcta

SEQ ID NO: 12707 - DNA, 25 bp, Saccharomyces pastorianus
aaagacacccgtttcgacaatggag

SEQ ID NO: 12708 - DNA, 25 bp, Saccharomyces pastorianus
gtgacacagacgcaggtcgtttgaa

SEQ ID NO: 12709 - DNA, 25 bp, Saccharomyces pastorianus
gtggcacattatactggaactcaaa

SEQ ID NO: 12710 - DNA, 25 bp, Saccharomyces pastorianus
gacgcattttcagaccttttcaaga

SEQ ID NO: 12711 - DNA, 25 bp, Saccharomyces pastorianus
agaattgatattcccacaccattta

SEQ ID NO: 12712 - DNA, 25 bp, Saccharomyces pastorianus
aatgacgcttattcgaatttggtag

SEQ ID NO: 12713 - DNA, 25 bp, Saccharomyces pastorianus
gggtttctgatactgaagtggcaca

SEQ ID NO: 12714 - DNA, 25 bp, Saccharomyces pastorianus
aattcggttacatcctttgtgtact

SEQ ID NO: 12715 - DNA, 25 bp, Saccharomyces pastorianus
gagccgtcgttttcaaaccattcaa

SEQ ID NO: 12716 - DNA, 25 bp, Saccharomyces pastorianus
gtaaccaagcatttgatgcctcaag

SEQ ID NO: 12717 - DNA, 25 bp, Saccharomyces pastorianus
tagttccatccacgcaatcggtagt

SEQ ID NO: 12718 - DNA, 25 bp, Saccharomyces pastorianus
attcaatgcaggctcaaatcctccg

SEQ ID NO: 12719 - DNA, 25 bp, Saccharomyces pastorianus
ggtggacggcacagtagtatcatgt

SEQ ID NO: 12720 - DNA, 25 bp, Saccharomyces pastorianus
tcaaatcctccgtcgtaccaaagtt

SEQ ID NO: 12721 - DNA, 25 bp, Saccharomyces pastorianus
tagtcaagttagttccatccacgca

SEQ ID NO: 12722 - DNA, 25 bp, Saccharomyces pastorianus
tttggccctcgaatgaagcagtatc

SEQ ID NO: 12723 - DNA, 25 bp, Saccharomyces pastorianus
agtatcatgttctcaacacgggttc

SEQ ID NO: 12724 - DNA, 25 bp, Saccharomyces pastorianus
ccaccgatgggtcagcagagttcaa

SEQ ID NO: 12725 - DNA, 25 bp, Saccharomyces pastorianus
aaacaagcccttgatggccggatgc

SEQ ID NO: 12726 - DNA, 25 bp, Saccharomyces pastorianus
atgtaatcatttgtgcaggctggct

SEQ ID NO: 12727 - DNA, 25 bp, Saccharomyces pastorianus
caggctggctgttgattctcgggtc

SEQ ID NO: 12728 - DNA, 25 bp, Saccharomyces pastorianus
tgcaggccctaatcgatgcccagaa

SEQ ID NO: 12729 - DNA, 25 bp, Saccharomyces pastorianus
tttctgagccaactacaatccgtgc

SEQ ID NO: 12730 - DNA, 25 bp, Saccharomyces pastorianus
atacacgaaagccatcccgaaggag

SEQ ID NO: 12731 - DNA, 25 bp, Saccharomyces pastorianus
gatgcccacattgtctctgtcatat

SEQ ID NO: 12732 - DNA, 25 bp, Saccharomyces pastorianus
ttgcgcggttggtccttgagaacaa

SEQ ID NO: 12733 - DNA, 25 bp, Saccharomyces pastorianus
ggccggatgcatggtacactacgtt

SEQ ID NO: 12734 - DNA, 25 bp, Saccharomyces pastorianus
ggtttgagaacgatcttgcgcggtt

SEQ ID NO: 12735 - DNA, 25 bp, Saccharomyces pastorianus
tgaaacagctcgaaatcaccccggg

SEQ ID NO: 12736 - DNA, 25 bp, Saccharomyces pastorianus
tcttgattatttgaccgggttccac

SEQ ID NO: 12737 - DNA, 25 bp, Saccharomyces pastorianus
gtggaatccttggagcccaacgata

SEQ ID NO: 12738 - DNA, 25 bp, Saccharomyces pastorianus
tatttggccaacttgaacaatgtca

SEQ ID NO: 12739 - DNA, 25 bp, Saccharomyces pastorianus
ggcaacgacgtgaagcccattttga

SEQ ID NO: 12740 - DNA, 25 bp, Saccharomyces pastorianus
gtttgacaaggattcccgtcttgat

SEQ ID NO: 12741 - DNA, 25 bp, Saccharomyces pastorianus
acagagctaccaaatacgccaaatt

SEQ ID NO: 12742 - DNA, 25 bp, Saccharomyces pastorianus
gtttgaacttggaggccgagataga

SEQ ID NO: 12743 - DNA, 25 bp, Saccharomyces pastorianus
acggtgccaaggtagagtctgacga

SEQ ID NO: 12744 - DNA, 25 bp, Saccharomyces pastorianus
gaaaaagtgctcacccaaagcataa

SEQ ID NO: 12745 - DNA, 25 bp, Saccharomyces pastorianus
gaagggcgccgttactgaaatatac

SEQ ID NO: 12746 - DNA, 25 bp, Saccharomyces pastorianus
ggtagagtctgacgattcctggcac

SEQ ID NO: 12747 - DNA, 25 bp, Saccharomyces pastorianus
gagaataccgcttactgcgcgataa

SEQ ID NO: 12748 - DNA, 25 bp, Saccharomyces pastorianus
actggtcgctggattcgttgtcaaa

SEQ ID NO: 12749 - DNA, 25 bp, Saccharomyces pastorianus
attttgacttatccgttgctctttt

SEQ ID NO: 12750 - DNA, 25 bp, Saccharomyces pastorianus
tatgggtctacttgttccagggttt

SEQ ID NO: 12751 - DNA, 25 bp, Saccharomyces pastorianus
gaaacacctatatcttgctctctga

SEQ ID NO: 12752 - DNA, 25 bp, Saccharomyces pastorianus
tgaaatacagctgtaacctccccat

SEQ ID NO: 12753 - DNA, 25 bp, Saccharomyces pastorianus
gaaaggctgctccacgcgcaaagat

SEQ ID NO: 12754 - DNA, 25 bp, Saccharomyces pastorianus
gtagctcctaatacagattgccttt

SEQ ID NO: 12755 - DNA, 25 bp, Saccharomyces pastorianus
ggttcatgctactcaattcttcgta

SEQ ID NO: 12756 - DNA, 25 bp, Saccharomyces pastorianus
gaacccttcacgcattttgacttat

SEQ ID NO: 12757 - DNA, 25 bp, Saccharomyces pastorianus
tgctcttttccctgtattggtcaga

SEQ ID NO: 12758 - DNA, 25 bp, Saccharomyces pastorianus
tgtcatagtggtcggttctcatcaa

SEQ ID NO: 12759 - DNA, 25 bp, Saccharomyces pastorianus
gcttgtagtgaccatggcagtgcca

SEQ ID NO: 12760 - DNA, 25 bp, Saccharomyces pastorianus
atcattgattcttacctgtccattc

SEQ ID NO: 12761 - DNA, 25 bp, Saccharomyces pastorianus
gttgagttccatttctattctgctg

SEQ ID NO: 12762 - DNA, 25 bp, Saccharomyces pastorianus
ggtgggccacagacctaataatact

SEQ ID NO: 12763 - DNA, 25 bp, Saccharomyces pastorianus
tataatggcagctcctggcgcagat

SEQ ID NO: 12764 - DNA, 25 bp, Saccharomyces pastorianus
gttttcaccgaatacgccaagcagg

SEQ ID NO: 12765 - DNA, 25 bp, Saccharomyces pastorianus
ggtttccaggctcctttgtaattga

SEQ ID NO: 12766 - DNA, 25 bp, Saccharomyces pastorianus
gaacatgtgggcatcgtgaccgatt

SEQ ID NO: 12767 - DNA, 25 bp, Saccharomyces pastorianus
gtttcgatcatatggccgagcacac

SEQ ID NO: 12768 - DNA, 25 bp, Saccharomyces pastorianus
gtacgataaccaacttagaggcctt

SEQ ID NO: 12769 - DNA, 25 bp, Saccharomyces pastorianus
ttgatttcaagaaccctcatgacat

SEQ ID NO: 12770 - DNA, 25 bp, Saccharomyces pastorianus
tttcaagaaccctcatgacatcatt

SEQ ID NO: 12771 - DNA, 25 bp, Saccharomyces pastorianus
atttcaagaaccctcatgacatcat

SEQ ID NO: 12772 - DNA, 25 bp, Saccharomyces pastorianus
gttgatttcaagaaccctcatgaca

SEQ ID NO: 12773 - DNA, 25 bp, Saccharomyces pastorianus
tgagagctgtcggtggtgaagtcgg

SEQ ID NO: 12774 - DNA, 25 bp, Saccharomyces pastorianus
gagagctgtcggtggtgaagtcggt

SEQ ID NO: 12775 - DNA, 25 bp, Saccharomyces pastorianus
ggttgtcgtgttgatttcaagaacc

SEQ ID NO: 12776 - DNA, 25 bp, Saccharomyces pastorianus
gttgtcgtgttgatttcaagaaccc

SEQ ID NO: 12777 - DNA, 25 bp, Saccharomyces pastorianus
ttgtcgtgttgatttcaagaaccct

SEQ ID NO: 12778 - DNA, 25 bp, Saccharomyces pastorianus
tgatttcaagaaccctcatgacatc

SEQ ID NO: 12779 - DNA, 25 bp, Saccharomyces pastorianus
tgttgatttcaagaaccctcatgac

SEQ ID NO: 12780 - DNA, 25 bp, Saccharomyces pastorianus
aacacttcatcgtacaagagtttga

SEQ ID NO: 12781 - DNA, 25 bp, Saccharomyces pastorianus
gattgtctgtccatatgcgtatcgg

SEQ ID NO: 12782 - DNA, 25 bp, Saccharomyces pastorianus
ccagttccagcggtcaccaaaatga

SEQ ID NO: 12783 - DNA, 25 bp, Saccharomyces pastorianus
aacatctacacccacaatgaatttg

SEQ ID NO: 12784 - DNA, 25 bp, Saccharomyces pastorianus
ttgaccatcgccaagatcttaaaat

SEQ ID NO: 12785 - DNA, 25 bp, Saccharomyces pastorianus
aaggacacaaggtcgctatcgaagt

SEQ ID NO: 12786 - DNA, 25 bp, Saccharomyces pastorianus
atgataacctggcaaactccgctat

SEQ ID NO: 12787 - DNA, 25 bp, Saccharomyces pastorianus
tataatcacatccacttgaccatcg

SEQ ID NO: 12788 - DNA, 25 bp, Saccharomyces pastorianus
agtcaagtacaaactccagttccag

SEQ ID NO: 12789 - DNA, 25 bp, Saccharomyces pastorianus
gggcaatgagccaaacgctgttaaa

SEQ ID NO: 12790 - DNA, 25 bp, Saccharomyces pastorianus
actccgctatgttggcagacgataa

SEQ ID NO: 12791 - DNA, 25 bp, Saccharomyces pastorianus
atgccttacgtgaagaaagcccttt

SEQ ID NO: 12792 - DNA, 25 bp, Saccharomyces pastorianus
gcacctagtgcattcttatagcgac

SEQ ID NO: 12793 - DNA, 25 bp, Saccharomyces pastorianus
atgttgggacttttgcagatcgtga

SEQ ID NO: 12794 - DNA, 25 bp, Saccharomyces pastorianus
ggatactgagtcaacggtttgtcaa

SEQ ID NO: 12795 - DNA, 25 bp, Saccharomyces pastorianus
tggagctacctttatttggcagata

SEQ ID NO: 12796 - DNA, 25 bp, Saccharomyces pastorianus
aatttcttgtcttcaggattatcag

SEQ ID NO: 12797 - DNA, 25 bp, Saccharomyces pastorianus
gagccctcgagagtaatgccttacg

SEQ ID NO: 12798 - DNA, 25 bp, Saccharomyces pastorianus
gccctttctcgcttcagtattgata

SEQ ID NO: 12799 - DNA, 25 bp, Saccharomyces pastorianus
aagacttgccttccctgatggtatt

SEQ ID NO: 12800 - DNA, 25 bp, Saccharomyces pastorianus
gtgggacattccgttggagctacct

SEQ ID NO: 12801 - DNA, 25 bp, Saccharomyces pastorianus
ttagctgcactcaaagatcctcaag

SEQ ID NO: 12802 - DNA, 25 bp, Saccharomyces pastorianus
attagaagacccagcagttagtgaa

SEQ ID NO: 12803 - DNA, 25 bp, Saccharomyces pastorianus
ctgtcagtgaagataagggtggcca

SEQ ID NO: 12804 - DNA, 25 bp, Saccharomyces pastorianus
cattttgagtgaactttccgcatta

SEQ ID NO: 12805 - DNA, 25 bp, Saccharomyces pastorianus
ccaagctggcggagctggcgccatc

SEQ ID NO: 12806 - DNA, 25 bp, Saccharomyces pastorianus
aaggcggagctgaagctgtcagtga

SEQ ID NO: 12807 - DNA, 25 bp, Saccharomyces pastorianus
acccagcagttagtgaaggcggagc

SEQ ID NO: 12808 - DNA, 25 bp, Saccharomyces pastorianus
aatgaattgtccattcaagaccatt

SEQ ID NO: 12809 - DNA, 25 bp, Saccharomyces pastorianus
gaagaagtcgatctaagattgacaa

SEQ ID NO: 12810 - DNA, 25 bp, Saccharomyces pastorianus
tggcgccatcccaggccaatatgtt

SEQ ID NO: 12811 - DNA, 25 bp, Saccharomyces pastorianus
gattgacaaggaactggaagcaagc

SEQ ID NO: 12812 - DNA, 25 bp, Saccharomyces pastorianus
gaccattttgagtgaactttccgca

SEQ ID NO: 12813 - DNA, 25 bp, Saccharomyces pastorianus
ggaactttgcgtaatgaccttgact

SEQ ID NO: 12814 - DNA, 25 bp, Saccharomyces pastorianus
gatcggtttggcaccattatgcagt

SEQ ID NO: 12815 - DNA, 25 bp, Saccharomyces pastorianus
agatggcccgaaactctgaacgtta

SEQ ID NO: 12816 - DNA, 25 bp, Saccharomyces pastorianus
ggcgacattcccactatcataatat

SEQ ID NO: 12817 - DNA, 25 bp, Saccharomyces pastorianus
aaggagtctcaactgctcatacacg

SEQ ID NO: 12818 - DNA, 25 bp, Saccharomyces pastorianus
aagatagtgccgactcatcaccggt

SEQ ID NO: 12819 - DNA, 25 bp, Saccharomyces pastorianus
tgaatacgtgtaccagcggcgacat

SEQ ID NO: 12820 - DNA, 25 bp, Saccharomyces pastorianus
atatccgaatgcttactgtgctaca

SEQ ID NO: 12821 - DNA, 25 bp, Saccharomyces pastorianus
ggttctcagcccaatgatcggtttg

SEQ ID NO: 12822 - DNA, 25 bp, Saccharomyces pastorianus
gcggtctcagcgaagtatgcccatg

SEQ ID NO: 12823 - DNA, 25 bp, Saccharomyces pastorianus
tggactatggatatcgtacgacccc

SEQ ID NO: 12824 - DNA, 25 bp, Saccharomyces pastorianus
ggattccttgtccacagtgacggat

SEQ ID NO: 12825 - DNA, 25 bp, Saccharomyces pastorianus
aatatggtcaatcctaccatcgtcc

SEQ ID NO: 12826 - DNA, 25 bp, Saccharomyces pastorianus
ttatgggcatgctgtgtatctacac

SEQ ID NO: 12827 - DNA, 25 bp, Saccharomyces pastorianus
gatactagacatctttccgcagagg

SEQ ID NO: 12828 - DNA, 25 bp, Saccharomyces pastorianus
gatggatcatcactctggaaggcat

SEQ ID NO: 12829 - DNA, 25 bp, Saccharomyces pastorianus
gtatctacaccggtcttctgatgta

SEQ ID NO: 12830 - DNA, 25 bp, Saccharomyces pastorianus
taccatcgtccttcggtgaggctac

SEQ ID NO: 12831 - DNA, 25 bp, Saccharomyces pastorianus
tacaatgaagactcgttaaccccac

SEQ ID NO: 12832 - DNA, 25 bp, Saccharomyces pastorianus
atgcgggcggccagctcgtaatact

SEQ ID NO: 12833 - DNA, 25 bp, Saccharomyces pastorianus
agcagttcgtcaacacgatactaga

SEQ ID NO: 12834 - DNA, 25 bp, Saccharomyces pastorianus
gtgaggctaccccacagcagttcgt

SEQ ID NO: 12835 - DNA, 25 bp, Saccharomyces pastorianus
gtcagttccccagtcaagggcgtat

SEQ ID NO: 12836 - DNA, 25 bp, Saccharomyces pastorianus
aacgaggcaacggatcaccacattg

SEQ ID NO: 12837 - DNA, 25 bp, Saccharomyces pastorianus
agaatcaacaccttggtcagttccc

SEQ ID NO: 12838 - DNA, 25 bp, Saccharomyces pastorianus
ttgagctgtcgagtatcggtgattc

SEQ ID NO: 12839 - DNA, 25 bp, Saccharomyces pastorianus
tatcaccattgctttcaaaacccgc

SEQ ID NO: 12840 - DNA, 25 bp, Saccharomyces pastorianus
gacatctaggagctcaactgccaat

SEQ ID NO: 12841 - DNA, 25 bp, Saccharomyces pastorianus
ggtgattcgaccacgatgacatcta

SEQ ID NO: 12842 - DNA, 25 bp, Saccharomyces pastorianus
gaaggatgaccatttggcggatcat

SEQ ID NO: 12843 - DNA, 25 bp, Saccharomyces pastorianus
gcggatcatgatatactgccaccta

SEQ ID NO: 12844 - DNA, 25 bp, Saccharomyces pastorianus
cgaacctgactcacctatatcaaag

SEQ ID NO: 12845 - DNA, 25 bp, Saccharomyces pastorianus
accacattgcccaattcagatgagg

SEQ ID NO: 12846 - DNA, 25 bp, Saccharomyces pastorianus
atcatggatgatgttcttgccaccg

SEQ ID NO: 12847 - DNA, 25 bp, Saccharomyces pastorianus
gctagaggtcttttgtttgggccgt

SEQ ID NO: 12848 - DNA, 25 bp, Saccharomyces pastorianus
atggctgcaggtaatctcatcaaac

SEQ ID NO: 12849 - DNA, 25 bp, Saccharomyces pastorianus
tagcactgggcgttggattcgtacc

SEQ ID NO: 12850 - DNA, 25 bp, Saccharomyces pastorianus
gaaacccaaagctattccagaagtt

SEQ ID NO: 12851 - DNA, 25 bp, Saccharomyces pastorianus
tttgggccgtccgtagcattagcac

SEQ ID NO: 12852 - DNA, 25 bp, Saccharomyces pastorianus
aactaccaggtgagtgtgctacagt

SEQ ID NO: 12853 - DNA, 25 bp, Saccharomyces pastorianus
tctcatcaaacaagtgggtgcccat

SEQ ID NO: 12854 - DNA, 25 bp, Saccharomyces pastorianus
gtaacgtttacgaagctggaccatg

SEQ ID NO: 12855 - DNA, 25 bp, Saccharomyces pastorianus
gatcgattttattgcgggtgtagaa

SEQ ID NO: 12856 - DNA, 25 bp, Saccharomyces pastorianus
ttgatcaacgctttcgcaacacatt

SEQ ID NO: 12857 - DNA, 25 bp, Saccharomyces pastorianus
ccaaaaatactttctcctgctacag

SEQ ID NO: 12858 - DNA, 25 bp, Saccharomyces pastorianus
tgttaagaccgagcccacaggattt

SEQ ID NO: 12859 - DNA, 25 bp, Saccharomyces pastorianus
tgatcagcaattccaactctaccaa

SEQ ID NO: 12860 - DNA, 25 bp, Saccharomyces pastorianus
gttgctgaccccaatttcaaagaaa

SEQ ID NO: 12861 - DNA, 25 bp, Saccharomyces pastorianus
tagtgtagccgattcgacattggaa

SEQ ID NO: 12862 - DNA, 25 bp, Saccharomyces pastorianus
gactactctagtatgttacctgctg

SEQ ID NO: 12863 - DNA, 25 bp, Saccharomyces pastorianus
gcagttagcgacacaccaaatgtta

SEQ ID NO: 12864 - DNA, 25 bp, Saccharomyces pastorianus
gatacgtgtctccaagactactcta

SEQ ID NO: 12865 - DNA, 25 bp, Saccharomyces pastorianus
aaatgtatcatctccggctaaacaa

SEQ ID NO: 12866 - DNA, 25 bp, Saccharomyces pastorianus
gggccaggaaatccttgatcagcaa

SEQ ID NO: 12867 - DNA, 25 bp, Saccharomyces pastorianus
acaggatttcagttgctgaccccaa

SEQ ID NO: 12868 - DNA, 25 bp, Saccharomyces pastorianus
gaagttccatggcaaacctgtggtt

SEQ ID NO: 12869 - DNA, 25 bp, Saccharomyces pastorianus
ttattaaagacctcacctccaaaca

SEQ ID NO: 12870 - DNA, 25 bp, Saccharomyces pastorianus
ataacgctcggttggctcgtcgaaa

SEQ ID NO: 12871 - DNA, 25 bp, Saccharomyces pastorianus
gaacgtcgtcgcatgagttaggaat

SEQ ID NO: 12872 - DNA, 25 bp, Saccharomyces pastorianus
ctccaaacatctctgcatcgatttt

SEQ ID NO: 12873 - DNA, 25 bp, Saccharomyces pastorianus
aagccgttgcaagattcactccagt

SEQ ID NO: 12874 - DNA, 25 bp, Saccharomyces pastorianus
gactgcgttcgatgaatgtcccact

SEQ ID NO: 12875 - DNA, 25 bp, Saccharomyces pastorianus
aagacgatcatattaccccttgtaa

SEQ ID NO: 12876 - DNA, 25 bp, Saccharomyces pastorianus
atgtcccactcctagtaagaccaag

SEQ ID NO: 12877 - DNA, 25 bp, Saccharomyces pastorianus
tcactccagtgattcgatttctatg

SEQ ID NO: 12878 - DNA, 25 bp, Saccharomyces pastorianus
tttagagattacttccaccccaaca

SEQ ID NO: 12879 - DNA, 25 bp, Saccharomyces pastorianus
aaacggttccagttgaaatgccaga

SEQ ID NO: 12880 - DNA, 25 bp, Saccharomyces pastorianus
taggtggttctgtcattccaacttt

SEQ ID NO: 12881 - DNA, 25 bp, Saccharomyces pastorianus
ccaactttcaatcctgcctttagaa

SEQ ID NO: 12882 - DNA, 25 bp, Saccharomyces pastorianus
gtatgtaccgcaactgtttactcca

SEQ ID NO: 12883 - DNA, 25 bp, Saccharomyces pastorianus
atacggactaggtcccgcgtatgta

SEQ ID NO: 12884 - DNA, 25 bp, Saccharomyces pastorianus
gaatccttactggaagacgaaccgg

SEQ ID NO: 12885 - DNA, 25 bp, Saccharomyces pastorianus
gaagccgtactcgatggacacgtta

SEQ ID NO: 12886 - DNA, 25 bp, Saccharomyces pastorianus
acattgactcccgaattagcagcga

SEQ ID NO: 12887 - DNA, 25 bp, Saccharomyces pastorianus
tgtatgaagacaaccctgcatggga

SEQ ID NO: 12888 - DNA, 25 bp, Saccharomyces pastorianus
atagcagatgaatccgacttcggta

SEQ ID NO: 12889 - DNA, 25 bp, Saccharomyces pastorianus
gtacacctcggatgagaagccgtac

SEQ ID NO: 12890 - DNA, 25 bp, Saccharomyces pastorianus
aatgggtgacaattccttcggagag

SEQ ID NO: 12891 - DNA, 25 bp, Saccharomyces pastorianus
attgaagcccgtgttcttggataac

SEQ ID NO: 12892 - DNA, 25 bp, Saccharomyces pastorianus
aaatgatgacattctgggccggact

SEQ ID NO: 12893 - DNA, 25 bp, Saccharomyces pastorianus
ttggataacatgtcgccgtccatac

SEQ ID NO: 12894 - DNA, 25 bp, Saccharomyces pastorianus
atcatctttggaggtactacggcag

SEQ ID NO: 12895 - DNA, 25 bp, Saccharomyces pastorianus
ggtgttgctttagccttgggtattc

SEQ ID NO: 12896 - DNA, 25 bp, Saccharomyces pastorianus
ataagctaggcacgatcttcaacgc

SEQ ID NO: 12897 - DNA, 25 bp, Saccharomyces pastorianus
tactttattggcgacggttcttgtt

SEQ ID NO: 12898 - DNA, 25 bp, Saccharomyces pastorianus
tttatgagtggtagccccatgccga

SEQ ID NO: 12899 - DNA, 25 bp, Saccharomyces pastorianus
gagtgttcctgatcatccatcaatg

SEQ ID NO: 12900 - DNA, 25 bp, Saccharomyces pastorianus
ggtttagggccatattctgataaca

SEQ ID NO: 12901 - DNA, 25 bp, Saccharomyces pastorianus
accacctatgtcaattataccgcga

SEQ ID NO: 12902 - DNA, 25 bp, Saccharomyces pastorianus
tttgcctccttatgaatcgtatgaa

SEQ ID NO: 12903 - DNA, 25 bp, Saccharomyces pastorianus
gtcaattacttctggagggcggtta

SEQ ID NO: 12904 - DNA, 25 bp, Saccharomyces pastorianus
cttcaatcagctgaatttgcctcct

SEQ ID NO: 12905 - DNA, 25 bp, Saccharomyces pastorianus
gattgccatcatcgcatacttgctt

SEQ ID NO: 12906 - DNA, 25 bp, Saccharomyces pastorianus
gttacgaggttctttattgttagca

SEQ ID NO: 12907 - DNA, 25 bp, Saccharomyces pastorianus
gaaacattttccgttgagactgatg

SEQ ID NO: 12908 - DNA, 25 bp, Saccharomyces pastorianus
gtgctaagctactgcaattcgttac

SEQ ID NO: 12909 - DNA, 25 bp, Saccharomyces pastorianus
gttggcttctatgctctgatatcta

SEQ ID NO: 12910 - DNA, 25 bp, Saccharomyces pastorianus
taagcttcaaacatccgtcaaggag

SEQ ID NO: 12911 - DNA, 25 bp, Saccharomyces pastorianus
agttgctgattagtggtttacctga

SEQ ID NO: 12912 - DNA, 25 bp, Saccharomyces pastorianus
tcgagaagtgctggtcgatctacca

SEQ ID NO: 12913 - DNA, 25 bp, Saccharomyces pastorianus
accagcagcagcagcgtgagcgcag

SEQ ID NO: 12914 - DNA, 25 bp, Saccharomyces pastorianus
ggtcacgcagctgagtgtgatttca

SEQ ID NO: 12915 - DNA, 25 bp, Saccharomyces pastorianus
agggtgccatgtccttgctgcaaga

SEQ ID NO: 12916 - DNA, 25 bp, Saccharomyces pastorianus
caagctgctgaaactctcgcgggag

SEQ ID NO: 12917 - DNA, 25 bp, Saccharomyces pastorianus
gagcaagagcgcaatgtcgcccctg

SEQ ID NO: 12918 - DNA, 25 bp, Saccharomyces pastorianus
agcgggtgtccggaaccacagtgtt

SEQ ID NO: 12919 - DNA, 25 bp, Saccharomyces pastorianus
agaagccatgcaggaccgtcgtgga

SEQ ID NO: 12920 - DNA, 25 bp, Saccharomyces pastorianus
gcgggaggatttgatcaagcaccaa

SEQ ID NO: 12921 - DNA, 25 bp, Saccharomyces pastorianus
aagagctcagccctcggctattcga

SEQ ID NO: 12922 - DNA, 25 bp, Saccharomyces pastorianus
ggaacacacagctagagttgcagta

SEQ ID NO: 12923 - DNA, 25 bp, Saccharomyces pastorianus
ggaaactatataacccgtcacaaca

SEQ ID NO: 12924 - DNA, 25 bp, Saccharomyces pastorianus
atttgatgccttgaaaacgcgtttc

SEQ ID NO: 12925 - DNA, 25 bp, Saccharomyces pastorianus
gatgactgttgtataggactactca

SEQ ID NO: 12926 - DNA, 25 bp, Saccharomyces pastorianus
ggtttccaacactaataatgacggc

SEQ ID NO: 12927 - DNA, 25 bp, Saccharomyces pastorianus
aacaccgccggtgatgatgatcaag

SEQ ID NO: 12928 - DNA, 25 bp, Saccharomyces pastorianus
caggatgttcatttggacggtattc

SEQ ID NO: 12929 - DNA, 25 bp, Saccharomyces pastorianus
agagcaattggaccgcttgggaaac

SEQ ID NO: 12930 - DNA, 25 bp, Saccharomyces pastorianus
aggactactcatcgttgtcttgata

SEQ ID NO: 12931 - DNA, 25 bp, Saccharomyces pastorianus
gcagaatttgcatatccaagcccaa

SEQ ID NO: 12932 - DNA, 25 bp, Saccharomyces pastorianus
taatgacggcggtatgtccaaccca

SEQ ID NO: 12933 - DNA, 25 bp, Saccharomyces pastorianus
aacgcgtttcgatcaaaggatacaa

SEQ ID NO: 12934 - DNA, 25 bp, Saccharomyces pastorianus
gcgtagaaacggtgtttccattcct

SEQ ID NO: 12935 - DNA, 25 bp, Saccharomyces pastorianus
atttgcggatatgggctacagataa

SEQ ID NO: 12936 - DNA, 25 bp, Saccharomyces pastorianus
tggcgtgatcagtttaatttgcgga

SEQ ID NO: 12937 - DNA, 25 bp, Saccharomyces pastorianus
gggtgcaggaatatttaccagtatt

SEQ ID NO: 12938 - DNA, 25 bp, Saccharomyces pastorianus
tacgtcgttgccagttaaactatct

SEQ ID NO: 12939 - DNA, 25 bp, Saccharomyces pastorianus
gtaagatcaccaacaccagaagttt

SEQ ID NO: 12940 - DNA, 25 bp, Saccharomyces pastorianus
ggtcatttacaatcaattccacata

SEQ ID NO: 12941 - DNA, 25 bp, Saccharomyces pastorianus
cattcctttagatatgtggtcttta

SEQ ID NO: 12942 - DNA, 25 bp, Saccharomyces pastorianus
aatcatttattttagccttgggtgc

SEQ ID NO: 12943 - DNA, 25 bp, Saccharomyces pastorianus
tattgtttaaagtcgattccactga

SEQ ID NO: 12944 - DNA, 25 bp, Saccharomyces pastorianus
gttccaaaacaaatacaggccaatt

SEQ ID NO: 12945 - DNA, 25 bp, Saccharomyces pastorianus
gggcgacgagaaatcgtgcagattt

SEQ ID NO: 12946 - DNA, 25 bp, Saccharomyces pastorianus
actctattacgtactttgagccaat

SEQ ID NO: 12947 - DNA, 25 bp, Saccharomyces pastorianus
tgtaactttcgtaaagccgtcggcg

SEQ ID NO: 12948 - DNA, 25 bp, Saccharomyces pastorianus
aaaaggcttgtgtcttcgtataaat

SEQ ID NO: 12949 - DNA, 25 bp, Saccharomyces pastorianus
ggactactaccaaagcctgaaccaa

SEQ ID NO: 12950 - DNA, 25 bp, Saccharomyces pastorianus
atatatcggatccaactgcctggga

SEQ ID NO: 12951 - DNA, 25 bp, Saccharomyces pastorianus
atgagcatgcaacataattcgattg

SEQ ID NO: 12952 - DNA, 25 bp, Saccharomyces pastorianus
gtcggcgtaccactgcaaggtattt

SEQ ID NO: 12953 - DNA, 25 bp, Saccharomyces pastorianus
gtgtgtaatgaccaagaaactctat

SEQ ID NO: 12954 - DNA, 25 bp, Saccharomyces pastorianus
gaattattatagtggtgggcgacga

SEQ ID NO: 12955 - DNA, 25 bp, Saccharomyces pastorianus
gagcgtctacgaaaatgaccagaat

SEQ ID NO: 12956 - DNA, 25 bp, Saccharomyces pastorianus
atgagcactttttcggcttatccat

SEQ ID NO: 12957 - DNA, 25 bp, Saccharomyces pastorianus
aagaatggccagttccactactcag

SEQ ID NO: 12958 - DNA, 25 bp, Saccharomyces pastorianus
ccaccgtttccaacatgtctgaaga

SEQ ID NO: 12959 - DNA, 25 bp, Saccharomyces pastorianus
aatctccattttacccacatcttta

SEQ ID NO: 12960 - DNA, 25 bp, Saccharomyces pastorianus
gctttgaaaaacttgggcgccgagt

SEQ ID NO: 12961 - DNA, 25 bp, Saccharomyces pastorianus
gttacggagatgacaccaccgtttc

SEQ ID NO: 12962 - DNA, 25 bp, Saccharomyces pastorianus
catagggctaacatgttggcgcagg

SEQ ID NO: 12963 - DNA, 25 bp, Saccharomyces pastorianus
agaggaagactccacaatctccatt

SEQ ID NO: 12964 - DNA, 25 bp, Saccharomyces pastorianus
tctttaccacagatccatagggcta

SEQ ID NO: 12965 - DNA, 25 bp, Saccharomyces pastorianus
cgccgagtgggcaaaaccttctgaa

SEQ ID NO: 12966 - DNA, 25 bp, Saccharomyces pastorianus
gccgcatccaagatatctccattaa

SEQ ID NO: 12967 - DNA, 25 bp, Saccharomyces pastorianus
gagaatcctcagtacgttgacaaga

SEQ ID NO: 12968 - DNA, 25 bp, Saccharomyces pastorianus
aagtttatggtttcaccgtctccat

SEQ ID NO: 12969 - DNA, 25 bp, Saccharomyces pastorianus
gggccttataataactgtccgttgg

SEQ ID NO: 12970 - DNA, 25 bp, Saccharomyces pastorianus
gtctccatccatgaatatgcggcca

SEQ ID NO: 12971 - DNA, 25 bp, Saccharomyces pastorianus
gatcatcaaggtgggttcttttacg

SEQ ID NO: 12972 - DNA, 25 bp, Saccharomyces pastorianus
tgatgctcctgttcattccattgct

SEQ ID NO: 12973 - DNA, 25 bp, Saccharomyces pastorianus
gacattggttactatcacgggcctt

SEQ ID NO: 12974 - DNA, 25 bp, Saccharomyces pastorianus
tggaaccaaacatcaagctacactg

SEQ ID NO: 12975 - DNA, 25 bp, Saccharomyces pastorianus
cattgctgcttctttgtttttacca

SEQ ID NO: 12976 - DNA, 25 bp, Saccharomyces pastorianus
gccactattccttccttatgggaaa

SEQ ID NO: 12977 - DNA, 25 bp, Saccharomyces pastorianus
tactttccaaagttactcttgcggt

SEQ ID NO: 12978 - DNA, 25 bp, Saccharomyces pastorianus
gagatataccgtccatgtttgatag

SEQ ID NO: 12979 - DNA, 25 bp, Saccharomyces pastorianus
ggcaataacacataaactggccatt

SEQ ID NO: 12980 - DNA, 25 bp, Saccharomyces pastorianus
tgacccattaacttcaccacatgaa

SEQ ID NO: 12981 - DNA, 25 bp, Saccharomyces pastorianus
gtactaatcagtatccgtgtggcaa

SEQ ID NO: 12982 - DNA, 25 bp, Saccharomyces pastorianus
tcagagagaccgagaaccacttcaa

SEQ ID NO: 12983 - DNA, 25 bp, Saccharomyces pastorianus
agttgattcagttatggccccggtt

SEQ ID NO: 12984 - DNA, 25 bp, Saccharomyces pastorianus
ggccccggtttcagcagttggtaga

SEQ ID NO: 12985 - DNA, 25 bp, Saccharomyces pastorianus
gatagtttcttaaacggccagttga

SEQ ID NO: 12986 - DNA, 25 bp, Saccharomyces pastorianus
gaatatgactgactcgaatacgcaa

SEQ ID NO: 12987 - DNA, 25 bp, Saccharomyces pastorianus
gtaagttttctgacattggcaataa

SEQ ID NO: 12988 - DNA, 25 bp, Saccharomyces pastorianus
ccgtgtggcaaatcaactgcagttt

SEQ ID NO: 12989 - DNA, 25 bp, Saccharomyces pastorianus
acgagtttggcaagccgtgctacac

SEQ ID NO: 12990 - DNA, 25 bp, Saccharomyces pastorianus
aaactccctctgctttgcatggaaa

SEQ ID NO: 12991 - DNA, 25 bp, Saccharomyces pastorianus
ggaacaagttcgtcttcatacacgt

SEQ ID NO: 12992 - DNA, 25 bp, Saccharomyces pastorianus
gaggtcgaactaaccattggcagta

SEQ ID NO: 12993 - DNA, 25 bp, Saccharomyces pastorianus
gtgacaatcccggacttgaacgaag

SEQ ID NO: 12994 - DNA, 25 bp, Saccharomyces pastorianus
tcatacacgtgaatgggccgccaga

SEQ ID NO: 12995 - DNA, 25 bp, Saccharomyces pastorianus
gactgttgaaccgaatatccgcgca

SEQ ID NO: 12996 - DNA, 25 bp, Saccharomyces pastorianus
gatcgacaaattctcgctctactta

SEQ ID NO: 12997 - DNA, 25 bp, Saccharomyces pastorianus
tgacctcccttaccgatttattgtc

SEQ ID NO: 12998 - DNA, 25 bp, Saccharomyces pastorianus
gctacgtacgatgtaggctcggcaa

SEQ ID NO: 12999 - DNA, 25 bp, Saccharomyces pastorianus
acgactcgcattctcttatctggtt

SEQ ID NO: 13000 - DNA, 25 bp, Saccharomyces pastorianus
ttgatcttgagacgcttgctccaga

SEQ ID NO: 13001 - DNA, 25 bp, Saccharomyces pastorianus
ttgtatgacgaaggctcccgaggga

SEQ ID NO: 13002 - DNA, 25 bp, Saccharomyces pastorianus
gaggcagcaacttgaagcgacccgc

SEQ ID NO: 13003 - DNA, 25 bp, Saccharomyces pastorianus
aagccacggaaagctcagcggttga

SEQ ID NO: 13004 - DNA, 25 bp, Saccharomyces pastorianus
gcgtgagttcgagctacagtttgaa

SEQ ID NO: 13005 - DNA, 25 bp, Saccharomyces pastorianus
atcgattctcctacagaaagcgccg

SEQ ID NO: 13006 - DNA, 25 bp, Saccharomyces pastorianus
tacaagagcccctgcgatatcgatt

SEQ ID NO: 13007 - DNA, 25 bp, Saccharomyces pastorianus
gcgatcatcgtccaattattccaaa

SEQ ID NO: 13008 - DNA, 25 bp, Saccharomyces pastorianus
aacggtcttcctggcagttgtatga

SEQ ID NO: 13009 - DNA, 25 bp, Saccharomyces pastorianus
gagcaggttagtcaacggtcttcct

SEQ ID NO: 13010 - DNA, 25 bp, Saccharomyces pastorianus
ggttcctcatgtacctgaatcgagc

SEQ ID NO: 13011 - DNA, 25 bp, Saccharomyces pastorianus
gtaaatataccccaggatcgtcatt

SEQ ID NO: 13012 - DNA, 25 bp, Saccharomyces pastorianus
gcgaatatcagctcttgaagccata

SEQ ID NO: 13013 - DNA, 25 bp, Saccharomyces pastorianus
tatgttctgtatgagccaacgcctt

SEQ ID NO: 13014 - DNA, 25 bp, Saccharomyces pastorianus
gaagtccaattaccctgtttataga

SEQ ID NO: 13015 - DNA, 25 bp, Saccharomyces pastorianus
gccaacgcctttatctttactagaa

SEQ ID NO: 13016 - DNA, 25 bp, Saccharomyces pastorianus
ggttaagagacctgctagtactgaa

SEQ ID NO: 13017 - DNA, 25 bp, Saccharomyces pastorianus
aatctgttgccatagcctctgaaga

SEQ ID NO: 13018 - DNA, 25 bp, Saccharomyces pastorianus
gtcacattttgacggcatctaagag

SEQ ID NO: 13019 - DNA, 25 bp, Saccharomyces pastorianus
actcacctcaagtgtttccaactaa

SEQ ID NO: 13020 - DNA, 25 bp, Saccharomyces pastorianus
gccgaatcgcaaggctgtcattaca

SEQ ID NO: 13021 - DNA, 25 bp, Saccharomyces pastorianus
aaatttgcctttgcaggaggatttt

SEQ ID NO: 13022 - DNA, 25 bp, Saccharomyces pastorianus
aaatcatcgattcctccaacttgtt

SEQ ID NO: 13023 - DNA, 25 bp, Saccharomyces pastorianus
ccccatgtttttgagtaccatatca

SEQ ID NO: 13024 - DNA, 25 bp, Saccharomyces pastorianus
aagaagacacgaacttttatccaag

SEQ ID NO: 13025 - DNA, 25 bp, Saccharomyces pastorianus
attgaattatccgaagccacttcta

SEQ ID NO: 13026 - DNA, 25 bp, Saccharomyces pastorianus
tagagctttctctactagattattg

SEQ ID NO: 13027 - DNA, 25 bp, Saccharomyces pastorianus
cgatgagttatacgcacaattgaat

SEQ ID NO: 13028 - DNA, 25 bp, Saccharomyces pastorianus
gaacctgggctgtcaatttgttgca

SEQ ID NO: 13029 - DNA, 25 bp, Saccharomyces pastorianus
aaggcttaggtgttccattcgccta

SEQ ID NO: 13030 - DNA, 25 bp, Saccharomyces pastorianus
ggaatggattaacaacgctgatagc

SEQ ID NO: 13031 - DNA, 25 bp, Saccharomyces pastorianus
attgttgccctatacgaaactttga

SEQ ID NO: 13032 - DNA, 25 bp, Saccharomyces pastorianus
gttccattcgcctacaaattatatg

SEQ ID NO: 13033 - DNA, 25 bp, Saccharomyces pastorianus
actagcgcagttgttgcctcaggat

SEQ ID NO: 13034 - DNA, 25 bp, Saccharomyces pastorianus
cttcattttcactttggttgccttt

SEQ ID NO: 13035 - DNA, 25 bp, Saccharomyces pastorianus
aacattactccagcaggttcctttg

SEQ ID NO: 13036 - DNA, 25 bp, Saccharomyces pastorianus
gcattctatgcccttggtatcggta

SEQ ID NO: 13037 - DNA, 25 bp, Saccharomyces pastorianus
ggttgcctttttctgcatcgataaa

SEQ ID NO: 13038 - DNA, 25 bp, Saccharomyces pastorianus
atcagtttcgatggcactagcgcag

SEQ ID NO: 13039 - DNA, 25 bp, Saccharomyces pastorianus
gccggactttcatgcttatcagtag

SEQ ID NO: 13040 - DNA, 25 bp, Saccharomyces pastorianus
gctggttctctagttattgcgtcta

SEQ ID NO: 13041 - DNA, 25 bp, Saccharomyces pastorianus
gtatgcgaccgctacaaactgggct

SEQ ID NO: 13042 - DNA, 25 bp, Saccharomyces pastorianus
gccattgcattccattacctaggta

SEQ ID NO: 13043 - DNA, 25 bp, Saccharomyces pastorianus
gtagaaccattctgctaatcggcct

SEQ ID NO: 13044 - DNA, 25 bp, Saccharomyces pastorianus
gagaaatgctcatctgttcatctga

SEQ ID NO: 13045 - DNA, 25 bp, Saccharomyces pastorianus
catgtcattatggagatttctcgta

SEQ ID NO: 13046 - DNA, 25 bp, Saccharomyces pastorianus
tatcgagggaacaagcactaatggt

SEQ ID NO: 13047 - DNA, 25 bp, Saccharomyces pastorianus
gaccattttgaacaactacgtgaag

SEQ ID NO: 13048 - DNA, 25 bp, Saccharomyces pastorianus
gttcatctgagtttttatcgaggga

SEQ ID NO: 13049 - DNA, 25 bp, Saccharomyces pastorianus
aatttggatcttcggtgccacctta

SEQ ID NO: 13050 - DNA, 25 bp, Saccharomyces pastorianus
atgtaggacaagactcgcccaattt

SEQ ID NO: 13051 - DNA, 25 bp, Saccharomyces pastorianus
gaaagtcaactagtcatgtcattat

SEQ ID NO: 13052 - DNA, 25 bp, Saccharomyces pastorianus
ttcggtgccaccttattgaacatgc

SEQ ID NO: 13053 - DNA, 25 bp, Saccharomyces pastorianus
aaatcattcgacttaactacactag

SEQ ID NO: 13054 - DNA, 25 bp, Saccharomyces pastorianus
agatgcttttgaagaacttccagga

SEQ ID NO: 13055 - DNA, 25 bp, Saccharomyces pastorianus
aatactgttcaggagacgccgcttc

SEQ ID NO: 13056 - DNA, 25 bp, Saccharomyces pastorianus
gattcaccgagccactttcaaaaat

SEQ ID NO: 13057 - DNA, 25 bp, Saccharomyces pastorianus
attcaatcacttcgcagttgagcag

SEQ ID NO: 13058 - DNA, 25 bp, Saccharomyces pastorianus
attactgacgaatctccttcatgta

SEQ ID NO: 13059 - DNA, 25 bp, Saccharomyces pastorianus
gcgcaaatcaccgtctttcagataa

SEQ ID NO: 13060 - DNA, 25 bp, Saccharomyces pastorianus
ggaaccaccaaattctcgtagtagc

SEQ ID NO: 13061 - DNA, 25 bp, Saccharomyces pastorianus
gccatgtaccccaaagaagctcaag

SEQ ID NO: 13062 - DNA, 25 bp, Saccharomyces pastorianus
attcatagggacgactttgttcata

SEQ ID NO: 13063 - DNA, 25 bp, Saccharomyces pastorianus
ggagacgccgcttcctaaagataag

SEQ ID NO: 13064 - DNA, 25 bp, Saccharomyces pastorianus
caaactccgttatccgacttacaga

SEQ ID NO: 13065 - DNA, 25 bp, Saccharomyces pastorianus
catcttgctttttctaatctccaac

SEQ ID NO: 13066 - DNA, 25 bp, Saccharomyces pastorianus
aaatgatggcgctcctaacagtttt

SEQ ID NO: 13067 - DNA, 25 bp, Saccharomyces pastorianus
tgcgcctccgcttaatgaaatccaa

SEQ ID NO: 13068 - DNA, 25 bp, Saccharomyces pastorianus
aatagaattaactttgcgcctccgc

SEQ ID NO: 13069 - DNA, 25 bp, Saccharomyces pastorianus
gccactccgtgggaagtaactacta

SEQ ID NO: 13070 - DNA, 25 bp, Saccharomyces pastorianus
aagcaagtcttacggtttgccactc

SEQ ID NO: 13071 - DNA, 25 bp, Saccharomyces pastorianus
aaaggctctacatattgctcaaaca

SEQ ID NO: 13072 - DNA, 25 bp, Saccharomyces pastorianus
gaatctggctatgtgctatcccaaa

SEQ ID NO: 13073 - DNA, 25 bp, Saccharomyces pastorianus
tccaaattccgcaaactactctaag

SEQ ID NO: 13074 - DNA, 25 bp, Saccharomyces pastorianus
ttatcgatcgattctaagtattacg

SEQ ID NO: 13075 - DNA, 25 bp, Saccharomyces pastorianus
gaattgattattccttctaagcaag

SEQ ID NO: 13076 - DNA, 25 bp, Saccharomyces pastorianus
gtaaatgacttctctcaaattaggt

SEQ ID NO: 13077 - DNA, 25 bp, Saccharomyces pastorianus
ttacgttcgacactatttgaggtta

SEQ ID NO: 13078 - DNA, 25 bp, Saccharomyces pastorianus
gattcttcgtcgcatgctgaaaaag

SEQ ID NO: 13079 - DNA, 25 bp, Saccharomyces pastorianus
gaaccaccattgaataagaccgtac

SEQ ID NO: 13080 - DNA, 25 bp, Saccharomyces pastorianus
tgaatcagattcttcgtcgcatgct

SEQ ID NO: 13081 - DNA, 25 bp, Saccharomyces pastorianus
ggtacacaggtcaaaaatcaatcga

SEQ ID NO: 13082 - DNA, 25 bp, Saccharomyces pastorianus
atatgttttctttacgttcgacact

SEQ ID NO: 13083 - DNA, 25 bp, Saccharomyces pastorianus
agaaattgctacgtggttggaatca

SEQ ID NO: 13084 - DNA, 25 bp, Saccharomyces pastorianus
aggaagaacttcatgagcaagcgaa

SEQ ID NO: 13085 - DNA, 25 bp, Saccharomyces pastorianus
gtggaagtggctcttttttcagaaa

SEQ ID NO: 13086 - DNA, 25 bp, Saccharomyces pastorianus
gaagaatgtcaaatccaatccaaac

SEQ ID NO: 13087 - DNA, 25 bp, Saccharomyces pastorianus
gagttatacgctaaagtttcagcaa

SEQ ID NO: 13088 - DNA, 25 bp, Saccharomyces pastorianus
tttcgagaattacttggccatgcca

SEQ ID NO: 13089 - DNA, 25 bp, Saccharomyces pastorianus
aggattggactttgttcattcccgc

SEQ ID NO: 13090 - DNA, 25 bp, Saccharomyces pastorianus
gttctcgtattctgatgtctttggc

SEQ ID NO: 13091 - DNA, 25 bp, Saccharomyces pastorianus
gatggtattggctttgattgcacaa

SEQ ID NO: 13092 - DNA, 25 bp, Saccharomyces pastorianus
gttgccatgcttgttagtgcactat

SEQ ID NO: 13093 - DNA, 25 bp, Saccharomyces pastorianus
tttccccaatcggtggaggtggcaa

SEQ ID NO: 13094 - DNA, 25 bp, Saccharomyces pastorianus
attttgtgcctcttctccaaaggag

SEQ ID NO: 13095 - DNA, 25 bp, Saccharomyces pastorianus
gtctgcgtacgctataatcatgatg

SEQ ID NO: 13096 - DNA, 25 bp, Saccharomyces pastorianus
tgtcccaacttttcacttggatcac

SEQ ID NO: 13097 - DNA, 25 bp, Saccharomyces pastorianus
tagcaatttccggtttgtcccaact

SEQ ID NO: 13098 - DNA, 25 bp, Saccharomyces pastorianus
gaaggtagaccagcagttgccatgc

SEQ ID NO: 13099 - DNA, 25 bp, Saccharomyces pastorianus
tggctcttcagagattttcttcaag

SEQ ID NO: 13100 - DNA, 25 bp, Saccharomyces pastorianus
agccaagccagacgtcaagccagac

SEQ ID NO: 13101 - DNA, 25 bp, Saccharomyces pastorianus
aagccgaccagacccctgaagatct

SEQ ID NO: 13102 - DNA, 25 bp, Saccharomyces pastorianus
gaggctttcgccaagagacaaggta

SEQ ID NO: 13103 - DNA, 25 bp, Saccharomyces pastorianus
gaaaaccactcccttgaggagactg

SEQ ID NO: 13104 - DNA, 25 bp, Saccharomyces pastorianus
taacctgaaggtgtctgatggctct

SEQ ID NO: 13105 - DNA, 25 bp, Saccharomyces pastorianus
ggagactgatggaggctttcgccaa

SEQ ID NO: 13106 - DNA, 25 bp, Saccharomyces pastorianus
ggaggacaacgatatcatcgaggct

SEQ ID NO: 13107 - DNA, 25 bp, Saccharomyces pastorianus
ttacgacggtatcagaatccaagcc

SEQ ID NO: 13108 - DNA, 25 bp, Saccharomyces pastorianus
gacgtcaagccggagactcacatta

SEQ ID NO: 13109 - DNA, 25 bp, Saccharomyces pastorianus
agccggagactcacattaacctgaa

SEQ ID NO: 13110 - DNA, 25 bp, Saccharomyces pastorianus
gggcaacgatgcatactacacactg

SEQ ID NO: 13111 - DNA, 25 bp, Saccharomyces pastorianus
ggacgagcccaagattttacctatg

SEQ ID NO: 13112 - DNA, 25 bp, Saccharomyces pastorianus
atttagcgggtcacaatggttccaa

SEQ ID NO: 13113 - DNA, 25 bp, Saccharomyces pastorianus
atactacacactgctattgatgctg

SEQ ID NO: 13114 - DNA, 25 bp, Saccharomyces pastorianus
aaaccagatggttcggtggaggcta

SEQ ID NO: 13115 - DNA, 25 bp, Saccharomyces pastorianus
gggtaagctgctaagactatttcat

SEQ ID NO: 13116 - DNA, 25 bp, Saccharomyces pastorianus
aagattggcgttcacatacccgagt

SEQ ID NO: 13117 - DNA, 25 bp, Saccharomyces pastorianus
attaagcgtgatgaatgccaacaac

SEQ ID NO: 13118 - DNA, 25 bp, Saccharomyces pastorianus
aaatctatagcatctgttacggtaa

SEQ ID NO: 13119 - DNA, 25 bp, Saccharomyces pastorianus
ccttcttacataatgcgggcaacga

SEQ ID NO: 13120 - DNA, 25 bp, Saccharomyces pastorianus
gaaagagcttttgtaggtcacagta

SEQ ID NO: 13121 - DNA, 25 bp, Saccharomyces pastorianus
gaccctattctcaaatccatcgaaa

SEQ ID NO: 13122 - DNA, 25 bp, Saccharomyces pastorianus
aaacgcatttccattcacagcaata

SEQ ID NO: 13123 - DNA, 25 bp, Saccharomyces pastorianus
gataactatttcatcagacctgaga

SEQ ID NO: 13124 - DNA, 25 bp, Saccharomyces pastorianus
ataatctgatggaccctattctcaa

SEQ ID NO: 13125 - DNA, 25 bp, Saccharomyces pastorianus
gggacccgaatctaattttggcatc

SEQ ID NO: 13126 - DNA, 25 bp, Saccharomyces pastorianus
tatccgtctttttaccccagtaatg

SEQ ID NO: 13127 - DNA, 25 bp, Saccharomyces pastorianus
accggcatatgagttcaacccatta

SEQ ID NO: 13128 - DNA, 25 bp, Saccharomyces pastorianus
gacctgagaattgggccgagttcac

SEQ ID NO: 13129 - DNA, 25 bp, Saccharomyces pastorianus
aacgcccaggtaaaaccggcatatg

SEQ ID NO: 13130 - DNA, 25 bp, Saccharomyces pastorianus
gaccaacgatgggtttatccccatg

SEQ ID NO: 13131 - DNA, 25 bp, Saccharomyces pastorianus
agggaaattctatcgtatggtcaat

SEQ ID NO: 13132 - DNA, 25 bp, Saccharomyces pastorianus
aatccaggctaccatcttttcgaaa

SEQ ID NO: 13133 - DNA, 25 bp, Saccharomyces pastorianus
gaccaactgcctcatcgtttgaaga

SEQ ID NO: 13134 - DNA, 25 bp, Saccharomyces pastorianus
gccctggcgctaagtccaattggta

SEQ ID NO: 13135 - DNA, 25 bp, Saccharomyces pastorianus
agaagatctgcgtacttggcgtctg

SEQ ID NO: 13136 - DNA, 25 bp, Saccharomyces pastorianus
aagacttccgaccactttcgaagag

SEQ ID NO: 13137 - DNA, 25 bp, Saccharomyces pastorianus
aatcgggttcgatggttacgtcatt

SEQ ID NO: 13138 - DNA, 25 bp, Saccharomyces pastorianus
agttgaagcatttatccgccaccaa

SEQ ID NO: 13139 - DNA, 25 bp, Saccharomyces pastorianus
tacgtcattgaatactaccctgggt

SEQ ID NO: 13140 - DNA, 25 bp, Saccharomyces pastorianus
taccctgggttcagatccatgctaa

SEQ ID NO: 13141 - DNA, 25 bp, Saccharomyces pastorianus
tctgtgccaattgccgctatcttaa

SEQ ID NO: 13142 - DNA, 25 bp, Saccharomyces pastorianus
agaaccccttccaattatgcagtga

SEQ ID NO: 13143 - DNA, 25 bp, Saccharomyces pastorianus
tacgcctcgtggtgtgttcacagta

SEQ ID NO: 13144 - DNA, 25 bp, Saccharomyces pastorianus
agttccccttattcgctattcataa

SEQ ID NO: 13145 - DNA, 25 bp, Saccharomyces pastorianus
tcatcagctttcctgtcacgggata

SEQ ID NO: 13146 - DNA, 25 bp, Saccharomyces pastorianus
agatgcgatcgttcaattggtcaaa

SEQ ID NO: 13147 - DNA, 25 bp, Saccharomyces pastorianus
agattgcagatgtttttgcctcaga

SEQ ID NO: 13148 - DNA, 25 bp, Saccharomyces pastorianus
acagtaagagattcgcgcccgttta

SEQ ID NO: 13149 - DNA, 25 bp, Saccharomyces pastorianus
gttcttgtcaagtattacgcctcgt

SEQ ID NO: 13150 - DNA, 25 bp, Saccharomyces pastorianus
aaatatggattaccgcagctgcccg

SEQ ID NO: 13151 - DNA, 25 bp, Saccharomyces pastorianus
tattgctctctaccctgcaggaaat

SEQ ID NO: 13152 - DNA, 25 bp, Saccharomyces pastorianus
tgcctcagatgagtccattcgtgat

SEQ ID NO: 13153 - DNA, 25 bp, Saccharomyces pastorianus
gaagcaggtacccatcatattgacg

SEQ ID NO: 13154 - DNA, 25 bp, Saccharomyces pastorianus
gaagttcattacactggttccttat

SEQ ID NO: 13155 - DNA, 25 bp, Saccharomyces pastorianus
gttatccaatatataccttttcttc

SEQ ID NO: 13156 - DNA, 25 bp, Saccharomyces pastorianus
gaatgtcaaatcaaggcaatgccag

SEQ ID NO: 13157 - DNA, 25 bp, Saccharomyces pastorianus
ggatttggaaatcggtgtcactaaa

SEQ ID NO: 13158 - DNA, 25 bp, Saccharomyces pastorianus
agctggctctttaacggatttggaa

SEQ ID NO: 13159 - DNA, 25 bp, Saccharomyces pastorianus
gttgctggtatgtgcattggcgaaa

SEQ ID NO: 13160 - DNA, 25 bp, Saccharomyces pastorianus
aatacccgtggaagaatgtcaaatc

SEQ ID NO: 13161 - DNA, 25 bp, Saccharomyces pastorianus
ccccattgcttttgaactaggtgtt

SEQ ID NO: 13162 - DNA, 25 bp, Saccharomyces pastorianus
gaatcaggtacagtatttgactcaa

SEQ ID NO: 13163 - DNA, 25 bp, Saccharomyces pastorianus
tttttgccgcagttttagctggctc

SEQ ID NO: 13164 - DNA, 25 bp, Saccharomyces pastorianus
tccaagcgctgatttggtgttcgac

SEQ ID NO: 13165 - DNA, 25 bp, Saccharomyces pastorianus
gaacgacttgaaccatccatccatt

SEQ ID NO: 13166 - DNA, 25 bp, Saccharomyces pastorianus
atttaaatactccttctagcacgcc

SEQ ID NO: 13167 - DNA, 25 bp, Saccharomyces pastorianus
aagtctctgatcaaggctatccatt

SEQ ID NO: 13168 - DNA, 25 bp, Saccharomyces pastorianus
tccatccattttccagtactcttta

SEQ ID NO: 13169 - DNA, 25 bp, Saccharomyces pastorianus
aacggaatcccgatattcttcatta

SEQ ID NO: 13170 - DNA, 25 bp, Saccharomyces pastorianus
gccttgcacagctgctcataataag

SEQ ID NO: 13171 - DNA, 25 bp, Saccharomyces pastorianus
gcccacaatcaggtccacatttaaa

SEQ ID NO: 13172 - DNA, 25 bp, Saccharomyces pastorianus
atacctgaacgtagtgcttccgcaa

SEQ ID NO: 13173 - DNA, 25 bp, Saccharomyces pastorianus
gtacggaaatttccaagccgccact

SEQ ID NO: 13174 - DNA, 25 bp, Saccharomyces pastorianus
cagagtatttattatgcaacggcat

SEQ ID NO: 13175 - DNA, 25 bp, Saccharomyces pastorianus
gatgaactacccaagatcactacaa

SEQ ID NO: 13176 - DNA, 25 bp, Saccharomyces pastorianus
gggtgctggtgtcttcggtgctgcc

SEQ ID NO: 13177 - DNA, 25 bp, Saccharomyces pastorianus
tgctgctgcttccaacgctttgggt

SEQ ID NO: 13178 - DNA, 25 bp, Saccharomyces pastorianus
ggtgctgctgcttccaacgctttgg

SEQ ID NO: 13179 - DNA, 25 bp, Saccharomyces pastorianus
tgctgcttccaacgctttgggtgct

SEQ ID NO: 13180 - DNA, 25 bp, Saccharomyces pastorianus
ttcgctactgttgccgctgtccaag

SEQ ID NO: 13181 - DNA, 25 bp, Saccharomyces pastorianus
atcgtcgctgccttcgctactgttg

SEQ ID NO: 13182 - DNA, 25 bp, Saccharomyces pastorianus
tgcttccaacgctttgggtgctggt

SEQ ID NO: 13183 - DNA, 25 bp, Saccharomyces pastorianus
aattcaagaccatcgtcgctgcctt

SEQ ID NO: 13184 - DNA, 25 bp, Saccharomyces pastorianus
caacgctttgggtgctggtgtcttc

SEQ ID NO: 13185 - DNA, 25 bp, Saccharomyces pastorianus
ttccaacgctttgggtgctggtgtc

SEQ ID NO: 13186 - DNA, 25 bp, Saccharomyces pastorianus
aacgctttgggtgctggtgtcttcg

SEQ ID NO: 13187 - DNA, 25 bp, Saccharomyces pastorianus
tggtcttcattgcaattttcgtccc

SEQ ID NO: 13188 - DNA, 25 bp, Saccharomyces pastorianus
ccccattagcagtctggctgaagag

SEQ ID NO: 13189 - DNA, 25 bp, Saccharomyces pastorianus
ggatctgctcattaatttcctgctg

SEQ ID NO: 13190 - DNA, 25 bp, Saccharomyces pastorianus
gcccgcgattggttattggtcttca

SEQ ID NO: 13191 - DNA, 25 bp, Saccharomyces pastorianus
tgggattcttccctggtttgatcca

SEQ ID NO: 13192 - DNA, 25 bp, Saccharomyces pastorianus
agggttcttctctaaggatctgctc

SEQ ID NO: 13193 - DNA, 25 bp, Saccharomyces pastorianus
ttagctgccacccatacgaggaaaa

SEQ ID NO: 13194 - DNA, 25 bp, Saccharomyces pastorianus
atgccatgtacgtgattagctgcca

SEQ ID NO: 13195 - DNA, 25 bp, Saccharomyces pastorianus
tccctggtttgatccatgccatgta

SEQ ID NO: 13196 - DNA, 25 bp, Saccharomyces pastorianus
aaaacgaggcctctgggtactcgca

SEQ ID NO: 13197 - DNA, 25 bp, Saccharomyces pastorianus
tttcctgctgtttttgctgggattc

SEQ ID NO: 13198 - DNA, 25 bp, Saccharomyces pastorianus
gctggttacaccatagtcgagctag

SEQ ID NO: 13199 - DNA, 25 bp, Saccharomyces pastorianus
gagctactaccaactagtgccggag

SEQ ID NO: 13200 - DNA, 25 bp, Saccharomyces pastorianus
tttagcggtaatcttgttccaccca

SEQ ID NO: 13201 - DNA, 25 bp, Saccharomyces pastorianus
tgcacgataagtacttcccggatct

SEQ ID NO: 13202 - DNA, 25 bp, Saccharomyces pastorianus
ggtgtattgccatacaaaccctggg

SEQ ID NO: 13203 - DNA, 25 bp, Saccharomyces pastorianus
attccggcttgcaccatcatagcga

SEQ ID NO: 13204 - DNA, 25 bp, Saccharomyces pastorianus
cccggatctgcccaaagaggtcaat

SEQ ID NO: 13205 - DNA, 25 bp, Saccharomyces pastorianus
gcaagatctactttcgcatctcaaa

SEQ ID NO: 13206 - DNA, 25 bp, Saccharomyces pastorianus
gatgcagcctatccgccaggaggaa

SEQ ID NO: 13207 - DNA, 25 bp, Saccharomyces pastorianus
ttgaatcactggaaattgcctcgga

SEQ ID NO: 13208 - DNA, 25 bp, Saccharomyces pastorianus
atagaatctaccgttcattccggct

SEQ ID NO: 13209 - DNA, 25 bp, Saccharomyces pastorianus
gaatcatatgccaggtcgtatagga

SEQ ID NO: 13210 - DNA, 25 bp, Saccharomyces pastorianus
gtccctgtagccagccaatttgtga

SEQ ID NO: 13211 - DNA, 25 bp, Saccharomyces pastorianus
agttgacccatcatttgctaccaag

SEQ ID NO: 13212 - DNA, 25 bp, Saccharomyces pastorianus
acccctcctatctaaactatgtgtc

SEQ ID NO: 13213 - DNA, 25 bp, Saccharomyces pastorianus
tacattttaaagtcacccctcctat

SEQ ID NO: 13214 - DNA, 25 bp, Saccharomyces pastorianus
gaaaatcctgtcatgcaaactgccc

SEQ ID NO: 13215 - DNA, 25 bp, Saccharomyces pastorianus
caatttgtgaacttttcgggctaca

SEQ ID NO: 13216 - DNA, 25 bp, Saccharomyces pastorianus
taaactatgtgtccctgtagccagc

SEQ ID NO: 13217 - DNA, 25 bp, Saccharomyces pastorianus
agaagacgttccttacttgttgcct

SEQ ID NO: 13218 - DNA, 25 bp, Saccharomyces pastorianus
gagctcatcaaaccgagttgaccca

SEQ ID NO: 13219 - DNA, 25 bp, Saccharomyces pastorianus
aactgccctaagaaggttgcctgaa

SEQ ID NO: 13220 - DNA, 25 bp, Saccharomyces pastorianus
gttggtccttgggatgattactcca

SEQ ID NO: 13221 - DNA, 25 bp, Saccharomyces pastorianus
attgcatccgatatctacgctaacg

SEQ ID NO: 13222 - DNA, 25 bp, Saccharomyces pastorianus
tgccggccacggtactttgttcgat

SEQ ID NO: 13223 - DNA, 25 bp, Saccharomyces pastorianus
gatgactaccagatattctttgcat

SEQ ID NO: 13224 - DNA, 25 bp, Saccharomyces pastorianus
taaggaagccctagacggccaagat

SEQ ID NO: 13225 - DNA, 25 bp, Saccharomyces pastorianus
aataactggtttcaccgatgtgggt

SEQ ID NO: 13226 - DNA, 25 bp, Saccharomyces pastorianus
gtggaagctttgcatcctttcaata

SEQ ID NO: 13227 - DNA, 25 bp, Saccharomyces pastorianus
aaactggtcactggtgtcaacccgg

SEQ ID NO: 13228 - DNA, 25 bp, Saccharomyces pastorianus
tgaaaccgttttgggcttggacagt

SEQ ID NO: 13229 - DNA, 25 bp, Saccharomyces pastorianus
gaagtatttggctccggttggtcct

SEQ ID NO: 13230 - DNA, 25 bp, Saccharomyces pastorianus
tcctgctattttcgatggcttaacg

SEQ ID NO: 13231 - DNA, 25 bp, Saccharomyces pastorianus
ggacatgccatttcctttgaagaat

SEQ ID NO: 13232 - DNA, 25 bp, Saccharomyces pastorianus
atgcagctggtttgattggtgacgc

SEQ ID NO: 13233 - DNA, 25 bp, Saccharomyces pastorianus
gaagagactctgaactcaaagctga

SEQ ID NO: 13234 - DNA, 25 bp, Saccharomyces pastorianus
taaatcttgtgggtacggtcatgta

SEQ ID NO: 13235 - DNA, 25 bp, Saccharomyces pastorianus
gagtacttgaaggacatgccatttc

SEQ ID NO: 13236 - DNA, 25 bp, Saccharomyces pastorianus
gagcacggtgttggcttccataaaa

SEQ ID NO: 13237 - DNA, 25 bp, Saccharomyces pastorianus
aactgagcggtttccttgaagagac

SEQ ID NO: 13238 - DNA, 25 bp, Saccharomyces pastorianus
gttctcattgagacctcaggttcta

SEQ ID NO: 13239 - DNA, 25 bp, Saccharomyces pastorianus
tccaatcaaagaagggttccatcag

SEQ ID NO: 13240 - DNA, 25 bp, Saccharomyces pastorianus
tcagtatcagaagccgtgacagaaa

SEQ ID NO: 13241 - DNA, 25 bp, Saccharomyces pastorianus
aatatgacatgtcccttcagttgaa

SEQ ID NO: 13242 - DNA, 25 bp, Saccharomyces pastorianus
agagaattgctgatcccacgttggc

SEQ ID NO: 13243 - DNA, 25 bp, Saccharomyces pastorianus
tgctttggtcatgtcttatcgttat

SEQ ID NO: 13244 - DNA, 25 bp, Saccharomyces pastorianus
gactcaggcgcacattcaggtataa

SEQ ID NO: 13245 - DNA, 25 bp, Saccharomyces pastorianus
gattgtttcattcggtcttttggtc

SEQ ID NO: 13246 - DNA, 25 bp, Saccharomyces pastorianus
gtaacttcattgtacttggctacct

SEQ ID NO: 13247 - DNA, 25 bp, Saccharomyces pastorianus
attcggcagttctgttagcggtgct

SEQ ID NO: 13248 - DNA, 25 bp, Saccharomyces pastorianus
tacggctcgcctttcgaatttatta

SEQ ID NO: 13249 - DNA, 25 bp, Saccharomyces pastorianus
tagcggtgctgtctggaccaatatt

SEQ ID NO: 13250 - DNA, 25 bp, Saccharomyces pastorianus
aagcttctgctggaactcacgcgag

SEQ ID NO: 13251 - DNA, 25 bp, Saccharomyces pastorianus
tttggcattctgtttccccttatta

SEQ ID NO: 13252 - DNA, 25 bp, Saccharomyces pastorianus
gaactaagcccttcatcatattcgg

SEQ ID NO: 13253 - DNA, 25 bp, Saccharomyces pastorianus
taactacctgtaacttgggtgcgtt

SEQ ID NO: 13254 - DNA, 25 bp, Saccharomyces pastorianus
gattgtcagcagcactcaaactatt

SEQ ID NO: 13255 - DNA, 25 bp, Saccharomyces pastorianus
atgctgcggcttaatgggttattca

SEQ ID NO: 13256 - DNA, 25 bp, Saccharomyces pastorianus
gctagactgtgctttgggtttaaca

SEQ ID NO: 13257 - DNA, 25 bp, Saccharomyces pastorianus
ggcgaaacttccatactacttttgc

SEQ ID NO: 13258 - DNA, 25 bp, Saccharomyces pastorianus
gaactaattggagctactacggcat

SEQ ID NO: 13259 - DNA, 25 bp, Saccharomyces pastorianus
tatttcggtaatatgctgcggctta

SEQ ID NO: 13260 - DNA, 25 bp, Saccharomyces pastorianus
tttcccaggaacagatgcagctatc

SEQ ID NO: 13261 - DNA, 25 bp, Saccharomyces pastorianus
tactacggcatccacaatggcttac

SEQ ID NO: 13262 - DNA, 25 bp, Saccharomyces pastorianus
ggtctttattaccatgggcatatca

SEQ ID NO: 13263 - DNA, 25 bp, Saccharomyces pastorianus
taacatgttaaccacttttccgatg

SEQ ID NO: 13264 - DNA, 25 bp, Saccharomyces pastorianus
acatacttcttgtcgttgcaaccag

SEQ ID NO: 13265 - DNA, 25 bp, Saccharomyces pastorianus
cattttgtccacatacatcggcagt

SEQ ID NO: 13266 - DNA, 25 bp, Saccharomyces pastorianus
gatgacactccaaacgctttgatct

SEQ ID NO: 13267 - DNA, 25 bp, Saccharomyces pastorianus
aaggacatcttgttcgacatccccg

SEQ ID NO: 13268 - DNA, 25 bp, Saccharomyces pastorianus
acagtgagttcttcgaatcgggcca

SEQ ID NO: 13269 - DNA, 25 bp, Saccharomyces pastorianus
gttgctggtctgttgacatacttct

SEQ ID NO: 13270 - DNA, 25 bp, Saccharomyces pastorianus
gggccagaaatctttgacccctcaa

SEQ ID NO: 13271 - DNA, 25 bp, Saccharomyces pastorianus
acatggacgagttcatcggttcgaa

SEQ ID NO: 13272 - DNA, 25 bp, Saccharomyces pastorianus
gaggccaccgctactttgtctggta

SEQ ID NO: 13273 - DNA, 25 bp, Saccharomyces pastorianus
gacaccaaaaagtctcactcgtctt

SEQ ID NO: 13274 - DNA, 25 bp, Saccharomyces pastorianus
ttgcaaccaggttccgacagtgagt

SEQ ID NO: 13275 - DNA, 25 bp, Saccharomyces pastorianus
cattgcacggcacccggtaaagcgg

SEQ ID NO: 13276 - DNA, 25 bp, Saccharomyces pastorianus
caccaaccacaattcgcggcagaga

SEQ ID NO: 13277 - DNA, 25 bp, Saccharomyces pastorianus
aattcgcggcagagaccaggcgctg

SEQ ID NO: 13278 - DNA, 25 bp, Saccharomyces pastorianus
acactcactgccacctgaaagagct

SEQ ID NO: 13279 - DNA, 25 bp, Saccharomyces pastorianus
cccttcaaacggctctttgagcatt

SEQ ID NO: 13280 - DNA, 25 bp, Saccharomyces pastorianus
tgccacctgaaagagctcgtgcagt

SEQ ID NO: 13281 - DNA, 25 bp, Saccharomyces pastorianus
tttgagcattgcacggcacccggta

SEQ ID NO: 13282 - DNA, 25 bp, Saccharomyces pastorianus
gccagttcaagggagcagactacat

SEQ ID NO: 13283 - DNA, 25 bp, Saccharomyces pastorianus
ctcgtgcagtgggagtgccagttca

SEQ ID NO: 13284 - DNA, 25 bp, Saccharomyces pastorianus
agactacatctgctcgcccttcaaa

SEQ ID NO: 13285 - DNA, 25 bp, Saccharomyces pastorianus
aacggctctttgagcattgcacggc

SEQ ID NO: 13286 - DNA, 25 bp, Saccharomyces pastorianus
agggacgaaatctccactttggaca

SEQ ID NO: 13287 - DNA, 25 bp, Saccharomyces pastorianus
ttttttcggtgatctatctcttggg

SEQ ID NO: 13288 - DNA, 25 bp, Saccharomyces pastorianus
agctgcaacgcttcatgaccaagtt

SEQ ID NO: 13289 - DNA, 25 bp, Saccharomyces pastorianus
gctgttcccagttgccatactaaaa

SEQ ID NO: 13290 - DNA, 25 bp, Saccharomyces pastorianus
aaatttggcgcgttcatcgtcaaaa

SEQ ID NO: 13291 - DNA, 25 bp, Saccharomyces pastorianus
gaaactgcaaactaagctgttccca

SEQ ID NO: 13292 - DNA, 25 bp, Saccharomyces pastorianus
gattacatacgagtacctttccaag

SEQ ID NO: 13293 - DNA, 25 bp, Saccharomyces pastorianus
tattggtcaaccgaacagcttttga

SEQ ID NO: 13294 - DNA, 25 bp, Saccharomyces pastorianus
gagacagttcaatcgtccactgtag

SEQ ID NO: 13295 - DNA, 25 bp, Saccharomyces pastorianus
gatttcctttacgaagactacttga

SEQ ID NO: 13296 - DNA, 25 bp, Saccharomyces pastorianus
agactttgccgccaaatcacgaaac

SEQ ID NO: 13297 - DNA, 25 bp, Saccharomyces pastorianus
ttcaaatcttttggcggctgcaggt

SEQ ID NO: 13298 - DNA, 25 bp, Saccharomyces pastorianus
ggctgcaggtacagactcacatgtt

SEQ ID NO: 13299 - DNA, 25 bp, Saccharomyces pastorianus
aattttcaccccatgtggatggcgt

SEQ ID NO: 13300 - DNA, 25 bp, Saccharomyces pastorianus
ggacggtgttcctgaattaatcatg

SEQ ID NO: 13301 - DNA, 25 bp, Saccharomyces pastorianus
agagcaaactcctgacgatgcagag

SEQ ID NO: 13302 - DNA, 25 bp, Saccharomyces pastorianus
gaagtgctcgcatagtttaccagtt

SEQ ID NO: 13303 - DNA, 25 bp, Saccharomyces pastorianus
tagcgtttagtcatcactcttcaaa

SEQ ID NO: 13304 - DNA, 25 bp, Saccharomyces pastorianus
tggtcgtttctagtggttccgataa

SEQ ID NO: 13305 - DNA, 25 bp, Saccharomyces pastorianus
caggccatgaagacgcggtgactaa

SEQ ID NO: 13306 - DNA, 25 bp, Saccharomyces pastorianus
tgaacgcacaaataccctggttggt

SEQ ID NO: 13307 - DNA, 25 bp, Saccharomyces pastorianus
gaaccattgcaccatatgtcaggcc

SEQ ID NO: 13308 - DNA, 25 bp, Saccharomyces pastorianus
ctctttggtcatcaccgccttgaag

SEQ ID NO: 13309 - DNA, 25 bp, Saccharomyces pastorianus
aatccgtcggctgtcgtgttgactt

SEQ ID NO: 13310 - DNA, 25 bp, Saccharomyces pastorianus
ggtcatcaccgccttgaaggaacca

SEQ ID NO: 13311 - DNA, 25 bp, Saccharomyces pastorianus
ttcctctttggtcatcaccgccttg

SEQ ID NO: 13312 - DNA, 25 bp, Saccharomyces pastorianus
gatgacatcattgaaattgctagac

SEQ ID NO: 13313 - DNA, 25 bp, Saccharomyces pastorianus
aggtctatctccaaagaaggtcggt

SEQ ID NO: 13314 - DNA, 25 bp, Saccharomyces pastorianus
aagatcggtcctttaggtctatctc

SEQ ID NO: 13315 - DNA, 25 bp, Saccharomyces pastorianus
tgttgacttcaagaatcctcatgat

SEQ ID NO: 13316 - DNA, 25 bp, Saccharomyces pastorianus
ggcttctgttactaaggaaatctta

SEQ ID NO: 13317 - DNA, 25 bp, Saccharomyces pastorianus
tacttatacctaagagccgttggtg

SEQ ID NO: 13318 - DNA, 25 bp, Saccharomyces pastorianus
atcttaggtactgctcaatccgtcg

SEQ ID NO: 13319 - DNA, 25 bp, Saccharomyces pastorianus
gagagtcatgcaaactgctgcgttc

SEQ ID NO: 13320 - DNA, 25 bp, Saccharomyces pastorianus
gtccaagaaagtgtttctaccgcaa

SEQ ID NO: 13321 - DNA, 25 bp, Saccharomyces pastorianus
gaacatgttatcattccaagaactg

SEQ ID NO: 13322 - DNA, 25 bp, Saccharomyces pastorianus
gaagagtcaatgctatcgaacatgt

SEQ ID NO: 13323 - DNA, 25 bp, Saccharomyces pastorianus
aactgctgcgttctcattagccgaa

SEQ ID NO: 13324 - DNA, 25 bp, Saccharomyces pastorianus
attagccgaagtttcctacgcaaca

SEQ ID NO: 13325 - DNA, 25 bp, Saccharomyces pastorianus
aatttgaatcttacattgaccctga

SEQ ID NO: 13326 - DNA, 25 bp, Saccharomyces pastorianus
acagactgcgttcatcattttggat

SEQ ID NO: 13327 - DNA, 25 bp, Saccharomyces pastorianus
gtgagtggtgtttacttgtcccaat

SEQ ID NO: 13328 - DNA, 25 bp, Saccharomyces pastorianus
gaaaccttagttgaattggcttctc

SEQ ID NO: 13329 - DNA, 25 bp, Saccharomyces pastorianus
tgaattggcttctctacagactgcg

SEQ ID NO: 13330 - DNA, 25 bp, Saccharomyces pastorianus
gttggacctgctaaattctgccgtt

SEQ ID NO: 13331 - DNA, 25 bp, Saccharomyces pastorianus
aggaataaggcccaccgtcagaggt

SEQ ID NO: 13332 - DNA, 25 bp, Saccharomyces pastorianus
agtgcgactggcgaattatcttata

SEQ ID NO: 13333 - DNA, 25 bp, Saccharomyces pastorianus
ggtgggaaggtcgatcctgctatct

SEQ ID NO: 13334 - DNA, 25 bp, Saccharomyces pastorianus
attgctaccgttggtgtggtctcca

SEQ ID NO: 13335 - DNA, 25 bp, Saccharomyces pastorianus
agaacaggtctctcggtaaagccgg

SEQ ID NO: 13336 - DNA, 25 bp, Saccharomyces pastorianus
gtgatggtttacgtccaggcgatat

SEQ ID NO: 13337 - DNA, 25 bp, Saccharomyces pastorianus
catcgttatgtctctttggaagcca

SEQ ID NO: 13338 - DNA, 25 bp, Saccharomyces pastorianus
gattcctatcggtactattgttcat

SEQ ID NO: 13339 - DNA, 25 bp, Saccharomyces pastorianus
agagttcttgcgaaactgcctgaga

SEQ ID NO: 13340 - DNA, 25 bp, Saccharomyces pastorianus
gtaactgtttacctatctctatgat

SEQ ID NO: 13341 - DNA, 25 bp, Saccharomyces pastorianus
ttacctggacttccttggattccaa

SEQ ID NO: 13342 - DNA, 25 bp, Saccharomyces pastorianus
gttctgaagtataacgtcctttcta

SEQ ID NO: 13343 - DNA, 25 bp, Saccharomyces pastorianus
atggcgacgaaatctctaccgtgga

SEQ ID NO: 13344 - DNA, 25 bp, Saccharomyces pastorianus
attggactattttgagagccctcta

SEQ ID NO: 13345 - DNA, 25 bp, Saccharomyces pastorianus
ttccaattggaaggcgcctctgtat

SEQ ID NO: 13346 - DNA, 25 bp, Saccharomyces pastorianus
agtctaattccctgcttcgtatcat

SEQ ID NO: 13347 - DNA, 25 bp, Saccharomyces pastorianus
attggccaaatcttcgaatccgtca

SEQ ID NO: 13348 - DNA, 25 bp, Saccharomyces pastorianus
aagatcgtcattgggtttgaacaga

SEQ ID NO: 13349 - DNA, 25 bp, Saccharomyces pastorianus
gcgcctctgtatttggcatgttaat

SEQ ID NO: 13350 - DNA, 25 bp, Saccharomyces pastorianus
ttgagagccctctaattacctggac

SEQ ID NO: 13351 - DNA, 25 bp, Saccharomyces pastorianus
gatttatgttcccaatgagaccgaa

SEQ ID NO: 13352 - DNA, 25 bp, Saccharomyces pastorianus
agaatggccctgtacaaaatcgacg

SEQ ID NO: 13353 - DNA, 25 bp, Saccharomyces pastorianus
tggtcgggaacctcaagtttatcaa

SEQ ID NO: 13354 - DNA, 25 bp, Saccharomyces pastorianus
aagccggcgtcccattgaaacagta

SEQ ID NO: 13355 - DNA, 25 bp, Saccharomyces pastorianus
atctctgaggccttcgattatgcaa

SEQ ID NO: 13356 - DNA, 25 bp, Saccharomyces pastorianus
tggcccgtttctgtagcgacaaagg

SEQ ID NO: 13357 - DNA, 25 bp, Saccharomyces pastorianus
tgggtggcagagtatccttccacta

SEQ ID NO: 13358 - DNA, 25 bp, Saccharomyces pastorianus
aatcgacggtgactggaaggcccaa

SEQ ID NO: 13359 - DNA, 25 bp, Saccharomyces pastorianus
gattccaacggtcctaccaagattt

SEQ ID NO: 13360 - DNA, 25 bp, Saccharomyces pastorianus
atctgtctgtccaagtccatgggtg

SEQ ID NO: 13361 - DNA, 25 bp, Saccharomyces pastorianus
caacttcgtcttcctagacctaaag

SEQ ID NO: 13362 - DNA, 25 bp, Saccharomyces pastorianus
gaccctgacgtccttgtcaagaagg

SEQ ID NO: 13363 - DNA, 25 bp, Saccharomyces pastorianus
acaccctctcattcgaacattttaa

SEQ ID NO: 13364 - DNA, 25 bp, Saccharomyces pastorianus
aagtcagcatcgtcttccggtaatg

SEQ ID NO: 13365 - DNA, 25 bp, Saccharomyces pastorianus
acttcgatgtgcctgtaactccaaa

SEQ ID NO: 13366 - DNA, 25 bp, Saccharomyces pastorianus
aggaagatcgttccatgcctcatca

SEQ ID NO: 13367 - DNA, 25 bp, Saccharomyces pastorianus
agtaccaaatcttagtccacggcgc

SEQ ID NO: 13368 - DNA, 25 bp, Saccharomyces pastorianus
acacgacgttcccattataccagga

SEQ ID NO: 13369 - DNA, 25 bp, Saccharomyces pastorianus
acgggaaacctcagtccgagagtct

SEQ ID NO: 13370 - DNA, 25 bp, Saccharomyces pastorianus
aggtgccaacaaaggactctcccaa

SEQ ID NO: 13371 - DNA, 25 bp, Saccharomyces pastorianus
agcaatagcagtatctcgtcagcct

SEQ ID NO: 13372 - DNA, 25 bp, Saccharomyces pastorianus
agcctggtctaagttcaagcacaag

SEQ ID NO: 13373 - DNA, 25 bp, Saccharomyces pastorianus
tggaacccaactacaaatcagcctt

SEQ ID NO: 13374 - DNA, 25 bp, Saccharomyces pastorianus
gttctggaaagaaaggtgcaactct

SEQ ID NO: 13375 - DNA, 25 bp, Saccharomyces pastorianus
aaagtgcagaattcaaaccaggttc

SEQ ID NO: 13376 - DNA, 25 bp, Saccharomyces pastorianus
gaagggctactcatacacggatgca

SEQ ID NO: 13377 - DNA, 25 bp, Saccharomyces pastorianus
aaaccagatgtcaacaatgccacac

SEQ ID NO: 13378 - DNA, 25 bp, Saccharomyces pastorianus
tgagaacaacatgtccgagtacttg

SEQ ID NO: 13379 - DNA, 25 bp, Saccharomyces pastorianus
gggtcctaatctgcatggtatcttt

SEQ ID NO: 13380 - DNA, 25 bp, Saccharomyces pastorianus
gtcaacaatgccacacaatagaaga

SEQ ID NO: 13381 - DNA, 25 bp, Saccharomyces pastorianus
ggctactcatacacggatgcaaata

SEQ ID NO: 13382 - DNA, 25 bp, Saccharomyces pastorianus
gtgcaactctatttaaaaccagatg

SEQ ID NO: 13383 - DNA, 25 bp, Saccharomyces pastorianus
actctggtcaagtgaagggctactc

SEQ ID NO: 13384 - DNA, 25 bp, Saccharomyces pastorianus
caataaagtgggtcctaatctgcat

SEQ ID NO: 13385 - DNA, 25 bp, Saccharomyces pastorianus
attcaggtgtatttcgcatgcgata

SEQ ID NO: 13386 - DNA, 25 bp, Saccharomyces pastorianus
aagtgaactatacccctgaagacga

SEQ ID NO: 13387 - DNA, 25 bp, Saccharomyces pastorianus
aaggcgacaatgcttcatctggcgg

SEQ ID NO: 13388 - DNA, 25 bp, Saccharomyces pastorianus
tgaagacgaccaagccatttcgcgc

SEQ ID NO: 13389 - DNA, 25 bp, Saccharomyces pastorianus
acgtcagacctaccagccgaagatg

SEQ ID NO: 13390 - DNA, 25 bp, Saccharomyces pastorianus
atttgcacaagctgctcaaggcgac

SEQ ID NO: 13391 - DNA, 25 bp, Saccharomyces pastorianus
agccgaagatgacctatttgcacaa

SEQ ID NO: 13392 - DNA, 25 bp, Saccharomyces pastorianus
gaaggcgaaggctctttccaagtga

SEQ ID NO: 13393 - DNA, 25 bp, Saccharomyces pastorianus
aacccagaggtgtttgtttctatgt

SEQ ID NO: 13394 - DNA, 25 bp, Saccharomyces pastorianus
gctgcggctgcgaccgaagaatcat

SEQ ID NO: 13395 - DNA, 25 bp, Saccharomyces pastorianus
gggttccatcggcttaactgtagaa

SEQ ID NO: 13396 - DNA, 25 bp, Saccharomyces pastorianus
gcatatttacgagccttccagtgat

SEQ ID NO: 13397 - DNA, 25 bp, Saccharomyces pastorianus
gaatccgcgagttctacaacaagat

SEQ ID NO: 13398 - DNA, 25 bp, Saccharomyces pastorianus
gccccactatgtaatctggcatatt

SEQ ID NO: 13399 - DNA, 25 bp, Saccharomyces pastorianus
gaggtgtctctatcctggcaaaggc

SEQ ID NO: 13400 - DNA, 25 bp, Saccharomyces pastorianus
tggcaaaggccaaggtcttcagaac

SEQ ID NO: 13401 - DNA, 25 bp, Saccharomyces pastorianus
aactggacggtatcggaggtgtctc

SEQ ID NO: 13402 - DNA, 25 bp, Saccharomyces pastorianus
ttacgagccttccagtgatgactta

SEQ ID NO: 13403 - DNA, 25 bp, Saccharomyces pastorianus
tgaactacaacgttatcggcctgcc

SEQ ID NO: 13404 - DNA, 25 bp, Saccharomyces pastorianus
aagcattcggcagattgtctcgcag

SEQ ID NO: 13405 - DNA, 25 bp, Saccharomyces pastorianus
gatgacttaaaacacatggcctgga

SEQ ID NO: 13406 - DNA, 25 bp, Saccharomyces pastorianus
aggtcttcagaacaggctcgcactt

SEQ ID NO: 13407 - DNA, 25 bp, Saccharomyces pastorianus
aggtccacatggtcgccattgatat

SEQ ID NO: 13408 - DNA, 25 bp, Saccharomyces pastorianus
ccatgcaagccgctttcgacgaagg

SEQ ID NO: 13409 - DNA, 25 bp, Saccharomyces pastorianus
gtgacaccatgcaagccgctttcga

SEQ ID NO: 13410 - DNA, 25 bp, Saccharomyces pastorianus
attgggtgacaccatgcaagccgct

SEQ ID NO: 13411 - DNA, 25 bp, Saccharomyces pastorianus
aaggtccacatggtcgccattgata

SEQ ID NO: 13412 - DNA, 25 bp, Saccharomyces pastorianus
ccacatggtcgccattgatatcttc

SEQ ID NO: 13413 - DNA, 25 bp, Saccharomyces pastorianus
tgggtgacaccatgcaagccgcttt

SEQ ID NO: 13414 - DNA, 25 bp, Saccharomyces pastorianus
ggtccacatggtcgccattgatatc

SEQ ID NO: 13415 - DNA, 25 bp, Saccharomyces pastorianus
gccaaggtccacatggtcgccattg

SEQ ID NO: 13416 - DNA, 25 bp, Saccharomyces pastorianus
gaaaccgccgatgccggtacctcca

SEQ ID NO: 13417 - DNA, 25 bp, Saccharomyces pastorianus
acgccaaggtccacatggtcgccat

SEQ ID NO: 13418 - DNA, 25 bp, Saccharomyces pastorianus
atggaagtcccagttgtcaagagaa

SEQ ID NO: 13419 - DNA, 25 bp, Saccharomyces pastorianus
ccatgcaagccgctttcgacgaagg

SEQ ID NO: 13420 - DNA, 25 bp, Saccharomyces pastorianus
gtgacaccatgcaagccgctttcga

SEQ ID NO: 13421 - DNA, 25 bp, Saccharomyces pastorianus
attgggtgacaccatgcaagccgct

SEQ ID NO: 13422 - DNA, 25 bp, Saccharomyces pastorianus
aaggtccacatggtcgccattgata

SEQ ID NO: 13423 - DNA, 25 bp, Saccharomyces pastorianus
acaccaaggatgacgtcaaggcccc

SEQ ID NO: 13424 - DNA, 25 bp, Saccharomyces pastorianus
ccacatggtcgccattgatatcttc

SEQ ID NO: 13425 - DNA, 25 bp, Saccharomyces pastorianus
tgggtgacaccatgcaagccgcttt

SEQ ID NO: 13426 - DNA, 25 bp, Saccharomyces pastorianus
ggtccacatggtcgccattgatatc

SEQ ID NO: 13427 - DNA, 25 bp, Saccharomyces pastorianus
gaaaccgccgatgccggtacctcca

SEQ ID NO: 13428 - DNA, 25 bp, Saccharomyces pastorianus
acgccaaggtccacatggtcgccat

SEQ ID NO: 13429 - DNA, 25 bp, Saccharomyces pastorianus
ggcaagtaattcagggtcaccaatc

SEQ ID NO: 13430 - DNA, 25 bp, Saccharomyces pastorianus
aggttatccctgatctcgggtataa

SEQ ID NO: 13431 - DNA, 25 bp, Saccharomyces pastorianus
gtggaaccaggtactatctctactg

SEQ ID NO: 13432 - DNA, 25 bp, Saccharomyces pastorianus
gcctcttactgaaatgggtacccca

SEQ ID NO: 13433 - DNA, 25 bp, Saccharomyces pastorianus
ctcgggtataattgcgcgtttgatg

SEQ ID NO: 13434 - DNA, 25 bp, Saccharomyces pastorianus
ataacgatatcatgtcgccacttcc

SEQ ID NO: 13435 - DNA, 25 bp, Saccharomyces pastorianus
gctacaccatcatcggcgcgtagaa

SEQ ID NO: 13436 - DNA, 25 bp, Saccharomyces pastorianus
atcagatgaaggtgccccagggcct

SEQ ID NO: 13437 - DNA, 25 bp, Saccharomyces pastorianus
tgagagtatctccaaggcgcaaaga

SEQ ID NO: 13438 - DNA, 25 bp, Saccharomyces pastorianus
aagagtcagacagccggcaagtaat

SEQ ID NO: 13439 - DNA, 25 bp, Saccharomyces pastorianus
aggcgcaaagagcatctccacacat

SEQ ID NO: 13440 - DNA, 25 bp, Saccharomyces pastorianus
ggtttattgttgtcagtctgtttct

SEQ ID NO: 13441 - DNA, 25 bp, Saccharomyces pastorianus
ttgaccttgacactgctacttgatt

SEQ ID NO: 13442 - DNA, 25 bp, Saccharomyces pastorianus
aagcagtttgctccatctctattaa

SEQ ID NO: 13443 - DNA, 25 bp, Saccharomyces pastorianus
tttgctattcacattgctactttgg

SEQ ID NO: 13444 - DNA, 25 bp, Saccharomyces pastorianus
gatggtcaagctactgtttctggtt

SEQ ID NO: 13445 - DNA, 25 bp, Saccharomyces pastorianus
gctactttggtttacatcacaacgg

SEQ ID NO: 13446 - DNA, 25 bp, Saccharomyces pastorianus
aacagagtttttccctgagctgaac

SEQ ID NO: 13447 - DNA, 25 bp, Saccharomyces pastorianus
tttgtgccaatgagcgacgacttta

SEQ ID NO: 13448 - DNA, 25 bp, Saccharomyces pastorianus
tatatggctggtgtcaagttcggtg

SEQ ID NO: 13449 - DNA, 25 bp, Saccharomyces pastorianus
ggatccgttctatctcaatttgcta

SEQ ID NO: 13450 - DNA, 25 bp, Saccharomyces pastorianus
aagacctcaagctggaattttcaat

SEQ ID NO: 13451 - DNA, 25 bp, Saccharomyces pastorianus
caatgctaaaatgggctccgctctg

SEQ ID NO: 13452 - DNA, 25 bp, Saccharomyces pastorianus
tgaatgtcactcgaagttatacttc

SEQ ID NO: 13453 - DNA, 25 bp, Saccharomyces pastorianus
aagctacatcgtacgattccagtga

SEQ ID NO: 13454 - DNA, 25 bp, Saccharomyces pastorianus
gttgtctcccaaacagctggtcgat

SEQ ID NO: 13455 - DNA, 25 bp, Saccharomyces pastorianus
gaaaatagcgttgtctcccaaacag

SEQ ID NO: 13456 - DNA, 25 bp, Saccharomyces pastorianus
tctgctttgctattagaccgagtct

SEQ ID NO: 13457 - DNA, 25 bp, Saccharomyces pastorianus
cctgttgtttatagagtgccgttca

SEQ ID NO: 13458 - DNA, 25 bp, Saccharomyces pastorianus
gaaaggcaagacacctgttgtttat

SEQ ID NO: 13459 - DNA, 25 bp, Saccharomyces pastorianus
aatgggctccgctctggaaatgaaa

SEQ ID NO: 13460 - DNA, 25 bp, Saccharomyces pastorianus
gattttatctattgtgtggcttcta

SEQ ID NO: 13461 - DNA, 25 bp, Saccharomyces pastorianus
gtcggtgatttgttctctgctttgc

SEQ ID NO: 13462 - DNA, 25 bp, Saccharomyces pastorianus
tatcattgccatttatgggctggtt

SEQ ID NO: 13463 - DNA, 25 bp, Saccharomyces pastorianus
cattatcttcacttccttaggtgct

SEQ ID NO: 13464 - DNA, 25 bp, Saccharomyces pastorianus
gtgttgagaccagacttgcttttca

SEQ ID NO: 13465 - DNA, 25 bp, Saccharomyces pastorianus
catttatgggctggttgtttccgtc

SEQ ID NO: 13466 - DNA, 25 bp, Saccharomyces pastorianus
tctgccattatcttcacttccttag

SEQ ID NO: 13467 - DNA, 25 bp, Saccharomyces pastorianus
ttatgggctggttgtttccgtcttg

SEQ ID NO: 13468 - DNA, 25 bp, Saccharomyces pastorianus
ttccgtcttggtctgttattcattg

SEQ ID NO: 13469 - DNA, 25 bp, Saccharomyces pastorianus
ttcacttccttaggtgctgcttatg

SEQ ID NO: 13470 - DNA, 25 bp, Saccharomyces pastorianus
ttccttaggtgctgcttatggtact

SEQ ID NO: 13471 - DNA, 25 bp, Saccharomyces pastorianus
ggtctgttattcattgggccaaaag

SEQ ID NO: 13472 - DNA, 25 bp, Saccharomyces pastorianus
gttgagaccagacttgcttttcaag

SEQ ID NO: 13473 - DNA, 25 bp, Saccharomyces pastorianus
gatgttgtccaacaagctgccaatt

SEQ ID NO: 13474 - DNA, 25 bp, Saccharomyces pastorianus
gactttaaaccgtggtatctctgaa

SEQ ID NO: 13475 - DNA, 25 bp, Saccharomyces pastorianus
atacgtctttgtcccatctagagtc

SEQ ID NO: 13476 - DNA, 25 bp, Saccharomyces pastorianus
ttggatgttgtccaacaagctgcca

SEQ ID NO: 13477 - DNA, 25 bp, Saccharomyces pastorianus
aacgttccatacgtctttgtcccat

SEQ ID NO: 13478 - DNA, 25 bp, Saccharomyces pastorianus
aagctgccaatttgagacaattgaa

SEQ ID NO: 13479 - DNA, 25 bp, Saccharomyces pastorianus
caagactttaaaccgtggtatctct

SEQ ID NO: 13480 - DNA, 25 bp, Saccharomyces pastorianus
acgtctttgtcccatctagagtcgc

SEQ ID NO: 13481 - DNA, 25 bp, Saccharomyces pastorianus
atcttggatgttgtccaacaagctg

SEQ ID NO: 13482 - DNA, 25 bp, Saccharomyces pastorianus
tgtgaagataaaaacgttccatacg

SEQ ID NO: 13483 - DNA, 25 bp, Saccharomyces pastorianus
cgtctttgtcccatctagagtcgct

SEQ ID NO: 13484 - DNA, 25 bp, Saccharomyces pastorianus
acgcccaactttgatgacgttctga

SEQ ID NO: 13485 - DNA, 25 bp, Saccharomyces pastorianus
aacttggcagccattccattaggta

SEQ ID NO: 13486 - DNA, 25 bp, Saccharomyces pastorianus
ttatttcatccatgactgccacagc

SEQ ID NO: 13487 - DNA, 25 bp, Saccharomyces pastorianus
tgccacagccgatgttctagctatg

SEQ ID NO: 13488 - DNA, 25 bp, Saccharomyces pastorianus
tatgggtctcttgtcttctgctggt

SEQ ID NO: 13489 - DNA, 25 bp, Saccharomyces pastorianus
gatcatgctgggtatctgtactcat

SEQ ID NO: 13490 - DNA, 25 bp, Saccharomyces pastorianus
tgctggtgccaagtcgactgttgaa

SEQ ID NO: 13491 - DNA, 25 bp, Saccharomyces pastorianus
aaatgtcgtcgtcaaatggcaaggt

SEQ ID NO: 13492 - DNA, 25 bp, Saccharomyces pastorianus
ggtcctgctcctttgaatctggaaa

SEQ ID NO: 13493 - DNA, 25 bp, Saccharomyces pastorianus
tacgcttatttcatggtcggtgcta

SEQ ID NO: 13494 - DNA, 25 bp, Saccharomyces pastorianus
gataagggccgttcttacgcttatt

SEQ ID NO: 13495 - DNA, 25 bp, Saccharomyces pastorianus
gactttgttattgggtttatcgctc

SEQ ID NO: 13496 - DNA, 25 bp, Saccharomyces pastorianus
ggatccgacatcattatcgtgggaa

SEQ ID NO: 13497 - DNA, 25 bp, Saccharomyces pastorianus
gaagctgcagtactcatcaggtgta

SEQ ID NO: 13498 - DNA, 25 bp, Saccharomyces pastorianus
agtgggcagacatcaccaatgcgca

SEQ ID NO: 13499 - DNA, 25 bp, Saccharomyces pastorianus
gacgtagtctctactggatccgaca

SEQ ID NO: 13500 - DNA, 25 bp, Saccharomyces pastorianus
gtacgactggttgattatgacgccc

SEQ ID NO: 13501 - DNA, 25 bp, Saccharomyces pastorianus
tggagggcactgtcaaaccgctaaa

SEQ ID NO: 13502 - DNA, 25 bp, Saccharomyces pastorianus
gtcctggcattgtcagcgggttgaa

SEQ ID NO: 13503 - DNA, 25 bp, Saccharomyces pastorianus
tcgacatcttgactgacttttccat

SEQ ID NO: 13504 - DNA, 25 bp, Saccharomyces pastorianus
gagcctagagctcttctgatgctag

SEQ ID NO: 13505 - DNA, 25 bp, Saccharomyces pastorianus
atgcaagggatctctagctactggg

SEQ ID NO: 13506 - DNA, 25 bp, Saccharomyces pastorianus
ggatttcatgcgtttatactccaac

SEQ ID NO: 13507 - DNA, 25 bp, Saccharomyces pastorianus
aggacaacgtttccaagagcagaac

SEQ ID NO: 13508 - DNA, 25 bp, Saccharomyces pastorianus
caacttccaagcttaccaacaagga

SEQ ID NO: 13509 - DNA, 25 bp, Saccharomyces pastorianus
cgagcgtgtaggacaacgtttccaa

SEQ ID NO: 13510 - DNA, 25 bp, Saccharomyces pastorianus
ggtgtttcacggactgtgtcaacga

SEQ ID NO: 13511 - DNA, 25 bp, Saccharomyces pastorianus
gtgtcaacgacttcacaacttccaa

SEQ ID NO: 13512 - DNA, 25 bp, Saccharomyces pastorianus
taccaacaaggaacaaacgtgcatc

SEQ ID NO: 13513 - DNA, 25 bp, Saccharomyces pastorianus
aacgtgcatcatgaagtgttcagag

SEQ ID NO: 13514 - DNA, 25 bp, Saccharomyces pastorianus
atgcgtttatactccaacttagtag

SEQ ID NO: 13515 - DNA, 25 bp, Saccharomyces pastorianus
gttcctaaagcacagcgagcgtgta

SEQ ID NO: 13516 - DNA, 25 bp, Saccharomyces pastorianus
gagaagttcctaaagcacagcgagc

SEQ ID NO: 13517 - DNA, 25 bp, Saccharomyces pastorianus
agaactaggcaagagcttccgggaa

SEQ ID NO: 13518 - DNA, 25 bp, Saccharomyces pastorianus
tggcgctagtcatcgtcgtcatgaa

SEQ ID NO: 13519 - DNA, 25 bp, Saccharomyces pastorianus
ctaaggccgcttatcgaggactata

SEQ ID NO: 13520 - DNA, 25 bp, Saccharomyces pastorianus
cacgggttcttcgtaaacacgctgg

SEQ ID NO: 13521 - DNA, 25 bp, Saccharomyces pastorianus
taatccagggcgattccgcattcgg

SEQ ID NO: 13522 - DNA, 25 bp, Saccharomyces pastorianus
gacaccgtctggacgcagggactaa

SEQ ID NO: 13523 - DNA, 25 bp, Saccharomyces pastorianus
gagctcgacgtggtgctaatccagg

SEQ ID NO: 13524 - DNA, 25 bp, Saccharomyces pastorianus
gaaccagacccgcttgcaggagaag

SEQ ID NO: 13525 - DNA, 25 bp, Saccharomyces pastorianus
gcattcgggttctcggccatggaaa

SEQ ID NO: 13526 - DNA, 25 bp, Saccharomyces pastorianus
agcgtcatcaacgtcatcatcgaac

SEQ ID NO: 13527 - DNA, 25 bp, Saccharomyces pastorianus
aagaattgccgctacgacctcgtgg

SEQ ID NO: 13528 - DNA, 25 bp, Saccharomyces pastorianus
ttgacctttccacctgggacaaata

SEQ ID NO: 13529 - DNA, 25 bp, Saccharomyces pastorianus
cgctccccaactttctgaattatat

SEQ ID NO: 13530 - DNA, 25 bp, Saccharomyces pastorianus
gggatttcgtaagagaccccatcat

SEQ ID NO: 13531 - DNA, 25 bp, Saccharomyces pastorianus
aaattcaatcagactcatgccctca

SEQ ID NO: 13532 - DNA, 25 bp, Saccharomyces pastorianus
taaggtcttaccgtacatctggaat

SEQ ID NO: 13533 - DNA, 25 bp, Saccharomyces pastorianus
tccaacgtgcgtgataccggatttg

SEQ ID NO: 13534 - DNA, 25 bp, Saccharomyces pastorianus
taaacatgtctcgatcggagccatc

SEQ ID NO: 13535 - DNA, 25 bp, Saccharomyces pastorianus
aagagactgtccacaagctgcatgc

SEQ ID NO: 13536 - DNA, 25 bp, Saccharomyces pastorianus
aagctgcatgctcacaagtcgtttc

SEQ ID NO: 13537 - DNA, 25 bp, Saccharomyces pastorianus
aaattgagttgacttgccccatcac

SEQ ID NO: 13538 - DNA, 25 bp, Saccharomyces pastorianus
aattcattccacaacgacatccaag

SEQ ID NO: 13539 - DNA, 25 bp, Saccharomyces pastorianus
agcgttcacgagctgcaactgatcc

SEQ ID NO: 13540 - DNA, 25 bp, Saccharomyces pastorianus
aagagcggtacaacgcaatcgcaat

SEQ ID NO: 13541 - DNA, 25 bp, Saccharomyces pastorianus
aaactgttcaagagccccaacaaca

SEQ ID NO: 13542 - DNA, 25 bp, Saccharomyces pastorianus
agttaagcctgcacggcctagagat

SEQ ID NO: 13543 - DNA, 25 bp, Saccharomyces pastorianus
gattgtgaagagtctgttccccggc

SEQ ID NO: 13544 - DNA, 25 bp, Saccharomyces pastorianus
taggcacgactacaacccatggagg

SEQ ID NO: 13545 - DNA, 25 bp, Saccharomyces pastorianus
gacaacgctgaacgatgggcagtta

SEQ ID NO: 13546 - DNA, 25 bp, Saccharomyces pastorianus
ggaggacatgctatggaccccaaaa

SEQ ID NO: 13547 - DNA, 25 bp, Saccharomyces pastorianus
gaaactcctagtgggcaagtacgat

SEQ ID NO: 13548 - DNA, 25 bp, Saccharomyces pastorianus
aatcgcaatcgcacacaggcaagag

SEQ ID NO: 13549 - DNA, 25 bp, Saccharomyces pastorianus
aactgtacagggacaccgtgctgaa

SEQ ID NO: 13550 - DNA, 25 bp, Saccharomyces pastorianus
tggcttgtatcattatcatttctac

SEQ ID NO: 13551 - DNA, 25 bp, Saccharomyces pastorianus
gaacatgttgccaggtggtgttatc

SEQ ID NO: 13552 - DNA, 25 bp, Saccharomyces pastorianus
gttgatgaacatgttgccaggtggt

SEQ ID NO: 13553 - DNA, 25 bp, Saccharomyces pastorianus
tgaacatgttgccaggtggtgttat

SEQ ID NO: 13554 - DNA, 25 bp, Saccharomyces pastorianus
tgttgatgaacatgttgccaggtgg

SEQ ID NO: 13555 - DNA, 25 bp, Saccharomyces pastorianus
atgttgatgaacatgttgccaggtg

SEQ ID NO: 13556 - DNA, 25 bp, Saccharomyces pastorianus
tgatgaacatgttgccaggtggtgt

SEQ ID NO: 13557 - DNA, 25 bp, Saccharomyces pastorianus
gatgaacatgttgccaggtggtgtt

SEQ ID NO: 13558 - DNA, 25 bp, Saccharomyces pastorianus
ttgatgaacatgttgccaggtggtg

SEQ ID NO: 13559 - DNA, 25 bp, Saccharomyces pastorianus
gttgccaggtggtgttatcttagtt

SEQ ID NO: 13560 - DNA, 25 bp, Saccharomyces pastorianus
ggtttggcttgtatcattatcattt

SEQ ID NO: 13561 - DNA, 25 bp, Saccharomyces pastorianus
atacgtcgaccaagtgtggacccag

SEQ ID NO: 13562 - DNA, 25 bp, Saccharomyces pastorianus
gtggacccagctctgtgtcgtgaac

SEQ ID NO: 13563 - DNA, 25 bp, Saccharomyces pastorianus
atactcacatggctgctctttttca

SEQ ID NO: 13564 - DNA, 25 bp, Saccharomyces pastorianus
ttggatccgatgacgttcaaccttt

SEQ ID NO: 13565 - DNA, 25 bp, Saccharomyces pastorianus
tcaatctgctcgatttcagcgctga

SEQ ID NO: 13566 - DNA, 25 bp, Saccharomyces pastorianus
tgagacaagtattagccgccgggcg

SEQ ID NO: 13567 - DNA, 25 bp, Saccharomyces pastorianus
atccggtacgacctggacatcgagt

SEQ ID NO: 13568 - DNA, 25 bp, Saccharomyces pastorianus
gaaattcttgatctctctggcaatc

SEQ ID NO: 13569 - DNA, 25 bp, Saccharomyces pastorianus
atagatttccactctcttcaatacg

SEQ ID NO: 13570 - DNA, 25 bp, Saccharomyces pastorianus
cgacgctggtttcgtactacatcaa

SEQ ID NO: 13571 - DNA, 25 bp, Saccharomyces pastorianus
acggtgcccctggtgttatctatgg

SEQ ID NO: 13572 - DNA, 25 bp, Saccharomyces pastorianus
agatatcttcttcccggacagaatc

SEQ ID NO: 13573 - DNA, 25 bp, Saccharomyces pastorianus
ggctggcccttaattgccatcaata

SEQ ID NO: 13574 - DNA, 25 bp, Saccharomyces pastorianus
agtatatcgtcactggaatccgcca

SEQ ID NO: 13575 - DNA, 25 bp, Saccharomyces pastorianus
ggtctggtgccaaagcattagcatt

SEQ ID NO: 13576 - DNA, 25 bp, Saccharomyces pastorianus
gggtacgactgcacattaagcgatc

SEQ ID NO: 13577 - DNA, 25 bp, Saccharomyces pastorianus
aataacttaatcacacacctaccta

SEQ ID NO: 13578 - DNA, 25 bp, Saccharomyces pastorianus
taggcacctatgtcaaacgggtcat

SEQ ID NO: 13579 - DNA, 25 bp, Saccharomyces pastorianus
aagtatggtctctggacattccaaa

SEQ ID NO: 13580 - DNA, 25 bp, Saccharomyces pastorianus
gatctagcaggcacgtcggagacaa

SEQ ID NO: 13581 - DNA, 25 bp, Saccharomyces pastorianus
tccaaatgggttcgatgcaggctct

SEQ ID NO: 13582 - DNA, 25 bp, Saccharomyces pastorianus
ggattatttgttcaggctggccctt

SEQ ID NO: 13583 - DNA, 25 bp, Saccharomyces pastorianus
aggtgtccggtaatgcagcagctgc

SEQ ID NO: 13584 - DNA, 25 bp, Saccharomyces pastorianus
gaggacgcaagcttagaactgtaca

SEQ ID NO: 13585 - DNA, 25 bp, Saccharomyces pastorianus
aggtattcgcggatttttgattaga

SEQ ID NO: 13586 - DNA, 25 bp, Saccharomyces pastorianus
ggcagatgcgacttttgaacgtcta

SEQ ID NO: 13587 - DNA, 25 bp, Saccharomyces pastorianus
tccgcatgttttgcaattttggctt

SEQ ID NO: 13588 - DNA, 25 bp, Saccharomyces pastorianus
aacgacacaggttcggagcatcaac

SEQ ID NO: 13589 - DNA, 25 bp, Saccharomyces pastorianus
tgctttggcaaatctgtgctcgagg

SEQ ID NO: 13590 - DNA, 25 bp, Saccharomyces pastorianus
gctttgattccaatgaccttttctc

SEQ ID NO: 13591 - DNA, 25 bp, Saccharomyces pastorianus
gagcatcaacctgcagaggacgcaa

SEQ ID NO: 13592 - DNA, 25 bp, Saccharomyces pastorianus
ttagattcgcctgttagtgtccaaa

SEQ ID NO: 13593 - DNA, 25 bp, Saccharomyces pastorianus
tggctttagcagacgtctccaaatt

SEQ ID NO: 13594 - DNA, 25 bp, Saccharomyces pastorianus
tcattgatcgtggtattgccctaca

SEQ ID NO: 13595 - DNA, 25 bp, Saccharomyces pastorianus
agatgatcctttgttacgctaccag

SEQ ID NO: 13596 - DNA, 25 bp, Saccharomyces pastorianus
ggttaattactcattcattgggtgg

SEQ ID NO: 13597 - DNA, 25 bp, Saccharomyces pastorianus
tattttcaactttcatcccacagac

SEQ ID NO: 13598 - DNA, 25 bp, Saccharomyces pastorianus
cgaattctttaccactgacttagaa

SEQ ID NO: 13599 - DNA, 25 bp, Saccharomyces pastorianus
gtattaaactcggatcgtgctgaat

SEQ ID NO: 13600 - DNA, 25 bp, Saccharomyces pastorianus
gacagttataagtacgctcggagac

SEQ ID NO: 13601 - DNA, 25 bp, Saccharomyces pastorianus
ggaacctaccattatcattgatcgt

SEQ ID NO: 13602 - DNA, 25 bp, Saccharomyces pastorianus
gtttggccacccagaatggttggat

SEQ ID NO: 13603 - DNA, 25 bp, Saccharomyces pastorianus
gaaggtaacgagtttggccacccag

SEQ ID NO: 13604 - DNA, 25 bp, Saccharomyces pastorianus
gatggatgcctcaatgtataccgat

SEQ ID NO: 13605 - DNA, 25 bp, Saccharomyces pastorianus
agatgacggcgatatacccaaatat

SEQ ID NO: 13606 - DNA, 25 bp, Saccharomyces pastorianus
gcccgtgtcgatgctatggttgaag

SEQ ID NO: 13607 - DNA, 25 bp, Saccharomyces pastorianus
gaagcggtccttcaatcgtaactaa

SEQ ID NO: 13608 - DNA, 25 bp, Saccharomyces pastorianus
gaatgttagtgcagatggcctcaca

SEQ ID NO: 13609 - DNA, 25 bp, Saccharomyces pastorianus
tcctctgctctttgattttttgcgt

SEQ ID NO: 13610 - DNA, 25 bp, Saccharomyces pastorianus
acaatactccggattctcattcaaa

SEQ ID NO: 13611 - DNA, 25 bp, Saccharomyces pastorianus
tggatggagaacttgcccgtgtcga

SEQ ID NO: 13612 - DNA, 25 bp, Saccharomyces pastorianus
gtaaggcatgcccagaagctatcgt

SEQ ID NO: 13613 - DNA, 25 bp, Saccharomyces pastorianus
agaagctatcgtttctgctacagaa

SEQ ID NO: 13614 - DNA, 25 bp, Saccharomyces pastorianus
caaagggcttctaccagtgggatca

SEQ ID NO: 13615 - DNA, 25 bp, Saccharomyces pastorianus
aatgaagctcattatcctctgctct

SEQ ID NO: 13616 - DNA, 25 bp, Saccharomyces pastorianus
ggtgctattattgcatcactgtata

SEQ ID NO: 13617 - DNA, 25 bp, Saccharomyces pastorianus
agggtgtaaacatgcttgccagcca

SEQ ID NO: 13618 - DNA, 25 bp, Saccharomyces pastorianus
aatcccgcacgcagaaacttttcta

SEQ ID NO: 13619 - DNA, 25 bp, Saccharomyces pastorianus
tacccctcttttcattgaacgcaaa

SEQ ID NO: 13620 - DNA, 25 bp, Saccharomyces pastorianus
gttctgacccagtatttttgcgtta

SEQ ID NO: 13621 - DNA, 25 bp, Saccharomyces pastorianus
tgatactttcttcggttacatcctc

SEQ ID NO: 13622 - DNA, 25 bp, Saccharomyces pastorianus
gatcgcacgttcgttttaggtgttt

SEQ ID NO: 13623 - DNA, 25 bp, Saccharomyces pastorianus
tgccagccagacgaatgccttgaca

SEQ ID NO: 13624 - DNA, 25 bp, Saccharomyces pastorianus
cttgacactctccataacattactt

SEQ ID NO: 13625 - DNA, 25 bp, Saccharomyces pastorianus
gctttcttatactcactcggatcaa

SEQ ID NO: 13626 - DNA, 25 bp, Saccharomyces pastorianus
ttatagtcacttcttggcactaccc

SEQ ID NO: 13627 - DNA, 25 bp, Saccharomyces pastorianus
aatgggtaccacatgttgcagatga

SEQ ID NO: 13628 - DNA, 25 bp, Saccharomyces pastorianus
gtttacattcattaccgactaccgt

SEQ ID NO: 13629 - DNA, 25 bp, Saccharomyces pastorianus
tgccgcctggatcttttttgttgtg

SEQ ID NO: 13630 - DNA, 25 bp, Saccharomyces pastorianus
gaacgactccgaaacgcagtactat

SEQ ID NO: 13631 - DNA, 25 bp, Saccharomyces pastorianus
accatttgtggtgttattgccgcct

SEQ ID NO: 13632 - DNA, 25 bp, Saccharomyces pastorianus
aacaacgctcgtttggtgtggatcg

SEQ ID NO: 13633 - DNA, 25 bp, Saccharomyces pastorianus
taaacccatccgtcatcttgctaat

SEQ ID NO: 13634 - DNA, 25 bp, Saccharomyces pastorianus
tgtacaggctgttcactcacatgca

SEQ ID NO: 13635 - DNA, 25 bp, Saccharomyces pastorianus
aagataggcctttcgtttattactg

SEQ ID NO: 13636 - DNA, 25 bp, Saccharomyces pastorianus
aaatttatgcttccggatcgtcacg

SEQ ID NO: 13637 - DNA, 25 bp, Saccharomyces pastorianus
tcttttgctacaacttcctctgtta

SEQ ID NO: 13638 - DNA, 25 bp, Saccharomyces pastorianus
gaatctgaaagtcctaatacggttt

SEQ ID NO: 13639 - DNA, 25 bp, Saccharomyces pastorianus
aatgtggcgccaccttctatcaatt

SEQ ID NO: 13640 - DNA, 25 bp, Saccharomyces pastorianus
attacagccgctaatgtagggccct

SEQ ID NO: 13641 - DNA, 25 bp, Saccharomyces pastorianus
agatcatcgttttggccattgttgg

SEQ ID NO: 13642 - DNA, 25 bp, Saccharomyces pastorianus
aaatggtgagagttgcagcccctcc

SEQ ID NO: 13643 - DNA, 25 bp, Saccharomyces pastorianus
gaggataccgcgtcattggtctata

SEQ ID NO: 13644 - DNA, 25 bp, Saccharomyces pastorianus
atcaagaagaacgtcgcccctaaga

SEQ ID NO: 13645 - DNA, 25 bp, Saccharomyces pastorianus
attccgtttttattagctgctagat

SEQ ID NO: 13646 - DNA, 25 bp, Saccharomyces pastorianus
ctatctgccgctacatctattattg

SEQ ID NO: 13647 - DNA, 25 bp, Saccharomyces pastorianus
agtttttatccgtccagatcatcgt

SEQ ID NO: 13648 - DNA, 25 bp, Saccharomyces pastorianus
ctatttgaaattgccagcccaccta

SEQ ID NO: 13649 - DNA, 25 bp, Saccharomyces pastorianus
cgtcgacttcaacactttggctcaa

SEQ ID NO: 13650 - DNA, 25 bp, Saccharomyces pastorianus
atgaatctatgttgactttcgaaac

SEQ ID NO: 13651 - DNA, 25 bp, Saccharomyces pastorianus
atcactggtgatctactgatcgacg

SEQ ID NO: 13652 - DNA, 25 bp, Saccharomyces pastorianus
actttggctcaaaactttactcaat

SEQ ID NO: 13653 - DNA, 25 bp, Saccharomyces pastorianus
gacggaaactcttactatgtgttca

SEQ ID NO: 13654 - DNA, 25 bp, Saccharomyces pastorianus
gaaaaattggtttctctgccattcc

SEQ ID NO: 13655 - DNA, 25 bp, Saccharomyces pastorianus
atcaccactttagatgctcaaccgg

SEQ ID NO: 13656 - DNA, 25 bp, Saccharomyces pastorianus
aacaagtcaattacaaggtgccaaa

SEQ ID NO: 13657 - DNA, 25 bp, Saccharomyces pastorianus
aaaagttcaacatcgcatcaccact

SEQ ID NO: 13658 - DNA, 25 bp, Saccharomyces pastorianus
ggtttctctgccattccaaaaagtt

SEQ ID NO: 13659 - DNA, 25 bp, Saccharomyces pastorianus
tctcccaacggtgatgtcttggtta

SEQ ID NO: 13660 - DNA, 25 bp, Saccharomyces pastorianus
tactctgccgttgactttgctggtg

SEQ ID NO: 13661 - DNA, 25 bp, Saccharomyces pastorianus
aagcaatccgccagcgtatctagct

SEQ ID NO: 13662 - DNA, 25 bp, Saccharomyces pastorianus
ggaaccagctttgaagtccatgatg

SEQ ID NO: 13663 - DNA, 25 bp, Saccharomyces pastorianus
tgcttctggttctgccaaggcttct

SEQ ID NO: 13664 - DNA, 25 bp, Saccharomyces pastorianus
aagccaccaagaccgtttctcaaca

SEQ ID NO: 13665 - DNA, 25 bp, Saccharomyces pastorianus
gaagctaagagttcctccgctgctg

SEQ ID NO: 13666 - DNA, 25 bp, Saccharomyces pastorianus
aaggcttctgccactgcttctggtt

SEQ ID NO: 13667 - DNA, 25 bp, Saccharomyces pastorianus
tgatgggtgaagcatccacttcctc

SEQ ID NO: 13668 - DNA, 25 bp, Saccharomyces pastorianus
gctccaacttccaccgaagctaaga

SEQ ID NO: 13669 - DNA, 25 bp, Saccharomyces pastorianus
acattggtgtggctttggcttccgc

SEQ ID NO: 13670 - DNA, 25 bp, Saccharomyces pastorianus
ccacttcttccactgaagctaagtc

SEQ ID NO: 13671 - DNA, 25 bp, Saccharomyces pastorianus
aaggcgtcatcgtcaaggttgtaga

SEQ ID NO: 13672 - DNA, 25 bp, Saccharomyces pastorianus
gtagaattaccttacggtgctcatg

SEQ ID NO: 13673 - DNA, 25 bp, Saccharomyces pastorianus
cggtgctcatggttattcagggttt

SEQ ID NO: 13674 - DNA, 25 bp, Saccharomyces pastorianus
gtgacactgtccaattcgccgaata

SEQ ID NO: 13675 - DNA, 25 bp, Saccharomyces pastorianus
gtttcgtcagacaggaattggccaa

SEQ ID NO: 13676 - DNA, 25 bp, Saccharomyces pastorianus
ttatgaactatctccacaagccgtg

SEQ ID NO: 13677 - DNA, 25 bp, Saccharomyces pastorianus
ggcctaactctactaaaactttgcg

SEQ ID NO: 13678 - DNA, 25 bp, Saccharomyces pastorianus
gaccagagctgtaccaaatagacta

SEQ ID NO: 13679 - DNA, 25 bp, Saccharomyces pastorianus
acaagccgtgtctagtttcgtcaga

SEQ ID NO: 13680 - DNA, 25 bp, Saccharomyces pastorianus
ctagatcgccattatagacctgata

SEQ ID NO: 13681 - DNA, 25 bp, Saccharomyces pastorianus
aactatcgccacacgcattgatgag

SEQ ID NO: 13682 - DNA, 25 bp, Saccharomyces pastorianus
cggccactgggaattcactattgca

SEQ ID NO: 13683 - DNA, 25 bp, Saccharomyces pastorianus
gtttcaagatgcttacggccagact

SEQ ID NO: 13684 - DNA, 25 bp, Saccharomyces pastorianus
aatcgccgagttactaccgaaggat

SEQ ID NO: 13685 - DNA, 25 bp, Saccharomyces pastorianus
ataacaccatccaaaatcgccgagt

SEQ ID NO: 13686 - DNA, 25 bp, Saccharomyces pastorianus
gaagattctctgtccaagctgttaa

SEQ ID NO: 13687 - DNA, 25 bp, Saccharomyces pastorianus
aagatgcactaaaccgtcacctagg

SEQ ID NO: 13688 - DNA, 25 bp, Saccharomyces pastorianus
gtgtgcctgttattccatccaagga

SEQ ID NO: 13689 - DNA, 25 bp, Saccharomyces pastorianus
gggttctccagaagtccaggtgtcc

SEQ ID NO: 13690 - DNA, 25 bp, Saccharomyces pastorianus
atgtgggctacgacgcatggcaaga

SEQ ID NO: 13691 - DNA, 25 bp, Saccharomyces pastorianus
taaatgtctcccaagattccatgtg

SEQ ID NO: 13692 - DNA, 25 bp, Saccharomyces pastorianus
caggtgtccccgatgttattgtaga

SEQ ID NO: 13693 - DNA, 25 bp, Saccharomyces pastorianus
gcatcaacgggctacaaggctttga

SEQ ID NO: 13694 - DNA, 25 bp, Saccharomyces pastorianus
gattggtattgtgggcatcgacgtt

SEQ ID NO: 13695 - DNA, 25 bp, Saccharomyces pastorianus
ccgtgggccacaagtcttcgaaaga

SEQ ID NO: 13696 - DNA, 25 bp, Saccharomyces pastorianus
ggttcgatcgacattagctgcaaaa

SEQ ID NO: 13697 - DNA, 25 bp, Saccharomyces pastorianus
cttatcatcatgtccctatatcact

SEQ ID NO: 13698 - DNA, 25 bp, Saccharomyces pastorianus
gatgatgttgtaactccgactttga

SEQ ID NO: 13699 - DNA, 25 bp, Saccharomyces pastorianus
aggtgaattacagctccgtgggcca

SEQ ID NO: 13700 - DNA, 25 bp, Saccharomyces pastorianus
gcgtgccaaggcctcaaaatttttc

SEQ ID NO: 13701 - DNA, 25 bp, Saccharomyces pastorianus
gacgagaccgcaaaggccattgatc

SEQ ID NO: 13702 - DNA, 25 bp, Saccharomyces pastorianus
aagggccgtataaatgtcattgatc

SEQ ID NO: 13703 - DNA, 25 bp, Saccharomyces pastorianus
gacgttgatgcggttcgatcgacat

SEQ ID NO: 13704 - DNA, 25 bp, Saccharomyces pastorianus
gagcatattgtatgccacggcggaa

SEQ ID NO: 13705 - DNA, 25 bp, Saccharomyces pastorianus
ggaggcccaccaataagacactctt

SEQ ID NO: 13706 - DNA, 25 bp, Saccharomyces pastorianus
cgcgatattgagatcctggtccata

SEQ ID NO: 13707 - DNA, 25 bp, Saccharomyces pastorianus
gctacccaaggtcagttaaatgcga

SEQ ID NO: 13708 - DNA, 25 bp, Saccharomyces pastorianus
atgccacggcggaaggatttgaaat

SEQ ID NO: 13709 - DNA, 25 bp, Saccharomyces pastorianus
tgcgatgcaagctgaattatccaat

SEQ ID NO: 13710 - DNA, 25 bp, Saccharomyces pastorianus
aagcaactctataccaggaggccca

SEQ ID NO: 13711 - DNA, 25 bp, Saccharomyces pastorianus
atgatgagactatcacgggccgtgg

SEQ ID NO: 13712 - DNA, 25 bp, Saccharomyces pastorianus
ccatccaaccctatcagtacaagaa

SEQ ID NO: 13713 - DNA, 25 bp, Saccharomyces pastorianus
gaatggcggtgctttattacggttt

SEQ ID NO: 13714 - DNA, 25 bp, Saccharomyces pastorianus
taggaaaaccagtgctacccaaggt

SEQ ID NO: 13715 - DNA, 25 bp, Saccharomyces pastorianus
gaagccggccatgctgtttgtggtt

SEQ ID NO: 13716 - DNA, 25 bp, Saccharomyces pastorianus
agaacctggacaaagtcgaccttgt

SEQ ID NO: 13717 - DNA, 25 bp, Saccharomyces pastorianus
gaccttgtcgccaaagagctgctgc

SEQ ID NO: 13718 - DNA, 25 bp, Saccharomyces pastorianus
aaggtgctctgggttacgctcaata

SEQ ID NO: 13719 - DNA, 25 bp, Saccharomyces pastorianus
aggcatgtcgtccaagatcggctat

SEQ ID NO: 13720 - DNA, 25 bp, Saccharomyces pastorianus
gttacgctcaatacttgccggcaga

SEQ ID NO: 13721 - DNA, 25 bp, Saccharomyces pastorianus
ccttggtggtcgtgtctctgaagaa

SEQ ID NO: 13722 - DNA, 25 bp, Saccharomyces pastorianus
gatcggctatctatcattcgaccaa

SEQ ID NO: 13723 - DNA, 25 bp, Saccharomyces pastorianus
caggatgatcatggcccttggtggt

SEQ ID NO: 13724 - DNA, 25 bp, Saccharomyces pastorianus
gaaatacgctgatccacttttgaaa

SEQ ID NO: 13725 - DNA, 25 bp, Saccharomyces pastorianus
aatggtcacgtctttaggcatgtcg

SEQ ID NO: 13726 - DNA, 25 bp, Saccharomyces pastorianus
ggccagcatcagaacctcgttgacg

SEQ ID NO: 13727 - DNA, 25 bp, Saccharomyces pastorianus
ttccagcaagacgtggcccaggtgc

SEQ ID NO: 13728 - DNA, 25 bp, Saccharomyces pastorianus
gcgagctgtctagacggcagttgac

SEQ ID NO: 13729 - DNA, 25 bp, Saccharomyces pastorianus
gcaactgcagcgtttccaagaggaa

SEQ ID NO: 13730 - DNA, 25 bp, Saccharomyces pastorianus
gagaccacgtgctcggcgcatgtca

SEQ ID NO: 13731 - DNA, 25 bp, Saccharomyces pastorianus
gcaccgaatggatgcgttccagcaa

SEQ ID NO: 13732 - DNA, 25 bp, Saccharomyces pastorianus
gaacgcttgagcacgtgctgaccgt

SEQ ID NO: 13733 - DNA, 25 bp, Saccharomyces pastorianus
taccacgagcgcaagggcgagctgt

SEQ ID NO: 13734 - DNA, 25 bp, Saccharomyces pastorianus
tgcagcagcagattcgcgcggccga

SEQ ID NO: 13735 - DNA, 25 bp, Saccharomyces pastorianus
ggcagttgacactggcggctcagtc

SEQ ID NO: 13736 - DNA, 25 bp, Saccharomyces pastorianus
gaggaaatgcgccacttgcacggcc

SEQ ID NO: 13737 - DNA, 25 bp, Saccharomyces pastorianus
gaagcaagcgaagcaaactcctact

SEQ ID NO: 13738 - DNA, 25 bp, Saccharomyces pastorianus
attgaagttgtacacggacgaggcc

SEQ ID NO: 13739 - DNA, 25 bp, Saccharomyces pastorianus
tgtacacggacgaggccaacgggtt

SEQ ID NO: 13740 - DNA, 25 bp, Saccharomyces pastorianus
tacttccgccagacaggctggtcac

SEQ ID NO: 13741 - DNA, 25 bp, Saccharomyces pastorianus
tcgtcgagctcggtattgaagttgt

SEQ ID NO: 13742 - DNA, 25 bp, Saccharomyces pastorianus
gtgttgtttctatccgccgggttca

SEQ ID NO: 13743 - DNA, 25 bp, Saccharomyces pastorianus
gactcgcttgtcgtgttgtttctat

SEQ ID NO: 13744 - DNA, 25 bp, Saccharomyces pastorianus
aggcgcaatctgtcaaggagaagca

SEQ ID NO: 13745 - DNA, 25 bp, Saccharomyces pastorianus
gggttcattttctccgtcataggcc

SEQ ID NO: 13746 - DNA, 25 bp, Saccharomyces pastorianus
aacgggttcagggtcgactcgcttg

SEQ ID NO: 13747 - DNA, 25 bp, Saccharomyces pastorianus
gaagcaaactcctacttccgccaga

SEQ ID NO: 13748 - DNA, 25 bp, Saccharomyces pastorianus
ggtgcggacatcaataaggctgcca

SEQ ID NO: 13749 - DNA, 25 bp, Saccharomyces pastorianus
tttgcggccatcaaggaaaccatct

SEQ ID NO: 13750 - DNA, 25 bp, Saccharomyces pastorianus
accgtcatcgatgtgggctcggaca

SEQ ID NO: 13751 - DNA, 25 bp, Saccharomyces pastorianus
tggtgctcttcgacaacatcgtcaa

SEQ ID NO: 13752 - DNA, 25 bp, Saccharomyces pastorianus
tctacttgatggattctacccctta

SEQ ID NO: 13753 - DNA, 25 bp, Saccharomyces pastorianus
gagattcgtccagttgaacaggtcg

SEQ ID NO: 13754 - DNA, 25 bp, Saccharomyces pastorianus
tacttcccggactacacaggtggtg

SEQ ID NO: 13755 - DNA, 25 bp, Saccharomyces pastorianus
atctgtggtgctcttcctaaacaaa

SEQ ID NO: 13756 - DNA, 25 bp, Saccharomyces pastorianus
gctacagacacctccaacattaaat

SEQ ID NO: 13757 - DNA, 25 bp, Saccharomyces pastorianus
acgtcactttggtcatcttctgcgt

SEQ ID NO: 13758 - DNA, 25 bp, Saccharomyces pastorianus
atcgtcaacagcagatggttcgccc

SEQ ID NO: 13759 - DNA, 25 bp, Saccharomyces pastorianus
aagagctatcagagacggtgtcatt

SEQ ID NO: 13760 - DNA, 25 bp, Saccharomyces pastorianus
gatccccaacaagtatttgatgaga

SEQ ID NO: 13761 - DNA, 25 bp, Saccharomyces pastorianus
tatgcaaaaatctcttctgccttac

SEQ ID NO: 13762 - DNA, 25 bp, Saccharomyces pastorianus
gatgatatgcttgatggcgatctat

SEQ ID NO: 13763 - DNA, 25 bp, Saccharomyces pastorianus
gacgggttcatcgagaccacagaat

SEQ ID NO: 13764 - DNA, 25 bp, Saccharomyces pastorianus
acttaccaactttgtgtcagattaa

SEQ ID NO: 13765 - DNA, 25 bp, Saccharomyces pastorianus
tatcatttaaccaagaccgtcaaac

SEQ ID NO: 13766 - DNA, 25 bp, Saccharomyces pastorianus
tttacgacagtgaagatccccaaca

SEQ ID NO: 13767 - DNA, 25 bp, Saccharomyces pastorianus
ggcgatctattggatgacatgtcag

SEQ ID NO: 13768 - DNA, 25 bp, Saccharomyces pastorianus
gaattatcatttttccaccaatcga

SEQ ID NO: 13769 - DNA, 25 bp, Saccharomyces pastorianus
gaatacatggtttcaagagctatca

SEQ ID NO: 13770 - DNA, 25 bp, Saccharomyces pastorianus
ttgacccttgatgatgactccatag

SEQ ID NO: 13771 - DNA, 25 bp, Saccharomyces pastorianus
aagatacctctgaagccaacgcggt

SEQ ID NO: 13772 - DNA, 25 bp, Saccharomyces pastorianus
gaaatccgtgcctttgacaaactgt

SEQ ID NO: 13773 - DNA, 25 bp, Saccharomyces pastorianus
attatgtgctggatattctccccgg

SEQ ID NO: 13774 - DNA, 25 bp, Saccharomyces pastorianus
taactgtacccaagcgtgaactcga

SEQ ID NO: 13775 - DNA, 25 bp, Saccharomyces pastorianus
caagagccccagattaagcctaata

SEQ ID NO: 13776 - DNA, 25 bp, Saccharomyces pastorianus
agggccgatttgatgcttgttatgc

SEQ ID NO: 13777 - DNA, 25 bp, Saccharomyces pastorianus
atgtgctattaattcgtcccatcct

SEQ ID NO: 13778 - DNA, 25 bp, Saccharomyces pastorianus
aacgcggtcacctttgacacgacat

SEQ ID NO: 13779 - DNA, 25 bp, Saccharomyces pastorianus
gaactcgagataaacctaccgccat

SEQ ID NO: 13780 - DNA, 25 bp, Saccharomyces pastorianus
gacacgacattctctgacttcaaag

SEQ ID NO: 13781 - DNA, 25 bp, Saccharomyces pastorianus
ccaaatacgggtacggctgtgctgt

SEQ ID NO: 13782 - DNA, 25 bp, Saccharomyces pastorianus
gtgctgtggtatcttattctgccga

SEQ ID NO: 13783 - DNA, 25 bp, Saccharomyces pastorianus
cttggctgccggttggacaattgac

SEQ ID NO: 13784 - DNA, 25 bp, Saccharomyces pastorianus
cgcagctactgcattggttggttca

SEQ ID NO: 13785 - DNA, 25 bp, Saccharomyces pastorianus
gccactgtggttcttcttggtacaa

SEQ ID NO: 13786 - DNA, 25 bp, Saccharomyces pastorianus
tattctgccgatgtttccaacgagc

SEQ ID NO: 13787 - DNA, 25 bp, Saccharomyces pastorianus
gttgagaagagtggtgcgcacccat

SEQ ID NO: 13788 - DNA, 25 bp, Saccharomyces pastorianus
caaccattgcaggattgtgtgtcat

SEQ ID NO: 13789 - DNA, 25 bp, Saccharomyces pastorianus
aaaactgcttatttccttggctgcc

SEQ ID NO: 13790 - DNA, 25 bp, Saccharomyces pastorianus
gtaatgactaacacacctgccaaat

SEQ ID NO: 13791 - DNA, 25 bp, Saccharomyces pastorianus
aggccctgcctttgttttgttgatg

SEQ ID NO: 13792 - DNA, 25 bp, Saccharomyces pastorianus
cgcggtacttcccataacaaaactg

SEQ ID NO: 13793 - DNA, 25 bp, Saccharomyces pastorianus
attggaggatgtctcgcggtacttc

SEQ ID NO: 13794 - DNA, 25 bp, Saccharomyces pastorianus
ttccgctacgtctttgagttccaag

SEQ ID NO: 13795 - DNA, 25 bp, Saccharomyces pastorianus
acaatggctacacggtttctggacc

SEQ ID NO: 13796 - DNA, 25 bp, Saccharomyces pastorianus
gaatgatcattcaagctcagcagta

SEQ ID NO: 13797 - DNA, 25 bp, Saccharomyces pastorianus
tggacaatgcaatcaacaacccctc

SEQ ID NO: 13798 - DNA, 25 bp, Saccharomyces pastorianus
tcgccaaacatcttcatcatcacaa

SEQ ID NO: 13799 - DNA, 25 bp, Saccharomyces pastorianus
attcaaccacgagagttggccagta

SEQ ID NO: 13800 - DNA, 25 bp, Saccharomyces pastorianus
cgcaattcagacagggcgacagatt

SEQ ID NO: 13801 - DNA, 25 bp, Saccharomyces pastorianus
agcagtatccgtcccaacagaaaag

SEQ ID NO: 13802 - DNA, 25 bp, Saccharomyces pastorianus
gatagcatatcatcgtcttcttccg

SEQ ID NO: 13803 - DNA, 25 bp, Saccharomyces pastorianus
aacggtgtcttcaaactaggcgatg

SEQ ID NO: 13804 - DNA, 25 bp, Saccharomyces pastorianus
tattacgtcgtctactaggtgttaa

SEQ ID NO: 13805 - DNA, 25 bp, Saccharomyces pastorianus
tagagccgatcgtcttgttggccaa

SEQ ID NO: 13806 - DNA, 25 bp, Saccharomyces pastorianus
ggtcaatatcggttctaccgctaca

SEQ ID NO: 13807 - DNA, 25 bp, Saccharomyces pastorianus
aattcgctgttcctggtggtttaat

SEQ ID NO: 13808 - DNA, 25 bp, Saccharomyces pastorianus
gttgaccctactttatgtagagccg

SEQ ID NO: 13809 - DNA, 25 bp, Saccharomyces pastorianus
gacatcacctgcttgtactgaagtt

SEQ ID NO: 13810 - DNA, 25 bp, Saccharomyces pastorianus
caagtcgttggtgctactggtcatt

SEQ ID NO: 13811 - DNA, 25 bp, Saccharomyces pastorianus
aacatcgtttccttattcgctgaac

SEQ ID NO: 13812 - DNA, 25 bp, Saccharomyces pastorianus
gtgttgccggtggatctatcctaaa

SEQ ID NO: 13813 - DNA, 25 bp, Saccharomyces pastorianus
atcaactatttcttattacgtcgtc

SEQ ID NO: 13814 - DNA, 25 bp, Saccharomyces pastorianus
gattcacacttacaggcaaacctca

SEQ ID NO: 13815 - DNA, 25 bp, Saccharomyces pastorianus
gttctctgggttttactcgattgtg

SEQ ID NO: 13816 - DNA, 25 bp, Saccharomyces pastorianus
acagcatcccattcggtattttcag

SEQ ID NO: 13817 - DNA, 25 bp, Saccharomyces pastorianus
caagaactggactcattggccgatt

SEQ ID NO: 13818 - DNA, 25 bp, Saccharomyces pastorianus
gattctgtcattcttcgttctatgt

SEQ ID NO: 13819 - DNA, 25 bp, Saccharomyces pastorianus
agttgcctaaggattcttccaccgg

SEQ ID NO: 13820 - DNA, 25 bp, Saccharomyces pastorianus
attggccgatttagtctcctttggt

SEQ ID NO: 13821 - DNA, 25 bp, Saccharomyces pastorianus
tctattgcgtttgccattggtttcc

SEQ ID NO: 13822 - DNA, 25 bp, Saccharomyces pastorianus
agcaagatttaacgtcaccgtcgcc

SEQ ID NO: 13823 - DNA, 25 bp, Saccharomyces pastorianus
atagatcgtctctgatgggtcaaga

SEQ ID NO: 13824 - DNA, 25 bp, Saccharomyces pastorianus
ggtttccaaaccacacttgatgtca

SEQ ID NO: 13825 - DNA, 25 bp, Saccharomyces pastorianus
tgaacctcagcaacaagcatccgat

SEQ ID NO: 13826 - DNA, 25 bp, Saccharomyces pastorianus
gaatatggcttggttgactcctcca

SEQ ID NO: 13827 - DNA, 25 bp, Saccharomyces pastorianus
atggaagtaactgcaccacctgact

SEQ ID NO: 13828 - DNA, 25 bp, Saccharomyces pastorianus
gtgcgtcgcgtcaattgttcgatac

SEQ ID NO: 13829 - DNA, 25 bp, Saccharomyces pastorianus
gatgacatgggcgacggttacactc

SEQ ID NO: 13830 - DNA, 25 bp, Saccharomyces pastorianus
agttgccacctcacctggaaaacgt

SEQ ID NO: 13831 - DNA, 25 bp, Saccharomyces pastorianus
tgagcgctcggtcaaggatcgcatt

SEQ ID NO: 13832 - DNA, 25 bp, Saccharomyces pastorianus
ggttacactcgtttccacgatgaaa

SEQ ID NO: 13833 - DNA, 25 bp, Saccharomyces pastorianus
gaaccatctggcgactagcagtatt

SEQ ID NO: 13834 - DNA, 25 bp, Saccharomyces pastorianus
gaatacacccaagatatacctgcag

SEQ ID NO: 13835 - DNA, 25 bp, Saccharomyces pastorianus
tttagtgattatttgcccaccgcaa

SEQ ID NO: 13836 - DNA, 25 bp, Saccharomyces pastorianus
gtcgactagccaacctgatcgatta

SEQ ID NO: 13837 - DNA, 25 bp, Saccharomyces pastorianus
gtggtcccggcgatagcattagtac

SEQ ID NO: 13838 - DNA, 25 bp, Saccharomyces pastorianus
gaacagattctgtctacggtggtag

SEQ ID NO: 13839 - DNA, 25 bp, Saccharomyces pastorianus
aggtggcacacggtagtcgactagc

SEQ ID NO: 13840 - DNA, 25 bp, Saccharomyces pastorianus
atatcgggcaattgttggcgtttga

SEQ ID NO: 13841 - DNA, 25 bp, Saccharomyces pastorianus
gagaaatagcacaaccttcctcgag

SEQ ID NO: 13842 - DNA, 25 bp, Saccharomyces pastorianus
gagtacccaggactcagctggacaa

SEQ ID NO: 13843 - DNA, 25 bp, Saccharomyces pastorianus
ggtagaggataagccactgctatct

SEQ ID NO: 13844 - DNA, 25 bp, Saccharomyces pastorianus
aggtacagcaatagcggtggtcccg

SEQ ID NO: 13845 - DNA, 25 bp, Saccharomyces pastorianus
agacggtgcgtccttgaatatcaaa

SEQ ID NO: 13846 - DNA, 25 bp, Saccharomyces pastorianus
agggttcttacccaagatggccgag

SEQ ID NO: 13847 - DNA, 25 bp, Saccharomyces pastorianus
ttacgtgctgtacccacagaagagt

SEQ ID NO: 13848 - DNA, 25 bp, Saccharomyces pastorianus
ggctgtcggtgccttgatcgtatac

SEQ ID NO: 13849 - DNA, 25 bp, Saccharomyces pastorianus
agcaccaaatggatctcgcagattc

SEQ ID NO: 13850 - DNA, 25 bp, Saccharomyces pastorianus
gagtttgccaccaggactctggaga

SEQ ID NO: 13851 - DNA, 25 bp, Saccharomyces pastorianus
aattgtgctgattggcgattccgga

SEQ ID NO: 13852 - DNA, 25 bp, Saccharomyces pastorianus
taaccactggttatcggagcttagg

SEQ ID NO: 13853 - DNA, 25 bp, Saccharomyces pastorianus
gttaccggaaatgccaatggcgcat

SEQ ID NO: 13854 - DNA, 25 bp, Saccharomyces pastorianus
ctcgcagattctggtgttaccggaa

SEQ ID NO: 13855 - DNA, 25 bp, Saccharomyces pastorianus
aatggcgcatctgctccaaatggtc

SEQ ID NO: 13856 - DNA, 25 bp, Saccharomyces pastorianus
gatgacaacgttgcggttggtctta

SEQ ID NO: 13857 - DNA, 25 bp, Saccharomyces pastorianus
catggattccaagtccactattggg

SEQ ID NO: 13858 - DNA, 25 bp, Saccharomyces pastorianus
taacgcctaccaattcattcagcaa

SEQ ID NO: 13859 - DNA, 25 bp, Saccharomyces pastorianus
attattcattaagtcccatccagga

SEQ ID NO: 13860 - DNA, 25 bp, Saccharomyces pastorianus
gcctttgcgacgtggttccagaaat

SEQ ID NO: 13861 - DNA, 25 bp, Saccharomyces pastorianus
aagactgtcacctttttcaataaca

SEQ ID NO: 13862 - DNA, 25 bp, Saccharomyces pastorianus
aatatcaaatgcatacctctcacca

SEQ ID NO: 13863 - DNA, 25 bp, Saccharomyces pastorianus
aactatgtaatctcacccactttac

SEQ ID NO: 13864 - DNA, 25 bp, Saccharomyces pastorianus
tgtatctccattttcatctttgtcc

SEQ ID NO: 13865 - DNA, 25 bp, Saccharomyces pastorianus
tggtacattgaaatcgcctttgcga

SEQ ID NO: 13866 - DNA, 25 bp, Saccharomyces pastorianus
tttgtcctcgtccttcagaagtaca

SEQ ID NO: 13867 - DNA, 25 bp, Saccharomyces pastorianus
gataacaactcgctctcacggaagt

SEQ ID NO: 13868 - DNA, 25 bp, Saccharomyces pastorianus
agagatgatcctaaccgtggtacat

SEQ ID NO: 13869 - DNA, 25 bp, Saccharomyces pastorianus
gataccatgaggacccggagctggc

SEQ ID NO: 13870 - DNA, 25 bp, Saccharomyces pastorianus
gcccagcgacaggaagtaccggtta

SEQ ID NO: 13871 - DNA, 25 bp, Saccharomyces pastorianus
gtcggcagctgcaggattacggcaa

SEQ ID NO: 13872 - DNA, 25 bp, Saccharomyces pastorianus
gtgccgatgcactgaagaccaagga

SEQ ID NO: 13873 - DNA, 25 bp, Saccharomyces pastorianus
aaacagatgggtgccgccgagctta

SEQ ID NO: 13874 - DNA, 25 bp, Saccharomyces pastorianus
gcagcagtaggagccacttcgccgt

SEQ ID NO: 13875 - DNA, 25 bp, Saccharomyces pastorianus
tgaaacggaagcatgccacgcccag

SEQ ID NO: 13876 - DNA, 25 bp, Saccharomyces pastorianus
gagcttaatcgctggttgcaccaac

SEQ ID NO: 13877 - DNA, 25 bp, Saccharomyces pastorianus
aacagcctgaattggacacgaacga

SEQ ID NO: 13878 - DNA, 25 bp, Saccharomyces pastorianus
ggattacggcaacacggacaccaac

SEQ ID NO: 13879 - DNA, 25 bp, Saccharomyces pastorianus
gagctggcgttcgaggacccgaaca

SEQ ID NO: 13880 - DNA, 25 bp, Saccharomyces pastorianus
ggtaaatccaccctattgaagatca

SEQ ID NO: 13881 - DNA, 25 bp, Saccharomyces pastorianus
ctttgccctgttggctttggaacaa

SEQ ID NO: 13882 - DNA, 25 bp, Saccharomyces pastorianus
aaatggccaccctatcagaaggtca

SEQ ID NO: 13883 - DNA, 25 bp, Saccharomyces pastorianus
gtcgtctcgcatgatttcagactac

SEQ ID NO: 13884 - DNA, 25 bp, Saccharomyces pastorianus
aagtaccctagcatttcacaagatt

SEQ ID NO: 13885 - DNA, 25 bp, Saccharomyces pastorianus
atccggccgtgtttccagacataca

SEQ ID NO: 13886 - DNA, 25 bp, Saccharomyces pastorianus
atgggacggctctatcttgcaatat

SEQ ID NO: 13887 - DNA, 25 bp, Saccharomyces pastorianus
gaattcgttcgtgacaagtacccta

SEQ ID NO: 13888 - DNA, 25 bp, Saccharomyces pastorianus
gaccaagtctgccttagaattcgtt

SEQ ID NO: 13889 - DNA, 25 bp, Saccharomyces pastorianus
aggtgtctactcacaacattcgcaa

SEQ ID NO: 13890 - DNA, 25 bp, Saccharomyces pastorianus
accaaacgtcctattgctggatgaa

SEQ ID NO: 13891 - DNA, 25 bp, Saccharomyces pastorianus
gcaacagttctccatactgaaggat

SEQ ID NO: 13892 - DNA, 25 bp, Saccharomyces pastorianus
gtgggcatgggtcatgttatccatt

SEQ ID NO: 13893 - DNA, 25 bp, Saccharomyces pastorianus
agaaacactttctatccatcttcct

SEQ ID NO: 13894 - DNA, 25 bp, Saccharomyces pastorianus
gctgatttgtttgacggcatcacat

SEQ ID NO: 13895 - DNA, 25 bp, Saccharomyces pastorianus
gattcttcgagactgccaaattaca

SEQ ID NO: 13896 - DNA, 25 bp, Saccharomyces pastorianus
aagccagatccaagattcttcgaga

SEQ ID NO: 13897 - DNA, 25 bp, Saccharomyces pastorianus
atatccttgagatccccttggtaat

SEQ ID NO: 13898 - DNA, 25 bp, Saccharomyces pastorianus
gttcatagatgattccttacccttg

SEQ ID NO: 13899 - DNA, 25 bp, Saccharomyces pastorianus
gaaagtaatgtggaggccgccttaa

SEQ ID NO: 13900 - DNA, 25 bp, Saccharomyces pastorianus
gccaacgcttggtttatcgatgata

SEQ ID NO: 13901 - DNA, 25 bp, Saccharomyces pastorianus
ctatccatcttccttcgcaataaag

SEQ ID NO: 13902 - DNA, 25 bp, Saccharomyces pastorianus
gacacaacacgccaaaatctgatcg

SEQ ID NO: 13903 - DNA, 25 bp, Saccharomyces pastorianus
tccatggaattcgagttcaggctgt

SEQ ID NO: 13904 - DNA, 25 bp, Saccharomyces pastorianus
tgtgcaccatttttcccactgaaaa

SEQ ID NO: 13905 - DNA, 25 bp, Saccharomyces pastorianus
gaggaagccacaagcgacacaacac

SEQ ID NO: 13906 - DNA, 25 bp, Saccharomyces pastorianus
gataaactgtgcaccatttttccca

SEQ ID NO: 13907 - DNA, 25 bp, Saccharomyces pastorianus
gaaactatttgacgagactcatttt

SEQ ID NO: 13908 - DNA, 25 bp, Saccharomyces pastorianus
gagactgtatactggatgtttctaa

SEQ ID NO: 13909 - DNA, 25 bp, Saccharomyces pastorianus
gatgtactattataagggcgacggt

SEQ ID NO: 13910 - DNA, 25 bp, Saccharomyces pastorianus
gacgatttcttcttacattataggc

SEQ ID NO: 13911 - DNA, 25 bp, Saccharomyces pastorianus
aaatgcttaaattcctgatgtacta

SEQ ID NO: 13912 - DNA, 25 bp, Saccharomyces pastorianus
taggctattacaaattttccccatt

SEQ ID NO: 13913 - DNA, 25 bp, Saccharomyces pastorianus
caagatcgtcgaattttgttaccca

SEQ ID NO: 13914 - DNA, 25 bp, Saccharomyces pastorianus
aatttcgatatcttcaacgctccgt

SEQ ID NO: 13915 - DNA, 25 bp, Saccharomyces pastorianus
gaacgtcaattcaaatagcccttta

SEQ ID NO: 13916 - DNA, 25 bp, Saccharomyces pastorianus
tcacacttcgctgttgtcacaacaa

SEQ ID NO: 13917 - DNA, 25 bp, Saccharomyces pastorianus
tcaccgggtatttcaagaccgtctt

SEQ ID NO: 13918 - DNA, 25 bp, Saccharomyces pastorianus
tcggtagttctacatcacccatgaa

SEQ ID NO: 13919 - DNA, 25 bp, Saccharomyces pastorianus
aacgctccgtcagattcaccgggta

SEQ ID NO: 13920 - DNA, 25 bp, Saccharomyces pastorianus
atatgacgcgaattcgagtgctggc

SEQ ID NO: 13921 - DNA, 25 bp, Saccharomyces pastorianus
aacaaaacctgctatccaactcttt

SEQ ID NO: 13922 - DNA, 25 bp, Saccharomyces pastorianus
catcgttcatggctgcatctttaca

SEQ ID NO: 13923 - DNA, 25 bp, Saccharomyces pastorianus
gtcacgtaatgcatctcattcctca

SEQ ID NO: 13924 - DNA, 25 bp, Saccharomyces pastorianus
gagagcatttctcagtgcttgacca

SEQ ID NO: 13925 - DNA, 25 bp, Saccharomyces pastorianus
agtgcttgaccagcttgtcacagac

SEQ ID NO: 13926 - DNA, 25 bp, Saccharomyces pastorianus
gatgaagcaaaccttgaagcccgtg

SEQ ID NO: 13927 - DNA, 25 bp, Saccharomyces pastorianus
acaagatactgtcgaccggttcctt

SEQ ID NO: 13928 - DNA, 25 bp, Saccharomyces pastorianus
tgaagcccgtgaagaagcgcctttt

SEQ ID NO: 13929 - DNA, 25 bp, Saccharomyces pastorianus
cagtgcttgataactcgcctggcaa

SEQ ID NO: 13930 - DNA, 25 bp, Saccharomyces pastorianus
aggttccgggatcttgctcaaaata

SEQ ID NO: 13931 - DNA, 25 bp, Saccharomyces pastorianus
ttagaaagcatgcatcaccgattaa

SEQ ID NO: 13932 - DNA, 25 bp, Saccharomyces pastorianus
aaagttggccaatctacgactagag

SEQ ID NO: 13933 - DNA, 25 bp, Saccharomyces pastorianus
gaagcgccttttcgtggacacagac

SEQ ID NO: 13934 - DNA, 25 bp, Saccharomyces pastorianus
catacctgacttctactggcaatat

SEQ ID NO: 13935 - DNA, 25 bp, Saccharomyces pastorianus
tttatgacgctgaagagtaccacca

SEQ ID NO: 13936 - DNA, 25 bp, Saccharomyces pastorianus
ctttttcagaattcatgaccccacc

SEQ ID NO: 13937 - DNA, 25 bp, Saccharomyces pastorianus
gcagcggattatttgctcattcaga

SEQ ID NO: 13938 - DNA, 25 bp, Saccharomyces pastorianus
gagtaccaccagttatacttggata

SEQ ID NO: 13939 - DNA, 25 bp, Saccharomyces pastorianus
gccgaagttctacaagtatcctata

SEQ ID NO: 13940 - DNA, 25 bp, Saccharomyces pastorianus
tcatcgctcatctctaaaacaatta

SEQ ID NO: 13941 - DNA, 25 bp, Saccharomyces pastorianus
aaaggattctgctcacggtgtatct

SEQ ID NO: 13942 - DNA, 25 bp, Saccharomyces pastorianus
taccctggtcgaacccatcaaaaat

SEQ ID NO: 13943 - DNA, 25 bp, Saccharomyces pastorianus
ggtgacaccgattttgccgaagttc

SEQ ID NO: 13944 - DNA, 25 bp, Saccharomyces pastorianus
taataagattgctaccctggtcgaa

SEQ ID NO: 13945 - DNA, 25 bp, Saccharomyces pastorianus
aaggaacgcagtatcgcagcggatt

SEQ ID NO: 13946 - DNA, 25 bp, Saccharomyces pastorianus
gaagccgttgctaaattccacttgg

SEQ ID NO: 13947 - DNA, 25 bp, Saccharomyces pastorianus
attggtcaagtctttgtcaccacca

SEQ ID NO: 13948 - DNA, 25 bp, Saccharomyces pastorianus
caccaccactggttgcagagacatt

SEQ ID NO: 13949 - DNA, 25 bp, Saccharomyces pastorianus
ggaagatgcttctcatattggtcaa

SEQ ID NO: 13950 - DNA, 25 bp, Saccharomyces pastorianus
gcccgtgttttggttactgaaatcg

SEQ ID NO: 13951 - DNA, 25 bp, Saccharomyces pastorianus
gaaggttaccaagtcatcaccatgg

SEQ ID NO: 13952 - DNA, 25 bp, Saccharomyces pastorianus
gtgttcatgtcctaccaaagatttt

SEQ ID NO: 13953 - DNA, 25 bp, Saccharomyces pastorianus
tccacttgggtaacttgggtgtcaa

SEQ ID NO: 13954 - DNA, 25 bp, Saccharomyces pastorianus
tgttctttctctaaccaagttttgg

SEQ ID NO: 13955 - DNA, 25 bp, Saccharomyces pastorianus
gtccattcggagttggtgttcatgt

SEQ ID NO: 13956 - DNA, 25 bp, Saccharomyces pastorianus
gctattgtctgtaacatcggtcatt

SEQ ID NO: 13957 - DNA, 25 bp, Saccharomyces pastorianus
accttcgtcgcctgtattatcagat

SEQ ID NO: 13958 - DNA, 25 bp, Saccharomyces pastorianus
gggcccattgattgtttcaaccaca

SEQ ID NO: 13959 - DNA, 25 bp, Saccharomyces pastorianus
gagtctacgagagaaagcctaccga

SEQ ID NO: 13960 - DNA, 25 bp, Saccharomyces pastorianus
agcctaccgaaacaacacacttaag

SEQ ID NO: 13961 - DNA, 25 bp, Saccharomyces pastorianus
tcatgtcttatgtcgttgctctttt

SEQ ID NO: 13962 - DNA, 25 bp, Saccharomyces pastorianus
aattcagtccagacttacatttctg

SEQ ID NO: 13963 - DNA, 25 bp, Saccharomyces pastorianus
tgctcttttccatttcggttccgaa

SEQ ID NO: 13964 - DNA, 25 bp, Saccharomyces pastorianus
atgttcaacctccaagacgtaataa

SEQ ID NO: 13965 - DNA, 25 bp, Saccharomyces pastorianus
tccatcgtatccgtctttaattcag

SEQ ID NO: 13966 - DNA, 25 bp, Saccharomyces pastorianus
ttcggttccgaactgttgattttca

SEQ ID NO: 13967 - DNA, 25 bp, Saccharomyces pastorianus
gttactgttcatttccatcgtatcc

SEQ ID NO: 13968 - DNA, 25 bp, Saccharomyces pastorianus
gccttaccagacgacgtacttatag

SEQ ID NO: 13969 - DNA, 25 bp, Saccharomyces pastorianus
accgagcgcgttgcaggcaatggca

SEQ ID NO: 13970 - DNA, 25 bp, Saccharomyces pastorianus
taaacacggaaaacggctcgctaat

SEQ ID NO: 13971 - DNA, 25 bp, Saccharomyces pastorianus
ggcaatggcaattcacagcagacaa

SEQ ID NO: 13972 - DNA, 25 bp, Saccharomyces pastorianus
ggctcgctaattcccctgtcaaaaa

SEQ ID NO: 13973 - DNA, 25 bp, Saccharomyces pastorianus
tctaatttcaccgaactgtacccta

SEQ ID NO: 13974 - DNA, 25 bp, Saccharomyces pastorianus
gacccgcctcagtttcaaagactaa

SEQ ID NO: 13975 - DNA, 25 bp, Saccharomyces pastorianus
aggcataacgttgcttggctaccca

SEQ ID NO: 13976 - DNA, 25 bp, Saccharomyces pastorianus
gaactgtaccctattgatctggcca

SEQ ID NO: 13977 - DNA, 25 bp, Saccharomyces pastorianus
ggtgctacagctggaactttaacaa

SEQ ID NO: 13978 - DNA, 25 bp, Saccharomyces pastorianus
ttgaaagacgtttccgccttaccag

SEQ ID NO: 13979 - DNA, 25 bp, Saccharomyces pastorianus
gtggtcatcattatcgagtgcagca

SEQ ID NO: 13980 - DNA, 25 bp, Saccharomyces pastorianus
atcgccctctattgtatttgtggac

SEQ ID NO: 13981 - DNA, 25 bp, Saccharomyces pastorianus
gcacacgcttactgacttagatttt

SEQ ID NO: 13982 - DNA, 25 bp, Saccharomyces pastorianus
gtgcagcagctggttcaaacaagaa

SEQ ID NO: 13983 - DNA, 25 bp, Saccharomyces pastorianus
gacctataggtctggtggacttcaa

SEQ ID NO: 13984 - DNA, 25 bp, Saccharomyces pastorianus
gagggcactggctccaataacaata

SEQ ID NO: 13985 - DNA, 25 bp, Saccharomyces pastorianus
ctaaggatgcagctatgggcccact

SEQ ID NO: 13986 - DNA, 25 bp, Saccharomyces pastorianus
gtttgcagtatatcaagccgtccgt

SEQ ID NO: 13987 - DNA, 25 bp, Saccharomyces pastorianus
aagccgtccgtgtcccaggatgggt

SEQ ID NO: 13988 - DNA, 25 bp, Saccharomyces pastorianus
atatattccgttgccagaggaccag

SEQ ID NO: 13989 - DNA, 25 bp, Saccharomyces pastorianus
tgctaagaaactatcgccctctatt

SEQ ID NO: 13990 - DNA, 25 bp, Saccharomyces pastorianus
aaatttgaatccacactggccggta

SEQ ID NO: 13991 - DNA, 25 bp, Saccharomyces pastorianus
taccaggtatttaatcgccgtcaag

SEQ ID NO: 13992 - DNA, 25 bp, Saccharomyces pastorianus
gcttttcacaggtactcgagacaat

SEQ ID NO: 13993 - DNA, 25 bp, Saccharomyces pastorianus
tacgggttttccaagcttttcacag

SEQ ID NO: 13994 - DNA, 25 bp, Saccharomyces pastorianus
gtgggccatgtccaaattcgaactt

SEQ ID NO: 13995 - DNA, 25 bp, Saccharomyces pastorianus
aaggctctaggtgtcatgtgggcca

SEQ ID NO: 13996 - DNA, 25 bp, Saccharomyces pastorianus
gctaacaagtttgccggcgccagaa

SEQ ID NO: 13997 - DNA, 25 bp, Saccharomyces pastorianus
gagcttgaccaatacgaacgtgcca

SEQ ID NO: 13998 - DNA, 25 bp, Saccharomyces pastorianus
agtgtcttctaaggagcgtctcgca

SEQ ID NO: 13999 - DNA, 25 bp, Saccharomyces pastorianus
ttgttgtacttgttggccagggttt

SEQ ID NO: 14000 - DNA, 25 bp, Saccharomyces pastorianus
aggcaatgctattcatcgctaacaa

SEQ ID NO: 14001 - DNA, 25 bp, Saccharomyces pastorianus
aagacagtcagtcatttcccaaatg

SEQ ID NO: 14002 - DNA, 25 bp, Saccharomyces pastorianus
gaagaacaagggacactttcaggga

SEQ ID NO: 14003 - DNA, 25 bp, Saccharomyces pastorianus
atttcccaaatgtataccttcgata

SEQ ID NO: 14004 - DNA, 25 bp, Saccharomyces pastorianus
tatcaagaattccaaccagttcaat

SEQ ID NO: 14005 - DNA, 25 bp, Saccharomyces pastorianus
gaaccaaaaagatccgaaagtgcta

SEQ ID NO: 14006 - DNA, 25 bp, Saccharomyces pastorianus
aatgtataccttcgatagactggtt

SEQ ID NO: 14007 - DNA, 25 bp, Saccharomyces pastorianus
cagctccaacaagaggacaagtgtt

SEQ ID NO: 14008 - DNA, 25 bp, Saccharomyces pastorianus
gaatctattcaaggacgcgaagaac

SEQ ID NO: 14009 - DNA, 25 bp, Saccharomyces pastorianus
acaactttagacagtactttcttag

SEQ ID NO: 14010 - DNA, 25 bp, Saccharomyces pastorianus
gacaagtgttgtcgttatacaaaca

SEQ ID NO: 14011 - DNA, 25 bp, Saccharomyces pastorianus
acgcgaagaacgaattgggtgtctt

SEQ ID NO: 14012 - DNA, 25 bp, Saccharomyces pastorianus
ttgaccccttctcctggttgggaat

SEQ ID NO: 14013 - DNA, 25 bp, Saccharomyces pastorianus
gacagtggtgactctgttctgatta

SEQ ID NO: 14014 - DNA, 25 bp, Saccharomyces pastorianus
gtatttagccttgctgacttctttg

SEQ ID NO: 14015 - DNA, 25 bp, Saccharomyces pastorianus
tagccaccaagtgccgtttcaatga

SEQ ID NO: 14016 - DNA, 25 bp, Saccharomyces pastorianus
gaacactttcaacttggtcctgaga

SEQ ID NO: 14017 - DNA, 25 bp, Saccharomyces pastorianus
gttaagtacgttagctggagtgcca

SEQ ID NO: 14018 - DNA, 25 bp, Saccharomyces pastorianus
gtgcccagtcagtgaacaagtcctc

SEQ ID NO: 14019 - DNA, 25 bp, Saccharomyces pastorianus
atcttccacaagagcaccattttca

SEQ ID NO: 14020 - DNA, 25 bp, Saccharomyces pastorianus
aattgccgatgcttctggtaacagt

SEQ ID NO: 14021 - DNA, 25 bp, Saccharomyces pastorianus
agctagcgttgattgacttggccat

SEQ ID NO: 14022 - DNA, 25 bp, Saccharomyces pastorianus
ttctgattaacgatccacctgcttg

SEQ ID NO: 14023 - DNA, 25 bp, Saccharomyces pastorianus
tggttaactccaggcgttactgtgt

SEQ ID NO: 14024 - DNA, 25 bp, Saccharomyces pastorianus
cgttactgtgtacttaatggcctca

SEQ ID NO: 14025 - DNA, 25 bp, Saccharomyces pastorianus
caagggtattgttcctctatggtgc

SEQ ID NO: 14026 - DNA, 25 bp, Saccharomyces pastorianus
aaaagattggatttgccggactatg

SEQ ID NO: 14027 - DNA, 25 bp, Saccharomyces pastorianus
accgctgagttccttgctgacataa

SEQ ID NO: 14028 - DNA, 25 bp, Saccharomyces pastorianus
gagcccattggagcagatatctgtc

SEQ ID NO: 14029 - DNA, 25 bp, Saccharomyces pastorianus
ctatttggccggtatattatgtgct

SEQ ID NO: 14030 - DNA, 25 bp, Saccharomyces pastorianus
ggtgcagacagatcccatacacgat

SEQ ID NO: 14031 - DNA, 25 bp, Saccharomyces pastorianus
attatgtgctgccatttcgcatcca

SEQ ID NO: 14032 - DNA, 25 bp, Saccharomyces pastorianus
taatgaatccatgtctgtcgcctca

SEQ ID NO: 14033 - DNA, 25 bp, Saccharomyces pastorianus
aagcatttatattccggctggttaa

SEQ ID NO: 14034 - DNA, 25 bp, Saccharomyces pastorianus
tatttttgccttcaccttcgtcttc

SEQ ID NO: 14035 - DNA, 25 bp, Saccharomyces pastorianus
tcttaagtatttttgccttcacctt

SEQ ID NO: 14036 - DNA, 25 bp, Saccharomyces pastorianus
gaagtattcttaagtatttttgcct

SEQ ID NO: 14037 - DNA, 25 bp, Saccharomyces pastorianus
ttcttaagtatttttgccttcacct

SEQ ID NO: 14038 - DNA, 25 bp, Saccharomyces pastorianus
ttaagtatttttgccttcaccttcg

SEQ ID NO: 14039 - DNA, 25 bp, Saccharomyces pastorianus
tcaccttcgtcttctactttggtgc

SEQ ID NO: 14040 - DNA, 25 bp, Saccharomyces pastorianus
atgcaagatctagaagtattcttaa

SEQ ID NO: 14041 - DNA, 25 bp, Saccharomyces pastorianus
tattcttaagtatttttgccttcac

SEQ ID NO: 14042 - DNA, 25 bp, Saccharomyces pastorianus
agtatttttgccttcaccttcgtct

SEQ ID NO: 14043 - DNA, 25 bp, Saccharomyces pastorianus
caccttcgtcttctactttggtgct

SEQ ID NO: 14044 - DNA, 25 bp, Saccharomyces pastorianus
gtatttttgccttcaccttcgtctt

SEQ ID NO: 14045 - DNA, 25 bp, Saccharomyces pastorianus
tatttttgccttcaccttcgtcttc

SEQ ID NO: 14046 - DNA, 25 bp, Saccharomyces pastorianus
tggtgctcatagaacagtcatgaag

SEQ ID NO: 14047 - DNA, 25 bp, Saccharomyces pastorianus
gaagtattcttaagtatttttgcct

SEQ ID NO: 14048 - DNA, 25 bp, Saccharomyces pastorianus
tcgtcttctactttggtgctcatag

SEQ ID NO: 14049 - DNA, 25 bp, Saccharomyces pastorianus
ttcttaagtatttttgccttcacct

SEQ ID NO: 14050 - DNA, 25 bp, Saccharomyces pastorianus
ttaagtatttttgccttcaccttcg

SEQ ID NO: 14051 - DNA, 25 bp, Saccharomyces pastorianus
tcaccttcgtcttctactttggtgc

SEQ ID NO: 14052 - DNA, 25 bp, Saccharomyces pastorianus
atgcaagatctagaagtattcttaa

SEQ ID NO: 14053 - DNA, 25 bp, Saccharomyces pastorianus
agtatttttgccttcaccttcgtct

SEQ ID NO: 14054 - DNA, 25 bp, Saccharomyces pastorianus
tattcttaagtatttttgccttcac

SEQ ID NO: 14055 - DNA, 25 bp, Saccharomyces pastorianus
caccttcgtcttctactttggtgct

SEQ ID NO: 14056 - DNA, 25 bp, Saccharomyces pastorianus
gtggttctgtagaggcatcatgcgc

SEQ ID NO: 14057 - DNA, 25 bp, Saccharomyces pastorianus
gagctgctggtttgatcgacatcgc

SEQ ID NO: 14058 - DNA, 25 bp, Saccharomyces pastorianus
atcatgcgcgctgggaatcggtgac

SEQ ID NO: 14059 - DNA, 25 bp, Saccharomyces pastorianus
gacatcgctactgtattgggcacaa

SEQ ID NO: 14060 - DNA, 25 bp, Saccharomyces pastorianus
gtttgatcgccaccatcaagtcaag

SEQ ID NO: 14061 - DNA, 25 bp, Saccharomyces pastorianus
gggtcgctgtcagttctatgatcga

SEQ ID NO: 14062 - DNA, 25 bp, Saccharomyces pastorianus
gggcacaagcgcctacctaatagaa

SEQ ID NO: 14063 - DNA, 25 bp, Saccharomyces pastorianus
tgtttcgtgtatctacaacgctccc

SEQ ID NO: 14064 - DNA, 25 bp, Saccharomyces pastorianus
tggacctaccgatcgatttgcagtt

SEQ ID NO: 14065 - DNA, 25 bp, Saccharomyces pastorianus
tgttaccagttttgtcagacttgct

SEQ ID NO: 14066 - DNA, 25 bp, Saccharomyces pastorianus
tcggtgacgctattgtggatcttgt

SEQ ID NO: 14067 - DNA, 25 bp, Saccharomyces pastorianus
atcatgtgtcgctgttgctgctttg

SEQ ID NO: 14068 - DNA, 25 bp, Saccharomyces pastorianus
gctggttgaaggatccatagctgat

SEQ ID NO: 14069 - DNA, 25 bp, Saccharomyces pastorianus
acaacttgatttacacttctggcca

SEQ ID NO: 14070 - DNA, 25 bp, Saccharomyces pastorianus
aactccagtcttttgtgaatccgct

SEQ ID NO: 14071 - DNA, 25 bp, Saccharomyces pastorianus
tcatactcccatgctatgaaggcaa

SEQ ID NO: 14072 - DNA, 25 bp, Saccharomyces pastorianus
ctttgctgaatttaacactgtttac

SEQ ID NO: 14073 - DNA, 25 bp, Saccharomyces pastorianus
taacattttcttggctgacattaaa

SEQ ID NO: 14074 - DNA, 25 bp, Saccharomyces pastorianus
ataagcctgctagatcatgtgtcgc

SEQ ID NO: 14075 - DNA, 25 bp, Saccharomyces pastorianus
acttctggccaaatcccaatgactt

SEQ ID NO: 14076 - DNA, 25 bp, Saccharomyces pastorianus
agtatttcaccacccataagcctgc

SEQ ID NO: 14077 - DNA, 25 bp, Saccharomyces pastorianus
aatgacttccgacaacaagctggtt

SEQ ID NO: 14078 - DNA, 25 bp, Saccharomyces pastorianus
gaattcagaagtattgtcccactac

SEQ ID NO: 14079 - DNA, 25 bp, Saccharomyces pastorianus
gattggccttgatcagtactttcag

SEQ ID NO: 14080 - DNA, 25 bp, Saccharomyces pastorianus
agggtcggaggcatatcgttacaag

SEQ ID NO: 14081 - DNA, 25 bp, Saccharomyces pastorianus
agagctgcagtttctggttttatgc

SEQ ID NO: 14082 - DNA, 25 bp, Saccharomyces pastorianus
aaattcctgagcgattttttctaca

SEQ ID NO: 14083 - DNA, 25 bp, Saccharomyces pastorianus
ccagatgttcgttatggattcccat

SEQ ID NO: 14084 - DNA, 25 bp, Saccharomyces pastorianus
ggttccgaggaaagcacgtgccaca

SEQ ID NO: 14085 - DNA, 25 bp, Saccharomyces pastorianus
gaggtacgcggatttactatacaga

SEQ ID NO: 14086 - DNA, 25 bp, Saccharomyces pastorianus
gattcccataatatccatcgactaa

SEQ ID NO: 14087 - DNA, 25 bp, Saccharomyces pastorianus
atagtgctactacaacgcccaaaac

SEQ ID NO: 14088 - DNA, 25 bp, Saccharomyces pastorianus
ttttatcactgcttgtctatttcga

SEQ ID NO: 14089 - DNA, 25 bp, Saccharomyces pastorianus
tggcactttccaccattgctaataa

SEQ ID NO: 14090 - DNA, 25 bp, Saccharomyces pastorianus
ttgtgttctattggcactttccacc

SEQ ID NO: 14091 - DNA, 25 bp, Saccharomyces pastorianus
atgttcctggcatgtatactgttgc

SEQ ID NO: 14092 - DNA, 25 bp, Saccharomyces pastorianus
aactgggctgctctacctattggta

SEQ ID NO: 14093 - DNA, 25 bp, Saccharomyces pastorianus
gattggccgtttgattggtgagcat

SEQ ID NO: 14094 - DNA, 25 bp, Saccharomyces pastorianus
acctactgggttggtgagattggcc

SEQ ID NO: 14095 - DNA, 25 bp, Saccharomyces pastorianus
gatgactgggacaactgggctgctc

SEQ ID NO: 14096 - DNA, 25 bp, Saccharomyces pastorianus
tgggctgctctacctattggtattg

SEQ ID NO: 14097 - DNA, 25 bp, Saccharomyces pastorianus
accattgctaataatgttcctggca

SEQ ID NO: 14098 - DNA, 25 bp, Saccharomyces pastorianus
tatgtctcaaacctactgggttggt

SEQ ID NO: 14099 - DNA, 25 bp, Saccharomyces pastorianus
gggcatttattatttacaacatcgc

SEQ ID NO: 14100 - DNA, 25 bp, Saccharomyces pastorianus
gcaatgccttgaacgctttaccaaa

SEQ ID NO: 14101 - DNA, 25 bp, Saccharomyces pastorianus
gaatctattagggttggcggttata

SEQ ID NO: 14102 - DNA, 25 bp, Saccharomyces pastorianus
tggcccaaaagtggttcgaacattt

SEQ ID NO: 14103 - DNA, 25 bp, Saccharomyces pastorianus
gagaacttatgacgctatcgccaag

SEQ ID NO: 14104 - DNA, 25 bp, Saccharomyces pastorianus
taaacctttccctgaaccatatttg

SEQ ID NO: 14105 - DNA, 25 bp, Saccharomyces pastorianus
agaaaaatgggctgtggccacttct

SEQ ID NO: 14106 - DNA, 25 bp, Saccharomyces pastorianus
agcacgtcatcgaagtctcacatgg

SEQ ID NO: 14107 - DNA, 25 bp, Saccharomyces pastorianus
acgcgatccttccaaatccaaggta

SEQ ID NO: 14108 - DNA, 25 bp, Saccharomyces pastorianus
tagggtacccaatcaacgaacgcga

SEQ ID NO: 14109 - DNA, 25 bp, Saccharomyces pastorianus
gtttgctcctgattttgccaacgaa

SEQ ID NO: 14110 - DNA, 25 bp, Saccharomyces pastorianus
gagaccaaaatacttcatcacagct

SEQ ID NO: 14111 - DNA, 25 bp, Saccharomyces pastorianus
agaccaggcagacatcgactctata

SEQ ID NO: 14112 - DNA, 25 bp, Saccharomyces pastorianus
gaagcccagataacctccgatgatg

SEQ ID NO: 14113 - DNA, 25 bp, Saccharomyces pastorianus
gaagctccggccgaaactaaagacg

SEQ ID NO: 14114 - DNA, 25 bp, Saccharomyces pastorianus
gaaccagcccctaaagatgctattg

SEQ ID NO: 14115 - DNA, 25 bp, Saccharomyces pastorianus
aatgcatcgtgctaacaaattcggt

SEQ ID NO: 14116 - DNA, 25 bp, Saccharomyces pastorianus
agtagcgacagcagtagacccaaaa

SEQ ID NO: 14117 - DNA, 25 bp, Saccharomyces pastorianus
gccccggttctatcaccagaagaaa

SEQ ID NO: 14118 - DNA, 25 bp, Saccharomyces pastorianus
gaggaattaggccttgtcactagga

SEQ ID NO: 14119 - DNA, 25 bp, Saccharomyces pastorianus
aggccaacgccttagatctactgaa

SEQ ID NO: 14120 - DNA, 25 bp, Saccharomyces pastorianus
gaacaaccgttctagagtcagtaag

SEQ ID NO: 14121 - DNA, 25 bp, Saccharomyces pastorianus
tgatgtttcccctactgctcaaaaa

SEQ ID NO: 14122 - DNA, 25 bp, Saccharomyces pastorianus
atttgctccatacgcggacttggta

SEQ ID NO: 14123 - DNA, 25 bp, Saccharomyces pastorianus
ttacaacttatctccttcgttcaac

SEQ ID NO: 14124 - DNA, 25 bp, Saccharomyces pastorianus
aaaagtttcctgaccaatggctcgc

SEQ ID NO: 14125 - DNA, 25 bp, Saccharomyces pastorianus
acaacttcgctcgtgattttgccaa

SEQ ID NO: 14126 - DNA, 25 bp, Saccharomyces pastorianus
gtgtcgacgtgttgatgcaccaaaa

SEQ ID NO: 14127 - DNA, 25 bp, Saccharomyces pastorianus
aatttatcactctagccggtttaca

SEQ ID NO: 14128 - DNA, 25 bp, Saccharomyces pastorianus
ggccaaaggccatgtctgttgacga

SEQ ID NO: 14129 - DNA, 25 bp, Saccharomyces pastorianus
gacgagcaacacactttcattcaga

SEQ ID NO: 14130 - DNA, 25 bp, Saccharomyces pastorianus
gaggtggtactcaatgttctgtcat

SEQ ID NO: 14131 - DNA, 25 bp, Saccharomyces pastorianus
atgcgttagcaatccacaacttcgc

SEQ ID NO: 14132 - DNA, 25 bp, Saccharomyces pastorianus
gttctgtcatgagagctcgtgcatt

SEQ ID NO: 14133 - DNA, 25 bp, Saccharomyces pastorianus
gacttgcaaggcttcgagaatttca

SEQ ID NO: 14134 - DNA, 25 bp, Saccharomyces pastorianus
tagtgtgtacacatgacgatgccat

SEQ ID NO: 14135 - DNA, 25 bp, Saccharomyces pastorianus
agctgaattactatccaccatttgt

SEQ ID NO: 14136 - DNA, 25 bp, Saccharomyces pastorianus
gaaaccgagtatcatggtaggccat

SEQ ID NO: 14137 - DNA, 25 bp, Saccharomyces pastorianus
ggtacagaccgttactactgaggac

SEQ ID NO: 14138 - DNA, 25 bp, Saccharomyces pastorianus
actctgcaaactctcattccaaaaa

SEQ ID NO: 14139 - DNA, 25 bp, Saccharomyces pastorianus
tccaccatttgttctacacgagtca

SEQ ID NO: 14140 - DNA, 25 bp, Saccharomyces pastorianus
gacgattttgaccacttacattgta

SEQ ID NO: 14141 - DNA, 25 bp, Saccharomyces pastorianus
gaggacggtgaatctgtgaagctat

SEQ ID NO: 14142 - DNA, 25 bp, Saccharomyces pastorianus
tgacgatgccatggtgtttgtcgac

SEQ ID NO: 14143 - DNA, 25 bp, Saccharomyces pastorianus
aagtttgtgcgtcacttgcatcagc

SEQ ID NO: 14144 - DNA, 25 bp, Saccharomyces pastorianus
gactcgttggctaaaggcatctctg

SEQ ID NO: 14145 - DNA, 25 bp, Saccharomyces pastorianus
gaggaaaaagctgctcccgttgcgg

SEQ ID NO: 14146 - DNA, 25 bp, Saccharomyces pastorianus
ttctgctgctattcaattcaccatc

SEQ ID NO: 14147 - DNA, 25 bp, Saccharomyces pastorianus
catcgaccaatctcactctttgaat

SEQ ID NO: 14148 - DNA, 25 bp, Saccharomyces pastorianus
gaccgtgccatttacatcgaccaat

SEQ ID NO: 14149 - DNA, 25 bp, Saccharomyces pastorianus
aaacgttaccattccatctctagat

SEQ ID NO: 14150 - DNA, 25 bp, Saccharomyces pastorianus
atatcgccgatatctctaacttgaa

SEQ ID NO: 14151 - DNA, 25 bp, Saccharomyces pastorianus
gcttcaagtgcaagttacgctgcca

SEQ ID NO: 14152 - DNA, 25 bp, Saccharomyces pastorianus
aagagatgcatctccagctccagta

SEQ ID NO: 14153 - DNA, 25 bp, Saccharomyces pastorianus
aaggttgctgatcaagctaccgaga

SEQ ID NO: 14154 - DNA, 25 bp, Saccharomyces pastorianus
agctccagtaggcaatgactcgttg

SEQ ID NO: 14155 - DNA, 25 bp, Saccharomyces pastorianus
gtctcagtaactacgttggacttaa

SEQ ID NO: 14156 - DNA, 25 bp, Saccharomyces pastorianus
atgagaccgatctttcgaccaagtc

SEQ ID NO: 14157 - DNA, 25 bp, Saccharomyces pastorianus
gaacaccgaaattgagatccatgat

SEQ ID NO: 14158 - DNA, 25 bp, Saccharomyces pastorianus
gatataggcgcatcatggcagtcaa

SEQ ID NO: 14159 - DNA, 25 bp, Saccharomyces pastorianus
gaaccctttgataaaatcggtcctg

SEQ ID NO: 14160 - DNA, 25 bp, Saccharomyces pastorianus
tcctctgccccaagaaaagctaatt

SEQ ID NO: 14161 - DNA, 25 bp, Saccharomyces pastorianus
gaccaagtcattttcgaaccctttg

SEQ ID NO: 14162 - DNA, 25 bp, Saccharomyces pastorianus
gggctctaatttttcattcaagaat

SEQ ID NO: 14163 - DNA, 25 bp, Saccharomyces pastorianus
atacaagtacatagtctcagtaact

SEQ ID NO: 14164 - DNA, 25 bp, Saccharomyces pastorianus
gaaaagcattcttccttatacaagt

SEQ ID NO: 14165 - DNA, 25 bp, Saccharomyces pastorianus
tggacttaaaagaacccactgaggg

SEQ ID NO: 14166 - DNA, 25 bp, Saccharomyces pastorianus
gggtcagtgctggattatttacatt

SEQ ID NO: 14167 - DNA, 25 bp, Saccharomyces pastorianus
gaagattgctttacccacaagagtg

SEQ ID NO: 14168 - DNA, 25 bp, Saccharomyces pastorianus
tgaacgtacctttttgtcatggtta

SEQ ID NO: 14169 - DNA, 25 bp, Saccharomyces pastorianus
agaggttcaggtccttacgacgaca

SEQ ID NO: 14170 - DNA, 25 bp, Saccharomyces pastorianus
tacgcacttgtgacataccattgga

SEQ ID NO: 14171 - DNA, 25 bp, Saccharomyces pastorianus
ttatttacatttgttgccatgggca

SEQ ID NO: 14172 - DNA, 25 bp, Saccharomyces pastorianus
cttcacagtgatgctgggtgggctt

SEQ ID NO: 14173 - DNA, 25 bp, Saccharomyces pastorianus
gcctactttgttatgctttttccta

SEQ ID NO: 14174 - DNA, 25 bp, Saccharomyces pastorianus
ggaacctaaagtcttctttgccaat

SEQ ID NO: 14175 - DNA, 25 bp, Saccharomyces pastorianus
ttttcctactagtcgctgtcattat

SEQ ID NO: 14176 - DNA, 25 bp, Saccharomyces pastorianus
agagccgccgcaatcagacgtagag

SEQ ID NO: 14177 - DNA, 25 bp, Saccharomyces pastorianus
atgattctcaatacgggctagctgc

SEQ ID NO: 14178 - DNA, 25 bp, Saccharomyces pastorianus
taaccgtttccaagttctctactgt

SEQ ID NO: 14179 - DNA, 25 bp, Saccharomyces pastorianus
tcaactccggtgaagtctgctgtgc

SEQ ID NO: 14180 - DNA, 25 bp, Saccharomyces pastorianus
gaggaagtatttggccctatcgtaa

SEQ ID NO: 14181 - DNA, 25 bp, Saccharomyces pastorianus
gattctggattacgtcaatgtggca

SEQ ID NO: 14182 - DNA, 25 bp, Saccharomyces pastorianus
tctgctgtgcaggttctagaattta

SEQ ID NO: 14183 - DNA, 25 bp, Saccharomyces pastorianus
aaatcagagggagctcgtcttgtta

SEQ ID NO: 14184 - DNA, 25 bp, Saccharomyces pastorianus
ggtgacgctgctttgagtaattaca

SEQ ID NO: 14185 - DNA, 25 bp, Saccharomyces pastorianus
agccaacgatttttgctgacgtcaa

SEQ ID NO: 14186 - DNA, 25 bp, Saccharomyces pastorianus
ggctagctgccggtattcacacaaa

SEQ ID NO: 14187 - DNA, 25 bp, Saccharomyces pastorianus
aagggctactttgtcaagccaacga

SEQ ID NO: 14188 - DNA, 25 bp, Saccharomyces pastorianus
agacctttatgaagccgtattgaac

SEQ ID NO: 14189 - DNA, 25 bp, Saccharomyces pastorianus
tatcggccataatttaggtctagac

SEQ ID NO: 14190 - DNA, 25 bp, Saccharomyces pastorianus
gtttactggcgcacaaagagacctt

SEQ ID NO: 14191 - DNA, 25 bp, Saccharomyces pastorianus
tgaaatggttcttgttgacgcagct

SEQ ID NO: 14192 - DNA, 25 bp, Saccharomyces pastorianus
aattattctctccatgacgttcatg

SEQ ID NO: 14193 - DNA, 25 bp, Saccharomyces pastorianus
tagacgttcacgatgtgcccaaagc

SEQ ID NO: 14194 - DNA, 25 bp, Saccharomyces pastorianus
tgttgacgcagctggttccttgggt

SEQ ID NO: 14195 - DNA, 25 bp, Saccharomyces pastorianus
aaattataccctcactatatcggcc

SEQ ID NO: 14196 - DNA, 25 bp, Saccharomyces pastorianus
gtgaatcattcccatcttattttag

SEQ ID NO: 14197 - DNA, 25 bp, Saccharomyces pastorianus
ggttcaaactcactatgcatccatt

SEQ ID NO: 14198 - DNA, 25 bp, Saccharomyces pastorianus
aaccgggcttgtacattcctgatag

SEQ ID NO: 14199 - DNA, 25 bp, Saccharomyces pastorianus
agtaacgccgaatcagcgccattaa

SEQ ID NO: 14200 - DNA, 25 bp, Saccharomyces pastorianus
gttcaaaggacattgcctcggctat

SEQ ID NO: 14201 - DNA, 25 bp, Saccharomyces pastorianus
atcattccccttctttgaactcaat

SEQ ID NO: 14202 - DNA, 25 bp, Saccharomyces pastorianus
gtgatttctaactcttctacttcat

SEQ ID NO: 14203 - DNA, 25 bp, Saccharomyces pastorianus
atagatccaccaatctggacctaga

SEQ ID NO: 14204 - DNA, 25 bp, Saccharomyces pastorianus
ggctctatcacttcaggagcttcta

SEQ ID NO: 14205 - DNA, 25 bp, Saccharomyces pastorianus
aatctgctgaactctatggttcgca

SEQ ID NO: 14206 - DNA, 25 bp, Saccharomyces pastorianus
taatggtaacaagtcccctactcca

SEQ ID NO: 14207 - DNA, 25 bp, Saccharomyces pastorianus
agaaccaactctggtggctctatca

SEQ ID NO: 14208 - DNA, 25 bp, Saccharomyces pastorianus
taatgcgaactacccacaatccaat

SEQ ID NO: 14209 - DNA, 25 bp, Saccharomyces pastorianus
ttccaatatcgcttcgggtgaggac

SEQ ID NO: 14210 - DNA, 25 bp, Saccharomyces pastorianus
ggctgggttcctcaagacatgtttg

SEQ ID NO: 14211 - DNA, 25 bp, Saccharomyces pastorianus
gtgcaccaagccattcattttacaa

SEQ ID NO: 14212 - DNA, 25 bp, Saccharomyces pastorianus
atttgctagtggacgaatcgctgtt

SEQ ID NO: 14213 - DNA, 25 bp, Saccharomyces pastorianus
gactttgacaagctatccgaaccag

SEQ ID NO: 14214 - DNA, 25 bp, Saccharomyces pastorianus
gaaattcccattggactacacaaag

SEQ ID NO: 14215 - DNA, 25 bp, Saccharomyces pastorianus
attagattttgaaggtgcgtgcacc

SEQ ID NO: 14216 - DNA, 25 bp, Saccharomyces pastorianus
gaagtctgggacatatttgcccaaa

SEQ ID NO: 14217 - DNA, 25 bp, Saccharomyces pastorianus
atttgccgccactcaaggctgggtt

SEQ ID NO: 14218 - DNA, 25 bp, Saccharomyces pastorianus
tcagctgattagtgcagtggccccg

SEQ ID NO: 14219 - DNA, 25 bp, Saccharomyces pastorianus
aatttattgcttatgaagggcccaa

SEQ ID NO: 14220 - DNA, 25 bp, Saccharomyces pastorianus
caattcatgtataaacggacccgta

SEQ ID NO: 14221 - DNA, 25 bp, Saccharomyces pastorianus
tgggttactcttaccatgacgaaac

SEQ ID NO: 14222 - DNA, 25 bp, Saccharomyces pastorianus
tagcgaagtccccaaggcttacatc

SEQ ID NO: 14223 - DNA, 25 bp, Saccharomyces pastorianus
tgcccttggtttcgaagctgtggat

SEQ ID NO: 14224 - DNA, 25 bp, Saccharomyces pastorianus
ttaattactatacctgacgtcccag

SEQ ID NO: 14225 - DNA, 25 bp, Saccharomyces pastorianus
gacgtcccaggtgcattcaagaaat

SEQ ID NO: 14226 - DNA, 25 bp, Saccharomyces pastorianus
cgtcatgaatcctctagcgaagtcc

SEQ ID NO: 14227 - DNA, 25 bp, Saccharomyces pastorianus
gatgcaacaactaagtgcccttggt

SEQ ID NO: 14228 - DNA, 25 bp, Saccharomyces pastorianus
ggcagggatttctgttccaccaaga

SEQ ID NO: 14229 - DNA, 25 bp, Saccharomyces pastorianus
gcgactcttggaatttaactctgtt

SEQ ID NO: 14230 - DNA, 25 bp, Saccharomyces pastorianus
gttcctaggtggtttaagcgactct

SEQ ID NO: 14231 - DNA, 25 bp, Saccharomyces pastorianus
gtcggtggtgcttctaaagtgccaa

SEQ ID NO: 14232 - DNA, 25 bp, Saccharomyces pastorianus
ggccacatatttttactgggcaaca

SEQ ID NO: 14233 - DNA, 25 bp, Saccharomyces pastorianus
aatgggtttagatggccagccataa

SEQ ID NO: 14234 - DNA, 25 bp, Saccharomyces pastorianus
gtattcgaagccactgaacgtcaag

SEQ ID NO: 14235 - DNA, 25 bp, Saccharomyces pastorianus
aaaacacgttgtcccgattgagcac

SEQ ID NO: 14236 - DNA, 25 bp, Saccharomyces pastorianus
aaagcatcgaagttggccacatatt

SEQ ID NO: 14237 - DNA, 25 bp, Saccharomyces pastorianus
ttatgtgtcatcgtaggcccaaaga

SEQ ID NO: 14238 - DNA, 25 bp, Saccharomyces pastorianus
tgtcccgattgagcacttggcagaa

SEQ ID NO: 14239 - DNA, 25 bp, Saccharomyces pastorianus
gataaagttatctcatgccatgggc

SEQ ID NO: 14240 - DNA, 25 bp, Saccharomyces pastorianus
tgtctatatgtaccgggcccagtaa

SEQ ID NO: 14241 - DNA, 25 bp, Saccharomyces pastorianus
aactgggccgtgatgcaaatgggtt

SEQ ID NO: 14242 - DNA, 25 bp, Saccharomyces pastorianus
acggcatcggagtaagcaggctaac

SEQ ID NO: 14243 - DNA, 25 bp, Saccharomyces pastorianus
ttgcagcttccgctcaaactaagaa

SEQ ID NO: 14244 - DNA, 25 bp, Saccharomyces pastorianus
cggttttattttctctgttgttgca

SEQ ID NO: 14245 - DNA, 25 bp, Saccharomyces pastorianus
gggctaagagtcgatcctttagtag

SEQ ID NO: 14246 - DNA, 25 bp, Saccharomyces pastorianus
tattttctctgttgttgcattgcat

SEQ ID NO: 14247 - DNA, 25 bp, Saccharomyces pastorianus
cacaaaaagttgcagcttccgctca

SEQ ID NO: 14248 - DNA, 25 bp, Saccharomyces pastorianus
gagtcgatcctttagtagtgttatt

SEQ ID NO: 14249 - DNA, 25 bp, Saccharomyces pastorianus
agtagtgttattcctagcggtcggt

SEQ ID NO: 14250 - DNA, 25 bp, Saccharomyces pastorianus
cgatcttgaagattttttccgatga

SEQ ID NO: 14251 - DNA, 25 bp, Saccharomyces pastorianus
gaagagcaacaactcgatcttgaag

SEQ ID NO: 14252 - DNA, 25 bp, Saccharomyces pastorianus
gcttccgctcaaactaagaacacga

SEQ ID NO: 14253 - DNA, 25 bp, Saccharomyces pastorianus
tagcggtcggttttattttctctgt

SEQ ID NO: 14254 - DNA, 25 bp, Saccharomyces pastorianus
aagaactatccaaaccatatcggtt

SEQ ID NO: 14255 - DNA, 25 bp, Saccharomyces pastorianus
accagctttgagagaaggtttgcca

SEQ ID NO: 14256 - DNA, 25 bp, Saccharomyces pastorianus
aggtttgtttgatatccattctcca

SEQ ID NO: 14257 - DNA, 25 bp, Saccharomyces pastorianus
agagaaggtgctgaaagatccgctt

SEQ ID NO: 14258 - DNA, 25 bp, Saccharomyces pastorianus
gaattcattaccaagatttctgcca

SEQ ID NO: 14259 - DNA, 25 bp, Saccharomyces pastorianus
agctgctggcattaaggtcattcaa

SEQ ID NO: 14260 - DNA, 25 bp, Saccharomyces pastorianus
gccatcttgaaaacttatcctgctg

SEQ ID NO: 14261 - DNA, 25 bp, Saccharomyces pastorianus
tgtcgaccaaagaacccaagccatg

SEQ ID NO: 14262 - DNA, 25 bp, Saccharomyces pastorianus
aagatccgcttactacagctgggct

SEQ ID NO: 14263 - DNA, 25 bp, Saccharomyces pastorianus
aaggtatgttaactggtccaatcac

SEQ ID NO: 14264 - DNA, 25 bp, Saccharomyces pastorianus
tatcctgctgaaaaattctgggtta

SEQ ID NO: 14265 - DNA, 25 bp, Saccharomyces pastorianus
gctactgacggccaaactggagaat

SEQ ID NO: 14266 - DNA, 25 bp, Saccharomyces pastorianus
gagaatataccactttgttgagaaa

SEQ ID NO: 14267 - DNA, 25 bp, Saccharomyces pastorianus
tgctgaatagcatagataccgaagg

SEQ ID NO: 14268 - DNA, 25 bp, Saccharomyces pastorianus
gaaggtgcccgaattgaaatggtac

SEQ ID NO: 14269 - DNA, 25 bp, Saccharomyces pastorianus
gttgatggacgcttatactttatac

SEQ ID NO: 14270 - DNA, 25 bp, Saccharomyces pastorianus
gaacaaatatcgctactgacggcca

SEQ ID NO: 14271 - DNA, 25 bp, Saccharomyces pastorianus
gttgatcaaacaggacgctacactg

SEQ ID NO: 14272 - DNA, 25 bp, Saccharomyces pastorianus
gtcgagtgtgataacggtgctgaat

SEQ ID NO: 14273 - DNA, 25 bp, Saccharomyces pastorianus
gaagatactgacgttcccgaagagt

SEQ ID NO: 14274 - DNA, 25 bp, Saccharomyces pastorianus
ggcagtacagaaatcccacgtttga

SEQ ID NO: 14275 - DNA, 25 bp, Saccharomyces pastorianus
gaaatcccacgtttgatatcagaaa

SEQ ID NO: 14276 - DNA, 25 bp, Saccharomyces pastorianus
gagaagatcttccattacggccatg

SEQ ID NO: 14277 - DNA, 25 bp, Saccharomyces pastorianus
gccagtcgctgggtgtgtcgaataa

SEQ ID NO: 14278 - DNA, 25 bp, Saccharomyces pastorianus
atagagccggaaacgttcacgcaat

SEQ ID NO: 14279 - DNA, 25 bp, Saccharomyces pastorianus
ggtaaagactgtgtggccattgcct

SEQ ID NO: 14280 - DNA, 25 bp, Saccharomyces pastorianus
acgcaattggtgtctagttcgcttt

SEQ ID NO: 14281 - DNA, 25 bp, Saccharomyces pastorianus
aaggacttcatcgtcagcggtactg

SEQ ID NO: 14282 - DNA, 25 bp, Saccharomyces pastorianus
tccaagtccggaaaacccttcattg

SEQ ID NO: 14283 - DNA, 25 bp, Saccharomyces pastorianus
ttcattgccgggttcgacctaatcg

SEQ ID NO: 14284 - DNA, 25 bp, Saccharomyces pastorianus
taaacggtggtattgtcgtcgcaat

SEQ ID NO: 14285 - DNA, 25 bp, Saccharomyces pastorianus
gtgtgagtccttgtacgagccaaat

SEQ ID NO: 14286 - DNA, 25 bp, Saccharomyces pastorianus
attgcctgcgatttgcgtctcggga

SEQ ID NO: 14287 - DNA, 25 bp, Saccharomyces pastorianus
gttggtgtccattgctcaaaggttc

SEQ ID NO: 14288 - DNA, 25 bp, Saccharomyces pastorianus
gaacagacttttcaggccgtggtga

SEQ ID NO: 14289 - DNA, 25 bp, Saccharomyces pastorianus
atggtggcatgtctttcaacccaga

SEQ ID NO: 14290 - DNA, 25 bp, Saccharomyces pastorianus
caattcggtgttgctgtcgtcatca

SEQ ID NO: 14291 - DNA, 25 bp, Saccharomyces pastorianus
tgagtgtgtctttgccatctacgaa

SEQ ID NO: 14292 - DNA, 25 bp, Saccharomyces pastorianus
ggttggatccggacgatgccctaaa

SEQ ID NO: 14293 - DNA, 25 bp, Saccharomyces pastorianus
tgaccatcagttgaggctcctggac

SEQ ID NO: 14294 - DNA, 25 bp, Saccharomyces pastorianus
tatgtcacactttagcagtcacctg

SEQ ID NO: 14295 - DNA, 25 bp, Saccharomyces pastorianus
ttgtttacccgaagctgagtgtgtc

SEQ ID NO: 14296 - DNA, 25 bp, Saccharomyces pastorianus
ggtggtaacatcatggcccattcat

SEQ ID NO: 14297 - DNA, 25 bp, Saccharomyces pastorianus
taaagtcgtggactcgccttgttta

SEQ ID NO: 14298 - DNA, 25 bp, Saccharomyces pastorianus
tatccggatgcgcagtacctgttag

SEQ ID NO: 14299 - DNA, 25 bp, Saccharomyces pastorianus
caatagtttaatttgcggtgcccct

SEQ ID NO: 14300 - DNA, 25 bp, Saccharomyces pastorianus
aattaagtgctgtcggatatccgga

SEQ ID NO: 14301 - DNA, 25 bp, Saccharomyces pastorianus
ttaggcgacgcttactcttctggag

SEQ ID NO: 14302 - DNA, 25 bp, Saccharomyces pastorianus
taactttttaacctttgcagcaact

SEQ ID NO: 14303 - DNA, 25 bp, Saccharomyces pastorianus
gcggtgccccttatgaattggctaa

SEQ ID NO: 14304 - DNA, 25 bp, Saccharomyces pastorianus
gaagggctacatccatggccaatag

SEQ ID NO: 14305 - DNA, 25 bp, Saccharomyces pastorianus
attcttttcacggtttgatgggtct

SEQ ID NO: 14306 - DNA, 25 bp, Saccharomyces pastorianus
aagaccttattatttcagatccaga

SEQ ID NO: 14307 - DNA, 25 bp, Saccharomyces pastorianus
ctaaaaatcaccctgctgcaatgta

SEQ ID NO: 14308 - DNA, 25 bp, Saccharomyces pastorianus
agaagggcatttctcctgttcttag

SEQ ID NO: 14309 - DNA, 25 bp, Saccharomyces pastorianus
caggccattcgggtgatcaaacaac

SEQ ID NO: 14310 - DNA, 25 bp, Saccharomyces pastorianus
gggtggctgttatatgacgacgaaa

SEQ ID NO: 14311 - DNA, 25 bp, Saccharomyces pastorianus
aattgagtggcgtcgtaatgcatat

SEQ ID NO: 14312 - DNA, 25 bp, Saccharomyces pastorianus
gactggttaagaaatcgcgcattga

SEQ ID NO: 14313 - DNA, 25 bp, Saccharomyces pastorianus
aacggtattgcagtttacaggccat

SEQ ID NO: 14314 - DNA, 25 bp, Saccharomyces pastorianus
aaggcacctgtaagaactgttgata

SEQ ID NO: 14315 - DNA, 25 bp, Saccharomyces pastorianus
gagagacactgtgacttcagatcaa

SEQ ID NO: 14316 - DNA, 25 bp, Saccharomyces pastorianus
gtacctagacgtttcttctacattt

SEQ ID NO: 14317 - DNA, 25 bp, Saccharomyces pastorianus
agcaggtgccttatattctgtcgct

SEQ ID NO: 14318 - DNA, 25 bp, Saccharomyces pastorianus
gatacgctatccattgtacctagac

SEQ ID NO: 14319 - DNA, 25 bp, Saccharomyces pastorianus
ggtccccagcatggccattatgtat

SEQ ID NO: 14320 - DNA, 25 bp, Saccharomyces pastorianus
ggatactccctataaagctggccaa

SEQ ID NO: 14321 - DNA, 25 bp, Saccharomyces pastorianus
gaatgattacaccaaacggacgttt

SEQ ID NO: 14322 - DNA, 25 bp, Saccharomyces pastorianus
tggaatcccggttggtccgtatcga

SEQ ID NO: 14323 - DNA, 25 bp, Saccharomyces pastorianus
aactggatccattactacgtcggat

SEQ ID NO: 14324 - DNA, 25 bp, Saccharomyces pastorianus
atgtctttccatgagtgattaccac

SEQ ID NO: 14325 - DNA, 25 bp, Saccharomyces pastorianus
gaacggcagttcttccatggtttat

SEQ ID NO: 14326 - DNA, 25 bp, Saccharomyces pastorianus
gctggccaatatcatggtaccttga

SEQ ID NO: 14327 - DNA, 25 bp, Saccharomyces pastorianus
gaagctcttggcaaagaactccgtg

SEQ ID NO: 14328 - DNA, 25 bp, Saccharomyces pastorianus
tgattaccaccctgatacctggaat

SEQ ID NO: 14329 - DNA, 25 bp, Saccharomyces pastorianus
aagccacccgccatcagaatgatta

SEQ ID NO: 14330 - DNA, 25 bp, Saccharomyces pastorianus
gtaccttgactttcccatcggatta

SEQ ID NO: 14331 - DNA, 25 bp, Saccharomyces pastorianus
gaaaccgaagcttacacacagggta

SEQ ID NO: 14332 - DNA, 25 bp, Saccharomyces pastorianus
cacagggtaaattcaacgccgtatt

SEQ ID NO: 14333 - DNA, 25 bp, Saccharomyces pastorianus
gtctggtaacggttcaacggtattg

SEQ ID NO: 14334 - DNA, 25 bp, Saccharomyces pastorianus
aattggttgttgtgacgtctggtaa

SEQ ID NO: 14335 - DNA, 25 bp, Saccharomyces pastorianus
tactcatttttatttcgaccctaat

SEQ ID NO: 14336 - DNA, 25 bp, Saccharomyces pastorianus
ggtattgtctgaacacttccccgac

SEQ ID NO: 14337 - DNA, 25 bp, Saccharomyces pastorianus
tcaaggaggcgttttcttatatggc

SEQ ID NO: 14338 - DNA, 25 bp, Saccharomyces pastorianus
gatgtttggctcaatgttgtggtca

SEQ ID NO: 14339 - DNA, 25 bp, Saccharomyces pastorianus
gagtcattcaagttccttaattcgt

SEQ ID NO: 14340 - DNA, 25 bp, Saccharomyces pastorianus
cttaattcgtgctaaaggcgcttat

SEQ ID NO: 14341 - DNA, 25 bp, Saccharomyces pastorianus
aggcgcttatattaccactgttggt

SEQ ID NO: 14342 - DNA, 25 bp, Saccharomyces pastorianus
agccactggtgctaaacgtgctcaa

SEQ ID NO: 14343 - DNA, 25 bp, Saccharomyces pastorianus
cagccactggtgctaaacgtgctca

SEQ ID NO: 14344 - DNA, 25 bp, Saccharomyces pastorianus
aagatcagccactggtgctaaacgt

SEQ ID NO: 14345 - DNA, 25 bp, Saccharomyces pastorianus
gccactggtgctaaacgtgctcaat

SEQ ID NO: 14346 - DNA, 25 bp, Saccharomyces pastorianus
gatcagccactggtgctaaacgtgc

SEQ ID NO: 14347 - DNA, 25 bp, Saccharomyces pastorianus
actggtgctaaacgtgctcaattca

SEQ ID NO: 14348 - DNA, 25 bp, Saccharomyces pastorianus
tcagccactggtgctaaacgtgctc

SEQ ID NO: 14349 - DNA, 25 bp, Saccharomyces pastorianus
atcagccactggtgctaaacgtgct

SEQ ID NO: 14350 - DNA, 25 bp, Saccharomyces pastorianus
tggtgctaaacgtgctcaattcaga

SEQ ID NO: 14351 - DNA, 25 bp, Saccharomyces pastorianus
ccactggtgctaaacgtgctcaatt

SEQ ID NO: 14352 - DNA, 25 bp, Saccharomyces pastorianus
aaaagatcagccactggtgctaaac

SEQ ID NO: 14353 - DNA, 25 bp, Saccharomyces pastorianus
ttctcctgggcttccgaaggtatct

SEQ ID NO: 14354 - DNA, 25 bp, Saccharomyces pastorianus
agaagaccagaatcgccggtgtcgt

SEQ ID NO: 14355 - DNA, 25 bp, Saccharomyces pastorianus
gaatcgaaaccggtaacttctcctg

SEQ ID NO: 14356 - DNA, 25 bp, Saccharomyces pastorianus
gtgactctcgtcataaaagatcagc

SEQ ID NO: 14357 - DNA, 25 bp, Saccharomyces pastorianus
taaaagatcagccactggtgctaaa

SEQ ID NO: 14358 - DNA, 25 bp, Saccharomyces pastorianus
agaatcgccggtgtcgtttaccatc

SEQ ID NO: 14359 - DNA, 25 bp, Saccharomyces pastorianus
tgttgtcaagaccaaaaactctgaa

SEQ ID NO: 14360 - DNA, 25 bp, Saccharomyces pastorianus
ggctgctgttgttcaaattgatgct

SEQ ID NO: 14361 - DNA, 25 bp, Saccharomyces pastorianus
tggtgctaaacgtgctcaattcaga

SEQ ID NO: 14362 - DNA, 25 bp, Saccharomyces pastorianus
tgttgaatcccaattcagcgctggt

SEQ ID NO: 14363 - DNA, 25 bp, Saccharomyces pastorianus
tgaccaaggctgctgttgttcaaat

SEQ ID NO: 14364 - DNA, 25 bp, Saccharomyces pastorianus
gaattagaagctattgccaacccta

SEQ ID NO: 14365 - DNA, 25 bp, Saccharomyces pastorianus
ttgccaaccctattatgactaaatt

SEQ ID NO: 14366 - DNA, 25 bp, Saccharomyces pastorianus
aggagctggtccagacccaaccggt

SEQ ID NO: 14367 - DNA, 25 bp, Saccharomyces pastorianus
tagaaacggctgctcaagataccat

SEQ ID NO: 14368 - DNA, 25 bp, Saccharomyces pastorianus
tccaggaggaggtcctgtcccagga

SEQ ID NO: 14369 - DNA, 25 bp, Saccharomyces pastorianus
tagatgcttcacaggcggcctccag

SEQ ID NO: 14370 - DNA, 25 bp, Saccharomyces pastorianus
gatatcgatgcaaacggtattttaa

SEQ ID NO: 14371 - DNA, 25 bp, Saccharomyces pastorianus
agaggaagccggacgtgttcaagtt

SEQ ID NO: 14372 - DNA, 25 bp, Saccharomyces pastorianus
aatcagctagagtcatacgccttta

SEQ ID NO: 14373 - DNA, 25 bp, Saccharomyces pastorianus
attttaaacgtatctgctgtcgaaa

SEQ ID NO: 14374 - DNA, 25 bp, Saccharomyces pastorianus
ggcggcctccagtcaagaatacaat

SEQ ID NO: 14375 - DNA, 25 bp, Saccharomyces pastorianus
ttgccacctcggaacagcaacgaat

SEQ ID NO: 14376 - DNA, 25 bp, Saccharomyces pastorianus
gattctccttccatagtttcaagtg

SEQ ID NO: 14377 - DNA, 25 bp, Saccharomyces pastorianus
aagaaatgcggtcccttcagacatg

SEQ ID NO: 14378 - DNA, 25 bp, Saccharomyces pastorianus
gatgatttgcttgcctttatcgaga

SEQ ID NO: 14379 - DNA, 25 bp, Saccharomyces pastorianus
gtaggttattccatgcattctaggt

SEQ ID NO: 14380 - DNA, 25 bp, Saccharomyces pastorianus
gatcatgcaaggtgagcgtcttcga

SEQ ID NO: 14381 - DNA, 25 bp, Saccharomyces pastorianus
agcaaccacgctttgaatccagatg

SEQ ID NO: 14382 - DNA, 25 bp, Saccharomyces pastorianus
aacaatctgactcgaatctttcctc

SEQ ID NO: 14383 - DNA, 25 bp, Saccharomyces pastorianus
aagtttttggacctcattcttcatc

SEQ ID NO: 14384 - DNA, 25 bp, Saccharomyces pastorianus
gctagaacagcttttgaacaaccct

SEQ ID NO: 14385 - DNA, 25 bp, Saccharomyces pastorianus
gaatctttcctccaatgggagcata

SEQ ID NO: 14386 - DNA, 25 bp, Saccharomyces pastorianus
tctagacgccgatcctgttcagaat

SEQ ID NO: 14387 - DNA, 25 bp, Saccharomyces pastorianus
gggacccagaatctttcatttctga

SEQ ID NO: 14388 - DNA, 25 bp, Saccharomyces pastorianus
tcaatggaaaagtgcttcccctttc

SEQ ID NO: 14389 - DNA, 25 bp, Saccharomyces pastorianus
acgtggttctattccgttggatcaa

SEQ ID NO: 14390 - DNA, 25 bp, Saccharomyces pastorianus
aatgattgtgcagatccgttaggat

SEQ ID NO: 14391 - DNA, 25 bp, Saccharomyces pastorianus
cagatagatctgtccggtcaatttt

SEQ ID NO: 14392 - DNA, 25 bp, Saccharomyces pastorianus
tcccctttcctatcttttcaatgat

SEQ ID NO: 14393 - DNA, 25 bp, Saccharomyces pastorianus
atttcaagcgctctgattcgagttg

SEQ ID NO: 14394 - DNA, 25 bp, Saccharomyces pastorianus
gaatgggatctactgttcgatgcta

SEQ ID NO: 14395 - DNA, 25 bp, Saccharomyces pastorianus
gtccggtcaatttttatatcagcag

SEQ ID NO: 14396 - DNA, 25 bp, Saccharomyces pastorianus
gataatatttccagttcatttccta

SEQ ID NO: 14397 - DNA, 25 bp, Saccharomyces pastorianus
gtggcgacggtacctttaatttctg

SEQ ID NO: 14398 - DNA, 25 bp, Saccharomyces pastorianus
ggttctcatttaagtgccatcgcca

SEQ ID NO: 14399 - DNA, 25 bp, Saccharomyces pastorianus
cccagccggtgtcgacagtaatgat

SEQ ID NO: 14400 - DNA, 25 bp, Saccharomyces pastorianus
gttacgactggcatcaagggcatat

SEQ ID NO: 14401 - DNA, 25 bp, Saccharomyces pastorianus
gtatagcatttcatccattgtatgg

SEQ ID NO: 14402 - DNA, 25 bp, Saccharomyces pastorianus
cagatgggtatgcaatcggttcagt

SEQ ID NO: 14403 - DNA, 25 bp, Saccharomyces pastorianus
gctactgcagagagacatattgtca

SEQ ID NO: 14404 - DNA, 25 bp, Saccharomyces pastorianus
ggttcagttgaaggcagatgttcca

SEQ ID NO: 14405 - DNA, 25 bp, Saccharomyces pastorianus
aatgtcatcaggctgcatgctacaa

SEQ ID NO: 14406 - DNA, 25 bp, Saccharomyces pastorianus
ttggcgaacccaacaagcatattca

SEQ ID NO: 14407 - DNA, 25 bp, Saccharomyces pastorianus
atctttattggtcgtagctactgca

SEQ ID NO: 14408 - DNA, 25 bp, Saccharomyces pastorianus
gtcataatgcttttactccagaggg

SEQ ID NO: 14409 - DNA, 25 bp, Saccharomyces pastorianus
ttgccgactgcaaactctctggaag

SEQ ID NO: 14410 - DNA, 25 bp, Saccharomyces pastorianus
gtgatagtgcatcggttcagcctgc

SEQ ID NO: 14411 - DNA, 25 bp, Saccharomyces pastorianus
gatttcggtctaaacttactggaca

SEQ ID NO: 14412 - DNA, 25 bp, Saccharomyces pastorianus
tcagcatcatctcctttaaacatat

SEQ ID NO: 14413 - DNA, 25 bp, Saccharomyces pastorianus
ccgcaagggttctcaactactaact

SEQ ID NO: 14414 - DNA, 25 bp, Saccharomyces pastorianus
aaacatatcaacgtctccatctggt

SEQ ID NO: 14415 - DNA, 25 bp, Saccharomyces pastorianus
aatccgaattctttgatgcttccaa

SEQ ID NO: 14416 - DNA, 25 bp, Saccharomyces pastorianus
ggtcataaagcctccgcaagggttc

SEQ ID NO: 14417 - DNA, 25 bp, Saccharomyces pastorianus
gagctcaataataatcccatcacag

SEQ ID NO: 14418 - DNA, 25 bp, Saccharomyces pastorianus
ctaagccaacaggaagtgcggtcat

SEQ ID NO: 14419 - DNA, 25 bp, Saccharomyces pastorianus
gctgctgaagacgacgaagccacca

SEQ ID NO: 14420 - DNA, 25 bp, Saccharomyces pastorianus
ggcacatttgccattgcacactggt

SEQ ID NO: 14421 - DNA, 25 bp, Saccharomyces pastorianus
gaaaataaccctgttgtcacaaacg

SEQ ID NO: 14422 - DNA, 25 bp, Saccharomyces pastorianus
gaagccaccagagaaatcattgaca

SEQ ID NO: 14423 - DNA, 25 bp, Saccharomyces pastorianus
atttctgccatttatgaacccgttt

SEQ ID NO: 14424 - DNA, 25 bp, Saccharomyces pastorianus
gaattgttgaatgctgccgaccaaa

SEQ ID NO: 14425 - DNA, 25 bp, Saccharomyces pastorianus
ttgaaggcgctttacgaattgttga

SEQ ID NO: 14426 - DNA, 25 bp, Saccharomyces pastorianus
gagattttcagcgttgtgttcacta

SEQ ID NO: 14427 - DNA, 25 bp, Saccharomyces pastorianus
tgttgtcacaaacgagaccccaagg

SEQ ID NO: 14428 - DNA, 25 bp, Saccharomyces pastorianus
gaccaaaaggctctagctgctgaag

SEQ ID NO: 14429 - DNA, 25 bp, Saccharomyces pastorianus
tgacagagcatacgcgaacgcaagt

SEQ ID NO: 14430 - DNA, 25 bp, Saccharomyces pastorianus
tcgagctcttcttcgcccaataata

SEQ ID NO: 14431 - DNA, 25 bp, Saccharomyces pastorianus
acacaagtccaatttcgaagtcgag

SEQ ID NO: 14432 - DNA, 25 bp, Saccharomyces pastorianus
gatgctttcaattccgtgtcaacga

SEQ ID NO: 14433 - DNA, 25 bp, Saccharomyces pastorianus
tcccaattcacaatcacatccggaa

SEQ ID NO: 14434 - DNA, 25 bp, Saccharomyces pastorianus
aagacggatgacaacgctgaaaata

SEQ ID NO: 14435 - DNA, 25 bp, Saccharomyces pastorianus
ttccgtgtcaacgaaagtttccata

SEQ ID NO: 14436 - DNA, 25 bp, Saccharomyces pastorianus
aaagccgaatcctctatatctaaca

SEQ ID NO: 14437 - DNA, 25 bp, Saccharomyces pastorianus
gaaggttgacgtagatcccaattca

SEQ ID NO: 14438 - DNA, 25 bp, Saccharomyces pastorianus
gagtttggagaagtcacaggcttta

SEQ ID NO: 14439 - DNA, 25 bp, Saccharomyces pastorianus
tagagctagccactgaactgacatt

SEQ ID NO: 14440 - DNA, 25 bp, Saccharomyces pastorianus
ggaacctaatcggtatcaccatcga

SEQ ID NO: 14441 - DNA, 25 bp, Saccharomyces pastorianus
actctatctggcgtaaccgaatata

SEQ ID NO: 14442 - DNA, 25 bp, Saccharomyces pastorianus
aacagtaacaataaccgccgcccat

SEQ ID NO: 14443 - DNA, 25 bp, Saccharomyces pastorianus
gcaatccaaatatgaacagcggttt

SEQ ID NO: 14444 - DNA, 25 bp, Saccharomyces pastorianus
gaaatttatgtcagaggaaccttca

SEQ ID NO: 14445 - DNA, 25 bp, Saccharomyces pastorianus
gcggtttaggtggatccgttcaaca

SEQ ID NO: 14446 - DNA, 25 bp, Saccharomyces pastorianus
tcccagcatcgtcaattcaacaaca

SEQ ID NO: 14447 - DNA, 25 bp, Saccharomyces pastorianus
ggcgaagatagtgctgacagtagta

SEQ ID NO: 14448 - DNA, 25 bp, Saccharomyces pastorianus
aatggcgaaatcatacagggtacat

SEQ ID NO: 14449 - DNA, 25 bp, Saccharomyces pastorianus
gaatttgactctatctggcgtaacc

SEQ ID NO: 14450 - DNA, 25 bp, Saccharomyces pastorianus
aaagcctagtcagtggcgaagatag

SEQ ID NO: 14451 - DNA, 25 bp, Saccharomyces pastorianus
ggtggatccgttcaacataatttca

SEQ ID NO: 14452 - DNA, 25 bp, Saccharomyces pastorianus
gtcaagctgaccgtacaatttctgc

SEQ ID NO: 14453 - DNA, 25 bp, Saccharomyces pastorianus
tatactactccaacggtttccttga

SEQ ID NO: 14454 - DNA, 25 bp, Saccharomyces pastorianus
gggatgttatctcctggactggctc

SEQ ID NO: 14455 - DNA, 25 bp, Saccharomyces pastorianus
tcgcactcattacttcgcggtggaa

SEQ ID NO: 14456 - DNA, 25 bp, Saccharomyces pastorianus
gatggctgcattgatcaagactact

SEQ ID NO: 14457 - DNA, 25 bp, Saccharomyces pastorianus
ggctcaaatgggttttctagtcctt

SEQ ID NO: 14458 - DNA, 25 bp, Saccharomyces pastorianus
taccatatctactccaaatctgtcc

SEQ ID NO: 14459 - DNA, 25 bp, Saccharomyces pastorianus
taacggaggaggactacttcgggca

SEQ ID NO: 14460 - DNA, 25 bp, Saccharomyces pastorianus
gacacttcagttccagtcattagtt

SEQ ID NO: 14461 - DNA, 25 bp, Saccharomyces pastorianus
tttcttactggcttctgggatgtta

SEQ ID NO: 14462 - DNA, 25 bp, Saccharomyces pastorianus
tgttttaaactactacctccacagc

SEQ ID NO: 14463 - DNA, 25 bp, Saccharomyces pastorianus
tcctcttcacgctttcttgacaata

SEQ ID NO: 14464 - DNA, 25 bp, Saccharomyces pastorianus
gcataccggtaactgccttcaaaat

SEQ ID NO: 14465 - DNA, 25 bp, Saccharomyces pastorianus
taccgcggaactattgctcaagagg

SEQ ID NO: 14466 - DNA, 25 bp, Saccharomyces pastorianus
tcatgaccagtcagttgcactcgat

SEQ ID NO: 14467 - DNA, 25 bp, Saccharomyces pastorianus
tgagttgctactgcagggcgcatat

SEQ ID NO: 14468 - DNA, 25 bp, Saccharomyces pastorianus
aaatgcaaagtctccctttaccgcg

SEQ ID NO: 14469 - DNA, 25 bp, Saccharomyces pastorianus
gatgtgcgtgtcaacaagccactct

SEQ ID NO: 14470 - DNA, 25 bp, Saccharomyces pastorianus
agttgcactcgattggcttgggtcc

SEQ ID NO: 14471 - DNA, 25 bp, Saccharomyces pastorianus
gagaggtgcgagatgtccgctccac

SEQ ID NO: 14472 - DNA, 25 bp, Saccharomyces pastorianus
tatggcaatcatactcttcctccaa

SEQ ID NO: 14473 - DNA, 25 bp, Saccharomyces pastorianus
gtggatttacccattgcataccggt

SEQ ID NO: 14474 - DNA, 25 bp, Saccharomyces pastorianus
tcggccactgtgcactttgcagaag

SEQ ID NO: 14475 - DNA, 25 bp, Saccharomyces pastorianus
tggtaacagtactgcaagcgccgct

SEQ ID NO: 14476 - DNA, 25 bp, Saccharomyces pastorianus
gttcagggcactcgaagaaggctct

SEQ ID NO: 14477 - DNA, 25 bp, Saccharomyces pastorianus
aataatgctgccacaacacacgatg

SEQ ID NO: 14478 - DNA, 25 bp, Saccharomyces pastorianus
agtgcttctctcatctctcaagaaa

SEQ ID NO: 14479 - DNA, 25 bp, Saccharomyces pastorianus
gacgaactgtcgacttgactgcaga

SEQ ID NO: 14480 - DNA, 25 bp, Saccharomyces pastorianus
cgatgacacatctctgttcagggca

SEQ ID NO: 14481 - DNA, 25 bp, Saccharomyces pastorianus
ttcacaaacagcagacccttcaagt

SEQ ID NO: 14482 - DNA, 25 bp, Saccharomyces pastorianus
acagttccagaacctgcaggcagtt

SEQ ID NO: 14483 - DNA, 25 bp, Saccharomyces pastorianus
agactgctctcatgaccttatgtgg

SEQ ID NO: 14484 - DNA, 25 bp, Saccharomyces pastorianus
atttgcttcgatccgccagagactg

SEQ ID NO: 14485 - DNA, 25 bp, Saccharomyces pastorianus
gccggctatctaacgtttggtgaca

SEQ ID NO: 14486 - DNA, 25 bp, Saccharomyces pastorianus
ggaaacatcatcatgctttacccac

SEQ ID NO: 14487 - DNA, 25 bp, Saccharomyces pastorianus
taacgtgtggtatcctggttgcgtc

SEQ ID NO: 14488 - DNA, 25 bp, Saccharomyces pastorianus
gttccacctctatctcatttatttt

SEQ ID NO: 14489 - DNA, 25 bp, Saccharomyces pastorianus
atgtgctagccatcgtgggtgccac

SEQ ID NO: 14490 - DNA, 25 bp, Saccharomyces pastorianus
acaagtactacatcggtggctggcc

SEQ ID NO: 14491 - DNA, 25 bp, Saccharomyces pastorianus
gctccccgttgatccttaacaatag

SEQ ID NO: 14492 - DNA, 25 bp, Saccharomyces pastorianus
aagtgtctcgagtaccgttggcaga

SEQ ID NO: 14493 - DNA, 25 bp, Saccharomyces pastorianus
atagcgatcgtgctgcttgtgatgc

SEQ ID NO: 14494 - DNA, 25 bp, Saccharomyces pastorianus
agaagagccgatttaccaacccaag

SEQ ID NO: 14495 - DNA, 25 bp, Saccharomyces pastorianus
aatctcagtatcatcgttggcccat

SEQ ID NO: 14496 - DNA, 25 bp, Saccharomyces pastorianus
aaacgaatcctccagcatgggtcta

SEQ ID NO: 14497 - DNA, 25 bp, Saccharomyces pastorianus
gaaagccctgttgaactggaaaccg

SEQ ID NO: 14498 - DNA, 25 bp, Saccharomyces pastorianus
aataaaggaacctgcaaccctgcct

SEQ ID NO: 14499 - DNA, 25 bp, Saccharomyces pastorianus
agctcccaagttctactgcgtaaga

SEQ ID NO: 14500 - DNA, 25 bp, Saccharomyces pastorianus
cgtacgtcaaccatcgaaccaaaat

SEQ ID NO: 14501 - DNA, 25 bp, Saccharomyces pastorianus
aaggatgtcgttgagcccgtggccc

SEQ ID NO: 14502 - DNA, 25 bp, Saccharomyces pastorianus
gaaaccgagccacctgttcaaataa

SEQ ID NO: 14503 - DNA, 25 bp, Saccharomyces pastorianus
aggtcatcttcctgggtctgactga

SEQ ID NO: 14504 - DNA, 25 bp, Saccharomyces pastorianus
gccgcggacttcaagtgtcgtgaca

SEQ ID NO: 14505 - DNA, 25 bp, Saccharomyces pastorianus
agacgatccaggtccaggtcatctt

SEQ ID NO: 14506 - DNA, 25 bp, Saccharomyces pastorianus
gaaagaagaagttccacctgccatc

SEQ ID NO: 14507 - DNA, 25 bp, Saccharomyces pastorianus
gatccagttcattcgatggtcgcaa

SEQ ID NO: 14508 - DNA, 25 bp, Saccharomyces pastorianus
gatactctaacaccgaagtttgcta

SEQ ID NO: 14509 - DNA, 25 bp, Saccharomyces pastorianus
atctcatcatcctcgtattttggcg

SEQ ID NO: 14510 - DNA, 25 bp, Saccharomyces pastorianus
gataatgccacatcgatctcatcat

SEQ ID NO: 14511 - DNA, 25 bp, Saccharomyces pastorianus
agtagcccagggtccaagatataca

SEQ ID NO: 14512 - DNA, 25 bp, Saccharomyces pastorianus
tccgatcagctttttggtcgtggtt

SEQ ID NO: 14513 - DNA, 25 bp, Saccharomyces pastorianus
gattcccaattcatcaatagcggca

SEQ ID NO: 14514 - DNA, 25 bp, Saccharomyces pastorianus
aaaggctatatcttccgatcagctt

SEQ ID NO: 14515 - DNA, 25 bp, Saccharomyces pastorianus
agtgacttcttgaatgacgctccaa

SEQ ID NO: 14516 - DNA, 25 bp, Saccharomyces pastorianus
gaccatgaatgacgctaacgattta

SEQ ID NO: 14517 - DNA, 25 bp, Saccharomyces pastorianus
gacgctccaagcaactctgatacaa

SEQ ID NO: 14518 - DNA, 25 bp, Saccharomyces pastorianus
atggatgacgccttgagattgaaca

SEQ ID NO: 14519 - DNA, 25 bp, Saccharomyces pastorianus
tacggcaatccgaatccaagggcta

SEQ ID NO: 14520 - DNA, 25 bp, Saccharomyces pastorianus
aagggctaacttgcatgggtacggc

SEQ ID NO: 14521 - DNA, 25 bp, Saccharomyces pastorianus
gccagtgccgacagctaagcaacaa

SEQ ID NO: 14522 - DNA, 25 bp, Saccharomyces pastorianus
gactctatcagtcatccccaaaatt

SEQ ID NO: 14523 - DNA, 25 bp, Saccharomyces pastorianus
caagggctaatggtaacacgacaag

SEQ ID NO: 14524 - DNA, 25 bp, Saccharomyces pastorianus
aacccgaaatactacgccagtgccg

SEQ ID NO: 14525 - DNA, 25 bp, Saccharomyces pastorianus
gtactaacgagcataacttaccaaa

SEQ ID NO: 14526 - DNA, 25 bp, Saccharomyces pastorianus
tagaatttcatcaaacccacaaagt

SEQ ID NO: 14527 - DNA, 25 bp, Saccharomyces pastorianus
taccaaagccaacactacgaacaag

SEQ ID NO: 14528 - DNA, 25 bp, Saccharomyces pastorianus
tattcaagcttaaaacccaatccta

SEQ ID NO: 14529 - DNA, 25 bp, Saccharomyces pastorianus
ttaactcaattaacctagacgggat

SEQ ID NO: 14530 - DNA, 25 bp, Saccharomyces pastorianus
ttaataactctcgacaacttctgtg

SEQ ID NO: 14531 - DNA, 25 bp, Saccharomyces pastorianus
gaaagcgatcaaagtctcacggata

SEQ ID NO: 14532 - DNA, 25 bp, Saccharomyces pastorianus
gtttgttgtatagcagtgacgacca

SEQ ID NO: 14533 - DNA, 25 bp, Saccharomyces pastorianus
gacaacttctgtgaactgggattac

SEQ ID NO: 14534 - DNA, 25 bp, Saccharomyces pastorianus
gaaatttctgattcatccgttttat

SEQ ID NO: 14535 - DNA, 25 bp, Saccharomyces pastorianus
tgctcttcagcaaatactattggtg

SEQ ID NO: 14536 - DNA, 25 bp, Saccharomyces pastorianus
gattgcacagtgaccaagaagatgt

SEQ ID NO: 14537 - DNA, 25 bp, Saccharomyces pastorianus
gatttcgctcaagggaacagggtgt

SEQ ID NO: 14538 - DNA, 25 bp, Saccharomyces pastorianus
acaacgtcaacactggtaaaccaat

SEQ ID NO: 14539 - DNA, 25 bp, Saccharomyces pastorianus
ttttttgttcttggagacgacgaat

SEQ ID NO: 14540 - DNA, 25 bp, Saccharomyces pastorianus
gctgccaaagtctcatacatgtttc

SEQ ID NO: 14541 - DNA, 25 bp, Saccharomyces pastorianus
gaagacttagtgaccgtgtttgacg

SEQ ID NO: 14542 - DNA, 25 bp, Saccharomyces pastorianus
atagacggtgtcttggacctcacat

SEQ ID NO: 14543 - DNA, 25 bp, Saccharomyces pastorianus
gagttgatttaccacaatatgtcga

SEQ ID NO: 14544 - DNA, 25 bp, Saccharomyces pastorianus
ggacctcacatttagtgccgacgat

SEQ ID NO: 14545 - DNA, 25 bp, Saccharomyces pastorianus
gaccgtgtttgacgaacgtgaacta

SEQ ID NO: 14546 - DNA, 25 bp, Saccharomyces pastorianus
aaagggcacgtttattgcaattcac

SEQ ID NO: 14547 - DNA, 25 bp, Saccharomyces pastorianus
gatctacaaggttccgatggtccaa

SEQ ID NO: 14548 - DNA, 25 bp, Saccharomyces pastorianus
tgttgattggtggtatcgcagaaat

SEQ ID NO: 14549 - DNA, 25 bp, Saccharomyces pastorianus
ttctcgtatacctgttaatgggttc

SEQ ID NO: 14550 - DNA, 25 bp, Saccharomyces pastorianus
ggtgaagtacaacagctgccaaagt

SEQ ID NO: 14551 - DNA, 25 bp, Saccharomyces pastorianus
tgacgctttgcccacatatttgttg

SEQ ID NO: 14552 - DNA, 25 bp, Saccharomyces pastorianus
gaaggattcaccagaagaccagtaa

SEQ ID NO: 14553 - DNA, 25 bp, Saccharomyces pastorianus
tcgaagtcaacgtttcagaactggg

SEQ ID NO: 14554 - DNA, 25 bp, Saccharomyces pastorianus
gtgactcatccagaattggccgtta

SEQ ID NO: 14555 - DNA, 25 bp, Saccharomyces pastorianus
gacaagttttcagtaccactaccaa

SEQ ID NO: 14556 - DNA, 25 bp, Saccharomyces pastorianus
gaattggccgttactgtcttcttac

SEQ ID NO: 14557 - DNA, 25 bp, Saccharomyces pastorianus
actgtcttcttaccaattctagctg

SEQ ID NO: 14558 - DNA, 25 bp, Saccharomyces pastorianus
gaacaaaccaatacagccaaagcta

SEQ ID NO: 14559 - DNA, 25 bp, Saccharomyces pastorianus
ccaagggtaccattatcgaagtcaa

SEQ ID NO: 14560 - DNA, 25 bp, Saccharomyces pastorianus
ttattaggccaagtgcattgagaca

SEQ ID NO: 14561 - DNA, 25 bp, Saccharomyces pastorianus
gaaaggcaaatgtgactcatccaga

SEQ ID NO: 14562 - DNA, 25 bp, Saccharomyces pastorianus
aatcctttgaaattgcttggtaata

SEQ ID NO: 14563 - DNA, 25 bp, Saccharomyces pastorianus
gaagtacccgaaccaatctcagatc

SEQ ID NO: 14564 - DNA, 25 bp, Saccharomyces pastorianus
gtactcttatcaagacccattctct

SEQ ID NO: 14565 - DNA, 25 bp, Saccharomyces pastorianus
gatcatgccatcataaatcctttga

SEQ ID NO: 14566 - DNA, 25 bp, Saccharomyces pastorianus
aagacccattctcttgaacaagaaa

SEQ ID NO: 14567 - DNA, 25 bp, Saccharomyces pastorianus
atctcagatccaagcgatgattcaa

SEQ ID NO: 14568 - DNA, 25 bp, Saccharomyces pastorianus
actccgcctttgaatcgtctttaag

SEQ ID NO: 14569 - DNA, 25 bp, Saccharomyces pastorianus
gaagtactaataaactccgcctttg

SEQ ID NO: 14570 - DNA, 25 bp, Saccharomyces pastorianus
aaggaagcttctactcacatcgcaa

SEQ ID NO: 14571 - DNA, 25 bp, Saccharomyces pastorianus
caacgaatccgttcaagtcaaacaa

SEQ ID NO: 14572 - DNA, 25 bp, Saccharomyces pastorianus
gcaagtaaaatctcaacgaatccgt

SEQ ID NO: 14573 - DNA, 25 bp, Saccharomyces pastorianus
ctgaagcttccgtgtaccctgaata

SEQ ID NO: 14574 - DNA, 25 bp, Saccharomyces pastorianus
cgccagaatcgtcagagttagatct

SEQ ID NO: 14575 - DNA, 25 bp, Saccharomyces pastorianus
gctctaccaaagacctacaacaagt

SEQ ID NO: 14576 - DNA, 25 bp, Saccharomyces pastorianus
atttgtctgaagcttccgtgtaccc

SEQ ID NO: 14577 - DNA, 25 bp, Saccharomyces pastorianus
gtgtaccctgaatacgctctaccaa

SEQ ID NO: 14578 - DNA, 25 bp, Saccharomyces pastorianus
gaatcgtcagagttagatctagaga

SEQ ID NO: 14579 - DNA, 25 bp, Saccharomyces pastorianus
tgtctgaagcttccgtgtaccctga

SEQ ID NO: 14580 - DNA, 25 bp, Saccharomyces pastorianus
gtaccctgaatacgctctaccaaag

SEQ ID NO: 14581 - DNA, 25 bp, Saccharomyces pastorianus
gaatacgctctaccaaagacctaca

SEQ ID NO: 14582 - DNA, 25 bp, Saccharomyces pastorianus
gagatttgtctgaagcttccgtgta

SEQ ID NO: 14583 - DNA, 25 bp, Saccharomyces pastorianus
ttccgtgtaccctgaatacgctcta

SEQ ID NO: 14584 - DNA, 25 bp, Saccharomyces pastorianus
gatttagtacccagacgacacactc

SEQ ID NO: 14585 - DNA, 25 bp, Saccharomyces pastorianus
gagtgattatactgcatctcaacaa

SEQ ID NO: 14586 - DNA, 25 bp, Saccharomyces pastorianus
ggttcggctcaaatttctcctagaa

SEQ ID NO: 14587 - DNA, 25 bp, Saccharomyces pastorianus
tccgctttattcatgaaccctgcaa

SEQ ID NO: 14588 - DNA, 25 bp, Saccharomyces pastorianus
tcgagcaagtttatccagccgggtt

SEQ ID NO: 14589 - DNA, 25 bp, Saccharomyces pastorianus
gaaattggcgacaagttccccgatt

SEQ ID NO: 14590 - DNA, 25 bp, Saccharomyces pastorianus
tcctaccttgagcagacagcattct

SEQ ID NO: 14591 - DNA, 25 bp, Saccharomyces pastorianus
gcattcaagaagacctcgagcaagt

SEQ ID NO: 14592 - DNA, 25 bp, Saccharomyces pastorianus
agttccccgatttcagaagcattca

SEQ ID NO: 14593 - DNA, 25 bp, Saccharomyces pastorianus
agtggatattttcccacgaggatcc

SEQ ID NO: 14594 - DNA, 25 bp, Saccharomyces pastorianus
ttctcctagaacgtctgtgagtgat

SEQ ID NO: 14595 - DNA, 25 bp, Saccharomyces pastorianus
gggtcattatctagccattatttcc

SEQ ID NO: 14596 - DNA, 25 bp, Saccharomyces pastorianus
agctccattagtaatcgctgatcca

SEQ ID NO: 14597 - DNA, 25 bp, Saccharomyces pastorianus
agaacctgcctttaagcttctagga

SEQ ID NO: 14598 - DNA, 25 bp, Saccharomyces pastorianus
aaatcacccagttccaaacactagt

SEQ ID NO: 14599 - DNA, 25 bp, Saccharomyces pastorianus
ggtacttatatgctggatacaccaa

SEQ ID NO: 14600 - DNA, 25 bp, Saccharomyces pastorianus
tgatccaacttacttccctgaaaaa

SEQ ID NO: 14601 - DNA, 25 bp, Saccharomyces pastorianus
tttacttgtccagatcttacgatgc

SEQ ID NO: 14602 - DNA, 25 bp, Saccharomyces pastorianus
taagcttctaggacccattgaggaa

SEQ ID NO: 14603 - DNA, 25 bp, Saccharomyces pastorianus
cacaacgtttgctctaagggtcatt

SEQ ID NO: 14604 - DNA, 25 bp, Saccharomyces pastorianus
ggccaaagagtcatcagagccattt

SEQ ID NO: 14605 - DNA, 25 bp, Saccharomyces pastorianus
ttacgatgcatcttcccactttgaa

SEQ ID NO: 14606 - DNA, 25 bp, Saccharomyces pastorianus
gttgtcgcaggctatggatgtctta

SEQ ID NO: 14607 - DNA, 25 bp, Saccharomyces pastorianus
gatattgtcaggttgtcgcaggcta

SEQ ID NO: 14608 - DNA, 25 bp, Saccharomyces pastorianus
taaagtgttctttctgtcaccagcc

SEQ ID NO: 14609 - DNA, 25 bp, Saccharomyces pastorianus
cacagtgctgcggaacggcatcgaa

SEQ ID NO: 14610 - DNA, 25 bp, Saccharomyces pastorianus
gaaggcgattcaacggatacaccac

SEQ ID NO: 14611 - DNA, 25 bp, Saccharomyces pastorianus
taagtctgaatgacagcgccggcac

SEQ ID NO: 14612 - DNA, 25 bp, Saccharomyces pastorianus
gatacaccacaggatgcagccagca

SEQ ID NO: 14613 - DNA, 25 bp, Saccharomyces pastorianus
aggatggatctcagttacaggtgga

SEQ ID NO: 14614 - DNA, 25 bp, Saccharomyces pastorianus
ggagatacgctctgatacccataaa

SEQ ID NO: 14615 - DNA, 25 bp, Saccharomyces pastorianus
gatggacgccaatggtcttgacaca

SEQ ID NO: 14616 - DNA, 25 bp, Saccharomyces pastorianus
agcccggacacacaagagcacgttg

SEQ ID NO: 14617 - DNA, 25 bp, Saccharomyces pastorianus
ggatatcccctttgtgggacagcac

SEQ ID NO: 14618 - DNA, 25 bp, Saccharomyces pastorianus
actttagatgctcccagttttacca

SEQ ID NO: 14619 - DNA, 25 bp, Saccharomyces pastorianus
ggattcatttgtttgaagaccccga

SEQ ID NO: 14620 - DNA, 25 bp, Saccharomyces pastorianus
agaccccgaacaggacaagcatgat

SEQ ID NO: 14621 - DNA, 25 bp, Saccharomyces pastorianus
gttttaccaagtacagctatcagat

SEQ ID NO: 14622 - DNA, 25 bp, Saccharomyces pastorianus
caaatttcactttagatgctcccag

SEQ ID NO: 14623 - DNA, 25 bp, Saccharomyces pastorianus
atttgagtcgatttctcactcccga

SEQ ID NO: 14624 - DNA, 25 bp, Saccharomyces pastorianus
gatcatcggtctactgtgtgattca

SEQ ID NO: 14625 - DNA, 25 bp, Saccharomyces pastorianus
acggatacgtgatcccttttcaatg

SEQ ID NO: 14626 - DNA, 25 bp, Saccharomyces pastorianus
tatgtatcaagacctcgtggacgag

SEQ ID NO: 14627 - DNA, 25 bp, Saccharomyces pastorianus
tgggacagcaccagaacggatacgt

SEQ ID NO: 14628 - DNA, 25 bp, Saccharomyces pastorianus
gaagttcaatcggatccgtccacag

SEQ ID NO: 14629 - DNA, 25 bp, Saccharomyces pastorianus
aaagcccacggtcactcgagaatgt

SEQ ID NO: 14630 - DNA, 25 bp, Saccharomyces pastorianus
gtctttacctgcgtttgttgtacta

SEQ ID NO: 14631 - DNA, 25 bp, Saccharomyces pastorianus
attcattgtcatggtcaggccgacg

SEQ ID NO: 14632 - DNA, 25 bp, Saccharomyces pastorianus
aaatattttgcctggcctacgtact

SEQ ID NO: 14633 - DNA, 25 bp, Saccharomyces pastorianus
gcacgcctacatcacgaagttcaat

SEQ ID NO: 14634 - DNA, 25 bp, Saccharomyces pastorianus
actcctcccagtatcaatgacatta

SEQ ID NO: 14635 - DNA, 25 bp, Saccharomyces pastorianus
acgcttttcaaatcaccggagtcct

SEQ ID NO: 14636 - DNA, 25 bp, Saccharomyces pastorianus
ggcatgggcaagatcgacatcgcta

SEQ ID NO: 14637 - DNA, 25 bp, Saccharomyces pastorianus
gcatcggtgttttcgttagccttac

SEQ ID NO: 14638 - DNA, 25 bp, Saccharomyces pastorianus
agtcctcttaccttccattattatt

SEQ ID NO: 14639 - DNA, 25 bp, Saccharomyces pastorianus
aaaacgcagtgacttccttacatgt

SEQ ID NO: 14640 - DNA, 25 bp, Saccharomyces pastorianus
tggatagcccggcaattggcccaat

SEQ ID NO: 14641 - DNA, 25 bp, Saccharomyces pastorianus
gcctacgttgcattcacatctgtgt

SEQ ID NO: 14642 - DNA, 25 bp, Saccharomyces pastorianus
acattacaggccacccttggtattt

SEQ ID NO: 14643 - DNA, 25 bp, Saccharomyces pastorianus
gtatctagtcccagtttcattagcc

SEQ ID NO: 14644 - DNA, 25 bp, Saccharomyces pastorianus
ggtacatagaacctgtgcctacgtt

SEQ ID NO: 14645 - DNA, 25 bp, Saccharomyces pastorianus
ggatctataacacttggcccaaaat

SEQ ID NO: 14646 - DNA, 25 bp, Saccharomyces pastorianus
gtttcattagcctctatccatcaag

SEQ ID NO: 14647 - DNA, 25 bp, Saccharomyces pastorianus
gtgttagctgcccatatgtatgcca

SEQ ID NO: 14648 - DNA, 25 bp, Saccharomyces pastorianus
tttattggcggtgtcttttctgacc

SEQ ID NO: 14649 - DNA, 25 bp, Saccharomyces pastorianus
ttggttttcgcctctcaactaagaa

SEQ ID NO: 14650 - DNA, 25 bp, Saccharomyces pastorianus
acaaccatcatgtccaccagattag

SEQ ID NO: 14651 - DNA, 25 bp, Saccharomyces pastorianus
gcatttgtagacactggtgcccaaa

SEQ ID NO: 14652 - DNA, 25 bp, Saccharomyces pastorianus
gtaagatccaccaagctcaagtcaa

SEQ ID NO: 14653 - DNA, 25 bp, Saccharomyces pastorianus
tagggacgctgttgtcaaggcctta

SEQ ID NO: 14654 - DNA, 25 bp, Saccharomyces pastorianus
gacatttggcttgcgtagacttgaa

SEQ ID NO: 14655 - DNA, 25 bp, Saccharomyces pastorianus
ggacttgggattttctagggacgct

SEQ ID NO: 14656 - DNA, 25 bp, Saccharomyces pastorianus
gacaagctctagtttgcagccgcaa

SEQ ID NO: 14657 - DNA, 25 bp, Saccharomyces pastorianus
tggtgttacgagaatgttccccgaa

SEQ ID NO: 14658 - DNA, 25 bp, Saccharomyces pastorianus
attccatgtagttttactgtcctag

SEQ ID NO: 14659 - DNA, 25 bp, Saccharomyces pastorianus
ggcgcttgctccaaagacaggcgta

SEQ ID NO: 14660 - DNA, 25 bp, Saccharomyces pastorianus
gtcggtcgcatcttcgtctaacaag

SEQ ID NO: 14661 - DNA, 25 bp, Saccharomyces pastorianus
aaagcaaccttccactaagcaactt

SEQ ID NO: 14662 - DNA, 25 bp, Saccharomyces pastorianus
caatggtcgtgttctaaatgtctaa

SEQ ID NO: 14663 - DNA, 25 bp, Saccharomyces pastorianus
tggatcttacaccatactgggccag

SEQ ID NO: 14664 - DNA, 25 bp, Saccharomyces pastorianus
actgggccagagctttcaatcatga

SEQ ID NO: 14665 - DNA, 25 bp, Saccharomyces pastorianus
ggttgcgtgccattcaggaagctta

SEQ ID NO: 14666 - DNA, 25 bp, Saccharomyces pastorianus
tgtcccacgcattatgacctgtaac

SEQ ID NO: 14667 - DNA, 25 bp, Saccharomyces pastorianus
tgccaggcctgtgaacatacttcta

SEQ ID NO: 14668 - DNA, 25 bp, Saccharomyces pastorianus
gcgtctagattacaatgccaggcct

SEQ ID NO: 14669 - DNA, 25 bp, Saccharomyces pastorianus
tgatgaggacattcccaccagaggc

SEQ ID NO: 14670 - DNA, 25 bp, Saccharomyces pastorianus
gccaaattccgccattcagatatag

SEQ ID NO: 14671 - DNA, 25 bp, Saccharomyces pastorianus
ggtggccattacacatcatatgtct

SEQ ID NO: 14672 - DNA, 25 bp, Saccharomyces pastorianus
gattttgtatctgatttccgccggt

SEQ ID NO: 14673 - DNA, 25 bp, Saccharomyces pastorianus
gctgcagattttcttgatcctgtcc

SEQ ID NO: 14674 - DNA, 25 bp, Saccharomyces pastorianus
aacattaacttcaaccaggacggtg

SEQ ID NO: 14675 - DNA, 25 bp, Saccharomyces pastorianus
tcaactgctgcaacccggaactgga

SEQ ID NO: 14676 - DNA, 25 bp, Saccharomyces pastorianus
gatcctgtccacctcgattttgtat

SEQ ID NO: 14677 - DNA, 25 bp, Saccharomyces pastorianus
aaccttgctagtggtggtgacgcct

SEQ ID NO: 14678 - DNA, 25 bp, Saccharomyces pastorianus
gaaacacatcaacccaggctactgg

SEQ ID NO: 14679 - DNA, 25 bp, Saccharomyces pastorianus
acctgtcctccatgttgtgttacaa

SEQ ID NO: 14680 - DNA, 25 bp, Saccharomyces pastorianus
agaaaggccgtgtaccacgtcaact

SEQ ID NO: 14681 - DNA, 25 bp, Saccharomyces pastorianus
tggctggtgcttattatcgtgttga

SEQ ID NO: 14682 - DNA, 25 bp, Saccharomyces pastorianus
tgttgtactacggtgcctccaaatc

SEQ ID NO: 14683 - DNA, 25 bp, Saccharomyces pastorianus
acatctgccacatctggtattgttc

SEQ ID NO: 14684 - DNA, 25 bp, Saccharomyces pastorianus
acatctggtattgttccaacattgc

SEQ ID NO: 14685 - DNA, 25 bp, Saccharomyces pastorianus
agaatcccgatggtacaaagctagc

SEQ ID NO: 14686 - DNA, 25 bp, Saccharomyces pastorianus
attgcaaaatattgtggccactgtg

SEQ ID NO: 14687 - DNA, 25 bp, Saccharomyces pastorianus
agaagacataaagagggcggcccca

SEQ ID NO: 14688 - DNA, 25 bp, Saccharomyces pastorianus
gaaaaggatacatctgccacatctg

SEQ ID NO: 14689 - DNA, 25 bp, Saccharomyces pastorianus
aagctagcaactacttttcaaagtg

SEQ ID NO: 14690 - DNA, 25 bp, Saccharomyces pastorianus
aaagagggcggccccagaatctgaa

SEQ ID NO: 14691 - DNA, 25 bp, Saccharomyces pastorianus
tggtattgttccaacattgcaaaat

SEQ ID NO: 14692 - DNA, 25 bp, Saccharomyces pastorianus
tcccgatggtacaaagctagcaact

SEQ ID NO: 14693 - DNA, 25 bp, Saccharomyces pastorianus
ggatacatctgccacatctggtatt

SEQ ID NO: 14694 - DNA, 25 bp, Saccharomyces pastorianus
gtcgttaccggtgccaaaagtgaag

SEQ ID NO: 14695 - DNA, 25 bp, Saccharomyces pastorianus
gaaaatatgccagaatcattcaaaa

SEQ ID NO: 14696 - DNA, 25 bp, Saccharomyces pastorianus
tgggtttgctgccaaattcacggac

SEQ ID NO: 14697 - DNA, 25 bp, Saccharomyces pastorianus
cactacatgcgcgtaatgcggagta

SEQ ID NO: 14698 - DNA, 25 bp, Saccharomyces pastorianus
ggtgccaaaagtgaagatgactcta

SEQ ID NO: 14699 - DNA, 25 bp, Saccharomyces pastorianus
aaacgtttcgctgctgttatcatgc

SEQ ID NO: 14700 - DNA, 25 bp, Saccharomyces pastorianus
cgctgctgttatcatgcgtatcaga

SEQ ID NO: 14701 - DNA, 25 bp, Saccharomyces pastorianus
attcaaaaaattgggtttgctgcca

SEQ ID NO: 14702 - DNA, 25 bp, Saccharomyces pastorianus
gtataaccctaaacgtttcgctgct

SEQ ID NO: 14703 - DNA, 25 bp, Saccharomyces pastorianus
gatgactctaaattagccagtagaa

SEQ ID NO: 14704 - DNA, 25 bp, Saccharomyces pastorianus
gcgcgtaatgcggagtataacccta

SEQ ID NO: 14705 - DNA, 25 bp, Saccharomyces pastorianus
tctcctcttatgaacccgaattatt

SEQ ID NO: 14706 - DNA, 25 bp, Saccharomyces pastorianus
gtccttaccggtgccaagcaaagag

SEQ ID NO: 14707 - DNA, 25 bp, Saccharomyces pastorianus
tggtactttctcctcttatgaaccc

SEQ ID NO: 14708 - DNA, 25 bp, Saccharomyces pastorianus
tgtgctgttaattttcgtttccggt

SEQ ID NO: 14709 - DNA, 25 bp, Saccharomyces pastorianus
actttctcctcttatgaacccgaat

SEQ ID NO: 14710 - DNA, 25 bp, Saccharomyces pastorianus
gtaagatcgtccttaccggtgccaa

SEQ ID NO: 14711 - DNA, 25 bp, Saccharomyces pastorianus
tatgaacccgaattatttcctggtt

SEQ ID NO: 14712 - DNA, 25 bp, Saccharomyces pastorianus
ctatacgtttggaagggttggcatt

SEQ ID NO: 14713 - DNA, 25 bp, Saccharomyces pastorianus
ggtgaagccaaagattgtgctgtta

SEQ ID NO: 14714 - DNA, 25 bp, Saccharomyces pastorianus
gtttggaagggttggcattcagtca

SEQ ID NO: 14715 - DNA, 25 bp, Saccharomyces pastorianus
tatatcaagcttttgaagccatata

SEQ ID NO: 14716 - DNA, 25 bp, Saccharomyces pastorianus
acacttgtgtcaacctggaaaagac

SEQ ID NO: 14717 - DNA, 25 bp, Saccharomyces pastorianus
gtgagctcgccagctacgtgggatc

SEQ ID NO: 14718 - DNA, 25 bp, Saccharomyces pastorianus
gagacggcgtttaatgatttgcaac

SEQ ID NO: 14719 - DNA, 25 bp, Saccharomyces pastorianus
agtatatcatcaccggtgagctcgc

SEQ ID NO: 14720 - DNA, 25 bp, Saccharomyces pastorianus
gactactgaactatcattcgaattt

SEQ ID NO: 14721 - DNA, 25 bp, Saccharomyces pastorianus
aacaggtggctctggatcacgctca

SEQ ID NO: 14722 - DNA, 25 bp, Saccharomyces pastorianus
ttactatccgcttcatctaactctt

SEQ ID NO: 14723 - DNA, 25 bp, Saccharomyces pastorianus
catctaactcttccgcagatcaaga

SEQ ID NO: 14724 - DNA, 25 bp, Saccharomyces pastorianus
ggaactggccgaagaacgtgaacat

SEQ ID NO: 14725 - DNA, 25 bp, Saccharomyces pastorianus
aaagactacaccgttactatccgct

SEQ ID NO: 14726 - DNA, 25 bp, Saccharomyces pastorianus
aacgatcgtgccgaatacgtacaag

SEQ ID NO: 14727 - DNA, 25 bp, Saccharomyces pastorianus
agtcaccaactgtccttgtactatc

SEQ ID NO: 14728 - DNA, 25 bp, Saccharomyces pastorianus
aactctagctcctctgtcattgtgg

SEQ ID NO: 14729 - DNA, 25 bp, Saccharomyces pastorianus
gtggaaacaaacgtcaatgctgcta

SEQ ID NO: 14730 - DNA, 25 bp, Saccharomyces pastorianus
aaagttcctactaccattggccatg

SEQ ID NO: 14731 - DNA, 25 bp, Saccharomyces pastorianus
aacgctacatacactgttacagccc

SEQ ID NO: 14732 - DNA, 25 bp, Saccharomyces pastorianus
attgtggcgccatcgagcgacgctt

SEQ ID NO: 14733 - DNA, 25 bp, Saccharomyces pastorianus
gttttctacaactctactgctacca

SEQ ID NO: 14734 - DNA, 25 bp, Saccharomyces pastorianus
tcttcttctgttccagttttctaca

SEQ ID NO: 14735 - DNA, 25 bp, Saccharomyces pastorianus
acagcttcctctacacatgacgtgg

SEQ ID NO: 14736 - DNA, 25 bp, Saccharomyces pastorianus
tagcgagtttactacctactgtcct

SEQ ID NO: 14737 - DNA, 25 bp, Saccharomyces pastorianus
ttcatcggcggtaacggcactgcta

SEQ ID NO: 14738 - DNA, 25 bp, Saccharomyces pastorianus
gtggccctgcaccaggacaagctgt

SEQ ID NO: 14739 - DNA, 25 bp, Saccharomyces pastorianus
tttgcgcgcggaactatgcactcca

SEQ ID NO: 14740 - DNA, 25 bp, Saccharomyces pastorianus
gaagaacgaatggtcgctgccgcta

SEQ ID NO: 14741 - DNA, 25 bp, Saccharomyces pastorianus
gttctagcggagtttcggcagtgtt

SEQ ID NO: 14742 - DNA, 25 bp, Saccharomyces pastorianus
ttcgagctccgcagggtcaaagtgg

SEQ ID NO: 14743 - DNA, 25 bp, Saccharomyces pastorianus
actccacggctcttagcgagaagtg

SEQ ID NO: 14744 - DNA, 25 bp, Saccharomyces pastorianus
gacaagctgttcctgccggcgcagt

SEQ ID NO: 14745 - DNA, 25 bp, Saccharomyces pastorianus
gcggcaaccgctggtcgtgaagaac

SEQ ID NO: 14746 - DNA, 25 bp, Saccharomyces pastorianus
ggcgctagcacacgtcgaaaccata

SEQ ID NO: 14747 - DNA, 25 bp, Saccharomyces pastorianus
agttcctacagcaccaccagacgat

SEQ ID NO: 14748 - DNA, 25 bp, Saccharomyces pastorianus
atagcgtacgtgtggtaccaccacg

SEQ ID NO: 14749 - DNA, 25 bp, Saccharomyces pastorianus
agacacatggccaactacccggtag

SEQ ID NO: 14750 - DNA, 25 bp, Saccharomyces pastorianus
tccgtcctacaaacacttgtcttga

SEQ ID NO: 14751 - DNA, 25 bp, Saccharomyces pastorianus
ccttacttgggcctgcaggtcatta

SEQ ID NO: 14752 - DNA, 25 bp, Saccharomyces pastorianus
tcagctccccaatgaagcgtctttt

SEQ ID NO: 14753 - DNA, 25 bp, Saccharomyces pastorianus
aaatacctattgctctcgggttctt

SEQ ID NO: 14754 - DNA, 25 bp, Saccharomyces pastorianus
gagaccggtgctcaacagttcagct

SEQ ID NO: 14755 - DNA, 25 bp, Saccharomyces pastorianus
gccgcagtgttcatttcattcacga

SEQ ID NO: 14756 - DNA, 25 bp, Saccharomyces pastorianus
ttctttaacgccctgagacacatgg

SEQ ID NO: 14757 - DNA, 25 bp, Saccharomyces pastorianus
ccctggcgcttcatcaacggaaaat

SEQ ID NO: 14758 - DNA, 25 bp, Saccharomyces pastorianus
atcaagaacaggtggctagccgccc

SEQ ID NO: 14759 - DNA, 25 bp, Saccharomyces pastorianus
atatgggcattttccagtccatgaa

SEQ ID NO: 14760 - DNA, 25 bp, Saccharomyces pastorianus
ctcccttttctcacatgcaatggta

SEQ ID NO: 14761 - DNA, 25 bp, Saccharomyces pastorianus
ggacgcatctaatttggctattgtg

SEQ ID NO: 14762 - DNA, 25 bp, Saccharomyces pastorianus
gataactccttcaccttagaggatg

SEQ ID NO: 14763 - DNA, 25 bp, Saccharomyces pastorianus
atttgagagagctaccggactccct

SEQ ID NO: 14764 - DNA, 25 bp, Saccharomyces pastorianus
aagaaggtgccaccgataactcctt

SEQ ID NO: 14765 - DNA, 25 bp, Saccharomyces pastorianus
caaagcgcatgatatgtcctgtgaa

SEQ ID NO: 14766 - DNA, 25 bp, Saccharomyces pastorianus
atagaattcccggttccattggtag

SEQ ID NO: 14767 - DNA, 25 bp, Saccharomyces pastorianus
ggactactgggaaagctacctaggt

SEQ ID NO: 14768 - DNA, 25 bp, Saccharomyces pastorianus
gctacctaggtgctactatcaaact

SEQ ID NO: 14769 - DNA, 25 bp, Saccharomyces pastorianus
agttcaaaccattctccaggatttc

SEQ ID NO: 14770 - DNA, 25 bp, Saccharomyces pastorianus
gaatgccatcgcaggatgtttcaag

SEQ ID NO: 14771 - DNA, 25 bp, Saccharomyces pastorianus
aagatcattgttttgccccagttct

SEQ ID NO: 14772 - DNA, 25 bp, Saccharomyces pastorianus
gtgccagcacgtttatcggcgaggt

SEQ ID NO: 14773 - DNA, 25 bp, Saccharomyces pastorianus
aaaggctacggcgaatcatggttgc

SEQ ID NO: 14774 - DNA, 25 bp, Saccharomyces pastorianus
agcatccccggaatcgtttcaggaa

SEQ ID NO: 14775 - DNA, 25 bp, Saccharomyces pastorianus
agttgagctccaagagtggcgtccc

SEQ ID NO: 14776 - DNA, 25 bp, Saccharomyces pastorianus
cagcgggcttcattggcggtgccaa

SEQ ID NO: 14777 - DNA, 25 bp, Saccharomyces pastorianus
aggattcctccgatgagtccttcga

SEQ ID NO: 14778 - DNA, 25 bp, Saccharomyces pastorianus
aagaggcctgccagaaccactgaga

SEQ ID NO: 14779 - DNA, 25 bp, Saccharomyces pastorianus
cgaggtcttcgtcacactggtgaaa

SEQ ID NO: 14780 - DNA, 25 bp, Saccharomyces pastorianus
agatcgagtttgtcctgttcacaga

SEQ ID NO: 14781 - DNA, 25 bp, Saccharomyces pastorianus
gtggcgtcccaggatgcatcttcat

SEQ ID NO: 14782 - DNA, 25 bp, Saccharomyces pastorianus
aaagcataacgatggccccggatat

SEQ ID NO: 14783 - DNA, 25 bp, Saccharomyces pastorianus
tcaaaaacaaagtcaccggaacctg

SEQ ID NO: 14784 - DNA, 25 bp, Saccharomyces pastorianus
gcccacgcctcaataaaccaggttt

SEQ ID NO: 14785 - DNA, 25 bp, Saccharomyces pastorianus
gaggaagcccatcgtagcagatcaa

SEQ ID NO: 14786 - DNA, 25 bp, Saccharomyces pastorianus
aagaaagcctctcctggtttagcat

SEQ ID NO: 14787 - DNA, 25 bp, Saccharomyces pastorianus
ttagcatcgcgtgggacaccatcaa

SEQ ID NO: 14788 - DNA, 25 bp, Saccharomyces pastorianus
attaccagagcaacacaggcctgtt

SEQ ID NO: 14789 - DNA, 25 bp, Saccharomyces pastorianus
ggaacctgttgctacggagcgccca

SEQ ID NO: 14790 - DNA, 25 bp, Saccharomyces pastorianus
aggcctgttaagctcaatcttccta

SEQ ID NO: 14791 - DNA, 25 bp, Saccharomyces pastorianus
tacgaatggattcgcgcaacctaat

SEQ ID NO: 14792 - DNA, 25 bp, Saccharomyces pastorianus
agcgctcagaatatgcttacgatga

SEQ ID NO: 14793 - DNA, 25 bp, Saccharomyces pastorianus
acgtcaatcgatacagccagggcac

SEQ ID NO: 14794 - DNA, 25 bp, Saccharomyces pastorianus
ttctggcagagttccacggatcatc

SEQ ID NO: 14795 - DNA, 25 bp, Saccharomyces pastorianus
tggccacgctgattccttacgagga

SEQ ID NO: 14796 - DNA, 25 bp, Saccharomyces pastorianus
cgggtgttgcttacgacggtgtaca

SEQ ID NO: 14797 - DNA, 25 bp, Saccharomyces pastorianus
aatcattcatggctttgcacgtcgg

SEQ ID NO: 14798 - DNA, 25 bp, Saccharomyces pastorianus
aagagtcatcgctacgtcgcatgga

SEQ ID NO: 14799 - DNA, 25 bp, Saccharomyces pastorianus
tgtggtatactacatcccgtctgaa

SEQ ID NO: 14800 - DNA, 25 bp, Saccharomyces pastorianus
ggtactgtcgacaacgaggctttca

SEQ ID NO: 14801 - DNA, 25 bp, Saccharomyces pastorianus
aaaactgcagcaggcgcttgcacaa

SEQ ID NO: 14802 - DNA, 25 bp, Saccharomyces pastorianus
aaatgggtacactctgcacgaggtt

SEQ ID NO: 14803 - DNA, 25 bp, Saccharomyces pastorianus
agggcacatctattcagggtccgga

SEQ ID NO: 14804 - DNA, 25 bp, Saccharomyces pastorianus
agtcgatgacgccagaaaccgccaa

SEQ ID NO: 14805 - DNA, 25 bp, Saccharomyces pastorianus
agacaaattccgcaagcacctctgg

SEQ ID NO: 14806 - DNA, 25 bp, Saccharomyces pastorianus
agtccaagtactgagccaagcatga

SEQ ID NO: 14807 - DNA, 25 bp, Saccharomyces pastorianus
gactgccgacatacgatgagcgcta

SEQ ID NO: 14808 - DNA, 25 bp, Saccharomyces pastorianus
tacagtgctaacttctggccagcag

SEQ ID NO: 14809 - DNA, 25 bp, Saccharomyces pastorianus
gcaaccccagtagtggtagtgccca

SEQ ID NO: 14810 - DNA, 25 bp, Saccharomyces pastorianus
aagcatgaagaaactccccactgga

SEQ ID NO: 14811 - DNA, 25 bp, Saccharomyces pastorianus
tacggacttcattaaagcgcctcag

SEQ ID NO: 14812 - DNA, 25 bp, Saccharomyces pastorianus
aaggccctgcggctttgataaacag

SEQ ID NO: 14813 - DNA, 25 bp, Saccharomyces pastorianus
atcatctaagttcaaggcctccagg

SEQ ID NO: 14814 - DNA, 25 bp, Saccharomyces pastorianus
gaattaaccaccatcggcaagcata

SEQ ID NO: 14815 - DNA, 25 bp, Saccharomyces pastorianus
gaatggcccagtttacggtgttcct

SEQ ID NO: 14816 - DNA, 25 bp, Saccharomyces pastorianus
ggtatgccaccacaattcaggaatg

SEQ ID NO: 14817 - DNA, 25 bp, Saccharomyces pastorianus
cagtttacggtgttcctccacaagg

SEQ ID NO: 14818 - DNA, 25 bp, Saccharomyces pastorianus
ttccgctgcttacgaatctttcaag

SEQ ID NO: 14819 - DNA, 25 bp, Saccharomyces pastorianus
aagaagcttccgctgcttacgaatc

SEQ ID NO: 14820 - DNA, 25 bp, Saccharomyces pastorianus
accacaattcaggaatggcccagtt

SEQ ID NO: 14821 - DNA, 25 bp, Saccharomyces pastorianus
aacgatgaattgtttgaacagcatt

SEQ ID NO: 14822 - DNA, 25 bp, Saccharomyces pastorianus
gaagaagcaaccaaagccatcactg

SEQ ID NO: 14823 - DNA, 25 bp, Saccharomyces pastorianus
gcaaccaaagccatcactgaaaaga

SEQ ID NO: 14824 - DNA, 25 bp, Saccharomyces pastorianus
atgccaaagaatggtatgccaccac

SEQ ID NO: 14825 - DNA, 25 bp, Saccharomyces pastorianus
gcattataaagaagcttccgctgct

SEQ ID NO: 14826 - DNA, 25 bp, Saccharomyces pastorianus
aaatcggcagacactttcataggca

SEQ ID NO: 14827 - DNA, 25 bp, Saccharomyces pastorianus
aatccagagtcttttttccatgaac

SEQ ID NO: 14828 - DNA, 25 bp, Saccharomyces pastorianus
aatagcagcatcgtggattccgtaa

SEQ ID NO: 14829 - DNA, 25 bp, Saccharomyces pastorianus
gagtgatgcaaatctcgaccatttt

SEQ ID NO: 14830 - DNA, 25 bp, Saccharomyces pastorianus
tatccactaccacaagcaatgcaac

SEQ ID NO: 14831 - DNA, 25 bp, Saccharomyces pastorianus
gcaaccgtttcattgggcgacttga

SEQ ID NO: 14832 - DNA, 25 bp, Saccharomyces pastorianus
ataggcaatatatccccagacacct

SEQ ID NO: 14833 - DNA, 25 bp, Saccharomyces pastorianus
cacacctttgttccacaatttcaac

SEQ ID NO: 14834 - DNA, 25 bp, Saccharomyces pastorianus
ggattccgtaatgacaaactcgata

SEQ ID NO: 14835 - DNA, 25 bp, Saccharomyces pastorianus
agaaatttctacgacggccacacct

SEQ ID NO: 14836 - DNA, 25 bp, Saccharomyces pastorianus
atgcaaccggcaactatttccaaga

SEQ ID NO: 14837 - DNA, 25 bp, Saccharomyces pastorianus
aacccatagtggacggcaagcaaat

SEQ ID NO: 14838 - DNA, 25 bp, Saccharomyces pastorianus
ggagaagcttcccattttgagaaaa

SEQ ID NO: 14839 - DNA, 25 bp, Saccharomyces pastorianus
cacgtccctcttagatgcattttta

SEQ ID NO: 14840 - DNA, 25 bp, Saccharomyces pastorianus
gagatttacaaatggctcgctgttg

SEQ ID NO: 14841 - DNA, 25 bp, Saccharomyces pastorianus
gtactggaaatgaaacctggcccgt

SEQ ID NO: 14842 - DNA, 25 bp, Saccharomyces pastorianus
ggctcgctgttgcaaaaatcggaaa

SEQ ID NO: 14843 - DNA, 25 bp, Saccharomyces pastorianus
ataacttgttatccgtcccagaaag

SEQ ID NO: 14844 - DNA, 25 bp, Saccharomyces pastorianus
aagaactgagtctcttctccacaat

SEQ ID NO: 14845 - DNA, 25 bp, Saccharomyces pastorianus
ggcagtttgataaccctgaaggaac

SEQ ID NO: 14846 - DNA, 25 bp, Saccharomyces pastorianus
gattgccacgaactaaaacccatag

SEQ ID NO: 14847 - DNA, 25 bp, Saccharomyces pastorianus
ggtcaatcacatagtttccagcaga

SEQ ID NO: 14848 - DNA, 25 bp, Saccharomyces pastorianus
gatgccatgagacatgctgcacaat

SEQ ID NO: 14849 - DNA, 25 bp, Saccharomyces pastorianus
gcagaccgtagattttccaggaaaa

SEQ ID NO: 14850 - DNA, 25 bp, Saccharomyces pastorianus
agaaaagcctgctcaaacggacggg

SEQ ID NO: 14851 - DNA, 25 bp, Saccharomyces pastorianus
gaacgatttcttatcttttgatgcc

SEQ ID NO: 14852 - DNA, 25 bp, Saccharomyces pastorianus
taatgataggtattccctttcaata

SEQ ID NO: 14853 - DNA, 25 bp, Saccharomyces pastorianus
gaaacaccagatgctcaagaaacat

SEQ ID NO: 14854 - DNA, 25 bp, Saccharomyces pastorianus
gaaacatctttagctttggagacat

SEQ ID NO: 14855 - DNA, 25 bp, Saccharomyces pastorianus
ggctatatctaacaccaaacaattt

SEQ ID NO: 14856 - DNA, 25 bp, Saccharomyces pastorianus
gattgcccagggtttatcagacgct

SEQ ID NO: 14857 - DNA, 25 bp, Saccharomyces pastorianus
tttaaggacaatggcccaacccacg

SEQ ID NO: 14858 - DNA, 25 bp, Saccharomyces pastorianus
gacgctgacttaaatctttctactg

SEQ ID NO: 14859 - DNA, 25 bp, Saccharomyces pastorianus
gagttccttaatctcaggtgcaaaa

SEQ ID NO: 14860 - DNA, 25 bp, Saccharomyces pastorianus
cggtgattcacaacttgctcaggtt

SEQ ID NO: 14861 - DNA, 25 bp, Saccharomyces pastorianus
aatgctcattcaaggtgtctgggat

SEQ ID NO: 14862 - DNA, 25 bp, Saccharomyces pastorianus
gagactttgaacctgacaacctaca

SEQ ID NO: 14863 - DNA, 25 bp, Saccharomyces pastorianus
gatactaactctcggtgattcacaa

SEQ ID NO: 14864 - DNA, 25 bp, Saccharomyces pastorianus
gtaatcgttgatattctctcagcaa

SEQ ID NO: 14865 - DNA, 25 bp, Saccharomyces pastorianus
gagtttgatattccaccaactggta

SEQ ID NO: 14866 - DNA, 25 bp, Saccharomyces pastorianus
tgctcaggttgccacatttgttaat

SEQ ID NO: 14867 - DNA, 25 bp, Saccharomyces pastorianus
atgttgaacttacctattctttgga

SEQ ID NO: 14868 - DNA, 25 bp, Saccharomyces pastorianus
tattctctcagcaaacgggtatcta

SEQ ID NO: 14869 - DNA, 25 bp, Saccharomyces pastorianus
gtttgtgattcataccttgatgcag

SEQ ID NO: 14870 - DNA, 25 bp, Saccharomyces pastorianus
gaccttttcgaaatagcagctgtac

SEQ ID NO: 14871 - DNA, 25 bp, Saccharomyces pastorianus
cccacattccctcagttgtatatta

SEQ ID NO: 14872 - DNA, 25 bp, Saccharomyces pastorianus
ttccgcctcaatatccaacaatgtt

SEQ ID NO: 14873 - DNA, 25 bp, Saccharomyces pastorianus
gcagctgtaccatattttatcttca

SEQ ID NO: 14874 - DNA, 25 bp, Saccharomyces pastorianus
ggcgcctgtaatgctcttcatgaag

SEQ ID NO: 14875 - DNA, 25 bp, Saccharomyces pastorianus
aagaagttttccgattggcccacat

SEQ ID NO: 14876 - DNA, 25 bp, Saccharomyces pastorianus
ggacccagatccacttcagatgtag

SEQ ID NO: 14877 - DNA, 25 bp, Saccharomyces pastorianus
gcgaggtgctcgaagccatcagtga

SEQ ID NO: 14878 - DNA, 25 bp, Saccharomyces pastorianus
aaacagtgggtcttctgatgacgaa

SEQ ID NO: 14879 - DNA, 25 bp, Saccharomyces pastorianus
ttagagactctctccaatggttccg

SEQ ID NO: 14880 - DNA, 25 bp, Saccharomyces pastorianus
aatgcgggttttctagacaattggt

SEQ ID NO: 14881 - DNA, 25 bp, Saccharomyces pastorianus
gtgcccattggtttgatttcgacaa

SEQ ID NO: 14882 - DNA, 25 bp, Saccharomyces pastorianus
gtttcatttgaaatctctcccagtg

SEQ ID NO: 14883 - DNA, 25 bp, Saccharomyces pastorianus
atctttccggactatcctgaatttg

SEQ ID NO: 14884 - DNA, 25 bp, Saccharomyces pastorianus
atccgaagcttttccgtcatattca

SEQ ID NO: 14885 - DNA, 25 bp, Saccharomyces pastorianus
tattaccgcggtggaatgtgcccat

SEQ ID NO: 14886 - DNA, 25 bp, Saccharomyces pastorianus
caggatatcgcggactggtttattg

SEQ ID NO: 14887 - DNA, 25 bp, Saccharomyces pastorianus
tatggcaaggaaaccctaggccctt

SEQ ID NO: 14888 - DNA, 25 bp, Saccharomyces pastorianus
gaccggaacttactgctaataccaa

SEQ ID NO: 14889 - DNA, 25 bp, Saccharomyces pastorianus
tgaaagacttcaccctggatccgaa

SEQ ID NO: 14890 - DNA, 25 bp, Saccharomyces pastorianus
aaagatctgtccatgccaatttgag

SEQ ID NO: 14891 - DNA, 25 bp, Saccharomyces pastorianus
agaacctggagtgcttaccaccaat

SEQ ID NO: 14892 - DNA, 25 bp, Saccharomyces pastorianus
gcacaacgtgacctgctatctgagg

SEQ ID NO: 14893 - DNA, 25 bp, Saccharomyces pastorianus
acggtgacccgctgtggagagacta

SEQ ID NO: 14894 - DNA, 25 bp, Saccharomyces pastorianus
atcatcaacggtctgcatgtcgcca

SEQ ID NO: 14895 - DNA, 25 bp, Saccharomyces pastorianus
atggcctggcgtggagcatcctctg

SEQ ID NO: 14896 - DNA, 25 bp, Saccharomyces pastorianus
tctgttcttctaccaatgcgatctg

SEQ ID NO: 14897 - DNA, 25 bp, Saccharomyces pastorianus
aagcacggcctgattgtggtcggta

SEQ ID NO: 14898 - DNA, 25 bp, Saccharomyces pastorianus
tggattccttccaaggccacgagaa

SEQ ID NO: 14899 - DNA, 25 bp, Saccharomyces pastorianus
aaggagccagcagcttgcagaacaa

SEQ ID NO: 14900 - DNA, 25 bp, Saccharomyces pastorianus
acaaaatcggattcctgcgcgataa

SEQ ID NO: 14901 - DNA, 25 bp, Saccharomyces pastorianus
gtggagagactacattgcctacctc

SEQ ID NO: 14902 - DNA, 25 bp, Saccharomyces pastorianus
atcgaactatttaacgcggccggct

SEQ ID NO: 14903 - DNA, 25 bp, Saccharomyces pastorianus
ttcgacgacgctattgccgagttag

SEQ ID NO: 14904 - DNA, 25 bp, Saccharomyces pastorianus
gagaatcgtatcctctatcgaacag

SEQ ID NO: 14905 - DNA, 25 bp, Saccharomyces pastorianus
cgtcgtgcttcctggagaatcgtat

SEQ ID NO: 14906 - DNA, 25 bp, Saccharomyces pastorianus
gaacaccaggtcgagctgattcgct

SEQ ID NO: 14907 - DNA, 25 bp, Saccharomyces pastorianus
gacattttatccgtgctagactctc

SEQ ID NO: 14908 - DNA, 25 bp, Saccharomyces pastorianus
gagttttccagtactgacgccagag

SEQ ID NO: 14909 - DNA, 25 bp, Saccharomyces pastorianus
tacaagaccgcctctgagattgcta

SEQ ID NO: 14910 - DNA, 25 bp, Saccharomyces pastorianus
taacgcttctttggaggcctacaag

SEQ ID NO: 14911 - DNA, 25 bp, Saccharomyces pastorianus
tgaacttaccaagatctccgacgac

SEQ ID NO: 14912 - DNA, 25 bp, Saccharomyces pastorianus
gagattgctaccacagagttgccac

SEQ ID NO: 14913 - DNA, 25 bp, Saccharomyces pastorianus
agacatgtccgaatcaggccaggct

SEQ ID NO: 14914 - DNA, 25 bp, Saccharomyces pastorianus
tgtggccctttttatcacctataca

SEQ ID NO: 14915 - DNA, 25 bp, Saccharomyces pastorianus
aattgccggtacatatccgatgttt

SEQ ID NO: 14916 - DNA, 25 bp, Saccharomyces pastorianus
ggattacttgggattctttcagcta

SEQ ID NO: 14917 - DNA, 25 bp, Saccharomyces pastorianus
gagcagcttcagtcatttgatttcg

SEQ ID NO: 14918 - DNA, 25 bp, Saccharomyces pastorianus
ttgcttatactagcccattgagata

SEQ ID NO: 14919 - DNA, 25 bp, Saccharomyces pastorianus
tatacttacccctcgattgcttata

SEQ ID NO: 14920 - DNA, 25 bp, Saccharomyces pastorianus
aatatcagggcccaacactaccatt

SEQ ID NO: 14921 - DNA, 25 bp, Saccharomyces pastorianus
atataccaaaatccccgtctataga

SEQ ID NO: 14922 - DNA, 25 bp, Saccharomyces pastorianus
gaacctgatgattacgaagccatta

SEQ ID NO: 14923 - DNA, 25 bp, Saccharomyces pastorianus
caatctgattcggatcttgttatcg

SEQ ID NO: 14924 - DNA, 25 bp, Saccharomyces pastorianus
gtgatcgcggttatgactgtggccc

SEQ ID NO: 14925 - DNA, 25 bp, Saccharomyces pastorianus
aacagcaggaggtttgtgagcacct

SEQ ID NO: 14926 - DNA, 25 bp, Saccharomyces pastorianus
gttagtgcgtcaaaccaaacttttg

SEQ ID NO: 14927 - DNA, 25 bp, Saccharomyces pastorianus
aagccaacgttagcgataaggaagt

SEQ ID NO: 14928 - DNA, 25 bp, Saccharomyces pastorianus
gtcagtacccaattatcttttgaag

SEQ ID NO: 14929 - DNA, 25 bp, Saccharomyces pastorianus
tgtgagcacctcaaacaagaaaatg

SEQ ID NO: 14930 - DNA, 25 bp, Saccharomyces pastorianus
acaccagcagcgatttaccagtcag

SEQ ID NO: 14931 - DNA, 25 bp, Saccharomyces pastorianus
atcttttgaagccaacgttagcgat

SEQ ID NO: 14932 - DNA, 25 bp, Saccharomyces pastorianus
gatctgctctggaataagacattgg

SEQ ID NO: 14933 - DNA, 25 bp, Saccharomyces pastorianus
gcgatttaccagtcagtacccaatt

SEQ ID NO: 14934 - DNA, 25 bp, Saccharomyces pastorianus
atgtctgcagaaaacaccagcagcg

SEQ ID NO: 14935 - DNA, 25 bp, Saccharomyces pastorianus
gatactttagatctgctctggaata

SEQ ID NO: 14936 - DNA, 25 bp, Saccharomyces pastorianus
ggctcaggtatcttcaagtcttcaa

SEQ ID NO: 14937 - DNA, 25 bp, Saccharomyces pastorianus
aagtgaggtcttgaccccagctgac

SEQ ID NO: 14938 - DNA, 25 bp, Saccharomyces pastorianus
taaggagtcagatcttgccgcaaaa

SEQ ID NO: 14939 - DNA, 25 bp, Saccharomyces pastorianus
aagcgctacaggtggactatatcga

SEQ ID NO: 14940 - DNA, 25 bp, Saccharomyces pastorianus
gtgtccgaagccgtgaagcacatca

SEQ ID NO: 14941 - DNA, 25 bp, Saccharomyces pastorianus
ttacccgtagttaatttcgctgccg

SEQ ID NO: 14942 - DNA, 25 bp, Saccharomyces pastorianus
ttcaaaccctgataagttggcccgc

SEQ ID NO: 14943 - DNA, 25 bp, Saccharomyces pastorianus
gaagaacagcttccaggtcccattt

SEQ ID NO: 14944 - DNA, 25 bp, Saccharomyces pastorianus
aagctggtactggtgatgtgtccga

SEQ ID NO: 14945 - DNA, 25 bp, Saccharomyces pastorianus
aaggcgctgcgatgatccgtactaa

SEQ ID NO: 14946 - DNA, 25 bp, Saccharomyces pastorianus
gaagtatccagcgacttgggtgatt

SEQ ID NO: 14947 - DNA, 25 bp, Saccharomyces pastorianus
agtctaccgactacatgttgaacaa

SEQ ID NO: 14948 - DNA, 25 bp, Saccharomyces pastorianus
acgttgacttcaagccacaattgga

SEQ ID NO: 14949 - DNA, 25 bp, Saccharomyces pastorianus
tgaacaacccagttgaagcttggaa

SEQ ID NO: 14950 - DNA, 25 bp, Saccharomyces pastorianus
gcacaaggcagaccagctaccgatg

SEQ ID NO: 14951 - DNA, 25 bp, Saccharomyces pastorianus
tggacactgatttgtcttacaaaca

SEQ ID NO: 14952 - DNA, 25 bp, Saccharomyces pastorianus
cgataagttggcttgtttgggctgt

SEQ ID NO: 14953 - DNA, 25 bp, Saccharomyces pastorianus
gaggaatacttaaccgcacaaggca

SEQ ID NO: 14954 - DNA, 25 bp, Saccharomyces pastorianus
tttgggctgttgttgtttctgtacc

SEQ ID NO: 14955 - DNA, 25 bp, Saccharomyces pastorianus
tgactccagacgactataccgccgt

SEQ ID NO: 14956 - DNA, 25 bp, Saccharomyces pastorianus
tgaaagcccttaagaagtctaccga

SEQ ID NO: 14957 - DNA, 25 bp, Saccharomyces pastorianus
tgaaggtaagattgacgccggtgtt

SEQ ID NO: 14958 - DNA, 25 bp, Saccharomyces pastorianus
gaagctgcaaaacgccatggtcaag

SEQ ID NO: 14959 - DNA, 25 bp, Saccharomyces pastorianus
tctcgctaacgacatcaacgcttta

SEQ ID NO: 14960 - DNA, 25 bp, Saccharomyces pastorianus
ccaacgttccacaaagcaatctact

SEQ ID NO: 14961 - DNA, 25 bp, Saccharomyces pastorianus
gattctttgattcctaacgttaacg

SEQ ID NO: 14962 - DNA, 25 bp, Saccharomyces pastorianus
tgggccagccaaaaatgatcacgaa

SEQ ID NO: 14963 - DNA, 25 bp, Saccharomyces pastorianus
tctactgaggacatcattgctgaag

SEQ ID NO: 14964 - DNA, 25 bp, Saccharomyces pastorianus
gccatggtcaaggtggtcctcaagt

SEQ ID NO: 14965 - DNA, 25 bp, Saccharomyces pastorianus
aacgttaacgcaatgggccagccaa

SEQ ID NO: 14966 - DNA, 25 bp, Saccharomyces pastorianus
catggcttctttaaccaaccaacgt

SEQ ID NO: 14967 - DNA, 25 bp, Saccharomyces pastorianus
tggctgcttccattaattttcatta

SEQ ID NO: 14968 - DNA, 25 bp, Saccharomyces pastorianus
aaaattgatgatttggctgcttcca

SEQ ID NO: 14969 - DNA, 25 bp, Saccharomyces pastorianus
gggtgtatcatgtctcacaagatct

SEQ ID NO: 14970 - DNA, 25 bp, Saccharomyces pastorianus
gtgtctgcacgggtacctttgcact

SEQ ID NO: 14971 - DNA, 25 bp, Saccharomyces pastorianus
caaacgtattgttggaattcctaca

SEQ ID NO: 14972 - DNA, 25 bp, Saccharomyces pastorianus
caatggttgataggtgtctgcacgg

SEQ ID NO: 14973 - DNA, 25 bp, Saccharomyces pastorianus
gaagtgcgttgttattcagcaatga

SEQ ID NO: 14974 - DNA, 25 bp, Saccharomyces pastorianus
aagactaacgcaggctttaagctag

SEQ ID NO: 14975 - DNA, 25 bp, Saccharomyces pastorianus
cgcgaagttgagagatcagctacta

SEQ ID NO: 14976 - DNA, 25 bp, Saccharomyces pastorianus
acagcgtgttgatttcgcgaagttg

SEQ ID NO: 14977 - DNA, 25 bp, Saccharomyces pastorianus
ttcctacaaggcgtgttttccatag

SEQ ID NO: 14978 - DNA, 25 bp, Saccharomyces pastorianus
ggctttaagctagatctgtccttag

SEQ ID NO: 14979 - DNA, 25 bp, Saccharomyces pastorianus
acaactaagttaccaacagcgtgtt

SEQ ID NO: 14980 - DNA, 25 bp, Saccharomyces pastorianus
acaaattggctgtgttcgttttaag

SEQ ID NO: 14981 - DNA, 25 bp, Saccharomyces pastorianus
gatgtcttcccagctggttgggata

SEQ ID NO: 14982 - DNA, 25 bp, Saccharomyces pastorianus
ggcttcccaatctttcatcaactgg

SEQ ID NO: 14983 - DNA, 25 bp, Saccharomyces pastorianus
gcaacacgttgctaaggatggtttc

SEQ ID NO: 14984 - DNA, 25 bp, Saccharomyces pastorianus
gattacgaaatctttgctgacgaaa

SEQ ID NO: 14985 - DNA, 25 bp, Saccharomyces pastorianus
tggtggttccgatttgagcaagcaa

SEQ ID NO: 14986 - DNA, 25 bp, Saccharomyces pastorianus
gggtaaggaactggcttcccaatct

SEQ ID NO: 14987 - DNA, 25 bp, Saccharomyces pastorianus
gacaaagtacaccaaattagagcta

SEQ ID NO: 14988 - DNA, 25 bp, Saccharomyces pastorianus
aaatctcctttgatgtcttcccagc

SEQ ID NO: 14989 - DNA, 25 bp, Saccharomyces pastorianus
atacttgtcggaaattgacttgcca

SEQ ID NO: 14990 - DNA, 25 bp, Saccharomyces pastorianus
acgattttgactactctttctctga

SEQ ID NO: 14991 - DNA, 25 bp, Saccharomyces pastorianus
gacgtttctatgtcctgtgatgatc

SEQ ID NO: 14992 - DNA, 25 bp, Saccharomyces pastorianus
gggatttttgcgatgagcctttcta

SEQ ID NO: 14993 - DNA, 25 bp, Saccharomyces pastorianus
gcattgtgcttcctgattgttggga

SEQ ID NO: 14994 - DNA, 25 bp, Saccharomyces pastorianus
ggtcaagataccaaaccgatcgatg

SEQ ID NO: 14995 - DNA, 25 bp, Saccharomyces pastorianus
gggtatcaagactccagattcgaat

SEQ ID NO: 14996 - DNA, 25 bp, Saccharomyces pastorianus
gcgggtggatcttagcattgtgctt

SEQ ID NO: 14997 - DNA, 25 bp, Saccharomyces pastorianus
ggctccatacggtcctcggaagaag

SEQ ID NO: 14998 - DNA, 25 bp, Saccharomyces pastorianus
gcggattccccataagtgggctatt

SEQ ID NO: 14999 - DNA, 25 bp, Saccharomyces pastorianus
taatcacagtgctgggcggattccc

SEQ ID NO: 15000 - DNA, 25 bp, Saccharomyces pastorianus
acagagtggaccctcatttgcatga

SEQ ID NO: 15001 - DNA, 25 bp, Saccharomyces pastorianus
gaattccaatatcggctccatacgg

SEQ ID NO: 15002 - DNA, 25 bp, Saccharomyces pastorianus
taacaacgtgcaaaccgccgtgtgt

SEQ ID NO: 15003 - DNA, 25 bp, Saccharomyces pastorianus
gccactgactgcgattggttctcaa

SEQ ID NO: 15004 - DNA, 25 bp, Saccharomyces pastorianus
attgctaactctacatccatccaag

SEQ ID NO: 15005 - DNA, 25 bp, Saccharomyces pastorianus
tggttctcaatcgttcagatcgttg

SEQ ID NO: 15006 - DNA, 25 bp, Saccharomyces pastorianus
tcatggttgggtatgcgccactgac

SEQ ID NO: 15007 - DNA, 25 bp, Saccharomyces pastorianus
tgatggccgctgctgacccaagaaa

SEQ ID NO: 15008 - DNA, 25 bp, Saccharomyces pastorianus
agatcgttgaccgttcctgaattga

SEQ ID NO: 15009 - DNA, 25 bp, Saccharomyces pastorianus
tgacccagcaaatgttcgactccaa

SEQ ID NO: 15010 - DNA, 25 bp, Saccharomyces pastorianus
ggaattctctgaagctgagtccaac

SEQ ID NO: 15011 - DNA, 25 bp, Saccharomyces pastorianus
aattggcagtcaatctggtcccatt

SEQ ID NO: 15012 - DNA, 25 bp, Saccharomyces pastorianus
ggtagatacttgaccgttgcggcat

SEQ ID NO: 15013 - DNA, 25 bp, Saccharomyces pastorianus
atgcttcgcatatgctgttgagtgc

SEQ ID NO: 15014 - DNA, 25 bp, Saccharomyces pastorianus
tcattcactcattggatgcttcgca

SEQ ID NO: 15015 - DNA, 25 bp, Saccharomyces pastorianus
aaatagccccttgccggaggataga

SEQ ID NO: 15016 - DNA, 25 bp, Saccharomyces pastorianus
ataagagctacgtcaagattggcaa

SEQ ID NO: 15017 - DNA, 25 bp, Saccharomyces pastorianus
tgtcaaccccgtcaatgcaagaaga

SEQ ID NO: 15018 - DNA, 25 bp, Saccharomyces pastorianus
gtatgagcgttcttttacccctaag

SEQ ID NO: 15019 - DNA, 25 bp, Saccharomyces pastorianus
agaccggtcttccaccaaatttcat

SEQ ID NO: 15020 - DNA, 25 bp, Saccharomyces pastorianus
aaggattggattttgcgtctgtgca

SEQ ID NO: 15021 - DNA, 25 bp, Saccharomyces pastorianus
tacaaccgtatcgttatttcaggac

SEQ ID NO: 15022 - DNA, 25 bp, Saccharomyces pastorianus
aggtcgatttggttatgaggctcag

SEQ ID NO: 15023 - DNA, 25 bp, Saccharomyces pastorianus
gcgtctgtgcatgattcctactgga

SEQ ID NO: 15024 - DNA, 25 bp, Saccharomyces pastorianus
gagtgctggaagaaccattctcccg

SEQ ID NO: 15025 - DNA, 25 bp, Saccharomyces pastorianus
tcagaccaccatcaacaccaaaaat

SEQ ID NO: 15026 - DNA, 25 bp, Saccharomyces pastorianus
taaatccaccacagagtccgaatca

SEQ ID NO: 15027 - DNA, 25 bp, Saccharomyces pastorianus
aaacgtaaagatgccgcccttgtcg

SEQ ID NO: 15028 - DNA, 25 bp, Saccharomyces pastorianus
gaatctgccagctgaagacacgaat

SEQ ID NO: 15029 - DNA, 25 bp, Saccharomyces pastorianus
gaatctttagacgaaacccagctca

SEQ ID NO: 15030 - DNA, 25 bp, Saccharomyces pastorianus
acaatagctgggtgccgaaatggct

SEQ ID NO: 15031 - DNA, 25 bp, Saccharomyces pastorianus
ggaagaaccattctcccggaggatg

SEQ ID NO: 15032 - DNA, 25 bp, Saccharomyces pastorianus
agacctgccagaaacagatgccaat

SEQ ID NO: 15033 - DNA, 25 bp, Saccharomyces pastorianus
gtaagcgatgtcgatgcagcgcaaa

SEQ ID NO: 15034 - DNA, 25 bp, Saccharomyces pastorianus
ggagcggaagcttcaactgaatctt

SEQ ID NO: 15035 - DNA, 25 bp, Saccharomyces pastorianus
tggttattgccggtggtatccacaa

SEQ ID NO: 15036 - DNA, 25 bp, Saccharomyces pastorianus
gatttgcaccgcgaaatgagcgact

SEQ ID NO: 15037 - DNA, 25 bp, Saccharomyces pastorianus
tgatcaacagtctcgacgtggcctt

SEQ ID NO: 15038 - DNA, 25 bp, Saccharomyces pastorianus
cacggctacttctcgtctttgagaa

SEQ ID NO: 15039 - DNA, 25 bp, Saccharomyces pastorianus
acatgggcgtgaccgcttgtaacaa

SEQ ID NO: 15040 - DNA, 25 bp, Saccharomyces pastorianus
gatgggccccgatcatgcagggata

SEQ ID NO: 15041 - DNA, 25 bp, Saccharomyces pastorianus
gagaacggccaagtgcacggctact

SEQ ID NO: 15042 - DNA, 25 bp, Saccharomyces pastorianus
gtgcagcagcaggttcatggactac

SEQ ID NO: 15043 - DNA, 25 bp, Saccharomyces pastorianus
aagacagtctggtgaacggcttgca

SEQ ID NO: 15044 - DNA, 25 bp, Saccharomyces pastorianus
agtacatccgtattggccacatggg

SEQ ID NO: 15045 - DNA, 25 bp, Saccharomyces pastorianus
tgactgcgtcccagaaggccattgg

SEQ ID NO: 15046 - DNA, 25 bp, Saccharomyces pastorianus
gtcactactgatgattgtctcccaa

SEQ ID NO: 15047 - DNA, 25 bp, Saccharomyces pastorianus
ataagctgggcataccgtctctcga

SEQ ID NO: 15048 - DNA, 25 bp, Saccharomyces pastorianus
gattgtctcccaatggtttcagagg

SEQ ID NO: 15049 - DNA, 25 bp, Saccharomyces pastorianus
acgccgttgcaaaacatgggtctgt

SEQ ID NO: 15050 - DNA, 25 bp, Saccharomyces pastorianus
gattgatctgctcgatcttcgataa

SEQ ID NO: 15051 - DNA, 25 bp, Saccharomyces pastorianus
ggatatacaaggcacccgaggttct

SEQ ID NO: 15052 - DNA, 25 bp, Saccharomyces pastorianus
atgggacacgttccggcgatgatta

SEQ ID NO: 15053 - DNA, 25 bp, Saccharomyces pastorianus
gtctgtagacgcctttgttggaatg

SEQ ID NO: 15054 - DNA, 25 bp, Saccharomyces pastorianus
cagaacattgtgctgacggctggca

SEQ ID NO: 15055 - DNA, 25 bp, Saccharomyces pastorianus
gactccccaaggctgtacataattg

SEQ ID NO: 15056 - DNA, 25 bp, Saccharomyces pastorianus
gaatggtctcgttttcaccaagtga

SEQ ID NO: 15057 - DNA, 25 bp, Saccharomyces pastorianus
gagagtcctactacttgacgaggtc

SEQ ID NO: 15058 - DNA, 25 bp, Saccharomyces pastorianus
ggatcctagacattgacgtgcgctg

SEQ ID NO: 15059 - DNA, 25 bp, Saccharomyces pastorianus
gagttttccgaggtggtcaacgcca

SEQ ID NO: 15060 - DNA, 25 bp, Saccharomyces pastorianus
ggcctgaccaagtgttccatatgaa

SEQ ID NO: 15061 - DNA, 25 bp, Saccharomyces pastorianus
gacttggacgttattgccagggcaa

SEQ ID NO: 15062 - DNA, 25 bp, Saccharomyces pastorianus
tgacgaggtcactgtggacttggac

SEQ ID NO: 15063 - DNA, 25 bp, Saccharomyces pastorianus
atctggtaagatcctcaacaagctg

SEQ ID NO: 15064 - DNA, 25 bp, Saccharomyces pastorianus
ggccaagtggcctttgatgaagaca

SEQ ID NO: 15065 - DNA, 25 bp, Saccharomyces pastorianus
gtttacgctacgcatatttttgatg

SEQ ID NO: 15066 - DNA, 25 bp, Saccharomyces pastorianus
aacaagctggactttctcaaggatg

SEQ ID NO: 15067 - DNA, 25 bp, Saccharomyces pastorianus
agtccaattagccatgggtcttttg

SEQ ID NO: 15068 - DNA, 25 bp, Saccharomyces pastorianus
tggccatcctgtaccaactacggaa

SEQ ID NO: 15069 - DNA, 25 bp, Saccharomyces pastorianus
gctattgcaaaacgcacccgaaata

SEQ ID NO: 15070 - DNA, 25 bp, Saccharomyces pastorianus
acgacggaatcgcaactaggtccaa

SEQ ID NO: 15071 - DNA, 25 bp, Saccharomyces pastorianus
ttactcaatacagcgtgcggcaacc

SEQ ID NO: 15072 - DNA, 25 bp, Saccharomyces pastorianus
tactaatcggaatcgtggccatcct

SEQ ID NO: 15073 - DNA, 25 bp, Saccharomyces pastorianus
aataactagggaccattcggcaaat

SEQ ID NO: 15074 - DNA, 25 bp, Saccharomyces pastorianus
gcaacccatccagtttccaaatgga

SEQ ID NO: 15075 - DNA, 25 bp, Saccharomyces pastorianus
acaagggcactagtccagaggctgg

SEQ ID NO: 15076 - DNA, 25 bp, Saccharomyces pastorianus
tggacgccgttgttttctacctaga

SEQ ID NO: 15077 - DNA, 25 bp, Saccharomyces pastorianus
cgatttcgatttgcgtcatggagct

SEQ ID NO: 15078 - DNA, 25 bp, Saccharomyces pastorianus
acacgaggtcgttaagtctagtact

SEQ ID NO: 15079 - DNA, 25 bp, Saccharomyces pastorianus
gtgaacgtgtcgctgtgtatactcc

SEQ ID NO: 15080 - DNA, 25 bp, Saccharomyces pastorianus
aaaaacaccacgacagggccatttg

SEQ ID NO: 15081 - DNA, 25 bp, Saccharomyces pastorianus
agaagattccttggcctcaaacaat

SEQ ID NO: 15082 - DNA, 25 bp, Saccharomyces pastorianus
tatactcccaatactgctgcagatg

SEQ ID NO: 15083 - DNA, 25 bp, Saccharomyces pastorianus
aaccactgttgccacattgttagct

SEQ ID NO: 15084 - DNA, 25 bp, Saccharomyces pastorianus
acaaacggattctacccaggtggat

SEQ ID NO: 15085 - DNA, 25 bp, Saccharomyces pastorianus
attgttagctgttttgtctctgcca

SEQ ID NO: 15086 - DNA, 25 bp, Saccharomyces pastorianus
gtcaatctttgttagtcccatcagt

SEQ ID NO: 15087 - DNA, 25 bp, Saccharomyces pastorianus
gttgcctacgcctacaagttcaaaa

SEQ ID NO: 15088 - DNA, 25 bp, Saccharomyces pastorianus
gccattgtcatctatgtgggccaca

SEQ ID NO: 15089 - DNA, 25 bp, Saccharomyces pastorianus
aacctttgtggatgggactgcgaac

SEQ ID NO: 15090 - DNA, 25 bp, Saccharomyces pastorianus
accgttctcttattcgtgtatacaa

SEQ ID NO: 15091 - DNA, 25 bp, Saccharomyces pastorianus
gttagcgcgattaacattcctatcg

SEQ ID NO: 15092 - DNA, 25 bp, Saccharomyces pastorianus
gatcacatcacaacatcctagctgt

SEQ ID NO: 15093 - DNA, 25 bp, Saccharomyces pastorianus
tagcgctactacagccatcaaacga

SEQ ID NO: 15094 - DNA, 25 bp, Saccharomyces pastorianus
tacctgtgtcagaatagcgctacta

SEQ ID NO: 15095 - DNA, 25 bp, Saccharomyces pastorianus
attcctatcgtcattgttttcttac

SEQ ID NO: 15096 - DNA, 25 bp, Saccharomyces pastorianus
atgctattcagcttcatttatggaa

SEQ ID NO: 15097 - DNA, 25 bp, Saccharomyces pastorianus
ggatggtgcaattaccgttctctta

SEQ ID NO: 15098 - DNA, 25 bp, Saccharomyces pastorianus
tcctagctgtggcaccaattatctt

SEQ ID NO: 15099 - DNA, 25 bp, Saccharomyces pastorianus
gggaaacttcgttcagatcacatca

SEQ ID NO: 15100 - DNA, 25 bp, Saccharomyces pastorianus
gttattcagatagctacctgtgtca

SEQ ID NO: 15101 - DNA, 25 bp, Saccharomyces pastorianus
tgacgaatttgtgaggctttacgac

SEQ ID NO: 15102 - DNA, 25 bp, Saccharomyces pastorianus
gcaacgatcaagtaccgtagggact

SEQ ID NO: 15103 - DNA, 25 bp, Saccharomyces pastorianus
atggaagtacgattccccacaaaat

SEQ ID NO: 15104 - DNA, 25 bp, Saccharomyces pastorianus
aggctgaaacagacccacatgcaac

SEQ ID NO: 15105 - DNA, 25 bp, Saccharomyces pastorianus
accggcaaggttaaatcagatttct

SEQ ID NO: 15106 - DNA, 25 bp, Saccharomyces pastorianus
ccgccaagccaagcagttctttaat

SEQ ID NO: 15107 - DNA, 25 bp, Saccharomyces pastorianus
gaacgattcattggtaaatcccggg

SEQ ID NO: 15108 - DNA, 25 bp, Saccharomyces pastorianus
cgtagggactacatcaacaggctga

SEQ ID NO: 15109 - DNA, 25 bp, Saccharomyces pastorianus
gttgggtaccaaatcctatgaacaa

SEQ ID NO: 15110 - DNA, 25 bp, Saccharomyces pastorianus
tacaaactcgtcaaattccctgaaa

SEQ ID NO: 15111 - DNA, 25 bp, Saccharomyces pastorianus
tatacaataacatccgccaagccaa

SEQ ID NO: 15112 - DNA, 25 bp, Saccharomyces pastorianus
cgctgagttccaccaggtcgaaggt

SEQ ID NO: 15113 - DNA, 25 bp, Saccharomyces pastorianus
aactggaagcccgaggagtgtcaaa

SEQ ID NO: 15114 - DNA, 25 bp, Saccharomyces pastorianus
aaaactggtcctgagaacgcacacc

SEQ ID NO: 15115 - DNA, 25 bp, Saccharomyces pastorianus
tttgagattcaagcccacttacaac

SEQ ID NO: 15116 - DNA, 25 bp, Saccharomyces pastorianus
catgggcctgccaaaggacctgagg

SEQ ID NO: 15117 - DNA, 25 bp, Saccharomyces pastorianus
gcaaggtaagttcggctccatcggt

SEQ ID NO: 15118 - DNA, 25 bp, Saccharomyces pastorianus
tcgaaggtgtcttggccgactacaa

SEQ ID NO: 15119 - DNA, 25 bp, Saccharomyces pastorianus
aaggtctccttggacttcatcgaaa

SEQ ID NO: 15120 - DNA, 25 bp, Saccharomyces pastorianus
gtgtgttccgtaacgaggccgtcga

SEQ ID NO: 15121 - DNA, 25 bp, Saccharomyces pastorianus
gagatcttctcctggcacgagggtt

SEQ ID NO: 15122 - DNA, 25 bp, Saccharomyces pastorianus
tcaaggccgtccacgagcaaggtaa

SEQ ID NO: 15123 - DNA, 25 bp, Saccharomyces pastorianus
gctgaggttttgttagtcgctgttg

SEQ ID NO: 15124 - DNA, 25 bp, Saccharomyces pastorianus
gaccttacatcgctggcttagatgc

SEQ ID NO: 15125 - DNA, 25 bp, Saccharomyces pastorianus
gaaattcccatttgcagctaactca

SEQ ID NO: 15126 - DNA, 25 bp, Saccharomyces pastorianus
aatgatcgccgaagctggtttagct

SEQ ID NO: 15127 - DNA, 25 bp, Saccharomyces pastorianus
gtggagattttcaaaaccggtcacg

SEQ ID NO: 15128 - DNA, 25 bp, Saccharomyces pastorianus
agagaggccgtctagtcattgatga

SEQ ID NO: 15129 - DNA, 25 bp, Saccharomyces pastorianus
gatcctgattgatgccaagaccgaa

SEQ ID NO: 15130 - DNA, 25 bp, Saccharomyces pastorianus
aatacggtgcctctgctgaagatgt

SEQ ID NO: 15131 - DNA, 25 bp, Saccharomyces pastorianus
atatcccctcagtgatgtattctca

SEQ ID NO: 15132 - DNA, 25 bp, Saccharomyces pastorianus
aagagtatgtcatgctcatcctact

SEQ ID NO: 15133 - DNA, 25 bp, Saccharomyces pastorianus
accggtcacggccatgtgaactata

SEQ ID NO: 15134 - DNA, 25 bp, Saccharomyces pastorianus
gtttccactcctgaactgaagaaat

SEQ ID NO: 15135 - DNA, 25 bp, Saccharomyces pastorianus
agcaacttgccgctgggcttgcaaa

SEQ ID NO: 15136 - DNA, 25 bp, Saccharomyces pastorianus
atgctgaatataaacgggtcccgga

SEQ ID NO: 15137 - DNA, 25 bp, Saccharomyces pastorianus
cagggatcttgagaggctacgacat

SEQ ID NO: 15138 - DNA, 25 bp, Saccharomyces pastorianus
ctgaacattgttctcgatgacgcaa

SEQ ID NO: 15139 - DNA, 25 bp, Saccharomyces pastorianus
tgaagatcccgctagcaacttgccg

SEQ ID NO: 15140 - DNA, 25 bp, Saccharomyces pastorianus
gccgctgggcttgcaaaccgtcatt

SEQ ID NO: 15141 - DNA, 25 bp, Saccharomyces pastorianus
gctacgacatcttcctgaacattgt

SEQ ID NO: 15142 - DNA, 25 bp, Saccharomyces pastorianus
ggtcccggaagatagcagggatctt

SEQ ID NO: 15143 - DNA, 25 bp, Saccharomyces pastorianus
taaacggtgaagatcccgctagcaa

SEQ ID NO: 15144 - DNA, 25 bp, Saccharomyces pastorianus
atgacgcaatggagataaacggtga

SEQ ID NO: 15145 - DNA, 25 bp, Saccharomyces pastorianus
caaccctatggtgatcgtggacaag

SEQ ID NO: 15146 - DNA, 25 bp, Saccharomyces pastorianus
gtgaacccgaagtaccaaggccaag

SEQ ID NO: 15147 - DNA, 25 bp, Saccharomyces pastorianus
aaggcttgggcaaactcttgatcga

SEQ ID NO: 15148 - DNA, 25 bp, Saccharomyces pastorianus
agctggtagccatcgggttcagcta

SEQ ID NO: 15149 - DNA, 25 bp, Saccharomyces pastorianus
acgaactagcgttatgtggccacat

SEQ ID NO: 15150 - DNA, 25 bp, Saccharomyces pastorianus
aaactcttgatcgaccagctggtag

SEQ ID NO: 15151 - DNA, 25 bp, Saccharomyces pastorianus
acatcgaggacatcgcggtgaaccc

SEQ ID NO: 15152 - DNA, 25 bp, Saccharomyces pastorianus
taggcacaattgctcctgaggcctt

SEQ ID NO: 15153 - DNA, 25 bp, Saccharomyces pastorianus
gtggacaagcgcactgagaccgtcg

SEQ ID NO: 15154 - DNA, 25 bp, Saccharomyces pastorianus
gctacggctgctacaagatcatctt

SEQ ID NO: 15155 - DNA, 25 bp, Saccharomyces pastorianus
gaaagtcttgaccaccgtaggcaca

SEQ ID NO: 15156 - DNA, 25 bp, Saccharomyces pastorianus
aggccctggccgatgtgaccaacga

SEQ ID NO: 15157 - DNA, 25 bp, Saccharomyces pastorianus
gccgtggaggccgatcttcaagact

SEQ ID NO: 15158 - DNA, 25 bp, Saccharomyces pastorianus
agaaatgtctctgggaggccctggc

SEQ ID NO: 15159 - DNA, 25 bp, Saccharomyces pastorianus
tgagaatccgcgtcgacaaggaccc

SEQ ID NO: 15160 - DNA, 25 bp, Saccharomyces pastorianus
acgggaaccgccatcaacgaagaga

SEQ ID NO: 15161 - DNA, 25 bp, Saccharomyces pastorianus
agaaaaccatgcagccgggaaccgc

SEQ ID NO: 15162 - DNA, 25 bp, Saccharomyces pastorianus
ctcgaccctgcgtggtgacatgaag

SEQ ID NO: 15163 - DNA, 25 bp, Saccharomyces pastorianus
caaggaccccagtttctccataaga

SEQ ID NO: 15164 - DNA, 25 bp, Saccharomyces pastorianus
tcatgggctgcaagacggcgacgtc

SEQ ID NO: 15165 - DNA, 25 bp, Saccharomyces pastorianus
acatgggtgtgccaagaacctcgac

SEQ ID NO: 15166 - DNA, 25 bp, Saccharomyces pastorianus
acaaccaagtgatatccatcccgaa

SEQ ID NO: 15167 - DNA, 25 bp, Saccharomyces pastorianus
aaggattcggcgacaaggcttctga

SEQ ID NO: 15168 - DNA, 25 bp, Saccharomyces pastorianus
gtccaagttgaacgacgctgttgaa

SEQ ID NO: 15169 - DNA, 25 bp, Saccharomyces pastorianus
aacgacgctgttgaatacgtttccg

SEQ ID NO: 15170 - DNA, 25 bp, Saccharomyces pastorianus
gtcgccggtaaggtcgaaagcaacg

SEQ ID NO: 15171 - DNA, 25 bp, Saccharomyces pastorianus
acgctgacagccaaggtgaatcttt

SEQ ID NO: 15172 - DNA, 25 bp, Saccharomyces pastorianus
tcacgactccgctcaacaaggtaag

SEQ ID NO: 15173 - DNA, 25 bp, Saccharomyces pastorianus
cagagactacatgggtgccgccaag

SEQ ID NO: 15174 - DNA, 25 bp, Saccharomyces pastorianus
tgccgaccaagccagagactacatg

SEQ ID NO: 15175 - DNA, 25 bp, Saccharomyces pastorianus
caaggcttctgaggctttgaaacca

SEQ ID NO: 15176 - DNA, 25 bp, Saccharomyces pastorianus
aaggtaaggacaacgctgacagcca

SEQ ID NO: 15177 - DNA, 25 bp, Saccharomyces pastorianus
ggtgaatcttttgccgaccaagcca

SEQ ID NO: 15178 - DNA, 25 bp, Saccharomyces pastorianus
caacaagcctactattcacagcaac

SEQ ID NO: 15179 - DNA, 25 bp, Saccharomyces pastorianus
gcacccaagggtaccacatggtcaa

SEQ ID NO: 15180 - DNA, 25 bp, Saccharomyces pastorianus
tgacttcgacggtggctatgacggc

SEQ ID NO: 15181 - DNA, 25 bp, Saccharomyces pastorianus
acgccatgatgggtggtctactcgg

SEQ ID NO: 15182 - DNA, 25 bp, Saccharomyces pastorianus
tactcggtgttggtgctggtttatt

SEQ ID NO: 15183 - DNA, 25 bp, Saccharomyces pastorianus
tcgacgaacagctcccagtgggaag

SEQ ID NO: 15184 - DNA, 25 bp, Saccharomyces pastorianus
aatgcatttgataaccacgaccaag

SEQ ID NO: 15185 - DNA, 25 bp, Saccharomyces pastorianus
gtgccgccccaaacgctaagaaaag

SEQ ID NO: 15186 - DNA, 25 bp, Saccharomyces pastorianus
agcagcaccacagcaagcatactat

SEQ ID NO: 15187 - DNA, 25 bp, Saccharomyces pastorianus
tgatgacaatggtggtgacttcgac

SEQ ID NO: 15188 - DNA, 25 bp, Saccharomyces pastorianus
agctcagcaagctcgctactatcag

SEQ ID NO: 15189 - DNA, 25 bp, Saccharomyces pastorianus
acgtccaaagaatcgcagcctacat

SEQ ID NO: 15190 - DNA, 25 bp, Saccharomyces pastorianus
ccttcttcgtcctcgatgaagtgga

SEQ ID NO: 15191 - DNA, 25 bp, Saccharomyces pastorianus
aagacttttgactacgtgagtgacc

SEQ ID NO: 15192 - DNA, 25 bp, Saccharomyces pastorianus
tactattcgctatcaactcttacca

SEQ ID NO: 15193 - DNA, 25 bp, Saccharomyces pastorianus
ggacctccagttcattgtcatttcg

SEQ ID NO: 15194 - DNA, 25 bp, Saccharomyces pastorianus
atgttcgaaaagtctgacgccctcg

SEQ ID NO: 15195 - DNA, 25 bp, Saccharomyces pastorianus
gcggcaatgcctctttgaccattga

SEQ ID NO: 15196 - DNA, 25 bp, Saccharomyces pastorianus
agacgaggacgaaccattcaatgcg

SEQ ID NO: 15197 - DNA, 25 bp, Saccharomyces pastorianus
gtgagtgaccatttagatgcgatct

SEQ ID NO: 15198 - DNA, 25 bp, Saccharomyces pastorianus
gatgcgatctacagagagctaacca

SEQ ID NO: 15199 - DNA, 25 bp, Saccharomyces pastorianus
atgaagtggacgcagctctcgacat

SEQ ID NO: 15200 - DNA, 25 bp, Saccharomyces pastorianus
accaccatcggtattgacttcaaga

SEQ ID NO: 15201 - DNA, 25 bp, Saccharomyces pastorianus
tgagtccagtgccaagaacgatgat

SEQ ID NO: 15202 - DNA, 25 bp, Saccharomyces pastorianus
aagcgcaactgctgttggtcggtaa

SEQ ID NO: 15203 - DNA, 25 bp, Saccharomyces pastorianus
tgcaactttgggacactgcgggcca

SEQ ID NO: 15204 - DNA, 25 bp, Saccharomyces pastorianus
tgacagctgatcagggtgaggcctt

SEQ ID NO: 15205 - DNA, 25 bp, Saccharomyces pastorianus
aaacttgtcggcgttggcaatggta

SEQ ID NO: 15206 - DNA, 25 bp, Saccharomyces pastorianus
ataccatttattgagtccagtgcca

SEQ ID NO: 15207 - DNA, 25 bp, Saccharomyces pastorianus
gaacgggaagagctacgactctatt

SEQ ID NO: 15208 - DNA, 25 bp, Saccharomyces pastorianus
aagacaaattcaacccctcattcat

SEQ ID NO: 15209 - DNA, 25 bp, Saccharomyces pastorianus
agattttactgattggtgattccgg

SEQ ID NO: 15210 - DNA, 25 bp, Saccharomyces pastorianus
aatcttcttcacattggctaggttg

SEQ ID NO: 15211 - DNA, 25 bp, Saccharomyces pastorianus
caggaaggagttttctcaggaaact

SEQ ID NO: 15212 - DNA, 25 bp, Saccharomyces pastorianus
atcattctgcaagttccatttttag

SEQ ID NO: 15213 - DNA, 25 bp, Saccharomyces pastorianus
tttagcttggtcagataaaacctca

SEQ ID NO: 15214 - DNA, 25 bp, Saccharomyces pastorianus
gttccatttttagacttcaatcgtt

SEQ ID NO: 15215 - DNA, 25 bp, Saccharomyces pastorianus
gaggagggacatattcaagaggact

SEQ ID NO: 15216 - DNA, 25 bp, Saccharomyces pastorianus
ttgcaaaaatgtatggtctcttccg

SEQ ID NO: 15217 - DNA, 25 bp, Saccharomyces pastorianus
ggtggatcctccgattaatattaat

SEQ ID NO: 15218 - DNA, 25 bp, Saccharomyces pastorianus
aggaaactggctggtggatcctccg

SEQ ID NO: 15219 - DNA, 25 bp, Saccharomyces pastorianus
gactggaaagagattgtcttgcaaa

SEQ ID NO: 15220 - DNA, 25 bp, Saccharomyces pastorianus
aaatatctaactactgaaaaccagg

SEQ ID NO: 15221 - DNA, 25 bp, Saccharomyces pastorianus
atggtctcttccgtttacctcgaat

SEQ ID NO: 15222 - DNA, 25 bp, Saccharomyces pastorianus
gaaattgtcttgtgcctgcttgata

SEQ ID NO: 15223 - DNA, 25 bp, Saccharomyces pastorianus
ttccttgtcggccaaacgcatgaag

SEQ ID NO: 15224 - DNA, 25 bp, Saccharomyces pastorianus
aaagcccgtttacgatatggcggat

SEQ ID NO: 15225 - DNA, 25 bp, Saccharomyces pastorianus
aagagcctgcaaccgacgatcataa

SEQ ID NO: 15226 - DNA, 25 bp, Saccharomyces pastorianus
gcggctgaggcgttaacattacact

SEQ ID NO: 15227 - DNA, 25 bp, Saccharomyces pastorianus
gatattttgcctacagcagatgcta

SEQ ID NO: 15228 - DNA, 25 bp, Saccharomyces pastorianus
ttcccgtttctgatactttctactg

SEQ ID NO: 15229 - DNA, 25 bp, Saccharomyces pastorianus
ttgttatacgattgcacctttcctc

SEQ ID NO: 15230 - DNA, 25 bp, Saccharomyces pastorianus
tgagtgcagagattcttcccgtttc

SEQ ID NO: 15231 - DNA, 25 bp, Saccharomyces pastorianus
tgggttgaaggccactgtttccaac

SEQ ID NO: 15232 - DNA, 25 bp, Saccharomyces pastorianus
gcgattaagtttacgacggcggctg

SEQ ID NO: 15233 - DNA, 25 bp, Saccharomyces pastorianus
tggaattattggacttactcccctt

SEQ ID NO: 15234 - DNA, 25 bp, Saccharomyces pastorianus
ttactcccctttacagacgaactgt

SEQ ID NO: 15235 - DNA, 25 bp, Saccharomyces pastorianus
cagccgttgattggacccgatgata

SEQ ID NO: 15236 - DNA, 25 bp, Saccharomyces pastorianus
cggcatatcgaagcagatccacatt

SEQ ID NO: 15237 - DNA, 25 bp, Saccharomyces pastorianus
gaaggcccaggacttttctagtcta

SEQ ID NO: 15238 - DNA, 25 bp, Saccharomyces pastorianus
gttgctcttgaacatttccagaatt

SEQ ID NO: 15239 - DNA, 25 bp, Saccharomyces pastorianus
agcaactctgttttgctggccagaa

SEQ ID NO: 15240 - DNA, 25 bp, Saccharomyces pastorianus
tggttcgtactttgaacggcagcaa

SEQ ID NO: 15241 - DNA, 25 bp, Saccharomyces pastorianus
gtatcctgttgtatcaactcgctga

SEQ ID NO: 15242 - DNA, 25 bp, Saccharomyces pastorianus
gagtgatacgctcagtgcctcagat

SEQ ID NO: 15243 - DNA, 25 bp, Saccharomyces pastorianus
agtgcctcagatttggaccagccgt

SEQ ID NO: 15244 - DNA, 25 bp, Saccharomyces pastorianus
aaagagatcatatagccccaacgcc

SEQ ID NO: 15245 - DNA, 25 bp, Saccharomyces pastorianus
atcttcgtcatcatcagagtctgaa

SEQ ID NO: 15246 - DNA, 25 bp, Saccharomyces pastorianus
aagaggtaccggcagttttgcaact

SEQ ID NO: 15247 - DNA, 25 bp, Saccharomyces pastorianus
agaggcaaggtccacgagacacaat

SEQ ID NO: 15248 - DNA, 25 bp, Saccharomyces pastorianus
gaagatcggaaagacgccatcgtaa

SEQ ID NO: 15249 - DNA, 25 bp, Saccharomyces pastorianus
gtgcaaccatccgtcagatcatgat

SEQ ID NO: 15250 - DNA, 25 bp, Saccharomyces pastorianus
aagatctgctgtattttccatccgc

SEQ ID NO: 15251 - DNA, 25 bp, Saccharomyces pastorianus
aacgcctatgaattccaaccagatt

SEQ ID NO: 15252 - DNA, 25 bp, Saccharomyces pastorianus
aaggatcttgatttcgacgaacgta

SEQ ID NO: 15253 - DNA, 25 bp, Saccharomyces pastorianus
tgggatcggaacaacaacagactgc

SEQ ID NO: 15254 - DNA, 25 bp, Saccharomyces pastorianus
ttttgcaactgcgagctacacaaga

SEQ ID NO: 15255 - DNA, 25 bp, Saccharomyces pastorianus
gaaacggctgatgaaactctggaaa

SEQ ID NO: 15256 - DNA, 25 bp, Saccharomyces pastorianus
aaataacattgtttcggtgctgacg

SEQ ID NO: 15257 - DNA, 25 bp, Saccharomyces pastorianus
ggttgattgacaccggtgcattgat

SEQ ID NO: 15258 - DNA, 25 bp, Saccharomyces pastorianus
acatcctgggttcggttgttggcta

SEQ ID NO: 15259 - DNA, 25 bp, Saccharomyces pastorianus
gattatcacaagaccccacaagaga

SEQ ID NO: 15260 - DNA, 25 bp, Saccharomyces pastorianus
aagagtctaatttggctgcgacaaa

SEQ ID NO: 15261 - DNA, 25 bp, Saccharomyces pastorianus
aagtcgtcattgatgcctttaggtt

SEQ ID NO: 15262 - DNA, 25 bp, Saccharomyces pastorianus
gttgttggctatcatccgtagatgt

SEQ ID NO: 15263 - DNA, 25 bp, Saccharomyces pastorianus
tgttaacacccaaaaatccttcgag

SEQ ID NO: 15264 - DNA, 25 bp, Saccharomyces pastorianus
atattcaagctttgattcacggtct

SEQ ID NO: 15265 - DNA, 25 bp, Saccharomyces pastorianus
gttgtcgggtggtaccattcacatc

SEQ ID NO: 15266 - DNA, 25 bp, Saccharomyces pastorianus
tatgagaccgttcttgatatgcaga

SEQ ID NO: 15267 - DNA, 25 bp, Saccharomyces pastorianus
ggttattacgaatgagccgggctgc

SEQ ID NO: 15268 - DNA, 25 bp, Saccharomyces pastorianus
aaatacatgtacgtcggcggtgtga

SEQ ID NO: 15269 - DNA, 25 bp, Saccharomyces pastorianus
taaaatcttcaggagcagggcttct

SEQ ID NO: 15270 - DNA, 25 bp, Saccharomyces pastorianus
gggacgacttgcatgcattgacaca

SEQ ID NO: 15271 - DNA, 25 bp, Saccharomyces pastorianus
gccgggctgctattttaatgagttt

SEQ ID NO: 15272 - DNA, 25 bp, Saccharomyces pastorianus
tatccccacggcttaggccatatgt

SEQ ID NO: 15273 - DNA, 25 bp, Saccharomyces pastorianus
tgatgtccacgacgttgccggtaat

SEQ ID NO: 15274 - DNA, 25 bp, Saccharomyces pastorianus
agcagggcttcttgtgccttttatc

SEQ ID NO: 15275 - DNA, 25 bp, Saccharomyces pastorianus
acttgactggcataacttctgaccc

SEQ ID NO: 15276 - DNA, 25 bp, Saccharomyces pastorianus
aggatccgccgtactctgaaggaaa

SEQ ID NO: 15277 - DNA, 25 bp, Saccharomyces pastorianus
gggttcaaccatgccttaaaagatc

SEQ ID NO: 15278 - DNA, 25 bp, Saccharomyces pastorianus
acaggagccctacttgtctacaaga

SEQ ID NO: 15279 - DNA, 25 bp, Saccharomyces pastorianus
gaattttagccaagacatccctctg

SEQ ID NO: 15280 - DNA, 25 bp, Saccharomyces pastorianus
tcgaaaatcctgaggctgcccataa

SEQ ID NO: 15281 - DNA, 25 bp, Saccharomyces pastorianus
aatcaggcttggtgacaactcttca

SEQ ID NO: 15282 - DNA, 25 bp, Saccharomyces pastorianus
gatcagtcggccctcgataatatta

SEQ ID NO: 15283 - DNA, 25 bp, Saccharomyces pastorianus
gcaaggccccttcgtatgataaatc

SEQ ID NO: 15284 - DNA, 25 bp, Saccharomyces pastorianus
actccggaccaatactgcatttcga

SEQ ID NO: 15285 - DNA, 25 bp, Saccharomyces pastorianus
ttcgccaccgacttttgacagtaat

SEQ ID NO: 15286 - DNA, 25 bp, Saccharomyces pastorianus
ggatggattccatttgtctcgaaga

SEQ ID NO: 15287 - DNA, 25 bp, Saccharomyces pastorianus
agacttttagccaagcggttcctga

SEQ ID NO: 15288 - DNA, 25 bp, Saccharomyces pastorianus
tggatactaccggtctagatgcctt

SEQ ID NO: 15289 - DNA, 25 bp, Saccharomyces pastorianus
aatgcaactgttgtccggtggtcaa

SEQ ID NO: 15290 - DNA, 25 bp, Saccharomyces pastorianus
gtcatttgggttcgtttggtatcac

SEQ ID NO: 15291 - DNA, 25 bp, Saccharomyces pastorianus
tagatgccttggtggatgccttgaa

SEQ ID NO: 15292 - DNA, 25 bp, Saccharomyces pastorianus
gatgtctaattctttcccaggtaag

SEQ ID NO: 15293 - DNA, 25 bp, Saccharomyces pastorianus
ggatttgaacacttctgccgtggat

SEQ ID NO: 15294 - DNA, 25 bp, Saccharomyces pastorianus
acccacatatcttggttctggatga

SEQ ID NO: 15295 - DNA, 25 bp, Saccharomyces pastorianus
tccgttattaactctgtctgcaagg

SEQ ID NO: 15296 - DNA, 25 bp, Saccharomyces pastorianus
aattgcgcttgtgggtgctaacggt

SEQ ID NO: 15297 - DNA, 25 bp, Saccharomyces pastorianus
gtattggttacttcacgcaacatca

SEQ ID NO: 15298 - DNA, 25 bp, Saccharomyces pastorianus
gcgtttgctgccttgtgtctaaaca

SEQ ID NO: 15299 - DNA, 25 bp, Saccharomyces pastorianus
atacgataaccaaatggcttacaga

SEQ ID NO: 15300 - DNA, 25 bp, Saccharomyces pastorianus
tccccacctattattcaactacaag

SEQ ID NO: 15301 - DNA, 25 bp, Saccharomyces pastorianus
attatccccacctattattcaacta

SEQ ID NO: 15302 - DNA, 25 bp, Saccharomyces pastorianus
ccagaacaggacaaaaccgttgatt

SEQ ID NO: 15303 - DNA, 25 bp, Saccharomyces pastorianus
cgtgaatacgataaccaaatggctt

SEQ ID NO: 15304 - DNA, 25 bp, Saccharomyces pastorianus
tcccgttttggaaccaccagaacag

SEQ ID NO: 15305 - DNA, 25 bp, Saccharomyces pastorianus
gaatgtgataaattatccccaccta

SEQ ID NO: 15306 - DNA, 25 bp, Saccharomyces pastorianus
gcatttgcaagagtttatcgacaag

SEQ ID NO: 15307 - DNA, 25 bp, Saccharomyces pastorianus
cgacaagtatagatacaatgctgcc

SEQ ID NO: 15308 - DNA, 25 bp, Saccharomyces pastorianus
gcaagagtttatcgacaagtataga

SEQ ID NO: 15309 - DNA, 25 bp, Saccharomyces pastorianus
ttttggaaccaccagaacaggacaa

SEQ ID NO: 15310 - DNA, 25 bp, Saccharomyces pastorianus
gaagctaaccttatttgatcaacta

SEQ ID NO: 15311 - DNA, 25 bp, Saccharomyces pastorianus
tatacactccacaaactcagatcga

SEQ ID NO: 15312 - DNA, 25 bp, Saccharomyces pastorianus
cttccaaagtgggtacaggtgctga

SEQ ID NO: 15313 - DNA, 25 bp, Saccharomyces pastorianus
gatgccactgatggagtgtcgtcaa

SEQ ID NO: 15314 - DNA, 25 bp, Saccharomyces pastorianus
actcagatcgatttttcgcagtcct

SEQ ID NO: 15315 - DNA, 25 bp, Saccharomyces pastorianus
gaatggccagatcgagtctttaaat

SEQ ID NO: 15316 - DNA, 25 bp, Saccharomyces pastorianus
ttcgcagtccttagtatctcaattg

SEQ ID NO: 15317 - DNA, 25 bp, Saccharomyces pastorianus
gagagtactttgaacaattccctat

SEQ ID NO: 15318 - DNA, 25 bp, Saccharomyces pastorianus
ctgagtgccttttggccaatagagg

SEQ ID NO: 15319 - DNA, 25 bp, Saccharomyces pastorianus
aggtcgctcaaaggctatctgactt

SEQ ID NO: 15320 - DNA, 25 bp, Saccharomyces pastorianus
gtgccaagagcaagtccgataccaa

SEQ ID NO: 15321 - DNA, 25 bp, Saccharomyces pastorianus
tgtgtcacgattcagcaacattgtt

SEQ ID NO: 15322 - DNA, 25 bp, Saccharomyces pastorianus
tactgctgattctaatccctcttta

SEQ ID NO: 15323 - DNA, 25 bp, Saccharomyces pastorianus
ttcaaactcttttaccacgatacgc

SEQ ID NO: 15324 - DNA, 25 bp, Saccharomyces pastorianus
gaagcaccaccggttgagcagaaac

SEQ ID NO: 15325 - DNA, 25 bp, Saccharomyces pastorianus
atacgccttctttggcgcatgatgt

SEQ ID NO: 15326 - DNA, 25 bp, Saccharomyces pastorianus
gtgatttctatttcattcttcgtga

SEQ ID NO: 15327 - DNA, 25 bp, Saccharomyces pastorianus
atccctctttaaatacgaatccact

SEQ ID NO: 15328 - DNA, 25 bp, Saccharomyces pastorianus
gatgcaaaatacaactccgcgagaa

SEQ ID NO: 15329 - DNA, 25 bp, Saccharomyces pastorianus
aattcctggaattcttagactgtaa

SEQ ID NO: 15330 - DNA, 25 bp, Saccharomyces pastorianus
catgatgtcgcgcagggtaaaaata

SEQ ID NO: 15331 - DNA, 25 bp, Saccharomyces pastorianus
gaaagcgccgtggttaccgaagcac

SEQ ID NO: 15332 - DNA, 25 bp, Saccharomyces pastorianus
gtagagcttacccagaccagttcaa

SEQ ID NO: 15333 - DNA, 25 bp, Saccharomyces pastorianus
ggttccctcaatcacaacaaacgtt

SEQ ID NO: 15334 - DNA, 25 bp, Saccharomyces pastorianus
cgtttccgggtttggtgcctatatg

SEQ ID NO: 15335 - DNA, 25 bp, Saccharomyces pastorianus
gattgccagacctctaagtgtacct

SEQ ID NO: 15336 - DNA, 25 bp, Saccharomyces pastorianus
atatgaatacccttgccggtggtaa

SEQ ID NO: 15337 - DNA, 25 bp, Saccharomyces pastorianus
gaatctgtggagcaattagccgact

SEQ ID NO: 15338 - DNA, 25 bp, Saccharomyces pastorianus
taagtgtacctggatctcccaaggt

SEQ ID NO: 15339 - DNA, 25 bp, Saccharomyces pastorianus
gaaccgagagactatctgatctgtt

SEQ ID NO: 15340 - DNA, 25 bp, Saccharomyces pastorianus
gacaattgggtcttcgtagagctta

SEQ ID NO: 15341 - DNA, 25 bp, Saccharomyces pastorianus
tacacgccggcagaatgtaccgtta

SEQ ID NO: 15342 - DNA, 25 bp, Saccharomyces pastorianus
tatcgtggaccgtcgtttcaaagcc

SEQ ID NO: 15343 - DNA, 25 bp, Saccharomyces pastorianus
gtctcggagtcttcctcgggagcag

SEQ ID NO: 15344 - DNA, 25 bp, Saccharomyces pastorianus
tccggaacaagtgaccagccaatct

SEQ ID NO: 15345 - DNA, 25 bp, Saccharomyces pastorianus
gaataccatccacaacttgcagtac

SEQ ID NO: 15346 - DNA, 25 bp, Saccharomyces pastorianus
aatcttcaagagctcgttcctcaac

SEQ ID NO: 15347 - DNA, 25 bp, Saccharomyces pastorianus
aacgactcggacatgagccacgcgg

SEQ ID NO: 15348 - DNA, 25 bp, Saccharomyces pastorianus
taactacatggacgcactcagttcc

SEQ ID NO: 15349 - DNA, 25 bp, Saccharomyces pastorianus
gttcctcaacaacggcagcggtaac

SEQ ID NO: 15350 - DNA, 25 bp, Saccharomyces pastorianus
gcaagctacgccaggtcgcaggact

SEQ ID NO: 15351 - DNA, 25 bp, Saccharomyces pastorianus
gccacgcaggaagtcgtcctttaag

SEQ ID NO: 15352 - DNA, 25 bp, Saccharomyces pastorianus
aacaacactaggattcctcgcgacg

SEQ ID NO: 15353 - DNA, 25 bp, Saccharomyces pastorianus
agacggcggtccactaactacatgg

SEQ ID NO: 15354 - DNA, 25 bp, Saccharomyces pastorianus
taagttcgcgccaagttattttgaa

SEQ ID NO: 15355 - DNA, 25 bp, Saccharomyces pastorianus
gggcctctgtctggaatgacacttt

SEQ ID NO: 15356 - DNA, 25 bp, Saccharomyces pastorianus
gttccatgatttaccaacaactttg

SEQ ID NO: 15357 - DNA, 25 bp, Saccharomyces pastorianus
ataaaaagcttctgagggcctctgt

SEQ ID NO: 15358 - DNA, 25 bp, Saccharomyces pastorianus
gaatgtcatggattactctctagtc

SEQ ID NO: 15359 - DNA, 25 bp, Saccharomyces pastorianus
gaaaagttctatatcgagctctaaa

SEQ ID NO: 15360 - DNA, 25 bp, Saccharomyces pastorianus
tagacatgtcgagcaaacgggcaaa

SEQ ID NO: 15361 - DNA, 25 bp, Saccharomyces pastorianus
aacagcctacggttgtaacacctag

SEQ ID NO: 15362 - DNA, 25 bp, Saccharomyces pastorianus
cacccatccatgtccgtgaatatga

SEQ ID NO: 15363 - DNA, 25 bp, Saccharomyces pastorianus
ggagccagtgtaatcaaacagccta

SEQ ID NO: 15364 - DNA, 25 bp, Saccharomyces pastorianus
gagtacatttacgaatcacccatcc

SEQ ID NO: 15365 - DNA, 25 bp, Saccharomyces pastorianus
ggttacctgtacaacttcgtcatgg

SEQ ID NO: 15366 - DNA, 25 bp, Saccharomyces pastorianus
tacttggcggttacaggttcctcca

SEQ ID NO: 15367 - DNA, 25 bp, Saccharomyces pastorianus
ggaacactcgatgggcagcaacaga

SEQ ID NO: 15368 - DNA, 25 bp, Saccharomyces pastorianus
agagaaccgtacgtggacgcgtcaa

SEQ ID NO: 15369 - DNA, 25 bp, Saccharomyces pastorianus
atcaaagtcacctcactcttggaat

SEQ ID NO: 15370 - DNA, 25 bp, Saccharomyces pastorianus
gattcccatcagagttgtttcgtcg

SEQ ID NO: 15371 - DNA, 25 bp, Saccharomyces pastorianus
gctgatgactcgtcgttggacacta

SEQ ID NO: 15372 - DNA, 25 bp, Saccharomyces pastorianus
gacgaattcccatgtgatgaccata

SEQ ID NO: 15373 - DNA, 25 bp, Saccharomyces pastorianus
gcgtctttgaaactccccattgaga

SEQ ID NO: 15374 - DNA, 25 bp, Saccharomyces pastorianus
gacacgtcagaatacccggaacttt

SEQ ID NO: 15375 - DNA, 25 bp, Saccharomyces pastorianus
cggatgatacgctactcttctcaga

SEQ ID NO: 15376 - DNA, 25 bp, Saccharomyces pastorianus
attggtgaagacttacctcccactt

SEQ ID NO: 15377 - DNA, 25 bp, Saccharomyces pastorianus
tagtttccattcttccagttttagg

SEQ ID NO: 15378 - DNA, 25 bp, Saccharomyces pastorianus
ggaacatctcttaatacgcttggtg

SEQ ID NO: 15379 - DNA, 25 bp, Saccharomyces pastorianus
atcacccgttttgctttcaagatca

SEQ ID NO: 15380 - DNA, 25 bp, Saccharomyces pastorianus
agaacacttctagcctcaacaacag

SEQ ID NO: 15381 - DNA, 25 bp, Saccharomyces pastorianus
attatcgccgttattaaatgtcccg

SEQ ID NO: 15382 - DNA, 25 bp, Saccharomyces pastorianus
agtacctccgagcttgaattatctg

SEQ ID NO: 15383 - DNA, 25 bp, Saccharomyces pastorianus
gctaatgacgtgctaccagtacctc

SEQ ID NO: 15384 - DNA, 25 bp, Saccharomyces pastorianus
caatggctccaggtgtagttctagt

SEQ ID NO: 15385 - DNA, 25 bp, Saccharomyces pastorianus
ctcccacttatttctgttcgataca

SEQ ID NO: 15386 - DNA, 25 bp, Saccharomyces pastorianus
gcttcccctatctcgataatcaatg

SEQ ID NO: 15387 - DNA, 25 bp, Saccharomyces pastorianus
gagcatcgttataacatcctgggaa

SEQ ID NO: 15388 - DNA, 25 bp, Saccharomyces pastorianus
aaaccagcgatttgaactcctcaca

SEQ ID NO: 15389 - DNA, 25 bp, Saccharomyces pastorianus
gcgagagctccttcatcaatgagta

SEQ ID NO: 15390 - DNA, 25 bp, Saccharomyces pastorianus
cttccgcttattctgggtacattaa

SEQ ID NO: 15391 - DNA, 25 bp, Saccharomyces pastorianus
gtgaaaacacttccgcttattctgg

SEQ ID NO: 15392 - DNA, 25 bp, Saccharomyces pastorianus
gagcagtccctatcacgaaggtgtt

SEQ ID NO: 15393 - DNA, 25 bp, Saccharomyces pastorianus
aatatcaggcctttcaagattcaaa

SEQ ID NO: 15394 - DNA, 25 bp, Saccharomyces pastorianus
atcacgatgattacgggatccggaa

SEQ ID NO: 15395 - DNA, 25 bp, Saccharomyces pastorianus
acaagttaccccatactaccattat

SEQ ID NO: 15396 - DNA, 25 bp, Saccharomyces pastorianus
tactaccattattcacaaaccagcg

SEQ ID NO: 15397 - DNA, 25 bp, Saccharomyces pastorianus
gaactcctcacagtatgctgcgaga

SEQ ID NO: 15398 - DNA, 25 bp, Saccharomyces pastorianus
acttttcttgctgtcttacttccat

SEQ ID NO: 15399 - DNA, 25 bp, Saccharomyces pastorianus
agtggcatgctggtggatcctaaaa

SEQ ID NO: 15400 - DNA, 25 bp, Saccharomyces pastorianus
agttccaattgcctcgttagacgtc

SEQ ID NO: 15401 - DNA, 25 bp, Saccharomyces pastorianus
ggtgtaccaccgcagaaagtgccat

SEQ ID NO: 15402 - DNA, 25 bp, Saccharomyces pastorianus
ttcaagttgtttctacccagtggca

SEQ ID NO: 15403 - DNA, 25 bp, Saccharomyces pastorianus
aatggccggacgtatacgacgcagt

SEQ ID NO: 15404 - DNA, 25 bp, Saccharomyces pastorianus
attcgttgcattccctcaatgacaa

SEQ ID NO: 15405 - DNA, 25 bp, Saccharomyces pastorianus
ggccatttcgacctgttcaagttgt

SEQ ID NO: 15406 - DNA, 25 bp, Saccharomyces pastorianus
tagacgtcatcaaccaatggccgga

SEQ ID NO: 15407 - DNA, 25 bp, Saccharomyces pastorianus
gtaaggccgtttgcgacctggtcaa

SEQ ID NO: 15408 - DNA, 25 bp, Saccharomyces pastorianus
aacgggatccccattgactttgatc

SEQ ID NO: 15409 - DNA, 25 bp, Saccharomyces pastorianus
aatccaacggcgaagttcgagccat

SEQ ID NO: 15410 - DNA, 25 bp, Saccharomyces pastorianus
tccattgaactcctcgcctttaaaa

SEQ ID NO: 15411 - DNA, 25 bp, Saccharomyces pastorianus
gggaccactcgagtacgatgcattt

SEQ ID NO: 15412 - DNA, 25 bp, Saccharomyces pastorianus
tagcatacacgaagcgggaccactc

SEQ ID NO: 15413 - DNA, 25 bp, Saccharomyces pastorianus
aaagcatccgatcgtggacgctgga

SEQ ID NO: 15414 - DNA, 25 bp, Saccharomyces pastorianus
gaagttgtccccagaagccaggtgg

SEQ ID NO: 15415 - DNA, 25 bp, Saccharomyces pastorianus
aaaatggctcgtctattgtccacca

SEQ ID NO: 15416 - DNA, 25 bp, Saccharomyces pastorianus
gaagccaggtggcatggtcacaacc

SEQ ID NO: 15417 - DNA, 25 bp, Saccharomyces pastorianus
gaacaatgagcttaatgcgccacac

SEQ ID NO: 15418 - DNA, 25 bp, Saccharomyces pastorianus
ggtcacaacccactgatagcggcgg

SEQ ID NO: 15419 - DNA, 25 bp, Saccharomyces pastorianus
gaaaccttgggatcgcgaccaaatt

SEQ ID NO: 15420 - DNA, 25 bp, Saccharomyces pastorianus
gagatttgacaatgacgccgccacc

SEQ ID NO: 15421 - DNA, 25 bp, Saccharomyces pastorianus
gatgaatccatgcacgataccaata

SEQ ID NO: 15422 - DNA, 25 bp, Saccharomyces pastorianus
aaaaggacaacgagcgccgcaggtg

SEQ ID NO: 15423 - DNA, 25 bp, Saccharomyces pastorianus
cacctaacagccatggagcgcttaa

SEQ ID NO: 15424 - DNA, 25 bp, Saccharomyces pastorianus
ttactctaagagtccacgcagaaga

SEQ ID NO: 15425 - DNA, 25 bp, Saccharomyces pastorianus
caatgcggcggatgataccatacta

SEQ ID NO: 15426 - DNA, 25 bp, Saccharomyces pastorianus
gaggctattggtggactttacccct

SEQ ID NO: 15427 - DNA, 25 bp, Saccharomyces pastorianus
aagtttgggtgtgccacagacttcg

SEQ ID NO: 15428 - DNA, 25 bp, Saccharomyces pastorianus
atatgacttctcatgccggcaggaa

SEQ ID NO: 15429 - DNA, 25 bp, Saccharomyces pastorianus
aaacgacatcttgtctgcttcatcg

SEQ ID NO: 15430 - DNA, 25 bp, Saccharomyces pastorianus
cgagccaaccttcaacagcgaatag

SEQ ID NO: 15431 - DNA, 25 bp, Saccharomyces pastorianus
aaaagcgtccggtccattgacacgt

SEQ ID NO: 15432 - DNA, 25 bp, Saccharomyces pastorianus
gatgccaagtacctgacgtgctcca

SEQ ID NO: 15433 - DNA, 25 bp, Saccharomyces pastorianus
gaaccattcttgttgaaaccgtcgc

SEQ ID NO: 15434 - DNA, 25 bp, Saccharomyces pastorianus
tatcacgtctacagcattcaactcg

SEQ ID NO: 15435 - DNA, 25 bp, Saccharomyces pastorianus
gggaacccgaacctgatgtgtatca

SEQ ID NO: 15436 - DNA, 25 bp, Saccharomyces pastorianus
atgggtccgtctacattatgtgtgc

SEQ ID NO: 15437 - DNA, 25 bp, Saccharomyces pastorianus
ggcaacaagctatacatcctggaca

SEQ ID NO: 15438 - DNA, 25 bp, Saccharomyces pastorianus
atccacaagtgcgaaatctctccaa

SEQ ID NO: 15439 - DNA, 25 bp, Saccharomyces pastorianus
attggagtctcgcttcttgatcatc

SEQ ID NO: 15440 - DNA, 25 bp, Saccharomyces pastorianus
cttcttcgtggaggactttgcgttt

SEQ ID NO: 15441 - DNA, 25 bp, Saccharomyces pastorianus
acgaatcggccatcttgcggttcaa

SEQ ID NO: 15442 - DNA, 25 bp, Saccharomyces pastorianus
gaagcttacaaagacgccggtatca

SEQ ID NO: 15443 - DNA, 25 bp, Saccharomyces pastorianus
gtcaagattgatttggatgccgcaa

SEQ ID NO: 15444 - DNA, 25 bp, Saccharomyces pastorianus
atcggtgctgcattctcaagagatc

SEQ ID NO: 15445 - DNA, 25 bp, Saccharomyces pastorianus
tgatcgataacgtaggttcctttta

SEQ ID NO: 15446 - DNA, 25 bp, Saccharomyces pastorianus
ggtttggccccatttaaagcaatcg

SEQ ID NO: 15447 - DNA, 25 bp, Saccharomyces pastorianus
gttgtcgtcgattggctggataaca

SEQ ID NO: 15448 - DNA, 25 bp, Saccharomyces pastorianus
gtatatctcagacttggctatcgga

SEQ ID NO: 15449 - DNA, 25 bp, Saccharomyces pastorianus
gtgcatccaaatgaagttcacctgt

SEQ ID NO: 15450 - DNA, 25 bp, Saccharomyces pastorianus
ttcacctgttgattgttgtcgtcga

SEQ ID NO: 15451 - DNA, 25 bp, Saccharomyces pastorianus
ttccttttacttatgtggtcctact

SEQ ID NO: 15452 - DNA, 25 bp, Saccharomyces pastorianus
ggtatcatcacccatatcggtgctg

SEQ ID NO: 15453 - DNA, 25 bp, Saccharomyces pastorianus
ggatcgcaattcatagtcgtttctc

SEQ ID NO: 15454 - DNA, 25 bp, Saccharomyces pastorianus
agatgaggttgacgctgctcttgat

SEQ ID NO: 15455 - DNA, 25 bp, Saccharomyces pastorianus
gaccagcgccgatgtatatcttaga

SEQ ID NO: 15456 - DNA, 25 bp, Saccharomyces pastorianus
gaaaaggtgacactcgattttggta

SEQ ID NO: 15457 - DNA, 25 bp, Saccharomyces pastorianus
gatgtcacgcaaggtctagaagtta

SEQ ID NO: 15458 - DNA, 25 bp, Saccharomyces pastorianus
gacaaggttcaaaggatcgcaattc

SEQ ID NO: 15459 - DNA, 25 bp, Saccharomyces pastorianus
aactatcaggtggacaacgatctct

SEQ ID NO: 15460 - DNA, 25 bp, Saccharomyces pastorianus
ttcgccaaattggttccttgcaaag

SEQ ID NO: 15461 - DNA, 25 bp, Saccharomyces pastorianus
tgccgatcttttaccaaactcattc

SEQ ID NO: 15462 - DNA, 25 bp, Saccharomyces pastorianus
aacgatctctgattgccttagcatt

SEQ ID NO: 15463 - DNA, 25 bp, Saccharomyces pastorianus
tattacaattcagaccagcgccgat

SEQ ID NO: 15464 - DNA, 25 bp, Saccharomyces pastorianus
gctaagtctaagaaccataccgctc

SEQ ID NO: 15465 - DNA, 25 bp, Saccharomyces pastorianus
agtctaagaaccataccgctcacaa

SEQ ID NO: 15466 - DNA, 25 bp, Saccharomyces pastorianus
ggctcacagaaacggtatcaagaag

SEQ ID NO: 15467 - DNA, 25 bp, Saccharomyces pastorianus
tcaagaagccaaagacctacaagta

SEQ ID NO: 15468 - DNA, 25 bp, Saccharomyces pastorianus
cggtatcaagaagccaaagacctac

SEQ ID NO: 15469 - DNA, 25 bp, Saccharomyces pastorianus
aagtctaagaaccataccgctcaca

SEQ ID NO: 15470 - DNA, 25 bp, Saccharomyces pastorianus
taagtctaagaaccataccgctcac

SEQ ID NO: 15471 - DNA, 25 bp, Saccharomyces pastorianus
aaggctcacagaaacggtatcaaga

SEQ ID NO: 15472 - DNA, 25 bp, Saccharomyces pastorianus
gaaacggtatcaagaagccaaagac

SEQ ID NO: 15473 - DNA, 25 bp, Saccharomyces pastorianus
taagaaccataccgctcacaaccaa

SEQ ID NO: 15474 - DNA, 25 bp, Saccharomyces pastorianus
gtctaagaaccataccgctcacaac

SEQ ID NO: 15475 - DNA, 25 bp, Saccharomyces pastorianus
gagtttttccacctgcagcactact

SEQ ID NO: 15476 - DNA, 25 bp, Saccharomyces pastorianus
gaaggagaccgttttgcccgtcgtg

SEQ ID NO: 15477 - DNA, 25 bp, Saccharomyces pastorianus
aaagtgctcgtacaccactacgaag

SEQ ID NO: 15478 - DNA, 25 bp, Saccharomyces pastorianus
gcgtgttggaacttgctggtgaata

SEQ ID NO: 15479 - DNA, 25 bp, Saccharomyces pastorianus
gatgaggaggccgtcaccgatcaat

SEQ ID NO: 15480 - DNA, 25 bp, Saccharomyces pastorianus
ccgcggctgaggatgatgacaacga

SEQ ID NO: 15481 - DNA, 25 bp, Saccharomyces pastorianus
acctgcagcactacttggacacgtg

SEQ ID NO: 15482 - DNA, 25 bp, Saccharomyces pastorianus
gagcgtgtcaaggtacagcagcaac

SEQ ID NO: 15483 - DNA, 25 bp, Saccharomyces pastorianus
taccaggacctcgaccacaaggagg

SEQ ID NO: 15484 - DNA, 25 bp, Saccharomyces pastorianus
actacgaagagtgcgccgagcgtgt

SEQ ID NO: 15485 - DNA, 25 bp, Saccharomyces pastorianus
ggccgtcaccgatcaattggaagat

SEQ ID NO: 15486 - DNA, 25 bp, Saccharomyces pastorianus
ttgcaacgacaaaacggcctccgtt

SEQ ID NO: 15487 - DNA, 25 bp, Saccharomyces pastorianus
aggacgatgtgtcttccctggtcga

SEQ ID NO: 15488 - DNA, 25 bp, Saccharomyces pastorianus
tctgcatctgtctaccgacaacaat

SEQ ID NO: 15489 - DNA, 25 bp, Saccharomyces pastorianus
gatgaagttcttccaaagcaaaaac

SEQ ID NO: 15490 - DNA, 25 bp, Saccharomyces pastorianus
tactctgcagctcagccaggacgat

SEQ ID NO: 15491 - DNA, 25 bp, Saccharomyces pastorianus
gacgatatggcttcttgcaacgaca

SEQ ID NO: 15492 - DNA, 25 bp, Saccharomyces pastorianus
ttccctggtcgatgatctcaacgag

SEQ ID NO: 15493 - DNA, 25 bp, Saccharomyces pastorianus
tacgctccaacacggacgtccaaga

SEQ ID NO: 15494 - DNA, 25 bp, Saccharomyces pastorianus
tcacaaaacgttgtcgacgacgacg

SEQ ID NO: 15495 - DNA, 25 bp, Saccharomyces pastorianus
aggatcctatcctctctgcatctgt

SEQ ID NO: 15496 - DNA, 25 bp, Saccharomyces pastorianus
gttgcacacaacaggatcctatcct

SEQ ID NO: 15497 - DNA, 25 bp, Saccharomyces pastorianus
tagactcaggcatacagctggtgga

SEQ ID NO: 15498 - DNA, 25 bp, Saccharomyces pastorianus
agtggcgcgtctgggtccaaactga

SEQ ID NO: 15499 - DNA, 25 bp, Saccharomyces pastorianus
cgaagctgtgtgatctggagacgca

SEQ ID NO: 15500 - DNA, 25 bp, Saccharomyces pastorianus
gaccggttatcgttgagcaagcaga

SEQ ID NO: 15501 - DNA, 25 bp, Saccharomyces pastorianus
acgatgcggtcgttgcgttgttgca

SEQ ID NO: 15502 - DNA, 25 bp, Saccharomyces pastorianus
gatcctggacgttaacaagtcgctg

SEQ ID NO: 15503 - DNA, 25 bp, Saccharomyces pastorianus
gagtttgccaatcgaagacagctat

SEQ ID NO: 15504 - DNA, 25 bp, Saccharomyces pastorianus
ggagatctcgcagaagtacattcag

SEQ ID NO: 15505 - DNA, 25 bp, Saccharomyces pastorianus
gacggcaacacggtcacgggacatg

SEQ ID NO: 15506 - DNA, 25 bp, Saccharomyces pastorianus
ttcacgaggtggttggctcgcaact

SEQ ID NO: 15507 - DNA, 25 bp, Saccharomyces pastorianus
aagagcgaccacagcagtggcgcgt

SEQ ID NO: 15508 - DNA, 25 bp, Saccharomyces pastorianus
gacactttaaacaagccttcattga

SEQ ID NO: 15509 - DNA, 25 bp, Saccharomyces pastorianus
gagagattgaacttggctacccaaa

SEQ ID NO: 15510 - DNA, 25 bp, Saccharomyces pastorianus
acctgcctcggtatggaacgttact

SEQ ID NO: 15511 - DNA, 25 bp, Saccharomyces pastorianus
gtgatgtctacgttatagagcctga

SEQ ID NO: 15512 - DNA, 25 bp, Saccharomyces pastorianus
gggtttcccaactatgattttcaca

SEQ ID NO: 15513 - DNA, 25 bp, Saccharomyces pastorianus
tttaccagggtcaagcccaagacgt

SEQ ID NO: 15514 - DNA, 25 bp, Saccharomyces pastorianus
aagacctctgtgaagaagggccaaa

SEQ ID NO: 15515 - DNA, 25 bp, Saccharomyces pastorianus
gacgtggtttatattggctttcata

SEQ ID NO: 15516 - DNA, 25 bp, Saccharomyces pastorianus
gaaacattgatctctccagacactt

SEQ ID NO: 15517 - DNA, 25 bp, Saccharomyces pastorianus
agatttattggcactaccgtggaag

SEQ ID NO: 15518 - DNA, 25 bp, Saccharomyces pastorianus
ggctacccaaattctttccaatggt

SEQ ID NO: 15519 - DNA, 25 bp, Saccharomyces pastorianus
gtcgttatcgcaagcatactgtcat

SEQ ID NO: 15520 - DNA, 25 bp, Saccharomyces pastorianus
tatgcagcattattcacgcggtggc

SEQ ID NO: 15521 - DNA, 25 bp, Saccharomyces pastorianus
tagggttgttctactagcatacttc

SEQ ID NO: 15522 - DNA, 25 bp, Saccharomyces pastorianus
gatatacttgatgctttgctcgagc

SEQ ID NO: 15523 - DNA, 25 bp, Saccharomyces pastorianus
atcctattccagcttcatcatttgt

SEQ ID NO: 15524 - DNA, 25 bp, Saccharomyces pastorianus
ggaaagccaacacctttatcacgtt

SEQ ID NO: 15525 - DNA, 25 bp, Saccharomyces pastorianus
gaactatcattctactccaacatta

SEQ ID NO: 15526 - DNA, 25 bp, Saccharomyces pastorianus
tcgtggaaacactttggctgcttaa

SEQ ID NO: 15527 - DNA, 25 bp, Saccharomyces pastorianus
gctgatactaatgcccttggtggga

SEQ ID NO: 15528 - DNA, 25 bp, Saccharomyces pastorianus
tatcacgttgcccattttatatttg

SEQ ID NO: 15529 - DNA, 25 bp, Saccharomyces pastorianus
gccacaagtttcctatatgcagcat

SEQ ID NO: 15530 - DNA, 25 bp, Saccharomyces pastorianus
acctggctttgggagggatcgcaca

SEQ ID NO: 15531 - DNA, 25 bp, Saccharomyces pastorianus
gaaggactgtctgaaccattgcccg

SEQ ID NO: 15532 - DNA, 25 bp, Saccharomyces pastorianus
aagacggtgcgttcaaggatacaaa

SEQ ID NO: 15533 - DNA, 25 bp, Saccharomyces pastorianus
gcatggtcagaagtcgatccctata

SEQ ID NO: 15534 - DNA, 25 bp, Saccharomyces pastorianus
tggtccgccatacaggaagagtctt

SEQ ID NO: 15535 - DNA, 25 bp, Saccharomyces pastorianus
tcgcgcatgaattgcttcccatgga

SEQ ID NO: 15536 - DNA, 25 bp, Saccharomyces pastorianus
acgcgtttgcatgttccgacaataa

SEQ ID NO: 15537 - DNA, 25 bp, Saccharomyces pastorianus
tattacccaaccaatcatggtccgc

SEQ ID NO: 15538 - DNA, 25 bp, Saccharomyces pastorianus
gaatgttttggagacgccacctggc

SEQ ID NO: 15539 - DNA, 25 bp, Saccharomyces pastorianus
tgacgatatgttcgagctcgcgcat

SEQ ID NO: 15540 - DNA, 25 bp, Saccharomyces pastorianus
agacaatccggtacatgatcccacg

SEQ ID NO: 15541 - DNA, 25 bp, Saccharomyces pastorianus
tcttgctagcggaaaggactgcctt

SEQ ID NO: 15542 - DNA, 25 bp, Saccharomyces pastorianus
ggctaccggttccataacaaaggct

SEQ ID NO: 15543 - DNA, 25 bp, Saccharomyces pastorianus
ggactgccttaaacatccttagtag

SEQ ID NO: 15544 - DNA, 25 bp, Saccharomyces pastorianus
gtggatgtgacacccacaggtacga

SEQ ID NO: 15545 - DNA, 25 bp, Saccharomyces pastorianus
ggctggcgcggatgtcatcatgtta

SEQ ID NO: 15546 - DNA, 25 bp, Saccharomyces pastorianus
tgcttggcacgttctacaggttaca

SEQ ID NO: 15547 - DNA, 25 bp, Saccharomyces pastorianus
ttctcttggaatgtagcggtggctt

SEQ ID NO: 15548 - DNA, 25 bp, Saccharomyces pastorianus
ggacccgctaaaaacatcttgctag

SEQ ID NO: 15549 - DNA, 25 bp, Saccharomyces pastorianus
gacaatcacatttgggctaccggtt

SEQ ID NO: 15550 - DNA, 25 bp, Saccharomyces pastorianus
ccaccgcttcgcacaggattatttg

SEQ ID NO: 15551 - DNA, 25 bp, Saccharomyces pastorianus
gaaagactacacctgggttacgtcg

SEQ ID NO: 15552 - DNA, 25 bp, Saccharomyces pastorianus
aagacctccgcgttcgtaaacagag

SEQ ID NO: 15553 - DNA, 25 bp, Saccharomyces pastorianus
atccattttcgaattacctgccagg

SEQ ID NO: 15554 - DNA, 25 bp, Saccharomyces pastorianus
gttccagttcaagcccattggtgaa

SEQ ID NO: 15555 - DNA, 25 bp, Saccharomyces pastorianus
ccaatgatcaggttcgtcggtgcaa

SEQ ID NO: 15556 - DNA, 25 bp, Saccharomyces pastorianus
gtgaaacacgctcccgagatcattg

SEQ ID NO: 15557 - DNA, 25 bp, Saccharomyces pastorianus
aagagtgcgtatgagccaatgatca

SEQ ID NO: 15558 - DNA, 25 bp, Saccharomyces pastorianus
attacctgccaggttccagttcaag

SEQ ID NO: 15559 - DNA, 25 bp, Saccharomyces pastorianus
tcggtgcaagacaccctgcagtgaa

SEQ ID NO: 15560 - DNA, 25 bp, Saccharomyces pastorianus
taaaccggagtgtcagcgctagtcc

SEQ ID NO: 15561 - DNA, 25 bp, Saccharomyces pastorianus
atcattgttcatccatgtgctacca

SEQ ID NO: 15562 - DNA, 25 bp, Saccharomyces pastorianus
gatgagcttgcatccattttcgaat

SEQ ID NO: 15563 - DNA, 25 bp, Saccharomyces pastorianus
gccatcatcgttgccggtgtagaat

SEQ ID NO: 15564 - DNA, 25 bp, Saccharomyces pastorianus
tactaggtgttacatattcctcccc

SEQ ID NO: 15565 - DNA, 25 bp, Saccharomyces pastorianus
tacgggtcccttctaaggttcaatg

SEQ ID NO: 15566 - DNA, 25 bp, Saccharomyces pastorianus
ggcgcacatggctaatccactgtta

SEQ ID NO: 15567 - DNA, 25 bp, Saccharomyces pastorianus
gaagtttctccttggctataatcga

SEQ ID NO: 15568 - DNA, 25 bp, Saccharomyces pastorianus
gatatccccaagacaactctacaaa

SEQ ID NO: 15569 - DNA, 25 bp, Saccharomyces pastorianus
gttgaccgagaatccgatatcccca

SEQ ID NO: 15570 - DNA, 25 bp, Saccharomyces pastorianus
atgcatacgacaatcctttggcgga

SEQ ID NO: 15571 - DNA, 25 bp, Saccharomyces pastorianus
tgagcccagccatgtcttcgaatat

SEQ ID NO: 15572 - DNA, 25 bp, Saccharomyces pastorianus
gaaagactcattcctgtgggtgaaa

SEQ ID NO: 15573 - DNA, 25 bp, Saccharomyces pastorianus
aaagctactagaagacctggtcact

SEQ ID NO: 15574 - DNA, 25 bp, Saccharomyces pastorianus
acagggcttcgatgtcaccattgaa

SEQ ID NO: 15575 - DNA, 25 bp, Saccharomyces pastorianus
taagcagtctttcctatccagtaaa

SEQ ID NO: 15576 - DNA, 25 bp, Saccharomyces pastorianus
atggccgtcgattctgtcgtcatgg

SEQ ID NO: 15577 - DNA, 25 bp, Saccharomyces pastorianus
cgcggaggccgaagtcatcaacatg

SEQ ID NO: 15578 - DNA, 25 bp, Saccharomyces pastorianus
agagttgccttacgatgtcatcacc

SEQ ID NO: 15579 - DNA, 25 bp, Saccharomyces pastorianus
ggaacttccatcagtgtcagccaaa

SEQ ID NO: 15580 - DNA, 25 bp, Saccharomyces pastorianus
agacgatgattcactggtcccattg

SEQ ID NO: 15581 - DNA, 25 bp, Saccharomyces pastorianus
gaacttactgatttggtcttcacca

SEQ ID NO: 15582 - DNA, 25 bp, Saccharomyces pastorianus
acgaggacgcgttgtacccaatgac

SEQ ID NO: 15583 - DNA, 25 bp, Saccharomyces pastorianus
gggacgtatccgctaagagcttcac

SEQ ID NO: 15584 - DNA, 25 bp, Saccharomyces pastorianus
aacgactcaggtgtgctagcattct

SEQ ID NO: 15585 - DNA, 25 bp, Saccharomyces pastorianus
acttggaggatgactcgctcttgtc

SEQ ID NO: 15586 - DNA, 25 bp, Saccharomyces pastorianus
agtagcgaccacaaactgtccgaat

SEQ ID NO: 15587 - DNA, 25 bp, Saccharomyces pastorianus
gactccttcaccgacattttgaaat

SEQ ID NO: 15588 - DNA, 25 bp, Saccharomyces pastorianus
gttttcgacagctacttcaaccaat

SEQ ID NO: 15589 - DNA, 25 bp, Saccharomyces pastorianus
agaacactgagttgtcgtacgactt

SEQ ID NO: 15590 - DNA, 25 bp, Saccharomyces pastorianus
cataaaggccctgttgttcttcaac

SEQ ID NO: 15591 - DNA, 25 bp, Saccharomyces pastorianus
atggagggctcgtaccagaaggctt

SEQ ID NO: 15592 - DNA, 25 bp, Saccharomyces pastorianus
taagtctgtacctgttgaacctgct

SEQ ID NO: 15593 - DNA, 25 bp, Saccharomyces pastorianus
gaaggcttgggatcttttgcagtct

SEQ ID NO: 15594 - DNA, 25 bp, Saccharomyces pastorianus
gccaacatctacacgtttgacttcg

SEQ ID NO: 15595 - DNA, 25 bp, Saccharomyces pastorianus
tcgtacccgatcaagctggacagat

SEQ ID NO: 15596 - DNA, 25 bp, Saccharomyces pastorianus
ggtatcaagacatccttgcccgaac

SEQ ID NO: 15597 - DNA, 25 bp, Saccharomyces pastorianus
aacttggaagacaccgacgacattt

SEQ ID NO: 15598 - DNA, 25 bp, Saccharomyces pastorianus
tgctgcgtatggtgttgatcgactt

SEQ ID NO: 15599 - DNA, 25 bp, Saccharomyces pastorianus
atacatcatggacacttcgtaccca

SEQ ID NO: 15600 - DNA, 25 bp, Saccharomyces pastorianus
ttgcccgaacgtaagctgatcagaa

SEQ ID NO: 15601 - DNA, 25 bp, Saccharomyces pastorianus
agacttgctgtctgtggtatcggtg

SEQ ID NO: 15602 - DNA, 25 bp, Saccharomyces pastorianus
gtatcggtgccatttgccaaaagag

SEQ ID NO: 15603 - DNA, 25 bp, Saccharomyces pastorianus
caagaccgggccaacaagcgtttga

SEQ ID NO: 15604 - DNA, 25 bp, Saccharomyces pastorianus
aggctacaagacaggccacattgcc

SEQ ID NO: 15605 - DNA, 25 bp, Saccharomyces pastorianus
tgtatccaggtttcaaagccgctgc

SEQ ID NO: 15606 - DNA, 25 bp, Saccharomyces pastorianus
gatggaccggtgatgccaccaacga

SEQ ID NO: 15607 - DNA, 25 bp, Saccharomyces pastorianus
gatcgtggatgactctgatttttct

SEQ ID NO: 15608 - DNA, 25 bp, Saccharomyces pastorianus
aaatcgctattttgacttcactgaa

SEQ ID NO: 15609 - DNA, 25 bp, Saccharomyces pastorianus
aaaatccccatggttcttgatggtg

SEQ ID NO: 15610 - DNA, 25 bp, Saccharomyces pastorianus
aacttatttgctgctttgaggaaag

SEQ ID NO: 15611 - DNA, 25 bp, Saccharomyces pastorianus
agtactgtggtcgatgggctatgca

SEQ ID NO: 15612 - DNA, 25 bp, Saccharomyces pastorianus
gaattaggtggcgaagcttggtctc

SEQ ID NO: 15613 - DNA, 25 bp, Saccharomyces pastorianus
cctcggccaaggtcattttgttagt

SEQ ID NO: 15614 - DNA, 25 bp, Saccharomyces pastorianus
ctggcggtttcacttatgaggagat

SEQ ID NO: 15615 - DNA, 25 bp, Saccharomyces pastorianus
atatagacattattctccctcggcc

SEQ ID NO: 15616 - DNA, 25 bp, Saccharomyces pastorianus
gaagggctggctgtcatgaacagat

SEQ ID NO: 15617 - DNA, 25 bp, Saccharomyces pastorianus
gttagtgcctaacacaagtgacacc

SEQ ID NO: 15618 - DNA, 25 bp, Saccharomyces pastorianus
gtgctatatatataccgttcttcca

SEQ ID NO: 15619 - DNA, 25 bp, Saccharomyces pastorianus
tacccaacccactaaatgcgatgca

SEQ ID NO: 15620 - DNA, 25 bp, Saccharomyces pastorianus
gaaacgtttacttactactgcaact

SEQ ID NO: 15621 - DNA, 25 bp, Saccharomyces pastorianus
gaagcctccaagaaaacgtactgat

SEQ ID NO: 15622 - DNA, 25 bp, Saccharomyces pastorianus
tggtccaccagctcaatcattgggt

SEQ ID NO: 15623 - DNA, 25 bp, Saccharomyces pastorianus
tttcaattgtctacctctgtggctg

SEQ ID NO: 15624 - DNA, 25 bp, Saccharomyces pastorianus
aactatgcagttggactttcactat

SEQ ID NO: 15625 - DNA, 25 bp, Saccharomyces pastorianus
gggtgtctgacatattactgctatt

SEQ ID NO: 15626 - DNA, 25 bp, Saccharomyces pastorianus
ctctgtggctgcgttatcgttggtc

SEQ ID NO: 15627 - DNA, 25 bp, Saccharomyces pastorianus
tgtctacggcattcaaactacccaa

SEQ ID NO: 15628 - DNA, 25 bp, Saccharomyces pastorianus
atgacttttacttgctttgttttct

SEQ ID NO: 15629 - DNA, 25 bp, Saccharomyces pastorianus
ggcctgaacagcgtcgatcttattg

SEQ ID NO: 15630 - DNA, 25 bp, Saccharomyces pastorianus
agcatcgtgccatagctcagtcagt

SEQ ID NO: 15631 - DNA, 25 bp, Saccharomyces pastorianus
ggatgcatgtgtgcttccaagcgac

SEQ ID NO: 15632 - DNA, 25 bp, Saccharomyces pastorianus
acgttccaacaatgctgcgattcgg

SEQ ID NO: 15633 - DNA, 25 bp, Saccharomyces pastorianus
agcccctcgtcgtatgtggacatga

SEQ ID NO: 15634 - DNA, 25 bp, Saccharomyces pastorianus
tggagtcacccctacaaagcgatgg

SEQ ID NO: 15635 - DNA, 25 bp, Saccharomyces pastorianus
agatggcccgctgcaagtgatcagg

SEQ ID NO: 15636 - DNA, 25 bp, Saccharomyces pastorianus
cgatgttgacattccgttttctatt

SEQ ID NO: 15637 - DNA, 25 bp, Saccharomyces pastorianus
gaaggcgagccctgtaagtgccaca

SEQ ID NO: 15638 - DNA, 25 bp, Saccharomyces pastorianus
atagacgagctagggttgcctcttc

SEQ ID NO: 15639 - DNA, 25 bp, Saccharomyces pastorianus
aatttcaacccttctggcggatgca

SEQ ID NO: 15640 - DNA, 25 bp, Saccharomyces pastorianus
tactggagcagagaagccgcctatc

SEQ ID NO: 15641 - DNA, 25 bp, Saccharomyces pastorianus
ggatacaccacaggaacttactata

SEQ ID NO: 15642 - DNA, 25 bp, Saccharomyces pastorianus
aagattgtccatttacctgaacgat

SEQ ID NO: 15643 - DNA, 25 bp, Saccharomyces pastorianus
tagtgtttccggcaaacttcttcga

SEQ ID NO: 15644 - DNA, 25 bp, Saccharomyces pastorianus
gctactcgagtacattgtccggttg

SEQ ID NO: 15645 - DNA, 25 bp, Saccharomyces pastorianus
aaaacttcatcgatcacgctactcg

SEQ ID NO: 15646 - DNA, 25 bp, Saccharomyces pastorianus
aagaacaagattcaccggtgttggt

SEQ ID NO: 15647 - DNA, 25 bp, Saccharomyces pastorianus
gaaaataaactctcacggtgatcaa

SEQ ID NO: 15648 - DNA, 25 bp, Saccharomyces pastorianus
gtccggttgacgtctttgcaaagca

SEQ ID NO: 15649 - DNA, 25 bp, Saccharomyces pastorianus
ggtgatcaagagaacgcgactactg

SEQ ID NO: 15650 - DNA, 25 bp, Saccharomyces pastorianus
agccgcctatcgaagacattacttg

SEQ ID NO: 15651 - DNA, 25 bp, Saccharomyces pastorianus
gccgcacggttagatggtacactgt

SEQ ID NO: 15652 - DNA, 25 bp, Saccharomyces pastorianus
aagagcacctgctatgctttatggt

SEQ ID NO: 15653 - DNA, 25 bp, Saccharomyces pastorianus
ctttatggtgatgcgactacttgga

SEQ ID NO: 15654 - DNA, 25 bp, Saccharomyces pastorianus
gaattcattttccttttgagttcca

SEQ ID NO: 15655 - DNA, 25 bp, Saccharomyces pastorianus
gaaacacacgaaacttaccactgta

SEQ ID NO: 15656 - DNA, 25 bp, Saccharomyces pastorianus
gaaaagacaaacgaccacctgctaa

SEQ ID NO: 15657 - DNA, 25 bp, Saccharomyces pastorianus
cttgagttcatgtgtggtcgatgca

SEQ ID NO: 15658 - DNA, 25 bp, Saccharomyces pastorianus
acaagcattatagtgccgcacggtt

SEQ ID NO: 15659 - DNA, 25 bp, Saccharomyces pastorianus
gtaaccgttgtaatgcgcagggaaa

SEQ ID NO: 15660 - DNA, 25 bp, Saccharomyces pastorianus
gatcaacaagccttggcgcgtgtat

SEQ ID NO: 15661 - DNA, 25 bp, Saccharomyces pastorianus
gatggtacactgtcgatcaacaaga

SEQ ID NO: 15662 - DNA, 25 bp, Saccharomyces pastorianus
caacgactgcgatttgtacggtgct

SEQ ID NO: 15663 - DNA, 25 bp, Saccharomyces pastorianus
agcggtgggctgagcttcatcataa

SEQ ID NO: 15664 - DNA, 25 bp, Saccharomyces pastorianus
gtttgagaacggtgcaggccattca

SEQ ID NO: 15665 - DNA, 25 bp, Saccharomyces pastorianus
gggtgccattcatcacgatgcaggt

SEQ ID NO: 15666 - DNA, 25 bp, Saccharomyces pastorianus
attcaatgggcgatcgtagctcttg

SEQ ID NO: 15667 - DNA, 25 bp, Saccharomyces pastorianus
ttcagtttacgggtactccaatttg

SEQ ID NO: 15668 - DNA, 25 bp, Saccharomyces pastorianus
tatctgttattgttgccattgccct

SEQ ID NO: 15669 - DNA, 25 bp, Saccharomyces pastorianus
aagaagctgctccattcaatctggc

SEQ ID NO: 15670 - DNA, 25 bp, Saccharomyces pastorianus
gagtgtccccgaattgatttcagtt

SEQ ID NO: 15671 - DNA, 25 bp, Saccharomyces pastorianus
caatctggctgttttacgggtatac

SEQ ID NO: 15672 - DNA, 25 bp, Saccharomyces pastorianus
ggcacaatcgtcgtatttcttgaag

SEQ ID NO: 15673 - DNA, 25 bp, Saccharomyces pastorianus
gtcgcgaagtttgaagtttgccatc

SEQ ID NO: 15674 - DNA, 25 bp, Saccharomyces pastorianus
gactatcgttgttaagatctccaaa

SEQ ID NO: 15675 - DNA, 25 bp, Saccharomyces pastorianus
aagctccccaaagacattggccaga

SEQ ID NO: 15676 - DNA, 25 bp, Saccharomyces pastorianus
gggaatcctttgcttcattgaatac

SEQ ID NO: 15677 - DNA, 25 bp, Saccharomyces pastorianus
gagaacgttatcttgtccaacataa

SEQ ID NO: 15678 - DNA, 25 bp, Saccharomyces pastorianus
ttggccagagttttgatgacatcgt

SEQ ID NO: 15679 - DNA, 25 bp, Saccharomyces pastorianus
atgacatcgtaagcatctccggcga

SEQ ID NO: 15680 - DNA, 25 bp, Saccharomyces pastorianus
tacaatttcaactacaagctcccca

SEQ ID NO: 15681 - DNA, 25 bp, Saccharomyces pastorianus
gacaccgtcaagctagctcacgaat

SEQ ID NO: 15682 - DNA, 25 bp, Saccharomyces pastorianus
gaagatcgtgccatcagatccaatt

SEQ ID NO: 15683 - DNA, 25 bp, Saccharomyces pastorianus
gggcgttatccagtgacaccgtcaa

SEQ ID NO: 15684 - DNA, 25 bp, Saccharomyces pastorianus
tatcgcggttgccattttgtacata

SEQ ID NO: 15685 - DNA, 25 bp, Saccharomyces pastorianus
ccaatcggatgacggtggtttccaa

SEQ ID NO: 15686 - DNA, 25 bp, Saccharomyces pastorianus
gaattctttgcagttactcacagac

SEQ ID NO: 15687 - DNA, 25 bp, Saccharomyces pastorianus
gggaactatgcatacctcaaaagat

SEQ ID NO: 15688 - DNA, 25 bp, Saccharomyces pastorianus
gaatgctacatatgaccaatcggat

SEQ ID NO: 15689 - DNA, 25 bp, Saccharomyces pastorianus
aattatctacttaatcggacgcaga

SEQ ID NO: 15690 - DNA, 25 bp, Saccharomyces pastorianus
ttggtacccacaatgaaccgcatgc

SEQ ID NO: 15691 - DNA, 25 bp, Saccharomyces pastorianus
cagggtatacgtcttgtgcactttc

SEQ ID NO: 15692 - DNA, 25 bp, Saccharomyces pastorianus
atgctacgcattctggtgcttgaat

SEQ ID NO: 15693 - DNA, 25 bp, Saccharomyces pastorianus
gtgcactttctactctagcattatt

SEQ ID NO: 15694 - DNA, 25 bp, Saccharomyces pastorianus
aaatttgccgatacatgctacgcat

SEQ ID NO: 15695 - DNA, 25 bp, Saccharomyces pastorianus
aatgaaattagcgtgcccgactggc

SEQ ID NO: 15696 - DNA, 25 bp, Saccharomyces pastorianus
agaccattttccatgtctcctaatg

SEQ ID NO: 15697 - DNA, 25 bp, Saccharomyces pastorianus
atacctggtatagacgcgatcccat

SEQ ID NO: 15698 - DNA, 25 bp, Saccharomyces pastorianus
taggtgacacaatttccgaactgca

SEQ ID NO: 15699 - DNA, 25 bp, Saccharomyces pastorianus
tgcgtccgaaatcctagccaagatg

SEQ ID NO: 15700 - DNA, 25 bp, Saccharomyces pastorianus
taagctcgagatgtccaacctacaa

SEQ ID NO: 15701 - DNA, 25 bp, Saccharomyces pastorianus
agaacggtgataatgctgccaacga

SEQ ID NO: 15702 - DNA, 25 bp, Saccharomyces pastorianus
aaccgggaaccaactgacatgcatg

SEQ ID NO: 15703 - DNA, 25 bp, Saccharomyces pastorianus
atgtctcctaatggcatacctggta

SEQ ID NO: 15704 - DNA, 25 bp, Saccharomyces pastorianus
aggcaaacaccgttccggcatggaa

SEQ ID NO: 15705 - DNA, 25 bp, Saccharomyces pastorianus
gatagcaatggctccatcccggaat

SEQ ID NO: 15706 - DNA, 25 bp, Saccharomyces pastorianus
attgctgaacgattcggccttagca

SEQ ID NO: 15707 - DNA, 25 bp, Saccharomyces pastorianus
ctcctttgcagtacttcttcatgaa

SEQ ID NO: 15708 - DNA, 25 bp, Saccharomyces pastorianus
gaaggcctagccaagactaacaaaa

SEQ ID NO: 15709 - DNA, 25 bp, Saccharomyces pastorianus
aaacgaagttgctcaagacgatgat

SEQ ID NO: 15710 - DNA, 25 bp, Saccharomyces pastorianus
aactagccacctatggagttccagg

SEQ ID NO: 15711 - DNA, 25 bp, Saccharomyces pastorianus
aagagggactcctttgcagtacttc

SEQ ID NO: 15712 - DNA, 25 bp, Saccharomyces pastorianus
gacaagcctaacgacatatcgatga

SEQ ID NO: 15713 - DNA, 25 bp, Saccharomyces pastorianus
gattcggccttagcaattggtgaga

SEQ ID NO: 15714 - DNA, 25 bp, Saccharomyces pastorianus
gaacgatacaagtgctcaagcttat

SEQ ID NO: 15715 - DNA, 25 bp, Saccharomyces pastorianus
aacagctgtgataatgacaagccta

SEQ ID NO: 15716 - DNA, 25 bp, Saccharomyces pastorianus
ttggtgacgccaaagaattttcttt

SEQ ID NO: 15717 - DNA, 25 bp, Saccharomyces pastorianus
ttctgcggtcagattaacccacatc

SEQ ID NO: 15718 - DNA, 25 bp, Saccharomyces pastorianus
aaagagtcaggtttcgagcacgaat

SEQ ID NO: 15719 - DNA, 25 bp, Saccharomyces pastorianus
aagaatccccagtacagagaccaag

SEQ ID NO: 15720 - DNA, 25 bp, Saccharomyces pastorianus
atcactgaccacagatgcgggttca

SEQ ID NO: 15721 - DNA, 25 bp, Saccharomyces pastorianus
gaggccatggctaactacgacagta

SEQ ID NO: 15722 - DNA, 25 bp, Saccharomyces pastorianus
ggccgtgattgtactaccccagatg

SEQ ID NO: 15723 - DNA, 25 bp, Saccharomyces pastorianus
gaacgtacaatttcccacagaacag

SEQ ID NO: 15724 - DNA, 25 bp, Saccharomyces pastorianus
gaaggacgcatacatccacagcggc

SEQ ID NO: 15725 - DNA, 25 bp, Saccharomyces pastorianus
gggcgacgaatctgccaaatccatt

SEQ ID NO: 15726 - DNA, 25 bp, Saccharomyces pastorianus
ctcaggtatcgttgtttccatgcaa

SEQ ID NO: 15727 - DNA, 25 bp, Saccharomyces pastorianus
gggttcacgttattggacctgccag

SEQ ID NO: 15728 - DNA, 25 bp, Saccharomyces pastorianus
ggcaccgtcacaaaagtgattccct

SEQ ID NO: 15729 - DNA, 25 bp, Saccharomyces pastorianus
agtccttaacttcagaattcttggg

SEQ ID NO: 15730 - DNA, 25 bp, Saccharomyces pastorianus
gcacggttccattgacacctattat

SEQ ID NO: 15731 - DNA, 25 bp, Saccharomyces pastorianus
gcacgatccaatgatgaacgcatga

SEQ ID NO: 15732 - DNA, 25 bp, Saccharomyces pastorianus
acagaccctgatcatcataatccag

SEQ ID NO: 15733 - DNA, 25 bp, Saccharomyces pastorianus
gcctcgtgctgctttgataagaaca

SEQ ID NO: 15734 - DNA, 25 bp, Saccharomyces pastorianus
aagcgagaacgtttggcattttcat

SEQ ID NO: 15735 - DNA, 25 bp, Saccharomyces pastorianus
gtgattccctatttacatactttaa

SEQ ID NO: 15736 - DNA, 25 bp, Saccharomyces pastorianus
gatacgagatgctaacagaccctga

SEQ ID NO: 15737 - DNA, 25 bp, Saccharomyces pastorianus
ctctggtacattccctaattctagt

SEQ ID NO: 15738 - DNA, 25 bp, Saccharomyces pastorianus
aaacattgagaagcctcgtgctgct

SEQ ID NO: 15739 - DNA, 25 bp, Saccharomyces pastorianus
taagtcctgtggtgtcgacgccatg

SEQ ID NO: 15740 - DNA, 25 bp, Saccharomyces pastorianus
tgacagagctaagtcctgtggtgtc

SEQ ID NO: 15741 - DNA, 25 bp, Saccharomyces pastorianus
gagctaagtcctgtggtgtcgacgc

SEQ ID NO: 15742 - DNA, 25 bp, Saccharomyces pastorianus
cgttaacttcttggtctctttgttg

SEQ ID NO: 15743 - DNA, 25 bp, Saccharomyces pastorianus
catgtctctttgtatcttcggtgat

SEQ ID NO: 15744 - DNA, 25 bp, Saccharomyces pastorianus
agaagatgttttggctaaccaaatt

SEQ ID NO: 15745 - DNA, 25 bp, Saccharomyces pastorianus
aagaccaaacatgtctctttgtatc

SEQ ID NO: 15746 - DNA, 25 bp, Saccharomyces pastorianus
tggtgtcgacgccatgtccgttgat

SEQ ID NO: 15747 - DNA, 25 bp, Saccharomyces pastorianus
gtccgttaacttcttggtctctttg

SEQ ID NO: 15748 - DNA, 25 bp, Saccharomyces pastorianus
tgatgtccgttaacttcttggtctc

SEQ ID NO: 15749 - DNA, 25 bp, Saccharomyces pastorianus
ggctaaccaaattttgatgtccgtt

SEQ ID NO: 15750 - DNA, 25 bp, Saccharomyces pastorianus
gtgtaagatcactaccgcagcatac

SEQ ID NO: 15751 - DNA, 25 bp, Saccharomyces pastorianus
gggcggatgtcaattcgcgtttaaa

SEQ ID NO: 15752 - DNA, 25 bp, Saccharomyces pastorianus
ccaatggcggtgacggtgtaagatc

SEQ ID NO: 15753 - DNA, 25 bp, Saccharomyces pastorianus
gtattacaactacgatgctaagcca

SEQ ID NO: 15754 - DNA, 25 bp, Saccharomyces pastorianus
tagaacaaccactaaacggcagaat

SEQ ID NO: 15755 - DNA, 25 bp, Saccharomyces pastorianus
gaagacctttctttacctaaagatg

SEQ ID NO: 15756 - DNA, 25 bp, Saccharomyces pastorianus
gattccgtttcattggaggatcttg

SEQ ID NO: 15757 - DNA, 25 bp, Saccharomyces pastorianus
gcagcatacccaaaatgccatgcca

SEQ ID NO: 15758 - DNA, 25 bp, Saccharomyces pastorianus
atgccaccacttcctaaacaaatgc

SEQ ID NO: 15759 - DNA, 25 bp, Saccharomyces pastorianus
accaccacctacaacgaacaatgat

SEQ ID NO: 15760 - DNA, 25 bp, Saccharomyces pastorianus
ggtaatcatacgtcagtggttcaaa

SEQ ID NO: 15761 - DNA, 25 bp, Saccharomyces pastorianus
gaaatcttttgagtaggtccatatt

SEQ ID NO: 15762 - DNA, 25 bp, Saccharomyces pastorianus
tcagcaattgcatggcacggtggta

SEQ ID NO: 15763 - DNA, 25 bp, Saccharomyces pastorianus
ggttcaaactaagcgatatcccagc

SEQ ID NO: 15764 - DNA, 25 bp, Saccharomyces pastorianus
tacatcatcggaaactcgtcatttg

SEQ ID NO: 15765 - DNA, 25 bp, Saccharomyces pastorianus
gaatgactttttctgaactggacga

SEQ ID NO: 15766 - DNA, 25 bp, Saccharomyces pastorianus
gtcatgccgcatttcgaaatcaaca

SEQ ID NO: 15767 - DNA, 25 bp, Saccharomyces pastorianus
gggtgacgcccaagtttgagttata

SEQ ID NO: 15768 - DNA, 25 bp, Saccharomyces pastorianus
agcacccatggtccatcattttata

SEQ ID NO: 15769 - DNA, 25 bp, Saccharomyces pastorianus
gaacaggaatccgtcaatatgctag

SEQ ID NO: 15770 - DNA, 25 bp, Saccharomyces pastorianus
agcagcatttcattggattcgccgc

SEQ ID NO: 15771 - DNA, 25 bp, Saccharomyces pastorianus
aaacgttcagtatgtcatgccgcat

SEQ ID NO: 15772 - DNA, 25 bp, Saccharomyces pastorianus
ggaaggtacatctgggaacgaaaca

SEQ ID NO: 15773 - DNA, 25 bp, Saccharomyces pastorianus
tacgctttcggatcgtgtagatcat

SEQ ID NO: 15774 - DNA, 25 bp, Saccharomyces pastorianus
catctttattggctcttttgtcaga

SEQ ID NO: 15775 - DNA, 25 bp, Saccharomyces pastorianus
tacagtcacaacacttccatcttta

SEQ ID NO: 15776 - DNA, 25 bp, Saccharomyces pastorianus
gcttctcagaggttttgttgttttc

SEQ ID NO: 15777 - DNA, 25 bp, Saccharomyces pastorianus
aaactgggacgtggacaagctcttc

SEQ ID NO: 15778 - DNA, 25 bp, Saccharomyces pastorianus
gttaacgagaactgacgagtccctt

SEQ ID NO: 15779 - DNA, 25 bp, Saccharomyces pastorianus
gagagaccaggcaagacgcgtttac

SEQ ID NO: 15780 - DNA, 25 bp, Saccharomyces pastorianus
agacgcgtttacagagatgttctct

SEQ ID NO: 15781 - DNA, 25 bp, Saccharomyces pastorianus
aagctcttcgcgcagttgcaagaag

SEQ ID NO: 15782 - DNA, 25 bp, Saccharomyces pastorianus
ggagaattacatacgctttcggatc

SEQ ID NO: 15783 - DNA, 25 bp, Saccharomyces pastorianus
gatagccccaaatatttcgataaca

SEQ ID NO: 15784 - DNA, 25 bp, Saccharomyces pastorianus
ttgatccaccccagtacagttcttg

SEQ ID NO: 15785 - DNA, 25 bp, Saccharomyces pastorianus
agaacatattcgctcacccagatgg

SEQ ID NO: 15786 - DNA, 25 bp, Saccharomyces pastorianus
gataacatccgctctcaactggaaa

SEQ ID NO: 15787 - DNA, 25 bp, Saccharomyces pastorianus
atagcacctgcatactacgatatgg

SEQ ID NO: 15788 - DNA, 25 bp, Saccharomyces pastorianus
atcacgggttcaagtcagacgaggc

SEQ ID NO: 15789 - DNA, 25 bp, Saccharomyces pastorianus
aatgaattcgtcctcacgtcgaaga

SEQ ID NO: 15790 - DNA, 25 bp, Saccharomyces pastorianus
aatggtgccgtgatcactacttaaa

SEQ ID NO: 15791 - DNA, 25 bp, Saccharomyces pastorianus
cacagatctatttctgctgcagata

SEQ ID NO: 15792 - DNA, 25 bp, Saccharomyces pastorianus
agtcacatctgttaggcccgaatgg

SEQ ID NO: 15793 - DNA, 25 bp, Saccharomyces pastorianus
agtacagttcttggtcatgacgcag

SEQ ID NO: 15794 - DNA, 25 bp, Saccharomyces pastorianus
gtgacttcatgtttgacatcctccg

SEQ ID NO: 15795 - DNA, 25 bp, Saccharomyces pastorianus
aactactaggtgatttcgtcatcca

SEQ ID NO: 15796 - DNA, 25 bp, Saccharomyces pastorianus
ggtacgctacgattacatcttcagt

SEQ ID NO: 15797 - DNA, 25 bp, Saccharomyces pastorianus
atcggcgaagtctataatcacctca

SEQ ID NO: 15798 - DNA, 25 bp, Saccharomyces pastorianus
agagcagcgagaacaacagccgtct

SEQ ID NO: 15799 - DNA, 25 bp, Saccharomyces pastorianus
acagccgtctggtaggtattactaa

SEQ ID NO: 15800 - DNA, 25 bp, Saccharomyces pastorianus
cagccctattttctttgatctacat

SEQ ID NO: 15801 - DNA, 25 bp, Saccharomyces pastorianus
aatgggtattggtcattcagcccta

SEQ ID NO: 15802 - DNA, 25 bp, Saccharomyces pastorianus
ggacgtttcaggcatgcatctcgac

SEQ ID NO: 15803 - DNA, 25 bp, Saccharomyces pastorianus
atcagtaattccaacgcatacgcgg

SEQ ID NO: 15804 - DNA, 25 bp, Saccharomyces pastorianus
ggtccccaaccgagcttgttgaaga

SEQ ID NO: 15805 - DNA, 25 bp, Saccharomyces pastorianus
agttggtgtccatactctccgaata

SEQ ID NO: 15806 - DNA, 25 bp, Saccharomyces pastorianus
tccgaatatcctagcctctggaggt

SEQ ID NO: 15807 - DNA, 25 bp, Saccharomyces pastorianus
aaagaaaacgcacaccgctgctgtg

SEQ ID NO: 15808 - DNA, 25 bp, Saccharomyces pastorianus
aaaaaggcagcgtcatggatggtat

SEQ ID NO: 15809 - DNA, 25 bp, Saccharomyces pastorianus
gggcaatcccgagaatgcaatctct

SEQ ID NO: 15810 - DNA, 25 bp, Saccharomyces pastorianus
tgttgttcgcaattatccccagatg

SEQ ID NO: 15811 - DNA, 25 bp, Saccharomyces pastorianus
aaatgagatccatacaggacggcct

SEQ ID NO: 15812 - DNA, 25 bp, Saccharomyces pastorianus
gagaacatctttgcctcagttttca

SEQ ID NO: 15813 - DNA, 25 bp, Saccharomyces pastorianus
gggccaaagttatatgtccaccagt

SEQ ID NO: 15814 - DNA, 25 bp, Saccharomyces pastorianus
ggttcaatcaatactggatctcagg

SEQ ID NO: 15815 - DNA, 25 bp, Saccharomyces pastorianus
acaggcgcaagagtaggttcaatca

SEQ ID NO: 15816 - DNA, 25 bp, Saccharomyces pastorianus
agcgggctctcggagttgaccaatt

SEQ ID NO: 15817 - DNA, 25 bp, Saccharomyces pastorianus
ggatacagcttccattcatccatct

SEQ ID NO: 15818 - DNA, 25 bp, Saccharomyces pastorianus
gtcactaagcgttggagaagccctt

SEQ ID NO: 15819 - DNA, 25 bp, Saccharomyces pastorianus
gacgtcatccaattgcttactcaag

SEQ ID NO: 15820 - DNA, 25 bp, Saccharomyces pastorianus
aaattgttgtcagtgttcttaccca

SEQ ID NO: 15821 - DNA, 25 bp, Saccharomyces pastorianus
gaatcttgaagtttgttgctctgaa

SEQ ID NO: 15822 - DNA, 25 bp, Saccharomyces pastorianus
acgattgattggtgtcttgacgcta

SEQ ID NO: 15823 - DNA, 25 bp, Saccharomyces pastorianus
aagcatacgatgttctgggtttgat

SEQ ID NO: 15824 - DNA, 25 bp, Saccharomyces pastorianus
gggcatctacaacgacttgtcacta

SEQ ID NO: 15825 - DNA, 25 bp, Saccharomyces pastorianus
tcttctgtccctatcgtcgatgaaa

SEQ ID NO: 15826 - DNA, 25 bp, Saccharomyces pastorianus
gagactcatttcctaaagatcccaa

SEQ ID NO: 15827 - DNA, 25 bp, Saccharomyces pastorianus
aacagttcaggatacctacggcagt

SEQ ID NO: 15828 - DNA, 25 bp, Saccharomyces pastorianus
gggctatatttgctgtactatcgct

SEQ ID NO: 15829 - DNA, 25 bp, Saccharomyces pastorianus
atcggagcctgttggtctgttattt

SEQ ID NO: 15830 - DNA, 25 bp, Saccharomyces pastorianus
aggtattgcagaagcttccgctcaa

SEQ ID NO: 15831 - DNA, 25 bp, Saccharomyces pastorianus
ccagctttaccatcgcaagattcat

SEQ ID NO: 15832 - DNA, 25 bp, Saccharomyces pastorianus
tatacccaggaatagacccggatcg

SEQ ID NO: 15833 - DNA, 25 bp, Saccharomyces pastorianus
ggttggcttcacatctttggttaaa

SEQ ID NO: 15834 - DNA, 25 bp, Saccharomyces pastorianus
aattctgcgcccagttgatcggagc

SEQ ID NO: 15835 - DNA, 25 bp, Saccharomyces pastorianus
tattccttccggagtagcagtcggt

SEQ ID NO: 15836 - DNA, 25 bp, Saccharomyces pastorianus
atacaatccccagtgaacagttcag

SEQ ID NO: 15837 - DNA, 25 bp, Saccharomyces pastorianus
aagattcatcggtgggttggcttca

SEQ ID NO: 15838 - DNA, 25 bp, Saccharomyces pastorianus
gagaaaattcccacaagcctataaa

SEQ ID NO: 15839 - DNA, 25 bp, Saccharomyces pastorianus
gcggtgtcaccatcgggtatcatat

SEQ ID NO: 15840 - DNA, 25 bp, Saccharomyces pastorianus
aactgggcgcgtttagtattcaatg

SEQ ID NO: 15841 - DNA, 25 bp, Saccharomyces pastorianus
actacgtgattttgctgcatcctta

SEQ ID NO: 15842 - DNA, 25 bp, Saccharomyces pastorianus
attcattcattgatgccctcgatat

SEQ ID NO: 15843 - DNA, 25 bp, Saccharomyces pastorianus
gctgcatccttactagactacgtat

SEQ ID NO: 15844 - DNA, 25 bp, Saccharomyces pastorianus
ttaggtaacctgaataactgggcgc

SEQ ID NO: 15845 - DNA, 25 bp, Saccharomyces pastorianus
ataaatcgtgtctttgggacttatt

SEQ ID NO: 15846 - DNA, 25 bp, Saccharomyces pastorianus
aaggatttgccagacttgtatgaag

SEQ ID NO: 15847 - DNA, 25 bp, Saccharomyces pastorianus
gatattaacattgctcctggctaaa

SEQ ID NO: 15848 - DNA, 25 bp, Saccharomyces pastorianus
gtggatactgtcattagcgcattgt

SEQ ID NO: 15849 - DNA, 25 bp, Saccharomyces pastorianus
ggagcaagagctaatcacaatcgta

SEQ ID NO: 15850 - DNA, 25 bp, Saccharomyces pastorianus
gtcgcgaatgttggagagatcacct

SEQ ID NO: 15851 - DNA, 25 bp, Saccharomyces pastorianus
gaaagaacacacttcatggtcagat

SEQ ID NO: 15852 - DNA, 25 bp, Saccharomyces pastorianus
caaattgaaggctggtcgcgaatgt

SEQ ID NO: 15853 - DNA, 25 bp, Saccharomyces pastorianus
tttcaaatctggtaagacgtcgtac

SEQ ID NO: 15854 - DNA, 25 bp, Saccharomyces pastorianus
gacgtcgtacgttcataaccgtgat

SEQ ID NO: 15855 - DNA, 25 bp, Saccharomyces pastorianus
gagatcacctcaacgagccaggctt

SEQ ID NO: 15856 - DNA, 25 bp, Saccharomyces pastorianus
gaagctgatgtgagccgatctgatt

SEQ ID NO: 15857 - DNA, 25 bp, Saccharomyces pastorianus
gtacgatgctgttgaagcttactta

SEQ ID NO: 15858 - DNA, 25 bp, Saccharomyces pastorianus
gaaggatgaaccacagtctgttgaa

SEQ ID NO: 15859 - DNA, 25 bp, Saccharomyces pastorianus
aacaaccttcgcagtacgatgctgt

SEQ ID NO: 15860 - DNA, 25 bp, Saccharomyces pastorianus
gtcaatcgtggtactacgaacgcaa

SEQ ID NO: 15861 - DNA, 25 bp, Saccharomyces pastorianus
ttaaaaagcacaacaggccagcctg

SEQ ID NO: 15862 - DNA, 25 bp, Saccharomyces pastorianus
aagtaagtcccaaagaagctgcaag

SEQ ID NO: 15863 - DNA, 25 bp, Saccharomyces pastorianus
aagtaaatctcaaccaatgccctcg

SEQ ID NO: 15864 - DNA, 25 bp, Saccharomyces pastorianus
gactagcagccgagaaaagatttca

SEQ ID NO: 15865 - DNA, 25 bp, Saccharomyces pastorianus
atgccctcgcaaaccacaacagtaa

SEQ ID NO: 15866 - DNA, 25 bp, Saccharomyces pastorianus
gcaagaacgtgccaagtctcacaag

SEQ ID NO: 15867 - DNA, 25 bp, Saccharomyces pastorianus
gggtaagaaactggcgcaagaacgt

SEQ ID NO: 15868 - DNA, 25 bp, Saccharomyces pastorianus
gtctcacaagactcgtttgatagaa

SEQ ID NO: 15869 - DNA, 25 bp, Saccharomyces pastorianus
cagtggcgcaagtgatacgagcaaa

SEQ ID NO: 15870 - DNA, 25 bp, Saccharomyces pastorianus
gaaggtagcaaactcagtggcgcaa

SEQ ID NO: 15871 - DNA, 25 bp, Saccharomyces pastorianus
gtctctgtcggtgatttgaggtaca

SEQ ID NO: 15872 - DNA, 25 bp, Saccharomyces pastorianus
cttcatcaaggcgtttcaggtgttt

SEQ ID NO: 15873 - DNA, 25 bp, Saccharomyces pastorianus
ggaccagatctccagcctgattgag

SEQ ID NO: 15874 - DNA, 25 bp, Saccharomyces pastorianus
atgtcagctaccagggccaacaagg

SEQ ID NO: 15875 - DNA, 25 bp, Saccharomyces pastorianus
tgagagatgcctccagcttgacatt

SEQ ID NO: 15876 - DNA, 25 bp, Saccharomyces pastorianus
gaaggaattagacgccaccaccagt

SEQ ID NO: 15877 - DNA, 25 bp, Saccharomyces pastorianus
gagactatttgagggccattggcta

SEQ ID NO: 15878 - DNA, 25 bp, Saccharomyces pastorianus
gggccaacaaggacattttcacact

SEQ ID NO: 15879 - DNA, 25 bp, Saccharomyces pastorianus
gaggtacatgcttacaggcctggga

SEQ ID NO: 15880 - DNA, 25 bp, Saccharomyces pastorianus
gaacgcggactccagcttgagagat

SEQ ID NO: 15881 - DNA, 25 bp, Saccharomyces pastorianus
aaccagttcgtgcaggacatcttga

SEQ ID NO: 15882 - DNA, 25 bp, Saccharomyces pastorianus
acaacggtactgatgtcgacatgga

SEQ ID NO: 15883 - DNA, 25 bp, Saccharomyces pastorianus
agcaaaccatctacagtctgacttt

SEQ ID NO: 15884 - DNA, 25 bp, Saccharomyces pastorianus
gaaccttctgacttgagatcatgga

SEQ ID NO: 15885 - DNA, 25 bp, Saccharomyces pastorianus
gcatattgcagccagacttcccggt

SEQ ID NO: 15886 - DNA, 25 bp, Saccharomyces pastorianus
caatactaagtagcgctggcgacga

SEQ ID NO: 15887 - DNA, 25 bp, Saccharomyces pastorianus
gtctggtctgtgtcttggaacttaa

SEQ ID NO: 15888 - DNA, 25 bp, Saccharomyces pastorianus
acttcagaggagtcttctagcaact

SEQ ID NO: 15889 - DNA, 25 bp, Saccharomyces pastorianus
agcaactcaaacctattcgacaacg

SEQ ID NO: 15890 - DNA, 25 bp, Saccharomyces pastorianus
agggcgaactacaatcaagcttgga

SEQ ID NO: 15891 - DNA, 25 bp, Saccharomyces pastorianus
aaagcttgcagtatcttcattggag

SEQ ID NO: 15892 - DNA, 25 bp, Saccharomyces pastorianus
ggagcaagcgattatttaccaaaga

SEQ ID NO: 15893 - DNA, 25 bp, Saccharomyces pastorianus
tcctccacctcatcttgaagacgat

SEQ ID NO: 15894 - DNA, 25 bp, Saccharomyces pastorianus
ttctctgctcatactggtggtgaca

SEQ ID NO: 15895 - DNA, 25 bp, Saccharomyces pastorianus
caaggttacggttcagccgatgaat

SEQ ID NO: 15896 - DNA, 25 bp, Saccharomyces pastorianus
attactgtatatcaatcctccacct

SEQ ID NO: 15897 - DNA, 25 bp, Saccharomyces pastorianus
gttgcgtacgcaagagcacgtggtt

SEQ ID NO: 15898 - DNA, 25 bp, Saccharomyces pastorianus
agacgatacgccttacaccagagaa

SEQ ID NO: 15899 - DNA, 25 bp, Saccharomyces pastorianus
gagaaattccaactgctcaagaact

SEQ ID NO: 15900 - DNA, 25 bp, Saccharomyces pastorianus
tatgtctttgacaggctaccggaaa

SEQ ID NO: 15901 - DNA, 25 bp, Saccharomyces pastorianus
ggaagctaaatctgtcacacatggt

SEQ ID NO: 15902 - DNA, 25 bp, Saccharomyces pastorianus
ggtggtaagcaagccgcgttataca

SEQ ID NO: 15903 - DNA, 25 bp, Saccharomyces pastorianus
gaatcaactgacattctctgctcat

SEQ ID NO: 15904 - DNA, 25 bp, Saccharomyces pastorianus
aggttctcaccattcggttgctgtt

SEQ ID NO: 15905 - DNA, 25 bp, Saccharomyces pastorianus
atgcggcggtcaattttctgtatct

SEQ ID NO: 15906 - DNA, 25 bp, Saccharomyces pastorianus
gttgcccaaaatggtattgcctatt

SEQ ID NO: 15907 - DNA, 25 bp, Saccharomyces pastorianus
accactaaaggtagcattgcccgag

SEQ ID NO: 15908 - DNA, 25 bp, Saccharomyces pastorianus
aaactgttgcagcaggttctcacca

SEQ ID NO: 15909 - DNA, 25 bp, Saccharomyces pastorianus
accattccctggtcttatctcaaga

SEQ ID NO: 15910 - DNA, 25 bp, Saccharomyces pastorianus
gacggcgatttgtactcttttggta

SEQ ID NO: 15911 - DNA, 25 bp, Saccharomyces pastorianus
agggccttctgatgaggataccgaa

SEQ ID NO: 15912 - DNA, 25 bp, Saccharomyces pastorianus
taacatcattttggccggatgcggc

SEQ ID NO: 15913 - DNA, 25 bp, Saccharomyces pastorianus
gacgttcacaataaggcccgttccg

SEQ ID NO: 15914 - DNA, 25 bp, Saccharomyces pastorianus
aatttggtcagtgcggtgtctcaga

SEQ ID NO: 15915 - DNA, 25 bp, Saccharomyces pastorianus
taacgcaggatttctctccggaaga

SEQ ID NO: 15916 - DNA, 25 bp, Saccharomyces pastorianus
gtatacatgcaacatatcccggaaa

SEQ ID NO: 15917 - DNA, 25 bp, Saccharomyces pastorianus
acagattcaaatcgctcttcaaccg

SEQ ID NO: 15918 - DNA, 25 bp, Saccharomyces pastorianus
gagagttgtcttaggtggcacatct

SEQ ID NO: 15919 - DNA, 25 bp, Saccharomyces pastorianus
gccaactggttgagcttttaacgca

SEQ ID NO: 15920 - DNA, 25 bp, Saccharomyces pastorianus
tcccggaaatctcatcattgctaac

SEQ ID NO: 15921 - DNA, 25 bp, Saccharomyces pastorianus
gaagacgtcaattttttccacagat

SEQ ID NO: 15922 - DNA, 25 bp, Saccharomyces pastorianus
gggatgactcaaactcagctcagaa

SEQ ID NO: 15923 - DNA, 25 bp, Saccharomyces pastorianus
cacactgtccagagatcgttttaaa

SEQ ID NO: 15924 - DNA, 25 bp, Saccharomyces pastorianus
agagctctccaaaaacacactgtcc

SEQ ID NO: 15925 - DNA, 25 bp, Saccharomyces pastorianus
ggtggcacatctatagtgtctacta

SEQ ID NO: 15926 - DNA, 25 bp, Saccharomyces pastorianus
gcaacgaagcgttaatctggttaca

SEQ ID NO: 15927 - DNA, 25 bp, Saccharomyces pastorianus
ggtcaagaacgatcctaccgcagaa

SEQ ID NO: 15928 - DNA, 25 bp, Saccharomyces pastorianus
ggattagcggttgtctacgaaggta

SEQ ID NO: 15929 - DNA, 25 bp, Saccharomyces pastorianus
ataatcgttgtgtggctcgagtgtc

SEQ ID NO: 15930 - DNA, 25 bp, Saccharomyces pastorianus
gcggtgacgagaacttgagcttttt

SEQ ID NO: 15931 - DNA, 25 bp, Saccharomyces pastorianus
aacctaccgacgattcccattagat

SEQ ID NO: 15932 - DNA, 25 bp, Saccharomyces pastorianus
aatttccattttttccacatgcctg

SEQ ID NO: 15933 - DNA, 25 bp, Saccharomyces pastorianus
gtaacccagcgcagccgtttggcaa

SEQ ID NO: 15934 - DNA, 25 bp, Saccharomyces pastorianus
atgggtgaaacctttgtctatagac

SEQ ID NO: 15935 - DNA, 25 bp, Saccharomyces pastorianus
tcgagtgtcgtattgggactggcta

SEQ ID NO: 15936 - DNA, 25 bp, Saccharomyces pastorianus
gttggttacgatccatccctcaaat

SEQ ID NO: 15937 - DNA, 25 bp, Saccharomyces pastorianus
acgcctttccaaatttccatgatcg

SEQ ID NO: 15938 - DNA, 25 bp, Saccharomyces pastorianus
gactatgggctcttattgatggaat

SEQ ID NO: 15939 - DNA, 25 bp, Saccharomyces pastorianus
ttgctactcaatttctctctcatta

SEQ ID NO: 15940 - DNA, 25 bp, Saccharomyces pastorianus
aacaactacagtgcattggcgttct

SEQ ID NO: 15941 - DNA, 25 bp, Saccharomyces pastorianus
gttctcttccttttgcctgaaattt

SEQ ID NO: 15942 - DNA, 25 bp, Saccharomyces pastorianus
ttttgtttgggctctgatggtacta

SEQ ID NO: 15943 - DNA, 25 bp, Saccharomyces pastorianus
ttattccgacactatctggtacaga

SEQ ID NO: 15944 - DNA, 25 bp, Saccharomyces pastorianus
atgggtgatgatgatcgccaatcta

SEQ ID NO: 15945 - DNA, 25 bp, Saccharomyces pastorianus
ttttttccttcgtggccatatggca

SEQ ID NO: 15946 - DNA, 25 bp, Saccharomyces pastorianus
gttatatttacattcctctcggcgg

SEQ ID NO: 15947 - DNA, 25 bp, Saccharomyces pastorianus
tagaatcctaacctctttagccgtt

SEQ ID NO: 15948 - DNA, 25 bp, Saccharomyces pastorianus
ggacagaatgaatcctacatctcca

SEQ ID NO: 15949 - DNA, 25 bp, Saccharomyces pastorianus
tatacgggcaactttattcctacaa

SEQ ID NO: 15950 - DNA, 25 bp, Saccharomyces pastorianus
aagaaaagcaagttcctctcccaca

SEQ ID NO: 15951 - DNA, 25 bp, Saccharomyces pastorianus
ggatctcaagatgcattttatacgg

SEQ ID NO: 15952 - DNA, 25 bp, Saccharomyces pastorianus
gaaatcctttttggcgaggtctgcc

SEQ ID NO: 15953 - DNA, 25 bp, Saccharomyces pastorianus
tcagcacgcaggtagagcagccagt

SEQ ID NO: 15954 - DNA, 25 bp, Saccharomyces pastorianus
gtcctatgccgtgctgttcagaaat

SEQ ID NO: 15955 - DNA, 25 bp, Saccharomyces pastorianus
aacccctttagtgatcagcacgcag

SEQ ID NO: 15956 - DNA, 25 bp, Saccharomyces pastorianus
aaccgcagggacataacttggcaat

SEQ ID NO: 15957 - DNA, 25 bp, Saccharomyces pastorianus
gaaatgatcatttttgcacactgta

SEQ ID NO: 15958 - DNA, 25 bp, Saccharomyces pastorianus
ttggcaatcgctgaagtctgttaac

SEQ ID NO: 15959 - DNA, 25 bp, Saccharomyces pastorianus
ttcacggtgatttatcccaacagca

SEQ ID NO: 15960 - DNA, 25 bp, Saccharomyces pastorianus
agaagactacgtccatagaatcggt

SEQ ID NO: 15961 - DNA, 25 bp, Saccharomyces pastorianus
gcatttggctggtggtttagttaac

SEQ ID NO: 15962 - DNA, 25 bp, Saccharomyces pastorianus
gtctaatttgttattggctaccgat

SEQ ID NO: 15963 - DNA, 25 bp, Saccharomyces pastorianus
gtactgctcatactttgttcactga

SEQ ID NO: 15964 - DNA, 25 bp, Saccharomyces pastorianus
taatcaacccgttcctgaggacttg

SEQ ID NO: 15965 - DNA, 25 bp, Saccharomyces pastorianus
acaatgttgctgctattcacggtga

SEQ ID NO: 15966 - DNA, 25 bp, Saccharomyces pastorianus
ggatatacccaatgttaagaccgtt

SEQ ID NO: 15967 - DNA, 25 bp, Saccharomyces pastorianus
gagcacagtgcttatggttcatttt

SEQ ID NO: 15968 - DNA, 25 bp, Saccharomyces pastorianus
agctggccaaacaggtactgctcat

SEQ ID NO: 15969 - DNA, 25 bp, Saccharomyces pastorianus
tgaagttgtggatccccgtggtaaa

SEQ ID NO: 15970 - DNA, 25 bp, Saccharomyces pastorianus
atttgacacattttgacgccgcgaa

SEQ ID NO: 15971 - DNA, 25 bp, Saccharomyces pastorianus
gtgctcaccatcctgtagattttca

SEQ ID NO: 15972 - DNA, 25 bp, Saccharomyces pastorianus
gatcacacgcgtctggaaagtcaag

SEQ ID NO: 15973 - DNA, 25 bp, Saccharomyces pastorianus
acattactgacctgagcaactcact

SEQ ID NO: 15974 - DNA, 25 bp, Saccharomyces pastorianus
ggaatatccccatagtcatgaccac

SEQ ID NO: 15975 - DNA, 25 bp, Saccharomyces pastorianus
tcatcatattccagatcacacgcgt

SEQ ID NO: 15976 - DNA, 25 bp, Saccharomyces pastorianus
gttcttgcaaaatagcccacacggt

SEQ ID NO: 15977 - DNA, 25 bp, Saccharomyces pastorianus
aacagcggcagcaggaatatcccca

SEQ ID NO: 15978 - DNA, 25 bp, Saccharomyces pastorianus
tgatagataacccttcgaccagaat

SEQ ID NO: 15979 - DNA, 25 bp, Saccharomyces pastorianus
tcatgccgccaatacttcaaacgat

SEQ ID NO: 15980 - DNA, 25 bp, Saccharomyces pastorianus
ttcggaaggcgatttcagccaaatt

SEQ ID NO: 15981 - DNA, 25 bp, Saccharomyces pastorianus
caataggctgttattcgaatgcaga

SEQ ID NO: 15982 - DNA, 25 bp, Saccharomyces pastorianus
gtcttgctcgcatatatttacttct

SEQ ID NO: 15983 - DNA, 25 bp, Saccharomyces pastorianus
acaggcatgaactgatcacgaacat

SEQ ID NO: 15984 - DNA, 25 bp, Saccharomyces pastorianus
tgatccgacgcttccgagatctgat

SEQ ID NO: 15985 - DNA, 25 bp, Saccharomyces pastorianus
gttgtaccctcgtgaagacaaggag

SEQ ID NO: 15986 - DNA, 25 bp, Saccharomyces pastorianus
agggaatgtcctaaatgccactctc

SEQ ID NO: 15987 - DNA, 25 bp, Saccharomyces pastorianus
aaacgtgtttttccaatcgcagcaa

SEQ ID NO: 15988 - DNA, 25 bp, Saccharomyces pastorianus
tgtgtgtttgtcttgctcgcatata

SEQ ID NO: 15989 - DNA, 25 bp, Saccharomyces pastorianus
aagacattggttctgatccgacgct

SEQ ID NO: 15990 - DNA, 25 bp, Saccharomyces pastorianus
gactgcgggcgtagtgcaagacatt

SEQ ID NO: 15991 - DNA, 25 bp, Saccharomyces pastorianus
atgccactctcgtgaaaacgtgttt

SEQ ID NO: 15992 - DNA, 25 bp, Saccharomyces pastorianus
agccggaggccaaaactgtgttcac

SEQ ID NO: 15993 - DNA, 25 bp, Saccharomyces pastorianus
gtcaaaggtttactaggtctctcac

SEQ ID NO: 15994 - DNA, 25 bp, Saccharomyces pastorianus
aaccgtcccagctacagaggctaaa

SEQ ID NO: 15995 - DNA, 25 bp, Saccharomyces pastorianus
cgactacaactgcaccattgtctaa

SEQ ID NO: 15996 - DNA, 25 bp, Saccharomyces pastorianus
aagaaattcgtcgaggctgctccaa

SEQ ID NO: 15997 - DNA, 25 bp, Saccharomyces pastorianus
catcccagagatgaccatgcctatg

SEQ ID NO: 15998 - DNA, 25 bp, Saccharomyces pastorianus
taggtctctcactagttgaagctaa

SEQ ID NO: 15999 - DNA, 25 bp, Saccharomyces pastorianus
gactcttttggaaacctctagtttg

SEQ ID NO: 16000 - DNA, 25 bp, Saccharomyces pastorianus
gtgaagttggattctttcgacgcaa

SEQ ID NO: 16001 - DNA, 25 bp, Saccharomyces pastorianus
taacgcagcaggctcagctggtgaa

SEQ ID NO: 16002 - DNA, 25 bp, Saccharomyces pastorianus
tcgaggctgctccaaaggtcttgaa

SEQ ID NO: 16003 - DNA, 25 bp, Saccharomyces pastorianus
tgggatccgcgttccattcaaaaat

SEQ ID NO: 16004 - DNA, 25 bp, Saccharomyces pastorianus
gcaccaagcttcaatgttccaacga

SEQ ID NO: 16005 - DNA, 25 bp, Saccharomyces pastorianus
tgaccaactcggactactctaaatg

SEQ ID NO: 16006 - DNA, 25 bp, Saccharomyces pastorianus
aatttgcccggaagcaccactattg

SEQ ID NO: 16007 - DNA, 25 bp, Saccharomyces pastorianus
ctacccttgtagcttgatgatcggc

SEQ ID NO: 16008 - DNA, 25 bp, Saccharomyces pastorianus
gatgatcggctgtctgggtattgtc

SEQ ID NO: 16009 - DNA, 25 bp, Saccharomyces pastorianus
gggtattgtcgaattcaacttccac

SEQ ID NO: 16010 - DNA, 25 bp, Saccharomyces pastorianus
ggagccttctgagaccattgaggaa

SEQ ID NO: 16011 - DNA, 25 bp, Saccharomyces pastorianus
aactgtttccagtggacgcaggcac

SEQ ID NO: 16012 - DNA, 25 bp, Saccharomyces pastorianus
caatgtcagagatgcgcgtgtcaat

SEQ ID NO: 16013 - DNA, 25 bp, Saccharomyces pastorianus
ttgccccggttgtggatctaaactg

SEQ ID NO: 16014 - DNA, 25 bp, Saccharomyces pastorianus
atagcttacctgtatacgtcgatca

SEQ ID NO: 16015 - DNA, 25 bp, Saccharomyces pastorianus
gagaatctaccttccaaatcaacga

SEQ ID NO: 16016 - DNA, 25 bp, Saccharomyces pastorianus
aaggccatataactcggtcacgaca

SEQ ID NO: 16017 - DNA, 25 bp, Saccharomyces pastorianus
gatcgaatccaaggtatgccagcca

SEQ ID NO: 16018 - DNA, 25 bp, Saccharomyces pastorianus
gataccaagggttaccagccggtgg

SEQ ID NO: 16019 - DNA, 25 bp, Saccharomyces pastorianus
aagcaggctacatccacaagttgat

SEQ ID NO: 16020 - DNA, 25 bp, Saccharomyces pastorianus
agaaggccagtgtctgccaatggaa

SEQ ID NO: 16021 - DNA, 25 bp, Saccharomyces pastorianus
gtaagtcaacgaattctatcctaga

SEQ ID NO: 16022 - DNA, 25 bp, Saccharomyces pastorianus
gtggatcaacatacattctcaagca

SEQ ID NO: 16023 - DNA, 25 bp, Saccharomyces pastorianus
gttggccacgaacacttttacaagg

SEQ ID NO: 16024 - DNA, 25 bp, Saccharomyces pastorianus
gtcacgacacagtccttactcaagg

SEQ ID NO: 16025 - DNA, 25 bp, Saccharomyces pastorianus
gatcgagttcattctagtgctaaat

SEQ ID NO: 16026 - DNA, 25 bp, Saccharomyces pastorianus
gaatcttgaggcatcaccgtcagtg

SEQ ID NO: 16027 - DNA, 25 bp, Saccharomyces pastorianus
aattttcacaaattgcctggcttgc

SEQ ID NO: 16028 - DNA, 25 bp, Saccharomyces pastorianus
cttttactttttgcccacacatcta

SEQ ID NO: 16029 - DNA, 25 bp, Saccharomyces pastorianus
aaatctatggtcgtttggcaaatct

SEQ ID NO: 16030 - DNA, 25 bp, Saccharomyces pastorianus
attggaacggtgacctgtccttgca

SEQ ID NO: 16031 - DNA, 25 bp, Saccharomyces pastorianus
gatatgggaccgatgcagttttgaa

SEQ ID NO: 16032 - DNA, 25 bp, Saccharomyces pastorianus
aggccatacatgcatacgtcgttag

SEQ ID NO: 16033 - DNA, 25 bp, Saccharomyces pastorianus
gcctggcttgcaaacagtatccatt

SEQ ID NO: 16034 - DNA, 25 bp, Saccharomyces pastorianus
accgtcagtgacattaaggccatac

SEQ ID NO: 16035 - DNA, 25 bp, Saccharomyces pastorianus
tgtccttgcattcgatgcctggata

SEQ ID NO: 16036 - DNA, 25 bp, Saccharomyces pastorianus
gagatgttccatccaaacgtctatg

SEQ ID NO: 16037 - DNA, 25 bp, Saccharomyces pastorianus
gacggtacatttcgattgcttctag

SEQ ID NO: 16038 - DNA, 25 bp, Saccharomyces pastorianus
accaggagtatctgcttcgccacta

SEQ ID NO: 16039 - DNA, 25 bp, Saccharomyces pastorianus
ggaccccgacatatgatgtagcatc

SEQ ID NO: 16040 - DNA, 25 bp, Saccharomyces pastorianus
cttcgccactacctgataatgtcat

SEQ ID NO: 16041 - DNA, 25 bp, Saccharomyces pastorianus
ttttgcaaaacagatggaccccgac

SEQ ID NO: 16042 - DNA, 25 bp, Saccharomyces pastorianus
agccgccacatgttaaatttttaag

SEQ ID NO: 16043 - DNA, 25 bp, Saccharomyces pastorianus
tttaacgatccaaatccggcttcac

SEQ ID NO: 16044 - DNA, 25 bp, Saccharomyces pastorianus
ttcacccgcaaacgtagaagccgca

SEQ ID NO: 16045 - DNA, 25 bp, Saccharomyces pastorianus
agaatacccaaataagccgccacat

SEQ ID NO: 16046 - DNA, 25 bp, Saccharomyces pastorianus
gctatgatcattggcccagcagaca

SEQ ID NO: 16047 - DNA, 25 bp, Saccharomyces pastorianus
atggctagctctccagttctaaaat

SEQ ID NO: 16048 - DNA, 25 bp, Saccharomyces pastorianus
ccaatcttctgcatcttccgaaaaa

SEQ ID NO: 16049 - DNA, 25 bp, Saccharomyces pastorianus
aactgataggtgtcgtgtctttaac

SEQ ID NO: 16050 - DNA, 25 bp, Saccharomyces pastorianus
gtacagccgaacgacaaccaatctt

SEQ ID NO: 16051 - DNA, 25 bp, Saccharomyces pastorianus
attagtggccaccaaatctcacaga

SEQ ID NO: 16052 - DNA, 25 bp, Saccharomyces pastorianus
ttcaaacagttcttcggcatctcca

SEQ ID NO: 16053 - DNA, 25 bp, Saccharomyces pastorianus
tccttggcaaggacgttcgcaaaat

SEQ ID NO: 16054 - DNA, 25 bp, Saccharomyces pastorianus
atgtcgccagctcagcaacagcaaa

SEQ ID NO: 16055 - DNA, 25 bp, Saccharomyces pastorianus
gagaacttcccaatatccgctattg

SEQ ID NO: 16056 - DNA, 25 bp, Saccharomyces pastorianus
tcgtcattttgtctcagtcattctg

SEQ ID NO: 16057 - DNA, 25 bp, Saccharomyces pastorianus
tgtaacaactttcccatcgcttgca

SEQ ID NO: 16058 - DNA, 25 bp, Saccharomyces pastorianus
cctctttggtcggtctagcatatga

SEQ ID NO: 16059 - DNA, 25 bp, Saccharomyces pastorianus
aaaacgccattgaagaagctctgat

SEQ ID NO: 16060 - DNA, 25 bp, Saccharomyces pastorianus
gactgcattaggcaaagacgccaca

SEQ ID NO: 16061 - DNA, 25 bp, Saccharomyces pastorianus
catctccgggattgttcacgacgta

SEQ ID NO: 16062 - DNA, 25 bp, Saccharomyces pastorianus
ttatctatctaacctctttggtcgg

SEQ ID NO: 16063 - DNA, 25 bp, Saccharomyces pastorianus
gccactcaaacgctgctcaaaatgt

SEQ ID NO: 16064 - DNA, 25 bp, Saccharomyces pastorianus
gcccagttttgaccgatttgccagt

SEQ ID NO: 16065 - DNA, 25 bp, Saccharomyces pastorianus
acaagggtttggtcatcatctccgg

SEQ ID NO: 16066 - DNA, 25 bp, Saccharomyces pastorianus
tgaaaaaattctcccaaaacgccat

SEQ ID NO: 16067 - DNA, 25 bp, Saccharomyces pastorianus
cacaaaggccttcagtggtggtgtc

SEQ ID NO: 16068 - DNA, 25 bp, Saccharomyces pastorianus
tcacgaattccctaccgattacaga

SEQ ID NO: 16069 - DNA, 25 bp, Saccharomyces pastorianus
gaagccgattatatcaacccaattg

SEQ ID NO: 16070 - DNA, 25 bp, Saccharomyces pastorianus
taaatttgccagttttagcctacaa

SEQ ID NO: 16071 - DNA, 25 bp, Saccharomyces pastorianus
aagtcaacaagcttattacacctga

SEQ ID NO: 16072 - DNA, 25 bp, Saccharomyces pastorianus
gccctatctttgctgttcttattga

SEQ ID NO: 16073 - DNA, 25 bp, Saccharomyces pastorianus
gaagccgcattacatggtgccctat

SEQ ID NO: 16074 - DNA, 25 bp, Saccharomyces pastorianus
ggttcaacttttggacgctacagaa

SEQ ID NO: 16075 - DNA, 25 bp, Saccharomyces pastorianus
taactgtatcaacttgttcggccaa

SEQ ID NO: 16076 - DNA, 25 bp, Saccharomyces pastorianus
attcagaactttgggtaagcacaag

SEQ ID NO: 16077 - DNA, 25 bp, Saccharomyces pastorianus
ttattacacctgaagccgcattaca

SEQ ID NO: 16078 - DNA, 25 bp, Saccharomyces pastorianus
gttcggccaagtgcactttacaatt

SEQ ID NO: 16079 - DNA, 25 bp, Saccharomyces pastorianus
gctgttcttattgaacggttactgg

SEQ ID NO: 16080 - DNA, 25 bp, Saccharomyces pastorianus
acagtaatcgattctcttccaacag

SEQ ID NO: 16081 - DNA, 25 bp, Saccharomyces pastorianus
gatttgaacaacgatccatctgaag

SEQ ID NO: 16082 - DNA, 25 bp, Saccharomyces pastorianus
actttggaatctgtcattgagctac

SEQ ID NO: 16083 - DNA, 25 bp, Saccharomyces pastorianus
cagtacttctcgacaatctattttt

SEQ ID NO: 16084 - DNA, 25 bp, Saccharomyces pastorianus
gagctactggatactgtgggtaaac

SEQ ID NO: 16085 - DNA, 25 bp, Saccharomyces pastorianus
gaagaatcttcccaagctccaaagg

SEQ ID NO: 16086 - DNA, 25 bp, Saccharomyces pastorianus
aagccactcttgaaggttcagtact

SEQ ID NO: 16087 - DNA, 25 bp, Saccharomyces pastorianus
gatgctggaccgaagacaattcaac

SEQ ID NO: 16088 - DNA, 25 bp, Saccharomyces pastorianus
gacaagtttgtcacgcctcaagcca

SEQ ID NO: 16089 - DNA, 25 bp, Saccharomyces pastorianus
tgcctcttcaaaaacaacctctttc

SEQ ID NO: 16090 - DNA, 25 bp, Saccharomyces pastorianus
ccaagctccaaaggccaatatgttt

SEQ ID NO: 16091 - DNA, 25 bp, Saccharomyces pastorianus
ggaggaggcgtcatccacgaacaac

SEQ ID NO: 16092 - DNA, 25 bp, Saccharomyces pastorianus
tgaccactccggcaatgatgatatc

SEQ ID NO: 16093 - DNA, 25 bp, Saccharomyces pastorianus
ttgttagagctgtgcccgcaattga

SEQ ID NO: 16094 - DNA, 25 bp, Saccharomyces pastorianus
ggagctgctgctaaccaatggcata

SEQ ID NO: 16095 - DNA, 25 bp, Saccharomyces pastorianus
gtggacgagaactcatcccgacgat

SEQ ID NO: 16096 - DNA, 25 bp, Saccharomyces pastorianus
caattgagttttgccactgcggagc

SEQ ID NO: 16097 - DNA, 25 bp, Saccharomyces pastorianus
aaatcgctattctgcccgatgacga

SEQ ID NO: 16098 - DNA, 25 bp, Saccharomyces pastorianus
gaaggacctcctaaagcaagtgcta

SEQ ID NO: 16099 - DNA, 25 bp, Saccharomyces pastorianus
ttaacgaagtgctggatccggcggt

SEQ ID NO: 16100 - DNA, 25 bp, Saccharomyces pastorianus
gacgatgccgtttcgttgttagagc

SEQ ID NO: 16101 - DNA, 25 bp, Saccharomyces pastorianus
agtggacgacttgattcccttagcg

SEQ ID NO: 16102 - DNA, 25 bp, Saccharomyces pastorianus
acgcctgcaaatggatctatgaacg

SEQ ID NO: 16103 - DNA, 25 bp, Saccharomyces pastorianus
gagatagtgagcatcctcctcaatc

SEQ ID NO: 16104 - DNA, 25 bp, Saccharomyces pastorianus
gaaggtgtcctactaccaattgcaa

SEQ ID NO: 16105 - DNA, 25 bp, Saccharomyces pastorianus
tggcgccagcacctttgaagcaaaa

SEQ ID NO: 16106 - DNA, 25 bp, Saccharomyces pastorianus
gcccgagtttttagctacatgcgat

SEQ ID NO: 16107 - DNA, 25 bp, Saccharomyces pastorianus
agccgcctataagggcagataccgt

SEQ ID NO: 16108 - DNA, 25 bp, Saccharomyces pastorianus
cctcctcaatcaattttacacactg

SEQ ID NO: 16109 - DNA, 25 bp, Saccharomyces pastorianus
tgaacgggtcagaacaacctgcctc

SEQ ID NO: 16110 - DNA, 25 bp, Saccharomyces pastorianus
ttaaaggccctttacgatgtattgg

SEQ ID NO: 16111 - DNA, 25 bp, Saccharomyces pastorianus
tgcgataccagtgaagccgcctata

SEQ ID NO: 16112 - DNA, 25 bp, Saccharomyces pastorianus
aaacggtgatatagcgcccgagttt

SEQ ID NO: 16113 - DNA, 25 bp, Saccharomyces pastorianus
tgattaacgccggtttggcccataa

SEQ ID NO: 16114 - DNA, 25 bp, Saccharomyces pastorianus
ggttttgtacgatgacggctccata

SEQ ID NO: 16115 - DNA, 25 bp, Saccharomyces pastorianus
gagaacgcagtgtctccagactggc

SEQ ID NO: 16116 - DNA, 25 bp, Saccharomyces pastorianus
gactggctgctgtagccgttaacta

SEQ ID NO: 16117 - DNA, 25 bp, Saccharomyces pastorianus
aatgctgcatgctgctgccgaaaag

SEQ ID NO: 16118 - DNA, 25 bp, Saccharomyces pastorianus
ttgtgaatacacttcccatggtcat

SEQ ID NO: 16119 - DNA, 25 bp, Saccharomyces pastorianus
tgcacattgtgtggcgccaagcgat

SEQ ID NO: 16120 - DNA, 25 bp, Saccharomyces pastorianus
gttctgctccttctagtggtgatag

SEQ ID NO: 16121 - DNA, 25 bp, Saccharomyces pastorianus
aatcgctttcgaatctcatcaaggt

SEQ ID NO: 16122 - DNA, 25 bp, Saccharomyces pastorianus
acctttgttatgtcttacgctgcta

SEQ ID NO: 16123 - DNA, 25 bp, Saccharomyces pastorianus
gtaaggacctaccaatctgtgccta

SEQ ID NO: 16124 - DNA, 25 bp, Saccharomyces pastorianus
acaagaccactgttctgctggacta

SEQ ID NO: 16125 - DNA, 25 bp, Saccharomyces pastorianus
tgctcaccaagcacatgaagattgt

SEQ ID NO: 16126 - DNA, 25 bp, Saccharomyces pastorianus
tactactccgccttcaatgatatct

SEQ ID NO: 16127 - DNA, 25 bp, Saccharomyces pastorianus
atcagcgaggatccagaggtcgtca

SEQ ID NO: 16128 - DNA, 25 bp, Saccharomyces pastorianus
acgaggtctacatcgtcggtgtttc

SEQ ID NO: 16129 - DNA, 25 bp, Saccharomyces pastorianus
ggactacacaagacctatcagcgag

SEQ ID NO: 16130 - DNA, 25 bp, Saccharomyces pastorianus
gaaaagcaccacacagacgaggtct

SEQ ID NO: 16131 - DNA, 25 bp, Saccharomyces pastorianus
atcgtcggtgtttccttggagtact

SEQ ID NO: 16132 - DNA, 25 bp, Saccharomyces pastorianus
agagctgggctacaagaccactgtt

SEQ ID NO: 16133 - DNA, 25 bp, Saccharomyces pastorianus
gagtactgtgtcaaggctaccgcca

SEQ ID NO: 16134 - DNA, 25 bp, Saccharomyces pastorianus
taatggatcaagtgctcaccaagca

SEQ ID NO: 16135 - DNA, 25 bp, Saccharomyces pastorianus
atacgatgcttattcttccaactcc

SEQ ID NO: 16136 - DNA, 25 bp, Saccharomyces pastorianus
ctttgtaccgtcctcatcgaataat

SEQ ID NO: 16137 - DNA, 25 bp, Saccharomyces pastorianus
gtgacatcagtctccaccaatgaac

SEQ ID NO: 16138 - DNA, 25 bp, Saccharomyces pastorianus
tagagccactgatgccatgacgact

SEQ ID NO: 16139 - DNA, 25 bp, Saccharomyces pastorianus
gcagtactcaagtatctggatctat

SEQ ID NO: 16140 - DNA, 25 bp, Saccharomyces pastorianus
aatatcgaggctttcactccatcat

SEQ ID NO: 16141 - DNA, 25 bp, Saccharomyces pastorianus
aagtagccttatctcacaagaacat

SEQ ID NO: 16142 - DNA, 25 bp, Saccharomyces pastorianus
gaggcaggcaactacgttaactaga

SEQ ID NO: 16143 - DNA, 25 bp, Saccharomyces pastorianus
gaacttcctatatcattacaaccaa

SEQ ID NO: 16144 - DNA, 25 bp, Saccharomyces pastorianus
atacaacaccatcttcctctaatag

SEQ ID NO: 16145 - DNA, 25 bp, Saccharomyces pastorianus
ccttcaacaccaacttcatacaata

SEQ ID NO: 16146 - DNA, 25 bp, Saccharomyces pastorianus
gtactacacctctattattatcgcc

SEQ ID NO: 16147 - DNA, 25 bp, Saccharomyces pastorianus
ttcgtcgtccgatttccagagagag

SEQ ID NO: 16148 - DNA, 25 bp, Saccharomyces pastorianus
agaaccattcccattctgaatcttc

SEQ ID NO: 16149 - DNA, 25 bp, Saccharomyces pastorianus
aaatgaatccgactccgatttcacc

SEQ ID NO: 16150 - DNA, 25 bp, Saccharomyces pastorianus
gtatcaatccagcagacgcccaaat

SEQ ID NO: 16151 - DNA, 25 bp, Saccharomyces pastorianus
cacacccacgacaatgctgagtagg

SEQ ID NO: 16152 - DNA, 25 bp, Saccharomyces pastorianus
ggtacgaatctgcatactttggaat

SEQ ID NO: 16153 - DNA, 25 bp, Saccharomyces pastorianus
gatgaacatgattaataccgccgta

SEQ ID NO: 16154 - DNA, 25 bp, Saccharomyces pastorianus
taaaggatccatccaactccagcat

SEQ ID NO: 16155 - DNA, 25 bp, Saccharomyces pastorianus
gcaaaactcgtcgttgtccagtcaa

SEQ ID NO: 16156 - DNA, 25 bp, Saccharomyces pastorianus
accagccaaagctccatacagttga

SEQ ID NO: 16157 - DNA, 25 bp, Saccharomyces pastorianus
gacgccatattctgtgtcaaccact

SEQ ID NO: 16158 - DNA, 25 bp, Saccharomyces pastorianus
aacttatgtcagtagttgcgggtct

SEQ ID NO: 16159 - DNA, 25 bp, Saccharomyces pastorianus
agcaatgcagggtgtattcgaatac

SEQ ID NO: 16160 - DNA, 25 bp, Saccharomyces pastorianus
atgcaattctcgcagtatttgtcgt

SEQ ID NO: 16161 - DNA, 25 bp, Saccharomyces pastorianus
gtatttgtcgttaatttccctgttg

SEQ ID NO: 16162 - DNA, 25 bp, Saccharomyces pastorianus
tgctagcttagagtcgacgccatat

SEQ ID NO: 16163 - DNA, 25 bp, Saccharomyces pastorianus
cactgctattcttgccaacgggaaa

SEQ ID NO: 16164 - DNA, 25 bp, Saccharomyces pastorianus
ggatgtggcggtttcatgcgaacaa

SEQ ID NO: 16165 - DNA, 25 bp, Saccharomyces pastorianus
gttggttccagctttagcacaggat

SEQ ID NO: 16166 - DNA, 25 bp, Saccharomyces pastorianus
gaacaaattccctctgctagcttag

SEQ ID NO: 16167 - DNA, 25 bp, Saccharomyces pastorianus
gggtctgtggccactacaacaaaga

SEQ ID NO: 16168 - DNA, 25 bp, Saccharomyces pastorianus
gaaatcgattccttttcaggtaaca

SEQ ID NO: 16169 - DNA, 25 bp, Saccharomyces pastorianus
ttcaggtaacagaatctacccaggt

SEQ ID NO: 16170 - DNA, 25 bp, Saccharomyces pastorianus
tcgattccttttcaggtaacagaat

SEQ ID NO: 16171 - DNA, 25 bp, Saccharomyces pastorianus
ttccttttcaggtaacagaatctac

SEQ ID NO: 16172 - DNA, 25 bp, Saccharomyces pastorianus
agtctgttggtactcaaggttccaa

SEQ ID NO: 16173 - DNA, 25 bp, Saccharomyces pastorianus
aagtctgttggtactcaaggttcca

SEQ ID NO: 16174 - DNA, 25 bp, Saccharomyces pastorianus
ccacaagaaaggtatcactgaagaa

SEQ ID NO: 16175 - DNA, 25 bp, Saccharomyces pastorianus
acgaaaaattgaaggctgacaagga

SEQ ID NO: 16176 - DNA, 25 bp, Saccharomyces pastorianus
aatcgattccttttcaggtaacaga

SEQ ID NO: 16177 - DNA, 25 bp, Saccharomyces pastorianus
aggtaacagaatctacccaggtaga

SEQ ID NO: 16178 - DNA, 25 bp, Saccharomyces pastorianus
aagcaccacaagaaaggtatcactg

SEQ ID NO: 16179 - DNA, 25 bp, Saccharomyces pastorianus
taagacgttgacatcatgggagctt

SEQ ID NO: 16180 - DNA, 25 bp, Saccharomyces pastorianus
gaaaaggcgccattgagggtcaaaa

SEQ ID NO: 16181 - DNA, 25 bp, Saccharomyces pastorianus
gagcgtttatctgctaagatgcacg

SEQ ID NO: 16182 - DNA, 25 bp, Saccharomyces pastorianus
ttgacatcatgggagcttaaaaaac

SEQ ID NO: 16183 - DNA, 25 bp, Saccharomyces pastorianus
tctggaaggtggaaaaggcgccatt

SEQ ID NO: 16184 - DNA, 25 bp, Saccharomyces pastorianus
gatacgagcgtttatctgctaagat

SEQ ID NO: 16185 - DNA, 25 bp, Saccharomyces pastorianus
agaagaagcacgtcaaactaagata

SEQ ID NO: 16186 - DNA, 25 bp, Saccharomyces pastorianus
gcacgtcaaactaagataaccactt

SEQ ID NO: 16187 - DNA, 25 bp, Saccharomyces pastorianus
caaaggctgcaaaaggtactttagt

SEQ ID NO: 16188 - DNA, 25 bp, Saccharomyces pastorianus
gcagaaaatgaaagatacgagcgtt

SEQ ID NO: 16189 - DNA, 25 bp, Saccharomyces pastorianus
atgcacgctaagaaggttgagagat

SEQ ID NO: 16190 - DNA, 25 bp, Saccharomyces pastorianus
ttggtgccgccaagtttgatgccat

SEQ ID NO: 16191 - DNA, 25 bp, Saccharomyces pastorianus
gttcaacaattccatttctgctcag

SEQ ID NO: 16192 - DNA, 25 bp, Saccharomyces pastorianus
tggatctctcaaatggcaccaggga

SEQ ID NO: 16193 - DNA, 25 bp, Saccharomyces pastorianus
taacggtgccattctttgtattcaa

SEQ ID NO: 16194 - DNA, 25 bp, Saccharomyces pastorianus
ttattccctacctttgtcacaggtg

SEQ ID NO: 16195 - DNA, 25 bp, Saccharomyces pastorianus
gttgagctcttcgacgagcacctta

SEQ ID NO: 16196 - DNA, 25 bp, Saccharomyces pastorianus
ggtccccgtttacaagttgagctct

SEQ ID NO: 16197 - DNA, 25 bp, Saccharomyces pastorianus
ccacctgcggtgttagagactcaag

SEQ ID NO: 16198 - DNA, 25 bp, Saccharomyces pastorianus
tccaaggccatctccacaagttgag

SEQ ID NO: 16199 - DNA, 25 bp, Saccharomyces pastorianus
ttaatcaactgttcttggctcccaa

SEQ ID NO: 16200 - DNA, 25 bp, Saccharomyces pastorianus
atggctttacaaggcgtttctttgg

SEQ ID NO: 16201 - DNA, 25 bp, Saccharomyces pastorianus
ttgtcaggacctgtatctgcctcaa

SEQ ID NO: 16202 - DNA, 25 bp, Saccharomyces pastorianus
ccaggtctgcaagcgatggctgaga

SEQ ID NO: 16203 - DNA, 25 bp, Saccharomyces pastorianus
gttactactgtaacggcatgcaatt

SEQ ID NO: 16204 - DNA, 25 bp, Saccharomyces pastorianus
ttatacggtttgatccacgcgaggt

SEQ ID NO: 16205 - DNA, 25 bp, Saccharomyces pastorianus
aatgacgaagccgtatctggcccca

SEQ ID NO: 16206 - DNA, 25 bp, Saccharomyces pastorianus
gcatgcaattactgccttgtgggct

SEQ ID NO: 16207 - DNA, 25 bp, Saccharomyces pastorianus
gagattgtattgtcctagttgtcag

SEQ ID NO: 16208 - DNA, 25 bp, Saccharomyces pastorianus
gagacaatacccattcacggaggaa

SEQ ID NO: 16209 - DNA, 25 bp, Saccharomyces pastorianus
acgcgaggttcattctgaccaagcc

SEQ ID NO: 16210 - DNA, 25 bp, Saccharomyces pastorianus
gatgcaaagtaatgacggccacgat

SEQ ID NO: 16211 - DNA, 25 bp, Saccharomyces pastorianus
tgcctcaatcatctaggttcctgtg

SEQ ID NO: 16212 - DNA, 25 bp, Saccharomyces pastorianus
ggtccaacttggcaaaggccttcaa

SEQ ID NO: 16213 - DNA, 25 bp, Saccharomyces pastorianus
atccgcagctcttgttggaagtgct

SEQ ID NO: 16214 - DNA, 25 bp, Saccharomyces pastorianus
acatgctcaaactcttgcgcaacat

SEQ ID NO: 16215 - DNA, 25 bp, Saccharomyces pastorianus
tggagcaatgctaccgtgacaagaa

SEQ ID NO: 16216 - DNA, 25 bp, Saccharomyces pastorianus
gacgttcatgacgagttgtcccaga

SEQ ID NO: 16217 - DNA, 25 bp, Saccharomyces pastorianus
gctgctgcagtgaaattgaccgtgg

SEQ ID NO: 16218 - DNA, 25 bp, Saccharomyces pastorianus
gaagactcgtctctacattttacga

SEQ ID NO: 16219 - DNA, 25 bp, Saccharomyces pastorianus
aagtgaccacgagtgatccgcagct

SEQ ID NO: 16220 - DNA, 25 bp, Saccharomyces pastorianus
gtgacaagaattacgctgctgcagt

SEQ ID NO: 16221 - DNA, 25 bp, Saccharomyces pastorianus
acccggacatggctcagcaaggtag

SEQ ID NO: 16222 - DNA, 25 bp, Saccharomyces pastorianus
agcaaggtagcgagcagtcttccac

SEQ ID NO: 16223 - DNA, 25 bp, Saccharomyces pastorianus
ggattcgcccactgacaaatttcta

SEQ ID NO: 16224 - DNA, 25 bp, Saccharomyces pastorianus
aggacaacatgaccaagctccgcgt

SEQ ID NO: 16225 - DNA, 25 bp, Saccharomyces pastorianus
aggactgccctaagatgaactacaa

SEQ ID NO: 16226 - DNA, 25 bp, Saccharomyces pastorianus
attcggcttcgagacttgcatgaaa

SEQ ID NO: 16227 - DNA, 25 bp, Saccharomyces pastorianus
gatgcgatacggttattcggcttcg

SEQ ID NO: 16228 - DNA, 25 bp, Saccharomyces pastorianus
gggaaggctattcttgttcgaagtt

SEQ ID NO: 16229 - DNA, 25 bp, Saccharomyces pastorianus
gatactatctattaccagcaaggac

SEQ ID NO: 16230 - DNA, 25 bp, Saccharomyces pastorianus
ccgctctgggagttgttggatttca

SEQ ID NO: 16231 - DNA, 25 bp, Saccharomyces pastorianus
aggcaatctgtttgttctgggtgaa

SEQ ID NO: 16232 - DNA, 25 bp, Saccharomyces pastorianus
tcaaatctgcaaacgagtctgtatt

SEQ ID NO: 16233 - DNA, 25 bp, Saccharomyces pastorianus
aggagctttacagcgtaccgtacga

SEQ ID NO: 16234 - DNA, 25 bp, Saccharomyces pastorianus
agccttcttccttgttgtcttaatt

SEQ ID NO: 16235 - DNA, 25 bp, Saccharomyces pastorianus
catttttgccctaccaagtcttgaa

SEQ ID NO: 16236 - DNA, 25 bp, Saccharomyces pastorianus
acgtcgtcctactatgtgcttatta

SEQ ID NO: 16237 - DNA, 25 bp, Saccharomyces pastorianus
tatgttggcccattggttgtacgcc

SEQ ID NO: 16238 - DNA, 25 bp, Saccharomyces pastorianus
gttgtacgccaacgcatgtgccaag

SEQ ID NO: 16239 - DNA, 25 bp, Saccharomyces pastorianus
tagcggctcatatcttctgattgat

SEQ ID NO: 16240 - DNA, 25 bp, Saccharomyces pastorianus
ttgggccctatcttgtggcttcaat

SEQ ID NO: 16241 - DNA, 25 bp, Saccharomyces pastorianus
atatatggtcacttctagcggctca

SEQ ID NO: 16242 - DNA, 25 bp, Saccharomyces pastorianus
caatatttcactgtacgtcgtccta

SEQ ID NO: 16243 - DNA, 25 bp, Saccharomyces pastorianus
gactcaatccttaatttgggcccta

SEQ ID NO: 16244 - DNA, 25 bp, Saccharomyces pastorianus
gcttcaattcggtattcccatggtt

SEQ ID NO: 16245 - DNA, 25 bp, Saccharomyces pastorianus
gaagtcggcgttgcaaccagtggca

SEQ ID NO: 16246 - DNA, 25 bp, Saccharomyces pastorianus
aagagaatggccaatctgtcccaaa

SEQ ID NO: 16247 - DNA, 25 bp, Saccharomyces pastorianus
tgcaagaaacgctgccttaagggct

SEQ ID NO: 16248 - DNA, 25 bp, Saccharomyces pastorianus
cttggacccagatactgtttcgtat

SEQ ID NO: 16249 - DNA, 25 bp, Saccharomyces pastorianus
atctgtcccaaatctacactcaaag

SEQ ID NO: 16250 - DNA, 25 bp, Saccharomyces pastorianus
gatcctgcaggttattttgttggtt

SEQ ID NO: 16251 - DNA, 25 bp, Saccharomyces pastorianus
ggacgaagaattgggcccatccatt

SEQ ID NO: 16252 - DNA, 25 bp, Saccharomyces pastorianus
atatgccgtgtgatgttctggctaa

SEQ ID NO: 16253 - DNA, 25 bp, Saccharomyces pastorianus
tacttacatttgtttccgtggacga

SEQ ID NO: 16254 - DNA, 25 bp, Saccharomyces pastorianus
gtagtcgaatttgccattacccata

SEQ ID NO: 16255 - DNA, 25 bp, Saccharomyces pastorianus
agtacctgacaaactcttggaccca

SEQ ID NO: 16256 - DNA, 25 bp, Saccharomyces pastorianus
cttctactaaaccatgcgctaatca

SEQ ID NO: 16257 - DNA, 25 bp, Saccharomyces pastorianus
tttgattcactccatattcgttcct

SEQ ID NO: 16258 - DNA, 25 bp, Saccharomyces pastorianus
taagatctcaactcgggttttacaa

SEQ ID NO: 16259 - DNA, 25 bp, Saccharomyces pastorianus
tcgcggtttcacgttaactactttg

SEQ ID NO: 16260 - DNA, 25 bp, Saccharomyces pastorianus
gcaggatttttcttacttctactaa

SEQ ID NO: 16261 - DNA, 25 bp, Saccharomyces pastorianus
gagtcaatttatatcgcggtttcac

SEQ ID NO: 16262 - DNA, 25 bp, Saccharomyces pastorianus
gagctaggtttgtttgttatcggat

SEQ ID NO: 16263 - DNA, 25 bp, Saccharomyces pastorianus
tttggtattggctccgtactttata

SEQ ID NO: 16264 - DNA, 25 bp, Saccharomyces pastorianus
atattcgttcctactatcctgttta

SEQ ID NO: 16265 - DNA, 25 bp, Saccharomyces pastorianus
gctgtttatatctgcctacaggcct

SEQ ID NO: 16266 - DNA, 25 bp, Saccharomyces pastorianus
cctacaggccttctagcaggatttt

SEQ ID NO: 16267 - DNA, 25 bp, Saccharomyces pastorianus
gcactgtctagttaacggccttgac

SEQ ID NO: 16268 - DNA, 25 bp, Saccharomyces pastorianus
gtgccgttcttgttgaccattttga

SEQ ID NO: 16269 - DNA, 25 bp, Saccharomyces pastorianus
tactaaagttcgacaacgctccaag

SEQ ID NO: 16270 - DNA, 25 bp, Saccharomyces pastorianus
gggtttgttctatgaatggcgtttc

SEQ ID NO: 16271 - DNA, 25 bp, Saccharomyces pastorianus
aaagtcaattatcgctccttcctat

SEQ ID NO: 16272 - DNA, 25 bp, Saccharomyces pastorianus
ttaacggccttgacgatatcggtat

SEQ ID NO: 16273 - DNA, 25 bp, Saccharomyces pastorianus
cgctccttcctatggtgatattttc

SEQ ID NO: 16274 - DNA, 25 bp, Saccharomyces pastorianus
gagagcacgcaccatgggctttgaa

SEQ ID NO: 16275 - DNA, 25 bp, Saccharomyces pastorianus
tactcgttcttggagggtggttcta

SEQ ID NO: 16276 - DNA, 25 bp, Saccharomyces pastorianus
gattttggattccaacggtgccgtt

SEQ ID NO: 16277 - DNA, 25 bp, Saccharomyces pastorianus
tttcgggtgtggttcttcaagagag

SEQ ID NO: 16278 - DNA, 25 bp, Saccharomyces pastorianus
ggcggatgccaagttttgatcatgt

SEQ ID NO: 16279 - DNA, 25 bp, Saccharomyces pastorianus
attcaacaccttcgtttggttacag

SEQ ID NO: 16280 - DNA, 25 bp, Saccharomyces pastorianus
gattttatcacaggctacattgcaa

SEQ ID NO: 16281 - DNA, 25 bp, Saccharomyces pastorianus
aataatggcaatcattggcggatgc

SEQ ID NO: 16282 - DNA, 25 bp, Saccharomyces pastorianus
gatttctgtttcgacttggaagatg

SEQ ID NO: 16283 - DNA, 25 bp, Saccharomyces pastorianus
cgctcatcgtctttgatttctgttt

SEQ ID NO: 16284 - DNA, 25 bp, Saccharomyces pastorianus
gatagaatttcaactgcaaacttaa

SEQ ID NO: 16285 - DNA, 25 bp, Saccharomyces pastorianus
gcaaacttaaacttcttccaagact

SEQ ID NO: 16286 - DNA, 25 bp, Saccharomyces pastorianus
gaagctgacggcatatcaagttgga

SEQ ID NO: 16287 - DNA, 25 bp, Saccharomyces pastorianus
ggttacagttctttactatgctagt

SEQ ID NO: 16288 - DNA, 25 bp, Saccharomyces pastorianus
ggcccgaattatttttcaatagcca

SEQ ID NO: 16289 - DNA, 25 bp, Saccharomyces pastorianus
aacactaccgatggcgtgggcacct

SEQ ID NO: 16290 - DNA, 25 bp, Saccharomyces pastorianus
tcgactgaatcgctaaggtcatcta

SEQ ID NO: 16291 - DNA, 25 bp, Saccharomyces pastorianus
gtggaaacactgctaccatgggtag

SEQ ID NO: 16292 - DNA, 25 bp, Saccharomyces pastorianus
ataccttgggaagtgccgtaagagc

SEQ ID NO: 16293 - DNA, 25 bp, Saccharomyces pastorianus
gtgggcaccttctagatccagggaa

SEQ ID NO: 16294 - DNA, 25 bp, Saccharomyces pastorianus
gagtactatctggataccttgggaa

SEQ ID NO: 16295 - DNA, 25 bp, Saccharomyces pastorianus
ttgtctcaaacactaccgatggcgt

SEQ ID NO: 16296 - DNA, 25 bp, Saccharomyces pastorianus
gaatcgctagctttaacgtctggaa

SEQ ID NO: 16297 - DNA, 25 bp, Saccharomyces pastorianus
aggtcatctaagctggagtactatc

SEQ ID NO: 16298 - DNA, 25 bp, Saccharomyces pastorianus
ggtagcgacatttcaataagcgact

SEQ ID NO: 16299 - DNA, 25 bp, Saccharomyces pastorianus
ataagcgacttcaagacatctctga

SEQ ID NO: 16300 - DNA, 25 bp, Saccharomyces pastorianus
gagtccttcatttgaccttatctaa

SEQ ID NO: 16301 - DNA, 25 bp, Saccharomyces pastorianus
gaacttgtgacatcgcatggttatt

SEQ ID NO: 16302 - DNA, 25 bp, Saccharomyces pastorianus
ttccaaatccccaatcttgacattt

SEQ ID NO: 16303 - DNA, 25 bp, Saccharomyces pastorianus
acacagtttcagagtccttcatttg

SEQ ID NO: 16304 - DNA, 25 bp, Saccharomyces pastorianus
atagacagtggctctcagatatgta

SEQ ID NO: 16305 - DNA, 25 bp, Saccharomyces pastorianus
ataagcttgcatcaggtggtaacga

SEQ ID NO: 16306 - DNA, 25 bp, Saccharomyces pastorianus
agaatgccggatcctttcttcgaaa

SEQ ID NO: 16307 - DNA, 25 bp, Saccharomyces pastorianus
aatggcttggtctcctcacaaaagg

SEQ ID NO: 16308 - DNA, 25 bp, Saccharomyces pastorianus
gtacttccatggatccaatcgcaat

SEQ ID NO: 16309 - DNA, 25 bp, Saccharomyces pastorianus
atactcaggaagtctgcggcttgaa

SEQ ID NO: 16310 - DNA, 25 bp, Saccharomyces pastorianus
atgggaccactgttgtttctggagc

SEQ ID NO: 16311 - DNA, 25 bp, Saccharomyces pastorianus
cagagttctccttcaggtgacttca

SEQ ID NO: 16312 - DNA, 25 bp, Saccharomyces pastorianus
aaatctgtcttcaatcccaagtaaa

SEQ ID NO: 16313 - DNA, 25 bp, Saccharomyces pastorianus
tgctcttcccagtcaaagtgattac

SEQ ID NO: 16314 - DNA, 25 bp, Saccharomyces pastorianus
gagcctctgcattttatttctatgg

SEQ ID NO: 16315 - DNA, 25 bp, Saccharomyces pastorianus
gaatctgtaaactctcgcgcaatgt

SEQ ID NO: 16316 - DNA, 25 bp, Saccharomyces pastorianus
agtggtccatcaacagagttctcct

SEQ ID NO: 16317 - DNA, 25 bp, Saccharomyces pastorianus
tgacttcacgttcctggcattagaa

SEQ ID NO: 16318 - DNA, 25 bp, Saccharomyces pastorianus
gattcaagtcattatcctgatctca

SEQ ID NO: 16319 - DNA, 25 bp, Saccharomyces pastorianus
gcgcaatgtggtggatcgtgattca

SEQ ID NO: 16320 - DNA, 25 bp, Saccharomyces pastorianus
aagttggaggactatgctcttccca

SEQ ID NO: 16321 - DNA, 25 bp, Saccharomyces pastorianus
tactggctcttgtgttatcgccctt

SEQ ID NO: 16322 - DNA, 25 bp, Saccharomyces pastorianus
ggaggtctctggtgaaactttcttt

SEQ ID NO: 16323 - DNA, 25 bp, Saccharomyces pastorianus
gatgctcatgttttagccgcacata

SEQ ID NO: 16324 - DNA, 25 bp, Saccharomyces pastorianus
aatttgcgctggttacctttcagaa

SEQ ID NO: 16325 - DNA, 25 bp, Saccharomyces pastorianus
gaaaagaccagttgcaatttgcgct

SEQ ID NO: 16326 - DNA, 25 bp, Saccharomyces pastorianus
gggccttagctcgtacagtttggaa

SEQ ID NO: 16327 - DNA, 25 bp, Saccharomyces pastorianus
agagccagggttgactccgtttaga

SEQ ID NO: 16328 - DNA, 25 bp, Saccharomyces pastorianus
gccgcacataagttgcttgacccaa

SEQ ID NO: 16329 - DNA, 25 bp, Saccharomyces pastorianus
ggcaaacgatccagacagcgatttt

SEQ ID NO: 16330 - DNA, 25 bp, Saccharomyces pastorianus
atgccggtaatgtcgctgatgctca

SEQ ID NO: 16331 - DNA, 25 bp, Saccharomyces pastorianus
gacagttggtgccaggtcttagaca

SEQ ID NO: 16332 - DNA, 25 bp, Saccharomyces pastorianus
ttatactgttgcacttcgtccagca

SEQ ID NO: 16333 - DNA, 25 bp, Saccharomyces pastorianus
ggcgttgggcgtaataacacacggt

SEQ ID NO: 16334 - DNA, 25 bp, Saccharomyces pastorianus
tgtgatgccatcaaacgacgtaatg

SEQ ID NO: 16335 - DNA, 25 bp, Saccharomyces pastorianus
gtacagcacgcttttagcagacaaa

SEQ ID NO: 16336 - DNA, 25 bp, Saccharomyces pastorianus
acacggtgaaaaactatcgccagga

SEQ ID NO: 16337 - DNA, 25 bp, Saccharomyces pastorianus
tcaagaactttctttaccctctcgt

SEQ ID NO: 16338 - DNA, 25 bp, Saccharomyces pastorianus
gatgtcacagctgtacagcacgctt

SEQ ID NO: 16339 - DNA, 25 bp, Saccharomyces pastorianus
ttacacaatatctcacatctcaggg

SEQ ID NO: 16340 - DNA, 25 bp, Saccharomyces pastorianus
tatcgacctttaaaccagcgctaca

SEQ ID NO: 16341 - DNA, 25 bp, Saccharomyces pastorianus
gaagatctgagagtgcgtacgctga

SEQ ID NO: 16342 - DNA, 25 bp, Saccharomyces pastorianus
gtaagcacgatccaaacattcctga

SEQ ID NO: 16343 - DNA, 25 bp, Saccharomyces pastorianus
ggattctcctcattcagatcagtca

SEQ ID NO: 16344 - DNA, 25 bp, Saccharomyces pastorianus
ggacgtccactatgctgagctatga

SEQ ID NO: 16345 - DNA, 25 bp, Saccharomyces pastorianus
tgaatttctgaattcttcccctagc

SEQ ID NO: 16346 - DNA, 25 bp, Saccharomyces pastorianus
gaaaggtttcgttcagtgcagcaaa

SEQ ID NO: 16347 - DNA, 25 bp, Saccharomyces pastorianus
cccctagccctgatatgtttacatt

SEQ ID NO: 16348 - DNA, 25 bp, Saccharomyces pastorianus
gactgttcttttcaaagtcgccctt

SEQ ID NO: 16349 - DNA, 25 bp, Saccharomyces pastorianus
gacagcaacagtgacgaccacgtat

SEQ ID NO: 16350 - DNA, 25 bp, Saccharomyces pastorianus
tgaataccctcgctccaaaaagtga

SEQ ID NO: 16351 - DNA, 25 bp, Saccharomyces pastorianus
cttcctgcttctgctactaaaacta

SEQ ID NO: 16352 - DNA, 25 bp, Saccharomyces pastorianus
gaccacgtatgacaatgagcccaat

SEQ ID NO: 16353 - DNA, 25 bp, Saccharomyces pastorianus
taacccttcagctacagacacatat

SEQ ID NO: 16354 - DNA, 25 bp, Saccharomyces pastorianus
agtgcatattataccttcctctagt

SEQ ID NO: 16355 - DNA, 25 bp, Saccharomyces pastorianus
gaagggaccttatgcgttcaagtat

SEQ ID NO: 16356 - DNA, 25 bp, Saccharomyces pastorianus
agttatgccatctatgaatgatcca

SEQ ID NO: 16357 - DNA, 25 bp, Saccharomyces pastorianus
gacgagtatgattactggtctctaa

SEQ ID NO: 16358 - DNA, 25 bp, Saccharomyces pastorianus
gaggtcagacaactctaatttcttg

SEQ ID NO: 16359 - DNA, 25 bp, Saccharomyces pastorianus
tatcaaatctattcgtatgccaaag

SEQ ID NO: 16360 - DNA, 25 bp, Saccharomyces pastorianus
gagacaggtatatcccatacgttaa

SEQ ID NO: 16361 - DNA, 25 bp, Saccharomyces pastorianus
gaacagtttgtcacgaatgtcaagt

SEQ ID NO: 16362 - DNA, 25 bp, Saccharomyces pastorianus
ttagccgatgagcagacaggttccg

SEQ ID NO: 16363 - DNA, 25 bp, Saccharomyces pastorianus
caggttccgcgggagagaataccca

SEQ ID NO: 16364 - DNA, 25 bp, Saccharomyces pastorianus
gtgtttggacaaggttgctactctt

SEQ ID NO: 16365 - DNA, 25 bp, Saccharomyces pastorianus
ggactatctatttaagctgtttgac

SEQ ID NO: 16366 - DNA, 25 bp, Saccharomyces pastorianus
atgccgacgcattagctcagtgtaa

SEQ ID NO: 16367 - DNA, 25 bp, Saccharomyces pastorianus
gattactcaagcaccatcatgacga

SEQ ID NO: 16368 - DNA, 25 bp, Saccharomyces pastorianus
aaagctgattgtcggcatcactaca

SEQ ID NO: 16369 - DNA, 25 bp, Saccharomyces pastorianus
gagcgttctctaagcgttctaagtt

SEQ ID NO: 16370 - DNA, 25 bp, Saccharomyces pastorianus
ggagatttcgacttatttcacatgg

SEQ ID NO: 16371 - DNA, 25 bp, Saccharomyces pastorianus
aaataatacgttggcgcctactcat

SEQ ID NO: 16372 - DNA, 25 bp, Saccharomyces pastorianus
atatcgtataggcacggctgtcctc

SEQ ID NO: 16373 - DNA, 25 bp, Saccharomyces pastorianus
ttattattaatgctgatgccgacgc

SEQ ID NO: 16374 - DNA, 25 bp, Saccharomyces pastorianus
acggctgtcctcacggaaggcggaa

SEQ ID NO: 16375 - DNA, 25 bp, Saccharomyces pastorianus
aatggatctccacccagacaaaaag

SEQ ID NO: 16376 - DNA, 25 bp, Saccharomyces pastorianus
gctaggtttttattcagttgccgaa

SEQ ID NO: 16377 - DNA, 25 bp, Saccharomyces pastorianus
gaatccccaaatcacatcaaaaaac

SEQ ID NO: 16378 - DNA, 25 bp, Saccharomyces pastorianus
ttgacagtggtgaaatacctccagt

SEQ ID NO: 16379 - DNA, 25 bp, Saccharomyces pastorianus
aatccaaagtacttctcacacactg

SEQ ID NO: 16380 - DNA, 25 bp, Saccharomyces pastorianus
cagtggtgaaatacctccagtattc

SEQ ID NO: 16381 - DNA, 25 bp, Saccharomyces pastorianus
gtaagccaggtgacgagatcgatga

SEQ ID NO: 16382 - DNA, 25 bp, Saccharomyces pastorianus
gatcgatgatttaattgacagtggt

SEQ ID NO: 16383 - DNA, 25 bp, Saccharomyces pastorianus
agggtcaaactctcaagcacatgaa

SEQ ID NO: 16384 - DNA, 25 bp, Saccharomyces pastorianus
caaataaatggactgaacgtgaatc

SEQ ID NO: 16385 - DNA, 25 bp, Saccharomyces pastorianus
aacgtgaatcaaaagctaatccaaa

SEQ ID NO: 16386 - DNA, 25 bp, Saccharomyces pastorianus
gccaggtgacgagatcgatgattta

SEQ ID NO: 16387 - DNA, 25 bp, Saccharomyces pastorianus
gaagagggtcaaactctcaagcaca

SEQ ID NO: 16388 - DNA, 25 bp, Saccharomyces pastorianus
agaagatggctttgaccactggtca

SEQ ID NO: 16389 - DNA, 25 bp, Saccharomyces pastorianus
gtggccgacgaaaaagtagccgaat

SEQ ID NO: 16390 - DNA, 25 bp, Saccharomyces pastorianus
ggaccaaatccaacaagttagtaat

SEQ ID NO: 16391 - DNA, 25 bp, Saccharomyces pastorianus
gaacacactgggtatgctaggtcac

SEQ ID NO: 16392 - DNA, 25 bp, Saccharomyces pastorianus
tgtttctaatccgttcaattctaaa

SEQ ID NO: 16393 - DNA, 25 bp, Saccharomyces pastorianus
tcaacaaatctcaaggtccactcaa

SEQ ID NO: 16394 - DNA, 25 bp, Saccharomyces pastorianus
gaatcgtagtatacttgccgttcat

SEQ ID NO: 16395 - DNA, 25 bp, Saccharomyces pastorianus
tacttgccgttcatgtttctaatcc

SEQ ID NO: 16396 - DNA, 25 bp, Saccharomyces pastorianus
cgcaagacgccgagagagctggtat

SEQ ID NO: 16397 - DNA, 25 bp, Saccharomyces pastorianus
tgctaggtcaccaaagtgaacagtt

SEQ ID NO: 16398 - DNA, 25 bp, Saccharomyces pastorianus
gagagctggtatgaacacactgggt

SEQ ID NO: 16399 - DNA, 25 bp, Saccharomyces pastorianus
gttggtggttatttctctccagtta

SEQ ID NO: 16400 - DNA, 25 bp, Saccharomyces pastorianus
aaggacctcatcgtggttaatggtt

SEQ ID NO: 16401 - DNA, 25 bp, Saccharomyces pastorianus
gaattagcttgcgaaaggacctcat

SEQ ID NO: 16402 - DNA, 25 bp, Saccharomyces pastorianus
agtccatgggtgaacctcacgtgtg

SEQ ID NO: 16403 - DNA, 25 bp, Saccharomyces pastorianus
gaatatcgaccgtggatggtcaaaa

SEQ ID NO: 16404 - DNA, 25 bp, Saccharomyces pastorianus
gattagcgccagctcatcatcgtgt

SEQ ID NO: 16405 - DNA, 25 bp, Saccharomyces pastorianus
ggtgatcttattgagtccatgggtg

SEQ ID NO: 16406 - DNA, 25 bp, Saccharomyces pastorianus
gactggatcggatgttagatctttc

SEQ ID NO: 16407 - DNA, 25 bp, Saccharomyces pastorianus
acgtgtgggctgattccgacttgca

SEQ ID NO: 16408 - DNA, 25 bp, Saccharomyces pastorianus
aaaacgtggattagcgccagctcat

SEQ ID NO: 16409 - DNA, 25 bp, Saccharomyces pastorianus
atgttactagcaggtggtgatctta

SEQ ID NO: 16410 - DNA, 25 bp, Saccharomyces pastorianus
ggataagtttcaaccatgcgatgga

SEQ ID NO: 16411 - DNA, 25 bp, Saccharomyces pastorianus
aatgattaccttttattcagcaaat

SEQ ID NO: 16412 - DNA, 25 bp, Saccharomyces pastorianus
gcttgaatcccggttacgcttatga

SEQ ID NO: 16413 - DNA, 25 bp, Saccharomyces pastorianus
gaggtcaatgcccacattacgaata

SEQ ID NO: 16414 - DNA, 25 bp, Saccharomyces pastorianus
gatgacatatccatgttaccgttag

SEQ ID NO: 16415 - DNA, 25 bp, Saccharomyces pastorianus
gggcatgttaaattagcacttcttg

SEQ ID NO: 16416 - DNA, 25 bp, Saccharomyces pastorianus
tattttgggtcgctgtaatcgtaaa

SEQ ID NO: 16417 - DNA, 25 bp, Saccharomyces pastorianus
gatctgctcatgcattacgcttaga

SEQ ID NO: 16418 - DNA, 25 bp, Saccharomyces pastorianus
acattgttctatttacaggttccga

SEQ ID NO: 16419 - DNA, 25 bp, Saccharomyces pastorianus
ggcgctaattccttgatctgctcat

SEQ ID NO: 16420 - DNA, 25 bp, Saccharomyces pastorianus
tacaggttccgatggttttattttg

SEQ ID NO: 16421 - DNA, 25 bp, Saccharomyces pastorianus
agctttatattatctaggcagttca

SEQ ID NO: 16422 - DNA, 25 bp, Saccharomyces pastorianus
atcggtttagtggtcaaagctttat

SEQ ID NO: 16423 - DNA, 25 bp, Saccharomyces pastorianus
gacgccgacgatcataacattaaca

SEQ ID NO: 16424 - DNA, 25 bp, Saccharomyces pastorianus
gaaattttttcaccgcggctttcag

SEQ ID NO: 16425 - DNA, 25 bp, Saccharomyces pastorianus
tatagaaagccagcgccgggccaaa

SEQ ID NO: 16426 - DNA, 25 bp, Saccharomyces pastorianus
gacaatggtcttctctatccagaca

SEQ ID NO: 16427 - DNA, 25 bp, Saccharomyces pastorianus
ggatgaggattctcaaccacaacca

SEQ ID NO: 16428 - DNA, 25 bp, Saccharomyces pastorianus
gaagtgtgtgtctatttcccagaaa

SEQ ID NO: 16429 - DNA, 25 bp, Saccharomyces pastorianus
tttggtatcgtttgtctttgtattg

SEQ ID NO: 16430 - DNA, 25 bp, Saccharomyces pastorianus
gatacttcaattaacgaccacaacg

SEQ ID NO: 16431 - DNA, 25 bp, Saccharomyces pastorianus
ggccaaaagcttacctctgaaacca

SEQ ID NO: 16432 - DNA, 25 bp, Saccharomyces pastorianus
gaaggtggtgataaccacgcctcta

SEQ ID NO: 16433 - DNA, 25 bp, Saccharomyces pastorianus
tggtgtcacgaatacgccgatatcc

SEQ ID NO: 16434 - DNA, 25 bp, Saccharomyces pastorianus
gggccactggtaaactctggtgtca

SEQ ID NO: 16435 - DNA, 25 bp, Saccharomyces pastorianus
taacgtgggtggatgtgcagtcaat

SEQ ID NO: 16436 - DNA, 25 bp, Saccharomyces pastorianus
tcgcatgggatttacctactggtga

SEQ ID NO: 16437 - DNA, 25 bp, Saccharomyces pastorianus
gaggagaaacatgccgatattttta

SEQ ID NO: 16438 - DNA, 25 bp, Saccharomyces pastorianus
acctgtggatttggtgacattttcg

SEQ ID NO: 16439 - DNA, 25 bp, Saccharomyces pastorianus
tgaacccgccagaatgatcattgct

SEQ ID NO: 16440 - DNA, 25 bp, Saccharomyces pastorianus
gtatcctgaaaacttccaaagcttg

SEQ ID NO: 16441 - DNA, 25 bp, Saccharomyces pastorianus
gggcacattcatcgcatgggattta

SEQ ID NO: 16442 - DNA, 25 bp, Saccharomyces pastorianus
gagagacgttactttgaaacacaat

SEQ ID NO: 16443 - DNA, 25 bp, Saccharomyces pastorianus
tgctatcttagaaatcccctccaag

SEQ ID NO: 16444 - DNA, 25 bp, Saccharomyces pastorianus
tcaatgcattccctgctatcttaga

SEQ ID NO: 16445 - DNA, 25 bp, Saccharomyces pastorianus
gctggtattggacaaatctctcctg

SEQ ID NO: 16446 - DNA, 25 bp, Saccharomyces pastorianus
aaatcccctccaaggatcatcctta

SEQ ID NO: 16447 - DNA, 25 bp, Saccharomyces pastorianus
cacaaccggtttattgttagctggt

SEQ ID NO: 16448 - DNA, 25 bp, Saccharomyces pastorianus
acaaagggacgatattgctattctt

SEQ ID NO: 16449 - DNA, 25 bp, Saccharomyces pastorianus
agctgacgaggataccacaaccggt

SEQ ID NO: 16450 - DNA, 25 bp, Saccharomyces pastorianus
accaccaaggaggagatcactgaca

SEQ ID NO: 16451 - DNA, 25 bp, Saccharomyces pastorianus
gctattcttttgatcaaccagcata

SEQ ID NO: 16452 - DNA, 25 bp, Saccharomyces pastorianus
ggatcatccttacgatcctgaaaag

SEQ ID NO: 16453 - DNA, 25 bp, Saccharomyces pastorianus
gacaagtttgatcacttcaccgaac

SEQ ID NO: 16454 - DNA, 25 bp, Saccharomyces pastorianus
agctactgcctttcatgattctaag

SEQ ID NO: 16455 - DNA, 25 bp, Saccharomyces pastorianus
gagttgcttgttatcctagctttga

SEQ ID NO: 16456 - DNA, 25 bp, Saccharomyces pastorianus
tattgtcttccgagaacttccattc

SEQ ID NO: 16457 - DNA, 25 bp, Saccharomyces pastorianus
aatgtaccgtctgtctctaattggc

SEQ ID NO: 16458 - DNA, 25 bp, Saccharomyces pastorianus
acatctgctagcttattcggagttg

SEQ ID NO: 16459 - DNA, 25 bp, Saccharomyces pastorianus
tggacttaaccctacatggagtgat

SEQ ID NO: 16460 - DNA, 25 bp, Saccharomyces pastorianus
gaaactgttaggttggagcccacaa

SEQ ID NO: 16461 - DNA, 25 bp, Saccharomyces pastorianus
ttccattctgttttgattgcctgct

SEQ ID NO: 16462 - DNA, 25 bp, Saccharomyces pastorianus
aaagtcgttctacaagctactgcct

SEQ ID NO: 16463 - DNA, 25 bp, Saccharomyces pastorianus
atgctgatcatctacgtcggtattt

SEQ ID NO: 16464 - DNA, 25 bp, Saccharomyces pastorianus
ggaacctccggatttatgctgatca

SEQ ID NO: 16465 - DNA, 25 bp, Saccharomyces pastorianus
atacgtttctgtctctgttttggtc

SEQ ID NO: 16466 - DNA, 25 bp, Saccharomyces pastorianus
acgtttctgtctctgttttggtcga

SEQ ID NO: 16467 - DNA, 25 bp, Saccharomyces pastorianus
aacttacagatacgtttctgtctct

SEQ ID NO: 16468 - DNA, 25 bp, Saccharomyces pastorianus
ttacagatacgtttctgtctctgtt

SEQ ID NO: 16469 - DNA, 25 bp, Saccharomyces pastorianus
tacgtttctgtctctgttttggtcg

SEQ ID NO: 16470 - DNA, 25 bp, Saccharomyces pastorianus
gatacgtttctgtctctgttttggt

SEQ ID NO: 16471 - DNA, 25 bp, Saccharomyces pastorianus
acttacagatacgtttctgtctctg

SEQ ID NO: 16472 - DNA, 25 bp, Saccharomyces pastorianus
cagatacgtttctgtctctgttttg

SEQ ID NO: 16473 - DNA, 25 bp, Saccharomyces pastorianus
cttacagatacgtttctgtctctgt

SEQ ID NO: 16474 - DNA, 25 bp, Saccharomyces pastorianus
agatacgtttctgtctctgttttgg

SEQ ID NO: 16475 - DNA, 25 bp, Saccharomyces pastorianus
gctacctggttcaggccaacggttt

SEQ ID NO: 16476 - DNA, 25 bp, Saccharomyces pastorianus
gttactgcgactttgaaagccgaat

SEQ ID NO: 16477 - DNA, 25 bp, Saccharomyces pastorianus
aatgattattggtgctactaaccgg

SEQ ID NO: 16478 - DNA, 25 bp, Saccharomyces pastorianus
ggtgttaacgatacttcttctctga

SEQ ID NO: 16479 - DNA, 25 bp, Saccharomyces pastorianus
caaaggattctcagggtcggactta

SEQ ID NO: 16480 - DNA, 25 bp, Saccharomyces pastorianus
tccaccgatcatgaagttactgcga

SEQ ID NO: 16481 - DNA, 25 bp, Saccharomyces pastorianus
aaaagattccttgtttcgctacctg

SEQ ID NO: 16482 - DNA, 25 bp, Saccharomyces pastorianus
ttcttgagagaacgttcttccaccg

SEQ ID NO: 16483 - DNA, 25 bp, Saccharomyces pastorianus
aaggcagctaattgacagtggcaaa

SEQ ID NO: 16484 - DNA, 25 bp, Saccharomyces pastorianus
gggtcggacttaaaagagctctgca

SEQ ID NO: 16485 - DNA, 25 bp, Saccharomyces pastorianus
agagccttgcataattttcattgat

SEQ ID NO: 16486 - DNA, 25 bp, Saccharomyces pastorianus
gctcatacagtatcacggcatatca

SEQ ID NO: 16487 - DNA, 25 bp, Saccharomyces pastorianus
aatcactgcctctgctgtaaattta

SEQ ID NO: 16488 - DNA, 25 bp, Saccharomyces pastorianus
atcacttttgtatccggttctaatg

SEQ ID NO: 16489 - DNA, 25 bp, Saccharomyces pastorianus
gtaaacaaatcactgcctctgctgt

SEQ ID NO: 16490 - DNA, 25 bp, Saccharomyces pastorianus
actcaatgcctactgtttcttcaag

SEQ ID NO: 16491 - DNA, 25 bp, Saccharomyces pastorianus
gagcaacaacagcacgtactttgtg

SEQ ID NO: 16492 - DNA, 25 bp, Saccharomyces pastorianus
gcgacaatggtacgctcatacagta

SEQ ID NO: 16493 - DNA, 25 bp, Saccharomyces pastorianus
gaatcaatcataccacctttaacaa

SEQ ID NO: 16494 - DNA, 25 bp, Saccharomyces pastorianus
ttgtgtattctcttatggtcctcat

SEQ ID NO: 16495 - DNA, 25 bp, Saccharomyces pastorianus
aaggaccacgaaagcttgcatcagt

SEQ ID NO: 16496 - DNA, 25 bp, Saccharomyces pastorianus
agacatctcttcttacactcaatgc

SEQ ID NO: 16497 - DNA, 25 bp, Saccharomyces pastorianus
atgtatgtagacgttcctggtgaga

SEQ ID NO: 16498 - DNA, 25 bp, Saccharomyces pastorianus
agaaacagacctatcgtatccacga

SEQ ID NO: 16499 - DNA, 25 bp, Saccharomyces pastorianus
gtctgcttctacatttactttctca

SEQ ID NO: 16500 - DNA, 25 bp, Saccharomyces pastorianus
gttatacactaacggcgcaggtgca

SEQ ID NO: 16501 - DNA, 25 bp, Saccharomyces pastorianus
tactttctcaggcatacttgtgata

SEQ ID NO: 16502 - DNA, 25 bp, Saccharomyces pastorianus
ttcagttcctagttctaagggcttt

SEQ ID NO: 16503 - DNA, 25 bp, Saccharomyces pastorianus
gacacacaacttttcaatagagccg

SEQ ID NO: 16504 - DNA, 25 bp, Saccharomyces pastorianus
atggccacaggttaagtctgcttct

SEQ ID NO: 16505 - DNA, 25 bp, Saccharomyces pastorianus
aagcacaaaccgttatggccacagg

SEQ ID NO: 16506 - DNA, 25 bp, Saccharomyces pastorianus
gataggcgctgttggtatatccact

SEQ ID NO: 16507 - DNA, 25 bp, Saccharomyces pastorianus
ttggcactggttcatctagaggcta

SEQ ID NO: 16508 - DNA, 25 bp, Saccharomyces pastorianus
gatggatactgaaaactctgacaac

SEQ ID NO: 16509 - DNA, 25 bp, Saccharomyces pastorianus
tccgcgcaatagcacacctaacaaa

SEQ ID NO: 16510 - DNA, 25 bp, Saccharomyces pastorianus
gacgacatttctgtgtctagtccta

SEQ ID NO: 16511 - DNA, 25 bp, Saccharomyces pastorianus
aacagtaactcgttcatgcgctcca

SEQ ID NO: 16512 - DNA, 25 bp, Saccharomyces pastorianus
taagggcgaaagcactccgcgcaat

SEQ ID NO: 16513 - DNA, 25 bp, Saccharomyces pastorianus
ggttaaaccaatatcatccctcaca

SEQ ID NO: 16514 - DNA, 25 bp, Saccharomyces pastorianus
gccaatcttgcaagaccgatggata

SEQ ID NO: 16515 - DNA, 25 bp, Saccharomyces pastorianus
atccctcacaaacacagtcacaaga

SEQ ID NO: 16516 - DNA, 25 bp, Saccharomyces pastorianus
gctccatcgtttcttccttaatggt

SEQ ID NO: 16517 - DNA, 25 bp, Saccharomyces pastorianus
acgatttgtttaaagctgctgctga

SEQ ID NO: 16518 - DNA, 25 bp, Saccharomyces pastorianus
ggccaaatccagaagaggctccaat

SEQ ID NO: 16519 - DNA, 25 bp, Saccharomyces pastorianus
tacggtctatacaagcaagctacag

SEQ ID NO: 16520 - DNA, 25 bp, Saccharomyces pastorianus
aaccctcaaccgatgaactactgga

SEQ ID NO: 16521 - DNA, 25 bp, Saccharomyces pastorianus
aagctacagtaggagacaatgacaa

SEQ ID NO: 16522 - DNA, 25 bp, Saccharomyces pastorianus
ggccaaggctgtcaacgagctacca

SEQ ID NO: 16523 - DNA, 25 bp, Saccharomyces pastorianus
ggaactttacggtctatacaagcaa

SEQ ID NO: 16524 - DNA, 25 bp, Saccharomyces pastorianus
agacaatgacaaggaaaagccaggt

SEQ ID NO: 16525 - DNA, 25 bp, Saccharomyces pastorianus
caacaaaaccctcaaccgatgaact

SEQ ID NO: 16526 - DNA, 25 bp, Saccharomyces pastorianus
aaaggccaaggctgtcaacgagcta

SEQ ID NO: 16527 - DNA, 25 bp, Saccharomyces pastorianus
tgccgaaaaggagtacatcgcgtat

SEQ ID NO: 16528 - DNA, 25 bp, Saccharomyces pastorianus
gaactactggaactttacggtctat

SEQ ID NO: 16529 - DNA, 25 bp, Saccharomyces pastorianus
tattcgaagaaaaggccaaggctgt

SEQ ID NO: 16530 - DNA, 25 bp, Saccharomyces pastorianus
gccttatttctggttagtactcact

SEQ ID NO: 16531 - DNA, 25 bp, Saccharomyces pastorianus
gggtcgtacgtcatgttccatttga

SEQ ID NO: 16532 - DNA, 25 bp, Saccharomyces pastorianus
agaacttaagccatttccttctgcc

SEQ ID NO: 16533 - DNA, 25 bp, Saccharomyces pastorianus
gattatcgtgccaattgccttattt

SEQ ID NO: 16534 - DNA, 25 bp, Saccharomyces pastorianus
acgtggtcgtcatcacactgttgaa

SEQ ID NO: 16535 - DNA, 25 bp, Saccharomyces pastorianus
ggcagtgcttcttcgtcaatcaaaa

SEQ ID NO: 16536 - DNA, 25 bp, Saccharomyces pastorianus
gttttcctggaactgctttttgaca

SEQ ID NO: 16537 - DNA, 25 bp, Saccharomyces pastorianus
tggaccctgactaacatgacttacg

SEQ ID NO: 16538 - DNA, 25 bp, Saccharomyces pastorianus
acattcgttgctgttgttccaaagt

SEQ ID NO: 16539 - DNA, 25 bp, Saccharomyces pastorianus
tatttttcaacttgttccctggtgt

SEQ ID NO: 16540 - DNA, 25 bp, Saccharomyces pastorianus
gcttggatcattcacgtggtcgtca

SEQ ID NO: 16541 - DNA, 25 bp, Saccharomyces pastorianus
aaacatttgctaaaggcgcggacca

SEQ ID NO: 16542 - DNA, 25 bp, Saccharomyces pastorianus
aaccgatccgctccaaatcatattt

SEQ ID NO: 16543 - DNA, 25 bp, Saccharomyces pastorianus
acctcgggtggtcaaaactcactgt

SEQ ID NO: 16544 - DNA, 25 bp, Saccharomyces pastorianus
aaacgcgtggattctccgaagtcta

SEQ ID NO: 16545 - DNA, 25 bp, Saccharomyces pastorianus
agaatagacacatcctccatacatt

SEQ ID NO: 16546 - DNA, 25 bp, Saccharomyces pastorianus
tgtgcacctgtgttttaattccgcc

SEQ ID NO: 16547 - DNA, 25 bp, Saccharomyces pastorianus
atggcaatcgccctttcaaatgcac

SEQ ID NO: 16548 - DNA, 25 bp, Saccharomyces pastorianus
gcacacgatacccattcagagaata

SEQ ID NO: 16549 - DNA, 25 bp, Saccharomyces pastorianus
gctgttctttttcttttccattgat

SEQ ID NO: 16550 - DNA, 25 bp, Saccharomyces pastorianus
atcatatttatcgttcccaagctcc

SEQ ID NO: 16551 - DNA, 25 bp, Saccharomyces pastorianus
attcgtatgactcccaaacgcgtgg

SEQ ID NO: 16552 - DNA, 25 bp, Saccharomyces pastorianus
aagcaacctgcttcctcagaacgtg

SEQ ID NO: 16553 - DNA, 25 bp, Saccharomyces pastorianus
gaaccacatttcaactgcaagggag

SEQ ID NO: 16554 - DNA, 25 bp, Saccharomyces pastorianus
gtggcgctagaggtggattcaacat

SEQ ID NO: 16555 - DNA, 25 bp, Saccharomyces pastorianus
aaactggtgtaagaatggcggccaa

SEQ ID NO: 16556 - DNA, 25 bp, Saccharomyces pastorianus
ttcacgtcagaacagatcctcctat

SEQ ID NO: 16557 - DNA, 25 bp, Saccharomyces pastorianus
agatcctcctattctatcagtgcaa

SEQ ID NO: 16558 - DNA, 25 bp, Saccharomyces pastorianus
agaagtccagaaacggtgcaaccag

SEQ ID NO: 16559 - DNA, 25 bp, Saccharomyces pastorianus
cagaacgtgtgcctactttgaacca

SEQ ID NO: 16560 - DNA, 25 bp, Saccharomyces pastorianus
aatgagttgaacaggccgagtataa

SEQ ID NO: 16561 - DNA, 25 bp, Saccharomyces pastorianus
gtgaacaagccttttaagaagccca

SEQ ID NO: 16562 - DNA, 25 bp, Saccharomyces pastorianus
ttcaagtaacagcatttcacgtcag

SEQ ID NO: 16563 - DNA, 25 bp, Saccharomyces pastorianus
gttacacgagtcaacagatcctatt

SEQ ID NO: 16564 - DNA, 25 bp, Saccharomyces pastorianus
gaacctcacttcagatacgtcttta

SEQ ID NO: 16565 - DNA, 25 bp, Saccharomyces pastorianus
gcggcttcctttagaaaccttgacg

SEQ ID NO: 16566 - DNA, 25 bp, Saccharomyces pastorianus
gactctcccactgaatattttgcaa

SEQ ID NO: 16567 - DNA, 25 bp, Saccharomyces pastorianus
tttccttcactcaagctgtagcatg

SEQ ID NO: 16568 - DNA, 25 bp, Saccharomyces pastorianus
acatgaccttgttgttttccttcac

SEQ ID NO: 16569 - DNA, 25 bp, Saccharomyces pastorianus
gagggcatccaagctgctaaagagt

SEQ ID NO: 16570 - DNA, 25 bp, Saccharomyces pastorianus
aataccgaggtgatggcggcttcct

SEQ ID NO: 16571 - DNA, 25 bp, Saccharomyces pastorianus
atcccggtgttctctctgtgagaaa

SEQ ID NO: 16572 - DNA, 25 bp, Saccharomyces pastorianus
cttgacgagctgaaggccttggcag

SEQ ID NO: 16573 - DNA, 25 bp, Saccharomyces pastorianus
catggatttctacaaggagcggtca

SEQ ID NO: 16574 - DNA, 25 bp, Saccharomyces pastorianus
tccgaattcgtttccaaatttcaag

SEQ ID NO: 16575 - DNA, 25 bp, Saccharomyces pastorianus
tacgagtgcaatactggaaccagct

SEQ ID NO: 16576 - DNA, 25 bp, Saccharomyces pastorianus
gaaagctgccgctacattggctaag

SEQ ID NO: 16577 - DNA, 25 bp, Saccharomyces pastorianus
aaagactcttactcagccgcataag

SEQ ID NO: 16578 - DNA, 25 bp, Saccharomyces pastorianus
gagtgcactgcaaaccattaaaggt

SEQ ID NO: 16579 - DNA, 25 bp, Saccharomyces pastorianus
gctaaacctgaaagctgccgctaca

SEQ ID NO: 16580 - DNA, 25 bp, Saccharomyces pastorianus
gtacttcaacccatttgctaatata

SEQ ID NO: 16581 - DNA, 25 bp, Saccharomyces pastorianus
attggctaagcattacaccctagag

SEQ ID NO: 16582 - DNA, 25 bp, Saccharomyces pastorianus
gccgcataagtaaatcgagtgcact

SEQ ID NO: 16583 - DNA, 25 bp, Saccharomyces pastorianus
gagataaccgctttgagttacgcag

SEQ ID NO: 16584 - DNA, 25 bp, Saccharomyces pastorianus
ccgctttgagttacgcaggtgatat

SEQ ID NO: 16585 - DNA, 25 bp, Saccharomyces pastorianus
gaaagccttcgatagttgcagatat

SEQ ID NO: 16586 - DNA, 25 bp, Saccharomyces pastorianus
atgctgttttgctttactctagtag

SEQ ID NO: 16587 - DNA, 25 bp, Saccharomyces pastorianus
tttatgtattccttatgccgcgggc

SEQ ID NO: 16588 - DNA, 25 bp, Saccharomyces pastorianus
aaaagtcatcgccatacctgtacta

SEQ ID NO: 16589 - DNA, 25 bp, Saccharomyces pastorianus
aaaacacgccgcatacaactgtatt

SEQ ID NO: 16590 - DNA, 25 bp, Saccharomyces pastorianus
gctatcgcatattcatcgtgccatg

SEQ ID NO: 16591 - DNA, 25 bp, Saccharomyces pastorianus
atacttcacggattgcgatatttgt

SEQ ID NO: 16592 - DNA, 25 bp, Saccharomyces pastorianus
gtagaggctttctttcagcattaca

SEQ ID NO: 16593 - DNA, 25 bp, Saccharomyces pastorianus
ggccttcctctctgaatattctaag

SEQ ID NO: 16594 - DNA, 25 bp, Saccharomyces pastorianus
ggttaacggctcaaagacattttca

SEQ ID NO: 16595 - DNA, 25 bp, Saccharomyces pastorianus
tttagggcgctcttttcatttgatt

SEQ ID NO: 16596 - DNA, 25 bp, Saccharomyces pastorianus
catggtcaagggatctcgttacgaa

SEQ ID NO: 16597 - DNA, 25 bp, Saccharomyces pastorianus
ttgcctgaaggccaactattttttg

SEQ ID NO: 16598 - DNA, 25 bp, Saccharomyces pastorianus
gaaggctcccaagaggaatccggaa

SEQ ID NO: 16599 - DNA, 25 bp, Saccharomyces pastorianus
ataacgtttgatggccaacctgcca

SEQ ID NO: 16600 - DNA, 25 bp, Saccharomyces pastorianus
atgtgtcattgagaccgacttggta

SEQ ID NO: 16601 - DNA, 25 bp, Saccharomyces pastorianus
gaggtgaaacctgaatcgtcatcaa

SEQ ID NO: 16602 - DNA, 25 bp, Saccharomyces pastorianus
gtcaagtcttagatccatcggtgct

SEQ ID NO: 16603 - DNA, 25 bp, Saccharomyces pastorianus
ggattttgcgccacccgtaggatat

SEQ ID NO: 16604 - DNA, 25 bp, Saccharomyces pastorianus
gacttggtaacggattttgcgccac

SEQ ID NO: 16605 - DNA, 25 bp, Saccharomyces pastorianus
aacctgccaaactagatttgcctga

SEQ ID NO: 16606 - DNA, 25 bp, Saccharomyces pastorianus
ggatttccaatggttctaccgaagg

SEQ ID NO: 16607 - DNA, 25 bp, Saccharomyces pastorianus
gttttcaattagatcggtaccagtg

SEQ ID NO: 16608 - DNA, 25 bp, Saccharomyces pastorianus
atcccagtgttgcacggaagatcca

SEQ ID NO: 16609 - DNA, 25 bp, Saccharomyces pastorianus
tcgacgaagagtgccgcttgcatat

SEQ ID NO: 16610 - DNA, 25 bp, Saccharomyces pastorianus
gacgtcgagttgattcattacggaa

SEQ ID NO: 16611 - DNA, 25 bp, Saccharomyces pastorianus
gaatacattgatgacgcagccgaaa

SEQ ID NO: 16612 - DNA, 25 bp, Saccharomyces pastorianus
agaattacaacactcttacgcccaa

SEQ ID NO: 16613 - DNA, 25 bp, Saccharomyces pastorianus
ataccggaagatcgttgcaaaattt

SEQ ID NO: 16614 - DNA, 25 bp, Saccharomyces pastorianus
tccataccattgaagacgtcgagtt

SEQ ID NO: 16615 - DNA, 25 bp, Saccharomyces pastorianus
ttacgcccaatgacaaactggttat

SEQ ID NO: 16616 - DNA, 25 bp, Saccharomyces pastorianus
tctaagccagagattaacgacgagt

SEQ ID NO: 16617 - DNA, 25 bp, Saccharomyces pastorianus
ataaggcttctttgaatgccatcag

SEQ ID NO: 16618 - DNA, 25 bp, Saccharomyces pastorianus
tgtacaatcaccattatagctccgc

SEQ ID NO: 16619 - DNA, 25 bp, Saccharomyces pastorianus
atcaatttcgccatcagtgctggtt

SEQ ID NO: 16620 - DNA, 25 bp, Saccharomyces pastorianus
ctggatccactgtgtgatcgcatgg

SEQ ID NO: 16621 - DNA, 25 bp, Saccharomyces pastorianus
gtcacagggtttttcgcattatcta

SEQ ID NO: 16622 - DNA, 25 bp, Saccharomyces pastorianus
aacagttgggtcgtgaaggtatcct

SEQ ID NO: 16623 - DNA, 25 bp, Saccharomyces pastorianus
tgatcattgcaccatatgttcctcc

SEQ ID NO: 16624 - DNA, 25 bp, Saccharomyces pastorianus
atcaaggccggcgtttttgtcacag

SEQ ID NO: 16625 - DNA, 25 bp, Saccharomyces pastorianus
acggcgagtccgtttattcaagcat

SEQ ID NO: 16626 - DNA, 25 bp, Saccharomyces pastorianus
tatgttcctccatcaaacggcgagt

SEQ ID NO: 16627 - DNA, 25 bp, Saccharomyces pastorianus
gcctccaggtgatgcgtatctacta

SEQ ID NO: 16628 - DNA, 25 bp, Saccharomyces pastorianus
tgaaggtatcctgccgttttccaac

SEQ ID NO: 16629 - DNA, 25 bp, Saccharomyces pastorianus
atttgatccgtatgctgagtttata

SEQ ID NO: 16630 - DNA, 25 bp, Saccharomyces pastorianus
taacgacatcaatggatcactcacc

SEQ ID NO: 16631 - DNA, 25 bp, Saccharomyces pastorianus
gtccgtgagaaaacatttgatccgt

SEQ ID NO: 16632 - DNA, 25 bp, Saccharomyces pastorianus
gcctcaactgctccttttgatagta

SEQ ID NO: 16633 - DNA, 25 bp, Saccharomyces pastorianus
agtgcataacccacaagtaccggcc

SEQ ID NO: 16634 - DNA, 25 bp, Saccharomyces pastorianus
gtatatcatcagtggatgccctaat

SEQ ID NO: 16635 - DNA, 25 bp, Saccharomyces pastorianus
caggcggaattcatctctttataca

SEQ ID NO: 16636 - DNA, 25 bp, Saccharomyces pastorianus
gttcagctgtttcacaaccatgaca

SEQ ID NO: 16637 - DNA, 25 bp, Saccharomyces pastorianus
gggcaaaaatcgactgacggcagaa

SEQ ID NO: 16638 - DNA, 25 bp, Saccharomyces pastorianus
gatatgcaggtagccgttcagctgt

SEQ ID NO: 16639 - DNA, 25 bp, Saccharomyces pastorianus
atctgataccttttgaggtccgtga

SEQ ID NO: 16640 - DNA, 25 bp, Saccharomyces pastorianus
aagtggctacagaatgggaccctga

SEQ ID NO: 16641 - DNA, 25 bp, Saccharomyces pastorianus
gttcaacgatatttctaaccaagag

SEQ ID NO: 16642 - DNA, 25 bp, Saccharomyces pastorianus
aaagattcttcttgactggcatctg

SEQ ID NO: 16643 - DNA, 25 bp, Saccharomyces pastorianus
gtctaaccaccaacacggttgaaat

SEQ ID NO: 16644 - DNA, 25 bp, Saccharomyces pastorianus
ataaccagacagctagaggccaaga

SEQ ID NO: 16645 - DNA, 25 bp, Saccharomyces pastorianus
aagccagagactgtctaaccaccaa

SEQ ID NO: 16646 - DNA, 25 bp, Saccharomyces pastorianus
agaggccaagaaaaggttcaacgat

SEQ ID NO: 16647 - DNA, 25 bp, Saccharomyces pastorianus
gactggcatctgatcgactttgtag

SEQ ID NO: 16648 - DNA, 25 bp, Saccharomyces pastorianus
aagagttccaaccatcattcaacgg

SEQ ID NO: 16649 - DNA, 25 bp, Saccharomyces pastorianus
gggactgttgaaatcgagaacgaaa

SEQ ID NO: 16650 - DNA, 25 bp, Saccharomyces pastorianus
ggaccctgaatttataaccagacag

SEQ ID NO: 16651 - DNA, 25 bp, Saccharomyces pastorianus
tatctctaggtttcggtaccgtcgg

SEQ ID NO: 16652 - DNA, 25 bp, Saccharomyces pastorianus
tacttcatcggtaactacgcctctt

SEQ ID NO: 16653 - DNA, 25 bp, Saccharomyces pastorianus
ttggtcgaagctattcctatctgga

SEQ ID NO: 16654 - DNA, 25 bp, Saccharomyces pastorianus
accctgctgaaactctatctctagg

SEQ ID NO: 16655 - DNA, 25 bp, Saccharomyces pastorianus
cggttacgatttcccatggtctttg

SEQ ID NO: 16656 - DNA, 25 bp, Saccharomyces pastorianus
tgggattactgcctagacaccgagt

SEQ ID NO: 16657 - DNA, 25 bp, Saccharomyces pastorianus
cgaagtcccattcccatctattaaa

SEQ ID NO: 16658 - DNA, 25 bp, Saccharomyces pastorianus
agatatgccgctccattcggtctat

SEQ ID NO: 16659 - DNA, 25 bp, Saccharomyces pastorianus
atacgtcatgtacaccggtcactta

SEQ ID NO: 16660 - DNA, 25 bp, Saccharomyces pastorianus
ggtcacttacatttgttcactctat

SEQ ID NO: 16661 - DNA, 25 bp, Saccharomyces pastorianus
tgttgactctcattccggttacgat

SEQ ID NO: 16662 - DNA, 25 bp, Saccharomyces pastorianus
aagattaacgcgaatggcaccctca

SEQ ID NO: 16663 - DNA, 25 bp, Saccharomyces pastorianus
aaattccgctttgggtgacgctctc

SEQ ID NO: 16664 - DNA, 25 bp, Saccharomyces pastorianus
agtgcaggatccaggcgtcttgacc

SEQ ID NO: 16665 - DNA, 25 bp, Saccharomyces pastorianus
ggatctttcgatctaagctcacctt

SEQ ID NO: 16666 - DNA, 25 bp, Saccharomyces pastorianus
tagaaactttctatcctgcttggat

SEQ ID NO: 16667 - DNA, 25 bp, Saccharomyces pastorianus
tgacgctctccatgggtatcaggac

SEQ ID NO: 16668 - DNA, 25 bp, Saccharomyces pastorianus
gaactttggccgtgctgaacgtgga

SEQ ID NO: 16669 - DNA, 25 bp, Saccharomyces pastorianus
aaaacgcgctattgcctattgtcca

SEQ ID NO: 16670 - DNA, 25 bp, Saccharomyces pastorianus
tattagcgcccattctggttggaac

SEQ ID NO: 16671 - DNA, 25 bp, Saccharomyces pastorianus
tcacagctgtactctttggtgcaga

SEQ ID NO: 16672 - DNA, 25 bp, Saccharomyces pastorianus
gacgcttacagaggcccagctaata

SEQ ID NO: 16673 - DNA, 25 bp, Saccharomyces pastorianus
aatgatatctatcacctggacggtg

SEQ ID NO: 16674 - DNA, 25 bp, Saccharomyces pastorianus
aagtggtcactcttttcgaaggcta

SEQ ID NO: 16675 - DNA, 25 bp, Saccharomyces pastorianus
ggttattactatcatcctgcttgtg

SEQ ID NO: 16676 - DNA, 25 bp, Saccharomyces pastorianus
aggtttggtcacttcagtactggaa

SEQ ID NO: 16677 - DNA, 25 bp, Saccharomyces pastorianus
aatacccattatgttcgacgcactg

SEQ ID NO: 16678 - DNA, 25 bp, Saccharomyces pastorianus
taaaacctcgcattctttggaccca

SEQ ID NO: 16679 - DNA, 25 bp, Saccharomyces pastorianus
ggtggctctcaatcgtctaaataca

SEQ ID NO: 16680 - DNA, 25 bp, Saccharomyces pastorianus
actggcccgcagaggaaccgtttga

SEQ ID NO: 16681 - DNA, 25 bp, Saccharomyces pastorianus
gaaccgtttgatccgtacatggctc

SEQ ID NO: 16682 - DNA, 25 bp, Saccharomyces pastorianus
gttttactacgtctgcttggaccaa

SEQ ID NO: 16683 - DNA, 25 bp, Saccharomyces pastorianus
agaaactcgagctggtgcctactaa

SEQ ID NO: 16684 - DNA, 25 bp, Saccharomyces pastorianus
cagctcataactttttgcatacgat

SEQ ID NO: 16685 - DNA, 25 bp, Saccharomyces pastorianus
aaagcgatttccatattttcagtga

SEQ ID NO: 16686 - DNA, 25 bp, Saccharomyces pastorianus
tctcatccttacgttttggcagtta

SEQ ID NO: 16687 - DNA, 25 bp, Saccharomyces pastorianus
gcctttgtcattttcatttctggag

SEQ ID NO: 16688 - DNA, 25 bp, Saccharomyces pastorianus
gagcttgtacgttgtgtactcggca

SEQ ID NO: 16689 - DNA, 25 bp, Saccharomyces pastorianus
aagagggtcattttggcagctcata

SEQ ID NO: 16690 - DNA, 25 bp, Saccharomyces pastorianus
agcagttcgcatattctcatcctta

SEQ ID NO: 16691 - DNA, 25 bp, Saccharomyces pastorianus
catgtttagggcacactctcaaagt

SEQ ID NO: 16692 - DNA, 25 bp, Saccharomyces pastorianus
actcggcaataaggttcgcatgttt

SEQ ID NO: 16693 - DNA, 25 bp, Saccharomyces pastorianus
tagtgtcgattcagagcctttgtca

SEQ ID NO: 16694 - DNA, 25 bp, Saccharomyces pastorianus
gtaggtcccttgatatctgactttg

SEQ ID NO: 16695 - DNA, 25 bp, Saccharomyces pastorianus
gaaactatcgccatacgtgaaaaag

SEQ ID NO: 16696 - DNA, 25 bp, Saccharomyces pastorianus
gaatactcatttcaggactttagtg

SEQ ID NO: 16697 - DNA, 25 bp, Saccharomyces pastorianus
ctttagtgtcttgaagtccttggac

SEQ ID NO: 16698 - DNA, 25 bp, Saccharomyces pastorianus
aagcaatctaattcttctcagcctc

SEQ ID NO: 16699 - DNA, 25 bp, Saccharomyces pastorianus
gatgaccgtgagaaaagcagtgcca

SEQ ID NO: 16700 - DNA, 25 bp, Saccharomyces pastorianus
aacgtcgaagaaggactcggcacaa

SEQ ID NO: 16701 - DNA, 25 bp, Saccharomyces pastorianus
agcgcagtcgtcgttcaaattcaaa

SEQ ID NO: 16702 - DNA, 25 bp, Saccharomyces pastorianus
aagcagtgccaccaagactaagaat

SEQ ID NO: 16703 - DNA, 25 bp, Saccharomyces pastorianus
acaaccccagacttgaaactatcgc

SEQ ID NO: 16704 - DNA, 25 bp, Saccharomyces pastorianus
gaaaaagttcacacaaacgtcgaag

SEQ ID NO: 16705 - DNA, 25 bp, Saccharomyces pastorianus
tagttggtgctggtgacaaggtcaa

SEQ ID NO: 16706 - DNA, 25 bp, Saccharomyces pastorianus
aagacagataatcctgccggactcc

SEQ ID NO: 16707 - DNA, 25 bp, Saccharomyces pastorianus
acaagccacgacaggtacgacgggt

SEQ ID NO: 16708 - DNA, 25 bp, Saccharomyces pastorianus
gtaaagttaacgctgccacaacctc

SEQ ID NO: 16709 - DNA, 25 bp, Saccharomyces pastorianus
aacgccttaagaagatcgggccaag

SEQ ID NO: 16710 - DNA, 25 bp, Saccharomyces pastorianus
ggaacactacaatcagtatcaccac

SEQ ID NO: 16711 - DNA, 25 bp, Saccharomyces pastorianus
atgaatgccatcctaacagacgtaa

SEQ ID NO: 16712 - DNA, 25 bp, Saccharomyces pastorianus
gccaagttgccagtgaccctaataa

SEQ ID NO: 16713 - DNA, 25 bp, Saccharomyces pastorianus
tggattcgctgctggttgaccaaat

SEQ ID NO: 16714 - DNA, 25 bp, Saccharomyces pastorianus
tgagcaagttaccatcgagttaaag

SEQ ID NO: 16715 - DNA, 25 bp, Saccharomyces pastorianus
gaccaaatgcaactaaacgccttaa

SEQ ID NO: 16716 - DNA, 25 bp, Saccharomyces pastorianus
ggtacgacgggtgacaatatagcaa

SEQ ID NO: 16717 - DNA, 25 bp, Saccharomyces pastorianus
gacccactttgcaacaattgacctt

SEQ ID NO: 16718 - DNA, 25 bp, Saccharomyces pastorianus
ggttgaaattagacccactttgcaa

SEQ ID NO: 16719 - DNA, 25 bp, Saccharomyces pastorianus
gtgcatcctgatgaaactggttgaa

SEQ ID NO: 16720 - DNA, 25 bp, Saccharomyces pastorianus
agtcgattggttggtcactcaagac

SEQ ID NO: 16721 - DNA, 25 bp, Saccharomyces pastorianus
gtgaacgactcgaacacttttagtt

SEQ ID NO: 16722 - DNA, 25 bp, Saccharomyces pastorianus
aaatattcacagcagttttccaaac

SEQ ID NO: 16723 - DNA, 25 bp, Saccharomyces pastorianus
ggtttatgcgcggttgcaatactat

SEQ ID NO: 16724 - DNA, 25 bp, Saccharomyces pastorianus
aacatgtctgttctaggtggtgtag

SEQ ID NO: 16725 - DNA, 25 bp, Saccharomyces pastorianus
agtggattgctttgctcattctaat

SEQ ID NO: 16726 - DNA, 25 bp, Saccharomyces pastorianus
gtcattatcggcaaatttggcgcat

SEQ ID NO: 16727 - DNA, 25 bp, Saccharomyces pastorianus
gtacattaccgctttgattctggtt

SEQ ID NO: 16728 - DNA, 25 bp, Saccharomyces pastorianus
atttttccaaagatatccgccttca

SEQ ID NO: 16729 - DNA, 25 bp, Saccharomyces pastorianus
gggtgttctcttacctaaaggtcat

SEQ ID NO: 16730 - DNA, 25 bp, Saccharomyces pastorianus
gacaatctgattgcatccaagaagg

SEQ ID NO: 16731 - DNA, 25 bp, Saccharomyces pastorianus
agctggcattgcgttatggagtgca

SEQ ID NO: 16732 - DNA, 25 bp, Saccharomyces pastorianus
tccgccttcaatcaaatattcttcg

SEQ ID NO: 16733 - DNA, 25 bp, Saccharomyces pastorianus
acatccagtcacacaacggttacat

SEQ ID NO: 16734 - DNA, 25 bp, Saccharomyces pastorianus
aacggttacatgatcctaaatactc

SEQ ID NO: 16735 - DNA, 25 bp, Saccharomyces pastorianus
gcaagactttttaccacctatcgat

SEQ ID NO: 16736 - DNA, 25 bp, Saccharomyces pastorianus
ggtatccacatcaacaaaggccgtt

SEQ ID NO: 16737 - DNA, 25 bp, Saccharomyces pastorianus
tgccaaccccttcttgccaaataaa

SEQ ID NO: 16738 - DNA, 25 bp, Saccharomyces pastorianus
atattcttcggtatccacatcaaca

SEQ ID NO: 16739 - DNA, 25 bp, Saccharomyces pastorianus
acaacggcagcttgagattcgacaa

SEQ ID NO: 16740 - DNA, 25 bp, Saccharomyces pastorianus
ataactcggtcaaacttgtctccca

SEQ ID NO: 16741 - DNA, 25 bp, Saccharomyces pastorianus
tgcccctctgtggatgcgttacaaa

SEQ ID NO: 16742 - DNA, 25 bp, Saccharomyces pastorianus
aacttctttatctattcttgcccat

SEQ ID NO: 16743 - DNA, 25 bp, Saccharomyces pastorianus
tcaaggtcgattccgagaggcctat

SEQ ID NO: 16744 - DNA, 25 bp, Saccharomyces pastorianus
gtatgcttccaacaagaacgggttc

SEQ ID NO: 16745 - DNA, 25 bp, Saccharomyces pastorianus
gatggtgatcgtactgttgctcaaa

SEQ ID NO: 16746 - DNA, 25 bp, Saccharomyces pastorianus
aaatcgtcattgtccgccaaaagtg

SEQ ID NO: 16747 - DNA, 25 bp, Saccharomyces pastorianus
ctgggcccagctatacgatatttaa

SEQ ID NO: 16748 - DNA, 25 bp, Saccharomyces pastorianus
gcgttacaaatcgacttgcctgggc

SEQ ID NO: 16749 - DNA, 25 bp, Saccharomyces pastorianus
gaagatgaccttgaccgtggttcca

SEQ ID NO: 16750 - DNA, 25 bp, Saccharomyces pastorianus
aatcaaaccctgtcttacgtggctt

SEQ ID NO: 16751 - DNA, 25 bp, Saccharomyces pastorianus
gaaagagaggccacattcactacca

SEQ ID NO: 16752 - DNA, 25 bp, Saccharomyces pastorianus
ggctaaggatcctatccctagtgat

SEQ ID NO: 16753 - DNA, 25 bp, Saccharomyces pastorianus
cctgcggatttgttaggtatctatc

SEQ ID NO: 16754 - DNA, 25 bp, Saccharomyces pastorianus
gttatgctgtttactttgactacca

SEQ ID NO: 16755 - DNA, 25 bp, Saccharomyces pastorianus
gtggctttgccatcacaacagctat

SEQ ID NO: 16756 - DNA, 25 bp, Saccharomyces pastorianus
tgactgtatatcctcaacctgcgga

SEQ ID NO: 16757 - DNA, 25 bp, Saccharomyces pastorianus
aagtcacggaattcttatctgtaga

SEQ ID NO: 16758 - DNA, 25 bp, Saccharomyces pastorianus
gccaagagccatgccaaggaggtca

SEQ ID NO: 16759 - DNA, 25 bp, Saccharomyces pastorianus
gaaagactgtccatgcaacaaggta

SEQ ID NO: 16760 - DNA, 25 bp, Saccharomyces pastorianus
tatcaaagatccatccctgaagcca

SEQ ID NO: 16761 - DNA, 25 bp, Saccharomyces pastorianus
ggatggcaagaactaccttcattaa

SEQ ID NO: 16762 - DNA, 25 bp, Saccharomyces pastorianus
tattgtatgatttgacgccacccga

SEQ ID NO: 16763 - DNA, 25 bp, Saccharomyces pastorianus
ttagacacggttttcaacatggacg

SEQ ID NO: 16764 - DNA, 25 bp, Saccharomyces pastorianus
aggtcatcactgaattcggtgcttt

SEQ ID NO: 16765 - DNA, 25 bp, Saccharomyces pastorianus
ggcgtcaacgttatgtatgctctca

SEQ ID NO: 16766 - DNA, 25 bp, Saccharomyces pastorianus
acctgtattggtgtgctgtgaaagt

SEQ ID NO: 16767 - DNA, 25 bp, Saccharomyces pastorianus
gacgccacccgaatacatcaaaaag

SEQ ID NO: 16768 - DNA, 25 bp, Saccharomyces pastorianus
gtattcttgggagcacattctattt

SEQ ID NO: 16769 - DNA, 25 bp, Saccharomyces pastorianus
ggtgcgttactaaaccagttcgtga

SEQ ID NO: 16770 - DNA, 25 bp, Saccharomyces pastorianus
agagcgggtacagcaatgttggcaa

SEQ ID NO: 16771 - DNA, 25 bp, Saccharomyces pastorianus
acatttaacgaattggcggatccga

SEQ ID NO: 16772 - DNA, 25 bp, Saccharomyces pastorianus
atggccaaggcagatggtccgaaga

SEQ ID NO: 16773 - DNA, 25 bp, Saccharomyces pastorianus
aagaattggtccgtgccgaagccga

SEQ ID NO: 16774 - DNA, 25 bp, Saccharomyces pastorianus
gtacaaggatcctcaatcccctaag

SEQ ID NO: 16775 - DNA, 25 bp, Saccharomyces pastorianus
aaaatcgctttgatcgctggttacg

SEQ ID NO: 16776 - DNA, 25 bp, Saccharomyces pastorianus
agatccaagttgagagccgctttca

SEQ ID NO: 16777 - DNA, 25 bp, Saccharomyces pastorianus
gaacacgaacatgccgatcatcaac

SEQ ID NO: 16778 - DNA, 25 bp, Saccharomyces pastorianus
tttgattccatcatcgaacactccg

SEQ ID NO: 16779 - DNA, 25 bp, Saccharomyces pastorianus
gccgctttcaactaccagtttgatt

SEQ ID NO: 16780 - DNA, 25 bp, Saccharomyces pastorianus
aatggactctagattccgcccaagt

SEQ ID NO: 16781 - DNA, 25 bp, Saccharomyces pastorianus
aggtgaaaccagacctgcctacgac

SEQ ID NO: 16782 - DNA, 25 bp, Saccharomyces pastorianus
cgaagccgaatccttagtcgctgaa

SEQ ID NO: 16783 - DNA, 25 bp, Saccharomyces pastorianus
gtgtttgacgctccagagagtctga

SEQ ID NO: 16784 - DNA, 25 bp, Saccharomyces pastorianus
gagctgtccaagttcctgcaagagg

SEQ ID NO: 16785 - DNA, 25 bp, Saccharomyces pastorianus
agctgaccagagatccggagttcca

SEQ ID NO: 16786 - DNA, 25 bp, Saccharomyces pastorianus
gaactaaagcttcccgtgtttgacg

SEQ ID NO: 16787 - DNA, 25 bp, Saccharomyces pastorianus
agaagaactccgtgatcagactgat

SEQ ID NO: 16788 - DNA, 25 bp, Saccharomyces pastorianus
taaaccagacaagcttcccgaagga

SEQ ID NO: 16789 - DNA, 25 bp, Saccharomyces pastorianus
atcggtgacgggtcgctgcaattga

SEQ ID NO: 16790 - DNA, 25 bp, Saccharomyces pastorianus
ggagagtcatcctgttcatcggtga

SEQ ID NO: 16791 - DNA, 25 bp, Saccharomyces pastorianus
gacgcctacggcatttcacaagttt

SEQ ID NO: 16792 - DNA, 25 bp, Saccharomyces pastorianus
gagggcgacgttattatatccgaga

SEQ ID NO: 16793 - DNA, 25 bp, Saccharomyces pastorianus
gcacgtccgcgttcggtataaacca

SEQ ID NO: 16794 - DNA, 25 bp, Saccharomyces pastorianus
ctttcactcctcaactagatagcga

SEQ ID NO: 16795 - DNA, 25 bp, Saccharomyces pastorianus
ggatatacaccattcagcggatcat

SEQ ID NO: 16796 - DNA, 25 bp, Saccharomyces pastorianus
caaggttctagtggcgtcttattta

SEQ ID NO: 16797 - DNA, 25 bp, Saccharomyces pastorianus
aagaaggccccgacaatcagatgga

SEQ ID NO: 16798 - DNA, 25 bp, Saccharomyces pastorianus
gaagtacgactttaccgtggattat

SEQ ID NO: 16799 - DNA, 25 bp, Saccharomyces pastorianus
gaagagctgcattttccgatagaac

SEQ ID NO: 16800 - DNA, 25 bp, Saccharomyces pastorianus
ggatctccagattacatggctctag

SEQ ID NO: 16801 - DNA, 25 bp, Saccharomyces pastorianus
gcggatcatccactaacgagacgta

SEQ ID NO: 16802 - DNA, 25 bp, Saccharomyces pastorianus
actaacggccatggtagatgactct

SEQ ID NO: 16803 - DNA, 25 bp, Saccharomyces pastorianus
ggtcattaggttgcatgctctttga

SEQ ID NO: 16804 - DNA, 25 bp, Saccharomyces pastorianus
gactctgcagtatcatcgaaactag

SEQ ID NO: 16805 - DNA, 25 bp, Saccharomyces pastorianus
gaagttccgtgctgctttagataga

SEQ ID NO: 16806 - DNA, 25 bp, Saccharomyces pastorianus
atgtctacggctgttttcgagatac

SEQ ID NO: 16807 - DNA, 25 bp, Saccharomyces pastorianus
ttagcttaccaatccagccttgtaa

SEQ ID NO: 16808 - DNA, 25 bp, Saccharomyces pastorianus
gtggaattctccaacttgtctacaa

SEQ ID NO: 16809 - DNA, 25 bp, Saccharomyces pastorianus
gagctggcacagagcctgttagctt

SEQ ID NO: 16810 - DNA, 25 bp, Saccharomyces pastorianus
atgctacgactctttttcctcagaa

SEQ ID NO: 16811 - DNA, 25 bp, Saccharomyces pastorianus
aagcaagttgttcctattccgaaat

SEQ ID NO: 16812 - DNA, 25 bp, Saccharomyces pastorianus
gaacgttctgttcatttccataagc

SEQ ID NO: 16813 - DNA, 25 bp, Saccharomyces pastorianus
ttggaagacgcgtattagccttctt

SEQ ID NO: 16814 - DNA, 25 bp, Saccharomyces pastorianus
aaaaatattcctggccagcttcaac

SEQ ID NO: 16815 - DNA, 25 bp, Saccharomyces pastorianus
attacttgcaattcactgtctacga

SEQ ID NO: 16816 - DNA, 25 bp, Saccharomyces pastorianus
tgatcagtcagctacggcaccttca

SEQ ID NO: 16817 - DNA, 25 bp, Saccharomyces pastorianus
gcgaatcaccatatcaaacccttaa

SEQ ID NO: 16818 - DNA, 25 bp, Saccharomyces pastorianus
agcttctagagttcatcctgtcaga

SEQ ID NO: 16819 - DNA, 25 bp, Saccharomyces pastorianus
gttccagtataatcgctacagggat

SEQ ID NO: 16820 - DNA, 25 bp, Saccharomyces pastorianus
agactccagcccatcttataatgaa

SEQ ID NO: 16821 - DNA, 25 bp, Saccharomyces pastorianus
gaaaaatgtatccttcagttctttg

SEQ ID NO: 16822 - DNA, 25 bp, Saccharomyces pastorianus
gaagtacatctgctgggaatccacc

SEQ ID NO: 16823 - DNA, 25 bp, Saccharomyces pastorianus
ggaaatgttccatctttaagcacag

SEQ ID NO: 16824 - DNA, 25 bp, Saccharomyces pastorianus
atgttaaaactgtccctgctgatca

SEQ ID NO: 16825 - DNA, 25 bp, Saccharomyces pastorianus
acgcgcaccctgctttttataaaag

SEQ ID NO: 16826 - DNA, 25 bp, Saccharomyces pastorianus
gctcaaaacttgaccactactggca

SEQ ID NO: 16827 - DNA, 25 bp, Saccharomyces pastorianus
gaatgctgtgcaagaaaggcctttt

SEQ ID NO: 16828 - DNA, 25 bp, Saccharomyces pastorianus
ggatgattttacatcggaccatcaa

SEQ ID NO: 16829 - DNA, 25 bp, Saccharomyces pastorianus
gttacgatcatccattcacgtcgat

SEQ ID NO: 16830 - DNA, 25 bp, Saccharomyces pastorianus
aaggccttttgaaccgttatcagca

SEQ ID NO: 16831 - DNA, 25 bp, Saccharomyces pastorianus
tgaacaagttcgtcgccgggtcgat

SEQ ID NO: 16832 - DNA, 25 bp, Saccharomyces pastorianus
agcataagggcgaaccctgctctag

SEQ ID NO: 16833 - DNA, 25 bp, Saccharomyces pastorianus
gaaagcacgccaactgacgcagcaa

SEQ ID NO: 16834 - DNA, 25 bp, Saccharomyces pastorianus
ttttttctccaacacgttacgatca

SEQ ID NO: 16835 - DNA, 25 bp, Saccharomyces pastorianus
aaagctcctggtttgaagttgacga

SEQ ID NO: 16836 - DNA, 25 bp, Saccharomyces pastorianus
gatggcatcttagctgacggcaaaa

SEQ ID NO: 16837 - DNA, 25 bp, Saccharomyces pastorianus
gaggaactgctgcaaagctcctggt

SEQ ID NO: 16838 - DNA, 25 bp, Saccharomyces pastorianus
gtattcgggttgtggcaatcgccta

SEQ ID NO: 16839 - DNA, 25 bp, Saccharomyces pastorianus
atactgttatttgtcttccctgttc

SEQ ID NO: 16840 - DNA, 25 bp, Saccharomyces pastorianus
gaggttcctccagaagtacatgtta

SEQ ID NO: 16841 - DNA, 25 bp, Saccharomyces pastorianus
aagcttgcacgcttggctattgcag

SEQ ID NO: 16842 - DNA, 25 bp, Saccharomyces pastorianus
gatgcttttcatatttgttccctca

SEQ ID NO: 16843 - DNA, 25 bp, Saccharomyces pastorianus
gttatggtacccgaagcttgcacgc

SEQ ID NO: 16844 - DNA, 25 bp, Saccharomyces pastorianus
gggatcaatcttgctgtattcgggt

SEQ ID NO: 16845 - DNA, 25 bp, Saccharomyces pastorianus
ggcgcctgggtagcatttttagcat

SEQ ID NO: 16846 - DNA, 25 bp, Saccharomyces pastorianus
ggtgcatccaatttcttctctttat

SEQ ID NO: 16847 - DNA, 25 bp, Saccharomyces pastorianus
tcatttggtgtttcactctcgtcaa

SEQ ID NO: 16848 - DNA, 25 bp, Saccharomyces pastorianus
atgcagcacatctaggaggctccat

SEQ ID NO: 16849 - DNA, 25 bp, Saccharomyces pastorianus
aactgctgcgattatcaggcttgcc

SEQ ID NO: 16850 - DNA, 25 bp, Saccharomyces pastorianus
agggtatgacgctcgactgatgccg

SEQ ID NO: 16851 - DNA, 25 bp, Saccharomyces pastorianus
gcctgggaagttaccggttagcatc

SEQ ID NO: 16852 - DNA, 25 bp, Saccharomyces pastorianus
agccattcaaatgcaactcgccaag

SEQ ID NO: 16853 - DNA, 25 bp, Saccharomyces pastorianus
tcgccaagcagttatcattcgtcaa

SEQ ID NO: 16854 - DNA, 25 bp, Saccharomyces pastorianus
gcttgcccctagaaggagcggacat

SEQ ID NO: 16855 - DNA, 25 bp, Saccharomyces pastorianus
ggatgctactagacgctgttaaaca

SEQ ID NO: 16856 - DNA, 25 bp, Saccharomyces pastorianus
acctgtgtggtctgttcatgaatac

SEQ ID NO: 16857 - DNA, 25 bp, Saccharomyces pastorianus
gattgccacctgtagagcttgtgaa

SEQ ID NO: 16858 - DNA, 25 bp, Saccharomyces pastorianus
cggttagcatccaccggaggagcta

SEQ ID NO: 16859 - DNA, 25 bp, Saccharomyces pastorianus
ggagaatacccttagattgccacct

SEQ ID NO: 16860 - DNA, 25 bp, Saccharomyces pastorianus
ggtgtcaaatattcagaagctcctg

SEQ ID NO: 16861 - DNA, 25 bp, Saccharomyces pastorianus
gaagctcctgaagccagcaagggtg

SEQ ID NO: 16862 - DNA, 25 bp, Saccharomyces pastorianus
gatgaaatattccaactccaaaaag

SEQ ID NO: 16863 - DNA, 25 bp, Saccharomyces pastorianus
cagccgcaatgggtctttgattgta

SEQ ID NO: 16864 - DNA, 25 bp, Saccharomyces pastorianus
agcaagggtgccaataagccaaaga

SEQ ID NO: 16865 - DNA, 25 bp, Saccharomyces pastorianus
tgaaacacttccacctcatttgagt

SEQ ID NO: 16866 - DNA, 25 bp, Saccharomyces pastorianus
ggtagaacatatattcagccgcaat

SEQ ID NO: 16867 - DNA, 25 bp, Saccharomyces pastorianus
gacatgtctaagattacccatcaaa

SEQ ID NO: 16868 - DNA, 25 bp, Saccharomyces pastorianus
gtatcttccaggtgaaacacttcca

SEQ ID NO: 16869 - DNA, 25 bp, Saccharomyces pastorianus
gttggttcctgccaacaagtatctt

SEQ ID NO: 16870 - DNA, 25 bp, Saccharomyces pastorianus
aataagggtgagttggttcctgcca

SEQ ID NO: 16871 - DNA, 25 bp, Saccharomyces pastorianus
gagttccagtatctcacaattggtg

SEQ ID NO: 16872 - DNA, 25 bp, Saccharomyces pastorianus
gattatactatcttcggctggtgaa

SEQ ID NO: 16873 - DNA, 25 bp, Saccharomyces pastorianus
tcagatattccagctgcaggtaata

SEQ ID NO: 16874 - DNA, 25 bp, Saccharomyces pastorianus
tagacatggacgcaacttccaccgt

SEQ ID NO: 16875 - DNA, 25 bp, Saccharomyces pastorianus
ttccaccgtttccaacaagtcatgt

SEQ ID NO: 16876 - DNA, 25 bp, Saccharomyces pastorianus
gatacatcgacttaagtgtaccaga

SEQ ID NO: 16877 - DNA, 25 bp, Saccharomyces pastorianus
cttcggctggtgaaaactcatcaat

SEQ ID NO: 16878 - DNA, 25 bp, Saccharomyces pastorianus
aacaagtcatgttcttcttggtcat

SEQ ID NO: 16879 - DNA, 25 bp, Saccharomyces pastorianus
gtaacaacagtactaccgtgggcaa

SEQ ID NO: 16880 - DNA, 25 bp, Saccharomyces pastorianus
atttcgctggactattctatgacaa

SEQ ID NO: 16881 - DNA, 25 bp, Saccharomyces pastorianus
gacgaagttccacagaccaacagta

SEQ ID NO: 16882 - DNA, 25 bp, Saccharomyces pastorianus
cttctgtgaagatactggcgattat

SEQ ID NO: 16883 - DNA, 25 bp, Saccharomyces pastorianus
acaccctagtcagtggaggtttagc

SEQ ID NO: 16884 - DNA, 25 bp, Saccharomyces pastorianus
aacagtacacaccaaacaccctagt

SEQ ID NO: 16885 - DNA, 25 bp, Saccharomyces pastorianus
cgttctcatcgtttacatcgttgta

SEQ ID NO: 16886 - DNA, 25 bp, Saccharomyces pastorianus
aatgtcgttctcatcgtttacatcg

SEQ ID NO: 16887 - DNA, 25 bp, Saccharomyces pastorianus
gtttaccgtggcaatggttgtacta

SEQ ID NO: 16888 - DNA, 25 bp, Saccharomyces pastorianus
atgtacctcgtactgtaatcaataa

SEQ ID NO: 16889 - DNA, 25 bp, Saccharomyces pastorianus
tacatcgttgtagccttctgtgaag

SEQ ID NO: 16890 - DNA, 25 bp, Saccharomyces pastorianus
gccgtcgatgtacctcgtactgtaa

SEQ ID NO: 16891 - DNA, 25 bp, Saccharomyces pastorianus
tgtacttacgtttttcattattcaa

SEQ ID NO: 16892 - DNA, 25 bp, Saccharomyces pastorianus
tggttgtactacctgtacttacgtt

SEQ ID NO: 16893 - DNA, 25 bp, Saccharomyces pastorianus
gtgcctaattgtttctgcattgttg

SEQ ID NO: 16894 - DNA, 25 bp, Saccharomyces pastorianus
tgctattgccatcttcgagttcgaa

SEQ ID NO: 16895 - DNA, 25 bp, Saccharomyces pastorianus
taatgaggtcgctttagtcgtcgct

SEQ ID NO: 16896 - DNA, 25 bp, Saccharomyces pastorianus
gaccgagggacttcttatgtgccta

SEQ ID NO: 16897 - DNA, 25 bp, Saccharomyces pastorianus
gactgtcgttatcaattcggttggt

SEQ ID NO: 16898 - DNA, 25 bp, Saccharomyces pastorianus
ggttggtaccattgacactgatgac

SEQ ID NO: 16899 - DNA, 25 bp, Saccharomyces pastorianus
tcattgcgctctcttggatatctaa

SEQ ID NO: 16900 - DNA, 25 bp, Saccharomyces pastorianus
agtcgtcgctgatgaattgcctatg

SEQ ID NO: 16901 - DNA, 25 bp, Saccharomyces pastorianus
tgatgactataactttgctgccaaa

SEQ ID NO: 16902 - DNA, 25 bp, Saccharomyces pastorianus
gtgttgttcaaatttccttctagcg

SEQ ID NO: 16903 - DNA, 25 bp, Saccharomyces pastorianus
gatttattgtacgaccacttcttag

SEQ ID NO: 16904 - DNA, 25 bp, Saccharomyces pastorianus
gcctcggcagcaatgtttctttcta

SEQ ID NO: 16905 - DNA, 25 bp, Saccharomyces pastorianus
attagcttcgctaatccgatgaatt

SEQ ID NO: 16906 - DNA, 25 bp, Saccharomyces pastorianus
gaacactagccaaattcttgatgga

SEQ ID NO: 16907 - DNA, 25 bp, Saccharomyces pastorianus
actgtatccagtttgccaattgttg

SEQ ID NO: 16908 - DNA, 25 bp, Saccharomyces pastorianus
atctgggatggcaacttgattcact

SEQ ID NO: 16909 - DNA, 25 bp, Saccharomyces pastorianus
gggcctgctctgtggacgagatcaa

SEQ ID NO: 16910 - DNA, 25 bp, Saccharomyces pastorianus
gatggattatcttgtagggcctacc

SEQ ID NO: 16911 - DNA, 25 bp, Saccharomyces pastorianus
tagggcctaccattcacgacgagtt

SEQ ID NO: 16912 - DNA, 25 bp, Saccharomyces pastorianus
ggaatattaccgtctttatgcgcct

SEQ ID NO: 16913 - DNA, 25 bp, Saccharomyces pastorianus
atcatgtttgttcattgcctctaaa

SEQ ID NO: 16914 - DNA, 25 bp, Saccharomyces pastorianus
taaacttccaaattagcttcgctaa

SEQ ID NO: 16915 - DNA, 25 bp, Saccharomyces pastorianus
tccagtatcgtgaccttttcatcat

SEQ ID NO: 16916 - DNA, 25 bp, Saccharomyces pastorianus
aaagctgtccttcggatttgcattg

SEQ ID NO: 16917 - DNA, 25 bp, Saccharomyces pastorianus
cagtgctgtcagacctcctaagggt

SEQ ID NO: 16918 - DNA, 25 bp, Saccharomyces pastorianus
ggatgcatgcgctagaattctggga

SEQ ID NO: 16919 - DNA, 25 bp, Saccharomyces pastorianus
gttcattttcactattgcaccagat

SEQ ID NO: 16920 - DNA, 25 bp, Saccharomyces pastorianus
tcctaagggttataccgccgacaag

SEQ ID NO: 16921 - DNA, 25 bp, Saccharomyces pastorianus
aaacagttgctgagccaagccataa

SEQ ID NO: 16922 - DNA, 25 bp, Saccharomyces pastorianus
attattccaattgctgaccgaactg

SEQ ID NO: 16923 - DNA, 25 bp, Saccharomyces pastorianus
agacatattcaagtggttccagtat

SEQ ID NO: 16924 - DNA, 25 bp, Saccharomyces pastorianus
gacgattctaaactcttttcggata

SEQ ID NO: 16925 - DNA, 25 bp, Saccharomyces pastorianus
ataatggctccatcagtgctgtcag

SEQ ID NO: 16926 - DNA, 25 bp, Saccharomyces pastorianus
gcatcatttatcgttgcctcaaggg

SEQ ID NO: 16927 - DNA, 25 bp, Saccharomyces pastorianus
gaggcagctgaccaaacaatcgagt

SEQ ID NO: 16928 - DNA, 25 bp, Saccharomyces pastorianus
aattggtctgcttagtaaggccacc

SEQ ID NO: 16929 - DNA, 25 bp, Saccharomyces pastorianus
ggcaagtgccggacatttacgatat

SEQ ID NO: 16930 - DNA, 25 bp, Saccharomyces pastorianus
gaaggatcatccgatacgcgacgaa

SEQ ID NO: 16931 - DNA, 25 bp, Saccharomyces pastorianus
tgagcacgatccttttagccgtagc

SEQ ID NO: 16932 - DNA, 25 bp, Saccharomyces pastorianus
agccgtagctcttgcgaaggctaaa

SEQ ID NO: 16933 - DNA, 25 bp, Saccharomyces pastorianus
gggcggagttgtgtctcaagaccaa

SEQ ID NO: 16934 - DNA, 25 bp, Saccharomyces pastorianus
tgtaaacctatccaattccaagcct

SEQ ID NO: 16935 - DNA, 25 bp, Saccharomyces pastorianus
ggtaggaagcccacgattgatttga

SEQ ID NO: 16936 - DNA, 25 bp, Saccharomyces pastorianus
tagtaacatggtacggcctttccct

SEQ ID NO: 16937 - DNA, 25 bp, Saccharomyces pastorianus
atatcgctcggaagtggtgccgcta

SEQ ID NO: 16938 - DNA, 25 bp, Saccharomyces pastorianus
ggatagtcaatggtcccatggcaaa

SEQ ID NO: 16939 - DNA, 25 bp, Saccharomyces pastorianus
ctggagctgatttgccgggcatcga

SEQ ID NO: 16940 - DNA, 25 bp, Saccharomyces pastorianus
agaaggtctactaaggccgccaaca

SEQ ID NO: 16941 - DNA, 25 bp, Saccharomyces pastorianus
aaatagcattgcctctggagctgat

SEQ ID NO: 16942 - DNA, 25 bp, Saccharomyces pastorianus
gaagaaacagttcagccaaccgctg

SEQ ID NO: 16943 - DNA, 25 bp, Saccharomyces pastorianus
agggacatccaaatcctctcaaggg

SEQ ID NO: 16944 - DNA, 25 bp, Saccharomyces pastorianus
aagaggcattccatgttcactgaaa

SEQ ID NO: 16945 - DNA, 25 bp, Saccharomyces pastorianus
cagcgaggcgtcctttgttctaaac

SEQ ID NO: 16946 - DNA, 25 bp, Saccharomyces pastorianus
aggccgccaacaacttgtcaacaga

SEQ ID NO: 16947 - DNA, 25 bp, Saccharomyces pastorianus
tgttcccttcctcgcaagtaagaaa

SEQ ID NO: 16948 - DNA, 25 bp, Saccharomyces pastorianus
gaccctgcgggcttaggtaagacta

SEQ ID NO: 16949 - DNA, 25 bp, Saccharomyces pastorianus
gaaattctaacgaaccagcagcgtg

SEQ ID NO: 16950 - DNA, 25 bp, Saccharomyces pastorianus
agacaatatgtcacaaggcaccggt

SEQ ID NO: 16951 - DNA, 25 bp, Saccharomyces pastorianus
tttattacaacgcagtgaggaccct

SEQ ID NO: 16952 - DNA, 25 bp, Saccharomyces pastorianus
gcatccagggttttgaaggcacaat

SEQ ID NO: 16953 - DNA, 25 bp, Saccharomyces pastorianus
ggtcacaattccagactttattaca

SEQ ID NO: 16954 - DNA, 25 bp, Saccharomyces pastorianus
caatggagagtaaaccctcttccca

SEQ ID NO: 16955 - DNA, 25 bp, Saccharomyces pastorianus
gaattggacactgcatccagggttt

SEQ ID NO: 16956 - DNA, 25 bp, Saccharomyces pastorianus
gaacgcgccaagaacatttctagcc

SEQ ID NO: 16957 - DNA, 25 bp, Saccharomyces pastorianus
aactaggcacacaattggcgatttt

SEQ ID NO: 16958 - DNA, 25 bp, Saccharomyces pastorianus
agcagcgtggtataacgtacttgaa

SEQ ID NO: 16959 - DNA, 25 bp, Saccharomyces pastorianus
gggtcctataacactgcattgcaat

SEQ ID NO: 16960 - DNA, 25 bp, Saccharomyces pastorianus
tgaatatagtccctaactcgcagct

SEQ ID NO: 16961 - DNA, 25 bp, Saccharomyces pastorianus
gtgggatcgccattggaatgcttca

SEQ ID NO: 16962 - DNA, 25 bp, Saccharomyces pastorianus
gaaagcatcctctacatacaaaaac

SEQ ID NO: 16963 - DNA, 25 bp, Saccharomyces pastorianus
atctatcttttcctgtcaattaacc

SEQ ID NO: 16964 - DNA, 25 bp, Saccharomyces pastorianus
gcattgcaatgccaggatggccgta

SEQ ID NO: 16965 - DNA, 25 bp, Saccharomyces pastorianus
aagaactggacatcctatcttccac

SEQ ID NO: 16966 - DNA, 25 bp, Saccharomyces pastorianus
gtggacttcctcttcttaaagtatt

SEQ ID NO: 16967 - DNA, 25 bp, Saccharomyces pastorianus
aactaggcacgtccagtgtcttcta

SEQ ID NO: 16968 - DNA, 25 bp, Saccharomyces pastorianus
acgccaagctttgtattgggtccta

SEQ ID NO: 16969 - DNA, 25 bp, Saccharomyces pastorianus
gatggccgtatagtggacttcctct

SEQ ID NO: 16970 - DNA, 25 bp, Saccharomyces pastorianus
attttccgacggtgtgggctactcg

SEQ ID NO: 16971 - DNA, 25 bp, Saccharomyces pastorianus
gagccaacaaatctactttagcctg

SEQ ID NO: 16972 - DNA, 25 bp, Saccharomyces pastorianus
aaggactttttgcaactgtgtatga

SEQ ID NO: 16973 - DNA, 25 bp, Saccharomyces pastorianus
gagttccataccgaatccgtacaac

SEQ ID NO: 16974 - DNA, 25 bp, Saccharomyces pastorianus
gccgctgataccgtcatgagatgga

SEQ ID NO: 16975 - DNA, 25 bp, Saccharomyces pastorianus
aaattcgatgcctggtttcctcaaa

SEQ ID NO: 16976 - DNA, 25 bp, Saccharomyces pastorianus
gggtgacgacatcccaactactaag

SEQ ID NO: 16977 - DNA, 25 bp, Saccharomyces pastorianus
tttcctcaaaagaccgccgctgata

SEQ ID NO: 16978 - DNA, 25 bp, Saccharomyces pastorianus
tgttcgccaatccaaaagctagctg

SEQ ID NO: 16979 - DNA, 25 bp, Saccharomyces pastorianus
tatttcagacgctatgttcgccaat

SEQ ID NO: 16980 - DNA, 25 bp, Saccharomyces pastorianus
ggctactcgtggatcgacggtctaa

SEQ ID NO: 16981 - DNA, 25 bp, Saccharomyces pastorianus
gtggctcagaacgtctttgcaaatg

SEQ ID NO: 16982 - DNA, 25 bp, Saccharomyces pastorianus
tatgtccctatttcagtagacgcag

SEQ ID NO: 16983 - DNA, 25 bp, Saccharomyces pastorianus
aaatcatcgccccaggaaacactat

SEQ ID NO: 16984 - DNA, 25 bp, Saccharomyces pastorianus
acacccctcgtaatcatcaaatgct

SEQ ID NO: 16985 - DNA, 25 bp, Saccharomyces pastorianus
gcatcaaggacactaggttcaagga

SEQ ID NO: 16986 - DNA, 25 bp, Saccharomyces pastorianus
tagaaacttgatgtccctaccaacc

SEQ ID NO: 16987 - DNA, 25 bp, Saccharomyces pastorianus
tgcactaaagcaatatcgacctgat

SEQ ID NO: 16988 - DNA, 25 bp, Saccharomyces pastorianus
atcaaatgctttccgtggctcagaa

SEQ ID NO: 16989 - DNA, 25 bp, Saccharomyces pastorianus
aagttctgggctcaactatgtccct

SEQ ID NO: 16990 - DNA, 25 bp, Saccharomyces pastorianus
agaaaaccttgcattgtacgtggag

SEQ ID NO: 16991 - DNA, 25 bp, Saccharomyces pastorianus
atcgacctgatatcgtatccgaagt

SEQ ID NO: 16992 - DNA, 25 bp, Saccharomyces pastorianus
agaagggtactccagacatcacagc

SEQ ID NO: 16993 - DNA, 25 bp, Saccharomyces pastorianus
agctccagagcagcctcttttgaag

SEQ ID NO: 16994 - DNA, 25 bp, Saccharomyces pastorianus
gctactgcgtattctcaaggttctt

SEQ ID NO: 16995 - DNA, 25 bp, Saccharomyces pastorianus
gaaaaggccaacttctaactcgata

SEQ ID NO: 16996 - DNA, 25 bp, Saccharomyces pastorianus
caaggttcttccctagaatccgata

SEQ ID NO: 16997 - DNA, 25 bp, Saccharomyces pastorianus
gatggttacacacaatgcgttagaa

SEQ ID NO: 16998 - DNA, 25 bp, Saccharomyces pastorianus
aagactctcgtgtttccggagcaaa

SEQ ID NO: 16999 - DNA, 25 bp, Saccharomyces pastorianus
aaattcggcgcacgatgctgcattt

SEQ ID NO: 17000 - DNA, 25 bp, Saccharomyces pastorianus
atcacagccccagtaacaaattcgg

SEQ ID NO: 17001 - DNA, 25 bp, Saccharomyces pastorianus
gtcactctgatgtgcactctcatca

SEQ ID NO: 17002 - DNA, 25 bp, Saccharomyces pastorianus
acagtgtaggcgatcagcaccgtca

SEQ ID NO: 17003 - DNA, 25 bp, Saccharomyces pastorianus
gacgtgagtcactactcagcatctg

SEQ ID NO: 17004 - DNA, 25 bp, Saccharomyces pastorianus
tactttcactgtattaggctccgcc

SEQ ID NO: 17005 - DNA, 25 bp, Saccharomyces pastorianus
gttgttttcaactcgcttcaaagtg

SEQ ID NO: 17006 - DNA, 25 bp, Saccharomyces pastorianus
ttacagatgcttgtggacccaaacg

SEQ ID NO: 17007 - DNA, 25 bp, Saccharomyces pastorianus
gcttcaaagtgttctcttccagata

SEQ ID NO: 17008 - DNA, 25 bp, Saccharomyces pastorianus
gataccacttcaaagccggatcttt

SEQ ID NO: 17009 - DNA, 25 bp, Saccharomyces pastorianus
gaacaccatatatgtgccgccttta

SEQ ID NO: 17010 - DNA, 25 bp, Saccharomyces pastorianus
gatggcgactactacggaacacgat

SEQ ID NO: 17011 - DNA, 25 bp, Saccharomyces pastorianus
ggtgactttaacttcttctatggtg

SEQ ID NO: 17012 - DNA, 25 bp, Saccharomyces pastorianus
gcctgcagacgagatcctgattctt

SEQ ID NO: 17013 - DNA, 25 bp, Saccharomyces pastorianus
tgatttgggcgcgtctatacccgat

SEQ ID NO: 17014 - DNA, 25 bp, Saccharomyces pastorianus
gaagttcatatgaccaactcgcgaa

SEQ ID NO: 17015 - DNA, 25 bp, Saccharomyces pastorianus
aagggtggacgcatctctaaagaca

SEQ ID NO: 17016 - DNA, 25 bp, Saccharomyces pastorianus
gagatccaggaagccagtgcaaatc

SEQ ID NO: 17017 - DNA, 25 bp, Saccharomyces pastorianus
ggaaaatgttaaggcaccaactggt

SEQ ID NO: 17018 - DNA, 25 bp, Saccharomyces pastorianus
aaagctttccactacactgttcaag

SEQ ID NO: 17019 - DNA, 25 bp, Saccharomyces pastorianus
agtaaataaactggcctctactttg

SEQ ID NO: 17020 - DNA, 25 bp, Saccharomyces pastorianus
aaccctaagaaatctcactacacag

SEQ ID NO: 17021 - DNA, 25 bp, Saccharomyces pastorianus
gcaccaactggtgtcgaaagtttta

SEQ ID NO: 17022 - DNA, 25 bp, Saccharomyces pastorianus
gaaaaccaagagtctatagcatgga

SEQ ID NO: 17023 - DNA, 25 bp, Saccharomyces pastorianus
gcctctactttggagtctgaatcga

SEQ ID NO: 17024 - DNA, 25 bp, Saccharomyces pastorianus
aagactcaagggactggaagttcat

SEQ ID NO: 17025 - DNA, 25 bp, Saccharomyces pastorianus
gaacgccgtgctcatgaagaacaat

SEQ ID NO: 17026 - DNA, 25 bp, Saccharomyces pastorianus
ggactcatttatcggcaatcaccaa

SEQ ID NO: 17027 - DNA, 25 bp, Saccharomyces pastorianus
aaaatgctgatgacgctctgaaaca

SEQ ID NO: 17028 - DNA, 25 bp, Saccharomyces pastorianus
agctgaaggcttacatgcggccgaa

SEQ ID NO: 17029 - DNA, 25 bp, Saccharomyces pastorianus
aagagagcaagcacgccattccaaa

SEQ ID NO: 17030 - DNA, 25 bp, Saccharomyces pastorianus
aaaacaccatccaatcacttacaag

SEQ ID NO: 17031 - DNA, 25 bp, Saccharomyces pastorianus
tgatatcgacgctcaaatttccacc

SEQ ID NO: 17032 - DNA, 25 bp, Saccharomyces pastorianus
agaagaacaggctcaccaggctcaa

SEQ ID NO: 17033 - DNA, 25 bp, Saccharomyces pastorianus
aaacttgaagatgaacgccgtgctc

SEQ ID NO: 17034 - DNA, 25 bp, Saccharomyces pastorianus
gaagagcagatcacgcaggtcaaaa

SEQ ID NO: 17035 - DNA, 25 bp, Saccharomyces pastorianus
agccatcgaagaacaaacccgtcaa

SEQ ID NO: 17036 - DNA, 25 bp, Saccharomyces pastorianus
tagaagcctccaaggacattgccca

SEQ ID NO: 17037 - DNA, 25 bp, Saccharomyces pastorianus
tggccaattccagtagtgttatcta

SEQ ID NO: 17038 - DNA, 25 bp, Saccharomyces pastorianus
tagcacagtttgatgcagccgagtt

SEQ ID NO: 17039 - DNA, 25 bp, Saccharomyces pastorianus
ggaagatgtctcaattacccatatg

SEQ ID NO: 17040 - DNA, 25 bp, Saccharomyces pastorianus
tacccatatgacgtttggccccgaa

SEQ ID NO: 17041 - DNA, 25 bp, Saccharomyces pastorianus
attgccacgaacactggtactagag

SEQ ID NO: 17042 - DNA, 25 bp, Saccharomyces pastorianus
gagtcttgcacagaccagaggtttt

SEQ ID NO: 17043 - DNA, 25 bp, Saccharomyces pastorianus
aatggtgtccttgacgttaagagtc

SEQ ID NO: 17044 - DNA, 25 bp, Saccharomyces pastorianus
ggttttacaactgccttccatatat

SEQ ID NO: 17045 - DNA, 25 bp, Saccharomyces pastorianus
gacattgcccaaactctggccaatt

SEQ ID NO: 17046 - DNA, 25 bp, Saccharomyces pastorianus
tttaccaagtcaacacgccggtagt

SEQ ID NO: 17047 - DNA, 25 bp, Saccharomyces pastorianus
catttatctatgctggccatgatga

SEQ ID NO: 17048 - DNA, 25 bp, Saccharomyces pastorianus
gaccattcggtgtatcatttatcta

SEQ ID NO: 17049 - DNA, 25 bp, Saccharomyces pastorianus
gttggagcaagacacttccacggaa

SEQ ID NO: 17050 - DNA, 25 bp, Saccharomyces pastorianus
taaaattgctgtcgctgttgctggg

SEQ ID NO: 17051 - DNA, 25 bp, Saccharomyces pastorianus
gacagtagcgcgttgacatacgaca

SEQ ID NO: 17052 - DNA, 25 bp, Saccharomyces pastorianus
gagttcacgctcaaaactacctaaa

SEQ ID NO: 17053 - DNA, 25 bp, Saccharomyces pastorianus
gaaggctatcagtgttggtgctaac

SEQ ID NO: 17054 - DNA, 25 bp, Saccharomyces pastorianus
gaagaccggcatcaccaagaaggat

SEQ ID NO: 17055 - DNA, 25 bp, Saccharomyces pastorianus
tacggttaccaactgtatacttcca

SEQ ID NO: 17056 - DNA, 25 bp, Saccharomyces pastorianus
gtatacttccaatccatcgggtaac

SEQ ID NO: 17057 - DNA, 25 bp, Saccharomyces pastorianus
acgacaggttagagtttgccactat

SEQ ID NO: 17058 - DNA, 25 bp, Saccharomyces pastorianus
cgcctccatcttatggaccagtagt

SEQ ID NO: 17059 - DNA, 25 bp, Saccharomyces pastorianus
gagtgtgccgaagccttatatgatt

SEQ ID NO: 17060 - DNA, 25 bp, Saccharomyces pastorianus
aatgggttacgtccaagcaccacct

SEQ ID NO: 17061 - DNA, 25 bp, Saccharomyces pastorianus
gaaggcgaccttcctttgaaagcag

SEQ ID NO: 17062 - DNA, 25 bp, Saccharomyces pastorianus
taaaatatctcgtcctagtgcgccg

SEQ ID NO: 17063 - DNA, 25 bp, Saccharomyces pastorianus
gaagatctcccctaattggtataga

SEQ ID NO: 17064 - DNA, 25 bp, Saccharomyces pastorianus
agtagtctcatcatactcttcacag

SEQ ID NO: 17065 - DNA, 25 bp, Saccharomyces pastorianus
gggtgggtatatttcctgcaaacta

SEQ ID NO: 17066 - DNA, 25 bp, Saccharomyces pastorianus
ttccacaacgcatccgtagaagagt

SEQ ID NO: 17067 - DNA, 25 bp, Saccharomyces pastorianus
gcatttgcaagatcagcttcacctg

SEQ ID NO: 17068 - DNA, 25 bp, Saccharomyces pastorianus
atcttacgctcctccaatgggttac

SEQ ID NO: 17069 - DNA, 25 bp, Saccharomyces pastorianus
cactctttattcaacctctttacat

SEQ ID NO: 17070 - DNA, 25 bp, Saccharomyces pastorianus
tggtgtggcatctcaatctttgcaa

SEQ ID NO: 17071 - DNA, 25 bp, Saccharomyces pastorianus
gaggaggccggctatttccaaaaat

SEQ ID NO: 17072 - DNA, 25 bp, Saccharomyces pastorianus
aactcgattacttgcgatccagaag

SEQ ID NO: 17073 - DNA, 25 bp, Saccharomyces pastorianus
ggccgttatgaatctgggtatctct

SEQ ID NO: 17074 - DNA, 25 bp, Saccharomyces pastorianus
cagcctaaaggctctaactcgatta

SEQ ID NO: 17075 - DNA, 25 bp, Saccharomyces pastorianus
aagaaccaatgtcggccgttatgaa

SEQ ID NO: 17076 - DNA, 25 bp, Saccharomyces pastorianus
gccgtctctgcgatttctactttaa

SEQ ID NO: 17077 - DNA, 25 bp, Saccharomyces pastorianus
aatctttgcaaatcgctccgtttga

SEQ ID NO: 17078 - DNA, 25 bp, Saccharomyces pastorianus
agaaaatccaaccttcactctttat

SEQ ID NO: 17079 - DNA, 25 bp, Saccharomyces pastorianus
gactacgtcagattgtatcagccta

SEQ ID NO: 17080 - DNA, 25 bp, Saccharomyces pastorianus
aggtccttccgtgggaacgcaagag

SEQ ID NO: 17081 - DNA, 25 bp, Saccharomyces pastorianus
aatgaaagcaggtccttccgtggga

SEQ ID NO: 17082 - DNA, 25 bp, Saccharomyces pastorianus
tcttacatcgtaatcatcgtggtga

SEQ ID NO: 17083 - DNA, 25 bp, Saccharomyces pastorianus
gctgctaaacgtatcagagccttga

SEQ ID NO: 17084 - DNA, 25 bp, Saccharomyces pastorianus
agggcgaaggtgctcatgttacatt

SEQ ID NO: 17085 - DNA, 25 bp, Saccharomyces pastorianus
agagccttgactgctgccgaagaat

SEQ ID NO: 17086 - DNA, 25 bp, Saccharomyces pastorianus
gacacagtaaaaccaaacgtcctga

SEQ ID NO: 17087 - DNA, 25 bp, Saccharomyces pastorianus
tgaagcagaacttacgtttgttccc

SEQ ID NO: 17088 - DNA, 25 bp, Saccharomyces pastorianus
tgactgctgccgaagaatctgatga

SEQ ID NO: 17089 - DNA, 25 bp, Saccharomyces pastorianus
gttacattcggtgaacaagtcggag

SEQ ID NO: 17090 - DNA, 25 bp, Saccharomyces pastorianus
aagcaaagagcactaatcgtacgta

SEQ ID NO: 17091 - DNA, 25 bp, Saccharomyces pastorianus
ttatcttcttctccatcgtcatcaa

SEQ ID NO: 17092 - DNA, 25 bp, Saccharomyces pastorianus
ggctacgacgatactaatgaacact

SEQ ID NO: 17093 - DNA, 25 bp, Saccharomyces pastorianus
agttagattctttgctcatttcccc

SEQ ID NO: 17094 - DNA, 25 bp, Saccharomyces pastorianus
gtcatcaactattccctttgacgaa

SEQ ID NO: 17095 - DNA, 25 bp, Saccharomyces pastorianus
aaaggcacacttgggctacgaaaat

SEQ ID NO: 17096 - DNA, 25 bp, Saccharomyces pastorianus
aaaggcttctcattcgcaagatctc

SEQ ID NO: 17097 - DNA, 25 bp, Saccharomyces pastorianus
gaagctattgtctcacctacataag

SEQ ID NO: 17098 - DNA, 25 bp, Saccharomyces pastorianus
tgctgccccaagatggtgtcgcaaa

SEQ ID NO: 17099 - DNA, 25 bp, Saccharomyces pastorianus
aaaggaattccattccactcacgtc

SEQ ID NO: 17100 - DNA, 25 bp, Saccharomyces pastorianus
gaacactatttgaacctaaccgact

SEQ ID NO: 17101 - DNA, 25 bp, Saccharomyces pastorianus
gtttgtgatcgtcttattccttcat

SEQ ID NO: 17102 - DNA, 25 bp, Saccharomyces pastorianus
aacaccatccttcgttagattcttg

SEQ ID NO: 17103 - DNA, 25 bp, Saccharomyces pastorianus
gtttcttaggagtccattcactagg

SEQ ID NO: 17104 - DNA, 25 bp, Saccharomyces pastorianus
gttaacatgtattgatttgccccta

SEQ ID NO: 17105 - DNA, 25 bp, Saccharomyces pastorianus
gcagaagtttggcatcgacctaatg

SEQ ID NO: 17106 - DNA, 25 bp, Saccharomyces pastorianus
agaactgctgatcgcgtacggtgta

SEQ ID NO: 17107 - DNA, 25 bp, Saccharomyces pastorianus
gacagcacgctgttagcagaactgc

SEQ ID NO: 17108 - DNA, 25 bp, Saccharomyces pastorianus
acgagagcacaagcgcactggaaat

SEQ ID NO: 17109 - DNA, 25 bp, Saccharomyces pastorianus
tgaggaagaagcaagcccgccgcga

SEQ ID NO: 17110 - DNA, 25 bp, Saccharomyces pastorianus
aaatacggttattctgcattgatcg

SEQ ID NO: 17111 - DNA, 25 bp, Saccharomyces pastorianus
aatcatcgtaagagtgcccctgacg

SEQ ID NO: 17112 - DNA, 25 bp, Saccharomyces pastorianus
aagcattccaaatgatggcctcgga

SEQ ID NO: 17113 - DNA, 25 bp, Saccharomyces pastorianus
gaaatcgattccttttcaggtaaca

SEQ ID NO: 17114 - DNA, 25 bp, Saccharomyces pastorianus
ttcaggtaacagaatctacccaggt

SEQ ID NO: 17115 - DNA, 25 bp, Saccharomyces pastorianus
tcgattccttttcaggtaacagaat

SEQ ID NO: 17116 - DNA, 25 bp, Saccharomyces pastorianus
ttccttttcaggtaacagaatctac

SEQ ID NO: 17117 - DNA, 25 bp, Saccharomyces pastorianus
agtctgttggtactcaaggttccaa

SEQ ID NO: 17118 - DNA, 25 bp, Saccharomyces pastorianus
aagtctgttggtactcaaggttcca

SEQ ID NO: 17119 - DNA, 25 bp, Saccharomyces pastorianus
ccacaagaaaggtatcactgaagaa

SEQ ID NO: 17120 - DNA, 25 bp, Saccharomyces pastorianus
acgaaaaattgaaggctgacaagga

SEQ ID NO: 17121 - DNA, 25 bp, Saccharomyces pastorianus
aatcgattccttttcaggtaacaga

SEQ ID NO: 17122 - DNA, 25 bp, Saccharomyces pastorianus
aggtaacagaatctacccaggtaga

SEQ ID NO: 17123 - DNA, 25 bp, Saccharomyces pastorianus
aagcaccacaagaaaggtatcactg

SEQ ID NO: 17124 - DNA, 25 bp, Saccharomyces pastorianus
ctaggcttcctagctctgcaaaaaa

SEQ ID NO: 17125 - DNA, 25 bp, Saccharomyces pastorianus
gtgtattcagtaacggaccgacaat

SEQ ID NO: 17126 - DNA, 25 bp, Saccharomyces pastorianus
aatgggtttcctcttggtgtattca

SEQ ID NO: 17127 - DNA, 25 bp, Saccharomyces pastorianus
aatgtcgacgaagtgtttgtggatc

SEQ ID NO: 17128 - DNA, 25 bp, Saccharomyces pastorianus
gaaaagcgtaaaccatcacacccag

SEQ ID NO: 17129 - DNA, 25 bp, Saccharomyces pastorianus
gggcagagtcccattttatgaaacc

SEQ ID NO: 17130 - DNA, 25 bp, Saccharomyces pastorianus
gaaccagtcttcatcgtctaggctt

SEQ ID NO: 17131 - DNA, 25 bp, Saccharomyces pastorianus
ataagtcatcacatggccaagccaa

SEQ ID NO: 17132 - DNA, 25 bp, Saccharomyces pastorianus
gaatcaaagattccgaccgtgttcc

SEQ ID NO: 17133 - DNA, 25 bp, Saccharomyces pastorianus
gaaaccagcgctttattgagaagta

SEQ ID NO: 17134 - DNA, 25 bp, Saccharomyces pastorianus
accgtgttccaatggtcctaatagg

SEQ ID NO: 17135 - DNA, 25 bp, Saccharomyces pastorianus
gaagacgacgtcattgtcgccattt

SEQ ID NO: 17136 - DNA, 25 bp, Saccharomyces pastorianus
gtcgtttccgtcaaggagactgcca

SEQ ID NO: 17137 - DNA, 25 bp, Saccharomyces pastorianus
tgggtgacttgaaccgtttctttga

SEQ ID NO: 17138 - DNA, 25 bp, Saccharomyces pastorianus
gccaaggtggccgatgtcatcaaga

SEQ ID NO: 17139 - DNA, 25 bp, Saccharomyces pastorianus
tatctatcaacaacgctgctagcga

SEQ ID NO: 17140 - DNA, 25 bp, Saccharomyces pastorianus
atcttgacccgtttcgatacatcta

SEQ ID NO: 17141 - DNA, 25 bp, Saccharomyces pastorianus
atgtcttcggtgacgctactgtaaa

SEQ ID NO: 17142 - DNA, 25 bp, Saccharomyces pastorianus
gccattttcccagattccgttagat

SEQ ID NO: 17143 - DNA, 25 bp, Saccharomyces pastorianus
acggcttgaagccaatccatattgt

SEQ ID NO: 17144 - DNA, 25 bp, Saccharomyces pastorianus
caattgcctgtattggccgaagacg

SEQ ID NO: 17145 - DNA, 25 bp, Saccharomyces pastorianus
aaactcctctgctgttatcactgac

SEQ ID NO: 17146 - DNA, 25 bp, Saccharomyces pastorianus
attcaaacacccctatgggcggaat

SEQ ID NO: 17147 - DNA, 25 bp, Saccharomyces pastorianus
agtgaggttccatcgatgctttcaa

SEQ ID NO: 17148 - DNA, 25 bp, Saccharomyces pastorianus
taaacactgcagaagcgccatccgg

SEQ ID NO: 17149 - DNA, 25 bp, Saccharomyces pastorianus
gcacgtttcgtccaatgacgtcaat

SEQ ID NO: 17150 - DNA, 25 bp, Saccharomyces pastorianus
ataaccacgccaacaatatgccagt

SEQ ID NO: 17151 - DNA, 25 bp, Saccharomyces pastorianus
aactcaaggctctgtgcccatgaac

SEQ ID NO: 17152 - DNA, 25 bp, Saccharomyces pastorianus
ctttacaacagcagccgtttggctt

SEQ ID NO: 17153 - DNA, 25 bp, Saccharomyces pastorianus
agaaacaatactccgctgcacgttt

SEQ ID NO: 17154 - DNA, 25 bp, Saccharomyces pastorianus
caaccctcgttggttcagcaacaaa

SEQ ID NO: 17155 - DNA, 25 bp, Saccharomyces pastorianus
tattgcgaaactgcagctgctaccc

SEQ ID NO: 17156 - DNA, 25 bp, Saccharomyces pastorianus
tatctgtgacacaagccctattgga

SEQ ID NO: 17157 - DNA, 25 bp, Saccharomyces pastorianus
gaaatgttcgctaagcacggtgaag

SEQ ID NO: 17158 - DNA, 25 bp, Saccharomyces pastorianus
aatactccagcttggacgacgccaa

SEQ ID NO: 17159 - DNA, 25 bp, Saccharomyces pastorianus
agaccaagtggttccggtgccaaca

SEQ ID NO: 17160 - DNA, 25 bp, Saccharomyces pastorianus
gtttcggttacgttcaatactccag

SEQ ID NO: 17161 - DNA, 25 bp, Saccharomyces pastorianus
agaagttcggtgacactccatctga

SEQ ID NO: 17162 - DNA, 25 bp, Saccharomyces pastorianus
gccaacactgctccattaggcagat

SEQ ID NO: 17163 - DNA, 25 bp, Saccharomyces pastorianus
ttattcttgggtaacttgtccttca

SEQ ID NO: 17164 - DNA, 25 bp, Saccharomyces pastorianus
atttccacaagtaagccagccggta

SEQ ID NO: 17165 - DNA, 25 bp, Saccharomyces pastorianus
gtcagactagactactcttctccaa

SEQ ID NO: 17166 - DNA, 25 bp, Saccharomyces pastorianus
gacttcgaaaaccaatcttatgctg

SEQ ID NO: 17167 - DNA, 25 bp, Saccharomyces pastorianus
ggtagaccaattaactgtgacattt

SEQ ID NO: 17168 - DNA, 25 bp, Saccharomyces pastorianus
aagatcatcgccctctttggagagc

SEQ ID NO: 17169 - DNA, 25 bp, Saccharomyces pastorianus
gaaggcgttcttccaattacagtat

SEQ ID NO: 17170 - DNA, 25 bp, Saccharomyces pastorianus
agccggaatgcttctatgtccagca

SEQ ID NO: 17171 - DNA, 25 bp, Saccharomyces pastorianus
tgaaaaatcaactacaccacccatt

SEQ ID NO: 17172 - DNA, 25 bp, Saccharomyces pastorianus
tcagacacaatcttccccatagaaa

SEQ ID NO: 17173 - DNA, 25 bp, Saccharomyces pastorianus
aagaggaacctttctgccgatctct

SEQ ID NO: 17174 - DNA, 25 bp, Saccharomyces pastorianus
gatggctcgaactctttgaaggctg

SEQ ID NO: 17175 - DNA, 25 bp, Saccharomyces pastorianus
gaaacgggcactttgcttcatgata

SEQ ID NO: 17176 - DNA, 25 bp, Saccharomyces pastorianus
gatgactgcagttacggctacacgt

SEQ ID NO: 17177 - DNA, 25 bp, Saccharomyces pastorianus
aaggattccatgacacacattgccc

SEQ ID NO: 17178 - DNA, 25 bp, Saccharomyces pastorianus
gagcgaatcggctgttttcgacgat

SEQ ID NO: 17179 - DNA, 25 bp, Saccharomyces pastorianus
aaaagaagaaccctctgcaccaact

SEQ ID NO: 17180 - DNA, 25 bp, Saccharomyces pastorianus
acgcccctcctgcattaaaggatag

SEQ ID NO: 17181 - DNA, 25 bp, Saccharomyces pastorianus
catccgaagaaaccctagagtcagt

SEQ ID NO: 17182 - DNA, 25 bp, Saccharomyces pastorianus
ggaaggttcccaattactcgatagt

SEQ ID NO: 17183 - DNA, 25 bp, Saccharomyces pastorianus
aacttccactgccacaaatatgttt

SEQ ID NO: 17184 - DNA, 25 bp, Saccharomyces pastorianus
ttcatcggtttcttgtaccgtttga

SEQ ID NO: 17185 - DNA, 25 bp, Saccharomyces pastorianus
tagtttcagaacaggccaagccaca

SEQ ID NO: 17186 - DNA, 25 bp, Saccharomyces pastorianus
cattcttacagaagagacgcccctc

SEQ ID NO: 17187 - DNA, 25 bp, Saccharomyces pastorianus
aagaaacactcaaagggctccacct

SEQ ID NO: 17188 - DNA, 25 bp, Saccharomyces pastorianus
aagagcaactcaagatcgaattcga

SEQ ID NO: 17189 - DNA, 25 bp, Saccharomyces pastorianus
tttgactgactctccatccgaagaa

SEQ ID NO: 17190 - DNA, 25 bp, Saccharomyces pastorianus
gggaaatttgcccattccgactcgg

SEQ ID NO: 17191 - DNA, 25 bp, Saccharomyces pastorianus
gatcatccgggactggataccgaca

SEQ ID NO: 17192 - DNA, 25 bp, Saccharomyces pastorianus
tggaaggacgcaccaaatccggatc

SEQ ID NO: 17193 - DNA, 25 bp, Saccharomyces pastorianus
gacttagaattatggctgcacgctt

SEQ ID NO: 17194 - DNA, 25 bp, Saccharomyces pastorianus
aagacccattgctgtcagacttaga

SEQ ID NO: 17195 - DNA, 25 bp, Saccharomyces pastorianus
gaatactctttttgacgacattgct

SEQ ID NO: 17196 - DNA, 25 bp, Saccharomyces pastorianus
ttggtcatcccatagtcaacgataa

SEQ ID NO: 17197 - DNA, 25 bp, Saccharomyces pastorianus
gaagtcgcccatatattccatcgat

SEQ ID NO: 17198 - DNA, 25 bp, Saccharomyces pastorianus
aatccggatccatttagccaggctt

SEQ ID NO: 17199 - DNA, 25 bp, Saccharomyces pastorianus
tccgactcggtactgaacggcgaat

SEQ ID NO: 17200 - DNA, 25 bp, Saccharomyces pastorianus
attccccacgccgatgaaagtgttg

SEQ ID NO: 17201 - DNA, 25 bp, Saccharomyces pastorianus
aagcgttactagctgcagaggaaga

SEQ ID NO: 17202 - DNA, 25 bp, Saccharomyces pastorianus
gcttttcggaatccgctgctaagaa

SEQ ID NO: 17203 - DNA, 25 bp, Saccharomyces pastorianus
aacgcttttcggaatccgctgctaa

SEQ ID NO: 17204 - DNA, 25 bp, Saccharomyces pastorianus
gagaccaagctcgtattaagcagag

SEQ ID NO: 17205 - DNA, 25 bp, Saccharomyces pastorianus
gcaaggaaaagagaccaagctcgta

SEQ ID NO: 17206 - DNA, 25 bp, Saccharomyces pastorianus
gaaaagctagaagcagaggaggctt

SEQ ID NO: 17207 - DNA, 25 bp, Saccharomyces pastorianus
aaagcagctggtatggcaaggaaaa

SEQ ID NO: 17208 - DNA, 25 bp, Saccharomyces pastorianus
aggcttctaagtgggagcaaggctc

SEQ ID NO: 17209 - DNA, 25 bp, Saccharomyces pastorianus
gggaaacgcttttcggaatccgctg

SEQ ID NO: 17210 - DNA, 25 bp, Saccharomyces pastorianus
taagggccaagaaagagcgtgaagc

SEQ ID NO: 17211 - DNA, 25 bp, Saccharomyces pastorianus
gagcgtgaagcgttactagctgcag

SEQ ID NO: 17212 - DNA, 25 bp, Saccharomyces pastorianus
tgttcgcagcgagttggatgtcttt

SEQ ID NO: 17213 - DNA, 25 bp, Saccharomyces pastorianus
gaacataagagttgtcattcccatt

SEQ ID NO: 17214 - DNA, 25 bp, Saccharomyces pastorianus
gtaagtgcagcatcggtatatttag

SEQ ID NO: 17215 - DNA, 25 bp, Saccharomyces pastorianus
gatacttcaaattcggtggatccac

SEQ ID NO: 17216 - DNA, 25 bp, Saccharomyces pastorianus
tgtaaacccaatggctgttcgcagc

SEQ ID NO: 17217 - DNA, 25 bp, Saccharomyces pastorianus
attcccattgattctcctgagtttg

SEQ ID NO: 17218 - DNA, 25 bp, Saccharomyces pastorianus
gttatcccacaggacaacttcatgt

SEQ ID NO: 17219 - DNA, 25 bp, Saccharomyces pastorianus
aaattcttcggagcgtattgaaacg

SEQ ID NO: 17220 - DNA, 25 bp, Saccharomyces pastorianus
gctagagccgctgggaatgtcacat

SEQ ID NO: 17221 - DNA, 25 bp, Saccharomyces pastorianus
cggtggatccactattgtaattgtt

SEQ ID NO: 17222 - DNA, 25 bp, Saccharomyces pastorianus
aacttcatgtttgactcagatcttg

SEQ ID NO: 17223 - DNA, 25 bp, Saccharomyces pastorianus
ccatggtatccacagagacttcaag

SEQ ID NO: 17224 - DNA, 25 bp, Saccharomyces pastorianus
attcacctctcctccaaagaataat

SEQ ID NO: 17225 - DNA, 25 bp, Saccharomyces pastorianus
agaccagtgttcaatgatcccctag

SEQ ID NO: 17226 - DNA, 25 bp, Saccharomyces pastorianus
aagagactatcgtatccataacgca

SEQ ID NO: 17227 - DNA, 25 bp, Saccharomyces pastorianus
ggtgatctatgccatggtatccaca

SEQ ID NO: 17228 - DNA, 25 bp, Saccharomyces pastorianus
ttggccagagaaccgaacaccgttg

SEQ ID NO: 17229 - DNA, 25 bp, Saccharomyces pastorianus
atccgccaagcattctcctcaaaaa

SEQ ID NO: 17230 - DNA, 25 bp, Saccharomyces pastorianus
tgtcaaagttacattcacctctcct

SEQ ID NO: 17231 - DNA, 25 bp, Saccharomyces pastorianus
gaggacggattcgaccattggtgat

SEQ ID NO: 17232 - DNA, 25 bp, Saccharomyces pastorianus
atgatcccctagtagtgaggacgga

SEQ ID NO: 17233 - DNA, 25 bp, Saccharomyces pastorianus
ccagttgaatttgagccgggtctat

SEQ ID NO: 17234 - DNA, 25 bp, Saccharomyces pastorianus
gacgttgtcttgttgatcaagaaga

SEQ ID NO: 17235 - DNA, 25 bp, Saccharomyces pastorianus
gattggtgaactagacttcagtgac

SEQ ID NO: 17236 - DNA, 25 bp, Saccharomyces pastorianus
tatcagtcgctttgtactcgttgtt

SEQ ID NO: 17237 - DNA, 25 bp, Saccharomyces pastorianus
gccagccagacaaaacgatgtcaca

SEQ ID NO: 17238 - DNA, 25 bp, Saccharomyces pastorianus
gttatcggtgatgcccttaacatga

SEQ ID NO: 17239 - DNA, 25 bp, Saccharomyces pastorianus
gagttacgactctgttatcaacgtt

SEQ ID NO: 17240 - DNA, 25 bp, Saccharomyces pastorianus
gtactcgttgtttgccgctgatagc

SEQ ID NO: 17241 - DNA, 25 bp, Saccharomyces pastorianus
ttaacatgagacacccattgaccgg

SEQ ID NO: 17242 - DNA, 25 bp, Saccharomyces pastorianus
tgtttgccgctgatagcgataactt

SEQ ID NO: 17243 - DNA, 25 bp, Saccharomyces pastorianus
gatgcccttaacatgagacacccat

SEQ ID NO: 17244 - DNA, 25 bp, Saccharomyces pastorianus
gttatcaacgttttatcagtcgctt

SEQ ID NO: 17245 - DNA, 25 bp, Saccharomyces pastorianus
attccagcctcaaccaatgttttac

SEQ ID NO: 17246 - DNA, 25 bp, Saccharomyces pastorianus
aatgttttaccacccatcaatgccg

SEQ ID NO: 17247 - DNA, 25 bp, Saccharomyces pastorianus
tatgccctcaggtttcatggcaggt

SEQ ID NO: 17248 - DNA, 25 bp, Saccharomyces pastorianus
ttgaaaagccttacttcactgcgcc

SEQ ID NO: 17249 - DNA, 25 bp, Saccharomyces pastorianus
gggaacatatcacctcatatgccct

SEQ ID NO: 17250 - DNA, 25 bp, Saccharomyces pastorianus
atcccggtgggatgccatttcaagg

SEQ ID NO: 17251 - DNA, 25 bp, Saccharomyces pastorianus
atcaggtccatctgggatgccggca

SEQ ID NO: 17252 - DNA, 25 bp, Saccharomyces pastorianus
atgggaggtccaaacgcttcaccaa

SEQ ID NO: 17253 - DNA, 25 bp, Saccharomyces pastorianus
caggttccagcaacgccaaatgaat

SEQ ID NO: 17254 - DNA, 25 bp, Saccharomyces pastorianus
gatgaatggtttcgccgcaggatcc

SEQ ID NO: 17255 - DNA, 25 bp, Saccharomyces pastorianus
tggttcggcaattcacagtcatggt

SEQ ID NO: 17256 - DNA, 25 bp, Saccharomyces pastorianus
aaaaatgcttaacctctccatacac

SEQ ID NO: 17257 - DNA, 25 bp, Saccharomyces pastorianus
aaaggacgcagcttcaagtgctaag

SEQ ID NO: 17258 - DNA, 25 bp, Saccharomyces pastorianus
atcgctcaagagctggccgtggcca

SEQ ID NO: 17259 - DNA, 25 bp, Saccharomyces pastorianus
ctatcttctatcttcggtggcggag

SEQ ID NO: 17260 - DNA, 25 bp, Saccharomyces pastorianus
tggccaatgccactgaactggtgaa

SEQ ID NO: 17261 - DNA, 25 bp, Saccharomyces pastorianus
tgcattgaccagtgcttagccaaat

SEQ ID NO: 17262 - DNA, 25 bp, Saccharomyces pastorianus
ggtggcggagcaccatctcaacaaa

SEQ ID NO: 17263 - DNA, 25 bp, Saccharomyces pastorianus
gaactaaagaaccagatcgctcaag

SEQ ID NO: 17264 - DNA, 25 bp, Saccharomyces pastorianus
gaaatgacccatgcattgaccagtg

SEQ ID NO: 17265 - DNA, 25 bp, Saccharomyces pastorianus
ttggaacgtcatatcgaaagcttat

SEQ ID NO: 17266 - DNA, 25 bp, Saccharomyces pastorianus
gtgctaagacttcatcaaacccaat

SEQ ID NO: 17267 - DNA, 25 bp, Saccharomyces pastorianus
acgacgaaactggtcaggcggccaa

SEQ ID NO: 17268 - DNA, 25 bp, Saccharomyces pastorianus
gcagcctccttccaatatttttgta

SEQ ID NO: 17269 - DNA, 25 bp, Saccharomyces pastorianus
gctccatatctaaattcgcacggtg

SEQ ID NO: 17270 - DNA, 25 bp, Saccharomyces pastorianus
gtgaccatactttctaacggatttt

SEQ ID NO: 17271 - DNA, 25 bp, Saccharomyces pastorianus
gggtgacgaattccgagtgaccata

SEQ ID NO: 17272 - DNA, 25 bp, Saccharomyces pastorianus
tatttttgtatctgctccatatcta

SEQ ID NO: 17273 - DNA, 25 bp, Saccharomyces pastorianus
caggcggccaacttattcggcgttg

SEQ ID NO: 17274 - DNA, 25 bp, Saccharomyces pastorianus
gaagtttgtctgcatctgacgcagc

SEQ ID NO: 17275 - DNA, 25 bp, Saccharomyces pastorianus
ggccccagtttgatggagcgactat

SEQ ID NO: 17276 - DNA, 25 bp, Saccharomyces pastorianus
gaaacacacttcaacctcagggaaa

SEQ ID NO: 17277 - DNA, 25 bp, Saccharomyces pastorianus
gaccaagaagagtgcctccaacaga

SEQ ID NO: 17278 - DNA, 25 bp, Saccharomyces pastorianus
aagtacccaggaggcgccaagactg

SEQ ID NO: 17279 - DNA, 25 bp, Saccharomyces pastorianus
gtttggcgcaaaccactttgaattt

SEQ ID NO: 17280 - DNA, 25 bp, Saccharomyces pastorianus
ttcggtggcccaataaccttcaaag

SEQ ID NO: 17281 - DNA, 25 bp, Saccharomyces pastorianus
gtctgcatctgatccaaattccaag

SEQ ID NO: 17282 - DNA, 25 bp, Saccharomyces pastorianus
gtagccctggtaacatcgaagacaa

SEQ ID NO: 17283 - DNA, 25 bp, Saccharomyces pastorianus
aaaacttgccaagtctgggctacaa

SEQ ID NO: 17284 - DNA, 25 bp, Saccharomyces pastorianus
gagaagggctatccagtcgcagcac

SEQ ID NO: 17285 - DNA, 25 bp, Saccharomyces pastorianus
tgtcagttcggtggtgtcgaccaaa

SEQ ID NO: 17286 - DNA, 25 bp, Saccharomyces pastorianus
atcagagaggagttcgccactaaca

SEQ ID NO: 17287 - DNA, 25 bp, Saccharomyces pastorianus
catggttccgggactgactcaaggt

SEQ ID NO: 17288 - DNA, 25 bp, Saccharomyces pastorianus
gggcacatctaatgaatcccatggt

SEQ ID NO: 17289 - DNA, 25 bp, Saccharomyces pastorianus
agatattgttgacgctattggtgat

SEQ ID NO: 17290 - DNA, 25 bp, Saccharomyces pastorianus
agtagaaactccagtgcctctcata

SEQ ID NO: 17291 - DNA, 25 bp, Saccharomyces pastorianus
acgaacgtgcataaagatcctaatt

SEQ ID NO: 17292 - DNA, 25 bp, Saccharomyces pastorianus
agtagcgagccaaccatggcatcgt

SEQ ID NO: 17293 - DNA, 25 bp, Saccharomyces pastorianus
gagattaacccatacctgtctgaat

SEQ ID NO: 17294 - DNA, 25 bp, Saccharomyces pastorianus
ggcatcgtcacccatcaaaacagag

SEQ ID NO: 17295 - DNA, 25 bp, Saccharomyces pastorianus
gaagtcatcacctaagaaacagcaa

SEQ ID NO: 17296 - DNA, 25 bp, Saccharomyces pastorianus
agaatggaatcctcaagttgcaaat

SEQ ID NO: 17297 - DNA, 25 bp, Saccharomyces pastorianus
aaataccctggtgctgagaacaaga

SEQ ID NO: 17298 - DNA, 25 bp, Saccharomyces pastorianus
ggcagcattgtattcttcagacgag

SEQ ID NO: 17299 - DNA, 25 bp, Saccharomyces pastorianus
catacctgtctgaatcggatttgga

SEQ ID NO: 17300 - DNA, 25 bp, Saccharomyces pastorianus
atctgttgccgtacattttgttgcc

SEQ ID NO: 17301 - DNA, 25 bp, Saccharomyces pastorianus
agaagacatgtttaatttgcctgat

SEQ ID NO: 17302 - DNA, 25 bp, Saccharomyces pastorianus
agaatatgatcttgttgtccccatt

SEQ ID NO: 17303 - DNA, 25 bp, Saccharomyces pastorianus
tacccgcttgtaagagagttgcaca

SEQ ID NO: 17304 - DNA, 25 bp, Saccharomyces pastorianus
taagaagcaagtccgtttacccgct

SEQ ID NO: 17305 - DNA, 25 bp, Saccharomyces pastorianus
cccatttccaaactgctagtcttta

SEQ ID NO: 17306 - DNA, 25 bp, Saccharomyces pastorianus
tgccatcatatgctgccacttagaa

SEQ ID NO: 17307 - DNA, 25 bp, Saccharomyces pastorianus
ttttgttgcctattgctagtgcgaa

SEQ ID NO: 17308 - DNA, 25 bp, Saccharomyces pastorianus
agcctgatgccggtgtcgtagaaga

SEQ ID NO: 17309 - DNA, 25 bp, Saccharomyces pastorianus
aagcaaagagatcccattcctgcca

SEQ ID NO: 17310 - DNA, 25 bp, Saccharomyces pastorianus
tgtgtacaacaaatgccgccagaga

SEQ ID NO: 17311 - DNA, 25 bp, Saccharomyces pastorianus
tcgtcgttttgttcctagttttgat

SEQ ID NO: 17312 - DNA, 25 bp, Saccharomyces pastorianus
ctcacattagattccgtcaagccat

SEQ ID NO: 17313 - DNA, 25 bp, Saccharomyces pastorianus
aggcgctagcgcagaatctttcttt

SEQ ID NO: 17314 - DNA, 25 bp, Saccharomyces pastorianus
gatagcgtctttctggacttctatg

SEQ ID NO: 17315 - DNA, 25 bp, Saccharomyces pastorianus
ccattcatttctcaaaccggtgttt

SEQ ID NO: 17316 - DNA, 25 bp, Saccharomyces pastorianus
atggccattaatctctctcacatta

SEQ ID NO: 17317 - DNA, 25 bp, Saccharomyces pastorianus
aacaagctgaggtctttacctggct

SEQ ID NO: 17318 - DNA, 25 bp, Saccharomyces pastorianus
gaagacatggatctcgacactggta

SEQ ID NO: 17319 - DNA, 25 bp, Saccharomyces pastorianus
tatgttcccaatcggcggttcaggc

SEQ ID NO: 17320 - DNA, 25 bp, Saccharomyces pastorianus
ggccatggcccatatcggtaattta

SEQ ID NO: 17321 - DNA, 25 bp, Saccharomyces pastorianus
ctttacctggctgagtgctttatca

SEQ ID NO: 17322 - DNA, 25 bp, Saccharomyces pastorianus
ccggtgccgccaaggctgtcggtaa

SEQ ID NO: 17323 - DNA, 25 bp, Saccharomyces pastorianus
cgccactcaaaagactgtcgatggt

SEQ ID NO: 17324 - DNA, 25 bp, Saccharomyces pastorianus
gttgaacaaggaaaccacctacgat

SEQ ID NO: 17325 - DNA, 25 bp, Saccharomyces pastorianus
tcaaaagactgtcgatggtccatcc

SEQ ID NO: 17326 - DNA, 25 bp, Saccharomyces pastorianus
atcctccaccggtgccgccaaggct

SEQ ID NO: 17327 - DNA, 25 bp, Saccharomyces pastorianus
caaggctgcctctgaaggtaagatg

SEQ ID NO: 17328 - DNA, 25 bp, Saccharomyces pastorianus
tcctccaccggtgccgccaaggctg

SEQ ID NO: 17329 - DNA, 25 bp, Saccharomyces pastorianus
tcaaggctgcctctgaaggtaagat

SEQ ID NO: 17330 - DNA, 25 bp, Saccharomyces pastorianus
gaccgccactcaaaagactgtcgat

SEQ ID NO: 17331 - DNA, 25 bp, Saccharomyces pastorianus
accgccactcaaaagactgtcgatg

SEQ ID NO: 17332 - DNA, 25 bp, Saccharomyces pastorianus
ctctgaaggtaagatgaagggtgtt

SEQ ID NO: 17333 - DNA, 25 bp, Saccharomyces pastorianus
gaggcttaccagtttactcatgaag

SEQ ID NO: 17334 - DNA, 25 bp, Saccharomyces pastorianus
gaacgaatacttgctaaccttaaat

SEQ ID NO: 17335 - DNA, 25 bp, Saccharomyces pastorianus
gaggatcttgtcacgttgaacccaa

SEQ ID NO: 17336 - DNA, 25 bp, Saccharomyces pastorianus
tacggtttcattcagatccccaagg

SEQ ID NO: 17337 - DNA, 25 bp, Saccharomyces pastorianus
taaatattttgatcctgtcttcgag

SEQ ID NO: 17338 - DNA, 25 bp, Saccharomyces pastorianus
agcagttggtgttccatgctccagt

SEQ ID NO: 17339 - DNA, 25 bp, Saccharomyces pastorianus
gcgtgagtcacttaacactttcatg

SEQ ID NO: 17340 - DNA, 25 bp, Saccharomyces pastorianus
atattcgatctcctaacaggcgcag

SEQ ID NO: 17341 - DNA, 25 bp, Saccharomyces pastorianus
gcagatgccaacgtctcatcagaga

SEQ ID NO: 17342 - DNA, 25 bp, Saccharomyces pastorianus
tgctccagtttctgttccctttgaa

SEQ ID NO: 17343 - DNA, 25 bp, Saccharomyces pastorianus
aatcccacccttacaattcgaagag

SEQ ID NO: 17344 - DNA, 25 bp, Saccharomyces pastorianus
gctcgctctgatagacgctggtata

SEQ ID NO: 17345 - DNA, 25 bp, Saccharomyces pastorianus
aggcgtgtccttgagattcaaactt

SEQ ID NO: 17346 - DNA, 25 bp, Saccharomyces pastorianus
atcactctcgtgaagggtccaaagg

SEQ ID NO: 17347 - DNA, 25 bp, Saccharomyces pastorianus
tgatcaatggtatcacgctcgctct

SEQ ID NO: 17348 - DNA, 25 bp, Saccharomyces pastorianus
tagagaacgtcctagccatcggtat

SEQ ID NO: 17349 - DNA, 25 bp, Saccharomyces pastorianus
gccatcggtattgcgggtgctcata

SEQ ID NO: 17350 - DNA, 25 bp, Saccharomyces pastorianus
gttgaacatttaccccagaacagtt

SEQ ID NO: 17351 - DNA, 25 bp, Saccharomyces pastorianus
aatccccttggacagactagagaac

SEQ ID NO: 17352 - DNA, 25 bp, Saccharomyces pastorianus
tatcgaaatccacgtccttgagcag

SEQ ID NO: 17353 - DNA, 25 bp, Saccharomyces pastorianus
tggtggtatcatgggcacactgatc

SEQ ID NO: 17354 - DNA, 25 bp, Saccharomyces pastorianus
atggatacttcgaaggccctgttaa

SEQ ID NO: 17355 - DNA, 25 bp, Saccharomyces pastorianus
ttgccaatggtcataaccacggatt

SEQ ID NO: 17356 - DNA, 25 bp, Saccharomyces pastorianus
tgaagaaccaaagactaagccacct

SEQ ID NO: 17357 - DNA, 25 bp, Saccharomyces pastorianus
gaacttagtggaatctacgcatgct

SEQ ID NO: 17358 - DNA, 25 bp, Saccharomyces pastorianus
gatatcctaagaaattgtctcgcaa

SEQ ID NO: 17359 - DNA, 25 bp, Saccharomyces pastorianus
acggtgaagaggtcatcgaagcccc

SEQ ID NO: 17360 - DNA, 25 bp, Saccharomyces pastorianus
cacgttatgtgggactgcccaaatt

SEQ ID NO: 17361 - DNA, 25 bp, Saccharomyces pastorianus
taagattaaataccccacgttatgt

SEQ ID NO: 17362 - DNA, 25 bp, Saccharomyces pastorianus
aggattttcccggtatcaatattga

SEQ ID NO: 17363 - DNA, 25 bp, Saccharomyces pastorianus
ttggccgcaggcaacaaatgcagcc

SEQ ID NO: 17364 - DNA, 25 bp, Saccharomyces pastorianus
tctacgcatgctgtttctatcggcc

SEQ ID NO: 17365 - DNA, 25 bp, Saccharomyces pastorianus
acctgtagtctaattgattccatgg

SEQ ID NO: 17366 - DNA, 25 bp, Saccharomyces pastorianus
agtccatgaccgacatcctatatat

SEQ ID NO: 17367 - DNA, 25 bp, Saccharomyces pastorianus
aagtcccggtcgagtcaagttgcat

SEQ ID NO: 17368 - DNA, 25 bp, Saccharomyces pastorianus
attaattgctgcgtatgccggtgtt

SEQ ID NO: 17369 - DNA, 25 bp, Saccharomyces pastorianus
cggtgggtttatacaattcgctagt

SEQ ID NO: 17370 - DNA, 25 bp, Saccharomyces pastorianus
agttgaacaccaagtccatgaccga

SEQ ID NO: 17371 - DNA, 25 bp, Saccharomyces pastorianus
tgtgtgccgagttcaaagtcccggt

SEQ ID NO: 17372 - DNA, 25 bp, Saccharomyces pastorianus
tcaccaagggtgtacccgaactttg

SEQ ID NO: 17373 - DNA, 25 bp, Saccharomyces pastorianus
ggtaatgacctaccagccatgggta

SEQ ID NO: 17374 - DNA, 25 bp, Saccharomyces pastorianus
ctaactggtaagacactgggtgcta

SEQ ID NO: 17375 - DNA, 25 bp, Saccharomyces pastorianus
aacacttttacaactgtgtgccgag

SEQ ID NO: 17376 - DNA, 25 bp, Saccharomyces pastorianus
aaacttgctgttttgagcggtgggt

SEQ ID NO: 17377 - DNA, 25 bp, Saccharomyces pastorianus
ttagggctccaagcattcaaggatg

SEQ ID NO: 17378 - DNA, 25 bp, Saccharomyces pastorianus
aagctgcaccaggaccttggattgt

SEQ ID NO: 17379 - DNA, 25 bp, Saccharomyces pastorianus
tgtgggataccgcttctgaaattca

SEQ ID NO: 17380 - DNA, 25 bp, Saccharomyces pastorianus
agttacccaaacacgcttgtcgaag

SEQ ID NO: 17381 - DNA, 25 bp, Saccharomyces pastorianus
gttgcgcccatcgaatacaagcata

SEQ ID NO: 17382 - DNA, 25 bp, Saccharomyces pastorianus
gagctgccgtttcatgtcgtagacg

SEQ ID NO: 17383 - DNA, 25 bp, Saccharomyces pastorianus
gctgcattgttgtgtaagttaccca

SEQ ID NO: 17384 - DNA, 25 bp, Saccharomyces pastorianus
ttagaggttgtctctcctcaacagt

SEQ ID NO: 17385 - DNA, 25 bp, Saccharomyces pastorianus
aaggatgcgtgcaacaccgagctgc

SEQ ID NO: 17386 - DNA, 25 bp, Saccharomyces pastorianus
gagtgcaaggcccataacgtttcct

SEQ ID NO: 17387 - DNA, 25 bp, Saccharomyces pastorianus
cagtgggccttcttctacttttgaa

SEQ ID NO: 17388 - DNA, 25 bp, Saccharomyces pastorianus
ttgcaagctactacggaaacccaga

SEQ ID NO: 17389 - DNA, 25 bp, Saccharomyces pastorianus
aaaaggcccttcgattgcaagctac

SEQ ID NO: 17390 - DNA, 25 bp, Saccharomyces pastorianus
gaagacactatatcctgacattgaa

SEQ ID NO: 17391 - DNA, 25 bp, Saccharomyces pastorianus
taaccttgacgaacagtaccgatta

SEQ ID NO: 17392 - DNA, 25 bp, Saccharomyces pastorianus
gagcgtgcccaaagctagactgcta

SEQ ID NO: 17393 - DNA, 25 bp, Saccharomyces pastorianus
tgacattgaattcgttaaccttgac

SEQ ID NO: 17394 - DNA, 25 bp, Saccharomyces pastorianus
ttatccgcgaaaatatttgaccaga

SEQ ID NO: 17395 - DNA, 25 bp, Saccharomyces pastorianus
gacatctgaagacactatatcctga

SEQ ID NO: 17396 - DNA, 25 bp, Saccharomyces pastorianus
ttgaccagaattttaatcccaccgg

SEQ ID NO: 17397 - DNA, 25 bp, Saccharomyces pastorianus
taaaggtagccgaattatccgcgaa

SEQ ID NO: 17398 - DNA, 25 bp, Saccharomyces pastorianus
taatcccaccggtattagaacaggt

SEQ ID NO: 17399 - DNA, 25 bp, Saccharomyces pastorianus
tctggtgttcttaactcctacagtt

SEQ ID NO: 17400 - DNA, 25 bp, Saccharomyces pastorianus
tatcatgggcagtcttttcaactta

SEQ ID NO: 17401 - DNA, 25 bp, Saccharomyces pastorianus
gggtggtatttccatagaactccaa

SEQ ID NO: 17402 - DNA, 25 bp, Saccharomyces pastorianus
gaggctattattgcgctcatcaacc

SEQ ID NO: 17403 - DNA, 25 bp, Saccharomyces pastorianus
agtaaactgtaccactgccagctaa

SEQ ID NO: 17404 - DNA, 25 bp, Saccharomyces pastorianus
gcatgcctactacgttggaacttaa

SEQ ID NO: 17405 - DNA, 25 bp, Saccharomyces pastorianus
cacgttctatattctgcattgccaa

SEQ ID NO: 17406 - DNA, 25 bp, Saccharomyces pastorianus
atttttcatttgtcactgtacggca

SEQ ID NO: 17407 - DNA, 25 bp, Saccharomyces pastorianus
gttgctgtttattattctggtgttc

SEQ ID NO: 17408 - DNA, 25 bp, Saccharomyces pastorianus
caaccatttccctttgtttgcatta

SEQ ID NO: 17409 - DNA, 25 bp, Saccharomyces pastorianus
gccgtatagcctattgttggcgcaa

SEQ ID NO: 17410 - DNA, 25 bp, Saccharomyces pastorianus
aattatttcttcgtttttgtcagcg

SEQ ID NO: 17411 - DNA, 25 bp, Saccharomyces pastorianus
gattctgatcacaagtccgggtttt

SEQ ID NO: 17412 - DNA, 25 bp, Saccharomyces pastorianus
accccacggattacttgtttgctga

SEQ ID NO: 17413 - DNA, 25 bp, Saccharomyces pastorianus
gcaaattgcattggacttggtcaaa

SEQ ID NO: 17414 - DNA, 25 bp, Saccharomyces pastorianus
gtgccgtcccatttgctaatgaatt

SEQ ID NO: 17415 - DNA, 25 bp, Saccharomyces pastorianus
gaagtaggaggtgaccccacggatt

SEQ ID NO: 17416 - DNA, 25 bp, Saccharomyces pastorianus
tccgggttttccaagcaatcgttgt

SEQ ID NO: 17417 - DNA, 25 bp, Saccharomyces pastorianus
taaatagcgcattccctcacttaac

SEQ ID NO: 17418 - DNA, 25 bp, Saccharomyces pastorianus
atattgaaagaatgggtgccgtccc

SEQ ID NO: 17419 - DNA, 25 bp, Saccharomyces pastorianus
tacaagtttcttatctgcattgact

SEQ ID NO: 17420 - DNA, 25 bp, Saccharomyces pastorianus
ctcccgccgcattcaaattatttgt

SEQ ID NO: 17421 - DNA, 25 bp, Saccharomyces pastorianus
ggaccgctttgatattatgtaccat

SEQ ID NO: 17422 - DNA, 25 bp, Saccharomyces pastorianus
gacactacacattctatcttttcag

SEQ ID NO: 17423 - DNA, 25 bp, Saccharomyces pastorianus
taaaagacttgcaacccgccaaaga

SEQ ID NO: 17424 - DNA, 25 bp, Saccharomyces pastorianus
taatgagacctaaccagctcacctt

SEQ ID NO: 17425 - DNA, 25 bp, Saccharomyces pastorianus
tgacaccaatctaccatttttctac

SEQ ID NO: 17426 - DNA, 25 bp, Saccharomyces pastorianus
atttttctacttttgcataccttga

SEQ ID NO: 17427 - DNA, 25 bp, Saccharomyces pastorianus
gaacctcgttattatatcttaccat

SEQ ID NO: 17428 - DNA, 25 bp, Saccharomyces pastorianus
acatgcagctgtgaaccgttaataa

SEQ ID NO: 17429 - DNA, 25 bp, Saccharomyces pastorianus
tattattccatctcccttattcgaa

SEQ ID NO: 17430 - DNA, 25 bp, Saccharomyces pastorianus
gacacatgtgtcatggaccgctttg

SEQ ID NO: 17431 - DNA, 25 bp, Saccharomyces pastorianus
ggaagcgatacatttgcccatacaa

SEQ ID NO: 17432 - DNA, 25 bp, Saccharomyces pastorianus
gcgaaattccaaagcatgccacgag

SEQ ID NO: 17433 - DNA, 25 bp, Saccharomyces pastorianus
caatgggcccatacaagactatttt

SEQ ID NO: 17434 - DNA, 25 bp, Saccharomyces pastorianus
gccacgagcgcacctaatgaaactt

SEQ ID NO: 17435 - DNA, 25 bp, Saccharomyces pastorianus
gcaaccttctacttttggtgacgaa

SEQ ID NO: 17436 - DNA, 25 bp, Saccharomyces pastorianus
aaataaaccggaggcgccagtggca

SEQ ID NO: 17437 - DNA, 25 bp, Saccharomyces pastorianus
gaaccacctcttcaacagcaaaaat

SEQ ID NO: 17438 - DNA, 25 bp, Saccharomyces pastorianus
gaagatgaagatgtcgctgaaccaa

SEQ ID NO: 17439 - DNA, 25 bp, Saccharomyces pastorianus
aaactttaagctccgctgaagtggc

SEQ ID NO: 17440 - DNA, 25 bp, Saccharomyces pastorianus
gccagtggcaaatgagcaaccttct

SEQ ID NO: 17441 - DNA, 25 bp, Saccharomyces pastorianus
gcaaaaatacatgcctggcgcgcaa

SEQ ID NO: 17442 - DNA, 25 bp, Saccharomyces pastorianus
gttacagcaacagaaacctcaacct

SEQ ID NO: 17443 - DNA, 25 bp, Saccharomyces pastorianus
gcatccgtgggctctttaagattga

SEQ ID NO: 17444 - DNA, 25 bp, Saccharomyces pastorianus
taacgccgagtacgatcttgtggat

SEQ ID NO: 17445 - DNA, 25 bp, Saccharomyces pastorianus
gttcaatcaaatcccactacacaga

SEQ ID NO: 17446 - DNA, 25 bp, Saccharomyces pastorianus
ttgcctgctcagtcggaaatttaga

SEQ ID NO: 17447 - DNA, 25 bp, Saccharomyces pastorianus
aaggcgtcacatgcctacatttggc

SEQ ID NO: 17448 - DNA, 25 bp, Saccharomyces pastorianus
ataaggtcaccaaccaaggcgtcac

SEQ ID NO: 17449 - DNA, 25 bp, Saccharomyces pastorianus
ataatggcgcctccgtgagaatcaa

SEQ ID NO: 17450 - DNA, 25 bp, Saccharomyces pastorianus
gacgctgccgtattgttagtagaaa

SEQ ID NO: 17451 - DNA, 25 bp, Saccharomyces pastorianus
actgcttcattgcaaaccttcgttg

SEQ ID NO: 17452 - DNA, 25 bp, Saccharomyces pastorianus
tggactccaatattccacgctttag

SEQ ID NO: 17453 - DNA, 25 bp, Saccharomyces pastorianus
gatggacgccattccatattgcctg

SEQ ID NO: 17454 - DNA, 25 bp, Saccharomyces pastorianus
tctgcccagtattaccacgatgcaa

SEQ ID NO: 17455 - DNA, 25 bp, Saccharomyces pastorianus
tcagacgctaaagaggccactatta

SEQ ID NO: 17456 - DNA, 25 bp, Saccharomyces pastorianus
gttttacgtcgactattgcaagctt

SEQ ID NO: 17457 - DNA, 25 bp, Saccharomyces pastorianus
taccatgccccttatattgggctca

SEQ ID NO: 17458 - DNA, 25 bp, Saccharomyces pastorianus
caataatgtcatgggtcttgctcat

SEQ ID NO: 17459 - DNA, 25 bp, Saccharomyces pastorianus
taataccaggcttatcgtccacttt

SEQ ID NO: 17460 - DNA, 25 bp, Saccharomyces pastorianus
tattgggctcatgttgctttgcgta

SEQ ID NO: 17461 - DNA, 25 bp, Saccharomyces pastorianus
ggttgtcgggaagtattacgctcgt

SEQ ID NO: 17462 - DNA, 25 bp, Saccharomyces pastorianus
ttgcaagcttacatactgacccaga

SEQ ID NO: 17463 - DNA, 25 bp, Saccharomyces pastorianus
atcgtccactttagttgcctttatg

SEQ ID NO: 17464 - DNA, 25 bp, Saccharomyces pastorianus
gattcagtaacacatctgcccagta

SEQ ID NO: 17465 - DNA, 25 bp, Saccharomyces pastorianus
gtgacgagtcagttgcctccataaa

SEQ ID NO: 17466 - DNA, 25 bp, Saccharomyces pastorianus
gataacaccctcatgaaatacgata

SEQ ID NO: 17467 - DNA, 25 bp, Saccharomyces pastorianus
agggcagcggaaggttcaccaccat

SEQ ID NO: 17468 - DNA, 25 bp, Saccharomyces pastorianus
atcatcaccatcatgtttcaaggac

SEQ ID NO: 17469 - DNA, 25 bp, Saccharomyces pastorianus
aaatcagctggcctatcaccaagaa

SEQ ID NO: 17470 - DNA, 25 bp, Saccharomyces pastorianus
taaggccaaaaccttccaggcaaat

SEQ ID NO: 17471 - DNA, 25 bp, Saccharomyces pastorianus
accaagatttacctcacatccaatg

SEQ ID NO: 17472 - DNA, 25 bp, Saccharomyces pastorianus
ggcagaaaattaactcccgttgagt

SEQ ID NO: 17473 - DNA, 25 bp, Saccharomyces pastorianus
aagcgtagttccaagcgtagttcaa

SEQ ID NO: 17474 - DNA, 25 bp, Saccharomyces pastorianus
catcatcttcttcagggcagcggaa

SEQ ID NO: 17475 - DNA, 25 bp, Saccharomyces pastorianus
gaacgtcaactacatcatcttcttc

SEQ ID NO: 17476 - DNA, 25 bp, Saccharomyces pastorianus
acagaatctgtccttattggccacg

SEQ ID NO: 17477 - DNA, 25 bp, Saccharomyces pastorianus
ggttgcactgctgggtaccatctaa

SEQ ID NO: 17478 - DNA, 25 bp, Saccharomyces pastorianus
gtaccatctaacgaggattgccaat

SEQ ID NO: 17479 - DNA, 25 bp, Saccharomyces pastorianus
cttttgggcgcccactttgaaatgg

SEQ ID NO: 17480 - DNA, 25 bp, Saccharomyces pastorianus
agacacctgcggctgtcgcggcaaa

SEQ ID NO: 17481 - DNA, 25 bp, Saccharomyces pastorianus
acgtacaaacaagccctacactata

SEQ ID NO: 17482 - DNA, 25 bp, Saccharomyces pastorianus
atcagcctttaattctgccttcaga

SEQ ID NO: 17483 - DNA, 25 bp, Saccharomyces pastorianus
attaagcccaagaactacctgctcg

SEQ ID NO: 17484 - DNA, 25 bp, Saccharomyces pastorianus
aaagtccgcatctgcctcggtgaat

SEQ ID NO: 17485 - DNA, 25 bp, Saccharomyces pastorianus
tgtgaacttcttcctgggttgcact

SEQ ID NO: 17486 - DNA, 25 bp, Saccharomyces pastorianus
gttggtctttgcagggctaaacgat

SEQ ID NO: 17487 - DNA, 25 bp, Saccharomyces pastorianus
aaatcgtgaactgcgtgggacctgt

SEQ ID NO: 17488 - DNA, 25 bp, Saccharomyces pastorianus
ccaggcatcgttgcgggtagttcaa

SEQ ID NO: 17489 - DNA, 25 bp, Saccharomyces pastorianus
aacactgacgggtccaacgaggtgc

SEQ ID NO: 17490 - DNA, 25 bp, Saccharomyces pastorianus
acgtctcgctgctatattctgatat

SEQ ID NO: 17491 - DNA, 25 bp, Saccharomyces pastorianus
acgaagaatttcagccacacgtctc

SEQ ID NO: 17492 - DNA, 25 bp, Saccharomyces pastorianus
tgtgcggccgctattcaatcggtaa

SEQ ID NO: 17493 - DNA, 25 bp, Saccharomyces pastorianus
gatattcgtccagtgagccaggcat

SEQ ID NO: 17494 - DNA, 25 bp, Saccharomyces pastorianus
gtgacgtctcacttggtatgtaaca

SEQ ID NO: 17495 - DNA, 25 bp, Saccharomyces pastorianus
aacaagatccttacttcctgtgcgg

SEQ ID NO: 17496 - DNA, 25 bp, Saccharomyces pastorianus
gacgccttggacgtgcaattggtga

SEQ ID NO: 17497 - DNA, 25 bp, Saccharomyces pastorianus
agatgggacttcgacatctcttcgt

SEQ ID NO: 17498 - DNA, 25 bp, Saccharomyces pastorianus
atgctctttgttccccggagaagaa

SEQ ID NO: 17499 - DNA, 25 bp, Saccharomyces pastorianus
gacgacggacacacatgctctttgt

SEQ ID NO: 17500 - DNA, 25 bp, Saccharomyces pastorianus
agtctggtgctacaattcgccgaaa

SEQ ID NO: 17501 - DNA, 25 bp, Saccharomyces pastorianus
gctccccagtgtcttggtcaatgaa

SEQ ID NO: 17502 - DNA, 25 bp, Saccharomyces pastorianus
atcgcggacgccaagaacgtttgct

SEQ ID NO: 17503 - DNA, 25 bp, Saccharomyces pastorianus
acaaagacactttcccgcatataaa

SEQ ID NO: 17504 - DNA, 25 bp, Saccharomyces pastorianus
aagatcgccgaggagtacgcgtctt

SEQ ID NO: 17505 - DNA, 25 bp, Saccharomyces pastorianus
acctggtcctactgggatgtggcga

SEQ ID NO: 17506 - DNA, 25 bp, Saccharomyces pastorianus
agtgctatacgaaggcctggtgaac

SEQ ID NO: 17507 - DNA, 25 bp, Saccharomyces pastorianus
aaccagtccttgatcggcggtggcg

SEQ ID NO: 17508 - DNA, 25 bp, Saccharomyces pastorianus
gaagaattcaactacctcgtggaag

SEQ ID NO: 17509 - DNA, 25 bp, Saccharomyces pastorianus
atggacgtcgatgcaatctttcagg

SEQ ID NO: 17510 - DNA, 25 bp, Saccharomyces pastorianus
gacgataccattgcccttacaagaa

SEQ ID NO: 17511 - DNA, 25 bp, Saccharomyces pastorianus
gaactctgtttgtaactctgtttcc

SEQ ID NO: 17512 - DNA, 25 bp, Saccharomyces pastorianus
gtttcatccaggttctttcacgcaa

SEQ ID NO: 17513 - DNA, 25 bp, Saccharomyces pastorianus
atggccccatcatattcatcttatt

SEQ ID NO: 17514 - DNA, 25 bp, Saccharomyces pastorianus
tgaaggctactactaccttgccaat

SEQ ID NO: 17515 - DNA, 25 bp, Saccharomyces pastorianus
gactctcctagtttggcagtgtgta

SEQ ID NO: 17516 - DNA, 25 bp, Saccharomyces pastorianus
aatccctcctacaatgaactctgtt

SEQ ID NO: 17517 - DNA, 25 bp, Saccharomyces pastorianus
gcgatttaccgcaacaagaccttaa

SEQ ID NO: 17518 - DNA, 25 bp, Saccharomyces pastorianus
attctggttgtaactctgcttctga

SEQ ID NO: 17519 - DNA, 25 bp, Saccharomyces pastorianus
gaacaagcttgtctcttttacagaa

SEQ ID NO: 17520 - DNA, 25 bp, Saccharomyces pastorianus
ttgatgcaatgctctatgttaccga

SEQ ID NO: 17521 - DNA, 25 bp, Saccharomyces pastorianus
gcgatacagaatatcctcacggaat

SEQ ID NO: 17522 - DNA, 25 bp, Saccharomyces pastorianus
gcctggcctttcttacaaccagtta

SEQ ID NO: 17523 - DNA, 25 bp, Saccharomyces pastorianus
gaggtgcctgactactatgatttta

SEQ ID NO: 17524 - DNA, 25 bp, Saccharomyces pastorianus
caattgacccgatgactattcctgg

SEQ ID NO: 17525 - DNA, 25 bp, Saccharomyces pastorianus
gaatcacaaaaccatgcggcggcct

SEQ ID NO: 17526 - DNA, 25 bp, Saccharomyces pastorianus
gaaatggacgccttggcgcaacgtc

SEQ ID NO: 17527 - DNA, 25 bp, Saccharomyces pastorianus
aaacgtggtcctcacgatgcagcga

SEQ ID NO: 17528 - DNA, 25 bp, Saccharomyces pastorianus
ctactccaggaagcggcactacgaa

SEQ ID NO: 17529 - DNA, 25 bp, Saccharomyces pastorianus
aatctcacattgtaaggcccgggct

SEQ ID NO: 17530 - DNA, 25 bp, Saccharomyces pastorianus
ggcccgggctagaccaattcagaga

SEQ ID NO: 17531 - DNA, 25 bp, Saccharomyces pastorianus
gttacaacgctaaggccatcggttc

SEQ ID NO: 17532 - DNA, 25 bp, Saccharomyces pastorianus
gagtgggctcacagcagatgctcgt

SEQ ID NO: 17533 - DNA, 25 bp, Saccharomyces pastorianus
atcggttctggttctgaaggtgccc

SEQ ID NO: 17534 - DNA, 25 bp, Saccharomyces pastorianus
gtaccgctgcagtaacacacaattt

SEQ ID NO: 17535 - DNA, 25 bp, Saccharomyces pastorianus
ggtcatgatgcggatgctggctatc

SEQ ID NO: 17536 - DNA, 25 bp, Saccharomyces pastorianus
gggttgccttattgatcgctggtca

SEQ ID NO: 17537 - DNA, 25 bp, Saccharomyces pastorianus
gttctatgatcgagcatgcgcgtac

SEQ ID NO: 17538 - DNA, 25 bp, Saccharomyces pastorianus
acagtcagtttgtgatcttgctcta

SEQ ID NO: 17539 - DNA, 25 bp, Saccharomyces pastorianus
tgaaggtgcccaagcggaactttta

SEQ ID NO: 17540 - DNA, 25 bp, Saccharomyces pastorianus
tggctatcagcttttccacgcagaa

SEQ ID NO: 17541 - DNA, 25 bp, Saccharomyces pastorianus
gatcgatcgccatatcggttgtgca

SEQ ID NO: 17542 - DNA, 25 bp, Saccharomyces pastorianus
ggttgactggtcctcaattggctga

SEQ ID NO: 17543 - DNA, 25 bp, Saccharomyces pastorianus
actggtcctcaattggctgacttgt

SEQ ID NO: 17544 - DNA, 25 bp, Saccharomyces pastorianus
agtggttgactggtcctcaattggc

SEQ ID NO: 17545 - DNA, 25 bp, Saccharomyces pastorianus
tgactggtcctcaattggctgactt

SEQ ID NO: 17546 - DNA, 25 bp, Saccharomyces pastorianus
tggtcctcaattggctgacttgtac

SEQ ID NO: 17547 - DNA, 25 bp, Saccharomyces pastorianus
gtcctcaattggctgacttgtacca

SEQ ID NO: 17548 - DNA, 25 bp, Saccharomyces pastorianus
ctcaattggctgacttgtaccactc

SEQ ID NO: 17549 - DNA, 25 bp, Saccharomyces pastorianus
gttgactggtcctcaattggctgac

SEQ ID NO: 17550 - DNA, 25 bp, Saccharomyces pastorianus
caacccaaagagaattgctaccgct

SEQ ID NO: 17551 - DNA, 25 bp, Saccharomyces pastorianus
gaatccaaactctgacaaatccaag

SEQ ID NO: 17552 - DNA, 25 bp, Saccharomyces pastorianus
aagtggttgactggtcctcaattgg

SEQ ID NO: 17553 - DNA, 25 bp, Saccharomyces pastorianus
gcagcaactagtatagcgcccttag

SEQ ID NO: 17554 - DNA, 25 bp, Saccharomyces pastorianus
agaaggtttcgctgctctctacaca

SEQ ID NO: 17555 - DNA, 25 bp, Saccharomyces pastorianus
gacattgaaccctctcttttgtggg

SEQ ID NO: 17556 - DNA, 25 bp, Saccharomyces pastorianus
caagtttctagataccatacggcgt

SEQ ID NO: 17557 - DNA, 25 bp, Saccharomyces pastorianus
atgatagctgctatttgcacccatc

SEQ ID NO: 17558 - DNA, 25 bp, Saccharomyces pastorianus
cacccatcccttcgatgttggtaaa

SEQ ID NO: 17559 - DNA, 25 bp, Saccharomyces pastorianus
tttgccagtggttgcgtaagcggaa

SEQ ID NO: 17560 - DNA, 25 bp, Saccharomyces pastorianus
cgagacgttccatttagcgcaatat

SEQ ID NO: 17561 - DNA, 25 bp, Saccharomyces pastorianus
ggtccgtctagagctcttttcaaag

SEQ ID NO: 17562 - DNA, 25 bp, Saccharomyces pastorianus
ggctagatgctaaccagtattcacg

SEQ ID NO: 17563 - DNA, 25 bp, Saccharomyces pastorianus
agtatacctagatcttcgaagtcca

SEQ ID NO: 17564 - DNA, 25 bp, Saccharomyces pastorianus
atgggtatttacgtcaatgccgctt

SEQ ID NO: 17565 - DNA, 25 bp, Saccharomyces pastorianus
aatgccgcttgtaactgtttgtggt

SEQ ID NO: 17566 - DNA, 25 bp, Saccharomyces pastorianus
taggagcctgtataaccacgtcgat

SEQ ID NO: 17567 - DNA, 25 bp, Saccharomyces pastorianus
gggtgaacccatcccatacgatgaa

SEQ ID NO: 17568 - DNA, 25 bp, Saccharomyces pastorianus
cttggttctgaggttcacggtgtaa

SEQ ID NO: 17569 - DNA, 25 bp, Saccharomyces pastorianus
gtatagcaatcgtccttggttctga

SEQ ID NO: 17570 - DNA, 25 bp, Saccharomyces pastorianus
gcagtttggtccgatcgtgtgaaat

SEQ ID NO: 17571 - DNA, 25 bp, Saccharomyces pastorianus
ggttcaggtttagtctctggccaaa

SEQ ID NO: 17572 - DNA, 25 bp, Saccharomyces pastorianus
ttagagcgcaattaatgaccgtccc

SEQ ID NO: 17573 - DNA, 25 bp, Saccharomyces pastorianus
tttgtccatcagtttagccttccaa

SEQ ID NO: 17574 - DNA, 25 bp, Saccharomyces pastorianus
atctttttcctcacggcaattgtct

SEQ ID NO: 17575 - DNA, 25 bp, Saccharomyces pastorianus
aaagtgggccgccagattggcttac

SEQ ID NO: 17576 - DNA, 25 bp, Saccharomyces pastorianus
acgagtcacgtttgctggcgaaatt

SEQ ID NO: 17577 - DNA, 25 bp, Saccharomyces pastorianus
ttacagacacccacagatagaccag

SEQ ID NO: 17578 - DNA, 25 bp, Saccharomyces pastorianus
gtgtccctcaactaatagcatgcga

SEQ ID NO: 17579 - DNA, 25 bp, Saccharomyces pastorianus
tggaatgattactgccacggcgatt

SEQ ID NO: 17580 - DNA, 25 bp, Saccharomyces pastorianus
tttgaagcagtctacctcgaacgag

SEQ ID NO: 17581 - DNA, 25 bp, Saccharomyces pastorianus
gatcttgtggcagctacgttgcata

SEQ ID NO: 17582 - DNA, 25 bp, Saccharomyces pastorianus
taagcaccgcaccttgaacgagtca

SEQ ID NO: 17583 - DNA, 25 bp, Saccharomyces pastorianus
gagccatcttaagtacgcattccaa

SEQ ID NO: 17584 - DNA, 25 bp, Saccharomyces pastorianus
aagatggtgccggatggatgcccca

SEQ ID NO: 17585 - DNA, 25 bp, Saccharomyces pastorianus
gatgccccatcttattgatttcggt

SEQ ID NO: 17586 - DNA, 25 bp, Saccharomyces pastorianus
aaagcgtggccattttcgactacat

SEQ ID NO: 17587 - DNA, 25 bp, Saccharomyces pastorianus
gacggattagaccatttcacttcca

SEQ ID NO: 17588 - DNA, 25 bp, Saccharomyces pastorianus
attcagcaggcggtaacgcggtttt

SEQ ID NO: 17589 - DNA, 25 bp, Saccharomyces pastorianus
gaccggtggacgaggataccatcta

SEQ ID NO: 17590 - DNA, 25 bp, Saccharomyces pastorianus
attactcccgaaacatggaccggtg

SEQ ID NO: 17591 - DNA, 25 bp, Saccharomyces pastorianus
gatttcactaatgacccttttgtta

SEQ ID NO: 17592 - DNA, 25 bp, Saccharomyces pastorianus
ggtcgaacatcaaggctttcacacc

SEQ ID NO: 17593 - DNA, 25 bp, Saccharomyces pastorianus
ttacttacgggagtgacgagctgct

SEQ ID NO: 17594 - DNA, 25 bp, Saccharomyces pastorianus
aggatgttcgtaggcaacaacccaa

SEQ ID NO: 17595 - DNA, 25 bp, Saccharomyces pastorianus
gccaatgccacttttttccatgaag

SEQ ID NO: 17596 - DNA, 25 bp, Saccharomyces pastorianus
gaagtatcccctacaagttctacaa

SEQ ID NO: 17597 - DNA, 25 bp, Saccharomyces pastorianus
aggtctactagataccccacagagg

SEQ ID NO: 17598 - DNA, 25 bp, Saccharomyces pastorianus
atcatttagtgccattcttcggtaa

SEQ ID NO: 17599 - DNA, 25 bp, Saccharomyces pastorianus
aaaggctcacgaagcagattgcgat

SEQ ID NO: 17600 - DNA, 25 bp, Saccharomyces pastorianus
attaagaccatcctgaccgaactag

SEQ ID NO: 17601 - DNA, 25 bp, Saccharomyces pastorianus
agttcatatcggctacataccaaac

SEQ ID NO: 17602 - DNA, 25 bp, Saccharomyces pastorianus
gatgatgtcatcaagaatgccgtct

SEQ ID NO: 17603 - DNA, 25 bp, Saccharomyces pastorianus
aaaccattgggtgttgccgttgtca

SEQ ID NO: 17604 - DNA, 25 bp, Saccharomyces pastorianus
aggatcttctacagtaacttcatgt

SEQ ID NO: 17605 - DNA, 25 bp, Saccharomyces pastorianus
aattcagcgtatttcaggcgcaatt

SEQ ID NO: 17606 - DNA, 25 bp, Saccharomyces pastorianus
cagaggtatgccaaagccatgcttt

SEQ ID NO: 17607 - DNA, 25 bp, Saccharomyces pastorianus
gttgccgttgtcatggaagctactc

SEQ ID NO: 17608 - DNA, 25 bp, Saccharomyces pastorianus
gacacacatgacgatggcttgccga

SEQ ID NO: 17609 - DNA, 25 bp, Saccharomyces pastorianus
aacgggcccttgtgcgttcaaccag

SEQ ID NO: 17610 - DNA, 25 bp, Saccharomyces pastorianus
atacactagcgcatggcagggaaac

SEQ ID NO: 17611 - DNA, 25 bp, Saccharomyces pastorianus
gaagatatgtgctccttgtgccatg

SEQ ID NO: 17612 - DNA, 25 bp, Saccharomyces pastorianus
taccaaatgcccgtatacactagcg

SEQ ID NO: 17613 - DNA, 25 bp, Saccharomyces pastorianus
acataccctcccaagttctattgta

SEQ ID NO: 17614 - DNA, 25 bp, Saccharomyces pastorianus
gagaggttgcagtcccaacagcagc

SEQ ID NO: 17615 - DNA, 25 bp, Saccharomyces pastorianus
aaaataacattactgctgccccttc

SEQ ID NO: 17616 - DNA, 25 bp, Saccharomyces pastorianus
aacaaagctcaagcttgccctggac

SEQ ID NO: 17617 - DNA, 25 bp, Saccharomyces pastorianus
gcagaggttctggacgtactaggtt

SEQ ID NO: 17618 - DNA, 25 bp, Saccharomyces pastorianus
gtactaggttcctcttggacgaaga

SEQ ID NO: 17619 - DNA, 25 bp, Saccharomyces pastorianus
gcaaagacgtggtatacacacacaa

SEQ ID NO: 17620 - DNA, 25 bp, Saccharomyces pastorianus
gaaatcacaacaacgtaggacagct

SEQ ID NO: 17621 - DNA, 25 bp, Saccharomyces pastorianus
aatggcagcgagttttccggtgcaa

SEQ ID NO: 17622 - DNA, 25 bp, Saccharomyces pastorianus
gaacaatcctgacgagatcaaccaa

SEQ ID NO: 17623 - DNA, 25 bp, Saccharomyces pastorianus
gaacaaacaagtcctgtccgatgta

SEQ ID NO: 17624 - DNA, 25 bp, Saccharomyces pastorianus
gatcctagggtcatccaagggtatg

SEQ ID NO: 17625 - DNA, 25 bp, Saccharomyces pastorianus
gtggctcaacaacaacgggcgtatg

SEQ ID NO: 17626 - DNA, 25 bp, Saccharomyces pastorianus
cgttgagtataagtaatccgtttga

SEQ ID NO: 17627 - DNA, 25 bp, Saccharomyces pastorianus
aacagcggcgcaacaaagatggaag

SEQ ID NO: 17628 - DNA, 25 bp, Saccharomyces pastorianus
aagaagatgcgctacctgtggacaa

SEQ ID NO: 17629 - DNA, 25 bp, Saccharomyces pastorianus
gcgctacctgtggacaaatcggaca

SEQ ID NO: 17630 - DNA, 25 bp, Saccharomyces pastorianus
gactctaaaggctgtttgatccgtt

SEQ ID NO: 17631 - DNA, 25 bp, Saccharomyces pastorianus
ggtatacgagaatgccgcaccaggc

SEQ ID NO: 17632 - DNA, 25 bp, Saccharomyces pastorianus
ggccatggaataacctttcgactga

SEQ ID NO: 17633 - DNA, 25 bp, Saccharomyces pastorianus
gggaacccgaaatagcagacgccat

SEQ ID NO: 17634 - DNA, 25 bp, Saccharomyces pastorianus
tcgactgaattagacgtcatccaag

SEQ ID NO: 17635 - DNA, 25 bp, Saccharomyces pastorianus
gatattggacagcacctgacacagg

SEQ ID NO: 17636 - DNA, 25 bp, Saccharomyces pastorianus
ggtcatgtcaggtacaggcgataca

SEQ ID NO: 17637 - DNA, 25 bp, Saccharomyces pastorianus
gcatttggcataggcatcaacacgg

SEQ ID NO: 17638 - DNA, 25 bp, Saccharomyces pastorianus
aggcaccatgattctggtcatgtca

SEQ ID NO: 17639 - DNA, 25 bp, Saccharomyces pastorianus
aagaaaccacggttcttcgtgatat

SEQ ID NO: 17640 - DNA, 25 bp, Saccharomyces pastorianus
gaatttgttcactaagttgcatcgt

SEQ ID NO: 17641 - DNA, 25 bp, Saccharomyces pastorianus
acagcggtccagttgtctccgttga

SEQ ID NO: 17642 - DNA, 25 bp, Saccharomyces pastorianus
aatacatcgacaccggtagagccgc

SEQ ID NO: 17643 - DNA, 25 bp, Saccharomyces pastorianus
tcggctgttgaaacgtacggttctt

SEQ ID NO: 17644 - DNA, 25 bp, Saccharomyces pastorianus
tgttgccgtcccatctaaggaaaac

SEQ ID NO: 17645 - DNA, 25 bp, Saccharomyces pastorianus
aagcttttcctaggtgtctactacg

SEQ ID NO: 17646 - DNA, 25 bp, Saccharomyces pastorianus
acaccttcattgctgtcatcaacaa

SEQ ID NO: 17647 - DNA, 25 bp, Saccharomyces pastorianus
gtattgacaccatcaagtcggctgt

SEQ ID NO: 17648 - DNA, 25 bp, Saccharomyces pastorianus
aaaggacgctgtctcttctatcacc

SEQ ID NO: 17649 - DNA, 25 bp, Saccharomyces pastorianus
ttattgttactgaatccggctggcc

SEQ ID NO: 17650 - DNA, 25 bp, Saccharomyces pastorianus
gacaaaaacactgctgcccaagact

SEQ ID NO: 17651 - DNA, 25 bp, Saccharomyces pastorianus
gtaactactcagactacatggccgt

SEQ ID NO: 17652 - DNA, 25 bp, Saccharomyces pastorianus
gatctcgcaagaattggacacgcag

SEQ ID NO: 17653 - DNA, 25 bp, Saccharomyces pastorianus
tgaaatccagcgagtctgcgtccaa

SEQ ID NO: 17654 - DNA, 25 bp, Saccharomyces pastorianus
cgtccaatattcctgattcggtgaa

SEQ ID NO: 17655 - DNA, 25 bp, Saccharomyces pastorianus
agaagtcctggcaagcacctgggac

SEQ ID NO: 17656 - DNA, 25 bp, Saccharomyces pastorianus
acgagttcgacaacggcgagtgcgc

SEQ ID NO: 17657 - DNA, 25 bp, Saccharomyces pastorianus
ttttccagcggattctaggtcgttt

SEQ ID NO: 17658 - DNA, 25 bp, Saccharomyces pastorianus
agggcagcactaatggactccaagg

SEQ ID NO: 17659 - DNA, 25 bp, Saccharomyces pastorianus
ggctgggcgccaaactgaagcgtaa

SEQ ID NO: 17660 - DNA, 25 bp, Saccharomyces pastorianus
actcgcctacgtcgcatatcaaagt

SEQ ID NO: 17661 - DNA, 25 bp, Saccharomyces pastorianus
tgaacacgaggctgtcggtgcgctc

SEQ ID NO: 17662 - DNA, 25 bp, Saccharomyces pastorianus
ggacccgaagactcacaaactcaga

SEQ ID NO: 17663 - DNA, 25 bp, Saccharomyces pastorianus
gattccgatggaagctcttactctg

SEQ ID NO: 17664 - DNA, 25 bp, Saccharomyces pastorianus
taagcaagttggtaccgtcgactcc

SEQ ID NO: 17665 - DNA, 25 bp, Saccharomyces pastorianus
ttgctggttacaactccgctgttat

SEQ ID NO: 17666 - DNA, 25 bp, Saccharomyces pastorianus
tactgatatcactttctgggtcggt

SEQ ID NO: 17667 - DNA, 25 bp, Saccharomyces pastorianus
tggctctgaagctttgtaccgtgac

SEQ ID NO: 17668 - DNA, 25 bp, Saccharomyces pastorianus
tgtaccgtgacgatttgaccgcttc

SEQ ID NO: 17669 - DNA, 25 bp, Saccharomyces pastorianus
gttgctgacatttctgattccgatg

SEQ ID NO: 17670 - DNA, 25 bp, Saccharomyces pastorianus
ttccgattttgtcatggccaacgct

SEQ ID NO: 17671 - DNA, 25 bp, Saccharomyces pastorianus
gaccgcttcgcaactatcggataag

SEQ ID NO: 17672 - DNA, 25 bp, Saccharomyces pastorianus
gatatccgtagctttgttgctgaca

SEQ ID NO: 17673 - DNA, 25 bp, Saccharomyces pastorianus
ttaagaaatccactgttgccggttt

SEQ ID NO: 17674 - DNA, 25 bp, Saccharomyces pastorianus
acttctttgttgttgtgttcctggt

SEQ ID NO: 17675 - DNA, 25 bp, Saccharomyces pastorianus
gttcattgccttcacatttagtaaa

SEQ ID NO: 17676 - DNA, 25 bp, Saccharomyces pastorianus
ttactgtcgtcataaccatcatcgg

SEQ ID NO: 17677 - DNA, 25 bp, Saccharomyces pastorianus
gctggtgccagtttgttagtcctaa

SEQ ID NO: 17678 - DNA, 25 bp, Saccharomyces pastorianus
attcacaggctcatcatttgtccta

SEQ ID NO: 17679 - DNA, 25 bp, Saccharomyces pastorianus
gaaacttcagtgtcattggtggatt

SEQ ID NO: 17680 - DNA, 25 bp, Saccharomyces pastorianus
ttcctggttgtggttacggtctcta

SEQ ID NO: 17681 - DNA, 25 bp, Saccharomyces pastorianus
taccaatactggtgccggtgaatta

SEQ ID NO: 17682 - DNA, 25 bp, Saccharomyces pastorianus
acggtctctatgttggctggtgcca

SEQ ID NO: 17683 - DNA, 25 bp, Saccharomyces pastorianus
tatgcgcttgtgttgtttctcaggc

SEQ ID NO: 17684 - DNA, 25 bp, Saccharomyces pastorianus
accatcatcggcaccatttgttttg

SEQ ID NO: 17685 - DNA, 25 bp, Saccharomyces pastorianus
gttgtaacagtatcttcaccggtaa

SEQ ID NO: 17686 - DNA, 25 bp, Saccharomyces pastorianus
ggactccaatggctgaggaacttgc

SEQ ID NO: 17687 - DNA, 25 bp, Saccharomyces pastorianus
aaccataacatcgacacttccagag

SEQ ID NO: 17688 - DNA, 25 bp, Saccharomyces pastorianus
gagaaccattgccacagcgagaata

SEQ ID NO: 17689 - DNA, 25 bp, Saccharomyces pastorianus
gaggaacttgccgatccaaagagta

SEQ ID NO: 17690 - DNA, 25 bp, Saccharomyces pastorianus
catcctgagtccctaccaattaata

SEQ ID NO: 17691 - DNA, 25 bp, Saccharomyces pastorianus
ggccattataagacttgccgctggt

SEQ ID NO: 17692 - DNA, 25 bp, Saccharomyces pastorianus
tgccgctggtcgttatacaatgaaa

SEQ ID NO: 17693 - DNA, 25 bp, Saccharomyces pastorianus
attatccaatatgtctcctcatcct

SEQ ID NO: 17694 - DNA, 25 bp, Saccharomyces pastorianus
gaataaaagcctgtaccggtggtat

SEQ ID NO: 17695 - DNA, 25 bp, Saccharomyces pastorianus
agagcaatttgtctgtttcatggca

SEQ ID NO: 17696 - DNA, 25 bp, Saccharomyces pastorianus
aaagactgtctcaatgacgcgttat

SEQ ID NO: 17697 - DNA, 25 bp, Saccharomyces pastorianus
gctacatccgcacatcgttaaactg

SEQ ID NO: 17698 - DNA, 25 bp, Saccharomyces pastorianus
atcgtggcagataccgtcattgaca

SEQ ID NO: 17699 - DNA, 25 bp, Saccharomyces pastorianus
aaatttgccaattcgctcttattga

SEQ ID NO: 17700 - DNA, 25 bp, Saccharomyces pastorianus
gcatctgtggtgtctcaaaggttac

SEQ ID NO: 17701 - DNA, 25 bp, Saccharomyces pastorianus
gacgtcatggagtacttgccatttt

SEQ ID NO: 17702 - DNA, 25 bp, Saccharomyces pastorianus
cgctcttattgatgtttggtgctat

SEQ ID NO: 17703 - DNA, 25 bp, Saccharomyces pastorianus
gcatccaatcaaaagctacatccgc

SEQ ID NO: 17704 - DNA, 25 bp, Saccharomyces pastorianus
ggataaggcaattcatcgtggcaga

SEQ ID NO: 17705 - DNA, 25 bp, Saccharomyces pastorianus
ggtatcgaccaactggcatctgtgg

SEQ ID NO: 17706 - DNA, 25 bp, Saccharomyces pastorianus
gacgcgttattgctctggataatca

SEQ ID NO: 17707 - DNA, 25 bp, Saccharomyces pastorianus
ataacgttccattcaaggccaccaa

SEQ ID NO: 17708 - DNA, 25 bp, Saccharomyces pastorianus
ggaattgactgttgacgttgccgtt

SEQ ID NO: 17709 - DNA, 25 bp, Saccharomyces pastorianus
gagcaagtacgacaccaacgtggtt

SEQ ID NO: 17710 - DNA, 25 bp, Saccharomyces pastorianus
aggtaccttcagaggtggtgccaga

SEQ ID NO: 17711 - DNA, 25 bp, Saccharomyces pastorianus
gttcccatccaagattgatttcgac

SEQ ID NO: 17712 - DNA, 25 bp, Saccharomyces pastorianus
gccttcagaggcagagctggtttca

SEQ ID NO: 17713 - DNA, 25 bp, Saccharomyces pastorianus
accggtagaatcttcacttccgatt

SEQ ID NO: 17714 - DNA, 25 bp, Saccharomyces pastorianus
gacgttgccgttgtcagaccagaaa

SEQ ID NO: 17715 - DNA, 25 bp, Saccharomyces pastorianus
gtatggcctttgtcactttcgaagg

SEQ ID NO: 17716 - DNA, 25 bp, Saccharomyces pastorianus
gaattcttcggtgctaacgccgact

SEQ ID NO: 17717 - DNA, 25 bp, Saccharomyces pastorianus
aggcggtttcagaggtaccttcaga

SEQ ID NO: 17718 - DNA, 25 bp, Saccharomyces pastorianus
cttctccaaagccatacgctgttaa

SEQ ID NO: 17719 - DNA, 25 bp, Saccharomyces pastorianus
cgctatcgctgaaggtaagtctaag

SEQ ID NO: 17720 - DNA, 25 bp, Saccharomyces pastorianus
gccatacgctgttaagtacggtttg

SEQ ID NO: 17721 - DNA, 25 bp, Saccharomyces pastorianus
tctccaaagccatacgctgttaagt

SEQ ID NO: 17722 - DNA, 25 bp, Saccharomyces pastorianus
catacgctgttaagtacggtttgaa

SEQ ID NO: 17723 - DNA, 25 bp, Saccharomyces pastorianus
cgctgaaggtaagtctaagcaagac

SEQ ID NO: 17724 - DNA, 25 bp, Saccharomyces pastorianus
agctgccgctatcgctgaaggtaag

SEQ ID NO: 17725 - DNA, 25 bp, Saccharomyces pastorianus
ctgccgctatcgctgaaggtaagtc

SEQ ID NO: 17726 - DNA, 25 bp, Saccharomyces pastorianus
gccgctatcgctgaaggtaagtcta

SEQ ID NO: 17727 - DNA, 25 bp, Saccharomyces pastorianus
aagccatacgctgttaagtacggtt

SEQ ID NO: 17728 - DNA, 25 bp, Saccharomyces pastorianus
tatcgctgaaggtaagtctaagcaa

SEQ ID NO: 17729 - DNA, 25 bp, Saccharomyces pastorianus
ggacatcttgggtccctgtgtcaag

SEQ ID NO: 17730 - DNA, 25 bp, Saccharomyces pastorianus
tgtggaaggacttgcacgacgtcaa

SEQ ID NO: 17731 - DNA, 25 bp, Saccharomyces pastorianus
aaagcgaacagatctcaccggatgt

SEQ ID NO: 17732 - DNA, 25 bp, Saccharomyces pastorianus
aggtcagaagatctccaacagcgga

SEQ ID NO: 17733 - DNA, 25 bp, Saccharomyces pastorianus
aaagacaccgttgtcggttctggct

SEQ ID NO: 17734 - DNA, 25 bp, Saccharomyces pastorianus
agagatttccgatgttacgtacgaa

SEQ ID NO: 17735 - DNA, 25 bp, Saccharomyces pastorianus
tactgggaccctgatgctagagcca

SEQ ID NO: 17736 - DNA, 25 bp, Saccharomyces pastorianus
tttgcttccaagctagagccatctt

SEQ ID NO: 17737 - DNA, 25 bp, Saccharomyces pastorianus
ccggatgttcatcccaacttaagga

SEQ ID NO: 17738 - DNA, 25 bp, Saccharomyces pastorianus
aggatattcgcaagccaatctgacg

SEQ ID NO: 17739 - DNA, 25 bp, Saccharomyces pastorianus
ccaaaggctggctcaaggacatcga

SEQ ID NO: 17740 - DNA, 25 bp, Saccharomyces pastorianus
ggcgtcaaccagctcatcatgaaga

SEQ ID NO: 17741 - DNA, 25 bp, Saccharomyces pastorianus
gaagagcttccgcaacatcaggtcc

SEQ ID NO: 17742 - DNA, 25 bp, Saccharomyces pastorianus
agcgcaacaggctcaatctgctatt

SEQ ID NO: 17743 - DNA, 25 bp, Saccharomyces pastorianus
ccatcgctgacgctgacgagtatat

SEQ ID NO: 17744 - DNA, 25 bp, Saccharomyces pastorianus
aaaacgccgtcgtattggccacgat

SEQ ID NO: 17745 - DNA, 25 bp, Saccharomyces pastorianus
gattgaccagtccaacaacgtcgta

SEQ ID NO: 17746 - DNA, 25 bp, Saccharomyces pastorianus
aatagacacgcagctggaggccatc

SEQ ID NO: 17747 - DNA, 25 bp, Saccharomyces pastorianus
aacagggtgctgcagactctacaaa

SEQ ID NO: 17748 - DNA, 25 bp, Saccharomyces pastorianus
caggacgtggtcgagtcgctgacaa

SEQ ID NO: 17749 - DNA, 25 bp, Saccharomyces pastorianus
gctgacaaagatctgcgactccaac

SEQ ID NO: 17750 - DNA, 25 bp, Saccharomyces pastorianus
ggtcgcagtttcactcgcaaagcaa

SEQ ID NO: 17751 - DNA, 25 bp, Saccharomyces pastorianus
atacgatcagtagcaccgatttcat

SEQ ID NO: 17752 - DNA, 25 bp, Saccharomyces pastorianus
gagacgattagatccttaggcaatg

SEQ ID NO: 17753 - DNA, 25 bp, Saccharomyces pastorianus
acctcttccacaacgacaagatcat

SEQ ID NO: 17754 - DNA, 25 bp, Saccharomyces pastorianus
gcaacttgctgcgagtgagattggc

SEQ ID NO: 17755 - DNA, 25 bp, Saccharomyces pastorianus
aaggtcattgtcgatgtgtgtaaca

SEQ ID NO: 17756 - DNA, 25 bp, Saccharomyces pastorianus
tgaacgaaatcgcatacctcttcca

SEQ ID NO: 17757 - DNA, 25 bp, Saccharomyces pastorianus
caaacccaacactgacattacacaa

SEQ ID NO: 17758 - DNA, 25 bp, Saccharomyces pastorianus
aagtcgtctaagcagaacatcgaga

SEQ ID NO: 17759 - DNA, 25 bp, Saccharomyces pastorianus
tccgcaagatgcaacgatcgtacta

SEQ ID NO: 17760 - DNA, 25 bp, Saccharomyces pastorianus
gtacgttagtgtaaatccgcaagat

SEQ ID NO: 17761 - DNA, 25 bp, Saccharomyces pastorianus
gatgaagattccaccagacatacat

SEQ ID NO: 17762 - DNA, 25 bp, Saccharomyces pastorianus
ggttccaaacaattcccatacgatt

SEQ ID NO: 17763 - DNA, 25 bp, Saccharomyces pastorianus
acaatgatcctttttggtttcctga

SEQ ID NO: 17764 - DNA, 25 bp, Saccharomyces pastorianus
atttccacctcttcatcattacaat

SEQ ID NO: 17765 - DNA, 25 bp, Saccharomyces pastorianus
aaagcctcgcactgtttcgatgatc

SEQ ID NO: 17766 - DNA, 25 bp, Saccharomyces pastorianus
acagattccaatatatccagcccgc

SEQ ID NO: 17767 - DNA, 25 bp, Saccharomyces pastorianus
attacaatccaacctcaactcaagt

SEQ ID NO: 17768 - DNA, 25 bp, Saccharomyces pastorianus
aagtgtccatatttccaattctcat

SEQ ID NO: 17769 - DNA, 25 bp, Saccharomyces pastorianus
ggtttcctgatctcgacagtatgga

SEQ ID NO: 17770 - DNA, 25 bp, Saccharomyces pastorianus
aatagcgattcaaacgatggccgta

SEQ ID NO: 17771 - DNA, 25 bp, Saccharomyces pastorianus
catcgaccctcatatgcaactgatt

SEQ ID NO: 17772 - DNA, 25 bp, Saccharomyces pastorianus
aagctcagacgaatggtacgccacc

SEQ ID NO: 17773 - DNA, 25 bp, Saccharomyces pastorianus
taccagcctatgcaagtcactacaa

SEQ ID NO: 17774 - DNA, 25 bp, Saccharomyces pastorianus
ttctacaagctgttccatcttaccg

SEQ ID NO: 17775 - DNA, 25 bp, Saccharomyces pastorianus
gatggtttattgcaagcttcgctag

SEQ ID NO: 17776 - DNA, 25 bp, Saccharomyces pastorianus
tattatgaatcaccatcaccagccc

SEQ ID NO: 17777 - DNA, 25 bp, Saccharomyces pastorianus
tatgcccaattactcttctacaagc

SEQ ID NO: 17778 - DNA, 25 bp, Saccharomyces pastorianus
tcattaaggactacttgctgtgctg

SEQ ID NO: 17779 - DNA, 25 bp, Saccharomyces pastorianus
ttcagttgaccaaatacccggcagg

SEQ ID NO: 17780 - DNA, 25 bp, Saccharomyces pastorianus
ttgccacctttgcactcgaatacta

SEQ ID NO: 17781 - DNA, 25 bp, Saccharomyces pastorianus
agataccaatgttgccatctcgtcc

SEQ ID NO: 17782 - DNA, 25 bp, Saccharomyces pastorianus
cttagttaccgaacatttgccacct

SEQ ID NO: 17783 - DNA, 25 bp, Saccharomyces pastorianus
tctcgtcctacgatggtgagcggaa

SEQ ID NO: 17784 - DNA, 25 bp, Saccharomyces pastorianus
gatctggtagaagccgtctttgtgc

SEQ ID NO: 17785 - DNA, 25 bp, Saccharomyces pastorianus
aaaggaagcggtgcctgcagtcgac

SEQ ID NO: 17786 - DNA, 25 bp, Saccharomyces pastorianus
gcgcccgaggactattggacacata

SEQ ID NO: 17787 - DNA, 25 bp, Saccharomyces pastorianus
aatcccagtggagcctcgacagaaa

SEQ ID NO: 17788 - DNA, 25 bp, Saccharomyces pastorianus
gaggccaggctacgaatcagacaga

SEQ ID NO: 17789 - DNA, 25 bp, Saccharomyces pastorianus
agggccctaaagtactcggatctca

SEQ ID NO: 17790 - DNA, 25 bp, Saccharomyces pastorianus
acccgcagctccaaggatctggtag

SEQ ID NO: 17791 - DNA, 25 bp, Saccharomyces pastorianus
ggaaccgctatcacagcagcagcag

SEQ ID NO: 17792 - DNA, 25 bp, Saccharomyces pastorianus
ggatctcatactagccgccgagaac

SEQ ID NO: 17793 - DNA, 25 bp, Saccharomyces pastorianus
gccgagcccttcaatacaaactttg

SEQ ID NO: 17794 - DNA, 25 bp, Saccharomyces pastorianus
ggacgcacggttggagccgcaacaa

SEQ ID NO: 17795 - DNA, 25 bp, Saccharomyces pastorianus
gaagatacaacgctgctaattcctt

SEQ ID NO: 17796 - DNA, 25 bp, Saccharomyces pastorianus
gaactgccctctgaaattcctgaat

SEQ ID NO: 17797 - DNA, 25 bp, Saccharomyces pastorianus
aatgcaataccacatgggccccatg

SEQ ID NO: 17798 - DNA, 25 bp, Saccharomyces pastorianus
aaatctatgcccaatgcctggtctt

SEQ ID NO: 17799 - DNA, 25 bp, Saccharomyces pastorianus
cagccggcagctctaacaacaataa

SEQ ID NO: 17800 - DNA, 25 bp, Saccharomyces pastorianus
cttcgccctcgtctaagagtttgaa

SEQ ID NO: 17801 - DNA, 25 bp, Saccharomyces pastorianus
aatatgggtcaaccccacagtgcta

SEQ ID NO: 17802 - DNA, 25 bp, Saccharomyces pastorianus
gaaatgttcccaccaaattactcca

SEQ ID NO: 17803 - DNA, 25 bp, Saccharomyces pastorianus
atacatgatggtttaccccatgccg

SEQ ID NO: 17804 - DNA, 25 bp, Saccharomyces pastorianus
tactacttacaataactcctcagcc

SEQ ID NO: 17805 - DNA, 25 bp, Saccharomyces pastorianus
ggtgatgagacttctgaactgccct

SEQ ID NO: 17806 - DNA, 25 bp, Saccharomyces pastorianus
gaaagcgggcaacccaatggcaaca

SEQ ID NO: 17807 - DNA, 25 bp, Saccharomyces pastorianus
gactatacaataattctggagcccg

SEQ ID NO: 17808 - DNA, 25 bp, Saccharomyces pastorianus
gtccccatggagctggttatcataa

SEQ ID NO: 17809 - DNA, 25 bp, Saccharomyces pastorianus
caggacgacctggtttggattacaa

SEQ ID NO: 17810 - DNA, 25 bp, Saccharomyces pastorianus
gacgatccggagatgcagcacgact

SEQ ID NO: 17811 - DNA, 25 bp, Saccharomyces pastorianus
aacatttattaatatccgcgtggat

SEQ ID NO: 17812 - DNA, 25 bp, Saccharomyces pastorianus
gatgcatttatgatcaaccttcaga

SEQ ID NO: 17813 - DNA, 25 bp, Saccharomyces pastorianus
gtcatggcgatgacctcgataataa

SEQ ID NO: 17814 - DNA, 25 bp, Saccharomyces pastorianus
tggagcccgagagagccacggcaat

SEQ ID NO: 17815 - DNA, 25 bp, Saccharomyces pastorianus
gatacgtgacacaattgctaacatt

SEQ ID NO: 17816 - DNA, 25 bp, Saccharomyces pastorianus
agagacgccaatgccaacgaagaat

SEQ ID NO: 17817 - DNA, 25 bp, Saccharomyces pastorianus
tttgcatgccaactctttgacaagt

SEQ ID NO: 17818 - DNA, 25 bp, Saccharomyces pastorianus
gagagtcagactttgaagcctacga

SEQ ID NO: 17819 - DNA, 25 bp, Saccharomyces pastorianus
gtccaaacctttgatcgagcattat

SEQ ID NO: 17820 - DNA, 25 bp, Saccharomyces pastorianus
ttccaaatcttacagtccttaccca

SEQ ID NO: 17821 - DNA, 25 bp, Saccharomyces pastorianus
ggatgccttttatgctacacgtaac

SEQ ID NO: 17822 - DNA, 25 bp, Saccharomyces pastorianus
gttgcccgaaaattgctgtgtcata

SEQ ID NO: 17823 - DNA, 25 bp, Saccharomyces pastorianus
gcacctttcacttttggtatttacg

SEQ ID NO: 17824 - DNA, 25 bp, Saccharomyces pastorianus
gaagctttgcaaatcgttcctgtaa

SEQ ID NO: 17825 - DNA, 25 bp, Saccharomyces pastorianus
gtccttacccaccagtcagggagaa

SEQ ID NO: 17826 - DNA, 25 bp, Saccharomyces pastorianus
atgaactatttcgtggatgcctttt

SEQ ID NO: 17827 - DNA, 25 bp, Saccharomyces pastorianus
atcaaatgcatcaactactctccgc

SEQ ID NO: 17828 - DNA, 25 bp, Saccharomyces pastorianus
agcaaatccggttcaaggccaactt

SEQ ID NO: 17829 - DNA, 25 bp, Saccharomyces pastorianus
atgtcgcccctcgagataagctggt

SEQ ID NO: 17830 - DNA, 25 bp, Saccharomyces pastorianus
tttcgagatcccgtattgcacatgc

SEQ ID NO: 17831 - DNA, 25 bp, Saccharomyces pastorianus
gaactgaaaacctctatgaacccgc

SEQ ID NO: 17832 - DNA, 25 bp, Saccharomyces pastorianus
cgacgacttcttgctctgggaaata

SEQ ID NO: 17833 - DNA, 25 bp, Saccharomyces pastorianus
tatgaagggccaccgtgaacgcaac

SEQ ID NO: 17834 - DNA, 25 bp, Saccharomyces pastorianus
ggcaaagtcgtgttcaacctgagcg

SEQ ID NO: 17835 - DNA, 25 bp, Saccharomyces pastorianus
aagctggtcagcgtcgatttcgaga

SEQ ID NO: 17836 - DNA, 25 bp, Saccharomyces pastorianus
agatcccgctgacaaaggtctttca

SEQ ID NO: 17837 - DNA, 25 bp, Saccharomyces pastorianus
acaggaggacaatgccagcgctctg

SEQ ID NO: 17838 - DNA, 25 bp, Saccharomyces pastorianus
gagttcccactgttcaaccaggaag

SEQ ID NO: 17839 - DNA, 25 bp, Saccharomyces pastorianus
ctcaacctcggtgtcgtgataagta

SEQ ID NO: 17840 - DNA, 25 bp, Saccharomyces pastorianus
ctagcccgtggtttaaagattgcct

SEQ ID NO: 17841 - DNA, 25 bp, Saccharomyces pastorianus
aaagattgcctacttcctgtgtgta

SEQ ID NO: 17842 - DNA, 25 bp, Saccharomyces pastorianus
cctgtgtgtattttttgccttggca

SEQ ID NO: 17843 - DNA, 25 bp, Saccharomyces pastorianus
ctgggatttatctggccaaacctat

SEQ ID NO: 17844 - DNA, 25 bp, Saccharomyces pastorianus
ttgccttggcatttttagtggtttg

SEQ ID NO: 17845 - DNA, 25 bp, Saccharomyces pastorianus
aattgaatgacctcaacctcggtgt

SEQ ID NO: 17846 - DNA, 25 bp, Saccharomyces pastorianus
gattatctggcttttctgtagtgca

SEQ ID NO: 17847 - DNA, 25 bp, Saccharomyces pastorianus
gtgcaagactgcatacacaatcgtc

SEQ ID NO: 17848 - DNA, 25 bp, Saccharomyces pastorianus
acaaattccctgacttctgcagaga

SEQ ID NO: 17849 - DNA, 25 bp, Saccharomyces pastorianus
gaattggctcaagctgatcccgata

SEQ ID NO: 17850 - DNA, 25 bp, Saccharomyces pastorianus
atgtttcttctaacatcgtcaagaa

SEQ ID NO: 17851 - DNA, 25 bp, Saccharomyces pastorianus
gaatcactttgacttctaccaaggt

SEQ ID NO: 17852 - DNA, 25 bp, Saccharomyces pastorianus
ggaagctccagttcaaatcgttaag

SEQ ID NO: 17853 - DNA, 25 bp, Saccharomyces pastorianus
gagaatcacccaaatcaccattgaa

SEQ ID NO: 17854 - DNA, 25 bp, Saccharomyces pastorianus
ggaaaatgtttcttctaacatcgtc

SEQ ID NO: 17855 - DNA, 25 bp, Saccharomyces pastorianus
agatacatcgacttggaagctccag

SEQ ID NO: 17856 - DNA, 25 bp, Saccharomyces pastorianus
gggtccagtcagattaccaactaag

SEQ ID NO: 17857 - DNA, 25 bp, Saccharomyces pastorianus
ttcttctaacatcgtcaagaacgct

SEQ ID NO: 17858 - DNA, 25 bp, Saccharomyces pastorianus
aaatgtttcttctaacatcgtcaag

SEQ ID NO: 17859 - DNA, 25 bp, Saccharomyces pastorianus
gcaattggaaaatgtttcttctaac

SEQ ID NO: 17860 - DNA, 25 bp, Saccharomyces pastorianus
gtttcttctaacatcgtcaagaacg

SEQ ID NO: 17861 - DNA, 25 bp, Saccharomyces pastorianus
aacttcgccatgatccaaaagagct

SEQ ID NO: 17862 - DNA, 25 bp, Saccharomyces pastorianus
ggaagcttcgcaacaacctgatttt

SEQ ID NO: 17863 - DNA, 25 bp, Saccharomyces pastorianus
gttcgatatacaacctgacggccac

SEQ ID NO: 17864 - DNA, 25 bp, Saccharomyces pastorianus
agaaaactaagatcgctgagctgta

SEQ ID NO: 17865 - DNA, 25 bp, Saccharomyces pastorianus
attgagatcttagctctatcccacg

SEQ ID NO: 17866 - DNA, 25 bp, Saccharomyces pastorianus
aacacagccaacaggatgttcccgg

SEQ ID NO: 17867 - DNA, 25 bp, Saccharomyces pastorianus
gaatctatagaccaattatgcgagg

SEQ ID NO: 17868 - DNA, 25 bp, Saccharomyces pastorianus
ctatcccacgtttttgattgtccga

SEQ ID NO: 17869 - DNA, 25 bp, Saccharomyces pastorianus
ccactgtctattcgcctcaatatta

SEQ ID NO: 17870 - DNA, 25 bp, Saccharomyces pastorianus
gatgttcccggccaacaagatcaac

SEQ ID NO: 17871 - DNA, 25 bp, Saccharomyces pastorianus
gacgatttcgttccttatttgttcg

SEQ ID NO: 17872 - DNA, 25 bp, Saccharomyces pastorianus
ggaactggaccatttaactgtaaca

SEQ ID NO: 17873 - DNA, 25 bp, Saccharomyces pastorianus
agtatctgtcccgtgaaagtgcaag

SEQ ID NO: 17874 - DNA, 25 bp, Saccharomyces pastorianus
taagattcgaattactgccatcaat

SEQ ID NO: 17875 - DNA, 25 bp, Saccharomyces pastorianus
gattgtatcggcttcttttcaaata

SEQ ID NO: 17876 - DNA, 25 bp, Saccharomyces pastorianus
aaatttgccgatttgttcaagtgaa

SEQ ID NO: 17877 - DNA, 25 bp, Saccharomyces pastorianus
ggattctcagtctctatcctttaag

SEQ ID NO: 17878 - DNA, 25 bp, Saccharomyces pastorianus
gtaatcaccattcctgatggctcta

SEQ ID NO: 17879 - DNA, 25 bp, Saccharomyces pastorianus
ctagcaacatgcgaggacttattcc

SEQ ID NO: 17880 - DNA, 25 bp, Saccharomyces pastorianus
attcatggagactttgcacttgcaa

SEQ ID NO: 17881 - DNA, 25 bp, Saccharomyces pastorianus
agagggaccgtcattatcatttgtg

SEQ ID NO: 17882 - DNA, 25 bp, Saccharomyces pastorianus
aacagatttttaccgctagcaacat

SEQ ID NO: 17883 - DNA, 25 bp, Saccharomyces pastorianus
catcgatattagtagtgtgctggct

SEQ ID NO: 17884 - DNA, 25 bp, Saccharomyces pastorianus
tatggccgacacgtgtggtactcta

SEQ ID NO: 17885 - DNA, 25 bp, Saccharomyces pastorianus
cacgtgtggtactctagctaaggct

SEQ ID NO: 17886 - DNA, 25 bp, Saccharomyces pastorianus
ggatttttcgatgttcccgtagata

SEQ ID NO: 17887 - DNA, 25 bp, Saccharomyces pastorianus
tggtgctaagcgtgctgccactttg

SEQ ID NO: 17888 - DNA, 25 bp, Saccharomyces pastorianus
gtccaaaactggctgtcatcgatat

SEQ ID NO: 17889 - DNA, 25 bp, Saccharomyces pastorianus
aaccactgctggctgtgatcatgtg

SEQ ID NO: 17890 - DNA, 25 bp, Saccharomyces pastorianus
gatggctgacatgctaaccactgct

SEQ ID NO: 17891 - DNA, 25 bp, Saccharomyces pastorianus
gagccaagtctgtcattgctattgt

SEQ ID NO: 17892 - DNA, 25 bp, Saccharomyces pastorianus
gtatggtccttgttggtgatgtcac

SEQ ID NO: 17893 - DNA, 25 bp, Saccharomyces pastorianus
gtgttttatccggtaaagctattga

SEQ ID NO: 17894 - DNA, 25 bp, Saccharomyces pastorianus
gaaactgcagtttcaagctgctcaa

SEQ ID NO: 17895 - DNA, 25 bp, Saccharomyces pastorianus
gaaggtaccgtcttagtacaacaga

SEQ ID NO: 17896 - DNA, 25 bp, Saccharomyces pastorianus
gatgaactacaaaacccggattatg

SEQ ID NO: 17897 - DNA, 25 bp, Saccharomyces pastorianus
aggagcccaggcatctaaaagcaag

SEQ ID NO: 17898 - DNA, 25 bp, Saccharomyces pastorianus
gggaataccatctagaatacgtgca

SEQ ID NO: 17899 - DNA, 25 bp, Saccharomyces pastorianus
acgtgcaagtgctgatttctcaatt

SEQ ID NO: 17900 - DNA, 25 bp, Saccharomyces pastorianus
gttttacctggactctcgagaacaa

SEQ ID NO: 17901 - DNA, 25 bp, Saccharomyces pastorianus
tggccgaatccaagcagggtctaga

SEQ ID NO: 17902 - DNA, 25 bp, Saccharomyces pastorianus
gttgcaggccaacttagatcatttg

SEQ ID NO: 17903 - DNA, 25 bp, Saccharomyces pastorianus
tacaacagaccctgggaggagccca

SEQ ID NO: 17904 - DNA, 25 bp, Saccharomyces pastorianus
gaactggcagcaaacttcttgagac

SEQ ID NO: 17905 - DNA, 25 bp, Saccharomyces pastorianus
gaatatggccccaaagtggatattt

SEQ ID NO: 17906 - DNA, 25 bp, Saccharomyces pastorianus
acgagactcccctaagagcactgta

SEQ ID NO: 17907 - DNA, 25 bp, Saccharomyces pastorianus
aagggtgttcttcatagagacatca

SEQ ID NO: 17908 - DNA, 25 bp, Saccharomyces pastorianus
gacaacatcttattatccatggaag

SEQ ID NO: 17909 - DNA, 25 bp, Saccharomyces pastorianus
attaccgaaatagccgaagccaatt

SEQ ID NO: 17910 - DNA, 25 bp, Saccharomyces pastorianus
ccgctagtcaaattggcccgattaa

SEQ ID NO: 17911 - DNA, 25 bp, Saccharomyces pastorianus
gagcaagtgctacagatttacttca

SEQ ID NO: 17912 - DNA, 25 bp, Saccharomyces pastorianus
aggcgaacctccttatctaaacgag

SEQ ID NO: 17913 - DNA, 25 bp, Saccharomyces pastorianus
ggaaccagagaatttatcgtcatac

SEQ ID NO: 17914 - DNA, 25 bp, Saccharomyces pastorianus
ttaattgctacgaacggtacaccaa

SEQ ID NO: 17915 - DNA, 25 bp, Saccharomyces pastorianus
gggaacaccgtattggatggcacct

SEQ ID NO: 17916 - DNA, 25 bp, Saccharomyces pastorianus
tgttgttttcggtttgttcgtgtct

SEQ ID NO: 17917 - DNA, 25 bp, Saccharomyces pastorianus
tatgtgttaaattacgccacgcaac

SEQ ID NO: 17918 - DNA, 25 bp, Saccharomyces pastorianus
atggtctgtcatgacggaattccgt

SEQ ID NO: 17919 - DNA, 25 bp, Saccharomyces pastorianus
caccatggatgtttcggattttttc

SEQ ID NO: 17920 - DNA, 25 bp, Saccharomyces pastorianus
gttttccaccatattgtgacgctgt

SEQ ID NO: 17921 - DNA, 25 bp, Saccharomyces pastorianus
tggtgctaatcggagctttacaatt

SEQ ID NO: 17922 - DNA, 25 bp, Saccharomyces pastorianus
gacaagcagcgttttgggcacaaca

SEQ ID NO: 17923 - DNA, 25 bp, Saccharomyces pastorianus
ttcgttgccgatcatattggtgcta

SEQ ID NO: 17924 - DNA, 25 bp, Saccharomyces pastorianus
ttaaattccatgttcacccctgttg

SEQ ID NO: 17925 - DNA, 25 bp, Saccharomyces pastorianus
aagcctgtgtccttgttttacaatt

SEQ ID NO: 17926 - DNA, 25 bp, Saccharomyces pastorianus
gttcgtgtctttctggatttatcta

SEQ ID NO: 17927 - DNA, 25 bp, Saccharomyces pastorianus
tacaggatcctcatattggcgatat

SEQ ID NO: 17928 - DNA, 25 bp, Saccharomyces pastorianus
ccgacgttccgcagtatggttatga

SEQ ID NO: 17929 - DNA, 25 bp, Saccharomyces pastorianus
tgtaacgccaattgctgagccatcg

SEQ ID NO: 17930 - DNA, 25 bp, Saccharomyces pastorianus
ttctgtgaatagtaagcccgacgtt

SEQ ID NO: 17931 - DNA, 25 bp, Saccharomyces pastorianus
tctccttacgtcaagtactcgcaaa

SEQ ID NO: 17932 - DNA, 25 bp, Saccharomyces pastorianus
gaaagaggacatgctctccttacgt

SEQ ID NO: 17933 - DNA, 25 bp, Saccharomyces pastorianus
gatatgtacggttcaataacgcctt

SEQ ID NO: 17934 - DNA, 25 bp, Saccharomyces pastorianus
taatggaccgcgcagcaaacgttta

SEQ ID NO: 17935 - DNA, 25 bp, Saccharomyces pastorianus
ggaatgcccaacactaatgtcgctc

SEQ ID NO: 17936 - DNA, 25 bp, Saccharomyces pastorianus
aaaccctgattatgcatcgtactcc

SEQ ID NO: 17937 - DNA, 25 bp, Saccharomyces pastorianus
tgcatcgtactccttgaatcaacat

SEQ ID NO: 17938 - DNA, 25 bp, Saccharomyces pastorianus
tgcgccctattctgtattggaactc

SEQ ID NO: 17939 - DNA, 25 bp, Saccharomyces pastorianus
atttacacggaaccagcttcaacca

SEQ ID NO: 17940 - DNA, 25 bp, Saccharomyces pastorianus
ggaatgattccatacgcaggcgtat

SEQ ID NO: 17941 - DNA, 25 bp, Saccharomyces pastorianus
tgatctcgggtggattagcaggcat

SEQ ID NO: 17942 - DNA, 25 bp, Saccharomyces pastorianus
caaagtgacgcctatggttgcatgt

SEQ ID NO: 17943 - DNA, 25 bp, Saccharomyces pastorianus
gcaagtaagtgctttatcgccaaaa

SEQ ID NO: 17944 - DNA, 25 bp, Saccharomyces pastorianus
caaacagccgcatatccattagaaa

SEQ ID NO: 17945 - DNA, 25 bp, Saccharomyces pastorianus
tagcaggcatggcatctcaaacagc

SEQ ID NO: 17946 - DNA, 25 bp, Saccharomyces pastorianus
aaaatgagcatctacccaactggtt

SEQ ID NO: 17947 - DNA, 25 bp, Saccharomyces pastorianus
atgatttgctgcatgacgtgctgaa

SEQ ID NO: 17948 - DNA, 25 bp, Saccharomyces pastorianus
gaggttttgttccaacagtactcgg

SEQ ID NO: 17949 - DNA, 25 bp, Saccharomyces pastorianus
gacgatgtactgtcctctgtagatg

SEQ ID NO: 17950 - DNA, 25 bp, Saccharomyces pastorianus
gatgcttgatccacgcagggacgat

SEQ ID NO: 17951 - DNA, 25 bp, Saccharomyces pastorianus
gcggtaaagaccaatcatctgtgat

SEQ ID NO: 17952 - DNA, 25 bp, Saccharomyces pastorianus
gggtactctacaaagctagctctaa

SEQ ID NO: 17953 - DNA, 25 bp, Saccharomyces pastorianus
ggctaaaattccatgacggcatact

SEQ ID NO: 17954 - DNA, 25 bp, Saccharomyces pastorianus
ggattccggtggtttttagcaatga

SEQ ID NO: 17955 - DNA, 25 bp, Saccharomyces pastorianus
aagccctgaggcacttaccgaaatt

SEQ ID NO: 17956 - DNA, 25 bp, Saccharomyces pastorianus
aaatctcctatcagcgggtactcta

SEQ ID NO: 17957 - DNA, 25 bp, Saccharomyces pastorianus
gaggtgtctttgaccaaccttgttc

SEQ ID NO: 17958 - DNA, 25 bp, Saccharomyces pastorianus
gaaattaggaaccatgccaggcatt

SEQ ID NO: 17959 - DNA, 25 bp, Saccharomyces pastorianus
gagagcactgtgctatcaatgctag

SEQ ID NO: 17960 - DNA, 25 bp, Saccharomyces pastorianus
taagtgacccgacggatacggacct

SEQ ID NO: 17961 - DNA, 25 bp, Saccharomyces pastorianus
aaggcagtcctctgtcttctttgga

SEQ ID NO: 17962 - DNA, 25 bp, Saccharomyces pastorianus
gagaccctattgtgatttgttttta

SEQ ID NO: 17963 - DNA, 25 bp, Saccharomyces pastorianus
ggacctactaaacctattgccattt

SEQ ID NO: 17964 - DNA, 25 bp, Saccharomyces pastorianus
gagggacggtgttggctacatcaaa

SEQ ID NO: 17965 - DNA, 25 bp, Saccharomyces pastorianus
gatactcaaccgatgtcaggaatat

SEQ ID NO: 17966 - DNA, 25 bp, Saccharomyces pastorianus
attcttctcaggctcatttagtgga

SEQ ID NO: 17967 - DNA, 25 bp, Saccharomyces pastorianus
attccgcttctcgaggtacaacaca

SEQ ID NO: 17968 - DNA, 25 bp, Saccharomyces pastorianus
gttatagaccttgacgagaccttaa

SEQ ID NO: 17969 - DNA, 25 bp, Saccharomyces pastorianus
gacgagaccttaattcattccgctt

SEQ ID NO: 17970 - DNA, 25 bp, Saccharomyces pastorianus
agaaggctcctttgcagctagtttt

SEQ ID NO: 17971 - DNA, 25 bp, Saccharomyces pastorianus
gctaccgatacccaaaccatgaaat

SEQ ID NO: 17972 - DNA, 25 bp, Saccharomyces pastorianus
actgcagttctatttgtcttagcga

SEQ ID NO: 17973 - DNA, 25 bp, Saccharomyces pastorianus
aaacgaacatgtgctaccgataccc

SEQ ID NO: 17974 - DNA, 25 bp, Saccharomyces pastorianus
caaagttcttgatgctggtggacag

SEQ ID NO: 17975 - DNA, 25 bp, Saccharomyces pastorianus
aatacttccctgactatcaaggtcg

SEQ ID NO: 17976 - DNA, 25 bp, Saccharomyces pastorianus
atcaaggtcgtgttggcgatgcaga

SEQ ID NO: 17977 - DNA, 25 bp, Saccharomyces pastorianus
gaaggatcggcagcgtattatttcg

SEQ ID NO: 17978 - DNA, 25 bp, Saccharomyces pastorianus
gatacaccattcatcctatttttaa

SEQ ID NO: 17979 - DNA, 25 bp, Saccharomyces pastorianus
agcgccgtcactgatctgataattc

SEQ ID NO: 17980 - DNA, 25 bp, Saccharomyces pastorianus
cgaggacatcttaaagggccgtata

SEQ ID NO: 17981 - DNA, 25 bp, Saccharomyces pastorianus
tgaaattcgttttgagcgccgtcac

SEQ ID NO: 17982 - DNA, 25 bp, Saccharomyces pastorianus
ggcggcggtcaacctcagttatcat

SEQ ID NO: 17983 - DNA, 25 bp, Saccharomyces pastorianus
ttcaagctgcggaggctgaattgga

SEQ ID NO: 17984 - DNA, 25 bp, Saccharomyces pastorianus
tactccgagggtgaactaaacaaga

SEQ ID NO: 17985 - DNA, 25 bp, Saccharomyces pastorianus
acgtgcttagacaggtgtgtggcta

SEQ ID NO: 17986 - DNA, 25 bp, Saccharomyces pastorianus
acctcagttatcatcccagcaaaag

SEQ ID NO: 17987 - DNA, 25 bp, Saccharomyces pastorianus
tttcctaggattcggcggcggtcaa

SEQ ID NO: 17988 - DNA, 25 bp, Saccharomyces pastorianus
ggctgaattggatttagttactgat

SEQ ID NO: 17989 - DNA, 25 bp, Saccharomyces pastorianus
caatacttcctactccgagggtgaa

SEQ ID NO: 17990 - DNA, 25 bp, Saccharomyces pastorianus
gaacgaatctacgtgcttagacagg

SEQ ID NO: 17991 - DNA, 25 bp, Saccharomyces pastorianus
gtgtgtggctaaatactttgaaacc

SEQ ID NO: 17992 - DNA, 25 bp, Saccharomyces pastorianus
tgaaaccaacgttcaggtcggtgaa

SEQ ID NO: 17993 - DNA, 25 bp, Saccharomyces pastorianus
aaatcgctacgaacactcaatggtt

SEQ ID NO: 17994 - DNA, 25 bp, Saccharomyces pastorianus
atcagcattatctccactttcaggg

SEQ ID NO: 17995 - DNA, 25 bp, Saccharomyces pastorianus
atatacactacatatgggctcccca

SEQ ID NO: 17996 - DNA, 25 bp, Saccharomyces pastorianus
aactatacccattagactcggagca

SEQ ID NO: 17997 - DNA, 25 bp, Saccharomyces pastorianus
tggacgagcacacaattggccacct

SEQ ID NO: 17998 - DNA, 25 bp, Saccharomyces pastorianus
aaaaatgcgccaattatatctcccc

SEQ ID NO: 17999 - DNA, 25 bp, Saccharomyces pastorianus
gactcggagcaatcgtttttagaat

SEQ ID NO: 18000 - DNA, 25 bp, Saccharomyces pastorianus
taaatgccaagcagtcccacagaga

SEQ ID NO: 18001 - DNA, 25 bp, Saccharomyces pastorianus
gcacatctcttgtagcccaggaata

SEQ ID NO: 18002 - DNA, 25 bp, Saccharomyces pastorianus
ttatcctccgtttcatcagcattat

SEQ ID NO: 18003 - DNA, 25 bp, Saccharomyces pastorianus
agagacgacaccctgccgacaaaaa

SEQ ID NO: 18004 - DNA, 25 bp, Saccharomyces pastorianus
gagcattttgcttactgtcagttag

SEQ ID NO: 18005 - DNA, 25 bp, Saccharomyces pastorianus
atgaattcaacatccaccgttggaa

SEQ ID NO: 18006 - DNA, 25 bp, Saccharomyces pastorianus
ggtgccatttccaagggtgttactt

SEQ ID NO: 18007 - DNA, 25 bp, Saccharomyces pastorianus
aaggtaagagtgtcccatctcctga

SEQ ID NO: 18008 - DNA, 25 bp, Saccharomyces pastorianus
caaacagttcttatgtcattccaga

SEQ ID NO: 18009 - DNA, 25 bp, Saccharomyces pastorianus
catctcctgatttcacatctatggt

SEQ ID NO: 18010 - DNA, 25 bp, Saccharomyces pastorianus
gtcattccagaaggctaccacgttt

SEQ ID NO: 18011 - DNA, 25 bp, Saccharomyces pastorianus
aactttgagattgcaccatccattg

SEQ ID NO: 18012 - DNA, 25 bp, Saccharomyces pastorianus
aagagacgaatatttcccacacgcc

SEQ ID NO: 18013 - DNA, 25 bp, Saccharomyces pastorianus
ctcctcttcttactctgttggtgaa

SEQ ID NO: 18014 - DNA, 25 bp, Saccharomyces pastorianus
caagggtgttacttccccatacttg

SEQ ID NO: 18015 - DNA, 25 bp, Saccharomyces pastorianus
agaacatcaaattccacggcggcgg

SEQ ID NO: 18016 - DNA, 25 bp, Saccharomyces pastorianus
tggaaccttatatttcgggccaaat

SEQ ID NO: 18017 - DNA, 25 bp, Saccharomyces pastorianus
ttcatcgtcaagaacctgtccaatg

SEQ ID NO: 18018 - DNA, 25 bp, Saccharomyces pastorianus
ttccacgaactctcgaatcttctgg

SEQ ID NO: 18019 - DNA, 25 bp, Saccharomyces pastorianus
ggagccaagcccagcaaacgcaaga

SEQ ID NO: 18020 - DNA, 25 bp, Saccharomyces pastorianus
cttggttcctttggttgccatcgat

SEQ ID NO: 18021 - DNA, 25 bp, Saccharomyces pastorianus
acaaaccattgcctgttctgggaaa

SEQ ID NO: 18022 - DNA, 25 bp, Saccharomyces pastorianus
cctggctccagagtcacaaggtggt

SEQ ID NO: 18023 - DNA, 25 bp, Saccharomyces pastorianus
taaagtcactttgccagacctaaag

SEQ ID NO: 18024 - DNA, 25 bp, Saccharomyces pastorianus
gtcgactacttcaaaaccatctgga

SEQ ID NO: 18025 - DNA, 25 bp, Saccharomyces pastorianus
caaaactagccggtgtgcaaggttc

SEQ ID NO: 18026 - DNA, 25 bp, Saccharomyces pastorianus
aagacagtggctccgtatgccatac

SEQ ID NO: 18027 - DNA, 25 bp, Saccharomyces pastorianus
agttgtccccaacgctatcaaaggg

SEQ ID NO: 18028 - DNA, 25 bp, Saccharomyces pastorianus
ctaccggtgttgaatgttcctacaa

SEQ ID NO: 18029 - DNA, 25 bp, Saccharomyces pastorianus
aagcaggcatgttttctaccggtgt

SEQ ID NO: 18030 - DNA, 25 bp, Saccharomyces pastorianus
gggccctggacgtccaaaattctga

SEQ ID NO: 18031 - DNA, 25 bp, Saccharomyces pastorianus
aagatctctatatcgcaagcggtca

SEQ ID NO: 18032 - DNA, 25 bp, Saccharomyces pastorianus
gagctgtatcattacgtatccaagt

SEQ ID NO: 18033 - DNA, 25 bp, Saccharomyces pastorianus
aatgcgcccgcgacaggcaaattaa

SEQ ID NO: 18034 - DNA, 25 bp, Saccharomyces pastorianus
catacctgaaagctcggatgacgtt

SEQ ID NO: 18035 - DNA, 25 bp, Saccharomyces pastorianus
gagcgcattctatcactatcaaacc

SEQ ID NO: 18036 - DNA, 25 bp, Saccharomyces pastorianus
gttcctacaagttcaggtcccctga

SEQ ID NO: 18037 - DNA, 25 bp, Saccharomyces pastorianus
gaagggtctttatcgtgtccacgag

SEQ ID NO: 18038 - DNA, 25 bp, Saccharomyces pastorianus
gaacttctatgatcccagaactggc

SEQ ID NO: 18039 - DNA, 25 bp, Saccharomyces pastorianus
atttaggattagttgccactgcaga

SEQ ID NO: 18040 - DNA, 25 bp, Saccharomyces pastorianus
aagtggaactcttttgctggagcaa

SEQ ID NO: 18041 - DNA, 25 bp, Saccharomyces pastorianus
ggaaagcttgagtatgtgcacacac

SEQ ID NO: 18042 - DNA, 25 bp, Saccharomyces pastorianus
tgattgccctggtagagaacttcta

SEQ ID NO: 18043 - DNA, 25 bp, Saccharomyces pastorianus
cacactgaacggtactgcaatggca

SEQ ID NO: 18044 - DNA, 25 bp, Saccharomyces pastorianus
aattagtagcgcctccaattgtacc

SEQ ID NO: 18045 - DNA, 25 bp, Saccharomyces pastorianus
ggcgagatatttgttcccgaatgct

SEQ ID NO: 18046 - DNA, 25 bp, Saccharomyces pastorianus
aagttcttgatctaagctctgctga

SEQ ID NO: 18047 - DNA, 25 bp, Saccharomyces pastorianus
ttatgggctccaagatacgaattta

SEQ ID NO: 18048 - DNA, 25 bp, Saccharomyces pastorianus
acgactttagattgtgatggcgcag

SEQ ID NO: 18049 - DNA, 25 bp, Saccharomyces pastorianus
cactcaccgccgcttgaaagaaaat

SEQ ID NO: 18050 - DNA, 25 bp, Saccharomyces pastorianus
atagagacacattggcctttgaggt

SEQ ID NO: 18051 - DNA, 25 bp, Saccharomyces pastorianus
gatgaatgatgacccagaccagcaa

SEQ ID NO: 18052 - DNA, 25 bp, Saccharomyces pastorianus
attgaccctggatgggaccaatgat

SEQ ID NO: 18053 - DNA, 25 bp, Saccharomyces pastorianus
atgtatcatattctttcttggccag

SEQ ID NO: 18054 - DNA, 25 bp, Saccharomyces pastorianus
ggccagaaacttcctttgttgctac

SEQ ID NO: 18055 - DNA, 25 bp, Saccharomyces pastorianus
aaattggatccaacgtacctggctc

SEQ ID NO: 18056 - DNA, 25 bp, Saccharomyces pastorianus
aaatggtcacatcacgtctttaagt

SEQ ID NO: 18057 - DNA, 25 bp, Saccharomyces pastorianus
gtacctggctcctggcgaaaaattg

SEQ ID NO: 18058 - DNA, 25 bp, Saccharomyces pastorianus
gtgagacaatccaacagagctgctt

SEQ ID NO: 18059 - DNA, 25 bp, Saccharomyces pastorianus
agggaaccctgtatttctgacaccg

SEQ ID NO: 18060 - DNA, 25 bp, Saccharomyces pastorianus
aagagaaccatccatgtttccgctc

SEQ ID NO: 18061 - DNA, 25 bp, Saccharomyces pastorianus
gtttccgctcccgtattatattgct

SEQ ID NO: 18062 - DNA, 25 bp, Saccharomyces pastorianus
tctgacaccgtgctataatccaagt

SEQ ID NO: 18063 - DNA, 25 bp, Saccharomyces pastorianus
tgtcgccctcctttgataaatcatt

SEQ ID NO: 18064 - DNA, 25 bp, Saccharomyces pastorianus
gcccatgtataacttcaacccgtat

SEQ ID NO: 18065 - DNA, 25 bp, Saccharomyces pastorianus
ggttcaaaagctccagatgtccgat

SEQ ID NO: 18066 - DNA, 25 bp, Saccharomyces pastorianus
gtgaattatgcaatccccgttcaac

SEQ ID NO: 18067 - DNA, 25 bp, Saccharomyces pastorianus
ttccgctcagccttctcaaataaga

SEQ ID NO: 18068 - DNA, 25 bp, Saccharomyces pastorianus
aataccgtccaatatttcctatctc

SEQ ID NO: 18069 - DNA, 25 bp, Saccharomyces pastorianus
gtgtacgattcaccattgtttgaca

SEQ ID NO: 18070 - DNA, 25 bp, Saccharomyces pastorianus
atgtattccatttgaccaacctata

SEQ ID NO: 18071 - DNA, 25 bp, Saccharomyces pastorianus
gaaccaagttgtcgttgtccgtaga

SEQ ID NO: 18072 - DNA, 25 bp, Saccharomyces pastorianus
gaagggtacaccaatccgtattgaa

SEQ ID NO: 18073 - DNA, 25 bp, Saccharomyces pastorianus
aggaactatttgacactcacagagt

SEQ ID NO: 18074 - DNA, 25 bp, Saccharomyces pastorianus
gggtgctaagtctctatgtattcca

SEQ ID NO: 18075 - DNA, 25 bp, Saccharomyces pastorianus
gtaaacacattcacgaatccgccag

SEQ ID NO: 18076 - DNA, 25 bp, Saccharomyces pastorianus
tccgccagaagcgtggaagctcgtt

SEQ ID NO: 18077 - DNA, 25 bp, Saccharomyces pastorianus
actccaggctggaaattctctcaat

SEQ ID NO: 18078 - DNA, 25 bp, Saccharomyces pastorianus
ggagagattttgttccagctttgaa

SEQ ID NO: 18079 - DNA, 25 bp, Saccharomyces pastorianus
atgtcgtttcccttgatgacttgga

SEQ ID NO: 18080 - DNA, 25 bp, Saccharomyces pastorianus
attttggctccatggtgtggcatca

SEQ ID NO: 18081 - DNA, 25 bp, Saccharomyces pastorianus
ggtaaacctaccgttgttatgcaag

SEQ ID NO: 18082 - DNA, 25 bp, Saccharomyces pastorianus
tatctcactatcttgcatacctcag

SEQ ID NO: 18083 - DNA, 25 bp, Saccharomyces pastorianus
gaccagacgatatttcccgtgttgc

SEQ ID NO: 18084 - DNA, 25 bp, Saccharomyces pastorianus
attcccgtttgtatacacatgtcct

SEQ ID NO: 18085 - DNA, 25 bp, Saccharomyces pastorianus
gactcaggcattttcggtatctcac

SEQ ID NO: 18086 - DNA, 25 bp, Saccharomyces pastorianus
cagccccacaggcagttgaggtgat

SEQ ID NO: 18087 - DNA, 25 bp, Saccharomyces pastorianus
aagcgcctttggtgacgtagagcat

SEQ ID NO: 18088 - DNA, 25 bp, Saccharomyces pastorianus
cggttcattcagtgcgggtggtccc

SEQ ID NO: 18089 - DNA, 25 bp, Saccharomyces pastorianus
aaccactcttattctgactcaggca

SEQ ID NO: 18090 - DNA, 25 bp, Saccharomyces pastorianus
aattgcgtcgcattcaaccactctt

SEQ ID NO: 18091 - DNA, 25 bp, Saccharomyces pastorianus
aatgcatggccgtaaggttcctatt

SEQ ID NO: 18092 - DNA, 25 bp, Saccharomyces pastorianus
cgggttctgtggctcatttctaaga

SEQ ID NO: 18093 - DNA, 25 bp, Saccharomyces pastorianus
aagtgtattgctatcatcccacaat

SEQ ID NO: 18094 - DNA, 25 bp, Saccharomyces pastorianus
tactgctgccatgatgggcgggttc

SEQ ID NO: 18095 - DNA, 25 bp, Saccharomyces pastorianus
aaatcccattgtctgaggtgcttcc

SEQ ID NO: 18096 - DNA, 25 bp, Saccharomyces pastorianus
ggaacccagccatcaagtgtattgc

SEQ ID NO: 18097 - DNA, 25 bp, Saccharomyces pastorianus
tggccttggctactgagaacttcga

SEQ ID NO: 18098 - DNA, 25 bp, Saccharomyces pastorianus
gattccagaggcattcttccaaagg

SEQ ID NO: 18099 - DNA, 25 bp, Saccharomyces pastorianus
atttgagttgtctaccgctgattcc

SEQ ID NO: 18100 - DNA, 25 bp, Saccharomyces pastorianus
acggtgtcgagtgttcctggaagtt

SEQ ID NO: 18101 - DNA, 25 bp, Saccharomyces pastorianus
aaagactggccgtattgaccactgc

SEQ ID NO: 18102 - DNA, 25 bp, Saccharomyces pastorianus
aaggcctaccctacgcaagatttgg

SEQ ID NO: 18103 - DNA, 25 bp, Saccharomyces pastorianus
tggacttgtttaatgacgctcacgt

SEQ ID NO: 18104 - DNA, 25 bp, Saccharomyces pastorianus
accactgcagttgggttagtatcgc

SEQ ID NO: 18105 - DNA, 25 bp, Saccharomyces pastorianus
gcatcaatcttaaccactgcagttg

SEQ ID NO: 18106 - DNA, 25 bp, Saccharomyces pastorianus
ttactcacgtgaacaagatgctctg

SEQ ID NO: 18107 - DNA, 25 bp, Saccharomyces pastorianus
caagatgctctgtttatcacaagat

SEQ ID NO: 18108 - DNA, 25 bp, Saccharomyces pastorianus
tgaaggttttcgacactttaacacg

SEQ ID NO: 18109 - DNA, 25 bp, Saccharomyces pastorianus
agattagcccaacttttgagacagt

SEQ ID NO: 18110 - DNA, 25 bp, Saccharomyces pastorianus
ggtcaacgtacgtgtcggacaagca

SEQ ID NO: 18111 - DNA, 25 bp, Saccharomyces pastorianus
taacacgtttctcgcatgatgctga

SEQ ID NO: 18112 - DNA, 25 bp, Saccharomyces pastorianus
ggattacacaatctacacctgtctt

SEQ ID NO: 18113 - DNA, 25 bp, Saccharomyces pastorianus
gaattctatttttgccatgggttta

SEQ ID NO: 18114 - DNA, 25 bp, Saccharomyces pastorianus
gaaagatacatgcacactcctcaag

SEQ ID NO: 18115 - DNA, 25 bp, Saccharomyces pastorianus
gatttagatcgcttgtccgtgataa

SEQ ID NO: 18116 - DNA, 25 bp, Saccharomyces pastorianus
gtattccctgattctgaccacagta

SEQ ID NO: 18117 - DNA, 25 bp, Saccharomyces pastorianus
acgggatgtctgttgctccggtaac

SEQ ID NO: 18118 - DNA, 25 bp, Saccharomyces pastorianus
tatggttccctgagtttcgtggact

SEQ ID NO: 18119 - DNA, 25 bp, Saccharomyces pastorianus
gattgttttcgacaagctgcttgct

SEQ ID NO: 18120 - DNA, 25 bp, Saccharomyces pastorianus
aacaggttcctactaatgcatggta

SEQ ID NO: 18121 - DNA, 25 bp, Saccharomyces pastorianus
tcgatggtcgtggtactggtttcaa

SEQ ID NO: 18122 - DNA, 25 bp, Saccharomyces pastorianus
aatgtcacagcgttggcccaagtaa

SEQ ID NO: 18123 - DNA, 25 bp, Saccharomyces pastorianus
gactggagattctacgactctgtct

SEQ ID NO: 18124 - DNA, 25 bp, Saccharomyces pastorianus
taagcttggcgattacgaggcccgt

SEQ ID NO: 18125 - DNA, 25 bp, Saccharomyces pastorianus
ggaccaaactgggttgttgctttag

SEQ ID NO: 18126 - DNA, 25 bp, Saccharomyces pastorianus
agcactgttgcgcactggaccaaac

SEQ ID NO: 18127 - DNA, 25 bp, Saccharomyces pastorianus
aatccgaacttcactatgctcacag

SEQ ID NO: 18128 - DNA, 25 bp, Saccharomyces pastorianus
atgagagcattttctccgttggaca

SEQ ID NO: 18129 - DNA, 25 bp, Saccharomyces pastorianus
tccttgagtttacccagaataccac

SEQ ID NO: 18130 - DNA, 25 bp, Saccharomyces pastorianus
aattcattgtggctccagcactgtt

SEQ ID NO: 18131 - DNA, 25 bp, Saccharomyces pastorianus
gtagcacttcataccatgtagcggg

SEQ ID NO: 18132 - DNA, 25 bp, Saccharomyces pastorianus
atcctgtttgcggaagcggttctgt

SEQ ID NO: 18133 - DNA, 25 bp, Saccharomyces pastorianus
gagcgggagctatcccattaacagt

SEQ ID NO: 18134 - DNA, 25 bp, Saccharomyces pastorianus
gtagaggacgcagaaacttgtttca

SEQ ID NO: 18135 - DNA, 25 bp, Saccharomyces pastorianus
gcaacttcgctcgttcaagaatgca

SEQ ID NO: 18136 - DNA, 25 bp, Saccharomyces pastorianus
atatcgatgaagaccctgtttgcgg

SEQ ID NO: 18137 - DNA, 25 bp, Saccharomyces pastorianus
gatgcagaaacctgtttcaatgcca

SEQ ID NO: 18138 - DNA, 25 bp, Saccharomyces pastorianus
aaattcattgcgactccagcactgc

SEQ ID NO: 18139 - DNA, 25 bp, Saccharomyces pastorianus
gggcccaaaaaagaatgctccgatt

SEQ ID NO: 18140 - DNA, 25 bp, Saccharomyces pastorianus
aagaataacactgcaacttcgcttg

SEQ ID NO: 18141 - DNA, 25 bp, Saccharomyces pastorianus
tacagggattattttggcgggccca

SEQ ID NO: 18142 - DNA, 25 bp, Saccharomyces pastorianus
atgctccgattaggaactcatacga

SEQ ID NO: 18143 - DNA, 25 bp, Saccharomyces pastorianus
agcactgctgcacactggaccggag

SEQ ID NO: 18144 - DNA, 25 bp, Saccharomyces pastorianus
gaacttcactgtactcacacagcaa

SEQ ID NO: 18145 - DNA, 25 bp, Saccharomyces pastorianus
aaatgagggcatttcctacagcgga

SEQ ID NO: 18146 - DNA, 25 bp, Saccharomyces pastorianus
gtaacacttcataccatgtggcagg

SEQ ID NO: 18147 - DNA, 25 bp, Saccharomyces pastorianus
aatggctgtaccctcaaactctgtt

SEQ ID NO: 18148 - DNA, 25 bp, Saccharomyces pastorianus
aagacaaccattactagcagagcaa

SEQ ID NO: 18149 - DNA, 25 bp, Saccharomyces pastorianus
tgttaatttatacccaaacgccaat

SEQ ID NO: 18150 - DNA, 25 bp, Saccharomyces pastorianus
gttttgaatccgtcaacgacatgga

SEQ ID NO: 18151 - DNA, 25 bp, Saccharomyces pastorianus
aaacgccaatgcacaagccttggat

SEQ ID NO: 18152 - DNA, 25 bp, Saccharomyces pastorianus
tatgatggatatgaggtctgcccct

SEQ ID NO: 18153 - DNA, 25 bp, Saccharomyces pastorianus
gaatgaccgttgatgaggcgctaga

SEQ ID NO: 18154 - DNA, 25 bp, Saccharomyces pastorianus
tttgccagggcacgatacagatttc

SEQ ID NO: 18155 - DNA, 25 bp, Saccharomyces pastorianus
gaacacccttacttgtctatatggc

SEQ ID NO: 18156 - DNA, 25 bp, Saccharomyces pastorianus
gttccaccacaacaagagtcatttg

SEQ ID NO: 18157 - DNA, 25 bp, Saccharomyces pastorianus
cctggaatcccgtctcaagatgata

SEQ ID NO: 18158 - DNA, 25 bp, Saccharomyces pastorianus
tgatatgcgacttgtgagccgggtc

SEQ ID NO: 18159 - DNA, 25 bp, Saccharomyces pastorianus
gaagccggtcaagtttacgttgcgt

SEQ ID NO: 18160 - DNA, 25 bp, Saccharomyces pastorianus
agaactcagattcccctaatgctgt

SEQ ID NO: 18161 - DNA, 25 bp, Saccharomyces pastorianus
tgagcttatggtcccagagcgtttc

SEQ ID NO: 18162 - DNA, 25 bp, Saccharomyces pastorianus
ggtcgtcggcaatcctattttgaaa

SEQ ID NO: 18163 - DNA, 25 bp, Saccharomyces pastorianus
gggcattatccattcacaaggcgca

SEQ ID NO: 18164 - DNA, 25 bp, Saccharomyces pastorianus
aaaccggcctgatgtggatttagtc

SEQ ID NO: 18165 - DNA, 25 bp, Saccharomyces pastorianus
atgcagtcaagatttcccctcataa

SEQ ID NO: 18166 - DNA, 25 bp, Saccharomyces pastorianus
aaatttccttatgttcgctggacaa

SEQ ID NO: 18167 - DNA, 25 bp, Saccharomyces pastorianus
gttgtcgagagcagtcaccatggat

SEQ ID NO: 18168 - DNA, 25 bp, Saccharomyces pastorianus
gagcgtttccccattgatataccaa

SEQ ID NO: 18169 - DNA, 25 bp, Saccharomyces pastorianus
acaagctgcggattctcgtcgagaa

SEQ ID NO: 18170 - DNA, 25 bp, Saccharomyces pastorianus
gagattgacgagaccgctatcgccc

SEQ ID NO: 18171 - DNA, 25 bp, Saccharomyces pastorianus
atagcgttccccaagatgaggcaga

SEQ ID NO: 18172 - DNA, 25 bp, Saccharomyces pastorianus
acgagttgagcataccgttgccgca

SEQ ID NO: 18173 - DNA, 25 bp, Saccharomyces pastorianus
aagaggccagcaacccgatgagcgt

SEQ ID NO: 18174 - DNA, 25 bp, Saccharomyces pastorianus
agtcatgcgagatccgtgagtccgt

SEQ ID NO: 18175 - DNA, 25 bp, Saccharomyces pastorianus
ggcagacatcaagatcttccacgtt

SEQ ID NO: 18176 - DNA, 25 bp, Saccharomyces pastorianus
gttcccagtggcgaaggcaccggta

SEQ ID NO: 18177 - DNA, 25 bp, Saccharomyces pastorianus
gagatccctgcgctggagatactga

SEQ ID NO: 18178 - DNA, 25 bp, Saccharomyces pastorianus
gtcgtgctttgcagggaccacatag

SEQ ID NO: 18179 - DNA, 25 bp, Saccharomyces pastorianus
gcagcctgacaagcccgagtacgag

SEQ ID NO: 18180 - DNA, 25 bp, Saccharomyces pastorianus
atcaaaagatatcccgtgtcacctc

SEQ ID NO: 18181 - DNA, 25 bp, Saccharomyces pastorianus
gacatcgagagcatcatacgccttg

SEQ ID NO: 18182 - DNA, 25 bp, Saccharomyces pastorianus
gtttaccggctttggaccaacagtg

SEQ ID NO: 18183 - DNA, 25 bp, Saccharomyces pastorianus
caaattttttactcggattcgtgcg

SEQ ID NO: 18184 - DNA, 25 bp, Saccharomyces pastorianus
taagagctactacggcgatggcatc

SEQ ID NO: 18185 - DNA, 25 bp, Saccharomyces pastorianus
gagcgcacagctgtttggagacatc

SEQ ID NO: 18186 - DNA, 25 bp, Saccharomyces pastorianus
tttcaaattgcccaagccgtggtca

SEQ ID NO: 18187 - DNA, 25 bp, Saccharomyces pastorianus
aacatcatcgtctgaggcatcttcc

SEQ ID NO: 18188 - DNA, 25 bp, Saccharomyces pastorianus
tttgcggcatcataacttggtgttt

SEQ ID NO: 18189 - DNA, 25 bp, Saccharomyces pastorianus
agatgacttttatgaccggaacgaa

SEQ ID NO: 18190 - DNA, 25 bp, Saccharomyces pastorianus
ggagacatcatcaattcgtttatag

SEQ ID NO: 18191 - DNA, 25 bp, Saccharomyces pastorianus
cagaatcgcgattaaaagtagccaa

SEQ ID NO: 18192 - DNA, 25 bp, Saccharomyces pastorianus
gatattgcaaccacttctcttaaag

SEQ ID NO: 18193 - DNA, 25 bp, Saccharomyces pastorianus
gccaacttgaacttgactcctgaaa

SEQ ID NO: 18194 - DNA, 25 bp, Saccharomyces pastorianus
gttcttgccgccaacttgaacttga

SEQ ID NO: 18195 - DNA, 25 bp, Saccharomyces pastorianus
ataaccgttttcgatcctaaagatg

SEQ ID NO: 18196 - DNA, 25 bp, Saccharomyces pastorianus
ttctgacaaaggctgaagctcaatt

SEQ ID NO: 18197 - DNA, 25 bp, Saccharomyces pastorianus
ggaccatcagaggtagtatcctcaa

SEQ ID NO: 18198 - DNA, 25 bp, Saccharomyces pastorianus
gttgacgtaaatgaacttctgacaa

SEQ ID NO: 18199 - DNA, 25 bp, Saccharomyces pastorianus
gatgactccgttaggaaagccgaac

SEQ ID NO: 18200 - DNA, 25 bp, Saccharomyces pastorianus
ttcgaagattataaacagtcctcat

SEQ ID NO: 18201 - DNA, 25 bp, Saccharomyces pastorianus
aagaatgcactcctaataaccgttt

SEQ ID NO: 18202 - DNA, 25 bp, Saccharomyces pastorianus
aaaggtgctcgtttacttcatggtg

SEQ ID NO: 18203 - DNA, 25 bp, Saccharomyces pastorianus
tttccaaccaactctcctagtagat

SEQ ID NO: 18204 - DNA, 25 bp, Saccharomyces pastorianus
agagtttcattgtgggtgcttatac

SEQ ID NO: 18205 - DNA, 25 bp, Saccharomyces pastorianus
gaaagctagagataccgaccactgt

SEQ ID NO: 18206 - DNA, 25 bp, Saccharomyces pastorianus
tctaggtggctctgtatttggttca

SEQ ID NO: 18207 - DNA, 25 bp, Saccharomyces pastorianus
ttcgctactttctatgtttgtcaac

SEQ ID NO: 18208 - DNA, 25 bp, Saccharomyces pastorianus
ttcatggtggctcccgttttaaaca

SEQ ID NO: 18209 - DNA, 25 bp, Saccharomyces pastorianus
gaccactgtatccaattggccaact

SEQ ID NO: 18210 - DNA, 25 bp, Saccharomyces pastorianus
aagtgtttggtcctattttggtcat

SEQ ID NO: 18211 - DNA, 25 bp, Saccharomyces pastorianus
gggcctattgggtctatgtaatgcc

SEQ ID NO: 18212 - DNA, 25 bp, Saccharomyces pastorianus
gtattaatggttccggctatggtaa

SEQ ID NO: 18213 - DNA, 25 bp, Saccharomyces pastorianus
tcccgtgataccgatgactttctat

SEQ ID NO: 18214 - DNA, 25 bp, Saccharomyces pastorianus
gcccacgtaacctcttcgataatta

SEQ ID NO: 18215 - DNA, 25 bp, Saccharomyces pastorianus
aacttgcctgttcattacgatctaa

SEQ ID NO: 18216 - DNA, 25 bp, Saccharomyces pastorianus
ataatggtgccttcatctacgtttg

SEQ ID NO: 18217 - DNA, 25 bp, Saccharomyces pastorianus
aacaacgtctccttgggtaagcatc

SEQ ID NO: 18218 - DNA, 25 bp, Saccharomyces pastorianus
agcatctattattctacgggtcccg

SEQ ID NO: 18219 - DNA, 25 bp, Saccharomyces pastorianus
aaatggtggtggctcactccagatt

SEQ ID NO: 18220 - DNA, 25 bp, Saccharomyces pastorianus
gagaacgtgtcgcattcatggaatc

SEQ ID NO: 18221 - DNA, 25 bp, Saccharomyces pastorianus
ggtgtgttaaatgctctgatcggaa

SEQ ID NO: 18222 - DNA, 25 bp, Saccharomyces pastorianus
aacatcgatgacactaacttgcctg

SEQ ID NO: 18223 - DNA, 25 bp, Saccharomyces pastorianus
tcatgttcgtcgttccactttcaga

SEQ ID NO: 18224 - DNA, 25 bp, Saccharomyces pastorianus
acagtttggatctcgtgtggttctc

SEQ ID NO: 18225 - DNA, 25 bp, Saccharomyces pastorianus
gtattcgtggctttagtatcggtaa

SEQ ID NO: 18226 - DNA, 25 bp, Saccharomyces pastorianus
atggacccttaagcacaacgttaga

SEQ ID NO: 18227 - DNA, 25 bp, Saccharomyces pastorianus
gcagaacgcaatgaacttggccgaa

SEQ ID NO: 18228 - DNA, 25 bp, Saccharomyces pastorianus
agtttttgacagctcggtggataat

SEQ ID NO: 18229 - DNA, 25 bp, Saccharomyces pastorianus
accagtcgagtcaaatcgtttgcag

SEQ ID NO: 18230 - DNA, 25 bp, Saccharomyces pastorianus
gcccatagcacatacgaatttttac

SEQ ID NO: 18231 - DNA, 25 bp, Saccharomyces pastorianus
gattgaaccgaatgctcttgagaaa

SEQ ID NO: 18232 - DNA, 25 bp, Saccharomyces pastorianus
taaattttacttatcctgggcgatt

SEQ ID NO: 18233 - DNA, 25 bp, Saccharomyces pastorianus
agtgatttcaacatttcctgcaaag

SEQ ID NO: 18234 - DNA, 25 bp, Saccharomyces pastorianus
ggttggatgcctttagtcggtatat

SEQ ID NO: 18235 - DNA, 25 bp, Saccharomyces pastorianus
agttgtacttcgctaggcctaacga

SEQ ID NO: 18236 - DNA, 25 bp, Saccharomyces pastorianus
gataacaggacatacttggccgtaa

SEQ ID NO: 18237 - DNA, 25 bp, Saccharomyces pastorianus
atttaggatcctctgcgatgaccat

SEQ ID NO: 18238 - DNA, 25 bp, Saccharomyces pastorianus
ggtggcattacaaccaggctcagca

SEQ ID NO: 18239 - DNA, 25 bp, Saccharomyces pastorianus
tttcgtgcgattatggttttgtcca

SEQ ID NO: 18240 - DNA, 25 bp, Saccharomyces pastorianus
gtttgcgctggatggtgtattctaa

SEQ ID NO: 18241 - DNA, 25 bp, Saccharomyces pastorianus
taaagagcccgtggtaggcgttatt

SEQ ID NO: 18242 - DNA, 25 bp, Saccharomyces pastorianus
gatgaccatggcatatatcgctatg

SEQ ID NO: 18243 - DNA, 25 bp, Saccharomyces pastorianus
gggaaaggctttgaccaccaagcta

SEQ ID NO: 18244 - DNA, 25 bp, Saccharomyces pastorianus
tttataatccacacattgacctcct

SEQ ID NO: 18245 - DNA, 25 bp, Saccharomyces pastorianus
gacctcctcatatcagcttctaaag

SEQ ID NO: 18246 - DNA, 25 bp, Saccharomyces pastorianus
agagattgcagccaggttcacctgt

SEQ ID NO: 18247 - DNA, 25 bp, Saccharomyces pastorianus
gcccaagctttcgacaccattagag

SEQ ID NO: 18248 - DNA, 25 bp, Saccharomyces pastorianus
aaaaagccattcttgcgttgatcaa

SEQ ID NO: 18249 - DNA, 25 bp, Saccharomyces pastorianus
tcacctccgttgaagatcttgaaaa

SEQ ID NO: 18250 - DNA, 25 bp, Saccharomyces pastorianus
tgatcaagccagctgttttcaacac

SEQ ID NO: 18251 - DNA, 25 bp, Saccharomyces pastorianus
attgttgcgttgagagccttgggta

SEQ ID NO: 18252 - DNA, 25 bp, Saccharomyces pastorianus
agaaccttgggttacttgttggatg

SEQ ID NO: 18253 - DNA, 25 bp, Saccharomyces pastorianus
gctgcgtgcgcatctggtgacaaaa

SEQ ID NO: 18254 - DNA, 25 bp, Saccharomyces pastorianus
gaaccaggacttctacataccaatg

SEQ ID NO: 18255 - DNA, 25 bp, Saccharomyces pastorianus
taccaaaaccctatttcttcagatg

SEQ ID NO: 18256 - DNA, 25 bp, Saccharomyces pastorianus
ggcttcgaccaaacgttggcccaag

SEQ ID NO: 18257 - DNA, 25 bp, Saccharomyces pastorianus
gtattgtcggtttctcccagggtgc

SEQ ID NO: 18258 - DNA, 25 bp, Saccharomyces pastorianus
ggcaagccactttggatgcagacgt

SEQ ID NO: 18259 - DNA, 25 bp, Saccharomyces pastorianus
gacatctcccacgaattggacgtct

SEQ ID NO: 18260 - DNA, 25 bp, Saccharomyces pastorianus
agtgtggtcatttcaggctactcct

SEQ ID NO: 18261 - DNA, 25 bp, Saccharomyces pastorianus
ggctaacggtccatacgacggtatt

SEQ ID NO: 18262 - DNA, 25 bp, Saccharomyces pastorianus
tcagtgtgactatatcgatgcgcct

SEQ ID NO: 18263 - DNA, 25 bp, Saccharomyces pastorianus
gatgattttcatctacggtgcctcc

SEQ ID NO: 18264 - DNA, 25 bp, Saccharomyces pastorianus
gatgcgcctgttctcttggaaaaga

SEQ ID NO: 18265 - DNA, 25 bp, Saccharomyces pastorianus
gagactcattcgctgtaaagccaga

SEQ ID NO: 18266 - DNA, 25 bp, Saccharomyces pastorianus
agagcttggttctaccacagcgaca

SEQ ID NO: 18267 - DNA, 25 bp, Saccharomyces pastorianus
ggaattggttccagaccacccagaa

SEQ ID NO: 18268 - DNA, 25 bp, Saccharomyces pastorianus
attctcgtccttgtagcagggcgca

SEQ ID NO: 18269 - DNA, 25 bp, Saccharomyces pastorianus
ggaacaatcgtgaccgtgcttgcag

SEQ ID NO: 18270 - DNA, 25 bp, Saccharomyces pastorianus
tgtggctgatcatttcgggcttaaa

SEQ ID NO: 18271 - DNA, 25 bp, Saccharomyces pastorianus
tccggtgctcttaatgcgtcacaag

SEQ ID NO: 18272 - DNA, 25 bp, Saccharomyces pastorianus
agacctctcaagaacttcggacaag

SEQ ID NO: 18273 - DNA, 25 bp, Saccharomyces pastorianus
atgggtagcagctcacaggaccgtg

SEQ ID NO: 18274 - DNA, 25 bp, Saccharomyces pastorianus
taaactggactgtgtcaccggcatt

SEQ ID NO: 18275 - DNA, 25 bp, Saccharomyces pastorianus
tcacaagtggtgctttctctactgt

SEQ ID NO: 18276 - DNA, 25 bp, Saccharomyces pastorianus
aatatcatgcgcgtacagctcaacc

SEQ ID NO: 18277 - DNA, 25 bp, Saccharomyces pastorianus
gctatgcagctctctttcaaaaggt

SEQ ID NO: 18278 - DNA, 25 bp, Saccharomyces pastorianus
gttttccatttacaacctgctatgc

SEQ ID NO: 18279 - DNA, 25 bp, Saccharomyces pastorianus
gcacgacgatgaaaccttcgaggaa

SEQ ID NO: 18280 - DNA, 25 bp, Saccharomyces pastorianus
gaagtattctgacgcgcacgacgat

SEQ ID NO: 18281 - DNA, 25 bp, Saccharomyces pastorianus
tttctcttacgatttggtccctgct

SEQ ID NO: 18282 - DNA, 25 bp, Saccharomyces pastorianus
tgttgagtgccagacctgccgctta

SEQ ID NO: 18283 - DNA, 25 bp, Saccharomyces pastorianus
gaagcttacgacttgttcgaagtgc

SEQ ID NO: 18284 - DNA, 25 bp, Saccharomyces pastorianus
acctaccgccatcagagtatttgaa

SEQ ID NO: 18285 - DNA, 25 bp, Saccharomyces pastorianus
ctccggcagtcatcgaaaaggcttt

SEQ ID NO: 18286 - DNA, 25 bp, Saccharomyces pastorianus
tgccgcttacactgcgaccagattg

SEQ ID NO: 18287 - DNA, 25 bp, Saccharomyces pastorianus
tcagaaaagagctgggcgttccctt

SEQ ID NO: 18288 - DNA, 25 bp, Saccharomyces pastorianus
gtgttgaacaactgtttctcttacg

SEQ ID NO: 18289 - DNA, 25 bp, Saccharomyces pastorianus
gcgaccagattgaccagaagttcat

SEQ ID NO: 18290 - DNA, 25 bp, Saccharomyces pastorianus
gtaatccccaactttatgatccagg

SEQ ID NO: 18291 - DNA, 25 bp, Saccharomyces pastorianus
acgaggcatcgtggcttgacggcaa

SEQ ID NO: 18292 - DNA, 25 bp, Saccharomyces pastorianus
gcaaacatgtggtcttcggccaagt

SEQ ID NO: 18293 - DNA, 25 bp, Saccharomyces pastorianus
tacggagacacgtttcccgacgaga

SEQ ID NO: 18294 - DNA, 25 bp, Saccharomyces pastorianus
aagaacttttacgagctgagcacca

SEQ ID NO: 18295 - DNA, 25 bp, Saccharomyces pastorianus
ttagcgccaacgtaatcgcgtctaa

SEQ ID NO: 18296 - DNA, 25 bp, Saccharomyces pastorianus
tttggtttatggtactggctgctgc

SEQ ID NO: 18297 - DNA, 25 bp, Saccharomyces pastorianus
atgatccagggaggcgacttcacac

SEQ ID NO: 18298 - DNA, 25 bp, Saccharomyces pastorianus
tcgagtccactttccacagagtaat

SEQ ID NO: 18299 - DNA, 25 bp, Saccharomyces pastorianus
gaaaatctgtcccaagaccgtcaag

SEQ ID NO: 18300 - DNA, 25 bp, Saccharomyces pastorianus
attacatccagcacgttgccaggga

SEQ ID NO: 18301 - DNA, 25 bp, Saccharomyces pastorianus
cagactgtggacaatggtgccggcc

SEQ ID NO: 18302 - DNA, 25 bp, Saccharomyces pastorianus
ggtaccgagtacgtgctaagcagtg

SEQ ID NO: 18303 - DNA, 25 bp, Saccharomyces pastorianus
aacatgaccgtcaacaccgtgggca

SEQ ID NO: 18304 - DNA, 25 bp, Saccharomyces pastorianus
ggtgccaacgtatatcaatcgccga

SEQ ID NO: 18305 - DNA, 25 bp, Saccharomyces pastorianus
gcaaatatggccactgttccctcga

SEQ ID NO: 18306 - DNA, 25 bp, Saccharomyces pastorianus
ggctgatgtctactagttaccacct

SEQ ID NO: 18307 - DNA, 25 bp, Saccharomyces pastorianus
tcgccgacggttttcaagattgtac

SEQ ID NO: 18308 - DNA, 25 bp, Saccharomyces pastorianus
gagaaccggacttctgggtcatcaa

SEQ ID NO: 18309 - DNA, 25 bp, Saccharomyces pastorianus
gcctaggatcattccgctacaggat

SEQ ID NO: 18310 - DNA, 25 bp, Saccharomyces pastorianus
ataagaacagtgtacggcccaccgg

SEQ ID NO: 18311 - DNA, 25 bp, Saccharomyces pastorianus
gaagagcctgtacgacctcatcgaa

SEQ ID NO: 18312 - DNA, 25 bp, Saccharomyces pastorianus
acatttctagccaaaatcggccgta

SEQ ID NO: 18313 - DNA, 25 bp, Saccharomyces pastorianus
aatcggccgtaattgtaacgaactg

SEQ ID NO: 18314 - DNA, 25 bp, Saccharomyces pastorianus
taccgtaacaatgaacccatccgtg

SEQ ID NO: 18315 - DNA, 25 bp, Saccharomyces pastorianus
aacgaactgaaggacacatttgaga

SEQ ID NO: 18316 - DNA, 25 bp, Saccharomyces pastorianus
gtcactgactacttctaaagctgcg

SEQ ID NO: 18317 - DNA, 25 bp, Saccharomyces pastorianus
aacagatacctgatgtcgatacatt

SEQ ID NO: 18318 - DNA, 25 bp, Saccharomyces pastorianus
tgctcttgaagaggtcactgactac

SEQ ID NO: 18319 - DNA, 25 bp, Saccharomyces pastorianus
atctttttctatgggattccaagac

SEQ ID NO: 18320 - DNA, 25 bp, Saccharomyces pastorianus
tcggtttcattcaaccatccctaaa

SEQ ID NO: 18321 - DNA, 25 bp, Saccharomyces pastorianus
tacgaatgaacaacggcctcccaat

SEQ ID NO: 18322 - DNA, 25 bp, Saccharomyces pastorianus
ctaaagctgcgtatcggtttcattc

SEQ ID NO: 18323 - DNA, 25 bp, Saccharomyces pastorianus
atgaatcttcgtccagcgaggatga

SEQ ID NO: 18324 - DNA, 25 bp, Saccharomyces pastorianus
gtccagcgaggatgagcattacagt

SEQ ID NO: 18325 - DNA, 25 bp, Saccharomyces pastorianus
gtgatgatgaatcttcgtccagcga

SEQ ID NO: 18326 - DNA, 25 bp, Saccharomyces pastorianus
gccgatgctgtgagtgatgatgaat

SEQ ID NO: 18327 - DNA, 25 bp, Saccharomyces pastorianus
gatgatgaatcttcgtccagcgagg

SEQ ID NO: 18328 - DNA, 25 bp, Saccharomyces pastorianus
gtgagtgatgatgaatcttcgtcca

SEQ ID NO: 18329 - DNA, 25 bp, Saccharomyces pastorianus
gaatcttcgtccagcgaggatgagc

SEQ ID NO: 18330 - DNA, 25 bp, Saccharomyces pastorianus
ttcgtccagcgaggatgagcattac

SEQ ID NO: 18331 - DNA, 25 bp, Saccharomyces pastorianus
tgatgaatcttcgtccagcgaggat

SEQ ID NO: 18332 - DNA, 25 bp, Saccharomyces pastorianus
gcgaggatgagcattacagtgatgt

SEQ ID NO: 18333 - DNA, 25 bp, Saccharomyces pastorianus
tcttcgtccagcgaggatgagcatt

SEQ ID NO: 18334 - DNA, 25 bp, Saccharomyces pastorianus
gcaatctcaaaactcgaaacctcaa

SEQ ID NO: 18335 - DNA, 25 bp, Saccharomyces pastorianus
agacatgctgcaaagatgagactca

SEQ ID NO: 18336 - DNA, 25 bp, Saccharomyces pastorianus
cttggaccacgatttgggtgcctat

SEQ ID NO: 18337 - DNA, 25 bp, Saccharomyces pastorianus
aagtgttgcatcacgaatacgttca

SEQ ID NO: 18338 - DNA, 25 bp, Saccharomyces pastorianus
cgacggtgaaaacaaggccgatgct

SEQ ID NO: 18339 - DNA, 25 bp, Saccharomyces pastorianus
gacatttcctcattaatcttggacc

SEQ ID NO: 18340 - DNA, 25 bp, Saccharomyces pastorianus
agacgtcaaagcaaagcaatctcaa

SEQ ID NO: 18341 - DNA, 25 bp, Saccharomyces pastorianus
gaattgggaccaagactaaccttga

SEQ ID NO: 18342 - DNA, 25 bp, Saccharomyces pastorianus
gaatctgttcaggaaaagtgttgca

SEQ ID NO: 18343 - DNA, 25 bp, Saccharomyces pastorianus
aagaaggctgtcaaagatgctaaga

SEQ ID NO: 18344 - DNA, 25 bp, Saccharomyces pastorianus
gtggttgataaccaagacgtcaaag

SEQ ID NO: 18345 - DNA, 25 bp, Saccharomyces pastorianus
gaaagcctattacacaactgcggta

SEQ ID NO: 18346 - DNA, 25 bp, Saccharomyces pastorianus
acaaggaatactgtcgccgagttga

SEQ ID NO: 18347 - DNA, 25 bp, Saccharomyces pastorianus
tgaaagggcccttctacaaagtcac

SEQ ID NO: 18348 - DNA, 25 bp, Saccharomyces pastorianus
gtcaatctttgaattcttcggccca

SEQ ID NO: 18349 - DNA, 25 bp, Saccharomyces pastorianus
gatatcatcatgcaaggtccctttt

SEQ ID NO: 18350 - DNA, 25 bp, Saccharomyces pastorianus
agacgttccaagtcagagacctcca

SEQ ID NO: 18351 - DNA, 25 bp, Saccharomyces pastorianus
ttactgaaatgcatccagccgcttt

SEQ ID NO: 18352 - DNA, 25 bp, Saccharomyces pastorianus
gcgtatgggcaattgtctctaaatc

SEQ ID NO: 18353 - DNA, 25 bp, Saccharomyces pastorianus
aggtcccttttcaatccagctatta

SEQ ID NO: 18354 - DNA, 25 bp, Saccharomyces pastorianus
gggtcaaggcgagcttatccagtat

SEQ ID NO: 18355 - DNA, 25 bp, Saccharomyces pastorianus
tattcgcccatcaacttagaccaag

SEQ ID NO: 18356 - DNA, 25 bp, Saccharomyces pastorianus
aacaagatcccaatcttttgcccat

SEQ ID NO: 18357 - DNA, 25 bp, Saccharomyces pastorianus
gatatgttgtttttccacactttca

SEQ ID NO: 18358 - DNA, 25 bp, Saccharomyces pastorianus
atctttgaccgatggttccattggt

SEQ ID NO: 18359 - DNA, 25 bp, Saccharomyces pastorianus
gaatggattgttccagtcttggaca

SEQ ID NO: 18360 - DNA, 25 bp, Saccharomyces pastorianus
cggtcctttactgggctcacaagaa

SEQ ID NO: 18361 - DNA, 25 bp, Saccharomyces pastorianus
aagacgtagactcgcccatttggac

SEQ ID NO: 18362 - DNA, 25 bp, Saccharomyces pastorianus
ttttcccattgattgtcgctgctac

SEQ ID NO: 18363 - DNA, 25 bp, Saccharomyces pastorianus
atccgtaaggttaactccatgtcca

SEQ ID NO: 18364 - DNA, 25 bp, Saccharomyces pastorianus
ggcgctagacctgatgaggctgttt

SEQ ID NO: 18365 - DNA, 25 bp, Saccharomyces pastorianus
gatggttctgatgcaggcgctagac

SEQ ID NO: 18366 - DNA, 25 bp, Saccharomyces pastorianus
gcgttgactgtttggatgccaacca

SEQ ID NO: 18367 - DNA, 25 bp, Saccharomyces pastorianus
aaaacctctcagatggacctggcaa

SEQ ID NO: 18368 - DNA, 25 bp, Saccharomyces pastorianus
ggaggtgcagtctctgttccaggac

SEQ ID NO: 18369 - DNA, 25 bp, Saccharomyces pastorianus
gttttgtcaagttccaagctcttta

SEQ ID NO: 18370 - DNA, 25 bp, Saccharomyces pastorianus
aatttgcccggtaacatcaccgtgg

SEQ ID NO: 18371 - DNA, 25 bp, Saccharomyces pastorianus
catcaaggcgttggcattctgcgaa

SEQ ID NO: 18372 - DNA, 25 bp, Saccharomyces pastorianus
gagcagtatcgttaaacccttccat

SEQ ID NO: 18373 - DNA, 25 bp, Saccharomyces pastorianus
gttccaggacggtagtgcttcttta

SEQ ID NO: 18374 - DNA, 25 bp, Saccharomyces pastorianus
ttgccggtatgcgaatgtcatcaag

SEQ ID NO: 18375 - DNA, 25 bp, Saccharomyces pastorianus
gaatgacccttccatatcaaacagc

SEQ ID NO: 18376 - DNA, 25 bp, Saccharomyces pastorianus
tcggtattactcaacagcgtgtggt

SEQ ID NO: 18377 - DNA, 25 bp, Saccharomyces pastorianus
tcgaataaatcatcgggccccactg

SEQ ID NO: 18378 - DNA, 25 bp, Saccharomyces pastorianus
agacggtcaagtccttcaacatgga

SEQ ID NO: 18379 - DNA, 25 bp, Saccharomyces pastorianus
aacaaggttgcccagacggtcaagt

SEQ ID NO: 18380 - DNA, 25 bp, Saccharomyces pastorianus
gacggcacgattaagatccctgttc

SEQ ID NO: 18381 - DNA, 25 bp, Saccharomyces pastorianus
gagagctacaagtccctgcaagaga

SEQ ID NO: 18382 - DNA, 25 bp, Saccharomyces pastorianus
cgcttcaaagaagtgccgatcccag

SEQ ID NO: 18383 - DNA, 25 bp, Saccharomyces pastorianus
acgagttgcacgagcgcgttcatgc

SEQ ID NO: 18384 - DNA, 25 bp, Saccharomyces pastorianus
aagaggtcaccgagcacgagttgca

SEQ ID NO: 18385 - DNA, 25 bp, Saccharomyces pastorianus
tgcacgtgcactgcttcgagaagta

SEQ ID NO: 18386 - DNA, 25 bp, Saccharomyces pastorianus
atcccagctcgaatcagtcactatg

SEQ ID NO: 18387 - DNA, 25 bp, Saccharomyces pastorianus
agtcactatgtcatgaacctgcccg

SEQ ID NO: 18388 - DNA, 25 bp, Saccharomyces pastorianus
ttggccaatgacctgaacccggaga

SEQ ID NO: 18389 - DNA, 25 bp, Saccharomyces pastorianus
agaagagcactgagaccggcgaaat

SEQ ID NO: 18390 - DNA, 25 bp, Saccharomyces pastorianus
cggcaaaagaatctacacattgaag

SEQ ID NO: 18391 - DNA, 25 bp, Saccharomyces pastorianus
accggcgaaattacaaagtctgctc

SEQ ID NO: 18392 - DNA, 25 bp, Saccharomyces pastorianus
tccagccagattttctccagatgac

SEQ ID NO: 18393 - DNA, 25 bp, Saccharomyces pastorianus
tcatccagccagattttctccagat

SEQ ID NO: 18394 - DNA, 25 bp, Saccharomyces pastorianus
cacattgaagaagagcactgagacc

SEQ ID NO: 18395 - DNA, 25 bp, Saccharomyces pastorianus
gaaattacaaagtctgctcatccag

SEQ ID NO: 18396 - DNA, 25 bp, Saccharomyces pastorianus
agagcactgagaccggcgaaattac

SEQ ID NO: 18397 - DNA, 25 bp, Saccharomyces pastorianus
atccagccagattttctccagatga

SEQ ID NO: 18398 - DNA, 25 bp, Saccharomyces pastorianus
aaagtctgctcatccagccagattt

SEQ ID NO: 18399 - DNA, 25 bp, Saccharomyces pastorianus
ttacaaagtctgctcatccagccag

SEQ ID NO: 18400 - DNA, 25 bp, Saccharomyces pastorianus
agaagagcactgagaccggcgaaat

SEQ ID NO: 18401 - DNA, 25 bp, Saccharomyces pastorianus
cggcaaaagaatctacacattgaag

SEQ ID NO: 18402 - DNA, 25 bp, Saccharomyces pastorianus
accggcgaaattacaaagtctgctc

SEQ ID NO: 18403 - DNA, 25 bp, Saccharomyces pastorianus
tccagccagattttctccagatgac

SEQ ID NO: 18404 - DNA, 25 bp, Saccharomyces pastorianus
tcatccagccagattttctccagat

SEQ ID NO: 18405 - DNA, 25 bp, Saccharomyces pastorianus
tgatgtacactttaggcccagacgg

SEQ ID NO: 18406 - DNA, 25 bp, Saccharomyces pastorianus
cacattgaagaagagcactgagacc

SEQ ID NO: 18407 - DNA, 25 bp, Saccharomyces pastorianus
gaaattacaaagtctgctcatccag

SEQ ID NO: 18408 - DNA, 25 bp, Saccharomyces pastorianus
agagcactgagaccggcgaaattac

SEQ ID NO: 18409 - DNA, 25 bp, Saccharomyces pastorianus
aaagtctgctcatccagccagattt

SEQ ID NO: 18410 - DNA, 25 bp, Saccharomyces pastorianus
ttacaaagtctgctcatccagccag

SEQ ID NO: 18411 - DNA, 25 bp, Saccharomyces pastorianus
aagttagagcaactccagcgtgaga

SEQ ID NO: 18412 - DNA, 25 bp, Saccharomyces pastorianus
gatgttgagcctagatatttcgaga

SEQ ID NO: 18413 - DNA, 25 bp, Saccharomyces pastorianus
actgagaccagatattagggcatac

SEQ ID NO: 18414 - DNA, 25 bp, Saccharomyces pastorianus
tggacgcagccaactacaattctaa

SEQ ID NO: 18415 - DNA, 25 bp, Saccharomyces pastorianus
gaggtatatggagccggttaacgaa

SEQ ID NO: 18416 - DNA, 25 bp, Saccharomyces pastorianus
tgccacctactgattcgagactgag

SEQ ID NO: 18417 - DNA, 25 bp, Saccharomyces pastorianus
tttccgtaatcccaccagtttcaag

SEQ ID NO: 18418 - DNA, 25 bp, Saccharomyces pastorianus
aactctggccggtaaatggacacaa

SEQ ID NO: 18419 - DNA, 25 bp, Saccharomyces pastorianus
ggtaatttgccacctactgattcga

SEQ ID NO: 18420 - DNA, 25 bp, Saccharomyces pastorianus
gcttgatcaatgaaaccactcatga

SEQ ID NO: 18421 - DNA, 25 bp, Saccharomyces pastorianus
tcccaccagtttcaagtcaccgtaa

SEQ ID NO: 18422 - DNA, 25 bp, Saccharomyces pastorianus
aacagatttgatttgcgtcccttct

SEQ ID NO: 18423 - DNA, 25 bp, Saccharomyces pastorianus
aaatatgattgttcttcggctgata

SEQ ID NO: 18424 - DNA, 25 bp, Saccharomyces pastorianus
ggacgactttttaaatgctacgcca

SEQ ID NO: 18425 - DNA, 25 bp, Saccharomyces pastorianus
gctggtgctaggtagtgccaatgtt

SEQ ID NO: 18426 - DNA, 25 bp, Saccharomyces pastorianus
gtgggttcgtggcattccaaattcc

SEQ ID NO: 18427 - DNA, 25 bp, Saccharomyces pastorianus
atgacatgccaatcttggacgactt

SEQ ID NO: 18428 - DNA, 25 bp, Saccharomyces pastorianus
tggtcaccaaaattatcgcctcgtc

SEQ ID NO: 18429 - DNA, 25 bp, Saccharomyces pastorianus
aaattccggcggtttgctggtgcta

SEQ ID NO: 18430 - DNA, 25 bp, Saccharomyces pastorianus
tcggctgatattaaccccatcggag

SEQ ID NO: 18431 - DNA, 25 bp, Saccharomyces pastorianus
aagtttcattgcatacgcttctaaa

SEQ ID NO: 18432 - DNA, 25 bp, Saccharomyces pastorianus
atgctacgccaaccgcagaactaga

SEQ ID NO: 18433 - DNA, 25 bp, Saccharomyces pastorianus
aaggccgactgctatgagagttcta

SEQ ID NO: 18434 - DNA, 25 bp, Saccharomyces pastorianus
ctgatggatttgttgagagctctta

SEQ ID NO: 18435 - DNA, 25 bp, Saccharomyces pastorianus
cgaagctacagatttgatttctcaa

SEQ ID NO: 18436 - DNA, 25 bp, Saccharomyces pastorianus
aggtaagcatccttttggtgataaa

SEQ ID NO: 18437 - DNA, 25 bp, Saccharomyces pastorianus
agtgtcttcgcgatagatctctggc

SEQ ID NO: 18438 - DNA, 25 bp, Saccharomyces pastorianus
gatatttcaggctttgttattccta

SEQ ID NO: 18439 - DNA, 25 bp, Saccharomyces pastorianus
catcatttcatggatctgcccgaag

SEQ ID NO: 18440 - DNA, 25 bp, Saccharomyces pastorianus
caaggaccccgcaagtgacttgtta

SEQ ID NO: 18441 - DNA, 25 bp, Saccharomyces pastorianus
ttcctaatgggaactggaccgtcaa

SEQ ID NO: 18442 - DNA, 25 bp, Saccharomyces pastorianus
agatctctggctgccgaagctacag

SEQ ID NO: 18443 - DNA, 25 bp, Saccharomyces pastorianus
aaaaccttcatggacaatctcggga

SEQ ID NO: 18444 - DNA, 25 bp, Saccharomyces pastorianus
ctgggcccacagtttactcttaaat

SEQ ID NO: 18445 - DNA, 25 bp, Saccharomyces pastorianus
gagggcccaactttctacttcaaat

SEQ ID NO: 18446 - DNA, 25 bp, Saccharomyces pastorianus
ggcaggttgttccagtctattttac

SEQ ID NO: 18447 - DNA, 25 bp, Saccharomyces pastorianus
gaccaactagtcatattccagagct

SEQ ID NO: 18448 - DNA, 25 bp, Saccharomyces pastorianus
aaggcatcgttacgtcttcaaagac

SEQ ID NO: 18449 - DNA, 25 bp, Saccharomyces pastorianus
gaatttgctaacatcctgattgagg

SEQ ID NO: 18450 - DNA, 25 bp, Saccharomyces pastorianus
gtctattttacctcaggaccctgat

SEQ ID NO: 18451 - DNA, 25 bp, Saccharomyces pastorianus
aagagaaatttcaccgacattgtta

SEQ ID NO: 18452 - DNA, 25 bp, Saccharomyces pastorianus
ggtaacgggtttgacattcatacat

SEQ ID NO: 18453 - DNA, 25 bp, Saccharomyces pastorianus
aacgaaccaccaaagatcttcctga

SEQ ID NO: 18454 - DNA, 25 bp, Saccharomyces pastorianus
gaggtgttgccaaatgtcacttttg

SEQ ID NO: 18455 - DNA, 25 bp, Saccharomyces pastorianus
gctgcgtctagctcaggatctatac

SEQ ID NO: 18456 - DNA, 25 bp, Saccharomyces pastorianus
aaatggttgcttgcgatggtcctaa

SEQ ID NO: 18457 - DNA, 25 bp, Saccharomyces pastorianus
aagacggtgtgctagctcctgtaga

SEQ ID NO: 18458 - DNA, 25 bp, Saccharomyces pastorianus
tggcaagggtcaaaacggctcattt

SEQ ID NO: 18459 - DNA, 25 bp, Saccharomyces pastorianus
aaaccaatcgtgcatctaagctcca

SEQ ID NO: 18460 - DNA, 25 bp, Saccharomyces pastorianus
tacgtggtactgtcctgactgcaaa

SEQ ID NO: 18461 - DNA, 25 bp, Saccharomyces pastorianus
aaaccttatactgcttttgccaaag

SEQ ID NO: 18462 - DNA, 25 bp, Saccharomyces pastorianus
gaataccgcgctctttttaattgct

SEQ ID NO: 18463 - DNA, 25 bp, Saccharomyces pastorianus
aaaaatctgtcaccccaatgagtcc

SEQ ID NO: 18464 - DNA, 25 bp, Saccharomyces pastorianus
atctataccgcccactttgaaaaag

SEQ ID NO: 18465 - DNA, 25 bp, Saccharomyces pastorianus
aaagtgctgctgaagcctccagaga

SEQ ID NO: 18466 - DNA, 25 bp, Saccharomyces pastorianus
atcacgtcaacttcggtatggttca

SEQ ID NO: 18467 - DNA, 25 bp, Saccharomyces pastorianus
ataccacgacttgccatatattcag

SEQ ID NO: 18468 - DNA, 25 bp, Saccharomyces pastorianus
ggtatatctgccataatcattcaag

SEQ ID NO: 18469 - DNA, 25 bp, Saccharomyces pastorianus
gaagatccacatcaggttgccgatt

SEQ ID NO: 18470 - DNA, 25 bp, Saccharomyces pastorianus
ttttgaaggtgacacaggcccctac

SEQ ID NO: 18471 - DNA, 25 bp, Saccharomyces pastorianus
gtcaccaggtctcttcatgttataa

SEQ ID NO: 18472 - DNA, 25 bp, Saccharomyces pastorianus
ggagctccagtaatattacagccga

SEQ ID NO: 18473 - DNA, 25 bp, Saccharomyces pastorianus
gagcccgctacaattataacgtatt

SEQ ID NO: 18474 - DNA, 25 bp, Saccharomyces pastorianus
tatccggacgtcctcaaacgagcgt

SEQ ID NO: 18475 - DNA, 25 bp, Saccharomyces pastorianus
gacgatgttgctataccacgacttg

SEQ ID NO: 18476 - DNA, 25 bp, Saccharomyces pastorianus
gattaagcttgtcagactcctggct

SEQ ID NO: 18477 - DNA, 25 bp, Saccharomyces pastorianus
ttaagacccaacgtcgaccaatact

SEQ ID NO: 18478 - DNA, 25 bp, Saccharomyces pastorianus
ttgtttagtgggtcgttgcctgaaa

SEQ ID NO: 18479 - DNA, 25 bp, Saccharomyces pastorianus
aagacgacttcatcaaagtgtcccc

SEQ ID NO: 18480 - DNA, 25 bp, Saccharomyces pastorianus
ggaggaatcgttgcctatcaaccaa

SEQ ID NO: 18481 - DNA, 25 bp, Saccharomyces pastorianus
ctttatccgcaaatcataccattcc

SEQ ID NO: 18482 - DNA, 25 bp, Saccharomyces pastorianus
gagaagttcacattccaatttcgtt

SEQ ID NO: 18483 - DNA, 25 bp, Saccharomyces pastorianus
gagccagctgctctgtgaagataag

SEQ ID NO: 18484 - DNA, 25 bp, Saccharomyces pastorianus
acaagtcgactctaccagtggtttt

SEQ ID NO: 18485 - DNA, 25 bp, Saccharomyces pastorianus
gatctaaccttttatgatgccaacg

SEQ ID NO: 18486 - DNA, 25 bp, Saccharomyces pastorianus
aagaccgtcaataggatcgaatcgt

SEQ ID NO: 18487 - DNA, 25 bp, Saccharomyces pastorianus
ggtgacatcatttacctgtggttca

SEQ ID NO: 18488 - DNA, 25 bp, Saccharomyces pastorianus
atacggcgggttccagttctgatga

SEQ ID NO: 18489 - DNA, 25 bp, Saccharomyces pastorianus
atatggccggattactctcaacact

SEQ ID NO: 18490 - DNA, 25 bp, Saccharomyces pastorianus
gaactcccaataccaattcacgatt

SEQ ID NO: 18491 - DNA, 25 bp, Saccharomyces pastorianus
ggtgtacccgtattaagacattcta

SEQ ID NO: 18492 - DNA, 25 bp, Saccharomyces pastorianus
gataggcttttcacggacattctga

SEQ ID NO: 18493 - DNA, 25 bp, Saccharomyces pastorianus
tagtcgtccccactttcaatgaact

SEQ ID NO: 18494 - DNA, 25 bp, Saccharomyces pastorianus
cgctgtgtaagcctagtctagtcgt

SEQ ID NO: 18495 - DNA, 25 bp, Saccharomyces pastorianus
tggcacactaaatacgcttcggctg

SEQ ID NO: 18496 - DNA, 25 bp, Saccharomyces pastorianus
tggaagacaagaccggtgtacccgt

SEQ ID NO: 18497 - DNA, 25 bp, Saccharomyces pastorianus
tgctttacaacccatcgctgtgtaa

SEQ ID NO: 18498 - DNA, 25 bp, Saccharomyces pastorianus
tggacaaagacaactgcatctcctt

SEQ ID NO: 18499 - DNA, 25 bp, Saccharomyces pastorianus
ttaacacgggtgttgctggaaccaa

SEQ ID NO: 18500 - DNA, 25 bp, Saccharomyces pastorianus
cagagtattcaaccgggaacccaat

SEQ ID NO: 18501 - DNA, 25 bp, Saccharomyces pastorianus
gaattctactactgctgttgcgaac

SEQ ID NO: 18502 - DNA, 25 bp, Saccharomyces pastorianus
ggcaatccctgtggcaccaataaca

SEQ ID NO: 18503 - DNA, 25 bp, Saccharomyces pastorianus
cggcgctaacaacaacatttctctt

SEQ ID NO: 18504 - DNA, 25 bp, Saccharomyces pastorianus
gatgtatcctccaccacagagttta

SEQ ID NO: 18505 - DNA, 25 bp, Saccharomyces pastorianus
acatttctcttgctattaacacggg

SEQ ID NO: 18506 - DNA, 25 bp, Saccharomyces pastorianus
aatatccttaactcaactgttcccg

SEQ ID NO: 18507 - DNA, 25 bp, Saccharomyces pastorianus
gattcaacacaagtagcgcgtccaa

SEQ ID NO: 18508 - DNA, 25 bp, Saccharomyces pastorianus
acaactgctccaatttctcaacaga

SEQ ID NO: 18509 - DNA, 25 bp, Saccharomyces pastorianus
gagggactcccttgtatcgaacatg

SEQ ID NO: 18510 - DNA, 25 bp, Saccharomyces pastorianus
gtggatcatttcagggcttaggact

SEQ ID NO: 18511 - DNA, 25 bp, Saccharomyces pastorianus
gtatcaacttcaacacgtggtggaa

SEQ ID NO: 18512 - DNA, 25 bp, Saccharomyces pastorianus
tggccgccggatacttactgcaaaa

SEQ ID NO: 18513 - DNA, 25 bp, Saccharomyces pastorianus
tgacgaactcttattccatcacttc

SEQ ID NO: 18514 - DNA, 25 bp, Saccharomyces pastorianus
catcacttcctcgtgagtggatcat

SEQ ID NO: 18515 - DNA, 25 bp, Saccharomyces pastorianus
aagatcttggtttcatttgcattga

SEQ ID NO: 18516 - DNA, 25 bp, Saccharomyces pastorianus
catccccgtattcatcgacgatgaa

SEQ ID NO: 18517 - DNA, 25 bp, Saccharomyces pastorianus
gtggtggaacatcttggaacgcatt

SEQ ID NO: 18518 - DNA, 25 bp, Saccharomyces pastorianus
tgaccaaaggttttgcatccccgta

SEQ ID NO: 18519 - DNA, 25 bp, Saccharomyces pastorianus
aaagcctttgtcacgtaggtgacca

SEQ ID NO: 18520 - DNA, 25 bp, Saccharomyces pastorianus
atccatctcgtcacagggtatagtt

SEQ ID NO: 18521 - DNA, 25 bp, Saccharomyces pastorianus
ataaccgaggctcatgtccctatta

SEQ ID NO: 18522 - DNA, 25 bp, Saccharomyces pastorianus
gaacacttggtggacttctgtaaga

SEQ ID NO: 18523 - DNA, 25 bp, Saccharomyces pastorianus
aagcctgtggctttgcaaatcgagc

SEQ ID NO: 18524 - DNA, 25 bp, Saccharomyces pastorianus
gaaactcactctaaccgagcaggaa

SEQ ID NO: 18525 - DNA, 25 bp, Saccharomyces pastorianus
aaatcgagcatcatccctacttgac

SEQ ID NO: 18526 - DNA, 25 bp, Saccharomyces pastorianus
gaaatggaccttggcttggcaaaga

SEQ ID NO: 18527 - DNA, 25 bp, Saccharomyces pastorianus
ggtatcgccgttattccaaagtcct

SEQ ID NO: 18528 - DNA, 25 bp, Saccharomyces pastorianus
aagagcacaccaacgctgtttgaaa

SEQ ID NO: 18529 - DNA, 25 bp, Saccharomyces pastorianus
ctttggccctcaatcgttcattgaa

SEQ ID NO: 18530 - DNA, 25 bp, Saccharomyces pastorianus
caagtgctcctgagatgggctactc

SEQ ID NO: 18531 - DNA, 25 bp, Saccharomyces pastorianus
ttcgaagagaagtacccaccagggt

SEQ ID NO: 18532 - DNA, 25 bp, Saccharomyces pastorianus
caatctggtaatttcatggctgcaa

SEQ ID NO: 18533 - DNA, 25 bp, Saccharomyces pastorianus
ttacaaacttaacctcgtcgccaat

SEQ ID NO: 18534 - DNA, 25 bp, Saccharomyces pastorianus
acatcaagtacggttgcctctctac

SEQ ID NO: 18535 - DNA, 25 bp, Saccharomyces pastorianus
tttgggactttcaagccctcaacca

SEQ ID NO: 18536 - DNA, 25 bp, Saccharomyces pastorianus
ctcgtcgccaatctcaaatttagtc

SEQ ID NO: 18537 - DNA, 25 bp, Saccharomyces pastorianus
taacgacttggatcttttgggactt

SEQ ID NO: 18538 - DNA, 25 bp, Saccharomyces pastorianus
ggtgatctgactgacttatccattt

SEQ ID NO: 18539 - DNA, 25 bp, Saccharomyces pastorianus
aaacagcttttggtcttggaggtga

SEQ ID NO: 18540 - DNA, 25 bp, Saccharomyces pastorianus
aatgctccaattaacccttcgaaat

SEQ ID NO: 18541 - DNA, 25 bp, Saccharomyces pastorianus
cagttaccactaccacaaattcgaa

SEQ ID NO: 18542 - DNA, 25 bp, Saccharomyces pastorianus
atattctgttaattccactccagcc

SEQ ID NO: 18543 - DNA, 25 bp, Saccharomyces pastorianus
atttatctgatctttgcgcttgtcc

SEQ ID NO: 18544 - DNA, 25 bp, Saccharomyces pastorianus
agccagcttggccataaccgtggat

SEQ ID NO: 18545 - DNA, 25 bp, Saccharomyces pastorianus
gggagagtgttccagttgacccaaa

SEQ ID NO: 18546 - DNA, 25 bp, Saccharomyces pastorianus
taatgacgtggtccgtacttcagtt

SEQ ID NO: 18547 - DNA, 25 bp, Saccharomyces pastorianus
gacccaaaggctatcttcgattcgc

SEQ ID NO: 18548 - DNA, 25 bp, Saccharomyces pastorianus
cttcagttcttcatgctagtggcag

SEQ ID NO: 18549 - DNA, 25 bp, Saccharomyces pastorianus
gaaggtgttcatttttacgccagac

SEQ ID NO: 18550 - DNA, 25 bp, Saccharomyces pastorianus
ggaacataggatgtgcttcaccccg

SEQ ID NO: 18551 - DNA, 25 bp, Saccharomyces pastorianus
ttcaccccgtcgtacaacaagaagt

SEQ ID NO: 18552 - DNA, 25 bp, Saccharomyces pastorianus
aatcggcaacgtcgaagcgcttgat

SEQ ID NO: 18553 - DNA, 25 bp, Saccharomyces pastorianus
ttcgataacgatcaccgtgtcctga

SEQ ID NO: 18554 - DNA, 25 bp, Saccharomyces pastorianus
ggcccatgcattggattggtcggca

SEQ ID NO: 18555 - DNA, 25 bp, Saccharomyces pastorianus
tgaggcaatcaatcttccagtcaaa

SEQ ID NO: 18556 - DNA, 25 bp, Saccharomyces pastorianus
gagactctaaaactcatcctaggtg

SEQ ID NO: 18557 - DNA, 25 bp, Saccharomyces pastorianus
acaaatttgggctctcgaacgtaag

SEQ ID NO: 18558 - DNA, 25 bp, Saccharomyces pastorianus
ggcttcccacaacaaagtctgcgta

SEQ ID NO: 18559 - DNA, 25 bp, Saccharomyces pastorianus
gatgctatattcaggcttcccacaa

SEQ ID NO: 18560 - DNA, 25 bp, Saccharomyces pastorianus
acgatgatggccgtcgagactctaa

SEQ ID NO: 18561 - DNA, 25 bp, Saccharomyces pastorianus
atgaacttttttgtggctcgcggaa

SEQ ID NO: 18562 - DNA, 25 bp, Saccharomyces pastorianus
aactataacgtttgtcagcctgatg

SEQ ID NO: 18563 - DNA, 25 bp, Saccharomyces pastorianus
ctgccgttatgggaatgactctcaa

SEQ ID NO: 18564 - DNA, 25 bp, Saccharomyces pastorianus
cgatatagtggttctctgccgttat

SEQ ID NO: 18565 - DNA, 25 bp, Saccharomyces pastorianus
gacagacccatacatcgatcagact

SEQ ID NO: 18566 - DNA, 25 bp, Saccharomyces pastorianus
atatcgtcttgtattccgctaccaa

SEQ ID NO: 18567 - DNA, 25 bp, Saccharomyces pastorianus
gaaagtttcatgttattgcggtcac

SEQ ID NO: 18568 - DNA, 25 bp, Saccharomyces pastorianus
agtggtgtcctcgtagtcaaagatg

SEQ ID NO: 18569 - DNA, 25 bp, Saccharomyces pastorianus
tgcggtcactcagaacttacgaact

SEQ ID NO: 18570 - DNA, 25 bp, Saccharomyces pastorianus
taggatgcgagtccgccgatgattt

SEQ ID NO: 18571 - DNA, 25 bp, Saccharomyces pastorianus
tcggcggtcactctgacttattgag

SEQ ID NO: 18572 - DNA, 25 bp, Saccharomyces pastorianus
agtactagattccacgtttgcgtct

SEQ ID NO: 18573 - DNA, 25 bp, Saccharomyces pastorianus
gcgtctccaccattgcaatatgcat

SEQ ID NO: 18574 - DNA, 25 bp, Saccharomyces pastorianus
taaaatactttcaccatgcgacctc

SEQ ID NO: 18575 - DNA, 25 bp, Saccharomyces pastorianus
aagatgaagctgtttctcggcgcct

SEQ ID NO: 18576 - DNA, 25 bp, Saccharomyces pastorianus
tagagaaaccgctggttctgccgat

SEQ ID NO: 18577 - DNA, 25 bp, Saccharomyces pastorianus
gcagtggtcccgtcatcaagataaa

SEQ ID NO: 18578 - DNA, 25 bp, Saccharomyces pastorianus
aaatcgttcttcctatcttctgacg

SEQ ID NO: 18579 - DNA, 25 bp, Saccharomyces pastorianus
ggtcctatcttagcgtccaagacag

SEQ ID NO: 18580 - DNA, 25 bp, Saccharomyces pastorianus
gttgcaaacgactctccatgtggtt

SEQ ID NO: 18581 - DNA, 25 bp, Saccharomyces pastorianus
agattccaacttcttgcctaacatc

SEQ ID NO: 18582 - DNA, 25 bp, Saccharomyces pastorianus
atgtggttccacaatcggtcctatc

SEQ ID NO: 18583 - DNA, 25 bp, Saccharomyces pastorianus
atggtttgacgttggcagccgacac

SEQ ID NO: 18584 - DNA, 25 bp, Saccharomyces pastorianus
aggagataggttcgtcttctgctca

SEQ ID NO: 18585 - DNA, 25 bp, Saccharomyces pastorianus
taaagttcctctgcagctgtttgtc

SEQ ID NO: 18586 - DNA, 25 bp, Saccharomyces pastorianus
accattgcctaactcatcgattttg

SEQ ID NO: 18587 - DNA, 25 bp, Saccharomyces pastorianus
gatggcgacatcatacagcttggca

SEQ ID NO: 18588 - DNA, 25 bp, Saccharomyces pastorianus
taatatcacggacccatggctgttt

SEQ ID NO: 18589 - DNA, 25 bp, Saccharomyces pastorianus
acaagtcctggaagctgaaggccaa

SEQ ID NO: 18590 - DNA, 25 bp, Saccharomyces pastorianus
ggacgtcaagtcctccagtggaacg

SEQ ID NO: 18591 - DNA, 25 bp, Saccharomyces pastorianus
tggaacgtttctgaaccaccaacgc

SEQ ID NO: 18592 - DNA, 25 bp, Saccharomyces pastorianus
aagccactctagaatccgaatctga

SEQ ID NO: 18593 - DNA, 25 bp, Saccharomyces pastorianus
gatgatcagggcaactggttcttaa

SEQ ID NO: 18594 - DNA, 25 bp, Saccharomyces pastorianus
ccccaactgtagatcgaactgtgac

SEQ ID NO: 18595 - DNA, 25 bp, Saccharomyces pastorianus
tcgcggcggcacagaagagatatac

SEQ ID NO: 18596 - DNA, 25 bp, Saccharomyces pastorianus
gaactgtgacttagaagccactcta

SEQ ID NO: 18597 - DNA, 25 bp, Saccharomyces pastorianus
gatcagtatcatccagtggtcttca

SEQ ID NO: 18598 - DNA, 25 bp, Saccharomyces pastorianus
tggtaaggccactatcctagccaga

SEQ ID NO: 18599 - DNA, 25 bp, Saccharomyces pastorianus
gaagtacccactttttacgctgaga

SEQ ID NO: 18600 - DNA, 25 bp, Saccharomyces pastorianus
ggccaagattggtctagcccaacta

SEQ ID NO: 18601 - DNA, 25 bp, Saccharomyces pastorianus
tacccctacatccaattggcttgtt

SEQ ID NO: 18602 - DNA, 25 bp, Saccharomyces pastorianus
tcaggagtcggcaactttggcaaga

SEQ ID NO: 18603 - DNA, 25 bp, Saccharomyces pastorianus
aaggcgacttcaatactgcgatcaa

SEQ ID NO: 18604 - DNA, 25 bp, Saccharomyces pastorianus
aactacatttgctgaagccgcgaag

SEQ ID NO: 18605 - DNA, 25 bp, Saccharomyces pastorianus
tgaaattccccattttacctgaagt

SEQ ID NO: 18606 - DNA, 25 bp, Saccharomyces pastorianus
aagttttccgaagctgagtctcttt

SEQ ID NO: 18607 - DNA, 25 bp, Saccharomyces pastorianus
atatggccatcgatctattgactaa

SEQ ID NO: 18608 - DNA, 25 bp, Saccharomyces pastorianus
tacacgtaggtattgggcccttgat

SEQ ID NO: 18609 - DNA, 25 bp, Saccharomyces pastorianus
aaggctgcaattggtactgaatctg

SEQ ID NO: 18610 - DNA, 25 bp, Saccharomyces pastorianus
tcagttccccaagaagtctcatctt

SEQ ID NO: 18611 - DNA, 25 bp, Saccharomyces pastorianus
gggctaacgaagaactgacctatga

SEQ ID NO: 18612 - DNA, 25 bp, Saccharomyces pastorianus
gaaagaatcagacaacccgtagcag

SEQ ID NO: 18613 - DNA, 25 bp, Saccharomyces pastorianus
cgaggaaagattgccctgtttgtgt

SEQ ID NO: 18614 - DNA, 25 bp, Saccharomyces pastorianus
actgaatctgaactgctgtcactga

SEQ ID NO: 18615 - DNA, 25 bp, Saccharomyces pastorianus
aaccagtcatgtttgcacgttctgc

SEQ ID NO: 18616 - DNA, 25 bp, Saccharomyces pastorianus
gggctatatgctctggattccattg

SEQ ID NO: 18617 - DNA, 25 bp, Saccharomyces pastorianus
ggtattgccagatttatcaaccatt

SEQ ID NO: 18618 - DNA, 25 bp, Saccharomyces pastorianus
aattgttatttatgcattgcgcgat

SEQ ID NO: 18619 - DNA, 25 bp, Saccharomyces pastorianus
caaaagagccttcggactcagttcc

SEQ ID NO: 18620 - DNA, 25 bp, Saccharomyces pastorianus
ggttccgcggatgatctatacaatg

SEQ ID NO: 18621 - DNA, 25 bp, Saccharomyces pastorianus
acgatcactggccattcttgatgag

SEQ ID NO: 18622 - DNA, 25 bp, Saccharomyces pastorianus
gcgatcatagtaattttggcacaaa

SEQ ID NO: 18623 - DNA, 25 bp, Saccharomyces pastorianus
aaccaatgtagaactctctttgcta

SEQ ID NO: 18624 - DNA, 25 bp, Saccharomyces pastorianus
ttttcagcagagttggttccgcgga

SEQ ID NO: 18625 - DNA, 25 bp, Saccharomyces pastorianus
aaagccaggcatttgcatgaaatca

SEQ ID NO: 18626 - DNA, 25 bp, Saccharomyces pastorianus
attactggaccgaacatgggtggta

SEQ ID NO: 18627 - DNA, 25 bp, Saccharomyces pastorianus
gacatcatttattcttcaaggcgct

SEQ ID NO: 18628 - DNA, 25 bp, Saccharomyces pastorianus
agaaactttcacagccaatgattgt

SEQ ID NO: 18629 - DNA, 25 bp, Saccharomyces pastorianus
gattggacgtggaaccagtggcaaa

SEQ ID NO: 18630 - DNA, 25 bp, Saccharomyces pastorianus
tcaaggcgctaccacacgatcactg

SEQ ID NO: 18631 - DNA, 25 bp, Saccharomyces pastorianus
caccaagtgggtcggcaaggatatc

SEQ ID NO: 18632 - DNA, 25 bp, Saccharomyces pastorianus
gacatcaaagttttacacgaaggca

SEQ ID NO: 18633 - DNA, 25 bp, Saccharomyces pastorianus
gaaccaatctcctcaaagtttcaaa

SEQ ID NO: 18634 - DNA, 25 bp, Saccharomyces pastorianus
gttttcaagactataggtgacacca

SEQ ID NO: 18635 - DNA, 25 bp, Saccharomyces pastorianus
gatcaagtgtacattcgttaagcat

SEQ ID NO: 18636 - DNA, 25 bp, Saccharomyces pastorianus
acacgaaggcagtaaccaatccatt

SEQ ID NO: 18637 - DNA, 25 bp, Saccharomyces pastorianus
tcatcgaacaataccctcactatac

SEQ ID NO: 18638 - DNA, 25 bp, Saccharomyces pastorianus
taaggtgcaaccaccatatacggtt

SEQ ID NO: 18639 - DNA, 25 bp, Saccharomyces pastorianus
ggtgacaaaccttcctttaattcat

SEQ ID NO: 18640 - DNA, 25 bp, Saccharomyces pastorianus
aaaccctcatacgtgagtgtggaaa

SEQ ID NO: 18641 - DNA, 25 bp, Saccharomyces pastorianus
gcaacaaattaaaccctcatacgtg

SEQ ID NO: 18642 - DNA, 25 bp, Saccharomyces pastorianus
attggacaaactactctcgattcga

SEQ ID NO: 18643 - DNA, 25 bp, Saccharomyces pastorianus
ctgctctctagctactttgattggt

SEQ ID NO: 18644 - DNA, 25 bp, Saccharomyces pastorianus
taaagagcgtgtagcagctgcttgt

SEQ ID NO: 18645 - DNA, 25 bp, Saccharomyces pastorianus
gccttgggcagctttctattgtaaa

SEQ ID NO: 18646 - DNA, 25 bp, Saccharomyces pastorianus
gaggctcttgctgaagatagaccat

SEQ ID NO: 18647 - DNA, 25 bp, Saccharomyces pastorianus
tccacccgaattgacttccgatgaa

SEQ ID NO: 18648 - DNA, 25 bp, Saccharomyces pastorianus
gattgcgcatatttctgatcctgaa

SEQ ID NO: 18649 - DNA, 25 bp, Saccharomyces pastorianus
agccaaggaccttttgctaggcggt

SEQ ID NO: 18650 - DNA, 25 bp, Saccharomyces pastorianus
gatctcttcctcctagattcagaat

SEQ ID NO: 18651 - DNA, 25 bp, Saccharomyces pastorianus
gaataacgccaaccattacacactg

SEQ ID NO: 18652 - DNA, 25 bp, Saccharomyces pastorianus
accattctcccaaatctcaagtgtt

SEQ ID NO: 18653 - DNA, 25 bp, Saccharomyces pastorianus
ctctaccatctcgtacatttactag

SEQ ID NO: 18654 - DNA, 25 bp, Saccharomyces pastorianus
tctcttccaaatatctccttttcga

SEQ ID NO: 18655 - DNA, 25 bp, Saccharomyces pastorianus
ttttcgatattacctaactcagcag

SEQ ID NO: 18656 - DNA, 25 bp, Saccharomyces pastorianus
aaactgcacttcttccagcaatgga

SEQ ID NO: 18657 - DNA, 25 bp, Saccharomyces pastorianus
gagttggttcgctagcattcaaaaa

SEQ ID NO: 18658 - DNA, 25 bp, Saccharomyces pastorianus
aactagctctgggaacgaactctct

SEQ ID NO: 18659 - DNA, 25 bp, Saccharomyces pastorianus
acgtggatcgactatgttctaaagg

SEQ ID NO: 18660 - DNA, 25 bp, Saccharomyces pastorianus
taaaatatccgagctcctcttcaag

SEQ ID NO: 18661 - DNA, 25 bp, Saccharomyces pastorianus
aaaaccagcatacacctttgaacat

SEQ ID NO: 18662 - DNA, 25 bp, Saccharomyces pastorianus
tggcatattcgagcagtatttctgt

SEQ ID NO: 18663 - DNA, 25 bp, Saccharomyces pastorianus
agtagcgagtggtactctaccatct

SEQ ID NO: 18664 - DNA, 25 bp, Saccharomyces pastorianus
aatcaatgttaacaccagccctggc

SEQ ID NO: 18665 - DNA, 25 bp, Saccharomyces pastorianus
gatgctgttcaatctgacattgggt

SEQ ID NO: 18666 - DNA, 25 bp, Saccharomyces pastorianus
ttctggatccgctactgcaaaagtc

SEQ ID NO: 18667 - DNA, 25 bp, Saccharomyces pastorianus
tagcatatcctacgacacaatctct

SEQ ID NO: 18668 - DNA, 25 bp, Saccharomyces pastorianus
aattgtttcatggagctctagtgga

SEQ ID NO: 18669 - DNA, 25 bp, Saccharomyces pastorianus
aagtgagggatttgccttctggatc

SEQ ID NO: 18670 - DNA, 25 bp, Saccharomyces pastorianus
aacatgaacatctcattgggctcca

SEQ ID NO: 18671 - DNA, 25 bp, Saccharomyces pastorianus
gaagatcccagaaggccagcagtac

SEQ ID NO: 18672 - DNA, 25 bp, Saccharomyces pastorianus
ttgggctccaatactctcaatggca

SEQ ID NO: 18673 - DNA, 25 bp, Saccharomyces pastorianus
cagctcgttatctcaaccaattcag

SEQ ID NO: 18674 - DNA, 25 bp, Saccharomyces pastorianus
gaacgcgggccttctagcaaaagaa

SEQ ID NO: 18675 - DNA, 25 bp, Saccharomyces pastorianus
gctggcgtttctttattttctagta

SEQ ID NO: 18676 - DNA, 25 bp, Saccharomyces pastorianus
tcctcaaatcgtcggctcggaatat

SEQ ID NO: 18677 - DNA, 25 bp, Saccharomyces pastorianus
gaggtcaactttgctttcatcgata

SEQ ID NO: 18678 - DNA, 25 bp, Saccharomyces pastorianus
gtattcaagctacctgacgggaaat

SEQ ID NO: 18679 - DNA, 25 bp, Saccharomyces pastorianus
acggtttcgcattacctgcatctat

SEQ ID NO: 18680 - DNA, 25 bp, Saccharomyces pastorianus
gaatctcaggattcgacatctgtat

SEQ ID NO: 18681 - DNA, 25 bp, Saccharomyces pastorianus
caattgcgaaaatcagctggcgttt

SEQ ID NO: 18682 - DNA, 25 bp, Saccharomyces pastorianus
aacgtgagattgttcgtacgatcaa

SEQ ID NO: 18683 - DNA, 25 bp, Saccharomyces pastorianus
tggtggaaccacaactcttcgaggg

SEQ ID NO: 18684 - DNA, 25 bp, Saccharomyces pastorianus
cagggttatccacctttcaaaggct

SEQ ID NO: 18685 - DNA, 25 bp, Saccharomyces pastorianus
aatattgttctctcctcaaatcgtc

SEQ ID NO: 18686 - DNA, 25 bp, Saccharomyces pastorianus
ggatttatcgaagttgacaccacag

SEQ ID NO: 18687 - DNA, 25 bp, Saccharomyces pastorianus
aagaaagatctgttacggcacaaga

SEQ ID NO: 18688 - DNA, 25 bp, Saccharomyces pastorianus
gacagcggtgattatgcgttgaaga

SEQ ID NO: 18689 - DNA, 25 bp, Saccharomyces pastorianus
taataatcttccagtcaccaatccc

SEQ ID NO: 18690 - DNA, 25 bp, Saccharomyces pastorianus
ggcacaagatgcaagaccgtcagta

SEQ ID NO: 18691 - DNA, 25 bp, Saccharomyces pastorianus
aagaccgtcagtattttgacagcgg

SEQ ID NO: 18692 - DNA, 25 bp, Saccharomyces pastorianus
ttcacccaccagcagcagagtggat

SEQ ID NO: 18693 - DNA, 25 bp, Saccharomyces pastorianus
agtcaccaatcccagtggcctgagg

SEQ ID NO: 18694 - DNA, 25 bp, Saccharomyces pastorianus
ggtggcgactccatttcgagacaag

SEQ ID NO: 18695 - DNA, 25 bp, Saccharomyces pastorianus
agtggcctgagggagtctattatta

SEQ ID NO: 18696 - DNA, 25 bp, Saccharomyces pastorianus
gtagtagtagcggtggcgactccat

SEQ ID NO: 18697 - DNA, 25 bp, Saccharomyces pastorianus
atgaaattgaatgacggccgtgggt

SEQ ID NO: 18698 - DNA, 25 bp, Saccharomyces pastorianus
tgaaacagcggacggccagtacgat

SEQ ID NO: 18699 - DNA, 25 bp, Saccharomyces pastorianus
gacggccagtacgattggatgaaat

SEQ ID NO: 18700 - DNA, 25 bp, Saccharomyces pastorianus
gatgctgatttacgcaattctcaat

SEQ ID NO: 18701 - DNA, 25 bp, Saccharomyces pastorianus
aagcagcttcaacttcaacagcagc

SEQ ID NO: 18702 - DNA, 25 bp, Saccharomyces pastorianus
tcatcctaatccaccaaacgacaaa

SEQ ID NO: 18703 - DNA, 25 bp, Saccharomyces pastorianus
gaaaccgaacctacatggttatggt

SEQ ID NO: 18704 - DNA, 25 bp, Saccharomyces pastorianus
tagaacccctcatcaacaactgaat

SEQ ID NO: 18705 - DNA, 25 bp, Saccharomyces pastorianus
tagaccccacctcttatgaagcata

SEQ ID NO: 18706 - DNA, 25 bp, Saccharomyces pastorianus
aatcccaacaattcggtgccactcg

SEQ ID NO: 18707 - DNA, 25 bp, Saccharomyces pastorianus
tagttcaagcttagcagcttcccgc

SEQ ID NO: 18708 - DNA, 25 bp, Saccharomyces pastorianus
tcatcttctggtccattggttccaa

SEQ ID NO: 18709 - DNA, 25 bp, Saccharomyces pastorianus
atctaactcatctactgcagctggg

SEQ ID NO: 18710 - DNA, 25 bp, Saccharomyces pastorianus
aggctccaatattcagggtctagtc

SEQ ID NO: 18711 - DNA, 25 bp, Saccharomyces pastorianus
gatgcgtcttccagtcatgatggtt

SEQ ID NO: 18712 - DNA, 25 bp, Saccharomyces pastorianus
gtactacaacatcatgggcgtcggt

SEQ ID NO: 18713 - DNA, 25 bp, Saccharomyces pastorianus
gacgcatgtcaaccaaccttgattg

SEQ ID NO: 18714 - DNA, 25 bp, Saccharomyces pastorianus
cccttcccagttgtttatgctattg

SEQ ID NO: 18715 - DNA, 25 bp, Saccharomyces pastorianus
gtattctaacttcaccaacacacag

SEQ ID NO: 18716 - DNA, 25 bp, Saccharomyces pastorianus
caagttcagtggttctacgacgcat

SEQ ID NO: 18717 - DNA, 25 bp, Saccharomyces pastorianus
ggtggtggtgcttcaaacagctcta

SEQ ID NO: 18718 - DNA, 25 bp, Saccharomyces pastorianus
ggtctagtcgtgatcagttctggta

SEQ ID NO: 18719 - DNA, 25 bp, Saccharomyces pastorianus
ggtttttaggcttcaacatctggga

SEQ ID NO: 18720 - DNA, 25 bp, Saccharomyces pastorianus
ttagtttatgcattctcttcacaga

SEQ ID NO: 18721 - DNA, 25 bp, Saccharomyces pastorianus
tagcgtcgatggatgcttccgggat

SEQ ID NO: 18722 - DNA, 25 bp, Saccharomyces pastorianus
gggcttttcttctttgtagcaggac

SEQ ID NO: 18723 - DNA, 25 bp, Saccharomyces pastorianus
gttttcgtcatctgtcaactactgg

SEQ ID NO: 18724 - DNA, 25 bp, Saccharomyces pastorianus
gactaccgatgatgacctggaattc

SEQ ID NO: 18725 - DNA, 25 bp, Saccharomyces pastorianus
ttctgcgtcatatccttacttcgtg

SEQ ID NO: 18726 - DNA, 25 bp, Saccharomyces pastorianus
ggcgcatgttgctgggctttattaa

SEQ ID NO: 18727 - DNA, 25 bp, Saccharomyces pastorianus
gcactacttggatggcttattcttt

SEQ ID NO: 18728 - DNA, 25 bp, Saccharomyces pastorianus
atgctattggttcgaggagcctcct

SEQ ID NO: 18729 - DNA, 25 bp, Saccharomyces pastorianus
aggagcctccttattgggatttgta

SEQ ID NO: 18730 - DNA, 25 bp, Saccharomyces pastorianus
caaatttagatgctgctgccgcagg

SEQ ID NO: 18731 - DNA, 25 bp, Saccharomyces pastorianus
ttagatgctgctgccgcaggtacct

SEQ ID NO: 18732 - DNA, 25 bp, Saccharomyces pastorianus
gtaaattatccttgtctagaactga

SEQ ID NO: 18733 - DNA, 25 bp, Saccharomyces pastorianus
tcccaatccagaaccgctactttga

SEQ ID NO: 18734 - DNA, 25 bp, Saccharomyces pastorianus
gattgtggtcacagaatcttgttaa

SEQ ID NO: 18735 - DNA, 25 bp, Saccharomyces pastorianus
caacaaatttagatgctgctgccgc

SEQ ID NO: 18736 - DNA, 25 bp, Saccharomyces pastorianus
gtctagaactgatccagtccgttgt

SEQ ID NO: 18737 - DNA, 25 bp, Saccharomyces pastorianus
ccagaaccgctactttgaaatatat

SEQ ID NO: 18738 - DNA, 25 bp, Saccharomyces pastorianus
tatccttgtctagaactgatccagt

SEQ ID NO: 18739 - DNA, 25 bp, Saccharomyces pastorianus
cagaatcttgttaaaagccagaacc

SEQ ID NO: 18740 - DNA, 25 bp, Saccharomyces pastorianus
aatccagaaccgctactttgaaata

SEQ ID NO: 18741 - DNA, 25 bp, Saccharomyces pastorianus
tggttataatgggacgccccgtcat

SEQ ID NO: 18742 - DNA, 25 bp, Saccharomyces pastorianus
gtgcagagttattgccactggttat

SEQ ID NO: 18743 - DNA, 25 bp, Saccharomyces pastorianus
aatggtcccaccaatgagacctagt

SEQ ID NO: 18744 - DNA, 25 bp, Saccharomyces pastorianus
ttagcggcatctcgttctaattgca

SEQ ID NO: 18745 - DNA, 25 bp, Saccharomyces pastorianus
gggttgtccacgttgcaatgatggt

SEQ ID NO: 18746 - DNA, 25 bp, Saccharomyces pastorianus
ctgcctaacatgctccgtaaagatc

SEQ ID NO: 18747 - DNA, 25 bp, Saccharomyces pastorianus
gcaggaatcactgttcgacaattta

SEQ ID NO: 18748 - DNA, 25 bp, Saccharomyces pastorianus
atattgtgatacttgtccctgccta

SEQ ID NO: 18749 - DNA, 25 bp, Saccharomyces pastorianus
aaacttacacacttgtctctgtcta

SEQ ID NO: 18750 - DNA, 25 bp, Saccharomyces pastorianus
atgaagctggccacattagcggcat

SEQ ID NO: 18751 - DNA, 25 bp, Saccharomyces pastorianus
gacgccccgtcatttgacaaattgt

SEQ ID NO: 18752 - DNA, 25 bp, Saccharomyces pastorianus
ggaactatccattgaagtccctgat

SEQ ID NO: 18753 - DNA, 25 bp, Saccharomyces pastorianus
tgaggaagttccatccaccagaacc

SEQ ID NO: 18754 - DNA, 25 bp, Saccharomyces pastorianus
taccgctttacacatcgccagaagt

SEQ ID NO: 18755 - DNA, 25 bp, Saccharomyces pastorianus
caagttcttctctttgctgcgaaat

SEQ ID NO: 18756 - DNA, 25 bp, Saccharomyces pastorianus
cttgccgtcctcagattcgtaggaa

SEQ ID NO: 18757 - DNA, 25 bp, Saccharomyces pastorianus
tgctcctacatctctgatcatagaa

SEQ ID NO: 18758 - DNA, 25 bp, Saccharomyces pastorianus
tgttgtcaaatcacctgctcctaca

SEQ ID NO: 18759 - DNA, 25 bp, Saccharomyces pastorianus
aagtccctgatttcttgcagttgga

SEQ ID NO: 18760 - DNA, 25 bp, Saccharomyces pastorianus
ggataagtaccagcgttccatgtgg

SEQ ID NO: 18761 - DNA, 25 bp, Saccharomyces pastorianus
gactaaattattacgctcccatgtg

SEQ ID NO: 18762 - DNA, 25 bp, Saccharomyces pastorianus
aggtttccatgagtacactgtctat

SEQ ID NO: 18763 - DNA, 25 bp, Saccharomyces pastorianus
aataaacgatcctgcttaccttgtg

SEQ ID NO: 18764 - DNA, 25 bp, Saccharomyces pastorianus
tatatgccatgggtgttttgactac

SEQ ID NO: 18765 - DNA, 25 bp, Saccharomyces pastorianus
tattcgtcgcctcgctaacaagtta

SEQ ID NO: 18766 - DNA, 25 bp, Saccharomyces pastorianus
ggccatgttcgtgtaggtcctaatc

SEQ ID NO: 18767 - DNA, 25 bp, Saccharomyces pastorianus
tgtctcctactgatccatttcgtag

SEQ ID NO: 18768 - DNA, 25 bp, Saccharomyces pastorianus
aaggtcatcgcgacactcaggtcat

SEQ ID NO: 18769 - DNA, 25 bp, Saccharomyces pastorianus
gatttcctcgagtggaagcaggacc

SEQ ID NO: 18770 - DNA, 25 bp, Saccharomyces pastorianus
gtagaagacgattgcctgtaattat

SEQ ID NO: 18771 - DNA, 25 bp, Saccharomyces pastorianus
aagttatcattgctgtctcctactg

SEQ ID NO: 18772 - DNA, 25 bp, Saccharomyces pastorianus
gatcctgcttaccttgtgacaagga

SEQ ID NO: 18773 - DNA, 25 bp, Saccharomyces pastorianus
aaattaccgtcagcgctatgtgtag

SEQ ID NO: 18774 - DNA, 25 bp, Saccharomyces pastorianus
gttcctttgccctattatttattgt

SEQ ID NO: 18775 - DNA, 25 bp, Saccharomyces pastorianus
agatcgttgatctcttatttgcaaa

SEQ ID NO: 18776 - DNA, 25 bp, Saccharomyces pastorianus
atgatggttcctgcatcggtttgtt

SEQ ID NO: 18777 - DNA, 25 bp, Saccharomyces pastorianus
ttacaattgcgtcctcttgcactat

SEQ ID NO: 18778 - DNA, 25 bp, Saccharomyces pastorianus
gtccgtatgcaagttgtccgtacca

SEQ ID NO: 18779 - DNA, 25 bp, Saccharomyces pastorianus
tatttgcaaaacgagtccttccctg

SEQ ID NO: 18780 - DNA, 25 bp, Saccharomyces pastorianus
gagtgtgttgagagtccctatttat

SEQ ID NO: 18781 - DNA, 25 bp, Saccharomyces pastorianus
ggccggcacgctagaggcttacaat

SEQ ID NO: 18782 - DNA, 25 bp, Saccharomyces pastorianus
aatgtccggatcagtatagcttcaa

SEQ ID NO: 18783 - DNA, 25 bp, Saccharomyces pastorianus
tcgatcacccagtcaacttctaagt

SEQ ID NO: 18784 - DNA, 25 bp, Saccharomyces pastorianus
acttctaagtccatgaactcggccg

SEQ ID NO: 18785 - DNA, 25 bp, Saccharomyces pastorianus
agggacctcttgaagcaggattcga

SEQ ID NO: 18786 - DNA, 25 bp, Saccharomyces pastorianus
ggcaacaatgcatccgcagagactg

SEQ ID NO: 18787 - DNA, 25 bp, Saccharomyces pastorianus
gtatcaccatgctcgcttaagttga

SEQ ID NO: 18788 - DNA, 25 bp, Saccharomyces pastorianus
gggaaatcacagcattccgaatttt

SEQ ID NO: 18789 - DNA, 25 bp, Saccharomyces pastorianus
ttaacttcaagggtcatctcgaggc

SEQ ID NO: 18790 - DNA, 25 bp, Saccharomyces pastorianus
gggtcatctcgaggccgattcggaa

SEQ ID NO: 18791 - DNA, 25 bp, Saccharomyces pastorianus
aaaacaatgccactaccgacaataa

SEQ ID NO: 18792 - DNA, 25 bp, Saccharomyces pastorianus
atagactagtatcaccatgctcgct

SEQ ID NO: 18793 - DNA, 25 bp, Saccharomyces pastorianus
gtgaccaatcagcatacacggtttc

SEQ ID NO: 18794 - DNA, 25 bp, Saccharomyces pastorianus
gcagcagaggtttgcatcaccgact

SEQ ID NO: 18795 - DNA, 25 bp, Saccharomyces pastorianus
cacggtttccttccttaagactgat

SEQ ID NO: 18796 - DNA, 25 bp, Saccharomyces pastorianus
gtaaaatacatcatccacgggatcg

SEQ ID NO: 18797 - DNA, 25 bp, Saccharomyces pastorianus
actgcgaaaaatagccatctccaaa

SEQ ID NO: 18798 - DNA, 25 bp, Saccharomyces pastorianus
gtccgacttggccaacatactggaa

SEQ ID NO: 18799 - DNA, 25 bp, Saccharomyces pastorianus
gagttgttcgatgatgcctctgcga

SEQ ID NO: 18800 - DNA, 25 bp, Saccharomyces pastorianus
acgggatcgaactgttgtccgactt

SEQ ID NO: 18801 - DNA, 25 bp, Saccharomyces pastorianus
gaaacagcgctagaagccctggcaa

SEQ ID NO: 18802 - DNA, 25 bp, Saccharomyces pastorianus
gaacgacgtcatagatgcagaacaa

SEQ ID NO: 18803 - DNA, 25 bp, Saccharomyces pastorianus
aaacctggtcaaactctcggacaat

SEQ ID NO: 18804 - DNA, 25 bp, Saccharomyces pastorianus
gtcgtactggcaaaacacctacttc

SEQ ID NO: 18805 - DNA, 25 bp, Saccharomyces pastorianus
cacctacttccaaaacaacgtcatt

SEQ ID NO: 18806 - DNA, 25 bp, Saccharomyces pastorianus
caacgtcattgtgaaatttcgcgaa

SEQ ID NO: 18807 - DNA, 25 bp, Saccharomyces pastorianus
gcagcaatgtgcatcatgacacgta

SEQ ID NO: 18808 - DNA, 25 bp, Saccharomyces pastorianus
aaacgaggccgctgtcttcgtctag

SEQ ID NO: 18809 - DNA, 25 bp, Saccharomyces pastorianus
atgacacgtacgaactatcctgaat

SEQ ID NO: 18810 - DNA, 25 bp, Saccharomyces pastorianus
cggtcagcttcaacttaccttttga

SEQ ID NO: 18811 - DNA, 25 bp, Saccharomyces pastorianus
atacggcgacgactcattgacacaa

SEQ ID NO: 18812 - DNA, 25 bp, Saccharomyces pastorianus
tgcacacaggactttcttcgacaat

SEQ ID NO: 18813 - DNA, 25 bp, Saccharomyces pastorianus
gttatcacaagaagccagcgactct

SEQ ID NO: 18814 - DNA, 25 bp, Saccharomyces pastorianus
tttggcgacactataaacctctcag

SEQ ID NO: 18815 - DNA, 25 bp, Saccharomyces pastorianus
tgcagtccgattattctgtcgtaat

SEQ ID NO: 18816 - DNA, 25 bp, Saccharomyces pastorianus
gtacagcgacacattatacggcgac

SEQ ID NO: 18817 - DNA, 25 bp, Saccharomyces pastorianus
tatctcttccttttgtctttggcga

SEQ ID NO: 18818 - DNA, 25 bp, Saccharomyces pastorianus
ggcagcgccatctttagggttttca

SEQ ID NO: 18819 - DNA, 25 bp, Saccharomyces pastorianus
gaggaacttcctgggctacagattt

SEQ ID NO: 18820 - DNA, 25 bp, Saccharomyces pastorianus
gttttccacgacagatcatcaatta

SEQ ID NO: 18821 - DNA, 25 bp, Saccharomyces pastorianus
tggaaatccctctgcgaaacgaatt

SEQ ID NO: 18822 - DNA, 25 bp, Saccharomyces pastorianus
atggacatggcttcgttttccacga

SEQ ID NO: 18823 - DNA, 25 bp, Saccharomyces pastorianus
accagaaattctcagcgccaaaaat

SEQ ID NO: 18824 - DNA, 25 bp, Saccharomyces pastorianus
agtgatggctctgtgattttgaaaa

SEQ ID NO: 18825 - DNA, 25 bp, Saccharomyces pastorianus
agtacagaaatacgctcgcctcagg

SEQ ID NO: 18826 - DNA, 25 bp, Saccharomyces pastorianus
gtactgaaagttgggctggcttcga

SEQ ID NO: 18827 - DNA, 25 bp, Saccharomyces pastorianus
gaaagggttggcttccgatatagtg

SEQ ID NO: 18828 - DNA, 25 bp, Saccharomyces pastorianus
gggttttcacgccatactatggaca

SEQ ID NO: 18829 - DNA, 25 bp, Saccharomyces pastorianus
gaccgtcgcagtgggaaactctaca

SEQ ID NO: 18830 - DNA, 25 bp, Saccharomyces pastorianus
taatgcggaatctttgcctcaatac

SEQ ID NO: 18831 - DNA, 25 bp, Saccharomyces pastorianus
tctggtcccaatcaacaagtcgtta

SEQ ID NO: 18832 - DNA, 25 bp, Saccharomyces pastorianus
acacaggaacctactttgccaaatc

SEQ ID NO: 18833 - DNA, 25 bp, Saccharomyces pastorianus
aacgttatgacgactccgacgagca

SEQ ID NO: 18834 - DNA, 25 bp, Saccharomyces pastorianus
aaataatgcgggtattgcccaaccg

SEQ ID NO: 18835 - DNA, 25 bp, Saccharomyces pastorianus
gttcgaacaacccatttgcactaca

SEQ ID NO: 18836 - DNA, 25 bp, Saccharomyces pastorianus
agcagggctattttgcacccgtaaa

SEQ ID NO: 18837 - DNA, 25 bp, Saccharomyces pastorianus
taaactccactgtcaatcctattct

SEQ ID NO: 18838 - DNA, 25 bp, Saccharomyces pastorianus
aacagaaaatacctccgcacgcaat

SEQ ID NO: 18839 - DNA, 25 bp, Saccharomyces pastorianus
agggtattctgtttcgcaaggcacg

SEQ ID NO: 18840 - DNA, 25 bp, Saccharomyces pastorianus
tcgttcgtcatcaagcccaggaata

SEQ ID NO: 18841 - DNA, 25 bp, Saccharomyces pastorianus
cactgcgatgatttggacccgttgg

SEQ ID NO: 18842 - DNA, 25 bp, Saccharomyces pastorianus
gaaaatttccggtgctcaaaacttg

SEQ ID NO: 18843 - DNA, 25 bp, Saccharomyces pastorianus
ttcaggccgttctggcagagcgaga

SEQ ID NO: 18844 - DNA, 25 bp, Saccharomyces pastorianus
tccatatcgcagttattcagctaca

SEQ ID NO: 18845 - DNA, 25 bp, Saccharomyces pastorianus
cgagacaggccctaagacggtccat

SEQ ID NO: 18846 - DNA, 25 bp, Saccharomyces pastorianus
acatcctcggtacgttttgcattca

SEQ ID NO: 18847 - DNA, 25 bp, Saccharomyces pastorianus
ggaatatcttgttggcctcagtcaa

SEQ ID NO: 18848 - DNA, 25 bp, Saccharomyces pastorianus
ctaacggccggctaccaattgagta

SEQ ID NO: 18849 - DNA, 25 bp, Saccharomyces pastorianus
cggtgctcaaaacttgtcgctgctc

SEQ ID NO: 18850 - DNA, 25 bp, Saccharomyces pastorianus
gaacggtgattccatatcgcagtta

SEQ ID NO: 18851 - DNA, 25 bp, Saccharomyces pastorianus
aactcgttagcgacaaacctatcat

SEQ ID NO: 18852 - DNA, 25 bp, Saccharomyces pastorianus
gagcggtgtgccatgtgaagatatt

SEQ ID NO: 18853 - DNA, 25 bp, Saccharomyces pastorianus
tgccatgacgagagccaaatccaaa

SEQ ID NO: 18854 - DNA, 25 bp, Saccharomyces pastorianus
atcacgtctcaatccaaactcgtta

SEQ ID NO: 18855 - DNA, 25 bp, Saccharomyces pastorianus
agatgccccgacattatggagcaaa

SEQ ID NO: 18856 - DNA, 25 bp, Saccharomyces pastorianus
aacgggtgccaaggctatcacgtct

SEQ ID NO: 18857 - DNA, 25 bp, Saccharomyces pastorianus
ttatacagagcgcagttgaggttac

SEQ ID NO: 18858 - DNA, 25 bp, Saccharomyces pastorianus
tttgaattatgacagatgccccgac

SEQ ID NO: 18859 - DNA, 25 bp, Saccharomyces pastorianus
ggccatataagtacaagttccctga

SEQ ID NO: 18860 - DNA, 25 bp, Saccharomyces pastorianus
aaactgatcatcatcggctcaaaaa

SEQ ID NO: 18861 - DNA, 25 bp, Saccharomyces pastorianus
aagggctagagatcctgaccgccga

SEQ ID NO: 18862 - DNA, 25 bp, Saccharomyces pastorianus
aattgctaggttgggttcatactca

SEQ ID NO: 18863 - DNA, 25 bp, Saccharomyces pastorianus
gtcacgtaggctccgtccaaataag

SEQ ID NO: 18864 - DNA, 25 bp, Saccharomyces pastorianus
tcagctccaggatctgtttcattaa

SEQ ID NO: 18865 - DNA, 25 bp, Saccharomyces pastorianus
ttggcgcctcaattgggtcacgtag

SEQ ID NO: 18866 - DNA, 25 bp, Saccharomyces pastorianus
gaaattactgccctgccagatacag

SEQ ID NO: 18867 - DNA, 25 bp, Saccharomyces pastorianus
gtccggtgcactttttacagttcaa

SEQ ID NO: 18868 - DNA, 25 bp, Saccharomyces pastorianus
atgggcacagcctttgatccagaag

SEQ ID NO: 18869 - DNA, 25 bp, Saccharomyces pastorianus
tgaacctactttcagcacacatgct

SEQ ID NO: 18870 - DNA, 25 bp, Saccharomyces pastorianus
gatatttccatcttttcagctccag

SEQ ID NO: 18871 - DNA, 25 bp, Saccharomyces pastorianus
tactactttctgaccgtatcatggg

SEQ ID NO: 18872 - DNA, 25 bp, Saccharomyces pastorianus
tcaagactgttgttttggcgcctca

SEQ ID NO: 18873 - DNA, 25 bp, Saccharomyces pastorianus
tatttccgtcgagctctaacattag

SEQ ID NO: 18874 - DNA, 25 bp, Saccharomyces pastorianus
gagtgtccagcggaacgtctcagga

SEQ ID NO: 18875 - DNA, 25 bp, Saccharomyces pastorianus
agtggatatctgtcctcgagacttt

SEQ ID NO: 18876 - DNA, 25 bp, Saccharomyces pastorianus
gatgggccacgaattcgtcgaactt

SEQ ID NO: 18877 - DNA, 25 bp, Saccharomyces pastorianus
gctttggctggctgtgtttgaaata

SEQ ID NO: 18878 - DNA, 25 bp, Saccharomyces pastorianus
atgcacctatactctctttactatt

SEQ ID NO: 18879 - DNA, 25 bp, Saccharomyces pastorianus
tacgattacgcgatgggagtgtcca

SEQ ID NO: 18880 - DNA, 25 bp, Saccharomyces pastorianus
taacgcatggaccttgatgggccac

SEQ ID NO: 18881 - DNA, 25 bp, Saccharomyces pastorianus
aagcctatgcgctcttggacatgca

SEQ ID NO: 18882 - DNA, 25 bp, Saccharomyces pastorianus
gcaggcaactatcaactagcgtacg

SEQ ID NO: 18883 - DNA, 25 bp, Saccharomyces pastorianus
aattctcatgctgcgatcgagtgct

SEQ ID NO: 18884 - DNA, 25 bp, Saccharomyces pastorianus
gactatgtgcccgatgtggttcttg

SEQ ID NO: 18885 - DNA, 25 bp, Saccharomyces pastorianus
atctcatctcggtgctatttgccat

SEQ ID NO: 18886 - DNA, 25 bp, Saccharomyces pastorianus
acaaggatattgacgcctctctgga

SEQ ID NO: 18887 - DNA, 25 bp, Saccharomyces pastorianus
gaagacgaagatgctccacaaatta

SEQ ID NO: 18888 - DNA, 25 bp, Saccharomyces pastorianus
gtttactataccagatctcatctcg

SEQ ID NO: 18889 - DNA, 25 bp, Saccharomyces pastorianus
gatataacccttgctagaacttcag

SEQ ID NO: 18890 - DNA, 25 bp, Saccharomyces pastorianus
tggcagacgtcacccaattagtcga

SEQ ID NO: 18891 - DNA, 25 bp, Saccharomyces pastorianus
gggtgtcaacgaccaagtttactat

SEQ ID NO: 18892 - DNA, 25 bp, Saccharomyces pastorianus
gtcgaattcatagtcctggacgtgg

SEQ ID NO: 18893 - DNA, 25 bp, Saccharomyces pastorianus
agctgcgcctactgaagagcatgat

SEQ ID NO: 18894 - DNA, 25 bp, Saccharomyces pastorianus
cgcctctctggattacaactcgaaa

SEQ ID NO: 18895 - DNA, 25 bp, Saccharomyces pastorianus
aatcctataatagtcccatccttgc

SEQ ID NO: 18896 - DNA, 25 bp, Saccharomyces pastorianus
atgtcaactagatcccgtactctat

SEQ ID NO: 18897 - DNA, 25 bp, Saccharomyces pastorianus
ttatctgacttgattcccctacaat

SEQ ID NO: 18898 - DNA, 25 bp, Saccharomyces pastorianus
aacgaattctcttctctataacgcc

SEQ ID NO: 18899 - DNA, 25 bp, Saccharomyces pastorianus
gtctcgcgaggtttgcccaagagtt

SEQ ID NO: 18900 - DNA, 25 bp, Saccharomyces pastorianus
atggagtacttcaaccaggacgtaa

SEQ ID NO: 18901 - DNA, 25 bp, Saccharomyces pastorianus
gaagatactgccttggagctcatgc

SEQ ID NO: 18902 - DNA, 25 bp, Saccharomyces pastorianus
gaaatttcgaccagtgtctcgcgag

SEQ ID NO: 18903 - DNA, 25 bp, Saccharomyces pastorianus
gacagttcgagtgccgatgctgcag

SEQ ID NO: 18904 - DNA, 25 bp, Saccharomyces pastorianus
gaagatgccggctaccaggaagata

SEQ ID NO: 18905 - DNA, 25 bp, Saccharomyces pastorianus
ccatccttgccgttgatattcagaa

SEQ ID NO: 18906 - DNA, 25 bp, Saccharomyces pastorianus
aaatgcgccgacgtgtttcaaaata

SEQ ID NO: 18907 - DNA, 25 bp, Saccharomyces pastorianus
agccattccactgccaatgtgatat

SEQ ID NO: 18908 - DNA, 25 bp, Saccharomyces pastorianus
ggattactcttttcagaacattgac

SEQ ID NO: 18909 - DNA, 25 bp, Saccharomyces pastorianus
ggatctttgccatgaaatgcgccga

SEQ ID NO: 18910 - DNA, 25 bp, Saccharomyces pastorianus
tggcgcaagcgattcgtaccaagat

SEQ ID NO: 18911 - DNA, 25 bp, Saccharomyces pastorianus
attaggtgagttttgcctgcaagcc

SEQ ID NO: 18912 - DNA, 25 bp, Saccharomyces pastorianus
catcgactcactatccacattaggt

SEQ ID NO: 18913 - DNA, 25 bp, Saccharomyces pastorianus
tttgtactgtctttgccaatggagc

SEQ ID NO: 18914 - DNA, 25 bp, Saccharomyces pastorianus
gtgatatctttccatagctcagaga

SEQ ID NO: 18915 - DNA, 25 bp, Saccharomyces pastorianus
acacctacaccctatacaagaagcg

SEQ ID NO: 18916 - DNA, 25 bp, Saccharomyces pastorianus
catctgcattaataccgaagccgcc

SEQ ID NO: 18917 - DNA, 25 bp, Saccharomyces pastorianus
gatggattcccattcaaactcacac

SEQ ID NO: 18918 - DNA, 25 bp, Saccharomyces pastorianus
aaccttcctactaagttgcgtatgc

SEQ ID NO: 18919 - DNA, 25 bp, Saccharomyces pastorianus
ttattctgtagctcgtgtatttggc

SEQ ID NO: 18920 - DNA, 25 bp, Saccharomyces pastorianus
gtgattatgtcttgccaacaaccag

SEQ ID NO: 18921 - DNA, 25 bp, Saccharomyces pastorianus
ccgttggtttggtccgtgtagtgat

SEQ ID NO: 18922 - DNA, 25 bp, Saccharomyces pastorianus
actatatacctcgtaggcgtgccag

SEQ ID NO: 18923 - DNA, 25 bp, Saccharomyces pastorianus
ctacttttgctactggatggattcc

SEQ ID NO: 18924 - DNA, 25 bp, Saccharomyces pastorianus
tgccagttttgctgaggtggcctca

SEQ ID NO: 18925 - DNA, 25 bp, Saccharomyces pastorianus
tttatctcattaaccagcccaacct

SEQ ID NO: 18926 - DNA, 25 bp, Saccharomyces pastorianus
gaaattccaccgcagttcagatatg

SEQ ID NO: 18927 - DNA, 25 bp, Saccharomyces pastorianus
atttgccctatttgtttccctatca

SEQ ID NO: 18928 - DNA, 25 bp, Saccharomyces pastorianus
ggcattttcaagtgctcagccgcaa

SEQ ID NO: 18929 - DNA, 25 bp, Saccharomyces pastorianus
ataaagatcttgtcgccagcgttgt

SEQ ID NO: 18930 - DNA, 25 bp, Saccharomyces pastorianus
aaagagccgttgatttcgttgtgcg

SEQ ID NO: 18931 - DNA, 25 bp, Saccharomyces pastorianus
tcccattagcacaccactttttaag

SEQ ID NO: 18932 - DNA, 25 bp, Saccharomyces pastorianus
attccacggcctttcaagactagtt

SEQ ID NO: 18933 - DNA, 25 bp, Saccharomyces pastorianus
ccagcgttgtacacattctttacca

SEQ ID NO: 18934 - DNA, 25 bp, Saccharomyces pastorianus
ccacgaaccgtgtgcgatttattca

SEQ ID NO: 18935 - DNA, 25 bp, Saccharomyces pastorianus
ggagaccaaaatggcccgttcattc

SEQ ID NO: 18936 - DNA, 25 bp, Saccharomyces pastorianus
ggaaattccccacgaacacagtaag

SEQ ID NO: 18937 - DNA, 25 bp, Saccharomyces pastorianus
aaattgtggctactcgaactgcccg

SEQ ID NO: 18938 - DNA, 25 bp, Saccharomyces pastorianus
gcatagtcccttcaaacagttacga

SEQ ID NO: 18939 - DNA, 25 bp, Saccharomyces pastorianus
agtcagagcttccaaggtcttgcca

SEQ ID NO: 18940 - DNA, 25 bp, Saccharomyces pastorianus
agatccgtcttcttggctgaaatca

SEQ ID NO: 18941 - DNA, 25 bp, Saccharomyces pastorianus
cgatgctgttaccaaggctcaatct

SEQ ID NO: 18942 - DNA, 25 bp, Saccharomyces pastorianus
agctttgtacgcttccaagatcatc

SEQ ID NO: 18943 - DNA, 25 bp, Saccharomyces pastorianus
ctcaacgtgattacttcggtgccca

SEQ ID NO: 18944 - DNA, 25 bp, Saccharomyces pastorianus
ctgctttgaccttctacgatgggta

SEQ ID NO: 18945 - DNA, 25 bp, Saccharomyces pastorianus
caacaagttcttcgccgatgctgtt

SEQ ID NO: 18946 - DNA, 25 bp, Saccharomyces pastorianus
gaatgtgcatccgaaaacttgccag

SEQ ID NO: 18947 - DNA, 25 bp, Saccharomyces pastorianus
gttgatccgtgaagccgctgccaca

SEQ ID NO: 18948 - DNA, 25 bp, Saccharomyces pastorianus
acactttcagagtcttgcccgaatg

SEQ ID NO: 18949 - DNA, 25 bp, Saccharomyces pastorianus
atccattgcattggctaccacatac

SEQ ID NO: 18950 - DNA, 25 bp, Saccharomyces pastorianus
atgctgctagtttaaggaaccttgc

SEQ ID NO: 18951 - DNA, 25 bp, Saccharomyces pastorianus
aaagcaaatccagacccgacaaata

SEQ ID NO: 18952 - DNA, 25 bp, Saccharomyces pastorianus
gagtaaaatcttcgctgcagcattg

SEQ ID NO: 18953 - DNA, 25 bp, Saccharomyces pastorianus
gaccctttgatattgagaagcgcaa

SEQ ID NO: 18954 - DNA, 25 bp, Saccharomyces pastorianus
atcagcaacctgagctcattggtat

SEQ ID NO: 18955 - DNA, 25 bp, Saccharomyces pastorianus
atattccgccaattataagtgttca

SEQ ID NO: 18956 - DNA, 25 bp, Saccharomyces pastorianus
tttggaacgaaacactctctgagta

SEQ ID NO: 18957 - DNA, 25 bp, Saccharomyces pastorianus
gtagatggtaatcccattacttcaa

SEQ ID NO: 18958 - DNA, 25 bp, Saccharomyces pastorianus
tatggtaaactacgcttcggagtcg

SEQ ID NO: 18959 - DNA, 25 bp, Saccharomyces pastorianus
cggagtcgcgccacttgaggaagaa

SEQ ID NO: 18960 - DNA, 25 bp, Saccharomyces pastorianus
ggtgtagccggattcaatgattcgt

SEQ ID NO: 18961 - DNA, 25 bp, Saccharomyces pastorianus
ccttgattacttcactgacggctga

SEQ ID NO: 18962 - DNA, 25 bp, Saccharomyces pastorianus
atcagacgcgttcttatcctcgatg

SEQ ID NO: 18963 - DNA, 25 bp, Saccharomyces pastorianus
aatgtggcttcccaatacggatcac

SEQ ID NO: 18964 - DNA, 25 bp, Saccharomyces pastorianus
tgccaccaattctcatgattctgtt

SEQ ID NO: 18965 - DNA, 25 bp, Saccharomyces pastorianus
gacggctgatcaattggctggtaat

SEQ ID NO: 18966 - DNA, 25 bp, Saccharomyces pastorianus
tctctcagagtatacgatcgccgtt

SEQ ID NO: 18967 - DNA, 25 bp, Saccharomyces pastorianus
gcatgctcctatcattgcgacaggt

SEQ ID NO: 18968 - DNA, 25 bp, Saccharomyces pastorianus
ccaacatctttatcgtactcttcaa

SEQ ID NO: 18969 - DNA, 25 bp, Saccharomyces pastorianus
tggacaacatctggcgatctcttga

SEQ ID NO: 18970 - DNA, 25 bp, Saccharomyces pastorianus
acgttagctgctactggtattccaa

SEQ ID NO: 18971 - DNA, 25 bp, Saccharomyces pastorianus
aaaccgaccacaatgacctgtatgc

SEQ ID NO: 18972 - DNA, 25 bp, Saccharomyces pastorianus
caaggcggtgccattgtctatgaat

SEQ ID NO: 18973 - DNA, 25 bp, Saccharomyces pastorianus
aggtttttgtccgagattgcatctg

SEQ ID NO: 18974 - DNA, 25 bp, Saccharomyces pastorianus
tggctcttttacagttcatggctac

SEQ ID NO: 18975 - DNA, 25 bp, Saccharomyces pastorianus
attatcccgataaactggctctttt

SEQ ID NO: 18976 - DNA, 25 bp, Saccharomyces pastorianus
ttgcagggactgaccacttttaacc

SEQ ID NO: 18977 - DNA, 25 bp, Saccharomyces pastorianus
gaccaagttgaattgcccttcttag

SEQ ID NO: 18978 - DNA, 25 bp, Saccharomyces pastorianus
tgcactatgcttgctacttaccata

SEQ ID NO: 18979 - DNA, 25 bp, Saccharomyces pastorianus
aacgacgatcatgtggcaatacctg

SEQ ID NO: 18980 - DNA, 25 bp, Saccharomyces pastorianus
gattgcatctgttcactgcactatg

SEQ ID NO: 18981 - DNA, 25 bp, Saccharomyces pastorianus
gttcatggctactacgatcttggat

SEQ ID NO: 18982 - DNA, 25 bp, Saccharomyces pastorianus
tgaatttaggattccccgtgggttg

SEQ ID NO: 18983 - DNA, 25 bp, Saccharomyces pastorianus
taaatactatctccaagcggctgat

SEQ ID NO: 18984 - DNA, 25 bp, Saccharomyces pastorianus
ggctgatagacaaaggcccgctcat

SEQ ID NO: 18985 - DNA, 25 bp, Saccharomyces pastorianus
gcccgctcatctggaattcacaatg

SEQ ID NO: 18986 - DNA, 25 bp, Saccharomyces pastorianus
acaatgttgattccagcccattcga

SEQ ID NO: 18987 - DNA, 25 bp, Saccharomyces pastorianus
tgctgttatctctatctacaccgga

SEQ ID NO: 18988 - DNA, 25 bp, Saccharomyces pastorianus
agaccgtggtgggattcgtactgcc

SEQ ID NO: 18989 - DNA, 25 bp, Saccharomyces pastorianus
gtgattaccgtactgtcaccagaat

SEQ ID NO: 18990 - DNA, 25 bp, Saccharomyces pastorianus
agtacccaccagatgctaatcacgg

SEQ ID NO: 18991 - DNA, 25 bp, Saccharomyces pastorianus
agcccattcgaacatcgtcatgact

SEQ ID NO: 18992 - DNA, 25 bp, Saccharomyces pastorianus
tactgccttccacaacgataacgat

SEQ ID NO: 18993 - DNA, 25 bp, Saccharomyces pastorianus
aatcgttgccatggttcgtcagagt

SEQ ID NO: 18994 - DNA, 25 bp, Saccharomyces pastorianus
aacgggctacggagccttgtgcaat

SEQ ID NO: 18995 - DNA, 25 bp, Saccharomyces pastorianus
aggctcgtcacgtggttatccatga

SEQ ID NO: 18996 - DNA, 25 bp, Saccharomyces pastorianus
caatgtagtggtggccgtgtaccct

SEQ ID NO: 18997 - DNA, 25 bp, Saccharomyces pastorianus
agtcaggcggccagtatatgaacct

SEQ ID NO: 18998 - DNA, 25 bp, Saccharomyces pastorianus
gtgagaactgcacgctactgaagtc

SEQ ID NO: 18999 - DNA, 25 bp, Saccharomyces pastorianus
gtcgggttgtacatgctagagctct

SEQ ID NO: 19000 - DNA, 25 bp, Saccharomyces pastorianus
agagctcttgcgtaagcggcttggc

SEQ ID NO: 19001 - DNA, 25 bp, Saccharomyces pastorianus
gcacaccttggtcacagagagcgaa

SEQ ID NO: 19002 - DNA, 25 bp, Saccharomyces pastorianus
taattctagggaccctgcgagcgta

SEQ ID NO: 19003 - DNA, 25 bp, Saccharomyces pastorianus
gcagaacaaggcctactctcctgtg

SEQ ID NO: 19004 - DNA, 25 bp, Saccharomyces pastorianus
agggataggcaatccggagccgcaa

SEQ ID NO: 19005 - DNA, 25 bp, Saccharomyces pastorianus
gggtaccacatgctacttgattttg

SEQ ID NO: 19006 - DNA, 25 bp, Saccharomyces pastorianus
actttccaattctgtgcaattccac

SEQ ID NO: 19007 - DNA, 25 bp, Saccharomyces pastorianus
gcaattccacaagtcatggccatcg

SEQ ID NO: 19008 - DNA, 25 bp, Saccharomyces pastorianus
gttaagatccgcaagggtaccacat

SEQ ID NO: 19009 - DNA, 25 bp, Saccharomyces pastorianus
ggccgtgcaagatccaaactaccta

SEQ ID NO: 19010 - DNA, 25 bp, Saccharomyces pastorianus
gtgttcacgaacagtctactttcca

SEQ ID NO: 19011 - DNA, 25 bp, Saccharomyces pastorianus
gatgtgttgacctacttagccagtg

SEQ ID NO: 19012 - DNA, 25 bp, Saccharomyces pastorianus
gaacgcattggatcacgtcattgat

SEQ ID NO: 19013 - DNA, 25 bp, Saccharomyces pastorianus
aatctggtctcaatacgttcctcaa

SEQ ID NO: 19014 - DNA, 25 bp, Saccharomyces pastorianus
ttacctgccaacgtgaaaccaaatg

SEQ ID NO: 19015 - DNA, 25 bp, Saccharomyces pastorianus
ttgtctatcattgtttccgttcttc

SEQ ID NO: 19016 - DNA, 25 bp, Saccharomyces pastorianus
gctggcacagggagattcccactat

SEQ ID NO: 19017 - DNA, 25 bp, Saccharomyces pastorianus
gtgatctggaattacctaaggactt

SEQ ID NO: 19018 - DNA, 25 bp, Saccharomyces pastorianus
gaagctgacacagtcccaggagaaa

SEQ ID NO: 19019 - DNA, 25 bp, Saccharomyces pastorianus
gagctactctgtttgtcggtaagaa

SEQ ID NO: 19020 - DNA, 25 bp, Saccharomyces pastorianus
gccggtaggtattatgcatttcaat

SEQ ID NO: 19021 - DNA, 25 bp, Saccharomyces pastorianus
taaggacttctcgtcgctggcacag

SEQ ID NO: 19022 - DNA, 25 bp, Saccharomyces pastorianus
gagattcccactatgaagcaaggtt

SEQ ID NO: 19023 - DNA, 25 bp, Saccharomyces pastorianus
acggtttgggctattacagcttgac

SEQ ID NO: 19024 - DNA, 25 bp, Saccharomyces pastorianus
gcaaggttcagcaaacaggacggta

SEQ ID NO: 19025 - DNA, 25 bp, Saccharomyces pastorianus
cgaagttagacgtgccggtaggtat

SEQ ID NO: 19026 - DNA, 25 bp, Saccharomyces pastorianus
agcttgacggcgagagagctactct

SEQ ID NO: 19027 - DNA, 25 bp, Saccharomyces pastorianus
attaatagcgcattgatccggccca

SEQ ID NO: 19028 - DNA, 25 bp, Saccharomyces pastorianus
agaggtgtacgacgcctttgctaac

SEQ ID NO: 19029 - DNA, 25 bp, Saccharomyces pastorianus
tggacttctccctaagactttacaa

SEQ ID NO: 19030 - DNA, 25 bp, Saccharomyces pastorianus
atccggcccattgtagggtacatca

SEQ ID NO: 19031 - DNA, 25 bp, Saccharomyces pastorianus
tggacatcgaccatctgaatgccgg

SEQ ID NO: 19032 - DNA, 25 bp, Saccharomyces pastorianus
tcttcacttcgggactgacgtatat

SEQ ID NO: 19033 - DNA, 25 bp, Saccharomyces pastorianus
attcctatcaagtgccggatcgtga

SEQ ID NO: 19034 - DNA, 25 bp, Saccharomyces pastorianus
ggaccatctacgattcctacttgat

SEQ ID NO: 19035 - DNA, 25 bp, Saccharomyces pastorianus
gaagggtcggcttttggtcgctaca

SEQ ID NO: 19036 - DNA, 25 bp, Saccharomyces pastorianus
gactttgaaggctcatggaccatct

SEQ ID NO: 19037 - DNA, 25 bp, Saccharomyces pastorianus
gttgacatggttggcgacgtacttt

SEQ ID NO: 19038 - DNA, 25 bp, Saccharomyces pastorianus
acgcgggacaccaaaacgacatctt

SEQ ID NO: 19039 - DNA, 25 bp, Saccharomyces pastorianus
ggtctgaacccatcatactgagcta

SEQ ID NO: 19040 - DNA, 25 bp, Saccharomyces pastorianus
acacgcttagtgaccaacctgagga

SEQ ID NO: 19041 - DNA, 25 bp, Saccharomyces pastorianus
gataactcgctggacgacaacgacg

SEQ ID NO: 19042 - DNA, 25 bp, Saccharomyces pastorianus
gaaccgcacgacgaattcaacgaag

SEQ ID NO: 19043 - DNA, 25 bp, Saccharomyces pastorianus
gacatcttcccttaagtcaagcaca

SEQ ID NO: 19044 - DNA, 25 bp, Saccharomyces pastorianus
gggctcaatagacctcagatccatc

SEQ ID NO: 19045 - DNA, 25 bp, Saccharomyces pastorianus
cacatcgtttccgttatcattcaag

SEQ ID NO: 19046 - DNA, 25 bp, Saccharomyces pastorianus
gaagacaacccaacggagccagagt

SEQ ID NO: 19047 - DNA, 25 bp, Saccharomyces pastorianus
gagtttaccgccaagagagaccata

SEQ ID NO: 19048 - DNA, 25 bp, Saccharomyces pastorianus
ctgctgttccagtccagaagtagaa

SEQ ID NO: 19049 - DNA, 25 bp, Saccharomyces pastorianus
gagaagaccttgcacaattgaccat

SEQ ID NO: 19050 - DNA, 25 bp, Saccharomyces pastorianus
tattttcaacagtatcagagccaat

SEQ ID NO: 19051 - DNA, 25 bp, Saccharomyces pastorianus
ggcttccgaaagctggacagaatct

SEQ ID NO: 19052 - DNA, 25 bp, Saccharomyces pastorianus
aaaagcctgaacaagactcgatcgt

SEQ ID NO: 19053 - DNA, 25 bp, Saccharomyces pastorianus
attattggacgatctggcttccgaa

SEQ ID NO: 19054 - DNA, 25 bp, Saccharomyces pastorianus
atctccaatattcttttgtctcatt

SEQ ID NO: 19055 - DNA, 25 bp, Saccharomyces pastorianus
tcattggaccatttgagcagaatat

SEQ ID NO: 19056 - DNA, 25 bp, Saccharomyces pastorianus
gactcgatcgtttatgccaacggag

SEQ ID NO: 19057 - DNA, 25 bp, Saccharomyces pastorianus
ttacctgttttacttgggatacaag

SEQ ID NO: 19058 - DNA, 25 bp, Saccharomyces pastorianus
ggaatgagcaacgtctgcttccgtt

SEQ ID NO: 19059 - DNA, 25 bp, Saccharomyces pastorianus
tttgcaggatcaaacatcatctgtt

SEQ ID NO: 19060 - DNA, 25 bp, Saccharomyces pastorianus
gcattctgaagaacccggactcgca

SEQ ID NO: 19061 - DNA, 25 bp, Saccharomyces pastorianus
caaggccccggtcttgatcaataac

SEQ ID NO: 19062 - DNA, 25 bp, Saccharomyces pastorianus
tcgggacgacgacttcttcattgag

SEQ ID NO: 19063 - DNA, 25 bp, Saccharomyces pastorianus
aggagaacctgcgtacagccttgga

SEQ ID NO: 19064 - DNA, 25 bp, Saccharomyces pastorianus
ataacctcttggacagtgggatcag

SEQ ID NO: 19065 - DNA, 25 bp, Saccharomyces pastorianus
aagaactacacgactgcttcaggag

SEQ ID NO: 19066 - DNA, 25 bp, Saccharomyces pastorianus
aaagaacctctcatcgggaagctct

SEQ ID NO: 19067 - DNA, 25 bp, Saccharomyces pastorianus
gtctcaggcgtttatcgacatcgcg

SEQ ID NO: 19068 - DNA, 25 bp, Saccharomyces pastorianus
gttgaacaaggactgctctctgagc

SEQ ID NO: 19069 - DNA, 25 bp, Saccharomyces pastorianus
tggaggccgggtttcaagaactaca

SEQ ID NO: 19070 - DNA, 25 bp, Saccharomyces pastorianus
aggacaagcacttggtcgccgaggt

SEQ ID NO: 19071 - DNA, 25 bp, Saccharomyces pastorianus
attcttgctggtttgcacgatacgc

SEQ ID NO: 19072 - DNA, 25 bp, Saccharomyces pastorianus
gtggacattatcaacttcggcgaga

SEQ ID NO: 19073 - DNA, 25 bp, Saccharomyces pastorianus
gcgtcctctcctataattcttgaag

SEQ ID NO: 19074 - DNA, 25 bp, Saccharomyces pastorianus
gattagactggccaagacgctgaag

SEQ ID NO: 19075 - DNA, 25 bp, Saccharomyces pastorianus
gagactagtcacttgctgaccgtgg

SEQ ID NO: 19076 - DNA, 25 bp, Saccharomyces pastorianus
gtggcgttcgtatgcagtcccataa

SEQ ID NO: 19077 - DNA, 25 bp, Saccharomyces pastorianus
ggcacgttcatggacttcggtgtag

SEQ ID NO: 19078 - DNA, 25 bp, Saccharomyces pastorianus
gactctgacgctaatggcacgttca

SEQ ID NO: 19079 - DNA, 25 bp, Saccharomyces pastorianus
actgttggacgagtttgttgccgcg

SEQ ID NO: 19080 - DNA, 25 bp, Saccharomyces pastorianus
ggccttgcgtctctccatggaggaa

SEQ ID NO: 19081 - DNA, 25 bp, Saccharomyces pastorianus
ctgcagattgcccagctgactttga

SEQ ID NO: 19082 - DNA, 25 bp, Saccharomyces pastorianus
attggtagttgcctccaaggtcgaa

SEQ ID NO: 19083 - DNA, 25 bp, Saccharomyces pastorianus
gttatcgcttcgctgggcataccat

SEQ ID NO: 19084 - DNA, 25 bp, Saccharomyces pastorianus
acgactgttctcattatggcggcga

SEQ ID NO: 19085 - DNA, 25 bp, Saccharomyces pastorianus
gccatggtgatgacacgcctcataa

SEQ ID NO: 19086 - DNA, 25 bp, Saccharomyces pastorianus
ggcatttcatcacagtaccattggt

SEQ ID NO: 19087 - DNA, 25 bp, Saccharomyces pastorianus
tacgcatgaagaacctgaccgccaa

SEQ ID NO: 19088 - DNA, 25 bp, Saccharomyces pastorianus
ctacggaagatgattttggctgcca

SEQ ID NO: 19089 - DNA, 25 bp, Saccharomyces pastorianus
gagcttgacgtattgaacgccgtaa

SEQ ID NO: 19090 - DNA, 25 bp, Saccharomyces pastorianus
gcctcataactcacagcgggaatat

SEQ ID NO: 19091 - DNA, 25 bp, Saccharomyces pastorianus
gaatatgttattcccaacgtggttc

SEQ ID NO: 19092 - DNA, 25 bp, Saccharomyces pastorianus
attctgcctaatttgataccctcga

SEQ ID NO: 19093 - DNA, 25 bp, Saccharomyces pastorianus
agatcgagcccaccactgaaatatt

SEQ ID NO: 19094 - DNA, 25 bp, Saccharomyces pastorianus
atttgtattcttccgtgtttctcta

SEQ ID NO: 19095 - DNA, 25 bp, Saccharomyces pastorianus
gtgccattgagctagaacctgcgtt

SEQ ID NO: 19096 - DNA, 25 bp, Saccharomyces pastorianus
taaagccttcacacatgcaacacta

SEQ ID NO: 19097 - DNA, 25 bp, Saccharomyces pastorianus
aaatccgcagttcagtacgtgtcag

SEQ ID NO: 19098 - DNA, 25 bp, Saccharomyces pastorianus
tatagtgccccgacatggaactgtc

SEQ ID NO: 19099 - DNA, 25 bp, Saccharomyces pastorianus
aactttatgcatgtttccaccgaca

SEQ ID NO: 19100 - DNA, 25 bp, Saccharomyces pastorianus
tagtcactgcatcaacgttccaaga

SEQ ID NO: 19101 - DNA, 25 bp, Saccharomyces pastorianus
acatgtgcgataccacggcggattt

SEQ ID NO: 19102 - DNA, 25 bp, Saccharomyces pastorianus
aaagtgactactacggcgacctagt

SEQ ID NO: 19103 - DNA, 25 bp, Saccharomyces pastorianus
tacagccggctgttcgagatcgata

SEQ ID NO: 19104 - DNA, 25 bp, Saccharomyces pastorianus
caagccaagtttgccggattcacct

SEQ ID NO: 19105 - DNA, 25 bp, Saccharomyces pastorianus
ataatgacagctacgccactatcgc

SEQ ID NO: 19106 - DNA, 25 bp, Saccharomyces pastorianus
agtcaagttccccagagacgtgttg

SEQ ID NO: 19107 - DNA, 25 bp, Saccharomyces pastorianus
cccatccgtacttcgcagatattga

SEQ ID NO: 19108 - DNA, 25 bp, Saccharomyces pastorianus
caagcatagactgggcgccatcgat

SEQ ID NO: 19109 - DNA, 25 bp, Saccharomyces pastorianus
gacagcatccacctcgtatatgaac

SEQ ID NO: 19110 - DNA, 25 bp, Saccharomyces pastorianus
aacagcaattcacacatcgattttg

SEQ ID NO: 19111 - DNA, 25 bp, Saccharomyces pastorianus
gaagcagaagagaatcccaccacct

SEQ ID NO: 19112 - DNA, 25 bp, Saccharomyces pastorianus
tttgacccggagttcacgacagcat

SEQ ID NO: 19113 - DNA, 25 bp, Saccharomyces pastorianus
gattcacctttgtcgatgagtctgc

SEQ ID NO: 19114 - DNA, 25 bp, Saccharomyces pastorianus
gggagatcctttgtcaagggcctat

SEQ ID NO: 19115 - DNA, 25 bp, Saccharomyces pastorianus
gtaccacattcttcaatgggctcta

SEQ ID NO: 19116 - DNA, 25 bp, Saccharomyces pastorianus
atcaacaactgttccatgctcaaca

SEQ ID NO: 19117 - DNA, 25 bp, Saccharomyces pastorianus
gatttgattacctacttacagcatg

SEQ ID NO: 19118 - DNA, 25 bp, Saccharomyces pastorianus
gtgccacggctacatctatcgtaag

SEQ ID NO: 19119 - DNA, 25 bp, Saccharomyces pastorianus
atggtctttcggctatttcaacgct

SEQ ID NO: 19120 - DNA, 25 bp, Saccharomyces pastorianus
gctagaccagacgtatccataccga

SEQ ID NO: 19121 - DNA, 25 bp, Saccharomyces pastorianus
gtctgcgcagcacggtcaacaagaa

SEQ ID NO: 19122 - DNA, 25 bp, Saccharomyces pastorianus
ttggccaagccattcacgagagacg

SEQ ID NO: 19123 - DNA, 25 bp, Saccharomyces pastorianus
atgtaagcagcagttaccaccgcgc

SEQ ID NO: 19124 - DNA, 25 bp, Saccharomyces pastorianus
taatccgtctactacaacacctgtt

SEQ ID NO: 19125 - DNA, 25 bp, Saccharomyces pastorianus
ggatcgcattcctttatgtaagcag

SEQ ID NO: 19126 - DNA, 25 bp, Saccharomyces pastorianus
atgtcagtgtgaccgttgccgaaat

SEQ ID NO: 19127 - DNA, 25 bp, Saccharomyces pastorianus
gacactagtgacgatactcctggta

SEQ ID NO: 19128 - DNA, 25 bp, Saccharomyces pastorianus
aaaatcgtctatgcgggaggctcag

SEQ ID NO: 19129 - DNA, 25 bp, Saccharomyces pastorianus
cgttgccgaaatgagttgtctactt

SEQ ID NO: 19130 - DNA, 25 bp, Saccharomyces pastorianus
gcgtcacttacgtaaatcccttaca

SEQ ID NO: 19131 - DNA, 25 bp, Saccharomyces pastorianus
ttattctgtggtgctttccctaaag

SEQ ID NO: 19132 - DNA, 25 bp, Saccharomyces pastorianus
gaaagtgtgaccaccaatttggcta

SEQ ID NO: 19133 - DNA, 25 bp, Saccharomyces pastorianus
aaccatgattgggacgttcaacatt

SEQ ID NO: 19134 - DNA, 25 bp, Saccharomyces pastorianus
gagcaagtttgcgtcacttacgtaa

SEQ ID NO: 19135 - DNA, 25 bp, Saccharomyces pastorianus
ggctaaggttgattctgatgacact

SEQ ID NO: 19136 - DNA, 25 bp, Saccharomyces pastorianus
ttggcactcattcatgaaccacgat

SEQ ID NO: 19137 - DNA, 25 bp, Saccharomyces pastorianus
gaaagagttggttactgccccatta

SEQ ID NO: 19138 - DNA, 25 bp, Saccharomyces pastorianus
tttgaccaagcaagtcgcccaatgg

SEQ ID NO: 19139 - DNA, 25 bp, Saccharomyces pastorianus
cacttctccagttggtccttattac

SEQ ID NO: 19140 - DNA, 25 bp, Saccharomyces pastorianus
tatcaatgttccattattgcctggt

SEQ ID NO: 19141 - DNA, 25 bp, Saccharomyces pastorianus
tgccccattagacggtactatcttg

SEQ ID NO: 19142 - DNA, 25 bp, Saccharomyces pastorianus
ctgctgttgtctcaccaatcaagga

SEQ ID NO: 19143 - DNA, 25 bp, Saccharomyces pastorianus
gattctgttttgagtttggctcgtg

SEQ ID NO: 19144 - DNA, 25 bp, Saccharomyces pastorianus
tatgctccatgtatcttacctcaat

SEQ ID NO: 19145 - DNA, 25 bp, Saccharomyces pastorianus
agtcggcaccatgaacgtgttcttc

SEQ ID NO: 19146 - DNA, 25 bp, Saccharomyces pastorianus
gtgagcaatctggtgctttgaccaa

SEQ ID NO: 19147 - DNA, 25 bp, Saccharomyces pastorianus
tcttacctcaattgcaagctgctaa

SEQ ID NO: 19148 - DNA, 25 bp, Saccharomyces pastorianus
ggagcatatacgcttcttggattag

SEQ ID NO: 19149 - DNA, 25 bp, Saccharomyces pastorianus
gttatcagcgcggaggcaattcatt

SEQ ID NO: 19150 - DNA, 25 bp, Saccharomyces pastorianus
taacgcccttggtgaagacttatcc

SEQ ID NO: 19151 - DNA, 25 bp, Saccharomyces pastorianus
gcgataacttggacttacctttgaa

SEQ ID NO: 19152 - DNA, 25 bp, Saccharomyces pastorianus
aaaataaatttctctggcgcacaac

SEQ ID NO: 19153 - DNA, 25 bp, Saccharomyces pastorianus
gaaatgctacgttctttattaccag

SEQ ID NO: 19154 - DNA, 25 bp, Saccharomyces pastorianus
agaggcttgtcattgcgataacttg

SEQ ID NO: 19155 - DNA, 25 bp, Saccharomyces pastorianus
ggcgcacaactatcactttgacaca

SEQ ID NO: 19156 - DNA, 25 bp, Saccharomyces pastorianus
gatgtcgaggtctccatttataacc

SEQ ID NO: 19157 - DNA, 25 bp, Saccharomyces pastorianus
atttataacccttcagacccagata

SEQ ID NO: 19158 - DNA, 25 bp, Saccharomyces pastorianus
ggattttactccagaagcgtcaaat

SEQ ID NO: 19159 - DNA, 25 bp, Saccharomyces pastorianus
caattccaggtcaagctttgctatt

SEQ ID NO: 19160 - DNA, 25 bp, Saccharomyces pastorianus
cattcttgcaggttgggtttccgaa

SEQ ID NO: 19161 - DNA, 25 bp, Saccharomyces pastorianus
caccttacatgtcgctgatcttgaa

SEQ ID NO: 19162 - DNA, 25 bp, Saccharomyces pastorianus
tactcactggtgtacttggtcttcc

SEQ ID NO: 19163 - DNA, 25 bp, Saccharomyces pastorianus
ttgggtgcttccttttattgtttct

SEQ ID NO: 19164 - DNA, 25 bp, Saccharomyces pastorianus
aagcatgaatttctccacctttctt

SEQ ID NO: 19165 - DNA, 25 bp, Saccharomyces pastorianus
ggcagttgccacaaagttctactat

SEQ ID NO: 19166 - DNA, 25 bp, Saccharomyces pastorianus
tattgtttctttagtcgctttgcca

SEQ ID NO: 19167 - DNA, 25 bp, Saccharomyces pastorianus
aaattcggtgagatcgcgtgcgata

SEQ ID NO: 19168 - DNA, 25 bp, Saccharomyces pastorianus
ttacttggacactactactgatcta

SEQ ID NO: 19169 - DNA, 25 bp, Saccharomyces pastorianus
ggctcttctaggatttgcttgtttc

SEQ ID NO: 19170 - DNA, 25 bp, Saccharomyces pastorianus
tgcaggtaatgcgtctcaggtctct

SEQ ID NO: 19171 - DNA, 25 bp, Saccharomyces pastorianus
gaaatcaacgaagcctttgccgctc

SEQ ID NO: 19172 - DNA, 25 bp, Saccharomyces pastorianus
taacgtcacggcagaatcacttggg

SEQ ID NO: 19173 - DNA, 25 bp, Saccharomyces pastorianus
cagacggcacggttttccagaaaga

SEQ ID NO: 19174 - DNA, 25 bp, Saccharomyces pastorianus
gccgctcaagctttatactgtatcc

SEQ ID NO: 19175 - DNA, 25 bp, Saccharomyces pastorianus
tcaggtctctgatggtgtcgccggt

SEQ ID NO: 19176 - DNA, 25 bp, Saccharomyces pastorianus
ttgggagcatcaagcctgcgtttat

SEQ ID NO: 19177 - DNA, 25 bp, Saccharomyces pastorianus
aaccagttggatttgcccgtgctag

SEQ ID NO: 19178 - DNA, 25 bp, Saccharomyces pastorianus
gacagaggcactaccactgcaggta

SEQ ID NO: 19179 - DNA, 25 bp, Saccharomyces pastorianus
accggcgcaagacaagtggctacta

SEQ ID NO: 19180 - DNA, 25 bp, Saccharomyces pastorianus
agtaaaccccagaggtggtgccatc

SEQ ID NO: 19181 - DNA, 25 bp, Saccharomyces pastorianus
cattcattgaatttttggccatgtt

SEQ ID NO: 19182 - DNA, 25 bp, Saccharomyces pastorianus
gcggtcactcagtttcagacaggaa

SEQ ID NO: 19183 - DNA, 25 bp, Saccharomyces pastorianus
aagattgaaaatgcggtcactcagt

SEQ ID NO: 19184 - DNA, 25 bp, Saccharomyces pastorianus
ggtgaagaccacgtactgtttgaga

SEQ ID NO: 19185 - DNA, 25 bp, Saccharomyces pastorianus
gtcaaattcaagatcaatcgggcta

SEQ ID NO: 19186 - DNA, 25 bp, Saccharomyces pastorianus
tgatctctaaattgcgtgaagtaaa

SEQ ID NO: 19187 - DNA, 25 bp, Saccharomyces pastorianus
gatgctgttgatttattgatctcta

SEQ ID NO: 19188 - DNA, 25 bp, Saccharomyces pastorianus
gaaggactcggaaccattaagaaga

SEQ ID NO: 19189 - DNA, 25 bp, Saccharomyces pastorianus
aattggaatgccgtgaatttcagca

SEQ ID NO: 19190 - DNA, 25 bp, Saccharomyces pastorianus
ggtgaagatcccaatgacaaagaaa

SEQ ID NO: 19191 - DNA, 25 bp, Saccharomyces pastorianus
accaaactcaacgaaatcactgtga

SEQ ID NO: 19192 - DNA, 25 bp, Saccharomyces pastorianus
gtccctgtcattttcagcggtgaga

SEQ ID NO: 19193 - DNA, 25 bp, Saccharomyces pastorianus
cgtgggcgtaacaatagctctgata

SEQ ID NO: 19194 - DNA, 25 bp, Saccharomyces pastorianus
acacgatcaataccagtctgcacga

SEQ ID NO: 19195 - DNA, 25 bp, Saccharomyces pastorianus
gaagtggctgtgtccgtatatgaaa

SEQ ID NO: 19196 - DNA, 25 bp, Saccharomyces pastorianus
gaacaagatctcaagccctgcgagg

SEQ ID NO: 19197 - DNA, 25 bp, Saccharomyces pastorianus
gtaggtacgactgttggaattccaa

SEQ ID NO: 19198 - DNA, 25 bp, Saccharomyces pastorianus
gagccgcttatatcaatgtccctgt

SEQ ID NO: 19199 - DNA, 25 bp, Saccharomyces pastorianus
agaacactcctagtcgtcgagctaa

SEQ ID NO: 19200 - DNA, 25 bp, Saccharomyces pastorianus
atgtacccattgactttgacgcgca

SEQ ID NO: 19201 - DNA, 25 bp, Saccharomyces pastorianus
taaaaaaccacagggagccgcttat

SEQ ID NO: 19202 - DNA, 25 bp, Saccharomyces pastorianus
tacaccggcgtataggcgacaattg

SEQ ID NO: 19203 - DNA, 25 bp, Saccharomyces pastorianus
aacttctgcacctgcatcaacgacg

SEQ ID NO: 19204 - DNA, 25 bp, Saccharomyces pastorianus
tcatcctgggcaccttgcagaactt

SEQ ID NO: 19205 - DNA, 25 bp, Saccharomyces pastorianus
atgcagctgctcaccaagggcgccg

SEQ ID NO: 19206 - DNA, 25 bp, Saccharomyces pastorianus
tcatgggcgccgtgctcaaccaggg

SEQ ID NO: 19207 - DNA, 25 bp, Saccharomyces pastorianus
gtacgtcagggccatgcagctgctc

SEQ ID NO: 19208 - DNA, 25 bp, Saccharomyces pastorianus
gaatccgcaaacacgtcatgcacct

SEQ ID NO: 19209 - DNA, 25 bp, Saccharomyces pastorianus
gcatgaaagtgctccccaacttctg

SEQ ID NO: 19210 - DNA, 25 bp, Saccharomyces pastorianus
tacgacctgggcatgaaagtgctcc

SEQ ID NO: 19211 - DNA, 25 bp, Saccharomyces pastorianus
ccaccctcgctgtcagaaagaaact

SEQ ID NO: 19212 - DNA, 25 bp, Saccharomyces pastorianus
gcatcaacgacgtgctggactccag

SEQ ID NO: 19213 - DNA, 25 bp, Saccharomyces pastorianus
aaatgctcgccaacgtcgccagaat

SEQ ID NO: 19214 - DNA, 25 bp, Saccharomyces pastorianus
aggacctccgttgccaaagctagtt

SEQ ID NO: 19215 - DNA, 25 bp, Saccharomyces pastorianus
gcaactacatagctccgtcaaggac

SEQ ID NO: 19216 - DNA, 25 bp, Saccharomyces pastorianus
aaatacgccatcacagagctcagga

SEQ ID NO: 19217 - DNA, 25 bp, Saccharomyces pastorianus
ggatgcccagcaggataacagccac

SEQ ID NO: 19218 - DNA, 25 bp, Saccharomyces pastorianus
ataaactcagtaacgctggcgcctc

SEQ ID NO: 19219 - DNA, 25 bp, Saccharomyces pastorianus
caattattcacgacctatctcatac

SEQ ID NO: 19220 - DNA, 25 bp, Saccharomyces pastorianus
tgctcataaagctcccgacgaaaga

SEQ ID NO: 19221 - DNA, 25 bp, Saccharomyces pastorianus
ggcgcctcactagtgatcgattcaa

SEQ ID NO: 19222 - DNA, 25 bp, Saccharomyces pastorianus
aattcatcggccctcatggaagcaa

SEQ ID NO: 19223 - DNA, 25 bp, Saccharomyces pastorianus
cagtccataagttctctatcctggt

SEQ ID NO: 19224 - DNA, 25 bp, Saccharomyces pastorianus
tacagactccagacttgtttcgcaa

SEQ ID NO: 19225 - DNA, 25 bp, Saccharomyces pastorianus
tacttggaagacacacgttgacgaa

SEQ ID NO: 19226 - DNA, 25 bp, Saccharomyces pastorianus
ttcgtggttaagacatttcgcacat

SEQ ID NO: 19227 - DNA, 25 bp, Saccharomyces pastorianus
ggccgtgccaaggaatttgcagttt

SEQ ID NO: 19228 - DNA, 25 bp, Saccharomyces pastorianus
agtcattatacgatgctagcactaa

SEQ ID NO: 19229 - DNA, 25 bp, Saccharomyces pastorianus
ttgtcattgacgctacttcgtggtt

SEQ ID NO: 19230 - DNA, 25 bp, Saccharomyces pastorianus
gatgctattgctaggctgaaccaaa

SEQ ID NO: 19231 - DNA, 25 bp, Saccharomyces pastorianus
attgttcggtttactttgtcattga

SEQ ID NO: 19232 - DNA, 25 bp, Saccharomyces pastorianus
agaattacgctatttgagaggctca

SEQ ID NO: 19233 - DNA, 25 bp, Saccharomyces pastorianus
caaggtctgtgattactattaggca

SEQ ID NO: 19234 - DNA, 25 bp, Saccharomyces pastorianus
tcgcacatattttcaagttagccaa

SEQ ID NO: 19235 - DNA, 25 bp, Saccharomyces pastorianus
gtttacagggaatatagccacgcat

SEQ ID NO: 19236 - DNA, 25 bp, Saccharomyces pastorianus
gatttgatccgacccatgggaaaat

SEQ ID NO: 19237 - DNA, 25 bp, Saccharomyces pastorianus
gagaaagtcatcctggcaccttcaa

SEQ ID NO: 19238 - DNA, 25 bp, Saccharomyces pastorianus
aacgggactgattcaacgtctagga

SEQ ID NO: 19239 - DNA, 25 bp, Saccharomyces pastorianus
gagagtccaagaacaaccgcgttaa

SEQ ID NO: 19240 - DNA, 25 bp, Saccharomyces pastorianus
gagagtgctctccaaacgggactga

SEQ ID NO: 19241 - DNA, 25 bp, Saccharomyces pastorianus
gtagattctcaacctagtttataca

SEQ ID NO: 19242 - DNA, 25 bp, Saccharomyces pastorianus
aaagtgcttaagtcctctgttcccg

SEQ ID NO: 19243 - DNA, 25 bp, Saccharomyces pastorianus
gtcattaatgatctcctacagtaca

SEQ ID NO: 19244 - DNA, 25 bp, Saccharomyces pastorianus
gaagtacccgtaaaggtctctctga

SEQ ID NO: 19245 - DNA, 25 bp, Saccharomyces pastorianus
ctgttcccggcggagagtccaagaa

SEQ ID NO: 19246 - DNA, 25 bp, Saccharomyces pastorianus
aatccacagcattgagccgtgagct

SEQ ID NO: 19247 - DNA, 25 bp, Saccharomyces pastorianus
aaccctgatttttccgttgatgaat

SEQ ID NO: 19248 - DNA, 25 bp, Saccharomyces pastorianus
cttttctttctttggattcttctag

SEQ ID NO: 19249 - DNA, 25 bp, Saccharomyces pastorianus
atcaggtccttcaattcgcaatcgt

SEQ ID NO: 19250 - DNA, 25 bp, Saccharomyces pastorianus
tcgcaatcgtctttactagcttctt

SEQ ID NO: 19251 - DNA, 25 bp, Saccharomyces pastorianus
gataaacttcaattcggacggattc

SEQ ID NO: 19252 - DNA, 25 bp, Saccharomyces pastorianus
tgaccgctctgtacaggcctttgaa

SEQ ID NO: 19253 - DNA, 25 bp, Saccharomyces pastorianus
agagacacggttaactcggctacca

SEQ ID NO: 19254 - DNA, 25 bp, Saccharomyces pastorianus
atgaatgatttcttcctgaccgctc

SEQ ID NO: 19255 - DNA, 25 bp, Saccharomyces pastorianus
aagatctgtctttggaatacgtgca

SEQ ID NO: 19256 - DNA, 25 bp, Saccharomyces pastorianus
gtaacatactttgtcaccgcagcat

SEQ ID NO: 19257 - DNA, 25 bp, Saccharomyces pastorianus
gggcgtttcaatcactattgggata

SEQ ID NO: 19258 - DNA, 25 bp, Saccharomyces pastorianus
cgaaggttcgttggctggtcttgct

SEQ ID NO: 19259 - DNA, 25 bp, Saccharomyces pastorianus
gatacgtccattgatttaccggagg

SEQ ID NO: 19260 - DNA, 25 bp, Saccharomyces pastorianus
aaacattccaaacctggcatacgcc

SEQ ID NO: 19261 - DNA, 25 bp, Saccharomyces pastorianus
atacgcctcgccaagggaacgtaga

SEQ ID NO: 19262 - DNA, 25 bp, Saccharomyces pastorianus
ggtttccaaggatactcaagagatg

SEQ ID NO: 19263 - DNA, 25 bp, Saccharomyces pastorianus
gccggtgatgatgctgacaattctg

SEQ ID NO: 19264 - DNA, 25 bp, Saccharomyces pastorianus
atgtttaatccaaatctcttcgcac

SEQ ID NO: 19265 - DNA, 25 bp, Saccharomyces pastorianus
tttaccggaggctacatgtttaatc

SEQ ID NO: 19266 - DNA, 25 bp, Saccharomyces pastorianus
gggagaggctcaaacggtcacaaga

SEQ ID NO: 19267 - DNA, 25 bp, Saccharomyces pastorianus
gagacaagctttccttgtagatcaa

SEQ ID NO: 19268 - DNA, 25 bp, Saccharomyces pastorianus
aatgcattcttttactccttggttt

SEQ ID NO: 19269 - DNA, 25 bp, Saccharomyces pastorianus
agcagtcgtgagctcagcatccgaa

SEQ ID NO: 19270 - DNA, 25 bp, Saccharomyces pastorianus
gagtggacaacatcatccgtgccag

SEQ ID NO: 19271 - DNA, 25 bp, Saccharomyces pastorianus
aaagccgtggacactcaagcgcaaa

SEQ ID NO: 19272 - DNA, 25 bp, Saccharomyces pastorianus
aacagtcttaggtggcggttgcgcc

SEQ ID NO: 19273 - DNA, 25 bp, Saccharomyces pastorianus
gtgccttaagacagctgccaactat

SEQ ID NO: 19274 - DNA, 25 bp, Saccharomyces pastorianus
gtgctgtcccagaccactaaggaaa

SEQ ID NO: 19275 - DNA, 25 bp, Saccharomyces pastorianus
gaggtgccaccgaacagatgctaga

SEQ ID NO: 19276 - DNA, 25 bp, Saccharomyces pastorianus
atccgaagccgctgaggtgctatta

SEQ ID NO: 19277 - DNA, 25 bp, Saccharomyces pastorianus
tgagagatccttacacgacgcattg

SEQ ID NO: 19278 - DNA, 25 bp, Saccharomyces pastorianus
gaggcctgtaccatcgttttaagag

SEQ ID NO: 19279 - DNA, 25 bp, Saccharomyces pastorianus
aagtggtgtccacgttcgacgagcc

SEQ ID NO: 19280 - DNA, 25 bp, Saccharomyces pastorianus
cttgccagattctcgttctgtaaca

SEQ ID NO: 19281 - DNA, 25 bp, Saccharomyces pastorianus
ttaccagcagttcctgacggtgtca

SEQ ID NO: 19282 - DNA, 25 bp, Saccharomyces pastorianus
aactatttgacttggatgtgccgcc

SEQ ID NO: 19283 - DNA, 25 bp, Saccharomyces pastorianus
aaatggtaaccttcccttgccagat

SEQ ID NO: 19284 - DNA, 25 bp, Saccharomyces pastorianus
tacatggacagtgagccggccgtaa

SEQ ID NO: 19285 - DNA, 25 bp, Saccharomyces pastorianus
agatcttcttcagtttacatggaca

SEQ ID NO: 19286 - DNA, 25 bp, Saccharomyces pastorianus
ggtaagactttctgctgggttcaca

SEQ ID NO: 19287 - DNA, 25 bp, Saccharomyces pastorianus
acaatgtcaacctcgtcttctgatg

SEQ ID NO: 19288 - DNA, 25 bp, Saccharomyces pastorianus
gtacgatgacgcatttcagtcccaa

SEQ ID NO: 19289 - DNA, 25 bp, Saccharomyces pastorianus
cgttactttgtcttcattggaccca

SEQ ID NO: 19290 - DNA, 25 bp, Saccharomyces pastorianus
gatatacgggcgacttaccagcagt

SEQ ID NO: 19291 - DNA, 25 bp, Saccharomyces pastorianus
aagcattgtctgctaagaacgagca

SEQ ID NO: 19292 - DNA, 25 bp, Saccharomyces pastorianus
gaaaactacaccaagaagaatcaag

SEQ ID NO: 19293 - DNA, 25 bp, Saccharomyces pastorianus
gagcagttcgatcatgaagtagaaa

SEQ ID NO: 19294 - DNA, 25 bp, Saccharomyces pastorianus
ttggctgaagactcgaacaatttaa

SEQ ID NO: 19295 - DNA, 25 bp, Saccharomyces pastorianus
tggctgaaactaaacaattggctga

SEQ ID NO: 19296 - DNA, 25 bp, Saccharomyces pastorianus
aattagagcatcaattggctgaaac

SEQ ID NO: 19297 - DNA, 25 bp, Saccharomyces pastorianus
ctcgaacaatttaaggtctcataat

SEQ ID NO: 19298 - DNA, 25 bp, Saccharomyces pastorianus
actagaatctgaatcatggcaggaa

SEQ ID NO: 19299 - DNA, 25 bp, Saccharomyces pastorianus
aaacgagatcaaagcattgtctgct

SEQ ID NO: 19300 - DNA, 25 bp, Saccharomyces pastorianus
agaagcagacttgaactctgagcaa

SEQ ID NO: 19301 - DNA, 25 bp, Saccharomyces pastorianus
atgggcagaaagatcgttgctttag

SEQ ID NO: 19302 - DNA, 25 bp, Saccharomyces pastorianus
gcgttattcgggttcaactacaact

SEQ ID NO: 19303 - DNA, 25 bp, Saccharomyces pastorianus
gttcacggacaatttcgaccaatgg

SEQ ID NO: 19304 - DNA, 25 bp, Saccharomyces pastorianus
attccatccttgttgtagtgtctca

SEQ ID NO: 19305 - DNA, 25 bp, Saccharomyces pastorianus
gtcaaacacagctcttgtgccggta

SEQ ID NO: 19306 - DNA, 25 bp, Saccharomyces pastorianus
gaagcatttccttggtaatctttca

SEQ ID NO: 19307 - DNA, 25 bp, Saccharomyces pastorianus
ggatgacatctggacttctgttcaa

SEQ ID NO: 19308 - DNA, 25 bp, Saccharomyces pastorianus
aggcgaccgtctgcacaaggtgttg

SEQ ID NO: 19309 - DNA, 25 bp, Saccharomyces pastorianus
gtgccggtatcacgaaccacattgt

SEQ ID NO: 19310 - DNA, 25 bp, Saccharomyces pastorianus
aagtcgttcgggaattgatctggaa

SEQ ID NO: 19311 - DNA, 25 bp, Saccharomyces pastorianus
gaagggcactactacaggcgaccgt

SEQ ID NO: 19312 - DNA, 25 bp, Saccharomyces pastorianus
atgtttgttccagatgagccagaaa

SEQ ID NO: 19313 - DNA, 25 bp, Saccharomyces pastorianus
ctgcggcccaactttctaaggatga

SEQ ID NO: 19314 - DNA, 25 bp, Saccharomyces pastorianus
ggacagcaaccctttgaatcgtttg

SEQ ID NO: 19315 - DNA, 25 bp, Saccharomyces pastorianus
tggacggccaaggtcgacaacgaca

SEQ ID NO: 19316 - DNA, 25 bp, Saccharomyces pastorianus
aagaggaacgcgtcttcgcagccta

SEQ ID NO: 19317 - DNA, 25 bp, Saccharomyces pastorianus
gctggttcggttacaacaagggcga

SEQ ID NO: 19318 - DNA, 25 bp, Saccharomyces pastorianus
agcagtacggtagccattggtggtc

SEQ ID NO: 19319 - DNA, 25 bp, Saccharomyces pastorianus
aagaacgtgaacagcggtagtaccg

SEQ ID NO: 19320 - DNA, 25 bp, Saccharomyces pastorianus
gatgacttcattgtccaaagccaag

SEQ ID NO: 19321 - DNA, 25 bp, Saccharomyces pastorianus
aaacgtgtcggacgcgatgacttca

SEQ ID NO: 19322 - DNA, 25 bp, Saccharomyces pastorianus
gtacgacgacgccaaggacaaattt

SEQ ID NO: 19323 - DNA, 25 bp, Saccharomyces pastorianus
tagtgaggcccaaaggcgtctcaac

SEQ ID NO: 19324 - DNA, 25 bp, Saccharomyces pastorianus
caaacatcatgactgggaagcccaa

SEQ ID NO: 19325 - DNA, 25 bp, Saccharomyces pastorianus
tcaggcaccgtccattcgagaagaa

SEQ ID NO: 19326 - DNA, 25 bp, Saccharomyces pastorianus
gaagaccgcctatgcaaaatcacta

SEQ ID NO: 19327 - DNA, 25 bp, Saccharomyces pastorianus
aagcccaaatccaagttccatatcg

SEQ ID NO: 19328 - DNA, 25 bp, Saccharomyces pastorianus
acatgggctttaccaaccctttcat

SEQ ID NO: 19329 - DNA, 25 bp, Saccharomyces pastorianus
aaactagaatcgcagctggctccgt

SEQ ID NO: 19330 - DNA, 25 bp, Saccharomyces pastorianus
agcgctggcgccgtgctatcaagat

SEQ ID NO: 19331 - DNA, 25 bp, Saccharomyces pastorianus
ttatgaatacgccttctcacttgcc

SEQ ID NO: 19332 - DNA, 25 bp, Saccharomyces pastorianus
gtcaccatcaattgctgtcaacaca

SEQ ID NO: 19333 - DNA, 25 bp, Saccharomyces pastorianus
ggcagtgaaggcttttcgtctgaag

SEQ ID NO: 19334 - DNA, 25 bp, Saccharomyces pastorianus
aaatcactactcgttttcgtcatca

SEQ ID NO: 19335 - DNA, 25 bp, Saccharomyces pastorianus
gaaatcacctcctttggcaaaatgg

SEQ ID NO: 19336 - DNA, 25 bp, Saccharomyces pastorianus
gtctgcaaacctagtacgagccatt

SEQ ID NO: 19337 - DNA, 25 bp, Saccharomyces pastorianus
ggtattgttcctgcactatttggtg

SEQ ID NO: 19338 - DNA, 25 bp, Saccharomyces pastorianus
agggcccgagcaaatccagcataaa

SEQ ID NO: 19339 - DNA, 25 bp, Saccharomyces pastorianus
gctatcttgacgaaccctatctggg

SEQ ID NO: 19340 - DNA, 25 bp, Saccharomyces pastorianus
gtgtccagcgattgctacgaaccga

SEQ ID NO: 19341 - DNA, 25 bp, Saccharomyces pastorianus
agtggactgttgacggctatcttga

SEQ ID NO: 19342 - DNA, 25 bp, Saccharomyces pastorianus
gggctcttacacttccatatacaat

SEQ ID NO: 19343 - DNA, 25 bp, Saccharomyces pastorianus
attcgcttatctacttatctgctgg

SEQ ID NO: 19344 - DNA, 25 bp, Saccharomyces pastorianus
aatggtatctgtcactttggtctac

SEQ ID NO: 19345 - DNA, 25 bp, Saccharomyces pastorianus
aatgacggcttcctgggactttata

SEQ ID NO: 19346 - DNA, 25 bp, Saccharomyces pastorianus
agaggccaccttcacgagataatat

SEQ ID NO: 19347 - DNA, 25 bp, Saccharomyces pastorianus
agatacctcacctgataccgaaatt

SEQ ID NO: 19348 - DNA, 25 bp, Saccharomyces pastorianus
agaggttctaacagctttctttcaa

SEQ ID NO: 19349 - DNA, 25 bp, Saccharomyces pastorianus
atattcttggcgtatttgatcagct

SEQ ID NO: 19350 - DNA, 25 bp, Saccharomyces pastorianus
aacttccgcatgagtattgacaaca

SEQ ID NO: 19351 - DNA, 25 bp, Saccharomyces pastorianus
tttctttcaaccgatattgcacttg

SEQ ID NO: 19352 - DNA, 25 bp, Saccharomyces pastorianus
atgcttgatgctacagatgacgttt

SEQ ID NO: 19353 - DNA, 25 bp, Saccharomyces pastorianus
ggctttgctcaatggcagaggccac

SEQ ID NO: 19354 - DNA, 25 bp, Saccharomyces pastorianus
cagctagatgctcaactttttggga

SEQ ID NO: 19355 - DNA, 25 bp, Saccharomyces pastorianus
ttgcacttgatgataaccaccaacg

SEQ ID NO: 19356 - DNA, 25 bp, Saccharomyces pastorianus
aatagctccaatccagttatcacaa

SEQ ID NO: 19357 - DNA, 25 bp, Saccharomyces pastorianus
gcgatttgtttccacttttattgca

SEQ ID NO: 19358 - DNA, 25 bp, Saccharomyces pastorianus
caattacctgactgcgttatcgcta

SEQ ID NO: 19359 - DNA, 25 bp, Saccharomyces pastorianus
caagccagttagtgggtccgttcat

SEQ ID NO: 19360 - DNA, 25 bp, Saccharomyces pastorianus
gttgttaacattagttccctacaga

SEQ ID NO: 19361 - DNA, 25 bp, Saccharomyces pastorianus
ttcggtgatattttccagactctag

SEQ ID NO: 19362 - DNA, 25 bp, Saccharomyces pastorianus
ttatcccttgttcttccgcaaaaat

SEQ ID NO: 19363 - DNA, 25 bp, Saccharomyces pastorianus
gtattgaaacacactccaagccagt

SEQ ID NO: 19364 - DNA, 25 bp, Saccharomyces pastorianus
tagttccattatcgttatcccttgt

SEQ ID NO: 19365 - DNA, 25 bp, Saccharomyces pastorianus
ggtccgttcattagcgatttgtttc

SEQ ID NO: 19366 - DNA, 25 bp, Saccharomyces pastorianus
ttgtggtcccattaaattattgcct

SEQ ID NO: 19367 - DNA, 25 bp, Saccharomyces pastorianus
ggctagtgccggttttatctgataa

SEQ ID NO: 19368 - DNA, 25 bp, Saccharomyces pastorianus
gaagcgtcagaattccaagcaactt

SEQ ID NO: 19369 - DNA, 25 bp, Saccharomyces pastorianus
tcattctcccttagtgaagcgtcag

SEQ ID NO: 19370 - DNA, 25 bp, Saccharomyces pastorianus
cttctgctgttaatgggctgctgtt

SEQ ID NO: 19371 - DNA, 25 bp, Saccharomyces pastorianus
agtctcgaccatgaaggcggacaga

SEQ ID NO: 19372 - DNA, 25 bp, Saccharomyces pastorianus
aatgggctgctgttgagtcttttgc

SEQ ID NO: 19373 - DNA, 25 bp, Saccharomyces pastorianus
ttgacaccgggattggcccctgtag

SEQ ID NO: 19374 - DNA, 25 bp, Saccharomyces pastorianus
gaaggtactttgactgagcatgaaa

SEQ ID NO: 19375 - DNA, 25 bp, Saccharomyces pastorianus
ttgcccggcgttcctaaagtcagag

SEQ ID NO: 19376 - DNA, 25 bp, Saccharomyces pastorianus
aagagcgactagagcaactggcgaa

SEQ ID NO: 19377 - DNA, 25 bp, Saccharomyces pastorianus
cataggtacccaggtttgacaccgg

SEQ ID NO: 19378 - DNA, 25 bp, Saccharomyces pastorianus
gcgattctgctagagaccataggta

SEQ ID NO: 19379 - DNA, 25 bp, Saccharomyces pastorianus
agcaattgttacgtcatccactagc

SEQ ID NO: 19380 - DNA, 25 bp, Saccharomyces pastorianus
ctacgccagccaacttatttcatat

SEQ ID NO: 19381 - DNA, 25 bp, Saccharomyces pastorianus
taggcgataaaaccactgctttctt

SEQ ID NO: 19382 - DNA, 25 bp, Saccharomyces pastorianus
attcgctcaactacgtgactctttg

SEQ ID NO: 19383 - DNA, 25 bp, Saccharomyces pastorianus
gatcctcgctatctgagttttctga

SEQ ID NO: 19384 - DNA, 25 bp, Saccharomyces pastorianus
gcaaggcattgcatgtggtcgaaga

SEQ ID NO: 19385 - DNA, 25 bp, Saccharomyces pastorianus
gtaatttccaagtcgtgtatccaac

SEQ ID NO: 19386 - DNA, 25 bp, Saccharomyces pastorianus
tgaagaactacatcctttcccattc

SEQ ID NO: 19387 - DNA, 25 bp, Saccharomyces pastorianus
ggcgctattcttctctaagcaattg

SEQ ID NO: 19388 - DNA, 25 bp, Saccharomyces pastorianus
aacatcgtcagttccgtaagccttt

SEQ ID NO: 19389 - DNA, 25 bp, Saccharomyces pastorianus
acgtgactctttgaactcttatcca

SEQ ID NO: 19390 - DNA, 25 bp, Saccharomyces pastorianus
agtgctatttgttccctactgggta

SEQ ID NO: 19391 - DNA, 25 bp, Saccharomyces pastorianus
gtagtatctattccgcttccaaagc

SEQ ID NO: 19392 - DNA, 25 bp, Saccharomyces pastorianus
tgggccaacctcatgcgtttagtag

SEQ ID NO: 19393 - DNA, 25 bp, Saccharomyces pastorianus
gtcagagttgtacttttgccgcagt

SEQ ID NO: 19394 - DNA, 25 bp, Saccharomyces pastorianus
atgtcggctgaagcttacgccaagc

SEQ ID NO: 19395 - DNA, 25 bp, Saccharomyces pastorianus
taacattccccttcggtagtatcta

SEQ ID NO: 19396 - DNA, 25 bp, Saccharomyces pastorianus
gacccttacctgaaacttccatata

SEQ ID NO: 19397 - DNA, 25 bp, Saccharomyces pastorianus
actatcgttttcactggttctcttg

SEQ ID NO: 19398 - DNA, 25 bp, Saccharomyces pastorianus
aagagtcatcaacgccattactggc

SEQ ID NO: 19399 - DNA, 25 bp, Saccharomyces pastorianus
agtggatgccactgatgctgtagtt

SEQ ID NO: 19400 - DNA, 25 bp, Saccharomyces pastorianus
gtggccaccgacattcatgacaaaa

SEQ ID NO: 19401 - DNA, 25 bp, Saccharomyces pastorianus
gtaccgttcaaacactgacaccgat

SEQ ID NO: 19402 - DNA, 25 bp, Saccharomyces pastorianus
cattgaactttggtgccgggtcgac

SEQ ID NO: 19403 - DNA, 25 bp, Saccharomyces pastorianus
actctggcggttctgatggttgtac

SEQ ID NO: 19404 - DNA, 25 bp, Saccharomyces pastorianus
aaggtggtagctcgctgccattgac

SEQ ID NO: 19405 - DNA, 25 bp, Saccharomyces pastorianus
ggatcggtaactgggctccattgaa

SEQ ID NO: 19406 - DNA, 25 bp, Saccharomyces pastorianus
aagccgcctacgtcgtttctgaatt

SEQ ID NO: 19407 - DNA, 25 bp, Saccharomyces pastorianus
aagactcctacttcacctgggaagg

SEQ ID NO: 19408 - DNA, 25 bp, Saccharomyces pastorianus
ggtcgactgacggtatcacatactt

SEQ ID NO: 19409 - DNA, 25 bp, Saccharomyces pastorianus
gtcaaaattgttgccgccgatgatt

SEQ ID NO: 19410 - DNA, 25 bp, Saccharomyces pastorianus
gttgatccctaacccaaacaatggc

SEQ ID NO: 19411 - DNA, 25 bp, Saccharomyces pastorianus
tgactgttgtcgaccaagactccta

SEQ ID NO: 19412 - DNA, 25 bp, Saccharomyces pastorianus
gatgaattcaaaccccgagtcccag

SEQ ID NO: 19413 - DNA, 25 bp, Saccharomyces pastorianus
gctcgcaatatctctctttaaacca

SEQ ID NO: 19414 - DNA, 25 bp, Saccharomyces pastorianus
gtgtcggttacccacaaatgcatca

SEQ ID NO: 19415 - DNA, 25 bp, Saccharomyces pastorianus
agacacccgtgatgagctcgcaata

SEQ ID NO: 19416 - DNA, 25 bp, Saccharomyces pastorianus
ccatgcggaattctcaacacggttc

SEQ ID NO: 19417 - DNA, 25 bp, Saccharomyces pastorianus
agtccccgaggccacagaaggtata

SEQ ID NO: 19418 - DNA, 25 bp, Saccharomyces pastorianus
atatccgccgggtatgggaccgcaa

SEQ ID NO: 19419 - DNA, 25 bp, Saccharomyces pastorianus
caacatttccatggcgaacttccgg

SEQ ID NO: 19420 - DNA, 25 bp, Saccharomyces pastorianus
agatcggacatacccactgtatcag

SEQ ID NO: 19421 - DNA, 25 bp, Saccharomyces pastorianus
tgccggtgcctgcaaaccagtggat

SEQ ID NO: 19422 - DNA, 25 bp, Saccharomyces pastorianus
aaatgcatcagcaaccgggcgcata

SEQ ID NO: 19423 - DNA, 25 bp, Saccharomyces pastorianus
gaaacatcatcctcaaatcgcaaaa

SEQ ID NO: 19424 - DNA, 25 bp, Saccharomyces pastorianus
aagtagaaccctcattcatcagtcc

SEQ ID NO: 19425 - DNA, 25 bp, Saccharomyces pastorianus
gtggcagacgatgttcaatactatt

SEQ ID NO: 19426 - DNA, 25 bp, Saccharomyces pastorianus
attttcgttattgtcatcagcacca

SEQ ID NO: 19427 - DNA, 25 bp, Saccharomyces pastorianus
gaggccagccaaaaatactacccac

SEQ ID NO: 19428 - DNA, 25 bp, Saccharomyces pastorianus
accgcgggatccacaacagcaagaa

SEQ ID NO: 19429 - DNA, 25 bp, Saccharomyces pastorianus
ttcagtgctcactacggatatgatc

SEQ ID NO: 19430 - DNA, 25 bp, Saccharomyces pastorianus
catcgcctttctttcagcaaacaat

SEQ ID NO: 19431 - DNA, 25 bp, Saccharomyces pastorianus
taagtacgccagagcacattcggtc

SEQ ID NO: 19432 - DNA, 25 bp, Saccharomyces pastorianus
gagcacattcggtccagcatgaata

SEQ ID NO: 19433 - DNA, 25 bp, Saccharomyces pastorianus
aatgcctttacaactaccgcgggat

SEQ ID NO: 19434 - DNA, 25 bp, Saccharomyces pastorianus
caccagaggttatttcccggaagtg

SEQ ID NO: 19435 - DNA, 25 bp, Saccharomyces pastorianus
attactgaccactgtgaaggcgtta

SEQ ID NO: 19436 - DNA, 25 bp, Saccharomyces pastorianus
gcgattccttggagaacgtccagaa

SEQ ID NO: 19437 - DNA, 25 bp, Saccharomyces pastorianus
gcataatgctatgtttcagtatcga

SEQ ID NO: 19438 - DNA, 25 bp, Saccharomyces pastorianus
cgacagtaaacacatcacgctatct

SEQ ID NO: 19439 - DNA, 25 bp, Saccharomyces pastorianus
gcctgtggtaagacctcgttactga

SEQ ID NO: 19440 - DNA, 25 bp, Saccharomyces pastorianus
agtatcgattcacgcgattccttgg

SEQ ID NO: 19441 - DNA, 25 bp, Saccharomyces pastorianus
attcatgatatctttgtcgacagta

SEQ ID NO: 19442 - DNA, 25 bp, Saccharomyces pastorianus
gtcatattcagatacccaatgcata

SEQ ID NO: 19443 - DNA, 25 bp, Saccharomyces pastorianus
tcccggaagtgtacgaacccactgt

SEQ ID NO: 19444 - DNA, 25 bp, Saccharomyces pastorianus
gttactgaacgtcttcaccagaggt

SEQ ID NO: 19445 - DNA, 25 bp, Saccharomyces pastorianus
aactgtgaggctgtaccgtgcctaa

SEQ ID NO: 19446 - DNA, 25 bp, Saccharomyces pastorianus
ggaaattctgccctttgatgtagtt

SEQ ID NO: 19447 - DNA, 25 bp, Saccharomyces pastorianus
taaggcgcgcttatgacctgctgaa

SEQ ID NO: 19448 - DNA, 25 bp, Saccharomyces pastorianus
taccggtgggagcacgattccgaca

SEQ ID NO: 19449 - DNA, 25 bp, Saccharomyces pastorianus
aagacttgcagacgcaggtgccctc

SEQ ID NO: 19450 - DNA, 25 bp, Saccharomyces pastorianus
ggagcgcatctatctgttctcggag

SEQ ID NO: 19451 - DNA, 25 bp, Saccharomyces pastorianus
atcgggacggatctggccttgctaa

SEQ ID NO: 19452 - DNA, 25 bp, Saccharomyces pastorianus
tacactgccagtgtggactgtcgag

SEQ ID NO: 19453 - DNA, 25 bp, Saccharomyces pastorianus
tgaagttccaccacttgagcctaag

SEQ ID NO: 19454 - DNA, 25 bp, Saccharomyces pastorianus
tgtgcaaagtgtacccgaagggccc

SEQ ID NO: 19455 - DNA, 25 bp, Saccharomyces pastorianus
catcgagtactatcactaccggtgg

SEQ ID NO: 19456 - DNA, 25 bp, Saccharomyces pastorianus
gcctcacggaaaagacgcttcatga

SEQ ID NO: 19457 - DNA, 25 bp, Saccharomyces pastorianus
ccatggcatggatcaactgggatga

SEQ ID NO: 19458 - DNA, 25 bp, Saccharomyces pastorianus
gattcttaccgctgtactattacgt

SEQ ID NO: 19459 - DNA, 25 bp, Saccharomyces pastorianus
atttgctctcaaaggatggacattc

SEQ ID NO: 19460 - DNA, 25 bp, Saccharomyces pastorianus
acttggcctccctttggaatatgtt

SEQ ID NO: 19461 - DNA, 25 bp, Saccharomyces pastorianus
agatttgcaagtagcctcacggaaa

SEQ ID NO: 19462 - DNA, 25 bp, Saccharomyces pastorianus
gaagccagacattcccataacaata

SEQ ID NO: 19463 - DNA, 25 bp, Saccharomyces pastorianus
ttcgacggcgttgatttggatacta

SEQ ID NO: 19464 - DNA, 25 bp, Saccharomyces pastorianus
gaaatttcctgttgatccaacccac

SEQ ID NO: 19465 - DNA, 25 bp, Saccharomyces pastorianus
aacatcgtatgagcatatccactat

SEQ ID NO: 19466 - DNA, 25 bp, Saccharomyces pastorianus
aaatttattaatttgcccatggcat

SEQ ID NO: 19467 - DNA, 25 bp, Saccharomyces pastorianus
gactatgggcttcgagcactttggt

SEQ ID NO: 19468 - DNA, 25 bp, Saccharomyces pastorianus
gaagctgggttaccactacaaactg

SEQ ID NO: 19469 - DNA, 25 bp, Saccharomyces pastorianus
agtcgttttgcctcaacctctcaat

SEQ ID NO: 19470 - DNA, 25 bp, Saccharomyces pastorianus
cccgatgtctactcattgcatgata

SEQ ID NO: 19471 - DNA, 25 bp, Saccharomyces pastorianus
ttggcactcaggatattttcgacat

SEQ ID NO: 19472 - DNA, 25 bp, Saccharomyces pastorianus
atgctgttccggctttagtatttga

SEQ ID NO: 19473 - DNA, 25 bp, Saccharomyces pastorianus
aagtgaacctgttaaccatgcatct

SEQ ID NO: 19474 - DNA, 25 bp, Saccharomyces pastorianus
aagatggtgaaaccaccgccacagt

SEQ ID NO: 19475 - DNA, 25 bp, Saccharomyces pastorianus
aaccagctaagaaaccatgacgata

SEQ ID NO: 19476 - DNA, 25 bp, Saccharomyces pastorianus
gtgcctccgctttgaacattttaga

SEQ ID NO: 19477 - DNA, 25 bp, Saccharomyces pastorianus
ttgttccaagtgatcatcgtgcctc

SEQ ID NO: 19478 - DNA, 25 bp, Saccharomyces pastorianus
atggtggcggtacctccatttcaat

SEQ ID NO: 19479 - DNA, 25 bp, Saccharomyces pastorianus
ttacatggcaaaaactactctacgg

SEQ ID NO: 19480 - DNA, 25 bp, Saccharomyces pastorianus
gtaacgcaatttctaacacagtcaa

SEQ ID NO: 19481 - DNA, 25 bp, Saccharomyces pastorianus
taacgtgaatccactattggctaac

SEQ ID NO: 19482 - DNA, 25 bp, Saccharomyces pastorianus
aaaataccattgtctgcaccattaa

SEQ ID NO: 19483 - DNA, 25 bp, Saccharomyces pastorianus
ttgcaagtgactttctatcgaggaa

SEQ ID NO: 19484 - DNA, 25 bp, Saccharomyces pastorianus
aaatccaacgtagcttcttcgtcat

SEQ ID NO: 19485 - DNA, 25 bp, Saccharomyces pastorianus
atgggcccaaaaatactgttagtgc

SEQ ID NO: 19486 - DNA, 25 bp, Saccharomyces pastorianus
tccatcgtccaaggattgttccaaa

SEQ ID NO: 19487 - DNA, 25 bp, Saccharomyces pastorianus
agaatgatttgtcagatgggcccaa

SEQ ID NO: 19488 - DNA, 25 bp, Saccharomyces pastorianus
ttcttcgtcatcttcccagaatgat

SEQ ID NO: 19489 - DNA, 25 bp, Saccharomyces pastorianus
gttctaacaccgaatttcttacatg

SEQ ID NO: 19490 - DNA, 25 bp, Saccharomyces pastorianus
gtcattacctaacaccaacgattct

SEQ ID NO: 19491 - DNA, 25 bp, Saccharomyces pastorianus
gaacagtaattatgtggagtccaca

SEQ ID NO: 19492 - DNA, 25 bp, Saccharomyces pastorianus
gtgttacacgccaagcaaaatggta

SEQ ID NO: 19493 - DNA, 25 bp, Saccharomyces pastorianus
aacacatccatgtcgtcattaccta

SEQ ID NO: 19494 - DNA, 25 bp, Saccharomyces pastorianus
tgacatctactgcaagcttacaaga

SEQ ID NO: 19495 - DNA, 25 bp, Saccharomyces pastorianus
ttgggttttcaaggccgactcttat

SEQ ID NO: 19496 - DNA, 25 bp, Saccharomyces pastorianus
gtaccgtgacagaacattccagaaa

SEQ ID NO: 19497 - DNA, 25 bp, Saccharomyces pastorianus
gcaaatgataataaccccggtaacg

SEQ ID NO: 19498 - DNA, 25 bp, Saccharomyces pastorianus
cggatgctaaatttgtgttacacgc

SEQ ID NO: 19499 - DNA, 25 bp, Saccharomyces pastorianus
gagtccacaatcacacccaaattgg

SEQ ID NO: 19500 - DNA, 25 bp, Saccharomyces pastorianus
cgaatgcattgcttcgttcaacgaa

SEQ ID NO: 19501 - DNA, 25 bp, Saccharomyces pastorianus
aaaagtacttctgggtgatctcacc

SEQ ID NO: 19502 - DNA, 25 bp, Saccharomyces pastorianus
gagactggtcatacgagcattatta

SEQ ID NO: 19503 - DNA, 25 bp, Saccharomyces pastorianus
aaagcgtggacgtttgtgtactata

SEQ ID NO: 19504 - DNA, 25 bp, Saccharomyces pastorianus
atactactgaaagcgcttggaccat

SEQ ID NO: 19505 - DNA, 25 bp, Saccharomyces pastorianus
gttatgcccgcaaatatcgtttcta

SEQ ID NO: 19506 - DNA, 25 bp, Saccharomyces pastorianus
aggagagctctaagctacccgctac

SEQ ID NO: 19507 - DNA, 25 bp, Saccharomyces pastorianus
aacatttcgtttccacgacgtgtat

SEQ ID NO: 19508 - DNA, 25 bp, Saccharomyces pastorianus
acctcgtggttcatctctcagggta

SEQ ID NO: 19509 - DNA, 25 bp, Saccharomyces pastorianus
gacgtttctatcatcaagcttgcca

SEQ ID NO: 19510 - DNA, 25 bp, Saccharomyces pastorianus
aagcttgccatcataacgggtatca

SEQ ID NO: 19511 - DNA, 25 bp, Saccharomyces pastorianus
gatcttaatgagaacaccccgcagt

SEQ ID NO: 19512 - DNA, 25 bp, Saccharomyces pastorianus
gtagatcaatcaaactccaatggga

SEQ ID NO: 19513 - DNA, 25 bp, Saccharomyces pastorianus
tagtttttaacttccctcataatgg

SEQ ID NO: 19514 - DNA, 25 bp, Saccharomyces pastorianus
ggctatggcaatatcatcttgtctg

SEQ ID NO: 19515 - DNA, 25 bp, Saccharomyces pastorianus
gtcaagagcttcaaaatctccagaa

SEQ ID NO: 19516 - DNA, 25 bp, Saccharomyces pastorianus
gggaaccttacgattcatggcaaat

SEQ ID NO: 19517 - DNA, 25 bp, Saccharomyces pastorianus
gtttcggacaatcaacagactcagt

SEQ ID NO: 19518 - DNA, 25 bp, Saccharomyces pastorianus
ggaaaactttccagggtatcatcat

SEQ ID NO: 19519 - DNA, 25 bp, Saccharomyces pastorianus
gatgcttttcgttatacacagggtt

SEQ ID NO: 19520 - DNA, 25 bp, Saccharomyces pastorianus
gaatattccaatgttcttccaaatt

SEQ ID NO: 19521 - DNA, 25 bp, Saccharomyces pastorianus
gcgaaggaacgtgatgctagatttt

SEQ ID NO: 19522 - DNA, 25 bp, Saccharomyces pastorianus
gatgttccagtcatttgcaatcaag

SEQ ID NO: 19523 - DNA, 25 bp, Saccharomyces pastorianus
gcatgccgccttcgatattatcaga

SEQ ID NO: 19524 - DNA, 25 bp, Saccharomyces pastorianus
aaacgatgcctaccacaacagcgag

SEQ ID NO: 19525 - DNA, 25 bp, Saccharomyces pastorianus
gtataagtctgcctcagggtatggt

SEQ ID NO: 19526 - DNA, 25 bp, Saccharomyces pastorianus
gccaccaaaaccgttgcatttaaga

SEQ ID NO: 19527 - DNA, 25 bp, Saccharomyces pastorianus
gattattacagatcccattccccag

SEQ ID NO: 19528 - DNA, 25 bp, Saccharomyces pastorianus
gaaagaatttctagtgaagccaccg

SEQ ID NO: 19529 - DNA, 25 bp, Saccharomyces pastorianus
ggaagttggaacatcgtcgcagcat

SEQ ID NO: 19530 - DNA, 25 bp, Saccharomyces pastorianus
tgaagccaccgaaacgattgttgat

SEQ ID NO: 19531 - DNA, 25 bp, Saccharomyces pastorianus
acagcgagacccactctaaaatcga

SEQ ID NO: 19532 - DNA, 25 bp, Saccharomyces pastorianus
aagtctaatcgacagtccagcgtaa

SEQ ID NO: 19533 - DNA, 25 bp, Saccharomyces pastorianus
gagagaaggcgctatcacgactcct

SEQ ID NO: 19534 - DNA, 25 bp, Saccharomyces pastorianus
atattatccgatggtgctgctgcat

SEQ ID NO: 19535 - DNA, 25 bp, Saccharomyces pastorianus
tcacgactcctgatttaggcggtaa

SEQ ID NO: 19536 - DNA, 25 bp, Saccharomyces pastorianus
gtcttgtcccaaaccgatggtctat

SEQ ID NO: 19537 - DNA, 25 bp, Saccharomyces pastorianus
aacgaggctgcccaagacatttata

SEQ ID NO: 19538 - DNA, 25 bp, Saccharomyces pastorianus
gggcgaagccactttaacggtgaca

SEQ ID NO: 19539 - DNA, 25 bp, Saccharomyces pastorianus
gtggattccatggtctacagattgt

SEQ ID NO: 19540 - DNA, 25 bp, Saccharomyces pastorianus
gatagtcgcacctaacctatacggt

SEQ ID NO: 19541 - DNA, 25 bp, Saccharomyces pastorianus
gctgctgcattagtgggttctctgg

SEQ ID NO: 19542 - DNA, 25 bp, Saccharomyces pastorianus
gtcggccccgaaatagtcattggtg

SEQ ID NO: 19543 - DNA, 25 bp, Saccharomyces pastorianus
ctctgggtgttgttccaagtgccaa

SEQ ID NO: 19544 - DNA, 25 bp, Saccharomyces pastorianus
gcggaccatgcacttactcaaaaca

SEQ ID NO: 19545 - DNA, 25 bp, Saccharomyces pastorianus
gagcaatcctgctgggtcttggaag

SEQ ID NO: 19546 - DNA, 25 bp, Saccharomyces pastorianus
gttcggatccatcttcggagtttca

SEQ ID NO: 19547 - DNA, 25 bp, Saccharomyces pastorianus
ttcggagtttcatccatcgagcatg

SEQ ID NO: 19548 - DNA, 25 bp, Saccharomyces pastorianus
gaaagcgtcattcagcggaccatgc

SEQ ID NO: 19549 - DNA, 25 bp, Saccharomyces pastorianus
gcaagctaacgctaatggactttac

SEQ ID NO: 19550 - DNA, 25 bp, Saccharomyces pastorianus
aagcaacacccttgggagctgtcaa

SEQ ID NO: 19551 - DNA, 25 bp, Saccharomyces pastorianus
aggacgacgctacattggacacggc

SEQ ID NO: 19552 - DNA, 25 bp, Saccharomyces pastorianus
ggaggacaggcttagagttcttttt

SEQ ID NO: 19553 - DNA, 25 bp, Saccharomyces pastorianus
gaggcatacgaccacgcaagatacg

SEQ ID NO: 19554 - DNA, 25 bp, Saccharomyces pastorianus
attggagccatatgcctcaactagg

SEQ ID NO: 19555 - DNA, 25 bp, Saccharomyces pastorianus
atgcctttttgggtaacactgattt

SEQ ID NO: 19556 - DNA, 25 bp, Saccharomyces pastorianus
aattagacggtctttcactggaaag

SEQ ID NO: 19557 - DNA, 25 bp, Saccharomyces pastorianus
cagtattgtcaaatctacgggctat

SEQ ID NO: 19558 - DNA, 25 bp, Saccharomyces pastorianus
atatccactgttaggtgtgtttaca

SEQ ID NO: 19559 - DNA, 25 bp, Saccharomyces pastorianus
gacgacgattctgtttggcgatata

SEQ ID NO: 19560 - DNA, 25 bp, Saccharomyces pastorianus
taagccaccaaataatccagagttt

SEQ ID NO: 19561 - DNA, 25 bp, Saccharomyces pastorianus
aagtgttattattcccagtattgtc

SEQ ID NO: 19562 - DNA, 25 bp, Saccharomyces pastorianus
gatcactatttcaacaaggccgcgt

SEQ ID NO: 19563 - DNA, 25 bp, Saccharomyces pastorianus
atagaaccagaaacctccagtatcg

SEQ ID NO: 19564 - DNA, 25 bp, Saccharomyces pastorianus
caaggccgcgtgaaagttctgttat

SEQ ID NO: 19565 - DNA, 25 bp, Saccharomyces pastorianus
gattcaagttcttcacaagtgttat

SEQ ID NO: 19566 - DNA, 25 bp, Saccharomyces pastorianus
agtccctgtatactgattgctatgt

SEQ ID NO: 19567 - DNA, 25 bp, Saccharomyces pastorianus
gggttctggaactggtgcaatattt

SEQ ID NO: 19568 - DNA, 25 bp, Saccharomyces pastorianus
ggaagacagctagcgatctccatga

SEQ ID NO: 19569 - DNA, 25 bp, Saccharomyces pastorianus
aatctactgtgctatttccataacg

SEQ ID NO: 19570 - DNA, 25 bp, Saccharomyces pastorianus
gattttgcagtattccggtgagtta

SEQ ID NO: 19571 - DNA, 25 bp, Saccharomyces pastorianus
gtgaatcagtatcaccagccatagt

SEQ ID NO: 19572 - DNA, 25 bp, Saccharomyces pastorianus
ttgcctacggcggataatctactgt

SEQ ID NO: 19573 - DNA, 25 bp, Saccharomyces pastorianus
ggcaacaaggattatccccgcttta

SEQ ID NO: 19574 - DNA, 25 bp, Saccharomyces pastorianus
aacgaattttgccaagtcacgatta

SEQ ID NO: 19575 - DNA, 25 bp, Saccharomyces pastorianus
cttcagtgttccgttatccatcaac

SEQ ID NO: 19576 - DNA, 25 bp, Saccharomyces pastorianus
atggtttggaccagatcagccagaa

SEQ ID NO: 19577 - DNA, 25 bp, Saccharomyces pastorianus
gatttcattcactctacctggttta

SEQ ID NO: 19578 - DNA, 25 bp, Saccharomyces pastorianus
gaacatcacgcaccattcgttaagt

SEQ ID NO: 19579 - DNA, 25 bp, Saccharomyces pastorianus
ggagccacaggttcaacgtcgattt

SEQ ID NO: 19580 - DNA, 25 bp, Saccharomyces pastorianus
gtcgtttgcattggttctttcatta

SEQ ID NO: 19581 - DNA, 25 bp, Saccharomyces pastorianus
aatctaatgcgttggctaccgatgc

SEQ ID NO: 19582 - DNA, 25 bp, Saccharomyces pastorianus
tgtacactctagcattatccgtcca

SEQ ID NO: 19583 - DNA, 25 bp, Saccharomyces pastorianus
gaggcactatggcagtccctgtaga

SEQ ID NO: 19584 - DNA, 25 bp, Saccharomyces pastorianus
ggaaacctcgacaatggctcaatag

SEQ ID NO: 19585 - DNA, 25 bp, Saccharomyces pastorianus
atctggctcgaaatcacttttggca

SEQ ID NO: 19586 - DNA, 25 bp, Saccharomyces pastorianus
tttattccagccattacgcgtagca

SEQ ID NO: 19587 - DNA, 25 bp, Saccharomyces pastorianus
taattggttctgactcgttagctgt

SEQ ID NO: 19588 - DNA, 25 bp, Saccharomyces pastorianus
gaaggtgcctccagtcaaaaagtcc

SEQ ID NO: 19589 - DNA, 25 bp, Saccharomyces pastorianus
gtttattgctacatggtctaccttg

SEQ ID NO: 19590 - DNA, 25 bp, Saccharomyces pastorianus
agtcccactactgatgaagctaagg

SEQ ID NO: 19591 - DNA, 25 bp, Saccharomyces pastorianus
atgagctactttcaccatttcgctg

SEQ ID NO: 19592 - DNA, 25 bp, Saccharomyces pastorianus
gatcatctacacctcgagttggtat

SEQ ID NO: 19593 - DNA, 25 bp, Saccharomyces pastorianus
agtgctgtccccatctttgaaggtg

SEQ ID NO: 19594 - DNA, 25 bp, Saccharomyces pastorianus
tatcgtccttatcattggccaacgc

SEQ ID NO: 19595 - DNA, 25 bp, Saccharomyces pastorianus
gtataagtgctaagaccgccctttt

SEQ ID NO: 19596 - DNA, 25 bp, Saccharomyces pastorianus
caatgtccagggtattttccagatc

SEQ ID NO: 19597 - DNA, 25 bp, Saccharomyces pastorianus
atttcgctggttatacgctttgaca

SEQ ID NO: 19598 - DNA, 25 bp, Saccharomyces pastorianus
ttggccgttagtgctatcgtcctta

SEQ ID NO: 19599 - DNA, 25 bp, Saccharomyces pastorianus
gcccctgcatggacattttctttga

SEQ ID NO: 19600 - DNA, 25 bp, Saccharomyces pastorianus
gcgcccatccattcgattggtttag

SEQ ID NO: 19601 - DNA, 25 bp, Saccharomyces pastorianus
gcaagattttccaggctgctacaag

SEQ ID NO: 19602 - DNA, 25 bp, Saccharomyces pastorianus
gattctggacctagaagacgttcat

SEQ ID NO: 19603 - DNA, 25 bp, Saccharomyces pastorianus
gacattcgtcgttacaacattgccc

SEQ ID NO: 19604 - DNA, 25 bp, Saccharomyces pastorianus
gctgctacaagccttccataaaaga

SEQ ID NO: 19605 - DNA, 25 bp, Saccharomyces pastorianus
gaaagggcgcgctctaagataccat

SEQ ID NO: 19606 - DNA, 25 bp, Saccharomyces pastorianus
tcgaggataattctagcccctgcat

SEQ ID NO: 19607 - DNA, 25 bp, Saccharomyces pastorianus
tatggcttcggatctggatgccgat

SEQ ID NO: 19608 - DNA, 25 bp, Saccharomyces pastorianus
atgccgatgcgtctgtcccaagaat

SEQ ID NO: 19609 - DNA, 25 bp, Saccharomyces pastorianus
acaacttgtgccatttttggagcaa

SEQ ID NO: 19610 - DNA, 25 bp, Saccharomyces pastorianus
agaaaagccgcggtgctcaacgata

SEQ ID NO: 19611 - DNA, 25 bp, Saccharomyces pastorianus
gacctttacgcattcttatttggag

SEQ ID NO: 19612 - DNA, 25 bp, Saccharomyces pastorianus
gactactgatggacgtagccaacgt

SEQ ID NO: 19613 - DNA, 25 bp, Saccharomyces pastorianus
gagtacggtaaagacacggccaacg

SEQ ID NO: 19614 - DNA, 25 bp, Saccharomyces pastorianus
tttaacaacccagcttacaagtcag

SEQ ID NO: 19615 - DNA, 25 bp, Saccharomyces pastorianus
aagtggttgggactcttcatccaat

SEQ ID NO: 19616 - DNA, 25 bp, Saccharomyces pastorianus
aatgaaggcaccgacctttacgcat

SEQ ID NO: 19617 - DNA, 25 bp, Saccharomyces pastorianus
aaagtgccaccgacacaggtgcggg

SEQ ID NO: 19618 - DNA, 25 bp, Saccharomyces pastorianus
caacgtccattcctatgccatgaat

SEQ ID NO: 19619 - DNA, 25 bp, Saccharomyces pastorianus
aaggatctcagttcccacactttaa

SEQ ID NO: 19620 - DNA, 25 bp, Saccharomyces pastorianus
atggcgtctgattcggatttcttac

SEQ ID NO: 19621 - DNA, 25 bp, Saccharomyces pastorianus
gaagtcattacacgccatgatcaat

SEQ ID NO: 19622 - DNA, 25 bp, Saccharomyces pastorianus
gttatcggaaacctgcttcagacaa

SEQ ID NO: 19623 - DNA, 25 bp, Saccharomyces pastorianus
gatcctgttcctaagttcctaagaa

SEQ ID NO: 19624 - DNA, 25 bp, Saccharomyces pastorianus
gttgtctattctacttggctgcagc

SEQ ID NO: 19625 - DNA, 25 bp, Saccharomyces pastorianus
gccatgatcgtttcctttaagctag

SEQ ID NO: 19626 - DNA, 25 bp, Saccharomyces pastorianus
tatacaagtctacacaggctctgga

SEQ ID NO: 19627 - DNA, 25 bp, Saccharomyces pastorianus
gatgaatccatgctgttatacaagt

SEQ ID NO: 19628 - DNA, 25 bp, Saccharomyces pastorianus
gactggtggaatcatgggcaactca

SEQ ID NO: 19629 - DNA, 25 bp, Saccharomyces pastorianus
ggctgcagccgtcagtgattttttc

SEQ ID NO: 19630 - DNA, 25 bp, Saccharomyces pastorianus
gattttttcgttccatactcaagat

SEQ ID NO: 19631 - DNA, 25 bp, Saccharomyces pastorianus
gatagttaacctggatcctgttcct

SEQ ID NO: 19632 - DNA, 25 bp, Saccharomyces pastorianus
gagctcaaacagcactatttcgacg

SEQ ID NO: 19633 - DNA, 25 bp, Saccharomyces pastorianus
gccattttggagacgactgtgcaga

SEQ ID NO: 19634 - DNA, 25 bp, Saccharomyces pastorianus
acggaagtgcgttttgcggcgataa

SEQ ID NO: 19635 - DNA, 25 bp, Saccharomyces pastorianus
gaagaagacaccatttagcccacac

SEQ ID NO: 19636 - DNA, 25 bp, Saccharomyces pastorianus
atgagtacccaagccattccaacta

SEQ ID NO: 19637 - DNA, 25 bp, Saccharomyces pastorianus
gatgcatatgactacccaggttcta

SEQ ID NO: 19638 - DNA, 25 bp, Saccharomyces pastorianus
ggacaacgaccagcaattcaacttc

SEQ ID NO: 19639 - DNA, 25 bp, Saccharomyces pastorianus
aacagggctcaatcatccagaaata

SEQ ID NO: 19640 - DNA, 25 bp, Saccharomyces pastorianus
gcggcgataatctagctatggagct

SEQ ID NO: 19641 - DNA, 25 bp, Saccharomyces pastorianus
aaaaatgtgcatgcgcatcccttag

SEQ ID NO: 19642 - DNA, 25 bp, Saccharomyces pastorianus
gatcgtctagagtgccgaacacaga

SEQ ID NO: 19643 - DNA, 25 bp, Saccharomyces pastorianus
gaccagttatgattcatcgtgccat

SEQ ID NO: 19644 - DNA, 25 bp, Saccharomyces pastorianus
tgccattttgggttccgttgaaaga

SEQ ID NO: 19645 - DNA, 25 bp, Saccharomyces pastorianus
gaatacgccgaagatgtccgcaacc

SEQ ID NO: 19646 - DNA, 25 bp, Saccharomyces pastorianus
aggcttctatgctgatgtcgacttg

SEQ ID NO: 19647 - DNA, 25 bp, Saccharomyces pastorianus
gtcgacttgactggtaacactctac

SEQ ID NO: 19648 - DNA, 25 bp, Saccharomyces pastorianus
atctccacgtcaagtcttggttgtc

SEQ ID NO: 19649 - DNA, 25 bp, Saccharomyces pastorianus
tcttggttgtcccagttggtgtgaa

SEQ ID NO: 19650 - DNA, 25 bp, Saccharomyces pastorianus
tgccaccgtttctgtcgaagaggtt

SEQ ID NO: 19651 - DNA, 25 bp, Saccharomyces pastorianus
taagtggccattctggttatctcca

SEQ ID NO: 19652 - DNA, 25 bp, Saccharomyces pastorianus
aatcaacgccggtgatggtgctttc

SEQ ID NO: 19653 - DNA, 25 bp, Saccharomyces pastorianus
gcaaccaattacacgacgcaggctt

SEQ ID NO: 19654 - DNA, 25 bp, Saccharomyces pastorianus
gaacaaatactcttcgaagccttat

SEQ ID NO: 19655 - DNA, 25 bp, Saccharomyces pastorianus
atatttctttcatcaaggacgacag

SEQ ID NO: 19656 - DNA, 25 bp, Saccharomyces pastorianus
gatgtattcagctatccaaagatgt

SEQ ID NO: 19657 - DNA, 25 bp, Saccharomyces pastorianus
tccctatcttttactccaacaacag

SEQ ID NO: 19658 - DNA, 25 bp, Saccharomyces pastorianus
caacaacagttatcggtatccgcgg

SEQ ID NO: 19659 - DNA, 25 bp, Saccharomyces pastorianus
taatatgactcgtatactgccccag

SEQ ID NO: 19660 - DNA, 25 bp, Saccharomyces pastorianus
gatgtacgaggaagccagtggtaaa

SEQ ID NO: 19661 - DNA, 25 bp, Saccharomyces pastorianus
gttctttccaccactgcaagagcaa

SEQ ID NO: 19662 - DNA, 25 bp, Saccharomyces pastorianus
gtatccgcggtaatgaccaaactat

SEQ ID NO: 19663 - DNA, 25 bp, Saccharomyces pastorianus
aaaaggtagctactgctgttctttc

SEQ ID NO: 19664 - DNA, 25 bp, Saccharomyces pastorianus
gtatactgccccagcaatcaagata

SEQ ID NO: 19665 - DNA, 25 bp, Saccharomyces pastorianus
ttgccaaatattatcctgaccccac

SEQ ID NO: 19666 - DNA, 25 bp, Saccharomyces pastorianus
gtactgtggtagatatcccggcttt

SEQ ID NO: 19667 - DNA, 25 bp, Saccharomyces pastorianus
ggagcagctctggatgtttacccac

SEQ ID NO: 19668 - DNA, 25 bp, Saccharomyces pastorianus
aggtaacaccgtgggctctgtgaat

SEQ ID NO: 19669 - DNA, 25 bp, Saccharomyces pastorianus
ttacccacatgaacctgccaaaaat

SEQ ID NO: 19670 - DNA, 25 bp, Saccharomyces pastorianus
tcaacgcttcgagaggtactgtggt

SEQ ID NO: 19671 - DNA, 25 bp, Saccharomyces pastorianus
atatcccggctttggttcaagctaa

SEQ ID NO: 19672 - DNA, 25 bp, Saccharomyces pastorianus
tgatggccgatatctcttctgttaa

SEQ ID NO: 19673 - DNA, 25 bp, Saccharomyces pastorianus
tccgaactggtttccttgccaaata

SEQ ID NO: 19674 - DNA, 25 bp, Saccharomyces pastorianus
gaaagacggcgcatatgtgatcaac

SEQ ID NO: 19675 - DNA, 25 bp, Saccharomyces pastorianus
gtgaaatcgcctatttgatggccga

SEQ ID NO: 19676 - DNA, 25 bp, Saccharomyces pastorianus
tattgcatttcactaccagttcacc

SEQ ID NO: 19677 - DNA, 25 bp, Saccharomyces pastorianus
ggtatgtcacgaattctgttcttgt

SEQ ID NO: 19678 - DNA, 25 bp, Saccharomyces pastorianus
atgtatgttgagactctttctccct

SEQ ID NO: 19679 - DNA, 25 bp, Saccharomyces pastorianus
taccagttcacccaaagccggaagc

SEQ ID NO: 19680 - DNA, 25 bp, Saccharomyces pastorianus
ggatgaaacactctgcctggataat

SEQ ID NO: 19681 - DNA, 25 bp, Saccharomyces pastorianus
gccctatttgtcttctttttggatg

SEQ ID NO: 19682 - DNA, 25 bp, Saccharomyces pastorianus
gatagctttattcacctcgaggatc

SEQ ID NO: 19683 - DNA, 25 bp, Saccharomyces pastorianus
tcaattcaagccttccaactcaaga

SEQ ID NO: 19684 - DNA, 25 bp, Saccharomyces pastorianus
ttgcaagagcttgacctcaattcaa

SEQ ID NO: 19685 - DNA, 25 bp, Saccharomyces pastorianus
aaagagttgctttcgccctatttgt

SEQ ID NO: 19686 - DNA, 25 bp, Saccharomyces pastorianus
gaaagagaggcttcccagcttccat

SEQ ID NO: 19687 - DNA, 25 bp, Saccharomyces pastorianus
atgtgttctttgacgttgcccaaat

SEQ ID NO: 19688 - DNA, 25 bp, Saccharomyces pastorianus
agagagctagtataccacggtccac

SEQ ID NO: 19689 - DNA, 25 bp, Saccharomyces pastorianus
atatcgacgccttatcagacaactt

SEQ ID NO: 19690 - DNA, 25 bp, Saccharomyces pastorianus
gtatccctctgttgatgctgctttg

SEQ ID NO: 19691 - DNA, 25 bp, Saccharomyces pastorianus
gggaaaccgttcatgtgttctttga

SEQ ID NO: 19692 - DNA, 25 bp, Saccharomyces pastorianus
aactgaaccagctgtctcatttgag

SEQ ID NO: 19693 - DNA, 25 bp, Saccharomyces pastorianus
gacaactttgctaacgtcaacgtcg

SEQ ID NO: 19694 - DNA, 25 bp, Saccharomyces pastorianus
cacggtccaccattttctaacttgg

SEQ ID NO: 19695 - DNA, 25 bp, Saccharomyces pastorianus
atctgccgaggctgagatttcaaga

SEQ ID NO: 19696 - DNA, 25 bp, Saccharomyces pastorianus
attctatgtcgatagtgctaccccg

SEQ ID NO: 19697 - DNA, 25 bp, Saccharomyces pastorianus
acgttgccagaatcaacttcgttgg

SEQ ID NO: 19698 - DNA, 25 bp, Saccharomyces pastorianus
tcactccttgtcatggcatctgaat

SEQ ID NO: 19699 - DNA, 25 bp, Saccharomyces pastorianus
tgcttctgtacggtccccaacaaaa

SEQ ID NO: 19700 - DNA, 25 bp, Saccharomyces pastorianus
agggtgtgcgacaagaggctcctca

SEQ ID NO: 19701 - DNA, 25 bp, Saccharomyces pastorianus
aggagcgtctttgaagccaccaatt

SEQ ID NO: 19702 - DNA, 25 bp, Saccharomyces pastorianus
tctcgacgcctctaacggaacaata

SEQ ID NO: 19703 - DNA, 25 bp, Saccharomyces pastorianus
gtagcgttaggatccttgccaggac

SEQ ID NO: 19704 - DNA, 25 bp, Saccharomyces pastorianus
gttcagtgctcgttccagggtgtgc

SEQ ID NO: 19705 - DNA, 25 bp, Saccharomyces pastorianus
ttcgacgatcagaatcactccttgt

SEQ ID NO: 19706 - DNA, 25 bp, Saccharomyces pastorianus
gagtgcatcactacattttgggttc

SEQ ID NO: 19707 - DNA, 25 bp, Saccharomyces pastorianus
ggctcctcagcatatttgtttcaag

SEQ ID NO: 19708 - DNA, 25 bp, Saccharomyces pastorianus
gacacagtcagcatcgataatcttc

SEQ ID NO: 19709 - DNA, 25 bp, Saccharomyces pastorianus
gcgagtactctatggccaagcgata

SEQ ID NO: 19710 - DNA, 25 bp, Saccharomyces pastorianus
gcccacgctgaaggacgcatacgaa

SEQ ID NO: 19711 - DNA, 25 bp, Saccharomyces pastorianus
gggcctgatcaagtccacagacgtg

SEQ ID NO: 19712 - DNA, 25 bp, Saccharomyces pastorianus
gacgggagtgcttgtactacctgac

SEQ ID NO: 19713 - DNA, 25 bp, Saccharomyces pastorianus
actacctgacgatcggctgctacaa

SEQ ID NO: 19714 - DNA, 25 bp, Saccharomyces pastorianus
aaatactgcgccagcaggtggtctc

SEQ ID NO: 19715 - DNA, 25 bp, Saccharomyces pastorianus
aaggtcctcacggatatctacaagg

SEQ ID NO: 19716 - DNA, 25 bp, Saccharomyces pastorianus
gacgaagatcgatttctggcccacg

SEQ ID NO: 19717 - DNA, 25 bp, Saccharomyces pastorianus
gaacggctcggcgtgaaggtcctca

SEQ ID NO: 19718 - DNA, 25 bp, Saccharomyces pastorianus
tatgtagacactctcttcgaacacg

SEQ ID NO: 19719 - DNA, 25 bp, Saccharomyces pastorianus
gctgctacaagctgggcgagtactc

SEQ ID NO: 19720 - DNA, 25 bp, Saccharomyces pastorianus
aagcgacgcagcaagacctctcaaa

SEQ ID NO: 19721 - DNA, 25 bp, Saccharomyces pastorianus
aaagacgtcagaagccccaagcgac

SEQ ID NO: 19722 - DNA, 25 bp, Saccharomyces pastorianus
gagtgcatataccaagtcaacgcta

SEQ ID NO: 19723 - DNA, 25 bp, Saccharomyces pastorianus
attggtcaaagggttcaccgtgcaa

SEQ ID NO: 19724 - DNA, 25 bp, Saccharomyces pastorianus
tcttcatcggcgtccaatacaacta

SEQ ID NO: 19725 - DNA, 25 bp, Saccharomyces pastorianus
ggattcaccggttcgttgcaaagcg

SEQ ID NO: 19726 - DNA, 25 bp, Saccharomyces pastorianus
acccgtatagtcatgagatcccgtg

SEQ ID NO: 19727 - DNA, 25 bp, Saccharomyces pastorianus
gatcccgtggtatcttgaaagtcat

SEQ ID NO: 19728 - DNA, 25 bp, Saccharomyces pastorianus
cataagattgttggccgtggacgac

SEQ ID NO: 19729 - DNA, 25 bp, Saccharomyces pastorianus
aaactgtaccagctctccaagatag

SEQ ID NO: 19730 - DNA, 25 bp, Saccharomyces pastorianus
aacagcgactctgagcagcgggcaa

SEQ ID NO: 19731 - DNA, 25 bp, Saccharomyces pastorianus
gaaacagggtggtgtcttgcttgct

SEQ ID NO: 19732 - DNA, 25 bp, Saccharomyces pastorianus
aatcaattgcgttcgctggccacga

SEQ ID NO: 19733 - DNA, 25 bp, Saccharomyces pastorianus
acagtatttcgtgagcgtgcttgaa

SEQ ID NO: 19734 - DNA, 25 bp, Saccharomyces pastorianus
tcaaggctttgaacgactcccagaa

SEQ ID NO: 19735 - DNA, 25 bp, Saccharomyces pastorianus
ttgacacaggtcagacaggccgata

SEQ ID NO: 19736 - DNA, 25 bp, Saccharomyces pastorianus
aattacccaagtcagcggtgtcacg

SEQ ID NO: 19737 - DNA, 25 bp, Saccharomyces pastorianus
caggccgatattggtaacgtagtca

SEQ ID NO: 19738 - DNA, 25 bp, Saccharomyces pastorianus
gtcttgcttgcttggttggaaaaaa

SEQ ID NO: 19739 - DNA, 25 bp, Saccharomyces pastorianus
gttgactgctgctgatctggtgcca

SEQ ID NO: 19740 - DNA, 25 bp, Saccharomyces pastorianus
catacagtgcggacgctgcgacaaa

SEQ ID NO: 19741 - DNA, 25 bp, Saccharomyces pastorianus
gatatcgatgcatttgacccggaaa

SEQ ID NO: 19742 - DNA, 25 bp, Saccharomyces pastorianus
agacacaagatatcacgcccaccgg

SEQ ID NO: 19743 - DNA, 25 bp, Saccharomyces pastorianus
tggaagattgccgtacgacctcaac

SEQ ID NO: 19744 - DNA, 25 bp, Saccharomyces pastorianus
tagtattcaaggaccccatcagcag

SEQ ID NO: 19745 - DNA, 25 bp, Saccharomyces pastorianus
atcccaggaagatttgcgaccgcaa

SEQ ID NO: 19746 - DNA, 25 bp, Saccharomyces pastorianus
ggtcacctcggtatacaagtccaga

SEQ ID NO: 19747 - DNA, 25 bp, Saccharomyces pastorianus
gtacactccggatagatacaccagt

SEQ ID NO: 19748 - DNA, 25 bp, Saccharomyces pastorianus
gaaccgtcaagtacttcaagccaag

SEQ ID NO: 19749 - DNA, 25 bp, Saccharomyces pastorianus
actgcaaaagcatttcgccaagttt

SEQ ID NO: 19750 - DNA, 25 bp, Saccharomyces pastorianus
tagatacaccagtgtcaccgcagac

SEQ ID NO: 19751 - DNA, 25 bp, Saccharomyces pastorianus
atggagagaatccacgctcccaggc

SEQ ID NO: 19752 - DNA, 25 bp, Saccharomyces pastorianus
gctttcaaggaaatcggcgtgcaca

SEQ ID NO: 19753 - DNA, 25 bp, Saccharomyces pastorianus
gtatcacctgagaacgacgatccga

SEQ ID NO: 19754 - DNA, 25 bp, Saccharomyces pastorianus
cataatgaacctgtacctgtaccat

SEQ ID NO: 19755 - DNA, 25 bp, Saccharomyces pastorianus
aatggcccacccactgtgtctgaaa

SEQ ID NO: 19756 - DNA, 25 bp, Saccharomyces pastorianus
gattagagacatttcttccatcccc

SEQ ID NO: 19757 - DNA, 25 bp, Saccharomyces pastorianus
ctgtaccatccgtcaccaaaaataa

SEQ ID NO: 19758 - DNA, 25 bp, Saccharomyces pastorianus
cttcacgttccaccagttgagtaat

SEQ ID NO: 19759 - DNA, 25 bp, Saccharomyces pastorianus
gagattattcgattcattttccaca

SEQ ID NO: 19760 - DNA, 25 bp, Saccharomyces pastorianus
agataatagcatgccgctacccatc

SEQ ID NO: 19761 - DNA, 25 bp, Saccharomyces pastorianus
gcaaacattagcatcactgccactg

SEQ ID NO: 19762 - DNA, 25 bp, Saccharomyces pastorianus
caaccgtcgggtgatcataagattc

SEQ ID NO: 19763 - DNA, 25 bp, Saccharomyces pastorianus
gaagataaccctattcctactgcaa

SEQ ID NO: 19764 - DNA, 25 bp, Saccharomyces pastorianus
ctacgacgccatcgccaagtttgct

SEQ ID NO: 19765 - DNA, 25 bp, Saccharomyces pastorianus
ggttggagaacctacgacgccatcg

SEQ ID NO: 19766 - DNA, 25 bp, Saccharomyces pastorianus
gaagttgtgtaacgctttgaacgct

SEQ ID NO: 19767 - DNA, 25 bp, Saccharomyces pastorianus
agatcgtcggtatcgctaccacttt

SEQ ID NO: 19768 - DNA, 25 bp, Saccharomyces pastorianus
aagtccaaggtcgtcgtctttgaag

SEQ ID NO: 19769 - DNA, 25 bp, Saccharomyces pastorianus
ttcgccgatgaagaatacgtcaaca

SEQ ID NO: 19770 - DNA, 25 bp, Saccharomyces pastorianus
aagtggttcgacatcttgaacatca

SEQ ID NO: 19771 - DNA, 25 bp, Saccharomyces pastorianus
cgctggttgtaagatcgtcggtatc

SEQ ID NO: 19772 - DNA, 25 bp, Saccharomyces pastorianus
tgctccagacttcgccgatgaagaa

SEQ ID NO: 19773 - DNA, 25 bp, Saccharomyces pastorianus
gaaaaagacccatccaagtccaagg

SEQ ID NO: 19774 - DNA, 25 bp, Saccharomyces pastorianus
aagtttgctccagacttcgccgatg

SEQ ID NO: 19775 - DNA, 25 bp, Saccharomyces pastorianus
caaagtcaacgttttcttagctgat

SEQ ID NO: 19776 - DNA, 25 bp, Saccharomyces pastorianus
atcttggctgaaagcaactcgtctt

SEQ ID NO: 19777 - DNA, 25 bp, Saccharomyces pastorianus
ttttgagaaccaccccaatcttgaa

SEQ ID NO: 19778 - DNA, 25 bp, Saccharomyces pastorianus
gaattcaattcagtgtatgccaaac

SEQ ID NO: 19779 - DNA, 25 bp, Saccharomyces pastorianus
aagatcatgcgtcggtgttgcttct

SEQ ID NO: 19780 - DNA, 25 bp, Saccharomyces pastorianus
tgttgcttctttgccattgaacgtt

SEQ ID NO: 19781 - DNA, 25 bp, Saccharomyces pastorianus
ctcttattcccaggccatgaaggcg

SEQ ID NO: 19782 - DNA, 25 bp, Saccharomyces pastorianus
ggtttgacaacattgaccccggtca

SEQ ID NO: 19783 - DNA, 25 bp, Saccharomyces pastorianus
gtctggtcaaatcccatataccgca

SEQ ID NO: 19784 - DNA, 25 bp, Saccharomyces pastorianus
gaacaacttcgtctacgtgtctggt

SEQ ID NO: 19785 - DNA, 25 bp, Saccharomyces pastorianus
aactcgtctttgaacagcgttgtca

SEQ ID NO: 19786 - DNA, 25 bp, Saccharomyces pastorianus
tatccacagattgctcattacgggt

SEQ ID NO: 19787 - DNA, 25 bp, Saccharomyces pastorianus
aaacatagtagatttccccacggat

SEQ ID NO: 19788 - DNA, 25 bp, Saccharomyces pastorianus
ggaaaaacgtccctgagatcgccgt

SEQ ID NO: 19789 - DNA, 25 bp, Saccharomyces pastorianus
ttatgggtccagtcctgaccgaaat

SEQ ID NO: 19790 - DNA, 25 bp, Saccharomyces pastorianus
ttatagcaactctcggtacgccaag

SEQ ID NO: 19791 - DNA, 25 bp, Saccharomyces pastorianus
gtcctgtgcgacttcaaattactag

SEQ ID NO: 19792 - DNA, 25 bp, Saccharomyces pastorianus
ttggctcccgttttggcattttatg

SEQ ID NO: 19793 - DNA, 25 bp, Saccharomyces pastorianus
atgacatctttctttccttactagt

SEQ ID NO: 19794 - DNA, 25 bp, Saccharomyces pastorianus
gaattgcaattcctagtcctgtgcg

SEQ ID NO: 19795 - DNA, 25 bp, Saccharomyces pastorianus
agatcgccgtggtccagtacttgga

SEQ ID NO: 19796 - DNA, 25 bp, Saccharomyces pastorianus
gatgaagacgaactcttggctcccg

SEQ ID NO: 19797 - DNA, 25 bp, Saccharomyces pastorianus
ggtcaaatactcactgcccagcggg

SEQ ID NO: 19798 - DNA, 25 bp, Saccharomyces pastorianus
attatttattccactctgttgccct

SEQ ID NO: 19799 - DNA, 25 bp, Saccharomyces pastorianus
gtgtcttggcgcaactggtcaaata

SEQ ID NO: 19800 - DNA, 25 bp, Saccharomyces pastorianus
ggatgttcggccttgtatgttgccc

SEQ ID NO: 19801 - DNA, 25 bp, Saccharomyces pastorianus
tattccgtactcttgctgattttaa

SEQ ID NO: 19802 - DNA, 25 bp, Saccharomyces pastorianus
gtactttgcccacttctattatctg

SEQ ID NO: 19803 - DNA, 25 bp, Saccharomyces pastorianus
ggctctacgaaacccttcatgtatt

SEQ ID NO: 19804 - DNA, 25 bp, Saccharomyces pastorianus
tctaccccaagtaccctattgtttg

SEQ ID NO: 19805 - DNA, 25 bp, Saccharomyces pastorianus
tgtcgtcaatcaccctatacttcta

SEQ ID NO: 19806 - DNA, 25 bp, Saccharomyces pastorianus
gtttggatcattttcggccactcat

SEQ ID NO: 19807 - DNA, 25 bp, Saccharomyces pastorianus
cactaatttgggtcatcgcaagctt

SEQ ID NO: 19808 - DNA, 25 bp, Saccharomyces pastorianus
gaactgatcatggttgctttagaaa

SEQ ID NO: 19809 - DNA, 25 bp, Saccharomyces pastorianus
ttactttcattattccagggttctg

SEQ ID NO: 19810 - DNA, 25 bp, Saccharomyces pastorianus
aagcagtctattccgtttgttcatt

SEQ ID NO: 19811 - DNA, 25 bp, Saccharomyces pastorianus
tgatttaagttttatgaccaccgta

SEQ ID NO: 19812 - DNA, 25 bp, Saccharomyces pastorianus
tatgctgaactcttggtgatcctac

SEQ ID NO: 19813 - DNA, 25 bp, Saccharomyces pastorianus
gccactttgttgttttacgtagcat

SEQ ID NO: 19814 - DNA, 25 bp, Saccharomyces pastorianus
gatcctactaatttcagtcttccct

SEQ ID NO: 19815 - DNA, 25 bp, Saccharomyces pastorianus
gtttcaccgccttaattttgaatga

SEQ ID NO: 19816 - DNA, 25 bp, Saccharomyces pastorianus
aatggttgctatcagtttcaccgcc

SEQ ID NO: 19817 - DNA, 25 bp, Saccharomyces pastorianus
ttattgccatttgccaagcagtcta

SEQ ID NO: 19818 - DNA, 25 bp, Saccharomyces pastorianus
tagcatctgttccattcctaggtga

SEQ ID NO: 19819 - DNA, 25 bp, Saccharomyces pastorianus
attttgctatggtctgggatatcct

SEQ ID NO: 19820 - DNA, 25 bp, Saccharomyces pastorianus
atgaacatgtcgctaacgtccatct

SEQ ID NO: 19821 - DNA, 25 bp, Saccharomyces pastorianus
ggattgtgtatgcaattgcccctca

SEQ ID NO: 19822 - DNA, 25 bp, Saccharomyces pastorianus
aacgtccatctattcagagtcaccg

SEQ ID NO: 19823 - DNA, 25 bp, Saccharomyces pastorianus
aagacgggagctattcattcagaag

SEQ ID NO: 19824 - DNA, 25 bp, Saccharomyces pastorianus
ttaccttatccaatctcgcaagttg

SEQ ID NO: 19825 - DNA, 25 bp, Saccharomyces pastorianus
agagtcaccggtgatgctcccttac

SEQ ID NO: 19826 - DNA, 25 bp, Saccharomyces pastorianus
cgtgacgtcatttattttggctact

SEQ ID NO: 19827 - DNA, 25 bp, Saccharomyces pastorianus
attgcccctcaaacgattcaacaaa

SEQ ID NO: 19828 - DNA, 25 bp, Saccharomyces pastorianus
gctcataacaccacatcttacaatt

SEQ ID NO: 19829 - DNA, 25 bp, Saccharomyces pastorianus
gattcaacaaagtgccgtgacgtca

SEQ ID NO: 19830 - DNA, 25 bp, Saccharomyces pastorianus
acacttgctgtcgtgcggactggac

SEQ ID NO: 19831 - DNA, 25 bp, Saccharomyces pastorianus
aattcgtgcctgaaagtgttccggg

SEQ ID NO: 19832 - DNA, 25 bp, Saccharomyces pastorianus
taaggatgcggagaacctggccacc

SEQ ID NO: 19833 - DNA, 25 bp, Saccharomyces pastorianus
aagagacactcaaccaacgcagacg

SEQ ID NO: 19834 - DNA, 25 bp, Saccharomyces pastorianus
tacgcatgtgggacatccgaaccaa

SEQ ID NO: 19835 - DNA, 25 bp, Saccharomyces pastorianus
gcagacgcaatctctgggcgacaaa

SEQ ID NO: 19836 - DNA, 25 bp, Saccharomyces pastorianus
gttccagggacgcaggctacaaaga

SEQ ID NO: 19837 - DNA, 25 bp, Saccharomyces pastorianus
tgtttcagcggtgacgagttcggat

SEQ ID NO: 19838 - DNA, 25 bp, Saccharomyces pastorianus
gaagtgcatgcacacgttccaggga

SEQ ID NO: 19839 - DNA, 25 bp, Saccharomyces pastorianus
gcgggtcccacgacggaagtatcaa

SEQ ID NO: 19840 - DNA, 25 bp, Saccharomyces pastorianus
agagtttctcgtgtttcagttgcag

SEQ ID NO: 19841 - DNA, 25 bp, Saccharomyces pastorianus
gaaaacggtccatgaatcagaatgc

SEQ ID NO: 19842 - DNA, 25 bp, Saccharomyces pastorianus
ttttgaatttatctcgcggcaggcc

SEQ ID NO: 19843 - DNA, 25 bp, Saccharomyces pastorianus
gacgcaaagaaggactctgacaaat

SEQ ID NO: 19844 - DNA, 25 bp, Saccharomyces pastorianus
ataataagaacttccccatcttaag

SEQ ID NO: 19845 - DNA, 25 bp, Saccharomyces pastorianus
gaatgcgtctatttctctaatgcaa

SEQ ID NO: 19846 - DNA, 25 bp, Saccharomyces pastorianus
ggatatcttcaaattctccatcgat

SEQ ID NO: 19847 - DNA, 25 bp, Saccharomyces pastorianus
tggacgccaacaacttattttacgg

SEQ ID NO: 19848 - DNA, 25 bp, Saccharomyces pastorianus
aatcagagatctcactggacgccaa

SEQ ID NO: 19849 - DNA, 25 bp, Saccharomyces pastorianus
tcaggtttccacaacatgactatag

SEQ ID NO: 19850 - DNA, 25 bp, Saccharomyces pastorianus
gcggcaggcctgtttttctacaaga

SEQ ID NO: 19851 - DNA, 25 bp, Saccharomyces pastorianus
gagcttactttactatcaggtttcc

SEQ ID NO: 19852 - DNA, 25 bp, Saccharomyces pastorianus
gtcgggcgatgctactctgcataaa

SEQ ID NO: 19853 - DNA, 25 bp, Saccharomyces pastorianus
atactctaaaccttcgactcagact

SEQ ID NO: 19854 - DNA, 25 bp, Saccharomyces pastorianus
aacttgcaggtttcatctctttcca

SEQ ID NO: 19855 - DNA, 25 bp, Saccharomyces pastorianus
tagtcctggaattattggtaccggt

SEQ ID NO: 19856 - DNA, 25 bp, Saccharomyces pastorianus
aaagccagagctcgttcttcaatac

SEQ ID NO: 19857 - DNA, 25 bp, Saccharomyces pastorianus
taatcaatcttctgtctcgaacgcg

SEQ ID NO: 19858 - DNA, 25 bp, Saccharomyces pastorianus
tctctttccaagaccacttctaata

SEQ ID NO: 19859 - DNA, 25 bp, Saccharomyces pastorianus
gttcttcaataccacgatacctcag

SEQ ID NO: 19860 - DNA, 25 bp, Saccharomyces pastorianus
tccgtcgccattagttagtcctgga

SEQ ID NO: 19861 - DNA, 25 bp, Saccharomyces pastorianus
aataacgccaactcgaactccaatt

SEQ ID NO: 19862 - DNA, 25 bp, Saccharomyces pastorianus
gacttgtcaagcatcgtcaacgggt

SEQ ID NO: 19863 - DNA, 25 bp, Saccharomyces pastorianus
ggagcacgtccccatagaggtcaat

SEQ ID NO: 19864 - DNA, 25 bp, Saccharomyces pastorianus
tatctgtcgctgacggcgcaaaaca

SEQ ID NO: 19865 - DNA, 25 bp, Saccharomyces pastorianus
gtggaggcgctcatgttcgactact

SEQ ID NO: 19866 - DNA, 25 bp, Saccharomyces pastorianus
gcgacctacccatagtgcagttggt

SEQ ID NO: 19867 - DNA, 25 bp, Saccharomyces pastorianus
agttggtcaagcacgtctcggacta

SEQ ID NO: 19868 - DNA, 25 bp, Saccharomyces pastorianus
tggcctgcccatgtgtaaaacgtat

SEQ ID NO: 19869 - DNA, 25 bp, Saccharomyces pastorianus
atacgatcgggatcctgcagcgcga

SEQ ID NO: 19870 - DNA, 25 bp, Saccharomyces pastorianus
aagctactggtgacgcactatctgt

SEQ ID NO: 19871 - DNA, 25 bp, Saccharomyces pastorianus
gccaatcctggagtacatcatgaca

SEQ ID NO: 19872 - DNA, 25 bp, Saccharomyces pastorianus
ttcgaggcgcagatagcacacggca

SEQ ID NO: 19873 - DNA, 25 bp, Saccharomyces pastorianus
caatctcttgaagccggacgacgat

SEQ ID NO: 19874 - DNA, 25 bp, Saccharomyces pastorianus
gaggcgcagaacatcttggtcgctc

SEQ ID NO: 19875 - DNA, 25 bp, Saccharomyces pastorianus
attcttgtccgattcattcgctcaa

SEQ ID NO: 19876 - DNA, 25 bp, Saccharomyces pastorianus
acctcttccgccctaatgaaggaat

SEQ ID NO: 19877 - DNA, 25 bp, Saccharomyces pastorianus
ttggtcgctccaggccctataaagg

SEQ ID NO: 19878 - DNA, 25 bp, Saccharomyces pastorianus
gagcctgaatcaaagcctcaagcag

SEQ ID NO: 19879 - DNA, 25 bp, Saccharomyces pastorianus
tggaggaccagttcggccaagtcac

SEQ ID NO: 19880 - DNA, 25 bp, Saccharomyces pastorianus
gtggctttgaactctagcgagtgtt

SEQ ID NO: 19881 - DNA, 25 bp, Saccharomyces pastorianus
gagcccaagacattgaactatgctt

SEQ ID NO: 19882 - DNA, 25 bp, Saccharomyces pastorianus
tcttcgctcttgcagttcagtgatg

SEQ ID NO: 19883 - DNA, 25 bp, Saccharomyces pastorianus
aggaagcttccctaagagtccaaat

SEQ ID NO: 19884 - DNA, 25 bp, Saccharomyces pastorianus
tgtcgcaaggaagtccactccatga

SEQ ID NO: 19885 - DNA, 25 bp, Saccharomyces pastorianus
ttgctaatgaacctgatcaccctgg

SEQ ID NO: 19886 - DNA, 25 bp, Saccharomyces pastorianus
gttagtcgtatcctgcatcggaatt

SEQ ID NO: 19887 - DNA, 25 bp, Saccharomyces pastorianus
tgtctgtggtcacccaatgtttgaa

SEQ ID NO: 19888 - DNA, 25 bp, Saccharomyces pastorianus
attcctgtatgtggcgttagtcgta

SEQ ID NO: 19889 - DNA, 25 bp, Saccharomyces pastorianus
aaccccaatacgagctgtctgtggt

SEQ ID NO: 19890 - DNA, 25 bp, Saccharomyces pastorianus
tttcaactctcgttcatttccttta

SEQ ID NO: 19891 - DNA, 25 bp, Saccharomyces pastorianus
atttctataacttcgccatgtccaa

SEQ ID NO: 19892 - DNA, 25 bp, Saccharomyces pastorianus
caggtactacgcattcaagatctat

SEQ ID NO: 19893 - DNA, 25 bp, Saccharomyces pastorianus
gatcaccctggttaagagattcctg

SEQ ID NO: 19894 - DNA, 25 bp, Saccharomyces pastorianus
gaatttacttacgtggttcccagca

SEQ ID NO: 19895 - DNA, 25 bp, Saccharomyces pastorianus
atccaatggttgatcccggcaatca

SEQ ID NO: 19896 - DNA, 25 bp, Saccharomyces pastorianus
cggtagtactgttttattgacccat

SEQ ID NO: 19897 - DNA, 25 bp, Saccharomyces pastorianus
gggacacttcaacaccgatacaatg

SEQ ID NO: 19898 - DNA, 25 bp, Saccharomyces pastorianus
gtgagcgtaaattcgccggtagtac

SEQ ID NO: 19899 - DNA, 25 bp, Saccharomyces pastorianus
gtagtgctaaacgatcttcttttgg

SEQ ID NO: 19900 - DNA, 25 bp, Saccharomyces pastorianus
ggaaggccctgctttacaaccagaa

SEQ ID NO: 19901 - DNA, 25 bp, Saccharomyces pastorianus
atccagatgttgatgcccctgaatc

SEQ ID NO: 19902 - DNA, 25 bp, Saccharomyces pastorianus
gtggttcgctaaagtatccctactt

SEQ ID NO: 19903 - DNA, 25 bp, Saccharomyces pastorianus
ataagaagtcttccgccacttggga

SEQ ID NO: 19904 - DNA, 25 bp, Saccharomyces pastorianus
ctaacacgacacatccttggagaat

SEQ ID NO: 19905 - DNA, 25 bp, Saccharomyces pastorianus
aaaactgggcttctaagatctcaaa

SEQ ID NO: 19906 - DNA, 25 bp, Saccharomyces pastorianus
aaggtttgtgctacgatggcccaga

SEQ ID NO: 19907 - DNA, 25 bp, Saccharomyces pastorianus
atgcgttgttcattgcgcgacgtaa

SEQ ID NO: 19908 - DNA, 25 bp, Saccharomyces pastorianus
tagactactcatttttacaaccacc

SEQ ID NO: 19909 - DNA, 25 bp, Saccharomyces pastorianus
aagagatctcgtgatatgtgcgaaa

SEQ ID NO: 19910 - DNA, 25 bp, Saccharomyces pastorianus
gagagttcatcatcggtctatgaca

SEQ ID NO: 19911 - DNA, 25 bp, Saccharomyces pastorianus
gaggctggcgatattgatgttgaca

SEQ ID NO: 19912 - DNA, 25 bp, Saccharomyces pastorianus
tttttacaaccacccgtcgatgcag

SEQ ID NO: 19913 - DNA, 25 bp, Saccharomyces pastorianus
ttctagactagtcgaagtaccgcaa

SEQ ID NO: 19914 - DNA, 25 bp, Saccharomyces pastorianus
aatttctcatggtaagcaactcttg

SEQ ID NO: 19915 - DNA, 25 bp, Saccharomyces pastorianus
gagatgttcacactattctacaatt

SEQ ID NO: 19916 - DNA, 25 bp, Saccharomyces pastorianus
gatgcagtacctgaggctggcgata

SEQ ID NO: 19917 - DNA, 25 bp, Saccharomyces pastorianus
attcagatccactcaacaatgggat

SEQ ID NO: 19918 - DNA, 25 bp, Saccharomyces pastorianus
tgagcaccgactctgtcacagtatt

SEQ ID NO: 19919 - DNA, 25 bp, Saccharomyces pastorianus
ggctgacccaagcttacgagcacaa

SEQ ID NO: 19920 - DNA, 25 bp, Saccharomyces pastorianus
aaattgaacctcttctgagcaccga

SEQ ID NO: 19921 - DNA, 25 bp, Saccharomyces pastorianus
agcctgtttgatcatactgcttcac

SEQ ID NO: 19922 - DNA, 25 bp, Saccharomyces pastorianus
ttggacatcaacgaacggttcctct

SEQ ID NO: 19923 - DNA, 25 bp, Saccharomyces pastorianus
gttgccggagccagtacatcattag

SEQ ID NO: 19924 - DNA, 25 bp, Saccharomyces pastorianus
aacacatttcacgtttcaggctgac

SEQ ID NO: 19925 - DNA, 25 bp, Saccharomyces pastorianus
gacactctcatcactgggaaagcgt

SEQ ID NO: 19926 - DNA, 25 bp, Saccharomyces pastorianus
ttgtgcgcgaacttccaattggaca

SEQ ID NO: 19927 - DNA, 25 bp, Saccharomyces pastorianus
ttccgtcccactgaatagagttgcc

SEQ ID NO: 19928 - DNA, 25 bp, Saccharomyces pastorianus
tattcatgaaccagtattccgtccc

SEQ ID NO: 19929 - DNA, 25 bp, Saccharomyces pastorianus
taatctgttgaaatacgaccaccaa

SEQ ID NO: 19930 - DNA, 25 bp, Saccharomyces pastorianus
gcatcgagattcttcaagggtccag

SEQ ID NO: 19931 - DNA, 25 bp, Saccharomyces pastorianus
tcaagggtccagaactactagtaga

SEQ ID NO: 19932 - DNA, 25 bp, Saccharomyces pastorianus
gattactctttagatctatggtcat

SEQ ID NO: 19933 - DNA, 25 bp, Saccharomyces pastorianus
gtcaaagtgcttggtacaacggatt

SEQ ID NO: 19934 - DNA, 25 bp, Saccharomyces pastorianus
gctaaagaagcaatgggtcacccat

SEQ ID NO: 19935 - DNA, 25 bp, Saccharomyces pastorianus
gggatgttaagcctcataacgtgat

SEQ ID NO: 19936 - DNA, 25 bp, Saccharomyces pastorianus
gaacaatgctagcttccatgatatt

SEQ ID NO: 19937 - DNA, 25 bp, Saccharomyces pastorianus
tttccatggaactagtaatacagat

SEQ ID NO: 19938 - DNA, 25 bp, Saccharomyces pastorianus
tataatgtccgtgttgcatcgagat

SEQ ID NO: 19939 - DNA, 25 bp, Saccharomyces pastorianus
gaaatacgaccaccaagaaagacta

SEQ ID NO: 19940 - DNA, 25 bp, Saccharomyces pastorianus
gggtatctccagtgtgtatctttgg

SEQ ID NO: 19941 - DNA, 25 bp, Saccharomyces pastorianus
tatttcccagaattgtccccagagg

SEQ ID NO: 19942 - DNA, 25 bp, Saccharomyces pastorianus
tcacacgttgctaatttgggatcct

SEQ ID NO: 19943 - DNA, 25 bp, Saccharomyces pastorianus
aagggcatcgccgtggacatgtccc

SEQ ID NO: 19944 - DNA, 25 bp, Saccharomyces pastorianus
gaccaggactcccatatgatgttgt

SEQ ID NO: 19945 - DNA, 25 bp, Saccharomyces pastorianus
tccttccgcgcctttgagagagatg

SEQ ID NO: 19946 - DNA, 25 bp, Saccharomyces pastorianus
aactcccggctctttcgattataga

SEQ ID NO: 19947 - DNA, 25 bp, Saccharomyces pastorianus
gatcttggctaatgactctttcgat

SEQ ID NO: 19948 - DNA, 25 bp, Saccharomyces pastorianus
aagaacgctgcgattgcatcctctg

SEQ ID NO: 19949 - DNA, 25 bp, Saccharomyces pastorianus
ggatttgcaagacagtccctttcct

SEQ ID NO: 19950 - DNA, 25 bp, Saccharomyces pastorianus
gtatccatgttttcgaagtcacagc

SEQ ID NO: 19951 - DNA, 25 bp, Saccharomyces pastorianus
tgggccctagataggctcaccttta

SEQ ID NO: 19952 - DNA, 25 bp, Saccharomyces pastorianus
gaaggaccacgactatttcggcgaa

SEQ ID NO: 19953 - DNA, 25 bp, Saccharomyces pastorianus
tacttctacgtggtggagcagggca

SEQ ID NO: 19954 - DNA, 25 bp, Saccharomyces pastorianus
gtgaccagggtgactacttctacgt

SEQ ID NO: 19955 - DNA, 25 bp, Saccharomyces pastorianus
gaaaagcttgactacgtatgaccgt

SEQ ID NO: 19956 - DNA, 25 bp, Saccharomyces pastorianus
gggagctggctctcatgtacaacag

SEQ ID NO: 19957 - DNA, 25 bp, Saccharomyces pastorianus
aagactattaggtcctgcggtagac

SEQ ID NO: 19958 - DNA, 25 bp, Saccharomyces pastorianus
aggaagatcctgttgggcagctctt

SEQ ID NO: 19959 - DNA, 25 bp, Saccharomyces pastorianus
aacttctacctgatcgagtacggcg

SEQ ID NO: 19960 - DNA, 25 bp, Saccharomyces pastorianus
atgggtctaccatcatcaagcaagg

SEQ ID NO: 19961 - DNA, 25 bp, Saccharomyces pastorianus
gttgaagaccatgcccgtgttgaaa

SEQ ID NO: 19962 - DNA, 25 bp, Saccharomyces pastorianus
gatcggtagcaatcctaatggtgaa

SEQ ID NO: 19963 - DNA, 25 bp, Saccharomyces pastorianus
gtgctattacactctggtttctcaa

SEQ ID NO: 19964 - DNA, 25 bp, Saccharomyces pastorianus
gttcttgcagtatttacgtctttca

SEQ ID NO: 19965 - DNA, 25 bp, Saccharomyces pastorianus
atcgctaaacaatgcacaaaccgta

SEQ ID NO: 19966 - DNA, 25 bp, Saccharomyces pastorianus
gaaatcgttttcactccaagctttg

SEQ ID NO: 19967 - DNA, 25 bp, Saccharomyces pastorianus
aaccgtaatccatgaattgcccaag

SEQ ID NO: 19968 - DNA, 25 bp, Saccharomyces pastorianus
gcagtttctacgttagtgctattac

SEQ ID NO: 19969 - DNA, 25 bp, Saccharomyces pastorianus
tgccaattgagagcaacgacgggat

SEQ ID NO: 19970 - DNA, 25 bp, Saccharomyces pastorianus
aagctttgttgatgtccacgctaag

SEQ ID NO: 19971 - DNA, 25 bp, Saccharomyces pastorianus
acgctcgtctccaaattactttatg

SEQ ID NO: 19972 - DNA, 25 bp, Saccharomyces pastorianus
ggattactattatttgttcttgcag

SEQ ID NO: 19973 - DNA, 25 bp, Saccharomyces pastorianus
gttttgcagtacgacagcagcgcac

SEQ ID NO: 19974 - DNA, 25 bp, Saccharomyces pastorianus
gagatcgtgtactggaactctgata

SEQ ID NO: 19975 - DNA, 25 bp, Saccharomyces pastorianus
aggaccaacgcagcacgatgttcaa

SEQ ID NO: 19976 - DNA, 25 bp, Saccharomyces pastorianus
agtgtgacttccacgaggcgttcaa

SEQ ID NO: 19977 - DNA, 25 bp, Saccharomyces pastorianus
gtcgcatagcgacctaagcagcacg

SEQ ID NO: 19978 - DNA, 25 bp, Saccharomyces pastorianus
tttttacttatcatccccgaagacg

SEQ ID NO: 19979 - DNA, 25 bp, Saccharomyces pastorianus
gaggcaagccagctcatggacgtac

SEQ ID NO: 19980 - DNA, 25 bp, Saccharomyces pastorianus
gcgcacagaactacacggtccaaat

SEQ ID NO: 19981 - DNA, 25 bp, Saccharomyces pastorianus
aactacttcgacaccgtgacggata

SEQ ID NO: 19982 - DNA, 25 bp, Saccharomyces pastorianus
gactacgtcaacttgtcgtcgcata

SEQ ID NO: 19983 - DNA, 25 bp, Saccharomyces pastorianus
ggaaggagtctctgaacgggctaat

SEQ ID NO: 19984 - DNA, 25 bp, Saccharomyces pastorianus
gcaccgccattggttgtctgatcaa

SEQ ID NO: 19985 - DNA, 25 bp, Saccharomyces pastorianus
agcatagccattactttccacgaaa

SEQ ID NO: 19986 - DNA, 25 bp, Saccharomyces pastorianus
aacgtggtgcctcagatcctgcaaa

SEQ ID NO: 19987 - DNA, 25 bp, Saccharomyces pastorianus
agtggtgtttccgagctcatgctgc

SEQ ID NO: 19988 - DNA, 25 bp, Saccharomyces pastorianus
gactggcttcaacatgtctgcgtac

SEQ ID NO: 19989 - DNA, 25 bp, Saccharomyces pastorianus
ggtggcctcatttacatcgctacga

SEQ ID NO: 19990 - DNA, 25 bp, Saccharomyces pastorianus
atgcaccaacatcgtcgtcgagtgg

SEQ ID NO: 19991 - DNA, 25 bp, Saccharomyces pastorianus
agcggtgggtcttacaactgggctc

SEQ ID NO: 19992 - DNA, 25 bp, Saccharomyces pastorianus
tacagctctgcgcaggtcggcataa

SEQ ID NO: 19993 - DNA, 25 bp, Saccharomyces pastorianus
gcgtacttgaacgtcatatccggta

SEQ ID NO: 19994 - DNA, 25 bp, Saccharomyces pastorianus
atctgcttcttgaccctggacaaaa

SEQ ID NO: 19995 - DNA, 25 bp, Saccharomyces pastorianus
agagaagaccgctgtgggccgttcc

SEQ ID NO: 19996 - DNA, 25 bp, Saccharomyces pastorianus
gagagagtacatcgtcccggagatc

SEQ ID NO: 19997 - DNA, 25 bp, Saccharomyces pastorianus
gtatgccatggtcttcaccagagat

SEQ ID NO: 19998 - DNA, 25 bp, Saccharomyces pastorianus
gaggcgtcgagatcgtcagcgcaaa

SEQ ID NO: 19999 - DNA, 25 bp, Saccharomyces pastorianus
ggtgacgaagccaacatcctgatga

SEQ ID NO: 20000 - DNA, 25 bp, Saccharomyces pastorianus
tgacggccgtatcctggacatcaga

SEQ ID NO: 20001 - DNA, 25 bp, Saccharomyces pastorianus
acatcctgatgagctcgtatgccat

SEQ ID NO: 20002 - DNA, 25 bp, Saccharomyces pastorianus
gggccgttccattcaatcgttaaag

SEQ ID NO: 20003 - DNA, 25 bp, Saccharomyces pastorianus
aatcgtcccgtgtgtacagccagtt

SEQ ID NO: 20004 - DNA, 25 bp, Saccharomyces pastorianus
gtctacgccgctcaacagaagattt

SEQ ID NO: 20005 - DNA, 25 bp, Saccharomyces pastorianus
gtgaaaaccctctgatcgtcattat

SEQ ID NO: 20006 - DNA, 25 bp, Saccharomyces pastorianus
gtgtcgaaccttctgggacgcaata

SEQ ID NO: 20007 - DNA, 25 bp, Saccharomyces pastorianus
aacgtgtacgccaaggacttagtca

SEQ ID NO: 20008 - DNA, 25 bp, Saccharomyces pastorianus
aaggcgacgcctttgattataaagc

SEQ ID NO: 20009 - DNA, 25 bp, Saccharomyces pastorianus
gagctgaaactaacttgtgttgcca

SEQ ID NO: 20010 - DNA, 25 bp, Saccharomyces pastorianus
atcggtcaccctgtcatacaagata

SEQ ID NO: 20011 - DNA, 25 bp, Saccharomyces pastorianus
atggccccagtccaaaaactgcgaa

SEQ ID NO: 20012 - DNA, 25 bp, Saccharomyces pastorianus
ccggcagcggccatagaattcgaat

SEQ ID NO: 20013 - DNA, 25 bp, Saccharomyces pastorianus
aagccgaggcagacacattttacat

SEQ ID NO: 20014 - DNA, 25 bp, Saccharomyces pastorianus
ggacttagtcatcgtgtcgaacctt

SEQ ID NO: 20015 - DNA, 25 bp, Saccharomyces pastorianus
gagtccgtagggtccattacagtcg

SEQ ID NO: 20016 - DNA, 25 bp, Saccharomyces pastorianus
aacggtgtgcttatttgcaagctga

SEQ ID NO: 20017 - DNA, 25 bp, Saccharomyces pastorianus
gtatagcttatcaagacgaccaagt

SEQ ID NO: 20018 - DNA, 25 bp, Saccharomyces pastorianus
ggtcagcaaacacgtccaaaggatt

SEQ ID NO: 20019 - DNA, 25 bp, Saccharomyces pastorianus
caggtccacgaggaacgggttgatt

SEQ ID NO: 20020 - DNA, 25 bp, Saccharomyces pastorianus
cagaaggtgggattgtcttgtcaaa

SEQ ID NO: 20021 - DNA, 25 bp, Saccharomyces pastorianus
gagagtcacacttgctgagtgcctt

SEQ ID NO: 20022 - DNA, 25 bp, Saccharomyces pastorianus
ctgagtgccttcagcaatggtggaa

SEQ ID NO: 20023 - DNA, 25 bp, Saccharomyces pastorianus
aatggtggaagtaactctgcggata

SEQ ID NO: 20024 - DNA, 25 bp, Saccharomyces pastorianus
aatcaccagtgtaggcaggtccacg

SEQ ID NO: 20025 - DNA, 25 bp, Saccharomyces pastorianus
aagctagatcgcgtacattggaaat

SEQ ID NO: 20026 - DNA, 25 bp, Saccharomyces pastorianus
atcgcatcagcggaaacaacaaggg

SEQ ID NO: 20027 - DNA, 25 bp, Saccharomyces pastorianus
attgactctgcaaagtatgggcggt

SEQ ID NO: 20028 - DNA, 25 bp, Saccharomyces pastorianus
atgtacaagttacacgggctacggt

SEQ ID NO: 20029 - DNA, 25 bp, Saccharomyces pastorianus
ataattgtcaacttggctgcagtaa

SEQ ID NO: 20030 - DNA, 25 bp, Saccharomyces pastorianus
gaaaggtagcacttcgaatgtacaa

SEQ ID NO: 20031 - DNA, 25 bp, Saccharomyces pastorianus
ccagttgctggtggatactccagag

SEQ ID NO: 20032 - DNA, 25 bp, Saccharomyces pastorianus
gaaggcgacgagtttgttcgtactc

SEQ ID NO: 20033 - DNA, 25 bp, Saccharomyces pastorianus
gggaccgggacattcaccaagtgat

SEQ ID NO: 20034 - DNA, 25 bp, Saccharomyces pastorianus
actgacgaatcgctatctgttagag

SEQ ID NO: 20035 - DNA, 25 bp, Saccharomyces pastorianus
agtattttgacgagccggatggcga

SEQ ID NO: 20036 - DNA, 25 bp, Saccharomyces pastorianus
gaaaatccacaatcaacggtcacga

SEQ ID NO: 20037 - DNA, 25 bp, Saccharomyces pastorianus
aagttagcgtgcctatgggtcctaa

SEQ ID NO: 20038 - DNA, 25 bp, Saccharomyces pastorianus
ttcgtactcccgcagcgaaaggtag

SEQ ID NO: 20039 - DNA, 25 bp, Saccharomyces pastorianus
tgagcaagaccagcacttcgacgta

SEQ ID NO: 20040 - DNA, 25 bp, Saccharomyces pastorianus
ataatcgcggccgtattcttggtca

SEQ ID NO: 20041 - DNA, 25 bp, Saccharomyces pastorianus
cgtattcttggtcacggtcactaga

SEQ ID NO: 20042 - DNA, 25 bp, Saccharomyces pastorianus
acggatcggaaatgtgtccttgaga

SEQ ID NO: 20043 - DNA, 25 bp, Saccharomyces pastorianus
gagctggacggtattgacctgatta

SEQ ID NO: 20044 - DNA, 25 bp, Saccharomyces pastorianus
ggtcactagacctagcagtagcaag

SEQ ID NO: 20045 - DNA, 25 bp, Saccharomyces pastorianus
cacttaccttggaagaacggatcgg

SEQ ID NO: 20046 - DNA, 25 bp, Saccharomyces pastorianus
gcaactactgcaacgagatgctgtt

SEQ ID NO: 20047 - DNA, 25 bp, Saccharomyces pastorianus
ggatgtttatgaacgcaactactgc

SEQ ID NO: 20048 - DNA, 25 bp, Saccharomyces pastorianus
tcttataagtaggttcgattccggt

SEQ ID NO: 20049 - DNA, 25 bp, Saccharomyces pastorianus
gacgtacgtcgtgctggccataatc

SEQ ID NO: 20050 - DNA, 25 bp, Saccharomyces pastorianus
tattccacagactagcatgcaagct

SEQ ID NO: 20051 - DNA, 25 bp, Saccharomyces pastorianus
aaaggtttctcaagtcctacgcact

SEQ ID NO: 20052 - DNA, 25 bp, Saccharomyces pastorianus
atattcctactgatgggtccattcc

SEQ ID NO: 20053 - DNA, 25 bp, Saccharomyces pastorianus
atgcaagctcttaattccacaacaa

SEQ ID NO: 20054 - DNA, 25 bp, Saccharomyces pastorianus
atcaatcagcgccttattacgatgc

SEQ ID NO: 20055 - DNA, 25 bp, Saccharomyces pastorianus
tgatccatttacagtcacttccgat

SEQ ID NO: 20056 - DNA, 25 bp, Saccharomyces pastorianus
gtgcaacggcgcgtaatcaatcagc

SEQ ID NO: 20057 - DNA, 25 bp, Saccharomyces pastorianus
tgcacaaccttggtccactaatgat

SEQ ID NO: 20058 - DNA, 25 bp, Saccharomyces pastorianus
gacgtttgcaaaactacgctctctt

SEQ ID NO: 20059 - DNA, 25 bp, Saccharomyces pastorianus
caggtcgactactacattgagcaaa

SEQ ID NO: 20060 - DNA, 25 bp, Saccharomyces pastorianus
gcactcaatgcctcaaactacagtt

SEQ ID NO: 20061 - DNA, 25 bp, Saccharomyces pastorianus
aaggctacttcttcagcagcaaagt

SEQ ID NO: 20062 - DNA, 25 bp, Saccharomyces pastorianus
ttaggtgacgatgccgctgctgctt

SEQ ID NO: 20063 - DNA, 25 bp, Saccharomyces pastorianus
atgtctaccaacacatgaccactta

SEQ ID NO: 20064 - DNA, 25 bp, Saccharomyces pastorianus
ttctctctgctttacaaagtgccgg

SEQ ID NO: 20065 - DNA, 25 bp, Saccharomyces pastorianus
gaatctgcttccgaatctgcttcag

SEQ ID NO: 20066 - DNA, 25 bp, Saccharomyces pastorianus
aaatcaccaccgctatgcaacaagt

SEQ ID NO: 20067 - DNA, 25 bp, Saccharomyces pastorianus
acggtacctcctctgctagtaagaa

SEQ ID NO: 20068 - DNA, 25 bp, Saccharomyces pastorianus
ctagtaagaacgctggtgccgctat

SEQ ID NO: 20069 - DNA, 25 bp, Saccharomyces pastorianus
gtgccgctatcaacatgggtttctt

SEQ ID NO: 20070 - DNA, 25 bp, Saccharomyces pastorianus
gactggtacctgaaattctctctgc

SEQ ID NO: 20071 - DNA, 25 bp, Saccharomyces pastorianus
ggtatcactgttaccgctttaggtg

SEQ ID NO: 20072 - DNA, 25 bp, Saccharomyces pastorianus
ctatccccgatttgagtctcttaaa

SEQ ID NO: 20073 - DNA, 25 bp, Saccharomyces pastorianus
gctttccggttctgttagatcacat

SEQ ID NO: 20074 - DNA, 25 bp, Saccharomyces pastorianus
gtgccaagaaaacaccgctttccgg

SEQ ID NO: 20075 - DNA, 25 bp, Saccharomyces pastorianus
gtagaccacagttcgtcaggtgcta

SEQ ID NO: 20076 - DNA, 25 bp, Saccharomyces pastorianus
gatgagtctgtctccttgaaagaaa

SEQ ID NO: 20077 - DNA, 25 bp, Saccharomyces pastorianus
gcaagcctgtgggttccgggacaac

SEQ ID NO: 20078 - DNA, 25 bp, Saccharomyces pastorianus
acatgcggctgtctttggattgagt

SEQ ID NO: 20079 - DNA, 25 bp, Saccharomyces pastorianus
aatttgccctaccatttattgagtg

SEQ ID NO: 20080 - DNA, 25 bp, Saccharomyces pastorianus
gaagatctcaaggaacatgcggctg

SEQ ID NO: 20081 - DNA, 25 bp, Saccharomyces pastorianus
aagcaagcacacctggttgtaccag

SEQ ID NO: 20082 - DNA, 25 bp, Saccharomyces pastorianus
gatcacatttcgtctttgctgatgg

SEQ ID NO: 20083 - DNA, 25 bp, Saccharomyces pastorianus
aacgacgtcagtattttcatcgaag

SEQ ID NO: 20084 - DNA, 25 bp, Saccharomyces pastorianus
atcctgtaacagtgggtgacttgat

SEQ ID NO: 20085 - DNA, 25 bp, Saccharomyces pastorianus
gggtgcataaagtcaccgtggacaa

SEQ ID NO: 20086 - DNA, 25 bp, Saccharomyces pastorianus
tcaccgtggacaaagaggatcctgt

SEQ ID NO: 20087 - DNA, 25 bp, Saccharomyces pastorianus
gattaagaatcccaacgacgtcagt

SEQ ID NO: 20088 - DNA, 25 bp, Saccharomyces pastorianus
tagtgtccaccatgattaagaatcc

SEQ ID NO: 20089 - DNA, 25 bp, Saccharomyces pastorianus
taaggcccggcatcctcacattaat

SEQ ID NO: 20090 - DNA, 25 bp, Saccharomyces pastorianus
tgattgagcatatagtgtccaccat

SEQ ID NO: 20091 - DNA, 25 bp, Saccharomyces pastorianus
gaagatgactctataaggcccggca

SEQ ID NO: 20092 - DNA, 25 bp, Saccharomyces pastorianus
gactgtgtcttagaagatggcgata

SEQ ID NO: 20093 - DNA, 25 bp, Saccharomyces pastorianus
gggcggattggatgctatttttgaa

SEQ ID NO: 20094 - DNA, 25 bp, Saccharomyces pastorianus
gaacgacttgaaccaccttttgcaa

SEQ ID NO: 20095 - DNA, 25 bp, Saccharomyces pastorianus
cattacctgttcgtctcttgagaga

SEQ ID NO: 20096 - DNA, 25 bp, Saccharomyces pastorianus
gtagacgtgctgcagatcaccatga

SEQ ID NO: 20097 - DNA, 25 bp, Saccharomyces pastorianus
ggaggcttatttcagcgtgctcaag

SEQ ID NO: 20098 - DNA, 25 bp, Saccharomyces pastorianus
acatgtcctgttgaatctgcacttt

SEQ ID NO: 20099 - DNA, 25 bp, Saccharomyces pastorianus
tagacccgagtctggcgtcgaggat

SEQ ID NO: 20100 - DNA, 25 bp, Saccharomyces pastorianus
atgggaaaattctcaccacgtcgct

SEQ ID NO: 20101 - DNA, 25 bp, Saccharomyces pastorianus
gtcgctgacaccttctaggaactgg

SEQ ID NO: 20102 - DNA, 25 bp, Saccharomyces pastorianus
tggtatggattctgcgctagtcacg

SEQ ID NO: 20103 - DNA, 25 bp, Saccharomyces pastorianus
agacggatatcgaggcccagctgga

SEQ ID NO: 20104 - DNA, 25 bp, Saccharomyces pastorianus
tcgttgcaggcagtccatcggataa

SEQ ID NO: 20105 - DNA, 25 bp, Saccharomyces pastorianus
gaaaaagacaccagccgacaaaatt

SEQ ID NO: 20106 - DNA, 25 bp, Saccharomyces pastorianus
gaaggccttgtacagctctaaaatg

SEQ ID NO: 20107 - DNA, 25 bp, Saccharomyces pastorianus
gacatagtccatcagaacggcattt

SEQ ID NO: 20108 - DNA, 25 bp, Saccharomyces pastorianus
tcttctcgcgagcttcgattacgaa

SEQ ID NO: 20109 - DNA, 25 bp, Saccharomyces pastorianus
gaggcatttgtctctctaaatattc

SEQ ID NO: 20110 - DNA, 25 bp, Saccharomyces pastorianus
aacgcttttagcttcttagacatag

SEQ ID NO: 20111 - DNA, 25 bp, Saccharomyces pastorianus
aaatattccatcgaaggccttgtac

SEQ ID NO: 20112 - DNA, 25 bp, Saccharomyces pastorianus
ggtaatactttaacggccaatgagc

SEQ ID NO: 20113 - DNA, 25 bp, Saccharomyces pastorianus
ggccaatgagcctctcttactaaga

SEQ ID NO: 20114 - DNA, 25 bp, Saccharomyces pastorianus
tgatgaattctccattccacaacgc

SEQ ID NO: 20115 - DNA, 25 bp, Saccharomyces pastorianus
gaacggcatttacggctatctttgt

SEQ ID NO: 20116 - DNA, 25 bp, Saccharomyces pastorianus
cggtgaatcattcccttatttctac

SEQ ID NO: 20117 - DNA, 25 bp, Saccharomyces pastorianus
gagggatcccaacccttttatcgag

SEQ ID NO: 20118 - DNA, 25 bp, Saccharomyces pastorianus
accaccacctagttcagacttgaaa

SEQ ID NO: 20119 - DNA, 25 bp, Saccharomyces pastorianus
gcaacgatgcgatagctgggcctac

SEQ ID NO: 20120 - DNA, 25 bp, Saccharomyces pastorianus
gtgttttccgatcatcgaccagtat

SEQ ID NO: 20121 - DNA, 25 bp, Saccharomyces pastorianus
tatatgcaacattcagggccagagt

SEQ ID NO: 20122 - DNA, 25 bp, Saccharomyces pastorianus
gaaatggcaatcgatttcccgccta

SEQ ID NO: 20123 - DNA, 25 bp, Saccharomyces pastorianus
aagtggttcttgacgtggacccaga

SEQ ID NO: 20124 - DNA, 25 bp, Saccharomyces pastorianus
cccgcctacctataaatttgatcct

SEQ ID NO: 20125 - DNA, 25 bp, Saccharomyces pastorianus
gataccagcttggactgaccggatt

SEQ ID NO: 20126 - DNA, 25 bp, Saccharomyces pastorianus
tccaacaccaattcctgaaccgaaa

SEQ ID NO: 20127 - DNA, 25 bp, Saccharomyces pastorianus
agacgcatgctcttaacagcaccgg

SEQ ID NO: 20128 - DNA, 25 bp, Saccharomyces pastorianus
gttgagccaaatcttctacagttta

SEQ ID NO: 20129 - DNA, 25 bp, Saccharomyces pastorianus
ggcgcttcttttgatgttgagccaa

SEQ ID NO: 20130 - DNA, 25 bp, Saccharomyces pastorianus
tgccacactgccagaaggtttccgg

SEQ ID NO: 20131 - DNA, 25 bp, Saccharomyces pastorianus
tatggctacatttgtgaacggtcac

SEQ ID NO: 20132 - DNA, 25 bp, Saccharomyces pastorianus
gaacggtcacagtttcccaatgaaa

SEQ ID NO: 20133 - DNA, 25 bp, Saccharomyces pastorianus
atcgccaatgttcaaaacctagccc

SEQ ID NO: 20134 - DNA, 25 bp, Saccharomyces pastorianus
ataaggaggccaacgtgccacactg

SEQ ID NO: 20135 - DNA, 25 bp, Saccharomyces pastorianus
atgaatcatctcagtctttgacttt

SEQ ID NO: 20136 - DNA, 25 bp, Saccharomyces pastorianus
gatcactatgtaccagaaggcgctt

SEQ ID NO: 20137 - DNA, 25 bp, Saccharomyces pastorianus
gaacaaccttgcattgaattcagat

SEQ ID NO: 20138 - DNA, 25 bp, Saccharomyces pastorianus
gggcggtatattccactctatgaaa

SEQ ID NO: 20139 - DNA, 25 bp, Saccharomyces pastorianus
gaacttattcgggatgggcggtata

SEQ ID NO: 20140 - DNA, 25 bp, Saccharomyces pastorianus
cttgcgtctcagaacttattcggga

SEQ ID NO: 20141 - DNA, 25 bp, Saccharomyces pastorianus
ggcgagtacgaatgataaacctttg

SEQ ID NO: 20142 - DNA, 25 bp, Saccharomyces pastorianus
acaagagcagctgttaatgggcaaa

SEQ ID NO: 20143 - DNA, 25 bp, Saccharomyces pastorianus
aagctattgggcgaagtcttcaaga

SEQ ID NO: 20144 - DNA, 25 bp, Saccharomyces pastorianus
gatacattgagaaccgtttcggcag

SEQ ID NO: 20145 - DNA, 25 bp, Saccharomyces pastorianus
ttcggcagccatagatgcacaaaat

SEQ ID NO: 20146 - DNA, 25 bp, Saccharomyces pastorianus
aaatggaatcttttggtctagacat

SEQ ID NO: 20147 - DNA, 25 bp, Saccharomyces pastorianus
acatccactttacgcggtgtctgta

SEQ ID NO: 20148 - DNA, 25 bp, Saccharomyces pastorianus
aggctgaaattttccttgcgtctca

SEQ ID NO: 20149 - DNA, 25 bp, Saccharomyces pastorianus
gaaactggcagtcccattccggtag

SEQ ID NO: 20150 - DNA, 25 bp, Saccharomyces pastorianus
aggaccatcaattccattagctccg

SEQ ID NO: 20151 - DNA, 25 bp, Saccharomyces pastorianus
tttatcaatccctgaatcggtcggc

SEQ ID NO: 20152 - DNA, 25 bp, Saccharomyces pastorianus
gctcctatcgcacaagtactttctg

SEQ ID NO: 20153 - DNA, 25 bp, Saccharomyces pastorianus
tattttagctactccaccaattcca

SEQ ID NO: 20154 - DNA, 25 bp, Saccharomyces pastorianus
ttacctggtgctgttcaagagccac

SEQ ID NO: 20155 - DNA, 25 bp, Saccharomyces pastorianus
ggtcccgattccgatgatgatgttt

SEQ ID NO: 20156 - DNA, 25 bp, Saccharomyces pastorianus
ttacccagtgtcaatgaaccccaag

SEQ ID NO: 20157 - DNA, 25 bp, Saccharomyces pastorianus
cccgttctgaacctactatcgatat

SEQ ID NO: 20158 - DNA, 25 bp, Saccharomyces pastorianus
aaacacaatctgcttctgttgcacc

SEQ ID NO: 20159 - DNA, 25 bp, Saccharomyces pastorianus
atatgggtgcatatggtcccgattc

SEQ ID NO: 20160 - DNA, 25 bp, Saccharomyces pastorianus
tacacacatattcttaccacgtcat

SEQ ID NO: 20161 - DNA, 25 bp, Saccharomyces pastorianus
attccatatctacctccaaatcaaa

SEQ ID NO: 20162 - DNA, 25 bp, Saccharomyces pastorianus
accacgtcatcattttgcacttaac

SEQ ID NO: 20163 - DNA, 25 bp, Saccharomyces pastorianus
tgaagatttctccatttggtcccca

SEQ ID NO: 20164 - DNA, 25 bp, Saccharomyces pastorianus
gacgcaattatgagaccattcccga

SEQ ID NO: 20165 - DNA, 25 bp, Saccharomyces pastorianus
gggtacagggctcttgacgcaatta

SEQ ID NO: 20166 - DNA, 25 bp, Saccharomyces pastorianus
aatacgctcgtcatcaggccaatac

SEQ ID NO: 20167 - DNA, 25 bp, Saccharomyces pastorianus
aacgggaatgacgacggccactaca

SEQ ID NO: 20168 - DNA, 25 bp, Saccharomyces pastorianus
atcaaaactaaattcctcctcacaa

SEQ ID NO: 20169 - DNA, 25 bp, Saccharomyces pastorianus
ggatagcccatcatgcagtctagag

SEQ ID NO: 20170 - DNA, 25 bp, Saccharomyces pastorianus
gagcagtaccccagttagcgatgat

SEQ ID NO: 20171 - DNA, 25 bp, Saccharomyces pastorianus
acacgtacgtgaattctcttttgaa

SEQ ID NO: 20172 - DNA, 25 bp, Saccharomyces pastorianus
gaccagttgaaacccttctttgtca

SEQ ID NO: 20173 - DNA, 25 bp, Saccharomyces pastorianus
gaccttataccctaaactggatgtg

SEQ ID NO: 20174 - DNA, 25 bp, Saccharomyces pastorianus
tacagggaacgtctgtgtgcccatt

SEQ ID NO: 20175 - DNA, 25 bp, Saccharomyces pastorianus
aggcgccgaaattgattgctttaca

SEQ ID NO: 20176 - DNA, 25 bp, Saccharomyces pastorianus
caggtggccacgtctctttttaaag

SEQ ID NO: 20177 - DNA, 25 bp, Saccharomyces pastorianus
gatgaccagcatgccattcaaactt

SEQ ID NO: 20178 - DNA, 25 bp, Saccharomyces pastorianus
atcgtttactccagaaaaggcgccg

SEQ ID NO: 20179 - DNA, 25 bp, Saccharomyces pastorianus
aatgacgtttcactaacctctttgc

SEQ ID NO: 20180 - DNA, 25 bp, Saccharomyces pastorianus
agctttgaagagaccttaccaccct

SEQ ID NO: 20181 - DNA, 25 bp, Saccharomyces pastorianus
tcgctcgttcgttggaccagttgaa

SEQ ID NO: 20182 - DNA, 25 bp, Saccharomyces pastorianus
aacttcaagaaacagcgaggccagg

SEQ ID NO: 20183 - DNA, 25 bp, Saccharomyces pastorianus
aacggctgcgaatgaacctgttcct

SEQ ID NO: 20184 - DNA, 25 bp, Saccharomyces pastorianus
gaacacgctatatgtgagccagctg

SEQ ID NO: 20185 - DNA, 25 bp, Saccharomyces pastorianus
tcaccgtattgcgaccgaacgtgta

SEQ ID NO: 20186 - DNA, 25 bp, Saccharomyces pastorianus
ttcctgctgttttccacatttggag

SEQ ID NO: 20187 - DNA, 25 bp, Saccharomyces pastorianus
gaggccaggcctttattacattgag

SEQ ID NO: 20188 - DNA, 25 bp, Saccharomyces pastorianus
tacattgaggaccatcgaccaggcc

SEQ ID NO: 20189 - DNA, 25 bp, Saccharomyces pastorianus
gcagaagactgatcgcgatcctcac

SEQ ID NO: 20190 - DNA, 25 bp, Saccharomyces pastorianus
ggccagtttggctcagatttcattg

SEQ ID NO: 20191 - DNA, 25 bp, Saccharomyces pastorianus
aaagatcaacacacaacggctgcga

SEQ ID NO: 20192 - DNA, 25 bp, Saccharomyces pastorianus
gaacgtgtagcggaacccaagaaca

SEQ ID NO: 20193 - DNA, 25 bp, Saccharomyces pastorianus
gacactgaactacgacagctgtttc

SEQ ID NO: 20194 - DNA, 25 bp, Saccharomyces pastorianus
acaaccgcatgaaccagctttggac

SEQ ID NO: 20195 - DNA, 25 bp, Saccharomyces pastorianus
gaatgggctactacactagacacct

SEQ ID NO: 20196 - DNA, 25 bp, Saccharomyces pastorianus
ctagacacctcgagaccggatcttg

SEQ ID NO: 20197 - DNA, 25 bp, Saccharomyces pastorianus
gaactcacattcattagccttaagc

SEQ ID NO: 20198 - DNA, 25 bp, Saccharomyces pastorianus
attaacttcactatcatcacaaccg

SEQ ID NO: 20199 - DNA, 25 bp, Saccharomyces pastorianus
ggacgatgaccattcgcaagctatt

SEQ ID NO: 20200 - DNA, 25 bp, Saccharomyces pastorianus
gaatctattggtcggcaaggtgtac

SEQ ID NO: 20201 - DNA, 25 bp, Saccharomyces pastorianus
ggtaccagtcacacatattgaactc

SEQ ID NO: 20202 - DNA, 25 bp, Saccharomyces pastorianus
gaaataacgacctccaagctgaaaa

SEQ ID NO: 20203 - DNA, 25 bp, Saccharomyces pastorianus
ggactcacaactcacgtttgcagat

SEQ ID NO: 20204 - DNA, 25 bp, Saccharomyces pastorianus
aatgcatgcggattgttctttagaa

SEQ ID NO: 20205 - DNA, 25 bp, Saccharomyces pastorianus
ggaaatcaaaacttcactgcagtgg

SEQ ID NO: 20206 - DNA, 25 bp, Saccharomyces pastorianus
actaacgttgcggttcggtagagca

SEQ ID NO: 20207 - DNA, 25 bp, Saccharomyces pastorianus
aaaaaatccccgtgcaactgttgct

SEQ ID NO: 20208 - DNA, 25 bp, Saccharomyces pastorianus
ggtatcactaggacttgcgggcaat

SEQ ID NO: 20209 - DNA, 25 bp, Saccharomyces pastorianus
aactgctttccctgactctattcca

SEQ ID NO: 20210 - DNA, 25 bp, Saccharomyces pastorianus
ctaggcttccaaccgtgatttcaaa

SEQ ID NO: 20211 - DNA, 25 bp, Saccharomyces pastorianus
aatagcgggtctacagcaccaactg

SEQ ID NO: 20212 - DNA, 25 bp, Saccharomyces pastorianus
agcaaatcaagggaacggccgccaa

SEQ ID NO: 20213 - DNA, 25 bp, Saccharomyces pastorianus
aatggtgccgcctgcttgtgcaatg

SEQ ID NO: 20214 - DNA, 25 bp, Saccharomyces pastorianus
aactgttgctgaatagcgggtctac

SEQ ID NO: 20215 - DNA, 25 bp, Saccharomyces pastorianus
atgctttttgtttgcgtctgcctac

SEQ ID NO: 20216 - DNA, 25 bp, Saccharomyces pastorianus
gagacagcacaacgatcatgcggat

SEQ ID NO: 20217 - DNA, 25 bp, Saccharomyces pastorianus
aaaggtgacaacaatgccggcaacg

SEQ ID NO: 20218 - DNA, 25 bp, Saccharomyces pastorianus
gcaacgatatttcattgtacgccaa

SEQ ID NO: 20219 - DNA, 25 bp, Saccharomyces pastorianus
acccatcgtggttgttctttcaggc

SEQ ID NO: 20220 - DNA, 25 bp, Saccharomyces pastorianus
gttaagggctacttcccacaattgg

SEQ ID NO: 20221 - DNA, 25 bp, Saccharomyces pastorianus
gggaaaacagatccccattgtgcat

SEQ ID NO: 20222 - DNA, 25 bp, Saccharomyces pastorianus
gcctacatgttttggcagggcttag

SEQ ID NO: 20223 - DNA, 25 bp, Saccharomyces pastorianus
gaaacactctgagccaagtcggtga

SEQ ID NO: 20224 - DNA, 25 bp, Saccharomyces pastorianus
gatcatgcggataaacagtaccttt

SEQ ID NO: 20225 - DNA, 25 bp, Saccharomyces pastorianus
gaaccggctttccaaagaggtgaca

SEQ ID NO: 20226 - DNA, 25 bp, Saccharomyces pastorianus
ggtatagcaccaaatttgcctggct

SEQ ID NO: 20227 - DNA, 25 bp, Saccharomyces pastorianus
tggtgtcatttgctcggactatttt

SEQ ID NO: 20228 - DNA, 25 bp, Saccharomyces pastorianus
tatcggtgacgtgggcgctccaaaa

SEQ ID NO: 20229 - DNA, 25 bp, Saccharomyces pastorianus
aactgcgtagagctgacttatgcga

SEQ ID NO: 20230 - DNA, 25 bp, Saccharomyces pastorianus
gtacggcttcaattggagggccctt

SEQ ID NO: 20231 - DNA, 25 bp, Saccharomyces pastorianus
atcggactgtgttactttttcccag

SEQ ID NO: 20232 - DNA, 25 bp, Saccharomyces pastorianus
gggttcttcattagtgctgtgatat

SEQ ID NO: 20233 - DNA, 25 bp, Saccharomyces pastorianus
ttgttgcgtatctctgcggtatagc

SEQ ID NO: 20234 - DNA, 25 bp, Saccharomyces pastorianus
ggtactccagtagacaacattctta

SEQ ID NO: 20235 - DNA, 25 bp, Saccharomyces pastorianus
aatttgcctggctttatcggtgacg

SEQ ID NO: 20236 - DNA, 25 bp, Saccharomyces pastorianus
ctggcgcaggaaggctcttactata

SEQ ID NO: 20237 - DNA, 25 bp, Saccharomyces pastorianus
gactattcggatcagcactttggtt

SEQ ID NO: 20238 - DNA, 25 bp, Saccharomyces pastorianus
tcagcactttggttcagccgataac

SEQ ID NO: 20239 - DNA, 25 bp, Saccharomyces pastorianus
gataacttgttattgccaggccgag

SEQ ID NO: 20240 - DNA, 25 bp, Saccharomyces pastorianus
gactgggcccgataaagaacatgta

SEQ ID NO: 20241 - DNA, 25 bp, Saccharomyces pastorianus
aggccgaggccatgatatgtctgat

SEQ ID NO: 20242 - DNA, 25 bp, Saccharomyces pastorianus
atcgttgatacagcacactacaggg

SEQ ID NO: 20243 - DNA, 25 bp, Saccharomyces pastorianus
gtgtggtccttcacaaagacacttt

SEQ ID NO: 20244 - DNA, 25 bp, Saccharomyces pastorianus
gaagtagcggccttactgaacaaaa

SEQ ID NO: 20245 - DNA, 25 bp, Saccharomyces pastorianus
aacttcccgcagtttatcagtgtgc

SEQ ID NO: 20246 - DNA, 25 bp, Saccharomyces pastorianus
ttgtacggaaaagtcgcccctccag

SEQ ID NO: 20247 - DNA, 25 bp, Saccharomyces pastorianus
aaccaggccataccgattgggcaat

SEQ ID NO: 20248 - DNA, 25 bp, Saccharomyces pastorianus
ttagcaacatgggtacagcgaatca

SEQ ID NO: 20249 - DNA, 25 bp, Saccharomyces pastorianus
taagaggttctggttgcgtcccaat

SEQ ID NO: 20250 - DNA, 25 bp, Saccharomyces pastorianus
atttcttgaccactttgctgtacga

SEQ ID NO: 20251 - DNA, 25 bp, Saccharomyces pastorianus
gtgactccggaggtaaccgcgaaga

SEQ ID NO: 20252 - DNA, 25 bp, Saccharomyces pastorianus
gcgaatcaaatttacttcatcccag

SEQ ID NO: 20253 - DNA, 25 bp, Saccharomyces pastorianus
gaggaggctacaaaactggcttcaa

SEQ ID NO: 20254 - DNA, 25 bp, Saccharomyces pastorianus
tggcttcaacaagtcccgtaggtga

SEQ ID NO: 20255 - DNA, 25 bp, Saccharomyces pastorianus
aacacggtgtcattctaagcgatac

SEQ ID NO: 20256 - DNA, 25 bp, Saccharomyces pastorianus
taagtatttcttgcccgaagtcacg

SEQ ID NO: 20257 - DNA, 25 bp, Saccharomyces pastorianus
ggatgatccaaaggccaacgaaatt

SEQ ID NO: 20258 - DNA, 25 bp, Saccharomyces pastorianus
gaataagtttgccttagcagctaag

SEQ ID NO: 20259 - DNA, 25 bp, Saccharomyces pastorianus
ggcatacttgatagtcgtggccaaa

SEQ ID NO: 20260 - DNA, 25 bp, Saccharomyces pastorianus
gtccttgaaaagcacccgagtagtt

SEQ ID NO: 20261 - DNA, 25 bp, Saccharomyces pastorianus
gaacaagccagacttatctacggta

SEQ ID NO: 20262 - DNA, 25 bp, Saccharomyces pastorianus
aagtgccaaccatgggactgcaatc

SEQ ID NO: 20263 - DNA, 25 bp, Saccharomyces pastorianus
gaaattccgctgaagtggcatactt

SEQ ID NO: 20264 - DNA, 25 bp, Saccharomyces pastorianus
aggctgtgacctacggcttgggcat

SEQ ID NO: 20265 - DNA, 25 bp, Saccharomyces pastorianus
gaaagtctggatcccgaataccctg

SEQ ID NO: 20266 - DNA, 25 bp, Saccharomyces pastorianus
gaacttgtttcgttgcttcccgcaa

SEQ ID NO: 20267 - DNA, 25 bp, Saccharomyces pastorianus
agtagttcgcaaacgttcgtgccca

SEQ ID NO: 20268 - DNA, 25 bp, Saccharomyces pastorianus
gagccgttgacgatagattctttca

SEQ ID NO: 20269 - DNA, 25 bp, Saccharomyces pastorianus
atgctcccatgatagtgcttggcgt

SEQ ID NO: 20270 - DNA, 25 bp, Saccharomyces pastorianus
aatgttgtagagcagtcctcatcta

SEQ ID NO: 20271 - DNA, 25 bp, Saccharomyces pastorianus
acgggaacacgtcactctggaatag

SEQ ID NO: 20272 - DNA, 25 bp, Saccharomyces pastorianus
gaactttccgacattggaactaaca

SEQ ID NO: 20273 - DNA, 25 bp, Saccharomyces pastorianus
gactccactgaggacaacgggaaca

SEQ ID NO: 20274 - DNA, 25 bp, Saccharomyces pastorianus
tatttttctggattcccttgacctt

SEQ ID NO: 20275 - DNA, 25 bp, Saccharomyces pastorianus
gaactaacattaatgactccactga

SEQ ID NO: 20276 - DNA, 25 bp, Saccharomyces pastorianus
ttgaccttgctgcttttaacgtcgt

SEQ ID NO: 20277 - DNA, 25 bp, Saccharomyces pastorianus
gagcagtcctcatctaatgtggaaa

SEQ ID NO: 20278 - DNA, 25 bp, Saccharomyces pastorianus
atgaggatttgttcccactatcttg

SEQ ID NO: 20279 - DNA, 25 bp, Saccharomyces pastorianus
aatcaagacaactccatcaaccata

SEQ ID NO: 20280 - DNA, 25 bp, Saccharomyces pastorianus
gaaaacctctttgttgccgatgaag

SEQ ID NO: 20281 - DNA, 25 bp, Saccharomyces pastorianus
aactgtcttgatcatcggcgctaag

SEQ ID NO: 20282 - DNA, 25 bp, Saccharomyces pastorianus
tgtcatttccatcgatcatttgccc

SEQ ID NO: 20283 - DNA, 25 bp, Saccharomyces pastorianus
aatcctatcccgatatacacggtgg

SEQ ID NO: 20284 - DNA, 25 bp, Saccharomyces pastorianus
aaaatcggcgttcctgatgccaata

SEQ ID NO: 20285 - DNA, 25 bp, Saccharomyces pastorianus
acggtggctactgtgttcaacgaac

SEQ ID NO: 20286 - DNA, 25 bp, Saccharomyces pastorianus
gttcaacgaacccactgtgctggta

SEQ ID NO: 20287 - DNA, 25 bp, Saccharomyces pastorianus
atatgaaggaaacctcccgcggtgg

SEQ ID NO: 20288 - DNA, 25 bp, Saccharomyces pastorianus
tcagagtttttctcgcatgaccttc

SEQ ID NO: 20289 - DNA, 25 bp, Saccharomyces pastorianus
aaccaattgcaccttttaccaacat

SEQ ID NO: 20290 - DNA, 25 bp, Saccharomyces pastorianus
tacaaacaagctttggccacgggcg

SEQ ID NO: 20291 - DNA, 25 bp, Saccharomyces pastorianus
atgaccttctgccatctttagaact

SEQ ID NO: 20292 - DNA, 25 bp, Saccharomyces pastorianus
tggctcccggtatcgtggacacgga

SEQ ID NO: 20293 - DNA, 25 bp, Saccharomyces pastorianus
caggtcaaggccattgctgtggctc

SEQ ID NO: 20294 - DNA, 25 bp, Saccharomyces pastorianus
gtaagatcgactcgcttgtggccaa

SEQ ID NO: 20295 - DNA, 25 bp, Saccharomyces pastorianus
gcattgcgctgcctgagttgaagaa

SEQ ID NO: 20296 - DNA, 25 bp, Saccharomyces pastorianus
ttgtgtcgttagtttgcattgcgct

SEQ ID NO: 20297 - DNA, 25 bp, Saccharomyces pastorianus
cgacgactccgtgttgaagcaattg

SEQ ID NO: 20298 - DNA, 25 bp, Saccharomyces pastorianus
atggtgacaggttcttctacgtcgt

SEQ ID NO: 20299 - DNA, 25 bp, Saccharomyces pastorianus
accactttgctatgacgttggccaa

SEQ ID NO: 20300 - DNA, 25 bp, Saccharomyces pastorianus
tcttggagcccgtgcagaatgtcaa

SEQ ID NO: 20301 - DNA, 25 bp, Saccharomyces pastorianus
tccgacatgtacttcagctcttggg

SEQ ID NO: 20302 - DNA, 25 bp, Saccharomyces pastorianus
gaacggcatcccagaaggtgctaat

SEQ ID NO: 20303 - DNA, 25 bp, Saccharomyces pastorianus
gagagatactcttcgctaaccaagc

SEQ ID NO: 20304 - DNA, 25 bp, Saccharomyces pastorianus
aacgtcgcctccaagtgtgggttca

SEQ ID NO: 20305 - DNA, 25 bp, Saccharomyces pastorianus
taagctagctcctaccgacaagaag

SEQ ID NO: 20306 - DNA, 25 bp, Saccharomyces pastorianus
gaagacatagctcagttctgccaat

SEQ ID NO: 20307 - DNA, 25 bp, Saccharomyces pastorianus
tactattatcgggtttccttgcaac

SEQ ID NO: 20308 - DNA, 25 bp, Saccharomyces pastorianus
ttgcaaccaattcggccaccaagag

SEQ ID NO: 20309 - DNA, 25 bp, Saccharomyces pastorianus
gtggttcttatcgttaacgtcgcct

SEQ ID NO: 20310 - DNA, 25 bp, Saccharomyces pastorianus
ttcaccccgcagtacaaggaactag

SEQ ID NO: 20311 - DNA, 25 bp, Saccharomyces pastorianus
aagagcctggttccgatgaagacat

SEQ ID NO: 20312 - DNA, 25 bp, Saccharomyces pastorianus
ttaaactacggtgtgactttccctg

SEQ ID NO: 20313 - DNA, 25 bp, Saccharomyces pastorianus
agaagtccggtatgctgggcttgaa

SEQ ID NO: 20314 - DNA, 25 bp, Saccharomyces pastorianus
atctccaacagtattccaggtgcta

SEQ ID NO: 20315 - DNA, 25 bp, Saccharomyces pastorianus
aacggaactccggtgacagaataca

SEQ ID NO: 20316 - DNA, 25 bp, Saccharomyces pastorianus
cggaccaaggatcactgtcttttaa

SEQ ID NO: 20317 - DNA, 25 bp, Saccharomyces pastorianus
gaataccaaactttactctctgctg

SEQ ID NO: 20318 - DNA, 25 bp, Saccharomyces pastorianus
ggtgtatacaccagatagtcccata

SEQ ID NO: 20319 - DNA, 25 bp, Saccharomyces pastorianus
aaggttacatcgctgattgttcaaa

SEQ ID NO: 20320 - DNA, 25 bp, Saccharomyces pastorianus
gaagccacagattcgggattcgtgt

SEQ ID NO: 20321 - DNA, 25 bp, Saccharomyces pastorianus
gcagcagtagcagttcagaccaaac

SEQ ID NO: 20322 - DNA, 25 bp, Saccharomyces pastorianus
acaacctattctactttacctacag

SEQ ID NO: 20323 - DNA, 25 bp, Saccharomyces pastorianus
ggacctcatattcagactattcgga

SEQ ID NO: 20324 - DNA, 25 bp, Saccharomyces pastorianus
tggatactccagcacatgggtgtat

SEQ ID NO: 20325 - DNA, 25 bp, Saccharomyces pastorianus
acgagggtacctttcgacaagcgat

SEQ ID NO: 20326 - DNA, 25 bp, Saccharomyces pastorianus
ttaaacgggccatctcgtagggcgg

SEQ ID NO: 20327 - DNA, 25 bp, Saccharomyces pastorianus
actgaacgcgccgttggtactttag

SEQ ID NO: 20328 - DNA, 25 bp, Saccharomyces pastorianus
tagtgaaaaacacggctcggaactt

SEQ ID NO: 20329 - DNA, 25 bp, Saccharomyces pastorianus
tattgcaacagaagcccaatttctt

SEQ ID NO: 20330 - DNA, 25 bp, Saccharomyces pastorianus
gaattgatcaagcaagcggttcgct

SEQ ID NO: 20331 - DNA, 25 bp, Saccharomyces pastorianus
gtcgaactagagacacccaatggtt

SEQ ID NO: 20332 - DNA, 25 bp, Saccharomyces pastorianus
cggcgatgcgtttgggatttaagta

SEQ ID NO: 20333 - DNA, 25 bp, Saccharomyces pastorianus
gtaccagtgggaccattcaatgact

SEQ ID NO: 20334 - DNA, 25 bp, Saccharomyces pastorianus
gccgttggtactttagccctaatga

SEQ ID NO: 20335 - DNA, 25 bp, Saccharomyces pastorianus
gggtatgtcattttttcgccagaat

SEQ ID NO: 20336 - DNA, 25 bp, Saccharomyces pastorianus
tactgtagactagaacccctcgata

SEQ ID NO: 20337 - DNA, 25 bp, Saccharomyces pastorianus
aacatgagggtacgtttcgacaagt

SEQ ID NO: 20338 - DNA, 25 bp, Saccharomyces pastorianus
taatacctatggtaaagcgggcgaa

SEQ ID NO: 20339 - DNA, 25 bp, Saccharomyces pastorianus
aatcgatcaagccagcggttcactt

SEQ ID NO: 20340 - DNA, 25 bp, Saccharomyces pastorianus
atgggccatcaagcagggcggcaat

SEQ ID NO: 20341 - DNA, 25 bp, Saccharomyces pastorianus
cgtgctgttggtacattatgcctaa

SEQ ID NO: 20342 - DNA, 25 bp, Saccharomyces pastorianus
atgggtagacattcgcaaaactttt

SEQ ID NO: 20343 - DNA, 25 bp, Saccharomyces pastorianus
agcatgggccagaactttttaatac

SEQ ID NO: 20344 - DNA, 25 bp, Saccharomyces pastorianus
actgaagctcaattccttttgatga

SEQ ID NO: 20345 - DNA, 25 bp, Saccharomyces pastorianus
aatgaagagactaaacgtgctgttg

SEQ ID NO: 20346 - DNA, 25 bp, Saccharomyces pastorianus
gcggcaatgcgcttagggtttaaac

SEQ ID NO: 20347 - DNA, 25 bp, Saccharomyces pastorianus
tgctcacctgaacgtgctgggttac

SEQ ID NO: 20348 - DNA, 25 bp, Saccharomyces pastorianus
ctgggttacaagtcaccttctcaga

SEQ ID NO: 20349 - DNA, 25 bp, Saccharomyces pastorianus
agacatggccactggtacgtttagc

SEQ ID NO: 20350 - DNA, 25 bp, Saccharomyces pastorianus
aatctgacttctggcgtgaaaccta

SEQ ID NO: 20351 - DNA, 25 bp, Saccharomyces pastorianus
tgaattctggcttcggattaccgtc

SEQ ID NO: 20352 - DNA, 25 bp, Saccharomyces pastorianus
taaggcttcaagtgtcttcagacaa

SEQ ID NO: 20353 - DNA, 25 bp, Saccharomyces pastorianus
tatctagttggaccgatggcctgct

SEQ ID NO: 20354 - DNA, 25 bp, Saccharomyces pastorianus
gaaacctactatggatttacccgtg

SEQ ID NO: 20355 - DNA, 25 bp, Saccharomyces pastorianus
atttcctgtgtcagaccactatcta

SEQ ID NO: 20356 - DNA, 25 bp, Saccharomyces pastorianus
ttacccgtgacagtggacatttctt

SEQ ID NO: 20357 - DNA, 25 bp, Saccharomyces pastorianus
gctttttctgcacaattacgggttc

SEQ ID NO: 20358 - DNA, 25 bp, Saccharomyces pastorianus
ttcttatgcgtacaatacccgggag

SEQ ID NO: 20359 - DNA, 25 bp, Saccharomyces pastorianus
tgacggcttgtgtaccactgatcaa

SEQ ID NO: 20360 - DNA, 25 bp, Saccharomyces pastorianus
tactccctacaactactcgttattt

SEQ ID NO: 20361 - DNA, 25 bp, Saccharomyces pastorianus
aaatatcttttctcaccagggcgta

SEQ ID NO: 20362 - DNA, 25 bp, Saccharomyces pastorianus
tggtcgtctacgctgttcaatggaa

SEQ ID NO: 20363 - DNA, 25 bp, Saccharomyces pastorianus
tgtctttttcacaggtccaggtaac

SEQ ID NO: 20364 - DNA, 25 bp, Saccharomyces pastorianus
tggtttattattcccaatggtcgtc

SEQ ID NO: 20365 - DNA, 25 bp, Saccharomyces pastorianus
attcctccatcatttggtctttacc

SEQ ID NO: 20366 - DNA, 25 bp, Saccharomyces pastorianus
gtcgtacagttttcaattcctccat

SEQ ID NO: 20367 - DNA, 25 bp, Saccharomyces pastorianus
aacgggttcacttgtgccaatggtc

SEQ ID NO: 20368 - DNA, 25 bp, Saccharomyces pastorianus
tgtcgcaatcgctgttgtcattatc

SEQ ID NO: 20369 - DNA, 25 bp, Saccharomyces pastorianus
ggaagatcacccactttgtgttcaa

SEQ ID NO: 20370 - DNA, 25 bp, Saccharomyces pastorianus
agacagctgctgtggaacgcacttc

SEQ ID NO: 20371 - DNA, 25 bp, Saccharomyces pastorianus
gcctatcatggttgcggtgtgacta

SEQ ID NO: 20372 - DNA, 25 bp, Saccharomyces pastorianus
aacgcacttctggagctattttcaa

SEQ ID NO: 20373 - DNA, 25 bp, Saccharomyces pastorianus
aatccataccagattgcttgctgcc

SEQ ID NO: 20374 - DNA, 25 bp, Saccharomyces pastorianus
ggctctgtgtttgctggattggaat

SEQ ID NO: 20375 - DNA, 25 bp, Saccharomyces pastorianus
cttgtcgcccgtgtatagaatgttt

SEQ ID NO: 20376 - DNA, 25 bp, Saccharomyces pastorianus
ggtgtgactaatttcgtgcggtttc

SEQ ID NO: 20377 - DNA, 25 bp, Saccharomyces pastorianus
ctgagcggtgtagctttccgatgca

SEQ ID NO: 20378 - DNA, 25 bp, Saccharomyces pastorianus
aagtggctcaacgtggcctatcatg

SEQ ID NO: 20379 - DNA, 25 bp, Saccharomyces pastorianus
aactactgctatgtgtgcgtcgtga

SEQ ID NO: 20380 - DNA, 25 bp, Saccharomyces pastorianus
tagatatttttctttgggcatgcgc

SEQ ID NO: 20381 - DNA, 25 bp, Saccharomyces pastorianus
cgaacatagaagctccctttggaat

SEQ ID NO: 20382 - DNA, 25 bp, Saccharomyces pastorianus
ggaatgtcgtttcttccttatacat

SEQ ID NO: 20383 - DNA, 25 bp, Saccharomyces pastorianus
gatgttggcctatggatcgattatc

SEQ ID NO: 20384 - DNA, 25 bp, Saccharomyces pastorianus
gcattaagcgccttacagacagaaa

SEQ ID NO: 20385 - DNA, 25 bp, Saccharomyces pastorianus
gatggccctcatcaatgaacttctg

SEQ ID NO: 20386 - DNA, 25 bp, Saccharomyces pastorianus
actataccacccaaacaagcgatgt

SEQ ID NO: 20387 - DNA, 25 bp, Saccharomyces pastorianus
aagctcatgattttgaccccgaaca

SEQ ID NO: 20388 - DNA, 25 bp, Saccharomyces pastorianus
aattgtaatccgttcatcatctcca

SEQ ID NO: 20389 - DNA, 25 bp, Saccharomyces pastorianus
gggcatgcgcagaattgtaccaaaa

SEQ ID NO: 20390 - DNA, 25 bp, Saccharomyces pastorianus
aaacagattcgctatcttgaggaat

SEQ ID NO: 20391 - DNA, 25 bp, Saccharomyces pastorianus
tactgtccaacggatactccaatct

SEQ ID NO: 20392 - DNA, 25 bp, Saccharomyces pastorianus
gattctttatctctagcgaacattg

SEQ ID NO: 20393 - DNA, 25 bp, Saccharomyces pastorianus
gagatttttccaagatatccaagct

SEQ ID NO: 20394 - DNA, 25 bp, Saccharomyces pastorianus
ctactacacaacctattactttcca

SEQ ID NO: 20395 - DNA, 25 bp, Saccharomyces pastorianus
gtttctttaatggatgcttatgctc

SEQ ID NO: 20396 - DNA, 25 bp, Saccharomyces pastorianus
gcaaaggaaatcatggctctggcca

SEQ ID NO: 20397 - DNA, 25 bp, Saccharomyces pastorianus
gaagcactaaacaactctactacac

SEQ ID NO: 20398 - DNA, 25 bp, Saccharomyces pastorianus
gcttatgctcagtcagaatctgtag

SEQ ID NO: 20399 - DNA, 25 bp, Saccharomyces pastorianus
gaataccgctaaatactcgtcatta

SEQ ID NO: 20400 - DNA, 25 bp, Saccharomyces pastorianus
gtggctgcgcagatatcctattgga

SEQ ID NO: 20401 - DNA, 25 bp, Saccharomyces pastorianus
aagcgtcatcgtcaattgcgttatg

SEQ ID NO: 20402 - DNA, 25 bp, Saccharomyces pastorianus
gctttatatctacagaaggcgctat

SEQ ID NO: 20403 - DNA, 25 bp, Saccharomyces pastorianus
ttgtaccttattttgttggattgaa

SEQ ID NO: 20404 - DNA, 25 bp, Saccharomyces pastorianus
tattagggtcgttgagttactttct

SEQ ID NO: 20405 - DNA, 25 bp, Saccharomyces pastorianus
gatctgtgatctaaattacttctat

SEQ ID NO: 20406 - DNA, 25 bp, Saccharomyces pastorianus
gggcaattgtatatcatatccggaa

SEQ ID NO: 20407 - DNA, 25 bp, Saccharomyces pastorianus
taatcattgtttcctattgactggg

SEQ ID NO: 20408 - DNA, 25 bp, Saccharomyces pastorianus
atttcattcgttttcaagactctac

SEQ ID NO: 20409 - DNA, 25 bp, Saccharomyces pastorianus
gggcgaccgataagggtaccattga

SEQ ID NO: 20410 - DNA, 25 bp, Saccharomyces pastorianus
ggcgctatttggttgatctgtgatc

SEQ ID NO: 20411 - DNA, 25 bp, Saccharomyces pastorianus
gtaccattgatgtctaccaacaaga

SEQ ID NO: 20412 - DNA, 25 bp, Saccharomyces pastorianus
aagactctacagttacctgacgact

SEQ ID NO: 20413 - DNA, 25 bp, Saccharomyces pastorianus
cacgtttaccgattttgtcactcag

SEQ ID NO: 20414 - DNA, 25 bp, Saccharomyces pastorianus
gatatttgaccgtgtcagtccagtg

SEQ ID NO: 20415 - DNA, 25 bp, Saccharomyces pastorianus
aaattctttattcctgaccacacag

SEQ ID NO: 20416 - DNA, 25 bp, Saccharomyces pastorianus
gtataaacgcataatctcttccgag

SEQ ID NO: 20417 - DNA, 25 bp, Saccharomyces pastorianus
gtaaccttggatgcatagcctcgaa

SEQ ID NO: 20418 - DNA, 25 bp, Saccharomyces pastorianus
agatgctctcgatttatcccagatg

SEQ ID NO: 20419 - DNA, 25 bp, Saccharomyces pastorianus
tggcgagggctctttacagttttta

SEQ ID NO: 20420 - DNA, 25 bp, Saccharomyces pastorianus
gatcccgtgggatgaattcactcaa

SEQ ID NO: 20421 - DNA, 25 bp, Saccharomyces pastorianus
aaaatacaatttgcggcgatcccgt

SEQ ID NO: 20422 - DNA, 25 bp, Saccharomyces pastorianus
aaacagttcacatccgttacacaac

SEQ ID NO: 20423 - DNA, 25 bp, Saccharomyces pastorianus
aataatcaaactcacggcacgctac

SEQ ID NO: 20424 - DNA, 25 bp, Saccharomyces pastorianus
atccgacaatagaccatggaccgta

SEQ ID NO: 20425 - DNA, 25 bp, Saccharomyces pastorianus
acggtgactcatttatcattaaggc

SEQ ID NO: 20426 - DNA, 25 bp, Saccharomyces pastorianus
gggtcatcttgaaaatatctcctat

SEQ ID NO: 20427 - DNA, 25 bp, Saccharomyces pastorianus
gaacatgctgctttatcgccaagat

SEQ ID NO: 20428 - DNA, 25 bp, Saccharomyces pastorianus
tctgctgcaggtgtttggttgaaat

SEQ ID NO: 20429 - DNA, 25 bp, Saccharomyces pastorianus
ggtatgctaccattgacctttgcta

SEQ ID NO: 20430 - DNA, 25 bp, Saccharomyces pastorianus
gaatcttgccgacatgattgccaaa

SEQ ID NO: 20431 - DNA, 25 bp, Saccharomyces pastorianus
tgacctttgctactgaatctgacta

SEQ ID NO: 20432 - DNA, 25 bp, Saccharomyces pastorianus
ggctctgcaagagaacatgctgctt

SEQ ID NO: 20433 - DNA, 25 bp, Saccharomyces pastorianus
aaggcaaagcataccatgtcgaaag

SEQ ID NO: 20434 - DNA, 25 bp, Saccharomyces pastorianus
agcttatgatcttgacggcactgaa

SEQ ID NO: 20435 - DNA, 25 bp, Saccharomyces pastorianus
gaggatgttcaaacccctgaataca

SEQ ID NO: 20436 - DNA, 25 bp, Saccharomyces pastorianus
ttacattcgccgtactaaggatggg

SEQ ID NO: 20437 - DNA, 25 bp, Saccharomyces pastorianus
atgagagcactggacttgaagactt

SEQ ID NO: 20438 - DNA, 25 bp, Saccharomyces pastorianus
aggtggcgggcattacactgcatac

SEQ ID NO: 20439 - DNA, 25 bp, Saccharomyces pastorianus
gaaaacagtattgccggatcagcat

SEQ ID NO: 20440 - DNA, 25 bp, Saccharomyces pastorianus
gggagtcacgccaggaatacgattt

SEQ ID NO: 20441 - DNA, 25 bp, Saccharomyces pastorianus
gggctccatctatgatttgtacgcg

SEQ ID NO: 20442 - DNA, 25 bp, Saccharomyces pastorianus
aagaatttggactcaggttcatcga

SEQ ID NO: 20443 - DNA, 25 bp, Saccharomyces pastorianus
gaattgggcggctctaaactacaag

SEQ ID NO: 20444 - DNA, 25 bp, Saccharomyces pastorianus
aatcgcagtttagaggttggacaca

SEQ ID NO: 20445 - DNA, 25 bp, Saccharomyces pastorianus
gttggacacattgaaacgcgggatt

SEQ ID NO: 20446 - DNA, 25 bp, Saccharomyces pastorianus
gaacggaactttccacttcattcaa

SEQ ID NO: 20447 - DNA, 25 bp, Saccharomyces pastorianus
tgtgattcaatcttttcccgtgtct

SEQ ID NO: 20448 - DNA, 25 bp, Saccharomyces pastorianus
tcccgtgtctctgcttttattgaac

SEQ ID NO: 20449 - DNA, 25 bp, Saccharomyces pastorianus
gataactttccacttattaggcgaa

SEQ ID NO: 20450 - DNA, 25 bp, Saccharomyces pastorianus
actaactcaggatcttcccgggaag

SEQ ID NO: 20451 - DNA, 25 bp, Saccharomyces pastorianus
atgatttacatctccctcgtgggat

SEQ ID NO: 20452 - DNA, 25 bp, Saccharomyces pastorianus
gattcccctttacctatctatgaaa

SEQ ID NO: 20453 - DNA, 25 bp, Saccharomyces pastorianus
gaagaatcacctggctacagatcct

SEQ ID NO: 20454 - DNA, 25 bp, Saccharomyces pastorianus
cagatcctcggcttggttttgaata

SEQ ID NO: 20455 - DNA, 25 bp, Saccharomyces pastorianus
atgcgctgtcatatcgatgttcatt

SEQ ID NO: 20456 - DNA, 25 bp, Saccharomyces pastorianus
ttgcctatctttttgctggtttatc

SEQ ID NO: 20457 - DNA, 25 bp, Saccharomyces pastorianus
gcatgggtaccgaagttcctcatag

SEQ ID NO: 20458 - DNA, 25 bp, Saccharomyces pastorianus
taaaagtctcaaaattcccgcatgg

SEQ ID NO: 20459 - DNA, 25 bp, Saccharomyces pastorianus
gctgcgaacgttatattgccggaca

SEQ ID NO: 20460 - DNA, 25 bp, Saccharomyces pastorianus
ggtctggttctgcataaaagtctca

SEQ ID NO: 20461 - DNA, 25 bp, Saccharomyces pastorianus
gcagatattttctccctaggtttaa

SEQ ID NO: 20462 - DNA, 25 bp, Saccharomyces pastorianus
gttcctcatagatggcgagtcactc

SEQ ID NO: 20463 - DNA, 25 bp, Saccharomyces pastorianus
gtgcaggcgccatcattcaggaaga

SEQ ID NO: 20464 - DNA, 25 bp, Saccharomyces pastorianus
aaatgactcgtagtgcaggcgccat

SEQ ID NO: 20465 - DNA, 25 bp, Saccharomyces pastorianus
gaggagacccactgcaaatcaaatt

SEQ ID NO: 20466 - DNA, 25 bp, Saccharomyces pastorianus
cgccaatactgctactgctattact

SEQ ID NO: 20467 - DNA, 25 bp, Saccharomyces pastorianus
ggcggttaagttctacggatatcca

SEQ ID NO: 20468 - DNA, 25 bp, Saccharomyces pastorianus
aatgacgatggctctgatttggata

SEQ ID NO: 20469 - DNA, 25 bp, Saccharomyces pastorianus
cggattctggaaaccgcaacggtat

SEQ ID NO: 20470 - DNA, 25 bp, Saccharomyces pastorianus
gatccatggactttgttccgcgaaa

SEQ ID NO: 20471 - DNA, 25 bp, Saccharomyces pastorianus
gcaacggtatgcaatggatttcgaa

SEQ ID NO: 20472 - DNA, 25 bp, Saccharomyces pastorianus
gacaaagaaacctttattgccgccg

SEQ ID NO: 20473 - DNA, 25 bp, Saccharomyces pastorianus
gctctctcaaggtactgcaggcgaa

SEQ ID NO: 20474 - DNA, 25 bp, Saccharomyces pastorianus
aaagaatccttctgtactcctgtga

SEQ ID NO: 20475 - DNA, 25 bp, Saccharomyces pastorianus
acgaacgattaccaaggccttgctt

SEQ ID NO: 20476 - DNA, 25 bp, Saccharomyces pastorianus
gcaagttattacaaggcggatccat

SEQ ID NO: 20477 - DNA, 25 bp, Saccharomyces pastorianus
aaggccttgctttgctccagcataa

SEQ ID NO: 20478 - DNA, 25 bp, Saccharomyces pastorianus
gcccatgctctgaatgtaccatatt

SEQ ID NO: 20479 - DNA, 25 bp, Saccharomyces pastorianus
aagtactgcatcttcttcggtggaa

SEQ ID NO: 20480 - DNA, 25 bp, Saccharomyces pastorianus
cgttgccttttgaattcgacagatt

SEQ ID NO: 20481 - DNA, 25 bp, Saccharomyces pastorianus
attttgagaacctgtcgccgtacaa

SEQ ID NO: 20482 - DNA, 25 bp, Saccharomyces pastorianus
gggacctcttttgatataccgtcaa

SEQ ID NO: 20483 - DNA, 25 bp, Saccharomyces pastorianus
acagcgtgactccattttcaggtat

SEQ ID NO: 20484 - DNA, 25 bp, Saccharomyces pastorianus
gtcgaaccgctcatcaagtactgca

SEQ ID NO: 20485 - DNA, 25 bp, Saccharomyces pastorianus
ggtgtttgagcagccacttcttaaa

SEQ ID NO: 20486 - DNA, 25 bp, Saccharomyces pastorianus
tgatataccatcgtttttcccacag

SEQ ID NO: 20487 - DNA, 25 bp, Saccharomyces pastorianus
ggcgccaatcttcgcaatattcaat

SEQ ID NO: 20488 - DNA, 25 bp, Saccharomyces pastorianus
agttccctccgacgagattgctata

SEQ ID NO: 20489 - DNA, 25 bp, Saccharomyces pastorianus
taaaagttcaccaccatcagaccag

SEQ ID NO: 20490 - DNA, 25 bp, Saccharomyces pastorianus
ttcagccaagatcattattccccat

SEQ ID NO: 20491 - DNA, 25 bp, Saccharomyces pastorianus
agattctggatctggctctactaag

SEQ ID NO: 20492 - DNA, 25 bp, Saccharomyces pastorianus
gttgctaatgacttccatggccaag

SEQ ID NO: 20493 - DNA, 25 bp, Saccharomyces pastorianus
ggtcaccttttacaatggcatccta

SEQ ID NO: 20494 - DNA, 25 bp, Saccharomyces pastorianus
gatacatattccttcgtcgttgcta

SEQ ID NO: 20495 - DNA, 25 bp, Saccharomyces pastorianus
atgaaggtgatttggccgcttcctt

SEQ ID NO: 20496 - DNA, 25 bp, Saccharomyces pastorianus
aacacgatgcttctttggattcaga

SEQ ID NO: 20497 - DNA, 25 bp, Saccharomyces pastorianus
gatgaaccttgacctttctttacaa

SEQ ID NO: 20498 - DNA, 25 bp, Saccharomyces pastorianus
atggcatcctaccttactgggcaag

SEQ ID NO: 20499 - DNA, 25 bp, Saccharomyces pastorianus
cggcgacgcgtaccattacaatgaa

SEQ ID NO: 20500 - DNA, 25 bp, Saccharomyces pastorianus
aaacgttccagtcgtggctaactca

SEQ ID NO: 20501 - DNA, 25 bp, Saccharomyces pastorianus
atgggacctggctatccttgagaaa

SEQ ID NO: 20502 - DNA, 25 bp, Saccharomyces pastorianus
tactccctggcttgaaaactgacat

SEQ ID NO: 20503 - DNA, 25 bp, Saccharomyces pastorianus
aaatcgttcatctgcggtgtgctat

SEQ ID NO: 20504 - DNA, 25 bp, Saccharomyces pastorianus
gtgctgccactttggaaaccatctt

SEQ ID NO: 20505 - DNA, 25 bp, Saccharomyces pastorianus
ggaaactacgtgctgcccaaaatga

SEQ ID NO: 20506 - DNA, 25 bp, Saccharomyces pastorianus
gaaaaaattgttcgtgctgccactt

SEQ ID NO: 20507 - DNA, 25 bp, Saccharomyces pastorianus
aaatctctgataatctactccctgg

SEQ ID NO: 20508 - DNA, 25 bp, Saccharomyces pastorianus
tccaaattttcttcccagcatgatg

SEQ ID NO: 20509 - DNA, 25 bp, Saccharomyces pastorianus
gataccttgttagtgttttcgccca

SEQ ID NO: 20510 - DNA, 25 bp, Saccharomyces pastorianus
ggctgtgatcctcaattggtcgcaa

SEQ ID NO: 20511 - DNA, 25 bp, Saccharomyces pastorianus
gttttcgcccacgagtgagtttgaa

SEQ ID NO: 20512 - DNA, 25 bp, Saccharomyces pastorianus
tcctgtggaaaatcgtttatcttgc

SEQ ID NO: 20513 - DNA, 25 bp, Saccharomyces pastorianus
gacaagaaaagctggctgaactaac

SEQ ID NO: 20514 - DNA, 25 bp, Saccharomyces pastorianus
gaaatgacagcgagtttaagaaact

SEQ ID NO: 20515 - DNA, 25 bp, Saccharomyces pastorianus
catggttaaccaacaattagcatat

SEQ ID NO: 20516 - DNA, 25 bp, Saccharomyces pastorianus
tagagtcttacccaacggataaatt

SEQ ID NO: 20517 - DNA, 25 bp, Saccharomyces pastorianus
atcgtttatcttgcaagagaaagcc

SEQ ID NO: 20518 - DNA, 25 bp, Saccharomyces pastorianus
gataaattgtggagatcctgtggaa

SEQ ID NO: 20519 - DNA, 25 bp, Saccharomyces pastorianus
gagaaagccaaatatgtcaatgact

SEQ ID NO: 20520 - DNA, 25 bp, Saccharomyces pastorianus
ctctagaacgcaactagacatggtt

SEQ ID NO: 20521 - DNA, 25 bp, Saccharomyces pastorianus
gtttaagaaactctagaacgcaact

SEQ ID NO: 20522 - DNA, 25 bp, Saccharomyces pastorianus
tgtcaatgacttatcacatgatgaa

SEQ ID NO: 20523 - DNA, 25 bp, Saccharomyces pastorianus
aatgacgttaaaccgatttccatcg

SEQ ID NO: 20524 - DNA, 25 bp, Saccharomyces pastorianus
tcgttgggcctaagaagccatgttt

SEQ ID NO: 20525 - DNA, 25 bp, Saccharomyces pastorianus
atgtttttgccacccatgaggagag

SEQ ID NO: 20526 - DNA, 25 bp, Saccharomyces pastorianus
aatagctcaatgacggatagggacg

SEQ ID NO: 20527 - DNA, 25 bp, Saccharomyces pastorianus
gactcaaagagccatccaatctgaa

SEQ ID NO: 20528 - DNA, 25 bp, Saccharomyces pastorianus
aaattgctctatcatcgttgggcct

SEQ ID NO: 20529 - DNA, 25 bp, Saccharomyces pastorianus
aagactgtacaagccatgactcaaa

SEQ ID NO: 20530 - DNA, 25 bp, Saccharomyces pastorianus
ttaacgtcctaaccaaatgcttgaa

SEQ ID NO: 20531 - DNA, 25 bp, Saccharomyces pastorianus
ggcgagacccttaatgaacaaaaca

SEQ ID NO: 20532 - DNA, 25 bp, Saccharomyces pastorianus
aggtcgcagataaaccactttcgaa

SEQ ID NO: 20533 - DNA, 25 bp, Saccharomyces pastorianus
gaaacatgttatccaaacccgaaag

SEQ ID NO: 20534 - DNA, 25 bp, Saccharomyces pastorianus
aatacgctaccagtgcagtgacata

SEQ ID NO: 20535 - DNA, 25 bp, Saccharomyces pastorianus
ggttggtcttattcgatatcttctg

SEQ ID NO: 20536 - DNA, 25 bp, Saccharomyces pastorianus
aaggttaccgctacgacatggacaa

SEQ ID NO: 20537 - DNA, 25 bp, Saccharomyces pastorianus
attgccccagcaagaaactactcta

SEQ ID NO: 20538 - DNA, 25 bp, Saccharomyces pastorianus
aagcatcttccatcgatagtcgttc

SEQ ID NO: 20539 - DNA, 25 bp, Saccharomyces pastorianus
taatcaaggttctaccacccattat

SEQ ID NO: 20540 - DNA, 25 bp, Saccharomyces pastorianus
aaacccagtgctttggctcaggatc

SEQ ID NO: 20541 - DNA, 25 bp, Saccharomyces pastorianus
aactactctaactccaggttggtct

SEQ ID NO: 20542 - DNA, 25 bp, Saccharomyces pastorianus
acatccatgggaggtactacagctt

SEQ ID NO: 20543 - DNA, 25 bp, Saccharomyces pastorianus
gtgacatacttttctactttcggga

SEQ ID NO: 20544 - DNA, 25 bp, Saccharomyces pastorianus
tatacatacagtgactcggcggcgc

SEQ ID NO: 20545 - DNA, 25 bp, Saccharomyces pastorianus
ggttttttaattcttgatgctgtac

SEQ ID NO: 20546 - DNA, 25 bp, Saccharomyces pastorianus
aaatcaagtcacaacccacagagtc

SEQ ID NO: 20547 - DNA, 25 bp, Saccharomyces pastorianus
acagagtcccaactggtcttgcaat

SEQ ID NO: 20548 - DNA, 25 bp, Saccharomyces pastorianus
tttacacggtgtggtcgctttacaa

SEQ ID NO: 20549 - DNA, 25 bp, Saccharomyces pastorianus
aacaagacgttcgaggtggattcgt

SEQ ID NO: 20550 - DNA, 25 bp, Saccharomyces pastorianus
gtaggaacaatgacgatggcgaatt

SEQ ID NO: 20551 - DNA, 25 bp, Saccharomyces pastorianus
gtacgaattcgtttgtaggaacaat

SEQ ID NO: 20552 - DNA, 25 bp, Saccharomyces pastorianus
aacaatatccgtgtctcgatgaaca

SEQ ID NO: 20553 - DNA, 25 bp, Saccharomyces pastorianus
aatcgccgaccatgtcgtcgacgaa

SEQ ID NO: 20554 - DNA, 25 bp, Saccharomyces pastorianus
agtgaaacacccagaatcgacccca

SEQ ID NO: 20555 - DNA, 25 bp, Saccharomyces pastorianus
acgaagagctaagtttacacggtgt

SEQ ID NO: 20556 - DNA, 25 bp, Saccharomyces pastorianus
atttatccgctattgccttcgttta

SEQ ID NO: 20557 - DNA, 25 bp, Saccharomyces pastorianus
attttcaccaaattcaggccctgtt

SEQ ID NO: 20558 - DNA, 25 bp, Saccharomyces pastorianus
ggatatcttggcaggtaccattcaa

SEQ ID NO: 20559 - DNA, 25 bp, Saccharomyces pastorianus
gcttgttgatttcatttccgagcaa

SEQ ID NO: 20560 - DNA, 25 bp, Saccharomyces pastorianus
ttctgtctcttctgtctttgaaaga

SEQ ID NO: 20561 - DNA, 25 bp, Saccharomyces pastorianus
gttaaagccaatgccctacctgaaa

SEQ ID NO: 20562 - DNA, 25 bp, Saccharomyces pastorianus
agagttggagccagcaccattttca

SEQ ID NO: 20563 - DNA, 25 bp, Saccharomyces pastorianus
agaattctatgttaccactggttta

SEQ ID NO: 20564 - DNA, 25 bp, Saccharomyces pastorianus
agtcaatttacactcttctgtctct

SEQ ID NO: 20565 - DNA, 25 bp, Saccharomyces pastorianus
gaacacgtagatgtgccaggccatt

SEQ ID NO: 20566 - DNA, 25 bp, Saccharomyces pastorianus
gacttgggccacattgacgttactg

SEQ ID NO: 20567 - DNA, 25 bp, Saccharomyces pastorianus
aaggctttggaacttgcctctgcag

SEQ ID NO: 20568 - DNA, 25 bp, Saccharomyces pastorianus
gttcgtgggtcatcaacaaggcttt

SEQ ID NO: 20569 - DNA, 25 bp, Saccharomyces pastorianus
tttcaagaccgcttactattccttt

SEQ ID NO: 20570 - DNA, 25 bp, Saccharomyces pastorianus
gccggcatcaccgacgaaaaggatt

SEQ ID NO: 20571 - DNA, 25 bp, Saccharomyces pastorianus
ctagccatgtatgttgccggcatca

SEQ ID NO: 20572 - DNA, 25 bp, Saccharomyces pastorianus
gaatctcgtggtttcaaagccgatg

SEQ ID NO: 20573 - DNA, 25 bp, Saccharomyces pastorianus
acatagacgtgaccgaattgttcca

SEQ ID NO: 20574 - DNA, 25 bp, Saccharomyces pastorianus
tgaagttactttccaaaccgagttg

SEQ ID NO: 20575 - DNA, 25 bp, Saccharomyces pastorianus
tactattccttttacttgcctgttg

SEQ ID NO: 20576 - DNA, 25 bp, Saccharomyces pastorianus
aaggactccacctcagaagccaagt

SEQ ID NO: 20577 - DNA, 25 bp, Saccharomyces pastorianus
aggacgtcttgatcccattgggtga

SEQ ID NO: 20578 - DNA, 25 bp, Saccharomyces pastorianus
aaccattgcaaggtatattccacaa

SEQ ID NO: 20579 - DNA, 25 bp, Saccharomyces pastorianus
gggtataactgcatacgcggtctct

SEQ ID NO: 20580 - DNA, 25 bp, Saccharomyces pastorianus
gttcctgtatgttttgatacctgca

SEQ ID NO: 20581 - DNA, 25 bp, Saccharomyces pastorianus
attcaacactttcaggagattcaaa

SEQ ID NO: 20582 - DNA, 25 bp, Saccharomyces pastorianus
tataactgcatacgcggtctctcca

SEQ ID NO: 20583 - DNA, 25 bp, Saccharomyces pastorianus
gtatgttttgatacctgcagggatt

SEQ ID NO: 20584 - DNA, 25 bp, Saccharomyces pastorianus
aacgccgtattcaacactttcagga

SEQ ID NO: 20585 - DNA, 25 bp, Saccharomyces pastorianus
tgaatatctatatagcaaggctggt

SEQ ID NO: 20586 - DNA, 25 bp, Saccharomyces pastorianus
aaggtatattccacaacgccgtatt

SEQ ID NO: 20587 - DNA, 25 bp, Saccharomyces pastorianus
gagattcaaatctcagttcctgtat

SEQ ID NO: 20588 - DNA, 25 bp, Saccharomyces pastorianus
acctgcagggatttattggtattgg

SEQ ID NO: 20589 - DNA, 25 bp, Saccharomyces pastorianus
gagaatattctgttccaaccaaatg

SEQ ID NO: 20590 - DNA, 25 bp, Saccharomyces pastorianus
agagccatacgttgcgcctgaagag

SEQ ID NO: 20591 - DNA, 25 bp, Saccharomyces pastorianus
ggaaggttccgggagcccattgcat

SEQ ID NO: 20592 - DNA, 25 bp, Saccharomyces pastorianus
aactgttgcaaagctcttggatgag

SEQ ID NO: 20593 - DNA, 25 bp, Saccharomyces pastorianus
attcctgaaaaggactccctgttca

SEQ ID NO: 20594 - DNA, 25 bp, Saccharomyces pastorianus
tcgacccgaccaaaagaatctccat

SEQ ID NO: 20595 - DNA, 25 bp, Saccharomyces pastorianus
cctgttcaaatctttcctcagcgaa

SEQ ID NO: 20596 - DNA, 25 bp, Saccharomyces pastorianus
gaatctccattgaacaactgttgca

SEQ ID NO: 20597 - DNA, 25 bp, Saccharomyces pastorianus
gatcgcattgtatagaacattccag

SEQ ID NO: 20598 - DNA, 25 bp, Saccharomyces pastorianus
cattgcatcctctagaagctgactg

SEQ ID NO: 20599 - DNA, 25 bp, Saccharomyces pastorianus
gttcggttttccaaacagcatggga

SEQ ID NO: 20600 - DNA, 25 bp, Saccharomyces pastorianus
gttccagatgtcacgtacacgttgt

SEQ ID NO: 20601 - DNA, 25 bp, Saccharomyces pastorianus
ggaagacatcaactatggcgttcaa

SEQ ID NO: 20602 - DNA, 25 bp, Saccharomyces pastorianus
aaatgccgagttaagattcccgcca

SEQ ID NO: 20603 - DNA, 25 bp, Saccharomyces pastorianus
tggtactccggattacatagcgcct

SEQ ID NO: 20604 - DNA, 25 bp, Saccharomyces pastorianus
aggtgacacttctcagtttgacaag

SEQ ID NO: 20605 - DNA, 25 bp, Saccharomyces pastorianus
aagttctatgctgccgaagtttgtt

SEQ ID NO: 20606 - DNA, 25 bp, Saccharomyces pastorianus
acacgttgtgtggtactccggatta

SEQ ID NO: 20607 - DNA, 25 bp, Saccharomyces pastorianus
taagattcccgccatttttcaacga

SEQ ID NO: 20608 - DNA, 25 bp, Saccharomyces pastorianus
tcagtttgacaagtaccccgaggaa

SEQ ID NO: 20609 - DNA, 25 bp, Saccharomyces pastorianus
aaatgctggcgggatacactccatt

SEQ ID NO: 20610 - DNA, 25 bp, Saccharomyces pastorianus
gatttgctaagtacgttccagatgt

SEQ ID NO: 20611 - DNA, 25 bp, Saccharomyces pastorianus
gggttcccatccctgatatatatgg

SEQ ID NO: 20612 - DNA, 25 bp, Saccharomyces pastorianus
ttatgcaattatcaagccttatcgg

SEQ ID NO: 20613 - DNA, 25 bp, Saccharomyces pastorianus
gtctaagacgaagcgaggtcctcct

SEQ ID NO: 20614 - DNA, 25 bp, Saccharomyces pastorianus
atatggcccttagactcagaatgaa

SEQ ID NO: 20615 - DNA, 25 bp, Saccharomyces pastorianus
ggtgatgtctcacaatttgcaattg

SEQ ID NO: 20616 - DNA, 25 bp, Saccharomyces pastorianus
gtagttggtgtcgtcgggttcccat

SEQ ID NO: 20617 - DNA, 25 bp, Saccharomyces pastorianus
gacaggcctggcatctttatatttg

SEQ ID NO: 20618 - DNA, 25 bp, Saccharomyces pastorianus
taacaacactatatgggacaggcct

SEQ ID NO: 20619 - DNA, 25 bp, Saccharomyces pastorianus
agccttatcggcagttcttctttgg

SEQ ID NO: 20620 - DNA, 25 bp, Saccharomyces pastorianus
gaggtcctcctgctattacagaaga

SEQ ID NO: 20621 - DNA, 25 bp, Saccharomyces pastorianus
gatatagtccacgattcaccaaata

SEQ ID NO: 20622 - DNA, 25 bp, Saccharomyces pastorianus
ttccgccaaggccaagagagacgtt

SEQ ID NO: 20623 - DNA, 25 bp, Saccharomyces pastorianus
gtcaaattcaagcatcaaccaccgc

SEQ ID NO: 20624 - DNA, 25 bp, Saccharomyces pastorianus
gatggttacttagccttaggtgaca

SEQ ID NO: 20625 - DNA, 25 bp, Saccharomyces pastorianus
ccaatacacctctactttcggtatt

SEQ ID NO: 20626 - DNA, 25 bp, Saccharomyces pastorianus
ccatctttgaaggacagctcttgta

SEQ ID NO: 20627 - DNA, 25 bp, Saccharomyces pastorianus
aaggacggtgtcttgactgacggta

SEQ ID NO: 20628 - DNA, 25 bp, Saccharomyces pastorianus
acaaccagttccgtgaagtcctctt

SEQ ID NO: 20629 - DNA, 25 bp, Saccharomyces pastorianus
cgctcaagccactgacggtcaaatt

SEQ ID NO: 20630 - DNA, 25 bp, Saccharomyces pastorianus
gctcttgtaagaactcaggtacttt

SEQ ID NO: 20631 - DNA, 25 bp, Saccharomyces pastorianus
taggtgacaaggacgtcttctacca

SEQ ID NO: 20632 - DNA, 25 bp, Saccharomyces pastorianus
gtattgccgttcaagctgtttcttc

SEQ ID NO: 20633 - DNA, 25 bp, Saccharomyces pastorianus
ctagggcttatggtacgaaggtcac

SEQ ID NO: 20634 - DNA, 25 bp, Saccharomyces pastorianus
agtacctcccttacaagaaattgca

SEQ ID NO: 20635 - DNA, 25 bp, Saccharomyces pastorianus
ttataacccatcaagctgtgcttcg

SEQ ID NO: 20636 - DNA, 25 bp, Saccharomyces pastorianus
gctgtgcttcggtgcatatatgcat

SEQ ID NO: 20637 - DNA, 25 bp, Saccharomyces pastorianus
aaacattcctgcagtaagtacgtat

SEQ ID NO: 20638 - DNA, 25 bp, Saccharomyces pastorianus
gaacacagcaaacggccaagtacct

SEQ ID NO: 20639 - DNA, 25 bp, Saccharomyces pastorianus
cgaactagatgctggtgtctgtgat

SEQ ID NO: 20640 - DNA, 25 bp, Saccharomyces pastorianus
gaagacttcaaagctcgtgacaatg

SEQ ID NO: 20641 - DNA, 25 bp, Saccharomyces pastorianus
gcatactttatgaacgtcccacaag

SEQ ID NO: 20642 - DNA, 25 bp, Saccharomyces pastorianus
gacagcatggacgtctactctgaag

SEQ ID NO: 20643 - DNA, 25 bp, Saccharomyces pastorianus
acgagtatacgtaccgaggcggaga

SEQ ID NO: 20644 - DNA, 25 bp, Saccharomyces pastorianus
gtatattccgattcaccatttccaa

SEQ ID NO: 20645 - DNA, 25 bp, Saccharomyces pastorianus
gtagcaaccgcttcaggtagcaagt

SEQ ID NO: 20646 - DNA, 25 bp, Saccharomyces pastorianus
gacactaacgttgccgttgggtcag

SEQ ID NO: 20647 - DNA, 25 bp, Saccharomyces pastorianus
cacacctttggtgggcaacggaaat

SEQ ID NO: 20648 - DNA, 25 bp, Saccharomyces pastorianus
aactcaatgaacgacctgcacatca

SEQ ID NO: 20649 - DNA, 25 bp, Saccharomyces pastorianus
aagacggatctggaatcgccgataa

SEQ ID NO: 20650 - DNA, 25 bp, Saccharomyces pastorianus
acaaagatctcttcgcgtggcggat

SEQ ID NO: 20651 - DNA, 25 bp, Saccharomyces pastorianus
atcaagtccaacgtcaatccggaag

SEQ ID NO: 20652 - DNA, 25 bp, Saccharomyces pastorianus
tatttcattcatggcgacgaggctg

SEQ ID NO: 20653 - DNA, 25 bp, Saccharomyces pastorianus
caccatttccaacgtacttgcgaat

SEQ ID NO: 20654 - DNA, 25 bp, Saccharomyces pastorianus
gaacacattgaacggatcttctaca

SEQ ID NO: 20655 - DNA, 25 bp, Saccharomyces pastorianus
tagtgatgacactgctaccaccatt

SEQ ID NO: 20656 - DNA, 25 bp, Saccharomyces pastorianus
aactccaaatcgcagctagtaccta

SEQ ID NO: 20657 - DNA, 25 bp, Saccharomyces pastorianus
gatatcattatgtgctaccacgccc

SEQ ID NO: 20658 - DNA, 25 bp, Saccharomyces pastorianus
gcccgcatgagcgagcctgaaatgg

SEQ ID NO: 20659 - DNA, 25 bp, Saccharomyces pastorianus
aaaggcttgtgatgcttacccgagc

SEQ ID NO: 20660 - DNA, 25 bp, Saccharomyces pastorianus
ccacgccctaattcatcatttcaaa

SEQ ID NO: 20661 - DNA, 25 bp, Saccharomyces pastorianus
tttattaccgtactcaaaggcttgt

SEQ ID NO: 20662 - DNA, 25 bp, Saccharomyces pastorianus
tgttaataatccataccaccactct

SEQ ID NO: 20663 - DNA, 25 bp, Saccharomyces pastorianus
gcgtgagaacccaaccaatgaactt

SEQ ID NO: 20664 - DNA, 25 bp, Saccharomyces pastorianus
gacattaatatggatctgcctcagg

SEQ ID NO: 20665 - DNA, 25 bp, Saccharomyces pastorianus
atttccgatgacttagaactcccac

SEQ ID NO: 20666 - DNA, 25 bp, Saccharomyces pastorianus
aagatttcggcgtcactgagaatgt

SEQ ID NO: 20667 - DNA, 25 bp, Saccharomyces pastorianus
gaaaattccaaggtcccagctattg

SEQ ID NO: 20668 - DNA, 25 bp, Saccharomyces pastorianus
gagagttcctcgtaaagacgttcca

SEQ ID NO: 20669 - DNA, 25 bp, Saccharomyces pastorianus
ggaacacttcgccacaggttatgat

SEQ ID NO: 20670 - DNA, 25 bp, Saccharomyces pastorianus
atttgaaaagctttcccctcgacag

SEQ ID NO: 20671 - DNA, 25 bp, Saccharomyces pastorianus
gaaaccctaaagattgccgccacag

SEQ ID NO: 20672 - DNA, 25 bp, Saccharomyces pastorianus
gatctggctgatcaagtttccgtca

SEQ ID NO: 20673 - DNA, 25 bp, Saccharomyces pastorianus
gtatgagcttgttggttccttcaga

SEQ ID NO: 20674 - DNA, 25 bp, Saccharomyces pastorianus
gagactttattgacacagggcaacc

SEQ ID NO: 20675 - DNA, 25 bp, Saccharomyces pastorianus
tgaatcctccacaactatgaccgtt

SEQ ID NO: 20676 - DNA, 25 bp, Saccharomyces pastorianus
aggatagcacaccattacaattcga

SEQ ID NO: 20677 - DNA, 25 bp, Saccharomyces pastorianus
gcgacgccttttatggagatgctta

SEQ ID NO: 20678 - DNA, 25 bp, Saccharomyces pastorianus
gatttacagtttcccttgcgacgcc

SEQ ID NO: 20679 - DNA, 25 bp, Saccharomyces pastorianus
atatccatcttactatactacaggt

SEQ ID NO: 20680 - DNA, 25 bp, Saccharomyces pastorianus
actacaggtcacgtattgcgcaaat

SEQ ID NO: 20681 - DNA, 25 bp, Saccharomyces pastorianus
aataccgttttatcagatccttaga

SEQ ID NO: 20682 - DNA, 25 bp, Saccharomyces pastorianus
gaaacgatcaccttcaccaaaaatc

SEQ ID NO: 20683 - DNA, 25 bp, Saccharomyces pastorianus
aggctcgctggttgtcagactacaa

SEQ ID NO: 20684 - DNA, 25 bp, Saccharomyces pastorianus
aagcatacaccggacttgccaaaat

SEQ ID NO: 20685 - DNA, 25 bp, Saccharomyces pastorianus
tgaaaaatcctacttgttacctgaa

SEQ ID NO: 20686 - DNA, 25 bp, Saccharomyces pastorianus
gattacttgtttgtgcactgaggac

SEQ ID NO: 20687 - DNA, 25 bp, Saccharomyces pastorianus
cagcaccatcttctacatcaataat

SEQ ID NO: 20688 - DNA, 25 bp, Saccharomyces pastorianus
ttgcggagatcttacaaccgtaaag

SEQ ID NO: 20689 - DNA, 25 bp, Saccharomyces pastorianus
gaaacctgtgttttattatcgaata

SEQ ID NO: 20690 - DNA, 25 bp, Saccharomyces pastorianus
gaccactattcccacggacaggtta

SEQ ID NO: 20691 - DNA, 25 bp, Saccharomyces pastorianus
gtgcagtcgcaatgtgtatcaagga

SEQ ID NO: 20692 - DNA, 25 bp, Saccharomyces pastorianus
gctggcctgcaaccaaattctataa

SEQ ID NO: 20693 - DNA, 25 bp, Saccharomyces pastorianus
caaggagtacttcacgatttatgga

SEQ ID NO: 20694 - DNA, 25 bp, Saccharomyces pastorianus
aactgctggaaagccctgaggtgtc

SEQ ID NO: 20695 - DNA, 25 bp, Saccharomyces pastorianus
acgaagaccctcagattatcatatt

SEQ ID NO: 20696 - DNA, 25 bp, Saccharomyces pastorianus
aggttcgagttgatctgctatttat

SEQ ID NO: 20697 - DNA, 25 bp, Saccharomyces pastorianus
agaattatgttagtgctggcctgca

SEQ ID NO: 20698 - DNA, 25 bp, Saccharomyces pastorianus
aatgatggttactgtgctgtgcccg

SEQ ID NO: 20699 - DNA, 25 bp, Saccharomyces pastorianus
gcaacagcagcatactcaggagccg

SEQ ID NO: 20700 - DNA, 25 bp, Saccharomyces pastorianus
aacccgcccagcctagtgtgatata

SEQ ID NO: 20701 - DNA, 25 bp, Saccharomyces pastorianus
gatatactactttgtggagttgacc

SEQ ID NO: 20702 - DNA, 25 bp, Saccharomyces pastorianus
aagcacttcaacgatatacacgaca

SEQ ID NO: 20703 - DNA, 25 bp, Saccharomyces pastorianus
gtgaattcgggaccactaatcaacc

SEQ ID NO: 20704 - DNA, 25 bp, Saccharomyces pastorianus
tcaggagccggaaggaccagaccaa

SEQ ID NO: 20705 - DNA, 25 bp, Saccharomyces pastorianus
gacccgttagtagaagaatatccca

SEQ ID NO: 20706 - DNA, 25 bp, Saccharomyces pastorianus
tggagttgaccaatgcaggcataca

SEQ ID NO: 20707 - DNA, 25 bp, Saccharomyces pastorianus
agcggtgcccgttacggccacggca

SEQ ID NO: 20708 - DNA, 25 bp, Saccharomyces pastorianus
gaccagaccaaggtggacccgttag

SEQ ID NO: 20709 - DNA, 25 bp, Saccharomyces pastorianus
aagaatatcccatgggtgaattcgg

SEQ ID NO: 20710 - DNA, 25 bp, Saccharomyces pastorianus
gaacgctatcattgccgggtttttt

SEQ ID NO: 20711 - DNA, 25 bp, Saccharomyces pastorianus
gattgcgctgtgaaagccgtcagga

SEQ ID NO: 20712 - DNA, 25 bp, Saccharomyces pastorianus
gggctcatgttccagagatacgctg

SEQ ID NO: 20713 - DNA, 25 bp, Saccharomyces pastorianus
gagaagatccatggaacgctatcat

SEQ ID NO: 20714 - DNA, 25 bp, Saccharomyces pastorianus
gatccatgtcccatagtcatactta

SEQ ID NO: 20715 - DNA, 25 bp, Saccharomyces pastorianus
cgcgtgctcctgtgcttggtggtaa

SEQ ID NO: 20716 - DNA, 25 bp, Saccharomyces pastorianus
ccagagatacgctgcttggcaagcc

SEQ ID NO: 20717 - DNA, 25 bp, Saccharomyces pastorianus
aaagccgtcaggaaaagagaagatc

SEQ ID NO: 20718 - DNA, 25 bp, Saccharomyces pastorianus
tttactggtggtgccttggctgtaa

SEQ ID NO: 20719 - DNA, 25 bp, Saccharomyces pastorianus
ttggagacatacaagaaacagttct

SEQ ID NO: 20720 - DNA, 25 bp, Saccharomyces pastorianus
gctcctgtgcttggtggtaattttg

SEQ ID NO: 20721 - DNA, 25 bp, Saccharomyces pastorianus
tagcaccagaagatagcggcaactc

SEQ ID NO: 20722 - DNA, 25 bp, Saccharomyces pastorianus
cgttgatatcggctctattggtaaa

SEQ ID NO: 20723 - DNA, 25 bp, Saccharomyces pastorianus
agtcattccgttcaagaaggcccct

SEQ ID NO: 20724 - DNA, 25 bp, Saccharomyces pastorianus
agctatgctacatccatttatcaca

SEQ ID NO: 20725 - DNA, 25 bp, Saccharomyces pastorianus
aaactccgacaacgatgctaatcat

SEQ ID NO: 20726 - DNA, 25 bp, Saccharomyces pastorianus
tagccggtgtgcttaatttgaatcc

SEQ ID NO: 20727 - DNA, 25 bp, Saccharomyces pastorianus
ttacctggcccatcgagaaaacacg

SEQ ID NO: 20728 - DNA, 25 bp, Saccharomyces pastorianus
gtctgattcatttcttagccggtgt

SEQ ID NO: 20729 - DNA, 25 bp, Saccharomyces pastorianus
caactcctcccaaaagcatcgtatg

SEQ ID NO: 20730 - DNA, 25 bp, Saccharomyces pastorianus
tattcacaggtgaatggtttcctcc

SEQ ID NO: 20731 - DNA, 25 bp, Saccharomyces pastorianus
ttaatgctggcgacggcagtgctga

SEQ ID NO: 20732 - DNA, 25 bp, Saccharomyces pastorianus
gcaactgggccaggagttccaattg

SEQ ID NO: 20733 - DNA, 25 bp, Saccharomyces pastorianus
gaaaatgctgccactttgcaactgg

SEQ ID NO: 20734 - DNA, 25 bp, Saccharomyces pastorianus
ggagtccatcgatgttctactagaa

SEQ ID NO: 20735 - DNA, 25 bp, Saccharomyces pastorianus
ttacacccgtttgaggtggcgcaac

SEQ ID NO: 20736 - DNA, 25 bp, Saccharomyces pastorianus
gcgccaatgacgaaacgactgctgt

SEQ ID NO: 20737 - DNA, 25 bp, Saccharomyces pastorianus
gcaactgggctctttggcctgtgac

SEQ ID NO: 20738 - DNA, 25 bp, Saccharomyces pastorianus
gaaaccgtgggtgctgttatacagc

SEQ ID NO: 20739 - DNA, 25 bp, Saccharomyces pastorianus
agctgctgaaaagcaccggcttaca

SEQ ID NO: 20740 - DNA, 25 bp, Saccharomyces pastorianus
tgcagtacttgacgagtttctcccg

SEQ ID NO: 20741 - DNA, 25 bp, Saccharomyces pastorianus
gtttctcccggttcagagaccagga

SEQ ID NO: 20742 - DNA, 25 bp, Saccharomyces pastorianus
gcgaggccaggctagtgatcaaaga

SEQ ID NO: 20743 - DNA, 25 bp, Saccharomyces pastorianus
gacgacaaattcactgtttccgcca

SEQ ID NO: 20744 - DNA, 25 bp, Saccharomyces pastorianus
ctacgatttgccatccaacaaggaa

SEQ ID NO: 20745 - DNA, 25 bp, Saccharomyces pastorianus
gttggtgctatgagagaaatcgaaa

SEQ ID NO: 20746 - DNA, 25 bp, Saccharomyces pastorianus
tgctaccaccaactactcaagttgt

SEQ ID NO: 20747 - DNA, 25 bp, Saccharomyces pastorianus
aaattttcacattgctaccaccaac

SEQ ID NO: 20748 - DNA, 25 bp, Saccharomyces pastorianus
caccaagttgagagacgacaaattc

SEQ ID NO: 20749 - DNA, 25 bp, Saccharomyces pastorianus
atcaactacgatttgccatccaaca

SEQ ID NO: 20750 - DNA, 25 bp, Saccharomyces pastorianus
aatgtttgaccgatttgtacgattc

SEQ ID NO: 20751 - DNA, 25 bp, Saccharomyces pastorianus
cactgtttccgccatctactctgat

SEQ ID NO: 20752 - DNA, 25 bp, Saccharomyces pastorianus
gacttcaagtatgaatgtttgaccg

SEQ ID NO: 20753 - DNA, 25 bp, Saccharomyces pastorianus
aaattcactgtttccgccatctact

SEQ ID NO: 20754 - DNA, 25 bp, Saccharomyces pastorianus
atatacttcaagtgcggcttcccga

SEQ ID NO: 20755 - DNA, 25 bp, Saccharomyces pastorianus
gtttccaagacagcgttgcgttcat

SEQ ID NO: 20756 - DNA, 25 bp, Saccharomyces pastorianus
tagacgagtgcccttgtttccaaga

SEQ ID NO: 20757 - DNA, 25 bp, Saccharomyces pastorianus
gcaagctcgaatgtccactgtatat

SEQ ID NO: 20758 - DNA, 25 bp, Saccharomyces pastorianus
ggcttcccgaacctacatatcgaaa

SEQ ID NO: 20759 - DNA, 25 bp, Saccharomyces pastorianus
caggttactggtgggcttagcgttt

SEQ ID NO: 20760 - DNA, 25 bp, Saccharomyces pastorianus
agaggttcgggttcacatcagtgta

SEQ ID NO: 20761 - DNA, 25 bp, Saccharomyces pastorianus
cgttggtgtactctctgctaattaa

SEQ ID NO: 20762 - DNA, 25 bp, Saccharomyces pastorianus
ttcgttatttatgcgggaatcccct

SEQ ID NO: 20763 - DNA, 25 bp, Saccharomyces pastorianus
gtggcatgcatggactactggactt

SEQ ID NO: 20764 - DNA, 25 bp, Saccharomyces pastorianus
tcgacatagtgggacggttcgttat

SEQ ID NO: 20765 - DNA, 25 bp, Saccharomyces pastorianus
attgccagcgccgttttcaagagat

SEQ ID NO: 20766 - DNA, 25 bp, Saccharomyces pastorianus
aagcgtctcgagaatagccgccgga

SEQ ID NO: 20767 - DNA, 25 bp, Saccharomyces pastorianus
gccagcgccgttttcaagagatctc

SEQ ID NO: 20768 - DNA, 25 bp, Saccharomyces pastorianus
gttgcctccgcaagcgtctcgagaa

SEQ ID NO: 20769 - DNA, 25 bp, Saccharomyces pastorianus
gggcaactcgttcacgtcgttcaaa

SEQ ID NO: 20770 - DNA, 25 bp, Saccharomyces pastorianus
atgccaagacgtacgggcccttaag

SEQ ID NO: 20771 - DNA, 25 bp, Saccharomyces pastorianus
gttcacgtcgttcaaagagtacaga

SEQ ID NO: 20772 - DNA, 25 bp, Saccharomyces pastorianus
atgatcgctcaaagtacaagattag

SEQ ID NO: 20773 - DNA, 25 bp, Saccharomyces pastorianus
tacgggcccttaagcgcctcgttgg

SEQ ID NO: 20774 - DNA, 25 bp, Saccharomyces pastorianus
gaatagccgccggagccattgccag

SEQ ID NO: 20775 - DNA, 25 bp, Saccharomyces pastorianus
gagtacagagagaatgccaagacgt

SEQ ID NO: 20776 - DNA, 25 bp, Saccharomyces pastorianus
gcattttactattcttacccaacca

SEQ ID NO: 20777 - DNA, 25 bp, Saccharomyces pastorianus
gcagccagtgccatatatcaagttt

SEQ ID NO: 20778 - DNA, 25 bp, Saccharomyces pastorianus
aatcccctcatacattgtctgtgtg

SEQ ID NO: 20779 - DNA, 25 bp, Saccharomyces pastorianus
acttcgggacgtacgagttctgcaa

SEQ ID NO: 20780 - DNA, 25 bp, Saccharomyces pastorianus
aagacggccatcagtggtgcctgtg

SEQ ID NO: 20781 - DNA, 25 bp, Saccharomyces pastorianus
aacacctccgcatcagtatggcaga

SEQ ID NO: 20782 - DNA, 25 bp, Saccharomyces pastorianus
tatcagcggatcgacatgtgcggcg

SEQ ID NO: 20783 - DNA, 25 bp, Saccharomyces pastorianus
aacggcctcagacgcactaatgaac

SEQ ID NO: 20784 - DNA, 25 bp, Saccharomyces pastorianus
gcgatcacaacacctttagactgca

SEQ ID NO: 20785 - DNA, 25 bp, Saccharomyces pastorianus
tgaacatcccattcgcagcatttaa

SEQ ID NO: 20786 - DNA, 25 bp, Saccharomyces pastorianus
gaagaacctgattgacccaagcgat

SEQ ID NO: 20787 - DNA, 25 bp, Saccharomyces pastorianus
agtcgtacatggcacctgagcgtat

SEQ ID NO: 20788 - DNA, 25 bp, Saccharomyces pastorianus
gaaagacgcaccaaaatcctacggg

SEQ ID NO: 20789 - DNA, 25 bp, Saccharomyces pastorianus
atttattgccaacgctgtcatccat

SEQ ID NO: 20790 - DNA, 25 bp, Saccharomyces pastorianus
tccatatccaccagaaactttcgac

SEQ ID NO: 20791 - DNA, 25 bp, Saccharomyces pastorianus
accacccaggttgccatcagaaaga

SEQ ID NO: 20792 - DNA, 25 bp, Saccharomyces pastorianus
gaaagaagacccacttacacagcct

SEQ ID NO: 20793 - DNA, 25 bp, Saccharomyces pastorianus
aaacatattgtgctctgccaaccaa

SEQ ID NO: 20794 - DNA, 25 bp, Saccharomyces pastorianus
acggaacatccctggctggtaaaat

SEQ ID NO: 20795 - DNA, 25 bp, Saccharomyces pastorianus
aattgagcgccattgttgacggacc

SEQ ID NO: 20796 - DNA, 25 bp, Saccharomyces pastorianus
gcacctgagcgtatcaagtccttga

SEQ ID NO: 20797 - DNA, 25 bp, Saccharomyces pastorianus
tcagaaagattcagtcccgacgcac

SEQ ID NO: 20798 - DNA, 25 bp, Saccharomyces pastorianus
tttccaattcttgggctacttgggc

SEQ ID NO: 20799 - DNA, 25 bp, Saccharomyces pastorianus
caattcttgggctacttgggcagtt

SEQ ID NO: 20800 - DNA, 25 bp, Saccharomyces pastorianus
aaccaggtccgctcgatctttacag

SEQ ID NO: 20801 - DNA, 25 bp, Saccharomyces pastorianus
atatttttcttcaaccaggtccgct

SEQ ID NO: 20802 - DNA, 25 bp, Saccharomyces pastorianus
tcgatctttacagctttgcacacac

SEQ ID NO: 20803 - DNA, 25 bp, Saccharomyces pastorianus
ctacttgggcagttgcgttgtgatt

SEQ ID NO: 20804 - DNA, 25 bp, Saccharomyces pastorianus
aatcaagttgtcaagaagggccttt

SEQ ID NO: 20805 - DNA, 25 bp, Saccharomyces pastorianus
attcttgggctacttgggcagttgc

SEQ ID NO: 20806 - DNA, 25 bp, Saccharomyces pastorianus
aggtccgctcgatctttacagcttt

SEQ ID NO: 20807 - DNA, 25 bp, Saccharomyces pastorianus
atctttacagctttgcacacaccca

SEQ ID NO: 20808 - DNA, 25 bp, Saccharomyces pastorianus
ttttcttcaaccaggtccgctcgat

SEQ ID NO: 20809 - DNA, 25 bp, Saccharomyces pastorianus
ttgcttcggcgaagagccctaagag

SEQ ID NO: 20810 - DNA, 25 bp, Saccharomyces pastorianus
gacctttgcgatccagcatgggaga

SEQ ID NO: 20811 - DNA, 25 bp, Saccharomyces pastorianus
aatatgctacgatattcgcttcccg

SEQ ID NO: 20812 - DNA, 25 bp, Saccharomyces pastorianus
tatgtttccccagtgcatttactac

SEQ ID NO: 20813 - DNA, 25 bp, Saccharomyces pastorianus
gtccgcagctttttgttacagattt

SEQ ID NO: 20814 - DNA, 25 bp, Saccharomyces pastorianus
aaaactccggtctatgggagctgaa

SEQ ID NO: 20815 - DNA, 25 bp, Saccharomyces pastorianus
gatcgggtcaagaatgttctcctct

SEQ ID NO: 20816 - DNA, 25 bp, Saccharomyces pastorianus
atgctatgtggtcatgccaggacaa

SEQ ID NO: 20817 - DNA, 25 bp, Saccharomyces pastorianus
gtaatagctcgtgcagacccaaatt

SEQ ID NO: 20818 - DNA, 25 bp, Saccharomyces pastorianus
acccaaattgtgtcggtccgcagct

SEQ ID NO: 20819 - DNA, 25 bp, Saccharomyces pastorianus
aagaaggtgtccacgacctttgcga

SEQ ID NO: 20820 - DNA, 25 bp, Saccharomyces pastorianus
attgagaacatttgaccagtacgca

SEQ ID NO: 20821 - DNA, 25 bp, Saccharomyces pastorianus
gaggtaaagaaatggcccgtcatgg

SEQ ID NO: 20822 - DNA, 25 bp, Saccharomyces pastorianus
accactgccgctattgtaagttcag

SEQ ID NO: 20823 - DNA, 25 bp, Saccharomyces pastorianus
tgacgccatggagcgcataccattc

SEQ ID NO: 20824 - DNA, 25 bp, Saccharomyces pastorianus
gtaagttcagtggaccgcaagatct

SEQ ID NO: 20825 - DNA, 25 bp, Saccharomyces pastorianus
gagagaacccaatccggtcaagaca

SEQ ID NO: 20826 - DNA, 25 bp, Saccharomyces pastorianus
agtacaattttactaccactgccgc

SEQ ID NO: 20827 - DNA, 25 bp, Saccharomyces pastorianus
taccattcaaggaagcctggcagat

SEQ ID NO: 20828 - DNA, 25 bp, Saccharomyces pastorianus
gacaacagcaacacttctccaagaa

SEQ ID NO: 20829 - DNA, 25 bp, Saccharomyces pastorianus
aaatgtcgtcatgctgggcgaagta

SEQ ID NO: 20830 - DNA, 25 bp, Saccharomyces pastorianus
gcaagatctttgtccttttacgtga

SEQ ID NO: 20831 - DNA, 25 bp, Saccharomyces pastorianus
atcaaatctgtagcactggacctat

SEQ ID NO: 20832 - DNA, 25 bp, Saccharomyces pastorianus
gtctcacggcttactcatcgagaac

SEQ ID NO: 20833 - DNA, 25 bp, Saccharomyces pastorianus
atccagcgcaaactctagatccggg

SEQ ID NO: 20834 - DNA, 25 bp, Saccharomyces pastorianus
atgtgattgacgacacctcgtctca

SEQ ID NO: 20835 - DNA, 25 bp, Saccharomyces pastorianus
atcactacaaggaccctttccaaga

SEQ ID NO: 20836 - DNA, 25 bp, Saccharomyces pastorianus
aaggatgcaggcgaaacttccaccg

SEQ ID NO: 20837 - DNA, 25 bp, Saccharomyces pastorianus
aaagcaggtctgttgcagccagcca

SEQ ID NO: 20838 - DNA, 25 bp, Saccharomyces pastorianus
aaactgttagtcgatgcaagtgcta

SEQ ID NO: 20839 - DNA, 25 bp, Saccharomyces pastorianus
aaccacagggtgcactctttgggta

SEQ ID NO: 20840 - DNA, 25 bp, Saccharomyces pastorianus
tatggacatcgacttggacagcacc

SEQ ID NO: 20841 - DNA, 25 bp, Saccharomyces pastorianus
gaaacttgaaatacgctgcgcaaag

SEQ ID NO: 20842 - DNA, 25 bp, Saccharomyces pastorianus
gactgggctttgttgcattctaaaa

SEQ ID NO: 20843 - DNA, 25 bp, Saccharomyces pastorianus
taggttgtcgtcgtgtgtacgtcaa

SEQ ID NO: 20844 - DNA, 25 bp, Saccharomyces pastorianus
tcccgtgtgtctgatgcgtatttta

SEQ ID NO: 20845 - DNA, 25 bp, Saccharomyces pastorianus
atttagtcatgagcgtcaccactgt

SEQ ID NO: 20846 - DNA, 25 bp, Saccharomyces pastorianus
cttactggtatagtgttcaccgcaa

SEQ ID NO: 20847 - DNA, 25 bp, Saccharomyces pastorianus
caactggtcgcttccaaaggtggga

SEQ ID NO: 20848 - DNA, 25 bp, Saccharomyces pastorianus
atttccggatggttctaccaactgg

SEQ ID NO: 20849 - DNA, 25 bp, Saccharomyces pastorianus
gacgtctactcattcgataacacac

SEQ ID NO: 20850 - DNA, 25 bp, Saccharomyces pastorianus
ccaactggcccgcatcaatgggaaa

SEQ ID NO: 20851 - DNA, 25 bp, Saccharomyces pastorianus
gtgggaaagtcttcggtatcaacct

SEQ ID NO: 20852 - DNA, 25 bp, Saccharomyces pastorianus
ttggcccctaacgtggctttgacta

SEQ ID NO: 20853 - DNA, 25 bp, Saccharomyces pastorianus
tccgactccattgctctttgtagaa

SEQ ID NO: 20854 - DNA, 25 bp, Saccharomyces pastorianus
atgaagacggttccttcaccggcga

SEQ ID NO: 20855 - DNA, 25 bp, Saccharomyces pastorianus
atccatcggtggtctgttgtgtaaa

SEQ ID NO: 20856 - DNA, 25 bp, Saccharomyces pastorianus
gaagcgtatctgtcgttgattccaa

SEQ ID NO: 20857 - DNA, 25 bp, Saccharomyces pastorianus
gcacttctggttcagacgtcggcaa

SEQ ID NO: 20858 - DNA, 25 bp, Saccharomyces pastorianus
accggcgatggttctgatggctgta

SEQ ID NO: 20859 - DNA, 25 bp, Saccharomyces pastorianus
gtagaactgattacccaggctctga

SEQ ID NO: 20860 - DNA, 25 bp, Saccharomyces pastorianus
gacttgtgttcgactgaccagacat

SEQ ID NO: 20861 - DNA, 25 bp, Saccharomyces pastorianus
gaacccggtatgtcgaagactcaat

SEQ ID NO: 20862 - DNA, 25 bp, Saccharomyces pastorianus
gaaaacatggtcattcccactctag

SEQ ID NO: 20863 - DNA, 25 bp, Saccharomyces pastorianus
attgggctccaatagtcttgggcgc

SEQ ID NO: 20864 - DNA, 25 bp, Saccharomyces pastorianus
gccgaactgattcctgccagtgagt

SEQ ID NO: 20865 - DNA, 25 bp, Saccharomyces pastorianus
cctactaagttgttcctatgacggg

SEQ ID NO: 20866 - DNA, 25 bp, Saccharomyces pastorianus
gtatccgcctgatcaaccgggcgta

SEQ ID NO: 20867 - DNA, 25 bp, Saccharomyces pastorianus
aacgggcatgaagacggcagtgaca

SEQ ID NO: 20868 - DNA, 25 bp, Saccharomyces pastorianus
gaagtaggcccctcaaacgggcatg

SEQ ID NO: 20869 - DNA, 25 bp, Saccharomyces pastorianus
gttcgttagagtgggctactacgta

SEQ ID NO: 20870 - DNA, 25 bp, Saccharomyces pastorianus
gagttaagagagaacccgccagcaa

SEQ ID NO: 20871 - DNA, 25 bp, Saccharomyces pastorianus
gccagcaaaggttcaggtcgaccat

SEQ ID NO: 20872 - DNA, 25 bp, Saccharomyces pastorianus
gggagcagcccacagatatcgagtc

SEQ ID NO: 20873 - DNA, 25 bp, Saccharomyces pastorianus
atgaaggagacctgtatccgcctga

SEQ ID NO: 20874 - DNA, 25 bp, Saccharomyces pastorianus
gtgtaaccgttatcctactaagttg

SEQ ID NO: 20875 - DNA, 25 bp, Saccharomyces pastorianus
gccgccgttgtagtcgctgatgaaa

SEQ ID NO: 20876 - DNA, 25 bp, Saccharomyces pastorianus
ctgcatgtttggtcacaggctcata

SEQ ID NO: 20877 - DNA, 25 bp, Saccharomyces pastorianus
gtataggcgcccttcaaagttttga

SEQ ID NO: 20878 - DNA, 25 bp, Saccharomyces pastorianus
caaagttttgatgcggccttggcca

SEQ ID NO: 20879 - DNA, 25 bp, Saccharomyces pastorianus
aaggatgaaagctggccctgcgttg

SEQ ID NO: 20880 - DNA, 25 bp, Saccharomyces pastorianus
cagtgggatttacgctccgggaaat

SEQ ID NO: 20881 - DNA, 25 bp, Saccharomyces pastorianus
gaaacgtctgtccaggtgtacgata

SEQ ID NO: 20882 - DNA, 25 bp, Saccharomyces pastorianus
gtaatccgtactttggaaggccaca

SEQ ID NO: 20883 - DNA, 25 bp, Saccharomyces pastorianus
agatttctcacaggataacgccgcc

SEQ ID NO: 20884 - DNA, 25 bp, Saccharomyces pastorianus
gtgcacccgtgctatcattagattt

SEQ ID NO: 20885 - DNA, 25 bp, Saccharomyces pastorianus
taatgtcttatcaacctccaccaat

SEQ ID NO: 20886 - DNA, 25 bp, Saccharomyces pastorianus
aagcaaccgtttaatgagcatacag

SEQ ID NO: 20887 - DNA, 25 bp, Saccharomyces pastorianus
ggtaatgcatctttaggcgattcat

SEQ ID NO: 20888 - DNA, 25 bp, Saccharomyces pastorianus
gagatccgtaataacttggcactgt

SEQ ID NO: 20889 - DNA, 25 bp, Saccharomyces pastorianus
attccaccatttcggactctattga

SEQ ID NO: 20890 - DNA, 25 bp, Saccharomyces pastorianus
cactgtgtcaactgcctgatgaaga

SEQ ID NO: 20891 - DNA, 25 bp, Saccharomyces pastorianus
attcaatgccagactttactccaag

SEQ ID NO: 20892 - DNA, 25 bp, Saccharomyces pastorianus
ggactctattgatgaaacggactta

SEQ ID NO: 20893 - DNA, 25 bp, Saccharomyces pastorianus
gattttgacatcaaccacaacgaca

SEQ ID NO: 20894 - DNA, 25 bp, Saccharomyces pastorianus
ggatacggattccaccatttcggac

SEQ ID NO: 20895 - DNA, 25 bp, Saccharomyces pastorianus
gatgaccattcaatacctgacgtgg

SEQ ID NO: 20896 - DNA, 25 bp, Saccharomyces pastorianus
taactctcaaacagtgtgtacacca

SEQ ID NO: 20897 - DNA, 25 bp, Saccharomyces pastorianus
ggctcatagggctttcatacaagtc

SEQ ID NO: 20898 - DNA, 25 bp, Saccharomyces pastorianus
tagggctttcatacaagtcataatc

SEQ ID NO: 20899 - DNA, 25 bp, Saccharomyces pastorianus
tgaggcttacagacaagcggcttca

SEQ ID NO: 20900 - DNA, 25 bp, Saccharomyces pastorianus
aaaagcattcgctgaggcttacaga

SEQ ID NO: 20901 - DNA, 25 bp, Saccharomyces pastorianus
ggtggaagcttttatttacagagta

SEQ ID NO: 20902 - DNA, 25 bp, Saccharomyces pastorianus
gcaaggtgctactaatgcttcaaga

SEQ ID NO: 20903 - DNA, 25 bp, Saccharomyces pastorianus
gaaaggcggcttgaacatggacaaa

SEQ ID NO: 20904 - DNA, 25 bp, Saccharomyces pastorianus
gagacctcctccaaattcaacaagt

SEQ ID NO: 20905 - DNA, 25 bp, Saccharomyces pastorianus
agattaaaatgggagctggctcaaa

SEQ ID NO: 20906 - DNA, 25 bp, Saccharomyces pastorianus
aggtgaatatggtggcattacatta

SEQ ID NO: 20907 - DNA, 25 bp, Saccharomyces pastorianus
caacgacagattcaactatttattt

SEQ ID NO: 20908 - DNA, 25 bp, Saccharomyces pastorianus
ggaagtcactttgcagagagcttta

SEQ ID NO: 20909 - DNA, 25 bp, Saccharomyces pastorianus
attagtaagctgcacgccaatatgt

SEQ ID NO: 20910 - DNA, 25 bp, Saccharomyces pastorianus
gacctgcaggttataatacgatcca

SEQ ID NO: 20911 - DNA, 25 bp, Saccharomyces pastorianus
gattttttcaatattcccatcctgg

SEQ ID NO: 20912 - DNA, 25 bp, Saccharomyces pastorianus
ggacttaactcatgacctgcaggtt

SEQ ID NO: 20913 - DNA, 25 bp, Saccharomyces pastorianus
taaattcatcgtcttcaacctcgtc

SEQ ID NO: 20914 - DNA, 25 bp, Saccharomyces pastorianus
gacggattttcttttactactgacg

SEQ ID NO: 20915 - DNA, 25 bp, Saccharomyces pastorianus
gacgggaaagccatcttcactaaat

SEQ ID NO: 20916 - DNA, 25 bp, Saccharomyces pastorianus
gatccatattggaacggtatgctcc

SEQ ID NO: 20917 - DNA, 25 bp, Saccharomyces pastorianus
aattcattcatattcgagtttctag

SEQ ID NO: 20918 - DNA, 25 bp, Saccharomyces pastorianus
aacggcctgtatttgaagtgtgctt

SEQ ID NO: 20919 - DNA, 25 bp, Saccharomyces pastorianus
aaattagcggccattgacaacggtt

SEQ ID NO: 20920 - DNA, 25 bp, Saccharomyces pastorianus
gcctccatccttttgcgaacaaaaa

SEQ ID NO: 20921 - DNA, 25 bp, Saccharomyces pastorianus
gaacctatcggatcaaactcctctt

SEQ ID NO: 20922 - DNA, 25 bp, Saccharomyces pastorianus
tatattatgattccagcctccatcc

SEQ ID NO: 20923 - DNA, 25 bp, Saccharomyces pastorianus
agacgagtggcgtttgtacccatac

SEQ ID NO: 20924 - DNA, 25 bp, Saccharomyces pastorianus
aaagggccaagcattcaacgtcgtg

SEQ ID NO: 20925 - DNA, 25 bp, Saccharomyces pastorianus
gtacccatacggctggttgtattta

SEQ ID NO: 20926 - DNA, 25 bp, Saccharomyces pastorianus
cggtttggccttcccatggaaacat

SEQ ID NO: 20927 - DNA, 25 bp, Saccharomyces pastorianus
acgattccatctcatgtacacaggc

SEQ ID NO: 20928 - DNA, 25 bp, Saccharomyces pastorianus
tatttacctttgcacatactggcca

SEQ ID NO: 20929 - DNA, 25 bp, Saccharomyces pastorianus
gagtttttgactctcttcagcagag

SEQ ID NO: 20930 - DNA, 25 bp, Saccharomyces pastorianus
gacggatttcaactggatgcggatt

SEQ ID NO: 20931 - DNA, 25 bp, Saccharomyces pastorianus
tgaaattcaacccacgtcctgattc

SEQ ID NO: 20932 - DNA, 25 bp, Saccharomyces pastorianus
acgactgggagtcatcatcttcgaa

SEQ ID NO: 20933 - DNA, 25 bp, Saccharomyces pastorianus
gacttccggcgcatatgcattatgt

SEQ ID NO: 20934 - DNA, 25 bp, Saccharomyces pastorianus
cgcccgtttatcaacatcagttcga

SEQ ID NO: 20935 - DNA, 25 bp, Saccharomyces pastorianus
tttcaagcgcgaatggccataactt

SEQ ID NO: 20936 - DNA, 25 bp, Saccharomyces pastorianus
aatcgatataagctcgcccgtttat

SEQ ID NO: 20937 - DNA, 25 bp, Saccharomyces pastorianus
gaattcgttgcccaagagagcttct

SEQ ID NO: 20938 - DNA, 25 bp, Saccharomyces pastorianus
gagagcttctccttccaaaatcgat

SEQ ID NO: 20939 - DNA, 25 bp, Saccharomyces pastorianus
ggcacaggacatcggtggtcacact

SEQ ID NO: 20940 - DNA, 25 bp, Saccharomyces pastorianus
gatttagatgatgcgacttccggcg

SEQ ID NO: 20941 - DNA, 25 bp, Saccharomyces pastorianus
aactctggccagtccaataacttga

SEQ ID NO: 20942 - DNA, 25 bp, Saccharomyces pastorianus
gaatgagtctgcgtcaagtcaaatg

SEQ ID NO: 20943 - DNA, 25 bp, Saccharomyces pastorianus
gttgacaaccgtccgattatctcga

SEQ ID NO: 20944 - DNA, 25 bp, Saccharomyces pastorianus
gacgagttagatttatccgacgacg

SEQ ID NO: 20945 - DNA, 25 bp, Saccharomyces pastorianus
gatatattctcccaactgacgcgag

SEQ ID NO: 20946 - DNA, 25 bp, Saccharomyces pastorianus
aagatctcgaaataggcggtccaaa

SEQ ID NO: 20947 - DNA, 25 bp, Saccharomyces pastorianus
gaagagatcttttaaccccagggat

SEQ ID NO: 20948 - DNA, 25 bp, Saccharomyces pastorianus
tattcatgttccaactgcaggcacg

SEQ ID NO: 20949 - DNA, 25 bp, Saccharomyces pastorianus
aattgaagcccaatcgaactgcgat

SEQ ID NO: 20950 - DNA, 25 bp, Saccharomyces pastorianus
tagtgagtgctctaatctttctagc

SEQ ID NO: 20951 - DNA, 25 bp, Saccharomyces pastorianus
acgcgaagtttttggctgatgcagc

SEQ ID NO: 20952 - DNA, 25 bp, Saccharomyces pastorianus
taccgaacgcagttctcaatgtaga

SEQ ID NO: 20953 - DNA, 25 bp, Saccharomyces pastorianus
gaagtagcttaccatcgactgtcaa

SEQ ID NO: 20954 - DNA, 25 bp, Saccharomyces pastorianus
aaatccccagagagacagatgccaa

SEQ ID NO: 20955 - DNA, 25 bp, Saccharomyces pastorianus
gatagcgacgaaatcttcttgaata

SEQ ID NO: 20956 - DNA, 25 bp, Saccharomyces pastorianus
ggaaaagcccataagacgacataca

SEQ ID NO: 20957 - DNA, 25 bp, Saccharomyces pastorianus
aaatggtgcattatttgcccaagag

SEQ ID NO: 20958 - DNA, 25 bp, Saccharomyces pastorianus
tcgactgtcaaggagaaatccccag

SEQ ID NO: 20959 - DNA, 25 bp, Saccharomyces pastorianus
gaaactcctcattatcagagcattc

SEQ ID NO: 20960 - DNA, 25 bp, Saccharomyces pastorianus
atatccacgaatctaccgaacgcag

SEQ ID NO: 20961 - DNA, 25 bp, Saccharomyces pastorianus
aattattatccattgcgtctgaaga

SEQ ID NO: 20962 - DNA, 25 bp, Saccharomyces pastorianus
agagtcaccgccaaagaatttcgtt

SEQ ID NO: 20963 - DNA, 25 bp, Saccharomyces pastorianus
gaaataatcaactccccacaagaaa

SEQ ID NO: 20964 - DNA, 25 bp, Saccharomyces pastorianus
gtcaaacggtacatcaaaggtcaac

SEQ ID NO: 20965 - DNA, 25 bp, Saccharomyces pastorianus
aattctcaacagtgatggctccagc

SEQ ID NO: 20966 - DNA, 25 bp, Saccharomyces pastorianus
tccaagcccgatttcagatccaaat

SEQ ID NO: 20967 - DNA, 25 bp, Saccharomyces pastorianus
gcgataacagtttacccttggagat

SEQ ID NO: 20968 - DNA, 25 bp, Saccharomyces pastorianus
aggtcaacactcaacttaatctttt

SEQ ID NO: 20969 - DNA, 25 bp, Saccharomyces pastorianus
ctgtaaacttcaatccaagcccgat

SEQ ID NO: 20970 - DNA, 25 bp, Saccharomyces pastorianus
tttcttaaagcatctccatacgact

SEQ ID NO: 20971 - DNA, 25 bp, Saccharomyces pastorianus
aatctaaattctcattcgccatcga

SEQ ID NO: 20972 - DNA, 25 bp, Saccharomyces pastorianus
gccatcgactccgacgacaaggaaa

SEQ ID NO: 20973 - DNA, 25 bp, Saccharomyces pastorianus
ttacccttggagatccctttcaata

SEQ ID NO: 20974 - DNA, 25 bp, Saccharomyces pastorianus
gacacttttgtctccatgggtgaag

SEQ ID NO: 20975 - DNA, 25 bp, Saccharomyces pastorianus
gttccaattatcaactccctatgtg

SEQ ID NO: 20976 - DNA, 25 bp, Saccharomyces pastorianus
agcgatgacgtcttctacggtgagc

SEQ ID NO: 20977 - DNA, 25 bp, Saccharomyces pastorianus
actaacgcatgactctttgaaggca

SEQ ID NO: 20978 - DNA, 25 bp, Saccharomyces pastorianus
cagctatgtctgctattgacgtctt

SEQ ID NO: 20979 - DNA, 25 bp, Saccharomyces pastorianus
taaatttcatcctctacaagccgtt

SEQ ID NO: 20980 - DNA, 25 bp, Saccharomyces pastorianus
attgcaactcctcccggtattgaaa

SEQ ID NO: 20981 - DNA, 25 bp, Saccharomyces pastorianus
tacaagccgtttgcgacttattaac

SEQ ID NO: 20982 - DNA, 25 bp, Saccharomyces pastorianus
tttgaaggcatctactggagctagt

SEQ ID NO: 20983 - DNA, 25 bp, Saccharomyces pastorianus
aaccgcagtagctgatccaaacttc

SEQ ID NO: 20984 - DNA, 25 bp, Saccharomyces pastorianus
acggtgagcattccatagttttcga

SEQ ID NO: 20985 - DNA, 25 bp, Saccharomyces pastorianus
ggattactcgcaaacgacagacttc

SEQ ID NO: 20986 - DNA, 25 bp, Saccharomyces pastorianus
attgggccacgtgatgtcgtctcgt

SEQ ID NO: 20987 - DNA, 25 bp, Saccharomyces pastorianus
gacttccatattacattgggccacg

SEQ ID NO: 20988 - DNA, 25 bp, Saccharomyces pastorianus
gaaaccgggtgcctaattgacgtga

SEQ ID NO: 20989 - DNA, 25 bp, Saccharomyces pastorianus
aagtccaatccggtgaagctcaaga

SEQ ID NO: 20990 - DNA, 25 bp, Saccharomyces pastorianus
tgtcaaggcggtttattcgaacgtt

SEQ ID NO: 20991 - DNA, 25 bp, Saccharomyces pastorianus
aaagttcctcatattacggtatgta

SEQ ID NO: 20992 - DNA, 25 bp, Saccharomyces pastorianus
gatcagacctgtttacatttcagtt

SEQ ID NO: 20993 - DNA, 25 bp, Saccharomyces pastorianus
ggtgaacaccactgacaaactgaaa

SEQ ID NO: 20994 - DNA, 25 bp, Saccharomyces pastorianus
gacgtgaacggcgatattgtcaatg

SEQ ID NO: 20995 - DNA, 25 bp, Saccharomyces pastorianus
gcaattgtagtagagctttccggaa

SEQ ID NO: 20996 - DNA, 25 bp, Saccharomyces pastorianus
tgaacttgacgcttgtcgaacagat

SEQ ID NO: 20997 - DNA, 25 bp, Saccharomyces pastorianus
gaaatcatctcattggttatgccca

SEQ ID NO: 20998 - DNA, 25 bp, Saccharomyces pastorianus
cattatcgtgttttgtgagtgactg

SEQ ID NO: 20999 - DNA, 25 bp, Saccharomyces pastorianus
aatggacgcagttttcatcgatagt

SEQ ID NO: 21000 - DNA, 25 bp, Saccharomyces pastorianus
gaactaaactcaatgttggctgcag

SEQ ID NO: 21001 - DNA, 25 bp, Saccharomyces pastorianus
gactgtatagacacattggcggtta

SEQ ID NO: 21002 - DNA, 25 bp, Saccharomyces pastorianus
gaaagcacatcaaatatactcccga

SEQ ID NO: 21003 - DNA, 25 bp, Saccharomyces pastorianus
agtacaaactatccgatccgtcgat

SEQ ID NO: 21004 - DNA, 25 bp, Saccharomyces pastorianus
tggctgcagaaggtcacgcaaggtt

SEQ ID NO: 21005 - DNA, 25 bp, Saccharomyces pastorianus
gttgatgcccaatcaggagccagat

SEQ ID NO: 21006 - DNA, 25 bp, Saccharomyces pastorianus
ctgactggagagatttgactgcaaa

SEQ ID NO: 21007 - DNA, 25 bp, Saccharomyces pastorianus
caggcctagctgatctcgtatattc

SEQ ID NO: 21008 - DNA, 25 bp, Saccharomyces pastorianus
ggaacattccatcagctatgggttg

SEQ ID NO: 21009 - DNA, 25 bp, Saccharomyces pastorianus
aagtaaatctatttctccacctgcc

SEQ ID NO: 21010 - DNA, 25 bp, Saccharomyces pastorianus
tctccacctgccgacagtatagata

SEQ ID NO: 21011 - DNA, 25 bp, Saccharomyces pastorianus
gccacactccaactctggtgtagta

SEQ ID NO: 21012 - DNA, 25 bp, Saccharomyces pastorianus
gtggtagtatactcacaagcctagg

SEQ ID NO: 21013 - DNA, 25 bp, Saccharomyces pastorianus
gatattccggaagattggccacact

SEQ ID NO: 21014 - DNA, 25 bp, Saccharomyces pastorianus
tcaattcccggcttaagtgacaggt

SEQ ID NO: 21015 - DNA, 25 bp, Saccharomyces pastorianus
ttacgggtggtacatcctcaattcc

SEQ ID NO: 21016 - DNA, 25 bp, Saccharomyces pastorianus
gactgacaagaaacctgtgcctaca

SEQ ID NO: 21017 - DNA, 25 bp, Saccharomyces pastorianus
tagctcataatgtcgtacttacggg

SEQ ID NO: 21018 - DNA, 25 bp, Saccharomyces pastorianus
taaactagcccgtgctccaattcaa

SEQ ID NO: 21019 - DNA, 25 bp, Saccharomyces pastorianus
gacgttgttatcaatgtcccaagaa

SEQ ID NO: 21020 - DNA, 25 bp, Saccharomyces pastorianus
tcaatatgattgtcggcccaggtgg

SEQ ID NO: 21021 - DNA, 25 bp, Saccharomyces pastorianus
ggtgccgacaccaaaagattcaata

SEQ ID NO: 21022 - DNA, 25 bp, Saccharomyces pastorianus
ttggtgcaccaacatcttctgaaga

SEQ ID NO: 21023 - DNA, 25 bp, Saccharomyces pastorianus
gccctcgacactgccgttaaattga

SEQ ID NO: 21024 - DNA, 25 bp, Saccharomyces pastorianus
aggacgcttcaaacgactctgctaa

SEQ ID NO: 21025 - DNA, 25 bp, Saccharomyces pastorianus
taacgttccagcttctatttacgaa

SEQ ID NO: 21026 - DNA, 25 bp, Saccharomyces pastorianus
gagattgacctacgaacctgttgat

SEQ ID NO: 21027 - DNA, 25 bp, Saccharomyces pastorianus
gaattgcgaaggcaccatctgccac

SEQ ID NO: 21028 - DNA, 25 bp, Saccharomyces pastorianus
gaaaatgttcgtggctctacagaag

SEQ ID NO: 21029 - DNA, 25 bp, Saccharomyces pastorianus
gaagtctaccacacaagtcggttgt

SEQ ID NO: 21030 - DNA, 25 bp, Saccharomyces pastorianus
tcaggtactttaactcattccggtg

SEQ ID NO: 21031 - DNA, 25 bp, Saccharomyces pastorianus
gactatgatttctcgaacccaggtt

SEQ ID NO: 21032 - DNA, 25 bp, Saccharomyces pastorianus
ttctcgggcaacactggtcatttca

SEQ ID NO: 21033 - DNA, 25 bp, Saccharomyces pastorianus
aaagcagcttcgtctgttttgcaga

SEQ ID NO: 21034 - DNA, 25 bp, Saccharomyces pastorianus
caggcgccgttgatgcttggtataa

SEQ ID NO: 21035 - DNA, 25 bp, Saccharomyces pastorianus
cattccggtggctcatatggcgaaa

SEQ ID NO: 21036 - DNA, 25 bp, Saccharomyces pastorianus
gatacattggctacttacgctcaag

SEQ ID NO: 21037 - DNA, 25 bp, Saccharomyces pastorianus
tatgccgacaactacgactgttcag

SEQ ID NO: 21038 - DNA, 25 bp, Saccharomyces pastorianus
gcttctgcttccagcgatgctaaag

SEQ ID NO: 21039 - DNA, 25 bp, Saccharomyces pastorianus
acttatcagattttgcctcatccgt

SEQ ID NO: 21040 - DNA, 25 bp, Saccharomyces pastorianus
gaggtaccgctaaactagtcattca

SEQ ID NO: 21041 - DNA, 25 bp, Saccharomyces pastorianus
tacaaatggtagatcctgcctcctt

SEQ ID NO: 21042 - DNA, 25 bp, Saccharomyces pastorianus
agtgcggttgattctacattccaaa

SEQ ID NO: 21043 - DNA, 25 bp, Saccharomyces pastorianus
aagagctgtcaaccaatgcccaatt

SEQ ID NO: 21044 - DNA, 25 bp, Saccharomyces pastorianus
ggtgaaactgtctacaccggtgttt

SEQ ID NO: 21045 - DNA, 25 bp, Saccharomyces pastorianus
aatatccacagtcatcgaggtcaat

SEQ ID NO: 21046 - DNA, 25 bp, Saccharomyces pastorianus
tccgtttccttcaactctaagcaaa

SEQ ID NO: 21047 - DNA, 25 bp, Saccharomyces pastorianus
tgcccaattcatttgtacgacgttt

SEQ ID NO: 21048 - DNA, 25 bp, Saccharomyces pastorianus
tgcctccttttacttgtttgacgaa

SEQ ID NO: 21049 - DNA, 25 bp, Saccharomyces pastorianus
cagtgtgtgccattgctttaatctt

SEQ ID NO: 21050 - DNA, 25 bp, Saccharomyces pastorianus
agcagacaagtttttccgcgttaag

SEQ ID NO: 21051 - DNA, 25 bp, Saccharomyces pastorianus
acagaagtggtcctttgggttgctc

SEQ ID NO: 21052 - DNA, 25 bp, Saccharomyces pastorianus
ggacgatttccatgatcctgttcac

SEQ ID NO: 21053 - DNA, 25 bp, Saccharomyces pastorianus
gcagcagaccttttcgccagaagaa

SEQ ID NO: 21054 - DNA, 25 bp, Saccharomyces pastorianus
aggcccatccagatagattcagtga

SEQ ID NO: 21055 - DNA, 25 bp, Saccharomyces pastorianus
tcgctggcagctcattacgacagat

SEQ ID NO: 21056 - DNA, 25 bp, Saccharomyces pastorianus
gatcctgttcacgaattacgcggta

SEQ ID NO: 21057 - DNA, 25 bp, Saccharomyces pastorianus
agattcattctgcatctcttactgc

SEQ ID NO: 21058 - DNA, 25 bp, Saccharomyces pastorianus
gagctggcttattttggcacgtata

SEQ ID NO: 21059 - DNA, 25 bp, Saccharomyces pastorianus
agctgaggccgttcatcactgacat

SEQ ID NO: 21060 - DNA, 25 bp, Saccharomyces pastorianus
attttggcacgtatactcttcagta

SEQ ID NO: 21061 - DNA, 25 bp, Saccharomyces pastorianus
gtgaaaaaccagatacccagtcgct

SEQ ID NO: 21062 - DNA, 25 bp, Saccharomyces pastorianus
gttcctatacgttagaacctctgat

SEQ ID NO: 21063 - DNA, 25 bp, Saccharomyces pastorianus
tagctgctccattatcgtctgtgtc

SEQ ID NO: 21064 - DNA, 25 bp, Saccharomyces pastorianus
gttgtccagaacgagtgtgttgtct

SEQ ID NO: 21065 - DNA, 25 bp, Saccharomyces pastorianus
caccaagatcaacccttctagagat

SEQ ID NO: 21066 - DNA, 25 bp, Saccharomyces pastorianus
ttgaaagatcaagcctccaccaaga

SEQ ID NO: 21067 - DNA, 25 bp, Saccharomyces pastorianus
gtctgtgtcgctattaaattctgaa

SEQ ID NO: 21068 - DNA, 25 bp, Saccharomyces pastorianus
ttcaaattcctattctagctgctcc

SEQ ID NO: 21069 - DNA, 25 bp, Saccharomyces pastorianus
tacagcgttgcagcgagtatttact

SEQ ID NO: 21070 - DNA, 25 bp, Saccharomyces pastorianus
ccactttgggatacggcatcaatga

SEQ ID NO: 21071 - DNA, 25 bp, Saccharomyces pastorianus
gaaaaatcttccaccttaaatcata

SEQ ID NO: 21072 - DNA, 25 bp, Saccharomyces pastorianus
gcattctcctcgaaagcgattattt

SEQ ID NO: 21073 - DNA, 25 bp, Saccharomyces pastorianus
aaacgctggatgcacacttcaacaa

SEQ ID NO: 21074 - DNA, 25 bp, Saccharomyces pastorianus
tgcacgggtttgatcactcttacta

SEQ ID NO: 21075 - DNA, 25 bp, Saccharomyces pastorianus
acggtgccatctgcgggtacttgaa

SEQ ID NO: 21076 - DNA, 25 bp, Saccharomyces pastorianus
gtgaccaagtcgcaaatgatcctga

SEQ ID NO: 21077 - DNA, 25 bp, Saccharomyces pastorianus
atcacaggccattcgatgggcgggt

SEQ ID NO: 21078 - DNA, 25 bp, Saccharomyces pastorianus
gcagggtgcagggttctacctcaac

SEQ ID NO: 21079 - DNA, 25 bp, Saccharomyces pastorianus
gatacaagtcctgttctgcattcgc

SEQ ID NO: 21080 - DNA, 25 bp, Saccharomyces pastorianus
gaccggaattgctacttgaggctgc

SEQ ID NO: 21081 - DNA, 25 bp, Saccharomyces pastorianus
aagcttacgatccatgtgcgctaat

SEQ ID NO: 21082 - DNA, 25 bp, Saccharomyces pastorianus
acttcgttagcacttttgttccaga

SEQ ID NO: 21083 - DNA, 25 bp, Saccharomyces pastorianus
gacttcctggataacgtggccatca

SEQ ID NO: 21084 - DNA, 25 bp, Saccharomyces pastorianus
gatcacgaagaacctgaggctccta

SEQ ID NO: 21085 - DNA, 25 bp, Saccharomyces pastorianus
gcgtttgctaccgaattcttcattc

SEQ ID NO: 21086 - DNA, 25 bp, Saccharomyces pastorianus
atggccatctgcagttcttgaacga

SEQ ID NO: 21087 - DNA, 25 bp, Saccharomyces pastorianus
ttaaagtcgaccgatggccatctgc

SEQ ID NO: 21088 - DNA, 25 bp, Saccharomyces pastorianus
gtgtactcaacctatgtgatgggcg

SEQ ID NO: 21089 - DNA, 25 bp, Saccharomyces pastorianus
tgttcgctccagctgcctgtggaaa

SEQ ID NO: 21090 - DNA, 25 bp, Saccharomyces pastorianus
atacatggacacttcagacgacgca

SEQ ID NO: 21091 - DNA, 25 bp, Saccharomyces pastorianus
gacacatgaatcgttgcagcagcag

SEQ ID NO: 21092 - DNA, 25 bp, Saccharomyces pastorianus
gagttaggtacaccacgagcgtcat

SEQ ID NO: 21093 - DNA, 25 bp, Saccharomyces pastorianus
gacgtctccgccacgatattaaagt

SEQ ID NO: 21094 - DNA, 25 bp, Saccharomyces pastorianus
gagacggccttgaaacccaacattg

SEQ ID NO: 21095 - DNA, 25 bp, Saccharomyces pastorianus
ttcaagccggaagcgcagttgcaca

SEQ ID NO: 21096 - DNA, 25 bp, Saccharomyces pastorianus
gttgcacagtgagttctcgctgatt

SEQ ID NO: 21097 - DNA, 25 bp, Saccharomyces pastorianus
tgagagcgcagatccagagccagct

SEQ ID NO: 21098 - DNA, 25 bp, Saccharomyces pastorianus
gcgagctgacgctgcagaatctgta

SEQ ID NO: 21099 - DNA, 25 bp, Saccharomyces pastorianus
ggccttgccctacgataagacggtg

SEQ ID NO: 21100 - DNA, 25 bp, Saccharomyces pastorianus
gatcgtgtcgacacatgccaagtgt

SEQ ID NO: 21101 - DNA, 25 bp, Saccharomyces pastorianus
gaacggatcatcacctggacgaaga

SEQ ID NO: 21102 - DNA, 25 bp, Saccharomyces pastorianus
ttgaaacaagtctactcttccgcgt

SEQ ID NO: 21103 - DNA, 25 bp, Saccharomyces pastorianus
aacgagattgctccacggtacgtgg

SEQ ID NO: 21104 - DNA, 25 bp, Saccharomyces pastorianus
gagcgctcgcgacgaacaacagtgt

SEQ ID NO: 21105 - DNA, 25 bp, Saccharomyces pastorianus
aaagaagcctccagggtcgcagaac

SEQ ID NO: 21106 - DNA, 25 bp, Saccharomyces pastorianus
aatgtccattgcaaatttcgcgcca

SEQ ID NO: 21107 - DNA, 25 bp, Saccharomyces pastorianus
gtcaataaattatgggccttccccg

SEQ ID NO: 21108 - DNA, 25 bp, Saccharomyces pastorianus
ataccatggtgtttcttccgattat

SEQ ID NO: 21109 - DNA, 25 bp, Saccharomyces pastorianus
tcgcgccagcaatttattggtccat

SEQ ID NO: 21110 - DNA, 25 bp, Saccharomyces pastorianus
tttcacctaccactgcatttttgga

SEQ ID NO: 21111 - DNA, 25 bp, Saccharomyces pastorianus
atattggccaattcctcgttttcca

SEQ ID NO: 21112 - DNA, 25 bp, Saccharomyces pastorianus
caaaatttctcgttcttccaattcg

SEQ ID NO: 21113 - DNA, 25 bp, Saccharomyces pastorianus
gcttgatgacggcatgtatcctttt

SEQ ID NO: 21114 - DNA, 25 bp, Saccharomyces pastorianus
gaatctcgcgatgggattgctaaat

SEQ ID NO: 21115 - DNA, 25 bp, Saccharomyces pastorianus
tataacatcgctgtagtgggactac

SEQ ID NO: 21116 - DNA, 25 bp, Saccharomyces pastorianus
tattttctaggttggaatctcgcga

SEQ ID NO: 21117 - DNA, 25 bp, Saccharomyces pastorianus
aacagtttgaactaactcgccagtt

SEQ ID NO: 21118 - DNA, 25 bp, Saccharomyces pastorianus
tcgccagttacaatctacgtccaag

SEQ ID NO: 21119 - DNA, 25 bp, Saccharomyces pastorianus
aaagaatcatccctccagcagatcg

SEQ ID NO: 21120 - DNA, 25 bp, Saccharomyces pastorianus
tccagcagatcgtcaattacctttg

SEQ ID NO: 21121 - DNA, 25 bp, Saccharomyces pastorianus
gaaccagctagaaatctttaccgat

SEQ ID NO: 21122 - DNA, 25 bp, Saccharomyces pastorianus
atgggactctcaaagtagcaggcaa

SEQ ID NO: 21123 - DNA, 25 bp, Saccharomyces pastorianus
aagcccaatctttgggtgtctctat

SEQ ID NO: 21124 - DNA, 25 bp, Saccharomyces pastorianus
gtctgaaaccgccagtgctgataaa

SEQ ID NO: 21125 - DNA, 25 bp, Saccharomyces pastorianus
aacctttccaagattgccgaatccg

SEQ ID NO: 21126 - DNA, 25 bp, Saccharomyces pastorianus
gattcgtatcgagtctgaaaccgcc

SEQ ID NO: 21127 - DNA, 25 bp, Saccharomyces pastorianus
aatgggacgaactgcgcaagatgct

SEQ ID NO: 21128 - DNA, 25 bp, Saccharomyces pastorianus
ggctctgctggtaaatcatttgctg

SEQ ID NO: 21129 - DNA, 25 bp, Saccharomyces pastorianus
tgaattgggcttgccatacactgca

SEQ ID NO: 21130 - DNA, 25 bp, Saccharomyces pastorianus
gatttccgtatttctcattggttga

SEQ ID NO: 21131 - DNA, 25 bp, Saccharomyces pastorianus
gcacctgaaggctcatattttgtct

SEQ ID NO: 21132 - DNA, 25 bp, Saccharomyces pastorianus
aattgactttgactgttggctctgc

SEQ ID NO: 21133 - DNA, 25 bp, Saccharomyces pastorianus
gtcttggttgatttctcgaaggtca

SEQ ID NO: 21134 - DNA, 25 bp, Saccharomyces pastorianus
gttgggtcgtatccttaaatgcaga

SEQ ID NO: 21135 - DNA, 25 bp, Saccharomyces pastorianus
cccgtcaccattacaggaagcttgt

SEQ ID NO: 21136 - DNA, 25 bp, Saccharomyces pastorianus
aagagttgccacactttctccggaa

SEQ ID NO: 21137 - DNA, 25 bp, Saccharomyces pastorianus
agctgggtgtggttgctattcctcc

SEQ ID NO: 21138 - DNA, 25 bp, Saccharomyces pastorianus
acaagaatctgctttgcatccccgt

SEQ ID NO: 21139 - DNA, 25 bp, Saccharomyces pastorianus
aacgcttcccaatccttatataact

SEQ ID NO: 21140 - DNA, 25 bp, Saccharomyces pastorianus
aataaatcaggcagtatctcccacc

SEQ ID NO: 21141 - DNA, 25 bp, Saccharomyces pastorianus
gtttgggcctagaacctaagctttg

SEQ ID NO: 21142 - DNA, 25 bp, Saccharomyces pastorianus
agattggtacttccatacgtgcttc

SEQ ID NO: 21143 - DNA, 25 bp, Saccharomyces pastorianus
tccaggcagcacatctttcaaacat

SEQ ID NO: 21144 - DNA, 25 bp, Saccharomyces pastorianus
tcattcgccctggtcggtgatgata

SEQ ID NO: 21145 - DNA, 25 bp, Saccharomyces pastorianus
ggagaataagtccatgccctttttt

SEQ ID NO: 21146 - DNA, 25 bp, Saccharomyces pastorianus
aaatttatacattctggccttctta

SEQ ID NO: 21147 - DNA, 25 bp, Saccharomyces pastorianus
atctcccaccttattatttccaatt

SEQ ID NO: 21148 - DNA, 25 bp, Saccharomyces pastorianus
gcttccattaaccactgtctatttg

SEQ ID NO: 21149 - DNA, 25 bp, Saccharomyces pastorianus
atggttctatgtggttcattcgccc

SEQ ID NO: 21150 - DNA, 25 bp, Saccharomyces pastorianus
gatttggcagctgtgttattaccat

SEQ ID NO: 21151 - DNA, 25 bp, Saccharomyces pastorianus
gaaaacagcgtcactgaaacggata

SEQ ID NO: 21152 - DNA, 25 bp, Saccharomyces pastorianus
tccaagagtttccaatggtggcatg

SEQ ID NO: 21153 - DNA, 25 bp, Saccharomyces pastorianus
gagactctatagttttgccttgtta

SEQ ID NO: 21154 - DNA, 25 bp, Saccharomyces pastorianus
attaccattagatcggaccattagc

SEQ ID NO: 21155 - DNA, 25 bp, Saccharomyces pastorianus
ggctgtgatttttccattggttttc

SEQ ID NO: 21156 - DNA, 25 bp, Saccharomyces pastorianus
ttagcgacgatggtgactccacgat

SEQ ID NO: 21157 - DNA, 25 bp, Saccharomyces pastorianus
gtgagctcactatacaatttggaaa

SEQ ID NO: 21158 - DNA, 25 bp, Saccharomyces pastorianus
aaggctgggtgttatatggcgcata

SEQ ID NO: 21159 - DNA, 25 bp, Saccharomyces pastorianus
gaaaacttcgtgactagcaacgatg

SEQ ID NO: 21160 - DNA, 25 bp, Saccharomyces pastorianus
ccgggtacatattggctgtgatttt

SEQ ID NO: 21161 - DNA, 25 bp, Saccharomyces pastorianus
taagggctctcggtttactggcact

SEQ ID NO: 21162 - DNA, 25 bp, Saccharomyces pastorianus
ctttgagcctcaactggatatcatt

SEQ ID NO: 21163 - DNA, 25 bp, Saccharomyces pastorianus
atgagaccactaacagctttactga

SEQ ID NO: 21164 - DNA, 25 bp, Saccharomyces pastorianus
taacgatgtcagacccactgcaaaa

SEQ ID NO: 21165 - DNA, 25 bp, Saccharomyces pastorianus
atggtttttaaatctcccgttgatg

SEQ ID NO: 21166 - DNA, 25 bp, Saccharomyces pastorianus
ggtgatttctatactttcaaccatt

SEQ ID NO: 21167 - DNA, 25 bp, Saccharomyces pastorianus
ttggctttcgtacacgtcattggta

SEQ ID NO: 21168 - DNA, 25 bp, Saccharomyces pastorianus
gagaggtcagtacagttttgctaca

SEQ ID NO: 21169 - DNA, 25 bp, Saccharomyces pastorianus
gcacgttaaatttcaccaccatatc

SEQ ID NO: 21170 - DNA, 25 bp, Saccharomyces pastorianus
agcgccgtatcgtcagcaaaagtaa

SEQ ID NO: 21171 - DNA, 25 bp, Saccharomyces pastorianus
gatatcattgacctaaaagcacgca

SEQ ID NO: 21172 - DNA, 25 bp, Saccharomyces pastorianus
ttataatagtatagccacggcacca

SEQ ID NO: 21173 - DNA, 25 bp, Saccharomyces pastorianus
gagcgggtatgacttaacgcccaat

SEQ ID NO: 21174 - DNA, 25 bp, Saccharomyces pastorianus
gataatcaagtcttgccggcaccac

SEQ ID NO: 21175 - DNA, 25 bp, Saccharomyces pastorianus
ggatggcccagttgaagccgcagat

SEQ ID NO: 21176 - DNA, 25 bp, Saccharomyces pastorianus
ttgacagattcaacggccatccggt

SEQ ID NO: 21177 - DNA, 25 bp, Saccharomyces pastorianus
acttcaacagcgctagtgccgatgg

SEQ ID NO: 21178 - DNA, 25 bp, Saccharomyces pastorianus
aatcatggatgggtctccggtgaaa

SEQ ID NO: 21179 - DNA, 25 bp, Saccharomyces pastorianus
aacgcccaatgtgagctgtaattac

SEQ ID NO: 21180 - DNA, 25 bp, Saccharomyces pastorianus
ggtgagaccattcctatcagattgt

SEQ ID NO: 21181 - DNA, 25 bp, Saccharomyces pastorianus
aagagagtcctctggcttacaaacc

SEQ ID NO: 21182 - DNA, 25 bp, Saccharomyces pastorianus
atttgagcctggtcatcatcgatga

SEQ ID NO: 21183 - DNA, 25 bp, Saccharomyces pastorianus
acaccaaatacactccagacttgaa

SEQ ID NO: 21184 - DNA, 25 bp, Saccharomyces pastorianus
accaaatacactccagacttgaaga

SEQ ID NO: 21185 - DNA, 25 bp, Saccharomyces pastorianus
ggaaaaggaagccacctacgatcaa

SEQ ID NO: 21186 - DNA, 25 bp, Saccharomyces pastorianus
ccaaatacactccagacttgaagat

SEQ ID NO: 21187 - DNA, 25 bp, Saccharomyces pastorianus
cgtcaaggccgccgctgatggtcca

SEQ ID NO: 21188 - DNA, 25 bp, Saccharomyces pastorianus
gaaaaggaagccacctacgatcaaa

SEQ ID NO: 21189 - DNA, 25 bp, Saccharomyces pastorianus
aaaggaagccacctacgatcaaatc

SEQ ID NO: 21190 - DNA, 25 bp, Saccharomyces pastorianus
gaaggccgtcaaggccgccgctgat

SEQ ID NO: 21191 - DNA, 25 bp, Saccharomyces pastorianus
cacaccaaatacactccagacttga

SEQ ID NO: 21192 - DNA, 25 bp, Saccharomyces pastorianus
aaaaggaagccacctacgatcaaat

SEQ ID NO: 21193 - DNA, 25 bp, Saccharomyces pastorianus
caccaaatacactccagacttgaag

SEQ ID NO: 21194 - DNA, 25 bp, Saccharomyces pastorianus
atgaatacggttactccgccagagt

SEQ ID NO: 21195 - DNA, 25 bp, Saccharomyces pastorianus
ggaaaaggaagccacctacgatcaa

SEQ ID NO: 21196 - DNA, 25 bp, Saccharomyces pastorianus
ccaaatacactccagacttgaagat

SEQ ID NO: 21197 - DNA, 25 bp, Saccharomyces pastorianus
cgtcaaggccgccgctgatggtcca

SEQ ID NO: 21198 - DNA, 25 bp, Saccharomyces pastorianus
tccaccgctccaatgtttgttgttg

SEQ ID NO: 21199 - DNA, 25 bp, Saccharomyces pastorianus
gaaaaggaagccacctacgatcaaa

SEQ ID NO: 21200 - DNA, 25 bp, Saccharomyces pastorianus
gacttcttgggtgacactcacgctt

SEQ ID NO: 21201 - DNA, 25 bp, Saccharomyces pastorianus
aaaggaagccacctacgatcaaatc

SEQ ID NO: 21202 - DNA, 25 bp, Saccharomyces pastorianus
gaaggccgtcaaggccgccgctgat

SEQ ID NO: 21203 - DNA, 25 bp, Saccharomyces pastorianus
cacaccaaatacactccagacttga

SEQ ID NO: 21204 - DNA, 25 bp, Saccharomyces pastorianus
caccaaatacactccagacttgaag

SEQ ID NO: 21205 - DNA, 25 bp, Saccharomyces pastorianus
aaggaactcgtggacgttgccaaca

SEQ ID NO: 21206 - DNA, 25 bp, Saccharomyces pastorianus
tgttacgtcggttgggattctgcac

SEQ ID NO: 21207 - DNA, 25 bp, Saccharomyces pastorianus
gggattctgcactcctaatgacatt

SEQ ID NO: 21208 - DNA, 25 bp, Saccharomyces pastorianus
ggacgttgccaacactatcggtaac

SEQ ID NO: 21209 - DNA, 25 bp, Saccharomyces pastorianus
actatcggtaactcctctcttaagg

SEQ ID NO: 21210 - DNA, 25 bp, Saccharomyces pastorianus
gaattgtctgaacctttgaaggcca

SEQ ID NO: 21211 - DNA, 25 bp, Saccharomyces pastorianus
gagttgcatgcgaaatttccagtgg

SEQ ID NO: 21212 - DNA, 25 bp, Saccharomyces pastorianus
aagcagctgccttgttatcttgttt

SEQ ID NO: 21213 - DNA, 25 bp, Saccharomyces pastorianus
gaatcacaagctgtcatccaactag

SEQ ID NO: 21214 - DNA, 25 bp, Saccharomyces pastorianus
gatgaccttcgtcgccgtaagagag

SEQ ID NO: 21215 - DNA, 25 bp, Saccharomyces pastorianus
gttatcttgttttgcatttcaggaa

SEQ ID NO: 21216 - DNA, 25 bp, Saccharomyces pastorianus
ggaaggaacaacagcacctgtcaaa

SEQ ID NO: 21217 - DNA, 25 bp, Saccharomyces pastorianus
ggccgcgccgttgcaaacactattg

SEQ ID NO: 21218 - DNA, 25 bp, Saccharomyces pastorianus
gaagatgtacacgtttccgacaaat

SEQ ID NO: 21219 - DNA, 25 bp, Saccharomyces pastorianus
taccttcaaacattgggcacgagtc

SEQ ID NO: 21220 - DNA, 25 bp, Saccharomyces pastorianus
gaagactaccccaacagagatgatg

SEQ ID NO: 21221 - DNA, 25 bp, Saccharomyces pastorianus
ggaactcagatctcgtggaaacttt

SEQ ID NO: 21222 - DNA, 25 bp, Saccharomyces pastorianus
gaaagcacacactatcttggcagga

SEQ ID NO: 21223 - DNA, 25 bp, Saccharomyces pastorianus
actcgttgcttgatttggttgtttt

SEQ ID NO: 21224 - DNA, 25 bp, Saccharomyces pastorianus
gtctctgctgcagcgcgcaaggaat

SEQ ID NO: 21225 - DNA, 25 bp, Saccharomyces pastorianus
acagattgggcgctaactcgttgct

SEQ ID NO: 21226 - DNA, 25 bp, Saccharomyces pastorianus
gtgtcagaaacatcaccgaagttga

SEQ ID NO: 21227 - DNA, 25 bp, Saccharomyces pastorianus
atatggccttgaatatctcgccgtt

SEQ ID NO: 21228 - DNA, 25 bp, Saccharomyces pastorianus
atatctcgccgttcgaatatattag

SEQ ID NO: 21229 - DNA, 25 bp, Saccharomyces pastorianus
aactaggtctagctcaaggcgttgc

SEQ ID NO: 21230 - DNA, 25 bp, Saccharomyces pastorianus
ggagcagttacacaatgtcagcaca

SEQ ID NO: 21231 - DNA, 25 bp, Saccharomyces pastorianus
ggctagaagcagtcttaaaccgcaa

SEQ ID NO: 21232 - DNA, 25 bp, Saccharomyces pastorianus
gtcgaagccctagaggacctcaaca

SEQ ID NO: 21233 - DNA, 25 bp, Saccharomyces pastorianus
gggtcaggttgattacatcgatgaa

SEQ ID NO: 21234 - DNA, 25 bp, Saccharomyces pastorianus
gaaaagtcacttgatatggccttga

SEQ ID NO: 21235 - DNA, 25 bp, Saccharomyces pastorianus
aggcgttgctgatttatgcgcattg

SEQ ID NO: 21236 - DNA, 25 bp, Saccharomyces pastorianus
ataatacgacacatgcagaactggt

SEQ ID NO: 21237 - DNA, 25 bp, Saccharomyces pastorianus
ttaatgggactgaatcgctcgatac

SEQ ID NO: 21238 - DNA, 25 bp, Saccharomyces pastorianus
aaatcaggaagcttcacgcagagaa

SEQ ID NO: 21239 - DNA, 25 bp, Saccharomyces pastorianus
gataacatccttaacgggcgaatta

SEQ ID NO: 21240 - DNA, 25 bp, Saccharomyces pastorianus
gattatactaagctgggcaccaact

SEQ ID NO: 21241 - DNA, 25 bp, Saccharomyces pastorianus
ttggatcactagcagaccatcatat

SEQ ID NO: 21242 - DNA, 25 bp, Saccharomyces pastorianus
atttaatctctggttacggtggaag

SEQ ID NO: 21243 - DNA, 25 bp, Saccharomyces pastorianus
aaggaatctcttggatcactagcag

SEQ ID NO: 21244 - DNA, 25 bp, Saccharomyces pastorianus
gtacattgttgatttgaaagacctc

SEQ ID NO: 21245 - DNA, 25 bp, Saccharomyces pastorianus
gctgggcaccaacttgcaggaacta

SEQ ID NO: 21246 - DNA, 25 bp, Saccharomyces pastorianus
atgcgacaactgatcaaactgaagg

SEQ ID NO: 21247 - DNA, 25 bp, Saccharomyces pastorianus
taacacaattgtcctacggtttaca

SEQ ID NO: 21248 - DNA, 25 bp, Saccharomyces pastorianus
gaaagacctcgaacactacatcgat

SEQ ID NO: 21249 - DNA, 25 bp, Saccharomyces pastorianus
gagtgtacccgggatcttgcgaaga

SEQ ID NO: 21250 - DNA, 25 bp, Saccharomyces pastorianus
gtaatggtactgtcttgccggtaaa

SEQ ID NO: 21251 - DNA, 25 bp, Saccharomyces pastorianus
catgtataatgtgtgcgtctgccct

SEQ ID NO: 21252 - DNA, 25 bp, Saccharomyces pastorianus
gagctcccaagccacgatcgaagag

SEQ ID NO: 21253 - DNA, 25 bp, Saccharomyces pastorianus
ataagaacacgtttccaccgatgga

SEQ ID NO: 21254 - DNA, 25 bp, Saccharomyces pastorianus
ggtggcccacgctgaattcatggga

SEQ ID NO: 21255 - DNA, 25 bp, Saccharomyces pastorianus
gcgtctgcccttaagcaattgggaa

SEQ ID NO: 21256 - DNA, 25 bp, Saccharomyces pastorianus
gacattactctgtacgtgactgtag

SEQ ID NO: 21257 - DNA, 25 bp, Saccharomyces pastorianus
gaagccataatgctgctgaggtatt

SEQ ID NO: 21258 - DNA, 25 bp, Saccharomyces pastorianus
tcatgatacgtgtactcttgcgcct

SEQ ID NO: 21259 - DNA, 25 bp, Saccharomyces pastorianus
gaacgatacgaacaggtccttgact

SEQ ID NO: 21260 - DNA, 25 bp, Saccharomyces pastorianus
tgaagtcacatttgccctagacgct

SEQ ID NO: 21261 - DNA, 25 bp, Saccharomyces pastorianus
ggtaacgctgatggctctgctgctg

SEQ ID NO: 21262 - DNA, 25 bp, Saccharomyces pastorianus
ggtatcttaaaggtttctgccactg

SEQ ID NO: 21263 - DNA, 25 bp, Saccharomyces pastorianus
ttctgccactgataagggtaccggt

SEQ ID NO: 21264 - DNA, 25 bp, Saccharomyces pastorianus
gctctgctgctggtgattatgacga

SEQ ID NO: 21265 - DNA, 25 bp, Saccharomyces pastorianus
gggtaccggtaaatctgaatccatc

SEQ ID NO: 21266 - DNA, 25 bp, Saccharomyces pastorianus
ttgactccctatcaaaggttgctta

SEQ ID NO: 21267 - DNA, 25 bp, Saccharomyces pastorianus
gatgacaacttcgaaaccgccatgg

SEQ ID NO: 21268 - DNA, 25 bp, Saccharomyces pastorianus
gttggaaaactacgcccactctttg

SEQ ID NO: 21269 - DNA, 25 bp, Saccharomyces pastorianus
gtttgaattgactggtatcccacca

SEQ ID NO: 21270 - DNA, 25 bp, Saccharomyces pastorianus
aaatttgcctccgaagatgcttcta

SEQ ID NO: 21271 - DNA, 25 bp, Saccharomyces pastorianus
tcagttggtattgtgcgttgtggac

SEQ ID NO: 21272 - DNA, 25 bp, Saccharomyces pastorianus
gacgtgcaacatttcccaagcaatg

SEQ ID NO: 21273 - DNA, 25 bp, Saccharomyces pastorianus
aaaggtggtcctttgacgtgcaaca

SEQ ID NO: 21274 - DNA, 25 bp, Saccharomyces pastorianus
cagtcaatatcgctgaagggttcaa

SEQ ID NO: 21275 - DNA, 25 bp, Saccharomyces pastorianus
gtactagcgtacacagatgcggatg

SEQ ID NO: 21276 - DNA, 25 bp, Saccharomyces pastorianus
aaattctcttgcaagtccacaggtg

SEQ ID NO: 21277 - DNA, 25 bp, Saccharomyces pastorianus
tagaatgggcagactccgacagtaa

SEQ ID NO: 21278 - DNA, 25 bp, Saccharomyces pastorianus
tccacaggtggcttctgggtggcaa

SEQ ID NO: 21279 - DNA, 25 bp, Saccharomyces pastorianus
acacacgatgatgagctgaaggatt

SEQ ID NO: 21280 - DNA, 25 bp, Saccharomyces pastorianus
gggtacacttttacagtactagcgt

SEQ ID NO: 21281 - DNA, 25 bp, Saccharomyces pastorianus
gttacctttctaccggagctgacaa

SEQ ID NO: 21282 - DNA, 25 bp, Saccharomyces pastorianus
gacgaaattatactccccataggac

SEQ ID NO: 21283 - DNA, 25 bp, Saccharomyces pastorianus
cttacgaaagattaggcctggtgac

SEQ ID NO: 21284 - DNA, 25 bp, Saccharomyces pastorianus
gaagcacaatcagcacagctactgg

SEQ ID NO: 21285 - DNA, 25 bp, Saccharomyces pastorianus
gtcaacatcgggatagacgcttcca

SEQ ID NO: 21286 - DNA, 25 bp, Saccharomyces pastorianus
ttccatcccatactcaagtgttgtg

SEQ ID NO: 21287 - DNA, 25 bp, Saccharomyces pastorianus
gttgtgaccgattacgattttacca

SEQ ID NO: 21288 - DNA, 25 bp, Saccharomyces pastorianus
ttgactttcgacaatgcaaaccccg

SEQ ID NO: 21289 - DNA, 25 bp, Saccharomyces pastorianus
ggactaagaacattcggtgcgacta

SEQ ID NO: 21290 - DNA, 25 bp, Saccharomyces pastorianus
ttgtgccacaaattctatccgagtt

SEQ ID NO: 21291 - DNA, 25 bp, Saccharomyces pastorianus
attgagattctccttgactttcgac

SEQ ID NO: 21292 - DNA, 25 bp, Saccharomyces pastorianus
actttccaagaacatttgccaccac

SEQ ID NO: 21293 - DNA, 25 bp, Saccharomyces pastorianus
ggccgtttcactaacaacttgcata

SEQ ID NO: 21294 - DNA, 25 bp, Saccharomyces pastorianus
ggcattgcggtcattggccagccaa

SEQ ID NO: 21295 - DNA, 25 bp, Saccharomyces pastorianus
agcaaatacctctaccaccgtggtt

SEQ ID NO: 21296 - DNA, 25 bp, Saccharomyces pastorianus
cgtgcgctcagtagtctttcaagta

SEQ ID NO: 21297 - DNA, 25 bp, Saccharomyces pastorianus
cggattccagaatacgccagcaaat

SEQ ID NO: 21298 - DNA, 25 bp, Saccharomyces pastorianus
tcccggagtacggtgttgctcaaaa

SEQ ID NO: 21299 - DNA, 25 bp, Saccharomyces pastorianus
ggccagccaatatagtttcggacaa

SEQ ID NO: 21300 - DNA, 25 bp, Saccharomyces pastorianus
tgtcatatttgcacggccgtttcac

SEQ ID NO: 21301 - DNA, 25 bp, Saccharomyces pastorianus
aaactcctctgtatttgaccaaaat

SEQ ID NO: 21302 - DNA, 25 bp, Saccharomyces pastorianus
tcattcaattgaagcctctcgtgcg

SEQ ID NO: 21303 - DNA, 25 bp, Saccharomyces pastorianus
ggaatgctttactatcaacgccctc

SEQ ID NO: 21304 - DNA, 25 bp, Saccharomyces pastorianus
gatcagaacagccaggttgccctta

SEQ ID NO: 21305 - DNA, 25 bp, Saccharomyces pastorianus
aagacgctgagaaatcacccataag

SEQ ID NO: 21306 - DNA, 25 bp, Saccharomyces pastorianus
attgcaaggtattacacgtggtgta

SEQ ID NO: 21307 - DNA, 25 bp, Saccharomyces pastorianus
ttgcccttaagaaaaaccgctcaag

SEQ ID NO: 21308 - DNA, 25 bp, Saccharomyces pastorianus
aaagaggccgtacaatcaccctgaa

SEQ ID NO: 21309 - DNA, 25 bp, Saccharomyces pastorianus
gaaacgtatttctaagtgactatga

SEQ ID NO: 21310 - DNA, 25 bp, Saccharomyces pastorianus
acttcccgcgaatatggtccatttt

SEQ ID NO: 21311 - DNA, 25 bp, Saccharomyces pastorianus
gaagaagcatctttgggatcagaac

SEQ ID NO: 21312 - DNA, 25 bp, Saccharomyces pastorianus
aatgggcagattaaattccttcaaa

SEQ ID NO: 21313 - DNA, 25 bp, Saccharomyces pastorianus
ggtccatttttactccatagttgaa

SEQ ID NO: 21314 - DNA, 25 bp, Saccharomyces pastorianus
ggtgtagtcaattttctgaacataa

SEQ ID NO: 21315 - DNA, 25 bp, Saccharomyces pastorianus
gagcatgttctacaaactaccaggg

SEQ ID NO: 21316 - DNA, 25 bp, Saccharomyces pastorianus
ttatcatgcaatgcgtatggctctc

SEQ ID NO: 21317 - DNA, 25 bp, Saccharomyces pastorianus
gggtgttttcacatgtcgttgagca

SEQ ID NO: 21318 - DNA, 25 bp, Saccharomyces pastorianus
gactatgacgacaagttcctgaata

SEQ ID NO: 21319 - DNA, 25 bp, Saccharomyces pastorianus
tatcattgagttcgtccactttggg

SEQ ID NO: 21320 - DNA, 25 bp, Saccharomyces pastorianus
gcattgctagcgcattagttagaga

SEQ ID NO: 21321 - DNA, 25 bp, Saccharomyces pastorianus
ataccagggatgactggccgacggc

SEQ ID NO: 21322 - DNA, 25 bp, Saccharomyces pastorianus
tagccttgcctgaagaacgcctcat

SEQ ID NO: 21323 - DNA, 25 bp, Saccharomyces pastorianus
gatagtatgctagccttgcctgaag

SEQ ID NO: 21324 - DNA, 25 bp, Saccharomyces pastorianus
tgacactatataaggagcgcattgc

SEQ ID NO: 21325 - DNA, 25 bp, Saccharomyces pastorianus
gaacgcctcatgcaaatgtgttacc

SEQ ID NO: 21326 - DNA, 25 bp, Saccharomyces pastorianus
gaggctgcaactactgtgctttcta

SEQ ID NO: 21327 - DNA, 25 bp, Saccharomyces pastorianus
gtatttacgacatgcttgccaccaa

SEQ ID NO: 21328 - DNA, 25 bp, Saccharomyces pastorianus
ggtgccacccagaacaatctagacg

SEQ ID NO: 21329 - DNA, 25 bp, Saccharomyces pastorianus
gattattctaagaggtgccacccag

SEQ ID NO: 21330 - DNA, 25 bp, Saccharomyces pastorianus
aaattgttgcctggagctggtgcca

SEQ ID NO: 21331 - DNA, 25 bp, Saccharomyces pastorianus
gccttgctcggctaatgaggaccat

SEQ ID NO: 21332 - DNA, 25 bp, Saccharomyces pastorianus
aacaattcgccgttgcttttgaagt

SEQ ID NO: 21333 - DNA, 25 bp, Saccharomyces pastorianus
gaaatttgctatcaacgtcgccaca

SEQ ID NO: 21334 - DNA, 25 bp, Saccharomyces pastorianus
tgaagtggttcctcgtactctagca

SEQ ID NO: 21335 - DNA, 25 bp, Saccharomyces pastorianus
cacacaacgttagtgagccttgctc

SEQ ID NO: 21336 - DNA, 25 bp, Saccharomyces pastorianus
gagcgaacacctggtttactacagt

SEQ ID NO: 21337 - DNA, 25 bp, Saccharomyces pastorianus
gatcttgtaatccacaaaagagaat

SEQ ID NO: 21338 - DNA, 25 bp, Saccharomyces pastorianus
agaagttctccaggggatcttgtaa

SEQ ID NO: 21339 - DNA, 25 bp, Saccharomyces pastorianus
atatagcaccgggtatacaggacat

SEQ ID NO: 21340 - DNA, 25 bp, Saccharomyces pastorianus
tactgaagcatacaaaggatgttgg

SEQ ID NO: 21341 - DNA, 25 bp, Saccharomyces pastorianus
gcaccgggtatacaggacatactag

SEQ ID NO: 21342 - DNA, 25 bp, Saccharomyces pastorianus
catcaaatatttgcggattccatgg

SEQ ID NO: 21343 - DNA, 25 bp, Saccharomyces pastorianus
attgtttccccaatttatatgatat

SEQ ID NO: 21344 - DNA, 25 bp, Saccharomyces pastorianus
aatatttgcggattccatggttatt

SEQ ID NO: 21345 - DNA, 25 bp, Saccharomyces pastorianus
gttattaaaggatatagcaccgggt

SEQ ID NO: 21346 - DNA, 25 bp, Saccharomyces pastorianus
tttgcggattccatggttattaaag

SEQ ID NO: 21347 - DNA, 25 bp, Saccharomyces pastorianus
ttgtcattattgtttccccaattta

SEQ ID NO: 21348 - DNA, 25 bp, Saccharomyces pastorianus
aactattttagtcataccccaacat

SEQ ID NO: 21349 - DNA, 25 bp, Saccharomyces pastorianus
tcattcgatatgtgcgatctacaac

SEQ ID NO: 21350 - DNA, 25 bp, Saccharomyces pastorianus
gaccagaatctggattgccgcaaat

SEQ ID NO: 21351 - DNA, 25 bp, Saccharomyces pastorianus
ttgccgcaaataccagatcacctgt

SEQ ID NO: 21352 - DNA, 25 bp, Saccharomyces pastorianus
agagtcatgctcattcgattataga

SEQ ID NO: 21353 - DNA, 25 bp, Saccharomyces pastorianus
ctgccgattggcgttgaaaggttta

SEQ ID NO: 21354 - DNA, 25 bp, Saccharomyces pastorianus
tggtagggagctatcctttgattat

SEQ ID NO: 21355 - DNA, 25 bp, Saccharomyces pastorianus
tttaccggctgatttgctgccgatt

SEQ ID NO: 21356 - DNA, 25 bp, Saccharomyces pastorianus
cacctgttgaatgccgatccttata

SEQ ID NO: 21357 - DNA, 25 bp, Saccharomyces pastorianus
gatctacaacgtcatttaccggctg

SEQ ID NO: 21358 - DNA, 25 bp, Saccharomyces pastorianus
agatatgtactttcactggagctaa

SEQ ID NO: 21359 - DNA, 25 bp, Saccharomyces pastorianus
gcggcggatttattgaactagactc

SEQ ID NO: 21360 - DNA, 25 bp, Saccharomyces pastorianus
ggtattatgcaatcgatttctgaga

SEQ ID NO: 21361 - DNA, 25 bp, Saccharomyces pastorianus
actagaatcgaatccagtgtggcat

SEQ ID NO: 21362 - DNA, 25 bp, Saccharomyces pastorianus
tgcttccagacacgaatttgcatct

SEQ ID NO: 21363 - DNA, 25 bp, Saccharomyces pastorianus
gtggcattattacatttacgacaac

SEQ ID NO: 21364 - DNA, 25 bp, Saccharomyces pastorianus
gaactcgttactattgcgtatccta

SEQ ID NO: 21365 - DNA, 25 bp, Saccharomyces pastorianus
tgaactagactctcggacggaggga

SEQ ID NO: 21366 - DNA, 25 bp, Saccharomyces pastorianus
gggcattttttgactttggcgagca

SEQ ID NO: 21367 - DNA, 25 bp, Saccharomyces pastorianus
gaagggcaaggaatctctcaaggaa

SEQ ID NO: 21368 - DNA, 25 bp, Saccharomyces pastorianus
gtatcctaagattcttgcttccaga

SEQ ID NO: 21369 - DNA, 25 bp, Saccharomyces pastorianus
atctataatgtcagctttaagcggc

SEQ ID NO: 21370 - DNA, 25 bp, Saccharomyces pastorianus
tcgactttacgaacgcatacggttt

SEQ ID NO: 21371 - DNA, 25 bp, Saccharomyces pastorianus
aactcgcatgggattttgctatcac

SEQ ID NO: 21372 - DNA, 25 bp, Saccharomyces pastorianus
tgagttgaaaccttcccagatcttc

SEQ ID NO: 21373 - DNA, 25 bp, Saccharomyces pastorianus
gcatacggtttatcaatctcactgt

SEQ ID NO: 21374 - DNA, 25 bp, Saccharomyces pastorianus
aagaaggtatttgcgagtgccgaat

SEQ ID NO: 21375 - DNA, 25 bp, Saccharomyces pastorianus
ttattacaccacagcgatcgttctt

SEQ ID NO: 21376 - DNA, 25 bp, Saccharomyces pastorianus
gagagcttagagacaccttttttga

SEQ ID NO: 21377 - DNA, 25 bp, Saccharomyces pastorianus
tgtggtgttcctctatactcggaaa

SEQ ID NO: 21378 - DNA, 25 bp, Saccharomyces pastorianus
caatctcactgttatggcttctgga

SEQ ID NO: 21379 - DNA, 25 bp, Saccharomyces pastorianus
attggttacgcctagtcagcagcat

SEQ ID NO: 21380 - DNA, 25 bp, Saccharomyces pastorianus
tcaaacaagattctctctctccaag

SEQ ID NO: 21381 - DNA, 25 bp, Saccharomyces pastorianus
gagggacaaagccaaccgaccgcat

SEQ ID NO: 21382 - DNA, 25 bp, Saccharomyces pastorianus
agaattggcttttctcttgggagaa

SEQ ID NO: 21383 - DNA, 25 bp, Saccharomyces pastorianus
aagatacttgcgcataccgaatgaa

SEQ ID NO: 21384 - DNA, 25 bp, Saccharomyces pastorianus
gctgctgtggcttttggactcatta

SEQ ID NO: 21385 - DNA, 25 bp, Saccharomyces pastorianus
gcttagagacacttttttcgagggt

SEQ ID NO: 21386 - DNA, 25 bp, Saccharomyces pastorianus
tactgctaccattcttttctattgc

SEQ ID NO: 21387 - DNA, 25 bp, Saccharomyces pastorianus
agtggtatctttctacacgtgggaa

SEQ ID NO: 21388 - DNA, 25 bp, Saccharomyces pastorianus
gattggtcttcaaatagtcctttta

SEQ ID NO: 21389 - DNA, 25 bp, Saccharomyces pastorianus
aacgcttatggtctttcactatcgc

SEQ ID NO: 21390 - DNA, 25 bp, Saccharomyces pastorianus
gtgatcacacactactaggccaatc

SEQ ID NO: 21391 - DNA, 25 bp, Saccharomyces pastorianus
tgggactttgccattaccatacacg

SEQ ID NO: 21392 - DNA, 25 bp, Saccharomyces pastorianus
agcgatcaagtacgagcaaggcgat

SEQ ID NO: 21393 - DNA, 25 bp, Saccharomyces pastorianus
gcaaggcgatcgtaaagttcaggaa

SEQ ID NO: 21394 - DNA, 25 bp, Saccharomyces pastorianus
aggattgggagcctgtgcgcgtcgc

SEQ ID NO: 21395 - DNA, 25 bp, Saccharomyces pastorianus
ttaggtctagaagacagcagctagt

SEQ ID NO: 21396 - DNA, 25 bp, Saccharomyces pastorianus
aagcattgagtaagcacccctttct

SEQ ID NO: 21397 - DNA, 25 bp, Saccharomyces pastorianus
tattatcgtttacaaggtctttctg

SEQ ID NO: 21398 - DNA, 25 bp, Saccharomyces pastorianus
gttgtcaagctttacagcgatcaag

SEQ ID NO: 21399 - DNA, 25 bp, Saccharomyces pastorianus
tgggttcgttttggttgtcaagctt

SEQ ID NO: 21400 - DNA, 25 bp, Saccharomyces pastorianus
gtgcaacaatagtattgggttcgtt

SEQ ID NO: 21401 - DNA, 25 bp, Saccharomyces pastorianus
cattgagtaagcacccctttctttt

SEQ ID NO: 21402 - DNA, 25 bp, Saccharomyces pastorianus
tagtatatgaagcatctttagcggg

SEQ ID NO: 21403 - DNA, 25 bp, Saccharomyces pastorianus
gttatcaagctttacagcaatcaaa

SEQ ID NO: 21404 - DNA, 25 bp, Saccharomyces pastorianus
caagcaccccttcttatactttggt

SEQ ID NO: 21405 - DNA, 25 bp, Saccharomyces pastorianus
ataaaagatccctgagcaagcaccc

SEQ ID NO: 21406 - DNA, 25 bp, Saccharomyces pastorianus
gcagttagcgtatgaagcatcgtta

SEQ ID NO: 21407 - DNA, 25 bp, Saccharomyces pastorianus
ttttgcgcaacaatagcactaggct

SEQ ID NO: 21408 - DNA, 25 bp, Saccharomyces pastorianus
taccgtctacaaggtctttcagaag

SEQ ID NO: 21409 - DNA, 25 bp, Saccharomyces pastorianus
aagaagaatactaccgtctacaagg

SEQ ID NO: 21410 - DNA, 25 bp, Saccharomyces pastorianus
cgaagtgatcgtaaagtccaggaac

SEQ ID NO: 21411 - DNA, 25 bp, Saccharomyces pastorianus
gatcgagaaaacagcagttagcgta

SEQ ID NO: 21412 - DNA, 25 bp, Saccharomyces pastorianus
gcactaggctctatttggttatcaa

SEQ ID NO: 21413 - DNA, 25 bp, Saccharomyces pastorianus
gaagcatcgttagcaggacgatata

SEQ ID NO: 21414 - DNA, 25 bp, Saccharomyces pastorianus
aaattgtccgatttcttgcatgtat

SEQ ID NO: 21415 - DNA, 25 bp, Saccharomyces pastorianus
tgtcttagacatgctcctgcctgag

SEQ ID NO: 21416 - DNA, 25 bp, Saccharomyces pastorianus
ttctccagtcccttttacaaatgtt

SEQ ID NO: 21417 - DNA, 25 bp, Saccharomyces pastorianus
gctatattttcaccgcactaatggg

SEQ ID NO: 21418 - DNA, 25 bp, Saccharomyces pastorianus
ggcccaccggacactgtatatgata

SEQ ID NO: 21419 - DNA, 25 bp, Saccharomyces pastorianus
gaaattcgttgcttctatcccaatt

SEQ ID NO: 21420 - DNA, 25 bp, Saccharomyces pastorianus
ctgcctgagggagctactgatcatt

SEQ ID NO: 21421 - DNA, 25 bp, Saccharomyces pastorianus
ttgcatgtatcctctggctcagacg

SEQ ID NO: 21422 - DNA, 25 bp, Saccharomyces pastorianus
gaattatcggtatttcttccggaag

SEQ ID NO: 21423 - DNA, 25 bp, Saccharomyces pastorianus
agaagcctctgtctattgcttgcta

SEQ ID NO: 21424 - DNA, 25 bp, Saccharomyces pastorianus
attcgatattgattctccagtccct

SEQ ID NO: 21425 - DNA, 25 bp, Saccharomyces pastorianus
atggcccattggacactgtatatga

SEQ ID NO: 21426 - DNA, 25 bp, Saccharomyces pastorianus
ttcacagttggctggactaacccat

SEQ ID NO: 21427 - DNA, 25 bp, Saccharomyces pastorianus
tttggttgggcttgtttccacctca

SEQ ID NO: 21428 - DNA, 25 bp, Saccharomyces pastorianus
aaaagcctctatccattgcttgcta

SEQ ID NO: 21429 - DNA, 25 bp, Saccharomyces pastorianus
ggccatgttaagctgactttccaat

SEQ ID NO: 21430 - DNA, 25 bp, Saccharomyces pastorianus
gcttgctacatttttgcggcattga

SEQ ID NO: 21431 - DNA, 25 bp, Saccharomyces pastorianus
aatatgttgcttctatcccattgct

SEQ ID NO: 21432 - DNA, 25 bp, Saccharomyces pastorianus
gttactacccaatgatgctactgat

SEQ ID NO: 21433 - DNA, 25 bp, Saccharomyces pastorianus
agattccccttgtttggaggctgga

SEQ ID NO: 21434 - DNA, 25 bp, Saccharomyces pastorianus
gaaactcactttattaccgtcttag

SEQ ID NO: 21435 - DNA, 25 bp, Saccharomyces pastorianus
aacccattgtccgatttcttacatg

SEQ ID NO: 21436 - DNA, 25 bp, Saccharomyces pastorianus
ggtctgatttcagcgcttatgacta

SEQ ID NO: 21437 - DNA, 25 bp, Saccharomyces pastorianus
gaggacatgcggtttttcccaactt

SEQ ID NO: 21438 - DNA, 25 bp, Saccharomyces pastorianus
atgtattagtgtcgtgttgtccaca

SEQ ID NO: 21439 - DNA, 25 bp, Saccharomyces pastorianus
atcggttacggacataggtactgca

SEQ ID NO: 21440 - DNA, 25 bp, Saccharomyces pastorianus
gagagtggcttgtcacgtaaccata

SEQ ID NO: 21441 - DNA, 25 bp, Saccharomyces pastorianus
aacacatagatgaagcggccagcgc

SEQ ID NO: 21442 - DNA, 25 bp, Saccharomyces pastorianus
ttgcctaattttgccgtgttggttc

SEQ ID NO: 21443 - DNA, 25 bp, Saccharomyces pastorianus
agagctgcgaaaggccttcaagtat

SEQ ID NO: 21444 - DNA, 25 bp, Saccharomyces pastorianus
tatgactatcattcctatcgcaaag

SEQ ID NO: 21445 - DNA, 25 bp, Saccharomyces pastorianus
gcaagacctatcgtttctgtattgg

SEQ ID NO: 21446 - DNA, 25 bp, Saccharomyces pastorianus
aagaccccattgaacgcaagaccta

SEQ ID NO: 21447 - DNA, 25 bp, Saccharomyces pastorianus
atcattgcgtttttgggtgcaggct

SEQ ID NO: 21448 - DNA, 25 bp, Saccharomyces pastorianus
aggccgattgtttccgtgttagacg

SEQ ID NO: 21449 - DNA, 25 bp, Saccharomyces pastorianus
gcaggcttgtgtttcgcaatttgtc

SEQ ID NO: 21450 - DNA, 25 bp, Saccharomyces pastorianus
aatatgtgccagtgtcgtgttgtct

SEQ ID NO: 21451 - DNA, 25 bp, Saccharomyces pastorianus
tattcctattgccaaaactcctttg

SEQ ID NO: 21452 - DNA, 25 bp, Saccharomyces pastorianus
tccgaagttcgtatatgctctaatt

SEQ ID NO: 21453 - DNA, 25 bp, Saccharomyces pastorianus
ggacatgcagttttcccaaatttga

SEQ ID NO: 21454 - DNA, 25 bp, Saccharomyces pastorianus
aactcctttgagtgcaaggccgatt

SEQ ID NO: 21455 - DNA, 25 bp, Saccharomyces pastorianus
ggtcactgacataggtactgccgtt

SEQ ID NO: 21456 - DNA, 25 bp, Saccharomyces pastorianus
agctataagcctccctgaatttgac

SEQ ID NO: 21457 - DNA, 25 bp, Saccharomyces pastorianus
gatgaagcggacagccctatgaaaa

SEQ ID NO: 21458 - DNA, 25 bp, Saccharomyces pastorianus
taacgctctgctgccagggttataa

SEQ ID NO: 21459 - DNA, 25 bp, Saccharomyces pastorianus
tgctgattttgccagggtcatcttt

SEQ ID NO: 21460 - DNA, 25 bp, Saccharomyces pastorianus
cagatcttgctgaaagtgacgtatt

SEQ ID NO: 21461 - DNA, 25 bp, Saccharomyces pastorianus
gatatcagggccgactgctgcaaaa

SEQ ID NO: 21462 - DNA, 25 bp, Saccharomyces pastorianus
aaaaaatctcttagcccagtatgga

SEQ ID NO: 21463 - DNA, 25 bp, Saccharomyces pastorianus
gtcatctttgatggcgcactaggag

SEQ ID NO: 21464 - DNA, 25 bp, Saccharomyces pastorianus
acgtattaactgaatcgctcatttt

SEQ ID NO: 21465 - DNA, 25 bp, Saccharomyces pastorianus
gctcattttagcattcttatccaga

SEQ ID NO: 21466 - DNA, 25 bp, Saccharomyces pastorianus
gaaggatttcgaattagctcacaag

SEQ ID NO: 21467 - DNA, 25 bp, Saccharomyces pastorianus
gattaattggcgctttcaaaggtaa

SEQ ID NO: 21468 - DNA, 25 bp, Saccharomyces pastorianus
gctacaatacgctgaagcttttatt

SEQ ID NO: 21469 - DNA, 25 bp, Saccharomyces pastorianus
ttacatcctcttctttcgcaacaat

SEQ ID NO: 21470 - DNA, 25 bp, Saccharomyces pastorianus
taagcaccagttttacgccttctgt

SEQ ID NO: 21471 - DNA, 25 bp, Saccharomyces pastorianus
gtccctctccgtaagcaaaacatta

SEQ ID NO: 21472 - DNA, 25 bp, Saccharomyces pastorianus
gaagccaattgtccggtatccaaca

SEQ ID NO: 21473 - DNA, 25 bp, Saccharomyces pastorianus
acatcttcagttggccttaattctt

SEQ ID NO: 21474 - DNA, 25 bp, Saccharomyces pastorianus
gagcccacttttgtaaatgccacga

SEQ ID NO: 21475 - DNA, 25 bp, Saccharomyces pastorianus
atacgggttactttgagcacacggc

SEQ ID NO: 21476 - DNA, 25 bp, Saccharomyces pastorianus
gaaactccttaaattccttctgcag

SEQ ID NO: 21477 - DNA, 25 bp, Saccharomyces pastorianus
tagtgtcatccttgatcgcatatcc

SEQ ID NO: 21478 - DNA, 25 bp, Saccharomyces pastorianus
actgctgctgttccatctgaagagc

SEQ ID NO: 21479 - DNA, 25 bp, Saccharomyces pastorianus
gagcacacggctttgacaacatctt

SEQ ID NO: 21480 - DNA, 25 bp, Saccharomyces pastorianus
aattcagaaagccagtcctcgacga

SEQ ID NO: 21481 - DNA, 25 bp, Saccharomyces pastorianus
gccagtcctcgacgaagtccagaaa

SEQ ID NO: 21482 - DNA, 25 bp, Saccharomyces pastorianus
aacgtctcgtatatcaaacgcgata

SEQ ID NO: 21483 - DNA, 25 bp, Saccharomyces pastorianus
aactgctaccacaaagtcctatttt

SEQ ID NO: 21484 - DNA, 25 bp, Saccharomyces pastorianus
aactggagctaatagggaccgtcaa

SEQ ID NO: 21485 - DNA, 25 bp, Saccharomyces pastorianus
aaaacctgtttctcatatctttaga

SEQ ID NO: 21486 - DNA, 25 bp, Saccharomyces pastorianus
aacaaagacctcttgccagttgtag

SEQ ID NO: 21487 - DNA, 25 bp, Saccharomyces pastorianus
ctatcacggaaaccctcaactttat

SEQ ID NO: 21488 - DNA, 25 bp, Saccharomyces pastorianus
gtactggacggagagttgccactaa

SEQ ID NO: 21489 - DNA, 25 bp, Saccharomyces pastorianus
cacgaaattagatcccaccgttttg

SEQ ID NO: 21490 - DNA, 25 bp, Saccharomyces pastorianus
gtaggtaactcatttcctccaactg

SEQ ID NO: 21491 - DNA, 25 bp, Saccharomyces pastorianus
aatggctgatacttcgaacacgcta

SEQ ID NO: 21492 - DNA, 25 bp, Saccharomyces pastorianus
gaacacgctaacttttgaagctcta

SEQ ID NO: 21493 - DNA, 25 bp, Saccharomyces pastorianus
aaaggttgcaccgatcaggaaaaca

SEQ ID NO: 21494 - DNA, 25 bp, Saccharomyces pastorianus
gaaatttttcatcagacgccctaca

SEQ ID NO: 21495 - DNA, 25 bp, Saccharomyces pastorianus
accaagccctgttctaaatccaaat

SEQ ID NO: 21496 - DNA, 25 bp, Saccharomyces pastorianus
cagaaagtcagtcttcaacgaagtc

SEQ ID NO: 21497 - DNA, 25 bp, Saccharomyces pastorianus
ggagccaatagaaaccgccaaaatt

SEQ ID NO: 21498 - DNA, 25 bp, Saccharomyces pastorianus
aaaattattgccaccaagccctgtt

SEQ ID NO: 21499 - DNA, 25 bp, Saccharomyces pastorianus
taaaacctgtttcccatattttcag

SEQ ID NO: 21500 - DNA, 25 bp, Saccharomyces pastorianus
gtagtcaacaattcattctcgccga

SEQ ID NO: 21501 - DNA, 25 bp, Saccharomyces pastorianus
aaagacctcttaccagtagtcaaca

SEQ ID NO: 21502 - DNA, 25 bp, Saccharomyces pastorianus
gaaacaacaactagaagctcaagaa

SEQ ID NO: 21503 - DNA, 25 bp, Saccharomyces pastorianus
agaaggtgcgagaacccctaaccag

SEQ ID NO: 21504 - DNA, 25 bp, Saccharomyces pastorianus
aagagaccaattactagccgccgaa

SEQ ID NO: 21505 - DNA, 25 bp, Saccharomyces pastorianus
gcataatactggcaagagatactca

SEQ ID NO: 21506 - DNA, 25 bp, Saccharomyces pastorianus
aaaagtggcagcaggaagagcaaga

SEQ ID NO: 21507 - DNA, 25 bp, Saccharomyces pastorianus
gaccaattactagccgccgaagagg

SEQ ID NO: 21508 - DNA, 25 bp, Saccharomyces pastorianus
agagatactcagaaactgccaaaaa

SEQ ID NO: 21509 - DNA, 25 bp, Saccharomyces pastorianus
aggaccaactagagaaacaacaact

SEQ ID NO: 21510 - DNA, 25 bp, Saccharomyces pastorianus
gagaacccctaaccagaagaagctg

SEQ ID NO: 21511 - DNA, 25 bp, Saccharomyces pastorianus
gagcaagaaaacgtaggcaagctta

SEQ ID NO: 21512 - DNA, 25 bp, Saccharomyces pastorianus
agctcaagaagctcagaggtgggaa

SEQ ID NO: 21513 - DNA, 25 bp, Saccharomyces pastorianus
aattggcggctcaagaggctcagaa

SEQ ID NO: 21514 - DNA, 25 bp, Saccharomyces pastorianus
ggaacaaggtgcaagaactcctaat

SEQ ID NO: 21515 - DNA, 25 bp, Saccharomyces pastorianus
gaaaaagctggcattggagcaaaaa

SEQ ID NO: 21516 - DNA, 25 bp, Saccharomyces pastorianus
gaacttttattagccgccgaagaag

SEQ ID NO: 21517 - DNA, 25 bp, Saccharomyces pastorianus
attagccgccgaagaagaagtgttg

SEQ ID NO: 21518 - DNA, 25 bp, Saccharomyces pastorianus
aaaagttgctgcaggaagggccaga

SEQ ID NO: 21519 - DNA, 25 bp, Saccharomyces pastorianus
ggagaaacaacaattggcggctcaa

SEQ ID NO: 21520 - DNA, 25 bp, Saccharomyces pastorianus
gacaagcttacgagaaagaccagtt

SEQ ID NO: 21521 - DNA, 25 bp, Saccharomyces pastorianus
aagggccagaaagcgcagacaagct

SEQ ID NO: 21522 - DNA, 25 bp, Saccharomyces pastorianus
tcaagaggctcagaaatgggaacaa

SEQ ID NO: 21523 - DNA, 25 bp, Saccharomyces pastorianus
actcctaatgagaaaaagctggcat

SEQ ID NO: 21524 - DNA, 25 bp, Saccharomyces pastorianus
aagtgacaaatctctaccgcaacag

SEQ ID NO: 21525 - DNA, 25 bp, Saccharomyces pastorianus
atatctgtccctgaattcagttcta

SEQ ID NO: 21526 - DNA, 25 bp, Saccharomyces pastorianus
gtccctagaatcatacttcaacggt

SEQ ID NO: 21527 - DNA, 25 bp, Saccharomyces pastorianus
tgtattggataagtggccccacgtt

SEQ ID NO: 21528 - DNA, 25 bp, Saccharomyces pastorianus
ggccccacgtttacattgtggcaaa

SEQ ID NO: 21529 - DNA, 25 bp, Saccharomyces pastorianus
tatgcccggaaccaatgatccaagt

SEQ ID NO: 21530 - DNA, 25 bp, Saccharomyces pastorianus
taccttatggtgttatccgtacact

SEQ ID NO: 21531 - DNA, 25 bp, Saccharomyces pastorianus
gaatttagtgaccaacccatatgag

SEQ ID NO: 21532 - DNA, 25 bp, Saccharomyces pastorianus
tgtggcaaaccagccatattttgga

SEQ ID NO: 21533 - DNA, 25 bp, Saccharomyces pastorianus
aatggcgtagacgttctagccgttt

SEQ ID NO: 21534 - DNA, 25 bp, Saccharomyces pastorianus
atatctgttgatattatgcccggaa

SEQ ID NO: 21535 - DNA, 25 bp, Saccharomyces pastorianus
ggactcttacttcgatgactctaat

SEQ ID NO: 21536 - DNA, 25 bp, Saccharomyces pastorianus
agtggcaaatcgttacctcaacagc

SEQ ID NO: 21537 - DNA, 25 bp, Saccharomyces pastorianus
tgtgggtaaccaaccgagcttcgga

SEQ ID NO: 21538 - DNA, 25 bp, Saccharomyces pastorianus
atctccgttgacataatgcctggta

SEQ ID NO: 21539 - DNA, 25 bp, Saccharomyces pastorianus
gtagacgttctcactatttcaggta

SEQ ID NO: 21540 - DNA, 25 bp, Saccharomyces pastorianus
cacctactgcacctgatacgttatg

SEQ ID NO: 21541 - DNA, 25 bp, Saccharomyces pastorianus
gacaattcactggactcttacttcg

SEQ ID NO: 21542 - DNA, 25 bp, Saccharomyces pastorianus
aatattttaccttccatctccgttg

SEQ ID NO: 21543 - DNA, 25 bp, Saccharomyces pastorianus
tggtactaacgatcccagtggcaaa

SEQ ID NO: 21544 - DNA, 25 bp, Saccharomyces pastorianus
acgaatggccacacgtttacgttgt

SEQ ID NO: 21545 - DNA, 25 bp, Saccharomyces pastorianus
gtatctgtgcctgaattcagttcca

SEQ ID NO: 21546 - DNA, 25 bp, Saccharomyces pastorianus
gaagacgctgagttacaagctctat

SEQ ID NO: 21547 - DNA, 25 bp, Saccharomyces pastorianus
gagccgatgttgaagtgtcttgttt

SEQ ID NO: 21548 - DNA, 25 bp, Saccharomyces pastorianus
tatatgttttgaccacccaagcctt

SEQ ID NO: 21549 - DNA, 25 bp, Saccharomyces pastorianus
aaaatcagctgaagacatgtccaca

SEQ ID NO: 21550 - DNA, 25 bp, Saccharomyces pastorianus
tgcaacattaccatgccaccaaagg

SEQ ID NO: 21551 - DNA, 25 bp, Saccharomyces pastorianus
tatccatcattgacgaaactgtttg

SEQ ID NO: 21552 - DNA, 25 bp, Saccharomyces pastorianus
gactgttcattccattttaagatac

SEQ ID NO: 21553 - DNA, 25 bp, Saccharomyces pastorianus
tagtcgccgccccattatatgtttt

SEQ ID NO: 21554 - DNA, 25 bp, Saccharomyces pastorianus
gggaaggtattgaaccgccatcaaa

SEQ ID NO: 21555 - DNA, 25 bp, Saccharomyces pastorianus
tacggcggtgtttgcaacattacca

SEQ ID NO: 21556 - DNA, 25 bp, Saccharomyces pastorianus
ttaagatactgtgccgaaaaattcc

SEQ ID NO: 21557 - DNA, 25 bp, Saccharomyces pastorianus
tggacaggtatcgaaccgccatcaa

SEQ ID NO: 21558 - DNA, 25 bp, Saccharomyces pastorianus
gtcttaaccactcaagccttagata

SEQ ID NO: 21559 - DNA, 25 bp, Saccharomyces pastorianus
acaccacaagccgttaaaatcagag

SEQ ID NO: 21560 - DNA, 25 bp, Saccharomyces pastorianus
gcagacgctgaagtgtcttgtttca

SEQ ID NO: 21561 - DNA, 25 bp, Saccharomyces pastorianus
aaatcaccgaagtcattaccaagta

SEQ ID NO: 21562 - DNA, 25 bp, Saccharomyces pastorianus
agttaagttggttgccgccccattg

SEQ ID NO: 21563 - DNA, 25 bp, Saccharomyces pastorianus
gtatcgatgccatcaaagaggcttt

SEQ ID NO: 21564 - DNA, 25 bp, Saccharomyces pastorianus
gactgttcattccatcctaagatat

SEQ ID NO: 21565 - DNA, 25 bp, Saccharomyces pastorianus
ccaagtatggcggtgtttgtaacat

SEQ ID NO: 21566 - DNA, 25 bp, Saccharomyces pastorianus
ccattgtacgtcttaaccactcaag

SEQ ID NO: 21567 - DNA, 25 bp, Saccharomyces pastorianus
gaagtctgctgaagatatgtccaca

SEQ ID NO: 21568 - DNA, 25 bp, Saccharomyces pastorianus
gaaatcaccggaaacaccatatgcg

SEQ ID NO: 21569 - DNA, 25 bp, Saccharomyces pastorianus
cacatcatcaagttcccatttggca

SEQ ID NO: 21570 - DNA, 25 bp, Saccharomyces pastorianus
gcattggtaatatcttgtcggagta

SEQ ID NO: 21571 - DNA, 25 bp, Saccharomyces pastorianus
ggcatcaaatttcagtggcctaatt

SEQ ID NO: 21572 - DNA, 25 bp, Saccharomyces pastorianus
gatggtttctcataacagcgttgat

SEQ ID NO: 21573 - DNA, 25 bp, Saccharomyces pastorianus
atgcagctccccatgttggtggaaa

SEQ ID NO: 21574 - DNA, 25 bp, Saccharomyces pastorianus
gatatggctgaacattccttagaga

SEQ ID NO: 21575 - DNA, 25 bp, Saccharomyces pastorianus
gggccgcagattccaatatactggg

SEQ ID NO: 21576 - DNA, 25 bp, Saccharomyces pastorianus
gatgccggtccttcaggcatcaaat

SEQ ID NO: 21577 - DNA, 25 bp, Saccharomyces pastorianus
aatatactgggtacgtcggaagcaa

SEQ ID NO: 21578 - DNA, 25 bp, Saccharomyces pastorianus
cagcgttgatgttgatcgttgcatt

SEQ ID NO: 21579 - DNA, 25 bp, Saccharomyces pastorianus
aatcggagctgttatagcatgcata

SEQ ID NO: 21580 - DNA, 25 bp, Saccharomyces pastorianus
ggagaactttcaacagttatcactc

SEQ ID NO: 21581 - DNA, 25 bp, Saccharomyces pastorianus
gcataagttgtgtgattactctact

SEQ ID NO: 21582 - DNA, 25 bp, Saccharomyces pastorianus
gttctattggttacgtatggcataa

SEQ ID NO: 21583 - DNA, 25 bp, Saccharomyces pastorianus
atacagagaaaactgatcttcccca

SEQ ID NO: 21584 - DNA, 25 bp, Saccharomyces pastorianus
actctactatgtgttttaccagctt

SEQ ID NO: 21585 - DNA, 25 bp, Saccharomyces pastorianus
agcatgcatattgggattcgctcaa

SEQ ID NO: 21586 - DNA, 25 bp, Saccharomyces pastorianus
tgatcttccccatagattttcccag

SEQ ID NO: 21587 - DNA, 25 bp, Saccharomyces pastorianus
gttatcactcacaatcggagctgtt

SEQ ID NO: 21588 - DNA, 25 bp, Saccharomyces pastorianus
gggattcgctcaacaatcgttgtat

SEQ ID NO: 21589 - DNA, 25 bp, Saccharomyces pastorianus
tttcccagccaacagaaaacggaga

SEQ ID NO: 21590 - DNA, 25 bp, Saccharomyces pastorianus
gggaagctacgaacgatacggaaat

SEQ ID NO: 21591 - DNA, 25 bp, Saccharomyces pastorianus
acctgggaagtgtcgacatttgatt

SEQ ID NO: 21592 - DNA, 25 bp, Saccharomyces pastorianus
tatattttatactacctggcccaga

SEQ ID NO: 21593 - DNA, 25 bp, Saccharomyces pastorianus
gcagacggtacatgtgtgtcgcata

SEQ ID NO: 21594 - DNA, 25 bp, Saccharomyces pastorianus
gctggacctgcttaattgcaaactg

SEQ ID NO: 21595 - DNA, 25 bp, Saccharomyces pastorianus
atttggaagttccagctggacctgc

SEQ ID NO: 21596 - DNA, 25 bp, Saccharomyces pastorianus
taagcagattaaacgtcgatttcaa

SEQ ID NO: 21597 - DNA, 25 bp, Saccharomyces pastorianus
gcaaactgttcaatgagctttctaa

SEQ ID NO: 21598 - DNA, 25 bp, Saccharomyces pastorianus
agatcattttgaaacacctgggaag

SEQ ID NO: 21599 - DNA, 25 bp, Saccharomyces pastorianus
gacaggtttccgtttgttattggat

SEQ ID NO: 21600 - DNA, 25 bp, Saccharomyces pastorianus
ttgttttacaactgcagaactgctt

SEQ ID NO: 21601 - DNA, 25 bp, Saccharomyces pastorianus
tttgctcatacccacctgattactg

SEQ ID NO: 21602 - DNA, 25 bp, Saccharomyces pastorianus
tactgcgaattttcaggtaaattga

SEQ ID NO: 21603 - DNA, 25 bp, Saccharomyces pastorianus
tgcggagtttgctcatacccacctg

SEQ ID NO: 21604 - DNA, 25 bp, Saccharomyces pastorianus
gagtttgctcatacccacctgatta

SEQ ID NO: 21605 - DNA, 25 bp, Saccharomyces pastorianus
gtttactgcggagtttgctcatacc

SEQ ID NO: 21606 - DNA, 25 bp, Saccharomyces pastorianus
gaaagaagttgtttactgcggagtt

SEQ ID NO: 21607 - DNA, 25 bp, Saccharomyces pastorianus
atacccacctgattactgcgaattt

SEQ ID NO: 21608 - DNA, 25 bp, Saccharomyces pastorianus
ttactgcggagtttgctcataccca

SEQ ID NO: 21609 - DNA, 25 bp, Saccharomyces pastorianus
acccacctgattactgcgaattttc

SEQ ID NO: 21610 - DNA, 25 bp, Saccharomyces pastorianus
aagttgtttactgcggagtttgctc

SEQ ID NO: 21611 - DNA, 25 bp, Saccharomyces pastorianus
ctgattactgcgaattttcaggtaa

SEQ ID NO: 21612 - DNA, 25 bp, Saccharomyces pastorianus
attgatttgttgatctccgaacagg

SEQ ID NO: 21613 - DNA, 25 bp, Saccharomyces pastorianus
ttgatcggtcacattgtcccagaag

SEQ ID NO: 21614 - DNA, 25 bp, Saccharomyces pastorianus
gttctcatgggttcttgatcggtca

SEQ ID NO: 21615 - DNA, 25 bp, Saccharomyces pastorianus
tacttcaaaggtaaggcccgtgtct

SEQ ID NO: 21616 - DNA, 25 bp, Saccharomyces pastorianus
aatcttatacggttcattggcgcca

SEQ ID NO: 21617 - DNA, 25 bp, Saccharomyces pastorianus
acaggaaatgtctcaacgtaagcaa

SEQ ID NO: 21618 - DNA, 25 bp, Saccharomyces pastorianus
agagatcatcaaacctctttcccat

SEQ ID NO: 21619 - DNA, 25 bp, Saccharomyces pastorianus
ggcaccaagcttgcctgaaggccaa

SEQ ID NO: 21620 - DNA, 25 bp, Saccharomyces pastorianus
gtaagcaaaactgggtcgctcctcc

SEQ ID NO: 21621 - DNA, 25 bp, Saccharomyces pastorianus
gaccagcggtcacttacaaatctta

SEQ ID NO: 21622 - DNA, 25 bp, Saccharomyces pastorianus
gtaaggcccgtgtctacgaagaaga

SEQ ID NO: 21623 - DNA, 25 bp, Saccharomyces pastorianus
attgcagcaagcgtctcccaggaag

SEQ ID NO: 21624 - DNA, 25 bp, Saccharomyces pastorianus
acacacggacgagctagactacttc

SEQ ID NO: 21625 - DNA, 25 bp, Saccharomyces pastorianus
gcaagtacgtggacgctttccagta

SEQ ID NO: 21626 - DNA, 25 bp, Saccharomyces pastorianus
tcgtgcagggcaggtacttcgactc

SEQ ID NO: 21627 - DNA, 25 bp, Saccharomyces pastorianus
ttcgcgtacctgtcagactcgtatc

SEQ ID NO: 21628 - DNA, 25 bp, Saccharomyces pastorianus
ggagtaccagttccccaaggatgtg

SEQ ID NO: 21629 - DNA, 25 bp, Saccharomyces pastorianus
aaagagaggtcttgagcccggagaa

SEQ ID NO: 21630 - DNA, 25 bp, Saccharomyces pastorianus
gaacgactggatccacctcaaagta

SEQ ID NO: 21631 - DNA, 25 bp, Saccharomyces pastorianus
aggcctcgtcgctctttgaaagaga

SEQ ID NO: 21632 - DNA, 25 bp, Saccharomyces pastorianus
tagggtgagacagcccatcacgaca

SEQ ID NO: 21633 - DNA, 25 bp, Saccharomyces pastorianus
aaggatgtgttctactctgcaagac

SEQ ID NO: 21634 - DNA, 25 bp, Saccharomyces pastorianus
attgcctgggaatgttcctcacagt

SEQ ID NO: 21635 - DNA, 25 bp, Saccharomyces pastorianus
gagagtgagctccaaatgctagatt

SEQ ID NO: 21636 - DNA, 25 bp, Saccharomyces pastorianus
aagggatctatgcttctgaaggttg

SEQ ID NO: 21637 - DNA, 25 bp, Saccharomyces pastorianus
gaaccgattatcacatcaacccaac

SEQ ID NO: 21638 - DNA, 25 bp, Saccharomyces pastorianus
cacagtcccgttaggttcgctaata

SEQ ID NO: 21639 - DNA, 25 bp, Saccharomyces pastorianus
acagtgatgatcgttggtgggccca

SEQ ID NO: 21640 - DNA, 25 bp, Saccharomyces pastorianus
gcacgcaagtgaagcaagccatttt

SEQ ID NO: 21641 - DNA, 25 bp, Saccharomyces pastorianus
agtgattcttacttattgcctggga

SEQ ID NO: 21642 - DNA, 25 bp, Saccharomyces pastorianus
gcagatcttttgaagccaccggtga

SEQ ID NO: 21643 - DNA, 25 bp, Saccharomyces pastorianus
gatggtattgttcgcattgtcgcca

SEQ ID NO: 21644 - DNA, 25 bp, Saccharomyces pastorianus
tatcgttgtggagcaagacagacct

SEQ ID NO: 21645 - DNA, 25 bp, Saccharomyces pastorianus
gaatatatgccagagcctgatttag

SEQ ID NO: 21646 - DNA, 25 bp, Saccharomyces pastorianus
taatgcttctaatgacccaattggg

SEQ ID NO: 21647 - DNA, 25 bp, Saccharomyces pastorianus
atcggacattagaatcgacgactgt

SEQ ID NO: 21648 - DNA, 25 bp, Saccharomyces pastorianus
tcattggccctctttaacttagaaa

SEQ ID NO: 21649 - DNA, 25 bp, Saccharomyces pastorianus
gaaagcaaaggcataccactatata

SEQ ID NO: 21650 - DNA, 25 bp, Saccharomyces pastorianus
gaatctggcaccctcttgtttaaaa

SEQ ID NO: 21651 - DNA, 25 bp, Saccharomyces pastorianus
cgagccaaggcatactacagaagag

SEQ ID NO: 21652 - DNA, 25 bp, Saccharomyces pastorianus
aatgaggacgattttggtaacgctt

SEQ ID NO: 21653 - DNA, 25 bp, Saccharomyces pastorianus
aaatctatcattggccctctttaac

SEQ ID NO: 21654 - DNA, 25 bp, Saccharomyces pastorianus
ggagatgtacaatgttccgaacaaa

SEQ ID NO: 21655 - DNA, 25 bp, Saccharomyces pastorianus
ggaatatcctgatgacgatacacat

SEQ ID NO: 21656 - DNA, 25 bp, Saccharomyces pastorianus
gtatgggttgcaactacttggccgc

SEQ ID NO: 21657 - DNA, 25 bp, Saccharomyces pastorianus
aattactagagagtcccgccaaaga

SEQ ID NO: 21658 - DNA, 25 bp, Saccharomyces pastorianus
ttcggcacccagaagtctattggat

SEQ ID NO: 21659 - DNA, 25 bp, Saccharomyces pastorianus
atgattttgcatctcctttctcttc

SEQ ID NO: 21660 - DNA, 25 bp, Saccharomyces pastorianus
gaggcggagcctttcaaagccagta

SEQ ID NO: 21661 - DNA, 25 bp, Saccharomyces pastorianus
aacgtccctcgatcaagattcttct

SEQ ID NO: 21662 - DNA, 25 bp, Saccharomyces pastorianus
ggtgctatgacagctgaaccaacgt

SEQ ID NO: 21663 - DNA, 25 bp, Saccharomyces pastorianus
tacttggccgcttcacttgtgaaga

SEQ ID NO: 21664 - DNA, 25 bp, Saccharomyces pastorianus
ttgaaagaaattccgttcctgtcca

SEQ ID NO: 21665 - DNA, 25 bp, Saccharomyces pastorianus
gaacgtagctccaagcatgttagat

SEQ ID NO: 21666 - DNA, 25 bp, Saccharomyces pastorianus
gttagatgacttttcgcaaccaccg

SEQ ID NO: 21667 - DNA, 25 bp, Saccharomyces pastorianus
gaacaaggatctgcctgagctttgt

SEQ ID NO: 21668 - DNA, 25 bp, Saccharomyces pastorianus
aaaagggctgttgccatctgtttgc

SEQ ID NO: 21669 - DNA, 25 bp, Saccharomyces pastorianus
acccctctcaactggcaagtacgat

SEQ ID NO: 21670 - DNA, 25 bp, Saccharomyces pastorianus
agaggtcgccctgcgtgatgataga

SEQ ID NO: 21671 - DNA, 25 bp, Saccharomyces pastorianus
ttgccatctgtttgcagaggtcgcc

SEQ ID NO: 21672 - DNA, 25 bp, Saccharomyces pastorianus
cgtgatgatagagaggcacaaccct

SEQ ID NO: 21673 - DNA, 25 bp, Saccharomyces pastorianus
tagacaatccagacctgaacaagga

SEQ ID NO: 21674 - DNA, 25 bp, Saccharomyces pastorianus
ggcacaaccctcaagagtgtctaga

SEQ ID NO: 21675 - DNA, 25 bp, Saccharomyces pastorianus
ggacatgaccaagcggtttaccggt

SEQ ID NO: 21676 - DNA, 25 bp, Saccharomyces pastorianus
agcagtacgaaaacctgtgcacggg

SEQ ID NO: 21677 - DNA, 25 bp, Saccharomyces pastorianus
tgagctttgtatagcccagatgaaa

SEQ ID NO: 21678 - DNA, 25 bp, Saccharomyces pastorianus
tgtaactgcgtctgatcgtatacct

SEQ ID NO: 21679 - DNA, 25 bp, Saccharomyces pastorianus
attcaacagattcatttccggtttt

SEQ ID NO: 21680 - DNA, 25 bp, Saccharomyces pastorianus
agtacgtcggtggattttctgatga

SEQ ID NO: 21681 - DNA, 25 bp, Saccharomyces pastorianus
gccattggcgcacacatgctttaat

SEQ ID NO: 21682 - DNA, 25 bp, Saccharomyces pastorianus
gatagtaacgatttgccattggcgc

SEQ ID NO: 21683 - DNA, 25 bp, Saccharomyces pastorianus
acctgcaacaggtatttccaccatc

SEQ ID NO: 21684 - DNA, 25 bp, Saccharomyces pastorianus
aaatcagtcagctaggcacacatga

SEQ ID NO: 21685 - DNA, 25 bp, Saccharomyces pastorianus
gaagactgggactatccattacaaa

SEQ ID NO: 21686 - DNA, 25 bp, Saccharomyces pastorianus
gtatttccaccatcccatttaaaat

SEQ ID NO: 21687 - DNA, 25 bp, Saccharomyces pastorianus
atgactctaaaattgtccgttggtt

SEQ ID NO: 21688 - DNA, 25 bp, Saccharomyces pastorianus
cactgagatctgtgacgaagtacgt

SEQ ID NO: 21689 - DNA, 25 bp, Saccharomyces pastorianus
atgacctaggccatcgtgaaaactg

SEQ ID NO: 21690 - DNA, 25 bp, Saccharomyces pastorianus
tagaaggtgctggtctgtcatccat

SEQ ID NO: 21691 - DNA, 25 bp, Saccharomyces pastorianus
gagtctttgctatacgattcagcgt

SEQ ID NO: 21692 - DNA, 25 bp, Saccharomyces pastorianus
aagatgcattggttacgttctgaaa

SEQ ID NO: 21693 - DNA, 25 bp, Saccharomyces pastorianus
ttcacatataacgaagcgctggata

SEQ ID NO: 21694 - DNA, 25 bp, Saccharomyces pastorianus
gaggtatcgacgtctttgttatttc

SEQ ID NO: 21695 - DNA, 25 bp, Saccharomyces pastorianus
gtctgtcatccattttataaccgaa

SEQ ID NO: 21696 - DNA, 25 bp, Saccharomyces pastorianus
gaattttccgtgcatggatttccaa

SEQ ID NO: 21697 - DNA, 25 bp, Saccharomyces pastorianus
gaaacaatttacctctctgaattag

SEQ ID NO: 21698 - DNA, 25 bp, Saccharomyces pastorianus
tacgttctgaaaaggcacttggcca

SEQ ID NO: 21699 - DNA, 25 bp, Saccharomyces pastorianus
ttcagcgtctgaattttccgtgcat

SEQ ID NO: 21700 - DNA, 25 bp, Saccharomyces pastorianus
tgctttgtcagcatcatcgaagtta

SEQ ID NO: 21701 - DNA, 25 bp, Saccharomyces pastorianus
tttgaatgctttcctagacacacct

SEQ ID NO: 21702 - DNA, 25 bp, Saccharomyces pastorianus
ttttggtctcaaaaccttggctctt

SEQ ID NO: 21703 - DNA, 25 bp, Saccharomyces pastorianus
agatgttgcttcctttctgcttaaa

SEQ ID NO: 21704 - DNA, 25 bp, Saccharomyces pastorianus
gacacacctgggaggcagtatttca

SEQ ID NO: 21705 - DNA, 25 bp, Saccharomyces pastorianus
atgcatgacggcaaactctctatgg

SEQ ID NO: 21706 - DNA, 25 bp, Saccharomyces pastorianus
acttacagcctggtatttatgcaat

SEQ ID NO: 21707 - DNA, 25 bp, Saccharomyces pastorianus
cttggctctttacgcaatactgcat

SEQ ID NO: 21708 - DNA, 25 bp, Saccharomyces pastorianus
tccgttctttgccagcttttagaaa

SEQ ID NO: 21709 - DNA, 25 bp, Saccharomyces pastorianus
cagcggatgccgtatctagactaat

SEQ ID NO: 21710 - DNA, 25 bp, Saccharomyces pastorianus
gtttaagttgtctaatcgtcaccat

SEQ ID NO: 21711 - DNA, 25 bp, Saccharomyces pastorianus
tccactgctctactggctaggatga

SEQ ID NO: 21712 - DNA, 25 bp, Saccharomyces pastorianus
ttctaccccaccaaggaagtcatct

SEQ ID NO: 21713 - DNA, 25 bp, Saccharomyces pastorianus
agacatgggcctcaggtccactgct

SEQ ID NO: 21714 - DNA, 25 bp, Saccharomyces pastorianus
gaagattcgctcatggaagtgccta

SEQ ID NO: 21715 - DNA, 25 bp, Saccharomyces pastorianus
aaggaagtcatctccagtggcgaaa

SEQ ID NO: 21716 - DNA, 25 bp, Saccharomyces pastorianus
aatcgcctgaaaaagctgctgtcaa

SEQ ID NO: 21717 - DNA, 25 bp, Saccharomyces pastorianus
gtaagatcaaaaaccacaccagaag

SEQ ID NO: 21718 - DNA, 25 bp, Saccharomyces pastorianus
aagagtcctcttcgtttattgacga

SEQ ID NO: 21719 - DNA, 25 bp, Saccharomyces pastorianus
agctggacgagaacacacgacccaa

SEQ ID NO: 21720 - DNA, 25 bp, Saccharomyces pastorianus
gtggcgaaaagagccttatcttcta

SEQ ID NO: 21721 - DNA, 25 bp, Saccharomyces pastorianus
gacgaggacggctatatagtcacaa

SEQ ID NO: 21722 - DNA, 25 bp, Saccharomyces pastorianus
aagctgcatcatgtgcatgaccggt

SEQ ID NO: 21723 - DNA, 25 bp, Saccharomyces pastorianus
tactacccattatttgacatcttga

SEQ ID NO: 21724 - DNA, 25 bp, Saccharomyces pastorianus
ggattcgtcgaacactggccaggat

SEQ ID NO: 21725 - DNA, 25 bp, Saccharomyces pastorianus
gacttgaaagtctcaccgctaacaa

SEQ ID NO: 21726 - DNA, 25 bp, Saccharomyces pastorianus
aattgatcggccatctaagctgcat

SEQ ID NO: 21727 - DNA, 25 bp, Saccharomyces pastorianus
gacatcttgatctttttactggccc

SEQ ID NO: 21728 - DNA, 25 bp, Saccharomyces pastorianus
tcgtcttctaccattgccaattgat

SEQ ID NO: 21729 - DNA, 25 bp, Saccharomyces pastorianus
ggccaggatctagctcattttctga

SEQ ID NO: 21730 - DNA, 25 bp, Saccharomyces pastorianus
gatcatttctctttcagggttcctg

SEQ ID NO: 21731 - DNA, 25 bp, Saccharomyces pastorianus
atcagtaccatacatccgacttcat

SEQ ID NO: 21732 - DNA, 25 bp, Saccharomyces pastorianus
gacttcatgtcggattcgtcgaaca

SEQ ID NO: 21733 - DNA, 25 bp, Saccharomyces pastorianus
agcaatccattgaaaccgccaacaa

SEQ ID NO: 21734 - DNA, 25 bp, Saccharomyces pastorianus
aggccacaagcaaggattcctccat

SEQ ID NO: 21735 - DNA, 25 bp, Saccharomyces pastorianus
gatgaagccagaaagcaatccattg

SEQ ID NO: 21736 - DNA, 25 bp, Saccharomyces pastorianus
taagaacgactcaggcaacagcaac

SEQ ID NO: 21737 - DNA, 25 bp, Saccharomyces pastorianus
caacgacaccgaaaactccttgaag

SEQ ID NO: 21738 - DNA, 25 bp, Saccharomyces pastorianus
ggttagagatcaaatcacctcattg

SEQ ID NO: 21739 - DNA, 25 bp, Saccharomyces pastorianus
catcgacgccgatggtatcatcaac

SEQ ID NO: 21740 - DNA, 25 bp, Saccharomyces pastorianus
gaattgcaaaactcttccatgaaat

SEQ ID NO: 21741 - DNA, 25 bp, Saccharomyces pastorianus
agcaaggattcctccatcactgttg

SEQ ID NO: 21742 - DNA, 25 bp, Saccharomyces pastorianus
ttctgctagagacaaggccacaagc

SEQ ID NO: 21743 - DNA, 25 bp, Saccharomyces pastorianus
acctcattgaaggaattgatcgcta

SEQ ID NO: 21744 - DNA, 25 bp, Saccharomyces pastorianus
agttccatttgttcagagaaacgaa

SEQ ID NO: 21745 - DNA, 25 bp, Saccharomyces pastorianus
tcactcttgatgtcttcaccggtaa

SEQ ID NO: 21746 - DNA, 25 bp, Saccharomyces pastorianus
tgaaactgccgatgccggttcctct

SEQ ID NO: 21747 - DNA, 25 bp, Saccharomyces pastorianus
attgggtgacatcatgcaaactgct

SEQ ID NO: 21748 - DNA, 25 bp, Saccharomyces pastorianus
cgccaaggtccatttagtcactctt

SEQ ID NO: 21749 - DNA, 25 bp, Saccharomyces pastorianus
tcatgcaaactgctttcgacgaagg

SEQ ID NO: 21750 - DNA, 25 bp, Saccharomyces pastorianus
aaggtccatttagtcactcttgatg

SEQ ID NO: 21751 - DNA, 25 bp, Saccharomyces pastorianus
ttagtcactcttgatgtcttcaccg

SEQ ID NO: 21752 - DNA, 25 bp, Saccharomyces pastorianus
gtccatttagtcactcttgatgtct

SEQ ID NO: 21753 - DNA, 25 bp, Saccharomyces pastorianus
ggtgacatcatgcaaactgctttcg

SEQ ID NO: 21754 - DNA, 25 bp, Saccharomyces pastorianus
actcttgatgtcttcaccggtaaga

SEQ ID NO: 21755 - DNA, 25 bp, Saccharomyces pastorianus
gttccgcaaagaagggtgctactct

SEQ ID NO: 21756 - DNA, 25 bp, Saccharomyces pastorianus
aagggtactcttacactgacgctaa

SEQ ID NO: 21757 - DNA, 25 bp, Saccharomyces pastorianus
agggtgctactcttttcaagaccag

SEQ ID NO: 21758 - DNA, 25 bp, Saccharomyces pastorianus
attcaaagccggttccgcaaagaag

SEQ ID NO: 21759 - DNA, 25 bp, Saccharomyces pastorianus
cgaaaacaacatgtccgattacttg

SEQ ID NO: 21760 - DNA, 25 bp, Saccharomyces pastorianus
aaacttgcacgggatcttcggcaga

SEQ ID NO: 21761 - DNA, 25 bp, Saccharomyces pastorianus
ccggccaggctgaagggtactctta

SEQ ID NO: 21762 - DNA, 25 bp, Saccharomyces pastorianus
ttacactgacgctaacatcaagaag

SEQ ID NO: 21763 - DNA, 25 bp, Saccharomyces pastorianus
aggtcggtccaaacttgcacgggat

SEQ ID NO: 21764 - DNA, 25 bp, Saccharomyces pastorianus
atcttcggcagacactccggccagg

SEQ ID NO: 21765 - DNA, 25 bp, Saccharomyces pastorianus
ggcggcccacacaaggtcggtccaa

SEQ ID NO: 21766 - DNA, 25 bp, Saccharomyces pastorianus
ggacggctcgttaatgactgttgct

SEQ ID NO: 21767 - DNA, 25 bp, Saccharomyces pastorianus
tgaacgcgattgcactaacgcccat

SEQ ID NO: 21768 - DNA, 25 bp, Saccharomyces pastorianus
tatatgcgccagtccatacgctttt

SEQ ID NO: 21769 - DNA, 25 bp, Saccharomyces pastorianus
aacagccagtggaagttcatgcccc

SEQ ID NO: 21770 - DNA, 25 bp, Saccharomyces pastorianus
ttcacgcacatcctgtcgcaaaaga

SEQ ID NO: 21771 - DNA, 25 bp, Saccharomyces pastorianus
gatgaagtctagagccccagcatgg

SEQ ID NO: 21772 - DNA, 25 bp, Saccharomyces pastorianus
tagtgtgccccacggtgaacgcgat

SEQ ID NO: 21773 - DNA, 25 bp, Saccharomyces pastorianus
catattcgttaagtgccggcgggtc

SEQ ID NO: 21774 - DNA, 25 bp, Saccharomyces pastorianus
agccgacgggctaattgctgcaaca

SEQ ID NO: 21775 - DNA, 25 bp, Saccharomyces pastorianus
atttgcccacatgcgttaagcttca

SEQ ID NO: 21776 - DNA, 25 bp, Saccharomyces pastorianus
aatgactgttgctcaagccgacggg

SEQ ID NO: 21777 - DNA, 25 bp, Saccharomyces pastorianus
aagctcattacaatttgcctgtgaa

SEQ ID NO: 21778 - DNA, 25 bp, Saccharomyces pastorianus
tatacgacccgtctttgaatgaggt

SEQ ID NO: 21779 - DNA, 25 bp, Saccharomyces pastorianus
gtgcaaatcacagaactcaacgacg

SEQ ID NO: 21780 - DNA, 25 bp, Saccharomyces pastorianus
gagacccaagaacgtttccaagata

SEQ ID NO: 21781 - DNA, 25 bp, Saccharomyces pastorianus
gacgctagaagacagccatctgctg

SEQ ID NO: 21782 - DNA, 25 bp, Saccharomyces pastorianus
ttttgaagccaactggacgcctgtt

SEQ ID NO: 21783 - DNA, 25 bp, Saccharomyces pastorianus
gcacatcgaccacaagcttctggag

SEQ ID NO: 21784 - DNA, 25 bp, Saccharomyces pastorianus
atgtgcccactcttgctgatatgga

SEQ ID NO: 21785 - DNA, 25 bp, Saccharomyces pastorianus
ggctttggaattgcccgaagtgaaa

SEQ ID NO: 21786 - DNA, 25 bp, Saccharomyces pastorianus
ataaacaagacacgcatgtgcccac

SEQ ID NO: 21787 - DNA, 25 bp, Saccharomyces pastorianus
ggacgcctgttttaaaagctcatta

SEQ ID NO: 21788 - DNA, 25 bp, Saccharomyces pastorianus
gcctttgatggaaatattgcacccg

SEQ ID NO: 21789 - DNA, 25 bp, Saccharomyces pastorianus
agatcattaattaccaacgcctttg

SEQ ID NO: 21790 - DNA, 25 bp, Saccharomyces pastorianus
ggtattgtccaaaggcctatatgcc

SEQ ID NO: 21791 - DNA, 25 bp, Saccharomyces pastorianus
attgcacccgaaacttctgtgtatg

SEQ ID NO: 21792 - DNA, 25 bp, Saccharomyces pastorianus
tcttattacaccctaccactggtag

SEQ ID NO: 21793 - DNA, 25 bp, Saccharomyces pastorianus
tattggagtgtgtcgtctttggtaa

SEQ ID NO: 21794 - DNA, 25 bp, Saccharomyces pastorianus
gcggcgtccacggagccaatagatt

SEQ ID NO: 21795 - DNA, 25 bp, Saccharomyces pastorianus
gattcaaaactatggcctacagact

SEQ ID NO: 21796 - DNA, 25 bp, Saccharomyces pastorianus
agattacgcctgttgttcatttcac

SEQ ID NO: 21797 - DNA, 25 bp, Saccharomyces pastorianus
gatgcggtgaccatggacatacagt

SEQ ID NO: 21798 - DNA, 25 bp, Saccharomyces pastorianus
cagactacggcgcaagacttggtta

SEQ ID NO: 21799 - DNA, 25 bp, Saccharomyces pastorianus
ggtcttactgcattcataccagaaa

SEQ ID NO: 21800 - DNA, 25 bp, Saccharomyces pastorianus
ctacagctaggtgatatggcggtta

SEQ ID NO: 21801 - DNA, 25 bp, Saccharomyces pastorianus
gtgcgttgtgtagacgactcaatta

SEQ ID NO: 21802 - DNA, 25 bp, Saccharomyces pastorianus
attaggccaagtcggatccactttg

SEQ ID NO: 21803 - DNA, 25 bp, Saccharomyces pastorianus
tagaccaaataaccacggactcttt

SEQ ID NO: 21804 - DNA, 25 bp, Saccharomyces pastorianus
gaacgacaaatttcacacactctcc

SEQ ID NO: 21805 - DNA, 25 bp, Saccharomyces pastorianus
agatctagggtttgtgcgttgtgta

SEQ ID NO: 21806 - DNA, 25 bp, Saccharomyces pastorianus
gtaacattaacctgtcctgacttga

SEQ ID NO: 21807 - DNA, 25 bp, Saccharomyces pastorianus
actgccgcagtacttaatgaacgac

SEQ ID NO: 21808 - DNA, 25 bp, Saccharomyces pastorianus
acacactctccattgaatatccact

SEQ ID NO: 21809 - DNA, 25 bp, Saccharomyces pastorianus
ggtgagcaaaatcccaaattatccg

SEQ ID NO: 21810 - DNA, 25 bp, Saccharomyces pastorianus
acccgaagatttggcgctgaacaca

SEQ ID NO: 21811 - DNA, 25 bp, Saccharomyces pastorianus
aagttggcatcttggttcataccac

SEQ ID NO: 21812 - DNA, 25 bp, Saccharomyces pastorianus
atgaggtcactaaatgctccacccg

SEQ ID NO: 21813 - DNA, 25 bp, Saccharomyces pastorianus
atctgaggatgaagccgaccctttt

SEQ ID NO: 21814 - DNA, 25 bp, Saccharomyces pastorianus
acagaactcaagatccgcttcaagg

SEQ ID NO: 21815 - DNA, 25 bp, Saccharomyces pastorianus
agtacggcagctcaggtaagactac

SEQ ID NO: 21816 - DNA, 25 bp, Saccharomyces pastorianus
ggttgtcggtaatatggtcctcgat

SEQ ID NO: 21817 - DNA, 25 bp, Saccharomyces pastorianus
cgacccttttgcaggtattccggag

SEQ ID NO: 21818 - DNA, 25 bp, Saccharomyces pastorianus
ttcttacgttcccaaagccaactga

SEQ ID NO: 21819 - DNA, 25 bp, Saccharomyces pastorianus
tgaacacaactttccacttgagctc

SEQ ID NO: 21820 - DNA, 25 bp, Saccharomyces pastorianus
aagacgagaccattaccggcgtcga

SEQ ID NO: 21821 - DNA, 25 bp, Saccharomyces pastorianus
tgaaacctcgtacacttccaataac

SEQ ID NO: 21822 - DNA, 25 bp, Saccharomyces pastorianus
aagccacctagtttacagacaagcg

SEQ ID NO: 21823 - DNA, 25 bp, Saccharomyces pastorianus
agtgggctcaaccagaagtcgtcta

SEQ ID NO: 21824 - DNA, 25 bp, Saccharomyces pastorianus
gattttagacccaccgaataccaat

SEQ ID NO: 21825 - DNA, 25 bp, Saccharomyces pastorianus
agattctctgcgattttagacccac

SEQ ID NO: 21826 - DNA, 25 bp, Saccharomyces pastorianus
taatgaaactcggaggcccaagcca

SEQ ID NO: 21827 - DNA, 25 bp, Saccharomyces pastorianus
gaagtcgtctactaccaggctacta

SEQ ID NO: 21828 - DNA, 25 bp, Saccharomyces pastorianus
tcagggaaactggtcttccgaggaa

SEQ ID NO: 21829 - DNA, 25 bp, Saccharomyces pastorianus
ggctactacaatctacaacctcgac

SEQ ID NO: 21830 - DNA, 25 bp, Saccharomyces pastorianus
gaaacttttcagacgctcagagata

SEQ ID NO: 21831 - DNA, 25 bp, Saccharomyces pastorianus
gaagattcgagcgtcctcagtgggc

SEQ ID NO: 21832 - DNA, 25 bp, Saccharomyces pastorianus
gttccggaaacatgagtagcgacct

SEQ ID NO: 21833 - DNA, 25 bp, Saccharomyces pastorianus
aaatgtcctaagtgtagcatacgat

SEQ ID NO: 21834 - DNA, 25 bp, Saccharomyces pastorianus
gctcaggctgtagttaagtgtggta

SEQ ID NO: 21835 - DNA, 25 bp, Saccharomyces pastorianus
gaattctatcaactaccgttagcga

SEQ ID NO: 21836 - DNA, 25 bp, Saccharomyces pastorianus
gaaattccatttagcgaaggtttat

SEQ ID NO: 21837 - DNA, 25 bp, Saccharomyces pastorianus
aacggaccctagttcagagtccaat

SEQ ID NO: 21838 - DNA, 25 bp, Saccharomyces pastorianus
taccttaacacattgcgatatggtg

SEQ ID NO: 21839 - DNA, 25 bp, Saccharomyces pastorianus
aacaacagtgctatcgtaaccggta

SEQ ID NO: 21840 - DNA, 25 bp, Saccharomyces pastorianus
ataacgtccaattgcaagaactatt

SEQ ID NO: 21841 - DNA, 25 bp, Saccharomyces pastorianus
gtagcatacgatattgttccttgaa

SEQ ID NO: 21842 - DNA, 25 bp, Saccharomyces pastorianus
aagcacattcataaaaacgttctag

SEQ ID NO: 21843 - DNA, 25 bp, Saccharomyces pastorianus
ggaagttctggatgcatttttcggc

SEQ ID NO: 21844 - DNA, 25 bp, Saccharomyces pastorianus
acgagcccatatacctttgtcacat

SEQ ID NO: 21845 - DNA, 25 bp, Saccharomyces pastorianus
aacatagtcatgacgccattgcgca

SEQ ID NO: 21846 - DNA, 25 bp, Saccharomyces pastorianus
cgtctgtgagctggatatcgtcttc

SEQ ID NO: 21847 - DNA, 25 bp, Saccharomyces pastorianus
agaaggtacgctgggctctatttcg

SEQ ID NO: 21848 - DNA, 25 bp, Saccharomyces pastorianus
gagttctccgattcgacaaagctca

SEQ ID NO: 21849 - DNA, 25 bp, Saccharomyces pastorianus
tggacctgcttgatgacgagcccat

SEQ ID NO: 21850 - DNA, 25 bp, Saccharomyces pastorianus
agggaccacaagcaccagagtaatt

SEQ ID NO: 21851 - DNA, 25 bp, Saccharomyces pastorianus
ggctctatttcgtcatgggcgtgga

SEQ ID NO: 21852 - DNA, 25 bp, Saccharomyces pastorianus
agatatataggctcatctcctccag

SEQ ID NO: 21853 - DNA, 25 bp, Saccharomyces pastorianus
ttgtcacatccatctgttcgtggaa

SEQ ID NO: 21854 - DNA, 25 bp, Saccharomyces pastorianus
tagtccaaatgtgtcctccttaaag

SEQ ID NO: 21855 - DNA, 25 bp, Saccharomyces pastorianus
gtgtcttcatcaagcaactcgatta

SEQ ID NO: 21856 - DNA, 25 bp, Saccharomyces pastorianus
aattgctcaatctccatcacttaaa

SEQ ID NO: 21857 - DNA, 25 bp, Saccharomyces pastorianus
aagtcaatgatcaactctacccctt

SEQ ID NO: 21858 - DNA, 25 bp, Saccharomyces pastorianus
gagacgccaatttctgtcaaggaca

SEQ ID NO: 21859 - DNA, 25 bp, Saccharomyces pastorianus
cgtgaaaactgccacaccattgaat

SEQ ID NO: 21860 - DNA, 25 bp, Saccharomyces pastorianus
tagaaaaggcgacaccaacttccac

SEQ ID NO: 21861 - DNA, 25 bp, Saccharomyces pastorianus
gagaacctttgagtactaaacctag

SEQ ID NO: 21862 - DNA, 25 bp, Saccharomyces pastorianus
actagcgcacccaatgtgtcttcat

SEQ ID NO: 21863 - DNA, 25 bp, Saccharomyces pastorianus
aggtcatccatcaccacttagatat

SEQ ID NO: 21864 - DNA, 25 bp, Saccharomyces pastorianus
gatatcactaacagcgtcacgaacg

SEQ ID NO: 21865 - DNA, 25 bp, Saccharomyces pastorianus
aatcctaacgctgttttgggctcca

SEQ ID NO: 21866 - DNA, 25 bp, Saccharomyces pastorianus
gtcgtagggtcgttaattttctgct

SEQ ID NO: 21867 - DNA, 25 bp, Saccharomyces pastorianus
gccactgttttctatacatgcacct

SEQ ID NO: 21868 - DNA, 25 bp, Saccharomyces pastorianus
cgagtgcagccaatgcaaagccata

SEQ ID NO: 21869 - DNA, 25 bp, Saccharomyces pastorianus
gagatgaactaccacactctgcaac

SEQ ID NO: 21870 - DNA, 25 bp, Saccharomyces pastorianus
gcgttcccatctgcattaagagcta

SEQ ID NO: 21871 - DNA, 25 bp, Saccharomyces pastorianus
gaaggacggtgctaccatcaaggaa

SEQ ID NO: 21872 - DNA, 25 bp, Saccharomyces pastorianus
aaatgtccccaatgtggcaatgaag

SEQ ID NO: 21873 - DNA, 25 bp, Saccharomyces pastorianus
aacggcagaagacgcgttcccatct

SEQ ID NO: 21874 - DNA, 25 bp, Saccharomyces pastorianus
aaagtcatcactacaacggcagaag

SEQ ID NO: 21875 - DNA, 25 bp, Saccharomyces pastorianus
tttgggctccaatgtcgagtgcagc

SEQ ID NO: 21876 - DNA, 25 bp, Saccharomyces pastorianus
gaaaactcaggccttgatccaattg

SEQ ID NO: 21877 - DNA, 25 bp, Saccharomyces pastorianus
gaagctcagcgtgcattacatgatt

SEQ ID NO: 21878 - DNA, 25 bp, Saccharomyces pastorianus
ggtactaccaaggaccgtatgctaa

SEQ ID NO: 21879 - DNA, 25 bp, Saccharomyces pastorianus
ttgctcaagctttagacaccattcc

SEQ ID NO: 21880 - DNA, 25 bp, Saccharomyces pastorianus
atatgcattccgtggctttgctcaa

SEQ ID NO: 21881 - DNA, 25 bp, Saccharomyces pastorianus
gtggtatcgaccaatatgcattccg

SEQ ID NO: 21882 - DNA, 25 bp, Saccharomyces pastorianus
aggtacttgttccagaatctacgaa

SEQ ID NO: 21883 - DNA, 25 bp, Saccharomyces pastorianus
atggtcgtattgttccgagattcca

SEQ ID NO: 21884 - DNA, 25 bp, Saccharomyces pastorianus
gttgattgcttaggctacgggtcca

SEQ ID NO: 21885 - DNA, 25 bp, Saccharomyces pastorianus
catgtcgctggctgtttccgaagaa

SEQ ID NO: 21886 - DNA, 25 bp, Saccharomyces pastorianus
tgtcgttgatccctttatcggtaag

SEQ ID NO: 21887 - DNA, 25 bp, Saccharomyces pastorianus
tcaggcttgtcctattgatgttcgt

SEQ ID NO: 21888 - DNA, 25 bp, Saccharomyces pastorianus
ggtgggtccaccatgtttaaggatt

SEQ ID NO: 21889 - DNA, 25 bp, Saccharomyces pastorianus
gttccttgctggcacaaactgcaga

SEQ ID NO: 21890 - DNA, 25 bp, Saccharomyces pastorianus
tgactcctttgcctacggtggtaga

SEQ ID NO: 21891 - DNA, 25 bp, Saccharomyces pastorianus
gtggatgtttctgtgatttcccata

SEQ ID NO: 21892 - DNA, 25 bp, Saccharomyces pastorianus
aaagttactgtcacaccaagaagga

SEQ ID NO: 21893 - DNA, 25 bp, Saccharomyces pastorianus
catgtttaaggatttcgggcgtcgt

SEQ ID NO: 21894 - DNA, 25 bp, Saccharomyces pastorianus
gtggtagatcaaacaattcaggctt

SEQ ID NO: 21895 - DNA, 25 bp, Saccharomyces pastorianus
gattcttggctccagaaatcttttt

SEQ ID NO: 21896 - DNA, 25 bp, Saccharomyces pastorianus
aacatcgtattatcaggtgggtcca

SEQ ID NO: 21897 - DNA, 25 bp, Saccharomyces pastorianus
aacgctgtctggttcggtggttcct

SEQ ID NO: 21898 - DNA, 25 bp, Saccharomyces pastorianus
gacgttcctgaacaggtcgataaat

SEQ ID NO: 21899 - DNA, 25 bp, Saccharomyces pastorianus
taacgaggatgctgacatacgcaat

SEQ ID NO: 21900 - DNA, 25 bp, Saccharomyces pastorianus
gaagcatttgcatttgatccattga

SEQ ID NO: 21901 - DNA, 25 bp, Saccharomyces pastorianus
taactattgaggaagcagcgaacat

SEQ ID NO: 21902 - DNA, 25 bp, Saccharomyces pastorianus
ggtagtttccgtattacatgtgaac

SEQ ID NO: 21903 - DNA, 25 bp, Saccharomyces pastorianus
ggaatcgttgatggcaatcttagaa

SEQ ID NO: 21904 - DNA, 25 bp, Saccharomyces pastorianus
taccctgaaaaggttccatttagat

SEQ ID NO: 21905 - DNA, 25 bp, Saccharomyces pastorianus
ttgcctccgcaaaaacttactgaac

SEQ ID NO: 21906 - DNA, 25 bp, Saccharomyces pastorianus
gtttagcgagttagacgttcctgaa

SEQ ID NO: 21907 - DNA, 25 bp, Saccharomyces pastorianus
cttactgaacaaactggaatccaat

SEQ ID NO: 21908 - DNA, 25 bp, Saccharomyces pastorianus
ctagggcaatgcttgttttaagacg

SEQ ID NO: 21909 - DNA, 25 bp, Saccharomyces pastorianus
actacattaccaacgatagcttcga

SEQ ID NO: 21910 - DNA, 25 bp, Saccharomyces pastorianus
aagaatcatcgacccattagcatcc

SEQ ID NO: 21911 - DNA, 25 bp, Saccharomyces pastorianus
gtgcgtcggtggtgaatcagctaca

SEQ ID NO: 21912 - DNA, 25 bp, Saccharomyces pastorianus
tggttactgttcactacggattcga

SEQ ID NO: 21913 - DNA, 25 bp, Saccharomyces pastorianus
tgcagtccgcttcgaagagagcaca

SEQ ID NO: 21914 - DNA, 25 bp, Saccharomyces pastorianus
gcgacgatggtgttttggcaaaaat

SEQ ID NO: 21915 - DNA, 25 bp, Saccharomyces pastorianus
aacaatggaaacttactcaggcgta

SEQ ID NO: 21916 - DNA, 25 bp, Saccharomyces pastorianus
atgaccgcagatgcacaaagtgctt

SEQ ID NO: 21917 - DNA, 25 bp, Saccharomyces pastorianus
tagcatcccgttgttcaaaattcag

SEQ ID NO: 21918 - DNA, 25 bp, Saccharomyces pastorianus
aaaatcttggatatctctgcgggag

SEQ ID NO: 21919 - DNA, 25 bp, Saccharomyces pastorianus
gaggcattacgttactgcagtccgc

SEQ ID NO: 21920 - DNA, 25 bp, Saccharomyces pastorianus
aaaaatgctatctctcatcgaggta

SEQ ID NO: 21921 - DNA, 25 bp, Saccharomyces pastorianus
tcgtggtccaactacattcggctgg

SEQ ID NO: 21922 - DNA, 25 bp, Saccharomyces pastorianus
atggcttgccaggtgcttatatcaa

SEQ ID NO: 21923 - DNA, 25 bp, Saccharomyces pastorianus
aagattgtctcgagtcgtggtccaa

SEQ ID NO: 21924 - DNA, 25 bp, Saccharomyces pastorianus
agggtaagcaagctgttttggcctt

SEQ ID NO: 21925 - DNA, 25 bp, Saccharomyces pastorianus
gaagtccagtcaattttggcccaag

SEQ ID NO: 21926 - DNA, 25 bp, Saccharomyces pastorianus
ccactatttgctttgctggttccaa

SEQ ID NO: 21927 - DNA, 25 bp, Saccharomyces pastorianus
tcatcgaggtaaggcctttgctcag

SEQ ID NO: 21928 - DNA, 25 bp, Saccharomyces pastorianus
ggctgggactcaatctttgaacctc

SEQ ID NO: 21929 - DNA, 25 bp, Saccharomyces pastorianus
ttgtcactggtaacgccaacaaact

SEQ ID NO: 21930 - DNA, 25 bp, Saccharomyces pastorianus
aagaatgccgaagccgtgaccacta

SEQ ID NO: 21931 - DNA, 25 bp, Saccharomyces pastorianus
ggaattctactctcaactagacgtt

SEQ ID NO: 21932 - DNA, 25 bp, Saccharomyces pastorianus
tggtgaactccatgtcgctgatgct

SEQ ID NO: 21933 - DNA, 25 bp, Saccharomyces pastorianus
acgagttcatgcagtgtgtggacaa

SEQ ID NO: 21934 - DNA, 25 bp, Saccharomyces pastorianus
gatcacgacagcatagacgccctta

SEQ ID NO: 21935 - DNA, 25 bp, Saccharomyces pastorianus
aggacgccaacgacggccttgtaga

SEQ ID NO: 21936 - DNA, 25 bp, Saccharomyces pastorianus
gtttcactggtgacggctttgacga

SEQ ID NO: 21937 - DNA, 25 bp, Saccharomyces pastorianus
gaacgtcaaagagcgctgaacctga

SEQ ID NO: 21938 - DNA, 25 bp, Saccharomyces pastorianus
aaacgagaaggacaccgctgctgca

SEQ ID NO: 21939 - DNA, 25 bp, Saccharomyces pastorianus
acaatgggctgggttctggctacat

SEQ ID NO: 21940 - DNA, 25 bp, Saccharomyces pastorianus
gacgcccttagcgacctggaagagg

SEQ ID NO: 21941 - DNA, 25 bp, Saccharomyces pastorianus
tctggctacatgagttccttggtga

SEQ ID NO: 21942 - DNA, 25 bp, Saccharomyces pastorianus
gatcattcagcaactggtccacagc

SEQ ID NO: 21943 - DNA, 25 bp, Saccharomyces pastorianus
aatcctcatggacgacagggtcact

SEQ ID NO: 21944 - DNA, 25 bp, Saccharomyces pastorianus
cgccgtggtctacttcatgtacaag

SEQ ID NO: 21945 - DNA, 25 bp, Saccharomyces pastorianus
ggaagagccattcactgccatgatc

SEQ ID NO: 21946 - DNA, 25 bp, Saccharomyces pastorianus
tgggtgactacttcggaatcctcat

SEQ ID NO: 21947 - DNA, 25 bp, Saccharomyces pastorianus
ttcaattggccatcatgtgcacgat

SEQ ID NO: 21948 - DNA, 25 bp, Saccharomyces pastorianus
ttgcgcgaacaatccacatgctctt

SEQ ID NO: 21949 - DNA, 25 bp, Saccharomyces pastorianus
acatgctctttgatcgtgggcgaaa

SEQ ID NO: 21950 - DNA, 25 bp, Saccharomyces pastorianus
accattttctcgctagggatcatca

SEQ ID NO: 21951 - DNA, 25 bp, Saccharomyces pastorianus
gatgttcaatcccatcttctggaat

SEQ ID NO: 21952 - DNA, 25 bp, Saccharomyces pastorianus
gccaggtgcttgtgttgagctccat

SEQ ID NO: 21953 - DNA, 25 bp, Saccharomyces pastorianus
caccatctgatacacacgggcaaaa

SEQ ID NO: 21954 - DNA, 25 bp, Saccharomyces pastorianus
aaattgaatgcttcatcgtcttcat

SEQ ID NO: 21955 - DNA, 25 bp, Saccharomyces pastorianus
ttaataatggcattctcagcccacc

SEQ ID NO: 21956 - DNA, 25 bp, Saccharomyces pastorianus
aacacgaatccgttcaagccaaatg

SEQ ID NO: 21957 - DNA, 25 bp, Saccharomyces pastorianus
gtctgtcgcaacagaatccatccgt

SEQ ID NO: 21958 - DNA, 25 bp, Saccharomyces pastorianus
acaaacatgtacttgcgtgcgcttt

SEQ ID NO: 21959 - DNA, 25 bp, Saccharomyces pastorianus
agcattgtctggtgagtctgtcgca

SEQ ID NO: 21960 - DNA, 25 bp, Saccharomyces pastorianus
ggacgtggaggattcttcaatctct

SEQ ID NO: 21961 - DNA, 25 bp, Saccharomyces pastorianus
ctttgccatcatcggatccaacgaa

SEQ ID NO: 21962 - DNA, 25 bp, Saccharomyces pastorianus
atccaacgaagtctacgacgtgggt

SEQ ID NO: 21963 - DNA, 25 bp, Saccharomyces pastorianus
aacgcgttgttgatttctcatttga

SEQ ID NO: 21964 - DNA, 25 bp, Saccharomyces pastorianus
gaaggtgtcggctccttttacagcg

SEQ ID NO: 21965 - DNA, 25 bp, Saccharomyces pastorianus
gttgaagagcactttgggctgtcca

SEQ ID NO: 21966 - DNA, 25 bp, Saccharomyces pastorianus
tcgggttgctagctcaattggccaa

SEQ ID NO: 21967 - DNA, 25 bp, Saccharomyces pastorianus
gtactttgacctctttgcaattcgg

SEQ ID NO: 21968 - DNA, 25 bp, Saccharomyces pastorianus
gcgggttcacaccaattcttttcaa

SEQ ID NO: 21969 - DNA, 25 bp, Saccharomyces pastorianus
tttggctgctgctattgtctcgcaa

SEQ ID NO: 21970 - DNA, 25 bp, Saccharomyces pastorianus
tgatattgcgctgtgtcccctagag

SEQ ID NO: 21971 - DNA, 25 bp, Saccharomyces pastorianus
ggtcggcgggttttccagaatcttg

SEQ ID NO: 21972 - DNA, 25 bp, Saccharomyces pastorianus
cactttgctgaacttgctttccggt

SEQ ID NO: 21973 - DNA, 25 bp, Saccharomyces pastorianus
gccatggccgagtttttggctgata

SEQ ID NO: 21974 - DNA, 25 bp, Saccharomyces pastorianus
tgcctcgcagtacaagaactccgtg

SEQ ID NO: 21975 - DNA, 25 bp, Saccharomyces pastorianus
gaccttcattgttcattgcgactgt

SEQ ID NO: 21976 - DNA, 25 bp, Saccharomyces pastorianus
gggttgccaatgatgtcaattccaa

SEQ ID NO: 21977 - DNA, 25 bp, Saccharomyces pastorianus
aataacttccaagggccacgtcaag

SEQ ID NO: 21978 - DNA, 25 bp, Saccharomyces pastorianus
ctcccggaatattttggccatcaac

SEQ ID NO: 21979 - DNA, 25 bp, Saccharomyces pastorianus
gaagggcccgagaacaatactgatt

SEQ ID NO: 21980 - DNA, 25 bp, Saccharomyces pastorianus
gagagtgcccaaacttatcacgaac

SEQ ID NO: 21981 - DNA, 25 bp, Saccharomyces pastorianus
tgaagtctcgactaccaccgaaatt

SEQ ID NO: 21982 - DNA, 25 bp, Saccharomyces pastorianus
gaattgcatgtagaggccgcgaaca

SEQ ID NO: 21983 - DNA, 25 bp, Saccharomyces pastorianus
gacattgccaattccgttgagagac

SEQ ID NO: 21984 - DNA, 25 bp, Saccharomyces pastorianus
gacactctagaggaacgggttgcca

SEQ ID NO: 21985 - DNA, 25 bp, Saccharomyces pastorianus
gacaaaatcctggtgaactcccgga

SEQ ID NO: 21986 - DNA, 25 bp, Saccharomyces pastorianus
tcacatcatagccatgcagattcag

SEQ ID NO: 21987 - DNA, 25 bp, Saccharomyces pastorianus
gaagacgcctttgacagtttacaac

SEQ ID NO: 21988 - DNA, 25 bp, Saccharomyces pastorianus
aaaggcgcactactccggtaatgtc

SEQ ID NO: 21989 - DNA, 25 bp, Saccharomyces pastorianus
actactccggtaatgtcatcaaggg

SEQ ID NO: 21990 - DNA, 25 bp, Saccharomyces pastorianus
ggaactcagacgtcaaaggcgcact

SEQ ID NO: 21991 - DNA, 25 bp, Saccharomyces pastorianus
tccggtcatggtggaactcagacgt

SEQ ID NO: 21992 - DNA, 25 bp, Saccharomyces pastorianus
gagtatttttcacacaacagtaaca

SEQ ID NO: 21993 - DNA, 25 bp, Saccharomyces pastorianus
tgcagattcagcatttagtaacaat

SEQ ID NO: 21994 - DNA, 25 bp, Saccharomyces pastorianus
gtaacaacaatcattccggtcatgg

SEQ ID NO: 21995 - DNA, 25 bp, Saccharomyces pastorianus
gacaccttttccaaatcacatcata

SEQ ID NO: 21996 - DNA, 25 bp, Saccharomyces pastorianus
agtctcttcaagatgggaaacaaca

SEQ ID NO: 21997 - DNA, 25 bp, Saccharomyces pastorianus
ttcttcaacaagaccaatcgcaccg

SEQ ID NO: 21998 - DNA, 25 bp, Saccharomyces pastorianus
gaaatttaaacacaaccgctcctgt

SEQ ID NO: 21999 - DNA, 25 bp, Saccharomyces pastorianus
gcgtgtacaagatacgggtcctaat

SEQ ID NO: 22000 - DNA, 25 bp, Saccharomyces pastorianus
gggtcctaatcttactccaaatgca

SEQ ID NO: 22001 - DNA, 25 bp, Saccharomyces pastorianus
aaacaatactatgcccacccgtagg

SEQ ID NO: 22002 - DNA, 25 bp, Saccharomyces pastorianus
gaatcgtacccaacagcgtgtacaa

SEQ ID NO: 22003 - DNA, 25 bp, Saccharomyces pastorianus
tgaagtgcgcagtgacgatgacgat

SEQ ID NO: 22004 - DNA, 25 bp, Saccharomyces pastorianus
acgaatacctttccacattttctag

SEQ ID NO: 22005 - DNA, 25 bp, Saccharomyces pastorianus
aaccgctcctgttgatgatgataca

SEQ ID NO: 22006 - DNA, 25 bp, Saccharomyces pastorianus
gtaggccgaatcgttcaccgaatcg

SEQ ID NO: 22007 - DNA, 25 bp, Saccharomyces pastorianus
cctcctccattaccgtcaagaaata

SEQ ID NO: 22008 - DNA, 25 bp, Saccharomyces pastorianus
atcccatccttagtatccgggttgg

SEQ ID NO: 22009 - DNA, 25 bp, Saccharomyces pastorianus
tgcactttaacagagacggtgggct

SEQ ID NO: 22010 - DNA, 25 bp, Saccharomyces pastorianus
ttactaccgtaaaggctccatccca

SEQ ID NO: 22011 - DNA, 25 bp, Saccharomyces pastorianus
gatcattagaggtatgccttccagg

SEQ ID NO: 22012 - DNA, 25 bp, Saccharomyces pastorianus
gttgctcggtgcagggatcattaga

SEQ ID NO: 22013 - DNA, 25 bp, Saccharomyces pastorianus
ttgccgggtacttgctgcactttaa

SEQ ID NO: 22014 - DNA, 25 bp, Saccharomyces pastorianus
ttttaaccgctaccggtggtctcat

SEQ ID NO: 22015 - DNA, 25 bp, Saccharomyces pastorianus
attcggtagtgtgtacggtgttgcc

SEQ ID NO: 22016 - DNA, 25 bp, Saccharomyces pastorianus
ggtgcatcgaccttgttgctcggtg

SEQ ID NO: 22017 - DNA, 25 bp, Saccharomyces pastorianus
gtggtctcatgggttactaccgtaa

SEQ ID NO: 22018 - DNA, 25 bp, Saccharomyces pastorianus
cagcatttacattgggtcttttaac

SEQ ID NO: 22019 - DNA, 25 bp, Saccharomyces pastorianus
gataattaactacacttcaaacaca

SEQ ID NO: 22020 - DNA, 25 bp, Saccharomyces pastorianus
gattacgctctacccgagttatggg

SEQ ID NO: 22021 - DNA, 25 bp, Saccharomyces pastorianus
gaatgcatgccttacgataattaac

SEQ ID NO: 22022 - DNA, 25 bp, Saccharomyces pastorianus
tgtagttcagaactcaccacggctg

SEQ ID NO: 22023 - DNA, 25 bp, Saccharomyces pastorianus
gcgcaggttcgaatcattttagaga

SEQ ID NO: 22024 - DNA, 25 bp, Saccharomyces pastorianus
accacggctgcaagagcctcaggag

SEQ ID NO: 22025 - DNA, 25 bp, Saccharomyces pastorianus
aagagctcagtcgtgaaagaatcac

SEQ ID NO: 22026 - DNA, 25 bp, Saccharomyces pastorianus
aagagcctcaggaggagcagcagca

SEQ ID NO: 22027 - DNA, 25 bp, Saccharomyces pastorianus
caaaagattacgctctacccgagtt

SEQ ID NO: 22028 - DNA, 25 bp, Saccharomyces pastorianus
ggtaccccagcgcaggttcgaatca

SEQ ID NO: 22029 - DNA, 25 bp, Saccharomyces pastorianus
aagaatcaccgcttcgaatgcatgc

SEQ ID NO: 22030 - DNA, 25 bp, Saccharomyces pastorianus
caagtttacatccacagtactcacc

SEQ ID NO: 22031 - DNA, 25 bp, Saccharomyces pastorianus
gacggagatctagcatttttaatca

SEQ ID NO: 22032 - DNA, 25 bp, Saccharomyces pastorianus
ggatatgacattcaccaactgggta

SEQ ID NO: 22033 - DNA, 25 bp, Saccharomyces pastorianus
tgggtcaatcttaccagtcgtaggt

SEQ ID NO: 22034 - DNA, 25 bp, Saccharomyces pastorianus
gaaaactttgaccacagataccgaa

SEQ ID NO: 22035 - DNA, 25 bp, Saccharomyces pastorianus
agagctgactttggtgaatggtgca

SEQ ID NO: 22036 - DNA, 25 bp, Saccharomyces pastorianus
gaaggtgcgatctatcaagcatgaa

SEQ ID NO: 22037 - DNA, 25 bp, Saccharomyces pastorianus
atgacgctacattgtctaatgacaa

SEQ ID NO: 22038 - DNA, 25 bp, Saccharomyces pastorianus
ggaacaccaattgcctacgaagaac

SEQ ID NO: 22039 - DNA, 25 bp, Saccharomyces pastorianus
ggagacgcctatttatttatcaacc

SEQ ID NO: 22040 - DNA, 25 bp, Saccharomyces pastorianus
caagcctgaacctgggtcaatctta

SEQ ID NO: 22041 - DNA, 25 bp, Saccharomyces pastorianus
attctactcgaatacagccaagccg

SEQ ID NO: 22042 - DNA, 25 bp, Saccharomyces pastorianus
tttcacatatgtttgccactccgga

SEQ ID NO: 22043 - DNA, 25 bp, Saccharomyces pastorianus
gtatcggctcatctaaaggccatac

SEQ ID NO: 22044 - DNA, 25 bp, Saccharomyces pastorianus
aattatcctggtgtcttcccagtgg

SEQ ID NO: 22045 - DNA, 25 bp, Saccharomyces pastorianus
aaagcgccggatcgaagcataccac

SEQ ID NO: 22046 - DNA, 25 bp, Saccharomyces pastorianus
ctgtttccagtgttaaaagcgccgg

SEQ ID NO: 22047 - DNA, 25 bp, Saccharomyces pastorianus
actccggatgcatctggacaacata

SEQ ID NO: 22048 - DNA, 25 bp, Saccharomyces pastorianus
ataagaggcctttctgtttccagtg

SEQ ID NO: 22049 - DNA, 25 bp, Saccharomyces pastorianus
aagttgggttggcatctccctcaaa

SEQ ID NO: 22050 - DNA, 25 bp, Saccharomyces pastorianus
gtcaccaggccagtcattgaatgct

SEQ ID NO: 22051 - DNA, 25 bp, Saccharomyces pastorianus
ggaactcgtttatcattgccgcaat

SEQ ID NO: 22052 - DNA, 25 bp, Saccharomyces pastorianus
ggcaagctaaactcttctaacgaca

SEQ ID NO: 22053 - DNA, 25 bp, Saccharomyces pastorianus
gatgcatccaagtttcccaccatta

SEQ ID NO: 22054 - DNA, 25 bp, Saccharomyces pastorianus
gatcaaggcgtaacgacgtcagagt

SEQ ID NO: 22055 - DNA, 25 bp, Saccharomyces pastorianus
ttggtagtttcccaccattccctat

SEQ ID NO: 22056 - DNA, 25 bp, Saccharomyces pastorianus
gaaggcattttcgaaagcgtcggta

SEQ ID NO: 22057 - DNA, 25 bp, Saccharomyces pastorianus
aagccttggagacaaccaggagcta

SEQ ID NO: 22058 - DNA, 25 bp, Saccharomyces pastorianus
atcagatgaaagacccgcaacagag

SEQ ID NO: 22059 - DNA, 25 bp, Saccharomyces pastorianus
gtcagagtcgaaagccgttactaca

SEQ ID NO: 22060 - DNA, 25 bp, Saccharomyces pastorianus
ggatcctaatgggtttactaactct

SEQ ID NO: 22061 - DNA, 25 bp, Saccharomyces pastorianus
gtcggtataacaactatagaccctg

SEQ ID NO: 22062 - DNA, 25 bp, Saccharomyces pastorianus
gacacagacttgaatctcggcaata

SEQ ID NO: 22063 - DNA, 25 bp, Saccharomyces pastorianus
gtgccatcatgctattacccattag

SEQ ID NO: 22064 - DNA, 25 bp, Saccharomyces pastorianus
ataccagaatctaccccatattgaa

SEQ ID NO: 22065 - DNA, 25 bp, Saccharomyces pastorianus
gactcatactatcagcaccaatacc

SEQ ID NO: 22066 - DNA, 25 bp, Saccharomyces pastorianus
tgcactccattaacaaccgtcatta

SEQ ID NO: 22067 - DNA, 25 bp, Saccharomyces pastorianus
taacgcgtcccatagcatgtacgaa

SEQ ID NO: 22068 - DNA, 25 bp, Saccharomyces pastorianus
gttagtgcttccaacgaccaagatt

SEQ ID NO: 22069 - DNA, 25 bp, Saccharomyces pastorianus
tagatgagcctcaagtgccatcatg

SEQ ID NO: 22070 - DNA, 25 bp, Saccharomyces pastorianus
gctgctgcctattcagttagtgctt

SEQ ID NO: 22071 - DNA, 25 bp, Saccharomyces pastorianus
tacgcacaagatttttacccacaca

SEQ ID NO: 22072 - DNA, 25 bp, Saccharomyces pastorianus
ttattcgaaaccctcaaacgtccat

SEQ ID NO: 22073 - DNA, 25 bp, Saccharomyces pastorianus
aacaatagtagccttcttcacaata

SEQ ID NO: 22074 - DNA, 25 bp, Saccharomyces pastorianus
ggtttgatttcaggtgccattggac

SEQ ID NO: 22075 - DNA, 25 bp, Saccharomyces pastorianus
attcatgccgcctatactatcatta

SEQ ID NO: 22076 - DNA, 25 bp, Saccharomyces pastorianus
ggtgctggtatcactgaagccgttc

SEQ ID NO: 22077 - DNA, 25 bp, Saccharomyces pastorianus
tcgtactaatcggtacccaacttct

SEQ ID NO: 22078 - DNA, 25 bp, Saccharomyces pastorianus
aagctcagcatttgactccgacgga

SEQ ID NO: 22079 - DNA, 25 bp, Saccharomyces pastorianus
atacaataacgccattcatgccgcc

SEQ ID NO: 22080 - DNA, 25 bp, Saccharomyces pastorianus
gaggtgtttctttaaccgcagcaag

SEQ ID NO: 22081 - DNA, 25 bp, Saccharomyces pastorianus
gaagccgttcttgtggtgaatccca

SEQ ID NO: 22082 - DNA, 25 bp, Saccharomyces pastorianus
gagtggcaccgggtcaagccgttac

SEQ ID NO: 22083 - DNA, 25 bp, Saccharomyces pastorianus
aatggatgtcttaccttcgtgggaa

SEQ ID NO: 22084 - DNA, 25 bp, Saccharomyces pastorianus
gaaccaaacgctggccctaaataca

SEQ ID NO: 22085 - DNA, 25 bp, Saccharomyces pastorianus
atcgtaatccgggtcaagtactaat

SEQ ID NO: 22086 - DNA, 25 bp, Saccharomyces pastorianus
gatttctccttggattatgaggcaa

SEQ ID NO: 22087 - DNA, 25 bp, Saccharomyces pastorianus
aaatgactgatccagacctgttgaa

SEQ ID NO: 22088 - DNA, 25 bp, Saccharomyces pastorianus
agtactaatccgttggtctctacaa

SEQ ID NO: 22089 - DNA, 25 bp, Saccharomyces pastorianus
gaagctttcgctccattgtgtcatg

SEQ ID NO: 22090 - DNA, 25 bp, Saccharomyces pastorianus
aacataagccggtggtcaaccaaat

SEQ ID NO: 22091 - DNA, 25 bp, Saccharomyces pastorianus
gaggacattttctatactactaagc

SEQ ID NO: 22092 - DNA, 25 bp, Saccharomyces pastorianus
aaaccttgtcgttgaagctttcgct

SEQ ID NO: 22093 - DNA, 25 bp, Saccharomyces pastorianus
gcaaccttgcggcttacaattttga

SEQ ID NO: 22094 - DNA, 25 bp, Saccharomyces pastorianus
gatctcctattgattcattcaccat

SEQ ID NO: 22095 - DNA, 25 bp, Saccharomyces pastorianus
ttagatcatcctgacgcttacgagc

SEQ ID NO: 22096 - DNA, 25 bp, Saccharomyces pastorianus
agtaacagtgcaactccgagaacta

SEQ ID NO: 22097 - DNA, 25 bp, Saccharomyces pastorianus
tacacaaacattttctaccggccaa

SEQ ID NO: 22098 - DNA, 25 bp, Saccharomyces pastorianus
taagtgggcccatttccttaggtga

SEQ ID NO: 22099 - DNA, 25 bp, Saccharomyces pastorianus
gtatgcaatccttcattcattgagt

SEQ ID NO: 22100 - DNA, 25 bp, Saccharomyces pastorianus
gttggaaccaggatccgacttgata

SEQ ID NO: 22101 - DNA, 25 bp, Saccharomyces pastorianus
gcaatcgctgatcaatttgtcttgg

SEQ ID NO: 22102 - DNA, 25 bp, Saccharomyces pastorianus
agtaaaggccatcgtgctgctattc

SEQ ID NO: 22103 - DNA, 25 bp, Saccharomyces pastorianus
ttaggtgaaagcgatccaactgccg

SEQ ID NO: 22104 - DNA, 25 bp, Saccharomyces pastorianus
gctacggtggacattaatctgcatt

SEQ ID NO: 22105 - DNA, 25 bp, Saccharomyces pastorianus
caactgccgctgatctgattgaaca

SEQ ID NO: 22106 - DNA, 25 bp, Saccharomyces pastorianus
aacgcgtgtggtttgtatgcaatcc

SEQ ID NO: 22107 - DNA, 25 bp, Saccharomyces pastorianus
gcgtcaacctatgggatcatgccta

SEQ ID NO: 22108 - DNA, 25 bp, Saccharomyces pastorianus
gaatattcttccttctattaccgaa

SEQ ID NO: 22109 - DNA, 25 bp, Saccharomyces pastorianus
atgcctctaatttgcgtcaacctat

SEQ ID NO: 22110 - DNA, 25 bp, Saccharomyces pastorianus
aaagttcaggactggaccatgcctc

SEQ ID NO: 22111 - DNA, 25 bp, Saccharomyces pastorianus
ctatcgacgagtttggtaccttgaa

SEQ ID NO: 22112 - DNA, 25 bp, Saccharomyces pastorianus
aaacagcgcaatttctatcgacgag

SEQ ID NO: 22113 - DNA, 25 bp, Saccharomyces pastorianus
gccagggctggttatttctcgtaga

SEQ ID NO: 22114 - DNA, 25 bp, Saccharomyces pastorianus
gaaccatccaggctatttttgtcca

SEQ ID NO: 22115 - DNA, 25 bp, Saccharomyces pastorianus
agaatccaagactcgttcaacggca

SEQ ID NO: 22116 - DNA, 25 bp, Saccharomyces pastorianus
atttccccagaaaccagacattcga

SEQ ID NO: 22117 - DNA, 25 bp, Saccharomyces pastorianus
tctcgagtcatatcatccattccat

SEQ ID NO: 22118 - DNA, 25 bp, Saccharomyces pastorianus
ctccggtgtcgtcaagttcgagcaa

SEQ ID NO: 22119 - DNA, 25 bp, Saccharomyces pastorianus
agttgttcggtgtcaattccgtcgt

SEQ ID NO: 22120 - DNA, 25 bp, Saccharomyces pastorianus
agtgtcgtcatccatgctggtcaag

SEQ ID NO: 22121 - DNA, 25 bp, Saccharomyces pastorianus
gagcaagcctccgaatctgagccaa

SEQ ID NO: 22122 - DNA, 25 bp, Saccharomyces pastorianus
gggtaacttgaagaccgacgccaat

SEQ ID NO: 22123 - DNA, 25 bp, Saccharomyces pastorianus
gtagccaagggctctttccaagaca

SEQ ID NO: 22124 - DNA, 25 bp, Saccharomyces pastorianus
aaccactgtctcctacgaaatttct

SEQ ID NO: 22125 - DNA, 25 bp, Saccharomyces pastorianus
tccgtcgtcggcagaagtgtcgtca

SEQ ID NO: 22126 - DNA, 25 bp, Saccharomyces pastorianus
gaaatttctggtaacagccccaatg

SEQ ID NO: 22127 - DNA, 25 bp, Saccharomyces pastorianus
ttcaaccctttcaagaagacccacg

SEQ ID NO: 22128 - DNA, 25 bp, Saccharomyces pastorianus
gaccgacgccaatggtgtagccaag

SEQ ID NO: 22129 - DNA, 25 bp, Saccharomyces pastorianus
ctaacgaatctgaagccgaggcctt

SEQ ID NO: 22130 - DNA, 25 bp, Saccharomyces pastorianus
gttttgaacttgagtgctcccttca

SEQ ID NO: 22131 - DNA, 25 bp, Saccharomyces pastorianus
acatcggcgggttccatttgactgt

SEQ ID NO: 22132 - DNA, 25 bp, Saccharomyces pastorianus
agacgcctttgctggtgggttcatg

SEQ ID NO: 22133 - DNA, 25 bp, Saccharomyces pastorianus
gcattagccagagtcttgccttacg

SEQ ID NO: 22134 - DNA, 25 bp, Saccharomyces pastorianus
cgcgatcgtcaagttgggccaacac

SEQ ID NO: 22135 - DNA, 25 bp, Saccharomyces pastorianus
ttgtctatccaagaagtcggtcctt

SEQ ID NO: 22136 - DNA, 25 bp, Saccharomyces pastorianus
actgggacttggttgaagccgctaa

SEQ ID NO: 22137 - DNA, 25 bp, Saccharomyces pastorianus
atttgactgtgtctccagacgcgat

SEQ ID NO: 22138 - DNA, 25 bp, Saccharomyces pastorianus
aatggttggctgctttgtctatcca

SEQ ID NO: 22139 - DNA, 25 bp, Saccharomyces pastorianus
ggactctgcagttgacaagaccgtc

SEQ ID NO: 22140 - DNA, 25 bp, Saccharomyces pastorianus
tattgacgcaaaatccagacctgtt

SEQ ID NO: 22141 - DNA, 25 bp, Saccharomyces pastorianus
gagatgaacgacgaattgcgccata

SEQ ID NO: 22142 - DNA, 25 bp, Saccharomyces pastorianus
atccagacctgtttgagttcaacga

SEQ ID NO: 22143 - DNA, 25 bp, Saccharomyces pastorianus
aaagagcactgcaattccgatggat

SEQ ID NO: 22144 - DNA, 25 bp, Saccharomyces pastorianus
cttccaacaatttctagactgcgta

SEQ ID NO: 22145 - DNA, 25 bp, Saccharomyces pastorianus
ttccgatggatctaagggcttaaat

SEQ ID NO: 22146 - DNA, 25 bp, Saccharomyces pastorianus
gtttcaacaagatctgccgaacaag

SEQ ID NO: 22147 - DNA, 25 bp, Saccharomyces pastorianus
aattcaatggtggtggcaactgtat

SEQ ID NO: 22148 - DNA, 25 bp, Saccharomyces pastorianus
ttcttcatcactacccatggataaa

SEQ ID NO: 22149 - DNA, 25 bp, Saccharomyces pastorianus
gtggaatggatttcaccagacttga

SEQ ID NO: 22150 - DNA, 25 bp, Saccharomyces pastorianus
tgtcaatacggaacgtttctttcaa

SEQ ID NO: 22151 - DNA, 25 bp, Saccharomyces pastorianus
atagttcttcgttctcagagactgc

SEQ ID NO: 22152 - DNA, 25 bp, Saccharomyces pastorianus
ccatcaatggcctcactgtgttaag

SEQ ID NO: 22153 - DNA, 25 bp, Saccharomyces pastorianus
agtaataatcgcctctttggttcct

SEQ ID NO: 22154 - DNA, 25 bp, Saccharomyces pastorianus
tgaataatctgaactcctcgtaccc

SEQ ID NO: 22155 - DNA, 25 bp, Saccharomyces pastorianus
cgctgccatgggtaatagttcttcg

SEQ ID NO: 22156 - DNA, 25 bp, Saccharomyces pastorianus
tataataaagtttccacccgtgtgg

SEQ ID NO: 22157 - DNA, 25 bp, Saccharomyces pastorianus
gctatactcgtatcccaatggtgtg

SEQ ID NO: 22158 - DNA, 25 bp, Saccharomyces pastorianus
ttcctcaagatgtcaaccctcaatt

SEQ ID NO: 22159 - DNA, 25 bp, Saccharomyces pastorianus
gacattttgctaccgcatctggatt

SEQ ID NO: 22160 - DNA, 25 bp, Saccharomyces pastorianus
actagctcacgtttatggcccatta

SEQ ID NO: 22161 - DNA, 25 bp, Saccharomyces pastorianus
atcaacagccgacgttctttcaaaa

SEQ ID NO: 22162 - DNA, 25 bp, Saccharomyces pastorianus
tacgtgaacaccaagcaaggcgcta

SEQ ID NO: 22163 - DNA, 25 bp, Saccharomyces pastorianus
gttagctcgggaattggacgaccta

SEQ ID NO: 22164 - DNA, 25 bp, Saccharomyces pastorianus
tgacgagtatttgggctctcacacg

SEQ ID NO: 22165 - DNA, 25 bp, Saccharomyces pastorianus
tggacgagctaatcgcggaagccaa

SEQ ID NO: 22166 - DNA, 25 bp, Saccharomyces pastorianus
gagaggcccgcaatcgacgaacttt

SEQ ID NO: 22167 - DNA, 25 bp, Saccharomyces pastorianus
aatggactgctgctgcaaagcctga

SEQ ID NO: 22168 - DNA, 25 bp, Saccharomyces pastorianus
gacaaagtgagctcatgcttcccgc

SEQ ID NO: 22169 - DNA, 25 bp, Saccharomyces pastorianus
gaatacgcacggcatacgatacatt

SEQ ID NO: 22170 - DNA, 25 bp, Saccharomyces pastorianus
acacggaccagccagtgaatggact

SEQ ID NO: 22171 - DNA, 25 bp, Saccharomyces pastorianus
accgttacatgggaggtggcctcaa

SEQ ID NO: 22172 - DNA, 25 bp, Saccharomyces pastorianus
tgtggaatgccacgtctacagccag

SEQ ID NO: 22173 - DNA, 25 bp, Saccharomyces pastorianus
ttaacacgggtgtggccaaggcctc

SEQ ID NO: 22174 - DNA, 25 bp, Saccharomyces pastorianus
ctctcatgctcaccaagacttttaa

SEQ ID NO: 22175 - DNA, 25 bp, Saccharomyces pastorianus
aagatagacctcttgcatggcccgc

SEQ ID NO: 22176 - DNA, 25 bp, Saccharomyces pastorianus
aactggatcgtgcagagcgccaacc

SEQ ID NO: 22177 - DNA, 25 bp, Saccharomyces pastorianus
attctcttcaaaggactacctgccg

SEQ ID NO: 22178 - DNA, 25 bp, Saccharomyces pastorianus
aaccagcgggtgtccagcgactttg

SEQ ID NO: 22179 - DNA, 25 bp, Saccharomyces pastorianus
gagaaagcgcagtccatgctgtcta

SEQ ID NO: 22180 - DNA, 25 bp, Saccharomyces pastorianus
aggcgttgtacctggtgtactgcca

SEQ ID NO: 22181 - DNA, 25 bp, Saccharomyces pastorianus
gcaggatccgatccaggctctggaa

SEQ ID NO: 22182 - DNA, 25 bp, Saccharomyces pastorianus
gtccatgctgtctaaggcgttgtac

SEQ ID NO: 22183 - DNA, 25 bp, Saccharomyces pastorianus
catccccgtgccgttgaacaaaaga

SEQ ID NO: 22184 - DNA, 25 bp, Saccharomyces pastorianus
gatgcactacaatgtcgtcacctac

SEQ ID NO: 22185 - DNA, 25 bp, Saccharomyces pastorianus
agagcaagaactccattccgctgtg

SEQ ID NO: 22186 - DNA, 25 bp, Saccharomyces pastorianus
atggccgtgttcttcttggtcagaa

SEQ ID NO: 22187 - DNA, 25 bp, Saccharomyces pastorianus
gatgagttgcctaaagtctccgccg

SEQ ID NO: 22188 - DNA, 25 bp, Saccharomyces pastorianus
acgcggactcgtacagctcaatggt

SEQ ID NO: 22189 - DNA, 25 bp, Saccharomyces pastorianus
gaccatgtgcatgcgtcatttcaag

SEQ ID NO: 22190 - DNA, 25 bp, Saccharomyces pastorianus
aaagttgatttcgacgtccacaccg

SEQ ID NO: 22191 - DNA, 25 bp, Saccharomyces pastorianus
accgtgtcgatgattcaggctgcca

SEQ ID NO: 22192 - DNA, 25 bp, Saccharomyces pastorianus
tgaactttctgaacgtcctgtggtt

SEQ ID NO: 22193 - DNA, 25 bp, Saccharomyces pastorianus
acgtacgtgtttctgttgtccttga

SEQ ID NO: 22194 - DNA, 25 bp, Saccharomyces pastorianus
gtaggctactttctttgggacctga

SEQ ID NO: 22195 - DNA, 25 bp, Saccharomyces pastorianus
atgtggatccactgtattcaagcta

SEQ ID NO: 22196 - DNA, 25 bp, Saccharomyces pastorianus
aaaaacctctctaccatgaatgtgg

SEQ ID NO: 22197 - DNA, 25 bp, Saccharomyces pastorianus
tttagccaattgcacactttcctta

SEQ ID NO: 22198 - DNA, 25 bp, Saccharomyces pastorianus
gacccggtcatcactaaggaatttc

SEQ ID NO: 22199 - DNA, 25 bp, Saccharomyces pastorianus
agggttacctttcaccagcaagaga

SEQ ID NO: 22200 - DNA, 25 bp, Saccharomyces pastorianus
actcttcattttacgacacctttgg

SEQ ID NO: 22201 - DNA, 25 bp, Saccharomyces pastorianus
actggtggtttcattgacccggtca

SEQ ID NO: 22202 - DNA, 25 bp, Saccharomyces pastorianus
cgagattacagctgttttggcccat

SEQ ID NO: 22203 - DNA, 25 bp, Saccharomyces pastorianus
attcaagctaccattattctcaccc

SEQ ID NO: 22204 - DNA, 25 bp, Saccharomyces pastorianus
gacacctttggctttttcacagaga

SEQ ID NO: 22205 - DNA, 25 bp, Saccharomyces pastorianus
ttcaccagcgtctacagaaactctt

SEQ ID NO: 22206 - DNA, 25 bp, Saccharomyces pastorianus
atacaacaacggcactttatccttt

SEQ ID NO: 22207 - DNA, 25 bp, Saccharomyces pastorianus
gatgtgttctgttctcaatgtaaaa

SEQ ID NO: 22208 - DNA, 25 bp, Saccharomyces pastorianus
tttgctagacaatgctactcctcat

SEQ ID NO: 22209 - DNA, 25 bp, Saccharomyces pastorianus
tttgtattgcatgcgctcagtgacc

SEQ ID NO: 22210 - DNA, 25 bp, Saccharomyces pastorianus
accatatgttcagtggcctttgtat

SEQ ID NO: 22211 - DNA, 25 bp, Saccharomyces pastorianus
tcagtgaccccgaatctttaagaac

SEQ ID NO: 22212 - DNA, 25 bp, Saccharomyces pastorianus
tatcctttaatgacgcctttgctag

SEQ ID NO: 22213 - DNA, 25 bp, Saccharomyces pastorianus
gtcaacccaaaaaccatgtgtcttt

SEQ ID NO: 22214 - DNA, 25 bp, Saccharomyces pastorianus
tgttttgtgcactcaggatttcttg

SEQ ID NO: 22215 - DNA, 25 bp, Saccharomyces pastorianus
acagatttttggctaccttatggat

SEQ ID NO: 22216 - DNA, 25 bp, Saccharomyces pastorianus
tgaccttcaattccggtccggaaga

SEQ ID NO: 22217 - DNA, 25 bp, Saccharomyces pastorianus
ttatgacgttgcctctaaggtccaa

SEQ ID NO: 22218 - DNA, 25 bp, Saccharomyces pastorianus
tcacgaccacgaagaagggttccgt

SEQ ID NO: 22219 - DNA, 25 bp, Saccharomyces pastorianus
aaccattcgccgtcgccgaggtctt

SEQ ID NO: 22220 - DNA, 25 bp, Saccharomyces pastorianus
gctgccgtcgttggtcaagaacatt

SEQ ID NO: 22221 - DNA, 25 bp, Saccharomyces pastorianus
ggccaccgatatgggtcttctacaa

SEQ ID NO: 22222 - DNA, 25 bp, Saccharomyces pastorianus
ttccgttacttctgtccaagccgtt

SEQ ID NO: 22223 - DNA, 25 bp, Saccharomyces pastorianus
gattaaaggataccgtcgcatcatt

SEQ ID NO: 22224 - DNA, 25 bp, Saccharomyces pastorianus
gaaactctacaaacctataaatcgt

SEQ ID NO: 22225 - DNA, 25 bp, Saccharomyces pastorianus
caagattattggatgctgccgtcgt

SEQ ID NO: 22226 - DNA, 25 bp, Saccharomyces pastorianus
gtcgcatcatttaaagccgttttgg

SEQ ID NO: 22227 - DNA, 25 bp, Saccharomyces pastorianus
ttgcctctaaggtccaagaaactct

SEQ ID NO: 22228 - DNA, 25 bp, Saccharomyces pastorianus
aaaggctcaatgtccaatcgtcgaa

SEQ ID NO: 22229 - DNA, 25 bp, Saccharomyces pastorianus
cgctggtcgttacgccaacaagaga

SEQ ID NO: 22230 - DNA, 25 bp, Saccharomyces pastorianus
gaagtccaacaagctcaaaccgaga

SEQ ID NO: 22231 - DNA, 25 bp, Saccharomyces pastorianus
gactacgtccaagttagacaaccaa

SEQ ID NO: 22232 - DNA, 25 bp, Saccharomyces pastorianus
tatttctttgttgaccatcggtgct

SEQ ID NO: 22233 - DNA, 25 bp, Saccharomyces pastorianus
ggatgcttctttggttgactacgtc

SEQ ID NO: 22234 - DNA, 25 bp, Saccharomyces pastorianus
tagagaggccgctttcagaaacatc

SEQ ID NO: 22235 - DNA, 25 bp, Saccharomyces pastorianus
agattgactaactccttgatgatga

SEQ ID NO: 22236 - DNA, 25 bp, Saccharomyces pastorianus
gttttggctactccaattccagaag

SEQ ID NO: 22237 - DNA, 25 bp, Saccharomyces pastorianus
gaattcaccccagtagttttggcta

SEQ ID NO: 22238 - DNA, 25 bp, Saccharomyces pastorianus
aatctttgttgctcacaccgctggt

SEQ ID NO: 22239 - DNA, 25 bp, Saccharomyces pastorianus
cttccgctaattcaacatctttcta

SEQ ID NO: 22240 - DNA, 25 bp, Saccharomyces pastorianus
aagtatcccaaactaatgcctcctc

SEQ ID NO: 22241 - DNA, 25 bp, Saccharomyces pastorianus
tgccattgccgctgagcctaaaaaa

SEQ ID NO: 22242 - DNA, 25 bp, Saccharomyces pastorianus
gtcagagcaatgttactcctgccat

SEQ ID NO: 22243 - DNA, 25 bp, Saccharomyces pastorianus
gtttccaacacttcgttcaatttgt

SEQ ID NO: 22244 - DNA, 25 bp, Saccharomyces pastorianus
acggatcgtcacaagtacccaaaga

SEQ ID NO: 22245 - DNA, 25 bp, Saccharomyces pastorianus
gattttgtcgactttttctccaacg

SEQ ID NO: 22246 - DNA, 25 bp, Saccharomyces pastorianus
agaccctttcagcttgttgttttca

SEQ ID NO: 22247 - DNA, 25 bp, Saccharomyces pastorianus
gttgttttcaacagccaaggcatcc

SEQ ID NO: 22248 - DNA, 25 bp, Saccharomyces pastorianus
gaagcacctattacccctaaagtat

SEQ ID NO: 22249 - DNA, 25 bp, Saccharomyces pastorianus
tgggtcaagggataccaccactcct

SEQ ID NO: 22250 - DNA, 25 bp, Saccharomyces pastorianus
atgggagacttcctcatgcacgagc

SEQ ID NO: 22251 - DNA, 25 bp, Saccharomyces pastorianus
taaaatgtgcttactgtccgcgacg

SEQ ID NO: 22252 - DNA, 25 bp, Saccharomyces pastorianus
gaagctgcgctatacatgggagact

SEQ ID NO: 22253 - DNA, 25 bp, Saccharomyces pastorianus
gaatgccttgccacaagccaatgta

SEQ ID NO: 22254 - DNA, 25 bp, Saccharomyces pastorianus
tcggacctggtggagacgcagctta

SEQ ID NO: 22255 - DNA, 25 bp, Saccharomyces pastorianus
aacctgctctttaaacctttgattg

SEQ ID NO: 22256 - DNA, 25 bp, Saccharomyces pastorianus
aacgttctcgagatcggtgccggaa

SEQ ID NO: 22257 - DNA, 25 bp, Saccharomyces pastorianus
agtacaccgtggtaacgagcaccga

SEQ ID NO: 22258 - DNA, 25 bp, Saccharomyces pastorianus
agagtttgcccgagagtgccataaa

SEQ ID NO: 22259 - DNA, 25 bp, Saccharomyces pastorianus
ctggtggtcgcagcagacgttacat

SEQ ID NO: 22260 - DNA, 25 bp, Saccharomyces pastorianus
taagtctcgttctcttgcggaagta

SEQ ID NO: 22261 - DNA, 25 bp, Saccharomyces pastorianus
ccaagatcttcagtggtgattcgaa

SEQ ID NO: 22262 - DNA, 25 bp, Saccharomyces pastorianus
tggtggcttgttttcattgactttt

SEQ ID NO: 22263 - DNA, 25 bp, Saccharomyces pastorianus
gtattgccctttgctgacattgttt

SEQ ID NO: 22264 - DNA, 25 bp, Saccharomyces pastorianus
atctcgtaagagtcagtgtaggctt

SEQ ID NO: 22265 - DNA, 25 bp, Saccharomyces pastorianus
tacgaactttacgttggcatgcccg

SEQ ID NO: 22266 - DNA, 25 bp, Saccharomyces pastorianus
gccattatagcacattaccaggaat

SEQ ID NO: 22267 - DNA, 25 bp, Saccharomyces pastorianus
gcatgcccgtatgccattatagcac

SEQ ID NO: 22268 - DNA, 25 bp, Saccharomyces pastorianus
ggatccttagtgctgaaccctaggg

SEQ ID NO: 22269 - DNA, 25 bp, Saccharomyces pastorianus
ctggaactatgtaaaggaccgtctt

SEQ ID NO: 22270 - DNA, 25 bp, Saccharomyces pastorianus
gacattgtttgtagttctttgacca

SEQ ID NO: 22271 - DNA, 25 bp, Saccharomyces pastorianus
gaaggtattgctaccacaagtggga

SEQ ID NO: 22272 - DNA, 25 bp, Saccharomyces pastorianus
gtagcgattactccatgttgaactt

SEQ ID NO: 22273 - DNA, 25 bp, Saccharomyces pastorianus
aagacttccagcagcgttgagacaa

SEQ ID NO: 22274 - DNA, 25 bp, Saccharomyces pastorianus
gagtccatcataggcctacaacatg

SEQ ID NO: 22275 - DNA, 25 bp, Saccharomyces pastorianus
acagagcctttaatcacgttacagt

SEQ ID NO: 22276 - DNA, 25 bp, Saccharomyces pastorianus
tcggtccttgcgcttttgaaaatta

SEQ ID NO: 22277 - DNA, 25 bp, Saccharomyces pastorianus
gaagcattccttgacgttggtgatg

SEQ ID NO: 22278 - DNA, 25 bp, Saccharomyces pastorianus
gactccttggattttgtagacggct

SEQ ID NO: 22279 - DNA, 25 bp, Saccharomyces pastorianus
gacccttgtgactcagttagcttca

SEQ ID NO: 22280 - DNA, 25 bp, Saccharomyces pastorianus
ggattacaggctacattccgaatta

SEQ ID NO: 22281 - DNA, 25 bp, Saccharomyces pastorianus
aattttcatcatcaggtttcggagg

SEQ ID NO: 22282 - DNA, 25 bp, Saccharomyces pastorianus
gaagaggacccattgacaggatcaa

SEQ ID NO: 22283 - DNA, 25 bp, Saccharomyces pastorianus
agttgacgacactcgaactactctt

SEQ ID NO: 22284 - DNA, 25 bp, Saccharomyces pastorianus
gatccaagctatcggtttatctttg

SEQ ID NO: 22285 - DNA, 25 bp, Saccharomyces pastorianus
gaggatacggttttttctatatttg

SEQ ID NO: 22286 - DNA, 25 bp, Saccharomyces pastorianus
gtggtggtatgattcctgcgagaat

SEQ ID NO: 22287 - DNA, 25 bp, Saccharomyces pastorianus
aggataagcccaagaaagccgactt

SEQ ID NO: 22288 - DNA, 25 bp, Saccharomyces pastorianus
tcattacgctttgtcagaactggaa

SEQ ID NO: 22289 - DNA, 25 bp, Saccharomyces pastorianus
aaagccgacttacctgactctatga

SEQ ID NO: 22290 - DNA, 25 bp, Saccharomyces pastorianus
atgtggttatgttatccttgggatg

SEQ ID NO: 22291 - DNA, 25 bp, Saccharomyces pastorianus
gactctatgattaattctgggcgtt

SEQ ID NO: 22292 - DNA, 25 bp, Saccharomyces pastorianus
ctgggcgttatattgccgcgcaaac

SEQ ID NO: 22293 - DNA, 25 bp, Saccharomyces pastorianus
tcaacatttcgattccctgattggt

SEQ ID NO: 22294 - DNA, 25 bp, Saccharomyces pastorianus
tagagacctctttacaattgttggg

SEQ ID NO: 22295 - DNA, 25 bp, Saccharomyces pastorianus
gcgagcgctcaattatcgaattcta

SEQ ID NO: 22296 - DNA, 25 bp, Saccharomyces pastorianus
gaagcagctgatttgcaagcaatcc

SEQ ID NO: 22297 - DNA, 25 bp, Saccharomyces pastorianus
ttgcctcaagaaaactccatgctgt

SEQ ID NO: 22298 - DNA, 25 bp, Saccharomyces pastorianus
aacgacgagatattgaggctacttg

SEQ ID NO: 22299 - DNA, 25 bp, Saccharomyces pastorianus
gaagacgattcatctataaaaccca

SEQ ID NO: 22300 - DNA, 25 bp, Saccharomyces pastorianus
ggccgcacgacaccctaggtagtga

SEQ ID NO: 22301 - DNA, 25 bp, Saccharomyces pastorianus
agcatcgacgatatcccagaggaag

SEQ ID NO: 22302 - DNA, 25 bp, Saccharomyces pastorianus
ataccgtacagaagagcgagcgctc

SEQ ID NO: 22303 - DNA, 25 bp, Saccharomyces pastorianus
ggagaactatcaacctcaaaggaat

SEQ ID NO: 22304 - DNA, 25 bp, Saccharomyces pastorianus
aacccataggagatgggccgcacga

SEQ ID NO: 22305 - DNA, 25 bp, Saccharomyces pastorianus
gagctttctagcaccgaatatggac

SEQ ID NO: 22306 - DNA, 25 bp, Saccharomyces pastorianus
tatacaggcttttactcagggcaaa

SEQ ID NO: 22307 - DNA, 25 bp, Saccharomyces pastorianus
aagacttcgtggtgagctttctagc

SEQ ID NO: 22308 - DNA, 25 bp, Saccharomyces pastorianus
gacccaggaatcttcgcagagttac

SEQ ID NO: 22309 - DNA, 25 bp, Saccharomyces pastorianus
gagctgctggtattactacggcatc

SEQ ID NO: 22310 - DNA, 25 bp, Saccharomyces pastorianus
gggaaacctactgacccaggaatct

SEQ ID NO: 22311 - DNA, 25 bp, Saccharomyces pastorianus
gaatttcttgtcatcgaggatccaa

SEQ ID NO: 22312 - DNA, 25 bp, Saccharomyces pastorianus
aaagccctaccaactcagatgttaa

SEQ ID NO: 22313 - DNA, 25 bp, Saccharomyces pastorianus
gatttttcatccaagactatgccaa

SEQ ID NO: 22314 - DNA, 25 bp, Saccharomyces pastorianus
aatcggcttcagcttggtgtcgaat

SEQ ID NO: 22315 - DNA, 25 bp, Saccharomyces pastorianus
agagagagcagacccaatcggcttc

SEQ ID NO: 22316 - DNA, 25 bp, Saccharomyces pastorianus
gaaattgccactttcctagagggtg

SEQ ID NO: 22317 - DNA, 25 bp, Saccharomyces pastorianus
taagaaatgcgttggctctgtcaat

SEQ ID NO: 22318 - DNA, 25 bp, Saccharomyces pastorianus
caattcactaatacctgttttaaga

SEQ ID NO: 22319 - DNA, 25 bp, Saccharomyces pastorianus
ggcttctcttgatgatacctctaaa

SEQ ID NO: 22320 - DNA, 25 bp, Saccharomyces pastorianus
gcaaaaagttcaaatgtccatccat

SEQ ID NO: 22321 - DNA, 25 bp, Saccharomyces pastorianus
tgtccatccatcaattcactaatac

SEQ ID NO: 22322 - DNA, 25 bp, Saccharomyces pastorianus
atcaacatccgatttggcttctctt

SEQ ID NO: 22323 - DNA, 25 bp, Saccharomyces pastorianus
acagtgtctggctaactgtgtgaac

SEQ ID NO: 22324 - DNA, 25 bp, Saccharomyces pastorianus
gttggctctgtcaataatccagatt

SEQ ID NO: 22325 - DNA, 25 bp, Saccharomyces pastorianus
gccactttcctagagggtgagaact

SEQ ID NO: 22326 - DNA, 25 bp, Saccharomyces pastorianus
ctgtgtgaacaggtttttagatacc

SEQ ID NO: 22327 - DNA, 25 bp, Saccharomyces pastorianus
ttcagtgggttaagattatcctcat

SEQ ID NO: 22328 - DNA, 25 bp, Saccharomyces pastorianus
gagcaggcatcatcaaaccaactac

SEQ ID NO: 22329 - DNA, 25 bp, Saccharomyces pastorianus
tagcccttattggtaaggccccaca

SEQ ID NO: 22330 - DNA, 25 bp, Saccharomyces pastorianus
atacgggttacgtcacgattctatt

SEQ ID NO: 22331 - DNA, 25 bp, Saccharomyces pastorianus
gcttggtggtggttatcttggtcaa

SEQ ID NO: 22332 - DNA, 25 bp, Saccharomyces pastorianus
ccatggttaggtgaattagccctta

SEQ ID NO: 22333 - DNA, 25 bp, Saccharomyces pastorianus
gaatctgaacgttttcttcctgata

SEQ ID NO: 22334 - DNA, 25 bp, Saccharomyces pastorianus
gatgactggttgtccaaacggttgt

SEQ ID NO: 22335 - DNA, 25 bp, Saccharomyces pastorianus
accaattctggtcacttcaggttga

SEQ ID NO: 22336 - DNA, 25 bp, Saccharomyces pastorianus
ggaaagttgctgagtacatgcttaa

SEQ ID NO: 22337 - DNA, 25 bp, Saccharomyces pastorianus
caacctgtggtttagcatttgctga

SEQ ID NO: 22338 - DNA, 25 bp, Saccharomyces pastorianus
acagggcatccaagtttctacaaag

SEQ ID NO: 22339 - DNA, 25 bp, Saccharomyces pastorianus
gttaatccattccactcttttgttg

SEQ ID NO: 22340 - DNA, 25 bp, Saccharomyces pastorianus
ggaaaatccattcttcctcaagctc

SEQ ID NO: 22341 - DNA, 25 bp, Saccharomyces pastorianus
ctggcgcttacgttgcagaactacg

SEQ ID NO: 22342 - DNA, 25 bp, Saccharomyces pastorianus
tacaatcccatctgttaatccattc

SEQ ID NO: 22343 - DNA, 25 bp, Saccharomyces pastorianus
atatccatcatactggcgcttacgt

SEQ ID NO: 22344 - DNA, 25 bp, Saccharomyces pastorianus
ttatcttctgaaggcatctggattt

SEQ ID NO: 22345 - DNA, 25 bp, Saccharomyces pastorianus
ctcaagctctgcactagatgctcaa

SEQ ID NO: 22346 - DNA, 25 bp, Saccharomyces pastorianus
gagaaaatggttgcctctttttagc

SEQ ID NO: 22347 - DNA, 25 bp, Saccharomyces pastorianus
accgcagttcaagtacgttcaatat

SEQ ID NO: 22348 - DNA, 25 bp, Saccharomyces pastorianus
aactacgacccctaaattgattgat

SEQ ID NO: 22349 - DNA, 25 bp, Saccharomyces pastorianus
agttgatgtcgccaccaaatctgtc

SEQ ID NO: 22350 - DNA, 25 bp, Saccharomyces pastorianus
aggttacaccgaaccagatccaaga

SEQ ID NO: 22351 - DNA, 25 bp, Saccharomyces pastorianus
gcgttacactaatccagtcgtcatt

SEQ ID NO: 22352 - DNA, 25 bp, Saccharomyces pastorianus
aacgaattctccactagcgaagcta

SEQ ID NO: 22353 - DNA, 25 bp, Saccharomyces pastorianus
attgtcggtagaatatctggcgtcg

SEQ ID NO: 22354 - DNA, 25 bp, Saccharomyces pastorianus
tctggcgtcgaagttgaatccccaa

SEQ ID NO: 22355 - DNA, 25 bp, Saccharomyces pastorianus
gattctgttaaatctgtcgacgaat

SEQ ID NO: 22356 - DNA, 25 bp, Saccharomyces pastorianus
gaagccgcagctgaagacaaagtat

SEQ ID NO: 22357 - DNA, 25 bp, Saccharomyces pastorianus
caggtgctgctgtcactgctgctgg

SEQ ID NO: 22358 - DNA, 25 bp, Saccharomyces pastorianus
acttctttcccagttcaatctttga

SEQ ID NO: 22359 - DNA, 25 bp, Saccharomyces pastorianus
atacgattactctcatccatttgca

SEQ ID NO: 22360 - DNA, 25 bp, Saccharomyces pastorianus
aataccatcatctgcgggttctatt

SEQ ID NO: 22361 - DNA, 25 bp, Saccharomyces pastorianus
tattgcatccaaaggcactccagat

SEQ ID NO: 22362 - DNA, 25 bp, Saccharomyces pastorianus
acctccaagtcgagtgccgtgaaga

SEQ ID NO: 22363 - DNA, 25 bp, Saccharomyces pastorianus
gactaaaactcgcattccaactgaa

SEQ ID NO: 22364 - DNA, 25 bp, Saccharomyces pastorianus
tgaacttttagaacgcgccattagc

SEQ ID NO: 22365 - DNA, 25 bp, Saccharomyces pastorianus
agttatgtagagcagatcctcccca

SEQ ID NO: 22366 - DNA, 25 bp, Saccharomyces pastorianus
atttggacttgctttttgccatgaa

SEQ ID NO: 22367 - DNA, 25 bp, Saccharomyces pastorianus
cttcgacagtgtttgcctgggtatt

SEQ ID NO: 22368 - DNA, 25 bp, Saccharomyces pastorianus
gcatagcggaattgccttcgacagt

SEQ ID NO: 22369 - DNA, 25 bp, Saccharomyces pastorianus
tattcgaccagagcaagcatccgga

SEQ ID NO: 22370 - DNA, 25 bp, Saccharomyces pastorianus
gacttcaatactactggccttgtta

SEQ ID NO: 22371 - DNA, 25 bp, Saccharomyces pastorianus
agacatggctatattacaccggaaa

SEQ ID NO: 22372 - DNA, 25 bp, Saccharomyces pastorianus
aaacatggccattaatgctcgacaa

SEQ ID NO: 22373 - DNA, 25 bp, Saccharomyces pastorianus
gttgtttcttacctctactttacag

SEQ ID NO: 22374 - DNA, 25 bp, Saccharomyces pastorianus
gagcgtcgaggaagccaacttgcaa

SEQ ID NO: 22375 - DNA, 25 bp, Saccharomyces pastorianus
agtttcaacctattcagcttacaag

SEQ ID NO: 22376 - DNA, 25 bp, Saccharomyces pastorianus
gcccaattgcgctttagtaacggta

SEQ ID NO: 22377 - DNA, 25 bp, Saccharomyces pastorianus
gacatttctgtgacggcattcgaca

SEQ ID NO: 22378 - DNA, 25 bp, Saccharomyces pastorianus
ggcgggtgtacttggtataaccaca

SEQ ID NO: 22379 - DNA, 25 bp, Saccharomyces pastorianus
aggagattcggttctggatcccaag

SEQ ID NO: 22380 - DNA, 25 bp, Saccharomyces pastorianus
agccagtatcaaggctgccggtgtt

SEQ ID NO: 22381 - DNA, 25 bp, Saccharomyces pastorianus
tagaaagccatacgtccttatcgaa

SEQ ID NO: 22382 - DNA, 25 bp, Saccharomyces pastorianus
ttccaggttgtttcattggccgttt

SEQ ID NO: 22383 - DNA, 25 bp, Saccharomyces pastorianus
cagtgtttttggtgtgtgcctccac

SEQ ID NO: 22384 - DNA, 25 bp, Saccharomyces pastorianus
gacatcgcggttactatgctttaaa

SEQ ID NO: 22385 - DNA, 25 bp, Saccharomyces pastorianus
tatttcccgttctttttgatggctc

SEQ ID NO: 22386 - DNA, 25 bp, Saccharomyces pastorianus
gatggctcgtcaaaagtttctgcat

SEQ ID NO: 22387 - DNA, 25 bp, Saccharomyces pastorianus
tcttcatttcctggtgttgtcacta

SEQ ID NO: 22388 - DNA, 25 bp, Saccharomyces pastorianus
atcgtggccgatttgcttacaagac

SEQ ID NO: 22389 - DNA, 25 bp, Saccharomyces pastorianus
gatgaagatgttccaggtacacctt

SEQ ID NO: 22390 - DNA, 25 bp, Saccharomyces pastorianus
gctttgtctactttgcaccattggt

SEQ ID NO: 22391 - DNA, 25 bp, Saccharomyces pastorianus
gtcagcttatctccatcagaagtcg

SEQ ID NO: 22392 - DNA, 25 bp, Saccharomyces pastorianus
ataaactgtcgtcggagcatccatt

SEQ ID NO: 22393 - DNA, 25 bp, Saccharomyces pastorianus
gctactgcaccataggcgaagtttc

SEQ ID NO: 22394 - DNA, 25 bp, Saccharomyces pastorianus
gcgatcgtttctcccatcaaagaaa

SEQ ID NO: 22395 - DNA, 25 bp, Saccharomyces pastorianus
ttttggttctggtacagccgcgatc

SEQ ID NO: 22396 - DNA, 25 bp, Saccharomyces pastorianus
ccattggacggcaccattctggaag

SEQ ID NO: 22397 - DNA, 25 bp, Saccharomyces pastorianus
aatcggctggaagggcgaacctatc

SEQ ID NO: 22398 - DNA, 25 bp, Saccharomyces pastorianus
gcaggccgcctcaagaggttaccaa

SEQ ID NO: 22399 - DNA, 25 bp, Saccharomyces pastorianus
gagagattccatattaaccctcgcc

SEQ ID NO: 22400 - DNA, 25 bp, Saccharomyces pastorianus
gcgagcaaacgggaccattgaccaa

SEQ ID NO: 22401 - DNA, 25 bp, Saccharomyces pastorianus
agaacttgtggttgtttggcccaga

SEQ ID NO: 22402 - DNA, 25 bp, Saccharomyces pastorianus
gtaggcaccatgaacgcattctttg

SEQ ID NO: 22403 - DNA, 25 bp, Saccharomyces pastorianus
aattgggcgccaactatgctccttg

SEQ ID NO: 22404 - DNA, 25 bp, Saccharomyces pastorianus
aatttcagaagtttccacggccgca

SEQ ID NO: 22405 - DNA, 25 bp, Saccharomyces pastorianus
aggctactacgagcactaacgtcaa

SEQ ID NO: 22406 - DNA, 25 bp, Saccharomyces pastorianus
gtttgttccactgtgattgcaccaa

SEQ ID NO: 22407 - DNA, 25 bp, Saccharomyces pastorianus
ctaaggctgctatgaccaccgacgt

SEQ ID NO: 22408 - DNA, 25 bp, Saccharomyces pastorianus
actactataactagctgcgcaggtg

SEQ ID NO: 22409 - DNA, 25 bp, Saccharomyces pastorianus
atgccttccgcaattgaaactacca

SEQ ID NO: 22410 - DNA, 25 bp, Saccharomyces pastorianus
atctgcttcccatgctattgatatc

SEQ ID NO: 22411 - DNA, 25 bp, Saccharomyces pastorianus
accgacgtcactgttactagttgca

SEQ ID NO: 22412 - DNA, 25 bp, Saccharomyces pastorianus
aaactaccataaccagctgttcggc

SEQ ID NO: 22413 - DNA, 25 bp, Saccharomyces pastorianus
gctccaatcactactgtcagtatcg

SEQ ID NO: 22414 - DNA, 25 bp, Saccharomyces pastorianus
gggctggcacatcgaccaagacaga

SEQ ID NO: 22415 - DNA, 25 bp, Saccharomyces pastorianus
attaatgggactgcctactggtgct

SEQ ID NO: 22416 - DNA, 25 bp, Saccharomyces pastorianus
tgctatgccgttatgatcgtgcttt

SEQ ID NO: 22417 - DNA, 25 bp, Saccharomyces pastorianus
gtgtcctttccaatattagtgctaa

SEQ ID NO: 22418 - DNA, 25 bp, Saccharomyces pastorianus
tagctgctgaaagaggttaccccga

SEQ ID NO: 22419 - DNA, 25 bp, Saccharomyces pastorianus
tgttgaactagttgggtgcccgctt

SEQ ID NO: 22420 - DNA, 25 bp, Saccharomyces pastorianus
ctggctggtgcctacttatggtata

SEQ ID NO: 22421 - DNA, 25 bp, Saccharomyces pastorianus
gtattctggccgtatacgcagctaa

SEQ ID NO: 22422 - DNA, 25 bp, Saccharomyces pastorianus
atatctcccctgtttcgtttatttg

SEQ ID NO: 22423 - DNA, 25 bp, Saccharomyces pastorianus
tagtgctaactcttcaggctacagt

SEQ ID NO: 22424 - DNA, 25 bp, Saccharomyces pastorianus
caaggttgccatggtcgtttgctat

SEQ ID NO: 22425 - DNA, 25 bp, Saccharomyces pastorianus
aatttggctgcatatgctgctgcca

SEQ ID NO: 22426 - DNA, 25 bp, Saccharomyces pastorianus
gtagctctactaatgttttgattca

SEQ ID NO: 22427 - DNA, 25 bp, Saccharomyces pastorianus
aacggtcactggtggagttcctatt

SEQ ID NO: 22428 - DNA, 25 bp, Saccharomyces pastorianus
ccggtacaaccatcaaattcctcaa

SEQ ID NO: 22429 - DNA, 25 bp, Saccharomyces pastorianus
ttcagggatgtaccgtctataacca

SEQ ID NO: 22430 - DNA, 25 bp, Saccharomyces pastorianus
atgcgtttgacgtgggtagctctac

SEQ ID NO: 22431 - DNA, 25 bp, Saccharomyces pastorianus
agattttggttgagaatgcttccga

SEQ ID NO: 22432 - DNA, 25 bp, Saccharomyces pastorianus
ggtgattctgcaggtggccataaca

SEQ ID NO: 22433 - DNA, 25 bp, Saccharomyces pastorianus
gtggccgttcagataatgtcgtcaa

SEQ ID NO: 22434 - DNA, 25 bp, Saccharomyces pastorianus
gacgactgtattgccgtaaattccg

SEQ ID NO: 22435 - DNA, 25 bp, Saccharomyces pastorianus
gtctgggaattcaatcaccggtggt

SEQ ID NO: 22436 - DNA, 25 bp, Saccharomyces pastorianus
gaaggtgcaacaggctcagttaaaa

SEQ ID NO: 22437 - DNA, 25 bp, Saccharomyces pastorianus
gggtgcaacaggttcagtttcgaat

SEQ ID NO: 22438 - DNA, 25 bp, Saccharomyces pastorianus
atgttgtcaacggtttctgggccca

SEQ ID NO: 22439 - DNA, 25 bp, Saccharomyces pastorianus
gggcagttccaccaatgttgtaatc

SEQ ID NO: 22440 - DNA, 25 bp, Saccharomyces pastorianus
aacggtcacggtatctctataggct

SEQ ID NO: 22441 - DNA, 25 bp, Saccharomyces pastorianus
tggccacaacacagacgcgtttgat

SEQ ID NO: 22442 - DNA, 25 bp, Saccharomyces pastorianus
atcagtggtgtaaccgttgacgtca

SEQ ID NO: 22443 - DNA, 25 bp, Saccharomyces pastorianus
tcaaagctggtgactccgccggtgg

SEQ ID NO: 22444 - DNA, 25 bp, Saccharomyces pastorianus
gacgcgtttgatgtgggcagttcca

SEQ ID NO: 22445 - DNA, 25 bp, Saccharomyces pastorianus
ggtggccgttccgacaatgttgtca

SEQ ID NO: 22446 - DNA, 25 bp, Saccharomyces pastorianus
gtaaaaccactggttctgccactgg

SEQ ID NO: 22447 - DNA, 25 bp, Saccharomyces pastorianus
gactgtatcgccgtaaactctggta

SEQ ID NO: 22448 - DNA, 25 bp, Saccharomyces pastorianus
tgtcaactctatcaacagtgtaggt

SEQ ID NO: 22449 - DNA, 25 bp, Saccharomyces pastorianus
taggtattaaattgcctccttattt

SEQ ID NO: 22450 - DNA, 25 bp, Saccharomyces pastorianus
tcctggtaaaccacaagtcgcttat

SEQ ID NO: 22451 - DNA, 25 bp, Saccharomyces pastorianus
acagagctaaacttgtcatgtccaa

SEQ ID NO: 22452 - DNA, 25 bp, Saccharomyces pastorianus
gtcgcttatgattttgacttaacta

SEQ ID NO: 22453 - DNA, 25 bp, Saccharomyces pastorianus
gtcatgtccaaatgttcctggtaaa

SEQ ID NO: 22454 - DNA, 25 bp, Saccharomyces pastorianus
aaatgagttcccattagcctatgtc

SEQ ID NO: 22455 - DNA, 25 bp, Saccharomyces pastorianus
acttgctaatgttcgtgcgttttac

SEQ ID NO: 22456 - DNA, 25 bp, Saccharomyces pastorianus
ggtaatggtctctttatcgatgtag

SEQ ID NO: 22457 - DNA, 25 bp, Saccharomyces pastorianus
aagccaaccgcacttgctaatgttc

SEQ ID NO: 22458 - DNA, 25 bp, Saccharomyces pastorianus
ggtgaatacgtcaagccaaccgcac

SEQ ID NO: 22459 - DNA, 25 bp, Saccharomyces pastorianus
ccaggctgggatttgggtcttccga

SEQ ID NO: 22460 - DNA, 25 bp, Saccharomyces pastorianus
ggaagactcagtagaccacaaggta

SEQ ID NO: 22461 - DNA, 25 bp, Saccharomyces pastorianus
gtcttccgatccagcggtaaggtca

SEQ ID NO: 22462 - DNA, 25 bp, Saccharomyces pastorianus
ggtcaggagacagcttttatccaca

SEQ ID NO: 22463 - DNA, 25 bp, Saccharomyces pastorianus
ggtgccccagtattttcgaagattt

SEQ ID NO: 22464 - DNA, 25 bp, Saccharomyces pastorianus
gtaacacacctacttctgttgaagc

SEQ ID NO: 22465 - DNA, 25 bp, Saccharomyces pastorianus
gccaaaagcctagcagagtctctaa

SEQ ID NO: 22466 - DNA, 25 bp, Saccharomyces pastorianus
gacgtttccgattacactcttgatg

SEQ ID NO: 22467 - DNA, 25 bp, Saccharomyces pastorianus
gatcgggtagccattactgccaaaa

SEQ ID NO: 22468 - DNA, 25 bp, Saccharomyces pastorianus
agacagccggtccaagaacgtagta

SEQ ID NO: 22469 - DNA, 25 bp, Saccharomyces pastorianus
aggaagagccacctttgcccaagag

SEQ ID NO: 22470 - DNA, 25 bp, Saccharomyces pastorianus
gttgccgtagccacattaattttca

SEQ ID NO: 22471 - DNA, 25 bp, Saccharomyces pastorianus
gaacttttgccaattatagccgacg

SEQ ID NO: 22472 - DNA, 25 bp, Saccharomyces pastorianus
gaagccgcatatagactttccatgg

SEQ ID NO: 22473 - DNA, 25 bp, Saccharomyces pastorianus
ttatctactgtcgagcctacgttaa

SEQ ID NO: 22474 - DNA, 25 bp, Saccharomyces pastorianus
tagccatgctaactgtgcgtatctt

SEQ ID NO: 22475 - DNA, 25 bp, Saccharomyces pastorianus
tagccgacgctatgaacaccaagta

SEQ ID NO: 22476 - DNA, 25 bp, Saccharomyces pastorianus
gagctgttgctatcgtttgccaata

SEQ ID NO: 22477 - DNA, 25 bp, Saccharomyces pastorianus
gataccgaattctctcaagcatctg

SEQ ID NO: 22478 - DNA, 25 bp, Saccharomyces pastorianus
agagagaactctgacctggaacttt

SEQ ID NO: 22479 - DNA, 25 bp, Saccharomyces pastorianus
taaaacccctgcgtacgacatagtg

SEQ ID NO: 22480 - DNA, 25 bp, Saccharomyces pastorianus
gtggtgcgctacatgacatcgatga

SEQ ID NO: 22481 - DNA, 25 bp, Saccharomyces pastorianus
tccattactatcctcctatcaaaat

SEQ ID NO: 22482 - DNA, 25 bp, Saccharomyces pastorianus
atgtggcttctatcaagtcaccgtt

SEQ ID NO: 22483 - DNA, 25 bp, Saccharomyces pastorianus
gaattcggcgtcacgttattaccaa

SEQ ID NO: 22484 - DNA, 25 bp, Saccharomyces pastorianus
ggtaccggtgccttgaagactgatt

SEQ ID NO: 22485 - DNA, 25 bp, Saccharomyces pastorianus
tttgcgcagcaataaccgttttagg

SEQ ID NO: 22486 - DNA, 25 bp, Saccharomyces pastorianus
tgggttcttagtcgttcaccaaaca

SEQ ID NO: 22487 - DNA, 25 bp, Saccharomyces pastorianus
ggcgctgtcaaccaagtttttgttc

SEQ ID NO: 22488 - DNA, 25 bp, Saccharomyces pastorianus
gatgcagtcagtgtcgcttactcag

SEQ ID NO: 22489 - DNA, 25 bp, Saccharomyces pastorianus
gccacgattttcttccctaaggata

SEQ ID NO: 22490 - DNA, 25 bp, Saccharomyces pastorianus
tcattcctgctgagaccacgtggga

SEQ ID NO: 22491 - DNA, 25 bp, Saccharomyces pastorianus
aatatgttgtatttcgcgggtgccg

SEQ ID NO: 22492 - DNA, 25 bp, Saccharomyces pastorianus
ggacatggaacctcttgttgaagta

SEQ ID NO: 22493 - DNA, 25 bp, Saccharomyces pastorianus
aggacactcttttgatcgcactttc

SEQ ID NO: 22494 - DNA, 25 bp, Saccharomyces pastorianus
gaatcctagatttgaagttctcccc

SEQ ID NO: 22495 - DNA, 25 bp, Saccharomyces pastorianus
acgggtcgctacaggatttggccaa

SEQ ID NO: 22496 - DNA, 25 bp, Saccharomyces pastorianus
ggaatctactccaaaggacactctt

SEQ ID NO: 22497 - DNA, 25 bp, Saccharomyces pastorianus
tccgtactgactgaacctcactggt

SEQ ID NO: 22498 - DNA, 25 bp, Saccharomyces pastorianus
aagggtcctatttgcctaaaggctg

SEQ ID NO: 22499 - DNA, 25 bp, Saccharomyces pastorianus
tgtcgccgctgaacaggctttgaaa

SEQ ID NO: 22500 - DNA, 25 bp, Saccharomyces pastorianus
ggacaccgttcttctcatagttaag

SEQ ID NO: 22501 - DNA, 25 bp, Saccharomyces pastorianus
ggagaggccttgtgtcctaagaaaa

SEQ ID NO: 22502 - DNA, 25 bp, Saccharomyces pastorianus
tgcttctccatcaaagggtcctatt

SEQ ID NO: 22503 - DNA, 25 bp, Saccharomyces pastorianus
aaggatgtccccacacatgtatcta

SEQ ID NO: 22504 - DNA, 25 bp, Saccharomyces pastorianus
aaattcattgcaggccgtatcattc

SEQ ID NO: 22505 - DNA, 25 bp, Saccharomyces pastorianus
gttttgttaatctagctttaccatt

SEQ ID NO: 22506 - DNA, 25 bp, Saccharomyces pastorianus
ataaccgcatgttccaactgtagag

SEQ ID NO: 22507 - DNA, 25 bp, Saccharomyces pastorianus
tatgcttcctttttccctcaaaaga

SEQ ID NO: 22508 - DNA, 25 bp, Saccharomyces pastorianus
tggtcaccggtctggtcaatttaga

SEQ ID NO: 22509 - DNA, 25 bp, Saccharomyces pastorianus
tatcattcctgccattgcaacgaca

SEQ ID NO: 22510 - DNA, 25 bp, Saccharomyces pastorianus
aatctatccatctctcagttggtca

SEQ ID NO: 22511 - DNA, 25 bp, Saccharomyces pastorianus
atgctttcatatggtgtttctctgc

SEQ ID NO: 22512 - DNA, 25 bp, Saccharomyces pastorianus
caacgacaacttctttggtcaccgg

SEQ ID NO: 22513 - DNA, 25 bp, Saccharomyces pastorianus
gtgtttctctgctttatgcttcctt

SEQ ID NO: 22514 - DNA, 25 bp, Saccharomyces pastorianus
ttattctgcccctcttgagcaagta

SEQ ID NO: 22515 - DNA, 25 bp, Saccharomyces pastorianus
taagcgagtttgttaggccgatatc

SEQ ID NO: 22516 - DNA, 25 bp, Saccharomyces pastorianus
tgtgcgcccgcacgagatatattcg

SEQ ID NO: 22517 - DNA, 25 bp, Saccharomyces pastorianus
gatcttttgtcgacacttcgtctta

SEQ ID NO: 22518 - DNA, 25 bp, Saccharomyces pastorianus
gacaagatacccgttgaccagcaga

SEQ ID NO: 22519 - DNA, 25 bp, Saccharomyces pastorianus
aaaggcctcaaactttccgcagcat

SEQ ID NO: 22520 - DNA, 25 bp, Saccharomyces pastorianus
ggttcacgccaacgagtttccaaga

SEQ ID NO: 22521 - DNA, 25 bp, Saccharomyces pastorianus
gtagcgccttagagttatttcacaa

SEQ ID NO: 22522 - DNA, 25 bp, Saccharomyces pastorianus
gtttctgcaatggatcacttcccaa

SEQ ID NO: 22523 - DNA, 25 bp, Saccharomyces pastorianus
tcaacaattggttacggttcacgcc

SEQ ID NO: 22524 - DNA, 25 bp, Saccharomyces pastorianus
tatgcatctgggactctttgagtgc

SEQ ID NO: 22525 - DNA, 25 bp, Saccharomyces pastorianus
cttcatcatgaaatgcgttccgata

SEQ ID NO: 22526 - DNA, 25 bp, Saccharomyces pastorianus
gagaactgttcctcgttaacaacaa

SEQ ID NO: 22527 - DNA, 25 bp, Saccharomyces pastorianus
aatatacctcccacaaatacagcta

SEQ ID NO: 22528 - DNA, 25 bp, Saccharomyces pastorianus
gtcattcaccaataattccgtcaca

SEQ ID NO: 22529 - DNA, 25 bp, Saccharomyces pastorianus
gaacgatttggtcacttacacgcca

SEQ ID NO: 22530 - DNA, 25 bp, Saccharomyces pastorianus
gaatgcgtgaaatacttgacccaaa

SEQ ID NO: 22531 - DNA, 25 bp, Saccharomyces pastorianus
aattttgcctgtcatattgaacgat

SEQ ID NO: 22532 - DNA, 25 bp, Saccharomyces pastorianus
gagcaacttcatcaaacgtttcgga

SEQ ID NO: 22533 - DNA, 25 bp, Saccharomyces pastorianus
aacgatggcatctgacctggcaaga

SEQ ID NO: 22534 - DNA, 25 bp, Saccharomyces pastorianus
tttcggaaacgggtcatgcttggat

SEQ ID NO: 22535 - DNA, 25 bp, Saccharomyces pastorianus
agtggttaccgattcctatagagat

SEQ ID NO: 22536 - DNA, 25 bp, Saccharomyces pastorianus
gaaactggtattcaattgcccgtaa

SEQ ID NO: 22537 - DNA, 25 bp, Saccharomyces pastorianus
agctacctccgtggaaaacctatgc

SEQ ID NO: 22538 - DNA, 25 bp, Saccharomyces pastorianus
ggaagtttccgtatcacctgtgaaa

SEQ ID NO: 22539 - DNA, 25 bp, Saccharomyces pastorianus
aggactgggtgatcgacatcctagt

SEQ ID NO: 22540 - DNA, 25 bp, Saccharomyces pastorianus
ttcaacaagctacctccgtggaaaa

SEQ ID NO: 22541 - DNA, 25 bp, Saccharomyces pastorianus
tgaaaaggtgccgtttaggttgact

SEQ ID NO: 22542 - DNA, 25 bp, Saccharomyces pastorianus
cagcgatttggatgtgccggagcaa

SEQ ID NO: 22543 - DNA, 25 bp, Saccharomyces pastorianus
ggttgactaggatgctaacttatgc

SEQ ID NO: 22544 - DNA, 25 bp, Saccharomyces pastorianus
ttgcccgtaatgaacgccaatgagt

SEQ ID NO: 22545 - DNA, 25 bp, Saccharomyces pastorianus
ggattcattgatggccatcctcgaa

SEQ ID NO: 22546 - DNA, 25 bp, Saccharomyces pastorianus
gactgggtatattctaggactgggt

SEQ ID NO: 22547 - DNA, 25 bp, Saccharomyces pastorianus
gagtacttggtagcacatcccgagg

SEQ ID NO: 22548 - DNA, 25 bp, Saccharomyces pastorianus
gtcaggccagcttatactcttttga

SEQ ID NO: 22549 - DNA, 25 bp, Saccharomyces pastorianus
ttttttgctgagacggttgcttcca

SEQ ID NO: 22550 - DNA, 25 bp, Saccharomyces pastorianus
accagtgctggccaaagacaaagta

SEQ ID NO: 22551 - DNA, 25 bp, Saccharomyces pastorianus
attacatcggtgtgttccgctctgg

SEQ ID NO: 22552 - DNA, 25 bp, Saccharomyces pastorianus
tgataaggaataccccgtcaggcca

SEQ ID NO: 22553 - DNA, 25 bp, Saccharomyces pastorianus
agtaagtaccaagacccttcacagg

SEQ ID NO: 22554 - DNA, 25 bp, Saccharomyces pastorianus
acccttcacaggctgatgcgatcat

SEQ ID NO: 22555 - DNA, 25 bp, Saccharomyces pastorianus
acggttgcttccagaaccagtgctg

SEQ ID NO: 22556 - DNA, 25 bp, Saccharomyces pastorianus
tattggccacgtttacgctaggagc

SEQ ID NO: 22557 - DNA, 25 bp, Saccharomyces pastorianus
gaatgggccgatgttactgagacaa

SEQ ID NO: 22558 - DNA, 25 bp, Saccharomyces pastorianus
aggttgccaccattcagttagactt

SEQ ID NO: 22559 - DNA, 25 bp, Saccharomyces pastorianus
atcatgattcacagagccacttttg

SEQ ID NO: 22560 - DNA, 25 bp, Saccharomyces pastorianus
attctggctaaacccttaccaagca

SEQ ID NO: 22561 - DNA, 25 bp, Saccharomyces pastorianus
taatcgattcaaacgagggccgctg

SEQ ID NO: 22562 - DNA, 25 bp, Saccharomyces pastorianus
agggccgctggccattctggctaaa

SEQ ID NO: 22563 - DNA, 25 bp, Saccharomyces pastorianus
gcgaatgatatggagcctgttgctt

SEQ ID NO: 22564 - DNA, 25 bp, Saccharomyces pastorianus
gttagacttccaactacctgagaga

SEQ ID NO: 22565 - DNA, 25 bp, Saccharomyces pastorianus
tgggtaaaacccatcaggttgccac

SEQ ID NO: 22566 - DNA, 25 bp, Saccharomyces pastorianus
agccacttttggctccattgaaaga

SEQ ID NO: 22567 - DNA, 25 bp, Saccharomyces pastorianus
ggcacttcagtgctgatttagacat

SEQ ID NO: 22568 - DNA, 25 bp, Saccharomyces pastorianus
gatggtgccttttatggtcctaaac

SEQ ID NO: 22569 - DNA, 25 bp, Saccharomyces pastorianus
actaactatgaatctgcctccatct

SEQ ID NO: 22570 - DNA, 25 bp, Saccharomyces pastorianus
gggcctcattcaaccagatagacca

SEQ ID NO: 22571 - DNA, 25 bp, Saccharomyces pastorianus
aaaaccttgaccatctgtctcagtt

SEQ ID NO: 22572 - DNA, 25 bp, Saccharomyces pastorianus
gagctttacttatcacacaacttca

SEQ ID NO: 22573 - DNA, 25 bp, Saccharomyces pastorianus
gttaaccgacatatgggcctcattc

SEQ ID NO: 22574 - DNA, 25 bp, Saccharomyces pastorianus
aaatctgtcctctttgaagtcgctg

SEQ ID NO: 22575 - DNA, 25 bp, Saccharomyces pastorianus
gaacttgtccaatttgtcacgtttg

SEQ ID NO: 22576 - DNA, 25 bp, Saccharomyces pastorianus
atcgaacaaactcacctcgttggaa

SEQ ID NO: 22577 - DNA, 25 bp, Saccharomyces pastorianus
agccgactctttcgaaggcttgagt

SEQ ID NO: 22578 - DNA, 25 bp, Saccharomyces pastorianus
ttaaccactctggatgtcacatcga

SEQ ID NO: 22579 - DNA, 25 bp, Saccharomyces pastorianus
atcaacctacatcccttacataatt

SEQ ID NO: 22580 - DNA, 25 bp, Saccharomyces pastorianus
gagccaagatcaggtctctcaaaga

SEQ ID NO: 22581 - DNA, 25 bp, Saccharomyces pastorianus
agttatcgacgtcatcaaggccttc

SEQ ID NO: 22582 - DNA, 25 bp, Saccharomyces pastorianus
aaaggttctactccgccaacttgag

SEQ ID NO: 22583 - DNA, 25 bp, Saccharomyces pastorianus
gagaagcgtgggtgaaaccgtcaac

SEQ ID NO: 22584 - DNA, 25 bp, Saccharomyces pastorianus
atctgcaaaatttcgtcccgcatgg

SEQ ID NO: 22585 - DNA, 25 bp, Saccharomyces pastorianus
catcaaggccttcgacaagaactcc

SEQ ID NO: 22586 - DNA, 25 bp, Saccharomyces pastorianus
cttggacaccgtcgagttgctcgtg

SEQ ID NO: 22587 - DNA, 25 bp, Saccharomyces pastorianus
gcatcgccaacaaacagatctcaag

SEQ ID NO: 22588 - DNA, 25 bp, Saccharomyces pastorianus
cgagttgctcgtggccattgaagaa

SEQ ID NO: 22589 - DNA, 25 bp, Saccharomyces pastorianus
gatctcaagcgacactcaatttcac

SEQ ID NO: 22590 - DNA, 25 bp, Saccharomyces pastorianus
atactcgcacaaaggttctactccg

SEQ ID NO: 22591 - DNA, 25 bp, Saccharomyces pastorianus
gaagacgatcgctccaagcagctga

SEQ ID NO: 22592 - DNA, 25 bp, Saccharomyces pastorianus
aaggccactacgagcgctaacgcat

SEQ ID NO: 22593 - DNA, 25 bp, Saccharomyces pastorianus
ggatcgtggacttcaaagacgccat

SEQ ID NO: 22594 - DNA, 25 bp, Saccharomyces pastorianus
tacagaaccgttcgtggaagggcct

SEQ ID NO: 22595 - DNA, 25 bp, Saccharomyces pastorianus
tatatggtgcattctcggctgcaac

SEQ ID NO: 22596 - DNA, 25 bp, Saccharomyces pastorianus
tttacaagccgatcatcacaccgta

SEQ ID NO: 22597 - DNA, 25 bp, Saccharomyces pastorianus
aagggcctgggcagcgacttcgact

SEQ ID NO: 22598 - DNA, 25 bp, Saccharomyces pastorianus
agaagcactaccttttcgtggtcgg

SEQ ID NO: 22599 - DNA, 25 bp, Saccharomyces pastorianus
ttcccacagtgacgagccagagttt

SEQ ID NO: 22600 - DNA, 25 bp, Saccharomyces pastorianus
cgggcaaatacaccagcacatcaag

SEQ ID NO: 22601 - DNA, 25 bp, Saccharomyces pastorianus
aagggcacagtatccacttctgcgg

SEQ ID NO: 22602 - DNA, 25 bp, Saccharomyces pastorianus
attctccggaaaatctaaagcttat

SEQ ID NO: 22603 - DNA, 25 bp, Saccharomyces pastorianus
gaaattgattccttaccacgcataa

SEQ ID NO: 22604 - DNA, 25 bp, Saccharomyces pastorianus
agacaaagcaccaagctgctggcct

SEQ ID NO: 22605 - DNA, 25 bp, Saccharomyces pastorianus
gtatcaacaaactaatggctcacgg

SEQ ID NO: 22606 - DNA, 25 bp, Saccharomyces pastorianus
ttaagcgctgcattcactacacatc

SEQ ID NO: 22607 - DNA, 25 bp, Saccharomyces pastorianus
aagattctactttccttgatgagag

SEQ ID NO: 22608 - DNA, 25 bp, Saccharomyces pastorianus
tttaaactcgccatcctcagtaata

SEQ ID NO: 22609 - DNA, 25 bp, Saccharomyces pastorianus
acgcataatttcatcgacgacagac

SEQ ID NO: 22610 - DNA, 25 bp, Saccharomyces pastorianus
gaatctctacaaatcttaagcgctg

SEQ ID NO: 22611 - DNA, 25 bp, Saccharomyces pastorianus
ctgctggcctctttaatcgtgataa

SEQ ID NO: 22612 - DNA, 25 bp, Saccharomyces pastorianus
acacatcccaagttagtctctaagg

SEQ ID NO: 22613 - DNA, 25 bp, Saccharomyces pastorianus
aagcatgatgttgtcgtcggcgatt

SEQ ID NO: 22614 - DNA, 25 bp, Saccharomyces pastorianus
gacgaattctttcctgtgggttgtg

SEQ ID NO: 22615 - DNA, 25 bp, Saccharomyces pastorianus
gacaagagccacatatccgtataaa

SEQ ID NO: 22616 - DNA, 25 bp, Saccharomyces pastorianus
gtctgccgctactcaatttaacggt

SEQ ID NO: 22617 - DNA, 25 bp, Saccharomyces pastorianus
ataggtggcggattccaattcgaat

SEQ ID NO: 22618 - DNA, 25 bp, Saccharomyces pastorianus
taatctgggcgcctatacttcgtct

SEQ ID NO: 22619 - DNA, 25 bp, Saccharomyces pastorianus
ggcgttcactttagcaactcacata

SEQ ID NO: 22620 - DNA, 25 bp, Saccharomyces pastorianus
gccgacctcgaacctgtcaataaga

SEQ ID NO: 22621 - DNA, 25 bp, Saccharomyces pastorianus
acaacttgccgcctttgaagatttt

SEQ ID NO: 22622 - DNA, 25 bp, Saccharomyces pastorianus
gtagatactttgtggccacggcgtt

SEQ ID NO: 22623 - DNA, 25 bp, Saccharomyces pastorianus
aagcgcctcacccaaagactttata

SEQ ID NO: 22624 - DNA, 25 bp, Saccharomyces pastorianus
tgatgtctctccaatttttgccgaa

SEQ ID NO: 22625 - DNA, 25 bp, Saccharomyces pastorianus
taacggtcacgttatcggcgacgac

SEQ ID NO: 22626 - DNA, 25 bp, Saccharomyces pastorianus
acaccatcgttgtcactaacacata

SEQ ID NO: 22627 - DNA, 25 bp, Saccharomyces pastorianus
ttagtgcagccgaacatctggtcca

SEQ ID NO: 22628 - DNA, 25 bp, Saccharomyces pastorianus
agaaggtttatgttgtcgccaccca

SEQ ID NO: 22629 - DNA, 25 bp, Saccharomyces pastorianus
taggcggtacatacgacgctgtcga

SEQ ID NO: 22630 - DNA, 25 bp, Saccharomyces pastorianus
gtgagcttcattctatcgacgtcat

SEQ ID NO: 22631 - DNA, 25 bp, Saccharomyces pastorianus
gacgccattttggaatctgacggtg

SEQ ID NO: 22632 - DNA, 25 bp, Saccharomyces pastorianus
atagaccgggctctttcattagtgc

SEQ ID NO: 22633 - DNA, 25 bp, Saccharomyces pastorianus
gtcgttccgccattattctagatga

SEQ ID NO: 22634 - DNA, 25 bp, Saccharomyces pastorianus
gtcgccacccatggtatatttactg

SEQ ID NO: 22635 - DNA, 25 bp, Saccharomyces pastorianus
tgacatcaaggcaccgattccgagt

SEQ ID NO: 22636 - DNA, 25 bp, Saccharomyces pastorianus
atttctacagctgcgtttaatgcct

SEQ ID NO: 22637 - DNA, 25 bp, Saccharomyces pastorianus
taatgccttcataggagccgcggta

SEQ ID NO: 22638 - DNA, 25 bp, Saccharomyces pastorianus
gcaggttcccgtgactttcaaaacg

SEQ ID NO: 22639 - DNA, 25 bp, Saccharomyces pastorianus
ggttgcctttagctgatgacatcaa

SEQ ID NO: 22640 - DNA, 25 bp, Saccharomyces pastorianus
gcgatcactggtctctatttcaagt

SEQ ID NO: 22641 - DNA, 25 bp, Saccharomyces pastorianus
ggtattgtgtctctgttccgcaact

SEQ ID NO: 22642 - DNA, 25 bp, Saccharomyces pastorianus
tctatggtttccgtttgtctgccaa

SEQ ID NO: 22643 - DNA, 25 bp, Saccharomyces pastorianus
gggccattcggagtgcacctgtgaa

SEQ ID NO: 22644 - DNA, 25 bp, Saccharomyces pastorianus
ttccgcaactttcattcctttggtt

SEQ ID NO: 22645 - DNA, 25 bp, Saccharomyces pastorianus
atattttgtatcctggcgatcactg

SEQ ID NO: 22646 - DNA, 25 bp, Saccharomyces pastorianus
tatctgtcacgcaattgtggtaaga

SEQ ID NO: 22647 - DNA, 25 bp, Saccharomyces pastorianus
acgatggctgtgtagatagaacctt

SEQ ID NO: 22648 - DNA, 25 bp, Saccharomyces pastorianus
aaaaggctctccgaaaagccctgca

SEQ ID NO: 22649 - DNA, 25 bp, Saccharomyces pastorianus
aaagccctgcaatagtcggagatag

SEQ ID NO: 22650 - DNA, 25 bp, Saccharomyces pastorianus
tggcgaacctctcggaacaagaatt

SEQ ID NO: 22651 - DNA, 25 bp, Saccharomyces pastorianus
gaaggatggctctatggtcgcattt

SEQ ID NO: 22652 - DNA, 25 bp, Saccharomyces pastorianus
gattaataagaacactggcgaacct

SEQ ID NO: 22653 - DNA, 25 bp, Saccharomyces pastorianus
aattcaggagctcaattagcagagt

SEQ ID NO: 22654 - DNA, 25 bp, Saccharomyces pastorianus
ggaacagccaatactaatcgtgtaa

SEQ ID NO: 22655 - DNA, 25 bp, Saccharomyces pastorianus
ggtcgcatttggagacactgcctgt

SEQ ID NO: 22656 - DNA, 25 bp, Saccharomyces pastorianus
gagacactgcctgtgttttgattaa

SEQ ID NO: 22657 - DNA, 25 bp, Saccharomyces pastorianus
atacacactatgtgggaccccagat

SEQ ID NO: 22658 - DNA, 25 bp, Saccharomyces pastorianus
tcgttcctgatgtcacatacacact

SEQ ID NO: 22659 - DNA, 25 bp, Saccharomyces pastorianus
ttatacaccgttctacaactccaat

SEQ ID NO: 22660 - DNA, 25 bp, Saccharomyces pastorianus
gaagtggtcagcaccaagccatata

SEQ ID NO: 22661 - DNA, 25 bp, Saccharomyces pastorianus
ttccatccggatgcacaggacttat

SEQ ID NO: 22662 - DNA, 25 bp, Saccharomyces pastorianus
accacccgtggttcagcgaagtgat

SEQ ID NO: 22663 - DNA, 25 bp, Saccharomyces pastorianus
agaaacaccgtatgagccaccaatt

SEQ ID NO: 22664 - DNA, 25 bp, Saccharomyces pastorianus
ttgggtttgcaaaattcgttcctga

SEQ ID NO: 22665 - DNA, 25 bp, Saccharomyces pastorianus
gaggatattaagaaccacccgtggt

SEQ ID NO: 22666 - DNA, 25 bp, Saccharomyces pastorianus
tgcagaattgaagttcccgccattt

SEQ ID NO: 22667 - DNA, 25 bp, Saccharomyces pastorianus
gagccaccaattcaacagggtcaag

SEQ ID NO: 22668 - DNA, 25 bp, Saccharomyces pastorianus
atggatgagccctagtgagacagac

SEQ ID NO: 22669 - DNA, 25 bp, Saccharomyces pastorianus
gatcgagcccaacattattatcaat

SEQ ID NO: 22670 - DNA, 25 bp, Saccharomyces pastorianus
agtgagacagacacacgcacattgt

SEQ ID NO: 22671 - DNA, 25 bp, Saccharomyces pastorianus
ccacgcttaacagggtcgagccaga

SEQ ID NO: 22672 - DNA, 25 bp, Saccharomyces pastorianus
aagggtgtatttcatgacggacttc

SEQ ID NO: 22673 - DNA, 25 bp, Saccharomyces pastorianus
tacacgacccacgatttagtcagat

SEQ ID NO: 22674 - DNA, 25 bp, Saccharomyces pastorianus
gaaagaagcctcatctggaagacat

SEQ ID NO: 22675 - DNA, 25 bp, Saccharomyces pastorianus
attgactattcgtgcaaacttgcgt

SEQ ID NO: 22676 - DNA, 25 bp, Saccharomyces pastorianus
atattccagaacatcgactcttcac

SEQ ID NO: 22677 - DNA, 25 bp, Saccharomyces pastorianus
gtcagatactcttcataccataacg

SEQ ID NO: 22678 - DNA, 25 bp, Saccharomyces pastorianus
gtggaaccatactccgattcaatct

SEQ ID NO: 22679 - DNA, 25 bp, Saccharomyces pastorianus
ttcagatcaagagggcataagcacg

SEQ ID NO: 22680 - DNA, 25 bp, Saccharomyces pastorianus
cagtataggaactctttcatgcaag

SEQ ID NO: 22681 - DNA, 25 bp, Saccharomyces pastorianus
agaagtcaattctgggcgcggaagc

SEQ ID NO: 22682 - DNA, 25 bp, Saccharomyces pastorianus
agttcgtggcgaagtcgattctgat

SEQ ID NO: 22683 - DNA, 25 bp, Saccharomyces pastorianus
tagtgattggtttgatgctgtagaa

SEQ ID NO: 22684 - DNA, 25 bp, Saccharomyces pastorianus
ggtcagtctttccaaacgcgtataa

SEQ ID NO: 22685 - DNA, 25 bp, Saccharomyces pastorianus
agctggatacgaaattcaactgttt

SEQ ID NO: 22686 - DNA, 25 bp, Saccharomyces pastorianus
tcgctatcgcaaccggtggatgtat

SEQ ID NO: 22687 - DNA, 25 bp, Saccharomyces pastorianus
gaaaaatctgtatcatgcactctag

SEQ ID NO: 22688 - DNA, 25 bp, Saccharomyces pastorianus
tataaattcgctatcgcaaccggtg

SEQ ID NO: 22689 - DNA, 25 bp, Saccharomyces pastorianus
gcaagaggctagtccaaaagctgga

SEQ ID NO: 22690 - DNA, 25 bp, Saccharomyces pastorianus
gttcacagaaactggtcatgcttgt

SEQ ID NO: 22691 - DNA, 25 bp, Saccharomyces pastorianus
agctcaacctcgtcacaagccaatg

SEQ ID NO: 22692 - DNA, 25 bp, Saccharomyces pastorianus
accactcagtggctgttattgagaa

SEQ ID NO: 22693 - DNA, 25 bp, Saccharomyces pastorianus
gaaaactgtatagctcaacctcgtc

SEQ ID NO: 22694 - DNA, 25 bp, Saccharomyces pastorianus
aagccaatgccattaggtcgctgag

SEQ ID NO: 22695 - DNA, 25 bp, Saccharomyces pastorianus
gtcgctgagcatgagtgaaccctgt

SEQ ID NO: 22696 - DNA, 25 bp, Saccharomyces pastorianus
agtaaacgttcactgttcacagaaa

SEQ ID NO: 22697 - DNA, 25 bp, Saccharomyces pastorianus
taaacctattattgcgtactcgaga

SEQ ID NO: 22698 - DNA, 25 bp, Saccharomyces pastorianus
ggtcatgcttgtgcgaaatgccaaa

SEQ ID NO: 22699 - DNA, 25 bp, Saccharomyces pastorianus
tagcaagatccgtccttgttttaaa

SEQ ID NO: 22700 - DNA, 25 bp, Saccharomyces pastorianus
gggtgcctctcttgttagcaagatc

SEQ ID NO: 22701 - DNA, 25 bp, Saccharomyces pastorianus
ccgtcaagcgtaaaggtcatgtcat

SEQ ID NO: 22702 - DNA, 25 bp, Saccharomyces pastorianus
aaacttctggccacatcatgggata

SEQ ID NO: 22703 - DNA, 25 bp, Saccharomyces pastorianus
aaattactcctacttgattctccag

SEQ ID NO: 22704 - DNA, 25 bp, Saccharomyces pastorianus
acacaggatacttggccgcgcgtta

SEQ ID NO: 22705 - DNA, 25 bp, Saccharomyces pastorianus
gaggtcattttccaaacaagcttat

SEQ ID NO: 22706 - DNA, 25 bp, Saccharomyces pastorianus
tggacggtttcgaggtcattttcca

SEQ ID NO: 22707 - DNA, 25 bp, Saccharomyces pastorianus
gttggatcatcaggtgacgacacac

SEQ ID NO: 22708 - DNA, 25 bp, Saccharomyces pastorianus
atgtcatgatggacctatgtgcacc

SEQ ID NO: 22709 - DNA, 25 bp, Saccharomyces pastorianus
gattctccagagatcgcataaagat

SEQ ID NO: 22710 - DNA, 25 bp, Saccharomyces pastorianus
gcgttataaatgaccccgtcaagcg

SEQ ID NO: 22711 - DNA, 25 bp, Saccharomyces pastorianus
tataatgaccttgaagactctcttc

SEQ ID NO: 22712 - DNA, 25 bp, Saccharomyces pastorianus
gtaagaccgtcatggttgctgctca

SEQ ID NO: 22713 - DNA, 25 bp, Saccharomyces pastorianus
gatatcttatacacttctcaattgt

SEQ ID NO: 22714 - DNA, 25 bp, Saccharomyces pastorianus
tcaattgtctagagctatccaaact

SEQ ID NO: 22715 - DNA, 25 bp, Saccharomyces pastorianus
tatggatcccagtcaagagatcttg

SEQ ID NO: 22716 - DNA, 25 bp, Saccharomyces pastorianus
tcatggttgctgctcacggtaactc

SEQ ID NO: 22717 - DNA, 25 bp, Saccharomyces pastorianus
aatcgaagcttcttctccatactcc

SEQ ID NO: 22718 - DNA, 25 bp, Saccharomyces pastorianus
agaacgtccacccagatatcttata

SEQ ID NO: 22719 - DNA, 25 bp, Saccharomyces pastorianus
tgtcatcgccaaggacttattgagc

SEQ ID NO: 22720 - DNA, 25 bp, Saccharomyces pastorianus
aagacattacggtgctttgcaaggt

SEQ ID NO: 22721 - DNA, 25 bp, Saccharomyces pastorianus
aggtaaggacaaggccgctactttg

SEQ ID NO: 22722 - DNA, 25 bp, Saccharomyces pastorianus
gaaagatacagcttggttgacccaa

SEQ ID NO: 22723 - DNA, 25 bp, Saccharomyces pastorianus
acggcgaagtcggattcatttctaa

SEQ ID NO: 22724 - DNA, 25 bp, Saccharomyces pastorianus
caaaggaggacacccacctgtttgt

SEQ ID NO: 22725 - DNA, 25 bp, Saccharomyces pastorianus
ttaaccccttataccaattggctca

SEQ ID NO: 22726 - DNA, 25 bp, Saccharomyces pastorianus
gcgatcttgctcagaagggtcactt

SEQ ID NO: 22727 - DNA, 25 bp, Saccharomyces pastorianus
gagttcacatcttttcgaccttaag

SEQ ID NO: 22728 - DNA, 25 bp, Saccharomyces pastorianus
gggtcacttccaattagtcatcaag

SEQ ID NO: 22729 - DNA, 25 bp, Saccharomyces pastorianus
ggtgctggtacaggcattaacccct

SEQ ID NO: 22730 - DNA, 25 bp, Saccharomyces pastorianus
attcaagagcacattccaggcccaa

SEQ ID NO: 22731 - DNA, 25 bp, Saccharomyces pastorianus
atatacccctgtaagcgatcttgct

SEQ ID NO: 22732 - DNA, 25 bp, Saccharomyces pastorianus
gaaatggcaacctaactcgttcaag

SEQ ID NO: 22733 - DNA, 25 bp, Saccharomyces pastorianus
acgttgttagaccatatacccctgt

SEQ ID NO: 22734 - DNA, 25 bp, Saccharomyces pastorianus
gatggatttccaagtgtacagctga

SEQ ID NO: 22735 - DNA, 25 bp, Saccharomyces pastorianus
atatcggcaatcactcaccagctaa

SEQ ID NO: 22736 - DNA, 25 bp, Saccharomyces pastorianus
ttcccaatatcggtctttgcattac

SEQ ID NO: 22737 - DNA, 25 bp, Saccharomyces pastorianus
gatggctcttcctatatcagtgtca

SEQ ID NO: 22738 - DNA, 25 bp, Saccharomyces pastorianus
atcagtgtcacatttcgagccattg

SEQ ID NO: 22739 - DNA, 25 bp, Saccharomyces pastorianus
aattccgccagatcaatttcatcgc

SEQ ID NO: 22740 - DNA, 25 bp, Saccharomyces pastorianus
gggtgttattatacgcctgaagaga

SEQ ID NO: 22741 - DNA, 25 bp, Saccharomyces pastorianus
tgccctactaggtagttgccaaaca

SEQ ID NO: 22742 - DNA, 25 bp, Saccharomyces pastorianus
gggcgaagaaactccacaaactgaa

SEQ ID NO: 22743 - DNA, 25 bp, Saccharomyces pastorianus
cgagccattgtgtttaagccatttt

SEQ ID NO: 22744 - DNA, 25 bp, Saccharomyces pastorianus
ggatttggtacgaattccgccagat

SEQ ID NO: 22745 - DNA, 25 bp, Saccharomyces pastorianus
cgtgttctcgagttgcaagtggcca

SEQ ID NO: 22746 - DNA, 25 bp, Saccharomyces pastorianus
aagtcgaggctttccatatcaatga

SEQ ID NO: 22747 - DNA, 25 bp, Saccharomyces pastorianus
gaaatactccaaatccgtctcaaag

SEQ ID NO: 22748 - DNA, 25 bp, Saccharomyces pastorianus
aagcatgatgtgaccgatttcgact

SEQ ID NO: 22749 - DNA, 25 bp, Saccharomyces pastorianus
gacgcattcaatgacgttgcccgtt

SEQ ID NO: 22750 - DNA, 25 bp, Saccharomyces pastorianus
gtctcaaagaagtcagggtccgcca

SEQ ID NO: 22751 - DNA, 25 bp, Saccharomyces pastorianus
gacgatgttatagcggcattgccaa

SEQ ID NO: 22752 - DNA, 25 bp, Saccharomyces pastorianus
ttgactcgaccgattttgccacaaa

SEQ ID NO: 22753 - DNA, 25 bp, Saccharomyces pastorianus
aaacgccgacggtgacattcctgac

SEQ ID NO: 22754 - DNA, 25 bp, Saccharomyces pastorianus
gagaccaccgacgaagagctttcaa

SEQ ID NO: 22755 - DNA, 25 bp, Saccharomyces pastorianus
agaagactcgtcaactccttgaaaa

SEQ ID NO: 22756 - DNA, 25 bp, Saccharomyces pastorianus
gttattgaaaccatccgtcttctca

SEQ ID NO: 22757 - DNA, 25 bp, Saccharomyces pastorianus
aactgggactcaacaaatctgcttt

SEQ ID NO: 22758 - DNA, 25 bp, Saccharomyces pastorianus
tttgctccacctcatctttgaagaa

SEQ ID NO: 22759 - DNA, 25 bp, Saccharomyces pastorianus
gaacaccaaggctgctattgccgag

SEQ ID NO: 22760 - DNA, 25 bp, Saccharomyces pastorianus
caaggtctctgattggtatcaccag

SEQ ID NO: 22761 - DNA, 25 bp, Saccharomyces pastorianus
ttatttgcgatccacttcggtgaca

SEQ ID NO: 22762 - DNA, 25 bp, Saccharomyces pastorianus
attctcttcggtgtttctggtctac

SEQ ID NO: 22763 - DNA, 25 bp, Saccharomyces pastorianus
aattgacctggtacctctcttctat

SEQ ID NO: 22764 - DNA, 25 bp, Saccharomyces pastorianus
gtgtatacagaaccggttacgccgt

SEQ ID NO: 22765 - DNA, 25 bp, Saccharomyces pastorianus
gggattctacttgttgaccattctc

SEQ ID NO: 22766 - DNA, 25 bp, Saccharomyces pastorianus
tagacacctgttttgggacgcggcc

SEQ ID NO: 22767 - DNA, 25 bp, Saccharomyces pastorianus
gcaaagtacacggaagctggttaat

SEQ ID NO: 22768 - DNA, 25 bp, Saccharomyces pastorianus
actgaggcagtataaccagcttgct

SEQ ID NO: 22769 - DNA, 25 bp, Saccharomyces pastorianus
gtataaccagcttgctcacgaactc

SEQ ID NO: 22770 - DNA, 25 bp, Saccharomyces pastorianus
agacattatgtcaaagcagagcaat

SEQ ID NO: 22771 - DNA, 25 bp, Saccharomyces pastorianus
gaactcaaggagctgcaaacaaatt

SEQ ID NO: 22772 - DNA, 25 bp, Saccharomyces pastorianus
gagcaatgagaatttggttaaccaa

SEQ ID NO: 22773 - DNA, 25 bp, Saccharomyces pastorianus
accagcttgctcacgaactcaagga

SEQ ID NO: 22774 - DNA, 25 bp, Saccharomyces pastorianus
ggagctgcaaacaaatttacaggaa

SEQ ID NO: 22775 - DNA, 25 bp, Saccharomyces pastorianus
aagctggttaattggtagttatatc

SEQ ID NO: 22776 - DNA, 25 bp, Saccharomyces pastorianus
taaccaattaggcaaagtacacgga

SEQ ID NO: 22777 - DNA, 25 bp, Saccharomyces pastorianus
ggaaacgacaagacaactagacatt

SEQ ID NO: 22778 - DNA, 25 bp, Saccharomyces pastorianus
tgataaaaaagccaccggttacagg

SEQ ID NO: 22779 - DNA, 25 bp, Saccharomyces pastorianus
ggtccatttaaattaacaagccctg

SEQ ID NO: 22780 - DNA, 25 bp, Saccharomyces pastorianus
caccggttacaggaagggtattcat

SEQ ID NO: 22781 - DNA, 25 bp, Saccharomyces pastorianus
aggcctacacgttcagagatgtcag

SEQ ID NO: 22782 - DNA, 25 bp, Saccharomyces pastorianus
aagggctgacttaccaagaagcctt

SEQ ID NO: 22783 - DNA, 25 bp, Saccharomyces pastorianus
tctgtctttcccaaggagagccaaa

SEQ ID NO: 22784 - DNA, 25 bp, Saccharomyces pastorianus
aatcagttaacattaggcctacacg

SEQ ID NO: 22785 - DNA, 25 bp, Saccharomyces pastorianus
gattattgaacaagccctctgtctt

SEQ ID NO: 22786 - DNA, 25 bp, Saccharomyces pastorianus
gaaaggcttagaaacgttgaccaag

SEQ ID NO: 22787 - DNA, 25 bp, Saccharomyces pastorianus
aatgtccacgcatcaaaaatgccgt

SEQ ID NO: 22788 - DNA, 25 bp, Saccharomyces pastorianus
ggagagccaaatgtcatccaaagac

SEQ ID NO: 22789 - DNA, 25 bp, Saccharomyces pastorianus
tgatccgttgatccgtacgcaagat

SEQ ID NO: 22790 - DNA, 25 bp, Saccharomyces pastorianus
gaaattaccgcccttacttgatccg

SEQ ID NO: 22791 - DNA, 25 bp, Saccharomyces pastorianus
ttcggatctgtggttggtatgcctt

SEQ ID NO: 22792 - DNA, 25 bp, Saccharomyces pastorianus
atacggcgatactccactaactttt

SEQ ID NO: 22793 - DNA, 25 bp, Saccharomyces pastorianus
ggccgaaaagcttacaccaattgga

SEQ ID NO: 22794 - DNA, 25 bp, Saccharomyces pastorianus
gcttaatatctgtcgactggccgaa

SEQ ID NO: 22795 - DNA, 25 bp, Saccharomyces pastorianus
gtttgtatttcgaagggccaactat

SEQ ID NO: 22796 - DNA, 25 bp, Saccharomyces pastorianus
tatcgtatgcgggtcactgtatctt

SEQ ID NO: 22797 - DNA, 25 bp, Saccharomyces pastorianus
aactatggcgcctgttatcgtatgc

SEQ ID NO: 22798 - DNA, 25 bp, Saccharomyces pastorianus
ggattcaatctttcgagccaatgca

SEQ ID NO: 22799 - DNA, 25 bp, Saccharomyces pastorianus
gcaattgccgtcttagatttcctga

SEQ ID NO: 22800 - DNA, 25 bp, Saccharomyces pastorianus
ttgtcagctgcatggcactctatct

SEQ ID NO: 22801 - DNA, 25 bp, Saccharomyces pastorianus
gaagatctgacgctaacgactgaat

SEQ ID NO: 22802 - DNA, 25 bp, Saccharomyces pastorianus
aagagttcgatgtcgtcgccactaa

SEQ ID NO: 22803 - DNA, 25 bp, Saccharomyces pastorianus
acgaatcgggttcagatgccgaccc

SEQ ID NO: 22804 - DNA, 25 bp, Saccharomyces pastorianus
agtcatttacgcagagtggccacgc

SEQ ID NO: 22805 - DNA, 25 bp, Saccharomyces pastorianus
atgccgaccctctggataaggtcat

SEQ ID NO: 22806 - DNA, 25 bp, Saccharomyces pastorianus
agtggccacgctacgattcgaaaga

SEQ ID NO: 22807 - DNA, 25 bp, Saccharomyces pastorianus
atagcttcgatgtttgtcaaatgcg

SEQ ID NO: 22808 - DNA, 25 bp, Saccharomyces pastorianus
aggtcatcttaccaatagcttcgat

SEQ ID NO: 22809 - DNA, 25 bp, Saccharomyces pastorianus
attgcgcattggcagcaacttgcta

SEQ ID NO: 22810 - DNA, 25 bp, Saccharomyces pastorianus
gaatttttctctttgtcagctgcat

SEQ ID NO: 22811 - DNA, 25 bp, Saccharomyces pastorianus
tcatgctaatgtttgctcgtatcgc

SEQ ID NO: 22812 - DNA, 25 bp, Saccharomyces pastorianus
ggtcattagccaccagacaacaatt

SEQ ID NO: 22813 - DNA, 25 bp, Saccharomyces pastorianus
aaacacttttatgctgcgttccagg

SEQ ID NO: 22814 - DNA, 25 bp, Saccharomyces pastorianus
aaagcgttgcttactgcttcagcat

SEQ ID NO: 22815 - DNA, 25 bp, Saccharomyces pastorianus
gttgcaagctatttgacttcgtggt

SEQ ID NO: 22816 - DNA, 25 bp, Saccharomyces pastorianus
agacatggtattttcagggacactg

SEQ ID NO: 22817 - DNA, 25 bp, Saccharomyces pastorianus
tcggtgcaagcaaacactgcgtcat

SEQ ID NO: 22818 - DNA, 25 bp, Saccharomyces pastorianus
gcgttccaggcattatgttacatat

SEQ ID NO: 22819 - DNA, 25 bp, Saccharomyces pastorianus
actgcgtcatcctcttggtcattag

SEQ ID NO: 22820 - DNA, 25 bp, Saccharomyces pastorianus
tcgtatcgcccaacaggaaagcgtt

SEQ ID NO: 22821 - DNA, 25 bp, Saccharomyces pastorianus
gtcgttgcaatacttgggatcttac

SEQ ID NO: 22822 - DNA, 25 bp, Saccharomyces pastorianus
tctatatcgtataaaccacccacac

SEQ ID NO: 22823 - DNA, 25 bp, Saccharomyces pastorianus
gcatctgtcctcgaactacaaattt

SEQ ID NO: 22824 - DNA, 25 bp, Saccharomyces pastorianus
atagcgttcgcctattcgaggtgaa

SEQ ID NO: 22825 - DNA, 25 bp, Saccharomyces pastorianus
aaaatgttgtcggtctggtcacttt

SEQ ID NO: 22826 - DNA, 25 bp, Saccharomyces pastorianus
taagaaaagcgaacctacggccacg

SEQ ID NO: 22827 - DNA, 25 bp, Saccharomyces pastorianus
gaggtgtatctgtaaccccaggcaa

SEQ ID NO: 22828 - DNA, 25 bp, Saccharomyces pastorianus
aagcccattgacaacttcatcatga

SEQ ID NO: 22829 - DNA, 25 bp, Saccharomyces pastorianus
tggtggctcttcagcttcgaagaag

SEQ ID NO: 22830 - DNA, 25 bp, Saccharomyces pastorianus
gattgcttagtgcattgggcccaag

SEQ ID NO: 22831 - DNA, 25 bp, Saccharomyces pastorianus
gcaaggtgccaatactgtgcagaat

SEQ ID NO: 22832 - DNA, 25 bp, Saccharomyces pastorianus
gaatccatctcagacactattttct

SEQ ID NO: 22833 - DNA, 25 bp, Saccharomyces pastorianus
gggccgcatgatattccgcaaagct

SEQ ID NO: 22834 - DNA, 25 bp, Saccharomyces pastorianus
gcaaagctctacctcggatccgaag

SEQ ID NO: 22835 - DNA, 25 bp, Saccharomyces pastorianus
agagccggtgctattttcaaaaact

SEQ ID NO: 22836 - DNA, 25 bp, Saccharomyces pastorianus
gaggcgaggattatttcacttgcac

SEQ ID NO: 22837 - DNA, 25 bp, Saccharomyces pastorianus
taattctacgttattcgggccgcat

SEQ ID NO: 22838 - DNA, 25 bp, Saccharomyces pastorianus
atcagggttcgattcgtgttttcag

SEQ ID NO: 22839 - DNA, 25 bp, Saccharomyces pastorianus
agttgacgaatttagcactgcccca

SEQ ID NO: 22840 - DNA, 25 bp, Saccharomyces pastorianus
gatccgaagctaaagtgcgacgttt

SEQ ID NO: 22841 - DNA, 25 bp, Saccharomyces pastorianus
aattccacgcttataactcgttcca

SEQ ID NO: 22842 - DNA, 25 bp, Saccharomyces pastorianus
ctgccccaccttcaaatgtagataa

SEQ ID NO: 22843 - DNA, 25 bp, Saccharomyces pastorianus
aggtaagtcgccaagagccggtgct

SEQ ID NO: 22844 - DNA, 25 bp, Saccharomyces pastorianus
gtcgttggttctccattgtttttag

SEQ ID NO: 22845 - DNA, 25 bp, Saccharomyces pastorianus
ggagttaacgttgtttctggtgcta

SEQ ID NO: 22846 - DNA, 25 bp, Saccharomyces pastorianus
tttctggtgctacctctggtataat

SEQ ID NO: 22847 - DNA, 25 bp, Saccharomyces pastorianus
ttgcccctcatacgatcatgtgttt

SEQ ID NO: 22848 - DNA, 25 bp, Saccharomyces pastorianus
ataattggtgccgtcgttggttctc

SEQ ID NO: 22849 - DNA, 25 bp, Saccharomyces pastorianus
tcaagtcttcagaattgcccctcat

SEQ ID NO: 22850 - DNA, 25 bp, Saccharomyces pastorianus
gatggaccagccttacatttaaccg

SEQ ID NO: 22851 - DNA, 25 bp, Saccharomyces pastorianus
aacgggctggtcacaattttcaaga

SEQ ID NO: 22852 - DNA, 25 bp, Saccharomyces pastorianus
gctgttcagaggtatcgatgccgct

SEQ ID NO: 22853 - DNA, 25 bp, Saccharomyces pastorianus
aaggtttcgtggctcaagtcttcag

SEQ ID NO: 22854 - DNA, 25 bp, Saccharomyces pastorianus
tcgatgccgctattcttagaacagg

SEQ ID NO: 22855 - DNA, 25 bp, Saccharomyces pastorianus
ttctgttgtcgtggctatttggtac

SEQ ID NO: 22856 - DNA, 25 bp, Saccharomyces pastorianus
gtgtttttacaagggcacgctgtcc

SEQ ID NO: 22857 - DNA, 25 bp, Saccharomyces pastorianus
aaataaacctatctcgtcacttcga

SEQ ID NO: 22858 - DNA, 25 bp, Saccharomyces pastorianus
gtccccattaattcactgctatttt

SEQ ID NO: 22859 - DNA, 25 bp, Saccharomyces pastorianus
tcttgtaagtgtcgtttctgttgtc

SEQ ID NO: 22860 - DNA, 25 bp, Saccharomyces pastorianus
tactggaccgggacctctacaaatt

SEQ ID NO: 22861 - DNA, 25 bp, Saccharomyces pastorianus
catgttcgtctcttattgtgtctat

SEQ ID NO: 22862 - DNA, 25 bp, Saccharomyces pastorianus
aaatttcccagtacatgttcgtctc

SEQ ID NO: 22863 - DNA, 25 bp, Saccharomyces pastorianus
actgttgacaccactcgaattcgaa

SEQ ID NO: 22864 - DNA, 25 bp, Saccharomyces pastorianus
atgatttgccctgctcaatgagaga

SEQ ID NO: 22865 - DNA, 25 bp, Saccharomyces pastorianus
gagcttacaccttcgcaaatcaata

SEQ ID NO: 22866 - DNA, 25 bp, Saccharomyces pastorianus
tggcgctcaaggcatggacttcagt

SEQ ID NO: 22867 - DNA, 25 bp, Saccharomyces pastorianus
tgccccagacttaactatcaaacca

SEQ ID NO: 22868 - DNA, 25 bp, Saccharomyces pastorianus
tttggaagccgaatactggccacgt

SEQ ID NO: 22869 - DNA, 25 bp, Saccharomyces pastorianus
gaacatgggcgatttccaagaaaat

SEQ ID NO: 22870 - DNA, 25 bp, Saccharomyces pastorianus
gtcgctaatggtcaacactatttct

SEQ ID NO: 22871 - DNA, 25 bp, Saccharomyces pastorianus
aattgctgactgtgatgccccagac

SEQ ID NO: 22872 - DNA, 25 bp, Saccharomyces pastorianus
tgaaggtaacgatgccgcccaaggc

SEQ ID NO: 22873 - DNA, 25 bp, Saccharomyces pastorianus
gtcggtgacgagactgttcatcatt

SEQ ID NO: 22874 - DNA, 25 bp, Saccharomyces pastorianus
atcaaagcctcatgtcggtgacgag

SEQ ID NO: 22875 - DNA, 25 bp, Saccharomyces pastorianus
aggtgccggctctccagatatggct

SEQ ID NO: 22876 - DNA, 25 bp, Saccharomyces pastorianus
ggtggagctcaaggcatggacttca

SEQ ID NO: 22877 - DNA, 25 bp, Saccharomyces pastorianus
tgagacagcgtagcagggccacgtc

SEQ ID NO: 22878 - DNA, 25 bp, Saccharomyces pastorianus
ggatcagaggactatgtgtctccag

SEQ ID NO: 22879 - DNA, 25 bp, Saccharomyces pastorianus
aggattcaccaatttactacaggca

SEQ ID NO: 22880 - DNA, 25 bp, Saccharomyces pastorianus
gaactagcggacttcggtctttgta

SEQ ID NO: 22881 - DNA, 25 bp, Saccharomyces pastorianus
gcccgtaacggtggcttagagttat

SEQ ID NO: 22882 - DNA, 25 bp, Saccharomyces pastorianus
tgacgagatttacgattccccgttc

SEQ ID NO: 22883 - DNA, 25 bp, Saccharomyces pastorianus
aaaggatctttgcagagttggctct

SEQ ID NO: 22884 - DNA, 25 bp, Saccharomyces pastorianus
gcctccaaacgcttcaatgagacag

SEQ ID NO: 22885 - DNA, 25 bp, Saccharomyces pastorianus
acaccgtatagctagattcgattgg

SEQ ID NO: 22886 - DNA, 25 bp, Saccharomyces pastorianus
gatacgtgggctttaggcgtcatat

SEQ ID NO: 22887 - DNA, 25 bp, Saccharomyces pastorianus
gataggttaccatttgatccgcctc

SEQ ID NO: 22888 - DNA, 25 bp, Saccharomyces pastorianus
gacaccgagctggtcttgagaggcc

SEQ ID NO: 22889 - DNA, 25 bp, Saccharomyces pastorianus
ggctgttatttctagaccctgaagt

SEQ ID NO: 22890 - DNA, 25 bp, Saccharomyces pastorianus
gagttcatcgagtctggcgagtcaa

SEQ ID NO: 22891 - DNA, 25 bp, Saccharomyces pastorianus
gagaggcctcgatttgaccatagaa

SEQ ID NO: 22892 - DNA, 25 bp, Saccharomyces pastorianus
gttggtccagtgaccgctttgaaac

SEQ ID NO: 22893 - DNA, 25 bp, Saccharomyces pastorianus
tggaaaatccctgaaaactggccct

SEQ ID NO: 22894 - DNA, 25 bp, Saccharomyces pastorianus
aaaagagcagttggctgccgcagcc

SEQ ID NO: 22895 - DNA, 25 bp, Saccharomyces pastorianus
ggacactctttgttacagaacgccc

SEQ ID NO: 22896 - DNA, 25 bp, Saccharomyces pastorianus
tattatgctcggttgtgactactgt

SEQ ID NO: 22897 - DNA, 25 bp, Saccharomyces pastorianus
gttcgttgacctttgtattatgctc

SEQ ID NO: 22898 - DNA, 25 bp, Saccharomyces pastorianus
aaagggctaaggtcaggcattcagg

SEQ ID NO: 22899 - DNA, 25 bp, Saccharomyces pastorianus
gacggatgctttttcgtggatctgc

SEQ ID NO: 22900 - DNA, 25 bp, Saccharomyces pastorianus
taaaagtctgacctcgattggcggg

SEQ ID NO: 22901 - DNA, 25 bp, Saccharomyces pastorianus
aaacagcggacacaatgacccattg

SEQ ID NO: 22902 - DNA, 25 bp, Saccharomyces pastorianus
taaaacccgcatctcaatccaattt

SEQ ID NO: 22903 - DNA, 25 bp, Saccharomyces pastorianus
ttcaaactctttgtccaccagaaac

SEQ ID NO: 22904 - DNA, 25 bp, Saccharomyces pastorianus
aatttcattcaagtcctcgatgtgg

SEQ ID NO: 22905 - DNA, 25 bp, Saccharomyces pastorianus
tccaccacgttctgcgtaattcaaa

SEQ ID NO: 22906 - DNA, 25 bp, Saccharomyces pastorianus
aacaatcgttgggattctccgcttt

SEQ ID NO: 22907 - DNA, 25 bp, Saccharomyces pastorianus
aatgtcgtcactttggcgcaattgc

SEQ ID NO: 22908 - DNA, 25 bp, Saccharomyces pastorianus
ctattctcactccacaggacaatat

SEQ ID NO: 22909 - DNA, 25 bp, Saccharomyces pastorianus
tggatctgcccatcggtaatgtcgt

SEQ ID NO: 22910 - DNA, 25 bp, Saccharomyces pastorianus
tgagttcggaaatcacgttggctga

SEQ ID NO: 22911 - DNA, 25 bp, Saccharomyces pastorianus
ttatctaccaagttcaagcacgcag

SEQ ID NO: 22912 - DNA, 25 bp, Saccharomyces pastorianus
ttgaatttgcccatcccagaagaac

SEQ ID NO: 22913 - DNA, 25 bp, Saccharomyces pastorianus
gaatttcctgttcattcaagaccag

SEQ ID NO: 22914 - DNA, 25 bp, Saccharomyces pastorianus
acagcttcattgatgacctcgatga

SEQ ID NO: 22915 - DNA, 25 bp, Saccharomyces pastorianus
tcgaacgtgaatctctatgacttaa

SEQ ID NO: 22916 - DNA, 25 bp, Saccharomyces pastorianus
aatggtgccactgctactaacgagt

SEQ ID NO: 22917 - DNA, 25 bp, Saccharomyces pastorianus
tacttgccgcccactttagaagaat

SEQ ID NO: 22918 - DNA, 25 bp, Saccharomyces pastorianus
aaattgctacctccaagtcgaacgt

SEQ ID NO: 22919 - DNA, 25 bp, Saccharomyces pastorianus
gaacccgtttcctctgaacaagaca

SEQ ID NO: 22920 - DNA, 25 bp, Saccharomyces pastorianus
gagttcgaccaaaacagcttcattg

SEQ ID NO: 22921 - DNA, 25 bp, Saccharomyces pastorianus
cgcgtatttgatgaggttgtgccta

SEQ ID NO: 22922 - DNA, 25 bp, Saccharomyces pastorianus
tatggttcccgtgtggttaacgtgg

SEQ ID NO: 22923 - DNA, 25 bp, Saccharomyces pastorianus
ctcagaggttgcattacgtcagaaa

SEQ ID NO: 22924 - DNA, 25 bp, Saccharomyces pastorianus
tatgtattcctctccaccaggttat

SEQ ID NO: 22925 - DNA, 25 bp, Saccharomyces pastorianus
gccactgccgatgacgaaaacttaa

SEQ ID NO: 22926 - DNA, 25 bp, Saccharomyces pastorianus
gtaatggtgtttttctttgtcaatc

SEQ ID NO: 22927 - DNA, 25 bp, Saccharomyces pastorianus
agatgtttgaacgtcttcgctggcc

SEQ ID NO: 22928 - DNA, 25 bp, Saccharomyces pastorianus
caaggtttagagtccggtgatatgc

SEQ ID NO: 22929 - DNA, 25 bp, Saccharomyces pastorianus
ttaagtgttatcacacccgccactg

SEQ ID NO: 22930 - DNA, 25 bp, Saccharomyces pastorianus
ggtgatatgctaaaggacgcgtatt

SEQ ID NO: 22931 - DNA, 25 bp, Saccharomyces pastorianus
tattgactacttgtgtgaagctctc

SEQ ID NO: 22932 - DNA, 25 bp, Saccharomyces pastorianus
gtcaatattattcccctgcaactaa

SEQ ID NO: 22933 - DNA, 25 bp, Saccharomyces pastorianus
ggaggttccacaaactgtcgactgt

SEQ ID NO: 22934 - DNA, 25 bp, Saccharomyces pastorianus
tgccttggtaatgtttgctttgtca

SEQ ID NO: 22935 - DNA, 25 bp, Saccharomyces pastorianus
tcgactgtctgcaaggcctagtcaa

SEQ ID NO: 22936 - DNA, 25 bp, Saccharomyces pastorianus
aaacatggtgttttggccctggtcg

SEQ ID NO: 22937 - DNA, 25 bp, Saccharomyces pastorianus
ttggccctggtcgatgaaaacttac

SEQ ID NO: 22938 - DNA, 25 bp, Saccharomyces pastorianus
aaggtattgacgttgactttccaag

SEQ ID NO: 22939 - DNA, 25 bp, Saccharomyces pastorianus
gtaccagagattctttgttccccaa

SEQ ID NO: 22940 - DNA, 25 bp, Saccharomyces pastorianus
taccaatttgctgccgccttagagg

SEQ ID NO: 22941 - DNA, 25 bp, Saccharomyces pastorianus
aaggtcgtttcctccatcgaacaag

SEQ ID NO: 22942 - DNA, 25 bp, Saccharomyces pastorianus
acacttctcagtatattgccttggt

SEQ ID NO: 22943 - DNA, 25 bp, Saccharomyces pastorianus
tttctgcttccagcactgaaaccat

SEQ ID NO: 22944 - DNA, 25 bp, Saccharomyces pastorianus
ccagcactgaaaccatttctcaaca

SEQ ID NO: 22945 - DNA, 25 bp, Saccharomyces pastorianus
gttgaaaccgtttctgcttccagca

SEQ ID NO: 22946 - DNA, 25 bp, Saccharomyces pastorianus
cgctttcgtcgccttggccaacttt

SEQ ID NO: 22947 - DNA, 25 bp, Saccharomyces pastorianus
tgcttccagcactgaaaccatttct

SEQ ID NO: 22948 - DNA, 25 bp, Saccharomyces pastorianus
tgctccatcttcttcccacgttgaa

SEQ ID NO: 22949 - DNA, 25 bp, Saccharomyces pastorianus
tgtcgtttccgtcgctttcgtcgcc

SEQ ID NO: 22950 - DNA, 25 bp, Saccharomyces pastorianus
actgaaaccatttctcaacaaactg

SEQ ID NO: 22951 - DNA, 25 bp, Saccharomyces pastorianus
atctgctgccgccatctctcaaatt

SEQ ID NO: 22952 - DNA, 25 bp, Saccharomyces pastorianus
aaccgtttctgcttccagcactgaa

SEQ ID NO: 22953 - DNA, 25 bp, Saccharomyces pastorianus
tcttcccacgttgaaaccgtttctg

SEQ ID NO: 22954 - DNA, 25 bp, Saccharomyces pastorianus
gatggttcctcttacatattctctt

SEQ ID NO: 22955 - DNA, 25 bp, Saccharomyces pastorianus
ggaaggttccgaaagcgacgctact

SEQ ID NO: 22956 - DNA, 25 bp, Saccharomyces pastorianus
tttaagcgctactgtcaccgatgac

SEQ ID NO: 22957 - DNA, 25 bp, Saccharomyces pastorianus
gttgtcagtgacgatggttccctaa

SEQ ID NO: 22958 - DNA, 25 bp, Saccharomyces pastorianus
attctcttccaagcaatctagcgac

SEQ ID NO: 22959 - DNA, 25 bp, Saccharomyces pastorianus
gctgcttctgtcatctctcaaatta

SEQ ID NO: 22960 - DNA, 25 bp, Saccharomyces pastorianus
ttcctctgggttctatgctgtcaaa

SEQ ID NO: 22961 - DNA, 25 bp, Saccharomyces pastorianus
tagcgacgctactggtattgccatc

SEQ ID NO: 22962 - DNA, 25 bp, Saccharomyces pastorianus
aaaatggtgccgtcaaggctgccgt

SEQ ID NO: 22963 - DNA, 25 bp, Saccharomyces pastorianus
agcaaaaccggttcagtcgttccag

SEQ ID NO: 22964 - DNA, 25 bp, Saccharomyces pastorianus
tcgttccagacttttctccaagtga

SEQ ID NO: 22965 - DNA, 25 bp, Saccharomyces pastorianus
gacgatactatcaacgaccccaagg

SEQ ID NO: 22966 - DNA, 25 bp, Saccharomyces pastorianus
aagacactccattttctcgctagag

SEQ ID NO: 22967 - DNA, 25 bp, Saccharomyces pastorianus
gaactgaagctctacccaggtgcaa

SEQ ID NO: 22968 - DNA, 25 bp, Saccharomyces pastorianus
accctatgtctgttccaatgtacgg

SEQ ID NO: 22969 - DNA, 25 bp, Saccharomyces pastorianus
attcattcaggattgtccctctgac

SEQ ID NO: 22970 - DNA, 25 bp, Saccharomyces pastorianus
gacgtccgataaagcgtaccgcgat

SEQ ID NO: 22971 - DNA, 25 bp, Saccharomyces pastorianus
aagggcatccccttattcatgtggg

SEQ ID NO: 22972 - DNA, 25 bp, Saccharomyces pastorianus
ttactggctaagttcctgcccaaag

SEQ ID NO: 22973 - DNA, 25 bp, Saccharomyces pastorianus
aataaacccgtcattgtcatgcacg

SEQ ID NO: 22974 - DNA, 25 bp, Saccharomyces pastorianus
ggtacattggttcagggccgttaat

SEQ ID NO: 22975 - DNA, 25 bp, Saccharomyces pastorianus
gtacgggtcattcaggcagatccac

SEQ ID NO: 22976 - DNA, 25 bp, Saccharomyces pastorianus
gtacgtttctcctgaattggacact

SEQ ID NO: 22977 - DNA, 25 bp, Saccharomyces pastorianus
gccatagcgataccaactcatctgt

SEQ ID NO: 22978 - DNA, 25 bp, Saccharomyces pastorianus
agaaattccagctcttcaagacaat

SEQ ID NO: 22979 - DNA, 25 bp, Saccharomyces pastorianus
cgatcctgaagtcggcgctggaaat

SEQ ID NO: 22980 - DNA, 25 bp, Saccharomyces pastorianus
atcaatgctcaatttccctctaggt

SEQ ID NO: 22981 - DNA, 25 bp, Saccharomyces pastorianus
aatacaagatcgttctcgctaccta

SEQ ID NO: 22982 - DNA, 25 bp, Saccharomyces pastorianus
gcaaggcagcgtgcgaattcatcct

SEQ ID NO: 22983 - DNA, 25 bp, Saccharomyces pastorianus
aactcatctgtatggcctggagaag

SEQ ID NO: 22984 - DNA, 25 bp, Saccharomyces pastorianus
gacactttaactgccgatcctgaag

SEQ ID NO: 22985 - DNA, 25 bp, Saccharomyces pastorianus
aattcatcctcttcttcaaacacta

SEQ ID NO: 22986 - DNA, 25 bp, Saccharomyces pastorianus
taggtcaagatcgagatcctccgcc

SEQ ID NO: 22987 - DNA, 25 bp, Saccharomyces pastorianus
gaaccactacgtcttttgggaagag

SEQ ID NO: 22988 - DNA, 25 bp, Saccharomyces pastorianus
gacttggaattttgacggaggcttt

SEQ ID NO: 22989 - DNA, 25 bp, Saccharomyces pastorianus
gtatccatagtgtcggcgggatctc

SEQ ID NO: 22990 - DNA, 25 bp, Saccharomyces pastorianus
gaaactcatgaagaagccgtcgcaa

SEQ ID NO: 22991 - DNA, 25 bp, Saccharomyces pastorianus
gagcccgttagttgtagttactggt

SEQ ID NO: 22992 - DNA, 25 bp, Saccharomyces pastorianus
ccgattagatttccacggctttcta

SEQ ID NO: 22993 - DNA, 25 bp, Saccharomyces pastorianus
gcaacattcaagtaagccctcaacg

SEQ ID NO: 22994 - DNA, 25 bp, Saccharomyces pastorianus
ctaacgaggcggtttcaatcttgaa

SEQ ID NO: 22995 - DNA, 25 bp, Saccharomyces pastorianus
tagacctatcctccttactgataaa

SEQ ID NO: 22996 - DNA, 25 bp, Saccharomyces pastorianus
taaagtacaattcgtgagcccgtta

SEQ ID NO: 22997 - DNA, 25 bp, Saccharomyces pastorianus
cggaggctttactttgacatcgcaa

SEQ ID NO: 22998 - DNA, 25 bp, Saccharomyces pastorianus
attccatgtgatacaagggatcgtt

SEQ ID NO: 22999 - DNA, 25 bp, Saccharomyces pastorianus
gcaggtgaccatttcgcaagacact

SEQ ID NO: 23000 - DNA, 25 bp, Saccharomyces pastorianus
gttgccagccatatctggacagaaa

SEQ ID NO: 23001 - DNA, 25 bp, Saccharomyces pastorianus
ggccatacaattatgtgcctacagg

SEQ ID NO: 23002 - DNA, 25 bp, Saccharomyces pastorianus
agaatgttcttcgtgcaggtgacca

SEQ ID NO: 23003 - DNA, 25 bp, Saccharomyces pastorianus
tgggatattaaagttgccagccata

SEQ ID NO: 23004 - DNA, 25 bp, Saccharomyces pastorianus
tacttttcagataccagcattcaat

SEQ ID NO: 23005 - DNA, 25 bp, Saccharomyces pastorianus
gagacacgggatactagaggctaat

SEQ ID NO: 23006 - DNA, 25 bp, Saccharomyces pastorianus
gagtgtcaaaggttctacttttcag

SEQ ID NO: 23007 - DNA, 25 bp, Saccharomyces pastorianus
ttgcacctaacttatcacaagctga

SEQ ID NO: 23008 - DNA, 25 bp, Saccharomyces pastorianus
gaaatcatcgcatttgcacctaact

SEQ ID NO: 23009 - DNA, 25 bp, Saccharomyces pastorianus
aacgagcgggtctggaattacatca

SEQ ID NO: 23010 - DNA, 25 bp, Saccharomyces pastorianus
gagctggagtgttctgcaaacccgc

SEQ ID NO: 23011 - DNA, 25 bp, Saccharomyces pastorianus
actgggacccgaactcaaacgatat

SEQ ID NO: 23012 - DNA, 25 bp, Saccharomyces pastorianus
atcgcgtatcttacatctggccaag

SEQ ID NO: 23013 - DNA, 25 bp, Saccharomyces pastorianus
cgagcagcagcagccacttatttat

SEQ ID NO: 23014 - DNA, 25 bp, Saccharomyces pastorianus
aaggaccctcagtatgttaccgacg

SEQ ID NO: 23015 - DNA, 25 bp, Saccharomyces pastorianus
ttgtcgcagtccagagaggtctcca

SEQ ID NO: 23016 - DNA, 25 bp, Saccharomyces pastorianus
aagagcttggtttagatcgcgtatc

SEQ ID NO: 23017 - DNA, 25 bp, Saccharomyces pastorianus
cgtgcggcggtatcaaactgtctaa

SEQ ID NO: 23018 - DNA, 25 bp, Saccharomyces pastorianus
atatgaaggtcgtcgtgccactgca

SEQ ID NO: 23019 - DNA, 25 bp, Saccharomyces pastorianus
gaaaagcaattctacgaggccatga

SEQ ID NO: 23020 - DNA, 25 bp, Saccharomyces pastorianus
actctcctctattcaagtccgaagg

SEQ ID NO: 23021 - DNA, 25 bp, Saccharomyces pastorianus
caaaaagctgttcggtgtgaccacc

SEQ ID NO: 23022 - DNA, 25 bp, Saccharomyces pastorianus
gagaagattcatcctattggcgaac

SEQ ID NO: 23023 - DNA, 25 bp, Saccharomyces pastorianus
attgtcgcccaggtcttgaagagca

SEQ ID NO: 23024 - DNA, 25 bp, Saccharomyces pastorianus
gtcaacgtcattggtggtcactcag

SEQ ID NO: 23025 - DNA, 25 bp, Saccharomyces pastorianus
ccttgggcccagacggtatcgagaa

SEQ ID NO: 23026 - DNA, 25 bp, Saccharomyces pastorianus
attggcgaactttcctctcaagaag

SEQ ID NO: 23027 - DNA, 25 bp, Saccharomyces pastorianus
gcacgctggtgctaagttcgccaac

SEQ ID NO: 23028 - DNA, 25 bp, Saccharomyces pastorianus
tctcccagactacccataagttgat

SEQ ID NO: 23029 - DNA, 25 bp, Saccharomyces pastorianus
atcgaaccctcatttgtagactctc

SEQ ID NO: 23030 - DNA, 25 bp, Saccharomyces pastorianus
aacgccgtgttgtcgggcttcaagg

SEQ ID NO: 23031 - DNA, 25 bp, Saccharomyces pastorianus
aagtgctgtgccacatactttgcct

SEQ ID NO: 23032 - DNA, 25 bp, Saccharomyces pastorianus
atactttgcctgtttcgagtgccac

SEQ ID NO: 23033 - DNA, 25 bp, Saccharomyces pastorianus
atctcccttcaatccaggttgcaaa

SEQ ID NO: 23034 - DNA, 25 bp, Saccharomyces pastorianus
gtgccaccaagaattaagttcccat

SEQ ID NO: 23035 - DNA, 25 bp, Saccharomyces pastorianus
gccatcaaattcaagtgctgtgcca

SEQ ID NO: 23036 - DNA, 25 bp, Saccharomyces pastorianus
atcaatctcggtgtgttcactggca

SEQ ID NO: 23037 - DNA, 25 bp, Saccharomyces pastorianus
gtacgatcttcacgacgatactgat

SEQ ID NO: 23038 - DNA, 25 bp, Saccharomyces pastorianus
tgatcgtgtgtggagtttgccgtca

SEQ ID NO: 23039 - DNA, 25 bp, Saccharomyces pastorianus
ggaataccataacgctcaactcgtc

SEQ ID NO: 23040 - DNA, 25 bp, Saccharomyces pastorianus
aagttcccattccttgcagaagtac

SEQ ID NO: 23041 - DNA, 25 bp, Saccharomyces pastorianus
ctggcatctgccgaacgacgtaata

SEQ ID NO: 23042 - DNA, 25 bp, Saccharomyces pastorianus
aattatttttcatttccagcctcgc

SEQ ID NO: 23043 - DNA, 25 bp, Saccharomyces pastorianus
ttgcgttccaccctggtatggtaac

SEQ ID NO: 23044 - DNA, 25 bp, Saccharomyces pastorianus
ggattgaccattacacgaccaacgc

SEQ ID NO: 23045 - DNA, 25 bp, Saccharomyces pastorianus
gaggaaagcgcttccgcattagtta

SEQ ID NO: 23046 - DNA, 25 bp, Saccharomyces pastorianus
gaaagctgccttgaattttgccata

SEQ ID NO: 23047 - DNA, 25 bp, Saccharomyces pastorianus
aactctgggatctcgaattcctact

SEQ ID NO: 23048 - DNA, 25 bp, Saccharomyces pastorianus
caatttctgtttctgcttacggtca

SEQ ID NO: 23049 - DNA, 25 bp, Saccharomyces pastorianus
gcagcttgacattaccgacgacgaa

SEQ ID NO: 23050 - DNA, 25 bp, Saccharomyces pastorianus
aaaacaccatcattccagggcattg

SEQ ID NO: 23051 - DNA, 25 bp, Saccharomyces pastorianus
acgaccaacgctttaggaccaatat

SEQ ID NO: 23052 - DNA, 25 bp, Saccharomyces pastorianus
aaacctgagggcttcactgttgttg

SEQ ID NO: 23053 - DNA, 25 bp, Saccharomyces pastorianus
catgcgtacaagtcgttgggtgtca

SEQ ID NO: 23054 - DNA, 25 bp, Saccharomyces pastorianus
gtaatttgtctaatgcctcgtcttt

SEQ ID NO: 23055 - DNA, 25 bp, Saccharomyces pastorianus
ctcgtctttgatttggcatgcgtac

SEQ ID NO: 23056 - DNA, 25 bp, Saccharomyces pastorianus
atctagcgggttccatcatgccgat

SEQ ID NO: 23057 - DNA, 25 bp, Saccharomyces pastorianus
gaaggttgcctgtcaaacgattcaa

SEQ ID NO: 23058 - DNA, 25 bp, Saccharomyces pastorianus
actaagagtgagatcgttgtcccga

SEQ ID NO: 23059 - DNA, 25 bp, Saccharomyces pastorianus
gatacattgatactgggcccgtttc

SEQ ID NO: 23060 - DNA, 25 bp, Saccharomyces pastorianus
tcgttgtcccgatcatatccaatga

SEQ ID NO: 23061 - DNA, 25 bp, Saccharomyces pastorianus
attatcgtacgaggcactatctgac

SEQ ID NO: 23062 - DNA, 25 bp, Saccharomyces pastorianus
tgggccgggttttacgttagtcatg

SEQ ID NO: 23063 - DNA, 25 bp, Saccharomyces pastorianus
gtttgcgggactgcagcctcaaaaa

SEQ ID NO: 23064 - DNA, 25 bp, Saccharomyces pastorianus
tggtgccactaacccattggccagt

SEQ ID NO: 23065 - DNA, 25 bp, Saccharomyces pastorianus
ggtcaagcaaggtaggtccattctt

SEQ ID NO: 23066 - DNA, 25 bp, Saccharomyces pastorianus
ggtgacttcggtgttgatctaggca

SEQ ID NO: 23067 - DNA, 25 bp, Saccharomyces pastorianus
atctggcccaatcttggctactgta

SEQ ID NO: 23068 - DNA, 25 bp, Saccharomyces pastorianus
agtgctccgggcaccatcagaggtg

SEQ ID NO: 23069 - DNA, 25 bp, Saccharomyces pastorianus
ggcttctttcatgaaatctggccca

SEQ ID NO: 23070 - DNA, 25 bp, Saccharomyces pastorianus
atgctgaacacgttggtaaaccatt

SEQ ID NO: 23071 - DNA, 25 bp, Saccharomyces pastorianus
gaggtttagtctctcaaattttatc

SEQ ID NO: 23072 - DNA, 25 bp, Saccharomyces pastorianus
agttggttgctatcaaattagtcca

SEQ ID NO: 23073 - DNA, 25 bp, Saccharomyces pastorianus
gatctaggcagaaacgtttgtcatg

SEQ ID NO: 23074 - DNA, 25 bp, Saccharomyces pastorianus
gtaggtccattcttggtgccactaa

SEQ ID NO: 23075 - DNA, 25 bp, Saccharomyces pastorianus
gaccaaaacttctccaagaaccgag

SEQ ID NO: 23076 - DNA, 25 bp, Saccharomyces pastorianus
tattgtatttctctatttgcatccc

SEQ ID NO: 23077 - DNA, 25 bp, Saccharomyces pastorianus
aacatgtacatttctgggttcatat

SEQ ID NO: 23078 - DNA, 25 bp, Saccharomyces pastorianus
tcataatgggcggtcttgttgggct

SEQ ID NO: 23079 - DNA, 25 bp, Saccharomyces pastorianus
gcagctataaccaattgacggctaa

SEQ ID NO: 23080 - DNA, 25 bp, Saccharomyces pastorianus
gaaagttccaaagcaggccgactct

SEQ ID NO: 23081 - DNA, 25 bp, Saccharomyces pastorianus
gcaggccgactctactaaattggaa

SEQ ID NO: 23082 - DNA, 25 bp, Saccharomyces pastorianus
tttattcctaatgctcaccgttgag

SEQ ID NO: 23083 - DNA, 25 bp, Saccharomyces pastorianus
gttgggctgttgtttatcgattcgt

SEQ ID NO: 23084 - DNA, 25 bp, Saccharomyces pastorianus
acaggccttggcatcaagagcttac

SEQ ID NO: 23085 - DNA, 25 bp, Saccharomyces pastorianus
aagaggtcacaaatccgcgtttcat

SEQ ID NO: 23086 - DNA, 25 bp, Saccharomyces pastorianus
gaaggtcacacttctgatactccta

SEQ ID NO: 23087 - DNA, 25 bp, Saccharomyces pastorianus
agatctcttgcctcgttataaaacg

SEQ ID NO: 23088 - DNA, 25 bp, Saccharomyces pastorianus
ataatggtgctatgatgggtgcatc

SEQ ID NO: 23089 - DNA, 25 bp, Saccharomyces pastorianus
gcagcaggtcaaagtacccaaggag

SEQ ID NO: 23090 - DNA, 25 bp, Saccharomyces pastorianus
ggcgggtttttgactactccaatga

SEQ ID NO: 23091 - DNA, 25 bp, Saccharomyces pastorianus
gggtgcatcggacccaaatagcaat

SEQ ID NO: 23092 - DNA, 25 bp, Saccharomyces pastorianus
ggaaaacgatcttaagcctcaggtc

SEQ ID NO: 23093 - DNA, 25 bp, Saccharomyces pastorianus
atatgttacttttgtgcggtgttta

SEQ ID NO: 23094 - DNA, 25 bp, Saccharomyces pastorianus
taagcctcaggtcgactcagaaaag

SEQ ID NO: 23095 - DNA, 25 bp, Saccharomyces pastorianus
gatactcctactaccggtaatgaac

SEQ ID NO: 23096 - DNA, 25 bp, Saccharomyces pastorianus
caactcgcctattctgacctaaata

SEQ ID NO: 23097 - DNA, 25 bp, Saccharomyces pastorianus
gctgaacgtccttttgcttgcatgt

SEQ ID NO: 23098 - DNA, 25 bp, Saccharomyces pastorianus
tttagatgccgctgcaatgtcgacc

SEQ ID NO: 23099 - DNA, 25 bp, Saccharomyces pastorianus
ggaaatccattgctaccattgacca

SEQ ID NO: 23100 - DNA, 25 bp, Saccharomyces pastorianus
aaaccttcgatgatgctgtccgaca

SEQ ID NO: 23101 - DNA, 25 bp, Saccharomyces pastorianus
gtcgtcgagcatcactttaagtcca

SEQ ID NO: 23102 - DNA, 25 bp, Saccharomyces pastorianus
aagcgtctgtaagcccaaacctaag

SEQ ID NO: 23103 - DNA, 25 bp, Saccharomyces pastorianus
aagtccaactatctctcacaataac

SEQ ID NO: 23104 - DNA, 25 bp, Saccharomyces pastorianus
tagataatctcaacactgcaccagc

SEQ ID NO: 23105 - DNA, 25 bp, Saccharomyces pastorianus
aatgtcgacctacgatcgtgacgca

SEQ ID NO: 23106 - DNA, 25 bp, Saccharomyces pastorianus
tcgtgacgcagatccttttaacatt

SEQ ID NO: 23107 - DNA, 25 bp, Saccharomyces pastorianus
gacatttcgatgaatccctcgttca

SEQ ID NO: 23108 - DNA, 25 bp, Saccharomyces pastorianus
aattgtttgcaagaggatttcgatt

SEQ ID NO: 23109 - DNA, 25 bp, Saccharomyces pastorianus
aaacaacttatactatcacgtcgag

SEQ ID NO: 23110 - DNA, 25 bp, Saccharomyces pastorianus
gacacactggaagttaaggtagact

SEQ ID NO: 23111 - DNA, 25 bp, Saccharomyces pastorianus
caacttatactatcacgtcgagaaa

SEQ ID NO: 23112 - DNA, 25 bp, Saccharomyces pastorianus
gcaaaattggacacactggaagtta

SEQ ID NO: 23113 - DNA, 25 bp, Saccharomyces pastorianus
ttgacgcaaaattggacacactgga

SEQ ID NO: 23114 - DNA, 25 bp, Saccharomyces pastorianus
aactggtgaattgtttgcaagagga

SEQ ID NO: 23115 - DNA, 25 bp, Saccharomyces pastorianus
atgggtgaacaaaacaacttatact

SEQ ID NO: 23116 - DNA, 25 bp, Saccharomyces pastorianus
tatactatcacgtcgagaaactggt

SEQ ID NO: 23117 - DNA, 25 bp, Saccharomyces pastorianus
cacgtcgagaaactggtgaattgtt

SEQ ID NO: 23118 - DNA, 25 bp, Saccharomyces pastorianus
tttaaaagctgaaattgacgcaaaa

SEQ ID NO: 23119 - DNA, 25 bp, Saccharomyces pastorianus
aaggtgtatctctcttcactagtaa

SEQ ID NO: 23120 - DNA, 25 bp, Saccharomyces pastorianus
ctagaagaaatgaagcttggcttga

SEQ ID NO: 23121 - DNA, 25 bp, Saccharomyces pastorianus
aaggataacgttgagctcgatgatg

SEQ ID NO: 23122 - DNA, 25 bp, Saccharomyces pastorianus
gatttcgatttagattgcgctcaag

SEQ ID NO: 23123 - DNA, 25 bp, Saccharomyces pastorianus
tgcgctcaaggtgtatctctcttca

SEQ ID NO: 23124 - DNA, 25 bp, Saccharomyces pastorianus
gaattggacaacaagttcaaagtaa

SEQ ID NO: 23125 - DNA, 25 bp, Saccharomyces pastorianus
gtatctctcttcactagtaaatcta

SEQ ID NO: 23126 - DNA, 25 bp, Saccharomyces pastorianus
gtaaaggataacgttgagctcgatg

SEQ ID NO: 23127 - DNA, 25 bp, Saccharomyces pastorianus
gctcaaggtgtatctctcttcacta

SEQ ID NO: 23128 - DNA, 25 bp, Saccharomyces pastorianus
gattgcgctcaaggtgtatctctct

SEQ ID NO: 23129 - DNA, 25 bp, Saccharomyces pastorianus
gcttggcttgaagaattggacaaca

SEQ ID NO: 23130 - DNA, 25 bp, Saccharomyces pastorianus
gaagaaaacattggtacttgtgtca

SEQ ID NO: 23131 - DNA, 25 bp, Saccharomyces pastorianus
ggtgaaaagaccatgtccgctaaga

SEQ ID NO: 23132 - DNA, 25 bp, Saccharomyces pastorianus
caaaagtacaccaaggaacaaactg

SEQ ID NO: 23133 - DNA, 25 bp, Saccharomyces pastorianus
ggttccaaggacgacaagccattat

SEQ ID NO: 23134 - DNA, 25 bp, Saccharomyces pastorianus
gacgacaagccattattcttggtct

SEQ ID NO: 23135 - DNA, 25 bp, Saccharomyces pastorianus
agaccatgtccgctaagatctccaa

SEQ ID NO: 23136 - DNA, 25 bp, Saccharomyces pastorianus
aagatggccgctatgggtcaatggt

SEQ ID NO: 23137 - DNA, 25 bp, Saccharomyces pastorianus
gaacaaactggttccaaggacgaca

SEQ ID NO: 23138 - DNA, 25 bp, Saccharomyces pastorianus
caacaacgaaaatgctgacaaggat

SEQ ID NO: 23139 - DNA, 25 bp, Saccharomyces pastorianus
tgctgacaaggatgacttatacacc

SEQ ID NO: 23140 - DNA, 25 bp, Saccharomyces pastorianus
gtccgctaagatctccaagtctttg

SEQ ID NO: 23141 - DNA, 25 bp, Saccharomyces pastorianus
aatcatgatgcttcccagaacgggt

SEQ ID NO: 23142 - DNA, 25 bp, Saccharomyces pastorianus
aagcttcattggctatgcgtgtcct

SEQ ID NO: 23143 - DNA, 25 bp, Saccharomyces pastorianus
ccaagctgacggtaaagggtaatct

SEQ ID NO: 23144 - DNA, 25 bp, Saccharomyces pastorianus
gataacacccaatccaagctgacgg

SEQ ID NO: 23145 - DNA, 25 bp, Saccharomyces pastorianus
tgatgtttggactttcattgtgaaa

SEQ ID NO: 23146 - DNA, 25 bp, Saccharomyces pastorianus
ggctatgcgtgtcctagagaagttt

SEQ ID NO: 23147 - DNA, 25 bp, Saccharomyces pastorianus
cagccagagtgttatttccgtcgac

SEQ ID NO: 23148 - DNA, 25 bp, Saccharomyces pastorianus
gggtaatcttgacacatatgggttt

SEQ ID NO: 23149 - DNA, 25 bp, Saccharomyces pastorianus
gttgaggacagtaatcatgatgctt

SEQ ID NO: 23150 - DNA, 25 bp, Saccharomyces pastorianus
ttgacaaggttgtggcagaaacatt

SEQ ID NO: 23151 - DNA, 25 bp, Saccharomyces pastorianus
gtgttatttccgtcgacaagttgag

SEQ ID NO: 23152 - DNA, 25 bp, Saccharomyces pastorianus
tgcttacgacgccaagttggtagat

SEQ ID NO: 23153 - DNA, 25 bp, Saccharomyces pastorianus
cgccaagttggtagatgacgttatc

SEQ ID NO: 23154 - DNA, 25 bp, Saccharomyces pastorianus
tctaacccagacgaaatttccaagt

SEQ ID NO: 23155 - DNA, 25 bp, Saccharomyces pastorianus
gtcggtaatgataacatcgatatcg

SEQ ID NO: 23156 - DNA, 25 bp, Saccharomyces pastorianus
tgatgcttacgacgccaagttggta

SEQ ID NO: 23157 - DNA, 25 bp, Saccharomyces pastorianus
gaatctaacccagacgaaatttcca

SEQ ID NO: 23158 - DNA, 25 bp, Saccharomyces pastorianus
tatggtcaatgtcggtaatgataac

SEQ ID NO: 23159 - DNA, 25 bp, Saccharomyces pastorianus
ttgcaagaatctaacccagacgaaa

SEQ ID NO: 23160 - DNA, 25 bp, Saccharomyces pastorianus
catctgctgacggtggtgaagacga

SEQ ID NO: 23161 - DNA, 25 bp, Saccharomyces pastorianus
tccaagttcgaaaaaggtgctcaaa

SEQ ID NO: 23162 - DNA, 25 bp, Saccharomyces pastorianus
tttacaacaaaccgccttcgacaag

SEQ ID NO: 23163 - DNA, 25 bp, Saccharomyces pastorianus
cgcacccgaatgtaccgatttgaaa

SEQ ID NO: 23164 - DNA, 25 bp, Saccharomyces pastorianus
tctgttgagaacgaatgctccaaac

SEQ ID NO: 23165 - DNA, 25 bp, Saccharomyces pastorianus
gcaaggtatcaaaccagccctagat

SEQ ID NO: 23166 - DNA, 25 bp, Saccharomyces pastorianus
gaatggtacagcgagaagttcctga

SEQ ID NO: 23167 - DNA, 25 bp, Saccharomyces pastorianus
gaggccagagacgaagcgccatttg

SEQ ID NO: 23168 - DNA, 25 bp, Saccharomyces pastorianus
ctgtgtcaacgctgcactcgtcaag

SEQ ID NO: 23169 - DNA, 25 bp, Saccharomyces pastorianus
aaaccagccctagatgaggccagag

SEQ ID NO: 23170 - DNA, 25 bp, Saccharomyces pastorianus
tataatgtcagccagtttcgcaccc

SEQ ID NO: 23171 - DNA, 25 bp, Saccharomyces pastorianus
gggatgcctacacgacctgtgtcaa

SEQ ID NO: 23172 - DNA, 25 bp, Saccharomyces pastorianus
aacgaaatacgacagctgttttaat

SEQ ID NO: 23173 - DNA, 25 bp, Saccharomyces pastorianus
aatgctccaaacagtgggatgccta

SEQ ID NO: 23174 - DNA, 25 bp, Saccharomyces pastorianus
gcacagcctacaaatttgtctcctt

SEQ ID NO: 23175 - DNA, 25 bp, Saccharomyces pastorianus
ggtcacacctgtgggctgaattggt

SEQ ID NO: 23176 - DNA, 25 bp, Saccharomyces pastorianus
aatggccgctttagaagtcatggtc

SEQ ID NO: 23177 - DNA, 25 bp, Saccharomyces pastorianus
gttccaaggcgggtgcaggtatcat

SEQ ID NO: 23178 - DNA, 25 bp, Saccharomyces pastorianus
ggttaaacacatccgcaattgctgc

SEQ ID NO: 23179 - DNA, 25 bp, Saccharomyces pastorianus
gtcacctcgtaccaatggacttaca

SEQ ID NO: 23180 - DNA, 25 bp, Saccharomyces pastorianus
ttagatagacctgctccgtatactg

SEQ ID NO: 23181 - DNA, 25 bp, Saccharomyces pastorianus
aattgctgccgctaagtcatgttct

SEQ ID NO: 23182 - DNA, 25 bp, Saccharomyces pastorianus
ggttcggcttacctgtacaactaca

SEQ ID NO: 23183 - DNA, 25 bp, Saccharomyces pastorianus
acaactacaccggatcagatctctg

SEQ ID NO: 23184 - DNA, 25 bp, Saccharomyces pastorianus
tactgcagaagatggcggttcgtct

SEQ ID NO: 23185 - DNA, 25 bp, Saccharomyces pastorianus
gagccctctcgaatgaagtgtcttc

SEQ ID NO: 23186 - DNA, 25 bp, Saccharomyces pastorianus
agtcgaggcgaacggcatatctgtc

SEQ ID NO: 23187 - DNA, 25 bp, Saccharomyces pastorianus
aaattctggaccatttatacccact

SEQ ID NO: 23188 - DNA, 25 bp, Saccharomyces pastorianus
tggacttcgttccaccgtagttctt

SEQ ID NO: 23189 - DNA, 25 bp, Saccharomyces pastorianus
catatctgtcgtgcgcagggcggat

SEQ ID NO: 23190 - DNA, 25 bp, Saccharomyces pastorianus
taaagatcggctctatgcacctcaa

SEQ ID NO: 23191 - DNA, 25 bp, Saccharomyces pastorianus
tcaatgacgaccacgatggcggcaa

SEQ ID NO: 23192 - DNA, 25 bp, Saccharomyces pastorianus
cgtagttcttaaaccgcgtgtgatt

SEQ ID NO: 23193 - DNA, 25 bp, Saccharomyces pastorianus
tgatatcgacagtgaggcccaaaac

SEQ ID NO: 23194 - DNA, 25 bp, Saccharomyces pastorianus
aagtaccatctgctatcaagtcgag

SEQ ID NO: 23195 - DNA, 25 bp, Saccharomyces pastorianus
agcgtatatcctggctcagcgtgaa

SEQ ID NO: 23196 - DNA, 25 bp, Saccharomyces pastorianus
ttcagtccttacagattacgtcatg

SEQ ID NO: 23197 - DNA, 25 bp, Saccharomyces pastorianus
aatgatagagcatccttgccatctc

SEQ ID NO: 23198 - DNA, 25 bp, Saccharomyces pastorianus
atctcctttgaatacgatgtcgcca

SEQ ID NO: 23199 - DNA, 25 bp, Saccharomyces pastorianus
attcaccatcttctaatgcttgctt

SEQ ID NO: 23200 - DNA, 25 bp, Saccharomyces pastorianus
ccacgctcaaatcaaatccatcgga

SEQ ID NO: 23201 - DNA, 25 bp, Saccharomyces pastorianus
agatgcaggaatcaatccccgctca

SEQ ID NO: 23202 - DNA, 25 bp, Saccharomyces pastorianus
agtacgcatcatcatccttcacatt

SEQ ID NO: 23203 - DNA, 25 bp, Saccharomyces pastorianus
attcccatcgggattattcaccatc

SEQ ID NO: 23204 - DNA, 25 bp, Saccharomyces pastorianus
tgttctgccaatgagctgtacgaga

SEQ ID NO: 23205 - DNA, 25 bp, Saccharomyces pastorianus
gaaacacaacaaggcgcaccacagt

SEQ ID NO: 23206 - DNA, 25 bp, Saccharomyces pastorianus
atgcttgcttagagtgttctgccaa

SEQ ID NO: 23207 - DNA, 25 bp, Saccharomyces pastorianus
acagaggcggatcaagtcggtacta

SEQ ID NO: 23208 - DNA, 25 bp, Saccharomyces pastorianus
cttgcagaataagacccagcagctt

SEQ ID NO: 23209 - DNA, 25 bp, Saccharomyces pastorianus
aaatggcggatagcgcaggcttgat

SEQ ID NO: 23210 - DNA, 25 bp, Saccharomyces pastorianus
caggacagttcgattgtatgccaaa

SEQ ID NO: 23211 - DNA, 25 bp, Saccharomyces pastorianus
gttgcgagagctagcagtcttgcag

SEQ ID NO: 23212 - DNA, 25 bp, Saccharomyces pastorianus
aacggcagacttaccaacgaatgac

SEQ ID NO: 23213 - DNA, 25 bp, Saccharomyces pastorianus
aagcacagttagactctgttcgaat

SEQ ID NO: 23214 - DNA, 25 bp, Saccharomyces pastorianus
agtcaattccctagtgaggcttcct

SEQ ID NO: 23215 - DNA, 25 bp, Saccharomyces pastorianus
cagcagcttatcaagaaatccgcaa

SEQ ID NO: 23216 - DNA, 25 bp, Saccharomyces pastorianus
gaatgtacacctccaaagcacagtt

SEQ ID NO: 23217 - DNA, 25 bp, Saccharomyces pastorianus
atgtcgatcatgttccaacggcaga

SEQ ID NO: 23218 - DNA, 25 bp, Saccharomyces pastorianus
gagaacgtggccctcgagaacttcg

SEQ ID NO: 23219 - DNA, 25 bp, Saccharomyces pastorianus
gcaattgccatactgcacgagatct

SEQ ID NO: 23220 - DNA, 25 bp, Saccharomyces pastorianus
tgaagctgtccaactccatgaacga

SEQ ID NO: 23221 - DNA, 25 bp, Saccharomyces pastorianus
gtgcagatcaccagcgtgttgacga

SEQ ID NO: 23222 - DNA, 25 bp, Saccharomyces pastorianus
agaacagacgtcctgtgggccagat

SEQ ID NO: 23223 - DNA, 25 bp, Saccharomyces pastorianus
taagcagatgccaacgtcgctgatt

SEQ ID NO: 23224 - DNA, 25 bp, Saccharomyces pastorianus
gagttatctcgccttttgcaattgc

SEQ ID NO: 23225 - DNA, 25 bp, Saccharomyces pastorianus
gaaggccaggcctcgagtacacaga

SEQ ID NO: 23226 - DNA, 25 bp, Saccharomyces pastorianus
agatcgggccaaagcatccgcgaga

SEQ ID NO: 23227 - DNA, 25 bp, Saccharomyces pastorianus
gcgctacgacgccatctgagggaaa

SEQ ID NO: 23228 - DNA, 25 bp, Saccharomyces pastorianus
gaacttcgtcagtatcggctggaaa

SEQ ID NO: 23229 - DNA, 25 bp, Saccharomyces pastorianus
acatttcgaaggtgctcacggtgtt

SEQ ID NO: 23230 - DNA, 25 bp, Saccharomyces pastorianus
tgaccattaccggtaacgtcttctt

SEQ ID NO: 23231 - DNA, 25 bp, Saccharomyces pastorianus
ggtgccgctatcagacatttcgaag

SEQ ID NO: 23232 - DNA, 25 bp, Saccharomyces pastorianus
gttccgatttgttgttagtcaagtc

SEQ ID NO: 23233 - DNA, 25 bp, Saccharomyces pastorianus
agtcaagtcagatctgttccgtttg

SEQ ID NO: 23234 - DNA, 25 bp, Saccharomyces pastorianus
cattattgtttgctcagacggtcac

SEQ ID NO: 23235 - DNA, 25 bp, Saccharomyces pastorianus
gtcttcttaggtaagggcgtcacct

SEQ ID NO: 23236 - DNA, 25 bp, Saccharomyces pastorianus
aatccctcacatcccgaagattgtt

SEQ ID NO: 23237 - DNA, 25 bp, Saccharomyces pastorianus
gaaactagatccatcccgtttcggt

SEQ ID NO: 23238 - DNA, 25 bp, Saccharomyces pastorianus
gttgaactagaccacttgaccatta

SEQ ID NO: 23239 - DNA, 25 bp, Saccharomyces pastorianus
ggaagtcgcccaagtcccaaaggag

SEQ ID NO: 23240 - DNA, 25 bp, Saccharomyces pastorianus
gtttaccggtcatatatgttttcac

SEQ ID NO: 23241 - DNA, 25 bp, Saccharomyces pastorianus
attcttcaaacgtctttaggcatca

SEQ ID NO: 23242 - DNA, 25 bp, Saccharomyces pastorianus
ttgttgtatttctatcgctgtggct

SEQ ID NO: 23243 - DNA, 25 bp, Saccharomyces pastorianus
gtatttcaagccactttcgaaccag

SEQ ID NO: 23244 - DNA, 25 bp, Saccharomyces pastorianus
taaactcctactggattccccaaat

SEQ ID NO: 23245 - DNA, 25 bp, Saccharomyces pastorianus
cgctgtggctactgttccaaatcag

SEQ ID NO: 23246 - DNA, 25 bp, Saccharomyces pastorianus
taaccacgttttccatacttcatgt

SEQ ID NO: 23247 - DNA, 25 bp, Saccharomyces pastorianus
tggtgggaccgttcaaaacactgtt

SEQ ID NO: 23248 - DNA, 25 bp, Saccharomyces pastorianus
tatggtgacaccctgtaaccacgtt

SEQ ID NO: 23249 - DNA, 25 bp, Saccharomyces pastorianus
gagaacaagagctaccaacggagga

SEQ ID NO: 23250 - DNA, 25 bp, Saccharomyces pastorianus
tggttcttacctcaacacacgattc

SEQ ID NO: 23251 - DNA, 25 bp, Saccharomyces pastorianus
gagttgctgcaacagttccctgaag

SEQ ID NO: 23252 - DNA, 25 bp, Saccharomyces pastorianus
gaaaacgacccgagcggcaacacaa

SEQ ID NO: 23253 - DNA, 25 bp, Saccharomyces pastorianus
aagtgcccgaactgtccaagttggc

SEQ ID NO: 23254 - DNA, 25 bp, Saccharomyces pastorianus
gaaatcagacccacagtcgtcaagg

SEQ ID NO: 23255 - DNA, 25 bp, Saccharomyces pastorianus
aaaaatggcgcgaactggatcctgc

SEQ ID NO: 23256 - DNA, 25 bp, Saccharomyces pastorianus
atgacagcatcgttaacgaccccgt

SEQ ID NO: 23257 - DNA, 25 bp, Saccharomyces pastorianus
gtcgcgggcagcaatggcaacacca

SEQ ID NO: 23258 - DNA, 25 bp, Saccharomyces pastorianus
gttccctgaagcgaaagtgcccgaa

SEQ ID NO: 23259 - DNA, 25 bp, Saccharomyces pastorianus
gtcatcgtcgatgtcattgcaacag

SEQ ID NO: 23260 - DNA, 25 bp, Saccharomyces pastorianus
gtcctttcattcaattcacccagga

SEQ ID NO: 23261 - DNA, 25 bp, Saccharomyces pastorianus
ctggatcctgccaagaaggccgaat

SEQ ID NO: 23262 - DNA, 25 bp, Saccharomyces pastorianus
aaacgtcaagcccacatgtctggtg

SEQ ID NO: 23263 - DNA, 25 bp, Saccharomyces pastorianus
ggccgtcgatggataccgtatctca

SEQ ID NO: 23264 - DNA, 25 bp, Saccharomyces pastorianus
gaacaataactgttactccttcccg

SEQ ID NO: 23265 - DNA, 25 bp, Saccharomyces pastorianus
aactggccgaattgtcaccactgag

SEQ ID NO: 23266 - DNA, 25 bp, Saccharomyces pastorianus
gcgccaccatcattacggacaagat

SEQ ID NO: 23267 - DNA, 25 bp, Saccharomyces pastorianus
gagacggtcaaggtgcctcgtgact

SEQ ID NO: 23268 - DNA, 25 bp, Saccharomyces pastorianus
ataataacgccttggtggccacggg

SEQ ID NO: 23269 - DNA, 25 bp, Saccharomyces pastorianus
gaattggtcttggtgccgtgctttc

SEQ ID NO: 23270 - DNA, 25 bp, Saccharomyces pastorianus
gggcgccttcactcaagacgtagtg

SEQ ID NO: 23271 - DNA, 25 bp, Saccharomyces pastorianus
gaggccgttccagcggatctaatga

SEQ ID NO: 23272 - DNA, 25 bp, Saccharomyces pastorianus
gtacaggcccatgatcaaggtgcag

SEQ ID NO: 23273 - DNA, 25 bp, Saccharomyces pastorianus
ttgatcctgcggtcactgcatctgc

SEQ ID NO: 23274 - DNA, 25 bp, Saccharomyces pastorianus
tgccgcttcaactgctgcagataca

SEQ ID NO: 23275 - DNA, 25 bp, Saccharomyces pastorianus
atcagcccttggaagattggataat

SEQ ID NO: 23276 - DNA, 25 bp, Saccharomyces pastorianus
aaactcaaaaacatctgccgcttca

SEQ ID NO: 23277 - DNA, 25 bp, Saccharomyces pastorianus
agtaccatcggtaaatcagcccttg

SEQ ID NO: 23278 - DNA, 25 bp, Saccharomyces pastorianus
gaatgattactatgctgcgttagca

SEQ ID NO: 23279 - DNA, 25 bp, Saccharomyces pastorianus
gccgttcccgaatggcacaaacaaa

SEQ ID NO: 23280 - DNA, 25 bp, Saccharomyces pastorianus
aagatgtgactgatgcaactgatac

SEQ ID NO: 23281 - DNA, 25 bp, Saccharomyces pastorianus
cggctgaaaacgcattcgaggatga

SEQ ID NO: 23282 - DNA, 25 bp, Saccharomyces pastorianus
gaatgcgaacaacgaatccgtgcaa

SEQ ID NO: 23283 - DNA, 25 bp, Saccharomyces pastorianus
atacaaaggtggacgcagatgcaga

SEQ ID NO: 23284 - DNA, 25 bp, Saccharomyces pastorianus
aaattaatgttagtcacgccggatg

SEQ ID NO: 23285 - DNA, 25 bp, Saccharomyces pastorianus
aaattggtccgaatcaggtacgaag

SEQ ID NO: 23286 - DNA, 25 bp, Saccharomyces pastorianus
acaactggattacaagcacttggga

SEQ ID NO: 23287 - DNA, 25 bp, Saccharomyces pastorianus
acatagaatccgtcttatcaagaga

SEQ ID NO: 23288 - DNA, 25 bp, Saccharomyces pastorianus
ggcaggttattcagactggtcaata

SEQ ID NO: 23289 - DNA, 25 bp, Saccharomyces pastorianus
gtcacgccggatgagttgaactgta

SEQ ID NO: 23290 - DNA, 25 bp, Saccharomyces pastorianus
gttcatggtcttggagtcatcacaa

SEQ ID NO: 23291 - DNA, 25 bp, Saccharomyces pastorianus
aacccatgtactaagatgcttgaac

SEQ ID NO: 23292 - DNA, 25 bp, Saccharomyces pastorianus
gggacaactattattcaacttatca

SEQ ID NO: 23293 - DNA, 25 bp, Saccharomyces pastorianus
caggtacgaagttccccattatact

SEQ ID NO: 23294 - DNA, 25 bp, Saccharomyces pastorianus
gaagagtgtccatgacctgaccagt

SEQ ID NO: 23295 - DNA, 25 bp, Saccharomyces pastorianus
aaatccaatgtcgtccgtattcgtt

SEQ ID NO: 23296 - DNA, 25 bp, Saccharomyces pastorianus
aagcaagttcatcctgttcttcgat

SEQ ID NO: 23297 - DNA, 25 bp, Saccharomyces pastorianus
caaattcttgatcgacggattcccc

SEQ ID NO: 23298 - DNA, 25 bp, Saccharomyces pastorianus
caggcgacttgttgcgtgctgaaca

SEQ ID NO: 23299 - DNA, 25 bp, Saccharomyces pastorianus
caagtctctgtggtcttcgttctag

SEQ ID NO: 23300 - DNA, 25 bp, Saccharomyces pastorianus
tttcaaagacaccagcatgcccgtt

SEQ ID NO: 23301 - DNA, 25 bp, Saccharomyces pastorianus
ctgctacgaaaacaacaccggcttt

SEQ ID NO: 23302 - DNA, 25 bp, Saccharomyces pastorianus
ttcgttctaggaggacccggtgcag

SEQ ID NO: 23303 - DNA, 25 bp, Saccharomyces pastorianus
atcactctggcgctattacgtaacg

SEQ ID NO: 23304 - DNA, 25 bp, Saccharomyces pastorianus
atgattattcgtttgtccacctagc

SEQ ID NO: 23305 - DNA, 25 bp, Saccharomyces pastorianus
aagacgtcatgctccagaggctgtt

SEQ ID NO: 23306 - DNA, 25 bp, Saccharomyces pastorianus
gataagctagagatcaccacccgca

SEQ ID NO: 23307 - DNA, 25 bp, Saccharomyces pastorianus
gccagatctcgagcgctcaaagagg

SEQ ID NO: 23308 - DNA, 25 bp, Saccharomyces pastorianus
caaagagccgtctgtgtcgccagat

SEQ ID NO: 23309 - DNA, 25 bp, Saccharomyces pastorianus
aggtatcatcggaagcgcagacgct

SEQ ID NO: 23310 - DNA, 25 bp, Saccharomyces pastorianus
gaggagagcacccaagacgccaaag

SEQ ID NO: 23311 - DNA, 25 bp, Saccharomyces pastorianus
gtcgaacttgagcaacgcctggaag

SEQ ID NO: 23312 - DNA, 25 bp, Saccharomyces pastorianus
atgcggaccatgacgaagaggcttc

SEQ ID NO: 23313 - DNA, 25 bp, Saccharomyces pastorianus
aaggctctcaaaagatgcggaccat

SEQ ID NO: 23314 - DNA, 25 bp, Saccharomyces pastorianus
gaacgtgcaggtcgacaaacagtct

SEQ ID NO: 23315 - DNA, 25 bp, Saccharomyces pastorianus
gcagacgctctcagttcgaagacta

SEQ ID NO: 23316 - DNA, 25 bp, Saccharomyces pastorianus
acagtctatgctgttcgagaccgaa

SEQ ID NO: 23317 - DNA, 25 bp, Saccharomyces pastorianus
agatgacgacatgttccacaacctg

SEQ ID NO: 23318 - DNA, 25 bp, Saccharomyces pastorianus
cttcagatgaaattgccctagagtt

SEQ ID NO: 23319 - DNA, 25 bp, Saccharomyces pastorianus
aagtctgtcgaaatcgggctacacg

SEQ ID NO: 23320 - DNA, 25 bp, Saccharomyces pastorianus
caaggacgcctcattcaaacaaaat

SEQ ID NO: 23321 - DNA, 25 bp, Saccharomyces pastorianus
gttccacaacctgtctaaagtcgtc

SEQ ID NO: 23322 - DNA, 25 bp, Saccharomyces pastorianus
acgtaagtgactgcgaatcctcttc

SEQ ID NO: 23323 - DNA, 25 bp, Saccharomyces pastorianus
ggaacaggatgctgactcgtctaaa

SEQ ID NO: 23324 - DNA, 25 bp, Saccharomyces pastorianus
tttggatcccattgactttggtatt

SEQ ID NO: 23325 - DNA, 25 bp, Saccharomyces pastorianus
atggatgattcccaaacctcttctg

SEQ ID NO: 23326 - DNA, 25 bp, Saccharomyces pastorianus
acgacgggtctttatggaacaggat

SEQ ID NO: 23327 - DNA, 25 bp, Saccharomyces pastorianus
gggctacacgacaacaccattcaag

SEQ ID NO: 23328 - DNA, 25 bp, Saccharomyces pastorianus
acgagctgcaattcgtcttggacaa

SEQ ID NO: 23329 - DNA, 25 bp, Saccharomyces pastorianus
agagcctacaacttgcttgcaacta

SEQ ID NO: 23330 - DNA, 25 bp, Saccharomyces pastorianus
gttcttcagcgatttccaacacgaa

SEQ ID NO: 23331 - DNA, 25 bp, Saccharomyces pastorianus
aattgagtcctcgtatgctctggag

SEQ ID NO: 23332 - DNA, 25 bp, Saccharomyces pastorianus
gacaaattggtccagttcgccacat

SEQ ID NO: 23333 - DNA, 25 bp, Saccharomyces pastorianus
ggagttcttggcacaccgttggagc

SEQ ID NO: 23334 - DNA, 25 bp, Saccharomyces pastorianus
gtctcttctaaaattgcatccctct

SEQ ID NO: 23335 - DNA, 25 bp, Saccharomyces pastorianus
attgggaacgttttctcactgccgg

SEQ ID NO: 23336 - DNA, 25 bp, Saccharomyces pastorianus
gagcgtggactcatcgactcgagag

SEQ ID NO: 23337 - DNA, 25 bp, Saccharomyces pastorianus
gtatttgcgcgggttccaagaactc

SEQ ID NO: 23338 - DNA, 25 bp, Saccharomyces pastorianus
agaactcgcccatgatgctggtcaa

SEQ ID NO: 23339 - DNA, 25 bp, Saccharomyces pastorianus
ggcgatgcttctatcggcaataaga

SEQ ID NO: 23340 - DNA, 25 bp, Saccharomyces pastorianus
aggaacgttggtggcgatgcttcta

SEQ ID NO: 23341 - DNA, 25 bp, Saccharomyces pastorianus
ttggacgtatcaatgacaatggcat

SEQ ID NO: 23342 - DNA, 25 bp, Saccharomyces pastorianus
tggtggcgatgcttctatcggcaat

SEQ ID NO: 23343 - DNA, 25 bp, Saccharomyces pastorianus
ggacggatttggacgtatcaatgac

SEQ ID NO: 23344 - DNA, 25 bp, Saccharomyces pastorianus
gagatgtgttattcaaggacgctaa

SEQ ID NO: 23345 - DNA, 25 bp, Saccharomyces pastorianus
tcagctgggcgggtggatacataaa

SEQ ID NO: 23346 - DNA, 25 bp, Saccharomyces pastorianus
ctgggcgggtggatacataaatata

SEQ ID NO: 23347 - DNA, 25 bp, Saccharomyces pastorianus
ttacaaccactatcagctgggcggg

SEQ ID NO: 23348 - DNA, 25 bp, Saccharomyces pastorianus
aaggttctagtcttttcagaaagca

SEQ ID NO: 23349 - DNA, 25 bp, Saccharomyces pastorianus
taagatgggtgctcgaaggaacgtt

SEQ ID NO: 23350 - DNA, 25 bp, Saccharomyces pastorianus
atctttgatgcattcactggccaac

SEQ ID NO: 23351 - DNA, 25 bp, Saccharomyces pastorianus
ttgctttaccccagacggtgaattt

SEQ ID NO: 23352 - DNA, 25 bp, Saccharomyces pastorianus
aaatactccatgttcgttaccgcgg

SEQ ID NO: 23353 - DNA, 25 bp, Saccharomyces pastorianus
caagtggtctcgtctttgcattggg

SEQ ID NO: 23354 - DNA, 25 bp, Saccharomyces pastorianus
tggattccggatcagcttgctttac

SEQ ID NO: 23355 - DNA, 25 bp, Saccharomyces pastorianus
gattgccatctggaaccattctgac

SEQ ID NO: 23356 - DNA, 25 bp, Saccharomyces pastorianus
cggtgaatttgttctcgggacagac

SEQ ID NO: 23357 - DNA, 25 bp, Saccharomyces pastorianus
aaaggccttccccatgagagagttt

SEQ ID NO: 23358 - DNA, 25 bp, Saccharomyces pastorianus
atactttcctgtcgtcatcatatga

SEQ ID NO: 23359 - DNA, 25 bp, Saccharomyces pastorianus
aatatttactcgtcgggtcctcaat

SEQ ID NO: 23360 - DNA, 25 bp, Saccharomyces pastorianus
ataccctgtgtttcccatgagactt

SEQ ID NO: 23361 - DNA, 25 bp, Saccharomyces pastorianus
atggaattcccatcacggtcaatgt

SEQ ID NO: 23362 - DNA, 25 bp, Saccharomyces pastorianus
taaacgtcgccatgacaagacccag

SEQ ID NO: 23363 - DNA, 25 bp, Saccharomyces pastorianus
acgaaatttcccctcatttggtatg

SEQ ID NO: 23364 - DNA, 25 bp, Saccharomyces pastorianus
ttgacgctactccatccgatgatga

SEQ ID NO: 23365 - DNA, 25 bp, Saccharomyces pastorianus
aggtgatgagttccccgaaactgca

SEQ ID NO: 23366 - DNA, 25 bp, Saccharomyces pastorianus
cggtcaatgtatcacggccagttat

SEQ ID NO: 23367 - DNA, 25 bp, Saccharomyces pastorianus
cgatgaaaccgtggcaaaccgactt

SEQ ID NO: 23368 - DNA, 25 bp, Saccharomyces pastorianus
tagatttacccatcgttgacgctac

SEQ ID NO: 23369 - DNA, 25 bp, Saccharomyces pastorianus
gaaactgcagacgacgcgaccattc

SEQ ID NO: 23370 - DNA, 25 bp, Saccharomyces pastorianus
gtcccacaagattccatcggtgtta

SEQ ID NO: 23371 - DNA, 25 bp, Saccharomyces pastorianus
atttgagatctttaaacgtcccaca

SEQ ID NO: 23372 - DNA, 25 bp, Saccharomyces pastorianus
gccggtcaaaatcaatgcttctaaa

SEQ ID NO: 23373 - DNA, 25 bp, Saccharomyces pastorianus
acgacgaggcacgtaggcaattatt

SEQ ID NO: 23374 - DNA, 25 bp, Saccharomyces pastorianus
gccaaggaaaccgaatccctagtct

SEQ ID NO: 23375 - DNA, 25 bp, Saccharomyces pastorianus
gattgagtccttcgaaaaacacgca

SEQ ID NO: 23376 - DNA, 25 bp, Saccharomyces pastorianus
agatcaagcctgaaatcgatgcgaa

SEQ ID NO: 23377 - DNA, 25 bp, Saccharomyces pastorianus
aacagggtccacagccactcaattg

SEQ ID NO: 23378 - DNA, 25 bp, Saccharomyces pastorianus
aatccctagtctcccaggagttgaa

SEQ ID NO: 23379 - DNA, 25 bp, Saccharomyces pastorianus
agccactcaattgtccagtttcaag

SEQ ID NO: 23380 - DNA, 25 bp, Saccharomyces pastorianus
acattcaatcagcaagaccattcga

SEQ ID NO: 23381 - DNA, 25 bp, Saccharomyces pastorianus
tacgtgaaacagtaccagccggtca

SEQ ID NO: 23382 - DNA, 25 bp, Saccharomyces pastorianus
caccgaggtagacttcggccattat

SEQ ID NO: 23383 - DNA, 25 bp, Saccharomyces pastorianus
aagcaatgtggctaggtaataccat

SEQ ID NO: 23384 - DNA, 25 bp, Saccharomyces pastorianus
gtaataccatggatccaaccgcagc

SEQ ID NO: 23385 - DNA, 25 bp, Saccharomyces pastorianus
cgatattataactgcaactttggaa

SEQ ID NO: 23386 - DNA, 25 bp, Saccharomyces pastorianus
gatcaattagattctgtccacaact

SEQ ID NO: 23387 - DNA, 25 bp, Saccharomyces pastorianus
tgatgacgacttacaacagttgtta

SEQ ID NO: 23388 - DNA, 25 bp, Saccharomyces pastorianus
gaaattcgattccttgaactgtgaa

SEQ ID NO: 23389 - DNA, 25 bp, Saccharomyces pastorianus
gaaccttccactttcttcgatatta

SEQ ID NO: 23390 - DNA, 25 bp, Saccharomyces pastorianus
aagcctagccatgatgatagttcaa

SEQ ID NO: 23391 - DNA, 25 bp, Saccharomyces pastorianus
gaatccatgcctaatacggccagca

SEQ ID NO: 23392 - DNA, 25 bp, Saccharomyces pastorianus
aagcacaagcttaatcaaaaccgaa

SEQ ID NO: 23393 - DNA, 25 bp, Saccharomyces pastorianus
tacggccagcatacttccagaaagt

SEQ ID NO: 23394 - DNA, 25 bp, Saccharomyces pastorianus
aaggcgtatcgctgggtattatcaa

SEQ ID NO: 23395 - DNA, 25 bp, Saccharomyces pastorianus
tatggtttccgatgtgatgatgtcc

SEQ ID NO: 23396 - DNA, 25 bp, Saccharomyces pastorianus
ctgggtattatcaagttccactata

SEQ ID NO: 23397 - DNA, 25 bp, Saccharomyces pastorianus
aaaggacaatgtgctgaacagtgct

SEQ ID NO: 23398 - DNA, 25 bp, Saccharomyces pastorianus
gtagctgatgatggcggactgaata

SEQ ID NO: 23399 - DNA, 25 bp, Saccharomyces pastorianus
aagaggcaacaagacgacgataaca

SEQ ID NO: 23400 - DNA, 25 bp, Saccharomyces pastorianus
gatatccctatggtttccgatgtga

SEQ ID NO: 23401 - DNA, 25 bp, Saccharomyces pastorianus
agctgagttgggtcttggcgacaat

SEQ ID NO: 23402 - DNA, 25 bp, Saccharomyces pastorianus
actatacgtggttgggatatcccta

SEQ ID NO: 23403 - DNA, 25 bp, Saccharomyces pastorianus
aactttaccattacacgagaaggcg

SEQ ID NO: 23404 - DNA, 25 bp, Saccharomyces pastorianus
gaacagtgctgatgtcttacaaaat

SEQ ID NO: 23405 - DNA, 25 bp, Saccharomyces pastorianus
taacagccgttcgttactctctgga

SEQ ID NO: 23406 - DNA, 25 bp, Saccharomyces pastorianus
gaagtacccaatactagcgccgaat

SEQ ID NO: 23407 - DNA, 25 bp, Saccharomyces pastorianus
gagcaatttctcttctcaagaagta

SEQ ID NO: 23408 - DNA, 25 bp, Saccharomyces pastorianus
gtgtcccaatacctggctatagcat

SEQ ID NO: 23409 - DNA, 25 bp, Saccharomyces pastorianus
cctggctatagcatttcctttctaa

SEQ ID NO: 23410 - DNA, 25 bp, Saccharomyces pastorianus
ggaggctgccttaactttgagcaat

SEQ ID NO: 23411 - DNA, 25 bp, Saccharomyces pastorianus
atgtcacaatcactacgtccatacc

SEQ ID NO: 23412 - DNA, 25 bp, Saccharomyces pastorianus
ttctatatcctaagacgtgtcccaa

SEQ ID NO: 23413 - DNA, 25 bp, Saccharomyces pastorianus
ctgtccgtatgagtttgatggttaa

SEQ ID NO: 23414 - DNA, 25 bp, Saccharomyces pastorianus
attgagcccagtgtgaactctgtcc

SEQ ID NO: 23415 - DNA, 25 bp, Saccharomyces pastorianus
gatcgaacagattttggtccataag

SEQ ID NO: 23416 - DNA, 25 bp, Saccharomyces pastorianus
cgagaagccccaccaaatttgttga

SEQ ID NO: 23417 - DNA, 25 bp, Saccharomyces pastorianus
atttggcagactcattccttcattc

SEQ ID NO: 23418 - DNA, 25 bp, Saccharomyces pastorianus
tacgctcgtctgatccacatcggat

SEQ ID NO: 23419 - DNA, 25 bp, Saccharomyces pastorianus
agctgcagtatacggtacgctcgtc

SEQ ID NO: 23420 - DNA, 25 bp, Saccharomyces pastorianus
ccttcattctttgtcgtggatcgag

SEQ ID NO: 23421 - DNA, 25 bp, Saccharomyces pastorianus
tctcgaacagattctcttctccaat

SEQ ID NO: 23422 - DNA, 25 bp, Saccharomyces pastorianus
gacctcatattggtgtattcctaaa

SEQ ID NO: 23423 - DNA, 25 bp, Saccharomyces pastorianus
acaggatacgagatgcactttctaa

SEQ ID NO: 23424 - DNA, 25 bp, Saccharomyces pastorianus
attgctagtcttttgaattccacag

SEQ ID NO: 23425 - DNA, 25 bp, Saccharomyces pastorianus
gtacaaggaccatgtcttctaggta

SEQ ID NO: 23426 - DNA, 25 bp, Saccharomyces pastorianus
gaattccacagcactctccaaagat

SEQ ID NO: 23427 - DNA, 25 bp, Saccharomyces pastorianus
atggcctgacagcaaatgaatactt

SEQ ID NO: 23428 - DNA, 25 bp, Saccharomyces pastorianus
gcattttccgaaggtttctcgaaag

SEQ ID NO: 23429 - DNA, 25 bp, Saccharomyces pastorianus
attagtggacatgttcggacgggtt

SEQ ID NO: 23430 - DNA, 25 bp, Saccharomyces pastorianus
gaatgctgatactctttccagaaga

SEQ ID NO: 23431 - DNA, 25 bp, Saccharomyces pastorianus
tctcgaaagttttcctctacgaaag

SEQ ID NO: 23432 - DNA, 25 bp, Saccharomyces pastorianus
tgttcttaacattcaccgtacctgg

SEQ ID NO: 23433 - DNA, 25 bp, Saccharomyces pastorianus
attggtctgtgggaaccttatacac

SEQ ID NO: 23434 - DNA, 25 bp, Saccharomyces pastorianus
gtgtgctaactacttgaaactacct

SEQ ID NO: 23435 - DNA, 25 bp, Saccharomyces pastorianus
tgcagtttttaactgggtctcccaa

SEQ ID NO: 23436 - DNA, 25 bp, Saccharomyces pastorianus
gccgaacatggctacacaatggact

SEQ ID NO: 23437 - DNA, 25 bp, Saccharomyces pastorianus
ggtctcccaaacttccaatcggagg

SEQ ID NO: 23438 - DNA, 25 bp, Saccharomyces pastorianus
gaatcatacgctcgttcagactatt

SEQ ID NO: 23439 - DNA, 25 bp, Saccharomyces pastorianus
gaactccaaggctccattaacattc

SEQ ID NO: 23440 - DNA, 25 bp, Saccharomyces pastorianus
acgtggtggtcaaatcccagttgaa

SEQ ID NO: 23441 - DNA, 25 bp, Saccharomyces pastorianus
tcttgggcaggttctaagttgatca

SEQ ID NO: 23442 - DNA, 25 bp, Saccharomyces pastorianus
acattcaccattcctgaaggcatca

SEQ ID NO: 23443 - DNA, 25 bp, Saccharomyces pastorianus
agatgtcccaatgatccattctttg

SEQ ID NO: 23444 - DNA, 25 bp, Saccharomyces pastorianus
gacagcccatatctggtttgtacaa

SEQ ID NO: 23445 - DNA, 25 bp, Saccharomyces pastorianus
aagattaccattgacagcccatatc

SEQ ID NO: 23446 - DNA, 25 bp, Saccharomyces pastorianus
tacagatacgcttgggtcttgcatc

SEQ ID NO: 23447 - DNA, 25 bp, Saccharomyces pastorianus
gggtcttgcatctggacgacgtaag

SEQ ID NO: 23448 - DNA, 25 bp, Saccharomyces pastorianus
gaaggcatcatttactcacgtggtg

SEQ ID NO: 23449 - DNA, 25 bp, Saccharomyces pastorianus
tccgattttcttttgtccttgtcca

SEQ ID NO: 23450 - DNA, 25 bp, Saccharomyces pastorianus
cctttctctttttgcatttttgtcg

SEQ ID NO: 23451 - DNA, 25 bp, Saccharomyces pastorianus
acgtccttaattttgctactcagca

SEQ ID NO: 23452 - DNA, 25 bp, Saccharomyces pastorianus
gtcgtttcatggatttacttgcgtc

SEQ ID NO: 23453 - DNA, 25 bp, Saccharomyces pastorianus
ttacgtcttccacttcactaaaatg

SEQ ID NO: 23454 - DNA, 25 bp, Saccharomyces pastorianus
caaggtcttttatttgggccaagct

SEQ ID NO: 23455 - DNA, 25 bp, Saccharomyces pastorianus
attgatttggtcttcttacgtcttc

SEQ ID NO: 23456 - DNA, 25 bp, Saccharomyces pastorianus
ttggattctgtttttgctcctttct

SEQ ID NO: 23457 - DNA, 25 bp, Saccharomyces pastorianus
ttgggctcaacaagcttgtatcctt

SEQ ID NO: 23458 - DNA, 25 bp, Saccharomyces pastorianus
gcttgtatccttgtgttgcaactgg

SEQ ID NO: 23459 - DNA, 25 bp, Saccharomyces pastorianus
tacaatggacctttccgattttctt

SEQ ID NO: 23460 - DNA, 25 bp, Saccharomyces pastorianus
gccacatttctactcaagtccatta

SEQ ID NO: 23461 - DNA, 25 bp, Saccharomyces pastorianus
tacgaatttacgcacccaaagctgg

SEQ ID NO: 23462 - DNA, 25 bp, Saccharomyces pastorianus
tttcagtcgaccatttagggcacag

SEQ ID NO: 23463 - DNA, 25 bp, Saccharomyces pastorianus
agtatcttgctcaaaacttcccagg

SEQ ID NO: 23464 - DNA, 25 bp, Saccharomyces pastorianus
gtcagttttgccgtttatccagttc

SEQ ID NO: 23465 - DNA, 25 bp, Saccharomyces pastorianus
tagggcacagaggtctcgacatcga

SEQ ID NO: 23466 - DNA, 25 bp, Saccharomyces pastorianus
actaaggaactgaccggccacattt

SEQ ID NO: 23467 - DNA, 25 bp, Saccharomyces pastorianus
tgaactggacttttctttctctgac

SEQ ID NO: 23468 - DNA, 25 bp, Saccharomyces pastorianus
aacggttgcacgatcaattgcgcga

SEQ ID NO: 23469 - DNA, 25 bp, Saccharomyces pastorianus
atggtgacgttagtttccagtccgg

SEQ ID NO: 23470 - DNA, 25 bp, Saccharomyces pastorianus
tacactccgtcattttttcagtcga

SEQ ID NO: 23471 - DNA, 25 bp, Saccharomyces pastorianus
accaactgtttgcttctgatgatga

SEQ ID NO: 23472 - DNA, 25 bp, Saccharomyces pastorianus
aatgcaacagcacagggagagtcct

SEQ ID NO: 23473 - DNA, 25 bp, Saccharomyces pastorianus
acattttaggcaatcccaacggtga

SEQ ID NO: 23474 - DNA, 25 bp, Saccharomyces pastorianus
aaccgctgcaccttatctgaaagaa

SEQ ID NO: 23475 - DNA, 25 bp, Saccharomyces pastorianus
gaacacaggagtttggatcccaacc

SEQ ID NO: 23476 - DNA, 25 bp, Saccharomyces pastorianus
ggctatcggtgatgggaacctgttt

SEQ ID NO: 23477 - DNA, 25 bp, Saccharomyces pastorianus
taaagtgcgcgtttctatatccggg

SEQ ID NO: 23478 - DNA, 25 bp, Saccharomyces pastorianus
gaagtctcttcttctagagcgattt

SEQ ID NO: 23479 - DNA, 25 bp, Saccharomyces pastorianus
tagacatactgaaagcacctgctca

SEQ ID NO: 23480 - DNA, 25 bp, Saccharomyces pastorianus
gaagttgtagactccttggaaacca

SEQ ID NO: 23481 - DNA, 25 bp, Saccharomyces pastorianus
tagagggacgcttacctacaacaac

SEQ ID NO: 23482 - DNA, 25 bp, Saccharomyces pastorianus
gtatacacatttgccgatagtcgat

SEQ ID NO: 23483 - DNA, 25 bp, Saccharomyces pastorianus
atacaagtcttttctgcaggtggtc

SEQ ID NO: 23484 - DNA, 25 bp, Saccharomyces pastorianus
gatggcaggctcagtattgtcgtac

SEQ ID NO: 23485 - DNA, 25 bp, Saccharomyces pastorianus
aactatggaatgcacggctcgccag

SEQ ID NO: 23486 - DNA, 25 bp, Saccharomyces pastorianus
aacgatccattagccgcagattcta

SEQ ID NO: 23487 - DNA, 25 bp, Saccharomyces pastorianus
ttatttttggtgctttcccttcatt

SEQ ID NO: 23488 - DNA, 25 bp, Saccharomyces pastorianus
gaaccgagcgtaagcccttcgatat

SEQ ID NO: 23489 - DNA, 25 bp, Saccharomyces pastorianus
gcaggtggtcgtacacttctattga

SEQ ID NO: 23490 - DNA, 25 bp, Saccharomyces pastorianus
acaacagcattttctaactcttcag

SEQ ID NO: 23491 - DNA, 25 bp, Saccharomyces pastorianus
cattgcattccggttgttctactat

SEQ ID NO: 23492 - DNA, 25 bp, Saccharomyces pastorianus
taacgatatcgagagcgtccctttg

SEQ ID NO: 23493 - DNA, 25 bp, Saccharomyces pastorianus
gtatagccaactcaaatgcgccgaa

SEQ ID NO: 23494 - DNA, 25 bp, Saccharomyces pastorianus
atcgctacatcgctctttagggaag

SEQ ID NO: 23495 - DNA, 25 bp, Saccharomyces pastorianus
acttgatgtggcttcatcgctacat

SEQ ID NO: 23496 - DNA, 25 bp, Saccharomyces pastorianus
gatcgtctatcgttaaagctagtac

SEQ ID NO: 23497 - DNA, 25 bp, Saccharomyces pastorianus
taagggatattatacccatgggtat

SEQ ID NO: 23498 - DNA, 25 bp, Saccharomyces pastorianus
tgttgtatgaacttatcggactcgt

SEQ ID NO: 23499 - DNA, 25 bp, Saccharomyces pastorianus
tcttcagctgcagtacaatcggaaa

SEQ ID NO: 23500 - DNA, 25 bp, Saccharomyces pastorianus
gaactttgaagaaagaccctcgtgt

SEQ ID NO: 23501 - DNA, 25 bp, Saccharomyces pastorianus
accctcgtgtcataagatcgtctat

SEQ ID NO: 23502 - DNA, 25 bp, Saccharomyces pastorianus
gaaggaattatctaccacgattggg

SEQ ID NO: 23503 - DNA, 25 bp, Saccharomyces pastorianus
ttatcggactcgttcgtatagccaa

SEQ ID NO: 23504 - DNA, 25 bp, Saccharomyces pastorianus
tcagctccttacgaagctccaaagg

SEQ ID NO: 23505 - DNA, 25 bp, Saccharomyces pastorianus
gagttcactggtatttcagctcctt

SEQ ID NO: 23506 - DNA, 25 bp, Saccharomyces pastorianus
gagacagagcccgtgatttacataa

SEQ ID NO: 23507 - DNA, 25 bp, Saccharomyces pastorianus
gacggctgtaccgtttggttgaccg
